(19) United States
(12) Patent Application Publication
(10) Pub. No.: US 2024/0327933 A1
(43) Pub. Date: Oct. 3, 2024

(54) CORONAVIRUS RAPID DIAGNOSTICS

(71) Applicants: The Broad Institute, Inc., Cambridge, MA (US); Massachusetts Institute of Technology, Cambridge, MA (US)

(72) Inventors: Feng Zhang, Cambridge, MA (US); Jonathan Gootenberg, Cambridge, MA (US); Omar O. Abudayyeh, Cambridge, MA (US)

(21) Appl. No.: 18/268,156

(22) PCT Filed: Dec. 15, 2021
(86) PCT No.: PCT/US2021/063589

§ 371 Date: Jun. 16, 2023

Related U.S. Application Data
(60) Provisional application No. 63/126,376, filed on Dec. 16, 2020.

(51) Int. Cl. C12Q 1/70; C12Q 1/6806; C12Q 1/6818

(52) U.S. Cl. CPC C12Q 1/701; C12Q 1/6818; C12Q 1/6806

(57) ABSTRACT

Systems and methods for rapid diagnostics related to the use of combinations of CRISPR effector systems with optimized guide sequences, OSD probes, RNA probes and/or RNase H for detection of nucleic acid sequences, such as sequences from coronavirus, as well as multiplex lateral flow diagnostic devices and methods of use, are provided.

[0001] The contents of the electronic sequence listing (“BROD-5775US_ST25.txt”; Size is 13,423,112 bytes and it was created on Jan. 18, 2024) is herein incorporated by reference in its entirety.

### TECHNICAL FIELD

[0002] The subject matter disclosed herein is generally directed to rapid single-reaction coronavirus diagnostics including the use of combinations of (1) nucleic acid amplification; (2) CRISPR effector systems and thermostable CRISPR Cas proteins; (3) oligonucleotide strand displacement (OSD); and/or fluorescently labeled RNA probes with RNase to release fluorescence.

### BACKGROUND

[0003] Nucleic acids are a universal signature of biological information. The ability to rapidly detect nucleic acids with high sensitivity and single-base specificity on a portable platform has the potential to revolutionize diagnosis and monitoring for many diseases, provide valuable epidemiological information, and serve as a generalizable scientific tool. Although many methods have been developed for detecting nucleic acids (Du et al., 2017; Green et al., 2014; Kumar et al., 2014; Pardee et al., 2014; Pardee et al., 2016; Urdea et al., 2006), they inevitably suffer from trade-offs among sensitivity, specificity, simplicity, and speed.

[0004] Sensitive and rapid detection of nucleic acids is important for clinical diagnostics and biotechnological applications. Particularly when responding to outbreaks, such as the novel coronavirus, which has been referred to as 2019-nCoV and SARS-CoV-2, which causes COVID 2019, time is of the essence. Sabeti, Early Detection Is Key to Combating the Spread of Coronavirus, Time (Feb. 6, 2020). The 2019-nCoV has killed over a million people, including well over 200,000 people in the U.S. alone, and response to the escalating outbreak, particularly where there are indications that both symptomatic and asymptomatic patients with 2019-nCov may transmit the disease. Wang, et al., A precision medicine approach to managing Wuhan Coronavirus pneumonia, Prec. Clin. Med, doi:10.1093/pcmedi/pbaa002. Early coronavirus testing kits sent to states and other countries did not work properly, according to the U.S. Centers for Disease Control and Prevention. Grady, “Coronavirus Test Kits Sent to States, 30 Countries Are Flawed, C. D. C. Says,” New York Times, Feb. 12, 2020. Moreover, early tests provide results in four hours from initial sample processing to results. cdc.gov/media/releases/2020/p0206-coronavirus-diagnostic-test-kits. Highly accurate test results at better processing speds, particularly that are field-depoloyable would aid in addressing the outbreak. Currently, the novel coronavirus SARS-CoV-2 has resulted in an international public health emergency, spreading to over 180 countries and infecting millions of individuals. Testing for the presence of the virus is of utmost importance to both reduce the basic reproductive rate of the virus (R0) and inform best clinical practices for affected patients. However, understanding the full extent of the virus outbreak has remained challenging due to bottlenecks in the diagnosis of infection, spurred by requirements for low-supply reagents and kits, complex instrumentation, and difficult logistics with central lab facilities. A platform that is simpler with common reagents and can be done in any setting would solve many of the world's testing issues.

[0005] Previously, Applicants developed a platform for nucleic acid detection using CRISPR enzymes called SHERLOCK (Specific High Sensitivity Enzymatic Reporter unLOCKing)(Gootenberg, 2018; Gootenberg, 2017), which combines pre-amplification with the RNA-guided RNase CRISPR-Cas13(Abudayyeh, 2016; East-Seletsky, 2016; Shmakov, 2015; Smargon, 201; Shmakov, 2017) and DNase CRISPR-Cas12(Zetsche, 2015 599; Chen, 2018) for sensing of nucleic acids via fluorescence or portable lateral flow. In addition, Applicants have also developed a platform termed “STOPCovid”. (N. Engl J Med 2020; 383:1492-1494).

[0006] These and related technologies have been described in the following applications, which are hereby incorporated by reference in their entireties: U.S. Provisional Application Ser. No. 62/818,702, filed Mar. 14, 2019, 62/890,555, filed Aug. 22, 2019, 62/970,125, filed Feb. 12, 2020, 62/993,494, filed Mar. 23, 2020, 63/018,487, filed Apr. 30, 2020, 63/019,406, filed May 3, 2020, 63/032,470, filed May 29, 2020, PCT/US2020/022795, filed Mar. 13, 2020, U.S. application Ser. Nos. 16/894,664, 16/894,678, and 16/894,670, all filed Jun. 5, 2020.

### SUMMARY

[0007] In certain example embodiments, compositions for detecting the presence of a target polynucleotide in a sample, comprising isothermal amplification reagents for amplifying the target polynucleotide, and an extraction-free solution for isolating polynucleotides from a cell or virus particle. In one embodiment, the amplification is isothermal. The isothermal amplification reagents may comprise loop-mediated isothermal amplification (LAMP) reagents comprising F3, B3, FIP, BIP, Loop Forward and Loop Reverse primers. In an aspect, the LAMP reagents may further comprise “oligonucleotide strand displacement” or “one step toehold displacement” (OSD) probes. LAMP amplification is described in U.S. Pat. No. 7,175,985, which is incorporated herein by reference in its entirety, as well as in numerous publications (Notomi et al., Nucleic Acids Research 2000, 28; Nagamine et al., Biochemical and Biophysical Research Communications 2002, 290, (4), 1195-1198; Tomita et al., Nature Protocols 2008, 3, (5), 877-882; Nagamine et al., Molecular and Cellular Probes 2002, 16, (3), 223-229; Mair et al., Bmc Veterinary Research 2013, 9; Tanner et al., Biotechniques 2012, 53, (2), 81-Suwancharoen et al., Journal of Veterinary Medical Science 2016, 78, (8), 1299-1302; Wang et al., Molecules 2016, 21. (1); Abdulmawjood et al., Molecular and Cellular Probes 2016, 30, (4), 205-210; Song 2016 Analytical Chemistry 2016, 88, (14), 7289-7294; Kong Scientific Reports 2016, 6 and Zhang et al., Scientific Reports 2016, 6) all of which are incorporated herein by reference in their entireties.

[0008] In one embodiment, the system includes a CRISPR-Cas system that generates R-loops on a target nucleic acid. Such a system for the detection of coronavirus is provided. A system for detecting the presence of a coronavirus in a sample, comprising: a Cas protein; at least one guide polynucleotides comprising a guide sequence capable of binding a coronoavirus target sequence and designed to form a complex with the Cas protein; and a detection construct comprising a polynucleotide component. The detection agent may be an OSD probe, which upon binding a single stranded region in a target nucleic acid (generated, e.g., using the LAMP and/or the aforementioned CRISPR-Cas system). In some embodiments, more than one guide polynucleotide may be used to increase signal and sensitivity. In another embodiment, the detection agent may be a labeled RNA probe, which, upon binding the single stranded region, can be digested with RNase to release a detectable label. In embodiments, this label is a fluorophore. In embodiments, the coronavirus is 2019-nCov. In an aspect, the at least one guide polynucleotide is a highly active guide polynucleotide. The guide polynucleotide of the system can, an an embodiment, bind to a coronavirus sequence encoding a polypeptide that is immunostimulatory to a host immune system, and/or binds to at least one target sequence that is a unique coronavirus genomic sequence.

[0009] The systems and methods may utilize one or more Cas proteins. In embodiments, the Cas proteins are a Type V or Type VI Cas protein, and may be Cas 12 proteins, Cas13 proteins, or a combination thereof. In an aspect, the one or more Cas proteins comprise a Cas13, which may be a thermostable Cas13 or Leplotrichia wadei Cas13. In an aspect, the one or more Cas proteins comprise a Cas12, which may be a thermostable Cas12b or Alicyclobacillhtys acidiphilus Cas12b. The systems may further comprise amplification reagents for amplification of the coronavirus target sequence. In an aspect the amplification reagents are reagents for LAMP, polymerase chain reaction (PCR), nucleic acid sequence-based amplification (NASBA), strand displacement amplification (SDA), helicase-dependent amplification (HAD), nicking enzyme amplification reaction (NEAR), transcription mediated amplification (TMA), recombinase polymerase amplification (RPA) or rolling circle amplification (RCA).

[0010] A lateral flow device comprising a substrate comprising a first end and a second end, are also provided, the first end comprising a sample loading portion, a first region comprising a detectable ligand, two or more systems of the claims provided herein, and one or more first capture regions, each comprising a first binding agent; the substrate comprising two or more second capture regions between the first region of the first end and the second end, each second capture region comprising a different binding agent. In an aspect, the first end comprises two detection constructs, wherein each of the two detection constructs comprises an RNA or DNA oligonucleotide, comprising a first molecule on a first end and a second molecule on a second end. In an aspect, the first end comprises three detection constructs, wherein each of the three detection constructs comprises an RNA or DNA oligonucleotide, comprising a first molecule on a first end and a second molecule on a second end. The lateral flow device may comprise a polynucleotide encoding a Cas13 and/or Cas12 and the one or more guide RNAs are provided as a multiplexing polynucleotide, the multiplexing polynucleotide configured to comprise two or more guide sequences. The lateral flow device may also comprise of OSD probes designed to separate binding agents upon detection of sequences.

[0011] Methods for detecting a target nucleic acid in a sample are also provided, comprising contacting a sample with the first end of the lateral flow device comprising the sample loading portion, wherein the sample flows from the sample loading portion of the substrate towards the first and second capture regions and generates a detectable signal. Methods may utilize a lateral flow device capable of detecting two different target nucleic acid sequences. In an aspect, the target nucleic acid sequences are absent from the sample, a detectable signal is generated at each capture region, the detectable signal appears at the first and second capture regions. The lateral flow device can be designed such that when the target nucleic acid sequences are present in the sample, a detectable signal is generated at each capture region, and wherein when the sample contains one or more target nucleic acid sequences, a detectable signal is present at the capture region for the corresponding target nucleic acid sequence.

[0012] Methods for detection may also comprise detecting coronavirus in a sample by contacting the sample with the systems disclosed herein. The step of contacting the sample with the system can comprise amplifying the one or more target sequences in the sample and incubating the sample under conditions sufficient to allow binding of a labeled, but quenched probe to one or more target molecules. In the case of a double-stranded OSD probe, a labeled strand will bind to the target sequences and the complementary strand containing the quencher will diffuse away, allowing for a fluorescent signal to be detected (FIG. 2). The single stranded region of the amplified target sequence exists either as a portion of the amplified target sequence (e.g., as in the case of a LAMP-amplified target sequence), or can be generated by incubating with a CRISPR-Cas system, which can generate a single-stranded R-loop in the target sequence. Alternatively, in the case of a single stranded RNA probe with both a fluorophore and quencher attached, the RNA probe will bind the single-stranded target sequences (LAMP loops or Cas-generated), and in the presence of RNaseH, the RNA strand of the resulting RNA-DNA duplex is digested, thus releasing detectable fluorescence (FIG. 3). In another embodiment, one strand of an unlabeled OSD probe binds to the target sequence, and a short RNA probe containing both a fluorophore and a quencher binds to the liberated strand of the OSD probe, and RNase acts to release the quencher from the RNA strand, resulting in detectable fluorescence (FIG. 4). In another embodiment, one strand of a double-stranded RNA probe containing a fluorophore and a quencher on the same strand binds to the target sequences, and RNase degrades the RNA strand of the RNA-DNA hybrid, thus releasing the quencher and resulting in detectable fluorescence (FIG. 5). In yet another embodiment, an OSD probe containing a fluorophore on one strand binds to a target sequence, thus releasing the complementary strand containing the quencher, thus resulting in detectable fluorescence (FIG. 6). The addition of RNase H to OSD is advantageous because the OSD probes can re-bind when separated thus limiting the overall signal generated. RNase H, however, will cleave the fluorophore from quencher driving the reaction to complete liberation of fluorophore, generating more signal amplification in the reaction.

[0013] The step of contacting the sample with the system can further comprise incubating the sample at about 55° C. to about 65° C., about 59° C. to 61° C. or about 60° C. for 50 to 70 minutes and detecting the presence of a positive signal. The steps of extracting, amplifying incubating, activating and detecting are all performed in the same individual discrete volume.

[0014] Methods of detection can further comprise the step of treating the sample with a DNA extraction solution prior to contacting the sample with the systems disclosed herein.

[0015] In an aspect, the DNA extraction solution is mixed with a sample at a concentration of about 1:2 to 2:1 sample:extraction solution. In an aspect, the method may further comprise incubating the sample and the DNA extraction solution, which may be performed at a temperature of about 20° C. to 60° C. for about 60 minutes, or 95° C. for about 5 to 10 minutes. Extraction may also comprise the addition of beads capable of concentrating targets of interest of the sample. In an aspect, the beads are magnetic.

[0016] A cartridge for detection assays in accordance with methods disclosed herein is provided comprising a sample receiver, at least a first, second, and third ampoule, and at least a first and second chamber, and a lateral flow strip, wherein the first ampoule is communicatively coupled to the first chamber comprising a heat source, the first chamber is communicatively coupled to the second ampoule, the second ampoule communicatively coupled to the second chamber, the third ampoule communicatively coupled to the lateral flow strip.

[0017] A cartridge can be provided comprising at least a first and second ampoule, a lysis chamber, an amplification chamber and a sample receiving chamber, the first ampoule fluidically connected to the sample receiving chamber, the sample receiving chamber further connected to the lysis chamber, the lysis chamber connected via a metering channel to the second ampoule and the amplification chamber.

[0018] The cartridge may be configured to fit in a system comprising a heating means, an optic means, a means for releasing reagents on the cartridge, and a means for readout of assay result. The cartridge can comprise a first ampoule that comprises lysis buffer, and/or the second ampoule that comprises a CRISPR system, the CRISPR-Cas system comprising one or more Cas proteins and at least one guide polynucleotide. Alternatively, the cartridge may be as described in U.S. application Ser. No. 16/894,670, which is incorporated herein by reference in its entirety.

[0019] The cartridge may further comprise amplification reagents. The amplification reagents comprise LAMP F3, B3, F1P, BIP, Loop Forward and Loop Reverse primers.

[0020] The cartridge can comprise a CRISPR system that includes a guide RNA designed to bind to a target nucleic acid that are diagnostic for a disease state. Alternatively, the cartridge can comprise OSD and/or RNA probes, one of which is detectably labeled as discussed above. The disease state can be an infection, which may be caused by a microbe, the microbe selected from a virus, bacterium, a fungus, a protozoa, or a parasite. The guide RNA may be specific for a microbe that is viral, bacterial, or fungal.

[0021] The cartridge can further comprise a detection construct comprising a polynucleotide component, which may be fluorescent. In an aspect, the cartridge comprises reagents that are lyophilized. In an aspect, the Cas protein of the CRISPR system is a Type V or Type VI Cas protein. In an aspect, the Cas protein is a Cas12 or Cas13 protein. The cartridge can comprise a thermostable protein, for example, the thermostable Cas protein is Alicyclobacillus acidiphilus Cas12b (Aap). In an aspect, the guide comprises a sequence derived from Alicyclobacillus acidoterrestris (Aac). The cartridge can comprise a lysis buffer that comprises a DNA extraction buffer.

[0022] A system designed to receive the detection cartridge as disclosed herein is provided, the system designed to receive the cartridge and conduct an assay comprising isothermal amplification of nucleic acids and detection of target nucleic acids on the cartridge. In one embodiment, the amplification may be isothermal. In embodiments, the system can comprise one or more heating means for extraction, amplification and/or detection, a means for releasing reagents for extraction, amplification, and/or detection, a means for mixing reagents for extraction, amplification, and/or detection, and/or a means for reading the results of the assay. In an aspect, the means of reading the results of the assay is an optic means. The system can further comprise a user interface for programming the device and/or readout of the results of the assay.

[0023] These and other aspects, objects, features, and advantages of the example embodiments will become apparent to those having ordinary skill in the art upon consideration of the following detailed description of illustrated example embodiments.

### BRIEF DESCRIPTION OF THE DRAWINGS

[0024] An understanding of the features and advantages of the present invention will be obtained by reference to the following detailed description that sets forth illustrative embodiments, in which the principles of the invention may be utilized, and the accompanying drawings.

[0025] FIG. 1. Cas9 or Cas12 generates exposed ssDNA region via an R-loop. Cas9 and Cas12 can generate ssDNA via R-loop formation. Cas9 blocks about 9 nucleotides of the ssDNA region nearest to the PAM, leaving about 11 nucleotides exposed. This exposed region can be used for generating ssDNA that can trigger one-step strand displacement (OSD) probes and release fluorescence and bind to ssRNA probes with a fluorophore and quencher that can be consequently cleaved by RNase H, release fluorescence Image from: https://www.frontiersin.org (/articles/10.3389/fmich.2018.00257/full

[0026] FIG. 2. OSD probes triggered by R-loops. With normal probes, the OSD probe binds the loop-mediated isothermal amplification (LAMP) amplicon loop, causing stand displacement and unquenching of fluorescence. With CRISPR OSD, the OSD probe binds the R-loop formed in the LAMP amplicon, causing strand displacement and unquenching fluorescence. CRISPR OSD therefore gives more flexibility in targeting and more signal than the normal OSD approach because the CRISPR-Cas9 complex can generate many ssDNA regions in the LAMP amplicon using multiple guide RNAs.

[0027] FIG. 3. R-loop triggering RNase H-based release of fluorescence. An RNA probe of 5-10 nucleotides with a fluorophore at one end and a quencher at the other end binds to the ssDNA region in the R-loop, and RNase H cleaves the RNA strand of the RNA-DNA duplex, which releases the fluorescence. RNase HII will be active in the hot temperature range of LAMP (55° C.-65° C.). CRISPR RNase H probes will have multiple turnover for a given R-loop, yielding multiple fluorescent events, which yields better signal to noise compared to the OSD approach.

[0028] FIG. 4. Combination of OSD and RNase H: Approach 1. A double-stranded OSD probe without a fluorophore or quencher is added to the LAMP amplicon, and one strand of the OSD probe binds to the LAMP amplicon loop, thus liberating the other strand of the OSD probe. That liberated OSD ss probe can now bind to an RNA probe of 5-10 nucleotides that has a fluorophore on one end and a quencher on the other end. RNase H can then cleave the RNA strand of the RNA-DNA duplex, thus releasing fluorescence. The combination of OSD and RNase H boosts the overall signal due to multiple turnover of RNase H, and also has increased specificity.

[0029] FIG. 5. Combination of OSD and RNase H: Approach 2. A double stranded RNA OSD probe with a fluorophore at one end of one strand and a quencher at the other end of the same strand is incubated with the LAMP amplicon. The labeled strand binds to the LAMP amplicon loop, and the RNA strand of the RNA-DNA duplex is cleaved with RNase H, releasing fluorescence. The combination of OSD and RNase H boosts the overall signal due to multiple turnover of RNase H and also has increased specificity.

[0030] FIG. 6. Combination of OSD and RNase H: Approach 3. A double stranded RNA OSD probe with a fluorophore at one end of one strand and a quencher at the end of the other strand is incubated with the LAMP amplicon. One strand binds to the LAMP amplicon, releasing the quenching of the fluorescence. The RNA strand of the RNA-DNA duplex in the LAMP amplicon loop is cleaved with RNase H, allowing for multiple turnover of the OSD probe and increased fluorescence. The combination of OSD and RNase H boosts the overall signal due to multiple turnover of RNase H and also has increased specificity.

[0031] FIG. 7. LAMP OSD preliminary limit of detection (LOD) with extraction beads. Detection of either pure RNA or mock viral particles (“SeraCare”) using a combination of LAMP and OSD at various input concentrations. All samples were pre-concentrated using a bead-based extraction method.

[0032] FIG. 8. LAMP OSD reaction and readout on alpha device without extraction bead workflow. Amplification and detection of RNA on device, with fluorescence labeled as arbitrary units (AU). FAM fluorescent channel refers to OSD detection; Syto64 refers to inline control detection of LAMP amplification.

[0033] FIG. 9. LAMP OSD reaction and readout on alpha device with extraction bead workflow Amplification and detection of RNA on device, with fluorescence labeled as arbitrary units (AU). FAM fluorescent channel refers to OSD detection; Syto64 refers to inline control detection of LAMP amplification.

[0034] FIG. 10. LAMP OSD reaction optimization for different buffer combinations. Relative fluorescence in LAMP OSD for reactions containing 6 mM additional MgSO4 and either KCl or GuHCl additives. GuHCl additives increase the speed of the LAMP OSD reaction.

[0035] FIG. 11. RNase H-based detection of oligonucleotides in LAMP reaction conditions shows that amplification can be achieved with small amounts of RNase H in the LAMP reaction

[0036] FIG. 12. RNase H-based detection of oligonucleotides in LAMP reactions. Shows that RNase H cleavage can also be achieved in the same range of RNase H amounts within the LAMP reaction. Certain RNase H enzymes work better than others.

### SUMMARY OF THE INVENTION

[0037] The following brief summary is not intended to include all features and aspects of the present invention, nor does it imply that the invention must include all features and aspects discussed in this summary.

[0038] The present invention provides the following:

[0039] 1. A method of detecting a target nucleic acid in a sample comprising:
[0040] (a) distributing a sample or set of samples into one or more individual discrete volumes each individual discrete volume comprising isothermal amplification reagents for amplifying the target polynucleotide, and a solution for rapidly isolating polynucleotides from a cell or vims particle;
[0041] (b) incubating the sample or set of samples at conditions sufficient to allow extraction of target polynucleotides from the sample,
[0042] (c) generating amplicons of target polynucleotides, wherein isolation of polynucleotides is not required between the extraction or amplification step;
[0043] (d) further incubating the sample with a probe that binds one or more single stranded regions of said amplicons, wherein said probe is:
   [0044] (1) a double stranded DNA probe with a fluorophore on one strand and a quencher on the other strand;
   [0045] (2) a single stranded RNA probe with a fluorophore on one end of the strand and a quencher on the other end of the strand;
   [0046] (3) a combination of an unlabeled double stranded DNA probe and a single stranded RNA probe with a fluorophore on one end of the strand and a quencher on the other end of the strand;
   [0047] (4) a double stranded RNA probe with a fluorophore on one end of one strand and a quencher on the other end of the same strand; or
   [0048] (5) a double stranded RNA probe with a fluorophore on one end of one strand and a quencher on the other end of the other strand;
[0049] (c) adding an enzyme capable of cleaving RNA in an RNA:DNA duplex to increase fluorescence to be detected; and
[0050] (f) detecting the one or more amplicons, thereby indicating the presence of one or more target polynucleotides in the sample.

[0051] 2. The method of item 1, wherein the enzyme capable of cleaving RNA is RNaseH.

[0052] 3. The method of item 1, wherein the fluorescence detected is greater than fluorescence detected by unwinding of the RNA:DNA duplex alone.

[0053] 4. The method of item 1, which does not include a washing step.

[0054] 5. The method of item 1, wherein the solution for isolating polynucleotides is protease-based, detergent-based, or chaotrope-based.

[0055] 6. The method of item 1, wherein the solution contains proteinase K.

[0056] 7. The method of item 6, wherein reaction buffer contains a proteinase K inhibitor.

[0057] 8. The method of item 1, wherein the solution for isolating polynucleotides is Lucigen Quick Extract Plant DNA Extraction Solution.

[0058] 9. The method of item 1, wherein the amplicons are generated using loop-mediated isothermal amplification (LAMP), polymerase chain reaction (PCR), nucleic acid sequence-based amplification (NASBA), strand displacement amplification (SDA), helicase-dependent amplification (HAD), nicking enzyme amplification reaction (NEAR), transcription mediated amplification (TMA), recombinase polymerase amplification (RPA) or rolling circle amplification (RCA).

[0059] 10. The method of item 1, wherein the isothermal incubation temperature is between 55° C. and 75° C.

[0060] 11. The method of item 1, wherein the single stranded region is a LAMP amplicon loop.

[0061] 12. The method of item 1, wherein the single stranded region is an R-loop generated when a guide polynucleotide binds to one strand of the amplicon.

[0062] 13. The method of item 12, wherein a Cas molecule or an argonaute protein enables the guide polynucleotide to bind to strand of the amplicon.

[0063] 14. The method of item 13, wherein the Cas molecule is Cas9, Cas12 or Cas14.

[0064] 15. The method of item 14, wherein the Cas molecule is Cas12(b).

[0065] 16. The method of item 1, wherein the enzyme is a nuclease or nickase.

[0066] 17. The method of item 1, wherein the probe is a double stranded DNA probe with a fluorophore on one strand and a quencher on the other strand.

[0067] 18. The method of item 1, wherein the probe is a single stranded RNA probe with a fluorophore on one end of the strand and a quencher on the other end of the strand.

[0068] 19. The method of item 1, wherein the probe is a single stranded RNA probe with a fluorophore on one end of the strand and a quencher on the other end of the strand.

[0069] 20. The method of item 1, wherein the probe is a combination of an unlabeled double stranded DNA probe and a single stranded RNA probe with a fluorophore on one end of the strand and a quencher on the other end of the strand.

[0070] 21. The method of item 1, wherein the probe is a double stranded RNA probe with a fluorophore on one end of one strand and a quencher on the other end of the same strand; or

[0071] 22. The method of item 1, where the probe is a double stranded RNA probe with a fluorophore on one end of one strand and a quencher on the other end of the other strand.

[0072] 23. The method of item 1, wherein the target nucleic acid is from a virus, bacterium, protozoa, fungus, or other pathogenic organism.

[0073] 24. The method of item 23, wherein the target nucleic acid is from human papillomavirus, hepatitis, adenovirus, Candidia, coronavirus, herpesvirus, human immunodeficiency virus, influenza virus, Plasmodium, rhinovirus, Neisseria gonorrhoeae, Respiratory syncytial virus, coronavirus, or Streptococcus pyogenes.

[0074] 25. The method of item 25, wherein the coronavirus SARS-CoV2.

[0075] 26. The method of item 1, wherein an extraction-free solution is mixed with a sample at a concentration of about 1:2 to 2:1 sample:extraction solution.

[0076] 27. The method of item 26, wherein the sample is from a nasal swab or saliva.

[0077] 28. The method of item 1, wherein the incubating step is performed at a temperature of about 20° C. to 60° C. for about 30 minutes.

[0078] 29. The method of item 1, wherein the amplifying and detecting steps are performed at about 55° C. to about 65° C., about 59° C. to 61° C. or about 60° C. for 50 to 70 minutes.

[0079] 30. The method of item 1, wherein the target polynucleotide is detected in one hour or less.

[0080] 31. The method of item 1, wherein the steps of incubating and detecting are all performed in the same individual discrete volume.

[0081] 32. A composition for detecting the presence of a target polynucleotide in a sample, comprising reagents for amplifying the target polynucleotide, an extraction-free solution for isolating polynucleotides from a cell or virus particle, and one or more of the following probes:
[0082] (a) a double stranded DNA probe with a fluorophore on one strand and a quencher on the other strand;
[0083] (b) a single stranded RNA probe with a fluorophore on one end of the strand and a quencher on the other end of the strand;
[0084] (c) a combination of an unlabeled double stranded DNA probe and a single stranded RNA probe with a fluorophore on one end of the strand and a quencher on the other end of the strand;
[0085] (d) a double stranded RNA probe with a fluorophore on one end of one strand and a quencher on the other end of the same strand; or
[0086] (e) a double stranded RNA probe with a fluorophore on one end of one strand and a quencher on the other end of the other strand.

[0087] 33. The composition of item 32, wherein the amplification reagents are LAMP reagents comprising F3, B3, FIP, BIP, Loop Forward and Loop Reverse primers.

[0088] 34. The compositions of item 32, wherein the probes are selected from Table 9.

[0089] 35. The composition of item 32, wherein the probes are provided at a concentration of 50 nM to 175 nM, preferably 75 nM to 150 nM.

[0090] 36. The composition of item 33, wherein LAMP primers are selected from Table 1A, Table 1B, Table 5 or Table 8.

[0091] 37. The composition of item 33, wherein the F3 primer is selected from Table 5 or Table 8.

[0092] 38. The composition of item 32, wherein the composition is lyophilized.

[0093] 39. The composition of item 38, wherein the composition is lyophilized as a complete formulation.

[0094] 40. The composition of item 39, wherein the composition is lyophilized as an incomplete formulation and additional components are added later in resuspension buffer.

[0095] 41. The composition of item 40, comprising one of more of lactose, trehalose, sorbitol, glucose, raffinose, glycine or histidine.

[0096] 42. The composition of item 32, further comprising one or more additives, wherein the additive is guanidinium chloride (GuHCl), L-proline, L-histidine, b-alanine, L-serine, urea, acetamide, 4-aminobutyric acid, polyethylene glycol, polypropylene glycol, polyvinylpyrrolidone K, 6-O-a-D-maltosyl-b-cyclodextrin, (2-hydroxypropyl)-b-cyclodextrin, a-cyclodextrin, b-cyclodextrin, methyl-b-cyclodextrin, glycine, proline, taurine, or a combination thereof.

[0097] 43. The composition of item 32, further comprising polynucleotide binding beads for the capture of nucleic acids in a sample.

[0098] 44. The composition of item 43, wherein the beads are carboxylated.

[0099] 45. The composition of item 43, wherein there is polyethylene glycol in binding solution.

[0100] 46. The composition of item 44, wherein there is silica in binding solution.

[0101] 47. The composition of item 32, further comprising one or more Cas proteins and at least one guide polynucleotide designed to form a complex with the one or more Cas proteins.

[0102] 48. The composition of item 47, wherein the one or more Cas proteins is a Type II Cas, Type V Cas, Type VI Cas, or a combination thereof.

[0103] 49. The composition of item 47, wherein the one or more Cas proteins is thermostable exhibiting nuclease activity at temperature of at least 50° C.

[0104] 50. The composition of item 47, wherein the Cas is a Cas12b.

[0105] 51. The composition of item 50, wherein the Cas12b is selected from Table 2A or Table 2B.

[0106] 52. The composition of item 49, wherein the thermostable Cas protein is Brevibaciluis sp. SYSU G02855 (Br) Cas12b or Alicyclobacillus acidiphilus (Aap) Cas 12b.

[0107] 53. The composition of item 52, wherein the Cas protein is Aap Cas12b and the guide is derived from Alicyclobacilus acidolerrestris.

[0108] 54. The composition of item 47, wherein the guide polynucleotide comprises a sequence selected from Aac guide types 1 to 5 (SEQ ID NOs: XX-XX).

[0109] 55. The composition of item 47, wherein the Cas12b is BrCas12b and the guide sequence comprises a crRNA design 1 to 3 (SEQ ID NO:XX-XX).

[0110] 56. The composition of item 47, wherein the guide polynucleotide comprises a spacer specific for the genome of SARS-CoV-2.

[0111] 57. The composition of item 56, wherein the guide polynucleotide comprises a spacer specific for the N gene or S gene of SARS-CoV-2.

[0112] 58. The composition of item 32, further comprising one or more additives to increase reaction specificity or kinetics.

[0113] 59. The composition of item 32, further comprising a polynucleotide binding beads.

[0114] 60. The method of item 1, wherein the sample is subjected to in-sample multiplexing using intercalating dyes.

[0115] The foregoing and other objects, features and advantages of the invention will be apparent from the following more particular description of preferred embodiments of the invention, as illustrated in the accompanying drawings in which like reference characters refer to the same parts throughout the different views. The drawings are not necessarily to scale, emphasis instead being placed upon illustrating the principles of the invention.

### DETAILED DESCRIPTION OF THE EXAMPLE EMBODIMENTS

### General Definitions

[0116] Unless defined otherwise, technical and scientific terms used herein have the same meaning as commonly understood by one of ordinary skill in the art to which this disclosure pertains. Definitions of common terms and techniques in molecular biology may be found in Molecular Cloning: A Laboratory Manual, 2^{nd} edition (1989) (Sambrook, Fritsch, and Maniatis); Molecular Cloning: A Laboratory Manual, 4^{th} edition (2012) (Green and Sambrook); Current Protocols in Molecular Biology (1987) (F. M. Ausubel et al. eds.); the series Methods in Enzymology (Academic Press, Inc.): PCR 2: A Practical Approach (1995) (M. J. MacPherson, B. D. Hames, and G. R. Taylor eds.): Antibodies, A Laboratory Manual (1988) (Harlow and Lane, eds.): Antibodies A Laboraotry Manual, 2^{nd} edition 2013 (E. A. Greenfield ed.); Animal Cell Culture (1987) (R. I. Freshney, ed.); Benjamin Lewin, Genes IX, published by Jones and Bartlet, 2008 (ISBN 0763752223); Kendrew et al. (eds.), The Encyclopedia of Molecular Biology, published by Blackwell Science Ltd., 1994 (ISBN 0632021829); Robert A. Meyers (ed.), Molecular Biology and Biotechnology: a Comprehensive Desk Reference, published by VCH Publishers, Inc., 1995 (ISBN 9780471185710); Singleton et al., Dictionary of Microbiology and Molecular Biology 2nd ed., J. Wiley & Sons (New York, N.Y. 1994), March, Advanced Organic Chemistry Reactions, Mechanisms and Structure 4th ed., John Wiley & Sons (New York, N.Y. 1992); and Marten H. Hofker and Jan van Deursen, Transgenic Mouse Methods and Protocols, 2^{nd} edition (2011).

[0117] As used herein, the singular forms “a”, “an”, and “the” include both singular and plural referents unless the context clearly dictates otherwise.

[0118] The term “optional” or “optionally” means that the subsequent described event, circumstance or substituent may or may not occur, and that the description includes instances where the event or circumstance occurs and instances where it does not.

[0119] The recitation of numerical ranges by endpoints includes all numbers and fractions subsumed within the respective ranges, as well as the recited endpoints.

[0120] The terms “about” or “approximately” as used herein when referring to a measurable value such as a parameter, an amount, a temporal duration, and the like, are meant to encompass variations of and from the specified value, such as variations of +/−10% or less, +/−5% or less, +/−1% or less, and +/−0.1% or less of and from the specified value, insofar such variations are appropriate to perform in the disclosed invention. It is to be understood that the value to which the modifier “about” or “approximately” refers is itself also specifically, and preferably, disclosed.

[0121] As used herein, a “biological sample” may contain whole cells and/or live cells and/or cell debris. The biological sample may contain (or be derived from) a “bodily fluid”. The present invention encompasses embodiments wherein the bodily fluid is selected from amniotic fluid, aqueous humour, vitreous humour, bile, blood serum, breast milk, cerebrospinal fluid, cerumen (earwax), chyle, chyme, endolymph, perilymph, exudates, feces, female ejaculate, gastric acid, gastric juice, lymph, mucus (including nasal drainage and phlegm), pericardial fluid, peritoneal fluid, pleural fluid, pus, rheum, saliva, sebum (skin oil), semen, sputum, synovial fluid, sweat, tears, urine, vaginal secretion, vomit and mixtures of one or more thereof. Biological samples include cell cultures, bodily fluids, cell cultures from bodily fluids. Bodily fluids may be obtained from a mammal organism, for example by puncture, or other collecting or sampling procedures.

[0122] The terms “subject,” “individual,” and “patient” are used interchangeably herein to refer to a vertebrate, preferably a mammal, more preferably a human. Mammals include, but are not limited to, murines, simians, humans, farm animals, sport animals, and pets. Tissues, cells and their progeny of a biological entity obtained in vivo or cultured in vitro are also encompassed.

[0123] Various embodiments are described hereinafter. It should be noted that the specific embodiments are not intended as an exhaustive description or as a limitation to the broader aspects discussed herein. One aspect described in conjunction with a particular embodiment is notnecessarily limited to that embodiment and can be practiced with any other embodiment(s). Reference throughout this specification to “one embodiment”, “an embodiment,” “an example embodiment,” means that a particular feature, structure or characteristic described in connection with the embodiment is included in at least one embodiment of the present invention. Thus, appearances of the phrases “in one embodiment,” “in an embodiment,” or “an example embodiment” in various places throughout this specification are not necessarily all referring to the same embodiment, but may. Furthermore, the particular features, structures or characteristics may be combined in any suitable manner, as would be apparent to a person skilled in the art from this disclosure, in one or more embodiments. Furthermore, while some embodiments described herein include some but not other features included in other embodiments, combinations of features of different embodiments are meant to be within the scope of the invention. For example, in the appended claims, any of the claimed embodiments can be used in any combination.

[0124] All publications, published patent documents, and patent applications cited herein are hereby incorporated by reference to the same extent as though each individual publication, published patent document, or patent application was specifically and individually indicated as being incorporated by reference.

### Overview

[0125] Embodiments herein are directed to systems and methods of detecting the presence of a target nucleic acid in a sample. In certain example embodiments, the systems and methods provide for single reaction (one-pot) detection of target nucleic acids. In certain example embodiments, extraction, amplification, and detection may take place under a single set of reaction buffer and reagent conditions. In certain example embodiments, detection is achieved using isothermal amplification (e.g. LAMP) only. In other example embodiments, detection of nucleic acids can utilize Cas proteins to provide improved reaction sensitivity and/or specificity. In certain other example embodiments, isothermal amplification may be utilized with a thermostable CRISPR-Cas protein, with the combination of thermostable protein and isothermal amplification utilized to further improve reaction conditions and times for detection and diagnostics. In certain other example embodiments, detection of nucleic acids produced by isothermal amplification may be accomplished using OSD probes. These probes may bind accessible loops, or bind open areas of ssDNA generated by binding of CRISPR proteins such as Cas9 and Cas12. Binding of OSD probes may release fluorescence by separation of a quencher and fluorophore, either through displacement of a oligonucleotide strand, or through triggered degradation of an oligonucleotide via endonucleases such as RNase H. Advantageous quick extraction approaches for the extraction of nucleic acids from a sample are also provided. Design of reaction conditions and reagents are provided for the identification of primers and reaction conditions, including concentration and content of reagents and additives, that enhance the detection systems and methods disclosed herein. Advantageously, the systems and methods can be provided in lateral flow or self-contained cartridge devices for rapid, point-of-care diagnostics. In certain embodiments, the detection assay can be provided on a cartridge or chip. A device system can be configured to receive the cartridge and conduct an assay.

[0126] In certain example embodiments, the Cas protein may be a Type V CRISPR-Cas, a Type VI CRISPR-Cas, or combination thereof. In certain example embodiments, the Type V or Type VI Cas protein is a thermostable case protein with a nuclease activity above at least 50° C. In certain example embodiments, the Cas protein is a Cas12b protein. In certain other example embodiments, the Cas12b is Alicyclobacillus acidiphilus (AapCas12b). In certain other example embodiments, the Cas12b protein is Brevibacillus sp. SYSU G02855 (BrCas12b). In certain example embodiments, the Cas protein, may be paired with the novel guide designs disclosed herein.

[0127] Systems and method disclosed herein include approaches to isothermal amplification for detection of target nucleic acids. In certain example embodiments, isothermal amplification approach is loop-mediated isothermal amplification (LAMP). Design of optimal systems, including primers, reagents and additives to be used with isothermal amplification approaches are also provided. Optionally, CRISPR-Cas systems as disclosed herein can be used with isothermal amplification approaches, including LAMP, that can enhance sensitivity and/or specificity.

[0128] Methods of designing optimal reaction conditions are also provided. In an aspect, methods can comprise identifying the type of amplification reaction and designing optimal primers in accordance with the methods disclosed herein. Methods may also comprise identifying optimum CRISPR-Cas systems, including identification of the Cas protein for the reaction conditions. For example, the Cas protein may be identified based on its thermostability, cutting preferences, or other desired characteristics. Preferred guide molecules may similarly be identified. Once one or more primers and/or guides are identified, salt concentrations and other additives can be titrated and selected for further investigation. Additional reaction conditions, additives and reagents can be identified to optimize the use of one-pot methodology, lyophilization of reagents, and use in the devices disclosed herein.

[0129] In certain example embodiments, the system comprises a Type VI CRISPR-Cas system, one or more guide polynucleotides comprising a guide sequence capable of binding a target sequence and designed to form a complex with the Type VI Cas protein, and a detection construct comprising a polynucleotide component. The Type VI Cas proteins of the present systems and methods exhibit collateral RNase activity, cleaving the polynucleotide component of the detection construct once activated by the target sequence, which can generate a detectable signal.

[0130] Embodiments disclosed herein provide systems utilized in multiplex lateral flow devices and methods of use. In certain preferred embodiments, the guides utilized are designed to be highly active guide molecules, allowing for rapid and highly sensitive detection of coronavirus. In certain example embodiments, the systems can utilize general capture of antibody that was not bound by intact reporter RNAs as described in Gootenberg, et al., Science 360, 439-444 (2018). In other embodiments, the presently disclosed system can be designed for detecting two or more targets. When utilized with a lateral flow approach, two or more separate detection lines consisting of deposited materials that capture detection construct and a molecule specific to the deposited material, allows visualization of detectable signal (e.g. gain or loss) at detection lines due to collateral activity and cleavage of corresponding reporter oligonucleotide. Utilizing guide design that allows for design of highly active guide RNAs for use with the specific Cas protein of the systems for target sequences, for example, coronavirus is also provided. In certain embodiments, the time from processing of a sample in the current methods and using the presently claimed systems, from receipt of sample to detectable signal is less than 120 minutes, 110 minutes, 100 minutes, 90 minutes, 75 minutes, 60 minutes, 45 minutes, or 30 minutes.

### OSD Probes

[0131] The use of OSD probes is described in U.S. Patent Publication 2016/0076083, published on Mar. 17, 2016 and in U.S. Patent Publication 2020/0255891, published on Agust 13, 2020, both of which are incorporated herein in their entireties.

### Single Lysis Reaction Compositions

[0132] In certain aspects, embodiments disclosed herein are directed to compositions and kits that consolidate lysis and amplification of target nucleic acids into a single reaction volume. In certain example embodiments, extraction-free lysis reagents can be used to extract nucleic acids from cells and/or viral particles. In contrast to existing protocols, extraction-free lysis solution does not require isolation of the nucleic acid prior to further amplification. The extraction-free lysis reagents may be mixed with amplification reagents such as standard RT-PCR amplification reactions. An example of an extraction-free lysis solution is described in U.S. Provisional Application Ser. Nos. 62/970,125, 62/993,494, 63/018,487, 63/019,406 and 63/032,470, noted above.

[0133] In certain example embodiments, the extraction-free lysis solution is combined with amplification reagents into a single volume. In certain example embodiments, the amplification reagents are isothermal amplification reagents. In certain other example embodiments, the isothermal amplification reagents are LAMP isothermal amplification reagents. In certain example embodiments, the LAMP isothermal amplification reagents may include primers for the target nucleic acids discussed in further detail below. In certain example embodiments, the LAMP amplification reagents include primer sets selected from those listed in Table 1A and Table 1B.

Lengthy table referenced here
US20240327933A1-20241003-T00001
Please refer to the end of the specification for access instructions.

Lengthy table referenced here
US20240327933A1-20241003-T00002
Please refer to the end of the specification for access instructions.

Lengthy table referenced here
US20240327933A1-20241003-T00003
Please refer to the end of the specification for access instructions.

[0134] In certain example embodiments, the LAMP amplification reagents may include primers to SARS-COV2. In certain example embodiments, the primers are SEQ ID NOS: X-X from Table 5 or from Table 8. LAMP reagents may further comprise colorimetric and/or fluorescent detection reagents, such as hydroxy napthol blue (see, e.g. Goto, M., et al., Colorimetric detection of loop-mediated isothermal amplification reaction by using hydroxy naphthol blue. Biotechniques, 2009. 46(3): p. 167-72.) leuco triphenylmethane dyes (see, e.g. Miyamoto, S., et al., Method for calorimetric detection of double-stranded nucleic acid using leuco triphenylmethane dyes. Anal Biochem, 2015. 473: p. 28-33) and pH-sensitive dyes (see, e.g. Tanner, N. A., Y. Zhang, and T. C. Evans, Jr., Visual detection of isothermal nucleic acid amplification using pH-sensitive dyes. Biotechniques, 2015. 58(2): p. 59-68); as well as fluorescent detection (see, e.g. Yu et al., Clinical Chemistry, hvaa102, doi:10.1093/clinchem/hvaa102 12 May 2020), including use of quenching probes (see, e.g. Shirato el al., J Virol Methods. 2018 August:258:41-48. doi: 10.1016/j.jviromet.2018.05.006). An overview of LAMP methods, including OSD-LAMP, for sequence-specific detection is described in Becherer et al., Anal. Methcd, 2020, 12, 717-746, doi: 10.1039/C9AY02246E, incorporated herein by reference in their entireties.

[0135] In embodiments, the LAMP amplification reagents can comprise oligonucleotide strand displacement (OSD) probes. As used herein, oligonucleotide strand displacement probes are also referred to herein as oligonucleotide strand exchange probes or one-step strand displacement probes. The general concept of the use of OSD exchange is depicted in FIG. 1 of Bhadra et al., High-surety isothermal amplification and detection of SARS-CoV-2, including with crude enzymes, doi:10.1101/2020.04.13.039941. OSD probes rely on the binding enthalpy between the target-binding probe and amplicon of the LAMP reaction yielding a strand exchange reaction, leading to an easily read change in fluorescent signal. As a result, the results of a LAMP reaction can be visually or optically read fluorogenic OSD probes.

[0136] In an aspect, the OSD probes comprise a sequence specific for a target molecule. The OSD probes may comprise a pre-hybridized nucleic acid sequence, strand wherein the target sequence is 5, 6, 7, 8, 9, 10, 11, 12 or 13 nucleotides longer than the strand to which it is hybridized, allowing for sequence-specific interaction with a complementary target, with the OSD undergoing strand exchange and yielding a change in fluorescent signal. In a certain aspect, the OSD probes are designed specific for one or more of the LAMP primer sets disclosed herein, for example Tables 1A and 1B, Table 5 or Table 8. In an aspect the OSD probes are specific for LAMP primer N set 6. The OSD probes may be selected from Table 9. In an aspect, the OSD probes are provided at a concentration of about 50 nM to 200 nM, about 75 nM to 150 nM, less than or equal to 200 nM, 190 nM, 80 nM, 170 nM, 160 nM, 50 nM, 140 nM, 130 nM, 120 nM, 110 nM, 100 nM, 90 nM, 80 nM, 75 nM, 65 nM, or 50 nM. Probes can be designed to be complementary to the loop region between the Fic and F2 primer binding sites for the LAMP primers, this can be referred to as the long toehold region. The complementary portion can be between about 9 and 14 nucleotides long, more preferably 11-12 nucleotides long. In an aspect, the longer strand of the OSD is labeled with a fluorescent molecule at the 5′ or 3′ end of the strand. In an aspect, the label is provided on the end opposite the designed complementary target region (long toehold region). The short strand is prepared with a quencher on one end of the probe, and can be designed to comprise a region complementary to a portion of the long strand. The OSD probes can be provided as part of LAMP reagents as described herein, which may comprise their use on any of the devices, cartridges or in any of the compositions as provided herein, including being provided as a lyophilized reagent in some instances.

[0137] In certain embodiments, an RNA probe of 5-10 nucleotides can be combined with the CRISPR-Cas system as shown in FIGS. 2 and 3. In certain embodiments, lysis solution and isothermal amplification reagents may be lyophilized in a single reaction volume, to be reconstituted by addition of a sample to be assayed. In certain other embodiments, extraction-free lysis solution and isothermal amplification reagents may be lyophilized and stored on a cartridge or lateral flow strip, as discussed in further detail below.

[0138] In certain example embodiments, the single lysis reaction compositions and kits may further comprise one or more Cas proteins possessing collateral activity and a detection construct. Pairing with one or more Cas proteins may increase sensitivity or specificity of the assay. In certain example embodiments, the one or more Cas proteins may be thermostable Cas proteins. Example Cas proteins are disclosed in further detail below.

[0139] In certain example embodiments, the single lysis amplification reaction compositions and kits may comprise optimized primers and/or one or more additives. In an aspect, the design optimizes the primers used in the amplification. In particular aspects, the isothermal amplification is used alone. In another aspect, the isothermal amplification is used with CRISPR-Cas systems. In either approach, design considerations can follow a rational design for optimization of the reactions. Optimization of the methods as disclosed herein can include first screening primers to identify one or more sets of primers that work well for a particular target, Cas protein and/or reaction. Once the primers have been screened, titration of magnesium concentration can be performed to identify an optimal magnesium concentration for higher signal to noise readout. Once an optimum magnesium concentration is identified, additional additives are screened at around 20-25% of the reaction, and once additives are identified, these additives, such as those additives identified in FIG. 17, can be evaluated and varied in concentration to identify optimal reaction kinetics for specific reaction parameters. In an example, varying additives with specific primers, target, Cas protein (when CRISPR system is used), temperature, and other additive concentrations within the reaction can be identified. Optimization can be made with the goal of reducing the number of steps and buffer exchanges that have to occur in the reaction, simplifying the reaction and reducing the risks of contamination at transfer steps. In an aspect, addition of inhibitors, such as proteinase K can be considered so that buffer exchanges can be reduced. Similarly, optimizing the salt levels as well as the type of salt utilized can further facilitate and optimize the one-pot detections disclosed herein. In an aspect, potassium chloride can be utilized rather than sodium choloride when such amplification approaches are used with bead concentration in a lysis step.

[0140] In certain embodiments, the compositions and kits may further comprise nucleic acid binding beads. The bead may be used to capture, concentrate or otherwise enrich for particular material. The bead may be magnetic, and may be provided to capture nucleic acid material. In another aspect, the bead is a silica bead. Beads may be utilized in an extraction step of the methods disclosed herein. Beads can be optionally used with the methods described herein, including with the one-pot methods that allow for concentration of viral nucleic acids from large volume samples, such as saliva or swab samples to allow for a single one-pot reaction method. Concentration of desired target molecules can be increased by about 10-fold, 50-fold, 100-fold, 200-fold, 500-fold, 800-fold, 1000-fold, 1500-fold, 2000-fold, 2500-fold, 3000-fold, or more.

[0141] Magnetic beads in a PEG and salt solution are preferred in an aspect, and in embodiments bind to viral RNA and/or DNA which allows for concentration and lysis concurrently. Silica beads can be used in another aspect. Capture moieties such as oligonucleotide functionalized beads are envisioned for use. The beads may be used with the extraction reagents, allowed to incubate with a sample and the lysis/extraction buffer, thereby concentrating target molecules on the beads. When used with a cartridge device detailed elsewhere herein, a magnet can be activated and the beads collected, with optional flushing of the extraction buffer and one or more washes performed. Advantageously, the beads can be used in the one-pot methods and systems without additional washings of the beads, allowing for a more efficient process without increased risks of contamination in multi-step processes. Beads can be utilized with the isothermal amplifications detailed herein, and the beads can flow into an amplification chamber of the cartridge or be maintained in the pot for the amplification step. Upon heating, nucleic acid can be released off the beads.

### Exemplary CRISPR-Cas Systems

[0142] CRISPR Cas for use in the embodiments disclosed herein may comprise a Type V Cas protein, a Type VI Cas protein, or a combination thereof. In certain embodiments, the Cas proteins are thermostable Cas proteins. Exemplary thermostable Cas proteins can be selected from Table 2A or Table 2B, comprising Cas12 thermostable Cas proteins; other representative Cas12 and Cas13 proteins can be identified from Cas systems isolated from organisms that inhabit similar microenviroments. In certain example embodiments, the Cas is AapCas12b. In other example embodiments, the Cas is BrCas12b. In an aspect, two or more CRISPR effector systems are provided which may be RNA-targeting effector proteins, DNA-targeting effector proteins, or a combination thereof. The RNA-targeting effector proteins may be a Type VI Cas protein, such as Cas13 protein, including Cas13b, Cas13c, or Cas13d. The DNA-targeting effector protein may be a Type V Cas protein, such as Cas12a (Cpf1), Cas12b (C2c2), or Cas12c (C2c3).

### Thermostable Proteins

[0143] In certain exemplary embodiments, the protein selected may be more thermostable at higher temperatures. Exemplary proteins may comprise any Cas protein used with particular methodologies disclosed herein. In an aspect, the Cas protein is a thermostable protein. The thermostable Cas protein may be a Type V or a Type VI protein, for example, a Cas12 or Cas13 protein. In embodiments, the thermostable protein, upon activation, comprises collateral cleavage. A thermostable protein as used herein comprises a protein that retains catalytic activity at a temperature at or above 320 C, 33° C., 34° C., 35° C., 36° C., 37° C., 38° C., 39° C., 40° C., 41° C., 42° C., 430 C, 44° C., 450 C, 46° C., 47° C., 48° C., 49° C., 50° C., 51° C., 52° C., 53° C., 54° C., 55° C., 56° C., 57° C., 58° C., 59° C., 60° C., 610 C, 62° C., 63° C., 640 C, 65° C., 66° C., 670 C, 68° C., 69° C., 700 C, 71° C., 72° C. In certain example embodiments, the protein is thermostable at or above 55° C.

[0144] Methods for identification of thermostable proteins are detailed herein, and may comprise identifying Cas proteins from thermophilic bacterial species. Upon identification of a particular Cas protein from a species, Cas proteins form similar species may be identified.

[0145] In certain embodiments, the thermostable CRISPR-Cas protein is a Cas 12 protein from Table 2A or 2B, or at least 80% identity to a polypeptide from Table 2A or 2B.

[0146] In an embodiment, the thermostable Cas protein is a Cas12 protein selected from a protein in Table 2A, more preferably from Table 2B.

TABLE 2A
Cas 12 proteins

| Cas12 proteins | Sequence |
|---|---|
| (65C) | [symbol] |
| Ga0209381_1004188\| | |
| GENOME_ACCESSION | |
| (66C) a0212093_1\| | [symbol] |
| Ga0212093_1006934\| | |
| GENOME_ACCESSION | |
| 3300022548\| | [symbol] |
| Ga0212092_1000015\| | |
| GENOME_ACCESSION | |
| a0117933_1071983\| | [symbol] |
| Ga0117933_1071983\| | |
| GENOME_ACCESSION | |
| a0212092_1024084\| | [symbol] |
| Ga0212092_1024084\| | |
| GENOME_ACCESSION | |
| a0212093_1001507\| | [symbol] |
| Ga0212093_1001507\| | |
| GENOME_ACCESSION | |
| a0212120_1000874\| | [symbol] |
| Ga0212120_1000874\| | |
| GENOME_ACCESSION | |
| a0212125_1004414\| | [symbol] |
| Ga0212125_1004414\| | |
| GENOME_ACCESSION | |
| a0212125_1006348\| | [symbol] |
| Ga0212125_1006348\| | |
| GENOME_ACCESSION | |
| ABHJ01000011.1_o\| | [symbol] |
| Hydrogenivirga sp. 128- | |
| 5-R1-1 1102927038514 | |
| AGIV01000002.1_o\| | [symbol] |
| Rhodothermus marinus | |
| SG0.5JP17-171 | |
| Rhoma_Contig848_C | |
| BDSM01000053.1_o\| | [symbol] |
| Microcystis sp. 0824 | |
| DNA | |
| BFBB01000008.1_o\| | [symbol] |
| Leptospira sp. YH101 | |
| DNA | |
| BHZK01000001.1_o\| | [symbol] |
| Parageobacillus | |
| thermoglucosidasius | |
| TG4 DNA | |
| CP000240.1_organ\| | [symbol] |
| Synechococcus sp. JA-2- | |
| 3B′a(2-13) | |
| CP001229.1_organ\| | [symbol] |
| Sulfurihydrogenibium | |
| azorense Az-Fu1 | |
| CP011339.1_organ\| | [symbol] |
| Microcystis panniformis | |
| FACHB-1757 | |
| CP020382.1_organ\| | [symbol] |
| Rhodothermaceae | |
| bacterium RA | |
| chromosome | |
| CP040694.1_organ\| | [symbol] |
| Elizabethkingia sp. | |
| JS20170427COW | |
| chromosome | |
| DCUT01000059.1_o\| | [symbol] |
| TPA_asm | |
| DHGN01000237.1_o\| | [symbol] |
| TPA_asm | |
| FQUK01000003.1_o\| | [symbol] |
| Thermomonas | |
| hydrothermalis strain | |
| DSM 14834 genome | |
| assembly | |
| Ga0063162_1014580\| | [symbol] |
| GENOME_ACCESSION | |
| Ga0065719_107896\| | [symbol] |
| GENOME_ACCESSION | |
| Ga0065719_116807\| | [symbol] |
| GENOME_ACCESSION | |
| Ga0067045_1002454\| | [symbol] |
| GENOME_ACCESSION | |
| Ga0067045_1004962\| | [symbol] |
| GENOME_ACCESSION | |
| Ga0068669_1023596\| | [symbol] |
| GENOME_ACCESSION | |
| Ga0068707_1002163\| | [symbol] |
| GENOME_ACCESSION | |
| Ga0068707_1009867\| | [symbol] |
| GENOME_ACCESSION | |
| Ga0068707_1024093\| | [symbol] |
| GENOME_ACCESSION | |
| Ga0071330_1110381\| | [symbol] |
| GENOME_ACCESSION | |
| Ga0072682_101461\| | [symbol] |
| GENOME_ACCESSION | |
| Ga0073928_10004924\| | [symbol] |
| GENOME_ACCESSION | |
| Ga0073932_1022770\| | [symbol] |
| GENOME_ACCESSION | |
| Ga0079044_1002244\| | [symbol] |
| GENOME_ACCESSION | |
| Ga0079639_1009487\| | [symbol] |
| GENOME_ACCESSION | |
| Ga0099914_10727\| | [symbol] |
| GENOME_ACCESSION | |
| Ga0101790_149349\| | [symbol] |
| GENOME_ACCESSION | |
| Ga0102924_1013089\| | [symbol] |
| GENOME_ACCESSION | |
| Ga0103818_10095\| | [symbol] |
| GENOME_ACCESSION | |
| Ga0105154_1006902\| | [symbol] |
| GENOME_ACCESSION | |
| Ga0105158_1004615\| | [symbol] |
| GENOME_ACCESSION | |
| Ga0114945_10008792\| | [symbol] |
| GENOME_ACCESSION | |
| Ga0116141_10037070\| | [symbol] |
| GENOME_ACCESSION | |
| Ga0116143_10029534\| | [symbol] |
| GENOME_ACCESSION | |
| Ga0116146_1004071\| | [symbol] |
| GENOME_ACCESSION | |
| Ga0116159_1001590\| | [symbol] |
| GENOME_ACCESSION | |
| Ga0116160_1008286\| | [symbol] |
| GENOME_ACCESSION | |
| Ga0116161_1004008\| | [symbol] |
| GENOME_ACCESSION | |
| Ga0116167_1006930\| | [symbol] |
| GENOME_ACCESSION | |
| Ga0116184_10002336\| | [symbol] |
| GENOME_ACCESSION | |
| Ga0116185_1015740\| | [symbol] |
| GENOME_ACCESSION | |
| Ga0116188_1022712\| | [symbol] |
| GENOME_ACCESSION | |
| Ga0116210_1003377\| | [symbol] |
| GENOME_ACCESSION | |
| Ga0123519_10000481\| | [symbol] |
| GENOME_ACCESSION | |
| Ga0123519_10002165\| | [symbol] |
| GENOME_ACCESSION | |
| Ga0123519_10002912\| | [symbol] |
| GENOME_ACCESSION | |
| Ga0123519_10003344\| | [symbol] |
| GENOME_ACCESSION | |
| Ga0123519_10003852\| | [symbol] |
| GENOME_ACCESSION | |
| Ga0123519_10021143\| | [symbol] |
| GENOME_ACCESSION | |
| Ga0123519_10027137\| | [symbol] |
| GENOME_ACCESSION | |
| Ga0123519_10057643\| | [symbol] |
| GENOME_ACCESSION | |
| Ga0123519_10064432\| | [symbol] |
| GENOME_ACCESSION | |
| G80124943_1106748\| | [symbol] |
| GENOME_ACCESSION | |
| Ga0124945_1030784\| | [symbol] |
| GENOME_ACCESSION | |
| Ga0133944_1001807\| | [symbol] |
| GENOME_ACCESSION | |
| Ga0134095_1000962\| | [symbol] |
| GENOME_ACCESSION | |
| Ga0137716_10003017\| | [symbol] |
| GENOME_ACCESSION | |
| Ga0137716_10003038\| | [symbol] |
| GENOME_ACCESSION | |
| Ga0137716_10003531\| | [symbol] |
| GENOME_ACCESSION | |
| Ga0137716_10006890\| | [symbol] |
| GENOME_ACCESSION | |
| Ga0137716_10009026\| | [symbol] |
| GENOME_ACCESSION | |
| Ga0137716_10009341\| | [symbol] |
| GENOME_ACCESSION | |
| Ga0137716_10027208\| | [symbol] |
| GENOME_ACCESSION | |
| Ga0137716_10032400\| | [symbol] |
| GENOME_ACCESSION | |
| Ga0137716_10033855\| | [symbol] |
| GENOME_ACCESSION | |
| Ga0137716_10038387\| | [symbol] |
| GENOME_ACCESSION | |
| Ga0137716_10042212\| | [symbol] |
| GENOME_ACCESSION | |
| Ga0137716_10061480\| | [symbol] |
| GENOME_ACCESSION | |
| Ga0172363_10016551\| | [symbol] |
| GENOME_ACCESSION | |
| Ga0172365_10006450\| | [symbol] |
| GENOME_ACCESSION | |
| Ga0172382_10012866\| | [symbol] |
| GENOME_ACCESSION | |
| Ga0180300_10000403\| | [symbol] |
| GENOME_ACCESSION | |
| Ga0180301_10011215\| | [symbol] |
| GENOME_ACCESSION | |
| Ga0180435_10008691\| | [symbol] |
| GENOME_ACCESSION | |
| Ga0180446_1198\| | [symbol] |
| GENOME_ACCESSION | |
| Ga0181613_1004254\| | [symbol] |
| GENOME_ACCESSION | |
| Ga0181613_1005053\| | [symbol] |
| GENOME_ACCESSION | |
| Ga0181858_1004277\| | [symbol] |
| GENOME_ACCESSION | |
| Ga0182014_10001887\| | [symbol] |
| GENOME_ACCESSION | |
| Ga0186994_110\| | [symbol] |
| GENOME_ACCESSION | |
| Ga0187028_105\| | [symbol] |
| GENOME_ACCESSION | |
| Ga0187073_104\| | [symbol] |
| GENOME_ACCESSION | |
| Ga0187107_1033\| | [symbol] |
| GENOME_ACCESSION | |
| Ga0187121_108\| | [symbol] |
| GENOME_ACCESSION | |
| Ga0187143_105\| | [symbol] |
| GENOME_ACCESSION | |
| Ga0187864_10009485\| | [symbol] |
| GENOME_ACCESSION | |
| Ga0190309_1003062\| | [symbol] |
| GENOME_ACCESSION | |
| Ga0190334_1000016\| | [symbol] |
| GENOME_ACCESSION | |
| Ga0190361_1000443\| | [symbol] |
| GENOME_ACCESSION | |
| Ga0190361_1001609\| | [symbol] |
| GENOME_ACCESSION | |
| Ga0190361_1003780\| | [symbol] |
| GENOME_ACCESSION | |
| 27 | |
| Ga0190361_1003780\| | [symbol] |
| GENOME_ACCESSION | |
| 31 | |
| Ga0190363_1000125\| | [symbol] |
| GENOME_ACCESSION | |
| Ga0194111_10067953\| | [symbol] |
| GENOME_ACCESSION | |
| Ga0207429_10023\| | [symbol] |
| GENOME_ACCESSION | |
| Ga0207433_10006213\| | [symbol] |
| GENOME_ACCESSION | |
| Ga0207433_10011113\| | [symbol] |
| GENOME_ACCESSION | |
| Ga0207433_10012523\| | [symbol] |
| GENOME_ACCESSION | |
| Ga0207433_10020534\| | [symbol] |
| GENOME_ACCESSION | |
| Ga0207433_10021674\| | [symbol] |
| GENOME_ACCESSION | |
| Ga0207433_10022806\| | [symbol] |
| GENOME_ACCESSION | |
| Ga0207433_10030792\| | [symbol] |
| GENOME_ACCESSION | |
| Ga0207433_10045901\| | [symbol] |
| GENOME_ACCESSION | |
| Ga0207433_10075234\| | [symbol] |
| GENOME_ACCESSION | |
| Ga0207433_10075916\| | [symbol] |
| GENOME_ACCESSION | |
| Ga0207433_10082276\| | [symbol] |
| GENOME_ACCESSION | |
| Ga0207747_1007959\| | [symbol] |
| GENOME_ACCESSION | |
| Ga0207868_1000002\| | [symbol] |
| GENOME_ACCESSION | |
| Ga0208151_102415\| | [symbol] |
| GENOME_ACCESSION | |
| Ga0208195_1004385\| | [symbol] |
| GENOME_ACCESSION | |
| Ga0208357_1002034\| | [symbol] |
| GENOME_ACCESSION | |
| Ga0208429_100128\| | [symbol] |
| GENOME_ACCESSION | |
| Ga0208429_100584\| | [symbol] |
| GENOME_ACCESSION | |
| Ga0208429_100770\| | [symbol] |
| GENOME_ACCESSION | |
| Ga0208461_1008711\| | [symbol] |
| GENOME_ACCESSION | |
| Ga0208609_100002\| | [symbol] |
| GENOME_ACCESSION | |
| Ga0208683_103187\| | [symbol] |
| GENOME_ACCESSION | |
| Ga0208683_103849\| | [symbol] |
| GENOME_ACCESSION | |
| Ga0208683_104403\| | [symbol] |
| GENOME_ACCESSION | |
| Ga0208940_1001448\| | [symbol] |
| GENOME_ACCESSION | |
| Ga0209012_1000842 | [symbol] |
| GENOME_ACCESSION | |
| Ga0209012_1001252\| | [symbol] |
| GENOME_ACCESSION | |
| Ga0209012_1015334\| | [symbol] |
| GENOME_ACCESSION | |
| Ga0209018_1000172\| | [symbol] |
| GENOME_ACCESSION | |
| Ga0209101_1000507\| | [symbol] |
| GENOME_ACCESSION | |
| Ga0209101_1006392\| | [symbol] |
| GENOME_ACCESSION | |
| Ga0209102_1000334\| | [symbol] |
| GENOME_ACCESSION | |
| Ga0209102_1003688\| | [symbol] |
| GENOME_ACCESSION | |
| Ga0209143_1000788\| | [symbol] |
| GENOME_ACCESSION | |
| Ga0209143_1002248\| | [symbol] |
| GENOME_ACCESSION | |
| Ga0209143_1006289\| | [symbol] |
| GENOME_ACCESSION | |
| Ga0209162_1014546\| | [symbol] |
| GENOME_ACCESSION | |
| Ga0209171_10000726\| | [symbol] |
| GENOME_ACCESSION | |
| Ga0209172_10015399\| | [symbol] |
| GENOME_ACCESSION | |
| Ga0209201_1007464\| | [symbol] |
| GENOME_ACCESSION | |
| Ga0209207_1001084\| | [symbol] |
| GENOME_ACCESSION | |
| Ga0209207_1006579\| | [symbol] |
| GENOME_ACCESSION | |
| Ga0209224_1000001\| | [symbol] |
| GENOME_ACCESSION | |
| G80209225_1002268\| | [symbol] |
| GENOME_ACCESSIO | |
| Ga0209399_10016114\| | [symbol] |
| GENOME_ACCESSION | |
| Ga0209410_1010848\| | [symbol] |
| GENOME_ACCESSION | |
| Ga0209467_1000554\| | [symbol] |
| GENOME_ACCESSION | |
| Ga0209507_1000982\| | [symbol] |
| GENOME_ACCESSION | |
| Ga0209513_1002134\| | [symbol] |
| GENOME_ACCESSION | |
| Ga0209542_10001012\| | [symbol] |
| GENOME_ACCESSION | |
| Ga0209542_10007289\| | [symbol] |
| GENOME_ACCESSION | |
| Ga0209669_100016\| | [symbol] |
| GENOME_ACCESSION | |
| Ga0209669_101200\| | [symbol] |
| GENOME_ACCESSION | |
| Ga0209750_1000252\| | [symbol] |
| GENOME_ACCESSION | |
| Ga0209827_10659006\| | [symbol] |
| GENOME_ACCESSION | |
| Ga0209980_10011112\| | [symbol] |
| GENOME_ACCESSION | |
| Ga0210049_1040060\| | [symbol] |
| GENOME_ACCESSION | |
| Ga0210051_1028938\| | [symbol] |
| GENOME_ACCESSION | |
| Ga0210057_1032582\| | [symbol] |
| GENOME_ACCESSION | |
| Ga0214474_1011027\| | [symbol] |
| GENOME_ACCESSION | |
| Ga0255343_1026926\| | [symbol] |
| GENOME_ACCESSION | |
| Ga0255346_1002844\| | [symbol] |
| GENOME_ACCESSION | |
| Ga0255355_1000451\| | [symbol] |
| GENOME_ACCESSION | |
| Ga0255811_11272827\| | [symbol] |
| GENOME_ACCESSION | |
| Ga0255812_10127107\| | [symbol] |
| GENOME_ACCESSION | |
| Ga0272445_1000517\| | [symbol] |
| GENOME_ACCESSION | |
| Ga0272446_1000057\| | [symbol] |
| GENOME_ACCESSION | |
| Ga0272446_1000164\| | [symbol] |
| GENOME_ACCESSION | |
| Ga0272446_1001728\| | [symbol] |
| GENOME_ACCESSION | |
| 137 | |
| Ga0272446_1001728\| | [symbol] |
| GENOME_ACCESSION | |
| 249 | |
| Ga0272446_1001929\| | [symbol] |
| GENOME_ACCESSION | |
| Ga0272446_1017314\| | [symbol] |
| GENOME_ACCESSION | |
| Ga0272447_1003507\| | [symbol] |
| GENOME_ACCESSION | |
| Ga0272448_1000001\| | [symbol] |
| GENOME_ACCESSION | |
| Ga0272448_1000002\| | [symbol] |
| GENOME_ACCESSION | |
| Ga0272448_1000009\| | [symbol] |
| GENOME_ACCESSION | |
| Ga0272448_1000011\| | [symbol] |
| GENOME_ACCESSION | |
| Ga0272448_1000062 | [symbol] |
| GENOME_ACCESSION | |
| Ga0272448_1000167\| | [symbol] |
| GENOME_ACCESSION | |
| Ga0272448_1002516\| | [symbol] |
| GENOME_ACCESSION | |
| Ga0272448_1011735\| | [symbol] |
| GENOME_ACCESSION | |
| Ga0272448_1059621\| | [symbol] |
| GENOME_ACCESSION | |
| Ga0272448_1067731\| | [symbol] |
| GENOME_ACCESSION | |
| Ga0272449_1002236\| | [symbol] |
| GENOME_ACCESSION | |
| Ga0272449_1004365\| | [symbol] |
| GENOME_ACCESSION | |
| Ga0272449_1006528\| | [symbol] |
| GENOME_ACCESSION | |
| Ga0272449_1019852\| | [symbol] |
| GENOME_ACCESSION | |
| Ga0302046_10000852\| | [symbol] |
| GENOME_ACCESSION | |
| Ga0302192_10026063\| | [symbol] |
| GENOME_ACCESSION | |
| Ga0302246_1000265\| | [symbol] |
| GENOME_ACCESSION | |
| Ga0302251_1001844\| | [symbol] |
| GENOME_ACCESSION | |
| Ga0302253_1002416\| | [symbol] |
| GENOME_ACCESSION | |
| Ga0307340_100872\| | [symbol] |
| GENOME_ACCESSION | |
| Ga0308310_1004946\| | [symbol] |
| GENOME_ACCESSION | |
| Ga0308310_1013800\| | [symbol] |
| GENOME_ACCESSION | |
| Ga0308411_10001123\| | [symbol] |
| GENOME_ACCESSION | |
| Ga0308411_10021369\| | [symbol] |
| GENOME_ACCESSION | |
| Ga0308414_1002480\| | [symbol] |
| GENOME_ACCESSION | |
| Ga0308414_1007395\| | [symbol] |
| GENOME_ACCESSION | |
| Ga0308414_1018540\| | [symbol] |
| GENOME_ACCESSION | |
| Ga0308415_1006042\| | [symbol] |
| GENOME_ACCESSION | |
| Ga0308419_1006240\| | [symbol] |
| GENOME_ACCESSION | |
| Ga0308419_1011938\| | [symbol] |
| GENOME_ACCESSION | |
| Ga0310136_000087\| | [symbol] |
| GENOME_ACCESSION | |
| Ga0310138_009337\| | [symbol] |
| GENOME_ACCESSION | |
| Ga0310146_00181\| | [symbol] |
| GENOME_ACCESSION | |
| G80310828_1006812\| | [symbol] |
| GENOME_ACCESSION | |
| Ga0311022_13670299\| | [symbol] |
| GENOME_ACCESSION | |
| Ga0315269_0011078\| | [symbol] |
| GENOME_ACCESSION | |
| Ga0315269_0014929\| | [symbol] |
| GENOME_ACCESSION | |
| Ga0315269_0030078\| | [symbol] |
| GENOME_ACCESSION | |
| Ga0315277_10001015\| | [symbol] |
| GENOME_ACCESSION | |
| Ga0315280_10009663\| | [symbol] |
| GENOME_ACCESSION | |
| Ga0315280_10032046\| | [symbol] |
| GENOME_ACCESSION | |
| Ga0315282_10006339\| | [symbol] |
| GENOME_ACCESSION | |
| Ga0315282_10053614\| | [symbol] |
| GENOME_ACCESSION | |
| Ga0315285_10079970\| | [symbol] |
| GENOME_ACCESSION | |
| Ga0315288_10142264\| | [symbol] |
| GENOME_ACCESSION | |
| Ga0315298_1000517\| | [symbol] |
| GENOME_ACCESSION | |
| Ga0315298_1001941\| | [symbol] |
| GENOME_ACCESSION | |
| Ga0315298_1005332\| | [symbol] |
| GENOME_ACCESSION | |
| Ga0315298_1007399\| | [symbol] |
| GENOME_ACCESSION | |
| Ga0315298_1007594\| | [symbol] |
| GENOME_ACCESSION | |
| Ga0315298_1015991\| | [symbol] |
| GENOME_ACCESSION | |
| Ga0315903_10087816\| | [symbol] |
| GENOME_ACCESSION | |
| Ga0334883_1024988\| | [symbol] |
| GENOME_ACCESSION | |
| Ga0334884_1015165\| | [symbol] |
| GENOME_ACCESSION | |
| G80370516\|000963\| | [symbol] |
| GENOME_ACCESSION | |
| Ga0370516_004838\| | [symbol] |
| GENOME_ACCESSION | |
| Ga0370516_008232\| | [symbol] |
| GENOME_ACCESSION | |
| Ga0370516_009639\| | [symbol] |
| GENOME_ACCESSION | |
| Ga0370516_018229\| | [symbol] |
| GENOME_ACCESSION | |
| Ga0370516_020865\| | [symbol] |
| GENOME_ACCESSION | |
| Ga0373397_000168\| | [symbol] |
| GENOME_ACCESSION | |
| Ga0373621_000479\| | [symbol] |
| GENOME_ACCESSION | |
| Ga0373621_007959\| | [symbol] |
| GENOME_ACCESSION | |
| Ga0373621_010685\| | [symbol] |
| GENOME_ACCESSION | |
| Ga0373621_017562\| | [symbol] |
| GENOME_ACCESSION | |
| Ga0373621_020135\| | [symbol] |
| GENOME_ACCESSION | |
| Ga0373621_023545\| | [symbol] |
| GENOME_ACCESSION | |
| Ga0373621_050562\| | [symbol] |
| GENOME_ACCESSION | |
| Ga0373637_0010996\| | [symbol] |
| GENOME_ACCESSION | |
| Ga0373637_0021496\| | [symbol] |
| GENOME_ACCESSION | |
| Ga0373637_0024972\| | [symbol] |
| GENOME_ACCESSION | |
| Ga0373637_0031827\| | [symbol] |
| GENOME_ACCESSION | |
| Ga0373637_0034837\| | [symbol] |
| GENOME_ACCESSION | |
| Ga0373637_0065620\| | [symbol] |
| GENOME_ACCESSION | |
| Ga0374803_055\| | [symbol] |
| GENOME_ACCESSION | |
| GCA_000092125.1\| | [symbol] |
| Meiothermus silvanus | |
| DSM 9946 plasmid | |
| pMESIL02 | |
| GCA_000444055.1\| | [symbol] |
| Alicyclobacillus | |
| acidoterrestris ATCC | |
| 49025 contig_23 | |
| GCA_000444055.1\| | [symbol] |
| Alicyclobacillus | |
| acidoterrestris ATCC | |
| 49025 config_26 | |
| GCA_000832185.1_AS | [symbol] |
| M83218v1\|Bacillus | |
| thermoamylovorans | |
| strain B4167 NODE_88 | |
| GCA_002951815.1_AS | [symbol] |
| M295181v1\| | |
| Sulfobacillus | |
| thermotolerans strain Kr | |
| chromosome | |
| GCA_004343255.1_AS | [symbol] |
| M434325v1\|Laceyella | |
| sacchari strain DSM | |
| 43356 Ga0244645_102 | |
| GCA_006503695.1\| | [symbol] |
| Tepidiphilus | |
| succinatimandens strain | |
| DSM 15512 Scaffold2 | |
| GCA_006503695.1_AS | [symbol] |
| M650369v1\| | |
| Tepidiphilus | |
| succinatimandens strain | |
| DSM 15512 Scaffold2 | |
| GCA_900116805.1\| | [symbol] |
| Alicyclobacillus | |
| macrosporangadus strain | |
| DSM 17980 genome | |
| assembly | |
| GCA_900129915.1\| | [symbol] |
| Tepidibacter thalassicus | |
| DSM 15285 genome | |
| assembly | |
| JGI12383J13903_1002647\| | [symbol] |
| GENOME_ACCESSION | |
| JGI24108J20142_1001595\| | [symbol] |
| GENOME_ACCESSION | |
| JG124721144947_10029740\| | [symbol] |
| GENOME_ACCESSION | |
| JGI24721J44947_10039167\| | [symbol] |
| GENOME_ACCESSION | |
| JGI26463151803_1000081\| | [symbol] |
| GENOME_ACCESSION | |
| KE386988.1_organ\| | [symbol] |
| Desulfatirhabdium | |
| butyrativorans DSM | |
| 18734 genomic scaffold | |
| G492DRAFT_ | |
| scaffold00017.17 | |
| KE387196.1_organ\| | [symbol] |
| Tuberibacillus calidus | |
| DSM 17572 genomic | |
| scaffold | |
| H532DRAFT _ | |
| scaffold00011.11 | |
| LGRA01000008.1_o\| | [symbol] |
| Azospirillum sp. TSO35- | |
| 2 Contig02 | |
| LNAA02000020.1_0\| | [symbol] |
| Oscillatoriales | |
| cyanobacterium MTP1 | |
| Contig 26 | |
| mgm4742482.3\| | [symbol] |
| NODE_1674_length_ | |
| 13888_cov_4.96582_ID_ | |
| 49155357\| | |
| GENOME_ACCESSION | |
| MHOL01000010.1_o\| | [symbol] |
| Candidatus | |
| Staskawiczbacteria | |
| bacterium | |
| RIFCSPHIGHO2_01_ | |
| FULL_34_27 | |
| rifcsphigho2_01_ | |
| scaffold_2126 | |
| MHPA01000001.1_o\| | [symbol] |
| Candidatus | |
| Staskawiczbacteria | |
| bacterium | |
| RIFCSPLOWO2_01_ | |
| FULL_38_12b | |
| rifcsplowo2_01_ | |
| scaffold_12327 | |
| MTKY01071110.1_o\| | [symbol] |
| Anaerobic digester | |
| metagenome | |
| soeholt_digester_71110 | |
| MVGR01000004.1_o\| | [symbol] |
| Microcystis aeruginosa | |
| KW Contig4 | |
| NICF_comb_assmDRAFT_ | [symbol] |
| 10010420\| | |
| GENOME_ACCESSION | |
| NJDI01000010.1_o\| | [symbol] |
| Archaeoglobales | |
| archaeon ex4484_ | |
| 92ex4484_82_scaffold_ | |
| 1630_length_14867 | |
| count_1478 | |
| OGCG01005283.1_o\| | [symbol] |
| hot springs metagenome | |
| genome assembly | |
| OGCG01007631.1_o\| | [symbol] |
| hot springs metagenome | |
| genome assembly | |
| OKRQ01000045.1_o\| | [symbol] |
| freshwater metagenome | |
| genome assembly | |
| OQOO01000421.1_o\| | [symbol] |
| homan oral metagenome | |
| genome asserubly | |
| OQUWOL.1\|hot springs | [symbol] |
| metagenome genome | |
| assembly | |
| OQUW01000094.1_o\| | [symbol] |
| hot springs metagenome | |
| genome asserubly | |
| OQUW01000235.1_o\| | [symbol] |
| hot springs metagenome | |
| genome assembly | |
| OQUW01001775.1_o\| | [symbol] |
| hot springs metagenome | |
| genome assembly | |
| ORXB01007227.1_o\| | [symbol] |
| sediment metagenome | |
| genome assembly | |
| OVXJ01001238.1_o\| | [symbol] |
| sediment metagenome | |
| genome assembly | |
| QNAW01000106.1_o\| | [symbol] |
| Thermodesulfobacteria | |
| bacterium isolate B8_ | |
| G2B8_Guay2_scaffold_ | |
| 12966 | |
| UOVV01006324.1_o\| | [symbol] |
| compost metagenome | |
| genome assembly | |
| UPSJ01002360.1_o\| | [symbol] |
| activated sludge | |
| metagenome genome | |
| assembly | |
| YNPsite07_CeleraDRAF_ | [symbol] |
| scf1119010704098\| | |
| GENOME_ACCESSION | |

Additional Cas12 proteins

| | |
|---|---|
| Ga0065721_ | [symbol] |
| 10050166\| | |
| GENOME | |
| ACCESSION: | |
| BioRI_2199352012_ | |
| SF_3300005286 | |
| GENOME_ID: 23829 | |
| CONTIG_ID: 14524 | |
| Ga0255812_ | [symbol] |
| 10583625_ | |
| GENOME | |
| ACESSION: | |
| IMG_3300023203_ | |
| SF_ | |
| 3300023203 | |
| GENOME_ID: 30040 | |
| CONTIG_ID: 32030 | |
| Ga0265297_ | [symbol] |
| 10015673\| | |
| GENOME | |
| ACESSION: | |
| Munlanlwell | |
| 13791_2_SF_ | |
| 3300029288 | |
| GENOME_ID: 280701 | |
| CONTIG_ID: 15672 | |
| Ga0315280_ | [symbol] |
| 10014676\| | |
| GENOME | |
| ACESSION: | |
| YL17G06_ | |
| 40_MG_2_SF_ | |
| 3300031862 | |
| GENOME_ID: 281631 | |
| CONTIG_ID: 14675 | |
| Ga0206102_ | [symbol] |
| 1000160\| | |
| GENOME | |
| ACESSION: | |
| 1B1Ametagenome_ | |
| 2_SF_ | |
| 3300020149 | |
| GENOME_ID: 20785 | |
| CONTIG_ID: 159 | |
| Ga0207869_ | [symbol] |
| 1001742\| | |
| GENOME | |
| ACESSION: | |
| HigsolAR5DSPAdes_ | |
| SF_ | |
| 3300025517 | |
| GENOME_ID: 27181 | |
| CONTIG_ID: 1741 | |
| Ga0209347_ | [symbol] |
| 1001125\| | |
| GENOME_ | |
| ACESSION: | |
| AutinicBR23SPAdes_ | |
| SF_ | |
| 3300027640 | |
| GENOME_ID: 23478 | |
| CONTIG_ID: 1124 | |
| Alicyclobacillus | [symbol] |
| kakegawensis | |
| NBRC | |
| 103104 | |
| DNA, | |
| contig: | |
| AK2_CON0027_ | |
| 0001, | |
| whole | |
| genome | |
| shotgun | |
| sequence\| | |
| GENOME_ | |
| ACESSION: | |
| GCA_001552655.1_ | |
| ASM155265v1_ | |
| genomic | |
| GENOME_ID: 98642 | |
| CONTIG_ID: 26 | |
| FCOJ0100000035.1 | [symbol] |
| Alicyclobacillus | |
| hesperidum | |
| strain DSM | |
| 12489 | |
| genome | |
| assembly, | |
| contig: | |
| Ga1074806_ | |
| 135, whole | |
| shotgun | |
| sequence\| | |
| GENOME_ | |
| ACESSION: | |
| GCA_900107035.1_ | |
| IMG- | |
| taxon_2634166329_ | |
| annotated_ | |
| assembly_ | |
| genomic | |
| GENOME_ID: 184129 | |
| CONTIG_ID: 49 | |
| OQOO010000421.1 | [symbol] |
| human oral | |
| metagenome | |
| genomte | |
| assembly, | |
| contig: | |
| NODE_421_ | |
| length_10358_ | |
| cov_14.800155, | |
| whole | |
| genome | |
| shotgun | |
| sequence\| | |
| GENOME_ | |
| ACESSION: | |
| GENOME_ID: 9995 | |
| CONTIG_ID: 420 | |
| bioreactor | [symbol] |
| metagenome | |
| geronte | |
| assembly, | |
| contig: | |
| NODE_247_ | |
| length_93349_ | |
| cov_7.384563, | |
| whole | |
| genome | |
| shotgun | |
| sequence\| | |
| GENOME_ | |
| ACCESSION | |
| OWPAO1.1 | |
| GENOME_ID: 12159 | |
| CONTIG_ID: 246 | |
| PGUZ01000040.3 | [symbol] |
| Bacillus sp. | |
| V3-13 | |
| contig_40, | |
| whole | |
| genome | |
| shotgun | |
| sequence\| | |
| GENOME_ | |
| ACCESSION: | |
| GCA_002860165.1_ | |
| ASM | |
| 286016v1_ | |
| genomic | |
| GENOME_ID: 150146 | |
| CONTIG_ID: 56 | |
| RHHN01000007.1 | [symbol] |
| Brevibacillus | |
| agri strain | |
| NRRL NRS | |
| 1219 | |
| contig 7, | |
| whole | |
| shotgun | |
| sequence\| | |
| GENOME_ | |
| ACCESSION | |
| GCA_003711885.1_ | |
| ASM371088v1_ | |
| genomic | |
| GENOME_ID: 202321 | |
| CONTIG_ID: 115 | |
| RHHS01000035.1 | [symbol] |
| Brevibacillus | |
| gelatini | |
| strain DSM | |
| 100115 | |
| contig 35, | |
| whole | |
| genome | |
| shotgun | |
| sequence\| | |
| GENOME_ | |
| ACESSION: | |
| GCA_003710935.1_ | |
| ASM371093v1_ | |
| genomic | |
| GENOME_ID: 202324 | |
| CONTIG_ID: 28 | |
| AacCas12b | [symbol] |
| AapCas12b | [symbol] |
| BrCas12b | [symbol] |

[symbol]

indicates data missing or illegible when filed

TABLE 2B
Cas12 proteins
Cas 12 proteins

(65C) Ga0209381_1004188 I GENOME_ACCESSION
a0212093_1001507 I Ga0212093_1001507 I GENOME_ACCESSION
DCUT01000059.1_o I TPA_asm: Syntrophaceae bacterium UBA2207 UBA2207_contig_83649, whole
genome shotgun sequence I GENOME_ACESSION: GCA_002328545.1_ASM232854v1_genomic
GENOME_ID: 131523 CONTIG_ID: 133
FQUK01000003.1_o I Thermomonas hydrothermalis strain DSM 14834 genome assembly
Ga0067045_1002454 I GENOME_ACCESSION
Ga0067045_1004962 I GENOME_ACCESSION
Ga0116159_1001590 I GENOME_ACCESSION
Ga0116160_1008286 I GENOME_ACCESSION
Ga0116161_1004008 I GENOME_ACCESSION
Ga0116167_1006930 I GENOME_ACCESSION
Ga0116184_10002336 I GENOME_ACCESSION
Ga0123519_10002912 I GENOME_ACCESSION
Ga0123519_10003852 I GENOME_ACCESSION
Ga0137716_10027208 I GENOME_ACCESSION
Ga0172382_10012866 I GENOME_ACCESSION
Ga0180435_10008691 I GENOME_ACCESSION
Ga0182014_10001887 I GENOME_ACCESSION
Ga0187107_1033 I GENOME_ACCESSION
Ga0187864_10009485 I GENOME_ACCESSION
Ga0208195_1004385 I GENOME_ACCESSION
Ga0208357_1002034 I GENOME_ACCESSION
Ga0208609_100002 I GENOME_ACCESSION
Ga0209012_1001252 I GENOME_ACCESSION
Ga0209018_1000172 I GENOME_ACCESSION
Ga0209507_1000982 I GENOME_ACCESSION
Ga0209513_1002134 I GENOME_ACCESSION
Ga0255346_1002844 I GENOME_ACCESSION
Ga0255812_10127107 I GENOME_ACCESSION
Ga0272448_1000001 I GENOME_ACCESSION
Ga0272448_1000009 I GENOME_ACCESSION
Ga0272448_1000167 I GENOME_ACCESSION
Ga0272448_1002516 I GENOME_ACCESSION
Ga0302246_1000265 I GENOME_ACCESSION
Ga0302251_1001844 I GENOME_ACCESSION
Ga0302253_1002416 I GENOME_ACCESSION
Ga0310136_000087 I GENOME_ACCESSION
Ga0315298_1005332 I GENOME_ACCESSION
Ga0315298_1015991 I GENOME_ACCESSION
Ga0334884_1015165 I GENOME_ACCESSION
Ga0373637_0010996 I GENOME_ACCESSION
Ga0373637_0024972 I GENOME_ACCESSION
Ga0373637_0031827 I GENOME_ACCESSION
GCA_000444055.1 I Alicyclobacillus acidoterrestris ATCC 49025 contig_26
GCA_000832185.1_ASM83218v1 I Bacillus thermoamylovorans strain B4167 NODE_88
GCA_002951815.1_ASM295181v1 I Sulfobacillus thermotolerans strain Kr chromosome
GCA_004343255.1_ASM434325v1 I Laceyella sacchari strain DSM 43356 Ga0244645_102
GCA_900116805.1 I Alicyclobacillus macrosporangiidus strain DSM 17980 genome assembly
KE386988.1_organ I Desulfatirhabdium butyrativorans DSM 18734 genomic scaffold
G492DRAFT_scaffold00017.17
KE387196.1_organ I Tuberibacillus calidus DSM 17572 genomic scaffold H532DRAFT_scaffold00011.11
LNAA02000020.1_o I Oscillatoriales cyanobacterium MTP1 Contig 26
OQUW01000094.1_o I hot springs metagenome genome assembly
OQUW01001775.1_o I hot springs metagenome genome assembly
Ga0255812_10583625 I GENOME_ACESSION: IMG_3300023203_$F_3300023203 GENOME_ID:
30040 CONTIG_ID: 32030
Ga0065721_10050166 I GENOME_ACCESSION: BioRi_2199352012_$F_3300005286 GENOME_ID:
23829 CONTIG_ID: 14524
Ga0265297_10015673 I GENOME_ACESSION: Munlanlwell13791_2_$F_3300029288 GENOME_ID:
280701 CONTIG_ID: 15672
Ga0315280_10014676 I GENOME_ACESSION: YL17G06_40_MG_2_$F_3300031862 GENOME_ID:
281631 CONTIG_ID: 14675
Ga0206102_1000160 I GENOME_ACESSION: 1B1Ametagenome_2_$F_3300020149 GENOME_ID:
20785 CONTIG_ID: 159
Ga0207869_1001742 I GENOME_ACESSION: HigsolAR5DSPAdes_$F_3300025517 GENOME_ID:
27181 CONTIG_ID: 1741
Ga0209347_1001125 I GENOME_ACESSION: AutmicBR23SPAdes_$F_3300027640 GENOME_ID:
23478 CONTIG_ID: 1124
Alicyclobacillus kakegawensis NBRC 103104 DNA, contig: AK2_CON0027_0001, whole genome shotgun
sequence I GENOME_ACESSION: GCA_001552655.1_ASM155265v1_genomic GENOME_ID: 98642
CONTIG_ID: 26
FNOJ0100000035.1
Alicyclobacillus hesperidum strain DSM 12489 genome assembly, contig: Ga0074806_135, whole genome
shotgun sequence I GENOME_ACESSION: GCA_900107035.1_IMG-
taxon_2634166329_annotated_assembly_genomic GENOME_ID: 184129 CONTIG_ID: 49
OQOO010000421.1
human oral metagenome genome assembly, contig: NODE_421_length_10358_cov_14.800155, whole
genome shotgun sequence I GENOME_ACESSION: OQOO01.1 GENOME_ID: 9995 CONTIG_ID: 420
bioreactor metagenome genome assembly, contig: NODE_247_length_93349_cov_7.384563, whole
genome shotgun sequence I GENOME_ACCESSION: OWPA01.1 GENOME_ID: 12159 CONTIG_ID:
246
PGUZ01000040.1
Bacillus sp. V3-13 contig_40, whole genome shotgun sequence I GENOME_ACCESSION:
GCA_002860165.1_ASM286016v1_genomic GENOME_ID: 150146 CONTIG_ID: 56
RHHN01000007.1
Brevibacillus agri strain NRRL NRS 1219 contig_7, whole genome shotgun sequence I
GENOME_ACCESSION: GCA_003710885.1_ASM371088v1_genomic GENOME_ID: 202321
CONTIG_ID: 115
RHHS01000035.1
Brevibacillus gelatini strain DSM 100115 contig_35, whole genome shotgun sequence I
GENOME_ACESSION: GCA_003710935.1_ASM371093v1 genomic GENOME_ID: 202324
CONTIG_ID: 28
AacCas12b
AapCas12b
BrCas12b

[0147] In certain embodiments, the CRISPR-Cas protein is a Cas12b from a thermostable species, for example Alicyclobacillus acidiphilus (Aap). Cas 12a proteins can be identified from similar organisms as identified in any of BROD_5090P4_Cas12b_sequences.txt. In certain embodiments, the thermostable CRISPR-Cas protein is a Cas13a. In an aspect, the Cas13a thermostable protein is from FIG. 1A of U.S. Provisional Application 62/967,408, filed Jan. 29, 2020, entitled “Novel CRISPR Enzymes and Systems” which were identified from stable anaerobic thermophilic methanogenic microbiomes fermenting switchgrass, supporting their thermostability. See, Liang et al., Biotechnol Biofuels 2018; 11: 243 doi: 10.1186/s13068-018-1238-1. Similarly, the 0J26742_10014101 clusters with the verified thermophilic sourced Cas13a sequences detailed in FIG. 1A of U.S. Provisional Application 62/967,408, filed Jan. 29, 2020, entitled “Novel CRISPR Enzymes and Systems”. The nucleic acid identified at loci 123519_10037894 was identified from a study focusing on 70° C. organism. In certain example embodiments, the Cas13 orthologue has at least two HEPN domains and at least 80% identity to a polypeptide encoded by the nucleic acid sequence 0123519_10037894 or0J26742_10014101.

[0148] Certain example embodiments disclosed herein provide are based on low-cost CRISPR-based diagnostic that enables single-molecule detection of DNA or RNA with single-nucleotide specificity (Gootenberg, 2018; Gootenberg, et al, Science. 2017 Apr. 28; 356(6336):438-442 (2017); Myhrvold, et al., Science 360,444-448 (2018)). Nucleic acid detection with SHERLOCK relies on the collateral activity of Type VI and Type V Cas proteins, such as Cas13 and Cas12, which unleashes promiscuous cleavage of reporters upon target detection (Gooteneberg et al., 2018)(Abudayyeh, et al., Science. 353(6299)(2016); East-Seletsky el al. Nature 538:270-273 (2016); Smargon et al. Mol Cell 65(4):618-630 (2017)). Certain embodiments disclosed herein, are capable of single-molecule detection in less than an hour and can be used for multiplexed target detection when using CRISPR enzymes with orthogonal cleavage preference, such as Cas13a from Leptotrichia wadei (LwaCas13a), Cas13b from Capnocytophaga canimorsus Cc5 (CcaCas13b), and Cas12a from Acidaminococcus sp. BV3L6 (AsCas12a); Alicyclobacillus acidiphilus (Aap) Cas 12b and Brevibacillus sp. SYSU G02855 (BrCas12b); (Gootenberg, 2018; Myhrvold et al. Science 360(6387):444-448 (2018); Gootenberg, 2017; Chen et al. Science 360(6387):436-439 (2018); Li et al. Cell Rep 25(12):3262-3272 (2018); Li et al. Nat Protoc 13(5):899-914 (2018)). Guide molecules used herein are designed using a model for high activity-based Cas guide selection for coronavirus would facilitate design of optimal diagnostic assays, especially in applications requiring high-activity guides like lateral flow detection, and enable guide RNA design for in vivo RNA targeting applications with Cas13 has also been detailed in U.S. Provisional Applications 62/818,702 filed Mar. 14, 2019, now PCT/US20/22795 and 62/890,555, filed Aug. 22, 2019, now PCT/US20/22795, both entitled CRISPR Effector System Based Multiplex Diagnostics, incorporated herein by reference in their entirety, and, in particular, Examples 1-4, Tables 1-8 and FIG. 4A of U.S. Provisional Application 62/890,555.

[0149] Cas proteins possessing non-specific nuclease collateral activity to cleave detectable reporters upon target recognition, providing sensitive and specific diagnostics, including single nucleotide variants, detection based on rRNA sequences, screening for drug resistance, monitoring microbe outbreaks, genetic perturbations, and screening of environmental samples, as described, for example, in PCT/US18/054472 filed Oct. 22, 2018 at [0183J-[0327J, incorporated herein by reference. Reference is made to WO 2017/219027, WO2018/107129, US20180298445, US 2018-0274017, US 2018-0305773, WO 2018/170340, U.S. application Ser. No. 15/922,837, filed Mar. 15, 2018 entitled “Devices for CRISPR Effector System Based Diagnostics”, PCT/US18/50091, filed Sep. 7, 2018 “Multi-Effector CRISPR Based Diagnostic Systems”, PCT/US18/66940 filed Dec. 20, 2018 entitled “CRISPR Effector System Based Multiplex Diagnostics”, PCT/US18/054472 filed Oct. 4, 2018 entitled “CRISPR Effector System Based Diagnostic”, U.S. Provisional 62/740,728 filed Oct. 3, 2018 entitled “CRISPR Effector System Based Diagnostics for Hemorrhagic Fever Detection”, U.S. Provisional 62/690,278 filed Jun. 26, 2018 and U.S. Provisional 62/767,059 filed Nov. 14, 2018 both entitled “CRISPR Double Nickase Based Amplification, Compositions, Systems and Methods”, U.S. Provisional 62/690,160 filed Jun. 26, 2018 and U.S. Pat. No. 62,767,077 filed Nov. 14, 2018, both entitled “CRISPR/CAS and Transposase Based Amplification Compositions, Systems, And Methods”, U.S. Provisional 62/690,257 filed Jun. 26, 2018 and 62/767,052 filed Nov. 14, 2018 both entitled “CRISPR Effector System Based Amplification Methods, Systems, And Diagnostics”, U.S. Provisional 62/767,076 filed Nov. 14, 2018 entitled “Multiplexing Highly Evolving Viral Variants With SHERLOCK” and 62/767,070 filed Nov. 14, 2018 entitled “Droplet SHERLOCK.” Reference is further made to WO2017/127807, WO2017/184786, WO 2017/184768, WO 2017/189308, WO 2018/035388, WO 2018/170333, WO 2018/191388, WO 2018/213708, WO 2019/005866, PCT/US18/67328 filed Dec. 21, 2018 entitled “Novel CRISPR Enzymes and Systems”, PCT/US18/67225 filed Dec. 21, 2018 entitled “Novel CRISPR Enzymes and Systems” and PCT/US18/67307 filed Dec. 21, 2018 entitled “Novel CRISPR Enzymes and Systems”, U.S. 62/712,809 filed Jul. 31, 2018 entitled “Novel CRISPR Enzymes and Systems”, U.S. 62/744,080 filed Oct. 10, 2018 entitled “Novel Cas12b Enzymes and Systems” and U.S. 62/751,196 filed Oct. 26 2018 entitled “Novel Cas12b Enzymes and Systems”, U.S. 715,640 filed Aug. 7, 2-18 entitled “Novel CRISPR Enzymes and Systems”, WO 2016/205711, U.S. Pat. No. 9,790,490, WO 2016/205749, WO 2016/205764, WO 2017/070605, WO 2017/106657, and WO 2016/149661, WO2018/035387, WO2018/194963, Cox DBT, et al., RNA editing with CRISPR-Cas13, Science. 2017 Nov. 24:358(6366):1019-1027; Gootenberg J S, et al., Multiplexed and portable nucleic acid detection platform with Cas13, Cas12a, and Csm6., Science. 2018 Apr. 27; 360(6387):439-444; Gootenberg J S, et al., Nucleic acid detection with CRISPR-Cas13a/C2c2., Science. 2017 Apr. 28; 356(6336):438-442; Abudayyeh 00, et al., RNA targeting with CRISPR-Cas13, Nature. 2017 Oct. 12; 550(7675):280-284; Smargon A A, et al., Cas13b Is a Type VI-B CRISPR-Associated RNA-Guided RNase Differentially Regulated by Accessory Proteins Csx27 and Csx28. Mol Cell. 2017 Feb. 16; 65(4):618-630.e7; Abudayyeh 00, et al., C2c2 is a single-component programmable RNA-guided RNA-targeting CRISPR effector, Science. 2016 Aug. 5; 353(6299):aaf5573; Yang L, et al., Engineering and optimising deaminase fusions for genome editing. Nat Commun. 2016 Nov. 2:7:13330, Myhrvold et al., Field deployable viral diagnostics using CRISPR-Cas13, Science 2018 360, 444-448, Shmakov et al. “Diversity and evolution of class 2 CRISPR-Cas systems,” Nat Rev Microbiol. 2017 15(3):169-182, each of which is incorporated herein by reference in its entirety.

[0150] In general, a CRISPR-Cas or CRISPR system as used herein and in documents, such as WO 2014/093622 (PCT/US2013/074667), refers collectively to transcripts and other elements involved in the expression of or directing the activity of CRISPR-associated (“Cas”) genes, including sequences encoding a Cas gene, a tracr (trans-activating CRISPR) sequence (e.g. tracrRNA or an active partial tracrRNA), a tracr-mate sequence (encompassing a “direct repeat” and a tracrRNA-processed partial direct repeat in the context of an endogenous CRISPR system), a guide sequence (also referred to as a “spacer” in the context of an endogenous CRISPR system), or “RNA(s)” as that term is herein used (e.g., RNA(s) to guide Cas, such as Cas9, e.g. CRISPR RNA and transactivating (tracr) RNA or a single guide RNA (sgRNA) (chimeric RNA)) or other sequences and transcripts from a CRISPR locus. In general, a CRISPR system is characterized by elements that promote the formation of a CRISPR complex at the site of a target sequence (also referred to as a protospacer in the context of an endogenous CRISPR system). When the CRISPR protein is a Cas13 protein, a tracrRNA is not required. Cas13 has been described in Abudayyeh et al. (2016) “C2c2 is a single-component programmable RNA-guided RNA-targeting CRISPR effector”; Science; DOI: 10.1126/science.aaf5573; and Shmakov et al. (2015) “Discovery and Functional Characterization of Diverse Class 2 CRISPR-Cas Systems”, Molecular Cell, DOI: dx.doi.org/10.1016/j.molcel.2015.10.008; which are incorporated herein in their entirety by reference. Cas13b has been described in Smargon et al. (2017) “Cas13b Is a Type VI-B CRISPR-Associated RNA-Guided RNases Differentially Regulated by Accessory Proteins Csx27 and Csx28,” Molecular Cell. 65, 1-13; dx.doi.org/10.1016/j.molcel.2016.12.023., which is incorporated herein in its entirety by reference.

[0151] In certain embodiments, protospacer flanking site, or protospacer flanking sequence (PFS) directs binding of the effector proteins (e.g Type VI) as disclosed herein to the target locus of interest. A PFS is a region that can affect the efficacy of Cas13a mediated targeting, and may be adjacent to the protospacer target in certain Cas13a proteins, while other orthologs do not require a specific PFS. In a preferred embodiment, the CRISPR effector protein may recognize a 3′ PFS. In certain embodiments, the CRISPR effector protein may recognize a 3′ PFS which is 5′H, wherein H is A, C or U. See, e.g. Abudayyeh, 2016. In certain embodiments, the effector protein may be Lepmoarichia shahii Cas13p, more preferably Leptotrichia shahii DSM 19757 Cas13, and the 3′ PFS is a 5′ H.

[0152] In the context of formation of a CRISPR complex, “target molecule” or “target sequence” or “target nucleic acid” refers to a molecule harboring a sequence, or a sequence to which a guide sequence is designed to have complementarity, where hybridization between a target sequence and a guide sequence promotes the formation of a CRISPR complex. A target sequence may comprise RNA polynucleotides. The term “target RNA” refers to an RNA polynucleotide being or comprising the target sequence. In other words, the target RNA may be an RNA polynucleotide or a part of an RNA polynucleotide to which a part of the gRNA, i.e., the guide sequence, is designed to have complementarity and to which the effector function mediated by the complex comprising CRISPR effector protein and a gRNA is to be directed. In some embodiments, a target sequence is located in the nucleus or cytoplasm of a cell. A target sequence may comprise DNA polynucleotides.

[0153] As such, a CRISPR system may comprise RNA-targeting effector proteins. A CRISPR system may comprise DNA-targeting effector proteins. In some embodiments, a CRISPR system may comprise a combination of RNA- and DNA-targeting effector proteins, or effector proteins that target both RNA and DNA.

### Other Exemplary Type VI Cas Proteins

[0154] In some embodiments, one or more elements of a nucleic acid-targeting system is derived from a particular organism comprising an endogenous CRISPR RNA-targeting system. In certain example embodiments, the effector protein CRISPR RNA-targeting system comprises at least one HEPN domain, including but not limited to the HEPN domains described herein, HEPN domains known in the art, and domains recognized to be HEPN domains by comparison to consensus sequence motifs. Several such domains are provided herein. In one non-limiting example, a consensus sequence can be derived from the sequences of Cas13a or Cas13b orthologs provided herein. In certain example embodiments, the effector protein comprises a single HEPN domain. In certain other example embodiments, the effector protein comprises two HEPN domains.

[0155] In one example embodiment, the effector protein comprises one or more HEPN domains comprising a RxxxxH motif sequence. The RxxxxH motif sequence can be, without limitation, from a HEPN domain described herein or a HEPN domain known in the art. RxxxxH motif sequences further include motif sequences created by combining portions of two or more HEPN domains. As noted, consensus sequences can be derived from the sequences of the orthologs disclosed in U.S. Provisional Patent Application 62/432,240 entitled “Novel CRISPR Enzymes and Systems,” U.S. Provisional Patent Application 62/471,710 entitled “Novel Type VI CRISPR Orthologs and Systems” filed on Mar. 15, 2017, and U.S. Provisional Patent Application entitled “Novel Type VI CRISPR Orthologs and Systems,” labeled as attorney docket number 47627-05-2133 and filed on Apr. 12, 2017.

[0156] In an embodiment of the invention, a HEPN domain comprises at least one RxxxxH motif comprising the sequence of R(N/H/K)X1X2X3H (SEQ ID NO:XX). In an embodiment of the invention, a HEPN domain comprises a RxxxxH motif comprising the sequence of R(N/H)X1X2X3H (SEQ ID NO:XX). In an embodiment of the invention, a HEPN domain comprises the sequence of R(N/K)X1X2X3H (SEQ ID NO:XX). In certain embodiments, X1 is R, S, D, E, Q, N, G, Y, or H. In certain embodiments, X2 is I, S, T, V, or L. In certain embodiments, X3 is L, F, N, Y, V, I, S, D, E, or A.

[0157] In particular embodiments, the Type VI RNA-targeting Cas enzyme is Cas13a. In other example embodiments, the Type VI RNA-targeting Cas enzyme is Cas13b. In certain embodiments, the Cas13b protein is from an organism of a genus selected from the group consisting of: Bergeyella, Prevotella, Porphyromonas, Bacterioides, Alistipes, Riemerella, Myroides, Capnocytophaga, Porphyromonas, Flavobacterium, Porphyromonas, Chryseobacterium, Paludibacter, Psychroflexus, Riemerella, Phaeodactylibacter, Sinomicrobium, Reichenbachiella.

[0158] In particular embodiments, the homologue or orthologue of a Type VI protein such as Cas13a as referred to herein has a sequence homology or identity of at least 30%, or at least 40%, or at least 50%, or at least 60%, or at least 70%, or at least 80%, more preferably at least 85%, even more preferably at least 90%, such as for instance at least 95% with a Type VI protein such as Cas13a (e.g., based on the wild-type sequence of any of Leptotrichia shahii Cas13a, Lachnospiraceae bacterium MA2020 Cas13a, Lachnospiraceae bacterium NK4A179 Cas13a, Clostridium aminophilum (DSM 10710) Cas13a, Carnobacterium gallinarum (DSM 4847) Cas13, Paludibacter propionicigenes (WB4) Cas13, Listeria weihenstephanensis (FSL R9-0317) Cas13, Listeriaceae bacterium (FSL M6-0635) Cas13, Listeria newyorkensis (FSL M6-0635) Cas13, Leptotrichia wadei (F0279) Cas13, Rhodobacter capsulatus (SB 1003) Cas13, Rhodobacter capsulatus (R121) Cas13, Rhodobacter capsulatus (DE442) Cas13, Leptotrichia wadei (Lw2) Cas13, or Listeria seeligeri Cas13). In further embodiments, the homologue or orthologue of a Type VI protein such as Cas13 as referred to herein has a sequence identity of at least 30%, or at least 40%, or at least 50%, or at least 60%, or at least 70%, or at least 80%, more preferably at least 85%, even more preferably at least 90%, such as for instance at least 95% with the wild type Cas13 (e.g., based on the wild-type sequence of any of Leptotrichia shahii Cas13, Lachnospiraceae bacterium MA2020 Cas13, Lachnospiraceae bacterium NK4A179 Cas13, Clostridium aminophilum (DSM 10710) Cas13, Carnobacterium gallinarum (DSM 4847) Cas13, Paludibacter propionicigenes (WB4) Cas13, Listeria weihenstephanensis (FSL R9-0317) Cas13, Listeriaceae bacterium (FSL M6-0635) Cas13, Listeria newyorkensis (FSL M6-0635) Cas13, Leptotrichia wadei (F0279) Cas13, Rhodobacter capsulatus (SB 1003) Cas13, Rhodobacter capsulatus (R121) Cas13, Rhodobacter capsulatus (DE442) Cas13, Leptotrichia wadei (Lw2) Cas13, or Listeria seeligeri Cas13).

[0159] In certain other example embodiments, the CRISPR system the effector protein is a Cas13 nuclease. The activity of Cas13 may depend on the presence of two HEPN domains. These have been shown to be RNase domains, i.e. nuclease (in particular an endonuclease) cutting RNA. Cas13a HEPN may also target DNA, or potentially DNA and/or RNA. On the basis that the HEPN domains of Cas13a are at least capable of binding to and, in their wild-type form, cutting RNA, then it is preferred that the Cas13a effector protein has RNase function. Regarding Cas13a CRISPR systems, reference is made to U.S. Provisional 62/351,662 filed on Jun. 17, 2016 and U.S. Provisional 62/376,377 filed on Aug. 17, 2016. Reference is also made to U.S. Provisional 62/351,803 filed on Jun. 17, 2016. Reference is also made to U.S. Provisional entitled “Novel Crispr Enzymes and Systems” filed Dec. 8, 2016 bearing Broad Institute No. 10035.PA4 and Attorney Docket No. 47627.03.2133. Reference is further made to East-Seletsky et al. “Two distinct RNase activities of CRISPR-C2c2 enable guide-RNA processing and RNA detection” Nature doi.10/1038/nature19802 and Abudayyeh et al. “C2c2 is a single-component programmable RNA-guided RNA targeting CRISPR effector” bioRxiv doi:10.1101/054742.

[0160] RNase function in CRISPR systems is known, for example mRNA targeting has been reported for certain type III CRISPR-Cas systems (Hale et al., 2014, Genes Dev, vol. 28, 2432-2443; Hale et al., 2009, Cell, vol. 139, 945-956; Peng et al., 2015, Nucleic acids research, vol. 43, 406-417) and provides significant advantages. In the Staphylococcus epidermis type III-A system, transcription across targets results in cleavage of the target DNA and its transcripts, mediated by independent active sites within the Cas10-Csm ribonucleoprotein effector protein complex (see, Samai et al., 2015, Cell, vol. 151, 1164-1174). A CRISPR-Cas system, composition or method targeting RNA via the present effector proteins is thus provided.

[0161] In an embodiment, the Cas protein may be a Cas13a ortholog of an organism of a genus which includes but is not limited to Leptotrichia, Listeria, Corynebacter, Sutterella, Legionella, Treponema, Filifactor, Eubacterium, Streptococcus, Lactobacillus, Mycoplasma, Bacteroides, Flaviivola, Flavobacterium, Sphaerochaeta, Azospirillum, Gluconacetobacter, Neisseria, Roseburia, Parvibaculum, Staphylococcus, Nitratifractor, Mycoplasma and Campylobacter. Species of organism of such a genus can be as otherwise herein discussed.

[0162] It will be appreciated that any of the functionalities described herein may be engineered into CRISPR enzymes from other orthologs, including chimeric enzymes comprising fragments from multiple orthologs. Examples of such orthologs are described elsewhere herein. Thus, chimeric enzymes may comprise fragments of CRISPR enzyme orthologs of an organism which includes but is not limited to Leptotrichia, Listeria, Corynebacter, Sutterella, Legionella, Treponema, Filifactor, Eubacterium, Streptococcus, Lactobacillus, Mycoplasma, Bacteroides, Flaviivola, Flavobacterium, Sphaerochaeta, Azospirillum, Gluconacetobacter, Neisseria, Roseburia, Parvibaculum, Staphylococcus, Nitratifractor, Mycoplasma and Campylobacter. A chimeric enzyme can comprise a first fragment and a second fragment, and the fragments can be of CRISPR enzyme orthologs of organisms of genera herein mentioned or of species herein mentioned; advantageously the fragments are from CRISPR enzyme orthologs of different species.

[0163] In embodiments, the Cas13a protein as referred to herein also encompasses a functional variant of Cas13a or a homologue or an orthologue thereof. A “functional variant” of a protein as used herein refers to a variant of such protein which retains at least partially the activity of that protein. Functional variants may include mutants (which may be insertion, deletion, or replacement mutants), including polymorphs, etc. Also included within functional variants are fusion products of such protein with another, usually unrelated, nucleic acid, protein, polypeptide or peptide. Functional variants may be naturally occurring or may be man-made. Advantageous embodiments can involve engineered or non-naturally occurring Type VI RNA-targeting effector protein.

[0164] In an embodiment, nucleic acid molecule(s) encoding the Cas13 or an ortholog or homolog thereof, may be codon-optimized for expression in a eukaryotic cell. A eukaryote can be as herein discussed. Nucleic acid molecule(s) can be engineered or non-naturally occurring.

[0165] In an embodiment, the Cas13a or an ortholog or homolog thereof, may comprise one or more mutations (and hence nucleic acid molecule(s) coding for same may have mutation(s). The mutations may be artificially introduced mutations and may include but are not limited to one or more mutations in a catalytic domain. Examples of catalytic domains with reference to a Cas9 enzyme may include but are not limited to RuvC I, RuvC I, RuvC III and HNH domains.

[0166] In an embodiment, the Cas13a or an ortholog or homolog thereof, may comprise one or more mutations. The mutations may be artificially introduced mutations and may include but are not limited to one or more mutations in a catalytic domain. Examples of catalytic domains with reference to a Cas enzyme may include but are not limited to HEPN domains.

[0167] In an embodiment, the Cas13a or an ortholog or homolog thereof, may be used as a generic nucleic acid binding protein with fusion to or being operably linked to a functional domain. Exemplary functional domains may include but are not limited to translational initiator, translational activator, translational repressor, nucleases, in particular ribonucleases, a spliceosome, beads, a light inducible/controllable domain or a chemically inducible/controllable domain.

[0168] In certain example embodiments, the Cas13a effector protein may be from an organism selected from the group consisting of; Leptotrichia, Listeria, Corynebacter, Sutterella, Legionella, Treponema, Filifactor, Eubacterium, Streptococcus, Lactobacillus, Mycoplasma, Bacteroides, Flaviivola, Flavobacterium, Sphaerochaeta, Azospirillum, Gluconacetobacter, Neisseria, Roseburia, Parvibaculum, Staphylococcus, Nitratifractor, Mycoplasma, and Campylobacter.

[0169] In certain embodiments, the effector protein may be a Listeria sp. Cas13p, preferably Listeria seeligeria Cas13p, more preferably Listeria seeligeria serovar 1/2b str. SLCC3954 Cas13p and the crRNA sequence may be 44 to 47 nucleotides in length, with a 5′ 29-nt direct repeat (DR) and a 15-nt to 18-nt spacer.

[0170] In certain embodiments, the effector protein may be a Leptotrichia sp. Cas13p, preferably Leptotrichia shahii Cas13p, more preferably Leptotrichia shahii DSM 19757 Cas13p and the crRNA sequence may be 42 to 58 nucleotides in length, with a 5′ direct repeat of at least 24 nt, such as a 5′ 24-28-nt direct repeat (DR) and a spacer of at least 14 nt, such as a 14-nt to 28-nt spacer, or a spacer of at least 18 nt, such as 19, 20, 21, 22, or more nt, such as 18-28, 19-28, 20-28, 21-28, or 22-28 nt.

[0171] In certain example embodiments, the effector protein may be a Leptotrichia sp., Leptotrichia wadei F0279, or a Listeria sp., preferably Listeria newyorkensis FSL M6-0635.

[0172] In certain example embodiments, the Cas13 effector proteins of the invention include, without limitation, the following 21 ortholog species (including multiple CRISPR loci. Leptotrichia shahii; Leptotrichia wadei (Lw2); Listeria seeligeri; Lachnospiraceae bacterium MA2020; Lachnospiraceae bacterium NK4A179; [Clostridium aminophilum DSM 10710; Carnobacterium gallinarum DSM 4847; Carnobacterium gallinarum DSM 4847 (second CRISPR Loci); Paludibacter propionicigenes WB4; Listeria weihenstephanensis FSL R9-0317; Listeriaceae bacterium FSL M6-0635; Leptotrichia wadei F0279; Rhodobacter capsulatus SB 1003; Rhodobacter capsulatus R121; Rhodobacter capsulatus DE442; Leptotrichia buccalis C-1013-b; Herbinix hemicellulosilytica; [Eubacterium reciale; Euhacteriaceae bacterium CHKCI004; Blautia sp. Marseille-P2398; and Leptotrichia sp. oral taxon 879 str. F0557. Twelve (12) further non-limiting examples are: Lachnospiraceae bacterium NK4A144; Chloroflexus aggregans; Demequina aurantiaca; Thalassospira sp. TSL5-1; Pseudobutyrivibrio sp. OR37; Butyrivibrio sp. YAB3001; Blautia sp. Marseille-P2398; Leptotrichia sp. Marseille-P3007; Bacteroides ihuae; Porphyromonadaceae bacterium KH3CP3RA; Listeria riparia; and Insolitispirillum peregrinum.

[0173] In certain embodiments, the Cas13 protein according to the invention is or is derived from one of the orthologues as described, or is a chimeric protein of two or more of the orthologues as described below, or is a mutant or variant of one of the orthologues as described (or a chimeric mutant or variant), including dead Cas13, split Cas13, destabilized Cas13, etc. as defined herein elsewhere, with or without fusion with a heterologous/functional domain.

[0174] In certain example embodiments, the Cas13a effector protein is from an organism of a genus selected from the group consisting of: Leptotrichia, Listeria, Corynebacter, Sutterella, Legionella, Treponema, Filifactor, Eubacterium, Streptococcus, Lactobacillus, Mycoplasma, Bacteroides, Flaviivola, Flavobacterium, Sphaerochaeta, Azospirillum, Gluconacetobacter Neisseria, Roseburia, Parvibaculum, Staphylococcus, Nitratifractor, Mycoplasma, Campylobacter, and Lachnospira.

[0175] In an embodiment of the invention, there is provided an effector protein which comprises an amino acid sequence having at least 80% sequence homology to the wild-type sequence of any of Leptotrichia shahii Cas13, Lachnospiraceae bacterium MA2020 Cas13, Lachnospiraceae bacterium NK4A179 Cas13, Clostridium aminophilum (DSM 10710) Cas13, Carnobacterium gallinarum (DSM 4847) Cas13, Paludibacter propionicigenes (WB4) Cas13, Listeria weihenstephanensis (FSL R9-0317) Cas13, Listeriaceae bacterium (FSL M6-0635) Cas13, Listeria newyorkensis (FSL M6-0635) Cas13, Leptotrichia wadei (F0279) Cas13, Rhodobacter capsulatus (SB 1003) Cas13, Rhodobacter capsulatus (R121) Cas13, Rhodobacter capsulatus (DE442) Cas13, Leptotrichia wadei (Lw2) Cas13, or Listeria seeligeri Cas13. According to the invention, a consensus sequence can be generated from multiple Cas13 orthologs, which can assist in locating conserved amino acid residues, and motifs, including but not limited to catalytic residues and HEPN motifs in Cas13 orthologs that mediate Cas13 function. One such consensus sequence, generated from selected orthologs.

[0176] In an embodiment of the invention, the effector protein comprises an amino acid sequence having at least 80% sequence homology to a Type VI effector protein consensus sequence including but not limited to a consensus sequence described herein.

[0177] In another non-limiting example, a sequence alignment tool to assist generation of a consensus sequence and identification of conserved residues is the MUSCLE alignment tool (www.ebi.ac.uk/Tools/msa/muscle/). For example, using MUSCLE, the following amino acid locations conserved among Cas13a orthologs can be identified in Leptotrichia wadei Cas13a:K2; K5; V6; E301; L331; 1335; N341; G351; K352; E375; L392; L396; D403; F446; 1466; I470; R474 (HEPN); H475; H479 (HEPN), E508; P556; L561; I595; Y596; F600; Y669; I673; F681; L685; Y761; L676; L779; Y782; L836; D847; Y863; L869; 1872; K879; I933; L954; I958; R961; Y965; E970; R971; D972; R1046 (HEPN), H1051 (HEPN), Y1075; D1076; K1078; K1080; 11083; 11090.

[0178] In certain example embodiments, the RNA-targeting effector protein is a Type VI-B effector protein, such as Cas13b and Group 29 or Group 30 proteins. In certain example embodiments, the RNA-targeting effector protein comprises one or more HEPN domains. In certain example embodiments, the RNA-targeting effector protein comprises a C-terminal HEPN domain, a N-terminal HEPN domain, or both. Regarding example Type VI-B effector proteins that may be used in the context of this invention, reference is made to U.S. application Ser. No. 15/331,792 entitled “Novel CRISPR Enzymes and Systems” and filed Oct. 21, 2016, International Patent Application No. PCT/US2016/058302 entitled “Novel CRISPR Enzymes and Systems”, and filed Oct. 21, 2016, and Smargon et al. “Cas13b is a Type VI-B CRISPR-associated RNA-Guided RNase differentially regulated by accessory proteins Csx27 and Csx28” Molecular Cell, 65, 1-13 (2017); dx.doi.org/10.1016/j.molcel.2016.12.023. In certain example embodiments, the Cas13b effector protein is, or comprises an amino acid sequence having at least 80% sequence homology to any of the sequences of Table 1 of International Patent Application No. PCT/US2016/058302. Further reference is made to example Type VI-B effector proteins of U.S. Provisional Application Nos. 62/471,710, 62/566,829 and International Patent Publication No. WO2018/1703333, entitled “Novel Cas13b Orthologues CRISPR Enzymes and System”. In particular embodiments, the Cas13b enzyme is derived from Bergeyella zoohelcum. In certain other example embodiments, the effector protein is, or comprises an amino acid sequence having at least 80% sequence homology to any of the sequences listed in Tables 1A or 1B of International Patent Publication No. WO2018/1703333, specifically incorporated herein by reference. In certain embodiments, the Cas 13b effector protein is, or comprises an amino acid sequence having at least 80% sequence homology to any of the polypeptides in U.S. Provisional Applications 62/484,791, 62/561,662, 62/568,129 or International Patent Publication WO2018/191388, all entitled “Novel Type VI CRISPR Orthologs and Systems,” incorporated herein by reference. In certain embodiments, the Cas13b effector protein is, or comprises an amino acid sequence having at least 80% sequence homology to a polypeptide as set forth in FIG. 1 of International Patent Publication WO2018/191388, specifically incorporated herein by reference. In an aspect, the Cas13b protein is selected from the group consisting of Porphyromonas gulae Cas13b (accession number WP 039434803), Prevotella sp. P5-125 Cas 13b (accession number WP 044065294), Porphyromonas gingivalis Cas 13b (accession number WP 053444417), Porphyromonas sp. COT-052 OH4946 Cas 13b (accession number WP 039428968), Bacteroides pyogenes Cas 13b (accession number WP 034542281), Riemerella anatipestifer Cas13b (accession number WP 004919755).

[0179] In certain example embodiments, the RNA-targeting effector protein is a Cas13c effector protein as disclosed in U.S. Provisional Patent Application No. 62/525,165 filed Jun. 26, 2017, and International Patent Publication No. WO2018/035250 filed Aug. 16, 2017. In certain example embodiments, the Cas13c protein may be from an organism of a genus such as Fusobacterium or Anaerosalibacter. Example wildtype orthologue sequences of Cas13c are: EHO19081, WP_094899336, WP_040490876, WP_047396607, WP_035935671, WP_035906563, WP_042678931, WP_062627846, WP_005959231, WP_027128616, WP_062624740, WP_096402050.

[0180] In certain example embodiments, the Cas13 protein may be selected from any of the following: Cas13a: Leptotrichia shahii, Leptotrichia wadei (Lw2), Listeria seeligeri, Lachnospiraceae bacterium MA2020, Lachnospiraceae bacterium NK4A179, [ClostridiumJ aminophilum DSM 10710, Carnobacterium gallinarum DSM 4847, Carnobacterium gallinarum DSM 4847, Paludibacter propionicigenes WB4, Listeria weihenstephanensis FSL R9-0317, Listeriaceae bacterium FSL M6-0635, Leptotrichia wadei F0279, Rhodobacter capsulatus SB 1003, Rhodobacter capsulatus R121, Rhodobacter capsulatus DE442, Leptotrichia buccalis C-1013-b, Herbinix hemicellulosilytica, [EubacteriumJ rectale, Eubacteriaceae bacterium CHKCI004, Blautia sp. Marseille-P2398, Leptotrichia sp. oral taxon 879 str. F0557; Cas 13b: Bergeyella zoohelcum, Prevotella intermedia, Prevotella buccae, Alistipes sp. ZOR0009, Prevotella sp. MA2016, Riemerella anatipestifer, Prevotella aurantiaca, Prevotella saccharolytica, Prevotella intermedia, Capnocytophaga canimorsus, Porphyromonas gulae, Prevotella sp. P5-125, Flavobacterium branchiophilum, Porphyromonas gingivalis, Prevolella intermedia; Cas13c: Fusobacterium necrophorum subsp. funduliforme ATCC 51357 contig00003, Fusobacterium necrophorum DJ-2 contig0065, whole genome shotgun sequence, Fusohacterium necrophorum BFTR-1 contig0068, Fusobacterium necrophorum subsp. funduliforme 1_1_36S cont1.14, Fusobacterium perfoetens ATCC 29250 T364DRAFT_scaffold00009.9_C, Fusobacterium ulcerans ATCC 49185 cont2.38, Anaerosalibacter sp. ND1 genome assembly Anaerosalibacter massiliensis ND1.

[0181] In certain example embodiments the orthologue is a Cas13a, Cas13b, Cas13c, or Cas13d. In certain example embodiments the orthologue is a Cas13 orthologue. In certain example embodiments, the Cas13a orthologues is derived from Herbinix hemicellulosilytica. In certainexample embodiments, the Cas13a orthologue is derived from Herbinix hemicellulosilytica DSM 29228. In certain example embodiments, the Cas 13 orthologue is defined by SEQ ID NO: 75 of International Publication No. WO 2017/219027. In certain example embodiments, the Cas 13 orthologue is defined by a sequence from FIG. 1A of U.S. Provisional Application 62/967,408, filed Jan. 29, 2020, entitled “Novel CRISPR Enzymes and Systems” (loci QNRW01000010.1, OWPA01000389.1, 0153798_10014618, 0153978_10005171, and 0153798_10004687). In certain example embodiments, the Cas 13a orthologue is encoded by the nucleic acid sequence 0123519_10037894 or 0J26742_10014101. In certain other example embodiments, the Cas13 orthologue has at least 80% sequence identity to SEQ ID NO: 75 of International Publication No. WO 2017/219027. In certain other example embodiments, the Cas13 orthologue has at least 80% sequence identity to sequence from FIG. 1A of U.S. Provisional Application 62/967,408, filed Jan. 29, 2020, entitled “Novel CRISPR Enzymes and Systems” (loci QNRW01000010.1, OWPA01000389.1, 0153798_10014618, 0153978_10005171, and 0153798_10004687), incorporated herein by reference. In certain other example embodiments, the Cas13 orthologue has at least 80% sequence identity to a polypeptide encoded by the nucleic acid sequence 0123519_10037894 or 0J26742_10014101. In certain example embodiments, the Cas13 orthologue has at least one HEPN domain and at least 80% identity to SEQ ID NO: 75 of International Publication No. WO 2017/219027. In certain example embodiments, the Cas13 orthologue has at least one HEPN domain and at least 80% identity to sequence from loci QNRW01000010.1,
[0182] OWPA01000389.1, 0153798_10014618, 0153978_10005171, and 0153798_10004687. In certain example embodiments, the Cas13 orthologue has at least one HEPN domain and at least 80% identity to a polypeptide encoded by the nucleic acid sequence of 0123519_10037894 or 0J26742_10014101 in BROD-4880P2_Cas13a_sequences.txt. In another example embodiment, the Cas13 orthologue has at least two HEPN domains and at least 80% identity to SEQ ID NO: 75 of International Publication No. WO 2017/219027. In another example embodiment, the Cas13 orthologue has at least two HEPN domains and at least 80% identity to sequence from FIG. 1A of U.S. Provisional Application 62/967,408, filed Jan. 29, 2020, entitled “Novel CRISPR Enzymes and Systems” loci QNRW01000010.1, OWPA01000389.1, 0153798_10014618, 0153978_10005171, and 0153798_10004687. The Cas13a thermostable proteins of FIG. 1A of U.S. Provisional Application 62/967,408, filed Jan. 29, 2020, entitled “Novel CRISPR Enzymes and Systems” were identified from stable anaerobic thermophilic methanogenic microbiomes fermenting switchgrass, supporting their thermostability. See, Liang et al., Biotechnol Biofuels 2018; 11: 243 doi: 10.1186/s13068-018-1238-1. Similarly, the 0J26742_10014101 clusters with the verified thermophilic sourced Cas13a sequences detailed in FIG. 1A of U.S. Provisional Application 62/967,408, filed Jan. 29, 2020, entitled “Novel CRISPR Enzymes and Systems”. The nucleic acid identified at loci 123519_10037894 was identified from a study focusing on 70° C. organism. In certain example embodiments, the Cas13 orthologue has at least two HEPN domains and at least 80% identity to a polypeptide encoded by the nucleic acid sequence 0123519_10037894 or 0J26742_10014101. Accordingly, a person of ordinary skill in the art may use characteristics of the above identified orthologs to select other suitable thermostable orthologues from those disclosed herein.

### Other Example Type V Cas Proteins

[0183] In certain example embodiments, the assays may comprise a DNA-targeting effector protein. In certain example embodiments, the assays may comprise multiple DNA-targeting effectors or one or more orthologs in combination with one or more RNA-targeting effectors. In certain example embodiments, the DNA targeting are Type V Cas proteins, such as Cas12 proteins. In certain other example embodiments, the Cas12 proteins are Cas12a, Cas12b, Cas12c, Cas12d, Cas12e, Cas12g, or a combination thereof.

### Cpf1 Orthologs

[0184] The present invention encompasses the use of a Cpf1 effector protein, derived from a Cpf1 locus denoted as subtype V-A. Herein such effector proteins are also referred to as “Cpf1p”, e.g., a Cpf1 protein (and such effector protein or Cpf1 protein or protein derived from a Cpf1 locus is also called “CRISPR enzyme”). Presently, the subtype V-A loci encompasses cas1, cas2, a distinct gene denoted cpf1 and a CRISPR array. Cpf1(CRISPR-associated protein Cpf1, subtype PREFRAN) is a large protein (about 1300 amino acids) that contains a RuvC-like nuclease domain homologous to the corresponding domain of Cas9 along with a counterpart to the characteristic arginine-rich cluster of Cas9. However, Cpf1 lacks the HNH nuclease domain that is present in all Cas9 proteins, and the RuvC-like domain is contiguous in the Cpf1 sequence, in contrast to Cas9 where it contains long inserts including the HNH domain. Accordingly, in particular embodiments, the CRISPR-Cas enzyme comprises only a RuvC-like nuclease domain.

[0185] The programmability, specificity, and collateral activity of the RNA-guided Cpf1 also make it an ideal switchable nuclease for non-specific cleavage of nucleic acids. In one embodiment, a Cpf1 system is engineered to provide and take advantage of collateral non-specific cleavage of RNA. In another embodiment, a Cpf1 system is engineered to provide and take advantage of collateral non-specific cleavage of ssDNA. Accordingly, engineered Cpf1 systems provide platforms for nucleic acid detection and transcriptome manipulation. Cpf1 is developed for use as a mammalian transcript knockdown and binding tool. Cpf1 is capable of robust collateral cleavage of RNA and ssDNA when activated by sequence-specific targeted DNA binding.

[0186] Homologs and orthologs may be identified by homology modelling (see, e.g., Greer, Science vol. 228 (1985) 1055, and Blundell et al. Eur J Biochem vol 172 (1988), 513) or “structural BLAST” (Dey F, Cliff Zhang Q, Petrey D, Honig B. Toward a “structural BLAST”: using structural relationships to infer function. Protein Sci. 2013 April; 22(4).359-66. doi: 10.1002/pro.2225.). See also Shmakov et al. (2015) for application in the field of CRISPR-Cas loci. Homologous proteins may but need not be structurally related, or are only partially structurally related. The Cpf1 gene is found in several diverse bacterial genomes, typically in the same locus with cas1, cas2, and cas4 genes and a CRISPR cassette (for example, FNFX1_1431-FNFX1_1428 of Francisella cf. novicida Fxl). In particular embodiments, the effector protein is a Cpf1 effector protein from an organism from a genus comprising Streptococcus, Campylobacter, Nitratifractor, Staphylococcus, Parvibaculum, Roseburia, Neisseria, Gluconacetobacter, Azospirillum, Sphaerochaeta, Lactobacillus, Eubacterium, Corynebacter, Carnobacterium, Rhodobacter, Listeria, Paludibacter, Clostridium, Lachnospiraceae, Clostridiaridium, Leptotrichia, Francisella, Legionella, Alicyclobacillus, Methanomethyophilus, Porphyromonas, Prevotella, Bacteroidetes, Helcococcus, Letospira, Desulfovibrio, Desulfonatronum, Opitutaceae, Tuberibacillus, Bacillus, Brevibacilus, Methylobacterium or Acidaminococcus.

[0187] In further particular embodiments, the Cpf1 effector protein is from an organism selected from S. mutans, S. agalactiae, S. equisimilis, S. sanguinis, S. pneumonia; C. jejuni, C. coli; N. salsuginis, N. tergarcus; S. auricularis, S. carnosus; N. meningitides, N. gonorrhoeae; L. monocytogenes, L. ivanovii; C. botulinum, C. difficile, C. tetani, C. sordellii.

[0188] The effector protein may comprise a chimeric effector protein comprising a first fragment from a first effector protein (e.g., a Cpf1) ortholog and a second fragment from a second effector (e.g., a Cpf1) protein ortholog, and wherein the first and second effector protein orthologs are different. At least one of the first and second effector protein (e.g., a Cpf1) orthologs may comprise an effector protein (e.g., a Cpf1) from an organism comprising Streptococcus, Campylobacter, Nitratifractor, Staphylococcus, Parvibaculum, Roseburia, Neisseria, Gluconacetobacter, Azospirillum, Sphaerochaeta, Lactobacillus, Eubacterium, Corynebacter, Carnobacterium, Rhodobacter, Listeria, Paludibacter, Clostridium, Lachnospiraceae, Clostridiaridium, Leptotrichia, Francisella, Legionella, Alicyclobacillus, Methanomethyophilus, Porphyromonas, Prevotella, Bacteroidetes, Helcococcus, Letospira, Desulfovibrio, Desulfonatronum, Opitutaceae, Tuberibacillus, Bacillus, Brevibacilus, Methylobacterium or Acidaminococcus; e.g., a chimeric effector protein comprising a first fragment and a second fragment wherein each of the first and second fragments is selected from a Cpf1 of an organism comprising Streptococcus, Campylobacter, Nitratifractor, Staphylococcus, Parvibaculum, Roseburia, Neisseria, Gluconacetobacter, Azospirillum, Sphaerochaeta, Lactobacillus, Eubacterium, Corynebacter, Carnobacterium, Rhodobacter, Listeria, Paludibacter, Clostridium, Lachnospiraceae, Clostridiaridium, Leptotrichia, Francisella, Legionella, Alicyclobacillus, Methanomethyophilus, Porphyromonas, Prevotella, Bacteroidetes, Helcococcus, Letospira, Desulfovibrio, Desulfonatronum, Opitutaceae, Tuberibacillus, Bacillus, Brevibacilus, Methylobacterium or Acidaminococcus wherein the first and second fragments are not from the same bacteria; for instance a chimeric effector protein comprising a first fragment and a second fragment wherein each of the first and second fragments is selected from a Cpf1 of S. mutans, S. agalactiae, S. equisimilis, S. sanguinis, S. pneumonia; C. jejuni, C. coli;

N. salsuginis, N. tergarcus; S. auricularis, S. carnosus; N. meningitides, N. gonorrhoeae; L. monocytogenes, L. ivanovii; C. botulinum, C. difficile, C. tetani, C. sordellii; Francisella tularensis 1, Prevotella albensis, Lachnospiraceae bacterium MC2017 1, Butyrivibrio proteoclasticus, Peregrinibacteria bacterium GW2011_GWA2_33_10, Parcubacteria bacterium GW2011_GWC2_44_17, Smithella sp. SCADC, Acidaminococcus sp. BV3L6, Lachnospiraceae bacterium MA2020, Candidatus Methanoplasma termitum, Eubacterium eligens, Moraxella bovoculi 237, Leptospira inadai, Lachnospiraceae bacterium ND2006, Porphyromonas crevioricanis 3, Prevotella disiens and Porphyromonas macacae, wherein the first and second fragments are not from the same bacteria. In a more preferred embodiment, the Cpf1p is derived from a bacterial species selected from Francisella tularensis 1, Prevotella albensis, Lachnospiraceae bacterium MC2017 1, Butyrivibrio proteoclasticus, Peregrinibacteria bacterium GW2011_GWA2_33_10, Parcubacteria bacterium GW2011_GWC2_44_17, Smithella sp. SCADC, Acidaminococcus sp. BV3L6, Lachnospiraceae bacterium MA2020, Candidatus Methanoplasma termitum, Eubacterium eligens, Moraxella bovoculi 237, Leptospira inadai, Lachnospiraceae bacterium ND2006, Porphyromonas crevioricanis 3, Prevotella disiens and Porphyromonas macacae. In certain embodiments, the Cpf1p is derived from a bacterial species selected from Acidaminococcus sp. BV3L6, Lachnospiraceae bacterium MA2020. In certain embodiments, the effector protein is derived from a subspecies of Francisella tularensis 1, including but not limited to Francisella tularensis subsp. Novicida.

[0189] In some embodiments, the Cpf1p is derived from an organism from the genus of Eubacterium. In some embodiments, the CRISPR effector protein is a Cpf1 protein derived from an organism from the bacterial species of Eubacterium rectale. In some embodiments, the amino acid sequence of the Cpf1 effector protein corresponds to NCBI Reference Sequence WP_055225123.1, NCBI Reference Sequence WP_055237260.1, NCBI Reference Sequence WP_055272206.1, or GenBank ID OLA16049.1. In some embodiments, the Cpf1 effector protein has a sequence homology or sequence identity of at least 60%, more particularly at least 70, such as at least 80%, more preferably at least 85%, even more preferably at least 90%, such as for instance at least 95%, with NCBI Reference Sequence WP_055225123.1, NCBI Reference Sequence WP_055237260.1, NCBI Reference Sequence WP_055272206.1, or GenBank ID OLA16049.1. The skilled person will understand that this includes truncated forms of the Cpf1 protein whereby the sequence identity is determined over the length of the truncated form. In some embodiments, the Cpf1 effector recognizes the PAM sequence of TTTN or CTTN.

[0190] In particular embodiments, the homologue or orthologue of Cpf1 as referred to herein has a sequence homology or identity of at least 80/6, more preferably at least 85%, even more preferably at least 90%, such as for instance at least 95% with Cpf1. In further embodiments, the homologue or orthologue of Cpf1 as referred to herein has a sequence identity of at least 80%, more preferably at least 85%, even more preferably at least 90%, such as for instance at least 95% with the wild type Cpf1. Where the Cpf1 has one or more mutations (mutated), the homologue or orthologue of said Cpf1 as referred to herein has a sequence identity of at least 80%, more preferably at least 85%, even more preferably at least 90%, such as for instance at least 95% with the mutated Cpf1.

[0191] In an embodiment, the Cpf1 protein may be an ortholog of an organism of a genus which includes, but is not limited to Acidaminococcus sp, Lachnospiraceae bacterium or Moraxella bovoculi; in particular embodiments, the type V Cas protein may be an ortholog of an organism of a species which includes, but is not limited to Acidaminococcus sp. BV3L6; Lachnospiraceae bacterium ND2006 (LbCpf1) or Moraxella bovoculi 237. In particular embodiments, the homologue or orthologue of Cpf1 as referred to herein has a sequence homology or identity of at least 80%, more preferably at least 85%, even more preferably at least 90%, such as for instance at least 95% with one or more of the Cpf1 sequences disclosed herein. In further embodiments, the homologue or orthologue of Cpf as referred to herein has a sequence identity of at least 80%, more preferably at least 85%, even more preferably at least 90°/%, such as for instance at least 95% with the wild type FnCpf1, AsCpf1 or LbCpf1. The skilled person will understand that this includes truncated forms of the Cpf1 protein whereby the sequence identity is determined over the length of the truncated form. In certain of the following, Cpf1 amino acids are followed by nuclear localization signals (NLS) (italics), a glycine-serine (GS) linker, and 3×HA tag. Further Cpf1 orthologs include NCBI WP_055225123.1, NCBI WP_055237260.1, NCBI WP_055272206.1, and GenBank OLA16049.1.

### C2c1 Orthologs

[0192] The present invention encompasses the use of a C2c1 effector proteins, derived from a C2c1 locus denoted as subtype V-B. Herein such effector proteins are also referred to as “C2c1p”, e.g., a C2c1 protein (and such effector protein or C2c1 protein or protein derived from a C2c1 locus is also called “CRISPR enzyme”). Presently, the subtype V-B loci encompasses cas1-Cas4 fusion, cas2, a distinct gene denoted C2c1 and a CRISPR array. C2c1 (CRISPR-associated protein C2c1) is a large protein (about 1100-1300 amino acids) that contains a RuvC-like nuclease domain homologous to the corresponding domain of Cas9 along with a counterpart to the characteristic arginine-rich cluster of Cas9. However, C2c1 lacks the HNH nuclease domain that is present in all Cas9 proteins, and the RuvC-like domain is contiguous in the C2c1 sequence, in contrast to Cas9 where it contains long inserts including the HNH domain. Accordingly, in particular embodiments, the CRISPR-Cas enzyme comprises only a RuvC-like nuclease domain.

[0193] The programmability, specificity, and collateral activity of the RNA-guided C2c1 also make it an ideal switchable nuclease for non-specific cleavage of nucleic acids. In one embodiment, a C2c1 system is engineered to provide and take advantage of collateral non-specific cleavage of RNA. In another embodiment, a C2c1 system is engineered to provide and take advantage of collateral non-specific cleavage of ssDNA. Accordingly, engineered C2c1 systems provide platforms for nucleic acid detection and transcriptome manipulation, and inducing cell death. C2c1 is developed for use as a mammalian transcript knockdown and binding tool. C2c1 is capable of robust collateral cleavage of RNA and ssDNA when activated by sequence-specific targeted DNA binding.

[0194] In certain embodiments, C2c1 is provided or expressed in an in vitro system or in a cell, transiently or stably, and targeted or triggered to non-specifically cleave cellular nucleic acids. In one embodiment, C2c1 is engineered to knock down ssDNA, for example viral ssDNA. In another embodiment, C2c1 is engineered to knock down RNA. The system can be devised such that the knockdown is dependent on a target DNA present in the cell or in vitro system, or triggered by the addition of a target nucleic acid to the system or cell.

[0195] C2c1 (also known as Cas12b) proteins are RNA guided nucleases. In certain embodiments, the Cas protein may comprise at least 80% sequence identity to a polypeptide as described in International Patent Publication WO 2016/205749 at FIG. 17-21, FIG. 41A-41M, 44A-44E, incorporated herein by reference. Its cleavage relies on a tracr RNA to recruit a guide RNA comprising a guide sequence and a direct repeat, where the guide sequence hybridizes with the target nucleotide sequence to form a DNA/RNA heteroduplex. Based on current studies, C2c1 nuclease activity also requires relies on recognition of PAM sequence. C2c1 PAM sequences are T-rich sequences. In some embodiments, the PAM sequence is 5′ TTN 3′ or 5′ ATTN 3′, wherein N is any nucleotide. In a particular embodiment, the PAM sequence is 5′ TTC 3′. In a particular embodiment, the PAM is in the sequence of Plasmodium falciparum.

[0196] In particular embodiments, the effector protein is a C2c1 effector protein from an organism from a genus comprising Alicyclobacillus, Desulfovibrio, Desulfonatronum, Opitutaceae, Tuberibacillus, Bacillus, Brevibacillus, Candidatus, Desulfatirhabdium, Citrobacter, Elusimicrobia, Methylobacterium, Omnitrophica, Phycisphaerae, Planctomycetes, Spirochaetes, and Verrucomicrobiaceae.

[0197] In further particular embodiments, the C2c1 effector protein is from a species selected from Alicyclobacillus acidoterrestris (e.g., ATCC 49025), Alicyclobacillus contaminans (e.g., DSM 17975), Alicyclobacillus macrosporangiidus (e.g. DSM 17980), Bacillus hisashii strain C4, Candidatus Lindowbacteria bacterium RIFCSPLOWO2, Desulfovibrio inopinatus (e.g., DSM 10711), Desulfonatronum thiodismutans (e.g., strain MLF-1), Elusimicrobia bacterium RIFOXYA12, Omnitrophica WOR_2 bacterium RIFCSPHIGHO2, Opitutaceae bacterium TAV5, Phycisphaerae bacterium ST-NAGAB-D1, Planctomycetes bacterium RBG_13_46_10, Spirochaetes bacterium GWB1_27_13, Verrucomicrobiaceae bacterium UBA2429, Tuberibacillus calidus (e.g., DSM 17572), Bacillus thermoamylovorans (e.g., strain B4166), Brevibacillus sp. CF112, Bacillus sp. NSP2.1, Desulfatirhabdium butyrativorans (e.g., DSM 18734), Alicyclobacillus herbarius (e.g., DSM 13609), Citrobacter freundii (e.g., ATCC 8090), Brevibacillus agri (e.g., BAB-2500), Methylobacterium nodulans (e.g., ORS 2060).

[0198] In one aspect, the CRISPR-Cas protein is a Cas12b from Table 2A or Table 2B. In certain embodiments, the CRISPR-Cas protein is a Cas12b from a thermostable species, for example Alicyclobacillus acidiphilus (AapCas12b). When the Aap protein is utilized, a related guide can be used, for example from the same or another Alicyclobacillus species, e.g. Alicyclobacillus acidoterrestrus (AacCas12b). In an aspect, the guide comprises at least 95%, 96%, 97% or more sequence identity to the DR and/or the tracr sequence from Aac. In certain embodiments, the AapCas12b protein comprises a sequence with 80%, 85%, 90%, 95% identity to, or consisting of the sequence:

MAVKSMKVKLRLDNMPEIRAGLWKLHTEVNAGVRYYTEWLSLLRQENLYR
RSPNGDGEQECYKTAEECKAELLERLRARQVENGHCGPAGSDDELLQLAR
QLYELLVPQAIGAKGDAQQIARKFLSPLADKDAVGGLGIAKAGNKPRWVR
MREAGEPGWEEEKAKAEARKSTDRTADVLRALADFGLKPLMRVYTDSDMS
SVQWKPLRKGQAVRTWDRDMFQQAIERMMSWESWNQRVGEAYAKLVEQKS
RFEQKNFVGQEHLVQLVNQLQQDMKEASHGLESKEQTAHYLTGRALRGSD
KVFEKWEKLDPDAPFDLYDTEIKNVQRRNTRRFGSHDLFAKLAEPKYQAL
WREDASFLTRYAVYNSIVRKLNHAKMFATFTLPDATAHPIWTRFDKLGGN
LHQYTFLFNEFGEGRHAIRFQKLLTVEDGVAKEVDDVTVPISMSAQLDDL
LPRDPHELVALYFQDYGAEQHLAGEFGGAKIQYRRDQLNHLHARRGARDV
YLNLSVRVQSQSEARGERRPPYAAVFRLVGDNHRAFVHEDKLSDYLAEHP
DDGKLGSEGLLSGLRVMSVDLGLRTSASISVFRVARKDELKPNSEGRVPF
CFPIEGNENLVAVHERSQLLKLPGETESKDLRAIREERQRTLRQLRTQLA
YLRLLVRCGSEDVGRRERSWAKLIEQPMDANQMTPDWREAFEDELQKLKS
LYGICGDREWTEAVYESVRRVWRHMGKQVRDWRKDVRSGERPKIRGYQKD
VVGGNSIEQIEYLERQYKFLKSWSFFGKVSGQVIRAEKGSRFAITLREHI
DHAKEDRLKKLADRIIMEALGYVYALDDERGKGKWVAKYPPCQLILLEEL
SEYQFNNDRPPSENNQLMQWSHRGVFQELLNQAQVHDLLVGTMYAAFSSR
FDARTGAPGIRCRRVPARCAREQNPEPFPWWLNKFVAEHKLDGCPLRADD
LIPTGEGEFFVSPFSAEEGDFHQIHADLNAAQNLQRRLWSDFDISQIRLR
CDWGEVDGEPVLIPRTTGKRTADSYGNKVFYTKTGVTYYERERGKKRRKV
FAQEELSEEEAELLVEADEAREKSVVLMRDPSGIINRGDWTRQKEFWSMV
NQRIEGYLVKQIRSRVRLQESACENTGDI*.

[0199] In an aspect, the CRISPR-Cas protein is a BrCas12b. In certain embodiments, the BrCas12b protein comprises a sequence with 80%, 85%, 90%, 95% identity to, or consisting of the sequence:

MPVRSFKVKLVTRSGDAEHMLQLRRGLWKTHEIVNQGIAYYMNKLALMRQ
EPYAGKSREVVRLELLHSLRAQQKRNNWTGDAGTDDEILNLSRRLYELLV
PSAIGEKGDAQMLSRKFLSPLVDPNSEGGKGTAKSGRKPRWMKMREEGHP
DWEAEREKDRAKKAADPTASILNDLEAFGLRPLFPLFTDEQKGIQWLPKQ
KRQFVRTFDRDMFQQALERMLSWESWNRRVABEYQKLQAQRDELYAKYLA
DGGAWLEALQSFEKQREVELAEESFAAKSEYLITRRQIRGWKQVYEKWSQ
LPEHAAQEQFWQVVADVQTSLPGAFGDPKVYQFLSQPEHHHIWRGYPNRL
FHYSDYNGVRKKLQRARHDATFTLPDPVEHPLWIRFDARGGNIHDYEISQ
NGKQYQVTFSRLLWPENETWVERENVTVAIGASQQLKRQIRLDGYADKKQ
KVRYRDYSSGIELTGVLGGAKIQFDRRHLRKASNRLADGETGPVYLNVVV
DIEPFLAMRNGRLQTPIGQVLQVNTKDWPKVTGYKPAELISWIQNSPLAV
GTGVNTIEAGMRVMSVDLGQRSAAAVSIFEVMRQKPAEQETKLFYPIAVT
GLYAVHRRSLLLRLPGEKISDEIEQQRKIRAHARSLVRYQIRLLADVLRL
HTRGTAEQRRAKLDELLATLQTKQELDQKLWQTELEKLFDYIHEPAERWQ
QALVAAHRTLEPVIGQAVRHWRKSLRIDRKGLAGMSMWNIEELEETRKLL
IAWSKHSRVPGEPNRLDKEETFAPQQLQHIQNVKDDRLKQMANLLVMTAL
GYKYDEAEKQWKEAYPACQMILFEDLSRYRFALDRPRRENNRLMKWAHRS
IPRLVYLQGELFGIQVGDVYSAYTSRFHAKTGAPGIRCHALKEEDLQPNS
YVVKQLIKDGFIREDQTGSLKPGQIVPWSGGELFVTLADRSGSRLAVIHA
DINAAQNLQKRFWQQNTEIFRVPCKVTTSGLIPAYDKMKKLFGKGYFAKI
NQTDTSEVYVWEHSAKMKGKTTPADPAEEGVFDESLTDEMEELEDSQEGY
KTLFRDPSGFFWSSDRWLPQKEFWFWVKRRIEKKLREQLQ.

[0200] In an aspect, when the CRISPR-Cas protein is a BrCas12b, the tracrRNA can be selected from one of tracrRNA design 1-tracrRNA design 6 as detailed below:

tracrRdesign 1:
TGCAGGTTAGTGGAAATATAGATAGCCGTTGTGACTGAGTGACGTGTTAG
GTCACCGTAGCACATGACACAACTGCACTGGTCAGCCTGTAGCTAACCAC
CTTCATTATATCTAGTTTTTCCAAC
tracrRNA design 2:
GTTGTGACTGAGTGACGTGTTAGGTCACCGTAGCACATGACACAACTGCA
CTGGTCAGCCTGTAGCTAACCACCTTCATTATATCTAGTTTTTCCAAC
tracrRNA design 3:
TGACACAACTGCACTGGTCAGCCTGTAGCTAACCACCTTCATTATATCTA
GTTTTTCCAAC
tracrRNA design 4:
GAAGGTGGTTAGCTACAGGCTGACCAGTGCAGTTGTGTCATGTGCTACGG
TGACCTAACACGTCACTCAGTCACAACGGCTATCTATATTTCCACTAAC
tracrRNA design 5:
GTTGGAAAAACTAGATATAATGAAGGTGGTTAGCTACAGGCTGACCAGTG
CAGTTGTGTCATGTGCTACGGTGACCTAACACGTCACTCAGTCACAACGG
CTATCTATATTTCCACTAAC
tracrRNA design 6:
GTGCAGTTGTGTCATGTGCTACGGTGACCTAACACGTCACTCAGTCACAA
CGGCTATCTATATTTCCACTAAC

[0201] In an aspect, when BrCas12b is utilized, the crNA design can be selected from one of crRNA design 1 to crRNA design 3, wherein N represents the spacer design:

crRNA design 1:
GTCCGTTTCGTTAGTGGAAATGTAGATGGTTAGCACNNNNNNNNNNNNNN
NNNNNNNNNNNNN
crRNA design 2:
TAGTGGAAATGTAGATGGTTAGCACNNNNNNNNNNNNNNNNNNNNNNNNN
NN
crRNA design 3
GTTAGTGGAAATCTAGATGGTTAGCACNNNNNNNNNNNNNNNNNNNNNNN
NNNN

[0202] In certain example embodiments, the guide sequence is selected from Table 3 or Table 8.

[0203] The effector protein may comprise a chimeric effector protein comprising a first fragment from a first effector protein (e.g., a C2c1) ortholog and a second fragment from a second effector (e.g., a C2c1) protein ortholog, and wherein the first and second effector protein orthologs are different. At least one of the first and second effector protein (e.g., a C2c1) orthologs may comprise an effector protein (e.g., a C2c1) from an organism comprising Alicyclobacillus, Desulfovibrio, Desulfonatronum, Opitutaceae, Tuberibacillus, Bacillus, Brevibacillus, Candidatus, Desulfatirhabdium, Elusimicrobia, Citrobacter, Methylobacterium, Omnitrophicai, Phycisphaerae, Planctomycetes, Spirochaetes, and Verrucomicrobiaceae: e.g., a chimeric effector protein comprising a first fragment and a second fragment wherein each of the first and second fragments is selected from a C2c1 of an organism comprising Alicyclobacillus, Desulfovibrio, Desulfonatronum, Opitutaceae, Tuberibacillus, Bacillus, Brevibacillus, Candidatus, Desulfatirhabdium, Elusimicrobia, Citrobacter, Methylobacterium, Omnitrophicai, Phycisphaerae, Planctomycetes, Spirochaetes, and Verrucomicrobiaceae wherein the first and second fragments are not from the same bacteria; for instance a chimeric effector protein comprising a first fragment and a second fragment wherein each of the first and second fragments is selected from a C2c1 of Alicyclobacillus acidoterrestris (e.g., ATCC 49025), Alicyclobacillus contaminans (e.g., DSM 17975), Alicyclobacillus macrosporangiidus (e.g. DSM 17980), Bacillus hisashii strain C4, Candidatus Lindowbacteria bacterium RIFCSPLOWO2, Desulfovibrio inopinatus (e.g., DSM 10711), Desulfonatronum thiodismutans (e.g., strain MLF-1), Elusimicrobia bacterium RIFOXYAl2, Omnitrophica WOR_2 bacterium RIFCSPHIGHO2, Opitutaceae bacterium TAV5, Phycisphaerae bacterium ST-NAGAB-D1, Planctomycetes bacterium RBG_13_46_10, Spirochaetes bacterium GWB1_27_13, Verrucomicrobiaceae bacterium UBA2429, Tuberibacillus calidus (e.g., DSM 17572), Bacillus thermoamylovorans (e.g., strain B4166), Brevibacillus sp. CF112, Bacillus sp. NSP2.1, Desulfatirhabdium butyrativorans (e.g., DSM 18734), Alicyclobacillus herbarius (e.g., DSM 13609), Citrobacter freundii (e.g., ATCC 8090), Brevibacillus agri (e.g., BAB-2500), Methylobacterium nodulans (e.g., ORS 2060), wherein the first and second fragments are not from the same bacteria.

[0204] In a more preferred embodiment, the C2c1p is derived from a bacterial species selected from Alicyclobacillus acidoterrestris (e.g., ATCC 49025), Alicyclobacillus contaminans (e.g., DSM 17975), Alicyclobacillus macrosporangiidus (e.g. DSM 17980), Bacillus hisashii strain C4, Candidatus Lindowbacteria bacterium RIFCSPLOWO2, Desulfovibrio inopinatus (e.g., DSM 10711), Desulfonatronum thiodismutans (e.g., strain MLF-1), Elusimicrobia bacterium RIFOXYA12, Omnitrophica WOR_2 bacterium RIFCSPHIGHO2, Opitutaceae bacterium TAV5, Phycisphaerae bacterium ST-NAGAB-D1, Planctomycetes bacterium RBG_13_46_10, Spirochaetes bacterium GWB1_27_13, Verrucomicrobiaceae bacterium UBA2429, Tuberibacillus calidus (e.g., DSM 17572), Bacillus thermoamylovorans (e.g., strain B4166), Brevibacillus sp. CFI 12, Bacillus sp. NSP2.1, Desulfatirhabdium butyrativorans (e.g., DSM 18734), Alicyclobacillus herbarius (e.g., DSM 13609), Citrobacter freundii (e.g., ATCC 8090), Brevibacillus agri (e.g., BAB-2500), Methylobacterium nodulans (e.g., ORS 2060). In certain embodiments, the C2c1p is derived from a bacterial species selected from Alicyclobacillus acidoterrestris (e.g., ATCC 49025), Alicyclobacillus contaminans (e.g., DSM 17975).

[0205] In particular embodiments, the homologue or orthologue of C2c1 as referred to herein has a sequence homology or identity of at least 80%, more preferably at least 85%, even more preferably at least 90%6, such as for instance at least 95% with C2c1. In further embodiments, the homologue or orthologue of C2c1 as referred to herein has a sequence identity of at least 80%, more preferably at least 85%, even more preferably at least 90%, such as for instance at least 95% with the wild type C2c1. Where the C2c1 has one or more mutations (mutated), the homologue or orthologue of said C2c1 as referred to herein has a sequence identity of at least 80%, more preferably at least 85%, even more preferably at least 90%, such as for instance at least 95% with the mutated C2c1.

[0206] In an embodiment, the C2c1 protein may be an ortholog of an organism of a genus which includes, but is not limited to Alicyclobacillus, Desulfovibrio, Desulfonatronum, Opitutaceae, Tuberibacillus, Bacillus, Brevibacillus, Candidatus, Desulfatirhabdium, Elusimicrobia, Citrobacter, Methylobacterium, Omnitrophicai, Phycisphaerae, Planctomycetes, Spirochaetes, and Verrucomicrobiaceae; in particular embodiments, the type V Cas protein may be an ortholog of an organism of a species which includes, but is not limited to Alicyclobacillus acidoterrestris (e.g., ATCC 49025), Alicyclobacillus contaminans (e.g., DSM 17975), Alicyclobacillus macrosporangiidus (e.g. DSM 17980), Bacillus hisashii strain C4, Candidatus Lindowbacteria bacterium RIFCSPLOWO2, Desulfovibrio inopinatus (e.g., DSM 10711), Desulfonatronum thiodismutans (e.g., strain MLF-1), Elusimicrobia bacterium RIFOXYA12, Omnitrophica WOR_2 bacterium RIFCSPHIGHO2, Opitutaceae bacterium TAV5, Phycisphaerae bacterium ST-NAGAB-D1, Planctomycetes bacterium RBG_13_46_10, Spirochaetes bacterium GWB1_27_13, Verrucomicrobiaceae bacterium UBA2429, Tuberibacillus calidus (e.g., DSM 17572), Bacillus thermoamylovorans (e.g., strain B4166), Brevibacillus sp. CF1112, Bacillus sp. NSP2.1, Desulfatirhabdium butyrativorans (e.g., DSM 18734), Alicyclobacillus herbarius (e.g., DSM 13609), Citrobacter freundii (e.g., ATCC 8090), Brevibacillus agri (e.g., BAB-2500), Methylobacterium nodulans (e.g., ORS 2060). In particular embodiments, the homologue or orthologue of C2c1 as referred to herein has a sequence homology or identity of at least 80%, more preferably at least 85%, even more preferably at least 90%, such as for instance at least 95% with one or more of the C2c1 sequences disclosed herein. In further embodiments, the homologue or orthologue of C2c1 as referred to herein has a sequence identity of at least 80%, more preferably at least 85%, even more preferably at least 90%, such as for instance at least 95% with the wild type AacC2c1 or BthC2c1.

[0207] In particular embodiments, the C2c1 protein of the invention has a sequence homology or identity of at least 60%, more particularly at least 70, such as at least 80%, more preferably at least 85%, even more preferably at least 90%, such as for instance at least 95% with AacC2c1 or BthC2c1. In further embodiments, the C2c1 protein as referred to herein has a sequence identity of at least 60%, such as at least 70%, more particularly at least 80%, more preferably at least 85%, even more preferably at least 90%, such as for instance at least 95% with the wild type AacC2c1. In particular embodiments, the C2c1 protein of the present invention has less than 60% sequence identity with AacC2c1. The skilled person will understand that this includes truncated forms of the C2c1 protein whereby the sequence identity is determined over the length of the truncated form.

[0208] In certain methods according to the present invention, the CRISPR-Cas protein is preferably mutated with respect to a corresponding wild-type enzyme such that the mutated CRISPR-Cas protein lacks the ability to cleave one or both DNA strands of a target locus containing a target sequence. In particular embodiments, one or more catalytic domains of the C2c1 protein are mutated to produce a mutated Cas protein which cleaves only one DNA strand of a target sequence.

[0209] In particular embodiments, the CRISPR-Cas protein may be mutated with respect to a corresponding wild-type enzyme such that the mutated CRISPR-Cas protein lacks substantially all DNA cleavage activity. In some embodiments, a CRISPR-Cas protein may be considered to substantially lack all DNA and/or RNA cleavage activity when the cleavage activity of the mutated enzyme is about no more than 25%, 10%, 5%, 1%, 0.1%, 0.01%, or less of the nucleic acid cleavage activity of the non-mutated form of the enzyme; an example can be when the nucleic acid cleavage activity of the mutated form is nil or negligible as compared with the non-mutated form. 101701 In certain embodiments of the methods provided herein the CRISPR-Cas protein is a mutated CRISPR-Cas protein which cleaves only one DNA strand, i.e. a nickase. More particularly, in the context of the present invention, the nickase ensures cleavage within the non-target sequence, i.e. the sequence which is on the opposite DNA strand of the target sequence and which is 3′ of the PAM sequence. By means of further guidance, and without limitation, an arginine-to-alanine substitution (R911A) in the Nuc domain of C2c1 from Alicyclobacillus acidoterrestris converts C2c1 from a nuclease that cleaves both strands to a nickase (cleaves a single strand). It will be understood by the skilled person that where the enzyme is not AacC2c1, a mutation may be made at a residue in a corresponding position.

### Cas 12c Orthologs

[0210] In certain embodiments, the effector protein, particularly a Type V loci effector protein, more particularly a Type V-C loci effector protein, even more particularly a C2c3p, may originate, may be isolated or may be derived from a bacterial metagenome selected from the group consisting of the bacterial metagenomes listed in the Table in FIG. 43A-43B of PCT/US2016/038238, specifically incorporated by reference, which presents analysis of the Type-V-C Cas12c loci. 101721 In certain embodiments, the effector protein, particularly a Type V loci effector protein, more particularly a Type V-C loci effector protein, even more particularly a C2c3p, may comprise, consist essentially of or consist of an amino acid sequence selected from the group consisting of amino acid sequences shown in the multiple sequence alignment in FIG. 131 of PCT/US2016/038238, specifically incorporated by reference.

[0211] In certain embodiments, a Type V-C locus as intended herein may encode Cas1 and the C2c3p effector protein. See FIG. 14 of PCT/US2016/038238, specifically incorporated by reference, depicting the genomic architecture of the Cas12c CRISPR-Cas loci. In certain embodiments, a Cas1 protein encoded by a Type V-C locus as intended herein may cluster with Type I-B system. See FIGS. 10A and 10B and FIG. 10C-V of PCT/US2016/038238, specifically incorporated by reference, illustrating a Cas1 tree including Cas1 encoded by representative Type V-C loci.

[0212] In certain embodiments, the effector protein, particularly a Type V loci effector protein, more particularly a Type V-C loci effector protein, even more particularly a C2c3p, such as a native C2c3p, may be about 1100 to about 1500 amino acids long, e.g., about 1100 to about 1200 amino acids long, or about 1200 to about 1300 amino acids long, or about 1300 to about 1400 amino acids long, or about 1400 to about 1500 amino acids long, e.g., about 1100, about 1200, about 1300, about 1400 or about 1500 amino acids long, or at least about 1100, at least about 1200, at least about 1300, at least about 1400 or at least about 1500 amino acids long.

[0213] In certain embodiments, the effector protein, particularly a Type V loci effector protein, more particularly a Type V-C loci effector protein, even more particularly a C2c3p, and preferably the C-terminal portion of said effector protein, comprises the three catalytic motifs of the RuvC-like nuclease (i.e., RuvCI, RuvCII and RuvCIII). In certain embodiments, said effector protein, and preferably the C-terminal portion of said effector protein, may further comprise a region corresponding to the bridge helix (also known as arginine-rich cluster) that in Cas9 protein is involved in crRNA-binding. In certain embodiments, said effector protein, and preferably the C-terminal portion of said effector protein, may further comprise a Zn finger region. Preferably, the Zn-binding cysteine residue(s) may be conserved in C2c3p. In certain embodiments, said effector protein, and preferably the C-terminal portion of said effector protein, may comprise the three catalytic motifs of the RuvC-like nuclease (i.e., RuvCI, RuvCII and RuvCIII), the region corresponding to the bridge helix, and the Zn finger region, preferably in the following order, from N to C terminus: RuvCI-bridge helix-RuvCII-Zinc finger-RuvCIII. See FIGS. 13A and 13C of PCT/US2016/038238, specifically incorporated by reference, for illustration of representative Type V-C effector proteins domain architecture.

[0214] In certain embodiments, Type V-C loci as intended herein may comprise CRISPR repeats between 20 and 30 bp long, more typically between 22 and 27 bp long, yet more typically 25 bp long, e.g., 20, 21, 22, 23, 24, 25, 26, 27, 28, 29, or 30 bp long.

[0215] Orthologous proteins may but need not be structurally related, or are only partially structurally related. In particular embodiments, the homologue or orthologue of a Type V protein such as Cas12c as referred to herein has a sequence homology or identity of at least 80%, more preferably at least 85%, even more preferably at least 90%, such as for instance at least 95% with a Cas12c. In further embodiments, the homologue or orthologue of a Type V Cas12c as referred to herein has a sequence identity of at least 80%, more preferably at least 85%, even more preferably at least 90%, such as for instance at least 95% with the wild type Cas12c.

[0216] In an embodiment, the Type V RNA-targeting Cas protein may be a Cas12c ortholog of an organism of a genus which includes but is not limited to Corynebacier, Sutterella, Legionella, Treponema, Filifactor, Eubacterium, Streptococcus, Lactobacillus, Mycoplasma, Bacteroides, Flaviivola, Flavobacierium, Sphaerochaeta, Azospirillum, Gluconacetobacter, Neisseria, Roseburia, Parvibaculum, Staphylococcus, Nitratifractor, Mycoplasma and Campylobacter.

[0217] In an embodiment, the Cas12c or an ortholog or homolog thereof, may comprise one or more mutations (and hence nucleic acid molecule(s) coding for same may have mutation(s). The mutations may be artificially introduced mutations and may include but are not limited to one or more mutations in a catalytic domain. Examples of catalytic domains with reference to a Cas9 enzyme may include but are not limited to RuvC 1, RuvC II, RuvC III and HNH domains. In an embodiment, the Cas12c or an ortholog or homolog thereof, may comprise one or more mutations. The mutations may be artificially introduced mutations and may include but are not limited to one or more mutations in a catalytic domain. Examples of catalytic domains with reference to a Cas enzyme may include but are not limited to RuvC I, RuvC II, RuvC III, HNH domains, and HEPN domains.

### Guide Sequences

[0218] As used herein, the term “guide sequence” and “guide molecule” in the context of a CRISPR-Cas system, comprises any polynucleotide sequence having sufficient complementarity with a target nucleic acid sequence to hybridize with the target nucleic acid sequence and direct sequence-specific binding of a nucleic acid-targeting complex to the target nucleic acid sequence. The guide sequences made using the methods disclosed herein may be a full-length guide sequence, a truncated guide sequence, a full-length sgRNA sequence, a truncated sgRNA sequence, or an E+F sgRNA sequence. In some embodiments, the degree of complementarity of the guide sequence to a given target sequence, when optimally aligned using a suitable alignment algorithm, is about or more than about 50%, 60%, 75%, 80%, 85%, 90%, 95%, 97.5%, 99%, or more. In certain example embodiments, the guide molecule comprises a guide sequence that may be designed to have at least one mismatch with the target sequence, such that a RNA duplex formed between the guide sequence and the target sequence. Accordingly, the degree of complementarity is preferably less than 99%. For instance, where the guide sequence consists of 24 nucleotides, the degree of complementarity is more particularly about 96% or less. In particular embodiments, the guide sequence is designed to have a stretch of two or more adjacent mismatching nucleotides, such that the degree of complementarity over the entire guide sequence is further reduced. For instance, where the guide sequence consists of 24 nucleotides, the degree of complementarity is more particularly about 96% or less, more particularly, about 92% or less, more particularly about 88% or less, more particularly about 84% or less, more particularly about 80% or less, more particularly about 76% or less, more particularly about 72% or less, depending on whether the stretch of two or more mismatching nucleotides encompasses 2, 3, 4, 5, 6 or 7 nucleotides, etc. In some embodiments, aside from the stretch of one or more mismatching nucleotides, the degree of complementarity, when optimally aligned using a suitable alignment algorithm, is about or more than about 50%, 60%, 75%, 80%, 85%, 90%, 95%, 97.5%, 99%, or more. Optimal alignment may be determined with the use of any suitable algorithm for aligning sequences, non-limiting example of which include the Smith-Waterman algorithm, the Needleman-Wunsch algorithm, algorithms based on the Burrows-Wheeler Transform (e.g., the Burrows Wheeler Aligner), ClustalW, Clustal X, BLAT, Novoalign (Novocraft Technologies; available at www.novocraft.com), ELAND (Illumina, San Diego, CA), SOAP (available at soap.genomics.org.cn), and Maq (available at maq.sourceforge.net). The ability of a guide sequence (within a nucleic acid-targeting guide RNA) to direct sequence-specific binding of a nucleic acid-targeting complex to a target nucleic acid sequence may be assessed by any suitable assay. For example, the components of a nucleic acid-targeting CRISPR system sufficient to form a nucleic acid-targeting complex, including the guide sequence to be tested, may be provided to a host cell having the corresponding target nucleic acid sequence, such as by transfection with vectors encoding the components of the nucleic acid-targeting complex, followed by an assessment of preferential targeting (e.g., cleavage) within the target nucleic acid sequence, such as by Surveyor assay as described herein. Similarly, cleavage of a target nucleic acid sequence (or a sequence in the vicinity thereof) may be evaluated in a test tube by providing the target nucleic acid sequence, components of a nucleic acid-targeting complex, including the guide sequence to be tested and a control guide sequence different from the test guide sequence, and comparing binding or rate of cleavage at or in the vicinity of the target sequence between the test and control guide sequence reactions. Other assays are possible, and will occur to those skilled in the art. A guide sequence, and hence a nucleic acid-targeting guide RNA may be selected to target any target nucleic acid sequence.

[0219] As used herein, the term “guide sequence,” “crRNA,” “guide RNA,” or “single guide RNA,” or “gRNA” refers to a polynucleotide comprising any polynucleotide sequence having sufficient complementarity with a target nucleic acid sequence to hybridize with the target nucleic acid sequence and to direct sequence-specific binding of a RNA-targeting complex comprising the guide sequence and a CRISPR effector protein to the target nucleic acid sequence. In some example embodiments, the degree of complementarity, when optimally aligned using a suitable alignment algorithm, is about or more than about 50%, 60%, 75%, 80%, 85%, 90%, 95%, 97.5%, 99%, or more. Optimal alignment may be determined with the use of any suitable algorithm for aligning sequences, non-limiting example of which include the Smith-Waterman algorithm, the Needleman-Wunsch algorithm, algorithms based on the Burrows-Wheeler Transform (e.g., the Burrows Wheeler Aligner), ClustalW, Clustal X, BLAT, Novoalign (Novocraft Technologies; available at www.novocraft.com), ELAND (Illumina, San Diego, CA), SOAP (available at soap.genomics.org.cn), and Maq (available at maq.sourceforge.net). The ability of a guide sequence (within a nucleic acid-targeting guide RNA) to direct sequence-specific binding of a nucleic acid-targeting complex to a target nucleic acid sequence may be assessed by any suitable assay. For example, the components of a nucleic acid-targeting CRISPR system sufficient to form a nucleic acid-targeting complex, including the guide sequence to be tested, may be provided to a host cell having the corresponding target nucleic acid sequence, such as by transfection with vectors encoding the components of the nucleic acid-targeting complex, followed by an assessment of preferential targeting (e.g., cleavage) within the target nucleic acid sequence, such as by Surveyor assay as described herein. Similarly, cleavage of a target nucleic acid sequence may be evaluated in a test tube by providing the target nucleic acid sequence, components of a nucleic acid-targeting complex, including the guide sequence to be tested and a control guide sequence different from the test guide sequence, and comparing binding or rate of cleavage at the target sequence between the test and control guide sequence reactions. Other assays are possible, and will occur to those skilled in the art. A guide sequence, and hence a nucleic acid-targeting guide may be selected to target any target nucleic acid sequence. The target sequence may be DNA. The target sequence may be any RNA sequence. In some embodiments, the target sequence may be a sequence within a RNA molecule selected from the group consisting of messenger RNA (mRNA), pre-mRNA, ribosomal RNA (rRNA), transfer RNA (tRNA), micro-RNA (miRNA), small interfering RNA (siRNA), small nuclear RNA (snRNA), small nucleolar RNA (snoRNA), double stranded RNA (dsRNA), non-coding RNA (ncRNA), long non-coding RNA (lncRNA), and small cytoplasmatic RNA (scRNA). In some preferred embodiments, the target sequence may be a sequence within a RNA molecule selected from the group consisting of mRNA, pre-mRNA, and rRNA. In some preferred embodiments, the target sequence may be a sequence within a RNA molecule selected from the group consisting of ncRNA, and lncRNA. In some more preferred embodiments, the target sequence may be a sequence within an mRNA molecule or a pre-mRNA molecule.

[0220] In certain embodiments, the guide sequence or spacer length of the guide molecules is from 15 to 50 nt. In certain embodiments, the spacer length of the guide RNA is at least 15 nucleotides. In certain embodiments, the spacer length is from 15 to 17 nt, e.g., 15, 16, or 17 nt, from 17 to 20 nt, e.g., 17, 18, 19, or 20 nt, from 20 to 24 nt, e.g., 20, 21, 22, 23, or 24 nt, from 23 to 25 nt, e.g., 23, 24, or 25 nt, from 24 to 27 nt, e.g., 24, 25, 26, or 27 nt, from 27-30 nt, e.g., 27, 28, 29, or 30 nt, from 30-35 nt, e.g., 30, 31, 32, 33, 34, or 35 nt, or 35 nt or longer. In certain example embodiment, the guide sequence is 15, 16, 17, 18, 19, 20, 21, 22, 23, 24, 25, 26, 27, 28, 29, 30, 31, 32, 33, 34, 35, 36, 37, 38, 3940, 41, 42, 43, 44, 45, 46, 4748, 49, 50, 51, 52, 53, 54, 55, 56, 57, 58, 59, 60, 61, 62, 63, 64, 65, 66, 67, 68, 69, 70, 71, 72, 73, 74, 75, 76, 77, 78, 79, 80, 81, 82, 83, 84, 85, 86, 87, 88, 89, 90, 91, 92, 93, 94, 95, 96, 97, 98, 99, or 100 nt.

[0221] The guide may be derived from a different species than the Cas protein. In certain embodiments, the CRISPR-Cas protein is a Cas12b from a thermostable species, for example Alicyclobacillus acidiphilus (Aap). When the Aap Cas protein is utilized, a related guide can be used, for example from the same or another Alicyclobacillus species, e.g. Alicyclobacillus acidoterrestrus (Aac). In an aspect, the guide comprises at least 95%, 96%, 97% or more sequence similarity to the DR and/or the tracr sequence from Aac Cas12b. The guide can be designed similarly for other Cas proteins, deriving the guide from a different species than the Cas protein species.

[0222] In an aspect, the CRISPR-Cas protein is a Cas12b from Aap, and the guide molecule is derived from Aac, or an Alicyclobacillus CRISPR Cas system direct repeat and tracrRNA. In certain embodiments, the guide is designed with a spacer sequence to target a molecule of interest, for example, SARS-CoV-2. While any portion of the SARS-CoV-2 can be targeted, as described elsewhere herein, in an aspect, the spacer is designed to target the Nucleocapsid protein of the SARS-CoV-2. In certain embodiments, the Aac guide has 90%, 91%, 92%, 93%, 94%, 95%, 96%, 97%, 98%, 99% sequence similarity to any one of Type 1 to Type 5 guide sequence below.

[0223] In an aspect, the guide comprises:

Type 1:
(SEQ ID NO: XX)
GTCTAGAGGACAGAATTTTTCAACGGGTGTGCCAATGGCCACTTTCCAGG
TGGCAAAGCCCGTTGAGCTTCTCAAATCTGAGAAGTGGCAC,
Type 2:
(SEQ ID NO: XX)
GTCTAAAGGACAGAATTTTTCAACGGGTGTGCCAATGGCCACTTTCCAGG
TGGCAAAGCCCGTTGAACTTCTCAAATCTGAGAAGTGGCAC
Type 3:
(SEQ ID NO: XX)
GTCTAGAGGACAGAATTTTTCAACGGGTGTGCCAATGGCCACTTTCCAGG
TGGCAAAGCCCGTTGAACTTCTCAAATCTGAGAAGTGGCAC
Type 4:
(SEQ ID NO: XX)
GTCTAAAGGACAGAATTTTTCAACGGGTGTGCCAATGGCCACTTTCCAGG
TGGCAAAGCCCGTTGAGCTTCTCAAATCTGAGAAGTGGCAC
or
Type 5:
(SEQ ID NO: XX)
GTCTAGAGGACAGAATTTTTCAACGGGTGTGCCAATGGCCACTTTCCAGG
TGGCAAAGCCCGTTGAACTTCTCAAATCTGCGAAGTGGCAC.

[0224] In certain embodiments, preservation of the underlined portions of the following guide sequence are maintained:

(SEQ ID NO: YY)
GTCTAGAGGACAGAATTTTTCAACGGGTGTGCCAATGGCCACTTTCCAGG
TGGCAAAGCCCGTTGAGCTTCTCAAATCTGAGAAGTGGCAC.

[0225] However, importance of particular bases of the guide sequence are not limited to the underlined areas in SEQ ID NO:YY, and mutations of these bases can be performed when structure and activity of the guide sequence can be maintained. Such mutations can be tested and optimized in accordance with the guide optimization methods detailed elsewhere herein. In an aspect, the guide preserves the secondary structure as detailed in FIG. 45. In some embodiments, the sequence of the guide molecule (direct repeat and/or spacer) is selected to reduce the degree secondary structure within the guide molecule. In some embodiments, about or less than about 75%, 50%, 40%, 30%, 25%, 20%, 15%, 10%, 5%, 1%, or fewer of the nucleotides of the nucleic acid-targeting guide RNA participate in self-complementary base pairing when optimally folded. Optimal folding may be determined by any suitable polynucleotide folding algorithm. Some programs are based on calculating the minimal Gibbs free energy. An example of one such algorithm is mFold, as described by Zuker and Stiegler (Nucleic Acids Res. 9 (1981), 133-148). Another example folding algorithm is the online webserver RNAfold, developed at Institute for Theoretical Chemistry at the University of Vienna, using the centroid structure prediction algorithm (see e.g., A. R. Gruber et al., 2008, Cell 106(1): 23-24; and PA Carr and GM Church, 2009, Nature Biotechnology 27(12): 1151-62).

[0226] In some embodiments, it is of interest to reduce the susceptibility of the guide molecule to RNA cleavage, such as to cleavage by Cas13. Accordingly, in particular embodiments, the guide molecule is adjusted to avoid cleavage by Cas13 or other RNA-cleaving enzymes.

[0227] In certain embodiments, the guide molecule comprises non-naturally occurring nucleic acids and/or non-naturally occurring nucleotides and/or nucleotide analogs, and/or chemically modifications. Preferably, these non-naturally occurring nucleic acids and non-naturally occurring nucleotides are located outside the guide sequence. Non-naturally occurring nucleic acids can include, for example, mixtures of naturally and non-naturally occurring nucleotides. Non-naturally occurring nucleotides and/or nucleotide analogs may be modified at the ribose, phosphate, and/or base moiety. In an embodiment of the invention, a guide nucleic acid comprises ribonucleotides and non-ribonucleotides. In one such embodiment, a guide comprises one or more ribonucleotides and one or more deoxyribonucleotides. In an embodiment of the invention, the guide comprises one or more non-naturally occurring nucleotide or nucleotide analog such as a nucleotide with phosphorothioate linkage, a locked nucleic acid (LNA) nucleotides comprising a methylene bridge between the 2′ and 4′ carbons of the ribose ring, or bridged nucleic acids (BNA). Other examples of modified nucleotides include 2-O-methyl analogs, 2-deoxy analogs, or 2-fluoro analogs. Further examples of modified bases include, but are not limited to, 2-aminopurine, 5-bromo-uridine, pseudouridine, inosine, 7-methylguanosine. Examples of guide RNA chemical modifications include, without limitation, incorporation of 2′-O-methyl (M), 2′-O-methyl 3′phosphorothioate (MS), S-constrained ethyl(cEt), or 2′-O-methyl 3′thioPACE (MSP) at one or more terminal nucleotides. Such chemically modified guides can comprise increased stability and increased activity as compared to unmodified guides, though on-target vs. off-target specificity is not predictable. (See, Hendel, 2015, Nat Biotechnol. 33(9):985-9, doi: 10.1038/nbt.3290, published online 29 Jun. 2015 Ragdarm et al., 0215, PNAS, E7110-E7111; Allerson et al., J. Med. Chem. 2005, 48:901-904; Bramsen et al., Front. Genet., 2012, 3:154; Deng et al., PNAS, 2015, 112:11870-11875; Sharma et al., MedChemComm., 2014, 5:1454-1471, Hendel et al., Nat. Biotechnol. (2015) 33(9): 985-989; Li et al., Nature Biomedical Engineering, 2017, 1, 0066 DOI:10.1038/s41551-017-0066). In some embodiments, the 5′ and/or 3′ end of a guide RNA is modified by a variety of functional moieties including fluorescent dyes, polyethylene glycol, cholesterol, proteins, or detection tags. (See Kelly et al., 2016, J. Biotech. 233:74-83). In certain embodiments, a guide comprises ribonucleotides in a region that binds to a target RNA and one or more deoxyribonucletides and/or nucleotide analogs in a region that binds to Cas13. In an embodiment of the invention, deoxyribonucleotides and/or nucleotide analogs are incorporated in engineered guide structures, such as, without limitation, stem-loop regions, and the seed region. For Cas13 guide, in certain embodiments, the modification is not in the 5′-handle of the stem-loop regions. Chemical modification in the 5′-handle of the stem-loop region of a guide may abolish its function (see Li, et al., Nature Biomedical Engineering, 2017, 1:0066). In certain embodiments, at least 1, 2, 3, 4, 5, 6, 7, 8, 9, 10, 11, 12, 13, 14, 15, 16, 17, 18, 19, 20, 21, 22, 23, 24, 25, 26, 27, 28, 29, 30, 35, 40, 45, 50, or 75 nucleotides of a guide is chemically modified. In some embodiments, 3-5 nucleotides at either the 3′ or the 5′ end of a guide is chemically modified. In some embodiments, only minor modifications are introduced in the seed region, such as 2′-F modifications. In some embodiments, 2′-F modification is introduced at the 3′ end of a guide. In certain embodiments, three to five nucleotides at the 5′ and/or the 3′ end of the guide are chemically modified with 2′-O-methyl (M), 2′-O-methyl 3′ phosphorothioate (MS), S-constrained ethyl(cEt), or 2′-O-methyl 3′ thioPACE (MSP). Such modification can enhance genome editing efficiency (see Hendel et al., Nat. Biotechnol. (2015) 33(9): 985-989). In certain embodiments, all of the phosphodiester bonds of a guide are substituted with phosphorothioates (PS) for enhancing levels of gene disruption. In certain embodiments, more than five nucleotides at the 5′ and/or the 3′ end of the guide are chemically modified with 2′-O-Me, 2′-F or S-constrained ethyl(cEt). Such chemically modified guide can mediate enhanced levels of gene disruption (see Ragdarm et al., 0215, PNAS, E7110-E7111). In an embodiment of the invention, a guide is modified to comprise a chemical moiety at its 3′ and/or 5′ end. Such moieties include, but are not limited to amine, azide, alkyne, thio, dibenzocyclooctyne (DBCO), or Rhodamine. In certain embodiment, the chemical moiety is conjugated to the guide by a linker, such as an alkyl chain. In certain embodiments, the chemical moiety of the modified guide can be used to attach the guide to another molecule, such as DNA, RNA, protein, or nanoparticles. Such chemically modified guide can be used to identify or enrich cells generically edited by a CRISPR system (see Lee et al., eLife, 2017, 6:e25312, DOI:10.7554).

[0228] In some embodiments, a nucleic acid-targeting guide is selected to reduce the degree secondary structure within the nucleic acid-targeting guide. In some embodiments, about or less than about 75%, 50%, 40%, 30%, 25%, 20%, 15%, 10%, 5%, 1%, or fewer of the nucleotides of the nucleic acid-targeting guide participate in self-complementary base pairing when optimally folded. Optimal folding may be determined by any suitable polynucleotide folding algorithm. Some programs are based on calculating the minimal Gibbs free energy. An example of one such algorithm is mFold, as described by Zuker and Stiegler (Nucleic Acids Res. 9 (1981), 133-148). Another example folding algorithm is the online webserver RNAfold, developed at Institute for Theoretical Chemistry at the University of Vienna, using the centroid structure prediction algorithm (see e.g., A. R. Gruber et al., 2008, Cell 106(1): 23-24; and PA Carr and GM Church, 2009, Nature Biotechnology 27(12): 1151-62).

[0229] In some embodiments, a nucleic acid-targeting guide is designed or selected to modulate intermolecular interactions among guide molecules, such as among stem-loop regions of different guide molecules. It will be appreciated that nucleotides within a guide that base-pair to form a stem-loop are also capable of base-pairing to form an intermolecular duplex with a second guide and that such an intermolecular duplex would not have a secondary structure compatible with CRISPR complex formation. Accordingly, is useful to select or design DR sequences in order to modulate stem-loop formation and CRISPR complex formation. In some embodiments, about or less than about 75%, 50%, 40%, 30%, 25%, 20%, 15%, 10%, 5%, 1%, or fewer of nucleic acid-targeting guides are in intermolecular duplexes. It will be appreciated that stem-loop variation will often be within limits imposed by DR-CRISPR effector interactions. One way to modulate stem-loop formation or change the equilibrium between stem-loop and intermolecular duplex is to vary nucleotide pairs in the stem of the stem-loop of a DR. For example, in one embodiment, a G-C pair is replaced by an A-U or U-A pair. In another embodiment, an A-U pair is substituted for a G-C or a C-G pair. In another embodiment, a naturally occurring nucleotide is replaced by a nucleotide analog. Another way to modulate stem-loop formation or change the equilibrium between stem-loop and intermolecular duplex is to modify the loop of the stem-loop of a DR. Without be bound by theory, the loop can be viewed as an intervening sequence flanked by two sequences that are complementary to each other. When that intervening sequence is not self-complementary, its effect will be to destabilize intermolecular duplex formation. The same principle applies when guides are multiplexed: while the targeting sequences may differ, it may be advantageous to modify the stem-loop region in the DRs of the different guides. Moreover, when guides are multiplexed, the relative activities of the different guides can be modulated by balancing the activity of each individual guide. In certain embodiments, the equilibrium between intermolecular stem-loops vs. intermolecular duplexes is determined. The determination may be made by physical or biochemical means and can be in the presence or absence of a CRISPR effector.

[0230] In certain embodiments, a guide RNA or crRNA may comprise, consist essentially of, or consist of a direct repeat (DR) sequence and a guide sequence or spacer sequence. In certain embodiments, the guide RNA or crRNA may comprise, consist essentially of, or consist of a direct repeat sequence fused or linked to a guide sequence or spacer sequence. In certain embodiments, the direct repeat sequence may be located upstream (i.e., 5′) from the guide sequence or spacer sequence. In other embodiments, the direct repeat sequence may be located downstream (i.e., 3′) from the guide sequence or spacer sequence.

[0231] In certain embodiments, the crRNA comprises a stem loop, preferably a single stem loop. In certain embodiments, the direct repeat sequence forms a stem loop, preferably a single stem loop.

[0232] In certain embodiments, the spacer length of the guide RNA is from 15 to 35 nt. In certain embodiments, the spacer length of the guide RNA is at least 15 nucleotides. In certain embodiments, the spacer length is from 15 to 17 nt, e.g., 15, 16, or 17 nt, from 17 to 20 nt, e.g., 17, 18, 19, or 20 nt, from 20 to 24 nt, e.g., 20, 21, 22, 23, or 24 nt, from 23 to 25 nt, e.g., 23, 24, or 25 nt, from 24 to 27 nt, e.g., 24, 25, 26, or 27 nt, from 27-30 nt, e.g., 27, 28, 29, or 30 nt, from 30-35 nt, e.g., 30, 31, 32, 33, 34, or 35 nt, or 35 nt or longer.

[0233] In general, the CRISPR-Cas, CRISPR-Cas9 or CRISPR system may be as used in the foregoing documents, such as WO 2014/093622 (PCT/US2013/074667) and refers collectively to transcripts and other elements involved in the expression of or directing the activity of CRISPR-associated (“Cas”) genes, including sequences encoding a Cas gene, in particular a Cas9 gene in the case of CRISPR-Cas9, a tracr (trans-activating CRISPR) sequence (e.g. tracrRNA or an active partial tracrRNA), a tracr-mate sequence (encompassing a “direct repeat” and a tracrRNA-processed partial direct repeat in the context of an endogenous CRISPR system), a guide sequence (also referred to as a “spacer” in the context of an endogenous CRISPR system), or “RNA(s)” as that term is herein used (e.g., RNA(s) to guide Cas9, e.g. CRISPR RNA and transactivating (tracr) RNA or a single guide RNA (sgRNA) (chimeric RNA)) or other sequences and transcripts from a CRISPR locus. In general, a CRISPR system is characterized by elements that promote the formation of a CRISPR complex at the site of a target sequence (also referred to as a protospacer in the context of an endogenous CRISPR system). In the context of formation of a CRISPR complex, “target sequence” refers to a sequence to which a guide sequence is designed to have complementarity, where hybridization between a target sequence and a guide sequence promotes the formation of a CRISPR complex. The section of the guide sequence through which complementarity to the target sequence is important for cleavage activity is referred to herein as the seed sequence. A target sequence may comprise any polynucleotide, such as DNA or RNA polynucleotides. In some embodiments, a target sequence is located in the nucleus or cytoplasm of a cell, and may include nucleic acids in or from mitochondrial, organelles, vesicles, liposomes or particles present within the cell. In some embodiments, especially for non-nuclear uses, NLSs are not preferred. In some embodiments, a CRISPR system comprises one or more nuclear exports signals (NESs). In some embodiments, a CRISPR system comprises one or more NLSs and one or more NESs. In some embodiments, direct repeats may be identified in silico by searching for repetitive motifs that fulfill any or all of the following criteria: 1. found in a 2 Kb window of genomic sequence flanking the type II CRISPR locus; 2. span from 20 to 50 bp; and 3. interspaced by 20 to 50 bp. In some embodiments, 2 of these criteria may be used, for instance 1 and 2, 2 and 3, or 1 and 3. In some embodiments, all 3 criteria may be used.

[0234] In embodiments of the invention the terms guide sequence and guide RNA, i.e. RNA capable of guiding Cas to a target genomic locus, are used interchangeably as in foregoing cited documents such as WO 2014/093622 (PCT/US2013/074667). In general, a guide sequence is any polynucleotide sequence having sufficient complementarity with a target polynucleotide sequence to hybridize with the target sequence and direct sequence-specific binding of a CRISPR complex to the target sequence. In some embodiments, the degree of complementarity between a guide sequence and its corresponding target sequence, when optimally aligned using a suitable alignment algorithm, is about or more than about 50%, 60%, 75%, 80%, 85%, 90%, 95%, 97.5%, 99%, or more. Optimal alignment may be determined with the use of any suitable algorithm for aligning sequences, non-limiting example of which include the Smith-Waterman algorithm, the Needleman-Wunsch algorithm, algorithms based on the Burrows-Wheeler Transform (e.g. the Burrows Wheeler Aligner), ClustalW, Clustal X, BLAT, Novoalign (Novocraft Technologies; available at www.novocraft.com), ELAND (illumina, San Diego, CA), SOAP (available at soap.genomics.org.cn), and Maq (available at maq.sourceforge.net). In some embodiments, a guide sequence is about or more than about 5, 10, 11, 12, 13, 14, 15, 16, 17, 18, 19, 20, 21, 22, 23, 24, 25, 26, 27, 28, 29, 30, 35, 40, 45, 50, 75, or more nucleotides in length. In some embodiments, a guide sequence is less than about 75, 50, 45, 40, 35, 30, 25, 20, 15, 12, or fewer nucleotides in length. Preferably the guide sequence is 10-30 nucleotides long. The ability of a guide sequence to direct sequence-specific binding of a CRISPR complex to a target sequence may be assessed by any suitable assay. For example, the components of a CRISPR system sufficient to form a CRISPR complex, including the guide sequence to be tested, may be provided to a host cell having the corresponding target sequence, such as by transfection with vectors encoding the components of the CRISPR sequence, followed by an assessment of preferential cleavage within the target sequence, such as by Surveyor assay as described herein. Similarly, cleavage of a target polynucleotide sequence may be evaluated in a test tube by providing the target sequence, components of a CRISPR complex, including the guide sequence to be tested and a control guide sequence different from the test guide sequence, and comparing binding or rate of cleavage at the target sequence between the test and control guide sequence reactions. Other assays are possible, and will occur to those skilled in the art.

[0235] In some embodiments of CRISPR-Cas systems, the degree of complementarity between a guide sequence and its corresponding target sequence can be about or more than about 50%, 60%, 75%, 80%, 85%, 90%, 95%, 97.5%, 99%, or 100%: a guide or RNA or sgRNA can be about or more than about 5, 10, 11, 12, 13, 14, 15, 16, 17, 18, 19, 20, 21, 22, 23, 24, 25, 26, 27, 28, 29, 30, 35, 40, 45, 50, 75, or more nucleotides in length; or guide or RNA or sgRNA can be less than about 75, 50, 45, 40, 35, 30, 25, 20, 15, 12, or fewer nucleotides in length; and advantageously tracr RNA is 30 or 50 nucleotides in length. However, an aspect of the invention is to reduce off-target interactions, e.g., reduce the guide interacting with a target sequence having low complementarity. Indeed, in the examples, it is shown that the invention involves mutations that result in the CRISPR-Cas system being able to distinguish between target and off-target sequences that have greater than 80% to about 95% complementarity, e.g., 83%-84% or 88-89% or 94-95% complementarity (for instance, distinguishing between a target having 18 nucleotides from an off-target of 18 nucleotides having 1, 2 or 3 mismatches). Accordingly, in the context of the present invention the degree of complementarity between a guide sequence and its corresponding target sequence is greater than 94.5% or 95% or 95.5% or 96% or 96.5% or 97% or 97.5% or 98% or 98.5% or 99% or 99.5% or 99.9%, or 100%. Off target is less than 100% or 99.9% or 99.5% or 99% or 99% or 98.5% or 98% or 97.5% or 97% or 96.5% or 96% or 95.5% or 95% or 94.5% or 94% or 93% or 92% or 91% or 90% or 89% or 88% or 87% or 86% or 85% or 84% or 83% or 82% or 81% or 80% complementarity between the sequence and the guide, with it advantageous that off target is 100% or 99.9% or 99.5% or 99% or 99% or 98.5% or 98% or 97.5% or 97% or 96.5% or 96% or 95.5% or 95% or 94.5% complementarity between the sequence and the guide.

### Multiplexing Polynucleotides

[0236] Provided herein are engineered polynucleotide sequences that can direct the activity of a CRISPR protein to multiple targets using a single crRNA. The engineered polynucleotide sequences, also referred to as a multiplexing polynucleotides, can include two or more direct repeats interspersed with two or more guide sequences. More specifically, the engineered polynucleotide sequences can include a direct repeat sequence having one or more mutations relative to the corresponding wild type direct repeat sequence. The engineered polynucleotide can be configured, for example, as: 5 DR1-G1-DR2-G2 3. In some embodiments, the engineered polynucleotide can be configured to include three, four, five, or more additional direct repeat and guide sequences, for example: 5 DR1-GI-DR2-G2-DR3-G3 3, 5″ DR1-G1-DR2-G2-DR3-G3-DR4-G4 3, or 5′ DR1-GI-DR2-G2-DR3-G3-DR4-G4-DR5-G5 3.

[0237] Regardless of the number of direct repeat sequences, the direct repeat sequences differ from one another. Thus, DR1 can be a wild type sequence and DR2 can include one or more mutations relative to the wild type sequence in accordance with the disclosure provided herein regarding direct repeats for Cas orthologs. The guide sequences can also be the same or different. In some embodiments, the guide sequences can bind to different nucleic acid targets, for example, nucleic acids encoding different polypeptides. The multiplexing polynucleotides can be as described, for example, at [0039J-[0072J in U.S. Application 62/780,748 entitled “CRISPR Cpf1 Direct Repeat Variants” and filed Dec. 17, 2018, incorporated herein in its entirety by reference.

[0238] Multiplex design of guide molecules for the detection of coronaviruses and/or other respiratory viruses in a sample to identify the cause of a respiratory infection is envisioned, and design can be according to the methods disclosed herein. Briefly, the design of guide molecules can encompass utilization of training models described herein using a variety of input features, which may include the particular Cas protein used for targeting of the sequences of interest. See U.S. Provisional Application 62/818,702 FIG. 4A, incorporated specifically by reference. Guide molecules can be designed as detailed elsewhere herein. Regarding detection of coronavirus, guide design can be predicated on genome sequences disclosed in Tian et al, “Potent binding of 2019 novel coronavirus spike protein by a SARS coronavirus-specific human monoclonal antibody”; doi: 10.1101/2020.01.28.923011, incorporated by reference, which details human monoclonal antibody, CR3022 binding of the 2019-nCoV RBD (KD of 6.3 nM) or Sequences of the 2019-nCoV are available at GISAID accession no. EPI_ISL_402124 and EPI_ISL_402127-402130, and described in doi:10.1101/2020.01.22.914952, or EP_ISL 402119-402121 and EP_ISL 402123-402124; see also GenBank Accession No. MN908947.3. Guide design can target unique viral genomic regions of SARS-CoV-2 or conserved genomic regions across one or more viruses of the coronavirus family.

### Guide Modifications

[0239] In certain embodiments, guides of the invention comprise non-naturally occurring nucleic acids and/or non-naturally occurring nucleotides and/or nucleotide analogs, and/or chemical modifications. Non-naturally occurring nucleic acids can include, for example, mixtures of naturally and non-naturally occurring nucleotides. Non-naturally occurring nucleotides and/or nucleotide analogs may be modified at the ribose, phosphate, and/or base moiety. In an embodiment of the invention, a guide nucleic acid comprises ribonucleotides and non-ribonucleotides. In one such embodiment, a guide comprises one or more ribonucleotides and one or more deoxyribonucleotides. In an embodiment of the invention, the guide comprises one or more non-naturally occurring nucleotide or nucleotide analog such as a nucleotide with phosphorothioate linkage, boranophosphate linkage, a locked nucleic acid (LNA) nucleotides comprising a methylene bridge between the 2′ and 4′ carbons of the ribose ring, or bridged nucleic acids (BNA). Other examples of modified nucleotides include 2-O-methyl analogs, 2-deoxy analogs, 2-thiouridine analogs, N6-methyladenosine analogs, or 2-fluoro analogs. Further examples of modified bases include, but are not limited to, 2-aminopurine, 5-bromo-uridine, pseudouridine (′¥), N1-methylpseudouridine (mel′¥), 5-methoxyuridine (5moU), inosine, 7-methylguanosine. Examples of guide RNA chemical modifications include, without limitation, incorporation of 2′-O-methyl (M), 2′-O-methyl-3′-phosphorothioate (MS), phosphorothioate (PS), S-constrained ethyl(cEt), or 2′-O-methyl-3′-thioPACE (MSP) at one or more terminal nucleotides. Such chemically modified guides can comprise increased stability and increased activity as compared to unmodified guides, though on-target vs. off-target specificity is not predictable. (See, Hendel, 2015, Nat Biotechnol. 33(9):985-9, doi: 10.1038/nbt.3290, published online 29 Jun. 2015; Ragdarm et al., 0215, PNAS, E7110-E7111. Allerson et al., J. Med. Chem. 2005, 48:901-904, Bramsen et al., Front. Genet., 2012, 3:154; Deng et al., PNAS, 2015, 112:11870-11875; Sharma et al., MedChemComm., 2014, 5:1454-1471; Hendel et al., Nat. Biotechnol. (2015) 33(9): 985-989; Li et al., Nature Biomedical Engineering, 2017, 1, 0066 DOI:10.1038/s41551-017-0066). In some embodiments, the 5′ and/or 3′ end of a guide RNA is modified by a variety of functional moieties including fluorescent dyes, polyethylene glycol, cholesterol, proteins, or detection tags. (See Kelly et al., 2016, J. Biotech. 233:74-83). In certain embodiments, a guide comprises ribonucleotides in a region that binds to a target DNA and one or more deoxyribonucleotides and/or nucleotide analogs in a region that binds to Cas9, Cpf1, or C2c1. In an embodiment of the invention, deoxyribonucleotides and/or nucleotide analogs are incorporated in engineered guide structures, such as, without limitation, 5′ and/or 3′ end, stem-loop regions, and the seed region. In certain embodiments, the modification is not in the 5′-handle of the stem-loop regions. Chemical modification in the 5′-handle of the stem-loop region of a guide may abolish its function (see Li, et al., Nature Biomedical Engineering, 2017, 1:0066). In certain embodiments, at least 1, 2, 3, 4, 5, 6, 7, 8, 9, 10, 11, 12, 13, 14, 15, 16, 17, 18, 19, 20, 21, 22, 23, 24, 25, 26, 27, 28, 29, 30, 35, 40, 45, 50, or 75 nucleotides of a guide is chemically modified. In some embodiments, 3-5 nucleotides at either the 3′ or the 5′ end of a guide is chemically modified. In some embodiments, only minor modifications are introduced in the seed region, such as 2′-F modifications. In some embodiments, 2′-F modification is introduced at the 3′ end of a guide. In certain embodiments, three to five nucleotides at the 5′ and/or the 3′ end of the guide are chemically modified with 2′-O-methyl (M), 2′-O-methyl-3′-phosphorothioate (MS), S-constrained ethyl(cEt), or 2′-O-methyl-3′-thioPACE (MSP). Such modification can enhance genome editing efficiency (see Hendel et al., Nat. Biotechnol. (2015) 33(9): 985-989). In certain embodiments, all of the phosphodiester bonds of a guide are substituted with phosphorothioates (PS) for enhancing levels of gene disruption. In certain embodiments, more than five nucleotides at the 5′ and/or the 3′ end of the guide are chemically modified with 2′-O-Me, 2′-F or S-constrained ethyl(cEt). Such chemically modified guide can mediate enhanced levels of gene disruption (see Ragdarm et al., 0215, PNAS, E7110-E71 11). In an embodiment of the invention, a guide is modified to comprise a chemical moiety at its 3′ and/or 5′ end. Such moieties include, but are not limited to amine, azide, alkyne, thio, dibenzocyclooctyne (DBCO), or Rhodamine. In certain embodiment, the chemical moiety is conjugated to the guide by a linker, such as an alkyl chain. In certain embodiments, the chemical moiety of the modified guide can be used to attach the guide to another molecule, such as DNA, RNA, protein, or nanoparticles. Such chemically modified guide can be used to identify or enrich cells generically edited by a CRISPR system (see Lee et al., eLife, 2017, 6:e25312, DOI:10.7554).

[0240] In certain embodiments, the CRISPR system as provided herein can make use of a crRNA or analogous polynucleotide comprising a guide sequence, wherein the polynucleotide is an RNA, a DNA or a mixture of RNA and DNA, and/or wherein the polynucleotide comprises one or more nucleotide analogs. The sequence can comprise any structure, including but not limited to a structure of a native crRNA, such as a bulge, a hairpin or a stem loop structure. In certain embodiments, the polynucleotide comprising the guide sequence forms a duplex with a second polynucleotide sequence which can be an RNA or a DNA sequence.

[0241] In certain embodiments, use is made of chemically modified guide RNAs. Examples of guide RNA chemical modifications include, without limitation, incorporation of 2′-O-methyl (M), 2′-O-methyl 3′phosphorothioate (MS), or 2′-O-methyl 3′thioPACE (MSP) at one or more terminal nucleotides. Such chemically modified guide RNAs can comprise increased stability and increased activity as compared to unmodified guide RNAs, though on-target vs. off-target specificity is not predictable. (See, Hendel, 2015, Nat Biotechnol. 33(9):985-9, doi: 10.1038/nbt.3290, published online 29 Jun. 2015). Chemically modified guide RNAs further include, without limitation, RNAs with phosphorothioate linkages and locked nucleic acid (LNA) nucleotides comprising a methylene bridge between the 2′ and 4′ carbons of the ribose ring.

[0242] In some embodiments, a guide sequence is about or more than about 5, 10, 11, 12, 13, 14, 15, 16, 17, 18, 19, 20, 21, 22, 23, 24, 25, 26, 27, 28, 29, 30, 35, 40, 45, 50, 75, or more nucleotides in length. In some embodiments, a guide sequence is less than about 75, 50, 45, 40, 35, 30, 25, 20, 15, 12, or fewer nucleotides in length. Preferably the guide sequence is 10 to 30 nucleotides long. The ability of a guide sequence to direct sequence-specific binding of a CRISPR complex to a target sequence may be assessed by any suitable assay. For example, the components of a CRISPR system sufficient to form a CRISPR complex, including the guide sequence to be tested, may be provided to a host cell having the corresponding target sequence, such as by transfection with vectors encoding the components of the CRISPR sequence, followed by an assessment of preferential cleavage within the target sequence, such as by Surveyor assay. Similarly, cleavage of a target RNA may be evaluated in a test tube by providing the target sequence, components of a CRISPR complex, including the guide sequence to be tested and a control guide sequence different from the test guide sequence, and comparing binding or rate of cleavage at the target sequence between the test and control guide sequence reactions. Other assays are possible, and will occur to those skilled in the art.

[0243] In some embodiments, the modification to the guide is a chemical modification, an insertion, a deletion or a split. In some embodiments, the chemical modification includes, but is not limited to, incorporation of 2-O-methyl (M) analogs, 2-deoxy analogs, 2-thiouridine analogs, N6-methyladenosine analogs, 2-fluoro analogs, 2-aminopurine, 5-bromo-uridine, pseudouridine (′¥), N1-methylpseudouridine (mel′¥), 5-methoxyuridine (5moU), inosine, 7-methylguanosine, 2′-O-methyl-3′-phosphorothioate (MS), S-constrained ethyl(cEt), phosphorothioate (PS), or 2′-O-methyl-3′-thioPACE (MSP). In some embodiments, the guide comprises one or more of phosphorothioate modifications. In certain embodiments, at least 1, 2, 3, 4, 5, 6, 7, 8, 9, 10, 11, 12, 13, 14, 15, 16, 17, 18, 19, 20, or 25 nucleotides of the guide are chemically modified. In certain embodiments, one or more nucleotides in the seed region are chemically modified. In certain embodiments, one or more nucleotides in the 3′-terminus are chemically modified. In certain embodiments, none of the nucleotides in the 5′-handle is chemically modified. In some embodiments, the chemical modification in the seed region is a minor modification, such as incorporation of a 2′-fluoro analog. In a specific embodiment, one nucleotide of the seed region is replaced with a 2′-fluoro analog. In some embodiments, 5 or 10 nucleotides in the 3′-terminus are chemically modified. Such chemical modifications at the 3′-terminus of the Cpf1 CrRNA improve gene cutting efficiency (see Li, et al., Nature Biomedical Engineering, 2017, 1:0066). In a specific embodiment, 5 nucleotides in the 3′-terminus are replaced with 2′-fluoro analogues. In a specific embodiment, 10 nucleotides in the 3′-terminus are replaced with 2′-fluoro analogues. In a specific embodiment, 5 nucleotides in the 3′-terminus are replaced with 2′-O-methyl (M) analogs.

[0244] In some embodiments, the loop of the 5′-handle of the guide is modified. In some embodiments, the loop of the 5′-handle of the guide is modified to have a deletion, an insertion, a split, or chemical modifications. In certain embodiments, the loop comprises 3, 4, or 5 nucleotides. In certain embodiments, the loop comprises the sequence of UCUU, UUUU, UAUU, or UGUU.

[0245] A guide sequence, and hence a nucleic acid-targeting guide RNA may be selected to target any target nucleic acid sequence. In the context of formation of a CRISPR complex, “target sequence” refers to a sequence to which a guide sequence is designed to have complementarity, where hybridization between a target sequence and a guide sequence promotes the formation of a CRISPR complex. A target sequence may comprise RNA polynucleotides. The term “target RNA” refers to a RNA polynucleotide being or comprising the target sequence. In other words, the target RNA may be a RNA polynucleotide or a part of a RNA polynucleotide to which a part of the gRNA, i.e. the guide sequence, is designed to have complementarity and to which the effector function mediated by the complex comprising CRISPR effector protein and a gRNA is to be directed. In some embodiments, a target sequence is located in the nucleus or cytoplasm of a cell. The target sequence may be DNA. The target sequence may be any RNA sequence. In some embodiments, the target sequence may be a sequence within a RNA molecule selected from the group consisting of messenger RNA (mRNA), pre-mRNA, ribosomal RNA (rRNA), transfer RNA (tRNA), micro-RNA (miRNA), small interfering RNA (siRNA), small nuclear RNA (snRNA), small nuclear RNA (snoRNA), double stranded RNA (dsRNA), non coding RNA (ncRNA), long non-coding RNA (lncRNA), and small cytoplasmic RNA (scRNA). In some preferred embodiments, the target sequence may be a sequence within a RNA molecule selected from the group consisting of mRNA, pre-mRNA, and rRNA. In some preferred embodiments, the target sequence may be a sequence within a RNA molecule selected from the group consisting of ncRNA, and lncRNA. In some more preferred embodiments, the target sequence may be a sequence within an mRNA molecule or a pre-mRNA molecule.

[0246] In certain embodiments, the spacer length of the guide RNA is less than 28 nucleotides. In certain embodiments, the spacer length of the guide RNA is at least 18 nucleotides and less than 28 nucleotides. In certain embodiments, the spacer length of the guide RNA is between 19 and 28 nucleotides. In certain embodiments, the spacer length of the guide RNA is between 19 and 25 nucleotides. In certain embodiments, the spacer length of the guide RNA is 20 nucleotides. In certain embodiments, the spacer length of the guide RNA is 23 nucleotides. In certain embodiments, the spacer length of the guide RNA is 25 nucleotides.

[0247] In certain embodiments, modulations of cleavage efficiency can be exploited by introduction of mismatches, e.g. 1 or more mismatches, such as 1 or 2 mismatches between spacer sequence and target sequence, including the position of the mismatch along the spacer/target. The more central (i.e. not 3′ or 5′) for instance a double mismatch is, the more cleavage efficiency is affected. Accordingly, by choosing mismatch position along the spacer, cleavage efficiency can be modulated. By means of example, if less than 100% cleavage of targets is desired (e.g. in a cell population), 1 or more, such as preferably 2 mismatches between spacer and target sequence may be introduced in the spacer sequences. The more central along the spacer of the mismatch position, the lower the cleavage percentage.

[0248] In certain example embodiments, the cleavage efficiency may be exploited to design single guides that can distinguish two or more targets that vary by a single nucleotide, such as a single nucleotide polymorphism (SNP), variation, or (point) mutation. The CRISPR effector may have reduced sensitivity to SNPs (or other single nucleotide variations) and continue to cleave SNP targets with a certain level of efficiency. Thus, for two targets, or a set of targets, a guide RNA may be designed with a nucleotide sequence that is complementary to one of the targets i.e. the on-target SNP. The guide RNA is further designed to have a synthetic mismatch. As used herein a “synthetic mismatch” refers to a non-naturally occurring mismatch that is introduced upstream or downstream of the naturally occurring SNP, such as at most 5 nucleotides upstream or downstream, for instance 4, 3, 2, or 1 nucleotide upstream or downstream, preferably at most 3 nucleotides upstream or downstream, more preferably at most 2 nucleotides upstream or downstream, most preferably 1 nucleotide upstream or downstream (i.e. adjacent the SNP). When the CRISPR effector binds to the on-target SNP, only a single mismatch will be formed with the synthetic mismatch and the CRISPR effector will continue to be activated and a detectable signal produced. When the guide RNA hybridizes to an off-target SNP, two mismatches will be formed, the mismatch from the SNP and the synthetic mismatch, and no detectable signal generated. Thus, the systems disclosed herein may be designed to distinguish SNPs within a population. For, example the systems may be used to distinguish pathogenic strains that differ by a single SNP or detect certain disease specific SNPs, such as but not limited to, disease associated SNPs, such as without limitation cancer associated SNPs.

[0249] In certain embodiments, the guide RNA is designed such that the SNP is located on position 1, 2, 3, 4, 5, 6, 7, 8, 9, 10, 11, 12, 13, 14, 15, 16, 17, 18, 19, 20, 21, 22, 23, 24, 25, 26, 27, 28, 29, or 30 of the spacer sequence (starting at the 5′ end). In certain embodiments, the guide RNA is designed such that the SNP is located on position 1, 2, 3, 4, 5, 6, 7, 8, or 9 of the spacer sequence (starting at the 5′ end). In certain embodiments, the guide RNA is designed such that the SNP is located on position 2, 3, 4, 5, 6, or 7 of the spacer sequence (starting at the 5′ end). In certain embodiments, the guide RNA is designed such that the SNP is located on position 3, 4, 5, or 6 of the spacer sequence (starting at the 5′ end). In certain embodiments, the guide RNA is designed such that the SNP is located on position 3 of the spacer sequence (starting at the 5′ end).

[0250] In certain embodiments, the guide RNA is designed such that the mismatch (e.g. the synthetic mismatch, i.e. an additional mutation besides a SNP) is located on position 1, 2, 3, 4, 5, 6, 7, 8, 9, 10, 11, 12, 13, 14, 15, 16, 17, 18, 19, 20, 21, 22, 23, 24, 25, 26, 27, 28, 29, or 30 of the spacer sequence (starting at the 5′ end). In certain embodiments, the guide RNA is designed such that the mismatch is located on position 1, 2, 3, 4, 5, 6, 7, 8, or 9 of the spacer sequence (starting at the 5′ end). In certain embodiments, the guide RNA is designed such that the mismatch is located on position 4, 5, 6, or 7 of the spacer sequence (starting at the 5′ end. In certain embodiments, the guide RNA is designed such that the mismatch is located at position 3, 4, 5, or 6 of the spacer, preferably position 3. In certain embodiments, the guide RNA is designed such that the mismatch is located on position 5 of the spacer sequence (starting at the 5′ end).

[0251] In certain embodiments, said mismatch is 1, 2, 3, 4, or 5 nucleotides upstream or downstream, preferably 2 nucleotides, preferably downstream of said SNP or other single nucleotide variation in said guide RNA.

[0252] In certain embodiments, the guide RNA is designed such that the mismatch is located 2 nucleotides upstream of the SNP (i.e. one intervening nucleotide).

[0253] In certain embodiments, the guide RNA is designed such that the mismatch is located 2 nucleotides downstream of the SNP (i.e. one intervening nucleotide).

[0254] In certain embodiments, the guide RNA is designed such that the mismatch is located on position 5 of the spacer sequence (starting at the 5′ end) and the SNP is located on position 3 of the spacer sequence (starting at the 5′ end).

[0255] In certain embodiments, the guide RNA comprises a spacer which is truncated relative to a wild type spacer. In certain embodiments, the guide RNA comprises a spacer which comprises less than 28 nucleotides, preferably between and including 20 to 27 nucleotides.

[0256] In certain embodiments, the guide RNA comprises a spacer which consists of 20-25 nucleotides or 20-23 nucleotides, such as preferably 20 or 23 nucleotides.

[0257] In certain embodiments, the one or more guide RNAs are designed to detect a single nucleotide polymorphism in a target RNA or DNA, or a splice variant of an RNA transcript.

[0258] In certain embodiments, the one or more guide RN As may be designed to bind to one or more target molecules that are diagnostic for a disease state. In some embodiments, the disease may be cancer. In some embodiments, the disease state may be an autoimmune disease. In some embodiments, the disease state may be an infection. In some embodiments, the infection may be caused by a virus, a bacterium, a fungus, a protozoa, or a parasite. In specific embodiments, the infection is a viral infection. In specific embodiments, the viral infection is caused by a DNA virus.

[0259] The embodiments described herein comprehend inducing one or more nucleotide modifications in a eukaryotic cell (in vitro, i.e. in an isolated eukaryotic cell) as herein discussed comprising delivering to cell a vector as herein discussed. The mutation(s) can include the introduction, deletion, or substitution of one or more nucleotides at each target sequence of cell(s) via the guide(s) RNA(s). The mutations can include the introduction, deletion, or substitution of 1-75 nucleotides at each target sequence of said cell(s) via the guide(s) RNA(s). The mutations can include the introduction, deletion, or substitution of 1, 5, 10, 11, 12, 13, 14, 15, 16, 17, 18, 19, 20, 21, 22, 23, 24, 25, 26, 27, 28, 29, 30, 35, 40, 45, 50, or 75 nucleotides at each target sequence of said cell(s) via the guide(s) RNA(s). The mutations can include the introduction, deletion, or substitution of 5, 10, 11, 12, 13, 14, 15, 16, 17, 18, 19, 20, 21, 22, 23, 24, 25, 26, 27, 28, 29, 30, 35, 40, 45, 50, or 75 nucleotides at each target sequence of said cell(s) via the guide(s) RNA(s). The mutations include the introduction, deletion, or substitution of 10, 11, 12, 13, 14, 15, 16, 17, 18, 19, 20, 21, 22, 23, 24, 25, 26, 27, 28, 29, 30, 35, 40, 45, 50, or 75 nucleotides at each target sequence of said cell(s) via the guide(s) RNA(s). The mutations can include the introduction, deletion, or substitution of 20, 21, 22, 23, 24, 25, 26, 27, 28, 29, 30, 35, 40, 45, 50, or 75 nucleotides at each target sequence of said cell(s) via the guide(s) RNA(s). The mutations can include the introduction, deletion, or substitution of 40, 45, 50, 75, 100, 200, 300, 400 or 500 nucleotides at each target sequence of said cell(s) via the guide(s) RNA(s).

[0260] Typically, in the context of an endogenous CRISPR system, formation of a CRISPR complex (comprising a guide sequence hybridized to a target sequence and complexed with one or more Cas proteins) results in cleavage in or near (e.g. within 1, 2, 3, 4, 5, 6, 7, 8, 9, 10, 20, 50, or more base pairs from) the target sequence, but may depend on for instance secondary structure, in particular in the case of RNA targets.

### Methods for Designing Highly Active Guides

[0261] A method for designing highly active guide molecules, e.g., guide RNAs, for use in the detection systems may comprise the steps of designing putative guide RNAs tiled across a target molecule of interest; creating a training model based on results of incubating guide RNAs with a Cas13 protein and the target molecule; predicting highly active guide RNAs for the target molecule, wherein the predicting comprises optimizing the nucleotide at each base position in the guide RNA based on the training model; and validating the predicted highly active guide RNAs by incubating the guide RNAs with the Cas13 protein and the target molecule. The method can be as described in U.S. Provisional Application Nos. 62/818,702 amd 62/890,555 (Attorney Reference BI-10504, Docket BROD-3980) incorporated by reference in their entirety. Guide RNAs generate by the design methods can be used with the systems for detecting coronavirus as described elsewhere herein.

[0262] In some embodiments, the invention provides a method for designing guide RNAs for use in the detection systems described herein. The method may comprise designing putative guide RNAs tiled across a target molecule of interest, such as a coronavirus, viruses that cause respiratory illness, including coronavirus, including 2019-nCov (Covid-19). The method may further comprise creating a training model based on results of incubating guide RNAs with a Cas13 protein and the target molecule. The method may further comprise predicting highly active guide RNAs for the target molecule. Predicting may comprise optimizing the nucleotide at each base position in the guide RNA based on the training model. The method may further comprise validating the predicted highly active guide RNAs by incubating the guide RNAs with the Cas13 protein and the target molecule.

[0263] In certain instances, the optimized guide for the target molecule is generated by pooling a set of guides, the guides produced by tiling guides across the target molecule; incubating the set of guides with a Cas polypeptide and the target molecule and measuring cleavage activity of each guide in the set; creating a training model based on the cleavage activity of the set of guides in the incubating step. Steps of predicting highly active guides for the target molecule and identifying the optimized guides by incubating the predicted highly active guides with the Cas polypeptide and the target molecule and selecting optimized guides may also be utilized in generating optimized guides. In embodiments, the training model comprises one or more input features selected from guide sequence, flanking target sequence, normalized positions of the guide in the target and guide GC content. In certain instances, the guide sequence and/or flanking sequence input comprises one hit encoding mono-nucleotide and/or dinucleotide In an embodiments, the training model comprises applying logistic regression model on the activity of the guides across the one or more input features.

[0264] In an aspect, the predicting highly active guides for the target molecule comprises selecting guides with an increase in activity of a guide relative to the median activity, or selecting guides with highest guide activity. In certain instances, the increase in activity is measured by an increase in fluorescence. Guides may be selected based on a particular cutoff, in certain instances based on activity relative to a median or above a particular cutoff-, for instance, are selected with a 1.5, 2, 2.5 or 3-fold activity relative to median, or are in the top quartile or quintile for each target tested.

[0265] The optimized guides may be generated for a Cas13 ortholog, in some instances, the optimized guide is generated for an LwaCas13a or a Cca13b ortholog.

[0266] In some embodiments, the invention provides a method for designing guide RNAs for use in the detection systems described herein. The method may comprise designing putative guide RNAs tiled across a target molecule of interest. The method may further comprise creating a training model based on results of incubating guide RNAs with a Cas13 protein and the target molecule. The method may further comprise predicting highly active guide RNAs for the target molecule. Predicting may comprise optimizing the nucleotide at each base position in the guide RNA based on the training model. The method may further comprise validating the predicted highly active guide RNAs by incubating the guide RNAs with the Cas13 protein and the target molecule.

[0267] Guides may be screened for on-target and off-target effects. When using LAMP amplification, the products of LAMP can help identify those guides with more minimal off-target effects relative to on-target products.

[0268] The design of putative guide RNAs for target molecules of interest is described elsewhere herein.

[0269] The creation of training models is known in the art. Machine learning can be generalized as the ability of a learning machine to perform accurately on new, unseen examples/tasks after having experienced a learning data set. Machine learning may include the following concepts and methods. Supervised learning concepts may include AODE; Artificial neural network, such as Backpropagation, Autoencoders, Hopfield networks, Boltzmann machines, Restricted Boltzmann Machines, and Spiking neural networks; Bayesian statistics, such as Bayesian network and Bayesian knowledge base; Case-based reasoning; Gaussian process regression; Gene expression programming; Group method of data handling (GMDH); Inductive logic programming; Instance-based learning; Lazy learning; Learning Automata, Learning Vector Quantization, Logistic Model Tree; Minimum message length (decision trees, decision graphs, etc.), such as Nearest Neighbor Algorithm and Analogical modeling; Probably approximately correct learning (PAC) learning; Ripple down rules, a knowledge acquisition methodology; Symbolic machine learning algorithms; Support vector machines; Random Forests; Ensembles of classifiers, such as Bootstrap aggregating (bagging) and Boosting (meta-algorithm); Ordinal classification; Information fuzzy networks (IFN); Conditional Random Field; ANOVA; Linear classifiers, such as Fisher s linear discriminant, Linear regression, Logistic regression, Multinomial logistic regression, Naive Bayes classifier, Perceptron, Support vector machines; Quadratic classifiers; k-nearest neighbor; Boosting; Decision trees, such as C4.5, Random forests, ID3, CART, SLIQ, SPRINT; Bayesian networks, such as Naive Bayes; and Hidden Markov models. Unsupervised learning concepts may include; Expectation-maximization algorithm; Vector Quantization; Generative topographic map; Information bottleneck method; Artificial neural network, such as Self-organizing map; Association rule learning, such as, Apriori algorithm, Eclat algorithm, and FP-growth algorithm; Hierarchical clustering, such as Single-linkage clustering and Conceptual clustering; Cluster analysis, such as, K-means algorithm, Fuzzy clustering, DBSCAN, and OPTICS algorithm; and Outlier Detection, such as Local Outlier Factor. Semi-supervised learning concepts may include; Generative models; Low-density separation; Graph-based methods; and Co-training. Reinforcement learning concepts may include; Temporal difference learning; Q-learning; Learning Automata; and SARSA. Deep learning concepts may include; Deep belief networks; Deep Boltzmann machines; Deep Convolutional neural networks; Deep Recurrent neural networks; and Hierarchical temporal memory.

[0270] The methods as disclosed herein designing putative guide RNAs may comprise design based on one or more variables, including guide sequence, flanking target sequence, guide position and guide GC content as input features. In certain embodiments, the length of the flanking target region can be considered a free parameter and can be further selected during cross-validation. Additionally, mono-nucleotide and/or dinucleotide based identities across a guide length and flanking sequence in the target, varying one or more of flanking sequence length, normalized positions of the guide in the target, and GC content of the guide, or a combination thereof.

[0271] In embodiments, the training model for the guide design of highly active guides is Cas protein specific. In embodiments, the Cas protein is a Cas13a, Cas13b, a Cas12a and/or a Cas12b protein. In certain embodiments, the protein is LwaCas13a or CcaCas13b. Selection for the best guides can be dependent on each enzyme. In particular embodiments, where majority of guides have activity above background on a per-target basis, selection of guides may be based on 1.5 fold, 2, 2.5, 3 or more fold activity over the median activity. In other instances, the best performing guides may be at or near background fluorescence. In this instance, the guide selection may be based on a top percentile, e.g. quartile or quintile, of performing guides.

[0272] Codon optimization is described elsewhere herein. In specific embodiments, the nucleotide at each base position in the guide RNA may be optimized based on the training model, thus allowing for prediction of highly active guide RNAs for the target molecule.

[0273] The predicted highly active guide RNAs may then be validated or verified by incubating the guide RNAs with a Cas effector protein, such as Cas13 protein and the target molecule(s) for coronavirus, for example coronavirus sequence that is immunostimulatory to a host immune system, or a target sequence unique to the 2019-nCov, as described elsewhere herein.

[0274] In certain embodiments, optimization comprises validation of best performing models for a particular Cas polypeptide across multiple guides may comprise comparing the predicted score of each guide versus actual collateral activity upon target recognition. In embodiments, kinetic data of the best and worst predicted guides are evaluated. In embodiments, lateral flow performance of the predicted guides is evaluated for a target sequence.

[0275] In an aspect, the guide sequence is selected from Table 3. Guide sequences can also be selected from Table 5 or Table 8.

Lengthy table referenced here
US20240327933A1-20241003-T00004
Please refer to the end of the specification for access instructions.

### Detection Construct

[0276] The systems and methods described herein comprise a detection construct. As used herein, a “detection construct” refers to a molecule that identified by suitable detection means. The term “detection construct” may also be referred to in the alternative as a “masking construct.” Depending on the particular embodiment, the masking construct may be a RNA-based masking construct or a DNA-based masking construct. The Nucleic Acid-based masking constructs comprises a nucleic acid element wherein a detectable label is “quenched” or “masked”. Cleavage of the nucleic acid element by RNase, or denaturation of two strands releases agents or produces conformational changes that allow a detectable signal to be produced. Example constructs demonstrating how the nucleic acid element may be used to prevent or mask generation of detectable signal are described below and embodiments of the invention comprise variants of the same. Prior to cleavage, or when the masking construct is in an ‘active’ state, the masking construct blocks the generation or detection of a positive detectable signal. In certain embodiments, detection constructs are designed for RNase H.

[0277] It will be understood that in certain example embodiments a minimal background signal may be produced in the presence of an active masking construct. A positive detectable signal may be any signal that can be detected using optical, fluorescent, chemiluminescent, electrochemical or other detection methods known in the art. The term “positive detectable signal” is used to differentiate from other detectable signals that may be detectable in the presence of the masking construct. For example, in certain embodiments a first signal may be detected when the masking agent is present or when a nuclease system has not been activated (i.e. a negative detectable signal), which then converts to a second signal (e.g. the positive detectable signal) upon detection of the target molecules and cleavage or deactivation of the masking agent, or upon activation of the nuclease. The positive detectable signal, then, is a signal detected upon activation of the nuclease or upon denaturation of two nucleic acid strands, and may be, in a colorimetric or fluorescent assay, a decrease in fluorescence or color relative to a control or an increase in fluorescence or color relative to a control, depending on the configuration of the lateral flow substrate, and as described further herein.

[0278] In certain example embodiments, the masking construct may comprise a hybridization chain reaction (HCR)initiator sequence and a cutting motif, or a cleavable structural element, such as a loop or hairpin, that prevents the initiator from initiating the HCR reaction. The cutting motif may be preferentially cut by a nuclease. Upon cleavage of the probe to release the quencher, the initiator is then released to trigger the HCR reaction, detection thereof indicating the presence of one or more targets in the sample. In certain example embodiments, the masking construct comprises a hairpin with a RNA loop. When a nuclease cuts the RNA loop, the initiator can be released to trigger the HCR reaction.

[0279] In certain example embodiments, the masking construct may suppress generation of a gene product. The gene product may be encoded by a reporter construct that is added to the sample. The masking construct may be an interfering RNA involved in a RNA interference pathway, such as a short hairpin RNA (shRNA) or small interfering RNA (siRNA). The masking construct may also comprise microRNA (miRNA). While present, the masking construct suppresses expression of the gene product. The gene product may be a fluorescent protein or other RNA transcript or proteins that would otherwise be detectable by a labeled probe, aptamer, or antibody but for the presence of the masking construct. Upon activation of the effector protein the masking construct is cleaved or otherwise silenced allowing for expression and detection of the gene product as the positive detectable signal. In preferred embodiments, the masking constructs comprise two or more detectable signals, for example, fluorescent signals, that can be read on different channels of a fluorimeter.

[0280] In specific embodiments, the masking construct comprises a silencing RNA that suppresses generation of a gene product encoded by a reporting construct, wherein the gene product generates the detectable positive signal when expressed.

[0281] In certain example embodiments, the masking construct may sequester one or more reagents needed to generate a detectable positive signal such that release of the one or more reagents from the masking construct results in generation of the detectable positive signal. The one or more reagents may combine to produce a colorimetric signal, a chemiluminescent signal, a fluorescent signal, or any other detectable signal and may comprise any reagents known to be suitable for such purposes. In certain example embodiments, the one or more reagents are sequestered by RNA aptamers that bind the one or more reagents. The one or more reagents are released when the effector protein is activated upon detection of a target molecule and the RNA or DNA aptamers are degraded.

[0282] In certain example embodiments, the masking construct may be immobilized on a solid substrate in an individual discrete volume (defined further below) and sequesters a single reagent. For example, the reagent may be a bead comprising a dye. When sequestered by the immobilized reagent, the individual beads are too diffuse to generate a detectable signal, but upon release from the masking construct are able to generate a detectable signal, for example by aggregation or simple increase in solution concentration. In certain example embodiments, the immobilized masking agent is a RNA- or DNA-based aptamer that can be cleaved by the activated effector protein upon detection of a target molecule.

[0283] In certain other example embodiments, the masking construct binds to an immobilized reagent in solution thereby blocking the ability of the reagent to bind to a separate labeled binding partner that is free in solution. Thus, upon application of a washing step to a sample, the labeled binding partner can be washed out of the sample in the absence of a target molecule. However, if the effector protein is activated, the masking construct is cleaved to a degree sufficient to interfere with the ability of the masking construct to bind the reagent thereby allowing the labeled binding partner to bind to the immobilized reagent. Thus, the labeled binding partner remains after the wash step indicating the presence of the target molecule in the sample. In certain aspects, the masking construct that binds the immobilized reagent is a DNA or RNA aptamer. The immobilized reagent may be a protein and the labeled binding partner may be a labeled antibody. Alternatively, the immobilized reagent may be streptavidin and the labeled binding partner may be labeled biotin. The label on the binding partner used in the above embodiments may be any detectable label known in the art. In addition, other known binding partners may be used in accordance with the overall design described herein.

[0284] In certain example embodiments, the masking construct may comprise a ribozyme. Ribozymes are RNA molecules having catalytic properties. Ribozymes, both naturally and engineered, comprise or consist of RNA that may be targeted by the effector proteins disclosed herein. The ribozyme may be selected or engineered to catalyze a reaction that either generates a negative detectable signal or prevents generation of a positive control signal. Upon deactivation of the ribozyme by the activated effector protein the reaction generating a negative control signal, or preventing generation of a positive detectable signal, is removed thereby allowing a positive detectable signal to be generated. In one example embodiment, the ribozyme may catalyze a colorimetric reaction causing a solution to appear as a first color. When the ribozyme is deactivated the solution then turns to a second color, the second color being the detectable positive signal. An example of how ribozymes can be used to catalyze a colorimetric reaction are described in Zhao et al. “Signal amplification of glucosamine-6-phosphate based on ribozyme g1 mS,” Biosens Bioelectron. 2014; 16:337-42, and provide an example of how such a system could be modified to work in the context of the embodiments disclosed herein. Alternatively, ribozymes, when present can generate cleavage products of, for example, RNA transcripts. Thus, detection of a positive detectable signal may comprise detection of non-cleaved RNA transcripts that are only generated in the absence of the ribozyme.

[0285] In some embodiments, the masking construct may be a ribozyme that generates a negative detectable signal, and wherein a positive detectable signal is generated when the ribozyme is deactivated.

[0286] In certain example embodiments, the one or more reagents is a protein, such as an enzyme, capable of facilitating generation of a detectable signal, such as a colorimetric, chemiluminescent, or fluorescent signal, that is inhibited or sequestered such that the protein cannot generate the detectable signal by the binding of one or more DNA or RNA aptamers to the protein. Upon activation of the effector proteins disclosed herein, the DNA or RNA aptamers are cleaved or degraded to an extent that they no longer inhibit the protein's ability to generate the detectable signal. In certain example embodiments, the aptamer is a thrombin inhibitor aptamer. In certain example embodiments the thrombin inhibitor aptamer has a sequence of GGGAACAAAGCUGAAGUACUUACCC (SEQ ID NO.XX). When this aptamer is cleaved, thrombin will become active and will cleave a peptide colorimetric or fluorescent substrate. In certain example embodiments, the colorimetric substrate is para-nitroanilide (pNA) covalently linked to the peptide substrate for thrombin. Upon cleavage by thrombin, pNA is released and becomes yellow in color and easily visible to the eye. In certain example embodiments, the fluorescent substrate is 7-amino-4-methylcoumarin a blue fluorophore that can be detected using a fluorescence detector. Inhibitory aptamers may also be used for horseradish peroxidase (HRP), beta-galactosidase, or calf alkaline phosphatase (CAP) and within the general principals laid out above.

[0287] In certain embodiments, RNAse or DNAse activity is detected colorimetrically via cleavage of enzyme-inhibiting aptamers. One potential mode of converting DNAse or RNAse activity into a colorimetric signal is to couple the cleavage of a DNA or RNA aptamer with the re-activation of an enzyme that is capable of producing a colorimetric output. In the absence of RNA or DNA cleavage, the intact aptamer will bind to the enzyme target and inhibit its activity. The advantage of this readout system is that the enzyme provides an additional amplification step: once liberated from an aptamer via collateral activity (e.g. Cpf1 collateral activity), the colorimetric enzyme will continue to produce colorimetric product, leading to a multiplication of signal.

[0288] In certain embodiments, an existing aptamer that inhibits an enzyme with a colorimetric readout is used. Several aptamer/enzyme pairs with colorimetric readouts exist, such as thrombin, protein C, neutrophil elastase, and subtilisin. These proteases have colorimetric substrates based upon pNA and are commercially available. In certain embodiments, a novel aptamer targeting a common colorimetric enzyme is used. Common and robust enzymes, such as beta-galactosidase, horseradish peroxidase, or calf intestinal alkaline phosphatase, could be targeted by engineered aptamers designed by selection strategies such as SELEX. Such strategies allow for quick selection of aptamers with nanomolar binding efficiencies and could be used for the development of additional enzyme/aptamer pairs for colorimetric readout.

[0289] In certain embodiments, the masking construct may be a DNA or RNA aptamer and/or may comprise a DNA or RNA-tethered inhibitor.

[0290] In certain embodiments, the masking construct may comprise a DNA or RNA oligonucleotide to which a detectable ligand and a masking component are attached.

[0291] In certain embodiments, RNAse or DNase activity is detected colorimetrically via cleavage of RNA-tethered inhibitors. Many common colorimetric enzymes have competitive, reversible inhibitors: for example, beta-galactosidase can be inhibited by galactose. Many of these inhibitors are weak, but their effect can be increased by increases in local concentration. By linking local concentration of inhibitors to DNase RNAse activity, colorimetric enzyme and inhibitor pairs can be engineered into DNase and RNAse sensors. The colorimetric DNase or RNAse sensor based upon small-molecule inhibitors involves three components: the colorimetric enzyme, the inhibitor, and a bridging RNA or DNA that is covalently linked to both the inhibitor and enzyme, tethering the inhibitor to the enzyme. In the uncleaved configuration, the enzyme is inhibited by the increased local concentration of the small molecule; when the DNA or RNA is cleaved (e.g. by Cas13 or Cas12 collateral cleavage), the inhibitor will be released and the colorimetric enzyme will be activated.

[0292] In certain embodiments, the aptamer or DNA- or RNA-tethered inhibitor may sequester an enzyme, wherein the enzyme generates a detectable signal upon release from the aptamer or DNA or RNA tethered inhibitor by acting upon a substrate. In some embodiments, the aptamer may be an inhibitor aptamer that inhibits an enzyme and prevents the enzyme from catalyzing generation of a detectable signal from a substance. In some embodiments, the DNA- or RNA-tethered inhibitor may inhibit an enzyme and may prevent the enzyme from catalyzing generation of a detectable signal from a substrate.

[0293] In certain embodiments, RNAse activity is detected colorimetrically via formation and/or activation of G-quadruplexes. G quadruplexes in DNA can complex with heme (iron (III)-protoporphyrin IX) to form a DNAzyme with peroxidase activity. When supplied with a peroxidase substrate (e.g. ABTS: (2,2-Azinobis [3-ethylbenzothiazoline-6-sulfonic acidJ-diammonium salt)), the G-quadruplex-heme complex in the presence of hydrogen peroxide causes oxidation of the substrate, which then forms a green color in solution. An example G-quadruplex forming DNA sequence is: GGGTAGGGCGGGTTGGGA (SEQ ID NO:311). By hybridizing an additional DNA or RNA sequence, referred to herein as a “staple,” to this DNA aptamer, formation of the G-quadraplex structure will be limited. Upon collateral activation, the staple will be cleaved allowing the G quadraplex to form and heme to bind. This strategy is particularly appealing because color formation is enzymatic, meaning there is additional amplification beyond collateral activation.

[0294] In certain embodiments, the masking construct may comprise an RNA oligonucleotide designed to bind a G-quadruplex forming sequence, wherein a G-quadruplex structure is formed by the G-quadruplex forming sequence upon cleavage of the masking construct, and wherein the G-quadruplex structure generates a detectable positive signal.

[0295] In certain example embodiments, the masking construct may be immobilized on a solid substrate in an individual discrete volume (defined further below) and sequesters a single reagent. For example, the reagent may be a bead comprising a dye. When sequestered by the immobilized reagent, the individual beads are too diffuse to generate a detectable signal, but upon release from the masking construct are able to generate a detectable signal, for example by aggregation or simple increase in solution concentration. In certain example embodiments, the immobilized masking agent is a DNA- or RNA-based aptamer that can be cleaved by the activated effector protein upon detection of a target molecule.

[0296] In one example embodiment, the masking construct comprises a detection agent that changes color depending on whether the detection agent is aggregated or dispersed in solution. For example, certain nanoparticles, such as colloidal gold, undergo a visible purple to red color shift as they move from aggregates to dispersed particles. Accordingly, in certain example embodiments, such detection agents may be held in aggregate by one or more bridge molecules. At least a portion of the bridge molecule comprises RNA or DNA. Upon activation of the effector proteins disclosed herein, the RNA or DNA portion of the bridge molecule is cleaved allowing the detection agent to disperse and resulting in the corresponding change in color. In certain example embodiments, the detection agent is a colloidal metal. The colloidal metal material may include water-insoluble metal particles or metallic compounds dispersed in a liquid, a hydrosol, or a metal sol. The colloidal metal may be selected from the metals in groups IA, IB, IIB and IIIB of the periodic table, as well as the transition metals, especially those of group VIII. Preferred metals include gold, silver, aluminum, ruthenium, zinc, iron, nickel and calcium. Other suitable metals also include the following in all of their various oxidation states: lithium, sodium, magnesium, potassium, scandium, titanium, vanadium, chromium, manganese, cobalt, copper, gallium, strontium, niobium, molybdenum, palladium, indium, tin, tungsten, rhenium, platinum, and gadolinium. The metals are preferably provided in ionic form, derived from an appropriate metal compound, for example the A13+, Ru3+, Zn2+, Fe3+, Ni2+ and Ca2+ ions.

[0297] When the RNA or DNA bridge is cut by the nuclease, the aforementioned color shift is observed. In certain example embodiments the particles are colloidal metals. In certain other example embodiments, the colloidal metal is a colloidal gold. In certain example embodiments, the colloidal nanoparticles are 15 nm gold nanoparticles (AuNPs). Due to the unique surface properties of colloidal gold nanoparticles, maximal absorbance is observed at 520 nm when fully dispersed in solution and appear red in color to the naked eye. Upon aggregation of AuNPs, they exhibit a red-shift in maximal absorbance and appear darker in color, eventually precipitating from solution as a dark purple aggregate. In certain example embodiments the nanoparticles are modified to include DNA linkers extending from the surface of the nanoparticle. Individual particles are linked together by single-stranded RNA (ssRNA) or single-stranded DNA bridges that hybridize on each end to at least a portion of the DNA linkers. Thus, the nanoparticles will form a web of linked particles and aggregate, appearing as a dark precipitate. Upon activation of the CRISPR effectors disclosed herein, the ssRNA or ssDNA bridge will be cleaved, releasing the AU NPS from the linked mesh and producing a visible red color. Example DNA linkers and bridge sequences are listed below. Thiol linkers on the end of the DNA linkers may be used for surface conjugation to the AuNPS. Other forms of conjugation may be used. In certain example embodiments, two populations of AuNPs may be generated, one for each DNA linker. This will help facilitate proper binding of the ssRNA bridge with proper orientation. In certain example embodiments, a first DNA linker is conjugated by the 3′ end while a second DNA linker is conjugated by the 5′ end.

[0298] In certain other example embodiments, the masking construct may comprise an RNA or DNA oligonucleotide to which are attached a detectable label and a masking agent of that detectable label. An example of such a detectable label/masking agent pair is a fluorophore and a quencher of the fluorophore. Quenching of the fluorophore can occur as a result of the formation of a non-fluorescent complex between the fluorophore and another fluorophore or non-fluorescent molecule. This mechanism is known as ground-state complex formation, static quenching, or contact quenching. Accordingly, the RNA or DNA oligonucleotide may be designed so that the fluorophore and quencher are in sufficient proximity for contact quenching to occur. Fluorophores and their cognate quenchers are known in the art and can be selected for this purpose by one having ordinary skill in the art. The particular fluorophore/quencher pair is not critical in the context of this invention, only that selection of the fluorophore/quencher pairs ensures masking of the fluorophore. Upon activation of the effector proteins disclosed herein, the RNA or DNA oligonucleotide is cleaved thereby severing the proximity between the fluorophore and quencher needed to maintain the contact quenching effect. Accordingly, detection of the fluorophore may be used to determine the presence of a target molecule in a sample.

[0299] In certain other example embodiments, the masking construct may comprise one or more RNA oligonucleotides to which are attached one or more metal nanoparticles, such as gold nanoparticles. In some embodiments, the masking construct comprises a plurality of metal nanoparticles crosslinked by a plurality of RNA or DNA oligonucleotides forming a closed loop. In one embodiment, the masking construct comprises three gold nanoparticles crosslinked by three RNA or DNA oligonucleotides forming a closed loop. In some embodiments, the cleavage of the RNA or DNA oligonucleotides by the CRISPR effector protein leads to a detectable signal produced by the metal nanoparticles.

[0300] In certain other example embodiments, the masking construct may comprise one or more RNA or DNA oligonucleotides to which are attached one or more quantum dots. In some embodiments, the cleavage of the RNA or DNA oligonucleotides by the CRISPR effector protein leads to a detectable signal produced by the quantum dots.

[0301] In one example embodiment, the masking construct may comprise a quantum dot. The quantum dot may have multiple linker molecules attached to the surface. At least a portion of the linker molecule comprises RNA or DNA. The linker molecule is attached to the quantum dot at one end and to one or more quenchers along the length or at terminal ends of the linker such that the quenchers are maintained in sufficient proximity for quenching of the quantum dot to occur. The linker may be branched. As above, the quantum dot/quencher pair is not critical, only that selection of the quantum dot/quencher pair ensures masking of the fluorophore. Quantum dots and their cognate quenchers are known in the art and can be selected for this purpose by one having ordinary skill in the art. Upon activation of the effector proteins disclosed herein, the RNA or DNA portion of the linker molecule is cleaved thereby eliminating the proximity between the quantumdot and one or more quenchers needed to maintain the quenching effect. In certain example embodiments the quantum dot is streptavidin conjugated. RNA or DNA are attached via biotin linkers and recruit quenching molecules with the sequences /5Biosg/UCUCGUACGUUC/3IAbRQSp/ (SEQ ID NO:XX) or /5Biosg/UCUCGUACGUUCUCUCGUACGUUC/3IAbRQSp/ (SEQ ID NO:XX) where /5Biosg/is a biotin tag and /3IAbRQSp/ is an Iowa black quencher (Iowa Black FQ). Upon cleavage, by the activated effectors disclosed herein the quantum dot will fluoresce visibly.

[0302] In specific embodiments, the detectable ligand may be a fluorophore and the masking component may be a quencher molecule.

[0303] In a similar fashion, fluorescence energy transfer (FRET) may be used to generate a detectable positive signal. FRET is a non-radiative process by which a photon from an energetically excited fluorophore (i.e. “donor fluorophore”) raises the energy state of an electron in another molecule (i.e. “the acceptor”) to higher vibrational levels of the excited singlet state. The donor fluorophore returns to the ground state without emitting a fluoresce characteristic of that fluorophore. The acceptor can be another fluorophore or non-fluorescent molecule. If the acceptor is a fluorophore, the transferred energy is emitted as fluorescence characteristic of that fluorophore. If the acceptor is a non-fluorescent molecule the absorbed energy is loss as heat. Thus, in the context of the embodiments disclosed herein, the fluorophore/quencher pair is replaced with a donor fluorophore/acceptor pair attached to the oligonucleotide molecule. When intact, the masking construct generates a first signal (negative detectable signal) as detected by the fluorescence or heat emitted from the acceptor. Upon activation of the effector proteins disclosed herein the RNA oligonucleotide is cleaved and FRET is disrupted such that fluorescence of the donor fluorophore is now detected (positive detectable signal).

[0304] In certain example embodiments, the masking construct comprises the use of intercalating dyes which change their absorbance in response to cleavage of long RNAs or DNAs to short nucleotides. Several such dyes exist. For example, pyronine-Y will complex with RNA and form a complex that has an absorbance at 572 nm. Cleavage of the RNA results in loss of absorbance and a color change. Methylene blue may be used in a similar fashion, with changes in absorbance at 688 nm upon RNA cleavage. Accordingly, in certain example embodiments the masking construct comprises a RNA and intercalating dye complex that changes absorbance upon the cleavage of RNA by the effector proteins disclosed herein.

[0305] In certain example embodiments, the masking construct may comprise an initiator for an HCR reaction. See e.g. Dirks and Pierce. PNAS 101, 15275-15728 (2004). HCR reactions utilize the potential energy in two hairpin species. When a single-stranded initiator having a portion of complementary to a corresponding region on one of the hairpins is released into the previously stable mixture, it opens a hairpin of one species. This process, in turn, exposes a single-stranded region that opens a hairpin of the other species. This process, in turn, exposes a single stranded region identical to the original initiator. The resulting chain reaction may lead to the formation of a nicked double helix that grows until the hairpin supply is exhausted. Detection of the resulting products may be done on a gel or colorimetrically. Example colorimetric detection methods include, for example, those disclosed in Lu et al. “Ultra-sensitive colorimetric assay system based on the hybridization chain reaction-triggered enzyme cascade amplification ACS Appl Mater Interfaces, 2017, 9(1):167-175, Wang et al. “An enzyme-free colorimetric assay using hybridization chain reaction amplification and split aptamers” Analyst 2015, 150, 7657-7662, and Song et al. “Non-covalent fluorescent labeling of hairpin DNA probe coupled with hybridization chain reaction for sensitive DNA detection.” Applied Spectroscopy, 70(4): 686-694 (2016).

[0306] In certain example embodiments, the masking construct suppresses generation of a detectable positive signal until cleaved, or modified by an activated CRISPR effector protein. In some embodiments, the masking construct may suppress generation of a detectable positive signal by masking the detectable positive signal, or generating a detectable negative signal instead.

### Devices for Detection Assays

[0307] In certain embodiments, the detection assay can be provided on a cartridge or chip. In an aspect, the cartridge can comprise one or more ampoules and one or more wells that are communicatively coupled, allowing for the transfer, exchange or movement of reagents and sample with or without the use of beads through the chambers of the cartridge and facilitating detection assays utilizing systems/devices for facilitating the detection assay on the cartridge.

### Cartridge

[0308] The cartridge, also referred to herein as a chip, according to the present invention comprises a series of components of ampoules and chambers that are communicatively coupled with one or more other components on the cartridge. The coupling is typically a fluidic communication, for example, via channels. The cartridge may comprise a membrane that seals one or more of the chambers and/or ampoules. In an aspect, the membrane allows for storage of reagents, buffers and other solid or fluid components which cover and seal the cartridge. The membrane can be configured to be punctured, pierced or otherwise released from sealing or covering one or more components of the cartridge by a means for releasing reagents.

[0309] As noted above, certain embodiments enable the use of nucleic acid binding beads to concentrate target nucleic acid but that do not require elution of the isolated nucleic acid. Thus, in certain example embodiments, the cartridge may further comprise an activatable magnet, such as an electro-magnet. A means for activating the magnet may be located on the device, or the means for supplying the magnet or activating the magnet on the cartridge may be provided by a second device, such as those disclosed in further detail below.

[0310] An exemplary cartridge is depicted in [CAN WE USE FIG. 30 OF PREVIOUS APPLICATION OR DO WE HAVE ANOTHER PICTURE??J. This embodiment is by way of example only, and it should be understood that other configurations of individual components on the cartridge are also envisioned without departing from the overall scope and function of the invention. The cartridge (10) can comprise two or more ampoules (80,90). A first chamber for receiving a sample (30) is also provided and can be communicatively connected to an ampoule (90) and a second chamber (40). The second chamber (40) may be a lysis chamber. The lysis chamber can in turn be communicatively connected to a channel (100). The channel (100) may be a metering channel that is communicatively coupled to an ampoule (90) and a third chamber (60). The third chamber (60) may be an amplification chamber. Hydrophobic vents can be disposed on the cartridge (50, 70). FIG. shows the cartridge body (15) with a membrane cover or laminate film (12).

[0311] The overall size of the device may be between 10, 15, 20, 25, 30, 35, 40, 45, 55, 60, 65, 70, 75, 80, 85, 90, 95, or 100 mm in width, and 45, 50, 55, 60, 65, 70, 75, 80, 85, 90, 95, 100, 105, 110, 115, 120, 125, 130, 135, 140, 145, 150, 155, 160, 165, 170, 175, 180, 185, 190, 195, or 200 mm. The sizing of ampoules, chambers, and channels can be selected to be in line with the reaction volumes discussed herein and to fit within the general size parameters of the overall cartridge.

### Ampoules

[0312] The ampoules, also referred to as blisters, allow for storage and release of reagents throughout the cartridge. Ampoules can include liquid or solid reagents, for example, lysis reagents in one ampoule and reaction reagents in another ampoule. The reagents can be as described elsewhere herein, and can be adapted for the use in the cartridge. The ampoule may be sealed by a film that allows for the bursting, puncture or other release of the contents of the ampoules. See, e.g. Becker, H. & Gartner, C. Microfluidics-enabled diagnostic systems: markets, challenges, and examples. In Microchip Diagnostics: Methods and Protocols (eds Taly, V. et al.) (Springer, New York, 2017); Czurratis el al., doi: 10.1088/0960-1317/25/4/045002. Considerations for ampoules can include as discussed in, for example, Smith, S., et al., Blister pouches for effective reagent storage on microfluidic chips for blood cell counting. Microfluid Nanofluid 20, 163 (2016). DOI:10.1007/s10404-016-1830-2. In an aspect, the seal is a frangible seal formed of a composite-layer film that is assembled to the cartride main body. While referred to herein as an ampoule, the ampoule may comprise a cavity on a chip which comprises a sealed film that is opened by the release means.

### Chambers

[0313] The chambers on the chip may located and sized for fluidic communication via channels or other communication means with ampoules and/or other chambers on the chip, see, e.g. FIG. 30A. A chamber for receiving a sample can be provided. The sample can be injected, placed in a receptacle into the chamber for receiving a sample, or otherwise transferred to the chamber. A lysis chamber may comprise, for example, capture beads, that may be used for concentration and/or extraction of the desired target material from the sample. Alternatively, the beads may be comprised in an ampoule comprising lysis reagents that are in fluidic communication with the lysis chamber. An amplification chamber may also be provided with, for example, one or more lyophilized components of the system in the amplification chamber and/or communicatively connected to an ampoule comprising one or more components of the amplification reaction.

[0314] When the cartridge comprises a magnet, it may be configured near one or more of the chambers. In an aspect, the magnet is near the lysis well, and may be configured such that the device has a means for activating the magnet. Embodiments comprising a magnet in the cartridge may be utilized with methodologies using magnetic beads for extraction of particular target molecules.

### System for Defection Assays

[0315] A system configured for use with the cartridge and to perform an assay, also referred to as a sample analysis apparatus, detection system or detection device, is configured system to receive the cartridge and conduct an assay comprising isothermal amplification of nucleic acids and detection of target nucleic acids on the cartridge. The system may comprise: a body; a door housing which may be provided in an opened state or a closed state, and configured to be coupled to the body of the sample analysis apparatus by a hinge or other closure means; a cartridge accommodating unit included in the detection system and configured to accommodate the cartridge. The system may further comprise one or more means for releasing reagents for extractions, amplification and/or detection; one or more heating means for extractions, amplification and/or detection, a means for mixing reagents for extraction, amplification, and/or detections, and/or a means for reading the results of the assay. The device may further comprise a user interface for programming the device and/or readout of the results of the assay.

### Means for Release of Reagents

[0316] The system may comprise means for releasing reagents for extraction, amplification and/or detection. Release of reagents can be performed by a crushing, puncturing, applying heat or pressure until burst, cutting, or other means for the opening of the ampoule and release of contents. e.g. Becker, H. & Gartner, C. Microfluidics-enabled diagnostic systems: markets, challenges, and examples. In Microchip Diagnostics: Methods and Protocols (eds Taly, V. et al.) (Springer, New York, 2017); Czurratis et al., doi: 10.1088/0960-1317/25/4/045002. Mechanical actuators

### Heating Means

[0317] The heating means or heating element can be provided, for example, by electrical or chemical elements. One or more heating means can be utilized, or circuits providing regulation of temperature to one or more locations within the detection device can be utilized. In one preferred embodiment the device is configured to comprise a heating means for heating the lysis (extraction) chamber and at the amplification chamber of the cartridge. In an aspect, the heating element is disposed under the extraction well. The system can be designed with one or more heating means for extraction, amplification and/or detection.

### Mixing Means

[0318] A means for mixing reagents for extraction, amplification and/or detection can be provided. A means for mixing reagents may comprise a means for mixing one or more fluids, or a fluid with a solid or lyophilized reaction mixture can also be provided. Means for mixing that disturb the laminar flow can be provided. In an aspect, the mixing means is a passive mixer, in another aspect, the mixing means is an active mixer. See, e.g. Nam-Trung Nguyen and Zhigang Wu 2005 J. Micromech. Microeng. 15 R1, doi: 10.1088/0960-1317/15/2/R01 for discussion of mixing approaches. In an aspect, the active mixer can be based on external sources such as pressure, temperature, hydrodynamics (with electrical or magnetic forces), dielectrophoresis, electrokinetics, or acoustics. Examples of passive mixing means can be provided by use of geometric approaches, such as a curved path or channel, see, e.g. U.S. Pat. No. 7,160,025, or an expansion/contraction of a channel cross section or diameter. When the cartridge is utilized with beads, channels and wells are configured and sized for the flow of beads.

### Means for Reading the Results of the Assay

[0319] A means for reading the results of the assay can be provided in the system. The means for reading the results of the assay will depend in part on the type of detectable signal generated by the assay. In particular embodiments, the assay generates a detectable fluorescent or color readout. In these instances, the means for reading the results of the assay will be an optic means, for example a single channel or multi-channel optical means such as a fluorimeter, colorimeter or other spectroscopic sensor.

[0320] A combination of means for reading the results of the assay can be utilized, and may include readings such as turbidity, temperature, magnetic, radio, or electrical properties and or optical properties, including scattering, polarization effects, etc.

[0321] The system may further comprise a user interface for programming the device and/or readout of the results of the assay. The user interface may comprise an LED screen. The system can be further configured for a USB port that can allow for docking of four or more devices.

[0322] In an aspect, the system comprises a means for activating a magnet that is disposed within or on the cartridge.

### Lateral Flow Devices

[0323] In certain embodiments, the detection assay can be provided on a lateral flow device, as described in International Publication WO 2019/071051, incorporated herein by reference. The lateral flow device can be adapted to detect one or more coronaviruses and/or other viruses in combination of the coronavirus. The lateral flow device may comprise a flexible substrate, such as a paper substrate or a flexible polymer-based substrate, which can include freeze-dried reagents for detection assays with a visual readout of the assay results. See, WO 2019/071051 at [0145J-[0151J and Example 2, specifically incorporated herein by reference. In an aspect, lyophilized reagents can include preferred excipients that aid in rate of reaction, specificity, or other variables. The excipients may comprise trehalose, histidine, and/or glycine. In certain embodiments, the coronavirus assay can be utilized with isothermal amplification reagents, allowing amplification without complex instrumentation that may be unavailable in the field, as described in WO 2019/071051. Accordingly, the assay can be adapted for field diagnostics, including use of visual readout on a lateral flow device, rapid, sensitive detection and can be deployed for early and direct detection. Colorimetric detection can be utilized and may be particularly suited for field deployable applications, as described in International Application PCT/US2019/015726, published as WO2019/148206. In particular, colorimetric detection can be as described in WO2019/148206 at FIGS. 102, 105, 107-111 and [00306J-[00324J, incorporated herein by reference.

[0324] In one embodiment, the invention provides a lateral flow device comprising a substrate comprising a first end and a second end. The first end may comprise a sample loading portion, a first region comprising a detectable ligand, two or more CRISPR effector systems, two or more detection constructs, and one or more first capture regions, each comprising a first binding agent. The substrate may also comprise two or more second capture regions between the first region of the first end and the second end, each second capture region comprising a different binding agent. Each of the two or more CRISPR effector systems may comprise a CRISPR effector protein and one or more guide sequences, each guide sequence configured to bind one or more target molecules.

[0325] The embodiments disclosed herein are directed to lateral flow detection devices that comprise SHERLOCK systems.

[0326] The device may comprise a lateral flow substrate for detecting a SHERLOCK reaction. Substrates suitable for use in lateral flow assays are known in the art. These may include, but are not necessarily limited to membranes or pads made of cellulose and/or glass fiber, polyesters, nitrocellulose, or absorbent pads (J Saudi Chem Soc 19(6):689-705; 2015), and other embodiments further described herein. The SHERLOCK system, i.e. one or more systems and corresponding reporter constructs are added to the lateral flow substrate at a defined reagent portion of the lateral flow substrate, typically on one end of the lateral flow substrate. Reporting constructs used within the context of the present invention can comprise a first molecule and a second molecule linked by an RNA or DNA linker. The lateral flow substrate further comprises a sample portion. The sample portion may be equivalent to, continuous with, or adjacent to the reagent portion. In an aspect, the lateral flow substrate can be contained within a further device (see, e.g. FIG. 21). In an aspect, the lateral flow substrate can be utilized for visual readout of a detectable signal in one-pot reactions, e.g. wherein steps of extracting, amplifying and detecting are performed in an individual discrete volume.

### Lateral Flow Substrate

[0327] In certain example embodiments, a lateral flow device comprises a lateral flow substrate on which detection can be performed. Substrates suitable for use in lateral flow assays are known in the art. These may include, but are not necessarily limited to, membranes or pads made of cellulose and/or glass fiber, polyesters, nitrocellulose, or absorbent pads (J Saudi Chem Soc 19(6):689-705: 2015).

[0328] Lateral support substrates comprise a first and second end, and one or more capture regions that each comprise binding agents. The first end may comprise a sample loading portion, a first region comprising a detectable ligand, two or more CRISPR effector systems, two or more detection constructs, and one or more first capture regions, each comprising a first binding agent. The substrate may also comprise two or more second capture regions between the first region of the first end and the second end, each second capture region comprising a different binding agent. Each of the two or more CRISPR effector systems may comprise a CRISPR effector protein and one or more guide sequences, each guide sequence configured to bind one or more target molecules. The lateral flow substrates may be configured to detect a SHERLOCK reaction.

[0329] Lateral support substrates may be located within a housing (see for example, “Rapid Lateral Flow Test Strips” Merck Millipore 2013). The housing may comprise at least one opening for loading samples and a second single opening or separate openings that allow for reading of detectable signal generated at the first and second capture regions.

[0330] The embodiments disclosed herein can be prepared in freeze-dried format for convenient distribution and point-of-care (POC) applications. Such embodiments are useful in multiple scenarios in human health including, for example, viral detection, bacterial strain typing, sensitive genotyping, and detection of disease-associated cell free DNA. Accordingly, the lateral substrate comprising one or more of the elements of the system, including detectable ligands, CRISPR effector systems, detection constructs and binding agents may be freeze-dried to the lateral flow substrate and packaged as a ready to use device. Alternatively, all or a portion of the elements of the system may be added to the reagent portion of the lateral flow substrate at the time of using the device.

### First End and Second End of the Substrate

[0331] The substrate of the lateral flow device comprises a first and second end. The SHERLOCK system, i.e. one or more CRISPR systems and corresponding reporter constructs are added to the lateral flow substrate at a defined reagent portion of the lateral flow substrate, typically on a first end of the lateral flow substrate. Reporting constructs used within the context of the present invention comprise a first molecule and a second molecule linked by an RNA or DNA linker. The lateral flow substrate further comprises a sample portion. The sample portion may be equivalent to, continuous with, or adjacent to the reagent portion.

[0332] In certain example embodiments, the first end comprises a first region. The first region comprises a detectable ligand, two or more CRISPR effector systems, two or more detection constructs, and one or more first capture regions, each comprising a first binding agent.

### Capture Regions

[0333] The lateral flow substrate can comprise one or more capture regions. In embodiments the first end of the lateral flow substrate comprises one or more first capture regions, with two or more second capture regions between the first region of the first end of the substrate and the second end of the substrate. The capture regions may be provided as a capture line, typically a horizontal line running across the device, but other configurations are possible. The first capture region is proximate to and on the same end of the lateral flow substrate as the sample loading portion.

### Binding Agents

[0334] Specific binding-integrating molecules comprise any members of binding pairs that can be used in the present invention. Such binding pairs are known to those skilled in the art and include, but are not limited to, antibody-antigen pairs, enzyme-substrate pairs, receptor-ligand pairs, and streptavidin-biotin. In addition to such known binding pairs, novel binding pairs may be specifically designed. A characteristic of binding pairs is the binding between the two members of the binding pair.

[0335] A first binding agent that specifically binds the first molecule of the reporter construct is fixed or otherwise immobilized to the first capture region. The second capture region is located towards the opposite end of the lateral flow substrate from the first capture region. A second binding agent is fixed or otherwise immobilized at the second capture region. The second binding agent specifically binds the second molecule of the reporter construct, or the second binding agent may bind a detectable ligand. For example, the detectable ligand may be a particle, such as a colloidal particle, that when it aggregates can be detected visually, and generates a detectable positive signal. The particle may be modified with an antibody that specifically binds the second molecule on the reporter construct. If the reporter construct is not cleaved it will facilitate accumulation of the detectable ligand at the first binding region. If the reporter construct is cleaved the detectable ligand is released to flow to the second binding region. In such an embodiment, the second binding region comprises a second binding agent capable of specifically or non-specifically binding the detectable ligand on the antibody of the detectable ligand. Binding agents can be, for example, antibodies, that recognize a particular affinity tag. Such binding agents can further contain, for example, detectable labels, such as isotope labels and/or nucleic acid barcodes. A barcode is a short sequence of nucleotides (for example, DNA, RNA, or combinations thereof) that is used as an identifier. A nucleic acid barcode may have a length of 4-100 nucleotides and be either single or double-stranded. Methods for identifying cells with barcodes are known in the art. Accordingly, guide RNAs of the CRISPR effector systems described herein may be used to detect the barcode.

### Detectable Ligands

[0336] The first region is loaded with a detectable ligand, such as those disclosed herein, for example a gold nanoparticle. The detectable ligand may be a particle, such as a colloidal particle, that when it aggregates can be detected visually. The particle may be modified with an antibody that specifically binds the second molecule on the reporter construct. If the reporter construct is not cleaved it will facilitate accumulation of the detectable ligand at the first binding region. If the reporter construct is cleaved the detectable ligand is released to flow to the second binding region. In such an embodiment, the second binding agent is an agent capable of specifically or non-specifically binding the detectable ligand on the antibody on the detectable ligand. Examples of suitable binding agents for such an embodiment include, but are not limited to, protein A and protein G. In some examples, the detectable ligand is a gold nanoparticle, which may be modified with a first antibody, such as an anti-FITC antibody.

### Lateral Flow Detection Constructs

[0337] The first region also comprises a detection construct. In one example embodiment, a RNA detection construct and a CRISPR effector system (a CRISPR effector protein and one or more guide sequences configured to bind to one or more target sequences) as disclosed herein. In one example embodiment, and for purposes of further illustration, the RNA construct may comprise a FAM molecule on a first end of the detection construction and a biotin on a second end of the detection construct. Upstream of the flow of solution from the first end of the lateral flow substrate is a first test band. The test band may comprise a biotin ligand. Accordingly, when the RNA detection construct is present it its initial state, i.e. in the absence of target, the FAM molecule on the first end will bind the anti-FITC antibody on the gold nanoparticle, and the biotin on the second end of the RNA construct will bind the biotin ligand allowing for the detectable ligand to accumulate at the first test, generating a detectable signal. Generation of a detectable signal at the first band indicates the absence of the target ligand. In the presence of target, the CRISPR effector complex forms and the CRISPR effector protein is activated resulting in cleavage of the RND detection construct. In the absence of intact RNA detection construct the colloidal gold will flow past the second strip. The lateral flow device may comprise a second band, upstream of the first band. The second band may comprise a molecule capable of binding the antibody-labeled colloidal gold molecule, for example an anti-rabbit antibody capable of binding a rabbit anti-FITC antibody on the colloidal gold. Therefore, in the presence of one or more targets, the detectable ligand will accumulate at the second band, indicating the presence of the one or more targets in the sample.

[0338] In some embodiments, the first end of the lateral flow device comprises two detection constructs and each of the two detection constructs comprises an RNA or DNA oligonucleotide, comprising a first molecule on a first end and a second molecule on a second end. The first molecule and the second molecule may be linked by an RNA or DNA linker.

[0339] In some embodiments, the first molecule on the first end of the first detection construct may be FAM and the second molecule on the second end of the first detection construct may be biotin, or vice versa. In some embodiments, the first molecule on the first end of the second detection construct may be FAM and the second molecule on the second end of the second detection construct may be Digoxigenin (DIG), or vice versa.

[0340] In some embodiments, the first end may comprise three detection constructs, wherein each of the three detection constructs comprises an RNA or DNA oligonucleotide, comprising a first molecule on a first end and a second molecule on a second end. In specific embodiments, the first and second molecules on the detection constructs comprise Tye 665 and Alexa 488; Tye 665 and FAM, and Tye 665 and Digoxigenin (DIG), respectively.

[0341] In some embodiments, the first end of the lateral flow device comprises two or more CRISPR effector systems, also referred to as a CRISPR-Cas or CRISPR system. In some embodiments, such a CRISPR effector system may include a CRISPR effector protein and one or more guide sequences configured to bind to one or more target sequences.

### Samples

[0342] When utilizing the detection systems with a lateral flow substrate, samples to be screened are loaded at the sample loading portion of the lateral flow substrate. The samples must be liquid samples or samples dissolved in an appropriate solvent, usually aqueous. The liquid sample reconstitutes the SHERLOCK reagents such that a SHERLOCK reaction can occur. The liquid sample begins to flow from the sample portion of the substrate towards the first and second capture regions.

[0343] A sample for use with the invention may be a biological or environmental sample, such as a surface sample, a fluid sample, or a food sample (fresh fruits or vegetables, meats). Food samples may include a beverage sample, a paper surface, a fabric surface, a metal surface, a wood surface, a plastic surface, a soil sample, a freshwater sample, a wastewater sample, a saline water sample, exposure to atmospheric air or other gas sample, or a combination thereof. For example, household/commercial/industrial surfaces made of any materials including, but not limited to, metal, wood, plastic, rubber, or the like, may be swabbed and tested for contaminants. Soil samples may be tested for the presence of pathogenic bacteria or parasites, or other microbes, both for environmental purposes and/or for human, animal, or plant disease testing. Water samples such as freshwater samples, wastewater samples, or saline water samples can be evaluated for cleanliness and safety, and/or potability, to detect the presence of, for example, Cryptosporidium parvum, Giardia lamblia, or other microbial contamination. In further embodiments, a biological sample may be obtained from a source including, but not limited to, a tissue sample, saliva, blood, plasma, sera, stool, urine, sputum, mucous, lymph, synovial fluid, spinal fluid, cerebrospinal fluid, ascites, pleural effusion, seroma, pus, bile, aqueous or vitreous humor, transudate, exudate, or swab of skin or a mucosal membrane surface. In some particular embodiments, an environmental sample or biological samples may be crude samples and/or the one or more target molecules may not be purified or amplified from the sample prior to application of the method. Identification of microbes may be useful and/or needed for any number of applications, and thus any type of sample from any source deemed appropriate by one of skill in the art may be used in accordance with the invention.

[0344] In particular embodiments, the methods and systems can be utilized for direct detection from patient samples. In an aspect, the methods and systems can further allow for direct detection from patient samples with a visual readout to further facilitate field-deployability. In an aspect, a field depoloyable version can include, for example the lateral flow devices and systems as described herein, and/or colorimetric detection. The methods and systems can be utilized to distinguish multiple viral species and strains and identify clinically relevant mutations, important with viral outbreaks such as the coronavirus outbreak in Wuhan (2019-nCoV). In an aspect, the sample is from a nasopharyngeal swab or a saliva sample. See., e.g. FIG. 40, see also, Wyllie et al., “Saliva is more sensitive for SARS-CoV-2 detection in COVID-19 patients than nasopharyngeal swabs,” DOI: 10.1101/2020.04.16.20067835.

Methods for Detecting and/or Quantifying Target Nucleic Acids

[0345] In some embodiments, the invention provides methods for detecting target nucleic acids in a sample. Such methods may comprise contacting a sample with the first end of a lateral flow device as described herein. The first end of the lateral flow device may comprise a sample loading portion, wherein the sample flows from the sample loading portion of the substrate towards the first and second capture regions and generates a detectable signal.

[0346] A positive detectable signal may be any signal that can be detected using optical, fluorescent, chemiluminescent, electrochemical or other detection methods known in the art, as described elsewhere herein.

[0347] In some embodiments, the lateral flow device may be capable of detecting two different target nucleic acid sequences. In some embodiments, this detection of two different target nucleic acid sequences may occur simultaneously.

[0348] In some embodiments, the absence of target nucleic acid sequences in a sample elicits a detectable fluorescent signal at each capture region. In such instances, the absence of any target nucleic acid sequences in a sample may cause a detectable signal to appear at the first and second capture regions.

[0349] In some embodiments, the lateral flow device as described herein is capable of detecting three different target nucleic acid sequences. In specific embodiments, when the target nucleic acid sequences are absent from the sample, a fluorescent signal may be generated at each of the three capture regions. In such exemplary embodiments, a fluorescent signal may be absent at the capture region for the corresponding target nucleic acid sequence when the sample contains one or more target nucleic acid sequences.

[0350] Samples to be screened are loaded at the sample loading portion of the lateral flow substrate. The samples must be liquid samples or samples dissolved in an appropriate solvent, usually aqueous. The liquid sample reconstitutes the system reagents such that a SHERLOCK reaction can occur. Intact reporter construct is bound at the first capture region by binding between the first binding agent and the first molecule. Likewise, the detection agent will begin to collect at the first binding region by binding to the second molecule on the intact reporter construct. If target molecule(s) are present in the sample, the CRISPR effector protein collateral effect is activated. As activated CRISPR effector protein comes into contact with the bound reporter construct, thereporter constructs are cleaved, releasing the second molecule to flow further down the lateral flow substrate towards the second binding region. The released second molecule is then captured at the second capture region by binding to the second binding agent, where additional detection agent may also accumulate by binding to the second molecule. Accordingly, if the target molecule(s) is not present in the sample, a detectable signal will appear at the first capture region, and if the target molecule(s) is present in the sample, a detectable signal will appear at the location of the second capture region.

[0351] In some embodiments, the invention provides a method for quantifying target nucleic acids in samples comprising distributing a sample or set of samples into one or more individual discrete volumes comprising two or more CRISPR systems as described herein. The method may comprise using HDA to amplify one or more target molecules in the sample or set of samples, as described herein. The method may further comprise incubating the sample or set of samples under conditions sufficient to allow binding of the guide RNAs to one or more target molecules. The method may further comprise activating the CRISPR effector protein via binding of the guide RNAs to the one or more target molecules. Activating the CRISPR effector protein may result in modification of the detection construct such that a detectable positive signal is generated. The method may further comprise detecting the one or more detectable positive signals, wherein detection indicates the presence of one or more target molecules in the sample. The method may further comprise comparing the intensity of the one or more signals to a control to quantify the nucleic acid in the sample. The steps of amplifying, incubating, activating, and detecting may all be performed in the same individual discrete volume.

[0352] An “individual discrete volume” is a discrete volume or discrete space, such as a container, receptacle, or other defined volume or space that can be defined by properties that prevent and/or inhibit migration of nucleic acids and reagents necessary to carry out the methods disclosed herein, for example a volume or space defined by physical properties such as walls, for example the walls of a well, tube, or a surface of a droplet, which may be impermeable or semipermeable, or as defined by other means such as chemical, diffusion rate limited, electro-magnetic, or light illumination, or any combination thereof. By “diffusion rate limited” (for example diffusion defined volumes) is meant spaces that are only accessible to certain molecules or reactions because diffusion constraints effectively defining a space or volume as would be the case for two parallel laminar streams where diffusion will limit the migration of a target molecule from one stream to the other. By “chemical” defined volume or space is meant spaces where only certain target molecules can exist because of their chemical or molecular properties, such as size, where for example gel beads may exclude certain species from entering the beads but not others, such as by surface charge, matrix size or other physical property of the bead that can allow selection of species that may enter the interior of the bead. By “electro-magnetically” defined volume or space is meant spaces where the electro-magnetic properties of the target molecules or their supports such as charge or magnetic properties can be used to define certain regions in a space such as capturing magnetic particles within a magnetic field or directly on magnets. By “optically” defined volume is meant any region of space that may be defined by illuminating it with visible, ultraviolet, infrared, or other wavelengths of light such that only target molecules within the defined space or volume may be labeled. One advantage to the used of non-walled, or semipermeable is that some reagents, such as buffers, chemical activators, or other agents maybe passed in Applicants' through the discrete volume, while other material, such as target molecules, maybe maintained in the discrete volume or space. Typically, a discrete volume will include a fluid medium, (for example, an aqueous solution, an oil, a buffer, and/or a media capable of supporting cell growth) suitable for labeling of the target molecule with the indexable nucleic acid identifier under conditions that permit labeling. Exemplary discrete volumes or spaces useful in the disclosed methods include droplets (for example, microfluidic droplets and/or emulsion droplets), hydrogel beads or other polymer structures (for example poly-ethylene glycol di-acrylate beads or agarose beads), tissue slides (for example, fixed formalin paraffin embedded tissue slides with particular regions, volumes, or spaces defined by chemical, optical, or physical means), microscope slides with regions defined by depositing reagents in ordered arrays or random patterns, tubes (such as, centrifuge tubes, microcentrifuge tubes, test tubes, cuvettes, conical tubes, and the like), bottles (such as glass bottles, plastic bottles, ceramic bottles, Erlenmeyer flasks, scintillation vials and the like), wells (such as wells in a plate), plates, pipettes, or pipette tips among others. In certain example embodiments, the individual discrete volumes are the wells of a microplate. In certain example embodiments, the microplate is a 96 well, a 384 well, or a 1536 well microplate.

[0353] Incubating the sample at either the amplification step or the extraction steps as described herein can be performed using heat sources known in the art. Advantageously, the heat source can be readily commercially available heating sources that do not require complicated instrumentation. Exemplary heating systems can include heating blocks, incubators, and/or water baths with temperatures maintained by commercially available sous-vide cookers. In this way, sample diagnostics can be performed without the requirement of expensive and proprietary equipment found primarily in diagnostic laboratory and hospital settings.

[0354] In certain example embodiments, paper-based microfluidics may be used for transfer of samples or reagents. For example, paper strips having wax barrier printed at a defined distance from the end of a paper dipstick may be used to define a volume of reagent or sample to be transferred. For example, a wax barrier may be printed across a paper dipstick to define a microliter volume such that when the dipstick is transferred into a volume of a reagent or sample only a microliter of said reagent or sample is absorbed onto the dipstick. The dipstick may be place in a second reagent mix, where the reagent or sample will diffuse into the reaction mixture. Such components allow for preparation and use of the assay without specialized equipment such as pipettors.

### Amplifying Target Molecules

[0355] The step of amplifying one or more target molecules can comprise amplification systems known in the art. In some embodiments, amplification is isothermal. In certain example embodiments, target RNAs and/or DNAs may be amplified prior to activating the CRISPR effector protein. Any suitable RNA or DNA amplification technique may be used. In certain embodiments, the amplifying step may take less than about 1 hour, 50 minutes, 40 minutes, 30 minutes, 25 minutes, 20 minutes or 15 minutes, which may depend on the sample, starting concentrations and nature of amplification used.

[0356] In certain embodiments, the amplifying of the target molecules and the detection of the target molecules can be performed in a single reaction, for example, a‘one-pot’ method. Guidance for use of a single-pot approach can be as described in Gootenberg, et al., Science 2018 Apr. 27: 360(6387) 439-444 (using Cas13, Cas12a and Csm6 generally, detecting multiple targets in a single reaction, and specifically performing DNA extraction in a sample and using as input for direct detection at Figure S33); and Ding et al., “All-in-One Dual CRISPR-Cas12a (AIOD-CRISPR) Assay: A Case for Rapid, Ultrasensitive and Visual Detection of Novel Coronavirus SARS-CoV-2 and HIV Virus,” doi:10.1101/2020.03.19.998724, biorxiv preprint (utilizing a pair of crRNAs with dual CRISPR-Cas12a detection for a one-pot approach to target-specific nucleic acid detection); and International Patent Application PCT/US2020/022795, filed Mar. 13, 2020, incorporated herein by reference in its entirety.

[0357] In certain example embodiments, the RNA or DNA amplification is an isothermal amplification. In certain example embodiments, the isothermal amplification may be nucleic-acid sequenced-based amplification (NASBA), recombinase polymerase amplification (RPA), loop-mediated isothermal amplification (LAMP), strand displacement amplification (SDA), helicase-dependent amplification (HDA), or nicking enzyme amplification reaction (NEAR). In certain example embodiments, non-isothermal amplification methods may be used which include, but are not limited to, PCR, multiple displacement amplification (MDA), rolling circle amplification (RCA), ligase chain reaction (LCR), or ramification amplification method (RAM).

[0358] The amplifying of target molecules can be optimized by methods as detailed herein. In an aspect, the design optimizes the primers used in the amplification, In particular aspects, the isothermal amplification is used alone. In another aspect, the iotheraml amplification is used with CRISPR-Cas systems. In either approach, design considerations can follow a rational design for optimization of the reactions. Optimization of the methods as disclosed herein can include first screening primers to identify one or more sets of primers that work well for a particular target, Cas protein and/or reaction. Once the primers have been screened, titration of magnesium concentration can be performed to identify an optimal magnesium concentration for higher signal to noise readout. Once an optimum magnesium concentration is identified, additional additives are screened at around 20-25% of the reaction, and once additives are identified, these additives, such as those additives identified in FIG. 17, can be evaluated and varied in concentration to identify optimal reaction kinetics for specific reaction parameters. In an example, varying additives with specific primers, target, Cas protein (when CRISPR system is used), temperature, and other additive concentrations within the reaction can be identified. Optimization can be made with the goal of reducing the number of steps and buffer exchanges that have to occur in the reaction, simplifying the reaction and reducing the risks of contamination at transfer steps. In an aspect, addition of inhibitors, such as proteinase K can be considered so that buffer exchanges can be reduced. Similarly, optimizing the salt levels as well as the type of salt utilized can further facilitate and optimize the one-pot detections disclosed herein. In an aspect, potassium chloride can be utilized rather than sodium chloride when such amplification approaches are used with bead concentration in a lysis step.

### Loop-Mediated Isothermal Amplification

[0359] In certain example embodiments, a loop-mediated isothermal amplification (LAMP) reaction may be used to target nucleic acids, which encompasses both LAMP and RT-LAMP reactions. LAMP can be performed with a four-primer system for isothermal nucleic acid amplification in conjunction with a polymerase. Notomi et al., Nucleic Acids Res. 2000, 28, 12, Nagamine et al., Molecular and Cellular Probes (2002) 16, 223-229, doi: 10.1006/mcpr.2002.0415. When performing LAMP with a 4-primer system, two loop-forming inner primers, denoted as FIP and BIP, are provided with two outer primers, F3 and B3. The inner primers each contain two distinct sequences, one for priming in the first stage of the amplification and the other sequence for self-priming in subsequent amplification states. The two outer primers initiate strand displacement of nucleic acid strands initiated from the FIP and BIP primers, thereby generating formation of loops and strand displacement nucleic acid synthesis utilizing the provided polymerase. LAMP can be conducted with two to six primers, ranging from only the two loop-forming primers, up to at least the addition of 2 additional primers, LF and LB along with the two outer primers and two inner primers. LAMP technologies advantageously have high specificity and can work at a variety of pH and temperature. In a preferred aspect, the LAMP is an isothermal reaction at between about 45° C. to 750 C, 55 to 70° C. or 60° C. to 65° C. Colorimetric LAMP (Y. Zhang et al., doi.10.1101/2020.92.26.20028373), RT-LAMP (Lamb et al., doi: 10.1101/2020.02.19.20025155; and Yang et al., doi:10.1101/2020.03.02.20030130) have been developed for detection of COVID-19, and are incorporated herein by reference in their entirety.

[0360] In certain embodiments, the LAMP reagents may include Bst 2.0+RTx or Bst 3.0 from New England Biolabs. In certain embodiments, the LAMP reagents may comprise colorimetric or fluorescent detection. Detection of LAMP products can be accomplished using colorimetric tools, such as hydroxy napthol blue (see, e.g. Goto, M., et al., Colorimetric detection of loop-mediated isothermal amplification reaction by using hydroxy naphthol blue. Biotechniques, 2009. 46(3): p. 167-72.) leuco triphenylmethane dyes (see, e.g. Miyamoto, S., et al., Method for colorimetric detection of double-stranded nucleic acid using leuco triphenylmethane dyes. Anal Biochem, 2015. 473: p. 28-33) and pH-sensitive dyes (see, e.g. Tanner, N. A., Y. Zhang, and T. C. Evans, Jr., Visual detection of isothermal nucleic acid amplification using pH-sensitive dyes. Biotechniques, 2015. 58(2): p. 59-68); as well as fluorescent detection (see, e.g. Yu et al., Clinical Chemistry, hvaa102, doi:10.1093/clinchem/hvaa102 12 May 2020), including use of quenching probes (see, e.g. Shirato et al., J Virol Methods. 2018 August; 258:41-48. doi: 10.1016/j.jviromet.2018.05.006).

[0361] In an aspect, the primer sets for LAMP are designed to amplify one or more target sequences, generating amplicons that comprise the one or more target sequences. Optionally, the primers can comprise barcodes that can be designed as described elsewhere herein. Incubating to a temperature sufficient for LAMP amplification, e.g. 50° C.-72° C., more preferably 55° C. to 65° C., using a polymerase and, optionally a reverse transcriptase (in the event RT-LAMP is utilized). Preferably the enzymes utilized in the LAMP reaction are heat-stabilized. LAMP primer sites have been designed, see, e.g. Park et al., “Development of Reverse Transcription Loop-Mediated Isothermal Amplification Assays Targeting SARS-CoV-2” J. of Mol. Diag. (2020). Optionally, a control template is further provided with the sample, which may differ from the target sequence but share primer binding sites. In an exemplary embodiment, visual read out of the detection results can be accomplished using commercially-available lateral flow substrate, e.g. a commercially available paper substrate.

[0362] In certain embodiments, the LAMP primer can be selected from Table 1A and Table 1B. In certain embodiments, the primers are designed to target one or more of the targets in Table IC, for example, Chlamydia trachomatis D/UW-3/CX chromosome, Hepatitis A virus, Hepatitis B virus (strain ayw) genome, Hepatitis C virus (isolate H77) genotype 1, complete cds, Hepatitis C virus genotype 1, Hepatitis C virus genotype 2, Hepatitis C virus genotype 3, genome, Hepatitis C virus genotype 4, genome, Hepatitis C virus genotype 5, genome, Hepatitis C virus genotype 6, Hepatitis C virus genotype 7, Hepatitis delta virus, Hepatitis E virus, Hepatitis E virus rat/R63/DEU/2009, Hepatitis GB virus A, Hepatitis GB virus B, Human adenovirus 54, Human adenovirus A, Human betaherpesvirus 6A, variant A DNA, complete virion genome, isolate U1102, Human coronavirus 229E, Human coronavirus HKU1, Human Coronavirus NL63, Human coronavirus OC43 strain ATCC VR-759, Human gammaherpesvirus 4, Human genital-associated circular DNA virus-1 isolate 349, Human herpesvirus 1 strain 17, Human herpesvirus 2 strain HG52, Human herpesvirus 3, Human herpesvirus 4, Human herpesvirus 5 strain Merlin, Human herpesvirus 6B, Human herpesvirus 7, Human herpesvirus 8 strain GK18, Human immunodeficiency virus 1, Human immunodeficiency virus 2, Human papillomavirus 54, Human papillomavirus 116, Human papillomavirus-1, Human papillomavirus-2, Human papillomavirus-18, Human papillomavirus-61, Human papillomavirus isolate SE379, Human papillomavirus KC5, Human papillomavirus type 4, Human papillomavirus type 6b, Human papillomavirus type 7 genomic DNA, Human papillomavirus type 9, Human papillomavirus type 10 genomic DNA, Human papillomavirus type 16, Human papillomavirus type 26, Human papillomavirus type 30 genomic DNA, Human papillomavirus type 32, Human papillomavirus type 34, Human papillomavirus type 41, Human papillomavirus type 48, Human papillomavirus type 49, Human papillomavirus type 50, Human papillomavirus type 53, Human papillomavirus type 60, Human papillomavirus type 63, Human papillomavirus type 71 DNA, Human papillomavirus type 85 isolate 114B, Human papillomavirus type 88, Human papillomavirus type 90, Human papillomavirus type 92, Human papillomavirus type 96, Human papillomavirus type 101, Human papillomavirus type 103, Human papillomavirus type 108, Human papillomavirus type 109, Human papillomavirus type 112, Human papillomavirus type 121, Human papillomavirus type 126, Human papillomavirus type 128, Human papillomavirus type 129, Human papillomavirus type 131, Human papillomavirus type 132, Human papillomavirus type 134, Human papillomavirus type 135, Human papillomavirus type 136, Human papillomavirus type 137, Human papillomavirus type 140, Human papillomavirus type 144, Human papillomavirus type 154 isolate PV77, Human papillomavirus type 156 isolate GC01, Human papillomavirus type 161 isolate KC1, Human papillomavirus type 163 isolate KC3, Human papillomavirus type 166 isolate KC9, Human papillomavirus type 167 isolate KC10, Human papillomavirus type 172, Human papillomavirus type 175 isolate SE87, Human, apillomavirus type 178, Human papillomavirus type 179 isolate SIBX16, Human papillomavirus type 184 isolate SIBX17, Human papillomavirus type 187 isolate ACS447, Human papillomavirus type 201 isolate HPV201, Human papillomavirus type 204 isolate A342, Human papillomoavirus type 5, Human parainfluenza virus 1, Human parainfluenza virus 3, Human rhinovirus 1 strain ATCC VR-1559, Human rhinovirus 3, Human rhinovirus 14, Human rhinovirus 89, Human rhinovirus C, Human rhinovirus NAT001 polyprotein gene, complete cds, Human T-lymphotropic virus 1, Influenza A virus (A/California/07/2009(H1N1)) segment 1 polymerase PB2 (PB2) gene, complete cds, Influenza A virus (A/California/07/2009(H1N1)) segment 2 polymerase PB1 (PB1) gene, complete cds; and nonfunctional PB1-F2 protein (PB1-F2) gene, Influenza A virus (A/California/07/2009(H1N1)) segment 3 polymerase PA (PA) gene, complete cds, Influenza A virus (A/California/07/2009(H1N1)) segment 4 hemagglutinin (HA) gene, complete cds, Influenza A virus (A/California/07/2009(H1N1)) segment 5 nucleocapsid protein (NP) gene, complete cds, Influenza A virus (A/California/07/2009(H1N1)) segment 6 neuraminidase (NA) gene, complete cds, Influenza A virus (A/California/07/2009(H1N1)) segment 7 matrix protein 2 (M2) and matrix protein 1 (M1) genes, complete cds, Influenza A virus (A/California/07/2009(H1N1)) segment 8 nuclear export protein (NEP) and nonstructural protein 1 (NS1) genes, complete cds, Influenza A virus (A/Goose/Guangdong/1/96(H5N1)) neuraminidase (NA) gene, complete cds, Influenza A virus (A/Goose/Guangdong/1/96(H5N1)) nucleocapsid protein (NP) gene, complete cds, Influenza A virus (A/Goose/Guangdong/1/96(H5N1)) polymerase (PB2) gene, complete cds, Influenza A virus (A/goose/Guangdong/l/1996(H5N1)) hemagglutinin (HA) gene, complete cds, Influenza A virus (A/goose/Guangdong/l/1996(H5N1)) polymerase (PA) and PA-X protein (PA-X) genes, complete cds, Influenza A virus (A/goose/Guangdong/l/1996(H5N1)) polymerase (PB1) and PB1-F2 protein (PB1-F2) genes, complete cds, Influenza A virus (A/goose/Guangdong/l/1996(H5N1)) segment 7, Influenza A virus (A/goose/Guangdong/1/1996(H5N1)) segment 8, Influenza A virus (A/Hong Kong/1073/99(H9N2)) segment 5, Influenza A virus (A/Hong Kong/1073/99(H9N2)) segment 7, Influenza A virus (A/Hong Kong/1073/99(H9N2)) segment 8, Influenza A virus (A/Korea/426/1968(H2N2)) segment 1, Influenza A virus (A/Korea/426/1968(H2N2)) segment 2, Influenza A virus (A/Korea/426/1968(H2N2)) segment 3, Influenza A virus (A/Korea/426/1968(H2N2)) segment 4, Influenza A virus (A/Korea/426/1968(H2N2)) segment 5, Influenza A virus (A/Korea/426/1968(H2N2)) segment 6, Influenza A virus (A/Korea/426/1968(H2N2)) segment 7, Influenza A virus (A/Korea/426/1968(H2N2)) segment 8, Influenza A virus (A/New York/392/2004(H3N2)) segment 1, Influenza A virus (A/New York/392/2004(H3N2)) segment 2, Influenza A virus (A/New York/392/2004(H3N2)) segment 3, Influenza A virus (A/New York/392/2004(H3N2)) segment 4, Influenza A virus (A/New York/392/2004(H3N2)) segment 5, Influenza A virus (A/New York/392/2004(H3N2)) segment 6, Influenza A virus (A/New York/392/2004(H3N2)) segment 7, Influenza A virus (A/NewYork/392/2004(H3N2)) segment 8, Influenza A virus (A/Puerto Rico/8/1934(H1N1)) segment 1, Influenza A virus (A/Puerto Rico/8/1934(H1N1)) segment 2, Influenza A virus (A/Puerto Rico/8/1934(H1N1)) segment 3, Influenza A virus (A/Puerto Rico/8/1934(HIN1)) segment 4, Influenza A virus (A/Puerto Rico/8/1934(H1N1)) segment 5, Influenza A virus (A/Puerto Rico/8/1934(H1N1)) segment 6, Influenza A virus (A/Puerto Rico/8/1934(H1N1)) segment 7, Influenza A virus (A/Puerto Rico/8/1934(H1N1)) segment 8, Influenza A virus (A/Shanghai/02/2013(H7N9)) segment 1 polymerase PB2 (PB2) gene, complete cds, Influenza A virus (A/Shanghai/02/2013(H7N9)) segment 2 polymerase PB1 (PB1) and PB1-F2 protein (PB1-F2) genes, complete cds, Influenza A virus (A/Shanghai/02/2013(H7N9)) segment 3 polymerase PA (PA) and PA-X protein (PA-X) genes, complete cds, Influenza A virus (A/Shanghai/02/2013(H7N9)) segment 4 hemagglutinin (HA) gene, complete cds, Influenza A virus (A/Shanghai/02/2013(H7N9)) segment 5 nucleocapsid protein (NP) gene, complete cds, Influenza A virus (A/Shanghai/02/2013(H7N9)) segment 6 neuraminidase (NA) gene, complete cds, Influenza A virus (A/Shanghai/02/2013(H7N9)) segment 7 matrix protein 2 (M2) and matrix protein 1 (M1) genes, complete cds, Influenza A virus (A/Shanghai/02/2013(H7N9)) segment 8 nuclear export protein (NEP) and nonstructural protein 1 (NS1) genes, complete cds, Influenza A virus ha gene for Hemagglutinin, genomic RNA, strain A/Hong Kong/i073/99(H9N2), Influenza A virus na gene for neuraminidase, genomic RNA, strain A/Hong Kong/1073/99(H9N2), Influenza A virus pa gene for polymerase PA, genomic RNA, strain A/Hong Kong/I073/99(H9N2), Influenza A virus pb1 gene for polymerase Pb1, genomic RNA, strain A/Hong Kong/1073/99(H9N2), Influenza A virus pb2 gene for polymerase Pb2, genomic RNA, strain A/Hong Kong/1073/99(H9N2), Influenza B virus (B/Lee/1940) segment 2, Influenza B virus (B/Lee/1940) segment 3, Influenza B virus (B/Lee/1940) segment 4, Influenza B virus (B/Lee/1940) segment 5, Influenza B virus (B/Lee/1940) segment 6, Influenza B virus (B/Lee/1940) segment 7, Influenza B virus (B/Lee/1940) segment 8, Influenza B virus RNA 1, Influenza C virus (C/Ann Arbor/1/50) HEF gene for hemagglutinin-esterase-fusion, complete cds, Influenza C virus (C/Ann Arbor/1/50) M1, CM2 genes for matrix protein, CM2 protein, complete cds, Influenza C virus (C/Ann Arbor/i/50) P3 gene for polymerase 3, complete cds, Influenza C virus (C/Ann Arbor/i/50) PB1 gene for polymerase 1, complete cds, Influenza C virus (C/Ann Arbor/i/50) PB2 gene for polymerase 2, complete cds, Influenza C virus (C/Ann Arbor/i/50 segment 5, Influenza C virus (C/Ann Arbor/i/50) segment 7, Neisseria gonorrhoeae strain WHO F chromosome 1, Respiratory syncytial virus, SARS coronavirus, or Streptococcus pyogenes strain NCTC8198 chromosome 1.

### NASBA

[0363] In certain example embodiments, the RNA or DNA amplification is NASBA, which is initiated with reverse transcription of target RNA by a sequence-specific reverse primer to create a RNA/DNA duplex. RNase H is then used to degrade the RNA template, allowing a forward primer containing a promoter, such as the T7 promoter, to bind and initiate elongation of the complementary strand, generating a double-stranded DNA product. The RNA polymerase promoter-mediated transcription of the DNA template then creates copies of the target RNA sequence. Importantly, each of the new target RNAs can be detected by the guide RNAs thus further enhancing the sensitivity of the assay. Binding of the target RNAs by the guide RNAs then leads to activation of the CRISPR effector protein and the methods proceed as outlined above. The NASBA reaction has the additional advantage of being able to proceed under moderate isothermal conditions, for example at approximately 41° C., making it suitable for systems and devices deployed for early and direct detection in the field and far from clinical laboratories.

### RPA

[0364] In certain other example embodiments, a recombinase polymerase amplification (RPA) reaction may be used to amplify the target nucleic acids. RPA reactions employ recombinases which are capable of pairing sequence-specific primers with homologous sequence in duplex DNA. If target DNA is present, DNA amplification is initiated and no other sample manipulation such as thermal cycling or chemical melting is required. The entire RPA amplification system is stable as a dried formulation and can be transported safely without refrigeration. RPA reactions may also be carried out at isothermal temperatures with an optimum reaction temperature of 37-42° C. The sequence specific primers are designed to amplify a sequence comprising the target nucleic acid sequence to be detected. In certain example embodiments, a RNA polymerase promoter, such as a T7 promoter, is added to one of the primers. This results in an amplified double-stranded DNA product comprising the target sequence and a RNA polymerase promoter. After, or during, the RPA reaction, a RNA polymerase is added that will produce RNA from the double-stranded DNA templates. The amplified target RNA can then in turn be detected by the CRISPR effector system. In this way target DNA can be detected using the embodiments disclosed herein. RPA reactions can also be used to amplify target RNA. The target RNA is first converted to cDNA using a reverse transcriptase, followed by second strand DNA synthesis, at which point the RPA reaction proceeds as outlined above.

### Transposase Based Amplification

[0365] Embodiments disclosed herein provide systems and methods for isothermal amplification of target nucleic acid sequences by contacting oligonucleotides containing the target nucleic acid sequence with a transposon complex. The oligonucleotides may be single stranded or double stranded RNA, DNA, or RNA/DNA hybrid oligonucleotides. The transposon complex comprises a transposase and a transposon sequence comprising one or more RNA polymerase promoters. The transposase facilitates insertion of the one or more RNA polymerase promoters into the oligonucleotide. A RNA polymerase promoter can then transcribe the target nucleic acid sequence from the inserted one or more RNA polymerase promoters. One advantage of this system is that there is no need to heat or melt double-stranded DNA templates, since RNA polymerase polymerases require a double-stranded template. Such isothermal amplification is fast and simple, obviating the need for complicated and expensive instrumentation for denaturation and cooling. In certain example embodiment the RNA polymerase promoter is a native of modified T7 RNA promoter.

[0366] The term “transposon”, as used herein, refers to a nucleic acid segment, which is recognized by a transposase or an integrase enzyme and which is an essential component of a functional nucleic acid-protein complex (i.e. a transposome) capable of transposition. The term “transposase” as used herein refers to an enzyme, which is a component of a functional nucleic acid-protein complex capable of transposition and which is mediating transposition. The term “transposase” also refers to integrases from retrotransposons or of retroviral origin. Transposon complexes form between a transposase enzyme and a fragment of double stranded DNA that contains a specific binding sequence for the enzyme, termed “transposon end”. The sequence of the transposon binding site can be modified with other bases, at certain positions, without affecting the ability for transposon complex to form a stable structure that can efficiently transpose into target DNA.

[0367] In embodiments provided herein, the transposon complex may comprise a transposase and a transposon sequence comprising one or more RNA polymerase promoters. The term “promoter” refers to a region of DNA involved in binding the RNA polymerase to initiate transcription. In specific embodiments, the RNA polymerase promoter may be a T7 RNA polymerase promoter. The T7 RNA promoter may be inserted into the double-stranded polynucleotide using the transposase. In some embodiments, insertion of the T7 RNA polymerase promoter into the oligonucleotide may be random.

[0368] The frequency of transposition is very low for most transposons, which use complex mechanisms to limit activity. Tn5 transposase, for example, utilizes a DNA binding sequence that is suboptimal and the C-terminus of the transposase interferes with DNA binding. Mechanisms involved in Tn5 transposition have been carefully characterized by Reznikoff and colleagues. Tn5 transposes by a cut-and-paste mechanism. The transposon has two pairs of 19 bp elements that are utilized by the transposase: outside elements (OE) and inside elements (IE). One transposase monomer binds to each of the two elements that are utilized. After a monomer is bound to each end of the transposon, the two monomers dimerize, forming a synapse. Vectors with donor backbones of at least 200 bp, but less than 1000 bp, are most functional for transposition in bacteria. Transposon cleavage occurs by trans catalysis and only when monomers bound to each DNA end are in a synaptic complex. Tn5 transposes with a relaxed target site selection and can therefore insert into target DNA with little to no target sequence specificity.

[0369] The natural downregulation of Tn5 transposition can be overcome by selection of a hyperactive transposase and by optimizing the transposase-binding elements [York et al. 1998J. A mosaic element (ME), made by modification of three bases of the wild type OE, led to a 50-fold increase in transposition events in bacteria as well as cell-free systems. The combined effect of the optimized ME and hyperactive mutant transposase is estimated to result in a 100-fold increase in transposition activity. Goryshin et al showed that preformed Tn5 transposition complexes could be functionally introduced into bacterial or yeast by electroporation [Goryshin et al. 2000J. Linearization of the DNA, to have inverted repeats precisely positioned at both ends of the transposon, allowed Goryshin and coworkers to bypass the cutting step of transposition thus enhancing transposition efficiency.

[0370] In some embodiments, the transposase may be used to tagment the oligonucleotide sequence comprising the target sequence. The term “tagmentation” refers to a step in the Assay for Transposase Accessible Chromatin using sequencing (ATAC-seq) as described. (See, Buenrostro, J. D., Giresi, P. G., Zaba, L. C., Chang, H. Y., Greenleaf, W. J., Transposition of native chromatin for fast and sensitive epigenomic profiling of open chromatin, DNA-binding proteins and nucleosome position. Nature methods 2013; 10 (12): 1213-1218). Specifically, a hyperactive Tn5 transposase loaded in vitro with adapters for high-throughput DNA sequencing, can simultaneously fragment and tag a genome with sequencing adapters. In one embodiment the adapters are compatible with the methods described herein.

[0371] In some embodiments, the transposase may be a Tn5 transposase. In some embodiments, the transposase may be a variant of a Tn5 transposase, or an engineered transposase. Transposases may be engineered using any method known in the art. The engineered transposase may be optimized to function at a temperature ranging from 30° C. to 45° C., 35° C. to 40° C. or any temperature in between. The engineered transposase may be optimized to release from the oligonucleotide at a faster rate compared to a wild type transposase.

[0372] In some embodiments, the transposase may be a Tn5 transposase, a Mu transposase, or a Tn7 transposase. Transposition efficiency in vitro may vary depending on the transposon system used. Generally, Tn5 and Mu transposases effect higher levels of transposition efficiency. In some embodiments, insertion may be random. In some embodiments, insertion may occur in GC rich regions of the target sequence.

[0373] In some embodiments, the transposon sequence may comprise two 19 base pair Mosaic End (ME) Tn5 transposase recognition sequences. Tn5 transposases will generally transpose any DNA sequence contained between such short 19 base pair ME Tn5 transposase recognition sequences.

[0374] In some embodiments, use of a transposase allows for separation of a double-stranded polynucleotide in the absence of heat or melting. Embodiments can be as described in PCT/US2019/039195, entitled CRISPR/Cas and Transposase Based Amplification Compositions, Systems and Methods, incorporated herein by reference.

### Nickase Dependent Amplification

[0375] In an embodiment of the invention may comprise nickase-based amplification. The nicking enzyme may be a CRISPR protein. Accordingly, the introduction of nicks into dsDNA can be programmable and sequence-specific. In an embodiment of the invention, two guides can be designed to target opposite strands of a dsDNA target. According to the invention, the nickase can be Cpf1, C2c1, Cas9 or any ortholog or CRISPR protein that cleaves or is engineered to cleave a single strand of a DNA duplex. The nicked strands may then be extended by a polymerase. In an embodiment, the locations of the nicks are selected such that extension of the strands by a polymerase is towards the central portion of the target duplex DNA between the nick sites. In certain embodiments, primers are included in the reaction capable of hybridizing to the extended strands followed by further polymerase extension of the primers to regenerate two dsDNA pieces: a first dsDNA that includes the first strand Cpf1 guide site or both the first and second strand Cpf1 guide sites, and a second dsDNA that includes the second strand Cpf1 guide site or both the first and second strand Cprf guide sites. These pieces continue to be nicked and extended in a cyclic reaction that exponentially amplifies the region of the target between nicking sites.

[0376] The amplification can be isothermal and selected for temperature. In one embodiment, the amplification proceeds rapidly at 37 degrees. In other embodiments, the temperature of the isothermal amplification may be chosen by selecting a polymerase (e.g. Bsu, Bst, Phi29, klenow fragment etc.).operable at a different temperature.

[0377] Thus, whereas nicking isothermal amplification techniques use nicking enzymes with fixed sequence preference (e.g. in nicking enzyme amplification reaction or NEAR), which requires denaturing of the original dsDNA target to allow annealing and extension of primers that add the nicking substrate to the ends of the target, use of a CRISPR nickase wherein the nicking sites can be programed via guide RNAs means that no denaturing step is necessary, enabling the entire reaction to be truly isothermal. This also simplifies the reaction because these primers that add the nicking substrate are different than the primers that are used later in the reaction, meaning that NEAR requires two primer sets (i.e. 4 primers) while Cpf1 nicking amplification only requires one primer set (i.e. two primers). This makes nicking Cpf1 amplification much simpler and easier to operate without complicated instrumentation to perform the denaturation and then cooling to the isothermal temperature.

[0378] In an aspect, the isothermal amplification reagents may be utilized with a thermostable CRISPR-Cas protein. The combination of thermostable protein and isothermal amplification reagents may be utilized to further improve reaction times for detection and diagnostics.

[0379] Accordingly, in certain example embodiments the systems disclosed herein may include amplification reagents. Different components or reagents useful for amplification of nucleic acids are described herein. For example, an amplification reagent as described herein may include a buffer, such as a Tris buffer. A Tris buffer may be used at any concentration appropriate for the desired application or use, for example including, but not limited to, a concentration of 1 mM, 2 mM, 3 mM, 4 mM, 5 mM, 6 mM, 7 mM, 8 mM, 9 mM, 10 mM, 11 mM, 12 mM, 13 mM, 14 mM, 15 mM, 25 mM, 50 mM, 75 mM, 1 M, or the like. One of skill in the art will be able to determine an appropriate concentration of a buffer such as Tris for use with the present invention.

[0380] A salt, such as magnesium chloride (MgCl2), potassium chloride (KCl), or sodium chloride (NaCl), may be included in an amplification reaction, such as PCR, in order to improve the amplification of nucleic acid fragments. Although the salt concentration will depend on the particular reaction and application, in some embodiments, nucleic acid fragments of a particular size may produce optimum results at particular salt concentrations. Larger products may require altered salt concentrations, typically lower salt, in order to produce desired results, while amplification of smaller products may produce better results at higher salt concentrations. One of skill in the art will understand that the presence and/or concentration of a salt, along with alteration of salt concentrations, may alter the stringency of a biological or chemical reaction, and therefore any salt may be used that provides the appropriate conditions for a reaction of the present invention and as described herein.

[0381] Other components of a biological or chemical reaction may include a cell lysis component in order to break open or lyse a cell for analysis of the materials therein. A cell lysis component may include, but is not limited to, a detergent, a salt as described above, such as NaCl, KCl, ammonium sulfate [(NH4)2SO4J, or others. Detergents that may be appropriate for the invention may include Triton X-100, sodium dodecyl sulfate (SDS), CHAPS (3-[(3-cholamidopropyl)dimethylammonioJ-1-propanesulfonate), ethyl trimethyl ammonium bromide, nonyl phenoxypolyethoxylethanol (NP-40). Concentrations of detergents may depend on the particular application, and may be specific to the reaction in some cases. Amplification reactionsmay include dNTPs and nucleic acid primers used at any concentration appropriate for the invention, such as including, but not limited to, a concentration of 100 nM, 150 nM, 200 nM, 250 nM, 300 nM, 350 nM, 400 nM, 450 nM, 500 nM, 550 nM, 600 nM, 650 nM, 700 nM, 750 nM, 800 nM, 850 nM, 900 nM, 950 nM, 1 mM, 2 mM, 3 mM, 4 mM, 5 mM, 6 mM, 7 mM, 8 mM, 9 mM, 10 mM, 20 mM, 30 mM, 40 mM, 50 mM, 60 mM, 70 mM, 80 mM, 90 mM, 100 mM, 150 mM, 200 mM, 250 mM, 300 mM, 350 mM, 400 mM, 450 mM, 500 mM, or the like. Likewise, a polymerase useful in accordance with the invention may be any specific or general polymerase known in the art and useful or the invention, including Taq polymerase, Q5 polymerase, or the like.

[0382] In some embodiments, amplification reagents as described herein may be appropriate for use in hot-start amplification. Hot start amplification may be beneficial in some embodiments to reduce or eliminate dimerization of adaptor molecules or oligos, or to otherwise prevent unwanted amplification products or artifacts and obtain optimum amplification of the desired product. Many components described herein for use in amplification may also be used in hot-start amplification. In some embodiments, reagents or components appropriate for use with hot-start amplification may be used in place of one or more of the composition components as appropriate. For example, a polymerase or other reagent may be used that exhibits a desired activity at a particular temperature or other reaction condition. In some embodiments, reagents may be used that are designed or optimized for use in hot-start amplification, for example, a polymerase may be activated after transposition or after reaching a particular temperature. Such polymerases may be antibody-based or aptamer-based. Polymerases as described herein are known in the art. Examples of such reagents may include, but are not limited to, hot-start polymerases, hot-start dNTPs, and photo-caged dNTPs. Such reagents are known and available in the art. One of skill in the art will be able to determine the optimum temperatures as appropriate for individual reagents.

[0383] Amplification of nucleic acids may be performed using specific thermal cycle machinery or equipment, and may be performed in single reactions or in bulk, such that any desired number of reactions may be performed simultaneously. In some embodiments, amplification may be performed using microfluidic or robotic devices, or may be performed using manual alteration in temperatures to achieve the desired amplification. In some embodiments, optimization may be performed to obtain the optimum reactions conditions for the particular application or materials. One of skill in the art will understand and be able to optimize reaction conditions to obtain sufficient amplification.

[0384] In certain embodiments, detection of DNA with the methods or systems of the invention requires transcription of the (amplified) DNA into RNA prior to detection.

[0385] It will be evident that detection methods of the invention can involve nucleic acid amplification and detection procedures in various combinations. The nucleic acid to be detected can be any naturally occurring or synthetic nucleic acid, including but not limited to DNA and RNA, which may be amplified by any suitable method to provide an intermediate product that can be detected. Detection of the intermediate product can be by any suitable method including but not limited to binding and activation of a CRISPR protein which produces a detectable signal moiety by direct or collateral activity.

### Helicase-Dependent Amplification

[0386] In helicase-dependent amplification, a helicase enzyme is used to unwind a double stranded nucleic acid to generate templates for primer hybridization and subsequent primer-extension. This process utilizes two oligonucleotide primers, each hybridizing to the 3′-end of either the sense strand containing the target sequence or the anti-sense strand containing the reverse-complementary target sequence. The HDA reaction is a general method for helicase-dependent nucleic acid amplification.

[0387] In combining this method with a CRISPR-SHERLOCK system, the target nucleic acid may be amplified by opening R-loops of the target nucleic acid using first and second CRISPR/Cas complexes. The first and second strand of the target nucleic acid may thus be unwound using a helicase, allowing primers and polymerase to bind and extend the DNA under isothermal conditions.

[0388] The term “helicase” refers hereto any enzyme capable of unwinding a double stranded nucleic acid enzymatically. For example, helicases are enzymes that are found in all organisms and in all processes that involve nucleic acid such as replication, recombination, repair, transcription, translation and RNA splicing. (Kornberg and Baker, DNA Replication, W. H. Freeman and Company (2^{nd} ed. (1992)), especially chapter 11). Any helicase that translocates along DNA or RNA in a 5′ to 3′ direction or in the opposite 3′ to 5′ direction may be used in present embodiments of the invention. This includes helicases obtained from prokaryotes, viruses, archaea, and eukaryotes or recombinant forms of naturally occurring enzymes as well as analogues or derivatives having the specified activity. Examples of naturally occurring DNA helicases, described by Komberg and Baker in chapter 11 of their book, DNA Replication, W. H. Freeman and Company (2^{nd} ed. (1992)), include E. coli helicase I, II, IH, & IV, Rep, DnaB, PriA, PcrA, T4 Gp41helicase, T4 Dda helicase, T7 Gp4 helicases, SV40 Large T antigen, yeast RAD. Additional helicases that may be useful in HDA include RecQ helicase (Harmon and Kowalczykowski, J. Biol. Chem. 276:232-243 (2001)), thermostable UvrD helicases from T. tengcongensis (disclosed in this invention, Example XII) and T. thermophilus (Collins and McCarthy, Extremophiles. 7:35-41. (2003)), thermostable DnaB helicase from T. aquaticus (Kaplan and Steitz, J. Biol. Chem. 274:6889-6897 (1999)), and MCM helicase from archaeal and eukaryotic organisms ((Grainge et al., Nucleic Acids Res. 31:4888-4898 (2003)).

[0389] A traditional definition of a helicase is an enzyme that catalyzes the reaction of separating/unzipping/unwinding the helical structure of nucleic acid duplexes (DNA, RNA or hybrids) into single-stranded components, using nucleoside triphosphate (NTP) hydrolysis as the energy source (such as ATP). However, it should be noted that not all helicases fit this definition anymore. A more general definition is that they are motor proteins that move along the single-stranded or double stranded nucleic acids (usually in a certain direction, 3′ to 5′ or 5 to 3, or both), i.e. translocases, that can or cannot unwind the duplexed nucleic acid encountered. In addition, some helicases simply bind and “melt” the duplexed nucleic acid structure without an apparent translocase activity.

[0390] Helicases exist in all living organisms and function in all aspects of nucleic acid metabolism. Helicases are classified based on the amino acid sequences, directionality, oligomerization state and nucleic-acid type and structure preferences. The most common classification method was developed based on the presence of certain amino acid sequences, called motifs. According to this classification helicases are divided into 6 super families: SF1, SF2, SF3, SF4, SF5 and SF6. SF1 and SF2 helicases do not form a ring structure around the nucleic acid, whereas SF3 to SF6 do. Superfamily classification is not dependent on the classical taxonomy.

[0391] DNA helicases are responsible for catalyzing the unwinding of double-stranded DNA (dsDNA) molecules to their respective single-stranded nucleic acid (ssDNA) forms. Although structural and biochemical studies have shown how various helicases can translocate on ssDNAdirectionally, consuming one ATP per nucleotide, the mechanism of nucleic acid unwinding and how the unwinding activity is regulated remains unclear and controversial (T. M. Lohman, E. J. Tomko, C. G. Wu, “Non-hexameric DNA helicases and translocases: mechanisms and regulation,” Nat Rev Mol Cell Biol 9:391-401 (2008)). Since helicases can potentially unwind all nucleic acids encountered, understanding how their unwinding activities are regulated can lead to harnessing helicase functions for biotechnology applications.

[0392] The term “HDA” refers to Helicase Dependent Amplification, which is an in vitro method for amplifying nucleic acids by using a helicase preparation for unwinding a double stranded nucleic acid to generate templates for primer hybridization and subsequent primer-extension. This process utilizes two oligonucleotide primers, each hybridizing to the 3′-end of either the sense strand containing the target sequence or the anti-sense strand containing the reverse-complementary target sequence. The HDA reaction is a general method for helicase-dependent nucleic acid amplification.

[0393] The invention comprises use of any suitable helicase known in the art. These include, but are not necessarily limited to, UvrD helicase, CRISPR-Cas3 helicase, E. coli helicase I, E. coli helicase II, E. coli helicase III, E. coli helicase IV, Rep helicase, DnaB helicase, PriA helicase, PcrA helicase, T4 Gp41 helicase, T4 Dda helicase, SV40 Large T antigen, yeast RAD helicase, RecD helicase, RecQ helicase, thermostable T. tengcongensis UvrD helicase, thermostable T. thermophilus UvrD helicase, thermostable T. aquaticus DnaB helicase, Dda helicase, papilloma virus E1 helicase, archaeal MCM helicase, eukaryotic MCM helicase, and T7 Gp4 helicase. 103561 In particularly preferred embodiments, the helicase comprises a super mutation. In particular embodiments, Although the E. coli mutation has been described, the mutations were generated by sequence alignment (e.g. D409A/D410A for TteUvrd) and result in thermophilic enzymes working at lower temperatures like 37° C., which is advantageous for amplification methods and systems described herein. In some embodiments, the super mutations is an aspartate to alanine mutation, with position based on sequence alignment. In some embodiments, the super mutant helicase is selected from WP_003870487.1 Thermoanaerobacter ethanolicus 403/404, WP_049660019.1 Bacillus sp. FJAT-27231 407/408, WP_034654680.1 Bacillus megaterium 415/416, WP_095390358.1 Bacillus simplex 407/408, and WP_055343022.1 Paeniclostridium sordellii 402/403.

### Incubating

[0394] Methods of detection and/or extraction using the systems disclosed herein can comprise incubating the sample or set of samples under conditions sufficient to allow binding of the guide RNAs to one or more target molecules. Extraction can comprise incubating the sample under conditions sufficient to allow release of viral RNA present in the sample, which may comprise incubating at 22° C. to 60° C. for 30 to 70 minutes or at 90° C.-100° C. for about 10 minutes.

[0395] In certain example embodiments, the incubation time of the amplifying and detecting in the present invention may be shortened. The assay may be performed in a period of time required for an enzymatic reaction to occur. One skilled in the art can perform biochemical reactions in 5 minutes (e.g., 5 minute ligation). Incubating may occur at one or more temperatures over timeframes between about 10 minutes and 90 minutes, preferably less than 90 minutes, 75 minutes, 60 minutes, 45 minutes, 30 minutes, 25 minutes, 20 minutes, 15 minutes, or 10 minutes depending on sample, reagents and components of the system. In some embodiments, incubating for the amplification is performed at one or more temperatures between about 20° C. and 80° C., in some embodiments, about 37° C. In some embodiments, incubating for the amplification is performed at one or more temperatures between about 55° C. and 65° C., between about 59° C. and 61° C., in some embodiments, about 60° C.

### Activating

[0396] In certain example embodiment, activating of the Cas protein occurs via binding of the CRISPR-Cas complex via the guide molecule to the one or more target molecules, wherein activating the CRISPR effector protein results in modification of the detection construct such that a detectable positive signal is generated.

### Detecting a Signal

[0397] Detecting may comprise visual observance of a positive signal relative to a control. Detecting may comprise a loss of signal or presence of signal at one or more capture regions, for example colorimetric detection, or fluorescent detection. In certain example embodiments, further modifications may be introduced that further amplify the detectable positive signal. For example, activated CRISPR effector protein collateral activation may be used to generate a secondary target or additional guide sequence, or both. In one example embodiment, the reaction solution would contain a secondary target that is spiked in at high concentration. The secondary target may be distinct from the primary target (i.e. the target for which the assay is designed to detect) and in certain instances may be common across all reaction volumes. A secondary guide sequence for the secondary target may be protected, e.g. by a secondary structural feature such as a hairpin with an RNA loop, and unable to bind the second target or the CRISPR effector protein. Cleavage of the protecting group by an activated CRISPR effector protein (i.e. after activation by formation of complex with the primary target(s) in solution) and formation of a complex with free CRISPR effector protein in solution and activation from the spiked in secondary target. In certain other example embodiments, a similar concept is used with free guide sequence to a secondary target and protected secondary target. Cleavage of a protecting group off the secondary target would allow additional CRISPR effector protein, guide sequence, secondary target sequence to form. In yet another example embodiment, activation of CRISPR effector protein by the primary target(s) may be used to cleave a protected or circularized primer, which would then be released to perform an isothermal amplification reaction, such as those disclosed herein, on a template for either secondary guide sequence, secondary target, or both. Subsequent transcription of this amplified template would produce more secondary guide sequence and/or secondary target sequence, followed by additional CRISPR effector protein collateral activation.

### Quantifying

[0398] In particular methods, comparing the intensity of the one or more signals to a control is performed to quantify the nucleic acid in the sample. The term “control” refers to anyreference standard suitable to provide a comparison to the expression products in the test sample. In one embodiment, the control comprises obtaining a “control sample” from which expression product levels are detected and compared to the expression product levels from the test sample. Such a control sample may comprise any suitable sample, including but not limited to a sample from a control patient (can be stored sample or previous sample measurement) with a known outcome; normal tissue, fluid, or cells isolated from a subject, such as a normal patient or the patient having a condition of interest.

[0399] The intensity of a signal is “significantly” higher or lower than the normal intensity if the signal is greater or less, respectively, than the normal or control level by an amount greater than the standard error of the assay employed to assess amount, and preferably at least 20%, 30%, 40%, 50%, 60%, 70%, 80%, 90%, 100%, 150%, 200%, 300%, 350%, 400%, 500%, 600%, 700%, 800%, 900%, 1000% or than that amount. Alternatively, the signal can be considered “significantly” higher or lower than the normal and/or control signal if the amount is at least about two, and preferably at least about 5%, 10%, 15%, 20%, 25%, 30%, 35%, 40%, 45%, 50%, 55%, 60%, 65%, 70%, 75%, 80%, 85%, 90%, 95%, 100%, 105%, 110%, 115%, 120%, 125%, 130%, 135%, 140%, 145%, 150%, 155%, 160%, 165%, 170%, 175%, 180%, 185%, 190%, 195%, two times, three times, four times, five times, or more, or any range in between, such as 5%-100%, higher or lower, respectively, than the normal and/or control signal. Such significant modulation values can be applied to any metric described herein, such as altered level of expression, altered activity, changes in biomarker inhibition, changes in test agent binding, and the like.

[0400] In some embodiments, the detectable positive signal may be a loss of fluorescent signal or colorimetric relative to a control, as described herein. In some embodiments, the detectable positive signal may be detected on a lateral flow device, as described herein.

### Applications of Detection Methods

[0401] Systems and methods can be designed for the detection and diagnosis of microbes, including bacterial, fungi and viral microbes. In an aspect, the systems may comprise multiplex detection of multiple variants of viral infections, including coronavirus, different viruses which may be related coronaviruses or respiratory viruses, or a combination thereof. In embodiments, assays can be performed for a variety of viruses and viral infections, including acute respiratory infections using the disclosure detailed herein. The systems can comprise two or more CRISPR Cas systems to multiplex, as described elsewhere herein, to detect a plurality of respiratory infections or viral infections, including coronavirus. The coronavirus is a positive-sense single stranded RNA family of viruses, infecting a variety of animals and humans. SARS-CoV is one type of coronavirus infection, as well as MERS-CoV Detection of one or more coronaviruses are envisioned, including the 2019-nCoV detected in Wuhan City. Sequences of the 2019-nCoV are available at GISAID accession no. EPI_ISL_402124 and EPI_ISL_402127-402130, and described in DOI: 10.1101/2020.01.22.914952. Further deposits of the SARS-CoV-2 deposited in the GISAID platform include EP_ISL_402119-402121 and EP_ISL 402123-402124; see also GenBank Accession No. MN908947.3.

[0402] Target molecule detection can comprise two or more detection systems utilizing RNA targeting Cas effector proteins; DNA targeting Cas effector proteins, or a combination thereof. The RNA-targeting effector proteins may be a Cas13 protein, such as Cas13a, Cas13b, or Cas13c, including one of the thermostable Cas13a proteins described herein. The DNA-targeting effector protein may be a Type V protein, e.g. Cas12 protein such as Cpf1 and C2c1. The Cas protein may preferably be thermostable, such as BrCas12b or Aap Cas12b. Multiplexing systems can be designed such that different Cas proteins with different sequence specificities or other motif cutting preferences can be used, including, in certain embodiments, at least one Cas. thermostable protein described herein. See International Publication WO 2019/126577. Type VI and Type V Cas proteins are known to possess different cutting motif preferences. See Gootenberg et al. “Multiplexed and portable nucleic acid detection platform with Cas13b, Cas12a, and Csm6.” Science. Apr. 27, 2018, 360:439-444; International Publication WO 2019/051318. Thus, embodiments disclosed herein may further comprise multiplex embodiments comprising two or more Type VI Cas proteins with different cutting preferences, or one or more Type VI Cas proteins and one or more Type V Cas proteins.

[0403] Multiplex approaches and selection of Cas effector proteins can be as described in International Publication WO 2019/126577 at [0415J-[0416J and Examples 1-10, incorporated herein by reference. In certain example embodiments, the coronavirus assay comprises a Type VI Cas protein disclosed herein and guide molecule comprising a guide sequence configured to directed binding of the CRISPR-Cas complex to a target molecule and a labeled detection molecule (“RNA-based masking construct”). A multiplex embodiment can be designed to track one or more variants of coronavirus or one or more variants of coronavirus, including SARS-CoV-2, in combination with other viruses, for example, Human respiratory syncytial virus, Middle East respiratory syndrome (MERS) coronavirus, Severe acute respiratory syndrome-related (SARS) coronavirus, and influenza. In embodiments, assays can be done in multiplex to detect multiple variants of coronavirus, different viruses which may be related coronaviruses or respiratory viruses, or a combination thereof. In an aspect, each assay can take place in an individual discrete volume.

[0404] An “individual discrete volume” is a discrete volume or discrete space, such as a container, receptacle, or other defined volume or space that can be defined by properties that prevent and/or inhibit migration of nucleic acids and reagents necessary to carry out the methods disclosed herein, for example a volume or space defined by physical properties such as walls, for example the walls of a well, tube, or a surface of a droplet, which may be impermeable or semipermeable, or as defined by other means such as chemical, diffusion rate limited, electro-magnetic, or light illumination, or any combination thereof. By “diffusion rate limited” (for example diffusion defined volumes) is meant spaces that are only accessible to certain molecules or reactions because diffusion constraints effectively defining a space or volume as would be the case for two parallel laminar streams where diffusion will limit the migration of a target molecule from one stream to the other. By “chemical” defined volume or space is meant spaces where only certain target molecules can exist because of their chemical or molecular properties, such as size, where for example gel beads may exclude certain species from entering the beads but not others, such as by surface charge, matrix size or other physical property of the bead that can allow selection of species that may enter the interior of the bead. By “electro-magnetically” defined volume or space is meant spaces where the electro-magnetic properties of the target molecules or their supports such as charge or magnetic properties can be used to define certain regions in a space such as capturing magnetic particles within a magnetic field or directly on magnets. By “optically” defined volume is meant any region of space that may be defined by illuminating it with visible, ultraviolet, infrared, or other wavelengths of light such that only target molecules within the defined space or volume may be labeled. One advantage to the used of non-walled, or semipermeable is that some reagents, such as buffers, chemical activators, or other agents maybe passed in Applicants' through the discrete volume, while other material, such as target molecules, maybe maintained in the discrete volume or space. Typically, a discrete volume will include a fluid medium, (for example, an aqueous solution, an oil, a buffer, and/or a media capable of supporting cell growth) suitable for labeling of the target molecule with the indexable nucleic acid identifier under conditions that permit labeling. Exemplary discrete volumes or spaces useful in the disclosed methods include droplets (for example, microfluidic droplets and/or emulsion droplets), hydrogel beads or other polymer structures (for example poly-ethylene glycol di-acrylate beads or agarose beads), tissue slides (for example, fixed formalin paraffin embedded tissue slides with particular regions, volumes, or spaces defined by chemical, optical, or physical means), microscope slides with regions defined by depositing reagents in ordered arrays or random patterns, tubes (such as, centrifuge tubes, microcentrifuge tubes, test tubes, cuvettes, conical tubes, and the like), bottles (such as glass bottles, plastic bottles, ceramic bottles, Erlenmeyer flasks, scintillation vials and the like), wells (such as wells in a plate), plates, pipettes, or pipette tips among others. In certain example embodiments, the individual discrete volumes are the wells of a microplate. In certain example embodiments, the microplate is a 96 well, a 384 well, or a 1536 well microplate.

[0405] In certain example embodiments, the systems, devices, and methods, disclosed herein are directed to detecting the presence of one or more microbial agents in a sample, such as a biological sample obtained from a subject. In certain example embodiments, the microbe may be a bacterium, a fungus, a yeast, a protozoan, a parasite, or a virus. Accordingly, the methods disclosed herein can be adapted for use in other methods (or in combination) with other methods that require quick identification of microbe species, monitoring the presence of microbial proteins (antigens), antibodies, antibody genes, detection of certain phenotypes (e.g. bacterial resistance), monitoring of disease progression and/or outbreak, and antibiotic screening. Because of the rapid and sensitive diagnostic capabilities of the embodiments disclosed here, detection of microbe species type, down to a single nucleotide difference, and the ability to be deployed as a POC device, the embodiments disclosed herein may be used as guide therapeutic regimens, such as a selection of the appropriate antibiotic or antiviral. The embodiments disclosed herein may also be used to screen environmental samples (air, water, surfaces, food etc.) for the presence of microbial contamination.

[0406] Disclosed is a method to identify microbial species, such as bacterial, viral, fungal, yeast, or parasitic species, or the like. Particular embodiments disclosed herein describe methods and systems that will identify and distinguish microbial species within a single sample, or across multiple samples, allowing for recognition of many different microbes. The present methods allow the detection of pathogens and distinguishing between two or more species of one or more organisms, e.g., bacteria, viruses, yeast, protozoa, and fungi or a combination thereof, in a biological or environmental sample, by detecting the presence of a target nucleic acid sequence in the sample. A positive signal obtained from the sample indicates the presence of the microbe. Multiple microbes can be identified simultaneously using the methods and systems of the invention, by employing the use of more than one effector protein, wherein each effector protein targets a specific microbial target sequence. In this way, a multi-level analysis can be performed for a particular subject in which any number of microbes can be detected at once, for example, a subject with unknown respiratory infection, having symptoms of coronavirus, or an individual at risk or having been exposed to coronavirus. In some embodiments, simultaneous detection of multiple microbes may be performed using a set of probes that can identify one or more microbial species.

[0407] Microbe Detection

[0408] In some embodiments, a method for detecting microbes in samples is provided comprising distributing a sample or set of samples into one or more individual discrete volumes, the individual discrete volumes comprising a CRISPR system as described herein; incubating the sample or set of samples under conditions sufficient to allow binding of the one or more guide RNAs to one or more microbe-specific targets: activating the CRISPR effector protein via binding of the one or more guide RNAs to the one or more target molecules, wherein activating the CRISPR effector protein results in modification of the RNA-based masking construct such that a detectable positive signal is generated; and detecting the detectable positive signal, wherein detection of the detectable positive signal indicates a presence of one or more target molecules in the sample. The one or more target molecules may be mRNA, gDNA (coding or non-coding), trRNA, or rRNA comprising a target nucleotide tide sequence that may be used to distinguish two or more microbial species/strains from one another. The guide RNAs may be designed to detect target sequences. The embodiments disclosed herein may also utilize certain steps to improve hybridization between guide RNA and target RNA sequences. Methods for enhancing ribonucleic acid hybridization are disclosed in WO 2015/085194, entitled “Enhanced Methods of Ribonucleic Acid Hybridization” which is incorporated herein by reference. The microbe-specific target may be RNA or DNA or a protein. If DNA method may further comprise the use of DNA primers that introduce a RNA polymerase promoter as described herein. If the target is a protein than the method will utilized aptamers and steps specific to protein detection described herein.

### Detection of Single Nucleotide Variants

[0409] In some embodiments, one or more identified target sequences may be detected using guide RNAs that are specific for and bind to the target sequence as described herein. The systems and methods of the present invention can distinguish even between single nucleotide polymorphisms present among different microbial species and therefore, use of multiple guide RNAs in accordance with the invention may further expand on or improve the number of target sequences that may be used to distinguish between species. For example, in some embodiments, the one or more guide RNAs may distinguish between microbes at the species, genus, family, order, class, phylum, kingdom, or phenotype, or a combination thereof.

Detection Based on rRNA Sequences

[0410] In certain example embodiments, the devices, systems, and methods disclosed herein may be used to distinguish multiple microbial species in a sample. In certain example embodiments, identification may be based on ribosomal RNA sequences, including the 16S, 23S, and 5S subunits. Methods for identifying relevant rRNA sequences are disclosed in U.S. Patent Application Publication No. 2017/0029872. In certain example embodiments, a set of guide RNA may designed to distinguish each species by a variable region that is unique to each species or strain. Guide RNAs may also be designed to target RNA genes that distinguish microbes at the genus, family, order, class, phylum, kingdom levels, or a combination thereof. In certain example embodiments where amplification is used, a set of amplification primers may be designed to flanking constant regions of the ribosomal RNA sequence and a guide RNA designed to distinguish each species by a variable internal region. In certain example embodiments, the primers and guide RNAs may be designed to conserved and variable regions in the 16S subunit respectfully. Other genes or genomic regions that uniquely variable across species or a subset of species such as the RecA gene family, RNA polymerase B subunit, may be used as well. Other suitable phylogenetic markers, and methods for identifying the same, are discussed for example in Wu et al. arXiv:1307.8690 [q-bio.GNJ.

[0411] In certain example embodiments, a method or diagnostic is designed to screen microbes across multiple phylogenetic and/or phenotypic levels at the same time. For example, the method or diagnostic may comprise the use of multiple CRISPR systems with different guide RNAs. A first set of guide RNAs may distinguish, for example, between mycobacteria, gram positive, and gram negative bacteria. These general classes can be even further subdivided. For example, guide RNAs could be designed and used in the method or diagnostic that distinguish enteric and non-enteric within gram negative bacteria. A second set of guide RNA can be designed to distinguish microbes at the genus or species level. Thus a matrix may be produced identifying all mycobacteria, gram positive, gram negative (further divided into enteric and non-enteric) with each genus of species of bacteria identified in a given sample that fall within one of those classes. The foregoing is for example purposes only. Other means for classifying other microbe types are also contemplated and would follow the general structure described above.

### Screening for Drug Resistance

[0412] In certain example embodiments, the devices, systems and methods disclosed herein may be used to screen for microbial genes of interest, for example antibiotic and/or antiviral resistance genes. Guide RNAs may be designed to distinguish between known genes of interest. Samples, including clinical samples, may then be screened using the embodiments disclosed herein for detection of such genes. The ability to screen for drug resistance at POC would have tremendous benefit in selecting an appropriate treatment regime. In certain example embodiments, the antibiotic resistance genes are carbapenemases including KPC, NDM1, CTX-M15, OXA-48. Other antibiotic resistance genes are known and may be found for example in the Comprehensive Antibiotic Resistance Database (Jia et al. “CARD 2017: expansion and model-centric curation of the Comprehensive Antibiotic Resistance Database.” Nucleic Acids Research, 45, D566-573).

[0413] Ribavirin is an effective antiviral that hits a number of RNA viruses. Several clinically important viruses have evolved ribavirin resistance including Foot and Mouth Disease Virus doi:10.1 128/JVI.03594-13; polio virus (Pfeifer and Kirkegaard. PNAS, 100(12):7289-7294, 2003); and hepatitis C virus (Pfeiffer and Kirkegaard, J. Virol. 79(4):2346-2355, 2005). A number of other persistent RNA viruses, such as hepatitis and HIV, have evolved resistance to existing antiviral drugs: hepatitis B virus (lamivudine, tenofovir, entecavir) doi:10/1002/hep22900; hepatitis C virus (telaprevir, BILN2061, ITMN-191, SCh6, boceprevir, AG-021541, ACH-806) doi:10.1002/hep.22549; and HIV (many drug resistance mutations) hivb.standford.edu. The embodiments disclosed herein may be used to detect such variants among others.

[0414] Aside from drug resistance, there are a number of clinically relevant mutations that could be detected with the embodiments disclosed herein, such as persistent versus acute infection in LCMV (doi:10.1073/pnas.1019304108), and increased infectivity of Ebola (Diehl et al. Cell. 2016, 167(4):1088-1098.

[0415] As described herein elsewhere, closely related microbial species (e.g. having only a single nucleotide difference in a given target sequence) may be distinguished by introduction of a synthetic mismatch in the gRNA.

### Monitoring Microbe Outbreaks

[0416] In some embodiments, a CRISPR system or methods of use thereof as described herein may be used to determine the evolution of a pathogen outbreak. The method may comprise detecting one or more target sequences from a plurality of samples from one or more subjects, wherein the target sequence is a sequence from a microbe causing the outbreaks. Such a method may further comprise determining a pattern of pathogen transmission, or a mechanism involved in a disease outbreak caused by a pathogen.

[0417] The pattern of pathogen transmission may comprise continued new transmissions from the natural reservoir of the pathogen or subject-to-subject transmissions (e.g. human-to-human transmission) following a single transmission from the natural reservoir or a mixture of both. In one embodiment, the pathogen transmission maybe bacterial or viral transmission, in such case, the target sequence is preferably a microbial genome or fragments thereof. In one embodiment, the pattern of the pathogen transmission is the early pattern of the pathogen transmission, i.e. at the beginning of the pathogen outbreak. Determining the pattern of the pathogen transmission at the beginning of the outbreak increases likelihood of stopping the outbreak at the earliest possible time thereby reducing the possibility of local and international dissemination.

[0418] Determining the pattern of the pathogen transmission may comprise detecting a pathogen sequence according to the methods described herein. Determining the pattern of the pathogen transmission may further comprise detecting shared intra-host variations of the pathogen sequence between the subjects and determining whether the shared intra-host variations show temporal patterns. Patterns in observed intrahost and interhost variation provide important insight about transmission and epidemiology (Gire, el al., 2014).

[0419] Detection of shared intra-host variations between the subjects that show temporal patterns is an indication of transmission links between subject (in particular between humans) because it can be explained by subject infection from multiple sources (superinfection), sample contamination recurring mutations (with or without balancing selection to reinforce mutations), or co-transmission of slightly divergent viruses that arose by mutation earlier in the transmission chain (Park, et al., Cell 161(7).1516-1526, 2015). Detection of shared intra-host variations between subjects may comprise detection of intra-host variants located at common single nucleotide polymorphism (SNP) positions. Positive detection of intra-host variants located at common (SNP) positions is indicative of superinfection and contamination as primary explanations for the intra-host variants. Superinfection and contamination can be parted on the basis of SNP frequency appearing as inter-host variants (Park, et al., 2015). Otherwise superinfection and contamination can be ruled out. In this latter case, detection of shared intra-host variations between subjects may further comprise assessing the frequencies of synonymous and nonsynonymous variants and comparing the frequency of synonymous and nonsynonymous variants to one another. A nonsynonymous mutation is a mutation that alters the amino acid of the protein, likely resulting in a biological change in the microbe that is subject to natural selection. Synonymous substitution does not alter an amino acid sequence. Equal frequency of synonymous and nonsynonymous variants is indicative of the intra-host variants evolving neutrally. If frequencies of synonymous and nonsynonymous variants are divergent, the intra-host variantsare likely to be maintained by balancing selection. If frequencies of synonymous and nonsynonymous variants are low, this is indicative of recurrent mutation. If frequencies of synonymous and nonsynonymous variants are high, this is indicative of co-transmission (Park, et al., 2015).

[0420] Like Ebola virus, Lassa virus (LASV) can cause hemorrhagic fever with high case fatality rates. Andersen et al. generated a genomic catalog of almost 200 LASV sequences from clinical and rodent reservoir samples (Andersen, et al., Cell Volume 162, Issue 4, p 738-750, 13 Aug. 2015). Andersen et al. show that whereas the 2013-2015 EVD epidemic is fueled by human-to-human transmissions, LASV infections mainly result from reservoir-to-human infections. Andersen et al. elucidated the spread of LASV across West Africa and show that this migration was accompanied by changes in LASV genome abundance, fatality rates, codon adaptation, and translational efficiency. The method may further comprise phylogenetically comparing a first pathogen sequence to a second pathogen sequence, and determining whether there is a phylogenetic link between the first and second pathogen sequences. The second pathogen sequence may be an earlier reference sequence. If there is a phylogenetic link, the method may further comprise rooting the phylogeny of the first pathogen sequence to the second pathogen sequence. Thus, it is possible to construct the lineage of the first pathogen sequence. (Park, et al., 2015).

[0421] The method may further comprise determining whether the mutations are deleterious or adaptive. Deleterious mutations are indicative of transmission-impaired viruses and dead-end infections, thus normally only present in an individual subject. Mutations unique to one individual subject are those that occur on the external branches of the phylogenetic tree, whereas internal branch mutations are those present in multiple samples (i.e. in multiple subjects). Higher rate of nonsynonymous substitution is a characteristic of external branches of the phylogenetic tree (Park, et al., 2015).

[0422] In internal branches of the phylogenetic tree, selection has had more opportunity to filter out deleterious mutants. Internal branches, by definition, have produced multiple descendent lineages and are thus less likely to include mutations with fitness costs. Thus, lower rate of nonsynonymous substitution is indicative of internal branches (Park, et al., 2015).

[0423] Synonymous mutations, which likely have less impact on fitness, occurred at more comparable frequencies on internal and external branches (Park, et al., 2015).

[0424] By analyzing the sequenced target sequence, such as viral genomes, it is possible to discover the mechanisms responsible for the severity of the epidemic episode such as during the 2014 Ebola outbreak. For example, Gire et al. made a phylogenetic comparison of the genomes of the 2014 outbreak to all 20 genomes from earlier outbreaks suggests that the 2014 West African virus likely spread from central Africa within the past decade. Rooting the phylogeny using divergence from other ebolavirus genomes was problematic (6, 13). However, rooting the tree on the oldest outbreak revealed a strong correlation between sample date and root-to-tip distance, with a substitution rate of 8×10-4 per site per year (13). This suggests that the lineages of the three most recent outbreaks all diverged from a common ancestor at roughly the same time, around 2004, which supports the hypothesis that each outbreak represents an independent zoonotic event from the same genetically diverse viral population in its natural reservoir. They also found out that the 2014 EBOV outbreak might be caused by a single transmission from the natural reservoir, followed by human-to-human transmission during the outbreak. Their results also suggested that the epidemic episode in Sierra Leon might stem from the introduction of two genetically distinct viruses from Guinea around the same time (Gire, et al., 2014).

[0425] It has been also possible to determine how the Lassa virus spread out from its origin point, in particular thanks to human-to-human transmission and even retrace the history of this spread 400 years back (Andersen, et al., Cell 162(4):738-50, 2015).

[0426] In relation to the work needed during the 2013-2015 EBOV outbreak and the difficulties encountered by the medical staff at the site of the outbreak, and more generally, the method of the invention makes it possible to carry out sequencing using fewer selected probes such that sequencing can be accelerated, thus shortening the time needed from sample taking to results procurement. Further, kits and systems can be designed to be usable on the field so that diagnostics of a patient can be readily performed without need to send or ship samples to another part of the country or the world.

[0427] In any method described above, sequencing the target sequence or fragment thereof may be used any of the sequencing processes described above. Further, sequencing the target sequence or fragment thereof may be a near-real-time sequencing. Sequencing the target sequence or fragment thereof may be carried out according to previously described methods (Experimental Procedures: Matranga et al., 2014; and Gire, et al., 2014). Sequencing the target sequence or fragment thereof may comprise parallel sequencing of a plurality of target sequences. Sequencing the target sequence or fragment thereof may comprise Illumina sequencing.

[0428] Analyzing the target sequence or fragment thereof that hybridizes to one or more of the selected probes may be an identifying analysis, wherein hybridization of a selected probe to the target sequence or a fragment thereof indicates the presence of the target sequence within the sample.

[0429] Currently, primary diagnostics are based on the symptoms a patient has. However, various diseases may share identical symptoms so that diagnostics rely much on statistics. For example, malaria triggers flu-like symptoms: headache, fever, shivering, joint pain, vomiting, hemolytic anemia, jaundice, hemoglobin in the urine, retinal damage, and convulsions. These symptoms are also common for septicemia, gastroenteritis, and viral diseases. Amongst the latter, Ebola hemorrhagic fever has the following symptoms fever, sore throat, muscular pain, headaches, vomiting, diarrhea, rash, decreased function of the liver and kidneys, internal and external hemorrhage.

[0430] When a patient is presented to a medical unit, for example in tropical Africa, basic diagnostics will conclude to malaria because statistically, malaria is the most probable disease within that region of Africa. The patient is consequently treated for malaria although the patient might not actually have contracted the disease and the patient ends up not being correctly treated. This lack of correct treatment can be life-threatening especially when the disease the patient contracted presents a rapid evolution. It might be too late before the medical staff realizes that the treatment given to the patient is ineffective and comes to the correct diagnostics and administers the adequate treatment to the patient.

[0431] The method of the invention provides a solution to this situation. Indeed, because the number of guide RNAs can be dramatically reduced, this makes it possible to provide on a single chip selected probes divided into groups, each group being specific to one disease, such that a plurality of diseases, e.g. viral infection, can be diagnosed at the same time. Thanks to the invention, more than 3 diseases can be diagnosed on a single chip, preferably more than 4, 5, 6, 7, 8, 9, 10, 11, 12, 13, 14, 15, 16, 17, 18, 19, 20 diseases at the same time, preferably the diseases that most commonly occur within the population of a given geographical area. Since each group of selected probes is specific to one of the diagnosed diseases, a more accurate diagnosis can be performed, thus diminishing the risk of administering the wrong treatment to the patient.

[0432] In other cases, a disease such as a viral infection may occur without any symptoms, or had caused symptoms but they faded out before the patient is presented to the medical staff. In such cases, either the patient does not seek any medical assistance or the diagnostics is complicated due to the absence of symptoms on the day of the presentation.

[0433] The present invention may also be used in concert with other methods of diagnosing disease, identifying pathogens and optimizing treatment based upon detection of nucleic acids, such as mRNA in crude, non-purified samples.

[0434] The method of the invention also provides a powerful tool to address this situation. Indeed, since a plurality of groups of selected guide RNAs, each group being specific to one of the most common diseases that occur within the population of the given area, are comprised within a single diagnostic, the medical staff only need to contact a biological sample taken from the patient with the chip. Reading the chip reveals the diseases the patient has contracted.

[0435] In some cases, the patient is presented to the medical staff for diagnostics of particular symptoms. The method of the invention makes it possible not only to identify which disease causes these symptoms but at the same time determine whether the patient suffers from another disease he was not aware of.

[0436] This information might be of utmost importance when searching for the mechanisms of an outbreak. Indeed, groups of patients with identical viruses also show temporal patterns suggesting a subject-to-subject transmission links.

### Example Microbes

[0437] The embodiment disclosed herein may be used to detect a number of different microbes. The term microbe as used herein includes bacteria, fungus, protozoa, parasites and viruses. Bacteria

[0438] The following provides an example list of the types of microbes that might be detected using the embodiments disclosed herein. In certain example embodiments, the microbe is a bacterium. Examples of bacteria that can be detected in accordance with the disclosed methods include without limitation any one or more of (or any combination of) Acinetobacter baumanii, Actinobacillus sp., Actinomycetes, Actinomyces sp. (such as Actinomyces israelii and Actinomyces naeslundii), Aeromonas sp. (such as Aeromonas hydrophila, Aeromonas veronii biovar sobria (Aeromonas sobria), and Aeromonas caviae), Anaplasma phagocytophilum, Anaplasma marginale Alcaligenes xylosoxidans, Acinetobacter baumanii, Actinobacillus actinomycetemcomitans, Bacillus sp. (such as Bacillus anthracis, Bacillus cereus, Bacillus subtihis, Bacillus thuringiensis, and Bacillus stearothermophilus), Bacteroides sp. (such as Bacteroides fragilis), Bartonella sp. (such as Bartonella bacilliformis and Bartonella henselae, Bifdobacterium sp., Bordetella sp. (such as Bordetella pertussis, Bordetella parapertussis, and Bordetella bronchiseptica), Borrelia sp. (such as Borrelia recurrentis, and Borrelia burgdorferi), Brucella sp. (such as Brucella abortus, Brucella canis, Brucella melintensis and Brucella suis), Burkholderia sp. (such as Burkholderia pseudomallei and Burkholderia cepacia), Campylobacter sp. (such as Campylobacter jejuni, Campylobacter coli, Campylobacter lari and Campylohacter fetus), Capnocytophaga sp., Cardiobacterium hominis, Chlamydia trachonatis, Chlamydophila pneumoniae, Chlamydophila psittaci, Citrobacter sp. Coxiella burnetii, Corynebacterium sp. (such as, Corynebacterium diphtheriae, Corynebacterium jeikeum and Corynebacterium), Clostridium sp. (such as Clostridium perfringens, Clostridium dificile, Clostridium botulinum and Clostridium tetani), Eikenella corrodens, Enterobacter sp. (such as Enterobacter aerogenes, Enterobacter agglomerans, Enterobacter cloacae and Escherichia coli, including opportunistic Escherichia coli, such as enterotoxigenic E. coli, enteroinvasive E. coli, enteropathogenic E. coli, enterohemorrhagic E. coli, enteroaggregative E. coli and uropathogenic E. coli) Enterococcus sp. (such as Enterococcus faecalis and Diterococcus faecium) Ehrlichia sp. (such as Ehrlichia chafeensia and Ehrlichia canis), Epidermophyton floccosum, Erysipelothrix rhusiopathiae, Eubacterium sp., Francisella tularensis, Fusobacterium nucleatum, Gardnerella vaginalis, Gemella morbillorum, Haemophilus sp. (such as Haemophilus influenzae, Haemophilus ducreyi, Haemophilus aegyptius, Haemophilus parainfluenzae, Haemophilus haemolyticus and Haemophilus parahaemolyticus, Helicobacter sp. (such as Helicobacter pylori, Helicohacter cinaedi and Helicobacter fennelliae), Kingella kingii, Klebsiella sp. (such as Klebsiella pneumoniae, Klebsiella granulomatis and Klebsiella oxytoca), Lactobacillus sp., Listeria monocytogenes, Leptospira interrogans, Legionella pneumophila, Leptospira interrogans, Peptostreptococcus sp., Mannheimia hemolytica, Microsporum canis, Moraxella catarrhalis, Morganella sp., Mobiluncus sp., Micrococcus sp., Mycobacterium sp. (such as Mycobacterium leprae, Mycobacterium tuberculosis, Mycobacterium paratuberculosis, Mycobacterium intracelhulare, Mycobacterium avium, Mycobacterium bovis, and Mycobacterium marinum), Mycoplasm sp. (such as Mycoplasma pneumoniae, Mycoplasma hominis, and Mycoplasma genitalium), Nocardia sp. (such as Nocardia asteroides, Nocardia cyriacigeorgica and Nocardia brasiliensis), Neisseria sp. (such as Neisseria gonorrhoeae and Neisseria meningitidis), Pasteurella multocida, Pityrosporum orbiculare (Malassezia furfur), Plesiomonas shigelloides. Prevotella sp., Porphyromonas sp., Prevotella melaninogenica, Proteus sp. (such as Proteus vulgaris and Proteus mirabilis), Providencia sp. (such as Providencia alcalifaciens, Providencia rettgeri and Providencia stuartii), Pseudomonas aeruginosa, Propionibacterium acnes, Rhodococcus equi, Rickettsia sp. (such as Rickettsia rickettsii, Rickettsia akari and Rickettsia prowazekii, Orientia tsutsugamushi (formerly: Rickettsia tsutsugamushi) and Rickettsia typhi), Rhodococcus sp., Serratia marcescens, Stenotrophomonas maltophilia, Salmonella sp. (such as Salmonella enterica, Salmonella typhi, Salmonella paratyphi, Salmonella enteritidis, Salmonella cholerasuis and Salmonella typhimurium), Serratia sp. (such as Serratia marcesans and Serratia liquifaciens), Shigella sp. (such as Shigella dysenteriae, Shigella flexneri, Shigella boydii and Shigella sonnei), Staphylococcus sp. (such as Staphylococcus aureus, Staphylococcus epidermidis, Staphylococcus hemolvticus, Staphylococcus saprophyticus), Streptococcus sp. (such as Streptococcus pneumoniae (for example chloramphenicol-resistant serotype 4 Streptococcus pneumoniae, spectinomycin-resistant serotype 6B Streptococcus pneumoniae, streptomycin-resistant serotype 9V Streptococcus pneumoniae, erythromycin-resistant serotype 14 Streptococcus pneumoniae, optochin-resistant serotype 14 Streptococcus pneumoniae, rifampicin-resistant serotype 18C Streptococcus pneumoniae, tetracycline-resistant serotype 19F Streptococcus pneumoniae, penicillin-resistant serotype 19F Streptococcus pneumoniae, and trimethoprim-resistant serotype 23F Streptococcus pneumoniae, chloramphenicol-resistant serotype 4 Streptococcus pneumoniae, spectinomycin-resistant serotype 6B Streptococcus pneumoniae, streptomycin-resistant serotype 9V Streptococcus pneumoniae, optochin-resistant serotype 14 Streptococcus pneumoniae, rifampicin-resistant serotype 18C Streptococcus pneumoniae, penicillin-resistant serotype 19F Streptococcus pneumoniae, or trimethoprim-resistant serotype 23F Streptococcus pneumoniae), Streptococcus agalactiae, Streptococcus mutans, Streptococcus pyogenes, Group A streptococci, Streptococcus pyogenes, Group B streptococci, Streptococcus agalactiae, Group C streptococci, Streptococcus anginosus, Streptococcus equismilis, Group D streptococci, Streptococcus bovis, Group F streptococci, and Streptococcus anginosus Group G streptococci), Spirillum minus, Streptobacillus moniliformi, Treponema sp. (such as Treponema carateum, Treponema petenue, Treponema pallidum and Treponema endemicum, Trichophyton rubrum, T. mentagrophytes, Tropheryma whippelii, Ureaplasma urealyticum, Veillonella sp., Virio sp. (such as Vibrio cholerae, Vibrio parahemolyticus, Vibrio vidnifcus, Vibrio parahaemolyticus, Vibrio vunifcus, Vibrio alginolyticus, V ibrio mimicus, Vibrio hollisae, Vibrio fluvialis, Vibrio metchnikovii, Vibriodamsela and Vibrio furnisii), Yersinia sp. (such as Yersinia enterocolitica, Yersinia pestis, and Yersinia pseudotuberculosis) and Xanthomonas maltophilia among others.

### Fungi

[0439] In certain example embodiments, the microbe is a fungus or a fungal species. Examples of fungi that can be detected in accordance with the disclosed methods include without limitation any one or more of (or any combination of), Aspergillus, Blastomyces, Candidiasis, Coccidiodomrycosis, Cryptococcus neoformans, Cryptococcus gatti, sp. Histoplasma sp. (such as Histoplasma capsulatum), Pneumocystis sp. (such as Pneumocystis jirovecii), Stachybotrys (such as Stachybotrys chartarum), Mucroymcosis, Sporothrix, fungal eye infections ringworm, Exserohilum, Cladosporium.

[0440] In certain example embodiments, the fungus is a yeast. Examples of yeast that can be detected in accordance with disclosed methods include without limitation one or more of (or any combination of), Aspergillus species (such as Aspergillus fumigatus, Aspergillus flavus and Aspergillus clavatus), Cryptococcus sp. (such as Cryptococcus neoformans, Crptococcus gattii, Cryptococcus laurentii and Cryptococcus albidus), a Geotrichum species, a Saccharomyces species, a Hansenula species, a Candida species (such as Candida albicans), a Kluyveromyces species, a Debaryomyces species, a Pichia species, or combination thereof. In certain example embodiments, the fungi is a mold. Example molds include, but are not limited to, a Penicillium species, a Cladosporium species, a Byssochlamys species, or a combination thereof.

### Protozoa

[0441] In certain example embodiments, the microbe is a protozoa. Examples of protozoa that can be detected in accordance with the disclosed methods and devices include without limitation any one or more of (or any combination of), Euglenozoa, Heterolobosea, Diplomonadida, Amoebozoa, Blastocystic, and Apicomplexa. Example Euglenoza include, but are not limited to, Trypanosoma cruzi (Chagas disease), T. brucei gambiense, T brucei rhodesiense, Leishmania braziliensis, L. infantum, L. mexicana, L. major, L. tropica, and L. donovani. Example Heterolobosea include, but are not limited to, Naegleria fowleri. Example Diplomonadids include, but are not limited to, Giardia intestinalis (G. lamblia, G. duodenalis). Example Amoebozoa include, but are not limited to, Acanthamoeba castellanii, Balamuthia madrillaris, Entamoeba histolytica. Example Blastocysts include, but are not limited to, Blastocystic hominis. Example Apicomplexa include, but are not limited to, Babesia microti, Cryptosporidium parvum, Cyclospora cayetanensis, Plasmodium falciparum, P. vivax, P. ovale, P. malariae, and Toxoplasma gondii.

### Parasites

[0442] In certain example embodiments, the microbe is a parasite. Examples of parasites that can be detected in accordance with disclosed methods include without limitation one or more of (or any combination of), an Onchocerca species and a Plasmodium species.

### Viruses

[0443] In certain example embodiments, the systems, devices, and methods, disclosed herein are directed to detecting viruses in a sample. The embodiments disclosed herein may be used to detect viral infection (e.g. of a subject or plant), or determination of a viral strain, including viral strains that differ by a single nucleotide polymorphism. The virus may be a DNA virus, a RNA virus, or a retrovirus. Non-limiting example of viruses useful with the present invention include, but are not limited to Ebola, measles, SARS, Chikungunya, hepatitis, Marburg, yellow fever, MERS, Dengue, Lassa, influenza, rhabdovirus or HIV. A hepatitis virus may include hepatitis A, hepatitis B, or hepatitis C. An influenza virus may include, for example, influenza A or influenza B. An HIV may include HIV 1 or HIV 2. In certain example embodiments, the viral sequence may be a human respiratory syncytial virus, Sudan ebola virus, Bundibugyo virus, Tai Forest ebola virus, Reston ebola virus, Achimota, Aedes flavivirus, Aguacate virus, Akabane virus, Alethinophid reptarenavirus, Allpahuayo mammarenavirus, Amapari mmarenavirus, Andes virus, Apoi virus, Aravan virus, Aroa virus, Arumwot virus, Atlantic salmon paramyxovirus, Australian bat lyssavirus, Avian bornavirus, Avian metapneumovirus, Avian paramyxoviruses, penguin or Falkland Islandsvirus, BK polyomavirus, Bagaza virus, Banna virus, Bat herpesvirus, Bat sapovirus, Bear Canon mammarenavirus, Beilong virus, Betacoronavirus, Betapapillomavirus 1-6, Bhanja virus, Bokeloh bat lyssavirus, Borna disease virus, Bourbon virus, Bovine hepacivirus, Bovine parainfluenza virus 3, Bovine respiratory syncytial virus, Brazoran virus, Bunyamwera virus, Caliciviridae virus. California encephalitis virus, Candiru virus, Canine distemper virus, Canine pneumovirus, Cedar virus, Cell fusing agent virus, Cetacean morbillivirus, Chandipura virus, Chaoyang virus, Chapare mammarenavirus, Chikungunya virus, Colobus monkey papillomavirus, Colorado tick fever virus, Cowpox virus, Crimean-Congo hemorrhagic fever virus, Culex flavivirus, Cupixi mammarenavirus, Dengue virus, Dobrava-Belgrade virus, Donggang virus, Dugbe virus, Duvenhage virus, Eastern equine encephalitis virus, Entebbe bat virus, Enterovirus A-D, European bat lyssavirus 1-2, Eyach virus, Feline morbillivirus, Fer-de-Lance paramyxovirus, Fitzroy River virus, Flaviviridae virus, Flexal mammarenavirus, GB virus C, Gairo virus, Gemycircularvirus, Goose paramyxovirus SF02, Great Island virus, Guanarito mammarenavirus, Hantaan virus, Hantavirus Z10, Heartland virus, Hendra virus, Hepatitis A/B/C/E, Hepatitis delta virus, Human bocavirus, Human coronavirus, Human endogenous retrovirus K, Human enteric coronavirus, Human genital-associated circular DNA virus-1, Human herpesvirus 1-8, Human immunodeficiency virus 1/2, Human mastadenovirus A-G, Human papillomavirus, Human parainfluenza virus 1-4, Human paraechovirus, Human picornavirus, Human smacovirus, Ikoma lyssavirus, Ilheus virus, Influenza A-C, Ippy mammarenavirus, Irkut virus, J-virus, JC polyomavirus, Japanese encephalitis virus, Junin mammarenavirus, KI polyomavirus, Kadipiro virus, Kamiti River virus, Kedougou virus, Khujand virus, Kokobera virus, Kyasanur forest disease virus, Lagos bat virus, Langat virus, Lassa mammarenavirus, Latino mammarenavirus, Leopards Hill virus, Liao ning virus, Ljungan virus, Lloviu virus, Louping ill virus, Lujo mammarenavirus, Luna mammarenavirus, Lunk virus, Lymphocytic choriomeningitis mammarenavirus, Lyssavirus Ozernoe, MSSI2.225 virus, Machupo mammarenavirus, Mamastrovirus 1, Manzanilla virus, Mapuera virus, Marburg virus, Mayaro virus, Measles virus, Menangle virus, Mercadeo virus, Merkel cell polyomavirus, Middle East respiratory syndrome coronavirus, Mobala mammarenavirus, Modoc virus, Moijang virus, Mokolo virus, Monkeypox virus, Montana myotis leukoenchalitis virus, Mopeia lassa virus reassortant 29, Mopeia mammarenavirus, Morogoro virus, Mossman virus, Mumps virus, Murine pneumonia virus, Murray Valley encephalitis virus, Nariva virus, Newcastle disease virus, Nipah virus, Norwalk virus, Norway rat hepacivirus, Ntaya virus, O'nyong-nyong virus, Oliveros mammarenavirus, Omsk hemorrhagic fever virus, Oropouche virus, Parainfluenza virus 5, Parana mammarenavirus, Parramatta River virus, Peste-des-petits-ruminants virus, Pichande mammarenavirus, Picornaviridae virus, Pirital mammarenavirus, Piscihepevirus A, Porcine parainfluenza virus 1, porcine rubulavirus, Powassan virus, Primate T-lymphotropic virus 1-2, Primate erythroparvovirus 1, Punta Toro virus, Puumala virus, Quang Binh virus, Rabies virus, Razdan virus, Reptile bornavirus 1, Rhinovirus A-B, Rift Valley fever virus, Rinderpest virus, Rio Bravo virus, Rodent Torque Teno virus, Rodent hepacivirus, Ross River virus, Rotavirus A-I, Royal Farm virus, Rubella virus, Sabia mammarenavirus, Salem virus, Sandfly fever Naples virus, Sandfly fever Sicilian virus, Sapporo virus, Sathuperi virus, Seal anellovirus, Semliki Forest virus, Sendai virus, Seoul virus, Sepik virus, Severe acute respiratory syndrome-related coronavirus, Severe fever with thrombocytopenia syndrome virus, Shamonda virus, Shimoni bat virus, Shuni virus, Simbu virus, Simian torque teno virus, Simian virus 40-41, Sin Nombre virus, Sindbis virus, Small anellovirus, Sosuga virus, Spanish goat encephalitis virus, Spondweni virus, St. Louis encephalitis virus, Sunshine virus, TTV-like mini virus, Tacaribe mammarenavirus, Taila virus, Tamana bat virus, Tamiami mammarenavirus, Tembusu virus, Thogoto virus, Thottapalayam virus, Tick-borne encephalitis virus, Tioman virus, Togaviridae virus, Torque teno canis virus, Torque teno douroucouli virus, Torque teno felis virus, Torque teno midi virus, Torque teno sus virus, Torque teno tamarin virus, Torque teno virus, Torque teno zalophus virus, Tuhoko virus, Tula virus, Tupaia paramyxovirus, Usutu virus, Uukuniemi virus, Vaccinia virus, Variola virus, Venezuelan equine encephalitis virus, Vesicular stomatitis Indiana virus, WU Polyomavirus, Wesselsbron virus, West Caucasian bat virus, West Nile virus, Western equine encephalitis virus, Whitewater Arroyo mammarenavirus, Yellow fever virus, Yokose virus, Yug Bogdanovac virus, Zaire ebolavirus, Zika virus, or Zygosaccharomyces bailii virus Z viral sequence. Examples of RNA viruses that may be detected include one or more of (or any combination of) Coronaviridae virus, a Picornaviridae virus, a Caliciviridae virus, a Flaviviridae virus, a Togaviridae virus, a Bornaviridae, a Filoviridae, a Paramyxoviridae, a Pneumoviridae, a Rhabdoviridae, an Arenaviridae, a Bunyaviridae, an Orthomyxoviridae, or a Deltavirus. In certain example embodiments, the virus is Coronavirus, SARS, Poliovirus, Rhinovirus, Hepatitis A, Norwalk virus, Yellow fever virus, West Nile virus, Hepatitis C virus, Dengue fever virus, Zika virus, Rubella virus, Ross River virus, Sindbis virus, Chikungunya virus, Borna disease virus, Ebola virus, Marburg virus, Measles virus, Mumps virus, Nipah virus, Hendra virus, Newcastle disease virus, Human respiratory syncytial virus, Rabies virus, Lassa virus, Hantavirus, Crimean-Congo hemorrhagic fever virus, Influenza, or Hepatitis D virus.

[0444] In certain example embodiments, the virus may be a plant virus selected from the group comprising Tobacco mosaic virus (TMV), Tomato spotted wilt virus (TSWV), Cucumber mosaic virus (CMV), Potato virus Y (PVY), the RT virus Cauliflower mosaic virus (CaMV), Plum pox virus (PPV), Brome mosaic virus (BMV), Potato virus X (PVX), Citrus tristeza virus (CTV), Barley yellow dwarf virus (BYDV), Potato leafroll virus (PLRV), Tomato bushy stunt virus (TBSV), rice tungro spherical virus (RTSV), rice yellow mottle virus (RYMV), rice hoja blanca virus (RHBV), maize rayado fino virus (MRFV), maize dwarf mosaic virus (MDMV), sugarcane mosaic virus (SCMV), Sweet potato feathery mottle virus (SPFMV), sweet potato sunken vein closterovirus (SPSVV), Grapevine fanleaf virus (GFLV), Grapevine virus A (GVA), Grapevine virus B (GVB), Grapevine fleck virus (GFkV), Grapevine leafroll-associated virus-1, -2, and -3, (GLRaV-1, -2, and -3), Arabis mosaic virus (ArMV), or Rupestris stem pitting-associated virus (RSPaV). In a preferred embodiment, the target RNA molecule is part of said pathogen or transcribed from a DNA molecule of said pathogen. For example, the target sequence may be comprised in the genome of an RNA virus. It is further preferred that CRISPR effector protein hydrolyzes said target RNA molecule of said pathogen in said plant if said pathogen infects or has infected said plant. It is thus preferred that the CRISPR system is capable of cleaving the target RNA molecule from the plant pathogen both when the CRISPR system (or parts needed for its completion) is applied therapeutically, i.e. after infection has occurred or prophylactically, i.e. before infection has occurred.

[0445] In certain example embodiments, the virus may be a retrovirus. Example retroviruses that may be detected using the embodiments disclosed herein include one or more of or any combination of viruses of the Genus Alpharetrovirus, Betaretrovirus, Gammaretrovirus, Deltaretrovirus, Epsilonretrovirus, Lentivirus, Spumavirus, or the Family Metaviridae, Pseudoviridae, and Retroviridae (including HIV), Hepadnaviridae (including Hepatitis B virus), and Caulimoviridae (including Cauliflower mosaic virus).

[0446] In certain example embodiments, the virus is a DNA virus. Example DNA viruses that may be detected using the embodiments disclosed herein include one or more of (or any combination of) viruses from the Family Myoviridae, Podoviridae, Siphoviridae, Alloherpesviridae, Herpesviridae (including human herpes virus, and Varicella Zozter virus), Malocoherpesviridae, Lipothrixviridae, Rudiviridae, Adenoviridae, Ampullaviridae, Ascoviridae, Asfarviridae (including African swine fever virus), Baculoviridae, Cicaudaviridae, Clavaviridae, Corticoviridae, Fuselloviridae, Globuloviridae, Guttaviridae, Hytrosaviridae, Iridoviridae, Maseilleviridae, Mimiviridae, Nudiviridae, Nimaviridae, Pandoraviridae, Papillomaviridae, Phycodnaviridae, Plasmaviridae, Polydnaviruses, Polyomaviridae (including Simian virus 40, JC virus, BK virus), Poxviridae (including Cowpox and smallpox), Sphaerolipoviridae, Tectiviridae, Turriviridae, Dinodnavirus, Salterprovirus, Rhizidovirus, among others. In some embodiments, a method of diagnosing a species-specific bacterial infection in a subject suspected of having a bacterial infection is described as obtaining a sample comprising bacterial ribosomal ribonucleic acid from the subject; contacting the sample with one or more of the probes described, and detecting hybridization between the bacterial ribosomal ribonucleic acid sequence present in the sample and the probe, wherein the detection of hybridization indicates that the subject is infected with Escherichia coli, Klebsiella pneumoniae, Pseudomonas aeruginosa, Staphylococcus aureus, Acinetobacter baumannii, Candida albicans, Enterobacter cloacae, Enterococcus faecalis, Enterococcus faecium, Proteus mirabilis, Staphylococcus agalactiae, or Staphylococcus maltophilia or a combination thereof.

### Coronavirus

[0447] Systems and methods of the presently disclosed invention are designed to detect coronavirus, in an aspect, the target sequence is the 2019-nCoV, also referred to herein as SARS-CoV-2, which causes COVID-19. The coronavirus is a positive-sense single stranded RNA family of viruses, infecting a variety of animals and humans. SARS-CoV is one type of coronavirus infection, as well as MERS-CoV. Detection of one or more coronaviruses are envisioned, including the SARS-CoV-2 detected in Wuhan City. Sequences of the sARS-CoV-2 areavailable at GISAID accession no. EPI_ISL_402124 and EPI_ISL_402127-402130, and described in DOI: 10.1101/2020.01.22.914952. Further deposits of the SARS-CoV2 are deposited in the GISAID platform include EP_ISL_402119-402121 and EP_ISL 402123-402124; see also GenBank Accession No. MN908947.3. In an aspect, one may use known SARS and SARS-related coronaviruses or other viruses from one or more hosts to generate a non-redundant alignment. Related viruses can be found, for example in bats.

[0448] In certain embodiments, the systems are designed to comprise at least one highly active guide polynucleotide which is designed according to the methods disclosed herein. In a preferred embodiment, the guide polynucleotide binds to at least one target sequence that is a unique coronavirus genomic sequence, thereby identifying the presence of coronavirus to the exclusion of other viruses. The systems and methods can be designed to detect a plurality of respiratory infections or viral infections, including coronavirus.

[0449] In an aspect the at least one guide polynucleotide binds to a coronavirus sequence encoding a polypeptide that is immunostimulatory to a host immune system. Immunostimulatory polypeptides have the ability to enhance, stimulate, or increase response of the immune system, typically by inducing the activation or activity of a components of the immune system (e.g. an immune cell). In embodiments, the immunostimulatory polypeptide contributes to immune-mediated disease in the host. In an aspect, the host is a mammal, for example, a human, a bat, or a pangolin, that may be infected by a coronavirus. Cyranoski, D. Did pangolins spread the China coronavirus to people? Nature, 7 Feb., 2020. In certain embodiments, the guide polynucleotide can be designed to detect SARS-CoV-2 or a variant thereof in meat, live anmials and humans so that testing can be performed, for example at markets and other public places where sources of contamination can arise.

[0450] Gene targets may comprise ORF1ab, N protein, RNA-dependent RNA polymerase (RdRP), E protein, ORF1b-nsp14, Spike glycoprotein (S), or pancorona targets. Molecular assays have been under development and can be used as a starting point to develop guide molecules for the methods and systems described herein. See, “Diagnostic detection of 2019-nCoV byreal-time RT-PCR” Charite, Berlin Germany (17 Jan. 2020)′ Detection of 2019 novel coronavirus (2019-nCoV) in suspected human cases by RT-PCR—Hong Kong University (23 Jan. 2020); PCR and sequencing protocol for 2019-nCoV—Department of Medical Sciences, Ministry of Public Health, Thailand (updated 28 Jan. 2020); PCR and sequencing protocols for 2019-nCoV-National Institute of Infectious Diseases Japan (24 Jan. 2020); US CDC panel primer and probes-U.S. CDC, USAV—U.S. CDC, USA (28 Jan. 2020); China CDC Primers and probes for detection 2019-nCoV (24 Jan. 2020), incorporated in their entirety by reference. Further, the guide molecule design may exploit differences or similarities with SARS-CoV. Researchers have recently identified similarities and differences between 2019-nCoV and SARS-CoV. “Coronavirus Genome Annotation Reveals Amino Acid Differences with Other SARS Viruses,” genomeweb, Feb. 10, 2020. For example, guide molecules based on the 8a protein, which was present in SARS-CoV but absent in SARS-CoV-2, can be utilized to differentiate between the viruses. Similarly, the 8b and 3b proteins have different lengths in SARS-CoV and sARS-CoV-2 and can be utilized to design guide molecules to detect non-overlapping proteins of nucleotides encoding in the two viruses. Wu et al., Genome Composition and Divergence of the Novel Coronavirus (2019-nCoV) Originating in China, Cell Host & Microbe (2020), DOI. 10.1016/j.chom.2020.02.001, incorporated herein by reference, including all supplemental information, in particular Table S1.

[0451] The systems and methods of detection can be used to identify single nucleotide variants, detection based on rRNA sequences, screening for drug resistance, monitoring microbe outbreaks, genetic perturbations, and screening of environmental samples, as described in PCT/US2018/054472 filed Oct. 22, 2018 at [0183J-[0327J, incorporated herein by reference.

[0452] In certain example embodiments, the systems, devices, and methods disclosed herein may be used for biomarker detection. For example, the systems, devices and method disclosed herein may be used for SNP detection and/or genotyping. The systems, devices and methods disclosed herein may be also used for the detection of any disease state or disorder characterized by aberrant gene expression. Aberrant gene expression includes aberration in the gene expressed, location of expression and level of expression. Multiple transcripts or protein markers related to cardiovascular, immune disorders, and cancer among other diseases may be detected. In certain example embodiments, the embodiments disclosed herein may be used for cell free DNA detection of diseases that involve lysis. In certain example embodiments, the embodiments could be utilized for faster and more portable detection for pre-natal testing of cell-free DNA. The embodiments disclosed herein may be used for screening panels of different SNPs associated with, among others, different coronaviruses, evolving SARS-CoV2, and other related respiratory viral infections. As described herein elsewhere, closely related genotypes/alleles or biomarkers (e.g. having only a single nucleotide difference in a given target sequence) may be distinguished by introduction of a synthetic mismatch in the gRNA.

[0453] In an aspect, the invention relates to a method for detecting target nucleic acids in samples, comprising:
[0454] distributing a sample or set of samples into one or more individual discrete volumes, the individual discrete volumes comprising a CRISPR system according to the invention as described herein;
[0455] incubating the sample or set of samples under conditions sufficient to allow binding of the one or more guide RNAs to one or more target molecules;
[0456] activating the CRISPR effector protein via binding of the one or more guide RNAs to the one or more target molecules, wherein activating the CRISPR effector protein results in modification of the RNA-based masking construct such that a detectable positive signal is generated; and
[0457] detecting the detectable positive signal, wherein detection of the detectable positive signal indicates a presence of one or more target molecules in the sample.

[0458] The sensitivity of the assays described herein are well suited for detection of target nucleic acids in a wide variety of biological sample types, including sample types in which the target nucleic acid is dilute or for which sample material is limited. Methods for field deployable and rapid diagnostic assays can be optimized for the type of sample material utilized. See, e.g. Myhrvold et al., 2018. Biomarker screening may be carried out on a number of sample types including, but not limited to, saliva, urine, blood, feces, sputum, and cerebrospinal fluid. The embodiments disclosed herein may also be used to detect up- and/or down-regulation of genes. For example, a sample may be serially diluted such that only over-expressed genes remain above the detection limit threshold of the assay.

[0459] In certain embodiments, the present invention provides steps of obtaining a sample of biological fluid (e.g., urine, blood plasma or serum, sputum, cerebral spinal fluid), and extracting the DNA or RNA. The mutant nucleotide sequence to be detected, may be a fraction of a larger molecule or can be present initially as a discrete molecule.

[0460] In certain embodiments, DNA is isolated from plasma/serum of a cancer patient. For comparison, DNA samples isolated from neoplastic tissue and a second sample may be isolated from non-neoplastic tissue from the same patient (control), for example, lymphocytes. The non-neoplastic tissue can be of the same type as the neoplastic tissue or from a different organ source. In certain embodiments, blood samples are collected and plasma immediately separated from the blood cells by centrifugation. Serum may be filtered and stored frozen until DNA/RNA extraction. 103751 In an aspect, sample preparation can comprise methods as disclosed herein to circumvent other RNA extraction methods and can be used with standard amplification techniques such as RT-PCR as well as the CRISPR-Cas detection methods disclosed herein. In an aspect, the method may comprise a one-step extraction-free RNA preparation method that can be used with samples tested for coronavirus, which may be, in an aspect, a RT-qPCR testing method, a lateral flow detection method or other CRISPR-Cas detection method disclosed herein. Advantageously, the RNA extraction method can be utilized directly with other testing protocols. In an aspect, the method comprises use of a nasopharyngeal swab, nasal saline lavage, or other nasal sample with Quick Extract™ DNA Extraction Solution (QE09050), Lucigen. In an aspect, the sample is diluted 2:1, 1:1 or 1:2 sample:DNA extraction solution. The sample:extraction mix is incubated at about 90° C. to about 98° C., preferably about 95° C. The incubation period can be about 2, 3, 4, 5, 6, 7, 8, 9, or 10 minutes, preferably about 4 to 6 minutes, or about 5 minutes. Incubation time and temperature may vary depending on sample size and quality. Current CDC Real-Time RT-PCR Diagnostic Panel are as described at fda.gov/media/134922/download, “CDC 2019-Novel Coronavirus (2019-nCoV) Real-Time RT-PCR Diagnostic Panel.” In certain embodiments, the DNA extraction solution can remain with the sample subsequent to incubation and be utilized in the next steps fo detection methods. In an aspect, the detection method is an RT-qPCR reaction and the extraction solution is kept at a concentration of less than 10%, 9%, 8%, 7%, 6%, 5%, 4%, 3% of the reaction mixture, where the reaction mixture comprises the detection reaction reagents, sample and extraction solution.

[0461] In certain embodiments, a bead is utilized with particular embodiments of the invention and may be included with the extraction solution. The bead may be used to capture, concentrate or otherwise enrich for particular material. The bead may be magnetic, and may be provided to capture nucleic acid material. In another aspect, the bead is a silica bead. Beads may be utilized in an extraction step of the methods disclosed herein. Beads can be optionally used with the methods described herein, including with the one-pot methods that allow for concentration of viral nucleic acids from large volume samples, such as saliva or swab samples to allow for a single one-pot reaction method. Concentration of desired target molecules can be increased by about 10-fold, 50-fold, 100-fold, 200-fold, 500-fold, 800-fold, 1000-fold, 1500-fold, 2000-fold, 2500-fold, 3000-fold, or more.

[0462] Magnetic beads in a PEG and salt solution are preferred in an aspect, and in embodiments bind to viral RNA and/or DNA which allows for concentration and lysis concurrently. Silica beads can be used in another aspect. Capture moieties such as oligonucleotide functionalized beads are envisioned for use. The beads may be using with the extraction reagents, allowed to incubate with a sample and the lysis/extraction buffer, thereby concreting target molecules on the beads. When used with a cartridge device detailed elsewhere herein, a magnet can be activated and the beads collected, with optional flushing of the extraction buffer and one or more washes performed. Advantageously, the beads can be used in the one-pot methods and systems without additional washings of the beads, allowing for a more efficient process without increased risks of contamination in multi-step processes. Beads can be utilized with the isothermal amplifications detailed herein, and the beads can flow into an amplification chamber of the cartridge or be maintained in the pot for the amplification step. Upon heating, nucleic acid can be released off the beads.

[0463] In certain example embodiments, target nucleic acids are detected directly from a crude or unprocessed sample, such as blood, serum, saliva, cebrospinal fluid, sputum, or urine. In certain example embodiments, the target nucleic acid is cell free DNA.

[0464] The following examples are provided to aid the understanding of the present invention, the true scope of which is set forth in the appended claims. It is understood that modifications can be made in the procedures set forth without departing from the spirit of the invention.

### EXAMPLES

[0465] The compositions and processes of the present invention will be better understood in connection with the following examples, which are intended as an illustration only and not limiting of the scope of the invention. Various changes and modifications to the disclosed embodiments will be apparent to those skilled in the art and such changes and modifications including, without limitation, those relating to the processes, formulations and/or methods of the invention may be made without departing from the spirit of the invention and the scope of the appended claims.

### Example 1. RNase H Accelerated Detection of Lamp Amplicons by RNA Molecular

[0466] beacons. In this example, a standard LAMP reaction (consisting of 4-6 primers, and either a polymerase and a reverse transcriptase, or a polymerase with reverse transcriptase activity) is supplemented with a RNA probe containing a fluorophore on end, and a quencher on the other end. The reaction is further supplemented by a protein with RNase H activity, such as RNase HI, RNase HII, or a reverse transcriptase with RNase H activity. The probe can be designed so that it is quenched when unbound, but fluorescence is unquenched during binding (molecular beacon). Furthermore, when the probe binds, the RNase H activity in the reaction results in cleavage and turnover, increasing signal and reaction kinetics.

[0467] Example 2. Multiplexed detection of multiple pathogens and inline controls. Using either multiple RNA or DNA probes with different fluorophores, or a combination of some subset of CRISPR-based detection, intercalating dyes, and RNA or DNA probes, a reaction can be used to detect the presence of multiple sequences of interest simultaneously. This can be accomplished either by design of a specific guide for CRISPR-based detection or RNA or DNA probe for each target, or by specific detection of targets combined with detection of general isothermal amplification by intercalating dyes or other amplification indicators (pH sensitive dyes or detection of released ATP). This approach can be used to detect multiple pathogens, or combine pathogen detection with in-line controls, such as human genes. The fluorophores in these examples could, for example, be Cy5, FAM, and HEX for 3-channel detection. For 5 channel detection, one example of fluorophores is Cy5, FAM, Cy3, Texas Red®-X, and HEX.

[0468] Example 3. Detection of proteins and small molecules using isothermal amplification. By using selective binding molecules, such as antibodies, RNA aptamers, or DNA aptamers, isothermal amplification can be extended to detection of proteins or small molecules of interest. Selective binding molecules can be fused to nucleic acids. See, e.g., proximity ligation: https://www.sigmaaldrich.com/technical-documents/protocols/biology/how-pla-works.html. When brought into proximity by binding to the protein or small molecule of interest, the nucleic acids will be ligated and serve as the template for isothermal amplification.

[0469] Example 3. R-loop based OSD release. OSD probes consist of hybridized oligos that when unbound, separate a fluorophore and quencher, resulting in fluorescence. OSD probes can bind ssDNA in amplification reactions, causing displacement of the dsDNA region in the OSD probe and unfolding. This unfolding leads to detectable fluorescence. Normally, OSD can be combined with LAMP as long as ssDNA regions exist in the amplicon. These ssDNA regions are typically in the loop regions at the end of the amplicons and this works sufficiently well for OSD binding and release of fluorescence. As there are only limited ssDNA regions, it would be ideal to be able to target multiple ssDNA regions to have increased fluorescence and more flexibility in design. One approach to do this would be to use catalytically inactive CRISPR enzymes to generate R-loops, which expose −10 nt of ssDNA DNA in the loop. These ssDNA regions could be used for triggering OSD probes and releasing fluorescence. Multiple guides can be used allowing for many regions to be targeted in the amplicon with OSD probes and enabling greater signal to noise. Additionally, a single CRISPR enzyme could be used for multiplexing as guides could target different amplicons, generating ssDNA regions for OSD probes with orthogonal fluorescent colors.

[0470] Example 4. R-Loop based molecular beacons OA. Molecular beacons consist of a single oligo that forms a hairpin that brings a fluorophore and quencher together. When a molecular beacon binds a complementary ssDNA region, it will unfold causing separation of the fluorophore and quencher, releasing detectable fluorescence. As with OSD probes, molecular beacons must bind ssDNA loop regions, limiting overall signal and flexibility in design. Similar to Example 1, one can use CRISPR enzymes to generate multiple ssDNA loops to trigger molecular beacons. Molecular beacons will have the advantage of faster kinetics and lower background because they are uni-molecular systems vs hybridization of two oligos as with OSDs.

[0471] Example 5. RNaseH-based probes. The Rnase H family of ribonucleases cleaves RNA strands that are heteroduplexed with DNA. By using RNA-based probes that hybridize with target regions of DNA, RNase H can cleave these probes, leading to unquenching of fluorescent reporters and generation of signal. Similarly, use of RNA probes with antigens on either end, such as FAM and biotin, can adapt this readout method for lateral flow based readouts, or to release tethered enzymes. These probes could be targeted to accessible single stranded regions of a DNA amplicon, such as the loops generated during LAMP, or double stranded regions that are melted by high temperatures, helicases, or the binding of programmable DNA-binding proteins, such as Cas enzymes (see below). The catalytic activity of Rnase H cleavage increases the turnover of this method compared to standard molecular beacons or OSD. The RNA fluor-quencher molecule can also be made double stranded by a complementary RNA piece, which may result in decreased background.

[0472] Example 6. Molecular beacons combined with RnaseH. As molecular beacons can generate fluorescence upon binding, they can be useful to detect regions of single stranded DNA. However, this reaction is reversible and has a one-to-one relationship between accessible DNA regions and unfolded, unquenched molecular beacons. By cleaving these beacons with RNase H, increased turnover can result in higher signal and more rapid kinetics. Furthermore, the increased quenching from the molecular beacon can improve background over the single-stranded RNA approach in Example 3.

[0473] Example 7. OSD combined with RNaseH. The limitations of OSD are a one-to-one relationship between the binding region on the amplicon (such as the LAMP amplicon), and the reversibility of the reaction, which can decrease the signal and kinetics. Using RNA-RNA OSD, where both the fluorophore strand and quencher strand consist of RNA, enables several improvements in kinetics. In the simplest scheme, RNAse H will degrade the bound strand (either a fluorphore strand or a quencher strand), leading to release of signal.

[0474] In a different circumstance, the OSD probes do not need fluorophores or quenchers, and instead are naked DNA. Unbinding of the OSD and freeing of an ssDNA piece allows for binding of this free ssDNA to bind to a free quencher-RNA-fluor strand, which allows cleavage of this strand by RNase H. This strand can also be a molecular beacon.

[0475] Example 8. R-loop based RNaseH probes OA. As RNase H probes are limited to ssDNA loops, one can combine this concept with using CRISPR enzyme to generate ssDNA regions in R loops. This is generalizable to all single-stranded binding approaches (Examples 3-5). The advantage of this approach over approaches 1 and 2 is that the RNase H probe will cause cleavage of the probe in the R loop and release of the probe, allowing more probes to bind. This multiple turnover will lead to signal amplification and more signal to noise than the OSD and molecular probe approaches. We also would expect to see faster kinetics of signal amplification and detection. The RNase H could also be fused to Cas9 or Cas12 to allow for faster cleavage of probes that bind.

[0476] Example 9. Magnetic bead preparation. 10 mL of Sera-Mag SpeedBeads Carboxyl Magnetic Beads Hydrophobic (GE Healthcare 65152105050250) were washed with ddH₂0 and resuspended in 500 mL of bead binding buffer (10 mM Tris-HCl pH 8.0, 1M KCl, 18% PEG-8000, and 1 mM EDTA). To make the combined lysis and bead buffer, 40 μL of 10× QuickExtract Plant DNA was combined with 200 μL of magnetic bead solution (see above) and 160 μL of water. Dry clinical swabs can then be added to this 400 μL of combined lysis and bead buffer for incubation between 2.5 minutes to 10 minutes. The mixture is then bound onto a magnet or magnetic plate (Alpaqua A001219) and can then be resuspended in 50 μL of STOPCovid mastermix for incubation at 60 C.

[0477] The preparation and use of magnetic beads is described in U.S. Pat. Nos. 5,665,554, 5,705,628, which are incorporated herein by reference in their entireties. Examples of magnetic beads include Beckman Ampure beads, Roche KAPA HyperPure beads, MagSi-DNA mf beads, Sera-Mag Carboxylate-modified magnetic beads and Speedbeads from Cytiva, M-PVA Magnetic beads from PerkinElmer and TurboBeads PEG-Carboxy, and CleanNGS SPRI beads.

[0478] Example 10. LAMP OSD—Oligonucleotide strand displacement. OSD probes consist of 2 complementary oligonucleotides, one with a 5-end fluorophore and one with a 3′-end quencher, that hybridize and quench the fluorescence. Combined with LAMP, fluorescence increases with amplicon-specific displacement of either strand. To detect synthetic COVID viral RNA, the LAMP reaction was performed with N6 primers and Actb primers, and the N6 amplicons are detected with OSD probes (111/112). Probe 111/112 (sequence below) hybridizes with the single-stranded loop region created from the LAMP reaction using N6 primers, and can be used as a sequence-specific readout for amplification. The reaction was carried out at 65 C, but also works in the range of 60-65 C.

[0479] Probe sequences. The two strands were annealed by heating to 95 C and ramping the temperature down to 4 C at a rate of 0.1 C/s.

### OSD Probe Set 111/112:

| Sequence | | Descrip- |
|---|---|---|
| ID | Oligo sequence | tion |
| PT0111 | /56-FAM/ | N6-F4 |
| | GTGCGCATTGGCATGGAAGTCACACCTTCGG | |
| | GAAC/3InvdT/ | |
| PT0112 | TGTGACTTCCATGCCAATGCGCAC/ | N6-Q4 |
| | 3IABKFQ/ | |

[0481] Additional OSD probe sets containing RNA bases:

| | | |
|---|---|---|
| PT0093 | /56- | N6-F4 one RNA base |
| | FAM/GTGCGCATTGGCATGGAArGTCACACCTTC | |
| | GGGAAC/3InvdT/ | |
| PT0096 | TGTGArCTTCCATGCCAATGCGCAC/3IABKFQ/ | N6-Q4 one RNA |
| | | base |
| PT0094 | /56- | N6-F4 two RNA base |
| | FAM/GTGCGCATTGGCATGGArArGTCACACCTTC | |
| | GGGAAC/3InvdT/ | |
| PT0097 | TGTGArCrUTCCATGCCAATGCGCAC/3IABKFQ/ | N6-Q4 two RNA |
| | | base |
| PT0095 | /56- | N6-F4 three RNA |
| | FAM/GTGCGCATTGGCATGGArArGrUCACACCTT | base |
| | CGGGAAC/3InvdT/ | |
| PT0098 | TGTGrArCrUTCCATGCCAATGCGCAC/3IABKFQ/ | N6-Q4 three RNA |
| | | base |

[0482] LAMP OSD preliminary LOD with beads is shown in FIG. 7.

[0483] Example 11. LAMP OSD reaction and readout on alpha device. Without bead workflow: 1e4 copies of synthetic viral RNA was spiked into LAMP OSD reaction master mix and transferred to the reaction chamber of a cartridge, and the results were read using the alpha device. (Performed at T=90 C setting). FIG. 8. With bead workflow: Bead extraction and binding of 1e4 copies of synthetic RNA was performed using 96-well plates and the reaction master mix and beads were transferred to the reaction chamber. (Performed at T=94 C setting). FIG. 9.

[0484] Example 12. Reaction optimization. LAMP OSD with probe set 111/112 was optimized for viral RNA detection speed by adding combinations of the following reagent quantities to the unoptimized buffer:

| KCl (mM) | Additional MgSO4 (mM) | GuHCl (mM) |
|---|---|---|
| 0 | 4 | 0 |
| 5 | 6 | 25 |
| 10 | 8 | |
| 20 | | |

[0485] Optimal speed was found with reaction buffer containing: 0 mM KCl, 6 mM additional MgSO4 (total 8 mM MgSO4) and 25 mM GuHCl. Relative fluorescence in LAMP OSD for reactions containing 6 mM additional MgSO4 is shown in FIG. 10.

[0486] Example 11. LAMP RNAase H: One-pot LAMP+RNase H reaction. RNase H selectively cleaves RNA within RNA/DNA heteroduplexes, and can be used to cleave dual-labeled fluorescent probes. Titration of RNase H was performed in the LAMP reaction with N6 primers to determine reaction conditions that would permit both RNase H activity and LAMP in a single reaction. LAMP was performed with N6 primers and amplification was detected with OSD probe 111/112 control. A previously described RNA-based molecular beacon (122) and its target DNA (124) (Wang et al, Microchim Acta 185, 375 (2018)) were spiked into the LAMP reaction to detect RNase H activity via cleavage of the molecular beacon when hybridized to the target. The reactions contained RNase H1 from Lucigen or RNase H2 from IDT. RNase H concentration is indicated as amount relative to the manufacturer's recommended amount. The reactions below were performed at 65 C, but optimal reaction temperature will likely vary based on the probe sequence RNA Molecular beacon with DNA target:

| | | |
|---|---|---|
| PT0122 | /56- | RNA MB from Wang et |
| | FAM/rCrCrUrArGrCrUrCrUrArArArUrCrArCrUrArUrGrGr | al |
| | UrCrGrCrGrCrUrArGrG/3IABKFQ/ | |
| PT0124 | CCTAGCGCGACCATAGTGATTTAGAGCTAGG | DNA trigger from Wang |
| | | et al |

[0487] Amplification can be achieved with small amounts of RNase H in the LAMP reaction. See FIG. 11. RNase H cleavage of MB 122 (resulting in increased fluorescence compared to 0×RNase H) can also be achieved in the same range of RNase H amounts within the LAMP reaction. See FIG. 12.

[0488] The patent and scientific literature referred to herein establishes the knowledge that is available to those with skill in the art. All United States patents and published or unpublished United States patent applications cited herein are incorporated by reference. All published foreign patents and patent applications cited herein are hereby incorporated by reference. All other published references, documents, manuscripts and scientific literature cited herein are hereby incorporated by reference.

[0489] While this invention has been particularly shown and described with references to preferred embodiments thereof, it will be understood by those skilled in the art that various changes in form and details may be made therein without departing from the scope of the invention encompassed by the appended claims.

### REFERENCES

[0490] Broughton, J. P., Deng, X., Yu, G., Fasching, C. L., Servellita, V., Singh, J., Miao, X., Streithorst, J. A., Granados, A., Sotomayor-Gonzalez, A., et al. (2020). CRISPR-Cas12-based detection of SARS-CoV-2. Nat. Biotechnol.
[0491] Ding, X., Yin, K., Li, Z., and Liu, C. (2020). All-in-One Dual CRISPR-Cas12a (AIOD-CRISPR) Assay: A Case for Rapid, Ultrasensitive and Visual Detection of Novel Coronavirus SARS-CoV-2 and HIV virus.
[0492] Gootenberg, J. S., Abudayyeh, O.O., Lee, J. W., Essletzbichler, P., Dy, A. J., Joung, J., Verdine, V., Donghia, N., Daringer, N. M., Freije, C. A., et al. (2017). Nucleic acid detection with CRISPR-Cas13a/C2c2. Science 356, 438-442.
[0493] Gootenberg, J. S., Abudayyeh, O.O., Kellner, M. J., Joung, J., Collins, J. J., and Zhang, F. (2018). Multiplexed and portable nucleic acid detection platform with Cas13, Cas12a, and Csm6. Science 360, 439-444.
[0494] Guo, L., Sun, X., Wang, X., Liang, C., Jiang, H., Gao, Q., Dai, M., Qu, B., Fang, S., Mao, Y., et al. (2020). SARS-CoV-2 detection with CRISPR diagnostics.
[0495] Lucia, C., Federico, P.-B., and Alejandra, G. C. (2020). An ultrasensitive, rapid, and portable coronavirus SARS-CoV-2 sequence detection method based on CRISPR-Cas12.
[0496] Shmakov, S., Abudayyeh, O.O., Makarova, K. S., Wolf, Y. I., Gootenberg, J. S., Semenova, E., Minakhin, L., Joung, J., Konermann, S., Severinov, K., et al. (2015). Discovery and Functional Characterization of Diverse Class 2 CRISPR-Cas Systems. Mol. Cell 60, 385-397.
[0497] Teng, F., Cui, T., Feng, G., Guo, L., Xu, K., Gao, Q., Li, T., Li, J., Zhou, Q., and Li, W. (2018). Repurposing CRISPR-Cas12b for mammalian genome engineering. Cell Discov 4, 63.
[0498] Whitman, J. D., Hiatt, J., Mowery, C. T., Shy, B. R., Yu, R., Yamamoto, T. N., Rathore, U., Goldgof, G. M., Whitty, C., Woo, J. M., et al. (2020). Test performance evaluation of SARS-CoV-2 serological assays. medRxiv 2020.04.25.20074856.
[0499] Zhang, Y., Odiwuor, N., Xiong, J., Sun, L., Nyaruaba, R. O., Wei, H., and Tanner, N. A. (2020). Rapid Molecular Detection of SARS-CoV-2 (COVID-19) Virus RNA Using Colorimetric LAMP. medRxiv 2020.02.26.20028373.

[0500] Various modifications and variations of the described methods, pharmaceutical compositions, and kits of the invention will be apparent to those skilled in the art without departing from the scope and spirit of the invention. Although the invention has been described in connection with specific embodiments, it will be understood that it is capable of further modifications and that the invention as claimed should not be unduly limited to such specific embodiments. Indeed, various modifications of the described modes for carrying out the invention that are obvious to those skilled in the art are intended to be within the scope of the invention. This application is intended to cover any variations, uses, or adaptations of the invention following, in general, the principles of the invention and including such departures from the present disclosure come within known customary practice within the art to which the invention pertains and may be applied to the essential features herein before set forth.

LENGTHY TABLES
The patent application contains a lengthy table section. A copy of the table is available in electronic form from the USPTO web site (https://seqdata.uspto.gov/?pageRequest=docDetail&DocID=US20240327933A1). An electronic copy of the table will also be available from the USPTO upon request and payment of the fee set forth in 37 CFR 1.19(b)(3).

1) A method of detecting a target nucleic acid in a sample comprising:
a) distributing a sample or set of samples into one or more individual discrete volumes each individual discrete volume comprising isothermal amplification reagents for amplifying a target polynucleotide, and a solution for rapidly isolating polynucleotides from a cell or virus particle;
b) incubating the sample or set of samples at conditions sufficient to allow extraction of target polynucleotides from the sample;
c) generating amplicons of target polynucleotides, wherein isolation of polynucleotides is not required between extraction or amplification step;
d) further incubating the sample with a probe that binds one or more single stranded regions of said amplicons, wherein said probe is:
i) a double stranded DNA probe with a fluorophore on one strand and a quencher on the other strand;
ii) a single stranded RNA probe with a fluorophore on one end of the strand and a quencher on the other end of the strand;
iii) a combination of an unlabeled double stranded DNA probe and a single stranded RNA probe with a fluorophore on one end of the strand and a quencher on the other end of the strand;
iv) a double stranded RNA probe with a fluorophore on one end of one strand and a quencher on the other end of the same strand; or
v) a double stranded RNA probe with a fluorophore on one end of one strand and a quencher on the other end of the other strand;
e) adding an enzyme capable of cleaving RNA in an RNA:DNA duplex to increase fluorescence to be detected; and
f) detecting the one or more amplicons, thereby indicating presence of one or more target polynucleotides in the sample.

2) The method of claim 1, wherein the enzyme capable of cleaving RNA is RNaseH.

3) The method of claim 1, wherein the fluorescence detected is greater than fluorescence detected by unwinding of the RNA:DNA duplex alone.

4) The method of claim 1, which does not include a washing step.

5) The method of claim 1, wherein the solution for isolating polynucleotides is protease-based, detergent-based, or chaotrope-based, optionally wherein the solution contains proteinase K.

6) (canceled)

7) The method of claim 5, wherein the reaction buffer contains a proteinase K inhibitor.

8) The method of claim 1, wherein the solution for isolating polynucleotides is Lucigen Quick Extract Plant DNA Extraction Solution.

9) The method of claim 1, wherein the amplicons are generated using loop-mediated isothermal amplification (LAMP), polymerase chain reaction (PCR), nucleic acid sequence-based amplification (NASBA), strand displacement amplification (SDA), helicase-dependent amplification (HAD), nicking enzyme amplification reaction (NEAR), transcription mediated amplification (TMA), recombinase polymerase amplification (RPA) or rolling circle amplification (RCA).

10) The method of claim 1, wherein the isothermal incubation temperature is between 55° C. and 75° C.

11) The method of claim 1, wherein the single stranded region is a LAMP amplicon loop, optionally wherein the single stranded region is an R-loop generated when a guide polynucleotide binds to one strand of the amplicon.

12) (canceled)

13) The method of claim 1L wherein a Cas molecule or an argonaute protein enables the guide polynucleotide to bind to a strand of the amplicon.

14) The method of claim 13, wherein the Cas molecule is Cas9, Cas12 or Cas14, optionally wherein the Cas molecule is Cas12(b).

15) (canceled)

16) The method of claim 14, wherein the enzyme is a nuclease or nickase.

17) (canceled)

18) (canceled)

19) (canceled)

20) (canceled)

21) (canceled)

22) (canceled)

23) The method of claim 1, wherein the target nucleic acid is from a virus, bacterium, protozoa, fungus, or other pathogenic organism, optionally wherein the target nucleic acid is from human papillomavirus, hepatitis, adenovirus, Candida, coronavirus, herpesvirus, human immunodeficiency virus, influenza virus, Plasmodium, rhinovirus, Neisseria gonorrhoeae, Respiratory syncytial virus, coronavirus, or Streptococcus pyogenes;
optionally wherein the coronavirus is a SARS-CoV2.

24) (canceled)

25) (canceled)

26) The method of claim 1, wherein an extraction-free solution is mixed with a sample at a concentration of about 1:2 to 2:1 sample:extraction solution, optionally wherein the sample is from a nasal swab or saliva.

27) (canceled)

28) The method of claim 1, wherein the incubating step is performed at a temperature of
about 20° C. to 60° C. for about 30 minutes;
about 55° C. to about 65° C. for 50 to 70 minutes;
about 59° C. to 61° C. for 50 to 70 minutes; or
about 60° C. for 50 to 70 minutes.

29) (canceled)

30) The method of claim 1, wherein the target polynucleotide is detected in one hour or less.

31) The method of claim 1, wherein the steps of incubating and detecting are all performed in the same individual discrete volume.

32) A composition for detecting the presence of a target polynucleotide in a sample, comprising reagents for amplifying the target polynucleotide, an extraction-free solution for isolating polynucleotides from a cell or virus particle, and one or more of the following probes:
a) a double stranded DNA probe with a fluorophore on one strand and a quencher on the other strand;
b) a single stranded RNA probe with a fluorophore on one end of the strand and a quencher on the other end of the strand;
c) a combination of an unlabeled double stranded DNA probe and a single stranded RNA probe with a fluorophore on one end of the strand and a quencher on the other end of the strand;
d) a double stranded RNA probe with a fluorophore on one end of one strand and a quencher on the other end of the same strand; or
e) a double stranded RNA probe with a fluorophore on one end of one strand and a quencher on the other end of the other strand.

33) The composition of claim 32, wherein the amplification reagents are LAMP reagents comprising F3, B3, FIP, BIP, Loop Forward and Loop Reverse primers.

34) The composition of claim 32, wherein the probes are selected from Table 9.

35) The composition of claim 32, wherein the probes are provided at a concentration of 50 nM to 175 nM, preferably 75 nM to 150_nM.

36) The composition of claim 33, wherein LAMP primers are selected from Table IA, Table 1B, Table 5 or Table 8.

37) The composition of claim 33, wherein the F3 primer is selected from Table 5 or Table 8.

38) The composition of claim 32, wherein the composition is lyophilized, optionally wherein the composition is lyophilized as a complete formulation:
optionally wherein the composition is lyophilized as an incomplete formulation and additional components are added later in resuspension buffer.

39) (canceled)

40) (canceled)

41) The composition of claim 3, comprising one of more of lactose, trehalose, sorbitol, glucose, raffinose, glycine or histidine.

42) The composition of claim 32, further comprising one or more additives, wherein the additive is guanidinium chloride (GuHCl), L-proline, L-histidine, b-alanine, L-serine, urea, acetamide, 4-aminobutyric acid, polyethylene glycol, polypropylene glycol, polyvinylpyrrolidone K, 6-O-a-D-maltosyl-b-cyclodextrin, (2-hydroxypropyl)-b-cyclodextrin, a-cyclodextrin, b-cyclodextrin, methyl-b-cyclodextrin, glycine, proline, taurine, or a combination thereof.

43) The composition of claim 32, further comprising polynucleotide binding beads for the capture of nucleic acids in a sample, optionally wherein the beads are carboxylated.

44) (canceled)

45) The composition of claim 43, wherein there is polyethylene glycol in binding solution, optionally wherein there is silica in the binding solution.

46) (canceled)

47) The composition of claim 32, further comprising one or more Cas proteins and at least one guide polynucleotide designed to form a complex with the one or more Cas proteins, optionally wherein the one or more Cas proteins is a Type II Cas, Type V Cas, Type VI Cas, or a combination thereof; optionally wherein the Cas is a Cas12b.

48) (canceled)

49) The composition of claim 47, wherein the one or more Cas proteins is thermostable exhibiting nuclease activity at temperature of at least 50° C.

50) (canceled)

51) The composition of claim 47, wherein the Cas12b is selected from Table 2A or Table 2B.

52) The composition of claim 49, wherein the thermostable Cas protein is Brevibacillus sp. SYSU G02855 (Br) Cas12b or Alicyclobacillus acidiphilus (Aap) Cas 12b, optionally wherein the Cas protein is Aap Cas12b and the guide is derived from Alicyclobacilus acidoterrestris.

53) (canceled)

54) The composition of claim 47, wherein the guide polynucleotide comprises a sequence selected from Aac guide types 1 to 5.

55) The composition of claim 51, wherein the Cas12b is BrCas12b and guide sequence comprises a crRNA design 1 to 3.

56) The composition of claim 47, wherein the guide polynucleotide comprises a spacer specific for N gene or S gene of SARS-CoV-2.

57) The composition of claim 32, further comprising one or more additives to increase reaction specificity or kinetics.

58) (canceled)

59) The method of claim 1, wherein the sample is subjected to in-sample multiplexing using intercalating dyes.

The application's sequence listing, which the Patent Office published only in electronic form, follows.

SEQUENCE LISTING (62000 sequences)

SEQ ID NO: 1 - DNA, 42 bp, Artificial Sequence
  Synthetic
acctgttccacaagtactacaacatacctgaagaggaggagc

SEQ ID NO: 2 - DNA, 47 bp, Artificial Sequence
  Synthetic
tgctgcagctgtttcatgatttactaactcatcatttaagtttggag

SEQ ID NO: 3 - DNA, 48 bp, Artificial Sequence
  Synthetic
gcagagtagcatcatctagaaaacctgtatctttcatgaataggcaaa

SEQ ID NO: 4 - DNA, 44 bp, Artificial Sequence
  Synthetic
tggcgagcataataatatagcacattgctaaaacagtggaagca

SEQ ID NO: 5 - DNA, 39 bp, Artificial Sequence
  Synthetic
ggtggggaaacggagtcgcgcactccactatttcctccc

SEQ ID NO: 6 - DNA, 39 bp, Artificial Sequence
  Synthetic
ataccccagcaccgaccaccaccagagaagctcccagaa

SEQ ID NO: 7 - DNA, 43 bp, Artificial Sequence
  Synthetic
tgagcctgattttgaaatgctacaatggggaagaggaagatgt

SEQ ID NO: 8 - DNA, 47 bp, Artificial Sequence
  Synthetic
ggacctcccaaagtctctaattctacctaatgtaaatgtgtttgtgg

SEQ ID NO: 9 - DNA, 38 bp, Artificial Sequence
  Synthetic
aatgcctcatctggagcagccgcctttacggatgacat

SEQ ID NO: 10 - DNA, 44 bp, Artificial Sequence
  Synthetic
gggttaacaatagtgtgtggcacaggctggagaaatagaaatgc

SEQ ID NO: 11 - DNA, 43 bp, Artificial Sequence
  Synthetic
ggatttcctgttaatccaatgcctatgtggaggttggaaggta

SEQ ID NO: 12 - DNA, 43 bp, Artificial Sequence
  Synthetic
ggccatttaccttatttactggtgaagcgggtattgatggtga

SEQ ID NO: 13 - DNA, 41 bp, Artificial Sequence
  Synthetic
ccagaatgcatattgtccccagaaatgtcctccagatgctg

SEQ ID NO: 14 - DNA, 46 bp, Artificial Sequence
  Synthetic
gtctgtaactaagtcctaaggatgccatggggtcaatatttttgcc

SEQ ID NO: 15 - DNA, 41 bp, Artificial Sequence
  Synthetic
aatgcctgcaataagcacgctgtattgttcaacaacagctg

SEQ ID NO: 16 - DNA, 49 bp, Artificial Sequence
  Synthetic
ggacaacaaagagaaagtccttcgaagacatttgctattagacttttgg

SEQ ID NO: 17 - DNA, 42 bp, Artificial Sequence
  Synthetic
actttcgttttagggcagctattgggaaattccctggcattg

SEQ ID NO: 18 - DNA, 50 bp, Artificial Sequence
  Synthetic
gcgccaagctttctaaagaaagattatgcattaccatttgataatgaagg

SEQ ID NO: 19 - DNA, 39 bp, Artificial Sequence
  Synthetic
gcgtgtcttggaggtcgaggaaccccagaagactccgtg

SEQ ID NO: 20 - DNA, 43 bp, Artificial Sequence
  Synthetic
ccaagtctagacagacctgttgtttgatttgtcccgtctccag

SEQ ID NO: 21 - DNA, 43 bp, Artificial Sequence
  Synthetic
ctccaggatttactctactaggagtggtctcgggattggtact

SEQ ID NO: 22 - DNA, 41 bp, Artificial Sequence
  Synthetic
acggttggatgtccactagcaggttgtaacaacacctgatc

SEQ ID NO: 23 - DNA, 43 bp, Artificial Sequence
  Synthetic
ctctggtgtgtaatgtctccaaagtgcacattttacaggtgac

SEQ ID NO: 24 - DNA, 40 bp, Artificial Sequence
  Synthetic
agcaaaatccagatcgggcgtgaccctgatgtaacaatga

SEQ ID NO: 25 - DNA, 46 bp, Artificial Sequence
  Synthetic
tcgcctatgacttggatgaagtatgtactcctctagaaccttatgc

SEQ ID NO: 26 - DNA, 44 bp, Artificial Sequence
  Synthetic
ccgaataggaaagtatgggtgaccttccatatacttccacgctg

SEQ ID NO: 27 - DNA, 42 bp, Artificial Sequence
  Synthetic
ggtctaaagatacgtcctggcgtaggagacacagaaaatccc

SEQ ID NO: 28 - DNA, 45 bp, Artificial Sequence
  Synthetic
ggtgttccaaagtacacatgtgataataggagctcaagacaatca

SEQ ID NO: 29 - DNA, 40 bp, Artificial Sequence
  Synthetic
ggtcctggaggctgtacgacacctcccctgcgaggaacca

SEQ ID NO: 30 - DNA, 40 bp, Artificial Sequence
  Synthetic
gactccgccaacgatctgccaccaaaagaaacaccgtccg

SEQ ID NO: 31 - DNA, 42 bp, Artificial Sequence
  Synthetic
gcgcctaggacagggatgtacccctcggtaaggtgatcgaca

SEQ ID NO: 32 - DNA, 42 bp, Artificial Sequence
  Synthetic
cactggttcccaacacctgctaaacagacaacgccatcctac

SEQ ID NO: 33 - DNA, 34 bp, Artificial Sequence
  Synthetic
ccattgacaaggccggcgcacgtcaccggccaca

SEQ ID NO: 34 - DNA, 42 bp, Artificial Sequence
  Synthetic
cctctcgggacagccactagaaatgactctttgcagacaggg

SEQ ID NO: 35 - DNA, 42 bp, Artificial Sequence
  Synthetic
gacgtatcttgcacggaggaccgctcatggatgaacacaacg

SEQ ID NO: 36 - DNA, 37 bp, Artificial Sequence
  Synthetic
ggggacatgtccaccctgtcttgcaattggacgcggg

SEQ ID NO: 37 - DNA, 40 bp, Artificial Sequence
  Synthetic
gccgcgttgaggtggatcaatgatgatgcttatggcccag

SEQ ID NO: 38 - DNA, 42 bp, Artificial Sequence
  Synthetic
cacgtttggagtgctgcttcacagcccttattctctggtggg

SEQ ID NO: 39 - DNA, 35 bp, Artificial Sequence
  Synthetic
aaatcccgtaggccgccggcgctggaccggcactt

SEQ ID NO: 40 - DNA, 38 bp, Artificial Sequence
  Synthetic
aacacctgcacctcgccggctacccttgtcgtgagcct

SEQ ID NO: 41 - DNA, 39 bp, Artificial Sequence
  Synthetic
acaagacaggccctcccgagtacagcgtccctactgtcc

SEQ ID NO: 42 - DNA, 42 bp, Artificial Sequence
  Synthetic
cggtgcgcacacttggatcaatgcttaatccatcagtcgcgg

SEQ ID NO: 43 - DNA, 39 bp, Artificial Sequence
  Synthetic
cccccttgatgtgttgcagggcttggcaacgatggggaa

SEQ ID NO: 44 - DNA, 41 bp, Artificial Sequence
  Synthetic
gcgagacagaatcttgcgggacgacttctccttggacccca

SEQ ID NO: 45 - DNA, 40 bp, Artificial Sequence
  Synthetic
aaacctctctgtcgggggcctactggcagtgttgttgtgg

SEQ ID NO: 46 - DNA, 41 bp, Artificial Sequence
  Synthetic
gggggctagtaactgaggcggactgccaggtaatccaactg

SEQ ID NO: 47 - DNA, 42 bp, Artificial Sequence
  Synthetic
cggcacaaacaactcccacaacctggcaaacctcttacctgc

SEQ ID NO: 48 - DNA, 41 bp, Artificial Sequence
  Synthetic
tccctggaaggctgggaagtactgcatggtcctatccgact

SEQ ID NO: 49 - DNA, 40 bp, Artificial Sequence
  Synthetic
acacgggcacttgaggtccttcgtcacaatgaccagcatt

SEQ ID NO: 50 - DNA, 37 bp, Artificial Sequence
  Synthetic
acaggaggggtctgcgcagcgagtacgcacctcccca

SEQ ID NO: 51 - DNA, 40 bp, Artificial Sequence
  Synthetic
tgggcgcaagagatctgacttcctgcccactcagccagat

SEQ ID NO: 52 - DNA, 42 bp, Artificial Sequence
  Synthetic
gctctcagtgcggatgtcttgtggcttctcatatgacacccg

SEQ ID NO: 53 - DNA, 35 bp, Artificial Sequence
  Synthetic
gtcatcgccgcagaccaggaaagcggctgcagcag

SEQ ID NO: 54 - DNA, 42 bp, Artificial Sequence
  Synthetic
cgcctgcaagtggagtgagttttgcggtctctacctcttcaa

SEQ ID NO: 55 - DNA, 48 bp, Artificial Sequence
  Synthetic
gctgattttcctcctgttattgctgatttctaaaaaatgttgctcctg

SEQ ID NO: 56 - DNA, 47 bp, Artificial Sequence
  Synthetic
agtctccagctgctttcatttgcttctagtttgaaaaaatcagaagg

SEQ ID NO: 57 - DNA, 42 bp, Artificial Sequence
  Synthetic
gtgtctattgtgtagcctgttcccaacattcccatacaccgg

SEQ ID NO: 58 - DNA, 44 bp, Artificial Sequence
  Synthetic
catggcattctgtgaccctgctttggatagaatggatgaagaac

SEQ ID NO: 59 - DNA, 44 bp, Artificial Sequence
  Synthetic
cgtttccacctacgggtaaacaaacttggctaaaaatatctgtg

SEQ ID NO: 60 - DNA, 43 bp, Artificial Sequence
  Synthetic
cccatcccattgttgatcatattgtgagtcgctggagtgaatg

SEQ ID NO: 61 - DNA, 47 bp, Artificial Sequence
  Synthetic
ttctggaatatgcaggtttctcaaaagagatggtctattagtagcag

SEQ ID NO: 62 - DNA, 47 bp, Artificial Sequence
  Synthetic
aaggttgcaacacttagcgtagaaaggaacagatctatactaaacac

SEQ ID NO: 63 - DNA, 40 bp, Artificial Sequence
  Synthetic
gcatatctggtcccccctcaccaaaagcataacaatggcc

SEQ ID NO: 64 - DNA, 45 bp, Artificial Sequence
  Synthetic
actgtatctcgggttttctttctccccagaatgtgataggcttct

SEQ ID NO: 65 - DNA, 41 bp, Artificial Sequence
  Synthetic
cgcttgtattgttgtacgatcctgtctggctgacacgtaaa

SEQ ID NO: 66 - DNA, 45 bp, Artificial Sequence
  Synthetic
atccctgaactacctcttttcgatgggacaccataaattttgaga

SEQ ID NO: 67 - DNA, 45 bp, Artificial Sequence
  Synthetic
tgccatcctccttctataaaaccagttccccagattgaatcaaga

SEQ ID NO: 68 - DNA, 43 bp, Artificial Sequence
  Synthetic
tttgtggtgtggtgtcattgtggcaaataaatcaattcagccg

SEQ ID NO: 69 - DNA, 47 bp, Artificial Sequence
  Synthetic
aacttgactttgctaagagccatttaaggagagacataagatgaaag

SEQ ID NO: 70 - DNA, 46 bp, Artificial Sequence
  Synthetic
tgggtagtaagcctttataacgtttggatagatctggtcttacagc

SEQ ID NO: 71 - DNA, 42 bp, Artificial Sequence
  Synthetic
cccattatgcctaggccagcagcatcattattgtctttgact

SEQ ID NO: 72 - DNA, 45 bp, Artificial Sequence
  Synthetic
aaccatggcatctcttataccatcacacattagtagtagcgagtg

SEQ ID NO: 73 - DNA, 48 bp, Artificial Sequence
  Synthetic
gtttgtttgttggtcttctgttggttgatttctgatcagttaccaatc

SEQ ID NO: 74 - DNA, 50 bp, Artificial Sequence
  Synthetic
tgggtgtggatatttgtttcactagccagcagatttacttataaaagaac

SEQ ID NO: 75 - DNA, 48 bp, Artificial Sequence
  Synthetic
cctgagtaagggatgatttttgcatacacacttgaaaatataacaacc

SEQ ID NO: 76 - DNA, 46 bp, Artificial Sequence
  Synthetic
ctgatgaacaatgacttgggatgattgtggttcaactaatcaaaca

SEQ ID NO: 77 - DNA, 40 bp, Artificial Sequence
  Synthetic
tgattgagagtgtcccaggtctccaaaaacaaggaccaac

SEQ ID NO: 78 - DNA, 43 bp, Artificial Sequence
  Synthetic
gcaaggtacaaagttgaacacttcaagcccaccacaaaacaac

SEQ ID NO: 79 - DNA, 43 bp, Artificial Sequence
  Synthetic
ttcccttttgacttgtgtgttctatcagaactacactgctcac

SEQ ID NO: 80 - DNA, 49 bp, Artificial Sequence
  Synthetic
gcatttgttttgaggattggcaaccaaatcaaccagaatcaaaatcaac

SEQ ID NO: 81 - DNA, 45 bp, Artificial Sequence
  Synthetic
actccatttgataagctgactacagctagaaggggaagtgaacaa

SEQ ID NO: 82 - DNA, 42 bp, Artificial Sequence
  Synthetic
actgatcctgcattgtcacagtaaagggtccaacatctgttt

SEQ ID NO: 83 - DNA, 42 bp, Artificial Sequence
  Synthetic
accactcagttgatccttgcttaactgctcctatactgcaag

SEQ ID NO: 84 - DNA, 39 bp, Artificial Sequence
  Synthetic
cactccaactacaccgagggaaataagtggagctgcaga

SEQ ID NO: 85 - DNA, 46 bp, Artificial Sequence
  Synthetic
ctgagttctctttctttgcctgtatcaaagttatcttaacaaccct

SEQ ID NO: 86 - DNA, 46 bp, Artificial Sequence
  Synthetic
tctgtagtggtatagtgttgtgcacaatagactggcagttactgag

SEQ ID NO: 87 - DNA, 46 bp, Artificial Sequence
  Synthetic
ggcgatgcaaatagttaacacttaacttagcataggaattcttggg

SEQ ID NO: 88 - DNA, 42 bp, Artificial Sequence
  Synthetic
ggaggctgcacgacactcatacatcactcccctgtgaggaac

SEQ ID NO: 89 - DNA, 39 bp, Artificial Sequence
  Synthetic
acgatctgaccgccacccgaccaaacgtaacaccaaccg

SEQ ID NO: 90 - DNA, 39 bp, Artificial Sequence
  Synthetic
tggcagcgcctccaagaggcatcgatacccttacgtgcg

SEQ ID NO: 91 - DNA, 35 bp, Artificial Sequence
  Synthetic
tcgaggcgttaccctcgcggccgatgccatcctgc

SEQ ID NO: 92 - DNA, 40 bp, Artificial Sequence
  Synthetic
ttgtgggatccggagcagcttgatgatgaactggtcccct

SEQ ID NO: 93 - DNA, 41 bp, Artificial Sequence
  Synthetic
tgggcaaaatcggtaaggcgtttcaactcttcaggctgtcc

SEQ ID NO: 94 - DNA, 42 bp, Artificial Sequence
  Synthetic
tccgcacactttggtgaatccatccttaacaacaccaggcca

SEQ ID NO: 95 - DNA, 38 bp, Artificial Sequence
  Synthetic
cggacctgtccctgtcttccaggcacaggctggaagcg

SEQ ID NO: 96 - DNA, 37 bp, Artificial Sequence
  Synthetic
acaagaccgtgcgtcccggcggctttggagaacctcg

SEQ ID NO: 97 - DNA, 40 bp, Artificial Sequence
  Synthetic
ggtccgaagatggccaggagttgtgtagtacacccgaccc

SEQ ID NO: 98 - DNA, 39 bp, Artificial Sequence
  Synthetic
cgggagaagacgactggttccaagactgggcgcacaacg

SEQ ID NO: 99 - DNA, 42 bp, Artificial Sequence
  Synthetic
cccgtggtagacagtccagcataactgctacccaaaccttcc

SEQ ID NO: 100 - DNA, 38 bp, Artificial Sequence
  Synthetic
aaagtccaccgctttagccactcacgccgtgggcctat

SEQ ID NO: 101 - DNA, 42 bp, Artificial Sequence
  Synthetic
aggaacttgccgtaggtggagtcctaatatcaggaccggggt

SEQ ID NO: 102 - DNA, 40 bp, Artificial Sequence
  Synthetic
cgagctcgtcgcacttcttctggtgatcaaggggggaaga

SEQ ID NO: 103 - DNA, 40 bp, Artificial Sequence
  Synthetic
ggacgagtcgaacatgccggagcaggactggcagggggaa

SEQ ID NO: 104 - DNA, 38 bp, Artificial Sequence
  Synthetic
gggtgttggcccatggaggccatcgtgggaccagatgt

SEQ ID NO: 105 - DNA, 41 bp, Artificial Sequence
  Synthetic
tgcttgaactgctcagcgagcgatggaagagtgctctcagc

SEQ ID NO: 106 - DNA, 39 bp, Artificial Sequence
  Synthetic
aaggcagtagcggcaccggtcaacatattgggggggtgg

SEQ ID NO: 107 - DNA, 37 bp, Artificial Sequence
  Synthetic
tgcatcgctctccggcacgctaatagccttcgcctcc

SEQ ID NO: 108 - DNA, 40 bp, Artificial Sequence
  Synthetic
gtcctaggaccgacgatcctcattatgcacactcgctgcc

SEQ ID NO: 109 - DNA, 40 bp, Artificial Sequence
  Synthetic
cgggtactcgtggagtcctactgcgcctacacaggtttgc

SEQ ID NO: 110 - DNA, 38 bp, Artificial Sequence
  Synthetic
agcggatcgaaggagtccagaacaggagatgggcggca

SEQ ID NO: 111 - DNA, 40 bp, Artificial Sequence
  Synthetic
gccggaagttgaggagctgccctatctactgccttggccg

SEQ ID NO: 112 - DNA, 40 bp, Artificial Sequence
  Synthetic
ctttggcaagcactgcgtgaagcaactcgttgctacgcca

SEQ ID NO: 113 - DNA, 41 bp, Artificial Sequence
  Synthetic
acacgatgagacgagctggctgaacgaggttttctgcgttc

SEQ ID NO: 114 - DNA, 42 bp, Artificial Sequence
  Synthetic
gcccccaacataaagcctctcaaccaatgttgtgacctggac

SEQ ID NO: 115 - DNA, 41 bp, Artificial Sequence
  Synthetic
ggggttgtagggtcacgggtaaacatcatgctcctccaacg

SEQ ID NO: 116 - DNA, 42 bp, Artificial Sequence
  Synthetic
tgcggccaccctattgatttcattcaaagactccatggcctc

SEQ ID NO: 117 - DNA, 43 bp, Artificial Sequence
  Synthetic
cccatattctttcattgccttttccactttgtgcgacaatgct

SEQ ID NO: 118 - DNA, 43 bp, Artificial Sequence
  Synthetic
ggagaaatttaggcttctcaactccgaacaatggcctggacag

SEQ ID NO: 119 - DNA, 43 bp, Artificial Sequence
  Synthetic
tgtctttggaattttctcctcgtttattacctcctggcttgga

SEQ ID NO: 120 - DNA, 44 bp, Artificial Sequence
  Synthetic
cttgcaatgtgctcaattggagttgacagattcaagttggattg

SEQ ID NO: 121 - DNA, 50 bp, Artificial Sequence
  Synthetic
tcggatcagtaagagagaattccatttataaaaggaagatcccatttgag

SEQ ID NO: 122 - DNA, 44 bp, Artificial Sequence
  Synthetic
gtctttttctttgacagaagactcggcccttttcaatcccttca

SEQ ID NO: 123 - DNA, 41 bp, Artificial Sequence
  Synthetic
gagggccttccactttctgctattgaggaattgtcaaggga

SEQ ID NO: 124 - DNA, 45 bp, Artificial Sequence
  Synthetic
ccaagcgaatctctgtagagttttactcatcggaggacttgaatg

SEQ ID NO: 125 - DNA, 43 bp, Artificial Sequence
  Synthetic
ggggttcagtagcagacattgcgaaaccggtacatataaaagc

SEQ ID NO: 126 - DNA, 41 bp, Artificial Sequence
  Synthetic
caggtcaaacggttctggttttaatgcatggaaatgtggct

SEQ ID NO: 127 - DNA, 43 bp, Artificial Sequence
  Synthetic
gcttccacaaaaaaccatccattaccatggcggataaccaagg

SEQ ID NO: 128 - DNA, 42 bp, Artificial Sequence
  Synthetic
ccgggggcttaggtccttttctggcagtccgtatgtaagtcc

SEQ ID NO: 129 - DNA, 42 bp, Artificial Sequence
  Synthetic
aggattgccatctaatgcattgctgctacaacacaatgctgg

SEQ ID NO: 130 - DNA, 40 bp, Artificial Sequence
  Synthetic
gtgttgctagggtctccattctgtcacgtttagcgctgaa

SEQ ID NO: 131 - DNA, 41 bp, Artificial Sequence
  Synthetic
gttcggtgctgtatactgtctttgcacaaggccattgaact

SEQ ID NO: 132 - DNA, 47 bp, Artificial Sequence
  Synthetic
ccacataatacactttgtgttctgcaggtgtgcagtaatatagatgc

SEQ ID NO: 133 - DNA, 44 bp, Artificial Sequence
  Synthetic
gggttaccctcatatacaggattgtcaggaccctgcctttttac

SEQ ID NO: 134 - DNA, 41 bp, Artificial Sequence
  Synthetic
aggacgtgcgggaacaaatgatacacctatacccacatcct

SEQ ID NO: 135 - DNA, 43 bp, Artificial Sequence
  Synthetic
gaggtagctacatcaaggggtaggctatggattttaaaaccct

SEQ ID NO: 136 - DNA, 44 bp, Artificial Sequence
  Synthetic
cccgttgtaaccagtatggcttataactcctagtggctctatgg

SEQ ID NO: 137 - DNA, 48 bp, Artificial Sequence
  Synthetic
gggttataccaaagttccagtcctcagatgttatggcctatattcatg

SEQ ID NO: 138 - DNA, 35 bp, Artificial Sequence
  Synthetic
tcaggaggcaccacaggcgccgccgccttacctga

SEQ ID NO: 139 - DNA, 39 bp, Artificial Sequence
  Synthetic
acgagcccccaactgtgtactacaactctgctggctcgg

SEQ ID NO: 140 - DNA, 40 bp, Artificial Sequence
  Synthetic
ctgggcttgggtttggatgagtccctcctagccagcctac

SEQ ID NO: 141 - DNA, 39 bp, Artificial Sequence
  Synthetic
tggcagtggggtcaaactgcggaagcccccagtttatgc

SEQ ID NO: 142 - DNA, 40 bp, Artificial Sequence
  Synthetic
gtctttggcactccctggcaaaggcgagaataccagcaac

SEQ ID NO: 143 - DNA, 38 bp, Artificial Sequence
  Synthetic
ggctgatttggggggggtttcctggacccccaaagaca

SEQ ID NO: 144 - DNA, 42 bp, Artificial Sequence
  Synthetic
ggcaagattacaggcggcctttggtcgtgatgccttacaaca

SEQ ID NO: 145 - DNA, 39 bp, Artificial Sequence
  Synthetic
tcgccaggttccattggctttggaggcaggccatatcga

SEQ ID NO: 146 - DNA, 40 bp, Artificial Sequence
  Synthetic
gcatttcgaacagggtgggactccggcactagatacgcct

SEQ ID NO: 147 - DNA, 40 bp, Artificial Sequence
  Synthetic
gctggcgtaaggtaggagttccctgggcgctacctgaact

SEQ ID NO: 148 - DNA, 39 bp, Artificial Sequence
  Synthetic
tggggtaggggggcatgtagccactgtggtgttccagtc

SEQ ID NO: 149 - DNA, 40 bp, Artificial Sequence
  Synthetic
gcgaacgtggtgcaaatagacgaaggcaggtcctctcagg

SEQ ID NO: 150 - DNA, 46 bp, Artificial Sequence
  Synthetic
acacatattgaggaagtcttgggaataggcaagcctagctacataa

SEQ ID NO: 151 - DNA, 40 bp, Artificial Sequence
  Synthetic
gcgcttaccgggatgagagcatggaaaggaccacaggagg

SEQ ID NO: 152 - DNA, 42 bp, Artificial Sequence
  Synthetic
gggcaggattgcagggtttagacatcctcggtgattacagcc

SEQ ID NO: 153 - DNA, 41 bp, Artificial Sequence
  Synthetic
taggggcaggtccatgattgctcttattcagacccttgttc

SEQ ID NO: 154 - DNA, 39 bp, Artificial Sequence
  Synthetic
gcgggatcctagcgtgggacataactccctcatcctgcc

SEQ ID NO: 155 - DNA, 40 bp, Artificial Sequence
  Synthetic
ggctggaggcgatgtggttgaaaccctgagtcatccctgt

SEQ ID NO: 156 - DNA, 37 bp, Artificial Sequence
  Synthetic
agagcgggagaaagaggaggaatgcgccgtgccttct

SEQ ID NO: 157 - DNA, 40 bp, Artificial Sequence
  Synthetic
tttgcctgttccatgcccggccaaggataatagcccgtcc

SEQ ID NO: 158 - DNA, 42 bp, Artificial Sequence
  Synthetic
ggaggggagtcgagggataagggagcatcagatcacctggga

SEQ ID NO: 159 - DNA, 43 bp, Artificial Sequence
  Synthetic
tgtagtactaaagatggctggcctttggacatttaccgatggc

SEQ ID NO: 160 - DNA, 39 bp, Artificial Sequence
  Synthetic
acgtcagggcctagcctgagtaaggctctgacgtctccc

SEQ ID NO: 161 - DNA, 41 bp, Artificial Sequence
  Synthetic
ggatggcggcctcaggtaaggataaaagcgtggggacagtt

SEQ ID NO: 162 - DNA, 40 bp, Artificial Sequence
  Synthetic
gccatatggtccactgtggttaatctgatgtcgcagtctc

SEQ ID NO: 163 - DNA, 44 bp, Artificial Sequence
  Synthetic
ttgtcattggtccatttctattccaggtcagatcgagtaatggt

SEQ ID NO: 164 - DNA, 46 bp, Artificial Sequence
  Synthetic
aggagaaattttgcaatcttggagtggatactaacgtcggaatcac

SEQ ID NO: 165 - DNA, 45 bp, Artificial Sequence
  Synthetic
ctagtggatctgctgatactgctcaaagtctaattattgcagcca

SEQ ID NO: 166 - DNA, 44 bp, Artificial Sequence
  Synthetic
gcacccttattttcaatgtttggagagcgggtcatcaatcaaga

SEQ ID NO: 167 - DNA, 47 bp, Artificial Sequence
  Synthetic
gcacttttgcatctttctgaaaatggacctgaatttcgttaataggg

SEQ ID NO: 168 - DNA, 41 bp, Artificial Sequence
  Synthetic
gtttcactgacctcctcaggagttgaccggtttttgagagt

SEQ ID NO: 169 - DNA, 46 bp, Artificial Sequence
  Synthetic
ccctcatttgttggaatagagtccttctttagttcctaaggccatt

SEQ ID NO: 170 - DNA, 40 bp, Artificial Sequence
  Synthetic
tccggatgtgccttcatctgaacaattctcggaaaggatg

SEQ ID NO: 171 - DNA, 40 bp, Artificial Sequence
  Synthetic
caaagagggcctgccactttcttgaggaaatgtcaaggga

SEQ ID NO: 172 - DNA, 41 bp, Artificial Sequence
  Synthetic
tccattcaagtcctccgatgagcttccaggacatactgctg

SEQ ID NO: 173 - DNA, 40 bp, Artificial Sequence
  Synthetic
tccatggctgtatggaggatctccagcgcaaaatgccata

SEQ ID NO: 174 - DNA, 47 bp, Artificial Sequence
  Synthetic
acttccattgtttcaaggcatgaattatggctttccttgaagaatcc

SEQ ID NO: 175 - DNA, 46 bp, Artificial Sequence
  Synthetic
agcctctcttattcagtctttgtttaaggagagtaagagacaacat

SEQ ID NO: 176 - DNA, 41 bp, Artificial Sequence
  Synthetic
tctcacaacatttgccagtttgggcgaaaagcttgaacagt

SEQ ID NO: 177 - DNA, 46 bp, Artificial Sequence
  Synthetic
gctggtatttgtgttcgaatcttcatgttctcaaacaaaatggcaa

SEQ ID NO: 178 - DNA, 45 bp, Artificial Sequence
  Synthetic
agcaaaatcgtcggatgattggcaaaagaaatacaccaagacaat

SEQ ID NO: 179 - DNA, 46 bp, Artificial Sequence
  Synthetic
ccaaggtcattgtttatcatgttgttctggagtaaatgaatcagct

SEQ ID NO: 180 - DNA, 39 bp, Artificial Sequence
  Synthetic
cgccaacagtaaggtgacgacagctggtgcatgtgggga

SEQ ID NO: 181 - DNA, 40 bp, Artificial Sequence
  Synthetic
gcctcgagcttgggcttctccttttactcggaggccacgg

SEQ ID NO: 182 - DNA, 42 bp, Artificial Sequence
  Synthetic
agtttcggggattgtgaaccgtcagatcacacgctctttcct

SEQ ID NO: 183 - DNA, 38 bp, Artificial Sequence
  Synthetic
agcagcgtggcggcgaaagtagacggggtagggagatc

SEQ ID NO: 184 - DNA, 39 bp, Artificial Sequence
  Synthetic
gcagtaccactaccgccacccaacggataacgcggtggc

SEQ ID NO: 185 - DNA, 43 bp, Artificial Sequence
  Synthetic
aatgttgcgttgttggagagtatcaactcttactgctctctcc

SEQ ID NO: 186 - DNA, 40 bp, Artificial Sequence
  Synthetic
caagaagcgaccgcagtgggtcataaagctgttgaccggc

SEQ ID NO: 187 - DNA, 40 bp, Artificial Sequence
  Synthetic
gcgtgctgcatagcttggcgtacgggagatacaaggagcg

SEQ ID NO: 188 - DNA, 38 bp, Artificial Sequence
  Synthetic
cggtgctttctgcagtgtgtgggcagccggcagaggat

SEQ ID NO: 189 - DNA, 38 bp, Artificial Sequence
  Synthetic
cgaaacgagaggctcagccgctgttacatcgccggcgg

SEQ ID NO: 190 - DNA, 36 bp, Artificial Sequence
  Synthetic
tccacaggtaccgcgtctgtcactcggaccgctcct

SEQ ID NO: 191 - DNA, 34 bp, Artificial Sequence
  Synthetic
ccggcggctgcagttgttgcgaactgtgcgtgcc

SEQ ID NO: 192 - DNA, 40 bp, Artificial Sequence
  Synthetic
cgcctcgttttcctcttcggtgcctgctgtgctactggtg

SEQ ID NO: 193 - DNA, 40 bp, Artificial Sequence
  Synthetic
gcgcctctctcatggatccactggtgagctggggaacagg

SEQ ID NO: 194 - DNA, 39 bp, Artificial Sequence
  Synthetic
tgacgtacccgccgggaacttccacgctgttttcgaaac

SEQ ID NO: 195 - DNA, 36 bp, Artificial Sequence
  Synthetic
tggagtttgcgcgcgtcgcaggtagcgcatgcagtg

SEQ ID NO: 196 - DNA, 37 bp, Artificial Sequence
  Synthetic
accccgtgcaacgtcgagatgcgcttcagatcgtgga

SEQ ID NO: 197 - DNA, 39 bp, Artificial Sequence
  Synthetic
gcagctatgctcgatgaccgagggctccagaaacaggca

SEQ ID NO: 198 - DNA, 36 bp, Artificial Sequence
  Synthetic
gccgtcaacagcgtgccttttggatgggctccgggt

SEQ ID NO: 199 - DNA, 40 bp, Artificial Sequence
  Synthetic
gccgacttggaggactttgccaactcctgctgctcactgt

SEQ ID NO: 200 - DNA, 37 bp, Artificial Sequence
  Synthetic
gccgtagttgtcgcggtcccaggacgtggtgacctcg

SEQ ID NO: 201 - DNA, 37 bp, Artificial Sequence
  Synthetic
cgactgccgcatggtttcctctcaccaagggcgggct

SEQ ID NO: 202 - DNA, 39 bp, Artificial Sequence
  Synthetic
cgctcgtcagcaggtagaaggctcggacaagatcacggc

SEQ ID NO: 203 - DNA, 37 bp, Artificial Sequence
  Synthetic
cccttgaacatcccgcagcacctgcggggaaacgaga

SEQ ID NO: 204 - DNA, 36 bp, Artificial Sequence
  Synthetic
gcgcggtcattctggccaatctggccgatggctgtg

SEQ ID NO: 205 - DNA, 33 bp, Artificial Sequence
  Synthetic
gctcgcagtagtggcgcacgtgtgcgcgctctt

SEQ ID NO: 206 - DNA, 38 bp, Artificial Sequence
  Synthetic
agtgcgtatacggggctgggagggctgctccaactttg

SEQ ID NO: 207 - DNA, 36 bp, Artificial Sequence
  Synthetic
aagcagccgcgtcttaagcgattgcgggacctgcgc

SEQ ID NO: 208 - DNA, 37 bp, Artificial Sequence
  Synthetic
ctacgcacctgtggccgcagggtgcacagcgacagtg

SEQ ID NO: 209 - DNA, 35 bp, Artificial Sequence
  Synthetic
taccagcggcccatggtgccgccgcggtagagcat

SEQ ID NO: 210 - DNA, 38 bp, Artificial Sequence
  Synthetic
ccgcgcacttttgccaagtcgccgctcagattccagga

SEQ ID NO: 211 - DNA, 36 bp, Artificial Sequence
  Synthetic
tggcgcagttctggcacggccaccgggaacaaagcg

SEQ ID NO: 212 - DNA, 40 bp, Artificial Sequence
  Synthetic
agacgcgcgtactcggaaacactacatcaaagggtcggct

SEQ ID NO: 213 - DNA, 42 bp, Artificial Sequence
  Synthetic
ccagacctccagcaacaccgtcatcagcaacgtgttatcggc

SEQ ID NO: 214 - DNA, 35 bp, Artificial Sequence
  Synthetic
acggtttccacgccaccgcgcagtacgggggtcga

SEQ ID NO: 215 - DNA, 35 bp, Artificial Sequence
  Synthetic
ctgcgcgaagaactgggctgaactcgcgacccacg

SEQ ID NO: 216 - DNA, 36 bp, Artificial Sequence
  Synthetic
cgtggttggagcagcaccagggtgccgcctggaaca

SEQ ID NO: 217 - DNA, 36 bp, Artificial Sequence
  Synthetic
ttctggcggtgggtcccgacgaagcccacactgacg

SEQ ID NO: 218 - DNA, 36 bp, Artificial Sequence
  Synthetic
ggcgtccgaatggtgggtagcacgccgatgtgcagc

SEQ ID NO: 219 - DNA, 37 bp, Artificial Sequence
  Synthetic
acgcggccattttgtgtttggcgggctctcgtcctgt

SEQ ID NO: 220 - DNA, 40 bp, Artificial Sequence
  Synthetic
tgtcaaccgtcgcatcacgcccagcccagcttttgtatga

SEQ ID NO: 221 - DNA, 39 bp, Artificial Sequence
  Synthetic
cgttgtggtagaacggcaaccggcttcctgcgacaccag

SEQ ID NO: 222 - DNA, 39 bp, Artificial Sequence
  Synthetic
cgcagattctcggccaacagctacccaccacgcgtttcg

SEQ ID NO: 223 - DNA, 38 bp, Artificial Sequence
  Synthetic
gcacccaggacctccggtacccgacaccgatcacgaag

SEQ ID NO: 224 - DNA, 38 bp, Artificial Sequence
  Synthetic
ccgcagaaagtcgaagatgcccggcaccaccgagacgt

SEQ ID NO: 225 - DNA, 40 bp, Artificial Sequence
  Synthetic
gtgagcaccatcagcacctgatcggaatgtcacaacgccg

SEQ ID NO: 226 - DNA, 41 bp, Artificial Sequence
  Synthetic
ggctgcagcgctttcagaattgacattcacgacctagacgc

SEQ ID NO: 227 - DNA, 37 bp, Artificial Sequence
  Synthetic
ttcgggtagctgcaggccgggccttggtacaggagca

SEQ ID NO: 228 - DNA, 39 bp, Artificial Sequence
  Synthetic
cggttgggcgcgttgatctagcgcaccaaccactggagg

SEQ ID NO: 229 - DNA, 36 bp, Artificial Sequence
  Synthetic
cagtccgccgctcattttgtgtgagcacggcgcaga

SEQ ID NO: 230 - DNA, 38 bp, Artificial Sequence
  Synthetic
tgatgcgggtgcgtagggtgctggcttttctggaggaa

SEQ ID NO: 231 - DNA, 35 bp, Artificial Sequence
  Synthetic
gaaagcgaagacggcgcccacgtggcaggcggtct

SEQ ID NO: 232 - DNA, 41 bp, Artificial Sequence
  Synthetic
gtcatggccaatcgtcgtctccagcctggtggaactcatca

SEQ ID NO: 233 - DNA, 38 bp, Artificial Sequence
  Synthetic
ggacccgaaaacgagggcgggctttcttggcgtacagc

SEQ ID NO: 234 - DNA, 38 bp, Artificial Sequence
  Synthetic
cgtgcaggatgacgtggattcttccgcgtcctcgtcga

SEQ ID NO: 235 - DNA, 37 bp, Artificial Sequence
  Synthetic
ggtgagagtagtggtggggctgtccacgccgcctcat

SEQ ID NO: 236 - DNA, 36 bp, Artificial Sequence
  Synthetic
gagaggaggagagccggcatagttgcacacggccga

SEQ ID NO: 237 - DNA, 35 bp, Artificial Sequence
  Synthetic
cggcgtcggcgtttccaactggcgccctggtacga

SEQ ID NO: 238 - DNA, 36 bp, Artificial Sequence
  Synthetic
catctctaccgccgccgtgcaagggcggcgacatct

SEQ ID NO: 239 - DNA, 39 bp, Artificial Sequence
  Synthetic
tgcgacgaacacgaagctctccgggtgacgttgtggatg

SEQ ID NO: 240 - DNA, 36 bp, Artificial Sequence
  Synthetic
caccgacacagcagcaccaggtccgtcgccgctgtt

SEQ ID NO: 241 - DNA, 41 bp, Artificial Sequence
  Synthetic
gcgtccgacgatgtgctcttctaacttgtccatcagcgacg

SEQ ID NO: 242 - DNA, 38 bp, Artificial Sequence
  Synthetic
cgtcttttcggcgctcaacaagaggcgcacctccgaaa

SEQ ID NO: 243 - DNA, 35 bp, Artificial Sequence
  Synthetic
acgcccgccagaagtacgctcggtaggcacgcgat

SEQ ID NO: 244 - DNA, 39 bp, Artificial Sequence
  Synthetic
tctgttggcggggctcacgcgtcgtaacaaagcacaggc

SEQ ID NO: 245 - DNA, 37 bp, Artificial Sequence
  Synthetic
agaggctacccgaccgtagcacaaccgcaacgatccc

SEQ ID NO: 246 - DNA, 38 bp, Artificial Sequence
  Synthetic
gacggtcgtggtctcctcggctggaggggtccggaaca

SEQ ID NO: 247 - DNA, 39 bp, Artificial Sequence
  Synthetic
acagtacgacggcaacccaacgtcttcttgcggtaccgg

SEQ ID NO: 248 - DNA, 40 bp, Artificial Sequence
  Synthetic
catcctgctgtcacacgacgaactgttgacggatgtgcaa

SEQ ID NO: 249 - DNA, 37 bp, Artificial Sequence
  Synthetic
aagcgcgtgcccacccaagtcgtcgtcatcgaaaggc

SEQ ID NO: 250 - DNA, 39 bp, Artificial Sequence
  Synthetic
acctggcatcgcagcctctttccgagaaacggctgtcgg

SEQ ID NO: 251 - DNA, 35 bp, Artificial Sequence
  Synthetic
tggcttacgacgctgacgcggcggcccagaaaacc

SEQ ID NO: 252 - DNA, 42 bp, Artificial Sequence
  Synthetic
ggtcgaacctcataacggtgggcacgcgtcctatgatgagtt

SEQ ID NO: 253 - DNA, 40 bp, Artificial Sequence
  Synthetic
cttgcgcttaccgatccgcttagattcgacggggaacgct

SEQ ID NO: 254 - DNA, 36 bp, Artificial Sequence
  Synthetic
gctcactcaacaccgccgtgacacgcgctttgggag

SEQ ID NO: 255 - DNA, 40 bp, Artificial Sequence
  Synthetic
acgtgacgatcaaaagtgcccgacgctactacatgcccct

SEQ ID NO: 256 - DNA, 36 bp, Artificial Sequence
  Synthetic
acgatgatggcccgcgacggaatttgcccgtgcgga

SEQ ID NO: 257 - DNA, 39 bp, Artificial Sequence
  Synthetic
gcaaccagtgctccactacgtcacgaccagtctccggac

SEQ ID NO: 258 - DNA, 35 bp, Artificial Sequence
  Synthetic
acatggacgccgcctctgcccgttcttcccgcgga

SEQ ID NO: 259 - DNA, 38 bp, Artificial Sequence
  Synthetic
atgcaaagacggcgcgggacgtggatccccattatccc

SEQ ID NO: 260 - DNA, 35 bp, Artificial Sequence
  Synthetic
tgttgtgtccgccgctgctggtcaccgtggtcagt

SEQ ID NO: 261 - DNA, 36 bp, Artificial Sequence
  Synthetic
cccgggcactgatcctgaccagcgtgagagccccgt

SEQ ID NO: 262 - DNA, 39 bp, Artificial Sequence
  Synthetic
cacgctgaccggcgatcaggcggaaaaagtggatgcggc

SEQ ID NO: 263 - DNA, 34 bp, Artificial Sequence
  Synthetic
ttggcccacgacgcctgacgcagcgcaaaggcca

SEQ ID NO: 264 - DNA, 40 bp, Artificial Sequence
  Synthetic
gcgactcctggacctgcgtaaaaacagcagagaaccgagg

SEQ ID NO: 265 - DNA, 37 bp, Artificial Sequence
  Synthetic
agatgtggcaggcgcgtctactggttctgctgacgcg

SEQ ID NO: 266 - DNA, 38 bp, Artificial Sequence
  Synthetic
acaaccccacgggccgaagagcgcgtacacatagatcg

SEQ ID NO: 267 - DNA, 34 bp, Artificial Sequence
  Synthetic
tctcggtgctgggcgcttggacgccagtcgcatg

SEQ ID NO: 268 - DNA, 39 bp, Artificial Sequence
  Synthetic
agggactggaggtgcgcgtagatacgtaacgtgtgcgag

SEQ ID NO: 269 - DNA, 37 bp, Artificial Sequence
  Synthetic
cgctgtgctggcatcgagttacggctggtgagtccac

SEQ ID NO: 270 - DNA, 40 bp, Artificial Sequence
  Synthetic
ccatgacctacgtgcgcaagtttcctggcacttgacgagc

SEQ ID NO: 271 - DNA, 40 bp, Artificial Sequence
  Synthetic
tcgctcgaccgttcgtacgaaagtaatggtctgcagctgc

SEQ ID NO: 272 - DNA, 40 bp, Artificial Sequence
  Synthetic
gcggtctccacgtcaggtacgaatcgagtcttcgggggtg

SEQ ID NO: 273 - DNA, 36 bp, Artificial Sequence
  Synthetic
aacgcgctgcacgaccacttccatgttacgcggcag

SEQ ID NO: 274 - DNA, 36 bp, Artificial Sequence
  Synthetic
cggaacccgccatgcaacgagcaccgcccatgggtt

SEQ ID NO: 275 - DNA, 38 bp, Artificial Sequence
  Synthetic
cgctcgagctcctgcctaaagtccggcgctggtcttga

SEQ ID NO: 276 - DNA, 40 bp, Artificial Sequence
  Synthetic
tcccagtaacagacgacccagtgcctgtccgatacacgtg

SEQ ID NO: 277 - DNA, 41 bp, Artificial Sequence
  Synthetic
gccacgtggttttcgagaacgtgacgttgttgttgcggatc

SEQ ID NO: 278 - DNA, 37 bp, Artificial Sequence
  Synthetic
gggagcgcggtggaagacaaccgtcagaatcgacggt

SEQ ID NO: 279 - DNA, 35 bp, Artificial Sequence
  Synthetic
tctcccccgattccagcgtgtcaacggcggtcgga

SEQ ID NO: 280 - DNA, 37 bp, Artificial Sequence
  Synthetic
cgctcatccgcgtgctctgaagggctgttcgatgtgg

SEQ ID NO: 281 - DNA, 37 bp, Artificial Sequence
  Synthetic
cacggcgtgtccttgctacccacctgcgagttgaggc

SEQ ID NO: 282 - DNA, 37 bp, Artificial Sequence
  Synthetic
ttcacgtccgggtggctgccgtgttcgagcacctgac

SEQ ID NO: 283 - DNA, 42 bp, Artificial Sequence
  Synthetic
ggcgctgatgatgttgacgtcgcgtagccacctgttggaacc

SEQ ID NO: 284 - DNA, 38 bp, Artificial Sequence
  Synthetic
agatgatgcaccccgaactcgccgcagaaggccatgag

SEQ ID NO: 285 - DNA, 35 bp, Artificial Sequence
  Synthetic
gcctaacctccgctcgcactggcggccgaatctcc

SEQ ID NO: 286 - DNA, 41 bp, Artificial Sequence
  Synthetic
gcggaggaagattcgtctgagccgtcttcgtcgtccctagt

SEQ ID NO: 287 - DNA, 36 bp, Artificial Sequence
  Synthetic
ggccgacgctggttctcctcgtgatgcgtgacggag

SEQ ID NO: 288 - DNA, 39 bp, Artificial Sequence
  Synthetic
ggtcgcagatgagcagcttctgcgcgaatgttaccaccc

SEQ ID NO: 289 - DNA, 36 bp, Artificial Sequence
  Synthetic
ttctccaacgcgcggcaggcatgggtacggaggcgt

SEQ ID NO: 290 - DNA, 42 bp, Artificial Sequence
  Synthetic
cgtccaggttactcggggaacagcataatctgcgaggaggac

SEQ ID NO: 291 - DNA, 39 bp, Artificial Sequence
  Synthetic
tcgtcctccccttcgtccggtctctacgctcctacgaca

SEQ ID NO: 292 - DNA, 39 bp, Artificial Sequence
  Synthetic
accactagcttggctacgtggagcactgggcgtggaaac

SEQ ID NO: 293 - DNA, 40 bp, Artificial Sequence
  Synthetic
tcgtcgcgctccagcacatacctacgatttggccatgtcg

SEQ ID NO: 294 - DNA, 41 bp, Artificial Sequence
  Synthetic
cgcgctctcttgaacacgacaattggcgcaaactttttggc

SEQ ID NO: 295 - DNA, 37 bp, Artificial Sequence
  Synthetic
cggatctgcggctcaaacacccgcgaagtgcagcagg

SEQ ID NO: 296 - DNA, 37 bp, Artificial Sequence
  Synthetic
gactttacggtgcgcggcgatggaaaccagcagcccg

SEQ ID NO: 297 - DNA, 40 bp, Artificial Sequence
  Synthetic
tctgccgccaccaaaagatctgtggcggtcaccactttca

SEQ ID NO: 298 - DNA, 35 bp, Artificial Sequence
  Synthetic
tttccctaccgcgcgctggcgctccacaccaacag

SEQ ID NO: 299 - DNA, 36 bp, Artificial Sequence
  Synthetic
tccacgatgtcggcgatgactccagcgcctgcagat

SEQ ID NO: 300 - DNA, 41 bp, Artificial Sequence
  Synthetic
cccccagggcgttgtaaaagtccttatgctgcgctacatgc

SEQ ID NO: 301 - DNA, 36 bp, Artificial Sequence
  Synthetic
ggggatgtcgtgggtctcctccagagcgtgccggta

SEQ ID NO: 302 - DNA, 40 bp, Artificial Sequence
  Synthetic
gcgcttgagaaaaatgtcgcggggcgctgctttctttcga

SEQ ID NO: 303 - DNA, 36 bp, Artificial Sequence
  Synthetic
agccctcgagcgtgtacgtcggctccttcgtgggca

SEQ ID NO: 304 - DNA, 39 bp, Artificial Sequence
  Synthetic
tgcagactcttgccctgcgctttgtgctcgacgttaacg

SEQ ID NO: 305 - DNA, 39 bp, Artificial Sequence
  Synthetic
acagcctggatctcaccgtcagcctccggatcacatggt

SEQ ID NO: 306 - DNA, 36 bp, Artificial Sequence
  Synthetic
cgctggatgacggtgatgcgtgtacacggccggcga

SEQ ID NO: 307 - DNA, 40 bp, Artificial Sequence
  Synthetic
actgctgtggtgttgccttctggtaggagcgacgctgacg

SEQ ID NO: 308 - DNA, 42 bp, Artificial Sequence
  Synthetic
gccacgacaaacactaccgtcgtgaagtgacgttaggggagg

SEQ ID NO: 309 - DNA, 39 bp, Artificial Sequence
  Synthetic
tgcatccgtccggtggtgcccacatctggtatacacccg

SEQ ID NO: 310 - DNA, 39 bp, Artificial Sequence
  Synthetic
ttccgtgctggcgatcgcgtacttttcactcccgggtgc

SEQ ID NO: 311 - DNA, 41 bp, Artificial Sequence
  Synthetic
tctacccaccctgcgagacatcgcgtacaggagtcctaggt

SEQ ID NO: 312 - DNA, 36 bp, Artificial Sequence
  Synthetic
agtgtgccgcacaaggccgtgcaagcccattccccg

SEQ ID NO: 313 - DNA, 38 bp, Artificial Sequence
  Synthetic
cccctggtcttcaagcacacttacgcagcccagcctag

SEQ ID NO: 314 - DNA, 38 bp, Artificial Sequence
  Synthetic
gagatgccaacagtgttgctacaggaagcttacagggt

SEQ ID NO: 315 - DNA, 42 bp, Artificial Sequence
  Synthetic
cgtacttttccactccaggcgatatgtgcggtatgattttgc

SEQ ID NO: 316 - DNA, 41 bp, Artificial Sequence
  Synthetic
gttaggtcgctactcgctgggatgattccgtagacgccagg

SEQ ID NO: 317 - DNA, 40 bp, Artificial Sequence
  Synthetic
gagcaagttaccatcccctgcatgcgcgaatggaaaccat

SEQ ID NO: 318 - DNA, 39 bp, Artificial Sequence
  Synthetic
agggttgagggggccgttcggatctacgtcccagtctct

SEQ ID NO: 319 - DNA, 36 bp, Artificial Sequence
  Synthetic
aacgacgacgcggttgcccgacgtcgtacgagtcgc

SEQ ID NO: 320 - DNA, 38 bp, Artificial Sequence
  Synthetic
gccacaaaagccaccgcggcgagagattctccagcccg

SEQ ID NO: 321 - DNA, 38 bp, Artificial Sequence
  Synthetic
tgcgcgctgctggtgttttattgcaacagcttcgacgg

SEQ ID NO: 322 - DNA, 36 bp, Artificial Sequence
  Synthetic
acgaaggtccaagcggcgggcggatgctggtcgttg

SEQ ID NO: 323 - DNA, 38 bp, Artificial Sequence
  Synthetic
cgcgtgactctctgttcgatggcagctccaagcgccgt

SEQ ID NO: 324 - DNA, 38 bp, Artificial Sequence
  Synthetic
cccaacggtcacacgtccggaaagccgtcccggtcatt

SEQ ID NO: 325 - DNA, 35 bp, Artificial Sequence
  Synthetic
caacgcggcacttccaacagtgtggtgcacggcgt

SEQ ID NO: 326 - DNA, 35 bp, Artificial Sequence
  Synthetic
ttcgcacacccagcccctgggatcggtcgtcgcgt

SEQ ID NO: 327 - DNA, 35 bp, Artificial Sequence
  Synthetic
ccgacgtcccgcatccaactggcgtgcgaggaaga

SEQ ID NO: 328 - DNA, 38 bp, Artificial Sequence
  Synthetic
gaacacgcgcaacagggccgatgtcgggcgtccaccta

SEQ ID NO: 329 - DNA, 39 bp, Artificial Sequence
  Synthetic
tatcgtcgggtcggctgtccaaagcctggttggatctcg

SEQ ID NO: 330 - DNA, 39 bp, Artificial Sequence
  Synthetic
cctcgtcatcctccgtgtcggtagcctcctccaccacgg

SEQ ID NO: 331 - DNA, 40 bp, Artificial Sequence
  Synthetic
ggcccactttcgggtggaggcttgaagtacagcatgccca

SEQ ID NO: 332 - DNA, 41 bp, Artificial Sequence
  Synthetic
ggtgccgaaatcaccgtgtgaaaaaccgcgactttccacac

SEQ ID NO: 333 - DNA, 37 bp, Artificial Sequence
  Synthetic
atgtcgcgacacccgggtcgcccacccccattacacg

SEQ ID NO: 334 - DNA, 43 bp, Artificial Sequence
  Synthetic
agaacatatataatcgccgtttcgtacggatcaagaggtccat

SEQ ID NO: 335 - DNA, 35 bp, Artificial Sequence
  Synthetic
agcacggggtactcgtggcgctctcggggccgtat

SEQ ID NO: 336 - DNA, 42 bp, Artificial Sequence
  Synthetic
gaaggaaaccgaccccgaaactagcgttcataacaatcccgg

SEQ ID NO: 337 - DNA, 37 bp, Artificial Sequence
  Synthetic
ctcaacctgtgcgccacagcgttgcaggccacgaaca

SEQ ID NO: 338 - DNA, 39 bp, Artificial Sequence
  Synthetic
ccctcactgggctacgagtgcaccggtgtgcagctaagc

SEQ ID NO: 339 - DNA, 37 bp, Artificial Sequence
  Synthetic
tcatctacgtgccccccggggacccaagccagactgc

SEQ ID NO: 340 - DNA, 37 bp, Artificial Sequence
  Synthetic
tcagcgaaaccggcacccgggccggcgagtaatagca

SEQ ID NO: 341 - DNA, 35 bp, Artificial Sequence
  Synthetic
ggctgtcatgggtctgcgcagccgccgaaacacga

SEQ ID NO: 342 - DNA, 37 bp, Artificial Sequence
  Synthetic
atcgttcacgtcgccgccgccgaaagcgtcgtgagca

SEQ ID NO: 343 - DNA, 37 bp, Artificial Sequence
  Synthetic
acagcagccgcgcttgtctaggggactacctcctcga

SEQ ID NO: 344 - DNA, 39 bp, Artificial Sequence
  Synthetic
gcgtctacgtggtgatgctgcccaatcggcgtcgcttag

SEQ ID NO: 345 - DNA, 37 bp, Artificial Sequence
  Synthetic
aggcctggttacagcgcgggggacctgtttcagcgtg

SEQ ID NO: 346 - DNA, 40 bp, Artificial Sequence
  Synthetic
gcaaccccgccaactggttcgcgtaaatctgcgggatagc

SEQ ID NO: 347 - DNA, 36 bp, Artificial Sequence
  Synthetic
tgttcgacagcggcgtagactcgcctcgacagagcc

SEQ ID NO: 348 - DNA, 38 bp, Artificial Sequence
  Synthetic
ggtcatgacaccgacgcgttgaagttcacgtcgcgtcc

SEQ ID NO: 349 - DNA, 35 bp, Artificial Sequence
  Synthetic
gtcgctcggcattccgcactccggcatggtgctgc

SEQ ID NO: 350 - DNA, 38 bp, Artificial Sequence
  Synthetic
agttgtgccgccggagctataacgccatgggatcctca

SEQ ID NO: 351 - DNA, 39 bp, Artificial Sequence
  Synthetic
aaccagatggcgacggacgtcctgaacagaccgctaacc

SEQ ID NO: 352 - DNA, 39 bp, Artificial Sequence
  Synthetic
tgctaaccacgcaaccggatctgatgctgttgtcgtgca

SEQ ID NO: 353 - DNA, 36 bp, Artificial Sequence
  Synthetic
atcccggcaagttgcgcgccaccaccgcattaaccg

SEQ ID NO: 354 - DNA, 38 bp, Artificial Sequence
  Synthetic
cgcctgctctctccaggtccggaccttctgggaccagt

SEQ ID NO: 355 - DNA, 40 bp, Artificial Sequence
  Synthetic
gccttccagactgcacggccataggcagcgacgtgtatgg

SEQ ID NO: 356 - DNA, 36 bp, Artificial Sequence
  Synthetic
cagaaaacacccccccgcccggacgcccgacatcca

SEQ ID NO: 357 - DNA, 43 bp, Artificial Sequence
  Synthetic
tcttccccatattccttcattgtctctttgtgcgacagtgctt

SEQ ID NO: 358 - DNA, 44 bp, Artificial Sequence
  Synthetic
tgtagtcgtatagatccggaagaaatggacagtggtgaatagca

SEQ ID NO: 359 - DNA, 40 bp, Artificial Sequence
  Synthetic
ttcgcctctctcggactgactaagacaggaaatggcaagc

SEQ ID NO: 360 - DNA, 44 bp, Artificial Sequence
  Synthetic
tcctcaaagtccaatttttccggaaacaagccaattaatgtggg

SEQ ID NO: 361 - DNA, 40 bp, Artificial Sequence
  Synthetic
caatgtgctcaattggggcagattcgagctggatagaact

SEQ ID NO: 362 - DNA, 47 bp, Artificial Sequence
  Synthetic
ccatactcacaaagttcaccacgtgttcattataaaaggaaggtccc

SEQ ID NO: 363 - DNA, 44 bp, Artificial Sequence
  Synthetic
tctctttgatagaagactcagcctctgccttcttcaatctcttc

SEQ ID NO: 364 - DNA, 44 bp, Artificial Sequence
  Synthetic
cagatgccctgatctcagtagcgatcctatgaacagatggaaac

SEQ ID NO: 365 - DNA, 44 bp, Artificial Sequence
  Synthetic
cctctttgtcatacaggatcagctaggtccaatttacaggagaa

SEQ ID NO: 366 - DNA, 43 bp, Artificial Sequence
  Synthetic
ccattttcgcctctccagaaattcatggaactgattcggatga

SEQ ID NO: 367 - DNA, 43 bp, Artificial Sequence
  Synthetic
ttgaagcaatttgaacccctctattagagggacaagaatggtc

SEQ ID NO: 368 - DNA, 43 bp, Artificial Sequence
  Synthetic
gcatttcagttttcgcgcctaaagaaatgatgttttttgggcg

SEQ ID NO: 369 - DNA, 41 bp, Artificial Sequence
  Synthetic
tccaatatgtcgtcagcttcctgggcgccattatgagaact

SEQ ID NO: 370 - DNA, 41 bp, Artificial Sequence
  Synthetic
ccgaatcgctacagggaaagcccacaactgcaccctgaaga

SEQ ID NO: 371 - DNA, 38 bp, Artificial Sequence
  Synthetic
acatctacgcctcccagtcagaagtgcggttccagaag

SEQ ID NO: 372 - DNA, 42 bp, Artificial Sequence
  Synthetic
tactgcaagagctggcgaactcttagtaatggagttggaaac

SEQ ID NO: 373 - DNA, 42 bp, Artificial Sequence
  Synthetic
gcgccagcgagtaaatgcaaacacatgtcaatgcagctgtgg

SEQ ID NO: 374 - DNA, 44 bp, Artificial Sequence
  Synthetic
gcgcatgaagtaatggttactgtttgcttttgctaaattggcct

SEQ ID NO: 375 - DNA, 47 bp, Artificial Sequence
  Synthetic
aggcattttctgaagctgcattagtgtacttgctttaattgtagagg

SEQ ID NO: 376 - DNA, 45 bp, Artificial Sequence
  Synthetic
accccatttaaacacactctagaaagtaacttcagccactcaaac

SEQ ID NO: 377 - DNA, 42 bp, Artificial Sequence
  Synthetic
ggcgagggtccaatagttgcataggatctacagtggacggtc

SEQ ID NO: 378 - DNA, 43 bp, Artificial Sequence
  Synthetic
aggctcatctttacaaaatactggagtaagctcttgaccaccg

SEQ ID NO: 379 - DNA, 48 bp, Artificial Sequence
  Synthetic
tggttctccacaatatgaatccaagtgattgtattttgagattggcaa

SEQ ID NO: 380 - DNA, 42 bp, Artificial Sequence
  Synthetic
tgggaagtctcagttgttgcgtacagtttctggagcaggtgt

SEQ ID NO: 381 - DNA, 40 bp, Artificial Sequence
  Synthetic
cgcaacgaggaagtttgctggagcttcagcagttgcaagc

SEQ ID NO: 382 - DNA, 42 bp, Artificial Sequence
  Synthetic
ttaaatgccttcagtgtcctcacaagacaaagcctctgtagc

SEQ ID NO: 383 - DNA, 45 bp, Artificial Sequence
  Synthetic
tggtcagaattcctgtacgaggatccgtatacagatttaaggggt

SEQ ID NO: 384 - DNA, 40 bp, Artificial Sequence
  Synthetic
gtgtactcacccaaccagttgcttggtcttcatcgctttc

SEQ ID NO: 385 - DNA, 42 bp, Artificial Sequence
  Synthetic
ccaccattttccccacctggaattgcggcaatattgagttgc

SEQ ID NO: 386 - DNA, 38 bp, Artificial Sequence
  Synthetic
atgcatcggccctcacacacgcccgctcataggggtta

SEQ ID NO: 387 - DNA, 42 bp, Artificial Sequence
  Synthetic
ggttcttaccgtgcagatgcaaggtattcctccttatccttc

SEQ ID NO: 388 - DNA, 43 bp, Artificial Sequence
  Synthetic
ggacgtccctggaccctttaaaataatattttgccagctcttg

SEQ ID NO: 389 - DNA, 47 bp, Artificial Sequence
  Synthetic
actttctactgcttaaccccagaaatgtaagcggtttctataggtac

SEQ ID NO: 390 - DNA, 42 bp, Artificial Sequence
  Synthetic
acactgcgcacgcttttacaaaaagtagaaatctcgtcggcg

SEQ ID NO: 391 - DNA, 39 bp, Artificial Sequence
  Synthetic
ctggacatgcaggtcgagggtgcattgccactaccgttt

SEQ ID NO: 392 - DNA, 36 bp, Artificial Sequence
  Synthetic
ttcctccgggagctcgtccgacggttccacggtgca

SEQ ID NO: 393 - DNA, 45 bp, Artificial Sequence
  Synthetic
cactattgaacgtgcgggacatgttatcttggtaggcaatttctg

SEQ ID NO: 394 - DNA, 41 bp, Artificial Sequence
  Synthetic
cgtcgcggcgaaatgattgaaagtgggggttgtcttcttcg

SEQ ID NO: 395 - DNA, 38 bp, Artificial Sequence
  Synthetic
ttgctcagcttcctggtactcagtcacagtcacaaggt

SEQ ID NO: 396 - DNA, 40 bp, Artificial Sequence
  Synthetic
accgctttgtagatgtggatgacaagcactgcctgttgaa

SEQ ID NO: 397 - DNA, 39 bp, Artificial Sequence
  Synthetic
gctgccggcatcacatggatcttccaacatgaggcggtg

SEQ ID NO: 398 - DNA, 41 bp, Artificial Sequence
  Synthetic
ggatcctgccggtttcgaaccccgtggtttggtggaaaagt

SEQ ID NO: 399 - DNA, 39 bp, Artificial Sequence
  Synthetic
gcgaaacatgttctgacgaggcctcctgagcgtcaccca

SEQ ID NO: 400 - DNA, 42 bp, Artificial Sequence
  Synthetic
agcttctacaaagtcccaaagatggcacactaatagcgcgag

SEQ ID NO: 401 - DNA, 37 bp, Artificial Sequence
  Synthetic
cgcttggctgccaccgtaggacgggagcaggaacaga

SEQ ID NO: 402 - DNA, 42 bp, Artificial Sequence
  Synthetic
gctttgctatccaacaaagcatttcagtagtgccgtctcgta

SEQ ID NO: 403 - DNA, 43 bp, Artificial Sequence
  Synthetic
aaaagtaatcgggtccagactgatagccttgcgactaatggtt

SEQ ID NO: 404 - DNA, 44 bp, Artificial Sequence
  Synthetic
gcatttgtaaagtattccccgttcatcgagctttcattaatcgc

SEQ ID NO: 405 - DNA, 40 bp, Artificial Sequence
  Synthetic
ttttgcgtcgctgccaacgtgaatgggaggaaagacagcc

SEQ ID NO: 406 - DNA, 45 bp, Artificial Sequence
  Synthetic
ggcatgttggtatgtaagatggttttggcacgcaaactattaact

SEQ ID NO: 407 - DNA, 40 bp, Artificial Sequence
  Synthetic
ctaattgggtttcggggtccctgctggaaagtgacattgg

SEQ ID NO: 408 - DNA, 45 bp, Artificial Sequence
  Synthetic
agttgtaactgcgtcctttgggccttaaataaggctgctaggatt

SEQ ID NO: 409 - DNA, 40 bp, Artificial Sequence
  Synthetic
cgcactggatgttggctagaccgtaacaacacgggctggg

SEQ ID NO: 410 - DNA, 36 bp, Artificial Sequence
  Synthetic
gctgcccgcatcatagctcgcggccagagcgttggt

SEQ ID NO: 411 - DNA, 40 bp, Artificial Sequence
  Synthetic
aactcgacgccgtctgctgacaagcgcgatatcaagcatg

SEQ ID NO: 412 - DNA, 41 bp, Artificial Sequence
  Synthetic
cctctaacttttgccgcttaggttaaaagggaagccatgga

SEQ ID NO: 413 - DNA, 40 bp, Artificial Sequence
  Synthetic
tgatggacctcgtctacggctagggtaccgtgggacaact

SEQ ID NO: 414 - DNA, 38 bp, Artificial Sequence
  Synthetic
aacggatccgggcacagtttgcccgacgaggtaatggt

SEQ ID NO: 415 - DNA, 41 bp, Artificial Sequence
  Synthetic
gccatcttgaaagcgctggtgcctatgttagcgccagagga

SEQ ID NO: 416 - DNA, 40 bp, Artificial Sequence
  Synthetic
ccacgatccagtacccctcgaactttacgctggctgtggg

SEQ ID NO: 417 - DNA, 42 bp, Artificial Sequence
  Synthetic
tgtttgctgcattgttagctgagacaatccaaggatgacaac

SEQ ID NO: 418 - DNA, 40 bp, Artificial Sequence
  Synthetic
actgcggaattccacaaggacagttaatgctggatgcttt

SEQ ID NO: 419 - DNA, 47 bp, Artificial Sequence
  Synthetic
ggtagttttatgtttcctggagtgtgaagcttcttgtactcaaatgt

SEQ ID NO: 420 - DNA, 42 bp, Artificial Sequence
  Synthetic
agtgtgctctgaagaatcatgtttcccggttcctacacttac

SEQ ID NO: 421 - DNA, 41 bp, Artificial Sequence
  Synthetic
aggtgccgtctaaatagggaatgctgggttcagggtttgac

SEQ ID NO: 422 - DNA, 43 bp, Artificial Sequence
  Synthetic
agttgttatgttgaaactctacggtgagtaggcaagttgtgga

SEQ ID NO: 423 - DNA, 40 bp, Artificial Sequence
  Synthetic
gggtccacagcctagatctcgaccctcccagactgctgta

SEQ ID NO: 424 - DNA, 42 bp, Artificial Sequence
  Synthetic
gaacatacaacaaaacaggccgtaccctagaaaagtcaaccc

SEQ ID NO: 425 - DNA, 40 bp, Artificial Sequence
  Synthetic
gctccccccctaggcttgttatggttggtgggcagggata

SEQ ID NO: 426 - DNA, 39 bp, Artificial Sequence
  Synthetic
cttttatgctggccgactacccactggcataaggagacg

SEQ ID NO: 427 - DNA, 42 bp, Artificial Sequence
  Synthetic
ctgcgtgtgggagcataagtgtcaccatctccattccatgca

SEQ ID NO: 428 - DNA, 38 bp, Artificial Sequence
  Synthetic
gttgttgttcgcaatccggcgcttccatgcctttttcc

SEQ ID NO: 429 - DNA, 40 bp, Artificial Sequence
  Synthetic
tcctcggggggagtctcgtactactcataccccaagacgc

SEQ ID NO: 430 - DNA, 43 bp, Artificial Sequence
  Synthetic
gacaggataggggtattttgtgattagtttttgcagtgccaga

SEQ ID NO: 431 - DNA, 41 bp, Artificial Sequence
  Synthetic
gcctccgggtcttgcaagttttgagcgcagtgatgaatcag

SEQ ID NO: 432 - DNA, 40 bp, Artificial Sequence
  Synthetic
aagcattgctgccaaacaccctgcatttaccttttcctgt

SEQ ID NO: 433 - DNA, 43 bp, Artificial Sequence
  Synthetic
attgctgtcagactgcggtcactgaactattaagtgaaagtca

SEQ ID NO: 434 - DNA, 40 bp, Artificial Sequence
  Synthetic
ttgcggctttcggggacatgttccatcacctttgtgtgct

SEQ ID NO: 435 - DNA, 40 bp, Artificial Sequence
  Synthetic
catgagcagtagccccgacgtgggacaccattgaaaccag

SEQ ID NO: 436 - DNA, 40 bp, Artificial Sequence
  Synthetic
tcgtgttcttgacctcgactgaaaacgcatttttcccact

SEQ ID NO: 437 - DNA, 41 bp, Artificial Sequence
  Synthetic
gagagcggcttgttctagcagtccccacatgatttccaggg

SEQ ID NO: 438 - DNA, 43 bp, Artificial Sequence
  Synthetic
cgggaacaggacaaatgcaatagctattggtggaaaaagatca

SEQ ID NO: 439 - DNA, 42 bp, Artificial Sequence
  Synthetic
aaatgcttgcgtacagggtgatttcaacctattaacctggga

SEQ ID NO: 440 - DNA, 47 bp, Artificial Sequence
  Synthetic
agccagaaggtaaagaaaagagaaactaacttgtttctagtgcaaca

SEQ ID NO: 441 - DNA, 47 bp, Artificial Sequence
  Synthetic
ccgtagtaccatcgactgacattattgtcacattacaattaactgca

SEQ ID NO: 442 - DNA, 48 bp, Artificial Sequence
  Synthetic
gaaccgtcaccatactgtaagaaatttctaaaacagaacctcttatgc

SEQ ID NO: 443 - DNA, 49 bp, Artificial Sequence
  Synthetic
ttggatattcgggaagatcatcagtctcctctgtagtttctttacaact

SEQ ID NO: 444 - DNA, 45 bp, Artificial Sequence
  Synthetic
tgttctttgcctggtaaagattcataaaaggacttttttgcctgg

SEQ ID NO: 445 - DNA, 42 bp, Artificial Sequence
  Synthetic
gtttgcaagtctgtcaggtttgaccatggtctccgtgtactc

SEQ ID NO: 446 - DNA, 44 bp, Artificial Sequence
  Synthetic
aaggggctccaaaacattgatatcggaataaaacttaatgccca

SEQ ID NO: 447 - DNA, 42 bp, Artificial Sequence
  Synthetic
gggtaagagcgttgttgcgaactgtaaattctagcggtgccc

SEQ ID NO: 448 - DNA, 46 bp, Artificial Sequence
  Synthetic
gctcgcatcaaagggataattaacagggtcatgaaagtaaacgttg

SEQ ID NO: 449 - DNA, 50 bp, Artificial Sequence
  Synthetic
ggttgatgtgattaatcttccctgtcctaaatatccaaagtactactacc

SEQ ID NO: 450 - DNA, 45 bp, Artificial Sequence
  Synthetic
gcaatttgtgttttgtgtgtgtttaaatcagcctttctctacacc

SEQ ID NO: 451 - DNA, 43 bp, Artificial Sequence
  Synthetic
gatggacactgactgttgttactttgtcactcaagcggcattc

SEQ ID NO: 452 - DNA, 42 bp, Artificial Sequence
  Synthetic
gatgcttttgggacgctggtacaccttttgttaattaaggcg

SEQ ID NO: 453 - DNA, 46 bp, Artificial Sequence
  Synthetic
aaagctacgttgagtacttcggatgtaaagtcagactattacactc

SEQ ID NO: 454 - DNA, 45 bp, Artificial Sequence
  Synthetic
tgccacctgcgagatttacgcaaggtagaggcataaaaacttaat

SEQ ID NO: 455 - DNA, 46 bp, Artificial Sequence
  Synthetic
tgctggcttctgatttgtatgatttagatttacattaggctccaca

SEQ ID NO: 456 - DNA, 38 bp, Artificial Sequence
  Synthetic
aagcatgtttcagaggtcgcgttccgtaaagactccgg

SEQ ID NO: 457 - DNA, 44 bp, Artificial Sequence
  Synthetic
gcctaaacaagagggcgactcccatgtggaggtataacaaaatt

SEQ ID NO: 458 - DNA, 42 bp, Artificial Sequence
  Synthetic
cttctcgtaggcactttgcggaccggtacccttgtatacgct

SEQ ID NO: 459 - DNA, 42 bp, Artificial Sequence
  Synthetic
agggagacatcaaggctgggtttttctcaagacccgtccaag

SEQ ID NO: 460 - DNA, 40 bp, Artificial Sequence
  Synthetic
ccactgccaccaacaaacatccgccatggggagatctgga

SEQ ID NO: 461 - DNA, 42 bp, Artificial Sequence
  Synthetic
gtgcggtagctttaatggcctccattgctcctatcaaatcag

SEQ ID NO: 462 - DNA, 45 bp, Artificial Sequence
  Synthetic
tctttgttcttctgaagaaatgggagccttcaatcatcatgtcac

SEQ ID NO: 463 - DNA, 43 bp, Artificial Sequence
  Synthetic
gtgtgaaattcgcccatagggaatgaatgataacacaaatgcc

SEQ ID NO: 464 - DNA, 41 bp, Artificial Sequence
  Synthetic
gcaggtattgggtggctctggctaagccaaaacatacaaca

SEQ ID NO: 465 - DNA, 43 bp, Artificial Sequence
  Synthetic
cctatggttccatgtacacacaacggtgaaggaccatgttctc

SEQ ID NO: 466 - DNA, 45 bp, Artificial Sequence
  Synthetic
acttgtcaccaatccattccaagtggttgaaaaagtttactgagt

SEQ ID NO: 467 - DNA, 42 bp, Artificial Sequence
  Synthetic
ggtctcttccatctggattttgactggctacaaccaacagga

SEQ ID NO: 468 - DNA, 41 bp, Artificial Sequence
  Synthetic
ccccggagttgaatcatctccagtgtgtggagtacaatctc

SEQ ID NO: 469 - DNA, 46 bp, Artificial Sequence
  Synthetic
tccacatcattttcatctgtgacaaagtagaggacacaattctgat

SEQ ID NO: 470 - DNA, 42 bp, Artificial Sequence
  Synthetic
ggttctttttcaccggggaatataaagcctatcaacacacca

SEQ ID NO: 471 - DNA, 43 bp, Artificial Sequence
  Synthetic
aaacacccttctgaagttagctgagggaaaacaagagctatcg

SEQ ID NO: 472 - DNA, 41 bp, Artificial Sequence
  Synthetic
gaggccagaaacggctatcttgatgtgatagcttcataccc

SEQ ID NO: 473 - DNA, 42 bp, Artificial Sequence
  Synthetic
gtcgtccaaggttgcaggtcacagtgcatttctactaaatcc

SEQ ID NO: 474 - DNA, 46 bp, Artificial Sequence
  Synthetic
ctcctcctctgtaatctcatactcaaaatgacttagtgttaccagc

SEQ ID NO: 475 - DNA, 47 bp, Artificial Sequence
  Synthetic
ttctgcttcatggacaatataccaaaagaagtcttaacagaaatggc

SEQ ID NO: 476 - DNA, 47 bp, Artificial Sequence
  Synthetic
ggagttattttcacagcctgcaaccgaaagtataacaaaagtccaga

SEQ ID NO: 477 - DNA, 49 bp, Artificial Sequence
  Synthetic
aactctctgttaacatagcatgcttatatcaaatgttatgtgatcctcc

SEQ ID NO: 478 - DNA, 44 bp, Artificial Sequence
  Synthetic
tcagaattgcttcttgaagtgcatcctgaagaggaaaacaatgg

SEQ ID NO: 479 - DNA, 47 bp, Artificial Sequence
  Synthetic
acagtccagttctgctaaatctttgcgggagaaagagcttattttac

SEQ ID NO: 480 - DNA, 40 bp, Artificial Sequence
  Synthetic
gggccctgattttccttctcgtccaccacgtcccctgaaa

SEQ ID NO: 481 - DNA, 45 bp, Artificial Sequence
  Synthetic
actcatgaataagaagttgcagcaatattgttaaagggcacagca

SEQ ID NO: 482 - DNA, 41 bp, Artificial Sequence
  Synthetic
tcagcaaacgatcagcaagagtgcaattgcctacctgatgt

SEQ ID NO: 483 - DNA, 44 bp, Artificial Sequence
  Synthetic
gatgttgttgggtctattgcatctatacagtgcctgtggaaagt

SEQ ID NO: 484 - DNA, 40 bp, Artificial Sequence
  Synthetic
gccaatgctatccgttttgtggtaacgccattgcagtgtt

SEQ ID NO: 485 - DNA, 45 bp, Artificial Sequence
  Synthetic
agtaggtatttgctgaacccttctacaccacgtgacgttttaaat

SEQ ID NO: 486 - DNA, 44 bp, Artificial Sequence
  Synthetic
acttctagtttttattgtgcctcggtttcagagacagatgctgg

SEQ ID NO: 487 - DNA, 48 bp, Artificial Sequence
  Synthetic
gtctggcaaattgaatctaaacactcacaaagtattagttcctaaggt

SEQ ID NO: 488 - DNA, 46 bp, Artificial Sequence
  Synthetic
tccaaagaaaaacaagctatctccaattgccacagtttgtaaatgg

SEQ ID NO: 489 - DNA, 46 bp, Artificial Sequence
  Synthetic
cctcaattccagagggaggtgtcctaatattttggataattggcag

SEQ ID NO: 490 - DNA, 48 bp, Artificial Sequence
  Synthetic
ccaaatgactcagagagactggatgtgaactatagtgaaataaactgc

SEQ ID NO: 491 - DNA, 38 bp, Artificial Sequence
  Synthetic
gttggcagctgacgccggttgtccacgacctactcacc

SEQ ID NO: 492 - DNA, 41 bp, Artificial Sequence
  Synthetic
ttgcacagccagttgacgttttggtaatggtcattcagttc

SEQ ID NO: 493 - DNA, 46 bp, Artificial Sequence
  Synthetic
tccatccgttataaaaaagcccgaacctgataaatactcatgaagg

SEQ ID NO: 494 - DNA, 39 bp, Artificial Sequence
  Synthetic
gcacatacattgctccgtccctcgcgccttcagacctga

SEQ ID NO: 495 - DNA, 42 bp, Artificial Sequence
  Synthetic
tggaggtggccctgtataggtcaacccatatttgatgtttct

SEQ ID NO: 496 - DNA, 46 bp, Artificial Sequence
  Synthetic
gcttaaaaaatccttcccccattctttgatatcagttccttgttgg

SEQ ID NO: 497 - DNA, 46 bp, Artificial Sequence
  Synthetic
gcattgagagaagtaacagtagtctgtgagaaattgaaagaaagcg

SEQ ID NO: 498 - DNA, 45 bp, Artificial Sequence
  Synthetic
gcagctgtaaaatcaactccttcattgtccaatcttgctatggaa

SEQ ID NO: 499 - DNA, 49 bp, Artificial Sequence
  Synthetic
ttaaacatgtcgcaaaccatttgataccctattgaatacagatatgaga

SEQ ID NO: 500 - DNA, 40 bp, Artificial Sequence
  Synthetic
tatggtcgttgcagacgtgggccctaaaatttagcaaacg

SEQ ID NO: 501 - DNA, 45 bp, Artificial Sequence
  Synthetic
gttgttgcatatccagcataatcaagtgctgcctagaatttcatg

SEQ ID NO: 502 - DNA, 46 bp, Artificial Sequence
  Synthetic
agctgtctactaattgctcatagcaggatattgtattagacctgca

SEQ ID NO: 503 - DNA, 44 bp, Artificial Sequence
  Synthetic
gcactatagcttctaccataaaccaggacgattcaggtacagaa

SEQ ID NO: 504 - DNA, 45 bp, Artificial Sequence
  Synthetic
ctttccactgcctcggctatgaaagtatttaggtagtccatatgt

SEQ ID NO: 505 - DNA, 39 bp, Artificial Sequence
  Synthetic
tgctcccgtacactgtttgtgaagggacatagaggggga

SEQ ID NO: 506 - DNA, 45 bp, Artificial Sequence
  Synthetic
actctcctcgcatatgtcattatcaggcagacagtcagtttaaat

SEQ ID NO: 507 - DNA, 45 bp, Artificial Sequence
  Synthetic
cttcctcgtcctcagaatcctgggaaatgtttttttgaaagactg

SEQ ID NO: 508 - DNA, 43 bp, Artificial Sequence
  Synthetic
cggttccatactatactcagtccttgtccgaagcaaaaggaca

SEQ ID NO: 509 - DNA, 38 bp, Artificial Sequence
  Synthetic
gtttccactgtccacgggtcgagtccaacagtcccctt

SEQ ID NO: 510 - DNA, 45 bp, Artificial Sequence
  Synthetic
tggtagggggtatttttacaacatcaaacatgccattgtaactgt

SEQ ID NO: 511 - DNA, 50 bp, Artificial Sequence
  Synthetic
ggttgttaatagcagccacaatagtatggatatctgagtttattgtgtac

SEQ ID NO: 512 - DNA, 41 bp, Artificial Sequence
  Synthetic
ctatataggcccacacgaggctcatctagtgatagcggtcc

SEQ ID NO: 513 - DNA, 43 bp, Artificial Sequence
  Synthetic
ggaaaagttatatcagggccagattggggtaacaccacagttc

SEQ ID NO: 514 - DNA, 43 bp, Artificial Sequence
  Synthetic
gcatgataaaatatgttggtgcgagcctcctcctaaccctgta

SEQ ID NO: 515 - DNA, 43 bp, Artificial Sequence
  Synthetic
ggaacatctgatttattggtctgcaacaggatggcgatatggt

SEQ ID NO: 516 - DNA, 38 bp, Artificial Sequence
  Synthetic
gtccctgggctttttgtagcggctctttggtgtcctct

SEQ ID NO: 517 - DNA, 38 bp, Artificial Sequence
  Synthetic
taaggcaataccgcaccctgccaagttgcttgccaagt

SEQ ID NO: 518 - DNA, 41 bp, Artificial Sequence
  Synthetic
tcaccggttccgaagaccactagtgttgtacagcctccagg

SEQ ID NO: 519 - DNA, 42 bp, Artificial Sequence
  Synthetic
ctgcgcggcaacaagtaaactcaatggacgttaagttcccgg

SEQ ID NO: 520 - DNA, 38 bp, Artificial Sequence
  Synthetic
ctgacaccatgtgccagggccgccgacctcatgggata

SEQ ID NO: 521 - DNA, 36 bp, Artificial Sequence
  Synthetic
cggtaggagtaagggccacccttgcgtgccctgcgt

SEQ ID NO: 522 - DNA, 41 bp, Artificial Sequence
  Synthetic
cccagtggcctccagagagtaaaccttagttctcgcccagg

SEQ ID NO: 523 - DNA, 40 bp, Artificial Sequence
  Synthetic
gccttggccgtagctgtcaagacagctcagggtgttccga

SEQ ID NO: 524 - DNA, 42 bp, Artificial Sequence
  Synthetic
cggtactgttcatccacacgcattttgaactcgaccagaccg

SEQ ID NO: 525 - DNA, 40 bp, Artificial Sequence
  Synthetic
caggggtgatagctctacccgaggcatgcaactggaccag

SEQ ID NO: 526 - DNA, 42 bp, Artificial Sequence
  Synthetic
caggagaaaacagggccacagctctgcattgtctggcatgtc

SEQ ID NO: 527 - DNA, 40 bp, Artificial Sequence
  Synthetic
aatcactgagtcgcgaggcctatagctaggaccgaggctg

SEQ ID NO: 528 - DNA, 40 bp, Artificial Sequence
  Synthetic
cccttatgatgtctccgcacgcgtgttcacgcccatggag

SEQ ID NO: 529 - DNA, 40 bp, Artificial Sequence
  Synthetic
accgcagtacccaggaaggaagaattgtggcgaagtgcag

SEQ ID NO: 530 - DNA, 36 bp, Artificial Sequence
  Synthetic
acgaagtctaccgccttggcgcgccggcatattccg

SEQ ID NO: 531 - DNA, 41 bp, Artificial Sequence
  Synthetic
cgtggtgatggtcctgactccacatgtccaaggcatatggc

SEQ ID NO: 532 - DNA, 40 bp, Artificial Sequence
  Synthetic
ccccccttgatcagctccagaggccaacaacgggggaaat

SEQ ID NO: 533 - DNA, 40 bp, Artificial Sequence
  Synthetic
cctaccagtgcggcctctccgattacaaccgttccccagg

SEQ ID NO: 534 - DNA, 40 bp, Artificial Sequence
  Synthetic
tggagcgagccagaccttggatcgggtgagaatttcccgt

SEQ ID NO: 535 - DNA, 42 bp, Artificial Sequence
  Synthetic
ggtagagcacttcgcgatcagggtgattgttgggagagtcgt

SEQ ID NO: 536 - DNA, 42 bp, Artificial Sequence
  Synthetic
agggtttgttgggtggtcagagcattgcttccctcatgtcct

SEQ ID NO: 537 - DNA, 35 bp, Artificial Sequence
  Synthetic
tggcggcgcaaaatcgccattctatcgcccggagc

SEQ ID NO: 538 - DNA, 41 bp, Artificial Sequence
  Synthetic
ggggatgcctggcattaagggtgctgagtgacttcaagacg

SEQ ID NO: 539 - DNA, 41 bp, Artificial Sequence
  Synthetic
gatgccgtccacttccgtgaaacaacatcaagttcccctgc

SEQ ID NO: 540 - DNA, 38 bp, Artificial Sequence
  Synthetic
acgtggcctgaagaagacggcgaccctcgctagctagt

SEQ ID NO: 541 - DNA, 39 bp, Artificial Sequence
  Synthetic
acagggggctgctttgccgaagcagcaggactaccaagc

SEQ ID NO: 542 - DNA, 42 bp, Artificial Sequence
  Synthetic
gccccagtccacgagtatgacatcagactcttggtccactgt

SEQ ID NO: 543 - DNA, 38 bp, Artificial Sequence
  Synthetic
ttgcgggaatggctccgaacccccactcagccagatca

SEQ ID NO: 544 - DNA, 42 bp, Artificial Sequence
  Synthetic
ggagtcaaagcagcgggtatcaagcgggtggaatttcttctg

SEQ ID NO: 545 - DNA, 35 bp, Artificial Sequence
  Synthetic
ctacgccgtcgctctcagcgcggcgctgagagact

SEQ ID NO: 546 - DNA, 40 bp, Artificial Sequence
  Synthetic
atcgagtttggcagcggcagtacctctttaactgggcggt

SEQ ID NO: 547 - DNA, 44 bp, Artificial Sequence
  Synthetic
tgctgtgaccataagacaatatgaatcgtaatgagcaattccgg

SEQ ID NO: 548 - DNA, 44 bp, Artificial Sequence
  Synthetic
gcctcaacattgggtgaattcaagaaccagttaaagatctcatg

SEQ ID NO: 549 - DNA, 45 bp, Artificial Sequence
  Synthetic
cttgagtgcatctggtaatttccattggatagtaagacatggaca

SEQ ID NO: 550 - DNA, 47 bp, Artificial Sequence
  Synthetic
accaataaacaggtttgtcccaaaagttacctcataccactaaatgc

SEQ ID NO: 551 - DNA, 44 bp, Artificial Sequence
  Synthetic
cctgatgtccatggtattgtcattagcaatgctaggtactcatg

SEQ ID NO: 552 - DNA, 44 bp, Artificial Sequence
  Synthetic
acctaagccttcagtgagtgcttaggctgatgaaagatactcaa

SEQ ID NO: 553 - DNA, 39 bp, Artificial Sequence
  Synthetic
tgccatgtgtaatcgcccacaagccatgtatgttccaca

SEQ ID NO: 554 - DNA, 38 bp, Artificial Sequence
  Synthetic
gtagggtagtgctctgggtgttatcacagggcaaagct

SEQ ID NO: 555 - DNA, 44 bp, Artificial Sequence
  Synthetic
tggaatagtaaacacctgatgtacgtagtctcaacaggaggaca

SEQ ID NO: 556 - DNA, 44 bp, Artificial Sequence
  Synthetic
tgtcgtatgtcagcaaaacaaacatatgcatacatggtcccatt

SEQ ID NO: 557 - DNA, 45 bp, Artificial Sequence
  Synthetic
ggagatccatcacatccaagtagtagaaatcatgatgacttggtc

SEQ ID NO: 558 - DNA, 45 bp, Artificial Sequence
  Synthetic
cgtcccacaatggatgttgttaaagtgtgtgtattaatccatggt

SEQ ID NO: 559 - DNA, 49 bp, Artificial Sequence
  Synthetic
tgtgttagaatttgtggaggctagaccaatggctagtttagataacaag

SEQ ID NO: 560 - DNA, 50 bp, Artificial Sequence
  Synthetic
gggggtgctactcaaattaataagtactttaccaacactatcttagaagt

SEQ ID NO: 561 - DNA, 48 bp, Artificial Sequence
  Synthetic
ccttgtcacctggaaaaacatcataggagtttaacataaatccagtca

SEQ ID NO: 562 - DNA, 46 bp, Artificial Sequence
  Synthetic
ggttgcctagtttcattctcatgttaaagtccgattagggaaaagt

SEQ ID NO: 563 - DNA, 38 bp, Artificial Sequence
  Synthetic
tctgggggtgtgatggttagtggatccacaagtgttgg

SEQ ID NO: 564 - DNA, 38 bp, Artificial Sequence
  Synthetic
aacagcccatgggtccagcttgcaaagccgctatgtcc

SEQ ID NO: 565 - DNA, 40 bp, Artificial Sequence
  Synthetic
actgagccctcctgcgacaaaccacaaaagatgctcgact

SEQ ID NO: 566 - DNA, 38 bp, Artificial Sequence
  Synthetic
gcaggcagcagtggatgtgtacgcgtctcggaaaaacg

SEQ ID NO: 567 - DNA, 40 bp, Artificial Sequence
  Synthetic
cgatgagagcggaatgtcccgaaaccaaattcttccgcgc

SEQ ID NO: 568 - DNA, 40 bp, Artificial Sequence
  Synthetic
accaggataccccgtggattgtcaccatgtccaccccatg

SEQ ID NO: 569 - DNA, 43 bp, Artificial Sequence
  Synthetic
ggcgtaagataattcctgcagaaatactgcgactacttcaaca

SEQ ID NO: 570 - DNA, 43 bp, Artificial Sequence
  Synthetic
actctggctgtacaagaattacacccagaggaggagttactgt

SEQ ID NO: 571 - DNA, 45 bp, Artificial Sequence
  Synthetic
gctattccactgtcctcaaacagtggaagcaattagtctttctcc

SEQ ID NO: 572 - DNA, 45 bp, Artificial Sequence
  Synthetic
tgtttgttttacaacccaatctggtcggctgcgctatatttttac

SEQ ID NO: 573 - DNA, 50 bp, Artificial Sequence
  Synthetic
acaatctagtaatggctgaatccaaagaggtaaagtagtatcatacatga

SEQ ID NO: 574 - DNA, 39 bp, Artificial Sequence
  Synthetic
ggtggggctgcttgatctccgtcttcacctgtctccccg

SEQ ID NO: 575 - DNA, 41 bp, Artificial Sequence
  Synthetic
cctgatcgtggaacagatcgaagaacgtcatatcctctctg

SEQ ID NO: 576 - DNA, 42 bp, Artificial Sequence
  Synthetic
catggaggtacccttaggaagtgtgcaaacagtaatcaacgc

SEQ ID NO: 577 - DNA, 42 bp, Artificial Sequence
  Synthetic
tccctccctaggtgtttgagcaacttgggtattggtacggga

SEQ ID NO: 578 - DNA, 47 bp, Artificial Sequence
  Synthetic
tcatctatttcaaactgcgccatagacattggtgatccagaatacat

SEQ ID NO: 579 - DNA, 46 bp, Artificial Sequence
  Synthetic
ctgtctagaggagttgtcagctggtgatttgacagacatattcaat

SEQ ID NO: 580 - DNA, 44 bp, Artificial Sequence
  Synthetic
gggtcgaaagatacattttgcctataaactgggtgacactgaaa

SEQ ID NO: 581 - DNA, 46 bp, Artificial Sequence
  Synthetic
tctgtataaaatccggccatttgctttagtactttttcagcgagtc

SEQ ID NO: 582 - DNA, 49 bp, Artificial Sequence
  Synthetic
cctcactagtaactagagaaccactcctaaaaatggattagggaatcac

SEQ ID NO: 583 - DNA, 49 bp, Artificial Sequence
  Synthetic
acctaaaggtgtctgatccaaatcaccatataagggcttaaatttttgg

SEQ ID NO: 584 - DNA, 49 bp, Artificial Sequence
  Synthetic
cgaagttaaagtgatagaacaccgaggtttctatttgaagtttgtacac

SEQ ID NO: 585 - DNA, 40 bp, Artificial Sequence
  Synthetic
tgctggtgagagagaaaaggccctctagcagcggccaact

SEQ ID NO: 586 - DNA, 42 bp, Artificial Sequence
  Synthetic
gcgggtaggggcagtataccaaaaccctaatgtggtccaccg

SEQ ID NO: 587 - DNA, 38 bp, Artificial Sequence
  Synthetic
acaggacctcaggcgggaggcgaggctatgttccgcca

SEQ ID NO: 588 - DNA, 38 bp, Artificial Sequence
  Synthetic
agggcgtaggtgatggctccgccattggctgccacttt

SEQ ID NO: 589 - DNA, 40 bp, Artificial Sequence
  Synthetic
agcgacctcagaggcgttccgctacaaggttactgtgggc

SEQ ID NO: 590 - DNA, 39 bp, Artificial Sequence
  Synthetic
aaaaccaacacccgtgggtcatacgctcagtgtaggcgc

SEQ ID NO: 591 - DNA, 36 bp, Artificial Sequence
  Synthetic
tgccagggacgacgtaggaatgtcgaccccgctgaa

SEQ ID NO: 592 - DNA, 41 bp, Artificial Sequence
  Synthetic
cagaggcggcataggtgagacttttgatgccagtcagagca

SEQ ID NO: 593 - DNA, 39 bp, Artificial Sequence
  Synthetic
ccttagagccatccgggtaggtccggccataacccacca

SEQ ID NO: 594 - DNA, 41 bp, Artificial Sequence
  Synthetic
gcagcctcaagcatctttgggtatacattaaccccccggcc

SEQ ID NO: 595 - DNA, 40 bp, Artificial Sequence
  Synthetic
gccagatttgctgtccgtgcaaccaataggccgacctgcc

SEQ ID NO: 596 - DNA, 35 bp, Artificial Sequence
  Synthetic
aatgacaacccggcgccccggcttcgctgctttca

SEQ ID NO: 597 - DNA, 42 bp, Artificial Sequence
  Synthetic
ggaggacccgactagtggtctgctgcggatgtatgtgagctg

SEQ ID NO: 598 - DNA, 38 bp, Artificial Sequence
  Synthetic
gagatgcccacctcgcgaaggcgccacactgagaagtg

SEQ ID NO: 599 - DNA, 40 bp, Artificial Sequence
  Synthetic
aggtcgagctcaaggacggcttgtacgagctagtggaggc

SEQ ID NO: 600 - DNA, 38 bp, Artificial Sequence
  Synthetic
ccagggccccaattcttctcagccttggcgcgcttcct

SEQ ID NO: 601 - DNA, 35 bp, Artificial Sequence
  Synthetic
tgggcctggtcacgccaaggggctggacctcgtgt

SEQ ID NO: 602 - DNA, 41 bp, Artificial Sequence
  Synthetic
gggagacccgcgtgttggtatctttgccctcgaacttgagt

SEQ ID NO: 603 - DNA, 40 bp, Artificial Sequence
  Synthetic
agactgggccggtcgaagagtgtgctttggctttctctca

SEQ ID NO: 604 - DNA, 42 bp, Artificial Sequence
  Synthetic
gcacccaggctagtggtgtaagactgctagtgaccaactgct

SEQ ID NO: 605 - DNA, 40 bp, Artificial Sequence
  Synthetic
attggctgcatatcgacgacaacaatataccaaaacggcg

SEQ ID NO: 606 - DNA, 40 bp, Artificial Sequence
  Synthetic
ccaccaacgattcaggaacattaccgaaagacacagtgtt

SEQ ID NO: 607 - DNA, 48 bp, Artificial Sequence
  Synthetic
gcatgccagatttaccggttatggggttgtttattaagtttaaatcgg

SEQ ID NO: 608 - DNA, 49 bp, Artificial Sequence
  Synthetic
aaactctttcatatgccgttcctatgattcgggctatagagtattttac

SEQ ID NO: 609 - DNA, 40 bp, Artificial Sequence
  Synthetic
acaacatccaacgccgttttagtggaaacgaaaaaccgtc

SEQ ID NO: 610 - DNA, 44 bp, Artificial Sequence
  Synthetic
aatcgagtcttttcgttcccataatgtttactgctattggacga

SEQ ID NO: 611 - DNA, 40 bp, Artificial Sequence
  Synthetic
tgattaaacaatgggccgttgaggctatgttacctgcact

SEQ ID NO: 612 - DNA, 45 bp, Artificial Sequence
  Synthetic
ggaaagaccgtttgttttatagtggaggggtatgtatattagcgc

SEQ ID NO: 613 - DNA, 43 bp, Artificial Sequence
  Synthetic
tgagtggattattcgacgggactttttcatcgtcgttacttcc

SEQ ID NO: 614 - DNA, 45 bp, Artificial Sequence
  Synthetic
cctctatggttgacagcacatttcttgctgggttatttaacatcc

SEQ ID NO: 615 - DNA, 42 bp, Artificial Sequence
  Synthetic
acctcatcgaaatgcgtatagccagaaactatccgacagaga

SEQ ID NO: 616 - DNA, 38 bp, Artificial Sequence
  Synthetic
ttttcggtttaggcagccggcgtttcctccttgcagac

SEQ ID NO: 617 - DNA, 37 bp, Artificial Sequence
  Synthetic
tgtggccgcccggttttggacgaaccgtgttccgtcg

SEQ ID NO: 618 - DNA, 38 bp, Artificial Sequence
  Synthetic
cagtacgtgctgccgggtttcccagaccccgagactgt

SEQ ID NO: 619 - DNA, 38 bp, Artificial Sequence
  Synthetic
ccatccaacagggtgcggttcatcctcccagtgaccct

SEQ ID NO: 620 - DNA, 39 bp, Artificial Sequence
  Synthetic
aggaaacatgatgcccggggtatctaggtttgccccccg

SEQ ID NO: 621 - DNA, 49 bp, Artificial Sequence
  Synthetic
ccctgcttgcccatactatatgtttattagatcgatgggaaaaaattcg

SEQ ID NO: 622 - DNA, 43 bp, Artificial Sequence
  Synthetic
gtgtcctgtgtcagctgctgtttagacaagatagaggaagagc

SEQ ID NO: 623 - DNA, 39 bp, Artificial Sequence
  Synthetic
atctggcctggtgcaataggccatcaatgaggaagctgc

SEQ ID NO: 624 - DNA, 40 bp, Artificial Sequence
  Synthetic
gttcgcattttggaccaacaaggagcaagcttcacaggag

SEQ ID NO: 625 - DNA, 46 bp, Artificial Sequence
  Synthetic
tggaatattgctggtgatcctttcccaccagggattagatatcagt

SEQ ID NO: 626 - DNA, 45 bp, Artificial Sequence
  Synthetic
tctgtatgtcattgacagtccagcccatcctgataaatggacagt

SEQ ID NO: 627 - DNA, 44 bp, Artificial Sequence
  Synthetic
tggttattttttgcactgcctctgatatgcaagaatgaggggtg

SEQ ID NO: 628 - DNA, 50 bp, Artificial Sequence
  Synthetic
ccattgctctccaattactgtgatatcaggaaagtactatttttagatgg

SEQ ID NO: 629 - DNA, 45 bp, Artificial Sequence
  Synthetic
actggccatcttcctgctaattttagaagcagaagttattccagc

SEQ ID NO: 630 - DNA, 43 bp, Artificial Sequence
  Synthetic
gtgggatgtgtacttctgaacttatggaaagctaggggatggt

SEQ ID NO: 631 - DNA, 46 bp, Artificial Sequence
  Synthetic
gccaagtattgtagagatcctacctattaggacacatagttagccc

SEQ ID NO: 632 - DNA, 49 bp, Artificial Sequence
  Synthetic
gcagaattcttattatggcttccaccttagggcaacatatctatgaaac

SEQ ID NO: 633 - DNA, 43 bp, Artificial Sequence
  Synthetic
tgcttccttccacacaggtactgtagtgctacagaaaaattgt

SEQ ID NO: 634 - DNA, 45 bp, Artificial Sequence
  Synthetic
agttgatactactggcctaattccatggaacaggaccatgtacaa

SEQ ID NO: 635 - DNA, 43 bp, Artificial Sequence
  Synthetic
tctcttgttaatagcagccctgtaacaatgtatgcccctccca

SEQ ID NO: 636 - DNA, 41 bp, Artificial Sequence
  Synthetic
cgcctcaatagccctcagcaaacaatgacgctgacggtaca

SEQ ID NO: 637 - DNA, 41 bp, Artificial Sequence
  Synthetic
gctcccaccctatctgctgcttggatggcctactgtaaggg

SEQ ID NO: 638 - DNA, 42 bp, Artificial Sequence
  Synthetic
agcaagctcgatgtcagcagtttagcatttcatcacgtggcc

SEQ ID NO: 639 - DNA, 40 bp, Artificial Sequence
  Synthetic
cgtcagagattcccacctcggtcaacgacatgcagtggct

SEQ ID NO: 640 - DNA, 39 bp, Artificial Sequence
  Synthetic
ccaggggctcagtctggacagtttaggcgcaggtttccg

SEQ ID NO: 641 - DNA, 36 bp, Artificial Sequence
  Synthetic
cccccttcagcacctacgtggagccggtcagcagct

SEQ ID NO: 642 - DNA, 37 bp, Artificial Sequence
  Synthetic
tcttcgccgggctggacgacttcgagggcgtagtggc

SEQ ID NO: 643 - DNA, 36 bp, Artificial Sequence
  Synthetic
ttcgaggctgtgctgcgcggcgaactccaccgaggt

SEQ ID NO: 644 - DNA, 41 bp, Artificial Sequence
  Synthetic
cgcgtacatggccaagctccaacacaacaaactccccctcg

SEQ ID NO: 645 - DNA, 39 bp, Artificial Sequence
  Synthetic
aggtcctggactgcgtggttaacgtacatgttctgcgcc

SEQ ID NO: 646 - DNA, 37 bp, Artificial Sequence
  Synthetic
agctcgtgctcccagaggcagtacatccccgcgtacg

SEQ ID NO: 647 - DNA, 38 bp, Artificial Sequence
  Synthetic
gctccggggacagttctccaggacctccgggacttcga

SEQ ID NO: 648 - DNA, 41 bp, Artificial Sequence
  Synthetic
gggcaggactagctcgtcgtctcctgaacacgctaatgtgc

SEQ ID NO: 649 - DNA, 39 bp, Artificial Sequence
  Synthetic
cgatacacggcaacccccggctctcctccacccaaacga

SEQ ID NO: 650 - DNA, 37 bp, Artificial Sequence
  Synthetic
ctggtgttcgaactgggccacaccgcgtcctccgaca

SEQ ID NO: 651 - DNA, 39 bp, Artificial Sequence
  Synthetic
tggagcttgtggccctacacccagacggaacagctccca

SEQ ID NO: 652 - DNA, 40 bp, Artificial Sequence
  Synthetic
gcaagggggagctgctgatctaatgggcgtaaagacgggc

SEQ ID NO: 653 - DNA, 38 bp, Artificial Sequence
  Synthetic
tgaccacatggggccggtacctaaggcccaccgtcacg

SEQ ID NO: 654 - DNA, 36 bp, Artificial Sequence
  Synthetic
gctgctgccgacacaacgtctgggcggtcagcgaga

SEQ ID NO: 655 - DNA, 37 bp, Artificial Sequence
  Synthetic
tcgggctggcggtcgatctcgctaaccagcagctcca

SEQ ID NO: 656 - DNA, 36 bp, Artificial Sequence
  Synthetic
ccacgacatccgcggctttacacgatctggcgctgc

SEQ ID NO: 657 - DNA, 39 bp, Artificial Sequence
  Synthetic
caaggcggcccacttggaatcatcatctctaagcgcgcg

SEQ ID NO: 658 - DNA, 41 bp, Artificial Sequence
  Synthetic
acgaagtgaaccaactgccgaatacagcgtcctgaacacgt

SEQ ID NO: 659 - DNA, 34 bp, Artificial Sequence
  Synthetic
acgatcgtgctgcgcgagcgggtggaccacgtca

SEQ ID NO: 660 - DNA, 39 bp, Artificial Sequence
  Synthetic
gctgacgcgtgcttttgttccgccagcgcgtgtatgagt

SEQ ID NO: 661 - DNA, 40 bp, Artificial Sequence
  Synthetic
agagctacgcgtacctctgcccggaaagaccactagcccg

SEQ ID NO: 662 - DNA, 35 bp, Artificial Sequence
  Synthetic
ccaccaacgtgccctacccccaggggcaggacgaa

SEQ ID NO: 663 - DNA, 37 bp, Artificial Sequence
  Synthetic
ttgtgcgggaggggcttggcttgggggattcgcaggc

SEQ ID NO: 664 - DNA, 41 bp, Artificial Sequence
  Synthetic
ccccgcgggatcggatacaagtaggtgataaacagcgggcg

SEQ ID NO: 665 - DNA, 36 bp, Artificial Sequence
  Synthetic
tggcacaacagacccgcggcagggcgttgtagtgcg

SEQ ID NO: 666 - DNA, 36 bp, Artificial Sequence
  Synthetic
ggtccatgttcgagggcggcgccggccaattcttcc

SEQ ID NO: 667 - DNA, 40 bp, Artificial Sequence
  Synthetic
tcgaaggcggaatagtggcgcgtcctgtctctgcagtcgt

SEQ ID NO: 668 - DNA, 35 bp, Artificial Sequence
  Synthetic
tgcaggcggttgtcgaggctgcttcggcggctcct

SEQ ID NO: 669 - DNA, 40 bp, Artificial Sequence
  Synthetic
cgtcagcaccttcatcgacctggtgtagacctccaggggc

SEQ ID NO: 670 - DNA, 38 bp, Artificial Sequence
  Synthetic
gccgcacctcaaggaggaactccaatcagcgcccgaac

SEQ ID NO: 671 - DNA, 39 bp, Artificial Sequence
  Synthetic
tccagcgcaaccagctcccacgcgatggtctctatgtcc

SEQ ID NO: 672 - DNA, 35 bp, Artificial Sequence
  Synthetic
agaagttctgccggcggctttgccccccacaaccc

SEQ ID NO: 673 - DNA, 36 bp, Artificial Sequence
  Synthetic
aggttccgaacgccgtcggtggtaccgcctcaagcc

SEQ ID NO: 674 - DNA, 37 bp, Artificial Sequence
  Synthetic
tctgcgccaagtgcctgggagacgaactcgaaggcgg

SEQ ID NO: 675 - DNA, 35 bp, Artificial Sequence
  Synthetic
acgccggtgttctgcacgcatgaacgactgggccg

SEQ ID NO: 676 - DNA, 37 bp, Artificial Sequence
  Synthetic
gctgatccacatgctggccatacgacgtcaaggggcg

SEQ ID NO: 677 - DNA, 36 bp, Artificial Sequence
  Synthetic
acgtgagggctcgcaggacacaacaggtgggtgctt

SEQ ID NO: 678 - DNA, 38 bp, Artificial Sequence
  Synthetic
tccctcagatgatagggcgtgtgatgcgacgcctgtgc

SEQ ID NO: 679 - DNA, 37 bp, Artificial Sequence
  Synthetic
ggagtcgaggaccttcagggcggcgttcaacgacgcc

SEQ ID NO: 680 - DNA, 38 bp, Artificial Sequence
  Synthetic
cctgcatgccaatgcccatggaaacccacgccccagtg

SEQ ID NO: 681 - DNA, 37 bp, Artificial Sequence
  Synthetic
cggcgggatccatggcgatatacagcgctccgatcgg

SEQ ID NO: 682 - DNA, 38 bp, Artificial Sequence
  Synthetic
ccacgaacacgagctcggtctcaaccaccttcgctccc

SEQ ID NO: 683 - DNA, 36 bp, Artificial Sequence
  Synthetic
tcatccacgacgccccggacagctcggcgatggtca

SEQ ID NO: 684 - DNA, 36 bp, Artificial Sequence
  Synthetic
accgaggaggcgtgggtgaccttgtcgcggtggttc

SEQ ID NO: 685 - DNA, 37 bp, Artificial Sequence
  Synthetic
acggatcggcgggcaaaaaccgatggcgtccaccaga

SEQ ID NO: 686 - DNA, 38 bp, Artificial Sequence
  Synthetic
gcgaatagctacggccgcttgtccagacggacagcacc

SEQ ID NO: 687 - DNA, 37 bp, Artificial Sequence
  Synthetic
cccgtcggtcgcatacagcactgcgatcacgaagggc

SEQ ID NO: 688 - DNA, 35 bp, Artificial Sequence
  Synthetic
tgcacaacgtacggggcggtcctgcgccgacaaga

SEQ ID NO: 689 - DNA, 38 bp, Artificial Sequence
  Synthetic
tgacatagtccccgcccaggccccatgttttccgcggc

SEQ ID NO: 690 - DNA, 36 bp, Artificial Sequence
  Synthetic
gttggtcccgacgctcagcctgcgcttcaagcacgg

SEQ ID NO: 691 - DNA, 36 bp, Artificial Sequence
  Synthetic
tggtgaagggcgacgaacggacacccagatgcgcct

SEQ ID NO: 692 - DNA, 37 bp, Artificial Sequence
  Synthetic
agctgcaccagggtctggcacacgaaaatcacccgcc

SEQ ID NO: 693 - DNA, 42 bp, Artificial Sequence
  Synthetic
cgtggcattcagacagtacgggtcgaacctgtttttacgggc

SEQ ID NO: 694 - DNA, 37 bp, Artificial Sequence
  Synthetic
accacacgacatgcaggcttccatgcccagcccccaa

SEQ ID NO: 695 - DNA, 34 bp, Artificial Sequence
  Synthetic
aagtcgacacaccgcgcggcggaaggaaacgggc

SEQ ID NO: 696 - DNA, 37 bp, Artificial Sequence
  Synthetic
cccgtgcatgaagacctggatccaccggggtgttgca

SEQ ID NO: 697 - DNA, 36 bp, Artificial Sequence
  Synthetic
gcatcatcccgcccgcatccgtcgccccatgcacgt

SEQ ID NO: 698 - DNA, 35 bp, Artificial Sequence
  Synthetic
acgcgtggtaggtcgctgggtttccgggagcgctg

SEQ ID NO: 699 - DNA, 38 bp, Artificial Sequence
  Synthetic
tgggatcggccatcttaagcgatgggactccgcgtcgt

SEQ ID NO: 700 - DNA, 40 bp, Artificial Sequence
  Synthetic
ggcatgtaggagcacgctgccccgatcactgtgtactacg

SEQ ID NO: 701 - DNA, 39 bp, Artificial Sequence
  Synthetic
ccaaaacaaaccggctggcgtcggtctgtatgtcctgcg

SEQ ID NO: 702 - DNA, 40 bp, Artificial Sequence
  Synthetic
cgtgctggccccttgatacgatgctggttgggtgggggta

SEQ ID NO: 703 - DNA, 42 bp, Artificial Sequence
  Synthetic
ccagccttgcaagcactctagtacttatcctggggagaaggg

SEQ ID NO: 704 - DNA, 43 bp, Artificial Sequence
  Synthetic
acagcaatacaatacagcaaacagtgatctggaggggaacttg

SEQ ID NO: 705 - DNA, 42 bp, Artificial Sequence
  Synthetic
ccgtatcccagtgttgcttgcttcagtgtccattttgccagg

SEQ ID NO: 706 - DNA, 45 bp, Artificial Sequence
  Synthetic
acctccatagcacttatctcactatgacaaaacaacatcacagca

SEQ ID NO: 707 - DNA, 49 bp, Artificial Sequence
  Synthetic
gcactggtttacaattatttctggctgctgctttattcttctatcatag

SEQ ID NO: 708 - DNA, 41 bp, Artificial Sequence
  Synthetic
gacaccgcttattcacatactgtagacactacaagacagcg

SEQ ID NO: 709 - DNA, 48 bp, Artificial Sequence
  Synthetic
ggtgataaccaaaaatgtgacccatcttaacaaatttttggatggaca

SEQ ID NO: 710 - DNA, 43 bp, Artificial Sequence
  Synthetic
cccatttccacaatacaacttctgtggcagccagttaccctaa

SEQ ID NO: 711 - DNA, 38 bp, Artificial Sequence
  Synthetic
ggggttctctccctcgtggacagcgccctggtaaatgt

SEQ ID NO: 712 - DNA, 47 bp, Artificial Sequence
  Synthetic
tgcctagcaagcattgtttaatgatcaagattcctaaaaacattggg

SEQ ID NO: 713 - DNA, 38 bp, Artificial Sequence
  Synthetic
cactggatatggacgggcgtcgggcattggcacaggac

SEQ ID NO: 714 - DNA, 40 bp, Artificial Sequence
  Synthetic
gtcaattgtgtccccccgggccgtaggtgacaatgctgaa

SEQ ID NO: 715 - DNA, 40 bp, Artificial Sequence
  Synthetic
gccagtagtgcgcctctggtacgtagtgacacagacctgc

SEQ ID NO: 716 - DNA, 40 bp, Artificial Sequence
  Synthetic
gcgtagggtctcctctcacagaactagatgtactgggtga

SEQ ID NO: 717 - DNA, 41 bp, Artificial Sequence
  Synthetic
gcagcatggaggaaagtactgatacaacggacattgaacac

SEQ ID NO: 718 - DNA, 45 bp, Artificial Sequence
  Synthetic
agggattttcagcatcatcaaacttgattgaggtttctaggggac

SEQ ID NO: 719 - DNA, 44 bp, Artificial Sequence
  Synthetic
actcatgtctgcatcctcaatgtaaagcagatgacaaatgtcct

SEQ ID NO: 720 - DNA, 47 bp, Artificial Sequence
  Synthetic
ggtgtgccttaaaaactcaaaaaacctaactttaccatcagtgttcc

SEQ ID NO: 721 - DNA, 45 bp, Artificial Sequence
  Synthetic
acctcccaaaacttaagatctttgtaaatgtccctctaaggatgc

SEQ ID NO: 722 - DNA, 42 bp, Artificial Sequence
  Synthetic
ggggctattggcaagacagaccccaacattggcaaacgtctc

SEQ ID NO: 723 - DNA, 45 bp, Artificial Sequence
  Synthetic
tctccttcacaatcggatgacatatgccaattaatttactgtgtg

SEQ ID NO: 724 - DNA, 45 bp, Artificial Sequence
  Synthetic
ggtgatatgtgaacagcatgcagcgaaagtatgtgataagtccac

SEQ ID NO: 725 - DNA, 44 bp, Artificial Sequence
  Synthetic
aggagctctctcatacagattcatttggaaacacaacagacact

SEQ ID NO: 726 - DNA, 49 bp, Artificial Sequence
  Synthetic
gatcagcaagtgtttcaccttctatataggaattgtcaaatatctggtg

SEQ ID NO: 727 - DNA, 43 bp, Artificial Sequence
  Synthetic
ttgaactgcgcgggaaactttattcagcaagttaaaacaacca

SEQ ID NO: 728 - DNA, 47 bp, Artificial Sequence
  Synthetic
gctcaggaattgctgataaatccattaagggaactattcataccaga

SEQ ID NO: 729 - DNA, 47 bp, Artificial Sequence
  Synthetic
ggtttccttcacatattcatccgtagaatctggaaaattgtatctgc

SEQ ID NO: 730 - DNA, 46 bp, Artificial Sequence
  Synthetic
aggaccacccctatccatttgatcctaatagagaacgtttagtctg

SEQ ID NO: 731 - DNA, 50 bp, Artificial Sequence
  Synthetic
tttctgtaaaaatcagcaagctgttctctttacaatgtatattttgtggc

SEQ ID NO: 732 - DNA, 44 bp, Artificial Sequence
  Synthetic
ccgttgcgcactaaatagaagtgatggcaatgttagatcttgtt

SEQ ID NO: 733 - DNA, 40 bp, Artificial Sequence
  Synthetic
gaagagtacgaacagcagtagcacacctgttgtcacactt

SEQ ID NO: 734 - DNA, 47 bp, Artificial Sequence
  Synthetic
gagagatacatgaaccgtctgtacatgcgtagattttaattctctgg

SEQ ID NO: 735 - DNA, 45 bp, Artificial Sequence
  Synthetic
atagcgactacctgagaagtacttttaaactttcaggacagtgga

SEQ ID NO: 736 - DNA, 45 bp, Artificial Sequence
  Synthetic
tgctgaagctgttcgatgatctaatatggtgagtttccatcatgg

SEQ ID NO: 737 - DNA, 50 bp, Artificial Sequence
  Synthetic
tgcccaagtatcattggttatttcatttccaaataaattacctgtcactg

SEQ ID NO: 738 - DNA, 40 bp, Artificial Sequence
  Synthetic
atgtggacggggtgttgctggggaacccaccaaaaggaaa

SEQ ID NO: 739 - DNA, 39 bp, Artificial Sequence
  Synthetic
cccgttcgctgagttgatcgagccaactgctgtcccaac

SEQ ID NO: 740 - DNA, 43 bp, Artificial Sequence
  Synthetic
agcgcgctttgatctatacatttttaaacctccaaaacacacg

SEQ ID NO: 741 - DNA, 43 bp, Artificial Sequence
  Synthetic
tggtacagtctccggtaaaggtataggtccggaagaggatcag

SEQ ID NO: 742 - DNA, 43 bp, Artificial Sequence
  Synthetic
tccgctgcatctgtatatatttcatcttcctgatccagcactt

SEQ ID NO: 743 - DNA, 47 bp, Artificial Sequence
  Synthetic
tgatcctattcaagggttgtaactctccggactttaatgtatttgtg

SEQ ID NO: 744 - DNA, 45 bp, Artificial Sequence
  Synthetic
ctctctaagatcccgctcaaactctttgaatttgaaaatcccgcg

SEQ ID NO: 745 - DNA, 44 bp, Artificial Sequence
  Synthetic
cctccccctaatccatctactataggaccctgatgtgtctgatg

SEQ ID NO: 746 - DNA, 41 bp, Artificial Sequence
  Synthetic
gatgacccgatgttcccaatcgagggtaagaggtatccaaa

SEQ ID NO: 747 - DNA, 44 bp, Artificial Sequence
  Synthetic
agccaatatcacacatatccccattgattgtcctccaattcagc

SEQ ID NO: 748 - DNA, 47 bp, Artificial Sequence
  Synthetic
tcacagttgaacattcacagtacatactgtgaactagtatactgtga

SEQ ID NO: 749 - DNA, 43 bp, Artificial Sequence
  Synthetic
tctgaacttgcacttacctttacaacctagggctactttccga

SEQ ID NO: 750 - DNA, 47 bp, Artificial Sequence
  Synthetic
cgtagtgtagtttgatacagttcctaaggaatacaaaagactatgcc

SEQ ID NO: 751 - DNA, 42 bp, Artificial Sequence
  Synthetic
gtactgctctgacaccttggatatggcccatgctactcaaga

SEQ ID NO: 752 - DNA, 48 bp, Artificial Sequence
  Synthetic
acctttttgtcactaggaaggtctatctctgataatcttgaagcattt

SEQ ID NO: 753 - DNA, 44 bp, Artificial Sequence
  Synthetic
gctaacgaagtgtccatgtgttcgtcatggaatagcgataaggg

SEQ ID NO: 754 - DNA, 45 bp, Artificial Sequence
  Synthetic
aggaaatcctcaaaatgaattccctctaggctttctgctaggtat

SEQ ID NO: 755 - DNA, 50 bp, Artificial Sequence
  Synthetic
gacaaaacctcgttgcttaaaaggtaatgatctagaaataaagctggaag

SEQ ID NO: 756 - DNA, 40 bp, Artificial Sequence
  Synthetic
gactcaactcagcaacagtctgtaagcgccctaaaacgaa

SEQ ID NO: 757 - DNA, 45 bp, Artificial Sequence
  Synthetic
gcagaaatatgatttcccagtgtcactttcttacagggtgttcca

SEQ ID NO: 758 - DNA, 44 bp, Artificial Sequence
  Synthetic
ggatcttaaatcagtttctccccttcacaggaaactctgacaga

SEQ ID NO: 759 - DNA, 40 bp, Artificial Sequence
  Synthetic
tgctccggaggttcgttctcccggcccacaatcttcgatc

SEQ ID NO: 760 - DNA, 49 bp, Artificial Sequence
  Synthetic
cgatctgctaatgtattgccttctagaatttgtatagacactgtaaagc

SEQ ID NO: 761 - DNA, 39 bp, Artificial Sequence
  Synthetic
tgcttctgcatgcacacttgcagtccctatgaacctcct

SEQ ID NO: 762 - DNA, 48 bp, Artificial Sequence
  Synthetic
ggcgggattttcaaattcaaattgagttacattcaacaaatcagaaca

SEQ ID NO: 763 - DNA, 44 bp, Artificial Sequence
  Synthetic
aggctctataggttcaattgcactattagtaccagaagcggtac

SEQ ID NO: 764 - DNA, 41 bp, Artificial Sequence
  Synthetic
tttgccacaggtttagccggtgttttgatgttttgcagatg

SEQ ID NO: 765 - DNA, 45 bp, Artificial Sequence
  Synthetic
cgttcaggattgaaaattgactgatccaatatcgagtgtttaggc

SEQ ID NO: 766 - DNA, 41 bp, Artificial Sequence
  Synthetic
taggtggacagtctcctgcatattgggatgttgctaaacca

SEQ ID NO: 767 - DNA, 44 bp, Artificial Sequence
  Synthetic
aatggcgagcatacgactgcgatgtttatggcgataaatgtttc

SEQ ID NO: 768 - DNA, 46 bp, Artificial Sequence
  Synthetic
gacatcttgttgccaaagatgttatgaatggcaattagcttttgtg

SEQ ID NO: 769 - DNA, 45 bp, Artificial Sequence
  Synthetic
ggctatgttccaaacaacttaccttgctggacaggtagtattgtc

SEQ ID NO: 770 - DNA, 41 bp, Artificial Sequence
  Synthetic
cccttatcaacaaaactgcttgctcgttggatgatgctgaa

SEQ ID NO: 771 - DNA, 43 bp, Artificial Sequence
  Synthetic
gcaacaaaaaaaagccttacacctctggagccagcaaatcctt

SEQ ID NO: 772 - DNA, 47 bp, Artificial Sequence
  Synthetic
tccacaggttcatcgtctagtaaaagtttaacagctttagatgactt

SEQ ID NO: 773 - DNA, 44 bp, Artificial Sequence
  Synthetic
attcattatggcggttcccatggtggaattgtagaagatgaagc

SEQ ID NO: 774 - DNA, 40 bp, Artificial Sequence
  Synthetic
gatggtgtttcggaactgatcgggtcctctccagtctctc

SEQ ID NO: 775 - DNA, 44 bp, Artificial Sequence
  Synthetic
ttgctgttccaccaattggtttatttggcaatttaggaataggg

SEQ ID NO: 776 - DNA, 41 bp, Artificial Sequence
  Synthetic
gtgcttgtactaggacccgcagaagaaattgaattaggccc

SEQ ID NO: 777 - DNA, 44 bp, Artificial Sequence
  Synthetic
cctgtgacttttggtacttctacttgatcgcctcttaacagtgg

SEQ ID NO: 778 - DNA, 48 bp, Artificial Sequence
  Synthetic
ggccatatctaatctgttgtcttctaattagttgatgtagaaaaccct

SEQ ID NO: 779 - DNA, 50 bp, Artificial Sequence
  Synthetic
accgtcttcctaaataagactgacttccttataaagacctaaagttttgg

SEQ ID NO: 780 - DNA, 43 bp, Artificial Sequence
  Synthetic
aattgttgggtgcggtaaggaatttccatcaagcaatactgac

SEQ ID NO: 781 - DNA, 46 bp, Artificial Sequence
  Synthetic
tgcatgtgtctaaatcttcttgtctcgacaaaacagtcaaatcaac

SEQ ID NO: 782 - DNA, 40 bp, Artificial Sequence
  Synthetic
tggtgctatgtttcttggagccgtccgtagaaatgaaggg

SEQ ID NO: 783 - DNA, 46 bp, Artificial Sequence
  Synthetic
ccgcttttaatgcatctgaaacattaagaagatctgtggatacctc

SEQ ID NO: 784 - DNA, 40 bp, Artificial Sequence
  Synthetic
gcaggctaggacacggtcacccctccactagtttggtcga

SEQ ID NO: 785 - DNA, 40 bp, Artificial Sequence
  Synthetic
gtgaattcagtgctggtgcctccatctaagttcacagagc

SEQ ID NO: 786 - DNA, 44 bp, Artificial Sequence
  Synthetic
gccaaatactcccatgtccttaagaaaagctacttccaaaggct

SEQ ID NO: 787 - DNA, 39 bp, Artificial Sequence
  Synthetic
tgttgtagatggcgtcgctgatccaggagatcgaggtat

SEQ ID NO: 788 - DNA, 43 bp, Artificial Sequence
  Synthetic
ccagtaaattctgtgcacattggtgacccactggatcttctcc

SEQ ID NO: 789 - DNA, 46 bp, Artificial Sequence
  Synthetic
accaatgtagagttttgtgccaaatcaaattacctcataccactgc

SEQ ID NO: 790 - DNA, 46 bp, Artificial Sequence
  Synthetic
ggattgtaagccaatatcccatacagtggtccagaagatagaaagg

SEQ ID NO: 791 - DNA, 44 bp, Artificial Sequence
  Synthetic
tgcgttcttgtttttgatttctgtcgatgtagagagcttcctcg

SEQ ID NO: 792 - DNA, 41 bp, Artificial Sequence
  Synthetic
ctttgccatgtgtaatcatcccaaggcaatgtatgtgcctc

SEQ ID NO: 793 - DNA, 41 bp, Artificial Sequence
  Synthetic
tgcttccacatgtttggctctgatgttcataccacgattgt

SEQ ID NO: 794 - DNA, 41 bp, Artificial Sequence
  Synthetic
ggagtagtaaacaccggatgtgcctactggagcacatggag

SEQ ID NO: 795 - DNA, 42 bp, Artificial Sequence
  Synthetic
gcaaaacagacataaccgcctctagatgtatacatggcccca

SEQ ID NO: 796 - DNA, 43 bp, Artificial Sequence
  Synthetic
cgagtcatgtatggatgctatttgtaagccagggaaaagcttg

SEQ ID NO: 797 - DNA, 44 bp, Artificial Sequence
  Synthetic
tggatgtagttagtgatttgccagaaaagaactgagccagtgtg

SEQ ID NO: 798 - DNA, 45 bp, Artificial Sequence
  Synthetic
agtggggggacttagagtgtgttgtttactagtaactttgtgttg

SEQ ID NO: 799 - DNA, 42 bp, Artificial Sequence
  Synthetic
gtgttggtaagacacagatacgatcaccacagagaaagggga

SEQ ID NO: 800 - DNA, 46 bp, Artificial Sequence
  Synthetic
gccatggttattggtcctacatctactactttagtagtgcactcca

SEQ ID NO: 801 - DNA, 48 bp, Artificial Sequence
  Synthetic
cttggttttggtgggtgtgtttaattgtatctaaacaaaaggtgagag

SEQ ID NO: 802 - DNA, 42 bp, Artificial Sequence
  Synthetic
cctccccatactctttcattgtttattttgtgcgacaatgct

SEQ ID NO: 803 - DNA, 45 bp, Artificial Sequence
  Synthetic
attcggaagtctaagtggtcgtgaagtaaatgctagaattgaacc

SEQ ID NO: 804 - DNA, 42 bp, Artificial Sequence
  Synthetic
ctcatgcttgcaatgtgttcaatgctggatagagcttgatga

SEQ ID NO: 805 - DNA, 43 bp, Artificial Sequence
  Synthetic
gtcagtgagagaaaactccatgcatcccacttaaggaatgaca

SEQ ID NO: 806 - DNA, 40 bp, Artificial Sequence
  Synthetic
tttgacagaggactcagcttcacgttgtctcctccagtca

SEQ ID NO: 807 - DNA, 43 bp, Artificial Sequence
  Synthetic
ggattcttctcctgtcttcctgatgcactcgcgagatactgac

SEQ ID NO: 808 - DNA, 46 bp, Artificial Sequence
  Synthetic
catgttttagcctttcgaccttttccaagcacagtccattatccaa

SEQ ID NO: 809 - DNA, 44 bp, Artificial Sequence
  Synthetic
ccaccattaaaggggcaattttgacatcagagtcacagttaacg

SEQ ID NO: 810 - DNA, 45 bp, Artificial Sequence
  Synthetic
ggcacatctccaaaagcgaaggctgctagaaatattgttagaaga

SEQ ID NO: 811 - DNA, 42 bp, Artificial Sequence
  Synthetic
cccgaccattgtgaattcctcataggcaacctccaaacattg

SEQ ID NO: 812 - DNA, 39 bp, Artificial Sequence
  Synthetic
aggacctttgcatccttttggaaaccagcggctaaatcc

SEQ ID NO: 813 - DNA, 40 bp, Artificial Sequence
  Synthetic
cagcttttctgttccctgtgttcagaggggaaacgtactc

SEQ ID NO: 814 - DNA, 39 bp, Artificial Sequence
  Synthetic
catcctactctgcttcggcgcgtactgggaacatttgac

SEQ ID NO: 815 - DNA, 48 bp, Artificial Sequence
  Synthetic
gctaccaaatcaaatttctcttgcaaccattgcatcaaatttacatga

SEQ ID NO: 816 - DNA, 48 bp, Artificial Sequence
  Synthetic
cgagactgtagaatcacaatcacttattgtatggatgacatagagact

SEQ ID NO: 817 - DNA, 45 bp, Artificial Sequence
  Synthetic
gttcagcttcatcttcgcctaaaagaaagacaaagtaaaaggaga

SEQ ID NO: 818 - DNA, 40 bp, Artificial Sequence
  Synthetic
gctcagcgacagagttggtggtaacagcaacggtcggagg

SEQ ID NO: 819 - DNA, 43 bp, Artificial Sequence
  Synthetic
gaagtcgttcaagtctcgatagacctgctgaggaagttggaag

SEQ ID NO: 820 - DNA, 43 bp, Artificial Sequence
  Synthetic
tgacctccaccacccttaccttggaagtattctttatttgggt

SEQ ID NO: 821 - DNA, 43 bp, Artificial Sequence
  Synthetic
acaccagttacttcagaaacaagatgtcctggtttgcctacag

SEQ ID NO: 822 - DNA, 48 bp, Artificial Sequence
  Synthetic
gcgccttatattagcaggatgtatcagcaatattttacctcttactcc

SEQ ID NO: 823 - DNA, 47 bp, Artificial Sequence
  Synthetic
cgtcattcaaaacgtcaaagtaaggtctttattttcatgccaattcg

SEQ ID NO: 824 - DNA, 43 bp, Artificial Sequence
  Synthetic
gggcataaacattaggattttccgtcctctaggcataggaacg

SEQ ID NO: 825 - DNA, 41 bp, Artificial Sequence
  Synthetic
ggaggctgcacgacactcatactcactcccctgtgaggaac

SEQ ID NO: 826 - DNA, 39 bp, Artificial Sequence
  Synthetic
accaacgatctggccgccgaaagaaacaccaaccgtcgc

SEQ ID NO: 827 - DNA, 38 bp, Artificial Sequence
  Synthetic
gctctcacgcaaggcacacatagtgctggaagcggagg

SEQ ID NO: 828 - DNA, 42 bp, Artificial Sequence
  Synthetic
ttcgggcactctcagaatgctcatgatgatgaactggtcgcc

SEQ ID NO: 829 - DNA, 40 bp, Artificial Sequence
  Synthetic
gttccaagggcttgcatgcgaccgcagcaatttcaactcc

SEQ ID NO: 830 - DNA, 40 bp, Artificial Sequence
  Synthetic
agagttcatccacgtgcaccctcatgctagagagcctgcg

SEQ ID NO: 831 - DNA, 41 bp, Artificial Sequence
  Synthetic
gggcatggtggtaaagctgcagtcccctcctcttttcaacc

SEQ ID NO: 832 - DNA, 36 bp, Artificial Sequence
  Synthetic
acaccaaccggcggtaccccggcaaggtcgaagcag

SEQ ID NO: 833 - DNA, 36 bp, Artificial Sequence
  Synthetic
acgcagcggtgtctgcaccgccgtagctgttgagcc

SEQ ID NO: 834 - DNA, 42 bp, Artificial Sequence
  Synthetic
agccagcaccgtgataaacagtaacagccactcagagtttcc

SEQ ID NO: 835 - DNA, 38 bp, Artificial Sequence
  Synthetic
ttggccacgcccctcgtaccatcagggcacgtagtagg

SEQ ID NO: 836 - DNA, 42 bp, Artificial Sequence
  Synthetic
ggagtggcactcgtcacagatgatatgggaagtttctggccg

SEQ ID NO: 837 - DNA, 40 bp, Artificial Sequence
  Synthetic
cgcctgaggtggggatcacattaggtctcaatgctgtcgc

SEQ ID NO: 838 - DNA, 39 bp, Artificial Sequence
  Synthetic
agcttcacagagcacgacgcaaagccgggggtgtatagg

SEQ ID NO: 839 - DNA, 42 bp, Artificial Sequence
  Synthetic
taggaggggggtaggacctgtggggacgtgatgtggaaatgt

SEQ ID NO: 840 - DNA, 42 bp, Artificial Sequence
  Synthetic
cagcccaaggaccttttgcttggctctaagcacatcccctac

SEQ ID NO: 841 - DNA, 38 bp, Artificial Sequence
  Synthetic
aagctgtggacgcggagggtcaacatattgggcggctg

SEQ ID NO: 842 - DNA, 40 bp, Artificial Sequence
  Synthetic
gtttgatgcgtccgtctcgggatagcctttgcctccaggg

SEQ ID NO: 843 - DNA, 41 bp, Artificial Sequence
  Synthetic
tccggggtcctgtgatcttcatgtgtgtcacaccacttgct

SEQ ID NO: 844 - DNA, 42 bp, Artificial Sequence
  Synthetic
gcccacagagaagctcacctcaaggatacatcgttatgcgcc

SEQ ID NO: 845 - DNA, 42 bp, Artificial Sequence
  Synthetic
ggtggtctatggcactctgctgtcctcgactcgtttgatcct

SEQ ID NO: 846 - DNA, 40 bp, Artificial Sequence
  Synthetic
gccggctattgaccctccgacaacagctggctgataaggt

SEQ ID NO: 847 - DNA, 42 bp, Artificial Sequence
  Synthetic
acccgcacggataagtctggatagtcttctgtgtagacccgt

SEQ ID NO: 848 - DNA, 38 bp, Artificial Sequence
  Synthetic
tggcacggcatctgcgatagccctcacagaacgcctct

SEQ ID NO: 849 - DNA, 42 bp, Artificial Sequence
  Synthetic
tggtacagtcacgggtgaggtaaacatcatgctcgtccaacg

SEQ ID NO: 850 - DNA, 40 bp, Artificial Sequence
  Synthetic
cgctcccaccctgttgagtttggtatggcagctttttccc

SEQ ID NO: 851 - DNA, 44 bp, Artificial Sequence
  Synthetic
gcaatgtaggcttcaatgttctcatgtcaaaacagaaagacgcc

SEQ ID NO: 852 - DNA, 45 bp, Artificial Sequence
  Synthetic
gtcaattcaacaactgcatggtagggattccattgggatcagact

SEQ ID NO: 853 - DNA, 45 bp, Artificial Sequence
  Synthetic
cgatgtgcttttccattatccattttctgctgaattgttcactct

SEQ ID NO: 854 - DNA, 43 bp, Artificial Sequence
  Synthetic
ggagtgatgcttctgcgatggtaaaagcaaactacaatgatgc

SEQ ID NO: 855 - DNA, 46 bp, Artificial Sequence
  Synthetic
ctaaccatagcagagaccaaactggtattaatgatggcatgctttg

SEQ ID NO: 856 - DNA, 46 bp, Artificial Sequence
  Synthetic
tggttttttgggtcttttcactcttacaccctttctttttcgaatt

SEQ ID NO: 857 - DNA, 42 bp, Artificial Sequence
  Synthetic
gccaaatcttgtaagcatacaggaaacgtttggggtatcgtt

SEQ ID NO: 858 - DNA, 39 bp, Artificial Sequence
  Synthetic
acacctgttccacaagtgtgagaggaggagcagcaagaa

SEQ ID NO: 859 - DNA, 50 bp, Artificial Sequence
  Synthetic
tcttctaggattccactgtcatcaaactttatcatctagaaagcaaactc

SEQ ID NO: 860 - DNA, 47 bp, Artificial Sequence
  Synthetic
ccaaacacatatgaagcatttccaaaaaattcgtagtgtacctgttg

SEQ ID NO: 861 - DNA, 47 bp, Artificial Sequence
  Synthetic
gaaggttctgttggcacatctatatagatagtaaacatagacagcct

SEQ ID NO: 862 - DNA, 43 bp, Artificial Sequence
  Synthetic
cattgtattcagaaactaccagtgccacgtcagcaaggcatta

SEQ ID NO: 863 - DNA, 43 bp, Artificial Sequence
  Synthetic
gcacagtccattctccagttttacttacagagccatcagggga

SEQ ID NO: 864 - DNA, 44 bp, Artificial Sequence
  Synthetic
gcatttgcccctcctctaattatatctgtctagacttagagcgt

SEQ ID NO: 865 - DNA, 42 bp, Artificial Sequence
  Synthetic
tgccatctggaattactctgctaggtacaggaggttctatgg

SEQ ID NO: 866 - DNA, 45 bp, Artificial Sequence
  Synthetic
cgtatcctattcaaaccttgactgaaatcaaagggaggagtttca

SEQ ID NO: 867 - DNA, 43 bp, Artificial Sequence
  Synthetic
agcctcagtaaatgctgtattctgtgttgatcagcttgccgaa

SEQ ID NO: 868 - DNA, 48 bp, Artificial Sequence
  Synthetic
gaccaacaccttagattgatctacattcattctgctactgatagactc

SEQ ID NO: 869 - DNA, 48 bp, Artificial Sequence
  Synthetic
ccttgttctcgctttccataaaagaatggcctgatttacttaaaatgt

SEQ ID NO: 870 - DNA, 50 bp, Artificial Sequence
  Synthetic
cctgtagtggaattttacaaagctgaacattatctcagacatgtagaaga

SEQ ID NO: 871 - DNA, 47 bp, Artificial Sequence
  Synthetic
actcaagctgaagtgtgcaaattgattactactgtgaaactactctg

SEQ ID NO: 872 - DNA, 44 bp, Artificial Sequence
  Synthetic
acgttatctccctcttaagtttcctcctcaatgggaatggagat

SEQ ID NO: 873 - DNA, 43 bp, Artificial Sequence
  Synthetic
cgcatttgaaaaaaagacgatcaagttgccgcgagtatcattg

SEQ ID NO: 874 - DNA, 44 bp, Artificial Sequence
  Synthetic
tcatctgatatagcatcccctgtttggtacgggatgtaatggat

SEQ ID NO: 875 - DNA, 46 bp, Artificial Sequence
  Synthetic
ctgctgagtttccacttcagtataaaaaggagattatttgaaagcg

SEQ ID NO: 876 - DNA, 43 bp, Artificial Sequence
  Synthetic
tgtgttagtattttgtcctgacacagaggacgaggacaaggaa

SEQ ID NO: 877 - DNA, 45 bp, Artificial Sequence
  Synthetic
gcacttccactgtatatccatgtttacattacaagacgttagcct

SEQ ID NO: 878 - DNA, 46 bp, Artificial Sequence
  Synthetic
aggtgtggtatcagttgaagtagtaaacatctgtaccttccattcc

SEQ ID NO: 879 - DNA, 46 bp, Artificial Sequence
  Synthetic
gcttacaaccttagatactgggacatttttcagatgtctctttggc

SEQ ID NO: 880 - DNA, 40 bp, Artificial Sequence
  Synthetic
ctacacaggcccaaaccagcaagtttggttttcctgacac

SEQ ID NO: 881 - DNA, 42 bp, Artificial Sequence
  Synthetic
tcaccatcctgaataactgtgtttaaggatccccatgtacca

SEQ ID NO: 882 - DNA, 50 bp, Artificial Sequence
  Synthetic
cagtagacccagagcctttaatgtattagacatttatttaatagggctgg

SEQ ID NO: 883 - DNA, 49 bp, Artificial Sequence
  Synthetic
ctgatctaggtctgcagaaaactttccccttaaaaaatacactttttgg

SEQ ID NO: 884 - DNA, 43 bp, Artificial Sequence
  Synthetic
gcaggaaacgtacaagtttaaaccacggttgcatgctttttgg

SEQ ID NO: 885 - DNA, 47 bp, Artificial Sequence
  Synthetic
tgtgcataactgtggtaactttctgcaaaagagaactgcaatgtttc

SEQ ID NO: 886 - DNA, 47 bp, Artificial Sequence
  Synthetic
tctttgctttttgtccagatgtcttgtgtattaactgtcaaaagcca

SEQ ID NO: 887 - DNA, 43 bp, Artificial Sequence
  Synthetic
gttctgcttgtccagctggaactgttatgagcaattaaatgac

SEQ ID NO: 888 - DNA, 44 bp, Artificial Sequence
  Synthetic
tcgattttcggatcttccccatatgcttcaatccaatgatcgtc

SEQ ID NO: 889 - DNA, 45 bp, Artificial Sequence
  Synthetic
agtcatacagatccgggagaaattggtgaatagtatctgcaacac

SEQ ID NO: 890 - DNA, 42 bp, Artificial Sequence
  Synthetic
tcttcatgttctttgtccttggaaggtgctagcagaacttca

SEQ ID NO: 891 - DNA, 41 bp, Artificial Sequence
  Synthetic
ccgtctcatgcttgcaatgtagaacttgatgaaatagggga

SEQ ID NO: 892 - DNA, 44 bp, Artificial Sequence
  Synthetic
cttgggtcggtaagggaaaattcatttgaggaatgataccgacg

SEQ ID NO: 893 - DNA, 47 bp, Artificial Sequence
  Synthetic
tcaaagaattctttggtcaggtcttcagattgagagcatgattgaag

SEQ ID NO: 894 - DNA, 46 bp, Artificial Sequence
  Synthetic
ttctctgtgtgaccattttcttgggattacaacacatttccagagg

SEQ ID NO: 895 - DNA, 41 bp, Artificial Sequence
  Synthetic
gctttcttctcattccctccgaccgaggagcatctgtgaga

SEQ ID NO: 896 - DNA, 44 bp, Artificial Sequence
  Synthetic
tgtgtccgtaacttcatactcttactgttctcaaacaagatggc

SEQ ID NO: 897 - DNA, 38 bp, Artificial Sequence
  Synthetic
tctgaggattggagtccgtcatctcgggcagaagaagt

SEQ ID NO: 898 - DNA, 45 bp, Artificial Sequence
  Synthetic
ctggtccaagatcgttgtttatcatagtgtccgggattaatgagt

SEQ ID NO: 899 - DNA, 43 bp, Artificial Sequence
  Synthetic
atcaattcccatttcaagcagacctagggccaaacctgtacaa

SEQ ID NO: 900 - DNA, 45 bp, Artificial Sequence
  Synthetic
caagagaaattcccaccagagtttgttctaacacgaacgtttacg

SEQ ID NO: 901 - DNA, 43 bp, Artificial Sequence
  Synthetic
tcagatacctcgaaagactcctgatttgcttgttgtcagtgct

SEQ ID NO: 902 - DNA, 45 bp, Artificial Sequence
  Synthetic
cctcagcaggtatatcctcataacaagagcagccaaatataggtg

SEQ ID NO: 903 - DNA, 43 bp, Artificial Sequence
  Synthetic
tgcctcatccacaatataccaatcactgtgtgccattcgacac

SEQ ID NO: 904 - DNA, 38 bp, Artificial Sequence
  Synthetic
ggcagtctctgtggcacttgcagaacgagcaggaccta

SEQ ID NO: 905 - DNA, 43 bp, Artificial Sequence
  Synthetic
ggcaagtagagcagatcttgtattagtacagtctctgggaggt

SEQ ID NO: 906 - DNA, 46 bp, Artificial Sequence
  Synthetic
aagtctaactggctccaaaaccttgcattttccttaacagacatca

SEQ ID NO: 907 - DNA, 43 bp, Artificial Sequence
  Synthetic
tgaggccactaagataaagagtcatcaagttgtgccttccctt

SEQ ID NO: 908 - DNA, 42 bp, Artificial Sequence
  Synthetic
cgatttcgggtggtgtctcgacaggacaatccacccaaactg

SEQ ID NO: 909 - DNA, 47 bp, Artificial Sequence
  Synthetic
cgtcgtttacgtactcttaacatgattctgttattttaggggcattt

SEQ ID NO: 910 - DNA, 43 bp, Artificial Sequence
  Synthetic
tgggaacgtgtgattgtacgtgatctagttcagctgttcttca

SEQ ID NO: 911 - DNA, 43 bp, Artificial Sequence
  Synthetic
agaaacgtgtaggcctttcctaactgagttcacaactagtaca

SEQ ID NO: 912 - DNA, 47 bp, Artificial Sequence
  Synthetic
gccatcatttgaggagatagagctagaagtggtgttactataggtgc

SEQ ID NO: 913 - DNA, 47 bp, Artificial Sequence
  Synthetic
atgaactaatttgcgacgtttacgtttagataattcaacaggggatt

SEQ ID NO: 914 - DNA, 44 bp, Artificial Sequence
  Synthetic
ctggaaatctaacacgaaagactctccgtgcaaatgataacact

SEQ ID NO: 915 - DNA, 41 bp, Artificial Sequence
  Synthetic
ttgaccagtgttccccagtgcaaaatgttgcttttgatgca

SEQ ID NO: 916 - DNA, 40 bp, Artificial Sequence
  Synthetic
cagtttttggaacagaacgctgttcctttaggccgcaaat

SEQ ID NO: 917 - DNA, 48 bp, Artificial Sequence
  Synthetic
gtcatgaggctatatgactaggcaattgttaataaacgtttatgctgc

SEQ ID NO: 918 - DNA, 45 bp, Artificial Sequence
  Synthetic
cagatgctctgatttctgtggcgatcatatgaacaaatggagact

SEQ ID NO: 919 - DNA, 47 bp, Artificial Sequence
  Synthetic
cctccagaaatttcggtcattgatgaacaatagcaatggagttaatc

SEQ ID NO: 920 - DNA, 41 bp, Artificial Sequence
  Synthetic
gtcatgcccacttgctactgcatgaggggatcagttgcaca

SEQ ID NO: 921 - DNA, 45 bp, Artificial Sequence
  Synthetic
tggacccctcttgtggaaagcaagtttcataagaggaaagaaagt

SEQ ID NO: 922 - DNA, 48 bp, Artificial Sequence
  Synthetic
gagaacatgaaataaagggctctctaagacaatagcataagaattggt

SEQ ID NO: 923 - DNA, 44 bp, Artificial Sequence
  Synthetic
cgttgtattttaatacagccactgccatgggctggctaacaatc

SEQ ID NO: 924 - DNA, 45 bp, Artificial Sequence
  Synthetic
tctgcacacacacatcactttgaattctcactatgaggaatgttc

SEQ ID NO: 925 - DNA, 43 bp, Artificial Sequence
  Synthetic
gatcccaaatcatctcaaacccattggtgtttggataggaagg

SEQ ID NO: 926 - DNA, 43 bp, Artificial Sequence
  Synthetic
gagttttcaaagatccctgggtgcagattgtgtattggaagca

SEQ ID NO: 927 - DNA, 43 bp, Artificial Sequence
  Synthetic
gccttcttttcattccctccgatactttgtcgaaacactagcg

SEQ ID NO: 928 - DNA, 48 bp, Artificial Sequence
  Synthetic
ctttccctaatcttgccatcttgtgtttagaaatgtcttaagcattgc

SEQ ID NO: 929 - DNA, 41 bp, Artificial Sequence
  Synthetic
gtccgtcccaccagtatgtgagtcttaggagtttcaatcct

SEQ ID NO: 930 - DNA, 42 bp, Artificial Sequence
  Synthetic
accaatgctcatgtcagccgatagccaacttcagtatggagc

SEQ ID NO: 931 - DNA, 45 bp, Artificial Sequence
  Synthetic
atcctcaaagcgcgccatagcgaaaacggtgtatataaaagatgt

SEQ ID NO: 932 - DNA, 44 bp, Artificial Sequence
  Synthetic
tgtctccatacacagagtctgaatatgctgcatgccataaatgt

SEQ ID NO: 933 - DNA, 48 bp, Artificial Sequence
  Synthetic
ttggggctctaaatgcaatacaaaatattaagtatgcatggacctaag

SEQ ID NO: 934 - DNA, 39 bp, Artificial Sequence
  Synthetic
gcatcattgtggacctcctgaacattttgtgaacaggca

SEQ ID NO: 935 - DNA, 38 bp, Artificial Sequence
  Synthetic
atacattgccgccatgttcgtgttctgaagtggaagca

SEQ ID NO: 936 - DNA, 43 bp, Artificial Sequence
  Synthetic
acatctaaatcgtatccactgtgacgtgccacaatgtgcaaac

SEQ ID NO: 937 - DNA, 44 bp, Artificial Sequence
  Synthetic
atgttcccttgctgcaaagaatgacatagacagccaaatacagt

SEQ ID NO: 938 - DNA, 45 bp, Artificial Sequence
  Synthetic
ccatgttcctgcatcagtcatatggcaacaaagacaattgtatga

SEQ ID NO: 939 - DNA, 40 bp, Artificial Sequence
  Synthetic
ggtgctggaatacggtgagggcggtatccgctactcagct

SEQ ID NO: 940 - DNA, 48 bp, Artificial Sequence
  Synthetic
tgccaggtggatgatatatctctatacagtttaaaatgtttacggtac

SEQ ID NO: 941 - DNA, 40 bp, Artificial Sequence
  Synthetic
ataccaatacccatgcatacgctatgtgtgctgccatgtc

SEQ ID NO: 942 - DNA, 50 bp, Artificial Sequence
  Synthetic
aacatcactacgaggatcaaatgtttcctctttaattacatatgacaacc

SEQ ID NO: 943 - DNA, 41 bp, Artificial Sequence
  Synthetic
agggtccatgtcatctgcatattgcagcctttagtatctgc

SEQ ID NO: 944 - DNA, 42 bp, Artificial Sequence
  Synthetic
cacagcccaaaatacataactgtgtgaggacgttagggacaa

SEQ ID NO: 945 - DNA, 44 bp, Artificial Sequence
  Synthetic
tgctctattccaaaaatgcctagcgggattccatgtttttttgc

SEQ ID NO: 946 - DNA, 45 bp, Artificial Sequence
  Synthetic
gagactgtgtagaagcacatattgttgtttgctggcataatcaat

SEQ ID NO: 947 - DNA, 42 bp, Artificial Sequence
  Synthetic
tgctgtaaggtgtgcagttttaatttgtgtttgtggtatggg

SEQ ID NO: 948 - DNA, 43 bp, Artificial Sequence
  Synthetic
cggtataagggaaagttgtgcttatggatgtcaatccgacctt

SEQ ID NO: 949 - DNA, 45 bp, Artificial Sequence
  Synthetic
cgagttttcaaaaataccaggatggacagattgtgtattggaagc

SEQ ID NO: 950 - DNA, 38 bp, Artificial Sequence
  Synthetic
tctcattgcctccaactggcttgagacactggcaagga

SEQ ID NO: 951 - DNA, 42 bp, Artificial Sequence
  Synthetic
ccatcccaccagtaagtagtcttgttaggcgtctccatcctg

SEQ ID NO: 952 - DNA, 39 bp, Artificial Sequence
  Synthetic
ctgactcgttgctcccagactttgttgccaatttcagca

SEQ ID NO: 953 - DNA, 47 bp, Artificial Sequence
  Synthetic
actgctggggaagaatttttcaaattgaatacaagtcaaagaggagt

SEQ ID NO: 954 - DNA, 36 bp, Artificial Sequence
  Synthetic
acaggatccaccgcctttcgcgccccaccacctcaa

SEQ ID NO: 955 - DNA, 39 bp, Artificial Sequence
  Synthetic
ggagcccacaacaatagtgggctcggggacagctatgcg

SEQ ID NO: 956 - DNA, 37 bp, Artificial Sequence
  Synthetic
ggctccgccaaacttcccaatggagttgctacgcggc

SEQ ID NO: 957 - DNA, 38 bp, Artificial Sequence
  Synthetic
gtgcctcgcccaccactaaattggtgttggagcaacgc

SEQ ID NO: 958 - DNA, 42 bp, Artificial Sequence
  Synthetic
gccgacactgtgccaagaacctccgagagggaactgtgtgga

SEQ ID NO: 959 - DNA, 42 bp, Artificial Sequence
  Synthetic
gctcacagtcatgttgaccccaaaggccaaaatacctgggtc

SEQ ID NO: 960 - DNA, 40 bp, Artificial Sequence
  Synthetic
ggcggccctttttgacatggatgcgtggacgtctgcaatg

SEQ ID NO: 961 - DNA, 41 bp, Artificial Sequence
  Synthetic
ggcggcgttactgactgaatcaccccactgtcaagcctttg

SEQ ID NO: 962 - DNA, 41 bp, Artificial Sequence
  Synthetic
agcatctggcagtgccgagaactggggttcctagcagtgtg

SEQ ID NO: 963 - DNA, 39 bp, Artificial Sequence
  Synthetic
gcggttgcctatgggagtgtctggtgcgtgttctaccaa

SEQ ID NO: 964 - DNA, 35 bp, Artificial Sequence
  Synthetic
ctggcttcacagcgacgggcagcggcagagcggtt

SEQ ID NO: 965 - DNA, 39 bp, Artificial Sequence
  Synthetic
ctggttgaccaccacctggctcatggcactaacgggagg

SEQ ID NO: 966 - DNA, 39 bp, Artificial Sequence
  Synthetic
gacccgattgccacgatgcaatcttgtgtgacgagggcc

SEQ ID NO: 967 - DNA, 42 bp, Artificial Sequence
  Synthetic
catgcccagaacactaacgccgggccatgacgtggtgatctg

SEQ ID NO: 968 - DNA, 41 bp, Artificial Sequence
  Synthetic
cgtcctctcgcactcaacctttttgcaagatacgccactgg

SEQ ID NO: 969 - DNA, 40 bp, Artificial Sequence
  Synthetic
ccagcgcggagtagtagtgtcctgaggatgcaacgcaggg

SEQ ID NO: 970 - DNA, 38 bp, Artificial Sequence
  Synthetic
ggcccccccacctgagtaataatgggcccccagctgat

SEQ ID NO: 971 - DNA, 35 bp, Artificial Sequence
  Synthetic
tcacaggggtagcgctccccggcgaggagtcccaa

SEQ ID NO: 972 - DNA, 41 bp, Artificial Sequence
  Synthetic
ccaccccgagaggtggattccttttcaccaatggtcgctcg

SEQ ID NO: 973 - DNA, 40 bp, Artificial Sequence
  Synthetic
gccaggcaggagatgatgcattgacctcctttctggcaag

SEQ ID NO: 974 - DNA, 38 bp, Artificial Sequence
  Synthetic
agagggattttgaggcgcgggccttggtcgctacctgt

SEQ ID NO: 975 - DNA, 37 bp, Artificial Sequence
  Synthetic
cgtcaccgtaaccgtgccagccagcttggttgcgcag

SEQ ID NO: 976 - DNA, 41 bp, Artificial Sequence
  Synthetic
catcctccagagcctgcaaggttgaggctatagggtctgca

SEQ ID NO: 977 - DNA, 41 bp, Artificial Sequence
  Synthetic
caatgtcccccactgtgtctgtatccgtgatgaggtgaggg

SEQ ID NO: 978 - DNA, 42 bp, Artificial Sequence
  Synthetic
acagttatcgcagccggatgttccaaaccagcgtgtaaaagc

SEQ ID NO: 979 - DNA, 42 bp, Artificial Sequence
  Synthetic
gccgagcaacactcagctgtatttaaggctgctttggctgac

SEQ ID NO: 980 - DNA, 41 bp, Artificial Sequence
  Synthetic
atccggtgatgaaccacttcggacccagtggtgagatacgt

SEQ ID NO: 981 - DNA, 49 bp, Artificial Sequence
  Synthetic
tgccacagaaattgcaaggtattatacctttaagtattagagacttagc

SEQ ID NO: 982 - DNA, 42 bp, Artificial Sequence
  Synthetic
attcccttccaggcgttccttagaaaagttagattgctgtgg

SEQ ID NO: 983 - DNA, 50 bp, Artificial Sequence
  Synthetic
tgctccagttcagtatcatctaacaacaattatttgagagagatacagac

SEQ ID NO: 984 - DNA, 43 bp, Artificial Sequence
  Synthetic
gcagtgtaatgtatatctacgtcccgtggaggtaccggctatt

SEQ ID NO: 985 - DNA, 46 bp, Artificial Sequence
  Synthetic
ggacccagatatagtcacaatgccatgatgatctatttgaaagctc

SEQ ID NO: 986 - DNA, 48 bp, Artificial Sequence
  Synthetic
tggtatgctatatctgcttcgtctaggcaagtacttttgatttttcag

SEQ ID NO: 987 - DNA, 47 bp, Artificial Sequence
  Synthetic
acactctacccttcaacactcttattgcattttaatttatggtcctc

SEQ ID NO: 988 - DNA, 48 bp, Artificial Sequence
  Synthetic
gccttgtaaaaaaagatttccagcttatgaaagcagataatacacctc

SEQ ID NO: 989 - DNA, 35 bp, Artificial Sequence
  Synthetic
gtcgcgggggtggtgtttgcagctccacgcctcca

SEQ ID NO: 990 - DNA, 38 bp, Artificial Sequence
  Synthetic
ctccccttctgcaggtggttgtcgggcccttacaagca

SEQ ID NO: 991 - DNA, 42 bp, Artificial Sequence
  Synthetic
agcttcttccagtaatcttccaaggagggtcacttcgatcag

SEQ ID NO: 992 - DNA, 43 bp, Artificial Sequence
  Synthetic
caggttgccataggccttatcaaggagagattttgatgaagcg

SEQ ID NO: 993 - DNA, 42 bp, Artificial Sequence
  Synthetic
gcccctcaggtacaggatggattctaactgagtccacaggcg

SEQ ID NO: 994 - DNA, 48 bp, Artificial Sequence
  Synthetic
ggttcttcaaagacatccagatcatttcgttttgcatttgataatcct

SEQ ID NO: 995 - DNA, 49 bp, Artificial Sequence
  Synthetic
tttctgcattattacgtgactctggcatactatacacaagacacaaagg

SEQ ID NO: 996 - DNA, 48 bp, Artificial Sequence
  Synthetic
ggatcaaaagatgtatcctgtctgtaaagatacagaaaacagtaatgc

SEQ ID NO: 997 - DNA, 49 bp, Artificial Sequence
  Synthetic
ccactaacagttgggaaatacatggcaaaaatcagttttacattccagg

SEQ ID NO: 998 - DNA, 43 bp, Artificial Sequence
  Synthetic
cgttttgttcctctattagacccttccaagctgggttacaaca

SEQ ID NO: 999 - DNA, 48 bp, Artificial Sequence
  Synthetic
tgggttggtacattcattgaaatgtgacaatatgtttactcatgcaga

SEQ ID NO: 1000 - DNA, 45 bp, Artificial Sequence
  Synthetic
acataaggttctcttgtcacccaaactttctccaaggacaactca

SEQ ID NO: 1001 - DNA, 41 bp, Artificial Sequence
  Synthetic
ccccagtgacacaaacatgtaacatagcatggtccagctca

SEQ ID NO: 1002 - DNA, 38 bp, Artificial Sequence
  Synthetic
ataccgggggtaacaggagccacattggtccactgtca

SEQ ID NO: 1003 - DNA, 40 bp, Artificial Sequence
  Synthetic
agcgcgaatctttcttgattgtggtgggcctttgacaatg

SEQ ID NO: 1004 - DNA, 47 bp, Artificial Sequence
  Synthetic
ggtgttttatcgattgttccggtatgcttcgagcactaataaaactg

SEQ ID NO: 1005 - DNA, 44 bp, Artificial Sequence
  Synthetic
gtccagctttgaccatcatctgagagataaagaagagcgtctac

SEQ ID NO: 1006 - DNA, 47 bp, Artificial Sequence
  Synthetic
tgggattgactttgtttttgtctgatgattcaatggcaaagaaaacc

SEQ ID NO: 1007 - DNA, 43 bp, Artificial Sequence
  Synthetic
ccgaaagtggtgcatagtttcttaaacctttaagttttggcgc

SEQ ID NO: 1008 - DNA, 48 bp, Artificial Sequence
  Synthetic
ctacagcaatttctccaatgacaacaattgattgttgttatgctgaac

SEQ ID NO: 1009 - DNA, 43 bp, Artificial Sequence
  Synthetic
gctctccaatcaataattgctcaaacttgtggagcaggtgtac

SEQ ID NO: 1010 - DNA, 45 bp, Artificial Sequence
  Synthetic
gttcattaaacaatgccagggaattactgatggatctgatgtctc

SEQ ID NO: 1011 - DNA, 43 bp, Artificial Sequence
  Synthetic
tggctcatcatggagattgttatcagtcatgagtcagctgcta

SEQ ID NO: 1012 - DNA, 47 bp, Artificial Sequence
  Synthetic
cacccaggataggttacatcatctaacagatgtagtacattttggtt

SEQ ID NO: 1013 - DNA, 48 bp, Artificial Sequence
  Synthetic
tggatcttctttaggctctagatcatactaataaaacctggacatgtt

SEQ ID NO: 1014 - DNA, 41 bp, Artificial Sequence
  Synthetic
tcgtcttggggtttgcggtacctccggatctcttcaagggt

SEQ ID NO: 1015 - DNA, 47 bp, Artificial Sequence
  Synthetic
tgatgtggtgtctgttacaatgtttaccagatacaatagtgacaact

SEQ ID NO: 1016 - DNA, 48 bp, Artificial Sequence
  Synthetic
tgctagtagttggtaagtcctcaattaacatttggtgaggaaatacca

SEQ ID NO: 1017 - DNA, 48 bp, Artificial Sequence
  Synthetic
tgcgtttcagtacactaggatgtattacctctaatacctggaagatcc

SEQ ID NO: 1018 - DNA, 47 bp, Artificial Sequence
  Synthetic
tgtttggatctggaaattgtagtctttaccgatgagtctaaagtagc

SEQ ID NO: 1019 - DNA, 43 bp, Artificial Sequence
  Synthetic
ccccatcctctgcttgcttttaataagtatgtggatgctgaga

SEQ ID NO: 1020 - DNA, 45 bp, Artificial Sequence
  Synthetic
aggccaaatactgatttcattcgtatggaaatgcaaactttgagc

SEQ ID NO: 1021 - DNA, 41 bp, Artificial Sequence
  Synthetic
tggctcctaatgccctatgtaaaagtggctcacttgtctcc

SEQ ID NO: 1022 - DNA, 50 bp, Artificial Sequence
  Synthetic
gctgtcctctttgatacaaaaatcgtaaacttgagtgaaaagttaactgg

SEQ ID NO: 1023 - DNA, 42 bp, Artificial Sequence
  Synthetic
gggaatgtggtgcttatggcagatgtcaatccgactctactg

SEQ ID NO: 1024 - DNA, 41 bp, Artificial Sequence
  Synthetic
tcaaagatacctgggtgggattacaaacagactgtgtcctg

SEQ ID NO: 1025 - DNA, 46 bp, Artificial Sequence
  Synthetic
ggtcatgttgtctcttactctccttaggatgtgatggaatcaatgg

SEQ ID NO: 1026 - DNA, 42 bp, Artificial Sequence
  Synthetic
attacccccaaccggaagtccgttgaaactttagctagaagc

SEQ ID NO: 1027 - DNA, 45 bp, Artificial Sequence
  Synthetic
tctcttactctcgaacatgtatcctcatcgcaccaataatgttct

SEQ ID NO: 1028 - DNA, 41 bp, Artificial Sequence
  Synthetic
gcccatcccaccagtatgttgagtctcggtactgaatcttg

SEQ ID NO: 1029 - DNA, 45 bp, Artificial Sequence
  Synthetic
ccaaggtcattgtttatcatgttgttggagtgtctggaataaacg

SEQ ID NO: 1030 - DNA, 44 bp, Artificial Sequence
  Synthetic
ggatgtgaaggttccggatattgtaccaatcaagggcaggacta

SEQ ID NO: 1031 - DNA, 40 bp, Artificial Sequence
  Synthetic
ctcgaacaagttgcagcacttagccaaaggggaattcttg

SEQ ID NO: 1032 - DNA, 41 bp, Artificial Sequence
  Synthetic
tcagtctccttcaaatctgtgctagacgtgacaaccgacta

SEQ ID NO: 1033 - DNA, 48 bp, Artificial Sequence
  Synthetic
tcagattctgctatgtcatcagtttcctgatattgttttagaagagct

SEQ ID NO: 1034 - DNA, 38 bp, Artificial Sequence
  Synthetic
atgcaccgctgaaagtctcgaagttttatgccaccccg

SEQ ID NO: 1035 - DNA, 43 bp, Artificial Sequence
  Synthetic
gctagtgacagaggaatgaatagttttcaacctgatgccactg

SEQ ID NO: 1036 - DNA, 42 bp, Artificial Sequence
  Synthetic
gcaatttagcatcacccctgtatcgttgtagctctgcatgga

SEQ ID NO: 1037 - DNA, 46 bp, Artificial Sequence
  Synthetic
tccaattcccaaattgccaaagtataatttgaaggcaacacaatcg

SEQ ID NO: 1038 - DNA, 44 bp, Artificial Sequence
  Synthetic
atcagttccacctgctgcagtcaatagttccattagtagaaggc

SEQ ID NO: 1039 - DNA, 48 bp, Artificial Sequence
  Synthetic
aaacgttccaaaggtatctcttcattgttaatgtattagttgacccca

SEQ ID NO: 1040 - DNA, 46 bp, Artificial Sequence
  Synthetic
cccgctcaaagtataggctcatgttcagtttgaatatagaaatccc

SEQ ID NO: 1041 - DNA, 43 bp, Artificial Sequence
  Synthetic
gcgtgcatgaaagtaaacatcagttaagtactcctgttgccag

SEQ ID NO: 1042 - DNA, 48 bp, Artificial Sequence
  Synthetic
gatgaccagtagatccaacacctattggaaactagtaggtatagaagt

SEQ ID NO: 1043 - DNA, 45 bp, Artificial Sequence
  Synthetic
aggaaagtttgcattaccaaatcctaagtgtcctccaatacaact

SEQ ID NO: 1044 - DNA, 48 bp, Artificial Sequence
  Synthetic
cgttacaaagcagattaacaggcaaaggttgatattaaggacattgtc

SEQ ID NO: 1045 - DNA, 45 bp, Artificial Sequence
  Synthetic
actgtccacaaatagacgtcttttaagatgtagatttgagtccgc

SEQ ID NO: 1046 - DNA, 40 bp, Artificial Sequence
  Synthetic
ctggtgtccccgtcgctttggacgaagacccagatcatcc

SEQ ID NO: 1047 - DNA, 43 bp, Artificial Sequence
  Synthetic
agcgatatctccagcattttaatgtctacaagaagaggctcgg

SEQ ID NO: 1048 - DNA, 42 bp, Artificial Sequence
  Synthetic
acaggttcaaccactatgtttggtggaggtggtggaagagtc

SEQ ID NO: 1049 - DNA, 38 bp, Artificial Sequence
  Synthetic
tataggggctgctggttgcacccgctgtttctacaact

SEQ ID NO: 1050 - DNA, 46 bp, Artificial Sequence
  Synthetic
gctctactaaaagctcttggtgtaggaatttaatattgaagagcca

SEQ ID NO: 1051 - DNA, 44 bp, Artificial Sequence
  Synthetic
catgtgagttactgaaatcctctgtgaaaacagtgatgcacctt

SEQ ID NO: 1052 - DNA, 47 bp, Artificial Sequence
  Synthetic
ggcagccaatatgacatctgtaaagtattacatcccagtcatatccc

SEQ ID NO: 1053 - DNA, 45 bp, Artificial Sequence
  Synthetic
accctattgcaacacgtttacgagacggtttgtttatcaaattgg

SEQ ID NO: 1054 - DNA, 46 bp, Artificial Sequence
  Synthetic
caggatatacctatgaagggtgggttttccaatcttctcatctgac

SEQ ID NO: 1055 - DNA, 47 bp, Artificial Sequence
  Synthetic
gcgacaaaaggtacaaggtagtctactactcctgtaactattaccga

SEQ ID NO: 1056 - DNA, 44 bp, Artificial Sequence
  Synthetic
caaactctgcacactgaatctattcacgaagttttgtcaccaga

SEQ ID NO: 1057 - DNA, 45 bp, Artificial Sequence
  Synthetic
ccactgttctcaaacaatcgtctttgcagacatagatttgagtcc

SEQ ID NO: 1058 - DNA, 48 bp, Artificial Sequence
  Synthetic
tgtagcatttccagttgtacacttatattcaaattatgtgtgaccctc

SEQ ID NO: 1059 - DNA, 49 bp, Artificial Sequence
  Synthetic
gttgaatccaaaaatgactgtgactgtattcactaatacgttttctgga

SEQ ID NO: 1060 - DNA, 39 bp, Artificial Sequence
  Synthetic
gcttcttgcacagcatcgaactcaccagaagaagagcag

SEQ ID NO: 1061 - DNA, 46 bp, Artificial Sequence
  Synthetic
agaggtaacagagggagaaatagttttgatgaaaaagcacaaacct

SEQ ID NO: 1062 - DNA, 50 bp, Artificial Sequence
  Synthetic
caattgtctttgtgcagtgtctttaatgggtagattatgatagtagtagc

SEQ ID NO: 1063 - DNA, 42 bp, Artificial Sequence
  Synthetic
ccttcatttagaggcaccaaagctggatcctttgggacctac

SEQ ID NO: 1064 - DNA, 43 bp, Artificial Sequence
  Synthetic
tgtacttgttgtacccgcctattctaaggcttttcaaagagca

SEQ ID NO: 1065 - DNA, 46 bp, Artificial Sequence
  Synthetic
agtggttgtgctatatctgttacaaatcacaatgccaactattcct

SEQ ID NO: 1066 - DNA, 42 bp, Artificial Sequence
  Synthetic
ggatctggcagcataacccttaatacaaggttgtggtgccta

SEQ ID NO: 1067 - DNA, 46 bp, Artificial Sequence
  Synthetic
tccccataggattcctttgtcatttgtgtacctttggacatagtgg

SEQ ID NO: 1068 - DNA, 44 bp, Artificial Sequence
  Synthetic
ggaacaaatgctaaattccagtcttttcctctggaacctgatgt

SEQ ID NO: 1069 - DNA, 44 bp, Artificial Sequence
  Synthetic
caatgaaacattaaggtgcaagcatacatgttttgagcctctcc

SEQ ID NO: 1070 - DNA, 38 bp, Artificial Sequence
  Synthetic
gcagttaccactcccggtacacagtctttggctgcaac

SEQ ID NO: 1071 - DNA, 42 bp, Artificial Sequence
  Synthetic
aggcagtcccccgtgatagtctccatctcgggggtctctagc

SEQ ID NO: 1072 - DNA, 36 bp, Artificial Sequence
  Synthetic
gacgcaatggacccgagggatgctctggggcacaca

SEQ ID NO: 1073 - DNA, 37 bp, Artificial Sequence
  Synthetic
gcgggagtcgtatctggcgattggggctggacgttcg

SEQ ID NO: 1074 - DNA, 37 bp, Artificial Sequence
  Synthetic
ctggacaaggtcgccatctgcgccacgtacgcgctgt

SEQ ID NO: 1075 - DNA, 39 bp, Artificial Sequence
  Synthetic
ccccctgccttacgtggtctttgttggtgttgacgacgg

SEQ ID NO: 1076 - DNA, 35 bp, Artificial Sequence
  Synthetic
agagccaggaccaggacgcgccacgaccagctgct

SEQ ID NO: 1077 - DNA, 40 bp, Artificial Sequence
  Synthetic
cacgcctacctgaaggtgaccccgtaagcacggggagggt

SEQ ID NO: 1078 - DNA, 35 bp, Artificial Sequence
  Synthetic
agacggcgtccctggagtctctggcggacggaaca

SEQ ID NO: 1079 - DNA, 41 bp, Artificial Sequence
  Synthetic
ccaggtacatcagcagacaggcttctccctgttcaacccca

SEQ ID NO: 1080 - DNA, 40 bp, Artificial Sequence
  Synthetic
tcgtcgtcgaacggttttacgtcagttgccactgggtcct

SEQ ID NO: 1081 - DNA, 38 bp, Artificial Sequence
  Synthetic
gcggtggcgctgttcaagattgcttttggccatctgca

SEQ ID NO: 1082 - DNA, 39 bp, Artificial Sequence
  Synthetic
cccgatgacgtgctggacctatcgaacaccagctgcatg

SEQ ID NO: 1083 - DNA, 37 bp, Artificial Sequence
  Synthetic
cgtcagtttacggaccgcgtggtggtcacgtccccga

SEQ ID NO: 1084 - DNA, 40 bp, Artificial Sequence
  Synthetic
cgggaaaaactaccgcgctgatacactcgtgtccggagag

SEQ ID NO: 1085 - DNA, 40 bp, Artificial Sequence
  Synthetic
ggacgtaaaccaggtgggccagcagatcaccgtcctgttg

SEQ ID NO: 1086 - DNA, 37 bp, Artificial Sequence
  Synthetic
ctcgccgagctatgggcctcgttgtttcggcagcagc

SEQ ID NO: 1087 - DNA, 35 bp, Artificial Sequence
  Synthetic
ggagggcgtaacgttccgcttgctgggtcctgcgg

SEQ ID NO: 1088 - DNA, 35 bp, Artificial Sequence
  Synthetic
gcccgttaaccccccacgtgcccggggcttttcgt

SEQ ID NO: 1089 - DNA, 35 bp, Artificial Sequence
  Synthetic
actgtcgtcggtggcgctgacacaggcgggacacc

SEQ ID NO: 1090 - DNA, 38 bp, Artificial Sequence
  Synthetic
tcaaccccgccctacactacaccagaccccccgaagct

SEQ ID NO: 1091 - DNA, 36 bp, Artificial Sequence
  Synthetic
ttggtgagcgcctggacgctcgctgcttcctcgagt

SEQ ID NO: 1092 - DNA, 38 bp, Artificial Sequence
  Synthetic
cggtttgttggcgcctttatggcgcgcgggactttagc

SEQ ID NO: 1093 - DNA, 37 bp, Artificial Sequence
  Synthetic
ctcctgtgcaccctcacgttctcgggggtttcctccg

SEQ ID NO: 1094 - DNA, 40 bp, Artificial Sequence
  Synthetic
cttcctaacccagaccccggggggcgcgtcagatacagaa

SEQ ID NO: 1095 - DNA, 36 bp, Artificial Sequence
  Synthetic
cccacccccgaaccatgaacccgtggccgagatcgt

SEQ ID NO: 1096 - DNA, 37 bp, Artificial Sequence
  Synthetic
tcagaacgggccggtcgtcggccgattccttcatgca

SEQ ID NO: 1097 - DNA, 36 bp, Artificial Sequence
  Synthetic
aaggtcatccgaggcgccgtcccccaacactgacgt

SEQ ID NO: 1098 - DNA, 38 bp, Artificial Sequence
  Synthetic
aaggctgccgctttacgagggtctcctagttggcccgc

SEQ ID NO: 1099 - DNA, 35 bp, Artificial Sequence
  Synthetic
aatcgtggcgcggctcgtgcggggtttctggggct

SEQ ID NO: 1100 - DNA, 36 bp, Artificial Sequence
  Synthetic
gcgcctgatcgtggagacggctgtacgtcgctggcg

SEQ ID NO: 1101 - DNA, 38 bp, Artificial Sequence
  Synthetic
cgctttgtgactgagaacgtgctggagctggcccagga

SEQ ID NO: 1102 - DNA, 37 bp, Artificial Sequence
  Synthetic
ggctcgtggtccagtgcatcagttcacgaacgccgcg

SEQ ID NO: 1103 - DNA, 41 bp, Artificial Sequence
  Synthetic
gaccagatgctgcacgtgctgtgcatcggcaacaacaaagc

SEQ ID NO: 1104 - DNA, 40 bp, Artificial Sequence
  Synthetic
ctcgtgcgctttctggagctagctccggaaacttggtaca

SEQ ID NO: 1105 - DNA, 35 bp, Artificial Sequence
  Synthetic
accttcagtccggacgggcggtgggcggcagcatt

SEQ ID NO: 1106 - DNA, 35 bp, Artificial Sequence
  Synthetic
taagctccatcgcgggcggacccacgcccacatcc

SEQ ID NO: 1107 - DNA, 36 bp, Artificial Sequence
  Synthetic
tcctggcccagcagacccaggcgttgtagtgtgccc

SEQ ID NO: 1108 - DNA, 34 bp, Artificial Sequence
  Synthetic
tgctcgcgacgtcgggttgcagaccgcgccgttt

SEQ ID NO: 1109 - DNA, 35 bp, Artificial Sequence
  Synthetic
tcgaccgcctggccaaacgcgaatcgcggccagca

SEQ ID NO: 1110 - DNA, 35 bp, Artificial Sequence
  Synthetic
gtggcgtgaaactcccgcaacgaagccatacgcgc

SEQ ID NO: 1111 - DNA, 38 bp, Artificial Sequence
  Synthetic
ggagggggaaggaacgaaacactcttctgcgtgcccgt

SEQ ID NO: 1112 - DNA, 41 bp, Artificial Sequence
  Synthetic
gggaactcgggggtgatgaagtgacgtctgggaacacaggc

SEQ ID NO: 1113 - DNA, 41 bp, Artificial Sequence
  Synthetic
tcttggacatacggccgtcccaccatcacggactttcccct

SEQ ID NO: 1114 - DNA, 36 bp, Artificial Sequence
  Synthetic
gaggccaagctagccgaggctgcgctccatggcaga

SEQ ID NO: 1115 - DNA, 42 bp, Artificial Sequence
  Synthetic
acatcaccaccgtcagcaccttcaaactcgtgatcctccagc

SEQ ID NO: 1116 - DNA, 35 bp, Artificial Sequence
  Synthetic
accccaacgccatcgcctcacgtcgccgagcatcc

SEQ ID NO: 1117 - DNA, 39 bp, Artificial Sequence
  Synthetic
gcgacgcacatcaaggtgggcgatcagaaagcccccatt

SEQ ID NO: 1118 - DNA, 37 bp, Artificial Sequence
  Synthetic
cgagatgctgcgctccgatggatatggcgtcggaaga

SEQ ID NO: 1119 - DNA, 35 bp, Artificial Sequence
  Synthetic
ttccccaacggcaagcccgccgtccagaaccactg

SEQ ID NO: 1120 - DNA, 40 bp, Artificial Sequence
  Synthetic
atcaattccaaccggtgctgcgccgacagaaacccgttgt

SEQ ID NO: 1121 - DNA, 35 bp, Artificial Sequence
  Synthetic
agtacgtggaccaggcggtgcctcgcggttggtga

SEQ ID NO: 1122 - DNA, 39 bp, Artificial Sequence
  Synthetic
acaaggtaaccataggcggggctgaacagctgcaacggg

SEQ ID NO: 1123 - DNA, 36 bp, Artificial Sequence
  Synthetic
caccatcaaggtcccccccgttcggacggacacgcg

SEQ ID NO: 1124 - DNA, 36 bp, Artificial Sequence
  Synthetic
cggtaaaacagagcggggcgttcgaggcggaggtgg

SEQ ID NO: 1125 - DNA, 38 bp, Artificial Sequence
  Synthetic
cgcgagcggatctgctttcgagagcctcctcagcatcc

SEQ ID NO: 1126 - DNA, 39 bp, Artificial Sequence
  Synthetic
atcttgtcgcccacggccgactccatctttgtgctgtgc

SEQ ID NO: 1127 - DNA, 36 bp, Artificial Sequence
  Synthetic
ccacttacgggggccacatgtagtgcaggtgggcgg

SEQ ID NO: 1128 - DNA, 39 bp, Artificial Sequence
  Synthetic
gctcttaacgaggctctctgcggggcggcacacctatca

SEQ ID NO: 1129 - DNA, 36 bp, Artificial Sequence
  Synthetic
acatgctggccatcatcggcctcggcgacctggaca

SEQ ID NO: 1130 - DNA, 40 bp, Artificial Sequence
  Synthetic
ccgccaaccaagggctgatagataatgtcgcggatgctgc

SEQ ID NO: 1131 - DNA, 37 bp, Artificial Sequence
  Synthetic
acacgttcttcgccggcccccctagggggccaatggt

SEQ ID NO: 1132 - DNA, 37 bp, Artificial Sequence
  Synthetic
tcgtggtcaccggtgctcggcatgcacgataccgacc

SEQ ID NO: 1133 - DNA, 36 bp, Artificial Sequence
  Synthetic
ttccccgcccggtcgagttggagatagcccagccca

SEQ ID NO: 1134 - DNA, 39 bp, Artificial Sequence
  Synthetic
cggttcttggccctggtgagttctatgcgctggaggtgc

SEQ ID NO: 1135 - DNA, 37 bp, Artificial Sequence
  Synthetic
accccacagccaaacgcggtgtgtatacggacgcgcc

SEQ ID NO: 1136 - DNA, 37 bp, Artificial Sequence
  Synthetic
tccacatcgcgcaggggtactcaggacatcggtgtgt

SEQ ID NO: 1137 - DNA, 35 bp, Artificial Sequence
  Synthetic
tagcccgatgcccccgttgacaaggcgaccctgcg

SEQ ID NO: 1138 - DNA, 38 bp, Artificial Sequence
  Synthetic
aggttggagccggcgatggtgttcaaagacgcggtgaa

SEQ ID NO: 1139 - DNA, 39 bp, Artificial Sequence
  Synthetic
atcgccgacaggtttctggagtccttgtagaacgcgggt

SEQ ID NO: 1140 - DNA, 37 bp, Artificial Sequence
  Synthetic
gccagtgacgtggacgcctagagctgggtctggagtc

SEQ ID NO: 1141 - DNA, 40 bp, Artificial Sequence
  Synthetic
agtgttccaggggcaggaacaccggggcatccttatccat

SEQ ID NO: 1142 - DNA, 35 bp, Artificial Sequence
  Synthetic
tgggcgtggcactatcggctgacgaggccgcagct

SEQ ID NO: 1143 - DNA, 42 bp, Artificial Sequence
  Synthetic
ttccggaatttatacccgggccggtgtgtgatgatttcgcca

SEQ ID NO: 1144 - DNA, 37 bp, Artificial Sequence
  Synthetic
cacggggttacgcgggtagtggagggtcagccgttca

SEQ ID NO: 1145 - DNA, 35 bp, Artificial Sequence
  Synthetic
tgggcacgtacacccccctcgtacaggggctgggt

SEQ ID NO: 1146 - DNA, 37 bp, Artificial Sequence
  Synthetic
acgcgcagactgtcgacggcgccgtctaagtggagct

SEQ ID NO: 1147 - DNA, 37 bp, Artificial Sequence
  Synthetic
gggctgtcattcctcgggaacggaccggacggacctt

SEQ ID NO: 1148 - DNA, 37 bp, Artificial Sequence
  Synthetic
tggtgaatccagacgtggtgccgcagaacgccctcga

SEQ ID NO: 1149 - DNA, 38 bp, Artificial Sequence
  Synthetic
gctcgacctctccacacctgctgcgcggacaattaggc

SEQ ID NO: 1150 - DNA, 35 bp, Artificial Sequence
  Synthetic
agaacgactggcgcgccactcctgatgggccgcca

SEQ ID NO: 1151 - DNA, 39 bp, Artificial Sequence
  Synthetic
gagaaccgtggacgacgtacgcgacaagatcggactgcg

SEQ ID NO: 1152 - DNA, 35 bp, Artificial Sequence
  Synthetic
tgttggccccgacgctcagttaagcacggccgggc

SEQ ID NO: 1153 - DNA, 36 bp, Artificial Sequence
  Synthetic
accacacgagcacgaggcctccctgcagcacctctc

SEQ ID NO: 1154 - DNA, 36 bp, Artificial Sequence
  Synthetic
atcggcgttggtggagggcgtgcgtctggtggtcgt

SEQ ID NO: 1155 - DNA, 36 bp, Artificial Sequence
  Synthetic
attccaggtcgtcgcggcgtggacctctccgacagc

SEQ ID NO: 1156 - DNA, 34 bp, Artificial Sequence
  Synthetic
tttcggcctgccaggtggcgggccccggacataa

SEQ ID NO: 1157 - DNA, 35 bp, Artificial Sequence
  Synthetic
tcgaccgaacagccgtccgcgcgcccgagttttgc

SEQ ID NO: 1158 - DNA, 38 bp, Artificial Sequence
  Synthetic
tctggacacccccacggaccattggcacggacaacagg

SEQ ID NO: 1159 - DNA, 38 bp, Artificial Sequence
  Synthetic
tggggagtagggccttttccatggatgcgccccaaagc

SEQ ID NO: 1160 - DNA, 38 bp, Artificial Sequence
  Synthetic
cgccctcgacgagtgggatcttcacccccagtaccctc

SEQ ID NO: 1161 - DNA, 34 bp, Artificial Sequence
  Synthetic
aaaccgccccccaagcctaggatgaagccccccg

SEQ ID NO: 1162 - DNA, 41 bp, Artificial Sequence
  Synthetic
actgaccctctgatcgccgttaccggatagcagatgtgagg

SEQ ID NO: 1163 - DNA, 35 bp, Artificial Sequence
  Synthetic
cagccccttggagagcacccggtgcagcagtcgga

SEQ ID NO: 1164 - DNA, 35 bp, Artificial Sequence
  Synthetic
ggcagtgccgcattttggctggccggacgaacgac

SEQ ID NO: 1165 - DNA, 37 bp, Artificial Sequence
  Synthetic
gggccccggggttttaaggatacgggggggtaggtca

SEQ ID NO: 1166 - DNA, 35 bp, Artificial Sequence
  Synthetic
agtccaggcacgcgtcctcgccgtcccgggtgttt

SEQ ID NO: 1167 - DNA, 40 bp, Artificial Sequence
  Synthetic
ctcttccgcggtaaatcccgtgccccccggtatacgacga

SEQ ID NO: 1168 - DNA, 40 bp, Artificial Sequence
  Synthetic
cgccttcacgattacccgttggtcggaggggtgtgtcttt

SEQ ID NO: 1169 - DNA, 40 bp, Artificial Sequence
  Synthetic
tgggttcaggcgcctactcatctggtcctccccaagtacc

SEQ ID NO: 1170 - DNA, 36 bp, Artificial Sequence
  Synthetic
tcgcacgggccccttttggactgccgtccacaacgc

SEQ ID NO: 1171 - DNA, 37 bp, Artificial Sequence
  Synthetic
tggcggtgggagagtcggttcgtccctcgcatgaagc

SEQ ID NO: 1172 - DNA, 36 bp, Artificial Sequence
  Synthetic
cgcgcatgcttcatgggtcccggggcggtcattgga

SEQ ID NO: 1173 - DNA, 36 bp, Artificial Sequence
  Synthetic
gggtggcggcaagaacagcgcgcagtctggcatctg

SEQ ID NO: 1174 - DNA, 38 bp, Artificial Sequence
  Synthetic
gtgttgttgggtgccctccgccccccaaaccatgtccg

SEQ ID NO: 1175 - DNA, 38 bp, Artificial Sequence
  Synthetic
cccggcgtccacaaatgagttccagcctggttgtccgt

SEQ ID NO: 1176 - DNA, 35 bp, Artificial Sequence
  Synthetic
tttggcgcgtcaccgaccgcaacgcgggactatgc

SEQ ID NO: 1177 - DNA, 34 bp, Artificial Sequence
  Synthetic
aggccgctgtccgtctctgcggccgtggttaacc

SEQ ID NO: 1178 - DNA, 37 bp, Artificial Sequence
  Synthetic
gcttcgaccgaaactggcgagtcagcgcgatccgaca

SEQ ID NO: 1179 - DNA, 37 bp, Artificial Sequence
  Synthetic
agccacatcaggagcgcccgatcgcctgtctcctcgt

SEQ ID NO: 1180 - DNA, 50 bp, Artificial Sequence
  Synthetic
tgttcccaatttgtaacatcaagctatcagaagataataaccattggatc

SEQ ID NO: 1181 - DNA, 39 bp, Artificial Sequence
  Synthetic
attgtcaaccaactggtgccaaggtttgagtctgttgct

SEQ ID NO: 1182 - DNA, 47 bp, Artificial Sequence
  Synthetic
atcaggataacaggagcactccgaaaaagggaaagtagttaaatcag

SEQ ID NO: 1183 - DNA, 48 bp, Artificial Sequence
  Synthetic
cctggaattagtgcttttggttctcaaagggttttcatttaaatacgg

SEQ ID NO: 1184 - DNA, 42 bp, Artificial Sequence
  Synthetic
ttccgaaagcccaggatgatggtgtatccctcctgttgctgt

SEQ ID NO: 1185 - DNA, 48 bp, Artificial Sequence
  Synthetic
cccataacatccaatgacataacccctttgggtatacatttaaaccct

SEQ ID NO: 1186 - DNA, 40 bp, Artificial Sequence
  Synthetic
gtggtctccatgcgacgtgccgtctgtgccttctcatctg

SEQ ID NO: 1187 - DNA, 41 bp, Artificial Sequence
  Synthetic
gttccccccagcaaagaattgttagagtctcctgagcattg

SEQ ID NO: 1188 - DNA, 42 bp, Artificial Sequence
  Synthetic
tggaaagattctgccccatgctgaaacaacacatagcgcctc

SEQ ID NO: 1189 - DNA, 45 bp, Artificial Sequence
  Synthetic
tgtggtttttgtcagtatctcgcaataaaagaactacggaacctg

SEQ ID NO: 1190 - DNA, 41 bp, Artificial Sequence
  Synthetic
ccacgggtccatttctattccagatcagatcgagtgatggt

SEQ ID NO: 1191 - DNA, 41 bp, Artificial Sequence
  Synthetic
agatgctagtggatctgctgatctaattattgcggccagga

SEQ ID NO: 1192 - DNA, 43 bp, Artificial Sequence
  Synthetic
acccctcatgtactcttatcttcaaaagcgggtcatcagtcaa

SEQ ID NO: 1193 - DNA, 43 bp, Artificial Sequence
  Synthetic
aatgccttaaaagctgatgcatggacctgaatttcgtcaacag

SEQ ID NO: 1194 - DNA, 42 bp, Artificial Sequence
  Synthetic
gtttcactgacctcctcaggagtgatcggtttttgagagttc

SEQ ID NO: 1195 - DNA, 43 bp, Artificial Sequence
  Synthetic
caagtacgtctctcatttgttggaaccaaggccattagaagcc

SEQ ID NO: 1196 - DNA, 38 bp, Artificial Sequence
  Synthetic
gaaaccctctcaagacggcggaaaagatgccggcactt

SEQ ID NO: 1197 - DNA, 46 bp, Artificial Sequence
  Synthetic
cacacaaatcacgacgacagaaatattttgatgttactcctgatgt

SEQ ID NO: 1198 - DNA, 46 bp, Artificial Sequence
  Synthetic
cgcgataatatcaatcttctcctcaaagagttaaatgtgaggtgtc

SEQ ID NO: 1199 - DNA, 48 bp, Artificial Sequence
  Synthetic
gcaacaacaacgacacgaattactaggagcatccagtatataaagttg

SEQ ID NO: 1200 - DNA, 50 bp, Artificial Sequence
  Synthetic
tgtcgtctaacagatttgagatgttgtggatgatatacaatgtattgatg

SEQ ID NO: 1201 - DNA, 45 bp, Artificial Sequence
  Synthetic
gatctctacctgcgacgtaaaagtattgaattttcaggacagtgg

SEQ ID NO: 1202 - DNA, 48 bp, Artificial Sequence
  Synthetic
tgaggccttcttttctcccataattggactcccaaataaattattgga

SEQ ID NO: 1203 - DNA, 41 bp, Artificial Sequence
  Synthetic
tttcggtgggactggaaacggcagctctgcaagttccttct

SEQ ID NO: 1204 - DNA, 44 bp, Artificial Sequence
  Synthetic
gttcctatacccagtcctccaaaatcgactcttgctgatcgatt

SEQ ID NO: 1205 - DNA, 47 bp, Artificial Sequence
  Synthetic
agttgtaagtacaggtggttctgccaacattaattgaatcaggagga

SEQ ID NO: 1206 - DNA, 43 bp, Artificial Sequence
  Synthetic
gatctggagtagcagctacattctctttagcactgacgtcact

SEQ ID NO: 1207 - DNA, 39 bp, Artificial Sequence
  Synthetic
tcgcctgaatgttggcctatctataggttctgacgctgc

SEQ ID NO: 1208 - DNA, 43 bp, Artificial Sequence
  Synthetic
ctgtaccagcatagaaaaacagactcaagaccaatcgccagag

SEQ ID NO: 1209 - DNA, 48 bp, Artificial Sequence
  Synthetic
ttaaataatggattgcctgttgtggttaagaggtattgaaataggtcg

SEQ ID NO: 1210 - DNA, 48 bp, Artificial Sequence
  Synthetic
caccaaagccaatgtcacacatattccacctgtgcaattaattaattc

SEQ ID NO: 1211 - DNA, 44 bp, Artificial Sequence
  Synthetic
tcgttcagtcatatctatttgccaactaagtgtcctactgctgc

SEQ ID NO: 1212 - DNA, 50 bp, Artificial Sequence
  Synthetic
agtacattcagagaccattcacagtattgtgataaaatactgtgaatccc

SEQ ID NO: 1213 - DNA, 40 bp, Artificial Sequence
  Synthetic
cctttggcgccaaaaacttaccgagggtcgatactgccaa

SEQ ID NO: 1214 - DNA, 47 bp, Artificial Sequence
  Synthetic
cgtcagaaattaagttagcaggcaagggagataaggctactattcct

SEQ ID NO: 1215 - DNA, 42 bp, Artificial Sequence
  Synthetic
gcttagatgctctctcaggcgacagatctcagagctaagtcc

SEQ ID NO: 1216 - DNA, 42 bp, Artificial Sequence
  Synthetic
gcagagtcggaccccaatttccccgagagaatctggaaccac

SEQ ID NO: 1217 - DNA, 43 bp, Artificial Sequence
  Synthetic
atcccccagacccttttccatttggaagtttggtatattttgg

SEQ ID NO: 1218 - DNA, 48 bp, Artificial Sequence
  Synthetic
gctggatctctaaaggtgaatagttgggcctgatatatcttttattgc

SEQ ID NO: 1219 - DNA, 50 bp, Artificial Sequence
  Synthetic
tctcttcaaatatgttgtccccaatgtgatactaatgtgtttgtagatcc

SEQ ID NO: 1220 - DNA, 44 bp, Artificial Sequence
  Synthetic
gctatttacatcacgctggaactgtttgagtttgaaaatcccgc

SEQ ID NO: 1221 - DNA, 44 bp, Artificial Sequence
  Synthetic
cgctctgtcatatctaaagtccagacctactgctgaaccagaag

SEQ ID NO: 1222 - DNA, 45 bp, Artificial Sequence
  Synthetic
caggagtttataggtcagaacccatgaatattttaccgtggtgtc

SEQ ID NO: 1223 - DNA, 43 bp, Artificial Sequence
  Synthetic
gccaatctggtattatcccttccaggaggagacatagaatcct

SEQ ID NO: 1224 - DNA, 38 bp, Artificial Sequence
  Synthetic
ccagctcctcccatgtccctctgaggctgcagggactt

SEQ ID NO: 1225 - DNA, 40 bp, Artificial Sequence
  Synthetic
gcgccaacctgctagggatttctgttaggacccttctcgc

SEQ ID NO: 1226 - DNA, 41 bp, Artificial Sequence
  Synthetic
cgggccgtaacctaactttttctgcgagaaactccgtcttg

SEQ ID NO: 1227 - DNA, 40 bp, Artificial Sequence
  Synthetic
ccgcttgttgcacggggtagacaagtagaccaacagcacc

SEQ ID NO: 1228 - DNA, 44 bp, Artificial Sequence
  Synthetic
gcctatacatccactggatctgttccaagagggtctgacatagc

SEQ ID NO: 1229 - DNA, 40 bp, Artificial Sequence
  Synthetic
cgagtgtccctcctttccacagggaccaagccctatccca

SEQ ID NO: 1230 - DNA, 44 bp, Artificial Sequence
  Synthetic
gacatgcctaaggctgtcagaataccataatgacaggagatacc

SEQ ID NO: 1231 - DNA, 48 bp, Artificial Sequence
  Synthetic
ccttttctttttggctagtcctgcaaataaggtgactcaagatttcac

SEQ ID NO: 1232 - DNA, 43 bp, Artificial Sequence
  Synthetic
ccctaggccatttagaagttctttgacaggacaggtttagagc

SEQ ID NO: 1233 - DNA, 43 bp, Artificial Sequence
  Synthetic
gttcctggctcaagataattttgttcagaagaagtgcagtgga

SEQ ID NO: 1234 - DNA, 46 bp, Artificial Sequence
  Synthetic
gcctggtataggatctcctactagggagtgggactttgtatctacc

SEQ ID NO: 1235 - DNA, 44 bp, Artificial Sequence
  Synthetic
gccttgacttactaaatggtctactagtctatgttgcatgggtc

SEQ ID NO: 1236 - DNA, 42 bp, Artificial Sequence
  Synthetic
tgcgttattggccacctactgggaagcagaagtcatcccaca

SEQ ID NO: 1237 - DNA, 44 bp, Artificial Sequence
  Synthetic
tcttgttctgtggtaatcatgttgaaagaaggggaggaataggg

SEQ ID NO: 1238 - DNA, 46 bp, Artificial Sequence
  Synthetic
ggtaacatctgtccagaacttttctgaacctaacaccagaaaaagg

SEQ ID NO: 1239 - DNA, 43 bp, Artificial Sequence
  Synthetic
acacctggaaaatgagctctcgccatagaagccttaaacaggg

SEQ ID NO: 1240 - DNA, 45 bp, Artificial Sequence
  Synthetic
gggtgtctccatgtctattatggataggaagaagccttaagacat

SEQ ID NO: 1241 - DNA, 39 bp, Artificial Sequence
  Synthetic
actcacttgtctggtgcagaaagacgaagaaggactcca

SEQ ID NO: 1242 - DNA, 47 bp, Artificial Sequence
  Synthetic
gcttgacacatggttttattgatgttggaataatacagtgacagaac

SEQ ID NO: 1243 - DNA, 46 bp, Artificial Sequence
  Synthetic
gcaatgtctcatgtaacatgtgcccatggtatttagaagatgtggt

SEQ ID NO: 1244 - DNA, 48 bp, Artificial Sequence
  Synthetic
gagagtgaaacactaatcctgacatgtaagagaccaggaaataagaca

SEQ ID NO: 1245 - DNA, 46 bp, Artificial Sequence
  Synthetic
ttttccctactttatgccaggtattcaattgggtagaagacaagaa

SEQ ID NO: 1246 - DNA, 41 bp, Artificial Sequence
  Synthetic
cgcacatccccatgaatttagcaagagtcactgctatcgag

SEQ ID NO: 1247 - DNA, 42 bp, Artificial Sequence
  Synthetic
cagccagtccctgattgctgttactatccaagaactccccga

SEQ ID NO: 1248 - DNA, 43 bp, Artificial Sequence
  Synthetic
tgctgcctatacaaatctttctgtcagagtacatgaacagccc

SEQ ID NO: 1249 - DNA, 41 bp, Artificial Sequence
  Synthetic
cagcatggagtcaaactgccaacaagcagacatgatgatga

SEQ ID NO: 1250 - DNA, 39 bp, Artificial Sequence
  Synthetic
agggaacacccaggctctaccgagaggctggcagatcga

SEQ ID NO: 1251 - DNA, 44 bp, Artificial Sequence
  Synthetic
tcccagtgcagattcgatctgaaggcaataattgtactactcat

SEQ ID NO: 1252 - DNA, 44 bp, Artificial Sequence
  Synthetic
gcaggtttgacttcatggagtattgcctaggcagaccaaaatgc

SEQ ID NO: 1253 - DNA, 43 bp, Artificial Sequence
  Synthetic
actggatttattgctgtcttgttgtatgggaacggcttcttca

SEQ ID NO: 1254 - DNA, 45 bp, Artificial Sequence
  Synthetic
tccaggtttttgtaccatgtaatcaccaaatcaaacagaagacga

SEQ ID NO: 1255 - DNA, 44 bp, Artificial Sequence
  Synthetic
tcctttaatagttttgcaggcggtccaatatgggtgaaaacacc

SEQ ID NO: 1256 - DNA, 43 bp, Artificial Sequence
  Synthetic
gctcttagatcatccactttttcgtcggagcaatgaatgagct

SEQ ID NO: 1257 - DNA, 39 bp, Artificial Sequence
  Synthetic
gcattaaaggtgccagcagctgctttgaaaccaaacaca

SEQ ID NO: 1258 - DNA, 47 bp, Artificial Sequence
  Synthetic
gccccatggaatgttatttctcttttggagatccaaacaatatggat

SEQ ID NO: 1259 - DNA, 41 bp, Artificial Sequence
  Synthetic
tcgatccagccatctgctccatgagaacagaatggtgctgg

SEQ ID NO: 1260 - DNA, 43 bp, Artificial Sequence
  Synthetic
cacaatatcaagtgcagtatcccaagcagcgattcaagtgatc

SEQ ID NO: 1261 - DNA, 43 bp, Artificial Sequence
  Synthetic
tccgcgcaataattcttcaaaaaggtgtaagggtttgtgttgc

SEQ ID NO: 1262 - DNA, 49 bp, Artificial Sequence
  Synthetic
gcttgttatacaatgccagggaattctaacgtttcccaattaatagacg

SEQ ID NO: 1263 - DNA, 46 bp, Artificial Sequence
  Synthetic
tcttgtaactctaattgcactgcaaaaattactgatgctgaatgga

SEQ ID NO: 1264 - DNA, 46 bp, Artificial Sequence
  Synthetic
tccattgtaatctgcatcaccttttgggattggatatactatcagg

SEQ ID NO: 1265 - DNA, 50 bp, Artificial Sequence
  Synthetic
ggacaatcaccagtaaagcattgtttgacagtttataatgtatagagctg

SEQ ID NO: 1266 - DNA, 41 bp, Artificial Sequence
  Synthetic
accaataggctccacaggtactgaggtacaacaaggcctat

SEQ ID NO: 1267 - DNA, 50 bp, Artificial Sequence
  Synthetic
gcctgaacgtggttcattatttacaatgatactgcagctatattagatgt

SEQ ID NO: 1268 - DNA, 45 bp, Artificial Sequence
  Synthetic
cgttcaactatttgggtgggagttggctgaatttgaaataatgga

SEQ ID NO: 1269 - DNA, 46 bp, Artificial Sequence
  Synthetic
caccttcacggctcactcttaattacataggcctacttatactaca

SEQ ID NO: 1270 - DNA, 45 bp, Artificial Sequence
  Synthetic
acatctgagcgtttgcgtttcatcagatgactattttctacatcc

SEQ ID NO: 1271 - DNA, 47 bp, Artificial Sequence
  Synthetic
tgggatctggacacagtaatctaaagaacacagtctgtagtagtacc

SEQ ID NO: 1272 - DNA, 50 bp, Artificial Sequence
  Synthetic
gtgcaacctactataaacacctgatgatgaaaatgatcacagattgaatg

SEQ ID NO: 1273 - DNA, 43 bp, Artificial Sequence
  Synthetic
ctccggagatatcctttgacatttagatctggtgttcctttgg

SEQ ID NO: 1274 - DNA, 46 bp, Artificial Sequence
  Synthetic
cccaatcatctaacactgttggatttttgcaaagtttctctggatc

SEQ ID NO: 1275 - DNA, 45 bp, Artificial Sequence
  Synthetic
cagtttttctggatactttcggagacgccgctttctatatcaaac

SEQ ID NO: 1276 - DNA, 39 bp, Artificial Sequence
  Synthetic
gacaaacagctttcgcaacagaaacagctgagtctggtt

SEQ ID NO: 1277 - DNA, 39 bp, Artificial Sequence
  Synthetic
atgactcctcctctggggtgagcccatctattgtgtgaa

SEQ ID NO: 1278 - DNA, 46 bp, Artificial Sequence
  Synthetic
cctagtccactgtcctgaaacagttggaagcaataagaatttctcc

SEQ ID NO: 1279 - DNA, 49 bp, Artificial Sequence
  Synthetic
gcttgagaagccatttgatgatttctgggaaatcatatatttatggaac

SEQ ID NO: 1280 - DNA, 46 bp, Artificial Sequence
  Synthetic
agtcattaattgctcttgtagtgcaacccgaagataatgaatcaga

SEQ ID NO: 1281 - DNA, 40 bp, Artificial Sequence
  Synthetic
ttttcctcttcggcctcggcgtctctatccgactcccctg

SEQ ID NO: 1282 - DNA, 42 bp, Artificial Sequence
  Synthetic
tgacatcttctggacagtccctaaacgaataaagcgagcttc

SEQ ID NO: 1283 - DNA, 45 bp, Artificial Sequence
  Synthetic
gcatctggagtgattggtagtacttccccaagaccttctattcca

SEQ ID NO: 1284 - DNA, 43 bp, Artificial Sequence
  Synthetic
aggaacctgttgaacaaatctatgaagggccctttaaggagta

SEQ ID NO: 1285 - DNA, 45 bp, Artificial Sequence
  Synthetic
gtgtcaggaatgttaacaaatgtgttataggagggttcagggatg

SEQ ID NO: 1286 - DNA, 47 bp, Artificial Sequence
  Synthetic
gcaaactggttaggatctggtaattaataatgtccaagttccaaagg

SEQ ID NO: 1287 - DNA, 50 bp, Artificial Sequence
  Synthetic
cccgccgtccataaaaaaataatttattaattctacatgtaaatggccag

SEQ ID NO: 1288 - DNA, 44 bp, Artificial Sequence
  Synthetic
ccagctgccagttttctaatattgacctttagaggctgatgtgt

SEQ ID NO: 1289 - DNA, 45 bp, Artificial Sequence
  Synthetic
ggtcgggtatcaaatacagcagtttacatatcagtcgttcaaagg

SEQ ID NO: 1290 - DNA, 43 bp, Artificial Sequence
  Synthetic
cctgtcttcctgatgtgtacttcttcactcgcgagatactgac

SEQ ID NO: 1291 - DNA, 39 bp, Artificial Sequence
  Synthetic
ggtccatttctgttccaccacgctggatcagacagggta

SEQ ID NO: 1292 - DNA, 45 bp, Artificial Sequence
  Synthetic
cctttgttattgtcagctgtgattcgtcgttttcccaaatgaagt

SEQ ID NO: 1293 - DNA, 43 bp, Artificial Sequence
  Synthetic
cctgacaatgttcctagcagcgggaggtaagaaatgatgatgt

SEQ ID NO: 1294 - DNA, 46 bp, Artificial Sequence
  Synthetic
gtccaaccattgtgaattcctcataaagagaggaagaagtgcttac

SEQ ID NO: 1295 - DNA, 41 bp, Artificial Sequence
  Synthetic
ggagttggtgcatgggattcaccgaggtgatttgaatttcg

SEQ ID NO: 1296 - DNA, 43 bp, Artificial Sequence
  Synthetic
tgtttcactaacttcttcaggggatcgtttcttaagggtccga

SEQ ID NO: 1297 - DNA, 41 bp, Artificial Sequence
  Synthetic
cccaaaacatcacgcatctgcgccagaagccaatatagtgg

SEQ ID NO: 1298 - DNA, 42 bp, Artificial Sequence
  Synthetic
tcctgctgttccttcatctggttacaatacttgggaaggacg

SEQ ID NO: 1299 - DNA, 41 bp, Artificial Sequence
  Synthetic
actttggttccgtttgacacggcgatcattccaacaaatgc

SEQ ID NO: 1300 - DNA, 47 bp, Artificial Sequence
  Synthetic
tcttcattcacgaatttcccaggatccgatttaattattgagaggcg

SEQ ID NO: 1301 - DNA, 42 bp, Artificial Sequence
  Synthetic
ccagtttgtttccactcccatatgggatccatcattccgtat

SEQ ID NO: 1302 - DNA, 40 bp, Artificial Sequence
  Synthetic
ttgtccctccactatgatagcatccagagtggagtacagg

SEQ ID NO: 1303 - DNA, 43 bp, Artificial Sequence
  Synthetic
tctgaaaccataccaaccatcaatttttggtgctatagcgggt

SEQ ID NO: 1304 - DNA, 42 bp, Artificial Sequence
  Synthetic
tgtccatttctgaatcagccagctgaactcttggtagcaatg

SEQ ID NO: 1305 - DNA, 42 bp, Artificial Sequence
  Synthetic
acttgccattctgccttaacaagggtttaaccgaaaacggtg

SEQ ID NO: 1306 - DNA, 47 bp, Artificial Sequence
  Synthetic
gcttttgacatatagcacagcgaatattttggcatacagtagaacaa

SEQ ID NO: 1307 - DNA, 47 bp, Artificial Sequence
  Synthetic
ttctgtaacgttgtatgtcctgtttaatttgacacctcagatgaaga

SEQ ID NO: 1308 - DNA, 39 bp, Artificial Sequence
  Synthetic
tttcctgattttcctgcacccacgggagtatgggtaacg

SEQ ID NO: 1309 - DNA, 46 bp, Artificial Sequence
  Synthetic
gcgattcttgccacatttaaatctcatacaatggttaacctgtacc

SEQ ID NO: 1310 - DNA, 45 bp, Artificial Sequence
  Synthetic
cagcacgttgggcatattcagcatatgataatgatttaaccgaag

SEQ ID NO: 1311 - DNA, 42 bp, Artificial Sequence
  Synthetic
acgcatctaaacgtttggccgaatttcaagaatcagaggacg

SEQ ID NO: 1312 - DNA, 44 bp, Artificial Sequence
  Synthetic
gcgtccctgtttttttaaacactttccatggacattgcaagaga

SEQ ID NO: 1313 - DNA, 42 bp, Artificial Sequence
  Synthetic
ggtcggggtggggtctttgtatcacctacacccacaaccatc

SEQ ID NO: 1314 - DNA, 47 bp, Artificial Sequence
  Synthetic
cacgcagcaacaactataaacaatattactgtgagtccactattgtg

SEQ ID NO: 1315 - DNA, 46 bp, Artificial Sequence
  Synthetic
ctaaaaaccacagcagcagccttgtacatacgtgataatatggtac

SEQ ID NO: 1316 - DNA, 47 bp, Artificial Sequence
  Synthetic
tgcagaggacgtaatattaaacccaattgattctagcataccagtgc

SEQ ID NO: 1317 - DNA, 39 bp, Artificial Sequence
  Synthetic
tgatggcctagtgattgggctgggctcgtattgggtcta

SEQ ID NO: 1318 - DNA, 46 bp, Artificial Sequence
  Synthetic
gaggaggcagataaaccttgttgtaccatatttttttgcagatgtc

SEQ ID NO: 1319 - DNA, 43 bp, Artificial Sequence
  Synthetic
accatcctgaataacactgttttgtctgcttgctctgcacaat

SEQ ID NO: 1320 - DNA, 50 bp, Artificial Sequence
  Synthetic
cgtctagtatgtcaggattcatggttgcaaaattacattatctgtagagg

SEQ ID NO: 1321 - DNA, 48 bp, Artificial Sequence
  Synthetic
gcatgtgcttgctaaatttaatggacaatcctccattttagtacatgc

SEQ ID NO: 1322 - DNA, 44 bp, Artificial Sequence
  Synthetic
cttaattgaaatgtgtctgcctgtggtgtgttacctgaatgggt

SEQ ID NO: 1323 - DNA, 47 bp, Artificial Sequence
  Synthetic
cactgtgccattgtcatatttttcaacaggtcaagtttgtaaaagac

SEQ ID NO: 1324 - DNA, 41 bp, Artificial Sequence
  Synthetic
cctccgaccgtctcttcagtctctgaatcccagagcaacgg

SEQ ID NO: 1325 - DNA, 39 bp, Artificial Sequence
  Synthetic
agacctgctgctggtactgactgctgacattactgctga

SEQ ID NO: 1326 - DNA, 43 bp, Artificial Sequence
  Synthetic
ccaactacttctgaaactggatcaagcccaggtcttgatgttg

SEQ ID NO: 1327 - DNA, 47 bp, Artificial Sequence
  Synthetic
caggccatttacaagtggagttaaacttttcagcattttcagaaagt

SEQ ID NO: 1328 - DNA, 38 bp, Artificial Sequence
  Synthetic
accactgggcgtcggataatgacaatgctacacctcca

SEQ ID NO: 1329 - DNA, 39 bp, Artificial Sequence
  Synthetic
gggctagcacatcagcttcctttgaagtggagcttgtga

SEQ ID NO: 1330 - DNA, 48 bp, Artificial Sequence
  Synthetic
acgggaattaagtaatcccatctgaatttgcgagataaatttacctcc

SEQ ID NO: 1331 - DNA, 45 bp, Artificial Sequence
  Synthetic
atgagtcagcaatgccttgtttaacatatggtgctatgtatcctg

SEQ ID NO: 1332 - DNA, 44 bp, Artificial Sequence
  Synthetic
acgatcgttaacggttggatttgttgaacttagaccgaatttgg

SEQ ID NO: 1333 - DNA, 40 bp, Artificial Sequence
  Synthetic
gccgtagtgctggctagtaccaggcagatggcgactacca

SEQ ID NO: 1334 - DNA, 45 bp, Artificial Sequence
  Synthetic
ccacaatatcaagtgcaatatcccagcaaatgcagagattcaagt

SEQ ID NO: 1335 - DNA, 43 bp, Artificial Sequence
  Synthetic
gagctctggattggcataagctggataatgagaaacaacatgc

SEQ ID NO: 1336 - DNA, 46 bp, Artificial Sequence
  Synthetic
tgaccagaactatccagatctgtattcaacaattgaagaccttgtc

SEQ ID NO: 1337 - DNA, 46 bp, Artificial Sequence
  Synthetic
tgttgcatggctctattttgtacaacaactatcctgccatatggag

SEQ ID NO: 1338 - DNA, 45 bp, Artificial Sequence
  Synthetic
tcttcccaagaatccatgatttgattttagagtttgcttgcaact

SEQ ID NO: 1339 - DNA, 42 bp, Artificial Sequence
  Synthetic
gaccacagtctcagctctactagaaactgtacagagaggacc

SEQ ID NO: 1340 - DNA, 48 bp, Artificial Sequence
  Synthetic
gtgttcctgatgattctgtctgtatgaaaatctcaaaaacaacaacca

SEQ ID NO: 1341 - DNA, 50 bp, Artificial Sequence
  Synthetic
cctgcatgtcgatatagatcaggtagaaaagatcaagaaaactaggtttg

SEQ ID NO: 1342 - DNA, 46 bp, Artificial Sequence
  Synthetic
ttgactttgagtggtaatggttctatacacattcccagaatcatca

SEQ ID NO: 1343 - DNA, 43 bp, Artificial Sequence
  Synthetic
tggcatcgaacagcattcctataaaaccagaactatacccatg

SEQ ID NO: 1344 - DNA, 44 bp, Artificial Sequence
  Synthetic
ttcccaactccttttgcgataatcaagagtggatgcaattttcc

SEQ ID NO: 1345 - DNA, 47 bp, Artificial Sequence
  Synthetic
gggatgatcagtctatccaataacctagaagactctaactcttgtgg

SEQ ID NO: 1346 - DNA, 42 bp, Artificial Sequence
  Synthetic
tctgagtgttcagcagcctagtgattactcaatcaccctcca

SEQ ID NO: 1347 - DNA, 46 bp, Artificial Sequence
  Synthetic
ctccttgattaggtggttgattgattgcaaactgtataacaaccac

SEQ ID NO: 1348 - DNA, 49 bp, Artificial Sequence
  Synthetic
ccagtattccatctcgaatttggataatccaactctactcatacaattg

SEQ ID NO: 1349 - DNA, 45 bp, Artificial Sequence
  Synthetic
gaagaccagacgtgcacctctaacacatgatgtaggtataaaacc

SEQ ID NO: 1350 - DNA, 42 bp, Artificial Sequence
  Synthetic
aagacctccatacccgagaaattatgctgcactatacccatc

SEQ ID NO: 1351 - DNA, 39 bp, Artificial Sequence
  Synthetic
tgactgggttcactctcgattcacagggagcattgtgtc

SEQ ID NO: 1352 - DNA, 42 bp, Artificial Sequence
  Synthetic
gcagagtttgaaccgtaagcatttgcctcctgtgacattacc

SEQ ID NO: 1353 - DNA, 50 bp, Artificial Sequence
  Synthetic
ctctgaccaaaagacacatctagattagcaaaagaatctattatgatggg

SEQ ID NO: 1354 - DNA, 48 bp, Artificial Sequence
  Synthetic
gcaggtattaaagaggcatattgcaatcaatccaactataacacagaa

SEQ ID NO: 1355 - DNA, 50 bp, Artificial Sequence
  Synthetic
ccttcctcctgataaatgaatccacatcagatatgaagatatgtgttcag

SEQ ID NO: 1356 - DNA, 46 bp, Artificial Sequence
  Synthetic
agtgtaaaatttgcacgtgtttgtgatgggcatttggtaatgatga

SEQ ID NO: 1357 - DNA, 45 bp, Artificial Sequence
  Synthetic
ctacgactccagcatcaaagatggactttgtgtctacttttctca

SEQ ID NO: 1358 - DNA, 40 bp, Artificial Sequence
  Synthetic
aaaccattgctagcggcctcaatttctgcaaatggctgtt

SEQ ID NO: 1359 - DNA, 45 bp, Artificial Sequence
  Synthetic
cttagtaagccaagcacaaacgtaattatggcagtttgttgacca

SEQ ID NO: 1360 - DNA, 46 bp, Artificial Sequence
  Synthetic
ccacaagtacattgaactaatgcactctcctgttatgacaaatggt

SEQ ID NO: 1361 - DNA, 45 bp, Artificial Sequence
  Synthetic
atgttcctcttctacaaaagtggaaagagtgattgctcttcagag

SEQ ID NO: 1362 - DNA, 45 bp, Artificial Sequence
  Synthetic
acagcacagtcaaagacagtttgatgcctgagaagtttttgaatg

SEQ ID NO: 1363 - DNA, 43 bp, Artificial Sequence
  Synthetic
agcagtgctacgttcaacacaaagttaagtatgcaacagttgt

SEQ ID NO: 1364 - DNA, 46 bp, Artificial Sequence
  Synthetic
tcctcaaaccaagactcgttactactttatgtgagagactatgttg

SEQ ID NO: 1365 - DNA, 43 bp, Artificial Sequence
  Synthetic
agtgtctaaaaacgcattataggccgaacatgtgcaaagcgtt

SEQ ID NO: 1366 - DNA, 50 bp, Artificial Sequence
  Synthetic
gtcaaaatgtgtagggtctgcaattcaggattaagtcttttagtactttc

SEQ ID NO: 1367 - DNA, 48 bp, Artificial Sequence
  Synthetic
tcccagtcaccttcatgtttaattttgagtttgaagatgaaaaacttg

SEQ ID NO: 1368 - DNA, 50 bp, Artificial Sequence
  Synthetic
gcatagtcaccatcaagtataccagtactcaaacaattggataacaactg

SEQ ID NO: 1369 - DNA, 43 bp, Artificial Sequence
  Synthetic
agtgggcgtacaaaacaaaacaaaatgtagttgtaccagtggt

SEQ ID NO: 1370 - DNA, 48 bp, Artificial Sequence
  Synthetic
gcgttcaacttctctttaacaacaaaagttgaaatatctgttacacca

SEQ ID NO: 1371 - DNA, 47 bp, Artificial Sequence
  Synthetic
tggttctattttaggttgctcaactaaggttaaggattttgtgtctg

SEQ ID NO: 1372 - DNA, 44 bp, Artificial Sequence
  Synthetic
acgtgtgcatcgttgaacattagttctgttgttgtctacatgtg

SEQ ID NO: 1373 - DNA, 47 bp, Artificial Sequence
  Synthetic
cgacccaatcaacatctattgcttttaaggacaaagatctttctggt

SEQ ID NO: 1374 - DNA, 43 bp, Artificial Sequence
  Synthetic
cctctaacacttctaacacgtgaattgtgctagtgtcaaacgt

SEQ ID NO: 1375 - DNA, 45 bp, Artificial Sequence
  Synthetic
agctgctgacgcttttaagttatgttaaaataatggccaaagcac

SEQ ID NO: 1376 - DNA, 47 bp, Artificial Sequence
  Synthetic
tggctaaattgacttaactcttggttcaaggatgattactgtgatgg

SEQ ID NO: 1377 - DNA, 44 bp, Artificial Sequence
  Synthetic
gggaatctcttaagtctagcactcttgtgctttttggttgtgaa

SEQ ID NO: 1378 - DNA, 44 bp, Artificial Sequence
  Synthetic
aacgatgtgcattagaaatagcacttatgtctttagccgagtgc

SEQ ID NO: 1379 - DNA, 47 bp, Artificial Sequence
  Synthetic
gcgtgacagcttggttttcattacgcaagtatattgtaaaaactagc

SEQ ID NO: 1380 - DNA, 46 bp, Artificial Sequence
  Synthetic
gccagcgacagtattaacaatttcaggcttcacacctttaaacaag

SEQ ID NO: 1381 - DNA, 41 bp, Artificial Sequence
  Synthetic
attcacctacgcggcagtatcaaggctttggttttagaaca

SEQ ID NO: 1382 - DNA, 50 bp, Artificial Sequence
  Synthetic
gcaattaaatatgcagcacaccaaaattgtatttctttgctactagaagc

SEQ ID NO: 1383 - DNA, 47 bp, Artificial Sequence
  Synthetic
ccagcctgtaatgtagaaccataaccttttcgcgtgatcataatgac

SEQ ID NO: 1384 - DNA, 48 bp, Artificial Sequence
  Synthetic
ctaaaagaatgtctaggtgtgtgcatgcatggagtaactcttaaaatt

SEQ ID NO: 1385 - DNA, 46 bp, Artificial Sequence
  Synthetic
gcaaccacattaactgttaacatctggttttgaagaccaacctaat

SEQ ID NO: 1386 - DNA, 47 bp, Artificial Sequence
  Synthetic
acccaaatagtggtggtataaacaaaatccataagcttatttgctgg

SEQ ID NO: 1387 - DNA, 44 bp, Artificial Sequence
  Synthetic
accaatgtgtacaacgctctttaatttgtctttttgttgcactg

SEQ ID NO: 1388 - DNA, 48 bp, Artificial Sequence
  Synthetic
ggctggactaacacagaaatcataagctgtatgtactatggtttgttg

SEQ ID NO: 1389 - DNA, 44 bp, Artificial Sequence
  Synthetic
gcccactcctttgaattagaagctacaaacgtcgttctaatggg

SEQ ID NO: 1390 - DNA, 47 bp, Artificial Sequence
  Synthetic
gcttgttcagccattctgttaatttttgaagaaggctatgaatgttg

SEQ ID NO: 1391 - DNA, 48 bp, Artificial Sequence
  Synthetic
tgcacattcttaccatcattatcctaaatgatggtagatggttttgtg

SEQ ID NO: 1392 - DNA, 43 bp, Artificial Sequence
  Synthetic
ccagagtcatgttcccatttaacatggtggacgtgcattcatg

SEQ ID NO: 1393 - DNA, 43 bp, Artificial Sequence
  Synthetic
acatctttacacaattgccaacaggcagctgcagcctatcttg

SEQ ID NO: 1394 - DNA, 46 bp, Artificial Sequence
  Synthetic
cccggactcgtttaaataactgtttaatcatggctgtacatgtgac

SEQ ID NO: 1395 - DNA, 48 bp, Artificial Sequence
  Synthetic
cagtctttttcatcaaagttacgcatatggtaatgttagtagacagga

SEQ ID NO: 1396 - DNA, 46 bp, Artificial Sequence
  Synthetic
tgacgtgcagtagggtattcctcttaatgggaatttctatgacttc

SEQ ID NO: 1397 - DNA, 44 bp, Artificial Sequence
  Synthetic
cgggtacaccatcaataaacacttttcttcgcaaccacaattcc

SEQ ID NO: 1398 - DNA, 48 bp, Artificial Sequence
  Synthetic
cccctgagaacgtaagaagtcataagctttgagtacaggattaacatc

SEQ ID NO: 1399 - DNA, 45 bp, Artificial Sequence
  Synthetic
aagagacgccacccactgtatgactcagttaaatcttaaatacgc

SEQ ID NO: 1400 - DNA, 48 bp, Artificial Sequence
  Synthetic
caatgtaaccaagtccagcataagtgcaaaagcatttttctatgatga

SEQ ID NO: 1401 - DNA, 44 bp, Artificial Sequence
  Synthetic
ggtaggcatctatagccagagaaacatcactaagactgatgctg

SEQ ID NO: 1402 - DNA, 45 bp, Artificial Sequence
  Synthetic
gcagaacttttgtacaaaccaaagaaccacaaaccacatctttca

SEQ ID NO: 1403 - DNA, 48 bp, Artificial Sequence
  Synthetic
accgtaatctactttctcaaacacacatgcttccaaattacaaaagac

SEQ ID NO: 1404 - DNA, 39 bp, Artificial Sequence
  Synthetic
tcgctccagggtaatacacactcctcctggtagtggaaa

SEQ ID NO: 1405 - DNA, 47 bp, Artificial Sequence
  Synthetic
tgttgaggatcaccaacatatacaatctatgtgcactaactatgact

SEQ ID NO: 1406 - DNA, 50 bp, Artificial Sequence
  Synthetic
cctggcagctacataattttgactaagcgatttatacataaaaactccac

SEQ ID NO: 1407 - DNA, 44 bp, Artificial Sequence
  Synthetic
agacaatgacaaataagtagtggcagtttaaggattgtgcacgt

SEQ ID NO: 1408 - DNA, 41 bp, Artificial Sequence
  Synthetic
tgccaacattgtcacctgtgatcatgtcagaggttggttag

SEQ ID NO: 1409 - DNA, 43 bp, Artificial Sequence
  Synthetic
gctccaatcttaacaaaataacgcaggtgtttgtactttgggc

SEQ ID NO: 1410 - DNA, 48 bp, Artificial Sequence
  Synthetic
gcccttgtttatggcattttcattagtatgactgctttgttaagaatg

SEQ ID NO: 1411 - DNA, 44 bp, Artificial Sequence
  Synthetic
cccaccatttacaccttcaaggtgaattctcaattgtttgcagg

SEQ ID NO: 1412 - DNA, 46 bp, Artificial Sequence
  Synthetic
tctgtgaatgtctgccacaaattataacatttttactcaagctggt

SEQ ID NO: 1413 - DNA, 41 bp, Artificial Sequence
  Synthetic
aagcttgtcaagggacgctcttgtcgccacatataagtttg

SEQ ID NO: 1414 - DNA, 47 bp, Artificial Sequence
  Synthetic
cgaccttgggtataaaaaccatcatttaactggtttgtttacgtacg

SEQ ID NO: 1415 - DNA, 47 bp, Artificial Sequence
  Synthetic
caacagtcaaatccaaagacttcaatcctagttctaagactgtttgt

SEQ ID NO: 1416 - DNA, 50 bp, Artificial Sequence
  Synthetic
gcacccaagtgtaacactctcatattgtgtcaatattttaacagtaccac

SEQ ID NO: 1417 - DNA, 48 bp, Artificial Sequence
  Synthetic
cgccaaaatacataatttgcgtgtagttgtcggaattaactatcttgg

SEQ ID NO: 1418 - DNA, 44 bp, Artificial Sequence
  Synthetic
cgttgcaaacagagtaactagtgtttgccttgttgcatattgct

SEQ ID NO: 1419 - DNA, 45 bp, Artificial Sequence
  Synthetic
acgtagtttcattgccaatagtagtgatgctcacataccatttgg

SEQ ID NO: 1420 - DNA, 45 bp, Artificial Sequence
  Synthetic
agcgacacaatagacacaggtaagatggtttttattctacaagcc

SEQ ID NO: 1421 - DNA, 50 bp, Artificial Sequence
  Synthetic
tgaagttgatgtgtacgtaattccaaatatttatgatgtatctggtgtgg

SEQ ID NO: 1422 - DNA, 50 bp, Artificial Sequence
  Synthetic
gaaacattacgtggttgaacagcaagttttaacttattctagttttggcg

SEQ ID NO: 1423 - DNA, 45 bp, Artificial Sequence
  Synthetic
gctaaggttgtagtcaccaaaactactgcagatgttagtgagatg

SEQ ID NO: 1424 - DNA, 47 bp, Artificial Sequence
  Synthetic
tgcctgaattgctaatgaaaatggtttctttaattggtggaattgct

SEQ ID NO: 1425 - DNA, 47 bp, Artificial Sequence
  Synthetic
ccaatctaccagtaatcagcctatctctatgacagacttgacactat

SEQ ID NO: 1426 - DNA, 43 bp, Artificial Sequence
  Synthetic
tgccttctttgtaaagagcaagattggttgtgcgttgatggta

SEQ ID NO: 1427 - DNA, 47 bp, Artificial Sequence
  Synthetic
gtgctaatttcactggtcaaattcatacaaattgccaaattacactg

SEQ ID NO: 1428 - DNA, 44 bp, Artificial Sequence
  Synthetic
tgtggatcttttcaacgtcgtaatggcttctttagttgttttgc

SEQ ID NO: 1429 - DNA, 49 bp, Artificial Sequence
  Synthetic
aaaattacagcaatcaaagttgcgtttctaatccttttcgtttatgtgc

SEQ ID NO: 1430 - DNA, 42 bp, Artificial Sequence
  Synthetic
atcactataagcaccacacaccaagctagtggatgatcatgc

SEQ ID NO: 1431 - DNA, 41 bp, Artificial Sequence
  Synthetic
agcccaggtgtcaaagattgattgaagatgcttgtactgtg

SEQ ID NO: 1432 - DNA, 45 bp, Artificial Sequence
  Synthetic
acgtagaaaacccagcctgtgtaatttatagtagagtcggaaggt

SEQ ID NO: 1433 - DNA, 46 bp, Artificial Sequence
  Synthetic
ttctgaaacgtttttgaacattccatacccatcaacaagaaagaca

SEQ ID NO: 1434 - DNA, 43 bp, Artificial Sequence
  Synthetic
acctaaagatttaagagccgcagggaatccttcaagtgacaga

SEQ ID NO: 1435 - DNA, 43 bp, Artificial Sequence
  Synthetic
ggccaaaacattgtgtgacattagaaaatgcaaaagccacggt

SEQ ID NO: 1436 - DNA, 45 bp, Artificial Sequence
  Synthetic
gagatgggttgaattctagtgcaattcactagagaaatgcaacaa

SEQ ID NO: 1437 - DNA, 47 bp, Artificial Sequence
  Synthetic
accactggcttaccattgtgtattcagagctgcttttaattaacatg

SEQ ID NO: 1438 - DNA, 40 bp, Artificial Sequence
  Synthetic
ccaggtgtggcaaatggacactcatgtcctgtttctgtgt

SEQ ID NO: 1439 - DNA, 40 bp, Artificial Sequence
  Synthetic
agaaacatctgtcccatcgctgcgatgagtgtctagactc

SEQ ID NO: 1440 - DNA, 42 bp, Artificial Sequence
  Synthetic
gcgatgctaccttttccaccctaaaagacggctgtttgaggg

SEQ ID NO: 1441 - DNA, 43 bp, Artificial Sequence
  Synthetic
ggcattacaccctctgtaaagctaaccgcggcataaaagtgtt

SEQ ID NO: 1442 - DNA, 47 bp, Artificial Sequence
  Synthetic
ggcgcatttcgtatcttttatacatgcatggctaaaaagtaacaatc

SEQ ID NO: 1443 - DNA, 42 bp, Artificial Sequence
  Synthetic
tccacttgtgcaccacctttagtcatgaactgtatacaacac

SEQ ID NO: 1444 - DNA, 45 bp, Artificial Sequence
  Synthetic
gcagaagtgtcagaagcagattctagaaagaaaacatagatcgcg

SEQ ID NO: 1445 - DNA, 49 bp, Artificial Sequence
  Synthetic
tcagctaatgtggtttgttctacttatatatatagacattgtgtggggt

SEQ ID NO: 1446 - DNA, 41 bp, Artificial Sequence
  Synthetic
cgtgtcgggggttaccacatctcttaggccaagtgtggtgg

SEQ ID NO: 1447 - DNA, 43 bp, Artificial Sequence
  Synthetic
acagaaatatatgatggggtggcatcacttccacgcctaaacg

SEQ ID NO: 1448 - DNA, 40 bp, Artificial Sequence
  Synthetic
tgacgtgggcggtttaagaagttccaaagggcaagggacc

SEQ ID NO: 1449 - DNA, 43 bp, Artificial Sequence
  Synthetic
agaaacaccctgaaggcctgttagaagatacttatgctgagga

SEQ ID NO: 1450 - DNA, 42 bp, Artificial Sequence
  Synthetic
ggtaaccacagtgacatctgaaacttggtacgtaaacgcaaa

SEQ ID NO: 1451 - DNA, 41 bp, Artificial Sequence
  Synthetic
ccaacgcaagcttgttaggatatctgggaatcagtacagag

SEQ ID NO: 1452 - DNA, 42 bp, Artificial Sequence
  Synthetic
gccatcccgtgtaaaaaagtgactgccatgtttttctttggt

SEQ ID NO: 1453 - DNA, 45 bp, Artificial Sequence
  Synthetic
ggggtacaaagcctaactgctctcatattaatgtaatggatccag

SEQ ID NO: 1454 - DNA, 36 bp, Artificial Sequence
  Synthetic
tgcccatctccacgcgaaggtccgcggaaatccagc

SEQ ID NO: 1455 - DNA, 41 bp, Artificial Sequence
  Synthetic
tgcttgtgaggcatgactccaggcatggacatctctccgtc

SEQ ID NO: 1456 - DNA, 39 bp, Artificial Sequence
  Synthetic
gcgttcagcagcgcctcagagtgtcgttggatctgaggg

SEQ ID NO: 1457 - DNA, 38 bp, Artificial Sequence
  Synthetic
ccaccggcatagtgatggtcacgcctggtgacctgcct

SEQ ID NO: 1458 - DNA, 41 bp, Artificial Sequence
  Synthetic
gccgtgctgcacctcaaacattaacatgtacccggcagtcc

SEQ ID NO: 1459 - DNA, 37 bp, Artificial Sequence
  Synthetic
acaaggcaggacgcagcccaacattagcatcccggcg

SEQ ID NO: 1460 - DNA, 42 bp, Artificial Sequence
  Synthetic
ctacctgaactaagactgggtgtaccatccttttgccaatca

SEQ ID NO: 1461 - DNA, 42 bp, Artificial Sequence
  Synthetic
cgaggcaggcttacatgggagtccaggggggactttatgtga

SEQ ID NO: 1462 - DNA, 35 bp, Artificial Sequence
  Synthetic
cgggttggtccagggccttgtcgctgactccgcca

SEQ ID NO: 1463 - DNA, 39 bp, Artificial Sequence
  Synthetic
ctcgtctgggttcttggccccagctcctaagaaggcacc

SEQ ID NO: 1464 - DNA, 36 bp, Artificial Sequence
  Synthetic
aagaggcccctctccgcgagaccctaggcgtcccct

SEQ ID NO: 1465 - DNA, 39 bp, Artificial Sequence
  Synthetic
cctctggtaggactgggcgacccacacacccacccgtct

SEQ ID NO: 1466 - DNA, 39 bp, Artificial Sequence
  Synthetic
cgtaaacgcgctggactgagaaaaggtcagggcccaagg

SEQ ID NO: 1467 - DNA, 39 bp, Artificial Sequence
  Synthetic
gccttcttaggagctgtccgagacacccaggcacacact

SEQ ID NO: 1468 - DNA, 42 bp, Artificial Sequence
  Synthetic
gagttgagctgcctaccatgctccaaaattggtgccttgctc

SEQ ID NO: 1469 - DNA, 38 bp, Artificial Sequence
  Synthetic
cctcgtcttcggtctcagcttcacacgttagggggcgc

SEQ ID NO: 1470 - DNA, 38 bp, Artificial Sequence
  Synthetic
aggggctggtctgtgacctgttgtcggaggtggagagg

SEQ ID NO: 1471 - DNA, 38 bp, Artificial Sequence
  Synthetic
agtccaggcccgggacataaactctaggcctgtggagc

SEQ ID NO: 1472 - DNA, 38 bp, Artificial Sequence
  Synthetic
agagcccagaccggtctccgctccagggaatctttggg

SEQ ID NO: 1473 - DNA, 38 bp, Artificial Sequence
  Synthetic
gcaacgtccaggagctgttctctccccgctgaccagtc

SEQ ID NO: 1474 - DNA, 38 bp, Artificial Sequence
  Synthetic
tcgtggtggaggctgccaggcagcttgtccttgaggag

SEQ ID NO: 1475 - DNA, 35 bp, Artificial Sequence
  Synthetic
cacgttggaccccaagcggtcgggagaggcgcctt

SEQ ID NO: 1476 - DNA, 35 bp, Artificial Sequence
  Synthetic
ggcggagagaatggaggccagagggccggtctcga

SEQ ID NO: 1477 - DNA, 34 bp, Artificial Sequence
  Synthetic
aatgcggccctgcacgtggccgaggccaccttgt

SEQ ID NO: 1478 - DNA, 39 bp, Artificial Sequence
  Synthetic
aaagctggaagcgcctcctatccctgttgtctggccacg

SEQ ID NO: 1479 - DNA, 42 bp, Artificial Sequence
  Synthetic
gccctcctttggggatgatgcatctaggtcagacaggtagcg

SEQ ID NO: 1480 - DNA, 37 bp, Artificial Sequence
  Synthetic
acccgtgggacaaacgcccgagaatggccgcgagttt

SEQ ID NO: 1481 - DNA, 37 bp, Artificial Sequence
  Synthetic
tccccccgccactactccactggatgccctccacgac

SEQ ID NO: 1482 - DNA, 36 bp, Artificial Sequence
  Synthetic
ccgctttctggtctcgggtgagctgcccccgtcaag

SEQ ID NO: 1483 - DNA, 38 bp, Artificial Sequence
  Synthetic
cggccgccttcatcgagttcagctcgttggagaggacc

SEQ ID NO: 1484 - DNA, 41 bp, Artificial Sequence
  Synthetic
gcttgaagaagagctcggggacgagaaccacgagaggtgcc

SEQ ID NO: 1485 - DNA, 42 bp, Artificial Sequence
  Synthetic
acggcgcagttgacgatagagagacagcgggcaagttttgtg

SEQ ID NO: 1486 - DNA, 35 bp, Artificial Sequence
  Synthetic
cgggaggcagatgttggccgtgctgcagccctcga

SEQ ID NO: 1487 - DNA, 37 bp, Artificial Sequence
  Synthetic
agacaacgtgggcctcaacggccttcactggccctgt

SEQ ID NO: 1488 - DNA, 39 bp, Artificial Sequence
  Synthetic
cgagggtgtctctggccttgccacctccgccacctccta

SEQ ID NO: 1489 - DNA, 41 bp, Artificial Sequence
  Synthetic
ctcatgagcaccctggcaacaacgtgacatggagaaactgg

SEQ ID NO: 1490 - DNA, 35 bp, Artificial Sequence
  Synthetic
aatccgcatggagcccccgccaggcccgcatgagt

SEQ ID NO: 1491 - DNA, 34 bp, Artificial Sequence
  Synthetic
tccaccacgtggcgggttcagccgcttcttgggc

SEQ ID NO: 1492 - DNA, 40 bp, Artificial Sequence
  Synthetic
ccttcagatatgccaccccccaggggtactgggggtggtt

SEQ ID NO: 1493 - DNA, 39 bp, Artificial Sequence
  Synthetic
cccgagggtcatgggctcatcaacatgagacgtgaccgg

SEQ ID NO: 1494 - DNA, 37 bp, Artificial Sequence
  Synthetic
tcagtcagggaagccgccgcacctggcttctgaccgg

SEQ ID NO: 1495 - DNA, 40 bp, Artificial Sequence
  Synthetic
cagcagcgtgttcacaaacttatagcctcagccatctacc

SEQ ID NO: 1496 - DNA, 38 bp, Artificial Sequence
  Synthetic
gcctgtgctaccggacacggagcagctcagggaatggc

SEQ ID NO: 1497 - DNA, 35 bp, Artificial Sequence
  Synthetic
aacggggtggatttggcgtgcattagacgcgcgcg

SEQ ID NO: 1498 - DNA, 41 bp, Artificial Sequence
  Synthetic
caccctcctcttgaacaggcctttgtcaatccatggcaggc

SEQ ID NO: 1499 - DNA, 39 bp, Artificial Sequence
  Synthetic
ggacattgtccccccctgactgtatgggttaccgcacgc

SEQ ID NO: 1500 - DNA, 39 bp, Artificial Sequence
  Synthetic
acttggctgaaccaccggccaacttagcagttcggcacc

SEQ ID NO: 1501 - DNA, 36 bp, Artificial Sequence
  Synthetic
ctgaagcccggtgcccaaacgagtcactgctgctgg

SEQ ID NO: 1502 - DNA, 42 bp, Artificial Sequence
  Synthetic
agccagatgttcaggaaccaaagcatcgcttaagtatgagtg

SEQ ID NO: 1503 - DNA, 39 bp, Artificial Sequence
  Synthetic
gggaacagcaggggaggtccagggaatgaaagctcacgg

SEQ ID NO: 1504 - DNA, 40 bp, Artificial Sequence
  Synthetic
gctctcgctgtagtcagactcgtgagggcagtgatagcga

SEQ ID NO: 1505 - DNA, 35 bp, Artificial Sequence
  Synthetic
ttggtgctgtgcccctgccgcagttcgcccagctc

SEQ ID NO: 1506 - DNA, 35 bp, Artificial Sequence
  Synthetic
catgcaccaggggcagctgcgttccagcttcgtcc

SEQ ID NO: 1507 - DNA, 35 bp, Artificial Sequence
  Synthetic
gcagcgggtcagcagtcatcgccgctggagttcct

SEQ ID NO: 1508 - DNA, 40 bp, Artificial Sequence
  Synthetic
gggaagagcacatgcagcctgaggagcgacgagtatgtgg

SEQ ID NO: 1509 - DNA, 39 bp, Artificial Sequence
  Synthetic
gctgatggtgcttgccggatgcgaaaatactgccccgcg

SEQ ID NO: 1510 - DNA, 39 bp, Artificial Sequence
  Synthetic
atccgggccttgacgtgggttctacaatgccagggggga

SEQ ID NO: 1511 - DNA, 38 bp, Artificial Sequence
  Synthetic
gctctacgccttcctccgcaggcttggtgcctctgtgg

SEQ ID NO: 1512 - DNA, 39 bp, Artificial Sequence
  Synthetic
ggaccaacaacccccacctgtggcatgtctgttccccct

SEQ ID NO: 1513 - DNA, 46 bp, Artificial Sequence
  Synthetic
gtctcagttgagcattcaccttttaactggaccctttaaaacatcc

SEQ ID NO: 1514 - DNA, 42 bp, Artificial Sequence
  Synthetic
tgccggactctgtcatccgtaaattgtctgcgtacgctttcc

SEQ ID NO: 1515 - DNA, 40 bp, Artificial Sequence
  Synthetic
ccgatccgacccgctctactttgacagcacctccaacagc

SEQ ID NO: 1516 - DNA, 42 bp, Artificial Sequence
  Synthetic
gcaaaaggggccctattctgctaatgcctctatgttggcaca

SEQ ID NO: 1517 - DNA, 36 bp, Artificial Sequence
  Synthetic
gcacagtgcggctcaggctgcaccgagctgatgggt

SEQ ID NO: 1518 - DNA, 39 bp, Artificial Sequence
  Synthetic
caccgacaacgttctgcgccaatctggttgtcggcctcc

SEQ ID NO: 1519 - DNA, 38 bp, Artificial Sequence
  Synthetic
tcccttcgcaggagggccacagacggatgtcaggtcgg

SEQ ID NO: 1520 - DNA, 38 bp, Artificial Sequence
  Synthetic
tcccgatggcaggtgcacgctcaagtgtaagcagcccg

SEQ ID NO: 1521 - DNA, 39 bp, Artificial Sequence
  Synthetic
ggggctccggtgcctttttcgtgctctcatccctgcaac

SEQ ID NO: 1522 - DNA, 41 bp, Artificial Sequence
  Synthetic
gcacacgttgttttggcaataaaccagaaagatacccagag

SEQ ID NO: 1523 - DNA, 41 bp, Artificial Sequence
  Synthetic
cggccgtttcaaatgctgtggacacgcatccctgtcttctc

SEQ ID NO: 1524 - DNA, 34 bp, Artificial Sequence
  Synthetic
tgctgtccaccgccctgtggctagcccccgcaaa

SEQ ID NO: 1525 - DNA, 39 bp, Artificial Sequence
  Synthetic
cggggtttacagtggcctcattgaaaagggggtggcggt

SEQ ID NO: 1526 - DNA, 39 bp, Artificial Sequence
  Synthetic
gctgaagcggctaagtgggaggtgtcttgggcatcatcc

SEQ ID NO: 1527 - DNA, 35 bp, Artificial Sequence
  Synthetic
tcccgctctgccagctcgagccccaagccttcgca

SEQ ID NO: 1528 - DNA, 42 bp, Artificial Sequence
  Synthetic
tgctcttcaaccttggcagtgtgacaaggcagtagaggacac

SEQ ID NO: 1529 - DNA, 39 bp, Artificial Sequence
  Synthetic
aggcaggcgtccttgggtgcaggcaccgtctgtatacgt

SEQ ID NO: 1530 - DNA, 38 bp, Artificial Sequence
  Synthetic
tggcgccctaagaccacctggccaccacagcacaagtg

SEQ ID NO: 1531 - DNA, 36 bp, Artificial Sequence
  Synthetic
gcagcacacgcccccattccttccccgggaatgtgt

SEQ ID NO: 1532 - DNA, 40 bp, Artificial Sequence
  Synthetic
aaggctggcaaagatccccagtctcctaggaatgccgagc

SEQ ID NO: 1533 - DNA, 39 bp, Artificial Sequence
  Synthetic
tcagcctacaagagcacccagagttgcgctcgacgaact

SEQ ID NO: 1534 - DNA, 38 bp, Artificial Sequence
  Synthetic
gccgagaagaccttctcctgcccgtcagcacccccaca

SEQ ID NO: 1535 - DNA, 40 bp, Artificial Sequence
  Synthetic
gccatcaagtgcacgtgcaacggggaaagaggccgttggc

SEQ ID NO: 1536 - DNA, 38 bp, Artificial Sequence
  Synthetic
gccgggacaagctcagcctccccagtaggtgcctggct

SEQ ID NO: 1537 - DNA, 39 bp, Artificial Sequence
  Synthetic
aggaggccgggcgctataggaccccctctatgtcttcgc

SEQ ID NO: 1538 - DNA, 40 bp, Artificial Sequence
  Synthetic
gggacgtggtctactgggagcgaaggcccgtctgtagagg

SEQ ID NO: 1539 - DNA, 38 bp, Artificial Sequence
  Synthetic
cgctgtgtgggcgagctgatgtcccctctgccgtggaa

SEQ ID NO: 1540 - DNA, 38 bp, Artificial Sequence
  Synthetic
agctagagaaggagccccatgggccgcatccacgtcct

SEQ ID NO: 1541 - DNA, 41 bp, Artificial Sequence
  Synthetic
tgtggctgcgttacaccgatatgcaaagatctgcgtggaca

SEQ ID NO: 1542 - DNA, 38 bp, Artificial Sequence
  Synthetic
ccctggccacctaccctcttagacctgtggcccgcgta

SEQ ID NO: 1543 - DNA, 40 bp, Artificial Sequence
  Synthetic
tcaaggcctccctgaggaaggacgatgtcggctgtcctgc

SEQ ID NO: 1544 - DNA, 37 bp, Artificial Sequence
  Synthetic
cctcccctacggttaccccaccgggaggccgtgcttt

SEQ ID NO: 1545 - DNA, 43 bp, Artificial Sequence
  Synthetic
cgagtcagccatggaagaagaaagagcggtctgtataaaaacg

SEQ ID NO: 1546 - DNA, 50 bp, Artificial Sequence
  Synthetic
aggtagtactaaagcatgcaaatctagacaaatatgattggaaatagacc

SEQ ID NO: 1547 - DNA, 48 bp, Artificial Sequence
  Synthetic
cgtttgtactggagaaccaactaacgttagtgcaagattccaataacg

SEQ ID NO: 1548 - DNA, 48 bp, Artificial Sequence
  Synthetic
tgaaagaagaaaatggcaactggtgactgtactgaattccaaatgatt

SEQ ID NO: 1549 - DNA, 49 bp, Artificial Sequence
  Synthetic
ggtctatttgtgtggcgagttttcagtttatgaaataactaatgccacc

SEQ ID NO: 1550 - DNA, 43 bp, Artificial Sequence
  Synthetic
accatatctttgggcatctgatgtattttgaggatgcaaacgg

SEQ ID NO: 1551 - DNA, 40 bp, Artificial Sequence
  Synthetic
cgaaaacggtcgtgtaggtcttaacaattgcaccgactcg

SEQ ID NO: 1552 - DNA, 49 bp, Artificial Sequence
  Synthetic
aggttggggttcttcaatttcaaattggagaagaaattcctttagatcc

SEQ ID NO: 1553 - DNA, 44 bp, Artificial Sequence
  Synthetic
tgcctccatgaaagtaatatccagtatcttccacctcaaaagcc

SEQ ID NO: 1554 - DNA, 48 bp, Artificial Sequence
  Synthetic
gcatttccaaatccaaattcacacagagattgtcctcctattgaatta

SEQ ID NO: 1555 - DNA, 44 bp, Artificial Sequence
  Synthetic
tgcaggacattttgtagctaatgatgggaacttgcctttgtacc

SEQ ID NO: 1556 - DNA, 50 bp, Artificial Sequence
  Synthetic
ggtatgttggcttggctttatactccacgtatattttatttttcaaccgc

SEQ ID NO: 1557 - DNA, 45 bp, Artificial Sequence
  Synthetic
cgcatggtagcctatacatattgtgctactggtcctgttatgtgc

SEQ ID NO: 1558 - DNA, 43 bp, Artificial Sequence
  Synthetic
gtcgatgaaatctcctggataacatctgcttccagtgagatca

SEQ ID NO: 1559 - DNA, 43 bp, Artificial Sequence
  Synthetic
acttctttccctttcttgttcacatatttgctatggctgacgg

SEQ ID NO: 1560 - DNA, 43 bp, Artificial Sequence
  Synthetic
agcataccttggtgctattagatttttgctaaaacccggagac

SEQ ID NO: 1561 - DNA, 42 bp, Artificial Sequence
  Synthetic
aaccggcaatggctccaaatgttacaggactaaggaacattc

SEQ ID NO: 1562 - DNA, 50 bp, Artificial Sequence
  Synthetic
cccattgattccaatttcactccattgattatcccaaatattcagaagag

SEQ ID NO: 1563 - DNA, 39 bp, Artificial Sequence
  Synthetic
acgtgccaagacttaccgttacaaggttcgttggcagac

SEQ ID NO: 1564 - DNA, 44 bp, Artificial Sequence
  Synthetic
acaccaaatcctcctctgtcctgagctacttaattttgatcaca

SEQ ID NO: 1565 - DNA, 50 bp, Artificial Sequence
  Synthetic
cctttccagctgtttctgaccttattaagttattagacttagtggagaag

SEQ ID NO: 1566 - DNA, 45 bp, Artificial Sequence
  Synthetic
accagttgtatatcacccagcaaacgtgcttgctacaaatttagg

SEQ ID NO: 1567 - DNA, 41 bp, Artificial Sequence
  Synthetic
ccctgtacagcatctccatcatatttgacgaagggacagac

SEQ ID NO: 1568 - DNA, 43 bp, Artificial Sequence
  Synthetic
ctgttgttggtggattggccaaatgaagctgaagatctttctg

SEQ ID NO: 1569 - DNA, 47 bp, Artificial Sequence
  Synthetic
tggtggcatataatgtagccaaattgaatgatgacttaattgaaagc

SEQ ID NO: 1570 - DNA, 45 bp, Artificial Sequence
  Synthetic
agtcaaattgtgtagcatttgcagtcctgaatggatacttacaca

SEQ ID NO: 1571 - DNA, 46 bp, Artificial Sequence
  Synthetic
ggtcagtaagttcaaattgtggtttcagcagagttaaatcctttgc

SEQ ID NO: 1572 - DNA, 44 bp, Artificial Sequence
  Synthetic
ccccaatcgcataactccatttagactttaagacaagagcaaat

SEQ ID NO: 1573 - DNA, 38 bp, Artificial Sequence
  Synthetic
accccgacctggaaagggtgtcttcgccaccaactgga

SEQ ID NO: 1574 - DNA, 37 bp, Artificial Sequence
  Synthetic
ggtgggggtagtggagtctgcaaaggggaggggagcg

SEQ ID NO: 1575 - DNA, 39 bp, Artificial Sequence
  Synthetic
gcacttaagcacattggcgtccacgattactggctgagg

SEQ ID NO: 1576 - DNA, 48 bp, Artificial Sequence
  Synthetic
cgaaccatgttagttagtatgggttatgatctgtaagctttactaacg

SEQ ID NO: 1577 - DNA, 40 bp, Artificial Sequence
  Synthetic
cctggcccttcccctaatggaataagtacaggccgtggca

SEQ ID NO: 1578 - DNA, 47 bp, Artificial Sequence
  Synthetic
accttctgttacaactggagtatctagaatcaattgctgagatacac

SEQ ID NO: 1579 - DNA, 49 bp, Artificial Sequence
  Synthetic
ggcgttgtacatctaaaaattgccttgaggtcacacaaatatttgaaag

SEQ ID NO: 1580 - DNA, 42 bp, Artificial Sequence
  Synthetic
actttcaactgggccttgtactgaaatgcaattattggggga

SEQ ID NO: 1581 - DNA, 44 bp, Artificial Sequence
  Synthetic
gcaaacggtcactaattgcatgatacagtggcgagagttcaaag

SEQ ID NO: 1582 - DNA, 40 bp, Artificial Sequence
  Synthetic
acctgatgttccaacccctaaagtttgggcctgtagaggt

SEQ ID NO: 1583 - DNA, 47 bp, Artificial Sequence
  Synthetic
tgctggcaaaaagaaattatgatccttatgttagaggaggttcagtt

SEQ ID NO: 1584 - DNA, 43 bp, Artificial Sequence
  Synthetic
aggggccgttttttatcgaaattagatcactgaaagccagaga

SEQ ID NO: 1585 - DNA, 40 bp, Artificial Sequence
  Synthetic
atgcacagctagcgccatatctttcttctagcatggacca

SEQ ID NO: 1586 - DNA, 42 bp, Artificial Sequence
  Synthetic
tgttgggatcttctggcctattctcaagggcgttatattgga

SEQ ID NO: 1587 - DNA, 43 bp, Artificial Sequence
  Synthetic
gcttaatgccactgtatcgtttcaagcaagaagcttgtggatg

SEQ ID NO: 1588 - DNA, 42 bp, Artificial Sequence
  Synthetic
acacgttaacagtactcgattcctggcaggagaaatcccatc

SEQ ID NO: 1589 - DNA, 42 bp, Artificial Sequence
  Synthetic
cgttttgatttagcctcagtcttcatgggggttaaagggaga

SEQ ID NO: 1590 - DNA, 42 bp, Artificial Sequence
  Synthetic
gtgaaatggcgaactgtttgttcgcatggtatcaacagtggg

SEQ ID NO: 1591 - DNA, 43 bp, Artificial Sequence
  Synthetic
agaacggttaggattcgtttttcttgtgtagctgcttctggtg

SEQ ID NO: 1592 - DNA, 44 bp, Artificial Sequence
  Synthetic
actcggagacaagtgatataatggacagttagtctggacggatg

SEQ ID NO: 1593 - DNA, 49 bp, Artificial Sequence
  Synthetic
ccatctttacatgagaaggcattccctaccttcctttagtaaagaatgt

SEQ ID NO: 1594 - DNA, 42 bp, Artificial Sequence
  Synthetic
aaccatgatccaccatgttcaatattgggttgattggtttgg

SEQ ID NO: 1595 - DNA, 45 bp, Artificial Sequence
  Synthetic
cgcaccttgacaaatcctttagaaattctcaaaagggattgacgg

SEQ ID NO: 1596 - DNA, 44 bp, Artificial Sequence
  Synthetic
agcatcaactgatgagccagaatctgaagctaacagaacattgc

SEQ ID NO: 1597 - DNA, 41 bp, Artificial Sequence
  Synthetic
agacaaagagtatgcagcggtcatcgcaatcgtaagtatcc

SEQ ID NO: 1598 - DNA, 43 bp, Artificial Sequence
  Synthetic
tgttccatagtcccttgtcgatatcctctttgtgaacagtgtc

SEQ ID NO: 1599 - DNA, 44 bp, Artificial Sequence
  Synthetic
atcaccctctacaaaaagctcctatacagggtgttatgttttgc

SEQ ID NO: 1600 - DNA, 45 bp, Artificial Sequence
  Synthetic
cacagtatcgcaagttgaaggttaactttttggatatctgccttc

SEQ ID NO: 1601 - DNA, 45 bp, Artificial Sequence
  Synthetic
tttgcaggcctgtagtccctgaagaagataaaactaagaatcagg

SEQ ID NO: 1602 - DNA, 42 bp, Artificial Sequence
  Synthetic
cccccgaaaagctctatccatgggctcttttgttgagtttga

SEQ ID NO: 1603 - DNA, 45 bp, Artificial Sequence
  Synthetic
gccaaccattgcttatccgaaatcaatgttctgttatctccagat

SEQ ID NO: 1604 - DNA, 41 bp, Artificial Sequence
  Synthetic
cctttgctacctcttccatggaatgcggttttaaagatggc

SEQ ID NO: 1605 - DNA, 47 bp, Artificial Sequence
  Synthetic
ttttgctatccaatttcctgagtcttctgattgagggacttctatca

SEQ ID NO: 1606 - DNA, 46 bp, Artificial Sequence
  Synthetic
aaagcgttctagttgtgtgtgataagtttctcggaaatcacaaact

SEQ ID NO: 1607 - DNA, 43 bp, Artificial Sequence
  Synthetic
gttcgcatattggaagacggagctgaataggaattcctcgacc

SEQ ID NO: 1608 - DNA, 41 bp, Artificial Sequence
  Synthetic
aggtttaacaaaagccaaggaggcttcgccaagctttgagt

SEQ ID NO: 1609 - DNA, 46 bp, Artificial Sequence
  Synthetic
cggagtagagaaatcagcagactgcttcgcattcttattaccaatg

SEQ ID NO: 1610 - DNA, 42 bp, Artificial Sequence
  Synthetic
catgcaccaatagttacggtgttttacagtttgtggagggtt

SEQ ID NO: 1611 - DNA, 47 bp, Artificial Sequence
  Synthetic
gcttgtgtgtcttttgtctttttcataaacaatatgctcaatacggg

SEQ ID NO: 1612 - DNA, 42 bp, Artificial Sequence
  Synthetic
gtttcacctcctaagaagaaccgctttcggaacaacaactgc

SEQ ID NO: 1613 - DNA, 45 bp, Artificial Sequence
  Synthetic
catcctgttcagctttacgaaggaaagcctgtacagaatacaaga

SEQ ID NO: 1614 - DNA, 48 bp, Artificial Sequence
  Synthetic
ccttcggttatcggagtagttacaagtttaacagtagatcaactttcc

SEQ ID NO: 1615 - DNA, 44 bp, Artificial Sequence
  Synthetic
ggaagcagataatttagaggaagctcttgccctttatgtggtct

SEQ ID NO: 1616 - DNA, 49 bp, Artificial Sequence
  Synthetic
cctaagatagcgatcaaaggttgatcctacttaacctattttacagatg

SEQ ID NO: 1617 - DNA, 42 bp, Artificial Sequence
  Synthetic
gcaggtttagatgttgtgggttttggctatggcttttatggg

SEQ ID NO: 1618 - DNA, 44 bp, Artificial Sequence
  Synthetic
aatgttctaaaggggatgtggatttaagcactcctcctatcaca

SEQ ID NO: 1619 - DNA, 42 bp, Artificial Sequence
  Synthetic
ggagtggattcctcggttgttccaacaacattatactcccct

SEQ ID NO: 1620 - DNA, 44 bp, Artificial Sequence
  Synthetic
catgggtgatttcttctgggaattactgttgaagtacgtccctt

SEQ ID NO: 1621 - DNA, 43 bp, Artificial Sequence
  Synthetic
agaactgctgcctctaaaagatcaggctgataaatgttttcgg

SEQ ID NO: 1622 - DNA, 43 bp, Artificial Sequence
  Synthetic
ctggtaaaagaagggctgtttgatattgtcgcgaatagtcaca

SEQ ID NO: 1623 - DNA, 43 bp, Artificial Sequence
  Synthetic
ggctgcagaggctattgaagtttgattttctctactaagtcgt

SEQ ID NO: 1624 - DNA, 38 bp, Artificial Sequence
  Synthetic
agacgtcacaggtgtggtaagttatccccaggcatgac

SEQ ID NO: 1625 - DNA, 42 bp, Artificial Sequence
  Synthetic
gattgctcctcagaggtattggtagtttggcaagcaaacaac

SEQ ID NO: 1626 - DNA, 41 bp, Artificial Sequence
  Synthetic
tggtttcttgcccaagatctcacctcttacaaaccgcattt

SEQ ID NO: 1627 - DNA, 45 bp, Artificial Sequence
  Synthetic
ttcacagatcctccgtaaagaatgattgcttctctcttttccaaa

SEQ ID NO: 1628 - DNA, 42 bp, Artificial Sequence
  Synthetic
aggttatggaatcgcggttatcaggagcctgtgcagaatgtg

SEQ ID NO: 1629 - DNA, 42 bp, Artificial Sequence
  Synthetic
tggaatttctcgaggcgctctaaagtaacaggactatcccct

SEQ ID NO: 1630 - DNA, 43 bp, Artificial Sequence
  Synthetic
gaagtggatactgagacagaaagttaccggtactttgcaacac

SEQ ID NO: 1631 - DNA, 47 bp, Artificial Sequence
  Synthetic
ggtgcatattacgctgtccttcgaaacaagaagttctttttcaacac

SEQ ID NO: 1632 - DNA, 43 bp, Artificial Sequence
  Synthetic
tggtcaaagacgcaagctgtgaccttatctttgggatacagat

SEQ ID NO: 1633 - DNA, 40 bp, Artificial Sequence
  Synthetic
atgattttgttcgttggcggagagaaaacaggcaagccat

SEQ ID NO: 1634 - DNA, 45 bp, Artificial Sequence
  Synthetic
agctagcttcatggagtatgtctaccaacataaaactggagttct

SEQ ID NO: 1635 - DNA, 45 bp, Artificial Sequence
  Synthetic
gggaaaggggttttcaagaagaatatcattctctgtaacaacctc

SEQ ID NO: 1636 - DNA, 47 bp, Artificial Sequence
  Synthetic
tttcaggaatttctgtcggtggcggtcttaattccattaataagact

SEQ ID NO: 1637 - DNA, 39 bp, Artificial Sequence
  Synthetic
agaaggaagaccgcaaaggaagcagacactacatgccaa

SEQ ID NO: 1638 - DNA, 42 bp, Artificial Sequence
  Synthetic
catggtagtcgtaaaagaaagggattgttgtgtccttccgtt

SEQ ID NO: 1639 - DNA, 39 bp, Artificial Sequence
  Synthetic
tagaggcccaggaatggagacgtagcaaaaatctcccca

SEQ ID NO: 1640 - DNA, 41 bp, Artificial Sequence
  Synthetic
gctcagtatttagcagggcagtcttcccaaaagacttcaga

SEQ ID NO: 1641 - DNA, 42 bp, Artificial Sequence
  Synthetic
gttagcatggcaggagaatttcttaactgacaaaagctgccg

SEQ ID NO: 1642 - DNA, 42 bp, Artificial Sequence
  Synthetic
aggctgctaatatgtcttcacgttccgtagtggttcgggatt

SEQ ID NO: 1643 - DNA, 38 bp, Artificial Sequence
  Synthetic
tcagaaagggctgaaggcagaaacggtgcaactcgatc

SEQ ID NO: 1644 - DNA, 48 bp, Artificial Sequence
  Synthetic
agttgcacagaaataacagctcccaaaaataggattagaagaacttcc

SEQ ID NO: 1645 - DNA, 46 bp, Artificial Sequence
  Synthetic
tgctttcgagaggatacaaaggggctggattcacaatagtaaatgc

SEQ ID NO: 1646 - DNA, 41 bp, Artificial Sequence
  Synthetic
taaggggtccccagacatggcagaacacatcacttcagaag

SEQ ID NO: 1647 - DNA, 41 bp, Artificial Sequence
  Synthetic
tggctcagtcggttcttcagtaatccagactcttcctcatc

SEQ ID NO: 1648 - DNA, 40 bp, Artificial Sequence
  Synthetic
tctacggcgagcttgtttactaaggcagaaggatcttgtt

SEQ ID NO: 1649 - DNA, 44 bp, Artificial Sequence
  Synthetic
cttgaatttcgaaagaggatgttgccttgcttgcgttattttcg

SEQ ID NO: 1650 - DNA, 43 bp, Artificial Sequence
  Synthetic
ggttgtcagtaagatcgtcggacctttaattacagctgggatg

SEQ ID NO: 1651 - DNA, 43 bp, Artificial Sequence
  Synthetic
acaggattcttgctttggcagaatttcaacattgcgatcatca

SEQ ID NO: 1652 - DNA, 46 bp, Artificial Sequence
  Synthetic
cattgatcgttttgctagggatttcttaaacacgtacagaaagcaa

SEQ ID NO: 1653 - DNA, 41 bp, Artificial Sequence
  Synthetic
cacgagtgtttgagtgctaagtctgactgcgctatgaggat

SEQ ID NO: 1654 - DNA, 43 bp, Artificial Sequence
  Synthetic
gtaggggctcaaggacgaactcaaatcaatgatttccacttca

SEQ ID NO: 1655 - DNA, 42 bp, Artificial Sequence
  Synthetic
gattgtagagtgggatcagcaagttggacaataaaatgcgcg

SEQ ID NO: 1656 - DNA, 49 bp, Artificial Sequence
  Synthetic
cctacctggttgattatggagaaattaccgaatctctaataatggatca

SEQ ID NO: 1657 - DNA, 38 bp, Artificial Sequence
  Synthetic
aaagctcctttttcgtgcccgtgctgctatccccgata

SEQ ID NO: 1658 - DNA, 40 bp, Artificial Sequence
  Synthetic
tcccattctcttcacgaggtttatccaccatccctgcttc

SEQ ID NO: 1659 - DNA, 43 bp, Artificial Sequence
  Synthetic
tgttcaatgttcctttggagcagaaattcactgctttagcctg

SEQ ID NO: 1660 - DNA, 38 bp, Artificial Sequence
  Synthetic
cgtgcgtgctagaacttcttaaaacgacgaggacccta

SEQ ID NO: 1661 - DNA, 46 bp, Artificial Sequence
  Synthetic
gcatttgtacgttgatatcgagcatgtgctgcttgagaattcttac

SEQ ID NO: 1662 - DNA, 43 bp, Artificial Sequence
  Synthetic
gcatgcagggttgctatcaacgaaaactcgaatccaaactttc

SEQ ID NO: 1663 - DNA, 42 bp, Artificial Sequence
  Synthetic
tggtataagaacggtcgtgtgcgacgctgtagcataatcaat

SEQ ID NO: 1664 - DNA, 41 bp, Artificial Sequence
  Synthetic
gatggcgctattgcaaatgcaagaacgcaaagattttcacg

SEQ ID NO: 1665 - DNA, 44 bp, Artificial Sequence
  Synthetic
agaagaaaactccaatcaaaacgtggtgtgcccaatcatttcag

SEQ ID NO: 1666 - DNA, 42 bp, Artificial Sequence
  Synthetic
ggcagctcctcaattccgagatatgctgatcaaattttggct

SEQ ID NO: 1667 - DNA, 45 bp, Artificial Sequence
  Synthetic
gggaagcagaccagagaagaagaatccccttagaagttacttaaa

SEQ ID NO: 1668 - DNA, 42 bp, Artificial Sequence
  Synthetic
tccccagggaatttctttgcaaggattaaccagcaaatacac

SEQ ID NO: 1669 - DNA, 42 bp, Artificial Sequence
  Synthetic
gggaggtaaatcaagactccgatttcctgctttcatcatggg

SEQ ID NO: 1670 - DNA, 43 bp, Artificial Sequence
  Synthetic
atcgtagagtcttgtatcacctgaaaaattgggatagcgctct

SEQ ID NO: 1671 - DNA, 42 bp, Artificial Sequence
  Synthetic
ttacgctaaaaacgggcctattttgattaaccaaaagagcgc

SEQ ID NO: 1672 - DNA, 41 bp, Artificial Sequence
  Synthetic
tcatcaagctatcggcgatgtatagctttcgatgctcaacc

SEQ ID NO: 1673 - DNA, 41 bp, Artificial Sequence
  Synthetic
gcaagagcagcttctttgtctatcgcagaagaaaaattccc

SEQ ID NO: 1674 - DNA, 39 bp, Artificial Sequence
  Synthetic
ctccaggagttgcggatacaacctatgaagaagctcgtc

SEQ ID NO: 1675 - DNA, 45 bp, Artificial Sequence
  Synthetic
caatcaatgcagaattcgtcacaaaagactttaggagatcgtgtg

SEQ ID NO: 1676 - DNA, 47 bp, Artificial Sequence
  Synthetic
gctatcgaagtggattgccgaattatcctttatctaacagtctctct

SEQ ID NO: 1677 - DNA, 48 bp, Artificial Sequence
  Synthetic
cttcgtcaagggttcttgtgattgtctctttactattaggaattaacg

SEQ ID NO: 1678 - DNA, 42 bp, Artificial Sequence
  Synthetic
ttgcgcatggatgactgttagtcaatgaccttcctatgtctc

SEQ ID NO: 1679 - DNA, 44 bp, Artificial Sequence
  Synthetic
cgagcagcaagaaggaattaattgtcatcgacaagattccctcc

SEQ ID NO: 1680 - DNA, 41 bp, Artificial Sequence
  Synthetic
gctgtttcatctgcggaactttaaagcagtgaaaacttgcc

SEQ ID NO: 1681 - DNA, 45 bp, Artificial Sequence
  Synthetic
gagaagtctttattcaagccaaaggctttcaatcttcgggacaac

SEQ ID NO: 1682 - DNA, 39 bp, Artificial Sequence
  Synthetic
aacagaaagcctgagccagctcgtgcaagtatgttcaac

SEQ ID NO: 1683 - DNA, 48 bp, Artificial Sequence
  Synthetic
gtcctccgctgatgatattagaagacgtttagaaattctagaagatgc

SEQ ID NO: 1684 - DNA, 42 bp, Artificial Sequence
  Synthetic
cagcaaatggtgaatgctgcctaaaaattcgtctaactgctg

SEQ ID NO: 1685 - DNA, 41 bp, Artificial Sequence
  Synthetic
tgcgagtgttatatgagcacgaacttctacaatagcgtgca

SEQ ID NO: 1686 - DNA, 43 bp, Artificial Sequence
  Synthetic
tgtccatttatttggtcttggagtctcttgaacgcaacgagaa

SEQ ID NO: 1687 - DNA, 41 bp, Artificial Sequence
  Synthetic
cgcttcatcgataggcatagccaacaggaaaatggagaggt

SEQ ID NO: 1688 - DNA, 43 bp, Artificial Sequence
  Synthetic
tccaagaattagacaaaagatcgcaccatttgttcgcgagtca

SEQ ID NO: 1689 - DNA, 43 bp, Artificial Sequence
  Synthetic
caaccaccttgatgaaaaacaaagtttgtctcggacgttttgc

SEQ ID NO: 1690 - DNA, 46 bp, Artificial Sequence
  Synthetic
cgatgtagtattttgctcttgccttacatttctcgcatatgaacag

SEQ ID NO: 1691 - DNA, 44 bp, Artificial Sequence
  Synthetic
agctaatcactcacagcaccatctgtgcgatcaaaaatacgttt

SEQ ID NO: 1692 - DNA, 41 bp, Artificial Sequence
  Synthetic
taccgtcgtatgtcggctgaccattttcaccatttcacaga

SEQ ID NO: 1693 - DNA, 45 bp, Artificial Sequence
  Synthetic
ctttccgactgcagttgatcatttatcacagatacatcaagagct

SEQ ID NO: 1694 - DNA, 43 bp, Artificial Sequence
  Synthetic
gttgttcttttgggtacaacaatctccaaagcgacgaagaact

SEQ ID NO: 1695 - DNA, 39 bp, Artificial Sequence
  Synthetic
caaaggagttgccggacctccaagagatgcaaccagaag

SEQ ID NO: 1696 - DNA, 46 bp, Artificial Sequence
  Synthetic
cgttgaaaccgattttgttgctaactcggacaataaactcgtaacg

SEQ ID NO: 1697 - DNA, 39 bp, Artificial Sequence
  Synthetic
acctgcggaagaagctgttgagcttcatcttgagcttct

SEQ ID NO: 1698 - DNA, 46 bp, Artificial Sequence
  Synthetic
ggatcctaaatagcgcttcactaaagtcattttctgttcatttcgg

SEQ ID NO: 1699 - DNA, 42 bp, Artificial Sequence
  Synthetic
tcacctaacctaggattatgcgttcgctatcgtcaacagcat

SEQ ID NO: 1700 - DNA, 39 bp, Artificial Sequence
  Synthetic
gccctttcccaactccttgagtttagtgcaccgttacga

SEQ ID NO: 1701 - DNA, 43 bp, Artificial Sequence
  Synthetic
ttaggcccagaggtcgattgtcgtctattaatccttctaacga

SEQ ID NO: 1702 - DNA, 45 bp, Artificial Sequence
  Synthetic
gtcaccggagcatcattatttactttacgctcttttgaacatgtc

SEQ ID NO: 1703 - DNA, 42 bp, Artificial Sequence
  Synthetic
gtgggagcgttcgagacatgattagttgctatgtctacctct

SEQ ID NO: 1704 - DNA, 41 bp, Artificial Sequence
  Synthetic
ggacaattccgcataatttcggaagctctgtttggttcctt

SEQ ID NO: 1705 - DNA, 41 bp, Artificial Sequence
  Synthetic
caatgcaccccttctttctgatccaagaggttccttctcaa

SEQ ID NO: 1706 - DNA, 43 bp, Artificial Sequence
  Synthetic
ccaccttcaatcacagcacttaaggaattcgatacttggattc

SEQ ID NO: 1707 - DNA, 45 bp, Artificial Sequence
  Synthetic
cgggatgattgaagtacagtccatgacttttttcaagctaacatc

SEQ ID NO: 1708 - DNA, 47 bp, Artificial Sequence
  Synthetic
ccagtcctcttgtctttcgacttcttagatagtcgcttattagtgaa

SEQ ID NO: 1709 - DNA, 42 bp, Artificial Sequence
  Synthetic
ctgttttattcttgcgtattggctgttgacaatggcttgagc

SEQ ID NO: 1710 - DNA, 44 bp, Artificial Sequence
  Synthetic
cggctttgcgcataaaaaacattttcaggttgagtatatggaag

SEQ ID NO: 1711 - DNA, 49 bp, Artificial Sequence
  Synthetic
gcgattttaaccacaagcttcaaatagaaactattgatcaaagtatccg

SEQ ID NO: 1712 - DNA, 45 bp, Artificial Sequence
  Synthetic
caaagttctggcattacagatcctagagttagtggtcatacaagg

SEQ ID NO: 1713 - DNA, 45 bp, Artificial Sequence
  Synthetic
gccctgaagtcagattttcttgccaaaaaaattatcaggacgctt

SEQ ID NO: 1714 - DNA, 40 bp, Artificial Sequence
  Synthetic
atgcagggttcgggaaaacaccatcacacacagcttttac

SEQ ID NO: 1715 - DNA, 44 bp, Artificial Sequence
  Synthetic
cctccgtagacaaaaacaacggactggaatatacacttcttccg

SEQ ID NO: 1716 - DNA, 45 bp, Artificial Sequence
  Synthetic
gcactctttaaatgattgctgcctaaggaagtgatgattcgaaga

SEQ ID NO: 1717 - DNA, 38 bp, Artificial Sequence
  Synthetic
gagtttgggcaagccgatgaagaaatccccgccagaaa

SEQ ID NO: 1718 - DNA, 39 bp, Artificial Sequence
  Synthetic
ctgttcgaaacgcatggcagcccatggatcgtttagagc

SEQ ID NO: 1719 - DNA, 43 bp, Artificial Sequence
  Synthetic
tcccaaccaactgcttaaacatctagctttgatcaattccgta

SEQ ID NO: 1720 - DNA, 42 bp, Artificial Sequence
  Synthetic
agtgattgttacctctttgcaacctttggcagtcattgagga

SEQ ID NO: 1721 - DNA, 41 bp, Artificial Sequence
  Synthetic
ccataggatctggaaccggagttgctgattttgtggttctt

SEQ ID NO: 1722 - DNA, 43 bp, Artificial Sequence
  Synthetic
actctttttagactctgtgcgtgtcagcagagcaatacgttgg

SEQ ID NO: 1723 - DNA, 43 bp, Artificial Sequence
  Synthetic
gccccaatcgaaaatctctcctattattcccccttaggtctgg

SEQ ID NO: 1724 - DNA, 45 bp, Artificial Sequence
  Synthetic
tgggatgcgatcttctgtgtattagcttttcttctttcagttctg

SEQ ID NO: 1725 - DNA, 42 bp, Artificial Sequence
  Synthetic
aggagaacacataccctcttctttattcatgcttcgatccca

SEQ ID NO: 1726 - DNA, 41 bp, Artificial Sequence
  Synthetic
tgaagaaccaggatccagctaatttctcggaagggagttgt

SEQ ID NO: 1727 - DNA, 38 bp, Artificial Sequence
  Synthetic
gctcgcaatagcagttctcctttttgggcttctctgcg

SEQ ID NO: 1728 - DNA, 39 bp, Artificial Sequence
  Synthetic
agagtgcgcaataaccacccgtgaaagcacaggttcatg

SEQ ID NO: 1729 - DNA, 46 bp, Artificial Sequence
  Synthetic
gtcacgaatattttcctgagaaggaatgacaatgctctttatcgac

SEQ ID NO: 1730 - DNA, 46 bp, Artificial Sequence
  Synthetic
aagaccctgctttccctgtaaagaattattaagcaaggatttaccg

SEQ ID NO: 1731 - DNA, 43 bp, Artificial Sequence
  Synthetic
ccaaagctccgtacactttttccttgcaaccgatagattctga

SEQ ID NO: 1732 - DNA, 38 bp, Artificial Sequence
  Synthetic
atctcccgcagccatatcacccggaagtggctactacc

SEQ ID NO: 1733 - DNA, 43 bp, Artificial Sequence
  Synthetic
gtgtctcgaaaagctgcttctaaatgtttgttcctttcgatcg

SEQ ID NO: 1734 - DNA, 41 bp, Artificial Sequence
  Synthetic
cgatttccctaacgcttccttatttatgcctttgttgctgc

SEQ ID NO: 1735 - DNA, 42 bp, Artificial Sequence
  Synthetic
accacaactcttgctcgcttatcaaagagcatcatacgaaga

SEQ ID NO: 1736 - DNA, 44 bp, Artificial Sequence
  Synthetic
catccgcaaaagttactttgttttgtgtcgttcggaaaatctcc

SEQ ID NO: 1737 - DNA, 40 bp, Artificial Sequence
  Synthetic
acaagcttgctgttaaactcctccttatggctcagcttca

SEQ ID NO: 1738 - DNA, 43 bp, Artificial Sequence
  Synthetic
gcgcattgaaactatgcagatcaatatttgttttcctccggga

SEQ ID NO: 1739 - DNA, 40 bp, Artificial Sequence
  Synthetic
tccagcacacatgagacaggttggagattgaaagacacga

SEQ ID NO: 1740 - DNA, 46 bp, Artificial Sequence
  Synthetic
ccagaaagtttaatctgcgctctttgtgtcagtcttttttctggat

SEQ ID NO: 1741 - DNA, 45 bp, Artificial Sequence
  Synthetic
cctactcatgcggaatgttttggtccgaataattacatctgttgc

SEQ ID NO: 1742 - DNA, 44 bp, Artificial Sequence
  Synthetic
cctaatccacaacgaggtcctggtgctttggttaaaattgctac

SEQ ID NO: 1743 - DNA, 42 bp, Artificial Sequence
  Synthetic
ttcctcattatctttggtcttgccaccacaggatacggcata

SEQ ID NO: 1744 - DNA, 45 bp, Artificial Sequence
  Synthetic
acaaaccgatcgcgaattggagcttagtctatttgtaaagtagtg

SEQ ID NO: 1745 - DNA, 39 bp, Artificial Sequence
  Synthetic
cgcaaatgattacgcccctctagtttggttggtgagtga

SEQ ID NO: 1746 - DNA, 41 bp, Artificial Sequence
  Synthetic
gccctgatagaaggagctatggtgaaatggcgttatgttcc

SEQ ID NO: 1747 - DNA, 45 bp, Artificial Sequence
  Synthetic
ttggaggtggcatcctttccgataagactatcatgattaaagctg

SEQ ID NO: 1748 - DNA, 43 bp, Artificial Sequence
  Synthetic
accggccaaactccatcaaggcccattaaagataatcattgga

SEQ ID NO: 1749 - DNA, 44 bp, Artificial Sequence
  Synthetic
ccagcagctacattgctactaaagaactctggatcagtttcctt

SEQ ID NO: 1750 - DNA, 43 bp, Artificial Sequence
  Synthetic
tgaatgcgcagatcgtatatctaaagcgagtagcttctttggt

SEQ ID NO: 1751 - DNA, 40 bp, Artificial Sequence
  Synthetic
aggttttcatatgctggttcccatttgttcggagatgcgt

SEQ ID NO: 1752 - DNA, 40 bp, Artificial Sequence
  Synthetic
acccgctgctgaattattttgtgcttccggactatcgaag

SEQ ID NO: 1753 - DNA, 46 bp, Artificial Sequence
  Synthetic
gacaaaccatgattcacctcgatacagccttgtttttattaaaccc

SEQ ID NO: 1754 - DNA, 42 bp, Artificial Sequence
  Synthetic
ccgcatctgtaagctcacagaatgcaagaagatataatcgcc

SEQ ID NO: 1755 - DNA, 39 bp, Artificial Sequence
  Synthetic
tcatcttcccgacggatgctagatggaaactgatgggga

SEQ ID NO: 1756 - DNA, 46 bp, Artificial Sequence
  Synthetic
gccagattcgccttatttcttctttaggacccatatacaagagagt

SEQ ID NO: 1757 - DNA, 42 bp, Artificial Sequence
  Synthetic
tctccagaagttccgatcattgagacaatggtgatggagttg

SEQ ID NO: 1758 - DNA, 45 bp, Artificial Sequence
  Synthetic
ggcccagtacctgcttcttagcaaatgaaaacatggatactatgg

SEQ ID NO: 1759 - DNA, 41 bp, Artificial Sequence
  Synthetic
ccttggaaccgattcttacactgctctgccctgttagtgga

SEQ ID NO: 1760 - DNA, 42 bp, Artificial Sequence
  Synthetic
tgtactttaacacagccactgcccaagtgcttgtcatgatgg

SEQ ID NO: 1761 - DNA, 50 bp, Artificial Sequence
  Synthetic
cactagaatcaggataacaggagcagaaaagggaaagatagtcaaatcag

SEQ ID NO: 1762 - DNA, 47 bp, Artificial Sequence
  Synthetic
aaaccgtttcttgaactaatgctttggagtaaaagggttttcattca

SEQ ID NO: 1763 - DNA, 43 bp, Artificial Sequence
  Synthetic
tcagaccgtgtttaaagaagcgtattgtggattcttgatcgtc

SEQ ID NO: 1764 - DNA, 47 bp, Artificial Sequence
  Synthetic
ttgtgtaggctgaagctactgtagaggctgaaaaaataaagatatgc

SEQ ID NO: 1765 - DNA, 44 bp, Artificial Sequence
  Synthetic
tccacatccttggtaaaggtagtcttctttgtctggtggatcct

SEQ ID NO: 1766 - DNA, 41 bp, Artificial Sequence
  Synthetic
aagctgttgttgcaattttttgccttggtgaatgccttgga

SEQ ID NO: 1767 - DNA, 46 bp, Artificial Sequence
  Synthetic
cctgttatctagtcctccaacaacttgtgacaactactttcaagtg

SEQ ID NO: 1768 - DNA, 41 bp, Artificial Sequence
  Synthetic
cctgacagcaactccctcatcatacattggagaagctgatg

SEQ ID NO: 1769 - DNA, 45 bp, Artificial Sequence
  Synthetic
tggttacagtggtatcagttccacaatccattccaaaaatcccag

SEQ ID NO: 1770 - DNA, 49 bp, Artificial Sequence
  Synthetic
agcttcagatcttgcattttcaattgaatgacagaatttctcatgatga

SEQ ID NO: 1771 - DNA, 48 bp, Artificial Sequence
  Synthetic
cagatcaatttttgtgtcaagagggtattttcaagttcaacgaaactg

SEQ ID NO: 1772 - DNA, 47 bp, Artificial Sequence
  Synthetic
gttgaatagcttagtgacacctcctatacaagaagctcaaaagagaa

SEQ ID NO: 1773 - DNA, 40 bp, Artificial Sequence
  Synthetic
tagcaacctccatggcctccgtagcactacggcaaaggct

SEQ ID NO: 1774 - DNA, 44 bp, Artificial Sequence
  Synthetic
ggaacactttcactgcctgtattgccatagaaaaacacgtaacc

SEQ ID NO: 1775 - DNA, 40 bp, Artificial Sequence
  Synthetic
tcaatgggctggacaaggtcggaaacaggctactatacca

SEQ ID NO: 1776 - DNA, 46 bp, Artificial Sequence
  Synthetic
ccatctacatcactacaatcagcttgcaaaaatggcagataaaggt

SEQ ID NO: 1777 - DNA, 47 bp, Artificial Sequence
  Synthetic
tgcgttgaggcgaaatagtaatagaagtattttagtcctaaagctgt

SEQ ID NO: 1778 - DNA, 38 bp, Artificial Sequence
  Synthetic
caaagctgctactacgctgcaaatgttggggatgcaca

SEQ ID NO: 1779 - DNA, 42 bp, Artificial Sequence
  Synthetic
cattgaaacggtcgctgagagggcaattagatctaagtgacc

SEQ ID NO: 1780 - DNA, 48 bp, Artificial Sequence
  Synthetic
gtgcgtcttgagcaaatctgatattatcatggtgcctattttatggat

SEQ ID NO: 1781 - DNA, 40 bp, Artificial Sequence
  Synthetic
tttggatccccctggaggcgtctaaaggaaggtacgggcg

SEQ ID NO: 1782 - DNA, 36 bp, Artificial Sequence
  Synthetic
tcccccgttcccttccgtcgggagcaggagaaggag

SEQ ID NO: 1783 - DNA, 49 bp, Artificial Sequence
  Synthetic
gaccatgtagtactgaagcaatcataatactcttaagtgttatcgctac

SEQ ID NO: 1784 - DNA, 38 bp, Artificial Sequence
  Synthetic
ggcaccaaagcaggcctaatggtgaagggacgagtgta

SEQ ID NO: 1785 - DNA, 45 bp, Artificial Sequence
  Synthetic
ccaagtctgctaacccttatatagcacaaaaacttggtaggccta

SEQ ID NO: 1786 - DNA, 50 bp, Artificial Sequence
  Synthetic
tcgtttcttccattttaagctaggagataataccccaacagtaataattc

SEQ ID NO: 1787 - DNA, 44 bp, Artificial Sequence
  Synthetic
tccctgacaccttaggcactaagttggacacccttattttgaag

SEQ ID NO: 1788 - DNA, 46 bp, Artificial Sequence
  Synthetic
agcatggtgtacatcctaaaacaaacaatactggaacaaaggatga

SEQ ID NO: 1789 - DNA, 48 bp, Artificial Sequence
  Synthetic
ccatagaaaaaacatgagttgccatttggatatagtagactccacatg

SEQ ID NO: 1790 - DNA, 49 bp, Artificial Sequence
  Synthetic
ggccgattaaataattgtgcatcagaaattgccagttctatctatttcc

SEQ ID NO: 1791 - DNA, 49 bp, Artificial Sequence
  Synthetic
caccactatgaaaaatctacgcccaaactttataaaaacatccactccc

SEQ ID NO: 1792 - DNA, 42 bp, Artificial Sequence
  Synthetic
gctagactgcacacaacactcaaaatcatgtgatggtggatt

SEQ ID NO: 1793 - DNA, 38 bp, Artificial Sequence
  Synthetic
atttccgggattgcacaggcgtgtctgtcttggtgcag

SEQ ID NO: 1794 - DNA, 44 bp, Artificial Sequence
  Synthetic
tgcaatctcataacataacgtggattcctacttggagtcaggaa

SEQ ID NO: 1795 - DNA, 45 bp, Artificial Sequence
  Synthetic
aatccaacctttaaaatcacacgagggttttgttatgcagtttgg

SEQ ID NO: 1796 - DNA, 45 bp, Artificial Sequence
  Synthetic
gccacacttgtgttgaacataatcagttttaggttgcaaggctat

SEQ ID NO: 1797 - DNA, 44 bp, Artificial Sequence
  Synthetic
ccaatcttaaaacaagaaaggccatgcacaagcatttcagagtg

SEQ ID NO: 1798 - DNA, 45 bp, Artificial Sequence
  Synthetic
ccagccttggccatataaacattaattctgaaccacctaaagttg

SEQ ID NO: 1799 - DNA, 48 bp, Artificial Sequence
  Synthetic
agtttcctcaccttctacatcatcttcctgaagatgatgactttcttg

SEQ ID NO: 1800 - DNA, 48 bp, Artificial Sequence
  Synthetic
ccaaggtatcaacaaacaactgactataaaaatttgcaggatctttgg

SEQ ID NO: 1801 - DNA, 44 bp, Artificial Sequence
  Synthetic
gccccctgtagagacataacaccgatatggttaagtctaaagga

SEQ ID NO: 1802 - DNA, 43 bp, Artificial Sequence
  Synthetic
tctgtttcgtaaacaatggaacgtcgggcactaagaaattggc

SEQ ID NO: 1803 - DNA, 48 bp, Artificial Sequence
  Synthetic
aacaggcacaaacctattagtgaaaaagccttgtttttggataaagtg

SEQ ID NO: 1804 - DNA, 44 bp, Artificial Sequence
  Synthetic
tctggagcattaagcaagaaacattgcaggttgttgttaatggt

SEQ ID NO: 1805 - DNA, 44 bp, Artificial Sequence
  Synthetic
tgtaccaaaatgcataacagcgtatgtaaatgtggtgtaaagca

SEQ ID NO: 1806 - DNA, 48 bp, Artificial Sequence
  Synthetic
acaccatctactttctcgaatgtttaatattattgtgacggaggtaag

SEQ ID NO: 1807 - DNA, 48 bp, Artificial Sequence
  Synthetic
ccatcgtcaacatcatccacttttataatagaccttcattggttgatg

SEQ ID NO: 1808 - DNA, 46 bp, Artificial Sequence
  Synthetic
ccagcaacctaaaactccaatgtaatgcccttatcagtattcagat

SEQ ID NO: 1809 - DNA, 47 bp, Artificial Sequence
  Synthetic
gcggcctcaacagtaataaaagtatactggcttttgttcaaaacatc

SEQ ID NO: 1810 - DNA, 44 bp, Artificial Sequence
  Synthetic
actgattaaaagcatccacagaccagcatgtgcagggtaatgtt

SEQ ID NO: 1811 - DNA, 48 bp, Artificial Sequence
  Synthetic
accatatcgtaacactttggtaggggctgtaatagatcaggattttgg

SEQ ID NO: 1812 - DNA, 41 bp, Artificial Sequence
  Synthetic
acgcacgatacgtacaagccatgctaaaggttttatccgtt

SEQ ID NO: 1813 - DNA, 43 bp, Artificial Sequence
  Synthetic
acaacaattacagcgagtatagcacgcctgtggattttttggc

SEQ ID NO: 1814 - DNA, 43 bp, Artificial Sequence
  Synthetic
gttggtaaagcacatcactaccatttgcatatagggaggctgc

SEQ ID NO: 1815 - DNA, 45 bp, Artificial Sequence
  Synthetic
cgcataaaaaggaacccttaatggttttagctgcttataacggca

SEQ ID NO: 1816 - DNA, 50 bp, Artificial Sequence
  Synthetic
acaaggtcagatttaacttggctaagtgttctgtagaagattttaatgtg

SEQ ID NO: 1817 - DNA, 46 bp, Artificial Sequence
  Synthetic
acagtgtaaaaagcacaggagttatttgtgttataagtttggccat

SEQ ID NO: 1818 - DNA, 47 bp, Artificial Sequence
  Synthetic
ccatgtgtaagtaccaaaaagggaaaagggttctaacttagaggaag

SEQ ID NO: 1819 - DNA, 43 bp, Artificial Sequence
  Synthetic
acctccaatacccaacagctccctcctaagaatagttttgaag

SEQ ID NO: 1820 - DNA, 44 bp, Artificial Sequence
  Synthetic
tcaacgaagctagccatattaacaacgatgattacgcaaaggac

SEQ ID NO: 1821 - DNA, 44 bp, Artificial Sequence
  Synthetic
acccgcataggtaacatagacattatggcagcaaatactctgaa

SEQ ID NO: 1822 - DNA, 48 bp, Artificial Sequence
  Synthetic
cagcttgcaatctaactgtagaagattttgtaaaaggttgtaacacac

SEQ ID NO: 1823 - DNA, 45 bp, Artificial Sequence
  Synthetic
cgtaatttgcacaacccatcaacatctgtttgtatatattgccgc

SEQ ID NO: 1824 - DNA, 48 bp, Artificial Sequence
  Synthetic
gctgaaaacggcaacaattaactttaagggcatttgatatttacaatg

SEQ ID NO: 1825 - DNA, 43 bp, Artificial Sequence
  Synthetic
agtgttaaaacgcctactaagcctaccctagttagcgctactg

SEQ ID NO: 1826 - DNA, 47 bp, Artificial Sequence
  Synthetic
cagcagcatataaaagcaagtctttattgtgatgaatatggatgtgg

SEQ ID NO: 1827 - DNA, 50 bp, Artificial Sequence
  Synthetic
aatggatagccagcactcttatcatagtattttgagatttatgatggtgg

SEQ ID NO: 1828 - DNA, 48 bp, Artificial Sequence
  Synthetic
ccaccataaaatttagtggtgcctaaaatgtttgaaaagtatagcagc

SEQ ID NO: 1829 - DNA, 45 bp, Artificial Sequence
  Synthetic
gcttctgaagagcacgtatactaaggccaatgtatgtgccttaat

SEQ ID NO: 1830 - DNA, 43 bp, Artificial Sequence
  Synthetic
caagcattgtgtgttgtgaacagttgggttgaacatgacataa

SEQ ID NO: 1831 - DNA, 45 bp, Artificial Sequence
  Synthetic
aaggactcatcagtgaacttttgtatcttggatagctacagtgtt

SEQ ID NO: 1832 - DNA, 50 bp, Artificial Sequence
  Synthetic
cgctctgtacattcattagctagtataatcgtatagctagttgtaaatgg

SEQ ID NO: 1833 - DNA, 47 bp, Artificial Sequence
  Synthetic
acgtctcaagcacactataaacactagctaatttaagtgctcctacg

SEQ ID NO: 1834 - DNA, 43 bp, Artificial Sequence
  Synthetic
acacatacttacgagtggtgtcatttattgttccggccaaggt

SEQ ID NO: 1835 - DNA, 49 bp, Artificial Sequence
  Synthetic
gcttagctgcaaagttctgactatttaataagtttttgaaggctaaccc

SEQ ID NO: 1836 - DNA, 46 bp, Artificial Sequence
  Synthetic
ccgctataactcttgctacaatcttccttagataaagtgccacagg

SEQ ID NO: 1837 - DNA, 43 bp, Artificial Sequence
  Synthetic
cacaacaaaatcaattcctgtggaagcgtgatagcattgggac

SEQ ID NO: 1838 - DNA, 40 bp, Artificial Sequence
  Synthetic
tcacgccctacttttgcaaagtagttacatgggcagccaa

SEQ ID NO: 1839 - DNA, 47 bp, Artificial Sequence
  Synthetic
tggttgggcatcatagaacttaaaactttgtgttatgatattggcaa

SEQ ID NO: 1840 - DNA, 43 bp, Artificial Sequence
  Synthetic
atccatatacacacaaggcgtatctggcagcctttgagcattt

SEQ ID NO: 1841 - DNA, 47 bp, Artificial Sequence
  Synthetic
tcgatcttagccacaactttatcattcaagactggtcattatacagg

SEQ ID NO: 1842 - DNA, 45 bp, Artificial Sequence
  Synthetic
tcgtggaaatgtaaacgccattaaattgaatgtcctttttgatgg

SEQ ID NO: 1843 - DNA, 48 bp, Artificial Sequence
  Synthetic
ccaccaataatcttctggttgaagttattcagaagtatggtttggagg

SEQ ID NO: 1844 - DNA, 43 bp, Artificial Sequence
  Synthetic
ggcttccagtcagatgcagcgtaacgatgagaaagttatgact

SEQ ID NO: 1845 - DNA, 50 bp, Artificial Sequence
  Synthetic
tctgcattccaagaaaactctgttaacatacatttgtcatatgattcgag

SEQ ID NO: 1846 - DNA, 43 bp, Artificial Sequence
  Synthetic
tgtgtggcgctgtttgtattaggtttacaatttcaaattctcg

SEQ ID NO: 1847 - DNA, 41 bp, Artificial Sequence
  Synthetic
tgatgaggggttgatggtgatttgatgcagcactgtccatt

SEQ ID NO: 1848 - DNA, 44 bp, Artificial Sequence
  Synthetic
aaggcgtaaaattaacaccctcataggagttttcactttaccga

SEQ ID NO: 1849 - DNA, 46 bp, Artificial Sequence
  Synthetic
acagattgctttcgtaggaacagttccctctggtaattatttagcc

SEQ ID NO: 1850 - DNA, 48 bp, Artificial Sequence
  Synthetic
tgattgtacgtggttgtactaccagtgagttccctgctataactatag

SEQ ID NO: 1851 - DNA, 49 bp, Artificial Sequence
  Synthetic
gcttactattacaagtcagaggcatgtttaatgtttatttaggcatggc

SEQ ID NO: 1852 - DNA, 45 bp, Artificial Sequence
  Synthetic
tcccaatttaatggagagggcaccgtaaacctaatcttcccaatt

SEQ ID NO: 1853 - DNA, 46 bp, Artificial Sequence
  Synthetic
tcgaggcttaaaaacagaatcttctctgctaatgtttctgttagca

SEQ ID NO: 1854 - DNA, 39 bp, Artificial Sequence
  Synthetic
caagacccgaacagtgctcaacttataagtgcccccaaa

SEQ ID NO: 1855 - DNA, 43 bp, Artificial Sequence
  Synthetic
agagttagcgtgaaaggccgcaaacagaacttttatgattcgt

SEQ ID NO: 1856 - DNA, 48 bp, Artificial Sequence
  Synthetic
gacaaatgcagcacaatcaatagtaccttcagagtttactataggtaa

SEQ ID NO: 1857 - DNA, 47 bp, Artificial Sequence
  Synthetic
actttgcacacaaatgaggtccgttgaggcttataataattgtacag

SEQ ID NO: 1858 - DNA, 50 bp, Artificial Sequence
  Synthetic
gcggtaagacgaccattaataagtccaagaaattctatctagacttgatg

SEQ ID NO: 1859 - DNA, 43 bp, Artificial Sequence
  Synthetic
ccactcttaggagctatacctctattatgtcacagcgagggtt

SEQ ID NO: 1860 - DNA, 46 bp, Artificial Sequence
  Synthetic
ccttgagattgatgtagctctgatttgttacattcttggacctaca

SEQ ID NO: 1861 - DNA, 47 bp, Artificial Sequence
  Synthetic
acaagcatcttctaattctgagacaagacctgagaagaaatatctcc

SEQ ID NO: 1862 - DNA, 47 bp, Artificial Sequence
  Synthetic
ggcctaacatacattgttcctttcaattagaactggaagtttttgga

SEQ ID NO: 1863 - DNA, 43 bp, Artificial Sequence
  Synthetic
gcttaccaggagtaaaagacatcctccaaaagggttctggcat

SEQ ID NO: 1864 - DNA, 40 bp, Artificial Sequence
  Synthetic
agcgacccagtagactccgtcgaacaggaccgcatgctaa

SEQ ID NO: 1865 - DNA, 39 bp, Artificial Sequence
  Synthetic
cagccatgtcaggtgttacaccgcgtagtagagccaatt

SEQ ID NO: 1866 - DNA, 41 bp, Artificial Sequence
  Synthetic
aacctaattgcgccgttatagctatctgggaatcctgacga

SEQ ID NO: 1867 - DNA, 41 bp, Artificial Sequence
  Synthetic
ggttaccaccagatgccgacatactgaagacacctcagaaa

SEQ ID NO: 1868 - DNA, 43 bp, Artificial Sequence
  Synthetic
actttctgcttgggcattagcaaactgacatgactattgagga

SEQ ID NO: 1869 - DNA, 45 bp, Artificial Sequence
  Synthetic
tccattcaagtcctccgatgagttttccaggacatactattgagg

SEQ ID NO: 1870 - DNA, 42 bp, Artificial Sequence
  Synthetic
ggtcaaggaatggggcatcaccctgctttctttggcatgtcc

SEQ ID NO: 1871 - DNA, 43 bp, Artificial Sequence
  Synthetic
gcttgggaatgagcattaaccagctacctaactgaaatgactc

SEQ ID NO: 1872 - DNA, 41 bp, Artificial Sequence
  Synthetic
tccattcaagtcctccgatgagcttccaggacatactgacg

SEQ ID NO: 1873 - DNA, 42 bp, Artificial Sequence
  Synthetic
tggaggctgcacgacactcgtagatcactcccctgtgaggaa

SEQ ID NO: 1874 - DNA, 40 bp, Artificial Sequence
  Synthetic
ccaacgatctgtccgccaccaaagaaacaccatccgtcgc

SEQ ID NO: 1875 - DNA, 39 bp, Artificial Sequence
  Synthetic
ccccatgaggtcggcgaatccggaggtcccgcaatttgg

SEQ ID NO: 1876 - DNA, 40 bp, Artificial Sequence
  Synthetic
tggggtccagcacgtagatgtacattctgcacacacccgg

SEQ ID NO: 1877 - DNA, 39 bp, Artificial Sequence
  Synthetic
ccaccaccatacccacagcgggacatcgaatggcttggg

SEQ ID NO: 1878 - DNA, 40 bp, Artificial Sequence
  Synthetic
ggtctgtcatcagaaggaccggagctgcaagcccatcact

SEQ ID NO: 1879 - DNA, 37 bp, Artificial Sequence
  Synthetic
gccgctgggacttcagcagggcgtgccaacctacacc

SEQ ID NO: 1880 - DNA, 41 bp, Artificial Sequence
  Synthetic
cgatcctcgatatcgcagcgctgaacatcgatttaccgccg

SEQ ID NO: 1881 - DNA, 40 bp, Artificial Sequence
  Synthetic
cagcgtgaccaggttctccaaccctttggctgatgctgat

SEQ ID NO: 1882 - DNA, 42 bp, Artificial Sequence
  Synthetic
gtggccactgctaggtctttgaacctatacgaccacctagcg

SEQ ID NO: 1883 - DNA, 40 bp, Artificial Sequence
  Synthetic
aggaaggtctgggtagccgtgagacaagaacgtggtgacc

SEQ ID NO: 1884 - DNA, 41 bp, Artificial Sequence
  Synthetic
gaagggcacataacgggacctcgctcagtcctaggcctctc

SEQ ID NO: 1885 - DNA, 39 bp, Artificial Sequence
  Synthetic
gtgcggatgttggggtcgatccacattaggcttcggctc

SEQ ID NO: 1886 - DNA, 40 bp, Artificial Sequence
  Synthetic
tctacctcgacccgttcggcaccttttccattgagacccg

SEQ ID NO: 1887 - DNA, 39 bp, Artificial Sequence
  Synthetic
gcgcacacagtggcttggtaagactaagcagcagggact

SEQ ID NO: 1888 - DNA, 39 bp, Artificial Sequence
  Synthetic
gtctggaacgagtgctggctttcggctgcgttgtgattg

SEQ ID NO: 1889 - DNA, 39 bp, Artificial Sequence
  Synthetic
tttggttggtcgtcaggggactttgcctggcaaccctgc

SEQ ID NO: 1890 - DNA, 38 bp, Artificial Sequence
  Synthetic
tgtcggcgcagtatggctggcccgccatactatctccg

SEQ ID NO: 1891 - DNA, 39 bp, Artificial Sequence
  Synthetic
ggaaatgaagggcagcccaggccgacttcaaggcatggc

SEQ ID NO: 1892 - DNA, 39 bp, Artificial Sequence
  Synthetic
cttggcacggacacttgagctgggtgggggacttccatt

SEQ ID NO: 1893 - DNA, 40 bp, Artificial Sequence
  Synthetic
gatgaggcctatgcgtctggcatccgccagccaactatca

SEQ ID NO: 1894 - DNA, 41 bp, Artificial Sequence
  Synthetic
gtccttttcctccgagggggatgtaccaccaactgtccatg

SEQ ID NO: 1895 - DNA, 41 bp, Artificial Sequence
  Synthetic
cgccggtccaagaatacgacataccgttagtgacagcgagg

SEQ ID NO: 1896 - DNA, 39 bp, Artificial Sequence
  Synthetic
ccctgctggacaaggagcgaatcactctgcccgatcgaa

SEQ ID NO: 1897 - DNA, 42 bp, Artificial Sequence
  Synthetic
gcctccggttcaaggttacagccactgaacaggacatcaggg

SEQ ID NO: 1898 - DNA, 40 bp, Artificial Sequence
  Synthetic
tcagccaccacgaccaaatcatcaaaggccgcaaacctcc

SEQ ID NO: 1899 - DNA, 48 bp, Artificial Sequence
  Synthetic
ccacggtggtttttgtgagtatcaaagaactaagaaatctaatgtcgc

SEQ ID NO: 1900 - DNA, 42 bp, Artificial Sequence
  Synthetic
gtcattggtccattcctattccacggatcagaccgagtgatg

SEQ ID NO: 1901 - DNA, 45 bp, Artificial Sequence
  Synthetic
ttggttatcgttagttgcgattccaagttgttttccctaacgaag

SEQ ID NO: 1902 - DNA, 43 bp, Artificial Sequence
  Synthetic
gtgggtctgctgatactgcagaatgatgatgttgatcaaagct

SEQ ID NO: 1903 - DNA, 43 bp, Artificial Sequence
  Synthetic
cctcatgcactcttatcttcaatgtacaagcggatcatcagtc

SEQ ID NO: 1904 - DNA, 47 bp, Artificial Sequence
  Synthetic
cgcatccttctgaaaatgtcttaaagatctgaatttcgtcaataggg

SEQ ID NO: 1905 - DNA, 39 bp, Artificial Sequence
  Synthetic
ttcactgacctcctcgggagattgaccggttcttgagag

SEQ ID NO: 1906 - DNA, 46 bp, Artificial Sequence
  Synthetic
cctcatttgttggaacagagttcttagtacctaaggccattagagg

SEQ ID NO: 1907 - DNA, 41 bp, Artificial Sequence
  Synthetic
tcccctcagaacagcggactcggcactttaaccgaagaccc

SEQ ID NO: 1908 - DNA, 41 bp, Artificial Sequence
  Synthetic
gccaacctctcaggacagcctatgaaagccttaacaccggc

SEQ ID NO: 1909 - DNA, 42 bp, Artificial Sequence; identical to SEQ ID NO: 94
  Synthetic

SEQ ID NO: 1910 - DNA, 36 bp, Artificial Sequence
  Synthetic
tgagctcggacctgtccctggcctgcaactggacgc

SEQ ID NO: 1911 - DNA, 42 bp, Artificial Sequence
  Synthetic
cgcaaagcagaagaacacgaggtactcaatgcagcatccctg

SEQ ID NO: 1912 - DNA, 41 bp, Artificial Sequence
  Synthetic
ggtccgaagatggccaggagttgtgttgtacacccgactct

SEQ ID NO: 1913 - DNA, 39 bp, Artificial Sequence
  Synthetic
cacgtgatgagcttggtctccactgcgagatctggccgt

SEQ ID NO: 1914 - DNA, 39 bp, Artificial Sequence
  Synthetic
gcgatggtcctcgttccggccaacgtgcatcaatggggt

SEQ ID NO: 1915 - DNA, 38 bp, Artificial Sequence
  Synthetic
acaccggggatctcatggttgtggtgtgcacccgtgga

SEQ ID NO: 1916 - DNA, 39 bp, Artificial Sequence
  Synthetic
taagcacctcctgagcacccggcagccccatcacgtact

SEQ ID NO: 1917 - DNA, 41 bp, Artificial Sequence
  Synthetic
agtaggccacggcattgatgctcaaagaagaagtgcgacga

SEQ ID NO: 1918 - DNA, 41 bp, Artificial Sequence
  Synthetic
acagaggacggacgagtcgaatctacagatttgtggcaccg

SEQ ID NO: 1919 - DNA, 38 bp, Artificial Sequence
  Synthetic
gggtgcgtcagggtgacttcggccaacacccctgctat

SEQ ID NO: 1920 - DNA, 41 bp, Artificial Sequence
  Synthetic
ggtgataacctctgcttggcggaagggatgatgctcgctga

SEQ ID NO: 1921 - DNA, 38 bp, Artificial Sequence
  Synthetic
ccctgcaagaatgtccacgaggtgggcgctggcttagc

SEQ ID NO: 1922 - DNA, 38 bp, Artificial Sequence
  Synthetic
tatggcagtgacgcgggcgggaaccatgtttcccccac

SEQ ID NO: 1923 - DNA, 42 bp, Artificial Sequence
  Synthetic
ctccacatgttcctgcaggtcctggacatgtcaaaaacggga

SEQ ID NO: 1924 - DNA, 37 bp, Artificial Sequence
  Synthetic
aggtaattgcgaccccaccggtgctgcgggaggaggt

SEQ ID NO: 1925 - DNA, 39 bp, Artificial Sequence
  Synthetic
cgaatctccgagacttccgcagtcgatccgcttgtggca

SEQ ID NO: 1926 - DNA, 37 bp, Artificial Sequence
  Synthetic
gactcaacgtcggagtcgggggcattacgggcgacaa

SEQ ID NO: 1927 - DNA, 42 bp, Artificial Sequence
  Synthetic
gctgcaagcttcctctacggatattaccaggacgtgctcaag

SEQ ID NO: 1928 - DNA, 38 bp, Artificial Sequence
  Synthetic
ggccatcttctcgcacacgccctgagaaggggggtcgt

SEQ ID NO: 1929 - DNA, 38 bp, Artificial Sequence
  Synthetic
ttgtcagtacgccgctcgcttatgttgggggccctctt

SEQ ID NO: 1930 - DNA, 38 bp, Artificial Sequence
  Synthetic
gtcttgctgtctcccacgcggcgctggaaagagggtct

SEQ ID NO: 1931 - DNA, 40 bp, Artificial Sequence
  Synthetic
tgtctccaagctcgcaagggtgaaatcaatagggtggccg

SEQ ID NO: 1932 - DNA, 44 bp, Artificial Sequence
  Synthetic
tgcacccatggacatagcttcgaatggggtacatataaaacaag

SEQ ID NO: 1933 - DNA, 49 bp, Artificial Sequence
  Synthetic
tgtagcatctgatcagctgtgtattattcatattatgtagaaggtgtgg

SEQ ID NO: 1934 - DNA, 41 bp, Artificial Sequence
  Synthetic
tggttccaccgcatctgtatggatatccctgtatgcaatgt

SEQ ID NO: 1935 - DNA, 40 bp, Artificial Sequence
  Synthetic
ccccagctttatggcgtctagcatttcagccccgtgtgtg

SEQ ID NO: 1936 - DNA, 45 bp, Artificial Sequence
  Synthetic
cattggcatggtagcacttgtatgcataaagaccctaatacaacc

SEQ ID NO: 1937 - DNA, 47 bp, Artificial Sequence
  Synthetic
gctcatacaaaagtatgatttgccaaggagtaccaaaaaaaagttgt

SEQ ID NO: 1938 - DNA, 44 bp, Artificial Sequence
  Synthetic
accttcgaaaaaagcatttccaatttgacaacacaaggagaacc

SEQ ID NO: 1939 - DNA, 45 bp, Artificial Sequence
  Synthetic
accctcgtatgagacttttcctgttatgtgcagaactatagtgac

SEQ ID NO: 1940 - DNA, 41 bp, Artificial Sequence
  Synthetic
tctttggacccttgtcgctgctaaagcgacagcgactcgag

SEQ ID NO: 1941 - DNA, 43 bp, Artificial Sequence
  Synthetic
ccaaaacaaacacagcagcagtggatttttacttgtgtcgact

SEQ ID NO: 1942 - DNA, 41 bp, Artificial Sequence
  Synthetic
ggtggtgccctctactttgggaataggacctgcaaggcctc

SEQ ID NO: 1943 - DNA, 40 bp, Artificial Sequence
  Synthetic
gttgtggcagaggatgtaacttagggtccaccatacctac

SEQ ID NO: 1944 - DNA, 43 bp, Artificial Sequence
  Synthetic
ggttccatttcaatgtcctcgatcccgggtacattactatcag

SEQ ID NO: 1945 - DNA, 40 bp, Artificial Sequence
  Synthetic
tccgtgctgagaactttagacagcgctctagtgacaactt

SEQ ID NO: 1946 - DNA, 47 bp, Artificial Sequence
  Synthetic
aggcacgtcagacttatttaattgtctattcaggatggtgatatggt

SEQ ID NO: 1947 - DNA, 45 bp, Artificial Sequence
  Synthetic
gccataatatccggggtcaatgtaggaatatgatttgcagttcat

SEQ ID NO: 1948 - DNA, 46 bp, Artificial Sequence
  Synthetic
cacaggaacagcaattacacaaatttgttatgagcatgtatgtgtg

SEQ ID NO: 1949 - DNA, 38 bp, Artificial Sequence
  Synthetic
atcgtacacctgtcccacagctgaggaggaggagcaat

SEQ ID NO: 1950 - DNA, 45 bp, Artificial Sequence
  Synthetic
atccatatcgtctatcaggttggaccactctggaggatttgtttg

SEQ ID NO: 1951 - DNA, 46 bp, Artificial Sequence
  Synthetic
gtcccagtttgtataaggaaacacatttcaaaaaacatggctacac

SEQ ID NO: 1952 - DNA, 40 bp, Artificial Sequence
  Synthetic
ggggtagaggggtatgcggttctagttctaccaggcagcc

SEQ ID NO: 1953 - DNA, 40 bp, Artificial Sequence
  Synthetic
gttcccactgcttcaggagctgacgaaccaccgagacaga

SEQ ID NO: 1954 - DNA, 43 bp, Artificial Sequence
  Synthetic
ctaacgatgaataacctgtagtcccatttgggcaacttgggta

SEQ ID NO: 1955 - DNA, 44 bp, Artificial Sequence
  Synthetic
tcctggatcagcagtgataactatgagctcttcaattgttcctt

SEQ ID NO: 1956 - DNA, 42 bp, Artificial Sequence
  Synthetic
tcatcatcaaaggcgggattttcattttgtaaggcaaccgtc

SEQ ID NO: 1957 - DNA, 46 bp, Artificial Sequence
  Synthetic
catcaggtactataggtctgtcagtacattggcctctaatattcct

SEQ ID NO: 1958 - DNA, 47 bp, Artificial Sequence
  Synthetic
cccttctacatattcatccgtactcaatcgtggaaagttatatctgc

SEQ ID NO: 1959 - DNA, 49 bp, Artificial Sequence
  Synthetic
gggatgacctgatgtactaatacctgttggtttggaaattgataggatt

SEQ ID NO: 1960 - DNA, 45 bp, Artificial Sequence
  Synthetic
acatgtcaccatcctgaatagtagtaaaggtttgcgaaaatgtcc

SEQ ID NO: 1961 - DNA, 44 bp, Artificial Sequence
  Synthetic
cctgctgagcaccataaataaagtttttacgcgaggcactttta

SEQ ID NO: 1962 - DNA, 38 bp, Artificial Sequence
  Synthetic
tggcgccaaaaacttaccgaatgctgccttttaagcca

SEQ ID NO: 1963 - DNA, 41 bp, Artificial Sequence
  Synthetic
ggtctaccgttgtctgtctcaactaaagcagctgttaaggg

SEQ ID NO: 1964 - DNA, 44 bp, Artificial Sequence
  Synthetic
ccttttcaaacccttcagtatcccttcaatagcagcagttacct

SEQ ID NO: 1965 - DNA, 48 bp, Artificial Sequence
  Synthetic
catcgttcccttcaatttttctcttaataccaagagaatctacttgga

SEQ ID NO: 1966 - DNA, 40 bp, Artificial Sequence
  Synthetic
agctctagtgggtttgatgcaatgattgtagcttgcagga

SEQ ID NO: 1967 - DNA, 42 bp, Artificial Sequence
  Synthetic
gctttttttcaatatccccctgcatatgggacggagaagagg

SEQ ID NO: 1968 - DNA, 43 bp, Artificial Sequence
  Synthetic
cattgatcaaaaaggtcattgctccgccaacttttatccccca

SEQ ID NO: 1969 - DNA, 45 bp, Artificial Sequence
  Synthetic
acgttatcattagctgtgcttgtgaagttataatgggagccaatg

SEQ ID NO: 1970 - DNA, 45 bp, Artificial Sequence
  Synthetic
ggtcagttttcataacctcttggtcggtcagtacagtggatttgc

SEQ ID NO: 1971 - DNA, 43 bp, Artificial Sequence
  Synthetic
ggttttgaaatctccaagatcagggatggggaatgcagtactg

SEQ ID NO: 1972 - DNA, 47 bp, Artificial Sequence
  Synthetic
gcatggataacagggaatcttgtttgtctatcagcttacgatctctt

SEQ ID NO: 1973 - DNA, 43 bp, Artificial Sequence
  Synthetic
agcgacaatctatcttcacatgattgttatgcccctctactgg

SEQ ID NO: 1974 - DNA, 49 bp, Artificial Sequence
  Synthetic
cacaatggacaagaaaaaccatccgataattgtgatttttatggttggg

SEQ ID NO: 1975 - DNA, 47 bp, Artificial Sequence
  Synthetic
caccaagaattattaacgccaagaattatgttcaatgtaagtgtggt

SEQ ID NO: 1976 - DNA, 45 bp, Artificial Sequence
  Synthetic
caccacacttacccatgtacatattgagtattgtcaaccacctaa

SEQ ID NO: 1977 - DNA, 46 bp, Artificial Sequence
  Synthetic
cagctttaacaagtctagcaacattacctcaattgtatggtttgtg

SEQ ID NO: 1978 - DNA, 48 bp, Artificial Sequence
  Synthetic
gcaacataagacaagctacattcaccggtccatttttttcttttgaac

SEQ ID NO: 1979 - DNA, 42 bp, Artificial Sequence
  Synthetic
acctgcacaattacagccaatttggtacattagcaaagactg

SEQ ID NO: 1980 - DNA, 48 bp, Artificial Sequence
  Synthetic
tgagcacaaatatcatgtccaactattaaaccatttgctaaagttgac

SEQ ID NO: 1981 - DNA, 48 bp, Artificial Sequence
  Synthetic
accagctttattacaaccatagacacggttttatatagttgttactgc

SEQ ID NO: 1982 - DNA, 45 bp, Artificial Sequence
  Synthetic
caacatctgaatcaatggaacaacagggtgtgcaattagaaaagg

SEQ ID NO: 1983 - DNA, 50 bp, Artificial Sequence
  Synthetic
agcattcttcataacaccatctgaactttgtgtactatgtttaaaagagg

SEQ ID NO: 1984 - DNA, 39 bp, Artificial Sequence
  Synthetic
acaagttgacagccctgcattaatgtctggtcggatgag

SEQ ID NO: 1985 - DNA, 47 bp, Artificial Sequence
  Synthetic
gcaataacattaacagtctggacgtttatggtccatatagagatgct

SEQ ID NO: 1986 - DNA, 45 bp, Artificial Sequence
  Synthetic
gttagtaagtgctaggtctgccattgtatgaacgtgataaagctg

SEQ ID NO: 1987 - DNA, 45 bp, Artificial Sequence
  Synthetic
gcaccaccataagaatcttggttaaatcatgctggtactggtatg

SEQ ID NO: 1988 - DNA, 46 bp, Artificial Sequence
  Synthetic
accattgaccatacaaatcttggtttactgtcatttttgcagacac

SEQ ID NO: 1989 - DNA, 46 bp, Artificial Sequence
  Synthetic
ggtgtgtgtcaacatctaagttcatccgtttgttgtttctattggt

SEQ ID NO: 1990 - DNA, 47 bp, Artificial Sequence
  Synthetic
gtgggcagaacattacgtttagtataagccagactttattatgaggc

SEQ ID NO: 1991 - DNA, 44 bp, Artificial Sequence
  Synthetic
cgggccaaaactaaactactaacaacctgttcttatgggttggg

SEQ ID NO: 1992 - DNA, 49 bp, Artificial Sequence
  Synthetic
gctctatcaaaagaacactgtcagttccagatccttctagaattttagg

SEQ ID NO: 1993 - DNA, 43 bp, Artificial Sequence
  Synthetic
tgccagaacataatcatcaacttctaatcttgcacgggttcac

SEQ ID NO: 1994 - DNA, 43 bp, Artificial Sequence
  Synthetic
acaccaatggaacactataaacactgtgcacctacacttgtcc

SEQ ID NO: 1995 - DNA, 41 bp, Artificial Sequence
  Synthetic
tgttccaatgttttcgcgagtagtgttagaggttgggttgg

SEQ ID NO: 1996 - DNA, 43 bp, Artificial Sequence
  Synthetic
aaacctttaggattgcctatgtcatggttattgcagcgtgtca

SEQ ID NO: 1997 - DNA, 50 bp, Artificial Sequence
  Synthetic
gcgcttcttaaaggaacgtaatcaaccttttttctattattcagatacgc

SEQ ID NO: 1998 - DNA, 50 bp, Artificial Sequence
  Synthetic
caactttatccacaatcacaccattagtaggttatcaatgattaaaggtc

SEQ ID NO: 1999 - DNA, 45 bp, Artificial Sequence
  Synthetic
cgcatattaacaggaacagctaatgacaggctgtatgatgaatgt

SEQ ID NO: 2000 - DNA, 41 bp, Artificial Sequence
  Synthetic
accaataggacaggaagcagaaaccttcttttgcttcaagt

SEQ ID NO: 2001 - DNA, 49 bp, Artificial Sequence
  Synthetic
cgaagaggaagaagaaggtgagttactgattattctgtttcttcttgtg

SEQ ID NO: 2002 - DNA, 50 bp, Artificial Sequence
  Synthetic
gcagttaaacgaccattaataagccttacaagaaattttatctcgtctcg

SEQ ID NO: 2003 - DNA, 47 bp, Artificial Sequence
  Synthetic
tgaccacgaataacagtagcagttaattgatatgaaaggcaagatgt

SEQ ID NO: 2004 - DNA, 40 bp, Artificial Sequence
  Synthetic
ggtcagcccaagaagttttctcggtcattatgctggaagt

SEQ ID NO: 2005 - DNA, 45 bp, Artificial Sequence
  Synthetic
gcttttggcgaggttttgttaaagtaaagattctaaacctcagca

SEQ ID NO: 2006 - DNA, 46 bp, Artificial Sequence
  Synthetic
agagtcaaactgttctggtaattgtcagaacactgattctgattcg

SEQ ID NO: 2007 - DNA, 44 bp, Artificial Sequence
  Synthetic
cctctccatactctttcattgctttagattttgtgcgacaatgc

SEQ ID NO: 2008 - DNA, 39 bp, Artificial Sequence
  Synthetic
cctctgttggccatttcttgtgaaagcagggctaggatt

SEQ ID NO: 2009 - DNA, 43 bp, Artificial Sequence
  Synthetic
gtttgattggtcttggtgttgtcatgtccaaagaagtgaatgc

SEQ ID NO: 2010 - DNA, 45 bp, Artificial Sequence
  Synthetic
tcatgtttttagtccttgggatctttggaagcaagtattgtcaga

SEQ ID NO: 2011 - DNA, 43 bp, Artificial Sequence
  Synthetic
ctcctcatgcttgcaatgtactgatagagctcgatgaaattgg

SEQ ID NO: 2012 - DNA, 41 bp, Artificial Sequence
  Synthetic
atgtggctcaagtctcgggtcacagatgtggtaaactttgt

SEQ ID NO: 2013 - DNA, 44 bp, Artificial Sequence
  Synthetic
ggccatgcttctgatttattctcaatcgagagcatgattgaagc

SEQ ID NO: 2014 - DNA, 41 bp, Artificial Sequence
  Synthetic
caccaaccattcttccaacagatgaaactggtggagaacgc

SEQ ID NO: 2015 - DNA, 42 bp, Artificial Sequence
  Synthetic
tctccagaagttccggtcattagggacaatggtaatggaact

SEQ ID NO: 2016 - DNA, 40 bp, Artificial Sequence
  Synthetic
tgagtgcagaccgtgccagaagcagaaatcctgggaatgc

SEQ ID NO: 2017 - DNA, 43 bp, Artificial Sequence
  Synthetic
gggatcactcttgttcctctaatgacatgccattctgcagcat

SEQ ID NO: 2018 - DNA, 43 bp, Artificial Sequence
  Synthetic
attccaaaggacgacgcgacgatacttattgctttgattgctc

SEQ ID NO: 2019 - DNA, 39 bp, Artificial Sequence
  Synthetic
tggatggggtgtccggggagtctcaaggtccgttccaga

SEQ ID NO: 2020 - DNA, 41 bp, Artificial Sequence
  Synthetic
gcctcttcttgaagtcgtctaaggggcaggaactagatcag

SEQ ID NO: 2021 - DNA, 45 bp, Artificial Sequence
  Synthetic
ctcgctttcttcttataggcatgttctttaccaaaaggcacatca

SEQ ID NO: 2022 - DNA, 43 bp, Artificial Sequence
  Synthetic
ttaccaaaaggacgcccagtctggtggttcattaggatatagg

SEQ ID NO: 2023 - DNA, 42 bp, Artificial Sequence
  Synthetic
catccaatacagcagaaacacccggtgattcaatagggggga

SEQ ID NO: 2024 - DNA, 44 bp, Artificial Sequence
  Synthetic
gtctccaatctttgtgtaggagtacggactcaggatttggtcag

SEQ ID NO: 2025 - DNA, 43 bp, Artificial Sequence
  Synthetic
ctggagcatactcagttaaccgccaatgaagattttgctgaca

SEQ ID NO: 2026 - DNA, 41 bp, Artificial Sequence
  Synthetic
gctggtgcacatcctacaataaacagaacagcggatggatt

SEQ ID NO: 2027 - DNA, 45 bp, Artificial Sequence
  Synthetic
tgtcatccgtaaataatctggccatgcaggaagacagatctagtg

SEQ ID NO: 2028 - DNA, 46 bp, Artificial Sequence
  Synthetic
aaaagctaattgccattgatcaagtatgtaaggtaaagcttgaacc

SEQ ID NO: 2029 - DNA, 48 bp, Artificial Sequence
  Synthetic
ccatttagcaggcctatctgatacaaacggttttcttcagatttaagc

SEQ ID NO: 2030 - DNA, 49 bp, Artificial Sequence
  Synthetic
caccaactgttactgaagaactgatgtcataatacactataaaaggctg

SEQ ID NO: 2031 - DNA, 47 bp, Artificial Sequence
  Synthetic
gaaacaaacttccaaatgtgtgcataaaggcaatgaaagaatatggg

SEQ ID NO: 2032 - DNA, 48 bp, Artificial Sequence
  Synthetic
accggttctctttgtaatcatacaatggtgaacagtatatgtaacaca

SEQ ID NO: 2033 - DNA, 46 bp, Artificial Sequence
  Synthetic
tcggactgacgaaaggaatcccttttcactataagacaagaaatgg

SEQ ID NO: 2034 - DNA, 41 bp, Artificial Sequence
  Synthetic
gccatattttcaccgagtgccagatcccaaggacaaagaac

SEQ ID NO: 2035 - DNA, 48 bp, Artificial Sequence
  Synthetic
gctgtaaaatagttcctcctcatgctgatgaaataggagaagatgttg

SEQ ID NO: 2036 - DNA, 43 bp, Artificial Sequence
  Synthetic
tcccatttgtgtggctccagtgaactttgtaagtatggagttc

SEQ ID NO: 2037 - DNA, 44 bp, Artificial Sequence
  Synthetic
gccatgtttccgatttgttttcaaattgagagcatgattgaggc

SEQ ID NO: 2038 - DNA, 44 bp, Artificial Sequence
  Synthetic
acatgtctctcatactgagtagcttcgataacctcgtttcaggt

SEQ ID NO: 2039 - DNA, 42 bp, Artificial Sequence
  Synthetic
cctaggcatcagcatgtaccaggtatatcaccgatatgagca

SEQ ID NO: 2040 - DNA, 47 bp, Artificial Sequence
  Synthetic
cgctcgaattgagttatcattccatttacagaggatgtcaaaaatgc

SEQ ID NO: 2041 - DNA, 49 bp, Artificial Sequence
  Synthetic
cactcttctctttctctggaaatgtgtaatggaatcaatggataaggaa

SEQ ID NO: 2042 - DNA, 42 bp, Artificial Sequence
  Synthetic
gtccagattgctcaagtttttcacaggattcgtgcactttgt

SEQ ID NO: 2043 - DNA, 45 bp, Artificial Sequence
  Synthetic
gcccatcccaccagtatgtgttaggagtctcaatcttaaatcttg

SEQ ID NO: 2044 - DNA, 43 bp, Artificial Sequence
  Synthetic
tcatgtcagccgattcattaattcctagccaacttcagcatgg

SEQ ID NO: 2045 - DNA, 44 bp, Artificial Sequence
  Synthetic
tggtacatttgttcatcctcaagaaattcccaagagaaatcgct

SEQ ID NO: 2046 - DNA, 47 bp, Artificial Sequence
  Synthetic
attgccaaattcagccatcctatgaaatcggtgcatatatataaccc

SEQ ID NO: 2047 - DNA, 43 bp, Artificial Sequence
  Synthetic
acacaatgtcatgtacagtaggtttccgcagagaaacacaagt

SEQ ID NO: 2048 - DNA, 47 bp, Artificial Sequence
  Synthetic
cctgtgcatgtaatagcgcttgctagtaatacaaattatatgcaggc

SEQ ID NO: 2049 - DNA, 45 bp, Artificial Sequence
  Synthetic
ctcaggtgtgtctcctgttactgcactatattggtataggacagg

SEQ ID NO: 2050 - DNA, 47 bp, Artificial Sequence
  Synthetic
acactggattgccattgctatcgtagggtaacagtatttacatttcc

SEQ ID NO: 2051 - DNA, 50 bp, Artificial Sequence
  Synthetic
aatttgaaatgttggtaccacgtgggtctggaaaatgcaatatattatgc

SEQ ID NO: 2052 - DNA, 46 bp, Artificial Sequence
  Synthetic
agcaattgcagtagcggatactacaatgttctgaatctatgtacag

SEQ ID NO: 2053 - DNA, 44 bp, Artificial Sequence
  Synthetic
ccacagattcaattacaacaggtgggtggcagacctaatactgt

SEQ ID NO: 2054 - DNA, 43 bp, Artificial Sequence
  Synthetic
tcccagatgtaggggtagtaataaatgcatttaccgacccttc

SEQ ID NO: 2055 - DNA, 50 bp, Artificial Sequence
  Synthetic
ggcctatgtaaacgaacaatatccaatagacactacattaaccttttcac

SEQ ID NO: 2056 - DNA, 42 bp, Artificial Sequence
  Synthetic
tcaggtaatgtaacccgaaacactcgcaagcaagacattcct

SEQ ID NO: 2057 - DNA, 44 bp, Artificial Sequence
  Synthetic
gggtttgtttataatccactgacaccccatgttgctacttctgt

SEQ ID NO: 2058 - DNA, 41 bp, Artificial Sequence
  Synthetic
ctgtccccatatgcatctgcaggttcccttagacatttgtc

SEQ ID NO: 2059 - DNA, 44 bp, Artificial Sequence
  Synthetic
tcttgtgactaaaacatccgagctggcacatatatgggaaagac

SEQ ID NO: 2060 - DNA, 44 bp, Artificial Sequence
  Synthetic
tgcattgttgtttggtcctgatatgtggtcaagtactagttgcc

SEQ ID NO: 2061 - DNA, 40 bp, Artificial Sequence
  Synthetic
ccaattgtccctgcatgtgcactggaactgctaagcatat

SEQ ID NO: 2062 - DNA, 44 bp, Artificial Sequence
  Synthetic
gctgtgcttattgtcctccctaggagtcaagggattctcatacc

SEQ ID NO: 2063 - DNA, 40 bp, Artificial Sequence
  Synthetic
gccatatggtccacagtggtcagatctaatgtcgcagtcc

SEQ ID NO: 2064 - DNA, 43 bp, Artificial Sequence
  Synthetic
agggtaatgaactgtacttgttgttgtatcacctctggccgta

SEQ ID NO: 2065 - DNA, 45 bp, Artificial Sequence
  Synthetic
gtacgccaccatcaagggagataacaaaagagaagaaagaagagc

SEQ ID NO: 2066 - DNA, 42 bp, Artificial Sequence
  Synthetic
tgctaatgggtctgctgacacagtttgattatcgctgctaga

SEQ ID NO: 2067 - DNA, 45 bp, Artificial Sequence
  Synthetic
tcccaaccattgtgaattcttcataagaagaagaagtgctaacgg

SEQ ID NO: 2068 - DNA, 45 bp, Artificial Sequence
  Synthetic
cccacatcattgatgacgaataagtgaacgtactattgtctcccg

SEQ ID NO: 2069 - DNA, 40 bp, Artificial Sequence
  Synthetic
gcagcaaaggggagaagttttaggacactgttccagcaaa

SEQ ID NO: 2070 - DNA, 43 bp, Artificial Sequence
  Synthetic
gtcttctttgcccaaaatgagaaatgatgaaggcacatctggg

SEQ ID NO: 2071 - DNA, 43 bp, Artificial Sequence
  Synthetic
tcttggtttggattccatcagaattatttgtgaccgggagaga

SEQ ID NO: 2072 - DNA, 47 bp, Artificial Sequence
  Synthetic
agcgtgtcaactctaaataattgctttaagcaatgaatctctgtcac

SEQ ID NO: 2073 - DNA, 43 bp, Artificial Sequence
  Synthetic
gacactctttgtggagaaatgtgaaggatcgctcatttgcaga

SEQ ID NO: 2074 - DNA, 41 bp, Artificial Sequence
  Synthetic
acttcttcaggagatgggacacacaacaaggagaacgttcc

SEQ ID NO: 2075 - DNA, 43 bp, Artificial Sequence
  Synthetic
cagcttcacctaatggtctgtaactttgggaattggatctggg

SEQ ID NO: 2076 - DNA, 48 bp, Artificial Sequence
  Synthetic
ggtagcagtagagtcagtgattgtatttagattttgtagctcctgatg

SEQ ID NO: 2077 - DNA, 39 bp, Artificial Sequence
  Synthetic
gctacttctgccaagtcccgaatttgaaaatgccgccta

SEQ ID NO: 2078 - DNA, 46 bp, Artificial Sequence
  Synthetic
cgttgtagctagtatgtcgtcaactagaattgcagactatagctgg

SEQ ID NO: 2079 - DNA, 48 bp, Artificial Sequence
  Synthetic
ctttgttaaagtaaggatggcctgttatcaggtgtagaaattaaacgt

SEQ ID NO: 2080 - DNA, 47 bp, Artificial Sequence
  Synthetic
ctgctttatcttcttgtaaacggcttaatagccctattcaggatggt

SEQ ID NO: 2081 - DNA, 46 bp, Artificial Sequence
  Synthetic
ggtgttaagaatgcacccccattcattaacctgctatgtatttgtc

SEQ ID NO: 2082 - DNA, 41 bp, Artificial Sequence
  Synthetic
gtttctaatgccctcctccgtggtggtgacagattgcaagt

SEQ ID NO: 2083 - DNA, 43 bp, Artificial Sequence
  Synthetic
gcattttcatccccattagtcaatgaggtggaaaaggtagcgt

SEQ ID NO: 2084 - DNA, 50 bp, Artificial Sequence
  Synthetic
cgcggaggatctgttattatttgatatgtagagatactgtacaaaaactg

SEQ ID NO: 2085 - DNA, 47 bp, Artificial Sequence
  Synthetic
aaagcacttctcatatacacatccaccactaacagatgctaaattgg

SEQ ID NO: 2086 - DNA, 41 bp, Artificial Sequence
  Synthetic
gtttgtatgccctgccttctgccaaatacaacactgggatc

SEQ ID NO: 2087 - DNA, 50 bp, Artificial Sequence
  Synthetic
atgtctataaagtacaggccatccgatatattatcaagatgcagatgagc

SEQ ID NO: 2088 - DNA, 46 bp, Artificial Sequence
  Synthetic
gctgtgctaatacactgaaataagccattgaaatgttggaggtaca

SEQ ID NO: 2089 - DNA, 40 bp, Artificial Sequence
  Synthetic
tgggaacatagccagaggcccactttgggggtctgggtat

SEQ ID NO: 2090 - DNA, 42 bp, Artificial Sequence
  Synthetic
aggatgcccatatacagagatgtaaaagggtctctgtaggca

SEQ ID NO: 2091 - DNA, 44 bp, Artificial Sequence
  Synthetic
aggccacttcttgtacgaatagtctgaaggccacattagactaa

SEQ ID NO: 2092 - DNA, 48 bp, Artificial Sequence
  Synthetic
agccacaaagacatctgcaaaatactacattttatttacatcctggac

SEQ ID NO: 2093 - DNA, 45 bp, Artificial Sequence
  Synthetic
caaacaaggagtacagcctactacgacaaagtgtctctatggacc

SEQ ID NO: 2094 - DNA, 45 bp, Artificial Sequence
  Synthetic
gccagcgtctgacttaacatttattacattggttgataacacaca

SEQ ID NO: 2095 - DNA, 45 bp, Artificial Sequence
  Synthetic
ccagtttgagataaaaatctgcgactacagaacgtttgtcctctg

SEQ ID NO: 2096 - DNA, 45 bp, Artificial Sequence
  Synthetic
aatattacaaaacatcgctgccggtcaacaacaagattactcagc

SEQ ID NO: 2097 - DNA, 42 bp, Artificial Sequence
  Synthetic
cctcctcctcaggatcaccattttacctgtcagtcttttagc

SEQ ID NO: 2098 - DNA, 43 bp, Artificial Sequence
  Synthetic
tgcccctcatttaattcaagagaatctgtttgaggtgctccag

SEQ ID NO: 2099 - DNA, 46 bp, Artificial Sequence
  Synthetic
tgtgacagcttccaaccttgggttaactaaaacacctttgaaaagc

SEQ ID NO: 2100 - DNA, 47 bp, Artificial Sequence
  Synthetic
taacccagttttcacaacatgatctaaagaatactttggtgtagcat

SEQ ID NO: 2101 - DNA, 49 bp, Artificial Sequence
  Synthetic
atgtcccagtttgtgaatatgtttgatggaaatagagcatattttctcc

SEQ ID NO: 2102 - DNA, 40 bp, Artificial Sequence
  Synthetic
tgctcgttggatcttcggcgtctctagctctaccacgtcg

SEQ ID NO: 2103 - DNA, 43 bp, Artificial Sequence
  Synthetic
gctggtgtaatgtctaatgtagcaacagatgtggtcggtgttg

SEQ ID NO: 2104 - DNA, 39 bp, Artificial Sequence
  Synthetic
aggtgtactggtacgtggagaggccctattaatcagcct

SEQ ID NO: 2105 - DNA, 42 bp, Artificial Sequence
  Synthetic
ctgcagatgtttctgaaaaccgaggccagaccaggattttgc

SEQ ID NO: 2106 - DNA, 49 bp, Artificial Sequence
  Synthetic
tgttgcaaatatcagctgtgcattaaatacctgacaatatactagagga

SEQ ID NO: 2107 - DNA, 45 bp, Artificial Sequence
  Synthetic
cgtttgcgtcgcctaagaagatatggcagtagatgtttatgatga

SEQ ID NO: 2108 - DNA, 48 bp, Artificial Sequence
  Synthetic
gctctgtctatcattgcaaatttgtgtagtggaaatcagtttagagtt

SEQ ID NO: 2109 - DNA, 45 bp, Artificial Sequence
  Synthetic
gcatttgttttggatccattgaaacccgcatatcctttaaagcag

SEQ ID NO: 2110 - DNA, 45 bp, Artificial Sequence
  Synthetic
agtgtgccaagtgattgtttcttaggggtctacatttttgtctac

SEQ ID NO: 2111 - DNA, 38 bp, Artificial Sequence
  Synthetic
ctgcccatctccacgcgaagccgcggaaatccagcaat

SEQ ID NO: 2112 - DNA, 41 bp, Artificial Sequence; identical to SEQ ID NO: 1458
  Synthetic

SEQ ID NO: 2113 - DNA, 42 bp, Artificial Sequence
  Synthetic
ctgaactaagactgggtgtccatccactaaccatccttttgc

SEQ ID NO: 2114 - DNA, 41 bp, Artificial Sequence
  Synthetic
cgaggcaggcttacatgggagggggggactttatgtgaccc

SEQ ID NO: 2115 - DNA, 35 bp, Artificial Sequence
  Synthetic
cgggctggtccagggacttgtcgctgactccgcca

SEQ ID NO: 2116 - DNA, 35 bp, Artificial Sequence
  Synthetic
cgcagggcaagacgagggatccaaggactcgggcc

SEQ ID NO: 2117 - DNA, 39 bp, Artificial Sequence
  Synthetic
cacgctggagggacattgtccgccacttcctgggtcatg

SEQ ID NO: 2118 - DNA, 43 bp, Artificial Sequence
  Synthetic
cccagctcattttggaaaataaacacaatccaacacgaggcaa

SEQ ID NO: 2119 - DNA, 35 bp, Artificial Sequence
  Synthetic
tgcgccgcctaatgcatcctatgcgccgaggcctt

SEQ ID NO: 2120 - DNA, 38 bp, Artificial Sequence
  Synthetic
tccttcttccacggcgccgcgagttacgctccttggag

SEQ ID NO: 2121 - DNA, 37 bp, Artificial Sequence
  Synthetic
tcgagctcgctggcgtgagaagctgtgtgacggtccc

SEQ ID NO: 2122 - DNA, 39 bp, Artificial Sequence
  Synthetic
acttgtaggcccggggaccccgatcgtaagccgcaatgt

SEQ ID NO: 2123 - DNA, 41 bp, Artificial Sequence
  Synthetic
cccacaccatcagcagcgtcttcctgagaggaggcttgtgt

SEQ ID NO: 2124 - DNA, 36 bp, Artificial Sequence
  Synthetic
cccccatcactctcccaggcctcgtttcggccccga

SEQ ID NO: 2125 - DNA, 39 bp, Artificial Sequence
  Synthetic
actcggcctggtctcggctgagtccgacaggaggtctcc

SEQ ID NO: 2126 - DNA, 38 bp, Artificial Sequence
  Synthetic
ccctgcgacccccttaaccctgtagttgagcggctcct

SEQ ID NO: 2127 - DNA, 36 bp, Artificial Sequence
  Synthetic
agcactcggcggggctttcttcgtcgcgtgacctgg

SEQ ID NO: 2128 - DNA, 40 bp, Artificial Sequence
  Synthetic
aattaggaaggcgctgggggcgggtgttccagtcatcggg

SEQ ID NO: 2129 - DNA, 39 bp, Artificial Sequence
  Synthetic
cgtccctggccacgaaggatttcagccagcatcttagca

SEQ ID NO: 2130 - DNA, 36 bp, Artificial Sequence
  Synthetic
gcaaccaggcccactgcaagacgcagttgctgacgc

SEQ ID NO: 2131 - DNA, 35 bp, Artificial Sequence
  Synthetic
agacccaccacctcgtgccgggcgtttgtcccacg

SEQ ID NO: 2132 - DNA, 38 bp, Artificial Sequence
  Synthetic
cggaagaggaggaggaggcggcggggggaggatgaaac

SEQ ID NO: 2133 - DNA, 38 bp, Artificial Sequence
  Synthetic
ggggtggtgaggatgcagctcctttatgcgctttgccg

SEQ ID NO: 2134 - DNA, 42 bp, Artificial Sequence
  Synthetic
cgttgcaggcctccttcaaaagttctctatcgtcaactgcgc

SEQ ID NO: 2135 - DNA, 37 bp, Artificial Sequence
  Synthetic
tcatccccctgcgtgtcggccaacatctgcctcccgc

SEQ ID NO: 2136 - DNA, 36 bp, Artificial Sequence
  Synthetic
tgtcaaccggccccgcaacgagtcccgctgagcaga

SEQ ID NO: 2137 - DNA, 35 bp, Artificial Sequence
  Synthetic
tgcggcagaggctaagcgcccgttgaggcccacgt

SEQ ID NO: 2138 - DNA, 38 bp, Artificial Sequence
  Synthetic
ctctccagtgcggtgttgctcaaggccagagacaccct

SEQ ID NO: 2139 - DNA, 35 bp, Artificial Sequence
  Synthetic
tctcgtcccacctggcggaacgtgtctgggaggcg

SEQ ID NO: 2140 - DNA, 38 bp, Artificial Sequence
  Synthetic
tcacgtccctggccgagctaaaagcctcggtctgctcc

SEQ ID NO: 2141 - DNA, 39 bp, Artificial Sequence
  Synthetic
accgcgttaacatctcggccagaactgggcctcgtggga

SEQ ID NO: 2142 - DNA, 39 bp, Artificial Sequence
  Synthetic
ggcttccgcctgttttgtttgtacgagagaacccgccac

SEQ ID NO: 2143 - DNA, 39 bp, Artificial Sequence
  Synthetic
cggagttgatgaaaggggccggatctcggccgttgtctc

SEQ ID NO: 2144 - DNA, 38 bp, Artificial Sequence
  Synthetic
aactccacgctgcgtccatcggggggtggcatatctga

SEQ ID NO: 2145 - DNA, 35 bp, Artificial Sequence
  Synthetic
agacgaggcacaggcacccctggctcgcctggagt

SEQ ID NO: 2146 - DNA, 38 bp, Artificial Sequence
  Synthetic
accggtgacaccaagtccatctgtcatgtcgggggcct

SEQ ID NO: 2147 - DNA, 41 bp, Artificial Sequence
  Synthetic
tgttcaggttttgctcaaggaaattggtttcagcaatcgga

SEQ ID NO: 2148 - DNA, 40 bp, Artificial Sequence
  Synthetic
cgccaaccaacacctccctctacaggcagcgtcttcagga

SEQ ID NO: 2149 - DNA, 38 bp, Artificial Sequence
  Synthetic
ggagtccggacagtttcatgctcgggcttcaggggcat

SEQ ID NO: 2150 - DNA, 41 bp, Artificial Sequence
  Synthetic
ggcagacatccgcgattacctttgtcgctgcagtactacga

SEQ ID NO: 2151 - DNA, 37 bp, Artificial Sequence
  Synthetic
tggccctgatcctgagccgggaagaggacgaggacga

SEQ ID NO: 2152 - DNA, 38 bp, Artificial Sequence
  Synthetic
tcacgtcctctaccccggcgcggggtcgaggaggtagt

SEQ ID NO: 2153 - DNA, 42 bp, Artificial Sequence
  Synthetic
cgtgtgctgcctggaacacaatgaggttcagggacttgtcct

SEQ ID NO: 2154 - DNA, 36 bp, Artificial Sequence
  Synthetic
actcgggagtctctggcccccatagctgcccctggt

SEQ ID NO: 2155 - DNA, 40 bp, Artificial Sequence
  Synthetic
accgtctatagcgcctttgggtccatgactgctgacccgc

SEQ ID NO: 2156 - DNA, 39 bp, Artificial Sequence
  Synthetic
cgcgcaggcttactttttgcatcatccggcaagcaccat

SEQ ID NO: 2157 - DNA, 42 bp, Artificial Sequence
  Synthetic
cagggggatctttacgtgggtgttcgtgccaaaccaaaaagg

SEQ ID NO: 2158 - DNA, 40 bp, Artificial Sequence
  Synthetic
acctgggcttatgcagacgagttcctctgaaggatgggcg

SEQ ID NO: 2159 - DNA, 39 bp, Artificial Sequence
  Synthetic
ggtggtctgccaaagctgctatcaacaggtgggggttgt

SEQ ID NO: 2160 - DNA, 40 bp, Artificial Sequence
  Synthetic
ctgcgaagagcgtcactgtgtgtagcagaatagggcccct

SEQ ID NO: 2161 - DNA, 36 bp, Artificial Sequence
  Synthetic
tgttcaacgcggtcaaggcctgcccatacctgcggg

SEQ ID NO: 2162 - DNA, 36 bp, Artificial Sequence
  Synthetic
tggttggggctgcttcccagtggccaggtggacgca

SEQ ID NO: 2163 - DNA, 37 bp, Artificial Sequence
  Synthetic
aactgcgagggggcctggtagaccctcgtgagacccg

SEQ ID NO: 2164 - DNA, 39 bp, Artificial Sequence
  Synthetic
acaggcaactacatggggccgtgtcggatctcggtccag

SEQ ID NO: 2165 - DNA, 36 bp, Artificial Sequence
  Synthetic
caacccggcagagctccaggtagcctgagccgcact

SEQ ID NO: 2166 - DNA, 42 bp, Artificial Sequence
  Synthetic
agcgtcccctgttaggtccttgcctaacagggtcatcgtcct

SEQ ID NO: 2167 - DNA, 39 bp, Artificial Sequence
  Synthetic
ggtcctaactggtcaggggcaagccggtcaacacgacat

SEQ ID NO: 2168 - DNA, 36 bp, Artificial Sequence
  Synthetic
agcagctggccccgaatcccaccagcccgttcacca

SEQ ID NO: 2169 - DNA, 37 bp, Artificial Sequence
  Synthetic
cctacacgaccgccaaggggcagaacgttgtcggtga

SEQ ID NO: 2170 - DNA, 38 bp, Artificial Sequence
  Synthetic
gttgagaccgtcctggcaggaagcggggtcttttggac

SEQ ID NO: 2171 - DNA, 39 bp, Artificial Sequence
  Synthetic
ttccccaggcagtcccagccgggacagattgtcttccac

SEQ ID NO: 2172 - DNA, 40 bp, Artificial Sequence
  Synthetic
cccggactcgttttacggactccccccttttccgcatcag

SEQ ID NO: 2173 - DNA, 40 bp, Artificial Sequence
  Synthetic
caacgggactgtcatggaaattattgccaaaacaacgtgt

SEQ ID NO: 2174 - DNA, 36 bp, Artificial Sequence
  Synthetic
gcggctgaacgtgactacccggcggtggacagcagt

SEQ ID NO: 2175 - DNA, 38 bp, Artificial Sequence
  Synthetic
atcctgccagcgggagaggcaaaagaccctccccacct

SEQ ID NO: 2176 - DNA, 36 bp, Artificial Sequence
  Synthetic
tggaggggggccaaagaggtaccacccccacccaca

SEQ ID NO: 2177 - DNA, 40 bp, Artificial Sequence
  Synthetic
caccagtttctttccgcggtggcgggaggacaccaaccct

SEQ ID NO: 2178 - DNA, 40 bp, Artificial Sequence
  Synthetic
ggcacaggagcgattaagtcctttctggagtgcctttcgc

SEQ ID NO: 2179 - DNA, 41 bp, Artificial Sequence
  Synthetic
tggccaacatgacttccgtcaaaggaaggcgctgtaggatt

SEQ ID NO: 2180 - DNA, 40 bp, Artificial Sequence
  Synthetic
cagatccacgaccgcatccagttttctcgcccccttcact

SEQ ID NO: 2181 - DNA, 36 bp, Artificial Sequence
  Synthetic
aggcgaccccatgatgcggggtgatgcggaccttgg

SEQ ID NO: 2182 - DNA, 37 bp, Artificial Sequence
  Synthetic
ggggtgacgaggatggaaaggccttgccgtgccctct

SEQ ID NO: 2183 - DNA, 39 bp, Artificial Sequence
  Synthetic
tggctcgctgctgtgacgcctggccatatcagggaagtc

SEQ ID NO: 2184 - DNA, 40 bp, Artificial Sequence
  Synthetic
cgagggtgccgcctttgagacagggtctgggtaaacaggt

SEQ ID NO: 2185 - DNA, 35 bp, Artificial Sequence
  Synthetic
tggcggtgccggtgaatccccagcctgccggactt

SEQ ID NO: 2186 - DNA, 35 bp, Artificial Sequence
  Synthetic
tggaggcctcgcacgagacgtcggcaaacaggggc

SEQ ID NO: 2187 - DNA, 40 bp, Artificial Sequence
  Synthetic
acaggaggtagcggtggggccacctccttgtcgtagagcg

SEQ ID NO: 2188 - DNA, 39 bp, Artificial Sequence
  Synthetic
cgctcctttgtggcatcaccgcctgtgcagagccttgac

SEQ ID NO: 2189 - DNA, 35 bp, Artificial Sequence
  Synthetic
tggtttgcgaggctgggccacgtcacggggaactg

SEQ ID NO: 2190 - DNA, 37 bp, Artificial Sequence
  Synthetic
gctcatcatcagcgtcctgcgctgagccgcgaccagt

SEQ ID NO: 2191 - DNA, 42 bp, Artificial Sequence
  Synthetic
gctacctcatgttcagggccatgcaaaggcaggtctttctca

SEQ ID NO: 2192 - DNA, 36 bp, Artificial Sequence
  Synthetic
cccttggtcacgcttggctgggctgaccccggcaaa

SEQ ID NO: 2193 - DNA, 43 bp, Artificial Sequence
  Synthetic
tgccaatatctaagttgccttagttgttttccgtttgctgcat

SEQ ID NO: 2194 - DNA, 42 bp, Artificial Sequence
  Synthetic
gctggcaaattgctcgtgacaaaaagacattgtcctgcagct

SEQ ID NO: 2195 - DNA, 47 bp, Artificial Sequence
  Synthetic
ttgccgtaccaattccatatatgattgttaaactccagtaatcgaag

SEQ ID NO: 2196 - DNA, 47 bp, Artificial Sequence
  Synthetic
tggtggttctattagcatgtttgttgtgtgctaaaaacagagatacc

SEQ ID NO: 2197 - DNA, 47 bp, Artificial Sequence
  Synthetic
gcatctttcacatatttggcttgactggctgatgtagatagtaatgc

SEQ ID NO: 2198 - DNA, 44 bp, Artificial Sequence
  Synthetic
aaccgtaataggctcatgcaaatgtttagtattttatgggcctg

SEQ ID NO: 2199 - DNA, 46 bp, Artificial Sequence
  Synthetic
gcacgtgttgccagtgtttaaagaactgtatgaaaaagatagtgac

SEQ ID NO: 2200 - DNA, 39 bp, Artificial Sequence
  Synthetic
attgcttaggcactgcgtcctatagcaacgaacgatgga

SEQ ID NO: 2201 - DNA, 42 bp, Artificial Sequence
  Synthetic
ggtgtcctgggtgctagacacagtacatgtgggttcaagggt

SEQ ID NO: 2202 - DNA, 41 bp, Artificial Sequence
  Synthetic
ggcctctatgcccttaggaataatgatagtgtggaacagcg

SEQ ID NO: 2203 - DNA, 44 bp, Artificial Sequence
  Synthetic
gctggttgtgtggtagtcacgtttctagcactatatatacaggc

SEQ ID NO: 2204 - DNA, 38 bp, Artificial Sequence
  Synthetic
tagtggcatgggaggtggaaggagcagatgttccagtg

SEQ ID NO: 2205 - DNA, 46 bp, Artificial Sequence
  Synthetic
acttgcctggcgaataggaaaatgctggtagttctagattacttac

SEQ ID NO: 2206 - DNA, 43 bp, Artificial Sequence
  Synthetic
gcattttcagtgtcattaagcttgtcggacagcctttaggaat

SEQ ID NO: 2207 - DNA, 39 bp, Artificial Sequence
  Synthetic
ccaagggaacgtcagacctatcacaggttttggggcaat

SEQ ID NO: 2208 - DNA, 43 bp, Artificial Sequence
  Synthetic
aaggcttgttaaacaactgtgacttctttatgcatccacacct

SEQ ID NO: 2209 - DNA, 43 bp, Artificial Sequence
  Synthetic
aagactagcagtaggaggtggtacatggatgctacattactgg

SEQ ID NO: 2210 - DNA, 40 bp, Artificial Sequence
  Synthetic
caccggacagggggggttattgcgtgtcatgtatgtgtgt

SEQ ID NO: 2211 - DNA, 43 bp, Artificial Sequence
  Synthetic
tgcacggtgagtaacacatgtattatgcctggcagttatttgg

SEQ ID NO: 2212 - DNA, 50 bp, Artificial Sequence
  Synthetic
ccaaactttgattcaccttttcctggtttctggtattgttagaaagatgg

SEQ ID NO: 2213 - DNA, 45 bp, Artificial Sequence
  Synthetic
cgacaaactctcttctgctaaaagagcctactgctgaaaatttgg

SEQ ID NO: 2214 - DNA, 43 bp, Artificial Sequence
  Synthetic
gctttattgcaatcctctgctaactacgatgcttcacagggaa

SEQ ID NO: 2215 - DNA, 50 bp, Artificial Sequence
  Synthetic
ggtaaccgtttctctactttttcctactgtaggattatatgctttaatgc

SEQ ID NO: 2216 - DNA, 50 bp, Artificial Sequence
  Synthetic
gtcatttggcgcatttcatatctttcaaagcaataatcaagctaaacatg

SEQ ID NO: 2217 - DNA, 43 bp, Artificial Sequence
  Synthetic
tgaaacagtttttgggttgggtattcgtatgcagcagaaacct

SEQ ID NO: 2218 - DNA, 40 bp, Artificial Sequence
  Synthetic
cttcgtcctccagctcgaagaccgccacaccttccacatc

SEQ ID NO: 2219 - DNA, 43 bp, Artificial Sequence
  Synthetic
gacgaaatccagtggcacccatttggcagtgttatttatttgg

SEQ ID NO: 2220 - DNA, 46 bp, Artificial Sequence
  Synthetic
gctatgtcttcttggccatgtagaaatgtatttgaggacttgtcca

SEQ ID NO: 2221 - DNA, 44 bp, Artificial Sequence
  Synthetic
tggtaatgcaccttttgtgtcaaagtttggtacgttttagcaga

SEQ ID NO: 2222 - DNA, 47 bp, Artificial Sequence
  Synthetic
tctacgtttcaataaagcaggatgtctaactctataccgtacacacc

SEQ ID NO: 2223 - DNA, 43 bp, Artificial Sequence
  Synthetic
acctgcttaggatccatactaagagccgatacagaaaatccca

SEQ ID NO: 2224 - DNA, 43 bp, Artificial Sequence
  Synthetic
cgctctgttaaatctacgttccaaaacgagatgtcctccagaa

SEQ ID NO: 2225 - DNA, 42 bp, Artificial Sequence
  Synthetic
aacacgcaggttatgttcaggatcttcctattgtgcaaagtc

SEQ ID NO: 2226 - DNA, 41 bp, Artificial Sequence
  Synthetic
cctcgccaaagcccagctattctgtgcagtgaggaaaagga

SEQ ID NO: 2227 - DNA, 41 bp, Artificial Sequence
  Synthetic
tctccaccaccagccttactgtcctacagaaccagcacagc

SEQ ID NO: 2228 - DNA, 42 bp, Artificial Sequence
  Synthetic
tccatccccgggatgcctactatagtgatgaggacgaggagg

SEQ ID NO: 2229 - DNA, 42 bp, Artificial Sequence
  Synthetic
gtcgcgtcaatatccacttgcgacgtagactgtttgagctgc

SEQ ID NO: 2230 - DNA, 41 bp, Artificial Sequence
  Synthetic
tgacaccctctgcaactgtgaaaagtaataggaccacgtgt

SEQ ID NO: 2231 - DNA, 45 bp, Artificial Sequence
  Synthetic
ccaattatttcactagcattgcccaccaaaataagacatccagcg

SEQ ID NO: 2232 - DNA, 42 bp, Artificial Sequence
  Synthetic
tgctctgcccgtttgtaatggccaagcaaaatatgtaaagga

SEQ ID NO: 2233 - DNA, 44 bp, Artificial Sequence
  Synthetic
gtggagttggcataggaaatcaatacttttgtatgagcctgttg

SEQ ID NO: 2234 - DNA, 44 bp, Artificial Sequence
  Synthetic
acaggaaatgcattaggaaaggtaatagaggaagacaggtggaa

SEQ ID NO: 2235 - DNA, 43 bp, Artificial Sequence
  Synthetic
tcatcatcaccgctttgtacatatacgttaagtttgatggcga

SEQ ID NO: 2236 - DNA, 36 bp, Artificial Sequence
  Synthetic
ccgagtcgctgacgcttatgcaacccgacgccacca

SEQ ID NO: 2237 - DNA, 43 bp, Artificial Sequence
  Synthetic
gccaggtggaggttactttgttaaggtatagattgcacaaaca

SEQ ID NO: 2238 - DNA, 46 bp, Artificial Sequence
  Synthetic
ggaaggatagacagccaaaagaagaagtgtggagacctttatttgc

SEQ ID NO: 2239 - DNA, 40 bp, Artificial Sequence
  Synthetic
cccccccatctctatcacgtacttgtgttgtagtgtgcaa

SEQ ID NO: 2240 - DNA, 39 bp, Artificial Sequence
  Synthetic
gggatgtatccagtgcgcccattctttgggggtttgggc

SEQ ID NO: 2241 - DNA, 45 bp, Artificial Sequence
  Synthetic
caggattgtcataggtaacaagtgtccaacaagtacatgtacagg

SEQ ID NO: 2242 - DNA, 44 bp, Artificial Sequence
  Synthetic
cactatagggttttttcctgattgcttcccgactgttaactgtt

SEQ ID NO: 2243 - DNA, 43 bp, Artificial Sequence
  Synthetic
ccatagtaagattgtcccgggtgtgacactgaaaacaccaatt

SEQ ID NO: 2244 - DNA, 44 bp, Artificial Sequence
  Synthetic
caccatatggctcagctgccgatgtgcctttagatattgtaacc

SEQ ID NO: 2245 - DNA, 41 bp, Artificial Sequence
  Synthetic
gcagataccattgttagggccatcccagttgtttaacaagc

SEQ ID NO: 2246 - DNA, 40 bp, Artificial Sequence
  Synthetic
aaggaacccgtgtacagacacccaaacgttcctaagcatg

SEQ ID NO: 2247 - DNA, 40 bp, Artificial Sequence
  Synthetic
ccgaaatcggtccgggggtagtggtgtcctgtatgtgacc

SEQ ID NO: 2248 - DNA, 40 bp, Artificial Sequence
  Synthetic
cgccatggctagacgctttctgccatgaatcactcccctg

SEQ ID NO: 2249 - DNA, 41 bp, Artificial Sequence
  Synthetic
cggcaacaagtatactccgccaaagaaacaccaaccgtcgc

SEQ ID NO: 2250 - DNA, 37 bp, Artificial Sequence
  Synthetic
gtaccccatgaggtcggcaaagtcgcgcaacgtgggt

SEQ ID NO: 2251 - DNA, 39 bp, Artificial Sequence
  Synthetic
ccggtatccagcactgagatgcgctgctgtcctccacgt

SEQ ID NO: 2252 - DNA, 42 bp, Artificial Sequence
  Synthetic
cccaatgagccccgctaatgatcacggctaccatgatcttgg

SEQ ID NO: 2253 - DNA, 40 bp, Artificial Sequence
  Synthetic
tcgggacatcctgacgagttgaccttgcacaccggcttta

SEQ ID NO: 2254 - DNA, 39 bp, Artificial Sequence
  Synthetic
gctctagtacggcagggtggtgtcatggttcggctgcac

SEQ ID NO: 2255 - DNA, 40 bp, Artificial Sequence
  Synthetic
cgtggtggagtgcaacaaaggattcactcgtggggatcgt

SEQ ID NO: 2256 - DNA, 40 bp, Artificial Sequence
  Synthetic
cccttgatgtaccaagcagccacagctagctgcaatggct

SEQ ID NO: 2257 - DNA, 39 bp, Artificial Sequence
  Synthetic
gtaagcaggcccaagcaccgccgtcgccatattctaccc

SEQ ID NO: 2258 - DNA, 40 bp, Artificial Sequence
  Synthetic
gaggacctcccgaccaagtcgagacagctgcttgtgggga

SEQ ID NO: 2259 - DNA, 38 bp, Artificial Sequence
  Synthetic
cgtgagccggccagagtctttctcgggggttttgtgga

SEQ ID NO: 2260 - DNA, 42 bp, Artificial Sequence
  Synthetic
caggtggtgtgctgttgtcacttttcatccccgttgagacac

SEQ ID NO: 2261 - DNA, 42 bp, Artificial Sequence
  Synthetic
ccacggcatggcattcatcacaatatggcaaattcctcgccg

SEQ ID NO: 2262 - DNA, 40 bp, Artificial Sequence
  Synthetic
cgaccactacgtctccctgagttcggggtatgggcttgaa

SEQ ID NO: 2263 - DNA, 42 bp, Artificial Sequence
  Synthetic
ggtctccgatggtgtgagctcagtgtagtgctctgtgagtgc

SEQ ID NO: 2264 - DNA, 38 bp, Artificial Sequence
  Synthetic
cacgggatgtgtgagggtgaccacactcgtgggcccca

SEQ ID NO: 2265 - DNA, 40 bp, Artificial Sequence
  Synthetic
gcctgcacagtgggttgtatgtgccgagatgctgaagtcc

SEQ ID NO: 2266 - DNA, 41 bp, Artificial Sequence
  Synthetic
cgacgagagcccccgaaatgcaggtaaggtgctagtggaca

SEQ ID NO: 2267 - DNA, 40 bp, Artificial Sequence
  Synthetic
cactggccctccgtgtaacaatcatgagaatcacggggcc

SEQ ID NO: 2268 - DNA, 39 bp, Artificial Sequence
  Synthetic
gcagtctccgccgtgatatgagcagcttccttgcgaccc

SEQ ID NO: 2269 - DNA, 41 bp, Artificial Sequence
  Synthetic
ccggtaaagctggtgggaacccgaccttgagccttcgatac

SEQ ID NO: 2270 - DNA, 39 bp, Artificial Sequence
  Synthetic
tccaagctccccctcgaggcctgatgagttggccctttc

SEQ ID NO: 2271 - DNA, 42 bp, Artificial Sequence
  Synthetic
ggaggccgctagcttaatgtcctgataggatgcaagtgctcg

SEQ ID NO: 2272 - DNA, 40 bp, Artificial Sequence
  Synthetic
ccatcaccgcctgaggaagttttttaccctgacctcggcg

SEQ ID NO: 2273 - DNA, 42 bp, Artificial Sequence
  Synthetic
ccctgcagctttacaagccgctggtgctcaccactagcatgg

SEQ ID NO: 2274 - DNA, 42 bp, Artificial Sequence
  Synthetic
gtggtagggtctctggtcaggttcctcaaatgtgtctgtggc

SEQ ID NO: 2275 - DNA, 42 bp, Artificial Sequence
  Synthetic
ccccaagttttctgagggctgactctgcacacatacactccc

SEQ ID NO: 2276 - DNA, 38 bp, Artificial Sequence
  Synthetic
caggctgcataggcaaggcggttgagggcagccagttg

SEQ ID NO: 2277 - DNA, 39 bp, Artificial Sequence
  Synthetic
gcacgggcaactaccaccaagcggtaatgaggccgaagt

SEQ ID NO: 2278 - DNA, 40 bp, Artificial Sequence
  Synthetic
acgtcaaaggctgccaccagtcttcgtcaacggtcaagtc

SEQ ID NO: 2279 - DNA, 41 bp, Artificial Sequence
  Synthetic
gctccgaccgaacaacaaccaagaggatgcggttttgttcg

SEQ ID NO: 2280 - DNA, 40 bp, Artificial Sequence
  Synthetic
aacagtaccgacaagcccggcgaaaagaaaatcgccctcc

SEQ ID NO: 2281 - DNA, 40 bp, Artificial Sequence
  Synthetic
ccttggctttgcagcttggctggacggcttggattttcag

SEQ ID NO: 2282 - DNA, 40 bp, Artificial Sequence
  Synthetic
gaccgcgccccagtatttcgatgtcgcccaagttttcaga

SEQ ID NO: 2283 - DNA, 38 bp, Artificial Sequence
  Synthetic
cgcgcagtttgccgttgacttgacgaagccgccctggt

SEQ ID NO: 2284 - DNA, 38 bp, Artificial Sequence
  Synthetic
ggcgttaaaaagccgagcggggcttcgatgcccttgtt

SEQ ID NO: 2285 - DNA, 37 bp, Artificial Sequence
  Synthetic
cccgaatggcagatacaggcacggctgccgtcttggt

SEQ ID NO: 2286 - DNA, 37 bp, Artificial Sequence
  Synthetic
attggcacgccgatccgcccgaacaggcggtatttgc

SEQ ID NO: 2287 - DNA, 39 bp, Artificial Sequence
  Synthetic
tcgggctgcccatgaccctttgttgcgatgtgatgacgc

SEQ ID NO: 2288 - DNA, 40 bp, Artificial Sequence
  Synthetic
cgcgcggcagttgatacaggcgggttctgccttttcaaac

SEQ ID NO: 2289 - DNA, 38 bp, Artificial Sequence
  Synthetic
gccgccaaaggcaaaggacgaggcggacaccttgttgc

SEQ ID NO: 2290 - DNA, 42 bp, Artificial Sequence
  Synthetic
gcccatttgtaaccggttctgcacaatttcagccacaactgc

SEQ ID NO: 2291 - DNA, 35 bp, Artificial Sequence
  Synthetic
aacggcggcctgattaccgcacaccagcgcaccga

SEQ ID NO: 2292 - DNA, 39 bp, Artificial Sequence
  Synthetic
agttgccgcacctgccctcgcaagataaaccacgtcgcc

SEQ ID NO: 2293 - DNA, 38 bp, Artificial Sequence
  Synthetic
gaatcggggcgaactcgggttccaatgcctgcgtttca

SEQ ID NO: 2294 - DNA, 37 bp, Artificial Sequence
  Synthetic
cgccagttgaccgaatcgggaactcttgccgcgttcc

SEQ ID NO: 2295 - DNA, 38 bp, Artificial Sequence
  Synthetic
cgcaaagactaccgcagcaacgtcagcggtgcaggcga

SEQ ID NO: 2296 - DNA, 36 bp, Artificial Sequence
  Synthetic
acttcctcgaccgcctcgcgtaacgcgcaaaccccg

SEQ ID NO: 2297 - DNA, 42 bp, Artificial Sequence
  Synthetic
gcatcctgctcgacaacatcctaggttttgtggacataggcg

SEQ ID NO: 2298 - DNA, 38 bp, Artificial Sequence
  Synthetic
cgaggctttgggcttgggtccttttgggcggcaggacg

SEQ ID NO: 2299 - DNA, 41 bp, Artificial Sequence
  Synthetic
gtccgcaacaaaatcgccctggttcatgttcgtgccttccg

SEQ ID NO: 2300 - DNA, 38 bp, Artificial Sequence
  Synthetic
agacattgccctccccgagggttttccagtgcgaacgc

SEQ ID NO: 2301 - DNA, 34 bp, Artificial Sequence
  Synthetic
acggcggcgaagagaaaggtttcttgggcgcggc

SEQ ID NO: 2302 - DNA, 35 bp, Artificial Sequence
  Synthetic
ttggcgttggctcaggcgggcatcggacggcaaag

SEQ ID NO: 2303 - DNA, 38 bp, Artificial Sequence
  Synthetic
ggcaatttgttcggcaatggcgcgaagctgcgttgggc

SEQ ID NO: 2304 - DNA, 35 bp, Artificial Sequence
  Synthetic
tcgaagatgcctgcgccgcataccgggttcgccga

SEQ ID NO: 2305 - DNA, 36 bp, Artificial Sequence
  Synthetic
ccgacaccatccgcctgatggcacgcctgccgctat

SEQ ID NO: 2306 - DNA, 34 bp, Artificial Sequence
  Synthetic
cgtgtgcatcggtcctgccttcggcggcggcaat

SEQ ID NO: 2307 - DNA, 38 bp, Artificial Sequence
  Synthetic
tgccgctcgccaaagtcggcgccttgttctttcaggga

SEQ ID NO: 2308 - DNA, 38 bp, Artificial Sequence
  Synthetic
ttggaaatcgtccgcaccgagggtttgaccgccgtaat

SEQ ID NO: 2309 - DNA, 38 bp, Artificial Sequence
  Synthetic
cgcctgaccatgctgttgcgccgcacctgtcagaatcg

SEQ ID NO: 2310 - DNA, 41 bp, Artificial Sequence
  Synthetic
cgccgatgccgtacaagaaaccatggacagatggatgtgcg

SEQ ID NO: 2311 - DNA, 38 bp, Artificial Sequence
  Synthetic
agtcgcgcccgtcgacaaagaaaatcaccgccatcagc

SEQ ID NO: 2312 - DNA, 37 bp, Artificial Sequence
  Synthetic
gcgcaggtggggcaggtaatcgccttaagccttgccg

SEQ ID NO: 2313 - DNA, 39 bp, Artificial Sequence
  Synthetic
gctgttttcgggcatctggctgaacacctgccccggtat

SEQ ID NO: 2314 - DNA, 37 bp, Artificial Sequence
  Synthetic
ccgatcataccggtcgcgccattgcgccgcttccaac

SEQ ID NO: 2315 - DNA, 38 bp, Artificial Sequence
  Synthetic
ccgatttccaaaaccgcgcctgctgcaaggctacgact

SEQ ID NO: 2316 - DNA, 39 bp, Artificial Sequence
  Synthetic
acggcagggcggggttttgtcgttttcgaaccccaaccc

SEQ ID NO: 2317 - DNA, 41 bp, Artificial Sequence
  Synthetic
cctgtcgctcggtaaatcagcgaatcgaacacagctacgcc

SEQ ID NO: 2318 - DNA, 37 bp, Artificial Sequence
  Synthetic
actgcttcgcgcgcttcgaaaaagccgaagccgaact

SEQ ID NO: 2319 - DNA, 38 bp, Artificial Sequence
  Synthetic
gcgttcttccctgcgtttgctgcctgcctcaacatcgg

SEQ ID NO: 2320 - DNA, 37 bp, Artificial Sequence
  Synthetic
tcgagcgggcaggctgaaatcaggcagtcggcgcagt

SEQ ID NO: 2321 - DNA, 37 bp, Artificial Sequence
  Synthetic
accgcgccatgctcttggcgcgttggcggctttttgg

SEQ ID NO: 2322 - DNA, 41 bp, Artificial Sequence
  Synthetic
cgcctcgcccgtatccatgtacgaacttcaccaaacccacg

SEQ ID NO: 2323 - DNA, 35 bp, Artificial Sequence
  Synthetic
ccgcagcattcccacgactccttttgggcgagccg

SEQ ID NO: 2324 - DNA, 40 bp, Artificial Sequence
  Synthetic
gcgcgtgaacacggcattcctaatgttggggaacggcatt

SEQ ID NO: 2325 - DNA, 36 bp, Artificial Sequence
  Synthetic
actctccgccctgctcgacctcgcggattgcctgct

SEQ ID NO: 2326 - DNA, 37 bp, Artificial Sequence
  Synthetic
ggctgaaaaacgccgtcgaacttcagcgtcgggtgca

SEQ ID NO: 2327 - DNA, 42 bp, Artificial Sequence
  Synthetic
ccatgctgaacaccgccctttcaaacggcatcggcttcttct

SEQ ID NO: 2328 - DNA, 42 bp, Artificial Sequence
  Synthetic
tcaagacagaaagctcctgccgtgtgcatataaagcggcagg

SEQ ID NO: 2329 - DNA, 40 bp, Artificial Sequence
  Synthetic
cgctgttttacacgctgaccgacgatcggacgcgttttgc

SEQ ID NO: 2330 - DNA, 36 bp, Artificial Sequence
  Synthetic
tgctgcactttccggcgaacaaggtttgccagcgcg

SEQ ID NO: 2331 - DNA, 41 bp, Artificial Sequence
  Synthetic
gggactgacggtgtcggtattgcggcatagtattcgcggac

SEQ ID NO: 2332 - DNA, 35 bp, Artificial Sequence
  Synthetic
aagctgcgcggtgctgaccgacgttgagccgggga

SEQ ID NO: 2333 - DNA, 39 bp, Artificial Sequence
  Synthetic
cctccgcaacgacctgacctcaatctgttcgggtgtcag

SEQ ID NO: 2334 - DNA, 36 bp, Artificial Sequence
  Synthetic
cgtgcgcgcctaccagattccttgcgaggctttgcg

SEQ ID NO: 2335 - DNA, 39 bp, Artificial Sequence
  Synthetic
tatggctgcacggcgaggcccagttgttcggacaaacgc

SEQ ID NO: 2336 - DNA, 42 bp, Artificial Sequence
  Synthetic
ggcacatttttcacgcttgccatgcttttgtcttcttcgccc

SEQ ID NO: 2337 - DNA, 41 bp, Artificial Sequence
  Synthetic
cccagcagtttcgccgttttgtctacgagcttttgggcgag

SEQ ID NO: 2338 - DNA, 36 bp, Artificial Sequence
  Synthetic
tgaccgccatgtacaagccgctgcccgcctgcatga

SEQ ID NO: 2339 - DNA, 38 bp, Artificial Sequence
  Synthetic
cgccgtttatgacgcccccaaggcgcgcaccataacca

SEQ ID NO: 2340 - DNA, 38 bp, Artificial Sequence
  Synthetic
gctcgcgcgaaaacttaaaccacgttttcaggcggccc

SEQ ID NO: 2341 - DNA, 37 bp, Artificial Sequence
  Synthetic
gcctgccggggctacatcactggagctgttcgtcggt

SEQ ID NO: 2342 - DNA, 37 bp, Artificial Sequence
  Synthetic
gtcccgaaagccgctgcacgaaatccgtgtcgatgca

SEQ ID NO: 2343 - DNA, 34 bp, Artificial Sequence
  Synthetic
ggcaaggtgcggcagcttcgctgcacgacacgct

SEQ ID NO: 2344 - DNA, 39 bp, Artificial Sequence
  Synthetic
cgatgacggtggtggcaaccaaaaggccgaagtcatggc

SEQ ID NO: 2345 - DNA, 39 bp, Artificial Sequence
  Synthetic
atcagcatcggggcggtttcgccaagctcgaagaagact

SEQ ID NO: 2346 - DNA, 35 bp, Artificial Sequence
  Synthetic
acacccgaaacccgcagcgcgcctgacggatgctg

SEQ ID NO: 2347 - DNA, 35 bp, Artificial Sequence
  Synthetic
gcttcaggacggcatcgccgcgtatcatcggcgcg

SEQ ID NO: 2348 - DNA, 35 bp, Artificial Sequence
  Synthetic
ccgccgacttccgcatacggcgtgggtcatgccgt

SEQ ID NO: 2349 - DNA, 37 bp, Artificial Sequence
  Synthetic
actttccaagtctgcgcggcaaacctgcctcgtcggg

SEQ ID NO: 2350 - DNA, 38 bp, Artificial Sequence
  Synthetic
ggagtagcgttgggattcgctctcggcaaagaacgtac

SEQ ID NO: 2351 - DNA, 38 bp, Artificial Sequence
  Synthetic
ttccgacccattctccggagatttcggcggcacagaag

SEQ ID NO: 2352 - DNA, 42 bp, Artificial Sequence
  Synthetic
ggtaggatgcggatttcctgcttttggaactgtggccaaaca

SEQ ID NO: 2353 - DNA, 42 bp, Artificial Sequence
  Synthetic
gcccacgtcgtttatccgcaagtgtttgagccagatttcgga

SEQ ID NO: 2354 - DNA, 41 bp, Artificial Sequence
  Synthetic
gcaactgccttatgccctgacgagacccaatgcgaggtagc

SEQ ID NO: 2355 - DNA, 40 bp, Artificial Sequence
  Synthetic
tatgctgccgattgccgccgatacacgggataatcagcgc

SEQ ID NO: 2356 - DNA, 38 bp, Artificial Sequence
  Synthetic
cgcccatgtgcgtgctgatcaagcgtggcgataatcga

SEQ ID NO: 2357 - DNA, 37 bp, Artificial Sequence
  Synthetic
cgtcgacggtctgacacacctaatcgccgtctgccca

SEQ ID NO: 2358 - DNA, 41 bp, Artificial Sequence
  Synthetic
gcaaatatacagccgcagcggttcatggcaacgtcaatcgg

SEQ ID NO: 2359 - DNA, 39 bp, Artificial Sequence
  Synthetic
tttccggttgccgatacgcctgtattccatcacgccgtc

SEQ ID NO: 2360 - DNA, 40 bp, Artificial Sequence
  Synthetic
gccattaccgccgaaccgagacctgtcgttttattggggc

SEQ ID NO: 2361 - DNA, 39 bp, Artificial Sequence
  Synthetic
cggtattcctgagcgtcggatccgtttggcgcaggttgg

SEQ ID NO: 2362 - DNA, 38 bp, Artificial Sequence
  Synthetic
cggcttggacgttgcacactttgggcgcaggtcatcga

SEQ ID NO: 2363 - DNA, 36 bp, Artificial Sequence
  Synthetic
cgcgccctatcatgatgccgccgcaaaaagccgccg

SEQ ID NO: 2364 - DNA, 38 bp, Artificial Sequence
  Synthetic
acggcggcatggcaatactgaaaaaccgaccgttgggc

SEQ ID NO: 2365 - DNA, 36 bp, Artificial Sequence
  Synthetic
gaccaaagccgccaatgccaatccggcatcgacgct

SEQ ID NO: 2366 - DNA, 35 bp, Artificial Sequence
  Synthetic
agcttgcccggaaagccgcgccgagggcgaatgtg

SEQ ID NO: 2367 - DNA, 36 bp, Artificial Sequence
  Synthetic
gcaggtcgtcgtcgctgtacctgctgcgcgggttca

SEQ ID NO: 2368 - DNA, 39 bp, Artificial Sequence
  Synthetic
tctgcctgtccctcagcgccctatcaggctcatacggcg

SEQ ID NO: 2369 - DNA, 41 bp, Artificial Sequence
  Synthetic
ccgtctgcaagcctacgaaggagttgctgttcaaaccacgg

SEQ ID NO: 2370 - DNA, 36 bp, Artificial Sequence
  Synthetic
ccacgttggcacgcctgtggcatcccttgccgtcca

SEQ ID NO: 2371 - DNA, 40 bp, Artificial Sequence
  Synthetic
cgcaagaacacaggcaaagcccggcactctgcatttttgc

SEQ ID NO: 2372 - DNA, 39 bp, Artificial Sequence
  Synthetic
cgctttgccgaactcgacggggatgacggtcagtgtgtg

SEQ ID NO: 2373 - DNA, 37 bp, Artificial Sequence
  Synthetic
aaatcccgccctgctcgccttggacggcgttatgggt

SEQ ID NO: 2374 - DNA, 35 bp, Artificial Sequence
  Synthetic
ctgaccggcacacccacacgcgggcaagctgacgt

SEQ ID NO: 2375 - DNA, 35 bp, Artificial Sequence
  Synthetic
acgccgacgacctcgaagctcgggacaggggtgga

SEQ ID NO: 2376 - DNA, 41 bp, Artificial Sequence
  Synthetic
ccaaaaccgccgtcctacaccaggattgcgctgaacagcct

SEQ ID NO: 2377 - DNA, 39 bp, Artificial Sequence
  Synthetic
caacagcatctccgtcagcgactttgacggatgcctggc

SEQ ID NO: 2378 - DNA, 42 bp, Artificial Sequence
  Synthetic
gccatattcgcaggattgctgccgggggaaaaggagttaacc

SEQ ID NO: 2379 - DNA, 37 bp, Artificial Sequence
  Synthetic
ccgacaaagaccgcgcatggtgtacgacaggtgcggc

SEQ ID NO: 2380 - DNA, 38 bp, Artificial Sequence
  Synthetic
catcacccgcatcggtttcaacctgcaaccggggatgc

SEQ ID NO: 2381 - DNA, 42 bp, Artificial Sequence
  Synthetic
gctatcggagttggaccaggtgcgggttttttgacggttcag

SEQ ID NO: 2382 - DNA, 37 bp, Artificial Sequence
  Synthetic
agccggcggattctgcctgtcggcaatggcatgcatg

SEQ ID NO: 2383 - DNA, 36 bp, Artificial Sequence
  Synthetic
accccggggcaaaccatccgcgcaatgcctgctcga

SEQ ID NO: 2384 - DNA, 43 bp, Artificial Sequence
  Synthetic
tccattatttaccaattcctcaccggacgttactttgcgccaa

SEQ ID NO: 2385 - DNA, 37 bp, Artificial Sequence
  Synthetic
cgccgctacgccatcaacgttgaccgatggcacgacc

SEQ ID NO: 2386 - DNA, 38 bp, Artificial Sequence
  Synthetic
ggcgaacccaaacccagcatcacgggtcggcgtggatt

SEQ ID NO: 2387 - DNA, 40 bp, Artificial Sequence
  Synthetic
gggaaatctttacccacggcggatttcgaccgcccattcc

SEQ ID NO: 2388 - DNA, 37 bp, Artificial Sequence
  Synthetic
acgcaccgttgccgacattgatgctgactttgtccgc

SEQ ID NO: 2389 - DNA, 34 bp, Artificial Sequence
  Synthetic
agcaggcgcgattaccggctgctgcgcttgggca

SEQ ID NO: 2390 - DNA, 35 bp, Artificial Sequence
  Synthetic
acgtcttgagcgtcggcccccgcgagacaggtcgt

SEQ ID NO: 2391 - DNA, 41 bp, Artificial Sequence
  Synthetic
ggcacaccaattgaaccttgccaaaccttccaatacgcccg

SEQ ID NO: 2392 - DNA, 40 bp, Artificial Sequence
  Synthetic
cgacgcactggtcggcaaaggatgccttcgatgacgaggt

SEQ ID NO: 2393 - DNA, 39 bp, Artificial Sequence
  Synthetic
cgacagcgcatcgaagccatgggatagcgtccggcaagt

SEQ ID NO: 2394 - DNA, 38 bp, Artificial Sequence
  Synthetic
gctgaccgccgacgatgtcgtccgatgtgtattcccaa

SEQ ID NO: 2395 - DNA, 37 bp, Artificial Sequence
  Synthetic
accggttgccgccaaaaaaggtaaacgacgacgcgcg

SEQ ID NO: 2396 - DNA, 39 bp, Artificial Sequence
  Synthetic
gcgtcaaccgtatgccgctccgctgaatcggataggtcg

SEQ ID NO: 2397 - DNA, 38 bp, Artificial Sequence
  Synthetic
aaacccaagcccgaagacgcggggtgaggatgtagcgt

SEQ ID NO: 2398 - DNA, 36 bp, Artificial Sequence
  Synthetic
tcctacggctggttcggcttgcctgttggacgggga

SEQ ID NO: 2399 - DNA, 36 bp, Artificial Sequence
  Synthetic
tcggcggcattgcccgatccggattcaaacgcgcca

SEQ ID NO: 2400 - DNA, 38 bp, Artificial Sequence
  Synthetic
gatgggttggttcgatgccgttggaaaacccgcccagc

SEQ ID NO: 2401 - DNA, 39 bp, Artificial Sequence
  Synthetic
ccttgccgtcgccatcctgtcggctttgaataactgcgt

SEQ ID NO: 2402 - DNA, 38 bp, Artificial Sequence
  Synthetic
tacgccttttcggacggcgccggaaagggtaacggtcg

SEQ ID NO: 2403 - DNA, 35 bp, Artificial Sequence
  Synthetic
aactgaccgcgctgctcggccgtcagccagagggt

SEQ ID NO: 2404 - DNA, 39 bp, Artificial Sequence
  Synthetic
accgactacgtcgtcgccgcaaggcattggctttttcca

SEQ ID NO: 2405 - DNA, 40 bp, Artificial Sequence
  Synthetic
gctccataagccctaccgcctgtcgcgttcgatttcgctg

SEQ ID NO: 2406 - DNA, 39 bp, Artificial Sequence
  Synthetic
cgatgccgaatacgaccgccctcgggatggtttcgttcc

SEQ ID NO: 2407 - DNA, 39 bp, Artificial Sequence
  Synthetic
ccgcactggacgcattctgcggtcggcgaaaccaaatgg

SEQ ID NO: 2408 - DNA, 35 bp, Artificial Sequence
  Synthetic
ccatcccgggcatccgctacgttgcggctgactgc

SEQ ID NO: 2409 - DNA, 41 bp, Artificial Sequence
  Synthetic
gcgttttccatcggcatcgaaccgaacggtattgcgcttcg

SEQ ID NO: 2410 - DNA, 42 bp, Artificial Sequence
  Synthetic
ggaaaagctgtttgccaaccggtgcaaagtgtgtatcaggct

SEQ ID NO: 2411 - DNA, 38 bp, Artificial Sequence
  Synthetic
ccgatacgcgccatcgatacttggtttgcgccccgatt

SEQ ID NO: 2412 - DNA, 41 bp, Artificial Sequence
  Synthetic
acggaacagcagcaaaggctcatgtattgaatgccgcgagc

SEQ ID NO: 2413 - DNA, 39 bp, Artificial Sequence
  Synthetic
cgcgcagttgttccagcgatcgctatgccgaaatgagcg

SEQ ID NO: 2414 - DNA, 41 bp, Artificial Sequence
  Synthetic
caccctgtacgaaacgctcgctgaattccgctttatcggcg

SEQ ID NO: 2415 - DNA, 40 bp, Artificial Sequence
  Synthetic
gccataatgcgcgctttgtaggccaacctcaaaccgccag

SEQ ID NO: 2416 - DNA, 37 bp, Artificial Sequence
  Synthetic
tcggcggtggtgatgtgttcaacccgttttggcgcaa

SEQ ID NO: 2417 - DNA, 37 bp, Artificial Sequence
  Synthetic
ggtaacggcggcgaccaatgtttctgcctgcccgtcc

SEQ ID NO: 2418 - DNA, 36 bp, Artificial Sequence
  Synthetic
tccatcgcgtccgccagtatgggcgggcgagttgaa

SEQ ID NO: 2419 - DNA, 36 bp, Artificial Sequence
  Synthetic
acatccacaccgccgagcgttcaaaccgaccaccgc

SEQ ID NO: 2420 - DNA, 38 bp, Artificial Sequence
  Synthetic
gcggaagcggtcgacgtatctggcggggtcttttttgc

SEQ ID NO: 2421 - DNA, 41 bp, Artificial Sequence
  Synthetic
ggcaggaaatcctatgccgtcgcaaatcgtaggcaagcgca

SEQ ID NO: 2422 - DNA, 34 bp, Artificial Sequence
  Synthetic
ggaaaccgccgccgacaacggcggcagaaggctt

SEQ ID NO: 2423 - DNA, 38 bp, Artificial Sequence
  Synthetic
tgccggtggacattggtgcagcgtccgggattttcaac

SEQ ID NO: 2424 - DNA, 39 bp, Artificial Sequence
  Synthetic
cctgcatcagatagctgcggaaccgcgccgattacttcg

SEQ ID NO: 2425 - DNA, 41 bp, Artificial Sequence
  Synthetic
cggcgcgaatttaaacggaaattggacgacctgataacaag

SEQ ID NO: 2426 - DNA, 43 bp, Artificial Sequence
  Synthetic
atccccaatatgccgtcagcattggccgtaataaaaagtatgg

SEQ ID NO: 2427 - DNA, 34 bp, Artificial Sequence
  Synthetic
tgggacagctcggggcaaggcaactggacgggga

SEQ ID NO: 2428 - DNA, 38 bp, Artificial Sequence
  Synthetic
ctcgcgcatatggacgcggtacatcgaatgctcgctcg

SEQ ID NO: 2429 - DNA, 38 bp, Artificial Sequence
  Synthetic
gcgtctgcctcgatacccaaacggcggctttgccccaa

SEQ ID NO: 2430 - DNA, 35 bp, Artificial Sequence
  Synthetic
tccacgcgcctgccagttgcgcaaaccgccgttgc

SEQ ID NO: 2431 - DNA, 36 bp, Artificial Sequence
  Synthetic
tgaggctgttgcggacggatattcggcttgccgctg

SEQ ID NO: 2432 - DNA, 36 bp, Artificial Sequence
  Synthetic
ttcaagacgacggcggactgtcggcagatacgccgt

SEQ ID NO: 2433 - DNA, 38 bp, Artificial Sequence
  Synthetic
tccatcgcgcgcggctatccttcctgaatcaggtcggc

SEQ ID NO: 2434 - DNA, 38 bp, Artificial Sequence
  Synthetic
gcctgcttccggccattctgatcggtttgttgggcggt

SEQ ID NO: 2435 - DNA, 35 bp, Artificial Sequence
  Synthetic
acgacgtttccggcctgccaaggtaggcgggcagc

SEQ ID NO: 2436 - DNA, 36 bp, Artificial Sequence
  Synthetic
ggtgtacggaatcgtcgccgggcgcatcagcagcat

SEQ ID NO: 2437 - DNA, 40 bp, Artificial Sequence
  Synthetic
ttcggttcgggcttgttgggaacgacgattcctgtgatgg

SEQ ID NO: 2438 - DNA, 37 bp, Artificial Sequence
  Synthetic
tggcgcacggcatcgatatgtccagccgttgcgtgca

SEQ ID NO: 2439 - DNA, 39 bp, Artificial Sequence
  Synthetic
tttccgtggcgatgtcgtaagcaaaaatggttatcggcc

SEQ ID NO: 2440 - DNA, 41 bp, Artificial Sequence
  Synthetic
ttgacggccttccattttggaaaagaagatttggctgaagt

SEQ ID NO: 2441 - DNA, 45 bp, Artificial Sequence
  Synthetic
ccctttggatattgcgctcaatttaaaaagcggtaataaagggaa

SEQ ID NO: 2442 - DNA, 39 bp, Artificial Sequence
  Synthetic
cacagcattcccggggtgtcccgaacaacgccttttcct

SEQ ID NO: 2443 - DNA, 42 bp, Artificial Sequence
  Synthetic
cctcaggcaaatacgcggacaaacgcagttgttcggaaaacg

SEQ ID NO: 2444 - DNA, 41 bp, Artificial Sequence
  Synthetic
tgccgtctgaagcaccgtttgaggttgatgctgtcgaactg

SEQ ID NO: 2445 - DNA, 37 bp, Artificial Sequence
  Synthetic
cgcgccacccatgcattggcatggcggcgacaaatgc

SEQ ID NO: 2446 - DNA, 45 bp, Artificial Sequence
  Synthetic
gttgatttgaaaaaaatgccgtctgaaacagtttctcgaacggta

SEQ ID NO: 2447 - DNA, 38 bp, Artificial Sequence
  Synthetic
acacccgaccaccaaaagctggcgattgcggcatgggc

SEQ ID NO: 2448 - DNA, 43 bp, Artificial Sequence
  Synthetic
gtctgaatgtttcgacaatccgattgctatctctctacgccac

SEQ ID NO: 2449 - DNA, 39 bp, Artificial Sequence
  Synthetic
cacaaccgccgacatcaagctttctttttcggcgagcgt

SEQ ID NO: 2450 - DNA, 42 bp, Artificial Sequence
  Synthetic
gtcaattcgcaccggactgcgtttcaaacccttgcccaaacc

SEQ ID NO: 2451 - DNA, 35 bp, Artificial Sequence
  Synthetic
tcctcaggctccgccacacccgctccttcgcatgg

SEQ ID NO: 2452 - DNA, 48 bp, Artificial Sequence
  Synthetic
cattggcaaaaatagcagcacaatattaaatcccaaaacagaaatgac

SEQ ID NO: 2453 - DNA, 35 bp, Artificial Sequence
  Synthetic
cgcaccttcgggcagactgggcaacgacagcgagg

SEQ ID NO: 2454 - DNA, 35 bp, Artificial Sequence
  Synthetic
ttgccggttcggaagccgcggtacgcgcatgacgg

SEQ ID NO: 2455 - DNA, 39 bp, Artificial Sequence
  Synthetic
cgcatgaagattggcttccgccttctgctggcggaatcg

SEQ ID NO: 2456 - DNA, 40 bp, Artificial Sequence
  Synthetic
cgcttcaaggtagccttttgccgatgtatctcggccggct

SEQ ID NO: 2457 - DNA, 35 bp, Artificial Sequence
  Synthetic
ggcgtgttggttgatgccgggctacggacacggca

SEQ ID NO: 2458 - DNA, 50 bp, Artificial Sequence
  Synthetic
gcgaaagtttccgtaaaaatatcggtcggattaatttgttcaatatcacc

SEQ ID NO: 2459 - DNA, 40 bp, Artificial Sequence
  Synthetic
ccgccgcccaagattggaatcttcaggaaagctttgccgc

SEQ ID NO: 2460 - DNA, 42 bp, Artificial Sequence
  Synthetic
acttcaaactgcgcggacaaccccaatccgtgcaaaaacagg

SEQ ID NO: 2461 - DNA, 38 bp, Artificial Sequence
  Synthetic
cgccgtacctatgcgtgtgaaagcattgtccgccacgc

SEQ ID NO: 2462 - DNA, 37 bp, Artificial Sequence
  Synthetic
acggtttcgtcgacggcacgtcggggatgatggcgac

SEQ ID NO: 2463 - DNA, 41 bp, Artificial Sequence
  Synthetic
gctctacttcgcagccgtcaacattgtggctgccggtaatc

SEQ ID NO: 2464 - DNA, 38 bp, Artificial Sequence
  Synthetic
tggtattcgtcatcggcatcgcgttaggcggcgtggca

SEQ ID NO: 2465 - DNA, 38 bp, Artificial Sequence
  Synthetic
gcatttccaatcccgacaccgtgccacgccgaagacga

SEQ ID NO: 2466 - DNA, 40 bp, Artificial Sequence
  Synthetic
catcgtcaggcgagcaaccggcttcccgattaccctgaaa

SEQ ID NO: 2467 - DNA, 38 bp, Artificial Sequence
  Synthetic
atcggacgaattggcacggattatgtcggtggcacggc

SEQ ID NO: 2468 - DNA, 37 bp, Artificial Sequence
  Synthetic
tgctcgacaacggcgttcccgttcggcgcaataaagc

SEQ ID NO: 2469 - DNA, 37 bp, Artificial Sequence
  Synthetic
cgtcgccgccataaaacgctcgaggtgtatgggcagg

SEQ ID NO: 2470 - DNA, 39 bp, Artificial Sequence
  Synthetic
atccgcagcccgacggttcctttcagacggcattggtcg

SEQ ID NO: 2471 - DNA, 38 bp, Artificial Sequence
  Synthetic
attgcgcgacatcgtccgaccgcccagccataaaacag

SEQ ID NO: 2472 - DNA, 40 bp, Artificial Sequence
  Synthetic
cgcccgataaagctgcgtaagtttgggcggatatttcggc

SEQ ID NO: 2473 - DNA, 41 bp, Artificial Sequence
  Synthetic
gcccgaaccgatgaagcaatccattttgcgcctgattccga

SEQ ID NO: 2474 - DNA, 37 bp, Artificial Sequence
  Synthetic
gccgattttgcctttgccgcgccttaccacatcgcgc

SEQ ID NO: 2475 - DNA, 40 bp, Artificial Sequence
  Synthetic
acgaagtggaagccgtgttggcgtcagcgtaaccatgtcg

SEQ ID NO: 2476 - DNA, 36 bp, Artificial Sequence
  Synthetic
agtcgaacccgccgccaagttgccggcaacaacgac

SEQ ID NO: 2477 - DNA, 42 bp, Artificial Sequence
  Synthetic
tcttcgcggaagatttcgccttcgcatccccttcctttatgc

SEQ ID NO: 2478 - DNA, 37 bp, Artificial Sequence
  Synthetic
agtccgctacacgcaaggccgctcgttgatgtagcgg

SEQ ID NO: 2479 - DNA, 38 bp, Artificial Sequence
  Synthetic
ggcttccaacgcgtcatccaggccaagcctttgcctgc

SEQ ID NO: 2480 - DNA, 40 bp, Artificial Sequence
  Synthetic
tgtcttcggcaaccacaccgacaattacccgcaaacacgt

SEQ ID NO: 2481 - DNA, 38 bp, Artificial Sequence
  Synthetic
gcgcattttgcccgaacgcaccacaacaaccgcatcct

SEQ ID NO: 2482 - DNA, 40 bp, Artificial Sequence
  Synthetic
aacggtctttgaggcggctgtatcgcgacgacttccatca

SEQ ID NO: 2483 - DNA, 34 bp, Artificial Sequence
  Synthetic
aagctcggcggcgcaaagcgttggaacaggcgca

SEQ ID NO: 2484 - DNA, 40 bp, Artificial Sequence
  Synthetic
cgaagccccggaatttgcctggcaaatgtggcgacatagc

SEQ ID NO: 2485 - DNA, 39 bp, Artificial Sequence
  Synthetic
gccaaaccgccgtggacatcaactcaaacaggttgcggg

SEQ ID NO: 2486 - DNA, 40 bp, Artificial Sequence
  Synthetic
cggaattccgcgcatttgcagaggtcaaactcgaaggcgg

SEQ ID NO: 2487 - DNA, 38 bp, Artificial Sequence
  Synthetic
ctgccctttctgcaaagccgttcagtgggcgaacgggt

SEQ ID NO: 2488 - DNA, 38 bp, Artificial Sequence
  Synthetic
gaacaggtattccggcgcggaccgcagggattacgcca

SEQ ID NO: 2489 - DNA, 39 bp, Artificial Sequence
  Synthetic
atcggcaggctgaaacactcggcaggattttatgtgctg

SEQ ID NO: 2490 - DNA, 37 bp, Artificial Sequence
  Synthetic
gcgcgctggatgccaaagttgtgatgaatgtcgcgca

SEQ ID NO: 2491 - DNA, 35 bp, Artificial Sequence
  Synthetic
gcgtgctgctgccggaaacgcgaacatcatgcccg

SEQ ID NO: 2492 - DNA, 41 bp, Artificial Sequence
  Synthetic
gctgaccactgaaaacacgcccgatgtagtaggcgtgttcc

SEQ ID NO: 2493 - DNA, 41 bp, Artificial Sequence
  Synthetic
accgtcatatgccttattgtcgtgggtaagaaggaacaggg

SEQ ID NO: 2494 - DNA, 40 bp, Artificial Sequence
  Synthetic
gcccggtcaaaagcgcaaaaagttccgatacctttgcgcc

SEQ ID NO: 2495 - DNA, 40 bp, Artificial Sequence
  Synthetic
agctacaccccgaaacatccgcaatcggggtctgacaggt

SEQ ID NO: 2496 - DNA, 38 bp, Artificial Sequence
  Synthetic
gcacggcgatgcggaagtgataagcggtttcgggatgg

SEQ ID NO: 2497 - DNA, 40 bp, Artificial Sequence
  Synthetic
gcggcggcggtttttgtagatgatggtacagaccgtgcgc

SEQ ID NO: 2498 - DNA, 35 bp, Artificial Sequence
  Synthetic
ccagcggtttgcaatcgcccggttgccaagcgtcc

SEQ ID NO: 2499 - DNA, 38 bp, Artificial Sequence
  Synthetic
taccgcgtctttgccgactgggacggtcgcagaaaagc

SEQ ID NO: 2500 - DNA, 38 bp, Artificial Sequence
  Synthetic
ccgatacggggtaaggcaggatgcctgtggacgcaacc

SEQ ID NO: 2501 - DNA, 35 bp, Artificial Sequence
  Synthetic
gtttgcgccgccgtctttgggcgcggttgccgtat

SEQ ID NO: 2502 - DNA, 37 bp, Artificial Sequence
  Synthetic
gttcctcgtaggctgcctgcgccgcaacaagaggccg

SEQ ID NO: 2503 - DNA, 37 bp, Artificial Sequence
  Synthetic
ggtcgtacagggcgttgccggtccttgaccgcgaacc

SEQ ID NO: 2504 - DNA, 46 bp, Artificial Sequence
  Synthetic
agtgccatttcattctaacttccttaaaacgctaatcataagaggg

SEQ ID NO: 2505 - DNA, 39 bp, Artificial Sequence
  Synthetic
gcttcatctgctttgtgcgggtcaggcatcgggagggat

SEQ ID NO: 2506 - DNA, 37 bp, Artificial Sequence
  Synthetic
cgaccacatcggacaatcccgcgcggcaggggttgtt

SEQ ID NO: 2507 - DNA, 41 bp, Artificial Sequence
  Synthetic
gtttccgttcgggcaatggttcccgcctgaaagaatcccat

SEQ ID NO: 2508 - DNA, 38 bp, Artificial Sequence
  Synthetic
gcccgtcgtcttccacgttgcgagatgcacggctcaaa

SEQ ID NO: 2509 - DNA, 41 bp, Artificial Sequence
  Synthetic
ggcggttacttttttgcctgccgttccgcccgaaaatctgc

SEQ ID NO: 2510 - DNA, 37 bp, Artificial Sequence
  Synthetic
gcagcttcggcttcggctgcaggacaatccgaacctg

SEQ ID NO: 2511 - DNA, 40 bp, Artificial Sequence
  Synthetic
cgcccgatataggcttccgcgacgatttcttcctcagcgt

SEQ ID NO: 2512 - DNA, 39 bp, Artificial Sequence
  Synthetic
cgttgacactgcccgcgaatcgatacgaacgtccgttac

SEQ ID NO: 2513 - DNA, 39 bp, Artificial Sequence
  Synthetic
ccctgcgtttcaagcccgatcggcaacatgaacgaagtg

SEQ ID NO: 2514 - DNA, 37 bp, Artificial Sequence
  Synthetic
tccaatacgccgcccagggcgcccgattacaggcttg

SEQ ID NO: 2515 - DNA, 41 bp, Artificial Sequence
  Synthetic
ccgcctgataaatgttgcgcgtgacgtgaaatccgacatcg

SEQ ID NO: 2516 - DNA, 36 bp, Artificial Sequence
  Synthetic
tcaaacccgcgttgcgcccctgacggctggttttcg

SEQ ID NO: 2517 - DNA, 36 bp, Artificial Sequence
  Synthetic
atcgcggctgtcctgctctgggcgtggaaatttcgg

SEQ ID NO: 2518 - DNA, 35 bp, Artificial Sequence
  Synthetic
cgggcgtgtgtctgaaccgcgtcgaggcagtccga

SEQ ID NO: 2519 - DNA, 41 bp, Artificial Sequence
  Synthetic
cgaacgggaacacatccgccttttatcgtgaatgccgaccg

SEQ ID NO: 2520 - DNA, 37 bp, Artificial Sequence
  Synthetic
cggcaagaagcggcggtatgttgccttgtgttgccgt

SEQ ID NO: 2521 - DNA, 41 bp, Artificial Sequence
  Synthetic
cggacaggagggcgtttgatgtggggtcgaaggcaagatgg

SEQ ID NO: 2522 - DNA, 36 bp, Artificial Sequence
  Synthetic
gcgggggcttcgagtttcgggactggtatcgcgcca

SEQ ID NO: 2523 - DNA, 35 bp, Artificial Sequence
  Synthetic
acaccgccgcaccgtatccccggcgcgtggcaata

SEQ ID NO: 2524 - DNA, 35 bp, Artificial Sequence
  Synthetic
ttcccaccgcttccccgacgatgtgattcgggcgg

SEQ ID NO: 2525 - DNA, 36 bp, Artificial Sequence
  Synthetic
tccgggcggttttggcgtgttcacgaagccgatgcc

SEQ ID NO: 2526 - DNA, 38 bp, Artificial Sequence
  Synthetic
gccttgagcttgtcgattgccgacgcatcgcacttgcc

SEQ ID NO: 2527 - DNA, 39 bp, Artificial Sequence
  Synthetic
cgcccatcaaccccatcactgcccgattcttgccgttgc

SEQ ID NO: 2528 - DNA, 40 bp, Artificial Sequence
  Synthetic
gcgaagtgggcgaactgatcgtgcggcaggcatattgagg

SEQ ID NO: 2529 - DNA, 34 bp, Artificial Sequence
  Synthetic
ttttggcgggcgcggtgtcggcgggaaaatgcgc

SEQ ID NO: 2530 - DNA, 38 bp, Artificial Sequence
  Synthetic
ggctggcaggcgagttttctcaagcactgccatcaccg

SEQ ID NO: 2531 - DNA, 41 bp, Artificial Sequence
  Synthetic
cgacaggggttctttttgctctagatcgtcaaagtttagca

SEQ ID NO: 2532 - DNA, 38 bp, Artificial Sequence
  Synthetic
ttttcgcaaatcttccgccccggcgagattctgaactt

SEQ ID NO: 2533 - DNA, 36 bp, Artificial Sequence
  Synthetic
caggaaatcatcgcgcgcgacaataccgccaagccg

SEQ ID NO: 2534 - DNA, 35 bp, Artificial Sequence
  Synthetic
gcacatcgcccccgaaacccgccacgcgttttcgg

SEQ ID NO: 2535 - DNA, 35 bp, Artificial Sequence
  Synthetic
actgccgacgtgcttgccctgccttgtccgagccg

SEQ ID NO: 2536 - DNA, 35 bp, Artificial Sequence
  Synthetic
cgccgacgcccgatttcacgcagcatcgcggtgga

SEQ ID NO: 2537 - DNA, 42 bp, Artificial Sequence
  Synthetic
cggaagacaaatccatgccgccatctgtggcgcatcaaaacc

SEQ ID NO: 2538 - DNA, 36 bp, Artificial Sequence
  Synthetic
atcagcgcgggcttgtgccgcacaaggtgcggcagt

SEQ ID NO: 2539 - DNA, 40 bp, Artificial Sequence
  Synthetic
cttgcattggaagccttgggcgcgttgacgtgatccatcg

SEQ ID NO: 2540 - DNA, 41 bp, Artificial Sequence
  Synthetic
gctggccggaaaccatatctcgaaaacgctgcaaaatgaac

SEQ ID NO: 2541 - DNA, 39 bp, Artificial Sequence
  Synthetic
tccacccgcacccgaccttatacacccaaagccacttcc

SEQ ID NO: 2542 - DNA, 35 bp, Artificial Sequence
  Synthetic
ccgtacgacgctgaacggctcggcctggatgtggc

SEQ ID NO: 2543 - DNA, 40 bp, Artificial Sequence
  Synthetic
ggcatcagcagctccacgctaaagtcgaaaacgtcgtgcg

SEQ ID NO: 2544 - DNA, 38 bp, Artificial Sequence
  Synthetic
ctccgatcggcaactggcaagaagaggtcagcgcgatg

SEQ ID NO: 2545 - DNA, 39 bp, Artificial Sequence
  Synthetic
aaggcgcatctgctcgatgtggccgcgatttgttcatcg

SEQ ID NO: 2546 - DNA, 37 bp, Artificial Sequence
  Synthetic
cgccgcgttcgtactgcatggacaccatcgagcagcg

SEQ ID NO: 2547 - DNA, 35 bp, Artificial Sequence
  Synthetic
atcaggctgcggtgggagcagtgtccctcgtcgcc

SEQ ID NO: 2548 - DNA, 37 bp, Artificial Sequence
  Synthetic
aaggcggtgcggacgttgttgaccgaatgctgcatca

SEQ ID NO: 2549 - DNA, 38 bp, Artificial Sequence
  Synthetic
cggtgaaacacggcatttggttgacggcatcgacgtgg

SEQ ID NO: 2550 - DNA, 34 bp, Artificial Sequence
  Synthetic
ggcgggcggcaaagtgttcgcggtacaccacgct

SEQ ID NO: 2551 - DNA, 38 bp, Artificial Sequence
  Synthetic
gcagcagcaatgtcggcattacagaaagccggtgtgga

SEQ ID NO: 2552 - DNA, 37 bp, Artificial Sequence
  Synthetic
cccgcccataaagccatcggcgccggagagtgcaatc

SEQ ID NO: 2553 - DNA, 40 bp, Artificial Sequence
  Synthetic
gctcgacagccttgccgacatttgtaggcaataagcgcgg

SEQ ID NO: 2554 - DNA, 35 bp, Artificial Sequence
  Synthetic
tgtttgccgcgctgatccgccggcggcagcagttt

SEQ ID NO: 2555 - DNA, 40 bp, Artificial Sequence
  Synthetic
cgacaggcagggagtcggcatacctgacggtcttcagccc

SEQ ID NO: 2556 - DNA, 39 bp, Artificial Sequence
  Synthetic
cggtgtcaacgataaggcacgggaacatctttgaccagt

SEQ ID NO: 2557 - DNA, 43 bp, Artificial Sequence
  Synthetic
accgtaaacgcaggtctgaaatttgagcgtttttgaattcagc

SEQ ID NO: 2558 - DNA, 38 bp, Artificial Sequence
  Synthetic
gcagcgcaacctcaaaccgaaacctgcgcgagtgttgc

SEQ ID NO: 2559 - DNA, 39 bp, Artificial Sequence
  Synthetic
cgacatctcgacggcaaccggttcaggttgttgaggcgt

SEQ ID NO: 2560 - DNA, 36 bp, Artificial Sequence
  Synthetic
cgcccttgcccaacgctatagcggtattgacggcgg

SEQ ID NO: 2561 - DNA, 38 bp, Artificial Sequence
  Synthetic
tggaaatccgcggcgcaggcgacctgcatcatttcgcc

SEQ ID NO: 2562 - DNA, 38 bp, Artificial Sequence
  Synthetic
cgaccacgcttctggtcgaggggaaatcggcgaaacgg

SEQ ID NO: 2563 - DNA, 33 bp, Artificial Sequence
  Synthetic
tcgccctgcacaagctcgttcggcggctttgcg

SEQ ID NO: 2564 - DNA, 37 bp, Artificial Sequence
  Synthetic
tgttgttcgtaccggttgccaccccgccaaaaacggc

SEQ ID NO: 2565 - DNA, 39 bp, Artificial Sequence
  Synthetic
tcctcgccgcctacatccattccgaagatgaagttgccg

SEQ ID NO: 2566 - DNA, 39 bp, Artificial Sequence
  Synthetic
tacagcacccgccacctgcttgttttcggtaatgctgcg

SEQ ID NO: 2567 - DNA, 38 bp, Artificial Sequence
  Synthetic
cgatctcatccgtatcgccccgcgttggagggcgacga

SEQ ID NO: 2568 - DNA, 39 bp, Artificial Sequence
  Synthetic
ggtatcgccgtcggtatggccgttgatggtgtcggtgag

SEQ ID NO: 2569 - DNA, 38 bp, Artificial Sequence
  Synthetic
gcaacgacgaactggcgcactcttcggtggtcatgcgg

SEQ ID NO: 2570 - DNA, 39 bp, Artificial Sequence
  Synthetic
ccaagttcgcccaatacctgctcgccgagtttcagcgtg

SEQ ID NO: 2571 - DNA, 42 bp, Artificial Sequence
  Synthetic
cgggcatcgttgcttttcattcatagtaacggatgtggaaag

SEQ ID NO: 2572 - DNA, 38 bp, Artificial Sequence
  Synthetic
tgcccctgcccgatgacataatgcaaactgcccacgcc

SEQ ID NO: 2573 - DNA, 42 bp, Artificial Sequence
  Synthetic
cgcagtcaggggcagaaacttcgaacaagcctgttttcctgc

SEQ ID NO: 2574 - DNA, 37 bp, Artificial Sequence
  Synthetic
atggtaggcagcacgcgcgacaaattcacacgggcgg

SEQ ID NO: 2575 - DNA, 40 bp, Artificial Sequence
  Synthetic
cggcgcattggcaaaaggtcgctttatcaggcgatggagg

SEQ ID NO: 2576 - DNA, 42 bp, Artificial Sequence
  Synthetic
cggcgtttcaaggtggttacgagtatcggcatcgttaccagt

SEQ ID NO: 2577 - DNA, 39 bp, Artificial Sequence
  Synthetic
cgcacgaccggttcttcgttaagattgtctgtcgcggcg

SEQ ID NO: 2578 - DNA, 37 bp, Artificial Sequence
  Synthetic
ggcgggaatggcggcaaatatcatcggcttctgcgtg

SEQ ID NO: 2579 - DNA, 39 bp, Artificial Sequence
  Synthetic
ccagaccgatatgccgtcgccgccatatccgacgcttac

SEQ ID NO: 2580 - DNA, 36 bp, Artificial Sequence
  Synthetic
ggtttgcgcccgcatgtgggcgtttaccggttcgac

SEQ ID NO: 2581 - DNA, 36 bp, Artificial Sequence
  Synthetic
aaccaccccgacccctgtgcgtttcaaacggcgcgg

SEQ ID NO: 2582 - DNA, 38 bp, Artificial Sequence
  Synthetic
gcagcgaacacgatacccgtatgagcagggcgcatcga

SEQ ID NO: 2583 - DNA, 38 bp, Artificial Sequence
  Synthetic
ggcaaagcaaccttagccgcgcacgatggaagcaggaa

SEQ ID NO: 2584 - DNA, 33 bp, Artificial Sequence
  Synthetic
atcaccgcgccgctgcaattggcggcctgcagt

SEQ ID NO: 2585 - DNA, 44 bp, Artificial Sequence
  Synthetic
accgcctttaaacaattgaaagaaatccgtatctggttaaacgg

SEQ ID NO: 2586 - DNA, 41 bp, Artificial Sequence
  Synthetic
tcgacattaccgaacaccgcaaagggtcagtccgatttcgt

SEQ ID NO: 2587 - DNA, 41 bp, Artificial Sequence
  Synthetic
ccagcttcgccgacatcttctttcttcggtcaacacgatgg

SEQ ID NO: 2588 - DNA, 41 bp, Artificial Sequence
  Synthetic
aatcccgccgaagaaaccgatatatattcgagtgcgcgctc

SEQ ID NO: 2589 - DNA, 36 bp, Artificial Sequence
  Synthetic
tccacccacggcgcattcgtcgccatcgtgtgttcg

SEQ ID NO: 2590 - DNA, 38 bp, Artificial Sequence
  Synthetic
agcgcgccaaatcgaccgtttggcaatccttttacgcg

SEQ ID NO: 2591 - DNA, 39 bp, Artificial Sequence
  Synthetic
cggatagacaagttcgcccgccggcaggcgttttctacc

SEQ ID NO: 2592 - DNA, 41 bp, Artificial Sequence
  Synthetic
gcgtgccattatgggtttccacgaccaaatccgcctgtacg

SEQ ID NO: 2593 - DNA, 38 bp, Artificial Sequence
  Synthetic
aaatgccggcgatgaaggtcaccgggtcggtatggaca

SEQ ID NO: 2594 - DNA, 35 bp, Artificial Sequence
  Synthetic
ttgtcttgcccacgcccggcggtggaaggcgggaa

SEQ ID NO: 2595 - DNA, 37 bp, Artificial Sequence
  Synthetic
ggatttgcgcgcccaagctcgcgccgtctgaaaatcc

SEQ ID NO: 2596 - DNA, 37 bp, Artificial Sequence
  Synthetic
tctttgacgaagcggcgcattgccgccgccaaatcca

SEQ ID NO: 2597 - DNA, 38 bp, Artificial Sequence
  Synthetic
ccaaagcccttgatcgcgtccggtgtggtgcaggagga

SEQ ID NO: 2598 - DNA, 34 bp, Artificial Sequence
  Synthetic
gattcccgccgccgtcatgcatacgcgccatcgt

SEQ ID NO: 2599 - DNA, 40 bp, Artificial Sequence
  Synthetic
tgcctgaaacggctaaatcctatcgattcaaaacactggc

SEQ ID NO: 2600 - DNA, 41 bp, Artificial Sequence
  Synthetic
cctgcactcatcaatcctgatttaacccaaactcaaagcca

SEQ ID NO: 2601 - DNA, 38 bp, Artificial Sequence
  Synthetic
gccatttgccgatgattggggcccccggcaggagcatt

SEQ ID NO: 2602 - DNA, 37 bp, Artificial Sequence
  Synthetic
tgttgtcgttgtgggcgggcggctttgtgcagattgc

SEQ ID NO: 2603 - DNA, 38 bp, Artificial Sequence
  Synthetic
ccgggtttcacatcgccgtatgagcgacgctttaccga

SEQ ID NO: 2604 - DNA, 41 bp, Artificial Sequence
  Synthetic
ggaacacggcatcgacacactcagagggctttgagcatcgc

SEQ ID NO: 2605 - DNA, 35 bp, Artificial Sequence
  Synthetic
gcgcatcgatttgggcgcggaagccggcgaagagt

SEQ ID NO: 2606 - DNA, 36 bp, Artificial Sequence
  Synthetic
cgtatgtccggcgcgtcaggtcagggcttcgggcgt

SEQ ID NO: 2607 - DNA, 38 bp, Artificial Sequence
  Synthetic
cagcgcgaagtgttggcggcgacgcagataaaatcgcg

SEQ ID NO: 2608 - DNA, 40 bp, Artificial Sequence
  Synthetic
cgtgccacttgttgccgtcgcactcttggggtcctgaagc

SEQ ID NO: 2609 - DNA, 38 bp, Artificial Sequence
  Synthetic
gagccgtccacgttggagacgcgctcaaacctttcggt

SEQ ID NO: 2610 - DNA, 38 bp, Artificial Sequence
  Synthetic
atttcgtggtgtccgggcagcacccccatcgacctgat

SEQ ID NO: 2611 - DNA, 41 bp, Artificial Sequence
  Synthetic
cactcttcgccattcccgcgatttccgatagattcctgccg

SEQ ID NO: 2612 - DNA, 37 bp, Artificial Sequence
  Synthetic
caacgtcggcgcactggaccggtcggctttttcctgc

SEQ ID NO: 2613 - DNA, 39 bp, Artificial Sequence
  Synthetic
acggacgcgggcaagacactgaacaggatgttgcggatg

SEQ ID NO: 2614 - DNA, 36 bp, Artificial Sequence
  Synthetic
acgagtgcggctacggaatccgacacgctcgtccgt

SEQ ID NO: 2615 - DNA, 38 bp, Artificial Sequence
  Synthetic
cgcgggaatccggtaaccgaaacggcgggggtttctgt

SEQ ID NO: 2616 - DNA, 36 bp, Artificial Sequence
  Synthetic
acgcctacctgctgaccggcaaggatgcgggcgatg

SEQ ID NO: 2617 - DNA, 40 bp, Artificial Sequence
  Synthetic
gttccacacgctcaacaaagccttgctgacgctttcggtc

SEQ ID NO: 2618 - DNA, 39 bp, Artificial Sequence
  Synthetic
aagtcatgctccatgccgtcaaggtgtcagtgcgttgtg

SEQ ID NO: 2619 - DNA, 39 bp, Artificial Sequence
  Synthetic
tggctgcggtacacaatgccgcagcccgcatgtttttcc

SEQ ID NO: 2620 - DNA, 39 bp, Artificial Sequence
  Synthetic
gcatcgccaaccgcctgttgacgccgttgtttttcacgt

SEQ ID NO: 2621 - DNA, 42 bp, Artificial Sequence
  Synthetic
gcgcaccttatcgccgaacaaacgaaacgttttttgcagcgg

SEQ ID NO: 2622 - DNA, 37 bp, Artificial Sequence
  Synthetic
agctgatgcggcagatggtgcagacgcgttcggcaac

SEQ ID NO: 2623 - DNA, 37 bp, Artificial Sequence
  Synthetic
ccttcatcgcccgatacggcgcttcggcgacaacagc

SEQ ID NO: 2624 - DNA, 45 bp, Artificial Sequence
  Synthetic
cgaatgctgcaaatttgtttgatgagccgtattgtttcatcatct

SEQ ID NO: 2625 - DNA, 40 bp, Artificial Sequence
  Synthetic
ccaagccaaaccggtaacctgtcgcttcgattacggcgtt

SEQ ID NO: 2626 - DNA, 39 bp, Artificial Sequence
  Synthetic
gcgtgggtcattttggcgttgttggacatcgcgcattgg

SEQ ID NO: 2627 - DNA, 41 bp, Artificial Sequence
  Synthetic
atgaccaaggacaaaatggacttgtaggggaggttgttctg

SEQ ID NO: 2628 - DNA, 43 bp, Artificial Sequence
  Synthetic
cgccaagcgtaaaccattcattatcggataacatctccttcaa

SEQ ID NO: 2629 - DNA, 47 bp, Artificial Sequence
  Synthetic
gctttggttccttcacatgtcagaagtaatcattaaattcggatccg

SEQ ID NO: 2630 - DNA, 42 bp, Artificial Sequence
  Synthetic
acacggtgcttgatacctttcaacaaatgtgggtgacaatcg

SEQ ID NO: 2631 - DNA, 40 bp, Artificial Sequence
  Synthetic
ggactactgtggctaccgtaaattgggtatctaggccact

SEQ ID NO: 2632 - DNA, 47 bp, Artificial Sequence
  Synthetic
ctgaatttttcagttgcctcacctttgaaaccacttctgatttacct

SEQ ID NO: 2633 - DNA, 45 bp, Artificial Sequence
  Synthetic
ttgtctgtttgggtgtatgaatcatcctgattcatttttctctgg

SEQ ID NO: 2634 - DNA, 44 bp, Artificial Sequence
  Synthetic
gccaaagtaaatggtactaaagctgctccaaagtaatcggttcg

SEQ ID NO: 2635 - DNA, 40 bp, Artificial Sequence
  Synthetic
accgcccggacagcttttgatacacgccaaatcgcaaggt

SEQ ID NO: 2636 - DNA, 38 bp, Artificial Sequence
  Synthetic
cgtggaagaaggcggcaaggtacctccgcgctgatgca

SEQ ID NO: 2637 - DNA, 39 bp, Artificial Sequence
  Synthetic
ctttggcagtggcgatgttgccgtgcgttgggtcaaaga

SEQ ID NO: 2638 - DNA, 39 bp, Artificial Sequence
  Synthetic
ccgtcggcaatcagcggaacctgaccgccattcacaacg

SEQ ID NO: 2639 - DNA, 38 bp, Artificial Sequence
  Synthetic
cttggctcatcgcgcccaagtaccaaggccgctcgtac

SEQ ID NO: 2640 - DNA, 35 bp, Artificial Sequence
  Synthetic
cgttcgatgcgcccctgatcgtccgccaagatgcc

SEQ ID NO: 2641 - DNA, 36 bp, Artificial Sequence
  Synthetic
acgggtttgacgatgcccgggacgcgataccgacga

SEQ ID NO: 2642 - DNA, 38 bp, Artificial Sequence
  Synthetic
ccgatgaccttgcccgcttcgcctgaacatccccacca

SEQ ID NO: 2643 - DNA, 36 bp, Artificial Sequence
  Synthetic
cgcttcggtcaggcagttcagacctgcggctcgtgt

SEQ ID NO: 2644 - DNA, 38 bp, Artificial Sequence
  Synthetic
tcgtccacgcctgcggttgtcttattcggcaacatcgc

SEQ ID NO: 2645 - DNA, 37 bp, Artificial Sequence
  Synthetic
atcctcgccgtcctcgagccgggcggacttcatcgtg

SEQ ID NO: 2646 - DNA, 39 bp, Artificial Sequence
  Synthetic
atatgccggactcgcgccgggaaacgccgaaattttccg

SEQ ID NO: 2647 - DNA, 40 bp, Artificial Sequence
  Synthetic
acacggtgagggacgaagcctccgaaccgtctttctgtgc

SEQ ID NO: 2648 - DNA, 39 bp, Artificial Sequence
  Synthetic
ttgtgcggacgcgtggtcgatgtccaacaagaaatgcgc

SEQ ID NO: 2649 - DNA, 41 bp, Artificial Sequence
  Synthetic
ccggacagatattgccggtgtacatcggatgctcttccaga

SEQ ID NO: 2650 - DNA, 35 bp, Artificial Sequence
  Synthetic
agccgtggtcgaagccgatgtccaactcgagggcg

SEQ ID NO: 2651 - DNA, 41 bp, Artificial Sequence
  Synthetic
gcaattccaccatccccaccgggtctgaccgtctttgaagg

SEQ ID NO: 2652 - DNA, 36 bp, Artificial Sequence
  Synthetic
acctaccgccgccgcaatcgacaaacgtgccttccg

SEQ ID NO: 2653 - DNA, 38 bp, Artificial Sequence
  Synthetic
tatcggcatcaggcagcagctccaaatcaaacgcgccc

SEQ ID NO: 2654 - DNA, 37 bp, Artificial Sequence
  Synthetic
ggcggcatcgaaggcttcgcgtctgaacaccctcccg

SEQ ID NO: 2655 - DNA, 37 bp, Artificial Sequence
  Synthetic
gctgcgtgaggactcggtcgcatcgcttttgccgccg

SEQ ID NO: 2656 - DNA, 37 bp, Artificial Sequence
  Synthetic
caaaccgcaaaccgtccgcagcacggacagggatcgt

SEQ ID NO: 2657 - DNA, 38 bp, Artificial Sequence
  Synthetic
aggacggggtgctgaaacaccgaccaaccgaccgattc

SEQ ID NO: 2658 - DNA, 36 bp, Artificial Sequence
  Synthetic
tctgttcattgtcccgcgccggcgcaacggccttac

SEQ ID NO: 2659 - DNA, 41 bp, Artificial Sequence
  Synthetic
gcgtgcggattgaaatgcatctgctttggcactgaaaagcg

SEQ ID NO: 2660 - DNA, 39 bp, Artificial Sequence
  Synthetic
ggtatccgaacacctgccgactcgcctcgggattgaaca

SEQ ID NO: 2661 - DNA, 41 bp, Artificial Sequence
  Synthetic
tggttttgtctgcctatgccgtctatctgaagtccgagcgc

SEQ ID NO: 2662 - DNA, 40 bp, Artificial Sequence
  Synthetic
tgcgagaattggcggaggaaaaaaactgtacagcaggcgc

SEQ ID NO: 2663 - DNA, 39 bp, Artificial Sequence
  Synthetic
gcgcatcgtcatccggcatttttcgtcatccgttaccgc

SEQ ID NO: 2664 - DNA, 40 bp, Artificial Sequence
  Synthetic
gcctcgctgccttcgagattcctactggtacatcgacacg

SEQ ID NO: 2665 - DNA, 38 bp, Artificial Sequence
  Synthetic
acgacggacagcaaaacgcccccgaacacctgcaacaa

SEQ ID NO: 2666 - DNA, 40 bp, Artificial Sequence
  Synthetic
aaagccgcgagtggtcatggaaaaccgttcgttacctccg

SEQ ID NO: 2667 - DNA, 41 bp, Artificial Sequence
  Synthetic
gttcagacggcattttgtatggagcgacaaataccccgttt

SEQ ID NO: 2668 - DNA, 39 bp, Artificial Sequence
  Synthetic
tcttcgaggcgttcgcgggtcgtttatgctgatccctcg

SEQ ID NO: 2669 - DNA, 42 bp, Artificial Sequence
  Synthetic
cgggtaatctttccgaaaccgtttcaatatagccaaggggat

SEQ ID NO: 2670 - DNA, 39 bp, Artificial Sequence
  Synthetic
agcctgctttgcgtatccacggcgactgcgtgtccattg

SEQ ID NO: 2671 - DNA, 40 bp, Artificial Sequence
  Synthetic
aggtattcgagataggcgcgggtcgtcaacagcgtcgtcg

SEQ ID NO: 2672 - DNA, 36 bp, Artificial Sequence
  Synthetic
acgaatcgccgtcttgcgccacgcgctgaaggaggt

SEQ ID NO: 2673 - DNA, 35 bp, Artificial Sequence
  Synthetic
acccccaagccgcattggattgccgggaaacacgc

SEQ ID NO: 2674 - DNA, 38 bp, Artificial Sequence
  Synthetic
tttgccgtcttcgatgcccaactgcccaaaagcgtacc

SEQ ID NO: 2675 - DNA, 38 bp, Artificial Sequence
  Synthetic
ttgccgaagccagatcgcacgttctttggcggcttcgt

SEQ ID NO: 2676 - DNA, 39 bp, Artificial Sequence
  Synthetic
tcgaccaaatcgccgatggggcggcgattatcatctgca

SEQ ID NO: 2677 - DNA, 37 bp, Artificial Sequence
  Synthetic
tcctttcgggcgcgagactaaaatcggtgcggacgtg

SEQ ID NO: 2678 - DNA, 37 bp, Artificial Sequence
  Synthetic
tccgcatcagccacatcggatgagtccgaggctgtgg

SEQ ID NO: 2679 - DNA, 38 bp, Artificial Sequence
  Synthetic
ccgataccacacccgaatacgcgccattgcaggcggtt

SEQ ID NO: 2680 - DNA, 34 bp, Artificial Sequence
  Synthetic
tgggcaagccattccgccttgccgatgttgccgc

SEQ ID NO: 2681 - DNA, 34 bp, Artificial Sequence
  Synthetic
cctcaaccgccgcatgcacgagtatggtggcgcg

SEQ ID NO: 2682 - DNA, 40 bp, Artificial Sequence
  Synthetic
ccgctgattgcaccgctcattggtgttccaaagcagtacc

SEQ ID NO: 2683 - DNA, 41 bp, Artificial Sequence
  Synthetic
caccgtaagcgagcgtcaacttgtattcctgatttccggcc

SEQ ID NO: 2684 - DNA, 43 bp, Artificial Sequence
  Synthetic
ggtactgcttcctttgccggctttgttatcgacttcaatttgg

SEQ ID NO: 2685 - DNA, 38 bp, Artificial Sequence
  Synthetic
ccttcggcgtgcatttggacagcgccgcataacctctt

SEQ ID NO: 2686 - DNA, 41 bp, Artificial Sequence
  Synthetic
cgatgtttgggcaaagtggctgagcagtagggtcatcaggc

SEQ ID NO: 2687 - DNA, 35 bp, Artificial Sequence
  Synthetic
tcaggtgcgcgctcatcgggacagccagcgcatcg

SEQ ID NO: 2688 - DNA, 37 bp, Artificial Sequence
  Synthetic
acatcaatgccaagccgggctcgccctgatagccgtc

SEQ ID NO: 2689 - DNA, 37 bp, Artificial Sequence
  Synthetic
tcacccacgccgtgctgtcgatatgggcggcgagtcc

SEQ ID NO: 2690 - DNA, 34 bp, Artificial Sequence
  Synthetic
tccgcgccggctttttcgggggcgaacaacaccg

SEQ ID NO: 2691 - DNA, 36 bp, Artificial Sequence
  Synthetic
gcaaagagtttcggggcggctgctctgcggcggaca

SEQ ID NO: 2692 - DNA, 39 bp, Artificial Sequence
  Synthetic
cggatatttctgcctgcccgttgaacccgtataccaacc

SEQ ID NO: 2693 - DNA, 39 bp, Artificial Sequence
  Synthetic
ccgtctggttgcgttggcgcggtagctaagacgacgtcc

SEQ ID NO: 2694 - DNA, 37 bp, Artificial Sequence
  Synthetic
cgggaactgggtgtgggaaatcatttcgcgcgcaccc

SEQ ID NO: 2695 - DNA, 38 bp, Artificial Sequence
  Synthetic
aaagtgcgtcaaggcagagtctacctcttcgcgacgct

SEQ ID NO: 2696 - DNA, 39 bp, Artificial Sequence
  Synthetic
aaatcccgtcccgcacgcgacgagcaaatgaaactggcg

SEQ ID NO: 2697 - DNA, 40 bp, Artificial Sequence
  Synthetic
tgcgccccctcatgattgagcggaatcgtacaggaagacg

SEQ ID NO: 2698 - DNA, 34 bp, Artificial Sequence
  Synthetic
tgccgcgcacgatgcttgcgcgtggcaggaacac

SEQ ID NO: 2699 - DNA, 34 bp, Artificial Sequence
  Synthetic
acgtcggtcagggcaacgcaaaaggccgcgctcg

SEQ ID NO: 2700 - DNA, 40 bp, Artificial Sequence
  Synthetic
atggttttgcccggcgagtcgaaactggtcgaatgcaacg

SEQ ID NO: 2701 - DNA, 40 bp, Artificial Sequence
  Synthetic
gggcgaggaatagtcgatgacggatgcgcgtttcggcata

SEQ ID NO: 2702 - DNA, 41 bp, Artificial Sequence
  Synthetic
cgtagaagcggctgaacagggtcgtatccgcactacctcgc

SEQ ID NO: 2703 - DNA, 38 bp, Artificial Sequence
  Synthetic
ggtcagcagtgccaaaacccaaggctgctgctgtccct

SEQ ID NO: 2704 - DNA, 38 bp, Artificial Sequence
  Synthetic
aaacggcatattcgcccgcgtttcgcaccctcttccgt

SEQ ID NO: 2705 - DNA, 41 bp, Artificial Sequence
  Synthetic
cgtacccgaaaacgaatacatcgccaaggcttcgatgaaga

SEQ ID NO: 2706 - DNA, 35 bp, Artificial Sequence
  Synthetic
ggtttggcggcggaaaccgtcagacggcaggcagc

SEQ ID NO: 2707 - DNA, 43 bp, Artificial Sequence
  Synthetic
gcatcgtattgactgcctttcaaccgatttgcacaaattaacc

SEQ ID NO: 2708 - DNA, 41 bp, Artificial Sequence
  Synthetic
ccaattcgtgcgtgtcttcaatttcggatttaattgacccg

SEQ ID NO: 2709 - DNA, 38 bp, Artificial Sequence
  Synthetic
aaccgaagtcaaaccgccgggcgatgaagcgtgggatt

SEQ ID NO: 2710 - DNA, 45 bp, Artificial Sequence
  Synthetic
cacagggtcaaaatacagttcagtctaccattgatattgtgtgct

SEQ ID NO: 2711 - DNA, 41 bp, Artificial Sequence
  Synthetic
ggacagtttggcagacggtgtgaatttgggcaaagaccccg

SEQ ID NO: 2712 - DNA, 45 bp, Artificial Sequence
  Synthetic
gtgccaccgtcttttttgtgatctttgattgataatggtgaaacg

SEQ ID NO: 2713 - DNA, 41 bp, Artificial Sequence
  Synthetic
tcgggcttttggtcattttcagaaacaattactggcgtgtc

SEQ ID NO: 2714 - DNA, 39 bp, Artificial Sequence
  Synthetic
ccgtcttggttttccagtgcaaaagggatacgcaaccat

SEQ ID NO: 2715 - DNA, 38 bp, Artificial Sequence
  Synthetic
tcgaattgcagcgtgaatgcgccgccgtactgctggct

SEQ ID NO: 2716 - DNA, 35 bp, Artificial Sequence
  Synthetic
tcggtggtccgctcggaagacaccgacgctgacct

SEQ ID NO: 2717 - DNA, 39 bp, Artificial Sequence
  Synthetic
atccattccctctcccgtggaatatttccgttgccgtcc

SEQ ID NO: 2718 - DNA, 43 bp, Artificial Sequence
  Synthetic
ctcaaaaaataccagcccgagagtatctgccagttttccttgt

SEQ ID NO: 2719 - DNA, 39 bp, Artificial Sequence
  Synthetic
gcgcgttgagatagacggcgagccgaaatgcgtaccggc

SEQ ID NO: 2720 - DNA, 37 bp, Artificial Sequence
  Synthetic
gcggagaactgtttgaccgcgggctcgcccgaatcca

SEQ ID NO: 2721 - DNA, 42 bp, Artificial Sequence
  Synthetic
acgccgtctgaaaaaacctttttgttttgcagtaaatcgaga

SEQ ID NO: 2722 - DNA, 39 bp, Artificial Sequence
  Synthetic
gccatgcgcccaaacagatgttgtcctttgtaagcggcg

SEQ ID NO: 2723 - DNA, 42 bp, Artificial Sequence
  Synthetic
gcgcctgctgcttaagatatgcaagcagtcgaaaatcaggcg

SEQ ID NO: 2724 - DNA, 39 bp, Artificial Sequence
  Synthetic
tttccagtcgccgccgtctaaggtcgaaatcgccaaacg

SEQ ID NO: 2725 - DNA, 40 bp, Artificial Sequence
  Synthetic
aaacacccgcttcaaaacccactcggggaatcagaagcgg

SEQ ID NO: 2726 - DNA, 37 bp, Artificial Sequence
  Synthetic
tttgaccgcgccgacacgtgacgaaagaggcggaaca

SEQ ID NO: 2727 - DNA, 38 bp, Artificial Sequence
  Synthetic
aaacggcggtcgattttgtcgccgtgtcaagatggaaa

SEQ ID NO: 2728 - DNA, 34 bp, Artificial Sequence
  Synthetic
tgccgcccgtgcaaactgtgcagacggcggaaca

SEQ ID NO: 2729 - DNA, 40 bp, Artificial Sequence
  Synthetic
acgaaccgttgggctacatcaagtcgagaccgcctgtttc

SEQ ID NO: 2730 - DNA, 42 bp, Artificial Sequence
  Synthetic
tcttcgccgtaaattaccgccaaatcggcgagatttccatcg

SEQ ID NO: 2731 - DNA, 38 bp, Artificial Sequence
  Synthetic
ccgaacttgctgtccactccgcgtaccacgctgctgac

SEQ ID NO: 2732 - DNA, 39 bp, Artificial Sequence
  Synthetic
ggaatgtgccgctgccgaaccgtcctattatgtccgtcg

SEQ ID NO: 2733 - DNA, 39 bp, Artificial Sequence
  Synthetic
cctgttgggtttgcgcgatgacgtatcggacgggttgga

SEQ ID NO: 2734 - DNA, 38 bp, Artificial Sequence
  Synthetic
tcttgatgggcgtcttgcgtatgtgctcctggcgcaga

SEQ ID NO: 2735 - DNA, 38 bp, Artificial Sequence
  Synthetic
atcagaagcggtagcgcacgacgcttggaaaacacccg

SEQ ID NO: 2736 - DNA, 42 bp, Artificial Sequence
  Synthetic
ccgataagtttccgtgcggacaatctcgaaacccgtcattcc

SEQ ID NO: 2737 - DNA, 37 bp, Artificial Sequence
  Synthetic
ctcttgtcgtgcggacggtttgcccgcctgagcaaca

SEQ ID NO: 2738 - DNA, 39 bp, Artificial Sequence
  Synthetic
aaacgatacggcaagcgcgacgaagaaaaccacctgcgt

SEQ ID NO: 2739 - DNA, 36 bp, Artificial Sequence
  Synthetic
cctgtcaagcccgtgtgcagggaagctgcccgaagc

SEQ ID NO: 2740 - DNA, 38 bp, Artificial Sequence
  Synthetic
ggcggatgatacggaggctttggccgccgtttcccgtt

SEQ ID NO: 2741 - DNA, 39 bp, Artificial Sequence
  Synthetic
gcgggggtgcgaaggaaataaggaaccaccgtatccaca

SEQ ID NO: 2742 - DNA, 36 bp, Artificial Sequence
  Synthetic
gcgcgtttccccgttgacggcgcgataatcggcagg

SEQ ID NO: 2743 - DNA, 36 bp, Artificial Sequence
  Synthetic
tcggggataaggcgggcgagacgtccagcggcgtca

SEQ ID NO: 2744 - DNA, 39 bp, Artificial Sequence
  Synthetic
gcgacgcggctttcgaacaggccgcatagtcaaaatgcc

SEQ ID NO: 2745 - DNA, 36 bp, Artificial Sequence
  Synthetic
ggcttatccggtgatggcggccgcagcaattcccgc

SEQ ID NO: 2746 - DNA, 41 bp, Artificial Sequence
  Synthetic
cccgtgatgaagtcccgggattccctcataaaaccgctgcc

SEQ ID NO: 2747 - DNA, 38 bp, Artificial Sequence
  Synthetic
acgagctgggcggtgtgtaaccaccaccagataatcgc

SEQ ID NO: 2748 - DNA, 39 bp, Artificial Sequence
  Synthetic
gcggttacggaggcggacaatcgcatcctcctccttcaa

SEQ ID NO: 2749 - DNA, 40 bp, Artificial Sequence
  Synthetic
ctgttgtcgcagcgtgtggaggccaccagcgtgattttgc

SEQ ID NO: 2750 - DNA, 34 bp, Artificial Sequence
  Synthetic
ttgcggaatcggcgggcagaatccgccgccgcat

SEQ ID NO: 2751 - DNA, 39 bp, Artificial Sequence
  Synthetic
gggctgtacgcgcttaccgtaagcctgtccaacacatcc

SEQ ID NO: 2752 - DNA, 38 bp, Artificial Sequence
  Synthetic
acgagaagggggcggctttcaaaccccaccgcagaatg

SEQ ID NO: 2753 - DNA, 37 bp, Artificial Sequence
  Synthetic
accaactcctaccgcagccagcggcagggatttgacc

SEQ ID NO: 2754 - DNA, 38 bp, Artificial Sequence
  Synthetic
gcggaagtatggtacaggcggtcaccgtgcgccctgtt

SEQ ID NO: 2755 - DNA, 39 bp, Artificial Sequence
  Synthetic
gggcaatgcacgccgaacacaacacggttgtttcagggt

SEQ ID NO: 2756 - DNA, 39 bp, Artificial Sequence
  Synthetic
gccgcctgcccgatattggggtatcacgcgcattcccct

SEQ ID NO: 2757 - DNA, 38 bp, Artificial Sequence
  Synthetic
atcgggcgttcgggcatcacggcgtagttttcaatccg

SEQ ID NO: 2758 - DNA, 39 bp, Artificial Sequence
  Synthetic
cggcctgtaaattccgcgtacgtcaacggcgcggattcg

SEQ ID NO: 2759 - DNA, 35 bp, Artificial Sequence
  Synthetic
ttacggcccggaccaacgccgccggccgatgatga

SEQ ID NO: 2760 - DNA, 39 bp, Artificial Sequence
  Synthetic
gcggtccgcagtcgcattttccactccgaatgtctgacg

SEQ ID NO: 2761 - DNA, 36 bp, Artificial Sequence
  Synthetic
cgaagtatcgcccgccgaaacgtgccggggttctca

SEQ ID NO: 2762 - DNA, 46 bp, Artificial Sequence
  Synthetic
aggttatccaaaaggtttacagcctatactggaatttctgcgtttg

SEQ ID NO: 2763 - DNA, 37 bp, Artificial Sequence
  Synthetic
aacagcctgctgtcgcccgtttggtggcggaggaaac

SEQ ID NO: 2764 - DNA, 39 bp, Artificial Sequence
  Synthetic
atacgcggcggcaaagaacatggtcaggaacaatgcctg

SEQ ID NO: 2765 - DNA, 41 bp, Artificial Sequence
  Synthetic
cggctgttgaccaaaatctgcgataaggcgtggcagaagga

SEQ ID NO: 2766 - DNA, 38 bp, Artificial Sequence
  Synthetic
cgcgcagggtgttgccttagagatggttaacgaaggcg

SEQ ID NO: 2767 - DNA, 38 bp, Artificial Sequence
  Synthetic
tggtggacaattccgcgccgccacatcgacatccaaga

SEQ ID NO: 2768 - DNA, 40 bp, Artificial Sequence
  Synthetic
acgtaaaacctgcaatgcgccagctcgttaccgaacagct

SEQ ID NO: 2769 - DNA, 40 bp, Artificial Sequence
  Synthetic
gtcgccttcgatgatgacggttgccgtttaccgcaacaac

SEQ ID NO: 2770 - DNA, 39 bp, Artificial Sequence
  Synthetic
cgatggttggcaaccgtgcggtatccatcccgattcggc

SEQ ID NO: 2771 - DNA, 40 bp, Artificial Sequence
  Synthetic
attaatacgccccagccgcccttacctctacacggacggc

SEQ ID NO: 2772 - DNA, 43 bp, Artificial Sequence
  Synthetic
ataggcagaatgaccgcagcgatgtttcaaatttcgaagatgt

SEQ ID NO: 2773 - DNA, 39 bp, Artificial Sequence
  Synthetic
accggagtggacgaacctcttagctacccggctatgcaa

SEQ ID NO: 2774 - DNA, 34 bp, Artificial Sequence
  Synthetic
cgcaagctgtttcggcggcttttcctgccgcgcc

SEQ ID NO: 2775 - DNA, 36 bp, Artificial Sequence
  Synthetic
cggtcgaggaggcaatccgtaacgctcaaaccgccg

SEQ ID NO: 2776 - DNA, 36 bp, Artificial Sequence
  Synthetic
gcaccttcgtcgcggatttcggccatcgcgccgttt

SEQ ID NO: 2777 - DNA, 37 bp, Artificial Sequence
  Synthetic
ttggtcgccgagctgccagccctgaaatcgaacgccg

SEQ ID NO: 2778 - DNA, 39 bp, Artificial Sequence
  Synthetic
accatttggtcgcggtgggcttcctgattaccatcggcg

SEQ ID NO: 2779 - DNA, 40 bp, Artificial Sequence
  Synthetic
cgatttgcccgtttacgccctgtcaacagtggcgcgaaac

SEQ ID NO: 2780 - DNA, 38 bp, Artificial Sequence
  Synthetic
acaggatggatttcgcccagccgcggcggcttcagcta

SEQ ID NO: 2781 - DNA, 35 bp, Artificial Sequence
  Synthetic
ggacgacttcgcgttccgcggcagcgttacgggca

SEQ ID NO: 2782 - DNA, 40 bp, Artificial Sequence
  Synthetic
acgagggcatgacgaccgtgggtctggtcggacagattgc

SEQ ID NO: 2783 - DNA, 39 bp, Artificial Sequence
  Synthetic
gctacggcaatcagtgtcaggttctacaccgcccaagca

SEQ ID NO: 2784 - DNA, 37 bp, Artificial Sequence
  Synthetic
atgccgtgcagggcttgggggcacgttctaccaaggc

SEQ ID NO: 2785 - DNA, 38 bp, Artificial Sequence
  Synthetic
cggcccattcgtcttggttgatcagctcgcccaagcca

SEQ ID NO: 2786 - DNA, 35 bp, Artificial Sequence
  Synthetic
cgttgcgcggcagcttgtcctcacccaagccgtct

SEQ ID NO: 2787 - DNA, 38 bp, Artificial Sequence
  Synthetic
ccgggtgcaagcagggtttcggcaaacacccattgacc

SEQ ID NO: 2788 - DNA, 43 bp, Artificial Sequence
  Synthetic
gaggcaaccggcaattattatgacgtaaacgctgtaatactgc

SEQ ID NO: 2789 - DNA, 42 bp, Artificial Sequence
  Synthetic
cgggcgttgtgtgttttgttgtcaatgactaccaccacgacg

SEQ ID NO: 2790 - DNA, 40 bp, Artificial Sequence
  Synthetic
gcaggttgtcggctttgacgtaaactaccgccgcaatacg

SEQ ID NO: 2791 - DNA, 36 bp, Artificial Sequence
  Synthetic
cgtacatcacgccggtcaggcgaagcccagcgcatc

SEQ ID NO: 2792 - DNA, 36 bp, Artificial Sequence
  Synthetic
cttggcaggcttcgcagcgacgcggctacaacgtcg

SEQ ID NO: 2793 - DNA, 35 bp, Artificial Sequence
  Synthetic
aaaggcagacgcggtcgccccgttgcgtttcggaa

SEQ ID NO: 2794 - DNA, 38 bp, Artificial Sequence
  Synthetic
tgggcgcgcaagaagtcggctgccgtagattttgacgg

SEQ ID NO: 2795 - DNA, 38 bp, Artificial Sequence
  Synthetic
acgtgcagcaggcggatttgttcgggtttttgacggcg

SEQ ID NO: 2796 - DNA, 38 bp, Artificial Sequence
  Synthetic
gcggtgtggcgcaggaattgtcgggagccagagtctct

SEQ ID NO: 2797 - DNA, 39 bp, Artificial Sequence
  Synthetic
acatcggcagcatcctcgaaagcgttgcgccataatggt

SEQ ID NO: 2798 - DNA, 35 bp, Artificial Sequence
  Synthetic
acggtttgcaggcagtcgcgcggcggctttgttca

SEQ ID NO: 2799 - DNA, 36 bp, Artificial Sequence
  Synthetic
ccgatgacccagaagccgaccagctgacgggcgtgt

SEQ ID NO: 2800 - DNA, 35 bp, Artificial Sequence
  Synthetic
aactcgccttcgcctgcggcgcagcaaaccgccga

SEQ ID NO: 2801 - DNA, 42 bp, Artificial Sequence
  Synthetic
cggggaaggaaataccgatgggtgcctgatacagtcggtaca

SEQ ID NO: 2802 - DNA, 38 bp, Artificial Sequence
  Synthetic
tccattttggtcggcggcgtttggaaggcaagagcgac

SEQ ID NO: 2803 - DNA, 39 bp, Artificial Sequence
  Synthetic
ggcgcggatgcacttgaagaagtgccgcctgcaaacctc

SEQ ID NO: 2804 - DNA, 37 bp, Artificial Sequence
  Synthetic
ccagtatttcagacggccccgcccaaacgccgcgtgt

SEQ ID NO: 2805 - DNA, 38 bp, Artificial Sequence
  Synthetic
tttggcaaaaccgggcggaacgcaacgacatcctcgcc

SEQ ID NO: 2806 - DNA, 38 bp, Artificial Sequence
  Synthetic
cgggcaggttgagggtgaaatcccgcgctgtacggcat

SEQ ID NO: 2807 - DNA, 38 bp, Artificial Sequence
  Synthetic
cctgccggattgcttgtccgatcgacgaccaccacacc

SEQ ID NO: 2808 - DNA, 38 bp, Artificial Sequence
  Synthetic
cgacttcgatgccgccgtcttagggcaaatgggtctgc

SEQ ID NO: 2809 - DNA, 38 bp, Artificial Sequence
  Synthetic
tgccttggaacatccccatcatcagtacgggaatgagc

SEQ ID NO: 2810 - DNA, 41 bp, Artificial Sequence
  Synthetic
ggaaaggtaaaacacgacgcgcttgaaagtgcgcgaactgt

SEQ ID NO: 2811 - DNA, 38 bp, Artificial Sequence
  Synthetic
cccaggtcttttgcgtcgtccgccaaagccgaactcgc

SEQ ID NO: 2812 - DNA, 42 bp, Artificial Sequence
  Synthetic
ggcgtattcgagataggcgcgtcccataccgattccaacacg

SEQ ID NO: 2813 - DNA, 41 bp, Artificial Sequence
  Synthetic
gcgggttgagggtggaaaagaagcgtgggcgttttacttgt

SEQ ID NO: 2814 - DNA, 42 bp, Artificial Sequence
  Synthetic
gcacggtcgatgtatctgaccgcgtagccggcttctatttcg

SEQ ID NO: 2815 - DNA, 39 bp, Artificial Sequence
  Synthetic
cggcaaggtgttcgccgaggccaaacggcaaaaaaacgc

SEQ ID NO: 2816 - DNA, 46 bp, Artificial Sequence
  Synthetic
cgggttcttgccatcaaatttaactaaacttttggtgctttttccg

SEQ ID NO: 2817 - DNA, 45 bp, Artificial Sequence
  Synthetic
agttcaaaggctacacgtcaaataaaagaaggttcaatatgtcgg

SEQ ID NO: 2818 - DNA, 36 bp, Artificial Sequence
  Synthetic
acaagtaatcccgcgtcccgcggctgtgcgtgaggt

SEQ ID NO: 2819 - DNA, 44 bp, Artificial Sequence
  Synthetic
ccgtccgttctaaaatttgaccaatcctgttttttgacgctgaa

SEQ ID NO: 2820 - DNA, 38 bp, Artificial Sequence
  Synthetic
ggttcgggctttcacaacggagcacatccgccacatcc

SEQ ID NO: 2821 - DNA, 38 bp, Artificial Sequence
  Synthetic
gacttggggcttctggctgccagcaggctgatggcaat

SEQ ID NO: 2822 - DNA, 35 bp, Artificial Sequence
  Synthetic
tatggcaatcggcgcctgccggcccagcaacacca

SEQ ID NO: 2823 - DNA, 39 bp, Artificial Sequence
  Synthetic
cggctcagggattcgacaatgtctcccgcaacaatgggc

SEQ ID NO: 2824 - DNA, 39 bp, Artificial Sequence
  Synthetic
ctcgccggacaattcattgctgggcacctgtatcggcgt

SEQ ID NO: 2825 - DNA, 36 bp, Artificial Sequence
  Synthetic
gctcgggcttttaccgcgtcaaacccaagccgcacc

SEQ ID NO: 2826 - DNA, 40 bp, Artificial Sequence
  Synthetic
acggctttttctttgggctcggaaaagccgaaaccgcacc

SEQ ID NO: 2827 - DNA, 38 bp, Artificial Sequence
  Synthetic
cggatatcgagctgcacagccgtgagttcgggcgggag

SEQ ID NO: 2828 - DNA, 40 bp, Artificial Sequence
  Synthetic
ccaccacacgccatgtcgaaaggaaaaccaacatgtccgc

SEQ ID NO: 2829 - DNA, 37 bp, Artificial Sequence
  Synthetic
tggttcgagggcaggctggacctgttcccgattggcg

SEQ ID NO: 2830 - DNA, 35 bp, Artificial Sequence
  Synthetic
tggcggcaaccttcggtaccagcgtgcagagccac

SEQ ID NO: 2831 - DNA, 39 bp, Artificial Sequence
  Synthetic
caatccctgcgtgcttcggggcgaagaaagccttgccaa

SEQ ID NO: 2832 - DNA, 40 bp, Artificial Sequence
  Synthetic
tccactgcttgccctcaacaagatggcggacggtataggc

SEQ ID NO: 2833 - DNA, 38 bp, Artificial Sequence
  Synthetic
tcgccagcttgcctgtccgcggagcatccaaatggcag

SEQ ID NO: 2834 - DNA, 38 bp, Artificial Sequence
  Synthetic
cccgttgcgtttcggaatgcccgtaaaggcagacgcgg

SEQ ID NO: 2835 - DNA, 40 bp, Artificial Sequence
  Synthetic
gttggaagtttgacgggggctcaccagaggttcgtccact

SEQ ID NO: 2836 - DNA, 43 bp, Artificial Sequence
  Synthetic
tccgttcaattgcttatttgttcaaaaagatgaagcggcaatg

SEQ ID NO: 2837 - DNA, 40 bp, Artificial Sequence
  Synthetic
ctgcctgcgggaatgtcgaaccaaacccaatgcttcaacc

SEQ ID NO: 2838 - DNA, 41 bp, Artificial Sequence
  Synthetic
acggacagatggatcggcatttgcggatccgggtttgatta

SEQ ID NO: 2839 - DNA, 39 bp, Artificial Sequence
  Synthetic
tatgcggcggcagggcttctttgccgaaaatatccccca

SEQ ID NO: 2840 - DNA, 36 bp, Artificial Sequence
  Synthetic
tacagttccgcgccgcactgcctgtatttccgcgac

SEQ ID NO: 2841 - DNA, 41 bp, Artificial Sequence
  Synthetic
cggcttgaccacccagaactgaactcaatgcggacgtatcc

SEQ ID NO: 2842 - DNA, 40 bp, Artificial Sequence
  Synthetic
attgctcaacgccgcttcgacgcacaaaaccatgtttggg

SEQ ID NO: 2843 - DNA, 37 bp, Artificial Sequence
  Synthetic
tgctcttctcgccgacagcgcgcgccatttgagtttc

SEQ ID NO: 2844 - DNA, 38 bp, Artificial Sequence
  Synthetic
ggcggtcgcttcgtccaactgcatcgatttgaccggtt

SEQ ID NO: 2845 - DNA, 37 bp, Artificial Sequence
  Synthetic
cgctgtgggtgtcggtcaggcttgaaagcccacctcg

SEQ ID NO: 2846 - DNA, 38 bp, Artificial Sequence
  Synthetic
ggttcgatcatcagcgtgccggactacggcttccacgc

SEQ ID NO: 2847 - DNA, 34 bp, Artificial Sequence
  Synthetic
cgcgagagtacggatgcgctcaacgcgccgcaca

SEQ ID NO: 2848 - DNA, 39 bp, Artificial Sequence
  Synthetic
agacaagggtgcggcagcccctgacaggttgcttcgaag

SEQ ID NO: 2849 - DNA, 35 bp, Artificial Sequence
  Synthetic
gcgcagggacgcatcgttacccgactttgagcgcg

SEQ ID NO: 2850 - DNA, 39 bp, Artificial Sequence
  Synthetic
ccacacaagccatcctgcccgtcggggtggacttcaaag

SEQ ID NO: 2851 - DNA, 39 bp, Artificial Sequence
  Synthetic
agcgcacacccaaacctggatcaggtcggtcagatagct

SEQ ID NO: 2852 - DNA, 40 bp, Artificial Sequence
  Synthetic
aagtcatcgacaacgcggcgttgcacgtcgatttcagtgg

SEQ ID NO: 2853 - DNA, 38 bp, Artificial Sequence
  Synthetic
tgggcttgaaagtcgtgcgcaccgtatgttccgcaacc

SEQ ID NO: 2854 - DNA, 39 bp, Artificial Sequence
  Synthetic
gcctgtaccgttgccgtcatggcggggttcagttcgatg

SEQ ID NO: 2855 - DNA, 39 bp, Artificial Sequence
  Synthetic
gcccaagcccttatcctgcaaagcggatgaagccttcgc

SEQ ID NO: 2856 - DNA, 37 bp, Artificial Sequence
  Synthetic
tgggacgaaacccggggcttgaaacatctgccgcgtc

SEQ ID NO: 2857 - DNA, 39 bp, Artificial Sequence
  Synthetic
ggcggacgcgttgaaggtggcaaaaaccaccgtttaccg

SEQ ID NO: 2858 - DNA, 38 bp, Artificial Sequence
  Synthetic
aaggcgtggctttcggcgccatactgacggttctgcag

SEQ ID NO: 2859 - DNA, 35 bp, Artificial Sequence
  Synthetic
agccgtgcgctatacccgccggcaagcgtcccgtt

SEQ ID NO: 2860 - DNA, 38 bp, Artificial Sequence
  Synthetic
tgaatggttgtggcagcccggttgacggtgcggacatt

SEQ ID NO: 2861 - DNA, 36 bp, Artificial Sequence
  Synthetic
cggcttgggacattgcctccccgtcgtgcgaggcat

SEQ ID NO: 2862 - DNA, 39 bp, Artificial Sequence
  Synthetic
gcggtcggacacgtcaaactggaagaaatccgcgctttg

SEQ ID NO: 2863 - DNA, 34 bp, Artificial Sequence
  Synthetic
cccggtgccgtgcagattcattgcagcacgccgg

SEQ ID NO: 2864 - DNA, 35 bp, Artificial Sequence
  Synthetic
agccggggcggaagtttcccgttcgcgtggggcat

SEQ ID NO: 2865 - DNA, 41 bp, Artificial Sequence
  Synthetic
gcgcagacgttttctgacggcttcggcaaaaaagaaaccgc

SEQ ID NO: 2866 - DNA, 36 bp, Artificial Sequence
  Synthetic
gccaatatcggtgcggcgcgtaccgacgcttccggt

SEQ ID NO: 2867 - DNA, 38 bp, Artificial Sequence
  Synthetic
agcagcagctacaatgtcggaccacgcgcccgaacaga

SEQ ID NO: 2868 - DNA, 40 bp, Artificial Sequence
  Synthetic
cctcgaatggggcggacagtcaaaatcagggtttgcgagc

SEQ ID NO: 2869 - DNA, 38 bp, Artificial Sequence
  Synthetic
cgacatccgcaccgcattgggttcgggaagtcgctgac

SEQ ID NO: 2870 - DNA, 40 bp, Artificial Sequence
  Synthetic
gaccgaagaccaaggcttcgttcatcggtgcgctctttgg

SEQ ID NO: 2871 - DNA, 37 bp, Artificial Sequence
  Synthetic
ccgaaacctatatcggggcgcgatacgggcggcggtt

SEQ ID NO: 2872 - DNA, 39 bp, Artificial Sequence
  Synthetic
ccaaacatcccgccaaaggcctgatgagggcttcgagga

SEQ ID NO: 2873 - DNA, 41 bp, Artificial Sequence
  Synthetic
ccgcttcctcgacagcgaaagtactgcaaaaggtgatgccg

SEQ ID NO: 2874 - DNA, 41 bp, Artificial Sequence
  Synthetic
cgacggtcggagaatgggtggtccggcttcgaacaatctgt

SEQ ID NO: 2875 - DNA, 38 bp, Artificial Sequence
  Synthetic
cctggaagcaggcggtagacctgccacatcgggttgcc

SEQ ID NO: 2876 - DNA, 38 bp, Artificial Sequence
  Synthetic
gggcaacgtcatcgaagcggcctgcgtcagatcgggat

SEQ ID NO: 2877 - DNA, 38 bp, Artificial Sequence
  Synthetic
tttggggcggcaagttcgtgcggttcgacaccccattt

SEQ ID NO: 2878 - DNA, 39 bp, Artificial Sequence
  Synthetic
gccgctattccgacgaatggcctcaggcacgacatcacg

SEQ ID NO: 2879 - DNA, 38 bp, Artificial Sequence
  Synthetic
atgcggcaggtttgatggatggacttttctcccacgaa

SEQ ID NO: 2880 - DNA, 39 bp, Artificial Sequence
  Synthetic
gcgttttgctggcggatgtagaggctgggtcaaatccgg

SEQ ID NO: 2881 - DNA, 34 bp, Artificial Sequence
  Synthetic
tcgcgcaaaagcccggaggggcaagtgttcgccg

SEQ ID NO: 2882 - DNA, 37 bp, Artificial Sequence
  Synthetic
ccgaatacgccgacaccgacgtacggctgcggacggt

SEQ ID NO: 2883 - DNA, 36 bp, Artificial Sequence
  Synthetic
gggcaacataagcggcggacgttgtggtagccgccg

SEQ ID NO: 2884 - DNA, 40 bp, Artificial Sequence
  Synthetic
cgccgtctttgcctacacccatatcacgaagacggctcgg

SEQ ID NO: 2885 - DNA, 39 bp, Artificial Sequence
  Synthetic
accacggcaggttacggattgatgtcgaaaccgccgttg

SEQ ID NO: 2886 - DNA, 42 bp, Artificial Sequence
  Synthetic
gttccgctgattaaggccttgcattttccaacacctgcttgc

SEQ ID NO: 2887 - DNA, 38 bp, Artificial Sequence
  Synthetic
ccgaaccgtgcctgctgtaaccaccacgtcgtaatcgt

SEQ ID NO: 2888 - DNA, 35 bp, Artificial Sequence
  Synthetic
cgccgaagaacagtccggtggcgcatacacgtcgg

SEQ ID NO: 2889 - DNA, 40 bp, Artificial Sequence
  Synthetic
tggcaatgctgtcttcgcggaactacaccaaccgttctcc

SEQ ID NO: 2890 - DNA, 35 bp, Artificial Sequence
  Synthetic
ttgtccgcacgaaccgccgcgcgcttgccagccaa

SEQ ID NO: 2891 - DNA, 38 bp, Artificial Sequence
  Synthetic
gcgcgctttggcaaacgatatcggcaatttcctgctgg

SEQ ID NO: 2892 - DNA, 38 bp, Artificial Sequence
  Synthetic
tgcccgcgccgattttgggcaaacgcctcgatattggg

SEQ ID NO: 2893 - DNA, 42 bp, Artificial Sequence
  Synthetic
acagataacctgcggcggcaaatacgcaaacactacgtctgc

SEQ ID NO: 2894 - DNA, 36 bp, Artificial Sequence
  Synthetic
gccttgccgaacgcgaacggcgcggtgcaaatcttg

SEQ ID NO: 2895 - DNA, 36 bp, Artificial Sequence
  Synthetic
cgtgttgcacagccggatggcccaacatcgcgcgca

SEQ ID NO: 2896 - DNA, 35 bp, Artificial Sequence
  Synthetic
agcagcgcgtctccatcgcggctcgtcggcgaaga

SEQ ID NO: 2897 - DNA, 41 bp, Artificial Sequence
  Synthetic
cgtcgtcgccgtagacatcaagatacgcctttcaaacggct

SEQ ID NO: 2898 - DNA, 40 bp, Artificial Sequence
  Synthetic
cccttctgccttctggacgaagagcttgcagaaacgcgag

SEQ ID NO: 2899 - DNA, 38 bp, Artificial Sequence
  Synthetic
ccctgatcaacgccaaacgctacttcgagcgcgtccag

SEQ ID NO: 2900 - DNA, 39 bp, Artificial Sequence
  Synthetic
tggcggaagagcagaccgttagcgatgtcgtctgaaagc

SEQ ID NO: 2901 - DNA, 40 bp, Artificial Sequence
  Synthetic
gcaggcggcatggctttcagacctgtacgggcagggattt

SEQ ID NO: 2902 - DNA, 36 bp, Artificial Sequence
  Synthetic
agcaggaagccgccgacttttgccacagttgcggcg

SEQ ID NO: 2903 - DNA, 35 bp, Artificial Sequence
  Synthetic
cgaggcaaaccgcatccgctcggcatgggcaagct

SEQ ID NO: 2904 - DNA, 40 bp, Artificial Sequence
  Synthetic
ggcaaaactgcccgccacataatgggggcggtgtttaagc

SEQ ID NO: 2905 - DNA, 40 bp, Artificial Sequence
  Synthetic
ggcgatttgctgctgaatcggatcggtgcgttcttctccg

SEQ ID NO: 2906 - DNA, 38 bp, Artificial Sequence
  Synthetic
gccttcttcgacttggctgtcgtgcctgtccgacgacc

SEQ ID NO: 2907 - DNA, 38 bp, Artificial Sequence
  Synthetic
tgctctacctggccgggttttatgccaaaagccccgtc

SEQ ID NO: 2908 - DNA, 38 bp, Artificial Sequence
  Synthetic
cacttgcccgcttttttgcagctgggaacaagccgcca

SEQ ID NO: 2909 - DNA, 40 bp, Artificial Sequence
  Synthetic
gatgttttcggggaacacggctcgacaacacgctcgttct

SEQ ID NO: 2910 - DNA, 39 bp, Artificial Sequence
  Synthetic
cggtcatcagggcggtgtcttgaaaccctgaccctctgc

SEQ ID NO: 2911 - DNA, 37 bp, Artificial Sequence
  Synthetic
gtaggtctcggtgtcatcgccgcgtccagggtcagct

SEQ ID NO: 2912 - DNA, 38 bp, Artificial Sequence
  Synthetic
acgtgattgccgaacagggcacttcctgatcgcgcatc

SEQ ID NO: 2913 - DNA, 40 bp, Artificial Sequence
  Synthetic
aaagcaggtgccaaccgcttgggtttgtaccaacagtccg

SEQ ID NO: 2914 - DNA, 38 bp, Artificial Sequence
  Synthetic
acgccaccgacaccaccagtctacttcgcggttgaagg

SEQ ID NO: 2915 - DNA, 38 bp, Artificial Sequence
  Synthetic
ccgccgcgaaaaactggaaacaatggcggggaagtcgg

SEQ ID NO: 2916 - DNA, 38 bp, Artificial Sequence
  Synthetic
cggcgtatcgctcaaaatgccgcgcgtaggtcagttcc

SEQ ID NO: 2917 - DNA, 34 bp, Artificial Sequence
  Synthetic
tgccgccgcattgctgaccgcctaagccgatgcg

SEQ ID NO: 2918 - DNA, 37 bp, Artificial Sequence
  Synthetic
caaaccgaaagcgcgggcccgtacacgctccaaaccg

SEQ ID NO: 2919 - DNA, 43 bp, Artificial Sequence
  Synthetic
ggcacaccaaaaatcatggcttaacacagagtatgcaacttac

SEQ ID NO: 2920 - DNA, 43 bp, Artificial Sequence
  Synthetic
gctgctgattatctgccgtaaacagtatgacaatttgctgaac

SEQ ID NO: 2921 - DNA, 39 bp, Artificial Sequence
  Synthetic
cggtgtgccattggtagattttgctgattaccaccaaca

SEQ ID NO: 2922 - DNA, 41 bp, Artificial Sequence
  Synthetic
gtcccacaattcaaaaccgtcttttgggtcaaaatgggtgc

SEQ ID NO: 2923 - DNA, 44 bp, Artificial Sequence
  Synthetic
ggctgtttttcaggttgcttaattttgaaatgttcaacggcatt

SEQ ID NO: 2924 - DNA, 40 bp, Artificial Sequence
  Synthetic
tttgagcttgtcagcagccgactgaaaatgcgcctgctca

SEQ ID NO: 2925 - DNA, 44 bp, Artificial Sequence
  Synthetic
tgccaaacaccgacataatcatcttcttgttttgatgttggcag

SEQ ID NO: 2926 - DNA, 43 bp, Artificial Sequence
  Synthetic
cgcttgtttacgagttttcaaacaaactttagcgcgaaaccat

SEQ ID NO: 2927 - DNA, 38 bp, Artificial Sequence
  Synthetic
gccctgccacaaacagatttcctgcatttcccaaaagc

SEQ ID NO: 2928 - DNA, 42 bp, Artificial Sequence
  Synthetic
gtggcaatgaatggaatattgtcccaaccgcttgaaacactt

SEQ ID NO: 2929 - DNA, 42 bp, Artificial Sequence
  Synthetic
agactgttcccgataactcgccatacaggacataatgcctac

SEQ ID NO: 2930 - DNA, 47 bp, Artificial Sequence
  Synthetic
gccttaatccaacaaaaaatgacgagcatatccggcaaataatcttg

SEQ ID NO: 2931 - DNA, 39 bp, Artificial Sequence
  Synthetic
agcgcgttattgttcaacagcgtcgtcaaagcaggcaaa

SEQ ID NO: 2932 - DNA, 41 bp, Artificial Sequence
  Synthetic
gtcggtgtgattgccgccattacggcaataatcgacagcgc

SEQ ID NO: 2933 - DNA, 36 bp, Artificial Sequence
  Synthetic
tatcgacctgcgccgccctgcccgtagcgacttggt

SEQ ID NO: 2934 - DNA, 49 bp, Artificial Sequence
  Synthetic
cagaaatcggttattgacgaagtgagatagggagagaaataaatatcgt

SEQ ID NO: 2935 - DNA, 35 bp, Artificial Sequence
  Synthetic
tgcggtgatgtcggcagggcctgatcgaatggccg

SEQ ID NO: 2936 - DNA, 35 bp, Artificial Sequence
  Synthetic
ggcgcgtaccgttttggcagccggcacactgttcg

SEQ ID NO: 2937 - DNA, 35 bp, Artificial Sequence
  Synthetic
gcgtcggcgtggatggagagcgtgtcgccaaaggg

SEQ ID NO: 2938 - DNA, 41 bp, Artificial Sequence
  Synthetic
gcttctcttcggcaggattggagcacccgatatgccgtcta

SEQ ID NO: 2939 - DNA, 39 bp, Artificial Sequence
  Synthetic
aggtcgaggcgggcgaaacgccgagttcttctccaaact

SEQ ID NO: 2940 - DNA, 39 bp, Artificial Sequence
  Synthetic
cgacgcattgggcaagcccgatgccttgttcttccagcc

SEQ ID NO: 2941 - DNA, 40 bp, Artificial Sequence
  Synthetic
acgccgaacaaatcaggcagttcgaccaagcccaaatcgc

SEQ ID NO: 2942 - DNA, 38 bp, Artificial Sequence
  Synthetic
atggatgggcggatggcggcaacaccagctcgttcaca

SEQ ID NO: 2943 - DNA, 42 bp, Artificial Sequence
  Synthetic
gcggcaatcaagcatttcggacgaagcagtcgtctatggtcg

SEQ ID NO: 2944 - DNA, 35 bp, Artificial Sequence
  Synthetic
tgcccccgttttggctgccgaccaggccctgcgta

SEQ ID NO: 2945 - DNA, 40 bp, Artificial Sequence
  Synthetic
cgcaccggcattcacatctgttaagcaagcgaaaacggca

SEQ ID NO: 2946 - DNA, 38 bp, Artificial Sequence; identical to SEQ ID NO: 2734
  Synthetic

SEQ ID NO: 2947 - DNA, 41 bp, Artificial Sequence
  Synthetic
cggggaatcagaagcggtagcaaacacccgcttcaaaaccc

SEQ ID NO: 2948 - DNA, 36 bp, Artificial Sequence
  Synthetic
acgcggggtttgggcaacgggaatccggacctgtcc

SEQ ID NO: 2949 - DNA, 37 bp, Artificial Sequence
  Synthetic
cccaaagccgttcccgttgccaaccatacggacggcg

SEQ ID NO: 2950 - DNA, 42 bp, Artificial Sequence
  Synthetic
acacgccgtcgatttggtgatttgtcgatgacggtagtcgga

SEQ ID NO: 2951 - DNA, 35 bp, Artificial Sequence
  Synthetic
tttcccggcctgcccaacgccgctccggcatggtt

SEQ ID NO: 2952 - DNA, 36 bp, Artificial Sequence
  Synthetic
gaagtgcgcttcgggcatcccctgacattcggcggc

SEQ ID NO: 2953 - DNA, 35 bp, Artificial Sequence
  Synthetic
ccgattacaccgcctccagcgcgcgtaccggcaaa

SEQ ID NO: 2954 - DNA, 38 bp, Artificial Sequence
  Synthetic
tgcgtccgccggcgatttcattggatggcgagatgtgg

SEQ ID NO: 2955 - DNA, 42 bp, Artificial Sequence
  Synthetic
ccaaatgcctgacggtgcagtgcgcgggttggaagtattggt

SEQ ID NO: 2956 - DNA, 38 bp, Artificial Sequence
  Synthetic
tcgaatttttcggcgagggcgccggcgtcatgttggaa

SEQ ID NO: 2957 - DNA, 36 bp, Artificial Sequence
  Synthetic
gcggtttggaagcggaaaccatatcgggcaggcgca

SEQ ID NO: 2958 - DNA, 38 bp, Artificial Sequence
  Synthetic
cccgatacggttgaggtcgtccggcatggtcgccccaa

SEQ ID NO: 2959 - DNA, 38 bp, Artificial Sequence
  Synthetic
gcgacatcaagttgccaaacggcggggtggtgtccgta

SEQ ID NO: 2960 - DNA, 36 bp, Artificial Sequence
  Synthetic
tcgggcgcggagagtggttcagaaagccgcgtttgc

SEQ ID NO: 2961 - DNA, 34 bp, Artificial Sequence
  Synthetic
gatgcgccgcaaatccgcacgcagtcggtcaggt

SEQ ID NO: 2962 - DNA, 33 bp, Artificial Sequence
  Synthetic
aaaacggcgggcgcgtgcggcggttcacaatgt

SEQ ID NO: 2963 - DNA, 40 bp, Artificial Sequence
  Synthetic
ccgcaaacccacctcgtcaaaaatggcggtcagaatcagc

SEQ ID NO: 2964 - DNA, 40 bp, Artificial Sequence
  Synthetic
tgagtttgaacgatgtggcggacgttcagacggcctttga

SEQ ID NO: 2965 - DNA, 41 bp, Artificial Sequence
  Synthetic
gggcgcggataaagtcgtcgtacgttgatgatgtcgtgcgg

SEQ ID NO: 2966 - DNA, 37 bp, Artificial Sequence
  Synthetic
ccgtcaacaaggcgcaacagcgactggtcaaggccgt

SEQ ID NO: 2967 - DNA, 38 bp, Artificial Sequence
  Synthetic
agcgaacagcggcgcaacgtttgattgccgaaccaggt

SEQ ID NO: 2968 - DNA, 39 bp, Artificial Sequence
  Synthetic
gcacacgtcatcggatttaccagcgaaagttccaaacct

SEQ ID NO: 2969 - DNA, 41 bp, Artificial Sequence
  Synthetic
gcgcacacgaattaagcatcgaatgtcgcggaatttggcag

SEQ ID NO: 2970 - DNA, 40 bp, Artificial Sequence
  Synthetic
tgaagaaaaggcgggcgagccgtgctttcttgcgcactgc

SEQ ID NO: 2971 - DNA, 41 bp, Artificial Sequence
  Synthetic
tgccgtctgaaacacattaaggacagaccttttccggattg

SEQ ID NO: 2972 - DNA, 39 bp, Artificial Sequence
  Synthetic
ccgttttggaacgcgtcatcgcggcgttgactttgccct

SEQ ID NO: 2973 - DNA, 37 bp, Artificial Sequence
  Synthetic
cggaaatgccgttgccttcgtcatccacgccatcggc

SEQ ID NO: 2974 - DNA, 35 bp, Artificial Sequence
  Synthetic
tcgcgcacttcggcaatgggatgcttgccgtgcgc

SEQ ID NO: 2975 - DNA, 37 bp, Artificial Sequence
  Synthetic
ggtttgttcggcaggtttggcggcgaagtcgtgtccg

SEQ ID NO: 2976 - DNA, 35 bp, Artificial Sequence
  Synthetic
gttgatcaggcgcgccactgatgccagcatcggcg

SEQ ID NO: 2977 - DNA, 36 bp, Artificial Sequence
  Synthetic
ccgagtaggaagccagcggggaccgaacttgccgcc

SEQ ID NO: 2978 - DNA, 39 bp, Artificial Sequence
  Synthetic
tccccagttgtggtagcggtatcggtttcgacatcacgc

SEQ ID NO: 2979 - DNA, 37 bp, Artificial Sequence
  Synthetic
tgccgctgtgggtcagtgcgccatgtacggtttgggt

SEQ ID NO: 2980 - DNA, 38 bp, Artificial Sequence
  Synthetic
gctgccggtggcgaaggtaaaacgccaaggcaaccaaa

SEQ ID NO: 2981 - DNA, 38 bp, Artificial Sequence
  Synthetic
cctcgcctttcagacgatggatggcttgcccgtcttgg

SEQ ID NO: 2982 - DNA, 39 bp, Artificial Sequence
  Synthetic
ggcggcttcgtcgcacaaaccatcggaaaacacgtcgcc

SEQ ID NO: 2983 - DNA, 39 bp, Artificial Sequence
  Synthetic
tgccgacggacgaacgctgacaaacgcaagacttcgtct

SEQ ID NO: 2984 - DNA, 39 bp, Artificial Sequence
  Synthetic
cgcacgcgaacagggcttgtcgatgcccgtaaacgttac

SEQ ID NO: 2985 - DNA, 34 bp, Artificial Sequence
  Synthetic
attgccgccgcccaacaatttccggcggcgaacg

SEQ ID NO: 2986 - DNA, 41 bp, Artificial Sequence
  Synthetic
tgtttgtgctggcgtttgtgcgacggaacagaacaaatgcc

SEQ ID NO: 2987 - DNA, 39 bp, Artificial Sequence
  Synthetic
gaacaaaagctgctccgtcccggggcaaacggcaacagc

SEQ ID NO: 2988 - DNA, 43 bp, Artificial Sequence
  Synthetic
tctcaatctgcaggtgctgaaatcgtacaggttaatcaaatgg

SEQ ID NO: 2989 - DNA, 38 bp, Artificial Sequence
  Synthetic
gtctgtgcctgtgtcctgcataccccctaccctgaccg

SEQ ID NO: 2990 - DNA, 36 bp, Artificial Sequence
  Synthetic
ggcaatcccgccgatgttcacgaagccctgttccgc

SEQ ID NO: 2991 - DNA, 37 bp, Artificial Sequence
  Synthetic
cggagagcgcgtcggatttcccgatacagctaccccg

SEQ ID NO: 2992 - DNA, 40 bp, Artificial Sequence
  Synthetic
cacagtttcggcaaggctttccgacagggcggttgtcatc

SEQ ID NO: 2993 - DNA, 40 bp, Artificial Sequence
  Synthetic
cgtattgaccgcaccggcagacaggaagcgtttcatctgg

SEQ ID NO: 2994 - DNA, 39 bp, Artificial Sequence
  Synthetic
ctgggtgtcggctacctgcttgttcgacggtcattttgc

SEQ ID NO: 2995 - DNA, 35 bp, Artificial Sequence
  Synthetic
gcaaccatggcctcgaccggtgtgccgcttccgca

SEQ ID NO: 2996 - DNA, 41 bp, Artificial Sequence
  Synthetic
ggcaggcactttaatcatggcgaggcacggtagaagaagcc

SEQ ID NO: 2997 - DNA, 37 bp, Artificial Sequence
  Synthetic
ggcgacaacttggatatgggcatacgcgcgcggcatt

SEQ ID NO: 2998 - DNA, 39 bp, Artificial Sequence
  Synthetic
aaaagctgcacgcggtttgcaatatttcaccgcccccga

SEQ ID NO: 2999 - DNA, 38 bp, Artificial Sequence
  Synthetic
cgggcgaggttttgggtgtaactccccgaccgcgacat

SEQ ID NO: 3000 - DNA, 36 bp, Artificial Sequence
  Synthetic
cgcccaaacactgctgcaaacgcggacaagacctgc

SEQ ID NO: 3001 - DNA, 38 bp, Artificial Sequence
  Synthetic
ttggtgcaacgcctctacacatcgcaggattgtgccgc

SEQ ID NO: 3002 - DNA, 39 bp, Artificial Sequence
  Synthetic
acggctacaacgaggtcaacctccgaacgcgcctttctg

SEQ ID NO: 3003 - DNA, 36 bp, Artificial Sequence
  Synthetic
ccgacggataagcgacgtgcgccgcctttgtccgca

SEQ ID NO: 3004 - DNA, 39 bp, Artificial Sequence
  Synthetic
tatgcgggctttttccacgccttaaggcggctttgtcgg

SEQ ID NO: 3005 - DNA, 39 bp, Artificial Sequence
  Synthetic
tggacgcttggcaaccggcgtaccgcttcaggaaatcgc

SEQ ID NO: 3006 - DNA, 39 bp, Artificial Sequence
  Synthetic
gcgaatgtctgccatgttcgggcccagttgaacagggga

SEQ ID NO: 3007 - DNA, 39 bp, Artificial Sequence
  Synthetic
cgctcctgaccgccctgttcttaccccgtatcggcaaac

SEQ ID NO: 3008 - DNA, 38 bp, Artificial Sequence
  Synthetic
gtacaagtaatcccgcgtcccgcggctgtgcgtgaggt

SEQ ID NO: 3009 - DNA, 35 bp, Artificial Sequence
  Synthetic
ccgacaaacaggccgcacccggcgcggcaaagtct

SEQ ID NO: 3010 - DNA, 35 bp, Artificial Sequence
  Synthetic
agggccgcaccaaatcggcgcgaactcaacgccgc

SEQ ID NO: 3011 - DNA, 44 bp, Artificial Sequence
  Synthetic
gccattaaaagaccagggcattcgaaaagtaattcttggttgcc

SEQ ID NO: 3012 - DNA, 42 bp, Artificial Sequence
  Synthetic
tgctgattgtcgtattcggcggttccacataatgaagcggct

SEQ ID NO: 3013 - DNA, 40 bp, Artificial Sequence
  Synthetic
agtcgcgcatgtgcctgaaaaaatcaaactgattgccgcc

SEQ ID NO: 3014 - DNA, 41 bp, Artificial Sequence
  Synthetic
ggaagaaacggcaatgacggcttccgaaaaaggcctgaccg

SEQ ID NO: 3015 - DNA, 38 bp, Artificial Sequence
  Synthetic
gtggacgatgcctacgaagcctcgcggacgacgtttcc

SEQ ID NO: 3016 - DNA, 39 bp, Artificial Sequence
  Synthetic
tgccgcaactgccacttcaaacatttgttgcaggcggga

SEQ ID NO: 3017 - DNA, 39 bp, Artificial Sequence
  Synthetic
caggttcggtcgtcgtgtccgacggcacagtaaaggctg

SEQ ID NO: 3018 - DNA, 41 bp, Artificial Sequence
  Synthetic
gccgcacccaccatcattgaaggccttcgacgatttcggaa

SEQ ID NO: 3019 - DNA, 35 bp, Artificial Sequence
  Synthetic
ggtgggcggacgctattcccgccaaccgcaaccat

SEQ ID NO: 3020 - DNA, 36 bp, Artificial Sequence
  Synthetic
cgctgcatacggctttgcgctccctgccgtccgcat

SEQ ID NO: 3021 - DNA, 36 bp, Artificial Sequence
  Synthetic
ccgattccgccggtcagtcactggtggctgacccat

SEQ ID NO: 3022 - DNA, 42 bp, Artificial Sequence
  Synthetic
ccgcgtacatactcaactccataacccaatttcgcacaatgg

SEQ ID NO: 3023 - DNA, 36 bp, Artificial Sequence
  Synthetic
cccgaggttgaagccgtgtggctgatcggcgatgcg

SEQ ID NO: 3024 - DNA, 35 bp, Artificial Sequence
  Synthetic
gcacacatggcggctgcacctgaccggcgttccct

SEQ ID NO: 3025 - DNA, 41 bp, Artificial Sequence
  Synthetic
cgaaaagcgtgccgccttgtgcgaattgaacggcttatggc

SEQ ID NO: 3026 - DNA, 37 bp, Artificial Sequence
  Synthetic
gcgttcttcccactgctgcaatgaccgccctgacagg

SEQ ID NO: 3027 - DNA, 43 bp, Artificial Sequence
  Synthetic
gcttgaaaaaacgtgttttaagggaaaccgaaaatgccgtctt

SEQ ID NO: 3028 - DNA, 40 bp, Artificial Sequence
  Synthetic
cggaaaaaatgtcggggatggctcctcctcaaacccgacc

SEQ ID NO: 3029 - DNA, 36 bp, Artificial Sequence
  Synthetic
cctgtccggcatccagacaggccgcatccgcctaca

SEQ ID NO: 3030 - DNA, 42 bp, Artificial Sequence
  Synthetic
cgcatcatcagcgtgttgtcggcggacggcaagaaataccgg

SEQ ID NO: 3031 - DNA, 41 bp, Artificial Sequence
  Synthetic
ggcagaaaaaatccgcgctcaagatgcgctgtttgcacaaa

SEQ ID NO: 3032 - DNA, 34 bp, Artificial Sequence
  Synthetic
cgaagtcagcaccgcgcctagcgcgtcccacctt

SEQ ID NO: 3033 - DNA, 38 bp, Artificial Sequence
  Synthetic
gccattcgatgacggcggccctccatatacgccagccc

SEQ ID NO: 3034 - DNA, 36 bp, Artificial Sequence
  Synthetic
ttgccgccgcgttgttctacatgcccgacaacccca

SEQ ID NO: 3035 - DNA, 41 bp, Artificial Sequence
  Synthetic
tttgagtgccgacgagaaccaggtaatactgttcctctacc

SEQ ID NO: 3036 - DNA, 40 bp, Artificial Sequence
  Synthetic
gccgccgatttggatgtcacttccgtaacggcgcattacg

SEQ ID NO: 3037 - DNA, 38 bp, Artificial Sequence
  Synthetic
cgtcatcctgcccaaacttgccgcaaggtcgtgcgcca

SEQ ID NO: 3038 - DNA, 41 bp, Artificial Sequence
  Synthetic
tcggtagggctgaacattgcccaaggcgatgtcctgatacg

SEQ ID NO: 3039 - DNA, 41 bp, Artificial Sequence
  Synthetic
gctcaaacccggacaggtcggatttgatgatgtgccagccg

SEQ ID NO: 3040 - DNA, 36 bp, Artificial Sequence
  Synthetic
cggcgcggaaagtaccatcctgcgaaatccgtgccg

SEQ ID NO: 3041 - DNA, 41 bp, Artificial Sequence
  Synthetic
cattgccgaaaaagtccgccagatttcagcttcgctcacgc

SEQ ID NO: 3042 - DNA, 36 bp, Artificial Sequence
  Synthetic
gtcaaagctgccgccacggggataccgccctgctgt

SEQ ID NO: 3043 - DNA, 35 bp, Artificial Sequence
  Synthetic
accgaacaaggcggacggtcgcccaacatttcggc

SEQ ID NO: 3044 - DNA, 36 bp, Artificial Sequence
  Synthetic
accctcggttcgacctgccttcggttctctcggggc

SEQ ID NO: 3045 - DNA, 40 bp, Artificial Sequence
  Synthetic
tttgcaccctgcggcaaatggcacactgatacccaaagca

SEQ ID NO: 3046 - DNA, 38 bp, Artificial Sequence
  Synthetic
cggtgtttgccgcgtatcgaatcgcacttgccgcagaa

SEQ ID NO: 3047 - DNA, 40 bp, Artificial Sequence
  Synthetic
gctttcgtcggagaggacggtactggcggtatgaacaggc

SEQ ID NO: 3048 - DNA, 37 bp, Artificial Sequence
  Synthetic
gctccctgcttagcggaacggagaatccgcccgaccg

SEQ ID NO: 3049 - DNA, 35 bp, Artificial Sequence
  Synthetic
gcgtttccggcccgaacagcgcgccccgatgaaac

SEQ ID NO: 3050 - DNA, 38 bp, Artificial Sequence
  Synthetic
gggcggcggtaaaggcgttttcacgggcgcaaaacttc

SEQ ID NO: 3051 - DNA, 39 bp, Artificial Sequence
  Synthetic
tcttctgcaaccgcccgcgacggctttgggcattttgtc

SEQ ID NO: 3052 - DNA, 35 bp, Artificial Sequence
  Synthetic
ccattgccgccagttcccatcggcaaatacgcgcc

SEQ ID NO: 3053 - DNA, 37 bp, Artificial Sequence
  Synthetic
tttgggcgcgcaccgtaacgaagccgtctatgccaag

SEQ ID NO: 3054 - DNA, 39 bp, Artificial Sequence
  Synthetic
ctgccactcgacgtgttcgctttacgccaaactctgggc

SEQ ID NO: 3055 - DNA, 38 bp, Artificial Sequence
  Synthetic
cgttttttgcgggtgctggcttgccgccgctacatcgt

SEQ ID NO: 3056 - DNA, 35 bp, Artificial Sequence
  Synthetic
agctggcggcaggtttcgcgcacgggattcgagga

SEQ ID NO: 3057 - DNA, 40 bp, Artificial Sequence
  Synthetic
cgccattacctacgcgctgatgccgtccgacaacaccatc

SEQ ID NO: 3058 - DNA, 35 bp, Artificial Sequence
  Synthetic
gcattacggcgcgttggcatcccacacggcaagct

SEQ ID NO: 3059 - DNA, 38 bp, Artificial Sequence
  Synthetic
atcggcacaattcccgctgccagaaatcggagtcgggc

SEQ ID NO: 3060 - DNA, 38 bp, Artificial Sequence
  Synthetic
gacggaaggggagggcaaagggagagcgcccaatacca

SEQ ID NO: 3061 - DNA, 41 bp, Artificial Sequence
  Synthetic
agcgcgatgatttggatgctgacgacgtaaaccaccaccag

SEQ ID NO: 3062 - DNA, 40 bp, Artificial Sequence
  Synthetic
aggggagggcgttcagacggatgataaataccgacgccgc

SEQ ID NO: 3063 - DNA, 35 bp, Artificial Sequence
  Synthetic
tttccgcacacgcccagccccgccgcctgtacgaa

SEQ ID NO: 3064 - DNA, 40 bp, Artificial Sequence
  Synthetic
ccgtgcgcgaaaaaagcaacccaatgcgccgtctatgtgt

SEQ ID NO: 3065 - DNA, 39 bp, Artificial Sequence
  Synthetic
agtccggatgccaagccgctcattatgggacaggtcgcc

SEQ ID NO: 3066 - DNA, 35 bp, Artificial Sequence
  Synthetic
gtgtgggcggcgttgttggccctgctgattctgcc

SEQ ID NO: 3067 - DNA, 41 bp, Artificial Sequence
  Synthetic
tgtgtaatcacgatgccgccgagtgatgctcacccaccaaa

SEQ ID NO: 3068 - DNA, 40 bp, Artificial Sequence
  Synthetic
gcgggattggtttcggtggggagcttcagatgtgtagggc

SEQ ID NO: 3069 - DNA, 37 bp, Artificial Sequence
  Synthetic
gcatattggtgcgcggatcgcgacccgcgcaaattcc

SEQ ID NO: 3070 - DNA, 36 bp, Artificial Sequence
  Synthetic
gcttcggtctcggaagcaggcatgcggcggtcagga

SEQ ID NO: 3071 - DNA, 36 bp, Artificial Sequence
  Synthetic
gtcccaaaactggctgcccacagttcggcggacgca

SEQ ID NO: 3072 - DNA, 37 bp, Artificial Sequence
  Synthetic
caagaaatcctcgccgtcggccgtccgcggaaggctt

SEQ ID NO: 3073 - DNA, 34 bp, Artificial Sequence
  Synthetic
tccacgaaaccggccacgccggacacgcccagtt

SEQ ID NO: 3074 - DNA, 38 bp, Artificial Sequence
  Synthetic
ggcatcaccgaacgcgtcgcgacgacggagttgagatg

SEQ ID NO: 3075 - DNA, 42 bp, Artificial Sequence
  Synthetic
ccgccggagattttgtagctgtcatcatgaccgtcttgcacg

SEQ ID NO: 3076 - DNA, 38 bp, Artificial Sequence
  Synthetic
cgttggtcggggcggtaacggatggtgtacgccatggc

SEQ ID NO: 3077 - DNA, 39 bp, Artificial Sequence
  Synthetic
acgccgacttcgccctgacctacaaaaccaacgcctcca

SEQ ID NO: 3078 - DNA, 34 bp, Artificial Sequence
  Synthetic
gggctttttcggcggcgacggcgggttggtgcaa

SEQ ID NO: 3079 - DNA, 39 bp, Artificial Sequence
  Synthetic
gcttccgatggcggcttacggttttcaatccggccggtg

SEQ ID NO: 3080 - DNA, 35 bp, Artificial Sequence
  Synthetic
agacggagttggggcagccgacggcgatgtcctgc

SEQ ID NO: 3081 - DNA, 38 bp, Artificial Sequence
  Synthetic
tgcgttcgttgcgtttgaggtcgacagccgttttgccg

SEQ ID NO: 3082 - DNA, 40 bp, Artificial Sequence
  Synthetic
cggaagttgtcgcgcattgtgcgcaatccaagtcccatcc

SEQ ID NO: 3083 - DNA, 37 bp, Artificial Sequence
  Synthetic
ggtcatccgatggcacagcttcgacatccgcgcccaa

SEQ ID NO: 3084 - DNA, 39 bp, Artificial Sequence
  Synthetic
cgcgtgcgtttgaggtggtcggaaggcttattgaccacc

SEQ ID NO: 3085 - DNA, 39 bp, Artificial Sequence
  Synthetic
ccaaagcgggtttcaggcgttgggcaaactctcccgttt

SEQ ID NO: 3086 - DNA, 41 bp, Artificial Sequence
  Synthetic
caggaaggtggcgacatcgacaagcgatgaaggacaacacc

SEQ ID NO: 3087 - DNA, 33 bp, Artificial Sequence
  Synthetic
tcgttgcggctgccgttcaccgcccgaaaccga

SEQ ID NO: 3088 - DNA, 36 bp, Artificial Sequence
  Synthetic
agcggatcggcaatgctgacccgcgcacgttttcgg

SEQ ID NO: 3089 - DNA, 37 bp, Artificial Sequence
  Synthetic
ttcccgtgcctgttccgccgcacaggaaatgccgtct

SEQ ID NO: 3090 - DNA, 38 bp, Artificial Sequence
  Synthetic
accgcgctcgatttggcggcacggcagttatcaggctg

SEQ ID NO: 3091 - DNA, 41 bp, Artificial Sequence
  Synthetic
ccgatgtggattttgccggacacgcggagtttaaagcacgc

SEQ ID NO: 3092 - DNA, 41 bp, Artificial Sequence
  Synthetic
cggcgtaacaaatcgtgcaggtgaacaaatccgcgtgttcg

SEQ ID NO: 3093 - DNA, 35 bp, Artificial Sequence
  Synthetic
acgctgtgctgggtgcgattcctgcaccagctcga

SEQ ID NO: 3094 - DNA, 38 bp, Artificial Sequence
  Synthetic
gacggtaaatttggcggcttcgtgccctgcggatccaa

SEQ ID NO: 3095 - DNA, 37 bp, Artificial Sequence
  Synthetic
gcgccgatgaggacgttcatacaacggcagcgaatgg

SEQ ID NO: 3096 - DNA, 40 bp, Artificial Sequence
  Synthetic
gaccatgcgtgcgttgatttggatgacgcgcgaacgtttg

SEQ ID NO: 3097 - DNA, 35 bp, Artificial Sequence
  Synthetic
gccggatttcgctgccgtttgctcctgaccaccgc

SEQ ID NO: 3098 - DNA, 38 bp, Artificial Sequence
  Synthetic
cgcatattggtgctgagccagatggaagccctcgccga

SEQ ID NO: 3099 - DNA, 39 bp, Artificial Sequence
  Synthetic
cgcggatggctttctcgacttcaccatcggcgtgaaacc

SEQ ID NO: 3100 - DNA, 35 bp, Artificial Sequence
  Synthetic
tgccgctgaaatacgcgcacgctgctcgccgtgat

SEQ ID NO: 3101 - DNA, 40 bp, Artificial Sequence
  Synthetic
cgactttgacgggcaggtagttcgtgtcgaaggcttgcag

SEQ ID NO: 3102 - DNA, 39 bp, Artificial Sequence
  Synthetic
cgatgtgtccgaccgtaccgagcgtaaccataggcagct

SEQ ID NO: 3103 - DNA, 36 bp, Artificial Sequence
  Synthetic
accactgcagtcgccacgctgatgaccgcgctgtcc

SEQ ID NO: 3104 - DNA, 40 bp, Artificial Sequence
  Synthetic
tcgtgaaatactcgcgcgtccgattacccagcaaatgcgc

SEQ ID NO: 3105 - DNA, 35 bp, Artificial Sequence
  Synthetic
gtttcggggaaacgggcgacgcccccatgtgcgat

SEQ ID NO: 3106 - DNA, 49 bp, Artificial Sequence
  Synthetic
gctactcgtgctaaattgatttgtgccaaatcttttgctttagtatcag

SEQ ID NO: 3107 - DNA, 43 bp, Artificial Sequence
  Synthetic
ggagttaaccatggctgaacaaatcaattgtaccaatcaggct

SEQ ID NO: 3108 - DNA, 42 bp, Artificial Sequence
  Synthetic
agctgctgttcggtgttcaattagttttgcctttagtggtaa

SEQ ID NO: 3109 - DNA, 44 bp, Artificial Sequence
  Synthetic
gcaaacagatttaaggcaaaacaacggcacaaaataagccgatt

SEQ ID NO: 3110 - DNA, 36 bp, Artificial Sequence
  Synthetic
aaagcctcgccctcctgccgacggcattgcatcgcg

SEQ ID NO: 3111 - DNA, 40 bp, Artificial Sequence
  Synthetic
cggttacctgacccgtcgtcatcgtcttcaacaacgacca

SEQ ID NO: 3112 - DNA, 40 bp, Artificial Sequence
  Synthetic
caacctctgggcggtaaagctgcccaaacctccatctcac

SEQ ID NO: 3113 - DNA, 38 bp, Artificial Sequence
  Synthetic
cgataccgatgccgtctgaacccccgcgcctgtaaacg

SEQ ID NO: 3114 - DNA, 37 bp, Artificial Sequence
  Synthetic
ggcagaaatggggcgcgaattgctgtgggggttgtct

SEQ ID NO: 3115 - DNA, 40 bp, Artificial Sequence
  Synthetic
cgtgcgggttcgactttaacctcgaaataacgccgctcca

SEQ ID NO: 3116 - DNA, 38 bp, Artificial Sequence
  Synthetic
gcaaaaagaagccgcgtggggcggattgcggatttcgt

SEQ ID NO: 3117 - DNA, 38 bp, Artificial Sequence
  Synthetic
ccagcggctgtatcgaacggtactacacccgcacccat

SEQ ID NO: 3118 - DNA, 38 bp, Artificial Sequence
  Synthetic
tgtgggagtgggcgaacgcccccgtattgaccacgtcc

SEQ ID NO: 3119 - DNA, 38 bp, Artificial Sequence
  Synthetic
ggcggtttcggcggaacacatgcgatgtggcaaacgcg

SEQ ID NO: 3120 - DNA, 37 bp, Artificial Sequence
  Synthetic
gtcgtggtcggtgctggttcgtatggcgatgtaccgg

SEQ ID NO: 3121 - DNA, 34 bp, Artificial Sequence
  Synthetic
gcgcgcggtcgttgatgtcagcgattggggcgtc

SEQ ID NO: 3122 - DNA, 43 bp, Artificial Sequence
  Synthetic
gctttctgttgaaatggagtctgataattgatgacgggggaag

SEQ ID NO: 3123 - DNA, 34 bp, Artificial Sequence
  Synthetic
acgtggtgaaagccggcggcgtgcggcatcgact

SEQ ID NO: 3124 - DNA, 36 bp, Artificial Sequence
  Synthetic
atccatcggcgtggggcagagcgatttggcgagccg

SEQ ID NO: 3125 - DNA, 38 bp, Artificial Sequence
  Synthetic
ggaatgcccgaaagcagcctaataaatcgacgcgccgg

SEQ ID NO: 3126 - DNA, 36 bp, Artificial Sequence
  Synthetic
ggctggacgatacgcagctgtccaactcgcgcaggt

SEQ ID NO: 3127 - DNA, 40 bp, Artificial Sequence
  Synthetic
tgcgatgaagctgtggaaggaaaccgccgcgatacctatg

SEQ ID NO: 3128 - DNA, 39 bp, Artificial Sequence
  Synthetic
cgaccttggacggcaaagtcacatcctcctgccggtttg

SEQ ID NO: 3129 - DNA, 38 bp, Artificial Sequence
  Synthetic
aaagcccttccttcgacagcgaggtatttggggcgaaa

SEQ ID NO: 3130 - DNA, 38 bp, Artificial Sequence
  Synthetic
cagccgttacctcgggggatttccgggtgtattcggca

SEQ ID NO: 3131 - DNA, 41 bp, Artificial Sequence
  Synthetic
tccacgatacggtcgacggtttccggacacttggttttcgg

SEQ ID NO: 3132 - DNA, 38 bp, Artificial Sequence
  Synthetic
ccatactttccctgctgcggacgctatgcgccaatccc

SEQ ID NO: 3133 - DNA, 37 bp, Artificial Sequence
  Synthetic
gggttcgcctagctgccagcttcccgttttcgccagt

SEQ ID NO: 3134 - DNA, 39 bp, Artificial Sequence
  Synthetic
aggatgatggcggtgctgtacctggctgaccaacccctt

SEQ ID NO: 3135 - DNA, 35 bp, Artificial Sequence
  Synthetic
ggtggcggatgtcgggactgctgccgccaatcgct

SEQ ID NO: 3136 - DNA, 41 bp, Artificial Sequence
  Synthetic
acgcctgattcgaggttcagcaccggcagcttcaaaaacac

SEQ ID NO: 3137 - DNA, 37 bp, Artificial Sequence
  Synthetic
agtacggtgccggcgatgcgccaacccaactacaccg

SEQ ID NO: 3138 - DNA, 37 bp, Artificial Sequence
  Synthetic
ggagatgtagccggtcagggccgacagcctgcaaccc

SEQ ID NO: 3139 - DNA, 36 bp, Artificial Sequence
  Synthetic
tgcggagggtgccgagttcacatgggacccgacgac

SEQ ID NO: 3140 - DNA, 38 bp, Artificial Sequence
  Synthetic
ttccctttgagccggggcgctaccctatagcccgcctt

SEQ ID NO: 3141 - DNA, 40 bp, Artificial Sequence
  Synthetic
cgcgctgttctttgaacgacgacgctgacgctgatttccg

SEQ ID NO: 3142 - DNA, 36 bp, Artificial Sequence
  Synthetic
atcaatacgccggcgcaggcgcgcccaagcttcgac

SEQ ID NO: 3143 - DNA, 40 bp, Artificial Sequence
  Synthetic
ggcaacgtcggcgatgtctttgtcgttgccaaagcctttg

SEQ ID NO: 3144 - DNA, 39 bp, Artificial Sequence
  Synthetic
cttcggcacactgcttaccctacataaacagcggcaggg

SEQ ID NO: 3145 - DNA, 40 bp, Artificial Sequence
  Synthetic
ggcttcgttggggatggagattctttggacggcgttacca

SEQ ID NO: 3146 - DNA, 38 bp, Artificial Sequence
  Synthetic
tttccccgaaaccctgccagggaaggttcgggcatcac

SEQ ID NO: 3147 - DNA, 36 bp, Artificial Sequence
  Synthetic
aagtcggcgcgggcaaaggtagcgtgccgggcgtta

SEQ ID NO: 3148 - DNA, 38 bp, Artificial Sequence
  Synthetic
tccacaggtttgttcaagccaactcgtccgtactttgg

SEQ ID NO: 3149 - DNA, 40 bp, Artificial Sequence
  Synthetic
tctgcaatctgttccgcacgaatgcaatgtttatctgcct

SEQ ID NO: 3150 - DNA, 41 bp, Artificial Sequence
  Synthetic
gcctgttttaatcggatcggtcaaatgccttggaaaaacct

SEQ ID NO: 3151 - DNA, 43 bp, Artificial Sequence
  Synthetic
cctttttttcaaatgcgccaacttattgttatggcttggggtg

SEQ ID NO: 3152 - DNA, 38 bp, Artificial Sequence
  Synthetic
ccgtcggcatcaccctcatcaggttgacaagcccggtt

SEQ ID NO: 3153 - DNA, 38 bp, Artificial Sequence
  Synthetic
gcgcggtgttcgacaaataccgttgccggaaaccgtca

SEQ ID NO: 3154 - DNA, 39 bp, Artificial Sequence
  Synthetic
agcctcccttcccgacttggctgccggtaatgttttgcg

SEQ ID NO: 3155 - DNA, 41 bp, Artificial Sequence
  Synthetic
cgggcaggctttgggtttgaacgatgcggtcgttttgaaag

SEQ ID NO: 3156 - DNA, 35 bp, Artificial Sequence
  Synthetic
tcaagggcggccgcctttcgtcaggccggcggtat

SEQ ID NO: 3157 - DNA, 38 bp, Artificial Sequence
  Synthetic
agctgtttaaagaccgcctgcttcgatgcgcgaagggt

SEQ ID NO: 3158 - DNA, 38 bp, Artificial Sequence
  Synthetic
aaatcccgtcctggttcggcgtcgagcagtgtgccttt

SEQ ID NO: 3159 - DNA, 42 bp, Artificial Sequence
  Synthetic
cgcgcaggttatttcttcacgcttgtccgcgtatgatgaacg

SEQ ID NO: 3160 - DNA, 39 bp, Artificial Sequence
  Synthetic
cccggctcggatgtcgatttgcgtttccaagaggcggtc

SEQ ID NO: 3161 - DNA, 35 bp, Artificial Sequence
  Synthetic
tttcggcagcaccccttccccgtcaaaaccggccg

SEQ ID NO: 3162 - DNA, 41 bp, Artificial Sequence
  Synthetic
tgatggagcacctactagtatggttttacccctgcttcacg

SEQ ID NO: 3163 - DNA, 35 bp, Artificial Sequence
  Synthetic
caaaccgcctcgcgcaaaccggcgtacggctcgaa

SEQ ID NO: 3164 - DNA, 37 bp, Artificial Sequence
  Synthetic
ccagcaggttgccgaaaatgccgatgccgtgtccgca

SEQ ID NO: 3165 - DNA, 37 bp, Artificial Sequence
  Synthetic
cccaacccgaacaccaccactcttctgtgccgtccgg

SEQ ID NO: 3166 - DNA, 39 bp, Artificial Sequence
  Synthetic
tgcgccaaaacaaccaaaccaacaggtggcggttgtagc

SEQ ID NO: 3167 - DNA, 38 bp, Artificial Sequence
  Synthetic
gcaccgcccgcattcaggacgatacagtcgcacatggc

SEQ ID NO: 3168 - DNA, 37 bp, Artificial Sequence
  Synthetic
ctttggcgaggcagacgcgcgacctcgacaccgacga

SEQ ID NO: 3169 - DNA, 38 bp, Artificial Sequence
  Synthetic
gggtggatttgccggcgttaactcaaagtcctcgccga

SEQ ID NO: 3170 - DNA, 40 bp, Artificial Sequence
  Synthetic
gtgtttgaggaagcggtggcctccccggtctgattgaagg

SEQ ID NO: 3171 - DNA, 39 bp, Artificial Sequence
  Synthetic
cgcggttgctccaccatgtatgggctggacggacatgtg

SEQ ID NO: 3172 - DNA, 35 bp, Artificial Sequence
  Synthetic
gcggcgaatacatcagcgcgttcggctgcacccca

SEQ ID NO: 3173 - DNA, 38 bp, Artificial Sequence
  Synthetic
gcgggcgcgaaaaatatgcgccacttgggcgtgaatcg

SEQ ID NO: 3174 - DNA, 38 bp, Artificial Sequence
  Synthetic
aagttgccgccgccgatatcgcctttgacaaagttcgg

SEQ ID NO: 3175 - DNA, 38 bp, Artificial Sequence
  Synthetic
cgttgagctgctgcggcttcttgccgcaacacgtatcg

SEQ ID NO: 3176 - DNA, 41 bp, Artificial Sequence
  Synthetic
agcgaacccaactcatactgcgcgagtgcctgatgttcagt

SEQ ID NO: 3177 - DNA, 37 bp, Artificial Sequence
  Synthetic
cacggaaaccgacctgtcgtcagggcgaacagacggt

SEQ ID NO: 3178 - DNA, 36 bp, Artificial Sequence
  Synthetic
tatgcgccccgccgaatccgggaaaacgcccaagcc

SEQ ID NO: 3179 - DNA, 38 bp, Artificial Sequence
  Synthetic
caaacacggcaggcttctttccaatcggggtcggcagg

SEQ ID NO: 3180 - DNA, 36 bp, Artificial Sequence
  Synthetic
acaccgccgtctcacgcagattcgacggccagtgcg

SEQ ID NO: 3181 - DNA, 38 bp, Artificial Sequence
  Synthetic
accccggctacatcgccagggcggtgggcatttgtttg

SEQ ID NO: 3182 - DNA, 36 bp, Artificial Sequence
  Synthetic
atcccccgagcacaccagcgtgtaaacccgcgccac

SEQ ID NO: 3183 - DNA, 39 bp, Artificial Sequence
  Synthetic
tgcaggaaaacggcagcctactcgctggataatggcttg

SEQ ID NO: 3184 - DNA, 35 bp, Artificial Sequence
  Synthetic
tttcctggctgccgctggcagcgttgccgtcaggg

SEQ ID NO: 3185 - DNA, 33 bp, Artificial Sequence
  Synthetic
cagcacgggtacgctgctaaagcagggccgcca

SEQ ID NO: 3186 - DNA, 38 bp, Artificial Sequence
  Synthetic
ccagacgggcgaggtaaaccatccgatccgcgcatcgt

SEQ ID NO: 3187 - DNA, 36 bp, Artificial Sequence
  Synthetic
cgcggataggcgtttttgcgcgcaagccggcaaact

SEQ ID NO: 3188 - DNA, 40 bp, Artificial Sequence
  Synthetic
ctgccgagcaggtctttggcggcaaaaaccaaggctttga

SEQ ID NO: 3189 - DNA, 40 bp, Artificial Sequence
  Synthetic
gccatacctttgctgttgccgacgaccgggcatattcagc

SEQ ID NO: 3190 - DNA, 34 bp, Artificial Sequence
  Synthetic
aaccggcatcgcccaacggcttttcgccgcttgc

SEQ ID NO: 3191 - DNA, 35 bp, Artificial Sequence
  Synthetic
ggcaggctggcggtttaccgcgcggcaggtcgaaa

SEQ ID NO: 3192 - DNA, 42 bp, Artificial Sequence
  Synthetic
tgccattacgtcgtcgttgactaaactttaccgcgaactgcc

SEQ ID NO: 3193 - DNA, 39 bp, Artificial Sequence
  Synthetic
ttccaagttgcgttgggcgtgcaaggcgaagtcatcacc

SEQ ID NO: 3194 - DNA, 37 bp, Artificial Sequence
  Synthetic
ggtcaggtgcaccatcagcagtgctcaaacgcctgcg

SEQ ID NO: 3195 - DNA, 40 bp, Artificial Sequence
  Synthetic
tccgcacacacttccaaggttcgtgaaaacaaacgcggac

SEQ ID NO: 3196 - DNA, 39 bp, Artificial Sequence
  Synthetic
gccccatcatggttttgggctactggccgaaatcacccg

SEQ ID NO: 3197 - DNA, 38 bp, Artificial Sequence
  Synthetic
gccgctgttcgaacgcaaatcccgcagcagcctttcgc

SEQ ID NO: 3198 - DNA, 36 bp, Artificial Sequence
  Synthetic
agtctgcgcccaaatcggcccatttgggctgctcgc

SEQ ID NO: 3199 - DNA, 40 bp, Artificial Sequence
  Synthetic
ttgccgcatcgaagttcggcttgttctttgcccctgaagg

SEQ ID NO: 3200 - DNA, 43 bp, Artificial Sequence
  Synthetic
tgacatttttagaatgatgccgtcttgaaaagcctgaatccgt

SEQ ID NO: 3201 - DNA, 39 bp, Artificial Sequence
  Synthetic
gcggacgtgatggcgaaaatggccgcctttaccgaatgc

SEQ ID NO: 3202 - DNA, 39 bp, Artificial Sequence
  Synthetic
gccctcgccgaagtagtcgttgttggacgaagccgcagc

SEQ ID NO: 3203 - DNA, 35 bp, Artificial Sequence
  Synthetic
cggacgcttgcagcacctgccatccgtgaagcagc

SEQ ID NO: 3204 - DNA, 38 bp, Artificial Sequence
  Synthetic
aattgcgcgtccggccagtcatcacctacaaactcgcc

SEQ ID NO: 3205 - DNA, 36 bp, Artificial Sequence
  Synthetic
cgtcaacgccgccaacgaccaggttgacggcaggtg

SEQ ID NO: 3206 - DNA, 38 bp, Artificial Sequence
  Synthetic
ccccgtgttgccgcaaactaatcgcgtccagattgagg

SEQ ID NO: 3207 - DNA, 38 bp, Artificial Sequence
  Synthetic
gcaaaatcaaacgcgtgcgcccctttttcgcgtgccgc

SEQ ID NO: 3208 - DNA, 38 bp, Artificial Sequence
  Synthetic
acgcataccgccgacctttctgcccttgattgccgttg

SEQ ID NO: 3209 - DNA, 35 bp, Artificial Sequence
  Synthetic
cctcggctgcgccaatttgaaggcttgggcgcaca

SEQ ID NO: 3210 - DNA, 41 bp, Artificial Sequence
  Synthetic
cggcaagcaggaaaaaaacgctatggccttggtcggtatgg

SEQ ID NO: 3211 - DNA, 35 bp, Artificial Sequence
  Synthetic
ctgccgcatctgtgcccacgaacatcggcggtctg

SEQ ID NO: 3212 - DNA, 39 bp, Artificial Sequence
  Synthetic
gtacgttccacgccgtttctgaaccggtatcgaaatcgt

SEQ ID NO: 3213 - DNA, 39 bp, Artificial Sequence
  Synthetic
acaagccccgattccccggttcctttctttgcgatgcct

SEQ ID NO: 3214 - DNA, 37 bp, Artificial Sequence
  Synthetic
catcgttgccgggtattgccccgccggcagaagcgtt

SEQ ID NO: 3215 - DNA, 42 bp, Artificial Sequence
  Synthetic
ccaaatccgccaactctaccgagacaaaaccaaattcccgcc

SEQ ID NO: 3216 - DNA, 35 bp, Artificial Sequence
  Synthetic
tcgccttgggctgacgcagcgtgcctgttccggca

SEQ ID NO: 3217 - DNA, 37 bp, Artificial Sequence
  Synthetic
gcgcccgaaaaacagcttgcggtaactgtgcgcctgc

SEQ ID NO: 3218 - DNA, 35 bp, Artificial Sequence
  Synthetic
acattccggaccgcccctcgcgagcgtttcccagc

SEQ ID NO: 3219 - DNA, 39 bp, Artificial Sequence
  Synthetic
gcataccgcccgccaaaaagagcactaccgctggacgta

SEQ ID NO: 3220 - DNA, 37 bp, Artificial Sequence
  Synthetic
gtccagccacgtctttaccgccggcgttcgtgtcggt

SEQ ID NO: 3221 - DNA, 39 bp, Artificial Sequence
  Synthetic
ggcttccaaaccagccgccgatttcctcgaccttgcctt

SEQ ID NO: 3222 - DNA, 41 bp, Artificial Sequence
  Synthetic
tgcaccgatatgcccgaactctagggttcgtacagggatgc

SEQ ID NO: 3223 - DNA, 38 bp, Artificial Sequence
  Synthetic
gcaaccgcagcaactacgcccgccgcatcatatgggaa

SEQ ID NO: 3224 - DNA, 38 bp, Artificial Sequence
  Synthetic
ccgtcggacaactcgtcttcttccaagcgtgcggatgc

SEQ ID NO: 3225 - DNA, 34 bp, Artificial Sequence
  Synthetic
aaccaggcaggccggcttgccggttgcgcgcaaa

SEQ ID NO: 3226 - DNA, 39 bp, Artificial Sequence
  Synthetic
ttgcgacaggacgggcagcttggaaatggaaaacccgcg

SEQ ID NO: 3227 - DNA, 37 bp, Artificial Sequence
  Synthetic
cgcgacattctgcgcggagaggttgatgtcttgcggc

SEQ ID NO: 3228 - DNA, 40 bp, Artificial Sequence
  Synthetic
cgagttccacacccaagccaacttcatcggtcagcggaat

SEQ ID NO: 3229 - DNA, 36 bp, Artificial Sequence
  Synthetic
cggtatgttcggcggcgttatgctgtcggcgagtgc

SEQ ID NO: 3230 - DNA, 35 bp, Artificial Sequence
  Synthetic
ggcgcgccatccatgttccggtcgctgtctcgcgt

SEQ ID NO: 3231 - DNA, 34 bp, Artificial Sequence
  Synthetic
gcctccgtcggcgcatttaatcgggcccggatgg

SEQ ID NO: 3232 - DNA, 37 bp, Artificial Sequence
  Synthetic
gccgtctgaaagccgtttgcggcactgccgccggatt

SEQ ID NO: 3233 - DNA, 36 bp, Artificial Sequence
  Synthetic
cgtccgaagcgtttggcgtagcaccaaaatgccgcg

SEQ ID NO: 3234 - DNA, 45 bp, Artificial Sequence
  Synthetic
tccggctacaagtgataaggtgggctttaattgacgattatcttg

SEQ ID NO: 3235 - DNA, 38 bp, Artificial Sequence
  Synthetic
ccggctgacgattttggggctccgtccggttcaaaccc

SEQ ID NO: 3236 - DNA, 37 bp, Artificial Sequence
  Synthetic
tcgccgcaaaattccgacccattgtgcggcggaaacc

SEQ ID NO: 3237 - DNA, 37 bp, Artificial Sequence
  Synthetic
cgctgcaaacccacggcaaacgttcggctttggtgcc

SEQ ID NO: 3238 - DNA, 39 bp, Artificial Sequence
  Synthetic
cgggttactttggcagggtcgaaggctccggcgaatacg

SEQ ID NO: 3239 - DNA, 40 bp, Artificial Sequence
  Synthetic
tggcataatcgagcagcagcacctgccctatctggtagcg

SEQ ID NO: 3240 - DNA, 40 bp, Artificial Sequence
  Synthetic
gcctgcgtaattccggcaaccgccggctttgtttatgttg

SEQ ID NO: 3241 - DNA, 36 bp, Artificial Sequence
  Synthetic
ccatacagccggccgccttccgtttgaggcgcgggt

SEQ ID NO: 3242 - DNA, 40 bp, Artificial Sequence
  Synthetic
gagggttttgtcaccggagaggttccgccgactattccca

SEQ ID NO: 3243 - DNA, 37 bp, Artificial Sequence
  Synthetic
acatcggcatcagcgcggggcggcggattttgcctct

SEQ ID NO: 3244 - DNA, 37 bp, Artificial Sequence
  Synthetic
cgacctgcgccaaatcggtaaaacaggatgccgacgc

SEQ ID NO: 3245 - DNA, 39 bp, Artificial Sequence
  Synthetic
acgcgggcttcagctacggaacaagtgcagatgcttggt

SEQ ID NO: 3246 - DNA, 38 bp, Artificial Sequence
  Synthetic
gtcatcgacagcgaccccgttcgttgaggaatcgggct

SEQ ID NO: 3247 - DNA, 40 bp, Artificial Sequence
  Synthetic
cgttcaacgtcgtcatccgcactgcctgaaacaatgccgt

SEQ ID NO: 3248 - DNA, 35 bp, Artificial Sequence
  Synthetic
cagacccgaaaaaccgcgccgaggtcgttgcgcag

SEQ ID NO: 3249 - DNA, 38 bp, Artificial Sequence
  Synthetic
cggcatttccacgccgcaatctttggcggatgcggtcg

SEQ ID NO: 3250 - DNA, 39 bp, Artificial Sequence
  Synthetic
ccgtcaaagccgttgccgaaacgccgcaaaccaatttcg

SEQ ID NO: 3251 - DNA, 41 bp, Artificial Sequence
  Synthetic
ggggttttcaggcggcatgaaacatccgatacagccgtccc

SEQ ID NO: 3252 - DNA, 36 bp, Artificial Sequence
  Synthetic
cagccaggcaaacgccatcacccgcctgccaaaacc

SEQ ID NO: 3253 - DNA, 39 bp, Artificial Sequence
  Synthetic
tcagggtaacgcctgccgctacccggaaaaacatacgcg

SEQ ID NO: 3254 - DNA, 34 bp, Artificial Sequence
  Synthetic
ccgcgttcgaccacggtttttgcggtcggtgcgt

SEQ ID NO: 3255 - DNA, 36 bp, Artificial Sequence
  Synthetic
ttgccgccgcattgggcaaacagggcatattcgcgc

SEQ ID NO: 3256 - DNA, 38 bp, Artificial Sequence
  Synthetic
gcggtagtagccgtagcggatcggcaggcatgataggc

SEQ ID NO: 3257 - DNA, 38 bp, Artificial Sequence
  Synthetic
gctgatggtgcgcgaaacgccatttccgttacccgctt

SEQ ID NO: 3258 - DNA, 37 bp, Artificial Sequence
  Synthetic
tgcctgcccttccaatgccgtcgtcgcttcgtttgcc

SEQ ID NO: 3259 - DNA, 37 bp, Artificial Sequence
  Synthetic
ccccaaatgccgaccagggtgcaaaattgccgccgcc

SEQ ID NO: 3260 - DNA, 37 bp, Artificial Sequence
  Synthetic
acgcgtttgttggcggcggccgtcgccgtattcaaac

SEQ ID NO: 3261 - DNA, 38 bp, Artificial Sequence
  Synthetic
gggcatcgccgtattggtacgatggcgaacgggtttgc

SEQ ID NO: 3262 - DNA, 37 bp, Artificial Sequence
  Synthetic
ggcaaatgccgtctgcgcgcgcaaggaagacggttcg

SEQ ID NO: 3263 - DNA, 40 bp, Artificial Sequence
  Synthetic
ggcgcgtatgtgctgcaccttagaatgtttgttgcgccgg

SEQ ID NO: 3264 - DNA, 35 bp, Artificial Sequence
  Synthetic
gcccgaagaaacccgccaagcgtcgccgaatctgc

SEQ ID NO: 3265 - DNA, 39 bp, Artificial Sequence
  Synthetic
cgcgccattttgaaagacgcgttgtccaatgcgctggtg

SEQ ID NO: 3266 - DNA, 34 bp, Artificial Sequence
  Synthetic
gccgacggcgtatgtgcatcgcgagcgtgccttt

SEQ ID NO: 3267 - DNA, 39 bp, Artificial Sequence
  Synthetic
cccctgatcaaccacggctttggtggaaaggatgtcggc

SEQ ID NO: 3268 - DNA, 40 bp, Artificial Sequence
  Synthetic
gccaaagaagccggagccaaactgcaatgggaaggaacgg

SEQ ID NO: 3269 - DNA, 37 bp, Artificial Sequence
  Synthetic
ttcggcaaccccgcaaccgcttgcgtgcagagtaccg

SEQ ID NO: 3270 - DNA, 47 bp, Artificial Sequence
  Synthetic
gtgctaaatctaccaagttgcaaatttgtagctactttgatattccg

SEQ ID NO: 3271 - DNA, 40 bp, Artificial Sequence
  Synthetic
tggtaaggtgtcacttgctccttatgcaacgaaagcttgt

SEQ ID NO: 3272 - DNA, 43 bp, Artificial Sequence
  Synthetic
tgcttagtctttctttttctggagaaaaaggaccgtctgttgc

SEQ ID NO: 3273 - DNA, 43 bp, Artificial Sequence
  Synthetic
gtaacccagctaggcaatttgttatagaagtgttcctgcagct

SEQ ID NO: 3274 - DNA, 43 bp, Artificial Sequence
  Synthetic
cgatgcccatttgtattgcaacatcatataccagcaacaaggg

SEQ ID NO: 3275 - DNA, 46 bp, Artificial Sequence
  Synthetic
tcctggcatcttcaaaaaacaatagtgggaaagttgattatgatgg

SEQ ID NO: 3276 - DNA, 42 bp, Artificial Sequence
  Synthetic
tccatctatacctccagcactttactagggatccggccatag

SEQ ID NO: 3277 - DNA, 45 bp, Artificial Sequence
  Synthetic
gaacaatagatgaagcaccaggctattccactagaacctataggc

SEQ ID NO: 3278 - DNA, 45 bp, Artificial Sequence
  Synthetic
tggaacctgtgttgtgtatctagtagccacctgtacaaagtactc

SEQ ID NO: 3279 - DNA, 46 bp, Artificial Sequence
  Synthetic
ccctgtgtgtctgtagtggtaacttttctgacgaatctttattgga

SEQ ID NO: 3280 - DNA, 46 bp, Artificial Sequence
  Synthetic
caaactaaccgttctctttgaggatgttttgcgtttacagttacct

SEQ ID NO: 3281 - DNA, 43 bp, Artificial Sequence
  Synthetic
tgacgagcataaagttgttctcttttggccagattttgtgcag

SEQ ID NO: 3282 - DNA, 48 bp, Artificial Sequence
  Synthetic
gggatccattgcattaatatgagctttggaagtagaaatagtaatgca

SEQ ID NO: 3283 - DNA, 47 bp, Artificial Sequence
  Synthetic
aagcagtcaggatattcaagtacaacaatgttaagctgtgaaacttg

SEQ ID NO: 3284 - DNA, 42 bp, Artificial Sequence
  Synthetic
tcttctccatactctttcattgcccgacaatgcttcaatccg

SEQ ID NO: 3285 - DNA, 45 bp, Artificial Sequence
  Synthetic
tccttgtaatcatacaaatctggcagcctggacagtagtaaacag

SEQ ID NO: 3286 - DNA, 44 bp, Artificial Sequence
  Synthetic
ctgaaaacaaggaggcccatcattgaaccttttctgaaaacaac

SEQ ID NO: 3287 - DNA, 42 bp, Artificial Sequence
  Synthetic
agctgactcgttttcttcatgtttaagcaagtactggcggaa

SEQ ID NO: 3288 - DNA, 42 bp, Artificial Sequence
  Synthetic
tctcatgcttgcaatgtgttcaactggatagagctcgatgag

SEQ ID NO: 3289 - DNA, 44 bp, Artificial Sequence
  Synthetic
tcacaaagtttaccacgtcggatggtttcatcataaaaggaaga

SEQ ID NO: 3290 - DNA, 45 bp, Artificial Sequence
  Synthetic
gtctttctctttgacagaggactcgctccttcagtcactacaaca

SEQ ID NO: 3291 - DNA, 38 bp, Artificial Sequence
  Synthetic
tctgttcgctgaaggggtcctggaggaagccacacgga

SEQ ID NO: 3292 - DNA, 39 bp, Artificial Sequence
  Synthetic
tggctccactggtccccaatcggaccccctttcaaagtg

SEQ ID NO: 3293 - DNA, 40 bp, Artificial Sequence
  Synthetic
gacgcacgtccactcggatgtagcttcccagagagaagcg

SEQ ID NO: 3294 - DNA, 41 bp, Artificial Sequence
  Synthetic
catgcaaggagtcccggagtcttccccttatgtccagtccc

SEQ ID NO: 3295 - DNA, 40 bp, Artificial Sequence
  Synthetic
ccaggggaggattcaccgacagttctcgagggccttcctt

SEQ ID NO: 3296 - DNA, 45 bp, Artificial Sequence
  Synthetic
aggatcctcgaacatagctgtttcgaaaccggtacatataaaagt

SEQ ID NO: 3297 - DNA, 45 bp, Artificial Sequence
  Synthetic
ggcatttgacatctatgacaccttatatggtgcaacattagaagc

SEQ ID NO: 3298 - DNA, 45 bp, Artificial Sequence
  Synthetic
gttcgtagcagcgtaggtcaattgaagatgtaatactagatctgg

SEQ ID NO: 3299 - DNA, 42 bp, Artificial Sequence
  Synthetic
ctcctcatttgtaccttcacagtccttggtgtgccatcagtg

SEQ ID NO: 3300 - DNA, 41 bp, Artificial Sequence
  Synthetic
ttaaattgcgcactgcctttgttaacccaggcattgtttca

SEQ ID NO: 3301 - DNA, 45 bp, Artificial Sequence
  Synthetic
ccaaatctaatctggaccaggtggcaatgggaatcctgtatatgc

SEQ ID NO: 3302 - DNA, 43 bp, Artificial Sequence
  Synthetic
cgtgtttattaacgactgcaatgctgtggtgccctctactgtt

SEQ ID NO: 3303 - DNA, 46 bp, Artificial Sequence
  Synthetic
cgtaatactgcttatatgccccttgtaaaggtactggagatgttga

SEQ ID NO: 3304 - DNA, 39 bp, Artificial Sequence
  Synthetic
cggtggtgtcaggtccactgaggcaccaaggaaaccgag

SEQ ID NO: 3305 - DNA, 42 bp, Artificial Sequence
  Synthetic
aggggctccagattgtataatactctgtgggtcctacagaac

SEQ ID NO: 3306 - DNA, 40 bp, Artificial Sequence
  Synthetic
agatgtaagggccggacgatcagtagtactgtagcacctg

SEQ ID NO: 3307 - DNA, 45 bp, Artificial Sequence
  Synthetic
atgttgtaggggaatatgacatgcatatgcagaccctgatacagt

SEQ ID NO: 3308 - DNA, 48 bp, Artificial Sequence
  Synthetic
gcatacgtttacggcgtttatggcatggggataattattatttatggc

SEQ ID NO: 3309 - DNA, 41 bp, Artificial Sequence
  Synthetic
aggatcaggtaggtgcactccgaaattcctaaggtatctgc

SEQ ID NO: 3310 - DNA, 50 bp, Artificial Sequence
  Synthetic
cacgttgtgtctgtgtatttttacacagttatgtattataggttgtacac

SEQ ID NO: 3311 - DNA, 47 bp, Artificial Sequence
  Synthetic
cccccgccttattataaaaatgtctacagcatgtttttttttcttcg

SEQ ID NO: 3312 - DNA, 47 bp, Artificial Sequence
  Synthetic
acacaccttacataacataccacaaaacgcaaaaaacgtaaacttac

SEQ ID NO: 3313 - DNA, 36 bp, Artificial Sequence
  Synthetic
ctccacccttctgcagacggtggagcacccccccta

SEQ ID NO: 3314 - DNA, 42 bp, Artificial Sequence
  Synthetic
ggaccctatcaggcagtacggtgcaagcccacctatatgtgt

SEQ ID NO: 3315 - DNA, 40 bp, Artificial Sequence
  Synthetic
ccagcaagcgtactatctggcatctagtaggcccgctggt

SEQ ID NO: 3316 - DNA, 40 bp, Artificial Sequence
  Synthetic
tgtacggattggcgggaaccttgttctccttccacttgcc

SEQ ID NO: 3317 - DNA, 43 bp, Artificial Sequence
  Synthetic
caccagggattgtataggggtactttgttacagtccaaagtgg

SEQ ID NO: 3318 - DNA, 46 bp, Artificial Sequence
  Synthetic
gtggaattcacagggtcataaaagttcaggccatttgtattttgag

SEQ ID NO: 3319 - DNA, 40 bp, Artificial Sequence
  Synthetic
agctgaagcaggcgtaaccaaagtcaccgcatagctctgc

SEQ ID NO: 3320 - DNA, 39 bp, Artificial Sequence
  Synthetic
cgatgctgcactggatgttaacgctggtgactttctgtg

SEQ ID NO: 3321 - DNA, 41 bp, Artificial Sequence
  Synthetic
gcatagccaaccctgcgaaaaccacggttgatggtttgccc

SEQ ID NO: 3322 - DNA, 42 bp, Artificial Sequence
  Synthetic
ccagctccacatggtggttgatacacccaataaccgttgacg

SEQ ID NO: 3323 - DNA, 43 bp, Artificial Sequence
  Synthetic
tgggggcaattaaaatttgcactgccactcttgatacaaaacc

SEQ ID NO: 3324 - DNA, 39 bp, Artificial Sequence
  Synthetic
ggtgtagggattactccaggggtcctaaccgaagctcca

SEQ ID NO: 3325 - DNA, 43 bp, Artificial Sequence
  Synthetic
agtttgagcttctgttgatgacaaacattgttgaagccttcga

SEQ ID NO: 3326 - DNA, 46 bp, Artificial Sequence
  Synthetic
cccaagaaaggtgttaagtttttcagagtacaatcaccacaactag

SEQ ID NO: 3327 - DNA, 40 bp, Artificial Sequence
  Synthetic
ggccactcacccatcaagcattttgacatgctaggcggct

SEQ ID NO: 3328 - DNA, 42 bp, Artificial Sequence
  Synthetic
tcagttgggtccggtctagcacttgttcaaattactggagag

SEQ ID NO: 3329 - DNA, 41 bp, Artificial Sequence
  Synthetic
ggtggtgaaggagggaggtttgtcatgtcctgaaagcctgc

SEQ ID NO: 3330 - DNA, 44 bp, Artificial Sequence
  Synthetic
cagttttgaagctaatcacgtcggtgggaaagagtgagttttcg

SEQ ID NO: 3331 - DNA, 40 bp, Artificial Sequence
  Synthetic
gtccagaacagccttgcggggctaagtcccacatcactgg

SEQ ID NO: 3332 - DNA, 41 bp, Artificial Sequence
  Synthetic
cctcgggtgtgatggtactgtctgttgtcgatgtggtcacc

SEQ ID NO: 3333 - DNA, 40 bp, Artificial Sequence
  Synthetic
gcgctcttccaaattacggtgccgaacaggctggcatgaa

SEQ ID NO: 3334 - DNA, 42 bp, Artificial Sequence
  Synthetic
gcagatcttctacaggcaccgtttgaggacaaacttcccgag

SEQ ID NO: 3335 - DNA, 38 bp, Artificial Sequence
  Synthetic
aaagtggtgtaccgagccaccttctctggcatgctaca

SEQ ID NO: 3336 - DNA, 40 bp, Artificial Sequence
  Synthetic
ggcttcacccgaaacggttctggggagaccccgggcttaa

SEQ ID NO: 3337 - DNA, 44 bp, Artificial Sequence
  Synthetic
cagtggttatcaggatggcaatttctgtttctctcaccatttcc

SEQ ID NO: 3338 - DNA, 45 bp, Artificial Sequence
  Synthetic
ggaaagcctaatcgaattgtccttatacagaaattggtcaaagcc

SEQ ID NO: 3339 - DNA, 38 bp, Artificial Sequence
  Synthetic
acacaaacatgcagccatgccaagtgtgcatagcatgg

SEQ ID NO: 3340 - DNA, 43 bp, Artificial Sequence
  Synthetic
gaggatagcaggagcactccggaaaatcattcatactagcaca

SEQ ID NO: 3341 - DNA, 42 bp, Artificial Sequence
  Synthetic
tccatcatcaaaggcccagccattgcttggatcctaacaatg

SEQ ID NO: 3342 - DNA, 48 bp, Artificial Sequence
  Synthetic
atcgtacttttcagcagtatccaatttgaattgtcttattgttcgttg

SEQ ID NO: 3343 - DNA, 47 bp, Artificial Sequence
  Synthetic
tgaagtagcaaaaacacacactcttattatattgggttgacacctgt

SEQ ID NO: 3344 - DNA, 50 bp, Artificial Sequence
  Synthetic
tgtgaagcattatccacatcatcaaatatatttgaagagagtacagatgg

SEQ ID NO: 3345 - DNA, 46 bp, Artificial Sequence
  Synthetic
tgtacctgagaaacatttgcagttaaaagacgattatttcaggaca

SEQ ID NO: 3346 - DNA, 50 bp, Artificial Sequence
  Synthetic
tcgtctaacaagccaattttaccataggtaaagtcatttctttcatgaac

SEQ ID NO: 3347 - DNA, 39 bp, Artificial Sequence
  Synthetic
gcgatggggtcttggagtacctcgcagactccagccaag

SEQ ID NO: 3348 - DNA, 38 bp, Artificial Sequence
  Synthetic
cttgtcgcgcaagtagtcgagaatctgctgtcccgtct

SEQ ID NO: 3349 - DNA, 43 bp, Artificial Sequence
  Synthetic
ggaagtgcttcaggaattggttttatggattgggaattggcac

SEQ ID NO: 3350 - DNA, 41 bp, Artificial Sequence
  Synthetic
gaaagtaggatccggtgcagccttttccgatgatgtcactt

SEQ ID NO: 3351 - DNA, 43 bp, Artificial Sequence
  Synthetic
gcattaggattttctgtgtcaagcaaccgttaggggttggaac

SEQ ID NO: 3352 - DNA, 48 bp, Artificial Sequence
  Synthetic
cctgatttgtcctgttgtaatcgtcaatacaagatggtgatatgtgtg

SEQ ID NO: 3353 - DNA, 39 bp, Artificial Sequence
  Synthetic
cagaaccggtatgcaatagcccagagctgtcaaccgttt

SEQ ID NO: 3354 - DNA, 42 bp, Artificial Sequence
  Synthetic
ctgatgatctttcgacgatgtaggcaacccttcttgtgacct

SEQ ID NO: 3355 - DNA, 43 bp, Artificial Sequence
  Synthetic
cgaaaagaatgctctttcccctgcaaaagagcggtttttaccc

SEQ ID NO: 3356 - DNA, 42 bp, Artificial Sequence
  Synthetic
tgaaagaacgtgtccataccatggggccaaacattgcgagta

SEQ ID NO: 3357 - DNA, 39 bp, Artificial Sequence
  Synthetic
taccagccagcgactagtccagaggactatttggagcca

SEQ ID NO: 3358 - DNA, 48 bp, Artificial Sequence
  Synthetic
atgctcatcgagtgttttttgatttagattgatgaccaaatacaagac

SEQ ID NO: 3359 - DNA, 42 bp, Artificial Sequence
  Synthetic
cggttccgcagaccactatggcatgagtgtcgaacagcctcc

SEQ ID NO: 3360 - DNA, 39 bp, Artificial Sequence
  Synthetic
gcggcaacaagtaaactccaccgcccacaggacgtcaag

SEQ ID NO: 3361 - DNA, 38 bp, Artificial Sequence
  Synthetic
tgacagcgtgggggtgatttgtgccctgtgtcctggaa

SEQ ID NO: 3362 - DNA, 41 bp, Artificial Sequence
  Synthetic
acagtatgggtgcggccatcactgggccaaggttatactgg

SEQ ID NO: 3363 - DNA, 40 bp, Artificial Sequence
  Synthetic
ttggtcgaatgcggcaagggtcaactcttctgggtgtcca

SEQ ID NO: 3364 - DNA, 40 bp, Artificial Sequence
  Synthetic
acaaaccccgtggagttcatcctaacattaggccccccgc

SEQ ID NO: 3365 - DNA, 40 bp, Artificial Sequence
  Synthetic
gtgtggtggtgtgcaggagcaattggacctatggtgagcg

SEQ ID NO: 3366 - DNA, 39 bp, Artificial Sequence
  Synthetic
cccatgattccctgcggccgaagcaacctgcaagaacgt

SEQ ID NO: 3367 - DNA, 41 bp, Artificial Sequence
  Synthetic
ccacccttaacctgcaacgggtttcatagcccgagtggagg

SEQ ID NO: 3368 - DNA, 40 bp, Artificial Sequence
  Synthetic
cgcggagaatacgatgggttcttgaaggattgggcagcgt

SEQ ID NO: 3369 - DNA, 41 bp, Artificial Sequence
  Synthetic
gccccatggaagagtgtccacaggtgcagttcttatccacg

SEQ ID NO: 3370 - DNA, 40 bp, Artificial Sequence
  Synthetic
aacacctaccacatgcccggttacctcaagggttcctcgg

SEQ ID NO: 3371 - DNA, 37 bp, Artificial Sequence
  Synthetic
ctccggtcctgatgttggggtgttcgggttcggggca

SEQ ID NO: 3372 - DNA, 41 bp, Artificial Sequence
  Synthetic
acgcccagactggtcaattgtttaaagggcggtaggcatct

SEQ ID NO: 3373 - DNA, 40 bp, Artificial Sequence
  Synthetic
tctccctgtacggcccctacgagactactacagtgcccca

SEQ ID NO: 3374 - DNA, 42 bp, Artificial Sequence
  Synthetic
gagtggggccagttaaagtcggccagctgggatacaatgtgg

SEQ ID NO: 3375 - DNA, 38 bp, Artificial Sequence
  Synthetic
aagaggggaggtcaccgcggaccttgccgggtaatccc

SEQ ID NO: 3376 - DNA, 38 bp, Artificial Sequence
  Synthetic
atgtggcgccgcagaacgtcaatactctgccctggagc

SEQ ID NO: 3377 - DNA, 39 bp, Artificial Sequence
  Synthetic
aagggcactccggggagttgcggcactgacagacttcaa

SEQ ID NO: 3378 - DNA, 40 bp, Artificial Sequence
  Synthetic
acgccatccagctccgtgaaacaatctgaagtgtccctgc

SEQ ID NO: 3379 - DNA, 38 bp, Artificial Sequence
  Synthetic
gcaggtggccttgagagaggtctccaccctctctggca

SEQ ID NO: 3380 - DNA, 36 bp, Artificial Sequence
  Synthetic
gcaggtggtatcgggcagcgacttggaagcgaccgg

SEQ ID NO: 3381 - DNA, 40 bp, Artificial Sequence
  Synthetic
gccccagtccaggtgtatgacacagggtcatggtcaaccg

SEQ ID NO: 3382 - DNA, 41 bp, Artificial Sequence
  Synthetic
cgccgtatccgtacttggaacgccctagaggaagcctgtgg

SEQ ID NO: 3383 - DNA, 42 bp, Artificial Sequence
  Synthetic
gtcgtcaccacataccaggagcgctttagcctcctgtagagc

SEQ ID NO: 3384 - DNA, 41 bp, Artificial Sequence
  Synthetic
gcactatccgagcccacaaggcggttaattcctggctaggg

SEQ ID NO: 3385 - DNA, 38 bp, Artificial Sequence
  Synthetic
atggcggccctacctccctgttggagacatcgggctcg

SEQ ID NO: 3386 - DNA, 43 bp, Artificial Sequence
  Synthetic
tactgcgtaggtgcactaggcttgtagatctgttctctaaacg

SEQ ID NO: 3387 - DNA, 42 bp, Artificial Sequence
  Synthetic
ggtgttcacgtgcctccgatagggttagagacgtgctagtgc

SEQ ID NO: 3388 - DNA, 45 bp, Artificial Sequence
  Synthetic
gtggttgaatgactttgacttttgagagtgccaagaaatttgaca

SEQ ID NO: 3389 - DNA, 43 bp, Artificial Sequence
  Synthetic
cgcttattatagcagccaacatagggcaagggaggtaggacta

SEQ ID NO: 3390 - DNA, 38 bp, Artificial Sequence
  Synthetic
tccaagcaccttttacgggcattgttgagtcctgcggt

SEQ ID NO: 3391 - DNA, 46 bp, Artificial Sequence
  Synthetic
gaccaccagttacatatgccataatgacgccatggtttatacttca

SEQ ID NO: 3392 - DNA, 41 bp, Artificial Sequence
  Synthetic
acctaagttgagtgatcgcaacttgttaacaaggcactcga

SEQ ID NO: 3393 - DNA, 40 bp, Artificial Sequence
  Synthetic
caggagacaatgcgcagtattaccagtctgtgtaaatggc

SEQ ID NO: 3394 - DNA, 46 bp, Artificial Sequence
  Synthetic
tgcatcgtcctcttcttcctcacttttcatcacgtatgtattgttc

SEQ ID NO: 3395 - DNA, 46 bp, Artificial Sequence
  Synthetic
aggtgtatgttagcagcatttacaatgtgttgacatcgttaaggag

SEQ ID NO: 3396 - DNA, 42 bp, Artificial Sequence
  Synthetic
aagactgaagtggtttagcacctcacaggacatcttacttgc

SEQ ID NO: 3397 - DNA, 42 bp, Artificial Sequence
  Synthetic
tcacctaccatgtaaggtgcatgaacatgcttagaggtgaag

SEQ ID NO: 3398 - DNA, 47 bp, Artificial Sequence
  Synthetic
gctctaacatccatgcatataggcaaactgtatcctggaatttgaga

SEQ ID NO: 3399 - DNA, 44 bp, Artificial Sequence
  Synthetic
tgatgacgaagtgaggtatccattccgtagtgtcagtatcatca

SEQ ID NO: 3400 - DNA, 47 bp, Artificial Sequence
  Synthetic
agcttcactacgtagtgtgtcatcatgtaaatcatgagggtaagact

SEQ ID NO: 3401 - DNA, 46 bp, Artificial Sequence
  Synthetic
ggtagtagttttctgaccacaatgtcatgctaatttggaatctgca

SEQ ID NO: 3402 - DNA, 44 bp, Artificial Sequence
  Synthetic
tggtcctttgtactctgacatcttaaggagaccctctatcgtat

SEQ ID NO: 3403 - DNA, 40 bp, Artificial Sequence
  Synthetic
ccactacatcgccattcaagtccaaagccagcttcacgag

SEQ ID NO: 3404 - DNA, 47 bp, Artificial Sequence
  Synthetic
tggtttaagtatgacattgcctacaaccatacagaaggaagtcatag

SEQ ID NO: 3405 - DNA, 46 bp, Artificial Sequence
  Synthetic
ggaaaagaaccttcacagaaatccagctccttcttattgtaatggc

SEQ ID NO: 3406 - DNA, 39 bp, Artificial Sequence
  Synthetic
ctaaccattgcagaaacgggttcttggctcatgtggttt

SEQ ID NO: 3407 - DNA, 44 bp, Artificial Sequence
  Synthetic
gtcagtagggttgattggtcttttcattagtgatgaagttgctc

SEQ ID NO: 3408 - DNA, 47 bp, Artificial Sequence
  Synthetic
gcaacaagtgccttaagtttttccagtttccgttaagatgtttgatg

SEQ ID NO: 3409 - DNA, 45 bp, Artificial Sequence
  Synthetic
gcagctgttcagataaagacatgtacatatcaatgcccaagtagc

SEQ ID NO: 3410 - DNA, 46 bp, Artificial Sequence
  Synthetic
accagcatgtttatttgcaaaacaaaaatcattggttacaaagcca

SEQ ID NO: 3411 - DNA, 43 bp, Artificial Sequence
  Synthetic
tctggacgaagctcactataagaaagctatgggcaaacctgtg

SEQ ID NO: 3412 - DNA, 39 bp, Artificial Sequence
  Synthetic
ccaccagccactactgaagcttactcctcttgtgcaacc

SEQ ID NO: 3413 - DNA, 47 bp, Artificial Sequence
  Synthetic
cgctacgcaattttaggtacatttcgttacatttagtaccttcgagg

SEQ ID NO: 3414 - DNA, 40 bp, Artificial Sequence
  Synthetic
aaccactctgcagaacagcagctgatgttctctaccaacc

SEQ ID NO: 3415 - DNA, 46 bp, Artificial Sequence
  Synthetic
cggacaaatttatacttgggtgtctaaaattgtctgcttaggctta

SEQ ID NO: 3416 - DNA, 47 bp, Artificial Sequence
  Synthetic
acatgatcttgtgtcaaaggttcatagattcaccactactttgaatg

SEQ ID NO: 3417 - DNA, 48 bp, Artificial Sequence
  Synthetic
gaccactgtgtactttgaacaagacatcattggatgcttttaactttc

SEQ ID NO: 3418 - DNA, 50 bp, Artificial Sequence
  Synthetic
cgacaccagaatagttagaggttactctactatggtaatgctttagatca

SEQ ID NO: 3419 - DNA, 43 bp, Artificial Sequence
  Synthetic
cctccaatacccaacaacttaatgtatatgaactcccaggggc

SEQ ID NO: 3420 - DNA, 47 bp, Artificial Sequence
  Synthetic
acaacctattaatgtctacagcaccagaagatggtttctcttttgtc

SEQ ID NO: 3421 - DNA, 43 bp, Artificial Sequence
  Synthetic
gcactagttacttttgccctcttgcaggctatgacccaaatgt

SEQ ID NO: 3422 - DNA, 43 bp, Artificial Sequence
  Synthetic
gtcgtagtgctactggactcagttggcctcttattgttacagc

SEQ ID NO: 3423 - DNA, 42 bp, Artificial Sequence
  Synthetic
gcaggtacttctgtagcatttccatatggtgctgggcagttt

SEQ ID NO: 3424 - DNA, 45 bp, Artificial Sequence
  Synthetic
gggtcattagcacaagtggtagtaaaggattctgtgacttgaaag

SEQ ID NO: 3425 - DNA, 48 bp, Artificial Sequence
  Synthetic
ccatgtcaccatctactctaaacttataacttggttaaagattgtcca

SEQ ID NO: 3426 - DNA, 44 bp, Artificial Sequence
  Synthetic
cctacaatgcctgcatcacgtgtacgccaatcattattaaagac

SEQ ID NO: 3427 - DNA, 48 bp, Artificial Sequence
  Synthetic
ggatacacctatcatccaaacagtttctcttcgaccgttattttaaat

SEQ ID NO: 3428 - DNA, 47 bp, Artificial Sequence
  Synthetic
tgacagtttgaaaagcaacattgtttattgctagataaacgcactac

SEQ ID NO: 3429 - DNA, 48 bp, Artificial Sequence
  Synthetic
acagatagagacaccagctacggaactcaaatgaatcttaagtatgcc

SEQ ID NO: 3430 - DNA, 43 bp, Artificial Sequence
  Synthetic
cgttagctaacctgtagaaacgggttcttgctcgcaaacataa

SEQ ID NO: 3431 - DNA, 46 bp, Artificial Sequence
  Synthetic
cggcatcatcagaaagaatcatcatatcatgaattcgtggatgagt

SEQ ID NO: 3432 - DNA, 47 bp, Artificial Sequence
  Synthetic
agacatcagcatactcctgattaggacttatgattgaaaggttcgtg

SEQ ID NO: 3433 - DNA, 45 bp, Artificial Sequence
  Synthetic
gcaaacatagggattaacagacaacgaccattcctatgttgcaag

SEQ ID NO: 3434 - DNA, 40 bp, Artificial Sequence
  Synthetic
ttcctcagtggctttgagcgccaacacttgtactgagaga

SEQ ID NO: 3435 - DNA, 43 bp, Artificial Sequence
  Synthetic
gtgttgggtacaagccagtaatcttagtgcacctactctagtg

SEQ ID NO: 3436 - DNA, 44 bp, Artificial Sequence
  Synthetic
agcattgacaacactcaagtcataaatgcattgccagaaacaac

SEQ ID NO: 3437 - DNA, 47 bp, Artificial Sequence
  Synthetic
tgattgcagatgaaacatcatgtgtaaaagcacacaaggataagtca

SEQ ID NO: 3438 - DNA, 47 bp, Artificial Sequence
  Synthetic
cgacgtggtatttctagacttgtaacattttgtgcataatgtctgat

SEQ ID NO: 3439 - DNA, 44 bp, Artificial Sequence
  Synthetic
aaagccaatccacgcacgaaggttaccctaatatgtttatcacc

SEQ ID NO: 3440 - DNA, 42 bp, Artificial Sequence
  Synthetic
gtaagctcaaagccatgcgcagtgatacactgaaaggattgt

SEQ ID NO: 3441 - DNA, 45 bp, Artificial Sequence
  Synthetic
caatgcagacttcacaaccatgtattataggagatgaactgaggg

SEQ ID NO: 3442 - DNA, 44 bp, Artificial Sequence
  Synthetic
catcacagcctggtaagttcaagaatgcaattgtgtgtaggttt

SEQ ID NO: 3443 - DNA, 45 bp, Artificial Sequence
  Synthetic
cctggtaaatgtattccacaggttaatttctgctggatttagcct

SEQ ID NO: 3444 - DNA, 43 bp, Artificial Sequence
  Synthetic
acaagacagtaagtgaagaacaagctctgcacaatgactgaca

SEQ ID NO: 3445 - DNA, 45 bp, Artificial Sequence
  Synthetic
cctcgagcttatatcgctgtatgaataagcccagatcacaaatgg

SEQ ID NO: 3446 - DNA, 50 bp, Artificial Sequence
  Synthetic
ccaaagcatgaatgaaatttcagcaaataaagtcacaagatttgtcagtg

SEQ ID NO: 3447 - DNA, 44 bp, Artificial Sequence
  Synthetic
ccaattaaagtagaatctgcgtcggctcagacaatggttgccaa

SEQ ID NO: 3448 - DNA, 45 bp, Artificial Sequence
  Synthetic
tgccaagatagttagccccaattggacagcttttgttacaaatgt

SEQ ID NO: 3449 - DNA, 43 bp, Artificial Sequence
  Synthetic
tgtctgtgtacccatgggtttgtaactttgaattgtgtgacaa

SEQ ID NO: 3450 - DNA, 44 bp, Artificial Sequence
  Synthetic
acttgagcataaatgtagttggcttttttcacctgctcaagaca

SEQ ID NO: 3451 - DNA, 50 bp, Artificial Sequence
  Synthetic
gcaaagatcattcaacttagtggcactacaactcaacatttttttcaacc

SEQ ID NO: 3452 - DNA, 43 bp, Artificial Sequence
  Synthetic
gccaataacaattaagagcaggtggtaggccctttgagagaga

SEQ ID NO: 3453 - DNA, 50 bp, Artificial Sequence
  Synthetic
agcatttgttccaggtgtaattacacatctgaaatattagacatttcacc

SEQ ID NO: 3454 - DNA, 47 bp, Artificial Sequence
  Synthetic
agcaatggtgttattagagtaagcaactagccaaaaatctattgtgg

SEQ ID NO: 3455 - DNA, 46 bp, Artificial Sequence
  Synthetic
gcattcgccatattgcttcatgaaaggtcttttattgaggacttgc

SEQ ID NO: 3456 - DNA, 49 bp, Artificial Sequence
  Synthetic
tgcagttgatgttgttgtaagtgattctatgagaaccaaaaacaaatcg

SEQ ID NO: 3457 - DNA, 42 bp, Artificial Sequence
  Synthetic
ggacataaggtggtagccctttctgagtgtgttcttggacaa

SEQ ID NO: 3458 - DNA, 48 bp, Artificial Sequence
  Synthetic
gctcttctttgaatgagtcaagctctcgttattggcatcattaacaac

SEQ ID NO: 3459 - DNA, 42 bp, Artificial Sequence
  Synthetic
aagagcatgcacccttgaggcatcgtcatggttacaatcttg

SEQ ID NO: 3460 - DNA, 42 bp, Artificial Sequence
  Synthetic
gcaaatgaactggaagcccttatgctgtttttcagagcgcta

SEQ ID NO: 3461 - DNA, 46 bp, Artificial Sequence
  Synthetic
gtgaaatagccatgtacaacgacataattggtggttattctgagga

SEQ ID NO: 3462 - DNA, 43 bp, Artificial Sequence
  Synthetic
gcaagaataccacgaaagcaagaaatcggaagaaacaggtacg

SEQ ID NO: 3463 - DNA, 43 bp, Artificial Sequence
  Synthetic
cctgttccgattagaataggcaaattcctggaacaatggaacc

SEQ ID NO: 3464 - DNA, 40 bp, Artificial Sequence
  Synthetic
acagcgccctagggagtgtcacttgtcattggtgctgtga

SEQ ID NO: 3465 - DNA, 48 bp, Artificial Sequence
  Synthetic
cctgatagtgatatagctcgcaagcatgaaaattattctcttcctgac

SEQ ID NO: 3466 - DNA, 47 bp, Artificial Sequence
  Synthetic
acatgaggtttattagatgcacagcttgtatttctctatgcagttgc

SEQ ID NO: 3467 - DNA, 41 bp, Artificial Sequence
  Synthetic
ccattgcgtcctccattctggtccccccgcattacatttgg

SEQ ID NO: 3468 - DNA, 40 bp, Artificial Sequence
  Synthetic
tgccaatgtggtctttgggtgtacttccctacggcgctaa

SEQ ID NO: 3469 - DNA, 45 bp, Artificial Sequence
  Synthetic
agcagatttcttagtgacagtttggcttgagagcaaagtttctgg

SEQ ID NO: 3470 - DNA, 43 bp, Artificial Sequence
  Synthetic
gttcagcagtatgacgttgtctttcatggagccattaaattgg

SEQ ID NO: 3471 - DNA, 49 bp, Artificial Sequence
  Synthetic
cctacttgtgctgtttagttacgagttccgtttacgatacatagtctac

SEQ ID NO: 3472 - DNA, 39 bp, Artificial Sequence
  Synthetic
gggaagggtgggaaaaactggccatgcggtgttgtactc

SEQ ID NO: 3473 - DNA, 41 bp, Artificial Sequence
  Synthetic
caagaagggtgagcaggcagcagtagacctggcagatgagg

SEQ ID NO: 3474 - DNA, 43 bp, Artificial Sequence
  Synthetic
gcacccatgatgacaatctatacacgtgtccgtgtttcctgtt

SEQ ID NO: 3475 - DNA, 46 bp, Artificial Sequence
  Synthetic
cacaagcttcaactgttggtgactgttaaagatgtgttagaaaagg

SEQ ID NO: 3476 - DNA, 38 bp, Artificial Sequence
  Synthetic
agggcatcaggcaatttccatggacagtcgttcttgga

SEQ ID NO: 3477 - DNA, 44 bp, Artificial Sequence
  Synthetic
ccaactgtcatcactaggtcttttaaggtgagcaaggtagagaa

SEQ ID NO: 3478 - DNA, 47 bp, Artificial Sequence
  Synthetic
ctgagtggtactaaacacaaccttatcaattagccctatgttttcag

SEQ ID NO: 3479 - DNA, 50 bp, Artificial Sequence
  Synthetic
ggttgtgaggcaatatctactggtatgaatatgtacactgttgatttacg

SEQ ID NO: 3480 - DNA, 40 bp, Artificial Sequence
  Synthetic
ccccacatcccacactaaatgttcctggtgttggaaaacc

SEQ ID NO: 3481 - DNA, 48 bp, Artificial Sequence
  Synthetic
tgtgagtactccttcttgtgtgtcaaagatttttgcttaagattagcc

SEQ ID NO: 3482 - DNA, 45 bp, Artificial Sequence
  Synthetic
ttcctgattgccatgtgtaatcatcttatgtatgtacccccagga

SEQ ID NO: 3483 - DNA, 45 bp, Artificial Sequence
  Synthetic
cgaggacaccatgcttttatatgtcacgattcaaatattgtgtgc

SEQ ID NO: 3484 - DNA, 50 bp, Artificial Sequence
  Synthetic
tcacatcattaccttcagtgtttgttgattctattcttgtatcatactcc

SEQ ID NO: 3485 - DNA, 49 bp, Artificial Sequence
  Synthetic
cacactggaattttctcaggtcaattggtgttataggtatgattacagc

SEQ ID NO: 3486 - DNA, 45 bp, Artificial Sequence
  Synthetic
acgcacagagtttctctttaagaaacacaaactgtaattgccact

SEQ ID NO: 3487 - DNA, 43 bp, Artificial Sequence
  Synthetic
tttaggatctgggggcaaagaatactggaaaatctcttgccac

SEQ ID NO: 3488 - DNA, 46 bp, Artificial Sequence
  Synthetic
tgaagatactgttggtggtgttagtaccatttacatccaagtttgt

SEQ ID NO: 3489 - DNA, 49 bp, Artificial Sequence
  Synthetic
accctgaagtgtacagaacaatttctataggtataatagctaatgtggt

SEQ ID NO: 3490 - DNA, 45 bp, Artificial Sequence
  Synthetic
gcaaatcataggaatcagagacctttggtacttccaacacattct

SEQ ID NO: 3491 - DNA, 42 bp, Artificial Sequence
  Synthetic
ccttgtacaaaacacccccacatactgcacgaatgatcaagt

SEQ ID NO: 3492 - DNA, 49 bp, Artificial Sequence
  Synthetic
gtgactatacctgggtttttgtggatgtgttattcagaagtgtatttgg

SEQ ID NO: 3493 - DNA, 43 bp, Artificial Sequence
  Synthetic
ctcatcagctctgaatcctcttttaacccctgctgataagtct

SEQ ID NO: 3494 - DNA, 43 bp, Artificial Sequence
  Synthetic
ggtagaagcactaacacacagtctaaagaggtggagttgtcac

SEQ ID NO: 3495 - DNA, 49 bp, Artificial Sequence
  Synthetic
cttcacaagctacctgtacattagatctaaaaggagattgtttacagac

SEQ ID NO: 3496 - DNA, 47 bp, Artificial Sequence
  Synthetic
ccatcaaatgcatttctcatatgcagggtaaagtaggctttctagat

SEQ ID NO: 3497 - DNA, 43 bp, Artificial Sequence
  Synthetic
tgtgatgtgatctctaaggtctgtactgagcgtacgttttgct

SEQ ID NO: 3498 - DNA, 48 bp, Artificial Sequence
  Synthetic
tgacaggagcaagaatagttttgttcaacctgatgtgttaaagtatgg

SEQ ID NO: 3499 - DNA, 44 bp, Artificial Sequence
  Synthetic
ttcacagtcatgccccaacccagaaatatgggcatttatacctg

SEQ ID NO: 3500 - DNA, 41 bp, Artificial Sequence
  Synthetic
ggaagatgctccaggttctactggcccattacaaggcctaa

SEQ ID NO: 3501 - DNA, 42 bp, Artificial Sequence
  Synthetic
ctctgtgattggtacctgctctatcacacctgtcactgcatt

SEQ ID NO: 3502 - DNA, 50 bp, Artificial Sequence
  Synthetic
tcggggacaaatacctttaaaactgagaaggggaaacattaaatattcct

SEQ ID NO: 3503 - DNA, 46 bp, Artificial Sequence
  Synthetic
gacgttccctgtctgaattgtatgtattcagatgtaagttaccaga

SEQ ID NO: 3504 - DNA, 43 bp, Artificial Sequence
  Synthetic
gctgttctcgctttccaaaaaagaacaattgctttgtggcctg

SEQ ID NO: 3505 - DNA, 48 bp, Artificial Sequence
  Synthetic
gccattcttccaatattctgggattatgtaaaataactttggatgctg

SEQ ID NO: 3506 - DNA, 48 bp, Artificial Sequence
  Synthetic
tgaccccatgagtcagataaaacagcttgaataaattgtttactgtgc

SEQ ID NO: 3507 - DNA, 47 bp, Artificial Sequence
  Synthetic
gaaggtaacaccaactcttccaaataaagtatgaaggggactattgc

SEQ ID NO: 3508 - DNA, 43 bp, Artificial Sequence
  Synthetic
ccaatctgcagtttgtaattcaagaccaggacctgctttcaag

SEQ ID NO: 3509 - DNA, 43 bp, Artificial Sequence
  Synthetic
agtctcggactcaaatctacaagatccgagctttagtggacct

SEQ ID NO: 3510 - DNA, 42 bp, Artificial Sequence
  Synthetic
tgatcctgcagtacatcgaaaccagtgtgacgaagaagatga

SEQ ID NO: 3511 - DNA, 48 bp, Artificial Sequence
  Synthetic
tggaactagtaacgacagaggaaattattcaaatactggacaatggac

SEQ ID NO: 3512 - DNA, 41 bp, Artificial Sequence
  Synthetic
ggctcttggttctctggtggttcgacaagagaacgacgacg

SEQ ID NO: 3513 - DNA, 45 bp, Artificial Sequence
  Synthetic
cctctggatttatcacatccaaaggtacaaaaccaagcataccac

SEQ ID NO: 3514 - DNA, 49 bp, Artificial Sequence
  Synthetic
ggtttgaacctgttgtacaaaacgcttttaatagggttatcaatcaagg

SEQ ID NO: 3515 - DNA, 43 bp, Artificial Sequence
  Synthetic
gttgaaaaaggtccagttggctatcgcgcaggtgttaagacaa

SEQ ID NO: 3516 - DNA, 41 bp, Artificial Sequence
  Synthetic
tgctttgccttctccatcttctaatgtcgctgtttggagac

SEQ ID NO: 3517 - DNA, 43 bp, Artificial Sequence
  Synthetic
acatcttctcatttttctctcagctcctgtcaggaatgggaac

SEQ ID NO: 3518 - DNA, 41 bp, Artificial Sequence
  Synthetic
tgtctttgctgtgttcatagctggtcttcggtacctggagt

SEQ ID NO: 3519 - DNA, 45 bp, Artificial Sequence
  Synthetic
agtttccatctgttcataagatcgtactcactgagtgacatcaac

SEQ ID NO: 3520 - DNA, 44 bp, Artificial Sequence
  Synthetic
tcctctttgtcatacagaatcagctaggtccaatctaccgaaga

SEQ ID NO: 3521 - DNA, 40 bp, Artificial Sequence; identical to SEQ ID NO: 2016
  Synthetic

SEQ ID NO: 3522 - DNA, 43 bp, Artificial Sequence
  Synthetic
ctgatgaagcttgagactctcagacaattggtgtggatggcat

SEQ ID NO: 3523 - DNA, 44 bp, Artificial Sequence
  Synthetic
cccaaaagagctctttcatttgatctttttgttcatgatgcccg

SEQ ID NO: 3524 - DNA, 43 bp, Artificial Sequence
  Synthetic
gccaccccaaataaacaaaggattaggctgttgctgcttcaat

SEQ ID NO: 3525 - DNA, 42 bp, Artificial Sequence
  Synthetic
tccatcttgctttctggcgcaaattgacacgattactgttga

SEQ ID NO: 3526 - DNA, 46 bp, Artificial Sequence
  Synthetic
gaggcgtgtataaaaagaaatgtgtccgttgaggtatttttctcac

SEQ ID NO: 3527 - DNA, 48 bp, Artificial Sequence
  Synthetic
cagtaccttccattgattagcctttgttgaaatgaaaaaacctcatgc

SEQ ID NO: 3528 - DNA, 50 bp, Artificial Sequence
  Synthetic
gcaaaaggataattagcagcttctggttggtaaatcaaccttatttaacg

SEQ ID NO: 3529 - DNA, 43 bp, Artificial Sequence
  Synthetic
tgcaaaacattaaactctgctactgtaaacgttatgcgcgtgt

SEQ ID NO: 3530 - DNA, 47 bp, Artificial Sequence
  Synthetic
ttcagtaagaccgatagcttccaaacgtgcagaagaagaaatttcag

SEQ ID NO: 3531 - DNA, 48 bp, Artificial Sequence
  Synthetic
agccataaaaccaatattgtgctttatggtaaaaatgattgttggtct

SEQ ID NO: 3532 - DNA, 45 bp, Artificial Sequence
  Synthetic
ccaactttgattcggttaaattcctaggaggacataatggcatta

SEQ ID NO: 3533 - DNA, 42 bp, Artificial Sequence
  Synthetic
caaagaagcaagcctaagcctaaagtgggcttgtctggtcta

SEQ ID NO: 3534 - DNA, 45 bp, Artificial Sequence
  Synthetic
gcctgcaaaatcttacctaagtcatggaggctcaaaatttgtgat

SEQ ID NO: 3535 - DNA, 40 bp, Artificial Sequence
  Synthetic
agcacaacaaaacaagccatttcagcaattagaagcgctg

SEQ ID NO: 3536 - DNA, 48 bp, Artificial Sequence
  Synthetic
cacaaaacctttcaagagacgtttgaagttactaagttttgacgatgt

SEQ ID NO: 3537 - DNA, 46 bp, Artificial Sequence
  Synthetic
gcaattaatggctgatttgcggagaataccgattgaaatttctcct

SEQ ID NO: 3538 - DNA, 44 bp, Artificial Sequence
  Synthetic
cccaaatctacggctgataaagattgtggtgatcacatctgctt

SEQ ID NO: 3539 - DNA, 39 bp, Artificial Sequence
  Synthetic
tacgagatccccaacgttggtggtaccgaaaacatgagt

SEQ ID NO: 3540 - DNA, 45 bp, Artificial Sequence
  Synthetic
gcagggcgtaactttgctaaatcaagatgaataccctaaatttgg

SEQ ID NO: 3541 - DNA, 42 bp, Artificial Sequence
  Synthetic
gcaatagctcctccattgacattacttttgctgctcaggctt

SEQ ID NO: 3542 - DNA, 40 bp, Artificial Sequence
  Synthetic
accagtgcatcaattaacgcttcacgattatggtcggtgg

SEQ ID NO: 3543 - DNA, 47 bp, Artificial Sequence
  Synthetic
tgaggttaatcgaccaaaatcttcttcttgccaaagaatatctgaac

SEQ ID NO: 3544 - DNA, 50 bp, Artificial Sequence
  Synthetic
gagcaacccttcaagataaacatcttttgaaggataagattgatagaagg

SEQ ID NO: 3545 - DNA, 50 bp, Artificial Sequence
  Synthetic
gcttcttttgtagctactagtgtcgctttgatcagcatttaaaactactg

SEQ ID NO: 3546 - DNA, 44 bp, Artificial Sequence
  Synthetic
acaatggggcatttccgatgctaaaaaatggttagttaagccag

SEQ ID NO: 3547 - DNA, 44 bp, Artificial Sequence
  Synthetic
gaccttgaaagtggcaaagttttagttgtcaagagcttactgac

SEQ ID NO: 3548 - DNA, 44 bp, Artificial Sequence
  Synthetic
gcatttttattaccacaagctgccaaaagtaaatggttggcagc

SEQ ID NO: 3549 - DNA, 44 bp, Artificial Sequence
  Synthetic
ccagtcacaaaatcttctgctgttatgtctcttggtatacggct

SEQ ID NO: 3550 - DNA, 44 bp, Artificial Sequence
  Synthetic
caacattcttagcatcccagtagtttggtgcttacttcttgagc

SEQ ID NO: 3551 - DNA, 50 bp, Artificial Sequence
  Synthetic
acgaaaatccttgttgttaagagcttctttcaaaaacactaagaaagacc

SEQ ID NO: 3552 - DNA, 45 bp, Artificial Sequence
  Synthetic
ctaattgaactgggaaggttacaccaaagctgagtttgcaaaagc

SEQ ID NO: 3553 - DNA, 44 bp, Artificial Sequence
  Synthetic
tgtgtcatcagccagctgtacatcagtttttagaggagaattgg

SEQ ID NO: 3554 - DNA, 45 bp, Artificial Sequence
  Synthetic
ggtgtccactcttgtgcctgctaaaaagagcttatttgtgacaag

SEQ ID NO: 3555 - DNA, 41 bp, Artificial Sequence
  Synthetic
tgcttggggtaatggctcactggcacctgcttctagtccag

SEQ ID NO: 3556 - DNA, 41 bp, Artificial Sequence
  Synthetic
cattggattgtaggcatggtttgcaccacaagtgttgcaac

SEQ ID NO: 3557 - DNA, 42 bp, Artificial Sequence
  Synthetic
tctgtaatactgccgcgatctggccatttgcaagtatttacg

SEQ ID NO: 3558 - DNA, 45 bp, Artificial Sequence
  Synthetic
caggttttcgaggtgttgcaggtcttgaaatgtattatactagtg

SEQ ID NO: 3559 - DNA, 43 bp, Artificial Sequence
  Synthetic
cagttggatgagttaggatcatccttccctcactggaaattcc

SEQ ID NO: 3560 - DNA, 47 bp, Artificial Sequence
  Synthetic
ggtttgaccatagagtcatattggtaggtttatccaccatattgatg

SEQ ID NO: 3561 - DNA, 43 bp, Artificial Sequence
  Synthetic
ccaaaatcatctgattgagcagctactaagccaaccaaagcgt

SEQ ID NO: 3562 - DNA, 44 bp, Artificial Sequence
  Synthetic
ggacgtaattgccctcactattgaaagaaaatgagaccactgtc

SEQ ID NO: 3563 - DNA, 43 bp, Artificial Sequence
  Synthetic
gctgctggtgttttagcaatgataaccaaacagctccgttgag

SEQ ID NO: 3564 - DNA, 47 bp, Artificial Sequence
  Synthetic
cttctgtgccatacataccatagtttatcatttacgatgcccttacc

SEQ ID NO: 3565 - DNA, 45 bp, Artificial Sequence
  Synthetic
aggaatagctcgctctttagggtaagcagagttgaatttgacctt

SEQ ID NO: 3566 - DNA, 46 bp, Artificial Sequence
  Synthetic
tgaaactgattggggctaacgcacatgtctaagttattattggttg

SEQ ID NO: 3567 - DNA, 41 bp, Artificial Sequence
  Synthetic
tgccttcaaaaatggcagctaaatgtggctctagcttttcg

SEQ ID NO: 3568 - DNA, 47 bp, Artificial Sequence
  Synthetic
gctccgtatggtaaatagcttgtaaagatactacgacgattagagaa

SEQ ID NO: 3569 - DNA, 47 bp, Artificial Sequence
  Synthetic
gccgattagccttaagtttggttaagaagcagtcttagctaatcaac

SEQ ID NO: 3570 - DNA, 49 bp, Artificial Sequence
  Synthetic
cgtcatacaacctggtaaataaggttattgttggtcctaatttcaatcg

SEQ ID NO: 3571 - DNA, 45 bp, Artificial Sequence
  Synthetic
ggcttatgcgcttgtttgtaagtaaaaatagggatgatgctatcg

SEQ ID NO: 3572 - DNA, 43 bp, Artificial Sequence
  Synthetic
ccgatttttacacacagttgtcctagccattaccgactaccga

SEQ ID NO: 3573 - DNA, 44 bp, Artificial Sequence
  Synthetic
agctaattgaacatctgctccaacataagccctgattatgctcc

SEQ ID NO: 3574 - DNA, 46 bp, Artificial Sequence
  Synthetic
aatcagattggcctttggtaattgttaaacggtaagaaagtagccg

SEQ ID NO: 3575 - DNA, 44 bp, Artificial Sequence
  Synthetic
gtgattcttgaagagtaccagctttctcttgacgatgctcttcg

SEQ ID NO: 3576 - DNA, 43 bp, Artificial Sequence
  Synthetic
cggtaccagtcttttctttgttgtagctgcagcttctttttcc

SEQ ID NO: 3577 - DNA, 45 bp, Artificial Sequence
  Synthetic
cacctccccataaaaatcccattttacaaaaaagagtttcggtgg

SEQ ID NO: 3578 - DNA, 46 bp, Artificial Sequence
  Synthetic
cggtatattaagcgacataccagtccaagtccccttcttagaaagt

SEQ ID NO: 3579 - DNA, 44 bp, Artificial Sequence
  Synthetic
gcgtcgtaaatggtattggattgataggaaggtcaattggttgc

SEQ ID NO: 3580 - DNA, 44 bp, Artificial Sequence
  Synthetic
ggtgattgacatgttcttgagtcaagttccggctatgaaaatgc

SEQ ID NO: 3581 - DNA, 45 bp, Artificial Sequence
  Synthetic
ggcaacaaatcagcaatcttgttaaaaaatggcaccattgattgc

SEQ ID NO: 3582 - DNA, 44 bp, Artificial Sequence
  Synthetic
gatcgcctttgttactagattctctttatccaaacgtgccaaac

SEQ ID NO: 3583 - DNA, 45 bp, Artificial Sequence
  Synthetic
ccacatatttgctttcttctagggtggctttattcaagacttgcc

SEQ ID NO: 3584 - DNA, 50 bp, Artificial Sequence
  Synthetic
ggtctaaaagagcaactcgattcaacagtttgttccttttagaatcaaag

SEQ ID NO: 3585 - DNA, 43 bp, Artificial Sequence
  Synthetic
gccccaaagccttagaaagattcctactttgctgaaatctacc

SEQ ID NO: 3586 - DNA, 43 bp, Artificial Sequence
  Synthetic
cccttaagcatggtgataccgttttacacctgatgacacactc

SEQ ID NO: 3587 - DNA, 44 bp, Artificial Sequence
  Synthetic
ggtctccatgcaaatgagtaatgaagaaggaacgcaaagacaaa

SEQ ID NO: 3588 - DNA, 43 bp, Artificial Sequence
  Synthetic
cgtctagggttccttctaagtctttgtctggcgcataccattt

SEQ ID NO: 3589 - DNA, 39 bp, Artificial Sequence
  Synthetic
gcttcatgagcgatttgtgctcggattgcgagaaatcac

SEQ ID NO: 3590 - DNA, 41 bp, Artificial Sequence
  Synthetic
tccaactcgaggcattctttgaacaaagaacgcctagaaca

SEQ ID NO: 3591 - DNA, 39 bp, Artificial Sequence
  Synthetic
tccgataagggcaaacttggtcaggcttgattgcgtcag

SEQ ID NO: 3592 - DNA, 46 bp, Artificial Sequence
  Synthetic
ccgctgttaaaaactcatctaaggcccgctcagttgatttatgatc

SEQ ID NO: 3593 - DNA, 47 bp, Artificial Sequence
  Synthetic
ttaggcgtgtcaagaagaccttttatcagtttttagaggctattggt

SEQ ID NO: 3594 - DNA, 41 bp, Artificial Sequence
  Synthetic
tgagggcttcaactaaagcatccaaacgacctcaactccaa

SEQ ID NO: 3595 - DNA, 40 bp, Artificial Sequence
  Synthetic
agccccatcagcaatcatttgtctttttcagatggggggt

SEQ ID NO: 3596 - DNA, 43 bp, Artificial Sequence
  Synthetic
caaacgtcttgtgttacctcttgatcttagcagccgagtacga

SEQ ID NO: 3597 - DNA, 39 bp, Artificial Sequence
  Synthetic
tgacatcgtgtacgcgtacaaagcagccttgtctgctta

SEQ ID NO: 3598 - DNA, 41 bp, Artificial Sequence
  Synthetic
gttcacaaatcgcacctgctaaacgtcagttagtggaaggg

SEQ ID NO: 3599 - DNA, 48 bp, Artificial Sequence
  Synthetic
aagagattgctcaatagcttgtgtttatggcctgtcaattagatacac

SEQ ID NO: 3600 - DNA, 46 bp, Artificial Sequence
  Synthetic
ggaaaagccaagaaatctgctggatgaacccctaaaacattacact

SEQ ID NO: 3601 - DNA, 42 bp, Artificial Sequence
  Synthetic
agcacccgcattcataaaaacaggtttgaatttgcatgtggc

SEQ ID NO: 3602 - DNA, 45 bp, Artificial Sequence
  Synthetic
gccctttaagatttgcttccatgatttgtggatctgtgtttaagc

SEQ ID NO: 3603 - DNA, 42 bp, Artificial Sequence
  Synthetic
ggttacttgattttcgttgtgcagaaagcaagagcccctgaa

SEQ ID NO: 3604 - DNA, 44 bp, Artificial Sequence
  Synthetic
ggccttcaattcccttgtcaaattccagttgctactttatcgac

SEQ ID NO: 3605 - DNA, 42 bp, Artificial Sequence
  Synthetic
agcaacacgttggcaaaccattgcggtaaaaattcctggacg

SEQ ID NO: 3606 - DNA, 43 bp, Artificial Sequence
  Synthetic
tattgccaccccatttgccattcaggctgtaataatttagcgc

SEQ ID NO: 3607 - DNA, 44 bp, Artificial Sequence
  Synthetic
tggaggaattatggaaaatcaggaaccaaaggtttcaagccttg

SEQ ID NO: 3608 - DNA, 45 bp, Artificial Sequence
  Synthetic
ttacctttcctttgcctacgttgtgccttaaacccatttaattgc

SEQ ID NO: 3609 - DNA, 43 bp, Artificial Sequence
  Synthetic
cggaagaaaaagatggtattgatgccaagtcctgcaacagcta

SEQ ID NO: 3610 - DNA, 48 bp, Artificial Sequence
  Synthetic
acaggctggtaccaattactcattatatttttgatggtcttgtcaacg

SEQ ID NO: 3611 - DNA, 47 bp, Artificial Sequence
  Synthetic
ccagttacgtctttggaaaatgtttgtaatcaccaaaggtttgtagt

SEQ ID NO: 3612 - DNA, 47 bp, Artificial Sequence
  Synthetic
gaatgtgccaagttgcaaaaatctcaggtggagtatatcaattctcc

SEQ ID NO: 3613 - DNA, 45 bp, Artificial Sequence
  Synthetic
cttagtgactacacgcccaaaagagcttcaacgattttttcaatg

SEQ ID NO: 3614 - DNA, 39 bp, Artificial Sequence
  Synthetic
tgacgtgacagtcgaaagcaagccttatttcggtaagct

SEQ ID NO: 3615 - DNA, 47 bp, Artificial Sequence
  Synthetic
aggtctgcgctaagatatggtatataaccattgctcaaaaaagaaga

SEQ ID NO: 3616 - DNA, 41 bp, Artificial Sequence
  Synthetic
gaaggagatttcggacgaaccttgatttgggacataacagc

SEQ ID NO: 3617 - DNA, 43 bp, Artificial Sequence
  Synthetic
tgcatttaatcttggagagcaagaaatgttttaaggcccgtcg

SEQ ID NO: 3618 - DNA, 48 bp, Artificial Sequence
  Synthetic
tgctcttcctagatctcaaaaaaggtaagccaagaatgttaaaaaacc

SEQ ID NO: 3619 - DNA, 43 bp, Artificial Sequence
  Synthetic
ggtggcggtgtagtggttttattatgctggtgattttttctca

SEQ ID NO: 3620 - DNA, 45 bp, Artificial Sequence
  Synthetic
tgcagccttgcttgttaaacaatttgaaaaacgttggataagacg

SEQ ID NO: 3621 - DNA, 44 bp, Artificial Sequence
  Synthetic
aggaactatcatatcaggaggtcttcaagaagtgcaatgatggg

SEQ ID NO: 3622 - DNA, 43 bp, Artificial Sequence
  Synthetic
actcgaaaccatacagaagaaatgatcccaccaaagtaatgcg

SEQ ID NO: 3623 - DNA, 45 bp, Artificial Sequence
  Synthetic
cgcgaaatgctaagattatcggtaatttcacttcttcactagcgt

SEQ ID NO: 3624 - DNA, 43 bp, Artificial Sequence
  Synthetic
tcagccttctatcttgattttgctacgacgacgttctaagcta

SEQ ID NO: 3625 - DNA, 43 bp, Artificial Sequence
  Synthetic
gcagatattcttcgactttgggtccatagaaacacggacatca

SEQ ID NO: 3626 - DNA, 45 bp, Artificial Sequence
  Synthetic
ccaaatggcgagtttacaaaagaacaagaagaaccagagtcaaac

SEQ ID NO: 3627 - DNA, 43 bp, Artificial Sequence
  Synthetic
tctgtttctgatttccgtcaagatcccatgatggatgaaaggt

SEQ ID NO: 3628 - DNA, 41 bp, Artificial Sequence
  Synthetic
gttacccttgagtcagggacatagtcatcctcaccaaaacc

SEQ ID NO: 3629 - DNA, 50 bp, Artificial Sequence
  Synthetic
cgattcaacctctttatactacgcccgatatacgtattagtatcaaggat

SEQ ID NO: 3630 - DNA, 46 bp, Artificial Sequence
  Synthetic
cgtaaggagatggatttagcagaattatcaacctgacttaaagcgt

SEQ ID NO: 3631 - DNA, 38 bp, Artificial Sequence
  Synthetic
aaacagcctttccaatgcgcttgttcccaagctgcttg

SEQ ID NO: 3632 - DNA, 50 bp, Artificial Sequence
  Synthetic
agaggtaaatctcagtgaaacacaactgtgattataagcaaatcatcttg

SEQ ID NO: 3633 - DNA, 48 bp, Artificial Sequence
  Synthetic
aggattaaaccgagtataagcgtagaaacgattaatgtctattctcgt

SEQ ID NO: 3634 - DNA, 45 bp, Artificial Sequence
  Synthetic
ccttttcacggcggtaacacaaagttactaaatagctatagtccg

SEQ ID NO: 3635 - DNA, 41 bp, Artificial Sequence
  Synthetic
gccccctgtgagataaggtagtagctgagctaaactcccat

SEQ ID NO: 3636 - DNA, 42 bp, Artificial Sequence
  Synthetic
tggacttaccgctggtgtaccaatgctttcagcgcttatccc

SEQ ID NO: 3637 - DNA, 42 bp, Artificial Sequence
  Synthetic
gggcttagtgatccggtggtactgttatccccagggtagctt

SEQ ID NO: 3638 - DNA, 41 bp, Artificial Sequence
  Synthetic
cgcagtgaataggcccaagcaaggcgtcaccccctatacat

SEQ ID NO: 3639 - DNA, 45 bp, Artificial Sequence
  Synthetic
gagtccggctaagcagtgagcagctcaatgttataaagataagca

SEQ ID NO: 3640 - DNA, 42 bp, Artificial Sequence
  Synthetic
tgtaccggggctaaaacagtttctctcctaccatgacacttt

SEQ ID NO: 3641 - DNA, 41 bp, Artificial Sequence
  Synthetic
cctacaacaagttcgagcccgtatcgtaactcgccggttca

SEQ ID NO: 3642 - DNA, 38 bp, Artificial Sequence
  Synthetic
tgagaggtcttgtggggcctgacctcctgcgtgcaaag

SEQ ID NO: 3643 - DNA, 48 bp, Artificial Sequence
  Synthetic
cgaaacgtaaagaagaagttgaccttctttgattgttttttcagtagc

SEQ ID NO: 3644 - DNA, 40 bp, Artificial Sequence
  Synthetic
gcagacaaccaaccagctgtcttgttatctgctgccattg

SEQ ID NO: 3645 - DNA, 43 bp, Artificial Sequence
  Synthetic
tgcaggattgtcattgtcagaaatctgggatacgagttgatcc

SEQ ID NO: 3646 - DNA, 45 bp, Artificial Sequence
  Synthetic
tccttgaattaggtgatggtgtctaccaccaagtttgttatcacc

SEQ ID NO: 3647 - DNA, 43 bp, Artificial Sequence
  Synthetic
tcgtacaactccttcagtagtatcacactgcttgacgttttgc

SEQ ID NO: 3648 - DNA, 50 bp, Artificial Sequence
  Synthetic
ccagcgatggtagttgtttataactgcttctaacttgctatctagtttac

SEQ ID NO: 3649 - DNA, 39 bp, Artificial Sequence
  Synthetic
tcgttctcaggatctggcaaaccaaggcacgttctagat

SEQ ID NO: 3650 - DNA, 50 bp, Artificial Sequence
  Synthetic
cgtaggtctgttagtttggtaaacacgataataatcacctaatttagcag

SEQ ID NO: 3651 - DNA, 43 bp, Artificial Sequence
  Synthetic
gcagtttgctattccaagaaactttagcgctcctctacgatag

SEQ ID NO: 3652 - DNA, 41 bp, Artificial Sequence
  Synthetic
tggcaaaactagagaagttgggacttggcatccgtccacta

SEQ ID NO: 3653 - DNA, 41 bp, Artificial Sequence
  Synthetic
gtcacatcacctcgtctatcacggctggtggaacttctgtt

SEQ ID NO: 3654 - DNA, 42 bp, Artificial Sequence
  Synthetic
atttggtgagcacgagggatcacaaaaagatctctttgcctt

SEQ ID NO: 3655 - DNA, 48 bp, Artificial Sequence
  Synthetic
acgatcgctggattctaaatttttgctatgcgcaaaatgatatctttg

SEQ ID NO: 3656 - DNA, 39 bp, Artificial Sequence
  Synthetic
ttgccgtattgctgttccgttggaaaataagcgtgctca

SEQ ID NO: 3657 - DNA, 49 bp, Artificial Sequence
  Synthetic
tctggtagtttttctttgaccttctaagcctattatgatctgatgaaga

SEQ ID NO: 3658 - DNA, 43 bp, Artificial Sequence
  Synthetic
cataggctggcgatcaataaagatctcgtgattgtggttgacc

SEQ ID NO: 3659 - DNA, 43 bp, Artificial Sequence
  Synthetic
gagtttatcaaacgcttgaaaggctctattgagagcgcacaga

SEQ ID NO: 3660 - DNA, 44 bp, Artificial Sequence
  Synthetic
agggtttgattttgccaaatcttgcgatcaagaacaagaagctc

SEQ ID NO: 3661 - DNA, 49 bp, Artificial Sequence
  Synthetic
cccgttcaaattggctcttgtatttaccaagcctataaagaaaaacaag

SEQ ID NO: 3662 - DNA, 44 bp, Artificial Sequence
  Synthetic
ggcttcttgttcagggagggtagctctagtgatatcaaatatgc

SEQ ID NO: 3663 - DNA, 39 bp, Artificial Sequence
  Synthetic
acatgatgcgctcagaagggggtcagaatcaccacttcc

SEQ ID NO: 3664 - DNA, 43 bp, Artificial Sequence
  Synthetic
cagaaaaagcagctgaattggtacacaaaagggcacaggttga

SEQ ID NO: 3665 - DNA, 48 bp, Artificial Sequence
  Synthetic
aggaccgtcatgaatactaaaatgtgaaaggaattcacacttatgact

SEQ ID NO: 3666 - DNA, 40 bp, Artificial Sequence
  Synthetic
attgcggtgtgaagacctgcctcagtttgactttgcctta

SEQ ID NO: 3667 - DNA, 49 bp, Artificial Sequence
  Synthetic
tccctacctagaagtttgtacttgtctctttaatcagcttgagattgac

SEQ ID NO: 3668 - DNA, 47 bp, Artificial Sequence
  Synthetic
gccaaatcgtaaacaacgttggaaatcaaagatgtagataatcaccg

SEQ ID NO: 3669 - DNA, 42 bp, Artificial Sequence
  Synthetic
agaagcttcgcaatcactatcaaagattgggctttatcacgt

SEQ ID NO: 3670 - DNA, 48 bp, Artificial Sequence
  Synthetic
cgatcagtgggttattggttatacggtctgattaaatcctacccattg

SEQ ID NO: 3671 - DNA, 44 bp, Artificial Sequence
  Synthetic
agcgtgacaaccaatccattggattactccattattggcaaagg

SEQ ID NO: 3672 - DNA, 44 bp, Artificial Sequence
  Synthetic
agtgaaaatccgactttcagaagttccacgagtggtttgattgt

SEQ ID NO: 3673 - DNA, 40 bp, Artificial Sequence
  Synthetic
gcattagcaaaggcggtagccgcatcagtatgtcgccgcc

SEQ ID NO: 3674 - DNA, 38 bp, Artificial Sequence
  Synthetic
atgcaacggcggatgttgttggatatgcagcgctggcg

SEQ ID NO: 3675 - DNA, 40 bp, Artificial Sequence
  Synthetic
gtccggcaacaacgcctcagcaatgcgtgctcatggtatg

SEQ ID NO: 3676 - DNA, 40 bp, Artificial Sequence
  Synthetic
gggcatggggcaaggatttgcgcgcgttagggctattggg

SEQ ID NO: 3677 - DNA, 40 bp, Artificial Sequence
  Synthetic
gtgagggcgtactcatcggtgaaagtcaccgttggcacag

SEQ ID NO: 3678 - DNA, 42 bp, Artificial Sequence
  Synthetic
tgacacccaatcccgacactgtaaagagacatttgtccccgg

SEQ ID NO: 3679 - DNA, 42 bp, Artificial Sequence
  Synthetic
gcgcggatggtccaattatccactgacagccgacttttaccc

SEQ ID NO: 3680 - DNA, 38 bp, Artificial Sequence
  Synthetic
ccaagatgcaggcgggggaggccaccgtctacaccgga

SEQ ID NO: 3681 - DNA, 38 bp, Artificial Sequence
  Synthetic
cctcataaactgccgccccatcgagtccagccggtcca

SEQ ID NO: 3682 - DNA, 40 bp, Artificial Sequence
  Synthetic
actcctgataggccacctgcatgtggcgcctgactatagg

SEQ ID NO: 3683 - DNA, 38 bp, Artificial Sequence
  Synthetic
gccctccattgcgccttaagttggggaagtccgtcggt

SEQ ID NO: 3684 - DNA, 42 bp, Artificial Sequence
  Synthetic
actgtagccgccattctgttggtgattttgagagcaagggcc

SEQ ID NO: 3685 - DNA, 40 bp, Artificial Sequence
  Synthetic
gcctgtggccgaatgcttcgtgcaggacatagacgcagtg

SEQ ID NO: 3686 - DNA, 39 bp, Artificial Sequence
  Synthetic
aacagacggagcgactcccgcaggtacggcaaggagaca

SEQ ID NO: 3687 - DNA, 41 bp, Artificial Sequence
  Synthetic
cgaacggagcaggtggtacaatattgatgaaggaggccggg

SEQ ID NO: 3688 - DNA, 38 bp, Artificial Sequence
  Synthetic
ctgcgtacgagccaacatcactgccctcatcaccggct

SEQ ID NO: 3689 - DNA, 36 bp, Artificial Sequence
  Synthetic
ttgagggccagaccaggctctgctctgtcgtgcctg

SEQ ID NO: 3690 - DNA, 35 bp, Artificial Sequence
  Synthetic
attggtccgttggggcgggcgacgcggcacacgat

SEQ ID NO: 3691 - DNA, 38 bp, Artificial Sequence
  Synthetic
ccaccgacgtggggactgttggtgggtatgcggtgtca

SEQ ID NO: 3692 - DNA, 41 bp, Artificial Sequence
  Synthetic
gcgatattcaacctggagggcgaccaattcagcctacaccg

SEQ ID NO: 3693 - DNA, 38 bp, Artificial Sequence
  Synthetic
ctctgcagagggcaaggtcaccgctcgccccatcacca

SEQ ID NO: 3694 - DNA, 44 bp, Artificial Sequence
  Synthetic
ctatcagagtcagtggtgttgtaatgggcaagatcagtttttgg

SEQ ID NO: 3695 - DNA, 48 bp, Artificial Sequence
  Synthetic
cctaaccagtttacaaacttgacgaactaaacgaaatttttctagtgc

SEQ ID NO: 3696 - DNA, 39 bp, Artificial Sequence
  Synthetic
ccaaaagcaacaaaacggcatgttcgcacctatagcgaa

SEQ ID NO: 3697 - DNA, 48 bp, Artificial Sequence
  Synthetic
ccacaattgcatttaacaaaagcatattacaaatggtatgtcattgct

SEQ ID NO: 3698 - DNA, 50 bp, Artificial Sequence
  Synthetic
gctagcagcaaatttaacatcttcttactttctaatcaattacgtctagc

SEQ ID NO: 3699 - DNA, 47 bp, Artificial Sequence
  Synthetic
caacaatcttacctttagggcaaactgaacttgccactgttaatttg

SEQ ID NO: 3700 - DNA, 44 bp, Artificial Sequence
  Synthetic
gctcccaaacattataacagtccttggttgatggctgtagtgtc

SEQ ID NO: 3701 - DNA, 50 bp, Artificial Sequence
  Synthetic
caagcaattttaccaaaacacgtctcacttacttctaatggtcttttagg

SEQ ID NO: 3702 - DNA, 49 bp, Artificial Sequence
  Synthetic
gcaacttaatatgttgcccaatgacgtccattatttatacaggtgattg

SEQ ID NO: 3703 - DNA, 47 bp, Artificial Sequence
  Synthetic
acaacactcacctttttgaaaaagtggtaaaaagtttgatgatcagg

SEQ ID NO: 3704 - DNA, 45 bp, Artificial Sequence
  Synthetic
agaaacacagtttacaaggtgtgaaaagctggtgaagttaaacct

SEQ ID NO: 3705 - DNA, 46 bp, Artificial Sequence
  Synthetic
cacacaacgaccaagatttttatcatttttgttgagagttgtacca

SEQ ID NO: 3706 - DNA, 44 bp, Artificial Sequence
  Synthetic
tggagctacagataagacagtatcaaacaattgggtgttgtgag

SEQ ID NO: 3707 - DNA, 46 bp, Artificial Sequence
  Synthetic
aaccatctttaagcacactagcatgtaaaagtactgtagttgaagt

SEQ ID NO: 3708 - DNA, 46 bp, Artificial Sequence
  Synthetic
caaacttagcctcatgccattgatttgtttgaagcacctttacact

SEQ ID NO: 3709 - DNA, 46 bp, Artificial Sequence
  Synthetic
acacgtccatcattaacataccatttattgtagagttggtgaatgc

SEQ ID NO: 3710 - DNA, 45 bp, Artificial Sequence
  Synthetic
gcataatctaacatagccttggctatagtggtagtgctagtgagg

SEQ ID NO: 3711 - DNA, 49 bp, Artificial Sequence
  Synthetic
gacactgaaaaattatgcaaacgcaccactgttcttattgattatgatc

SEQ ID NO: 3712 - DNA, 48 bp, Artificial Sequence
  Synthetic
actaggttggtcatcaaaattaccatacaccaaattgagttaggtagt

SEQ ID NO: 3713 - DNA, 50 bp, Artificial Sequence
  Synthetic
tgaagtccattagcaaccatgtattaggttttttaaatgtactatgggtg

SEQ ID NO: 3714 - DNA, 48 bp, Artificial Sequence
  Synthetic
ggcacgcttcaattgtttaataagtttgcttatgaaaatgctagacaa

SEQ ID NO: 3715 - DNA, 45 bp, Artificial Sequence
  Synthetic
gaacaggtctaccatcattgtcttttctgttcattatgctggagt

SEQ ID NO: 3716 - DNA, 46 bp, Artificial Sequence
  Synthetic
tccagaattaacagccaattcagttcgttcttggttttataggtgc

SEQ ID NO: 3717 - DNA, 45 bp, Artificial Sequence
  Synthetic
caacaaccacaaacattacacacatggtaaatgtgttcaggttcc

SEQ ID NO: 3718 - DNA, 49 bp, Artificial Sequence
  Synthetic
gccaaagcaccagaaaagttaagttgttataaagaggtgtactaagtcg

SEQ ID NO: 3719 - DNA, 48 bp, Artificial Sequence
  Synthetic
acgcatttaagcatagctctagccccagttgaaaatgaagatatacat

SEQ ID NO: 3720 - DNA, 45 bp, Artificial Sequence
  Synthetic
cctaactgagtgtgtgttaacatctgtgttccacttgttacaact

SEQ ID NO: 3721 - DNA, 46 bp, Artificial Sequence
  Synthetic
gcacgttctttaccactaatagcatctttgacaaagcgtaatgtcc

SEQ ID NO: 3722 - DNA, 47 bp, Artificial Sequence
  Synthetic
gcctataaaacctatctgttgcagtgcctaacatgatacgtatgatt

SEQ ID NO: 3723 - DNA, 48 bp, Artificial Sequence
  Synthetic
ggtaccatctttgtcaactatttgcgttgggttgaagaagatttaact

SEQ ID NO: 3724 - DNA, 49 bp, Artificial Sequence
  Synthetic
ccagcagcttgcaatattgtagaaaatcaagaagataagttttggtgtg

SEQ ID NO: 3725 - DNA, 48 bp, Artificial Sequence
  Synthetic
gctagaatacttctcttggtttgcattttgtcttaacatctcacaatg

SEQ ID NO: 3726 - DNA, 42 bp, Artificial Sequence
  Synthetic
gccacaaacatgagcactttcatttgctattcgtaatgtgcg

SEQ ID NO: 3727 - DNA, 44 bp, Artificial Sequence
  Synthetic
ggaaccaacataaccccactggttgtgattatgtttacaatccg

SEQ ID NO: 3728 - DNA, 44 bp, Artificial Sequence
  Synthetic
tgggttgcataatcataatccaacagctgttactgatgccaaat

SEQ ID NO: 3729 - DNA, 46 bp, Artificial Sequence
  Synthetic
gcaacattagtaggcaatgttgtttcaaagtttttgttcgctatgg

SEQ ID NO: 3730 - DNA, 47 bp, Artificial Sequence
  Synthetic
caccacaacatccacctataaggactaaagagtttagatcttggtgt

SEQ ID NO: 3731 - DNA, 39 bp, Artificial Sequence
  Synthetic
acacctttgtcagaaccagcaacaatgtgcgtacctcat

SEQ ID NO: 3732 - DNA, 44 bp, Artificial Sequence
  Synthetic
gttgaagaattgtcaggaacacctatggcctcttgctttttcac

SEQ ID NO: 3733 - DNA, 47 bp, Artificial Sequence
  Synthetic
tggcacataaaaagtacgagttacaggcataactatatctggtgaaa

SEQ ID NO: 3734 - DNA, 38 bp, Artificial Sequence
  Synthetic
agaccccgtccactagtgtggccgcattcctaatggtt

SEQ ID NO: 3735 - DNA, 46 bp, Artificial Sequence
  Synthetic
atgagtagtgttgatagtgctgtttttcttgacaccacaatacctt

SEQ ID NO: 3736 - DNA, 43 bp, Artificial Sequence
  Synthetic
agtctcaggcaaaacattatcatcagtgtgagcacttgcagtt

SEQ ID NO: 3737 - DNA, 45 bp, Artificial Sequence
  Synthetic
gtctggttggttacatggtgtccttggttttaaaaatgtttccac

SEQ ID NO: 3738 - DNA, 46 bp, Artificial Sequence
  Synthetic
gctaaacaacaaatcttccaaagcattacctcagagaaacattcgt

SEQ ID NO: 3739 - DNA, 46 bp, Artificial Sequence
  Synthetic
gcctgaattgaattagaaatggccttgttaatcaacagggtagtgc

SEQ ID NO: 3740 - DNA, 38 bp, Artificial Sequence
  Synthetic
ggttgacgcagaacatagccatgtaaaggcgtggtctg

SEQ ID NO: 3741 - DNA, 49 bp, Artificial Sequence
  Synthetic
caacaaaacacaagaagactcaacagaaaattatatcaaatggccttgg

SEQ ID NO: 3742 - DNA, 47 bp, Artificial Sequence
  Synthetic
ggcacactactattagacatcgttttgcttaccaagattatatgcaa

SEQ ID NO: 3743 - DNA, 47 bp, Artificial Sequence
  Synthetic
gcagccatcaccggtaagtaataagcttttaatcctgaaactaatgc

SEQ ID NO: 3744 - DNA, 49 bp, Artificial Sequence
  Synthetic
ggaaatttcttcctagcagctctgtctaaactaaacaaaatggctagtg

SEQ ID NO: 3745 - DNA, 41 bp, Artificial Sequence
  Synthetic
cgtttgcgattaccaagactggcaacgttctgatggtgttg

SEQ ID NO: 3746 - DNA, 47 bp, Artificial Sequence
  Synthetic
ggtgacttcgactggttatcaaaacgattctaaccagtcttcttcag

SEQ ID NO: 3747 - DNA, 43 bp, Artificial Sequence
  Synthetic
cagtgctaacctcactatcaaagaaaggttttccacagcttgc

SEQ ID NO: 3748 - DNA, 44 bp, Artificial Sequence
  Synthetic
cggtacctcataagactcctgataatcaagggtgtgctagaact

SEQ ID NO: 3749 - DNA, 43 bp, Artificial Sequence
  Synthetic
tcaccaagtgaggtttcctctaacaacgattggtttttggtgg

SEQ ID NO: 3750 - DNA, 41 bp, Artificial Sequence
  Synthetic
acaggttttgttgctcttgtacgtaaagatacggctggcgt

SEQ ID NO: 3751 - DNA, 45 bp, Artificial Sequence
  Synthetic
ccccatgtaaaaacagttgaagacactgagcctccaaaatcaaga

SEQ ID NO: 3752 - DNA, 50 bp, Artificial Sequence
  Synthetic
gcgaaatggaaaagaacttgttcttaacaggacagtaaattgatagaaga

SEQ ID NO: 3753 - DNA, 38 bp, Artificial Sequence
  Synthetic
aacctcaagtgtgctgccacgagagctgtttttggcac

SEQ ID NO: 3754 - DNA, 36 bp, Artificial Sequence
  Synthetic
tgctgggcggtgtcactctcctggggctcctgcagt

SEQ ID NO: 3755 - DNA, 44 bp, Artificial Sequence
  Synthetic
caagaaacttctctcgttgagccaggataggtagtgctagaatg

SEQ ID NO: 3756 - DNA, 47 bp, Artificial Sequence
  Synthetic
tcagcaattgttgtatgctcaatttctcatgcaaaatatcaaacacc

SEQ ID NO: 3757 - DNA, 47 bp, Artificial Sequence
  Synthetic
gttggtattgggaagtctctacctagaaattttccccatagatgttg

SEQ ID NO: 3758 - DNA, 41 bp, Artificial Sequence
  Synthetic
ctaccaaggggatatcctcgcggagaagcatcaacatcaga

SEQ ID NO: 3759 - DNA, 42 bp, Artificial Sequence
  Synthetic
cactggtgtctgagcaagagcaaatccagcatttgagccaga

SEQ ID NO: 3760 - DNA, 45 bp, Artificial Sequence
  Synthetic
tggaactaatgactgttgtttgacttattgctccagaagactcaa

SEQ ID NO: 3761 - DNA, 43 bp, Artificial Sequence
  Synthetic
gttgcatggtagaagagattggtccatcactagaatcctgtcc

SEQ ID NO: 3762 - DNA, 44 bp, Artificial Sequence
  Synthetic
ttgtctagaatctccatttgcatgagggccaccctcttttaaat

SEQ ID NO: 3763 - DNA, 44 bp, Artificial Sequence
  Synthetic
gcttgaacaacatctaaagggacatttggggctatggattttgc

SEQ ID NO: 3764 - DNA, 43 bp, Artificial Sequence
  Synthetic
tcgctgaagccagtaagatctacaacaaattatgtaggcacac

SEQ ID NO: 3765 - DNA, 49 bp, Artificial Sequence
  Synthetic
gggattaacaaaaagaaaggacagcctgattgattgtgtgttattttcc

SEQ ID NO: 3766 - DNA, 43 bp, Artificial Sequence
  Synthetic
gttggcaaaccgtctttgggtcttcattgtttatggtttaccg

SEQ ID NO: 3767 - DNA, 40 bp, Artificial Sequence
  Synthetic
cagttctctgatggagagcagagcgcagtgtttgaatgtg

SEQ ID NO: 3768 - DNA, 47 bp, Artificial Sequence
  Synthetic
ggaatttccctgactttgtggtttggaaactaacagtgatatatcag

SEQ ID NO: 3769 - DNA, 44 bp, Artificial Sequence
  Synthetic
tgtcaacttcatttggcaacgatcgaaggcgattatttaatgtg

SEQ ID NO: 3770 - DNA, 43 bp, Artificial Sequence
  Synthetic
gcaatatccattcaggtgtttttcccctgctgcaatgttttgg

SEQ ID NO: 3771 - DNA, 44 bp, Artificial Sequence
  Synthetic
gctgcaaccaaaaatgacttttacttttgtatgagcctgttgca

SEQ ID NO: 3772 - DNA, 47 bp, Artificial Sequence
  Synthetic
gcacttgctcttgttttattaaggtctgttgagtctttatgaacagg

SEQ ID NO: 3773 - DNA, 49 bp, Artificial Sequence
  Synthetic
cctctaccagttccaataccaagaaagattcttcaatatggaagtttgg

SEQ ID NO: 3774 - DNA, 46 bp, Artificial Sequence
  Synthetic
ggaagatcagaagcagggtgaatttctatctaacattcccactaca

SEQ ID NO: 3775 - DNA, 41 bp, Artificial Sequence
  Synthetic
gtgtcaaagctggatgcacggtcaatctgtaggtgaagaca

SEQ ID NO: 3776 - DNA, 43 bp, Artificial Sequence
  Synthetic
ctcctgctttgtcatgatcactatttgttaccgggcatcctag

SEQ ID NO: 3777 - DNA, 47 bp, Artificial Sequence
  Synthetic
gggcacatcagataaatttccttgttagaagatggtgatatgatgga

SEQ ID NO: 3778 - DNA, 47 bp, Artificial Sequence
  Synthetic
tgggaacagcaaaataattgtctgtaatacatttgtagccaatggag

SEQ ID NO: 3779 - DNA, 48 bp, Artificial Sequence
  Synthetic
cataccgtacttaaggagtcacatcgacaccaaatcctaataaaatgc

SEQ ID NO: 3780 - DNA, 41 bp, Artificial Sequence
  Synthetic
gacccacctcaatttgtgttgttttagtcactggcaaacgg

SEQ ID NO: 3781 - DNA, 44 bp, Artificial Sequence
  Synthetic
gctcaaacccttcaattccagcggggtaaaaatgatgaaagtgc

SEQ ID NO: 3782 - DNA, 43 bp, Artificial Sequence
  Synthetic
gggtgcttgaggaaggttccaaaaagggatatacgtaatgtgt

SEQ ID NO: 3783 - DNA, 39 bp, Artificial Sequence
  Synthetic
gactcccaccgcagtttcagtcttcgagcgttttgatga

SEQ ID NO: 3784 - DNA, 43 bp, Artificial Sequence
  Synthetic
gggaaaatttagcctatagcctaggtggaagtccatggtgagg

SEQ ID NO: 3785 - DNA, 38 bp, Artificial Sequence
  Synthetic
acactgcaaggtgacgttccgcatggagctgtaggagt

SEQ ID NO: 3786 - DNA, 43 bp, Artificial Sequence
  Synthetic
gcagtcctatcaactgattgaatcatggtcttgaccacatcct

SEQ ID NO: 3787 - DNA, 50 bp, Artificial Sequence
  Synthetic
atgccaaatcttgcatatgtatggtgtggtgaaattattatacaatgagc

SEQ ID NO: 3788 - DNA, 50 bp, Artificial Sequence
  Synthetic
accaaactctaattgtcaattcccaaaggttccatttatttacacaagag

SEQ ID NO: 3789 - DNA, 45 bp, Artificial Sequence
  Synthetic
atgagtaattttgatcccaccacccagcaaagatgtcttttgctt

SEQ ID NO: 3790 - DNA, 49 bp, Artificial Sequence
  Synthetic
gccaggaacaaaacaaaacagtaatgagatcttgtctttgattttcaag

SEQ ID NO: 3791 - DNA, 45 bp, Artificial Sequence
  Synthetic
cgttagaaggagaggtcaatctgttaagtcagcacatcagaaagg

SEQ ID NO: 3792 - DNA, 42 bp, Artificial Sequence
  Synthetic
tgttgtgatagctcccacaggaagctaacagagggaaaatgg

SEQ ID NO: 3793 - DNA, 46 bp, Artificial Sequence
  Synthetic
tgaaacaagttgaaaaaccacctcagtcttcaacctctaatcctcc

SEQ ID NO: 3794 - DNA, 43 bp, Artificial Sequence
  Synthetic
gcttcctgcattctatatgactctccagctggagacttggagt

SEQ ID NO: 3795 - DNA, 48 bp, Artificial Sequence
  Synthetic
aatccaaacctccttaaagctctagtgaaataatgaagttttcctgga

SEQ ID NO: 3796 - DNA, 47 bp, Artificial Sequence
  Synthetic
cctcatctgttgtgttttggccatggatatagtggacaattagtttg

SEQ ID NO: 3797 - DNA, 47 bp, Artificial Sequence
  Synthetic
caacccacttgtgattagtaacagagtttttccagtcttttccatct

SEQ ID NO: 3798 - DNA, 45 bp, Artificial Sequence
  Synthetic
caactccaaactgaaccaagttctagaatctcagtcaactttgga

SEQ ID NO: 3799 - DNA, 41 bp, Artificial Sequence
  Synthetic
tgcccaagattgcattctgtatcgaaggtcttcctggaatg

SEQ ID NO: 3800 - DNA, 48 bp, Artificial Sequence
  Synthetic
gccattggatcaatttcagctttagatcatcacattgataaaaccatg

SEQ ID NO: 3801 - DNA, 46 bp, Artificial Sequence
  Synthetic
gcaataaaccattttcatccaaccactcctggatttccttatgtcc

SEQ ID NO: 3802 - DNA, 45 bp, Artificial Sequence
  Synthetic
cctgtatggaaacctggattcaaattactcaattttgtgccgaat

SEQ ID NO: 3803 - DNA, 41 bp, Artificial Sequence
  Synthetic
ttgccgtgctgttgtcatttagctacattctatgtctggtt

SEQ ID NO: 3804 - DNA, 40 bp, Artificial Sequence
  Synthetic
tttgctgcgttcaacaaaaaggggagaccctcagtgtgat

SEQ ID NO: 3805 - DNA, 49 bp, Artificial Sequence
  Synthetic
cccccaaatgtacagtttgtcaaatgacccacttaaaattcaaataccc

SEQ ID NO: 3806 - DNA, 48 bp, Artificial Sequence
  Synthetic
cgtattttgaagtaaccccgaggaggagacatacttttgattaacagc

SEQ ID NO: 3807 - DNA, 43 bp, Artificial Sequence
  Synthetic
ccattttctatgaaacccgcgattggcaacagggatgcgaaat

SEQ ID NO: 3808 - DNA, 45 bp, Artificial Sequence
  Synthetic
cgcgttgtatgaccagagatctagaagtagaagggagaattcagg

SEQ ID NO: 3809 - DNA, 50 bp, Artificial Sequence
  Synthetic
aggatccaatctttgtatcctgactatacagagatgaagcattaaacaac

SEQ ID NO: 3810 - DNA, 44 bp, Artificial Sequence
  Synthetic
tccatctcaacaatgaacagagatccctgccactcataaacaag

SEQ ID NO: 3811 - DNA, 46 bp, Artificial Sequence
  Synthetic
tcgtcccttgactgttttttcataatgttgtttcaattgtgctaga

SEQ ID NO: 3812 - DNA, 41 bp, Artificial Sequence
  Synthetic
caggtcaatgggcaggacaaagaagcaactataccagacat

SEQ ID NO: 3813 - DNA, 43 bp, Artificial Sequence
  Synthetic
acacccttctttaggatcaatacctaccttctttgctgtgtcc

SEQ ID NO: 3814 - DNA, 41 bp, Artificial Sequence
  Synthetic
gctaagctgctgcaactctttcgagcagcaaatacaggact

SEQ ID NO: 3815 - DNA, 48 bp, Artificial Sequence
  Synthetic
cccgacaacaagtcttattgctattatgctcagcaaatttaaaaacag

SEQ ID NO: 3816 - DNA, 41 bp, Artificial Sequence
  Synthetic
tgaagccacccatgaccatggaaagacaaacttagaggctc

SEQ ID NO: 3817 - DNA, 38 bp, Artificial Sequence
  Synthetic
atgtgccagctgccttacaggcgcacgtagagtaaagc

SEQ ID NO: 3818 - DNA, 44 bp, Artificial Sequence
  Synthetic
actgaaggtgcaacagggtcgtcctactgatataatacctttgg

SEQ ID NO: 3819 - DNA, 43 bp, Artificial Sequence
  Synthetic
ttgagtgccaacctgtgctcaggttacattagagtcagtagac

SEQ ID NO: 3820 - DNA, 44 bp, Artificial Sequence
  Synthetic
accacaatgatgacatctgcaaatttacatccaagtttgagacg

SEQ ID NO: 3821 - DNA, 43 bp, Artificial Sequence
  Synthetic
cggtaagtgtaccctaaaggcccatgaagtgttagttcccaag

SEQ ID NO: 3822 - DNA, 41 bp, Artificial Sequence
  Synthetic
ccaatgttcccccaagcaggggtgaatacatcctttgatcc

SEQ ID NO: 3823 - DNA, 46 bp, Artificial Sequence
  Synthetic
cctctacaaaacatatgtctggcattaatgatgtgtatggcaatgc

SEQ ID NO: 3824 - DNA, 43 bp, Artificial Sequence
  Synthetic
caatgtcacagtagttaccaggatgtctctcaccattgcaaca

SEQ ID NO: 3825 - DNA, 43 bp, Artificial Sequence
  Synthetic
cagcagaaagccggattgaatgcaatgtcaaattacaggattt

SEQ ID NO: 3826 - DNA, 40 bp, Artificial Sequence
  Synthetic
tgacacaaacatgcaaccatgcgtgtgtgtagcatggtcc

SEQ ID NO: 3827 - DNA, 44 bp, Artificial Sequence
  Synthetic
tcgaggataacaggaacactccggaaaattgtccatattagccc

SEQ ID NO: 3828 - DNA, 38 bp, Artificial Sequence
  Synthetic
tcccatccacacgtcatctcgagagggaatccaggagt

SEQ ID NO: 3829 - DNA, 37 bp, Artificial Sequence
  Synthetic
gctgctccagcgtgtcgtgcctaattacgctgtccgc

SEQ ID NO: 3830 - DNA, 40 bp, Artificial Sequence
  Synthetic
gctctcccactccaacacgggccctgtggagactgcatct

SEQ ID NO: 3831 - DNA, 39 bp, Artificial Sequence
  Synthetic
tgcggagatgtggagagaaacggctggacgaactgtgcg

SEQ ID NO: 3832 - DNA, 38 bp, Artificial Sequence
  Synthetic
acgtatacgaagggtggctcgtgggcggtctcccttgt

SEQ ID NO: 3833 - DNA, 38 bp, Artificial Sequence
  Synthetic
tccgttgtgctcgacgccgtgtacgtccaccacatgag

SEQ ID NO: 3834 - DNA, 40 bp, Artificial Sequence
  Synthetic
gcgtatcctcgtctgccctctggccggcgagagaaagaga

SEQ ID NO: 3835 - DNA, 38 bp, Artificial Sequence
  Synthetic
gcggggctttctttgagttcgccgggtatgagccgcca

SEQ ID NO: 3836 - DNA, 37 bp, Artificial Sequence
  Synthetic
tctcgccgaggacgcgttccgtagacgggctcgaagc

SEQ ID NO: 3837 - DNA, 40 bp, Artificial Sequence
  Synthetic
ataccattcccaaccatccctaacatcaagttccctggaa

SEQ ID NO: 3838 - DNA, 39 bp, Artificial Sequence
  Synthetic
tggttaagctgggcgattgtgcaaaaagtctggcaaacc

SEQ ID NO: 3839 - DNA, 39 bp, Artificial Sequence
  Synthetic
tgtgagtcaaaacggaggcttgcaaaaaaacagagtggt

SEQ ID NO: 3840 - DNA, 43 bp, Artificial Sequence
  Synthetic
ccatttcccacaaagtctgccgacacgaaacactgatacttac

SEQ ID NO: 3841 - DNA, 40 bp, Artificial Sequence
  Synthetic
tgcaagtttgtaaggcgtgtttctcccgaagaactgacag

SEQ ID NO: 3842 - DNA, 46 bp, Artificial Sequence
  Synthetic
cctctatgttgcgaaagtatgctttcctttgccatagtaaacatga

SEQ ID NO: 3843 - DNA, 44 bp, Artificial Sequence
  Synthetic
tctgcggtaaacctgtactagatgtttgttgttgtacttcaagc

SEQ ID NO: 3844 - DNA, 40 bp, Artificial Sequence
  Synthetic
cagtgcgacacaactaacgaattgtttgatttcggttgga

SEQ ID NO: 3845 - DNA, 42 bp, Artificial Sequence
  Synthetic
cgccccggctttataacatttagggacttgatatatccgagt

SEQ ID NO: 3846 - DNA, 43 bp, Artificial Sequence
  Synthetic
gttgctgtccggttgtaacatttgtgtttttttaccgaaagac

SEQ ID NO: 3847 - DNA, 42 bp, Artificial Sequence
  Synthetic
ttttccccccctgatcggagtctgcgcagattttaaaatacg

SEQ ID NO: 3848 - DNA, 39 bp, Artificial Sequence
  Synthetic
accctcgggaaggttctcttttacgtcgtttcctgtagc

SEQ ID NO: 3849 - DNA, 38 bp, Artificial Sequence
  Synthetic
atcgcgcaatcgaaccattctctgacggctaaggtgaa

SEQ ID NO: 3850 - DNA, 44 bp, Artificial Sequence
  Synthetic
gcaatgtgatcaacgacgttttatgtatcggaaaaactcgaatt

SEQ ID NO: 3851 - DNA, 48 bp, Artificial Sequence
  Synthetic
caaagcaattcctctatcgcagaagaaagtttcggaaaatgtaaacac

SEQ ID NO: 3852 - DNA, 45 bp, Artificial Sequence
  Synthetic
cctgtaaactggtctgcttgcatgtgttataacagacatatgcaa

SEQ ID NO: 3853 - DNA, 44 bp, Artificial Sequence
  Synthetic
aatctctaacccgtcatctccaaggacactttcaaaatttttcg

SEQ ID NO: 3854 - DNA, 43 bp, Artificial Sequence
  Synthetic
cacaaatcatcgtcgaacaataaggcggtgagcaagttctctt

SEQ ID NO: 3855 - DNA, 40 bp, Artificial Sequence
  Synthetic
gattccgccgtactgaaaaaacaacgctgtttaaaagggc

SEQ ID NO: 3856 - DNA, 40 bp, Artificial Sequence
  Synthetic
ggcagaacagagaccccccctgctgacaggatcgtcccct

SEQ ID NO: 3857 - DNA, 35 bp, Artificial Sequence
  Synthetic
cgcgaagtgttccgcgacgtggagacgcgggcgaa

SEQ ID NO: 3858 - DNA, 40 bp, Artificial Sequence
  Synthetic
gggcgttcgttccgcacatagccgtgacgtatgaagaaga

SEQ ID NO: 3859 - DNA, 38 bp, Artificial Sequence
  Synthetic
gcgatctccacctcgcgtggcctccgatacgtacgact

SEQ ID NO: 3860 - DNA, 41 bp, Artificial Sequence
  Synthetic
aggaaaacgagtacgcgcaccaatcatgcattgtgtggggt

SEQ ID NO: 3861 - DNA, 42 bp, Artificial Sequence
  Synthetic
ccgacttcgataaacctcttggttccttagcccaagagcatg

SEQ ID NO: 3862 - DNA, 43 bp, Artificial Sequence
  Synthetic
tcctttttcaatttcttcttcccctctcacagaacttcaggct

SEQ ID NO: 3863 - DNA, 40 bp, Artificial Sequence
  Synthetic
tggaacttctggtagctcatggaaatgggaggacctgaga

SEQ ID NO: 3864 - DNA, 43 bp, Artificial Sequence
  Synthetic
catctcctgtggcccacttgaatacaataagcaatgaggaaac

SEQ ID NO: 3865 - DNA, 48 bp, Artificial Sequence
  Synthetic
agggagccaattttaaagacagtatgactttcgagtttagtagtacag

SEQ ID NO: 3866 - DNA, 48 bp, Artificial Sequence
  Synthetic
tgagtcccaatactgaaagttttggcgatacaagggtatgatatgacc

SEQ ID NO: 3867 - DNA, 47 bp, Artificial Sequence
  Synthetic
gaaggttaacagagtgtgttactgtgttatcatgcgaacaattcaac

SEQ ID NO: 3868 - DNA, 40 bp, Artificial Sequence
  Synthetic
tcctgggtaacacgttccataagctcatggtcctacattg

SEQ ID NO: 3869 - DNA, 42 bp, Artificial Sequence
  Synthetic
agagactttgttggtcagcactaaaagaagtcctcgtgctat

SEQ ID NO: 3870 - DNA, 44 bp, Artificial Sequence
  Synthetic
cgtggactggtgtatctgaaatgattggaaatctagtggtaccg

SEQ ID NO: 3871 - DNA, 43 bp, Artificial Sequence
  Synthetic
tctaccatccctgtccacccattcaatctagaggcctatttgg

SEQ ID NO: 3872 - DNA, 36 bp, Artificial Sequence
  Synthetic
agcacgagccaaggggacgcttccacgcggcagatc

SEQ ID NO: 3873 - DNA, 39 bp, Artificial Sequence
  Synthetic
aggtgcgtacacggccaccttggagtgggagagaacaga

SEQ ID NO: 3874 - DNA, 38 bp, Artificial Sequence
  Synthetic
tcgttcaggtcaagcgccagctccgcacgtctgtctga

SEQ ID NO: 3875 - DNA, 37 bp, Artificial Sequence
  Synthetic
gcaggagtcggtcgatcgtctagtctatgcgcgcgcc

SEQ ID NO: 3876 - DNA, 39 bp, Artificial Sequence
  Synthetic
gccggcgagcgtttgcttgttcacacagatgcaaccgat

SEQ ID NO: 3877 - DNA, 36 bp, Artificial Sequence
  Synthetic
ctcatacgccacggggtcccccgtctggcgtcgaac

SEQ ID NO: 3878 - DNA, 37 bp, Artificial Sequence
  Synthetic
gcctccgctgcctatcggacgccgttctgtctcgaga

SEQ ID NO: 3879 - DNA, 40 bp, Artificial Sequence
  Synthetic
ggagaagaggtggcggctcagaagaatctgccgatcacca

SEQ ID NO: 3880 - DNA, 35 bp, Artificial Sequence
  Synthetic
ttgcgtcgcttcgagcccgagaaagaggcgccggt

SEQ ID NO: 3881 - DNA, 41 bp, Artificial Sequence
  Synthetic
gccaagctgtctcgcggatacctgcgaagatagtgaccccg

SEQ ID NO: 3882 - DNA, 44 bp, Artificial Sequence
  Synthetic
gtatgacggccccagattcgactccttaacacatcattattcct

SEQ ID NO: 3883 - DNA, 40 bp, Artificial Sequence
  Synthetic
atgagaacagctgctctctgttagcgattttgtgctcatg

SEQ ID NO: 3884 - DNA, 44 bp, Artificial Sequence
  Synthetic
cgtctgactgtttgcgattctggtttccaatgtccattttttcc

SEQ ID NO: 3885 - DNA, 44 bp, Artificial Sequence
  Synthetic
cgtgcctgctttttagcgtgtagctctgttttctttgttttgtc

SEQ ID NO: 3886 - DNA, 44 bp, Artificial Sequence
  Synthetic
tctcggattgcgtcgttatgatttttgttaaaaagcgaatgtcc

SEQ ID NO: 3887 - DNA, 41 bp, Artificial Sequence
  Synthetic
gcccagagagattgcaactacttcacacatcacgagtctcc

SEQ ID NO: 3888 - DNA, 43 bp, Artificial Sequence
  Synthetic
cggcccattggaacgaacattatgatcatctgaaactgtttgg

SEQ ID NO: 3889 - DNA, 45 bp, Artificial Sequence
  Synthetic
cggtatacgcgtttagtagaatgctgatgacgcatacgatctact

SEQ ID NO: 3890 - DNA, 38 bp, Artificial Sequence
  Synthetic
gcgtgtttagtgggtgcagtccgtcattacatctcccg

SEQ ID NO: 3891 - DNA, 42 bp, Artificial Sequence
  Synthetic
tcagacctctcatcgttcacataatttcgacgcaaactttgg

SEQ ID NO: 3892 - DNA, 42 bp, Artificial Sequence
  Synthetic
tggaagtccgacagatgcaatagttcgttgagagaattaggc

SEQ ID NO: 3893 - DNA, 49 bp, Artificial Sequence
  Synthetic
agtcttagtgaggactgactttgaagaaacatactgatttgtacagaag

SEQ ID NO: 3894 - DNA, 42 bp, Artificial Sequence
  Synthetic
tcagacatgggaagcaagatacaagtgttggtaaacgcgtgt

SEQ ID NO: 3895 - DNA, 39 bp, Artificial Sequence
  Synthetic
acacaaggcaattttagcccttttttcaaacgtctgggc

SEQ ID NO: 3896 - DNA, 39 bp, Artificial Sequence
  Synthetic
cgcccatatgctaaacgaacggtttgtggagtcggtagc

SEQ ID NO: 3897 - DNA, 45 bp, Artificial Sequence
  Synthetic
ggactagtgttcgcattagagaatcgagcctagcgattagtttgt

SEQ ID NO: 3898 - DNA, 39 bp, Artificial Sequence
  Synthetic
cggcctggaatacaagaccattgatgccaatgaagcctt

SEQ ID NO: 3899 - DNA, 41 bp, Artificial Sequence
  Synthetic
accatgacctcgagaatctctctgaatgggagcctttgaac

SEQ ID NO: 3900 - DNA, 43 bp, Artificial Sequence
  Synthetic
agacgttcgagacctgttcaaaatctgtgtttgtatctgctcc

SEQ ID NO: 3901 - DNA, 46 bp, Artificial Sequence
  Synthetic
acaaccattgagtgagaatacgctgaattttttctggaatcttgag

SEQ ID NO: 3902 - DNA, 35 bp, Artificial Sequence
  Synthetic
cgagccaaggggacgatccgccgacacactgcagc

SEQ ID NO: 3903 - DNA, 39 bp, Artificial Sequence
  Synthetic
cgtctccgatccgtcaggaccgagctctctcaccccgtg

SEQ ID NO: 3904 - DNA, 38 bp, Artificial Sequence
  Synthetic
tctcgctccgcttggttttccggccgccgagattaacg

SEQ ID NO: 3905 - DNA, 38 bp, Artificial Sequence
  Synthetic
gtctgcggaccccgatgtaaaccggtgattcccggaga

SEQ ID NO: 3906 - DNA, 36 bp, Artificial Sequence
  Synthetic
cctcgccttgcaaactccgtacatgagggcggccag

SEQ ID NO: 3907 - DNA, 43 bp, Artificial Sequence
  Synthetic
ccctcttgagcttcctatacagtttccttaatgggaacgggga

SEQ ID NO: 3908 - DNA, 44 bp, Artificial Sequence
  Synthetic
agcgacggtaaatgcatttgaaactattgccgcaaatatcattg

SEQ ID NO: 3909 - DNA, 42 bp, Artificial Sequence
  Synthetic
ccgatcaaggaatggggcatcagtttcctttggcatatccgc

SEQ ID NO: 3910 - DNA, 43 bp, Artificial Sequence
  Synthetic
ggcctattatcttttgcctaggcattttctgacatgaccctcg

SEQ ID NO: 3911 - DNA, 45 bp, Artificial Sequence
  Synthetic
agtttctccaagcgaatctctgtatctcatcggaggacttgaatg

SEQ ID NO: 3912 - DNA, 41 bp, Artificial Sequence
  Synthetic
ccagatcaggttttttgggttgggtaaccgaaaacggtccg

SEQ ID NO: 3913 - DNA, 49 bp, Artificial Sequence
  Synthetic
tcttcttccactgttggtgcatatttatggaaaagtgaatcagtatagg

SEQ ID NO: 3914 - DNA, 41 bp, Artificial Sequence
  Synthetic
ggttgctcacgctgtctattgtcagaagatgaccatgaaca

SEQ ID NO: 3915 - DNA, 40 bp, Artificial Sequence
  Synthetic
tctgtacctgaatcgtctgcctatagtgtgccccaactgt

SEQ ID NO: 3916 - DNA, 43 bp, Artificial Sequence
  Synthetic
cggactaagttgctgtataacatcagcgacagttgaaacggaa

SEQ ID NO: 3917 - DNA, 40 bp, Artificial Sequence
  Synthetic
tgccgcactactgtttctctattggacaacgtgtagatgg

SEQ ID NO: 3918 - DNA, 43 bp, Artificial Sequence
  Synthetic
cccattatcatatgcccactgcgttggaacatagttttgctga

SEQ ID NO: 3919 - DNA, 39 bp, Artificial Sequence
  Synthetic
tcctggcacaaatctaggcgcagtttagagctgcagaca

SEQ ID NO: 3920 - DNA, 44 bp, Artificial Sequence
  Synthetic
cgtccatggctctaagttatattcacatgcagcaattgaaatgc

SEQ ID NO: 3921 - DNA, 42 bp, Artificial Sequence
  Synthetic
tgtttccagtgtccacgtattttccggagacttgtccatcag

SEQ ID NO: 3922 - DNA, 45 bp, Artificial Sequence
  Synthetic
ggtgtgtggtagatgtaacatgtaccatcaggtacagatgtccct

SEQ ID NO: 3923 - DNA, 42 bp, Artificial Sequence
  Synthetic
cacaggcaaatatggtgtacctttaacatctggtcctgacat

SEQ ID NO: 3924 - DNA, 48 bp, Artificial Sequence
  Synthetic
ctctgtattgatgtccagacactttccatattttgaattgaaaaagcc

SEQ ID NO: 3925 - DNA, 50 bp, Artificial Sequence
  Synthetic
acccataccccaatattctccaatagttgctatggattataaacaaactc

SEQ ID NO: 3926 - DNA, 43 bp, Artificial Sequence
  Synthetic
cacacatacacaatcatcgttttgtgcccctacctcttcttcc

SEQ ID NO: 3927 - DNA, 43 bp, Artificial Sequence
  Synthetic
agtgtaattaaaggtgtggcaacctgttccctgccaaaaatgc

SEQ ID NO: 3928 - DNA, 48 bp, Artificial Sequence
  Synthetic
tggtcgctcttctgtattttcaaatacatataaaagcactgtgtacaa

SEQ ID NO: 3929 - DNA, 46 bp, Artificial Sequence
  Synthetic
gccccgtacactgaacaattgctgtttgctattttatagtaaggtc

SEQ ID NO: 3930 - DNA, 46 bp, Artificial Sequence
  Synthetic
caggtcaatctcagtttgtggtataatcagcagtataatcatgcac

SEQ ID NO: 3931 - DNA, 42 bp, Artificial Sequence
  Synthetic
cgttttaatttctgcagcgtctgtgacagctcagcagttgtt

SEQ ID NO: 3932 - DNA, 42 bp, Artificial Sequence
  Synthetic
cacatccatatcacttcctgaccaggctcacaacatagtgtg

SEQ ID NO: 3933 - DNA, 47 bp, Artificial Sequence
  Synthetic
ccactgcaccattttagatagttcaacaccagaatggatagaaagac

SEQ ID NO: 3934 - DNA, 45 bp, Artificial Sequence
  Synthetic
tgtactattggcttccagtccctatgaaacaatggataaagcatg

SEQ ID NO: 3935 - DNA, 48 bp, Artificial Sequence
  Synthetic
ggaccatgtcctttcaaaaaaacataatggaaatcctgtataccaatt

SEQ ID NO: 3936 - DNA, 41 bp, Artificial Sequence
  Synthetic
acgttttatggccgtcatgtatggatgggtggtgtaaagtg

SEQ ID NO: 3937 - DNA, 38 bp, Artificial Sequence
  Synthetic
cgggctctgtggttctgggaggcacctacgaagcctca

SEQ ID NO: 3938 - DNA, 48 bp, Artificial Sequence
  Synthetic
gcacagtttacatttgtccaatgataggtatcggtttcaaaaacataa

SEQ ID NO: 3939 - DNA, 44 bp, Artificial Sequence
  Synthetic
gcaaaaacacaaaactaacacacaacgccatatatgctgctagg

SEQ ID NO: 3940 - DNA, 45 bp, Artificial Sequence
  Synthetic
tacctcaccagtttgggggaagttctactacatatactaatccca

SEQ ID NO: 3941 - DNA, 45 bp, Artificial Sequence
  Synthetic
atcaggatcaggtgccacacgataatcccatatttcaaaatgctg

SEQ ID NO: 3942 - DNA, 43 bp, Artificial Sequence
  Synthetic
gccataacgcaaatgtggagctcaatctccttttgataccacc

SEQ ID NO: 3943 - DNA, 47 bp, Artificial Sequence
  Synthetic
tgtcctctaagctagtggcaaccatactatgaattctaccttactgg

SEQ ID NO: 3944 - DNA, 48 bp, Artificial Sequence
  Synthetic
gtaaaagcatagttggcagcctatttgttttatacactatgccttacc

SEQ ID NO: 3945 - DNA, 38 bp, Artificial Sequence
  Synthetic
gaggggagggaaaaactggccccaatgggtgttgtact

SEQ ID NO: 3946 - DNA, 42 bp, Artificial Sequence
  Synthetic
aggctggaccactgttaccagttgcatacccagcagtagacc

SEQ ID NO: 3947 - DNA, 42 bp, Artificial Sequence
  Synthetic
gcctcaacagatggtgattgtatgacccagttaaagatgtct

SEQ ID NO: 3948 - DNA, 47 bp, Artificial Sequence
  Synthetic
caccagaaaattcagcacacatgacatcttctaatatagtgccaatc

SEQ ID NO: 3949 - DNA, 46 bp, Artificial Sequence
  Synthetic
caaaggctgtgatgtaatgtctacttgtacactgtacaactaggga

SEQ ID NO: 3950 - DNA, 42 bp, Artificial Sequence
  Synthetic
tccaacatcccacacaacatgctggtattgatgaaccaacaa

SEQ ID NO: 3951 - DNA, 48 bp, Artificial Sequence
  Synthetic
tgtcctgtccattatagtcagtgttagaaagtttccttggtagatctg

SEQ ID NO: 3952 - DNA, 43 bp, Artificial Sequence
  Synthetic
ccagaatattgacatattggtgcctcaggagctccaattcctt

SEQ ID NO: 3953 - DNA, 43 bp, Artificial Sequence
  Synthetic
cagcacagtgaaattgtctaagatcacatggtgtcattggcat

SEQ ID NO: 3954 - DNA, 40 bp, Artificial Sequence
  Synthetic
tggtgaaccattgcaaccaattaaactcctctgaccctca

SEQ ID NO: 3955 - DNA, 46 bp, Artificial Sequence
  Synthetic
tgtctccttcttttgtcttcttccattgctcaacatacaccttagc

SEQ ID NO: 3956 - DNA, 45 bp, Artificial Sequence
  Synthetic
cctcagcttgtacttacctggataaccaaaggctgttttagtacc

SEQ ID NO: 3957 - DNA, 48 bp, Artificial Sequence
  Synthetic
agcaacgaatagtaatgctctgtaatgaaaattattgtgtgtgtgttg

SEQ ID NO: 3958 - DNA, 45 bp, Artificial Sequence
  Synthetic
tgaaccatctgtactttcatcgaaaaaagttggtttgttgtggat

SEQ ID NO: 3959 - DNA, 49 bp, Artificial Sequence
  Synthetic
tgcctcaattacttcttctaaagcaagaagctacaaaagtaataagtcc

SEQ ID NO: 3960 - DNA, 46 bp, Artificial Sequence
  Synthetic
accatttgactgcaatctctaacattatacgcagatgaagatagca

SEQ ID NO: 3961 - DNA, 47 bp, Artificial Sequence
  Synthetic
ggtagtttaatttgttgtgggactctatgaggaatgcattagatggt

SEQ ID NO: 3962 - DNA, 47 bp, Artificial Sequence
  Synthetic
ctcagaggcatactgtgatttacttttcaagtttcagaagctaaagc

SEQ ID NO: 3963 - DNA, 40 bp, Artificial Sequence
  Synthetic
ggcctcctctcaggggaattgaggcctcctccaactccat

SEQ ID NO: 3964 - DNA, 45 bp, Artificial Sequence
  Synthetic
cacgtttatttctacctgctctgtaactgtaaacctcccaaaagg

SEQ ID NO: 3965 - DNA, 44 bp, Artificial Sequence
  Synthetic
tggattaccccctacaccaccaggggaaatcgatattgtatcag

SEQ ID NO: 3966 - DNA, 45 bp, Artificial Sequence
  Synthetic
agtctgcatcaggagcagctgatgtttcatttacatttgaaaggg

SEQ ID NO: 3967 - DNA, 47 bp, Artificial Sequence
  Synthetic
gctctgtttgtgatggtataatggttggattggtagtgtttaatccc

SEQ ID NO: 3968 - DNA, 46 bp, Artificial Sequence
  Synthetic
tgggtatgtgttaggattttcaacagaagaggaaatccattaggtg

SEQ ID NO: 3969 - DNA, 43 bp, Artificial Sequence
  Synthetic
gggaagcaagtttattatcctgcttggctggaaaggttggaga

SEQ ID NO: 3970 - DNA, 49 bp, Artificial Sequence
  Synthetic
gcgtaagggtcagttttttccttattacaagtatattacttcatgggcc

SEQ ID NO: 3971 - DNA, 37 bp, Artificial Sequence
  Synthetic
actgtcgccagtggggtgcgctcagccactaacccgt

SEQ ID NO: 3972 - DNA, 43 bp, Artificial Sequence
  Synthetic
acactatttgtcaccataagcaagtctgtgggatggaaccaac

SEQ ID NO: 3973 - DNA, 43 bp, Artificial Sequence
  Synthetic
tgcttcaacagttggtgacattaaaattcacacaacctctagc

SEQ ID NO: 3974 - DNA, 40 bp, Artificial Sequence
  Synthetic
acagattttgcccgaagatgctaaaggttggtggtggaag

SEQ ID NO: 3975 - DNA, 50 bp, Artificial Sequence
  Synthetic
agggtcccattacaattaaagaaggttcaaatgttaggagagataacaag

SEQ ID NO: 3976 - DNA, 41 bp, Artificial Sequence
  Synthetic
cttggcagccgtgttggtaagataagtcagagttctcaggg

SEQ ID NO: 3977 - DNA, 45 bp, Artificial Sequence
  Synthetic
gtggtagaaaagagagtgttgctaacaagaaaacagcagacaagc

SEQ ID NO: 3978 - DNA, 44 bp, Artificial Sequence
  Synthetic
accttgtctatgtagtcctcaactacaccaatgatgaaacagga

SEQ ID NO: 3979 - DNA, 43 bp, Artificial Sequence
  Synthetic
catgctcttggaagtttatatcccactctttgggccaagatcc

SEQ ID NO: 3980 - DNA, 49 bp, Artificial Sequence
  Synthetic
tctggggacatcataaccatcataaggttttcctaggtttactattcca

SEQ ID NO: 3981 - DNA, 45 bp, Artificial Sequence
  Synthetic
tcagtcctgtggttaataaagtgttattcagcacaaactaccatg

SEQ ID NO: 3982 - DNA, 45 bp, Artificial Sequence
  Synthetic
gtcgtgtgcttctaatttaactggtttggagggctgctactatag

SEQ ID NO: 3983 - DNA, 43 bp, Artificial Sequence
  Synthetic
gctaccaaaggcactccctaattgtttagacactcaccaaggt

SEQ ID NO: 3984 - DNA, 44 bp, Artificial Sequence
  Synthetic
ggtctagtgatgtttaaccactgacctgtcacaagtcaccatgg

SEQ ID NO: 3985 - DNA, 45 bp, Artificial Sequence
  Synthetic
acttcttgttgatcatacccatcaagtttaaccaaaccaggtgac

SEQ ID NO: 3986 - DNA, 43 bp, Artificial Sequence
  Synthetic
ggtacccttgcaagatcttaagatcacccacagtaacagtccc

SEQ ID NO: 3987 - DNA, 43 bp, Artificial Sequence
  Synthetic
ccaagccctgaaatatagctgttatagaggagagcaaatccag

SEQ ID NO: 3988 - DNA, 43 bp, Artificial Sequence
  Synthetic
actcaggtttcttcttgggtgtattgatgtgtattgcccaagg

SEQ ID NO: 3989 - DNA, 45 bp, Artificial Sequence
  Synthetic
cctatgatattacctgtgttggccatatgactatccaacccaacc

SEQ ID NO: 3990 - DNA, 41 bp, Artificial Sequence
  Synthetic
gtgaggtctacttccaatcgtgtcctggtgttaaggaacca

SEQ ID NO: 3991 - DNA, 45 bp, Artificial Sequence
  Synthetic
ccttgtgtctttagtagcgttgtttttcccttatgtgtctttggg

SEQ ID NO: 3992 - DNA, 43 bp, Artificial Sequence
  Synthetic
gcatgcatttgtgaccaaaacaccaggtatcttaacaggctca

SEQ ID NO: 3993 - DNA, 45 bp, Artificial Sequence
  Synthetic
tgcattgagtaaacaggatgtatcaaatgtgaccttccttaaacg

SEQ ID NO: 3994 - DNA, 46 bp, Artificial Sequence
  Synthetic
cttctcttgtcttcctgatgtgtatcgcgagatactaacaaaaacc

SEQ ID NO: 3995 - DNA, 38 bp, Artificial Sequence
  Synthetic
ttgtcggcccattcctgttcgtcggacagagtgatggt

SEQ ID NO: 3996 - DNA, 45 bp, Artificial Sequence
  Synthetic
ggagctcttctttcttctcttttgtgtcgttttcccaaatgaagt

SEQ ID NO: 3997 - DNA, 44 bp, Artificial Sequence
  Synthetic
tgtgaattcttcatacccctcatgtcatccgtcaagaaggaaga

SEQ ID NO: 3998 - DNA, 39 bp, Artificial Sequence
  Synthetic
cctcaggagttgatgcatgggggcgatctgaatttcgtg

SEQ ID NO: 3999 - DNA, 44 bp, Artificial Sequence
  Synthetic
tgtttcactaacctcttcaggagatattgaccgtttcttgaggg

SEQ ID NO: 4000 - DNA, 40 bp, Artificial Sequence
  Synthetic
gacttgcttccgggctaggcacaagcggtaatgcagttga

SEQ ID NO: 4001 - DNA, 39 bp, Artificial Sequence
  Synthetic
ggatttaacacggacgcggaaaccgattacgtggggttt

SEQ ID NO: 4002 - DNA, 38 bp, Artificial Sequence
  Synthetic
cttcgtttgggtcgttctcccccacacttcaggaccta

SEQ ID NO: 4003 - DNA, 40 bp, Artificial Sequence
  Synthetic
ggtctgttcccggtgatattgattggacaatcctgaggtg

SEQ ID NO: 4004 - DNA, 40 bp, Artificial Sequence
  Synthetic
cccacgtcctgcaacaaatcctggttagaccgagtggcga

SEQ ID NO: 4005 - DNA, 40 bp, Artificial Sequence
  Synthetic
gtctccaaaacccggagcacgggaatttaacaagacacgc

SEQ ID NO: 4006 - DNA, 39 bp, Artificial Sequence
  Synthetic
tctgtccccgctgcctcatcgcaggggctacattctgga

SEQ ID NO: 4007 - DNA, 38 bp, Artificial Sequence
  Synthetic
cttgcaatctgggcgcagggacgaggattgggaggagg

SEQ ID NO: 4008 - DNA, 40 bp, Artificial Sequence
  Synthetic
cggtacagactcccaggtagcatggaagacccaagagcga

SEQ ID NO: 4009 - DNA, 41 bp, Artificial Sequence
  Synthetic
gatgccgttcaggttcaccctgtgcaactttagccagacca

SEQ ID NO: 4010 - DNA, 35 bp, Artificial Sequence
  Synthetic
tgctggaagcactgggcgcgggatgggccggagtt

SEQ ID NO: 4011 - DNA, 38 bp, Artificial Sequence
  Synthetic
cacctctaccgggtcctggatggtccacctctcccgat

SEQ ID NO: 4012 - DNA, 40 bp, Artificial Sequence
  Synthetic
tgcacaacatgaacccccggggcctggatcttaaggttgg

SEQ ID NO: 4013 - DNA, 36 bp, Artificial Sequence
  Synthetic
aaccgggtgcggcaagtccggggtgatgagctgcga

SEQ ID NO: 4014 - DNA, 38 bp, Artificial Sequence
  Synthetic
ccccgaaacgaggaagtctgcttccaggcggtcccaga

SEQ ID NO: 4015 - DNA, 38 bp, Artificial Sequence
  Synthetic
ctgtacgccctgcaatccctccggagcttgcccttgga

SEQ ID NO: 4016 - DNA, 38 bp, Artificial Sequence
  Synthetic
gccttcgtctcagagtggtccgtgtcctgcaggggcgt

SEQ ID NO: 4017 - DNA, 39 bp, Artificial Sequence
  Synthetic
tgacaacctgagtgccgaggtccagctgttggggtaggt

SEQ ID NO: 4018 - DNA, 37 bp, Artificial Sequence
  Synthetic
cgcgtcaggattgtgcccgcgcaacgcacttccattc

SEQ ID NO: 4019 - DNA, 39 bp, Artificial Sequence
  Synthetic
tacgtgcgcgccagcatcctacacatagatgggctccga

SEQ ID NO: 4020 - DNA, 40 bp, Artificial Sequence
  Synthetic
cgctcaagcttacgccctccatggttaacggccttgtagg

SEQ ID NO: 4021 - DNA, 40 bp, Artificial Sequence
  Synthetic
cgcccgcgattcatggaactatctgggcggctaggacaat

SEQ ID NO: 4022 - DNA, 35 bp, Artificial Sequence
  Synthetic
ccccaagctggtcgccctttcccagcgatcccagc

SEQ ID NO: 4023 - DNA, 38 bp, Artificial Sequence
  Synthetic
cgccactcctgaagttcctcctcgctgcacgggctgta

SEQ ID NO: 4024 - DNA, 36 bp, Artificial Sequence
  Synthetic
gttcaaagtcacggggcccggacgcggcggttgaca

SEQ ID NO: 4025 - DNA, 35 bp, Artificial Sequence
  Synthetic
cgccgtctttacgcggcactccccgtcaacgtcgc

SEQ ID NO: 4026 - DNA, 38 bp, Artificial Sequence
  Synthetic
ccaccgcccccagaggaaattcgcgctcaaaatccccg

SEQ ID NO: 4027 - DNA, 39 bp, Artificial Sequence
  Synthetic
cggtcgatcttgacgcgcttaggcgctaacgatgcatct

SEQ ID NO: 4028 - DNA, 38 bp, Artificial Sequence
  Synthetic
gctcaggggcgttggggttatgtcatcatttgcggcgg

SEQ ID NO: 4029 - DNA, 36 bp, Artificial Sequence
  Synthetic
atgctcgaggacctggcccactaggaagtgcggcgg

SEQ ID NO: 4030 - DNA, 37 bp, Artificial Sequence
  Synthetic
ctcgaaccggggtacacgccttcctccgtagcctggc

SEQ ID NO: 4031 - DNA, 37 bp, Artificial Sequence
  Synthetic
aaaagggggctcgctcgccagcattgccagggttacg

SEQ ID NO: 4032 - DNA, 40 bp, Artificial Sequence
  Synthetic
ggtgcgcacgtggttgttgaaaggcctacgagcagacggt

SEQ ID NO: 4033 - DNA, 42 bp, Artificial Sequence
  Synthetic
gggcacgtacggcgtcttgtaagcgatcaactactcagtgct

SEQ ID NO: 4034 - DNA, 38 bp, Artificial Sequence
  Synthetic
gggcttgctgctgggacatctaaggatgcacccgctgc

SEQ ID NO: 4035 - DNA, 35 bp, Artificial Sequence
  Synthetic
gctgttgtagcggcccacgaggccatccgtcccga

SEQ ID NO: 4036 - DNA, 42 bp, Artificial Sequence
  Synthetic
cccgcgtaggttcttgaaagcctttttccagacaagccggca

SEQ ID NO: 4037 - DNA, 41 bp, Artificial Sequence
  Synthetic
cgtactgcggcggaattttctgacgacaccgacagtttgag

SEQ ID NO: 4038 - DNA, 37 bp, Artificial Sequence
  Synthetic
cgggagccaatgcgggttcaagcgcggcgtccatgaa

SEQ ID NO: 4039 - DNA, 42 bp, Artificial Sequence
  Synthetic
agcgtaggtcttccagcggtttgaacgccatggccaataacg

SEQ ID NO: 4040 - DNA, 41 bp, Artificial Sequence
  Synthetic
catcacgctctcgtacgagggccttgttagagatgaggcgc

SEQ ID NO: 4041 - DNA, 41 bp, Artificial Sequence
  Synthetic
ggtcccagcccagcttgaaattaagtggggcgtcaaaatgg

SEQ ID NO: 4042 - DNA, 45 bp, Artificial Sequence
  Synthetic
aggagcattaactttagcagcatttcaagtacttggaaagcaaga

SEQ ID NO: 4043 - DNA, 41 bp, Artificial Sequence
  Synthetic
gctgggtggagcgaaaggtgagcaagtttactggtcgctgc

SEQ ID NO: 4044 - DNA, 40 bp, Artificial Sequence
  Synthetic
tgcccagggccttgtagacgcgagtgaccgttactgacgc

SEQ ID NO: 4045 - DNA, 38 bp, Artificial Sequence
  Synthetic
gcgtcagcgactacggagtcaagcttacaagcgcgggc

SEQ ID NO: 4046 - DNA, 35 bp, Artificial Sequence
  Synthetic
tttccgcgcctgggtctggcagacgagcggccgtt

SEQ ID NO: 4047 - DNA, 36 bp, Artificial Sequence
  Synthetic
caacacgcgctgcaccctgtgtgcgcgagtttgctc

SEQ ID NO: 4048 - DNA, 38 bp, Artificial Sequence
  Synthetic
ggtgtccagcacgtcctcctacccgaccatgcagatca

SEQ ID NO: 4049 - DNA, 35 bp, Artificial Sequence
  Synthetic
aggctcggtggccgtggatgtgcagaccgacccct

SEQ ID NO: 4050 - DNA, 41 bp, Artificial Sequence
  Synthetic
cggcgggatcttcctcggtaatactgttgcagagagatggc

SEQ ID NO: 4051 - DNA, 41 bp, Artificial Sequence
  Synthetic
cgttccaggtgcccatgaacgcatcaattttgcgtccctgg

SEQ ID NO: 4052 - DNA, 38 bp, Artificial Sequence
  Synthetic
gcatcttccatctccaccaccgccgtgcagcgcgagat

SEQ ID NO: 4053 - DNA, 35 bp, Artificial Sequence
  Synthetic
tgccagttctgggcctggccagctccggtcgtgca

SEQ ID NO: 4054 - DNA, 38 bp, Artificial Sequence
  Synthetic
ggagccaccgtggggtttctaaccgggtctggtgcagt

SEQ ID NO: 4055 - DNA, 44 bp, Artificial Sequence
  Synthetic
aattgttatgtcagcgcctccccaaaacaaactaatgctggaaa

SEQ ID NO: 4056 - DNA, 43 bp, Artificial Sequence
  Synthetic
acccagagaatctagcaaaagcttgtggttgacttacaagaca

SEQ ID NO: 4057 - DNA, 38 bp, Artificial Sequence
  Synthetic
tggtgttggtgggcagtgtgttgtacctgcccgactcc

SEQ ID NO: 4058 - DNA, 40 bp, Artificial Sequence
  Synthetic
gttgcccagggaactctgcacacctacgagtggaacttcc

SEQ ID NO: 4059 - DNA, 41 bp, Artificial Sequence
  Synthetic
acgctgcgcttaatctcgaactgttcgactcctcggttagc

SEQ ID NO: 4060 - DNA, 35 bp, Artificial Sequence
  Synthetic
cctggcgcatggtaggtgcccctgcccttccagca

SEQ ID NO: 4061 - DNA, 40 bp, Artificial Sequence
  Synthetic
gtagacggcctcgatgacgctgaagttttcgacgtggtca

SEQ ID NO: 4062 - DNA, 35 bp, Artificial Sequence
  Synthetic
tctgcttaagccggcggtcgctcgcgcacctgcta

SEQ ID NO: 4063 - DNA, 40 bp, Artificial Sequence
  Synthetic
gcacctgtggcgattgtagcatgggaaccccaccatgaac

SEQ ID NO: 4064 - DNA, 41 bp, Artificial Sequence
  Synthetic
ccccgagattgctgttcccaaatgcggtactggtacttggg

SEQ ID NO: 4065 - DNA, 39 bp, Artificial Sequence
  Synthetic
tacccgaatatgcagcgcggctgtggggcttgtggttac

SEQ ID NO: 4066 - DNA, 37 bp, Artificial Sequence
  Synthetic
gctcaagtgtctgcacgggacgcgctgaccgttctcg

SEQ ID NO: 4067 - DNA, 40 bp, Artificial Sequence
  Synthetic
tgctgatggaacgctaccgctttggaagatctcggtctgc

SEQ ID NO: 4068 - DNA, 42 bp, Artificial Sequence
  Synthetic
cgaggaggacgtggttccactgtgtttggtctttctgggctg

SEQ ID NO: 4069 - DNA, 42 bp, Artificial Sequence
  Synthetic
tcctgtgggggttctagacgaggcaacccaaaatcaagcagg

SEQ ID NO: 4070 - DNA, 39 bp, Artificial Sequence
  Synthetic
tcgacgctgcgcttaagcacgttacactagcgccctggt

SEQ ID NO: 4071 - DNA, 40 bp, Artificial Sequence
  Synthetic
tgtagtgcagggtctcctcgacttggaatgtatgcgccgc

SEQ ID NO: 4072 - DNA, 41 bp, Artificial Sequence
  Synthetic
gcccgtccacaacgttttaagggacgagaacctgaaggagc

SEQ ID NO: 4073 - DNA, 38 bp, Artificial Sequence
  Synthetic
actcaagcagcccctcgccagctggccaactacattgc

SEQ ID NO: 4074 - DNA, 41 bp, Artificial Sequence
  Synthetic
gatcgtgccctgggtgatgactctttgaggaccaattgcgc

SEQ ID NO: 4075 - DNA, 37 bp, Artificial Sequence
  Synthetic
acgaggaggcttgaccggaggcaggcaacagagcagc

SEQ ID NO: 4076 - DNA, 40 bp, Artificial Sequence
  Synthetic
gctgacctcgactctgctgaaacttgaccaccagggagct

SEQ ID NO: 4077 - DNA, 42 bp, Artificial Sequence
  Synthetic
gccagctggacacctgagttagactaccgtactacttccgcg

SEQ ID NO: 4078 - DNA, 40 bp, Artificial Sequence
  Synthetic
ggcctggggagcctgaaaagcagttcgtggaggagtttgt

SEQ ID NO: 4079 - DNA, 43 bp, Artificial Sequence
  Synthetic
tccagagtagagtcttatttcagctcccgaagttgcatgagaa

SEQ ID NO: 4080 - DNA, 47 bp, Artificial Sequence
  Synthetic
caccagggaaaggataattagcaaatatctgctgggttagatattgc

SEQ ID NO: 4081 - DNA, 43 bp, Artificial Sequence
  Synthetic
acctgacataaagcaggccataatctaccaaggagaacatggt

SEQ ID NO: 4082 - DNA, 44 bp, Artificial Sequence
  Synthetic
agctatgcttgatttgtgggtttccagttacatggtatgatgga

SEQ ID NO: 4083 - DNA, 45 bp, Artificial Sequence
  Synthetic
ctttgagcagtattaccttgtccaagtgtcagtcaaaaccttgtt

SEQ ID NO: 4084 - DNA, 47 bp, Artificial Sequence
  Synthetic
gaggttctttggtatgtggcttaatgataaggcaaatcgttacagaa

SEQ ID NO: 4085 - DNA, 49 bp, Artificial Sequence
  Synthetic
acaaagtacaaaagaaccacgagaactcaggtttgcatattcaaattac

SEQ ID NO: 4086 - DNA, 39 bp, Artificial Sequence
  Synthetic
gcagacaatgctgcagacgcagccattccccacctacct

SEQ ID NO: 4087 - DNA, 48 bp, Artificial Sequence
  Synthetic
cgagatcaaaacaggggtagatcatttcctattacttggtaattgtgg

SEQ ID NO: 4088 - DNA, 41 bp, Artificial Sequence
  Synthetic
cccgtctgctgggtgatgactaccccagcagaagcaaaagt

SEQ ID NO: 4089 - DNA, 38 bp, Artificial Sequence
  Synthetic
tgagtgacagaaccccagggcttccttactcccccctt

SEQ ID NO: 4090 - DNA, 49 bp, Artificial Sequence
  Synthetic
aaatgctaccaagtctccattatcaggtggaaatatatgtgttagagtt

SEQ ID NO: 4091 - DNA, 46 bp, Artificial Sequence
  Synthetic
gccaaggtagatgtttccataaacttttggtagcctatccaaaacc

SEQ ID NO: 4092 - DNA, 40 bp, Artificial Sequence
  Synthetic
aaggccacccgtactgagagacacattctcccaccaccag

SEQ ID NO: 4093 - DNA, 44 bp, Artificial Sequence
  Synthetic
tgggctgctgaataacataatgattgcaccgcattctaatttcg

SEQ ID NO: 4094 - DNA, 43 bp, Artificial Sequence
  Synthetic
cctgggatatgatcctgaccacaaggcacactgacatacatct

SEQ ID NO: 4095 - DNA, 41 bp, Artificial Sequence
  Synthetic
ggcagcattaactggatggggatgcgaattcccctcaacac

SEQ ID NO: 4096 - DNA, 45 bp, Artificial Sequence
  Synthetic
tggacttacaccaacaatttgtagacatcatgttacattcctgca

SEQ ID NO: 4097 - DNA, 44 bp, Artificial Sequence
  Synthetic
cctggctttatcacttacattttggctgcatgctggaataagct

SEQ ID NO: 4098 - DNA, 40 bp, Artificial Sequence
  Synthetic
ccgatgtgatttttgccggaagtccgtgtgattaaagagc

SEQ ID NO: 4099 - DNA, 42 bp, Artificial Sequence
  Synthetic
cgtcagtgtaagttgcctttaagtcagtacaagcgccaacag

SEQ ID NO: 4100 - DNA, 39 bp, Artificial Sequence
  Synthetic
gatgctctcacttctcctggattataatggccgggctac

SEQ ID NO: 4101 - DNA, 43 bp, Artificial Sequence
  Synthetic
caggatatccatatgtctgaagcaaccattgttccaagggcaa

SEQ ID NO: 4102 - DNA, 40 bp, Artificial Sequence
  Synthetic
agctccacagtgctggatagatactcagagacccagttca

SEQ ID NO: 4103 - DNA, 46 bp, Artificial Sequence
  Synthetic
ccagttcttgttgtcccgatcttgatcatacagacataacatttgg

SEQ ID NO: 4104 - DNA, 42 bp, Artificial Sequence
  Synthetic
cattctcatagtcagcatcactgcggccgacagaaaacagag

SEQ ID NO: 4105 - DNA, 41 bp, Artificial Sequence
  Synthetic
cttctccaatttctgtgggctttctcagatgtcatcggact

SEQ ID NO: 4106 - DNA, 45 bp, Artificial Sequence
  Synthetic
gttgatcaaggattctagcatgtgtggagtggaatctctaggaga

SEQ ID NO: 4107 - DNA, 49 bp, Artificial Sequence
  Synthetic
cttgggttggtaatgacatcagttagagggtagaacaaataataatgga

SEQ ID NO: 4108 - DNA, 41 bp, Artificial Sequence
  Synthetic
gctgctgactcttcgttctttgatcgaagaccacaacacca

SEQ ID NO: 4109 - DNA, 42 bp, Artificial Sequence
  Synthetic
tgtctttcccttttgtgaagactgcgggaaaacgggaaatcc

SEQ ID NO: 4110 - DNA, 44 bp, Artificial Sequence
  Synthetic
gagaggttctactgtcccattttcaaatggctgaaacatacagg

SEQ ID NO: 4111 - DNA, 45 bp, Artificial Sequence
  Synthetic
ggagcatggatcgaatctaccatgcattgacctcaaaataactgt

SEQ ID NO: 4112 - DNA, 48 bp, Artificial Sequence
  Synthetic
ttgagttcggtaatgcaagatctgtggaacatcactaggtacaattac

SEQ ID NO: 4113 - DNA, 46 bp, Artificial Sequence
  Synthetic
tccattaaaggatagcaaactgcttcaggcacattatccaaaactc

SEQ ID NO: 4114 - DNA, 49 bp, Artificial Sequence
  Synthetic
gctgagctttttgagactcttgtctcagttcaaataagaaaaacgtagg

SEQ ID NO: 4115 - DNA, 50 bp, Artificial Sequence
  Synthetic
gcaccaaagaatctagtttgtggatatccctgataacaataactaatgac

SEQ ID NO: 4116 - DNA, 50 bp, Artificial Sequence
  Synthetic
acctgttcagtgtaaatgatgtcatctctactctgctaatataacagaaa

SEQ ID NO: 4117 - DNA, 43 bp, Artificial Sequence
  Synthetic
gaatgtaactcctcttgagcgatctcatccacatgtacatgcg

SEQ ID NO: 4118 - DNA, 49 bp, Artificial Sequence
  Synthetic
gactggattgtctttaaccctaagtcatacaacaatcaaatctatccac

SEQ ID NO: 4119 - DNA, 42 bp, Artificial Sequence
  Synthetic
cagaaatcgtgtgggtccagagaaaacaccattgctattcac

SEQ ID NO: 4120 - DNA, 46 bp, Artificial Sequence
  Synthetic
tcctgcagctattacagaacatgggtaatttctcatacctatgaca

SEQ ID NO: 4121 - DNA, 47 bp, Artificial Sequence
  Synthetic
cgtaccctaggaaaatgagtgtattacttttgaccatcctttttctg

SEQ ID NO: 4122 - DNA, 46 bp, Artificial Sequence
  Synthetic
agtgccaacctgaagatctagtagaaggtaggctacttaaactagg

SEQ ID NO: 4123 - DNA, 41 bp, Artificial Sequence
  Synthetic
tggtgggattaacacgtgatgtccactatctcctgatgcag

SEQ ID NO: 4124 - DNA, 44 bp, Artificial Sequence
  Synthetic
cggataaggttcaaaagtgtaacgacccggcagatcaaaatcag

SEQ ID NO: 4125 - DNA, 45 bp, Artificial Sequence
  Synthetic
cgagtcgtccagctgaagacgtattaatgtattgtgatgttgtcg

SEQ ID NO: 4126 - DNA, 44 bp, Artificial Sequence
  Synthetic
cccattttcactgaataactcacctaagatgagagcagtccagg

SEQ ID NO: 4127 - DNA, 45 bp, Artificial Sequence
  Synthetic
tgctatagcttgattgtctccttgttcttgcagctgttaaagttg

SEQ ID NO: 4128 - DNA, 48 bp, Artificial Sequence
  Synthetic
gctgtagacatatagttgaaccctcaagggaaaaattggttaagatgt

SEQ ID NO: 4129 - DNA, 50 bp, Artificial Sequence
  Synthetic
gtggattggtcttccataagttagagagtatatgtgttcagtagaattgg

SEQ ID NO: 4130 - DNA, 44 bp, Artificial Sequence
  Synthetic
ttctctaaacttaagttagccctgggggcttatggaactgatga

SEQ ID NO: 4131 - DNA, 41 bp, Artificial Sequence
  Synthetic
tccctctgacgtttaacccgttcgggggtattctaatcaat

SEQ ID NO: 4132 - DNA, 44 bp, Artificial Sequence
  Synthetic
agcatactatcggcatcaggatctgagagtaagaggtataggga

SEQ ID NO: 4133 - DNA, 47 bp, Artificial Sequence
  Synthetic
ggtaagttccaatgctttcaaacaattatcacaccaattgagacttt

SEQ ID NO: 4134 - DNA, 42 bp, Artificial Sequence
  Synthetic
aggatctccagtataagggaatgtggatgtcaatccgacctt

SEQ ID NO: 4135 - DNA, 45 bp, Artificial Sequence
  Synthetic
gtttgtccactcttgtttgttgaatatcacacccaggaatctttg

SEQ ID NO: 4136 - DNA, 47 bp, Artificial Sequence
  Synthetic
tggtcatgttgtctcttactcttctggatgtgatagaatcaatggat

SEQ ID NO: 4137 - DNA, 46 bp, Artificial Sequence
  Synthetic
ccttcttttcattacctccaaccgacactagcgagaaatatttgtg

SEQ ID NO: 4138 - DNA, 42 bp, Artificial Sequence
  Synthetic
tcgaacatgtaacctttccctagtctgagcattgcacccata

SEQ ID NO: 4139 - DNA, 41 bp, Artificial Sequence
  Synthetic
agtccgtcccaccagtatgttcttaggagtctcaatcctga

SEQ ID NO: 4140 - DNA, 46 bp, Artificial Sequence
  Synthetic
agccgattcattaattccagacacgatttgtagccaattttagcat

SEQ ID NO: 4141 - DNA, 40 bp, Artificial Sequence
  Synthetic
gcctcccctgatagtcttcattctccacattccagaagtc

SEQ ID NO: 4142 - DNA, 46 bp, Artificial Sequence
  Synthetic
actgctagggaagaatttctcaaatgggaattcttgaagatgaaca

SEQ ID NO: 4143 - DNA, 43 bp, Artificial Sequence
  Synthetic
tgcagagcaggaaaatattagttgggtagggtcagcaaagcac

SEQ ID NO: 4144 - DNA, 40 bp, Artificial Sequence
  Synthetic
ccgtcctgttgtctgttccacaaaaagtgagggagctgcg

SEQ ID NO: 4145 - DNA, 42 bp, Artificial Sequence
  Synthetic
acgcacactatcctcctcctctggtggttgacctacattgca

SEQ ID NO: 4146 - DNA, 49 bp, Artificial Sequence
  Synthetic
gctagtccaaataggtccttgaattagacatattagaggtgtttaaggt

SEQ ID NO: 4147 - DNA, 44 bp, Artificial Sequence
  Synthetic
ggtatgtttaacagttttcccatgctgtgcgatacaaatgtggg

SEQ ID NO: 4148 - DNA, 42 bp, Artificial Sequence
  Synthetic
cctcatttcccagcaatgcatattgggcatatgacaatgaca

SEQ ID NO: 4149 - DNA, 42 bp, Artificial Sequence
  Synthetic
gcaaaatagcgacttccctgtgggtaccaaaaaaaagctgca

SEQ ID NO: 4150 - DNA, 42 bp, Artificial Sequence
  Synthetic
ggtctagtaatttctcctggcacgaggaggaggaggatgagg

SEQ ID NO: 4151 - DNA, 40 bp, Artificial Sequence
  Synthetic
tttccaaagaggtggtttgcaaagggttacaaacaagtgc

SEQ ID NO: 4152 - DNA, 46 bp, Artificial Sequence
  Synthetic
gcacaacaatcctacatatatggcagctttcctatctttcctcact

SEQ ID NO: 4153 - DNA, 39 bp, Artificial Sequence
  Synthetic
tacagtaggaggccgggtgcgggggattgggtataggca

SEQ ID NO: 4154 - DNA, 40 bp, Artificial Sequence
  Synthetic
cccctgcctgaggaggttcaatgggtctgtgcaggttagc

SEQ ID NO: 4155 - DNA, 41 bp, Artificial Sequence
  Synthetic
ggcaccaaaggctgtaactccagcgctcgggtacactttta

SEQ ID NO: 4156 - DNA, 45 bp, Artificial Sequence
  Synthetic
gcaacaaataaaaatcagagccctggtaccagctgtaccatatgt

SEQ ID NO: 4157 - DNA, 39 bp, Artificial Sequence
  Synthetic
gtgtttttcttgccctgcagccagttcccgtctgcttac

SEQ ID NO: 4158 - DNA, 47 bp, Artificial Sequence
  Synthetic
agcagccatttgtaaataatcaggaaataaatctgaagtgccattgg

SEQ ID NO: 4159 - DNA, 46 bp, Artificial Sequence
  Synthetic
ataccattgttgtggccctggctgattcccaattatttaataagcc

SEQ ID NO: 4160 - DNA, 44 bp, Artificial Sequence
  Synthetic
ggactgcaaaaacctatatgtgtctttgttggatgactggaact

SEQ ID NO: 4161 - DNA, 43 bp, Artificial Sequence
  Synthetic
acatgcacaacaacagcatacagtgctacaaaacgcaaaaagc

SEQ ID NO: 4162 - DNA, 42 bp, Artificial Sequence
  Synthetic
acagaaatggggaagctgcacatgcaccctgtgagtaagtgt

SEQ ID NO: 4163 - DNA, 43 bp, Artificial Sequence
  Synthetic
cacagtaattgcacaacatgtcaaagggtgtgtttgacaggtt

SEQ ID NO: 4164 - DNA, 44 bp, Artificial Sequence
  Synthetic
gctgttatattgcgggcataagtttggagaaacagtggaattac

SEQ ID NO: 4165 - DNA, 43 bp, Artificial Sequence
  Synthetic
tctgtatagtttgagcgttgaaagagacgtttgcatccaacac

SEQ ID NO: 4166 - DNA, 38 bp, Artificial Sequence
  Synthetic
ggacatgggctgccagaccgggacggtccagtacttcc

SEQ ID NO: 4167 - DNA, 37 bp, Artificial Sequence
  Synthetic
acgggattggtcggccgaaccggcccgtcaatcaaag

SEQ ID NO: 4168 - DNA, 41 bp, Artificial Sequence
  Synthetic
taagcaaaggggggatgggttttaccgagtaaaaggttcca

SEQ ID NO: 4169 - DNA, 39 bp, Artificial Sequence
  Synthetic
tatcccgcatgtaagctggctgattctggtctcacctgt

SEQ ID NO: 4170 - DNA, 36 bp, Artificial Sequence
  Synthetic
tacaccatgcgcggcggtcgcggttcgatgtagggt

SEQ ID NO: 4171 - DNA, 39 bp, Artificial Sequence
  Synthetic
tacgtgcaggcgccacacgcatgtggctgagcaaaaagg

SEQ ID NO: 4172 - DNA, 38 bp, Artificial Sequence
  Synthetic
gctggacacgcccatctcctcaggttcctgcggaggtg

SEQ ID NO: 4173 - DNA, 38 bp, Artificial Sequence
  Synthetic
gcagcacgcaaaagagcaggttacttgaggagccggcg

SEQ ID NO: 4174 - DNA, 35 bp, Artificial Sequence
  Synthetic
ccccattgacgcgtctgccccccttccgcctccaa

SEQ ID NO: 4175 - DNA, 39 bp, Artificial Sequence
  Synthetic
ccgaacagaagatgggacgccgtcgtcacgctccacaac

SEQ ID NO: 4176 - DNA, 40 bp, Artificial Sequence
  Synthetic
accgcatctcttggcgtttaccgtcctcgaattcgtggcc

SEQ ID NO: 4177 - DNA, 40 bp, Artificial Sequence
  Synthetic
acaggcaaaacacgccgtggcggtgcgaaatgaagagtgt

SEQ ID NO: 4178 - DNA, 38 bp, Artificial Sequence
  Synthetic
cgcgcttcagtgcaccgttgagaagcagtttcaggacg

SEQ ID NO: 4179 - DNA, 42 bp, Artificial Sequence
  Synthetic
cactgataacatgtaactccgccttatcaggtacgtgctgtt

SEQ ID NO: 4180 - DNA, 38 bp, Artificial Sequence
  Synthetic
ggtcacgggcgtgttcagtaatcgatggagcgcatgcc

SEQ ID NO: 4181 - DNA, 38 bp, Artificial Sequence
  Synthetic
cctgccgttgttctttgcggcccgttgcagtgattcgg

SEQ ID NO: 4182 - DNA, 36 bp, Artificial Sequence
  Synthetic
tttgtgggagcgtccggccgtcccgttgtgcgttgt

SEQ ID NO: 4183 - DNA, 38 bp, Artificial Sequence
  Synthetic
cggcaccgttgtcgcagtacagacggtgtcagtcaagg

SEQ ID NO: 4184 - DNA, 39 bp, Artificial Sequence
  Synthetic
ggcttctggttgggcgagcccaacagtagtccctctgcc

SEQ ID NO: 4185 - DNA, 41 bp, Artificial Sequence
  Synthetic
ccccgtgttgttctgccgtattcgtcctccccctgaaaagc

SEQ ID NO: 4186 - DNA, 37 bp, Artificial Sequence
  Synthetic
gcccgggtatgcgaaaccatcgtagctggcggttctg

SEQ ID NO: 4187 - DNA, 35 bp, Artificial Sequence
  Synthetic
tgcacctctggcgccacagagccacgcgctagcac

SEQ ID NO: 4188 - DNA, 39 bp, Artificial Sequence
  Synthetic
tcagggcgcgtctggtctcaaaggggatcaaattggccc

SEQ ID NO: 4189 - DNA, 40 bp, Artificial Sequence
  Synthetic
gtgaatgagggcgcatctacctcgaggcctgcgtaacttg

SEQ ID NO: 4190 - DNA, 38 bp, Artificial Sequence
  Synthetic
acgcctctgaggacgctgcctgtccttagttggcgccg

SEQ ID NO: 4191 - DNA, 39 bp, Artificial Sequence
  Synthetic
ggccaccgcgtccttcatttccggcggtaacaaaggacg

SEQ ID NO: 4192 - DNA, 40 bp, Artificial Sequence
  Synthetic
cctgttggacgatctcgcacatgacgcaaagacgctcctg

SEQ ID NO: 4193 - DNA, 41 bp, Artificial Sequence
  Synthetic
ggcgatgtgctgggggtgatacagagagcctagaatcacgc

SEQ ID NO: 4194 - DNA, 40 bp, Artificial Sequence
  Synthetic
cgcgtgaggtgaggtggacatccccacacgccatagacat

SEQ ID NO: 4195 - DNA, 39 bp, Artificial Sequence
  Synthetic
ttggggtaacggcgggcacctttccacacgcaatgaagc

SEQ ID NO: 4196 - DNA, 38 bp, Artificial Sequence
  Synthetic
tgcgagcaggagggacctttgtatgccagaagcctcct

SEQ ID NO: 4197 - DNA, 36 bp, Artificial Sequence
  Synthetic
tccctgggcaggcggaatagcgctgtgcgccctcaa

SEQ ID NO: 4198 - DNA, 38 bp, Artificial Sequence
  Synthetic
gcagcagcaggatgagcagcatgctgctcctgctcctc

SEQ ID NO: 4199 - DNA, 40 bp, Artificial Sequence
  Synthetic
gcactcttaccccccgtaaccacggagacacaggatggga

SEQ ID NO: 4200 - DNA, 35 bp, Artificial Sequence
  Synthetic
tgtcagaggtgctgcgggcacggtgcccagtgggt

SEQ ID NO: 4201 - DNA, 41 bp, Artificial Sequence
  Synthetic
ccccggacgtaaaggtcgaaggagacagctctgattcacgg

SEQ ID NO: 4202 - DNA, 36 bp, Artificial Sequence
  Synthetic
ttctgccgggagctgggagaagcgtcggagagctgg

SEQ ID NO: 4203 - DNA, 37 bp, Artificial Sequence
  Synthetic
catgctggccgagagggtggggacggagtgatggcct

SEQ ID NO: 4204 - DNA, 41 bp, Artificial Sequence
  Synthetic
gcgcatcttggagaccctgaagagtccggagaagatagggc

SEQ ID NO: 4205 - DNA, 43 bp, Artificial Sequence
  Synthetic
ccaaaccatactctttgcaaagcaagcagggatgtctgaggag

SEQ ID NO: 4206 - DNA, 38 bp, Artificial Sequence
  Synthetic
ccgcactcaaccaccagcccggggtggtaactacctgc

SEQ ID NO: 4207 - DNA, 40 bp, Artificial Sequence
  Synthetic
tcccccgttacctcctctggcagacagtgggtatggcaat

SEQ ID NO: 4208 - DNA, 41 bp, Artificial Sequence
  Synthetic
catggccgtcttgtaccagtcatagaaccaccaaaactgag

SEQ ID NO: 4209 - DNA, 47 bp, Artificial Sequence
  Synthetic
cgccttttaggaacaatttaaaggctcaggtttctaagacatcaagg

SEQ ID NO: 4210 - DNA, 45 bp, Artificial Sequence
  Synthetic
gttgttatcattaggggtggacactagtgagcatagacagaaagc

SEQ ID NO: 4211 - DNA, 39 bp, Artificial Sequence
  Synthetic
gagggcaggcacagctgtactgctgtttaaggcccgaga

SEQ ID NO: 4212 - DNA, 39 bp, Artificial Sequence
  Synthetic
ttcgtcgtccgaggcgctgtggctgggactgttattcac

SEQ ID NO: 4213 - DNA, 43 bp, Artificial Sequence
  Synthetic
cccttaggtatactgactcttgtcagcctttgtaacactgtgg

SEQ ID NO: 4214 - DNA, 44 bp, Artificial Sequence
  Synthetic
acaaacggacataaaacatcaacaatggggtcatgatgatgttc

SEQ ID NO: 4215 - DNA, 40 bp, Artificial Sequence
  Synthetic
gggtctgtaacggtggaggttgcaggagcgtcacatccca

SEQ ID NO: 4216 - DNA, 41 bp, Artificial Sequence
  Synthetic
gcaatggctgaaggacatccgagttgcccccagcttctact

SEQ ID NO: 4217 - DNA, 42 bp, Artificial Sequence
  Synthetic
ccgtactgatcacctttgaaacaggtggcggcctaatgaaag

SEQ ID NO: 4218 - DNA, 41 bp, Artificial Sequence
  Synthetic
gacttatttgactgcagagtggcgaggacggggatatggtt

SEQ ID NO: 4219 - DNA, 45 bp, Artificial Sequence
  Synthetic
gggttatcttgcacagttggaagggaatatctcaggcatatggag

SEQ ID NO: 4220 - DNA, 47 bp, Artificial Sequence
  Synthetic
acagttacagaacacacaacacatgacatgtatggtatgtatcccct

SEQ ID NO: 4221 - DNA, 43 bp, Artificial Sequence
  Synthetic
ttgctttcttgcagcagctgaaacttactagatgatagcgatg

SEQ ID NO: 4222 - DNA, 44 bp, Artificial Sequence
  Synthetic
ggcaatctggagagacagactcacagtggaatagaaaatgaagc

SEQ ID NO: 4223 - DNA, 50 bp, Artificial Sequence
  Synthetic
tctgtagcatcatctataagcccaaggtttctcatatgaattcaaaaagc

SEQ ID NO: 4224 - DNA, 44 bp, Artificial Sequence
  Synthetic
ggaacatgctgcaggcctagtcatgagaaaagaaggaatactgt

SEQ ID NO: 4225 - DNA, 42 bp, Artificial Sequence
  Synthetic
ggtttctccggtttgtgcaaccatcagctcttcctaccccac

SEQ ID NO: 4226 - DNA, 48 bp, Artificial Sequence
  Synthetic
ggccaccaaagtatactaaactactaataaagtagaggaaacaacact

SEQ ID NO: 4227 - DNA, 44 bp, Artificial Sequence
  Synthetic
gttctgtagttatgtcaaagcctgtggtcactcctgaagtagtg

SEQ ID NO: 4228 - DNA, 39 bp, Artificial Sequence
  Synthetic
aggatctggagcagcagttggaaaatcccgcctttacca

SEQ ID NO: 4229 - DNA, 41 bp, Artificial Sequence
  Synthetic
tgagggtgagacacaaagagtctggtgtggctcttagagtg

SEQ ID NO: 4230 - DNA, 44 bp, Artificial Sequence
  Synthetic
gccgtggaagtatatttctgtttctatcttccaccttccagacc

SEQ ID NO: 4231 - DNA, 46 bp, Artificial Sequence
  Synthetic
cgtttaacttatttagcaaggggtggaaactgaaaggtattgaggt

SEQ ID NO: 4232 - DNA, 44 bp, Artificial Sequence
  Synthetic
cccaaatccaatatcacacatgtctctgcccacctcttgaatta

SEQ ID NO: 4233 - DNA, 43 bp, Artificial Sequence
  Synthetic
gcctgagtaccttgaccagggggttgtaggtgaaaatattcct

SEQ ID NO: 4234 - DNA, 43 bp, Artificial Sequence
  Synthetic
tctgatagatccacatcccaaaagtccacacgttgtcctgatc

SEQ ID NO: 4235 - DNA, 44 bp, Artificial Sequence
  Synthetic
cgtgttgagacagcaccatttactgtgaatttaatgtgaaatgc

SEQ ID NO: 4236 - DNA, 48 bp, Artificial Sequence
  Synthetic
gcttcccttgagcaatcaaatcaaattgcaagaaattgatattcgttg

SEQ ID NO: 4237 - DNA, 47 bp, Artificial Sequence
  Synthetic
ctgaaatgttggacccatcagtacgtgagaatgagcatgatactttg

SEQ ID NO: 4238 - DNA, 48 bp, Artificial Sequence
  Synthetic
cctgttcagaagaatttgcagtttcattgaaaagacgattgttgtttc

SEQ ID NO: 4239 - DNA, 48 bp, Artificial Sequence
  Synthetic
gatgttgcactttggtgattcactaacaaatgcctcttatatgtatgg

SEQ ID NO: 4240 - DNA, 39 bp, Artificial Sequence
  Synthetic
gcgtcacctcctcgctttctcgacgacgacgacgaagag

SEQ ID NO: 4241 - DNA, 50 bp, Artificial Sequence
  Synthetic
ggcaatgtggtagtgactaaaaacagaacataaagaatctagtagcaagc

SEQ ID NO: 4242 - DNA, 50 bp, Artificial Sequence
  Synthetic
ccaaaatagaccacacttccaaacaaataaagtagaaggtaatacatggg

SEQ ID NO: 4243 - DNA, 44 bp, Artificial Sequence
  Synthetic
gggggtctagcactgttactatattgttatagacacaggcacat

SEQ ID NO: 4244 - DNA, 43 bp, Artificial Sequence
  Synthetic
accaaaagactgtgcatctacaaatactgctgtgcaaactcat

SEQ ID NO: 4245 - DNA, 45 bp, Artificial Sequence
  Synthetic
ccatagtgacgtcctcctcaaattgcactttatacatctaggttt

SEQ ID NO: 4246 - DNA, 47 bp, Artificial Sequence
  Synthetic
aggttgcacaggaatataaggtgtaattaatacattaccctgtgcag

SEQ ID NO: 4247 - DNA, 50 bp, Artificial Sequence
  Synthetic
tcaaagaaaggatgtccaactgttaattgttggaactgatttatacttcc

SEQ ID NO: 4248 - DNA, 48 bp, Artificial Sequence
  Synthetic
ggattttctgtatcctgcaatttgtggtattgaaattgatagaggtgg

SEQ ID NO: 4249 - DNA, 47 bp, Artificial Sequence
  Synthetic
cgaaccactcggaattgtaaagtaatattttaatcctaatggccagg

SEQ ID NO: 4250 - DNA, 48 bp, Artificial Sequence
  Synthetic
ccacatgagtcaagtcaacatcatttattttgcatgtgaaatggaaca

SEQ ID NO: 4251 - DNA, 45 bp, Artificial Sequence
  Synthetic
cccctgatgtgagtaatagggttaatgaacaggccaaaaatgaac

SEQ ID NO: 4252 - DNA, 40 bp, Artificial Sequence
  Synthetic
ttcctttgatctctccgaacctagggctcaacctttcaga

SEQ ID NO: 4253 - DNA, 40 bp, Artificial Sequence
  Synthetic
accatcatggcatgcggatccaactgtggaaaactccatt

SEQ ID NO: 4254 - DNA, 46 bp, Artificial Sequence
  Synthetic
gctccactcttcctgttggaatgcagatttcttaaaattagagagg

SEQ ID NO: 4255 - DNA, 39 bp, Artificial Sequence
  Synthetic
tccaagccacttgtctccattccagaccggatgatggaa

SEQ ID NO: 4256 - DNA, 48 bp, Artificial Sequence
  Synthetic
caagtatcttttccaccatcgtgtataaaggacaagaaatgtgatgtc

SEQ ID NO: 4257 - DNA, 39 bp, Artificial Sequence
  Synthetic
cgcccgattgaaacttaccgtcattttggcgccaactct

SEQ ID NO: 4258 - DNA, 43 bp, Artificial Sequence
  Synthetic
ctggccaaactcttcttgtagtattggggtgtgtagacattgc

SEQ ID NO: 4259 - DNA, 43 bp, Artificial Sequence
  Synthetic
tgaggacacaagaattgcagttcctgacgctgctattagaagt

SEQ ID NO: 4260 - DNA, 46 bp, Artificial Sequence
  Synthetic
ctcaaattcctgctggcgaagtcaaatttgttaaatgatgaggagg

SEQ ID NO: 4261 - DNA, 45 bp, Artificial Sequence
  Synthetic
aggtcaaattgcatagcatctgctgattggattgtaaatcagacc

SEQ ID NO: 4262 - DNA, 46 bp, Artificial Sequence
  Synthetic
gtgtccaaagcctttcaaaaaaagaatggtacccctgtatttcaac

SEQ ID NO: 4263 - DNA, 43 bp, Artificial Sequence
  Synthetic
cggaggtacgggttgatacccaagctttattattttttgcacg

SEQ ID NO: 4264 - DNA, 49 bp, Artificial Sequence
  Synthetic
ttccatccttataatatgcacctgctttgtagactcagatgatatgtgg

SEQ ID NO: 4265 - DNA, 37 bp, Artificial Sequence
  Synthetic
ggtgtctcgtcgacggtgtcccacggggctacgagaa

SEQ ID NO: 4266 - DNA, 39 bp, Artificial Sequence
  Synthetic
ggaccctctggatcctctggaagggaagcgagcacctca

SEQ ID NO: 4267 - DNA, 43 bp, Artificial Sequence
  Synthetic
gctagcctcctccagtaaccttagagtacaaacagttagtgga

SEQ ID NO: 4268 - DNA, 44 bp, Artificial Sequence
  Synthetic
tccacctattggttgaccaccgaatctgcattaactgatcatgt

SEQ ID NO: 4269 - DNA, 43 bp, Artificial Sequence
  Synthetic
tgctacgtccctttcaaatatttgtgccctcacgtttagttcg

SEQ ID NO: 4270 - DNA, 50 bp, Artificial Sequence
  Synthetic
accagaatgttcccctaatagtgatagtgcatttttatacagatcttagc

SEQ ID NO: 4271 - DNA, 46 bp, Artificial Sequence
  Synthetic
cacagcataaccttccaaatcttgtgcgttctaccacatttactgt

SEQ ID NO: 4272 - DNA, 39 bp, Artificial Sequence
  Synthetic
tccgtgctttgtacccttgccctgcaactggtaaggtat

SEQ ID NO: 4273 - DNA, 44 bp, Artificial Sequence
  Synthetic
aacacctaaaggctggccacccagaaaaggaaagattagtatgg

SEQ ID NO: 4274 - DNA, 40 bp, Artificial Sequence
  Synthetic
gcagtattgggtatcgcatcccaatgttatgccaggcact

SEQ ID NO: 4275 - DNA, 44 bp, Artificial Sequence
  Synthetic
gctcatatggatctttcctttctggtcttacatcacaggcaaca

SEQ ID NO: 4276 - DNA, 45 bp, Artificial Sequence
  Synthetic
gctttcaatgtgatgtttttgtccaacagaaaataacagggtccc

SEQ ID NO: 4277 - DNA, 42 bp, Artificial Sequence
  Synthetic
gccccaacagtaagaatgcatttcgaaggggtcttgcaagga

SEQ ID NO: 4278 - DNA, 48 bp, Artificial Sequence
  Synthetic
agcttctcttaaaggttgagcaattagacattaaacgaaaaacagatg

SEQ ID NO: 4279 - DNA, 48 bp, Artificial Sequence
  Synthetic
cctctggagtgtcatcaatggataatacaagaaaatgtagaagacctt

SEQ ID NO: 4280 - DNA, 44 bp, Artificial Sequence
  Synthetic
gcaactgtaggttccgtagaactttgcaggtaaacgaggaatgt

SEQ ID NO: 4281 - DNA, 43 bp, Artificial Sequence
  Synthetic
gcatacttggatttagccaaactttaaaaccacgctaaaaccg

SEQ ID NO: 4282 - DNA, 44 bp, Artificial Sequence
  Synthetic
cagtccatgtaccagtttttccatattttaccgaactggatggg

SEQ ID NO: 4283 - DNA, 46 bp, Artificial Sequence
  Synthetic
agtgacgctagtgtcaagcaataagtgttattgatattcaaacgcc

SEQ ID NO: 4284 - DNA, 41 bp, Artificial Sequence
  Synthetic
agggcggagagatagaccaacagggcgcgagatttgtacaa

SEQ ID NO: 4285 - DNA, 43 bp, Artificial Sequence
  Synthetic
tgtgcttagtactttgtcagtgttacagtgacggaagacctag

SEQ ID NO: 4286 - DNA, 38 bp, Artificial Sequence
  Synthetic
cacgtacccttttgacctggccttagggcaacattggg

SEQ ID NO: 4287 - DNA, 41 bp, Artificial Sequence
  Synthetic
cagggatactgtcgccaacaaaaacgtgaacaagtctatgc

SEQ ID NO: 4288 - DNA, 42 bp, Artificial Sequence
  Synthetic
gcgtctttaggacagatagtagcttagcctttgtaccagcac

SEQ ID NO: 4289 - DNA, 41 bp, Artificial Sequence
  Synthetic
ggttacaatggtcacagcatgtggatgagctggaggaggag

SEQ ID NO: 4290 - DNA, 47 bp, Artificial Sequence
  Synthetic
tgaagagtgccagggaatttccgggtcagttatttcaaatctaatag

SEQ ID NO: 4291 - DNA, 48 bp, Artificial Sequence
  Synthetic
gcactcttctacctgtgatagttcatccaaaaaaacgtttatttgagg

SEQ ID NO: 4292 - DNA, 45 bp, Artificial Sequence
  Synthetic
gcactagccatttgatgattaacaaatttgtgtttggtcaaatgc

SEQ ID NO: 4293 - DNA, 40 bp, Artificial Sequence
  Synthetic
ccttcccacttcttcagcagacagcaagaaaacgaagagt

SEQ ID NO: 4294 - DNA, 42 bp, Artificial Sequence
  Synthetic
ccaaatggtctgtagccagtagctattttgggggtttgggaa

SEQ ID NO: 4295 - DNA, 42 bp, Artificial Sequence
  Synthetic
tcttcagcagttattgtaggccccagaaggtgttccagagac

SEQ ID NO: 4296 - DNA, 48 bp, Artificial Sequence
  Synthetic
ggcctactcaggtaattgatatctcttgttattcaatcaagaacttgc

SEQ ID NO: 4297 - DNA, 46 bp, Artificial Sequence
  Synthetic
acaaagggttttctgaatctccataagaattaggtagaggaggtcc

SEQ ID NO: 4298 - DNA, 46 bp, Artificial Sequence
  Synthetic
tgctgatctgtcttgagaaaatgttgcacacaagaattcaagatgg

SEQ ID NO: 4299 - DNA, 46 bp, Artificial Sequence
  Synthetic
tggtactttacaaagacgaaagactaagcgattttaaccagtacac

SEQ ID NO: 4300 - DNA, 45 bp, Artificial Sequence
  Synthetic
acatgagtcagtattttgcaaacacttttgccaaatgtactgtga

SEQ ID NO: 4301 - DNA, 44 bp, Artificial Sequence
  Synthetic
ccgccaaattttgagtcagtcaaacagaggcgattgttataccg

SEQ ID NO: 4302 - DNA, 46 bp, Artificial Sequence
  Synthetic
gcttttctgctgcatccaacaactttacctgaggtgattattaggt

SEQ ID NO: 4303 - DNA, 39 bp, Artificial Sequence
  Synthetic
atcgacgagctccagagtcgacttcttgtgcaaactgtg

SEQ ID NO: 4304 - DNA, 43 bp, Artificial Sequence
  Synthetic
tgagttagtgtctacctgtgtaagaggcaaaacggagactgtt

SEQ ID NO: 4305 - DNA, 49 bp, Artificial Sequence
  Synthetic
gcagctgattgatgttctaccaatataatttcatgatgggagaatttcc

SEQ ID NO: 4306 - DNA, 40 bp, Artificial Sequence
  Synthetic
tcggtgtcggtggtcccaccctagctctacaaggccaacc

SEQ ID NO: 4307 - DNA, 40 bp, Artificial Sequence
  Synthetic
ggatcccgagcttcttcttgtatagaacggttgcgagaac

SEQ ID NO: 4308 - DNA, 43 bp, Artificial Sequence
  Synthetic
ggtgtagatggtgtcaatggtctatgggcataggtactggcaa

SEQ ID NO: 4309 - DNA, 46 bp, Artificial Sequence
  Synthetic
actacagtaggtgtactttctggtaccatcagttgttagtacctct

SEQ ID NO: 4310 - DNA, 46 bp, Artificial Sequence
  Synthetic
cttgtttttggtgggttaatagagctatagggggacaatatgagga

SEQ ID NO: 4311 - DNA, 48 bp, Artificial Sequence
  Synthetic
gtttgtttgggatcaaaagacacattaacaaatacatgagcaaacagt

SEQ ID NO: 4312 - DNA, 47 bp, Artificial Sequence
  Synthetic
ggccatttgcaagtactgtgaatatgtcaattttgtaaagtttcagg

SEQ ID NO: 4313 - DNA, 50 bp, Artificial Sequence
  Synthetic
agcgtttacctaaagaaaactgtgatccttatgccagatataatttttgg

SEQ ID NO: 4314 - DNA, 46 bp, Artificial Sequence
  Synthetic
tcataggtaaacaggggtgcgcaactatatctactgactcatttgg

SEQ ID NO: 4315 - DNA, 45 bp, Artificial Sequence
  Synthetic
cctcttgttaaaacttgacctacctcgccaaaaggaagtaaagac

SEQ ID NO: 4316 - DNA, 46 bp, Artificial Sequence
  Synthetic
cccatcagtttccatctgttcataacgagtgacatcaaaatcatgg

SEQ ID NO: 4317 - DNA, 43 bp, Artificial Sequence
  Synthetic
ccctctcaatatcaatgcagatcttgagagaaagtcggaaccc

SEQ ID NO: 4318 - DNA, 43 bp, Artificial Sequence
  Synthetic
ccctctgatgaagcttaacaatcttgagtcagctggtgtggat

SEQ ID NO: 4319 - DNA, 42 bp, Artificial Sequence
  Synthetic
ccagtgaatgctgccatgatcgttttctgtacaaagaaacct

SEQ ID NO: 4320 - DNA, 39 bp, Artificial Sequence
  Synthetic
aagccatgggtacactgtcctttcaaccgaaaacggtac

SEQ ID NO: 4321 - DNA, 46 bp, Artificial Sequence
  Synthetic
aggtcaatttcagtttgcggtacacggtaaagtaacaactattcca

SEQ ID NO: 4322 - DNA, 41 bp, Artificial Sequence
  Synthetic
gcagcgtctgtgtatctgcatatgacagggagacagctcag

SEQ ID NO: 4323 - DNA, 43 bp, Artificial Sequence
  Synthetic
gcctatatccatatcactgtctgctgatggaggctcacagact

SEQ ID NO: 4324 - DNA, 43 bp, Artificial Sequence
  Synthetic
cgtcattatcaaatgcccattgcaatacagcacagttttcagg

SEQ ID NO: 4325 - DNA, 50 bp, Artificial Sequence
  Synthetic
gaagtcgaccccttgatatcttaaacacacatatgtagtaaagtagatga

SEQ ID NO: 4326 - DNA, 45 bp, Artificial Sequence
  Synthetic
cccatatgcacttcccatgtgattatacagactttaatgacgagg

SEQ ID NO: 4327 - DNA, 43 bp, Artificial Sequence
  Synthetic
gcaaagcaaaaacacaaaactaacatattttgctgctacgcct

SEQ ID NO: 4328 - DNA, 47 bp, Artificial Sequence
  Synthetic
gccctacacaaagcaaaagtgtaatatgctgtgtggttaataaacac

SEQ ID NO: 4329 - DNA, 42 bp, Artificial Sequence
  Synthetic
cctcaataactgggggttcaacaaggctctgtccatgttagt

SEQ ID NO: 4330 - DNA, 42 bp, Artificial Sequence
  Synthetic
gtcaggatcaggtgccacactggataatccagtctttgagga

SEQ ID NO: 4331 - DNA, 47 bp, Artificial Sequence
  Synthetic
gcctacgccttaaaaagtatacaggcacatgatgtggttatacatgg

SEQ ID NO: 4332 - DNA, 43 bp, Artificial Sequence
  Synthetic
catctgttttggaattaccagccttctcacgtttgcttgctgt

SEQ ID NO: 4333 - DNA, 41 bp, Artificial Sequence
  Synthetic
tttgtgttcctagtggtgtccaacagggacacaataatggc

SEQ ID NO: 4334 - DNA, 45 bp, Artificial Sequence
  Synthetic
ctaagcttgtggcagctgggcatactatgaactccactttacttg

SEQ ID NO: 4335 - DNA, 41 bp, Artificial Sequence
  Synthetic
tgcgtttggctgatggtgtaactactactaaaaaacgctcg

SEQ ID NO: 4336 - DNA, 39 bp, Artificial Sequence
  Synthetic
aaaagggtggaggacatagggggttgtgtccctaggcat

SEQ ID NO: 4337 - DNA, 42 bp, Artificial Sequence
  Synthetic
ccaacagcagtaaagtatgctgatgtaagacgcctcgcctta

SEQ ID NO: 4338 - DNA, 47 bp, Artificial Sequence
  Synthetic
cctcaggattgggaaaaaacatttcatatcggtgcatatataagtgc

SEQ ID NO: 4339 - DNA, 42 bp, Artificial Sequence
  Synthetic
actcgtaacatgtaaggtcagtctaagtgtgcaggacattgt

SEQ ID NO: 4340 - DNA, 41 bp, Artificial Sequence
  Synthetic
cccaattacctgaatcagccatcaaaattgtgtgccccaac

SEQ ID NO: 4341 - DNA, 47 bp, Artificial Sequence
  Synthetic
tgagataggtcaaattgacagtcctgtacccgaatggattaaaagac

SEQ ID NO: 4342 - DNA, 40 bp, Artificial Sequence
  Synthetic
tgtccagcatgcaggtgttgagtcatttttggttatcgcc

SEQ ID NO: 4343 - DNA, 48 bp, Artificial Sequence
  Synthetic
tgccttccagttttcattagtaagtaaagtgtttacgttttcaaatcc

SEQ ID NO: 4344 - DNA, 41 bp, Artificial Sequence
  Synthetic
tcgtgatactgcaaggcttggacataaggcacgtgaaatgg

SEQ ID NO: 4345 - DNA, 44 bp, Artificial Sequence
  Synthetic
attgccctcaacctttggaatttacaaaacatgtaagcaaagtg

SEQ ID NO: 4346 - DNA, 45 bp, Artificial Sequence
  Synthetic
ggcactatggaggtaggaccgattcttctatagtttcattagtgg

SEQ ID NO: 4347 - DNA, 45 bp, Artificial Sequence
  Synthetic
aagcaggcctatgtaactttacaatagaatttcagcacagtgact

SEQ ID NO: 4348 - DNA, 47 bp, Artificial Sequence
  Synthetic
gccacatctgcaaaaaaatatgacatatgggtccgattttatattgc

SEQ ID NO: 4349 - DNA, 47 bp, Artificial Sequence
  Synthetic
gtaccccaatgttcccctaagggtcagtagattataaacaaacacag

SEQ ID NO: 4350 - DNA, 43 bp, Artificial Sequence
  Synthetic
gccctgttaaataggtgtctaacaagcagatccctatggcgat

SEQ ID NO: 4351 - DNA, 41 bp, Artificial Sequence
  Synthetic
aagcggtcgcagaataactttataatagccactgtgtctcc

SEQ ID NO: 4352 - DNA, 46 bp, Artificial Sequence
  Synthetic
tccattattgtgtcaacctgctctaaaagtgatcagatttgcattg

SEQ ID NO: 4353 - DNA, 39 bp, Artificial Sequence
  Synthetic
gaggtcattggctggactggacgaattcatcaatgtgcc

SEQ ID NO: 4354 - DNA, 45 bp, Artificial Sequence
  Synthetic
gtgaatcccccacagtactaaaagaacccaacaataaagaggagc

SEQ ID NO: 4355 - DNA, 46 bp, Artificial Sequence
  Synthetic
ccctttcttgacaattttgtatgcagaatgatgccatcaatttcga

SEQ ID NO: 4356 - DNA, 50 bp, Artificial Sequence
  Synthetic
catcctccctctataaaacctgctagagagagagaagaagaaaaaagaga

SEQ ID NO: 4357 - DNA, 50 bp, Artificial Sequence
  Synthetic
aagttcagcattataagtccagacaaaggaggatagagaatttaaacaag

SEQ ID NO: 4358 - DNA, 43 bp, Artificial Sequence
  Synthetic
cccattgattccaattttactccacaacgtatgactacccgca

SEQ ID NO: 4359 - DNA, 47 bp, Artificial Sequence
  Synthetic
catcagtctccatctgttcgtaagactgagtgacatcaaaatcatgg

SEQ ID NO: 4360 - DNA, 48 bp, Artificial Sequence
  Synthetic
ctcttctgtatataggtcctccagtaataaatacctggaagaacatcc

SEQ ID NO: 4361 - DNA, 42 bp, Artificial Sequence
  Synthetic
aattccatcaccattgttccaactctccctaggaggtctgga

SEQ ID NO: 4362 - DNA, 43 bp, Artificial Sequence
  Synthetic
ccctttgatgaagctcaatactcttgagtcaactggtgtggat

SEQ ID NO: 4363 - DNA, 50 bp, Artificial Sequence
  Synthetic
ctcctcggttactaattcatcacatctattggagatgtaaagttagaact

SEQ ID NO: 4364 - DNA, 42 bp, Artificial Sequence
  Synthetic
gttgcagtcttgggctcaaataaagtactttagtcctagccc

SEQ ID NO: 4365 - DNA, 43 bp, Artificial Sequence
  Synthetic
acatcattactgtaacgcccgtcaacattactgcaaccacatt

SEQ ID NO: 4366 - DNA, 48 bp, Artificial Sequence
  Synthetic
cccatctactagtggttgcaaccaataaaatatacccaaggtaaggtg

SEQ ID NO: 4367 - DNA, 44 bp, Artificial Sequence
  Synthetic
ccatctgagctgtcgtctggctttttttagtaaactgtggaagc

SEQ ID NO: 4368 - DNA, 48 bp, Artificial Sequence
  Synthetic
actgcattgtcctcattatttccattcgcatacatttaaaaaacaagg

SEQ ID NO: 4369 - DNA, 42 bp, Artificial Sequence
  Synthetic
gtgtctattaggcagtcgatgtccggggatccgagtctccta

SEQ ID NO: 4370 - DNA, 47 bp, Artificial Sequence
  Synthetic
ggccatataccgatatgtaagaaggacctcctacatctactcctaag

SEQ ID NO: 4371 - DNA, 39 bp, Artificial Sequence
  Synthetic
agccatcaacaatagaggccatggctcagttgaattgca

SEQ ID NO: 4372 - DNA, 42 bp, Artificial Sequence
  Synthetic
accatccacaacaataggaggttacatcctgttattcctggc

SEQ ID NO: 4373 - DNA, 41 bp, Artificial Sequence
  Synthetic
caaccaacaacaaacaactgtgtggtgctaaggacgctaga

SEQ ID NO: 4374 - DNA, 47 bp, Artificial Sequence
  Synthetic
gcaaaatataaagagggagccagcgtttgagggtaatggtaaaaagt

SEQ ID NO: 4375 - DNA, 47 bp, Artificial Sequence
  Synthetic
ccttttccttaggaggctctgccttacagatatattgattctcttgc

SEQ ID NO: 4376 - DNA, 43 bp, Artificial Sequence
  Synthetic
gaacatacctgctggcaaaattggtattgcttttggaggcacc

SEQ ID NO: 4377 - DNA, 41 bp, Artificial Sequence
  Synthetic
gtccgtctctctgttttggcccttgaagcagtagtccttct

SEQ ID NO: 4378 - DNA, 49 bp, Artificial Sequence
  Synthetic
ttagcagaaatggttcaatggtgtcatatctataagcaataattggctc

SEQ ID NO: 4379 - DNA, 41 bp, Artificial Sequence
  Synthetic
cttgttggctgttcatggatacttccaaacatacaggggtg

SEQ ID NO: 4380 - DNA, 43 bp, Artificial Sequence
  Synthetic
ggtttgcaaccccttcctagaaatgtatagcttctttggactt

SEQ ID NO: 4381 - DNA, 37 bp, Artificial Sequence
  Synthetic
ctcccacccaggcggcataccggtggtgctactagcg

SEQ ID NO: 4382 - DNA, 41 bp, Artificial Sequence
  Synthetic
ctgctggagaagtgggaagcggcttcagcttcaagtcttgc

SEQ ID NO: 4383 - DNA, 48 bp, Artificial Sequence
  Synthetic
aaagcagtttctaagtagtgtgtctttataatgagtccaaatgtccat

SEQ ID NO: 4384 - DNA, 42 bp, Artificial Sequence
  Synthetic
aagaatcaggtcctagcactagcataaaattggcgggctctg

SEQ ID NO: 4385 - DNA, 47 bp, Artificial Sequence
  Synthetic
cggacattaagtagaccaacattcatcctagcctacttaatcgaatt

SEQ ID NO: 4386 - DNA, 47 bp, Artificial Sequence
  Synthetic
agatgcattagctgagtctgctgtcaaaagactcattatatggatct

SEQ ID NO: 4387 - DNA, 46 bp, Artificial Sequence
  Synthetic
ttgttcaataaatatgctgacgtggtgtaatcctcatcctgttgag

SEQ ID NO: 4388 - DNA, 46 bp, Artificial Sequence
  Synthetic
ttgctccctacacgtattttccagcagccaatatggtctattaaat

SEQ ID NO: 4389 - DNA, 44 bp, Artificial Sequence
  Synthetic
ctatggatctgtctgaaagactgtcccgtaacataccggtttga

SEQ ID NO: 4390 - DNA, 38 bp, Artificial Sequence
  Synthetic
gctgtggacagtgtggtcagtttggcgcctttttagca

SEQ ID NO: 4391 - DNA, 47 bp, Artificial Sequence
  Synthetic
actgaaaaatgagaggtaatgctccaggcagtactaattcttcaaga

SEQ ID NO: 4392 - DNA, 45 bp, Artificial Sequence
  Synthetic
atcctgtgcaagaaaccgtggctacttgtaccttctaaactatca

SEQ ID NO: 4393 - DNA, 44 bp, Artificial Sequence
  Synthetic
ctaaaagtccagaagttgcagttgagagcttattttcacagcct

SEQ ID NO: 4394 - DNA, 43 bp, Artificial Sequence
  Synthetic
acctaaaacatccagaaggagatggcagttcctgcagtgcatc

SEQ ID NO: 4395 - DNA, 42 bp, Artificial Sequence
  Synthetic
aggagagtcctgctaggagacgtgtctcaggtgatgttgtgg

SEQ ID NO: 4396 - DNA, 43 bp, Artificial Sequence
  Synthetic
gcttgggatccgccaataattccgatatctccagcatttaagc

SEQ ID NO: 4397 - DNA, 41 bp, Artificial Sequence
  Synthetic
gacccacaattcctgttgacactgaatgactgcagagccag

SEQ ID NO: 4398 - DNA, 42 bp, Artificial Sequence
  Synthetic
ttagcaatgcagaagaaggtgtagtgctaaacgtttcggtgg

SEQ ID NO: 4399 - DNA, 43 bp, Artificial Sequence
  Synthetic
ctgaatttgaaattgaagcccctccatctctgaagcgggtgac

SEQ ID NO: 4400 - DNA, 44 bp, Artificial Sequence
  Synthetic
taggacgtcctagatacagtgaaaccgagtttgcattgttccac

SEQ ID NO: 4401 - DNA, 44 bp, Artificial Sequence
  Synthetic
cgcaaacgaaaacgaatagctatcagatacagtttaccagttgg

SEQ ID NO: 4402 - DNA, 40 bp, Artificial Sequence
  Synthetic
agttcctcatgtctcaggaagtgcgattcggatctggtag

SEQ ID NO: 4403 - DNA, 45 bp, Artificial Sequence
  Synthetic
acccaactatttattgtaggctgtgacaaggctttgctatatccc

SEQ ID NO: 4404 - DNA, 42 bp, Artificial Sequence
  Synthetic
tagtggttctctagtttccagtgattgttagtcccctgagca

SEQ ID NO: 4405 - DNA, 41 bp, Artificial Sequence
  Synthetic
tagtggtctgcggaaccggtgcgggcatagagtgggttgat

SEQ ID NO: 4406 - DNA, 38 bp, Artificial Sequence
  Synthetic
ggccctagattgggtgtgcgtttggggatacgttggcg

SEQ ID NO: 4407 - DNA, 39 bp, Artificial Sequence
  Synthetic
ccagggctctggcacatggtccctgttgcatagttgacc

SEQ ID NO: 4408 - DNA, 38 bp, Artificial Sequence
  Synthetic
ccactttggcggtccgctataggtcaatatgcgtccgc

SEQ ID NO: 4409 - DNA, 37 bp, Artificial Sequence
  Synthetic
ttgccgcttacgctgtgagaaacacaccccagtggcc

SEQ ID NO: 4410 - DNA, 40 bp, Artificial Sequence
  Synthetic
cagtgactttgaccaggggtggaatagggtcgctggtccg

SEQ ID NO: 4411 - DNA, 41 bp, Artificial Sequence
  Synthetic
cccagggtgcccagagtaacacggatgtttcctgaagcagt

SEQ ID NO: 4412 - DNA, 42 bp, Artificial Sequence
  Synthetic
tgctccattccactacggagctgtagataaggccggaagcgg

SEQ ID NO: 4413 - DNA, 41 bp, Artificial Sequence
  Synthetic
gggaacccatggtatctggtggctgcctcgtagatgccaag

SEQ ID NO: 4414 - DNA, 38 bp, Artificial Sequence
  Synthetic
tccctcctctcaaccctcggtagcacagcagcacacac

SEQ ID NO: 4415 - DNA, 39 bp, Artificial Sequence
  Synthetic
cgttgcagtcgagcccgtgatatgtcgccacaagcagtg

SEQ ID NO: 4416 - DNA, 38 bp, Artificial Sequence
  Synthetic
tccacctcaacgcagaccttccgtgcccgctccgtgat

SEQ ID NO: 4417 - DNA, 39 bp, Artificial Sequence
  Synthetic
gcccccaaagtcattgcgttgctgctttggctacaccgc

SEQ ID NO: 4418 - DNA, 38 bp, Artificial Sequence
  Synthetic
accacgggggctcccataacacctgaacaacccccgtc

SEQ ID NO: 4419 - DNA, 42 bp, Artificial Sequence
  Synthetic
aaatgtgatgagcttgccgggacccctatagtaagcaacggc

SEQ ID NO: 4420 - DNA, 39 bp, Artificial Sequence
  Synthetic
gctctcagagacgtgggaggacgccactggacacgtatc

SEQ ID NO: 4421 - DNA, 40 bp, Artificial Sequence
  Synthetic
tggaagagtgctccaaagctcctgaacattccgccgatgg

SEQ ID NO: 4422 - DNA, 40 bp, Artificial Sequence
  Synthetic
agtcaacatcctgggtgggtggccgagaccacgaaagtcg

SEQ ID NO: 4423 - DNA, 39 bp, Artificial Sequence
  Synthetic
ggcataccggcactagtgaggatttccacgggaggcgaa

SEQ ID NO: 4424 - DNA, 42 bp, Artificial Sequence
  Synthetic
ggcatcatgaacaccaagtgcccgcatcgatccgttcttgac

SEQ ID NO: 4425 - DNA, 40 bp, Artificial Sequence
  Synthetic
tccttcccccgaattcttcagctgggttcaggggcgaatc

SEQ ID NO: 4426 - DNA, 35 bp, Artificial Sequence
  Synthetic
tccaccacccaggcggaaggtgccgtggaaaccgc

SEQ ID NO: 4427 - DNA, 42 bp, Artificial Sequence
  Synthetic
ctacaggacatgaccaccccgaggcaggatttacgcagaaga

SEQ ID NO: 4428 - DNA, 42 bp, Artificial Sequence
  Synthetic
tatcagtgctgcaacctcgaccccacgtacaacctctcggta

SEQ ID NO: 4429 - DNA, 41 bp, Artificial Sequence
  Synthetic
cgagagcaagggagtcgaacgggagtacctggtcattgccg

SEQ ID NO: 4430 - DNA, 37 bp, Artificial Sequence
  Synthetic
ctggccggctcgatctttcgtgatccacgtccgcctc

SEQ ID NO: 4431 - DNA, 45 bp, Artificial Sequence
  Synthetic
aagaatgaacatcttcccctaatgttaagcacctcataacgatgt

SEQ ID NO: 4432 - DNA, 42 bp, Artificial Sequence
  Synthetic
tcttgggagtggagtcaatgaacttcttcaaccatttccatt

SEQ ID NO: 4433 - DNA, 45 bp, Artificial Sequence
  Synthetic
cgtgattagaacacacgagtactccacatcctgtaacatcagaaa

SEQ ID NO: 4434 - DNA, 42 bp, Artificial Sequence
  Synthetic
gacaaattgactcaggggagacatattgttgtgttcagtgcc

SEQ ID NO: 4435 - DNA, 41 bp, Artificial Sequence
  Synthetic
agaaggccaaactatcaaatgcatactgatccctcctggtg

SEQ ID NO: 4436 - DNA, 43 bp, Artificial Sequence
  Synthetic
gcacaaacagccatacaattattcaatctcccctgtggcattt

SEQ ID NO: 4437 - DNA, 46 bp, Artificial Sequence
  Synthetic
acaacataatggaccctgagtacacaaatgtcctacaaagggattt

SEQ ID NO: 4438 - DNA, 41 bp, Artificial Sequence
  Synthetic
tttgaggcttgctttaacagtgcgtgggccatagcttcaag

SEQ ID NO: 4439 - DNA, 43 bp, Artificial Sequence
  Synthetic
attggataccatgccaataattccacacagtgacattccgctc

SEQ ID NO: 4440 - DNA, 38 bp, Artificial Sequence
  Synthetic
ttgtgttacccaggcagcttatgtttcacgctgctgag

SEQ ID NO: 4441 - DNA, 45 bp, Artificial Sequence
  Synthetic
aaatgctaataatttggggagtgcatctggtacaatgctctttgt

SEQ ID NO: 4442 - DNA, 47 bp, Artificial Sequence
  Synthetic
catgaagacagaaggaacacttgagtgtatttattgctcccaaagga

SEQ ID NO: 4443 - DNA, 41 bp, Artificial Sequence
  Synthetic
aggaatggttgatggttggtatgctgctgcataccctgatc

SEQ ID NO: 4444 - DNA, 46 bp, Artificial Sequence
  Synthetic
gactgatgatcacagacatgagacctgtgtgttatgatgtctctgg

SEQ ID NO: 4445 - DNA, 43 bp, Artificial Sequence
  Synthetic
acactcaacaaagatcaacttctgtactatctcctgtgctccg

SEQ ID NO: 4446 - DNA, 44 bp, Artificial Sequence
  Synthetic
gccaacagcttctatgaagtgttgtgctataccaaaatgaacaa

SEQ ID NO: 4447 - DNA, 43 bp, Artificial Sequence
  Synthetic
acagaggtacaccaaggaatcaattgagttgttcagcatatgc

SEQ ID NO: 4448 - DNA, 45 bp, Artificial Sequence
  Synthetic
atcagaactgaagcattaatgaccattcactttcctcattcctga

SEQ ID NO: 4449 - DNA, 40 bp, Artificial Sequence
  Synthetic
caactcacccatccaaccaaactttttccgggtggctagt

SEQ ID NO: 4450 - DNA, 41 bp, Artificial Sequence
  Synthetic
aaactcaagaagtgcagtgctagaaggacacattggcacat

SEQ ID NO: 4451 - DNA, 50 bp, Artificial Sequence
  Synthetic
tactgttagtcatcacagtgactgactactataaattgactttgtggctt

SEQ ID NO: 4452 - DNA, 48 bp, Artificial Sequence
  Synthetic
atccacatggggcaaataatcatttgtctatgttgacagatattgtga

SEQ ID NO: 4453 - DNA, 46 bp, Artificial Sequence
  Synthetic
gcacaaatcacattatccattctggatgaatatgatggctgcaatt

SEQ ID NO: 4454 - DNA, 43 bp, Artificial Sequence
  Synthetic
agcatatgcagcaacaatccaatccaggttttttgtttggtat

SEQ ID NO: 4455 - DNA, 40 bp, Artificial Sequence
  Synthetic
ccctccactcaacctcctcctgtgataggtactcggatgt

SEQ ID NO: 4456 - DNA, 39 bp, Artificial Sequence
  Synthetic
caatccttgctgcagtcacacgcactgcatgttgtttga

SEQ ID NO: 4457 - DNA, 45 bp, Artificial Sequence
  Synthetic
agtgtcttaaccagcaaagtgtttcacaataggtaacaactgttt

SEQ ID NO: 4458 - DNA, 44 bp, Artificial Sequence
  Synthetic
tcttcccactagctgaaacatgtaactgttcattgtgtcacaaa

SEQ ID NO: 4459 - DNA, 47 bp, Artificial Sequence
  Synthetic
gcacctaatcatgttcttacaatggaaatccaatgatagatgggttg

SEQ ID NO: 4460 - DNA, 40 bp, Artificial Sequence
  Synthetic
gccatgagcaaactcctcactcttcattgtccctcagttt

SEQ ID NO: 4461 - DNA, 46 bp, Artificial Sequence
  Synthetic
tgtaggtagaatgtttgcaatgcacagctatcattttctctgctaa

SEQ ID NO: 4462 - DNA, 45 bp, Artificial Sequence
  Synthetic
gaacctacatatcctcacgggcttctctgctttataaaagggtaa

SEQ ID NO: 4463 - DNA, 49 bp, Artificial Sequence
  Synthetic
tacagtcagtagtagaccatgtgaaggctagtatcaaagtgataatttg

SEQ ID NO: 4464 - DNA, 38 bp, Artificial Sequence
  Synthetic
cctcccgggagagccatagtgtcgtcctggcaattccg

SEQ ID NO: 4465 - DNA, 42 bp, Artificial Sequence
  Synthetic
caggggccctagattgggtgtgtggggataggctgacgtcta

SEQ ID NO: 4466 - DNA, 39 bp, Artificial Sequence
  Synthetic
cgcatggcgtccgggttctagaaagagcaaccaggaagg

SEQ ID NO: 4467 - DNA, 36 bp, Artificial Sequence
  Synthetic
ggtgttgggtggcggtgatgcgttgtggggagtttg

SEQ ID NO: 4468 - DNA, 42 bp, Artificial Sequence
  Synthetic
tcatggacatgatcgctggtgcccaccatggagaaatacgct

SEQ ID NO: 4469 - DNA, 41 bp, Artificial Sequence
  Synthetic
tcagttatgccaacggaagcgggtcttggagggtagtgcca

SEQ ID NO: 4470 - DNA, 39 bp, Artificial Sequence
  Synthetic
gcccccttgtgtcatcggaggaagcaatcagtggggcag

SEQ ID NO: 4471 - DNA, 39 bp, Artificial Sequence
  Synthetic
agcccgttgctgctgtccagcagggtcgtgaaagaacac

SEQ ID NO: 4472 - DNA, 40 bp, Artificial Sequence
  Synthetic
cctcgtgttcttctgctttgcggaggccacatcccgtaga

SEQ ID NO: 4473 - DNA, 39 bp, Artificial Sequence
  Synthetic
aaagtcccctacttcgtgcgccggctatcttccgcgcta

SEQ ID NO: 4474 - DNA, 42 bp, Artificial Sequence
  Synthetic
ggagaccaagctcatcacgtggaagccgttgatgatgtcacc

SEQ ID NO: 4475 - DNA, 41 bp, Artificial Sequence
  Synthetic
ggaacgaggaccatcgcatcacacaaggtcttggtccacat

SEQ ID NO: 4476 - DNA, 41 bp, Artificial Sequence
  Synthetic
tccctgtggagaacctagggacggtggagaggagttgtccg

SEQ ID NO: 4477 - DNA, 39 bp, Artificial Sequence
  Synthetic
cgggtgctcaggaggtgcttaatgtggcatccgtggagt

SEQ ID NO: 4478 - DNA, 39 bp, Artificial Sequence
  Synthetic
gaagctggtcgcattgggcagacagacacgtcaagaccg

SEQ ID NO: 4479 - DNA, 41 bp, Artificial Sequence
  Synthetic
tctgtgagtgctatgacgcgggtaactgtagtctcggcggg

SEQ ID NO: 4480 - DNA, 38 bp, Artificial Sequence
  Synthetic
tgaagtcaccctgacgcacccggtgctcgtgacgacct

SEQ ID NO: 4481 - DNA, 41 bp, Artificial Sequence
  Synthetic
gtcccgccatgcagaggttatagacctcgagtttctgccag

SEQ ID NO: 4482 - DNA, 37 bp, Artificial Sequence
  Synthetic
tgtgggtgctggcctagctcacgaggaccttccccag

SEQ ID NO: 4483 - DNA, 36 bp, Artificial Sequence
  Synthetic
cgcccgcgtcactgccatatgcagtcgcctcaggag

SEQ ID NO: 4484 - DNA, 41 bp, Artificial Sequence
  Synthetic
ctgcaggaacatgtggagtgggcaggaaggggagtacaggg

SEQ ID NO: 4485 - DNA, 41 bp, Artificial Sequence
  Synthetic
gcaattaccttgcgagcccgaagggatcagtgagcatggac

SEQ ID NO: 4486 - DNA, 40 bp, Artificial Sequence
  Synthetic
tgtggcagaggaggatgagcggcgaatctccgagacttcc

SEQ ID NO: 4487 - DNA, 42 bp, Artificial Sequence
  Synthetic
acgacaacatcctctgagcccgggggcatggaagaataggac

SEQ ID NO: 4488 - DNA, 40 bp, Artificial Sequence
  Synthetic
agactgcaagttctggacagccttttgacgccgctgcttt

SEQ ID NO: 4489 - DNA, 38 bp, Artificial Sequence
  Synthetic
gcgtgtgcgagaagatggccaggagcttcccatcacgg

SEQ ID NO: 4490 - DNA, 41 bp, Artificial Sequence
  Synthetic
ttcaaggggggaaaactgcggcagctagttgtcagtacgcc

SEQ ID NO: 4491 - DNA, 40 bp, Artificial Sequence
  Synthetic
cgcgtgggagacagcaagactgtgggggcaaacatgatta

SEQ ID NO: 4492 - DNA, 40 bp, Artificial Sequence
  Synthetic
tgcctcagaaaacttggggtcctggacagaagcctagcgc

SEQ ID NO: 4493 - DNA, 45 bp, Artificial Sequence
  Synthetic
agatccgaaaatcgaaacgaacacatgaaacagacttctaagtgc

SEQ ID NO: 4494 - DNA, 46 bp, Artificial Sequence
  Synthetic
gtatgactacaaggagaaccgattttagtatgtgtgaacttccctc

SEQ ID NO: 4495 - DNA, 43 bp, Artificial Sequence
  Synthetic
aagaacatgaggaaaacaagccactactttctctggtgccata

SEQ ID NO: 4496 - DNA, 47 bp, Artificial Sequence
  Synthetic
atgagaaggaactatttcacagcgcccttcattatgtattcagtagc

SEQ ID NO: 4497 - DNA, 39 bp, Artificial Sequence
  Synthetic
tggagccacacagatgggaagtccgtaagagcatgtctc

SEQ ID NO: 4498 - DNA, 41 bp, Artificial Sequence
  Synthetic
aatcagaaacatggccaattggaaaggttctgcacaccttc

SEQ ID NO: 4499 - DNA, 43 bp, Artificial Sequence
  Synthetic
tttgcatcagaatagaccaggcatcacactgaaattcgctttc

SEQ ID NO: 4500 - DNA, 42 bp, Artificial Sequence
  Synthetic
agaagcagtaatgagaatgggagagttctcgccattttccgt

SEQ ID NO: 4501 - DNA, 38 bp, Artificial Sequence
  Synthetic
agccgcgtactctagctgatgcacaaggaagttgcaaa

SEQ ID NO: 4502 - DNA, 42 bp, Artificial Sequence
  Synthetic
gcagggagcaattagaagactccttgtttgtcaggttgtgtt

SEQ ID NO: 4503 - DNA, 42 bp, Artificial Sequence
  Synthetic
aattgtagaacgtaaaacaggggacactgtcctccacatcct

SEQ ID NO: 4504 - DNA, 42 bp, Artificial Sequence
  Synthetic
ggggctatatccctaggacggcttgggccttatcaaacagcc

SEQ ID NO: 4505 - DNA, 46 bp, Artificial Sequence
  Synthetic
tgtgctttgatagaaaacatcgagcgcatttatgttggaggtcact

SEQ ID NO: 4506 - DNA, 44 bp, Artificial Sequence
  Synthetic
ccaggaaaggcttctagacctccaatgttctatttggtcctcta

SEQ ID NO: 4507 - DNA, 42 bp, Artificial Sequence
  Synthetic
cgtggacattacaggacacatgctactgtttgtccacgtctt

SEQ ID NO: 4508 - DNA, 44 bp, Artificial Sequence
  Synthetic
aaaaggaagcatctaagtatggggagaaaaaatgatgctgctgc

SEQ ID NO: 4509 - DNA, 42 bp, Artificial Sequence
  Synthetic
agatgttaccctacactttgagcatgtccataaaggcgggat

SEQ ID NO: 4510 - DNA, 47 bp, Artificial Sequence
  Synthetic
atttccacaaacacccattgctataagtataactaggatgcaggtaa

SEQ ID NO: 4511 - DNA, 43 bp, Artificial Sequence
  Synthetic
atcctgattaccttaaaatggctgcacatttgttcccgcctta

SEQ ID NO: 4512 - DNA, 43 bp, Artificial Sequence
  Synthetic
cccagggtcaaaacaatggtattgggtggtatctacaactgtt

SEQ ID NO: 4513 - DNA, 40 bp, Artificial Sequence
  Synthetic
ccccagctacaagtagtttggattgacatgcaatggcctg

SEQ ID NO: 4514 - DNA, 36 bp, Artificial Sequence
  Synthetic
actacgtccgccgtctaggtgagcgccggacaaagg

SEQ ID NO: 4515 - DNA, 35 bp, Artificial Sequence
  Synthetic
cgggattcgagcgccccttagggctagcgctacgg

SEQ ID NO: 4516 - DNA, 39 bp, Artificial Sequence
  Synthetic
cgccgtcatcctccacccaaacatagggaggggggattt

SEQ ID NO: 4517 - DNA, 41 bp, Artificial Sequence
  Synthetic
aagacctccaagacctcctgcatgctggtgatggagggaag

SEQ ID NO: 4518 - DNA, 40 bp, Artificial Sequence
  Synthetic
ccttcctgggcctctatcctccgaggcgttctacgaaggc

SEQ ID NO: 4519 - DNA, 38 bp, Artificial Sequence
  Synthetic
cttccggtgcgggaaagcagtgacatagggggcatggc

SEQ ID NO: 4520 - DNA, 39 bp, Artificial Sequence
  Synthetic
tacaggcgccagctgtccttggaactggctgatttcggg

SEQ ID NO: 4521 - DNA, 38 bp, Artificial Sequence
  Synthetic
gacctgcgggccactaactcaggctggacaagtcaggg

SEQ ID NO: 4522 - DNA, 40 bp, Artificial Sequence
  Synthetic
ctggcccatatcctgcagcctgccaggagaatgtcatcca

SEQ ID NO: 4523 - DNA, 42 bp, Artificial Sequence
  Synthetic
aggcatactgatccccgagacccgcagctgcactaatgattg

SEQ ID NO: 4524 - DNA, 40 bp, Artificial Sequence
  Synthetic
ggggcagctacttgcctcagtggtttggcagagtagtcca

SEQ ID NO: 4525 - DNA, 40 bp, Artificial Sequence
  Synthetic
acctgatcccatctccaggcttgcaggacaggggtgatta

SEQ ID NO: 4526 - DNA, 46 bp, Artificial Sequence
  Synthetic
gctattcgccatactacccatgtcatagggttttaagaatgccatt

SEQ ID NO: 4527 - DNA, 37 bp, Artificial Sequence
  Synthetic
agttctgcccagtggatcccgtccgacgggtcttggg

SEQ ID NO: 4528 - DNA, 39 bp, Artificial Sequence
  Synthetic
gttcatggaccctcgacctgcattagggcagggtggctg

SEQ ID NO: 4529 - DNA, 46 bp, Artificial Sequence
  Synthetic
cagcccctactggaaatttcagaatattgaggtgtgaaacttcttg

SEQ ID NO: 4530 - DNA, 35 bp, Artificial Sequence
  Synthetic
gagcagtaccggtggcggttcctgccagccactcc

SEQ ID NO: 4531 - DNA, 40 bp, Artificial Sequence
  Synthetic
atcctccttctcctgcagcaacttggaaggcgaggtggag

SEQ ID NO: 4532 - DNA, 38 bp, Artificial Sequence
  Synthetic
tcgcttcctcttctcctcagcctccaggggggaaagcg

SEQ ID NO: 4533 - DNA, 41 bp, Artificial Sequence
  Synthetic
tatcagcccacttcccagggttccaaacacgtagactgggt

SEQ ID NO: 4534 - DNA, 42 bp, Artificial Sequence
  Synthetic
acccttaaggtccttaccccgcgaggaaggagggtggaatgt

SEQ ID NO: 4535 - DNA, 44 bp, Artificial Sequence
  Synthetic
tcaaaccaaggcctaccaccgagatgcaaattatgaaaggaaga

SEQ ID NO: 4536 - DNA, 41 bp, Artificial Sequence
  Synthetic
taagctcagacctccgggaagcacggcttgacaaacatggg

SEQ ID NO: 4537 - DNA, 37 bp, Artificial Sequence
  Synthetic
acgccggttgagtcgcgtcggacgtagttcaggaggc

SEQ ID NO: 4538 - DNA, 43 bp, Artificial Sequence
  Synthetic
agaagtacacatcagggagacagttcattgccatcatccattt

SEQ ID NO: 4539 - DNA, 45 bp, Artificial Sequence
  Synthetic
aagtcgaaaggttaaaacatggaacggcgtattttgacttggttt

SEQ ID NO: 4540 - DNA, 43 bp, Artificial Sequence
  Synthetic
tggttgcatacatgttagagagagattgttccaccagcaactg

SEQ ID NO: 4541 - DNA, 39 bp, Artificial Sequence
  Synthetic
attggagatgtgccacagcactgcctaagaatgtccacc

SEQ ID NO: 4542 - DNA, 43 bp, Artificial Sequence
  Synthetic
ggaaaagggcaacagctatactcattgactgttcgtctcttcc

SEQ ID NO: 4543 - DNA, 45 bp, Artificial Sequence
  Synthetic
aattggggaattgaacatatcgacacttggagtcatgtctggtaa

SEQ ID NO: 4544 - DNA, 40 bp, Artificial Sequence
  Synthetic
acaggggacagagaaactgactcagggccattaatctccc

SEQ ID NO: 4545 - DNA, 43 bp, Artificial Sequence
  Synthetic
tgtacttgggacatttgataccactctactttgctttggtggg

SEQ ID NO: 4546 - DNA, 39 bp, Artificial Sequence
  Synthetic
gtggagtccgctgttctgagtgatgcttaatgctggtcc

SEQ ID NO: 4547 - DNA, 40 bp, Artificial Sequence
  Synthetic
tatcagaatggaccaggcgattcacactgaagttcgcttt

SEQ ID NO: 4548 - DNA, 44 bp, Artificial Sequence
  Synthetic
aacacagttcgagtctctgaaactcccattctcattactgcttc

SEQ ID NO: 4549 - DNA, 42 bp, Artificial Sequence
  Synthetic
acaggaacaggatacaccatggccactttcccttttctgagt

SEQ ID NO: 4550 - DNA, 39 bp, Artificial Sequence
  Synthetic
ctaactcaaggtcgccagacttatggtgttggccaatgc

SEQ ID NO: 4551 - DNA, 46 bp, Artificial Sequence
  Synthetic
agagcactgacattaaatacgatgacgatagcccttctttttaact

SEQ ID NO: 4552 - DNA, 41 bp, Artificial Sequence
  Synthetic
ctttcacaatcactggggacaaccatcgccaggaacattcg

SEQ ID NO: 4553 - DNA, 42 bp, Artificial Sequence
  Synthetic
gctagcaagcattgacctgaagaagaggccttattttctcaa

SEQ ID NO: 4554 - DNA, 43 bp, Artificial Sequence
  Synthetic
ctcatagtgaatgcaccaaaccaaggtcctgtagaatctgtcc

SEQ ID NO: 4555 - DNA, 42 bp, Artificial Sequence
  Synthetic
cccagatggctcttcaattgttctcccctatggcacctatat

SEQ ID NO: 4556 - DNA, 37 bp, Artificial Sequence
  Synthetic
gacggcctcgctgactggagaatcgtgtgcgcgaaag

SEQ ID NO: 4557 - DNA, 38 bp, Artificial Sequence
  Synthetic
tattgccacgcatccggatcactgggctggggtggttt

SEQ ID NO: 4558 - DNA, 35 bp, Artificial Sequence
  Synthetic
acgccgtccaacttcacgcgttcaccgcgtcgtgc

SEQ ID NO: 4559 - DNA, 42 bp, Artificial Sequence
  Synthetic
tccaataaacccatcccctcgcgacggattcctgaggctaca

SEQ ID NO: 4560 - DNA, 41 bp, Artificial Sequence
  Synthetic
gggacggaggagagacgatgcaggtcggaccatccacccat

SEQ ID NO: 4561 - DNA, 45 bp, Artificial Sequence
  Synthetic
atacaccacatcgttggataatacggacgcgttaatcgaactttc

SEQ ID NO: 4562 - DNA, 41 bp, Artificial Sequence
  Synthetic
cgttatcatctgctcccgctgccggccgctgaaaaaagagt

SEQ ID NO: 4563 - DNA, 40 bp, Artificial Sequence
  Synthetic
cggattccaagtcagagcggcgggtcggtccaggtcaacg

SEQ ID NO: 4564 - DNA, 39 bp, Artificial Sequence
  Synthetic
tcagccacgacgcgagtgacgttatagcgccgtctttcg

SEQ ID NO: 4565 - DNA, 39 bp, Artificial Sequence
  Synthetic
tctcatcaccgagaccgcgggccaggctgtgggtctcgt

SEQ ID NO: 4566 - DNA, 36 bp, Artificial Sequence
  Synthetic
cgcccgatccctccaggtttacgcggtgccgttcac

SEQ ID NO: 4567 - DNA, 38 bp, Artificial Sequence
  Synthetic
catcgggtagacggcgctagcggatccgtcagccagta

SEQ ID NO: 4568 - DNA, 37 bp, Artificial Sequence
  Synthetic
ggaggaaactgccgcgggatcttcctcagagacggcc

SEQ ID NO: 4569 - DNA, 39 bp, Artificial Sequence
  Synthetic
gcacgctgcatggctaaatacccatgacgcgttcgggac

SEQ ID NO: 4570 - DNA, 40 bp, Artificial Sequence
  Synthetic
gcatgaactgcccgtggtggtggagcctcggtttggatac

SEQ ID NO: 4571 - DNA, 36 bp, Artificial Sequence
  Synthetic
tgaggttgcgggccaggttctcggacgagggctatg

SEQ ID NO: 4572 - DNA, 36 bp, Artificial Sequence
  Synthetic
tctgagcgagtcccttgcgcgcagcggctcatcagg

SEQ ID NO: 4573 - DNA, 38 bp, Artificial Sequence
  Synthetic
cgcaagtaatgggtgcgcgatacgtggtgtgcacgttg

SEQ ID NO: 4574 - DNA, 37 bp, Artificial Sequence
  Synthetic
cgagagcccgtcgtgatagtcctacgcggcgacagct

SEQ ID NO: 4575 - DNA, 36 bp, Artificial Sequence
  Synthetic
acatgcgccctgggtctgatcgatgggtccgcttca

SEQ ID NO: 4576 - DNA, 37 bp, Artificial Sequence
  Synthetic
cgtgcgccacgccaagatagtacgactcgtaggccgt

SEQ ID NO: 4577 - DNA, 38 bp, Artificial Sequence
  Synthetic
caggcggtgcagatcggttttcaatgcgggcaggcgtg

SEQ ID NO: 4578 - DNA, 39 bp, Artificial Sequence
  Synthetic
cgggtacgacctgcgatttagcgacagttgagcgcgtcg

SEQ ID NO: 4579 - DNA, 39 bp, Artificial Sequence
  Synthetic
ccgctggtcggtttctgactggcggtgtttccagcattt

SEQ ID NO: 4580 - DNA, 39 bp, Artificial Sequence
  Synthetic
gcgctccacgatctcggcatgtgctagaccgtaccgaat

SEQ ID NO: 4581 - DNA, 38 bp, Artificial Sequence
  Synthetic
accaggacaaggtggtgagctgccgatttttcgccgca

SEQ ID NO: 4582 - DNA, 39 bp, Artificial Sequence
  Synthetic
ggccttggtggacttccaggcggataatctcctgggcca

SEQ ID NO: 4583 - DNA, 40 bp, Artificial Sequence
  Synthetic
agagggctcatccgactctgcccacgctgatgtcctcggg

SEQ ID NO: 4584 - DNA, 39 bp, Artificial Sequence
  Synthetic
caggggcgagtccgtcgtcacgacgccatcaccgagaac

SEQ ID NO: 4585 - DNA, 41 bp, Artificial Sequence
  Synthetic
tcgcgcatagtgtggaagtggtcgcccaccatgaaggattt

SEQ ID NO: 4586 - DNA, 39 bp, Artificial Sequence
  Synthetic
cccctccgtattcttgtcgcgtccaccagctggactacg

SEQ ID NO: 4587 - DNA, 38 bp, Artificial Sequence
  Synthetic
tgctgggcgccaggaaaaacttcatgacgcccaagtgg

SEQ ID NO: 4588 - DNA, 38 bp, Artificial Sequence
  Synthetic
acctgacggtgaaccacccaaatcgcccctcacgtcag

SEQ ID NO: 4589 - DNA, 39 bp, Artificial Sequence
  Synthetic
cggcagcagtacacgtcgagcgcgtacgccgtgtaccac

SEQ ID NO: 4590 - DNA, 38 bp, Artificial Sequence
  Synthetic
cgtcgggcacagacccatggcgaccgggatcacgacga

SEQ ID NO: 4591 - DNA, 37 bp, Artificial Sequence
  Synthetic
gcgtagttgcgcaggccctgtacctggtgtcgcggtc

SEQ ID NO: 4592 - DNA, 41 bp, Artificial Sequence
  Synthetic
cgtaattcaccacgggcacgcccgtgagtgttacttcccca

SEQ ID NO: 4593 - DNA, 37 bp, Artificial Sequence
  Synthetic
actgacagttgcgcaatccgatctccatcgccagcgc

SEQ ID NO: 4594 - DNA, 38 bp, Artificial Sequence
  Synthetic
gcgcgttgccccaaaccactttgatttgagcgtgctgc

SEQ ID NO: 4595 - DNA, 35 bp, Artificial Sequence
  Synthetic
acaagccccagcaaccggtacccaagctggccgag

SEQ ID NO: 4596 - DNA, 36 bp, Artificial Sequence
  Synthetic
aagctacagcgctcgcggcactggcagaccttggtc

SEQ ID NO: 4597 - DNA, 38 bp, Artificial Sequence
  Synthetic
gggccacgctgacggctttttacggtctggatctcgcg

SEQ ID NO: 4598 - DNA, 37 bp, Artificial Sequence
  Synthetic
cggcttgaacgagcgccttgtcgctgctgatctgacg

SEQ ID NO: 4599 - DNA, 34 bp, Artificial Sequence
  Synthetic
gcgctacgaacccgcacagcctggcttacgggga

SEQ ID NO: 4600 - DNA, 35 bp, Artificial Sequence
  Synthetic
tacgcgcacgccaaaccgcgcgccaacgagttgac

SEQ ID NO: 4601 - DNA, 36 bp, Artificial Sequence
  Synthetic
ggcttcggcgtgcagctgtcgccacatccagcatgt

SEQ ID NO: 4602 - DNA, 40 bp, Artificial Sequence
  Synthetic
gttggacgacaacgccaagcgcaactctagcattttggcg

SEQ ID NO: 4603 - DNA, 39 bp, Artificial Sequence
  Synthetic
gtgcagcagcgcctacagagcgtttcctcttcctcttcg

SEQ ID NO: 4604 - DNA, 40 bp, Artificial Sequence
  Synthetic
tcaaccaggacttgctgtcggccgttgatccgcccgtcta

SEQ ID NO: 4605 - DNA, 37 bp, Artificial Sequence
  Synthetic
tgaccacccccgacgccaaacagctcgcgaagtgtct

SEQ ID NO: 4606 - DNA, 37 bp, Artificial Sequence
  Synthetic
cggaagcaggacccactaccgtgcgctagcgtcacgg

SEQ ID NO: 4607 - DNA, 38 bp, Artificial Sequence
  Synthetic
caaacagctgtcgcggtactcgacttcgcacgggcacg

SEQ ID NO: 4608 - DNA, 36 bp, Artificial Sequence
  Synthetic
cgccacagcagagccagcactttgcgactctgggcc

SEQ ID NO: 4609 - DNA, 40 bp, Artificial Sequence
  Synthetic
agctcgatgttgaacaccgacgcggagtgctgacgaagtg

SEQ ID NO: 4610 - DNA, 42 bp, Artificial Sequence
  Synthetic
tcgttttcctcctctccgtcgtgaatgtcctgggctaagcag

SEQ ID NO: 4611 - DNA, 39 bp, Artificial Sequence
  Synthetic
accagtctcagtctcagcagcattgagaaacagcggcgg

SEQ ID NO: 4612 - DNA, 40 bp, Artificial Sequence
  Synthetic
ctgttgctctcctctaccccgcgtcggacgcgattgatgg

SEQ ID NO: 4613 - DNA, 38 bp, Artificial Sequence
  Synthetic
ccactactgccggagccgagctccggcagtaacagtag

SEQ ID NO: 4614 - DNA, 41 bp, Artificial Sequence
  Synthetic
atagcggcgttaggtgacacgtacagcaaaggtacgacggt

SEQ ID NO: 4615 - DNA, 35 bp, Artificial Sequence
  Synthetic
gttgcgcacccgtaagccgagggggaggggcgaat

SEQ ID NO: 4616 - DNA, 39 bp, Artificial Sequence
  Synthetic
gctgctgttgctgctgttgttgagcagcaacagtcgcag

SEQ ID NO: 4617 - DNA, 39 bp, Artificial Sequence
  Synthetic
ggggatctcctcacgcacgcggattgcgaccccgaagtg

SEQ ID NO: 4618 - DNA, 39 bp, Artificial Sequence
  Synthetic
gccacaaagtcgcttttgccgctcatcgaccccgtgacg

SEQ ID NO: 4619 - DNA, 38 bp, Artificial Sequence
  Synthetic
cctcgcacagccgatgcaccatacgcaaggcatcgtgg

SEQ ID NO: 4620 - DNA, 38 bp, Artificial Sequence
  Synthetic
gcgatcaccacgctcgaggaacgcaggagattctggcc

SEQ ID NO: 4621 - DNA, 37 bp, Artificial Sequence
  Synthetic
cagccagaccgctagccgaaagccgtcccgaacatca

SEQ ID NO: 4622 - DNA, 39 bp, Artificial Sequence
  Synthetic
acccggcgtgtcgactcgtagggaaaaaaaggtggggcc

SEQ ID NO: 4623 - DNA, 35 bp, Artificial Sequence
  Synthetic
gcggactgcaccgggatgatctcacggcggcagtc

SEQ ID NO: 4624 - DNA, 36 bp, Artificial Sequence
  Synthetic
cgaccgcgcggctgatgatacgtctggcaccctacc

SEQ ID NO: 4625 - DNA, 41 bp, Artificial Sequence
  Synthetic
tgaagaaatagaccgggtgccgtctggatgaccgtatgggc

SEQ ID NO: 4626 - DNA, 35 bp, Artificial Sequence
  Synthetic
gaggccacggcgcagaagaaccgctgcccgtctac

SEQ ID NO: 4627 - DNA, 37 bp, Artificial Sequence
  Synthetic
cgcgccggtactcgagcaaacgtctacctggcctacc

SEQ ID NO: 4628 - DNA, 35 bp, Artificial Sequence
  Synthetic
agcggctgctggaagagggcgggtgacggcgacat

SEQ ID NO: 4629 - DNA, 38 bp, Artificial Sequence
  Synthetic
cacctggacatctaccgtcgccacaggcggttgagcgc

SEQ ID NO: 4630 - DNA, 35 bp, Artificial Sequence
  Synthetic
tgcctcagctgttaccgcggccttcccaagcggca

SEQ ID NO: 4631 - DNA, 35 bp, Artificial Sequence
  Synthetic
gctggtgcggcttttccacatcgtcccgtagcccg

SEQ ID NO: 4632 - DNA, 35 bp, Artificial Sequence
  Synthetic
ctcggtgagcgggtagcgaagcctgcgactgctgc

SEQ ID NO: 4633 - DNA, 39 bp, Artificial Sequence
  Synthetic
cagggccagggacagccttgtcgtcgtggttgatgttga

SEQ ID NO: 4634 - DNA, 37 bp, Artificial Sequence
  Synthetic
cgcaccctctgagtgctgcctgccacggtagcacctg

SEQ ID NO: 4635 - DNA, 36 bp, Artificial Sequence
  Synthetic
ccgtcttatcccgtgccgcataccgcccggagagtc

SEQ ID NO: 4636 - DNA, 39 bp, Artificial Sequence
  Synthetic
cgtaaggaaaccgcggcgggcctgggaaactcaagtctt

SEQ ID NO: 4637 - DNA, 39 bp, Artificial Sequence
  Synthetic
acagtccggcttgggtgtccatgtttgccggcttcgagg

SEQ ID NO: 4638 - DNA, 37 bp, Artificial Sequence
  Synthetic
cgcggagggtgattcgcactcccgggcgtctccatag

SEQ ID NO: 4639 - DNA, 41 bp, Artificial Sequence
  Synthetic
agttgttgaggtccaccagcagtaaacatcaagggccgctg

SEQ ID NO: 4640 - DNA, 36 bp, Artificial Sequence
  Synthetic
agacgaccggcttccagcgactgccaggtgcttcgg

SEQ ID NO: 4641 - DNA, 34 bp, Artificial Sequence
  Synthetic
gcttgcccgacgcgtgaaggccgagcgcaaacac

SEQ ID NO: 4642 - DNA, 40 bp, Artificial Sequence
  Synthetic
gcacgttgaccgacacgttctacaatcagctgcaggtgca

SEQ ID NO: 4643 - DNA, 39 bp, Artificial Sequence
  Synthetic
gctgttgcgacggcgaatgacgcaccaagtcaaatccac

SEQ ID NO: 4644 - DNA, 36 bp, Artificial Sequence
  Synthetic
ccggagcgtggcggtacaaggtgcgacgacccttct

SEQ ID NO: 4645 - DNA, 38 bp, Artificial Sequence
  Synthetic
cgtgtcgtacgcgcaccgttgataccgcggaatcaacg

SEQ ID NO: 4646 - DNA, 42 bp, Artificial Sequence
  Synthetic
tcagctccgaggctaggttagctgatcgacatgaagaccgcc

SEQ ID NO: 4647 - DNA, 40 bp, Artificial Sequence
  Synthetic
gaggcccatgatgagtagtcgcgccctggatcgtacccat

SEQ ID NO: 4648 - DNA, 38 bp, Artificial Sequence
  Synthetic
gcggccggcatcaggagaaacctcaagacgctgctagt

SEQ ID NO: 4649 - DNA, 39 bp, Artificial Sequence
  Synthetic
ccgatagcggttcctcagccaggtaacgcgcatctcagc

SEQ ID NO: 4650 - DNA, 35 bp, Artificial Sequence
  Synthetic
agggtggtccgcgttccgttgtgccacccggtgct

SEQ ID NO: 4651 - DNA, 37 bp, Artificial Sequence
  Synthetic
ccgaccagttctccatcgcgtgctttccccgagctcc

SEQ ID NO: 4652 - DNA, 39 bp, Artificial Sequence
  Synthetic
cccgtggccgtaccctgttgtaccagatgttcaccgtgg

SEQ ID NO: 4653 - DNA, 40 bp, Artificial Sequence
  Synthetic
cacgcatgtgctacgcggattagaggctcggcaattctcg

SEQ ID NO: 4654 - DNA, 36 bp, Artificial Sequence
  Synthetic
cgacgagcgcgggtcacaaacgtcgaacgcgatcgg

SEQ ID NO: 4655 - DNA, 38 bp, Artificial Sequence
  Synthetic
ctgacgccacgccgccattgtgttcctgataggcccgg

SEQ ID NO: 4656 - DNA, 35 bp, Artificial Sequence
  Synthetic
tgctgctctgcacgctctgacaccaaccaggcggc

SEQ ID NO: 4657 - DNA, 39 bp, Artificial Sequence
  Synthetic
gcgtcgcccttctccgtgatcaacgtggtctcttacgtg

SEQ ID NO: 4658 - DNA, 39 bp, Artificial Sequence
  Synthetic
cgtcgtggagacaagcaacaccagttttgggggcggagg

SEQ ID NO: 4659 - DNA, 37 bp, Artificial Sequence
  Synthetic
gtgctcagcggcgtgtacagcttggatcacgtcggcg

SEQ ID NO: 4660 - DNA, 36 bp, Artificial Sequence
  Synthetic
ggtagcgcttgcggcacaccacctcctgcatctcca

SEQ ID NO: 4661 - DNA, 39 bp, Artificial Sequence
  Synthetic
gcagcggcgagaggagaggattcaggtggatcctccgtc

SEQ ID NO: 4662 - DNA, 38 bp, Artificial Sequence
  Synthetic
tcctctcagtttccccgtctccacgtcgaaaccccggc

SEQ ID NO: 4663 - DNA, 37 bp, Artificial Sequence
  Synthetic
gtggtgccgtccacgtcgtgcaagccgtggtaaccgt

SEQ ID NO: 4664 - DNA, 35 bp, Artificial Sequence
  Synthetic
gcacgcgcgtttccccgtaagcgccgacaactccg

SEQ ID NO: 4665 - DNA, 37 bp, Artificial Sequence
  Synthetic
cggcaagctcacgcactgccgtagctcatttgcgccg

SEQ ID NO: 4666 - DNA, 35 bp, Artificial Sequence
  Synthetic
cggaacgtgacggttgccgttttccccgccggtgg

SEQ ID NO: 4667 - DNA, 37 bp, Artificial Sequence
  Synthetic
tgacgacggggaggatgacgagccactaccgcagagc

SEQ ID NO: 4668 - DNA, 39 bp, Artificial Sequence
  Synthetic
atcggctcgtatcccgaagtgctcagagacgcgttccgc

SEQ ID NO: 4669 - DNA, 36 bp, Artificial Sequence
  Synthetic
ccgtcctggcacgcctcttcagacgcagacaggtgc

SEQ ID NO: 4670 - DNA, 39 bp, Artificial Sequence
  Synthetic
cccggcgtgctgttggtctccgttgccgtagaagaagtt

SEQ ID NO: 4671 - DNA, 38 bp, Artificial Sequence
  Synthetic
agagcctcacctgcgtgacgtttctgggctactccgcc

SEQ ID NO: 4672 - DNA, 40 bp, Artificial Sequence
  Synthetic
gagcacttgcggctccatgagctggaggtccatacggatt

SEQ ID NO: 4673 - DNA, 37 bp, Artificial Sequence
  Synthetic
gcccgtcgtagcgcagaataagctgctgttcaccacg

SEQ ID NO: 4674 - DNA, 40 bp, Artificial Sequence
  Synthetic
caacgccgcgtgtaacttccacgctctttgacaccatcac

SEQ ID NO: 4675 - DNA, 36 bp, Artificial Sequence
  Synthetic
atatgtgggagcgcaaggccagaggtcctcgcaggc

SEQ ID NO: 4676 - DNA, 36 bp, Artificial Sequence
  Synthetic
gcgactttaccgcgaacgccggtctgcgtgggcgaa

SEQ ID NO: 4677 - DNA, 41 bp, Artificial Sequence
  Synthetic
tgcctgtccaaccaccatgacgtgtgatccatgagttcggc

SEQ ID NO: 4678 - DNA, 40 bp, Artificial Sequence
  Synthetic
gctcatgcagcgtctcacggggcgattgtaggtaacgagc

SEQ ID NO: 4679 - DNA, 36 bp, Artificial Sequence
  Synthetic
acaccagcgacaacgtgctctgcaccacctcggggt

SEQ ID NO: 4680 - DNA, 38 bp, Artificial Sequence
  Synthetic
cgtgtgcaccaccgtggagactcttggcgatggtcatg

SEQ ID NO: 4681 - DNA, 36 bp, Artificial Sequence
  Synthetic
cgtgcaccacggtgaacacgttgcctggacgcctgg

SEQ ID NO: 4682 - DNA, 39 bp, Artificial Sequence
  Synthetic
ggcgctgtgtccgagctcacctgctgtacaacaatccgg

SEQ ID NO: 4683 - DNA, 40 bp, Artificial Sequence
  Synthetic
ccaggtgagaaagagaagccgcctctcatcgtgccgcaga

SEQ ID NO: 4684 - DNA, 39 bp, Artificial Sequence
  Synthetic
cggcagcggtggtactggtatgcttactgtgtgaagcgg

SEQ ID NO: 4685 - DNA, 35 bp, Artificial Sequence
  Synthetic
gtccagaacgcggttgggaacgccacaggccgtag

SEQ ID NO: 4686 - DNA, 40 bp, Artificial Sequence
  Synthetic
catgttgccgtgtgacgagacgaggtgacgcgacctcctg

SEQ ID NO: 4687 - DNA, 41 bp, Artificial Sequence
  Synthetic
tgggcgatgcacaactctttctgctacggctgctgatacga

SEQ ID NO: 4688 - DNA, 35 bp, Artificial Sequence
  Synthetic
ggtggtggtgggcatcgtgcgctcggcagctcctt

SEQ ID NO: 4689 - DNA, 40 bp, Artificial Sequence
  Synthetic
gtcgcctcggtagctcagtagtctacggaccgtctgtcga

SEQ ID NO: 4690 - DNA, 48 bp, Artificial Sequence
  Synthetic
cgataggcggctataagatagagattgtctctctttatctttcttgtg

SEQ ID NO: 4691 - DNA, 41 bp, Artificial Sequence
  Synthetic
tatggttcttaggcgcgcatcaagtcatgattcgtaactgc

SEQ ID NO: 4692 - DNA, 38 bp, Artificial Sequence
  Synthetic
ccggcgtgcagcaaggttcgcttcgtaattctgacgca

SEQ ID NO: 4693 - DNA, 38 bp, Artificial Sequence
  Synthetic
tccctcggcgaccaacaccaagatgtgggccgagaact

SEQ ID NO: 4694 - DNA, 37 bp, Artificial Sequence
  Synthetic
gtagcgggagatacggcgttcaagccgccgttcaagc

SEQ ID NO: 4695 - DNA, 39 bp, Artificial Sequence
  Synthetic
gctatcgtcgccggtttcgggtggtggacgagacgagac

SEQ ID NO: 4696 - DNA, 37 bp, Artificial Sequence
  Synthetic
tcggcgttttcgggaagggcaaacccaagccggtcgg

SEQ ID NO: 4697 - DNA, 36 bp, Artificial Sequence
  Synthetic
cgacgcgatcacggtaaccctacgctagcggggctg

SEQ ID NO: 4698 - DNA, 42 bp, Artificial Sequence
  Synthetic
gcgttgtctcgcctatcagcgttaacgtgggtttcaggggaa

SEQ ID NO: 4699 - DNA, 37 bp, Artificial Sequence
  Synthetic
tacgagaccccgaggtacgcactgcagaccgtacggg

SEQ ID NO: 4700 - DNA, 36 bp, Artificial Sequence
  Synthetic
cggaacggcgtttcactgccttctgcaccgccgacg

SEQ ID NO: 4701 - DNA, 37 bp, Artificial Sequence
  Synthetic
gcgtggcagggctggaagaacccagcactccatcgac

SEQ ID NO: 4702 - DNA, 37 bp, Artificial Sequence
  Synthetic
accggtgtggaagccgaggcatacgccacagcatgcg

SEQ ID NO: 4703 - DNA, 35 bp, Artificial Sequence
  Synthetic
acatgggccatgtgtggtggtgtgcactgccgcga

SEQ ID NO: 4704 - DNA, 40 bp, Artificial Sequence
  Synthetic
ctccgggttcctgccttttccaaggccgtggaaaaccacc

SEQ ID NO: 4705 - DNA, 40 bp, Artificial Sequence
  Synthetic
aacaacgcagactgctgaaggccaggcatgggtctgtcga

SEQ ID NO: 4706 - DNA, 37 bp, Artificial Sequence
  Synthetic
agcttctccccgactccgcgagactggcagggacacg

SEQ ID NO: 4707 - DNA, 40 bp, Artificial Sequence
  Synthetic
cgataccaccacattcaggggcctggccgtcctgttcctg

SEQ ID NO: 4708 - DNA, 35 bp, Artificial Sequence
  Synthetic
gggactttccacacggcggaccgttgacgtgggcg

SEQ ID NO: 4709 - DNA, 40 bp, Artificial Sequence
  Synthetic
tcgacgacaggtgcggattagtgcgacagacatccccctg

SEQ ID NO: 4710 - DNA, 41 bp, Artificial Sequence
  Synthetic
caacaataccgccctacgttggttcagtgttggatcagact

SEQ ID NO: 4711 - DNA, 38 bp, Artificial Sequence
  Synthetic
ggacgtaacattcggacacggactcgcgggtttgggga

SEQ ID NO: 4712 - DNA, 35 bp, Artificial Sequence
  Synthetic
ggcgacgacagttccgtgggaaggcaccgcgacag

SEQ ID NO: 4713 - DNA, 35 bp, Artificial Sequence
  Synthetic
ccggcggtggtgaacgagaaccccagcaacggcct

SEQ ID NO: 4714 - DNA, 41 bp, Artificial Sequence
  Synthetic
gtaacccagccaaaccagcgcgattgctgacgctggaaacc

SEQ ID NO: 4715 - DNA, 36 bp, Artificial Sequence
  Synthetic
ccgtgccatcggtgggtaccagagaacgcagcgcac

SEQ ID NO: 4716 - DNA, 40 bp, Artificial Sequence
  Synthetic
gcgagaaccggtcgctcatagctcctcctggtgcctgtgg

SEQ ID NO: 4717 - DNA, 37 bp, Artificial Sequence
  Synthetic
ggaggctatatgaccgcgcggggccgcccaaacatct

SEQ ID NO: 4718 - DNA, 41 bp, Artificial Sequence
  Synthetic
ccttcatcgcgtttgccgtgccccttgagtttgatggtgcc

SEQ ID NO: 4719 - DNA, 39 bp, Artificial Sequence
  Synthetic
aaacgggcgcggttttataggccgggactttgacagccg

SEQ ID NO: 4720 - DNA, 40 bp, Artificial Sequence
  Synthetic
agctgatgcatttccagcgacgtctcctttacggggctgg

SEQ ID NO: 4721 - DNA, 38 bp, Artificial Sequence
  Synthetic
ttctctgtggtcggcgagtctgggcctgaagcgatgga

SEQ ID NO: 4722 - DNA, 37 bp, Artificial Sequence
  Synthetic
gcagtgctacggtggttccctacgatcctccggcgct

SEQ ID NO: 4723 - DNA, 38 bp, Artificial Sequence
  Synthetic
tggtaaagtgaagacgcgccgcaggctggaacgcaacg

SEQ ID NO: 4724 - DNA, 38 bp, Artificial Sequence
  Synthetic
gtgacgcagcagcatcgctccacagacgccgtttgcta

SEQ ID NO: 4725 - DNA, 41 bp, Artificial Sequence
  Synthetic
acacctggtcgacgtggttacgttgagtgccagtacagcgc

SEQ ID NO: 4726 - DNA, 36 bp, Artificial Sequence
  Synthetic
gtcagggccagaacccgcaggtgacgccggttgtcc

SEQ ID NO: 4727 - DNA, 40 bp, Artificial Sequence
  Synthetic
ccctgctgttggctacctctctttcctgtgcaccgtcatc

SEQ ID NO: 4728 - DNA, 39 bp, Artificial Sequence
  Synthetic
cgcatctgctcgccgtagattggatgattttgcgcgaca

SEQ ID NO: 4729 - DNA, 38 bp, Artificial Sequence
  Synthetic
acgagcacgcttccgaggggaagatcgtcctctcgccg

SEQ ID NO: 4730 - DNA, 39 bp, Artificial Sequence
  Synthetic
gaccgagccagagggacctccgacaggtaagatgtggct

SEQ ID NO: 4731 - DNA, 36 bp, Artificial Sequence
  Synthetic
cgtggaaaaccacccggcagtcctccgggttcctgc

SEQ ID NO: 4732 - DNA, 40 bp, Artificial Sequence
  Synthetic
cgggggggtgaaatttggagtgcagcacacgcaactagtc

SEQ ID NO: 4733 - DNA, 47 bp, Artificial Sequence
  Synthetic
aagttcgctgcaatatgcacaccaatgaaatggaagtctgaatacat

SEQ ID NO: 4734 - DNA, 48 bp, Artificial Sequence
  Synthetic
aggaaaaccgattcactgaaattggtcggattttatcttgttagcttt

SEQ ID NO: 4735 - DNA, 39 bp, Artificial Sequence
  Synthetic
aatcacagggaccatgcgtaaaggctggagaagttaggt

SEQ ID NO: 4736 - DNA, 42 bp, Artificial Sequence
  Synthetic
ctgcaaagatattggcgatctgatgctatcgatctgagctct

SEQ ID NO: 4737 - DNA, 39 bp, Artificial Sequence
  Synthetic
cattgcagggccactgagtaccatccatggctgcacaag

SEQ ID NO: 4738 - DNA, 42 bp, Artificial Sequence
  Synthetic
ttctcccttactgacccaaggcctacttcaagaacacagtac

SEQ ID NO: 4739 - DNA, 39 bp, Artificial Sequence
  Synthetic
aaacagatcggagacatggccaaggttctgcacaccttc

SEQ ID NO: 4740 - DNA, 41 bp, Artificial Sequence
  Synthetic
agaatggttagcggcattggggaatcagcctcccttcattg

SEQ ID NO: 4741 - DNA, 40 bp, Artificial Sequence
  Synthetic
gcgacaagcgaacaatggagatgccatatcatcagatggg

SEQ ID NO: 4742 - DNA, 43 bp, Artificial Sequence
  Synthetic
agaaggacaagaattgcatatgagagtgctgctgtttggaatt

SEQ ID NO: 4743 - DNA, 48 bp, Artificial Sequence
  Synthetic
atgagaacatggaagcaatggacttcttatagcccaatatctacttct

SEQ ID NO: 4744 - DNA, 40 bp, Artificial Sequence
  Synthetic
ggaagtgaaaattgatgacggcgaggctcagagttcactc

SEQ ID NO: 4745 - DNA, 46 bp, Artificial Sequence
  Synthetic
tttggtggacaacttttttaacgagtcgtaaagagacggaacataa

SEQ ID NO: 4746 - DNA, 40 bp, Artificial Sequence
  Synthetic
aagacgagcaagacgagaacgggttccctatcagcggcag

SEQ ID NO: 4747 - DNA, 44 bp, Artificial Sequence
  Synthetic
agaggaagaaagagaacaaacagtgcaggtgctcaaagtccatt

SEQ ID NO: 4748 - DNA, 43 bp, Artificial Sequence
  Synthetic
aaacacttcaggtttttggaggttcaccctatttaccaccttg

SEQ ID NO: 4749 - DNA, 40 bp, Artificial Sequence
  Synthetic
ctgccgacgttgcaagaggatttacttctccaccaccgca

SEQ ID NO: 4750 - DNA, 46 bp, Artificial Sequence
  Synthetic
tataggtaacggggcaatagttgagtgcattcgacatctaaaagca

SEQ ID NO: 4751 - DNA, 45 bp, Artificial Sequence
  Synthetic
tgaagggaatggctattttaaagcacaaaacgtcgcatagtttga

SEQ ID NO: 4752 - DNA, 40 bp, Artificial Sequence
  Synthetic
tgatgatactcgacatcgttgctagcacaatgggacgaag

SEQ ID NO: 4753 - DNA, 41 bp, Artificial Sequence
  Synthetic
cgcttctacggctcgcagtatagcattcgaagccaagtgat

SEQ ID NO: 4754 - DNA, 40 bp, Artificial Sequence
  Synthetic
gcattaggccatctttgggatcactaacccggaacatgaa

SEQ ID NO: 4755 - DNA, 40 bp, Artificial Sequence
  Synthetic
cgaaaacggtgtagccagtactttccatgcctttccttct

SEQ ID NO: 4756 - DNA, 39 bp, Artificial Sequence
  Synthetic
ttaacgaggtgcagctgccgcgcgtccgacaaatgatga

SEQ ID NO: 4757 - DNA, 40 bp, Artificial Sequence
  Synthetic
gggtttggctggctgttgctggacaaaaccctcgtccatt

SEQ ID NO: 4758 - DNA, 39 bp, Artificial Sequence
  Synthetic
ggcgtacagttttggagccaagttattgtggcgcagatg

SEQ ID NO: 4759 - DNA, 42 bp, Artificial Sequence
  Synthetic
ctctgacacaaaagctctagtccaaacgatcggtacccttcc

SEQ ID NO: 4760 - DNA, 47 bp, Artificial Sequence
  Synthetic
acgtgtcagtttctataaacgatgatgatcaaatggaagaaagccta

SEQ ID NO: 4761 - DNA, 41 bp, Artificial Sequence
  Synthetic
tgcgctcgtcagatagcaagccggtgaagtagttaccagcg

SEQ ID NO: 4762 - DNA, 40 bp, Artificial Sequence
  Synthetic
agtaggatagcacctgccgccgcgccttcacatgagctat

SEQ ID NO: 4763 - DNA, 44 bp, Artificial Sequence
  Synthetic
agcatataaaactgatttaccgcctttaagaaaggctgcacaag

SEQ ID NO: 4764 - DNA, 47 bp, Artificial Sequence
  Synthetic
aagcggttattgattacctgagcgagttgtatatagtaggacacaat

SEQ ID NO: 4765 - DNA, 43 bp, Artificial Sequence
  Synthetic
agagtctttttcccattggtccctcttgtcaaacatgccttac

SEQ ID NO: 4766 - DNA, 38 bp, Artificial Sequence
  Synthetic
gcatcgttgcacgggctgtactgctttctggtgcgagg

SEQ ID NO: 4767 - DNA, 41 bp, Artificial Sequence
  Synthetic
cggaaacgggaaatcagggcggcggacatgcttttctctct

SEQ ID NO: 4768 - DNA, 35 bp, Artificial Sequence
  Synthetic
ggttcgggtcctgcgggaatcccctgccagagcgt

SEQ ID NO: 4769 - DNA, 44 bp, Artificial Sequence
  Synthetic
gctgcaaggtcattagatatccgggaacgaaattggactaaacg

SEQ ID NO: 4770 - DNA, 40 bp, Artificial Sequence
  Synthetic
gctcgaccgttttcacgtggtgcaacgcctcatttcccat

SEQ ID NO: 4771 - DNA, 42 bp, Artificial Sequence
  Synthetic
ttgaagtaagctgttttaagcccagcctgcgaattcaacaag

SEQ ID NO: 4772 - DNA, 43 bp, Artificial Sequence
  Synthetic
taagctcctgcattaatggtgtagacacagaaactgtacagcc

SEQ ID NO: 4773 - DNA, 42 bp, Artificial Sequence
  Synthetic
tgttgctcgcataaattcgcggcgtggcaactattgaacgct

SEQ ID NO: 4774 - DNA, 42 bp, Artificial Sequence
  Synthetic
gctatgagcacaagtgaggcgcaagactcctctccgtgtctg

SEQ ID NO: 4775 - DNA, 35 bp, Artificial Sequence
  Synthetic
gacaacagcggggaggaagcaaatccgcggcgcag

SEQ ID NO: 4776 - DNA, 48 bp, Artificial Sequence
  Synthetic
tgtacataatccagcaagtaaaccccattgtctctactatgttgaact

SEQ ID NO: 4777 - DNA, 38 bp, Artificial Sequence
  Synthetic
tgctgacgtcactggcgatgacgccggtcgctgcatct

SEQ ID NO: 4778 - DNA, 38 bp, Artificial Sequence
  Synthetic
catccgcaaagatgaggctgctgttatagcgtgccacg

SEQ ID NO: 4779 - DNA, 44 bp, Artificial Sequence
  Synthetic
caaacgtccaggcagggtttcttgcaaatttttaaaagcctgag

SEQ ID NO: 4780 - DNA, 41 bp, Artificial Sequence
  Synthetic
ccccctcctggattttacactgactgtccgtaacatcatcc

SEQ ID NO: 4781 - DNA, 42 bp, Artificial Sequence
  Synthetic
cacatgcgggggatgaaggaagagcaaatgggtttcctgacc

SEQ ID NO: 4782 - DNA, 43 bp, Artificial Sequence
  Synthetic
gtttaccaccaaatttaaggccaggatggtttggccttcgttg

SEQ ID NO: 4783 - DNA, 41 bp, Artificial Sequence
  Synthetic
aactccgggagtgtacactaatgaaaatcaaccccgcaacc

SEQ ID NO: 4784 - DNA, 39 bp, Artificial Sequence
  Synthetic
tatcgcagctggtatttggcagtccatgaccgaactcct

SEQ ID NO: 4785 - DNA, 39 bp, Artificial Sequence
  Synthetic
cgtacgcggacattaccgagccgtctacagtggtgcgac

SEQ ID NO: 4786 - DNA, 38 bp, Artificial Sequence
  Synthetic
gctgcggccgcaacagctatcgcgcacccagtatacat

SEQ ID NO: 4787 - DNA, 41 bp, Artificial Sequence
  Synthetic
cgcccagacgtagggtacagtccgggagaaaaaaccactgt

SEQ ID NO: 4788 - DNA, 46 bp, Artificial Sequence
  Synthetic
acgtactagagcacatgaaggtcttttttatcggacgtacttttac

SEQ ID NO: 4789 - DNA, 39 bp, Artificial Sequence
  Synthetic
cgccgtagacgtcgacgcattgtacaacgcgacgtactg

SEQ ID NO: 4790 - DNA, 42 bp, Artificial Sequence
  Synthetic
ccaaccaaaggagaaaagcggcggttctgttgtgtgcgttac

SEQ ID NO: 4791 - DNA, 38 bp, Artificial Sequence
  Synthetic
cactccctcgatgatgccgcactccgaggcatcctgac

SEQ ID NO: 4792 - DNA, 42 bp, Artificial Sequence
  Synthetic
ttaagccctattccggaaccgcttgtgaagcattaggagcgc

SEQ ID NO: 4793 - DNA, 44 bp, Artificial Sequence
  Synthetic
ctgctcaagttgtgttctataccggcttaaacacaagatgcgtg

SEQ ID NO: 4794 - DNA, 42 bp, Artificial Sequence
  Synthetic
cgttcgcgttattgagaatcacgcctactgcgctaagaggaa

SEQ ID NO: 4795 - DNA, 46 bp, Artificial Sequence
  Synthetic
aacaagaacacctacgagtacatgcgatattgacataggtatccac

SEQ ID NO: 4796 - DNA, 40 bp, Artificial Sequence
  Synthetic
gggaaatgatcttcgggtggatgtgccatgggaaaaaagt

SEQ ID NO: 4797 - DNA, 44 bp, Artificial Sequence
  Synthetic
gtgtcaatcatgtttgactcctccttcatttggggttagcaaac

SEQ ID NO: 4798 - DNA, 39 bp, Artificial Sequence
  Synthetic
ggatacctgggccccactatcacagctgtttggcctata

SEQ ID NO: 4799 - DNA, 40 bp, Artificial Sequence
  Synthetic
tttccgggttttgtgtctcgcggtgtacgcccccagtttc

SEQ ID NO: 4800 - DNA, 45 bp, Artificial Sequence
  Synthetic
atggataaaaatcccactatggacccctgaggactttgtagcata

SEQ ID NO: 4801 - DNA, 40 bp, Artificial Sequence
  Synthetic
ccacagctggcgcacaagttggccctaattgcgacttcaa

SEQ ID NO: 4802 - DNA, 46 bp, Artificial Sequence
  Synthetic
gctatttgagccttcattccttcaggaataattctttctccggaaa

SEQ ID NO: 4803 - DNA, 39 bp, Artificial Sequence
  Synthetic
accggtgggttcccaggaatttcaggagctcatgggacg

SEQ ID NO: 4804 - DNA, 42 bp, Artificial Sequence
  Synthetic
acattcttttcattttcgtcgctgaaatggaaaccaggcagg

SEQ ID NO: 4805 - DNA, 40 bp, Artificial Sequence
  Synthetic
aaaacgctgggctcgaggactgctttgtcgctgtagatgt

SEQ ID NO: 4806 - DNA, 45 bp, Artificial Sequence
  Synthetic
ttcttgctttaagggctggcgacctaaaccttcaaaaattttagg

SEQ ID NO: 4807 - DNA, 42 bp, Artificial Sequence
  Synthetic
atggaaagccggttgtaagcgacgctgttgtagttcgttgga

SEQ ID NO: 4808 - DNA, 43 bp, Artificial Sequence
  Synthetic
aaccttcgagaactaaacaaactgttgtccgttcgtcaaaacc

SEQ ID NO: 4809 - DNA, 42 bp, Artificial Sequence
  Synthetic
ttcacgacgaacctaagacttaccggttcaaatttgcgcagg

SEQ ID NO: 4810 - DNA, 41 bp, Artificial Sequence
  Synthetic
cgcagcaacgctcaaagaaacactgcctgactctcccaaga

SEQ ID NO: 4811 - DNA, 42 bp, Artificial Sequence
  Synthetic
tgtagcctgctttcagcactgcgaatcgccactccatcatgg

SEQ ID NO: 4812 - DNA, 43 bp, Artificial Sequence
  Synthetic
ccgcagctgtctctacctcaagtatttattgaacagagcttct

SEQ ID NO: 4813 - DNA, 42 bp, Artificial Sequence
  Synthetic
ttaaccctccctcttggccagccgaggcaaaagtacagtggt

SEQ ID NO: 4814 - DNA, 43 bp, Artificial Sequence
  Synthetic
tgaagatttctgctgtcatttgtgtcttcttcaggcggtacag

SEQ ID NO: 4815 - DNA, 42 bp, Artificial Sequence
  Synthetic
ttgttgctccagttattgacaaacgaaggagaaactgcctcg

SEQ ID NO: 4816 - DNA, 41 bp, Artificial Sequence
  Synthetic
gtatgctcaaacagccgaaagaagggttacattatggccag

SEQ ID NO: 4817 - DNA, 43 bp, Artificial Sequence
  Synthetic
atacggtaagggcagcccaaagcttttagtaatacctgaaaca

SEQ ID NO: 4818 - DNA, 41 bp, Artificial Sequence
  Synthetic
ttctcatctttttatgcctgccaatcaaggtcactgactgc

SEQ ID NO: 4819 - DNA, 39 bp, Artificial Sequence
  Synthetic
cccccaggatgatttacccctaacaacagaaggaggacg

SEQ ID NO: 4820 - DNA, 38 bp, Artificial Sequence
  Synthetic
tcaactgtgctacacgctgcaataggtaccgagcccac

SEQ ID NO: 4821 - DNA, 43 bp, Artificial Sequence
  Synthetic
aaatggaaggtcagattcttcttcccatactgggttctgctgc

SEQ ID NO: 4822 - DNA, 45 bp, Artificial Sequence
  Synthetic
tcacaaggtcttaaactttcttggatcttgtgttaagtgtgaggg

SEQ ID NO: 4823 - DNA, 42 bp, Artificial Sequence
  Synthetic
aatggtgagctccgatgggttggacaaggctaaggaaccgtt

SEQ ID NO: 4824 - DNA, 43 bp, Artificial Sequence
  Synthetic
ctgtccttaagacggggattggagttgttaagttccagtttgt

SEQ ID NO: 4825 - DNA, 43 bp, Artificial Sequence
  Synthetic
ctggttccccaagcttcgtgtaacagtattggtagacactgat

SEQ ID NO: 4826 - DNA, 42 bp, Artificial Sequence
  Synthetic
tacactatacgcgtggttaaactgtacaaagggggaaaggga

SEQ ID NO: 4827 - DNA, 43 bp, Artificial Sequence
  Synthetic
cgcccaaggattctctcgtttaattatgcatcatcgagcaatt

SEQ ID NO: 4828 - DNA, 41 bp, Artificial Sequence
  Synthetic
ccagctgacatacactgtagtgatacatggtcatgagcggt

SEQ ID NO: 4829 - DNA, 38 bp, Artificial Sequence
  Synthetic
ttcctcacagggcggtagttcagacggtatcgctacag

SEQ ID NO: 4830 - DNA, 43 bp, Artificial Sequence
  Synthetic
ccgctgtgctggtgaaagatttgaacatttggaaaatcgctta

SEQ ID NO: 4831 - DNA, 43 bp, Artificial Sequence
  Synthetic
gcaaagaaagttcacctccaggttgtgcaagttgtatgttctg

SEQ ID NO: 4832 - DNA, 39 bp, Artificial Sequence
  Synthetic
ctggcaaacgggtggaaaaaccgtgttttgcgatgttcg

SEQ ID NO: 4833 - DNA, 39 bp, Artificial Sequence
  Synthetic
catagccccaggtcccgtaatctggtaaggcattatggc

SEQ ID NO: 4834 - DNA, 40 bp, Artificial Sequence
  Synthetic
gcctatggctggtcgctcaaacatctagcctcatctgcca

SEQ ID NO: 4835 - DNA, 41 bp, Artificial Sequence
  Synthetic
gttgaggcttgtgggttttccgcacagcgtcttgggttgtt

SEQ ID NO: 4836 - DNA, 40 bp, Artificial Sequence
  Synthetic
gcctgagcaccagttggcttatgggtgtgctcatagctca

SEQ ID NO: 4837 - DNA, 39 bp, Artificial Sequence
  Synthetic
gaatgcctagtggggctaacctggtggggtgaaatcctg

SEQ ID NO: 4838 - DNA, 41 bp, Artificial Sequence
  Synthetic
acagaaggtggctttatcacattccattatagcccctgtgg

SEQ ID NO: 4839 - DNA, 48 bp, Artificial Sequence
  Synthetic
tcaagagctggaaaataaacttccatcaaatctaacataggtgaacaa

SEQ ID NO: 4840 - DNA, 47 bp, Artificial Sequence
  Synthetic
gtaccaattacaacaagcaaaagcctgttaaggaaatgttttggctc

SEQ ID NO: 4841 - DNA, 41 bp, Artificial Sequence
  Synthetic
gatggtgactgcaggtggagtgagctgtagtttctcaagtc

SEQ ID NO: 4842 - DNA, 40 bp, Artificial Sequence
  Synthetic
atccaagttcattgactggctgtaatgtgtccgacttgcg

SEQ ID NO: 4843 - DNA, 43 bp, Artificial Sequence
  Synthetic
tttgtcagatggtttcaagcactctctgcccttatcttcaaga

SEQ ID NO: 4844 - DNA, 45 bp, Artificial Sequence
  Synthetic
cattgtagatcttcttagtgcctcccatccctctttctcacagaa

SEQ ID NO: 4845 - DNA, 47 bp, Artificial Sequence
  Synthetic
ataacgattttgtggctagatcgaaggtagtctggtatgaatcttct

SEQ ID NO: 4846 - DNA, 39 bp, Artificial Sequence
  Synthetic
cgctgtgttgacccagaaagcttggacaaaacagctgtt

SEQ ID NO: 4847 - DNA, 44 bp, Artificial Sequence
  Synthetic
gtaatctctatgctggcttccatgatcacaccctatagctgaac

SEQ ID NO: 4848 - DNA, 44 bp, Artificial Sequence
  Synthetic
atggattgacaataacacctgctgcattatcccagttgactttc

SEQ ID NO: 4849 - DNA, 43 bp, Artificial Sequence
  Synthetic
ttctgcagacgattcgacatttagatcgacagtatgagaacaa

SEQ ID NO: 4850 - DNA, 48 bp, Artificial Sequence
  Synthetic
tcggtggttccatttagaatagacagcagcatacaatgtaattcttac

SEQ ID NO: 4851 - DNA, 48 bp, Artificial Sequence
  Synthetic
tgcactgacagtatagatacgttgggttagaaatgtttgaatcgtcat

SEQ ID NO: 4852 - DNA, 46 bp, Artificial Sequence
  Synthetic
tgaaagacacagcaaaaggagattgaattttcagcttcatcttcga

SEQ ID NO: 4853 - DNA, 41 bp, Artificial Sequence
  Synthetic
ctgtttttggacaaacaccgggttgctgcttgatgacttac

SEQ ID NO: 4854 - DNA, 49 bp, Artificial Sequence
  Synthetic
ctcatattgagtcacaggagagcagcattttcttttctgatattttccc

SEQ ID NO: 4855 - DNA, 43 bp, Artificial Sequence
  Synthetic
ggactgtgcattttaaaacccaagtgtcgaaggaggaggagta

SEQ ID NO: 4856 - DNA, 39 bp, Artificial Sequence
  Synthetic
gtcaggagaaaccccccgcattcggtctctcctcctcct

SEQ ID NO: 4857 - DNA, 43 bp, Artificial Sequence
  Synthetic
actgtttggaactgggttggagtcagtgctatcaaatgcaata

SEQ ID NO: 4858 - DNA, 45 bp, Artificial Sequence
  Synthetic
gggaagtgtaatatacctaggaggcggattatacccagttgaccc

SEQ ID NO: 4859 - DNA, 48 bp, Artificial Sequence
  Synthetic
ttctgttgtgccattagaggatctctcttgtatctccactatctactg

SEQ ID NO: 4860 - DNA, 44 bp, Artificial Sequence
  Synthetic
gagcctcagcaactccacatacaaatacattcagatcagatgac

SEQ ID NO: 4861 - DNA, 39 bp, Artificial Sequence
  Synthetic
cccagctttactgacacagccgcatcaaaggcgggattt

SEQ ID NO: 4862 - DNA, 44 bp, Artificial Sequence
  Synthetic
aattgggcaggcggttcattgataattcaatagcatcagcagta

SEQ ID NO: 4863 - DNA, 44 bp, Artificial Sequence
  Synthetic
atgattctgatcatgaacgcctaggtagtacctataccaagcgg

SEQ ID NO: 4864 - DNA, 43 bp, Artificial Sequence
  Synthetic
agaagagaacaactatatgccagactggtagagcatctcccat

SEQ ID NO: 4865 - DNA, 44 bp, Artificial Sequence
  Synthetic
tagagctacaagatgccctacactcaacaacccaaaaagacaaa

SEQ ID NO: 4866 - DNA, 47 bp, Artificial Sequence
  Synthetic
gtccgcaccccaataattatttgcggaaatttgaagaggatatgtcc

SEQ ID NO: 4867 - DNA, 37 bp, Artificial Sequence
  Synthetic
acagaccacgatccccacaccactgctgccgtgcgac

SEQ ID NO: 4868 - DNA, 44 bp, Artificial Sequence
  Synthetic
gccttaaccacaaattctttggccttactgaacgacatcgaaat

SEQ ID NO: 4869 - DNA, 42 bp, Artificial Sequence
  Synthetic
tgccagcctattcacatacctgactacattaacggtctccat

SEQ ID NO: 4870 - DNA, 36 bp, Artificial Sequence
  Synthetic
atcacatgagaacggcgcgacgtcgcgcgaattcgg

SEQ ID NO: 4871 - DNA, 48 bp, Artificial Sequence
  Synthetic
atgtcacatggatcatcaaccaaagttcttgagtagtcatatgttctt

SEQ ID NO: 4872 - DNA, 42 bp, Artificial Sequence
  Synthetic
attgtgtaatggaggcagaaacagtcttccttccgtaagtct

SEQ ID NO: 4873 - DNA, 44 bp, Artificial Sequence
  Synthetic
caggatgaacagtgatcagtttgctgttggcattcattccattt

SEQ ID NO: 4874 - DNA, 44 bp, Artificial Sequence
  Synthetic
aacagcttatcaccttctactgctcgctctaaattcttggagac

SEQ ID NO: 4875 - DNA, 39 bp, Artificial Sequence
  Synthetic
aagcgtgtttgaatcagcggtttcttctatggcctctcc

SEQ ID NO: 4876 - DNA, 42 bp, Artificial Sequence
  Synthetic
gaccagttgtgcaagacgttgcaaaacacacaattaatttgc

SEQ ID NO: 4877 - DNA, 44 bp, Artificial Sequence
  Synthetic
aacaagacatcttagacgtgctaattttctacttcacacagcgg

SEQ ID NO: 4878 - DNA, 45 bp, Artificial Sequence
  Synthetic
cagaagatgaggtggacgaagtgggtcactatttggaaatgttgt

SEQ ID NO: 4879 - DNA, 43 bp, Artificial Sequence
  Synthetic
cccaacaggtacacaaatatcagaccatgtcatacccactgtc

SEQ ID NO: 4880 - DNA, 38 bp, Artificial Sequence
  Synthetic
tccacgattggacgccattatggtttgaaacagccgtc

SEQ ID NO: 4881 - DNA, 39 bp, Artificial Sequence
  Synthetic
caggcacagcaggaatattggtaccaagtaatgctgccc

SEQ ID NO: 4882 - DNA, 49 bp, Artificial Sequence
  Synthetic
gcatttgaatatgcacaaaggggagcatattgctatttaaaaatgctcg

SEQ ID NO: 4883 - DNA, 46 bp, Artificial Sequence
  Synthetic
atggaagcaatagccaagcgtcagtactgttttcttcataaagttc

SEQ ID NO: 4884 - DNA, 43 bp, Artificial Sequence
  Synthetic
aacaagttatgaaatgtggcaaacattctacagttttgccccg

SEQ ID NO: 4885 - DNA, 43 bp, Artificial Sequence
  Synthetic
accagcaccaaagacggaacactttaaacaattggattcacct

SEQ ID NO: 4886 - DNA, 47 bp, Artificial Sequence
  Synthetic
ctgggatttatgtcactgcacctaatgtacagttgtattacaccaat

SEQ ID NO: 4887 - DNA, 45 bp, Artificial Sequence
  Synthetic
aactctacttgtgtgttactgtccccatcattgctgtgtggtaac

SEQ ID NO: 4888 - DNA, 41 bp, Artificial Sequence
  Synthetic
ccaggtgcaggttacagacctccccttcatatacagggtta

SEQ ID NO: 4889 - DNA, 40 bp, Artificial Sequence
  Synthetic
tactgcacctatgggaacaccaaacagggcctgtaggtaa

SEQ ID NO: 4890 - DNA, 42 bp, Artificial Sequence
  Synthetic
cagcagttctagacttcttgcagcagttttgttagcccgttt

SEQ ID NO: 4891 - DNA, 45 bp, Artificial Sequence
  Synthetic
tccagattatttacaaatggctgcaacatttgttccttccgtaga

SEQ ID NO: 4892 - DNA, 43 bp, Artificial Sequence
  Synthetic
acaatggtatttgttggggtaatcaatgttggtactgcgtgtg

SEQ ID NO: 4893 - DNA, 47 bp, Artificial Sequence
  Synthetic
cttttatgcactgtagccaactctaacagtaagagcaaaaaaatgtg

SEQ ID NO: 4894 - DNA, 38 bp, Artificial Sequence
  Synthetic
tggattaacccgctcaatgcccaggcctttcgcgaccc

SEQ ID NO: 4895 - DNA, 38 bp, Artificial Sequence
  Synthetic
cccagattgggtgtgcgcgtcttccacgaggttgcgac

SEQ ID NO: 4896 - DNA, 41 bp, Artificial Sequence
  Synthetic
ggctttggaggacgggatcaacgaaagaagtgccaagagga

SEQ ID NO: 4897 - DNA, 39 bp, Artificial Sequence
  Synthetic
tcgcagcgccatacatcggccccaccatcaaatccacat

SEQ ID NO: 4898 - DNA, 40 bp, Artificial Sequence
  Synthetic
cctcgtgggggtggcctattcaacccctgcaaagaggaat

SEQ ID NO: 4899 - DNA, 36 bp, Artificial Sequence
  Synthetic
cccactcggggtcgctaacaatcccgcatggccgag

SEQ ID NO: 4900 - DNA, 39 bp, Artificial Sequence
  Synthetic
gttcaccaaaacctgtggcgccctgaagcaatcggtggg

SEQ ID NO: 4901 - DNA, 39 bp, Artificial Sequence
  Synthetic
ccactacagcgtggcagatccatcaagccggtggagagg

SEQ ID NO: 4902 - DNA, 38 bp, Artificial Sequence
  Synthetic
ttctgatgctgcctgagagggcgacaacgatggcgccg

SEQ ID NO: 4903 - DNA, 42 bp, Artificial Sequence
  Synthetic
tcttgcagtcctggtctgtccagccctaagatggccagaaga

SEQ ID NO: 4904 - DNA, 40 bp, Artificial Sequence
  Synthetic
cctgtttcggccaggttggggtctccacccctttgatgtt

SEQ ID NO: 4905 - DNA, 39 bp, Artificial Sequence
  Synthetic
taacggcgtgatgtggaccggattgacaggtcccttcgg

SEQ ID NO: 4906 - DNA, 38 bp, Artificial Sequence
  Synthetic
cactgacaactcaacacccccaggtgcgtgtaggtgcg

SEQ ID NO: 4907 - DNA, 39 bp, Artificial Sequence
  Synthetic
ggtgcgccaatcacgtactcaatgtcgtatgcccctccg

SEQ ID NO: 4908 - DNA, 42 bp, Artificial Sequence
  Synthetic
aaagtgcgatgaactggccagactctgtagtaggctacggca

SEQ ID NO: 4909 - DNA, 41 bp, Artificial Sequence
  Synthetic
gggaggttgggcacataccgggcagtgtcaaacatgcctga

SEQ ID NO: 4910 - DNA, 39 bp, Artificial Sequence
  Synthetic
ccaagctgggacaccatgtggtctgtagaggaggggcgt

SEQ ID NO: 4911 - DNA, 42 bp, Artificial Sequence
  Synthetic
aacacctcccactagtcgagcacctaaggccttctgcttgaa

SEQ ID NO: 4912 - DNA, 40 bp, Artificial Sequence
  Synthetic
gattcgcgactccgatgcttctttttgccaaggcccacac

SEQ ID NO: 4913 - DNA, 36 bp, Artificial Sequence
  Synthetic
gaaggggccgtgcagtggaacacgtgattgcctcgc

SEQ ID NO: 4914 - DNA, 40 bp, Artificial Sequence
  Synthetic
aggctataagggagagtggcgcacctgccagatctgctcc

SEQ ID NO: 4915 - DNA, 41 bp, Artificial Sequence
  Synthetic
ccacgcccctaagtgcaaaccttgtgatcccactacgaacg

SEQ ID NO: 4916 - DNA, 41 bp, Artificial Sequence
  Synthetic
gtaccgctccccatgactcccagacccccacaagaggttag

SEQ ID NO: 4917 - DNA, 42 bp, Artificial Sequence
  Synthetic
tccctctcccaggaggaaacgggccaaagcggtagaaacaac

SEQ ID NO: 4918 - DNA, 40 bp, Artificial Sequence
  Synthetic
gcttgtaacaccttgcgcggtgaattgctcagggggctaa

SEQ ID NO: 4919 - DNA, 42 bp, Artificial Sequence
  Synthetic
taaccacatcagctccgtgtggtggccatgattgttgttgga

SEQ ID NO: 4920 - DNA, 40 bp, Artificial Sequence
  Synthetic
accgaaaaggacatcagggtcgatgactttgcgggcttcg

SEQ ID NO: 4921 - DNA, 35 bp, Artificial Sequence
  Synthetic
aggaggacaaccgagccctagcgtcacctggggga

SEQ ID NO: 4922 - DNA, 40 bp, Artificial Sequence
  Synthetic
atcgggttggtttacggtaggcggtcgggcatgagacatg

SEQ ID NO: 4923 - DNA, 45 bp, Artificial Sequence
  Synthetic
atacatatactgtgatcatgggcgttgattttcgtgagatccact

SEQ ID NO: 4924 - DNA, 42 bp, Artificial Sequence
  Synthetic
gagtacaacaaatcacactcgggcataacacacaacagcgtt

SEQ ID NO: 4925 - DNA, 42 bp, Artificial Sequence
  Synthetic
tatgggtgtgttcgggcaaatactgtgtaacctgatcttcct

SEQ ID NO: 4926 - DNA, 45 bp, Artificial Sequence
  Synthetic
gatggggtcttcaaaactactcttcgtgatccagaccaatgtgta

SEQ ID NO: 4927 - DNA, 49 bp, Artificial Sequence
  Synthetic
actgatccagatacatacaccagtgaagtataagagaagtttgatacca

SEQ ID NO: 4928 - DNA, 43 bp, Artificial Sequence
  Synthetic
gttgagaaaacgaaacagacggtgggactttttgtgtgtgttt

SEQ ID NO: 4929 - DNA, 43 bp, Artificial Sequence
  Synthetic
aagtgcttcaaaccccagtgttaaggcacactaaaccttgatg

SEQ ID NO: 4930 - DNA, 44 bp, Artificial Sequence
  Synthetic
acatcaatagggcgcacaaatcctttcctcttcttaattactgg

SEQ ID NO: 4931 - DNA, 44 bp, Artificial Sequence
  Synthetic
attaccccataatttgcgaaaagcacttgggtaataagggcttc

SEQ ID NO: 4932 - DNA, 39 bp, Artificial Sequence
  Synthetic
gttggagtgtatcgcagaggaagtgaacccgacaccaaa

SEQ ID NO: 4933 - DNA, 45 bp, Artificial Sequence
  Synthetic
tgtacatttccaaacactttcaggtactttctgaaccatccatca

SEQ ID NO: 4934 - DNA, 44 bp, Artificial Sequence
  Synthetic
tgcaattgcagaacacttcaattccatcaaagtgcttgggatct

SEQ ID NO: 4935 - DNA, 44 bp, Artificial Sequence
  Synthetic
ctaagccccccaacaatcttgtgcaaacatatatctaggtcaaa

SEQ ID NO: 4936 - DNA, 45 bp, Artificial Sequence
  Synthetic
atgattatgcaacaaaaactgggcaccaaagatcttaccagtagc

SEQ ID NO: 4937 - DNA, 49 bp, Artificial Sequence
  Synthetic
aacctgctgtattgagtgacaatgcccttgtacttagagaataatgatt

SEQ ID NO: 4938 - DNA, 43 bp, Artificial Sequence
  Synthetic
acaaagcattccatcaaaatcccgcacatcaggatcacaaccc

SEQ ID NO: 4939 - DNA, 48 bp, Artificial Sequence
  Synthetic
aagagatacttcaagcctgatcaacatgtatatctttcatgggcataa

SEQ ID NO: 4940 - DNA, 42 bp, Artificial Sequence
  Synthetic
tcattggtcgagagaaccacgctcgaccgaaatccacgaaag

SEQ ID NO: 4941 - DNA, 41 bp, Artificial Sequence
  Synthetic
ttgcagatgcagcaagtgtggagcataaaagcgctcgtggt

SEQ ID NO: 4942 - DNA, 40 bp, Artificial Sequence
  Synthetic
agtggaacgtggacgacctcaatcgtcaagcactgcgtac

SEQ ID NO: 4943 - DNA, 39 bp, Artificial Sequence
  Synthetic
ccggggttgagtgtgactgttcactgccaagctggacac

SEQ ID NO: 4944 - DNA, 38 bp, Artificial Sequence
  Synthetic
aagtgaaaacaacgcggcgcgaacgcctgcagatcgac

SEQ ID NO: 4945 - DNA, 46 bp, Artificial Sequence
  Synthetic
aagcaattgagtcttgtatggaagggcttcaaattttgcactaagc

SEQ ID NO: 4946 - DNA, 40 bp, Artificial Sequence
  Synthetic
caggctttgtgtagttgcaacagtcacgaaaaagcagtcg

SEQ ID NO: 4947 - DNA, 42 bp, Artificial Sequence
  Synthetic
agaagatgaagctacaaatgctgcttaaggagctctgcgtcc

SEQ ID NO: 4948 - DNA, 47 bp, Artificial Sequence
  Synthetic
catcagctagcttcacaggcaggagtcttctgttaattgattgtcat

SEQ ID NO: 4949 - DNA, 43 bp, Artificial Sequence
  Synthetic
agtaggatttttggatgatgccactccatctaatgcatttcgc

SEQ ID NO: 4950 - DNA, 38 bp, Artificial Sequence
  Synthetic
acctacaccaagaccccgcaagtgcttgcctcctcctg

SEQ ID NO: 4951 - DNA, 43 bp, Artificial Sequence
  Synthetic
tgaaagacttgaagaggaagctaggtaatggattagcaggccc

SEQ ID NO: 4952 - DNA, 39 bp, Artificial Sequence
  Synthetic
tcgcagacgaataaaacgagcatcaccaccttggacaca

SEQ ID NO: 4953 - DNA, 41 bp, Artificial Sequence
  Synthetic
taggccacgtcctaccatacccgcaacaggaaggacgtctg

SEQ ID NO: 4954 - DNA, 44 bp, Artificial Sequence
  Synthetic
gggacctttaagaagtacaccttttctgatataaatctcgcgcc

SEQ ID NO: 4955 - DNA, 42 bp, Artificial Sequence
  Synthetic
tattgcatttacagaacagccacgtaagcggcttacacgaat

SEQ ID NO: 4956 - DNA, 46 bp, Artificial Sequence
  Synthetic
atcagatgttcattgttggttgtgccacatggtttagctaaatccc

SEQ ID NO: 4957 - DNA, 49 bp, Artificial Sequence
  Synthetic
agatgtttcttttatggcaagagggtactccatctttacaaaacatgtg

SEQ ID NO: 4958 - DNA, 41 bp, Artificial Sequence
  Synthetic
taataggccattttgggtgcacaaagttcgtttccccatgc

SEQ ID NO: 4959 - DNA, 45 bp, Artificial Sequence
  Synthetic
tgtaccaactaggaatgctcacaggagtactggatgtataggtat

SEQ ID NO: 4960 - DNA, 43 bp, Artificial Sequence
  Synthetic
cgaaatcggtcgcttgtatagcacaaagtaaagtgtgccaaat

SEQ ID NO: 4961 - DNA, 41 bp, Artificial Sequence
  Synthetic
aacctaatgcaacctcgccagcgctggatgggatggttcca

SEQ ID NO: 4962 - DNA, 37 bp, Artificial Sequence
  Synthetic
gggccggctgctaattgccgcagtaagtgcggtcagc

SEQ ID NO: 4963 - DNA, 35 bp, Artificial Sequence
  Synthetic
ccccctggcacataccgcaaccacaacgcgcctgc

SEQ ID NO: 4964 - DNA, 42 bp, Artificial Sequence
  Synthetic
tgttccttacccccggtctacctggaaatagggagggggtac

SEQ ID NO: 4965 - DNA, 40 bp, Artificial Sequence
  Synthetic
ttaccatctgccaccagcggtacttctgagcatgctcccg

SEQ ID NO: 4966 - DNA, 41 bp, Artificial Sequence
  Synthetic
ggactgcgattcgtaaggcggggttgtaggaaacaggtgca

SEQ ID NO: 4967 - DNA, 39 bp, Artificial Sequence
  Synthetic
ctgccctccaaccgctttacctttactgtggcggtcagc

SEQ ID NO: 4968 - DNA, 35 bp, Artificial Sequence
  Synthetic
ctgggctggaggtgcgctacgggggcaaaaaccgc

SEQ ID NO: 4969 - DNA, 39 bp, Artificial Sequence
  Synthetic
attcgccggctcgctgttttggtcaacattagacgcgtt

SEQ ID NO: 4970 - DNA, 38 bp, Artificial Sequence
  Synthetic
gacttgctcccgcctcggtagcacctggtatatgccgg

SEQ ID NO: 4971 - DNA, 38 bp, Artificial Sequence
  Synthetic
cttgactcagccacagacgtcgactgcacaacgccggg

SEQ ID NO: 4972 - DNA, 36 bp, Artificial Sequence
  Synthetic
gatgaggccccgtcccttccaaggtggacggtggcg

SEQ ID NO: 4973 - DNA, 38 bp, Artificial Sequence
  Synthetic
ggtcgttgttctggggtgagcgttggcggccttagctg

SEQ ID NO: 4974 - DNA, 40 bp, Artificial Sequence
  Synthetic
tccttgctggtggcgaaattggattggcgtcaggattgcc

SEQ ID NO: 4975 - DNA, 38 bp, Artificial Sequence
  Synthetic
gtaaccgcgacgtgtccagggtctcccccgtggtgaat

SEQ ID NO: 4976 - DNA, 39 bp, Artificial Sequence
  Synthetic
gaagcagctccgcctcgctcatccacacacatctgagct

SEQ ID NO: 4977 - DNA, 35 bp, Artificial Sequence
  Synthetic
gccgctgcctcacgtcgtaagcgaccgcggttagc

SEQ ID NO: 4978 - DNA, 38 bp, Artificial Sequence
  Synthetic
ttactccagcactgcccgtcatggtgagctcggcagtc

SEQ ID NO: 4979 - DNA, 41 bp, Artificial Sequence
  Synthetic
ttggttaatgtagcgaccggcgtgtgaccttggtccagtcg

SEQ ID NO: 4980 - DNA, 39 bp, Artificial Sequence
  Synthetic
ggccccgtctctatttccgctcctcaagcaatgctagcg

SEQ ID NO: 4981 - DNA, 41 bp, Artificial Sequence
  Synthetic
acttgacgttcgtaatgggcttaaaaaatccgttggtcgtc

SEQ ID NO: 4982 - DNA, 47 bp, Artificial Sequence
  Synthetic
tctcgtgtatgtctaacgatgttccaaacatctttgaattgtttcca

SEQ ID NO: 4983 - DNA, 43 bp, Artificial Sequence
  Synthetic
gtattaacgcattgcccagttgaattgaagtttggtttacgcg

SEQ ID NO: 4984 - DNA, 39 bp, Artificial Sequence
  Synthetic
acaaacaatggtagaccgcgcatacgaaactgtgcaagc

SEQ ID NO: 4985 - DNA, 47 bp, Artificial Sequence
  Synthetic
gttgcaaaaacaaagacagtttgaaggaatacgttcaattaaagctc

SEQ ID NO: 4986 - DNA, 39 bp, Artificial Sequence
  Synthetic
ccagctccggattatgtggtcgatgtacggcaaatcaat

SEQ ID NO: 4987 - DNA, 38 bp, Artificial Sequence
  Synthetic
cgatgaacaccgttttgcactaggccaacgttttccac

SEQ ID NO: 4988 - DNA, 38 bp, Artificial Sequence
  Synthetic
ggcaccactggattccgtttagtaaatttgggacgccg

SEQ ID NO: 4989 - DNA, 42 bp, Artificial Sequence
  Synthetic
ctagctcctgcaaactttctggaagccagtttttcattggtg

SEQ ID NO: 4990 - DNA, 41 bp, Artificial Sequence
  Synthetic
gtgtgcacaccgttgcatttaaggctgttatcatctgatcg

SEQ ID NO: 4991 - DNA, 43 bp, Artificial Sequence
  Synthetic
ctgcttcttccggtgaatattcaagccctgaattaaaaaaggc

SEQ ID NO: 4992 - DNA, 42 bp, Artificial Sequence
  Synthetic
caccgttgcctttactgtaagtatgttacaaaatacgcacgc

SEQ ID NO: 4993 - DNA, 38 bp, Artificial Sequence
  Synthetic
actctgggaatcggggggaggtcggtggcgctgtatgc

SEQ ID NO: 4994 - DNA, 37 bp, Artificial Sequence
  Synthetic
ccggtattcacggggcgacaacaccgtgtgtacccgc

SEQ ID NO: 4995 - DNA, 38 bp, Artificial Sequence
  Synthetic
cgatccgggccaagggcttgataattcccccggtgtcg

SEQ ID NO: 4996 - DNA, 36 bp, Artificial Sequence
  Synthetic
tgggcgggtatcatcggtcttcggacagcgttcccg

SEQ ID NO: 4997 - DNA, 46 bp, Artificial Sequence
  Synthetic
agctagaacgattcgcagttaatccagtatttgtctacagccttct

SEQ ID NO: 4998 - DNA, 39 bp, Artificial Sequence
  Synthetic
agcaatcaggtcagccaaaatgcctgatgtaccatttgc

SEQ ID NO: 4999 - DNA, 43 bp, Artificial Sequence
  Synthetic
gagagaaccaaggggaagtgaccatcctatttgttcctgaagg

SEQ ID NO: 5000 - DNA, 39 bp, Artificial Sequence
  Synthetic
ggaccagcggctacactagaagccaaaactcttgcctta

SEQ ID NO: 5001 - DNA, 50 bp, Artificial Sequence
  Synthetic
gtagcatgacaaaaatcttagagcctgtattgatagataactatgtctgg

SEQ ID NO: 5002 - DNA, 47 bp, Artificial Sequence
  Synthetic
gttagtggggaaattgaattgggcaggagtttacataattgccttac

SEQ ID NO: 5003 - DNA, 42 bp, Artificial Sequence
  Synthetic
aaactgcccatacaaaaggaaacaactcaggaatccaggtgg

SEQ ID NO: 5004 - DNA, 43 bp, Artificial Sequence
  Synthetic
ctagtgattttaacctgccacctctgacatttatcacagctgg

SEQ ID NO: 5005 - DNA, 43 bp, Artificial Sequence
  Synthetic
atacatactgacaatggcagcaattattcctgcttgattcccg

SEQ ID NO: 5006 - DNA, 45 bp, Artificial Sequence
  Synthetic
aggggatgctagattggtaataacaaaatgccagtctctttctcc

SEQ ID NO: 5007 - DNA, 43 bp, Artificial Sequence
  Synthetic
aacaccaaaaaagataaagccacctttctggggcttgttccat

SEQ ID NO: 5008 - DNA, 44 bp, Artificial Sequence
  Synthetic
acaactgctgtttatccattttcagtctgtcgagtaacgcctat

SEQ ID NO: 5009 - DNA, 41 bp, Artificial Sequence
  Synthetic
acagaggtacataatgtttgggctacttcttgtgggttggg

SEQ ID NO: 5010 - DNA, 44 bp, Artificial Sequence
  Synthetic
ctgctgttaaatggcagtctagctgtccgtgaaattgacagatc

SEQ ID NO: 5011 - DNA, 45 bp, Artificial Sequence
  Synthetic
tggtggtaatagcaacaatgagtcccacttctccaattgtccctc

SEQ ID NO: 5012 - DNA, 42 bp, Artificial Sequence
  Synthetic
gttgcaactcacagtctggggcggtatctttccacagccagg

SEQ ID NO: 5013 - DNA, 41 bp, Artificial Sequence
  Synthetic
agcagctaccaatgctgcttgtggaaaacccacctcctcct

SEQ ID NO: 5014 - DNA, 38 bp, Artificial Sequence
  Synthetic
agggactttccgctggggactgcaggatctgagggctc

SEQ ID NO: 5015 - DNA, 40 bp, Artificial Sequence
  Synthetic
acgaccttcaccgcgactccgcctcgaacatctccgtgtc

SEQ ID NO: 5016 - DNA, 37 bp, Artificial Sequence
  Synthetic
gagcgcgtgatggtcatcgcccatggccatcaacgcc

SEQ ID NO: 5017 - DNA, 36 bp, Artificial Sequence
  Synthetic
cgctctcaaacacctccccgagggcctttctggggc

SEQ ID NO: 5018 - DNA, 39 bp, Artificial Sequence
  Synthetic
taacgtcaaggtcgtcgtcgggttaagcacctgggcccg

SEQ ID NO: 5019 - DNA, 35 bp, Artificial Sequence
  Synthetic
ggtccgaaacgtcccgtcgaacagccaggtcgcgg

SEQ ID NO: 5020 - DNA, 42 bp, Artificial Sequence
  Synthetic
tccttgtgggacgagaacagccaagttacatcaccaacccgg

SEQ ID NO: 5021 - DNA, 37 bp, Artificial Sequence
  Synthetic
cgttgagggtctgcacgcacggcgtatctcatcaccg

SEQ ID NO: 5022 - DNA, 42 bp, Artificial Sequence
  Synthetic
ggtgcgctgcttcaagattctgccgctagagtacgagatcga

SEQ ID NO: 5023 - DNA, 35 bp, Artificial Sequence
  Synthetic
ccacgccctcgctgttcgtaagggagacgcgtggc

SEQ ID NO: 5024 - DNA, 40 bp, Artificial Sequence
  Synthetic
cactggtacatggcccactaccgcaaaacagggccgagag

SEQ ID NO: 5025 - DNA, 37 bp, Artificial Sequence
  Synthetic
gagcgcggccccagacttacctggcccatgatgcagg

SEQ ID NO: 5026 - DNA, 41 bp, Artificial Sequence
  Synthetic
ctgcatgtagcggtcgtagtggcgaacctttagccccgagg

SEQ ID NO: 5027 - DNA, 39 bp, Artificial Sequence
  Synthetic
gctctccggcggcgttgatggcggctttacgaccactac

SEQ ID NO: 5028 - DNA, 39 bp, Artificial Sequence
  Synthetic
gagagtccgtacccgccccacatgaactacgggccggac

SEQ ID NO: 5029 - DNA, 36 bp, Artificial Sequence
  Synthetic
ggggtgagcgagtggagcacgttgccaggttctgcc

SEQ ID NO: 5030 - DNA, 35 bp, Artificial Sequence
  Synthetic
cggagaacgcgaggcccatcgaaacagccgcctgg

SEQ ID NO: 5031 - DNA, 37 bp, Artificial Sequence
  Synthetic
cgtgcttcagggggcggttcaccggagctctcggtaa

SEQ ID NO: 5032 - DNA, 39 bp, Artificial Sequence
  Synthetic
cgaagagcgcactcccccaaaaagagtggtttgccgtgg

SEQ ID NO: 5033 - DNA, 40 bp, Artificial Sequence
  Synthetic
aaaggcgccaacaaacctaggaccagaccctgcagctaca

SEQ ID NO: 5034 - DNA, 35 bp, Artificial Sequence
  Synthetic
gcgggacttcgcccagttccgtagtctccgcgaga

SEQ ID NO: 5035 - DNA, 38 bp, Artificial Sequence
  Synthetic
gtttgcctccagccacaacacaccggggaaacaggcac

SEQ ID NO: 5036 - DNA, 36 bp, Artificial Sequence
  Synthetic
ggacaaggccgggtcccgtatcagcctcgcagaccc

SEQ ID NO: 5037 - DNA, 40 bp, Artificial Sequence
  Synthetic
ctcccggaaggtattgctcgcagcttcatggagggcagcc

SEQ ID NO: 5038 - DNA, 39 bp, Artificial Sequence
  Synthetic
cggcgtagatgcgcttctcccggatctggtggccatagg

SEQ ID NO: 5039 - DNA, 35 bp, Artificial Sequence
  Synthetic
ccggcggacgcgactaacagttggtcgggttgccc

SEQ ID NO: 5040 - DNA, 36 bp, Artificial Sequence
  Synthetic
caagggggtgtgggtgacgaagccccggatcctcgt

SEQ ID NO: 5041 - DNA, 37 bp, Artificial Sequence
  Synthetic
gtccgccgggatgtcggatgagggcgggttcatcctg

SEQ ID NO: 5042 - DNA, 37 bp, Artificial Sequence
  Synthetic
cgtactaccctttcgacgcgctcctggagtcggcgac

SEQ ID NO: 5043 - DNA, 35 bp, Artificial Sequence
  Synthetic
gtgcgccgtgctgtgtctgatcgcgatcgggggag

SEQ ID NO: 5044 - DNA, 36 bp, Artificial Sequence
  Synthetic
gctgggcatgctgatcccggtccaatccggacgccc

SEQ ID NO: 5045 - DNA, 39 bp, Artificial Sequence
  Synthetic
gtgacgtcggcgcgactcagggctacgtgtacttcgagg

SEQ ID NO: 5046 - DNA, 35 bp, Artificial Sequence
  Synthetic
aggagccccacgttctcgaacagcttcgcccagcc

SEQ ID NO: 5047 - DNA, 37 bp, Artificial Sequence
  Synthetic
gggcggtccagaaccactgctttcccaacggcaagcc

SEQ ID NO: 5048 - DNA, 37 bp, Artificial Sequence
  Synthetic
acaacccccacctcgctcagtacgtatggcgctgagc

SEQ ID NO: 5049 - DNA, 39 bp, Artificial Sequence
  Synthetic
agcgacgtcgagtttaactgcaggcaggtcacacatggc

SEQ ID NO: 5050 - DNA, 39 bp, Artificial Sequence
  Synthetic
ggaacgcgtaatcggccaccgcaccatcgagctgtacaa

SEQ ID NO: 5051 - DNA, 37 bp, Artificial Sequence
  Synthetic
ttcggtgctgtttcaggggtttgctccgccgtgatcg

SEQ ID NO: 5052 - DNA, 35 bp, Artificial Sequence
  Synthetic
gctttgtgcgcatgccccgtgcgaacggcgtcctc

SEQ ID NO: 5053 - DNA, 40 bp, Artificial Sequence
  Synthetic
cttcgcccaccgattcctgtccaacaatctgtcgacagga

SEQ ID NO: 5054 - DNA, 34 bp, Artificial Sequence
  Synthetic
gtatgcgacgcggctggtatacaggcgggcggac

SEQ ID NO: 5055 - DNA, 36 bp, Artificial Sequence
  Synthetic
tggtggcggcgcacaacattccaggtacacgcacgc

SEQ ID NO: 5056 - DNA, 38 bp, Artificial Sequence
  Synthetic
cacacggcgtgcctgaagagttcaggtcccggaactcg

SEQ ID NO: 5057 - DNA, 37 bp, Artificial Sequence
  Synthetic
gcgagcaccgaccccctagatggggcacaccggaatc

SEQ ID NO: 5058 - DNA, 42 bp, Artificial Sequence
  Synthetic
aggacgtctccaagctctccgacgacaggaaggcaaacagaa

SEQ ID NO: 5059 - DNA, 36 bp, Artificial Sequence
  Synthetic
gcgacgtccggcgacatagtcgtgcaggtccccaac

SEQ ID NO: 5060 - DNA, 39 bp, Artificial Sequence
  Synthetic
cgctatcgtcggctgcggttggaaaagaagacaaccggc

SEQ ID NO: 5061 - DNA, 36 bp, Artificial Sequence
  Synthetic
caggtcgaggatcgcgtcgcagacgctgcagcaggg

SEQ ID NO: 5062 - DNA, 38 bp, Artificial Sequence
  Synthetic
gggggcggagtcgttcaacctgccggggtaaaatccac

SEQ ID NO: 5063 - DNA, 39 bp, Artificial Sequence
  Synthetic
tgcgttatcacctcctcgctcgatacaacggctcggccc

SEQ ID NO: 5064 - DNA, 35 bp, Artificial Sequence
  Synthetic
cggctccctgacgatgcgtcggtccaacagcaccg

SEQ ID NO: 5065 - DNA, 38 bp, Artificial Sequence
  Synthetic
ttttcgagaagaaggcgtcgcgtccgtcagggtctcgc

SEQ ID NO: 5066 - DNA, 38 bp, Artificial Sequence
  Synthetic
cgcctatgcgcgtccctgtggcaggcggttgttatcgc

SEQ ID NO: 5067 - DNA, 39 bp, Artificial Sequence
  Synthetic
acgacgatgcatgttcggcgcaaaagataggtcgccggg

SEQ ID NO: 5068 - DNA, 37 bp, Artificial Sequence
  Synthetic
gttcgaggcggatccggtcagcccacgatgacgccaa

SEQ ID NO: 5069 - DNA, 34 bp, Artificial Sequence
  Synthetic
tggcaggccgaaaacgccataactccgcgcggcc

SEQ ID NO: 5070 - DNA, 36 bp, Artificial Sequence
  Synthetic
cggtcgtagtccaacgtgcctagtggtcggcgtggg

SEQ ID NO: 5071 - DNA, 34 bp, Artificial Sequence
  Synthetic
gcatgccccgcaaaacgccccaccacaacacggc

SEQ ID NO: 5072 - DNA, 36 bp, Artificial Sequence
  Synthetic
atgcagaaggggtgcaggcaacggacgagatcgccc

SEQ ID NO: 5073 - DNA, 37 bp, Artificial Sequence
  Synthetic
ggggcggggtttgttgtgagaacgcagctgtcttcgc

SEQ ID NO: 5074 - DNA, 36 bp, Artificial Sequence
  Synthetic
ctccccagagcctgctggttgggtcgtgccatccga

SEQ ID NO: 5075 - DNA, 39 bp, Artificial Sequence
  Synthetic
tttcgcgggaagaaccttccggaacacgcttcaccccgg

SEQ ID NO: 5076 - DNA, 39 bp, Artificial Sequence
  Synthetic
ccatcggaggccccccagattgtacgtgtgctttcgggc

SEQ ID NO: 5077 - DNA, 37 bp, Artificial Sequence
  Synthetic
gggtggcgctctctgccaatcgcaggagccgtagtcc

SEQ ID NO: 5078 - DNA, 40 bp, Artificial Sequence
  Synthetic
cgatcctgccgctcgttcgacgagtcgaaatcccacacag

SEQ ID NO: 5079 - DNA, 39 bp, Artificial Sequence
  Synthetic
acgaagtgtcttgtgcagccaaaggtcgctgaggctctg

SEQ ID NO: 5080 - DNA, 45 bp, Artificial Sequence
  Synthetic
aatcgtgcgtaaattgctataccccaatttcttgcaggtcaacac

SEQ ID NO: 5081 - DNA, 41 bp, Artificial Sequence
  Synthetic
caggcactcctggtcaacagtcgccattctgctcgacacag

SEQ ID NO: 5082 - DNA, 43 bp, Artificial Sequence
  Synthetic
tttgctgcgacaacaatgccgaacagtataatgccatcattgt

SEQ ID NO: 5083 - DNA, 41 bp, Artificial Sequence
  Synthetic
gtggtgtctaatcagcagacagacagatcgttgtccagtgc

SEQ ID NO: 5084 - DNA, 41 bp, Artificial Sequence
  Synthetic
tggaccatggggaagctgattgatacctcagaaaatgcaca

SEQ ID NO: 5085 - DNA, 39 bp, Artificial Sequence
  Synthetic
gggcacggtgctgtctaatagatgttttggtccgcgtac

SEQ ID NO: 5086 - DNA, 44 bp, Artificial Sequence
  Synthetic
tgaatggtataaagctagaggtggcacagactcgtggtcaatgt

SEQ ID NO: 5087 - DNA, 38 bp, Artificial Sequence
  Synthetic
aaggtactacgaccgcaggggtttaggggctggggcga

SEQ ID NO: 5088 - DNA, 39 bp, Artificial Sequence
  Synthetic
aagggttaaacgcgctaatccaacatcgggtggacaatc

SEQ ID NO: 5089 - DNA, 38 bp, Artificial Sequence
  Synthetic
ggtccccgggatattttgccaaacacggggtgccatgg

SEQ ID NO: 5090 - DNA, 40 bp, Artificial Sequence
  Synthetic
ggcgaggaggagactgccttatcgctcctgtataggcaca

SEQ ID NO: 5091 - DNA, 40 bp, Artificial Sequence
  Synthetic
gttagtcgcctggggcaacgagcctacctgaacaccagag

SEQ ID NO: 5092 - DNA, 49 bp, Artificial Sequence
  Synthetic
ttgagcaagacataggactaaccggcagttaataaatctatttcctgca

SEQ ID NO: 5093 - DNA, 39 bp, Artificial Sequence
  Synthetic
cactgaccgtttgcttactgtgaccacctctttgccatc

SEQ ID NO: 5094 - DNA, 39 bp, Artificial Sequence
  Synthetic
actgaccaaggttcagactcaagcagctgtgtttgctta

SEQ ID NO: 5095 - DNA, 43 bp, Artificial Sequence
  Synthetic
cataggcctgggaaacttgaatcacaatatctaatggggcatc

SEQ ID NO: 5096 - DNA, 41 bp, Artificial Sequence
  Synthetic
gaggagtttcagcttgcctttaaattctcaggggtaaggtc

SEQ ID NO: 5097 - DNA, 45 bp, Artificial Sequence
  Synthetic
tgatctacgggatcgtatgacagagaaacaaaaacttcctgccaa

SEQ ID NO: 5098 - DNA, 41 bp, Artificial Sequence
  Synthetic
actgaaacggtgtgtactgccacgcctaaatccttgcgctt

SEQ ID NO: 5099 - DNA, 43 bp, Artificial Sequence
  Synthetic
agaatgcacctgttttaattgtggtaaaggccccaatacctcc

SEQ ID NO: 5100 - DNA, 46 bp, Artificial Sequence
  Synthetic
tcgaaaaaacatcaaaagacgcttgatttgtagcttcatcttcctc

SEQ ID NO: 5101 - DNA, 50 bp, Artificial Sequence
  Synthetic
ttgctttctcaaattgaacattggacttttctagcatagtataaagtcac

SEQ ID NO: 5102 - DNA, 45 bp, Artificial Sequence
  Synthetic
acttgggaaatttgggtattggtacgcagcaggtgtaataggttt

SEQ ID NO: 5103 - DNA, 42 bp, Artificial Sequence
  Synthetic
tacacaaatcccgcctttgatccaaaatctggatctggtgca

SEQ ID NO: 5104 - DNA, 46 bp, Artificial Sequence
  Synthetic
agaactacagcctttagggtcttactttctgcaagattatccacta

SEQ ID NO: 5105 - DNA, 48 bp, Artificial Sequence
  Synthetic
tgttggacatccatactttgaagtgctaactttaggaacttctacagc

SEQ ID NO: 5106 - DNA, 44 bp, Artificial Sequence
  Synthetic
aatccaaatcagtatcctccagaggatcatgtgctacgtccatg

SEQ ID NO: 5107 - DNA, 41 bp, Artificial Sequence
  Synthetic
ggtcttagcctggtttggagaagctcaaactcaaaccgtgc

SEQ ID NO: 5108 - DNA, 43 bp, Artificial Sequence
  Synthetic
ctggaaaggtttgtgtagacagttgatatcacgcaaagtaggt

SEQ ID NO: 5109 - DNA, 38 bp, Artificial Sequence
  Synthetic
tgctgtttgcagaacttggtgatctgccatggcgatag

SEQ ID NO: 5110 - DNA, 40 bp, Artificial Sequence
  Synthetic
agctgattgatgatgccgatggtcttctgtaacctgctgg

SEQ ID NO: 5111 - DNA, 43 bp, Artificial Sequence
  Synthetic
agaaacatctgtggtggaaaagcactacaccgtaacagttcaa

SEQ ID NO: 5112 - DNA, 44 bp, Artificial Sequence
  Synthetic
acaatgggcatttgacaatgacacatctgcagctaaagcataat

SEQ ID NO: 5113 - DNA, 41 bp, Artificial Sequence
  Synthetic
agacttgagaaaagaggatggcgtcgaaacgctctgtcaga

SEQ ID NO: 5114 - DNA, 40 bp, Artificial Sequence
  Synthetic
cgcagagcctcagccctagagaggtttccgaagacgagga

SEQ ID NO: 5115 - DNA, 42 bp, Artificial Sequence
  Synthetic
cgcgacttcaacgacttcaagcagtttgcaggaccttgaaca

SEQ ID NO: 5116 - DNA, 39 bp, Artificial Sequence
  Synthetic
aaacgggacactgctgaaaatatcaggagggcatgtacc

SEQ ID NO: 5117 - DNA, 43 bp, Artificial Sequence
  Synthetic
gtggtacaacccactgttaaacctgtctagagggacaccaaat

SEQ ID NO: 5118 - DNA, 44 bp, Artificial Sequence
  Synthetic
aactctaggggctacaggaggaaggtgtaatttctaataaggct

SEQ ID NO: 5119 - DNA, 44 bp, Artificial Sequence
  Synthetic
tctttgcaaagaactagcacaccccataaagttctctgggtctt

SEQ ID NO: 5120 - DNA, 38 bp, Artificial Sequence
  Synthetic
tgctccagatcccgcctttacgtatatttccgctgggc

SEQ ID NO: 5121 - DNA, 45 bp, Artificial Sequence
  Synthetic
ttgatgtttttggtgacttcagtgacttcacgaaacacatcatcc

SEQ ID NO: 5122 - DNA, 49 bp, Artificial Sequence
  Synthetic
aattaggtgacactgaaaatcctgccattctgcctattatcattaccag

SEQ ID NO: 5123 - DNA, 43 bp, Artificial Sequence
  Synthetic
ttggggctgcaaacttcaaaacggccatttgcaagtttgatta

SEQ ID NO: 5124 - DNA, 45 bp, Artificial Sequence
  Synthetic
tgctttaattctactgactcatgggagctgacaacatgtatgagg

SEQ ID NO: 5125 - DNA, 40 bp, Artificial Sequence
  Synthetic
agactgactcaaatctggcagcactcccggtacatgagtg

SEQ ID NO: 5126 - DNA, 43 bp, Artificial Sequence
  Synthetic
aaatggactacatcaaggaaggaaaaatttgctgctcattgcc

SEQ ID NO: 5127 - DNA, 45 bp, Artificial Sequence
  Synthetic
tactggagtgagcaagaagaattcttcctttctgctgaataaagc

SEQ ID NO: 5128 - DNA, 46 bp, Artificial Sequence
  Synthetic
ttcaggatgtaagctttcaacatccttgttatggccgttttctcat

SEQ ID NO: 5129 - DNA, 49 bp, Artificial Sequence
  Synthetic
gaagggtttagtgtttgtgaaaacgccacatcaattaaatcttgtcttg

SEQ ID NO: 5130 - DNA, 47 bp, Artificial Sequence
  Synthetic
aagaatctagctgatgtggtatgcttttcaggtaaatcaagcaatga

SEQ ID NO: 5131 - DNA, 42 bp, Artificial Sequence
  Synthetic
atctgatgaggagacccaggacgcaactggtatctatttgga

SEQ ID NO: 5132 - DNA, 43 bp, Artificial Sequence
  Synthetic
caaggcttcaagcagtttcaattctgtcatcgaataagcgtct

SEQ ID NO: 5133 - DNA, 47 bp, Artificial Sequence
  Synthetic
aatacgtttttttgggggaaaagtttttagtatcttgcaatggttgt

SEQ ID NO: 5134 - DNA, 47 bp, Artificial Sequence
  Synthetic
attgggagctggttagaaaagagcccaagtctattatagccactctt

SEQ ID NO: 5135 - DNA, 40 bp, Artificial Sequence
  Synthetic
agaagaagaacagccaccgacgatcccacctgcgaaggag

SEQ ID NO: 5136 - DNA, 40 bp, Artificial Sequence
  Synthetic
attgctgcgcatttttggtagtaatacctgttgtgccctc

SEQ ID NO: 5137 - DNA, 49 bp, Artificial Sequence
  Synthetic
agagagctcactacctacagaatccaatttcacctgtaatattagcatc

SEQ ID NO: 5138 - DNA, 43 bp, Artificial Sequence
  Synthetic
ctggtgatgtaagtcttgaatttgcaatctggatcaggagccg

SEQ ID NO: 5139 - DNA, 48 bp, Artificial Sequence
  Synthetic
ctaatttaggggagtttagtggggactactgtatgcccagataaaatt

SEQ ID NO: 5140 - DNA, 47 bp, Artificial Sequence
  Synthetic
ttggaactcagttacattttcatgctttcatagtagggatggtctac

SEQ ID NO: 5141 - DNA, 48 bp, Artificial Sequence
  Synthetic
aaggtattcaaattggtagaggtgggctttgttaaataaaggatgacc

SEQ ID NO: 5142 - DNA, 45 bp, Artificial Sequence
  Synthetic
taatgctgttattcaggacggaacagttcttaaaatttgctgccc

SEQ ID NO: 5143 - DNA, 43 bp, Artificial Sequence
  Synthetic
tatggctcgtgaaggtaaaatggagcatttgtaggtggcaata

SEQ ID NO: 5144 - DNA, 46 bp, Artificial Sequence
  Synthetic
ctactgaaaatcctgctccagaaatcttgcaaatcaactaaccaaa

SEQ ID NO: 5145 - DNA, 39 bp, Artificial Sequence
  Synthetic
tctctcgaacggaagcggtacgccaaaataccagagacg

SEQ ID NO: 5146 - DNA, 48 bp, Artificial Sequence
  Synthetic
gtgcagaaattgtaagtcatgaaggcaaattaacaggcaataccaaat

SEQ ID NO: 5147 - DNA, 41 bp, Artificial Sequence
  Synthetic
aacttctgcttcaattcgcacaagacagatcacaggcaatt

SEQ ID NO: 5148 - DNA, 43 bp, Artificial Sequence
  Synthetic
ggaaattccctggcactatacaacaagtccccaatagctctgt

SEQ ID NO: 5149 - DNA, 44 bp, Artificial Sequence
  Synthetic
cccataacactgcgttgttggccaaataaatctttgaatttgcc

SEQ ID NO: 5150 - DNA, 46 bp, Artificial Sequence
  Synthetic
tcaagaggaagctagggatccacacattaaatctattcctccaaca

SEQ ID NO: 5151 - DNA, 42 bp, Artificial Sequence
  Synthetic
gcaaaggtcctgaaataactgtgaaagggtatgacatcagcg

SEQ ID NO: 5152 - DNA, 46 bp, Artificial Sequence
  Synthetic
aagaattatcaatcaagggcaacgagtctggatttctggtttgaac

SEQ ID NO: 5153 - DNA, 48 bp, Artificial Sequence
  Synthetic
atagggttttcagatttcatttgccctggattataaactttgggatct

SEQ ID NO: 5154 - DNA, 45 bp, Artificial Sequence
  Synthetic
atggagcctaagcaaaatcaattgtcccaatgttctcctattgtg

SEQ ID NO: 5155 - DNA, 48 bp, Artificial Sequence
  Synthetic
tcagattggaatgttaaatgggagcgcagattttttagaaactgaagt

SEQ ID NO: 5156 - DNA, 43 bp, Artificial Sequence
  Synthetic
atttggccagtattaatacccacacaggttgtaaagcgtccag

SEQ ID NO: 5157 - DNA, 42 bp, Artificial Sequence
  Synthetic
aaaacgtcaacaaaagccaggtatcttcccatgttctaggtg

SEQ ID NO: 5158 - DNA, 43 bp, Artificial Sequence
  Synthetic
attcctaactttgatggaaacgtcttgtcaaagttgctccacg

SEQ ID NO: 5159 - DNA, 42 bp, Artificial Sequence
  Synthetic
attcgttatggctaccgatgaaataatagggatcgagctggg

SEQ ID NO: 5160 - DNA, 40 bp, Artificial Sequence
  Synthetic
ggcggccaacccagcttatgcatgcgagtcttcacaccat

SEQ ID NO: 5161 - DNA, 41 bp, Artificial Sequence
  Synthetic
cgaatgttgaagcatgtggttactatggtggaattgcccag

SEQ ID NO: 5162 - DNA, 48 bp, Artificial Sequence
  Synthetic
ttaccattcacttggtagaacaggtctatgaaatttggtagcattgca

SEQ ID NO: 5163 - DNA, 45 bp, Artificial Sequence
  Synthetic
tggacggaactcttctaggcgtcctcaaatttataaattggtgag

SEQ ID NO: 5164 - DNA, 42 bp, Artificial Sequence
  Synthetic
ccacaagggttacccactactgtctgtcatctgtagtgagaa

SEQ ID NO: 5165 - DNA, 45 bp, Artificial Sequence
  Synthetic
ttgggtgaaatagctcagtactacatcctgtgtacatgagtgaaa

SEQ ID NO: 5166 - DNA, 46 bp, Artificial Sequence
  Synthetic
cattccatggacatcaggtgtaccccagcactagtataagtatcag

SEQ ID NO: 5167 - DNA, 47 bp, Artificial Sequence
  Synthetic
gctggcttggataatcacaggagacttgaaaggttaattttccaatc

SEQ ID NO: 5168 - DNA, 40 bp, Artificial Sequence
  Synthetic
tgcttctaaccccagtgtgtaaaagggacactaaacctgg

SEQ ID NO: 5169 - DNA, 40 bp, Artificial Sequence
  Synthetic
tggattccaagagcacctagagtctggggtagttagtgcg

SEQ ID NO: 5170 - DNA, 43 bp, Artificial Sequence
  Synthetic
acaggaagttctatcccatcatttgagtacgagctaccctcaa

SEQ ID NO: 5171 - DNA, 45 bp, Artificial Sequence
  Synthetic
agacaattggatttcattgctgatgtgctctccctaaactggtaa

SEQ ID NO: 5172 - DNA, 47 bp, Artificial Sequence
  Synthetic
aatcccactcaagagaaaagagagcttgtgacatttgttctaaccac

SEQ ID NO: 5173 - DNA, 42 bp, Artificial Sequence
  Synthetic
cgcgcattggcagaacatttaatgttttggatcaggaggtaa

SEQ ID NO: 5174 - DNA, 40 bp, Artificial Sequence
  Synthetic
atcttgaacccagaagctctgatgtgctgtgcatgcaaat

SEQ ID NO: 5175 - DNA, 47 bp, Artificial Sequence
  Synthetic
atgcccaaccaggtgataatgtggatctactagtttgtatttgtctt

SEQ ID NO: 5176 - DNA, 42 bp, Artificial Sequence
  Synthetic
atacaccaacaaccaggatgatctttttcctgttgtgcacaa

SEQ ID NO: 5177 - DNA, 46 bp, Artificial Sequence
  Synthetic
agtgtgttttacaatgtgttccctggtctagggtcattgtcattga

SEQ ID NO: 5178 - DNA, 49 bp, Artificial Sequence
  Synthetic
aaatcgaaacaaacaaatttgcagcgaaatctgaatacatgaagcatac

SEQ ID NO: 5179 - DNA, 39 bp, Artificial Sequence
  Synthetic
cctgttctcagcggtccaaatgggtcctcaatgcttaat

SEQ ID NO: 5180 - DNA, 43 bp, Artificial Sequence
  Synthetic
aggaattatttcacatcagaggtgttgatgtacacccccttca

SEQ ID NO: 5181 - DNA, 49 bp, Artificial Sequence
  Synthetic
ccaagacttgaaccacacaaatggcttagaagcatatctcctatctcaa

SEQ ID NO: 5182 - DNA, 43 bp, Artificial Sequence
  Synthetic
aagacatgaccaaagagttctttgattcctccactcctttggg

SEQ ID NO: 5183 - DNA, 42 bp, Artificial Sequence
  Synthetic
tgcccttaggatgaagtggatgccattatccttttgtctgcc

SEQ ID NO: 5184 - DNA, 38 bp, Artificial Sequence
  Synthetic
ggccccgttcacttcagaaactaagatctgcatggccc

SEQ ID NO: 5185 - DNA, 41 bp, Artificial Sequence
  Synthetic
acatgttggagagagaactggtcgatatacacgctgcttgt

SEQ ID NO: 5186 - DNA, 41 bp, Artificial Sequence
  Synthetic
agtacacagattggcgggatgttcttctgttgggttttgtc

SEQ ID NO: 5187 - DNA, 41 bp, Artificial Sequence
  Synthetic
cgaagagcaacagccattctaacccactcactatcagttgg

SEQ ID NO: 5188 - DNA, 44 bp, Artificial Sequence
  Synthetic
gtttcaaaactggggaattgaacctgtcaggcaatattccgatc

SEQ ID NO: 5189 - DNA, 46 bp, Artificial Sequence
  Synthetic
attcatcgtccatgatgtgggaattgatatgtgttaactagcactg

SEQ ID NO: 5190 - DNA, 44 bp, Artificial Sequence
  Synthetic
ctcttctctaactgtgaatgtgaggacaggagaattgcctctca

SEQ ID NO: 5191 - DNA, 45 bp, Artificial Sequence
  Synthetic
agtgagagggtattggagaggcaattgttactctatcacctttca

SEQ ID NO: 5192 - DNA, 43 bp, Artificial Sequence
  Synthetic
gacgatgagaattttcaagaacaggactcctctgcacactgta

SEQ ID NO: 5193 - DNA, 43 bp, Artificial Sequence
  Synthetic
tttctgaacaggtagaagtgcaaaactattacatgcggcactt

SEQ ID NO: 5194 - DNA, 38 bp, Artificial Sequence
  Synthetic
gggccctccagatccaccgacgctctgcgtctgtgctt

SEQ ID NO: 5195 - DNA, 44 bp, Artificial Sequence
  Synthetic
ggaggctcgggatccgtataccaacactttaatgtattctgagg

SEQ ID NO: 5196 - DNA, 40 bp, Artificial Sequence
  Synthetic
ggatacacaccttttggaggcaaattgcaggccttactgg

SEQ ID NO: 5197 - DNA, 45 bp, Artificial Sequence
  Synthetic
tggtgaacatccttccgttacattgtacttgaacatctatctgag

SEQ ID NO: 5198 - DNA, 40 bp, Artificial Sequence
  Synthetic
aaacgcaaacactcctcctctgaagataaagccgtccagt

SEQ ID NO: 5199 - DNA, 49 bp, Artificial Sequence
  Synthetic
taaagcaatagaggttccaaaggtggcaaatttattaggatcaggtaac

SEQ ID NO: 5200 - DNA, 46 bp, Artificial Sequence
  Synthetic
ctgcagaggtagatgacagtagaataaaaagctgattttgtttggg

SEQ ID NO: 5201 - DNA, 38 bp, Artificial Sequence; identical to SEQ ID NO: 4464
  Synthetic

SEQ ID NO: 5202 - DNA, 36 bp, Artificial Sequence
  Synthetic
ggtgtgcgcgccacaagaaaagatgggcgcgccttg

SEQ ID NO: 5203 - DNA, 41 bp, Artificial Sequence
  Synthetic
ttcacgctgctggcatcctgttccacatgtttgcggaaccc

SEQ ID NO: 5204 - DNA, 40 bp, Artificial Sequence
  Synthetic
cggtcactggggtgtcctgaaccttcaaccaattgcctga

SEQ ID NO: 5205 - DNA, 41 bp, Artificial Sequence
  Synthetic
tggggccctataacccacaagtgcatagtgccagcagtagg

SEQ ID NO: 5206 - DNA, 39 bp, Artificial Sequence
  Synthetic
gcttcaccaagacctgcggaggggcacaggagctggtta

SEQ ID NO: 5207 - DNA, 42 bp, Artificial Sequence
  Synthetic
cctctacggagtctcctcgagcatgaggacgacatactccca

SEQ ID NO: 5208 - DNA, 37 bp, Artificial Sequence
  Synthetic
tggaccctcatcttcctgtgctaggtgcatgcgggca

SEQ ID NO: 5209 - DNA, 41 bp, Artificial Sequence
  Synthetic
gtggcgacatcttgaggggtctgtcccagcagcaccaagtc

SEQ ID NO: 5210 - DNA, 39 bp, Artificial Sequence
  Synthetic
aagggcccgtatgccagatgtaagtgacctagcccccag

SEQ ID NO: 5211 - DNA, 40 bp, Artificial Sequence
  Synthetic
ggccctggacttcatccctgtggcgaggagttgtcggtaa

SEQ ID NO: 5212 - DNA, 39 bp, Artificial Sequence
  Synthetic
cagacccaacgacggtgcttggcgtagcgagcaccgtga

SEQ ID NO: 5213 - DNA, 38 bp, Artificial Sequence
  Synthetic
gacggacgcccttatgaccgtctaccacctgcgtcacg

SEQ ID NO: 5214 - DNA, 40 bp, Artificial Sequence
  Synthetic
cacggggtgcgcatggtatgggagtgtttaggtaggcacg

SEQ ID NO: 5215 - DNA, 42 bp, Artificial Sequence
  Synthetic
ctgggggctgtccaaaatgagaacttccaggtctgcagacat

SEQ ID NO: 5216 - DNA, 42 bp, Artificial Sequence
  Synthetic
tgcagaagaactgaaacccgctccacatgtgtttcctccaga

SEQ ID NO: 5217 - DNA, 38 bp, Artificial Sequence
  Synthetic
tcgtcgtgagcggcttagcccggcaaggatgtcaacaa

SEQ ID NO: 5218 - DNA, 40 bp, Artificial Sequence
  Synthetic
gttacgcaggctacaccagtggtctcgcagccatgaggac

SEQ ID NO: 5219 - DNA, 40 bp, Artificial Sequence
  Synthetic
tgtgcagcaacacttggcatggcacactagggctggtagt

SEQ ID NO: 5220 - DNA, 41 bp, Artificial Sequence
  Synthetic
tgttgtggggtctcagctccccagtgagcattgacgtgact

SEQ ID NO: 5221 - DNA, 38 bp, Artificial Sequence
  Synthetic
gttccctcctgctctcccgatcgtatccgggcatttgc

SEQ ID NO: 5222 - DNA, 42 bp, Artificial Sequence
  Synthetic
catctcctgacccgacaacagcggggcattgagctaaaggat

SEQ ID NO: 5223 - DNA, 40 bp, Artificial Sequence
  Synthetic
tgcgagaagatggcactctacgtgcagatcccatcacggt

SEQ ID NO: 5224 - DNA, 41 bp, Artificial Sequence
  Synthetic
gtggggtgctcactaccagtttgatgttggctgccctacac

SEQ ID NO: 5225 - DNA, 40 bp, Artificial Sequence
  Synthetic
gcgagctgcttgggagacagtgatgatgttgcccaaccac

SEQ ID NO: 5226 - DNA, 40 bp, Artificial Sequence
  Synthetic
ggcgccacccttaagagcttaccttgggcaatgagtttgg

SEQ ID NO: 5227 - DNA, 45 bp, Artificial Sequence
  Synthetic
gtaaggaagtgggccttaatggctttttcaattgctatgccattt

SEQ ID NO: 5228 - DNA, 45 bp, Artificial Sequence
  Synthetic
aagccgctcaagaattgttcaatttgctctgtttagttcatttcc

SEQ ID NO: 5229 - DNA, 44 bp, Artificial Sequence
  Synthetic
aattggagttcttatagctgacgcctcctcttttgccttctctc

SEQ ID NO: 5230 - DNA, 43 bp, Artificial Sequence
  Synthetic
aaagcctcagataaccaacaagatgagagtaagtctggcagcc

SEQ ID NO: 5231 - DNA, 44 bp, Artificial Sequence
  Synthetic
ccaccctcttaagttgagaaacaggagaaagcactgttgaaact

SEQ ID NO: 5232 - DNA, 43 bp, Artificial Sequence
  Synthetic
tatcagcagattggaagaagaaggtcatcttcttggcttgtcc

SEQ ID NO: 5233 - DNA, 49 bp, Artificial Sequence
  Synthetic
tttggagagaaggaagatgttatgcgctgttgaaattcaaataaagcag

SEQ ID NO: 5234 - DNA, 43 bp, Artificial Sequence
  Synthetic
agagttacttctgatccacgaaggaagatcgtctcctggaaca

SEQ ID NO: 5235 - DNA, 40 bp, Artificial Sequence
  Synthetic
ccatagcggttcagaaaatggccagttgctcgccaattag

SEQ ID NO: 5236 - DNA, 41 bp, Artificial Sequence
  Synthetic
ccagattgggttgctagacaaaaatcaaattggtctgcagc

SEQ ID NO: 5237 - DNA, 44 bp, Artificial Sequence
  Synthetic
agggtagtatgctttaaattcccaaaacatatacacaggctccc

SEQ ID NO: 5238 - DNA, 48 bp, Artificial Sequence
  Synthetic
aacaagcaatttccataagtctgacatgtttcttttccaaatggtgat

SEQ ID NO: 5239 - DNA, 45 bp, Artificial Sequence
  Synthetic
aaaacctacactatctcccctcccgtggttctagagtaagagctg

SEQ ID NO: 5240 - DNA, 42 bp, Artificial Sequence
  Synthetic
aaaacgcattccagcagtaaacaccccaacccatttaaacac

SEQ ID NO: 5241 - DNA, 43 bp, Artificial Sequence
  Synthetic
taggcctactgttcctgtagagcattatagctgatgcctctgg

SEQ ID NO: 5242 - DNA, 43 bp, Artificial Sequence
  Synthetic
ttttacaacaaccaaccagaaacgttcaaattgaacagcccga

SEQ ID NO: 5243 - DNA, 49 bp, Artificial Sequence
  Synthetic
tggttttacgtactggtagtagacattcctaattcaggtggtaaactag

SEQ ID NO: 5244 - DNA, 49 bp, Artificial Sequence
  Synthetic
agtttcaggcaatcagtttagagtgatctattaaagcaaacttgttagg

SEQ ID NO: 5245 - DNA, 44 bp, Artificial Sequence
  Synthetic
atatgccagacatttttggacacggagcatgtggttcaggtatg

SEQ ID NO: 5246 - DNA, 42 bp, Artificial Sequence
  Synthetic
atcaatgctatgaatccaggcattgtcctcaataccggatgg

SEQ ID NO: 5247 - DNA, 41 bp, Artificial Sequence
  Synthetic
cacttgtccatttgtgtcattcgtgtttgttttgacagccg

SEQ ID NO: 5248 - DNA, 40 bp, Artificial Sequence
  Synthetic
tccatggggccaaagaaatagctatgaggcccatgcaact

SEQ ID NO: 5249 - DNA, 43 bp, Artificial Sequence
  Synthetic
ctatcgactcttcaaacacggcatagactcaggtactccttcc

SEQ ID NO: 5250 - DNA, 46 bp, Artificial Sequence
  Synthetic
cgagaacgaaaatgacagtgatacactgtttctgcctgtgttaaat

SEQ ID NO: 5251 - DNA, 38 bp, Artificial Sequence
  Synthetic
tacaggtagaagggcgccatccccacttccaccactat

SEQ ID NO: 5252 - DNA, 49 bp, Artificial Sequence
  Synthetic
acagacctacgtgaccatatagacttgtaataaatagcacattctaggc

SEQ ID NO: 5253 - DNA, 46 bp, Artificial Sequence
  Synthetic
tggagacatatgcaatacaatgcagttactgatgcttcttcacaaa

SEQ ID NO: 5254 - DNA, 39 bp, Artificial Sequence
  Synthetic
aatcccactttcactgacccaaatgccctccagtttctg

SEQ ID NO: 5255 - DNA, 41 bp, Artificial Sequence
  Synthetic
acggatgaatatgttgcacgcgcaagtagtctggatgttcc

SEQ ID NO: 5256 - DNA, 45 bp, Artificial Sequence
  Synthetic
gtgttgaggtaggtcgtggtccaatttatttaataaaggatggcc

SEQ ID NO: 5257 - DNA, 44 bp, Artificial Sequence
  Synthetic
tatggttgatactggctttggtgaacttcacttttgttagcctg

SEQ ID NO: 5258 - DNA, 44 bp, Artificial Sequence
  Synthetic
tttcctacacctagtggttctatggtgtgctcgttgtaaccaat

SEQ ID NO: 5259 - DNA, 47 bp, Artificial Sequence
  Synthetic
taggacgcaaatttttactacaagctgtagcttttcgttttcctaat

SEQ ID NO: 5260 - DNA, 42 bp, Artificial Sequence
  Synthetic
atgcgtgccaaatccctgtttaaaaaacaatggaatggttgg

SEQ ID NO: 5261 - DNA, 41 bp, Artificial Sequence
  Synthetic
agaatgtgtgtactgcaagcaatcccgaaaagcaaagtcat

SEQ ID NO: 5262 - DNA, 44 bp, Artificial Sequence
  Synthetic
ttccataatataaggggtcggtggcgtgttcttgatgatctgca

SEQ ID NO: 5263 - DNA, 43 bp, Artificial Sequence
  Synthetic
cggacagagcccattacaatattgtttgtacgcacaaccgaag

SEQ ID NO: 5264 - DNA, 42 bp, Artificial Sequence
  Synthetic
atatgcacacacttagaagtctgcagttgattcgcctcgttc

SEQ ID NO: 5265 - DNA, 50 bp, Artificial Sequence
  Synthetic
aggaaaaccgtttcattgaaattggctttctctaggtaatatatgtggac

SEQ ID NO: 5266 - DNA, 41 bp, Artificial Sequence
  Synthetic
aacaagccaattaaagtgggcatcctcaaagtccaccttct

SEQ ID NO: 5267 - DNA, 45 bp, Artificial Sequence
  Synthetic
ttttacagcagaggtgtcccactgtatttatgtacactcccttca

SEQ ID NO: 5268 - DNA, 43 bp, Artificial Sequence
  Synthetic
gttggaaccacataaatgggaaaagcttggcctactgcagttc

SEQ ID NO: 5269 - DNA, 41 bp, Artificial Sequence; identical to SEQ ID NO: 4498
  Synthetic

SEQ ID NO: 5270 - DNA, 46 bp, Artificial Sequence
  Synthetic
acaaagactgaacaaaaggagctacgcatcctttgtcattgtgttc

SEQ ID NO: 5271 - DNA, 44 bp, Artificial Sequence
  Synthetic
aattggcaaatgttgtgaggaagaaattgtgaaggagagctctg

SEQ ID NO: 5272 - DNA, 43 bp, Artificial Sequence
  Synthetic
agtaccagcggaaatgctcgctctcttgttgatttgttgaagt

SEQ ID NO: 5273 - DNA, 40 bp, Artificial Sequence
  Synthetic
tgacttcgccctcatagtgaaacctatctactcctgcctg

SEQ ID NO: 5274 - DNA, 38 bp, Artificial Sequence
  Synthetic
cccaaatggcccttcagctacccctgtgacatcggtat

SEQ ID NO: 5275 - DNA, 44 bp, Artificial Sequence
  Synthetic
ggatgaagactaccaaggcaggatttccttatgactgacaaacg

SEQ ID NO: 5276 - DNA, 47 bp, Artificial Sequence
  Synthetic
agatggacctgacatctgtacattctcaataaatgggatacggagag

SEQ ID NO: 5277 - DNA, 48 bp, Artificial Sequence
  Synthetic
attggtttaaggtgtgttacatgcaagaaacaacagctaacttttctg

SEQ ID NO: 5278 - DNA, 43 bp, Artificial Sequence
  Synthetic
aggaggagtctgaatatccatatgcgccttaacagctgatcgc

SEQ ID NO: 5279 - DNA, 46 bp, Artificial Sequence
  Synthetic
cgggatgatgatgagagcgaattatctgatatgtcactttcagatc

SEQ ID NO: 5280 - DNA, 39 bp, Artificial Sequence
  Synthetic
tgcaatagcctcagtcccagttgcctttttttccctctg

SEQ ID NO: 5281 - DNA, 44 bp, Artificial Sequence
  Synthetic
cacagtaggtgtcagttttactgaaactacagcatgtcttgttg

SEQ ID NO: 5282 - DNA, 41 bp, Artificial Sequence
  Synthetic
aagtgaccaagaagacgaggagcttgtagccagtctaagcg

SEQ ID NO: 5283 - DNA, 47 bp, Artificial Sequence
  Synthetic
gactcacaatatggttctgaacagttggtgctaaaaagatttctctg

SEQ ID NO: 5284 - DNA, 38 bp, Artificial Sequence
  Synthetic
ccggctgttcgcaagcgatctgagggtggtatctctgg

SEQ ID NO: 5285 - DNA, 43 bp, Artificial Sequence
  Synthetic
agctgctccacaagatatttatcctttgtatatcaggggggca

SEQ ID NO: 5286 - DNA, 49 bp, Artificial Sequence
  Synthetic
tcctttattcaggatcacagctagtaatattatcagatgctgaagcttc

SEQ ID NO: 5287 - DNA, 43 bp, Artificial Sequence
  Synthetic
tagacgctattatgaacaagtgccgtaactaaggaagcaggcc

SEQ ID NO: 5288 - DNA, 43 bp, Artificial Sequence
  Synthetic
ttgagttacaaacactgggtgaagcgatgcagcaagagaactt

SEQ ID NO: 5289 - DNA, 38 bp, Artificial Sequence
  Synthetic
cagatggctgtttggcttccttggtgatcggttgggta

SEQ ID NO: 5290 - DNA, 44 bp, Artificial Sequence
  Synthetic
cctaaccgatttgcctttggagccaaactagtctctcagtttct

SEQ ID NO: 5291 - DNA, 46 bp, Artificial Sequence
  Synthetic
tgtgcaggaacacagtttcagcctcaataactgtgttaactaattc

SEQ ID NO: 5292 - DNA, 46 bp, Artificial Sequence
  Synthetic
tttcagaaaacgtagatcctccaatattcacatgtatattcaggcc

SEQ ID NO: 5293 - DNA, 39 bp, Artificial Sequence
  Synthetic
tggcatgcaattggtatgtggaacttcaaaattcgcgcg

SEQ ID NO: 5294 - DNA, 48 bp, Artificial Sequence
  Synthetic
tcggaagaatgattggtggaatcgcataatcactgagtttgagttcag

SEQ ID NO: 5295 - DNA, 44 bp, Artificial Sequence
  Synthetic
ggtgaaaatggacgaaggacaatgtttgaaattttcctttgagg

SEQ ID NO: 5296 - DNA, 42 bp, Artificial Sequence
  Synthetic
agggaagggtactcactggtcggaccacttggctgttttgga

SEQ ID NO: 5297 - DNA, 44 bp, Artificial Sequence
  Synthetic
ttgcttcaaatgagaatgtggaaaccccagtatctgcttctcag

SEQ ID NO: 5298 - DNA, 43 bp, Artificial Sequence
  Synthetic
acttggaatgcaggaccttttttccccatttgaatgcctgtca

SEQ ID NO: 5299 - DNA, 49 bp, Artificial Sequence
  Synthetic
ttgaggacacaagagtctgaatgtccatcagtcattatagtaaaacatg

SEQ ID NO: 5300 - DNA, 47 bp, Artificial Sequence
  Synthetic
gacaattggcatggttcgaaccgtatcctatttgataatccaggttt

SEQ ID NO: 5301 - DNA, 44 bp, Artificial Sequence
  Synthetic
aatggatggacagagactgatagtcaatcagtcattgccacaac

SEQ ID NO: 5302 - DNA, 41 bp, Artificial Sequence
  Synthetic
gtgtcttgaaacgatggaagttggtcataggtttggcgacc

SEQ ID NO: 5303 - DNA, 48 bp, Artificial Sequence
  Synthetic
aattggcaaatgtcgtgaggaagagtaattgtaaaagagagctctgta

SEQ ID NO: 5304 - DNA, 44 bp, Artificial Sequence
  Synthetic
atgttcgaaagtaagagcatgaagctcaagtcaatgcttgcaag

SEQ ID NO: 5305 - DNA, 43 bp, Artificial Sequence
  Synthetic
tccaatcctctgatgatttcgctcctgcttctattccctcatg

SEQ ID NO: 5306 - DNA, 41 bp, Artificial Sequence
  Synthetic
ggacaacgaccttggaccagcgtggcatcggtatgggtatc

SEQ ID NO: 5307 - DNA, 40 bp, Artificial Sequence
  Synthetic
caacacggcgaccctacaagtcttgcagtgaagtgttcag

SEQ ID NO: 5308 - DNA, 43 bp, Artificial Sequence
  Synthetic
ttggaaaaactaactaacactgggtttcaacggtttctggcac

SEQ ID NO: 5309 - DNA, 47 bp, Artificial Sequence
  Synthetic
aattccggttgaccttctatgtccatctatttcatcgttttcttcct

SEQ ID NO: 5310 - DNA, 38 bp, Artificial Sequence
  Synthetic
acgaaagtttgcaggaggcatctgtatccacctccagc

SEQ ID NO: 5311 - DNA, 46 bp, Artificial Sequence
  Synthetic
ggcagtacggaggctatagacctatattgctattgtcacttgtacc

SEQ ID NO: 5312 - DNA, 47 bp, Artificial Sequence
  Synthetic
agatgaagggggagattggagaggctcctaaaaatgttataaactct

SEQ ID NO: 5313 - DNA, 46 bp, Artificial Sequence
  Synthetic
ggcatacagacattaaaccaccagttcaatagctttatgtgcttta

SEQ ID NO: 5314 - DNA, 41 bp, Artificial Sequence
  Synthetic
gacaaaaccgctacctgtgtaacgtgttgtacccttccttt

SEQ ID NO: 5315 - DNA, 39 bp, Artificial Sequence
  Synthetic
gggcaccgcaaagacctacggagtccacagtgtccaggt

SEQ ID NO: 5316 - DNA, 43 bp, Artificial Sequence
  Synthetic
ttggacaggtgcaggcaatgtctttgtgtttcactatggtatg

SEQ ID NO: 5317 - DNA, 44 bp, Artificial Sequence
  Synthetic
attgtggtaataacgtcccctgcgcaatagtaacatgggcaata

SEQ ID NO: 5318 - DNA, 44 bp, Artificial Sequence
  Synthetic
tatccgtctacataggcctgcctaatctactaaagcgaacagtc

SEQ ID NO: 5319 - DNA, 41 bp, Artificial Sequence
  Synthetic
gcctgtaccatcgcgttctacagaagatatagtgggcgaat

SEQ ID NO: 5320 - DNA, 39 bp, Artificial Sequence
  Synthetic
attggggaacactgggctaataagttctaaaggggggca

SEQ ID NO: 5321 - DNA, 40 bp, Artificial Sequence
  Synthetic
ggtactatgggtgacactgtgccaggtgaagcaggcatac

SEQ ID NO: 5322 - DNA, 44 bp, Artificial Sequence
  Synthetic
ctgtacctgggcaatatgatgcatcatattcctcaacatgtctg

SEQ ID NO: 5323 - DNA, 43 bp, Artificial Sequence
  Synthetic
tcctacaatcctccattttgctgaaaccacagacataagccaa

SEQ ID NO: 5324 - DNA, 40 bp, Artificial Sequence
  Synthetic
gagaccctccttacagccatgactgatgtgtcctgttgac

SEQ ID NO: 5325 - DNA, 40 bp, Artificial Sequence
  Synthetic
tgaaacgatggaggttgttcagagtcataggtctgtcggc

SEQ ID NO: 5326 - DNA, 43 bp, Artificial Sequence
  Synthetic
gaaagcaaagttggcaaatgttgtaagaaagttcggtgtcctg

SEQ ID NO: 5327 - DNA, 43 bp, Artificial Sequence
  Synthetic
tcttcaatcctctgacgattttgccggcttgaatcccttcatg

SEQ ID NO: 5328 - DNA, 43 bp, Artificial Sequence
  Synthetic
cggacatgagtattggagttactgtgctggaccaagatcattg

SEQ ID NO: 5329 - DNA, 41 bp, Artificial Sequence
  Synthetic
acagaagaccagtcgggatatccgcatcaattcgggctctg

SEQ ID NO: 5330 - DNA, 39 bp, Artificial Sequence
  Synthetic
ggtggtaaatcccagcacaggttccagggaagcggtcac

SEQ ID NO: 5331 - DNA, 38 bp, Artificial Sequence
  Synthetic
gagttcctctagggatggccgatgccgcctgtagcacg

SEQ ID NO: 5332 - DNA, 38 bp, Artificial Sequence
  Synthetic
ccggtggcctcagctgcttcgagggagaatggttcacc

SEQ ID NO: 5333 - DNA, 41 bp, Artificial Sequence
  Synthetic
agggtggcatcttcgacaactgtgatgtccagcctaggagg

SEQ ID NO: 5334 - DNA, 37 bp, Artificial Sequence
  Synthetic
cagtggggctccgcgtactctcctgggcagctcatca

SEQ ID NO: 5335 - DNA, 41 bp, Artificial Sequence
  Synthetic
taggaggttattggcacgccctcactgggattccgggaatc

SEQ ID NO: 5336 - DNA, 40 bp, Artificial Sequence
  Synthetic
tcttcagtggtcagcgtcggtaccaacatggcaagaacca

SEQ ID NO: 5337 - DNA, 37 bp, Artificial Sequence
  Synthetic
tgcttcgctggttccgacttgtggcgccagaaagggc

SEQ ID NO: 5338 - DNA, 38 bp, Artificial Sequence
  Synthetic
cgtgctggtggcgatgcactgccaacactagcatgact

SEQ ID NO: 5339 - DNA, 40 bp, Artificial Sequence
  Synthetic
gccggcctttgtgcaaactgacacacttcagcagcaatgt

SEQ ID NO: 5340 - DNA, 42 bp, Artificial Sequence
  Synthetic
aggactgtgccatagttcgggagcacaccattcactctctga

SEQ ID NO: 5341 - DNA, 39 bp, Artificial Sequence
  Synthetic
ccattgccaatgggggctaccttctcacgacccaaacgc

SEQ ID NO: 5342 - DNA, 42 bp, Artificial Sequence
  Synthetic
ctccctagggaggctcagaccaacgatagccggttttacccg

SEQ ID NO: 5343 - DNA, 37 bp, Artificial Sequence
  Synthetic
gtgcccggttgctggcgaagggtcgcagtggcaaaca

SEQ ID NO: 5344 - DNA, 39 bp, Artificial Sequence
  Synthetic
ctgggtgtgtcggcagtgaccacatcaccggctggaatt

SEQ ID NO: 5345 - DNA, 38 bp, Artificial Sequence
  Synthetic
ggcaggtaccgtgcgctcttaccacgtgacaccagcct

SEQ ID NO: 5346 - DNA, 38 bp, Artificial Sequence
  Synthetic
ggaacatgtggccccccatcacccgccaagcaaggggt

SEQ ID NO: 5347 - DNA, 39 bp, Artificial Sequence
  Synthetic
tgtgaagccggtggcggaagcgtagctagcagccatggg

SEQ ID NO: 5348 - DNA, 36 bp, Artificial Sequence
  Synthetic
cggcctctttcctgctgggaaggagcagagcagccg

SEQ ID NO: 5349 - DNA, 39 bp, Artificial Sequence
  Synthetic
gcgctcggcgttctactctggagacggttgacccagtcg

SEQ ID NO: 5350 - DNA, 40 bp, Artificial Sequence
  Synthetic
gatggggtgcagcaaaggatggatccacaagtacagcgcg

SEQ ID NO: 5351 - DNA, 39 bp, Artificial Sequence
  Synthetic
cgtctagcgcctacgacctgaggcaaatcaccggcgaag

SEQ ID NO: 5352 - DNA, 39 bp, Artificial Sequence
  Synthetic
ctgctgtgtccctactgccctctcggcaagaacagtcgt

SEQ ID NO: 5353 - DNA, 41 bp, Artificial Sequence
  Synthetic
agctggtgtgcaggagagaagaccctcccacaacctaaggg

SEQ ID NO: 5354 - DNA, 40 bp, Artificial Sequence
  Synthetic
tcgacgaacatgacatgcaggtcaaagcatgcacccggac

SEQ ID NO: 5355 - DNA, 41 bp, Artificial Sequence
  Synthetic
cttggctgaatgtgttgctgggggcttccgcatatccgtac

SEQ ID NO: 5356 - DNA, 40 bp, Artificial Sequence
  Synthetic
gagttggtgatgtgccaggtccgcgaggcaagagcttcag

SEQ ID NO: 5357 - DNA, 42 bp, Artificial Sequence
  Synthetic
atttggaagcttgtgaattcgactagcacgcaaacacacaat

SEQ ID NO: 5358 - DNA, 47 bp, Artificial Sequence
  Synthetic
aggcagtgtaagcatttttatcatgagctccagaataatatcttgca

SEQ ID NO: 5359 - DNA, 43 bp, Artificial Sequence
  Synthetic
ggcaattccctggaactatttcaagtttttgcaattgctcctc

SEQ ID NO: 5360 - DNA, 42 bp, Artificial Sequence
  Synthetic
tgcgttctagcaacaaaaaagcaacctactccaaacgactct

SEQ ID NO: 5361 - DNA, 40 bp, Artificial Sequence
  Synthetic
gtgggataggtgcaatgtcatttatgaactgtcccgcgat

SEQ ID NO: 5362 - DNA, 39 bp, Artificial Sequence
  Synthetic
caaggcttgctcccgaagaccaaatttggcctggttgtt

SEQ ID NO: 5363 - DNA, 48 bp, Artificial Sequence
  Synthetic
ctaaaagtcagttttggctgcaactgttacatcatccaatagagctat

SEQ ID NO: 5364 - DNA, 42 bp, Artificial Sequence
  Synthetic
tttggacacaattagacctgagtgattgaaacgctcgctgag

SEQ ID NO: 5365 - DNA, 40 bp, Artificial Sequence
  Synthetic
ccccaccacctccacaaccgtcggtttgttgtggctgttt

SEQ ID NO: 5366 - DNA, 37 bp, Artificial Sequence
  Synthetic
gtggaaggtcacccaggcggtgtggtgcaggaggagg

SEQ ID NO: 5367 - DNA, 38 bp, Artificial Sequence
  Synthetic
gcgaccccccagtaatcatttttagctctgttgcggac

SEQ ID NO: 5368 - DNA, 47 bp, Artificial Sequence
  Synthetic
atgctgcttttgctactaacatactcgccatagcaaatacaaaatgt

SEQ ID NO: 5369 - DNA, 41 bp, Artificial Sequence
  Synthetic
ccactagcacaggttccagtgctgacccgtgttggaggaat

SEQ ID NO: 5370 - DNA, 43 bp, Artificial Sequence
  Synthetic
tccagacagagattttcttgatgttcatatcccgctggtgttg

SEQ ID NO: 5371 - DNA, 43 bp, Artificial Sequence
  Synthetic
agtcattatacaccctcatgacagtttttacgtttgcgcctgt

SEQ ID NO: 5372 - DNA, 45 bp, Artificial Sequence
  Synthetic
ccaaatgtttattgtaggatgcacatcattttctgcacatggaac

SEQ ID NO: 5373 - DNA, 46 bp, Artificial Sequence
  Synthetic
atccagtgatgctcaattgtttaacccattattatgaccttgggct

SEQ ID NO: 5374 - DNA, 48 bp, Artificial Sequence
  Synthetic
caaacgtaaaaattgaggtctgaccttccttgaatactgtgtaaaagt

SEQ ID NO: 5375 - DNA, 43 bp, Artificial Sequence
  Synthetic
tcgaacaatcaagcagtgccactatctctgttatgttcctttc

SEQ ID NO: 5376 - DNA, 42 bp, Artificial Sequence
  Synthetic
atcgtgcggtcttggtaaatgtttgttgttcaaagtggttcc

SEQ ID NO: 5377 - DNA, 45 bp, Artificial Sequence
  Synthetic
atgcgactgctagcatcatttatgatgagttctgaggatgttctt

SEQ ID NO: 5378 - DNA, 48 bp, Artificial Sequence
  Synthetic
ccagaagttagatgtgtttgcagaacatttatatatagcacgggtcta

SEQ ID NO: 5379 - DNA, 47 bp, Artificial Sequence
  Synthetic
ctggttatgagactttcagggtcgtgacttgcctatttatttgtgac

SEQ ID NO: 5380 - DNA, 39 bp, Artificial Sequence
  Synthetic
aagaactgactcccggaaccagttcgtttgttgcttggc

SEQ ID NO: 5381 - DNA, 48 bp, Artificial Sequence
  Synthetic
ctaattcaaaatgcacaagctgtggttcagttttcttgtcatcagttg

SEQ ID NO: 5382 - DNA, 45 bp, Artificial Sequence
  Synthetic
tgagattccaattaagcagaccatctcataatcctctgctgtgtc

SEQ ID NO: 5383 - DNA, 44 bp, Artificial Sequence
  Synthetic
tctctcctatcattgttggcaacttatagtaaccggtgctggtt

SEQ ID NO: 5384 - DNA, 49 bp, Artificial Sequence
  Synthetic
actttgtcgatttgaaaatgagaggtggtagaactaagctttctaattc

SEQ ID NO: 5385 - DNA, 45 bp, Artificial Sequence
  Synthetic
ccctccgtgctcgaagatttgttaagtcagtacctttattactgt

SEQ ID NO: 5386 - DNA, 42 bp, Artificial Sequence
  Synthetic
tgaaacggaggatcataactctgcgctgaggagaggtggtaa

SEQ ID NO: 5387 - DNA, 40 bp, Artificial Sequence
  Synthetic
agcattgcctacagatatgccaatgcttcagaaacgcagc

SEQ ID NO: 5388 - DNA, 43 bp, Artificial Sequence
  Synthetic
cgaggcgcattagatggtaatgttcaattgagtaggtgctcta

SEQ ID NO: 5389 - DNA, 47 bp, Artificial Sequence
  Synthetic
agatgaatcaggccgatttgacctcataaagattcattaggttttcc

SEQ ID NO: 5390 - DNA, 39 bp, Artificial Sequence
  Synthetic
aaaaggcgaagagggaggagccgtcgtcgtcgtcgtaac

SEQ ID NO: 5391 - DNA, 45 bp, Artificial Sequence
  Synthetic
tctccagaaaatggggttgcaatttaatagtgtcatgtgcaaaca

SEQ ID NO: 5392 - DNA, 46 bp, Artificial Sequence
  Synthetic
cccctattgaacgtctacaatcctaacttgctgtacaaaacgtcta

SEQ ID NO: 5393 - DNA, 43 bp, Artificial Sequence
  Synthetic
tttcagatgtcttggacaaagtcagcacctttgcaacaggctt

SEQ ID NO: 5394 - DNA, 46 bp, Artificial Sequence
  Synthetic
aatttgctatcacagatgcatgtgtactagtctccatactaatcgc

SEQ ID NO: 5395 - DNA, 41 bp, Artificial Sequence
  Synthetic
agacaggatatggcatttgaccctactgtcctgttggtggt

SEQ ID NO: 5396 - DNA, 46 bp, Artificial Sequence
  Synthetic
aaatgggcaaggatatttatggtgatcttgcataaagctgttcctt

SEQ ID NO: 5397 - DNA, 48 bp, Artificial Sequence
  Synthetic
atggtgttttatggggtaatgactgctgaagttaatatttcgcgtatt

SEQ ID NO: 5398 - DNA, 41 bp, Artificial Sequence
  Synthetic
aacatgccctcaaactttggtttttgtgctacgtttgcagt

SEQ ID NO: 5399 - DNA, 40 bp, Artificial Sequence
  Synthetic
ggagatcctccatacagccattgtgttctgttgactgtgt

SEQ ID NO: 5400 - DNA, 42 bp, Artificial Sequence
  Synthetic
gaactcatgccttgaaacaatggaggccttgggttagtttgt

SEQ ID NO: 5401 - DNA, 48 bp, Artificial Sequence
  Synthetic
aatggtcacacaaagaacaataggggctcttattagatagcctctctt

SEQ ID NO: 5402 - DNA, 43 bp, Artificial Sequence
  Synthetic
ccaaactggcaaatgttgtgagtgaaagaaagctcagtgtctt

SEQ ID NO: 5403 - DNA, 45 bp, Artificial Sequence
  Synthetic
tgaagctccgaacacaaatacccattgaaatacttcaggtcaatg

SEQ ID NO: 5404 - DNA, 43 bp, Artificial Sequence
  Synthetic
tccaatcctccgacgattttgcgaatctatccactcctgcttg

SEQ ID NO: 5405 - DNA, 42 bp, Artificial Sequence
  Synthetic
cccagatggctctccaattgttcctctatggcacctatatgt

SEQ ID NO: 5406 - DNA, 43 bp, Artificial Sequence
  Synthetic
tgaagtctgcttaaagtgggagccagggggttacaaagtcttc

SEQ ID NO: 5407 - DNA, 43 bp, Artificial Sequence
  Synthetic
ccctagtagttcatataggagaccgattctggcatcaatccgg

SEQ ID NO: 5408 - DNA, 46 bp, Artificial Sequence
  Synthetic
tggagcctcagagagctaaaaattacaagcactgtagctctaattc

SEQ ID NO: 5409 - DNA, 44 bp, Artificial Sequence
  Synthetic
aaggtcaccattcaagattgattctgacacaacacagtctaacg

SEQ ID NO: 5410 - DNA, 47 bp, Artificial Sequence
  Synthetic
aacaccagaaagacaatccaaaaggttttcagcttcatcttcaatcc

SEQ ID NO: 5411 - DNA, 38 bp, Artificial Sequence
  Synthetic
tcctcaaggagtgcgtttggtgtcgtacgatgtggaag

SEQ ID NO: 5412 - DNA, 46 bp, Artificial Sequence
  Synthetic
gcttttaaaaatcctgaacaaaggcaatgtcccatagagtacgtag

SEQ ID NO: 5413 - DNA, 38 bp, Artificial Sequence
  Synthetic
caggaagaggaactgggggttgagttggccttccagac

SEQ ID NO: 5414 - DNA, 46 bp, Artificial Sequence
  Synthetic
caacagatgttggtgctgttggctacttcaaattcttcgttagagg

SEQ ID NO: 5415 - DNA, 48 bp, Artificial Sequence
  Synthetic
tcaaacctttgacattttagagccaacaaacctattacctaattgggt

SEQ ID NO: 5416 - DNA, 45 bp, Artificial Sequence
  Synthetic
cgccattgcaggaatttgctgcttactcttattgtaccttctgag

SEQ ID NO: 5417 - DNA, 45 bp, Artificial Sequence
  Synthetic
agtgagcgtttactaattgtgggaactttgatatctccaccatct

SEQ ID NO: 5418 - DNA, 50 bp, Artificial Sequence
  Synthetic
gttggagacacagaaaatcctagctgtttgtttaggatctatagacaagt

SEQ ID NO: 5419 - DNA, 41 bp, Artificial Sequence
  Synthetic
aactacaacaggacagagcaggtcaggccataagctgattg

SEQ ID NO: 5420 - DNA, 43 bp, Artificial Sequence
  Synthetic
aggatttgtcacaagaggcggcaactgaaacaatacacaacaa

SEQ ID NO: 5421 - DNA, 44 bp, Artificial Sequence
  Synthetic
ggactaggaaatgaagctgaagatcccattgctatcagactcag

SEQ ID NO: 5422 - DNA, 40 bp, Artificial Sequence
  Synthetic
cgtcgacgcctagaagacgacgttgttctctccgttgggc

SEQ ID NO: 5423 - DNA, 41 bp, Artificial Sequence
  Synthetic
gcaaactaaaatacaggggcatgccttcagcaacccatgaa

SEQ ID NO: 5424 - DNA, 42 bp, Artificial Sequence
  Synthetic
aattggtgccaatagacgcccgcactactatttcaggaccaa

SEQ ID NO: 5425 - DNA, 39 bp, Artificial Sequence
  Synthetic
cctagacgggtagcgactagctgtagtggccacaaatgt

SEQ ID NO: 5426 - DNA, 44 bp, Artificial Sequence
  Synthetic
tgtacaatagaagagtcagacaggtaattgaactgaatcgcctg

SEQ ID NO: 5427 - DNA, 41 bp, Artificial Sequence
  Synthetic
tcgtccttaatactggctctcgacctttaatgctgctccac

SEQ ID NO: 5428 - DNA, 45 bp, Artificial Sequence
  Synthetic
tgcttctggtaaggtgtatcttccaatcatctgtactcagcactc

SEQ ID NO: 5429 - DNA, 46 bp, Artificial Sequence
  Synthetic
acttctaagtcttccaaacgcaaagcaagtagaacaaagttcacat

SEQ ID NO: 5430 - DNA, 41 bp, Artificial Sequence
  Synthetic
gactcacagccaacctctctgttgcaagaggattatgtctc

SEQ ID NO: 5431 - DNA, 46 bp, Artificial Sequence
  Synthetic
ttcaggatcttgcatcgtttgaaccataacaaaatggtcctttcca

SEQ ID NO: 5432 - DNA, 44 bp, Artificial Sequence
  Synthetic
atcagattttatgtaagtgccagcgctgagaaagaagcagttgc

SEQ ID NO: 5433 - DNA, 48 bp, Artificial Sequence
  Synthetic
cagtgcagaaaatgaagctgaagcattgttattttcagttccagtttc

SEQ ID NO: 5434 - DNA, 42 bp, Artificial Sequence
  Synthetic
gcataatgccagagtggataacaatgactcactagctgtagc

SEQ ID NO: 5435 - DNA, 46 bp, Artificial Sequence
  Synthetic
tgatgttacatatgcatgttggagtggattaccatctaaacccgtt

SEQ ID NO: 5436 - DNA, 48 bp, Artificial Sequence
  Synthetic
aaatgctgcaaaagacattgatacaacataataacatgctcttgtctt

SEQ ID NO: 5437 - DNA, 39 bp, Artificial Sequence
  Synthetic
ctctcccactgcctggaaacatagtttcggagttccagg

SEQ ID NO: 5438 - DNA, 48 bp, Artificial Sequence
  Synthetic
gacactgtcacactaccaaaaggaattaacccttttactggtattcat

SEQ ID NO: 5439 - DNA, 41 bp, Artificial Sequence
  Synthetic
ttttcctgatgtcaccgttgttggaccagaaacagtgacat

SEQ ID NO: 5440 - DNA, 43 bp, Artificial Sequence
  Synthetic
tacactttttaaatcagccttcccgtctgctcctcctcaaagg

SEQ ID NO: 5441 - DNA, 48 bp, Artificial Sequence
  Synthetic
cccacaaacaaatataattcctggcattgcaggttcaatattagaagt

SEQ ID NO: 5442 - DNA, 43 bp, Artificial Sequence
  Synthetic
aatccagaaactcaacggctagtgtagttccaataccaagcgg

SEQ ID NO: 5443 - DNA, 40 bp, Artificial Sequence
  Synthetic
ctatggaaaacgagagcagctgtctcccattgttcctgct

SEQ ID NO: 5444 - DNA, 41 bp, Artificial Sequence
  Synthetic
acaaccaacatccagtattgaggcagcttgttcaggacagg

SEQ ID NO: 5445 - DNA, 45 bp, Artificial Sequence
  Synthetic
tgtttgactcatggggtcagtcgatggacagtctaaaatctgttt

SEQ ID NO: 5446 - DNA, 42 bp, Artificial Sequence
  Synthetic
ttcaggtacgtctttattgttgcctaccactcccggtcattg

SEQ ID NO: 5447 - DNA, 38 bp, Artificial Sequence
  Synthetic
gcccatcctggacatggagacgcccgtctggtccacca

SEQ ID NO: 5448 - DNA, 42 bp, Artificial Sequence
  Synthetic
ctcaagttttcgcacccgtcgcgaggaaatgctggcaggttc

SEQ ID NO: 5449 - DNA, 36 bp, Artificial Sequence
  Synthetic
gattccattcggggtgccgctgtggcctcccgttcc

SEQ ID NO: 5450 - DNA, 38 bp, Artificial Sequence
  Synthetic
taaggccctgggagcgcgtgccataaacgccgactacg

SEQ ID NO: 5451 - DNA, 38 bp, Artificial Sequence
  Synthetic
gcctcttccagtaactcggccctttgcggacgagctgc

SEQ ID NO: 5452 - DNA, 37 bp, Artificial Sequence
  Synthetic
gcgagtagttggtgatgcggcgcccggcctgacgatt

SEQ ID NO: 5453 - DNA, 36 bp, Artificial Sequence
  Synthetic
gagcttggccatgtacgcgcaacctccccggctgga

SEQ ID NO: 5454 - DNA, 36 bp, Artificial Sequence
  Synthetic
gtcggcgagcccacacacaaccacaccccccagtac

SEQ ID NO: 5455 - DNA, 35 bp, Artificial Sequence
  Synthetic
agaactgcccccgaagccacgagccacgccagaac

SEQ ID NO: 5456 - DNA, 36 bp, Artificial Sequence
  Synthetic
gttcgtcctgccccactggacagggccgagagaacg

SEQ ID NO: 5457 - DNA, 35 bp, Artificial Sequence
  Synthetic
gtggtccgtctcgctaacggagccgtcaagcgcgt

SEQ ID NO: 5458 - DNA, 37 bp, Artificial Sequence
  Synthetic
ccgaaggtcctcccagatccctgcagcaccatggccg

SEQ ID NO: 5459 - DNA, 40 bp, Artificial Sequence
  Synthetic
gcagaaccgggccacgatctggggcgataacatctgcatt

SEQ ID NO: 5460 - DNA, 35 bp, Artificial Sequence
  Synthetic
attggcgcgcggaccacaaccttccccaacgcgag

SEQ ID NO: 5461 - DNA, 39 bp, Artificial Sequence
  Synthetic
tgcactttgcgtgtctggtgtgatacgtcccgctcagga

SEQ ID NO: 5462 - DNA, 38 bp, Artificial Sequence
  Synthetic
cgtgtcgtcgaatgccaggccgcatcgatccggagatc

SEQ ID NO: 5463 - DNA, 36 bp, Artificial Sequence
  Synthetic
ggtgcggtgcctgccgataagccacttccccgactg

SEQ ID NO: 5464 - DNA, 37 bp, Artificial Sequence
  Synthetic
gaatgggagctcgggtccacaaccttccgtcccctgc

SEQ ID NO: 5465 - DNA, 37 bp, Artificial Sequence
  Synthetic
atcgccttgtgtgtgtgctggcccaagattcggcgcg

SEQ ID NO: 5466 - DNA, 37 bp, Artificial Sequence
  Synthetic
ggcgaacacggggctgcattccccctcgcacatcctc

SEQ ID NO: 5467 - DNA, 35 bp, Artificial Sequence
  Synthetic
cgccggatcgaggtaccgttggaggagcaagcggc

SEQ ID NO: 5468 - DNA, 40 bp, Artificial Sequence
  Synthetic
aggatcttgggtgctgacgcgccgagatttacaaggacca

SEQ ID NO: 5469 - DNA, 35 bp, Artificial Sequence
  Synthetic
tcagggggtgcgtcacgcttttaaccgcgagcgcc

SEQ ID NO: 5470 - DNA, 39 bp, Artificial Sequence
  Synthetic
ggccacctgacacagaggcgagcggctcaagatctttcg

SEQ ID NO: 5471 - DNA, 35 bp, Artificial Sequence
  Synthetic
tgtgggtgtgtaggcgatgctacgcgcgccaaacc

SEQ ID NO: 5472 - DNA, 35 bp, Artificial Sequence
  Synthetic
aagtctgcgggggagcggtgaggccgctgttggtg

SEQ ID NO: 5473 - DNA, 38 bp, Artificial Sequence
  Synthetic
atggtcgccgtcattatggccgcgaatgtgtgcggagg

SEQ ID NO: 5474 - DNA, 37 bp, Artificial Sequence
  Synthetic
cgctctccatcctgcatcaggagtgtcacgcgggagg

SEQ ID NO: 5475 - DNA, 36 bp, Artificial Sequence
  Synthetic
caggggcgatggaagcggagtgcgcctggattcgct

SEQ ID NO: 5476 - DNA, 39 bp, Artificial Sequence
  Synthetic
tccaggcagcgatgtttggcgtgctcagcccctgcttta

SEQ ID NO: 5477 - DNA, 39 bp, Artificial Sequence
  Synthetic
gtcctgtcggacgacggtgcatcatcagctcaagacggg

SEQ ID NO: 5478 - DNA, 39 bp, Artificial Sequence
  Synthetic
gccagggcgcagaagacgtcggtgttttacctgctgcag

SEQ ID NO: 5479 - DNA, 36 bp, Artificial Sequence
  Synthetic
cgctcaaacgccccgaggagttgcgcgccatccaac

SEQ ID NO: 5480 - DNA, 42 bp, Artificial Sequence
  Synthetic
acagggtgttgcaatacgacccatgcaaacagcctgtacgac

SEQ ID NO: 5481 - DNA, 38 bp, Artificial Sequence
  Synthetic
ggcggcgaacaaggcacatgttttgggggatgtccgtg

SEQ ID NO: 5482 - DNA, 38 bp, Artificial Sequence
  Synthetic
gctacgccaccaccatgcaggtttcggtccgttgtgac

SEQ ID NO: 5483 - DNA, 39 bp, Artificial Sequence
  Synthetic
cttcgaccggggtctcggacgagagcgtgtttatcctgg

SEQ ID NO: 5484 - DNA, 37 bp, Artificial Sequence
  Synthetic
gccccgttaggcgccagaagtttttctcgggggacgc

SEQ ID NO: 5485 - DNA, 39 bp, Artificial Sequence
  Synthetic
tgtgtctgtcctccggaagggctcatcccgccgaccttg

SEQ ID NO: 5486 - DNA, 36 bp, Artificial Sequence
  Synthetic
cggcacgctgttgacgcttgtggcctcgaataccga

SEQ ID NO: 5487 - DNA, 37 bp, Artificial Sequence
  Synthetic
ccccgcgtcagacaaaccctgagtcttcggacctcgc

SEQ ID NO: 5488 - DNA, 37 bp, Artificial Sequence
  Synthetic
ccgggacttttggatgtcgccacgaccacctgctccg

SEQ ID NO: 5489 - DNA, 39 bp, Artificial Sequence
  Synthetic
ccttcatgacggcgctggtactggaatagtggcgctggc

SEQ ID NO: 5490 - DNA, 38 bp, Artificial Sequence
  Synthetic
gtcaaagtcgccgccctccctcaagaaccccaccaacc

SEQ ID NO: 5491 - DNA, 37 bp, Artificial Sequence
  Synthetic
cggctcagctggtgggagtcaccttcggtgggggcta

SEQ ID NO: 5492 - DNA, 34 bp, Artificial Sequence
  Synthetic
tcagcttgcgggcctcgttgccatcgcgtggtgc

SEQ ID NO: 5493 - DNA, 36 bp, Artificial Sequence
  Synthetic
tgtacctgcgggcgaagatgtgggggactgcatcgg

SEQ ID NO: 5494 - DNA, 36 bp, Artificial Sequence
  Synthetic
tccacctcctgccacttggttggcctgggactgggt

SEQ ID NO: 5495 - DNA, 36 bp, Artificial Sequence
  Synthetic
gatggccgcgtggaactgcaagcgcgtggacatcct

SEQ ID NO: 5496 - DNA, 35 bp, Artificial Sequence
  Synthetic
tgcgaaagttgcgcccctgccctgagtcagtgcca

SEQ ID NO: 5497 - DNA, 38 bp, Artificial Sequence
  Synthetic
gcagggtctcgagttcggctcatgcaggagacgtaccg

SEQ ID NO: 5498 - DNA, 39 bp, Artificial Sequence
  Synthetic
ccgagcctcccaggtgcagaaccgagggcttcaaggagg

SEQ ID NO: 5499 - DNA, 39 bp, Artificial Sequence
  Synthetic
gttgccgtcttgggctttgtcggattacctccgttcgcg

SEQ ID NO: 5500 - DNA, 36 bp, Artificial Sequence
  Synthetic
cgtctacgtccgaagcgggatggccgggcagaagtt

SEQ ID NO: 5501 - DNA, 37 bp, Artificial Sequence
  Synthetic
gattccccagagcagccccgcttgatggcggcctgct

SEQ ID NO: 5502 - DNA, 38 bp, Artificial Sequence
  Synthetic
acatctcgcgcgcgctgtggtgaacgtcttttcgcact

SEQ ID NO: 5503 - DNA, 42 bp, Artificial Sequence
  Synthetic
ggtccgggtaaaacaacagccgagctttttttcgtccacacg

SEQ ID NO: 5504 - DNA, 37 bp, Artificial Sequence
  Synthetic
caggaggctgggatcgaaggcgcagcagctggaaggc

SEQ ID NO: 5505 - DNA, 36 bp, Artificial Sequence
  Synthetic
ggatcagctgctttgtgcgctcggggcccatgaacc

SEQ ID NO: 5506 - DNA, 36 bp, Artificial Sequence
  Synthetic
cgtcaggacggagagccaggatccagcggggccaga

SEQ ID NO: 5507 - DNA, 36 bp, Artificial Sequence
  Synthetic
gtgcggggcattgtgtctccggcgaggtgggcttct

SEQ ID NO: 5508 - DNA, 38 bp, Artificial Sequence
  Synthetic
gatcccccccgcgttccatgcagggcacatatgatcgc

SEQ ID NO: 5509 - DNA, 38 bp, Artificial Sequence
  Synthetic
ggtaggccgcgctacacgtcctacgttctggccctggt

SEQ ID NO: 5510 - DNA, 38 bp, Artificial Sequence
  Synthetic
gaggccctcttgcacgaacggaaccttaccaccccggc

SEQ ID NO: 5511 - DNA, 35 bp, Artificial Sequence
  Synthetic
gggtggttccgccttgcgtagcaagacccggggga

SEQ ID NO: 5512 - DNA, 38 bp, Artificial Sequence
  Synthetic
aaaagccagcgcgggtgggaccggcaagtttccaaagc

SEQ ID NO: 5513 - DNA, 36 bp, Artificial Sequence
  Synthetic
tgcgtgcaggcgtttaacgaccttgagggcgggcat

SEQ ID NO: 5514 - DNA, 38 bp, Artificial Sequence
  Synthetic
ctgcaccgagatcgtccatcccgcttcccaggttgcag

SEQ ID NO: 5515 - DNA, 39 bp, Artificial Sequence
  Synthetic
atcaggggccgtgatatgccgaggacatccgcgacgaaa

SEQ ID NO: 5516 - DNA, 39 bp, Artificial Sequence
  Synthetic
ctcctcgtccgtccggcactttgtgtttggagccaaggc

SEQ ID NO: 5517 - DNA, 40 bp, Artificial Sequence
  Synthetic
ttcagtcggtatcgctggcgccgcttctggtccacgagag

SEQ ID NO: 5518 - DNA, 38 bp, Artificial Sequence
  Synthetic
ccacgttcgagctcggggtggtgacgcaggtactcgtg

SEQ ID NO: 5519 - DNA, 36 bp, Artificial Sequence
  Synthetic
ggggacacgggctaccctcatgtgcgttcgatgcgg

SEQ ID NO: 5520 - DNA, 39 bp, Artificial Sequence
  Synthetic
tgtctggttcgaggacgaccactcgtgcgtctgcgtgtc

SEQ ID NO: 5521 - DNA, 37 bp, Artificial Sequence
  Synthetic
ggccgtgaatcccccgtcatttgccgacaccgtggtg

SEQ ID NO: 5522 - DNA, 36 bp, Artificial Sequence
  Synthetic
gtgtcccgcggggagaaaggacgacgcccccgaaga

SEQ ID NO: 5523 - DNA, 37 bp, Artificial Sequence
  Synthetic
tggtcgccaccacgcattgggaagtcacgaggtacgg

SEQ ID NO: 5524 - DNA, 35 bp, Artificial Sequence
  Synthetic
actcgttggcgcgctgaatcaccaccatccgcgtg

SEQ ID NO: 5525 - DNA, 38 bp, Artificial Sequence
  Synthetic
gcggcccgggagagaagagacacagagggccactcacg

SEQ ID NO: 5526 - DNA, 36 bp, Artificial Sequence
  Synthetic
aggttcaccatgcaggcgtgcccgacgcctcgtgaa

SEQ ID NO: 5527 - DNA, 39 bp, Artificial Sequence
  Synthetic
taacgatgcggggggtggcctccacaaaatctcggtcca

SEQ ID NO: 5528 - DNA, 38 bp, Artificial Sequence
  Synthetic
cgcctgtgcgtgtccttgtgttgcaggcggttgctgtc

SEQ ID NO: 5529 - DNA, 35 bp, Artificial Sequence
  Synthetic
ccgtcttcggtgccagtcctgttggtgccggtggg

SEQ ID NO: 5530 - DNA, 39 bp, Artificial Sequence
  Synthetic
tgtttggcgtcgtgagtcccgcctgcgtagttcaagagg

SEQ ID NO: 5531 - DNA, 37 bp, Artificial Sequence
  Synthetic
ggacagcagcggggagtgttcctctccgtgggggtct

SEQ ID NO: 5532 - DNA, 34 bp, Artificial Sequence
  Synthetic
cggccatgcacaccagcaggcgcggaccaggtaa

SEQ ID NO: 5533 - DNA, 37 bp, Artificial Sequence
  Synthetic
acgaacggccacgacagtgacgtacgccgaggctatg

SEQ ID NO: 5534 - DNA, 37 bp, Artificial Sequence
  Synthetic
ataacgacaaacggcccctcgttgctgatcccccgcc

SEQ ID NO: 5535 - DNA, 39 bp, Artificial Sequence
  Synthetic
tccaagccagccaagttaacggcaaaatccgccggggtg

SEQ ID NO: 5536 - DNA, 41 bp, Artificial Sequence
  Synthetic
ccccggtgtcgttcaacaaagattggggagaagcaggtgtc

SEQ ID NO: 5537 - DNA, 38 bp, Artificial Sequence
  Synthetic
tctggacatgtcggcggaatcctgtcgtcggggtcgtc

SEQ ID NO: 5538 - DNA, 36 bp, Artificial Sequence
  Synthetic
ttcttgcggaccacggcccgcgtgtatgggcatgcc

SEQ ID NO: 5539 - DNA, 37 bp, Artificial Sequence
  Synthetic
tcctccgcaaacaggcccgatcgtgcgcactaggtcc

SEQ ID NO: 5540 - DNA, 36 bp, Artificial Sequence
  Synthetic
gcaggaagctccacagggcagaacaacgccctgccc

SEQ ID NO: 5541 - DNA, 40 bp, Artificial Sequence
  Synthetic
gtcgttcggggtgctcgttgacaaaacttacgacaggcca

SEQ ID NO: 5542 - DNA, 36 bp, Artificial Sequence
  Synthetic
ccccggagacccccaaaccttgacacaggcgctcgg

SEQ ID NO: 5543 - DNA, 36 bp, Artificial Sequence
  Synthetic
ctggacgccatggacagggatggtcgaggggggctt

SEQ ID NO: 5544 - DNA, 37 bp, Artificial Sequence
  Synthetic
gtggtacacgagcacgagccaaggatcgccgggtggt

SEQ ID NO: 5545 - DNA, 39 bp, Artificial Sequence
  Synthetic
ccgcagatcgcagcggtctccctggcggtgaatgtagtc

SEQ ID NO: 5546 - DNA, 42 bp, Artificial Sequence
  Synthetic
tcagatcacccgcatcatccgatctggatgcggggaaaactc

SEQ ID NO: 5547 - DNA, 38 bp, Artificial Sequence
  Synthetic
tcagccttaccacgcccgacctcctcctccagtccaat

SEQ ID NO: 5548 - DNA, 38 bp, Artificial Sequence
  Synthetic
acttccgggcctcagaaccctccggatagccaggcctg

SEQ ID NO: 5549 - DNA, 37 bp, Artificial Sequence
  Synthetic
gggacctgcggccaacacactggggtgaggggacact

SEQ ID NO: 5550 - DNA, 38 bp, Artificial Sequence
  Synthetic
cgggctaaccaggaaatccgtgtcacacggccgggcta

SEQ ID NO: 5551 - DNA, 38 bp, Artificial Sequence
  Synthetic
cccgacggcgtagtggaggaggtcccccacaaagcgaa

SEQ ID NO: 5552 - DNA, 38 bp, Artificial Sequence
  Synthetic
cgccagcctgtttgtcctgggagccgttgtacgccaga

SEQ ID NO: 5553 - DNA, 37 bp, Artificial Sequence
  Synthetic
gtataccctgtccgtgggcgaccaccaggaccaccga

SEQ ID NO: 5554 - DNA, 38 bp, Artificial Sequence
  Synthetic
actcggaaagcgaagacgaggcaccgactgttggcggc

SEQ ID NO: 5555 - DNA, 42 bp, Artificial Sequence
  Synthetic
gctccgctaaaagaccgcatcggtgatgggggggaagagaga

SEQ ID NO: 5556 - DNA, 45 bp, Artificial Sequence
  Synthetic
ttcaattcagacagggaatcaacactgatttacccaggtgttgtt

SEQ ID NO: 5557 - DNA, 42 bp, Artificial Sequence
  Synthetic
ggggctgtggctgtattgaattgagttctcagtatgttgttc

SEQ ID NO: 5558 - DNA, 44 bp, Artificial Sequence
  Synthetic
gctggcgaaatcacatgtgtccaaattttgattgaaagataccc

SEQ ID NO: 5559 - DNA, 40 bp, Artificial Sequence
  Synthetic
agcggctttgaaatgatttgggcaccgagaagctactgtc

SEQ ID NO: 5560 - DNA, 42 bp, Artificial Sequence
  Synthetic
attcctatgggagtgggcctcaaccactgaacaaatggcact

SEQ ID NO: 5561 - DNA, 41 bp, Artificial Sequence
  Synthetic
tccttgccacaagaacacatcaggcctgttaataggaagtt

SEQ ID NO: 5562 - DNA, 40 bp, Artificial Sequence
  Synthetic
gaacgcccaccaaatattgcccatgcctcaaggtcggtcg

SEQ ID NO: 5563 - DNA, 44 bp, Artificial Sequence
  Synthetic
tttggaagatccagcgtctagagacacaagagttgcctgaactt

SEQ ID NO: 5564 - DNA, 42 bp, Artificial Sequence
  Synthetic
ctttcccgaccaccagttggataggtgtccttgttgggattg

SEQ ID NO: 5565 - DNA, 44 bp, Artificial Sequence
  Synthetic
gtggaccatatggccataattaagatcctaagtgacgggttctt

SEQ ID NO: 5566 - DNA, 47 bp, Artificial Sequence
  Synthetic
caagtacggtccattacccaaaagatgttttaacctttcgactttgt

SEQ ID NO: 5567 - DNA, 41 bp, Artificial Sequence
  Synthetic
attggagatgtgccacagcactgtctaagaatgtccaccat

SEQ ID NO: 5568 - DNA, 43 bp, Artificial Sequence
  Synthetic
atgaggagttcacaatggtgggatcttctggttgcttttctga

SEQ ID NO: 5569 - DNA, 40 bp, Artificial Sequence
  Synthetic
ttcagaaagatgcgaaagtgctccatcacactgtcgatgt

SEQ ID NO: 5570 - DNA, 45 bp, Artificial Sequence
  Synthetic
attcatcgtcgatgatgtgggaatgatccattgataggtattgac

SEQ ID NO: 5571 - DNA, 38 bp, Artificial Sequence
  Synthetic
ggacatttgacaccacccagtgctttgctttggtggag

SEQ ID NO: 5572 - DNA, 46 bp, Artificial Sequence
  Synthetic
aggtaaggaagacagaagatacggcttttgcaaggttactcagttc

SEQ ID NO: 5573 - DNA, 44 bp, Artificial Sequence
  Synthetic
gaaagcgtctgagtttagtatggaagtgcaacacatctcacaca

SEQ ID NO: 5574 - DNA, 44 bp, Artificial Sequence
  Synthetic
tctggttctaaatttcaactggtgcgcatcttagaagcattcgc

SEQ ID NO: 5575 - DNA, 43 bp, Artificial Sequence
  Synthetic
actgaaactggcattagagcatttttggggcaaagaaacgaaa

SEQ ID NO: 5576 - DNA, 39 bp, Artificial Sequence
  Synthetic
gtgatgaggtggatcaggggatttgtcacaatcctcccg

SEQ ID NO: 5577 - DNA, 47 bp, Artificial Sequence
  Synthetic
gttagtacgcctgaagaaaatggctgctttctgattagttctttcca

SEQ ID NO: 5578 - DNA, 44 bp, Artificial Sequence
  Synthetic
ccgttacctgtagcagcagtcttttttaatgactgcaacaacag

SEQ ID NO: 5579 - DNA, 41 bp, Artificial Sequence
  Synthetic
accgtatcccaatcggaaagccactggtactagagccgacc

SEQ ID NO: 5580 - DNA, 39 bp, Artificial Sequence
  Synthetic
aaagggttcagggggtgctactgtgactctaggtgttgt

SEQ ID NO: 5581 - DNA, 49 bp, Artificial Sequence
  Synthetic
agatcctatatcagacgttacagcagctatattttcatcttgtcctgta

SEQ ID NO: 5582 - DNA, 46 bp, Artificial Sequence
  Synthetic
ttgcagatgttatcacagtacacagtaactctaacgcgaccactat

SEQ ID NO: 5583 - DNA, 48 bp, Artificial Sequence
  Synthetic
aactgcaattgtagatgcagtggcctcatcatcaaattgtatttcact

SEQ ID NO: 5584 - DNA, 41 bp, Artificial Sequence
  Synthetic
aacgcttactacaagtaggccacctcaacagtttcctgagg

SEQ ID NO: 5585 - DNA, 40 bp, Artificial Sequence
  Synthetic
atcctctggctcaaacagatgaagctgtgtttgttttggg

SEQ ID NO: 5586 - DNA, 49 bp, Artificial Sequence
  Synthetic
cttgcaatttcagaacatttcagcagaaaatctggatatttacaggtgc

SEQ ID NO: 5587 - DNA, 45 bp, Artificial Sequence
  Synthetic
atcaatttccactaggtagacggtgctcttttctaacacgtttgt

SEQ ID NO: 5588 - DNA, 45 bp, Artificial Sequence
  Synthetic
tttgtctgaataaattgctgatgcgtgaaaaatatttgccagccc

SEQ ID NO: 5589 - DNA, 45 bp, Artificial Sequence
  Synthetic
aacggtctcttagagtcaaacaaggaaacacttgagtcagccata

SEQ ID NO: 5590 - DNA, 42 bp, Artificial Sequence
  Synthetic
agtcattgtcaccagatgctactattgtgacacttggagtct

SEQ ID NO: 5591 - DNA, 44 bp, Artificial Sequence
  Synthetic
tagtggagttgttgaagatgaagctgtctttttgcaccaacagt

SEQ ID NO: 5592 - DNA, 42 bp, Artificial Sequence
  Synthetic
accaactccttcggaagtgggaagtcgtgagtaaccgtgtct

SEQ ID NO: 5593 - DNA, 46 bp, Artificial Sequence
  Synthetic
ttggatatagaccattaggatccgcgtctagtcactggtaagtctg

SEQ ID NO: 5594 - DNA, 45 bp, Artificial Sequence
  Synthetic
aactgatgtaggtggtgttagtggtagctgtctcactttcttctg

SEQ ID NO: 5595 - DNA, 41 bp, Artificial Sequence
  Synthetic
ttaaatttcagttttccgcgggatgagctggtgttcgtaaa

SEQ ID NO: 5596 - DNA, 41 bp, Artificial Sequence
  Synthetic
ctgcgccaaatccagcttttgtccttctgatgtagcagaca

SEQ ID NO: 5597 - DNA, 44 bp, Artificial Sequence
  Synthetic
aagtcagttttccttgggtcgagctcgtttaccatttaacaaac

SEQ ID NO: 5598 - DNA, 41 bp, Artificial Sequence
  Synthetic
ggtcagtcatttggtcagcagatctcacaaatggacgtctg

SEQ ID NO: 5599 - DNA, 43 bp, Artificial Sequence
  Synthetic
gaattatactcatgggccaggagactgatactagcttccacag

SEQ ID NO: 5600 - DNA, 41 bp, Artificial Sequence
  Synthetic
ttcagtcgctctgcggagaggtgctagtgctggagagaacc

SEQ ID NO: 5601 - DNA, 40 bp, Artificial Sequence
  Synthetic
aagaggactgagaagccctggacgtggtttgttcctgccg

SEQ ID NO: 5602 - DNA, 43 bp, Artificial Sequence
  Synthetic
acaggttaaaacatattgtgtgggcgactccaacaggctctct

SEQ ID NO: 5603 - DNA, 42 bp, Artificial Sequence
  Synthetic
tggcaactatgtccatgtgccacccgaacttcttttcctcca

SEQ ID NO: 5604 - DNA, 46 bp, Artificial Sequence
  Synthetic
cagaagatggatccaaatagggctttttggtccctgttttatgtct

SEQ ID NO: 5605 - DNA, 42 bp, Artificial Sequence
  Synthetic
gtgccgagcacctagaagacagtttgccatgatgtgtcctgg

SEQ ID NO: 5606 - DNA, 41 bp, Artificial Sequence
  Synthetic
ttaccagttgccaagatagagccgccttggtccatctttcc

SEQ ID NO: 5607 - DNA, 45 bp, Artificial Sequence
  Synthetic
agatgtaggggatgcctatttttccctggtagggtaaatgcagta

SEQ ID NO: 5608 - DNA, 42 bp, Artificial Sequence
  Synthetic
tctactccagatgagaagttccaattggccatagttcacagc

SEQ ID NO: 5609 - DNA, 45 bp, Artificial Sequence
  Synthetic
tagaggcaacaatccaaaaaagccggattttctcttcctggtgta

SEQ ID NO: 5610 - DNA, 44 bp, Artificial Sequence
  Synthetic
gcagagaccttctacacagatggcatatcctgcttttccctctt

SEQ ID NO: 5611 - DNA, 48 bp, Artificial Sequence
  Synthetic
attcctggaaaagatagagcccggggttagttcttttataatgctatg

SEQ ID NO: 5612 - DNA, 38 bp, Artificial Sequence
  Synthetic
gcacacagacaatggccccaacctacccaccatgccac

SEQ ID NO: 5613 - DNA, 44 bp, Artificial Sequence
  Synthetic
tttccaggtctattacagagaaggcttccacagtagttcaccag

SEQ ID NO: 5614 - DNA, 38 bp, Artificial Sequence
  Synthetic
ccagactgtgcagacatcctcttcacctgccgtaaagc

SEQ ID NO: 5615 - DNA, 48 bp, Artificial Sequence
  Synthetic
ggcaaaggtcctggagatattgggcacaaatatctatactttgtgtag

SEQ ID NO: 5616 - DNA, 38 bp, Artificial Sequence
  Synthetic
aggcgccagagagctcattatacatcccgctctgaagt

SEQ ID NO: 5617 - DNA, 44 bp, Artificial Sequence
  Synthetic
atggagcctggtaggaatcagacaatatactaagcaagcacttg

SEQ ID NO: 5618 - DNA, 43 bp, Artificial Sequence
  Synthetic
acacctctatgtgtggcaatgaattgaggttgtggaactcgag

SEQ ID NO: 5619 - DNA, 47 bp, Artificial Sequence
  Synthetic
gagtcatgtgataagcactattgggttacatcttaatagggcaaagc

SEQ ID NO: 5620 - DNA, 40 bp, Artificial Sequence
  Synthetic
agccaatcaacacaaggcctagggtttgcttcacctcctg

SEQ ID NO: 5621 - DNA, 44 bp, Artificial Sequence
  Synthetic
cctcctagggaaggggagttgtccgatttttatctatgtcaatg

SEQ ID NO: 5622 - DNA, 45 bp, Artificial Sequence
  Synthetic
aatgactctttatcgcctgactggtgatatttgcctctaggtagc

SEQ ID NO: 5623 - DNA, 40 bp, Artificial Sequence
  Synthetic
agacttaaggcggcccaactgcctcgcgaatgcttggaaa

SEQ ID NO: 5624 - DNA, 50 bp, Artificial Sequence
  Synthetic
acctaataggagttcctgttacacccatatctattgccaatttataggtc

SEQ ID NO: 5625 - DNA, 46 bp, Artificial Sequence
  Synthetic
gtttgggcacaagtcaggattgcctgttattcactatatggtatcc

SEQ ID NO: 5626 - DNA, 41 bp, Artificial Sequence
  Synthetic
cagtacttggccggtactgggtgcttctaactggcagcttt

SEQ ID NO: 5627 - DNA, 42 bp, Artificial Sequence
  Synthetic
aacatcgtcaaactcacctcatgatcacaccagtcacattga

SEQ ID NO: 5628 - DNA, 49 bp, Artificial Sequence
  Synthetic
acatctggatgctttcctataatgcctctgagaagattaggtagttgtc

SEQ ID NO: 5629 - DNA, 45 bp, Artificial Sequence
  Synthetic
accatacatttgttcagaaggggattttgtcatcagagtggaacc

SEQ ID NO: 5630 - DNA, 46 bp, Artificial Sequence
  Synthetic
aggaacaattgtttatcaaagaggccttttattaccttgctcctgc

SEQ ID NO: 5631 - DNA, 42 bp, Artificial Sequence
  Synthetic
aagaggtttcttcggagctattgacctgcaatcattccttcc

SEQ ID NO: 5632 - DNA, 48 bp, Artificial Sequence
  Synthetic
taagctcacaaatagagcttgcagctcatcttcactgtttattatccc

SEQ ID NO: 5633 - DNA, 44 bp, Artificial Sequence
  Synthetic
tgctgcatctttaaatgatgatggcctagaagcagcagttgagt

SEQ ID NO: 5634 - DNA, 44 bp, Artificial Sequence
  Synthetic
aaggaggtcgcactcagctattgtatatgagacccatacaactg

SEQ ID NO: 5635 - DNA, 40 bp, Artificial Sequence
  Synthetic
cggaagccatggaggttgctcccaattgtcctcattgcct

SEQ ID NO: 5636 - DNA, 44 bp, Artificial Sequence
  Synthetic
tcttgatcgtcttttcttcaaatgcgaaggccctcttttcaaac

SEQ ID NO: 5637 - DNA, 44 bp, Artificial Sequence
  Synthetic
aggccattttcatcatgggagatctcctccataacaaaccagtt

SEQ ID NO: 5638 - DNA, 46 bp, Artificial Sequence
  Synthetic
actgaggaatgtgatttagccttacaacagaatgtttcggactaca

SEQ ID NO: 5639 - DNA, 38 bp, Artificial Sequence
  Synthetic
agaggaagcagatggagagcgagtctcctgtagtgcag

SEQ ID NO: 5640 - DNA, 43 bp, Artificial Sequence
  Synthetic
accttttatgaggaggttacaggaccatatctggcagcatctg

SEQ ID NO: 5641 - DNA, 49 bp, Artificial Sequence
  Synthetic
aaaattgaaggagatacatgggcagacccaagtatattacacttccaaa

SEQ ID NO: 5642 - DNA, 49 bp, Artificial Sequence
  Synthetic
ggcagggccatctgttatagatttctatgtcaataatagatggatcagg

SEQ ID NO: 5643 - DNA, 46 bp, Artificial Sequence
  Synthetic
tcttcaactacacatcctgaccctttcaccttgataatttggtgaa

SEQ ID NO: 5644 - DNA, 43 bp, Artificial Sequence
  Synthetic
ctgtttgaacaggttcctacacgaatattcaaactgcacagcg

SEQ ID NO: 5645 - DNA, 50 bp, Artificial Sequence
  Synthetic
ctcgtgcatctataactaccagaaggactcaatagcagataaatcttgat

SEQ ID NO: 5646 - DNA, 41 bp, Artificial Sequence
  Synthetic
ttttgcagatgactgtctggatgaagtactctggctgtggg

SEQ ID NO: 5647 - DNA, 44 bp, Artificial Sequence
  Synthetic
agagacagagaacgcttagtatggccaacacctagaggatttcc

SEQ ID NO: 5648 - DNA, 40 bp, Artificial Sequence
  Synthetic
tcctccatggggtgaatattggcctggcttcaagggtcta

SEQ ID NO: 5649 - DNA, 38 bp, Artificial Sequence
  Synthetic
ttttgggcgtaaggagcagcatccccaacatttcctgc

SEQ ID NO: 5650 - DNA, 47 bp, Artificial Sequence
  Synthetic
tttagcatttgtacccccaccacaagaagacaaatatctgtatgtgt

SEQ ID NO: 5651 - DNA, 49 bp, Artificial Sequence
  Synthetic
aagcgcaaaaggtctaagtaatttcgcatacagtaaacatttcacagta

SEQ ID NO: 5652 - DNA, 45 bp, Artificial Sequence
  Synthetic
ttaacggcgaaatatgaatcagagaaatagcccatgcaaatcttg

SEQ ID NO: 5653 - DNA, 44 bp, Artificial Sequence
  Synthetic
ccttaccaggttgacactatttgtgtagctaacacacacagtct

SEQ ID NO: 5654 - DNA, 47 bp, Artificial Sequence
  Synthetic
agactttatcagatgaaactgtggccaaaatatcctgtaaggcagtg

SEQ ID NO: 5655 - DNA, 38 bp, Artificial Sequence
  Synthetic
aagtcaaatggtgcagtggggtatgcaatggctggttc

SEQ ID NO: 5656 - DNA, 47 bp, Artificial Sequence
  Synthetic
aattgggacccaccgatttatccagcataatactccaatacactttc

SEQ ID NO: 5657 - DNA, 38 bp, Artificial Sequence
  Synthetic
acaaccgcagacgacaagcccttgtcctcgtcgtcgtc

SEQ ID NO: 5658 - DNA, 45 bp, Artificial Sequence
  Synthetic
aagttgaaggaacaacatgggctttcccaaatatataacactgct

SEQ ID NO: 5659 - DNA, 45 bp, Artificial Sequence
  Synthetic
agaagaaggaattccagatgttgggtgtttctgctcctaaaccag

SEQ ID NO: 5660 - DNA, 43 bp, Artificial Sequence
  Synthetic
actcgttctgctgaccttttccgggattttcaaattcaaatgt

SEQ ID NO: 5661 - DNA, 45 bp, Artificial Sequence
  Synthetic
agtgataaataacaccggcctaccctggcacatttttttcactag

SEQ ID NO: 5662 - DNA, 43 bp, Artificial Sequence
  Synthetic
tcctgaaagagaacgtttagtttggtaccgactccaagaggac

SEQ ID NO: 5663 - DNA, 43 bp, Artificial Sequence
  Synthetic
atgccagacatttcttttgtaaggagctcatctggaggattcc

SEQ ID NO: 5664 - DNA, 46 bp, Artificial Sequence
  Synthetic
tcctcctcaaggattggaggatacctttaggacacatagctgctaa

SEQ ID NO: 5665 - DNA, 38 bp, Artificial Sequence
  Synthetic
aacaaccggttctggtcgttaagacacaggcaccgata

SEQ ID NO: 5666 - DNA, 42 bp, Artificial Sequence
  Synthetic
agaagaatcccgctcttagaatgatttgtcagctgtgatcgg

SEQ ID NO: 5667 - DNA, 47 bp, Artificial Sequence
  Synthetic
agtacagtccattatccaaaggtgttccgtgttttaatctttcaacc

SEQ ID NO: 5668 - DNA, 42 bp, Artificial Sequence
  Synthetic
aatattgctcctttaatggtggcaaggaatctggtcttgcga

SEQ ID NO: 5669 - DNA, 41 bp, Artificial Sequence
  Synthetic
agagcaacagtatcagcagaccccaatttgtgtgctatggc

SEQ ID NO: 5670 - DNA, 41 bp, Artificial Sequence
  Synthetic
gaagagcaacagccattctaagacccttccgctgactatca

SEQ ID NO: 5671 - DNA, 43 bp, Artificial Sequence
  Synthetic
tgagacactttcaaaaggatgcaacattgtcgatgggttcaat

SEQ ID NO: 5672 - DNA, 41 bp, Artificial Sequence
  Synthetic
cagggaatggaaaagttgacgattctggcccgttaatctcc

SEQ ID NO: 5673 - DNA, 43 bp, Artificial Sequence
  Synthetic
acgttcgacactgttcaaataatcacctactctgttccggtgg

SEQ ID NO: 5674 - DNA, 41 bp, Artificial Sequence
  Synthetic
agagtctgcagtattgagaggattgcttaatgctggtccat

SEQ ID NO: 5675 - DNA, 45 bp, Artificial Sequence
  Synthetic
aacacattaactgaaagaggagtgggatgtttgttcgttccactg

SEQ ID NO: 5676 - DNA, 48 bp, Artificial Sequence
  Synthetic
tgaggcaaattctcagagaatcaggccattagttcttattccactgta

SEQ ID NO: 5677 - DNA, 47 bp, Artificial Sequence
  Synthetic
atcaacaatcttttgtaccgagtcccaattcttccagatagaccatt

SEQ ID NO: 5678 - DNA, 47 bp, Artificial Sequence
  Synthetic
cttgccatttcagaacatagatagcctcctttgcttaacatatctcg

SEQ ID NO: 5679 - DNA, 43 bp, Artificial Sequence
  Synthetic
caccagaatgcacagggagatgttatttgatcaattgccgatt

SEQ ID NO: 5680 - DNA, 47 bp, Artificial Sequence
  Synthetic
aactgtacgaacgagtgaaaagactgaaatatttcaaagcaaccagt

SEQ ID NO: 5681 - DNA, 41 bp, Artificial Sequence
  Synthetic
acttctgcctcatcacagccgcagatttgtaaattccgcag

SEQ ID NO: 5682 - DNA, 49 bp, Artificial Sequence
  Synthetic
tatcgccaagtgagaaagatcatcgtccacctatttaaaatgaatctga

SEQ ID NO: 5683 - DNA, 40 bp, Artificial Sequence
  Synthetic
gtgtggttgtacacagtgtggatgcagctgttgtatgtcc

SEQ ID NO: 5684 - DNA, 44 bp, Artificial Sequence
  Synthetic
agggtggtggaattgcttaagtgaccaaatgacaatccaaacag

SEQ ID NO: 5685 - DNA, 46 bp, Artificial Sequence
  Synthetic
accacagtgtctaaaggaatgtggctctattaacagttgattagca

SEQ ID NO: 5686 - DNA, 45 bp, Artificial Sequence
  Synthetic
acacagatagtaatgcagctgctgtctacacataattccacaatc

SEQ ID NO: 5687 - DNA, 41 bp, Artificial Sequence
  Synthetic
aacatgtgcagcactggaagtccatttcacgagccttaaat

SEQ ID NO: 5688 - DNA, 46 bp, Artificial Sequence
  Synthetic
actgtggaggttgtattcgatggcgtatataaatgtccatgctgta

SEQ ID NO: 5689 - DNA, 38 bp, Artificial Sequence
  Synthetic
ccccgccgcgaaaacgatacttgtgacgccgtagtgct

SEQ ID NO: 5690 - DNA, 41 bp, Artificial Sequence
  Synthetic
tgtgttgtgtgtgtggattagttagctagcaagacaggagg

SEQ ID NO: 5691 - DNA, 48 bp, Artificial Sequence
  Synthetic
ttaaactactgcagacatacgtgtgtacaaacaatacaaaaacccaac

SEQ ID NO: 5692 - DNA, 46 bp, Artificial Sequence
  Synthetic
ggacatttctcctcccaccaatacgtaaagtaaaaggatcactgta

SEQ ID NO: 5693 - DNA, 45 bp, Artificial Sequence
  Synthetic
aggctatagaattgcaacctttaggtcattaattgcggatgaagc

SEQ ID NO: 5694 - DNA, 41 bp, Artificial Sequence
  Synthetic
ctcctgtttccaaggtggtcaactgctggcatgataaaagt

SEQ ID NO: 5695 - DNA, 44 bp, Artificial Sequence
  Synthetic
tatggcagatgtagggtttggagcacctcagcttttgaagtttg

SEQ ID NO: 5696 - DNA, 41 bp, Artificial Sequence
  Synthetic
attggaatgttggtgtagctccatatggcctgagactgcac

SEQ ID NO: 5697 - DNA, 46 bp, Artificial Sequence
  Synthetic
tgtactgccaaatggtattgctaagctttctaaaacatgcttgtgc

SEQ ID NO: 5698 - DNA, 45 bp, Artificial Sequence
  Synthetic
aaatggttcaatgggcgtatgaaaagcataatagtaagcaattgc

SEQ ID NO: 5699 - DNA, 49 bp, Artificial Sequence
  Synthetic
aaatgttgtagggaatgtgatggtccctgatacttaagtaaattagcaa

SEQ ID NO: 5700 - DNA, 41 bp, Artificial Sequence
  Synthetic
gattcctcaagaagcggcaggatcgtcgtcgttgtcctctt

SEQ ID NO: 5701 - DNA, 49 bp, Artificial Sequence
  Synthetic
caagagttgagcgacttaaagcagctccaacatttcaatttattagcac

SEQ ID NO: 5702 - DNA, 40 bp, Artificial Sequence
  Synthetic
tgtaggtgagcatcccaatgtagctgcacatcgatttgag

SEQ ID NO: 5703 - DNA, 44 bp, Artificial Sequence
  Synthetic
tggggacagattgtttttttatggtatcaccaacaactccatct

SEQ ID NO: 5704 - DNA, 43 bp, Artificial Sequence
  Synthetic
tcgttagttagcagcgaatctcattccctgagctttatgtacc

SEQ ID NO: 5705 - DNA, 40 bp, Artificial Sequence
  Synthetic
attaatgcaatggactctcgcacctgaggaggtgaaggaa

SEQ ID NO: 5706 - DNA, 42 bp, Artificial Sequence
  Synthetic
aagcgaccacggaatatctatgagtttagtagtgcgacgctt

SEQ ID NO: 5707 - DNA, 43 bp, Artificial Sequence
  Synthetic
ttaccctcctattatttgcccacaaacgtttgtgtgcgatgtt

SEQ ID NO: 5708 - DNA, 41 bp, Artificial Sequence
  Synthetic
aagctggcaagaacaacacccagaagatgactcaaatgcct

SEQ ID NO: 5709 - DNA, 42 bp, Artificial Sequence
  Synthetic
atggctggatcaagtgagcaggccatttgcctagcctgactt

SEQ ID NO: 5710 - DNA, 42 bp, Artificial Sequence
  Synthetic
tcttcaaatgcatttatcgtcgctagactcaggcactccttc

SEQ ID NO: 5711 - DNA, 49 bp, Artificial Sequence
  Synthetic
acctaacaacaaatggaagtaatgcgttttagatctttctcgatcatgt

SEQ ID NO: 5712 - DNA, 46 bp, Artificial Sequence
  Synthetic
aagctatcactagtatctcagggttcttgtctgaaagcttccaatc

SEQ ID NO: 5713 - DNA, 46 bp, Artificial Sequence
  Synthetic
atatgttccagctaggacaagcaccaagttcatcttctagtgttga

SEQ ID NO: 5714 - DNA, 41 bp, Artificial Sequence
  Synthetic
atcaactaatatctcctcggccctaggtcttcttgggggtc

SEQ ID NO: 5715 - DNA, 43 bp, Artificial Sequence
  Synthetic
gaggaatctccagaagcatcacgatcaatatcctccgtgttct

SEQ ID NO: 5716 - DNA, 43 bp, Artificial Sequence
  Synthetic
aatcctcatcatggaatctcaccaagttgtgtttgtctgttcg

SEQ ID NO: 5717 - DNA, 48 bp, Artificial Sequence
  Synthetic
atacactagagaacgatgtgcaagtgttgcatttgattcattgtatga

SEQ ID NO: 5718 - DNA, 45 bp, Artificial Sequence
  Synthetic
gaacagagaaaagcagtaccccatctaaataccgagatccatgtt

SEQ ID NO: 5719 - DNA, 44 bp, Artificial Sequence
  Synthetic
acaaagttgctcttgctcctccgtacaattcacgaagattactc

SEQ ID NO: 5720 - DNA, 49 bp, Artificial Sequence
  Synthetic
aatctctacttcaatctggacgcagtcctaagtttttgattatccctta

SEQ ID NO: 5721 - DNA, 44 bp, Artificial Sequence
  Synthetic
tgtgatagtaaccaatcaggaatcccccctccaaagaatcgttt

SEQ ID NO: 5722 - DNA, 43 bp, Artificial Sequence
  Synthetic
agaatggtatattcctcttcccagcacatctgctccacctaga

SEQ ID NO: 5723 - DNA, 46 bp, Artificial Sequence
  Synthetic
agtacaataggtatcaacggaatgctgtgtagaatgcaagagttcc

SEQ ID NO: 5724 - DNA, 43 bp, Artificial Sequence
  Synthetic
aagcataccaatcacggaaagggagcttgttgttatgagtagc

SEQ ID NO: 5725 - DNA, 43 bp, Artificial Sequence
  Synthetic
acccaaaaataaggttaatgccaggcacagccatcaacagtcg

SEQ ID NO: 5726 - DNA, 46 bp, Artificial Sequence
  Synthetic
atgagaatgtaatctgcaacacaacgactataagatgcctgattgc

SEQ ID NO: 5727 - DNA, 42 bp, Artificial Sequence
  Synthetic
acttactcaacagcaactgaaagaccagctgagagtgttctg

SEQ ID NO: 5728 - DNA, 48 bp, Artificial Sequence
  Synthetic
aaacgctgttgattattaccagagcaattgtcaaatcctcatctaact

SEQ ID NO: 5729 - DNA, 48 bp, Artificial Sequence
  Synthetic
tagacgaaacaagatcagcatcttctgaataaccattctcaattgctt

SEQ ID NO: 5730 - DNA, 42 bp, Artificial Sequence
  Synthetic
cagtgttgggggattcaattacaatgcagcaactgatggatc

SEQ ID NO: 5731 - DNA, 45 bp, Artificial Sequence
  Synthetic
aagtggacttgaaacacctgaccttctgatcctgttattaccacc

SEQ ID NO: 5732 - DNA, 49 bp, Artificial Sequence
  Synthetic
gtctcaaaattttaacaccggtagcttgcagtatcttttaatctgtgtg

SEQ ID NO: 5733 - DNA, 40 bp, Artificial Sequence
  Synthetic
atttgggttgcaacagtttggaaatctcgtgacggaacac

SEQ ID NO: 5734 - DNA, 41 bp, Artificial Sequence
  Synthetic
tagggcatgccgatttgtttctgcagacccataacatatgt

SEQ ID NO: 5735 - DNA, 48 bp, Artificial Sequence
  Synthetic
cgtaagcccttagattacaaacgtcaccatgcacatattcaatctctt

SEQ ID NO: 5736 - DNA, 40 bp, Artificial Sequence
  Synthetic
ccaagtcttggtctgttggtgactgatcacgttgcaacaa

SEQ ID NO: 5737 - DNA, 43 bp, Artificial Sequence
  Synthetic
ggatacattctgcttcaatgtacgctttcagcacccaacatgg

SEQ ID NO: 5738 - DNA, 43 bp, Artificial Sequence
  Synthetic
tgaaacttgtactattgccggtaaaagcgcattatcaagcaaa

SEQ ID NO: 5739 - DNA, 44 bp, Artificial Sequence
  Synthetic
acttacaatcgccaacaattattccacatcgccaattacaacag

SEQ ID NO: 5740 - DNA, 45 bp, Artificial Sequence
  Synthetic
tgattacagggcttttatcagtgttttagactctgcagctttcac

SEQ ID NO: 5741 - DNA, 48 bp, Artificial Sequence
  Synthetic
ggtttctactgttaaaattggtggcacaatgtaaggtttatcaaaagc

SEQ ID NO: 5742 - DNA, 46 bp, Artificial Sequence
  Synthetic
agatgcagagtttgtagaaccagttcttataaaagacgtgctcatc

SEQ ID NO: 5743 - DNA, 46 bp, Artificial Sequence
  Synthetic
ttcaatcagcactttctgttgtttccgccttcttcatcataaatgt

SEQ ID NO: 5744 - DNA, 45 bp, Artificial Sequence
  Synthetic
tatgcagttttttaaaatgggccgacgtatacattgctcagcagt

SEQ ID NO: 5745 - DNA, 43 bp, Artificial Sequence
  Synthetic
aggcgtttccttatggtacttgaactgcctaattgtacacatg

SEQ ID NO: 5746 - DNA, 46 bp, Artificial Sequence
  Synthetic
cttcctcgttcatgacaatgtagcgtcaacaccattaacaacagta

SEQ ID NO: 5747 - DNA, 46 bp, Artificial Sequence
  Synthetic
aaccagtgtccgtaattaaagttgcacacacaacaagtcttctgta

SEQ ID NO: 5748 - DNA, 48 bp, Artificial Sequence
  Synthetic
ataccagctgactacatcttgcccctacaaaagaaacattacaagtca

SEQ ID NO: 5749 - DNA, 45 bp, Artificial Sequence
  Synthetic
agatgctgttacttttgcaacagtccattaacaacagcactttca

SEQ ID NO: 5750 - DNA, 44 bp, Artificial Sequence
  Synthetic
gctattatagtcagtgtcgaacagcagcaacaccactcaaaagt

SEQ ID NO: 5751 - DNA, 47 bp, Artificial Sequence
  Synthetic
gttcttaaatctaagtggtggctgcgcaaaactactgagtacaatgt

SEQ ID NO: 5752 - DNA, 42 bp, Artificial Sequence
  Synthetic
tttggatgttgtgtggaagcatgacaatgaaaggttgcatat

SEQ ID NO: 5753 - DNA, 46 bp, Artificial Sequence
  Synthetic
acacaattgtcaatggtgtgcaacacaaaacttactaccaccattt

SEQ ID NO: 5754 - DNA, 42 bp, Artificial Sequence
  Synthetic
aacaactttgtcagttcgtatgcttacaacacgccaagtcat

SEQ ID NO: 5755 - DNA, 40 bp, Artificial Sequence
  Synthetic
ctggtgatgctggccattcaatcaaacacacaagaccaca

SEQ ID NO: 5756 - DNA, 44 bp, Artificial Sequence
  Synthetic
ttttacactacaagctgcttttggtcaggtgttgtgactccaaa

SEQ ID NO: 5757 - DNA, 40 bp, Artificial Sequence
  Synthetic
gtgttgaatccaatgcaggtgtaacgtaaccattggcaac

SEQ ID NO: 5758 - DNA, 42 bp, Artificial Sequence
  Synthetic
ttttgctccatggtggttgtgtcagcaaactaggtaacaaac

SEQ ID NO: 5759 - DNA, 38 bp, Artificial Sequence
  Synthetic
tttgcgcaaaatggcacaacatagcagacacggacaac

SEQ ID NO: 5760 - DNA, 44 bp, Artificial Sequence
  Synthetic
ctggtgaaggttttaacatcttagctgttcacaccaaaaacacc

SEQ ID NO: 5761 - DNA, 47 bp, Artificial Sequence
  Synthetic
ttatgctgctatattgaatggttgctcattataatgctccacaaaca

SEQ ID NO: 5762 - DNA, 46 bp, Artificial Sequence
  Synthetic
taaccctggttttcttactccgtaaatgtaagacagagtgacaaag

SEQ ID NO: 5763 - DNA, 45 bp, Artificial Sequence
  Synthetic
gcacttatttgttctcactcattgcaccagcaaactaacgtagtc

SEQ ID NO: 5764 - DNA, 47 bp, Artificial Sequence
  Synthetic
tatggttgctaatggtttgaatgcaagtttaaaagacagaaagagcg

SEQ ID NO: 5765 - DNA, 40 bp, Artificial Sequence
  Synthetic
aacttgtgtgacgaccctgaaaagaaaaaggccaacaacg

SEQ ID NO: 5766 - DNA, 42 bp, Artificial Sequence
  Synthetic
tgctgcagctatgtacaaagaagtgcatggcactaacaactt

SEQ ID NO: 5767 - DNA, 43 bp, Artificial Sequence
  Synthetic
agatgttacaaaggaaaaccaggaaacgacacgttcacaagtc

SEQ ID NO: 5768 - DNA, 46 bp, Artificial Sequence
  Synthetic
tacagttgaattggaaccaccttgagatacttaatttggggtccag

SEQ ID NO: 5769 - DNA, 41 bp, Artificial Sequence
  Synthetic
gactaatggttctggtagcggttcctgcgtagtgttggaat

SEQ ID NO: 5770 - DNA, 40 bp, Artificial Sequence
  Synthetic
ctagtgccgctcgactagagaatgcacggacacagtaatc

SEQ ID NO: 5771 - DNA, 45 bp, Artificial Sequence
  Synthetic
ggagatattggttcttactggttgttctatggggtcaaaccaatt

SEQ ID NO: 5772 - DNA, 47 bp, Artificial Sequence
  Synthetic
tgatgcctgttatgggtatgactaagatgtcacttttcataaagcac

SEQ ID NO: 5773 - DNA, 43 bp, Artificial Sequence
  Synthetic
agttgctactgctggttaccatgttaacatctttgttccacac

SEQ ID NO: 5774 - DNA, 43 bp, Artificial Sequence
  Synthetic
tttcgatgagggttcagaattaacaattgcagcatcacccttt

SEQ ID NO: 5775 - DNA, 45 bp, Artificial Sequence
  Synthetic
tgtctgaaatccatagtagctaccagccataaaacttggtagtgc

SEQ ID NO: 5776 - DNA, 45 bp, Artificial Sequence
  Synthetic
agccactttgtattatcagaatggtagatcttcctcagtccaaca

SEQ ID NO: 5777 - DNA, 46 bp, Artificial Sequence
  Synthetic
ttgtctaagcatcctaaacctgagtagatgtttgacccagtctaac

SEQ ID NO: 5778 - DNA, 42 bp, Artificial Sequence
  Synthetic
tttgggttccatggacattgatggcgaatgtcagaccaatca

SEQ ID NO: 5779 - DNA, 47 bp, Artificial Sequence
  Synthetic
atacggttacttacaaatccactgcagcaacattatgagaagtcaaa

SEQ ID NO: 5780 - DNA, 38 bp, Artificial Sequence
  Synthetic
cgctctgtgcaaaagctgtcaacactcaactctggcac

SEQ ID NO: 5781 - DNA, 44 bp, Artificial Sequence
  Synthetic
gcttccagctcctagagttctcaacattatagtcaattggttcc

SEQ ID NO: 5782 - DNA, 50 bp, Artificial Sequence
  Synthetic
tttaggcttacaaactcagacagtggcgaatataacatagtcatattcac

SEQ ID NO: 5783 - DNA, 43 bp, Artificial Sequence
  Synthetic
aagactagtggtgacttggctcacatgttcataggtacaaaca

SEQ ID NO: 5784 - DNA, 45 bp, Artificial Sequence
  Synthetic
tgtacctctacaagttggtttttccgttagaacacaaccttcagg

SEQ ID NO: 5785 - DNA, 45 bp, Artificial Sequence
  Synthetic
acattgccaatgtggtactgttgcaatgcatgtttaaagcaacaa

SEQ ID NO: 5786 - DNA, 41 bp, Artificial Sequence
  Synthetic
gtcgcactgtgcagagtcatgattgctttagggttgtacaa

SEQ ID NO: 5787 - DNA, 39 bp, Artificial Sequence
  Synthetic
tcatgcatttcacactcctgcaacggtgctggtttcaat

SEQ ID NO: 5788 - DNA, 47 bp, Artificial Sequence
  Synthetic
agagaacattgcttttaacgttgttctaatggctactggtaattcac

SEQ ID NO: 5789 - DNA, 46 bp, Artificial Sequence
  Synthetic
ctgtttgtggttatacagactttgccagagtaaaacgttcgtatga

SEQ ID NO: 5790 - DNA, 40 bp, Artificial Sequence
  Synthetic
acaagactttttgcctcgcacacgcctatatccatgttca

SEQ ID NO: 5791 - DNA, 48 bp, Artificial Sequence
  Synthetic
ccaaggttcatgaggtcataattgagcattatctttacaccatagcat

SEQ ID NO: 5792 - DNA, 40 bp, Artificial Sequence
  Synthetic
tggctctgattatggtgttgcaaacaacaattgcgtcgtg

SEQ ID NO: 5793 - DNA, 50 bp, Artificial Sequence
  Synthetic
aactccactgttatgagtttgtcctgtgtttgcaattaaatttactcagg

SEQ ID NO: 5794 - DNA, 48 bp, Artificial Sequence
  Synthetic
aaatgtatttgctgttgagagtggtaggaaccaattattgaatgcaaa

SEQ ID NO: 5795 - DNA, 38 bp, Artificial Sequence
  Synthetic
ctgcttttgtgggtgcactaaatgtcctgtgcgtgaaa

SEQ ID NO: 5796 - DNA, 44 bp, Artificial Sequence
  Synthetic
acgtttattgtgttgtacgttgactaacagttaaagcacttgcc

SEQ ID NO: 5797 - DNA, 44 bp, Artificial Sequence
  Synthetic
ggcaccatctactctatcactcccagcttgctgataaacaacaa

SEQ ID NO: 5798 - DNA, 41 bp, Artificial Sequence
  Synthetic
agtgtttcagctatcgtcacagcctcaacctggaccgaagt

SEQ ID NO: 5799 - DNA, 38 bp, Artificial Sequence
  Synthetic
agcgtcatacctagcttgcccttctatggcactgcgac

SEQ ID NO: 5800 - DNA, 44 bp, Artificial Sequence
  Synthetic
atgttgcattgcagactgatgttgttaaaagatgcagcaagaat

SEQ ID NO: 5801 - DNA, 43 bp, Artificial Sequence
  Synthetic
ctgctttgaatgtattcgtttctcattgttgtgcaagctgtct

SEQ ID NO: 5802 - DNA, 48 bp, Artificial Sequence
  Synthetic
tcacatctcgcataatgtttgaaccgtgacattgcaattttcaatttg

SEQ ID NO: 5803 - DNA, 45 bp, Artificial Sequence
  Synthetic
acactgttcaaaaattgcaaactctagccactttaagtcgactaa

SEQ ID NO: 5804 - DNA, 46 bp, Artificial Sequence
  Synthetic
tacagtaatggctctaggtttgttcgcattgctaagcgattgatta

SEQ ID NO: 5805 - DNA, 43 bp, Artificial Sequence
  Synthetic
ttttccatacagcttggcactggtgtggttacattgaagacaa

SEQ ID NO: 5806 - DNA, 48 bp, Artificial Sequence
  Synthetic
aagctttgtttcacttgccatatgtatatgattggtaaatgtggtaca

SEQ ID NO: 5807 - DNA, 42 bp, Artificial Sequence
  Synthetic
aattgggattctaattgggcctttaacgagtgttgatacggc

SEQ ID NO: 5808 - DNA, 46 bp, Artificial Sequence
  Synthetic
acgagtaaaacacggtgatttttctctttcgttttctgtcatgttg

SEQ ID NO: 5809 - DNA, 39 bp, Artificial Sequence
  Synthetic
gaaagggcaaacgggtggatggtcctgtgccaagataat

SEQ ID NO: 5810 - DNA, 43 bp, Artificial Sequence
  Synthetic
tttgacaagcctcaggaaaaagatacgagaaggcttaggagta

SEQ ID NO: 5811 - DNA, 42 bp, Artificial Sequence
  Synthetic
ccagagaccttgaccacaacttttagctttaacaccattggc

SEQ ID NO: 5812 - DNA, 44 bp, Artificial Sequence
  Synthetic
aacttcacctgcaactgctgagcatgtttagtttacttcatcaa

SEQ ID NO: 5813 - DNA, 43 bp, Artificial Sequence
  Synthetic
actgaacctaggtgaacgctagtgcgatctttgattactccag

SEQ ID NO: 5814 - DNA, 46 bp, Artificial Sequence
  Synthetic
cttttagtatttggcttccgtccttaagtagccaaatacctaggac

SEQ ID NO: 5815 - DNA, 38 bp, Artificial Sequence
  Synthetic
ggaaatccccatgcactgttcacacttagcagctgact

SEQ ID NO: 5816 - DNA, 40 bp, Artificial Sequence
  Synthetic
aatggggaacaggagcagcagtgcaaaatgtccaggcact

SEQ ID NO: 5817 - DNA, 46 bp, Artificial Sequence
  Synthetic
agaagcaaactatgttaaaccaccaattgcaccataggagctaatt

SEQ ID NO: 5818 - DNA, 49 bp, Artificial Sequence
  Synthetic
aggacaatggataaaaaagtgtgggattaattagctttttccagtctcc

SEQ ID NO: 5819 - DNA, 46 bp, Artificial Sequence
  Synthetic
agtgctatatgacaacgaggaaaataggtcttctgaatcttggtaa

SEQ ID NO: 5820 - DNA, 43 bp, Artificial Sequence
  Synthetic
cactatccgtcgagacttgcagtgtgttagatggtccttttac

SEQ ID NO: 5821 - DNA, 40 bp, Artificial Sequence
  Synthetic
aaatggattgccagtgtggtgtacatacccagaggaaccc

SEQ ID NO: 5822 - DNA, 42 bp, Artificial Sequence
  Synthetic
gcttccattgttcccctggagggcagagggtctacaggtaca

SEQ ID NO: 5823 - DNA, 47 bp, Artificial Sequence
  Synthetic
cagccgcagaggttattattggtatccaaaggtatagattcaccaat

SEQ ID NO: 5824 - DNA, 40 bp, Artificial Sequence
  Synthetic
cgcctttgaggaggaggtaaccgcagcagcagcaagtgta

SEQ ID NO: 5825 - DNA, 42 bp, Artificial Sequence
  Synthetic
atctcctgccttggaaactgtgtttaccaccagtagaggtta

SEQ ID NO: 5826 - DNA, 45 bp, Artificial Sequence
  Synthetic
tccggtaaattatatttgccaccctcacgtaatcatctgtaggca

SEQ ID NO: 5827 - DNA, 41 bp, Artificial Sequence
  Synthetic
aatcctgagtctgaacgtttgggtagacccaacacctaacg

SEQ ID NO: 5828 - DNA, 48 bp, Artificial Sequence
  Synthetic
tggtgacaagattccagaacaaaatgactccccaggaataatatatgt

SEQ ID NO: 5829 - DNA, 40 bp, Artificial Sequence
  Synthetic
ccatctattggggatgcgtacatttccttagggggctctg

SEQ ID NO: 5830 - DNA, 41 bp, Artificial Sequence
  Synthetic
ggcagtttggcttcgaggtgcattgatggcctggaactgac

SEQ ID NO: 5831 - DNA, 36 bp, Artificial Sequence
  Synthetic
tcctgtcacaccccaccgttgaccctgtccgtgtgc

SEQ ID NO: 5832 - DNA, 41 bp, Artificial Sequence
  Synthetic
agcatgtgccccaatcttggagatccaggtgtagatgcagg

SEQ ID NO: 5833 - DNA, 40 bp, Artificial Sequence
  Synthetic
tccgactacctcccggagatgcgctcctccacctcaaaca

SEQ ID NO: 5834 - DNA, 39 bp, Artificial Sequence
  Synthetic
ccagagacggtgttgcgccggcaaaggatgaccaggttc

SEQ ID NO: 5835 - DNA, 38 bp, Artificial Sequence
  Synthetic
tgggtgcaaggctcgtgcgcaaaacatatggcatcccg

SEQ ID NO: 5836 - DNA, 42 bp, Artificial Sequence
  Synthetic
acacccagttatgcagtgccatgatagaattccaggaggttt

SEQ ID NO: 5837 - DNA, 37 bp, Artificial Sequence
  Synthetic
gtaggtgcctccagagcccctaagtttgggggcgccc

SEQ ID NO: 5838 - DNA, 38 bp, Artificial Sequence
  Synthetic
ccggtatcgggccagaggtggtggagtgttgggcttag

SEQ ID NO: 5839 - DNA, 40 bp, Artificial Sequence
  Synthetic
tccgtagaagggtcctcgtcctacccctgaaggtgaaccg

SEQ ID NO: 5840 - DNA, 35 bp, Artificial Sequence
  Synthetic
tgggccctcaagtccagccagagaagggccggtgg

SEQ ID NO: 5841 - DNA, 40 bp, Artificial Sequence
  Synthetic
gggccaagaacccagacgagtaccacctcctcttcttgct

SEQ ID NO: 5842 - DNA, 42 bp, Artificial Sequence
  Synthetic
aagccagacagcagccaattgtccactttataccaggggcag

SEQ ID NO: 5843 - DNA, 38 bp, Artificial Sequence
  Synthetic
accggtcgcccagtcctacggacccttctacggactcg

SEQ ID NO: 5844 - DNA, 40 bp, Artificial Sequence
  Synthetic
cccgtcttactgcccagcctggaaatgcataggagtgcga

SEQ ID NO: 5845 - DNA, 37 bp, Artificial Sequence
  Synthetic
cgagttacgctccttggagggccttcttccacggcgc

SEQ ID NO: 5846 - DNA, 35 bp, Artificial Sequence
  Synthetic
tgaccctcgcgccccatcttccacacccaccaccg

SEQ ID NO: 5847 - DNA, 38 bp, Artificial Sequence
  Synthetic
cacaaagctgtgtgacggtcccatcgagctcgctggcg

SEQ ID NO: 5848 - DNA, 37 bp, Artificial Sequence
  Synthetic
cggaagccctcgtttcggccatcactctcccaggccc

SEQ ID NO: 5849 - DNA, 40 bp, Artificial Sequence
  Synthetic
gtggattcgggggaagctggtccttctacgagcacgaaga

SEQ ID NO: 5850 - DNA, 37 bp, Artificial Sequence
  Synthetic
tcttgagctggcgcgggtaacgctgcaggatctggtc

SEQ ID NO: 5851 - DNA, 37 bp, Artificial Sequence
  Synthetic
gccagagccaacctcagctcaagtcgagggcatggcc

SEQ ID NO: 5852 - DNA, 39 bp, Artificial Sequence
  Synthetic
gcaccaccatcgtccacgagccgctatgctattgggaat

SEQ ID NO: 5853 - DNA, 38 bp, Artificial Sequence
  Synthetic
gaccggacggccacgttgtgagagtatggggcccctcc

SEQ ID NO: 5854 - DNA, 40 bp, Artificial Sequence
  Synthetic
cgtcgtccaggaccaaggggaaggaggagaacccgaggat

SEQ ID NO: 5855 - DNA, 37 bp, Artificial Sequence
  Synthetic
ccgaagggaggtgatggggaaaaaccatcccccggcc

SEQ ID NO: 5856 - DNA, 38 bp, Artificial Sequence
  Synthetic
gagggggaatcgtcggttagggtttgctcgcacggccc

SEQ ID NO: 5857 - DNA, 40 bp, Artificial Sequence
  Synthetic
aacgctcttttccttcaccgctcagatccctctggcgacg

SEQ ID NO: 5858 - DNA, 39 bp, Artificial Sequence
  Synthetic
gtggccaggcccaacgactacctccctcttttcactcct

SEQ ID NO: 5859 - DNA, 40 bp, Artificial Sequence
  Synthetic
agaaggggctgtggacataggctactgccggtccctgagg

SEQ ID NO: 5860 - DNA, 37 bp, Artificial Sequence
  Synthetic
gacacgccctggtcggactagagcctctccaggtccc

SEQ ID NO: 5861 - DNA, 34 bp, Artificial Sequence
  Synthetic
ccggcagccccttcatcctgcaggtcgcgccaaa

SEQ ID NO: 5862 - DNA, 36 bp, Artificial Sequence
  Synthetic
cgctgcctggtgaatgcgctcatccccctgcgtgtc

SEQ ID NO: 5863 - DNA, 36 bp, Artificial Sequence
  Synthetic
gctcggtagcagcggactcctaacggccggaatgcg

SEQ ID NO: 5864 - DNA, 38 bp, Artificial Sequence
  Synthetic
cctgccattcccagccactcccctcgcgagctgaacag

SEQ ID NO: 5865 - DNA, 40 bp, Artificial Sequence
  Synthetic
gagggccagatgcaggagcttgatagagggacatctgggc

SEQ ID NO: 5866 - DNA, 36 bp, Artificial Sequence
  Synthetic
ttcagctgctggacacgcagcgcacctacttcaccc

SEQ ID NO: 5867 - DNA, 35 bp, Artificial Sequence
  Synthetic
ggcgaggcgttgtggcacatgccatcctctcgcgg

SEQ ID NO: 5868 - DNA, 40 bp, Artificial Sequence
  Synthetic
gccaggtggattttgagctccgcctccagaatcagcggcg

SEQ ID NO: 5869 - DNA, 42 bp, Artificial Sequence
  Synthetic
ggcatagaggcctaggtccacaaacaagaccaccatcctgct

SEQ ID NO: 5870 - DNA, 42 bp, Artificial Sequence
  Synthetic
agcccaggaccagttctactccctggtcaaagaaggcgagaa

SEQ ID NO: 5871 - DNA, 44 bp, Artificial Sequence
  Synthetic
agatggggatatttaaaaggggcaggtttaacgagcagagaaga

SEQ ID NO: 5872 - DNA, 39 bp, Artificial Sequence
  Synthetic
acctacgcccttgccccctccgtcgctaaaaacacctgg

SEQ ID NO: 5873 - DNA, 40 bp, Artificial Sequence
  Synthetic
ctcccagtcagatgtccgtgctttgacctgtgcctcagca

SEQ ID NO: 5874 - DNA, 36 bp, Artificial Sequence
  Synthetic
gccaggatgccaccgaggttgaacaggccactcggg

SEQ ID NO: 5875 - DNA, 38 bp, Artificial Sequence
  Synthetic
acccggtccttgtgactgcttacgttgttgcatgccgc

SEQ ID NO: 5876 - DNA, 38 bp, Artificial Sequence
  Synthetic
atgacccaacgaaacagtcccgtcgcaggggcattggc

SEQ ID NO: 5877 - DNA, 39 bp, Artificial Sequence
  Synthetic
catggtcgggctcgggagagagtccggacagtttcatgc

SEQ ID NO: 5878 - DNA, 44 bp, Artificial Sequence
  Synthetic
ggggcattaactaagcttatgagctttcctccagaaagagtgac

SEQ ID NO: 5879 - DNA, 39 bp, Artificial Sequence
  Synthetic
ccagtttgccccatcgtttcccgcaaggatcccatgccc

SEQ ID NO: 5880 - DNA, 40 bp, Artificial Sequence
  Synthetic
cgaggatgaagcaacccccgggtagatggcgagactcttg

SEQ ID NO: 5881 - DNA, 40 bp, Artificial Sequence
  Synthetic
gctccgccacgtattccccgatctacgcttttagccacgg

SEQ ID NO: 5882 - DNA, 38 bp, Artificial Sequence
  Synthetic
tctctcaggacctcaaaggcgggcgaaccaagcccagg

SEQ ID NO: 5883 - DNA, 39 bp, Artificial Sequence
  Synthetic
atgtggcggctcttgaacccagacactccgagcctactg

SEQ ID NO: 5884 - DNA, 37 bp, Artificial Sequence
  Synthetic
cccggccatctttgccggattctggtagaggcgctgc

SEQ ID NO: 5885 - DNA, 38 bp, Artificial Sequence
  Synthetic
ggggacacggagcctgaccaaacttccagcaccaggcg

SEQ ID NO: 5886 - DNA, 40 bp, Artificial Sequence
  Synthetic
gatctcgtcccagttttgcggctcgacctggtcctcggag

SEQ ID NO: 5887 - DNA, 35 bp, Artificial Sequence
  Synthetic
gcccccggccatactccaatcttgagccggctggg

SEQ ID NO: 5888 - DNA, 39 bp, Artificial Sequence
  Synthetic
gcccatcatcccccgagcatcttccagcctctctttcca

SEQ ID NO: 5889 - DNA, 40 bp, Artificial Sequence
  Synthetic
catcgcaatcatgaagtcctccacaagcgttttgacccac

SEQ ID NO: 5890 - DNA, 38 bp, Artificial Sequence
  Synthetic
ggaccacgggtgtcaccagcgacctgcttctggacgcc

SEQ ID NO: 5891 - DNA, 41 bp, Artificial Sequence
  Synthetic
aatcccatgtcagggttggggttggtatcatgcacctcgct

SEQ ID NO: 5892 - DNA, 36 bp, Artificial Sequence
  Synthetic
cccgtgccgcagcgtaaacttctacggccccaggtc

SEQ ID NO: 5893 - DNA, 38 bp, Artificial Sequence
  Synthetic
gtgacgatgccatcaaccagctcggctactcgggggtt

SEQ ID NO: 5894 - DNA, 38 bp, Artificial Sequence
  Synthetic
aaacaccccccccactggcctcaagggggtcagtacct

SEQ ID NO: 5895 - DNA, 37 bp, Artificial Sequence
  Synthetic
ggggcacctaaagacccccctttcgctcttggccggg

SEQ ID NO: 5896 - DNA, 41 bp, Artificial Sequence
  Synthetic
tgtcttccacaccatccacagcacattttccccaggcagtc

SEQ ID NO: 5897 - DNA, 38 bp, Artificial Sequence
  Synthetic
cggagccccaagccacctttgtcgcccgatgtcgtaaa

SEQ ID NO: 5898 - DNA, 39 bp, Artificial Sequence
  Synthetic
tcttcatacaggcccgcaatttcactatctgctgctgac

SEQ ID NO: 5899 - DNA, 40 bp, Artificial Sequence
  Synthetic
cctggtccagcgttgcctcccgatttgacctcacacgaga

SEQ ID NO: 5900 - DNA, 40 bp, Artificial Sequence
  Synthetic
ttggtatagggcaaggttgggcgtggtgctacgcgagttg

SEQ ID NO: 5901 - DNA, 39 bp, Artificial Sequence
  Synthetic
ccttggggtagccgacggtgggtcacctgactactgaga

SEQ ID NO: 5902 - DNA, 41 bp, Artificial Sequence
  Synthetic
tgggcagcatgcttggataacttctcttcgaacacctggcc

SEQ ID NO: 5903 - DNA, 39 bp, Artificial Sequence
  Synthetic
ccgaaagggccaggtcggagcagcctatttttgagcacc

SEQ ID NO: 5904 - DNA, 38 bp, Artificial Sequence
  Synthetic
atttccgtcagccagggtgaccatgtgtgtgggcgcag

SEQ ID NO: 5905 - DNA, 37 bp, Artificial Sequence
  Synthetic
tcacctggatcccctcaccgcgtgagtggcaagggct

SEQ ID NO: 5906 - DNA, 41 bp, Artificial Sequence
  Synthetic
ggatcgattggaaaagggcccagcggcctgtttctaaacgt

SEQ ID NO: 5907 - DNA, 39 bp, Artificial Sequence
  Synthetic
gccagcaggtaaggcaggcccagatcttcctcagtggct

SEQ ID NO: 5908 - DNA, 39 bp, Artificial Sequence
  Synthetic
ctagattcagcgatcccccggtacgagcgggatagcagg

SEQ ID NO: 5909 - DNA, 36 bp, Artificial Sequence
  Synthetic
gagcttgcggctgagctcctccgtgaaggcagggtc

SEQ ID NO: 5910 - DNA, 36 bp, Artificial Sequence
  Synthetic
ctccagggagatgggggccattgccgatgccctggc

SEQ ID NO: 5911 - DNA, 39 bp, Artificial Sequence
  Synthetic
cagctgctgcttgtcgaggatgaagaagctgctggcggc

SEQ ID NO: 5912 - DNA, 39 bp, Artificial Sequence
  Synthetic
acacggcgtacatgtcgatgggtcttgcgggccaacacc

SEQ ID NO: 5913 - DNA, 36 bp, Artificial Sequence
  Synthetic
cccctgtcgaccagaggacgacggccaccaacgagg

SEQ ID NO: 5914 - DNA, 36 bp, Artificial Sequence
  Synthetic
gcaggcacagggtctcggtgccaagctgcagtcctg

SEQ ID NO: 5915 - DNA, 37 bp, Artificial Sequence
  Synthetic
ccagcagggcacagaggtgacgctttcggggcgtaag

SEQ ID NO: 5916 - DNA, 41 bp, Artificial Sequence
  Synthetic
ttccttcagcgtctatgcccagactggcagctgaaccagaa

SEQ ID NO: 5917 - DNA, 36 bp, Artificial Sequence
  Synthetic
cgggcctctggaccctcacaccggccagcctcaact

SEQ ID NO: 5918 - DNA, 39 bp, Artificial Sequence
  Synthetic
agatgtagccgcacggaccctgcacagactagcgaggat

SEQ ID NO: 5919 - DNA, 37 bp, Artificial Sequence
  Synthetic
tgagccggcagaggaccagcggtgttcacccgggatg

SEQ ID NO: 5920 - DNA, 38 bp, Artificial Sequence
  Synthetic
cgggtgaggcggctaagaggatatccgccgtctgctgc

SEQ ID NO: 5921 - DNA, 44 bp, Artificial Sequence
  Synthetic
ttcgagtatccttctttgatgttcgctgctaactcttgcaaaca

SEQ ID NO: 5922 - DNA, 44 bp, Artificial Sequence
  Synthetic
cttagtgaagagtctttgtcaccactctataagggctatgctcc

SEQ ID NO: 5923 - DNA, 42 bp, Artificial Sequence
  Synthetic
cccgcgattggaagctgtataaacaatcgtcttttgctttgt

SEQ ID NO: 5924 - DNA, 46 bp, Artificial Sequence
  Synthetic
ttcctttaagttcggtgattatccagctgactcatgactaagcata

SEQ ID NO: 5925 - DNA, 40 bp, Artificial Sequence
  Synthetic
tgtcccccaaggaagagctacagtgcatcgaaacgaactg

SEQ ID NO: 5926 - DNA, 43 bp, Artificial Sequence
  Synthetic
ttccacttctcttagttctcaaaggggaggaactgactgatcc

SEQ ID NO: 5927 - DNA, 43 bp, Artificial Sequence
  Synthetic
tgcaagcaggcccatagatgggggtaatttctgatagaggtac

SEQ ID NO: 5928 - DNA, 43 bp, Artificial Sequence
  Synthetic
acacctttagacagagttcagagagctgaatgtgacgcccata

SEQ ID NO: 5929 - DNA, 45 bp, Artificial Sequence
  Synthetic
cagaacggttgcttatggttggtttcatcgtctacagtatccatt

SEQ ID NO: 5930 - DNA, 43 bp, Artificial Sequence
  Synthetic
tgagtcttttcaacaagacagagctggccaaagagctgtttca

SEQ ID NO: 5931 - DNA, 49 bp, Artificial Sequence
  Synthetic
gatgttattccagcagaaaagcctgtcatatctatttcccaaaatgtgt

SEQ ID NO: 5932 - DNA, 44 bp, Artificial Sequence
  Synthetic
ctgaagccatttgcacttatcttctaaacggttggtgaatgtcc

SEQ ID NO: 5933 - DNA, 41 bp, Artificial Sequence
  Synthetic
ttcaaccgacactgttgacacaggttaacagagtgtgtcac

SEQ ID NO: 5934 - DNA, 43 bp, Artificial Sequence
  Synthetic
gctgagggagcaattgagctttctttgggaaatatttcgaatc

SEQ ID NO: 5935 - DNA, 48 bp, Artificial Sequence
  Synthetic
ccttgtactgtggggtattcatcattctgatagatattctgttgatcc

SEQ ID NO: 5936 - DNA, 41 bp, Artificial Sequence
  Synthetic
ttcgcactgagtagaggctttgttacactcatgcattgatg

SEQ ID NO: 5937 - DNA, 41 bp, Artificial Sequence
  Synthetic
ttgaagggggatggactggaccctgttcattctgatgatga

SEQ ID NO: 5938 - DNA, 43 bp, Artificial Sequence
  Synthetic
ctatcagattctggcgatctactcagaaactgattgcccccag

SEQ ID NO: 5939 - DNA, 44 bp, Artificial Sequence
  Synthetic
aggtggttatttgatcgttgggagcggtcatatgaaaatgtgta

SEQ ID NO: 5940 - DNA, 43 bp, Artificial Sequence
  Synthetic
atggactctgtagtagctgtgctcttttccaactacagcaaat

SEQ ID NO: 5941 - DNA, 41 bp, Artificial Sequence
  Synthetic
attgtgcagacactgtgggtccacctctggtatagtagctt

SEQ ID NO: 5942 - DNA, 45 bp, Artificial Sequence
  Synthetic
gaggcagacttcgccatgagctacagcattctttaggatctaatt

SEQ ID NO: 5943 - DNA, 40 bp, Artificial Sequence
  Synthetic
aaactcccgcgaactgttttggcaattgtgtttgttgctc

SEQ ID NO: 5944 - DNA, 41 bp, Artificial Sequence
  Synthetic
ctcagggaactaagggcttggacagctttcacattgctatg

SEQ ID NO: 5945 - DNA, 44 bp, Artificial Sequence
  Synthetic
aacgtaggcaaaagtagagaaactacttcagatacttgcagcaa

SEQ ID NO: 5946 - DNA, 45 bp, Artificial Sequence
  Synthetic
ttgatgaagctaccattgcatatcagtaaaaaagccctggcatta

SEQ ID NO: 5947 - DNA, 42 bp, Artificial Sequence
  Synthetic
aaaaggctttggacacagttagagctgagagtttccatcctc

SEQ ID NO: 5948 - DNA, 43 bp, Artificial Sequence
  Synthetic
taccaacctgtacctccgttggcaatagtaaaaccatgccaat

SEQ ID NO: 5949 - DNA, 40 bp, Artificial Sequence
  Synthetic
cgccaacaacatcgcgactcgggatgatgtcctggatcct

SEQ ID NO: 5950 - DNA, 37 bp, Artificial Sequence
  Synthetic
gacaggcgaaggggaaggggaggagtgggagcgggaa

SEQ ID NO: 5951 - DNA, 40 bp, Artificial Sequence
  Synthetic
agtactacgtggtcatgggtagaatcattcgcgctcttcc

SEQ ID NO: 5952 - DNA, 41 bp, Artificial Sequence
  Synthetic
cgtactaaacgtgcctctgttacgtggacatgtaccagcag

SEQ ID NO: 5953 - DNA, 41 bp, Artificial Sequence
  Synthetic
agttcgccctggggtgataccgggtcaattggtctgactgt

SEQ ID NO: 5954 - DNA, 40 bp, Artificial Sequence
  Synthetic
ggctcgtctgccattttagaggattgagttcgtgcaacac

SEQ ID NO: 5955 - DNA, 41 bp, Artificial Sequence
  Synthetic
acagaaacacctcagggatatgttacgtgtgcggattgttg

SEQ ID NO: 5956 - DNA, 45 bp, Artificial Sequence
  Synthetic
acctgatggtttggaggtgggaattaaaatccacatcttcaacag

SEQ ID NO: 5957 - DNA, 46 bp, Artificial Sequence
  Synthetic
gtgggtcatccatattatgatgtccagacactttagggacttcaat

SEQ ID NO: 5958 - DNA, 45 bp, Artificial Sequence
  Synthetic
ggttagagacacagaaaactctagcgatgtgttttgcctgtcatc

SEQ ID NO: 5959 - DNA, 49 bp, Artificial Sequence
  Synthetic
gtgatcaacaacaacgaacaatagcgttactaatgacccacttactgta

SEQ ID NO: 5960 - DNA, 40 bp, Artificial Sequence
  Synthetic
cttctgtatgcctcttggggacttggattttcgtgtcctc

SEQ ID NO: 5961 - DNA, 41 bp, Artificial Sequence
  Synthetic
cctgagctcacctatgtccggtcccaggatatattcgtctc

SEQ ID NO: 5962 - DNA, 42 bp, Artificial Sequence
  Synthetic
ggagatcccaaaagattttcaacgtgtcctatgagcgctgat

SEQ ID NO: 5963 - DNA, 42 bp, Artificial Sequence
  Synthetic
agtctgctcctaagcctgaaaagatttcttcttacccttggg

SEQ ID NO: 5964 - DNA, 44 bp, Artificial Sequence
  Synthetic
cttccctgaaggttgagacaatttgaatgctcaaatcaaaggcg

SEQ ID NO: 5965 - DNA, 46 bp, Artificial Sequence
  Synthetic
aaatccatctacgtgcatttccttactctgaaatggattcttgatg

SEQ ID NO: 5966 - DNA, 46 bp, Artificial Sequence
  Synthetic
aacggtttcaataaaaagctgtgctagacatgaagtatgcagagac

SEQ ID NO: 5967 - DNA, 40 bp, Artificial Sequence
  Synthetic
gtacagctcacagttggcgtaagcgatacgactatctagc

SEQ ID NO: 5968 - DNA, 45 bp, Artificial Sequence
  Synthetic
caaggcagcgtggaattatacaaccatattcaaagcctaaaacgg

SEQ ID NO: 5969 - DNA, 45 bp, Artificial Sequence
  Synthetic
gatctttatgctctgggggttgcttttttctggatcaaaacgttc

SEQ ID NO: 5970 - DNA, 47 bp, Artificial Sequence
  Synthetic
tctgtttctgtctataaccgaagtcactctctccatgatctttcaag

SEQ ID NO: 5971 - DNA, 42 bp, Artificial Sequence
  Synthetic
gctgttgccgagggaagaaacgattcttttctcgttcaatga

SEQ ID NO: 5972 - DNA, 45 bp, Artificial Sequence
  Synthetic
ttgcctgaatgagagtggacttgattatctaattcaaacagctcc

SEQ ID NO: 5973 - DNA, 43 bp, Artificial Sequence
  Synthetic
tcaaacagcatgatgtccgatagcaggcgttatggttatgcta

SEQ ID NO: 5974 - DNA, 45 bp, Artificial Sequence
  Synthetic
ataccctgtcagaaatacacgagcacaaaacaatcacaacagctc

SEQ ID NO: 5975 - DNA, 40 bp, Artificial Sequence
  Synthetic
gcagactttctgggggaggaaagagagctcagatctgtgt

SEQ ID NO: 5976 - DNA, 41 bp, Artificial Sequence
  Synthetic
tgatgagttgcgtaattggatgcacaggagacaatggcaac

SEQ ID NO: 5977 - DNA, 39 bp, Artificial Sequence
  Synthetic
tgcttgcgaaaggtgtgtacccattattccacccccatc

SEQ ID NO: 5978 - DNA, 41 bp, Artificial Sequence
  Synthetic
aaaggagaacctcgagccttgttggtaaaggatgtctgatg

SEQ ID NO: 5979 - DNA, 44 bp, Artificial Sequence
  Synthetic
ttagctcccaggttacgtcatgtatgagactgatagatgtttgt

SEQ ID NO: 5980 - DNA, 50 bp, Artificial Sequence
  Synthetic
tatcgatgtttctcgcttaacagaactctagatccttaaatagagcattt

SEQ ID NO: 5981 - DNA, 43 bp, Artificial Sequence
  Synthetic
ccgctttcctgtgtgtaatcatctctgctatcgaaaaggtttc

SEQ ID NO: 5982 - DNA, 44 bp, Artificial Sequence
  Synthetic
gatcttcagttacaacttgacagctgagttcgaggtgtttctct

SEQ ID NO: 5983 - DNA, 42 bp, Artificial Sequence
  Synthetic
aacgacctcggtacaaaaaccctggtttatgaagtggtggat

SEQ ID NO: 5984 - DNA, 42 bp, Artificial Sequence
  Synthetic
gcaaaacatctccttcctgcattgttgcttataagaaggctg

SEQ ID NO: 5985 - DNA, 41 bp, Artificial Sequence
  Synthetic
gaagctgacttcgccgatcttacttctcccagactgttctt

SEQ ID NO: 5986 - DNA, 42 bp, Artificial Sequence
  Synthetic
cgtatccttgccggtattcactcgatattacggagacaaaga

SEQ ID NO: 5987 - DNA, 43 bp, Artificial Sequence
  Synthetic
tgcacaagctttactgaacactacgaactcatagactagggat

SEQ ID NO: 5988 - DNA, 41 bp, Artificial Sequence
  Synthetic
cactgttcgcggttacaaacccttgtggttcagtaggagaa

SEQ ID NO: 5989 - DNA, 38 bp, Artificial Sequence
  Synthetic
tctagggatttggcctccacgaacccctacatccatgc

SEQ ID NO: 5990 - DNA, 41 bp, Artificial Sequence
  Synthetic
aggtttagggcttcttcctgcataccataaacagcctcagt

SEQ ID NO: 5991 - DNA, 46 bp, Artificial Sequence
  Synthetic
caagtagcgaaaaatccaacagcccacaaaccaaaaccttctatag

SEQ ID NO: 5992 - DNA, 38 bp, Artificial Sequence
  Synthetic
ctgctcagctcttgcggttataaccgcgaatcccatag

SEQ ID NO: 5993 - DNA, 43 bp, Artificial Sequence
  Synthetic
tttgtcacgaatatagccactgatttgggttcttctgagctag

SEQ ID NO: 5994 - DNA, 48 bp, Artificial Sequence
  Synthetic
agatcctctaaatttgaacctccgcatactaagttgtccattgttgat

SEQ ID NO: 5995 - DNA, 44 bp, Artificial Sequence
  Synthetic
tccagacatagcaacaatgacagaaacttcaataaacgaaagcg

SEQ ID NO: 5996 - DNA, 45 bp, Artificial Sequence
  Synthetic
tgatggttacttcctcaaaacaagaacggtaaaagaaggtcgttt

SEQ ID NO: 5997 - DNA, 40 bp, Artificial Sequence
  Synthetic
tcagaaccctgacggattgtctgagagagattgtggtact

SEQ ID NO: 5998 - DNA, 43 bp, Artificial Sequence
  Synthetic
ggctgcatcgtctcgagaacttaaaaaacacttgttggagaga

SEQ ID NO: 5999 - DNA, 45 bp, Artificial Sequence
  Synthetic
tctccagcagcaaaaactaaaattctggttcggtttctttacctc

SEQ ID NO: 6000 - DNA, 42 bp, Artificial Sequence
  Synthetic
tgtacggaagaagaattgaggtctaagaagaaggtggacgac

SEQ ID NO: 6001 - DNA, 41 bp, Artificial Sequence
  Synthetic
caacgttctctcctgcacgagttactggggttgaaatgttc

SEQ ID NO: 6002 - DNA, 44 bp, Artificial Sequence
  Synthetic
caagtagtcattgctatgctcgaatagagttgtacaagcgattg

SEQ ID NO: 6003 - DNA, 41 bp, Artificial Sequence
  Synthetic
agccgataatgctcgctcactcctccaactaaaagaccatt

SEQ ID NO: 6004 - DNA, 48 bp, Artificial Sequence
  Synthetic
gtccttcctgtttagggaaacgacgttttatttttatagcggacttct

SEQ ID NO: 6005 - DNA, 41 bp, Artificial Sequence
  Synthetic
cattctgtggcttctgcattagataaggatggccgattcgt

SEQ ID NO: 6006 - DNA, 46 bp, Artificial Sequence
  Synthetic
tacgatccaaattgagaaccttgcctgatacaccagaaatagtcga

SEQ ID NO: 6007 - DNA, 43 bp, Artificial Sequence
  Synthetic
tcttactagctccttgtcgagaacaggacttggagaagctttc

SEQ ID NO: 6008 - DNA, 38 bp, Artificial Sequence
  Synthetic
aatgccgctcgagtcaatgtagttcacgagcagtttgc

SEQ ID NO: 6009 - DNA, 38 bp, Artificial Sequence
  Synthetic
cgacaacccacgatcttgctgcgctcatttcttggttg

SEQ ID NO: 6010 - DNA, 41 bp, Artificial Sequence
  Synthetic
tcgctcccactaatgcaactcttgaagcttttggtacagta

SEQ ID NO: 6011 - DNA, 42 bp, Artificial Sequence
  Synthetic
aaacagtgaggacgacaaagtaaagtcggagatactgggagg

SEQ ID NO: 6012 - DNA, 42 bp, Artificial Sequence
  Synthetic
gcaatcgctaaaacaatcgattgcagcaattgtggctatcgc

SEQ ID NO: 6013 - DNA, 47 bp, Artificial Sequence
  Synthetic
gtaggtaaaacctcgtttggtcaacatctgtatcaaaaaaaggcagc

SEQ ID NO: 6014 - DNA, 43 bp, Artificial Sequence
  Synthetic
caggctgcacaccatcactacttttttatggttttgtctgtgc

SEQ ID NO: 6015 - DNA, 43 bp, Artificial Sequence
  Synthetic
ggaactgaccctataaggaatgcgtaacgacatcattgcatga

SEQ ID NO: 6016 - DNA, 41 bp, Artificial Sequence
  Synthetic
gacaaccatttttgctttgctgtgggatttggcgaagaaga

SEQ ID NO: 6017 - DNA, 42 bp, Artificial Sequence
  Synthetic
cgatcaaatcgcaaacaaacacttgatcgtgtgtgtcgtgat

SEQ ID NO: 6018 - DNA, 44 bp, Artificial Sequence
  Synthetic
gcgaacgtttacaaatggctcccaaaattttcgcaaaagcatac

SEQ ID NO: 6019 - DNA, 50 bp, Artificial Sequence
  Synthetic
atctgtgcagcttaaaacctaatgtctttagagaaagtcataaatacgga

SEQ ID NO: 6020 - DNA, 40 bp, Artificial Sequence
  Synthetic
ggcttctgtcaccttgctcagctttagttgtggcttcaac

SEQ ID NO: 6021 - DNA, 40 bp, Artificial Sequence
  Synthetic
ccgcacaagaaagccctcttggaaagactcctttggtgtt

SEQ ID NO: 6022 - DNA, 46 bp, Artificial Sequence
  Synthetic
ctgtcaattctacattatgtgcagcgatcttttttggagcatatgc

SEQ ID NO: 6023 - DNA, 46 bp, Artificial Sequence
  Synthetic
gaagctggttctacaacagaaactacagtttctccatagatagcac

SEQ ID NO: 6024 - DNA, 41 bp, Artificial Sequence
  Synthetic
gctcaaagtccaaaaaaacgcatcttggagcatcttgtgga

SEQ ID NO: 6025 - DNA, 44 bp, Artificial Sequence
  Synthetic
gcctgaccccagaaaccatttcttcttcattaaaatcagcaacg

SEQ ID NO: 6026 - DNA, 42 bp, Artificial Sequence
  Synthetic
tcgtttccttttccaggttcattggtcgaggacaatatgctc

SEQ ID NO: 6027 - DNA, 44 bp, Artificial Sequence
  Synthetic
ttaggtcctgtagctttagactcatcaaagagactcccgtagac

SEQ ID NO: 6028 - DNA, 41 bp, Artificial Sequence
  Synthetic
aaggcactattcgttgcaccaaagagttcagttccttggat

SEQ ID NO: 6029 - DNA, 41 bp, Artificial Sequence
  Synthetic
aatcacaatgcgctcccatttagtgcatgagaatcgtcttg

SEQ ID NO: 6030 - DNA, 42 bp, Artificial Sequence
  Synthetic
agaagcaaggatgaggttttctgtgttggagcacacatcacg

SEQ ID NO: 6031 - DNA, 42 bp, Artificial Sequence
  Synthetic
gcccctaaaacccgacaaagagaacgtccctaatattgaaga

SEQ ID NO: 6032 - DNA, 42 bp, Artificial Sequence
  Synthetic
aaaagcatctaggagctccccaaaggactggatatgaagtgg

SEQ ID NO: 6033 - DNA, 39 bp, Artificial Sequence
  Synthetic
cacaggagcaaccacgaagagtaaaagagtgccttggtg

SEQ ID NO: 6034 - DNA, 49 bp, Artificial Sequence
  Synthetic
acctctctgtaagcaaatactgacaggttacttccggatattaatgatc

SEQ ID NO: 6035 - DNA, 41 bp, Artificial Sequence
  Synthetic
cgaagcggtgaatgcatgaaggatgagatgttgaagagagc

SEQ ID NO: 6036 - DNA, 48 bp, Artificial Sequence
  Synthetic
actggaaaagctacaatggattgtagaagagtaagaagttcattgctt

SEQ ID NO: 6037 - DNA, 40 bp, Artificial Sequence
  Synthetic
tctgccatcaaagcatttcgaatgggaatgacgagtgatt

SEQ ID NO: 6038 - DNA, 38 bp, Artificial Sequence
  Synthetic
aatttggcggctggtaatcctgacttcggcgaatttgg

SEQ ID NO: 6039 - DNA, 42 bp, Artificial Sequence
  Synthetic
ttccgaccgagcaatctcagtttgggagtaaaagttcaggtt

SEQ ID NO: 6040 - DNA, 45 bp, Artificial Sequence
  Synthetic
caacacttttttaaggcatcttccagtagtgttgttgaagctcaa

SEQ ID NO: 6041 - DNA, 45 bp, Artificial Sequence
  Synthetic
ccaaagcgttcatatctcggactaagaaaaggtccttttgttgat

SEQ ID NO: 6042 - DNA, 40 bp, Artificial Sequence
  Synthetic
aagcaaccttgacgggcattgccattccactaaaaagcct

SEQ ID NO: 6043 - DNA, 40 bp, Artificial Sequence
  Synthetic
aaaccggcgtatttcttcctgaaaacaattcccctgtgga

SEQ ID NO: 6044 - DNA, 46 bp, Artificial Sequence
  Synthetic
agaccctcttacgctggttaacctttggagataataatagaggatt

SEQ ID NO: 6045 - DNA, 41 bp, Artificial Sequence
  Synthetic
tctttgtcatcgatttggtcacggaggggaaagcatcatca

SEQ ID NO: 6046 - DNA, 42 bp, Artificial Sequence
  Synthetic
cgtccactaccaagacctagatacgccaatcaaaatctcctt

SEQ ID NO: 6047 - DNA, 42 bp, Artificial Sequence
  Synthetic
tagctctgcagattttgtagcaccctccgggatagtcttagg

SEQ ID NO: 6048 - DNA, 45 bp, Artificial Sequence
  Synthetic
agctaaaccaacccgaagaatctgttcttacacatatcgatcgta

SEQ ID NO: 6049 - DNA, 47 bp, Artificial Sequence
  Synthetic
tctcaaaatccctttaaagcagagcatacgcggaaatttctacttct

SEQ ID NO: 6050 - DNA, 45 bp, Artificial Sequence
  Synthetic
atctggaaattcaagaaagtcgtggggtaagggatcaggaattcc

SEQ ID NO: 6051 - DNA, 42 bp, Artificial Sequence
  Synthetic
ctgaaggaatcgctcaaggacgtgttccaatttggtttggtt

SEQ ID NO: 6052 - DNA, 39 bp, Artificial Sequence
  Synthetic
tggaggggccattccgtaattgttgttcgagatccttgg

SEQ ID NO: 6053 - DNA, 39 bp, Artificial Sequence
  Synthetic
aacctgggagacaagatgcaccattggagataaaagcgc

SEQ ID NO: 6054 - DNA, 44 bp, Artificial Sequence
  Synthetic
caccctaatatagttccgctgcctcttgatacagtttgaaagct

SEQ ID NO: 6055 - DNA, 42 bp, Artificial Sequence
  Synthetic
cagatgcttttacgacttgcaaccaagatattggtgtgcggt

SEQ ID NO: 6056 - DNA, 40 bp, Artificial Sequence
  Synthetic
aagttcccatgatcgcctcaacaggaaactctaacccttt

SEQ ID NO: 6057 - DNA, 40 bp, Artificial Sequence
  Synthetic
gagcttgtcccaattgctccgtcaaaaagaaacggatcgt

SEQ ID NO: 6058 - DNA, 46 bp, Artificial Sequence
  Synthetic
tatcagcgatgcagtttctacagcagaagatacccacaataaaagc

SEQ ID NO: 6059 - DNA, 38 bp, Artificial Sequence
  Synthetic
tgttccccgtacaagcaagtttctgccccatatctgca

SEQ ID NO: 6060 - DNA, 43 bp, Artificial Sequence
  Synthetic
ctgctcagctgttaaaaagtcaaatggtaagtgttcttcccac

SEQ ID NO: 6061 - DNA, 38 bp, Artificial Sequence
  Synthetic
ccccaggcaaagcaaaaagcaagctcactgttgctgtt

SEQ ID NO: 6062 - DNA, 45 bp, Artificial Sequence
  Synthetic
ggtaactgttgtattcgcacgggcgatatatcaatgaggtaggac

SEQ ID NO: 6063 - DNA, 46 bp, Artificial Sequence
  Synthetic
gatcctaacgtgtctcctattgctgtagtaggtatctgaatctgtg

SEQ ID NO: 6064 - DNA, 43 bp, Artificial Sequence
  Synthetic
ttttcctgtgttttttcgatcagcggagcaactcttactgacg

SEQ ID NO: 6065 - DNA, 43 bp, Artificial Sequence
  Synthetic
gggagttggagaaatcatgggaccctcaaactcaacaagaact

SEQ ID NO: 6066 - DNA, 42 bp, Artificial Sequence
  Synthetic
ttcgagcccttttgaagagtgatcgcaatctaatgacgagaa

SEQ ID NO: 6067 - DNA, 42 bp, Artificial Sequence
  Synthetic
tcagagcctgtggatagtcttgcagcgtattccattccattt

SEQ ID NO: 6068 - DNA, 43 bp, Artificial Sequence
  Synthetic
agggaaatcagaaaatcccgcaaaaccttcctcttaagtctcc

SEQ ID NO: 6069 - DNA, 43 bp, Artificial Sequence
  Synthetic
agcgtacatccatgatttattgtgttatcgcggctatcgtctt

SEQ ID NO: 6070 - DNA, 39 bp, Artificial Sequence
  Synthetic
cgcgctccgttaagatgattcaaggccctattgacaaag

SEQ ID NO: 6071 - DNA, 43 bp, Artificial Sequence
  Synthetic
ccttcggcaacaaaaatcgttgcaaaaattctccaacggaaag

SEQ ID NO: 6072 - DNA, 40 bp, Artificial Sequence
  Synthetic
ttaacttcaacaagcgctgcaacaaaagagggcgtgattg

SEQ ID NO: 6073 - DNA, 44 bp, Artificial Sequence
  Synthetic
caggacgcaccggagataaaattaaagatgctgttattgatgcg

SEQ ID NO: 6074 - DNA, 38 bp, Artificial Sequence
  Synthetic
gtagtgccagctcgggataaacccgtcactaaacactg

SEQ ID NO: 6075 - DNA, 40 bp, Artificial Sequence
  Synthetic
tcctgcagccagaccatgtaatgtctccggaaaagacaac

SEQ ID NO: 6076 - DNA, 42 bp, Artificial Sequence
  Synthetic
cttaatctttctgaatggggcgttccagtaggagcatacagc

SEQ ID NO: 6077 - DNA, 40 bp, Artificial Sequence
  Synthetic
ttacgaaggccatacggtatctaaattggctattcgtgcg

SEQ ID NO: 6078 - DNA, 44 bp, Artificial Sequence
  Synthetic
gtgcggggagaactcttgttggttctcgtatttaaaatcgattc

SEQ ID NO: 6079 - DNA, 46 bp, Artificial Sequence
  Synthetic
caacgaaatacgcttgatacccattggaagttgcaaaaaagattgt

SEQ ID NO: 6080 - DNA, 42 bp, Artificial Sequence
  Synthetic
aatgtcgaggctttaaacgttttcatatcgcaaacgccttgt

SEQ ID NO: 6081 - DNA, 40 bp, Artificial Sequence
  Synthetic
cgtctgcgtaagatgcatcttaacgtcttccctaatccca

SEQ ID NO: 6082 - DNA, 40 bp, Artificial Sequence
  Synthetic
gcgtaatggtgtgatgcctgctgcttgctctctaaactct

SEQ ID NO: 6083 - DNA, 44 bp, Artificial Sequence
  Synthetic
tccgtaacttctgattcagaattgaccttcccatgaatgcctat

SEQ ID NO: 6084 - DNA, 38 bp, Artificial Sequence
  Synthetic
catggcaaaggttcgcctcacacactttcttcgcgaag

SEQ ID NO: 6085 - DNA, 41 bp, Artificial Sequence
  Synthetic
aggcgattctggaccaaaatcgaacgcttactacaggagat

SEQ ID NO: 6086 - DNA, 41 bp, Artificial Sequence
  Synthetic
ttgccttaggagaaaagggaaggacaatcacacatcccacc

SEQ ID NO: 6087 - DNA, 39 bp, Artificial Sequence
  Synthetic
agcttcggaaggagacaagttcgatccgagatggcttta

SEQ ID NO: 6088 - DNA, 42 bp, Artificial Sequence
  Synthetic
agcaattacgggatgaacatctggcaagctttgaatacggtg

SEQ ID NO: 6089 - DNA, 45 bp, Artificial Sequence
  Synthetic
gttcacctctttcaacggtatatgagtatggctaaggagattcgc

SEQ ID NO: 6090 - DNA, 43 bp, Artificial Sequence
  Synthetic
ctccacaaatcagccgatccctatcgatcagatttatgcagat

SEQ ID NO: 6091 - DNA, 41 bp, Artificial Sequence
  Synthetic
tgctcgctgcaaattccgaaagttttgcgttagtagaagct

SEQ ID NO: 6092 - DNA, 44 bp, Artificial Sequence
  Synthetic
aacagctcaccaatcgagaatcagatgtcggttttatgcttagt

SEQ ID NO: 6093 - DNA, 40 bp, Artificial Sequence
  Synthetic
catgtgcggcaagccttttggtgtttgcctctctacaaga

SEQ ID NO: 6094 - DNA, 42 bp, Artificial Sequence
  Synthetic
caagagcacaatggtatccgagctagcattgcatcaggacta

SEQ ID NO: 6095 - DNA, 43 bp, Artificial Sequence
  Synthetic
tggaagaggttcttttatgaatcgttagcactgcattcacagc

SEQ ID NO: 6096 - DNA, 45 bp, Artificial Sequence
  Synthetic
tatagggagcgaatgttgctgtttgctaagaaactatctctctgg

SEQ ID NO: 6097 - DNA, 38 bp, Artificial Sequence
  Synthetic
ttggcgagatagcgttgttcacaggctgtgatggaaat

SEQ ID NO: 6098 - DNA, 41 bp, Artificial Sequence
  Synthetic
ggtgctttgtgccaactctttgctttaccaataagctcgaa

SEQ ID NO: 6099 - DNA, 43 bp, Artificial Sequence
  Synthetic
ctaagggaacagaaggcttgataatctccaagcaagcgtctac

SEQ ID NO: 6100 - DNA, 39 bp, Artificial Sequence
  Synthetic
tgctaaaaggtcgcgctagaagcatgatctttgttgcag

SEQ ID NO: 6101 - DNA, 42 bp, Artificial Sequence
  Synthetic
gtggaaattcgggggagtcttttctaaggacaaaaaccactg

SEQ ID NO: 6102 - DNA, 45 bp, Artificial Sequence
  Synthetic
aaggacaatatagccttggagaaaccgactctcctagtactccat

SEQ ID NO: 6103 - DNA, 47 bp, Artificial Sequence
  Synthetic
tcctggttttcctctcttaatagctcaccacattctgaaatccaaat

SEQ ID NO: 6104 - DNA, 47 bp, Artificial Sequence
  Synthetic
ccggaagacttattagcagcagctgtctgattactagaaaattgcat

SEQ ID NO: 6105 - DNA, 44 bp, Artificial Sequence
  Synthetic
actagctaagcagttaggccttttgactaaacatccgattgttc

SEQ ID NO: 6106 - DNA, 40 bp, Artificial Sequence
  Synthetic
ttcacactacacaatgtgtcgcccaccctttcctggagta

SEQ ID NO: 6107 - DNA, 44 bp, Artificial Sequence
  Synthetic
tgacggatgttgttaaaggttctccacaatgacatcttcttggc

SEQ ID NO: 6108 - DNA, 48 bp, Artificial Sequence
  Synthetic
ttctcagaagaggatgtgcatgagaaatcggatcatctaaattctgaa

SEQ ID NO: 6109 - DNA, 42 bp, Artificial Sequence
  Synthetic
tcgcagaattgatgatcatatgcctgcgttatcgagcgtatg

SEQ ID NO: 6110 - DNA, 43 bp, Artificial Sequence
  Synthetic
atatgctgaggatttagaacaagcagtatccccttctgcgatg

SEQ ID NO: 6111 - DNA, 40 bp, Artificial Sequence
  Synthetic
gtcgcatcgagcaaagcatctgatgttttgtcgagcaatt

SEQ ID NO: 6112 - DNA, 44 bp, Artificial Sequence
  Synthetic
tagcagggatagaggaagccaaggattcttcaagaaatctacga

SEQ ID NO: 6113 - DNA, 47 bp, Artificial Sequence
  Synthetic
ctccttctttgacaaagtcagagatctgtcatatttctgaattgtct

SEQ ID NO: 6114 - DNA, 50 bp, Artificial Sequence
  Synthetic
ggagcatatttagaaacagttcccttcatatccttaatcttatgacacag

SEQ ID NO: 6115 - DNA, 42 bp, Artificial Sequence
  Synthetic
gcgattcagttagcacgtattccccagctcctaaacgcaaat

SEQ ID NO: 6116 - DNA, 39 bp, Artificial Sequence
  Synthetic
tccgaagaaagcttgggtgctgcaggtatcagcatttgg

SEQ ID NO: 6117 - DNA, 40 bp, Artificial Sequence
  Synthetic
cgttgcgtgatctcaaggctctctcgtaacagcagatacc

SEQ ID NO: 6118 - DNA, 44 bp, Artificial Sequence
  Synthetic
ggaaattttctttccggagaacgagtgcgtcgggttaattttcc

SEQ ID NO: 6119 - DNA, 44 bp, Artificial Sequence
  Synthetic
gatcccagccatcaatgtgatagctttactgtatcggtgtcaaa

SEQ ID NO: 6120 - DNA, 40 bp, Artificial Sequence
  Synthetic
ctagtcagcgagtgggatgacattatatcaccccccctcc

SEQ ID NO: 6121 - DNA, 47 bp, Artificial Sequence
  Synthetic
tatgccgcatattttaacgcgtacaacagaatccctataaagaatgt

SEQ ID NO: 6122 - DNA, 42 bp, Artificial Sequence
  Synthetic
tccacagttacagaaatcgatgagtagaccgatgaaacgcat

SEQ ID NO: 6123 - DNA, 38 bp, Artificial Sequence
  Synthetic
gcgctatgatggttacagcgagcatcgtcgctacaatc

SEQ ID NO: 6124 - DNA, 44 bp, Artificial Sequence
  Synthetic
accagtattttgggtcatatcttgtctcaaagaggggaagagtc

SEQ ID NO: 6125 - DNA, 41 bp, Artificial Sequence
  Synthetic
gaaagggggagctatttatgccaagaattgtacagggccac

SEQ ID NO: 6126 - DNA, 42 bp, Artificial Sequence
  Synthetic
gcaattcaagcaagtgtggatgcgaaactccagaaacccata

SEQ ID NO: 6127 - DNA, 41 bp, Artificial Sequence
  Synthetic
atacacatttgcagaggagagcccaatctctccaaccagac

SEQ ID NO: 6128 - DNA, 41 bp, Artificial Sequence
  Synthetic
gcatcgacaccatcaccatctccggactgattaatcgtgac

SEQ ID NO: 6129 - DNA, 42 bp, Artificial Sequence
  Synthetic
tttacgcagttgctgtactactcaaaaagaggcgaggtctct

SEQ ID NO: 6130 - DNA, 43 bp, Artificial Sequence
  Synthetic
ttgctctgaaacacttctgtcgtttcatttttttctcacgtcg

SEQ ID NO: 6131 - DNA, 44 bp, Artificial Sequence
  Synthetic
ttgatggaattggacgattctacatgcccctcataatcactgag

SEQ ID NO: 6132 - DNA, 48 bp, Artificial Sequence
  Synthetic
gccaagccaataatggtgatgatggtatgttgtatcattcaaattgga

SEQ ID NO: 6133 - DNA, 44 bp, Artificial Sequence
  Synthetic
ggtgagaatggacggaaaacaattttcctttgagaatgttgcac

SEQ ID NO: 6134 - DNA, 40 bp, Artificial Sequence
  Synthetic
aaggaccagaagtggaggaaagtacactgatttgacctgc

SEQ ID NO: 6135 - DNA, 46 bp, Artificial Sequence
  Synthetic
gggatgtgtttgtcataagggaacttgagtcaagaagaaggttctg

SEQ ID NO: 6136 - DNA, 45 bp, Artificial Sequence
  Synthetic
aacagacactatcaagagttggagaacacatgcacattcagactc

SEQ ID NO: 6137 - DNA, 41 bp, Artificial Sequence
  Synthetic
cacatgtgtgtgcagggataacttctggttgaaagacaccc

SEQ ID NO: 6138 - DNA, 47 bp, Artificial Sequence
  Synthetic
tgagatgatttgggatccgaacgcgatatcttgctttattgagaagt

SEQ ID NO: 6139 - DNA, 40 bp, Artificial Sequence
  Synthetic
tctacggaaggagtacctgagttatcgtcagcatccacag

SEQ ID NO: 6140 - DNA, 41 bp, Artificial Sequence
  Synthetic
tggcttcggaggaaatttgtatgtcaagacagaggctccag

SEQ ID NO: 6141 - DNA, 46 bp, Artificial Sequence
  Synthetic
tgaaggagttaactggagtccacttcagtttgatatcagtccaatt

SEQ ID NO: 6142 - DNA, 45 bp, Artificial Sequence
  Synthetic
aaatccagcattgtacacacaagagcaagattttctttcccacat

SEQ ID NO: 6143 - DNA, 42 bp, Artificial Sequence
  Synthetic
atcaccttacacagggaattctgggtttcagctggagcatgt

SEQ ID NO: 6144 - DNA, 42 bp, Artificial Sequence
  Synthetic
actggactatgaagctagatgcacgtaaaagggctggtttca

SEQ ID NO: 6145 - DNA, 44 bp, Artificial Sequence
  Synthetic
agagcagaatttttggaatcgatgactgcttcaacgattgcaac

SEQ ID NO: 6146 - DNA, 49 bp, Artificial Sequence
  Synthetic
aggagaattgggaataataagagccgttcccataaagattcttgtaatc

SEQ ID NO: 6147 - DNA, 43 bp, Artificial Sequence
  Synthetic
caatcagatcctttttactggggagccaatgaaatagcagcag

SEQ ID NO: 6148 - DNA, 38 bp, Artificial Sequence
  Synthetic
ccagttgcatgggcctcataccaaaagcagcttctgtg

SEQ ID NO: 6149 - DNA, 42 bp, Artificial Sequence
  Synthetic
tcatcctagctccagtgctggtcttctggtaggcctgcaaat

SEQ ID NO: 6150 - DNA, 46 bp, Artificial Sequence
  Synthetic
catcacaatggcaaaacctccttccaatggaatatctaactgtctt

SEQ ID NO: 6151 - DNA, 41 bp, Artificial Sequence
  Synthetic
cctgcattgtgacgaagacttgtctattctttgaggtgcag

SEQ ID NO: 6152 - DNA, 42 bp, Artificial Sequence
  Synthetic
tttgacaaagacacagactcagattttcccaattctgcgtcc

SEQ ID NO: 6153 - DNA, 41 bp, Artificial Sequence
  Synthetic
aagaggcgactgttcgaggagaatcttcagcttcatgagtt

SEQ ID NO: 6154 - DNA, 46 bp, Artificial Sequence
  Synthetic
atacccatggagaatacccagagtcatattcctgatgagaaagcaa

SEQ ID NO: 6155 - DNA, 48 bp, Artificial Sequence
  Synthetic
cactgcaagacaagttaatgacaatgttccaatgttcaatttgatctt

SEQ ID NO: 6156 - DNA, 41 bp, Artificial Sequence
  Synthetic
agtgaaactggagaatgggaagtgttggtggagctggtaac

SEQ ID NO: 6157 - DNA, 40 bp, Artificial Sequence
  Synthetic
gacgaccgaaagcgtcaccgtgtgatcccgatctcgatcc

SEQ ID NO: 6158 - DNA, 39 bp, Artificial Sequence
  Synthetic
cctccagaggccgtagaggggccacttgtgccaacagat

SEQ ID NO: 6159 - DNA, 46 bp, Artificial Sequence
  Synthetic
gcaggtagcaacgatagaataggtctttgagatttactggtaaagc

SEQ ID NO: 6160 - DNA, 41 bp, Artificial Sequence
  Synthetic
tgaggctataggaccaagtgaacagaagcactggggtcaat

SEQ ID NO: 6161 - DNA, 46 bp, Artificial Sequence
  Synthetic
caaacgagctactataaggaccagccctaaaaaaatgtacctgacc

SEQ ID NO: 6162 - DNA, 41 bp, Artificial Sequence
  Synthetic
ttttgcagatgtcctattggctttttgtacccttgcaaccg

SEQ ID NO: 6163 - DNA, 45 bp, Artificial Sequence
  Synthetic
atcagtttagagcttttcgactgaacagacatgtcagctaaagca

SEQ ID NO: 6164 - DNA, 40 bp, Artificial Sequence
  Synthetic
taggtgaacattgggacacagcctctaatggtgggcatcc

SEQ ID NO: 6165 - DNA, 43 bp, Artificial Sequence
  Synthetic
acgacgagaacaatgttatgttagggggatggtatcacccaca

SEQ ID NO: 6166 - DNA, 45 bp, Artificial Sequence
  Synthetic
attggttacaaagagcacaaggcgtcagaaacagttcattactcc

SEQ ID NO: 6167 - DNA, 39 bp, Artificial Sequence
  Synthetic
gttaacagctttcagccagggcattgtgacctatgggcg

SEQ ID NO: 6168 - DNA, 43 bp, Artificial Sequence
  Synthetic
tgaatgcaagtccatatgatttggaaaaactgcttcacgggac

SEQ ID NO: 6169 - DNA, 47 bp, Artificial Sequence
  Synthetic
ttgttccatgggttatgtacttgctccatgatctttattgtaagcac

SEQ ID NO: 6170 - DNA, 44 bp, Artificial Sequence
  Synthetic
gagtgctgctactatacgtagtgtaaccatcacacaagtcttca

SEQ ID NO: 6171 - DNA, 44 bp, Artificial Sequence
  Synthetic
tggtaacatgatagatggttttgcttgccatcaaatcacctact

SEQ ID NO: 6172 - DNA, 43 bp, Artificial Sequence
  Synthetic
acgggagttgctaggtgtttacagaggtttataaacacctcta

SEQ ID NO: 6173 - DNA, 45 bp, Artificial Sequence
  Synthetic
acgtagaagaatttgtctttcaggcgatgaatgtaacaagccacg

SEQ ID NO: 6174 - DNA, 43 bp, Artificial Sequence
  Synthetic
tgacaaatattaccctgttgtggtggaactctccatgcttgat

SEQ ID NO: 6175 - DNA, 43 bp, Artificial Sequence
  Synthetic
ttaactgtcacaagtgctggacaagacttcagaagactcctcc

SEQ ID NO: 6176 - DNA, 46 bp, Artificial Sequence
  Synthetic
acctgctaatattgtacttccacaaactgccaatcacataaggtta

SEQ ID NO: 6177 - DNA, 48 bp, Artificial Sequence
  Synthetic
aaactgtgcttaatgttgttggaccgctctaacaatacataactttgt

SEQ ID NO: 6178 - DNA, 47 bp, Artificial Sequence
  Synthetic
atcaatgacgttgcatttgtttcggtgctatatcatgtcttaaggat

SEQ ID NO: 6179 - DNA, 46 bp, Artificial Sequence
  Synthetic
aggaaatgtgttttgtgatggagtactggaaaaagactttaccttt

SEQ ID NO: 6180 - DNA, 42 bp, Artificial Sequence
  Synthetic
aaaattgttcaatggcaagaggcctacaaatctagcagggcg

SEQ ID NO: 6181 - DNA, 48 bp, Artificial Sequence
  Synthetic
ttgagtcgtgaagatcttgagattgatgaattagctttttaccgcaag

SEQ ID NO: 6182 - DNA, 48 bp, Artificial Sequence
  Synthetic
ttaaattgataggacacaccgtctgctttagagctatcaaaacccaac

SEQ ID NO: 6183 - DNA, 43 bp, Artificial Sequence
  Synthetic
ggtgacagctcagagagtggtggttttttaacaccacttaact

SEQ ID NO: 6184 - DNA, 48 bp, Artificial Sequence
  Synthetic
tggctttagctaatatgttaccagcagagcttaataaaagaggcaata

SEQ ID NO: 6185 - DNA, 45 bp, Artificial Sequence
  Synthetic
ctaaggaattgaaacggcccattcttaacatcagtaaccgtatga

SEQ ID NO: 6186 - DNA, 48 bp, Artificial Sequence
  Synthetic
aactggtttgaaactgaagcttactggtgtagttaaaacagagacatt

SEQ ID NO: 6187 - DNA, 47 bp, Artificial Sequence
  Synthetic
tgtgttgcactttattacacatgcatacgatatttgactatgtggcg

SEQ ID NO: 6188 - DNA, 45 bp, Artificial Sequence
  Synthetic
actcgttctatgtcgtattgcagtaaagcatataccctcatcagc

SEQ ID NO: 6189 - DNA, 42 bp, Artificial Sequence
  Synthetic
aagcttaaacgtgcttttggtgacaccacacaatcacgttaa

SEQ ID NO: 6190 - DNA, 43 bp, Artificial Sequence
  Synthetic
gcctactgcttccgtctcaaagtaggatttaccattttcacaa

SEQ ID NO: 6191 - DNA, 47 bp, Artificial Sequence
  Synthetic
gatcttgtggatctgttggttatgtctaagctccaattgatgcatat

SEQ ID NO: 6192 - DNA, 48 bp, Artificial Sequence
  Synthetic
agatgctttagcttctatgactggtaccattcttaagacgcttaatag

SEQ ID NO: 6193 - DNA, 45 bp, Artificial Sequence
  Synthetic
tgtgtacaagcatacatttagaggcgtgtactcaactgatggaac

SEQ ID NO: 6194 - DNA, 46 bp, Artificial Sequence
  Synthetic
gcaaaggttattgctaagtgggttagcacaaaagcactatcttaat

SEQ ID NO: 6195 - DNA, 48 bp, Artificial Sequence
  Synthetic
tgactgatgtcaaatgtgctaatgtacttagaattagaagcaacatgc

SEQ ID NO: 6196 - DNA, 47 bp, Artificial Sequence
  Synthetic
tgctaagaaaaatcttgatgaggcggctttctctagctgttttaact

SEQ ID NO: 6197 - DNA, 50 bp, Artificial Sequence
  Synthetic
gtatggcagattcaaactatccaggatcagatatctcattcaactgctta

SEQ ID NO: 6198 - DNA, 46 bp, Artificial Sequence
  Synthetic
gaactgctactgaatatgcttccacttaggatctacagaaaacgca

SEQ ID NO: 6199 - DNA, 44 bp, Artificial Sequence
  Synthetic
cggcaagtttgtacaagtgcccatgtgtcaaaacataagacaca

SEQ ID NO: 6200 - DNA, 47 bp, Artificial Sequence
  Synthetic
tcagttctttgttgttaagaggacacttttacacgctcatagcattt

SEQ ID NO: 6201 - DNA, 48 bp, Artificial Sequence
  Synthetic
ttttggtgactatgttattgcagcccagcataggcatgatataagaat

SEQ ID NO: 6202 - DNA, 41 bp, Artificial Sequence
  Synthetic
atccagctttgcatgtagcttcacactaaaacagcaagtgc

SEQ ID NO: 6203 - DNA, 50 bp, Artificial Sequence
  Synthetic
ttggaaaagccaggctctattatgatagtataagcgtaaatttcatcctg

SEQ ID NO: 6204 - DNA, 40 bp, Artificial Sequence
  Synthetic
ctgggatgatatgttacgccgcccaacccataagtacagg

SEQ ID NO: 6205 - DNA, 47 bp, Artificial Sequence
  Synthetic
gttgattcaacctttgtcacagaatccatcatcactcaaaatcatca

SEQ ID NO: 6206 - DNA, 42 bp, Artificial Sequence
  Synthetic
agatggatggtgacgatgtctacaaaacatccagctcctaat

SEQ ID NO: 6207 - DNA, 40 bp, Artificial Sequence
  Synthetic
ttatgcagagtgttggagcttgttctgatgcaactgccac

SEQ ID NO: 6208 - DNA, 46 bp, Artificial Sequence
  Synthetic
cttgaaattgtttgctgcagaaacctgatgcataactctgcttaaa

SEQ ID NO: 6209 - DNA, 44 bp, Artificial Sequence
  Synthetic
acacattggtatgaaacgttactgcgcaagatgtgacttccctg

SEQ ID NO: 6210 - DNA, 48 bp, Artificial Sequence
  Synthetic
accataaatgcattacctgagatggtggtaagcatactaacttcatct

SEQ ID NO: 6211 - DNA, 41 bp, Artificial Sequence
  Synthetic
caaaccgtggattctgctcaatgtttctgcagtctgtgaat

SEQ ID NO: 6212 - DNA, 38 bp, Artificial Sequence
  Synthetic
atcacccagctcatgctcctaaatcgccagttgcctta

SEQ ID NO: 6213 - DNA, 39 bp, Artificial Sequence
  Synthetic
gaagccactggtttgtttgcttcaccaggaggagctttc

SEQ ID NO: 6214 - DNA, 48 bp, Artificial Sequence
  Synthetic
taaacgtgccacagtttacaattcttacaagtaatcacatgtaacact

SEQ ID NO: 6215 - DNA, 48 bp, Artificial Sequence
  Synthetic
tttgaggcacataaggactcttttacttatccacattacagttccaaa

SEQ ID NO: 6216 - DNA, 42 bp, Artificial Sequence
  Synthetic
gcatggatgctaagcaggttgacctaaattgcatcttgtgat

SEQ ID NO: 6217 - DNA, 42 bp, Artificial Sequence
  Synthetic
acaacataccctactaatgtggccttaagctctgggtggtgt

SEQ ID NO: 6218 - DNA, 44 bp, Artificial Sequence
  Synthetic
agagtctttcgatgataagaggtcccaaccttgtccaccactac

SEQ ID NO: 6219 - DNA, 46 bp, Artificial Sequence
  Synthetic
tgcatttgttaataggcttgtaccgaaacaaactcctgaacaacca

SEQ ID NO: 6220 - DNA, 45 bp, Artificial Sequence
  Synthetic
ttctccaatggaaagagttagtctcttcatcatacagcctgtagg

SEQ ID NO: 6221 - DNA, 47 bp, Artificial Sequence
  Synthetic
aatggggtattttgcattttggacgccaattaaaaatccttcactag

SEQ ID NO: 6222 - DNA, 41 bp, Artificial Sequence
  Synthetic
ctggacatacagcctgaagactccatcaccccaatgcatat

SEQ ID NO: 6223 - DNA, 47 bp, Artificial Sequence
  Synthetic
ccggctagacttgaaatagttaagcccagtgactaactatggtttca

SEQ ID NO: 6224 - DNA, 43 bp, Artificial Sequence
  Synthetic
tcatgcctttaaatgcaaccgtaacaagcctttattctgcatc

SEQ ID NO: 6225 - DNA, 42 bp, Artificial Sequence
  Synthetic
gtaaggattttacgcctgtacagggttatcagactgcctggc

SEQ ID NO: 6226 - DNA, 45 bp, Artificial Sequence
  Synthetic
acaaggtcttttagaggtctctgtggttaggatgacaaatcgttt

SEQ ID NO: 6227 - DNA, 47 bp, Artificial Sequence
  Synthetic
attgggttacacctctcacttctagactcatacaatcaacagcatta

SEQ ID NO: 6228 - DNA, 48 bp, Artificial Sequence
  Synthetic
tgagcagcctgatgtcttttattcaccatatatcttagcagcatcaat

SEQ ID NO: 6229 - DNA, 47 bp, Artificial Sequence
  Synthetic
cctgcaggtgttcttactaatcatacagaaatttttaggagctttga

SEQ ID NO: 6230 - DNA, 43 bp, Artificial Sequence
  Synthetic
aagtgattattgtggaggcaattcttctgcagaccaacccaaa

SEQ ID NO: 6231 - DNA, 40 bp, Artificial Sequence
  Synthetic
ccgaaccagcattgctatttcgcagctgtcgtgtaagact

SEQ ID NO: 6232 - DNA, 48 bp, Artificial Sequence
  Synthetic
tgtggtgattatgcagcatgtaagcattaatgttatcacagaaactac

SEQ ID NO: 6233 - DNA, 38 bp, Artificial Sequence
  Synthetic
gcatcaaagtgttgcctccaggcagccaaagtgtatcc

SEQ ID NO: 6234 - DNA, 44 bp, Artificial Sequence
  Synthetic
tgcttatgtttctcaacagcttagtccttctccatagcttgtgc

SEQ ID NO: 6235 - DNA, 43 bp, Artificial Sequence
  Synthetic
gtagtggttactactaccctgaaccacagcgcaggtactcata

SEQ ID NO: 6236 - DNA, 50 bp, Artificial Sequence
  Synthetic
gtaaaatggccttggtatgtatggcaatagtaaaacaagcatagctacac

SEQ ID NO: 6237 - DNA, 46 bp, Artificial Sequence
  Synthetic
agagttcctagtcatgcttggtggatttaccataaagagtgaatgt

SEQ ID NO: 6238 - DNA, 49 bp, Artificial Sequence
  Synthetic
ttgaggactatcatactctgacgggtacctagttttataccttgaatgt

SEQ ID NO: 6239 - DNA, 40 bp, Artificial Sequence
  Synthetic
aatccagtagtagagcgtcctcaaactggtcggactgatc

SEQ ID NO: 6240 - DNA, 42 bp, Artificial Sequence
  Synthetic
ccaggctgatgtcaataccccgcggaatagcctcatcgctac

SEQ ID NO: 6241 - DNA, 45 bp, Artificial Sequence
  Synthetic
ttgctagtcttgttctggcaaaacatgcttagttacttgctgagg

SEQ ID NO: 6242 - DNA, 47 bp, Artificial Sequence
  Synthetic
tgacagtacactttcaggttttgagtgataggcattcaaattctcat

SEQ ID NO: 6243 - DNA, 47 bp, Artificial Sequence
  Synthetic
gcagaaaagtcgagataaggcacctatagtctgctataaccttctct

SEQ ID NO: 6244 - DNA, 42 bp, Artificial Sequence
  Synthetic
ggaaggacctctttgcatcagattcgctttcaacatgatgtt

SEQ ID NO: 6245 - DNA, 46 bp, Artificial Sequence
  Synthetic
ctacagagattcgcttggagaagcttctgttttggagtaagtggag

SEQ ID NO: 6246 - DNA, 41 bp, Artificial Sequence
  Synthetic
ggcttcgccgagatcagaagtgtggcagttctgatgtccag

SEQ ID NO: 6247 - DNA, 42 bp, Artificial Sequence
  Synthetic
gaaagtgacagggcccctttttcaatatgatggttttaccca

SEQ ID NO: 6248 - DNA, 42 bp, Artificial Sequence
  Synthetic
aacacagttcgagtctctgaaactcccattctcatcactgct

SEQ ID NO: 6249 - DNA, 40 bp, Artificial Sequence
  Synthetic
ccctcccgggagagccatagtggtcaccccagcgattccg

SEQ ID NO: 6250 - DNA, 40 bp, Artificial Sequence
  Synthetic
tggagtatacgtgttgccgcgcagaagttttacgcgtcgc

SEQ ID NO: 6251 - DNA, 35 bp, Artificial Sequence
  Synthetic
gctcgtcggcgctcctgtatcaagggccctcacgc

SEQ ID NO: 6252 - DNA, 42 bp, Artificial Sequence
  Synthetic
acacctacagtggcagtcaggtcgcgcctactaataggtcca

SEQ ID NO: 6253 - DNA, 39 bp, Artificial Sequence
  Synthetic
gcatgtcctgcgtttaccccagccaagatgccccaatgg

SEQ ID NO: 6254 - DNA, 38 bp, Artificial Sequence
  Synthetic
tactgctggcactacgcaccggccgcagacacttgatg

SEQ ID NO: 6255 - DNA, 40 bp, Artificial Sequence
  Synthetic
ctcccagtggtcggtggtttgcgcacgtcttgagaaaccc

SEQ ID NO: 6256 - DNA, 41 bp, Artificial Sequence
  Synthetic
tgaccgcagtgagcaacatccagcaaggcagtatagcaagc

SEQ ID NO: 6257 - DNA, 38 bp, Artificial Sequence
  Synthetic
cgctgctgctgggacacatgttaccccgcacgtaccac

SEQ ID NO: 6258 - DNA, 39 bp, Artificial Sequence
  Synthetic
aggtcatcacctggggtgcgctaatcgtgcagagacggg

SEQ ID NO: 6259 - DNA, 41 bp, Artificial Sequence
  Synthetic
atggagcaggttcgagaacgctcccaacgaggtcctgatct

SEQ ID NO: 6260 - DNA, 42 bp, Artificial Sequence
  Synthetic
tgttgcggggatctttagggcttgctaagggtttccactggt

SEQ ID NO: 6261 - DNA, 41 bp, Artificial Sequence
  Synthetic
gggaaccgcaccgttacaactccgcgagaaacttaccgtag

SEQ ID NO: 6262 - DNA, 40 bp, Artificial Sequence
  Synthetic
acgtaccgatatgtcgcctccgacagaggacgaccgagtc

SEQ ID NO: 6263 - DNA, 40 bp, Artificial Sequence
  Synthetic
gcaggctcctcccccaagttggtccatgtagtgttggctt

SEQ ID NO: 6264 - DNA, 42 bp, Artificial Sequence
  Synthetic
atggaggagtgctcacaagctgccttgaactggtgggctatt

SEQ ID NO: 6265 - DNA, 38 bp, Artificial Sequence
  Synthetic
tactcggggggtgggttgccaagccgcttaccacgaac

SEQ ID NO: 6266 - DNA, 36 bp, Artificial Sequence
  Synthetic
cgtaggacctggggagggagtggttgccccgggatg

SEQ ID NO: 6267 - DNA, 40 bp, Artificial Sequence
  Synthetic
aaagggatacaagggcgtgtggcagttattgctgccccgc

SEQ ID NO: 6268 - DNA, 38 bp, Artificial Sequence
  Synthetic
tgccggctgctgagttctttaggggcttacatggaggg

SEQ ID NO: 6269 - DNA, 41 bp, Artificial Sequence
  Synthetic
cagacgctgagctagtggacgtgtaatgttgctgcccatct

SEQ ID NO: 6270 - DNA, 41 bp, Artificial Sequence
  Synthetic
tcagctggacggctctaatgtgtcctgtggtttcgaggacg

SEQ ID NO: 6271 - DNA, 42 bp, Artificial Sequence
  Synthetic
aagagaaactgcccatcagccccgcttctagacgacgttgaa

SEQ ID NO: 6272 - DNA, 38 bp, Artificial Sequence
  Synthetic
ttccaaccaccatcatggcgaatgcggccccctttagc

SEQ ID NO: 6273 - DNA, 39 bp, Artificial Sequence
  Synthetic
ctccctcacggagcggctttacgataaccacactgggcc

SEQ ID NO: 6274 - DNA, 39 bp, Artificial Sequence
  Synthetic
tagagcagccctgagagcctttggcctgtggagcatctc

SEQ ID NO: 6275 - DNA, 45 bp, Artificial Sequence
  Synthetic
tcaagaagtacacatcaggaagacattcattgccatcatccattt

SEQ ID NO: 6276 - DNA, 44 bp, Artificial Sequence
  Synthetic
agtcgaaaggctaaagcatggaaacgtattttgacttggtttct

SEQ ID NO: 6277 - DNA, 45 bp, Artificial Sequence
  Synthetic
agagaagaaagaagaactccaggatctctccaacatgtatgcaac

SEQ ID NO: 6278 - DNA, 45 bp, Artificial Sequence
  Synthetic
tagcatctttattggagatgtgccactgcttaaggatgtctacca

SEQ ID NO: 6279 - DNA, 42 bp, Artificial Sequence
  Synthetic
tgaagagttcacaatggttgggatcaatctcctggttgcttt

SEQ ID NO: 6280 - DNA, 44 bp, Artificial Sequence
  Synthetic
aaagtgctttttcaaaattggggagcaatatcccaatcattccc

SEQ ID NO: 6281 - DNA, 42 bp, Artificial Sequence
  Synthetic
acacagggaacagagaaactgattgaccaacactgattcagg

SEQ ID NO: 6282 - DNA, 42 bp, Artificial Sequence
  Synthetic
gatgtgcttgggacatttgataccactttgctttggtggagc

SEQ ID NO: 6283 - DNA, 42 bp, Artificial Sequence
  Synthetic
agacaggagatatgggccagcagccttctctcctttcgcaag

SEQ ID NO: 6284 - DNA, 40 bp, Artificial Sequence
  Synthetic
ctgccgacgccttaccgattgcttccgttggcataactga

SEQ ID NO: 6285 - DNA, 40 bp, Artificial Sequence
  Synthetic
gcccccttgtgtcatcggaggaaacaatcagtggggcaga

SEQ ID NO: 6286 - DNA, 39 bp, Artificial Sequence
  Synthetic
gcccattgctgctgtccaccggcagggtcgtgaaagaac

SEQ ID NO: 6287 - DNA, 40 bp, Artificial Sequence
  Synthetic
atctgaagggtaggtgggtgccggaggagaggccacatcc

SEQ ID NO: 6288 - DNA, 39 bp, Artificial Sequence; identical to SEQ ID NO: 4473
  Synthetic

SEQ ID NO: 6289 - DNA, 37 bp, Artificial Sequence
  Synthetic
ccgcgtgcggtgacatcagtatctcctggcccctacg

SEQ ID NO: 6290 - DNA, 37 bp, Artificial Sequence
  Synthetic
agaccttgtgggctggccctaaaggtccgaggagccg

SEQ ID NO: 6291 - DNA, 38 bp, Artificial Sequence
  Synthetic
tcacggacaactcctctccaccgagcatgcaggtgggc

SEQ ID NO: 6292 - DNA, 40 bp, Artificial Sequence
  Synthetic
tttgtgacgagtgccactccacggtcaaggacagtgccga

SEQ ID NO: 6293 - DNA, 38 bp, Artificial Sequence
  Synthetic
accgcggtcttgacgtgtctgagcatcggtcgacacga

SEQ ID NO: 6294 - DNA, 40 bp, Artificial Sequence
  Synthetic
gagtgctatgacgcgggctgagcctaactgtagtctcggc

SEQ ID NO: 6295 - DNA, 38 bp, Artificial Sequence
  Synthetic
acctggaggtcgtcacgagcttgacaggcaatacgcgg

SEQ ID NO: 6296 - DNA, 42 bp, Artificial Sequence
  Synthetic
accaactggcagaaactcgaggcccgccaagtattgtatccc

SEQ ID NO: 6297 - DNA, 38 bp, Artificial Sequence
  Synthetic
agatcatgagcggtgaggtcccagaggatggcgggcag

SEQ ID NO: 6298 - DNA, 42 bp, Artificial Sequence
  Synthetic
ctcagcagcctcactgtaacccacactccgagcttatccact

SEQ ID NO: 6299 - DNA, 39 bp, Artificial Sequence
  Synthetic
gggacgttccccattaacgcctagttcggcgcaggaagg

SEQ ID NO: 6300 - DNA, 39 bp, Artificial Sequence
  Synthetic
cgagcccgaaccggacgtacgcctctgctgttatatggg

SEQ ID NO: 6301 - DNA, 39 bp, Artificial Sequence
  Synthetic
ccggactacaaccccccgctccacaggtggttcgtagtc

SEQ ID NO: 6302 - DNA, 36 bp, Artificial Sequence
  Synthetic
tcttccatgccccccctggccatgacccgtcgctga

SEQ ID NO: 6303 - DNA, 39 bp, Artificial Sequence
  Synthetic
ctgacgcccccacattcagccatggcaacggacgtcttt

SEQ ID NO: 6304 - DNA, 39 bp, Artificial Sequence
  Synthetic
acgacgtggttagcaagctcccccgctgtcctggtgagt

SEQ ID NO: 6305 - DNA, 40 bp, Artificial Sequence
  Synthetic
tcacttgctacatcaaggcccggcatggtgcagtcctgga

SEQ ID NO: 6306 - DNA, 42 bp, Artificial Sequence
  Synthetic
ccagtcaattcctggctaggcatatcatcctcgcccacagtg

SEQ ID NO: 6307 - DNA, 40 bp, Artificial Sequence
  Synthetic
gtccgcgctaggcttctgtctgcccagttgaagaggtact

SEQ ID NO: 6308 - DNA, 48 bp, Artificial Sequence
  Synthetic
acccagaaacatattgcttttgtgttgttttgtgcaaaatatacagca

SEQ ID NO: 6309 - DNA, 40 bp, Artificial Sequence
  Synthetic
tgtgtcacaaaccgctggtatgatattttgtgcagtcgtc

SEQ ID NO: 6310 - DNA, 39 bp, Artificial Sequence
  Synthetic
gcacaacaagcgtatagggtgtgcactctaccaccagtc

SEQ ID NO: 6311 - DNA, 41 bp, Artificial Sequence
  Synthetic
gacagtcagcaaaggccaaacgacctgtgtttggccatagc

SEQ ID NO: 6312 - DNA, 41 bp, Artificial Sequence
  Synthetic
gggaatgacagtgcttatgctgtttagccactgtttccctg

SEQ ID NO: 6313 - DNA, 39 bp, Artificial Sequence
  Synthetic
tggggggggctgttatatcccagataatggctgcaacca

SEQ ID NO: 6314 - DNA, 41 bp, Artificial Sequence
  Synthetic
tatgggcacgtttaagccttacctaaacggttcgctagggt

SEQ ID NO: 6315 - DNA, 41 bp, Artificial Sequence
  Synthetic
atgtgaatttcaaggatgacgctcccacatgtacctcccat

SEQ ID NO: 6316 - DNA, 38 bp, Artificial Sequence
  Synthetic
ttccacccagaaggccgcgaaccgggtcctgtcactgt

SEQ ID NO: 6317 - DNA, 44 bp, Artificial Sequence
  Synthetic
gctgacgtgctatctggcattgtaaatataatgctataaggccc

SEQ ID NO: 6318 - DNA, 40 bp, Artificial Sequence
  Synthetic
tggcagatcgcattttgcagtggttccaatgcctaggccc

SEQ ID NO: 6319 - DNA, 43 bp, Artificial Sequence
  Synthetic
ccccagctgtgttggacatcgcaggatttgtaaagtttgtact

SEQ ID NO: 6320 - DNA, 40 bp, Artificial Sequence
  Synthetic
tacttgctccagctgcctcttcaccatcatcaacatcagc

SEQ ID NO: 6321 - DNA, 38 bp, Artificial Sequence
  Synthetic
cgactatgtgacacgcaccatggcctacagtaagcaac

SEQ ID NO: 6322 - DNA, 43 bp, Artificial Sequence
  Synthetic
atccagattatttgggaatggccctgcgcaagtaaaagaacat

SEQ ID NO: 6323 - DNA, 46 bp, Artificial Sequence
  Synthetic
attggaggattggaactttgggtaaatctatatgtgtcctccaagc

SEQ ID NO: 6324 - DNA, 42 bp, Artificial Sequence
  Synthetic
gtaaggttgttctaggtcaggagaaattggtggtgtgcacac

SEQ ID NO: 6325 - DNA, 44 bp, Artificial Sequence
  Synthetic
tgtgcgacacaagctgcaataacagcaaagataattcttgttgt

SEQ ID NO: 6326 - DNA, 46 bp, Artificial Sequence
  Synthetic
gaatcggagcagggaaattccgcaatagtattattacagtcctctg

SEQ ID NO: 6327 - DNA, 49 bp, Artificial Sequence
  Synthetic
tatcaggattcacatgaacagtggcaaagtacattccatcataatccac

SEQ ID NO: 6328 - DNA, 39 bp, Artificial Sequence
  Synthetic
accgcaaatcgcagctggagtgagacagtgcctctctcc

SEQ ID NO: 6329 - DNA, 41 bp, Artificial Sequence
  Synthetic
agacttcaagaggaggctcgggtaagctgtttcccggacct

SEQ ID NO: 6330 - DNA, 46 bp, Artificial Sequence
  Synthetic
ctccatctattacacgccctttgagtgggatattaaaaggtcttgt

SEQ ID NO: 6331 - DNA, 46 bp, Artificial Sequence
  Synthetic
acatcattaggtggtggggagtcatatgcaggatttaaaactgtag

SEQ ID NO: 6332 - DNA, 44 bp, Artificial Sequence
  Synthetic
catcagtttgcagtttcagcagtgaaagtctatatctggtgcag

SEQ ID NO: 6333 - DNA, 46 bp, Artificial Sequence
  Synthetic
atcacctacttacccttacacaccgggtgcaagaaaaaatcataat

SEQ ID NO: 6334 - DNA, 45 bp, Artificial Sequence
  Synthetic
ttatgctggatctgaaaggcttctttccaggatcaattacatcaa

SEQ ID NO: 6335 - DNA, 46 bp, Artificial Sequence
  Synthetic
acagaaaatcctaacacgtatcctgagacacgtccattctattgtc

SEQ ID NO: 6336 - DNA, 46 bp, Artificial Sequence
  Synthetic
gtgatgtaggatttggagctgctaggtactcctgatttatcttcct

SEQ ID NO: 6337 - DNA, 47 bp, Artificial Sequence
  Synthetic
acaaacctcaaaacaatttaggaccttgagtataaagagccactagg

SEQ ID NO: 6338 - DNA, 43 bp, Artificial Sequence
  Synthetic
gaggcaaacttagaaaccgtttctgtttgaacttgcacttacc

SEQ ID NO: 6339 - DNA, 39 bp, Artificial Sequence
  Synthetic
aagaatgaagtgggccatgtgttgccatatcacccttgg

SEQ ID NO: 6340 - DNA, 44 bp, Artificial Sequence
  Synthetic
tcagaaagatgagacttgacaatgcttactctctcaacagggcc

SEQ ID NO: 6341 - DNA, 41 bp, Artificial Sequence
  Synthetic
aactcccattgtactggcatacatactggcaggaaccttct

SEQ ID NO: 6342 - DNA, 43 bp, Artificial Sequence
  Synthetic
agctgtagagattgcaaataagactacatcacctccatccagg

SEQ ID NO: 6343 - DNA, 44 bp, Artificial Sequence
  Synthetic
ttcagccaaaaaggaggacatggtgtcttgagaaaataccatgc

SEQ ID NO: 6344 - DNA, 48 bp, Artificial Sequence
  Synthetic
tgaggaatcacctaaagcaagtgagaatgtatagtcagatgcattcat

SEQ ID NO: 6345 - DNA, 45 bp, Artificial Sequence
  Synthetic
ccaagatgtgggaaatgggaacactaaatttttaagcacccattg

SEQ ID NO: 6346 - DNA, 48 bp, Artificial Sequence
  Synthetic
aattgttgcctttctgtttttcgccaaaaattgataaggctctccatt

SEQ ID NO: 6347 - DNA, 43 bp, Artificial Sequence
  Synthetic
tgaggaacttgaaagactaaaaccgacgggctttccttggtaa

SEQ ID NO: 6348 - DNA, 43 bp, Artificial Sequence
  Synthetic
actttccacacttttcatctctctgcattgcgacctatgggag

SEQ ID NO: 6349 - DNA, 45 bp, Artificial Sequence
  Synthetic
tcttggacaagaatggcatgtgaacatgtagatcttcatgaacaa

SEQ ID NO: 6350 - DNA, 48 bp, Artificial Sequence
  Synthetic
ctagcgaagttaaagcccaatcatcatcatggttaacagtatcagtac

SEQ ID NO: 6351 - DNA, 43 bp, Artificial Sequence
  Synthetic
attgacttgtttgttaagcgtcgaaaaccatctccacaaactg

SEQ ID NO: 6352 - DNA, 46 bp, Artificial Sequence
  Synthetic
tttgtcttttagatcaggcttggccaacaggtttctcgttaaaatt

SEQ ID NO: 6353 - DNA, 42 bp, Artificial Sequence
  Synthetic
ttaatcctgctaatgggcatatgctttacctgcagctacagc

SEQ ID NO: 6354 - DNA, 42 bp, Artificial Sequence
  Synthetic
cagtggcaggaagcatggtagctaaaacaagagcaactaacc

SEQ ID NO: 6355 - DNA, 44 bp, Artificial Sequence
  Synthetic
ctcctctgagtaaggatttacctgagcctacacctacacccata

SEQ ID NO: 6356 - DNA, 48 bp, Artificial Sequence
  Synthetic
tgttgagtacaaagtaacagtctggacatataaatcatcagatgccaa

SEQ ID NO: 6357 - DNA, 50 bp, Artificial Sequence
  Synthetic
acgaaattgtagtgttcgtgttaagccaccattagcagtaatatcataat

SEQ ID NO: 6358 - DNA, 46 bp, Artificial Sequence
  Synthetic
cagtagctgctggtttggaatcactctttaaatatgtaggtaccaa

SEQ ID NO: 6359 - DNA, 49 bp, Artificial Sequence
  Synthetic
atacatctttggttccacatacacgccttcactaataacatcaggaaat

SEQ ID NO: 6360 - DNA, 43 bp, Artificial Sequence
  Synthetic
tggtaatgttaaacctggtgaaactgaaatgccccttgtggtc

SEQ ID NO: 6361 - DNA, 43 bp, Artificial Sequence
  Synthetic
attgtgcttggtttgtacaaaatgatttgccatagcccaaaca

SEQ ID NO: 6362 - DNA, 44 bp, Artificial Sequence
  Synthetic
agaggctcggattaatgataagaagacgaaccatgctaaaaagc

SEQ ID NO: 6363 - DNA, 48 bp, Artificial Sequence
  Synthetic
ctcagtttgtatttattgccgtgcccacgtaatttacatataccatct

SEQ ID NO: 6364 - DNA, 50 bp, Artificial Sequence
  Synthetic
tttggtgattttatacaaacagcccgtcaacataggcatcatataagaat

SEQ ID NO: 6365 - DNA, 44 bp, Artificial Sequence
  Synthetic
cagatcctgctatgcacgttgcactaaaacaacaagttcgtaaa

SEQ ID NO: 6366 - DNA, 47 bp, Artificial Sequence
  Synthetic
tgctatcagtgctaagaatagagctggcctgtcatagtactaagaat

SEQ ID NO: 6367 - DNA, 46 bp, Artificial Sequence
  Synthetic
acatgaattttgttgttcacatggttcaaaacttgagcacattcat

SEQ ID NO: 6368 - DNA, 46 bp, Artificial Sequence
  Synthetic
aagtctagctatagatgcttaccctacacgaaagactttttggtat

SEQ ID NO: 6369 - DNA, 44 bp, Artificial Sequence
  Synthetic
tgaacgtttaaagttatttgctgcatggtagcagaagcatagct

SEQ ID NO: 6370 - DNA, 43 bp, Artificial Sequence
  Synthetic
atgttgctaattatcagcacattggagactttcccgtaccagg

SEQ ID NO: 6371 - DNA, 49 bp, Artificial Sequence
  Synthetic
ctttccactgcaaataggtttttcaaagtataacaatctctctcagcaa

SEQ ID NO: 6372 - DNA, 45 bp, Artificial Sequence
  Synthetic
tgatgcttttcctgtagccaagatctttatgcacatcatagacat

SEQ ID NO: 6373 - DNA, 48 bp, Artificial Sequence
  Synthetic
atcacacggtgtaatctaggtggggtagttacaatattcttcagcatg

SEQ ID NO: 6374 - DNA, 41 bp, Artificial Sequence
  Synthetic
ctcaaagttgagttttggttcgcctgtctgttcggctgaag

SEQ ID NO: 6375 - DNA, 43 bp, Artificial Sequence
  Synthetic
ttttacatttaggtgcagggtctgccagatggtaaccactgtc

SEQ ID NO: 6376 - DNA, 46 bp, Artificial Sequence
  Synthetic
atcgttcttgtgagagtactactgtcaggtaaacaagaacacctac

SEQ ID NO: 6377 - DNA, 47 bp, Artificial Sequence
  Synthetic
tcgtaaacgtagaagtatttctgctaaactgacattaaagggttcaa

SEQ ID NO: 6378 - DNA, 45 bp, Artificial Sequence
  Synthetic
aaatgcttatgtctctcaacagctccttctccatagctaaagcag

SEQ ID NO: 6379 - DNA, 44 bp, Artificial Sequence
  Synthetic
tacagggtgtcaaacttggcatacagtaacatatacgggcaaat

SEQ ID NO: 6380 - DNA, 44 bp, Artificial Sequence
  Synthetic
atctgagcgaaattaccaaacctagacacagtgaatttaggttg

SEQ ID NO: 6381 - DNA, 47 bp, Artificial Sequence
  Synthetic
tcaacagtgttttggtaaaagaggaccaagctttaacatttcagcat

SEQ ID NO: 6382 - DNA, 46 bp, Artificial Sequence
  Synthetic
ctggtactcagcacatttcaaatgggatcatcaagagtagcaagta

SEQ ID NO: 6383 - DNA, 39 bp, Artificial Sequence
  Synthetic
tgcagcaatatgcacccacttcgccttgttcattgatga

SEQ ID NO: 6384 - DNA, 42 bp, Artificial Sequence
  Synthetic
cgaaagaggcgaagaaacaattgatttcggtgggagactttg

SEQ ID NO: 6385 - DNA, 45 bp, Artificial Sequence
  Synthetic
cctaatggacctccttgttatcagttcaatgctcaatttcaaagc

SEQ ID NO: 6386 - DNA, 45 bp, Artificial Sequence
  Synthetic
aaaacgagtcaactaaagtgggctgtcaaagtctactttctctgg

SEQ ID NO: 6387 - DNA, 49 bp, Artificial Sequence
  Synthetic
gaattatttcacagcagaggtgtcccagtattaatgtatacccccttca

SEQ ID NO: 6388 - DNA, 45 bp, Artificial Sequence
  Synthetic
aaatgggagaaatactgtgtccttgccttgaaatttggcctatgg

SEQ ID NO: 6389 - DNA, 42 bp, Artificial Sequence
  Synthetic
ccccaagggagtggaagaagtgacttagccaatagagtccta

SEQ ID NO: 6390 - DNA, 45 bp, Artificial Sequence
  Synthetic
aattgggaggttttacgtacagatgatcaaccttccttcttggtc

SEQ ID NO: 6391 - DNA, 40 bp, Artificial Sequence
  Synthetic
ggcgataatggacgaagaacattccctttgaggatgttgc

SEQ ID NO: 6392 - DNA, 39 bp, Artificial Sequence
  Synthetic
tcctgagaggatccgtagccctatccactggccacagcg

SEQ ID NO: 6393 - DNA, 44 bp, Artificial Sequence
  Synthetic
aagaggacaactatccactagaggagaatccattgcttccacgt

SEQ ID NO: 6394 - DNA, 47 bp, Artificial Sequence
  Synthetic
aagctttcagcatctattactgacactgtatatttctcctagcacac

SEQ ID NO: 6395 - DNA, 42 bp, Artificial Sequence
  Synthetic
aagagacggagagagaccgaggttcaatgttggacgaggagg

SEQ ID NO: 6396 - DNA, 45 bp, Artificial Sequence
  Synthetic
aaatgttggaggtggagatgtaaaaaaactgtagtgcatgctaaa

SEQ ID NO: 6397 - DNA, 43 bp, Artificial Sequence
  Synthetic
cggaggacttatatagggcttgttgcaagtgtagtttgttcaa

SEQ ID NO: 6398 - DNA, 43 bp, Artificial Sequence
  Synthetic
acacctgttaaaccaaatacagctgttgcagatgactcaggag

SEQ ID NO: 6399 - DNA, 39 bp, Artificial Sequence
  Synthetic
tgcagcctatacctgaaaggcctgggctgttgcatcaat

SEQ ID NO: 6400 - DNA, 45 bp, Artificial Sequence
  Synthetic
cactttagttagagccagggaactggatcacttataggtacctgt

SEQ ID NO: 6401 - DNA, 40 bp, Artificial Sequence
  Synthetic
ggtggttcgagtgagcagatgtgcactgtttgacctatag

SEQ ID NO: 6402 - DNA, 50 bp, Artificial Sequence
  Synthetic
tacaggtgaatattgggatgtagcagtttactaattgtattgcaggacaa

SEQ ID NO: 6403 - DNA, 39 bp, Artificial Sequence
  Synthetic
ctttcatggaagacgggagcaatcacccatagtccctgc

SEQ ID NO: 6404 - DNA, 38 bp, Artificial Sequence
  Synthetic
gtacctccccctcagactgcggtaaatgacagcgggtt

SEQ ID NO: 6405 - DNA, 44 bp, Artificial Sequence
  Synthetic
tcgcactgtttatgcagagcatgcagtattgtaaacaacattct

SEQ ID NO: 6406 - DNA, 43 bp, Artificial Sequence
  Synthetic
ttttggtaagtgacaaatgcccggctttaaagtgcacggtaac

SEQ ID NO: 6407 - DNA, 42 bp, Artificial Sequence
  Synthetic
attcggatttccatttcatcgacgatagtgcattcgggtcac

SEQ ID NO: 6408 - DNA, 46 bp, Artificial Sequence
  Synthetic
tcattgaaattggagtaacacggatattttgttggctttctctagg

SEQ ID NO: 6409 - DNA, 41 bp, Artificial Sequence
  Synthetic
aagaggcgaagagacaattgaaggttcggtgggagactttg

SEQ ID NO: 6410 - DNA, 43 bp, Artificial Sequence
  Synthetic
agactttgatgactgcaaagatgtttagagatctgggctctgg

SEQ ID NO: 6411 - DNA, 43 bp, Artificial Sequence
  Synthetic
gggctactgaatacataatgaagggaaagtcatccatggctgc

SEQ ID NO: 6412 - DNA, 43 bp, Artificial Sequence
  Synthetic
tgtgttcttgaaataggagacatgcataggaacatgggcctcg

SEQ ID NO: 6413 - DNA, 41 bp, Artificial Sequence
  Synthetic
gggagtggaggaaggctctaagacgcatatagactgttgaa

SEQ ID NO: 6414 - DNA, 39 bp, Artificial Sequence
  Synthetic
gtgatgccccctttgatgacacaagtgtgctgcctcttc

SEQ ID NO: 6415 - DNA, 48 bp, Artificial Sequence
  Synthetic
cagaaaataactggaggccttatggactgagaaatttgctttaaggat

SEQ ID NO: 6416 - DNA, 40 bp, Artificial Sequence
  Synthetic
acagagattcgcttggggaactgttttggagggagtgaag

SEQ ID NO: 6417 - DNA, 43 bp, Artificial Sequence
  Synthetic
agggacaacatgaccaagaaaatagctcttttttgtcagcttt

SEQ ID NO: 6418 - DNA, 45 bp, Artificial Sequence
  Synthetic
ccgttggagggaatgagaagagttagtcatcatctttctcacaac

SEQ ID NO: 6419 - DNA, 43 bp, Artificial Sequence
  Synthetic
tccaatcctctgatgatttcgctcctgcttgtattccctcatg

SEQ ID NO: 6420 - DNA, 43 bp, Artificial Sequence
  Synthetic
aacaacgaccttggaccagctgtagtctttaatgaacagctga

SEQ ID NO: 6421 - DNA, 41 bp, Artificial Sequence
  Synthetic
tcttccctagcagttcatatcggatcaattcgggccctaga

SEQ ID NO: 6422 - DNA, 38 bp, Artificial Sequence
  Synthetic
ccagctacccgaccctacaacttgcagtgatgtgtcca

SEQ ID NO: 6423 - DNA, 47 bp, Artificial Sequence
  Synthetic
tggaaccatataatgaagtgcaagacctctgagttgtttaattcctc

SEQ ID NO: 6424 - DNA, 44 bp, Artificial Sequence
  Synthetic
acatgccttaaaacgaaagtatggacttgctgtatcacgacatg

SEQ ID NO: 6425 - DNA, 48 bp, Artificial Sequence
  Synthetic
tgacagtgtatttgacctgtcagatcatatgctatgtcactttcatct

SEQ ID NO: 6426 - DNA, 41 bp, Artificial Sequence
  Synthetic
gacgtggtccagattagatttgcaacgttgggatagggcat

SEQ ID NO: 6427 - DNA, 45 bp, Artificial Sequence
  Synthetic
aaaagcaaagcacatgaagcaatactctgatttagcaagactctc

SEQ ID NO: 6428 - DNA, 40 bp, Artificial Sequence
  Synthetic
agagaattacaacaccccaccagaacccccactcttttgg

SEQ ID NO: 6429 - DNA, 43 bp, Artificial Sequence
  Synthetic
ggccttcagatccatctattgttacaacaggagctccagatgt

SEQ ID NO: 6430 - DNA, 41 bp, Artificial Sequence
  Synthetic
cacatggatacgaggaaattccaaataggttcggtgcctct

SEQ ID NO: 6431 - DNA, 46 bp, Artificial Sequence
  Synthetic
tgccttaacatccagacgtgggacatagttagttttttacccaatc

SEQ ID NO: 6432 - DNA, 43 bp, Artificial Sequence
  Synthetic
tcctgaaacacaacgtttagtatggtaacacctaaaggctgcc

SEQ ID NO: 6433 - DNA, 41 bp, Artificial Sequence
  Synthetic
attggttgtgttcctgctattggcagtcacctgtttgcaca

SEQ ID NO: 6434 - DNA, 43 bp, Artificial Sequence
  Synthetic
tttacgacgcgaacagttatttgcctgcatctcctatagtgcc

SEQ ID NO: 6435 - DNA, 40 bp, Artificial Sequence
  Synthetic
gaaccctatgtttcatgcgacctgttgttccttggctgag

SEQ ID NO: 6436 - DNA, 42 bp, Artificial Sequence
  Synthetic
tctgcagtagtatggtacaacagaagtatgtttcgggcccat

SEQ ID NO: 6437 - DNA, 48 bp, Artificial Sequence
  Synthetic
ggctcaaatagaccagtgattcagcatatatattgactagtgtgtgtc

SEQ ID NO: 6438 - DNA, 44 bp, Artificial Sequence
  Synthetic
ctcgaggtctggatacgagatgggctttgatctatcatctgtca

SEQ ID NO: 6439 - DNA, 42 bp, Artificial Sequence
  Synthetic
aaaagtacacatcaggaaggcaaattgccatcatccacttca

SEQ ID NO: 6440 - DNA, 49 bp, Artificial Sequence
  Synthetic
aaaaggtcgaaaggttgaaacatgcctccttattttaacttgatttctg

SEQ ID NO: 6441 - DNA, 42 bp, Artificial Sequence
  Synthetic
atgctagaaagagaattggtccgttaaacactgcctgttccg

SEQ ID NO: 6442 - DNA, 41 bp, Artificial Sequence
  Synthetic
tctctcttggaaatgtgccacagtctaaggatgtccaccat

SEQ ID NO: 6443 - DNA, 45 bp, Artificial Sequence
  Synthetic
gaagagcaacagctattctcagaaactctcccgcttactatcaac

SEQ ID NO: 6444 - DNA, 41 bp, Artificial Sequence
  Synthetic
agatcaatggccctgagtcacaatttcccagttcctgatta

SEQ ID NO: 6445 - DNA, 39 bp, Artificial Sequence
  Synthetic
tgccccaccagaacagagtatcaaccctgatcctctcac

SEQ ID NO: 6446 - DNA, 44 bp, Artificial Sequence
  Synthetic
aagagatatggcccagcattaagcacattagccttctctccttt

SEQ ID NO: 6447 - DNA, 43 bp, Artificial Sequence
  Synthetic
tggaggagtattgcaaacattatggatggcaaaacacgcatct

SEQ ID NO: 6448 - DNA, 46 bp, Artificial Sequence
  Synthetic
ggttagattaagggtttgtgtacgtaagagaagcacttgaagactg

SEQ ID NO: 6449 - DNA, 49 bp, Artificial Sequence
  Synthetic
aaaaggagattgtttttggacagtgctacctgtgtaacagtattttcag

SEQ ID NO: 6450 - DNA, 42 bp, Artificial Sequence
  Synthetic
gggaagtggatctagaacggttcattaatggcggatcccaag

SEQ ID NO: 6451 - DNA, 45 bp, Artificial Sequence
  Synthetic
gtggatcacgttctggtagacccatctactgttacagatggtctt

SEQ ID NO: 6452 - DNA, 43 bp, Artificial Sequence
  Synthetic
actggcggtgtcactcaatcctagaactgcaaaactagtctca

SEQ ID NO: 6453 - DNA, 45 bp, Artificial Sequence
  Synthetic
agcagcaccagacaatgcatttttctgttagtataggtctgtgta

SEQ ID NO: 6454 - DNA, 46 bp, Artificial Sequence
  Synthetic
agaccctataaatgcaacagatgttgctttctgcatattcatcctc

SEQ ID NO: 6455 - DNA, 43 bp, Artificial Sequence
  Synthetic
taggtgatacagagaatccagcaacaattcattcgttggtctg

SEQ ID NO: 6456 - DNA, 45 bp, Artificial Sequence
  Synthetic
gtgtgccattagaattagtggacactatcactggtcatgcgtaag

SEQ ID NO: 6457 - DNA, 39 bp, Artificial Sequence
  Synthetic
ctagtggacagcagtgaccttcaggcgccaaaaacttac

SEQ ID NO: 6458 - DNA, 49 bp, Artificial Sequence
  Synthetic
ctgtgtggaaacctggatattgtgtaagatgtacctttagtgtctttgt

SEQ ID NO: 6459 - DNA, 45 bp, Artificial Sequence
  Synthetic
gtgcctggatattttacacagcagttccttatatcccactccaaa

SEQ ID NO: 6460 - DNA, 46 bp, Artificial Sequence
  Synthetic
agaagtgtaccagtagcattgtttattgttccatgtacaaaacttg

SEQ ID NO: 6461 - DNA, 43 bp, Artificial Sequence
  Synthetic
agatggaaacgaggtgtctgtgaggtaatttaatttgcactgg

SEQ ID NO: 6462 - DNA, 43 bp, Artificial Sequence
  Synthetic
cattggcagcatctgaaagcaccatattgggatttctttaggc

SEQ ID NO: 6463 - DNA, 41 bp, Artificial Sequence
  Synthetic
atgtgcattttaccaaggaagcattccagtcctcacttgcc

SEQ ID NO: 6464 - DNA, 45 bp, Artificial Sequence
  Synthetic
ttttacatgggtggcggatgcctttgtgatgtattagtaaatcct

SEQ ID NO: 6465 - DNA, 40 bp, Artificial Sequence
  Synthetic
caggtgggggtcgggtaacacaggaggcccaataggatct

SEQ ID NO: 6466 - DNA, 43 bp, Artificial Sequence
  Synthetic
acagaccctgttacacaatctgccagatccttctgttacagca

SEQ ID NO: 6467 - DNA, 45 bp, Artificial Sequence
  Synthetic
gtatccaccctgactcatttgaattcaataatacctgtgtcaccg

SEQ ID NO: 6468 - DNA, 46 bp, Artificial Sequence
  Synthetic
ccacagtccggtaaactttatctaccgtattcatcagtaggcagta

SEQ ID NO: 6469 - DNA, 38 bp, Artificial Sequence
  Synthetic
cattgggatgctgcaaagcctaaaggaggacatgcacc

SEQ ID NO: 6470 - DNA, 45 bp, Artificial Sequence
  Synthetic
tgccaccagctataaacattatctgtgagaggaaccttgcataat

SEQ ID NO: 6471 - DNA, 41 bp, Artificial Sequence
  Synthetic
tctacctcctctagaaagcggtcttaaaccccccgtctacg

SEQ ID NO: 6472 - DNA, 43 bp, Artificial Sequence
  Synthetic
cttgatcctatgattgttgttggcatacacctctcccggttag

SEQ ID NO: 6473 - DNA, 50 bp, Artificial Sequence
  Synthetic
gcactatccctatacaatagacaccgcaataatagtaaatctaacacctg

SEQ ID NO: 6474 - DNA, 45 bp, Artificial Sequence
  Synthetic
tagcgaatggtatgttgtgacagtagctcttccattgtatccaaa

SEQ ID NO: 6475 - DNA, 48 bp, Artificial Sequence
  Synthetic
tttcacctcagagacaaagcaaaagtagcttcatcttctcctaatcca

SEQ ID NO: 6476 - DNA, 43 bp, Artificial Sequence
  Synthetic
gtgccgctgcagaagaagtaaaaaatcacaatgttgctgcata

SEQ ID NO: 6477 - DNA, 44 bp, Artificial Sequence
  Synthetic
ccaaattatttctgctcctgttaccgctttggaagtgtagtcgt

SEQ ID NO: 6478 - DNA, 39 bp, Artificial Sequence
  Synthetic
ctccagagagtcgccccgtaactctgtcggtcgacttcg

SEQ ID NO: 6479 - DNA, 47 bp, Artificial Sequence
  Synthetic
agaccctataagttcaggttctgaatctgcagcacttatatctgaaa

SEQ ID NO: 6480 - DNA, 44 bp, Artificial Sequence
  Synthetic
ggggagggatttcaacgtgttatcaatattttgtgttggctgtt

SEQ ID NO: 6481 - DNA, 48 bp, Artificial Sequence
  Synthetic
gaacaatacgagtcagcagattaggctttctgaccaatagttagtcca

SEQ ID NO: 6482 - DNA, 45 bp, Artificial Sequence
  Synthetic
tgaaggagaatctatgatcatgccccttgcagctatttctggaat

SEQ ID NO: 6483 - DNA, 43 bp, Artificial Sequence
  Synthetic
aatgttttacagatggctctttggtgagtacacgagcaacagg

SEQ ID NO: 6484 - DNA, 45 bp, Artificial Sequence
  Synthetic
tgtctttaacccagaaagagagagaccacctctaccaatttcaag

SEQ ID NO: 6485 - DNA, 38 bp, Artificial Sequence
  Synthetic
ccagccactggtgaacactgggatccttttgctggagc

SEQ ID NO: 6486 - DNA, 41 bp, Artificial Sequence
  Synthetic
ctcggatttaacaagcattgctgttgcctgtttcccctttg

SEQ ID NO: 6487 - DNA, 40 bp, Artificial Sequence
  Synthetic
gcagtttggcttcgaggtgcattgatggcctggaactgac

SEQ ID NO: 6488 - DNA, 39 bp, Artificial Sequence
  Synthetic
ccagagacggtgttgcgccggcaaaggaggaccaggttc

SEQ ID NO: 6489 - DNA, 43 bp, Artificial Sequence
  Synthetic
gtagacacccagttatgcagtgtgatagaattccaggaggttt

SEQ ID NO: 6490 - DNA, 36 bp, Artificial Sequence
  Synthetic
agtaggtgcctccagagcccaagtttgggggcgccc

SEQ ID NO: 6491 - DNA, 38 bp, Artificial Sequence; identical to SEQ ID NO: 5838
  Synthetic

SEQ ID NO: 6492 - DNA, 39 bp, Artificial Sequence
  Synthetic
cctggggccaccttcatcaccacttcggtctcccctagg

SEQ ID NO: 6493 - DNA, 36 bp, Artificial Sequence
  Synthetic
gtggctgcctttgggatgcagcaggcaaggcgagca

SEQ ID NO: 6494 - DNA, 39 bp, Artificial Sequence
  Synthetic
agttgatgatctgtaggcgcacatctacgaggccatcaa

SEQ ID NO: 6495 - DNA, 35 bp, Artificial Sequence
  Synthetic
atgcgggatctgccggtcgaaacccgatggccccg

SEQ ID NO: 6496 - DNA, 36 bp, Artificial Sequence
  Synthetic
actcgtgaggcaccccatcctggctcccgcgcatac

SEQ ID NO: 6497 - DNA, 40 bp, Artificial Sequence
  Synthetic
tccccgggagattcgcgacacatgatcagccacgaacgaa

SEQ ID NO: 6498 - DNA, 39 bp, Artificial Sequence
  Synthetic
gtttcagatcccacgcctccaaaaacacggccaagggag

SEQ ID NO: 6499 - DNA, 41 bp, Artificial Sequence
  Synthetic
agctatgcctcccgtcgactgagaagcccagttatccaccc

SEQ ID NO: 6500 - DNA, 40 bp, Artificial Sequence
  Synthetic
cggccaatcccggggtaactagggactggctgtctcctac

SEQ ID NO: 6501 - DNA, 39 bp, Artificial Sequence
  Synthetic
cctgcgtagaacgatggggcgctggtcggcacacatccg

SEQ ID NO: 6502 - DNA, 39 bp, Artificial Sequence
  Synthetic
gactctgtttccagccagagggacaatttctggcggcgg

SEQ ID NO: 6503 - DNA, 37 bp, Artificial Sequence
  Synthetic
ccgccatctcgtgggccttcgctggaagagcaggtcc

SEQ ID NO: 6504 - DNA, 39 bp, Artificial Sequence
  Synthetic
ggcctcattcgcctctcgcgctccgagaacaggaagaca

SEQ ID NO: 6505 - DNA, 39 bp, Artificial Sequence
  Synthetic
gcaggcaggcctccagcttaaacaagggaagagcgggag

SEQ ID NO: 6506 - DNA, 37 bp, Artificial Sequence
  Synthetic
gccgtgcctaggatgcggaggatgtgaatgcccccgg

SEQ ID NO: 6507 - DNA, 38 bp, Artificial Sequence
  Synthetic
tgcgagcaaaggcggcgatccggaacagatcacagtca

SEQ ID NO: 6508 - DNA, 36 bp, Artificial Sequence
  Synthetic
tcgccagagggatctgcacctggaggctgtgctccc

SEQ ID NO: 6509 - DNA, 38 bp, Artificial Sequence
  Synthetic
cgacctcagctccgagtgggaagaggtagcgccccagg

SEQ ID NO: 6510 - DNA, 35 bp, Artificial Sequence
  Synthetic
cccacttttggcgcgacctcctcggcgcacaggtt

SEQ ID NO: 6511 - DNA, 35 bp, Artificial Sequence
  Synthetic
actcctgctggccctcccttcaccgactgccccct

SEQ ID NO: 6512 - DNA, 36 bp, Artificial Sequence
  Synthetic
catgagcaagggcccagggacttccaatcccccggg

SEQ ID NO: 6513 - DNA, 38 bp, Artificial Sequence
  Synthetic
ttccggccgttagcgtgccaccacagctatgatgccag

SEQ ID NO: 6514 - DNA, 38 bp, Artificial Sequence
  Synthetic
gcctctggctgttcagctcgcttctgcttctgcctggc

SEQ ID NO: 6515 - DNA, 36 bp, Artificial Sequence
  Synthetic
aggggtcagcggctgtcaaccggtcttcctctgcca

SEQ ID NO: 6516 - DNA, 36 bp, Artificial Sequence
  Synthetic
cggccaggctctgaccagattgagaccctggcgcac

SEQ ID NO: 6517 - DNA, 37 bp, Artificial Sequence
  Synthetic
agatgcggcgcagacagccacagggggatgccagagg

SEQ ID NO: 6518 - DNA, 40 bp, Artificial Sequence
  Synthetic
ctcgtcaggccgcgagaggatggcctcaaacactgacatt

SEQ ID NO: 6519 - DNA, 35 bp, Artificial Sequence
  Synthetic
cctttgagcccgaggtgccagagtgctccggctgc

SEQ ID NO: 6520 - DNA, 40 bp, Artificial Sequence
  Synthetic
gtagcgccgctgattctggacatcatcgatcccggctaca

SEQ ID NO: 6521 - DNA, 42 bp, Artificial Sequence
  Synthetic
tctgttccttctgctccagtgctcattacctctcgctgtcga

SEQ ID NO: 6522 - DNA, 37 bp, Artificial Sequence
  Synthetic
gatgcgcctgacgttgtgcggccccactgtatccacc

SEQ ID NO: 6523 - DNA, 44 bp, Artificial Sequence
  Synthetic
tcgaagagtttatatggatgtgcatatggtttttgtctgatggc

SEQ ID NO: 6524 - DNA, 41 bp, Artificial Sequence
  Synthetic
ttggcttctgacatctcccagctgtgcgtagtgttgctgtg

SEQ ID NO: 6525 - DNA, 37 bp, Artificial Sequence
  Synthetic
agtagcgggcctcggtgtggatggacgaggagctcat

SEQ ID NO: 6526 - DNA, 40 bp, Artificial Sequence
  Synthetic
gcagtggctatgcctccatgccaagagctggtgggagagg

SEQ ID NO: 6527 - DNA, 38 bp, Artificial Sequence
  Synthetic
gagatggtgtccggagaccccacaccgtgggccccttt

SEQ ID NO: 6528 - DNA, 41 bp, Artificial Sequence
  Synthetic
aagagccagggggggaagtcgtcttttcaccacgtccacga

SEQ ID NO: 6529 - DNA, 39 bp, Artificial Sequence
  Synthetic
aagcctgcctcatccttgaccaaagcagcagcctcagga

SEQ ID NO: 6530 - DNA, 39 bp, Artificial Sequence
  Synthetic
ccctgggcttggttcgcctccaaatactggccggtactc

SEQ ID NO: 6531 - DNA, 37 bp, Artificial Sequence
  Synthetic
tgggcagtaggctcggagtgtcacgggagccacaacc

SEQ ID NO: 6532 - DNA, 36 bp, Artificial Sequence
  Synthetic
cccgcctggtgctggaagttcagggacgttggtggc

SEQ ID NO: 6533 - DNA, 39 bp, Artificial Sequence
  Synthetic
agatggccatcagtaggcaccctggcccgcagacacatt

SEQ ID NO: 6534 - DNA, 38 bp, Artificial Sequence
  Synthetic
cagtcctaggtcagcggccgactcgggggcctctacac

SEQ ID NO: 6535 - DNA, 38 bp, Artificial Sequence
  Synthetic
tgtgctggaaagagaggctggatcttgtccgccgccag

SEQ ID NO: 6536 - DNA, 37 bp, Artificial Sequence
  Synthetic
tgggacctggggccgtagacctggtgcctgaagaccc

SEQ ID NO: 6537 - DNA, 37 bp, Artificial Sequence
  Synthetic
tgctgtatgcctcgcagcgctatcctgctgcagggcg

SEQ ID NO: 6538 - DNA, 40 bp, Artificial Sequence
  Synthetic
ggggggcctggagtcgatcaccacccgctgtatgaggaag

SEQ ID NO: 6539 - DNA, 36 bp, Artificial Sequence
  Synthetic
tggcacgcgattggggcacccctcctcgtgcaccta

SEQ ID NO: 6540 - DNA, 37 bp, Artificial Sequence
  Synthetic
aagggcgcacaccactcctgtgatggatccagcgagt

SEQ ID NO: 6541 - DNA, 37 bp, Artificial Sequence
  Synthetic
acaccctcaacccccgagtgccggatcaacgtacacg

SEQ ID NO: 6542 - DNA, 35 bp, Artificial Sequence
  Synthetic
gccctccagatcgccaccttgggggtgcagggtga

SEQ ID NO: 6543 - DNA, 42 bp, Artificial Sequence
  Synthetic
tgacggatgtctttaacggcgcaggatgtgttggcctttagg

SEQ ID NO: 6544 - DNA, 42 bp, Artificial Sequence
  Synthetic
gcgtaacgtcattgtccaccgacattcatgacctgccccact

SEQ ID NO: 6545 - DNA, 40 bp, Artificial Sequence
  Synthetic
actgacccccttgagcacgcgaagccgtctctctgagatg

SEQ ID NO: 6546 - DNA, 39 bp, Artificial Sequence
  Synthetic
gtgtcctggtttaaggccgcagtgctgctccaatgtccg

SEQ ID NO: 6547 - DNA, 36 bp, Artificial Sequence
  Synthetic
tgtacccatcccggccctcatgggcaggctctcacg

SEQ ID NO: 6548 - DNA, 39 bp, Artificial Sequence
  Synthetic
tcgatgagggagcaaacacccgcacagtcacggggatct

SEQ ID NO: 6549 - DNA, 43 bp, Artificial Sequence
  Synthetic
gtggtcagcagcagatagtgaatcttgagctccaactactttg

SEQ ID NO: 6550 - DNA, 36 bp, Artificial Sequence
  Synthetic
cgtagcaccacgtggctgctccagcccctgcatacc

SEQ ID NO: 6551 - DNA, 36 bp, Artificial Sequence
  Synthetic
cgctctccgggcacgtcttagttcggggcctgtgtc

SEQ ID NO: 6552 - DNA, 37 bp, Artificial Sequence
  Synthetic
cccgtgcctccttactacggatggatcgcgagggagc

SEQ ID NO: 6553 - DNA, 37 bp, Artificial Sequence
  Synthetic
aggcctctgcgtccggagtcacagacttggccttggg

SEQ ID NO: 6554 - DNA, 40 bp, Artificial Sequence
  Synthetic
ctggatgagggagcgccaattacaagggtgggctaactct

SEQ ID NO: 6555 - DNA, 37 bp, Artificial Sequence
  Synthetic
ccagggtccccacagtggatggctctgaccagcaaga

SEQ ID NO: 6556 - DNA, 38 bp, Artificial Sequence
  Synthetic
gggcagttcctcgttgcgcacccagatgcctcacctgg

SEQ ID NO: 6557 - DNA, 39 bp, Artificial Sequence
  Synthetic
cagacgcccccagccctaacaggcacatctacagcatca

SEQ ID NO: 6558 - DNA, 37 bp, Artificial Sequence
  Synthetic
ccaccaccgtcagggagtctaggggtggtggatgtgc

SEQ ID NO: 6559 - DNA, 36 bp, Artificial Sequence
  Synthetic
cacgttgctgggtgggggaaccttcatcacggggcc

SEQ ID NO: 6560 - DNA, 36 bp, Artificial Sequence
  Synthetic
ctgtcctcccagggacccgacccgcatgcgcaacca

SEQ ID NO: 6561 - DNA, 40 bp, Artificial Sequence
  Synthetic
ggtggttacaggagacgtgggttggttctgcccaaccacg

SEQ ID NO: 6562 - DNA, 38 bp, Artificial Sequence
  Synthetic
cgtagctcaccgccagctccggactcgggagccttaat

SEQ ID NO: 6563 - DNA, 42 bp, Artificial Sequence
  Synthetic
aacgatggaatggccaccaggtggcaataaccgaggccttca

SEQ ID NO: 6564 - DNA, 38 bp, Artificial Sequence
  Synthetic
gcaccgtcaggcacctgtgctcttagggaggtggccac

SEQ ID NO: 6565 - DNA, 38 bp, Artificial Sequence
  Synthetic
gagtctgcgatagagggccaggcacaagagcgccgcct

SEQ ID NO: 6566 - DNA, 39 bp, Artificial Sequence
  Synthetic
cgtacgtgcgtgtctttgcccaggaagctgtacgcggag

SEQ ID NO: 6567 - DNA, 37 bp, Artificial Sequence
  Synthetic
tggactcagccaccttgtcgttgaggaccccggtcga

SEQ ID NO: 6568 - DNA, 35 bp, Artificial Sequence
  Synthetic
gccgctgggtgacacagacaacaccccccgatgcc

SEQ ID NO: 6569 - DNA, 44 bp, Artificial Sequence
  Synthetic
tttcaggctttgcaaacacagtgtattagttgctctgtaactgg

SEQ ID NO: 6570 - DNA, 42 bp, Artificial Sequence
  Synthetic
atagggtggacggtgagcaaccaccacagtatgaaaccaccc

SEQ ID NO: 6571 - DNA, 41 bp, Artificial Sequence
  Synthetic
aacaacatgtttggactgggtagttttacaccctccgcaac

SEQ ID NO: 6572 - DNA, 40 bp, Artificial Sequence
  Synthetic
agaagtacgcctgctgcattatatgtcacttgcgtttccc

SEQ ID NO: 6573 - DNA, 50 bp, Artificial Sequence
  Synthetic
gtagacattataaacgagcagagcacacttctaaatgatatccattgtga

SEQ ID NO: 6574 - DNA, 40 bp, Artificial Sequence
  Synthetic
tttgggtggggttgtcatttcattttgcatcagctaacgg

SEQ ID NO: 6575 - DNA, 43 bp, Artificial Sequence
  Synthetic
atgtgttgttatttaaggcaagggaaataccaagcacaggcac

SEQ ID NO: 6576 - DNA, 46 bp, Artificial Sequence
  Synthetic
gctggaaaaaaaaaggctacactgacacattgtcttttcctctttg

SEQ ID NO: 6577 - DNA, 40 bp, Artificial Sequence
  Synthetic
aaacctactgaccacggacccgggtttcgttggtgcccag

SEQ ID NO: 6578 - DNA, 43 bp, Artificial Sequence
  Synthetic
accaggatatatgtcattgtttgcagtacccttaacgttccgc

SEQ ID NO: 6579 - DNA, 49 bp, Artificial Sequence
  Synthetic
tactgctactacgtgtacataacctcacaacaggatacatatatgcaat

SEQ ID NO: 6580 - DNA, 44 bp, Artificial Sequence
  Synthetic
ctcctactcctgtagtgccgaaataatacctcagttccatacac

SEQ ID NO: 6581 - DNA, 47 bp, Artificial Sequence
  Synthetic
aaatcgtatagttgtccccaaagtgcaaatttatttgggtcgggtag

SEQ ID NO: 6582 - DNA, 48 bp, Artificial Sequence
  Synthetic
gctgtttgatgttaatcctggtgagcaaccaataatacatagttgtgt

SEQ ID NO: 6583 - DNA, 44 bp, Artificial Sequence
  Synthetic
tatcagattatttcgaatggctgcattaaaacattgctctcggc

SEQ ID NO: 6584 - DNA, 41 bp, Artificial Sequence
  Synthetic
actggctacaacgtgcacaggttacaaaaagcagattgccc

SEQ ID NO: 6585 - DNA, 41 bp, Artificial Sequence
  Synthetic
ggtgatacctaccgctttttacattttctgcaggaggagga

SEQ ID NO: 6586 - DNA, 38 bp, Artificial Sequence
  Synthetic
cagtgaccatgccctgccttaacggcggccattttagg

SEQ ID NO: 6587 - DNA, 42 bp, Artificial Sequence
  Synthetic
ccattgtttggggcatatagttgttacactgctgttgccaaa

SEQ ID NO: 6588 - DNA, 42 bp, Artificial Sequence
  Synthetic
ataccacttctgtcactggctgtgttaaggaaatgcaagcac

SEQ ID NO: 6589 - DNA, 38 bp, Artificial Sequence
  Synthetic
tcctgaagaggaggagcgactgcattacaggtaccgca

SEQ ID NO: 6590 - DNA, 42 bp, Artificial Sequence
  Synthetic
aaaacgaaagtatctgacaagccctacagcttccagtctcgg

SEQ ID NO: 6591 - DNA, 45 bp, Artificial Sequence
  Synthetic
tgaagttatgtgccagcctcccgaccgtttataaaaatacaaagc

SEQ ID NO: 6592 - DNA, 45 bp, Artificial Sequence
  Synthetic
ggcagcatggataaataaatgttgctgtgcaataggtttccaatc

SEQ ID NO: 6593 - DNA, 44 bp, Artificial Sequence
  Synthetic
aaaagctggctattccgttgatgtgtgtatggaaaggctttagc

SEQ ID NO: 6594 - DNA, 41 bp, Artificial Sequence
  Synthetic
agaagaaccaggtcccctcagcatgtcctgttcccacctcc

SEQ ID NO: 6595 - DNA, 42 bp, Artificial Sequence
  Synthetic
attcctttggaaactttacctccaaggcctaacgactggaat

SEQ ID NO: 6596 - DNA, 42 bp, Artificial Sequence
  Synthetic
ctgacccgattcctcccagatttcaataactacagcatttgc

SEQ ID NO: 6597 - DNA, 45 bp, Artificial Sequence
  Synthetic
agcccaatttcgactattgttgaaagcatatctgaagtgtcatgt

SEQ ID NO: 6598 - DNA, 41 bp, Artificial Sequence
  Synthetic
aattgcctttcagatgacactgtctactggctttgcaggag

SEQ ID NO: 6599 - DNA, 41 bp, Artificial Sequence
  Synthetic
ggttgtgaaccagcgttaggtttaacctcatcactgcaagg

SEQ ID NO: 6600 - DNA, 40 bp, Artificial Sequence
  Synthetic
tttcagctgaattgtcccagtttttagcagccctgtttga

SEQ ID NO: 6601 - DNA, 40 bp, Artificial Sequence
  Synthetic
ttgcggaacagcattaacagaacaacttgtagctccttgt

SEQ ID NO: 6602 - DNA, 40 bp, Artificial Sequence
  Synthetic
gcttgcctgcagtgttggaaaccgcatcaggctgatccag

SEQ ID NO: 6603 - DNA, 39 bp, Artificial Sequence
  Synthetic
ctccaggagcttctgttgggccttcaccgtcggccatag

SEQ ID NO: 6604 - DNA, 41 bp, Artificial Sequence
  Synthetic
acagacagcaggaggcacaagggccaacggactagctagat

SEQ ID NO: 6605 - DNA, 38 bp, Artificial Sequence
  Synthetic
gcacagggggggtacaggaagtgctgtaactgcacccg

SEQ ID NO: 6606 - DNA, 44 bp, Artificial Sequence
  Synthetic
cagcaacactgtcaatatgcacaatctcactagcattaggacca

SEQ ID NO: 6607 - DNA, 45 bp, Artificial Sequence
  Synthetic
agaaacaccagaatggattgtaagaactgaaactggcattcttct

SEQ ID NO: 6608 - DNA, 42 bp, Artificial Sequence
  Synthetic
ggcacaaatgacaatgtcagaatgaccgtactatgggtctcc

SEQ ID NO: 6609 - DNA, 43 bp, Artificial Sequence
  Synthetic
gctgcagccattatgtgatgcggtatctatatagctccagcac

SEQ ID NO: 6610 - DNA, 41 bp, Artificial Sequence
  Synthetic
tgatgcaaactggaaatgcttctattgtcctcctggtcgtc

SEQ ID NO: 6611 - DNA, 38 bp, Artificial Sequence
  Synthetic
acatggaccaaggtgtctgggttacacgtgtcccttcg

SEQ ID NO: 6612 - DNA, 42 bp, Artificial Sequence
  Synthetic
acagaagacaggatccagcggcgctgtcagggttacactggt

SEQ ID NO: 6613 - DNA, 39 bp, Artificial Sequence
  Synthetic
gatggtcaacgtgcagtaacaatcatgccacagggttac

SEQ ID NO: 6614 - DNA, 46 bp, Artificial Sequence
  Synthetic
tggcgttactgcttttcttattgtgtatgtatatgatcaggaggcc

SEQ ID NO: 6615 - DNA, 43 bp, Artificial Sequence
  Synthetic
atcctgtagtactgtggacacctaagacacacgaaaagcaaca

SEQ ID NO: 6616 - DNA, 35 bp, Artificial Sequence
  Synthetic
attgggacccgaccccccataacgacaggggggcg

SEQ ID NO: 6617 - DNA, 45 bp, Artificial Sequence
  Synthetic
acagaggaaaccatactatttgagcatccaaaaagtcaggatccg

SEQ ID NO: 6618 - DNA, 43 bp, Artificial Sequence
  Synthetic
gttcccaaggtgtctggatatcaacttattgggatcaggcaaa

SEQ ID NO: 6619 - DNA, 45 bp, Artificial Sequence
  Synthetic
acccagctatttattatagggtgcaagacatattgcatggggtac

SEQ ID NO: 6620 - DNA, 42 bp, Artificial Sequence
  Synthetic
tctgtttacgtagggaacagatgtgaattgcgtcgcccatag

SEQ ID NO: 6621 - DNA, 48 bp, Artificial Sequence
  Synthetic
actacacgtagcaccaatatgactgcatgtactctttaaaattggaag

SEQ ID NO: 6622 - DNA, 46 bp, Artificial Sequence
  Synthetic
gtactgttgtgtatgtatgggtggcacacaaacatgcataaggaaa

SEQ ID NO: 6623 - DNA, 39 bp, Artificial Sequence
  Synthetic
ccggtttcggtcgtgcacaagcgcgaaacagctaacagt

SEQ ID NO: 6624 - DNA, 40 bp, Artificial Sequence
  Synthetic
tgagtgtcgtacagcctccaggtactcaccggttccgcag

SEQ ID NO: 6625 - DNA, 38 bp, Artificial Sequence
  Synthetic
gcgcgcgacaaggaagactttttagggatgggctggcg

SEQ ID NO: 6626 - DNA, 39 bp, Artificial Sequence
  Synthetic
cgccagagctctcgcgcatcgggtaagttccctgttgca

SEQ ID NO: 6627 - DNA, 37 bp, Artificial Sequence
  Synthetic
tctcaccgaatgtggccgtgcgtcgatgtgcgtccgc

SEQ ID NO: 6628 - DNA, 40 bp, Artificial Sequence
  Synthetic
cgtcatgttcggcttggcctggccaacagaaggatgacaa

SEQ ID NO: 6629 - DNA, 40 bp, Artificial Sequence
  Synthetic
ggatggggcgccttgcaatatgccagcaatagggtctcat

SEQ ID NO: 6630 - DNA, 40 bp, Artificial Sequence
  Synthetic
tgacttcaacgccagcacggccgcatttgaggtaagtggt

SEQ ID NO: 6631 - DNA, 42 bp, Artificial Sequence
  Synthetic
ccttgctcttactcggacctgcacgatgttttggtggaggtg

SEQ ID NO: 6632 - DNA, 41 bp, Artificial Sequence
  Synthetic
attccctcactggcctgtggtgcacagatgcgtcataagca

SEQ ID NO: 6633 - DNA, 41 bp, Artificial Sequence
  Synthetic
ctaaaaggtgctttgacgcgcggcacatcctcagtagagcg

SEQ ID NO: 6634 - DNA, 40 bp, Artificial Sequence
  Synthetic
tggcccagctgatggctataccgtgtctgctgggcgtaag

SEQ ID NO: 6635 - DNA, 39 bp, Artificial Sequence
  Synthetic
tcacgcagatgtactccagtgccgtgcacggctccaaag

SEQ ID NO: 6636 - DNA, 41 bp, Artificial Sequence
  Synthetic
caggtcgggtacttgcatgcccagcatatgcgacaggaact

SEQ ID NO: 6637 - DNA, 42 bp, Artificial Sequence
  Synthetic
ctaccaccatccttggcatcgggcacagttagtctgacccca

SEQ ID NO: 6638 - DNA, 39 bp, Artificial Sequence
  Synthetic
caccgacgccctcatgacagtacgttgcagtcgatcacg

SEQ ID NO: 6639 - DNA, 40 bp, Artificial Sequence
  Synthetic
ccgtcaggctcagggcgtatctgcctcccaaaactcaaga

SEQ ID NO: 6640 - DNA, 40 bp, Artificial Sequence
  Synthetic
atacatcgccacctgcatgcaacctgccaagacccatgtg

SEQ ID NO: 6641 - DNA, 42 bp, Artificial Sequence
  Synthetic
ttctgggccaaacacatgtggatgttgatagtcctgcgaggt

SEQ ID NO: 6642 - DNA, 40 bp, Artificial Sequence
  Synthetic
tgtcgtcaacttgctgcctggacagaatggccgcgcagat

SEQ ID NO: 6643 - DNA, 38 bp, Artificial Sequence
  Synthetic
cgaaacccgcgccaaactttacctccgcgtactctgag

SEQ ID NO: 6644 - DNA, 35 bp, Artificial Sequence
  Synthetic
cgtttagcgcgggggtcatgccgatagctggctcg

SEQ ID NO: 6645 - DNA, 40 bp, Artificial Sequence
  Synthetic
cctgggcacggcctgattaccggttggtaatctggccttt

SEQ ID NO: 6646 - DNA, 40 bp, Artificial Sequence
  Synthetic
acctggagcctgagcaggtagaagaccaggaccccgagtc

SEQ ID NO: 6647 - DNA, 40 bp, Artificial Sequence
  Synthetic
cgcaaggctcctcaccatggagatcttgcagaatggggtg

SEQ ID NO: 6648 - DNA, 40 bp, Artificial Sequence
  Synthetic
tggattccagtattcccccgctggtccttcttttccgccc

SEQ ID NO: 6649 - DNA, 40 bp, Artificial Sequence
  Synthetic
aatcgcgcccacaatgctggggtcccctggctttctgaga

SEQ ID NO: 6650 - DNA, 40 bp, Artificial Sequence
  Synthetic
gggctgcctgggaaacagtttggatgatgtttcccagcca

SEQ ID NO: 6651 - DNA, 36 bp, Artificial Sequence
  Synthetic
ccacccctcagagcgtggaacgggagatgagggacg

SEQ ID NO: 6652 - DNA, 39 bp, Artificial Sequence
  Synthetic
cgcgattgatgcggatttgccgttccagcaccgttttgc

SEQ ID NO: 6653 - DNA, 40 bp, Artificial Sequence
  Synthetic
cgaggtgggcgtaacgcttgcaaagtccacgccaaaatgg

SEQ ID NO: 6654 - DNA, 39 bp, Artificial Sequence
  Synthetic
tcatgcccgggaagagtttgccggcttcgtcttcctgtc

SEQ ID NO: 6655 - DNA, 37 bp, Artificial Sequence
  Synthetic
gggcggacaatgccgtctgcgtcatgccgcctgaaac

SEQ ID NO: 6656 - DNA, 36 bp, Artificial Sequence
  Synthetic
cagcgtcagtccgaacgtcctcagtgccaccccgtc

SEQ ID NO: 6657 - DNA, 39 bp, Artificial Sequence
  Synthetic
gcgaaccgaaaacccaataccgagccccagtagcgttgg

SEQ ID NO: 6658 - DNA, 41 bp, Artificial Sequence
  Synthetic
gaccaatacatcggcggcatcgagtttggtgaagaagcgcg

SEQ ID NO: 6659 - DNA, 36 bp, Artificial Sequence
  Synthetic
gcaaaatcaccgtcgccgcctcgttggcgagtgcgg

SEQ ID NO: 6660 - DNA, 38 bp, Artificial Sequence
  Synthetic
gctcccaagccgaaacgtgatatcgcaagccgctttcg

SEQ ID NO: 6661 - DNA, 35 bp, Artificial Sequence
  Synthetic
gtgatgcggccgccgacttctatcgcgccgccaac

SEQ ID NO: 6662 - DNA, 37 bp, Artificial Sequence
  Synthetic
aaccgggaatcaggtcggtggcggtgtggcaggcgta

SEQ ID NO: 6663 - DNA, 35 bp, Artificial Sequence
  Synthetic
ggggtgtgcgtgccggaaattaccgccgaccgcac

SEQ ID NO: 6664 - DNA, 38 bp, Artificial Sequence
  Synthetic
ccgcccgcgacaatgtagttggcacgaacgcttggaag

SEQ ID NO: 6665 - DNA, 37 bp, Artificial Sequence
  Synthetic
gcgcttttgggcgaacagcgtaaggaagcgcgcgtgg

SEQ ID NO: 6666 - DNA, 36 bp, Artificial Sequence
  Synthetic
ggcagggaataccgcccgttacgtccgccagttcgc

SEQ ID NO: 6667 - DNA, 38 bp, Artificial Sequence
  Synthetic
ccgccctgcaagccgatgtcgtgcgtgatttgtccgaa

SEQ ID NO: 6668 - DNA, 42 bp, Artificial Sequence
  Synthetic
gcttcctgccatttgctgtcgggctggagaatgtacaaggcc

SEQ ID NO: 6669 - DNA, 36 bp, Artificial Sequence
  Synthetic
agtttcaccgccaccaacgcgcaaggactggcaccg

SEQ ID NO: 6670 - DNA, 39 bp, Artificial Sequence
  Synthetic
ttcgtcccaagccggacaccaaaaaccatgtgtcgtggc

SEQ ID NO: 6671 - DNA, 38 bp, Artificial Sequence
  Synthetic
ccgcgtttcgggcaactcggaatggtttgccgaacgcg

SEQ ID NO: 6672 - DNA, 36 bp, Artificial Sequence
  Synthetic
ggtacgcgccgtggatgacgacatcgggctgttgtc

SEQ ID NO: 6673 - DNA, 37 bp, Artificial Sequence
  Synthetic
ccgctttgccgtggaacagttcgtcagcctgtgtccg

SEQ ID NO: 6674 - DNA, 38 bp, Artificial Sequence
  Synthetic
tgcaggtggaggtagcgcgcaaaccgaagatgccgtct

SEQ ID NO: 6675 - DNA, 36 bp, Artificial Sequence
  Synthetic
tagagcagttcggcgtgtgctttctcgcgctcgccc

SEQ ID NO: 6676 - DNA, 42 bp, Artificial Sequence
  Synthetic
gccgccctaccgacttgataatgcgaagtgttttatgcgtgg

SEQ ID NO: 6677 - DNA, 37 bp, Artificial Sequence
  Synthetic
cgcgtgtcgcccaaaatgacttgcctccgccgaactc

SEQ ID NO: 6678 - DNA, 40 bp, Artificial Sequence
  Synthetic
ccaaaaacgcctcgaatcgtggatatgcggcgaaacgtgc

SEQ ID NO: 6679 - DNA, 39 bp, Artificial Sequence
  Synthetic
ttatgccgtctgtcgaacggcggcagtcatcgtcgcttc

SEQ ID NO: 6680 - DNA, 37 bp, Artificial Sequence
  Synthetic
ggcggagagtgcaccgtgttcaacgtcaacgatgccg

SEQ ID NO: 6681 - DNA, 40 bp, Artificial Sequence
  Synthetic
ttcgggccgatgaaggtaaagctgccgaaaacgccgattt

SEQ ID NO: 6682 - DNA, 40 bp, Artificial Sequence
  Synthetic
gattcgtcggcgagtttgacgtcaccgttgccgtgcattc

SEQ ID NO: 6683 - DNA, 37 bp, Artificial Sequence
  Synthetic
cgccggtggctttggagacgtgttggaagtgaacccg

SEQ ID NO: 6684 - DNA, 39 bp, Artificial Sequence
  Synthetic
acgtcttccaatgtcagcggcgtgtccaccgacttcgac

SEQ ID NO: 6685 - DNA, 39 bp, Artificial Sequence
  Synthetic
cgggtgtcgatgtcggcgaaagcctgcacgactatttgg

SEQ ID NO: 6686 - DNA, 36 bp, Artificial Sequence
  Synthetic
cgatgtgcgcgacagggaacagcgttcagacggcat

SEQ ID NO: 6687 - DNA, 35 bp, Artificial Sequence
  Synthetic
ggcgttgcccagttgcaggtgtccggactcgccac

SEQ ID NO: 6688 - DNA, 37 bp, Artificial Sequence
  Synthetic
cctgcgaaatgctggtcggattccgctgttgccggta

SEQ ID NO: 6689 - DNA, 40 bp, Artificial Sequence
  Synthetic
cgctcccttgcctacgatgcagagtttgtgcagcatacgg

SEQ ID NO: 6690 - DNA, 36 bp, Artificial Sequence
  Synthetic
gaccccagcttcaaagccgccctacccagccggcaa

SEQ ID NO: 6691 - DNA, 38 bp, Artificial Sequence
  Synthetic
gttccgaccagtggggcaactttttggttcaggcggcg

SEQ ID NO: 6692 - DNA, 37 bp, Artificial Sequence
  Synthetic
atcagccccctgcgtaccaaaacccaggcggcatcga

SEQ ID NO: 6693 - DNA, 40 bp, Artificial Sequence
  Synthetic
tcagtggtttgtcggcatggacttgatggctttgtcgcgc

SEQ ID NO: 6694 - DNA, 37 bp, Artificial Sequence
  Synthetic
ccgccgccatcgagcctttcttccgcctgcaaggacg

SEQ ID NO: 6695 - DNA, 38 bp, Artificial Sequence
  Synthetic
catggcagggcaggccgaaggaaaaatacggcggtccc

SEQ ID NO: 6696 - DNA, 39 bp, Artificial Sequence
  Synthetic
tcttcgaggctgacgaaggcgaattcgttaccgccgtgc

SEQ ID NO: 6697 - DNA, 38 bp, Artificial Sequence
  Synthetic
tcgatgctgtcgaacgcgccaacacatgaaccgccgca

SEQ ID NO: 6698 - DNA, 39 bp, Artificial Sequence
  Synthetic
gattcgtccgcctgatacacggggcggcgtgttgattgc

SEQ ID NO: 6699 - DNA, 35 bp, Artificial Sequence
  Synthetic
tgcggcgaggcgtgcattccgttgcgcatcgtagc

SEQ ID NO: 6700 - DNA, 37 bp, Artificial Sequence
  Synthetic
cgtccaaacgcgccatttcgcttcgcgcccgaccaac

SEQ ID NO: 6701 - DNA, 35 bp, Artificial Sequence
  Synthetic
tcgtgccacggcagcatgcgcaaaaccggccatcc

SEQ ID NO: 6702 - DNA, 38 bp, Artificial Sequence
  Synthetic
cgccacggcgtgttgtcgactatcaaggcggctgctcc

SEQ ID NO: 6703 - DNA, 40 bp, Artificial Sequence
  Synthetic
tgtttggtccgtcgggttcgggaacacgcccccttcagac

SEQ ID NO: 6704 - DNA, 37 bp, Artificial Sequence
  Synthetic
aacaaccagaatgaggcggcattgccgtaccgtccgg

SEQ ID NO: 6705 - DNA, 38 bp, Artificial Sequence
  Synthetic
gcggcaacatgcacgatacgacctcctgctgccggaaa

SEQ ID NO: 6706 - DNA, 37 bp, Artificial Sequence
  Synthetic
ccgtcagcggcaacagcacttttcgtccgcgcaactc

SEQ ID NO: 6707 - DNA, 38 bp, Artificial Sequence
  Synthetic
gccgccgtctgcatcagcatgctgtcgtggtatttccc

SEQ ID NO: 6708 - DNA, 39 bp, Artificial Sequence
  Synthetic
cggcacgcaaaacctgtacgcggcagcagcttttggatt

SEQ ID NO: 6709 - DNA, 40 bp, Artificial Sequence
  Synthetic
cgttgtgcattgaagggcgaaccgaactcaaaatgcccgc

SEQ ID NO: 6710 - DNA, 35 bp, Artificial Sequence
  Synthetic
cggcgacgggggaatttgcaaggcaaaggcgtgcg

SEQ ID NO: 6711 - DNA, 39 bp, Artificial Sequence
  Synthetic
cgccgtaacccatttccgcttcgcgcatggctcaacctc

SEQ ID NO: 6712 - DNA, 40 bp, Artificial Sequence
  Synthetic
caacacgctgttgggtatgggaccggtaaagcctgctacg

SEQ ID NO: 6713 - DNA, 35 bp, Artificial Sequence
  Synthetic
tttgccgtatccgggcggtaacgcttcgggcctgc

SEQ ID NO: 6714 - DNA, 36 bp, Artificial Sequence
  Synthetic
ggtggaacggaagctgctggatcacgccgcacatcg

SEQ ID NO: 6715 - DNA, 41 bp, Artificial Sequence
  Synthetic
ccgctgtcggcttcaaaatggtgatgctcgaccacagcctg

SEQ ID NO: 6716 - DNA, 36 bp, Artificial Sequence
  Synthetic
gtttgcgcgtcagctcgacaccgtacccgcgttacc

SEQ ID NO: 6717 - DNA, 39 bp, Artificial Sequence
  Synthetic
ttttccggcaggagcttgtcgcccaacgcatcgaagacg

SEQ ID NO: 6718 - DNA, 40 bp, Artificial Sequence
  Synthetic
gcgtgccgcagattttcatcgaaggcggtagaggtcggta

SEQ ID NO: 6719 - DNA, 42 bp, Artificial Sequence
  Synthetic
aagcctgcgccttttgcattcgcgtgccgtctgaaagttgat

SEQ ID NO: 6720 - DNA, 37 bp, Artificial Sequence
  Synthetic
aagtcggcgtagatgtgcccaaagcccatgcgctcgg

SEQ ID NO: 6721 - DNA, 42 bp, Artificial Sequence
  Synthetic
aaccctgaaatcgtcgaagcgcacccaaataaccttccctgc

SEQ ID NO: 6722 - DNA, 36 bp, Artificial Sequence
  Synthetic
gaaccggcgggcaggatgtaaaccgtcctgcgcgac

SEQ ID NO: 6723 - DNA, 39 bp, Artificial Sequence
  Synthetic
ccggcgatggtctgcctgaggcgacaacttcaaagccta

SEQ ID NO: 6724 - DNA, 39 bp, Artificial Sequence
  Synthetic
aaaggtcgatgacgcgcacgggcatcgccatgaaagacg

SEQ ID NO: 6725 - DNA, 38 bp, Artificial Sequence
  Synthetic
aatcggcaactgcggttcccccagatgtcgaagtcgcc

SEQ ID NO: 6726 - DNA, 39 bp, Artificial Sequence
  Synthetic
gctttcagacgacgtcaggttcccttttccaacgtatcc

SEQ ID NO: 6727 - DNA, 36 bp, Artificial Sequence
  Synthetic
gcaaggtcggcggcgctttattaccaatgcgccgcc

SEQ ID NO: 6728 - DNA, 39 bp, Artificial Sequence
  Synthetic
catgttgcgcgggatttctggtccattgctgctgccaaa

SEQ ID NO: 6729 - DNA, 35 bp, Artificial Sequence
  Synthetic
gggcatgaccgccgccatatcgaagccgccgacct

SEQ ID NO: 6730 - DNA, 40 bp, Artificial Sequence
  Synthetic
aacgtggtcgatgtggttgcagcccatctccgacacgacc

SEQ ID NO: 6731 - DNA, 36 bp, Artificial Sequence
  Synthetic
atgccgaacgtcccccagctcttcctgctcgccagc

SEQ ID NO: 6732 - DNA, 39 bp, Artificial Sequence
  Synthetic
aggcagtggagtcgaggatgtgccccgttaccgacaagt

SEQ ID NO: 6733 - DNA, 38 bp, Artificial Sequence
  Synthetic
gggttgccgccgaccaaaactgctgtctttaggcatcg

SEQ ID NO: 6734 - DNA, 39 bp, Artificial Sequence
  Synthetic
ttgatgccgacgacctgtccatcaatccgggcaattccg

SEQ ID NO: 6735 - DNA, 40 bp, Artificial Sequence
  Synthetic
gcttcgccgtcgccttgtttaaatcgccgttctgctttcg

SEQ ID NO: 6736 - DNA, 38 bp, Artificial Sequence
  Synthetic
ttcgcgcccaaccgttatttggtcgcgacggcaagcag

SEQ ID NO: 6737 - DNA, 37 bp, Artificial Sequence
  Synthetic
aaaaccctgcaccgcagtgatccggcaatctgcacgg

SEQ ID NO: 6738 - DNA, 35 bp, Artificial Sequence
  Synthetic
gtagcgcgctgatgcaggagccttgaccaccgcct

SEQ ID NO: 6739 - DNA, 38 bp, Artificial Sequence
  Synthetic
cgcaaggcaggccgtggttcggtaaaacgccgtgttcg

SEQ ID NO: 6740 - DNA, 39 bp, Artificial Sequence
  Synthetic
gggttcggacggcatctgtctgttttcgacattcgccgg

SEQ ID NO: 6741 - DNA, 38 bp, Artificial Sequence
  Synthetic
agccataagctgcccgtttcggctttgccgaccaccgc

SEQ ID NO: 6742 - DNA, 39 bp, Artificial Sequence
  Synthetic
gggtatggacggcagcaaggtgcggatttccttcagcct

SEQ ID NO: 6743 - DNA, 36 bp, Artificial Sequence
  Synthetic
tgctcctgctcgcccacgatagagcgtttgggcggc

SEQ ID NO: 6744 - DNA, 35 bp, Artificial Sequence
  Synthetic
agacggatgcgagggcgtacgacctgctccttgcc

SEQ ID NO: 6745 - DNA, 39 bp, Artificial Sequence
  Synthetic
gggtaccttccacgacgcgtaaatccccgaattcgcacc

SEQ ID NO: 6746 - DNA, 35 bp, Artificial Sequence
  Synthetic
ctgcgggcagttcgttggtttcgtccgcagcctcg

SEQ ID NO: 6747 - DNA, 39 bp, Artificial Sequence
  Synthetic
tttgggcgtgtcgtgtgttccacggcggacaatacagca

SEQ ID NO: 6748 - DNA, 38 bp, Artificial Sequence
  Synthetic
gcaaggtggcggctgtcgacaacggacaaaccactgcc

SEQ ID NO: 6749 - DNA, 36 bp, Artificial Sequence
  Synthetic
gccgctgcaagggcttttttgattgcaccgccgcag

SEQ ID NO: 6750 - DNA, 40 bp, Artificial Sequence
  Synthetic
tccgttgcggatgtggtggggcacgcaccaaaaaacctca

SEQ ID NO: 6751 - DNA, 41 bp, Artificial Sequence
  Synthetic
atgaggaagttgcagtgtcgggcctcacgacagaaaccgac

SEQ ID NO: 6752 - DNA, 37 bp, Artificial Sequence
  Synthetic
tgtgcaggctgtgtccgaagcgcatcccggcatcagc

SEQ ID NO: 6753 - DNA, 40 bp, Artificial Sequence
  Synthetic
ggtgcgttgttctgttcgccactcttggcacgcatcaatg

SEQ ID NO: 6754 - DNA, 38 bp, Artificial Sequence
  Synthetic
ggaggcggtcagtatgccgaagaggcttcagacggcat

SEQ ID NO: 6755 - DNA, 42 bp, Artificial Sequence
  Synthetic
tttccgcaggttcggctgtactatacttccgccgaaaccctt

SEQ ID NO: 6756 - DNA, 38 bp, Artificial Sequence
  Synthetic
aggctgtgttcgagttcggggttcaaagccgtcctgcc

SEQ ID NO: 6757 - DNA, 39 bp, Artificial Sequence
  Synthetic
gggaagcggccgatgtgttttgaacaccttcttccggca

SEQ ID NO: 6758 - DNA, 40 bp, Artificial Sequence
  Synthetic
gcttttcgcgtgatgccccgatggtcatgaaacgcaaagc

SEQ ID NO: 6759 - DNA, 38 bp, Artificial Sequence
  Synthetic
ggtgcaggcggggtggaaattgcgcctttttttgggca

SEQ ID NO: 6760 - DNA, 42 bp, Artificial Sequence
  Synthetic
ttgatggctttaggttttgtcgttaaaacgccattcgaaacg

SEQ ID NO: 6761 - DNA, 38 bp, Artificial Sequence
  Synthetic
caggttgcggctgccttcttctacatcctgcaagcccg

SEQ ID NO: 6762 - DNA, 39 bp, Artificial Sequence
  Synthetic
caggtgtcgccgctgacgaactcgttcccaaactcggat

SEQ ID NO: 6763 - DNA, 38 bp, Artificial Sequence
  Synthetic
agcgtgtgttttcggggttgacggttcgcaagccatcg

SEQ ID NO: 6764 - DNA, 39 bp, Artificial Sequence
  Synthetic
ccgacggtcagcgggatgacaccatcctgcacatcatcg

SEQ ID NO: 6765 - DNA, 36 bp, Artificial Sequence
  Synthetic
acgccatgtttttcggcggctcccgtcatcgcctcc

SEQ ID NO: 6766 - DNA, 37 bp, Artificial Sequence
  Synthetic
tggcactgcgttggacggggtcttccccgacctgaac

SEQ ID NO: 6767 - DNA, 34 bp, Artificial Sequence
  Synthetic
agcgcgtcggcatcggtatcccttgacgcggcag

SEQ ID NO: 6768 - DNA, 39 bp, Artificial Sequence
  Synthetic
aaccagtcgtcgcttttgcctttccaagccgttgacgca

SEQ ID NO: 6769 - DNA, 39 bp, Artificial Sequence
  Synthetic
ctcttgcgccgtcctgcctaccgtttaccgcaatatcgc

SEQ ID NO: 6770 - DNA, 36 bp, Artificial Sequence
  Synthetic
agcagggtggcggtcaacggcattaccgccgcattc

SEQ ID NO: 6771 - DNA, 37 bp, Artificial Sequence
  Synthetic
cgcctttgccgcgtgtttcagccaacctcctagagcc

SEQ ID NO: 6772 - DNA, 39 bp, Artificial Sequence
  Synthetic
gtttgcgacagtcggccatgatgctcgcctacgtcgaaa

SEQ ID NO: 6773 - DNA, 42 bp, Artificial Sequence
  Synthetic
ttcgacaatgccggtaatgcgttcatacggcatcgtcgaaac

SEQ ID NO: 6774 - DNA, 37 bp, Artificial Sequence
  Synthetic
gacgtgttcctcgggttgcagacgtcttccgggccga

SEQ ID NO: 6775 - DNA, 38 bp, Artificial Sequence
  Synthetic
agccttcaacggcactgcacgacaatttctcctgccgc

SEQ ID NO: 6776 - DNA, 40 bp, Artificial Sequence
  Synthetic
ccggcaaaatgcaggcaggcaactctggttcggctacacc

SEQ ID NO: 6777 - DNA, 36 bp, Artificial Sequence
  Synthetic
acgatgatgcccatcccgcgccccctccgtcaactt

SEQ ID NO: 6778 - DNA, 36 bp, Artificial Sequence
  Synthetic
ggagagggcggcgggtatcaacgtcctctcccgcct

SEQ ID NO: 6779 - DNA, 42 bp, Artificial Sequence
  Synthetic
tcgaaacagccttggatgtcgcttcccacttcacaacacccg

SEQ ID NO: 6780 - DNA, 38 bp, Artificial Sequence
  Synthetic
ttttggacacgctgccggaaccaagcccaagccctaat

SEQ ID NO: 6781 - DNA, 39 bp, Artificial Sequence
  Synthetic
gaacggattcggtttgcttggctcgggcatcagcaggac

SEQ ID NO: 6782 - DNA, 37 bp, Artificial Sequence
  Synthetic
ggtatgctgggcgcgtcgatcaccgacctcctcaacc

SEQ ID NO: 6783 - DNA, 41 bp, Artificial Sequence
  Synthetic
aagccacttcgataaaggcggccattcgcacaaagcatggg

SEQ ID NO: 6784 - DNA, 38 bp, Artificial Sequence
  Synthetic
tcggcaatctggaaatggtcgttttccaaccgctgccg

SEQ ID NO: 6785 - DNA, 36 bp, Artificial Sequence
  Synthetic
cacttctcccgcccccgaaatcatgcggcgacatgg

SEQ ID NO: 6786 - DNA, 38 bp, Artificial Sequence
  Synthetic
accgcatccgtgccgtattctttccctgatcgtgctgc

SEQ ID NO: 6787 - DNA, 34 bp, Artificial Sequence
  Synthetic
acaggcgcgcgagaaagacaaacgccgcgcacac

SEQ ID NO: 6788 - DNA, 34 bp, Artificial Sequence
  Synthetic
aaacaggtgcgccgacggcagcaacgccctgcct

SEQ ID NO: 6789 - DNA, 35 bp, Artificial Sequence
  Synthetic
tcctgtggcacggctaccctatccacaccggcggc

SEQ ID NO: 6790 - DNA, 35 bp, Artificial Sequence
  Synthetic
cgccgtgcggttgccgatactcctgcatacgcgcg

SEQ ID NO: 6791 - DNA, 34 bp, Artificial Sequence
  Synthetic
cccgaaggcagcgcgtttttcgggcgtggcttgg

SEQ ID NO: 6792 - DNA, 35 bp, Artificial Sequence
  Synthetic
agccgcccgcctcgttttggtgttgcggggtcacg

SEQ ID NO: 6793 - DNA, 42 bp, Artificial Sequence
  Synthetic
aggcgcacaaattcttcctcgggcgttttctttggcggattt

SEQ ID NO: 6794 - DNA, 35 bp, Artificial Sequence
  Synthetic
gcgatgtttgccgccgtcgcgcaccaccttttccg

SEQ ID NO: 6795 - DNA, 41 bp, Artificial Sequence
  Synthetic
ggtggttttcgtcgtggaggcgttgtttcaacacgacgcgg

SEQ ID NO: 6796 - DNA, 35 bp, Artificial Sequence
  Synthetic
ccggtgatgcggacggcttagccgtgggtgcttgc

SEQ ID NO: 6797 - DNA, 40 bp, Artificial Sequence
  Synthetic
tcgctgtcggtttgcgaaccttgccttccgtgatccttac

SEQ ID NO: 6798 - DNA, 38 bp, Artificial Sequence
  Synthetic
cgttttcggcggcggatttcgcaacggaaagccaaacg

SEQ ID NO: 6799 - DNA, 39 bp, Artificial Sequence
  Synthetic
gtctgtcgtcgaggcattccacggcgcataccagctttc

SEQ ID NO: 6800 - DNA, 40 bp, Artificial Sequence
  Synthetic
acgaaaacggccaagtcttgggcgatgccggggtaatcca

SEQ ID NO: 6801 - DNA, 44 bp, Artificial Sequence
  Synthetic
cctgttaacaagaaacggttttgccataacggggcattaaacct

SEQ ID NO: 6802 - DNA, 39 bp, Artificial Sequence
  Synthetic
cgactaccgttgctatgcgttccaacgtaccgatgattg

SEQ ID NO: 6803 - DNA, 35 bp, Artificial Sequence
  Synthetic
aattccgcgcgcgggcatgcaaccaccatcagccc

SEQ ID NO: 6804 - DNA, 35 bp, Artificial Sequence
  Synthetic
gccaaccatccgcttgccggtgtcgccgcacggat

SEQ ID NO: 6805 - DNA, 39 bp, Artificial Sequence
  Synthetic
gcactgtttgccgagcgcggcttgtcgatttcctgacgt

SEQ ID NO: 6806 - DNA, 39 bp, Artificial Sequence
  Synthetic
tgaagggcgatgtcccgcgttcttcgccttcttcctcca

SEQ ID NO: 6807 - DNA, 40 bp, Artificial Sequence
  Synthetic
ggctttggggcgacaaacagacggcggacgacggaaatcc

SEQ ID NO: 6808 - DNA, 37 bp, Artificial Sequence
  Synthetic
gccagcggctttccacaatgctgcaaaacgccttggc

SEQ ID NO: 6809 - DNA, 36 bp, Artificial Sequence
  Synthetic
aacgacgacgcgcaggtgggccggataaagggcgac

SEQ ID NO: 6810 - DNA, 38 bp, Artificial Sequence
  Synthetic
gtttgcccgaacgtgcggtccgcctttctcggtgtctg

SEQ ID NO: 6811 - DNA, 39 bp, Artificial Sequence
  Synthetic
gcagggcagtgtgtatccagtcgcctacctgttcggtct

SEQ ID NO: 6812 - DNA, 41 bp, Artificial Sequence
  Synthetic
aaacagtcatgccgatgccgaacaatacagcctgatgacgc

SEQ ID NO: 6813 - DNA, 41 bp, Artificial Sequence
  Synthetic
acgcatgatatttggctggcggggcaaccactttaaacgcc

SEQ ID NO: 6814 - DNA, 38 bp, Artificial Sequence
  Synthetic
cgccgtacacgaggtcttccggcccgaacacaaaccgc

SEQ ID NO: 6815 - DNA, 43 bp, Artificial Sequence
  Synthetic
aaccgtttacaccggaagatgtcttgggcaatcaattctttca

SEQ ID NO: 6816 - DNA, 39 bp, Artificial Sequence
  Synthetic
atggtgatgatgattgcgcccaatcggagtaagcggaaa

SEQ ID NO: 6817 - DNA, 44 bp, Artificial Sequence
  Synthetic
agaagtaacaggccgtctgaaaacatcgttactccaaaaacgta

SEQ ID NO: 6818 - DNA, 38 bp, Artificial Sequence
  Synthetic
tcatcgtcgaagaaagcggctcaatgcgttgcgtccga

SEQ ID NO: 6819 - DNA, 37 bp, Artificial Sequence
  Synthetic
gtagggcggcgaggttggttcatctactgcaccggcg

SEQ ID NO: 6820 - DNA, 41 bp, Artificial Sequence
  Synthetic
tccgagtccgaagcatcttgtgtgtctgcctccccgataat

SEQ ID NO: 6821 - DNA, 42 bp, Artificial Sequence
  Synthetic
tcgctgctcatcaggctaaggtcgtcttgccataggtacggc

SEQ ID NO: 6822 - DNA, 40 bp, Artificial Sequence
  Synthetic
gttctttacgtttttgtggggcttaccaggcatccaaacg

SEQ ID NO: 6823 - DNA, 39 bp, Artificial Sequence
  Synthetic
aggcgtggatttccgttaccgtttgccgcattgcccgac

SEQ ID NO: 6824 - DNA, 46 bp, Artificial Sequence
  Synthetic
gcatttttcggtatcggtgtaacggcgttttcggtatatatgcaaa

SEQ ID NO: 6825 - DNA, 39 bp, Artificial Sequence
  Synthetic
ggcgtggcgatgattgccgcgaatccccaaaccgcatta

SEQ ID NO: 6826 - DNA, 41 bp, Artificial Sequence
  Synthetic
taagccaagccgttgcaaccggcatagtgcttgcattgagc

SEQ ID NO: 6827 - DNA, 39 bp, Artificial Sequence
  Synthetic
acgtctggctttccattcgggtcaattcccgaagctcgc

SEQ ID NO: 6828 - DNA, 39 bp, Artificial Sequence
  Synthetic
cctaccgtttttctgcttgcgtggcacaaacagttgtcg

SEQ ID NO: 6829 - DNA, 40 bp, Artificial Sequence
  Synthetic
gcgtattgtctgtgcgcggattctcctgcaaggcattcat

SEQ ID NO: 6830 - DNA, 41 bp, Artificial Sequence
  Synthetic
cgaaaacacagcttccgaaccgagggacggtgcttctatgg

SEQ ID NO: 6831 - DNA, 41 bp, Artificial Sequence
  Synthetic
gcggcgaagatgaatgccaactcgaaggcgtaacgaagttg

SEQ ID NO: 6832 - DNA, 41 bp, Artificial Sequence
  Synthetic
tgcactgaagccgagtattccgactgtgcggtttcgtcaaa

SEQ ID NO: 6833 - DNA, 38 bp, Artificial Sequence
  Synthetic
gaccccgaacacgccaaaatctgccgtgatactgccgc

SEQ ID NO: 6834 - DNA, 40 bp, Artificial Sequence
  Synthetic
aagcccaatgggagaaatcgtggatttgggctttcatcaa

SEQ ID NO: 6835 - DNA, 37 bp, Artificial Sequence
  Synthetic
acgcttcgaccgtccaatcccaccggtcggattgcgc

SEQ ID NO: 6836 - DNA, 38 bp, Artificial Sequence
  Synthetic
ggcaacggcgtaaatcagtgccgcgatggacgaagccg

SEQ ID NO: 6837 - DNA, 35 bp, Artificial Sequence
  Synthetic
gacggtttcgcggctgtctcgccgacaaccccctt

SEQ ID NO: 6838 - DNA, 39 bp, Artificial Sequence
  Synthetic
ccagcccgcgatcctgatacacgacagcatatgcgtcgc

SEQ ID NO: 6839 - DNA, 39 bp, Artificial Sequence
  Synthetic
aggagtggtaaccatgccgacaatccaacgcggcctgac

SEQ ID NO: 6840 - DNA, 38 bp, Artificial Sequence
  Synthetic
gacttgttcgggcagccccacgccctgcttgtaccgat

SEQ ID NO: 6841 - DNA, 42 bp, Artificial Sequence
  Synthetic
ggcggttttgattttggagccggcgctgttgattttccttgc

SEQ ID NO: 6842 - DNA, 39 bp, Artificial Sequence
  Synthetic
acggtttatctgcccgccgaccatcaatgcgacaaagcg

SEQ ID NO: 6843 - DNA, 37 bp, Artificial Sequence
  Synthetic
gaacgcaggctgccgagcagctcgaaggcgacctcat

SEQ ID NO: 6844 - DNA, 35 bp, Artificial Sequence
  Synthetic
ggtgttgttcggcggcaaggacgaaaccgccgcac

SEQ ID NO: 6845 - DNA, 38 bp, Artificial Sequence
  Synthetic
cggctgccgtgtcggtaaatcacaggcctaggttacct

SEQ ID NO: 6846 - DNA, 36 bp, Artificial Sequence
  Synthetic
agagcggcatatcgggatgcaaccccgtcgtcagcg

SEQ ID NO: 6847 - DNA, 39 bp, Artificial Sequence
  Synthetic
tcgtcggcgtgtttaagcgctacaacactttcggcctgc

SEQ ID NO: 6848 - DNA, 36 bp, Artificial Sequence
  Synthetic
tttgcccgccgtcgaacgccgcttctgcatcttccg

SEQ ID NO: 6849 - DNA, 40 bp, Artificial Sequence
  Synthetic
gttgtcgtttcccccgaagccggccttcgacgtttttcac

SEQ ID NO: 6850 - DNA, 34 bp, Artificial Sequence
  Synthetic
gcatcggccctgcctacgaagcaaatcggcggcg

SEQ ID NO: 6851 - DNA, 40 bp, Artificial Sequence
  Synthetic
cgcgcgtcatatggtcgagcgcatcgagaaacagctccct

SEQ ID NO: 6852 - DNA, 36 bp, Artificial Sequence
  Synthetic
atctggtgatgggccgcccacttcgcgcaatacggc

SEQ ID NO: 6853 - DNA, 40 bp, Artificial Sequence
  Synthetic
gcgcgaactcgaaaaaccgcggcgcaatacttggtcaaac

SEQ ID NO: 6854 - DNA, 39 bp, Artificial Sequence
  Synthetic
tggtggaaggcttcgaacatcgcaccgttgccgaaaccg

SEQ ID NO: 6855 - DNA, 37 bp, Artificial Sequence
  Synthetic
ggccgggtttcgaccgtgtgcgttgccgaaaacaccc

SEQ ID NO: 6856 - DNA, 39 bp, Artificial Sequence
  Synthetic
gcccaattggaaaagggcagcggattgacggcgaaccag

SEQ ID NO: 6857 - DNA, 37 bp, Artificial Sequence
  Synthetic
ccggcatccgcgccttgttcaaacggctgagccttgc

SEQ ID NO: 6858 - DNA, 38 bp, Artificial Sequence
  Synthetic
accgtccgaccatcgtgtttgctggagcgtcccgaacc

SEQ ID NO: 6859 - DNA, 41 bp, Artificial Sequence
  Synthetic
gacgagttccacgtcgttcgccacgcttttttgtgtttgcc

SEQ ID NO: 6860 - DNA, 36 bp, Artificial Sequence
  Synthetic
ggatgttgggcgcgggcattacggacgcggcgaaac

SEQ ID NO: 6861 - DNA, 37 bp, Artificial Sequence
  Synthetic
gcgtgtcgggcaggtaggttcacccaaatcggcttgg

SEQ ID NO: 6862 - DNA, 38 bp, Artificial Sequence
  Synthetic
gtctgtgcccacatcggtctgaccgcgcccctgaactt

SEQ ID NO: 6863 - DNA, 38 bp, Artificial Sequence
  Synthetic
cgggaacggctctggcaaccggcgacttcgggggattt

SEQ ID NO: 6864 - DNA, 35 bp, Artificial Sequence
  Synthetic
gacaaaggcgtgctggcggtctgccgcaaagccgc

SEQ ID NO: 6865 - DNA, 40 bp, Artificial Sequence
  Synthetic
atacgcttagggtgtctgatcgaaaccatacgcccaagac

SEQ ID NO: 6866 - DNA, 37 bp, Artificial Sequence
  Synthetic
aagggttcgtccaaaagcaggaaacgccagcgcatcg

SEQ ID NO: 6867 - DNA, 42 bp, Artificial Sequence
  Synthetic
aacgttgtgaaacggtttgcgcgaaggaattgtcgggcgaat

SEQ ID NO: 6868 - DNA, 38 bp, Artificial Sequence
  Synthetic
ggagttgccgcgttggaagttggctggtgaaacccctg

SEQ ID NO: 6869 - DNA, 44 bp, Artificial Sequence
  Synthetic
ttctgcggatgtttttctccgtaattaatccgcttatccttgat

SEQ ID NO: 6870 - DNA, 36 bp, Artificial Sequence
  Synthetic
ggacagccggttccggtcacaggaacgcgccgtcaa

SEQ ID NO: 6871 - DNA, 40 bp, Artificial Sequence
  Synthetic
tcatcttgttgctgatggcggaaccaagaaagcagcgacg

SEQ ID NO: 6872 - DNA, 39 bp, Artificial Sequence
  Synthetic
cggcaaccggcttcttcttccttgagcgccgagatttgg

SEQ ID NO: 6873 - DNA, 36 bp, Artificial Sequence
  Synthetic
ctgacggcgcggcattccttggcggagaacatcggc

SEQ ID NO: 6874 - DNA, 38 bp, Artificial Sequence
  Synthetic
tgcgagatgctgggaacggaaaccggtttccttgtccc

SEQ ID NO: 6875 - DNA, 41 bp, Artificial Sequence
  Synthetic
gcgtgaaaccaagacattcggcagccttttgtccaaaccgc

SEQ ID NO: 6876 - DNA, 38 bp, Artificial Sequence
  Synthetic
accgttattggcggatttggcgccttatacgccgccgc

SEQ ID NO: 6877 - DNA, 42 bp, Artificial Sequence
  Synthetic
ttggacaacgccctgaaggttgcctgtcgttgtgataggcaa

SEQ ID NO: 6878 - DNA, 38 bp, Artificial Sequence
  Synthetic
ggctgaaatcaggcggcgcgccaagcccaaatccgtct

SEQ ID NO: 6879 - DNA, 38 bp, Artificial Sequence
  Synthetic
tcgccgtcgccgtcagctagcagggaaacgtctctgcc

SEQ ID NO: 6880 - DNA, 39 bp, Artificial Sequence
  Synthetic
agggcaattcgacgatgttgatacaggcttgcagaactt

SEQ ID NO: 6881 - DNA, 38 bp, Artificial Sequence
  Synthetic
gaagcgaggtcaggcggcatccgggattcgaccgtgtt

SEQ ID NO: 6882 - DNA, 41 bp, Artificial Sequence
  Synthetic
agccgataatcaggcgtgttgccaggcattacgcgcaacaa

SEQ ID NO: 6883 - DNA, 35 bp, Artificial Sequence
  Synthetic
ggcgatggcggacggtatgcttgccggcaaccagc

SEQ ID NO: 6884 - DNA, 39 bp, Artificial Sequence
  Synthetic
gcacatttttcggggcgcatacgcctgtcttgactttcg

SEQ ID NO: 6885 - DNA, 36 bp, Artificial Sequence
  Synthetic
gtgattccggctgttcgcggtcagaaccggccgcac

SEQ ID NO: 6886 - DNA, 35 bp, Artificial Sequence
  Synthetic
tgccgaagcagaagccgaaaagcgataccggggcg

SEQ ID NO: 6887 - DNA, 37 bp, Artificial Sequence
  Synthetic
gcctcctggccgccgattaacacgatgcggtctttgc

SEQ ID NO: 6888 - DNA, 37 bp, Artificial Sequence
  Synthetic
taaggcttcgctgcgccagatatcgcggcggtttcag

SEQ ID NO: 6889 - DNA, 37 bp, Artificial Sequence
  Synthetic
agcaggaagccgcacaagccaatcaccgcgccgaaac

SEQ ID NO: 6890 - DNA, 34 bp, Artificial Sequence
  Synthetic
cggcgcgcgggtcaaaatttcaccgcaccgacgg

SEQ ID NO: 6891 - DNA, 40 bp, Artificial Sequence
  Synthetic
gctgcatgaggacgctctatgacgcccgtttaccgtgaat

SEQ ID NO: 6892 - DNA, 36 bp, Artificial Sequence
  Synthetic
gcaggacggtcaaggcacacgggtagggcaggcgaa

SEQ ID NO: 6893 - DNA, 38 bp, Artificial Sequence
  Synthetic
tgctgacattgtgctacgtcgacgcccttcagttcggc

SEQ ID NO: 6894 - DNA, 39 bp, Artificial Sequence
  Synthetic
aagcatcaacggcttggaggcccgccactttgccgtttg

SEQ ID NO: 6895 - DNA, 38 bp, Artificial Sequence
  Synthetic
tggtggacacgcagaaaaaccgccgccttgccgttgac

SEQ ID NO: 6896 - DNA, 37 bp, Artificial Sequence
  Synthetic
cgccgccctgccttgtgaagcttacaaccgcgcaacc

SEQ ID NO: 6897 - DNA, 40 bp, Artificial Sequence
  Synthetic
acatcgggcatttcttcccagctgtccgaccttttggcgg

SEQ ID NO: 6898 - DNA, 39 bp, Artificial Sequence
  Synthetic
atacggctgcatcgcggtctgccgacaacgaagaaaacg

SEQ ID NO: 6899 - DNA, 35 bp, Artificial Sequence
  Synthetic
cggaacgcctcaaagccgccggcggacgatttgcg

SEQ ID NO: 6900 - DNA, 38 bp, Artificial Sequence
  Synthetic
gtcaaatcgtggtttgacgggcacaacgacggccagcc

SEQ ID NO: 6901 - DNA, 36 bp, Artificial Sequence
  Synthetic
aaaagccgggcgcaaatcagtcgggtctttggccgc

SEQ ID NO: 6902 - DNA, 39 bp, Artificial Sequence
  Synthetic
ccaaatgggcgaattggggcgcgcgtttgccctcgttct

SEQ ID NO: 6903 - DNA, 34 bp, Artificial Sequence
  Synthetic
gcggcggcggttctcaaaatgtcccagccgcctg

SEQ ID NO: 6904 - DNA, 34 bp, Artificial Sequence
  Synthetic
gcgcggcacttcgaccaatccccctgcccggttt

SEQ ID NO: 6905 - DNA, 35 bp, Artificial Sequence
  Synthetic
atgcgcgcggatgtttggcgcctggcgggttttgc

SEQ ID NO: 6906 - DNA, 36 bp, Artificial Sequence
  Synthetic
attgtccgaccatacgcccgtgctcagcacggggac

SEQ ID NO: 6907 - DNA, 44 bp, Artificial Sequence
  Synthetic
gagttcctgttgtcgctatttgcattttcaaatggtagggaagg

SEQ ID NO: 6908 - DNA, 44 bp, Artificial Sequence
  Synthetic
gcgaagagcggaaaatcaaacaccttgatttctttggaaatctc

SEQ ID NO: 6909 - DNA, 40 bp, Artificial Sequence
  Synthetic
tcccgggtagcagccttttttgcgcccaaatgctcaacca

SEQ ID NO: 6910 - DNA, 40 bp, Artificial Sequence
  Synthetic
aaatgccccgatggtgcaggtttacctccgaatgcgtctc

SEQ ID NO: 6911 - DNA, 40 bp, Artificial Sequence
  Synthetic
ctgttcggcagccgtttcacccgggcggcttgattttcct

SEQ ID NO: 6912 - DNA, 37 bp, Artificial Sequence
  Synthetic
gcgcgatgtccatccgcagccgaatttctgcccttcg

SEQ ID NO: 6913 - DNA, 35 bp, Artificial Sequence
  Synthetic
cccgccccgatcccttctatgctcgggcggtatcc

SEQ ID NO: 6914 - DNA, 35 bp, Artificial Sequence
  Synthetic
atttggccgatgcgctgcaaactgttccccgccgc

SEQ ID NO: 6915 - DNA, 40 bp, Artificial Sequence
  Synthetic
gttggcgatgacttcgttggtgtccgacgtgtatcagggc

SEQ ID NO: 6916 - DNA, 40 bp, Artificial Sequence
  Synthetic
cgcattaatgccgtttatgccagagaccgacaaaaatgcc

SEQ ID NO: 6917 - DNA, 41 bp, Artificial Sequence
  Synthetic
tggttttgccgatgtctgccggatcggtgaagtctgccttg

SEQ ID NO: 6918 - DNA, 35 bp, Artificial Sequence
  Synthetic
gcagtaccgcccagcaggacgacttggcttgggcg

SEQ ID NO: 6919 - DNA, 39 bp, Artificial Sequence
  Synthetic
ggtggtgcagcctgccgaacgcagcagttctttaccgta

SEQ ID NO: 6920 - DNA, 36 bp, Artificial Sequence
  Synthetic
tgtggacgacgtaaccgcgcatgcagcacgacagcg

SEQ ID NO: 6921 - DNA, 40 bp, Artificial Sequence
  Synthetic
tccgccaccaaaaacctgatgacgtaaatggcggacacgg

SEQ ID NO: 6922 - DNA, 38 bp, Artificial Sequence
  Synthetic
atttggacttcaaacgcggcagttcggcggggtacacg

SEQ ID NO: 6923 - DNA, 38 bp, Artificial Sequence
  Synthetic
tcaaaccataggccgcgccttgtcggcgtacaggatgg

SEQ ID NO: 6924 - DNA, 35 bp, Artificial Sequence
  Synthetic
cgaagctgacgttggcggcaccgtggcgatggtcg

SEQ ID NO: 6925 - DNA, 38 bp, Artificial Sequence
  Synthetic
ttgcccatgccgaccataatcggattgcctgcccgtgc

SEQ ID NO: 6926 - DNA, 40 bp, Artificial Sequence
  Synthetic
tcttcgggattggattcgccggtatcgaaagcggcagcgg

SEQ ID NO: 6927 - DNA, 38 bp, Artificial Sequence
  Synthetic
aatcgttgctgccggcatcgttcagaggaccgttcggc

SEQ ID NO: 6928 - DNA, 38 bp, Artificial Sequence
  Synthetic
agccgcagtggattaagaagggtgtcgagctgggtcgg

SEQ ID NO: 6929 - DNA, 36 bp, Artificial Sequence
  Synthetic
tgctccccgaacgcgctttggacggtatggacgggc

SEQ ID NO: 6930 - DNA, 38 bp, Artificial Sequence
  Synthetic
acataaagccggcggcaaacaactccgtcggcgaatgg

SEQ ID NO: 6931 - DNA, 39 bp, Artificial Sequence
  Synthetic
gagcaggcggtatggtcggcgatttccccaacagccacg

SEQ ID NO: 6932 - DNA, 41 bp, Artificial Sequence
  Synthetic
tccagcatcacatactcgaaagtcatgccaacgctatctgg

SEQ ID NO: 6933 - DNA, 39 bp, Artificial Sequence
  Synthetic
acgaagttttggtcgattgcccaagaaatgaacccgggt

SEQ ID NO: 6934 - DNA, 38 bp, Artificial Sequence
  Synthetic
gcaagggcgggttcggtaagcaagaaaccgtccgtacg

SEQ ID NO: 6935 - DNA, 38 bp, Artificial Sequence
  Synthetic
ggttttggcggcaggcgtataactacctcaacgccgca

SEQ ID NO: 6936 - DNA, 40 bp, Artificial Sequence
  Synthetic
tttggcggctttggatatcggaacaccgttcggatgttcg

SEQ ID NO: 6937 - DNA, 36 bp, Artificial Sequence
  Synthetic
aatcctgcatggcgagggtgacgcctcgacgccatc

SEQ ID NO: 6938 - DNA, 35 bp, Artificial Sequence
  Synthetic
ggcgagtacggcgacctgtaccgaagtcgccctgc

SEQ ID NO: 6939 - DNA, 40 bp, Artificial Sequence
  Synthetic
cgctttcatgcgcctgaccggctttatgtgcctgtttcgc

SEQ ID NO: 6940 - DNA, 37 bp, Artificial Sequence
  Synthetic
tccgccgcgccgcttttacaggatttggtgtcggagc

SEQ ID NO: 6941 - DNA, 35 bp, Artificial Sequence
  Synthetic
ggcccggggcgcatgattttcaacctgcgccaacg

SEQ ID NO: 6942 - DNA, 33 bp, Artificial Sequence
  Synthetic
ttgttcgaccgccgcgtcagcaaccgcctgacc

SEQ ID NO: 6943 - DNA, 37 bp, Artificial Sequence
  Synthetic
ggttcgatggcttcggatgccgccgatgcgcgtttgc

SEQ ID NO: 6944 - DNA, 36 bp, Artificial Sequence
  Synthetic
ggacgagccgttgacgagccgaacacgagccgcttg

SEQ ID NO: 6945 - DNA, 37 bp, Artificial Sequence
  Synthetic
caagcgcgcgcaggacgtaccgtatccagcggatccg

SEQ ID NO: 6946 - DNA, 36 bp, Artificial Sequence
  Synthetic
gcttcgccgaagcagacgggggcataccggcgtgct

SEQ ID NO: 6947 - DNA, 45 bp, Artificial Sequence
  Synthetic
aatttgcaggttatcactatgtgcagccagaatgaacaatctgat

SEQ ID NO: 6948 - DNA, 35 bp, Artificial Sequence
  Synthetic
ggcgaaaaaggcgctggcgtttcgggtggcgcagg

SEQ ID NO: 6949 - DNA, 37 bp, Artificial Sequence
  Synthetic
gacgttgtgcaaggtttccgggatggcgtgtgcggtc

SEQ ID NO: 6950 - DNA, 34 bp, Artificial Sequence
  Synthetic
cagtccgcacgccccaattttgcacggaggctgc

SEQ ID NO: 6951 - DNA, 37 bp, Artificial Sequence
  Synthetic
actttggtggcgacgacttcgtcccgtttcggcgtgc

SEQ ID NO: 6952 - DNA, 35 bp, Artificial Sequence
  Synthetic
gcgcccgaaatccccgtcagaaactcgctgcccgc

SEQ ID NO: 6953 - DNA, 39 bp, Artificial Sequence
  Synthetic
cgccatcgaagcctgcacgcgtgaaatcggtttcgtgtc

SEQ ID NO: 6954 - DNA, 39 bp, Artificial Sequence
  Synthetic
acctgaaagacctgttcggcacaccaggccagcaggatg

SEQ ID NO: 6955 - DNA, 40 bp, Artificial Sequence
  Synthetic
gcattggccgtcataccgctaggtcgagtgctttgacaaa

SEQ ID NO: 6956 - DNA, 39 bp, Artificial Sequence
  Synthetic
aaaaccgtgttggagctcggcttccaaatcggcatcggg

SEQ ID NO: 6957 - DNA, 42 bp, Artificial Sequence
  Synthetic
ccctgcgacggttttagacaggggggccgaatacttcttctc

SEQ ID NO: 6958 - DNA, 40 bp, Artificial Sequence
  Synthetic
cgatacgttcggggtggatgttttgccaacctcaaaccgc

SEQ ID NO: 6959 - DNA, 38 bp, Artificial Sequence
  Synthetic
ttgcgacgtatgcaccagctcacgctgacggacaaagc

SEQ ID NO: 6960 - DNA, 37 bp, Artificial Sequence
  Synthetic
gcgcaggcgatggtggtgtcaacgccgaaatcgtcgc

SEQ ID NO: 6961 - DNA, 44 bp, Artificial Sequence
  Synthetic
ttgctggaatctaaatcggctgcagacccttgttttttattccc

SEQ ID NO: 6962 - DNA, 38 bp, Artificial Sequence
  Synthetic
tgtgaatgtttcgccgcccgatcggctctccatcgacc

SEQ ID NO: 6963 - DNA, 38 bp, Artificial Sequence
  Synthetic
gggcgataatggcgcggaagtcttcacgcgaacatgcc

SEQ ID NO: 6964 - DNA, 40 bp, Artificial Sequence
  Synthetic
gcactttgccgccgatgttttcgaaccgcaagttacttgg

SEQ ID NO: 6965 - DNA, 36 bp, Artificial Sequence
  Synthetic
gcgaatcgccgcagacgatatggggcccgaacaagg

SEQ ID NO: 6966 - DNA, 39 bp, Artificial Sequence
  Synthetic
tattgcaggagttcggcagcttatgccgacagtttgccg

SEQ ID NO: 6967 - DNA, 36 bp, Artificial Sequence
  Synthetic
tccgcaccgcaaatcagggtgtgcggatgcggttga

SEQ ID NO: 6968 - DNA, 40 bp, Artificial Sequence
  Synthetic
acgaagcagtgctgatgctcactgttcgatcagccagacg

SEQ ID NO: 6969 - DNA, 36 bp, Artificial Sequence
  Synthetic
acagcctcgccaccaacgcacagcagcatcgcgatg

SEQ ID NO: 6970 - DNA, 38 bp, Artificial Sequence
  Synthetic
cgttggcgcggattttggcgaacacggcggaaacaggc

SEQ ID NO: 6971 - DNA, 38 bp, Artificial Sequence
  Synthetic
gccgtttcgacaaaggcggccacggatttgtgcagggc

SEQ ID NO: 6972 - DNA, 40 bp, Artificial Sequence
  Synthetic
aaacgccagcgacgaagtgcttccttcatcagcttggtcg

SEQ ID NO: 6973 - DNA, 39 bp, Artificial Sequence
  Synthetic
gcagcgaccaggaatggcgacgaacccttcagcgtgatg

SEQ ID NO: 6974 - DNA, 35 bp, Artificial Sequence
  Synthetic
agcccgttcatttgcgccacggcgtactcgtccgt

SEQ ID NO: 6975 - DNA, 40 bp, Artificial Sequence
  Synthetic
gcctgaacaatcaaaatggcgattgctgaccatcgtgaat

SEQ ID NO: 6976 - DNA, 41 bp, Artificial Sequence
  Synthetic
tatcggcttcactattggcagctgttcgttgctttgggatt

SEQ ID NO: 6977 - DNA, 40 bp, Artificial Sequence
  Synthetic
tgtacggcaaaggagacggctgtaatcgccgaaacggtct

SEQ ID NO: 6978 - DNA, 38 bp, Artificial Sequence
  Synthetic
cggcggcaagcgtctgaatgttggactactatccgcgt

SEQ ID NO: 6979 - DNA, 41 bp, Artificial Sequence
  Synthetic
accgtattcattgcaggtgccgatacagttgggcggtcaac

SEQ ID NO: 6980 - DNA, 38 bp, Artificial Sequence
  Synthetic
aaagccagttggacttcgccccgcaacagcggcattcc

SEQ ID NO: 6981 - DNA, 40 bp, Artificial Sequence
  Synthetic
acttctcggacgttccattcgggcttcgactccgttaccg

SEQ ID NO: 6982 - DNA, 36 bp, Artificial Sequence
  Synthetic
gtcggtcagcagcgccactactgaccccgcctttgg

SEQ ID NO: 6983 - DNA, 40 bp, Artificial Sequence
  Synthetic
acacgatggcgggtgcttcggtggttaaagtgtcagccgt

SEQ ID NO: 6984 - DNA, 38 bp, Artificial Sequence
  Synthetic
acagtaatgcgcttcagacggctttctgccccgccctc

SEQ ID NO: 6985 - DNA, 41 bp, Artificial Sequence
  Synthetic
gcaactgcgcgacgtattgtcttggaggcgatgatgaacag

SEQ ID NO: 6986 - DNA, 39 bp, Artificial Sequence
  Synthetic
cctgcttgccaacgtctttgccttcgtcgggggttttgc

SEQ ID NO: 6987 - DNA, 36 bp, Artificial Sequence
  Synthetic
gcaggattggcggggcatgcaatccgaccgaaaccg

SEQ ID NO: 6988 - DNA, 40 bp, Artificial Sequence
  Synthetic
ttcgccgtgggactttatccggctgtgcatcaaagccgcc

SEQ ID NO: 6989 - DNA, 38 bp, Artificial Sequence
  Synthetic
tttctgcgtcggtcattggggttccgagcacacccacc

SEQ ID NO: 6990 - DNA, 38 bp, Artificial Sequence
  Synthetic
ccccaaagccgaaatcgaaggcctcatcaggcgcgcct

SEQ ID NO: 6991 - DNA, 35 bp, Artificial Sequence
  Synthetic
ttcgcgggaatgacggtcgaagatctgccccccgg

SEQ ID NO: 6992 - DNA, 37 bp, Artificial Sequence
  Synthetic
ggtgcagcctgccttcgtagtcggtcaggaacacgtc

SEQ ID NO: 6993 - DNA, 39 bp, Artificial Sequence
  Synthetic
acgagttggtgtacttgccggaacgtccacccgaccaaa

SEQ ID NO: 6994 - DNA, 39 bp, Artificial Sequence
  Synthetic
tgtcgcggacaaaacgatggtccgactttcgccaaaggc

SEQ ID NO: 6995 - DNA, 40 bp, Artificial Sequence
  Synthetic
acgatttgcagttggcggcgagatacggcatatcgcaagg

SEQ ID NO: 6996 - DNA, 38 bp, Artificial Sequence
  Synthetic
cggctgcgtttggcgactacaactgttgcagctcgata

SEQ ID NO: 6997 - DNA, 37 bp, Artificial Sequence
  Synthetic
ttttccccgagcgcggcattcgaagccgccaatcagg

SEQ ID NO: 6998 - DNA, 39 bp, Artificial Sequence
  Synthetic
tcttcggcgatttcaaagccgttcccgtccgcatccttc

SEQ ID NO: 6999 - DNA, 40 bp, Artificial Sequence
  Synthetic
gggcattgtttgaccggtttcctttcgacccgagcattcg

SEQ ID NO: 7000 - DNA, 40 bp, Artificial Sequence
  Synthetic
gcttaagcccgcaacaaaaagacttggtcagtttgccttt

SEQ ID NO: 7001 - DNA, 39 bp, Artificial Sequence
  Synthetic
gaagtcggcggcgaattgctggatcatgcctttacccgg

SEQ ID NO: 7002 - DNA, 38 bp, Artificial Sequence
  Synthetic
ccaaatgcggatggtgcggagacggaagagcaggttgc

SEQ ID NO: 7003 - DNA, 45 bp, Artificial Sequence
  Synthetic
agtgactgggttatcttcggcttgtagtatcagaggataaagtgt

SEQ ID NO: 7004 - DNA, 39 bp, Artificial Sequence
  Synthetic
gttgagaagcgttgacggctatgcggatatgacctcagt

SEQ ID NO: 7005 - DNA, 42 bp, Artificial Sequence
  Synthetic
tgaaagaatgtccaggcgatttcgaatttcctgatgcaaagt

SEQ ID NO: 7006 - DNA, 44 bp, Artificial Sequence
  Synthetic
cccgatgttcgtgattacggaggtatttttgtgcgatagacatc

SEQ ID NO: 7007 - DNA, 46 bp, Artificial Sequence
  Synthetic
aatatttcacgggcaataacttcccaagcagatgaagtagtgattg

SEQ ID NO: 7008 - DNA, 43 bp, Artificial Sequence
  Synthetic
cgattgaggcttcatcgtttttagggcaatctcggtgctgaat

SEQ ID NO: 7009 - DNA, 43 bp, Artificial Sequence
  Synthetic
tggaattctaggcagaatctcttgccttgacccagagcagttg

SEQ ID NO: 7010 - DNA, 44 bp, Artificial Sequence
  Synthetic
tggcacaaattccatatccgaacatcaaaaagaggtatcggaaa

SEQ ID NO: 7011 - DNA, 35 bp, Artificial Sequence
  Synthetic
ctgcgcgacatccacaccccaggttggccgccaag

SEQ ID NO: 7012 - DNA, 34 bp, Artificial Sequence
  Synthetic
acatcgccaaaggacgcggattggcgcgcgtctg

SEQ ID NO: 7013 - DNA, 39 bp, Artificial Sequence
  Synthetic
ccgctttggatttggttgccgtcgaacccggaccgatac

SEQ ID NO: 7014 - DNA, 35 bp, Artificial Sequence
  Synthetic
gcatccgcttctccggcgaaccgccgagcatgacg

SEQ ID NO: 7015 - DNA, 39 bp, Artificial Sequence
  Synthetic
gttctgccgaccgctacttccttcgatgccttcggggac

SEQ ID NO: 7016 - DNA, 36 bp, Artificial Sequence
  Synthetic
gttcggtcaccgtcgggcaacacttcggcggtcagc

SEQ ID NO: 7017 - DNA, 33 bp, Artificial Sequence
  Synthetic
gttggatgcgcccgtcgatcaggcgcgcgcaat

SEQ ID NO: 7018 - DNA, 39 bp, Artificial Sequence
  Synthetic
cgtggcaaacatccaacccgaccgccgattcgatcatgg

SEQ ID NO: 7019 - DNA, 38 bp, Artificial Sequence
  Synthetic
gtctgtccctgcccggcaaacaattctttgcggcctgc

SEQ ID NO: 7020 - DNA, 38 bp, Artificial Sequence
  Synthetic
agcatcctcaaattcaccggcctaccttcgacggcggc

SEQ ID NO: 7021 - DNA, 34 bp, Artificial Sequence
  Synthetic
gccgacacgttggcgcaattcgcccaccacccga

SEQ ID NO: 7022 - DNA, 35 bp, Artificial Sequence
  Synthetic
tccaagacccaggcgagcatactcggcgtggcagg

SEQ ID NO: 7023 - DNA, 42 bp, Artificial Sequence
  Synthetic
atcgccaactcctgcgtcttcccgggtgtacagttcggtcag

SEQ ID NO: 7024 - DNA, 36 bp, Artificial Sequence
  Synthetic
cccctgcccaaaacgaccggtcggcaccgtcttacg

SEQ ID NO: 7025 - DNA, 42 bp, Artificial Sequence
  Synthetic
gatcgccgaaatcgattccccaggacagatgacggaagagga

SEQ ID NO: 7026 - DNA, 40 bp, Artificial Sequence
  Synthetic
cgcgtgccgccatatcttcgaccatcacccaaatgctcaa

SEQ ID NO: 7027 - DNA, 40 bp, Artificial Sequence
  Synthetic
gcgggatgattttttccgccaaacgttacccccttgtcgc

SEQ ID NO: 7028 - DNA, 38 bp, Artificial Sequence
  Synthetic
tcgttgagcaggcgcaatacgacgccaggccaccaaag

SEQ ID NO: 7029 - DNA, 42 bp, Artificial Sequence
  Synthetic
aagcccaaaaagtcggactggtggtcgatttcgttcaacagc

SEQ ID NO: 7030 - DNA, 34 bp, Artificial Sequence
  Synthetic
tacttgccaccgcgccctacgtgttcgggcgtgc

SEQ ID NO: 7031 - DNA, 41 bp, Artificial Sequence
  Synthetic
ctcgaggttgcaaaagtcgcctggaaatcggggtgcgaaca

SEQ ID NO: 7032 - DNA, 40 bp, Artificial Sequence
  Synthetic
ttgatgaccgcctgccagtagcacttgcgtccgaactgcc

SEQ ID NO: 7033 - DNA, 39 bp, Artificial Sequence
  Synthetic
gatggatgcccgattcgtgcgtatcccgtgcagcccaat

SEQ ID NO: 7034 - DNA, 39 bp, Artificial Sequence
  Synthetic
ttttcgcaatcgcattgaccgctcgaagcgggttttgcc

SEQ ID NO: 7035 - DNA, 35 bp, Artificial Sequence
  Synthetic
gccatcgttgccgccctgatacggcttcggggtcg

SEQ ID NO: 7036 - DNA, 37 bp, Artificial Sequence
  Synthetic
gcaccggtctcttccgattggccgtcctgccgggtat

SEQ ID NO: 7037 - DNA, 40 bp, Artificial Sequence
  Synthetic
tgctttccaacatcctccccctgaggttgagcagccaacg

SEQ ID NO: 7038 - DNA, 40 bp, Artificial Sequence
  Synthetic
cgcacacgctgccatatcctgacattggaacttcctgcgg

SEQ ID NO: 7039 - DNA, 38 bp, Artificial Sequence
  Synthetic
tgcccttcattgccgttggggagggcggtttcgtcagt

SEQ ID NO: 7040 - DNA, 39 bp, Artificial Sequence
  Synthetic
gcagaaagtcggcgaataccgggttcggcaggcaggttt

SEQ ID NO: 7041 - DNA, 40 bp, Artificial Sequence
  Synthetic
tccgcctgtaccgaaatcaacgccatacccaatacgccgg

SEQ ID NO: 7042 - DNA, 40 bp, Artificial Sequence
  Synthetic
cgaaaccgacgctcgcgtatcgtcttcgggattagccaat

SEQ ID NO: 7043 - DNA, 44 bp, Artificial Sequence
  Synthetic
ttttccagacggcattttttgttttggtcattttgctggaagag

SEQ ID NO: 7044 - DNA, 38 bp, Artificial Sequence
  Synthetic
catccgcacccagttgcgcggtttgtttgctgccgagg

SEQ ID NO: 7045 - DNA, 44 bp, Artificial Sequence
  Synthetic
gtcagacatcgggaaatgcttttttcaaaagcagattggacaaa

SEQ ID NO: 7046 - DNA, 38 bp, Artificial Sequence
  Synthetic
tgcaaaccgcgccgtatcagaattgcgcgcttgcttca

SEQ ID NO: 7047 - DNA, 37 bp, Artificial Sequence
  Synthetic
gcgaaccggcgcaagaactatacttcggggttgcggg

SEQ ID NO: 7048 - DNA, 39 bp, Artificial Sequence
  Synthetic
gttgccaagcctaagccgttgcgcaatcggcggattcgg

SEQ ID NO: 7049 - DNA, 40 bp, Artificial Sequence
  Synthetic
tggcggcttcgactgtttcgcctttatgcacgccaccttt

SEQ ID NO: 7050 - DNA, 41 bp, Artificial Sequence
  Synthetic
agcatccccatcatccacaaccggggaagtagaacacggct

SEQ ID NO: 7051 - DNA, 41 bp, Artificial Sequence
  Synthetic
tcgcttcgatcacttcgggacgcggaattgctgaaacagga

SEQ ID NO: 7052 - DNA, 39 bp, Artificial Sequence
  Synthetic
ggattgccggcgccgatgtccgatatgaagcggcggata

SEQ ID NO: 7053 - DNA, 34 bp, Artificial Sequence
  Synthetic
cgcgccgtccaagccttttggcgagggtcatcgc

SEQ ID NO: 7054 - DNA, 37 bp, Artificial Sequence
  Synthetic
ggcttggatttgccggactgtgcacgacctccggcaa

SEQ ID NO: 7055 - DNA, 36 bp, Artificial Sequence
  Synthetic
cgagggtgcgctccatctgccgaaatgggcgtcgtc

SEQ ID NO: 7056 - DNA, 38 bp, Artificial Sequence
  Synthetic
gtagcggtcgaagtcgtgcggacctggacatcctcgcc

SEQ ID NO: 7057 - DNA, 41 bp, Artificial Sequence
  Synthetic
cgggggaagtcggtcaggtagcctgttcaaccccttcgtcc

SEQ ID NO: 7058 - DNA, 38 bp, Artificial Sequence
  Synthetic
tttgaccagcagcgaagacaggtcggcttcggcgcaag

SEQ ID NO: 7059 - DNA, 39 bp, Artificial Sequence
  Synthetic
cacggtccgcgtgatttggtaatcggcaggggaaatgtg

SEQ ID NO: 7060 - DNA, 44 bp, Artificial Sequence
  Synthetic
acaggctggttactttgtttttttgccatcgtgaccaaactgac

SEQ ID NO: 7061 - DNA, 37 bp, Artificial Sequence
  Synthetic
ggtcggtatgcaatgcgtggtcgcgtgggctgtatgc

SEQ ID NO: 7062 - DNA, 37 bp, Artificial Sequence
  Synthetic
ccccgatagccgaaaagcagctaccgaagccctgcgc

SEQ ID NO: 7063 - DNA, 38 bp, Artificial Sequence
  Synthetic
ggacagcccgaacacacccgttttcgggaatcagggcg

SEQ ID NO: 7064 - DNA, 36 bp, Artificial Sequence
  Synthetic
ttgccggaacatggctgctagatgcctgcgccgtag

SEQ ID NO: 7065 - DNA, 38 bp, Artificial Sequence
  Synthetic
tgggcaacgaaggcgacggacaccagcatgtcgcaatg

SEQ ID NO: 7066 - DNA, 41 bp, Artificial Sequence
  Synthetic
ctacaccctctccgtcgtcccggctttgaaatggcggtaca

SEQ ID NO: 7067 - DNA, 36 bp, Artificial Sequence
  Synthetic
atatgtgccgtgccgcgctgccggtcgttgagttcg

SEQ ID NO: 7068 - DNA, 40 bp, Artificial Sequence
  Synthetic
aaaggggcgaagtttacaggcttcgcgttgttgtaggttt

SEQ ID NO: 7069 - DNA, 36 bp, Artificial Sequence
  Synthetic
ttggtttcgccgctcatggcaaagcccgcgccgaag

SEQ ID NO: 7070 - DNA, 36 bp, Artificial Sequence
  Synthetic
cgctcggcggcatccaaagaaagttacgaggccgcc

SEQ ID NO: 7071 - DNA, 35 bp, Artificial Sequence
  Synthetic
tcacaggcacacgtctgcgaaagcctcgaccgccc

SEQ ID NO: 7072 - DNA, 39 bp, Artificial Sequence
  Synthetic
cgtgggcttacctgccgctcgatgtaaacctcgggcagc

SEQ ID NO: 7073 - DNA, 40 bp, Artificial Sequence
  Synthetic
ttcagacggcattttcggcacaatttctggtggcggcttg

SEQ ID NO: 7074 - DNA, 41 bp, Artificial Sequence
  Synthetic
tacctcgccaaaaaactcggcaggcttggaggaattcgtgc

SEQ ID NO: 7075 - DNA, 41 bp, Artificial Sequence
  Synthetic
ggtcggtatggatgccttcctgagcccgtcaaagagtttgg

SEQ ID NO: 7076 - DNA, 42 bp, Artificial Sequence
  Synthetic
accaacaacagcaccttcctcgcgttctaggttcgggtatgc

SEQ ID NO: 7077 - DNA, 41 bp, Artificial Sequence
  Synthetic
atctggcgaaggaaatgcacgtgcgaaatactgtcgccgat

SEQ ID NO: 7078 - DNA, 41 bp, Artificial Sequence
  Synthetic
gcttgcccgattttgaaagccgggtgagttttgccagttgc

SEQ ID NO: 7079 - DNA, 36 bp, Artificial Sequence
  Synthetic
ccgcccgcccgattgtcaaaaggcagggcgatcagc

SEQ ID NO: 7080 - DNA, 42 bp, Artificial Sequence
  Synthetic
tcgagtacgccggtgattttgtgtccacggcttgaatatcga

SEQ ID NO: 7081 - DNA, 45 bp, Artificial Sequence
  Synthetic
aattcgactgctttttcggcgggataaaaatatgacgacacaaga

SEQ ID NO: 7082 - DNA, 42 bp, Artificial Sequence
  Synthetic
tccaacagttttgccacaccgtgtggaaaaacggtggacaga

SEQ ID NO: 7083 - DNA, 42 bp, Artificial Sequence
  Synthetic
agcccagtatgacaatttgctgtgctgattatctgccgtaaa

SEQ ID NO: 7084 - DNA, 40 bp, Artificial Sequence
  Synthetic
tgcccaagcacccaaatcatatttgttttgccgtgatgtg

SEQ ID NO: 7085 - DNA, 40 bp, Artificial Sequence
  Synthetic
cacgccaatgacgcgcaatctttcggattctttcgccagt

SEQ ID NO: 7086 - DNA, 39 bp, Artificial Sequence
  Synthetic
gcaaaattccgcgcattaagcatgattttcaggctgcct

SEQ ID NO: 7087 - DNA, 41 bp, Artificial Sequence
  Synthetic
gcctataccgaaaaatggcgcgaaaccattctgtgcgctcg

SEQ ID NO: 7088 - DNA, 38 bp, Artificial Sequence
  Synthetic
gtttgatgccgttttgtgcgtgattatttacgcggcgg

SEQ ID NO: 7089 - DNA, 38 bp, Artificial Sequence
  Synthetic
gcaaacaacaacactcgggcctgcccattgtgcatagg

SEQ ID NO: 7090 - DNA, 43 bp, Artificial Sequence
  Synthetic
cgaaatttttcatggtaaacgagcggataccgcaatggctttg

SEQ ID NO: 7091 - DNA, 39 bp, Artificial Sequence
  Synthetic
gtccgaagacggcggcttcacaacagccgaagccgtaag

SEQ ID NO: 7092 - DNA, 39 bp, Artificial Sequence
  Synthetic
ggtacgcaaccgaacagctctgttggctatgactgcccg

SEQ ID NO: 7093 - DNA, 47 bp, Artificial Sequence
  Synthetic
accgttcaaataaatcgctctacatgattagacccaacatgagtttg

SEQ ID NO: 7094 - DNA, 43 bp, Artificial Sequence
  Synthetic
ctgggcaaactggaaaaacggatatattatgctgacgcccaaa

SEQ ID NO: 7095 - DNA, 33 bp, Artificial Sequence
  Synthetic
cggcaaaggcgtgcacgtaatgcctgcgtcgcg

SEQ ID NO: 7096 - DNA, 36 bp, Artificial Sequence
  Synthetic
cgcctgcgcgttgtgaatcgccctgcaacactacgc

SEQ ID NO: 7097 - DNA, 41 bp, Artificial Sequence
  Synthetic
aaacggtttttctttggcttcggggataaaaccgcctacgc

SEQ ID NO: 7098 - DNA, 40 bp, Artificial Sequence
  Synthetic
gcggctgccgtacaatcaaaatgatatgtcgggcggcatc

SEQ ID NO: 7099 - DNA, 34 bp, Artificial Sequence
  Synthetic
gcatcagccttgccacgcttgcgcgtcggcttga

SEQ ID NO: 7100 - DNA, 40 bp, Artificial Sequence
  Synthetic
caggcagtgtcggtcatcctcactcttccagcctgccctc

SEQ ID NO: 7101 - DNA, 37 bp, Artificial Sequence
  Synthetic
tccaggcgtccccagttgtcatcacgcccaacctgac

SEQ ID NO: 7102 - DNA, 37 bp, Artificial Sequence
  Synthetic
acgttcgacggcggcttgtgcatcaaaagtcctgcgg

SEQ ID NO: 7103 - DNA, 39 bp, Artificial Sequence
  Synthetic
ttcagcttcggatggaaaaggacgttttttgctggcatc

SEQ ID NO: 7104 - DNA, 39 bp, Artificial Sequence
  Synthetic
catacggcgcatcgttggcggcgccggtttacaatcctt

SEQ ID NO: 7105 - DNA, 40 bp, Artificial Sequence
  Synthetic
cccgcctttccgacaacgagaacagtatgcccaactgcaa

SEQ ID NO: 7106 - DNA, 39 bp, Artificial Sequence
  Synthetic
tgtggcgaaaagctccatcggaatcgcccaagtgagctg

SEQ ID NO: 7107 - DNA, 38 bp, Artificial Sequence
  Synthetic
gggctgctggatgcgggtaaaagtcgccgaacggaaag

SEQ ID NO: 7108 - DNA, 37 bp, Artificial Sequence
  Synthetic
cgcccgccggtctgaaacatccagctcgaccatcagg

SEQ ID NO: 7109 - DNA, 41 bp, Artificial Sequence
  Synthetic
acggtggaacgtgggaacagggatagtttgggtactgccgc

SEQ ID NO: 7110 - DNA, 37 bp, Artificial Sequence
  Synthetic
aagcaacagcatccgccgcgcgtgatgtcgaaaccga

SEQ ID NO: 7111 - DNA, 39 bp, Artificial Sequence
  Synthetic
tccccgataccgatgccgtctgtaaacggcaggtgcatc

SEQ ID NO: 7112 - DNA, 39 bp, Artificial Sequence
  Synthetic
aaacggttgcccaaaccccgcaaccgaaccgtcattccc

SEQ ID NO: 7113 - DNA, 38 bp, Artificial Sequence
  Synthetic
tctgctcgccaaagtcaaagccacgcggatgtcgaggc

SEQ ID NO: 7114 - DNA, 40 bp, Artificial Sequence
  Synthetic
aacatctggcgcaaaaaaccggcggcatccaaagtgtcgg

SEQ ID NO: 7115 - DNA, 40 bp, Artificial Sequence
  Synthetic
cgaagtgttggacgcaccgctaaagagttgccgtcgatgg

SEQ ID NO: 7116 - DNA, 38 bp, Artificial Sequence
  Synthetic
ttttccacgcgtttgcccgggctgcggcaaagttgttg

SEQ ID NO: 7117 - DNA, 38 bp, Artificial Sequence
  Synthetic
cgacatccacggcaaagcgctgtggaaacgctcgtcgg

SEQ ID NO: 7118 - DNA, 37 bp, Artificial Sequence
  Synthetic
attcacacgcaaacccgcctgacaacacggcggaagg

SEQ ID NO: 7119 - DNA, 41 bp, Artificial Sequence
  Synthetic
agtgtccgccaacatattgcgcggcagtgacgacgatgacc

SEQ ID NO: 7120 - DNA, 39 bp, Artificial Sequence
  Synthetic
ccccgcccgtttcgccaaaggagaagtttaaccgccagg

SEQ ID NO: 7121 - DNA, 39 bp, Artificial Sequence
  Synthetic
accattgccgtctgcgacacggctttttgtggatgatgg

SEQ ID NO: 7122 - DNA, 37 bp, Artificial Sequence
  Synthetic
cgaaaccttaaaccccggcccgcgaggcggagaagct

SEQ ID NO: 7123 - DNA, 37 bp, Artificial Sequence
  Synthetic
tgtcaaaacgctccttcaggcgaacggttggcgcgtg

SEQ ID NO: 7124 - DNA, 34 bp, Artificial Sequence
  Synthetic
gcatccgcgccgaagagtcggcggcgttttggac

SEQ ID NO: 7125 - DNA, 35 bp, Artificial Sequence
  Synthetic
catctgcgccttgtccggcaggcggactggcggaa

SEQ ID NO: 7126 - DNA, 39 bp, Artificial Sequence
  Synthetic
cctgcggattcaataccggcaggaaacgtgcgcctgttg

SEQ ID NO: 7127 - DNA, 36 bp, Artificial Sequence
  Synthetic
cggccgattccgccaaaccggattatgcgccgggag

SEQ ID NO: 7128 - DNA, 39 bp, Artificial Sequence
  Synthetic
cccattccccgtttgccagcggaatcggccggtgagttt

SEQ ID NO: 7129 - DNA, 41 bp, Artificial Sequence
  Synthetic
gctgggcacgtcttccaaagccggcaaggcttatttgtcca

SEQ ID NO: 7130 - DNA, 34 bp, Artificial Sequence
  Synthetic
gccagttcgcgcgtggttttcggggcgcaacacc

SEQ ID NO: 7131 - DNA, 38 bp, Artificial Sequence
  Synthetic
gcctttggcggctttgcgttgggatttcatcggacagg

SEQ ID NO: 7132 - DNA, 34 bp, Artificial Sequence
  Synthetic
gtgtgcggcgcggatgtacggaaaaacgcgcggc

SEQ ID NO: 7133 - DNA, 37 bp, Artificial Sequence
  Synthetic
gcgtttttccagcgcgtcgacgaaatggcggcatacg

SEQ ID NO: 7134 - DNA, 40 bp, Artificial Sequence
  Synthetic
gatcctacacgccgcgaacctccgaaagctccttgtccgc

SEQ ID NO: 7135 - DNA, 42 bp, Artificial Sequence
  Synthetic
gactcggaagacgtcatccggcggtccagttgaagcagctga

SEQ ID NO: 7136 - DNA, 42 bp, Artificial Sequence
  Synthetic
aacttgaagcggcaatgagggccctgacgcagatagacgatg

SEQ ID NO: 7137 - DNA, 37 bp, Artificial Sequence
  Synthetic
cggctgtgcgtgaggtgctcaagtaatcccgcgtccc

SEQ ID NO: 7138 - DNA, 38 bp, Artificial Sequence
  Synthetic
tcaacgcctttcaccagctctcctccgcgatatagggt

SEQ ID NO: 7139 - DNA, 37 bp, Artificial Sequence
  Synthetic
gtccaccaccaagagcgcggccgacttggaagccttg

SEQ ID NO: 7140 - DNA, 38 bp, Artificial Sequence
  Synthetic
ggcgagcgtttgcggatgaatgccgaacggacaaaacc

SEQ ID NO: 7141 - DNA, 40 bp, Artificial Sequence
  Synthetic
atgtgtgccgaaaacaaccgcttgaggaagacggttgcga

SEQ ID NO: 7142 - DNA, 35 bp, Artificial Sequence
  Synthetic
cttccgtcctcgccgatcctgtggatgacggcggg

SEQ ID NO: 7143 - DNA, 35 bp, Artificial Sequence
  Synthetic
cgaagccctgcgcctcgaaaccgcccaagccttgc

SEQ ID NO: 7144 - DNA, 35 bp, Artificial Sequence
  Synthetic
tttgcagacgaccgcgtgctccgacaagcagcccg

SEQ ID NO: 7145 - DNA, 36 bp, Artificial Sequence
  Synthetic
aaatcctgtttgccgccgccttggggcgcaattcgg

SEQ ID NO: 7146 - DNA, 35 bp, Artificial Sequence
  Synthetic
tttggccttggctgccgatccgccgaaacagcttg

SEQ ID NO: 7147 - DNA, 38 bp, Artificial Sequence
  Synthetic
cgctacggcagccgcgaaagcggttgttggtggtttgc

SEQ ID NO: 7148 - DNA, 39 bp, Artificial Sequence
  Synthetic
tgccggtatggtttcaagacgaaagagcagacggagaag

SEQ ID NO: 7149 - DNA, 41 bp, Artificial Sequence
  Synthetic
cctctcgtactaggagcagccccgtgagacagtttggtccc

SEQ ID NO: 7150 - DNA, 36 bp, Artificial Sequence
  Synthetic
gcggggccctcgaaaacctccgcacggttaccaacc

SEQ ID NO: 7151 - DNA, 42 bp, Artificial Sequence
  Synthetic
agcacaaaaatcttgccgtcgcgcgattgacgtgattgtcga

SEQ ID NO: 7152 - DNA, 39 bp, Artificial Sequence
  Synthetic
gacgggcaaaggttcgcgtgttgaggttggacacggtaa

SEQ ID NO: 7153 - DNA, 41 bp, Artificial Sequence
  Synthetic
atctccatccacgacgtgggcgcatcgttgaccaattcagg

SEQ ID NO: 7154 - DNA, 41 bp, Artificial Sequence
  Synthetic
cggcaaataccaaacccccgtcgataggtgttgaagcccat

SEQ ID NO: 7155 - DNA, 39 bp, Artificial Sequence
  Synthetic
aatggccgccgccttcaccaggtcggacatatgcacgtc

SEQ ID NO: 7156 - DNA, 38 bp, Artificial Sequence
  Synthetic
ccctgccttgcgcgaccaacccaatgtcagcgtgttcg

SEQ ID NO: 7157 - DNA, 37 bp, Artificial Sequence
  Synthetic
tctcgctcgcgtccaaatctgatgccgccgatggagc

SEQ ID NO: 7158 - DNA, 36 bp, Artificial Sequence
  Synthetic
ccgtgggtatgtcgctcggctgcgttcgagcgaggc

SEQ ID NO: 7159 - DNA, 37 bp, Artificial Sequence
  Synthetic
caccgtcggtgcagtcttcatttggcgatgtggacgg

SEQ ID NO: 7160 - DNA, 39 bp, Artificial Sequence
  Synthetic
ctacgaagcccccgtcggagcccaatagctgaatacggt

SEQ ID NO: 7161 - DNA, 35 bp, Artificial Sequence
  Synthetic
cgttcaggctgcccgaacacttgtccgccgtcgtc

SEQ ID NO: 7162 - DNA, 40 bp, Artificial Sequence
  Synthetic
agaacaaatcaaacgcgcccgcctgcaggtagcggctgag

SEQ ID NO: 7163 - DNA, 36 bp, Artificial Sequence
  Synthetic
cgcaccccgtgggcacaatgcgcagggtcatggctt

SEQ ID NO: 7164 - DNA, 46 bp, Artificial Sequence
  Synthetic
catgcagatatgcagattctgacaaaggtttagatcagttttcgga

SEQ ID NO: 7165 - DNA, 40 bp, Artificial Sequence
  Synthetic
tatcgagttgcgccaccaaccccaaatattgcacgcccca

SEQ ID NO: 7166 - DNA, 40 bp, Artificial Sequence
  Synthetic
tcaaccaatccgtttacgcccataaagctgcggcccattt

SEQ ID NO: 7167 - DNA, 38 bp, Artificial Sequence
  Synthetic
ttttggacgaaccctccatcggtgagggtggcgagcag

SEQ ID NO: 7168 - DNA, 41 bp, Artificial Sequence
  Synthetic
gcgacggcgtgattaaagtcgaagacttcgcaggggacgta

SEQ ID NO: 7169 - DNA, 38 bp, Artificial Sequence
  Synthetic
acgccgtacgccgaaacaggccgatgaggttttcgagg

SEQ ID NO: 7170 - DNA, 36 bp, Artificial Sequence
  Synthetic
aacgcatcgtgccgcccatgacgaatggcaaaccgc

SEQ ID NO: 7171 - DNA, 40 bp, Artificial Sequence
  Synthetic
agctgcaactgctcggtaatgacgaatgccccgaaatgct

SEQ ID NO: 7172 - DNA, 38 bp, Artificial Sequence
  Synthetic
ccgccagattgccgcgtgttcgtcccctatgctttggc

SEQ ID NO: 7173 - DNA, 39 bp, Artificial Sequence
  Synthetic
tggggtctttttcggtcaggcatcgtcaaaccgctcgac

SEQ ID NO: 7174 - DNA, 42 bp, Artificial Sequence
  Synthetic
tgtccgtcgggattttggtgtcatgcgctcttctctgctttg

SEQ ID NO: 7175 - DNA, 39 bp, Artificial Sequence
  Synthetic
atgaccccgcttttgctggtagcgggtcaatacggtcag

SEQ ID NO: 7176 - DNA, 39 bp, Artificial Sequence
  Synthetic
cttggtcgagctgcttgccctttgactttggcggcatcg

SEQ ID NO: 7177 - DNA, 37 bp, Artificial Sequence
  Synthetic
caggttcaggcttggtcgcttcgggcatatcgagcgg

SEQ ID NO: 7178 - DNA, 38 bp, Artificial Sequence
  Synthetic
cgcgaaagagttgtccgacgaattccatacgcgcgccg

SEQ ID NO: 7179 - DNA, 40 bp, Artificial Sequence
  Synthetic
ctgcggaaaatgcggcaaagcgccgatgtcttccttacgc

SEQ ID NO: 7180 - DNA, 37 bp, Artificial Sequence
  Synthetic
ggcacgacacccgccgattttcgtcgtgttcggcctg

SEQ ID NO: 7181 - DNA, 40 bp, Artificial Sequence
  Synthetic
ctcgatgcgatggaaagccccgccattcccgcatcagggc

SEQ ID NO: 7182 - DNA, 40 bp, Artificial Sequence
  Synthetic
ccgtcctcgaagccgtcaggggttgttcgggtaggcgata

SEQ ID NO: 7183 - DNA, 38 bp, Artificial Sequence
  Synthetic
cactcggcgacaaaaaaggcatagggcttcgtcgagcg

SEQ ID NO: 7184 - DNA, 40 bp, Artificial Sequence
  Synthetic
gcgtatacaaccgctcgccctgccgtaaacttttgctcct

SEQ ID NO: 7185 - DNA, 40 bp, Artificial Sequence
  Synthetic
tcggttttctctgtgcggacacgttttgggttatgaggat

SEQ ID NO: 7186 - DNA, 35 bp, Artificial Sequence
  Synthetic
caaccggcgtggcgatgtaggacagggtgtgccag

SEQ ID NO: 7187 - DNA, 35 bp, Artificial Sequence
  Synthetic
cgcggccaaactcgttgcttacggtttcgcgcagg

SEQ ID NO: 7188 - DNA, 36 bp, Artificial Sequence
  Synthetic
atgagcgtggtcaaaggtcgccgctgcacgggcttt

SEQ ID NO: 7189 - DNA, 40 bp, Artificial Sequence
  Synthetic
tggcaatggcaggctttgagaccgatcatcgtgatgtcgg

SEQ ID NO: 7190 - DNA, 42 bp, Artificial Sequence
  Synthetic
cttgcccatgaaaaccacgtcgggttgagcacgatttggttc

SEQ ID NO: 7191 - DNA, 39 bp, Artificial Sequence
  Synthetic
gacaagcccccgcctaccagtagggcaggtaaacgtcga

SEQ ID NO: 7192 - DNA, 39 bp, Artificial Sequence
  Synthetic
aaccgtctgcaccgtaaatgttaaagatggtcgggttgc

SEQ ID NO: 7193 - DNA, 39 bp, Artificial Sequence
  Synthetic
tttccagtgcggcgagatacatcatccttgcaacaggtc

SEQ ID NO: 7194 - DNA, 37 bp, Artificial Sequence
  Synthetic
acatccgccgtggtgttgcatcccgttcaagttgccg

SEQ ID NO: 7195 - DNA, 45 bp, Artificial Sequence
  Synthetic
ttcatgcagtggcgttagcttaaaaaactgagcttcgagaattac

SEQ ID NO: 7196 - DNA, 38 bp, Artificial Sequence
  Synthetic
gtgcctctccaaacgccacgcctgacgaagcgacaacg

SEQ ID NO: 7197 - DNA, 40 bp, Artificial Sequence
  Synthetic
gtttgtcgtcaaaccgcgcgttgggcttcgtattgttggt

SEQ ID NO: 7198 - DNA, 37 bp, Artificial Sequence
  Synthetic
gaggcggaggtagagccggaatgttgggcggcgttcc

SEQ ID NO: 7199 - DNA, 36 bp, Artificial Sequence
  Synthetic
ttgccgccagttgcagcgcggaatgggagcagatgc

SEQ ID NO: 7200 - DNA, 38 bp, Artificial Sequence
  Synthetic
cgcatcgacgttgtcctttggtttcggcgggtgagagc

SEQ ID NO: 7201 - DNA, 36 bp, Artificial Sequence
  Synthetic
tgccgcacgcgcagaagctttcagttttgccgcttc

SEQ ID NO: 7202 - DNA, 38 bp, Artificial Sequence
  Synthetic
caagccgaaacacgagcgaaacggtgcggcaggtttcg

SEQ ID NO: 7203 - DNA, 34 bp, Artificial Sequence
  Synthetic
cgtgtccgcgcgtttgcaaccctgaccctgctcg

SEQ ID NO: 7204 - DNA, 39 bp, Artificial Sequence
  Synthetic
acggtgcgtttctgacttcgcgcaaaacctcgctcctgc

SEQ ID NO: 7205 - DNA, 40 bp, Artificial Sequence
  Synthetic
ccgtcctgccactcggtctccgccgaaaatcgtcttgaac

SEQ ID NO: 7206 - DNA, 36 bp, Artificial Sequence
  Synthetic
ctggtccgcatacagccgcacgtggtttcggggcaa

SEQ ID NO: 7207 - DNA, 39 bp, Artificial Sequence
  Synthetic
cgcgggcttggcgttatacggggtttcagcctgtcatcg

SEQ ID NO: 7208 - DNA, 40 bp, Artificial Sequence
  Synthetic
accgcaaaagacgacaaggtgtaccgattacgcccatccc

SEQ ID NO: 7209 - DNA, 32 bp, Artificial Sequence
  Synthetic
aaggcagccgcgcgatttcgccgcccgatacg

SEQ ID NO: 7210 - DNA, 39 bp, Artificial Sequence
  Synthetic
cgggcctataccgttgccgcttttgacggcagggagcaa

SEQ ID NO: 7211 - DNA, 40 bp, Artificial Sequence
  Synthetic
gcccactgcagatagggaccaaagtggtacgtgagctggg

SEQ ID NO: 7212 - DNA, 41 bp, Artificial Sequence
  Synthetic
aaaccataaaacgggttgccttcagaagttgaagcaggtaa

SEQ ID NO: 7213 - DNA, 41 bp, Artificial Sequence
  Synthetic
cagatcgaccgcttcctcgtgcggatattgtggaacgggaa

SEQ ID NO: 7214 - DNA, 42 bp, Artificial Sequence
  Synthetic
acaggcgaacaccaccaactacatgcgttcgacaccaatgtt

SEQ ID NO: 7215 - DNA, 40 bp, Artificial Sequence
  Synthetic
cggtagattgcccggaatgcgcgcctctcccttgtccaac

SEQ ID NO: 7216 - DNA, 37 bp, Artificial Sequence
  Synthetic
ccgccgacggccgaaaagttacaaaacaaccgccgcc

SEQ ID NO: 7217 - DNA, 39 bp, Artificial Sequence
  Synthetic
cgtatcgaccaaagcggcgtaagcgatgtacgaacccga

SEQ ID NO: 7218 - DNA, 41 bp, Artificial Sequence
  Synthetic
gcattcaaccgtttggacagcatccatttgtcggtactgcc

SEQ ID NO: 7219 - DNA, 40 bp, Artificial Sequence
  Synthetic
cgactttgtcggcaacaccttgtcgggcaaatcgagttcg

SEQ ID NO: 7220 - DNA, 39 bp, Artificial Sequence
  Synthetic
gccgaagcgatggcgatggccacaaagaaacgctcggat

SEQ ID NO: 7221 - DNA, 39 bp, Artificial Sequence
  Synthetic
caagtgccgggcaaacctccaatcggcaggatggatgca

SEQ ID NO: 7222 - DNA, 38 bp, Artificial Sequence
  Synthetic
cgaaagcaaagccgaactcgactgcacttcgcggcgaa

SEQ ID NO: 7223 - DNA, 36 bp, Artificial Sequence
  Synthetic
agaagccgtcttcccgctgcgcggttgacgaagggc

SEQ ID NO: 7224 - DNA, 39 bp, Artificial Sequence
  Synthetic
tctgccttcgcttctgccgcgcttcaggaacagcttctg

SEQ ID NO: 7225 - DNA, 38 bp, Artificial Sequence
  Synthetic
gagcgcggggttgcctttggtttggacgtttaccgcag

SEQ ID NO: 7226 - DNA, 40 bp, Artificial Sequence
  Synthetic
ctttgtcgcgggcgagtttggaactcttcctcgtcgaagg

SEQ ID NO: 7227 - DNA, 36 bp, Artificial Sequence
  Synthetic
tcgtcttcgcctttgaccggaaagccgtgctgctgc

SEQ ID NO: 7228 - DNA, 40 bp, Artificial Sequence
  Synthetic
cttggcagatatgtgtcgggctagccggtcaaagaacgtc

SEQ ID NO: 7229 - DNA, 41 bp, Artificial Sequence
  Synthetic
tcttcagccgccttcaaatccacgtgaaaactgtggcgttg

SEQ ID NO: 7230 - DNA, 36 bp, Artificial Sequence
  Synthetic
ggaggtgtggatgcggccttgaatcgggcggacacc

SEQ ID NO: 7231 - DNA, 36 bp, Artificial Sequence
  Synthetic
ggaagctgtccgagcccgtgtccgcacgcttatccc

SEQ ID NO: 7232 - DNA, 39 bp, Artificial Sequence
  Synthetic
ggcaagtgcgccgaaatggagcaaaatcagcacggaaac

SEQ ID NO: 7233 - DNA, 38 bp, Artificial Sequence
  Synthetic
gtcgccttcacatcgtgcacggcggctttggcttccgt

SEQ ID NO: 7234 - DNA, 39 bp, Artificial Sequence
  Synthetic
ggcaacgcggctgtcttccccgcattttggacacatgga

SEQ ID NO: 7235 - DNA, 36 bp, Artificial Sequence
  Synthetic
tttcaggcaggtcgggctgtgtttgccgggcagacg

SEQ ID NO: 7236 - DNA, 40 bp, Artificial Sequence
  Synthetic
cgattgcgatatacccggcggggtttggaatgggtgcgtt

SEQ ID NO: 7237 - DNA, 36 bp, Artificial Sequence
  Synthetic
cgtcgcataccaaacgcgcccgttcctgcccgctat

SEQ ID NO: 7238 - DNA, 37 bp, Artificial Sequence
  Synthetic
gaagcctgccgcgagattctccacgccgtaatacgcg

SEQ ID NO: 7239 - DNA, 40 bp, Artificial Sequence
  Synthetic
acgcaccacaacgacagtatggtgcagggcgtattgttgc

SEQ ID NO: 7240 - DNA, 36 bp, Artificial Sequence
  Synthetic
ttgggacgggcagaacgacctcggtttcccagccgc

SEQ ID NO: 7241 - DNA, 39 bp, Artificial Sequence
  Synthetic
ccgaaatgcctgcccataccgtccgcatccgcacatcaa

SEQ ID NO: 7242 - DNA, 40 bp, Artificial Sequence
  Synthetic
gtttgcctgtttgagcgcgtcgaagtattgctcgaccgtc

SEQ ID NO: 7243 - DNA, 36 bp, Artificial Sequence
  Synthetic
gacattgccgccgctcaagctcctgcccacgcttgc

SEQ ID NO: 7244 - DNA, 40 bp, Artificial Sequence
  Synthetic
gtaaccgccgcccaattcgtctttccaccgggcaggctat

SEQ ID NO: 7245 - DNA, 41 bp, Artificial Sequence
  Synthetic
gcaaacgaaatgccttgcgcctcgccgcagttgaaaatcga

SEQ ID NO: 7246 - DNA, 38 bp, Artificial Sequence
  Synthetic
ggcaggaacgaagtcggcagatatcggcttggcggttg

SEQ ID NO: 7247 - DNA, 39 bp, Artificial Sequence
  Synthetic
cgatttgctccgcgtgttgcgaaccccatatcggcgaag

SEQ ID NO: 7248 - DNA, 41 bp, Artificial Sequence
  Synthetic
caaccaggtcgaatacggcgggttgggtttgaacgacggag

SEQ ID NO: 7249 - DNA, 39 bp, Artificial Sequence
  Synthetic
cggatgtggcggatgacgggaaaccgaattggcgcaatt

SEQ ID NO: 7250 - DNA, 36 bp, Artificial Sequence
  Synthetic
ctgccgccatatccgggcattcggacgttttgccgc

SEQ ID NO: 7251 - DNA, 39 bp, Artificial Sequence
  Synthetic
aaacagctgatccgtgccgccgatttgaacgtccgctgg

SEQ ID NO: 7252 - DNA, 41 bp, Artificial Sequence
  Synthetic
caatgcatcccgctcggattgagcacaagctgtccgaacat

SEQ ID NO: 7253 - DNA, 40 bp, Artificial Sequence
  Synthetic
tacctgcccaagcaatacccgtggaacttgggtgtcgttg

SEQ ID NO: 7254 - DNA, 40 bp, Artificial Sequence
  Synthetic
cgcccacacgtgccaaatcatacgaccatccgttccaatg

SEQ ID NO: 7255 - DNA, 38 bp, Artificial Sequence
  Synthetic
tcgccccttatgacctcgactaatgccttcgaatgccc

SEQ ID NO: 7256 - DNA, 38 bp, Artificial Sequence
  Synthetic
gacaccgtgcgcgaagaaggtttgggcgtgagtttggc

SEQ ID NO: 7257 - DNA, 36 bp, Artificial Sequence
  Synthetic
cgctcgcccgccacaaactcttccaagtcgcgggac

SEQ ID NO: 7258 - DNA, 40 bp, Artificial Sequence
  Synthetic
ggtacgacttcgatgccgcgcgtttccttcctgaccaacc

SEQ ID NO: 7259 - DNA, 41 bp, Artificial Sequence
  Synthetic
aaccttggtcgcccataacggaacttgtccgccctgaaagg

SEQ ID NO: 7260 - DNA, 39 bp, Artificial Sequence
  Synthetic
ggccgaccgacagtttccagccttcggcaaacagggttt

SEQ ID NO: 7261 - DNA, 39 bp, Artificial Sequence
  Synthetic
ggcaagggcgaggatgatgagatcccatttggcgcaacc

SEQ ID NO: 7262 - DNA, 36 bp, Artificial Sequence
  Synthetic
ctctgcctgccctgctgctcgaaacgctggtgtccg

SEQ ID NO: 7263 - DNA, 40 bp, Artificial Sequence
  Synthetic
cgttaacaccgagcttgtcgcatgatgacggttgccaacc

SEQ ID NO: 7264 - DNA, 37 bp, Artificial Sequence
  Synthetic
cgaggttcgcaccgacttcggcgcaagagctgttggg

SEQ ID NO: 7265 - DNA, 40 bp, Artificial Sequence
  Synthetic
aagccgcacaagcctttccccattttttccagcagggcga

SEQ ID NO: 7266 - DNA, 40 bp, Artificial Sequence
  Synthetic
tgccgcgttgtcgtgaaaagcctgatgtgggacagctcgg

SEQ ID NO: 7267 - DNA, 41 bp, Artificial Sequence
  Synthetic
tcgtctttcaactgcgcttccacgagccggcttatgaggat

SEQ ID NO: 7268 - DNA, 39 bp, Artificial Sequence
  Synthetic
gcgtcgtggtttcagacgtgccacgggtttggcgggtac

SEQ ID NO: 7269 - DNA, 38 bp, Artificial Sequence
  Synthetic
ggacaggcgcggcgaaactagggtaatcaggtgcaggg

SEQ ID NO: 7270 - DNA, 35 bp, Artificial Sequence
  Synthetic
gcaccatcagcatcggggcaaaccctcgccccgct

SEQ ID NO: 7271 - DNA, 38 bp, Artificial Sequence
  Synthetic
cggcacgtcggcaaaacgggaaatcaacctcacgccgc

SEQ ID NO: 7272 - DNA, 39 bp, Artificial Sequence
  Synthetic
gctgtccgcccgagagttcaggatttgggtttggcaagt

SEQ ID NO: 7273 - DNA, 39 bp, Artificial Sequence
  Synthetic
cgcgacacgcctttttcctgtgaccatggaaatggcgga

SEQ ID NO: 7274 - DNA, 35 bp, Artificial Sequence
  Synthetic
ggcggggttgaggctgaacccggcggcgaaaaagc

SEQ ID NO: 7275 - DNA, 38 bp, Artificial Sequence
  Synthetic
cctcctgctgctgcaacaggcaaaccaagctgccgcag

SEQ ID NO: 7276 - DNA, 34 bp, Artificial Sequence
  Synthetic
actgtgccagttcgcgctctctggcgcgcaccaa

SEQ ID NO: 7277 - DNA, 35 bp, Artificial Sequence
  Synthetic
ggcaaaggtgcgggcggtatgccgaacgcctgcac

SEQ ID NO: 7278 - DNA, 42 bp, Artificial Sequence
  Synthetic
tgcgacaggatttgcgacaacggcctgaagcagcaacacatt

SEQ ID NO: 7279 - DNA, 39 bp, Artificial Sequence
  Synthetic
tcctgctgggtttggaaggccgtctgcccgaattggaag

SEQ ID NO: 7280 - DNA, 37 bp, Artificial Sequence
  Synthetic
ctttcggcgcgggggtttccgttttgtgcggcaaccg

SEQ ID NO: 7281 - DNA, 37 bp, Artificial Sequence
  Synthetic
ataccggcctgtccgtgacccattgcccatcgcgccg

SEQ ID NO: 7282 - DNA, 38 bp, Artificial Sequence
  Synthetic
ggcttcgtacagcttatcgcctgtcggcaagcgggttg

SEQ ID NO: 7283 - DNA, 39 bp, Artificial Sequence
  Synthetic
ccgacaatggcaagggcgtttcgtcaaaggggacaaacg

SEQ ID NO: 7284 - DNA, 38 bp, Artificial Sequence
  Synthetic
ccgccgtacaacgaatggctctcggaagggatgccgac

SEQ ID NO: 7285 - DNA, 37 bp, Artificial Sequence
  Synthetic
ccctcgccgctgattgacgtgtccgtagtcgcattgc

SEQ ID NO: 7286 - DNA, 38 bp, Artificial Sequence
  Synthetic
acggcgaaatcgaatgggtcaattcggtcagcggctcg

SEQ ID NO: 7287 - DNA, 38 bp, Artificial Sequence
  Synthetic
gcggcggatgctgttgctacggtttatcctcctcacga

SEQ ID NO: 7288 - DNA, 37 bp, Artificial Sequence
  Synthetic
cgccgtcgcggaatgggaagtctcgacctcaacggcg

SEQ ID NO: 7289 - DNA, 38 bp, Artificial Sequence
  Synthetic
agcggcacttccaatacgcgaaattcaccgccgaagcc

SEQ ID NO: 7290 - DNA, 38 bp, Artificial Sequence
  Synthetic
aggcgagtttgtaggcggtctgaaacacgccaatccgt

SEQ ID NO: 7291 - DNA, 36 bp, Artificial Sequence
  Synthetic
aacgcaccatggtcgggcgctgcacactggaagacg

SEQ ID NO: 7292 - DNA, 37 bp, Artificial Sequence
  Synthetic
agaaacaccgccgctccgacagcgtcttccccgaaat

SEQ ID NO: 7293 - DNA, 39 bp, Artificial Sequence
  Synthetic
cgtccacacgcccaacatcggtgtataacgtgccgctcg

SEQ ID NO: 7294 - DNA, 37 bp, Artificial Sequence
  Synthetic
gcgcggtaagccacgcctagcgacggtgcgaacgata

SEQ ID NO: 7295 - DNA, 39 bp, Artificial Sequence
  Synthetic
tgttgtcggtttagcagcaaggttcaggaaaggcattgc

SEQ ID NO: 7296 - DNA, 40 bp, Artificial Sequence
  Synthetic
gtttgaacacgattgaccgctagatgctttgatgtcggtt

SEQ ID NO: 7297 - DNA, 41 bp, Artificial Sequence
  Synthetic
ccacctacttacattttgcggttttctatccgccgtttgtc

SEQ ID NO: 7298 - DNA, 40 bp, Artificial Sequence
  Synthetic
ggtcgcgccattcagaaaactttcaaggatttccaaacgg

SEQ ID NO: 7299 - DNA, 38 bp, Artificial Sequence
  Synthetic
aaacagcccgaatcacaacctgttccaatgcttcggag

SEQ ID NO: 7300 - DNA, 40 bp, Artificial Sequence
  Synthetic
acacaaagcgagatgcccgacttcggtatctgcaatcggc

SEQ ID NO: 7301 - DNA, 45 bp, Artificial Sequence
  Synthetic
acgtgatgatgctaaatttttgcagaaaataggtaattgccaccg

SEQ ID NO: 7302 - DNA, 43 bp, Artificial Sequence
  Synthetic
ggtcgtcatgaagttttaatgcggcgtctgaaacaaccaacca

SEQ ID NO: 7303 - DNA, 44 bp, Artificial Sequence
  Synthetic
cggaagcgatgcacaatctggttaaatattgctgataagtgcca

SEQ ID NO: 7304 - DNA, 43 bp, Artificial Sequence
  Synthetic
tctgaaagatgatgatgagccaagcatcacatcggcaatcagt

SEQ ID NO: 7305 - DNA, 45 bp, Artificial Sequence
  Synthetic
tgcaactgacctgcaaattttctgacagaaagtgtgtaaaaactc

SEQ ID NO: 7306 - DNA, 43 bp, Artificial Sequence
  Synthetic
gtgcctgtcataatcgcttaatgcctgccataaataaaccgcg

SEQ ID NO: 7307 - DNA, 38 bp, Artificial Sequence
  Synthetic
cgttggaaacgttgtgcgacttaacgggcaactttcct

SEQ ID NO: 7308 - DNA, 39 bp, Artificial Sequence
  Synthetic
catagccagcagcgtccaagcccctggttttggcactgc

SEQ ID NO: 7309 - DNA, 37 bp, Artificial Sequence
  Synthetic
cggttggtcaggcgcacgttacgccgccgttccaaat

SEQ ID NO: 7310 - DNA, 40 bp, Artificial Sequence
  Synthetic
tcgcccaggtaagtctttggaaaggatgatgattgggagg

SEQ ID NO: 7311 - DNA, 38 bp, Artificial Sequence
  Synthetic
acattgacacacggcggcggcttcctcgttcggtatgg

SEQ ID NO: 7312 - DNA, 35 bp, Artificial Sequence
  Synthetic
ccgcagtttaccgccgcagctttccagcgtcaggc

SEQ ID NO: 7313 - DNA, 36 bp, Artificial Sequence
  Synthetic
tttcaccagcccctccgcgtggtcgcgcctttggtg

SEQ ID NO: 7314 - DNA, 38 bp, Artificial Sequence
  Synthetic
gctgggcagcgaatccttcctagcgttggacacccgag

SEQ ID NO: 7315 - DNA, 34 bp, Artificial Sequence
  Synthetic
gccgccggcaaattcccatacctgctcggctcgc

SEQ ID NO: 7316 - DNA, 35 bp, Artificial Sequence
  Synthetic
gcccgatgccgatgttgcgtcgccaaagccgtcgg

SEQ ID NO: 7317 - DNA, 34 bp, Artificial Sequence
  Synthetic
ggctgtgtgcgtcggcatatgatgtcggcgcgcc

SEQ ID NO: 7318 - DNA, 36 bp, Artificial Sequence
  Synthetic
ggcgcggtgcagggttttgttcgtccctgccagcgt

SEQ ID NO: 7319 - DNA, 38 bp, Artificial Sequence
  Synthetic
ctgttgggtaaacgtgccctgcctcgccgtcgaacgtc

SEQ ID NO: 7320 - DNA, 40 bp, Artificial Sequence
  Synthetic
acccgaaaaacagcacggcggggattgtcgtccaatttgc

SEQ ID NO: 7321 - DNA, 37 bp, Artificial Sequence
  Synthetic
gcaatcagcctttgcgtcggctggtgttgttggcggg

SEQ ID NO: 7322 - DNA, 36 bp, Artificial Sequence
  Synthetic
aagcgacagcatccgccggcgtgatgtcgaaaccga

SEQ ID NO: 7323 - DNA, 37 bp, Artificial Sequence
  Synthetic
acaccgatgccgtctgaacctccgcgcctgtaaacgg

SEQ ID NO: 7324 - DNA, 39 bp, Artificial Sequence
  Synthetic
ccacttccgtgggaatgacggtcagacggcatcggtgtc

SEQ ID NO: 7325 - DNA, 42 bp, Artificial Sequence
  Synthetic
cggcggataaatcgaattgcccctgactttgggcatgatggc

SEQ ID NO: 7326 - DNA, 40 bp, Artificial Sequence
  Synthetic
tccaaacgctcgcggatttcatcctgatgctgcccgaaga

SEQ ID NO: 7327 - DNA, 35 bp, Artificial Sequence
  Synthetic
gttcctgcgcggcgaggattgcatcccgttcgccc

SEQ ID NO: 7328 - DNA, 34 bp, Artificial Sequence
  Synthetic
tttacgcgttccgccgcctcgcctcggtcgccat

SEQ ID NO: 7329 - DNA, 37 bp, Artificial Sequence
  Synthetic
cgcgacgaaggcgggttttcagcgacgtatccgaagc

SEQ ID NO: 7330 - DNA, 41 bp, Artificial Sequence
  Synthetic
tgtacgttcccctgccagtgccgatgtccacctacatccgc

SEQ ID NO: 7331 - DNA, 39 bp, Artificial Sequence
  Synthetic
aggctcttcgtaaggcttcgcccacgcgcgttttgccac

SEQ ID NO: 7332 - DNA, 39 bp, Artificial Sequence
  Synthetic
ccccgaccacgcgctctttctgccacagacatcgtgttg

SEQ ID NO: 7333 - DNA, 37 bp, Artificial Sequence
  Synthetic
ccacgccacggaaatcacgcgatacctgcgtcggcac

SEQ ID NO: 7334 - DNA, 35 bp, Artificial Sequence
  Synthetic
aaaacggcggcgcaccacacaggaagcctaccgcc

SEQ ID NO: 7335 - DNA, 41 bp, Artificial Sequence
  Synthetic
cgtatttttggaagcggcggctgaagcgatccaaaaaggct

SEQ ID NO: 7336 - DNA, 42 bp, Artificial Sequence
  Synthetic
agagtgggtaagctggtagccgcgggtagtggcatttttgga

SEQ ID NO: 7337 - DNA, 37 bp, Artificial Sequence
  Synthetic
gacgccgatcaggaacacgcaggacttcacgcccctg

SEQ ID NO: 7338 - DNA, 42 bp, Artificial Sequence
  Synthetic
gcttgaacgcctcgatatccggtcgatattctggcgctcagt

SEQ ID NO: 7339 - DNA, 35 bp, Artificial Sequence
  Synthetic
gcactgcctgcccgcattgatgttcggcccgtgga

SEQ ID NO: 7340 - DNA, 34 bp, Artificial Sequence
  Synthetic
aaccggcagccaaagccacggccgccacaatgtc

SEQ ID NO: 7341 - DNA, 35 bp, Artificial Sequence
  Synthetic
gctgccgcgcccatcaatgtattcggttgcggcgg

SEQ ID NO: 7342 - DNA, 41 bp, Artificial Sequence
  Synthetic
aacggtagagcagggtttggaccattggaagaaaccgcgca

SEQ ID NO: 7343 - DNA, 37 bp, Artificial Sequence
  Synthetic
cggccgggtctgttgggatcgcacgggggaaatcctc

SEQ ID NO: 7344 - DNA, 40 bp, Artificial Sequence
  Synthetic
caggttgcccatcgggtaatttgggtttggaaaactttgt

SEQ ID NO: 7345 - DNA, 40 bp, Artificial Sequence
  Synthetic
cgccgaacatgacatgtcccagtggggcaaagtgtctctt

SEQ ID NO: 7346 - DNA, 39 bp, Artificial Sequence
  Synthetic
acctcgtcggctttgtcggcgagcagtcggatgcggaaa

SEQ ID NO: 7347 - DNA, 38 bp, Artificial Sequence
  Synthetic
cgtttgcttacgggcggatagggaatggaagcaggttt

SEQ ID NO: 7348 - DNA, 35 bp, Artificial Sequence
  Synthetic
acgcactgctttcgcccgaagtccccagcctgtcc

SEQ ID NO: 7349 - DNA, 39 bp, Artificial Sequence
  Synthetic
caaactctccgccatccatccgagttcgcccatcacgcg

SEQ ID NO: 7350 - DNA, 38 bp, Artificial Sequence
  Synthetic
agccgtcgatttctgccgctttgcgtcttgaggcaggg

SEQ ID NO: 7351 - DNA, 38 bp, Artificial Sequence
  Synthetic
agcctgattgccggttatgccagggcggaagtcgggat

SEQ ID NO: 7352 - DNA, 35 bp, Artificial Sequence
  Synthetic
aaagcccttgccaaacgcggcgttttgtccgccgg

SEQ ID NO: 7353 - DNA, 40 bp, Artificial Sequence
  Synthetic
ccgacttggacggtttgctgcgacgtggttcacaccggtg

SEQ ID NO: 7354 - DNA, 40 bp, Artificial Sequence
  Synthetic
cgcttggaaaacacccgcttcaatcagaagcggtagcgca

SEQ ID NO: 7355 - DNA, 36 bp, Artificial Sequence
  Synthetic
aaggcgcacgcaattccgctatagccgcccacgcct

SEQ ID NO: 7356 - DNA, 37 bp, Artificial Sequence
  Synthetic
tgggcggcagtgcgcaatgggatactgcaccagcgtc

SEQ ID NO: 7357 - DNA, 39 bp, Artificial Sequence
  Synthetic
cgcgccaagtccataccggcgccaaacttttcctcgtca

SEQ ID NO: 7358 - DNA, 36 bp, Artificial Sequence
  Synthetic
gtccgcaccatcctgtcgcatcgaacgccacgccct

SEQ ID NO: 7359 - DNA, 38 bp, Artificial Sequence
  Synthetic
tttcccgtccatccatcggcatggcttggcgcgtgatg

SEQ ID NO: 7360 - DNA, 38 bp, Artificial Sequence
  Synthetic
ctgcgcctgcggcaatttgaacccgaagttacccgcaa

SEQ ID NO: 7361 - DNA, 37 bp, Artificial Sequence
  Synthetic
gtgttgctgctggacgaaccgcgtcttccaacgcgcg

SEQ ID NO: 7362 - DNA, 40 bp, Artificial Sequence
  Synthetic
gcatggcgacaatctcgtcccggaacgtgaaacgggtgtc

SEQ ID NO: 7363 - DNA, 38 bp, Artificial Sequence
  Synthetic
attcggcgaacacatcatccggtgtcggtatggcggcg

SEQ ID NO: 7364 - DNA, 42 bp, Artificial Sequence
  Synthetic
atcttgatgtgtttgtgttcgacgagccgcacattatccaag

SEQ ID NO: 7365 - DNA, 35 bp, Artificial Sequence
  Synthetic
ctgcaccgcagcaggatgttttcggcggcggtttg

SEQ ID NO: 7366 - DNA, 39 bp, Artificial Sequence
  Synthetic
aacatcagcgtactcccccccggcatattgcccggccct

SEQ ID NO: 7367 - DNA, 42 bp, Artificial Sequence
  Synthetic
gcgtaaccacttccacatcggtgtccgttgtttttcgtcagg

SEQ ID NO: 7368 - DNA, 41 bp, Artificial Sequence
  Synthetic
gatgacggtccgttgcagtcgtcaaacgactgagccggata

SEQ ID NO: 7369 - DNA, 39 bp, Artificial Sequence
  Synthetic
ctggtgtggttggaagacggcttggccaaaccgataccg

SEQ ID NO: 7370 - DNA, 34 bp, Artificial Sequence
  Synthetic
gcgggcgcgttcgtgtatgcaggcagcgtgatgc

SEQ ID NO: 7371 - DNA, 38 bp, Artificial Sequence
  Synthetic
cgccattttgcgcccgatatgttgcaagggcagggtcg

SEQ ID NO: 7372 - DNA, 37 bp, Artificial Sequence
  Synthetic
accgacgcaggcatcgatgcaggttcacgctgatgcc

SEQ ID NO: 7373 - DNA, 37 bp, Artificial Sequence
  Synthetic
agcttcttcatctcgcgcgtggcctttgagccggtcg

SEQ ID NO: 7374 - DNA, 39 bp, Artificial Sequence
  Synthetic
atgggcatctaccggcgtgacaggctgtcaacgtagagc

SEQ ID NO: 7375 - DNA, 40 bp, Artificial Sequence
  Synthetic
cgacatcggcgatttcgtcctgacgacggcgagctggtat

SEQ ID NO: 7376 - DNA, 40 bp, Artificial Sequence
  Synthetic
ttccgacaccgcaatatgccccgaccatttctgcccttgc

SEQ ID NO: 7377 - DNA, 39 bp, Artificial Sequence
  Synthetic
atcggcgtattcgatcggggctgatgcgcgaatgggaca

SEQ ID NO: 7378 - DNA, 35 bp, Artificial Sequence
  Synthetic
tcttcggcggctttggcggtcgccctgcaactggg

SEQ ID NO: 7379 - DNA, 37 bp, Artificial Sequence
  Synthetic
cgcacgggattcagcggctgggcattcaggcggacaa

SEQ ID NO: 7380 - DNA, 38 bp, Artificial Sequence
  Synthetic
atgcgggcggaggattatgcccggcagggaagttaagc

SEQ ID NO: 7381 - DNA, 37 bp, Artificial Sequence
  Synthetic
agtgctgaacgacacgcgcgttcccagcatctcgcac

SEQ ID NO: 7382 - DNA, 41 bp, Artificial Sequence
  Synthetic
cgcgattgagcaagacgcaaattccgtcgtagtagctttcg

SEQ ID NO: 7383 - DNA, 36 bp, Artificial Sequence
  Synthetic
ggaggcggcggcgtataaggttcggacggcatcgcg

SEQ ID NO: 7384 - DNA, 36 bp, Artificial Sequence
  Synthetic
atccgccgtggtgttgccatcccgttcaagttgccg

SEQ ID NO: 7385 - DNA, 35 bp, Artificial Sequence
  Synthetic
acactgcctgggcaaagcgtgcccaggctttggcg

SEQ ID NO: 7386 - DNA, 35 bp, Artificial Sequence
  Synthetic
gcccgaaactgccgcaccttaccggccgccttcag

SEQ ID NO: 7387 - DNA, 42 bp, Artificial Sequence
  Synthetic
aactgacgggcattttgaatttgctgaaccttggttttgcct

SEQ ID NO: 7388 - DNA, 38 bp, Artificial Sequence
  Synthetic
ccagtccgacccactgcatctcaggcggctttcctgta

SEQ ID NO: 7389 - DNA, 40 bp, Artificial Sequence
  Synthetic
gggcggactgaatatccggtccggttacggtaatgctgcc

SEQ ID NO: 7390 - DNA, 38 bp, Artificial Sequence
  Synthetic
gcacaggcagtccgcgatcctgtattcgcgtacctgcg

SEQ ID NO: 7391 - DNA, 41 bp, Artificial Sequence
  Synthetic
ttcaaccgcgatgtgtccgtagacgcacaactgggatacgg

SEQ ID NO: 7392 - DNA, 38 bp, Artificial Sequence
  Synthetic
cggtacatcacgctgcgctgccgatgccgacatgatgc

SEQ ID NO: 7393 - DNA, 40 bp, Artificial Sequence
  Synthetic
cggtacgcggccttggtagagttcatcggtcaatccacca

SEQ ID NO: 7394 - DNA, 40 bp, Artificial Sequence
  Synthetic
ctgcaggggctcgagtacgccggcaaaaacgtccacttga

SEQ ID NO: 7395 - DNA, 38 bp, Artificial Sequence
  Synthetic
cagtcgtacatcgcaaacacgccgatacggaagcggcg

SEQ ID NO: 7396 - DNA, 38 bp, Artificial Sequence
  Synthetic
cccctcgctgccgttgactggcggatttggaagggaaa

SEQ ID NO: 7397 - DNA, 34 bp, Artificial Sequence
  Synthetic
cagcggcaaatcggcagcgcgtccgcatcgatgc

SEQ ID NO: 7398 - DNA, 43 bp, Artificial Sequence
  Synthetic
cgtaaaaaccggcggcaaacctgttctactttcaatttttcgc

SEQ ID NO: 7399 - DNA, 40 bp, Artificial Sequence
  Synthetic
tttccagcgcggatattctggccgatgtcttgaccgcgct

SEQ ID NO: 7400 - DNA, 40 bp, Artificial Sequence
  Synthetic
aggatggggtgcatacggtagccatcgagccgctggtcta

SEQ ID NO: 7401 - DNA, 41 bp, Artificial Sequence
  Synthetic
ccgatacggtttggagccgttttccgcataagctcggaagc

SEQ ID NO: 7402 - DNA, 37 bp, Artificial Sequence
  Synthetic
tggttcgcaccgctttacgaacgtggcgatgtccagc

SEQ ID NO: 7403 - DNA, 39 bp, Artificial Sequence
  Synthetic
gcgaccataccaaacacccattgatggagcaaaggttgt

SEQ ID NO: 7404 - DNA, 40 bp, Artificial Sequence
  Synthetic
ggcaaagcaaaaacccccgggtaggtcactgccaaacacc

SEQ ID NO: 7405 - DNA, 39 bp, Artificial Sequence
  Synthetic
tttgcctgacccactgcctggcacagtcggacatagacg

SEQ ID NO: 7406 - DNA, 40 bp, Artificial Sequence
  Synthetic
cgaaatgattaaggcgggcgcgaaatcgtgttccgccgcc

SEQ ID NO: 7407 - DNA, 39 bp, Artificial Sequence
  Synthetic
acgttttaaacctcccccgccgaaatcggtcagctgccg

SEQ ID NO: 7408 - DNA, 35 bp, Artificial Sequence
  Synthetic
gccaccctgcaatcgctcgttcgggcagccacagc

SEQ ID NO: 7409 - DNA, 39 bp, Artificial Sequence
  Synthetic
tgcccaagctgatttcgccctttgcgcgaggaaaacagg

SEQ ID NO: 7410 - DNA, 38 bp, Artificial Sequence
  Synthetic
tcatcgaaatcaccgtccccgatcggtgcggatgaggc

SEQ ID NO: 7411 - DNA, 43 bp, Artificial Sequence
  Synthetic
tcgaaataccccaatcggaaccccatagagctttctacggttt

SEQ ID NO: 7412 - DNA, 36 bp, Artificial Sequence
  Synthetic
gcggcagggttgggttcgacgtgttgggtttcgccg

SEQ ID NO: 7413 - DNA, 39 bp, Artificial Sequence
  Synthetic
gtttcgcgcgcctcttgcacaccagcgaagacatcaaca

SEQ ID NO: 7414 - DNA, 36 bp, Artificial Sequence
  Synthetic
aaccgacttcccggcaaacggtcatttcgggcggcg

SEQ ID NO: 7415 - DNA, 38 bp, Artificial Sequence
  Synthetic
gcgtggacggcttcttcaaaggatggcggcgacttggg

SEQ ID NO: 7416 - DNA, 35 bp, Artificial Sequence
  Synthetic
acggcggcgtttttgctgccgttgcgccaataccg

SEQ ID NO: 7417 - DNA, 40 bp, Artificial Sequence
  Synthetic
atgttgtcggcaagctcgcgcacaaaatcccgccctcaaa

SEQ ID NO: 7418 - DNA, 34 bp, Artificial Sequence
  Synthetic
ctttggcgggcgcggtttccgcattgctggcagc

SEQ ID NO: 7419 - DNA, 40 bp, Artificial Sequence
  Synthetic
ttccatacggacgttgtgcgcggcgaaaccctgacctaca

SEQ ID NO: 7420 - DNA, 38 bp, Artificial Sequence
  Synthetic
atcggaagcttgtgcggattcgttgcggcggaagaggc

SEQ ID NO: 7421 - DNA, 39 bp, Artificial Sequence
  Synthetic
acactgggcgagtttgacgactagtagtcgtgccggtcg

SEQ ID NO: 7422 - DNA, 39 bp, Artificial Sequence
  Synthetic
aaacctgcccgccgtcattcggattaaccctttgctcgg

SEQ ID NO: 7423 - DNA, 36 bp, Artificial Sequence
  Synthetic
cttgccgatatgcttgccgcgcccaagccgtgtacg

SEQ ID NO: 7424 - DNA, 34 bp, Artificial Sequence
  Synthetic
gctgctgcaacgcgggttcagccgtagcgttgcg

SEQ ID NO: 7425 - DNA, 37 bp, Artificial Sequence
  Synthetic
ggctgcctgccgacatcctgcatcggcaggcggattt

SEQ ID NO: 7426 - DNA, 40 bp, Artificial Sequence
  Synthetic
aaaaccctgcccatccccagcgatgacgcttttgccgttt

SEQ ID NO: 7427 - DNA, 42 bp, Artificial Sequence
  Synthetic
atgtcaaacgcctctcctccgcccaagaccatacgttcggcg

SEQ ID NO: 7428 - DNA, 37 bp, Artificial Sequence
  Synthetic
cggcgatgatggtgttttcggagggtttgcaggcgca

SEQ ID NO: 7429 - DNA, 37 bp, Artificial Sequence
  Synthetic
ggctggcgactctgctgcacggagagggtcagcgaag

SEQ ID NO: 7430 - DNA, 39 bp, Artificial Sequence
  Synthetic
cacgactgaaccgatgccgttggggttgggtgtggaaat

SEQ ID NO: 7431 - DNA, 39 bp, Artificial Sequence
  Synthetic
cgtcgatttcgcctgcggcacaacttgttcggcgttgac

SEQ ID NO: 7432 - DNA, 42 bp, Artificial Sequence
  Synthetic
ggtggtgtccgaaatgtttgcgccttcctcacgaccagactg

SEQ ID NO: 7433 - DNA, 40 bp, Artificial Sequence
  Synthetic
taatagaggcccgccgcaaagacgggtttcatcctgttgg

SEQ ID NO: 7434 - DNA, 39 bp, Artificial Sequence
  Synthetic
acggcatttgtcatcactggccctgctgtcgctgctggt

SEQ ID NO: 7435 - DNA, 40 bp, Artificial Sequence
  Synthetic
ttacccatcgcaccgacaaacacggcgtggaatggtcttt

SEQ ID NO: 7436 - DNA, 42 bp, Artificial Sequence
  Synthetic
ttgaggccgtctgaaacttcgcggtgaaaatggaagcggtca

SEQ ID NO: 7437 - DNA, 40 bp, Artificial Sequence
  Synthetic
cacgcagaaggtcagcaccataccgttaccgccaaaaacc

SEQ ID NO: 7438 - DNA, 37 bp, Artificial Sequence
  Synthetic
gcccatgtgctgcggttgtgaaagacgcgctggatgc

SEQ ID NO: 7439 - DNA, 38 bp, Artificial Sequence
  Synthetic
ggcggcggtatttatgtccgtcgatgccgaagccgtca

SEQ ID NO: 7440 - DNA, 39 bp, Artificial Sequence
  Synthetic
aaaaccgctcaaaccgcccttcgacaaatcaagcctcgg

SEQ ID NO: 7441 - DNA, 39 bp, Artificial Sequence
  Synthetic
ggtcaacgcaggcggttcgcttgagtccttgaaccagcg

SEQ ID NO: 7442 - DNA, 40 bp, Artificial Sequence
  Synthetic
ccaacacacccaagccacacaggggttttgaaggcggttt

SEQ ID NO: 7443 - DNA, 39 bp, Artificial Sequence
  Synthetic
attcggtgactacggctggatgcaggacaagcagggctg

SEQ ID NO: 7444 - DNA, 36 bp, Artificial Sequence
  Synthetic
caccaacctcaccggctcaatggattcccgcctgcg

SEQ ID NO: 7445 - DNA, 39 bp, Artificial Sequence
  Synthetic
gttccgccacaaacaactgggggtaacttggtgcagggc

SEQ ID NO: 7446 - DNA, 37 bp, Artificial Sequence
  Synthetic
ggcttcccaagtacaggcctctggtcttcgggcgagg

SEQ ID NO: 7447 - DNA, 38 bp, Artificial Sequence
  Synthetic
ggacgtgccgccgatgttatttccaccggattcaccaa

SEQ ID NO: 7448 - DNA, 37 bp, Artificial Sequence
  Synthetic
ccagaagcgtttgcctgtggcagcgccgatgcctacg

SEQ ID NO: 7449 - DNA, 38 bp, Artificial Sequence
  Synthetic
gagggtgaggatttcgtcgtggctgcaacttcgccccg

SEQ ID NO: 7450 - DNA, 37 bp, Artificial Sequence
  Synthetic
ggtcagacgctcgacggtgtaatcgccgccgtcaaag

SEQ ID NO: 7451 - DNA, 37 bp, Artificial Sequence
  Synthetic
gcgtgggcgtatccgtcgttcgcggtagatggtcagc

SEQ ID NO: 7452 - DNA, 35 bp, Artificial Sequence
  Synthetic
gcgcggcaggcatcattcggcgtgggggttgaact

SEQ ID NO: 7453 - DNA, 37 bp, Artificial Sequence
  Synthetic
agcgtgttcaatggcggcgccacttgtttgggcgtgc

SEQ ID NO: 7454 - DNA, 38 bp, Artificial Sequence
  Synthetic
gcacgctcgcgctcttggaggatgacttcgtcgagcga

SEQ ID NO: 7455 - DNA, 37 bp, Artificial Sequence
  Synthetic
gtgccgactgttttgccgacgaaaccgtccgccacgc

SEQ ID NO: 7456 - DNA, 39 bp, Artificial Sequence
  Synthetic
ttccgacaaaatccggctcacagtttgccgtatcgggcg

SEQ ID NO: 7457 - DNA, 35 bp, Artificial Sequence
  Synthetic
cgaagccgacgaacgcaaggttgcggacgcgcgtt

SEQ ID NO: 7458 - DNA, 36 bp, Artificial Sequence
  Synthetic
aaacagccgttgaccgcaacctgcacgttccgcgct

SEQ ID NO: 7459 - DNA, 38 bp, Artificial Sequence
  Synthetic
gacaaactccgcacgtccgcgtgcctgttcccgatgga

SEQ ID NO: 7460 - DNA, 39 bp, Artificial Sequence
  Synthetic
cggcacgcctttcagacgggagatacggtgcggattccg

SEQ ID NO: 7461 - DNA, 37 bp, Artificial Sequence
  Synthetic
cgaaagcagccacgtcgcctcgatgccgcggattacg

SEQ ID NO: 7462 - DNA, 41 bp, Artificial Sequence
  Synthetic
ctgaacgaaaaacgcgccgagaggacgacgttcacatccaa

SEQ ID NO: 7463 - DNA, 38 bp, Artificial Sequence
  Synthetic
acgtggccaaaccgcaccgttttccgctgtctgaacgg

SEQ ID NO: 7464 - DNA, 40 bp, Artificial Sequence
  Synthetic
catcgccacacccgttcagatcataaatcagtgcgtcgcc

SEQ ID NO: 7465 - DNA, 36 bp, Artificial Sequence
  Synthetic
accgcacaaaccggcggagcccatgccttcaatgcg

SEQ ID NO: 7466 - DNA, 35 bp, Artificial Sequence
  Synthetic
cgtgatcgacggaggtgcgacagcttcgggcaggg

SEQ ID NO: 7467 - DNA, 38 bp, Artificial Sequence
  Synthetic
ttggaaaactacgaaggcggcccaaacgtccgccgagc

SEQ ID NO: 7468 - DNA, 40 bp, Artificial Sequence
  Synthetic
cccgaacctcgattacgccggaggttttcagacggcatcg

SEQ ID NO: 7469 - DNA, 38 bp, Artificial Sequence
  Synthetic
atccgccctctttgctgcgccggcgtttatcaggtctt

SEQ ID NO: 7470 - DNA, 41 bp, Artificial Sequence
  Synthetic
gtcgtcgttttgcccacaccggacatgagtgcgaacatcct

SEQ ID NO: 7471 - DNA, 38 bp, Artificial Sequence
  Synthetic
gccattgccgccgccaaaagcatgaaacgccacatcag

SEQ ID NO: 7472 - DNA, 38 bp, Artificial Sequence
  Synthetic
aaaagccgcagccacctcgcatcatggaggggctgatg

SEQ ID NO: 7473 - DNA, 35 bp, Artificial Sequence
  Synthetic
tgctcgaccgccacttcacgttgatgagggcggcg

SEQ ID NO: 7474 - DNA, 39 bp, Artificial Sequence
  Synthetic
caggaaatttccgccctcgtcagttcgtgggcatccagc

SEQ ID NO: 7475 - DNA, 39 bp, Artificial Sequence
  Synthetic
caaacttgggactgaacccggctcagcatgggcatcggc

SEQ ID NO: 7476 - DNA, 35 bp, Artificial Sequence
  Synthetic
aggcgctcggcaaacacaatgcgccttcccagctc

SEQ ID NO: 7477 - DNA, 40 bp, Artificial Sequence
  Synthetic
gcgacacctacaacgacacacaagaaaccggtggcgtaca

SEQ ID NO: 7478 - DNA, 40 bp, Artificial Sequence
  Synthetic
atcgccgacaaaaccaccatcgaggtgtttgccgctttcg

SEQ ID NO: 7479 - DNA, 38 bp, Artificial Sequence
  Synthetic
ccgggcgcggtattctggagccgtatttggtggccatg

SEQ ID NO: 7480 - DNA, 39 bp, Artificial Sequence
  Synthetic
ggacgacgtacgcgccgaagcggtaaatcaagccctgtt

SEQ ID NO: 7481 - DNA, 38 bp, Artificial Sequence
  Synthetic
cgacggcggcgagattgtcgatcaaatcctgcaacacg

SEQ ID NO: 7482 - DNA, 43 bp, Artificial Sequence
  Synthetic
accaataccgtaaatagcctgaagttgcaggggtaaatatccc

SEQ ID NO: 7483 - DNA, 43 bp, Artificial Sequence
  Synthetic
aaatgtcttccactgtcaagcctgtctaagttgcatactcctg

SEQ ID NO: 7484 - DNA, 42 bp, Artificial Sequence
  Synthetic
cgacagcagctttgatttcaggatgcaaccaaatgacgttta

SEQ ID NO: 7485 - DNA, 39 bp, Artificial Sequence
  Synthetic
cgccgcatattttcagacggaatccccaagcaatcaatg

SEQ ID NO: 7486 - DNA, 35 bp, Artificial Sequence
  Synthetic
ccccttcagacggcatcgcatcggcgtgcctgtcg

SEQ ID NO: 7487 - DNA, 40 bp, Artificial Sequence
  Synthetic
gagttcgcggttttcaacgcgactttattgcgacccacgg

SEQ ID NO: 7488 - DNA, 40 bp, Artificial Sequence
  Synthetic
gtaaccagactgtacgggccgctgcaccacttggttgacg

SEQ ID NO: 7489 - DNA, 40 bp, Artificial Sequence
  Synthetic
gggaatcagaagcggtagcgctggaaaacacccgcttcaa

SEQ ID NO: 7490 - DNA, 38 bp, Artificial Sequence
  Synthetic
gccaggccggcggtaatcacaggttacgctggtggtcg

SEQ ID NO: 7491 - DNA, 37 bp, Artificial Sequence
  Synthetic
atatgccccgttccgtcggcgtatcggcgcggcttct

SEQ ID NO: 7492 - DNA, 37 bp, Artificial Sequence
  Synthetic
gcgcgtatcagcacggtgacccgaagacaacggcaac

SEQ ID NO: 7493 - DNA, 39 bp, Artificial Sequence
  Synthetic
tggtcgaaaccgccatttccgcggtgtcttccggcattt

SEQ ID NO: 7494 - DNA, 40 bp, Artificial Sequence
  Synthetic
cgctgaacgccaataccgcccaggtcttggaaatcggggt

SEQ ID NO: 7495 - DNA, 39 bp, Artificial Sequence
  Synthetic
cggcgcgtatccgtttgaaacctctttttccgcagccgc

SEQ ID NO: 7496 - DNA, 36 bp, Artificial Sequence
  Synthetic
acggcgttgaacgaagtcgatggtcgccggaatgca

SEQ ID NO: 7497 - DNA, 35 bp, Artificial Sequence
  Synthetic
gcgtgggcgtgaactaccggtctgccgcccattcg

SEQ ID NO: 7498 - DNA, 41 bp, Artificial Sequence
  Synthetic
aattgttggaatccggcttgtttgaccttttctcaggagca

SEQ ID NO: 7499 - DNA, 37 bp, Artificial Sequence
  Synthetic
cgcgcgggtcttggacgaatccatcaggacggcttgg

SEQ ID NO: 7500 - DNA, 37 bp, Artificial Sequence
  Synthetic
tttgaccaactcggcaagcggtgtttccctgcgcggc

SEQ ID NO: 7501 - DNA, 35 bp, Artificial Sequence
  Synthetic
gcaccagttcgcccgcgatgctcatcgccatcggc

SEQ ID NO: 7502 - DNA, 37 bp, Artificial Sequence
  Synthetic
cgcccgtggcttctttacggcttttggacgacggcgc

SEQ ID NO: 7503 - DNA, 41 bp, Artificial Sequence
  Synthetic
aacgccgccatttccatatcggggtattgccgtgccgtatt

SEQ ID NO: 7504 - DNA, 39 bp, Artificial Sequence
  Synthetic
gcacttctaactccccgcccatttgcattgcgaactgcc

SEQ ID NO: 7505 - DNA, 45 bp, Artificial Sequence
  Synthetic
tttgcaaaggtctcagaatgccgcatatctgaaaagtgtattccg

SEQ ID NO: 7506 - DNA, 41 bp, Artificial Sequence
  Synthetic
agcgtaccgaccgacaatccgcgtgcaaaaatatccgcacc

SEQ ID NO: 7507 - DNA, 37 bp, Artificial Sequence
  Synthetic
cgtattccccgccggagagaacggcggtcagcgattc

SEQ ID NO: 7508 - DNA, 36 bp, Artificial Sequence
  Synthetic
aatacgcgatgcagctcgccggtgttggcgtggagc

SEQ ID NO: 7509 - DNA, 39 bp, Artificial Sequence
  Synthetic
aagctcgccatgcccttcgcggttgtccaaatcgaccag

SEQ ID NO: 7510 - DNA, 41 bp, Artificial Sequence
  Synthetic
ttccaaatcatcctgccccaccgagtgcttcgtaggcgttg

SEQ ID NO: 7511 - DNA, 38 bp, Artificial Sequence
  Synthetic
tgagccgccttctcgacaaccgctgtgtcggagttggc

SEQ ID NO: 7512 - DNA, 36 bp, Artificial Sequence
  Synthetic
attccgccatgccgtccggcttcgacgatggtgcag

SEQ ID NO: 7513 - DNA, 40 bp, Artificial Sequence
  Synthetic
cggcgtaatcgtcggctcgcccagagtttggtttcgacgg

SEQ ID NO: 7514 - DNA, 40 bp, Artificial Sequence
  Synthetic
cgcataccgcagcgaaatgcaaggtggaactgtgcggtaa

SEQ ID NO: 7515 - DNA, 37 bp, Artificial Sequence
  Synthetic
gcagcagcggaacacaaagcagttgccgggcgatgag

SEQ ID NO: 7516 - DNA, 39 bp, Artificial Sequence
  Synthetic
cggttccctaaggcgcccacgcaggcagtacaaatggta

SEQ ID NO: 7517 - DNA, 39 bp, Artificial Sequence
  Synthetic
tgcagaccggcaagctgttattcttgtttgccgccttcg

SEQ ID NO: 7518 - DNA, 35 bp, Artificial Sequence
  Synthetic
gcgggcgaactcgacgcttatcgccaccatcgggc

SEQ ID NO: 7519 - DNA, 39 bp, Artificial Sequence
  Synthetic
atgattttggacatcggcccgaaccggcggctttaagca

SEQ ID NO: 7520 - DNA, 40 bp, Artificial Sequence
  Synthetic
ggttggcgcagaagctgtttgcactacttctcgctgcacg

SEQ ID NO: 7521 - DNA, 40 bp, Artificial Sequence
  Synthetic
agacgacctgattattgcccgctctaccacggcgcagaag

SEQ ID NO: 7522 - DNA, 40 bp, Artificial Sequence
  Synthetic
aagggtttccaacaggctgctgtctgttcgagttggcaca

SEQ ID NO: 7523 - DNA, 39 bp, Artificial Sequence
  Synthetic
cgccgacctgttcgcaaatcgacagtatctggcgcgcct

SEQ ID NO: 7524 - DNA, 43 bp, Artificial Sequence
  Synthetic
aaatgccgtctgaacacattgccataagccgcaatatcaagtt

SEQ ID NO: 7525 - DNA, 38 bp, Artificial Sequence
  Synthetic
cgggctgccgtttaccatagtttcaacagatacgccgc

SEQ ID NO: 7526 - DNA, 43 bp, Artificial Sequence
  Synthetic
gttcaagtttcggctattgcaaatgataaaccaaatctgcggt

SEQ ID NO: 7527 - DNA, 41 bp, Artificial Sequence
  Synthetic
ccgcaacacaagggtatgatttgaagtaaaggctgcaattg

SEQ ID NO: 7528 - DNA, 39 bp, Artificial Sequence
  Synthetic
ccgcagttttgccctgtcctgtaaaaacctgccccaccc

SEQ ID NO: 7529 - DNA, 37 bp, Artificial Sequence
  Synthetic
tatcgacatcgggcacgctggaagggacggcggaact

SEQ ID NO: 7530 - DNA, 38 bp, Artificial Sequence
  Synthetic
gtaatcctgccgccgagcgcgatttgggcatcggcaac

SEQ ID NO: 7531 - DNA, 35 bp, Artificial Sequence
  Synthetic
ccgggcaatacggcatcgccctacgggcacaacgc

SEQ ID NO: 7532 - DNA, 38 bp, Artificial Sequence
  Synthetic
gcatcgggcggcttgtgtagacatccgttcgctcgatt

SEQ ID NO: 7533 - DNA, 40 bp, Artificial Sequence
  Synthetic
cgagatagccttgcgcggtcgtgttcgacaccgtcaacat

SEQ ID NO: 7534 - DNA, 40 bp, Artificial Sequence
  Synthetic
ggtacagcccgaagcgcaaagcagtatgtttcctcggctg

SEQ ID NO: 7535 - DNA, 38 bp, Artificial Sequence
  Synthetic
ggcagaggtgcggattagcgcgacggcaaaatcgggac

SEQ ID NO: 7536 - DNA, 38 bp, Artificial Sequence
  Synthetic
ttttccggccttctgcgagaaaggtatgtgcgcgaccg

SEQ ID NO: 7537 - DNA, 35 bp, Artificial Sequence
  Synthetic
agatgaggaggcagcgggccttctccggcggttgc

SEQ ID NO: 7538 - DNA, 43 bp, Artificial Sequence
  Synthetic
ggcatattaacaacatcaaccctgcttgtagctgcaatgaacg

SEQ ID NO: 7539 - DNA, 39 bp, Artificial Sequence
  Synthetic
cgatggggaggtttggaagctagtctgccaccctatccg

SEQ ID NO: 7540 - DNA, 39 bp, Artificial Sequence
  Synthetic
cgtaacctacgccgcccagctctatgatggcgggcatag

SEQ ID NO: 7541 - DNA, 36 bp, Artificial Sequence
  Synthetic
cggcatcttgtccgacggccaacacaccgacagccc

SEQ ID NO: 7542 - DNA, 35 bp, Artificial Sequence
  Synthetic
ggtaggaacgggcggtggtgcgcgcaaaccgatga

SEQ ID NO: 7543 - DNA, 36 bp, Artificial Sequence
  Synthetic
gcggatgggggacgttgagcgacggcggcaaaatcg

SEQ ID NO: 7544 - DNA, 37 bp, Artificial Sequence
  Synthetic
gcaaaggcggcttgggcaaattgttttggggcgcggt

SEQ ID NO: 7545 - DNA, 38 bp, Artificial Sequence
  Synthetic
tgattaccgccgtctccgccatgcagggtggtgaaggg

SEQ ID NO: 7546 - DNA, 39 bp, Artificial Sequence
  Synthetic
ctatcacgcaccggtctgctggcgggattgacggtttcg

SEQ ID NO: 7547 - DNA, 42 bp, Artificial Sequence
  Synthetic
ggcaggcgtatgcgaaagatgtcaagttcgggcgtaaccatc

SEQ ID NO: 7548 - DNA, 38 bp, Artificial Sequence
  Synthetic
ccatgcccagtttgcggatgcgcccgccaaagttaccg

SEQ ID NO: 7549 - DNA, 38 bp, Artificial Sequence
  Synthetic
gccggaagcggcttggtacggcctgttccaaaacgatt

SEQ ID NO: 7550 - DNA, 38 bp, Artificial Sequence
  Synthetic
catcggcaagattttcggtcgcaattgctgctggcgcg

SEQ ID NO: 7551 - DNA, 38 bp, Artificial Sequence
  Synthetic
gcagcagatgccggcgcatacagccgccaatagccgtc

SEQ ID NO: 7552 - DNA, 38 bp, Artificial Sequence
  Synthetic
gcctgttgcggcacttgctgatttgcgtttccaaaccc

SEQ ID NO: 7553 - DNA, 37 bp, Artificial Sequence
  Synthetic
cgaagcggcgggattcggaacttgagccggctgttcc

SEQ ID NO: 7554 - DNA, 40 bp, Artificial Sequence
  Synthetic
ttgtcgaacactttgccgaagcaaccgtcatacgcgacac

SEQ ID NO: 7555 - DNA, 38 bp, Artificial Sequence
  Synthetic
aacaaccgtccgatttggtgcgcccgaatccgcgctca

SEQ ID NO: 7556 - DNA, 38 bp, Artificial Sequence
  Synthetic
gcaatacgccgtcaaaaccccacgggcttgggtttgcc

SEQ ID NO: 7557 - DNA, 36 bp, Artificial Sequence
  Synthetic
gacagggcgcggtcgagttcgccggtttgcgtttgg

SEQ ID NO: 7558 - DNA, 39 bp, Artificial Sequence
  Synthetic
gcggttttcgcgccgtagcagacctgcaagcccaatacg

SEQ ID NO: 7559 - DNA, 39 bp, Artificial Sequence
  Synthetic
tcatcgtgagcgtgttcagacgtgggcaggcagagcatt

SEQ ID NO: 7560 - DNA, 35 bp, Artificial Sequence
  Synthetic
ggcatgacggcggacagttgcccgccgtttcagac

SEQ ID NO: 7561 - DNA, 40 bp, Artificial Sequence
  Synthetic
atttcggcaatcgataccgccgctccttcatcttccgccg

SEQ ID NO: 7562 - DNA, 38 bp, Artificial Sequence
  Synthetic
gcaaacacgccgccgacatgtttggcgatgacggtaac

SEQ ID NO: 7563 - DNA, 39 bp, Artificial Sequence
  Synthetic
cgaactttccggcggtcagaaccggattcaggcacaggg

SEQ ID NO: 7564 - DNA, 40 bp, Artificial Sequence
  Synthetic
gtcgaattcgtcctgaccgaggggtcgactttgccggaac

SEQ ID NO: 7565 - DNA, 40 bp, Artificial Sequence
  Synthetic
gttggcgatgctggtggtggagtggaaaaggacgaaccga

SEQ ID NO: 7566 - DNA, 35 bp, Artificial Sequence
  Synthetic
ccgcgtccgattccacgcttatggtcgtgccgccc

SEQ ID NO: 7567 - DNA, 37 bp, Artificial Sequence
  Synthetic
ggttcgcccgcttccagcacatcgtcggctgcacaca

SEQ ID NO: 7568 - DNA, 34 bp, Artificial Sequence
  Synthetic
tggcagccctctcgcctgaatggcgcggcggtaa

SEQ ID NO: 7569 - DNA, 40 bp, Artificial Sequence
  Synthetic
accttggttgccgcgactttcagtttggcatcagggtctt

SEQ ID NO: 7570 - DNA, 36 bp, Artificial Sequence
  Synthetic
aacggcgtggcgcaaggtcattttgccccgatgcgg

SEQ ID NO: 7571 - DNA, 40 bp, Artificial Sequence
  Synthetic
tttggcagaggcgctcaaagatgcttctcaatccggcaac

SEQ ID NO: 7572 - DNA, 37 bp, Artificial Sequence
  Synthetic
ccggcatcggcgatctcatctaacccaagccgacgcg

SEQ ID NO: 7573 - DNA, 42 bp, Artificial Sequence
  Synthetic
gtgccgtagtggttttcgagcagccaaacgggttttccttac

SEQ ID NO: 7574 - DNA, 39 bp, Artificial Sequence
  Synthetic
ggaagggcggcttcttctgccctttatatacgcggccgg

SEQ ID NO: 7575 - DNA, 39 bp, Artificial Sequence
  Synthetic
atgcgctgaaaacacccccgatggcgtagaacggtgtga

SEQ ID NO: 7576 - DNA, 47 bp, Artificial Sequence
  Synthetic
ggcatcgggaacttaatcaggggtttcagaccttttcctaattcaat

SEQ ID NO: 7577 - DNA, 37 bp, Artificial Sequence
  Synthetic
gcccgaagatttggtgtgccgtttcctgccctgccgc

SEQ ID NO: 7578 - DNA, 38 bp, Artificial Sequence
  Synthetic
atgagtatcgtgctgcacggcgtcaggtgggcgcaacc

SEQ ID NO: 7579 - DNA, 35 bp, Artificial Sequence
  Synthetic
ggccagccgtccgcattcaactgggaggcaggctg

SEQ ID NO: 7580 - DNA, 40 bp, Artificial Sequence
  Synthetic
cgacaacgccctgagcaagggcttaagcggaattggtcgc

SEQ ID NO: 7581 - DNA, 38 bp, Artificial Sequence
  Synthetic
tcgtctttggcggcgtcggcgtgaaaacggttcggtaa

SEQ ID NO: 7582 - DNA, 36 bp, Artificial Sequence
  Synthetic
gcgaggtaggcggtcagcacgaacgcctgcacgaag

SEQ ID NO: 7583 - DNA, 37 bp, Artificial Sequence
  Synthetic
cgtcggtgttgacggcaatgccggcctcaaacgcctc

SEQ ID NO: 7584 - DNA, 36 bp, Artificial Sequence
  Synthetic
gccgccggcattgtcgatagcccttgtccgcatcag

SEQ ID NO: 7585 - DNA, 38 bp, Artificial Sequence
  Synthetic
cggaaggattgcaggcttttgggccgcacctgtccatg

SEQ ID NO: 7586 - DNA, 36 bp, Artificial Sequence
  Synthetic
tcaaacagagcccgacgtgggcggcagccaaaaccc

SEQ ID NO: 7587 - DNA, 36 bp, Artificial Sequence
  Synthetic
gcgtgaaggtcgccaaaggcccgccgttgtgcgaaa

SEQ ID NO: 7588 - DNA, 47 bp, Artificial Sequence
  Synthetic
cgttttcctgatgttccgtcttgataataaaaattctggcaaccatc

SEQ ID NO: 7589 - DNA, 37 bp, Artificial Sequence
  Synthetic
cgggctgtccgtccgtatcgaatcccgaacccgaccc

SEQ ID NO: 7590 - DNA, 37 bp, Artificial Sequence
  Synthetic
attcatcgcggcaggttgacggaacgacgccggcaac

SEQ ID NO: 7591 - DNA, 38 bp, Artificial Sequence
  Synthetic
caggcctcaacccatcctgcgttttcctggatggcggc

SEQ ID NO: 7592 - DNA, 38 bp, Artificial Sequence
  Synthetic
aagctccctgccgtggattttgactgacccgccgcttc

SEQ ID NO: 7593 - DNA, 38 bp, Artificial Sequence
  Synthetic
cggggacgcggatttcagacgcccttaccgcccatcaa

SEQ ID NO: 7594 - DNA, 39 bp, Artificial Sequence
  Synthetic
gttccgcgccgatgatgcgatcctcaactggtcgctcaa

SEQ ID NO: 7595 - DNA, 39 bp, Artificial Sequence
  Synthetic
tgatgttgacggcgcagtggcagcaccacaaaccagacc

SEQ ID NO: 7596 - DNA, 38 bp, Artificial Sequence
  Synthetic
gatgacgggcgcgacgtgtttggaaaaacaccgcccga

SEQ ID NO: 7597 - DNA, 38 bp, Artificial Sequence
  Synthetic
aaagacggcttcatgcgtgcgtcttccaaccctccgcc

SEQ ID NO: 7598 - DNA, 36 bp, Artificial Sequence
  Synthetic
gaagcccagtccgacgacgtaagctcgccgttgccg

SEQ ID NO: 7599 - DNA, 39 bp, Artificial Sequence
  Synthetic
cgtatggcgaggcggtcgacttgggctacctgcaccata

SEQ ID NO: 7600 - DNA, 38 bp, Artificial Sequence
  Synthetic
gcgaaattttgccgcctactgccatcttcgtcggcggc

SEQ ID NO: 7601 - DNA, 40 bp, Artificial Sequence
  Synthetic
gcctgcctgaaaggttcggacaccggtatggaaacactgc

SEQ ID NO: 7602 - DNA, 39 bp, Artificial Sequence
  Synthetic
gacgatgccgcgctgctgtatggttgccgagattgtcct

SEQ ID NO: 7603 - DNA, 36 bp, Artificial Sequence
  Synthetic
gtagccgcgtttgagggcgcaacaggcgcaaaacgg

SEQ ID NO: 7604 - DNA, 36 bp, Artificial Sequence
  Synthetic
tcgccttcggcatagggacactgcggcaagaccacc

SEQ ID NO: 7605 - DNA, 41 bp, Artificial Sequence
  Synthetic
cccgcgccggtaatcagaatcgttggaaaaaaccgtggacg

SEQ ID NO: 7606 - DNA, 41 bp, Artificial Sequence
  Synthetic
actttgccgagcatatagccgctgattttgggtctgccgac

SEQ ID NO: 7607 - DNA, 39 bp, Artificial Sequence
  Synthetic
cgcgaagggcagtacgtccgtcatgctgcccatcgtatt

SEQ ID NO: 7608 - DNA, 38 bp, Artificial Sequence
  Synthetic
atgccgtatcacgttccccctccgccgccaaagtcaga

SEQ ID NO: 7609 - DNA, 35 bp, Artificial Sequence
  Synthetic
gacgccgcctacgcactcaacggcattcacgcccg

SEQ ID NO: 7610 - DNA, 38 bp, Artificial Sequence
  Synthetic
acaccttggctcgttccaaaggcaataagacgggacat

SEQ ID NO: 7611 - DNA, 38 bp, Artificial Sequence
  Synthetic
atcaggtaggcaaacaccgccatgctgctggggcggta

SEQ ID NO: 7612 - DNA, 39 bp, Artificial Sequence
  Synthetic
ccaaggcgaggacggtgcaccccattttggagacaccct

SEQ ID NO: 7613 - DNA, 38 bp, Artificial Sequence
  Synthetic
cgtcatacaggcgcgggctgaacactggagcttcagcg

SEQ ID NO: 7614 - DNA, 37 bp, Artificial Sequence
  Synthetic
ttccgcgctgcaacacgctcatgcagtcggtcgtcag

SEQ ID NO: 7615 - DNA, 35 bp, Artificial Sequence
  Synthetic
ccgttaccggggttctgcgaccggctcgaaccagc

SEQ ID NO: 7616 - DNA, 39 bp, Artificial Sequence
  Synthetic
acctgaacgccttgtcctccaggtaaacacgacgcaggc

SEQ ID NO: 7617 - DNA, 35 bp, Artificial Sequence
  Synthetic
gttggcgggttggatgggcttccctctgaccggcc

SEQ ID NO: 7618 - DNA, 34 bp, Artificial Sequence
  Synthetic
gccgcatttcaaagcggcggcgcagtgccgaaca

SEQ ID NO: 7619 - DNA, 39 bp, Artificial Sequence
  Synthetic
cgaacctgccgatgccgtattgcatcggcaactcggcac

SEQ ID NO: 7620 - DNA, 35 bp, Artificial Sequence
  Synthetic
gtttgttggcggtaggcgcaagcggcatccgggac

SEQ ID NO: 7621 - DNA, 38 bp, Artificial Sequence
  Synthetic
cgcgcgttccgaacccaagatccgaaatacaccaccgc

SEQ ID NO: 7622 - DNA, 37 bp, Artificial Sequence
  Synthetic
gatgccggaaccgacaccgccgcatccgtttgaagcc

SEQ ID NO: 7623 - DNA, 40 bp, Artificial Sequence
  Synthetic
cgccttcaaaccccaagccggctttatacgggcagcatcg

SEQ ID NO: 7624 - DNA, 36 bp, Artificial Sequence
  Synthetic
gcgcggcgttcgtcttgtaccgaaccgatgaaaggc

SEQ ID NO: 7625 - DNA, 35 bp, Artificial Sequence
  Synthetic
gcggggaggccgtctgaattttgccgactgcgccg

SEQ ID NO: 7626 - DNA, 37 bp, Artificial Sequence
  Synthetic
cgctcttcaatcagcgtgcccgcgctacggcaaccct

SEQ ID NO: 7627 - DNA, 34 bp, Artificial Sequence
  Synthetic
ggcatgcgccgcattgtgtctgcggcggttttgc

SEQ ID NO: 7628 - DNA, 36 bp, Artificial Sequence
  Synthetic
tggcccggcgtgttttcccggcggtatagacggcag

SEQ ID NO: 7629 - DNA, 38 bp, Artificial Sequence
  Synthetic
cctgggctttgctgatgacgcgggtgcgtggcttttcg

SEQ ID NO: 7630 - DNA, 35 bp, Artificial Sequence
  Synthetic
ggcggccagcagcttgtctgctcaggcggaatggc

SEQ ID NO: 7631 - DNA, 35 bp, Artificial Sequence
  Synthetic
gttgcgcgcgtctgtggtgcaacgatgcctggagg

SEQ ID NO: 7632 - DNA, 42 bp, Artificial Sequence
  Synthetic
agtcatcgtcttcatcgtcgccttgccggtgctttgaatcag

SEQ ID NO: 7633 - DNA, 37 bp, Artificial Sequence
  Synthetic
ccagccgccgcctttcctttcggcgacaacctcttga

SEQ ID NO: 7634 - DNA, 35 bp, Artificial Sequence
  Synthetic
gccgtctgaacgcgaccgtcattcgaccagcgcgg

SEQ ID NO: 7635 - DNA, 41 bp, Artificial Sequence
  Synthetic
tcggtttgattcctaccggcgacaaaatacccaaggcggcg

SEQ ID NO: 7636 - DNA, 40 bp, Artificial Sequence
  Synthetic
cctgctgaaaaaagccgatgccttcgtcctgttgcagcag

SEQ ID NO: 7637 - DNA, 38 bp, Artificial Sequence
  Synthetic
gtcgccgtcagccattattgcccccaaacggtgcagtc

SEQ ID NO: 7638 - DNA, 39 bp, Artificial Sequence
  Synthetic
ttgccgcttctgatcgattgccagccgactgttcctgcc

SEQ ID NO: 7639 - DNA, 38 bp, Artificial Sequence
  Synthetic
taccgcgaacgcatgagggcccgaccgcttcatctgcg

SEQ ID NO: 7640 - DNA, 38 bp, Artificial Sequence
  Synthetic
agggcgcgggtcatatcggcggggcattaccgtcaact

SEQ ID NO: 7641 - DNA, 35 bp, Artificial Sequence
  Synthetic
ggcaatggcgacgcgttggcccatcggatcgaacg

SEQ ID NO: 7642 - DNA, 40 bp, Artificial Sequence
  Synthetic
ggcgaggaacatcgtctgcacaaatgtacgcccccatcaa

SEQ ID NO: 7643 - DNA, 38 bp, Artificial Sequence
  Synthetic
ggcgatgaaggcggcaagagccctgattgccattttcg

SEQ ID NO: 7644 - DNA, 36 bp, Artificial Sequence
  Synthetic
gcagccatggtgcgtccgaactcgcccggacaagtc

SEQ ID NO: 7645 - DNA, 41 bp, Artificial Sequence
  Synthetic
catgagttgtgccagttccgccgtccgccggaaattcgaca

SEQ ID NO: 7646 - DNA, 38 bp, Artificial Sequence
  Synthetic
tggagacaacatgtagcgcaccatatctcgcacacagc

SEQ ID NO: 7647 - DNA, 46 bp, Artificial Sequence
  Synthetic
gacagttggtgtcctaattgtaacaaatggcaaaagatgtagcaag

SEQ ID NO: 7648 - DNA, 46 bp, Artificial Sequence
  Synthetic
aaaggaggttattgtttgaggacactgaacattatggttttcagct

SEQ ID NO: 7649 - DNA, 48 bp, Artificial Sequence
  Synthetic
acagctgacgttaattagccacccccattgaatcattttagaaagttc

SEQ ID NO: 7650 - DNA, 45 bp, Artificial Sequence
  Synthetic
atcccttgcgaaatctaaatatgcagcaaattgatcagagcttgt

SEQ ID NO: 7651 - DNA, 44 bp, Artificial Sequence
  Synthetic
tttggagtgtgcattacaaaaatgacagacctcctagaagagct

SEQ ID NO: 7652 - DNA, 42 bp, Artificial Sequence
  Synthetic
aacctaaacttgggtcccctggtgtttcttcttgtgtaaccc

SEQ ID NO: 7653 - DNA, 42 bp, Artificial Sequence
  Synthetic
tattgcagtgattgatacaccaggacactgcgtctattgtgg

SEQ ID NO: 7654 - DNA, 43 bp, Artificial Sequence
  Synthetic
acaagacaggttttaaatgtcaccggtgtcaaaggcgggattt

SEQ ID NO: 7655 - DNA, 47 bp, Artificial Sequence
  Synthetic
accaccagcatttaatgtaaaagtgtctgttacaggatgatacacta

SEQ ID NO: 7656 - DNA, 44 bp, Artificial Sequence
  Synthetic
agtaggggttcaaattgatagaggtcgatccagtaaagggtgac

SEQ ID NO: 7657 - DNA, 43 bp, Artificial Sequence
  Synthetic
aaggagatagtttacctacagacccgaggagtaccatcagctg

SEQ ID NO: 7658 - DNA, 49 bp, Artificial Sequence
  Synthetic
acttgatgagtgggaattagcattttatctgtaagtatcttccaaaccc

SEQ ID NO: 7659 - DNA, 47 bp, Artificial Sequence
  Synthetic
gacctatgtgtaagtgaccaatagcaggaaacagaatgattcaacat

SEQ ID NO: 7660 - DNA, 50 bp, Artificial Sequence
  Synthetic
aaatcgaaacaaacaaatttgcagcgaaaatctgaatacatgaagcatac

SEQ ID NO: 7661 - DNA, 44 bp, Artificial Sequence
  Synthetic
cgagattggagtgacaaggagagtggatgtgtgtattctcagat

SEQ ID NO: 7662 - DNA, 39 bp, Artificial Sequence
  Synthetic
cggtccaaattcctgctgatgtattccctccccttcgtg

SEQ ID NO: 7663 - DNA, 43 bp, Artificial Sequence
  Synthetic
aaagtgggcacttggtgagaatgtctctacagttgtcaaagtc

SEQ ID NO: 7664 - DNA, 48 bp, Artificial Sequence
  Synthetic
aggaattacttcacagcagaggtatacccccttcattatatattctgt

SEQ ID NO: 7665 - DNA, 42 bp, Artificial Sequence
  Synthetic
gcatggagttttctctcactgacaggacacagtacttctccc

SEQ ID NO: 7666 - DNA, 43 bp, Artificial Sequence
  Synthetic
tgagaataaatcagaaacatggcccctgcagaccttcccaatg

SEQ ID NO: 7667 - DNA, 38 bp, Artificial Sequence
  Synthetic
agcgataggaggggatgctaggctagccccgctgctct

SEQ ID NO: 7668 - DNA, 37 bp, Artificial Sequence
  Synthetic
tgggatgctcctcccgattcctcccgccattcctggg

SEQ ID NO: 7669 - DNA, 38 bp, Artificial Sequence
  Synthetic
tccttcggatgcccaggtcgtttcctcttcgggtcggc

SEQ ID NO: 7670 - DNA, 36 bp, Artificial Sequence
  Synthetic
cgctcccctcgttccacctaagaatagccggcccgc

SEQ ID NO: 7671 - DNA, 39 bp, Artificial Sequence
  Synthetic
aaggcctcttcctaggtccggaaggatggagagggggct

SEQ ID NO: 7672 - DNA, 39 bp, Artificial Sequence
  Synthetic
agagaacgacccagaacgctacacactgtacctgcaaat

SEQ ID NO: 7673 - DNA, 42 bp, Artificial Sequence
  Synthetic
attggggccagaagaaaaacaaagccctgctatttcgtgaaa

SEQ ID NO: 7674 - DNA, 43 bp, Artificial Sequence
  Synthetic
ttggactatgaacaatttgacagcttcttgtccagcttgtctg

SEQ ID NO: 7675 - DNA, 43 bp, Artificial Sequence
  Synthetic
ggggtgtacagggtggttttcattgtctgtttcatcatctgat

SEQ ID NO: 7676 - DNA, 40 bp, Artificial Sequence
  Synthetic
actaggtagtcagaacagccctgtattctgctgactgtcg

SEQ ID NO: 7677 - DNA, 38 bp, Artificial Sequence
  Synthetic
ggaggacgcggacaaagaaatattttctcctggcacgc

SEQ ID NO: 7678 - DNA, 42 bp, Artificial Sequence
  Synthetic
acagaagcttggacaatgcgaacaatgtttaggttctgtcat

SEQ ID NO: 7679 - DNA, 39 bp, Artificial Sequence
  Synthetic
tggactttaaacaagaggcggaccacacacatgtacagc

SEQ ID NO: 7680 - DNA, 39 bp, Artificial Sequence
  Synthetic
ccactgtcaccacagctgccggcctccacttgtactgtg

SEQ ID NO: 7681 - DNA, 41 bp, Artificial Sequence
  Synthetic
acctacatttagtggtggcaatggatgtccaacacagcagg

SEQ ID NO: 7682 - DNA, 44 bp, Artificial Sequence
  Synthetic
cgcaaaggtactgtacgctatagttccactacgtgttttcatag

SEQ ID NO: 7683 - DNA, 47 bp, Artificial Sequence
  Synthetic
taccagttccaagatatgcctccgtaacattggtagtggaagtatta

SEQ ID NO: 7684 - DNA, 38 bp, Artificial Sequence
  Synthetic
tttcagatggctttgtggcgttgacaacccgagacaca

SEQ ID NO: 7685 - DNA, 39 bp, Artificial Sequence
  Synthetic
tggattgcctgatccacagtacttcaacaccaacacagg

SEQ ID NO: 7686 - DNA, 41 bp, Artificial Sequence
  Synthetic
gggattgcccccccttagaagtatcaatcatatcgccatcc

SEQ ID NO: 7687 - DNA, 38 bp, Artificial Sequence
  Synthetic
gggatgctatacccaccactagaagatgtagggggctc

SEQ ID NO: 7688 - DNA, 46 bp, Artificial Sequence
  Synthetic
acaactgtatgtaatgtaaaggcgtaacacataaccatgcatacat

SEQ ID NO: 7689 - DNA, 40 bp, Artificial Sequence
  Synthetic
ccaccttagtatgtaggcggcggggccatccaagtcaagc

SEQ ID NO: 7690 - DNA, 38 bp, Artificial Sequence
  Synthetic
ttgcgaggggatctgggagtgcgcaggtacaggacttg

SEQ ID NO: 7691 - DNA, 42 bp, Artificial Sequence
  Synthetic
tggagtcaactgggctactggtcaggccaaagatagcagaca

SEQ ID NO: 7692 - DNA, 40 bp, Artificial Sequence
  Synthetic
acacccttccaattggactggccacaggtcacaagagcgc

SEQ ID NO: 7693 - DNA, 43 bp, Artificial Sequence
  Synthetic
cgaggggatgtatggttaaattcaaatagtgcagtacgatggc

SEQ ID NO: 7694 - DNA, 39 bp, Artificial Sequence
  Synthetic
gtaccccacctgtggtacgtcctgtggctaggtctttca

SEQ ID NO: 7695 - DNA, 42 bp, Artificial Sequence
  Synthetic
tggagggctgacaataccaccttgagcaaagaagccaaaacg

SEQ ID NO: 7696 - DNA, 48 bp, Artificial Sequence
  Synthetic
gttagggcccatagaatgttggtcactaagaggaaaaacttaagaaca

SEQ ID NO: 7697 - DNA, 38 bp, Artificial Sequence
  Synthetic
cgccagatgggtgggccattgccacgttcagagagaca

SEQ ID NO: 7698 - DNA, 40 bp, Artificial Sequence
  Synthetic
gtcccttactcggtgctcttgcaccaatgaccccagtcgt

SEQ ID NO: 7699 - DNA, 43 bp, Artificial Sequence
  Synthetic
tcttacatgcaggagaagtatgaggtcgcgtgcatgtactttg

SEQ ID NO: 7700 - DNA, 48 bp, Artificial Sequence
  Synthetic
acatgccaacataactgagattcaatcttcagattttcctccttaatc

SEQ ID NO: 7701 - DNA, 38 bp, Artificial Sequence
  Synthetic
caacctgggttacctgcgatatgaaggttcggggttga

SEQ ID NO: 7702 - DNA, 43 bp, Artificial Sequence
  Synthetic
cctcatgcagctacaatccttgggattgtcaggtaaagtgact

SEQ ID NO: 7703 - DNA, 42 bp, Artificial Sequence
  Synthetic
gtctactccgcgttcaatccggccctgctgttgtcaaagcaa

SEQ ID NO: 7704 - DNA, 47 bp, Artificial Sequence
  Synthetic
ggactagtcttgtcgtcaattatggtgtgatctcccattttctcata

SEQ ID NO: 7705 - DNA, 40 bp, Artificial Sequence
  Synthetic
ccatgccgatgcccctgttgtgcacatccaattgcagtga

SEQ ID NO: 7706 - DNA, 39 bp, Artificial Sequence
  Synthetic
caactcgggccatcactagtgttctaagctccgcatccc

SEQ ID NO: 7707 - DNA, 41 bp, Artificial Sequence
  Synthetic
ttgcagaagtgtgtcgaggcaagacctcctcctttggaact

SEQ ID NO: 7708 - DNA, 42 bp, Artificial Sequence
  Synthetic
aactcagtgaccaacaccgagcgtcctccagcgtataactgc

SEQ ID NO: 7709 - DNA, 41 bp, Artificial Sequence
  Synthetic
tgcagacaaacaagcaatgcgttcttgtggtgcacccatca

SEQ ID NO: 7710 - DNA, 41 bp, Artificial Sequence
  Synthetic
gcatcattgctggtgtgcacggatctcagcgttggtgtagc

SEQ ID NO: 7711 - DNA, 43 bp, Artificial Sequence
  Synthetic
attgtgatgtttactccccggaacttctgcaatcttctctgtg

SEQ ID NO: 7712 - DNA, 40 bp, Artificial Sequence
  Synthetic
tggtctgaaggggatgacgtcctcctcacccacccgagac

SEQ ID NO: 7713 - DNA, 46 bp, Artificial Sequence
  Synthetic
gaattcaactcccccccaaacgatacactatctctgttatgtttct

SEQ ID NO: 7714 - DNA, 39 bp, Artificial Sequence
  Synthetic
tggggacatctgggtgacaaccaagggcaaattggtaac

SEQ ID NO: 7715 - DNA, 43 bp, Artificial Sequence
  Synthetic
aacgggggatgataaaaatgcaaatactatctacaagcctccc

SEQ ID NO: 7716 - DNA, 42 bp, Artificial Sequence
  Synthetic
atcctggtgtcagatgtgtcttgtttatatctacgatgggcc

SEQ ID NO: 7717 - DNA, 42 bp, Artificial Sequence
  Synthetic
aatgacgtgtggatgggaagatcaatgactttgaaggtttca

SEQ ID NO: 7718 - DNA, 38 bp, Artificial Sequence
  Synthetic
agaagtcagtggcgaggttttgatatcaggttgtgccc

SEQ ID NO: 7719 - DNA, 40 bp, Artificial Sequence
  Synthetic
ggacagctttcctttgtgtgcttagttaggtctgccatgg

SEQ ID NO: 7720 - DNA, 43 bp, Artificial Sequence
  Synthetic
ggaattccctggcgttttacagctctgatattgctttattgca

SEQ ID NO: 7721 - DNA, 49 bp, Artificial Sequence
  Synthetic
agctgatactcagataagtgtaccccacagcttttctattactacatct

SEQ ID NO: 7722 - DNA, 48 bp, Artificial Sequence
  Synthetic
ttgcttgttggcaatatatggatgtcaatagatacagcattaccatct

SEQ ID NO: 7723 - DNA, 40 bp, Artificial Sequence
  Synthetic
gaagcgtcgacgagctgcagcctgatggggctgatgatga

SEQ ID NO: 7724 - DNA, 47 bp, Artificial Sequence
  Synthetic
ctcttggaagagttcagcgactgaccttttaaaattaggatgaatgg

SEQ ID NO: 7725 - DNA, 38 bp, Artificial Sequence
  Synthetic
ccggaaggtgcaccaacaaatgggccttgtaactgatg

SEQ ID NO: 7726 - DNA, 50 bp, Artificial Sequence
  Synthetic
ttcaactacagaaacctcagtttgcttccaagtctactaaatctgactaa

SEQ ID NO: 7727 - DNA, 41 bp, Artificial Sequence
  Synthetic
atcctccagaacaaacagacgatctgaacctgtttgggatc

SEQ ID NO: 7728 - DNA, 43 bp, Artificial Sequence
  Synthetic
tggcctgatcttataaaaatggagctgctcccgttttgtgaaa

SEQ ID NO: 7729 - DNA, 40 bp, Artificial Sequence
  Synthetic
acaacatgtgcagacaaactgaagccagtaacaaaagcgg

SEQ ID NO: 7730 - DNA, 43 bp, Artificial Sequence
  Synthetic
aaatggaacgtgttaccctggaactaaaaagtgtcctgagttc

SEQ ID NO: 7731 - DNA, 45 bp, Artificial Sequence
  Synthetic
tgtggggcatacatcacccagtgtcgtttcttatgtacaaatttg

SEQ ID NO: 7732 - DNA, 41 bp, Artificial Sequence
  Synthetic
ggagggagccatggaagaatattgcactacacaattaccac

SEQ ID NO: 7733 - DNA, 46 bp, Artificial Sequence
  Synthetic
tggtttccagcattcaaatgatcaagccttttgagttgaatcccta

SEQ ID NO: 7734 - DNA, 43 bp, Artificial Sequence
  Synthetic
ctatataacaaggtgaagagggcacctcgaaacagcctttccc

SEQ ID NO: 7735 - DNA, 39 bp, Artificial Sequence
  Synthetic
aaacccgctcaatgcccggcactactcggctagcagtct

SEQ ID NO: 7736 - DNA, 36 bp, Artificial Sequence
  Synthetic
gcaggggccctaaattgggttccacggggttgcgac

SEQ ID NO: 7737 - DNA, 36 bp, Artificial Sequence
  Synthetic
cgagcttcggagcagtcacgaaggcagcccctcctg

SEQ ID NO: 7738 - DNA, 39 bp, Artificial Sequence
  Synthetic
gggcggtactgttggtcaaggtacgaactgcaactgccg

SEQ ID NO: 7739 - DNA, 40 bp, Artificial Sequence
  Synthetic
gatgacaagccgtattgctggcactggaccgcagacatcc

SEQ ID NO: 7740 - DNA, 39 bp, Artificial Sequence
  Synthetic
ggccaacaggcaacaacagcacccacatctggtgtaggt

SEQ ID NO: 7741 - DNA, 40 bp, Artificial Sequence
  Synthetic
cttcacacctacgcccgctcgccgtagaggtattgggtgt

SEQ ID NO: 7742 - DNA, 42 bp, Artificial Sequence
  Synthetic
gcttggcttggcatgtcaagggacggactaagagtagtggcc

SEQ ID NO: 7743 - DNA, 42 bp, Artificial Sequence
  Synthetic
cgtgacgctgtcatcatgctcacccagtatcccgaagaggat

SEQ ID NO: 7744 - DNA, 42 bp, Artificial Sequence
  Synthetic
ggagacgaaggtcatcacgtgggctgataccggaagaacagc

SEQ ID NO: 7745 - DNA, 42 bp, Artificial Sequence
  Synthetic
cggttctaagacccttgctggccccaccaggtctttgtctac

SEQ ID NO: 7746 - DNA, 38 bp, Artificial Sequence
  Synthetic
gtgtgcacgcggggtgttgtggtctccaggttttcgac

SEQ ID NO: 7747 - DNA, 39 bp, Artificial Sequence
  Synthetic
taggactgtcaccaccggagccgtcggcgaagaacttgc

SEQ ID NO: 7748 - DNA, 38 bp, Artificial Sequence
  Synthetic
agaggtctagacgtcgccgtgtcatgagcgcgtcagtg

SEQ ID NO: 7749 - DNA, 42 bp, Artificial Sequence
  Synthetic
accggtatgtttcgtctggggaactcacagagcaccacagag

SEQ ID NO: 7750 - DNA, 38 bp, Artificial Sequence
  Synthetic
gctgggggccgttcagaatggtctgcggacatgcaagc

SEQ ID NO: 7751 - DNA, 35 bp, Artificial Sequence
  Synthetic
tctaggagggtgggtggccaacgacgaacgcggtg

SEQ ID NO: 7752 - DNA, 39 bp, Artificial Sequence
  Synthetic
caggcgagggggctgtacagtatgattgccccgggaagc

SEQ ID NO: 7753 - DNA, 40 bp, Artificial Sequence
  Synthetic
catgccagaaggggtacaagggcagatatcgtcgctccgc

SEQ ID NO: 7754 - DNA, 40 bp, Artificial Sequence
  Synthetic
gaggattcaccgcttcgcgcccacggagaaagtaacctcc

SEQ ID NO: 7755 - DNA, 40 bp, Artificial Sequence
  Synthetic
acaaggccaccacccagatgcatgcactgtctccatagca

SEQ ID NO: 7756 - DNA, 40 bp, Artificial Sequence
  Synthetic
ttccgcggaggaaaaggaagcccggccatgacttgggaca

SEQ ID NO: 7757 - DNA, 41 bp, Artificial Sequence
  Synthetic
gctcatcaccccttgctctgctggcgtaataaggtgttgct

SEQ ID NO: 7758 - DNA, 42 bp, Artificial Sequence
  Synthetic
tcgctctctcgacaagaaagcctcggcaatggggtatcagag

SEQ ID NO: 7759 - DNA, 40 bp, Artificial Sequence
  Synthetic
gagagccaggggacacacgaggagtacctggtcatagcct

SEQ ID NO: 7760 - DNA, 42 bp, Artificial Sequence
  Synthetic
ctacagagccaggaacagctggagatccagcggagtaacaga

SEQ ID NO: 7761 - DNA, 40 bp, Artificial Sequence
  Synthetic
actgggcggtgaagacaaaacgggacaagtccagccggtc

SEQ ID NO: 7762 - DNA, 41 bp, Artificial Sequence
  Synthetic
cgagtaactcgtccctcttctgtgatgatcgactgcaacac

SEQ ID NO: 7763 - DNA, 39 bp, Artificial Sequence
  Synthetic
gcgtactgccccagcttgaaggccgtgattggtgcttaa

SEQ ID NO: 7764 - DNA, 44 bp, Artificial Sequence
  Synthetic
gtgttgaaaagaaaaagactgaggggagatgcaacagggtacac

SEQ ID NO: 7765 - DNA, 44 bp, Artificial Sequence
  Synthetic
ccatactggcattactggtgacacgactcagtatctcaaggaga

SEQ ID NO: 7766 - DNA, 39 bp, Artificial Sequence
  Synthetic
ccactgtgtggttttccctcatttgctgcatcaagtgtg

SEQ ID NO: 7767 - DNA, 44 bp, Artificial Sequence
  Synthetic
tgtacaacagacttctcagtggttaggcctgagtttttcaacag

SEQ ID NO: 7768 - DNA, 40 bp, Artificial Sequence
  Synthetic
gaagtcttcatcgctcaaagcagagtagttgcagctgctc

SEQ ID NO: 7769 - DNA, 45 bp, Artificial Sequence
  Synthetic
tactggctacaaacaatgtctttcgtcttctccaaaggttacacc

SEQ ID NO: 7770 - DNA, 43 bp, Artificial Sequence
  Synthetic
tgatgaaacctgtgaacatgagtaccaccaaattccagaggga

SEQ ID NO: 7771 - DNA, 39 bp, Artificial Sequence
  Synthetic
gaaacatggtggtggtgtagcccttttgcatggcaccat

SEQ ID NO: 7772 - DNA, 39 bp, Artificial Sequence
  Synthetic
gtgcagacggttcgtacacaccatgacaacctgctcata

SEQ ID NO: 7773 - DNA, 44 bp, Artificial Sequence
  Synthetic
ctagtggtgatatcacttgtgttgtgagagcatctcagtagtgc

SEQ ID NO: 7774 - DNA, 41 bp, Artificial Sequence
  Synthetic
cataatggcaaccatccaacgttagtcaacgatgccctctt

SEQ ID NO: 7775 - DNA, 45 bp, Artificial Sequence
  Synthetic
aagacatctgaggagcactttgtctgaataggaccaatctctgta

SEQ ID NO: 7776 - DNA, 44 bp, Artificial Sequence
  Synthetic
cttgatgagagttttcttggtaggtaccaccaacttgaggaaat

SEQ ID NO: 7777 - DNA, 42 bp, Artificial Sequence
  Synthetic
ttaacgggtgtagaagctgtgacacacacatggaatggaaac

SEQ ID NO: 7778 - DNA, 47 bp, Artificial Sequence
  Synthetic
aaggaaacatcttacactacaaccaattttggttcaatctctgtgta

SEQ ID NO: 7779 - DNA, 46 bp, Artificial Sequence
  Synthetic
agacactattcagcgagtttcaagaggttaatgtgccaaacaattg

SEQ ID NO: 7780 - DNA, 47 bp, Artificial Sequence
  Synthetic
aacacaagagttaggtcatgaggatcttaatggtaatgcttgtgttt

SEQ ID NO: 7781 - DNA, 44 bp, Artificial Sequence
  Synthetic
tgcagcatttgtttaagtggattaggaaatcgtcacctgaatgg

SEQ ID NO: 7782 - DNA, 44 bp, Artificial Sequence
  Synthetic
tggaagagctatgttcatatcatggttgcgcttatagcacatca

SEQ ID NO: 7783 - DNA, 43 bp, Artificial Sequence
  Synthetic
agtgttgctgtgaaaaatggcgggatgtctctcataggtcttt

SEQ ID NO: 7784 - DNA, 42 bp, Artificial Sequence
  Synthetic
tacagctcacagcgagttagcacacgaatgtagaaaggacac

SEQ ID NO: 7785 - DNA, 43 bp, Artificial Sequence
  Synthetic
aattcgtagtgctgccaagaagtgtctagttgtagcacaagtt

SEQ ID NO: 7786 - DNA, 40 bp, Artificial Sequence
  Synthetic
tttagccagcgtggtggttctgatagcagctactacaggg

SEQ ID NO: 7787 - DNA, 42 bp, Artificial Sequence
  Synthetic
cactcgttatgtgcttatggatggctaacagaaccctccagg

SEQ ID NO: 7788 - DNA, 43 bp, Artificial Sequence
  Synthetic
tattgccatattggtgacttgtgcactcaccaaaaacacgtct

SEQ ID NO: 7789 - DNA, 45 bp, Artificial Sequence
  Synthetic
agacactgttgccacttacacaccactgaaatacttgtacttgtt

SEQ ID NO: 7790 - DNA, 42 bp, Artificial Sequence
  Synthetic
aggaaaatggcattcccgtcagttccacaggttacttgtacc

SEQ ID NO: 7791 - DNA, 44 bp, Artificial Sequence
  Synthetic
atccaacctggtcaaacattttcacactgataaacaccagatgg

SEQ ID NO: 7792 - DNA, 43 bp, Artificial Sequence
  Synthetic
tgacatattgggacctctttctgcctttcaaagcagcacacat

SEQ ID NO: 7793 - DNA, 41 bp, Artificial Sequence
  Synthetic
gtttacgagaatgctttcttgcccaagcagcatagcacatg

SEQ ID NO: 7794 - DNA, 43 bp, Artificial Sequence
  Synthetic
gctagagctatagtgtttgtgtgtctgtaaggtgttgccagta

SEQ ID NO: 7795 - DNA, 44 bp, Artificial Sequence
  Synthetic
aaaccatgtatcaaggttgctactgtaccacagatgtgcacttt

SEQ ID NO: 7796 - DNA, 40 bp, Artificial Sequence
  Synthetic
gcgaggaaatgctcgataaccaagcggcatatgatggtaa

SEQ ID NO: 7797 - DNA, 45 bp, Artificial Sequence
  Synthetic
acaatgctcttcactatgcttaggcgcattgttgataatgttgtt

SEQ ID NO: 7798 - DNA, 43 bp, Artificial Sequence
  Synthetic
cggctggtaccacacaaacagaattgttatagtaggcaagtgc

SEQ ID NO: 7799 - DNA, 47 bp, Artificial Sequence
  Synthetic
ttcaactgtgctttccttctgtgtaggtaatccttatatgctttagc

SEQ ID NO: 7800 - DNA, 40 bp, Artificial Sequence
  Synthetic
agaaacacagtctgtaccgtctgactgcatcaagggttcg

SEQ ID NO: 7801 - DNA, 46 bp, Artificial Sequence
  Synthetic
cgtcagcgtctaactaaatacacattaccctcatcaaaatgacgta

SEQ ID NO: 7802 - DNA, 43 bp, Artificial Sequence
  Synthetic
aatcaggatcttaatgggaactggtcaataggaactccgcagc

SEQ ID NO: 7803 - DNA, 44 bp, Artificial Sequence
  Synthetic
tctactgtgtttccacctacaagtcaacaaaaggaacaccatct

SEQ ID NO: 7804 - DNA, 48 bp, Artificial Sequence
  Synthetic
agacttttatgactttgctgtgtctgaagtgttttagttcaacagaac

SEQ ID NO: 7805 - DNA, 41 bp, Artificial Sequence
  Synthetic
ttgaagtcaatagccgccactccgtaaaacttgcttgttcc

SEQ ID NO: 7806 - DNA, 42 bp, Artificial Sequence
  Synthetic
agtgtgcgcaagtattaagtgagatgatgttccacctggttt

SEQ ID NO: 7807 - DNA, 47 bp, Artificial Sequence
  Synthetic
tgtgtgctataacagtaactatgcgactgccttaaagttcttaatgc

SEQ ID NO: 7808 - DNA, 47 bp, Artificial Sequence
  Synthetic
acatgatgagcttactggccacgtgttatcattagttagcattacgg

SEQ ID NO: 7809 - DNA, 43 bp, Artificial Sequence
  Synthetic
aatgccccaggttgtgatgtgcaataatagctcatacctccta

SEQ ID NO: 7810 - DNA, 39 bp, Artificial Sequence
  Synthetic
tggtattgccactgtacgcgaacctcccatgaaagatgc

SEQ ID NO: 7811 - DNA, 43 bp, Artificial Sequence
  Synthetic
atgttgcaaattatcaaaaggtcggcttaccagtaccaggtgg

SEQ ID NO: 7812 - DNA, 41 bp, Artificial Sequence
  Synthetic
agacttcgtgcaaaacactacgcctttagtcagcaatgtgc

SEQ ID NO: 7813 - DNA, 49 bp, Artificial Sequence
  Synthetic
acagacctcaaataggcgttgtaaggagataaaaacagcttttctccaa

SEQ ID NO: 7814 - DNA, 46 bp, Artificial Sequence
  Synthetic
atgtggctacattacaagcagaaatgaagaccagtaatgatcttac

SEQ ID NO: 7815 - DNA, 41 bp, Artificial Sequence
  Synthetic
tagagggctgtcatgcaactcctgtagaaaatcctagctgg

SEQ ID NO: 7816 - DNA, 46 bp, Artificial Sequence
  Synthetic
tgaagtactttgtcaagattggacctgaagtagaaaagcaagttgc

SEQ ID NO: 7817 - DNA, 44 bp, Artificial Sequence
  Synthetic
ttgctgataagtttccagttcttcaattctacttcagcctgagg

SEQ ID NO: 7818 - DNA, 45 bp, Artificial Sequence
  Synthetic
atgtgaataagcatgcattccacagtaaaagaaaggcaattgctt

SEQ ID NO: 7819 - DNA, 43 bp, Artificial Sequence
  Synthetic
aaaggacactttgatggacacgacctttgtgtaaacagcatta

SEQ ID NO: 7820 - DNA, 46 bp, Artificial Sequence
  Synthetic
ttgatggtagagtggaaggacagtgttattaaaacaccattacggg

SEQ ID NO: 7821 - DNA, 41 bp, Artificial Sequence
  Synthetic
gctatgccttcgaacacatcgtaatgaagaccgccaagttg

SEQ ID NO: 7822 - DNA, 43 bp, Artificial Sequence
  Synthetic
gtaaggatggacatgttgaaaccttgttaggcatcgcaacacc

SEQ ID NO: 7823 - DNA, 43 bp, Artificial Sequence
  Synthetic
ctgtgcaacagtacatacggcctagggtcatacatatcgctaa

SEQ ID NO: 7824 - DNA, 45 bp, Artificial Sequence
  Synthetic
tggctataccatgcatgctaactggaagacaactggataggattt

SEQ ID NO: 7825 - DNA, 50 bp, Artificial Sequence
  Synthetic
tgcactttcgagtacatatctgatgctcgtaagtgtttaaaattacctga

SEQ ID NO: 7826 - DNA, 43 bp, Artificial Sequence
  Synthetic
aaatggtacaatcacagatgctgtcagagcatttgagttcagc

SEQ ID NO: 7827 - DNA, 45 bp, Artificial Sequence
  Synthetic
atgcagattcttttgtagtcaaggggcaataacaccagtttgtcc

SEQ ID NO: 7828 - DNA, 46 bp, Artificial Sequence
  Synthetic
tatggtttttacaccactactggcaccggtgcatttaaaagttcaa

SEQ ID NO: 7829 - DNA, 45 bp, Artificial Sequence
  Synthetic
tcaagatgttaactgcactgatgtcagtagaatatatgcgccaag

SEQ ID NO: 7830 - DNA, 44 bp, Artificial Sequence
  Synthetic
acagaagtaatgcctgtttctatgggtagaatctccgcagatgt

SEQ ID NO: 7831 - DNA, 43 bp, Artificial Sequence
  Synthetic
taatgctagagatctcatttgtgcgatcagtgagcagaggtgg

SEQ ID NO: 7832 - DNA, 43 bp, Artificial Sequence
  Synthetic
gcaagctgcaagacgttgttgctaagttgtttaacaagtgtgt

SEQ ID NO: 7833 - DNA, 41 bp, Artificial Sequence
  Synthetic
acatgtcacgtatgtgccatccgagggaagtatgctttgcc

SEQ ID NO: 7834 - DNA, 45 bp, Artificial Sequence
  Synthetic
catcaccagatgttgatcttggcttttgaatgttgacgacagaag

SEQ ID NO: 7835 - DNA, 43 bp, Artificial Sequence
  Synthetic
gtggttcttgctgcaagtttgtaatttgacacccttgagaact

SEQ ID NO: 7836 - DNA, 43 bp, Artificial Sequence
  Synthetic
attcacatcttttgcttgtcgctatcaaggcatagaggtacaa

SEQ ID NO: 7837 - DNA, 45 bp, Artificial Sequence
  Synthetic
cgaagtttactaccagcttgagttgtagcattttcaataccagtg

SEQ ID NO: 7838 - DNA, 44 bp, Artificial Sequence
  Synthetic
agtcacactagccatccttactgcacgttaacaatattgcagca

SEQ ID NO: 7839 - DNA, 45 bp, Artificial Sequence
  Synthetic
taaagcttgttttcctctggctcattaattctgtagacagcagca

SEQ ID NO: 7840 - DNA, 42 bp, Artificial Sequence
  Synthetic
actgtggctacatcacgaacgcgcaaaacctgaatcagtgcc

SEQ ID NO: 7841 - DNA, 40 bp, Artificial Sequence
  Synthetic
agtgtgttagaggtacgactgtttgccctcgtatgttcct

SEQ ID NO: 7842 - DNA, 44 bp, Artificial Sequence
  Synthetic
gcttgaagatccttgtaaggtacaacctttcctagagcacaaag

SEQ ID NO: 7843 - DNA, 39 bp, Artificial Sequence
  Synthetic
agcgccgaccccaaggtttactccttgccatgctgagtg

SEQ ID NO: 7844 - DNA, 40 bp, Artificial Sequence
  Synthetic
acaatgctgccaccgtgctatctgcgtagaagccttttgg

SEQ ID NO: 7845 - DNA, 41 bp, Artificial Sequence
  Synthetic
gctgaggcatctaaaaagccttgagtgacgttgtactgttt

SEQ ID NO: 7846 - DNA, 46 bp, Artificial Sequence
  Synthetic
aagcacattgacgcatacaaaaccagtctttttctttttgtccttt

SEQ ID NO: 7847 - DNA, 43 bp, Artificial Sequence
  Synthetic
tcaatgtgtaacattagggaggacttaccctcgatcgtactcc

SEQ ID NO: 7848 - DNA, 43 bp, Artificial Sequence
  Synthetic
accaataggtgacaatcatccagacatatcctcattgaccggg

SEQ ID NO: 7849 - DNA, 42 bp, Artificial Sequence
  Synthetic
ttgacaaggtgtgaagagccgcaaggttagccacattcaggg

SEQ ID NO: 7850 - DNA, 46 bp, Artificial Sequence
  Synthetic
gttgggacacactccacacaaagctgcgtctttaaaataattgatg

SEQ ID NO: 7851 - DNA, 44 bp, Artificial Sequence
  Synthetic
cagacagactaatacagataacccgacaccataagcaacaactg

SEQ ID NO: 7852 - DNA, 48 bp, Artificial Sequence
  Synthetic
ttaccattttctagggagatctggactgatgaaacttgctagaattac

SEQ ID NO: 7853 - DNA, 49 bp, Artificial Sequence
  Synthetic
ggtaacttacctatttatccccaccgtaaaataagggtagctgaattgt

SEQ ID NO: 7854 - DNA, 43 bp, Artificial Sequence
  Synthetic
taccagttatgttaacacctggatcaaacgctgatggggattg

SEQ ID NO: 7855 - DNA, 43 bp, Artificial Sequence
  Synthetic
ttagccactactctcataggagaacaaagcgcagactaccagt

SEQ ID NO: 7856 - DNA, 42 bp, Artificial Sequence
  Synthetic
agtccaccgcctcactagttggtgtagtgaatctaaaatggc

SEQ ID NO: 7857 - DNA, 42 bp, Artificial Sequence
  Synthetic
ttaaatgaagttcttgtggtgccatttccgcagcatccaatg

SEQ ID NO: 7858 - DNA, 43 bp, Artificial Sequence
  Synthetic
aaatgcatctgtgttctggcagctcataaaagggattgtgaat

SEQ ID NO: 7859 - DNA, 41 bp, Artificial Sequence
  Synthetic
ttgcctatcaacacacacactcaatctgagttgtggcctca

SEQ ID NO: 7860 - DNA, 46 bp, Artificial Sequence
  Synthetic
tccctaattgtgattgcactgaatgccaatcatgtgcagtaactct

SEQ ID NO: 7861 - DNA, 41 bp, Artificial Sequence
  Synthetic
ctgaggagcaagggttatctgacgaagcctacaccaaagac

SEQ ID NO: 7862 - DNA, 45 bp, Artificial Sequence
  Synthetic
ggctccagcttagctatgtacatcacgcttcagtaaatttcttga

SEQ ID NO: 7863 - DNA, 46 bp, Artificial Sequence
  Synthetic
ttgatgggtatgatcaacagagtgtcttcaccactaggattttgca

SEQ ID NO: 7864 - DNA, 45 bp, Artificial Sequence
  Synthetic
ttaccagcaatggcaagaaggttttgccatctaaaagatactctt

SEQ ID NO: 7865 - DNA, 41 bp, Artificial Sequence
  Synthetic
gggaacctaaacccaaaagcagacaaactcttcctctgggc

SEQ ID NO: 7866 - DNA, 46 bp, Artificial Sequence
  Synthetic
ccatgagggtgttaagctagagatctgatgtctttaaacttctcat

SEQ ID NO: 7867 - DNA, 46 bp, Artificial Sequence
  Synthetic
ttcttggtatacatgttggtggcaaataagatttgagaagcattgc

SEQ ID NO: 7868 - DNA, 41 bp, Artificial Sequence
  Synthetic
tggttcagcagtagggtgtgattctccatctagcatgagag

SEQ ID NO: 7869 - DNA, 42 bp, Artificial Sequence
  Synthetic
cgccactctttccttatacaccggtttttggtccatctgatg

SEQ ID NO: 7870 - DNA, 39 bp, Artificial Sequence
  Synthetic
tctgccattcgcattttgcacacccagaacaaagcaaat

SEQ ID NO: 7871 - DNA, 45 bp, Artificial Sequence
  Synthetic
agactctctaaattcaaatgtggcgaaaatggaaagcacttctgc

SEQ ID NO: 7872 - DNA, 47 bp, Artificial Sequence
  Synthetic
gtatgcaacaaatcatattgccacctgtttgctcagatttaacatct

SEQ ID NO: 7873 - DNA, 49 bp, Artificial Sequence
  Synthetic
actgggatgcagttagaaaagaaagcaaacctaaattagaatatccttc

SEQ ID NO: 7874 - DNA, 41 bp, Artificial Sequence
  Synthetic
ctagctcctcacggacttttttctatgtggtgttcgaggtg

SEQ ID NO: 7875 - DNA, 45 bp, Artificial Sequence
  Synthetic
aaacagaaacatcaaaggtgctagttgggtaaagtcacagtttct

SEQ ID NO: 7876 - DNA, 42 bp, Artificial Sequence
  Synthetic
gttccattagttgaaggtacccctttctccccctactcctgg

SEQ ID NO: 7877 - DNA, 42 bp, Artificial Sequence
  Synthetic
cctgaatttttggtacagccttcctacatctgggtcaaaggc

SEQ ID NO: 7878 - DNA, 50 bp, Artificial Sequence
  Synthetic
tgtaggtgatggactttttgtagcactcaactggtaaattatttggtagt

SEQ ID NO: 7879 - DNA, 43 bp, Artificial Sequence
  Synthetic
tggtctggagattaatagggctgcctgtagaaccaacacctaa

SEQ ID NO: 7880 - DNA, 48 bp, Artificial Sequence
  Synthetic
ttactcatgcaggaactataggtgagtctctagtatcatccacctttc

SEQ ID NO: 7881 - DNA, 41 bp, Artificial Sequence
  Synthetic
agttggcttttattcctcctgcggcacatagttgccaaaga

SEQ ID NO: 7882 - DNA, 43 bp, Artificial Sequence
  Synthetic
cccatggggttggtataaatacagagttgtccagatgtccagc

SEQ ID NO: 7883 - DNA, 42 bp, Artificial Sequence
  Synthetic
aatttgctggcttcagaagagtcgatttgttggctcctcctc

SEQ ID NO: 7884 - DNA, 46 bp, Artificial Sequence
  Synthetic
attgtggaagaagcagattgtgttgctttgttcaaataagtcatct

SEQ ID NO: 7885 - DNA, 41 bp, Artificial Sequence
  Synthetic
ggcagcagtacacatttctcctcaattccactgtcctgaaa

SEQ ID NO: 7886 - DNA, 48 bp, Artificial Sequence
  Synthetic
tcctagcactttatgaaaaaggagcctttctacttagttcccaatgtt

SEQ ID NO: 7887 - DNA, 40 bp, Artificial Sequence
  Synthetic
agaagtccttctccgctgaaacggtgaggattctctatgc

SEQ ID NO: 7888 - DNA, 40 bp, Artificial Sequence
  Synthetic
gcccactgcaccaactcctgattgtgcgacggaactgatc

SEQ ID NO: 7889 - DNA, 40 bp, Artificial Sequence
  Synthetic
tccctcagttgtgcctttgctccagtgtctgtaatgggaa

SEQ ID NO: 7890 - DNA, 44 bp, Artificial Sequence
  Synthetic
cccagacttcattagacagccttaatgtatatgtcacgtcatcg

SEQ ID NO: 7891 - DNA, 39 bp, Artificial Sequence
  Synthetic
tggtacaatttgcgcgggaacaggctgtaaatacgaccg

SEQ ID NO: 7892 - DNA, 48 bp, Artificial Sequence
  Synthetic
gctgaaaaattacactgttggttcggttttttatccattccaaagcag

SEQ ID NO: 7893 - DNA, 45 bp, Artificial Sequence
  Synthetic
tgaagcatttgaaatagcagaaggctcagggtttaggtacatgac

SEQ ID NO: 7894 - DNA, 43 bp, Artificial Sequence
  Synthetic
tgaatggaatgggaaagggagacaatgttgttttgcagctctt

SEQ ID NO: 7895 - DNA, 39 bp, Artificial Sequence
  Synthetic
gtggagaacgccagaatgctccaattccaccaaccattc

SEQ ID NO: 7896 - DNA, 40 bp, Artificial Sequence
  Synthetic
gatcaggagaatttggcgtcaaatgtgagtgagaccagca

SEQ ID NO: 7897 - DNA, 39 bp, Artificial Sequence
  Synthetic
tcctgagaggatcagtggccccatatccactggccacgg

SEQ ID NO: 7898 - DNA, 45 bp, Artificial Sequence
  Synthetic
cccaaggggacaactatctactagccattgtttccatgttctcat

SEQ ID NO: 7899 - DNA, 48 bp, Artificial Sequence
  Synthetic
ctgctggttttgaagtttataacgccaatcattaggtcttcttcgaaa

SEQ ID NO: 7900 - DNA, 45 bp, Artificial Sequence
  Synthetic
cctgggcttggaaaaacccagcatttggattttctaatagtacag

SEQ ID NO: 7901 - DNA, 45 bp, Artificial Sequence
  Synthetic
aatgacagttattcccatcgaagaaatttctttgacggtaacacc

SEQ ID NO: 7902 - DNA, 44 bp, Artificial Sequence
  Synthetic
ggaaattatcccgatacagaccgtattgaaaacaacctccgtct

SEQ ID NO: 7903 - DNA, 45 bp, Artificial Sequence
  Synthetic
cagtgtactaactgtcagcatgtgagactttcatggttgcagtac

SEQ ID NO: 7904 - DNA, 46 bp, Artificial Sequence
  Synthetic
tgatcccaatgttggtatggtagaaggtgtaatcaattctgtcaat

SEQ ID NO: 7905 - DNA, 46 bp, Artificial Sequence
  Synthetic
ttaaacctgttttggaagatgggaacctttaacaacttttgcttca

SEQ ID NO: 7906 - DNA, 47 bp, Artificial Sequence
  Synthetic
tcaggcgttgataaattaaccagagtgctgtaaaataggttccaagg

SEQ ID NO: 7907 - DNA, 48 bp, Artificial Sequence
  Synthetic
tcaagaaccttgacgttacctttacataaaagtacttcctatctgtgc

SEQ ID NO: 7908 - DNA, 42 bp, Artificial Sequence
  Synthetic
ccatgtgatgggccaattcactctgtcaagagttaacgaaat

SEQ ID NO: 7909 - DNA, 46 bp, Artificial Sequence
  Synthetic
atggttccttattcaaagatggggtcgtaaaatggaaactgaagca

SEQ ID NO: 7910 - DNA, 45 bp, Artificial Sequence
  Synthetic
atcaattaggagatgccacaacaagtttgagaggtaagataaggc

SEQ ID NO: 7911 - DNA, 41 bp, Artificial Sequence
  Synthetic
tgagagaggctagaacaacttccgacggtttagtggaggtc

SEQ ID NO: 7912 - DNA, 50 bp, Artificial Sequence
  Synthetic
aaggcagagttgatctcttaggagagattttattaacacccactacacta

SEQ ID NO: 7913 - DNA, 39 bp, Artificial Sequence
  Synthetic
tcatgtgatgcgataaccaccgggcgtctagttggacta

SEQ ID NO: 7914 - DNA, 45 bp, Artificial Sequence
  Synthetic
tttagctgataccggtcttaaaagtgcatgtaacacattcccaaa

SEQ ID NO: 7915 - DNA, 44 bp, Artificial Sequence
  Synthetic
gataccatgcttaaagatgggttgattcggctgttatacccatg

SEQ ID NO: 7916 - DNA, 41 bp, Artificial Sequence
  Synthetic
tcaaagatgaggggacagtaactataaaattgccgctgctc

SEQ ID NO: 7917 - DNA, 44 bp, Artificial Sequence
  Synthetic
tttgggtcacccgattggagcatttctgctaataaggtgactaa

SEQ ID NO: 7918 - DNA, 42 bp, Artificial Sequence
  Synthetic
tgacaaaggcacaaaagacttaactttttccaacaccgcgat

SEQ ID NO: 7919 - DNA, 40 bp, Artificial Sequence
  Synthetic
ctaactgtgtagcctgcttgcatttgcttttcggtgatgc

SEQ ID NO: 7920 - DNA, 46 bp, Artificial Sequence
  Synthetic
gacttgtccctttgatagaggtgcaccaatacatacaaagaccaaa

SEQ ID NO: 7921 - DNA, 50 bp, Artificial Sequence
  Synthetic
accggcttttttagaataaccaacacagttataattacatgcttaaaggc

SEQ ID NO: 7922 - DNA, 43 bp, Artificial Sequence
  Synthetic
tttgtcaacaaatttgggttcggtgttaataacgccaatagcc

SEQ ID NO: 7923 - DNA, 40 bp, Artificial Sequence
  Synthetic
aacggcaatcgcatgcttaggccttattttttgcagcaag

SEQ ID NO: 7924 - DNA, 47 bp, Artificial Sequence
  Synthetic
tggctcagaagctacaaaaacccgccattagtcaaaatataatccaa

SEQ ID NO: 7925 - DNA, 50 bp, Artificial Sequence
  Synthetic
aatcagatgctctttacgttgttgacaacttctttaaaatctacttcacc

SEQ ID NO: 7926 - DNA, 45 bp, Artificial Sequence
  Synthetic
attgacttactcagatggttcagacctgaactcacccttgtcaaa

SEQ ID NO: 7927 - DNA, 43 bp, Artificial Sequence
  Synthetic
caagctattcagtttgcttttgacctttggcatcttgacctgc

SEQ ID NO: 7928 - DNA, 44 bp, Artificial Sequence
  Synthetic
attaccctgttgaccaagcaaacacagattgtttgaaagactgg

SEQ ID NO: 7929 - DNA, 45 bp, Artificial Sequence
  Synthetic
acgtaaccctaaatcaaatgaacctaaaagtggtgtcatcaaaca

SEQ ID NO: 7930 - DNA, 46 bp, Artificial Sequence
  Synthetic
acgatcggttacagaaatcaagtcagtgtcaccgtattttacagta

SEQ ID NO: 7931 - DNA, 41 bp, Artificial Sequence
  Synthetic
tctgccacctctcaaccgactgttgggacatcagatggtgt

SEQ ID NO: 7932 - DNA, 39 bp, Artificial Sequence
  Synthetic
ggcttcaaccacaaacagcagcctggacggtaaccacta

SEQ ID NO: 7933 - DNA, 44 bp, Artificial Sequence
  Synthetic
tcatgttcatgtctcctttaatgctaaaaactcacgcctaaacg

SEQ ID NO: 7934 - DNA, 43 bp, Artificial Sequence
  Synthetic
aaggggtagatcagaaatcagctcgaataaggaaaacagctgc

SEQ ID NO: 7935 - DNA, 43 bp, Artificial Sequence
  Synthetic
tcgtttgattcacaagagaggaaagactgtttaccgagcgtat

SEQ ID NO: 7936 - DNA, 46 bp, Artificial Sequence
  Synthetic
tattgcttacctagaatcacacgacccacctgaatatcagtgactt

SEQ ID NO: 7937 - DNA, 45 bp, Artificial Sequence
  Synthetic
tcatcctaaagtgttttaccaggactgttttatggttgctgtagc

SEQ ID NO: 7938 - DNA, 43 bp, Artificial Sequence
  Synthetic
acaagaaaattgaggagtgtacaggtcaacaggtaccccaagg

SEQ ID NO: 7939 - DNA, 42 bp, Artificial Sequence
  Synthetic
ttgggggacaacagaagacttaagaatatggccgttgacaaa

SEQ ID NO: 7940 - DNA, 41 bp, Artificial Sequence
  Synthetic
gtgaaagccagttgacctatgttaaaatcagccgccttagt

SEQ ID NO: 7941 - DNA, 42 bp, Artificial Sequence
  Synthetic
gaacagcggaatgcacgtattaattgccaacaaatctctgta

SEQ ID NO: 7942 - DNA, 40 bp, Artificial Sequence
  Synthetic
ttttcggcggttcagaagttaaatctggtagggccgtaaa

SEQ ID NO: 7943 - DNA, 46 bp, Artificial Sequence
  Synthetic
agtcactttcattttagtgggatcatctcacaagtacctcaatcag

SEQ ID NO: 7944 - DNA, 44 bp, Artificial Sequence
  Synthetic
gcccaaggcagtaatcatttcaatcacttcacaggattcgtaaa

SEQ ID NO: 7945 - DNA, 41 bp, Artificial Sequence
  Synthetic
ttgtcctagttgtacgaggagagttcaatactggccaggct

SEQ ID NO: 7946 - DNA, 45 bp, Artificial Sequence
  Synthetic
tgaagtggttacagcattagaatcacctacagtagaaccaggaaa

SEQ ID NO: 7947 - DNA, 43 bp, Artificial Sequence
  Synthetic
acagaagtgaactcttgtcttgaactcgagtttgatgccacag

SEQ ID NO: 7948 - DNA, 47 bp, Artificial Sequence
  Synthetic
ttttggatcgtgaagtaacgcaaagacgtattcttaactgtcttgaa

SEQ ID NO: 7949 - DNA, 47 bp, Artificial Sequence
  Synthetic
caggctattgctgatgaattagacgaccagtctgtaaactagacaaa

SEQ ID NO: 7950 - DNA, 43 bp, Artificial Sequence
  Synthetic
tctttgactgctatgggagaagcacaggtgcttctaaggtaac

SEQ ID NO: 7951 - DNA, 47 bp, Artificial Sequence
  Synthetic
cgtaaacgtaaatcagaagcagctagttctaattgtgagaactgttt

SEQ ID NO: 7952 - DNA, 46 bp, Artificial Sequence
  Synthetic
ataacggctcctaaaaagctaccttgaaaacatcactcaattgtca

SEQ ID NO: 7953 - DNA, 43 bp, Artificial Sequence
  Synthetic
agcgttaatattgtcgatgtcattgaaagcccgagataatgcc

SEQ ID NO: 7954 - DNA, 40 bp, Artificial Sequence
  Synthetic
gcagtacttgctagccaacacgcatcctcatgaagtgtca

SEQ ID NO: 7955 - DNA, 44 bp, Artificial Sequence
  Synthetic
ctttcgaaatcgtatcatgtttcccacgtcctgaaaaggcaata

SEQ ID NO: 7956 - DNA, 43 bp, Artificial Sequence
  Synthetic
tgatggtgacgatgctggaccgacaacaaaatctttaagcaat

SEQ ID NO: 7957 - DNA, 43 bp, Artificial Sequence
  Synthetic
atgcattaaggattcaagataggcacaagattgctgacggctt

SEQ ID NO: 7958 - DNA, 46 bp, Artificial Sequence
  Synthetic
tcaagcggctctagaagtactagaatttcctctattccatttttcg

SEQ ID NO: 7959 - DNA, 48 bp, Artificial Sequence
  Synthetic
atttgctgttacatgtgattgatgcttaaaaccactttttcttgctca

SEQ ID NO: 7960 - DNA, 45 bp, Artificial Sequence
  Synthetic
tacacgtttgaccaagaaatagaggtcaagtctccattgctgttt

SEQ ID NO: 7961 - DNA, 44 bp, Artificial Sequence
  Synthetic
actgaccaaccatcttttgaggaccataagcttttccagacaaa

SEQ ID NO: 7962 - DNA, 48 bp, Artificial Sequence
  Synthetic
gctcttagccaaacattttctggttgtaaatcataaattctcgttggg

SEQ ID NO: 7963 - DNA, 50 bp, Artificial Sequence
  Synthetic
ttaccaggatttttatcaagtcggtccataaatatcaagatctgtctgtt

SEQ ID NO: 7964 - DNA, 44 bp, Artificial Sequence
  Synthetic
cagaagccttaaaagcagcgggaccatttttaattttgccaaag

SEQ ID NO: 7965 - DNA, 48 bp, Artificial Sequence
  Synthetic
tcttgctcaatcatgtatcagctcgaacattttcaaatatagtggcgg

SEQ ID NO: 7966 - DNA, 42 bp, Artificial Sequence
  Synthetic
attaccaatccagtagccattgagatcaatacggccatagcg

SEQ ID NO: 7967 - DNA, 45 bp, Artificial Sequence
  Synthetic
cccttcgcttagaattagcggataaagcttggtcaaaaaacttgg

SEQ ID NO: 7968 - DNA, 41 bp, Artificial Sequence
  Synthetic
acttgtctcaactgcatgatcctcgaattcttggcacagct

SEQ ID NO: 7969 - DNA, 42 bp, Artificial Sequence
  Synthetic
acgggttgctaaaatgtatgcggccgtaaactcctctttagg

SEQ ID NO: 7970 - DNA, 42 bp, Artificial Sequence
  Synthetic
catgaccatgcgaggcatcactttccttatataagcctctgg

SEQ ID NO: 7971 - DNA, 38 bp, Artificial Sequence
  Synthetic
tcatcgacgttggtggagaattcatcggtagcgcttac

SEQ ID NO: 7972 - DNA, 45 bp, Artificial Sequence
  Synthetic
tctaggcaatagagcacaagcatcaacccaaatattgttttttgg

SEQ ID NO: 7973 - DNA, 47 bp, Artificial Sequence
  Synthetic
ccagttgatgtgaggacttatggattctgttcttctttaaaggctcc

SEQ ID NO: 7974 - DNA, 41 bp, Artificial Sequence
  Synthetic
agctttttaacgaatttccgcctatcggtgggttttccttt

SEQ ID NO: 7975 - DNA, 48 bp, Artificial Sequence
  Synthetic
ggtcgtgtgaggcatgaaaaatgctccaaatagcaagatatcaatgtc

SEQ ID NO: 7976 - DNA, 42 bp, Artificial Sequence
  Synthetic
aatcactacgagctatcacgcacaaaacaagccaaggcatat

SEQ ID NO: 7977 - DNA, 41 bp, Artificial Sequence
  Synthetic
tatccgctaaggtgcttacccagccatatccctagctgaaa

SEQ ID NO: 7978 - DNA, 43 bp, Artificial Sequence
  Synthetic
atcggattggtggtgtggaatctgccacattaatcataaaacc

SEQ ID NO: 7979 - DNA, 45 bp, Artificial Sequence
  Synthetic
aagagccccacaaccacagagttaccaactttattagaacctgta

SEQ ID NO: 7980 - DNA, 40 bp, Artificial Sequence
  Synthetic
aagactagggcaagggaccatctgtcttgacaatgggtat

SEQ ID NO: 7981 - DNA, 40 bp, Artificial Sequence
  Synthetic
cgcccgcagactgtctgttgggggtctgtgtcttgtttgt

SEQ ID NO: 7982 - DNA, 43 bp, Artificial Sequence
  Synthetic
aaatggtaaccaaaaaggatcctgtgtgtaaaaaatgcggccg

SEQ ID NO: 7983 - DNA, 48 bp, Artificial Sequence
  Synthetic
ttttccatcatgagatttgaccactaacattgttacacatatgggata

SEQ ID NO: 7984 - DNA, 41 bp, Artificial Sequence
  Synthetic
aaatggcacctggtgtttgtgcaaagtcaagagcaagactc

SEQ ID NO: 7985 - DNA, 43 bp, Artificial Sequence
  Synthetic
catcactatttccaatttggacagcgtggtggttcaggtacag

SEQ ID NO: 7986 - DNA, 44 bp, Artificial Sequence
  Synthetic
gattggggcaaagtaatgacgttgagcttagagaggaagacttt

SEQ ID NO: 7987 - DNA, 48 bp, Artificial Sequence
  Synthetic
ctttgatcaagttggatttaggtgcctaaaagataagcgtcaagaagg

SEQ ID NO: 7988 - DNA, 44 bp, Artificial Sequence
  Synthetic
ggatacccgtgatgccaatattgatgttctggtgaaggaatgtt

SEQ ID NO: 7989 - DNA, 42 bp, Artificial Sequence
  Synthetic
accagcatcatttctccagagtacaaacaggtctcttgagaa

SEQ ID NO: 7990 - DNA, 48 bp, Artificial Sequence
  Synthetic
ttccagcaattttatagaggctgtccttatgaagaccaactgactttc

SEQ ID NO: 7991 - DNA, 39 bp, Artificial Sequence
  Synthetic
aaagggcttgtcctccatacaacgtgaccatcccagaaa

SEQ ID NO: 7992 - DNA, 40 bp, Artificial Sequence
  Synthetic
ggaaacgagcatagttgagcaaaccaaaccatcgaagttg

SEQ ID NO: 7993 - DNA, 43 bp, Artificial Sequence
  Synthetic
tggaatgttaatcaaagtgtcacgctcaatgtcggcaaccatg

SEQ ID NO: 7994 - DNA, 47 bp, Artificial Sequence
  Synthetic
acagactctgttaaaaaagcatcgtcttacagctcgtagacctatag

SEQ ID NO: 7995 - DNA, 44 bp, Artificial Sequence
  Synthetic
acacttgactttcaattgttcgaaacggtatgtctattgcagct

SEQ ID NO: 7996 - DNA, 47 bp, Artificial Sequence
  Synthetic
ttgctgtcatcataccaatacgatgctacggtactatatggggctaa

SEQ ID NO: 7997 - DNA, 42 bp, Artificial Sequence
  Synthetic
accactcgaatactagttacttgcatgggagcacagattgtc

SEQ ID NO: 7998 - DNA, 41 bp, Artificial Sequence
  Synthetic
caacctgtgttgttccttttgcctgctcaggttaagtcagc

SEQ ID NO: 7999 - DNA, 46 bp, Artificial Sequence
  Synthetic
gctttttgagcttgagtacgcatcaagaggatattttagaagcttg

SEQ ID NO: 8000 - DNA, 41 bp, Artificial Sequence
  Synthetic
atcaaccgtaacaaagttcaccagcaacgattactgacgct

SEQ ID NO: 8001 - DNA, 43 bp, Artificial Sequence
  Synthetic
agacattttttcgcccttaccagcatgctccatataaggctat

SEQ ID NO: 8002 - DNA, 40 bp, Artificial Sequence
  Synthetic
tgaccctggatgagtgaagcatcaatcatttggtggcaaa

SEQ ID NO: 8003 - DNA, 42 bp, Artificial Sequence
  Synthetic
ggtacagcacgccagatgatgatcaatcactcttacccattt

SEQ ID NO: 8004 - DNA, 45 bp, Artificial Sequence
  Synthetic
atggtcaccaaggataaccaattcagtacattgtgacagaacacc

SEQ ID NO: 8005 - DNA, 46 bp, Artificial Sequence
  Synthetic
tgtcatggtattcaatttcagcctcaacctgtttattggtcatggt

SEQ ID NO: 8006 - DNA, 41 bp, Artificial Sequence
  Synthetic
gattccttgcttagccaagactccttatgtacctggttggg

SEQ ID NO: 8007 - DNA, 43 bp, Artificial Sequence
  Synthetic
aactccttttaaacaaacttgcgaccacgagctttcgtccttt

SEQ ID NO: 8008 - DNA, 45 bp, Artificial Sequence
  Synthetic
ggctcagtcgtagaatcagattgttgatgaaagcaataaggagtt

SEQ ID NO: 8009 - DNA, 46 bp, Artificial Sequence
  Synthetic
actaagaagcaattgaatagcctgcagacttcttctcagtgtcatt

SEQ ID NO: 8010 - DNA, 38 bp, Artificial Sequence
  Synthetic
cccttgaccaacggaccatagataagcgtgaggtcggt

SEQ ID NO: 8011 - DNA, 42 bp, Artificial Sequence
  Synthetic
ctgtgttcggcatgggtacatgggttatgaaaatagcacatt

SEQ ID NO: 8012 - DNA, 41 bp, Artificial Sequence
  Synthetic
tctcaaatttcctacgcccgcgctgggttcagaacgtcgtg

SEQ ID NO: 8013 - DNA, 42 bp, Artificial Sequence
  Synthetic
cctgctcgagttgtagctctcgggttccctcagattggttgg

SEQ ID NO: 8014 - DNA, 41 bp, Artificial Sequence
  Synthetic
aagtcagcaccccttctcccggcctcaggtgatcgagagaa

SEQ ID NO: 8015 - DNA, 44 bp, Artificial Sequence
  Synthetic
ttccaatcgtccggtttagttagcgccaacaggttgatattcct

SEQ ID NO: 8016 - DNA, 45 bp, Artificial Sequence
  Synthetic
actcgactagtgagctattacgcgacaactaggatgttagcttag

SEQ ID NO: 8017 - DNA, 42 bp, Artificial Sequence
  Synthetic
cacctttccctcacggtactggggaccatctcccaaccctaa

SEQ ID NO: 8018 - DNA, 41 bp, Artificial Sequence
  Synthetic
gaaaggaggtgatccagccgcgatgattggggtgaagtcgt

SEQ ID NO: 8019 - DNA, 40 bp, Artificial Sequence
  Synthetic
catcggcttcggcattagctgacggactttctgaagaaga

SEQ ID NO: 8020 - DNA, 44 bp, Artificial Sequence
  Synthetic
tgctgttgagaagacttgtgattttcactaaattgatcgaccgc

SEQ ID NO: 8021 - DNA, 39 bp, Artificial Sequence
  Synthetic
tctgaaagggcttgacgaacttttgacgatctcactcgc

SEQ ID NO: 8022 - DNA, 44 bp, Artificial Sequence
  Synthetic
gatacgtcaaatgtaccaccaccggataagactgacaaggatga

SEQ ID NO: 8023 - DNA, 40 bp, Artificial Sequence
  Synthetic
ttgccttctgggttagcaatgaactcagcagtagcagttc

SEQ ID NO: 8024 - DNA, 38 bp, Artificial Sequence
  Synthetic
cttagcagacgctcgtgcaagaacatccagccgatagc

SEQ ID NO: 8025 - DNA, 39 bp, Artificial Sequence
  Synthetic
tagcgttgaagttgttgacgtgagctcatgcagaaatgc

SEQ ID NO: 8026 - DNA, 47 bp, Artificial Sequence
  Synthetic
atcaataggaccaatcaaactcaggtgtgtcagttttaactcacaaa

SEQ ID NO: 8027 - DNA, 44 bp, Artificial Sequence
  Synthetic
actgtcactggcttagattcatctgttcagcttagcaaccatga

SEQ ID NO: 8028 - DNA, 43 bp, Artificial Sequence
  Synthetic
attacgaatagtggcgctactagaaactcatgaaccagtaggg

SEQ ID NO: 8029 - DNA, 47 bp, Artificial Sequence
  Synthetic
acttctcatcaatggcttacctatgtcaatgcattgatgattctgag

SEQ ID NO: 8030 - DNA, 43 bp, Artificial Sequence
  Synthetic
aaaagcactaattctccttcgtccttatagccagacttgcggt

SEQ ID NO: 8031 - DNA, 45 bp, Artificial Sequence
  Synthetic
tggtcaccaccattcaaaaactctttggagtgtcataactttcca

SEQ ID NO: 8032 - DNA, 45 bp, Artificial Sequence
  Synthetic
atgtctccatcaatacaccgttaaaactcaacttgaaagcctaga

SEQ ID NO: 8033 - DNA, 48 bp, Artificial Sequence
  Synthetic
ctatcactgaaaatgacaatgcgtcagtcttctagatttttggtcatt

SEQ ID NO: 8034 - DNA, 49 bp, Artificial Sequence
  Synthetic
aaacctcagcacattattcaagctccgtaatgttttctactttcaaaga

SEQ ID NO: 8035 - DNA, 46 bp, Artificial Sequence
  Synthetic
ttgcatctgtacaggtctatagtgacatctgataacccaacctcac

SEQ ID NO: 8036 - DNA, 40 bp, Artificial Sequence
  Synthetic
gctatggctgactcactagcttcataggctttgggttctt

SEQ ID NO: 8037 - DNA, 44 bp, Artificial Sequence
  Synthetic
cttaaaagggcactaggaaaggaaacaaaaccgtcaaagcgata

SEQ ID NO: 8038 - DNA, 44 bp, Artificial Sequence
  Synthetic
attggcgaacttttccaaatggttctttaagggttgctagcttt

SEQ ID NO: 8039 - DNA, 41 bp, Artificial Sequence
  Synthetic
ccttgcccataaagccaagattgtcaatcgtgtctttgttg

SEQ ID NO: 8040 - DNA, 43 bp, Artificial Sequence
  Synthetic
atccgtcgctttatgttgtaattgtgaacatggctatgcggtg

SEQ ID NO: 8041 - DNA, 43 bp, Artificial Sequence
  Synthetic
ggacaaccgtttttttaaaaggttggttgggattcgggattgg

SEQ ID NO: 8042 - DNA, 43 bp, Artificial Sequence
  Synthetic
cctttgccaaacacgagcaatcggtatagataaagtccacgta

SEQ ID NO: 8043 - DNA, 43 bp, Artificial Sequence
  Synthetic
gtatgagatggctgaggtcaagggaaaacagcctgatagtctg

SEQ ID NO: 8044 - DNA, 46 bp, Artificial Sequence
  Synthetic
aaaagtcccgctaatgaatcccgcaaaacatataccttacacaaag

SEQ ID NO: 8045 - DNA, 47 bp, Artificial Sequence
  Synthetic
atcaactcctgattgattacctgtttacgctcaaaatggtatttcag

SEQ ID NO: 8046 - DNA, 46 bp, Artificial Sequence
  Synthetic
cctgctaagtcgggattgaagtctaacgtatatggctatacactag

SEQ ID NO: 8047 - DNA, 43 bp, Artificial Sequence
  Synthetic
ccacctaaagctacccccaactatggtaaaacatttgggttag

SEQ ID NO: 8048 - DNA, 40 bp, Artificial Sequence
  Synthetic
attcacacgaccaatcagacctacggtagctctgctcaag

SEQ ID NO: 8049 - DNA, 41 bp, Artificial Sequence
  Synthetic
gtggtacgcccctacctgtcgagaggggagaagagctcaac

SEQ ID NO: 8050 - DNA, 36 bp, Artificial Sequence
  Synthetic
cagggcgccctgctactgacataatgccggcagcgt

SEQ ID NO: 8051 - DNA, 40 bp, Artificial Sequence
  Synthetic
gggtttataccacccgcgcttatgtgactatcaggcgccc

SEQ ID NO: 8052 - DNA, 38 bp, Artificial Sequence
  Synthetic
tacaccccttacccgaaggccaatgcccgcccgcacta

SEQ ID NO: 8053 - DNA, 40 bp, Artificial Sequence
  Synthetic
cggtggttgtggcctcctatttatgccttgcgtccgaatc

SEQ ID NO: 8054 - DNA, 41 bp, Artificial Sequence
  Synthetic
tgcttcgatcgtgaatacgcctacatcctttacgcacagcc

SEQ ID NO: 8055 - DNA, 38 bp, Artificial Sequence
  Synthetic
tctcacggacgccttccatcacagccagttttgcgccg

SEQ ID NO: 8056 - DNA, 37 bp, Artificial Sequence
  Synthetic
ggggccgatttccccgaggtaagaagcccgcagaccc

SEQ ID NO: 8057 - DNA, 39 bp, Artificial Sequence
  Synthetic
cggccaacgcccaacacaacgtcgaaggcctctggaaag

SEQ ID NO: 8058 - DNA, 41 bp, Artificial Sequence
  Synthetic
tataggcaggagacggctgctcttcgggagggacttggtat

SEQ ID NO: 8059 - DNA, 41 bp, Artificial Sequence
  Synthetic
ggtttccctgttatgaccccgcaatcaccagcctcttgccc

SEQ ID NO: 8060 - DNA, 38 bp, Artificial Sequence
  Synthetic
cgatgcccccgagatgtgtgttcgaggtggtcatcccg

SEQ ID NO: 8061 - DNA, 39 bp, Artificial Sequence
  Synthetic
tcgaggtgcgagctgtggtgggtgtaaagcttaccctgc

SEQ ID NO: 8062 - DNA, 40 bp, Artificial Sequence
  Synthetic
agcttgccgaattggttgaggcagttgagaaccgcagtgc

SEQ ID NO: 8063 - DNA, 38 bp, Artificial Sequence
  Synthetic
ggtgttgcaggctccccaagtagcagtgtaccgggctc

SEQ ID NO: 8064 - DNA, 39 bp, Artificial Sequence
  Synthetic
gcttgctagtcgcctgtggtcgagagcctccccaggaac

SEQ ID NO: 8065 - DNA, 41 bp, Artificial Sequence
  Synthetic
tgcggtcgcaggtttgaaagcggccaggtgtactccttcag

SEQ ID NO: 8066 - DNA, 39 bp, Artificial Sequence
  Synthetic
ctctccaccatgcccccacttgtcgggtacgacggcaac

SEQ ID NO: 8067 - DNA, 38 bp, Artificial Sequence
  Synthetic
ttccatcacttccaccgacgtgacgacgagctctgcgg

SEQ ID NO: 8068 - DNA, 40 bp, Artificial Sequence
  Synthetic
tgacccctggtaacacgaacacttgatcttgtgcggggct

SEQ ID NO: 8069 - DNA, 42 bp, Artificial Sequence
  Synthetic
gcccagtcgcagagtgctatggaatgattgtcgcctcctcag

SEQ ID NO: 8070 - DNA, 44 bp, Artificial Sequence
  Synthetic
tctgtgggtctggtgggatgagcatagtagtataggtagaaaca

SEQ ID NO: 8071 - DNA, 46 bp, Artificial Sequence
  Synthetic
tttctgtgtctaagcactggtgggaacaccacttaaatatcaatgt

SEQ ID NO: 8072 - DNA, 50 bp, Artificial Sequence
  Synthetic
tgattatgtcattgcattgactggtgggtctatcagaaaaaggtaaaatt

SEQ ID NO: 8073 - DNA, 42 bp, Artificial Sequence
  Synthetic
ttctgagagttggagtgttggtaaagtttcttagcaggtgtg

SEQ ID NO: 8074 - DNA, 46 bp, Artificial Sequence
  Synthetic
actggtgttattgacattagtgctaccaaggtttattgtttgtcaa

SEQ ID NO: 8075 - DNA, 47 bp, Artificial Sequence
  Synthetic
acaagcttttttctatagtggtggtatcaccagtaaaaacaggatca

SEQ ID NO: 8076 - DNA, 48 bp, Artificial Sequence
  Synthetic
ttctgcattgataattgtggtgagcggttattactctgcaagatagca

SEQ ID NO: 8077 - DNA, 48 bp, Artificial Sequence
  Synthetic
tgaaactgtctgtagtgtcgcataaccactaataactacatatggaac

SEQ ID NO: 8078 - DNA, 48 bp, Artificial Sequence
  Synthetic
tgatgaagagggtggttatgatgtcattactaataggccattgtgaaa

SEQ ID NO: 8079 - DNA, 46 bp, Artificial Sequence
  Synthetic
agcttgttagtatgaaaggtactggaagcatcaatgtcaataggtg

SEQ ID NO: 8080 - DNA, 42 bp, Artificial Sequence
  Synthetic
tttgactttgttgtcaatgctgctaatagcacgtgcaacacc

SEQ ID NO: 8081 - DNA, 47 bp, Artificial Sequence
  Synthetic
aacttgtgttattgccaatgttccaagtcaaacttgaaagaagcttt

SEQ ID NO: 8082 - DNA, 45 bp, Artificial Sequence
  Synthetic
gaagttgactgggttgctttttacgctttacatccaaagaagcaa

SEQ ID NO: 8083 - DNA, 44 bp, Artificial Sequence
  Synthetic
gtgatgttggtttttgtccacaccaacacgtccattaacaaact

SEQ ID NO: 8084 - DNA, 49 bp, Artificial Sequence
  Synthetic
tgtcctatagttgttggtgtttcaggagtctttcctaccaaatatacat

SEQ ID NO: 8085 - DNA, 47 bp, Artificial Sequence
  Synthetic
tgatgacggttacatttgtggtggatgaactaaagattgagagtaca

SEQ ID NO: 8086 - DNA, 45 bp, Artificial Sequence
  Synthetic
agctacaattccaccttacaatctgtctctcaacacaaccagatg

SEQ ID NO: 8087 - DNA, 44 bp, Artificial Sequence
  Synthetic
cataatggtgtcttcttgggagttaccttaatacgcaacacaga

SEQ ID NO: 8088 - DNA, 39 bp, Artificial Sequence
  Synthetic
tgcaagttgagagtgccaacgcagcatacaaaaaggcaa

SEQ ID NO: 8089 - DNA, 40 bp, Artificial Sequence
  Synthetic
tgcaccacatggaccttttggtcaccaccaataccaagta

SEQ ID NO: 8090 - DNA, 44 bp, Artificial Sequence
  Synthetic
cgcaaagtctgaatttgatcatgagtgagtagcagcttgttcag

SEQ ID NO: 8091 - DNA, 47 bp, Artificial Sequence
  Synthetic
tgaaactttgacatggcctcttatcgcttaagtttaccaggcataat

SEQ ID NO: 8092 - DNA, 45 bp, Artificial Sequence
  Synthetic
ttaactgcttgtgctttttctgttgtgcaccatgtttaacagctt

SEQ ID NO: 8093 - DNA, 45 bp, Artificial Sequence
  Synthetic
gggtgtgcttgtgaccgtaccttgctcgtttaaataagaaatgtc

SEQ ID NO: 8094 - DNA, 45 bp, Artificial Sequence
  Synthetic
tacttggaaagatggcagagtcagcatagaccaagtccatcatag

SEQ ID NO: 8095 - DNA, 45 bp, Artificial Sequence
  Synthetic
tgctctatgcgatgcgatggcttggttatctaatgttaaaacacc

SEQ ID NO: 8096 - DNA, 42 bp, Artificial Sequence
  Synthetic
actgaacttttgcaatttgtcaccttgatcaacgagtgctgg

SEQ ID NO: 8097 - DNA, 45 bp, Artificial Sequence
  Synthetic
agaactgttggtggtgtttctcatgtttttgatggtattgtcttg

SEQ ID NO: 8098 - DNA, 44 bp, Artificial Sequence
  Synthetic
tggcacaagttttaacagaagttgttcgtaccacctggcttaaa

SEQ ID NO: 8099 - DNA, 46 bp, Artificial Sequence
  Synthetic
atttgccttacccagatcctagttgtcttaacaacatcatcaacaa

SEQ ID NO: 8100 - DNA, 44 bp, Artificial Sequence
  Synthetic
ttgtggttcacaaactgtacttcgacatgatcatatgcgcattt

SEQ ID NO: 8101 - DNA, 45 bp, Artificial Sequence
  Synthetic
gtcagtgatgcatatgctaatttggggaggaccctgtattgtagt

SEQ ID NO: 8102 - DNA, 45 bp, Artificial Sequence
  Synthetic
tgttcctttacaggttggtttttcagacacacaaccttcagtttg

SEQ ID NO: 8103 - DNA, 38 bp, Artificial Sequence
  Synthetic
ttgagccaaaaccaccacactaacagcatcaccagagg

SEQ ID NO: 8104 - DNA, 46 bp, Artificial Sequence
  Synthetic
tggtcaacttgatggtctttgttacacaattgaaaattctggatac

SEQ ID NO: 8105 - DNA, 46 bp, Artificial Sequence
  Synthetic
aattgtttgcaaaacgaaaaatgggacaacaccgagatttttgaga

SEQ ID NO: 8106 - DNA, 44 bp, Artificial Sequence
  Synthetic
taaccacttgtccactttttatccaggcatagcataaccacact

SEQ ID NO: 8107 - DNA, 48 bp, Artificial Sequence
  Synthetic
cacctggtacaactgttttaaaacgtgcatcactaacataatcattga

SEQ ID NO: 8108 - DNA, 41 bp, Artificial Sequence
  Synthetic
gttacgggtttattgccaactcaagaaaccattggctgagt

SEQ ID NO: 8109 - DNA, 43 bp, Artificial Sequence
  Synthetic
ttcctgtgtttttagtgttgtcaacacacggccattatgtgtg

SEQ ID NO: 8110 - DNA, 47 bp, Artificial Sequence
  Synthetic
atcaaccactccgtttaacttgttggcattaaaataaacaaaaccag

SEQ ID NO: 8111 - DNA, 48 bp, Artificial Sequence
  Synthetic
gcacttttgtgggtattttaccaccccattaatataaaactggccagt

SEQ ID NO: 8112 - DNA, 44 bp, Artificial Sequence
  Synthetic
atgttgcactccccatttattatcacaccaaaagatgcagttgc

SEQ ID NO: 8113 - DNA, 46 bp, Artificial Sequence
  Synthetic
atcaacaaagcattattggtgccgtaactgtagtaagttttgcaag

SEQ ID NO: 8114 - DNA, 50 bp, Artificial Sequence
  Synthetic
aagttgttacatctggtttgggtactagaaagacctttagtacaagactt

SEQ ID NO: 8115 - DNA, 44 bp, Artificial Sequence
  Synthetic
atgaccggcttgattcaattcaaaaacaaatgcattcaaagctg

SEQ ID NO: 8116 - DNA, 45 bp, Artificial Sequence
  Synthetic
aatggtgtctttcgtgtaacttccgcacaaaatcagacaaaacag

SEQ ID NO: 8117 - DNA, 41 bp, Artificial Sequence
  Synthetic
ctacaggttgttgtggttgttgcccacaatcacaacagcct

SEQ ID NO: 8118 - DNA, 46 bp, Artificial Sequence
  Synthetic
atgtccatttacgtaactggaacttgcaacacaactataaaaagcg

SEQ ID NO: 8119 - DNA, 43 bp, Artificial Sequence
  Synthetic
cacttcttagtggtgtacttcttgtactgacccacttgaacac

SEQ ID NO: 8120 - DNA, 43 bp, Artificial Sequence
  Synthetic
tcctccttcattttacatgcctctaagattcctgggaatgacc

SEQ ID NO: 8121 - DNA, 44 bp, Artificial Sequence
  Synthetic
tttggaaccaaagttctctattgctgagcgatcctcaaactcaa

SEQ ID NO: 8122 - DNA, 42 bp, Artificial Sequence
  Synthetic
agttcttctggtacttccactccttatcagccctgggttgag

SEQ ID NO: 8123 - DNA, 49 bp, Artificial Sequence
  Synthetic
agtgggtgataatgttcagattaccaggttcttattatccttagctaca

SEQ ID NO: 8124 - DNA, 45 bp, Artificial Sequence
  Synthetic
ttggacagacctttattgcaaattgttttcagcaacactcagttt

SEQ ID NO: 8125 - DNA, 43 bp, Artificial Sequence
  Synthetic
atctgatttattagacgaggcgcgattcttgcttgtggaacaa

SEQ ID NO: 8126 - DNA, 44 bp, Artificial Sequence
  Synthetic
tgtggagattgggttttggcagcaataattcttttacactgtca

SEQ ID NO: 8127 - DNA, 42 bp, Artificial Sequence
  Synthetic
acaactttggagtggattgcacgggactttcggaatctaact

SEQ ID NO: 8128 - DNA, 44 bp, Artificial Sequence
  Synthetic
aatggggtaatgagaattggattgcctttgccttctcctgtgag

SEQ ID NO: 8129 - DNA, 45 bp, Artificial Sequence
  Synthetic
taaccctgataatcagacaaggcacatcgtccccattttgataat

SEQ ID NO: 8130 - DNA, 41 bp, Artificial Sequence
  Synthetic
tcgacgtccatcgactacaccgtctttgtcggacctgcgag

SEQ ID NO: 8131 - DNA, 43 bp, Artificial Sequence
  Synthetic
agagagttgctttgcccagaacttccattaattttaagaccca

SEQ ID NO: 8132 - DNA, 42 bp, Artificial Sequence
  Synthetic
aatattgcaatatggcagtctgggttcttcctccagagcctc

SEQ ID NO: 8133 - DNA, 46 bp, Artificial Sequence
  Synthetic
tgcaggttattgcagaaattcaccagattctccttcatttgttgaa

SEQ ID NO: 8134 - DNA, 43 bp, Artificial Sequence
  Synthetic
ttaaacttaggccttgaaacagacatcagcaattggtgtgctg

SEQ ID NO: 8135 - DNA, 41 bp, Artificial Sequence
  Synthetic
ctgagcaagcccacattttcgctgaacttttgccaaggcgg

SEQ ID NO: 8136 - DNA, 49 bp, Artificial Sequence
  Synthetic
taggtgacacagcatttatacaaggggtgtttctaaagagataacttct

SEQ ID NO: 8137 - DNA, 46 bp, Artificial Sequence
  Synthetic
atctgaacgtctactgctggtcacttttggtatagttacagtttga

SEQ ID NO: 8138 - DNA, 42 bp, Artificial Sequence
  Synthetic
tactgcttttgatgcaaaacagacagtgttcacctgaagcag

SEQ ID NO: 8139 - DNA, 43 bp, Artificial Sequence
  Synthetic
atcagaatgaaccatgaagcctatgatacatttgctcgcgacg

SEQ ID NO: 8140 - DNA, 45 bp, Artificial Sequence
  Synthetic
ccagaataatggcatttgctggatcctctggtattatctccaact

SEQ ID NO: 8141 - DNA, 43 bp, Artificial Sequence
  Synthetic
aatccctacccctaaaatctgtttgcgggtgcggtgttaatag

SEQ ID NO: 8142 - DNA, 38 bp, Artificial Sequence
  Synthetic
cgcggttaggacttgtttcagttttaggtgcttggcag

SEQ ID NO: 8143 - DNA, 42 bp, Artificial Sequence
  Synthetic
tttgtgtgaaacctgtgctgctccatcagtacctttgtgatc

SEQ ID NO: 8144 - DNA, 44 bp, Artificial Sequence
  Synthetic
ggaattgttccaccaacaggaaagttgtgaaggactctgaaagt

SEQ ID NO: 8145 - DNA, 41 bp, Artificial Sequence
  Synthetic
ctgatgttacggagagtcaaaccgaagtaccaagtcgcctc

SEQ ID NO: 8146 - DNA, 49 bp, Artificial Sequence
  Synthetic
acaaacacaagtagggcaaacagaatctgtatgttcattatcataagcc

SEQ ID NO: 8147 - DNA, 45 bp, Artificial Sequence
  Synthetic
acgatgcaacgtcacaatgttgatataggattaccatctaatgca

SEQ ID NO: 8148 - DNA, 42 bp, Artificial Sequence
  Synthetic
tttcactatgctcgacaaaatggtagctgccagtgtaggtat

SEQ ID NO: 8149 - DNA, 40 bp, Artificial Sequence
  Synthetic
atctggtggaaggcttggatatatcctccaactcgaacac

SEQ ID NO: 8150 - DNA, 42 bp, Artificial Sequence
  Synthetic
gggtgacccaaaatgaaggccttaatgaaggtgaatcaacac

SEQ ID NO: 8151 - DNA, 42 bp, Artificial Sequence
  Synthetic
tgtagcagagaccgattttaccaaaatcgagtaggacgttcc

SEQ ID NO: 8152 - DNA, 42 bp, Artificial Sequence
  Synthetic
acaacagacaaaatgtgggctttcacatccaaccataaacac

SEQ ID NO: 8153 - DNA, 49 bp, Artificial Sequence
  Synthetic
atccagactacattaaaatggcgcccttctggaaaaaaagaataaggaa

SEQ ID NO: 8154 - DNA, 40 bp, Artificial Sequence
  Synthetic
gtggttctctcgtatccacagagttttgaccttgggcctg

SEQ ID NO: 8155 - DNA, 42 bp, Artificial Sequence
  Synthetic
aacatctcagacaagttgtagcatcagaaaatcagcagctgc

SEQ ID NO: 8156 - DNA, 42 bp, Artificial Sequence
  Synthetic
actttgaagcaggaattctggagtctgtgtaggcggtcttga

SEQ ID NO: 8157 - DNA, 43 bp, Artificial Sequence
  Synthetic
actgtgtgaaaaatccctcaactagtggggttggagggtaatc

SEQ ID NO: 8158 - DNA, 43 bp, Artificial Sequence
  Synthetic
aatggagacaagtccttatcaactccaacaagccctccattct

SEQ ID NO: 8159 - DNA, 48 bp, Artificial Sequence
  Synthetic
tatcccaatttggtcaagagcacctactcaagagataaagttcttccg

SEQ ID NO: 8160 - DNA, 42 bp, Artificial Sequence
  Synthetic
tttcccttttccctttcctattcctaagaaccctgaacctgc

SEQ ID NO: 8161 - DNA, 45 bp, Artificial Sequence
  Synthetic
tctctttgatcttccacaaggggtatccaaggcatctcttcatag

SEQ ID NO: 8162 - DNA, 44 bp, Artificial Sequence
  Synthetic
agtgactggtgcttcttattttacttgatccaacctcagctgta

SEQ ID NO: 8163 - DNA, 43 bp, Artificial Sequence
  Synthetic
tcaagttcagataaaccctacaccttcaccaggaaccatagca

SEQ ID NO: 8164 - DNA, 49 bp, Artificial Sequence
  Synthetic
aatattgggacaggaacttcagctctccaaatctgtaaatctagctaaa

SEQ ID NO: 8165 - DNA, 45 bp, Artificial Sequence
  Synthetic
cttggacatctattccaactttggcgttgaccaactgagtctgaa

SEQ ID NO: 8166 - DNA, 46 bp, Artificial Sequence
  Synthetic
tttctggaatcacattaaagcaagctgcactcctgtaatatccatt

SEQ ID NO: 8167 - DNA, 42 bp, Artificial Sequence
  Synthetic
ttgcttcccatgtcagagtgaaggagcaaaacattccaagtt

SEQ ID NO: 8168 - DNA, 46 bp, Artificial Sequence
  Synthetic
ttgaggatccagttttagcaaagaatgatgtatgtctggattctcc

SEQ ID NO: 8169 - DNA, 42 bp, Artificial Sequence
  Synthetic
tagagggcctttagatctgacaatacctactggagtgaacca

SEQ ID NO: 8170 - DNA, 42 bp, Artificial Sequence
  Synthetic
agaagttgggaaacaaagactcaagggggtggaagtacttca

SEQ ID NO: 8171 - DNA, 42 bp, Artificial Sequence
  Synthetic
caggcagaagtgtgtggactcaatctaatcagtctcccagta

SEQ ID NO: 8172 - DNA, 44 bp, Artificial Sequence
  Synthetic
tggtcagatttttgtcagttagtgtcctacccttctcctcaaga

SEQ ID NO: 8173 - DNA, 38 bp, Artificial Sequence
  Synthetic
gcagttggcattcttggagtttgcgggagaaatgctta

SEQ ID NO: 8174 - DNA, 43 bp, Artificial Sequence
  Synthetic
gagagaagaatggatgtgtgagatgacaagcagccaatcatct

SEQ ID NO: 8175 - DNA, 45 bp, Artificial Sequence
  Synthetic
tccatgttgctggaggaaattctttggaacatttcttgagtaacc

SEQ ID NO: 8176 - DNA, 47 bp, Artificial Sequence
  Synthetic
agaaccagaggattataaagaggctctaactgagtcttacccactat

SEQ ID NO: 8177 - DNA, 45 bp, Artificial Sequence
  Synthetic
ggagttcatccaagattggctcagaacaattttccatcatgacag

SEQ ID NO: 8178 - DNA, 47 bp, Artificial Sequence
  Synthetic
tgctattggcatagatcctgatagacatctccgaatcttatcattgt

SEQ ID NO: 8179 - DNA, 41 bp, Artificial Sequence
  Synthetic
ggcaccatgcagtaccaaacacttcaatttggtcattcgtg

SEQ ID NO: 8180 - DNA, 42 bp, Artificial Sequence
  Synthetic
cctacagcaactgttacccttatgttaaactccagtgtgccg

SEQ ID NO: 8181 - DNA, 42 bp, Artificial Sequence
  Synthetic
cgggtacggacaatgaccaagagactgtgattcttcctgatg

SEQ ID NO: 8182 - DNA, 42 bp, Artificial Sequence
  Synthetic
atgagatcagatgcacccattggttgtcattgggaatgcttc

SEQ ID NO: 8183 - DNA, 39 bp, Artificial Sequence
  Synthetic
ttgggagggaatggtagacggtgtcctgttccctcagaa

SEQ ID NO: 8184 - DNA, 43 bp, Artificial Sequence
  Synthetic
ttcttgtggccctggagaacagtttgttcatttctgagtcagt

SEQ ID NO: 8185 - DNA, 43 bp, Artificial Sequence
  Synthetic
atggatttcctttgccatatcatgtcaggcccacatgatgaac

SEQ ID NO: 8186 - DNA, 42 bp, Artificial Sequence
  Synthetic
aaagacagtgcagcaacttagaaacaggctaacaacaggtct

SEQ ID NO: 8187 - DNA, 44 bp, Artificial Sequence
  Synthetic
aatctcgcagtggcagtttacaaataatctaacagtcgcaaaca

SEQ ID NO: 8188 - DNA, 42 bp, Artificial Sequence
  Synthetic
cattgtgacgaagagttgacagatccacctctgctactgtag

SEQ ID NO: 8189 - DNA, 48 bp, Artificial Sequence
  Synthetic
aattggttttctcttgaagcagactttcttcaaacagcttttccaaat

SEQ ID NO: 8190 - DNA, 42 bp, Artificial Sequence
  Synthetic
cctcgtttggaagcaataccttgtcctgttccataaatagcc

SEQ ID NO: 8191 - DNA, 44 bp, Artificial Sequence
  Synthetic
actgggtcgtaactgcatatgggtaacagttgcttacatccttc

SEQ ID NO: 8192 - DNA, 46 bp, Artificial Sequence
  Synthetic
caaggtaatacacgcataggtagagttccctctgatcttctgaaac

SEQ ID NO: 8193 - DNA, 46 bp, Artificial Sequence
  Synthetic
ccaaattttaaagtatggcagcacccctttgcctgtactaataccc

SEQ ID NO: 8194 - DNA, 39 bp, Artificial Sequence
  Synthetic
tgtccctcttacagacacaggcctcagcaatggtctcaa

SEQ ID NO: 8195 - DNA, 42 bp, Artificial Sequence
  Synthetic
taagcactattgacacagaaccctagcatccccagaatgttc

SEQ ID NO: 8196 - DNA, 39 bp, Artificial Sequence
  Synthetic
tgtcaacaacgggtaaggtctgtaggagtccgtgctttg

SEQ ID NO: 8197 - DNA, 43 bp, Artificial Sequence
  Synthetic
gatcctaacagatttgctctagctgaacagcccataccaaacg

SEQ ID NO: 8198 - DNA, 48 bp, Artificial Sequence
  Synthetic
ccttaccttgtgtagaaaatcctcccatgtccccatcttcaataatag

SEQ ID NO: 8199 - DNA, 49 bp, Artificial Sequence
  Synthetic
tgggtcagtaggagacagtattcccagcctttaaataataatggttgtc

SEQ ID NO: 8200 - DNA, 47 bp, Artificial Sequence
  Synthetic
ttaagcaacatgagtgcgactctttctattattattggttcacacgg

SEQ ID NO: 8201 - DNA, 42 bp, Artificial Sequence
  Synthetic
gtggggacatttgggtgacgaattgataacacttgccaggat

SEQ ID NO: 8202 - DNA, 44 bp, Artificial Sequence
  Synthetic
ctggggatgataaaaatgcaactgaccaatactgtccataagcc

SEQ ID NO: 8203 - DNA, 43 bp, Artificial Sequence
  Synthetic
tcctgacgtcagatgtatctgcatatgtctatgacgggcctat

SEQ ID NO: 8204 - DNA, 44 bp, Artificial Sequence
  Synthetic
agaacgatcagcaaggatttacgcgatttggaattaggtgtgga

SEQ ID NO: 8205 - DNA, 39 bp, Artificial Sequence
  Synthetic
ttccacgcgacagatccgtctaggatcacgagccaaggg

SEQ ID NO: 8206 - DNA, 36 bp, Artificial Sequence
  Synthetic
acagagctggtcctgacggatgggcgcgtctctctg

SEQ ID NO: 8207 - DNA, 38 bp, Artificial Sequence
  Synthetic
gctgatcctaacggaaggaggcatgcgccacacggagg

SEQ ID NO: 8208 - DNA, 36 bp, Artificial Sequence
  Synthetic
cctcccacgcgcgcctataaactgtgccctgttgcg

SEQ ID NO: 8209 - DNA, 37 bp, Artificial Sequence
  Synthetic
acaagacgagggctgcaacgctggtccggcagctcta

SEQ ID NO: 8210 - DNA, 38 bp, Artificial Sequence
  Synthetic
cggaggagagagaacggccgtacaccctctctcgcgcc

SEQ ID NO: 8211 - DNA, 38 bp, Artificial Sequence
  Synthetic
ggccaaggcaacggcacgatgacgacgtcctggctttc

SEQ ID NO: 8212 - DNA, 38 bp, Artificial Sequence
  Synthetic
cgatacagcgcgtcgtcgaactgctggtcggagagtgc

SEQ ID NO: 8213 - DNA, 43 bp, Artificial Sequence
  Synthetic
gttctcggacgggtcccttaatacttacttgagtgatggagtt

SEQ ID NO: 8214 - DNA, 47 bp, Artificial Sequence
  Synthetic
gcacgttgtctatccaatcgtaaagacctattctttgtattgggaaa

SEQ ID NO: 8215 - DNA, 41 bp, Artificial Sequence
  Synthetic
cgctttcctccgcatgtacaatgttgttcaacattcgcaag

SEQ ID NO: 8216 - DNA, 45 bp, Artificial Sequence
  Synthetic
ttttacacagtgtcgaaatcaccaaccggcttaactatacagttt

SEQ ID NO: 8217 - DNA, 40 bp, Artificial Sequence
  Synthetic
aacctgacctcgataaagcacttctcggcagtttgtttca

SEQ ID NO: 8218 - DNA, 42 bp, Artificial Sequence
  Synthetic
aatgacaaaacgtgctctctctggtgactatgagcagaccga

SEQ ID NO: 8219 - DNA, 46 bp, Artificial Sequence
  Synthetic
gttgcctgagttttcggtattcgaagttaacctgtgtttttaacga

SEQ ID NO: 8220 - DNA, 45 bp, Artificial Sequence
  Synthetic
ggttttgaagaagaagatgggatgttcaacgcctggaaaaaaatt

SEQ ID NO: 8221 - DNA, 43 bp, Artificial Sequence
  Synthetic
aacgattggattttcaaagtttccattggagaccgttgaacat

SEQ ID NO: 8222 - DNA, 44 bp, Artificial Sequence
  Synthetic
cgaaaatagttccgcctgtttctactcagaatacggtagcattt

SEQ ID NO: 8223 - DNA, 43 bp, Artificial Sequence
  Synthetic
ggtcaagcgaagataacattctttctaacgtagtgttgccgga

SEQ ID NO: 8224 - DNA, 42 bp, Artificial Sequence
  Synthetic
cattcgactcacatcattgaagcttaactttttcaccacgcc

SEQ ID NO: 8225 - DNA, 45 bp, Artificial Sequence
  Synthetic
aggttagattcggaaaccatagctagtgcaagttaagcagtttac

SEQ ID NO: 8226 - DNA, 39 bp, Artificial Sequence
  Synthetic
ggctccgcccatgatttcattaaaaaaacggccaacctc

SEQ ID NO: 8227 - DNA, 40 bp, Artificial Sequence
  Synthetic
gagtcgcttctagactcgcctgtttgagctgaagatggtg

SEQ ID NO: 8228 - DNA, 41 bp, Artificial Sequence
  Synthetic
tatgggcgcaaagtgctgtaaggtgttttcggttttcttac

SEQ ID NO: 8229 - DNA, 42 bp, Artificial Sequence
  Synthetic
ttggaagcatacgtttgtggcgtaagataacaggtaccgtgt

SEQ ID NO: 8230 - DNA, 44 bp, Artificial Sequence
  Synthetic
tttgcttttactgcagagcgtaatacctgtttataaactccgaa

SEQ ID NO: 8231 - DNA, 39 bp, Artificial Sequence
  Synthetic
tcggagagcgttgtggattgtgaaatgctacacggacac

SEQ ID NO: 8232 - DNA, 39 bp, Artificial Sequence
  Synthetic
acgacgtgctgcaaggccggcccgtctttagaaagagcg

SEQ ID NO: 8233 - DNA, 41 bp, Artificial Sequence
  Synthetic
cagaccgctgctggacgaacttggagagaaacgcgaaggga

SEQ ID NO: 8234 - DNA, 38 bp, Artificial Sequence
  Synthetic
acatctgttcgacgtgatcgcctctgacacaggccgcc

SEQ ID NO: 8235 - DNA, 42 bp, Artificial Sequence
  Synthetic
ttgggtggtcttgactttggcggacagatcttgccggtatcg

SEQ ID NO: 8236 - DNA, 41 bp, Artificial Sequence
  Synthetic
ccctcttccctttaaccccacgcaccctgtgtgtgactgtc

SEQ ID NO: 8237 - DNA, 43 bp, Artificial Sequence
  Synthetic
acaaagggattggctgatgattacagttccatgctattcccca

SEQ ID NO: 8238 - DNA, 47 bp, Artificial Sequence
  Synthetic
aactgaggaatatatctgttccagctgtctatgtaacttctcatccc

SEQ ID NO: 8239 - DNA, 44 bp, Artificial Sequence
  Synthetic
taatgcctttctcctcatgtctgatcttggactttccttcagtc

SEQ ID NO: 8240 - DNA, 50 bp, Artificial Sequence
  Synthetic
agaagtagcaatagatgacgaaacgactctacatttattgggtattttgg

SEQ ID NO: 8241 - DNA, 46 bp, Artificial Sequence
  Synthetic
tttgtgagtggaagagaaaaaccttggattttgtttgtaccattca

SEQ ID NO: 8242 - DNA, 46 bp, Artificial Sequence
  Synthetic
ggaaggcaaactagtaaaagggtccataatgcatcaaacatttggt

SEQ ID NO: 8243 - DNA, 45 bp, Artificial Sequence
  Synthetic
agaagacaagcataacgggaaacgcaatgttacatttacccaaat

SEQ ID NO: 8244 - DNA, 46 bp, Artificial Sequence
  Synthetic
tcatcgattatgaggagctaagagaggggaatatctcaaacctttc

SEQ ID NO: 8245 - DNA, 43 bp, Artificial Sequence
  Synthetic
tgcagatgcatatgtttttgtggtattgctatttccggcttga

SEQ ID NO: 8246 - DNA, 48 bp, Artificial Sequence
  Synthetic
attgcaatacaacttgtcaaacaccatgtatattctgaaatgggaggc

SEQ ID NO: 8247 - DNA, 46 bp, Artificial Sequence
  Synthetic
caccatcaaaatgagcaggggtctttgttagtaatctcgtcaatgg

SEQ ID NO: 8248 - DNA, 39 bp, Artificial Sequence
  Synthetic
cctacaagcgccaggagggtggagatagagccggccttg

SEQ ID NO: 8249 - DNA, 38 bp, Artificial Sequence
  Synthetic
ctcggagtcccagcgcgtttctgtcgctgcgttccatg

SEQ ID NO: 8250 - DNA, 36 bp, Artificial Sequence
  Synthetic
cacctccctgtggcgcatcagagcaggagcaggctc

SEQ ID NO: 8251 - DNA, 39 bp, Artificial Sequence
  Synthetic
tatccgtcctccctgggcacgatctggccctcaggtgac

SEQ ID NO: 8252 - DNA, 35 bp, Artificial Sequence
  Synthetic
ccgtccaccgtccctctcaggcgttcgggggactt

SEQ ID NO: 8253 - DNA, 42 bp, Artificial Sequence
  Synthetic
gaagacctagagctgccggacccacgtcgaacagatgtctga

SEQ ID NO: 8254 - DNA, 40 bp, Artificial Sequence
  Synthetic
gtgattctgggaaacgtgcccagacgatcacccaagccgt

SEQ ID NO: 8255 - DNA, 37 bp, Artificial Sequence
  Synthetic
gccctcctgggtacggcaactctcgtgccgttgcctt

SEQ ID NO: 8256 - DNA, 39 bp, Artificial Sequence
  Synthetic
gccgtgcttccagagaccgagtttaacggcgtgttcgac

SEQ ID NO: 8257 - DNA, 38 bp, Artificial Sequence
  Synthetic
caactcggcctgcgtgatcccgtgggggcagaactgag

SEQ ID NO: 8258 - DNA, 38 bp, Artificial Sequence
  Synthetic
aagccatgacggtacacagggtaagatacggcgtcctg

SEQ ID NO: 8259 - DNA, 47 bp, Artificial Sequence
  Synthetic
ttaaccgtttcttctgccagttaggcttatgctatatgaacagactg

SEQ ID NO: 8260 - DNA, 42 bp, Artificial Sequence
  Synthetic
tctccgaacatgatcagaactcgtgtttaagggggttcgttt

SEQ ID NO: 8261 - DNA, 42 bp, Artificial Sequence
  Synthetic
acgaaaacttttaacttcgacggaaatcttacttgtcgggcg

SEQ ID NO: 8262 - DNA, 39 bp, Artificial Sequence
  Synthetic
actgcaaatcgttccgtcgtggtctcgacttcgtgaatg

SEQ ID NO: 8263 - DNA, 43 bp, Artificial Sequence
  Synthetic
agcaaagcaataacgaaccttgttctcgttttttgctgtgaaa

SEQ ID NO: 8264 - DNA, 39 bp, Artificial Sequence
  Synthetic
tatcgtcgagctgtacagacgtatcgtcctccgcaagtt

SEQ ID NO: 8265 - DNA, 45 bp, Artificial Sequence
  Synthetic
taccttcaaaaatacgtaaacccctctgtaacagggagaagtttg

SEQ ID NO: 8266 - DNA, 42 bp, Artificial Sequence
  Synthetic
acaaacttgcaagcctgagctttcatttgctcttccatatgt

SEQ ID NO: 8267 - DNA, 39 bp, Artificial Sequence
  Synthetic
ggtaggtcgcgacttgttgattacttgtccaaaggtcga

SEQ ID NO: 8268 - DNA, 43 bp, Artificial Sequence
  Synthetic
caaccctgatgtaataaattccgtgatccaaccgcagattgtc

SEQ ID NO: 8269 - DNA, 42 bp, Artificial Sequence
  Synthetic
tcgggagaaaatagatcaagggctaattcggtttttaggcgc

SEQ ID NO: 8270 - DNA, 47 bp, Artificial Sequence
  Synthetic
taattcgcttaagattggcagtggaagttttgtagatatgggcttag

SEQ ID NO: 8271 - DNA, 39 bp, Artificial Sequence
  Synthetic
cgtctgttgttaggaccggtttagtcgttggtgtcccat

SEQ ID NO: 8272 - DNA, 49 bp, Artificial Sequence
  Synthetic
tcttcgcatacgtaagaaactacgcttttttaatgaagctgaacaactc

SEQ ID NO: 8273 - DNA, 43 bp, Artificial Sequence
  Synthetic
gcaaagcataaattcttctggcgttttcagttcaaacgcagac

SEQ ID NO: 8274 - DNA, 46 bp, Artificial Sequence
  Synthetic
tcatggttccgtcttccaagtcgttagtaaatataacagtaggaga

SEQ ID NO: 8275 - DNA, 42 bp, Artificial Sequence
  Synthetic
ccagatccgggttatagcgacaaagatctacactctttgctc

SEQ ID NO: 8276 - DNA, 42 bp, Artificial Sequence
  Synthetic
ctctctcctgtgtcgatcgcaataaacttatgctgaaccgag

SEQ ID NO: 8277 - DNA, 38 bp, Artificial Sequence
  Synthetic
atgtgtgacgtccgcatcattaacgacgttgtccacca

SEQ ID NO: 8278 - DNA, 38 bp, Artificial Sequence
  Synthetic
tgctcctacaagcgccaggatagagccggccttggaac

SEQ ID NO: 8279 - DNA, 37 bp, Artificial Sequence
  Synthetic
ggtggccgtgtacgcacctcgtcactcgaggaaacgc

SEQ ID NO: 8280 - DNA, 40 bp, Artificial Sequence
  Synthetic
atcgaccgactcctgctatccgggtgactccgcagactgg

SEQ ID NO: 8281 - DNA, 35 bp, Artificial Sequence
  Synthetic
gcggttctgccagggcgttagggtgacgacggacc

SEQ ID NO: 8282 - DNA, 36 bp, Artificial Sequence
  Synthetic
gggaccccgtggcgtatgatcgttccgcacatacgc

SEQ ID NO: 8283 - DNA, 38 bp, Artificial Sequence
  Synthetic
acattccatggggccaaagaatacaactggcaagtgca

SEQ ID NO: 8284 - DNA, 48 bp, Artificial Sequence
  Synthetic
ttaaatacggactgaaaggagggccgatattcttccctcatagacttt

SEQ ID NO: 8285 - DNA, 42 bp, Artificial Sequence
  Synthetic
ctccgccgagatcaaaagtccttgtttcccaacaagagtggc

SEQ ID NO: 8286 - DNA, 46 bp, Artificial Sequence
  Synthetic
aggcgatcatggaaaagaacatagtagcccttagtagtatcaaggt

SEQ ID NO: 8287 - DNA, 43 bp, Artificial Sequence
  Synthetic
gggagaccttcactacctccagaatttctgtcccaattgctct

SEQ ID NO: 8288 - DNA, 40 bp, Artificial Sequence
  Synthetic
ggccactatgtctgcacgttttgcactggtcacataattc

SEQ ID NO: 8289 - DNA, 44 bp, Artificial Sequence
  Synthetic
agaagtgagaataagatgctgcaacaatgtggttggttttttcc

SEQ ID NO: 8290 - DNA, 42 bp, Artificial Sequence
  Synthetic
cacgcaacaggacttgcaagcagtgacaaaatacacaatgtg

SEQ ID NO: 8291 - DNA, 43 bp, Artificial Sequence
  Synthetic
atgtggggtctgggtgttcacatcttctgaaactacatcacct

SEQ ID NO: 8292 - DNA, 46 bp, Artificial Sequence
  Synthetic
caggtggtagagctgtttaaatgccactccaaaaagttccttaaac

SEQ ID NO: 8293 - DNA, 49 bp, Artificial Sequence
  Synthetic
gcttgccaaaatgttaaatgtaccagaactttgtaatttaggtggttgt

SEQ ID NO: 8294 - DNA, 50 bp, Artificial Sequence
  Synthetic
tgcacaaatagcagatatagatgcacacaatctctaacatatttagcttg

SEQ ID NO: 8295 - DNA, 41 bp, Artificial Sequence
  Synthetic
gcaaacagctacagcaccatatgcccatttgtcttgctgta

SEQ ID NO: 8296 - DNA, 46 bp, Artificial Sequence
  Synthetic
tacaggacacaagtcaagaactatgttctactgtctttcctccttt

SEQ ID NO: 8297 - DNA, 45 bp, Artificial Sequence
  Synthetic
gcacgctcgcctgatattgaacttccagttgtattataggtgtag

SEQ ID NO: 8298 - DNA, 45 bp, Artificial Sequence
  Synthetic
aaccccatatttactgatccttcgggatacgaccactagcctcta

SEQ ID NO: 8299 - DNA, 47 bp, Artificial Sequence
  Synthetic
tcaccttctatacctgccatatctgtctgaaatagtatgcaggattc

SEQ ID NO: 8300 - DNA, 45 bp, Artificial Sequence
  Synthetic
tacgcttgcccgaccctaatggtttcagaattaaataaagacgtg

SEQ ID NO: 8301 - DNA, 46 bp, Artificial Sequence
  Synthetic
acaccgtgcaatgcttctaaatcactttttaattctagtacaggac

SEQ ID NO: 8302 - DNA, 44 bp, Artificial Sequence
  Synthetic
tgtgtgtgatactcccttgcaacaacacatacatacattccaga

SEQ ID NO: 8303 - DNA, 49 bp, Artificial Sequence
  Synthetic
atacgcttccaaacttgcttttaggccaaactgctattagctaaatgtt

SEQ ID NO: 8304 - DNA, 40 bp, Artificial Sequence
  Synthetic
cattgcaccagctatgtgaagtgaacacacagccaagttg

SEQ ID NO: 8305 - DNA, 47 bp, Artificial Sequence
  Synthetic
taaggtgctacagatgtcaacatcccgtttcttatagtcacagtgta

SEQ ID NO: 8306 - DNA, 42 bp, Artificial Sequence
  Synthetic
ctcagaggatgaggatgaggatgatgttgttcgtcccgtcta

SEQ ID NO: 8307 - DNA, 41 bp, Artificial Sequence
  Synthetic
gtaatcagcaaacagtgtgccgccggcacttctgtatcaat

SEQ ID NO: 8308 - DNA, 42 bp, Artificial Sequence
  Synthetic
tgccactgcaacaaatacaagatacaatatagcttggcctgc

SEQ ID NO: 8309 - DNA, 47 bp, Artificial Sequence
  Synthetic
gcatttgacaatgaagtaaccgatgtgtgcattactgtctacatctg

SEQ ID NO: 8310 - DNA, 46 bp, Artificial Sequence
  Synthetic
cctaaggtatcaaggggtcgagacaattatgttttggtgtaccttg

SEQ ID NO: 8311 - DNA, 42 bp, Artificial Sequence
  Synthetic
atttggataacgacgaagacaagggaattttctcctggcacg

SEQ ID NO: 8312 - DNA, 40 bp, Artificial Sequence
  Synthetic
acaaactttaaagacgaggccatcccatatgcacttccca

SEQ ID NO: 8313 - DNA, 41 bp, Artificial Sequence
  Synthetic
actgactccaccacacagtccattccttgcgacacactctg

SEQ ID NO: 8314 - DNA, 44 bp, Artificial Sequence
  Synthetic
agatgaaacccaacgccaaaaattgtaccagtgatacactaggg

SEQ ID NO: 8315 - DNA, 38 bp, Artificial Sequence
  Synthetic
tttgctgctttgtgtgcctgaaacacagaggcagactg

SEQ ID NO: 8316 - DNA, 42 bp, Artificial Sequence
  Synthetic
ccaacatctggggttcatagttatattgcctgtaccctgaac

SEQ ID NO: 8317 - DNA, 42 bp, Artificial Sequence
  Synthetic
agacattgtggctttacacagaccgcctactaaaacgcacac

SEQ ID NO: 8318 - DNA, 43 bp, Artificial Sequence
  Synthetic
acgtaggcgtcgtaaacgtattctaggaggcagataaaccttg

SEQ ID NO: 8319 - DNA, 41 bp, Artificial Sequence
  Synthetic
acagatatgtgaaaagtgcagctgtgggtcctgcttttcag

SEQ ID NO: 8320 - DNA, 41 bp, Artificial Sequence
  Synthetic
ctgcataccttagtgcttttgggagaacgtatgctgcaagc

SEQ ID NO: 8321 - DNA, 39 bp, Artificial Sequence
  Synthetic
ggcaactctccaggttgtctgcatatcaacatcaaccgg

SEQ ID NO: 8322 - DNA, 40 bp, Artificial Sequence
  Synthetic
ctgcctgcgcacctctcatgggactcaaagtgagcacacg

SEQ ID NO: 8323 - DNA, 46 bp, Artificial Sequence
  Synthetic
tgtggctattcagacaggattatgcgcatttgctacatcttgagat

SEQ ID NO: 8324 - DNA, 40 bp, Artificial Sequence
  Synthetic
aactccaggatctgggcaattctaccagggtagtgcacaa

SEQ ID NO: 8325 - DNA, 43 bp, Artificial Sequence
  Synthetic
acaactttaattggggagattgcaaaactaaatcgcagactgc

SEQ ID NO: 8326 - DNA, 47 bp, Artificial Sequence
  Synthetic
tctcttgttgtaccatgggtgacatggagtatttattatctgcagtt

SEQ ID NO: 8327 - DNA, 47 bp, Artificial Sequence
  Synthetic
tggaaaatcacactacaggaaatggggttatttctgagtcaaacctg

SEQ ID NO: 8328 - DNA, 46 bp, Artificial Sequence
  Synthetic
ggacagccatttcctagattttcttttgtctccatcatatccatca

SEQ ID NO: 8329 - DNA, 50 bp, Artificial Sequence
  Synthetic
aggaacaaggcataactgattacatgttctttaacactatctacaaaacc

SEQ ID NO: 8330 - DNA, 48 bp, Artificial Sequence
  Synthetic
aaaagttttgcaaatggacccaattatttcttaagccatgaatcagac

SEQ ID NO: 8331 - DNA, 39 bp, Artificial Sequence
  Synthetic
ggtggtggatgtcatgtctgctatagctggtggtggtgg

SEQ ID NO: 8332 - DNA, 44 bp, Artificial Sequence
  Synthetic
aacgatttatgagtcaaaaggttggaatagttgtaccactcccg

SEQ ID NO: 8333 - DNA, 44 bp, Artificial Sequence
  Synthetic
tatgcgaaaaacttgattgttgtgtctctccaagtacctctcac

SEQ ID NO: 8334 - DNA, 50 bp, Artificial Sequence
  Synthetic
agatgatgaagttgatgcagaagagccacagttacttgattattgtacaa

SEQ ID NO: 8335 - DNA, 48 bp, Artificial Sequence
  Synthetic
acaggtaacaactagtggattttcatctctactctttgcactcttaaa

SEQ ID NO: 8336 - DNA, 44 bp, Artificial Sequence
  Synthetic
aaatgcgtaatatgtcaatggcagaccctctgttttacaacgat

SEQ ID NO: 8337 - DNA, 48 bp, Artificial Sequence
  Synthetic
agatgtaaaagcagaacaatcgttgtgttaggaaactgtatacattgt

SEQ ID NO: 8338 - DNA, 47 bp, Artificial Sequence
  Synthetic
atttggaggcttaaagacacaagtttaaaacagtattttggctctgt

SEQ ID NO: 8339 - DNA, 40 bp, Artificial Sequence
  Synthetic
aaccttcgacgacgacaaggagtccgtcgtttggctcctc

SEQ ID NO: 8340 - DNA, 43 bp, Artificial Sequence
  Synthetic
gaggagctatataaacaatgtgccagcccatgtatcaccttct

SEQ ID NO: 8341 - DNA, 45 bp, Artificial Sequence
  Synthetic
cagatgagtctgcagtactagatgtccacatctaaagcaaaccgt

SEQ ID NO: 8342 - DNA, 43 bp, Artificial Sequence
  Synthetic
accttcctattttacaaccgataccaattgtagctcgctcacc

SEQ ID NO: 8343 - DNA, 45 bp, Artificial Sequence
  Synthetic
ttcagatgacttttacttgcatcctacagccatctgcaaaaaatt

SEQ ID NO: 8344 - DNA, 44 bp, Artificial Sequence
  Synthetic
gaggacgatactggtgatcacatgaacacttgattctgtttagg

SEQ ID NO: 8345 - DNA, 38 bp, Artificial Sequence
  Synthetic
caacaccgagtggctcactgtctttgcaaccaaaacgg

SEQ ID NO: 8346 - DNA, 43 bp, Artificial Sequence
  Synthetic
ttctgggacgttgatttaacagagaaatcgtctgcccaaagac

SEQ ID NO: 8347 - DNA, 41 bp, Artificial Sequence
  Synthetic
ggctgcctgcccctctttgagcacacgagactcttcacacc

SEQ ID NO: 8348 - DNA, 39 bp, Artificial Sequence
  Synthetic
tactgtttgacaccatgggcgtgagttttcatgcgagcc

SEQ ID NO: 8349 - DNA, 50 bp, Artificial Sequence
  Synthetic
aggcttaaacaaattactatcgggacagtatagagtttagtgtatcttgt

SEQ ID NO: 8350 - DNA, 43 bp, Artificial Sequence
  Synthetic
accatcatgcattgggtaggtgaattttgtggcattacattgg

SEQ ID NO: 8351 - DNA, 50 bp, Artificial Sequence
  Synthetic
aacatcactatattcccacaccagcggtacacaattaatgtatggtacaa

SEQ ID NO: 8352 - DNA, 47 bp, Artificial Sequence
  Synthetic
tggatctcaacaatttctcacaactgacactaaagtctggtagaaga

SEQ ID NO: 8353 - DNA, 49 bp, Artificial Sequence
  Synthetic
actttgcaaattggtcaggtagtatctgtactaaagctatcacaaacac

SEQ ID NO: 8354 - DNA, 38 bp, Artificial Sequence
  Synthetic
ccaacccagtggtccacaacatggtggttgaagatgcc

SEQ ID NO: 8355 - DNA, 44 bp, Artificial Sequence
  Synthetic
tttgacatggaagttactgttgtcaccaggtggtacaaacatga

SEQ ID NO: 8356 - DNA, 46 bp, Artificial Sequence
  Synthetic
tgctgtgtatggtatcacatctacagtgtcttccatagctctgaag

SEQ ID NO: 8357 - DNA, 38 bp, Artificial Sequence
  Synthetic
aaactgcaggcccaagtgattaagtgcgcattcctgta

SEQ ID NO: 8358 - DNA, 45 bp, Artificial Sequence
  Synthetic
tggtatcagatagaggaaacctgttacaatgtccttcaccaatca

SEQ ID NO: 8359 - DNA, 47 bp, Artificial Sequence
  Synthetic
ggtttcactgacacacttaaagaccgccatttaactacctttgaagt

SEQ ID NO: 8360 - DNA, 38 bp, Artificial Sequence
  Synthetic
ccaagccgacaaggtgatggatgccaatccactcaagg

SEQ ID NO: 8361 - DNA, 41 bp, Artificial Sequence
  Synthetic
atggatgatctgggccaaaacgacaccatctgacagaacat

SEQ ID NO: 8362 - DNA, 44 bp, Artificial Sequence
  Synthetic
tcaagtaggcttgctagatactgcgtggtggcttactacagttc

SEQ ID NO: 8363 - DNA, 44 bp, Artificial Sequence
  Synthetic
agaccctaaagtcattcaatactgctcaattgagccatggactg

SEQ ID NO: 8364 - DNA, 44 bp, Artificial Sequence
  Synthetic
ccttgcaaggtcctgaacatggtaatgatatggcagtttcttct

SEQ ID NO: 8365 - DNA, 49 bp, Artificial Sequence
  Synthetic
atacatgtgggtggaaatggtaggtcagcaaaatatttcctaagtagtg

SEQ ID NO: 8366 - DNA, 43 bp, Artificial Sequence
  Synthetic
tgaatgagtacatagaaacagccggttctgggttgatgtcaag

SEQ ID NO: 8367 - DNA, 43 bp, Artificial Sequence
  Synthetic
actttcctaaaggatgaactccgctccacaatcctggtcttac

SEQ ID NO: 8368 - DNA, 42 bp, Artificial Sequence
  Synthetic
agatggagaactcattgcttttgacgctttaaaccacactgg

SEQ ID NO: 8369 - DNA, 44 bp, Artificial Sequence
  Synthetic
atgagtcaatcagatggactaaggaacaaacacaacgaatggac

SEQ ID NO: 8370 - DNA, 43 bp, Artificial Sequence
  Synthetic
aaccctgctctcagaatgaaatgttctcttgtctgctgtgatt

SEQ ID NO: 8371 - DNA, 48 bp, Artificial Sequence
  Synthetic
caagtacagtccattatccaaaggtcatgttttaacctttcaaccttc

SEQ ID NO: 8372 - DNA, 44 bp, Artificial Sequence
  Synthetic
gtaaaattgctcctttaatggtggcgaaatctggttttgcggac

SEQ ID NO: 8373 - DNA, 43 bp, Artificial Sequence
  Synthetic
ggcggagagcaacagctatccttactatcaactgaatcagcct

SEQ ID NO: 8374 - DNA, 46 bp, Artificial Sequence
  Synthetic
cacttccaaaaagatgcaaaagtgccatccccatgacattgtcaat

SEQ ID NO: 8375 - DNA, 41 bp, Artificial Sequence
  Synthetic
cagggaacagagaagttgacaatcaggaccgttgatttccc

SEQ ID NO: 8376 - DNA, 40 bp, Artificial Sequence
  Synthetic
ggaaacggccgattttcccacttacttgcaaccgcccaaa

SEQ ID NO: 8377 - DNA, 44 bp, Artificial Sequence
  Synthetic
ggtgtttatgttacacatcagctgaggcactcaagagtagtctc

SEQ ID NO: 8378 - DNA, 41 bp, Artificial Sequence
  Synthetic
atgattcttcaggctgacatagctaggtataggcggcagag

SEQ ID NO: 8379 - DNA, 43 bp, Artificial Sequence
  Synthetic
ggagacccaaatgcttcctgcttactgtaaataaagctgaagc

SEQ ID NO: 8380 - DNA, 39 bp, Artificial Sequence
  Synthetic
ccaggaactaggcgcagctgccttgcatgcgtcacacat

SEQ ID NO: 8381 - DNA, 48 bp, Artificial Sequence
  Synthetic
actggtttggaactcctctatctctttcaaattcctcgctataatcct

SEQ ID NO: 8382 - DNA, 41 bp, Artificial Sequence
  Synthetic
gcttttacagccagcagcgtcgcctccctcatttcttcctc

SEQ ID NO: 8383 - DNA, 41 bp, Artificial Sequence
  Synthetic
aacatgcctgctacatctcgggaggctgacttgtccagagt

SEQ ID NO: 8384 - DNA, 42 bp, Artificial Sequence
  Synthetic
ctgctcttccctagaaacgggcgtgcagccctttaccacatt

SEQ ID NO: 8385 - DNA, 40 bp, Artificial Sequence
  Synthetic
acgatgagaccaagtccagggtgctgcatcctggtgtgtc

SEQ ID NO: 8386 - DNA, 37 bp, Artificial Sequence
  Synthetic
gaccatgacctacgcgaccgttgtcatggcggctgcg

SEQ ID NO: 8387 - DNA, 40 bp, Artificial Sequence
  Synthetic
ggggtggaggtagcaccactcccctgctatgactggatca

SEQ ID NO: 8388 - DNA, 42 bp, Artificial Sequence
  Synthetic
ggaccaccaggacaatgtagccgcattcccttccaagttgca

SEQ ID NO: 8389 - DNA, 38 bp, Artificial Sequence
  Synthetic
gggccgtagatgaccccgagacggcagttgcatctcct

SEQ ID NO: 8390 - DNA, 39 bp, Artificial Sequence
  Synthetic
ttgggacgactgcgactgtaggaggacatgacgctggcc

SEQ ID NO: 8391 - DNA, 36 bp, Artificial Sequence
  Synthetic
tttgggcgcgagaaagaccgtgcgagaccgtctgcg

SEQ ID NO: 8392 - DNA, 41 bp, Artificial Sequence
  Synthetic
cgtccacgccaagacaaaggaggaccccctggtggaaaacg

SEQ ID NO: 8393 - DNA, 41 bp, Artificial Sequence
  Synthetic
ccctgccgcaatgctttttaggtgccaccaagcttgacaat

SEQ ID NO: 8394 - DNA, 37 bp, Artificial Sequence
  Synthetic
ccagcctcggttatgcagggactaacgagcccctgcg

SEQ ID NO: 8395 - DNA, 36 bp, Artificial Sequence
  Synthetic
acaactcatgcgagggtgccctttcgcgccgagcag

SEQ ID NO: 8396 - DNA, 38 bp, Artificial Sequence
  Synthetic
gaggtgtgcgtcagggcaaatgcgacgactcggacttt

SEQ ID NO: 8397 - DNA, 40 bp, Artificial Sequence
  Synthetic
aagctcctcgtaggtgaggtccttcaggagtgggcactgg

SEQ ID NO: 8398 - DNA, 42 bp, Artificial Sequence
  Synthetic
accagcatgaaggggacaagctgcggctctttgttacctacg

SEQ ID NO: 8399 - DNA, 38 bp, Artificial Sequence
  Synthetic
gccctggctggtggttttcatctccgtcctcgaggagc

SEQ ID NO: 8400 - DNA, 38 bp, Artificial Sequence
  Synthetic
gcgtcattgacggcggcctctaccaggacaactcgggc

SEQ ID NO: 8401 - DNA, 36 bp, Artificial Sequence
  Synthetic
cgcaggcgctgaaaaaggtagtgcgccgctggatca

SEQ ID NO: 8402 - DNA, 38 bp, Artificial Sequence
  Synthetic
cgggagacggtcgacgaagccaccgaaaccatgcgtcg

SEQ ID NO: 8403 - DNA, 42 bp, Artificial Sequence
  Synthetic
aggaaagcgtctagccaatcgccgcaattctaacagcgtcca

SEQ ID NO: 8404 - DNA, 39 bp, Artificial Sequence
  Synthetic
cgacgcgctcggcaaggattgttgacatggacgacttcc

SEQ ID NO: 8405 - DNA, 38 bp, Artificial Sequence
  Synthetic
gtagccgtagaggtagcgggactctggaaccgcgtccg

SEQ ID NO: 8406 - DNA, 37 bp, Artificial Sequence
  Synthetic
ggctaaagccgcgactaacgtggcggctatcgggctt

SEQ ID NO: 8407 - DNA, 37 bp, Artificial Sequence
  Synthetic
gcatcccgtcctgcgccaaatttgtacagcgccggcg

SEQ ID NO: 8408 - DNA, 35 bp, Artificial Sequence
  Synthetic
tgattgcgcgcgaggaggttgcacgatggcctccg

SEQ ID NO: 8409 - DNA, 36 bp, Artificial Sequence
  Synthetic
cgcatggcgctcaaggtgcacggccttgtggatgcg

SEQ ID NO: 8410 - DNA, 34 bp, Artificial Sequence
  Synthetic
taagggcggcgctgcaaagttgcatcgcggcctc

SEQ ID NO: 8411 - DNA, 37 bp, Artificial Sequence
  Synthetic
acgaacgtgcagtccaacctgtgaaccgctcgcgctg

SEQ ID NO: 8412 - DNA, 39 bp, Artificial Sequence
  Synthetic
cggtcaacggtgagcagcttggtgaagggtgcgatcagc

SEQ ID NO: 8413 - DNA, 37 bp, Artificial Sequence
  Synthetic
cactgtcggccgaggaagaaagccccctcctgcatca

SEQ ID NO: 8414 - DNA, 39 bp, Artificial Sequence
  Synthetic
ccgccagggttctacacgggcccacagaaacccgtcgtt

SEQ ID NO: 8415 - DNA, 37 bp, Artificial Sequence
  Synthetic
gcctggtgtgggacgacgatcccgcccaagtccaaca

SEQ ID NO: 8416 - DNA, 41 bp, Artificial Sequence
  Synthetic
accctggaggttccgtttgtgcaatgctgtttctgccctcc

SEQ ID NO: 8417 - DNA, 40 bp, Artificial Sequence
  Synthetic
gatgccgggggtctacacctacggctctcggtgaagtcca

SEQ ID NO: 8418 - DNA, 43 bp, Artificial Sequence
  Synthetic
gcaagaggagatagcagtgtcccaatctctagctccttctcag

SEQ ID NO: 8419 - DNA, 42 bp, Artificial Sequence
  Synthetic
tcagcaactaccccgtggttggggcgagatcgttgtaaaagc

SEQ ID NO: 8420 - DNA, 39 bp, Artificial Sequence
  Synthetic
cgcgtgctctccagtcgcatgttattgctgggcgagatg

SEQ ID NO: 8421 - DNA, 35 bp, Artificial Sequence
  Synthetic
aactacacccccgcccccttagtcgcgcgcgtcag

SEQ ID NO: 8422 - DNA, 37 bp, Artificial Sequence
  Synthetic
cgtgtactgggtgcgcgagatcagggacgaggaggac

SEQ ID NO: 8423 - DNA, 40 bp, Artificial Sequence
  Synthetic
cggcacggcggtggtgtttaatagctacgcttgctcctga

SEQ ID NO: 8424 - DNA, 37 bp, Artificial Sequence
  Synthetic
aaatggatgtggagcccgaggtccacggtctgcacgc

SEQ ID NO: 8425 - DNA, 40 bp, Artificial Sequence
  Synthetic
ccaggaggcgaagatggggctggaaggatgcaacacgtag

SEQ ID NO: 8426 - DNA, 36 bp, Artificial Sequence
  Synthetic
caggagaggcatggcaggcaggaacccgccactcag

SEQ ID NO: 8427 - DNA, 38 bp, Artificial Sequence
  Synthetic
gaacgggggcgccttcaatttaggtccggagcgttgag

SEQ ID NO: 8428 - DNA, 37 bp, Artificial Sequence
  Synthetic
cctgacgcggaggagacgaaagggcctcctcgtacga

SEQ ID NO: 8429 - DNA, 40 bp, Artificial Sequence
  Synthetic
gagcacgctgcacagtatcgtcttaatagcatcggcggcg

SEQ ID NO: 8430 - DNA, 39 bp, Artificial Sequence
  Synthetic
cacccacgatgtgaccacggagatccacgggcacaaagc

SEQ ID NO: 8431 - DNA, 43 bp, Artificial Sequence
  Synthetic
aagggtctgcaaattggtgttgttcgtttgcatagataggctc

SEQ ID NO: 8432 - DNA, 39 bp, Artificial Sequence
  Synthetic
gaactctgcggtggacagttttccacaccgtgattctca

SEQ ID NO: 8433 - DNA, 42 bp, Artificial Sequence
  Synthetic
cctacgagtacatgaacgggcgcgccaatgttaacgtaagcg

SEQ ID NO: 8434 - DNA, 35 bp, Artificial Sequence
  Synthetic
gcgcctccgtccgctttgatgtgcgccatggggaa

SEQ ID NO: 8435 - DNA, 40 bp, Artificial Sequence
  Synthetic
aacgtggcccaatgcaacatggccctggtagccaatgttg

SEQ ID NO: 8436 - DNA, 35 bp, Artificial Sequence
  Synthetic
cagccctaccccgccaacttgggtgacggagggca

SEQ ID NO: 8437 - DNA, 35 bp, Artificial Sequence
  Synthetic
ggcaacgccaccacctaagctcgcgcacaatggcc

SEQ ID NO: 8438 - DNA, 40 bp, Artificial Sequence
  Synthetic
ttcgagtacgaggccatgttgctgctcgaggctgagacag

SEQ ID NO: 8439 - DNA, 38 bp, Artificial Sequence
  Synthetic
tccggcgcaaccaggaggaagcgaaagtagggggagtg

SEQ ID NO: 8440 - DNA, 38 bp, Artificial Sequence
  Synthetic
gtctcgctccacatgcgccgcggtcccaactgcgattt

SEQ ID NO: 8441 - DNA, 40 bp, Artificial Sequence
  Synthetic
ctgcttaaaagcttgctgggccttagcgggaaaagctgcg

SEQ ID NO: 8442 - DNA, 35 bp, Artificial Sequence
  Synthetic
tggccttccacctcggcaaactgggagtgcaccgg

SEQ ID NO: 8443 - DNA, 40 bp, Artificial Sequence
  Synthetic
tggtatccatgcccttctcccatctgaacgtgtgcaaccc

SEQ ID NO: 8444 - DNA, 36 bp, Artificial Sequence
  Synthetic
ccggagcccacccgctgataaaaggagcccctcgcc

SEQ ID NO: 8445 - DNA, 41 bp, Artificial Sequence
  Synthetic
acagaaggaaaccaacgctgggagcagcacatcctcctgtc

SEQ ID NO: 8446 - DNA, 40 bp, Artificial Sequence
  Synthetic
ctcacccattttgcctaccccggatccatgatgcgacgca

SEQ ID NO: 8447 - DNA, 39 bp, Artificial Sequence
  Synthetic
cgtggagctaaccaacctggtcagcacagtctgccccag

SEQ ID NO: 8448 - DNA, 39 bp, Artificial Sequence
  Synthetic
gccttggacctggccgaaatctcataaagtcgggcagcc

SEQ ID NO: 8449 - DNA, 35 bp, Artificial Sequence
  Synthetic
gccactgccgctgcaacctggagctgggggttgca

SEQ ID NO: 8450 - DNA, 40 bp, Artificial Sequence
  Synthetic
ctcgcccaattgcacgccatccaggtagacccctttaccc

SEQ ID NO: 8451 - DNA, 40 bp, Artificial Sequence
  Synthetic
gggatcgagtaaagggtgacggtgtgggccctccatgatc

SEQ ID NO: 8452 - DNA, 40 bp, Artificial Sequence
  Synthetic
aaatcggtctctgcgctcgcgctgcagctgatcttcgttt

SEQ ID NO: 8453 - DNA, 40 bp, Artificial Sequence
  Synthetic
gtccgcccagacccgacttaagttgtatgcctttgcctcg

SEQ ID NO: 8454 - DNA, 40 bp, Artificial Sequence
  Synthetic
taccccgacgagttcataccgattcagtcgtagccgtcga

SEQ ID NO: 8455 - DNA, 41 bp, Artificial Sequence
  Synthetic
atccagtgtcgtcataatcgcaaaagttcacctgttcctgg

SEQ ID NO: 8456 - DNA, 44 bp, Artificial Sequence
  Synthetic
ggggtgtactgtcatgccactactgtacatataacactcctctc

SEQ ID NO: 8457 - DNA, 42 bp, Artificial Sequence
  Synthetic
ctgctggtaggggctctaatgagcaatttttccttctgctca

SEQ ID NO: 8458 - DNA, 48 bp, Artificial Sequence
  Synthetic
taatgctgacaagtctcatgaaaggtctacttttcccttactgtcatg

SEQ ID NO: 8459 - DNA, 43 bp, Artificial Sequence
  Synthetic
atcaacaaataaccttcagccaacattgccatttggaggtcca

SEQ ID NO: 8460 - DNA, 43 bp, Artificial Sequence
  Synthetic
acaagttgcagaaactgatcaaaacatcactcccaccacgatt

SEQ ID NO: 8461 - DNA, 42 bp, Artificial Sequence
  Synthetic
ttgctgcaaagccagaaaaaaatcggctgaggattcccgatt

SEQ ID NO: 8462 - DNA, 42 bp, Artificial Sequence
  Synthetic
tcctgcagcttatcgactggtgtgtattcgggactgtggtga

SEQ ID NO: 8463 - DNA, 38 bp, Artificial Sequence
  Synthetic
ctggaactctgttggggcataactgatttctgcgggga

SEQ ID NO: 8464 - DNA, 41 bp, Artificial Sequence
  Synthetic
cgaaaccagcggctgtatccagcaaagggtcttaaggaggg

SEQ ID NO: 8465 - DNA, 46 bp, Artificial Sequence
  Synthetic
tggaaatgtctcactcaaggttggcaaaggtggttcagtattaact

SEQ ID NO: 8466 - DNA, 44 bp, Artificial Sequence
  Synthetic
agaagataaacgcaccctatggaatcctgatcaattctgcaatt

SEQ ID NO: 8467 - DNA, 41 bp, Artificial Sequence
  Synthetic
ggaaagccacatcaaccagcgtattcacatccagtttcctg

SEQ ID NO: 8468 - DNA, 38 bp, Artificial Sequence
  Synthetic
gtgcgggaactggacttgggaatcaccgacccccgttt

SEQ ID NO: 8469 - DNA, 42 bp, Artificial Sequence
  Synthetic
atgttgggaatgatggaacccacagtgtgtttataaggggca

SEQ ID NO: 8470 - DNA, 45 bp, Artificial Sequence
  Synthetic
tggaaactcttgcagcaggggcagattatcataatgtaagttctg

SEQ ID NO: 8471 - DNA, 40 bp, Artificial Sequence
  Synthetic
gcggaggcaggattggaagaacctgcgtgacttgcacttt

SEQ ID NO: 8472 - DNA, 42 bp, Artificial Sequence
  Synthetic
tccgcacatgtggaaaagctgtttctattatgaaggtttgcc

SEQ ID NO: 8473 - DNA, 45 bp, Artificial Sequence
  Synthetic
atcctgtaaatacgtcactaggacctctactaaccatgcttcagc

SEQ ID NO: 8474 - DNA, 40 bp, Artificial Sequence
  Synthetic
actgggttagtatgcccgtgtgtactcgttcctactggat

SEQ ID NO: 8475 - DNA, 41 bp, Artificial Sequence
  Synthetic
aatgacggaaggtgtaaaaacccggaagtgtgtttgcgaaa

SEQ ID NO: 8476 - DNA, 42 bp, Artificial Sequence
  Synthetic
agtctggcggaggagcaattatagggcctaatgtgaagacag

SEQ ID NO: 8477 - DNA, 49 bp, Artificial Sequence
  Synthetic
agttcaagtttggatagtgttggtgcttctaatctattgaagaatcctt

SEQ ID NO: 8478 - DNA, 42 bp, Artificial Sequence
  Synthetic
caatgggcgttgctgtggtaccatgtccaaatatgttcttcc

SEQ ID NO: 8479 - DNA, 43 bp, Artificial Sequence
  Synthetic
aatgacagcaatgaaagatggatgatcttctgcaccacgaatc

SEQ ID NO: 8480 - DNA, 44 bp, Artificial Sequence
  Synthetic
tgatgatgctacagcggctgcttctattgtccaagtatcctgtt

SEQ ID NO: 8481 - DNA, 39 bp, Artificial Sequence
  Synthetic
acagaagctggctccatggtatatcgtcggctttgcatg

SEQ ID NO: 8482 - DNA, 42 bp, Artificial Sequence
  Synthetic
aaggtatacacagggcctctagtgcccatattctcaggtaga

SEQ ID NO: 8483 - DNA, 38 bp, Artificial Sequence
  Synthetic
tccagagcttgaagatgccgttacgcttgatggtcgtc

SEQ ID NO: 8484 - DNA, 44 bp, Artificial Sequence
  Synthetic
cactccaaagaacaaccacaacctggactttttgtgttgttgtt

SEQ ID NO: 8485 - DNA, 43 bp, Artificial Sequence
  Synthetic
aaagacaaggtttgacccctctctctcttatcaagtcaggctt

SEQ ID NO: 8486 - DNA, 45 bp, Artificial Sequence
  Synthetic
cctctcaaaacaggtcctgacaatctcctaccttgactattctga

SEQ ID NO: 8487 - DNA, 44 bp, Artificial Sequence
  Synthetic
tctactaccatggtccagccgctagagctactttattggcatta

SEQ ID NO: 8488 - DNA, 43 bp, Artificial Sequence
  Synthetic
tatcagtgaatctgctggttacactaacggggaggattccttt

SEQ ID NO: 8489 - DNA, 43 bp, Artificial Sequence
  Synthetic
ccacatatgaatctagtcatctgggttggaacacagcatcgac

SEQ ID NO: 8490 - DNA, 48 bp, Artificial Sequence
  Synthetic
aagcagagagaaaaacaacaacacattgcttttgttcttgtttgtgat

SEQ ID NO: 8491 - DNA, 42 bp, Artificial Sequence
  Synthetic
tgtcattggtaccatagcactaggtcagctaatgcaatgccc

SEQ ID NO: 8492 - DNA, 50 bp, Artificial Sequence
  Synthetic
aagggaactgtgatagatgttgattcctggtatttctgataaaattggta

SEQ ID NO: 8493 - DNA, 46 bp, Artificial Sequence
  Synthetic
ttgacctataccaattgcggtttcccttttattggcatatagttct

SEQ ID NO: 8494 - DNA, 46 bp, Artificial Sequence
  Synthetic
aacctataaggcaacagcatccccaatatgaactatttgttttccc

SEQ ID NO: 8495 - DNA, 50 bp, Artificial Sequence
  Synthetic
tctcattattacctggaccaagtctgataatgaaggtagtctaacacatc

SEQ ID NO: 8496 - DNA, 43 bp, Artificial Sequence
  Synthetic
acaaggggttatcagttatgctccccttcactcgagtagtctg

SEQ ID NO: 8497 - DNA, 43 bp, Artificial Sequence
  Synthetic
gtggcttaacaactccgctctgattaacattggtacatctgtt

SEQ ID NO: 8498 - DNA, 43 bp, Artificial Sequence
  Synthetic
ccaacctgcaaataggatcattagagacaggacttcatgaggc

SEQ ID NO: 8499 - DNA, 50 bp, Artificial Sequence
  Synthetic
tcaacatgctaagactcaagaatgtgagtgatacatgatgtagtagtgta

SEQ ID NO: 8500 - DNA, 49 bp, Artificial Sequence
  Synthetic
agagttactcagactggatatcccatcagagactgaaaaaatggatctt

SEQ ID NO: 8501 - DNA, 49 bp, Artificial Sequence
  Synthetic
gaattatgggagcttatcgactcttagtgataaaggttctagtagtgat

SEQ ID NO: 8502 - DNA, 45 bp, Artificial Sequence
  Synthetic
tggtaaagggagaaattgacctactatcttggaacacctgagaca

SEQ ID NO: 8503 - DNA, 44 bp, Artificial Sequence
  Synthetic
gtgacatccagagttcctgtcagtgatttcttcatagacgtgag

SEQ ID NO: 8504 - DNA, 46 bp, Artificial Sequence
  Synthetic
ttgtcagaaatataggtgatccagcacctgctttgatgaatctctt

SEQ ID NO: 8505 - DNA, 45 bp, Artificial Sequence
  Synthetic
agaaactccagacccgttagaatttacatatttctgagccttcaa

SEQ ID NO: 8506 - DNA, 46 bp, Artificial Sequence
  Synthetic
ttgaagttactcacccctgtatcggtagcagtatctctcaatctgt

SEQ ID NO: 8507 - DNA, 46 bp, Artificial Sequence
  Synthetic
aaagacacatcacatgcagtccccagaatcgtttgaatattttagg

SEQ ID NO: 8508 - DNA, 43 bp, Artificial Sequence
  Synthetic
ctgctgaggttcaacacaatatacccccttaacccccagaagg

SEQ ID NO: 8509 - DNA, 39 bp, Artificial Sequence
  Synthetic
atctcggagaaggtgcaggtgttcatgcagggtcctaat

SEQ ID NO: 8510 - DNA, 41 bp, Artificial Sequence
  Synthetic
ccatacagccatgggacaggattgatgtgttctgttgactg

SEQ ID NO: 8511 - DNA, 39 bp, Artificial Sequence
  Synthetic
gtcgtcagacctatgactggatatagtgttggctagcgc

SEQ ID NO: 8512 - DNA, 50 bp, Artificial Sequence
  Synthetic
aaatggtcacacaacgaacaataggttatcagatagcttctcttgttcaa

SEQ ID NO: 8513 - DNA, 46 bp, Artificial Sequence
  Synthetic
atgactaattcacaagacacagagcctcattccatttggtgttgtc

SEQ ID NO: 8514 - DNA, 45 bp, Artificial Sequence
  Synthetic
gcatgaagctccgaacacaaggttgattcattaaagtatttcagg

SEQ ID NO: 8515 - DNA, 40 bp, Artificial Sequence
  Synthetic
ccaatcctctgatgacttcgccctgcttgtattccctcat

SEQ ID NO: 8516 - DNA, 40 bp, Artificial Sequence
  Synthetic
atgagcattggggtaacagtgagttgaagagccatttggg

SEQ ID NO: 8517 - DNA, 45 bp, Artificial Sequence
  Synthetic
gtaatcccctgaatccatttgtcacattaccacagcattgtttac

SEQ ID NO: 8518 - DNA, 38 bp, Artificial Sequence
  Synthetic
tcgtacaggagaccagttggaatccgagccctagacac

SEQ ID NO: 8519 - DNA, 44 bp, Artificial Sequence
  Synthetic
aggactacgaggtggactttgagcaattcttctgttgttaattc

SEQ ID NO: 8520 - DNA, 40 bp, Artificial Sequence
  Synthetic
atacggtgccatgcatgcagcgcctgtacctgatgctcct

SEQ ID NO: 8521 - DNA, 40 bp, Artificial Sequence
  Synthetic
ttgttgaacaagcacagcaggctgcaccaccagcctaact

SEQ ID NO: 8522 - DNA, 43 bp, Artificial Sequence
  Synthetic
agtgataagtcaatatgtggggacttttacagcctctgccaca

SEQ ID NO: 8523 - DNA, 40 bp, Artificial Sequence
  Synthetic
ccaccaaagattagaagcgcacgtttcgccatacacctcg

SEQ ID NO: 8524 - DNA, 44 bp, Artificial Sequence
  Synthetic
ccttcttggccagtaactgccatgcttacacattgtaattgcat

SEQ ID NO: 8525 - DNA, 44 bp, Artificial Sequence
  Synthetic
tgagcctactaaattttctgggaggaccaaaaatggctgcttga

SEQ ID NO: 8526 - DNA, 42 bp, Artificial Sequence
  Synthetic
gcaacaagcttgaggaccaaataacattgcattttccaaacg

SEQ ID NO: 8527 - DNA, 42 bp, Artificial Sequence
  Synthetic
tgtggaatacgcagccacaacaaatttaactgttagtctgcg

SEQ ID NO: 8528 - DNA, 43 bp, Artificial Sequence
  Synthetic
acatgcaagtgttgtggtatatggacatatgagcagcagtgta

SEQ ID NO: 8529 - DNA, 40 bp, Artificial Sequence
  Synthetic
gtggatattggccctgtgtccctagagggatcggcagcac

SEQ ID NO: 8530 - DNA, 40 bp, Artificial Sequence
  Synthetic
accttgccggccatgtcatttgtgcattgggatttcctca

SEQ ID NO: 8531 - DNA, 42 bp, Artificial Sequence
  Synthetic
atgctgaccctgaggtgttggagccctgtactgtaagtgtgg

SEQ ID NO: 8532 - DNA, 41 bp, Artificial Sequence
  Synthetic
cgtcgtaaacgtgtaccctattctataccttgccgtcacca

SEQ ID NO: 8533 - DNA, 40 bp, Artificial Sequence
  Synthetic
tatccccaaggtgtctggctattagggtcaggaagctgta

SEQ ID NO: 8534 - DNA, 43 bp, Artificial Sequence
  Synthetic
gtttacgcagggaacaaatgttttaataagagtcaggcagtgc

SEQ ID NO: 8535 - DNA, 43 bp, Artificial Sequence
  Synthetic
aattgtttgtaaccgttgtggatacgggggatgtagcagtaca

SEQ ID NO: 8536 - DNA, 41 bp, Artificial Sequence
  Synthetic
gcccaaggaggatcgctatggtggaaaacttgtctcgtaaa

SEQ ID NO: 8537 - DNA, 43 bp, Artificial Sequence
  Synthetic
gttgttttgtattgtgctgtactggtcatacaaaccaggcacc

SEQ ID NO: 8538 - DNA, 42 bp, Artificial Sequence
  Synthetic
gttccttgtgttcgggtagccacaacaaaaaaggcgggagac

SEQ ID NO: 8539 - DNA, 44 bp, Artificial Sequence
  Synthetic
tttgtgctgactactttcccttaaagtttcctggctagaaaagt

SEQ ID NO: 8540 - DNA, 41 bp, Artificial Sequence
  Synthetic
aacatgtttacaaggtgggacgtgggtttggacaggacttt

SEQ ID NO: 8541 - DNA, 40 bp, Artificial Sequence
  Synthetic
acctccaacaaagcctgaagaggctgttcacagttggtat

SEQ ID NO: 8542 - DNA, 37 bp, Artificial Sequence
  Synthetic
aacctgactcacgctcagggcatgggggatgcggagg

SEQ ID NO: 8543 - DNA, 38 bp, Artificial Sequence
  Synthetic
cgaccgcgccattccattggtaggggccaatgggaggc

SEQ ID NO: 8544 - DNA, 41 bp, Artificial Sequence
  Synthetic
atcacccgaaaactagaggacattgactttcaaacaacccg

SEQ ID NO: 8545 - DNA, 42 bp, Artificial Sequence
  Synthetic
agttggcctaactcaccaaaaacttctaagtaagcgccccaa

SEQ ID NO: 8546 - DNA, 35 bp, Artificial Sequence
  Synthetic
tgcgtggtctccggtgcctacccgctgaacccacc

SEQ ID NO: 8547 - DNA, 38 bp, Artificial Sequence
  Synthetic
tgggtgggtgtacgtaggttccattcagcggccccgtg

SEQ ID NO: 8548 - DNA, 41 bp, Artificial Sequence
  Synthetic
gagatgctgctgtgtgaggcagccccaccttatcgttcaag

SEQ ID NO: 8549 - DNA, 40 bp, Artificial Sequence
  Synthetic
tggaagcctgctcagggatttcccgccttctgccatggta

SEQ ID NO: 8550 - DNA, 38 bp, Artificial Sequence
  Synthetic
acgtgggctgggcggatctgccccccttggtagatgtt

SEQ ID NO: 8551 - DNA, 40 bp, Artificial Sequence
  Synthetic
tctcccggattcactgccatctgtttcgggcgaacgtgag

SEQ ID NO: 8552 - DNA, 42 bp, Artificial Sequence
  Synthetic
ctcttcgcctacgcacaagtggctacggatcatgctctcacc

SEQ ID NO: 8553 - DNA, 37 bp, Artificial Sequence
  Synthetic
accagtgtcgccagtgcctcaggagaacgcattcggc

SEQ ID NO: 8554 - DNA, 39 bp, Artificial Sequence
  Synthetic
ccgagctcgggactctggtacccgttcccttttcagcgc

SEQ ID NO: 8555 - DNA, 40 bp, Artificial Sequence
  Synthetic
actggatgtgggcaaaggatgtacttatggcagcctttgt

SEQ ID NO: 8556 - DNA, 36 bp, Artificial Sequence
  Synthetic
tggcgatctgggagttggcggtccggacggccttga

SEQ ID NO: 8557 - DNA, 40 bp, Artificial Sequence
  Synthetic
tagaggctgccgatgcctgaggtcacatctcacgcatacg

SEQ ID NO: 8558 - DNA, 37 bp, Artificial Sequence
  Synthetic
atgggagaggcaccactctgtatacccccacacggcg

SEQ ID NO: 8559 - DNA, 36 bp, Artificial Sequence
  Synthetic
gcaatgccagcgcggggtatgcaggagtggacgctg

SEQ ID NO: 8560 - DNA, 39 bp, Artificial Sequence
  Synthetic
tcgggcgaagagcttccggcgttgaatctctacacggca

SEQ ID NO: 8561 - DNA, 37 bp, Artificial Sequence
  Synthetic
cggacagtgtcgcgctgcacgctggcaattgacctgc

SEQ ID NO: 8562 - DNA, 35 bp, Artificial Sequence
  Synthetic
gcgctgggcggttgaggttggctcctcagggtgct

SEQ ID NO: 8563 - DNA, 39 bp, Artificial Sequence
  Synthetic
ccctggctgaactcaccgacagcccccagttggattccg

SEQ ID NO: 8564 - DNA, 38 bp, Artificial Sequence
  Synthetic
ggccaccatcccgtgacaggcgtccccgtggatacctg

SEQ ID NO: 8565 - DNA, 40 bp, Artificial Sequence
  Synthetic
ggtatccacacggagcaggcccgctattacaatgttggcg

SEQ ID NO: 8566 - DNA, 39 bp, Artificial Sequence
  Synthetic
ctccagcggcccaaagggacggaattggagtctccggat

SEQ ID NO: 8567 - DNA, 39 bp, Artificial Sequence
  Synthetic
accagccaccagacgagcacggactggtccatgtgttcc

SEQ ID NO: 8568 - DNA, 40 bp, Artificial Sequence
  Synthetic
cggttgaaggagcccacgttattccaagcaggggtttagc

SEQ ID NO: 8569 - DNA, 41 bp, Artificial Sequence
  Synthetic
cgtcgcctataccgcatctgcgctttggagaacccctttgg

SEQ ID NO: 8570 - DNA, 38 bp, Artificial Sequence
  Synthetic
agagacacaagcccccccggggcgccattactcgaatg

SEQ ID NO: 8571 - DNA, 36 bp, Artificial Sequence
  Synthetic
cgcaccgtagcccgcgaaatgcagtgtcccaacccg

SEQ ID NO: 8572 - DNA, 36 bp, Artificial Sequence
  Synthetic
gcagcactacgtggcgggaacgccatgcttgggtca

SEQ ID NO: 8573 - DNA, 39 bp, Artificial Sequence
  Synthetic
aaaagctcagggcatccgcgcagtcgaacagggtgttgg

SEQ ID NO: 8574 - DNA, 41 bp, Artificial Sequence
  Synthetic
atcctgctgctcctgctcatccgagcagcagcaggatgagc

SEQ ID NO: 8575 - DNA, 42 bp, Artificial Sequence
  Synthetic
cggtggaggtaaaggtgttgcgagtcctactttaccggtggc

SEQ ID NO: 8576 - DNA, 42 bp, Artificial Sequence
  Synthetic
gtgtacctggggcacctcaaccaacccgctcgaacttatggt

SEQ ID NO: 8577 - DNA, 42 bp, Artificial Sequence
  Synthetic
atctggatcccttgacctcggctggaggtccttcccttcaac

SEQ ID NO: 8578 - DNA, 36 bp, Artificial Sequence
  Synthetic
ttccttgcaggcgaagaggctaactggcgccgtggc

SEQ ID NO: 8579 - DNA, 35 bp, Artificial Sequence
  Synthetic
gacgagtgcagcaccaggtaacaggctggcgtggg

SEQ ID NO: 8580 - DNA, 34 bp, Artificial Sequence
  Synthetic
accgcgttgtcggagctgtgagcccacggacgga

SEQ ID NO: 8581 - DNA, 43 bp, Artificial Sequence
  Synthetic
agctagaggatttgcgattgctatatgtcagcctctgataacg

SEQ ID NO: 8582 - DNA, 38 bp, Artificial Sequence
  Synthetic
agacgctgactctagtgtgccctcctcctcggtcccgt

SEQ ID NO: 8583 - DNA, 40 bp, Artificial Sequence
  Synthetic
ccggtggaggatcaggaggacctgactgtggagtgtgtac

SEQ ID NO: 8584 - DNA, 48 bp, Artificial Sequence
  Synthetic
atggattgttagacagacgttggtaggtcatatgcatactgtaccata

SEQ ID NO: 8585 - DNA, 41 bp, Artificial Sequence
  Synthetic
agtgttctatggacctgcagactaggaactgcaacaagctc

SEQ ID NO: 8586 - DNA, 48 bp, Artificial Sequence
  Synthetic
gaggaggacagatggaaatatttgcgcaaaaggaaatggattcttaaa

SEQ ID NO: 8587 - DNA, 41 bp, Artificial Sequence
  Synthetic
aggccatagaggtacagctggccatgcctccgtgctatagg

SEQ ID NO: 8588 - DNA, 37 bp, Artificial Sequence
  Synthetic
gtatccccagtcccagccccacaacgcttgggtgggc

SEQ ID NO: 8589 - DNA, 47 bp, Artificial Sequence
  Synthetic
gatagcattgccagggtatatgtcttgaaatgtattggaccatatgt

SEQ ID NO: 8590 - DNA, 42 bp, Artificial Sequence
  Synthetic
cacacctaacacccccacttgcagcaaatacaaaaaaaacac

SEQ ID NO: 8591 - DNA, 42 bp, Artificial Sequence
  Synthetic
gccgtcttggatatcacccccttggctcagtgtatagtgggt

SEQ ID NO: 8592 - DNA, 38 bp, Artificial Sequence
  Synthetic
ttgatgagttacccgccgcctagatgcggaggtggcag

SEQ ID NO: 8593 - DNA, 40 bp, Artificial Sequence
  Synthetic
atgtctatgtcacgcggactaacccacagtgagaagccta

SEQ ID NO: 8594 - DNA, 43 bp, Artificial Sequence
  Synthetic
atcctgattatctgaagatggctgcatttgttccctacgcagc

SEQ ID NO: 8595 - DNA, 40 bp, Artificial Sequence
  Synthetic
atggatccccagttgttagaggctgtaaactggcagacgg

SEQ ID NO: 8596 - DNA, 38 bp, Artificial Sequence
  Synthetic
cttgtgtgtagcccccagttttaagctgggttggcaac

SEQ ID NO: 8597 - DNA, 47 bp, Artificial Sequence
  Synthetic
ccttcaattggcagatctaaaacgaggactcaaagctaatactgaat

SEQ ID NO: 8598 - DNA, 43 bp, Artificial Sequence
  Synthetic
gccagggtgtgtaaggagttccaaatgattctttaaactttgc

SEQ ID NO: 8599 - DNA, 42 bp, Artificial Sequence
  Synthetic
tgcatgttggcagttcatggaactgaaatgtcattaccatct

SEQ ID NO: 8600 - DNA, 46 bp, Artificial Sequence
  Synthetic
agcaaaacaagctataatgatggccttttctctgccaaattcagaa

SEQ ID NO: 8601 - DNA, 41 bp, Artificial Sequence
  Synthetic
gacgagggggaagtcgaaggaccgatatctgcgttttccgt

SEQ ID NO: 8602 - DNA, 38 bp, Artificial Sequence
  Synthetic
tggcatagggacaggcaaagcacttccacctcccaaag

SEQ ID NO: 8603 - DNA, 44 bp, Artificial Sequence
  Synthetic
gtagtggtagtaatactcctgcagtgctgcacttctagtactgc

SEQ ID NO: 8604 - DNA, 47 bp, Artificial Sequence
  Synthetic
aactagaaagaccaaggttctctgatagttcctaatctgctaagcct

SEQ ID NO: 8605 - DNA, 46 bp, Artificial Sequence
  Synthetic
attaccagcaataataacaccaggctcattggaagcaaaatcatct

SEQ ID NO: 8606 - DNA, 44 bp, Artificial Sequence
  Synthetic
gtagtgatcgccttctaacagttgagccttagtcctactgtcag

SEQ ID NO: 8607 - DNA, 47 bp, Artificial Sequence
  Synthetic
tttcagggtagtactgatagcagactactattaaaagctgggtttgt

SEQ ID NO: 8608 - DNA, 44 bp, Artificial Sequence
  Synthetic
gtttacagcacgataggtcctcatcaaaatatcaggccacttac

SEQ ID NO: 8609 - DNA, 45 bp, Artificial Sequence
  Synthetic
gtttactttcctactcctagtggctgtaagggcgatttaggatca

SEQ ID NO: 8610 - DNA, 50 bp, Artificial Sequence
  Synthetic
attgtctcagacatctcttggaaggggttattcctttgtttaacaatcct

SEQ ID NO: 8611 - DNA, 40 bp, Artificial Sequence
  Synthetic
gtgtgttactgactcacagggtcaaaagcagggtggagtg

SEQ ID NO: 8612 - DNA, 45 bp, Artificial Sequence
  Synthetic
ggatactttagagcgccttgtacagggagaattacccctcattct

SEQ ID NO: 8613 - DNA, 45 bp, Artificial Sequence
  Synthetic
tagacgatgatgtggatgaagttgattcacagtcctcagttaact

SEQ ID NO: 8614 - DNA, 39 bp, Artificial Sequence
  Synthetic
gagccgagctctgaaaccaagtaaaagcaagcgacatgc

SEQ ID NO: 8615 - DNA, 48 bp, Artificial Sequence
  Synthetic
agcagactcatttgatctatcacaatctgaatcttctgtaaatccatt

SEQ ID NO: 8616 - DNA, 41 bp, Artificial Sequence
  Synthetic
actgctgcagaagttggaagcatgtaagtcgcgagagaccc

SEQ ID NO: 8617 - DNA, 44 bp, Artificial Sequence
  Synthetic
aaaagggtgtacgtattgctttggacgtcttttattggcttgca

SEQ ID NO: 8618 - DNA, 38 bp, Artificial Sequence
  Synthetic
tgggcttggcattggaacagctacagtgccacctagtg

SEQ ID NO: 8619 - DNA, 39 bp, Artificial Sequence
  Synthetic
tatcagaggtcacaggggttggctatcagcagtaccacc

SEQ ID NO: 8620 - DNA, 48 bp, Artificial Sequence
  Synthetic
actcatgtgggttatacagaagacatcttctaattcaaattcactcct

SEQ ID NO: 8621 - DNA, 47 bp, Artificial Sequence
  Synthetic
atgatttggcagagattggggaggcctatttaaaattcttacatcag

SEQ ID NO: 8622 - DNA, 49 bp, Artificial Sequence
  Synthetic
cctgatggagttctggtagatgaccgttttctttttcgagaatacaaac

SEQ ID NO: 8623 - DNA, 48 bp, Artificial Sequence
  Synthetic
ttaagcacagaccaaaataccgtttctaaataccctgaattgattacc

SEQ ID NO: 8624 - DNA, 47 bp, Artificial Sequence
  Synthetic
atggattaatcagtgaccaaaaggacaattgattttgtttgggatca

SEQ ID NO: 8625 - DNA, 41 bp, Artificial Sequence
  Synthetic
ttgactagcagcgaatcaaacatatttgcaccctgagctct

SEQ ID NO: 8626 - DNA, 44 bp, Artificial Sequence
  Synthetic
tctgcatttttgttaccccaccgatatgttttgaagtgccaaat

SEQ ID NO: 8627 - DNA, 50 bp, Artificial Sequence
  Synthetic
atcactatatgtgtcagcctcattggatgaaaattttagcaatacatccg

SEQ ID NO: 8628 - DNA, 44 bp, Artificial Sequence
  Synthetic
actcagctcccttgataataagagaagcaaagtgtctgcattct

SEQ ID NO: 8629 - DNA, 49 bp, Artificial Sequence
  Synthetic
aatggacatatatcggagttgatgggcttctccatattttattttgacc

SEQ ID NO: 8630 - DNA, 39 bp, Artificial Sequence
  Synthetic
cactgaagagtgcacatgcggtctctacaggcacattct

SEQ ID NO: 8631 - DNA, 40 bp, Artificial Sequence
  Synthetic
ggcatcaaaggaggattcgtcctcgttcgggagtaccatc

SEQ ID NO: 8632 - DNA, 41 bp, Artificial Sequence
  Synthetic
acagccatttactgtttgatgggtatcaacgcctgtgacag

SEQ ID NO: 8633 - DNA, 47 bp, Artificial Sequence
  Synthetic
aacagatatacatgtaaccgcttgctcctgtctgtattctttccaag

SEQ ID NO: 8634 - DNA, 39 bp, Artificial Sequence
  Synthetic
attgacctgcaatgctacgaggcctccaactcttgttca

SEQ ID NO: 8635 - DNA, 41 bp, Artificial Sequence
  Synthetic
gtgtcgtgaagaaattcggaatgtcgctacacccttctttg

SEQ ID NO: 8636 - DNA, 45 bp, Artificial Sequence
  Synthetic
cggagcaagtacaaaagttaaaacggtgggctaagttgttgaact

SEQ ID NO: 8637 - DNA, 45 bp, Artificial Sequence
  Synthetic
acaatgggcctatgatagcgatcactatttgccattttagcataa

SEQ ID NO: 8638 - DNA, 41 bp, Artificial Sequence
  Synthetic
aattagagctcagtgacccagaattgaaacgagcgttgagt

SEQ ID NO: 8639 - DNA, 42 bp, Artificial Sequence
  Synthetic
tggcagtatctgaaaccaaagcggagacttttgcaagctttg

SEQ ID NO: 8640 - DNA, 41 bp, Artificial Sequence
  Synthetic
gttaccttcgctgatgatgctggttgttaatgcggacttca

SEQ ID NO: 8641 - DNA, 37 bp, Artificial Sequence
  Synthetic
caccagcaccacagcaaccactgtggctgtggctgtg

SEQ ID NO: 8642 - DNA, 41 bp, Artificial Sequence
  Synthetic
caacctccagagattccagccctacttctccctcccctccc

SEQ ID NO: 8643 - DNA, 47 bp, Artificial Sequence
  Synthetic
gatcctccagtaatacttttgcgacgcttcttatctctgtatctgta

SEQ ID NO: 8644 - DNA, 42 bp, Artificial Sequence
  Synthetic
tagaggaacctacaccaccaagctacagcttgtgtgatgttg

SEQ ID NO: 8645 - DNA, 41 bp, Artificial Sequence
  Synthetic
gctgtagaagaacctccagacagtaaagagggcggcttaat

SEQ ID NO: 8646 - DNA, 44 bp, Artificial Sequence
  Synthetic
gatgctactattgtccaaggccggcagttcctgaacatttaaat

SEQ ID NO: 8647 - DNA, 48 bp, Artificial Sequence
  Synthetic
atcctgaacgaaggaattatccagagaattattacagttggcaaatcg

SEQ ID NO: 8648 - DNA, 47 bp, Artificial Sequence
  Synthetic
acattcagaggacagacatctactcaaaatatggatgtcctacagtt

SEQ ID NO: 8649 - DNA, 49 bp, Artificial Sequence
  Synthetic
acaacaggacatccattgtttaacatcctgtctatcatctttagaagtt

SEQ ID NO: 8650 - DNA, 42 bp, Artificial Sequence
  Synthetic
attacctgcagcaagtcaacagacggtagggaaatagatgga

SEQ ID NO: 8651 - DNA, 43 bp, Artificial Sequence
  Synthetic
cagaaaaactgtctttggatttggagttgtagcccagcttgaa

SEQ ID NO: 8652 - DNA, 45 bp, Artificial Sequence
  Synthetic
tttcagtgtgattttcaatcggctctccttcttccgtaaaagctc

SEQ ID NO: 8653 - DNA, 47 bp, Artificial Sequence
  Synthetic
tttcctgggaaaataaaagtggtgccttcttgcattgatttcctttc

SEQ ID NO: 8654 - DNA, 46 bp, Artificial Sequence
  Synthetic
gctggtacaacaattctatttctgctgctcattacaaaagccttct

SEQ ID NO: 8655 - DNA, 43 bp, Artificial Sequence
  Synthetic
attgtcaccttatagagttgacagcaccacagaaagcctgact

SEQ ID NO: 8656 - DNA, 41 bp, Artificial Sequence
  Synthetic
tgctcttagtcctcgtttggattttgctgctgattgttctg

SEQ ID NO: 8657 - DNA, 39 bp, Artificial Sequence
  Synthetic
atctgaacagtggacgtttgcaaacagtttctgggtggc

SEQ ID NO: 8658 - DNA, 43 bp, Artificial Sequence
  Synthetic
tgacaatgaacaaattttgccctttcctcttgggtgtcagaaa

SEQ ID NO: 8659 - DNA, 41 bp, Artificial Sequence
  Synthetic
cacaccactgagcctagtttgacaaacacattgacatcagc

SEQ ID NO: 8660 - DNA, 42 bp, Artificial Sequence
  Synthetic
atcccgcctttgatgctgatgtcctccatttgaccttgtgct

SEQ ID NO: 8661 - DNA, 47 bp, Artificial Sequence
  Synthetic
tctcagttcattaccaatgcttcagaaggtccaataggtatagtagg

SEQ ID NO: 8662 - DNA, 44 bp, Artificial Sequence
  Synthetic
atacattcgcctatacaagatggctgtagcaaaattaactgccc

SEQ ID NO: 8663 - DNA, 45 bp, Artificial Sequence
  Synthetic
aggatgtgaatggtgatcacagacctaaatttaagtctggtggtg

SEQ ID NO: 8664 - DNA, 41 bp, Artificial Sequence
  Synthetic
tcaacagaagccacctgcagctgacaaatcaactgtccaaa

SEQ ID NO: 8665 - DNA, 41 bp, Artificial Sequence
  Synthetic
tttcagcaactattggtttccgatgaaaattctcccggcag

SEQ ID NO: 8666 - DNA, 47 bp, Artificial Sequence
  Synthetic
atgcccaagttacagaggattcaggctgttaatatactttcgcttta

SEQ ID NO: 8667 - DNA, 46 bp, Artificial Sequence
  Synthetic
tctaacaatgcggtggttgaaaattttagcaagaataacagctctt

SEQ ID NO: 8668 - DNA, 48 bp, Artificial Sequence
  Synthetic
gaactttcaaagatggtacaatgggtctgctaataatgcatagtgaaa

SEQ ID NO: 8669 - DNA, 43 bp, Artificial Sequence
  Synthetic
cttccgcgacatggtttatcggaacctttcactaagaggacat

SEQ ID NO: 8670 - DNA, 42 bp, Artificial Sequence
  Synthetic
tggtggaggaacagtttctaggcttggttttggaagggattc

SEQ ID NO: 8671 - DNA, 46 bp, Artificial Sequence
  Synthetic
tgagcatcctgcagtaataaatgttggcaaagtttgtacatcaagt

SEQ ID NO: 8672 - DNA, 40 bp, Artificial Sequence
  Synthetic
ttttacagtgagaccgaaagcgtgcatagaagccctttgg

SEQ ID NO: 8673 - DNA, 50 bp, Artificial Sequence
  Synthetic
ttaccagaacaaaatgaaaacagggcctacaataaatatctgagtttgct

SEQ ID NO: 8674 - DNA, 46 bp, Artificial Sequence
  Synthetic
agatgctgtttgtaaatggcctggcaaagaaaaacaattcattacc

SEQ ID NO: 8675 - DNA, 43 bp, Artificial Sequence
  Synthetic
tcgcatataaatgtgatgaacccaggtggaggaacaaaagcta

SEQ ID NO: 8676 - DNA, 44 bp, Artificial Sequence
  Synthetic
ggtcaaattccttttccccaccatgtttggaatgatactgacag

SEQ ID NO: 8677 - DNA, 44 bp, Artificial Sequence
  Synthetic
cgcttttgttgctggctgtcaatcttaaacacattccataaccg

SEQ ID NO: 8678 - DNA, 39 bp, Artificial Sequence
  Synthetic
tagagggcattggagagggtaatagtaggttcctggccc

SEQ ID NO: 8679 - DNA, 43 bp, Artificial Sequence
  Synthetic
gctcgaagaattatcattcgtttgctagtgggatctgccatgg

SEQ ID NO: 8680 - DNA, 43 bp, Artificial Sequence
  Synthetic
gtagtgagctgggtaaagatggcggcccttgtattactctgta

SEQ ID NO: 8681 - DNA, 45 bp, Artificial Sequence
  Synthetic
tggtacagtgggcatatgataatgactaacgccaattctgcatat

SEQ ID NO: 8682 - DNA, 42 bp, Artificial Sequence
  Synthetic
ggcccagcagaaagttccatccgggctcgaggtactagcaac

SEQ ID NO: 8683 - DNA, 46 bp, Artificial Sequence
  Synthetic
aaaaggtcctgcaaatcccctagctagcatatttctgattacatct

SEQ ID NO: 8684 - DNA, 43 bp, Artificial Sequence
  Synthetic
acgcgtattacctgaagggacggtggtcctatagggtctatag

SEQ ID NO: 8685 - DNA, 46 bp, Artificial Sequence
  Synthetic
atatatctcctgcacaaccagcctaatgtgaaccaattgatatggt

SEQ ID NO: 8686 - DNA, 38 bp, Artificial Sequence
  Synthetic
cagtgccacggctaacacaaagttgttggcacctgttg

SEQ ID NO: 8687 - DNA, 41 bp, Artificial Sequence
  Synthetic
accttcattaggggaacattgggaatctcctggctgtttgg

SEQ ID NO: 8688 - DNA, 46 bp, Artificial Sequence
  Synthetic
tacggtgaccaggtatttttctttgtctagcccaaaaatgtctagc

SEQ ID NO: 8689 - DNA, 45 bp, Artificial Sequence
  Synthetic
tcaaactggtttactggagcgttcacagttttctttcttacagta

SEQ ID NO: 8690 - DNA, 41 bp, Artificial Sequence
  Synthetic
atccggacctcatgccagataaaagagtaaagccgtccaaa

SEQ ID NO: 8691 - DNA, 41 bp, Artificial Sequence
  Synthetic
tgactgactcaaacgttcttggaccgttttcgttgcaagta

SEQ ID NO: 8692 - DNA, 40 bp, Artificial Sequence
  Synthetic
gatcgccagaatgcaactgatctcccaattccatcaatca

SEQ ID NO: 8693 - DNA, 42 bp, Artificial Sequence
  Synthetic
tcagttgctcacaaatcttgcccctctttttcgaagtcgtac

SEQ ID NO: 8694 - DNA, 42 bp, Artificial Sequence
  Synthetic
aaaagtatctccgcgggggatgttctcatttgaagcaatttg

SEQ ID NO: 8695 - DNA, 40 bp, Artificial Sequence
  Synthetic
aatacggagggaaggacttcagggttttgcaccttccatc

SEQ ID NO: 8696 - DNA, 44 bp, Artificial Sequence
  Synthetic
aatttgaaaatacaggcgagcgccgatgtttcttgtacctcaca

SEQ ID NO: 8697 - DNA, 41 bp, Artificial Sequence
  Synthetic
gagcaattgaacagctcagaggattgtctagcttgctgtgg

SEQ ID NO: 8698 - DNA, 43 bp, Artificial Sequence
  Synthetic
aaaacgaaagtatttaggcagtccgttttactccttcccggca

SEQ ID NO: 8699 - DNA, 39 bp, Artificial Sequence
  Synthetic
acgccaccacagcaaatacaaacacagctttgcctgtac

SEQ ID NO: 8700 - DNA, 45 bp, Artificial Sequence
  Synthetic
aacagatgacagtgacattgcactgtgcattactatctacatctg

SEQ ID NO: 8701 - DNA, 41 bp, Artificial Sequence
  Synthetic
ttttacgaggcacaccaaaacaactttcctgtgtttggtgg

SEQ ID NO: 8702 - DNA, 41 bp, Artificial Sequence
  Synthetic
attgtcccgactctgtgtctagcgacaacagtttcaacagg

SEQ ID NO: 8703 - DNA, 40 bp, Artificial Sequence
  Synthetic
tttgtgtgcctgtgtgtctgaacaggtagaaaacaacgag

SEQ ID NO: 8704 - DNA, 39 bp, Artificial Sequence
  Synthetic
gtgtactatggtcgcccaccacgtttgatacagctgagt

SEQ ID NO: 8705 - DNA, 45 bp, Artificial Sequence
  Synthetic
tccacaaactggggaggtatctcataactatgtacaccagatgtg

SEQ ID NO: 8706 - DNA, 42 bp, Artificial Sequence
  Synthetic
ttgtggctttacacagacctgccaagcctactaaaacgcaca

SEQ ID NO: 8707 - DNA, 43 bp, Artificial Sequence
  Synthetic
aacatgttccctattttcttgcagaggtgtaggaggcaggtaa

SEQ ID NO: 8708 - DNA, 41 bp, Artificial Sequence
  Synthetic
ttcccaaggtgtctgcatttcaacttattgggatcgggcaa

SEQ ID NO: 8709 - DNA, 48 bp, Artificial Sequence
  Synthetic
catgactatatctgcaaccacacaaacatactgtttaatttggcttga

SEQ ID NO: 8710 - DNA, 43 bp, Artificial Sequence
  Synthetic
aaaagccttgctataacctgtcaattagctagtgggtcctctt

SEQ ID NO: 8711 - DNA, 45 bp, Artificial Sequence
  Synthetic
cggcggtgattgtttgtgtccatacaaaaacatacattcatgcac

SEQ ID NO: 8712 - DNA, 41 bp, Artificial Sequence
  Synthetic
tggttgttgcacaccactgtgcataaaatggacactactgt

SEQ ID NO: 8713 - DNA, 43 bp, Artificial Sequence
  Synthetic
tgcaaacatctgcaacacaatgaagacacatagttggctacca

SEQ ID NO: 8714 - DNA, 42 bp, Artificial Sequence
  Synthetic
aacggccatacaagctaccaacagtccaattctatttcatgt

SEQ ID NO: 8715 - DNA, 44 bp, Artificial Sequence
  Synthetic
ctcagaggatgaggatgaaacagacattctgtaccaggcttgct

SEQ ID NO: 8716 - DNA, 39 bp, Artificial Sequence
  Synthetic
ggaggtgttcgggatggtttattgcatcccctgttttcc

SEQ ID NO: 8717 - DNA, 48 bp, Artificial Sequence
  Synthetic
aatggtacagtgggcatttgataatcctcagatgctaataatgcatat

SEQ ID NO: 8718 - DNA, 49 bp, Artificial Sequence
  Synthetic
aatgcattagatggcaatcctatgtgatgttattagtaatggaggacat

SEQ ID NO: 8719 - DNA, 42 bp, Artificial Sequence
  Synthetic
acaaagacgtggtcaaaactagattgcacagtgtctccatca

SEQ ID NO: 8720 - DNA, 47 bp, Artificial Sequence
  Synthetic
tccaaagggcataatgcaattgaattctgtgttatagcttgattcat

SEQ ID NO: 8721 - DNA, 44 bp, Artificial Sequence
  Synthetic
atggtagcattggggtattttttggcacatatcctgtacgaccc

SEQ ID NO: 8722 - DNA, 45 bp, Artificial Sequence
  Synthetic
aacaacatctgtggacagtacaccagatacttgtgtagtgtcact

SEQ ID NO: 8723 - DNA, 45 bp, Artificial Sequence
  Synthetic
gctagaaaaactggcatacgtgtcacttctagtaaacatagtggc

SEQ ID NO: 8724 - DNA, 47 bp, Artificial Sequence
  Synthetic
gacctactgaggcaaaggtataccgttacatactcttcagtgcttac

SEQ ID NO: 8725 - DNA, 41 bp, Artificial Sequence
  Synthetic
gcacaccatgtggtacccaagtggtgttctttaattcaagc

SEQ ID NO: 8726 - DNA, 41 bp, Artificial Sequence
  Synthetic
aggtactgtaggcgatgctattccacaactggatggcgatg

SEQ ID NO: 8727 - DNA, 41 bp, Artificial Sequence
  Synthetic
aacatgttttggtctgtttgtgcaatccaagttgcctgcag

SEQ ID NO: 8728 - DNA, 42 bp, Artificial Sequence
  Synthetic
aagaacgttactgttacacatgccatcgcagagcttcccatt

SEQ ID NO: 8729 - DNA, 41 bp, Artificial Sequence
  Synthetic
gttacccaggggatttcaacgaaatggtttgttctgctcaa

SEQ ID NO: 8730 - DNA, 40 bp, Artificial Sequence
  Synthetic
gatgcggcagagcagacaaatgatgttccaacggaaatgt

SEQ ID NO: 8731 - DNA, 46 bp, Artificial Sequence
  Synthetic
agtgaattggaatatggtaactgcatggcatactagagtttatcgc

SEQ ID NO: 8732 - DNA, 43 bp, Artificial Sequence
  Synthetic
ggtaccaccatagcaatgagcagtgactccatctattgccttt

SEQ ID NO: 8733 - DNA, 45 bp, Artificial Sequence
  Synthetic
ttcatgactcaaatgtcaagaacctcctttgcattatccctaagc

SEQ ID NO: 8734 - DNA, 46 bp, Artificial Sequence
  Synthetic
actgtcaatttattcaacagtggcgaaagatagaccagctaccatg

SEQ ID NO: 8735 - DNA, 39 bp, Artificial Sequence
  Synthetic
gagaacgccagaatgccactcgtccaattccaccaatca

SEQ ID NO: 8736 - DNA, 42 bp, Artificial Sequence
  Synthetic
taaacggaaagtggatgagagaacccattattagcttggcgc

SEQ ID NO: 8737 - DNA, 44 bp, Artificial Sequence
  Synthetic
ggtcaggatgatcaaacgtggaattcttgtttttcgtccattct

SEQ ID NO: 8738 - DNA, 45 bp, Artificial Sequence
  Synthetic
ggaagctttccactagaggagttcacttgattccatagtctccat

SEQ ID NO: 8739 - DNA, 38 bp, Artificial Sequence
  Synthetic
cagcaggacgagcaagctttaggttttgtgacactgcc

SEQ ID NO: 8740 - DNA, 40 bp, Artificial Sequence
  Synthetic
agttgcgtgtatcgtcccaacctagtccactgtcctcaaa

SEQ ID NO: 8741 - DNA, 48 bp, Artificial Sequence
  Synthetic
ttcagttttatgctgcaaaatgtcggtacatgcaatacattacacaat

SEQ ID NO: 8742 - DNA, 49 bp, Artificial Sequence
  Synthetic
agggctaatagatgatgcaacatttagtccattcctcatatatacatcc

SEQ ID NO: 8743 - DNA, 38 bp, Artificial Sequence
  Synthetic
accgtttcgatgctgtgcaacatctatgtctgtgcggc

SEQ ID NO: 8744 - DNA, 43 bp, Artificial Sequence
  Synthetic
acgttatggaccgctatttattaccctgcagatacctgtccac

SEQ ID NO: 8745 - DNA, 43 bp, Artificial Sequence
  Synthetic
aagacgaggctagggatccggtttcattctatacctccaacat

SEQ ID NO: 8746 - DNA, 44 bp, Artificial Sequence
  Synthetic
gctggtgctgaggtgtttgttgtctaaaggtatagattcaccta

SEQ ID NO: 8747 - DNA, 41 bp, Artificial Sequence
  Synthetic
gcatctgctaacattaatggcaggggccaacaagtgtatga

SEQ ID NO: 8748 - DNA, 45 bp, Artificial Sequence
  Synthetic
atttgcatccaagtcacagacgctgcaaaacattaaaaaccagac

SEQ ID NO: 8749 - DNA, 40 bp, Artificial Sequence
  Synthetic
caccccttgtaaaggtgaacacgacaggtgcctttaggag

SEQ ID NO: 8750 - DNA, 47 bp, Artificial Sequence
  Synthetic
gtccttagcatctagtgactccccataatacagcattattagcaccc

SEQ ID NO: 8751 - DNA, 43 bp, Artificial Sequence
  Synthetic
ttttgggtggttgatttatcagacaaaaagcgcctaccaagag

SEQ ID NO: 8752 - DNA, 43 bp, Artificial Sequence
  Synthetic
gtattactcatgtgttttgcaacgtactgtaaaagcaccgctc

SEQ ID NO: 8753 - DNA, 20 bp, Artificial Sequence
  Synthetic
atctttgtcacccgatttgg

SEQ ID NO: 8754 - DNA, 25 bp, Artificial Sequence
  Synthetic
tgcagtagctttatacttttttcag

SEQ ID NO: 8755 - DNA, 23 bp, Artificial Sequence
  Synthetic
taattagatttttgaagggcagt

SEQ ID NO: 8756 - DNA, 25 bp, Artificial Sequence
  Synthetic
gactattgaatctttatgaaagtgg

SEQ ID NO: 8757 - DNA, 20 bp, Artificial Sequence
  Synthetic
atacctagctcacacaggcc

SEQ ID NO: 8758 - DNA, 19 bp, Artificial Sequence
  Synthetic
aggagaaccaacgtccacc

SEQ ID NO: 8759 - DNA, 19 bp, Artificial Sequence
  Synthetic
caactgtgtttagatgggc

SEQ ID NO: 8760 - DNA, 24 bp, Artificial Sequence
  Synthetic
atacactttatacaacccgtgtag

SEQ ID NO: 8761 - DNA, 21 bp, Artificial Sequence
  Synthetic
cgcgcaattttatttggctat

SEQ ID NO: 8762 - DNA, 25 bp, Artificial Sequence
  Synthetic
ctgcacatttttattatgatgtgtc

SEQ ID NO: 8763 - DNA, 19 bp, Artificial Sequence
  Synthetic
cctgaaaaggaacgtttgg

SEQ ID NO: 8764 - DNA, 23 bp, Artificial Sequence
  Synthetic
tattccagacatatgttagccag

SEQ ID NO: 8765 - DNA, 25 bp, Artificial Sequence
  Synthetic
cagataccttttatctaaagcaact

SEQ ID NO: 8766 - DNA, 22 bp, Artificial Sequence
  Synthetic
ctatgtgagcaataatctgact

SEQ ID NO: 8767 - DNA, 22 bp, Artificial Sequence
  Synthetic
ggattgtgcagaaaaaattgac

SEQ ID NO: 8768 - DNA, 21 bp, Artificial Sequence
  Synthetic
cagagcaagtgttagattcac

SEQ ID NO: 8769 - DNA, 25 bp, Artificial Sequence
  Synthetic
catatctaacctaatagatgatgga

SEQ ID NO: 8770 - DNA, 22 bp, Artificial Sequence
  Synthetic
gcatagtagattacagtgcttt

SEQ ID NO: 8771 - DNA, 20 bp, Artificial Sequence
  Synthetic
actacaagggactcctccac

SEQ ID NO: 8772 - DNA, 19 bp, Artificial Sequence
  Synthetic
agaggaggaagggaattgg

SEQ ID NO: 8773 - DNA, 25 bp, Artificial Sequence
  Synthetic
gttaagtagtgtgatatatcttggt

SEQ ID NO: 8774 - DNA, 25 bp, Artificial Sequence
  Synthetic
ggtcctatagaaactccttctatag

SEQ ID NO: 8775 - DNA, 25 bp, Artificial Sequence
  Synthetic
cttcagatatcaatgtttttgtgga

SEQ ID NO: 8776 - DNA, 19 bp, Artificial Sequence
  Synthetic
gatttgaaaatcccgcctt

SEQ ID NO: 8777 - DNA, 23 bp, Artificial Sequence
  Synthetic
gtatcttacccacaacaaaatgt

SEQ ID NO: 8778 - DNA, 23 bp, Artificial Sequence
  Synthetic
acggatgaatatgttaaaggaac

SEQ ID NO: 8779 - DNA, 24 bp, Artificial Sequence
  Synthetic
ctggacatcctttgtataacaaac

SEQ ID NO: 8780 - DNA, 20 bp, Artificial Sequence
  Synthetic
ccatttgaaccaacatctga

SEQ ID NO: 8781 - DNA, 18 bp, Artificial Sequence
  Synthetic
cccttacggggcgacact

SEQ ID NO: 8782 - DNA, 19 bp, Artificial Sequence
  Synthetic
tgcaccatgagcacgaatc

SEQ ID NO: 8783 - DNA, 15 bp, Artificial Sequence
  Synthetic
gcaccgctcgcgaaa

SEQ ID NO: 8784 - DNA, 18 bp, Artificial Sequence
  Synthetic
tcaccaatgactgcccca

SEQ ID NO: 8785 - DNA, 17 bp, Artificial Sequence
  Synthetic
ttcgatctacccgggcc

SEQ ID NO: 8786 - DNA, 18 bp, Artificial Sequence
  Synthetic
acatcaaccggaccgctt

SEQ ID NO: 8787 - DNA, 18 bp, Artificial Sequence
  Synthetic
cgcaaggcagttggtttg

SEQ ID NO: 8788 - DNA, 19 bp, Artificial Sequence
  Synthetic
acataggctcgatgcagcg

SEQ ID NO: 8789 - DNA, 18 bp, Artificial Sequence
  Synthetic
gatctgcgcctgcctttg

SEQ ID NO: 8790 - DNA, 20 bp, Artificial Sequence
  Synthetic
ttagttaccttgggaccgca

SEQ ID NO: 8791 - DNA, 17 bp, Artificial Sequence
  Synthetic
gccgcgctgctcactat

SEQ ID NO: 8792 - DNA, 17 bp, Artificial Sequence
  Synthetic
gacccgcggtctcatct

SEQ ID NO: 8793 - DNA, 20 bp, Artificial Sequence
  Synthetic
tcttaggaggaagggtgacg

SEQ ID NO: 8794 - DNA, 18 bp, Artificial Sequence
  Synthetic
gccagggctacaaagtgc

SEQ ID NO: 8795 - DNA, 18 bp, Artificial Sequence
  Synthetic
ccaccccaacatcgagga

SEQ ID NO: 8796 - DNA, 18 bp, Artificial Sequence
  Synthetic
gtggcggttacccagact

SEQ ID NO: 8797 - DNA, 18 bp, Artificial Sequence
  Synthetic
cgtggccgcatattgcat

SEQ ID NO: 8798 - DNA, 20 bp, Artificial Sequence
  Synthetic
tacctagctgggctatccac

SEQ ID NO: 8799 - DNA, 19 bp, Artificial Sequence
  Synthetic
ggtccctagcacagaggat

SEQ ID NO: 8800 - DNA, 18 bp, Artificial Sequence
  Synthetic
gaggtgtgggactgggtt

SEQ ID NO: 8801 - DNA, 19 bp, Artificial Sequence
  Synthetic
cggagtacgtcgagatcct

SEQ ID NO: 8802 - DNA, 20 bp, Artificial Sequence
  Synthetic
gtggagaattggaaggaccc

SEQ ID NO: 8803 - DNA, 20 bp, Artificial Sequence
  Synthetic
tctcagtagaggaagctgct

SEQ ID NO: 8804 - DNA, 19 bp, Artificial Sequence
  Synthetic
gtccaaacggactcccatg

SEQ ID NO: 8805 - DNA, 20 bp, Artificial Sequence
  Synthetic
tgacgtgctacatcaaagcc

SEQ ID NO: 8806 - DNA, 16 bp, Artificial Sequence
  Synthetic
gggcagggctcgcata

SEQ ID NO: 8807 - DNA, 21 bp, Artificial Sequence
  Synthetic
tggcacatgaaatactgattg

SEQ ID NO: 8808 - DNA, 19 bp, Artificial Sequence
  Synthetic
gcgacatgctgaataaagc

SEQ ID NO: 8809 - DNA, 20 bp, Artificial Sequence
  Synthetic
atacaggcagcaatttcaac

SEQ ID NO: 8810 - DNA, 20 bp, Artificial Sequence
  Synthetic
aattggattgtgttctggag

SEQ ID NO: 8811 - DNA, 25 bp, Artificial Sequence
  Synthetic
tcagaggatttgtattagtagttga

SEQ ID NO: 8812 - DNA, 25 bp, Artificial Sequence
  Synthetic
ggatttgtatctaattttgcaatgg

SEQ ID NO: 8813 - DNA, 22 bp, Artificial Sequence
  Synthetic
gctatgggaaaacactaaagga

SEQ ID NO: 8814 - DNA, 21 bp, Artificial Sequence
  Synthetic
ggaactcatagttggagaacc

SEQ ID NO: 8815 - DNA, 21 bp, Artificial Sequence
  Synthetic
caggggttataccatagacaa

SEQ ID NO: 8816 - DNA, 18 bp, Artificial Sequence
  Synthetic
ggatggctccttggaaat

SEQ ID NO: 8817 - DNA, 22 bp, Artificial Sequence
  Synthetic
gtaaaccatcattcttcaggaa

SEQ ID NO: 8818 - DNA, 21 bp, Artificial Sequence
  Synthetic
gaatggaattctcttggaccc

SEQ ID NO: 8819 - DNA, 21 bp, Artificial Sequence
  Synthetic
atcggagaaattggtcttagc

SEQ ID NO: 8820 - DNA, 25 bp, Artificial Sequence
  Synthetic
aaacttgacagaagataaaaatggg

SEQ ID NO: 8821 - DNA, 20 bp, Artificial Sequence
  Synthetic
catagttcaaatggagcctg

SEQ ID NO: 8822 - DNA, 23 bp, Artificial Sequence
  Synthetic
tatagcggcattagtaataacca

SEQ ID NO: 8823 - DNA, 25 bp, Artificial Sequence
  Synthetic
ttctaccatatattgaacaacccaa

SEQ ID NO: 8824 - DNA, 25 bp, Artificial Sequence
  Synthetic
ttaagtgaaatactaggaatgcttc

SEQ ID NO: 8825 - DNA, 25 bp, Artificial Sequence
  Synthetic
tgatagtgacaatgatctatcactt

SEQ ID NO: 8826 - DNA, 18 bp, Artificial Sequence
  Synthetic
ggtgcccatgttccaatc

SEQ ID NO: 8827 - DNA, 25 bp, Artificial Sequence
  Synthetic
catcagtgtcagaaataaagatctg

SEQ ID NO: 8828 - DNA, 21 bp, Artificial Sequence
  Synthetic
ccatcataatcaccaaccctc

SEQ ID NO: 8829 - DNA, 23 bp, Artificial Sequence
  Synthetic
ttaagactaacaataacgttggg

SEQ ID NO: 8830 - DNA, 22 bp, Artificial Sequence
  Synthetic
caacaacaaccaaaatacaacc

SEQ ID NO: 8831 - DNA, 20 bp, Artificial Sequence
  Synthetic
tcaacaccaccaaaacaaac

SEQ ID NO: 8832 - DNA, 22 bp, Artificial Sequence
  Synthetic
cgtattattgcaaaaagccatg

SEQ ID NO: 8833 - DNA, 20 bp, Artificial Sequence
  Synthetic
ctgtatctaaggtcctgcac

SEQ ID NO: 8834 - DNA, 22 bp, Artificial Sequence
  Synthetic
ctatgtacaaccaacacaaagg

SEQ ID NO: 8835 - DNA, 22 bp, Artificial Sequence
  Synthetic
tgttatcattaattgccgttgg

SEQ ID NO: 8836 - DNA, 24 bp, Artificial Sequence
  Synthetic
taagtctatggataaaagcatcga

SEQ ID NO: 8837 - DNA, 25 bp, Artificial Sequence
  Synthetic
gaatgtgatttatacaactgtgtag

SEQ ID NO: 8838 - DNA, 23 bp, Artificial Sequence
  Synthetic
tctgagagacaagctaaaattac

SEQ ID NO: 8839 - DNA, 25 bp, Artificial Sequence
  Synthetic
ggtgtatgcatctatagataacaag

SEQ ID NO: 8840 - DNA, 18 bp, Artificial Sequence
  Synthetic
ggcgacactccaccatga

SEQ ID NO: 8841 - DNA, 19 bp, Artificial Sequence
  Synthetic
tgcaccatgagcacgaatc

SEQ ID NO: 8842 - DNA, 19 bp, Artificial Sequence
  Synthetic
cgtaggtcgcgcaatttgg

SEQ ID NO: 8843 - DNA, 20 bp, Artificial Sequence
  Synthetic
cgagtattgtgtacgaggcg

SEQ ID NO: 8844 - DNA, 19 bp, Artificial Sequence
  Synthetic
ataacgggtcatcgcatgg

SEQ ID NO: 8845 - DNA, 18 bp, Artificial Sequence
  Synthetic
gctggttagcagggctct

SEQ ID NO: 8846 - DNA, 18 bp, Artificial Sequence
  Synthetic
tacctacagctggggtgc

SEQ ID NO: 8847 - DNA, 18 bp, Artificial Sequence
  Synthetic
gtacgtgggaggggtcga

SEQ ID NO: 8848 - DNA, 20 bp, Artificial Sequence
  Synthetic
actcatatcccaagcggagg

SEQ ID NO: 8849 - DNA, 19 bp, Artificial Sequence
  Synthetic
cgcgatgccgtcatcttac

SEQ ID NO: 8850 - DNA, 20 bp, Artificial Sequence
  Synthetic
aaccatctcacccctcttcg

SEQ ID NO: 8851 - DNA, 19 bp, Artificial Sequence
  Synthetic
ggtgaggtccagatcgtgt

SEQ ID NO: 8852 - DNA, 16 bp, Artificial Sequence
  Synthetic
gggggtccgctgttgt

SEQ ID NO: 8853 - DNA, 18 bp, Artificial Sequence
  Synthetic
aaggcccatggggttgat

SEQ ID NO: 8854 - DNA, 18 bp, Artificial Sequence
  Synthetic
caaggctatccccctcga

SEQ ID NO: 8855 - DNA, 18 bp, Artificial Sequence
  Synthetic
tctccaggactcaacgcc

SEQ ID NO: 8856 - DNA, 16 bp, Artificial Sequence
  Synthetic
caagccaccgtgtgcg

SEQ ID NO: 8857 - DNA, 20 bp, Artificial Sequence
  Synthetic
tgacagggaggttctctacc

SEQ ID NO: 8858 - DNA, 19 bp, Artificial Sequence
  Synthetic
actggccaaaccctcctct

SEQ ID NO: 8859 - DNA, 16 bp, Artificial Sequence
  Synthetic
cgagggggcagtgcaa

SEQ ID NO: 8860 - DNA, 18 bp, Artificial Sequence
  Synthetic
tataggggggtctggcga

SEQ ID NO: 8861 - DNA, 20 bp, Artificial Sequence
  Synthetic
ttcacagaattggacggggt

SEQ ID NO: 8862 - DNA, 19 bp, Artificial Sequence
  Synthetic
aggctaacctcctgtggag

SEQ ID NO: 8863 - DNA, 20 bp, Artificial Sequence
  Synthetic
gtggtcctcaccgaatcaac

SEQ ID NO: 8864 - DNA, 20 bp, Artificial Sequence
  Synthetic
aaaaactgcccatcaacgca

SEQ ID NO: 8865 - DNA, 20 bp, Artificial Sequence
  Synthetic
gacactaccatcatggccaa

SEQ ID NO: 8866 - DNA, 19 bp, Artificial Sequence
  Synthetic
gacatccgtacggaggagg

SEQ ID NO: 8867 - DNA, 18 bp, Artificial Sequence
  Synthetic
gaccccccacaaccagaa

SEQ ID NO: 8868 - DNA, 20 bp, Artificial Sequence
  Synthetic
gcctgctactccatagaacc

SEQ ID NO: 8869 - DNA, 22 bp, Artificial Sequence
  Synthetic
aggtactgatccaaaatggaag

SEQ ID NO: 8870 - DNA, 21 bp, Artificial Sequence
  Synthetic
ttgaaataatcgaagggaggg

SEQ ID NO: 8871 - DNA, 21 bp, Artificial Sequence
  Synthetic
atgaaaaaggcataaacccca

SEQ ID NO: 8872 - DNA, 19 bp, Artificial Sequence
  Synthetic
gaattcaacaaggcatgcg

SEQ ID NO: 8873 - DNA, 21 bp, Artificial Sequence
  Synthetic
aaggaagacggaaaactaacc

SEQ ID NO: 8874 - DNA, 18 bp, Artificial Sequence
  Synthetic
gcatggaaatgaggcgat

SEQ ID NO: 8875 - DNA, 21 bp, Artificial Sequence
  Synthetic
gcgatacctaactgacatgac

SEQ ID NO: 8876 - DNA, 20 bp, Artificial Sequence
  Synthetic
ttgaggatgtcaaaaatgca

SEQ ID NO: 8877 - DNA, 25 bp, Artificial Sequence
  Synthetic
catgatttataaaataagggaggga

SEQ ID NO: 8878 - DNA, 19 bp, Artificial Sequence
  Synthetic
tacattgctggaagccata

SEQ ID NO: 8879 - DNA, 18 bp, Artificial Sequence
  Synthetic
acctgtgcttcacgacta

SEQ ID NO: 8880 - DNA, 20 bp, Artificial Sequence
  Synthetic
agatgtagaggcagtgcaac

SEQ ID NO: 8881 - DNA, 22 bp, Artificial Sequence
  Synthetic
ccaaaatagctatgctagacga

SEQ ID NO: 8882 - DNA, 25 bp, Artificial Sequence
  Synthetic
ggaaatcattctttaaaaggtcatg

SEQ ID NO: 8883 - DNA, 18 bp, Artificial Sequence
  Synthetic
cacttgctgtgtcaaagg

SEQ ID NO: 8884 - DNA, 18 bp, Artificial Sequence
  Synthetic
atggggagggatggacta

SEQ ID NO: 8885 - DNA, 18 bp, Artificial Sequence
  Synthetic
cgttacagcaagtgcctg

SEQ ID NO: 8886 - DNA, 18 bp, Artificial Sequence
  Synthetic
taactgcctcatcgccat

SEQ ID NO: 8887 - DNA, 25 bp, Artificial Sequence
  Synthetic
gtgatatggtagatataggatttgg

SEQ ID NO: 8888 - DNA, 23 bp, Artificial Sequence
  Synthetic
cttgacagttctatttatgctgc

SEQ ID NO: 8889 - DNA, 23 bp, Artificial Sequence
  Synthetic
ttatgtaccataacccttacagc

SEQ ID NO: 8890 - DNA, 19 bp, Artificial Sequence
  Synthetic
ggctcgcatctctccttca

SEQ ID NO: 8891 - DNA, 17 bp, Artificial Sequence
  Synthetic
cgactgactgccggctt

SEQ ID NO: 8892 - DNA, 20 bp, Artificial Sequence
  Synthetic
agaaacaccggtctggatct

SEQ ID NO: 8893 - DNA, 20 bp, Artificial Sequence
  Synthetic
aagcaagaagtctcccaagc

SEQ ID NO: 8894 - DNA, 20 bp, Artificial Sequence
  Synthetic
tgtccaagccaacaatccac

SEQ ID NO: 8895 - DNA, 20 bp, Artificial Sequence
  Synthetic
ctaggagatatgttgcgggc

SEQ ID NO: 8896 - DNA, 20 bp, Artificial Sequence
  Synthetic
taccaaaaacaactgggcca

SEQ ID NO: 8897 - DNA, 18 bp, Artificial Sequence
  Synthetic
gcaacacttggtccggaa

SEQ ID NO: 8898 - DNA, 20 bp, Artificial Sequence
  Synthetic
cccacagcagtgtaactacg

SEQ ID NO: 8899 - DNA, 20 bp, Artificial Sequence
  Synthetic
tatgatgcagtccccaaggt

SEQ ID NO: 8900 - DNA, 20 bp, Artificial Sequence
  Synthetic
aggggctattatgctgaccc

SEQ ID NO: 8901 - DNA, 20 bp, Artificial Sequence
  Synthetic
cattaccttcggacccttgc

SEQ ID NO: 8902 - DNA, 20 bp, Artificial Sequence
  Synthetic
gctatttcctctttgctcca

SEQ ID NO: 8903 - DNA, 20 bp, Artificial Sequence
  Synthetic
tcctggtcttaatagccgcc

SEQ ID NO: 8904 - DNA, 18 bp, Artificial Sequence
  Synthetic
cttccagttctgccccct

SEQ ID NO: 8905 - DNA, 19 bp, Artificial Sequence
  Synthetic
gcggaggctattattcagc

SEQ ID NO: 8906 - DNA, 20 bp, Artificial Sequence
  Synthetic
agctatagtctcctccccct

SEQ ID NO: 8907 - DNA, 18 bp, Artificial Sequence
  Synthetic
cgcgtcagatacccccat

SEQ ID NO: 8908 - DNA, 16 bp, Artificial Sequence
  Synthetic
gcgaagtcagcggcct

SEQ ID NO: 8909 - DNA, 20 bp, Artificial Sequence
  Synthetic
agcacagtttcctcctcctc

SEQ ID NO: 8910 - DNA, 18 bp, Artificial Sequence
  Synthetic
ctactggccacctgtcca

SEQ ID NO: 8911 - DNA, 18 bp, Artificial Sequence
  Synthetic
cttccgttccactcaacc

SEQ ID NO: 8912 - DNA, 18 bp, Artificial Sequence
  Synthetic
gaaggtcagggcccagaa

SEQ ID NO: 8913 - DNA, 18 bp, Artificial Sequence
  Synthetic
catggcacgcatacggct

SEQ ID NO: 8914 - DNA, 25 bp, Artificial Sequence
  Synthetic
tatggaaagaataaaagaactacgg

SEQ ID NO: 8915 - DNA, 20 bp, Artificial Sequence
  Synthetic
gagtaaaatgagtgatgccg

SEQ ID NO: 8916 - DNA, 23 bp, Artificial Sequence
  Synthetic
gtaatcatggaagttgttttccc

SEQ ID NO: 8917 - DNA, 23 bp, Artificial Sequence
  Synthetic
aagtgaggaatgatgatgttgat

SEQ ID NO: 8918 - DNA, 20 bp, Artificial Sequence
  Synthetic
gcgggttcacatttaagaga

SEQ ID NO: 8919 - DNA, 22 bp, Artificial Sequence
  Synthetic
gcatgataaaagcagttagagg

SEQ ID NO: 8920 - DNA, 19 bp, Artificial Sequence
  Synthetic
gagagggtagtggtaagca

SEQ ID NO: 8921 - DNA, 20 bp, Artificial Sequence
  Synthetic
tggaatttgagccatttcag

SEQ ID NO: 8922 - DNA, 21 bp, Artificial Sequence
  Synthetic
caacaagaccactaagagact

SEQ ID NO: 8923 - DNA, 19 bp, Artificial Sequence
  Synthetic
cgttacctaaccgacatga

SEQ ID NO: 8924 - DNA, 21 bp, Artificial Sequence
  Synthetic
gaaatttcaccattgccttct

SEQ ID NO: 8925 - DNA, 24 bp, Artificial Sequence
  Synthetic
ccgactctacttttcctaaaaatt

SEQ ID NO: 8926 - DNA, 19 bp, Artificial Sequence
  Synthetic
cagactgtgttctagaggc

SEQ ID NO: 8927 - DNA, 22 bp, Artificial Sequence
  Synthetic
gataacaacccactttcaaaga

SEQ ID NO: 8928 - DNA, 25 bp, Artificial Sequence
  Synthetic
tcgtatactttgttgaaactttagc

SEQ ID NO: 8929 - DNA, 18 bp, Artificial Sequence
  Synthetic
aaacatcctgagcatggc

SEQ ID NO: 8930 - DNA, 22 bp, Artificial Sequence
  Synthetic
agtctcgatactgaatcttgga

SEQ ID NO: 8931 - DNA, 18 bp, Artificial Sequence
  Synthetic
ctacccagctttggagtg

SEQ ID NO: 8932 - DNA, 16 bp, Artificial Sequence
  Synthetic
gcgacttcgacgccga

SEQ ID NO: 8933 - DNA, 16 bp, Artificial Sequence
  Synthetic
ggcgtcagcacctggt

SEQ ID NO: 8934 - DNA, 16 bp, Artificial Sequence
  Synthetic
catgctacggctcggc

SEQ ID NO: 8935 - DNA, 20 bp, Artificial Sequence
  Synthetic
cccaaggataaacgtccctg

SEQ ID NO: 8936 - DNA, 19 bp, Artificial Sequence
  Synthetic
cccaggaccagcctacgag

SEQ ID NO: 8937 - DNA, 21 bp, Artificial Sequence
  Synthetic
acactacgtcttatacagctt

SEQ ID NO: 8938 - DNA, 18 bp, Artificial Sequence
  Synthetic
cgacgtccctgattccct

SEQ ID NO: 8939 - DNA, 18 bp, Artificial Sequence
  Synthetic
tcgaggaggacgagtggc

SEQ ID NO: 8940 - DNA, 18 bp, Artificial Sequence
  Synthetic
cccctccggatccaccat

SEQ ID NO: 8941 - DNA, 18 bp, Artificial Sequence
  Synthetic
ttacacaacgacgccagc

SEQ ID NO: 8942 - DNA, 16 bp, Artificial Sequence
  Synthetic
ccgacgtgcacgacct

SEQ ID NO: 8943 - DNA, 16 bp, Artificial Sequence
  Synthetic
tgcgaggaggacgagc

SEQ ID NO: 8944 - DNA, 18 bp, Artificial Sequence
  Synthetic
cctgacctccctctgcca

SEQ ID NO: 8945 - DNA, 19 bp, Artificial Sequence
  Synthetic
tgagtccttgagtgacggt

SEQ ID NO: 8946 - DNA, 16 bp, Artificial Sequence
  Synthetic
cgcagcaagtgaccgc

SEQ ID NO: 8947 - DNA, 19 bp, Artificial Sequence
  Synthetic
gcttaaccaacgacgaggt

SEQ ID NO: 8948 - DNA, 18 bp, Artificial Sequence
  Synthetic
tgtcctcggtgaagcgaa

SEQ ID NO: 8949 - DNA, 18 bp, Artificial Sequence
  Synthetic
gatgagttcgcgctcctc

SEQ ID NO: 8950 - DNA, 19 bp, Artificial Sequence
  Synthetic
attctccccctccgtctcg

SEQ ID NO: 8951 - DNA, 18 bp, Artificial Sequence
  Synthetic
agttcggcttcttgctcg

SEQ ID NO: 8952 - DNA, 17 bp, Artificial Sequence
  Synthetic
actatcgtctgccggcg

SEQ ID NO: 8953 - DNA, 16 bp, Artificial Sequence
  Synthetic
gtgctgcaaccgctca

SEQ ID NO: 8954 - DNA, 17 bp, Artificial Sequence
  Synthetic
tccttctgtcaccgcgt

SEQ ID NO: 8955 - DNA, 16 bp, Artificial Sequence
  Synthetic
gggctggccttggtca

SEQ ID NO: 8956 - DNA, 18 bp, Artificial Sequence
  Synthetic
caaaggcgatgggttccg

SEQ ID NO: 8957 - DNA, 17 bp, Artificial Sequence
  Synthetic
ctgcagacggctgtgtc

SEQ ID NO: 8958 - DNA, 19 bp, Artificial Sequence
  Synthetic
ctgctcgagatgttgaccc

SEQ ID NO: 8959 - DNA, 16 bp, Artificial Sequence
  Synthetic
gcaacagccgcgacgt

SEQ ID NO: 8960 - DNA, 17 bp, Artificial Sequence
  Synthetic
gcgaacaccctccacgt

SEQ ID NO: 8961 - DNA, 18 bp, Artificial Sequence
  Synthetic
ccgacaggctctccacgt

SEQ ID NO: 8962 - DNA, 20 bp, Artificial Sequence
  Synthetic
ggaattttcccttcgcggat

SEQ ID NO: 8963 - DNA, 16 bp, Artificial Sequence
  Synthetic
acgtgggagcgcacct

SEQ ID NO: 8964 - DNA, 19 bp, Artificial Sequence
  Synthetic
ttcatcttcgcacgcgatg

SEQ ID NO: 8965 - DNA, 20 bp, Artificial Sequence
  Synthetic
acgcgtgttgttacccactt

SEQ ID NO: 8966 - DNA, 19 bp, Artificial Sequence
  Synthetic
gcgacggcgaactaaccag

SEQ ID NO: 8967 - DNA, 15 bp, Artificial Sequence
  Synthetic
gtcgcgcgccaacat

SEQ ID NO: 8968 - DNA, 19 bp, Artificial Sequence
  Synthetic
ccacgtcgttttggatcgc

SEQ ID NO: 8969 - DNA, 16 bp, Artificial Sequence
  Synthetic
ctcgaacacggtgccg

SEQ ID NO: 8970 - DNA, 16 bp, Artificial Sequence
  Synthetic
ccgtgtgcaagccagc

SEQ ID NO: 8971 - DNA, 16 bp, Artificial Sequence
  Synthetic
cgcaaaaacacgccgc

SEQ ID NO: 8972 - DNA, 18 bp, Artificial Sequence
  Synthetic
gaatgtcgtcagccaggc

SEQ ID NO: 8973 - DNA, 18 bp, Artificial Sequence
  Synthetic
tgcacgaacagctggacc

SEQ ID NO: 8974 - DNA, 20 bp, Artificial Sequence
  Synthetic
aggtcaatacggactacgcg

SEQ ID NO: 8975 - DNA, 16 bp, Artificial Sequence
  Synthetic
cgactccgcatgacgc

SEQ ID NO: 8976 - DNA, 16 bp, Artificial Sequence
  Synthetic
tctcgcggcccttcaa

SEQ ID NO: 8977 - DNA, 17 bp, Artificial Sequence
  Synthetic
tgatccgcacagctccg

SEQ ID NO: 8978 - DNA, 18 bp, Artificial Sequence
  Synthetic
ggcctcatcaccagcatc

SEQ ID NO: 8979 - DNA, 16 bp, Artificial Sequence
  Synthetic
gctcggcgctgacact

SEQ ID NO: 8980 - DNA, 20 bp, Artificial Sequence
  Synthetic
cgagatgctctccaccatcc

SEQ ID NO: 8981 - DNA, 16 bp, Artificial Sequence
  Synthetic
caacgcgacgagcagc

SEQ ID NO: 8982 - DNA, 16 bp, Artificial Sequence
  Synthetic
gcacggtgcgctggat

SEQ ID NO: 8983 - DNA, 18 bp, Artificial Sequence
  Synthetic
cctgctgcacaatgtggc

SEQ ID NO: 8984 - DNA, 16 bp, Artificial Sequence
  Synthetic
cgaagagacggcgcag

SEQ ID NO: 8985 - DNA, 16 bp, Artificial Sequence
  Synthetic
ccaacgacgtcgacgc

SEQ ID NO: 8986 - DNA, 16 bp, Artificial Sequence
  Synthetic
accgctcgtaccagcc

SEQ ID NO: 8987 - DNA, 18 bp, Artificial Sequence
  Synthetic
cccctcctcctcgtctca

SEQ ID NO: 8988 - DNA, 19 bp, Artificial Sequence
  Synthetic
cggatcttcggctacctcg

SEQ ID NO: 8989 - DNA, 17 bp, Artificial Sequence
  Synthetic
ccacctcgggctcaaac

SEQ ID NO: 8990 - DNA, 16 bp, Artificial Sequence
  Synthetic
ggacggcgcagattgc

SEQ ID NO: 8991 - DNA, 16 bp, Artificial Sequence
  Synthetic
gcgcacgttcacctcg

SEQ ID NO: 8992 - DNA, 18 bp, Artificial Sequence
  Synthetic
tgttgatgatgcgacgcc

SEQ ID NO: 8993 - DNA, 16 bp, Artificial Sequence
  Synthetic
ctcctgcaacgcggca

SEQ ID NO: 8994 - DNA, 16 bp, Artificial Sequence
  Synthetic
cgtcgcggctgctctt

SEQ ID NO: 8995 - DNA, 16 bp, Artificial Sequence
  Synthetic
gcacaacgccgccaga

SEQ ID NO: 8996 - DNA, 17 bp, Artificial Sequence
  Synthetic
tttcgtgagcaccccgc

SEQ ID NO: 8997 - DNA, 16 bp, Artificial Sequence
  Synthetic
cggaccaccaaaggcg

SEQ ID NO: 8998 - DNA, 18 bp, Artificial Sequence
  Synthetic
acgcgttttccacccttt

SEQ ID NO: 8999 - DNA, 18 bp, Artificial Sequence
  Synthetic
gcgcattaccaccgagtc

SEQ ID NO: 9000 - DNA, 19 bp, Artificial Sequence
  Synthetic
ggttcctccagccaatcga

SEQ ID NO: 9001 - DNA, 18 bp, Artificial Sequence
  Synthetic
gctcgtcccggtaatcga

SEQ ID NO: 9002 - DNA, 16 bp, Artificial Sequence
  Synthetic
tcggtcagggcctcgt

SEQ ID NO: 9003 - DNA, 17 bp, Artificial Sequence
  Synthetic
cagctcggtggaaagcc

SEQ ID NO: 9004 - DNA, 16 bp, Artificial Sequence
  Synthetic
ccgaggaaacgggggt

SEQ ID NO: 9005 - DNA, 16 bp, Artificial Sequence
  Synthetic
gtgtggggacgacgct

SEQ ID NO: 9006 - DNA, 19 bp, Artificial Sequence
  Synthetic
tgtctgctagtcgcctacg

SEQ ID NO: 9007 - DNA, 16 bp, Artificial Sequence
  Synthetic
gcgactcgcccgatct

SEQ ID NO: 9008 - DNA, 20 bp, Artificial Sequence
  Synthetic
tgattggcgcaagtaaagga

SEQ ID NO: 9009 - DNA, 16 bp, Artificial Sequence
  Synthetic
ggctttctcgcccgct

SEQ ID NO: 9010 - DNA, 16 bp, Artificial Sequence
  Synthetic
cttccagcgtcgccgt

SEQ ID NO: 9011 - DNA, 17 bp, Artificial Sequence
  Synthetic
ggcacgtcactttgcgg

SEQ ID NO: 9012 - DNA, 18 bp, Artificial Sequence
  Synthetic
atgggagcgttacgacgg

SEQ ID NO: 9013 - DNA, 17 bp, Artificial Sequence
  Synthetic
gtgccacgaggggatga

SEQ ID NO: 9014 - DNA, 20 bp, Artificial Sequence
  Synthetic
tgagagtccaaaacccacgg

SEQ ID NO: 9015 - DNA, 16 bp, Artificial Sequence
  Synthetic
ctaacgggcacgcggt

SEQ ID NO: 9016 - DNA, 20 bp, Artificial Sequence
  Synthetic
tcgtgcggagatttgttctc

SEQ ID NO: 9017 - DNA, 18 bp, Artificial Sequence
  Synthetic
agacgtcgggctctttcc

SEQ ID NO: 9018 - DNA, 19 bp, Artificial Sequence
  Synthetic
gttcagcatcttgagcggc

SEQ ID NO: 9019 - DNA, 20 bp, Artificial Sequence
  Synthetic
aagcttacagtcttgcggtt

SEQ ID NO: 9020 - DNA, 18 bp, Artificial Sequence
  Synthetic
aaggcccgtaaaagcggc

SEQ ID NO: 9021 - DNA, 16 bp, Artificial Sequence
  Synthetic
gagaggcgcgccgaaa

SEQ ID NO: 9022 - DNA, 16 bp, Artificial Sequence
  Synthetic
ccagccgcatcagcag

SEQ ID NO: 9023 - DNA, 15 bp, Artificial Sequence
  Synthetic
aggtggcgtcgcgaa

SEQ ID NO: 9024 - DNA, 15 bp, Artificial Sequence
  Synthetic
tgacgttgcgccgct

SEQ ID NO: 9025 - DNA, 18 bp, Artificial Sequence
  Synthetic
ggccactacctgtacgcc

SEQ ID NO: 9026 - DNA, 20 bp, Artificial Sequence
  Synthetic
cgcggtaaaaatgcggtatg

SEQ ID NO: 9027 - DNA, 19 bp, Artificial Sequence
  Synthetic
ggcctcgaacatctcctcg

SEQ ID NO: 9028 - DNA, 17 bp, Artificial Sequence
  Synthetic
ttgcggctctctaccgt

SEQ ID NO: 9029 - DNA, 18 bp, Artificial Sequence
  Synthetic
cgctgctctacgtgcacc

SEQ ID NO: 9030 - DNA, 17 bp, Artificial Sequence
  Synthetic
aggacgtcgcggctatc

SEQ ID NO: 9031 - DNA, 18 bp, Artificial Sequence
  Synthetic
ggtacggggagagatggc

SEQ ID NO: 9032 - DNA, 16 bp, Artificial Sequence
  Synthetic
cgcggcccatgaggta

SEQ ID NO: 9033 - DNA, 18 bp, Artificial Sequence
  Synthetic
catgttggccgtcttgcg

SEQ ID NO: 9034 - DNA, 18 bp, Artificial Sequence
  Synthetic
cttggaactggtcgcgtc

SEQ ID NO: 9035 - DNA, 19 bp, Artificial Sequence
  Synthetic
acgaagctctctatccggt

SEQ ID NO: 9036 - DNA, 17 bp, Artificial Sequence
  Synthetic
gttgtagtcgcggtggc

SEQ ID NO: 9037 - DNA, 18 bp, Artificial Sequence
  Synthetic
cgtagcgctcctggatct

SEQ ID NO: 9038 - DNA, 16 bp, Artificial Sequence
  Synthetic
ggcgccgtcactcgtt

SEQ ID NO: 9039 - DNA, 18 bp, Artificial Sequence
  Synthetic
ttttccgcatgcgttcga

SEQ ID NO: 9040 - DNA, 16 bp, Artificial Sequence
  Synthetic
actgctcgcaccgtct

SEQ ID NO: 9041 - DNA, 16 bp, Artificial Sequence
  Synthetic
gcggtctggacgaggt

SEQ ID NO: 9042 - DNA, 15 bp, Artificial Sequence
  Synthetic
ttcggcgcaccacca

SEQ ID NO: 9043 - DNA, 16 bp, Artificial Sequence
  Synthetic
ctctgggtcgccaggt

SEQ ID NO: 9044 - DNA, 16 bp, Artificial Sequence
  Synthetic
tttggaggccgcaccg

SEQ ID NO: 9045 - DNA, 20 bp, Artificial Sequence
  Synthetic
attgcgtcgcggttactacg

SEQ ID NO: 9046 - DNA, 18 bp, Artificial Sequence
  Synthetic
cggactgtggtcgactgt

SEQ ID NO: 9047 - DNA, 20 bp, Artificial Sequence
  Synthetic
tccacgcatgaaataacggt

SEQ ID NO: 9048 - DNA, 16 bp, Artificial Sequence
  Synthetic
ctgcggtactcggcca

SEQ ID NO: 9049 - DNA, 16 bp, Artificial Sequence
  Synthetic
ttgagctcgtggcggc

SEQ ID NO: 9050 - DNA, 16 bp, Artificial Sequence
  Synthetic
gctctggcgcaacgag

SEQ ID NO: 9051 - DNA, 17 bp, Artificial Sequence
  Synthetic
gcacgaggagaccacca

SEQ ID NO: 9052 - DNA, 17 bp, Artificial Sequence
  Synthetic
gtcatcgacgagtgcgg

SEQ ID NO: 9053 - DNA, 18 bp, Artificial Sequence
  Synthetic
cggattcttctcagggcg

SEQ ID NO: 9054 - DNA, 18 bp, Artificial Sequence
  Synthetic
cgtcaagccacctagcct

SEQ ID NO: 9055 - DNA, 19 bp, Artificial Sequence
  Synthetic
tgtcagatcagctcgcaga

SEQ ID NO: 9056 - DNA, 16 bp, Artificial Sequence
  Synthetic
atgcgctcgggttcct

SEQ ID NO: 9057 - DNA, 16 bp, Artificial Sequence
  Synthetic
tcccggcgctctgaca

SEQ ID NO: 9058 - DNA, 16 bp, Artificial Sequence
  Synthetic
cggcacaggtcgtcca

SEQ ID NO: 9059 - DNA, 16 bp, Artificial Sequence
  Synthetic
gactttctcggcggcg

SEQ ID NO: 9060 - DNA, 19 bp, Artificial Sequence
  Synthetic
tgacggtgttactcgtggt

SEQ ID NO: 9061 - DNA, 17 bp, Artificial Sequence
  Synthetic
ctttcttggtggcgccc

SEQ ID NO: 9062 - DNA, 16 bp, Artificial Sequence
  Synthetic
acggcgcttgtggtgc

SEQ ID NO: 9063 - DNA, 20 bp, Artificial Sequence
  Synthetic
acgacaggatcagacagacg

SEQ ID NO: 9064 - DNA, 18 bp, Artificial Sequence
  Synthetic
ttccatctgcgtcagcgg

SEQ ID NO: 9065 - DNA, 19 bp, Artificial Sequence
  Synthetic
atactgtcccagtcgcgac

SEQ ID NO: 9066 - DNA, 21 bp, Artificial Sequence
  Synthetic
taccgtgatgtaaaaacaaca

SEQ ID NO: 9067 - DNA, 20 bp, Artificial Sequence
  Synthetic
ctttttccttgtttgacggt

SEQ ID NO: 9068 - DNA, 18 bp, Artificial Sequence
  Synthetic
cggtacatcccgcagtcg

SEQ ID NO: 9069 - DNA, 19 bp, Artificial Sequence
  Synthetic
cgtgggaacgacagaaacg

SEQ ID NO: 9070 - DNA, 18 bp, Artificial Sequence
  Synthetic
ggtgaccgtcctctgtcc

SEQ ID NO: 9071 - DNA, 17 bp, Artificial Sequence
  Synthetic
ccattctggcagcagcg

SEQ ID NO: 9072 - DNA, 20 bp, Artificial Sequence
  Synthetic
ggacacgagagtcccacctt

SEQ ID NO: 9073 - DNA, 19 bp, Artificial Sequence
  Synthetic
gccaacgtcgaatgctacg

SEQ ID NO: 9074 - DNA, 16 bp, Artificial Sequence
  Synthetic
cctgggcgctgctgtt

SEQ ID NO: 9075 - DNA, 17 bp, Artificial Sequence
  Synthetic
caagtcccaggcggcta

SEQ ID NO: 9076 - DNA, 17 bp, Artificial Sequence
  Synthetic
aggggagcaacaaccgt

SEQ ID NO: 9077 - DNA, 15 bp, Artificial Sequence
  Synthetic
tcgcgccgcagagtt

SEQ ID NO: 9078 - DNA, 18 bp, Artificial Sequence
  Synthetic
ggccgttggagaattggt

SEQ ID NO: 9079 - DNA, 19 bp, Artificial Sequence
  Synthetic
agacggtgttcgatggaga

SEQ ID NO: 9080 - DNA, 16 bp, Artificial Sequence
  Synthetic
cacacggcccggaatg

SEQ ID NO: 9081 - DNA, 18 bp, Artificial Sequence
  Synthetic
agcacagttgacgaccac

SEQ ID NO: 9082 - DNA, 20 bp, Artificial Sequence
  Synthetic
aatttgggtcttttcacgcg

SEQ ID NO: 9083 - DNA, 18 bp, Artificial Sequence
  Synthetic
gttgcccgacatcctccc

SEQ ID NO: 9084 - DNA, 20 bp, Artificial Sequence
  Synthetic
ctttccgtaccgggatttcc

SEQ ID NO: 9085 - DNA, 20 bp, Artificial Sequence
  Synthetic
aacgtcaagagtcacgtcag

SEQ ID NO: 9086 - DNA, 20 bp, Artificial Sequence
  Synthetic
cacatcaacagaaaaccgag

SEQ ID NO: 9087 - DNA, 17 bp, Artificial Sequence
  Synthetic
tcgttaccccaggtgcc

SEQ ID NO: 9088 - DNA, 19 bp, Artificial Sequence
  Synthetic
cggaatcgtataccgggca

SEQ ID NO: 9089 - DNA, 16 bp, Artificial Sequence
  Synthetic
gttcccaagccacgcc

SEQ ID NO: 9090 - DNA, 16 bp, Artificial Sequence
  Synthetic
cgcgcccagaaccaac

SEQ ID NO: 9091 - DNA, 16 bp, Artificial Sequence
  Synthetic
ccacgcggcaacagtc

SEQ ID NO: 9092 - DNA, 16 bp, Artificial Sequence
  Synthetic
gggatgtgcgccagga

SEQ ID NO: 9093 - DNA, 17 bp, Artificial Sequence
  Synthetic
tgttgccgctgtcgaac

SEQ ID NO: 9094 - DNA, 16 bp, Artificial Sequence
  Synthetic
gcgctggccacgatca

SEQ ID NO: 9095 - DNA, 16 bp, Artificial Sequence
  Synthetic
gccataccgccagcct

SEQ ID NO: 9096 - DNA, 18 bp, Artificial Sequence
  Synthetic
cgcacaacgtcaccacta

SEQ ID NO: 9097 - DNA, 18 bp, Artificial Sequence
  Synthetic
tcccatctggtcgggttc

SEQ ID NO: 9098 - DNA, 16 bp, Artificial Sequence
  Synthetic
ggcggccagagaacgt

SEQ ID NO: 9099 - DNA, 18 bp, Artificial Sequence
  Synthetic
tttagcatttcggcgcgg

SEQ ID NO: 9100 - DNA, 19 bp, Artificial Sequence
  Synthetic
atggcgtccaggtgtatga

SEQ ID NO: 9101 - DNA, 18 bp, Artificial Sequence
  Synthetic
gtccagcagttggtcgcg

SEQ ID NO: 9102 - DNA, 20 bp, Artificial Sequence
  Synthetic
aaatcccgcaacacttgtcg

SEQ ID NO: 9103 - DNA, 19 bp, Artificial Sequence
  Synthetic
cgtgaagagccctcatcca

SEQ ID NO: 9104 - DNA, 18 bp, Artificial Sequence
  Synthetic
ggtcacacgctgcagttc

SEQ ID NO: 9105 - DNA, 16 bp, Artificial Sequence
  Synthetic
ccttctcgcgggccta

SEQ ID NO: 9106 - DNA, 20 bp, Artificial Sequence
  Synthetic
ttctacgggtatctgcagct

SEQ ID NO: 9107 - DNA, 16 bp, Artificial Sequence
  Synthetic
gcagacacgcacctgg

SEQ ID NO: 9108 - DNA, 16 bp, Artificial Sequence
  Synthetic
gcgcaccctcctaggt

SEQ ID NO: 9109 - DNA, 22 bp, Artificial Sequence
  Synthetic
aggtactgatccaaaatggaag

SEQ ID NO: 9110 - DNA, 20 bp, Artificial Sequence
  Synthetic
aattgaaggaagagaccgag

SEQ ID NO: 9111 - DNA, 25 bp, Artificial Sequence
  Synthetic
aagaataaaaaccagactattcacc

SEQ ID NO: 9112 - DNA, 23 bp, Artificial Sequence
  Synthetic
cccaaaaacaaagaacatgaaga

SEQ ID NO: 9113 - DNA, 21 bp, Artificial Sequence
  Synthetic
caacaaggcatgtgaattgac

SEQ ID NO: 9114 - DNA, 21 bp, Artificial Sequence
  Synthetic
aaggaagacaaacctgtatgg

SEQ ID NO: 9115 - DNA, 18 bp, Artificial Sequence
  Synthetic
ggggatggaaatgagacg

SEQ ID NO: 9116 - DNA, 18 bp, Artificial Sequence
  Synthetic
cgtctcaaggcaccaaac

SEQ ID NO: 9117 - DNA, 21 bp, Artificial Sequence
  Synthetic
aaaggaccctaagaaaactgg

SEQ ID NO: 9118 - DNA, 18 bp, Artificial Sequence
  Synthetic
gggatagggacaatggtg

SEQ ID NO: 9119 - DNA, 20 bp, Artificial Sequence
  Synthetic
accttagggtctcaagtttc

SEQ ID NO: 9120 - DNA, 20 bp, Artificial Sequence
  Synthetic
tttagacgccattttacacg

SEQ ID NO: 9121 - DNA, 19 bp, Artificial Sequence
  Synthetic
tctgccagctcattttcac

SEQ ID NO: 9122 - DNA, 20 bp, Artificial Sequence
  Synthetic
tattgggggcgaatgtatgc

SEQ ID NO: 9123 - DNA, 18 bp, Artificial Sequence
  Synthetic
cctcacccccgaaactag

SEQ ID NO: 9124 - DNA, 21 bp, Artificial Sequence
  Synthetic
ggtgttgctttgaatagttca

SEQ ID NO: 9125 - DNA, 19 bp, Artificial Sequence
  Synthetic
gcgagaaatcccacctgag

SEQ ID NO: 9126 - DNA, 18 bp, Artificial Sequence
  Synthetic
ggttagagccatgggagg

SEQ ID NO: 9127 - DNA, 23 bp, Artificial Sequence
  Synthetic
aactgtctgtaaaaaagtgtttg

SEQ ID NO: 9128 - DNA, 18 bp, Artificial Sequence
  Synthetic
gcggggtatgtttagacc

SEQ ID NO: 9129 - DNA, 20 bp, Artificial Sequence
  Synthetic
ccaggttaccatattgggcc

SEQ ID NO: 9130 - DNA, 23 bp, Artificial Sequence
  Synthetic
tgatacttgttttttctgacatg

SEQ ID NO: 9131 - DNA, 22 bp, Artificial Sequence
  Synthetic
cgaggtgacatgatatgaagtt

SEQ ID NO: 9132 - DNA, 20 bp, Artificial Sequence
  Synthetic
agatgggggaatcatgtcca

SEQ ID NO: 9133 - DNA, 19 bp, Artificial Sequence
  Synthetic
ccataggcatgtggtccag

SEQ ID NO: 9134 - DNA, 23 bp, Artificial Sequence
  Synthetic
ggcaaggtagcattttaacataa

SEQ ID NO: 9135 - DNA, 20 bp, Artificial Sequence
  Synthetic
acaaaaagactgtcagtgtc

SEQ ID NO: 9136 - DNA, 19 bp, Artificial Sequence
  Synthetic
cacaattttctggtggtgg

SEQ ID NO: 9137 - DNA, 18 bp, Artificial Sequence
  Synthetic
tttgtccctatcggcccg

SEQ ID NO: 9138 - DNA, 20 bp, Artificial Sequence
  Synthetic
taattttccagcgccacctg

SEQ ID NO: 9139 - DNA, 25 bp, Artificial Sequence
  Synthetic
ctcctttttttttccatagttcttg

SEQ ID NO: 9140 - DNA, 19 bp, Artificial Sequence
  Synthetic
gattgggaagggcaaaagt

SEQ ID NO: 9141 - DNA, 22 bp, Artificial Sequence
  Synthetic
aagatcagtagctaaggaggtt

SEQ ID NO: 9142 - DNA, 20 bp, Artificial Sequence
  Synthetic
caccagttggaagaatggct

SEQ ID NO: 9143 - DNA, 20 bp, Artificial Sequence
  Synthetic
tcgtcctcttcctcttctgc

SEQ ID NO: 9144 - DNA, 18 bp, Artificial Sequence
  Synthetic
tgagcccggggactaacc

SEQ ID NO: 9145 - DNA, 22 bp, Artificial Sequence
  Synthetic
cctgtcttaaaatctcctgaac

SEQ ID NO: 9146 - DNA, 20 bp, Artificial Sequence
  Synthetic
tttcttcctcgaccacaggt

SEQ ID NO: 9147 - DNA, 21 bp, Artificial Sequence
  Synthetic
ctttcaagaaaggcatctagc

SEQ ID NO: 9148 - DNA, 23 bp, Artificial Sequence
  Synthetic
gttgtaataaagctaaatctgcc

SEQ ID NO: 9149 - DNA, 18 bp, Artificial Sequence
  Synthetic
cagcacctggagcgagat

SEQ ID NO: 9150 - DNA, 20 bp, Artificial Sequence
  Synthetic
aaagttggtaagcgactccc

SEQ ID NO: 9151 - DNA, 16 bp, Artificial Sequence
  Synthetic
cgattgggcgcccact

SEQ ID NO: 9152 - DNA, 23 bp, Artificial Sequence
  Synthetic
aaaaagctttaataaccatgtgc

SEQ ID NO: 9153 - DNA, 20 bp, Artificial Sequence
  Synthetic
catagcttacaaagggcgct

SEQ ID NO: 9154 - DNA, 19 bp, Artificial Sequence
  Synthetic
ttttcggccattttggaag

SEQ ID NO: 9155 - DNA, 23 bp, Artificial Sequence
  Synthetic
gtggtcaggaagattatacaaac

SEQ ID NO: 9156 - DNA, 18 bp, Artificial Sequence
  Synthetic
gtccttctacgcttccaa

SEQ ID NO: 9157 - DNA, 20 bp, Artificial Sequence
  Synthetic
aacatatgcacaagagcggc

SEQ ID NO: 9158 - DNA, 25 bp, Artificial Sequence
  Synthetic
gtagtgcaaaataatgactattccc

SEQ ID NO: 9159 - DNA, 19 bp, Artificial Sequence
  Synthetic
gtaggaagacagcatggag

SEQ ID NO: 9160 - DNA, 22 bp, Artificial Sequence
  Synthetic
aggatcaaaacactgtaagagg

SEQ ID NO: 9161 - DNA, 20 bp, Artificial Sequence
  Synthetic
tgtccattttggtttcgcca

SEQ ID NO: 9162 - DNA, 16 bp, Artificial Sequence
  Synthetic
tcgccggcgtagacca

SEQ ID NO: 9163 - DNA, 20 bp, Artificial Sequence
  Synthetic
atggcccatcggataacctt

SEQ ID NO: 9164 - DNA, 18 bp, Artificial Sequence
  Synthetic
cggaagaaaagcgtggaa

SEQ ID NO: 9165 - DNA, 20 bp, Artificial Sequence
  Synthetic
tacatccttccattgtgccc

SEQ ID NO: 9166 - DNA, 20 bp, Artificial Sequence
  Synthetic
attgccaaccgtttagagcc

SEQ ID NO: 9167 - DNA, 20 bp, Artificial Sequence
  Synthetic
tcccatctgtgtatacgcct

SEQ ID NO: 9168 - DNA, 20 bp, Artificial Sequence
  Synthetic
acctactcctacaaggctcg

SEQ ID NO: 9169 - DNA, 18 bp, Artificial Sequence
  Synthetic
caaccaacgaacacggag

SEQ ID NO: 9170 - DNA, 21 bp, Artificial Sequence
  Synthetic
tgcaagacagaaatacagagc

SEQ ID NO: 9171 - DNA, 22 bp, Artificial Sequence
  Synthetic
taatttgcaggctaatttgtgg

SEQ ID NO: 9172 - DNA, 20 bp, Artificial Sequence
  Synthetic
gccatcagaaatttgttgct

SEQ ID NO: 9173 - DNA, 25 bp, Artificial Sequence
  Synthetic
ttactcgcctaaaaactaaagaaac

SEQ ID NO: 9174 - DNA, 21 bp, Artificial Sequence
  Synthetic
ctttagaaactttcagcccat

SEQ ID NO: 9175 - DNA, 19 bp, Artificial Sequence
  Synthetic
cgggtaacgctaccaccta

SEQ ID NO: 9176 - DNA, 18 bp, Artificial Sequence
  Synthetic
cactaaagaccgatgcgt

SEQ ID NO: 9177 - DNA, 20 bp, Artificial Sequence
  Synthetic
aaatcaaatggctcttcgcg

SEQ ID NO: 9178 - DNA, 19 bp, Artificial Sequence
  Synthetic
tgtttaaacattcgcagcg

SEQ ID NO: 9179 - DNA, 20 bp, Artificial Sequence
  Synthetic
tccaccaaatgctctttgcg

SEQ ID NO: 9180 - DNA, 23 bp, Artificial Sequence
  Synthetic
tacttttccattagcatagccat

SEQ ID NO: 9181 - DNA, 18 bp, Artificial Sequence
  Synthetic
gctacggctgtcatggag

SEQ ID NO: 9182 - DNA, 20 bp, Artificial Sequence
  Synthetic
aaatcctcgccttaacttct

SEQ ID NO: 9183 - DNA, 19 bp, Artificial Sequence
  Synthetic
ccggcagtaaatcttccgc

SEQ ID NO: 9184 - DNA, 18 bp, Artificial Sequence
  Synthetic
cagagattacgtgcgaga

SEQ ID NO: 9185 - DNA, 18 bp, Artificial Sequence
  Synthetic
accgttctttggtttgca

SEQ ID NO: 9186 - DNA, 18 bp, Artificial Sequence
  Synthetic
ccttgatccccaaaccgg

SEQ ID NO: 9187 - DNA, 20 bp, Artificial Sequence
  Synthetic
aatctcagaaagccaaccgt

SEQ ID NO: 9188 - DNA, 18 bp, Artificial Sequence
  Synthetic
agcagcaacaaggaaagt

SEQ ID NO: 9189 - DNA, 20 bp, Artificial Sequence
  Synthetic
atgaattggttaagcgccgg

SEQ ID NO: 9190 - DNA, 25 bp, Artificial Sequence
  Synthetic
ggaattgatacacacctcattaaat

SEQ ID NO: 9191 - DNA, 23 bp, Artificial Sequence
  Synthetic
aaactacacaaagaaaacatcac

SEQ ID NO: 9192 - DNA, 22 bp, Artificial Sequence
  Synthetic
tcgcagctcttattttattcct

SEQ ID NO: 9193 - DNA, 24 bp, Artificial Sequence
  Synthetic
aatgcatcattacttcaaagtacc

SEQ ID NO: 9194 - DNA, 22 bp, Artificial Sequence
  Synthetic
cagcctttatttatctgtgctg

SEQ ID NO: 9195 - DNA, 23 bp, Artificial Sequence
  Synthetic
ctgggtttatggaattatgtctg

SEQ ID NO: 9196 - DNA, 24 bp, Artificial Sequence
  Synthetic
gagttaattgatttacaaaccgtg

SEQ ID NO: 9197 - DNA, 23 bp, Artificial Sequence
  Synthetic
ttaccggaaatctgaaaatacat

SEQ ID NO: 9198 - DNA, 19 bp, Artificial Sequence
  Synthetic
ttacactcaagctagggga

SEQ ID NO: 9199 - DNA, 20 bp, Artificial Sequence
  Synthetic
tctcaccactgaaactccct

SEQ ID NO: 9200 - DNA, 23 bp, Artificial Sequence
  Synthetic
gtaacaagaataggggatggttt

SEQ ID NO: 9201 - DNA, 22 bp, Artificial Sequence
  Synthetic
taagtttagtgggtgttaaggg

SEQ ID NO: 9202 - DNA, 21 bp, Artificial Sequence
  Synthetic
tttaacattcatgtggtcagg

SEQ ID NO: 9203 - DNA, 19 bp, Artificial Sequence
  Synthetic
tgatggaaacgaatccctc

SEQ ID NO: 9204 - DNA, 20 bp, Artificial Sequence
  Synthetic
gttaacaacctcccgatacc

SEQ ID NO: 9205 - DNA, 19 bp, Artificial Sequence
  Synthetic
aggaatgcctcttacctca

SEQ ID NO: 9206 - DNA, 19 bp, Artificial Sequence
  Synthetic
cgacttacaggaggaggag

SEQ ID NO: 9207 - DNA, 22 bp, Artificial Sequence
  Synthetic
aaaagtctggatcttcaaacac

SEQ ID NO: 9208 - DNA, 20 bp, Artificial Sequence
  Synthetic
cctcaaaatctaagccatgc

SEQ ID NO: 9209 - DNA, 22 bp, Artificial Sequence
  Synthetic
aggaatatcaactgctatgtgc

SEQ ID NO: 9210 - DNA, 20 bp, Artificial Sequence
  Synthetic
aacggtcaagcacttctgtt

SEQ ID NO: 9211 - DNA, 19 bp, Artificial Sequence
  Synthetic
ataaggatgcggcaagctc

SEQ ID NO: 9212 - DNA, 20 bp, Artificial Sequence
  Synthetic
tggccaaaacatgttccacc

SEQ ID NO: 9213 - DNA, 19 bp, Artificial Sequence
  Synthetic
acaaaccctaccaatcacc

SEQ ID NO: 9214 - DNA, 18 bp, Artificial Sequence
  Synthetic
acgttgtgtgggatttgg

SEQ ID NO: 9215 - DNA, 24 bp, Artificial Sequence
  Synthetic
gacattgattgaaacgagatatgt

SEQ ID NO: 9216 - DNA, 18 bp, Artificial Sequence
  Synthetic
gatggagccgagaacagt

SEQ ID NO: 9217 - DNA, 25 bp, Artificial Sequence
  Synthetic
cccaaaacatattcaatatgacatc

SEQ ID NO: 9218 - DNA, 19 bp, Artificial Sequence
  Synthetic
tagcagacaaggtgactca

SEQ ID NO: 9219 - DNA, 22 bp, Artificial Sequence
  Synthetic
cacctgatcccaaatactttga

SEQ ID NO: 9220 - DNA, 21 bp, Artificial Sequence
  Synthetic
gccaggaaaagaaaaacagaa

SEQ ID NO: 9221 - DNA, 18 bp, Artificial Sequence
  Synthetic
aatacccacacatgccca

SEQ ID NO: 9222 - DNA, 20 bp, Artificial Sequence
  Synthetic
caaggtacaagatgttggtc

SEQ ID NO: 9223 - DNA, 21 bp, Artificial Sequence
  Synthetic
agctcctgcaaaaataaaagc

SEQ ID NO: 9224 - DNA, 23 bp, Artificial Sequence
  Synthetic
ctgaaaattgtagcatatggtga

SEQ ID NO: 9225 - DNA, 24 bp, Artificial Sequence
  Synthetic
cggaagagatacatataaaaaggg

SEQ ID NO: 9226 - DNA, 20 bp, Artificial Sequence
  Synthetic
ccacggttgcagatcttaat

SEQ ID NO: 9227 - DNA, 19 bp, Artificial Sequence
  Synthetic
gaaagctgacgttttgctg

SEQ ID NO: 9228 - DNA, 21 bp, Artificial Sequence
  Synthetic
gaggattgtgacaatgcacta

SEQ ID NO: 9229 - DNA, 23 bp, Artificial Sequence
  Synthetic
aaactgtacaaaagttgatgtgt

SEQ ID NO: 9230 - DNA, 21 bp, Artificial Sequence
  Synthetic
aaaagcttggcagacaattag

SEQ ID NO: 9231 - DNA, 25 bp, Artificial Sequence
  Synthetic
tatgatggcttatactttacagacc

SEQ ID NO: 9232 - DNA, 20 bp, Artificial Sequence
  Synthetic
ggaggaaaccgaggaaatcc

SEQ ID NO: 9233 - DNA, 18 bp, Artificial Sequence
  Synthetic
agctagggatccgcctat

SEQ ID NO: 9234 - DNA, 25 bp, Artificial Sequence
  Synthetic
gttccaaatctttatgcaaaatgtc

SEQ ID NO: 9235 - DNA, 22 bp, Artificial Sequence
  Synthetic
ctagtggtactttagtaaggcc

SEQ ID NO: 9236 - DNA, 19 bp, Artificial Sequence
  Synthetic
caatcatatctggcgagga

SEQ ID NO: 9237 - DNA, 22 bp, Artificial Sequence
  Synthetic
tagaaagccctccaaaaactag

SEQ ID NO: 9238 - DNA, 18 bp, Artificial Sequence
  Synthetic
ctatagggcgtccaaggt

SEQ ID NO: 9239 - DNA, 20 bp, Artificial Sequence
  Synthetic
gtgaaagatgtacaggaacc

SEQ ID NO: 9240 - DNA, 19 bp, Artificial Sequence
  Synthetic
tagtgctcctttggatgtc

SEQ ID NO: 9241 - DNA, 21 bp, Artificial Sequence
  Synthetic
tctaactgcagatgttatggc

SEQ ID NO: 9242 - DNA, 21 bp, Artificial Sequence
  Synthetic
tgcaaacgtgtatgtatctgt

SEQ ID NO: 9243 - DNA, 17 bp, Artificial Sequence
  Synthetic
attacccaggcagccga

SEQ ID NO: 9244 - DNA, 24 bp, Artificial Sequence
  Synthetic
caagcacaaattttccttaaatcc

SEQ ID NO: 9245 - DNA, 21 bp, Artificial Sequence
  Synthetic
tgcaatatgctagaagactgc

SEQ ID NO: 9246 - DNA, 20 bp, Artificial Sequence
  Synthetic
ggatacgtacgcaacagagc

SEQ ID NO: 9247 - DNA, 22 bp, Artificial Sequence
  Synthetic
cagaagcagaggattatggaaa

SEQ ID NO: 9248 - DNA, 20 bp, Artificial Sequence
  Synthetic
ggtaaaaccaacaggaaacg

SEQ ID NO: 9249 - DNA, 23 bp, Artificial Sequence
  Synthetic
tcaaaaattgttgaaactgtagc

SEQ ID NO: 9250 - DNA, 24 bp, Artificial Sequence
  Synthetic
gtatgttctttgatggagaatttg

SEQ ID NO: 9251 - DNA, 21 bp, Artificial Sequence
  Synthetic
ttcagaactagagcaaacaga

SEQ ID NO: 9252 - DNA, 23 bp, Artificial Sequence
  Synthetic
cgaaaacggttgtatataaacca

SEQ ID NO: 9253 - DNA, 18 bp, Artificial Sequence
  Synthetic
gcggctatccatatgcag

SEQ ID NO: 9254 - DNA, 21 bp, Artificial Sequence
  Synthetic
atggaagacatgttaccctaa

SEQ ID NO: 9255 - DNA, 19 bp, Artificial Sequence
  Synthetic
aagacctaacaacgatggc

SEQ ID NO: 9256 - DNA, 18 bp, Artificial Sequence
  Synthetic
cgactgtgcaggacctaa

SEQ ID NO: 9257 - DNA, 19 bp, Artificial Sequence
  Synthetic
gtcaggaaaaggacacagg

SEQ ID NO: 9258 - DNA, 21 bp, Artificial Sequence
  Synthetic
aacagttattgaacacgggtt

SEQ ID NO: 9259 - DNA, 25 bp, Artificial Sequence
  Synthetic
agtgtatgaactgtcaaatacaaac

SEQ ID NO: 9260 - DNA, 20 bp, Artificial Sequence
  Synthetic
gtagtgccaccattaaaggt

SEQ ID NO: 9261 - DNA, 18 bp, Artificial Sequence
  Synthetic
ctaggaaacgagcacgag

SEQ ID NO: 9262 - DNA, 18 bp, Artificial Sequence
  Synthetic
tcctcaaaggcaccacat

SEQ ID NO: 9263 - DNA, 24 bp, Artificial Sequence
  Synthetic
gcatttgttgtatgttttgttagc

SEQ ID NO: 9264 - DNA, 23 bp, Artificial Sequence
  Synthetic
attcctttagatacttttgtggt

SEQ ID NO: 9265 - DNA, 25 bp, Artificial Sequence
  Synthetic
cagatacatatttaacttccacacc

SEQ ID NO: 9266 - DNA, 19 bp, Artificial Sequence
  Synthetic
gcgacagcacagtatatgt

SEQ ID NO: 9267 - DNA, 21 bp, Artificial Sequence
  Synthetic
ccgcccttagaacttattacc

SEQ ID NO: 9268 - DNA, 24 bp, Artificial Sequence
  Synthetic
gtctgtagggagtagtatatatgt

SEQ ID NO: 9269 - DNA, 18 bp, Artificial Sequence
  Synthetic
caggtacacattgccctg

SEQ ID NO: 9270 - DNA, 18 bp, Artificial Sequence
  Synthetic
aagcgtctagccatggcg

SEQ ID NO: 9271 - DNA, 19 bp, Artificial Sequence
  Synthetic
caaacgtaacaccaaccgc

SEQ ID NO: 9272 - DNA, 20 bp, Artificial Sequence
  Synthetic
catcgataccctaacctgcg

SEQ ID NO: 9273 - DNA, 20 bp, Artificial Sequence
  Synthetic
cacatcatgcaccttccagg

SEQ ID NO: 9274 - DNA, 20 bp, Artificial Sequence
  Synthetic
tgaactggagtccaacaacc

SEQ ID NO: 9275 - DNA, 20 bp, Artificial Sequence
  Synthetic
actgggttcttggctagctt

SEQ ID NO: 9276 - DNA, 18 bp, Artificial Sequence
  Synthetic
tggggggagaacgagact

SEQ ID NO: 9277 - DNA, 18 bp, Artificial Sequence
  Synthetic
cggcggtatagagcatcg

SEQ ID NO: 9278 - DNA, 18 bp, Artificial Sequence
  Synthetic
ggtgcccaaggcttctgg

SEQ ID NO: 9279 - DNA, 19 bp, Artificial Sequence
  Synthetic
ggggattgtggtggatcca

SEQ ID NO: 9280 - DNA, 18 bp, Artificial Sequence
  Synthetic
gtggccctagagccagtt

SEQ ID NO: 9281 - DNA, 18 bp, Artificial Sequence
  Synthetic
ctggcagggacaccaatg

SEQ ID NO: 9282 - DNA, 16 bp, Artificial Sequence
  Synthetic
ggaggtccgctgctgt

SEQ ID NO: 9283 - DNA, 18 bp, Artificial Sequence
  Synthetic
ggccacactgggttttgg

SEQ ID NO: 9284 - DNA, 20 bp, Artificial Sequence
  Synthetic
tccaacatagaggaggtcgc

SEQ ID NO: 9285 - DNA, 20 bp, Artificial Sequence
  Synthetic
gacttcagcttggaccccac

SEQ ID NO: 9286 - DNA, 20 bp, Artificial Sequence
  Synthetic
ttcctatcccagaccaagca

SEQ ID NO: 9287 - DNA, 19 bp, Artificial Sequence
  Synthetic
ctgtctttcagtgggcagc

SEQ ID NO: 9288 - DNA, 20 bp, Artificial Sequence
  Synthetic
atctcgctggactgtctact

SEQ ID NO: 9289 - DNA, 20 bp, Artificial Sequence
  Synthetic
ttggtaaatttgctcccggc

SEQ ID NO: 9290 - DNA, 18 bp, Artificial Sequence
  Synthetic
gggattgggtcttgcacg

SEQ ID NO: 9291 - DNA, 20 bp, Artificial Sequence
  Synthetic
ttccattatgtcaccggggt

SEQ ID NO: 9292 - DNA, 19 bp, Artificial Sequence
  Synthetic
gagattggctcgagggtca

SEQ ID NO: 9293 - DNA, 20 bp, Artificial Sequence
  Synthetic
cacctcttaccgagacgtgg

SEQ ID NO: 9294 - DNA, 18 bp, Artificial Sequence
  Synthetic
ggtgacccggacttgaca

SEQ ID NO: 9295 - DNA, 20 bp, Artificial Sequence
  Synthetic
ttaccacagaggaagcttgc

SEQ ID NO: 9296 - DNA, 20 bp, Artificial Sequence
  Synthetic
atggcttccaatactcccca

SEQ ID NO: 9297 - DNA, 20 bp, Artificial Sequence
  Synthetic
tgacgtgctatctcaaagcc

SEQ ID NO: 9298 - DNA, 19 bp, Artificial Sequence
  Synthetic
cttatcgcccagggaggta

SEQ ID NO: 9299 - DNA, 19 bp, Artificial Sequence
  Synthetic
cgatccagtggttgtaagg

SEQ ID NO: 9300 - DNA, 23 bp, Artificial Sequence
  Synthetic
tcaatggacccatctaagtttac

SEQ ID NO: 9301 - DNA, 23 bp, Artificial Sequence
  Synthetic
cttctgtctgtaggttttacaca

SEQ ID NO: 9302 - DNA, 21 bp, Artificial Sequence
  Synthetic
acgcatacaaaagatgaggtt

SEQ ID NO: 9303 - DNA, 18 bp, Artificial Sequence
  Synthetic
tccacaggacaggagaga

SEQ ID NO: 9304 - DNA, 21 bp, Artificial Sequence
  Synthetic
gtgcatgtccagattttaagc

SEQ ID NO: 9305 - DNA, 19 bp, Artificial Sequence
  Synthetic
tcaagcaatttggtggtcc

SEQ ID NO: 9306 - DNA, 22 bp, Artificial Sequence
  Synthetic
caaaactcttgtcaagatcaga

SEQ ID NO: 9307 - DNA, 24 bp, Artificial Sequence
  Synthetic
cctatccaaatagagatttagcaa

SEQ ID NO: 9308 - DNA, 18 bp, Artificial Sequence
  Synthetic
ctgcggtgggattttgag

SEQ ID NO: 9309 - DNA, 23 bp, Artificial Sequence
  Synthetic
tttcagctttagtgatcatttgc

SEQ ID NO: 9310 - DNA, 23 bp, Artificial Sequence
  Synthetic
aaaagtaaacaaagaactgaacc

SEQ ID NO: 9311 - DNA, 20 bp, Artificial Sequence
  Synthetic
tcaaatggtttcttcagtgg

SEQ ID NO: 9312 - DNA, 18 bp, Artificial Sequence
  Synthetic
tggatgccactttggtag

SEQ ID NO: 9313 - DNA, 24 bp, Artificial Sequence
  Synthetic
tagagaaacaaggccaagtaatag

SEQ ID NO: 9314 - DNA, 25 bp, Artificial Sequence
  Synthetic
taaggatgaattaagaagtgttgac

SEQ ID NO: 9315 - DNA, 22 bp, Artificial Sequence
  Synthetic
cttacggtgatgatttgattgt

SEQ ID NO: 9316 - DNA, 20 bp, Artificial Sequence
  Synthetic
aagtcaatggctgagtcacc

SEQ ID NO: 9317 - DNA, 19 bp, Artificial Sequence
  Synthetic
gccacccgaacattcaacc

SEQ ID NO: 9318 - DNA, 18 bp, Artificial Sequence
  Synthetic
gacgtcctcgaagcctga

SEQ ID NO: 9319 - DNA, 18 bp, Artificial Sequence
  Synthetic
cagtgggggcagtgtcat

SEQ ID NO: 9320 - DNA, 19 bp, Artificial Sequence
  Synthetic
tgatccaaagtgggctgtg

SEQ ID NO: 9321 - DNA, 20 bp, Artificial Sequence
  Synthetic
atggagactctcttccctac

SEQ ID NO: 9322 - DNA, 23 bp, Artificial Sequence
  Synthetic
tattgtgtgaagaatcattgtca

SEQ ID NO: 9323 - DNA, 18 bp, Artificial Sequence
  Synthetic
tgcagcacttagtccaag

SEQ ID NO: 9324 - DNA, 18 bp, Artificial Sequence
  Synthetic
gtgagccaccaaaatgca

SEQ ID NO: 9325 - DNA, 21 bp, Artificial Sequence
  Synthetic
gggaaagtcgtatttctgttt

SEQ ID NO: 9326 - DNA, 20 bp, Artificial Sequence
  Synthetic
atcttcccttctgttgccag

SEQ ID NO: 9327 - DNA, 22 bp, Artificial Sequence
  Synthetic
ccagtaagagaagaagaagagg

SEQ ID NO: 9328 - DNA, 21 bp, Artificial Sequence
  Synthetic
tgggagagtattggtagcttt

SEQ ID NO: 9329 - DNA, 20 bp, Artificial Sequence
  Synthetic
cgttgttgaaggtgtttggg

SEQ ID NO: 9330 - DNA, 23 bp, Artificial Sequence
  Synthetic
ttgtaaatccagcttttaatggt

SEQ ID NO: 9331 - DNA, 19 bp, Artificial Sequence
  Synthetic
tttacaaatcccgcctttg

SEQ ID NO: 9332 - DNA, 18 bp, Artificial Sequence
  Synthetic
ggttggcactactggtca

SEQ ID NO: 9333 - DNA, 19 bp, Artificial Sequence
  Synthetic
ggacatgtgcgatattggg

SEQ ID NO: 9334 - DNA, 24 bp, Artificial Sequence
  Synthetic
tttagaacctgataacaatacacc

SEQ ID NO: 9335 - DNA, 18 bp, Artificial Sequence
  Synthetic
tacccccctctgaaaagc

SEQ ID NO: 9336 - DNA, 24 bp, Artificial Sequence
  Synthetic
ctaggtaagtacagtaaccgttat

SEQ ID NO: 9337 - DNA, 20 bp, Artificial Sequence
  Synthetic
ttaaggctcctggcatcact

SEQ ID NO: 9338 - DNA, 20 bp, Artificial Sequence
  Synthetic
tgccttgaaattggtgccca

SEQ ID NO: 9339 - DNA, 20 bp, Artificial Sequence
  Synthetic
atgtcaccatctgatgtcgc

SEQ ID NO: 9340 - DNA, 18 bp, Artificial Sequence
  Synthetic
cctctcgtcattgagcgg

SEQ ID NO: 9341 - DNA, 18 bp, Artificial Sequence
  Synthetic
ttgctgctcccgcctaat

SEQ ID NO: 9342 - DNA, 18 bp, Artificial Sequence
  Synthetic
ggccgtcagttggagttc

SEQ ID NO: 9343 - DNA, 19 bp, Artificial Sequence
  Synthetic
gaggcctatgaggggtctg

SEQ ID NO: 9344 - DNA, 19 bp, Artificial Sequence
  Synthetic
agactaatggcccagagcg

SEQ ID NO: 9345 - DNA, 16 bp, Artificial Sequence
  Synthetic
tggtgagccggctcct

SEQ ID NO: 9346 - DNA, 18 bp, Artificial Sequence
  Synthetic
cttttgtgatgcgcgacg

SEQ ID NO: 9347 - DNA, 18 bp, Artificial Sequence
  Synthetic
gcttgctgccagatggtt

SEQ ID NO: 9348 - DNA, 17 bp, Artificial Sequence
  Synthetic
ttgcgtaatgcctggcg

SEQ ID NO: 9349 - DNA, 18 bp, Artificial Sequence
  Synthetic
atgtgacccatcgctgcc

SEQ ID NO: 9350 - DNA, 18 bp, Artificial Sequence
  Synthetic
ccgagctcatgccattgt

SEQ ID NO: 9351 - DNA, 18 bp, Artificial Sequence
  Synthetic
gccattggccacgtacag

SEQ ID NO: 9352 - DNA, 20 bp, Artificial Sequence
  Synthetic
ttgtatgcaggtgttgtggt

SEQ ID NO: 9353 - DNA, 16 bp, Artificial Sequence
  Synthetic
ccttcgcccccgatgt

SEQ ID NO: 9354 - DNA, 16 bp, Artificial Sequence
  Synthetic
ccctcgggctgttgga

SEQ ID NO: 9355 - DNA, 19 bp, Artificial Sequence
  Synthetic
ccccttttctgtcctccga

SEQ ID NO: 9356 - DNA, 20 bp, Artificial Sequence
  Synthetic
aggtactactaaagccgggt

SEQ ID NO: 9357 - DNA, 18 bp, Artificial Sequence
  Synthetic
ttcagagggtccaaatcg

SEQ ID NO: 9358 - DNA, 19 bp, Artificial Sequence
  Synthetic
catcgccggttttacaaag

SEQ ID NO: 9359 - DNA, 23 bp, Artificial Sequence
  Synthetic
ccttagcgtgtgtaaatatctca

SEQ ID NO: 9360 - DNA, 19 bp, Artificial Sequence
  Synthetic
tacattaccaagcgaaggt

SEQ ID NO: 9361 - DNA, 21 bp, Artificial Sequence
  Synthetic
cccgaattttttttattgcct

SEQ ID NO: 9362 - DNA, 19 bp, Artificial Sequence
  Synthetic
tcttacaaacaatcccccg

SEQ ID NO: 9363 - DNA, 21 bp, Artificial Sequence
  Synthetic
agttcgacatacagtagatgc

SEQ ID NO: 9364 - DNA, 21 bp, Artificial Sequence
  Synthetic
gcaaaactggtgatacttagt

SEQ ID NO: 9365 - DNA, 22 bp, Artificial Sequence
  Synthetic
gccgactaacaattatacttgt

SEQ ID NO: 9366 - DNA, 19 bp, Artificial Sequence
  Synthetic
acaacggaatctgatcgta

SEQ ID NO: 9367 - DNA, 21 bp, Artificial Sequence
  Synthetic
tgtgtaaaggtagacaactga

SEQ ID NO: 9368 - DNA, 20 bp, Artificial Sequence
  Synthetic
tcacctaaaaacctgactca

SEQ ID NO: 9369 - DNA, 16 bp, Artificial Sequence
  Synthetic
ccccgtggtgtccgaa

SEQ ID NO: 9370 - DNA, 18 bp, Artificial Sequence
  Synthetic
ctcgtccacaaagtcggc

SEQ ID NO: 9371 - DNA, 16 bp, Artificial Sequence
  Synthetic
gccgctctcacagcct

SEQ ID NO: 9372 - DNA, 17 bp, Artificial Sequence
  Synthetic
ggcagggccaaaaacgc

SEQ ID NO: 9373 - DNA, 20 bp, Artificial Sequence
  Synthetic
cgagagcgtcagtattaagc

SEQ ID NO: 9374 - DNA, 20 bp, Artificial Sequence
  Synthetic
ataaaagacaccaaggaagc

SEQ ID NO: 9375 - DNA, 22 bp, Artificial Sequence
  Synthetic
gccatgcaaatgttaaaagaga

SEQ ID NO: 9376 - DNA, 22 bp, Artificial Sequence
  Synthetic
tagaccggttctataaaactct

SEQ ID NO: 9377 - DNA, 25 bp, Artificial Sequence
  Synthetic
accatacctagtataaacaatgaga

SEQ ID NO: 9378 - DNA, 22 bp, Artificial Sequence
  Synthetic
ttcctttggatgggttatgaac

SEQ ID NO: 9379 - DNA, 25 bp, Artificial Sequence
  Synthetic
gagccatttaaaaatctgaaaacag

SEQ ID NO: 9380 - DNA, 25 bp, Artificial Sequence
  Synthetic
gaacaagtagataaattagtcagtg

SEQ ID NO: 9381 - DNA, 21 bp, Artificial Sequence
  Synthetic
tatcctggtagcagttcatgt

SEQ ID NO: 9382 - DNA, 25 bp, Artificial Sequence
  Synthetic
gtaaaacaccatatgtatgtttcag

SEQ ID NO: 9383 - DNA, 25 bp, Artificial Sequence
  Synthetic
attactttgactgtttttcagactc

SEQ ID NO: 9384 - DNA, 20 bp, Artificial Sequence
  Synthetic
ttttcctaggatttggctcc

SEQ ID NO: 9385 - DNA, 18 bp, Artificial Sequence
  Synthetic
catgctccttgggatgtt

SEQ ID NO: 9386 - DNA, 23 bp, Artificial Sequence
  Synthetic
ctggttttgcgattctaaaatgt

SEQ ID NO: 9387 - DNA, 22 bp, Artificial Sequence
  Synthetic
taaacatgtggcagaaagtagg

SEQ ID NO: 9388 - DNA, 18 bp, Artificial Sequence
  Synthetic
gcaggaagcactatgggc

SEQ ID NO: 9389 - DNA, 19 bp, Artificial Sequence
  Synthetic
aagatgggtggcaagtggt

SEQ ID NO: 9390 - DNA, 19 bp, Artificial Sequence
  Synthetic
gagtggaggtttgacagcc

SEQ ID NO: 9391 - DNA, 16 bp, Artificial Sequence
  Synthetic
acgcctgggggatgct

SEQ ID NO: 9392 - DNA, 16 bp, Artificial Sequence
  Synthetic
tggctacgtacgcgct

SEQ ID NO: 9393 - DNA, 16 bp, Artificial Sequence
  Synthetic
gcagggccacggacat

SEQ ID NO: 9394 - DNA, 16 bp, Artificial Sequence
  Synthetic
gcggtggtctcaggct

SEQ ID NO: 9395 - DNA, 17 bp, Artificial Sequence
  Synthetic
cgcgacaggaaccggta

SEQ ID NO: 9396 - DNA, 19 bp, Artificial Sequence
  Synthetic
gtgagcacggggagggtaa

SEQ ID NO: 9397 - DNA, 16 bp, Artificial Sequence
  Synthetic
tcagaaacgcccccga

SEQ ID NO: 9398 - DNA, 19 bp, Artificial Sequence
  Synthetic
gccaacagtttccagcacc

SEQ ID NO: 9399 - DNA, 18 bp, Artificial Sequence
  Synthetic
ggctctccttgtttcgcc

SEQ ID NO: 9400 - DNA, 16 bp, Artificial Sequence
  Synthetic
ctccgcagctgccact

SEQ ID NO: 9401 - DNA, 18 bp, Artificial Sequence
  Synthetic
agggtaatggcgctgacg

SEQ ID NO: 9402 - DNA, 16 bp, Artificial Sequence
  Synthetic
gtcggccacgcgctta

SEQ ID NO: 9403 - DNA, 16 bp, Artificial Sequence
  Synthetic
cggccatggtgctgca

SEQ ID NO: 9404 - DNA, 17 bp, Artificial Sequence
  Synthetic
ccacgtggttgagcagc

SEQ ID NO: 9405 - DNA, 16 bp, Artificial Sequence
  Synthetic
gtgcggcggatcgaag

SEQ ID NO: 9406 - DNA, 20 bp, Artificial Sequence
  Synthetic
tgtccacgacgtcaaattcg

SEQ ID NO: 9407 - DNA, 16 bp, Artificial Sequence
  Synthetic
ctcggggccacgtaca

SEQ ID NO: 9408 - DNA, 16 bp, Artificial Sequence
  Synthetic
tgtcgtacgcggggaa

SEQ ID NO: 9409 - DNA, 16 bp, Artificial Sequence
  Synthetic
aggtcgctcgctgtcg

SEQ ID NO: 9410 - DNA, 17 bp, Artificial Sequence
  Synthetic
cccaacgcaacgcctac

SEQ ID NO: 9411 - DNA, 17 bp, Artificial Sequence
  Synthetic
gctggtttggctcgtcc

SEQ ID NO: 9412 - DNA, 18 bp, Artificial Sequence
  Synthetic
cgcaccaaaagcagaggg

SEQ ID NO: 9413 - DNA, 20 bp, Artificial Sequence
  Synthetic
atggtaaacgcaaagcctcc

SEQ ID NO: 9414 - DNA, 16 bp, Artificial Sequence
  Synthetic
gccgggttgaacagcc

SEQ ID NO: 9415 - DNA, 17 bp, Artificial Sequence
  Synthetic
gagcggccattgggttc

SEQ ID NO: 9416 - DNA, 16 bp, Artificial Sequence
  Synthetic
gcaggtggcggtgaga

SEQ ID NO: 9417 - DNA, 16 bp, Artificial Sequence
  Synthetic
ggacgaaggcgcggat

SEQ ID NO: 9418 - DNA, 20 bp, Artificial Sequence
  Synthetic
tcaaagaacgtggtgttggg

SEQ ID NO: 9419 - DNA, 19 bp, Artificial Sequence
  Synthetic
gaccttcatgaccgcgctg

SEQ ID NO: 9420 - DNA, 19 bp, Artificial Sequence
  Synthetic
aacaccattacggccctgg

SEQ ID NO: 9421 - DNA, 17 bp, Artificial Sequence
  Synthetic
ccttgatctcgtggcgc

SEQ ID NO: 9422 - DNA, 18 bp, Artificial Sequence
  Synthetic
ttgaaactcgctgacggc

SEQ ID NO: 9423 - DNA, 16 bp, Artificial Sequence
  Synthetic
tcgcgccgtagtccag

SEQ ID NO: 9424 - DNA, 16 bp, Artificial Sequence
  Synthetic
ggcggcgtctgggttt

SEQ ID NO: 9425 - DNA, 18 bp, Artificial Sequence
  Synthetic
ggggtttgtcaccttcgg

SEQ ID NO: 9426 - DNA, 19 bp, Artificial Sequence
  Synthetic
aagtggtggtccatgacgt

SEQ ID NO: 9427 - DNA, 17 bp, Artificial Sequence
  Synthetic
gagtacgtcctgcggct

SEQ ID NO: 9428 - DNA, 18 bp, Artificial Sequence
  Synthetic
ggactgtccctcggagac

SEQ ID NO: 9429 - DNA, 16 bp, Artificial Sequence
  Synthetic
cgggcggtctgggtta

SEQ ID NO: 9430 - DNA, 16 bp, Artificial Sequence
  Synthetic
actacgcgctcgctga

SEQ ID NO: 9431 - DNA, 16 bp, Artificial Sequence
  Synthetic
ggcatcgggctgtgca

SEQ ID NO: 9432 - DNA, 19 bp, Artificial Sequence
  Synthetic
atgatcgacagcacgctac

SEQ ID NO: 9433 - DNA, 16 bp, Artificial Sequence
  Synthetic
ctgcgcgctgtaagca

SEQ ID NO: 9434 - DNA, 18 bp, Artificial Sequence
  Synthetic
ctcccagtgccccgacat

SEQ ID NO: 9435 - DNA, 20 bp, Artificial Sequence
  Synthetic
ttgacgtatctgtgctccac

SEQ ID NO: 9436 - DNA, 18 bp, Artificial Sequence
  Synthetic
ggggatcggagtggctgt

SEQ ID NO: 9437 - DNA, 18 bp, Artificial Sequence
  Synthetic
gacccacccgttgatcgc

SEQ ID NO: 9438 - DNA, 16 bp, Artificial Sequence
  Synthetic
gcccagggcgatcctt

SEQ ID NO: 9439 - DNA, 16 bp, Artificial Sequence
  Synthetic
ggcgatggggacggaa

SEQ ID NO: 9440 - DNA, 17 bp, Artificial Sequence
  Synthetic
cggactccgtcgtgtgt

SEQ ID NO: 9441 - DNA, 18 bp, Artificial Sequence
  Synthetic
ttccactttcacgccccg

SEQ ID NO: 9442 - DNA, 19 bp, Artificial Sequence
  Synthetic
gaaccaaagcctctcgtgt

SEQ ID NO: 9443 - DNA, 17 bp, Artificial Sequence
  Synthetic
tgcttggaggccctctg

SEQ ID NO: 9444 - DNA, 20 bp, Artificial Sequence
  Synthetic
cgtgttcttgcaatacccct

SEQ ID NO: 9445 - DNA, 18 bp, Artificial Sequence
  Synthetic
catgacaacgacgcccct

SEQ ID NO: 9446 - DNA, 18 bp, Artificial Sequence
  Synthetic
gtcatccctgcatgcgtg

SEQ ID NO: 9447 - DNA, 17 bp, Artificial Sequence
  Synthetic
ggggtggtggtagtggt

SEQ ID NO: 9448 - DNA, 18 bp, Artificial Sequence
  Synthetic
cggtcacgcccactatca

SEQ ID NO: 9449 - DNA, 19 bp, Artificial Sequence
  Synthetic
gggctcatcgggaatctcg

SEQ ID NO: 9450 - DNA, 16 bp, Artificial Sequence
  Synthetic
ccgggtttcgtggcct

SEQ ID NO: 9451 - DNA, 17 bp, Artificial Sequence
  Synthetic
cctgctagttgtcgcgg

SEQ ID NO: 9452 - DNA, 16 bp, Artificial Sequence
  Synthetic
ttccagccccccagca

SEQ ID NO: 9453 - DNA, 17 bp, Artificial Sequence
  Synthetic
gcaacgcgcgactatgc

SEQ ID NO: 9454 - DNA, 17 bp, Artificial Sequence
  Synthetic
ggtcacaccctaagcgc

SEQ ID NO: 9455 - DNA, 20 bp, Artificial Sequence
  Synthetic
tttacgctttcgaccagagc

SEQ ID NO: 9456 - DNA, 19 bp, Artificial Sequence
  Synthetic
tctgtgcatagaattggcg

SEQ ID NO: 9457 - DNA, 18 bp, Artificial Sequence
  Synthetic
tccccacacccaggagaa

SEQ ID NO: 9458 - DNA, 18 bp, Artificial Sequence
  Synthetic
accaggccattcaaaagc

SEQ ID NO: 9459 - DNA, 18 bp, Artificial Sequence
  Synthetic
aaggacacgaaacatgcc

SEQ ID NO: 9460 - DNA, 24 bp, Artificial Sequence
  Synthetic
gtgaagaattgtagcataatggtt

SEQ ID NO: 9461 - DNA, 22 bp, Artificial Sequence
  Synthetic
caaatcatattttgccaatggt

SEQ ID NO: 9462 - DNA, 24 bp, Artificial Sequence
  Synthetic
cgtctcggacatttaagaaattag

SEQ ID NO: 9463 - DNA, 19 bp, Artificial Sequence
  Synthetic
ctgtcacctaccggctagg

SEQ ID NO: 9464 - DNA, 23 bp, Artificial Sequence
  Synthetic
agagaaaagttcctcaaatctgt

SEQ ID NO: 9465 - DNA, 20 bp, Artificial Sequence
  Synthetic
tgtaggggttttctttggcg

SEQ ID NO: 9466 - DNA, 18 bp, Artificial Sequence
  Synthetic
ctgaaagcggtggcacat

SEQ ID NO: 9467 - DNA, 20 bp, Artificial Sequence
  Synthetic
ttgaggatgatctgcagcag

SEQ ID NO: 9468 - DNA, 23 bp, Artificial Sequence
  Synthetic
ctattgagccaattgatgcaatt

SEQ ID NO: 9469 - DNA, 22 bp, Artificial Sequence
  Synthetic
agattttacttaccccctcaac

SEQ ID NO: 9470 - DNA, 18 bp, Artificial Sequence
  Synthetic
ctggtctggggtattcgt

SEQ ID NO: 9471 - DNA, 18 bp, Artificial Sequence
  Synthetic
aaaaccctccactgacca

SEQ ID NO: 9472 - DNA, 18 bp, Artificial Sequence
  Synthetic
ttgacactaccaggggaa

SEQ ID NO: 9473 - DNA, 21 bp, Artificial Sequence
  Synthetic
gtacatactgtccattgcaac

SEQ ID NO: 9474 - DNA, 18 bp, Artificial Sequence
  Synthetic
tccccaaacccaaagcgt

SEQ ID NO: 9475 - DNA, 25 bp, Artificial Sequence
  Synthetic
cctactttaggtgacataattttgg

SEQ ID NO: 9476 - DNA, 19 bp, Artificial Sequence
  Synthetic
agaggagtgtaacagagct

SEQ ID NO: 9477 - DNA, 20 bp, Artificial Sequence
  Synthetic
ctgataccagaagaagacca

SEQ ID NO: 9478 - DNA, 24 bp, Artificial Sequence
  Synthetic
atagagctagtagaaataaacgag

SEQ ID NO: 9479 - DNA, 23 bp, Artificial Sequence
  Synthetic
aagaacacgtgacttatacagac

SEQ ID NO: 9480 - DNA, 18 bp, Artificial Sequence
  Synthetic
tgtcagcagaattggcac

SEQ ID NO: 9481 - DNA, 20 bp, Artificial Sequence
  Synthetic
tttacagatggctttctggc

SEQ ID NO: 9482 - DNA, 23 bp, Artificial Sequence
  Synthetic
ccagatccaaataagtttgcttt

SEQ ID NO: 9483 - DNA, 23 bp, Artificial Sequence
  Synthetic
attgtaaatactttcgtgtgtct

SEQ ID NO: 9484 - DNA, 20 bp, Artificial Sequence
  Synthetic
taattcgttgctatggttgc

SEQ ID NO: 9485 - DNA, 18 bp, Artificial Sequence
  Synthetic
cctgaagaggaggagcaa

SEQ ID NO: 9486 - DNA, 20 bp, Artificial Sequence
  Synthetic
tatgttgtgactgaagctga

SEQ ID NO: 9487 - DNA, 21 bp, Artificial Sequence
  Synthetic
gtgaaggaaagagcaaaagac

SEQ ID NO: 9488 - DNA, 24 bp, Artificial Sequence
  Synthetic
taaacgttcaatgtctaatgtagc

SEQ ID NO: 9489 - DNA, 22 bp, Artificial Sequence
  Synthetic
gaaacattggtgtatttgcgta

SEQ ID NO: 9490 - DNA, 20 bp, Artificial Sequence
  Synthetic
ctagctacaccaaacggacc

SEQ ID NO: 9491 - DNA, 20 bp, Artificial Sequence
  Synthetic
agacgatcagtttcccctga

SEQ ID NO: 9492 - DNA, 23 bp, Artificial Sequence
  Synthetic
agttctgttaatcaaagaaacca

SEQ ID NO: 9493 - DNA, 25 bp, Artificial Sequence
  Synthetic
agtattatatacttaggtgggttgg

SEQ ID NO: 9494 - DNA, 18 bp, Artificial Sequence
  Synthetic
ggaacccgctattgtacc

SEQ ID NO: 9495 - DNA, 21 bp, Artificial Sequence
  Synthetic
actttcataaggacttctgca

SEQ ID NO: 9496 - DNA, 18 bp, Artificial Sequence
  Synthetic
ccatcacgtgctgttcaa

SEQ ID NO: 9497 - DNA, 20 bp, Artificial Sequence
  Synthetic
tatgatttaagccccatcgc

SEQ ID NO: 9498 - DNA, 19 bp, Artificial Sequence
  Synthetic
atcatgagcgtcttgtttg

SEQ ID NO: 9499 - DNA, 18 bp, Artificial Sequence
  Synthetic
cgaggaccagcaaaatgg

SEQ ID NO: 9500 - DNA, 22 bp, Artificial Sequence
  Synthetic
ttatgagctgtttacatcttgt

SEQ ID NO: 9501 - DNA, 19 bp, Artificial Sequence
  Synthetic
ttttggtacattgttggcg

SEQ ID NO: 9502 - DNA, 23 bp, Artificial Sequence
  Synthetic
tgtcttttctattgacaatagca

SEQ ID NO: 9503 - DNA, 21 bp, Artificial Sequence
  Synthetic
gaggaccattaggaaaaactc

SEQ ID NO: 9504 - DNA, 24 bp, Artificial Sequence
  Synthetic
caaaagaaaaaattcaccttgagc

SEQ ID NO: 9505 - DNA, 24 bp, Artificial Sequence
  Synthetic
caatgtattttcttggagtaaggc

SEQ ID NO: 9506 - DNA, 18 bp, Artificial Sequence
  Synthetic
cgtgttgtgtcccttgtt

SEQ ID NO: 9507 - DNA, 18 bp, Artificial Sequence
  Synthetic
aatgattgggaaggagcc

SEQ ID NO: 9508 - DNA, 21 bp, Artificial Sequence
  Synthetic
cagaggattgtaacacagcta

SEQ ID NO: 9509 - DNA, 23 bp, Artificial Sequence
  Synthetic
atcatttctcattgcattgaaac

SEQ ID NO: 9510 - DNA, 23 bp, Artificial Sequence
  Synthetic
cagttaaacctggtcttagaaga

SEQ ID NO: 9511 - DNA, 19 bp, Artificial Sequence
  Synthetic
actacaagaggcggtcagc

SEQ ID NO: 9512 - DNA, 18 bp, Artificial Sequence
  Synthetic
taaacgtgacactgctga

SEQ ID NO: 9513 - DNA, 23 bp, Artificial Sequence
  Synthetic
aatgaaacagcaatcttagacat

SEQ ID NO: 9514 - DNA, 18 bp, Artificial Sequence
  Synthetic
aaagatttcttgggcggg

SEQ ID NO: 9515 - DNA, 18 bp, Artificial Sequence
  Synthetic
tgggaacaaaaggagcga

SEQ ID NO: 9516 - DNA, 18 bp, Artificial Sequence
  Synthetic
gcaaacgcaaacgcaata

SEQ ID NO: 9517 - DNA, 18 bp, Artificial Sequence
  Synthetic
tcctaaggtgtctgcatg

SEQ ID NO: 9518 - DNA, 18 bp, Artificial Sequence
  Synthetic
cattcctgcagatggtga

SEQ ID NO: 9519 - DNA, 23 bp, Artificial Sequence
  Synthetic
cagacttccttaaaatggacaaa

SEQ ID NO: 9520 - DNA, 23 bp, Artificial Sequence
  Synthetic
gctcacttaaatgttatgaatcc

SEQ ID NO: 9521 - DNA, 20 bp, Artificial Sequence
  Synthetic
actcgaccttataagtgtgg

SEQ ID NO: 9522 - DNA, 20 bp, Artificial Sequence
  Synthetic
gttgctgtacatgttttgct

SEQ ID NO: 9523 - DNA, 18 bp, Artificial Sequence
  Synthetic
tcgcctgatattgaagca

SEQ ID NO: 9524 - DNA, 19 bp, Artificial Sequence
  Synthetic
gaagaagcagactgtgtgg

SEQ ID NO: 9525 - DNA, 24 bp, Artificial Sequence
  Synthetic
gtccaagaaaagattatttgagga

SEQ ID NO: 9526 - DNA, 18 bp, Artificial Sequence
  Synthetic
gagagacccagagccaaa

SEQ ID NO: 9527 - DNA, 25 bp, Artificial Sequence
  Synthetic
acaaatatttgggagtatactgtac

SEQ ID NO: 9528 - DNA, 19 bp, Artificial Sequence
  Synthetic
caggtgatgttgtgggttt

SEQ ID NO: 9529 - DNA, 25 bp, Artificial Sequence
  Synthetic
cagccaactaatatatatttttgcg

SEQ ID NO: 9530 - DNA, 24 bp, Artificial Sequence
  Synthetic
tccattaggaataggtattagtgg

SEQ ID NO: 9531 - DNA, 23 bp, Artificial Sequence
  Synthetic
ggaaaccctaaatctgaaaaagc

SEQ ID NO: 9532 - DNA, 25 bp, Artificial Sequence
  Synthetic
tcttgtacttgaatatcttttaggc

SEQ ID NO: 9533 - DNA, 21 bp, Artificial Sequence
  Synthetic
aggggtacttttccaaaatgt

SEQ ID NO: 9534 - DNA, 18 bp, Artificial Sequence
  Synthetic
ctcctacaatgacgccag

SEQ ID NO: 9535 - DNA, 22 bp, Artificial Sequence
  Synthetic
gcatttgttttgtattgcagaa

SEQ ID NO: 9536 - DNA, 20 bp, Artificial Sequence
  Synthetic
gcgttcgatcaggtggattt

SEQ ID NO: 9537 - DNA, 22 bp, Artificial Sequence
  Synthetic
ctggacaatctttttcaatgga

SEQ ID NO: 9538 - DNA, 25 bp, Artificial Sequence
  Synthetic
ttacacattagatagcaaaacatgg

SEQ ID NO: 9539 - DNA, 25 bp, Artificial Sequence
  Synthetic
gtttcagttaaatacaagtacacac

SEQ ID NO: 9540 - DNA, 21 bp, Artificial Sequence
  Synthetic
tccaatagctccacttaatgc

SEQ ID NO: 9541 - DNA, 24 bp, Artificial Sequence
  Synthetic
aacacaggaacaaatgataatgtc

SEQ ID NO: 9542 - DNA, 19 bp, Artificial Sequence
  Synthetic
tttagcatacactccccct

SEQ ID NO: 9543 - DNA, 22 bp, Artificial Sequence
  Synthetic
gcatttcaatggttcagaaaca

SEQ ID NO: 9544 - DNA, 22 bp, Artificial Sequence
  Synthetic
tattccagcaatctaacagtcc

SEQ ID NO: 9545 - DNA, 22 bp, Artificial Sequence
  Synthetic
cattcagagtggttaatgaaca

SEQ ID NO: 9546 - DNA, 20 bp, Artificial Sequence
  Synthetic
ttagtagccccttacccaaa

SEQ ID NO: 9547 - DNA, 18 bp, Artificial Sequence
  Synthetic
ggagactgtggtgggata

SEQ ID NO: 9548 - DNA, 25 bp, Artificial Sequence
  Synthetic
actcatagaatggatcaaaaacaag

SEQ ID NO: 9549 - DNA, 25 bp, Artificial Sequence
  Synthetic
aattacatgcagtttaagagtaagc

SEQ ID NO: 9550 - DNA, 23 bp, Artificial Sequence
  Synthetic
tggctagtttagacaataaagga

SEQ ID NO: 9551 - DNA, 25 bp, Artificial Sequence
  Synthetic
cttactcaggaaaaatatactcaca

SEQ ID NO: 9552 - DNA, 21 bp, Artificial Sequence
  Synthetic
catatcagaggatttggaagg

SEQ ID NO: 9553 - DNA, 22 bp, Artificial Sequence
  Synthetic
agcaatactttgtggagaaaca

SEQ ID NO: 9554 - DNA, 22 bp, Artificial Sequence
  Synthetic
aggtactgatccaaaatggaag

SEQ ID NO: 9555 - DNA, 21 bp, Artificial Sequence
  Synthetic
aagctgtctcaaatgtccaaa

SEQ ID NO: 9556 - DNA, 18 bp, Artificial Sequence
  Synthetic
gcatgcgaactgacagat

SEQ ID NO: 9557 - DNA, 25 bp, Artificial Sequence
  Synthetic
tgtatggtttcatcataaaaggaag

SEQ ID NO: 9558 - DNA, 19 bp, Artificial Sequence
  Synthetic
aatggggaatggagatgag

SEQ ID NO: 9559 - DNA, 25 bp, Artificial Sequence
  Synthetic
aaagaactaagagatttgatgtcac

SEQ ID NO: 9560 - DNA, 19 bp, Artificial Sequence
  Synthetic
aacagaaatggaccaacga

SEQ ID NO: 9561 - DNA, 18 bp, Artificial Sequence
  Synthetic
acgaagttggagccagaa

SEQ ID NO: 9562 - DNA, 23 bp, Artificial Sequence
  Synthetic
agaaatgatgatgttgatcagag

SEQ ID NO: 9563 - DNA, 20 bp, Artificial Sequence
  Synthetic
aaagggaagaagaagtgctc

SEQ ID NO: 9564 - DNA, 21 bp, Artificial Sequence
  Synthetic
tttgaactttgtcaacagagc

SEQ ID NO: 9565 - DNA, 18 bp, Artificial Sequence
  Synthetic
ttcttgagggtccgagac

SEQ ID NO: 9566 - DNA, 19 bp, Artificial Sequence
  Synthetic
tattccaacagatgcgtga

SEQ ID NO: 9567 - DNA, 20 bp, Artificial Sequence
  Synthetic
ctttgcatgatcttttggga

SEQ ID NO: 9568 - DNA, 24 bp, Artificial Sequence
  Synthetic
catggtttattgtaaatgaagcag

SEQ ID NO: 9569 - DNA, 21 bp, Artificial Sequence
  Synthetic
ggaagctgttaaaatttcacc

SEQ ID NO: 9570 - DNA, 20 bp, Artificial Sequence
  Synthetic
aacaaatctcccttcctgcc

SEQ ID NO: 9571 - DNA, 18 bp, Artificial Sequence
  Synthetic
agacagcggtggaatctc

SEQ ID NO: 9572 - DNA, 25 bp, Artificial Sequence
  Synthetic
ctcttgcagatattttattaaaggc

SEQ ID NO: 9573 - DNA, 21 bp, Artificial Sequence
  Synthetic
tgctgtaatagatgttcctgg

SEQ ID NO: 9574 - DNA, 23 bp, Artificial Sequence
  Synthetic
ctactataatagataacggggct

SEQ ID NO: 9575 - DNA, 24 bp, Artificial Sequence
  Synthetic
tgatgattatattgtaccgacgaa

SEQ ID NO: 9576 - DNA, 20 bp, Artificial Sequence
  Synthetic
tacagattgacagaggtggt

SEQ ID NO: 9577 - DNA, 18 bp, Artificial Sequence
  Synthetic
ggcgacactccaccatga

SEQ ID NO: 9578 - DNA, 20 bp, Artificial Sequence
  Synthetic
tgcaacatgagcacacttcc

SEQ ID NO: 9579 - DNA, 16 bp, Artificial Sequence
  Synthetic
tgtccacgctccagca

SEQ ID NO: 9580 - DNA, 18 bp, Artificial Sequence
  Synthetic
cacagaatggcgtgggac

SEQ ID NO: 9581 - DNA, 20 bp, Artificial Sequence
  Synthetic
caaactgggtttcttagcgc

SEQ ID NO: 9582 - DNA, 20 bp, Artificial Sequence
  Synthetic
acaactggggagaaaacgag

SEQ ID NO: 9583 - DNA, 20 bp, Artificial Sequence
  Synthetic
gaccgttgcgacttgtatga

SEQ ID NO: 9584 - DNA, 19 bp, Artificial Sequence
  Synthetic
tttggttgatgctgctcgt

SEQ ID NO: 9585 - DNA, 19 bp, Artificial Sequence
  Synthetic
cctctcagtgagtgggcga

SEQ ID NO: 9586 - DNA, 18 bp, Artificial Sequence
  Synthetic
gagggggaagtgcaggtt

SEQ ID NO: 9587 - DNA, 18 bp, Artificial Sequence
  Synthetic
ctcttcaggaggccccct

SEQ ID NO: 9588 - DNA, 19 bp, Artificial Sequence
  Synthetic
caggaccatcaccacaggg

SEQ ID NO: 9589 - DNA, 20 bp, Artificial Sequence
  Synthetic
agaaatgcgacgaactgtct

SEQ ID NO: 9590 - DNA, 18 bp, Artificial Sequence
  Synthetic
gtctcgagaagccaacgg

SEQ ID NO: 9591 - DNA, 18 bp, Artificial Sequence
  Synthetic
gtgtgtgccagagccaaa

SEQ ID NO: 9592 - DNA, 20 bp, Artificial Sequence
  Synthetic
ggtcctgtaccagcagtttg

SEQ ID NO: 9593 - DNA, 18 bp, Artificial Sequence
  Synthetic
cctcccagaccctgttgc

SEQ ID NO: 9594 - DNA, 19 bp, Artificial Sequence
  Synthetic
ctctgaaggcgctaaccag

SEQ ID NO: 9595 - DNA, 19 bp, Artificial Sequence
  Synthetic
ataggggagtttgggctgg

SEQ ID NO: 9596 - DNA, 18 bp, Artificial Sequence
  Synthetic
tcactgaggtggatggcg

SEQ ID NO: 9597 - DNA, 19 bp, Artificial Sequence
  Synthetic
caacatcacccgggttgag

SEQ ID NO: 9598 - DNA, 20 bp, Artificial Sequence
  Synthetic
cgagtctgctgtatcgcaag

SEQ ID NO: 9599 - DNA, 20 bp, Artificial Sequence
  Synthetic
atgccaccccaatacctacc

SEQ ID NO: 9600 - DNA, 20 bp, Artificial Sequence
  Synthetic
ttgccaactagaccctaccg

SEQ ID NO: 9601 - DNA, 18 bp, Artificial Sequence
  Synthetic
ccacagcccacatacgac

SEQ ID NO: 9602 - DNA, 19 bp, Artificial Sequence
  Synthetic
cactccactcgatctccct

SEQ ID NO: 9603 - DNA, 23 bp, Artificial Sequence
  Synthetic
tgattttcaaaaatgtctgacag

SEQ ID NO: 9604 - DNA, 19 bp, Artificial Sequence
  Synthetic
ggacagcaacttcaatgca

SEQ ID NO: 9605 - DNA, 18 bp, Artificial Sequence
  Synthetic
gcagcaagaagaaacggt

SEQ ID NO: 9606 - DNA, 22 bp, Artificial Sequence
  Synthetic
ttaagagcactagcaagaagag

SEQ ID NO: 9607 - DNA, 20 bp, Artificial Sequence
  Synthetic
caatagaggacaaggctcaa

SEQ ID NO: 9608 - DNA, 21 bp, Artificial Sequence
  Synthetic
aataaatttcaggtctggagc

SEQ ID NO: 9609 - DNA, 21 bp, Artificial Sequence
  Synthetic
atggatcctcagtttcctact

SEQ ID NO: 9610 - DNA, 25 bp, Artificial Sequence
  Synthetic
tgagtaatgaggaatcattagaaga

SEQ ID NO: 9611 - DNA, 18 bp, Artificial Sequence
  Synthetic
tgttgccgctttaagtcc

SEQ ID NO: 9612 - DNA, 25 bp, Artificial Sequence
  Synthetic
aatgtatgattatatctgaacctcc

SEQ ID NO: 9613 - DNA, 18 bp, Artificial Sequence
  Synthetic
gagagcagctctagatgg

SEQ ID NO: 9614 - DNA, 24 bp, Artificial Sequence
  Synthetic
gggaaactattagaaaagaaagtg

SEQ ID NO: 9615 - DNA, 21 bp, Artificial Sequence
  Synthetic
aagtggactataatgggctct

SEQ ID NO: 9616 - DNA, 22 bp, Artificial Sequence
  Synthetic
ccaaagacatagatcagttgaa

SEQ ID NO: 9617 - DNA, 18 bp, Artificial Sequence
  Synthetic
tgggtattggaaccggaa

SEQ ID NO: 9618 - DNA, 24 bp, Artificial Sequence
  Synthetic
tataggttcttttgaagagatacc

SEQ ID NO: 9619 - DNA, 21 bp, Artificial Sequence
  Synthetic
attaatgccacttggacagac

SEQ ID NO: 9620 - DNA, 25 bp, Artificial Sequence
  Synthetic
gagtttacaatacggatgaatatgt

SEQ ID NO: 9621 - DNA, 20 bp, Artificial Sequence
  Synthetic
gtgcaccactggatatcaat

SEQ ID NO: 9622 - DNA, 25 bp, Artificial Sequence
  Synthetic
accaggattataagtataaagctac

SEQ ID NO: 9623 - DNA, 21 bp, Artificial Sequence
  Synthetic
tggaacatagtactgtgaaca

SEQ ID NO: 9624 - DNA, 19 bp, Artificial Sequence
  Synthetic
gacgctttgtccaaaatgc

SEQ ID NO: 9625 - DNA, 19 bp, Artificial Sequence
  Synthetic
gcagatgcaacgattcaag

SEQ ID NO: 9626 - DNA, 19 bp, Artificial Sequence
  Synthetic
aggtaccaatggggaagag

SEQ ID NO: 9627 - DNA, 22 bp, Artificial Sequence
  Synthetic
tagaaaaacaaagtagagctgc

SEQ ID NO: 9628 - DNA, 20 bp, Artificial Sequence
  Synthetic
cgtggtccagattaagtttg

SEQ ID NO: 9629 - DNA, 25 bp, Artificial Sequence
  Synthetic
ctcacaatatagtaatgaaaagtgg

SEQ ID NO: 9630 - DNA, 25 bp, Artificial Sequence
  Synthetic
gtggaagaaactagttttattgatg

SEQ ID NO: 9631 - DNA, 19 bp, Artificial Sequence
  Synthetic
tacgaaaacgacgtaaacg

SEQ ID NO: 9632 - DNA, 20 bp, Artificial Sequence
  Synthetic
tacatttacctgaccccaat

SEQ ID NO: 9633 - DNA, 19 bp, Artificial Sequence
  Synthetic
ccacctataggggaacact

SEQ ID NO: 9634 - DNA, 20 bp, Artificial Sequence
  Synthetic
acgaagggaacaaatgtttg

SEQ ID NO: 9635 - DNA, 19 bp, Artificial Sequence
  Synthetic
ctccagcacctaaagaaga

SEQ ID NO: 9636 - DNA, 21 bp, Artificial Sequence
  Synthetic
ttttgtagcttcaaccgaatt

SEQ ID NO: 9637 - DNA, 23 bp, Artificial Sequence
  Synthetic
ataaaagcagacattttatgcac

SEQ ID NO: 9638 - DNA, 24 bp, Artificial Sequence
  Synthetic
accgttgtgtgatttgttaattag

SEQ ID NO: 9639 - DNA, 21 bp, Artificial Sequence
  Synthetic
caaccagagacaactgatctc

SEQ ID NO: 9640 - DNA, 19 bp, Artificial Sequence
  Synthetic
gaagactttgtgcgacagt

SEQ ID NO: 9641 - DNA, 18 bp, Artificial Sequence
  Synthetic
aacaatggcctggacagt

SEQ ID NO: 9642 - DNA, 19 bp, Artificial Sequence
  Synthetic
atctcctgacttggaagca

SEQ ID NO: 9643 - DNA, 18 bp, Artificial Sequence
  Synthetic
gactgactcaagctgggt

SEQ ID NO: 9644 - DNA, 25 bp, Artificial Sequence
  Synthetic
ggattcattataaaaggaagatctc

SEQ ID NO: 9645 - DNA, 19 bp, Artificial Sequence
  Synthetic
gccttcttcaatctctcca

SEQ ID NO: 9646 - DNA, 25 bp, Artificial Sequence
  Synthetic
gattcaatggataaggaagaaatgg

SEQ ID NO: 9647 - DNA, 21 bp, Artificial Sequence
  Synthetic
ttcgtgtattttgtagaagca

SEQ ID NO: 9648 - DNA, 21 bp, Artificial Sequence
  Synthetic
gaaatgtcttaagcattgctc

SEQ ID NO: 9649 - DNA, 23 bp, Artificial Sequence
  Synthetic
agtcttaggagtttcaattctga

SEQ ID NO: 9650 - DNA, 22 bp, Artificial Sequence
  Synthetic
ttcgtagctaacttcagtatgg

SEQ ID NO: 9651 - DNA, 19 bp, Artificial Sequence
  Synthetic
caggactgttggtttcaga

SEQ ID NO: 9652 - DNA, 21 bp, Artificial Sequence
  Synthetic
gttaacaactatcaggcgatt

SEQ ID NO: 9653 - DNA, 19 bp, Artificial Sequence
  Synthetic
ctggcgagataatttcgtg

SEQ ID NO: 9654 - DNA, 25 bp, Artificial Sequence
  Synthetic
gcagactctatataattaacaatgg

SEQ ID NO: 9655 - DNA, 18 bp, Artificial Sequence
  Synthetic
ctgctgttaggctcactg

SEQ ID NO: 9656 - DNA, 19 bp, Artificial Sequence
  Synthetic
ctgttccacttacaggagc

SEQ ID NO: 9657 - DNA, 18 bp, Artificial Sequence
  Synthetic
caggagcaggtagacatc

SEQ ID NO: 9658 - DNA, 22 bp, Artificial Sequence
  Synthetic
atttgatgaaaatggtcaaccg

SEQ ID NO: 9659 - DNA, 21 bp, Artificial Sequence
  Synthetic
ccgaaaaaagggaataatgcg

SEQ ID NO: 9660 - DNA, 16 bp, Artificial Sequence
  Synthetic
ccaacccagccaccca

SEQ ID NO: 9661 - DNA, 20 bp, Artificial Sequence
  Synthetic
tttagataaggtggtggtgc

SEQ ID NO: 9662 - DNA, 18 bp, Artificial Sequence
  Synthetic
cggcacctactactgatg

SEQ ID NO: 9663 - DNA, 19 bp, Artificial Sequence
  Synthetic
ctactgaaggtgagcttga

SEQ ID NO: 9664 - DNA, 20 bp, Artificial Sequence
  Synthetic
cagagccactataagtacca

SEQ ID NO: 9665 - DNA, 22 bp, Artificial Sequence
  Synthetic
atcctactgatcttgacattcc

SEQ ID NO: 9666 - DNA, 18 bp, Artificial Sequence
  Synthetic
cacccgctctatgaggtt

SEQ ID NO: 9667 - DNA, 22 bp, Artificial Sequence
  Synthetic
taataatacacatgcaactggt

SEQ ID NO: 9668 - DNA, 18 bp, Artificial Sequence
  Synthetic
cggagcagcttgatcaat

SEQ ID NO: 9669 - DNA, 19 bp, Artificial Sequence
  Synthetic
ggttacacacctgtacagt

SEQ ID NO: 9670 - DNA, 18 bp, Artificial Sequence
  Synthetic
cgtctcaaggcaccaaac

SEQ ID NO: 9671 - DNA, 18 bp, Artificial Sequence
  Synthetic
ctgcggtgaaaggagttg

SEQ ID NO: 9672 - DNA, 19 bp, Artificial Sequence
  Synthetic
cattttcctggcacggtca

SEQ ID NO: 9673 - DNA, 23 bp, Artificial Sequence
  Synthetic
gctgcatttgaagatttaagagt

SEQ ID NO: 9674 - DNA, 19 bp, Artificial Sequence
  Synthetic
tgggtgggctatatacagc

SEQ ID NO: 9675 - DNA, 18 bp, Artificial Sequence
  Synthetic
cttggtcagcaagtgcat

SEQ ID NO: 9676 - DNA, 21 bp, Artificial Sequence
  Synthetic
tcaatagagttgaatgcacct

SEQ ID NO: 9677 - DNA, 25 bp, Artificial Sequence
  Synthetic
agggattttcatataggtatggtaa

SEQ ID NO: 9678 - DNA, 18 bp, Artificial Sequence
  Synthetic
cgagtgggtatgcacaaa

SEQ ID NO: 9679 - DNA, 20 bp, Artificial Sequence
  Synthetic
tgcaaatcagaggattcgtg

SEQ ID NO: 9680 - DNA, 19 bp, Artificial Sequence
  Synthetic
caaggaaccaacctgaatg

SEQ ID NO: 9681 - DNA, 22 bp, Artificial Sequence
  Synthetic
gcatgttcaatatgctgagtac

SEQ ID NO: 9682 - DNA, 20 bp, Artificial Sequence
  Synthetic
gcttcttctaccgctatggg

SEQ ID NO: 9683 - DNA, 25 bp, Artificial Sequence
  Synthetic
tagtatataaaaaagggagtaaccg

SEQ ID NO: 9684 - DNA, 22 bp, Artificial Sequence
  Synthetic
ggtgtatagagacagtataccc

SEQ ID NO: 9685 - DNA, 18 bp, Artificial Sequence
  Synthetic
caacgacgcagagaaaca

SEQ ID NO: 9686 - DNA, 25 bp, Artificial Sequence
  Synthetic
tggtagattttattgatacacaagg

SEQ ID NO: 9687 - DNA, 21 bp, Artificial Sequence
  Synthetic
atatcagatagtggctatggc

SEQ ID NO: 9688 - DNA, 23 bp, Artificial Sequence
  Synthetic
cctttttaaaaagcaattgccaa

SEQ ID NO: 9689 - DNA, 23 bp, Artificial Sequence
  Synthetic
atagaccactatgaaaatgacag

SEQ ID NO: 9690 - DNA, 21 bp, Artificial Sequence
  Synthetic
ttaaaaaaggtggccaaacag

SEQ ID NO: 9691 - DNA, 19 bp, Artificial Sequence
  Synthetic
atgtgcagtaccagtgacg

SEQ ID NO: 9692 - DNA, 25 bp, Artificial Sequence
  Synthetic
ctacgcctataatacatttaaaagg

SEQ ID NO: 9693 - DNA, 23 bp, Artificial Sequence
  Synthetic
tattttgcttttgtgtatgcatg

SEQ ID NO: 9694 - DNA, 19 bp, Artificial Sequence
  Synthetic
tgagtttcttacacgtcca

SEQ ID NO: 9695 - DNA, 23 bp, Artificial Sequence
  Synthetic
accttccccagaatatattgaac

SEQ ID NO: 9696 - DNA, 18 bp, Artificial Sequence
  Synthetic
cgccacgtctaatgtttc

SEQ ID NO: 9697 - DNA, 25 bp, Artificial Sequence
  Synthetic
atcctgattatttacaaatgtctgc

SEQ ID NO: 9698 - DNA, 22 bp, Artificial Sequence
  Synthetic
tattggttacataaggcacagg

SEQ ID NO: 9699 - DNA, 19 bp, Artificial Sequence
  Synthetic
cgccctagtgagtaacaac

SEQ ID NO: 9700 - DNA, 18 bp, Artificial Sequence
  Synthetic
cgaaagcaggcaaaccat

SEQ ID NO: 9701 - DNA, 18 bp, Artificial Sequence
  Synthetic
ccaagtggttatgcccaa

SEQ ID NO: 9702 - DNA, 24 bp, Artificial Sequence
  Synthetic
aaataagggggtttgtatactttg

SEQ ID NO: 9703 - DNA, 25 bp, Artificial Sequence
  Synthetic
catgttcaatatgttaagcactgta

SEQ ID NO: 9704 - DNA, 24 bp, Artificial Sequence
  Synthetic
acaagttttttctatcgttatggg

SEQ ID NO: 9705 - DNA, 18 bp, Artificial Sequence
  Synthetic
cactcctggatccccaaa

SEQ ID NO: 9706 - DNA, 16 bp, Artificial Sequence
  Synthetic
ggtggaaggcccggaa

SEQ ID NO: 9707 - DNA, 19 bp, Artificial Sequence
  Synthetic
caacgccgcttaaaaccct

SEQ ID NO: 9708 - DNA, 20 bp, Artificial Sequence
  Synthetic
tgctggactctctacagacc

SEQ ID NO: 9709 - DNA, 19 bp, Artificial Sequence
  Synthetic
caacgcctcaatgttggct

SEQ ID NO: 9710 - DNA, 16 bp, Artificial Sequence
  Synthetic
ctgtggcgtgacggtg

SEQ ID NO: 9711 - DNA, 18 bp, Artificial Sequence
  Synthetic
ggggtggaaagcaaggtg

SEQ ID NO: 9712 - DNA, 20 bp, Artificial Sequence
  Synthetic
gtgtaattggccaacagtgc

SEQ ID NO: 9713 - DNA, 18 bp, Artificial Sequence
  Synthetic
atcatggggttggaccgt

SEQ ID NO: 9714 - DNA, 19 bp, Artificial Sequence
  Synthetic
gcacaggagtcttggttcg

SEQ ID NO: 9715 - DNA, 20 bp, Artificial Sequence
  Synthetic
aagcttaggtggtatcgcac

SEQ ID NO: 9716 - DNA, 19 bp, Artificial Sequence
  Synthetic
tttgagcacgctggacatg

SEQ ID NO: 9717 - DNA, 20 bp, Artificial Sequence
  Synthetic
ccatgggcacttgtgtgaat

SEQ ID NO: 9718 - DNA, 18 bp, Artificial Sequence
  Synthetic
ggtcgtctggctctccga

SEQ ID NO: 9719 - DNA, 20 bp, Artificial Sequence
  Synthetic
atcccagaaagtacctccgc

SEQ ID NO: 9720 - DNA, 20 bp, Artificial Sequence
  Synthetic
ttatggacacaggttgccag

SEQ ID NO: 9721 - DNA, 17 bp, Artificial Sequence
  Synthetic
gccagcaccagcagagt

SEQ ID NO: 9722 - DNA, 16 bp, Artificial Sequence
  Synthetic
ggtgtccagcggcaga

SEQ ID NO: 9723 - DNA, 19 bp, Artificial Sequence
  Synthetic
caaccccctgttgtaccag

SEQ ID NO: 9724 - DNA, 18 bp, Artificial Sequence
  Synthetic
ccagacgtgggaggccat

SEQ ID NO: 9725 - DNA, 18 bp, Artificial Sequence
  Synthetic
taacgcggcctctctcac

SEQ ID NO: 9726 - DNA, 20 bp, Artificial Sequence
  Synthetic
gtactgtgggacctccttga

SEQ ID NO: 9727 - DNA, 18 bp, Artificial Sequence
  Synthetic
ctcctcggggtcccaaga

SEQ ID NO: 9728 - DNA, 18 bp, Artificial Sequence
  Synthetic
gctgagcttcagtgtgcg

SEQ ID NO: 9729 - DNA, 20 bp, Artificial Sequence
  Synthetic
tatgacccagaagaccacct

SEQ ID NO: 9730 - DNA, 18 bp, Artificial Sequence
  Synthetic
tgggcagcgcttatctgt

SEQ ID NO: 9731 - DNA, 20 bp, Artificial Sequence
  Synthetic
catctatgagaacgacggca

SEQ ID NO: 9732 - DNA, 19 bp, Artificial Sequence
  Synthetic
gctctcgggaccatcttga

SEQ ID NO: 9733 - DNA, 20 bp, Artificial Sequence
  Synthetic
caccaacagaaactgacaga

SEQ ID NO: 9734 - DNA, 24 bp, Artificial Sequence
  Synthetic
tattgatatcaggtgtcaaacttg

SEQ ID NO: 9735 - DNA, 25 bp, Artificial Sequence
  Synthetic
tgtagtgatgtagaaaatgatttgg

SEQ ID NO: 9736 - DNA, 21 bp, Artificial Sequence
  Synthetic
gctgaagatgttactcctgag

SEQ ID NO: 9737 - DNA, 21 bp, Artificial Sequence
  Synthetic
gttgtctctgtatatgcagtg

SEQ ID NO: 9738 - DNA, 22 bp, Artificial Sequence
  Synthetic
gcccaacaaactatattaggtc

SEQ ID NO: 9739 - DNA, 24 bp, Artificial Sequence
  Synthetic
gcattaaaagaattcctacactca

SEQ ID NO: 9740 - DNA, 23 bp, Artificial Sequence
  Synthetic
tttgaatttccaaatccttttcc

SEQ ID NO: 9741 - DNA, 20 bp, Artificial Sequence
  Synthetic
actgtgtttgctcctgtcac

SEQ ID NO: 9742 - DNA, 18 bp, Artificial Sequence
  Synthetic
cacgtcgctcaccaagac

SEQ ID NO: 9743 - DNA, 18 bp, Artificial Sequence
  Synthetic
tctctcctggtgaagtgg

SEQ ID NO: 9744 - DNA, 25 bp, Artificial Sequence
  Synthetic
cattagcttttcttcctatactcaa

SEQ ID NO: 9745 - DNA, 19 bp, Artificial Sequence
  Synthetic
agttaaccccgtggaacct

SEQ ID NO: 9746 - DNA, 23 bp, Artificial Sequence
  Synthetic
caatccattgtttctaactcaac

SEQ ID NO: 9747 - DNA, 24 bp, Artificial Sequence
  Synthetic
ggtttgaaactacaagaaatggtt

SEQ ID NO: 9748 - DNA, 18 bp, Artificial Sequence
  Synthetic
tacggagtactggtcacc

SEQ ID NO: 9749 - DNA, 18 bp, Artificial Sequence
  Synthetic
gatgacattccacgtgca

SEQ ID NO: 9750 - DNA, 25 bp, Artificial Sequence
  Synthetic
tttagatcaatattccttaggcaga

SEQ ID NO: 9751 - DNA, 23 bp, Artificial Sequence
  Synthetic
ggctctgtttctataactattgc

SEQ ID NO: 9752 - DNA, 18 bp, Artificial Sequence
  Synthetic
ggtcaaaaccgcaatgtc

SEQ ID NO: 9753 - DNA, 18 bp, Artificial Sequence
  Synthetic
ggaaccaaacaagtgtgc

SEQ ID NO: 9754 - DNA, 25 bp, Artificial Sequence
  Synthetic
attcattagagaagggaaaattgtc

SEQ ID NO: 9755 - DNA, 19 bp, Artificial Sequence
  Synthetic
taataacgagagagggggc

SEQ ID NO: 9756 - DNA, 18 bp, Artificial Sequence
  Synthetic
ggcagaagcacagcattt

SEQ ID NO: 9757 - DNA, 21 bp, Artificial Sequence
  Synthetic
ccaaaagaaacaaaccccaac

SEQ ID NO: 9758 - DNA, 20 bp, Artificial Sequence
  Synthetic
gtgatgcagatgtcaaagga

SEQ ID NO: 9759 - DNA, 21 bp, Artificial Sequence
  Synthetic
caggtgagtacaagttcaaac

SEQ ID NO: 9760 - DNA, 23 bp, Artificial Sequence
  Synthetic
aaacgtttggactttatagagaa

SEQ ID NO: 9761 - DNA, 23 bp, Artificial Sequence
  Synthetic
ggagcaagtaccttataaagttg

SEQ ID NO: 9762 - DNA, 23 bp, Artificial Sequence
  Synthetic
tagatgaactatttgaaggcagt

SEQ ID NO: 9763 - DNA, 25 bp, Artificial Sequence
  Synthetic
ttaccagattggataaaaagacaga

SEQ ID NO: 9764 - DNA, 25 bp, Artificial Sequence
  Synthetic
catggcaaagttatttctatgatga

SEQ ID NO: 9765 - DNA, 18 bp, Artificial Sequence
  Synthetic
ctctaaaggaggacggct

SEQ ID NO: 9766 - DNA, 20 bp, Artificial Sequence
  Synthetic
agcacctcacaagacacctt

SEQ ID NO: 9767 - DNA, 22 bp, Artificial Sequence
  Synthetic
attgtaacactcactgaaacag

SEQ ID NO: 9768 - DNA, 20 bp, Artificial Sequence
  Synthetic
tccttttgcaacagtggaaa

SEQ ID NO: 9769 - DNA, 25 bp, Artificial Sequence
  Synthetic
tctagtaattctgatattccttcag

SEQ ID NO: 9770 - DNA, 25 bp, Artificial Sequence
  Synthetic
catccttattttgatgttatggatg

SEQ ID NO: 9771 - DNA, 18 bp, Artificial Sequence
  Synthetic
taggagcaacaggccatc

SEQ ID NO: 9772 - DNA, 24 bp, Artificial Sequence
  Synthetic
tggtgatatgtgtgaaataggatt

SEQ ID NO: 9773 - DNA, 24 bp, Artificial Sequence
  Synthetic
tattggaccgtattgttactacac

SEQ ID NO: 9774 - DNA, 24 bp, Artificial Sequence
  Synthetic
ccatacgaacagtatacattttgg

SEQ ID NO: 9775 - DNA, 18 bp, Artificial Sequence
  Synthetic
caaaagcaggcaaaccat

SEQ ID NO: 9776 - DNA, 21 bp, Artificial Sequence
  Synthetic
taatgagccaagtggatatgc

SEQ ID NO: 9777 - DNA, 23 bp, Artificial Sequence
  Synthetic
atcaggaaggctaatagatttcc

SEQ ID NO: 9778 - DNA, 21 bp, Artificial Sequence
  Synthetic
caaattagagggttcgtgtac

SEQ ID NO: 9779 - DNA, 20 bp, Artificial Sequence
  Synthetic
tggttcagaaacatcctgag

SEQ ID NO: 9780 - DNA, 22 bp, Artificial Sequence
  Synthetic
acatgctaagtacggttttagg

SEQ ID NO: 9781 - DNA, 18 bp, Artificial Sequence
  Synthetic
catggagcttcccagttt

SEQ ID NO: 9782 - DNA, 20 bp, Artificial Sequence
  Synthetic
aagaagctgtgggatcaaac

SEQ ID NO: 9783 - DNA, 21 bp, Artificial Sequence
  Synthetic
gaaccgctctattctaaacac

SEQ ID NO: 9784 - DNA, 23 bp, Artificial Sequence
  Synthetic
agttgccaacaattattagacat

SEQ ID NO: 9785 - DNA, 18 bp, Artificial Sequence
  Synthetic
gttacgaacatgaggggt

SEQ ID NO: 9786 - DNA, 21 bp, Artificial Sequence
  Synthetic
gacctggttacagtaaaacga

SEQ ID NO: 9787 - DNA, 25 bp, Artificial Sequence
  Synthetic
actggtgattcagtatactttaaac

SEQ ID NO: 9788 - DNA, 25 bp, Artificial Sequence
  Synthetic
caaaaatatgcagatctctatgagt

SEQ ID NO: 9789 - DNA, 18 bp, Artificial Sequence
  Synthetic
caagggggggattgcata

SEQ ID NO: 9790 - DNA, 18 bp, Artificial Sequence
  Synthetic
gtagatccctctgcagct

SEQ ID NO: 9791 - DNA, 24 bp, Artificial Sequence
  Synthetic
tttgaaacacagattaatcccttc

SEQ ID NO: 9792 - DNA, 22 bp, Artificial Sequence
  Synthetic
agattttttgagtcaaccttcc

SEQ ID NO: 9793 - DNA, 22 bp, Artificial Sequence
  Synthetic
ctggaaagttataccttccacc

SEQ ID NO: 9794 - DNA, 21 bp, Artificial Sequence
  Synthetic
ctcagatacagaacgtttggt

SEQ ID NO: 9795 - DNA, 24 bp, Artificial Sequence
  Synthetic
gacaaaaacagcttaaataatggc

SEQ ID NO: 9796 - DNA, 20 bp, Artificial Sequence
  Synthetic
actcaggatgcatggtaatc

SEQ ID NO: 9797 - DNA, 19 bp, Artificial Sequence
  Synthetic
tattttagccctgcgaagg

SEQ ID NO: 9798 - DNA, 18 bp, Artificial Sequence
  Synthetic
aaccgaaatcgcaccaca

SEQ ID NO: 9799 - DNA, 19 bp, Artificial Sequence
  Synthetic
tctctcaagacttggacga

SEQ ID NO: 9800 - DNA, 19 bp, Artificial Sequence
  Synthetic
tacaggttatcggcctttg

SEQ ID NO: 9801 - DNA, 24 bp, Artificial Sequence
  Synthetic
attatagatgtaactggtcctaga

SEQ ID NO: 9802 - DNA, 20 bp, Artificial Sequence
  Synthetic
ggacacttttaatgagccag

SEQ ID NO: 9803 - DNA, 23 bp, Artificial Sequence
  Synthetic
cagaaagtacatttgtagatgca

SEQ ID NO: 9804 - DNA, 25 bp, Artificial Sequence
  Synthetic
gtaggaccaagtattttaatcaatg

SEQ ID NO: 9805 - DNA, 25 bp, Artificial Sequence
  Synthetic
tgatttaactcaaacatctttaggc

SEQ ID NO: 9806 - DNA, 25 bp, Artificial Sequence
  Synthetic
aataaaggtctgatgaatacttgtg

SEQ ID NO: 9807 - DNA, 19 bp, Artificial Sequence
  Synthetic
atggacttgcagcaatcac

SEQ ID NO: 9808 - DNA, 19 bp, Artificial Sequence
  Synthetic
tcatgcctgctgatctact

SEQ ID NO: 9809 - DNA, 18 bp, Artificial Sequence
  Synthetic
tatgccactccaagtcca

SEQ ID NO: 9810 - DNA, 23 bp, Artificial Sequence
  Synthetic
tgttcaatactaactgtcaatga

SEQ ID NO: 9811 - DNA, 23 bp, Artificial Sequence
  Synthetic
aatactggaaaatcctactttgt

SEQ ID NO: 9812 - DNA, 18 bp, Artificial Sequence
  Synthetic
tgccaggcagttagaact

SEQ ID NO: 9813 - DNA, 25 bp, Artificial Sequence
  Synthetic
tgtattatatagatgactatgggga

SEQ ID NO: 9814 - DNA, 21 bp, Artificial Sequence
  Synthetic
atttgaacaggcatctacagt

SEQ ID NO: 9815 - DNA, 20 bp, Artificial Sequence
  Synthetic
tggtacgacctacaatacca

SEQ ID NO: 9816 - DNA, 23 bp, Artificial Sequence
  Synthetic
ctctgctcctaaacatagtactc

SEQ ID NO: 9817 - DNA, 22 bp, Artificial Sequence
  Synthetic
ttaacatctaatacacgcactc

SEQ ID NO: 9818 - DNA, 23 bp, Artificial Sequence
  Synthetic
ctgttggtcatccatatttcaat

SEQ ID NO: 9819 - DNA, 23 bp, Artificial Sequence
  Synthetic
taattttaaaaagttccagcagg

SEQ ID NO: 9820 - DNA, 22 bp, Artificial Sequence
  Synthetic
tggaagaaatagagtttgagct

SEQ ID NO: 9821 - DNA, 23 bp, Artificial Sequence
  Synthetic
tacctcagtgttacatgtttcag

SEQ ID NO: 9822 - DNA, 22 bp, Artificial Sequence
  Synthetic
aagtacagacaaactttgactc

SEQ ID NO: 9823 - DNA, 16 bp, Artificial Sequence
  Synthetic
ctcacgcgctacctgc

SEQ ID NO: 9824 - DNA, 16 bp, Artificial Sequence
  Synthetic
ccccggcctggtgttt

SEQ ID NO: 9825 - DNA, 19 bp, Artificial Sequence
  Synthetic
gcttgcgattctagcctcg

SEQ ID NO: 9826 - DNA, 16 bp, Artificial Sequence
  Synthetic
gaggtggtgcgggaca

SEQ ID NO: 9827 - DNA, 19 bp, Artificial Sequence
  Synthetic
gactcgacaaactcgctga

SEQ ID NO: 9828 - DNA, 19 bp, Artificial Sequence
  Synthetic
gtaagtgacgtcgttgcgg

SEQ ID NO: 9829 - DNA, 19 bp, Artificial Sequence
  Synthetic
aactccttgaccgacacga

SEQ ID NO: 9830 - DNA, 17 bp, Artificial Sequence
  Synthetic
cgtgagcacgttctcgc

SEQ ID NO: 9831 - DNA, 16 bp, Artificial Sequence
  Synthetic
cgttctgctgcaccgg

SEQ ID NO: 9832 - DNA, 19 bp, Artificial Sequence
  Synthetic
gttcgctgccttttcctcc

SEQ ID NO: 9833 - DNA, 16 bp, Artificial Sequence
  Synthetic
ccgggaaacgtctgcg

SEQ ID NO: 9834 - DNA, 19 bp, Artificial Sequence
  Synthetic
tacgttacagtggcccagt

SEQ ID NO: 9835 - DNA, 18 bp, Artificial Sequence
  Synthetic
aaccacgcggtattggcc

SEQ ID NO: 9836 - DNA, 18 bp, Artificial Sequence
  Synthetic
cgacaggagacgacgagc

SEQ ID NO: 9837 - DNA, 18 bp, Artificial Sequence
  Synthetic
cgtctgctcttggttgct

SEQ ID NO: 9838 - DNA, 18 bp, Artificial Sequence
  Synthetic
cgtcgtcggtgatgagga

SEQ ID NO: 9839 - DNA, 18 bp, Artificial Sequence
  Synthetic
ttcgggagaatggacgcc

SEQ ID NO: 9840 - DNA, 18 bp, Artificial Sequence
  Synthetic
tgaggcgtcagaaagtgc

SEQ ID NO: 9841 - DNA, 16 bp, Artificial Sequence
  Synthetic
gcgcacgggttggtgt

SEQ ID NO: 9842 - DNA, 20 bp, Artificial Sequence
  Synthetic
gttggacgtcaccgtatccc

SEQ ID NO: 9843 - DNA, 18 bp, Artificial Sequence
  Synthetic
cccacagagaagcgttgg

SEQ ID NO: 9844 - DNA, 20 bp, Artificial Sequence
  Synthetic
tgtcgcatcatctctaagcg

SEQ ID NO: 9845 - DNA, 17 bp, Artificial Sequence
  Synthetic
gctgttcggtggttggg

SEQ ID NO: 9846 - DNA, 15 bp, Artificial Sequence
  Synthetic
caaccgcagcgcctt

SEQ ID NO: 9847 - DNA, 18 bp, Artificial Sequence
  Synthetic
gaaccaaagacgagggcc

SEQ ID NO: 9848 - DNA, 19 bp, Artificial Sequence
  Synthetic
ggaccgccgatttgtttct

SEQ ID NO: 9849 - DNA, 20 bp, Artificial Sequence
  Synthetic
ataacctcaccgaaaccgtc

SEQ ID NO: 9850 - DNA, 16 bp, Artificial Sequence
  Synthetic
gagccagggccaaggt

SEQ ID NO: 9851 - DNA, 16 bp, Artificial Sequence
  Synthetic
aggtctggcagccctc

SEQ ID NO: 9852 - DNA, 16 bp, Artificial Sequence
  Synthetic
ccggggggcgcttaaa

SEQ ID NO: 9853 - DNA, 15 bp, Artificial Sequence
  Synthetic
tttcgtgccgggcca

SEQ ID NO: 9854 - DNA, 20 bp, Artificial Sequence
  Synthetic
gtcacgacgtacgagaccag

SEQ ID NO: 9855 - DNA, 16 bp, Artificial Sequence
  Synthetic
aggcggccgttgtcca

SEQ ID NO: 9856 - DNA, 19 bp, Artificial Sequence
  Synthetic
cccctcgttcatgtaggcc

SEQ ID NO: 9857 - DNA, 16 bp, Artificial Sequence
  Synthetic
cgtgtgcgcaggggat

SEQ ID NO: 9858 - DNA, 17 bp, Artificial Sequence
  Synthetic
tgtcggtgttcccccat

SEQ ID NO: 9859 - DNA, 16 bp, Artificial Sequence
  Synthetic
cgaaggcgcggatcag

SEQ ID NO: 9860 - DNA, 18 bp, Artificial Sequence
  Synthetic
aaagcctagcaggtcgga

SEQ ID NO: 9861 - DNA, 19 bp, Artificial Sequence
  Synthetic
gcaagcagcccataaacgc

SEQ ID NO: 9862 - DNA, 18 bp, Artificial Sequence
  Synthetic
cgtgttgatggcaggggt

SEQ ID NO: 9863 - DNA, 17 bp, Artificial Sequence
  Synthetic
taagaggatcgcggcgc

SEQ ID NO: 9864 - DNA, 18 bp, Artificial Sequence
  Synthetic
tgcccatttgacgctctg

SEQ ID NO: 9865 - DNA, 18 bp, Artificial Sequence
  Synthetic
cgcactatccaggaccgc

SEQ ID NO: 9866 - DNA, 20 bp, Artificial Sequence
  Synthetic
cttcttggccttgtgttccg

SEQ ID NO: 9867 - DNA, 19 bp, Artificial Sequence
  Synthetic
gtgtacacctccaggggga

SEQ ID NO: 9868 - DNA, 18 bp, Artificial Sequence
  Synthetic
cacgtggagacggccatc

SEQ ID NO: 9869 - DNA, 19 bp, Artificial Sequence
  Synthetic
ctgagaaggggctggtacg

SEQ ID NO: 9870 - DNA, 18 bp, Artificial Sequence
  Synthetic
ggttggtggtgaaggtgg

SEQ ID NO: 9871 - DNA, 17 bp, Artificial Sequence
  Synthetic
gctggttgcgttggagg

SEQ ID NO: 9872 - DNA, 18 bp, Artificial Sequence
  Synthetic
cgaccgtcagcgttttgg

SEQ ID NO: 9873 - DNA, 19 bp, Artificial Sequence
  Synthetic
gttcaccaccgtatgcagg

SEQ ID NO: 9874 - DNA, 20 bp, Artificial Sequence
  Synthetic
gacacggctaaaatccggca

SEQ ID NO: 9875 - DNA, 17 bp, Artificial Sequence
  Synthetic
gccagaagctcgatgcc

SEQ ID NO: 9876 - DNA, 16 bp, Artificial Sequence
  Synthetic
gcatctccgcggacca

SEQ ID NO: 9877 - DNA, 17 bp, Artificial Sequence
  Synthetic
caaggctcacgtgcgag

SEQ ID NO: 9878 - DNA, 18 bp, Artificial Sequence
  Synthetic
tcatctacggggacacgg

SEQ ID NO: 9879 - DNA, 19 bp, Artificial Sequence
  Synthetic
agcatccggtctatgagcc

SEQ ID NO: 9880 - DNA, 16 bp, Artificial Sequence
  Synthetic
acgtcctcgtcgagcg

SEQ ID NO: 9881 - DNA, 16 bp, Artificial Sequence
  Synthetic
gagacgacggggctgt

SEQ ID NO: 9882 - DNA, 16 bp, Artificial Sequence
  Synthetic
cgcgcctgttggtcgt

SEQ ID NO: 9883 - DNA, 17 bp, Artificial Sequence
  Synthetic
gtccctgaacagcccca

SEQ ID NO: 9884 - DNA, 19 bp, Artificial Sequence
  Synthetic
agaaaggacagcgacgagc

SEQ ID NO: 9885 - DNA, 16 bp, Artificial Sequence
  Synthetic
tggccctcaaccgtgg

SEQ ID NO: 9886 - DNA, 16 bp, Artificial Sequence
  Synthetic
agtgagggtcgcgtcg

SEQ ID NO: 9887 - DNA, 20 bp, Artificial Sequence
  Synthetic
cccaaatggccctttaaacg

SEQ ID NO: 9888 - DNA, 17 bp, Artificial Sequence
  Synthetic
aggaacacacccccgtg

SEQ ID NO: 9889 - DNA, 16 bp, Artificial Sequence
  Synthetic
ccccaggccaccacaa

SEQ ID NO: 9890 - DNA, 16 bp, Artificial Sequence
  Synthetic
gggagccccttcgtca

SEQ ID NO: 9891 - DNA, 19 bp, Artificial Sequence
  Synthetic
ccagaatttggccaggacg

SEQ ID NO: 9892 - DNA, 18 bp, Artificial Sequence
  Synthetic
gcgcatgttggaaaaggc

SEQ ID NO: 9893 - DNA, 19 bp, Artificial Sequence
  Synthetic
cgcttctggttatgggcga

SEQ ID NO: 9894 - DNA, 18 bp, Artificial Sequence
  Synthetic
gaacccccgacgttcagt

SEQ ID NO: 9895 - DNA, 16 bp, Artificial Sequence
  Synthetic
agtcccgaagaccgcc

SEQ ID NO: 9896 - DNA, 16 bp, Artificial Sequence
  Synthetic
agccccacgcggtgat

SEQ ID NO: 9897 - DNA, 16 bp, Artificial Sequence
  Synthetic
acttggcgggggtggt

SEQ ID NO: 9898 - DNA, 16 bp, Artificial Sequence
  Synthetic
gccatcgccacgtcct

SEQ ID NO: 9899 - DNA, 19 bp, Artificial Sequence
  Synthetic
gaaaacccccaaacgcgtt

SEQ ID NO: 9900 - DNA, 16 bp, Artificial Sequence
  Synthetic
ctcgaggtcgctcggt

SEQ ID NO: 9901 - DNA, 18 bp, Artificial Sequence
  Synthetic
gaacacgctagggtcgga

SEQ ID NO: 9902 - DNA, 16 bp, Artificial Sequence
  Synthetic
caggcgccgcatcttg

SEQ ID NO: 9903 - DNA, 16 bp, Artificial Sequence
  Synthetic
gcccgtgtgttcctgc

SEQ ID NO: 9904 - DNA, 17 bp, Artificial Sequence
  Synthetic
agcctgtcgtgtctgcg

SEQ ID NO: 9905 - DNA, 16 bp, Artificial Sequence
  Synthetic
catgctcgccgtccgt

SEQ ID NO: 9906 - DNA, 20 bp, Artificial Sequence
  Synthetic
agaccctatggtacacacgg

SEQ ID NO: 9907 - DNA, 20 bp, Artificial Sequence
  Synthetic
tatgctaattgacctcggcc

SEQ ID NO: 9908 - DNA, 16 bp, Artificial Sequence
  Synthetic
cgacccccctcaccaa

SEQ ID NO: 9909 - DNA, 20 bp, Artificial Sequence
  Synthetic
gaattgaccctaggaggccg

SEQ ID NO: 9910 - DNA, 16 bp, Artificial Sequence
  Synthetic
ggaggaggttggcgga

SEQ ID NO: 9911 - DNA, 16 bp, Artificial Sequence
  Synthetic
ccgcctccgaagccat

SEQ ID NO: 9912 - DNA, 16 bp, Artificial Sequence
  Synthetic
ttctcccccccccctt

SEQ ID NO: 9913 - DNA, 19 bp, Artificial Sequence
  Synthetic
ttcgaccgagtctggggac

SEQ ID NO: 9914 - DNA, 17 bp, Artificial Sequence
  Synthetic
gggggctaaagggtggt

SEQ ID NO: 9915 - DNA, 16 bp, Artificial Sequence
  Synthetic
ggggctgggttggtct

SEQ ID NO: 9916 - DNA, 17 bp, Artificial Sequence
  Synthetic
ggccaaccgtcgaaggt

SEQ ID NO: 9917 - DNA, 18 bp, Artificial Sequence
  Synthetic
ggggaggggagggtgatt

SEQ ID NO: 9918 - DNA, 16 bp, Artificial Sequence
  Synthetic
gtcccgccggagacaa

SEQ ID NO: 9919 - DNA, 16 bp, Artificial Sequence
  Synthetic
cccgtgtggcgcatct

SEQ ID NO: 9920 - DNA, 16 bp, Artificial Sequence
  Synthetic
agcgctcaccccagga

SEQ ID NO: 9921 - DNA, 16 bp, Artificial Sequence
  Synthetic
tctccggggtcacgtg

SEQ ID NO: 9922 - DNA, 19 bp, Artificial Sequence
  Synthetic
gccggtctggtgatcttcg

SEQ ID NO: 9923 - DNA, 18 bp, Artificial Sequence
  Synthetic
ccaactccagaccaccgg

SEQ ID NO: 9924 - DNA, 18 bp, Artificial Sequence
  Synthetic
gtttttggggtgtggcgg

SEQ ID NO: 9925 - DNA, 18 bp, Artificial Sequence
  Synthetic
gtgtcgcgatgtctctgc

SEQ ID NO: 9926 - DNA, 20 bp, Artificial Sequence
  Synthetic
tggtataaatcaccggtgcg

SEQ ID NO: 9927 - DNA, 17 bp, Artificial Sequence
  Synthetic
cctctgggtctgtgcca

SEQ ID NO: 9928 - DNA, 18 bp, Artificial Sequence
  Synthetic
gcttttgcgggtccagag

SEQ ID NO: 9929 - DNA, 17 bp, Artificial Sequence
  Synthetic
cggacttcgtgtggcag

SEQ ID NO: 9930 - DNA, 19 bp, Artificial Sequence
  Synthetic
gctctccgatcccaactcc

SEQ ID NO: 9931 - DNA, 16 bp, Artificial Sequence
  Synthetic
gctgcgtcggcatggt

SEQ ID NO: 9932 - DNA, 24 bp, Artificial Sequence
  Synthetic
aaagcaggagattaaaatgaatcc

SEQ ID NO: 9933 - DNA, 20 bp, Artificial Sequence
  Synthetic
ctccctccccatataactca

SEQ ID NO: 9934 - DNA, 21 bp, Artificial Sequence
  Synthetic
gcaggcctcatataagatctt

SEQ ID NO: 9935 - DNA, 18 bp, Artificial Sequence
  Synthetic
ctaacggggcatatggag

SEQ ID NO: 9936 - DNA, 19 bp, Artificial Sequence
  Synthetic
cggacctgcatgactactg

SEQ ID NO: 9937 - DNA, 19 bp, Artificial Sequence
  Synthetic
cctttttaccgctgttacc

SEQ ID NO: 9938 - DNA, 19 bp, Artificial Sequence
  Synthetic
tctctttacgcggactccc

SEQ ID NO: 9939 - DNA, 18 bp, Artificial Sequence
  Synthetic
tcagctctgtatcgggaa

SEQ ID NO: 9940 - DNA, 19 bp, Artificial Sequence
  Synthetic
cacactctatggaaggcgg

SEQ ID NO: 9941 - DNA, 25 bp, Artificial Sequence
  Synthetic
caggtcaattatattcagtatggaa

SEQ ID NO: 9942 - DNA, 21 bp, Artificial Sequence
  Synthetic
ggagtaaaatgagtgatgctg

SEQ ID NO: 9943 - DNA, 20 bp, Artificial Sequence
  Synthetic
aatgacgatgttgaccaaag

SEQ ID NO: 9944 - DNA, 24 bp, Artificial Sequence
  Synthetic
tggtgggtttacatttaaaagaac

SEQ ID NO: 9945 - DNA, 22 bp, Artificial Sequence
  Synthetic
catgataaaagcagttagaggt

SEQ ID NO: 9946 - DNA, 18 bp, Artificial Sequence
  Synthetic
gagggtggtggttagcat

SEQ ID NO: 9947 - DNA, 23 bp, Artificial Sequence
  Synthetic
tgaaccatttcaatctttagtcc

SEQ ID NO: 9948 - DNA, 24 bp, Artificial Sequence
  Synthetic
ccactaaaagactaacaattctcg

SEQ ID NO: 9949 - DNA, 20 bp, Artificial Sequence
  Synthetic
gaacctcttgcttccagttt

SEQ ID NO: 9950 - DNA, 24 bp, Artificial Sequence
  Synthetic
agtattttactcaaactccattgc

SEQ ID NO: 9951 - DNA, 21 bp, Artificial Sequence
  Synthetic
gagtttgtcaccagattcaga

SEQ ID NO: 9952 - DNA, 20 bp, Artificial Sequence
  Synthetic
actttgtaactgaagcagac

SEQ ID NO: 9953 - DNA, 23 bp, Artificial Sequence
  Synthetic
aagaaaaacaaagtaaaagacgc

SEQ ID NO: 9954 - DNA, 22 bp, Artificial Sequence
  Synthetic
tcttgaatctaattgagcaggg

SEQ ID NO: 9955 - DNA, 20 bp, Artificial Sequence
  Synthetic
aaaactctttccgcccctag

SEQ ID NO: 9956 - DNA, 23 bp, Artificial Sequence
  Synthetic
tgtaataaacaaagtagaaggca

SEQ ID NO: 9957 - DNA, 20 bp, Artificial Sequence
  Synthetic
agaagctggaattcctgatg

SEQ ID NO: 9958 - DNA, 23 bp, Artificial Sequence
  Synthetic
caatttgattttgaaaatcccgc

SEQ ID NO: 9959 - DNA, 22 bp, Artificial Sequence
  Synthetic
acacttctattttgacctcagt

SEQ ID NO: 9960 - DNA, 22 bp, Artificial Sequence
  Synthetic
cagaatggtaaactgtatctgc

SEQ ID NO: 9961 - DNA, 23 bp, Artificial Sequence
  Synthetic
tctttaacatggatagagaacga

SEQ ID NO: 9962 - DNA, 18 bp, Artificial Sequence
  Synthetic
acctcaggctggagaatg

SEQ ID NO: 9963 - DNA, 25 bp, Artificial Sequence
  Synthetic
tgaggatcaatatagatttttgcag

SEQ ID NO: 9964 - DNA, 24 bp, Artificial Sequence
  Synthetic
cctcaaaataagcaatgtatccaa

SEQ ID NO: 9965 - DNA, 19 bp, Artificial Sequence
  Synthetic
ctgacaagcacgaatctgt

SEQ ID NO: 9966 - DNA, 21 bp, Artificial Sequence
  Synthetic
agaaattgtatcagccatgag

SEQ ID NO: 9967 - DNA, 23 bp, Artificial Sequence
  Synthetic
agaaagttaaatgttactcctga

SEQ ID NO: 9968 - DNA, 18 bp, Artificial Sequence
  Synthetic
gagcgacgacgacgagaa

SEQ ID NO: 9969 - DNA, 25 bp, Artificial Sequence
  Synthetic
tgaaaattctactattgcagattgg

SEQ ID NO: 9970 - DNA, 19 bp, Artificial Sequence
  Synthetic
gcgtcatctatagtccctc

SEQ ID NO: 9971 - DNA, 18 bp, Artificial Sequence
  Synthetic
gcaaacacaggtaaaccc

SEQ ID NO: 9972 - DNA, 18 bp, Artificial Sequence
  Synthetic
ccttctcgattggtgcag

SEQ ID NO: 9973 - DNA, 22 bp, Artificial Sequence
  Synthetic
caaatccatggctactaaatgc

SEQ ID NO: 9974 - DNA, 24 bp, Artificial Sequence
  Synthetic
acaaactgtgatcaataaacactg

SEQ ID NO: 9975 - DNA, 20 bp, Artificial Sequence
  Synthetic
tgcaagggatgttttacagt

SEQ ID NO: 9976 - DNA, 20 bp, Artificial Sequence
  Synthetic
ccatacttggtcaaggcagg

SEQ ID NO: 9977 - DNA, 20 bp, Artificial Sequence
  Synthetic
cctggtcattcggtgttcat

SEQ ID NO: 9978 - DNA, 23 bp, Artificial Sequence
  Synthetic
cctttagacaggtagaagattgt

SEQ ID NO: 9979 - DNA, 20 bp, Artificial Sequence
  Synthetic
agtggcagaaactggaactg

SEQ ID NO: 9980 - DNA, 18 bp, Artificial Sequence
  Synthetic
ttaccagcaggacagctc

SEQ ID NO: 9981 - DNA, 20 bp, Artificial Sequence
  Synthetic
gctgaagccctaaaagaggc

SEQ ID NO: 9982 - DNA, 25 bp, Artificial Sequence
  Synthetic
agtactaaataaaagagtaagagcc

SEQ ID NO: 9983 - DNA, 25 bp, Artificial Sequence
  Synthetic
gaggatgctgatagattttagagaa

SEQ ID NO: 9984 - DNA, 25 bp, Artificial Sequence
  Synthetic
gtacatggatgatatcttaatagct

SEQ ID NO: 9985 - DNA, 23 bp, Artificial Sequence
  Synthetic
aattagaggaaaaatgacactca

SEQ ID NO: 9986 - DNA, 19 bp, Artificial Sequence
  Synthetic
aactactggcaagtgacat

SEQ ID NO: 9987 - DNA, 25 bp, Artificial Sequence
  Synthetic
tagaagaaatgataaagaaggaagc

SEQ ID NO: 9988 - DNA, 20 bp, Artificial Sequence
  Synthetic
gcagtacatgttgcaagtgg

SEQ ID NO: 9989 - DNA, 18 bp, Artificial Sequence
  Synthetic
ctgatggcagttcattgc

SEQ ID NO: 9990 - DNA, 25 bp, Artificial Sequence
  Synthetic
ggaaaaagtcatctagaaatacagg

SEQ ID NO: 9991 - DNA, 18 bp, Artificial Sequence
  Synthetic
ttcgagtggctagagagg

SEQ ID NO: 9992 - DNA, 21 bp, Artificial Sequence
  Synthetic
ggtaatagaaactctgaggga

SEQ ID NO: 9993 - DNA, 21 bp, Artificial Sequence
  Synthetic
atatcatatgagcgaaagggc

SEQ ID NO: 9994 - DNA, 18 bp, Artificial Sequence
  Synthetic
acagaggcttttgatgca

SEQ ID NO: 9995 - DNA, 25 bp, Artificial Sequence
  Synthetic
gataagaaaaggaggtataaggaca

SEQ ID NO: 9996 - DNA, 24 bp, Artificial Sequence
  Synthetic
caagtattataatctcacaatgcg

SEQ ID NO: 9997 - DNA, 20 bp, Artificial Sequence
  Synthetic
ctgtaacatgacttggttcc

SEQ ID NO: 9998 - DNA, 19 bp, Artificial Sequence
  Synthetic
gtctggggaacgaaaaacc

SEQ ID NO: 9999 - DNA, 18 bp, Artificial Sequence
  Synthetic
cgcctcttgatcgggcta

SEQ ID NO: 10000 - DNA, 18 bp, Artificial Sequence
  Synthetic
acagcagtatcagcaggg

SEQ ID NO: 10001 - DNA, 19 bp, Artificial Sequence
  Synthetic
aactgcttagtacacccag

SEQ ID NO: 10002 - DNA, 20 bp, Artificial Sequence
  Synthetic
aaatgtacccgcttcttgca

SEQ ID NO: 10003 - DNA, 22 bp, Artificial Sequence
  Synthetic
cgttgcattttctaatatccac

SEQ ID NO: 10004 - DNA, 20 bp, Artificial Sequence
  Synthetic
ttaactgcacagatctggac

SEQ ID NO: 10005 - DNA, 18 bp, Artificial Sequence
  Synthetic
atcttgccctaacgttgc

SEQ ID NO: 10006 - DNA, 18 bp, Artificial Sequence
  Synthetic
tctcagattggtggcttc

SEQ ID NO: 10007 - DNA, 19 bp, Artificial Sequence
  Synthetic
aaaggccataggaaattgc

SEQ ID NO: 10008 - DNA, 25 bp, Artificial Sequence
  Synthetic
ttaagtgagctagaagtaaaaaacc

SEQ ID NO: 10009 - DNA, 22 bp, Artificial Sequence
  Synthetic
ctgctgtagaaatagggaatgg

SEQ ID NO: 10010 - DNA, 21 bp, Artificial Sequence
  Synthetic
ctttgtccagaatgccttaaa

SEQ ID NO: 10011 - DNA, 20 bp, Artificial Sequence
  Synthetic
gacagatggcaactaccacc

SEQ ID NO: 10012 - DNA, 18 bp, Artificial Sequence
  Synthetic
acgaatgggagtgcaaat

SEQ ID NO: 10013 - DNA, 20 bp, Artificial Sequence
  Synthetic
gagtagactccctttgttct

SEQ ID NO: 10014 - DNA, 23 bp, Artificial Sequence
  Synthetic
atttgatgaaagtacagattgct

SEQ ID NO: 10015 - DNA, 22 bp, Artificial Sequence
  Synthetic
aaaatgccttttactgaaagtg

SEQ ID NO: 10016 - DNA, 22 bp, Artificial Sequence
  Synthetic
taaagcccttccatatcctaac

SEQ ID NO: 10017 - DNA, 23 bp, Artificial Sequence
  Synthetic
ctgtaaatgttcctaaaggctct

SEQ ID NO: 10018 - DNA, 21 bp, Artificial Sequence
  Synthetic
gcactggctatagacctatag

SEQ ID NO: 10019 - DNA, 25 bp, Artificial Sequence
  Synthetic
gggtaatcctacagttataacatca

SEQ ID NO: 10020 - DNA, 22 bp, Artificial Sequence
  Synthetic
cctttaacaacgttttctgaaa

SEQ ID NO: 10021 - DNA, 22 bp, Artificial Sequence
  Synthetic
cctgatagtgatttcagagatg

SEQ ID NO: 10022 - DNA, 20 bp, Artificial Sequence
  Synthetic
cctagcacagacaatacacc

SEQ ID NO: 10023 - DNA, 23 bp, Artificial Sequence
  Synthetic
taggacatccattttttcctgtt

SEQ ID NO: 10024 - DNA, 22 bp, Artificial Sequence
  Synthetic
tagaaaatcccactctttaccc

SEQ ID NO: 10025 - DNA, 23 bp, Artificial Sequence
  Synthetic
ataacagaacattttttgctgac

SEQ ID NO: 10026 - DNA, 23 bp, Artificial Sequence
  Synthetic
tgatattgaaattgtaatgcagc

SEQ ID NO: 10027 - DNA, 20 bp, Artificial Sequence
  Synthetic
tttacctcagagctttctca

SEQ ID NO: 10028 - DNA, 23 bp, Artificial Sequence
  Synthetic
aagaattagcatccttttttgag

SEQ ID NO: 10029 - DNA, 19 bp, Artificial Sequence
  Synthetic
tggaagatctagtgatgcc

SEQ ID NO: 10030 - DNA, 18 bp, Artificial Sequence
  Synthetic
ttgcggctcttagtccaa

SEQ ID NO: 10031 - DNA, 19 bp, Artificial Sequence
  Synthetic
cagccgcattgtactttta

SEQ ID NO: 10032 - DNA, 23 bp, Artificial Sequence
  Synthetic
ctgcaaaagcatttagatcttca

SEQ ID NO: 10033 - DNA, 20 bp, Artificial Sequence
  Synthetic
ctccctctgttaccagctct

SEQ ID NO: 10034 - DNA, 25 bp, Artificial Sequence
  Synthetic
gaaaaattgtaattatgtacccagc

SEQ ID NO: 10035 - DNA, 21 bp, Artificial Sequence
  Synthetic
acaaacaccaaatacaggaac

SEQ ID NO: 10036 - DNA, 23 bp, Artificial Sequence
  Synthetic
ttagagaggagtttgatattgac

SEQ ID NO: 10037 - DNA, 23 bp, Artificial Sequence
  Synthetic
tttttctcaaactcatttggttg

SEQ ID NO: 10038 - DNA, 22 bp, Artificial Sequence
  Synthetic
tattttgatgtagtaggaggcg

SEQ ID NO: 10039 - DNA, 19 bp, Artificial Sequence
  Synthetic
ccgatgctcctttagaagt

SEQ ID NO: 10040 - DNA, 24 bp, Artificial Sequence
  Synthetic
agtagaaataacaatgcaactgtg

SEQ ID NO: 10041 - DNA, 23 bp, Artificial Sequence
  Synthetic
tattgactcatgagtttgttgat

SEQ ID NO: 10042 - DNA, 23 bp, Artificial Sequence
  Synthetic
aagaactaagaaatttgatgtcg

SEQ ID NO: 10043 - DNA, 22 bp, Artificial Sequence
  Synthetic
tctttggagcaaaacaaatgac

SEQ ID NO: 10044 - DNA, 20 bp, Artificial Sequence
  Synthetic
agcacaagatgtcatcatgg

SEQ ID NO: 10045 - DNA, 19 bp, Artificial Sequence
  Synthetic
cagatgtacacaccaggag

SEQ ID NO: 10046 - DNA, 22 bp, Artificial Sequence
  Synthetic
gagggttcactttcaaaagaac

SEQ ID NO: 10047 - DNA, 18 bp, Artificial Sequence
  Synthetic
ttgcatggtaaaggcagt

SEQ ID NO: 10048 - DNA, 18 bp, Artificial Sequence
  Synthetic
gtggtcgtgagcattgac

SEQ ID NO: 10049 - DNA, 24 bp, Artificial Sequence
  Synthetic
tgaaccatttcaatctttagtacc

SEQ ID NO: 10050 - DNA, 20 bp, Artificial Sequence
  Synthetic
caacaagacaactaagaggc

SEQ ID NO: 10051 - DNA, 20 bp, Artificial Sequence
  Synthetic
aaatcctggtattcgctctg

SEQ ID NO: 10052 - DNA, 24 bp, Artificial Sequence
  Synthetic
gtgaccaattcctagaattttcag

SEQ ID NO: 10053 - DNA, 20 bp, Artificial Sequence
  Synthetic
gcccagctctaatagtatgg

SEQ ID NO: 10054 - DNA, 18 bp, Artificial Sequence
  Synthetic
gtgcaagcttcctgagag

SEQ ID NO: 10055 - DNA, 20 bp, Artificial Sequence
  Synthetic
agattccaaaaggaagaggc

SEQ ID NO: 10056 - DNA, 21 bp, Artificial Sequence
  Synthetic
cagaagtgtggtcatacaatg

SEQ ID NO: 10057 - DNA, 25 bp, Artificial Sequence
  Synthetic
gaattataaaaaagtagggaggaac

SEQ ID NO: 10058 - DNA, 19 bp, Artificial Sequence
  Synthetic
gacactacgacagatcagc

SEQ ID NO: 10059 - DNA, 23 bp, Artificial Sequence
  Synthetic
ggttgacctgtattgttatgaac

SEQ ID NO: 10060 - DNA, 20 bp, Artificial Sequence
  Synthetic
caggaacaggtagaaaatgg

SEQ ID NO: 10061 - DNA, 20 bp, Artificial Sequence
  Synthetic
gcagaggcgttatatacaca

SEQ ID NO: 10062 - DNA, 21 bp, Artificial Sequence
  Synthetic
ttaacagaaatggtgcaatgg

SEQ ID NO: 10063 - DNA, 19 bp, Artificial Sequence
  Synthetic
aaggttgtggtccagctta

SEQ ID NO: 10064 - DNA, 20 bp, Artificial Sequence
  Synthetic
agtccacatttggtacagaa

SEQ ID NO: 10065 - DNA, 20 bp, Artificial Sequence
  Synthetic
ccaccgacctatacaacacc

SEQ ID NO: 10066 - DNA, 25 bp, Artificial Sequence
  Synthetic
atgtacaaacatatataggggaaca

SEQ ID NO: 10067 - DNA, 18 bp, Artificial Sequence
  Synthetic
tgtgtggtgtgcatggta

SEQ ID NO: 10068 - DNA, 20 bp, Artificial Sequence
  Synthetic
tattggaagagtctgcagtt

SEQ ID NO: 10069 - DNA, 19 bp, Artificial Sequence
  Synthetic
cttccttgcaaacacgtag

SEQ ID NO: 10070 - DNA, 18 bp, Artificial Sequence
  Synthetic
gtaagcgccgtaaacctg

SEQ ID NO: 10071 - DNA, 18 bp, Artificial Sequence
  Synthetic
gagcattggggtaagggt

SEQ ID NO: 10072 - DNA, 25 bp, Artificial Sequence
  Synthetic
atgcagaggaatatgatatacagtt

SEQ ID NO: 10073 - DNA, 23 bp, Artificial Sequence
  Synthetic
tgattgtgttcattgtatgttgt

SEQ ID NO: 10074 - DNA, 22 bp, Artificial Sequence
  Synthetic
attacaggaaaagcatttgtct

SEQ ID NO: 10075 - DNA, 22 bp, Artificial Sequence
  Synthetic
ctgcgttcttaaacagtaattc

SEQ ID NO: 10076 - DNA, 20 bp, Artificial Sequence
  Synthetic
ttcctccctctgttggtagc

SEQ ID NO: 10077 - DNA, 18 bp, Artificial Sequence
  Synthetic
ctgaaggacgtggaggaa

SEQ ID NO: 10078 - DNA, 20 bp, Artificial Sequence
  Synthetic
ggttaattgacactcctggt

SEQ ID NO: 10079 - DNA, 22 bp, Artificial Sequence
  Synthetic
ggagatatgtgcgatataggtc

SEQ ID NO: 10080 - DNA, 20 bp, Artificial Sequence
  Synthetic
gcaggttctttttatcacct

SEQ ID NO: 10081 - DNA, 23 bp, Artificial Sequence
  Synthetic
attatatgagacataccgaggag

SEQ ID NO: 10082 - DNA, 25 bp, Artificial Sequence
  Synthetic
tacaaggatttaacattttggaagg

SEQ ID NO: 10083 - DNA, 22 bp, Artificial Sequence
  Synthetic
tgtactgtgaaaataagctgtg

SEQ ID NO: 10084 - DNA, 25 bp, Artificial Sequence
  Synthetic
gctttctagtttaaaccacctttta

SEQ ID NO: 10085 - DNA, 18 bp, Artificial Sequence
  Synthetic
cccaacatcggtcccaca

SEQ ID NO: 10086 - DNA, 18 bp, Artificial Sequence
  Synthetic
accagaaacggatgggag

SEQ ID NO: 10087 - DNA, 25 bp, Artificial Sequence
  Synthetic
gctcttctttttttatctcattcac

SEQ ID NO: 10088 - DNA, 22 bp, Artificial Sequence
  Synthetic
atcaggaaactatgttgcagaa

SEQ ID NO: 10089 - DNA, 22 bp, Artificial Sequence
  Synthetic
ctgtatcctcagagatcccata

SEQ ID NO: 10090 - DNA, 25 bp, Artificial Sequence
  Synthetic
atcctattataccagaatatagggt

SEQ ID NO: 10091 - DNA, 25 bp, Artificial Sequence
  Synthetic
agcaaaagatagaactattgatcag

SEQ ID NO: 10092 - DNA, 19 bp, Artificial Sequence
  Synthetic
ccacatcaaaagggcagaa

SEQ ID NO: 10093 - DNA, 22 bp, Artificial Sequence
  Synthetic
tccaatgagagagtatccatga

SEQ ID NO: 10094 - DNA, 25 bp, Artificial Sequence
  Synthetic
tccaaaatgagtataactaactctg

SEQ ID NO: 10095 - DNA, 23 bp, Artificial Sequence
  Synthetic
aaagagatggttgtgtatacagt

SEQ ID NO: 10096 - DNA, 21 bp, Artificial Sequence
  Synthetic
cttaatctggttatctgggct

SEQ ID NO: 10097 - DNA, 22 bp, Artificial Sequence
  Synthetic
taattttgagcctcataccaaa

SEQ ID NO: 10098 - DNA, 25 bp, Artificial Sequence
  Synthetic
tttacagaatcaataaaggtgagag

SEQ ID NO: 10099 - DNA, 19 bp, Artificial Sequence
  Synthetic
ttgtcaatggaggagtggt

SEQ ID NO: 10100 - DNA, 24 bp, Artificial Sequence
  Synthetic
aaaaacttaggagtaaagttacgc

SEQ ID NO: 10101 - DNA, 18 bp, Artificial Sequence
  Synthetic
gaagtgccgcaacaaaga

SEQ ID NO: 10102 - DNA, 22 bp, Artificial Sequence
  Synthetic
taacataagctttgatcaaccc

SEQ ID NO: 10103 - DNA, 21 bp, Artificial Sequence
  Synthetic
tgatgcgtatccactaaatcc

SEQ ID NO: 10104 - DNA, 24 bp, Artificial Sequence
  Synthetic
taattaacggatatagagagaggc

SEQ ID NO: 10105 - DNA, 23 bp, Artificial Sequence
  Synthetic
tgaaacgattataagtagcaaga

SEQ ID NO: 10106 - DNA, 23 bp, Artificial Sequence
  Synthetic
caactatatattgcccttgggat

SEQ ID NO: 10107 - DNA, 21 bp, Artificial Sequence
  Synthetic
aacactaagtaggactttgcg

SEQ ID NO: 10108 - DNA, 21 bp, Artificial Sequence
  Synthetic
ccgcaataagaatagcaatga

SEQ ID NO: 10109 - DNA, 23 bp, Artificial Sequence
  Synthetic
atctacagatagaaaagttgctt

SEQ ID NO: 10110 - DNA, 19 bp, Artificial Sequence
  Synthetic
ccgtagcaagtgattctga

SEQ ID NO: 10111 - DNA, 21 bp, Artificial Sequence
  Synthetic
gatggcaaacctgttatgagt

SEQ ID NO: 10112 - DNA, 23 bp, Artificial Sequence
  Synthetic
tgctcttgacaaactttacaaag

SEQ ID NO: 10113 - DNA, 19 bp, Artificial Sequence
  Synthetic
tgaaggtgtctctgtttgg

SEQ ID NO: 10114 - DNA, 22 bp, Artificial Sequence
  Synthetic
gtggtactatacaaattctcgc

SEQ ID NO: 10115 - DNA, 18 bp, Artificial Sequence
  Synthetic
cgtgaacgtggccttaat

SEQ ID NO: 10116 - DNA, 23 bp, Artificial Sequence
  Synthetic
aattgtcaaacctaatatcagcc

SEQ ID NO: 10117 - DNA, 18 bp, Artificial Sequence
  Synthetic
cacacaacagggtttgct

SEQ ID NO: 10118 - DNA, 20 bp, Artificial Sequence
  Synthetic
atggattgagctttttccac

SEQ ID NO: 10119 - DNA, 21 bp, Artificial Sequence
  Synthetic
tgtttacagagtcaagctttg

SEQ ID NO: 10120 - DNA, 22 bp, Artificial Sequence
  Synthetic
ccttttgaaatgccatttgaag

SEQ ID NO: 10121 - DNA, 22 bp, Artificial Sequence
  Synthetic
actggttttatggttatggatt

SEQ ID NO: 10122 - DNA, 25 bp, Artificial Sequence
  Synthetic
gtattaaggatgcagattataatgc

SEQ ID NO: 10123 - DNA, 20 bp, Artificial Sequence
  Synthetic
atacagacacagaggtttgt

SEQ ID NO: 10124 - DNA, 25 bp, Artificial Sequence
  Synthetic
ccttctggtaatcttattaagtttg

SEQ ID NO: 10125 - DNA, 22 bp, Artificial Sequence
  Synthetic
aagtcatttgaacaacaagttg

SEQ ID NO: 10126 - DNA, 23 bp, Artificial Sequence
  Synthetic
aaaactctgttgcatctatcaat

SEQ ID NO: 10127 - DNA, 24 bp, Artificial Sequence
  Synthetic
tttgtgtaaaactgcagtaactac

SEQ ID NO: 10128 - DNA, 22 bp, Artificial Sequence
  Synthetic
ggttatgctaagtcaaactttg

SEQ ID NO: 10129 - DNA, 23 bp, Artificial Sequence
  Synthetic
aaggttatttcttttgtcagaca

SEQ ID NO: 10130 - DNA, 25 bp, Artificial Sequence
  Synthetic
gatgtactacgtaatagctttggta

SEQ ID NO: 10131 - DNA, 19 bp, Artificial Sequence
  Synthetic
cagtctttctgctgaaggt

SEQ ID NO: 10132 - DNA, 23 bp, Artificial Sequence
  Synthetic
tttttgaaaactttgaggactgg

SEQ ID NO: 10133 - DNA, 22 bp, Artificial Sequence
  Synthetic
ttaagttgccagaagttattgc

SEQ ID NO: 10134 - DNA, 23 bp, Artificial Sequence
  Synthetic
ttagtaacaatgattgcttatgc

SEQ ID NO: 10135 - DNA, 20 bp, Artificial Sequence
  Synthetic
ttagcaaaagcaatgttgga

SEQ ID NO: 10136 - DNA, 19 bp, Artificial Sequence
  Synthetic
ttggtgttgtaggtgctac

SEQ ID NO: 10137 - DNA, 22 bp, Artificial Sequence
  Synthetic
ctttgatggtgttatgtatggt

SEQ ID NO: 10138 - DNA, 19 bp, Artificial Sequence
  Synthetic
cctgcaaagtggtaaaacc

SEQ ID NO: 10139 - DNA, 21 bp, Artificial Sequence
  Synthetic
ctgttatgcaaatggacatcc

SEQ ID NO: 10140 - DNA, 23 bp, Artificial Sequence
  Synthetic
gttttacatgttgttaggctttg

SEQ ID NO: 10141 - DNA, 25 bp, Artificial Sequence
  Synthetic
gtctaaattgactgatcttaagtgc

SEQ ID NO: 10142 - DNA, 23 bp, Artificial Sequence
  Synthetic
ttcctcaccacaaataatcaaac

SEQ ID NO: 10143 - DNA, 23 bp, Artificial Sequence
  Synthetic
taccagatcatgattcatttgtg

SEQ ID NO: 10144 - DNA, 25 bp, Artificial Sequence
  Synthetic
gaaggtaatgctctatacaacaatg

SEQ ID NO: 10145 - DNA, 21 bp, Artificial Sequence
  Synthetic
cattgttcttttgctgttgac

SEQ ID NO: 10146 - DNA, 21 bp, Artificial Sequence
  Synthetic
tgtaaagtttgtggttgttgg

SEQ ID NO: 10147 - DNA, 22 bp, Artificial Sequence
  Synthetic
gcatgatttctttacttggcat

SEQ ID NO: 10148 - DNA, 22 bp, Artificial Sequence
  Synthetic
gttttgaccttagacaaccaag

SEQ ID NO: 10149 - DNA, 23 bp, Artificial Sequence
  Synthetic
gcattgttcaaattttaacacac

SEQ ID NO: 10150 - DNA, 20 bp, Artificial Sequence
  Synthetic
acgcactgtttgtttttctg

SEQ ID NO: 10151 - DNA, 25 bp, Artificial Sequence
  Synthetic
tcattaacaaagcgtaatattctcc

SEQ ID NO: 10152 - DNA, 23 bp, Artificial Sequence
  Synthetic
ttgatgaatcttttgtggatgac

SEQ ID NO: 10153 - DNA, 19 bp, Artificial Sequence
  Synthetic
tctgctggtgtttttgtgg

SEQ ID NO: 10154 - DNA, 23 bp, Artificial Sequence
  Synthetic
tggaggtttgaattattactgtg

SEQ ID NO: 10155 - DNA, 20 bp, Artificial Sequence
  Synthetic
ccaccgttaaaccgtaattc

SEQ ID NO: 10156 - DNA, 19 bp, Artificial Sequence
  Synthetic
gcaaacagcgtataaccac

SEQ ID NO: 10157 - DNA, 19 bp, Artificial Sequence
  Synthetic
gacattgttgtcgtggatg

SEQ ID NO: 10158 - DNA, 22 bp, Artificial Sequence
  Synthetic
ctccagtataaataggcgtcaa

SEQ ID NO: 10159 - DNA, 22 bp, Artificial Sequence
  Synthetic
agtctgaaagtagttgtggttt

SEQ ID NO: 10160 - DNA, 19 bp, Artificial Sequence
  Synthetic
ctagagactttgccatgcg

SEQ ID NO: 10161 - DNA, 19 bp, Artificial Sequence
  Synthetic
ctggctcatctgatgtact

SEQ ID NO: 10162 - DNA, 19 bp, Artificial Sequence
  Synthetic
tgactagatgtttggctgt

SEQ ID NO: 10163 - DNA, 24 bp, Artificial Sequence
  Synthetic
gaattgtaatgtggatatgtaccc

SEQ ID NO: 10164 - DNA, 23 bp, Artificial Sequence
  Synthetic
tctctatagagcatatgttgagt

SEQ ID NO: 10165 - DNA, 22 bp, Artificial Sequence
  Synthetic
agtattctcaaaaaccttggtg

SEQ ID NO: 10166 - DNA, 21 bp, Artificial Sequence
  Synthetic
actgtcaaatcagaagatggt

SEQ ID NO: 10167 - DNA, 23 bp, Artificial Sequence
  Synthetic
ctgacataacactcaaatgttgt

SEQ ID NO: 10168 - DNA, 20 bp, Artificial Sequence
  Synthetic
cccagtggcattatgttcaa

SEQ ID NO: 10169 - DNA, 24 bp, Artificial Sequence
  Synthetic
acttctgttaatacgtcatcatca

SEQ ID NO: 10170 - DNA, 22 bp, Artificial Sequence
  Synthetic
aaatgtttgttttgcttgttgc

SEQ ID NO: 10171 - DNA, 22 bp, Artificial Sequence
  Synthetic
caacaacactttagtttcaggt

SEQ ID NO: 10172 - DNA, 20 bp, Artificial Sequence
  Synthetic
cagttgtcctttgatgtacc

SEQ ID NO: 10173 - DNA, 24 bp, Artificial Sequence
  Synthetic
gttcctttatgaatgttacattgg

SEQ ID NO: 10174 - DNA, 22 bp, Artificial Sequence
  Synthetic
gtccaatggcacttataattgc

SEQ ID NO: 10175 - DNA, 19 bp, Artificial Sequence
  Synthetic
ttaagaaatagcgccaggc

SEQ ID NO: 10176 - DNA, 20 bp, Artificial Sequence
  Synthetic
cgaatggccatgtatacagg

SEQ ID NO: 10177 - DNA, 22 bp, Artificial Sequence
  Synthetic
ctatctctagctctattcaggc

SEQ ID NO: 10178 - DNA, 20 bp, Artificial Sequence
  Synthetic
ataaggatgttgaagcgtgg

SEQ ID NO: 10179 - DNA, 23 bp, Artificial Sequence
  Synthetic
tattgatgttaataagacgctgc

SEQ ID NO: 10180 - DNA, 23 bp, Artificial Sequence
  Synthetic
gctattatgttgttgttctactg

SEQ ID NO: 10181 - DNA, 21 bp, Artificial Sequence
  Synthetic
cagagctgctcttatagtgtt

SEQ ID NO: 10182 - DNA, 25 bp, Artificial Sequence
  Synthetic
aattagaaatccactaagatgttcc

SEQ ID NO: 10183 - DNA, 23 bp, Artificial Sequence
  Synthetic
aatactccagattgttttatggt

SEQ ID NO: 10184 - DNA, 22 bp, Artificial Sequence
  Synthetic
acctacctgaatacatgacagt

SEQ ID NO: 10185 - DNA, 20 bp, Artificial Sequence
  Synthetic
ggtgatacctcgtaatttgg

SEQ ID NO: 10186 - DNA, 21 bp, Artificial Sequence
  Synthetic
gtgaatccaaacctcaatctc

SEQ ID NO: 10187 - DNA, 22 bp, Artificial Sequence
  Synthetic
gaaacaaaagaacaaaagcatg

SEQ ID NO: 10188 - DNA, 23 bp, Artificial Sequence
  Synthetic
aagtttcttgaggagttaaatgc

SEQ ID NO: 10189 - DNA, 22 bp, Artificial Sequence
  Synthetic
tgatctatgtatgatggtacga

SEQ ID NO: 10190 - DNA, 21 bp, Artificial Sequence
  Synthetic
actgtttggcatgtttacagt

SEQ ID NO: 10191 - DNA, 23 bp, Artificial Sequence
  Synthetic
tacaatttatagagactgaagcc

SEQ ID NO: 10192 - DNA, 18 bp, Artificial Sequence
  Synthetic
atcgttgtgtgtgtcgcc

SEQ ID NO: 10193 - DNA, 25 bp, Artificial Sequence
  Synthetic
tgtagaagagtatcaaatacttgca

SEQ ID NO: 10194 - DNA, 21 bp, Artificial Sequence
  Synthetic
gcagatgtagaacctaatgct

SEQ ID NO: 10195 - DNA, 20 bp, Artificial Sequence
  Synthetic
catggggactaacagatacc

SEQ ID NO: 10196 - DNA, 18 bp, Artificial Sequence
  Synthetic
caatcgacgaaggaagcg

SEQ ID NO: 10197 - DNA, 18 bp, Artificial Sequence
  Synthetic
cgcaaaagggacactgta

SEQ ID NO: 10198 - DNA, 18 bp, Artificial Sequence
  Synthetic
cgtgtaacatcccagggc

SEQ ID NO: 10199 - DNA, 18 bp, Artificial Sequence
  Synthetic
cagtgctgtcctagaggt

SEQ ID NO: 10200 - DNA, 18 bp, Artificial Sequence
  Synthetic
ccccagggctttccaaag

SEQ ID NO: 10201 - DNA, 21 bp, Artificial Sequence
  Synthetic
gagcctttactaaatgctgac

SEQ ID NO: 10202 - DNA, 25 bp, Artificial Sequence
  Synthetic
ctgatacattttatttgcatccttc

SEQ ID NO: 10203 - DNA, 23 bp, Artificial Sequence
  Synthetic
aaaactgttgttattcctaaggt

SEQ ID NO: 10204 - DNA, 23 bp, Artificial Sequence
  Synthetic
atgtctaatgatccatatggcag

SEQ ID NO: 10205 - DNA, 20 bp, Artificial Sequence
  Synthetic
ctcttactgctgatgtgttg

SEQ ID NO: 10206 - DNA, 18 bp, Artificial Sequence
  Synthetic
ggcaaggccttccacatg

SEQ ID NO: 10207 - DNA, 20 bp, Artificial Sequence
  Synthetic
acccttagatgtggacgaga

SEQ ID NO: 10208 - DNA, 20 bp, Artificial Sequence
  Synthetic
cattgggagaacaggggtac

SEQ ID NO: 10209 - DNA, 18 bp, Artificial Sequence
  Synthetic
gggcatgacatcagcgac

SEQ ID NO: 10210 - DNA, 17 bp, Artificial Sequence
  Synthetic
agaccctgcgctccatg

SEQ ID NO: 10211 - DNA, 16 bp, Artificial Sequence
  Synthetic
tgagtcccgctggctg

SEQ ID NO: 10212 - DNA, 23 bp, Artificial Sequence
  Synthetic
cacaaaacaaactatctccccta

SEQ ID NO: 10213 - DNA, 18 bp, Artificial Sequence
  Synthetic
tgtgtccaccccagtccc

SEQ ID NO: 10214 - DNA, 17 bp, Artificial Sequence
  Synthetic
cggggccaccttcatca

SEQ ID NO: 10215 - DNA, 16 bp, Artificial Sequence
  Synthetic
tcagggtcccctcgga

SEQ ID NO: 10216 - DNA, 18 bp, Artificial Sequence
  Synthetic
cccaggatgtcccccaga

SEQ ID NO: 10217 - DNA, 18 bp, Artificial Sequence
  Synthetic
acacccaggcacacacta

SEQ ID NO: 10218 - DNA, 20 bp, Artificial Sequence
  Synthetic
ggcttgtttgtgacttcacc

SEQ ID NO: 10219 - DNA, 19 bp, Artificial Sequence
  Synthetic
ctaagcccaacactccacc

SEQ ID NO: 10220 - DNA, 19 bp, Artificial Sequence
  Synthetic
caacacgaccccaaggaag

SEQ ID NO: 10221 - DNA, 17 bp, Artificial Sequence
  Synthetic
ggggtgtcttggggact

SEQ ID NO: 10222 - DNA, 17 bp, Artificial Sequence
  Synthetic
actcgtccgcctactgg

SEQ ID NO: 10223 - DNA, 17 bp, Artificial Sequence
  Synthetic
ccccccttgttgaggca

SEQ ID NO: 10224 - DNA, 17 bp, Artificial Sequence
  Synthetic
tgctggttggggaagga

SEQ ID NO: 10225 - DNA, 19 bp, Artificial Sequence
  Synthetic
atctgctgactgaaacccg

SEQ ID NO: 10226 - DNA, 16 bp, Artificial Sequence
  Synthetic
gccgaggcatagcgca

SEQ ID NO: 10227 - DNA, 18 bp, Artificial Sequence
  Synthetic
gggcctcctggatgatgg

SEQ ID NO: 10228 - DNA, 17 bp, Artificial Sequence
  Synthetic
aagcgtccagtctggcc

SEQ ID NO: 10229 - DNA, 20 bp, Artificial Sequence
  Synthetic
aggagagataatcggaggcc

SEQ ID NO: 10230 - DNA, 20 bp, Artificial Sequence
  Synthetic
gtcctcctcatctaccccag

SEQ ID NO: 10231 - DNA, 20 bp, Artificial Sequence
  Synthetic
cggacatggataggaaaggc

SEQ ID NO: 10232 - DNA, 18 bp, Artificial Sequence
  Synthetic
gttcctgccgttacccag

SEQ ID NO: 10233 - DNA, 16 bp, Artificial Sequence
  Synthetic
gcgtcccggcacacat

SEQ ID NO: 10234 - DNA, 16 bp, Artificial Sequence
  Synthetic
gggagcacagcctcca

SEQ ID NO: 10235 - DNA, 17 bp, Artificial Sequence
  Synthetic
gagagcgggttttgggc

SEQ ID NO: 10236 - DNA, 17 bp, Artificial Sequence
  Synthetic
tggaaacgaagctgccg

SEQ ID NO: 10237 - DNA, 19 bp, Artificial Sequence
  Synthetic
gcgagtactatcggctggt

SEQ ID NO: 10238 - DNA, 16 bp, Artificial Sequence
  Synthetic
caacctgtgcgccgag

SEQ ID NO: 10239 - DNA, 18 bp, Artificial Sequence
  Synthetic
tgagtgtggggccatacg

SEQ ID NO: 10240 - DNA, 19 bp, Artificial Sequence
  Synthetic
acggtcagtccatctcctt

SEQ ID NO: 10241 - DNA, 18 bp, Artificial Sequence
  Synthetic
aagtttggcccggtttgc

SEQ ID NO: 10242 - DNA, 16 bp, Artificial Sequence
  Synthetic
tccacactgagcccgg

SEQ ID NO: 10243 - DNA, 17 bp, Artificial Sequence
  Synthetic
cagcggctctgtgaggt

SEQ ID NO: 10244 - DNA, 17 bp, Artificial Sequence
  Synthetic
agagacgtccaggccca

SEQ ID NO: 10245 - DNA, 19 bp, Artificial Sequence
  Synthetic
tagccgggatcgatgatgc

SEQ ID NO: 10246 - DNA, 16 bp, Artificial Sequence
  Synthetic
tgctcttcctcgccgc

SEQ ID NO: 10247 - DNA, 19 bp, Artificial Sequence
  Synthetic
ttctgacgcttgtcttagt

SEQ ID NO: 10248 - DNA, 18 bp, Artificial Sequence
  Synthetic
acccccaaccattcacct

SEQ ID NO: 10249 - DNA, 17 bp, Artificial Sequence
  Synthetic
gccccggggaaacttct

SEQ ID NO: 10250 - DNA, 18 bp, Artificial Sequence
  Synthetic
gccgtgtgaagctcttga

SEQ ID NO: 10251 - DNA, 20 bp, Artificial Sequence
  Synthetic
gtcatcttgcagatcctggc

SEQ ID NO: 10252 - DNA, 16 bp, Artificial Sequence
  Synthetic
gtcccccaccacgtct

SEQ ID NO: 10253 - DNA, 18 bp, Artificial Sequence
  Synthetic
ctcggtgtcactgttgcc

SEQ ID NO: 10254 - DNA, 19 bp, Artificial Sequence
  Synthetic
attaggcgactctgcatca

SEQ ID NO: 10255 - DNA, 20 bp, Artificial Sequence
  Synthetic
tgctctcagttaacgagcag

SEQ ID NO: 10256 - DNA, 19 bp, Artificial Sequence
  Synthetic
ccagtgacgaagacccatc

SEQ ID NO: 10257 - DNA, 18 bp, Artificial Sequence
  Synthetic
catcccaggcaacctcca

SEQ ID NO: 10258 - DNA, 20 bp, Artificial Sequence
  Synthetic
ccacggctgttagaatgtgc

SEQ ID NO: 10259 - DNA, 19 bp, Artificial Sequence
  Synthetic
ccagtatttggccaggtcc

SEQ ID NO: 10260 - DNA, 20 bp, Artificial Sequence
  Synthetic
tgaccatcgagtaccttccg

SEQ ID NO: 10261 - DNA, 20 bp, Artificial Sequence
  Synthetic
tctacatcgaggacctcggt

SEQ ID NO: 10262 - DNA, 16 bp, Artificial Sequence
  Synthetic
cgtggccaccaacgtc

SEQ ID NO: 10263 - DNA, 18 bp, Artificial Sequence
  Synthetic
agttcggggtccaggagg

SEQ ID NO: 10264 - DNA, 19 bp, Artificial Sequence
  Synthetic
agagtgcctctgagcatgg

SEQ ID NO: 10265 - DNA, 19 bp, Artificial Sequence
  Synthetic
tgtttgagatctgaggagg

SEQ ID NO: 10266 - DNA, 16 bp, Artificial Sequence
  Synthetic
ccatggcgcggtgtca

SEQ ID NO: 10267 - DNA, 20 bp, Artificial Sequence
  Synthetic
agttcaggttccacatctgc

SEQ ID NO: 10268 - DNA, 17 bp, Artificial Sequence
  Synthetic
cctggtgaggtgtgcca

SEQ ID NO: 10269 - DNA, 18 bp, Artificial Sequence
  Synthetic
cctctttctggacggggc

SEQ ID NO: 10270 - DNA, 18 bp, Artificial Sequence
  Synthetic
catagctcgagggcccca

SEQ ID NO: 10271 - DNA, 18 bp, Artificial Sequence
  Synthetic
tccagaagccagggaggg

SEQ ID NO: 10272 - DNA, 18 bp, Artificial Sequence
  Synthetic
ccatccactgccgtgatg

SEQ ID NO: 10273 - DNA, 18 bp, Artificial Sequence
  Synthetic
ctggagatccccgtgact

SEQ ID NO: 10274 - DNA, 23 bp, Artificial Sequence
  Synthetic
aggaaaaacataacaatcttgtg

SEQ ID NO: 10275 - DNA, 17 bp, Artificial Sequence
  Synthetic
tgtaggcggggagatgc

SEQ ID NO: 10276 - DNA, 16 bp, Artificial Sequence
  Synthetic
agcccgctctctgtcc

SEQ ID NO: 10277 - DNA, 17 bp, Artificial Sequence
  Synthetic
acggtatgcaggggctg

SEQ ID NO: 10278 - DNA, 20 bp, Artificial Sequence
  Synthetic
atgctctccttcctctgagc

SEQ ID NO: 10279 - DNA, 17 bp, Artificial Sequence
  Synthetic
acacaggccccgaactc

SEQ ID NO: 10280 - DNA, 17 bp, Artificial Sequence
  Synthetic
tcgtctgcaccccagtg

SEQ ID NO: 10281 - DNA, 18 bp, Artificial Sequence
  Synthetic
atagcgggcacaatggtg

SEQ ID NO: 10282 - DNA, 20 bp, Artificial Sequence
  Synthetic
taatgatgaggagcaccgga

SEQ ID NO: 10283 - DNA, 18 bp, Artificial Sequence
  Synthetic
tggcgtttaccggacaca

SEQ ID NO: 10284 - DNA, 17 bp, Artificial Sequence
  Synthetic
ctcaaggcgaggctcct

SEQ ID NO: 10285 - DNA, 18 bp, Artificial Sequence
  Synthetic
tggatctggggcagttcc

SEQ ID NO: 10286 - DNA, 18 bp, Artificial Sequence
  Synthetic
catcagggtcttgccgtc

SEQ ID NO: 10287 - DNA, 16 bp, Artificial Sequence
  Synthetic
cggcgatggagaggca

SEQ ID NO: 10288 - DNA, 19 bp, Artificial Sequence
  Synthetic
cacatcctccttcttggcc

SEQ ID NO: 10289 - DNA, 20 bp, Artificial Sequence
  Synthetic
atgggaactcgtagacctca

SEQ ID NO: 10290 - DNA, 16 bp, Artificial Sequence
  Synthetic
tcccagggacccgaga

SEQ ID NO: 10291 - DNA, 19 bp, Artificial Sequence
  Synthetic
gccaggtggttacaggaga

SEQ ID NO: 10292 - DNA, 18 bp, Artificial Sequence
  Synthetic
aaactggaccacttcggc

SEQ ID NO: 10293 - DNA, 20 bp, Artificial Sequence
  Synthetic
cgtagaggacggaattggtg

SEQ ID NO: 10294 - DNA, 15 bp, Artificial Sequence
  Synthetic
aaggagcggcaccgt

SEQ ID NO: 10295 - DNA, 18 bp, Artificial Sequence
  Synthetic
tacgtgcgtgtctttgcc

SEQ ID NO: 10296 - DNA, 16 bp, Artificial Sequence
  Synthetic
gaggtcgttggcggca

SEQ ID NO: 10297 - DNA, 22 bp, Artificial Sequence
  Synthetic
caacaataatttcctgtgcaca

SEQ ID NO: 10298 - DNA, 19 bp, Artificial Sequence
  Synthetic
ttggagaaactgttgcaga

SEQ ID NO: 10299 - DNA, 21 bp, Artificial Sequence
  Synthetic
ccctggcattgtttaatgaac

SEQ ID NO: 10300 - DNA, 23 bp, Artificial Sequence
  Synthetic
caaaagctgttttgtaacatgtt

SEQ ID NO: 10301 - DNA, 25 bp, Artificial Sequence
  Synthetic
cctaacaaattaccatttaatgagg

SEQ ID NO: 10302 - DNA, 18 bp, Artificial Sequence
  Synthetic
gcatagagcagctggaaa

SEQ ID NO: 10303 - DNA, 19 bp, Artificial Sequence
  Synthetic
gttcacgacctattcctga

SEQ ID NO: 10304 - DNA, 23 bp, Artificial Sequence
  Synthetic
taggttttgcagaaaatattgtg

SEQ ID NO: 10305 - DNA, 19 bp, Artificial Sequence
  Synthetic
gcagaccactggaaaactg

SEQ ID NO: 10306 - DNA, 24 bp, Artificial Sequence
  Synthetic
ttacaaaaccatgtaaagataggc

SEQ ID NO: 10307 - DNA, 25 bp, Artificial Sequence
  Synthetic
gctcatattaatgtaatgaatccac

SEQ ID NO: 10308 - DNA, 25 bp, Artificial Sequence
  Synthetic
ctctacaaataaatctgcaaacttg

SEQ ID NO: 10309 - DNA, 22 bp, Artificial Sequence
  Synthetic
agcaggggaaaataaaaacaac

SEQ ID NO: 10310 - DNA, 18 bp, Artificial Sequence
  Synthetic
ggatggctcttgggaaac

SEQ ID NO: 10311 - DNA, 22 bp, Artificial Sequence
  Synthetic
gggaaaagcagtttttacagaa

SEQ ID NO: 10312 - DNA, 22 bp, Artificial Sequence
  Synthetic
gaggatgaactattactggacc

SEQ ID NO: 10313 - DNA, 19 bp, Artificial Sequence
  Synthetic
gagtgccaaattgaggatg

SEQ ID NO: 10314 - DNA, 22 bp, Artificial Sequence
  Synthetic
gcatggaaagtgtaagaaatgg

SEQ ID NO: 10315 - DNA, 18 bp, Artificial Sequence
  Synthetic
caaccgccaatttcactg

SEQ ID NO: 10316 - DNA, 23 bp, Artificial Sequence
  Synthetic
tgttgataccttgtaaattttgc

SEQ ID NO: 10317 - DNA, 24 bp, Artificial Sequence
  Synthetic
ggaaatatttgtattaggtgtcgc

SEQ ID NO: 10318 - DNA, 18 bp, Artificial Sequence
  Synthetic
cggtgcaagacttcgttt

SEQ ID NO: 10319 - DNA, 22 bp, Artificial Sequence
  Synthetic
agtttagatggtgatttggaaa

SEQ ID NO: 10320 - DNA, 20 bp, Artificial Sequence
  Synthetic
acagcggactagaatgttct

SEQ ID NO: 10321 - DNA, 20 bp, Artificial Sequence
  Synthetic
ggtaattgctgtgtatgctg

SEQ ID NO: 10322 - DNA, 23 bp, Artificial Sequence
  Synthetic
agtatgaaccctaatgtatacgc

SEQ ID NO: 10323 - DNA, 23 bp, Artificial Sequence
  Synthetic
gaccaaaagtacaaatatttgca

SEQ ID NO: 10324 - DNA, 18 bp, Artificial Sequence
  Synthetic
gtcagattgaccactggc

SEQ ID NO: 10325 - DNA, 20 bp, Artificial Sequence
  Synthetic
tgtttgcccctgttactagc

SEQ ID NO: 10326 - DNA, 20 bp, Artificial Sequence
  Synthetic
caagggtcgaacagaaaccg

SEQ ID NO: 10327 - DNA, 18 bp, Artificial Sequence
  Synthetic
gacatcacgggagacttg

SEQ ID NO: 10328 - DNA, 23 bp, Artificial Sequence
  Synthetic
cctacagtagattggtctttagg

SEQ ID NO: 10329 - DNA, 18 bp, Artificial Sequence
  Synthetic
tgtttttcgggggcttgg

SEQ ID NO: 10330 - DNA, 19 bp, Artificial Sequence
  Synthetic
gttgaccttttacctggtg

SEQ ID NO: 10331 - DNA, 23 bp, Artificial Sequence
  Synthetic
ttcagtttgataatccagcattt

SEQ ID NO: 10332 - DNA, 24 bp, Artificial Sequence
  Synthetic
accattaacacagaagaacctata

SEQ ID NO: 10333 - DNA, 19 bp, Artificial Sequence
  Synthetic
ccagcaagtggtaaggtat

SEQ ID NO: 10334 - DNA, 25 bp, Artificial Sequence
  Synthetic
ttataatcctgataaggaacgtcta

SEQ ID NO: 10335 - DNA, 21 bp, Artificial Sequence
  Synthetic
agagaacaatgttatgccagg

SEQ ID NO: 10336 - DNA, 19 bp, Artificial Sequence
  Synthetic
aaaatgcggacgtaagaga

SEQ ID NO: 10337 - DNA, 20 bp, Artificial Sequence
  Synthetic
gctttgcaagacaatcaagg

SEQ ID NO: 10338 - DNA, 18 bp, Artificial Sequence
  Synthetic
tttacgaggtagccaggt

SEQ ID NO: 10339 - DNA, 18 bp, Artificial Sequence
  Synthetic
catccgttcttcacagga

SEQ ID NO: 10340 - DNA, 21 bp, Artificial Sequence
  Synthetic
cttagaaaaatcttcgcagcg

SEQ ID NO: 10341 - DNA, 22 bp, Artificial Sequence
  Synthetic
atcagaggatatagcttgcaaa

SEQ ID NO: 10342 - DNA, 18 bp, Artificial Sequence
  Synthetic
ccccttgaggcatttgtg

SEQ ID NO: 10343 - DNA, 19 bp, Artificial Sequence
  Synthetic
aacatactgcagcttgtgg

SEQ ID NO: 10344 - DNA, 20 bp, Artificial Sequence
  Synthetic
attcgtggaactttcagtca

SEQ ID NO: 10345 - DNA, 22 bp, Artificial Sequence
  Synthetic
atagggatgttttgatcgaatc

SEQ ID NO: 10346 - DNA, 20 bp, Artificial Sequence
  Synthetic
ctgtggctccaaatacagat

SEQ ID NO: 10347 - DNA, 18 bp, Artificial Sequence
  Synthetic
caaactagacgctcgcat

SEQ ID NO: 10348 - DNA, 19 bp, Artificial Sequence
  Synthetic
ctctggaagcaaaggtttc

SEQ ID NO: 10349 - DNA, 18 bp, Artificial Sequence
  Synthetic
atcgcccaacaattttcc

SEQ ID NO: 10350 - DNA, 23 bp, Artificial Sequence
  Synthetic
gagcaagaatttgtaagaaacag

SEQ ID NO: 10351 - DNA, 20 bp, Artificial Sequence
  Synthetic
tagactagttctgcgccttt

SEQ ID NO: 10352 - DNA, 18 bp, Artificial Sequence
  Synthetic
tctcgaagccgtagaagc

SEQ ID NO: 10353 - DNA, 21 bp, Artificial Sequence
  Synthetic
agttcattcgttttgtatcgt

SEQ ID NO: 10354 - DNA, 20 bp, Artificial Sequence
  Synthetic
ccctgttttcttctcggaaa

SEQ ID NO: 10355 - DNA, 22 bp, Artificial Sequence
  Synthetic
ctattcaactaaatggagcact

SEQ ID NO: 10356 - DNA, 18 bp, Artificial Sequence
  Synthetic
ctagacgggcgatttctg

SEQ ID NO: 10357 - DNA, 21 bp, Artificial Sequence
  Synthetic
ggtatcgtaacgaatagccaa

SEQ ID NO: 10358 - DNA, 18 bp, Artificial Sequence
  Synthetic
ccaacacttccgcgattt

SEQ ID NO: 10359 - DNA, 21 bp, Artificial Sequence
  Synthetic
tggcagattctttttcgtgaa

SEQ ID NO: 10360 - DNA, 21 bp, Artificial Sequence
  Synthetic
aaagccttttagtcattccaa

SEQ ID NO: 10361 - DNA, 18 bp, Artificial Sequence
  Synthetic
atgacagagacacgacga

SEQ ID NO: 10362 - DNA, 20 bp, Artificial Sequence
  Synthetic
agcaatagtcctttccatcg

SEQ ID NO: 10363 - DNA, 21 bp, Artificial Sequence
  Synthetic
atctctagaaacttgtgcaga

SEQ ID NO: 10364 - DNA, 23 bp, Artificial Sequence
  Synthetic
tgcagaagctaagtttatcaaac

SEQ ID NO: 10365 - DNA, 20 bp, Artificial Sequence
  Synthetic
acgaataacaccacgatagc

SEQ ID NO: 10366 - DNA, 19 bp, Artificial Sequence
  Synthetic
tgggcagaatcttatccag

SEQ ID NO: 10367 - DNA, 21 bp, Artificial Sequence
  Synthetic
ccaactcctgtaatacatggt

SEQ ID NO: 10368 - DNA, 18 bp, Artificial Sequence
  Synthetic
ggagagtctcatgaccac

SEQ ID NO: 10369 - DNA, 21 bp, Artificial Sequence
  Synthetic
atttccttcattacgacagga

SEQ ID NO: 10370 - DNA, 19 bp, Artificial Sequence
  Synthetic
gatctcgcatagctgaagg

SEQ ID NO: 10371 - DNA, 21 bp, Artificial Sequence
  Synthetic
ccccaatttttcatgaagagc

SEQ ID NO: 10372 - DNA, 19 bp, Artificial Sequence
  Synthetic
gtgaactcaagctcttcac

SEQ ID NO: 10373 - DNA, 21 bp, Artificial Sequence
  Synthetic
taagacgttgctcttatcacc

SEQ ID NO: 10374 - DNA, 20 bp, Artificial Sequence
  Synthetic
taatttcgccacaagaccac

SEQ ID NO: 10375 - DNA, 18 bp, Artificial Sequence
  Synthetic
gaagtcaacccatccacc

SEQ ID NO: 10376 - DNA, 21 bp, Artificial Sequence
  Synthetic
caattgcacttcaaactcaac

SEQ ID NO: 10377 - DNA, 23 bp, Artificial Sequence
  Synthetic
aactgtgtatgaggtttaacact

SEQ ID NO: 10378 - DNA, 22 bp, Artificial Sequence
  Synthetic
atcacaaaccataacaatacga

SEQ ID NO: 10379 - DNA, 21 bp, Artificial Sequence
  Synthetic
catgctttctgtagaaaaacg

SEQ ID NO: 10380 - DNA, 18 bp, Artificial Sequence
  Synthetic
tagcttcaacacgcctct

SEQ ID NO: 10381 - DNA, 18 bp, Artificial Sequence
  Synthetic
ctcctcttcctgctgttg

SEQ ID NO: 10382 - DNA, 20 bp, Artificial Sequence
  Synthetic
agcgctcttaaacaatctca

SEQ ID NO: 10383 - DNA, 23 bp, Artificial Sequence
  Synthetic
caagcatcacaagatttatagcc

SEQ ID NO: 10384 - DNA, 18 bp, Artificial Sequence
  Synthetic
aactgctccaaaacctga

SEQ ID NO: 10385 - DNA, 23 bp, Artificial Sequence
  Synthetic
agtttgaaactccaatactcttc

SEQ ID NO: 10386 - DNA, 22 bp, Artificial Sequence
  Synthetic
taataaccgtatccgtttgact

SEQ ID NO: 10387 - DNA, 20 bp, Artificial Sequence
  Synthetic
tcaggagacgagaaatcaac

SEQ ID NO: 10388 - DNA, 18 bp, Artificial Sequence
  Synthetic
tgtcattctcggagcaac

SEQ ID NO: 10389 - DNA, 21 bp, Artificial Sequence
  Synthetic
tttccatatttcgtgattgca

SEQ ID NO: 10390 - DNA, 21 bp, Artificial Sequence
  Synthetic
gtggaaaagctttgttagagg

SEQ ID NO: 10391 - DNA, 18 bp, Artificial Sequence
  Synthetic
gctgttgtgttcaaagct

SEQ ID NO: 10392 - DNA, 19 bp, Artificial Sequence
  Synthetic
aaaatcctcgctatcccct

SEQ ID NO: 10393 - DNA, 18 bp, Artificial Sequence
  Synthetic
attgatccgagcaaggga

SEQ ID NO: 10394 - DNA, 18 bp, Artificial Sequence
  Synthetic
gcccggaattggatttgg

SEQ ID NO: 10395 - DNA, 20 bp, Artificial Sequence
  Synthetic
ctttggatagagaagctgct

SEQ ID NO: 10396 - DNA, 18 bp, Artificial Sequence
  Synthetic
ctcaagcgtacgtccttc

SEQ ID NO: 10397 - DNA, 18 bp, Artificial Sequence
  Synthetic
acaagaagcggtgtgaag

SEQ ID NO: 10398 - DNA, 18 bp, Artificial Sequence
  Synthetic
cgttcgttgcagacttac

SEQ ID NO: 10399 - DNA, 19 bp, Artificial Sequence
  Synthetic
gacgttactgcatcttctg

SEQ ID NO: 10400 - DNA, 21 bp, Artificial Sequence
  Synthetic
ttaaatcccttcccattcagg

SEQ ID NO: 10401 - DNA, 22 bp, Artificial Sequence
  Synthetic
gactctgaaggtaatatcgagt

SEQ ID NO: 10402 - DNA, 21 bp, Artificial Sequence
  Synthetic
gaatttaatccctcttcgacc

SEQ ID NO: 10403 - DNA, 19 bp, Artificial Sequence
  Synthetic
ttcaggaacagcttgtgtg

SEQ ID NO: 10404 - DNA, 20 bp, Artificial Sequence
  Synthetic
gcctagtcctggtaaaactg

SEQ ID NO: 10405 - DNA, 19 bp, Artificial Sequence
  Synthetic
aaaggagtcggaccatgaa

SEQ ID NO: 10406 - DNA, 22 bp, Artificial Sequence
  Synthetic
ccagctttctgtaaaaagacaa

SEQ ID NO: 10407 - DNA, 19 bp, Artificial Sequence
  Synthetic
agaaaattgcggaggaacc

SEQ ID NO: 10408 - DNA, 18 bp, Artificial Sequence
  Synthetic
gcatcttcaggaaccgta

SEQ ID NO: 10409 - DNA, 25 bp, Artificial Sequence
  Synthetic
atctactaagccctatattaaagtc

SEQ ID NO: 10410 - DNA, 21 bp, Artificial Sequence
  Synthetic
caaaaccgatacagaacatct

SEQ ID NO: 10411 - DNA, 19 bp, Artificial Sequence
  Synthetic
ctgtccatacactaagcca

SEQ ID NO: 10412 - DNA, 18 bp, Artificial Sequence
  Synthetic
ccattccaccatctgagc

SEQ ID NO: 10413 - DNA, 20 bp, Artificial Sequence
  Synthetic
taaaaagtgagcaacgaacc

SEQ ID NO: 10414 - DNA, 22 bp, Artificial Sequence
  Synthetic
ttttcgttacactcttatctgg

SEQ ID NO: 10415 - DNA, 23 bp, Artificial Sequence
  Synthetic
taattccataagtagtttctgca

SEQ ID NO: 10416 - DNA, 19 bp, Artificial Sequence
  Synthetic
gacatcaacccgaacttct

SEQ ID NO: 10417 - DNA, 19 bp, Artificial Sequence
  Synthetic
tacggccattatgaacctc

SEQ ID NO: 10418 - DNA, 23 bp, Artificial Sequence
  Synthetic
ttctctcttttttgttgatacga

SEQ ID NO: 10419 - DNA, 22 bp, Artificial Sequence
  Synthetic
gcttacattcaagatgagagaa

SEQ ID NO: 10420 - DNA, 20 bp, Artificial Sequence
  Synthetic
ttagaagaactttgcgagca

SEQ ID NO: 10421 - DNA, 22 bp, Artificial Sequence
  Synthetic
ccttctgacttcatgatcatca

SEQ ID NO: 10422 - DNA, 19 bp, Artificial Sequence
  Synthetic
aactattcccgtcaccaat

SEQ ID NO: 10423 - DNA, 18 bp, Artificial Sequence
  Synthetic
agaacaaacgaaggagct

SEQ ID NO: 10424 - DNA, 18 bp, Artificial Sequence
  Synthetic
ccgcttttggtttcttcc

SEQ ID NO: 10425 - DNA, 20 bp, Artificial Sequence
  Synthetic
tagaagctatggccaaaacg

SEQ ID NO: 10426 - DNA, 18 bp, Artificial Sequence
  Synthetic
ttcgataacagaccgctc

SEQ ID NO: 10427 - DNA, 18 bp, Artificial Sequence
  Synthetic
gctggaaactcctatccg

SEQ ID NO: 10428 - DNA, 18 bp, Artificial Sequence
  Synthetic
atcgatggagctgtaggc

SEQ ID NO: 10429 - DNA, 18 bp, Artificial Sequence
  Synthetic
taacgcacgggaaaaagt

SEQ ID NO: 10430 - DNA, 22 bp, Artificial Sequence
  Synthetic
tttcgaaaccataccattactc

SEQ ID NO: 10431 - DNA, 19 bp, Artificial Sequence
  Synthetic
tctttatcagggagagggc

SEQ ID NO: 10432 - DNA, 19 bp, Artificial Sequence
  Synthetic
gaaacgcaaacatggggta

SEQ ID NO: 10433 - DNA, 21 bp, Artificial Sequence
  Synthetic
tttgtaattgctggttttcct

SEQ ID NO: 10434 - DNA, 20 bp, Artificial Sequence
  Synthetic
atggcacgtcttaaaagagc

SEQ ID NO: 10435 - DNA, 18 bp, Artificial Sequence
  Synthetic
acaagatcagtggcaagc

SEQ ID NO: 10436 - DNA, 18 bp, Artificial Sequence
  Synthetic
aatgcgcacagagaactc

SEQ ID NO: 10437 - DNA, 24 bp, Artificial Sequence
  Synthetic
aatacttccactatatccccttag

SEQ ID NO: 10438 - DNA, 23 bp, Artificial Sequence
  Synthetic
catatccttgttgatgttcttga

SEQ ID NO: 10439 - DNA, 21 bp, Artificial Sequence
  Synthetic
cgcctatggattaaaaatggg

SEQ ID NO: 10440 - DNA, 23 bp, Artificial Sequence
  Synthetic
atctggattattagcaaagactt

SEQ ID NO: 10441 - DNA, 19 bp, Artificial Sequence
  Synthetic
acgggatcaccttttctca

SEQ ID NO: 10442 - DNA, 18 bp, Artificial Sequence
  Synthetic
ctcttgtgcatgcgacat

SEQ ID NO: 10443 - DNA, 20 bp, Artificial Sequence
  Synthetic
atcagaaggtagggggattc

SEQ ID NO: 10444 - DNA, 20 bp, Artificial Sequence
  Synthetic
gggacaataatgaaggcctt

SEQ ID NO: 10445 - DNA, 18 bp, Artificial Sequence
  Synthetic
cggacgttatggaccagt

SEQ ID NO: 10446 - DNA, 18 bp, Artificial Sequence
  Synthetic
tcgaagacaacagggaac

SEQ ID NO: 10447 - DNA, 22 bp, Artificial Sequence
  Synthetic
caggagcttttaaaattacagg

SEQ ID NO: 10448 - DNA, 18 bp, Artificial Sequence
  Synthetic
agctcgtggtcaagaaga

SEQ ID NO: 10449 - DNA, 20 bp, Artificial Sequence
  Synthetic
aaaaccccctctttagaaga

SEQ ID NO: 10450 - DNA, 20 bp, Artificial Sequence
  Synthetic
aaactttggaagatgctgga

SEQ ID NO: 10451 - DNA, 23 bp, Artificial Sequence
  Synthetic
gaaagggatttgttctgttttac

SEQ ID NO: 10452 - DNA, 18 bp, Artificial Sequence
  Synthetic
ctttgccggaaattgctc

SEQ ID NO: 10453 - DNA, 22 bp, Artificial Sequence
  Synthetic
taatgggagtggaaatggatac

SEQ ID NO: 10454 - DNA, 18 bp, Artificial Sequence
  Synthetic
cttttgcgtatggctacc

SEQ ID NO: 10455 - DNA, 22 bp, Artificial Sequence
  Synthetic
tagtgacaatagtaggagaagc

SEQ ID NO: 10456 - DNA, 20 bp, Artificial Sequence
  Synthetic
cgtgatatagctatcccgga

SEQ ID NO: 10457 - DNA, 22 bp, Artificial Sequence
  Synthetic
gtggagaagtagactttgagtt

SEQ ID NO: 10458 - DNA, 23 bp, Artificial Sequence
  Synthetic
cttttactgctaagattggatcg

SEQ ID NO: 10459 - DNA, 18 bp, Artificial Sequence
  Synthetic
aggaaacgccatctttcc

SEQ ID NO: 10460 - DNA, 19 bp, Artificial Sequence
  Synthetic
tgttgtttcggagagaagg

SEQ ID NO: 10461 - DNA, 19 bp, Artificial Sequence
  Synthetic
aacttgcttctcagtgagg

SEQ ID NO: 10462 - DNA, 20 bp, Artificial Sequence
  Synthetic
catctctctcgctatctgat

SEQ ID NO: 10463 - DNA, 18 bp, Artificial Sequence
  Synthetic
cgaatcgcccttattggt

SEQ ID NO: 10464 - DNA, 22 bp, Artificial Sequence
  Synthetic
agagatacaaagtgtcttgagt

SEQ ID NO: 10465 - DNA, 21 bp, Artificial Sequence
  Synthetic
gagatcctttttgcaagagaa

SEQ ID NO: 10466 - DNA, 21 bp, Artificial Sequence
  Synthetic
ataacgattacttgcttgtgc

SEQ ID NO: 10467 - DNA, 19 bp, Artificial Sequence
  Synthetic
gactacagtctctcctggg

SEQ ID NO: 10468 - DNA, 23 bp, Artificial Sequence
  Synthetic
ccctaattttatgctaagtgggt

SEQ ID NO: 10469 - DNA, 20 bp, Artificial Sequence
  Synthetic
gcagagaatcctttctgttt

SEQ ID NO: 10470 - DNA, 20 bp, Artificial Sequence
  Synthetic
ttggcttggattacgaatgt

SEQ ID NO: 10471 - DNA, 18 bp, Artificial Sequence
  Synthetic
tattgtctccggcttgtg

SEQ ID NO: 10472 - DNA, 18 bp, Artificial Sequence
  Synthetic
caactgtttccgcagctt

SEQ ID NO: 10473 - DNA, 19 bp, Artificial Sequence
  Synthetic
agttcgttgctatccacat

SEQ ID NO: 10474 - DNA, 20 bp, Artificial Sequence
  Synthetic
aacacttttgagctgctatc

SEQ ID NO: 10475 - DNA, 18 bp, Artificial Sequence
  Synthetic
caccccagagttgtcttt

SEQ ID NO: 10476 - DNA, 21 bp, Artificial Sequence
  Synthetic
atgcttttttggttatgcatg

SEQ ID NO: 10477 - DNA, 22 bp, Artificial Sequence
  Synthetic
aaaatttccaggggatagagaa

SEQ ID NO: 10478 - DNA, 18 bp, Artificial Sequence
  Synthetic
agaagtttgatgcggagg

SEQ ID NO: 10479 - DNA, 23 bp, Artificial Sequence
  Synthetic
gtttgtttttggccttatctttg

SEQ ID NO: 10480 - DNA, 18 bp, Artificial Sequence
  Synthetic
cgaacaatggaaagctgg

SEQ ID NO: 10481 - DNA, 20 bp, Artificial Sequence
  Synthetic
agatgccaaaatgacgattg

SEQ ID NO: 10482 - DNA, 18 bp, Artificial Sequence
  Synthetic
gctgggagagaaactgtg

SEQ ID NO: 10483 - DNA, 19 bp, Artificial Sequence
  Synthetic
aggctttttgggagttacc

SEQ ID NO: 10484 - DNA, 24 bp, Artificial Sequence
  Synthetic
ctttttattgctatagctaccgag

SEQ ID NO: 10485 - DNA, 20 bp, Artificial Sequence
  Synthetic
acaattgttaagcgcaatgg

SEQ ID NO: 10486 - DNA, 21 bp, Artificial Sequence
  Synthetic
ccaatattgaaaaggagcctg

SEQ ID NO: 10487 - DNA, 21 bp, Artificial Sequence
  Synthetic
caatcttggttttgttgatgc

SEQ ID NO: 10488 - DNA, 18 bp, Artificial Sequence
  Synthetic
ggatgaacggttctgcta

SEQ ID NO: 10489 - DNA, 19 bp, Artificial Sequence
  Synthetic
aagactaatcttccagcgt

SEQ ID NO: 10490 - DNA, 19 bp, Artificial Sequence
  Synthetic
acgctcgataatttgacgg

SEQ ID NO: 10491 - DNA, 22 bp, Artificial Sequence
  Synthetic
cagcagcagaatatctagagaa

SEQ ID NO: 10492 - DNA, 20 bp, Artificial Sequence
  Synthetic
agagatagggaaaagaggga

SEQ ID NO: 10493 - DNA, 19 bp, Artificial Sequence
  Synthetic
aagctacctgttccgagtt

SEQ ID NO: 10494 - DNA, 21 bp, Artificial Sequence
  Synthetic
gatcattgactgtgttagctt

SEQ ID NO: 10495 - DNA, 19 bp, Artificial Sequence
  Synthetic
attcccgtagttagtccgg

SEQ ID NO: 10496 - DNA, 23 bp, Artificial Sequence
  Synthetic
tatttttatcgcgaatagaaacg

SEQ ID NO: 10497 - DNA, 19 bp, Artificial Sequence
  Synthetic
gctttattgggactgggtt

SEQ ID NO: 10498 - DNA, 21 bp, Artificial Sequence
  Synthetic
gtactacgagagaagttcgtg

SEQ ID NO: 10499 - DNA, 23 bp, Artificial Sequence
  Synthetic
aaccatcaaaagcttctaaaagg

SEQ ID NO: 10500 - DNA, 20 bp, Artificial Sequence
  Synthetic
ttcgtctacaattgagaggc

SEQ ID NO: 10501 - DNA, 18 bp, Artificial Sequence
  Synthetic
caagcagcaggatccaat

SEQ ID NO: 10502 - DNA, 18 bp, Artificial Sequence
  Synthetic
tgggtataatcctgggcc

SEQ ID NO: 10503 - DNA, 21 bp, Artificial Sequence
  Synthetic
aacaagctttatgtggatcct

SEQ ID NO: 10504 - DNA, 24 bp, Artificial Sequence
  Synthetic
gatggaacgactgtttctttaaat

SEQ ID NO: 10505 - DNA, 20 bp, Artificial Sequence
  Synthetic
atacgccctaattcagctaa

SEQ ID NO: 10506 - DNA, 18 bp, Artificial Sequence
  Synthetic
acggagattctcgcctag

SEQ ID NO: 10507 - DNA, 20 bp, Artificial Sequence
  Synthetic
caccaaacggtcttatgaac

SEQ ID NO: 10508 - DNA, 22 bp, Artificial Sequence
  Synthetic
ggaaggatcctaagaaaactgg

SEQ ID NO: 10509 - DNA, 19 bp, Artificial Sequence
  Synthetic
ctgcagtcaaaggagttgg

SEQ ID NO: 10510 - DNA, 22 bp, Artificial Sequence
  Synthetic
actagaggagtacaaattgctt

SEQ ID NO: 10511 - DNA, 18 bp, Artificial Sequence
  Synthetic
ttagcgggcaattcctct

SEQ ID NO: 10512 - DNA, 20 bp, Artificial Sequence
  Synthetic
tcaagatttgagtcagtcgc

SEQ ID NO: 10513 - DNA, 21 bp, Artificial Sequence
  Synthetic
gcctcatacaagatcttcaga

SEQ ID NO: 10514 - DNA, 20 bp, Artificial Sequence
  Synthetic
cagtatcgtctaatggagca

SEQ ID NO: 10515 - DNA, 21 bp, Artificial Sequence
  Synthetic
atcattgggatcttgcacttt

SEQ ID NO: 10516 - DNA, 25 bp, Artificial Sequence
  Synthetic
gtttttctcattactcttgatgttg

SEQ ID NO: 10517 - DNA, 23 bp, Artificial Sequence
  Synthetic
caaaaactgctgataagtttcgt

SEQ ID NO: 10518 - DNA, 20 bp, Artificial Sequence
  Synthetic
ttcacaatcacattgcatga

SEQ ID NO: 10519 - DNA, 23 bp, Artificial Sequence
  Synthetic
aagaagtgtacaataaaagagga

SEQ ID NO: 10520 - DNA, 18 bp, Artificial Sequence
  Synthetic
agggtgcatgttgatcca

SEQ ID NO: 10521 - DNA, 18 bp, Artificial Sequence
  Synthetic
ccttggctgcaaaggaag

SEQ ID NO: 10522 - DNA, 24 bp, Artificial Sequence
  Synthetic
cctaagatcttctacaaatatcgc

SEQ ID NO: 10523 - DNA, 24 bp, Artificial Sequence
  Synthetic
gggtaattgacaataacatttgtg

SEQ ID NO: 10524 - DNA, 22 bp, Artificial Sequence
  Synthetic
aacatggatagagcagttaaac

SEQ ID NO: 10525 - DNA, 20 bp, Artificial Sequence
  Synthetic
gaaaacagaatggtgctggc

SEQ ID NO: 10526 - DNA, 19 bp, Artificial Sequence
  Synthetic
tgttgccaacaatcatcac

SEQ ID NO: 10527 - DNA, 25 bp, Artificial Sequence
  Synthetic
taggttttgtacagagatatgattg

SEQ ID NO: 10528 - DNA, 19 bp, Artificial Sequence
  Synthetic
aagaaatagcgttgctgtg

SEQ ID NO: 10529 - DNA, 18 bp, Artificial Sequence
  Synthetic
gctgcagcagttaaaacg

SEQ ID NO: 10530 - DNA, 23 bp, Artificial Sequence
  Synthetic
aaagaacttgttgatgtccattt

SEQ ID NO: 10531 - DNA, 23 bp, Artificial Sequence
  Synthetic
aatctttttttcaaaggctttgg

SEQ ID NO: 10532 - DNA, 21 bp, Artificial Sequence
  Synthetic
aaaagactgagggacatttgg

SEQ ID NO: 10533 - DNA, 19 bp, Artificial Sequence
  Synthetic
gtacccactcaacggaagc

SEQ ID NO: 10534 - DNA, 17 bp, Artificial Sequence
  Synthetic
cgggagcagaagcagga

SEQ ID NO: 10535 - DNA, 21 bp, Artificial Sequence
  Synthetic
attttgttgaaaggacaagcc

SEQ ID NO: 10536 - DNA, 18 bp, Artificial Sequence
  Synthetic
cactggatatgggccatt

SEQ ID NO: 10537 - DNA, 25 bp, Artificial Sequence
  Synthetic
ctcctgatagacaatttttagatgt

SEQ ID NO: 10538 - DNA, 22 bp, Artificial Sequence
  Synthetic
tccagaagttattcctacagaa

SEQ ID NO: 10539 - DNA, 18 bp, Artificial Sequence
  Synthetic
aatagtgatcgcctgctg

SEQ ID NO: 10540 - DNA, 22 bp, Artificial Sequence
  Synthetic
aggtattggacactgaaaatcc

SEQ ID NO: 10541 - DNA, 23 bp, Artificial Sequence
  Synthetic
atgaattttaaggccttatcagt

SEQ ID NO: 10542 - DNA, 20 bp, Artificial Sequence
  Synthetic
ccagtgaccagtctagaagt

SEQ ID NO: 10543 - DNA, 18 bp, Artificial Sequence
  Synthetic
ccgcttcactgatctctt

SEQ ID NO: 10544 - DNA, 20 bp, Artificial Sequence
  Synthetic
aacagacggaatttgtcctg

SEQ ID NO: 10545 - DNA, 25 bp, Artificial Sequence
  Synthetic
atcagttatatatgattgatcctgc

SEQ ID NO: 10546 - DNA, 23 bp, Artificial Sequence
  Synthetic
taagacattgcaagaaatgaagg

SEQ ID NO: 10547 - DNA, 20 bp, Artificial Sequence
  Synthetic
gtgttgctttgaaagattgc

SEQ ID NO: 10548 - DNA, 25 bp, Artificial Sequence
  Synthetic
atatgacagtttggtttatactgga

SEQ ID NO: 10549 - DNA, 23 bp, Artificial Sequence
  Synthetic
gttaaaaacattcctcgttatgc

SEQ ID NO: 10550 - DNA, 22 bp, Artificial Sequence
  Synthetic
ttgttacaacttcacttacacc

SEQ ID NO: 10551 - DNA, 23 bp, Artificial Sequence
  Synthetic
aaattgtattgtgcctttacagc

SEQ ID NO: 10552 - DNA, 18 bp, Artificial Sequence
  Synthetic
tttggcagtgatgcagaa

SEQ ID NO: 10553 - DNA, 21 bp, Artificial Sequence
  Synthetic
gacagcagtttgttaaagaga

SEQ ID NO: 10554 - DNA, 21 bp, Artificial Sequence
  Synthetic
gtgtcagataactgctgttga

SEQ ID NO: 10555 - DNA, 24 bp, Artificial Sequence
  Synthetic
gcagggtatttttaataaggctac

SEQ ID NO: 10556 - DNA, 22 bp, Artificial Sequence
  Synthetic
attgcttgcctattacaacatg

SEQ ID NO: 10557 - DNA, 23 bp, Artificial Sequence
  Synthetic
gcaatatgtgattttgaaattgc

SEQ ID NO: 10558 - DNA, 25 bp, Artificial Sequence
  Synthetic
gaaaattgagtataaacctgacttg

SEQ ID NO: 10559 - DNA, 21 bp, Artificial Sequence
  Synthetic
ttaagccatgagaaagcttcc

SEQ ID NO: 10560 - DNA, 21 bp, Artificial Sequence
  Synthetic
tacggcatggttttatccatt

SEQ ID NO: 10561 - DNA, 23 bp, Artificial Sequence
  Synthetic
attacgatgttatggctaatggt

SEQ ID NO: 10562 - DNA, 22 bp, Artificial Sequence
  Synthetic
gtgttctgattcaaaattctgc

SEQ ID NO: 10563 - DNA, 19 bp, Artificial Sequence
  Synthetic
ggcttgtcccattgttgtt

SEQ ID NO: 10564 - DNA, 20 bp, Artificial Sequence
  Synthetic
cgtgcggtataatcttgcta

SEQ ID NO: 10565 - DNA, 25 bp, Artificial Sequence
  Synthetic
tatcagctatttaaaggtttagcac

SEQ ID NO: 10566 - DNA, 23 bp, Artificial Sequence
  Synthetic
taggtattacagcggtaaaatgg

SEQ ID NO: 10567 - DNA, 19 bp, Artificial Sequence
  Synthetic
gtggttaaacctggtgaga

SEQ ID NO: 10568 - DNA, 23 bp, Artificial Sequence
  Synthetic
ttgtaattggtttgtacaaagtg

SEQ ID NO: 10569 - DNA, 23 bp, Artificial Sequence
  Synthetic
atgtttagtattacgttttgtgc

SEQ ID NO: 10570 - DNA, 24 bp, Artificial Sequence
  Synthetic
atttctgttttctctttgtggtac

SEQ ID NO: 10571 - DNA, 24 bp, Artificial Sequence
  Synthetic
atatatgaatgctaatggattgcg

SEQ ID NO: 10572 - DNA, 22 bp, Artificial Sequence
  Synthetic
aagtgcctgactagtattgaag

SEQ ID NO: 10573 - DNA, 22 bp, Artificial Sequence
  Synthetic
gttgtgtaccattgaatgcaat

SEQ ID NO: 10574 - DNA, 23 bp, Artificial Sequence
  Synthetic
ttactgttcaagatgctaaaggt

SEQ ID NO: 10575 - DNA, 19 bp, Artificial Sequence
  Synthetic
ggattcatatggtggtgcg

SEQ ID NO: 10576 - DNA, 19 bp, Artificial Sequence
  Synthetic
cgccagtggtttatctact

SEQ ID NO: 10577 - DNA, 24 bp, Artificial Sequence
  Synthetic
taatgtgtataaaaagctaggacc

SEQ ID NO: 10578 - DNA, 23 bp, Artificial Sequence
  Synthetic
gctaccattataaagaacttggt

SEQ ID NO: 10579 - DNA, 21 bp, Artificial Sequence
  Synthetic
ggacattaagcagttgttgtt

SEQ ID NO: 10580 - DNA, 20 bp, Artificial Sequence
  Synthetic
actatgactggcagaatgtt

SEQ ID NO: 10581 - DNA, 24 bp, Artificial Sequence
  Synthetic
ttcagtctttaacatatgtcaagc

SEQ ID NO: 10582 - DNA, 23 bp, Artificial Sequence
  Synthetic
cgtttttatgtcagaatccaaat

SEQ ID NO: 10583 - DNA, 21 bp, Artificial Sequence
  Synthetic
tacaatgacctgggtaatcag

SEQ ID NO: 10584 - DNA, 19 bp, Artificial Sequence
  Synthetic
tcttgtacaggatctccgt

SEQ ID NO: 10585 - DNA, 25 bp, Artificial Sequence
  Synthetic
tgtaggagatgtttttgttttaacc

SEQ ID NO: 10586 - DNA, 23 bp, Artificial Sequence
  Synthetic
ttgaatataaatgattgcactcg

SEQ ID NO: 10587 - DNA, 24 bp, Artificial Sequence
  Synthetic
aaagttctagtgctgtaaatatgc

SEQ ID NO: 10588 - DNA, 23 bp, Artificial Sequence
  Synthetic
agcattacagtttactacattga

SEQ ID NO: 10589 - DNA, 18 bp, Artificial Sequence
  Synthetic
cctgggttggctttgatg

SEQ ID NO: 10590 - DNA, 20 bp, Artificial Sequence
  Synthetic
tctgtctgattgtgttgtgc

SEQ ID NO: 10591 - DNA, 19 bp, Artificial Sequence
  Synthetic
cttaaagctgccatgctct

SEQ ID NO: 10592 - DNA, 21 bp, Artificial Sequence
  Synthetic
aataaacatgcattccacact

SEQ ID NO: 10593 - DNA, 21 bp, Artificial Sequence
  Synthetic
tacaaagcttggagaatgttg

SEQ ID NO: 10594 - DNA, 21 bp, Artificial Sequence
  Synthetic
ggtgtctgcatgtatacagat

SEQ ID NO: 10595 - DNA, 23 bp, Artificial Sequence
  Synthetic
atagctttagatcaagatgtgtt

SEQ ID NO: 10596 - DNA, 23 bp, Artificial Sequence
  Synthetic
agattttcagtttatgctttggt

SEQ ID NO: 10597 - DNA, 23 bp, Artificial Sequence
  Synthetic
gagtacaatgtgagtaaagatgg

SEQ ID NO: 10598 - DNA, 23 bp, Artificial Sequence
  Synthetic
attttccacttacccattttcag

SEQ ID NO: 10599 - DNA, 18 bp, Artificial Sequence
  Synthetic
gattggccattgcaccat

SEQ ID NO: 10600 - DNA, 22 bp, Artificial Sequence
  Synthetic
tatcatctaaagctggcaactc

SEQ ID NO: 10601 - DNA, 25 bp, Artificial Sequence
  Synthetic
cattaccactggttttgatcttaat

SEQ ID NO: 10602 - DNA, 24 bp, Artificial Sequence
  Synthetic
taccaaggttattaaagatcgtgt

SEQ ID NO: 10603 - DNA, 24 bp, Artificial Sequence
  Synthetic
ttatgcatattttacagacactgg

SEQ ID NO: 10604 - DNA, 18 bp, Artificial Sequence
  Synthetic
ctgttcagccaatcgcag

SEQ ID NO: 10605 - DNA, 21 bp, Artificial Sequence
  Synthetic
tactactgcaacaagttgtca

SEQ ID NO: 10606 - DNA, 24 bp, Artificial Sequence
  Synthetic
tcctgatcctattacatttacagg

SEQ ID NO: 10607 - DNA, 25 bp, Artificial Sequence
  Synthetic
ctctacggttttagagactacataa

SEQ ID NO: 10608 - DNA, 20 bp, Artificial Sequence
  Synthetic
cctgtaggtggtttgtatga

SEQ ID NO: 10609 - DNA, 24 bp, Artificial Sequence
  Synthetic
taaagtaaagttatctgatgtcgg

SEQ ID NO: 10610 - DNA, 25 bp, Artificial Sequence
  Synthetic
caacaactctctaatagatttggtg

SEQ ID NO: 10611 - DNA, 24 bp, Artificial Sequence
  Synthetic
cactttagttatgtccctactaag

SEQ ID NO: 10612 - DNA, 19 bp, Artificial Sequence
  Synthetic
gcaccagatttgtcacttg

SEQ ID NO: 10613 - DNA, 21 bp, Artificial Sequence
  Synthetic
gttaaagttcttaaggccacg

SEQ ID NO: 10614 - DNA, 23 bp, Artificial Sequence
  Synthetic
ttttgtgaatagtatcaggttgt

SEQ ID NO: 10615 - DNA, 22 bp, Artificial Sequence
  Synthetic
ttatgttaagtccaaagtcggt

SEQ ID NO: 10616 - DNA, 18 bp, Artificial Sequence
  Synthetic
gtcaactgctgccacgat

SEQ ID NO: 10617 - DNA, 18 bp, Artificial Sequence
  Synthetic
gagcctctagtgcaggat

SEQ ID NO: 10618 - DNA, 18 bp, Artificial Sequence
  Synthetic
gttggccaaagtgcagaa

SEQ ID NO: 10619 - DNA, 22 bp, Artificial Sequence
  Synthetic
ttcttaagaagatggatgagcc

SEQ ID NO: 10620 - DNA, 18 bp, Artificial Sequence
  Synthetic
acctgcttcgcgatacat

SEQ ID NO: 10621 - DNA, 20 bp, Artificial Sequence
  Synthetic
gaaatctcaccattgccttc

SEQ ID NO: 10622 - DNA, 20 bp, Artificial Sequence
  Synthetic
ttccaacactgtgtcaagct

SEQ ID NO: 10623 - DNA, 18 bp, Artificial Sequence
  Synthetic
cttcagtgcctgcttcac

SEQ ID NO: 10624 - DNA, 21 bp, Artificial Sequence
  Synthetic
gaaatctcaccattaccttcc

SEQ ID NO: 10625 - DNA, 19 bp, Artificial Sequence
  Synthetic
gaggcgacactccaccatg

SEQ ID NO: 10626 - DNA, 20 bp, Artificial Sequence
  Synthetic
tgcaacatgagcacacttcc

SEQ ID NO: 10627 - DNA, 18 bp, Artificial Sequence
  Synthetic
gtccatcctggggcccaa

SEQ ID NO: 10628 - DNA, 20 bp, Artificial Sequence
  Synthetic
gtgtatgaggccgatgatgt

SEQ ID NO: 10629 - DNA, 20 bp, Artificial Sequence
  Synthetic
tgtacccaggccatctttca

SEQ ID NO: 10630 - DNA, 20 bp, Artificial Sequence
  Synthetic
actggatgtcctcaaaggct

SEQ ID NO: 10631 - DNA, 19 bp, Artificial Sequence
  Synthetic
ggcactactgatgccaggg

SEQ ID NO: 10632 - DNA, 20 bp, Artificial Sequence
  Synthetic
aaggtgaggatgtttgtggg

SEQ ID NO: 10633 - DNA, 19 bp, Artificial Sequence
  Synthetic
gttttcctccttctggcgg

SEQ ID NO: 10634 - DNA, 20 bp, Artificial Sequence
  Synthetic
tactgagcattggcagatgg

SEQ ID NO: 10635 - DNA, 20 bp, Artificial Sequence
  Synthetic
ttgtgactagcttgactggc

SEQ ID NO: 10636 - DNA, 18 bp, Artificial Sequence
  Synthetic
ggactccacagcgagctt

SEQ ID NO: 10637 - DNA, 20 bp, Artificial Sequence
  Synthetic
tactaaatccatcggtggcg

SEQ ID NO: 10638 - DNA, 20 bp, Artificial Sequence
  Synthetic
acagtacgttgacttcagcc

SEQ ID NO: 10639 - DNA, 20 bp, Artificial Sequence
  Synthetic
agatgcccactttctgtcac

SEQ ID NO: 10640 - DNA, 18 bp, Artificial Sequence
  Synthetic
cggcctactgcttgtcag

SEQ ID NO: 10641 - DNA, 18 bp, Artificial Sequence
  Synthetic
cctagcaggcctctccac

SEQ ID NO: 10642 - DNA, 20 bp, Artificial Sequence
  Synthetic
gaggacatggtcaacctgtt

SEQ ID NO: 10643 - DNA, 18 bp, Artificial Sequence
  Synthetic
gactgggtttgctcggtg

SEQ ID NO: 10644 - DNA, 19 bp, Artificial Sequence
  Synthetic
gccaacagctacgttgagg

SEQ ID NO: 10645 - DNA, 19 bp, Artificial Sequence
  Synthetic
ctccatcagaggcaagctc

SEQ ID NO: 10646 - DNA, 18 bp, Artificial Sequence
  Synthetic
ctgttggaccgctggaaa

SEQ ID NO: 10647 - DNA, 18 bp, Artificial Sequence
  Synthetic
gacccggacttgagttgc

SEQ ID NO: 10648 - DNA, 19 bp, Artificial Sequence
  Synthetic
ctcaccatcgaggaagcgt

SEQ ID NO: 10649 - DNA, 20 bp, Artificial Sequence
  Synthetic
gggttctcatatgacacccg

SEQ ID NO: 10650 - DNA, 20 bp, Artificial Sequence
  Synthetic
tgttacatcaaggccacagc

SEQ ID NO: 10651 - DNA, 25 bp, Artificial Sequence
  Synthetic
cgaaagcaggtcaattatattcaat

SEQ ID NO: 10652 - DNA, 24 bp, Artificial Sequence
  Synthetic
ttatggagtaaaatgaatgatgcc

SEQ ID NO: 10653 - DNA, 20 bp, Artificial Sequence
  Synthetic
ggcacaggatgtaatcatgg

SEQ ID NO: 10654 - DNA, 18 bp, Artificial Sequence
  Synthetic
ccaggaggggaagtgaag

SEQ ID NO: 10655 - DNA, 23 bp, Artificial Sequence
  Synthetic
ttggtggattcacatttaagaga

SEQ ID NO: 10656 - DNA, 24 bp, Artificial Sequence
  Synthetic
ttgtatgataaaagcagttagagg

SEQ ID NO: 10657 - DNA, 18 bp, Artificial Sequence
  Synthetic
gagagggtagtggtgagc

SEQ ID NO: 10658 - DNA, 21 bp, Artificial Sequence
  Synthetic
tggaatttgaaccatttcagt

SEQ ID NO: 10659 - DNA, 20 bp, Artificial Sequence
  Synthetic
cagttctcggaaaggatgct

SEQ ID NO: 10660 - DNA, 20 bp, Artificial Sequence
  Synthetic
tcaatagcacggccttgaac

SEQ ID NO: 10661 - DNA, 19 bp, Artificial Sequence
  Synthetic
ggggtgcaaatgatacgga

SEQ ID NO: 10662 - DNA, 16 bp, Artificial Sequence
  Synthetic
gcacaggctggaagcg

SEQ ID NO: 10663 - DNA, 15 bp, Artificial Sequence
  Synthetic
aagcggaggcggctt

SEQ ID NO: 10664 - DNA, 19 bp, Artificial Sequence
  Synthetic
cgcgatgccgtcatcttac

SEQ ID NO: 10665 - DNA, 17 bp, Artificial Sequence
  Synthetic
gagactgggcgcacaac

SEQ ID NO: 10666 - DNA, 20 bp, Artificial Sequence
  Synthetic
ctgctacccaaaccttcctg

SEQ ID NO: 10667 - DNA, 16 bp, Artificial Sequence
  Synthetic
acacgccgtgggccta

SEQ ID NO: 10668 - DNA, 18 bp, Artificial Sequence
  Synthetic
ggaccggggtgagaacaa

SEQ ID NO: 10669 - DNA, 20 bp, Artificial Sequence
  Synthetic
tcaaggggggaagacatctc

SEQ ID NO: 10670 - DNA, 16 bp, Artificial Sequence
  Synthetic
agggggaagccaggca

SEQ ID NO: 10671 - DNA, 20 bp, Artificial Sequence
  Synthetic
tgtggaagtgtttgatccgc

SEQ ID NO: 10672 - DNA, 20 bp, Artificial Sequence
  Synthetic
gatggaagagtgctctcagc

SEQ ID NO: 10673 - DNA, 17 bp, Artificial Sequence
  Synthetic
gtgccgctaccgccttt

SEQ ID NO: 10674 - DNA, 16 bp, Artificial Sequence
  Synthetic
tagccttcgcctcccg

SEQ ID NO: 10675 - DNA, 18 bp, Artificial Sequence
  Synthetic
ctgccactgtggagctga

SEQ ID NO: 10676 - DNA, 16 bp, Artificial Sequence
  Synthetic
cccccttgcaagccct

SEQ ID NO: 10677 - DNA, 20 bp, Artificial Sequence
  Synthetic
agtggtgattctggactcct

SEQ ID NO: 10678 - DNA, 20 bp, Artificial Sequence
  Synthetic
aaagttttggcagctcctca

SEQ ID NO: 10679 - DNA, 20 bp, Artificial Sequence
  Synthetic
tgacagactgcaagttctgg

SEQ ID NO: 10680 - DNA, 19 bp, Artificial Sequence
  Synthetic
acgaggttttctgcgttca

SEQ ID NO: 10681 - DNA, 16 bp, Artificial Sequence
  Synthetic
cccgcgtggccatcaa

SEQ ID NO: 10682 - DNA, 20 bp, Artificial Sequence
  Synthetic
aacatcatgctcctccaacg

SEQ ID NO: 10683 - DNA, 18 bp, Artificial Sequence
  Synthetic
gcctcagcgcattttcac

SEQ ID NO: 10684 - DNA, 25 bp, Artificial Sequence
  Synthetic
atctagacaataataaatagggagg

SEQ ID NO: 10685 - DNA, 21 bp, Artificial Sequence
  Synthetic
tacgacgcctaaaatattggg

SEQ ID NO: 10686 - DNA, 25 bp, Artificial Sequence
  Synthetic
gtaaaagatatcgaattgagtcttg

SEQ ID NO: 10687 - DNA, 20 bp, Artificial Sequence
  Synthetic
gaaagtttgcacccagtcct

SEQ ID NO: 10688 - DNA, 18 bp, Artificial Sequence
  Synthetic
tgttttgcacagtggcag

SEQ ID NO: 10689 - DNA, 22 bp, Artificial Sequence
  Synthetic
gtgcctttaaaacattcctaca

SEQ ID NO: 10690 - DNA, 22 bp, Artificial Sequence
  Synthetic
cagctcttcacatttaaaaacc

SEQ ID NO: 10691 - DNA, 20 bp, Artificial Sequence
  Synthetic
tgtgctatgtacaatggagg

SEQ ID NO: 10692 - DNA, 18 bp, Artificial Sequence
  Synthetic
gtccgagggaccggaaca

SEQ ID NO: 10693 - DNA, 25 bp, Artificial Sequence
  Synthetic
agatctatagggtgattgtacattc

SEQ ID NO: 10694 - DNA, 18 bp, Artificial Sequence
  Synthetic
catccgccacacagcttt

SEQ ID NO: 10695 - DNA, 22 bp, Artificial Sequence
  Synthetic
aggactccagcattattaattc

SEQ ID NO: 10696 - DNA, 18 bp, Artificial Sequence
  Synthetic
agtggcaagggtattgga

SEQ ID NO: 10697 - DNA, 22 bp, Artificial Sequence
  Synthetic
aacgtgtctcatatttttttgc

SEQ ID NO: 10698 - DNA, 20 bp, Artificial Sequence
  Synthetic
cccctggagcttataacttc

SEQ ID NO: 10699 - DNA, 21 bp, Artificial Sequence
  Synthetic
aagaatatttgaggcacggag

SEQ ID NO: 10700 - DNA, 25 bp, Artificial Sequence
  Synthetic
gtttgtaatgtctatgtatgtgtgt

SEQ ID NO: 10701 - DNA, 19 bp, Artificial Sequence
  Synthetic
gtttgtcgcctgattctga

SEQ ID NO: 10702 - DNA, 18 bp, Artificial Sequence
  Synthetic
atgtgtgggtagcttgga

SEQ ID NO: 10703 - DNA, 20 bp, Artificial Sequence
  Synthetic
cacacacagccaaaaaactg

SEQ ID NO: 10704 - DNA, 19 bp, Artificial Sequence
  Synthetic
ttttaccctccgcctctgt

SEQ ID NO: 10705 - DNA, 20 bp, Artificial Sequence
  Synthetic
gaatcgccaaccaaaagacg

SEQ ID NO: 10706 - DNA, 23 bp, Artificial Sequence
  Synthetic
attacaaatttttggtagtgctg

SEQ ID NO: 10707 - DNA, 23 bp, Artificial Sequence
  Synthetic
cctactgatattattgacccttt

SEQ ID NO: 10708 - DNA, 20 bp, Artificial Sequence
  Synthetic
attacaaacgagaaacccag

SEQ ID NO: 10709 - DNA, 24 bp, Artificial Sequence
  Synthetic
gaaaatgagcaactttttattccc

SEQ ID NO: 10710 - DNA, 18 bp, Artificial Sequence
  Synthetic
atggctttgtggatgcaa

SEQ ID NO: 10711 - DNA, 24 bp, Artificial Sequence
  Synthetic
aaatctctgtataatccagacagg

SEQ ID NO: 10712 - DNA, 19 bp, Artificial Sequence
  Synthetic
caccagtgggagaacattg

SEQ ID NO: 10713 - DNA, 23 bp, Artificial Sequence
  Synthetic
tgttcttttttggaagaaaggaa

SEQ ID NO: 10714 - DNA, 24 bp, Artificial Sequence
  Synthetic
atactcggaacatactattgaact

SEQ ID NO: 10715 - DNA, 21 bp, Artificial Sequence
  Synthetic
gacgttggctaaaattgaact

SEQ ID NO: 10716 - DNA, 22 bp, Artificial Sequence
  Synthetic
taggaactaaaggacaaatgtg

SEQ ID NO: 10717 - DNA, 24 bp, Artificial Sequence
  Synthetic
aatattattccctaaagaagcagg

SEQ ID NO: 10718 - DNA, 25 bp, Artificial Sequence
  Synthetic
actaactgaatctagatctcaatca

SEQ ID NO: 10719 - DNA, 23 bp, Artificial Sequence
  Synthetic
cggaacaatacaaaagattggaa

SEQ ID NO: 10720 - DNA, 25 bp, Artificial Sequence
  Synthetic
ggagagataaattttcttaatcgag

SEQ ID NO: 10721 - DNA, 25 bp, Artificial Sequence
  Synthetic
tcttagtttaataaaaaggactggg

SEQ ID NO: 10722 - DNA, 19 bp, Artificial Sequence
  Synthetic
taatccctcagaagatggc

SEQ ID NO: 10723 - DNA, 25 bp, Artificial Sequence
  Synthetic
tgaggatgaagaaagaaatagatca

SEQ ID NO: 10724 - DNA, 19 bp, Artificial Sequence
  Synthetic
gagtttgagcgattgacgt

SEQ ID NO: 10725 - DNA, 18 bp, Artificial Sequence
  Synthetic
gaagtcagatgagggtgg

SEQ ID NO: 10726 - DNA, 22 bp, Artificial Sequence
  Synthetic
gtggttttgttatgcagtatgg

SEQ ID NO: 10727 - DNA, 25 bp, Artificial Sequence
  Synthetic
gttaaagaaactgctcttattactc

SEQ ID NO: 10728 - DNA, 25 bp, Artificial Sequence
  Synthetic
agaagatgatgttattgagaatgtc

SEQ ID NO: 10729 - DNA, 25 bp, Artificial Sequence
  Synthetic
atggaatgtcatttagtatgtcttc

SEQ ID NO: 10730 - DNA, 23 bp, Artificial Sequence
  Synthetic
ttaacagtatgtaaatggtctgt

SEQ ID NO: 10731 - DNA, 22 bp, Artificial Sequence
  Synthetic
ttaaacaagaaagtcgtgttgg

SEQ ID NO: 10732 - DNA, 25 bp, Artificial Sequence
  Synthetic
tacaaaacctattataaaggctcag

SEQ ID NO: 10733 - DNA, 24 bp, Artificial Sequence
  Synthetic
atttgtagctaatatgttacctgc

SEQ ID NO: 10734 - DNA, 22 bp, Artificial Sequence
  Synthetic
ttttgttaacattgctcatgct

SEQ ID NO: 10735 - DNA, 23 bp, Artificial Sequence
  Synthetic
aatgatttttatgctagtggttg

SEQ ID NO: 10736 - DNA, 23 bp, Artificial Sequence
  Synthetic
attctgccttattgtgtagagtt

SEQ ID NO: 10737 - DNA, 20 bp, Artificial Sequence
  Synthetic
cacactggcactgattttac

SEQ ID NO: 10738 - DNA, 25 bp, Artificial Sequence
  Synthetic
aaagcatgtaatatagctaagtctg

SEQ ID NO: 10739 - DNA, 22 bp, Artificial Sequence
  Synthetic
aattgtgttaaaatgctctgtg

SEQ ID NO: 10740 - DNA, 25 bp, Artificial Sequence
  Synthetic
aattaggccctatttttaatagagc

SEQ ID NO: 10741 - DNA, 20 bp, Artificial Sequence
  Synthetic
ttggtccccttgttagacaa

SEQ ID NO: 10742 - DNA, 23 bp, Artificial Sequence
  Synthetic
tgataaaagtgctggttatccat

SEQ ID NO: 10743 - DNA, 24 bp, Artificial Sequence
  Synthetic
cgtcatcttataaaggatgttgac

SEQ ID NO: 10744 - DNA, 25 bp, Artificial Sequence
  Synthetic
actatgttagttaagatagatggtg

SEQ ID NO: 10745 - DNA, 23 bp, Artificial Sequence
  Synthetic
ttatgaatggtatggtctttggt

SEQ ID NO: 10746 - DNA, 23 bp, Artificial Sequence
  Synthetic
gttttaacatcacattctgtagc

SEQ ID NO: 10747 - DNA, 24 bp, Artificial Sequence
  Synthetic
tactaaagatgaagccattaaacg

SEQ ID NO: 10748 - DNA, 25 bp, Artificial Sequence
  Synthetic
gtatccaataatttctaatgaggtc

SEQ ID NO: 10749 - DNA, 25 bp, Artificial Sequence
  Synthetic
gaactgtttttgaaaatcttaagcc

SEQ ID NO: 10750 - DNA, 23 bp, Artificial Sequence
  Synthetic
tagaaaagcaagaaatggtgttt

SEQ ID NO: 10751 - DNA, 23 bp, Artificial Sequence
  Synthetic
atggtaaacctattaatttgcct

SEQ ID NO: 10752 - DNA, 22 bp, Artificial Sequence
  Synthetic
aatactttttgtccttgtgcta

SEQ ID NO: 10753 - DNA, 21 bp, Artificial Sequence
  Synthetic
tgatagttatcttggttgcgt

SEQ ID NO: 10754 - DNA, 23 bp, Artificial Sequence
  Synthetic
aatttggtgcaattagttcttct

SEQ ID NO: 10755 - DNA, 24 bp, Artificial Sequence
  Synthetic
ccagagaccaataatcttatgtgt

SEQ ID NO: 10756 - DNA, 25 bp, Artificial Sequence
  Synthetic
aaactattaggatgtcttatactcc

SEQ ID NO: 10757 - DNA, 22 bp, Artificial Sequence
  Synthetic
cgctaatcttgttttagccaag

SEQ ID NO: 10758 - DNA, 25 bp, Artificial Sequence
  Synthetic
cttgaagagaatttaaatgcttacg

SEQ ID NO: 10759 - DNA, 20 bp, Artificial Sequence
  Synthetic
aggtactgattcgaaatgga

SEQ ID NO: 10760 - DNA, 18 bp, Artificial Sequence
  Synthetic
agactacactctcgacga

SEQ ID NO: 10761 - DNA, 18 bp, Artificial Sequence
  Synthetic
gagggcaagctttctcaa

SEQ ID NO: 10762 - DNA, 22 bp, Artificial Sequence
  Synthetic
aaattcaaattacctgctgtca

SEQ ID NO: 10763 - DNA, 20 bp, Artificial Sequence
  Synthetic
tgcgagctaactgattcaat

SEQ ID NO: 10764 - DNA, 24 bp, Artificial Sequence
  Synthetic
atatggattcatcataaagggaag

SEQ ID NO: 10765 - DNA, 18 bp, Artificial Sequence
  Synthetic
ttcagtcactccagcaga

SEQ ID NO: 10766 - DNA, 21 bp, Artificial Sequence
  Synthetic
aaacgatcctatgaacagatg

SEQ ID NO: 10767 - DNA, 19 bp, Artificial Sequence
  Synthetic
tgcagcaataaagggagtc

SEQ ID NO: 10768 - DNA, 20 bp, Artificial Sequence
  Synthetic
atgatggatcaggtgcgaga

SEQ ID NO: 10769 - DNA, 21 bp, Artificial Sequence
  Synthetic
atccagcacataaaagtcaat

SEQ ID NO: 10770 - DNA, 21 bp, Artificial Sequence
  Synthetic
gaggaggagcgctataaaatt

SEQ ID NO: 10771 - DNA, 20 bp, Artificial Sequence
  Synthetic
ttctgcctctgtgtctagct

SEQ ID NO: 10772 - DNA, 19 bp, Artificial Sequence
  Synthetic
ccaactcctgaagaagtgg

SEQ ID NO: 10773 - DNA, 20 bp, Artificial Sequence
  Synthetic
gcgactgtatgtgaaagaca

SEQ ID NO: 10774 - DNA, 20 bp, Artificial Sequence
  Synthetic
gtattggtacaggaaggggt

SEQ ID NO: 10775 - DNA, 20 bp, Artificial Sequence
  Synthetic
cacaataacagacaccactg

SEQ ID NO: 10776 - DNA, 23 bp, Artificial Sequence
  Synthetic
gtgtatgaagatattcctttgga

SEQ ID NO: 10777 - DNA, 18 bp, Artificial Sequence
  Synthetic
catcagtagaggctgcac

SEQ ID NO: 10778 - DNA, 25 bp, Artificial Sequence
  Synthetic
attagagatacagaaaatcccaatc

SEQ ID NO: 10779 - DNA, 23 bp, Artificial Sequence
  Synthetic
ttttggagctgctaatttcaaag

SEQ ID NO: 10780 - DNA, 25 bp, Artificial Sequence
  Synthetic
actagacatactgaagaatatgaac

SEQ ID NO: 10781 - DNA, 18 bp, Artificial Sequence
  Synthetic
ttggactgttgatctgca

SEQ ID NO: 10782 - DNA, 18 bp, Artificial Sequence
  Synthetic
gcagcatagtttacccca

SEQ ID NO: 10783 - DNA, 21 bp, Artificial Sequence
  Synthetic
cgacaatgcttcaatccaatg

SEQ ID NO: 10784 - DNA, 18 bp, Artificial Sequence
  Synthetic
gaatcatggcctggacag

SEQ ID NO: 10785 - DNA, 21 bp, Artificial Sequence
  Synthetic
cagggcaagaatcaaaactag

SEQ ID NO: 10786 - DNA, 24 bp, Artificial Sequence
  Synthetic
tacaggacattgaaaatgaagaga

SEQ ID NO: 10787 - DNA, 22 bp, Artificial Sequence
  Synthetic
ctgattcaagctggatagaact

SEQ ID NO: 10788 - DNA, 24 bp, Artificial Sequence
  Synthetic
atttgagaaatgatactgatgtgg

SEQ ID NO: 10789 - DNA, 20 bp, Artificial Sequence
  Synthetic
ttcttcagtctcttcagcag

SEQ ID NO: 10790 - DNA, 23 bp, Artificial Sequence
  Synthetic
tgacaaagacataatggattcca

SEQ ID NO: 10791 - DNA, 18 bp, Artificial Sequence
  Synthetic
ccattgcttccagtcctg

SEQ ID NO: 10792 - DNA, 18 bp, Artificial Sequence
  Synthetic
cctccgtaccaggacatt

SEQ ID NO: 10793 - DNA, 24 bp, Artificial Sequence
  Synthetic
gaaggttaatagatttcctcaagg

SEQ ID NO: 10794 - DNA, 18 bp, Artificial Sequence
  Synthetic
acccggaatgcaaatcag

SEQ ID NO: 10795 - DNA, 24 bp, Artificial Sequence
  Synthetic
gcatgtttaatatgctaagtacgg

SEQ ID NO: 10796 - DNA, 21 bp, Artificial Sequence
  Synthetic
ttttctaccgctatgggtttg

SEQ ID NO: 10797 - DNA, 20 bp, Artificial Sequence
  Synthetic
ttgcaactacacattcatgg

SEQ ID NO: 10798 - DNA, 21 bp, Artificial Sequence
  Synthetic
attactgaaaagggtgtaacc

SEQ ID NO: 10799 - DNA, 18 bp, Artificial Sequence
  Synthetic
gtgcacaagaacagcaag

SEQ ID NO: 10800 - DNA, 21 bp, Artificial Sequence
  Synthetic
cagatacaggttcagacttgg

SEQ ID NO: 10801 - DNA, 18 bp, Artificial Sequence
  Synthetic
ttgagccaccaaaactgc

SEQ ID NO: 10802 - DNA, 22 bp, Artificial Sequence
  Synthetic
atacaaatcctgcaacagatga

SEQ ID NO: 10803 - DNA, 25 bp, Artificial Sequence
  Synthetic
gatcaaatagactattggaagtgtg

SEQ ID NO: 10804 - DNA, 23 bp, Artificial Sequence
  Synthetic
attgaatgtgtaaatacctgtga

SEQ ID NO: 10805 - DNA, 19 bp, Artificial Sequence
  Synthetic
cgtaccggctatattccat

SEQ ID NO: 10806 - DNA, 23 bp, Artificial Sequence
  Synthetic
aagtagcactagttttaccaatc

SEQ ID NO: 10807 - DNA, 21 bp, Artificial Sequence
  Synthetic
ttaccaatcctgcatatgagc

SEQ ID NO: 10808 - DNA, 25 bp, Artificial Sequence
  Synthetic
tggacatccatactataaagttacc

SEQ ID NO: 10809 - DNA, 23 bp, Artificial Sequence
  Synthetic
caaattggatgacacagaaaatt

SEQ ID NO: 10810 - DNA, 24 bp, Artificial Sequence
  Synthetic
gtactttgcaggataataaaagtg

SEQ ID NO: 10811 - DNA, 25 bp, Artificial Sequence
  Synthetic
aaagggctctgtactataaattcat

SEQ ID NO: 10812 - DNA, 18 bp, Artificial Sequence
  Synthetic
cagggtggaatgcattgg

SEQ ID NO: 10813 - DNA, 23 bp, Artificial Sequence
  Synthetic
ggaaaatattgaaatgggagtct

SEQ ID NO: 10814 - DNA, 25 bp, Artificial Sequence
  Synthetic
ccttatccaggtaataataacaatg

SEQ ID NO: 10815 - DNA, 23 bp, Artificial Sequence
  Synthetic
atggagagaataaaagaactgag

SEQ ID NO: 10816 - DNA, 18 bp, Artificial Sequence
  Synthetic
ctggatcagaccgagtga

SEQ ID NO: 10817 - DNA, 18 bp, Artificial Sequence
  Synthetic
tgacatcagagtcacagc

SEQ ID NO: 10818 - DNA, 21 bp, Artificial Sequence
  Synthetic
agaaatgatgatgttgaccaa

SEQ ID NO: 10819 - DNA, 18 bp, Artificial Sequence
  Synthetic
gcggatcatcagtcaaga

SEQ ID NO: 10820 - DNA, 23 bp, Artificial Sequence
  Synthetic
ttaagggttagagatcaaagagg

SEQ ID NO: 10821 - DNA, 19 bp, Artificial Sequence
  Synthetic
cggtacagtggattcgtaa

SEQ ID NO: 10822 - DNA, 19 bp, Artificial Sequence
  Synthetic
tgcattgactgaagatcca

SEQ ID NO: 10823 - DNA, 22 bp, Artificial Sequence
  Synthetic
caacaatcatctgactagctat

SEQ ID NO: 10824 - DNA, 21 bp, Artificial Sequence
  Synthetic
agaatctttggtgttacctgc

SEQ ID NO: 10825 - DNA, 20 bp, Artificial Sequence
  Synthetic
cgaaagtttatagctagccc

SEQ ID NO: 10826 - DNA, 18 bp, Artificial Sequence
  Synthetic
tcgactacgaggaggaga

SEQ ID NO: 10827 - DNA, 22 bp, Artificial Sequence
  Synthetic
gcagtttagtttactttggtgg

SEQ ID NO: 10828 - DNA, 18 bp, Artificial Sequence
  Synthetic
tgtaccattggcagaagg

SEQ ID NO: 10829 - DNA, 20 bp, Artificial Sequence
  Synthetic
ttcccgcctagttcaatttg

SEQ ID NO: 10830 - DNA, 23 bp, Artificial Sequence
  Synthetic
agtgaaataccaccaatagaaga

SEQ ID NO: 10831 - DNA, 21 bp, Artificial Sequence
  Synthetic
cacaacgtttagtttggagac

SEQ ID NO: 10832 - DNA, 19 bp, Artificial Sequence
  Synthetic
tgcccgccaattcaattag

SEQ ID NO: 10833 - DNA, 25 bp, Artificial Sequence
  Synthetic
catttcaatgtctttatctgtttgg

SEQ ID NO: 10834 - DNA, 18 bp, Artificial Sequence
  Synthetic
gagcaggaagagcaggat

SEQ ID NO: 10835 - DNA, 19 bp, Artificial Sequence
  Synthetic
acagtggcttaggacatga

SEQ ID NO: 10836 - DNA, 23 bp, Artificial Sequence
  Synthetic
ttatgcttgtttgagttttcaag

SEQ ID NO: 10837 - DNA, 24 bp, Artificial Sequence
  Synthetic
gctaatagtaaaagtcagttttgg

SEQ ID NO: 10838 - DNA, 18 bp, Artificial Sequence
  Synthetic
acgctcagacctggaatc

SEQ ID NO: 10839 - DNA, 20 bp, Artificial Sequence
  Synthetic
cgaggaagaaaaagctatgc

SEQ ID NO: 10840 - DNA, 24 bp, Artificial Sequence
  Synthetic
cccccaatattattagttaaaggg

SEQ ID NO: 10841 - DNA, 19 bp, Artificial Sequence
  Synthetic
tggattgccagtgtggttt

SEQ ID NO: 10842 - DNA, 18 bp, Artificial Sequence
  Synthetic
ccactgcatcaacaccta

SEQ ID NO: 10843 - DNA, 22 bp, Artificial Sequence
  Synthetic
gtaggcctactttatctgaaac

SEQ ID NO: 10844 - DNA, 21 bp, Artificial Sequence
  Synthetic
ccttctgtggtagtagattcc

SEQ ID NO: 10845 - DNA, 23 bp, Artificial Sequence
  Synthetic
agttatgttaaaacaggaaagga

SEQ ID NO: 10846 - DNA, 21 bp, Artificial Sequence
  Synthetic
agggccctaataatagtgtgt

SEQ ID NO: 10847 - DNA, 21 bp, Artificial Sequence
  Synthetic
atctttttggaaggtggatct

SEQ ID NO: 10848 - DNA, 23 bp, Artificial Sequence
  Synthetic
ccaactttcaggtatgtactttg

SEQ ID NO: 10849 - DNA, 21 bp, Artificial Sequence
  Synthetic
tgtaaatttggaggagttggt

SEQ ID NO: 10850 - DNA, 19 bp, Artificial Sequence
  Synthetic
gcttcaagaagtgttcctg

SEQ ID NO: 10851 - DNA, 21 bp, Artificial Sequence
  Synthetic
gctattttagcgctaaaacga

SEQ ID NO: 10852 - DNA, 24 bp, Artificial Sequence
  Synthetic
atttcgcagtactaatagaaaagc

SEQ ID NO: 10853 - DNA, 25 bp, Artificial Sequence
  Synthetic
tggactataatggactttatttcac

SEQ ID NO: 10854 - DNA, 19 bp, Artificial Sequence
  Synthetic
cgactactaccgacggagg

SEQ ID NO: 10855 - DNA, 25 bp, Artificial Sequence
  Synthetic
gcaagtgaaattgatatagtttcag

SEQ ID NO: 10856 - DNA, 23 bp, Artificial Sequence
  Synthetic
agttttggagaagaaatagagtt

SEQ ID NO: 10857 - DNA, 19 bp, Artificial Sequence
  Synthetic
caagatttgcaagaggtgg

SEQ ID NO: 10858 - DNA, 24 bp, Artificial Sequence
  Synthetic
ttaactgaaactacaaatgaaggc

SEQ ID NO: 10859 - DNA, 25 bp, Artificial Sequence
  Synthetic
attttgattcctaatgttccagatg

SEQ ID NO: 10860 - DNA, 25 bp, Artificial Sequence
  Synthetic
gtggttcaaataatattactgtacc

SEQ ID NO: 10861 - DNA, 23 bp, Artificial Sequence
  Synthetic
atatggagatacagaaaatcctg

SEQ ID NO: 10862 - DNA, 18 bp, Artificial Sequence
  Synthetic
tgcacatcagcaagtgtc

SEQ ID NO: 10863 - DNA, 18 bp, Artificial Sequence
  Synthetic
ggcaaggccttccacatg

SEQ ID NO: 10864 - DNA, 17 bp, Artificial Sequence
  Synthetic
agaccctgcgctccatg

SEQ ID NO: 10865 - DNA, 21 bp, Artificial Sequence
  Synthetic
ccctacaacacaaaacaaact

SEQ ID NO: 10866 - DNA, 16 bp, Artificial Sequence
  Synthetic
accccagtcccgtcca

SEQ ID NO: 10867 - DNA, 17 bp, Artificial Sequence
  Synthetic
tggggccaccttcatca

SEQ ID NO: 10868 - DNA, 20 bp, Artificial Sequence
  Synthetic
cttctacctctccctagccc

SEQ ID NO: 10869 - DNA, 18 bp, Artificial Sequence
  Synthetic
gtcagctgaccgatgctc

SEQ ID NO: 10870 - DNA, 18 bp, Artificial Sequence
  Synthetic
acccaatagcatgacagc

SEQ ID NO: 10871 - DNA, 17 bp, Artificial Sequence
  Synthetic
ggacaccgacttcacgc

SEQ ID NO: 10872 - DNA, 20 bp, Artificial Sequence
  Synthetic
tcagaagctgagaccgaaga

SEQ ID NO: 10873 - DNA, 16 bp, Artificial Sequence
  Synthetic
cgggcctggactcaca

SEQ ID NO: 10874 - DNA, 18 bp, Artificial Sequence
  Synthetic
gccgggatgttttcgtgg

SEQ ID NO: 10875 - DNA, 20 bp, Artificial Sequence
  Synthetic
agaatggccatagggtgggt

SEQ ID NO: 10876 - DNA, 18 bp, Artificial Sequence
  Synthetic
cggtctgggctctcggaa

SEQ ID NO: 10877 - DNA, 18 bp, Artificial Sequence
  Synthetic
agcctgtaggtgaggacc

SEQ ID NO: 10878 - DNA, 20 bp, Artificial Sequence
  Synthetic
aaagttgtggtagacgggga

SEQ ID NO: 10879 - DNA, 18 bp, Artificial Sequence
  Synthetic
gagttcatcgtcgggggc

SEQ ID NO: 10880 - DNA, 16 bp, Artificial Sequence
  Synthetic
agcagggaggccagca

SEQ ID NO: 10881 - DNA, 16 bp, Artificial Sequence
  Synthetic
tcggccagctggggaa

SEQ ID NO: 10882 - DNA, 20 bp, Artificial Sequence
  Synthetic
agctcttgaccaggtagagg

SEQ ID NO: 10883 - DNA, 17 bp, Artificial Sequence
  Synthetic
ggaggatgcggaatggc

SEQ ID NO: 10884 - DNA, 18 bp, Artificial Sequence
  Synthetic
cgtctggaggtccgtgga

SEQ ID NO: 10885 - DNA, 16 bp, Artificial Sequence
  Synthetic
gtgtgctgctccacgc

SEQ ID NO: 10886 - DNA, 19 bp, Artificial Sequence
  Synthetic
cgggtctccatcaagtccc

SEQ ID NO: 10887 - DNA, 18 bp, Artificial Sequence
  Synthetic
tggccacctgcaatctgg

SEQ ID NO: 10888 - DNA, 19 bp, Artificial Sequence
  Synthetic
gggaggaacagaatgagcg

SEQ ID NO: 10889 - DNA, 17 bp, Artificial Sequence
  Synthetic
aaggctcaggacgtggg

SEQ ID NO: 10890 - DNA, 19 bp, Artificial Sequence
  Synthetic
cctacttgggagagtccgg

SEQ ID NO: 10891 - DNA, 17 bp, Artificial Sequence
  Synthetic
agagggccctggtgaga

SEQ ID NO: 10892 - DNA, 18 bp, Artificial Sequence
  Synthetic
ctcgtgtgcaaagtgggc

SEQ ID NO: 10893 - DNA, 19 bp, Artificial Sequence
  Synthetic
taagcagccgtgactagca

SEQ ID NO: 10894 - DNA, 19 bp, Artificial Sequence
  Synthetic
caggtgaagctgcagttcc

SEQ ID NO: 10895 - DNA, 16 bp, Artificial Sequence
  Synthetic
gtgcctgggcgcaaga

SEQ ID NO: 10896 - DNA, 18 bp, Artificial Sequence
  Synthetic
gacccttgtcctcctcca

SEQ ID NO: 10897 - DNA, 17 bp, Artificial Sequence
  Synthetic
tggaagacatggccgcc

SEQ ID NO: 10898 - DNA, 16 bp, Artificial Sequence
  Synthetic
tgctgaggtggggctg

SEQ ID NO: 10899 - DNA, 22 bp, Artificial Sequence
  Synthetic
tggccagtcttaatttattgtc

SEQ ID NO: 10900 - DNA, 19 bp, Artificial Sequence
  Synthetic
ttgtgcttcgtgatggcag

SEQ ID NO: 10901 - DNA, 16 bp, Artificial Sequence
  Synthetic
gcagtcggcgctttgg

SEQ ID NO: 10902 - DNA, 18 bp, Artificial Sequence
  Synthetic
gaagcgactacacagccg

SEQ ID NO: 10903 - DNA, 20 bp, Artificial Sequence
  Synthetic
ataaccatggacgaggacgg

SEQ ID NO: 10904 - DNA, 18 bp, Artificial Sequence
  Synthetic
ggtcgaggaggcagtgga

SEQ ID NO: 10905 - DNA, 19 bp, Artificial Sequence
  Synthetic
catagtcacggatgctgca

SEQ ID NO: 10906 - DNA, 19 bp, Artificial Sequence
  Synthetic
ccacgatcacattggtggt

SEQ ID NO: 10907 - DNA, 16 bp, Artificial Sequence
  Synthetic
ggcgtccgtagagcga

SEQ ID NO: 10908 - DNA, 18 bp, Artificial Sequence
  Synthetic
gaccgggggagatcatgg

SEQ ID NO: 10909 - DNA, 17 bp, Artificial Sequence
  Synthetic
ttggtccagggtccagg

SEQ ID NO: 10910 - DNA, 19 bp, Artificial Sequence
  Synthetic
tctcacctgtgctagtggc

SEQ ID NO: 10911 - DNA, 18 bp, Artificial Sequence
  Synthetic
catctcggacccgaagcc

SEQ ID NO: 10912 - DNA, 20 bp, Artificial Sequence
  Synthetic
tggtgtataaaccgcagtgg

SEQ ID NO: 10913 - DNA, 19 bp, Artificial Sequence
  Synthetic
cagtgccagttccagacac

SEQ ID NO: 10914 - DNA, 16 bp, Artificial Sequence
  Synthetic
tgcccgtccgatgtgg

SEQ ID NO: 10915 - DNA, 16 bp, Artificial Sequence
  Synthetic
gcagcaaacacgcggc

SEQ ID NO: 10916 - DNA, 18 bp, Artificial Sequence
  Synthetic
cgctggtcctgtgtgtct

SEQ ID NO: 10917 - DNA, 16 bp, Artificial Sequence
  Synthetic
tcctcgctgagccagg

SEQ ID NO: 10918 - DNA, 16 bp, Artificial Sequence
  Synthetic
tcgccgccgtgactca

SEQ ID NO: 10919 - DNA, 18 bp, Artificial Sequence
  Synthetic
atgcagggaatgagcggt

SEQ ID NO: 10920 - DNA, 18 bp, Artificial Sequence
  Synthetic
ctcggagaaggcaaaggc

SEQ ID NO: 10921 - DNA, 18 bp, Artificial Sequence
  Synthetic
ggaaggtcaagagctggc

SEQ ID NO: 10922 - DNA, 20 bp, Artificial Sequence
  Synthetic
agcctagtcagagagaaccg

SEQ ID NO: 10923 - DNA, 16 bp, Artificial Sequence
  Synthetic
gccgtgcacctgccat

SEQ ID NO: 10924 - DNA, 20 bp, Artificial Sequence
  Synthetic
agactcctgcctgaatcaga

SEQ ID NO: 10925 - DNA, 23 bp, Artificial Sequence
  Synthetic
caaaagcaataaagtacaggatt

SEQ ID NO: 10926 - DNA, 17 bp, Artificial Sequence
  Synthetic
ctctagggccgagcaca

SEQ ID NO: 10927 - DNA, 18 bp, Artificial Sequence
  Synthetic
gagtttccagccctgggc

SEQ ID NO: 10928 - DNA, 17 bp, Artificial Sequence
  Synthetic
cgatggacgctcacacc

SEQ ID NO: 10929 - DNA, 16 bp, Artificial Sequence
  Synthetic
ggagcagccgggaact

SEQ ID NO: 10930 - DNA, 19 bp, Artificial Sequence
  Synthetic
gtggcatcctaaggaggga

SEQ ID NO: 10931 - DNA, 17 bp, Artificial Sequence
  Synthetic
ggcttgtcatgccgctg

SEQ ID NO: 10932 - DNA, 18 bp, Artificial Sequence
  Synthetic
tcctcggccatctccgtc

SEQ ID NO: 10933 - DNA, 20 bp, Artificial Sequence
  Synthetic
atgtctatggggatgaggcc

SEQ ID NO: 10934 - DNA, 16 bp, Artificial Sequence
  Synthetic
gggcttccgtgggtgt

SEQ ID NO: 10935 - DNA, 16 bp, Artificial Sequence
  Synthetic
tcgctcggctcgatgc

SEQ ID NO: 10936 - DNA, 16 bp, Artificial Sequence
  Synthetic
gcaggtgctccgagct

SEQ ID NO: 10937 - DNA, 18 bp, Artificial Sequence
  Synthetic
tcagcctccaacaggtgc

SEQ ID NO: 10938 - DNA, 17 bp, Artificial Sequence
  Synthetic
gcctctggaccctcaca

SEQ ID NO: 10939 - DNA, 16 bp, Artificial Sequence
  Synthetic
gcacgccctctgggaa

SEQ ID NO: 10940 - DNA, 16 bp, Artificial Sequence
  Synthetic
agttggggtcgggcct

SEQ ID NO: 10941 - DNA, 16 bp, Artificial Sequence
  Synthetic
agtcaggctggccagg

SEQ ID NO: 10942 - DNA, 19 bp, Artificial Sequence
  Synthetic
tgtgtagcacagcaccacc

SEQ ID NO: 10943 - DNA, 16 bp, Artificial Sequence
  Synthetic
gcagaggaccagggct

SEQ ID NO: 10944 - DNA, 16 bp, Artificial Sequence
  Synthetic
gtgacgaagggcccca

SEQ ID NO: 10945 - DNA, 20 bp, Artificial Sequence
  Synthetic
tgaaagttgtgtggagaagt

SEQ ID NO: 10946 - DNA, 18 bp, Artificial Sequence
  Synthetic
ttggaaaccatgcgaggc

SEQ ID NO: 10947 - DNA, 18 bp, Artificial Sequence
  Synthetic
cagcacacacaggaacaa

SEQ ID NO: 10948 - DNA, 22 bp, Artificial Sequence
  Synthetic
tggggagtggttatattaatgc

SEQ ID NO: 10949 - DNA, 23 bp, Artificial Sequence
  Synthetic
acagatgaaagtatattggcata

SEQ ID NO: 10950 - DNA, 23 bp, Artificial Sequence
  Synthetic
taaagggtataccaaagaaaagc

SEQ ID NO: 10951 - DNA, 18 bp, Artificial Sequence
  Synthetic
tttagatgcgtgccagga

SEQ ID NO: 10952 - DNA, 23 bp, Artificial Sequence
  Synthetic
taaagacattacttaacagtccc

SEQ ID NO: 10953 - DNA, 20 bp, Artificial Sequence
  Synthetic
atatggggacacaggcatct

SEQ ID NO: 10954 - DNA, 21 bp, Artificial Sequence
  Synthetic
caacatttgtaacattgtggc

SEQ ID NO: 10955 - DNA, 22 bp, Artificial Sequence
  Synthetic
tttttgttactgtgtttcttgg

SEQ ID NO: 10956 - DNA, 20 bp, Artificial Sequence
  Synthetic
gcacacaaaatgttacagca

SEQ ID NO: 10957 - DNA, 19 bp, Artificial Sequence
  Synthetic
caccgacgactatgttacc

SEQ ID NO: 10958 - DNA, 18 bp, Artificial Sequence
  Synthetic
aagggtcttgaggtaggc

SEQ ID NO: 10959 - DNA, 22 bp, Artificial Sequence
  Synthetic
atacaggatggtgatatggtag

SEQ ID NO: 10960 - DNA, 18 bp, Artificial Sequence
  Synthetic
tgcttcccctacaagctc

SEQ ID NO: 10961 - DNA, 22 bp, Artificial Sequence
  Synthetic
tttaacagctgaaattatggcc

SEQ ID NO: 10962 - DNA, 19 bp, Artificial Sequence
  Synthetic
ccctggcttcctgtatgca

SEQ ID NO: 10963 - DNA, 21 bp, Artificial Sequence
  Synthetic
catatcctttccaacacaggt

SEQ ID NO: 10964 - DNA, 20 bp, Artificial Sequence
  Synthetic
gccacaagctacattagacc

SEQ ID NO: 10965 - DNA, 24 bp, Artificial Sequence
  Synthetic
gaaagcttattgtagaaagtgtgt

SEQ ID NO: 10966 - DNA, 25 bp, Artificial Sequence
  Synthetic
gtatcagatttaattgatgatgtgg

SEQ ID NO: 10967 - DNA, 23 bp, Artificial Sequence
  Synthetic
caaaacattactacaaacgcatg

SEQ ID NO: 10968 - DNA, 19 bp, Artificial Sequence
  Synthetic
actgaaaatgcaaacgcag

SEQ ID NO: 10969 - DNA, 25 bp, Artificial Sequence
  Synthetic
agctatacaaatacaacttttggtc

SEQ ID NO: 10970 - DNA, 19 bp, Artificial Sequence
  Synthetic
gccgaagaatcacacagga

SEQ ID NO: 10971 - DNA, 23 bp, Artificial Sequence
  Synthetic
actcttgcagatattttactgaa

SEQ ID NO: 10972 - DNA, 24 bp, Artificial Sequence
  Synthetic
actatgagatattgacaaccacag

SEQ ID NO: 10973 - DNA, 25 bp, Artificial Sequence
  Synthetic
ctagatcgcccaatatatagtgaaa

SEQ ID NO: 10974 - DNA, 25 bp, Artificial Sequence
  Synthetic
aactactacatatccagatattcca

SEQ ID NO: 10975 - DNA, 22 bp, Artificial Sequence
  Synthetic
ccatccgttgtttaataaagtg

SEQ ID NO: 10976 - DNA, 24 bp, Artificial Sequence
  Synthetic
ctcagagtattgaggataactaca

SEQ ID NO: 10977 - DNA, 18 bp, Artificial Sequence
  Synthetic
ggagactactgcccaaga

SEQ ID NO: 10978 - DNA, 20 bp, Artificial Sequence
  Synthetic
gctacctgtgccataaacca

SEQ ID NO: 10979 - DNA, 18 bp, Artificial Sequence
  Synthetic
gaggacggtgagcaacct

SEQ ID NO: 10980 - DNA, 18 bp, Artificial Sequence
  Synthetic
gccacagtggacagaacc

SEQ ID NO: 10981 - DNA, 20 bp, Artificial Sequence
  Synthetic
ggcagaagctcacaaaaagc

SEQ ID NO: 10982 - DNA, 19 bp, Artificial Sequence
  Synthetic
tggagctagcaagacagtt

SEQ ID NO: 10983 - DNA, 22 bp, Artificial Sequence
  Synthetic
caacatatgctcatagaacctc

SEQ ID NO: 10984 - DNA, 18 bp, Artificial Sequence
  Synthetic
ggcattcctagcaagcaa

SEQ ID NO: 10985 - DNA, 20 bp, Artificial Sequence
  Synthetic
atatatggacctgcagacac

SEQ ID NO: 10986 - DNA, 22 bp, Artificial Sequence
  Synthetic
atgacaacaaataccaatccct

SEQ ID NO: 10987 - DNA, 19 bp, Artificial Sequence
  Synthetic
aaaaagggctacaccgtag

SEQ ID NO: 10988 - DNA, 20 bp, Artificial Sequence
  Synthetic
tactgaccccccatacaccg

SEQ ID NO: 10989 - DNA, 23 bp, Artificial Sequence
  Synthetic
ggtgatccaaacaaattaaagtg

SEQ ID NO: 10990 - DNA, 20 bp, Artificial Sequence
  Synthetic
ggaacgttaagggacatctg

SEQ ID NO: 10991 - DNA, 24 bp, Artificial Sequence
  Synthetic
tgctgctcaattgtatatattcct

SEQ ID NO: 10992 - DNA, 18 bp, Artificial Sequence
  Synthetic
tggggtagcttgggtgtc

SEQ ID NO: 10993 - DNA, 18 bp, Artificial Sequence
  Synthetic
gttgtacagcagggcata

SEQ ID NO: 10994 - DNA, 25 bp, Artificial Sequence
  Synthetic
caaacatatattattatgcaggcag

SEQ ID NO: 10995 - DNA, 18 bp, Artificial Sequence
  Synthetic
gttgtacaaccgcctgta

SEQ ID NO: 10996 - DNA, 20 bp, Artificial Sequence
  Synthetic
cgttgcaaaccaataagtct

SEQ ID NO: 10997 - DNA, 18 bp, Artificial Sequence
  Synthetic
cctagtgggtccatggtt

SEQ ID NO: 10998 - DNA, 21 bp, Artificial Sequence
  Synthetic
cctctacaaaacgtaaacggt

SEQ ID NO: 10999 - DNA, 18 bp, Artificial Sequence
  Synthetic
ggttgcgccttgtgagtc

SEQ ID NO: 11000 - DNA, 20 bp, Artificial Sequence
  Synthetic
ccctaataggggcgacactc

SEQ ID NO: 11001 - DNA, 20 bp, Artificial Sequence
  Synthetic
gcaccatgagcacaaatcct

SEQ ID NO: 11002 - DNA, 19 bp, Artificial Sequence
  Synthetic
caatgacccccggcatagg

SEQ ID NO: 11003 - DNA, 19 bp, Artificial Sequence
  Synthetic
gcattacctggcagctcca

SEQ ID NO: 11004 - DNA, 20 bp, Artificial Sequence
  Synthetic
atgatgatgaactggtcgcc

SEQ ID NO: 11005 - DNA, 19 bp, Artificial Sequence
  Synthetic
gccctgaactgcaatgact

SEQ ID NO: 11006 - DNA, 20 bp, Artificial Sequence
  Synthetic
attgaacagcactcgaccac

SEQ ID NO: 11007 - DNA, 18 bp, Artificial Sequence
  Synthetic
ctcacggctgcatgcaat

SEQ ID NO: 11008 - DNA, 20 bp, Artificial Sequence
  Synthetic
cagcactagagaagctggtc

SEQ ID NO: 11009 - DNA, 20 bp, Artificial Sequence
  Synthetic
ccgtgatggcatcatatggg

SEQ ID NO: 11010 - DNA, 19 bp, Artificial Sequence
  Synthetic
gtcattgtctggggagcgg

SEQ ID NO: 11011 - DNA, 19 bp, Artificial Sequence
  Synthetic
tccttcctcggaacatcca

SEQ ID NO: 11012 - DNA, 18 bp, Artificial Sequence
  Synthetic
gggcgtggctaagtccat

SEQ ID NO: 11013 - DNA, 18 bp, Artificial Sequence
  Synthetic
cgcccatcacgtactcca

SEQ ID NO: 11014 - DNA, 20 bp, Artificial Sequence
  Synthetic
aaaaagtgtgacgagctcgc

SEQ ID NO: 11015 - DNA, 20 bp, Artificial Sequence
  Synthetic
tatgtttccactggtgagcg

SEQ ID NO: 11016 - DNA, 20 bp, Artificial Sequence
  Synthetic
tgtttgactcgactcaagcc

SEQ ID NO: 11017 - DNA, 18 bp, Artificial Sequence
  Synthetic
gggcggctctcattgaag

SEQ ID NO: 11018 - DNA, 19 bp, Artificial Sequence
  Synthetic
cagtggcctagtgggagct

SEQ ID NO: 11019 - DNA, 18 bp, Artificial Sequence
  Synthetic
caatgtccgcttgggctc

SEQ ID NO: 11020 - DNA, 19 bp, Artificial Sequence
  Synthetic
tcgttctgcgttgggctta

SEQ ID NO: 11021 - DNA, 20 bp, Artificial Sequence
  Synthetic
acccaatggtcgaagaaagg

SEQ ID NO: 11022 - DNA, 16 bp, Artificial Sequence
  Synthetic
cggcagtcagacgcct

SEQ ID NO: 11023 - DNA, 20 bp, Artificial Sequence
  Synthetic
acaaagagcgcctcactaag

SEQ ID NO: 11024 - DNA, 18 bp, Artificial Sequence
  Synthetic
caaggggggcaagaaagc

SEQ ID NO: 11025 - DNA, 18 bp, Artificial Sequence
  Synthetic
ggccaaacctgcgggtac

SEQ ID NO: 11026 - DNA, 20 bp, Artificial Sequence
  Synthetic
ccccagaccggagtatgatc

SEQ ID NO: 11027 - DNA, 20 bp, Artificial Sequence
  Synthetic
aaggttacatgggcttgacg

SEQ ID NO: 11028 - DNA, 19 bp, Artificial Sequence
  Synthetic
ctcaacggtctgctgatgc

SEQ ID NO: 11029 - DNA, 19 bp, Artificial Sequence
  Synthetic
ggcggtgatttgttcgtcg

SEQ ID NO: 11030 - DNA, 18 bp, Artificial Sequence
  Synthetic
gcgcggaggttttgtacg

SEQ ID NO: 11031 - DNA, 17 bp, Artificial Sequence
  Synthetic
ccagcaggctcagttcg

SEQ ID NO: 11032 - DNA, 18 bp, Artificial Sequence
  Synthetic
gattccaaacgcggtgca

SEQ ID NO: 11033 - DNA, 16 bp, Artificial Sequence
  Synthetic
ggtcaacagcggcgac

SEQ ID NO: 11034 - DNA, 19 bp, Artificial Sequence
  Synthetic
cgagctggtacttcttccg

SEQ ID NO: 11035 - DNA, 16 bp, Artificial Sequence
  Synthetic
caggctggccgacagt

SEQ ID NO: 11036 - DNA, 18 bp, Artificial Sequence
  Synthetic
ccaagtcggctacgcaat

SEQ ID NO: 11037 - DNA, 17 bp, Artificial Sequence
  Synthetic
gttcgggtacgctgtcg

SEQ ID NO: 11038 - DNA, 19 bp, Artificial Sequence
  Synthetic
cgattaaatcgtgctcgcg

SEQ ID NO: 11039 - DNA, 20 bp, Artificial Sequence
  Synthetic
ttttgatgttttggtcgcgc

SEQ ID NO: 11040 - DNA, 20 bp, Artificial Sequence
  Synthetic
aataaaactactgcgccgca

SEQ ID NO: 11041 - DNA, 15 bp, Artificial Sequence
  Synthetic
gcgattgcgtgccga

SEQ ID NO: 11042 - DNA, 17 bp, Artificial Sequence
  Synthetic
ggaacgggtgcgtttcc

SEQ ID NO: 11043 - DNA, 20 bp, Artificial Sequence
  Synthetic
tcatatcggtcagcggtact

SEQ ID NO: 11044 - DNA, 17 bp, Artificial Sequence
  Synthetic
tggtgaaatcgctggcg

SEQ ID NO: 11045 - DNA, 18 bp, Artificial Sequence
  Synthetic
cttggtcgtttccacgct

SEQ ID NO: 11046 - DNA, 17 bp, Artificial Sequence
  Synthetic
cggcaggctttcctcga

SEQ ID NO: 11047 - DNA, 16 bp, Artificial Sequence
  Synthetic
tctgcggcggctttcc

SEQ ID NO: 11048 - DNA, 16 bp, Artificial Sequence
  Synthetic
cctgtccgagcgaggt

SEQ ID NO: 11049 - DNA, 16 bp, Artificial Sequence
  Synthetic
cggcggcggttttcac

SEQ ID NO: 11050 - DNA, 16 bp, Artificial Sequence
  Synthetic
ggggttgcgggtgtgt

SEQ ID NO: 11051 - DNA, 16 bp, Artificial Sequence
  Synthetic
gtgaggctgggcggat

SEQ ID NO: 11052 - DNA, 16 bp, Artificial Sequence
  Synthetic
gcctgagaagggcgga

SEQ ID NO: 11053 - DNA, 16 bp, Artificial Sequence
  Synthetic
gttgccgagccagcga

SEQ ID NO: 11054 - DNA, 20 bp, Artificial Sequence
  Synthetic
gaaaaactatctgccgctgc

SEQ ID NO: 11055 - DNA, 17 bp, Artificial Sequence
  Synthetic
agtcgtcgaagccgtgc

SEQ ID NO: 11056 - DNA, 19 bp, Artificial Sequence
  Synthetic
gccagatttgttcggtggg

SEQ ID NO: 11057 - DNA, 16 bp, Artificial Sequence
  Synthetic
atgcgccgtcagagcc

SEQ ID NO: 11058 - DNA, 16 bp, Artificial Sequence
  Synthetic
cgtccgcgcaggttac

SEQ ID NO: 11059 - DNA, 20 bp, Artificial Sequence
  Synthetic
ggggacgacttctttttcca

SEQ ID NO: 11060 - DNA, 18 bp, Artificial Sequence
  Synthetic
ccaatgcgttggcgagtt

SEQ ID NO: 11061 - DNA, 20 bp, Artificial Sequence
  Synthetic
cgctttttcaacggtggcat

SEQ ID NO: 11062 - DNA, 18 bp, Artificial Sequence
  Synthetic
gtgccgatttccgtgtct

SEQ ID NO: 11063 - DNA, 17 bp, Artificial Sequence
  Synthetic
tgttcgggcgttcgtct

SEQ ID NO: 11064 - DNA, 17 bp, Artificial Sequence
  Synthetic
ttcctcgccgcattgtg

SEQ ID NO: 11065 - DNA, 18 bp, Artificial Sequence
  Synthetic
gcgccgtttaccgctatg

SEQ ID NO: 11066 - DNA, 18 bp, Artificial Sequence
  Synthetic
cctgctgcccgtattggc

SEQ ID NO: 11067 - DNA, 20 bp, Artificial Sequence
  Synthetic
taccgagttcgcctattccc

SEQ ID NO: 11068 - DNA, 16 bp, Artificial Sequence
  Synthetic
gattgcccgtcgtggc

SEQ ID NO: 11069 - DNA, 18 bp, Artificial Sequence
  Synthetic
cctcttggcaagcagcaa

SEQ ID NO: 11070 - DNA, 17 bp, Artificial Sequence
  Synthetic
gttcccggccatcaacg

SEQ ID NO: 11071 - DNA, 16 bp, Artificial Sequence
  Synthetic
ggctggacggcatcga

SEQ ID NO: 11072 - DNA, 18 bp, Artificial Sequence
  Synthetic
agcacttggtcggctttg

SEQ ID NO: 11073 - DNA, 16 bp, Artificial Sequence
  Synthetic
aaacagcccgccctga

SEQ ID NO: 11074 - DNA, 17 bp, Artificial Sequence
  Synthetic
gcgcaggcccaaaaagt

SEQ ID NO: 11075 - DNA, 20 bp, Artificial Sequence
  Synthetic
ctgaagcataaagccgaagc

SEQ ID NO: 11076 - DNA, 17 bp, Artificial Sequence
  Synthetic
gcgttacgccgctgtca

SEQ ID NO: 11077 - DNA, 16 bp, Artificial Sequence
  Synthetic
ggcgttgacgagcagg

SEQ ID NO: 11078 - DNA, 19 bp, Artificial Sequence
  Synthetic
aacgcgatttcgtcgtcgg

SEQ ID NO: 11079 - DNA, 20 bp, Artificial Sequence
  Synthetic
gttggacagcaggactttgg

SEQ ID NO: 11080 - DNA, 18 bp, Artificial Sequence
  Synthetic
aggccaggcagaacaatg

SEQ ID NO: 11081 - DNA, 16 bp, Artificial Sequence
  Synthetic
gcgcccaaggtggcaa

SEQ ID NO: 11082 - DNA, 18 bp, Artificial Sequence
  Synthetic
aaacagcaaaaaggcggc

SEQ ID NO: 11083 - DNA, 18 bp, Artificial Sequence
  Synthetic
aagtgtctttgtcggcgg

SEQ ID NO: 11084 - DNA, 19 bp, Artificial Sequence
  Synthetic
ggcgcaaagttggaaaagc

SEQ ID NO: 11085 - DNA, 17 bp, Artificial Sequence
  Synthetic
tcaggcggacggtttcg

SEQ ID NO: 11086 - DNA, 17 bp, Artificial Sequence
  Synthetic
tcgccagcgaggtttga

SEQ ID NO: 11087 - DNA, 17 bp, Artificial Sequence
  Synthetic
tgcggcggaggttttgc

SEQ ID NO: 11088 - DNA, 18 bp, Artificial Sequence
  Synthetic
ggcgatcatgtggcagtg

SEQ ID NO: 11089 - DNA, 18 bp, Artificial Sequence
  Synthetic
ggtcaggggcataggcga

SEQ ID NO: 11090 - DNA, 15 bp, Artificial Sequence
  Synthetic
ggcgcggttttgcct

SEQ ID NO: 11091 - DNA, 15 bp, Artificial Sequence
  Synthetic
cggcggcattgcgtt

SEQ ID NO: 11092 - DNA, 19 bp, Artificial Sequence
  Synthetic
cgtagcatacggtttgcgg

SEQ ID NO: 11093 - DNA, 20 bp, Artificial Sequence
  Synthetic
gtcaggtagtcgatgtcgga

SEQ ID NO: 11094 - DNA, 16 bp, Artificial Sequence
  Synthetic
cggcaggtgtcggaca

SEQ ID NO: 11095 - DNA, 17 bp, Artificial Sequence
  Synthetic
cggcgttggacgttacg

SEQ ID NO: 11096 - DNA, 16 bp, Artificial Sequence
  Synthetic
gcatgaaggccgccga

SEQ ID NO: 11097 - DNA, 18 bp, Artificial Sequence
  Synthetic
gtgcctatgctgcgcttc

SEQ ID NO: 11098 - DNA, 18 bp, Artificial Sequence
  Synthetic
acccacacatcggattgc

SEQ ID NO: 11099 - DNA, 16 bp, Artificial Sequence
  Synthetic
cggtggcgtgcatacc

SEQ ID NO: 11100 - DNA, 18 bp, Artificial Sequence
  Synthetic
cgtacacggcttgggaaa

SEQ ID NO: 11101 - DNA, 20 bp, Artificial Sequence
  Synthetic
agacgatgtcgcattgttcc

SEQ ID NO: 11102 - DNA, 19 bp, Artificial Sequence
  Synthetic
aagccttcagtgaagactt

SEQ ID NO: 11103 - DNA, 20 bp, Artificial Sequence
  Synthetic
atgaacgaaatgaccgctgt

SEQ ID NO: 11104 - DNA, 20 bp, Artificial Sequence
  Synthetic
cgcaagtttacgggaattgc

SEQ ID NO: 11105 - DNA, 16 bp, Artificial Sequence
  Synthetic
cgatatcgcggcgcaa

SEQ ID NO: 11106 - DNA, 20 bp, Artificial Sequence
  Synthetic
ccaacagcgcggattttgtc

SEQ ID NO: 11107 - DNA, 16 bp, Artificial Sequence
  Synthetic
ccccgccattactgcg

SEQ ID NO: 11108 - DNA, 20 bp, Artificial Sequence
  Synthetic
gtaggtaacgagcaatccgg

SEQ ID NO: 11109 - DNA, 16 bp, Artificial Sequence
  Synthetic
ggtttgcccagcgacc

SEQ ID NO: 11110 - DNA, 19 bp, Artificial Sequence
  Synthetic
gtttttcagctgttcggcg

SEQ ID NO: 11111 - DNA, 18 bp, Artificial Sequence
  Synthetic
acagcccgatggttttcg

SEQ ID NO: 11112 - DNA, 15 bp, Artificial Sequence
  Synthetic
tgcttctgccgcgca

SEQ ID NO: 11113 - DNA, 16 bp, Artificial Sequence
  Synthetic
ttccgccgcctctgtc

SEQ ID NO: 11114 - DNA, 19 bp, Artificial Sequence
  Synthetic
cgttacaacgtcggactcg

SEQ ID NO: 11115 - DNA, 18 bp, Artificial Sequence
  Synthetic
aacggcgacatcacttcg

SEQ ID NO: 11116 - DNA, 18 bp, Artificial Sequence
  Synthetic
tcttgaaaggcttgccgg

SEQ ID NO: 11117 - DNA, 19 bp, Artificial Sequence
  Synthetic
acaggtgttcgtcaacgtc

SEQ ID NO: 11118 - DNA, 20 bp, Artificial Sequence
  Synthetic
gatttgctcgcgctttacca

SEQ ID NO: 11119 - DNA, 17 bp, Artificial Sequence
  Synthetic
cgaagccgtcgttccct

SEQ ID NO: 11120 - DNA, 16 bp, Artificial Sequence
  Synthetic
cggcgtggctcaatgc

SEQ ID NO: 11121 - DNA, 18 bp, Artificial Sequence
  Synthetic
ccgctggagattttgcgg

SEQ ID NO: 11122 - DNA, 17 bp, Artificial Sequence
  Synthetic
ggcgacgatgttgctgt

SEQ ID NO: 11123 - DNA, 20 bp, Artificial Sequence
  Synthetic
tttgtgttccaggtatgcgg

SEQ ID NO: 11124 - DNA, 18 bp, Artificial Sequence
  Synthetic
tgtgttggcggtattcgg

SEQ ID NO: 11125 - DNA, 18 bp, Artificial Sequence
  Synthetic
gtggctgccgaattggaa

SEQ ID NO: 11126 - DNA, 17 bp, Artificial Sequence
  Synthetic
aggatggtcaggacggc

SEQ ID NO: 11127 - DNA, 19 bp, Artificial Sequence
  Synthetic
tgtcggacaggatgtcgag

SEQ ID NO: 11128 - DNA, 20 bp, Artificial Sequence
  Synthetic
cgtatggcgggtaaattggc

SEQ ID NO: 11129 - DNA, 18 bp, Artificial Sequence
  Synthetic
gtcagttcgagcggcatg

SEQ ID NO: 11130 - DNA, 19 bp, Artificial Sequence
  Synthetic
ttttggcactgtcgtcagc

SEQ ID NO: 11131 - DNA, 20 bp, Artificial Sequence
  Synthetic
tatagctgacttcgacggcc

SEQ ID NO: 11132 - DNA, 18 bp, Artificial Sequence
  Synthetic
cggtagcggcataaggtg

SEQ ID NO: 11133 - DNA, 18 bp, Artificial Sequence
  Synthetic
cggcggtctctgaggtaa

SEQ ID NO: 11134 - DNA, 19 bp, Artificial Sequence
  Synthetic
aatgcgtttcaggcggtat

SEQ ID NO: 11135 - DNA, 16 bp, Artificial Sequence
  Synthetic
gccaaataccggcgcg

SEQ ID NO: 11136 - DNA, 20 bp, Artificial Sequence
  Synthetic
ttgctgaaaaaagacagtcc

SEQ ID NO: 11137 - DNA, 19 bp, Artificial Sequence
  Synthetic
ccttgccctgaccgacttt

SEQ ID NO: 11138 - DNA, 18 bp, Artificial Sequence
  Synthetic
gtcgccgacgtagagggt

SEQ ID NO: 11139 - DNA, 15 bp, Artificial Sequence
  Synthetic
gcgccgcgtttttgc

SEQ ID NO: 11140 - DNA, 16 bp, Artificial Sequence
  Synthetic
gtaacggcggcggtgt

SEQ ID NO: 11141 - DNA, 19 bp, Artificial Sequence
  Synthetic
gtcgagggaatctgccagt

SEQ ID NO: 11142 - DNA, 20 bp, Artificial Sequence
  Synthetic
tggtgaacacgatgtcttcc

SEQ ID NO: 11143 - DNA, 16 bp, Artificial Sequence
  Synthetic
cgcaccgtccacgaca

SEQ ID NO: 11144 - DNA, 19 bp, Artificial Sequence
  Synthetic
agattttgtcggcatcggg

SEQ ID NO: 11145 - DNA, 19 bp, Artificial Sequence
  Synthetic
gttgtccgcccgaaagttc

SEQ ID NO: 11146 - DNA, 16 bp, Artificial Sequence
  Synthetic
gcggcggcgtattgtg

SEQ ID NO: 11147 - DNA, 18 bp, Artificial Sequence
  Synthetic
tcagacagtttgcgggtg

SEQ ID NO: 11148 - DNA, 19 bp, Artificial Sequence
  Synthetic
caattcggcggtgatttcg

SEQ ID NO: 11149 - DNA, 20 bp, Artificial Sequence
  Synthetic
caggccggttaaaagatcga

SEQ ID NO: 11150 - DNA, 20 bp, Artificial Sequence
  Synthetic
ctgcccagttccaaaatcgc

SEQ ID NO: 11151 - DNA, 18 bp, Artificial Sequence
  Synthetic
gacgcaaggagtaggcga

SEQ ID NO: 11152 - DNA, 17 bp, Artificial Sequence
  Synthetic
gatgctggcatcgtggg

SEQ ID NO: 11153 - DNA, 20 bp, Artificial Sequence
  Synthetic
ctttctttgtcaatgccggg

SEQ ID NO: 11154 - DNA, 16 bp, Artificial Sequence
  Synthetic
cggacgatgcacgagc

SEQ ID NO: 11155 - DNA, 17 bp, Artificial Sequence
  Synthetic
gccgcggttgacgatgt

SEQ ID NO: 11156 - DNA, 19 bp, Artificial Sequence
  Synthetic
cttcgctgaggacggaaac

SEQ ID NO: 11157 - DNA, 17 bp, Artificial Sequence
  Synthetic
cgacggcttcgccttct

SEQ ID NO: 11158 - DNA, 17 bp, Artificial Sequence
  Synthetic
ctgtcgggcagcttgag

SEQ ID NO: 11159 - DNA, 18 bp, Artificial Sequence
  Synthetic
ttctacgccgctgatgct

SEQ ID NO: 11160 - DNA, 18 bp, Artificial Sequence
  Synthetic
cttcctgcgaggcaagtc

SEQ ID NO: 11161 - DNA, 18 bp, Artificial Sequence
  Synthetic
tgccaacagcgtttcgag

SEQ ID NO: 11162 - DNA, 19 bp, Artificial Sequence
  Synthetic
cgtgcaatcaggaaatggc

SEQ ID NO: 11163 - DNA, 17 bp, Artificial Sequence
  Synthetic
aacattgggtgcagggc

SEQ ID NO: 11164 - DNA, 15 bp, Artificial Sequence
  Synthetic
aggctacgggcgcaa

SEQ ID NO: 11165 - DNA, 16 bp, Artificial Sequence
  Synthetic
cgccggcttcctgcaa

SEQ ID NO: 11166 - DNA, 16 bp, Artificial Sequence
  Synthetic
gtcgtcgttgccgcgt

SEQ ID NO: 11167 - DNA, 16 bp, Artificial Sequence
  Synthetic
cgcgccgtcatcatgc

SEQ ID NO: 11168 - DNA, 18 bp, Artificial Sequence
  Synthetic
ttatcgggcgcgtgatga

SEQ ID NO: 11169 - DNA, 16 bp, Artificial Sequence
  Synthetic
gtgtgcgcccccatca

SEQ ID NO: 11170 - DNA, 19 bp, Artificial Sequence
  Synthetic
ggcgacggtctgtatttgg

SEQ ID NO: 11171 - DNA, 16 bp, Artificial Sequence
  Synthetic
gtcgatacgccgggct

SEQ ID NO: 11172 - DNA, 18 bp, Artificial Sequence
  Synthetic
cgataaaggcggcgactt

SEQ ID NO: 11173 - DNA, 17 bp, Artificial Sequence
  Synthetic
ggccggatatcgcgttc

SEQ ID NO: 11174 - DNA, 18 bp, Artificial Sequence
  Synthetic
gctcgctgatttcgctgt

SEQ ID NO: 11175 - DNA, 16 bp, Artificial Sequence
  Synthetic
ccgggcaggacttgga

SEQ ID NO: 11176 - DNA, 18 bp, Artificial Sequence
  Synthetic
tggatacgcctgaccacg

SEQ ID NO: 11177 - DNA, 20 bp, Artificial Sequence
  Synthetic
ttcacaaaatctcttgcgtg

SEQ ID NO: 11178 - DNA, 21 bp, Artificial Sequence
  Synthetic
ctacatcattatgaccgttgt

SEQ ID NO: 11179 - DNA, 18 bp, Artificial Sequence
  Synthetic
ggactggtggtgcatccg

SEQ ID NO: 11180 - DNA, 19 bp, Artificial Sequence
  Synthetic
acgctatcttgcccacagc

SEQ ID NO: 11181 - DNA, 18 bp, Artificial Sequence
  Synthetic
tgtgggaagccaaaccgg

SEQ ID NO: 11182 - DNA, 20 bp, Artificial Sequence
  Synthetic
gggcatgccgtcaatatcga

SEQ ID NO: 11183 - DNA, 18 bp, Artificial Sequence
  Synthetic
gaagacgtgcggacgctg

SEQ ID NO: 11184 - DNA, 16 bp, Artificial Sequence
  Synthetic
aatctggcggatgcgc

SEQ ID NO: 11185 - DNA, 17 bp, Artificial Sequence
  Synthetic
gcgtttgaccgccttca

SEQ ID NO: 11186 - DNA, 16 bp, Artificial Sequence
  Synthetic
tcggggcgggtgaagt

SEQ ID NO: 11187 - DNA, 19 bp, Artificial Sequence
  Synthetic
cacagtgccggataaaggg

SEQ ID NO: 11188 - DNA, 16 bp, Artificial Sequence
  Synthetic
aggccgaggttgtggg

SEQ ID NO: 11189 - DNA, 19 bp, Artificial Sequence
  Synthetic
ctgtcgctgctgattcagg

SEQ ID NO: 11190 - DNA, 20 bp, Artificial Sequence
  Synthetic
tcgccgaaacgggtaaacag

SEQ ID NO: 11191 - DNA, 22 bp, Artificial Sequence
  Synthetic
cgtcaagcaactctatcctaat

SEQ ID NO: 11192 - DNA, 18 bp, Artificial Sequence
  Synthetic
gcaacttttggaacgtgt

SEQ ID NO: 11193 - DNA, 19 bp, Artificial Sequence
  Synthetic
cggtaaggattgggaacag

SEQ ID NO: 11194 - DNA, 18 bp, Artificial Sequence
  Synthetic
cgaacccggcattaccaa

SEQ ID NO: 11195 - DNA, 19 bp, Artificial Sequence
  Synthetic
tagctttcgcctgaaacgg

SEQ ID NO: 11196 - DNA, 19 bp, Artificial Sequence
  Synthetic
gggcaggatgtgttcgatg

SEQ ID NO: 11197 - DNA, 17 bp, Artificial Sequence
  Synthetic
gctttgggctttgcggt

SEQ ID NO: 11198 - DNA, 18 bp, Artificial Sequence
  Synthetic
ttggatgaggacaggttg

SEQ ID NO: 11199 - DNA, 18 bp, Artificial Sequence
  Synthetic
ttacccccgaggacgtgc

SEQ ID NO: 11200 - DNA, 19 bp, Artificial Sequence
  Synthetic
ctgccttcttatggcgaac

SEQ ID NO: 11201 - DNA, 18 bp, Artificial Sequence
  Synthetic
cttgtcggcaatcggtgt

SEQ ID NO: 11202 - DNA, 16 bp, Artificial Sequence
  Synthetic
caccacgtcgccgact

SEQ ID NO: 11203 - DNA, 19 bp, Artificial Sequence
  Synthetic
tgccggaagaaggttttgc

SEQ ID NO: 11204 - DNA, 19 bp, Artificial Sequence
  Synthetic
cagctcaaaatgttgctgt

SEQ ID NO: 11205 - DNA, 15 bp, Artificial Sequence
  Synthetic
gcgggcgtgtttgca

SEQ ID NO: 11206 - DNA, 17 bp, Artificial Sequence
  Synthetic
ttaaatgccgtccgcgc

SEQ ID NO: 11207 - DNA, 18 bp, Artificial Sequence
  Synthetic
acagcagctttcccgcta

SEQ ID NO: 11208 - DNA, 18 bp, Artificial Sequence
  Synthetic
cgataacgcgcttctgct

SEQ ID NO: 11209 - DNA, 18 bp, Artificial Sequence
  Synthetic
aggtcgcacgtatcctga

SEQ ID NO: 11210 - DNA, 20 bp, Artificial Sequence
  Synthetic
aatcgggaatagttggatca

SEQ ID NO: 11211 - DNA, 17 bp, Artificial Sequence
  Synthetic
attgcggcgagtggaac

SEQ ID NO: 11212 - DNA, 16 bp, Artificial Sequence
  Synthetic
ccgccgcctttgccat

SEQ ID NO: 11213 - DNA, 16 bp, Artificial Sequence
  Synthetic
gaaatccgtgccggcc

SEQ ID NO: 11214 - DNA, 16 bp, Artificial Sequence
  Synthetic
tgcatcgggcagccct

SEQ ID NO: 11215 - DNA, 18 bp, Artificial Sequence
  Synthetic
accgttgtaatcgggcgg

SEQ ID NO: 11216 - DNA, 17 bp, Artificial Sequence
  Synthetic
taagcccgtgccgaaca

SEQ ID NO: 11217 - DNA, 19 bp, Artificial Sequence
  Synthetic
gggcgacttccttccattg

SEQ ID NO: 11218 - DNA, 20 bp, Artificial Sequence
  Synthetic
ggtcggcattaaagacctgc

SEQ ID NO: 11219 - DNA, 20 bp, Artificial Sequence
  Synthetic
tttgtttgatgccgtgtccg

SEQ ID NO: 11220 - DNA, 16 bp, Artificial Sequence
  Synthetic
aggcggctgacgggat

SEQ ID NO: 11221 - DNA, 18 bp, Artificial Sequence
  Synthetic
cggttgaggtcgaaggtg

SEQ ID NO: 11222 - DNA, 18 bp, Artificial Sequence
  Synthetic
caccgccgatttggaagc

SEQ ID NO: 11223 - DNA, 19 bp, Artificial Sequence
  Synthetic
caaaaggatgttgctgccg

SEQ ID NO: 11224 - DNA, 17 bp, Artificial Sequence
  Synthetic
gcgggcgttatgacgga

SEQ ID NO: 11225 - DNA, 18 bp, Artificial Sequence
  Synthetic
gtcggcggcaaaaaaacc

SEQ ID NO: 11226 - DNA, 16 bp, Artificial Sequence
  Synthetic
cctgcccgctgatcct

SEQ ID NO: 11227 - DNA, 20 bp, Artificial Sequence
  Synthetic
ttgaccacgccttgaatcag

SEQ ID NO: 11228 - DNA, 18 bp, Artificial Sequence
  Synthetic
cgggtatccgcttggacg

SEQ ID NO: 11229 - DNA, 18 bp, Artificial Sequence
  Synthetic
ggactggtgtcaggacga

SEQ ID NO: 11230 - DNA, 18 bp, Artificial Sequence
  Synthetic
gctttgtcgggcaggaag

SEQ ID NO: 11231 - DNA, 19 bp, Artificial Sequence
  Synthetic
caaaacgtccaaaggctcg

SEQ ID NO: 11232 - DNA, 18 bp, Artificial Sequence
  Synthetic
aacaacccggtcagccaa

SEQ ID NO: 11233 - DNA, 18 bp, Artificial Sequence
  Synthetic
cgatgtcgtccccctcga

SEQ ID NO: 11234 - DNA, 19 bp, Artificial Sequence
  Synthetic
tcagacgactttggtggcg

SEQ ID NO: 11235 - DNA, 16 bp, Artificial Sequence
  Synthetic
cccgcctgcgacatca

SEQ ID NO: 11236 - DNA, 18 bp, Artificial Sequence
  Synthetic
atcgggtatgcgcacttg

SEQ ID NO: 11237 - DNA, 18 bp, Artificial Sequence
  Synthetic
tttccgccctcgaaaggc

SEQ ID NO: 11238 - DNA, 16 bp, Artificial Sequence
  Synthetic
ctgccggcgcgcatat

SEQ ID NO: 11239 - DNA, 16 bp, Artificial Sequence
  Synthetic
cgaacgcgcacggctt

SEQ ID NO: 11240 - DNA, 16 bp, Artificial Sequence
  Synthetic
caatgacggcggcgat

SEQ ID NO: 11241 - DNA, 18 bp, Artificial Sequence
  Synthetic
atgatgggaagaaggacg

SEQ ID NO: 11242 - DNA, 17 bp, Artificial Sequence
  Synthetic
gctggttacgccgaggt

SEQ ID NO: 11243 - DNA, 17 bp, Artificial Sequence
  Synthetic
tattcccccgttgcccg

SEQ ID NO: 11244 - DNA, 16 bp, Artificial Sequence
  Synthetic
gcggctgttgcggtag

SEQ ID NO: 11245 - DNA, 18 bp, Artificial Sequence
  Synthetic
cgacaaccaatgcgactt

SEQ ID NO: 11246 - DNA, 17 bp, Artificial Sequence
  Synthetic
cacgtcagggcttcgtc

SEQ ID NO: 11247 - DNA, 20 bp, Artificial Sequence
  Synthetic
cgttcaggaggccgtaattc

SEQ ID NO: 11248 - DNA, 17 bp, Artificial Sequence
  Synthetic
gtttctctgccgccgtt

SEQ ID NO: 11249 - DNA, 16 bp, Artificial Sequence
  Synthetic
caccgcgtccgctaag

SEQ ID NO: 11250 - DNA, 17 bp, Artificial Sequence
  Synthetic
acgaagttttgggcggc

SEQ ID NO: 11251 - DNA, 18 bp, Artificial Sequence
  Synthetic
cggtttccaaagacggcg

SEQ ID NO: 11252 - DNA, 16 bp, Artificial Sequence
  Synthetic
ccgatattgggcgccg

SEQ ID NO: 11253 - DNA, 16 bp, Artificial Sequence
  Synthetic
cgcgatgccgtccgaa

SEQ ID NO: 11254 - DNA, 18 bp, Artificial Sequence
  Synthetic
catgggcgaaggtggatg

SEQ ID NO: 11255 - DNA, 16 bp, Artificial Sequence
  Synthetic
gggcttgacgggcgaa

SEQ ID NO: 11256 - DNA, 20 bp, Artificial Sequence
  Synthetic
ttttgcgtagggtttagcat

SEQ ID NO: 11257 - DNA, 16 bp, Artificial Sequence
  Synthetic
caggtttcggtgcggg

SEQ ID NO: 11258 - DNA, 16 bp, Artificial Sequence
  Synthetic
gggatttggcggcgga

SEQ ID NO: 11259 - DNA, 18 bp, Artificial Sequence
  Synthetic
tgtgcaggaattggcagg

SEQ ID NO: 11260 - DNA, 18 bp, Artificial Sequence
  Synthetic
atatgaagttcggcgcgg

SEQ ID NO: 11261 - DNA, 16 bp, Artificial Sequence
  Synthetic
cgatacgttcggcggc

SEQ ID NO: 11262 - DNA, 17 bp, Artificial Sequence
  Synthetic
ctaaaaccgggcagccg

SEQ ID NO: 11263 - DNA, 18 bp, Artificial Sequence
  Synthetic
gttgaacatgaccggcgg

SEQ ID NO: 11264 - DNA, 17 bp, Artificial Sequence
  Synthetic
tgtcgtttcgggcgaag

SEQ ID NO: 11265 - DNA, 16 bp, Artificial Sequence
  Synthetic
gcgaagaagcggccga

SEQ ID NO: 11266 - DNA, 18 bp, Artificial Sequence
  Synthetic
ccctgcagatttcagccg

SEQ ID NO: 11267 - DNA, 18 bp, Artificial Sequence
  Synthetic
caggtcgtccgtgaaggt

SEQ ID NO: 11268 - DNA, 20 bp, Artificial Sequence
  Synthetic
tgctgaagcacaatctgacg

SEQ ID NO: 11269 - DNA, 20 bp, Artificial Sequence
  Synthetic
tttcgaccgcacaaatacgt

SEQ ID NO: 11270 - DNA, 16 bp, Artificial Sequence
  Synthetic
cgggcagcgtcaacga

SEQ ID NO: 11271 - DNA, 16 bp, Artificial Sequence
  Synthetic
ggcacgcccgaaagca

SEQ ID NO: 11272 - DNA, 16 bp, Artificial Sequence
  Synthetic
ccggtggcagtggaca

SEQ ID NO: 11273 - DNA, 17 bp, Artificial Sequence
  Synthetic
atttccgtaccggcggc

SEQ ID NO: 11274 - DNA, 16 bp, Artificial Sequence
  Synthetic
ggacgcgcggtcatca

SEQ ID NO: 11275 - DNA, 16 bp, Artificial Sequence
  Synthetic
tgtcggtttgcgccgt

SEQ ID NO: 11276 - DNA, 17 bp, Artificial Sequence
  Synthetic
gatgttttcggcggcgg

SEQ ID NO: 11277 - DNA, 16 bp, Artificial Sequence
  Synthetic
gaacgggccgccgata

SEQ ID NO: 11278 - DNA, 20 bp, Artificial Sequence
  Synthetic
gcctatgacgcattgcagga

SEQ ID NO: 11279 - DNA, 20 bp, Artificial Sequence
  Synthetic
gcgcatatcccatatgtcgg

SEQ ID NO: 11280 - DNA, 19 bp, Artificial Sequence
  Synthetic
agccgttgacgatggtttc

SEQ ID NO: 11281 - DNA, 20 bp, Artificial Sequence
  Synthetic
gaacaccaacgcgtaaatgg

SEQ ID NO: 11282 - DNA, 16 bp, Artificial Sequence
  Synthetic
cgcggcaggcttttgg

SEQ ID NO: 11283 - DNA, 20 bp, Artificial Sequence
  Synthetic
ttatcgttggtgaaggaaga

SEQ ID NO: 11284 - DNA, 22 bp, Artificial Sequence
  Synthetic
ctttgcctatatcgtgaaaacc

SEQ ID NO: 11285 - DNA, 17 bp, Artificial Sequence
  Synthetic
ggctgccgaatttcccg

SEQ ID NO: 11286 - DNA, 17 bp, Artificial Sequence
  Synthetic
cgctgcggatttcgtgc

SEQ ID NO: 11287 - DNA, 20 bp, Artificial Sequence
  Synthetic
gatgaccgcatccaaaacgt

SEQ ID NO: 11288 - DNA, 16 bp, Artificial Sequence
  Synthetic
tcgaccccgccctgtt

SEQ ID NO: 11289 - DNA, 17 bp, Artificial Sequence
  Synthetic
ggtcgatctgcaggcca

SEQ ID NO: 11290 - DNA, 16 bp, Artificial Sequence
  Synthetic
ccctcaatgcgcggca

SEQ ID NO: 11291 - DNA, 18 bp, Artificial Sequence
  Synthetic
tcgttggtggattggctg

SEQ ID NO: 11292 - DNA, 19 bp, Artificial Sequence
  Synthetic
aacgccctgaagttaaacg

SEQ ID NO: 11293 - DNA, 17 bp, Artificial Sequence
  Synthetic
tgaggaggcaggtcggt

SEQ ID NO: 11294 - DNA, 20 bp, Artificial Sequence
  Synthetic
atacgcagttcggaatcagg

SEQ ID NO: 11295 - DNA, 16 bp, Artificial Sequence
  Synthetic
ggctgcgcgtgttacg

SEQ ID NO: 11296 - DNA, 20 bp, Artificial Sequence
  Synthetic
tgttttcaagcacatcgcgg

SEQ ID NO: 11297 - DNA, 18 bp, Artificial Sequence
  Synthetic
ccgaagcctatgtgccca

SEQ ID NO: 11298 - DNA, 20 bp, Artificial Sequence
  Synthetic
tgctgtccgtaaaagaaggc

SEQ ID NO: 11299 - DNA, 16 bp, Artificial Sequence
  Synthetic
gcctcgacatccccga

SEQ ID NO: 11300 - DNA, 16 bp, Artificial Sequence
  Synthetic
ggcatcggcgagctga

SEQ ID NO: 11301 - DNA, 19 bp, Artificial Sequence
  Synthetic
cagcgtaccggttttgtcc

SEQ ID NO: 11302 - DNA, 17 bp, Artificial Sequence
  Synthetic
tttggctgccgagctgc

SEQ ID NO: 11303 - DNA, 19 bp, Artificial Sequence
  Synthetic
gtcaaaccgttaccgttgc

SEQ ID NO: 11304 - DNA, 20 bp, Artificial Sequence
  Synthetic
cagaccgttgaccagatacg

SEQ ID NO: 11305 - DNA, 18 bp, Artificial Sequence
  Synthetic
cgaactgccaaagctgcc

SEQ ID NO: 11306 - DNA, 17 bp, Artificial Sequence
  Synthetic
gatgacagggccggtga

SEQ ID NO: 11307 - DNA, 16 bp, Artificial Sequence
  Synthetic
ccgccgcgctgtttgt

SEQ ID NO: 11308 - DNA, 22 bp, Artificial Sequence
  Synthetic
acgggattaaattgaatttgca

SEQ ID NO: 11309 - DNA, 21 bp, Artificial Sequence
  Synthetic
ccgactttaacttcaatttcg

SEQ ID NO: 11310 - DNA, 19 bp, Artificial Sequence
  Synthetic
catgtcgtttggggggatg

SEQ ID NO: 11311 - DNA, 18 bp, Artificial Sequence
  Synthetic
tgcgttgacaaggttgcc

SEQ ID NO: 11312 - DNA, 19 bp, Artificial Sequence
  Synthetic
aaaaccggcaaaaacctgc

SEQ ID NO: 11313 - DNA, 19 bp, Artificial Sequence
  Synthetic
tcggtgtagagcgtgaagc

SEQ ID NO: 11314 - DNA, 19 bp, Artificial Sequence
  Synthetic
aaggctggcgacttttacg

SEQ ID NO: 11315 - DNA, 16 bp, Artificial Sequence
  Synthetic
cggtatcgcgcgcttt

SEQ ID NO: 11316 - DNA, 20 bp, Artificial Sequence
  Synthetic
gttttcagccaaaacgtgcg

SEQ ID NO: 11317 - DNA, 20 bp, Artificial Sequence
  Synthetic
atagccggtcatacccaaga

SEQ ID NO: 11318 - DNA, 16 bp, Artificial Sequence
  Synthetic
gtgttcgccgtggtgg

SEQ ID NO: 11319 - DNA, 17 bp, Artificial Sequence
  Synthetic
cgaccagtttggcggtt

SEQ ID NO: 11320 - DNA, 20 bp, Artificial Sequence
  Synthetic
gtccaaaagacgcagacagg

SEQ ID NO: 11321 - DNA, 18 bp, Artificial Sequence
  Synthetic
gccgcgaattgcacttct

SEQ ID NO: 11322 - DNA, 16 bp, Artificial Sequence
  Synthetic
cccgtgctgctggctt

SEQ ID NO: 11323 - DNA, 20 bp, Artificial Sequence
  Synthetic
caatccatcaaaaggctctc

SEQ ID NO: 11324 - DNA, 19 bp, Artificial Sequence
  Synthetic
aggggagccggaagaatcc

SEQ ID NO: 11325 - DNA, 16 bp, Artificial Sequence
  Synthetic
cccatcccgcgaacct

SEQ ID NO: 11326 - DNA, 15 bp, Artificial Sequence
  Synthetic
gcaacgcgctggcaa

SEQ ID NO: 11327 - DNA, 17 bp, Artificial Sequence
  Synthetic
ccggcggcttttcgatt

SEQ ID NO: 11328 - DNA, 16 bp, Artificial Sequence
  Synthetic
cccgtccgtccgcaat

SEQ ID NO: 11329 - DNA, 17 bp, Artificial Sequence
  Synthetic
gccgaatgcgatgtgct

SEQ ID NO: 11330 - DNA, 18 bp, Artificial Sequence
  Synthetic
ggcagcaaagccctgttc

SEQ ID NO: 11331 - DNA, 18 bp, Artificial Sequence
  Synthetic
caaccccgacgacgaaac

SEQ ID NO: 11332 - DNA, 20 bp, Artificial Sequence
  Synthetic
gtcgaagataccgatgcgat

SEQ ID NO: 11333 - DNA, 17 bp, Artificial Sequence
  Synthetic
ggttcacgggcaggttg

SEQ ID NO: 11334 - DNA, 17 bp, Artificial Sequence
  Synthetic
gcagtgtgcctaagccg

SEQ ID NO: 11335 - DNA, 19 bp, Artificial Sequence
  Synthetic
ggaaaaaatccgatgccgc

SEQ ID NO: 11336 - DNA, 16 bp, Artificial Sequence
  Synthetic
cactttctcgccgcgg

SEQ ID NO: 11337 - DNA, 18 bp, Artificial Sequence
  Synthetic
aattgccgggaatggaaa

SEQ ID NO: 11338 - DNA, 20 bp, Artificial Sequence
  Synthetic
taattttgtcggcgtgttgc

SEQ ID NO: 11339 - DNA, 19 bp, Artificial Sequence
  Synthetic
gaaaagccggtcgacttgt

SEQ ID NO: 11340 - DNA, 18 bp, Artificial Sequence
  Synthetic
gcgtaccggccttcaaac

SEQ ID NO: 11341 - DNA, 18 bp, Artificial Sequence
  Synthetic
tcgcggtaatgcactggg

SEQ ID NO: 11342 - DNA, 17 bp, Artificial Sequence
  Synthetic
ggctttgagcgatgccg

SEQ ID NO: 11343 - DNA, 20 bp, Artificial Sequence
  Synthetic
tttggctgcttctattgggc

SEQ ID NO: 11344 - DNA, 18 bp, Artificial Sequence
  Synthetic
ccgccccaagaaatcctc

SEQ ID NO: 11345 - DNA, 18 bp, Artificial Sequence
  Synthetic
gcgcgacctgaaaaaccg

SEQ ID NO: 11346 - DNA, 16 bp, Artificial Sequence
  Synthetic
gcgaaggcaagccgct

SEQ ID NO: 11347 - DNA, 16 bp, Artificial Sequence
  Synthetic
ttacgtgccgccgaca

SEQ ID NO: 11348 - DNA, 18 bp, Artificial Sequence
  Synthetic
gcaagccgtgctgtacct

SEQ ID NO: 11349 - DNA, 16 bp, Artificial Sequence
  Synthetic
gggatgcgccgtcttc

SEQ ID NO: 11350 - DNA, 20 bp, Artificial Sequence
  Synthetic
cggcgaatttcatcagttcg

SEQ ID NO: 11351 - DNA, 20 bp, Artificial Sequence
  Synthetic
ggcactcaaattcacagtca

SEQ ID NO: 11352 - DNA, 21 bp, Artificial Sequence
  Synthetic
caatcatgttcgcattggtac

SEQ ID NO: 11353 - DNA, 17 bp, Artificial Sequence
  Synthetic
ccgcagcatgaggcaac

SEQ ID NO: 11354 - DNA, 19 bp, Artificial Sequence
  Synthetic
tgtccgacgatttgttgcg

SEQ ID NO: 11355 - DNA, 19 bp, Artificial Sequence
  Synthetic
gaagaaatcgccctgctgt

SEQ ID NO: 11356 - DNA, 17 bp, Artificial Sequence
  Synthetic
gtcggcgtaaggtccgt

SEQ ID NO: 11357 - DNA, 19 bp, Artificial Sequence
  Synthetic
gcactgctggtcatactgc

SEQ ID NO: 11358 - DNA, 16 bp, Artificial Sequence
  Synthetic
gcgatgttgccgccca

SEQ ID NO: 11359 - DNA, 16 bp, Artificial Sequence
  Synthetic
gggccttggtagcgga

SEQ ID NO: 11360 - DNA, 16 bp, Artificial Sequence
  Synthetic
gcacggttacggcgca

SEQ ID NO: 11361 - DNA, 18 bp, Artificial Sequence
  Synthetic
cccgctgacgatgtgtac

SEQ ID NO: 11362 - DNA, 18 bp, Artificial Sequence
  Synthetic
gcatcaaggcacgcacat

SEQ ID NO: 11363 - DNA, 16 bp, Artificial Sequence
  Synthetic
cgggaatgacggcggt

SEQ ID NO: 11364 - DNA, 18 bp, Artificial Sequence
  Synthetic
gtggtgtgggtgtggtcg

SEQ ID NO: 11365 - DNA, 19 bp, Artificial Sequence
  Synthetic
agccgcgttcctattcttg

SEQ ID NO: 11366 - DNA, 17 bp, Artificial Sequence
  Synthetic
ccggcgaacaggctttg

SEQ ID NO: 11367 - DNA, 18 bp, Artificial Sequence
  Synthetic
tctagattcccgcctgcg

SEQ ID NO: 11368 - DNA, 20 bp, Artificial Sequence
  Synthetic
ttcgcagttgaggcttttgg

SEQ ID NO: 11369 - DNA, 17 bp, Artificial Sequence
  Synthetic
gcaacacttcgcctgcg

SEQ ID NO: 11370 - DNA, 20 bp, Artificial Sequence
  Synthetic
tcgaggaaaaggacgaaagc

SEQ ID NO: 11371 - DNA, 17 bp, Artificial Sequence
  Synthetic
ggaagaatacgcccgcc

SEQ ID NO: 11372 - DNA, 17 bp, Artificial Sequence
  Synthetic
cgacggcggcatcgatt

SEQ ID NO: 11373 - DNA, 20 bp, Artificial Sequence
  Synthetic
tttctttttcctacgcgccc

SEQ ID NO: 11374 - DNA, 18 bp, Artificial Sequence
  Synthetic
cctttcgccaactcctgc

SEQ ID NO: 11375 - DNA, 18 bp, Artificial Sequence
  Synthetic
gcccatctgtcgttcagc

SEQ ID NO: 11376 - DNA, 18 bp, Artificial Sequence
  Synthetic
aataggcagaatgaccgc

SEQ ID NO: 11377 - DNA, 20 bp, Artificial Sequence
  Synthetic
cctacatgactacttgggcg

SEQ ID NO: 11378 - DNA, 20 bp, Artificial Sequence
  Synthetic
attttctgttttgcctgcgg

SEQ ID NO: 11379 - DNA, 24 bp, Artificial Sequence
  Synthetic
ctgtctcagtttgatttttttcag

SEQ ID NO: 11380 - DNA, 19 bp, Artificial Sequence
  Synthetic
atgctgaaatggactcctc

SEQ ID NO: 11381 - DNA, 23 bp, Artificial Sequence
  Synthetic
tttcccactcagataatttctca

SEQ ID NO: 11382 - DNA, 24 bp, Artificial Sequence
  Synthetic
gtaaagttacccgagttaaaaacc

SEQ ID NO: 11383 - DNA, 22 bp, Artificial Sequence
  Synthetic
gaagataaggctttttttaccg

SEQ ID NO: 11384 - DNA, 18 bp, Artificial Sequence
  Synthetic
cgcaagaaatccactccg

SEQ ID NO: 11385 - DNA, 24 bp, Artificial Sequence
  Synthetic
atatcaaccaacttattgagatcc

SEQ ID NO: 11386 - DNA, 21 bp, Artificial Sequence
  Synthetic
aaacagttttttgctggtttg

SEQ ID NO: 11387 - DNA, 19 bp, Artificial Sequence
  Synthetic
ggtggagatggaacaccgc

SEQ ID NO: 11388 - DNA, 18 bp, Artificial Sequence
  Synthetic
gccatgagctgccctacg

SEQ ID NO: 11389 - DNA, 19 bp, Artificial Sequence
  Synthetic
atagccaaggcgtgatcga

SEQ ID NO: 11390 - DNA, 16 bp, Artificial Sequence
  Synthetic
cgtgggtgtgccgcaa

SEQ ID NO: 11391 - DNA, 18 bp, Artificial Sequence
  Synthetic
ccgggcgaaatcgaactc

SEQ ID NO: 11392 - DNA, 19 bp, Artificial Sequence
  Synthetic
atttccccgtccaactggt

SEQ ID NO: 11393 - DNA, 18 bp, Artificial Sequence
  Synthetic
cctgatcggcaaatgggc

SEQ ID NO: 11394 - DNA, 17 bp, Artificial Sequence
  Synthetic
gctgattgccgccatgc

SEQ ID NO: 11395 - DNA, 18 bp, Artificial Sequence
  Synthetic
gtcgaacaaaacgcctgc

SEQ ID NO: 11396 - DNA, 17 bp, Artificial Sequence
  Synthetic
gcaagacggcggtttgg

SEQ ID NO: 11397 - DNA, 16 bp, Artificial Sequence
  Synthetic
ttgaggcttgcgggca

SEQ ID NO: 11398 - DNA, 16 bp, Artificial Sequence
  Synthetic
gcgtttgcggtaggcg

SEQ ID NO: 11399 - DNA, 16 bp, Artificial Sequence
  Synthetic
cggtctgatgccggca

SEQ ID NO: 11400 - DNA, 17 bp, Artificial Sequence
  Synthetic
tccaaatccgcctgcga

SEQ ID NO: 11401 - DNA, 20 bp, Artificial Sequence
  Synthetic
atcgtcaatacagttccggc

SEQ ID NO: 11402 - DNA, 18 bp, Artificial Sequence
  Synthetic
cggcatccagcaaatcgc

SEQ ID NO: 11403 - DNA, 19 bp, Artificial Sequence
  Synthetic
ccttgcacgacgtgtatcg

SEQ ID NO: 11404 - DNA, 17 bp, Artificial Sequence
  Synthetic
cgccgcccaaatcgtac

SEQ ID NO: 11405 - DNA, 19 bp, Artificial Sequence
  Synthetic
ttttgccgaattgatggcg

SEQ ID NO: 11406 - DNA, 18 bp, Artificial Sequence
  Synthetic
ctcgaaacgcgcgtatgc

SEQ ID NO: 11407 - DNA, 15 bp, Artificial Sequence
  Synthetic
aaccgtttccgccgc

SEQ ID NO: 11408 - DNA, 19 bp, Artificial Sequence
  Synthetic
ttgtatttcctgccgctgc

SEQ ID NO: 11409 - DNA, 18 bp, Artificial Sequence
  Synthetic
gcccaagctcaatcggtt

SEQ ID NO: 11410 - DNA, 16 bp, Artificial Sequence
  Synthetic
gcgttttttcggcgcg

SEQ ID NO: 11411 - DNA, 18 bp, Artificial Sequence
  Synthetic
gttacttccgatgcggcg

SEQ ID NO: 11412 - DNA, 20 bp, Artificial Sequence
  Synthetic
cagttcttcttcggtttgcg

SEQ ID NO: 11413 - DNA, 19 bp, Artificial Sequence
  Synthetic
acactttcgacgacaaccg

SEQ ID NO: 11414 - DNA, 20 bp, Artificial Sequence
  Synthetic
ttcattgcaaaaaccgaccg

SEQ ID NO: 11415 - DNA, 17 bp, Artificial Sequence
  Synthetic
gccgcaccaaaacgacc

SEQ ID NO: 11416 - DNA, 20 bp, Artificial Sequence
  Synthetic
tttcaaccgcaaagacaagc

SEQ ID NO: 11417 - DNA, 19 bp, Artificial Sequence
  Synthetic
acacactgacccgattcct

SEQ ID NO: 11418 - DNA, 19 bp, Artificial Sequence
  Synthetic
aaaaacgccatcccgaacg

SEQ ID NO: 11419 - DNA, 18 bp, Artificial Sequence
  Synthetic
gacaagtgactgccttgt

SEQ ID NO: 11420 - DNA, 19 bp, Artificial Sequence
  Synthetic
ttgagcggcaaaatccacc

SEQ ID NO: 11421 - DNA, 18 bp, Artificial Sequence
  Synthetic
gggagcaatacccgaagt

SEQ ID NO: 11422 - DNA, 20 bp, Artificial Sequence
  Synthetic
cataccaacgtttcccccag

SEQ ID NO: 11423 - DNA, 17 bp, Artificial Sequence
  Synthetic
cgaaagccctgttgccg

SEQ ID NO: 11424 - DNA, 16 bp, Artificial Sequence
  Synthetic
cgcaagccgcctgaca

SEQ ID NO: 11425 - DNA, 18 bp, Artificial Sequence
  Synthetic
tgaagcctttcagacggc

SEQ ID NO: 11426 - DNA, 20 bp, Artificial Sequence
  Synthetic
atccatttcatcaaccgccc

SEQ ID NO: 11427 - DNA, 20 bp, Artificial Sequence
  Synthetic
gccctcgataaaaccttggc

SEQ ID NO: 11428 - DNA, 16 bp, Artificial Sequence
  Synthetic
gcgctggccgttttgg

SEQ ID NO: 11429 - DNA, 15 bp, Artificial Sequence
  Synthetic
tgcccgcgaactgga

SEQ ID NO: 11430 - DNA, 17 bp, Artificial Sequence
  Synthetic
atttgtagggcgtgccg

SEQ ID NO: 11431 - DNA, 16 bp, Artificial Sequence
  Synthetic
ttcgggtggcgggatc

SEQ ID NO: 11432 - DNA, 19 bp, Artificial Sequence
  Synthetic
tccgagtgcttgaagaccc

SEQ ID NO: 11433 - DNA, 19 bp, Artificial Sequence
  Synthetic
tcgtcgccgatattgcgtc

SEQ ID NO: 11434 - DNA, 17 bp, Artificial Sequence
  Synthetic
tgatgaaggcggcaagc

SEQ ID NO: 11435 - DNA, 20 bp, Artificial Sequence
  Synthetic
actggtggaaaacggtatgc

SEQ ID NO: 11436 - DNA, 19 bp, Artificial Sequence
  Synthetic
tcgataacggttttctcgc

SEQ ID NO: 11437 - DNA, 18 bp, Artificial Sequence
  Synthetic
gtcgcgctcggatttgac

SEQ ID NO: 11438 - DNA, 17 bp, Artificial Sequence
  Synthetic
taatttgcgcccctgcc

SEQ ID NO: 11439 - DNA, 18 bp, Artificial Sequence
  Synthetic
tgccgtctgaaaccgaac

SEQ ID NO: 11440 - DNA, 19 bp, Artificial Sequence
  Synthetic
ctactcgtcatcctcgccc

SEQ ID NO: 11441 - DNA, 20 bp, Artificial Sequence
  Synthetic
gcatttggatcatcggcacc

SEQ ID NO: 11442 - DNA, 16 bp, Artificial Sequence
  Synthetic
cgtcatcgccggcaca

SEQ ID NO: 11443 - DNA, 16 bp, Artificial Sequence
  Synthetic
accgccctgccgttca

SEQ ID NO: 11444 - DNA, 22 bp, Artificial Sequence
  Synthetic
tcaattcaattacggtttgtct

SEQ ID NO: 11445 - DNA, 20 bp, Artificial Sequence
  Synthetic
gccgatggttacttgttcgc

SEQ ID NO: 11446 - DNA, 19 bp, Artificial Sequence
  Synthetic
aatcgaccaaatcctgcgc

SEQ ID NO: 11447 - DNA, 19 bp, Artificial Sequence
  Synthetic
catgtccgacaacgctttg

SEQ ID NO: 11448 - DNA, 16 bp, Artificial Sequence
  Synthetic
ggtgcgccgtctgctt

SEQ ID NO: 11449 - DNA, 20 bp, Artificial Sequence
  Synthetic
gcttgccaaagaaggattgg

SEQ ID NO: 11450 - DNA, 16 bp, Artificial Sequence
  Synthetic
gccgccgctacaagct

SEQ ID NO: 11451 - DNA, 17 bp, Artificial Sequence
  Synthetic
gcgcctgcggaatttcc

SEQ ID NO: 11452 - DNA, 20 bp, Artificial Sequence
  Synthetic
acgcccttgaatatcgtgtt

SEQ ID NO: 11453 - DNA, 20 bp, Artificial Sequence
  Synthetic
acattcatgcggctttgaac

SEQ ID NO: 11454 - DNA, 16 bp, Artificial Sequence
  Synthetic
tgctgcaaagcgtggc

SEQ ID NO: 11455 - DNA, 16 bp, Artificial Sequence
  Synthetic
ccgccattcctgccga

SEQ ID NO: 11456 - DNA, 20 bp, Artificial Sequence
  Synthetic
ccttggcagggatagatgac

SEQ ID NO: 11457 - DNA, 22 bp, Artificial Sequence
  Synthetic
ttgatttttttaccgcttttgc

SEQ ID NO: 11458 - DNA, 16 bp, Artificial Sequence
  Synthetic
caaccgcgccagagct

SEQ ID NO: 11459 - DNA, 21 bp, Artificial Sequence
  Synthetic
ttaaacataccgagtgaatgg

SEQ ID NO: 11460 - DNA, 21 bp, Artificial Sequence
  Synthetic
aaaacgacttttaccaaagcg

SEQ ID NO: 11461 - DNA, 20 bp, Artificial Sequence
  Synthetic
accgcatttttttgacggag

SEQ ID NO: 11462 - DNA, 19 bp, Artificial Sequence
  Synthetic
attctgaataccgtccgtt

SEQ ID NO: 11463 - DNA, 19 bp, Artificial Sequence
  Synthetic
ccgcattcaaatcatgggc

SEQ ID NO: 11464 - DNA, 18 bp, Artificial Sequence
  Synthetic
ctgacggaaaagcagctt

SEQ ID NO: 11465 - DNA, 18 bp, Artificial Sequence
  Synthetic
acgcgaagaactactgaa

SEQ ID NO: 11466 - DNA, 20 bp, Artificial Sequence
  Synthetic
gcaaaaattccaaaggcatg

SEQ ID NO: 11467 - DNA, 18 bp, Artificial Sequence
  Synthetic
tgcaaacccgcatcctct

SEQ ID NO: 11468 - DNA, 19 bp, Artificial Sequence
  Synthetic
aagcgaaattcacggtcga

SEQ ID NO: 11469 - DNA, 21 bp, Artificial Sequence
  Synthetic
taaaacgtggcagatacagac

SEQ ID NO: 11470 - DNA, 18 bp, Artificial Sequence
  Synthetic
gctgtatcaactgctgcc

SEQ ID NO: 11471 - DNA, 19 bp, Artificial Sequence
  Synthetic
ctgcacgacggcaaaatcg

SEQ ID NO: 11472 - DNA, 16 bp, Artificial Sequence
  Synthetic
cacgcccttgtgcgtt

SEQ ID NO: 11473 - DNA, 19 bp, Artificial Sequence
  Synthetic
ttgcaagccttcatcttcg

SEQ ID NO: 11474 - DNA, 18 bp, Artificial Sequence
  Synthetic
cgttactttggccgggtc

SEQ ID NO: 11475 - DNA, 18 bp, Artificial Sequence
  Synthetic
ccggcaatgattgagcgt

SEQ ID NO: 11476 - DNA, 19 bp, Artificial Sequence
  Synthetic
cgccgagcaggtattgagc

SEQ ID NO: 11477 - DNA, 18 bp, Artificial Sequence
  Synthetic
gttcagacggcatcggtg

SEQ ID NO: 11478 - DNA, 16 bp, Artificial Sequence
  Synthetic
gactggccgcacgaca

SEQ ID NO: 11479 - DNA, 21 bp, Artificial Sequence
  Synthetic
attgatttgattgacgaagct

SEQ ID NO: 11480 - DNA, 18 bp, Artificial Sequence
  Synthetic
tgtacccgaaacggcagg

SEQ ID NO: 11481 - DNA, 18 bp, Artificial Sequence
  Synthetic
gcgcaatgccgtctgaat

SEQ ID NO: 11482 - DNA, 18 bp, Artificial Sequence
  Synthetic
ccatatccgtccgggcaa

SEQ ID NO: 11483 - DNA, 18 bp, Artificial Sequence
  Synthetic
cgtggatgagcaacgaca

SEQ ID NO: 11484 - DNA, 17 bp, Artificial Sequence
  Synthetic
gcagtgaaggcgacacg

SEQ ID NO: 11485 - DNA, 16 bp, Artificial Sequence
  Synthetic
agggacgccgcctgaa

SEQ ID NO: 11486 - DNA, 19 bp, Artificial Sequence
  Synthetic
cagagtttcttaccgccgc

SEQ ID NO: 11487 - DNA, 19 bp, Artificial Sequence
  Synthetic
taccgctaccacaactggg

SEQ ID NO: 11488 - DNA, 20 bp, Artificial Sequence
  Synthetic
cgtcattcccgacaataccg

SEQ ID NO: 11489 - DNA, 17 bp, Artificial Sequence
  Synthetic
caactcgccgtcaaccg

SEQ ID NO: 11490 - DNA, 20 bp, Artificial Sequence
  Synthetic
aaacacgtccaacagttcct

SEQ ID NO: 11491 - DNA, 20 bp, Artificial Sequence
  Synthetic
atccatcgaagacctccctg

SEQ ID NO: 11492 - DNA, 16 bp, Artificial Sequence
  Synthetic
cacatcctgcaccgcg

SEQ ID NO: 11493 - DNA, 16 bp, Artificial Sequence
  Synthetic
cggataccgccgtgca

SEQ ID NO: 11494 - DNA, 16 bp, Artificial Sequence
  Synthetic
cgccggacgaatcagc

SEQ ID NO: 11495 - DNA, 16 bp, Artificial Sequence
  Synthetic
aaacccaaacgccccg

SEQ ID NO: 11496 - DNA, 16 bp, Artificial Sequence
  Synthetic
gcgcggacggttttgc

SEQ ID NO: 11497 - DNA, 20 bp, Artificial Sequence
  Synthetic
agcccgatctgtttagaagc

SEQ ID NO: 11498 - DNA, 16 bp, Artificial Sequence
  Synthetic
acagcctcgcccagct

SEQ ID NO: 11499 - DNA, 17 bp, Artificial Sequence
  Synthetic
attcccgtccgcatcct

SEQ ID NO: 11500 - DNA, 17 bp, Artificial Sequence
  Synthetic
cagatccgcaagcgctt

SEQ ID NO: 11501 - DNA, 19 bp, Artificial Sequence
  Synthetic
ttcgggcgtaaggttttcc

SEQ ID NO: 11502 - DNA, 15 bp, Artificial Sequence
  Synthetic
ccaaacggcgcgtga

SEQ ID NO: 11503 - DNA, 19 bp, Artificial Sequence
  Synthetic
ggtaaccgtaaaccgcacg

SEQ ID NO: 11504 - DNA, 19 bp, Artificial Sequence
  Synthetic
gcataagccttcgttccgg

SEQ ID NO: 11505 - DNA, 18 bp, Artificial Sequence
  Synthetic
ccgccgcctgatattcgg

SEQ ID NO: 11506 - DNA, 16 bp, Artificial Sequence
  Synthetic
gggtttgcgccgtcaa

SEQ ID NO: 11507 - DNA, 16 bp, Artificial Sequence
  Synthetic
cgtctcgcccgggaaa

SEQ ID NO: 11508 - DNA, 20 bp, Artificial Sequence
  Synthetic
ggggtaaggcaggataaggc

SEQ ID NO: 11509 - DNA, 16 bp, Artificial Sequence
  Synthetic
tggccatccccgggat

SEQ ID NO: 11510 - DNA, 16 bp, Artificial Sequence
  Synthetic
gcggtcggcaaagtcg

SEQ ID NO: 11511 - DNA, 18 bp, Artificial Sequence
  Synthetic
cccccgacggataagcga

SEQ ID NO: 11512 - DNA, 18 bp, Artificial Sequence
  Synthetic
caatccggtgttgacgcg

SEQ ID NO: 11513 - DNA, 18 bp, Artificial Sequence
  Synthetic
gtcgggttcgggattggg

SEQ ID NO: 11514 - DNA, 18 bp, Artificial Sequence
  Synthetic
gctttctgttcttcgtgg

SEQ ID NO: 11515 - DNA, 18 bp, Artificial Sequence
  Synthetic
cccgtgtccgtctatggc

SEQ ID NO: 11516 - DNA, 19 bp, Artificial Sequence
  Synthetic
ttgtcccacatgaagctgc

SEQ ID NO: 11517 - DNA, 18 bp, Artificial Sequence
  Synthetic
gactacatcgacgcgctt

SEQ ID NO: 11518 - DNA, 17 bp, Artificial Sequence
  Synthetic
atgcggacatgagcgtg

SEQ ID NO: 11519 - DNA, 20 bp, Artificial Sequence
  Synthetic
ggcgaaagaatccctgatga

SEQ ID NO: 11520 - DNA, 18 bp, Artificial Sequence
  Synthetic
aaaccatcagccccgaac

SEQ ID NO: 11521 - DNA, 18 bp, Artificial Sequence
  Synthetic
gccgactgccaaatctgc

SEQ ID NO: 11522 - DNA, 20 bp, Artificial Sequence
  Synthetic
ttctgccgccgatattttgg

SEQ ID NO: 11523 - DNA, 19 bp, Artificial Sequence
  Synthetic
acgatatggacacacccgt

SEQ ID NO: 11524 - DNA, 18 bp, Artificial Sequence
  Synthetic
gcgaatgctgcaaatttg

SEQ ID NO: 11525 - DNA, 20 bp, Artificial Sequence
  Synthetic
gcgcttatctcttccgaact

SEQ ID NO: 11526 - DNA, 19 bp, Artificial Sequence
  Synthetic
ggaatgccgaagacaaccg

SEQ ID NO: 11527 - DNA, 20 bp, Artificial Sequence
  Synthetic
cagacggcatttccattcca

SEQ ID NO: 11528 - DNA, 20 bp, Artificial Sequence
  Synthetic
gaaagtggaaacgcacaacc

SEQ ID NO: 11529 - DNA, 16 bp, Artificial Sequence
  Synthetic
ccgtacaacgcggcaa

SEQ ID NO: 11530 - DNA, 16 bp, Artificial Sequence
  Synthetic
ctgccgtagccgccaa

SEQ ID NO: 11531 - DNA, 17 bp, Artificial Sequence
  Synthetic
catcgccgcgccgttta

SEQ ID NO: 11532 - DNA, 16 bp, Artificial Sequence
  Synthetic
aaaatgctggcggcgt

SEQ ID NO: 11533 - DNA, 18 bp, Artificial Sequence
  Synthetic
cgtcatcgtttcgcagct

SEQ ID NO: 11534 - DNA, 18 bp, Artificial Sequence
  Synthetic
gccaccgtcatcattgcc

SEQ ID NO: 11535 - DNA, 17 bp, Artificial Sequence
  Synthetic
catcgacggcattgccc

SEQ ID NO: 11536 - DNA, 16 bp, Artificial Sequence
  Synthetic
atggggctgctgctcg

SEQ ID NO: 11537 - DNA, 16 bp, Artificial Sequence
  Synthetic
gcaacgcccccatcct

SEQ ID NO: 11538 - DNA, 16 bp, Artificial Sequence
  Synthetic
acaccctgcgcgacga

SEQ ID NO: 11539 - DNA, 19 bp, Artificial Sequence
  Synthetic
ccgaactgaacggcaaact

SEQ ID NO: 11540 - DNA, 21 bp, Artificial Sequence
  Synthetic
gcttattttcagcggattcac

SEQ ID NO: 11541 - DNA, 18 bp, Artificial Sequence
  Synthetic
gcgcgtacatctgaaccg

SEQ ID NO: 11542 - DNA, 20 bp, Artificial Sequence
  Synthetic
ccatatgctcaacctcggtg

SEQ ID NO: 11543 - DNA, 17 bp, Artificial Sequence
  Synthetic
cgccgaaaccctttccg

SEQ ID NO: 11544 - DNA, 16 bp, Artificial Sequence
  Synthetic
tacccctctcgcgcga

SEQ ID NO: 11545 - DNA, 18 bp, Artificial Sequence
  Synthetic
ggcaacggtataggcccg

SEQ ID NO: 11546 - DNA, 18 bp, Artificial Sequence
  Synthetic
gcgttcgcgaatgtgtcc

SEQ ID NO: 11547 - DNA, 18 bp, Artificial Sequence
  Synthetic
cgcgattttgacggtgtg

SEQ ID NO: 11548 - DNA, 19 bp, Artificial Sequence
  Synthetic
gatgccgctccgtttaagc

SEQ ID NO: 11549 - DNA, 20 bp, Artificial Sequence
  Synthetic
tgtcaccgtgtacgatttcg

SEQ ID NO: 11550 - DNA, 17 bp, Artificial Sequence
  Synthetic
cccatttggcggcttcg

SEQ ID NO: 11551 - DNA, 16 bp, Artificial Sequence
  Synthetic
caacctgcttggccgc

SEQ ID NO: 11552 - DNA, 17 bp, Artificial Sequence
  Synthetic
attcccgccctcccttt

SEQ ID NO: 11553 - DNA, 16 bp, Artificial Sequence
  Synthetic
gctcaaccgcctgctg

SEQ ID NO: 11554 - DNA, 16 bp, Artificial Sequence
  Synthetic
gcgccgcctccaaact

SEQ ID NO: 11555 - DNA, 17 bp, Artificial Sequence
  Synthetic
tttcgtacttgccgcgc

SEQ ID NO: 11556 - DNA, 16 bp, Artificial Sequence
  Synthetic
aacgccttcgtcgccg

SEQ ID NO: 11557 - DNA, 19 bp, Artificial Sequence
  Synthetic
tccgtccgctccttcatcc

SEQ ID NO: 11558 - DNA, 18 bp, Artificial Sequence
  Synthetic
tcatgtaccgccacaacg

SEQ ID NO: 11559 - DNA, 17 bp, Artificial Sequence
  Synthetic
gcaaaggcgacctgcac

SEQ ID NO: 11560 - DNA, 19 bp, Artificial Sequence
  Synthetic
cacaaatcggctgggtagg

SEQ ID NO: 11561 - DNA, 18 bp, Artificial Sequence
  Synthetic
ggcaggtagaaaaggaca

SEQ ID NO: 11562 - DNA, 16 bp, Artificial Sequence
  Synthetic
gtccggctgggcgtat

SEQ ID NO: 11563 - DNA, 20 bp, Artificial Sequence
  Synthetic
tggaaaaagaattggcacgc

SEQ ID NO: 11564 - DNA, 15 bp, Artificial Sequence
  Synthetic
acgcaaccgcacgct

SEQ ID NO: 11565 - DNA, 18 bp, Artificial Sequence
  Synthetic
gaacctgcacgcctcatg

SEQ ID NO: 11566 - DNA, 20 bp, Artificial Sequence
  Synthetic
gtcaccaataccttcgtcgt

SEQ ID NO: 11567 - DNA, 20 bp, Artificial Sequence
  Synthetic
gtcatcctccttcataccgc

SEQ ID NO: 11568 - DNA, 23 bp, Artificial Sequence
  Synthetic
gtttactaaaacttcatcgtcct

SEQ ID NO: 11569 - DNA, 18 bp, Artificial Sequence
  Synthetic
ctgaccgaatcccgaaat

SEQ ID NO: 11570 - DNA, 17 bp, Artificial Sequence
  Synthetic
ttttcggcgggcgatac

SEQ ID NO: 11571 - DNA, 21 bp, Artificial Sequence
  Synthetic
tctaaataacgctgctcttcc

SEQ ID NO: 11572 - DNA, 17 bp, Artificial Sequence
  Synthetic
gctgcttcaggcttgcg

SEQ ID NO: 11573 - DNA, 18 bp, Artificial Sequence
  Synthetic
cctgaatcacgccgacag

SEQ ID NO: 11574 - DNA, 18 bp, Artificial Sequence
  Synthetic
accagtgctcgtatgcct

SEQ ID NO: 11575 - DNA, 19 bp, Artificial Sequence
  Synthetic
tatcctcgcaaccgaaagc

SEQ ID NO: 11576 - DNA, 16 bp, Artificial Sequence
  Synthetic
gcgcatcgatccgcaa

SEQ ID NO: 11577 - DNA, 19 bp, Artificial Sequence
  Synthetic
gcacaagtaaaagccgccc

SEQ ID NO: 11578 - DNA, 19 bp, Artificial Sequence
  Synthetic
cgcagaaacctaccgaagc

SEQ ID NO: 11579 - DNA, 19 bp, Artificial Sequence
  Synthetic
caatgactgcgggctttgt

SEQ ID NO: 11580 - DNA, 16 bp, Artificial Sequence
  Synthetic
agtccgggcgtgtcat

SEQ ID NO: 11581 - DNA, 16 bp, Artificial Sequence
  Synthetic
tgtctccagcgcggca

SEQ ID NO: 11582 - DNA, 17 bp, Artificial Sequence
  Synthetic
ccgacaccagcattccg

SEQ ID NO: 11583 - DNA, 18 bp, Artificial Sequence
  Synthetic
gggtacgaaagggctgga

SEQ ID NO: 11584 - DNA, 18 bp, Artificial Sequence
  Synthetic
ccattgcccgaacggaaa

SEQ ID NO: 11585 - DNA, 18 bp, Artificial Sequence
  Synthetic
acggtgcgttgacgatac

SEQ ID NO: 11586 - DNA, 17 bp, Artificial Sequence
  Synthetic
agctgtttcggcggacg

SEQ ID NO: 11587 - DNA, 19 bp, Artificial Sequence
  Synthetic
actggcgttacaaccggta

SEQ ID NO: 11588 - DNA, 18 bp, Artificial Sequence
  Synthetic
tctttccccgaaacaagt

SEQ ID NO: 11589 - DNA, 18 bp, Artificial Sequence
  Synthetic
cgaacgccatcacgtctg

SEQ ID NO: 11590 - DNA, 18 bp, Artificial Sequence
  Synthetic
aacccgacgcgctgatta

SEQ ID NO: 11591 - DNA, 19 bp, Artificial Sequence
  Synthetic
cactttcccgatgaagccg

SEQ ID NO: 11592 - DNA, 16 bp, Artificial Sequence
  Synthetic
aacctgttgcagccgc

SEQ ID NO: 11593 - DNA, 18 bp, Artificial Sequence
  Synthetic
gcgtggaagttactgccc

SEQ ID NO: 11594 - DNA, 18 bp, Artificial Sequence
  Synthetic
cccctaccgcatcaacac

SEQ ID NO: 11595 - DNA, 20 bp, Artificial Sequence
  Synthetic
tcaaccccaacgaatttgcc

SEQ ID NO: 11596 - DNA, 20 bp, Artificial Sequence
  Synthetic
tgttgaacttccagcaggtg

SEQ ID NO: 11597 - DNA, 17 bp, Artificial Sequence
  Synthetic
gggcatgggtccgattg

SEQ ID NO: 11598 - DNA, 17 bp, Artificial Sequence
  Synthetic
tcgccaaacgcctgatg

SEQ ID NO: 11599 - DNA, 20 bp, Artificial Sequence
  Synthetic
gaaagacgacaacccactgg

SEQ ID NO: 11600 - DNA, 17 bp, Artificial Sequence
  Synthetic
accgggaatcgaaccgc

SEQ ID NO: 11601 - DNA, 17 bp, Artificial Sequence
  Synthetic
cggtgcaggaaatccgc

SEQ ID NO: 11602 - DNA, 17 bp, Artificial Sequence
  Synthetic
gcgttgccgaaaagctg

SEQ ID NO: 11603 - DNA, 16 bp, Artificial Sequence
  Synthetic
cttcctgtgcgtcggc

SEQ ID NO: 11604 - DNA, 20 bp, Artificial Sequence
  Synthetic
aagcgaaccgtcttcatgaa

SEQ ID NO: 11605 - DNA, 20 bp, Artificial Sequence
  Synthetic
tcaaagtcagcatcagaccg

SEQ ID NO: 11606 - DNA, 17 bp, Artificial Sequence
  Synthetic
tatcggtgcgcaggtcg

SEQ ID NO: 11607 - DNA, 19 bp, Artificial Sequence
  Synthetic
gcgtaaagtcttgcacggc

SEQ ID NO: 11608 - DNA, 17 bp, Artificial Sequence
  Synthetic
cggatttcgaggccgtc

SEQ ID NO: 11609 - DNA, 20 bp, Artificial Sequence
  Synthetic
cttttcagacggcattcggc

SEQ ID NO: 11610 - DNA, 19 bp, Artificial Sequence
  Synthetic
acactgcatccgcattgct

SEQ ID NO: 11611 - DNA, 16 bp, Artificial Sequence
  Synthetic
cccaaccgggccaaca

SEQ ID NO: 11612 - DNA, 19 bp, Artificial Sequence
  Synthetic
caataccgcctgtaccacg

SEQ ID NO: 11613 - DNA, 19 bp, Artificial Sequence
  Synthetic
atcgaaactacgcgccatt

SEQ ID NO: 11614 - DNA, 16 bp, Artificial Sequence
  Synthetic
cgcgacgaagccgaag

SEQ ID NO: 11615 - DNA, 18 bp, Artificial Sequence
  Synthetic
tcctcgcctttcagacgg

SEQ ID NO: 11616 - DNA, 16 bp, Artificial Sequence
  Synthetic
ggcgggcgcaatcgaa

SEQ ID NO: 11617 - DNA, 16 bp, Artificial Sequence
  Synthetic
gccggcggcaaaagga

SEQ ID NO: 11618 - DNA, 18 bp, Artificial Sequence
  Synthetic
ccgcccaattcgacagaa

SEQ ID NO: 11619 - DNA, 17 bp, Artificial Sequence
  Synthetic
cagtgctgcttcgctgc

SEQ ID NO: 11620 - DNA, 16 bp, Artificial Sequence
  Synthetic
cggctgcaaccgccaa

SEQ ID NO: 11621 - DNA, 17 bp, Artificial Sequence
  Synthetic
cgttgcagacggccttg

SEQ ID NO: 11622 - DNA, 19 bp, Artificial Sequence
  Synthetic
gggtaacttgtgctagcgt

SEQ ID NO: 11623 - DNA, 16 bp, Artificial Sequence
  Synthetic
ggcagcaggctttccg

SEQ ID NO: 11624 - DNA, 16 bp, Artificial Sequence
  Synthetic
caggatttcgcgcgcg

SEQ ID NO: 11625 - DNA, 16 bp, Artificial Sequence
  Synthetic
ctccgcatcggcacca

SEQ ID NO: 11626 - DNA, 20 bp, Artificial Sequence
  Synthetic
gactgccttttggtcatcgg

SEQ ID NO: 11627 - DNA, 18 bp, Artificial Sequence
  Synthetic
taccacgcgctgacatcc

SEQ ID NO: 11628 - DNA, 18 bp, Artificial Sequence
  Synthetic
ccaatgaggcaagcagcg

SEQ ID NO: 11629 - DNA, 18 bp, Artificial Sequence
  Synthetic
cacgactgaaacggggtt

SEQ ID NO: 11630 - DNA, 19 bp, Artificial Sequence
  Synthetic
ggaatgccggcatattgga

SEQ ID NO: 11631 - DNA, 18 bp, Artificial Sequence
  Synthetic
atgcctacaccacattgc

SEQ ID NO: 11632 - DNA, 20 bp, Artificial Sequence
  Synthetic
ttccgtcaactggctttacg

SEQ ID NO: 11633 - DNA, 16 bp, Artificial Sequence
  Synthetic
ggcggcgttgcaggaa

SEQ ID NO: 11634 - DNA, 20 bp, Artificial Sequence
  Synthetic
gttgtagaggtgcagttcgg

SEQ ID NO: 11635 - DNA, 16 bp, Artificial Sequence
  Synthetic
tggcgctgtcggggtt

SEQ ID NO: 11636 - DNA, 16 bp, Artificial Sequence
  Synthetic
gccgccgaagtgctgt

SEQ ID NO: 11637 - DNA, 18 bp, Artificial Sequence
  Synthetic
aagggtttccaaacggcg

SEQ ID NO: 11638 - DNA, 20 bp, Artificial Sequence
  Synthetic
tttggcaagctgtttcatcg

SEQ ID NO: 11639 - DNA, 17 bp, Artificial Sequence
  Synthetic
tggctcgccgttgaaga

SEQ ID NO: 11640 - DNA, 17 bp, Artificial Sequence
  Synthetic
cgacttcgcccgcaatc

SEQ ID NO: 11641 - DNA, 18 bp, Artificial Sequence
  Synthetic
gattcagacggcatcggc

SEQ ID NO: 11642 - DNA, 17 bp, Artificial Sequence
  Synthetic
ggcggcaaactcttggg

SEQ ID NO: 11643 - DNA, 17 bp, Artificial Sequence
  Synthetic
gtccggcgaacttgtgc

SEQ ID NO: 11644 - DNA, 17 bp, Artificial Sequence
  Synthetic
acggcgtgatgatcggc

SEQ ID NO: 11645 - DNA, 19 bp, Artificial Sequence
  Synthetic
ctgcaccatcacgaactct

SEQ ID NO: 11646 - DNA, 18 bp, Artificial Sequence
  Synthetic
tgcacccacaaactcacg

SEQ ID NO: 11647 - DNA, 17 bp, Artificial Sequence
  Synthetic
tcaccagcttcgcctgc

SEQ ID NO: 11648 - DNA, 16 bp, Artificial Sequence
  Synthetic
gcggtatcgagtgcgc

SEQ ID NO: 11649 - DNA, 20 bp, Artificial Sequence
  Synthetic
gacggcatttttgacatccc

SEQ ID NO: 11650 - DNA, 20 bp, Artificial Sequence
  Synthetic
gcaccgacatttctttgacc

SEQ ID NO: 11651 - DNA, 19 bp, Artificial Sequence
  Synthetic
gccgattctttcgccaacg

SEQ ID NO: 11652 - DNA, 16 bp, Artificial Sequence
  Synthetic
cggcggcttcctgcaa

SEQ ID NO: 11653 - DNA, 19 bp, Artificial Sequence
  Synthetic
tgcgcttggatttggttca

SEQ ID NO: 11654 - DNA, 16 bp, Artificial Sequence
  Synthetic
gggcgcggtgatgtgt

SEQ ID NO: 11655 - DNA, 18 bp, Artificial Sequence
  Synthetic
tgcttggcaacggtttgt

SEQ ID NO: 11656 - DNA, 17 bp, Artificial Sequence
  Synthetic
aatgcccaagcggtggc

SEQ ID NO: 11657 - DNA, 16 bp, Artificial Sequence
  Synthetic
ccgtatctgggcgcga

SEQ ID NO: 11658 - DNA, 18 bp, Artificial Sequence
  Synthetic
ggcgacgaatccctctcc

SEQ ID NO: 11659 - DNA, 20 bp, Artificial Sequence
  Synthetic
ggcatccgtgttttggaaac

SEQ ID NO: 11660 - DNA, 17 bp, Artificial Sequence
  Synthetic
atgggtggacagccgct

SEQ ID NO: 11661 - DNA, 20 bp, Artificial Sequence
  Synthetic
cccacagcagaacaaaaacg

SEQ ID NO: 11662 - DNA, 17 bp, Artificial Sequence
  Synthetic
cgagttcggcagcttcc

SEQ ID NO: 11663 - DNA, 18 bp, Artificial Sequence
  Synthetic
tccccagttgtggtagcg

SEQ ID NO: 11664 - DNA, 16 bp, Artificial Sequence
  Synthetic
gtccgccgcgtcgaaa

SEQ ID NO: 11665 - DNA, 19 bp, Artificial Sequence
  Synthetic
ttgatgcggttgatgtcgg

SEQ ID NO: 11666 - DNA, 20 bp, Artificial Sequence
  Synthetic
atctgtttgacggtttcgcc

SEQ ID NO: 11667 - DNA, 16 bp, Artificial Sequence
  Synthetic
cttcgagttcggcggc

SEQ ID NO: 11668 - DNA, 16 bp, Artificial Sequence
  Synthetic
agcagcagggacagcg

SEQ ID NO: 11669 - DNA, 20 bp, Artificial Sequence
  Synthetic
gggatgatactgctgcacgt

SEQ ID NO: 11670 - DNA, 18 bp, Artificial Sequence
  Synthetic
cgcctatccgaacaggcc

SEQ ID NO: 11671 - DNA, 22 bp, Artificial Sequence
  Synthetic
aaatcatgagcaattacgaaga

SEQ ID NO: 11672 - DNA, 18 bp, Artificial Sequence
  Synthetic
agtcaatacgatgcagcc

SEQ ID NO: 11673 - DNA, 20 bp, Artificial Sequence
  Synthetic
agaacgccctgatactaact

SEQ ID NO: 11674 - DNA, 20 bp, Artificial Sequence
  Synthetic
tgatgcaaatgaccgtgatt

SEQ ID NO: 11675 - DNA, 19 bp, Artificial Sequence
  Synthetic
ataacgaagaacctcagcc

SEQ ID NO: 11676 - DNA, 20 bp, Artificial Sequence
  Synthetic
cgaacttgaccctaagcagc

SEQ ID NO: 11677 - DNA, 20 bp, Artificial Sequence
  Synthetic
gaaacgcatcactttatcgg

SEQ ID NO: 11678 - DNA, 18 bp, Artificial Sequence
  Synthetic
ctgtttagggctgcgttc

SEQ ID NO: 11679 - DNA, 21 bp, Artificial Sequence
  Synthetic
aaccagtttgcatcaaaacac

SEQ ID NO: 11680 - DNA, 20 bp, Artificial Sequence
  Synthetic
caccgtattcaaaggtatgg

SEQ ID NO: 11681 - DNA, 19 bp, Artificial Sequence
  Synthetic
tccaaatggaaaactgcca

SEQ ID NO: 11682 - DNA, 20 bp, Artificial Sequence
  Synthetic
caattccaacacgttttcca

SEQ ID NO: 11683 - DNA, 22 bp, Artificial Sequence
  Synthetic
tctgccaaaatcaaacttttcg

SEQ ID NO: 11684 - DNA, 17 bp, Artificial Sequence
  Synthetic
tactgcgaccaacccga

SEQ ID NO: 11685 - DNA, 16 bp, Artificial Sequence
  Synthetic
tgaagccttgcgcgtc

SEQ ID NO: 11686 - DNA, 21 bp, Artificial Sequence
  Synthetic
ttttgatggtttgatggtttg

SEQ ID NO: 11687 - DNA, 18 bp, Artificial Sequence
  Synthetic
ttgccgcaaacagcatct

SEQ ID NO: 11688 - DNA, 18 bp, Artificial Sequence
  Synthetic
caaatcatccgccgcacc

SEQ ID NO: 11689 - DNA, 20 bp, Artificial Sequence
  Synthetic
acgtgttcatcccattgagc

SEQ ID NO: 11690 - DNA, 19 bp, Artificial Sequence
  Synthetic
gccaatttcgccgtattgc

SEQ ID NO: 11691 - DNA, 16 bp, Artificial Sequence
  Synthetic
cggcgaggatgcggat

SEQ ID NO: 11692 - DNA, 16 bp, Artificial Sequence
  Synthetic
tcaggctgacgcggct

SEQ ID NO: 11693 - DNA, 16 bp, Artificial Sequence
  Synthetic
ccgtgtccggcgttga

SEQ ID NO: 11694 - DNA, 16 bp, Artificial Sequence
  Synthetic
cgcgcgcggtcagttt

SEQ ID NO: 11695 - DNA, 18 bp, Artificial Sequence
  Synthetic
ctgacgggtttcgacctg

SEQ ID NO: 11696 - DNA, 16 bp, Artificial Sequence
  Synthetic
gcatgcctgcgtgtcc

SEQ ID NO: 11697 - DNA, 19 bp, Artificial Sequence
  Synthetic
acggtataactttgcgcca

SEQ ID NO: 11698 - DNA, 18 bp, Artificial Sequence
  Synthetic
gagtttcttaccgccgcc

SEQ ID NO: 11699 - DNA, 17 bp, Artificial Sequence
  Synthetic
aactggggacgcctgga

SEQ ID NO: 11700 - DNA, 16 bp, Artificial Sequence
  Synthetic
ccgtcattcccgcgca

SEQ ID NO: 11701 - DNA, 20 bp, Artificial Sequence
  Synthetic
agtgccggaagaaaatacgg

SEQ ID NO: 11702 - DNA, 16 bp, Artificial Sequence
  Synthetic
cagttccgtgccgtcg

SEQ ID NO: 11703 - DNA, 19 bp, Artificial Sequence
  Synthetic
ggcacggcataagtgtagg

SEQ ID NO: 11704 - DNA, 17 bp, Artificial Sequence
  Synthetic
ggccgtccattgtccgt

SEQ ID NO: 11705 - DNA, 18 bp, Artificial Sequence
  Synthetic
agtttgcccatgctcagg

SEQ ID NO: 11706 - DNA, 18 bp, Artificial Sequence
  Synthetic
cactgccggccaaaatcg

SEQ ID NO: 11707 - DNA, 16 bp, Artificial Sequence
  Synthetic
ggcggcgacaacgttg

SEQ ID NO: 11708 - DNA, 16 bp, Artificial Sequence
  Synthetic
gcagtcgcgccgaact

SEQ ID NO: 11709 - DNA, 16 bp, Artificial Sequence
  Synthetic
gtcagctccacgccga

SEQ ID NO: 11710 - DNA, 20 bp, Artificial Sequence
  Synthetic
tcaaaaacattgccttcgcc

SEQ ID NO: 11711 - DNA, 17 bp, Artificial Sequence
  Synthetic
gggttgccgccatttcg

SEQ ID NO: 11712 - DNA, 17 bp, Artificial Sequence
  Synthetic
tcggtatgcgcttccgg

SEQ ID NO: 11713 - DNA, 16 bp, Artificial Sequence
  Synthetic
gccgtctgaaccgcct

SEQ ID NO: 11714 - DNA, 18 bp, Artificial Sequence
  Synthetic
cgcaatcaccttgtcgcc

SEQ ID NO: 11715 - DNA, 18 bp, Artificial Sequence
  Synthetic
caacagggtggacacggt

SEQ ID NO: 11716 - DNA, 17 bp, Artificial Sequence
  Synthetic
ggttgcgcccttgatgc

SEQ ID NO: 11717 - DNA, 16 bp, Artificial Sequence
  Synthetic
acggcgggcaggatgt

SEQ ID NO: 11718 - DNA, 16 bp, Artificial Sequence
  Synthetic
ggcacgccgttgactc

SEQ ID NO: 11719 - DNA, 19 bp, Artificial Sequence
  Synthetic
tgccttcgcaatcacgaac

SEQ ID NO: 11720 - DNA, 18 bp, Artificial Sequence
  Synthetic
ccatacaggctgtcttca

SEQ ID NO: 11721 - DNA, 19 bp, Artificial Sequence
  Synthetic
cgtatagaggcgcgacaga

SEQ ID NO: 11722 - DNA, 20 bp, Artificial Sequence
  Synthetic
cggtttgttcacgctcttcc

SEQ ID NO: 11723 - DNA, 19 bp, Artificial Sequence
  Synthetic
aaaccgaagaagaaaccgg

SEQ ID NO: 11724 - DNA, 18 bp, Artificial Sequence
  Synthetic
ttcgctgacgctcaaagc

SEQ ID NO: 11725 - DNA, 19 bp, Artificial Sequence
  Synthetic
accgcgactatgtcaaagc

SEQ ID NO: 11726 - DNA, 16 bp, Artificial Sequence
  Synthetic
acacccccgcgctgat

SEQ ID NO: 11727 - DNA, 16 bp, Artificial Sequence
  Synthetic
aacttcccgctcgcca

SEQ ID NO: 11728 - DNA, 16 bp, Artificial Sequence
  Synthetic
cgggtgcggcattgac

SEQ ID NO: 11729 - DNA, 16 bp, Artificial Sequence
  Synthetic
aggccttctgcgccct

SEQ ID NO: 11730 - DNA, 18 bp, Artificial Sequence
  Synthetic
aggtctcggtgtcatcgc

SEQ ID NO: 11731 - DNA, 20 bp, Artificial Sequence
  Synthetic
agcagtccccaaacaaatcc

SEQ ID NO: 11732 - DNA, 19 bp, Artificial Sequence
  Synthetic
ggcacgcaaatcgaaatcc

SEQ ID NO: 11733 - DNA, 16 bp, Artificial Sequence
  Synthetic
tctgacctgcgcggac

SEQ ID NO: 11734 - DNA, 18 bp, Artificial Sequence
  Synthetic
gtggtcgggagaggacga

SEQ ID NO: 11735 - DNA, 16 bp, Artificial Sequence
  Synthetic
ccgccgaaaccgccaa

SEQ ID NO: 11736 - DNA, 18 bp, Artificial Sequence
  Synthetic
tcccattcgttgtggcac

SEQ ID NO: 11737 - DNA, 18 bp, Artificial Sequence
  Synthetic
gcaaaatcgcaaggcagc

SEQ ID NO: 11738 - DNA, 18 bp, Artificial Sequence
  Synthetic
gcggtttgagcgcatcaa

SEQ ID NO: 11739 - DNA, 17 bp, Artificial Sequence
  Synthetic
aacatcctgtgccgccc

SEQ ID NO: 11740 - DNA, 20 bp, Artificial Sequence
  Synthetic
gagaatgccgtctgaaatgt

SEQ ID NO: 11741 - DNA, 16 bp, Artificial Sequence
  Synthetic
cggaagggcacgcctt

SEQ ID NO: 11742 - DNA, 16 bp, Artificial Sequence
  Synthetic
tcgtccccgcctttca

SEQ ID NO: 11743 - DNA, 16 bp, Artificial Sequence
  Synthetic
acaaccccgacagcgc

SEQ ID NO: 11744 - DNA, 18 bp, Artificial Sequence
  Synthetic
gtccgcctgttccgaaat

SEQ ID NO: 11745 - DNA, 19 bp, Artificial Sequence
  Synthetic
ggcaaacgttaccgtaccg

SEQ ID NO: 11746 - DNA, 20 bp, Artificial Sequence
  Synthetic
tctgatttccaagatggcgc

SEQ ID NO: 11747 - DNA, 20 bp, Artificial Sequence
  Synthetic
tgtccacaatcatgcccaaa

SEQ ID NO: 11748 - DNA, 20 bp, Artificial Sequence
  Synthetic
gaacttgccaaagacgctca

SEQ ID NO: 11749 - DNA, 19 bp, Artificial Sequence
  Synthetic
aaaccctcaaagcctacgc

SEQ ID NO: 11750 - DNA, 19 bp, Artificial Sequence
  Synthetic
gccgcctatcaagattggg

SEQ ID NO: 11751 - DNA, 17 bp, Artificial Sequence
  Synthetic
gcaaacagccgtcgtgg

SEQ ID NO: 11752 - DNA, 18 bp, Artificial Sequence
  Synthetic
ggcgttacccacatcgtg

SEQ ID NO: 11753 - DNA, 16 bp, Artificial Sequence
  Synthetic
ggctgtggcggacgat

SEQ ID NO: 11754 - DNA, 19 bp, Artificial Sequence
  Synthetic
ttcgttcatcagacacgcg

SEQ ID NO: 11755 - DNA, 16 bp, Artificial Sequence
  Synthetic
ttacggcccggaccaa

SEQ ID NO: 11756 - DNA, 18 bp, Artificial Sequence
  Synthetic
cgcaggcgcaaaaaaacc

SEQ ID NO: 11757 - DNA, 16 bp, Artificial Sequence
  Synthetic
ccgcaaaacccacggc

SEQ ID NO: 11758 - DNA, 19 bp, Artificial Sequence
  Synthetic
atatccccgtcgtcttggt

SEQ ID NO: 11759 - DNA, 20 bp, Artificial Sequence
  Synthetic
cgtgatacgccttatcctgc

SEQ ID NO: 11760 - DNA, 16 bp, Artificial Sequence
  Synthetic
ggttttcggcgggcga

SEQ ID NO: 11761 - DNA, 16 bp, Artificial Sequence
  Synthetic
caaagagacgggcggc

SEQ ID NO: 11762 - DNA, 17 bp, Artificial Sequence
  Synthetic
ttgatgctgacggcgtg

SEQ ID NO: 11763 - DNA, 18 bp, Artificial Sequence
  Synthetic
gagattcggctcgttgat

SEQ ID NO: 11764 - DNA, 20 bp, Artificial Sequence
  Synthetic
accagaacaatactgtcggc

SEQ ID NO: 11765 - DNA, 20 bp, Artificial Sequence
  Synthetic
ccacaggggatacatcttgc

SEQ ID NO: 11766 - DNA, 17 bp, Artificial Sequence
  Synthetic
gcggcagcgttaccgtt

SEQ ID NO: 11767 - DNA, 18 bp, Artificial Sequence
  Synthetic
cgtgtttcatcaggccgg

SEQ ID NO: 11768 - DNA, 20 bp, Artificial Sequence
  Synthetic
tattcggcgtaaacgtctgc

SEQ ID NO: 11769 - DNA, 18 bp, Artificial Sequence
  Synthetic
gtccacgcgtttgacgat

SEQ ID NO: 11770 - DNA, 20 bp, Artificial Sequence
  Synthetic
ctgccttcttcgacaatcgc

SEQ ID NO: 11771 - DNA, 16 bp, Artificial Sequence
  Synthetic
cccgctagcagttcgc

SEQ ID NO: 11772 - DNA, 17 bp, Artificial Sequence
  Synthetic
ggcggatttcgggcaac

SEQ ID NO: 11773 - DNA, 16 bp, Artificial Sequence
  Synthetic
gtatggcgggcggtca

SEQ ID NO: 11774 - DNA, 23 bp, Artificial Sequence
  Synthetic
aacaggcaaataacaatacaatg

SEQ ID NO: 11775 - DNA, 17 bp, Artificial Sequence
  Synthetic
ctacggcaaacgcagcg

SEQ ID NO: 11776 - DNA, 17 bp, Artificial Sequence
  Synthetic
ggtaatcacgccgtcgg

SEQ ID NO: 11777 - DNA, 15 bp, Artificial Sequence
  Synthetic
aaaacgcgggctgcc

SEQ ID NO: 11778 - DNA, 20 bp, Artificial Sequence
  Synthetic
tgtttatggacgatttgcgc

SEQ ID NO: 11779 - DNA, 21 bp, Artificial Sequence
  Synthetic
cttacctcattgtttcacaca

SEQ ID NO: 11780 - DNA, 20 bp, Artificial Sequence
  Synthetic
atcccaaagtttcaagccgt

SEQ ID NO: 11781 - DNA, 20 bp, Artificial Sequence
  Synthetic
tcatcacgatatgcagcctg

SEQ ID NO: 11782 - DNA, 16 bp, Artificial Sequence
  Synthetic
tcgacctcacccgcaa

SEQ ID NO: 11783 - DNA, 20 bp, Artificial Sequence
  Synthetic
attccgattatcgatgccgc

SEQ ID NO: 11784 - DNA, 18 bp, Artificial Sequence
  Synthetic
aatgccagccccatcagc

SEQ ID NO: 11785 - DNA, 20 bp, Artificial Sequence
  Synthetic
acagggcgaactctacatcc

SEQ ID NO: 11786 - DNA, 18 bp, Artificial Sequence
  Synthetic
tcgccaaactccccttcg

SEQ ID NO: 11787 - DNA, 19 bp, Artificial Sequence
  Synthetic
cagcaaaaggggatacagg

SEQ ID NO: 11788 - DNA, 20 bp, Artificial Sequence
  Synthetic
ttctcgtaaggattggcgac

SEQ ID NO: 11789 - DNA, 16 bp, Artificial Sequence
  Synthetic
cgtgggtgcggctcat

SEQ ID NO: 11790 - DNA, 19 bp, Artificial Sequence
  Synthetic
tcggcaaaacgggaaaacc

SEQ ID NO: 11791 - DNA, 16 bp, Artificial Sequence
  Synthetic
ccggcatcgcgcactt

SEQ ID NO: 11792 - DNA, 16 bp, Artificial Sequence
  Synthetic
atcggcgtgccaaacc

SEQ ID NO: 11793 - DNA, 18 bp, Artificial Sequence
  Synthetic
ctgctcgaggaaggcatc

SEQ ID NO: 11794 - DNA, 20 bp, Artificial Sequence
  Synthetic
ggcaatgccgtctgaaaagc

SEQ ID NO: 11795 - DNA, 19 bp, Artificial Sequence
  Synthetic
cgtcagtttgtaacgccct

SEQ ID NO: 11796 - DNA, 16 bp, Artificial Sequence
  Synthetic
taccttggacggcggc

SEQ ID NO: 11797 - DNA, 18 bp, Artificial Sequence
  Synthetic
acacgcgctacttcctcc

SEQ ID NO: 11798 - DNA, 18 bp, Artificial Sequence
  Synthetic
caacgccgaacacatccg

SEQ ID NO: 11799 - DNA, 20 bp, Artificial Sequence
  Synthetic
ctgcgtcaaaaactcgaagc

SEQ ID NO: 11800 - DNA, 17 bp, Artificial Sequence
  Synthetic
ggcagacctgacgatgc

SEQ ID NO: 11801 - DNA, 17 bp, Artificial Sequence
  Synthetic
cgccctgaccaccaaag

SEQ ID NO: 11802 - DNA, 16 bp, Artificial Sequence
  Synthetic
tggtacggcggcaggt

SEQ ID NO: 11803 - DNA, 16 bp, Artificial Sequence
  Synthetic
cggcatcggcgcgaaa

SEQ ID NO: 11804 - DNA, 20 bp, Artificial Sequence
  Synthetic
gggcaaaatcgtagagtggc

SEQ ID NO: 11805 - DNA, 18 bp, Artificial Sequence
  Synthetic
ctctttttccacggcgcg

SEQ ID NO: 11806 - DNA, 19 bp, Artificial Sequence
  Synthetic
aactcctcgaaaaacgcgg

SEQ ID NO: 11807 - DNA, 17 bp, Artificial Sequence
  Synthetic
ccaaattaccgccggct

SEQ ID NO: 11808 - DNA, 20 bp, Artificial Sequence
  Synthetic
actcccaaccctgattgtgt

SEQ ID NO: 11809 - DNA, 19 bp, Artificial Sequence
  Synthetic
gttttcgcactcgttgtcc

SEQ ID NO: 11810 - DNA, 17 bp, Artificial Sequence
  Synthetic
aagacgtgctgccctgt

SEQ ID NO: 11811 - DNA, 18 bp, Artificial Sequence
  Synthetic
tcgcggcgtgaatcaatg

SEQ ID NO: 11812 - DNA, 18 bp, Artificial Sequence
  Synthetic
catcgcgctgataccgaa

SEQ ID NO: 11813 - DNA, 19 bp, Artificial Sequence
  Synthetic
aacaacaccattacggcgc

SEQ ID NO: 11814 - DNA, 20 bp, Artificial Sequence
  Synthetic
acggcgcacgatagaatcag

SEQ ID NO: 11815 - DNA, 20 bp, Artificial Sequence
  Synthetic
ctgtcgggttgttttgctct

SEQ ID NO: 11816 - DNA, 18 bp, Artificial Sequence
  Synthetic
cataatgccgcctacgcc

SEQ ID NO: 11817 - DNA, 16 bp, Artificial Sequence
  Synthetic
cggttccggcgggttt

SEQ ID NO: 11818 - DNA, 18 bp, Artificial Sequence
  Synthetic
tacgtttggggcgcaatc

SEQ ID NO: 11819 - DNA, 17 bp, Artificial Sequence
  Synthetic
gccaccctgttcggact

SEQ ID NO: 11820 - DNA, 18 bp, Artificial Sequence
  Synthetic
cgaaagcgggaatccagg

SEQ ID NO: 11821 - DNA, 17 bp, Artificial Sequence
  Synthetic
cacgcccgtgttcttcc

SEQ ID NO: 11822 - DNA, 20 bp, Artificial Sequence
  Synthetic
gcattgtcttcactgttggc

SEQ ID NO: 11823 - DNA, 18 bp, Artificial Sequence
  Synthetic
ccagtcaggggcacaaag

SEQ ID NO: 11824 - DNA, 19 bp, Artificial Sequence
  Synthetic
gtgcgtctatgctcggttc

SEQ ID NO: 11825 - DNA, 19 bp, Artificial Sequence
  Synthetic
cccattctacgccgttgat

SEQ ID NO: 11826 - DNA, 16 bp, Artificial Sequence
  Synthetic
cgcagttcgggcgtgt

SEQ ID NO: 11827 - DNA, 16 bp, Artificial Sequence
  Synthetic
gttccgccgccgaagt

SEQ ID NO: 11828 - DNA, 16 bp, Artificial Sequence
  Synthetic
aacacccggctctggc

SEQ ID NO: 11829 - DNA, 16 bp, Artificial Sequence
  Synthetic
gcgcaatcggcatcct

SEQ ID NO: 11830 - DNA, 18 bp, Artificial Sequence
  Synthetic
tgggcttaacttgcgacc

SEQ ID NO: 11831 - DNA, 18 bp, Artificial Sequence
  Synthetic
gtaaacgaggcatccggg

SEQ ID NO: 11832 - DNA, 20 bp, Artificial Sequence
  Synthetic
atcagaatcatcagcggcac

SEQ ID NO: 11833 - DNA, 16 bp, Artificial Sequence
  Synthetic
cgcgccgtttcagcct

SEQ ID NO: 11834 - DNA, 19 bp, Artificial Sequence
  Synthetic
atgccgtctgaaactcggg

SEQ ID NO: 11835 - DNA, 17 bp, Artificial Sequence
  Synthetic
cagggcgaatacgggga

SEQ ID NO: 11836 - DNA, 17 bp, Artificial Sequence
  Synthetic
caccgtgtaccgccaca

SEQ ID NO: 11837 - DNA, 16 bp, Artificial Sequence
  Synthetic
gcgcccgcgtacagat

SEQ ID NO: 11838 - DNA, 18 bp, Artificial Sequence
  Synthetic
tttgcgcatggttcagga

SEQ ID NO: 11839 - DNA, 17 bp, Artificial Sequence
  Synthetic
cacccgttgcagatgcc

SEQ ID NO: 11840 - DNA, 17 bp, Artificial Sequence
  Synthetic
caaagtccgttccgccg

SEQ ID NO: 11841 - DNA, 16 bp, Artificial Sequence
  Synthetic
ggcaccgaaagccgca

SEQ ID NO: 11842 - DNA, 16 bp, Artificial Sequence
  Synthetic
tctcgacggcggtctc

SEQ ID NO: 11843 - DNA, 17 bp, Artificial Sequence
  Synthetic
gtgatcaccgcgatggg

SEQ ID NO: 11844 - DNA, 19 bp, Artificial Sequence
  Synthetic
gcaaaaactcgccgaagac

SEQ ID NO: 11845 - DNA, 16 bp, Artificial Sequence
  Synthetic
gcacttcccgggcgat

SEQ ID NO: 11846 - DNA, 15 bp, Artificial Sequence
  Synthetic
tgcccgtcgtcgcat

SEQ ID NO: 11847 - DNA, 17 bp, Artificial Sequence
  Synthetic
gtgcatgctcatcggcg

SEQ ID NO: 11848 - DNA, 15 bp, Artificial Sequence
  Synthetic
agcaacggcaggcgt

SEQ ID NO: 11849 - DNA, 20 bp, Artificial Sequence
  Synthetic
aaatcgtcaacaccaccgag

SEQ ID NO: 11850 - DNA, 17 bp, Artificial Sequence
  Synthetic
cgccatcaaccccgaac

SEQ ID NO: 11851 - DNA, 16 bp, Artificial Sequence
  Synthetic
cccttttggacgcgcg

SEQ ID NO: 11852 - DNA, 18 bp, Artificial Sequence
  Synthetic
catcccgatgatgccctg

SEQ ID NO: 11853 - DNA, 20 bp, Artificial Sequence
  Synthetic
ccgacttcaccatccaagac

SEQ ID NO: 11854 - DNA, 18 bp, Artificial Sequence
  Synthetic
aaaaccggcatctcaggc

SEQ ID NO: 11855 - DNA, 18 bp, Artificial Sequence
  Synthetic
tttcccattttgcggcgt

SEQ ID NO: 11856 - DNA, 16 bp, Artificial Sequence
  Synthetic
aagtttccggcggcac

SEQ ID NO: 11857 - DNA, 20 bp, Artificial Sequence
  Synthetic
gaagaactgtggcaaaccgt

SEQ ID NO: 11858 - DNA, 20 bp, Artificial Sequence
  Synthetic
agcatctaattgagtctcgt

SEQ ID NO: 11859 - DNA, 18 bp, Artificial Sequence
  Synthetic
gcacatgcacgatgagat

SEQ ID NO: 11860 - DNA, 20 bp, Artificial Sequence
  Synthetic
ccaaaatacgaccaaaacgc

SEQ ID NO: 11861 - DNA, 20 bp, Artificial Sequence
  Synthetic
atgccgtctgaaaattcttg

SEQ ID NO: 11862 - DNA, 20 bp, Artificial Sequence
  Synthetic
ccgcgcttttaggaacttca

SEQ ID NO: 11863 - DNA, 20 bp, Artificial Sequence
  Synthetic
acaaagccgtctgaagtacc

SEQ ID NO: 11864 - DNA, 18 bp, Artificial Sequence
  Synthetic
gcgccgtatgcttccaat

SEQ ID NO: 11865 - DNA, 18 bp, Artificial Sequence
  Synthetic
ggtatttccccgcacctg

SEQ ID NO: 11866 - DNA, 20 bp, Artificial Sequence
  Synthetic
taatcagtttgtggcagcct

SEQ ID NO: 11867 - DNA, 19 bp, Artificial Sequence
  Synthetic
tcttgggcgatgtggtact

SEQ ID NO: 11868 - DNA, 17 bp, Artificial Sequence
  Synthetic
cggcggaaagctggatg

SEQ ID NO: 11869 - DNA, 19 bp, Artificial Sequence
  Synthetic
aacggctgaaagacaacga

SEQ ID NO: 11870 - DNA, 19 bp, Artificial Sequence
  Synthetic
tcagcacataacgcggatt

SEQ ID NO: 11871 - DNA, 16 bp, Artificial Sequence
  Synthetic
acccgcgcggaagtca

SEQ ID NO: 11872 - DNA, 16 bp, Artificial Sequence
  Synthetic
cgtttccgcccaacgc

SEQ ID NO: 11873 - DNA, 18 bp, Artificial Sequence
  Synthetic
acacgccgatgtcaaagg

SEQ ID NO: 11874 - DNA, 24 bp, Artificial Sequence
  Synthetic
tagtgtggttaaatctttttgcag

SEQ ID NO: 11875 - DNA, 19 bp, Artificial Sequence
  Synthetic
tcgtcagcgcgatacgttt

SEQ ID NO: 11876 - DNA, 16 bp, Artificial Sequence
  Synthetic
ttcgaccaccgcgtcc

SEQ ID NO: 11877 - DNA, 16 bp, Artificial Sequence
  Synthetic
cgccagttcggacgca

SEQ ID NO: 11878 - DNA, 15 bp, Artificial Sequence
  Synthetic
acggccttgcgctct

SEQ ID NO: 11879 - DNA, 18 bp, Artificial Sequence
  Synthetic
gcagcatcaaaagcgtcc

SEQ ID NO: 11880 - DNA, 20 bp, Artificial Sequence
  Synthetic
tgacacccttacctttcacg

SEQ ID NO: 11881 - DNA, 22 bp, Artificial Sequence
  Synthetic
ggggatattcgggtaaaattag

SEQ ID NO: 11882 - DNA, 15 bp, Artificial Sequence
  Synthetic
acgcccagcccgatt

SEQ ID NO: 11883 - DNA, 15 bp, Artificial Sequence
  Synthetic
tgaccgccgccgaaa

SEQ ID NO: 11884 - DNA, 16 bp, Artificial Sequence
  Synthetic
ggcagacggcggtaca

SEQ ID NO: 11885 - DNA, 20 bp, Artificial Sequence
  Synthetic
agcctctgctcattacctcg

SEQ ID NO: 11886 - DNA, 19 bp, Artificial Sequence
  Synthetic
tacctacacccccgaaacc

SEQ ID NO: 11887 - DNA, 16 bp, Artificial Sequence
  Synthetic
tcggacgcgccatcga

SEQ ID NO: 11888 - DNA, 16 bp, Artificial Sequence
  Synthetic
catcgccgccctcgaa

SEQ ID NO: 11889 - DNA, 18 bp, Artificial Sequence
  Synthetic
tgaccgcccttttcgtct

SEQ ID NO: 11890 - DNA, 18 bp, Artificial Sequence
  Synthetic
cgaacccgcaaaattcgc

SEQ ID NO: 11891 - DNA, 17 bp, Artificial Sequence
  Synthetic
cttccaacacctgcccg

SEQ ID NO: 11892 - DNA, 19 bp, Artificial Sequence
  Synthetic
gagattggcgggatgaagc

SEQ ID NO: 11893 - DNA, 20 bp, Artificial Sequence
  Synthetic
tgccttggatttgggcattc

SEQ ID NO: 11894 - DNA, 16 bp, Artificial Sequence
  Synthetic
ttcggcaccgcacacc

SEQ ID NO: 11895 - DNA, 16 bp, Artificial Sequence
  Synthetic
gctgccgaccgatgtc

SEQ ID NO: 11896 - DNA, 18 bp, Artificial Sequence
  Synthetic
cgctttggatgcccagat

SEQ ID NO: 11897 - DNA, 18 bp, Artificial Sequence
  Synthetic
tcgtccgcttcaaaacgc

SEQ ID NO: 11898 - DNA, 18 bp, Artificial Sequence
  Synthetic
ttgccgtctttcagccag

SEQ ID NO: 11899 - DNA, 20 bp, Artificial Sequence
  Synthetic
ttccagtaatgcggaatcgg

SEQ ID NO: 11900 - DNA, 19 bp, Artificial Sequence
  Synthetic
gaaatgtcctacacctgcc

SEQ ID NO: 11901 - DNA, 23 bp, Artificial Sequence
  Synthetic
gcagaaactgaatcaaaaacaac

SEQ ID NO: 11902 - DNA, 18 bp, Artificial Sequence
  Synthetic
gataccggtttgctgcat

SEQ ID NO: 11903 - DNA, 18 bp, Artificial Sequence
  Synthetic
tgcttatccgaccgaatc

SEQ ID NO: 11904 - DNA, 20 bp, Artificial Sequence
  Synthetic
gaggatgccggagaaattgt

SEQ ID NO: 11905 - DNA, 16 bp, Artificial Sequence
  Synthetic
aatagcgcaggcgggt

SEQ ID NO: 11906 - DNA, 16 bp, Artificial Sequence
  Synthetic
cgcggaggcattcagg

SEQ ID NO: 11907 - DNA, 16 bp, Artificial Sequence
  Synthetic
ccgccgtcaagcagga

SEQ ID NO: 11908 - DNA, 16 bp, Artificial Sequence
  Synthetic
gcgcccgtaccttcca

SEQ ID NO: 11909 - DNA, 19 bp, Artificial Sequence
  Synthetic
attgcctgccggaaattgc

SEQ ID NO: 11910 - DNA, 18 bp, Artificial Sequence
  Synthetic
cagttgtcgccgtcgaag

SEQ ID NO: 11911 - DNA, 18 bp, Artificial Sequence
  Synthetic
gtgcaacggtgtaacccg

SEQ ID NO: 11912 - DNA, 19 bp, Artificial Sequence
  Synthetic
cacgttgttgagcagctgg

SEQ ID NO: 11913 - DNA, 17 bp, Artificial Sequence
  Synthetic
tcaagtcggcggacacg

SEQ ID NO: 11914 - DNA, 20 bp, Artificial Sequence
  Synthetic
ttatgaacattcgcttccac

SEQ ID NO: 11915 - DNA, 20 bp, Artificial Sequence
  Synthetic
actgccggttttgtcattgg

SEQ ID NO: 11916 - DNA, 17 bp, Artificial Sequence
  Synthetic
cggggcttcgtggaaac

SEQ ID NO: 11917 - DNA, 16 bp, Artificial Sequence
  Synthetic
cagtccgctgccgctt

SEQ ID NO: 11918 - DNA, 17 bp, Artificial Sequence
  Synthetic
cgacttgtccgagcagc

SEQ ID NO: 11919 - DNA, 19 bp, Artificial Sequence
  Synthetic
ccttccagcagtacggagt

SEQ ID NO: 11920 - DNA, 18 bp, Artificial Sequence
  Synthetic
cgtcggcacccttatccg

SEQ ID NO: 11921 - DNA, 17 bp, Artificial Sequence
  Synthetic
ccgttccctgcaactcg

SEQ ID NO: 11922 - DNA, 18 bp, Artificial Sequence
  Synthetic
gcttcgtgatggccgaca

SEQ ID NO: 11923 - DNA, 20 bp, Artificial Sequence
  Synthetic
ggcaaagtcatgcatacgct

SEQ ID NO: 11924 - DNA, 15 bp, Artificial Sequence
  Synthetic
caacacgcggcgcat

SEQ ID NO: 11925 - DNA, 16 bp, Artificial Sequence
  Synthetic
tcggcaagctcgtccg

SEQ ID NO: 11926 - DNA, 17 bp, Artificial Sequence
  Synthetic
gccgggtttgatccacc

SEQ ID NO: 11927 - DNA, 16 bp, Artificial Sequence
  Synthetic
ggagcttgccgacggt

SEQ ID NO: 11928 - DNA, 16 bp, Artificial Sequence
  Synthetic
ggtcgcaccgtttggg

SEQ ID NO: 11929 - DNA, 18 bp, Artificial Sequence
  Synthetic
tgcacttggaaacggcag

SEQ ID NO: 11930 - DNA, 16 bp, Artificial Sequence
  Synthetic
ggtgtcggcaacagcc

SEQ ID NO: 11931 - DNA, 18 bp, Artificial Sequence
  Synthetic
ctttcattgcgccggaca

SEQ ID NO: 11932 - DNA, 16 bp, Artificial Sequence
  Synthetic
aatgccagccgtccgg

SEQ ID NO: 11933 - DNA, 20 bp, Artificial Sequence
  Synthetic
caatttgtccaagccttgcg

SEQ ID NO: 11934 - DNA, 17 bp, Artificial Sequence
  Synthetic
tgagcgtgatttcgggc

SEQ ID NO: 11935 - DNA, 18 bp, Artificial Sequence
  Synthetic
cgtttgagatggcggacg

SEQ ID NO: 11936 - DNA, 18 bp, Artificial Sequence
  Synthetic
cccgtcagcgtataggcg

SEQ ID NO: 11937 - DNA, 16 bp, Artificial Sequence
  Synthetic
ccgacggcatgaccca

SEQ ID NO: 11938 - DNA, 17 bp, Artificial Sequence
  Synthetic
agcaatcgccaaagccg

SEQ ID NO: 11939 - DNA, 16 bp, Artificial Sequence
  Synthetic
cgaccgtgccgaagca

SEQ ID NO: 11940 - DNA, 19 bp, Artificial Sequence
  Synthetic
cggctatgttgacgcaaac

SEQ ID NO: 11941 - DNA, 18 bp, Artificial Sequence
  Synthetic
ttgccgccgtgatgaatg

SEQ ID NO: 11942 - DNA, 16 bp, Artificial Sequence
  Synthetic
gtgccgctgtgtaccg

SEQ ID NO: 11943 - DNA, 16 bp, Artificial Sequence
  Synthetic
ccgggcattcggggtt

SEQ ID NO: 11944 - DNA, 16 bp, Artificial Sequence
  Synthetic
ccgcagcgaactcgac

SEQ ID NO: 11945 - DNA, 20 bp, Artificial Sequence
  Synthetic
ggacaaatccgcattaccga

SEQ ID NO: 11946 - DNA, 17 bp, Artificial Sequence
  Synthetic
cggtttgcaagtcgcca

SEQ ID NO: 11947 - DNA, 18 bp, Artificial Sequence
  Synthetic
tccgccaaatgcaggaag

SEQ ID NO: 11948 - DNA, 16 bp, Artificial Sequence
  Synthetic
cactggttacgcgcgg

SEQ ID NO: 11949 - DNA, 20 bp, Artificial Sequence
  Synthetic
gtatcagttcgtgggcgagg

SEQ ID NO: 11950 - DNA, 19 bp, Artificial Sequence
  Synthetic
acatccttgtcgccatcgg

SEQ ID NO: 11951 - DNA, 20 bp, Artificial Sequence
  Synthetic
tcctgattgtcttctgtgcc

SEQ ID NO: 11952 - DNA, 18 bp, Artificial Sequence
  Synthetic
ttcattttgcctgccgtt

SEQ ID NO: 11953 - DNA, 16 bp, Artificial Sequence
  Synthetic
ggcggcggaagacctt

SEQ ID NO: 11954 - DNA, 18 bp, Artificial Sequence
  Synthetic
gaactggaaaccgacggc

SEQ ID NO: 11955 - DNA, 19 bp, Artificial Sequence
  Synthetic
aggtcgaaacactcgttgc

SEQ ID NO: 11956 - DNA, 16 bp, Artificial Sequence
  Synthetic
gaagacgtgcgcaccg

SEQ ID NO: 11957 - DNA, 20 bp, Artificial Sequence
  Synthetic
ttgtcattgacgtatcgcgg

SEQ ID NO: 11958 - DNA, 17 bp, Artificial Sequence
  Synthetic
ttcgcgcgtgttcttcc

SEQ ID NO: 11959 - DNA, 16 bp, Artificial Sequence
  Synthetic
gatgccgccgctgatg

SEQ ID NO: 11960 - DNA, 20 bp, Artificial Sequence
  Synthetic
gaagcggcttccttcaaacc

SEQ ID NO: 11961 - DNA, 18 bp, Artificial Sequence
  Synthetic
gaatgcacgggggtttga

SEQ ID NO: 11962 - DNA, 16 bp, Artificial Sequence
  Synthetic
gtggcagcggtcaagg

SEQ ID NO: 11963 - DNA, 18 bp, Artificial Sequence
  Synthetic
gcttgggcttcctgatgg

SEQ ID NO: 11964 - DNA, 20 bp, Artificial Sequence
  Synthetic
cgatatagggtttgaagcgg

SEQ ID NO: 11965 - DNA, 16 bp, Artificial Sequence
  Synthetic
cgccgtcttcgccttc

SEQ ID NO: 11966 - DNA, 16 bp, Artificial Sequence
  Synthetic
tgtcggtgggggggat

SEQ ID NO: 11967 - DNA, 20 bp, Artificial Sequence
  Synthetic
atccgataagtttccgcacc

SEQ ID NO: 11968 - DNA, 16 bp, Artificial Sequence
  Synthetic
ttgaatcgggcgggcg

SEQ ID NO: 11969 - DNA, 18 bp, Artificial Sequence
  Synthetic
cgttcgagacggggaatc

SEQ ID NO: 11970 - DNA, 20 bp, Artificial Sequence
  Synthetic
gcggaaaaatctcttggagc

SEQ ID NO: 11971 - DNA, 19 bp, Artificial Sequence
  Synthetic
tgctgctgattgtcaggtc

SEQ ID NO: 11972 - DNA, 17 bp, Artificial Sequence
  Synthetic
ggcgcggttctgtttgc

SEQ ID NO: 11973 - DNA, 18 bp, Artificial Sequence
  Synthetic
ggattcgtacagcggcag

SEQ ID NO: 11974 - DNA, 16 bp, Artificial Sequence
  Synthetic
acaccgaccagcccga

SEQ ID NO: 11975 - DNA, 20 bp, Artificial Sequence
  Synthetic
cgtatagtccgaccagttcg

SEQ ID NO: 11976 - DNA, 16 bp, Artificial Sequence
  Synthetic
ccggtgaagcggtcga

SEQ ID NO: 11977 - DNA, 18 bp, Artificial Sequence
  Synthetic
agtatgaagggcgtggcg

SEQ ID NO: 11978 - DNA, 16 bp, Artificial Sequence
  Synthetic
cgccgccgatttccct

SEQ ID NO: 11979 - DNA, 18 bp, Artificial Sequence
  Synthetic
cgcgacatcatgcgttcg

SEQ ID NO: 11980 - DNA, 18 bp, Artificial Sequence
  Synthetic
ccaaccacggatagcggt

SEQ ID NO: 11981 - DNA, 18 bp, Artificial Sequence
  Synthetic
ggaatgcccaaatccgcc

SEQ ID NO: 11982 - DNA, 17 bp, Artificial Sequence
  Synthetic
ggcaggttctttcggcg

SEQ ID NO: 11983 - DNA, 20 bp, Artificial Sequence
  Synthetic
ccgtaaaattcggaagcggc

SEQ ID NO: 11984 - DNA, 20 bp, Artificial Sequence
  Synthetic
agatgttttatcggcctggg

SEQ ID NO: 11985 - DNA, 20 bp, Artificial Sequence
  Synthetic
aacattaccgtcttggcagt

SEQ ID NO: 11986 - DNA, 22 bp, Artificial Sequence
  Synthetic
tgcttctaatttctccaatcgt

SEQ ID NO: 11987 - DNA, 17 bp, Artificial Sequence
  Synthetic
acccgaccacaacaccg

SEQ ID NO: 11988 - DNA, 16 bp, Artificial Sequence
  Synthetic
acggacgcgctttcgg

SEQ ID NO: 11989 - DNA, 19 bp, Artificial Sequence
  Synthetic
gatttcggtattgcgcgcg

SEQ ID NO: 11990 - DNA, 20 bp, Artificial Sequence
  Synthetic
ggcaactacggttacaacgc

SEQ ID NO: 11991 - DNA, 15 bp, Artificial Sequence
  Synthetic
cggcggcgcattcat

SEQ ID NO: 11992 - DNA, 20 bp, Artificial Sequence
  Synthetic
caacacctacggcattgttg

SEQ ID NO: 11993 - DNA, 20 bp, Artificial Sequence
  Synthetic
gacgatgcttttcaagacgc

SEQ ID NO: 11994 - DNA, 16 bp, Artificial Sequence
  Synthetic
cgggcagcgtcatcgt

SEQ ID NO: 11995 - DNA, 17 bp, Artificial Sequence
  Synthetic
ccgtaatgcagcacgcg

SEQ ID NO: 11996 - DNA, 16 bp, Artificial Sequence
  Synthetic
cggtccggttgtgcga

SEQ ID NO: 11997 - DNA, 19 bp, Artificial Sequence
  Synthetic
gccggtgctgtattttgcc

SEQ ID NO: 11998 - DNA, 16 bp, Artificial Sequence
  Synthetic
cgaaatcggggcgcag

SEQ ID NO: 11999 - DNA, 16 bp, Artificial Sequence
  Synthetic
gaatccgtgccgccga

SEQ ID NO: 12000 - DNA, 18 bp, Artificial Sequence
  Synthetic
cggtttgggcgattttgc

SEQ ID NO: 12001 - DNA, 17 bp, Artificial Sequence
  Synthetic
ccggatggcttcgtgga

SEQ ID NO: 12002 - DNA, 18 bp, Artificial Sequence
  Synthetic
gtccttcggtgcgtttgc

SEQ ID NO: 12003 - DNA, 15 bp, Artificial Sequence
  Synthetic
tgtcgcccgcatcga

SEQ ID NO: 12004 - DNA, 20 bp, Artificial Sequence
  Synthetic
tatgctgacctataccccgc

SEQ ID NO: 12005 - DNA, 18 bp, Artificial Sequence
  Synthetic
cacacccttgtggctgtg

SEQ ID NO: 12006 - DNA, 20 bp, Artificial Sequence
  Synthetic
agcgcaatgtgtagttgagt

SEQ ID NO: 12007 - DNA, 20 bp, Artificial Sequence
  Synthetic
cttctttgccgatgacgttc

SEQ ID NO: 12008 - DNA, 19 bp, Artificial Sequence
  Synthetic
ggcttttgtcatacagcgc

SEQ ID NO: 12009 - DNA, 16 bp, Artificial Sequence
  Synthetic
ggaaacaccacgccgc

SEQ ID NO: 12010 - DNA, 15 bp, Artificial Sequence
  Synthetic
cgcgggcaaggcaaa

SEQ ID NO: 12011 - DNA, 17 bp, Artificial Sequence
  Synthetic
cgacaagctgcccgaaa

SEQ ID NO: 12012 - DNA, 17 bp, Artificial Sequence
  Synthetic
tgaccgccaaactgcag

SEQ ID NO: 12013 - DNA, 20 bp, Artificial Sequence
  Synthetic
tgccgaccaattatgccttt

SEQ ID NO: 12014 - DNA, 18 bp, Artificial Sequence
  Synthetic
ttgaatacgccgtcccgc

SEQ ID NO: 12015 - DNA, 18 bp, Artificial Sequence
  Synthetic
cagttcggcggcatcgag

SEQ ID NO: 12016 - DNA, 18 bp, Artificial Sequence
  Synthetic
gcatcggcgatgtcttgc

SEQ ID NO: 12017 - DNA, 17 bp, Artificial Sequence
  Synthetic
cgaggcgttcggattcg

SEQ ID NO: 12018 - DNA, 17 bp, Artificial Sequence
  Synthetic
tgatgcgcccttcgaca

SEQ ID NO: 12019 - DNA, 16 bp, Artificial Sequence
  Synthetic
tcgcgccagttttgca

SEQ ID NO: 12020 - DNA, 17 bp, Artificial Sequence
  Synthetic
cggcgggtttcatcagg

SEQ ID NO: 12021 - DNA, 17 bp, Artificial Sequence
  Synthetic
cccgttgccgtctgaac

SEQ ID NO: 12022 - DNA, 21 bp, Artificial Sequence
  Synthetic
cctgatggagaacctatttcc

SEQ ID NO: 12023 - DNA, 25 bp, Artificial Sequence
  Synthetic
gagttaagtgagttagttatacctg

SEQ ID NO: 12024 - DNA, 20 bp, Artificial Sequence
  Synthetic
cgaaagtatgctaaaagccc

SEQ ID NO: 12025 - DNA, 25 bp, Artificial Sequence
  Synthetic
gtaaaagaatgccaattattgtgtg

SEQ ID NO: 12026 - DNA, 22 bp, Artificial Sequence
  Synthetic
ggatactcaaatttaggtttgc

SEQ ID NO: 12027 - DNA, 21 bp, Artificial Sequence
  Synthetic
caagacgaagatgatatgtgg

SEQ ID NO: 12028 - DNA, 23 bp, Artificial Sequence
  Synthetic
aatcttaacagacttgaaagact

SEQ ID NO: 12029 - DNA, 18 bp, Artificial Sequence
  Synthetic
cactcctattcgcccttc

SEQ ID NO: 12030 - DNA, 25 bp, Artificial Sequence
  Synthetic
ttaagggagtcatttgaaattgaag

SEQ ID NO: 12031 - DNA, 21 bp, Artificial Sequence
  Synthetic
ctttgaacaaccaattcaggg

SEQ ID NO: 12032 - DNA, 25 bp, Artificial Sequence
  Synthetic
aaaccatagatgttcctaaagtttc

SEQ ID NO: 12033 - DNA, 23 bp, Artificial Sequence
  Synthetic
tgcacctcttgaagttattaact

SEQ ID NO: 12034 - DNA, 25 bp, Artificial Sequence
  Synthetic
gaaagtatttgagacatgtagaaga

SEQ ID NO: 12035 - DNA, 22 bp, Artificial Sequence
  Synthetic
ttatcatgcttactaactgtgg

SEQ ID NO: 12036 - DNA, 23 bp, Artificial Sequence
  Synthetic
gattcgaaatggaagattttgtg

SEQ ID NO: 12037 - DNA, 19 bp, Artificial Sequence
  Synthetic
tagagggaagagatcgcac

SEQ ID NO: 12038 - DNA, 23 bp, Artificial Sequence
  Synthetic
caaatgtccaaagaagtaaatgc

SEQ ID NO: 12039 - DNA, 22 bp, Artificial Sequence
  Synthetic
aaatccaaattatctgctgtca

SEQ ID NO: 12040 - DNA, 18 bp, Artificial Sequence
  Synthetic
cgagctgaccgattcaat

SEQ ID NO: 12041 - DNA, 18 bp, Artificial Sequence
  Synthetic
ggaaggcgaaagaccaat

SEQ ID NO: 12042 - DNA, 18 bp, Artificial Sequence
  Synthetic
aatggagatgaggccttg

SEQ ID NO: 12043 - DNA, 20 bp, Artificial Sequence
  Synthetic
gggttgagagtaccccagag

SEQ ID NO: 12044 - DNA, 20 bp, Artificial Sequence
  Synthetic
gtccccacatagcagactcc

SEQ ID NO: 12045 - DNA, 19 bp, Artificial Sequence
  Synthetic
ctcggtaatggcgaatggg

SEQ ID NO: 12046 - DNA, 20 bp, Artificial Sequence
  Synthetic
atcctatgggaatccctggc

SEQ ID NO: 12047 - DNA, 20 bp, Artificial Sequence
  Synthetic
gccgatagctgctttctctt

SEQ ID NO: 12048 - DNA, 24 bp, Artificial Sequence
  Synthetic
atatgttactaaaagggtgtaacc

SEQ ID NO: 12049 - DNA, 23 bp, Artificial Sequence
  Synthetic
atagacgctatacatgttctgtg

SEQ ID NO: 12050 - DNA, 24 bp, Artificial Sequence
  Synthetic
cagaaacacaagtgtaaagaacaa

SEQ ID NO: 12051 - DNA, 21 bp, Artificial Sequence
  Synthetic
gagcagatgttaatggaagac

SEQ ID NO: 12052 - DNA, 20 bp, Artificial Sequence
  Synthetic
tgattatgcagaacaggagg

SEQ ID NO: 12053 - DNA, 23 bp, Artificial Sequence
  Synthetic
tccaaatacatttccatttgaca

SEQ ID NO: 12054 - DNA, 18 bp, Artificial Sequence
  Synthetic
ctcgtgaaggaaacatgc

SEQ ID NO: 12055 - DNA, 25 bp, Artificial Sequence
  Synthetic
attataaaactgatatagggtggtg

SEQ ID NO: 12056 - DNA, 18 bp, Artificial Sequence
  Synthetic
ccagaccaccgaagccta

SEQ ID NO: 12057 - DNA, 21 bp, Artificial Sequence
  Synthetic
gtccgcccattattattgaac

SEQ ID NO: 12058 - DNA, 25 bp, Artificial Sequence
  Synthetic
tagatgaaacacttacatatgcttc

SEQ ID NO: 12059 - DNA, 21 bp, Artificial Sequence
  Synthetic
attcatctgcacctttgtttg

SEQ ID NO: 12060 - DNA, 21 bp, Artificial Sequence
  Synthetic
accactaacttacctgcaata

SEQ ID NO: 12061 - DNA, 19 bp, Artificial Sequence
  Synthetic
cctaaaactggccaaaagg

SEQ ID NO: 12062 - DNA, 20 bp, Artificial Sequence
  Synthetic
gacaacagggacaatgtttc

SEQ ID NO: 12063 - DNA, 22 bp, Artificial Sequence
  Synthetic
atgtctgcagatacatatggaa

SEQ ID NO: 12064 - DNA, 21 bp, Artificial Sequence
  Synthetic
cttctacctcttcctctacca

SEQ ID NO: 12065 - DNA, 20 bp, Artificial Sequence
  Synthetic
tccagtttgttacactccgc

SEQ ID NO: 12066 - DNA, 19 bp, Artificial Sequence
  Synthetic
gagtatcacgcctccggaa

SEQ ID NO: 12067 - DNA, 19 bp, Artificial Sequence
  Synthetic
cctttggggtggattggtg

SEQ ID NO: 12068 - DNA, 20 bp, Artificial Sequence
  Synthetic
caatcctgaccaattgctgc

SEQ ID NO: 12069 - DNA, 24 bp, Artificial Sequence
  Synthetic
actcttatttgagtgagaatgtgt

SEQ ID NO: 12070 - DNA, 24 bp, Artificial Sequence
  Synthetic
ggtctaaagaaatgtttaaacctc

SEQ ID NO: 12071 - DNA, 20 bp, Artificial Sequence
  Synthetic
tggcagggttagttttgtgg

SEQ ID NO: 12072 - DNA, 19 bp, Artificial Sequence
  Synthetic
ccttgtgctggtttgtttc

SEQ ID NO: 12073 - DNA, 16 bp, Artificial Sequence
  Synthetic
gcttggcgtgtgggga

SEQ ID NO: 12074 - DNA, 18 bp, Artificial Sequence
  Synthetic
ggttggctcatcccacag

SEQ ID NO: 12075 - DNA, 19 bp, Artificial Sequence
  Synthetic
ataccatccccagtacaca

SEQ ID NO: 12076 - DNA, 18 bp, Artificial Sequence
  Synthetic
gtgttgggcattggaaag

SEQ ID NO: 12077 - DNA, 19 bp, Artificial Sequence
  Synthetic
ggtatggttcctgaatgca

SEQ ID NO: 12078 - DNA, 19 bp, Artificial Sequence
  Synthetic
ctgcaattgacaagctgaa

SEQ ID NO: 12079 - DNA, 20 bp, Artificial Sequence
  Synthetic
ttggtacatggacatcggtg

SEQ ID NO: 12080 - DNA, 20 bp, Artificial Sequence
  Synthetic
aactttacaaaggacccaga

SEQ ID NO: 12081 - DNA, 19 bp, Artificial Sequence
  Synthetic
gagatccgtcccaggagtg

SEQ ID NO: 12082 - DNA, 21 bp, Artificial Sequence
  Synthetic
aacggcctacaaaaaagaagt

SEQ ID NO: 12083 - DNA, 20 bp, Artificial Sequence
  Synthetic
atgaagtagcagctcacacg

SEQ ID NO: 12084 - DNA, 18 bp, Artificial Sequence
  Synthetic
gtacccgtgtcaagcgtc

SEQ ID NO: 12085 - DNA, 20 bp, Artificial Sequence
  Synthetic
tgctggctgaaggtaaatgc

SEQ ID NO: 12086 - DNA, 18 bp, Artificial Sequence
  Synthetic
cgtgtgttggctgtccat

SEQ ID NO: 12087 - DNA, 18 bp, Artificial Sequence
  Synthetic
gcaaaattggctcgcttc

SEQ ID NO: 12088 - DNA, 17 bp, Artificial Sequence
  Synthetic
tttagggcagcggcaac

SEQ ID NO: 12089 - DNA, 23 bp, Artificial Sequence
  Synthetic
atcaaaagataataacgattggc

SEQ ID NO: 12090 - DNA, 18 bp, Artificial Sequence
  Synthetic
tgccccaaactagcagaa

SEQ ID NO: 12091 - DNA, 23 bp, Artificial Sequence
  Synthetic
gaattaggtgttccatttcatct

SEQ ID NO: 12092 - DNA, 25 bp, Artificial Sequence
  Synthetic
actaaaatactattcattgaggagg

SEQ ID NO: 12093 - DNA, 18 bp, Artificial Sequence
  Synthetic
aaaaacgacagctccagc

SEQ ID NO: 12094 - DNA, 20 bp, Artificial Sequence
  Synthetic
gaaactgttgcagaaaaagc

SEQ ID NO: 12095 - DNA, 19 bp, Artificial Sequence
  Synthetic
ctgaagaggaggagcaaca

SEQ ID NO: 12096 - DNA, 23 bp, Artificial Sequence
  Synthetic
gtgaagctgaatgtattactgat

SEQ ID NO: 12097 - DNA, 22 bp, Artificial Sequence
  Synthetic
aatttctgtggaaggaaaaagt

SEQ ID NO: 12098 - DNA, 25 bp, Artificial Sequence
  Synthetic
ctgtttcagcttgttaaatttcttg

SEQ ID NO: 12099 - DNA, 20 bp, Artificial Sequence
  Synthetic
ttgtctcctcttccagctcc

SEQ ID NO: 12100 - DNA, 18 bp, Artificial Sequence
  Synthetic
acaccagtgaatcagctg

SEQ ID NO: 12101 - DNA, 23 bp, Artificial Sequence
  Synthetic
tttggaagtgtaatttatttggg

SEQ ID NO: 12102 - DNA, 21 bp, Artificial Sequence
  Synthetic
atttgagtatgataatcccgc

SEQ ID NO: 12103 - DNA, 21 bp, Artificial Sequence
  Synthetic
cttacaattaggtcgtggtgg

SEQ ID NO: 12104 - DNA, 23 bp, Artificial Sequence
  Synthetic
cacctattgaattagtcagttca

SEQ ID NO: 12105 - DNA, 24 bp, Artificial Sequence
  Synthetic
aaatcaatatagacatcacacctg

SEQ ID NO: 12106 - DNA, 23 bp, Artificial Sequence
  Synthetic
actattgaaggactagtctatgg

SEQ ID NO: 12107 - DNA, 19 bp, Artificial Sequence
  Synthetic
ggagtatgagatggctgac

SEQ ID NO: 12108 - DNA, 21 bp, Artificial Sequence
  Synthetic
tattggtcggtactaaaacca

SEQ ID NO: 12109 - DNA, 18 bp, Artificial Sequence
  Synthetic
gtgcctgctagatcaagt

SEQ ID NO: 12110 - DNA, 22 bp, Artificial Sequence
  Synthetic
aattcagtgaggttgaaactag

SEQ ID NO: 12111 - DNA, 20 bp, Artificial Sequence
  Synthetic
agaaagcgtctagccatggc

SEQ ID NO: 12112 - DNA, 20 bp, Artificial Sequence
  Synthetic
caaaagaaacaccaaccgcc

SEQ ID NO: 12113 - DNA, 17 bp, Artificial Sequence
  Synthetic
acacgcacctggttgtg

SEQ ID NO: 12114 - DNA, 19 bp, Artificial Sequence
  Synthetic
gcatactttgcgtcaacgg

SEQ ID NO: 12115 - DNA, 19 bp, Artificial Sequence
  Synthetic
gggtttatagccggcctca

SEQ ID NO: 12116 - DNA, 18 bp, Artificial Sequence
  Synthetic
ggcagcaacgagactgac

SEQ ID NO: 12117 - DNA, 18 bp, Artificial Sequence
  Synthetic
catcggaggcctagagca

SEQ ID NO: 12118 - DNA, 20 bp, Artificial Sequence
  Synthetic
tgctcctaatctgtcaggca

SEQ ID NO: 12119 - DNA, 18 bp, Artificial Sequence
  Synthetic
gtgctggtcatgtggtgg

SEQ ID NO: 12120 - DNA, 20 bp, Artificial Sequence
  Synthetic
ttatgaccatcttgccccca

SEQ ID NO: 12121 - DNA, 19 bp, Artificial Sequence
  Synthetic
gccgggacaaaaatgaagc

SEQ ID NO: 12122 - DNA, 17 bp, Artificial Sequence
  Synthetic
tccttgctcagcccgag

SEQ ID NO: 12123 - DNA, 16 bp, Artificial Sequence
  Synthetic
ccgtccgtcgcagcaa

SEQ ID NO: 12124 - DNA, 20 bp, Artificial Sequence
  Synthetic
gaaatccccttctacggcag

SEQ ID NO: 12125 - DNA, 20 bp, Artificial Sequence
  Synthetic
tggacttcagtctggatccc

SEQ ID NO: 12126 - DNA, 20 bp, Artificial Sequence
  Synthetic
agcaacagtctgtgttcgtg

SEQ ID NO: 12127 - DNA, 20 bp, Artificial Sequence
  Synthetic
aataccttgctggcctttcg

SEQ ID NO: 12128 - DNA, 20 bp, Artificial Sequence
  Synthetic
gaactggtaaacctcctgcc

SEQ ID NO: 12129 - DNA, 18 bp, Artificial Sequence
  Synthetic
tttgggactgggtctgca

SEQ ID NO: 12130 - DNA, 20 bp, Artificial Sequence
  Synthetic
taccactacataacgggggt

SEQ ID NO: 12131 - DNA, 18 bp, Artificial Sequence
  Synthetic
gcgcaggctaaatcgagg

SEQ ID NO: 12132 - DNA, 16 bp, Artificial Sequence
  Synthetic
acccgcccctcttgga

SEQ ID NO: 12133 - DNA, 18 bp, Artificial Sequence
  Synthetic
gggaccctgacctttcgt

SEQ ID NO: 12134 - DNA, 20 bp, Artificial Sequence
  Synthetic
ggttaaggccagactactgc

SEQ ID NO: 12135 - DNA, 20 bp, Artificial Sequence
  Synthetic
ccactagtatgggcaacacc

SEQ ID NO: 12136 - DNA, 20 bp, Artificial Sequence
  Synthetic
ggaaactgccaaacactccc

SEQ ID NO: 12137 - DNA, 19 bp, Artificial Sequence
  Synthetic
gggtaccccctttgagagc

SEQ ID NO: 12138 - DNA, 21 bp, Artificial Sequence
  Synthetic
ttttacctacccaggaaaagc

SEQ ID NO: 12139 - DNA, 20 bp, Artificial Sequence
  Synthetic
ctcagtttgcctgtccttca

SEQ ID NO: 12140 - DNA, 18 bp, Artificial Sequence
  Synthetic
accagacacccttcgaaa

SEQ ID NO: 12141 - DNA, 21 bp, Artificial Sequence
  Synthetic
tgcagattatcacaaccactc

SEQ ID NO: 12142 - DNA, 23 bp, Artificial Sequence
  Synthetic
ttgattacaagtctttcaaaacc

SEQ ID NO: 12143 - DNA, 21 bp, Artificial Sequence
  Synthetic
ttctgaacagtcattacgtct

SEQ ID NO: 12144 - DNA, 23 bp, Artificial Sequence
  Synthetic
ttgtgtaaaatgcttcattgatg

SEQ ID NO: 12145 - DNA, 20 bp, Artificial Sequence
  Synthetic
cacaaatggagctatcgttg

SEQ ID NO: 12146 - DNA, 22 bp, Artificial Sequence
  Synthetic
acttatttgatgatgctggtga

SEQ ID NO: 12147 - DNA, 23 bp, Artificial Sequence
  Synthetic
ttaaaacttactgacaatgttgc

SEQ ID NO: 12148 - DNA, 23 bp, Artificial Sequence
  Synthetic
aggcagcatatgaaaatttcaat

SEQ ID NO: 12149 - DNA, 22 bp, Artificial Sequence
  Synthetic
gtaagctttaccatgattctca

SEQ ID NO: 12150 - DNA, 24 bp, Artificial Sequence
  Synthetic
taatgctaaggaagagattctagg

SEQ ID NO: 12151 - DNA, 20 bp, Artificial Sequence
  Synthetic
gctgtatgcgttctcttaaa

SEQ ID NO: 12152 - DNA, 23 bp, Artificial Sequence
  Synthetic
atggtgctgatgttacaaaaatt

SEQ ID NO: 12153 - DNA, 23 bp, Artificial Sequence
  Synthetic
aaactatgacccatcttctacag

SEQ ID NO: 12154 - DNA, 23 bp, Artificial Sequence
  Synthetic
ggtcattacactcatataactgc

SEQ ID NO: 12155 - DNA, 22 bp, Artificial Sequence
  Synthetic
ttaaatcaaatgacaggcttca

SEQ ID NO: 12156 - DNA, 22 bp, Artificial Sequence
  Synthetic
tgaagaagtagtggaaaatcct

SEQ ID NO: 12157 - DNA, 25 bp, Artificial Sequence
  Synthetic
gcttttggtgtactcttatctaatt

SEQ ID NO: 12158 - DNA, 21 bp, Artificial Sequence
  Synthetic
gctagtcatttcatcagcaat

SEQ ID NO: 12159 - DNA, 19 bp, Artificial Sequence
  Synthetic
tgtgacacattttgcactg

SEQ ID NO: 12160 - DNA, 22 bp, Artificial Sequence
  Synthetic
agacgttggagatagtactgaa

SEQ ID NO: 12161 - DNA, 19 bp, Artificial Sequence
  Synthetic
tcttggcgcatgtattgac

SEQ ID NO: 12162 - DNA, 24 bp, Artificial Sequence
  Synthetic
tatgccagtacatacattgtcaat

SEQ ID NO: 12163 - DNA, 19 bp, Artificial Sequence
  Synthetic
ttcttgctgctgagtgtac

SEQ ID NO: 12164 - DNA, 24 bp, Artificial Sequence
  Synthetic
cgatgaatctcatagctaacatct

SEQ ID NO: 12165 - DNA, 25 bp, Artificial Sequence
  Synthetic
taggaaaagagtcatgtttaatgga

SEQ ID NO: 12166 - DNA, 20 bp, Artificial Sequence
  Synthetic
atgactttagcaactcaggt

SEQ ID NO: 12167 - DNA, 21 bp, Artificial Sequence
  Synthetic
gtgttattggccattctatgc

SEQ ID NO: 12168 - DNA, 23 bp, Artificial Sequence
  Synthetic
tatcaatggtgataggtggtttc

SEQ ID NO: 12169 - DNA, 25 bp, Artificial Sequence
  Synthetic
gtaagttcaagaaaattgttaaggg

SEQ ID NO: 12170 - DNA, 23 bp, Artificial Sequence
  Synthetic
tgtcattacacttgtttacaaag

SEQ ID NO: 12171 - DNA, 23 bp, Artificial Sequence
  Synthetic
tggtctctacacaagaatttagg

SEQ ID NO: 12172 - DNA, 21 bp, Artificial Sequence
  Synthetic
ttgcaaaagacacaactgaag

SEQ ID NO: 12173 - DNA, 19 bp, Artificial Sequence
  Synthetic
agttggaaaagatggcaga

SEQ ID NO: 12174 - DNA, 25 bp, Artificial Sequence
  Synthetic
gttcaacttagtgaaattaacatgg

SEQ ID NO: 12175 - DNA, 23 bp, Artificial Sequence
  Synthetic
ggcttaaacaacctaaatagagg

SEQ ID NO: 12176 - DNA, 20 bp, Artificial Sequence
  Synthetic
cacattgaccatccaaatcc

SEQ ID NO: 12177 - DNA, 23 bp, Artificial Sequence
  Synthetic
gcatactatgtctaactaccaac

SEQ ID NO: 12178 - DNA, 22 bp, Artificial Sequence
  Synthetic
catcttacgcgtatatgctaac

SEQ ID NO: 12179 - DNA, 23 bp, Artificial Sequence
  Synthetic
gctgaaatatgattttacggaag

SEQ ID NO: 12180 - DNA, 18 bp, Artificial Sequence
  Synthetic
catgcagcttctggcaat

SEQ ID NO: 12181 - DNA, 21 bp, Artificial Sequence
  Synthetic
gcgtatactaagcgtaatgtc

SEQ ID NO: 12182 - DNA, 21 bp, Artificial Sequence
  Synthetic
cttaggataatggcctctctt

SEQ ID NO: 12183 - DNA, 25 bp, Artificial Sequence
  Synthetic
tgtctctatagaaatagggatgttg

SEQ ID NO: 12184 - DNA, 25 bp, Artificial Sequence
  Synthetic
atgatattgtcaaaacagatggtac

SEQ ID NO: 12185 - DNA, 18 bp, Artificial Sequence
  Synthetic
gttgcggtgcctgtatta

SEQ ID NO: 12186 - DNA, 20 bp, Artificial Sequence
  Synthetic
tgctggcgattacatacttg

SEQ ID NO: 12187 - DNA, 20 bp, Artificial Sequence
  Synthetic
acatctcacactgtaatgcc

SEQ ID NO: 12188 - DNA, 24 bp, Artificial Sequence
  Synthetic
caaagtgaattcaacactagaaca

SEQ ID NO: 12189 - DNA, 23 bp, Artificial Sequence
  Synthetic
tgtgagtgctttagtttatgaca

SEQ ID NO: 12190 - DNA, 18 bp, Artificial Sequence
  Synthetic
ccgcttcaatgtggctat

SEQ ID NO: 12191 - DNA, 22 bp, Artificial Sequence
  Synthetic
gggtttcaaaatgaattaccaa

SEQ ID NO: 12192 - DNA, 25 bp, Artificial Sequence
  Synthetic
atgtagtgcgtattaagatagtaca

SEQ ID NO: 12193 - DNA, 18 bp, Artificial Sequence
  Synthetic
cgcgttgattggtctgtt

SEQ ID NO: 12194 - DNA, 18 bp, Artificial Sequence
  Synthetic
gttgatcgttacccagcc

SEQ ID NO: 12195 - DNA, 19 bp, Artificial Sequence
  Synthetic
taccgacagtacttggatg

SEQ ID NO: 12196 - DNA, 23 bp, Artificial Sequence
  Synthetic
agcacatgtatctacaataggtg

SEQ ID NO: 12197 - DNA, 22 bp, Artificial Sequence
  Synthetic
agagcagagacttagaggattt

SEQ ID NO: 12198 - DNA, 24 bp, Artificial Sequence
  Synthetic
atcttttacttgatgactttgtcg

SEQ ID NO: 12199 - DNA, 18 bp, Artificial Sequence
  Synthetic
taaaggagttgcaccagg

SEQ ID NO: 12200 - DNA, 19 bp, Artificial Sequence
  Synthetic
gcttatgggccatttctca

SEQ ID NO: 12201 - DNA, 25 bp, Artificial Sequence
  Synthetic
tctactaatgttgttatacgagcat

SEQ ID NO: 12202 - DNA, 21 bp, Artificial Sequence
  Synthetic
tttagagccattcttacagcc

SEQ ID NO: 12203 - DNA, 24 bp, Artificial Sequence
  Synthetic
ctaattgtgttgctgattactctg

SEQ ID NO: 12204 - DNA, 23 bp, Artificial Sequence
  Synthetic
tataggtatcttagacatggcaa

SEQ ID NO: 12205 - DNA, 21 bp, Artificial Sequence
  Synthetic
ctgatttcactgattccgttc

SEQ ID NO: 12206 - DNA, 22 bp, Artificial Sequence
  Synthetic
tttgtgctagttaccatacagt

SEQ ID NO: 12207 - DNA, 21 bp, Artificial Sequence
  Synthetic
gaccctctaaagccaactaag

SEQ ID NO: 12208 - DNA, 21 bp, Artificial Sequence
  Synthetic
ttggagttacccaaaatgttc

SEQ ID NO: 12209 - DNA, 19 bp, Artificial Sequence
  Synthetic
ttctgctaatcttgctgct

SEQ ID NO: 12210 - DNA, 23 bp, Artificial Sequence
  Synthetic
atacatttgtctcaggaaattgt

SEQ ID NO: 12211 - DNA, 20 bp, Artificial Sequence
  Synthetic
gcttcattgctggactaatt

SEQ ID NO: 12212 - DNA, 18 bp, Artificial Sequence
  Synthetic
ggatggcttgttattggc

SEQ ID NO: 12213 - DNA, 22 bp, Artificial Sequence
  Synthetic
caaaactcaaagaagactacca

SEQ ID NO: 12214 - DNA, 24 bp, Artificial Sequence
  Synthetic
aaagtgagtacgaacttatgtact

SEQ ID NO: 12215 - DNA, 21 bp, Artificial Sequence
  Synthetic
attaccgttgaggagcttaaa

SEQ ID NO: 12216 - DNA, 20 bp, Artificial Sequence
  Synthetic
ggggacaattgtgaccagac

SEQ ID NO: 12217 - DNA, 25 bp, Artificial Sequence
  Synthetic
ggagttagattatccataaaacgaa

SEQ ID NO: 12218 - DNA, 24 bp, Artificial Sequence
  Synthetic
catgaaacttctcattgttttgac

SEQ ID NO: 12219 - DNA, 20 bp, Artificial Sequence
  Synthetic
tggaccccaatcaaaccaac

SEQ ID NO: 12220 - DNA, 19 bp, Artificial Sequence
  Synthetic
taggaactggcccagaagc

SEQ ID NO: 12221 - DNA, 20 bp, Artificial Sequence
  Synthetic
tgctagacagattgaaccag

SEQ ID NO: 12222 - DNA, 18 bp, Artificial Sequence
  Synthetic
gggaacatggctgactta

SEQ ID NO: 12223 - DNA, 20 bp, Artificial Sequence
  Synthetic
cagatgggctatgtaaacgt

SEQ ID NO: 12224 - DNA, 19 bp, Artificial Sequence
  Synthetic
ttaaaactgggagtgggtt

SEQ ID NO: 12225 - DNA, 18 bp, Artificial Sequence
  Synthetic
aattgggttggtcgctcc

SEQ ID NO: 12226 - DNA, 18 bp, Artificial Sequence
  Synthetic
gtaatgcgtaagtgcggg

SEQ ID NO: 12227 - DNA, 25 bp, Artificial Sequence
  Synthetic
tcaagaccctagtaaatttactgat

SEQ ID NO: 12228 - DNA, 21 bp, Artificial Sequence
  Synthetic
catccaacagattctacacct

SEQ ID NO: 12229 - DNA, 18 bp, Artificial Sequence
  Synthetic
ggtacaatcacacccacc

SEQ ID NO: 12230 - DNA, 24 bp, Artificial Sequence
  Synthetic
acacaatccatacctataacagta

SEQ ID NO: 12231 - DNA, 24 bp, Artificial Sequence
  Synthetic
cactcattcctgttaacaatacac

SEQ ID NO: 12232 - DNA, 25 bp, Artificial Sequence
  Synthetic
tgaaactattaattgcatacactcc

SEQ ID NO: 12233 - DNA, 18 bp, Artificial Sequence
  Synthetic
atggtgtgcatggtttct

SEQ ID NO: 12234 - DNA, 25 bp, Artificial Sequence
  Synthetic
aatgatagtggacatatagtattgc

SEQ ID NO: 12235 - DNA, 25 bp, Artificial Sequence
  Synthetic
accatatgtgttagaatagtgacat

SEQ ID NO: 12236 - DNA, 25 bp, Artificial Sequence
  Synthetic
cttcatctctttaattctgatcttg

SEQ ID NO: 12237 - DNA, 23 bp, Artificial Sequence
  Synthetic
gattgtggaggaaaactattgtg

SEQ ID NO: 12238 - DNA, 24 bp, Artificial Sequence
  Synthetic
taatggtaaggaatagttctgatc

SEQ ID NO: 12239 - DNA, 23 bp, Artificial Sequence
  Synthetic
aaccagttgcagttctaatacat

SEQ ID NO: 12240 - DNA, 23 bp, Artificial Sequence
  Synthetic
gcagatcttccagataaaggaaa

SEQ ID NO: 12241 - DNA, 25 bp, Artificial Sequence
  Synthetic
agtgttctattgaaagagatttagg

SEQ ID NO: 12242 - DNA, 20 bp, Artificial Sequence
  Synthetic
aaattcacaggtcttggcat

SEQ ID NO: 12243 - DNA, 24 bp, Artificial Sequence
  Synthetic
taacatcttattgagtggtaccaa

SEQ ID NO: 12244 - DNA, 25 bp, Artificial Sequence
  Synthetic
gtcatagaagctaatagtgtgaatg

SEQ ID NO: 12245 - DNA, 19 bp, Artificial Sequence
  Synthetic
tcttgccaaagaaggagaa

SEQ ID NO: 12246 - DNA, 22 bp, Artificial Sequence
  Synthetic
ttaagtgacgaatcattgtcag

SEQ ID NO: 12247 - DNA, 23 bp, Artificial Sequence
  Synthetic
gttcatataactcctgaaaaagc

SEQ ID NO: 12248 - DNA, 25 bp, Artificial Sequence
  Synthetic
catgaataagtctagtcatttttgg

SEQ ID NO: 12249 - DNA, 24 bp, Artificial Sequence
  Synthetic
tttagatcttacttctgaagatgc

SEQ ID NO: 12250 - DNA, 25 bp, Artificial Sequence
  Synthetic
taaagaacatactggagatattgtg

SEQ ID NO: 12251 - DNA, 23 bp, Artificial Sequence
  Synthetic
tgaaatgctggagaaatagatgt

SEQ ID NO: 12252 - DNA, 23 bp, Artificial Sequence
  Synthetic
aaatgctggtaaacctattcaag

SEQ ID NO: 12253 - DNA, 25 bp, Artificial Sequence
  Synthetic
atcttcaggagtttgaaatagaaga

SEQ ID NO: 12254 - DNA, 25 bp, Artificial Sequence
  Synthetic
ctcatatagtagtgacaagtaccac

SEQ ID NO: 12255 - DNA, 23 bp, Artificial Sequence
  Synthetic
aggtctctgctaatcaatatagg

SEQ ID NO: 12256 - DNA, 20 bp, Artificial Sequence
  Synthetic
ggatagatccgcagtacctt

SEQ ID NO: 12257 - DNA, 23 bp, Artificial Sequence
  Synthetic
tgaggagtttgaaattgaaatgg

SEQ ID NO: 12258 - DNA, 18 bp, Artificial Sequence
  Synthetic
ctggacttgagcctggaa

SEQ ID NO: 12259 - DNA, 18 bp, Artificial Sequence
  Synthetic
cgcacagagtgtagactt

SEQ ID NO: 12260 - DNA, 20 bp, Artificial Sequence
  Synthetic
aattggagaactgtctgtca

SEQ ID NO: 12261 - DNA, 22 bp, Artificial Sequence
  Synthetic
ctcaaattactgatgaatgcga

SEQ ID NO: 12262 - DNA, 21 bp, Artificial Sequence
  Synthetic
ctcgctgttcaattagatctg

SEQ ID NO: 12263 - DNA, 22 bp, Artificial Sequence
  Synthetic
aatattttctgaggatgcagac

SEQ ID NO: 12264 - DNA, 20 bp, Artificial Sequence
  Synthetic
actaccaactaccaccaccg

SEQ ID NO: 12265 - DNA, 20 bp, Artificial Sequence
  Synthetic
cgtgcacctgaaattactgt

SEQ ID NO: 12266 - DNA, 18 bp, Artificial Sequence
  Synthetic
ctttgagtagcacaccca

SEQ ID NO: 12267 - DNA, 18 bp, Artificial Sequence
  Synthetic
cacccgtgagtatcttgc

SEQ ID NO: 12268 - DNA, 21 bp, Artificial Sequence
  Synthetic
agaagcacgcactttcttaaa

SEQ ID NO: 12269 - DNA, 19 bp, Artificial Sequence
  Synthetic
ggagattcatcacagagcc

SEQ ID NO: 12270 - DNA, 18 bp, Artificial Sequence
  Synthetic
ccatagcagagcagcaag

SEQ ID NO: 12271 - DNA, 21 bp, Artificial Sequence
  Synthetic
agcaaaagcagggtagataat

SEQ ID NO: 12272 - DNA, 20 bp, Artificial Sequence
  Synthetic
aaggacccaaagaaaactgg

SEQ ID NO: 12273 - DNA, 20 bp, Artificial Sequence
  Synthetic
atgatggatcaggtacggga

SEQ ID NO: 12274 - DNA, 23 bp, Artificial Sequence
  Synthetic
atgagaatccagcacataaaagt

SEQ ID NO: 12275 - DNA, 25 bp, Artificial Sequence
  Synthetic
attagctcagagtcaattaaaacag

SEQ ID NO: 12276 - DNA, 25 bp, Artificial Sequence
  Synthetic
actttattcaaggagatgaaaatcg

SEQ ID NO: 12277 - DNA, 23 bp, Artificial Sequence
  Synthetic
tagtctggttgctaatttcaaac

SEQ ID NO: 12278 - DNA, 25 bp, Artificial Sequence
  Synthetic
gaattttcagcagtatttacagatg

SEQ ID NO: 12279 - DNA, 25 bp, Artificial Sequence
  Synthetic
gataatataagtggagaaaagggaa

SEQ ID NO: 12280 - DNA, 21 bp, Artificial Sequence
  Synthetic
ttaacagcaggtattgtaggc

SEQ ID NO: 12281 - DNA, 24 bp, Artificial Sequence
  Synthetic
tcttagctgatttagagtcaatca

SEQ ID NO: 12282 - DNA, 24 bp, Artificial Sequence
  Synthetic
aatgctgaagtagttgttatctca

SEQ ID NO: 12283 - DNA, 18 bp, Artificial Sequence
  Synthetic
acattccagcccttttgg

SEQ ID NO: 12284 - DNA, 19 bp, Artificial Sequence
  Synthetic
tacgtagtaagggttcagc

SEQ ID NO: 12285 - DNA, 24 bp, Artificial Sequence
  Synthetic
agctatagcctttatcatttttcg

SEQ ID NO: 12286 - DNA, 20 bp, Artificial Sequence
  Synthetic
ctgaatattgcggtaccatc

SEQ ID NO: 12287 - DNA, 21 bp, Artificial Sequence
  Synthetic
cttcaggcgtttttttaaggt

SEQ ID NO: 12288 - DNA, 23 bp, Artificial Sequence
  Synthetic
aggtggtaagctgatgattaatc

SEQ ID NO: 12289 - DNA, 20 bp, Artificial Sequence
  Synthetic
aatgccagagatgagttgag

SEQ ID NO: 12290 - DNA, 24 bp, Artificial Sequence
  Synthetic
gaaaaaggagaagtttctatgact

SEQ ID NO: 12291 - DNA, 23 bp, Artificial Sequence
  Synthetic
aacgctgatattgttttagttgg

SEQ ID NO: 12292 - DNA, 19 bp, Artificial Sequence
  Synthetic
ggtgaacctttactcgttg

SEQ ID NO: 12293 - DNA, 23 bp, Artificial Sequence
  Synthetic
tgatgacattgatttgattgaag

SEQ ID NO: 12294 - DNA, 25 bp, Artificial Sequence
  Synthetic
ctatcagtcatattaaagatggtga

SEQ ID NO: 12295 - DNA, 23 bp, Artificial Sequence
  Synthetic
catcttagacatactagcaggat

SEQ ID NO: 12296 - DNA, 23 bp, Artificial Sequence
  Synthetic
ccaccagacctttaaaaagaaac

SEQ ID NO: 12297 - DNA, 22 bp, Artificial Sequence
  Synthetic
tatagctaaatcatcctcgtgg

SEQ ID NO: 12298 - DNA, 25 bp, Artificial Sequence
  Synthetic
tctgtattaggataagtattagctc

SEQ ID NO: 12299 - DNA, 20 bp, Artificial Sequence
  Synthetic
tttagcttgcccttagaaac

SEQ ID NO: 12300 - DNA, 23 bp, Artificial Sequence
  Synthetic
tttaggggtgacttttatgaaga

SEQ ID NO: 12301 - DNA, 22 bp, Artificial Sequence
  Synthetic
atacttatactcttcgcgatgg

SEQ ID NO: 12302 - DNA, 18 bp, Artificial Sequence
  Synthetic
tggtacaaccgatccatc

SEQ ID NO: 12303 - DNA, 22 bp, Artificial Sequence
  Synthetic
tttaacatggaatttgaaccgt

SEQ ID NO: 12304 - DNA, 25 bp, Artificial Sequence
  Synthetic
atggtttctataatcctgaaaaagc

SEQ ID NO: 12305 - DNA, 19 bp, Artificial Sequence
  Synthetic
acaaagcagtgctattcgt

SEQ ID NO: 12306 - DNA, 23 bp, Artificial Sequence
  Synthetic
aaataaaaaggaagcagagatga

SEQ ID NO: 12307 - DNA, 20 bp, Artificial Sequence
  Synthetic
acggtcaggcaacgaatttg

SEQ ID NO: 12308 - DNA, 18 bp, Artificial Sequence
  Synthetic
agcacaaaaagctgtagc

SEQ ID NO: 12309 - DNA, 19 bp, Artificial Sequence
  Synthetic
ggaaacagcgattctatgc

SEQ ID NO: 12310 - DNA, 22 bp, Artificial Sequence
  Synthetic
tgatgatatcactttgcttgac

SEQ ID NO: 12311 - DNA, 20 bp, Artificial Sequence
  Synthetic
ttgagtgtatgtgggacatg

SEQ ID NO: 12312 - DNA, 20 bp, Artificial Sequence
  Synthetic
ctgtagaaatgcgacgctat

SEQ ID NO: 12313 - DNA, 18 bp, Artificial Sequence
  Synthetic
aaagcagcacatacggta

SEQ ID NO: 12314 - DNA, 23 bp, Artificial Sequence
  Synthetic
gtcaacctcattttaaagaacaa

SEQ ID NO: 12315 - DNA, 22 bp, Artificial Sequence
  Synthetic
cattcaatgtaatgggattggt

SEQ ID NO: 12316 - DNA, 18 bp, Artificial Sequence
  Synthetic
ccaagcggctaaaaatgg

SEQ ID NO: 12317 - DNA, 19 bp, Artificial Sequence
  Synthetic
caaaggttttggttgggga

SEQ ID NO: 12318 - DNA, 19 bp, Artificial Sequence
  Synthetic
ttttgacgaggaaaggagg

SEQ ID NO: 12319 - DNA, 20 bp, Artificial Sequence
  Synthetic
gtcaggtttattatgaccgc

SEQ ID NO: 12320 - DNA, 23 bp, Artificial Sequence
  Synthetic
gacatgtttgatagaaaaaaggc

SEQ ID NO: 12321 - DNA, 21 bp, Artificial Sequence
  Synthetic
gaagatcagctctatcacagt

SEQ ID NO: 12322 - DNA, 21 bp, Artificial Sequence
  Synthetic
tattttagcaggagcacagtt

SEQ ID NO: 12323 - DNA, 25 bp, Artificial Sequence
  Synthetic
aagaattatggaaagagttgttagg

SEQ ID NO: 12324 - DNA, 19 bp, Artificial Sequence
  Synthetic
caaagcagccaatctgaca

SEQ ID NO: 12325 - DNA, 23 bp, Artificial Sequence
  Synthetic
aacaagaaaattagtcgttgctg

SEQ ID NO: 12326 - DNA, 25 bp, Artificial Sequence
  Synthetic
aaagtgaccaaaaatattagtgacc

SEQ ID NO: 12327 - DNA, 24 bp, Artificial Sequence
  Synthetic
tgaaacacatgtcaaaaacagtag

SEQ ID NO: 12328 - DNA, 24 bp, Artificial Sequence
  Synthetic
cggatttctgtcaataattcttct

SEQ ID NO: 12329 - DNA, 23 bp, Artificial Sequence
  Synthetic
agtaaacaaaatccaatggaatc

SEQ ID NO: 12330 - DNA, 25 bp, Artificial Sequence
  Synthetic
ggggatgtttttaaatttattgagg

SEQ ID NO: 12331 - DNA, 23 bp, Artificial Sequence
  Synthetic
tcaagctctttctaaaaaatacg

SEQ ID NO: 12332 - DNA, 18 bp, Artificial Sequence
  Synthetic
ggaagggtttatggacgt

SEQ ID NO: 12333 - DNA, 23 bp, Artificial Sequence
  Synthetic
gcaatcacaaattgtttatgtgg

SEQ ID NO: 12334 - DNA, 21 bp, Artificial Sequence
  Synthetic
tagctcttggtgagattgatg

SEQ ID NO: 12335 - DNA, 23 bp, Artificial Sequence
  Synthetic
caatttcaagcaaccttaacaga

SEQ ID NO: 12336 - DNA, 23 bp, Artificial Sequence
  Synthetic
cttgagacgtttaatcattgacc

SEQ ID NO: 12337 - DNA, 19 bp, Artificial Sequence
  Synthetic
tatcacaccaccaccaagt

SEQ ID NO: 12338 - DNA, 21 bp, Artificial Sequence
  Synthetic
gcaaggagaatgtgaagacat

SEQ ID NO: 12339 - DNA, 18 bp, Artificial Sequence
  Synthetic
tggatgtttgattgcggt

SEQ ID NO: 12340 - DNA, 22 bp, Artificial Sequence
  Synthetic
gataagtttgaggtctatgcag

SEQ ID NO: 12341 - DNA, 18 bp, Artificial Sequence
  Synthetic
ccacctatggtaagggtg

SEQ ID NO: 12342 - DNA, 22 bp, Artificial Sequence
  Synthetic
cagcttgattttattaggacgt

SEQ ID NO: 12343 - DNA, 25 bp, Artificial Sequence
  Synthetic
tcaccttattaatattgtgtccatg

SEQ ID NO: 12344 - DNA, 24 bp, Artificial Sequence
  Synthetic
cttctttaagctagcaaagacaaa

SEQ ID NO: 12345 - DNA, 19 bp, Artificial Sequence
  Synthetic
aggaaaaagcagaagcagc

SEQ ID NO: 12346 - DNA, 18 bp, Artificial Sequence
  Synthetic
gcgagcagttgaagtagc

SEQ ID NO: 12347 - DNA, 22 bp, Artificial Sequence
  Synthetic
atggggattttaaatgtgactc

SEQ ID NO: 12348 - DNA, 18 bp, Artificial Sequence
  Synthetic
caggtttgtacgacggtc

SEQ ID NO: 12349 - DNA, 18 bp, Artificial Sequence
  Synthetic
cggcaacaccaaagctaa

SEQ ID NO: 12350 - DNA, 21 bp, Artificial Sequence
  Synthetic
gggatggtgtttgatagtgtc

SEQ ID NO: 12351 - DNA, 18 bp, Artificial Sequence
  Synthetic
gccaggctgattttctca

SEQ ID NO: 12352 - DNA, 23 bp, Artificial Sequence
  Synthetic
acttcatgggattgatattcgag

SEQ ID NO: 12353 - DNA, 23 bp, Artificial Sequence
  Synthetic
gccaaattccatagtttaacagg

SEQ ID NO: 12354 - DNA, 23 bp, Artificial Sequence
  Synthetic
aaacaacctttagaatttccatc

SEQ ID NO: 12355 - DNA, 24 bp, Artificial Sequence
  Synthetic
ggtcatttgaggaagattaaagac

SEQ ID NO: 12356 - DNA, 25 bp, Artificial Sequence
  Synthetic
ctaaaatagctacaataattccagc

SEQ ID NO: 12357 - DNA, 20 bp, Artificial Sequence
  Synthetic
tctccaaaagctcttgccat

SEQ ID NO: 12358 - DNA, 18 bp, Artificial Sequence
  Synthetic
ccaaccaaaagctcaacc

SEQ ID NO: 12359 - DNA, 19 bp, Artificial Sequence
  Synthetic
aaagccagacacaaaaacg

SEQ ID NO: 12360 - DNA, 18 bp, Artificial Sequence
  Synthetic
agccacgttcttagcatt

SEQ ID NO: 12361 - DNA, 22 bp, Artificial Sequence
  Synthetic
tactgagattggaaaccttgac

SEQ ID NO: 12362 - DNA, 23 bp, Artificial Sequence
  Synthetic
cgctaaaatcttaaccctttagg

SEQ ID NO: 12363 - DNA, 18 bp, Artificial Sequence
  Synthetic
agaccatctggcaagagg

SEQ ID NO: 12364 - DNA, 22 bp, Artificial Sequence
  Synthetic
catcttcattttcttcaggagc

SEQ ID NO: 12365 - DNA, 19 bp, Artificial Sequence
  Synthetic
tagacaccactgctggaaa

SEQ ID NO: 12366 - DNA, 22 bp, Artificial Sequence
  Synthetic
taacacgtctaacaggaacttg

SEQ ID NO: 12367 - DNA, 22 bp, Artificial Sequence
  Synthetic
attctttttccttttctagggc

SEQ ID NO: 12368 - DNA, 22 bp, Artificial Sequence
  Synthetic
tgtaaagagtttagttgggtct

SEQ ID NO: 12369 - DNA, 25 bp, Artificial Sequence
  Synthetic
accatcacataatacttaatgtcga

SEQ ID NO: 12370 - DNA, 19 bp, Artificial Sequence
  Synthetic
aacatcaaccctaacccca

SEQ ID NO: 12371 - DNA, 22 bp, Artificial Sequence
  Synthetic
ggtacaaagtttcaaaagaagc

SEQ ID NO: 12372 - DNA, 21 bp, Artificial Sequence
  Synthetic
tttagtcatgacacagccttt

SEQ ID NO: 12373 - DNA, 18 bp, Artificial Sequence
  Synthetic
ggttgttccttgtgcttg

SEQ ID NO: 12374 - DNA, 20 bp, Artificial Sequence
  Synthetic
agttatctcttgagcagtga

SEQ ID NO: 12375 - DNA, 22 bp, Artificial Sequence
  Synthetic
tgtctaaagcagtcaataaggt

SEQ ID NO: 12376 - DNA, 21 bp, Artificial Sequence
  Synthetic
tatcatagaagactgtctgca

SEQ ID NO: 12377 - DNA, 22 bp, Artificial Sequence
  Synthetic
taagtttcagagacttgaccaa

SEQ ID NO: 12378 - DNA, 25 bp, Artificial Sequence
  Synthetic
ttctttagtattcatgactccattc

SEQ ID NO: 12379 - DNA, 20 bp, Artificial Sequence
  Synthetic
attgtaaaggcgtgtttcac

SEQ ID NO: 12380 - DNA, 22 bp, Artificial Sequence
  Synthetic
tttgtattttgtcccaacattg

SEQ ID NO: 12381 - DNA, 21 bp, Artificial Sequence
  Synthetic
tgatgctgtaacggtaaatgg

SEQ ID NO: 12382 - DNA, 20 bp, Artificial Sequence
  Synthetic
tttgaaatcatctcgctgtt

SEQ ID NO: 12383 - DNA, 21 bp, Artificial Sequence
  Synthetic
acgttttttgtaaagctctgc

SEQ ID NO: 12384 - DNA, 18 bp, Artificial Sequence
  Synthetic
ctcatcatctcccgcttg

SEQ ID NO: 12385 - DNA, 18 bp, Artificial Sequence
  Synthetic
aaccgtccataaccctga

SEQ ID NO: 12386 - DNA, 24 bp, Artificial Sequence
  Synthetic
aatacaatcaaccaagttagttcg

SEQ ID NO: 12387 - DNA, 19 bp, Artificial Sequence
  Synthetic
tgaccctctgcttgtaagg

SEQ ID NO: 12388 - DNA, 19 bp, Artificial Sequence
  Synthetic
tcatcttgaggggggcttc

SEQ ID NO: 12389 - DNA, 20 bp, Artificial Sequence
  Synthetic
actcttgggggagataagcc

SEQ ID NO: 12390 - DNA, 19 bp, Artificial Sequence
  Synthetic
ttgcgctaaaccctcctct

SEQ ID NO: 12391 - DNA, 20 bp, Artificial Sequence
  Synthetic
ctactaaaattcgctcccca

SEQ ID NO: 12392 - DNA, 21 bp, Artificial Sequence
  Synthetic
accttcttcacacatagaacg

SEQ ID NO: 12393 - DNA, 18 bp, Artificial Sequence
  Synthetic
cggctccgtctcttcaac

SEQ ID NO: 12394 - DNA, 18 bp, Artificial Sequence
  Synthetic
gatggagcctagcgggat

SEQ ID NO: 12395 - DNA, 20 bp, Artificial Sequence
  Synthetic
tcaaagcctttaccttcagt

SEQ ID NO: 12396 - DNA, 18 bp, Artificial Sequence
  Synthetic
ttggaagcgaccaagagt

SEQ ID NO: 12397 - DNA, 20 bp, Artificial Sequence
  Synthetic
cttttacagcttcgacaact

SEQ ID NO: 12398 - DNA, 22 bp, Artificial Sequence
  Synthetic
taattttttggtcaaagtcgtc

SEQ ID NO: 12399 - DNA, 24 bp, Artificial Sequence
  Synthetic
taatagagattactgtttctgggt

SEQ ID NO: 12400 - DNA, 21 bp, Artificial Sequence
  Synthetic
tagtttaatcagcaagcgaaa

SEQ ID NO: 12401 - DNA, 24 bp, Artificial Sequence
  Synthetic
cttttttaacatcatctgtcaacc

SEQ ID NO: 12402 - DNA, 24 bp, Artificial Sequence
  Synthetic
gccattatcagtgaacttcataat

SEQ ID NO: 12403 - DNA, 22 bp, Artificial Sequence
  Synthetic
tctatgacactattatccagca

SEQ ID NO: 12404 - DNA, 24 bp, Artificial Sequence
  Synthetic
ggagtgctctacaaaatacttaaa

SEQ ID NO: 12405 - DNA, 21 bp, Artificial Sequence
  Synthetic
aagtcgttaaagcagacaatg

SEQ ID NO: 12406 - DNA, 23 bp, Artificial Sequence
  Synthetic
atgggtagatcaaaacaacaaac

SEQ ID NO: 12407 - DNA, 19 bp, Artificial Sequence
  Synthetic
accgcttctgcttttcaat

SEQ ID NO: 12408 - DNA, 18 bp, Artificial Sequence
  Synthetic
ccggcactcctatctttg

SEQ ID NO: 12409 - DNA, 22 bp, Artificial Sequence
  Synthetic
tactaaccgttaagagtattgc

SEQ ID NO: 12410 - DNA, 21 bp, Artificial Sequence
  Synthetic
accgtcatgaacaattagacc

SEQ ID NO: 12411 - DNA, 18 bp, Artificial Sequence
  Synthetic
atccagacgctttcccaa

SEQ ID NO: 12412 - DNA, 21 bp, Artificial Sequence
  Synthetic
tgaccttaattcaagcctttg

SEQ ID NO: 12413 - DNA, 18 bp, Artificial Sequence
  Synthetic
aagtgggcatgtcaacct

SEQ ID NO: 12414 - DNA, 22 bp, Artificial Sequence
  Synthetic
caggttcaacttttgatagcat

SEQ ID NO: 12415 - DNA, 21 bp, Artificial Sequence
  Synthetic
ttttgaaaacttgctggaatc

SEQ ID NO: 12416 - DNA, 18 bp, Artificial Sequence
  Synthetic
tttggtctggcaaagcac

SEQ ID NO: 12417 - DNA, 25 bp, Artificial Sequence
  Synthetic
cgtttatctggtatgatagttttac

SEQ ID NO: 12418 - DNA, 18 bp, Artificial Sequence
  Synthetic
cagggggggaaatctttg

SEQ ID NO: 12419 - DNA, 18 bp, Artificial Sequence
  Synthetic
acgatgctaaagccttct

SEQ ID NO: 12420 - DNA, 22 bp, Artificial Sequence
  Synthetic
gtgctaatacactctttgctaa

SEQ ID NO: 12421 - DNA, 24 bp, Artificial Sequence
  Synthetic
ctgcaagctatctaaaatagtcaa

SEQ ID NO: 12422 - DNA, 25 bp, Artificial Sequence
  Synthetic
atccgttagataatgattttcatcg

SEQ ID NO: 12423 - DNA, 18 bp, Artificial Sequence
  Synthetic
aatcaagtgcgcaggatg

SEQ ID NO: 12424 - DNA, 22 bp, Artificial Sequence
  Synthetic
ctttttcaattgaccatcctga

SEQ ID NO: 12425 - DNA, 17 bp, Artificial Sequence
  Synthetic
gcaacccccgatggaga

SEQ ID NO: 12426 - DNA, 20 bp, Artificial Sequence
  Synthetic
ttcttccacctgacggtaga

SEQ ID NO: 12427 - DNA, 20 bp, Artificial Sequence
  Synthetic
ccttgcacgatctacatccg

SEQ ID NO: 12428 - DNA, 18 bp, Artificial Sequence
  Synthetic
ctgctgtgcactcgtcat

SEQ ID NO: 12429 - DNA, 19 bp, Artificial Sequence
  Synthetic
cttgcgaggcatctccttt

SEQ ID NO: 12430 - DNA, 19 bp, Artificial Sequence
  Synthetic
gctattggccaaggtgtgt

SEQ ID NO: 12431 - DNA, 20 bp, Artificial Sequence
  Synthetic
ttagaggactcttgcgagga

SEQ ID NO: 12432 - DNA, 19 bp, Artificial Sequence
  Synthetic
gccttattgggctgatgcg

SEQ ID NO: 12433 - DNA, 18 bp, Artificial Sequence
  Synthetic
caatttggaccccccccg

SEQ ID NO: 12434 - DNA, 20 bp, Artificial Sequence
  Synthetic
gacacccaggcccataattc

SEQ ID NO: 12435 - DNA, 18 bp, Artificial Sequence
  Synthetic
ggtgcactaccggtttgt

SEQ ID NO: 12436 - DNA, 18 bp, Artificial Sequence
  Synthetic
gacccaaggcagatccct

SEQ ID NO: 12437 - DNA, 16 bp, Artificial Sequence
  Synthetic
gagcggacggccaaca

SEQ ID NO: 12438 - DNA, 18 bp, Artificial Sequence
  Synthetic
ttggcggtcttgtcgact

SEQ ID NO: 12439 - DNA, 20 bp, Artificial Sequence
  Synthetic
actctttaggccttgagtgc

SEQ ID NO: 12440 - DNA, 20 bp, Artificial Sequence
  Synthetic
ctaccagcaagagcctcgag

SEQ ID NO: 12441 - DNA, 16 bp, Artificial Sequence
  Synthetic
aggctgcgcaacgtca

SEQ ID NO: 12442 - DNA, 18 bp, Artificial Sequence
  Synthetic
ccatgtaccccggtggag

SEQ ID NO: 12443 - DNA, 19 bp, Artificial Sequence
  Synthetic
gctggttccaaactcggtg

SEQ ID NO: 12444 - DNA, 19 bp, Artificial Sequence
  Synthetic
tggtgcccccattaattcg

SEQ ID NO: 12445 - DNA, 19 bp, Artificial Sequence
  Synthetic
cagcacctccaggataggc

SEQ ID NO: 12446 - DNA, 22 bp, Artificial Sequence
  Synthetic
ttgtatactatcaactgccact

SEQ ID NO: 12447 - DNA, 22 bp, Artificial Sequence
  Synthetic
gactttgtgtctactcttctca

SEQ ID NO: 12448 - DNA, 19 bp, Artificial Sequence
  Synthetic
gttttgccattccttctgt

SEQ ID NO: 12449 - DNA, 18 bp, Artificial Sequence
  Synthetic
aatgctgtgtatagggcg

SEQ ID NO: 12450 - DNA, 23 bp, Artificial Sequence
  Synthetic
gaaattcattagaccctttttgc

SEQ ID NO: 12451 - DNA, 24 bp, Artificial Sequence
  Synthetic
ctacaactgaagttaagttttctg

SEQ ID NO: 12452 - DNA, 22 bp, Artificial Sequence
  Synthetic
aaactgcagtttttgtgtacac

SEQ ID NO: 12453 - DNA, 25 bp, Artificial Sequence
  Synthetic
acagattggttaaaaactcttaagc

SEQ ID NO: 12454 - DNA, 23 bp, Artificial Sequence
  Synthetic
gatgatgttgttaccagtctttg

SEQ ID NO: 12455 - DNA, 22 bp, Artificial Sequence
  Synthetic
ttttgagatgtcttgtgattgt

SEQ ID NO: 12456 - DNA, 23 bp, Artificial Sequence
  Synthetic
actgtttgttttgttgatgttga

SEQ ID NO: 12457 - DNA, 20 bp, Artificial Sequence
  Synthetic
gttaaaactgtaccagctgg

SEQ ID NO: 12458 - DNA, 23 bp, Artificial Sequence
  Synthetic
atgttaaagatgttgttgttgag

SEQ ID NO: 12459 - DNA, 23 bp, Artificial Sequence
  Synthetic
tgaacaatattcaacttgtgaca

SEQ ID NO: 12460 - DNA, 25 bp, Artificial Sequence
  Synthetic
gattttaagtacattgagaatggtc

SEQ ID NO: 12461 - DNA, 22 bp, Artificial Sequence
  Synthetic
actattagaactttggctacac

SEQ ID NO: 12462 - DNA, 24 bp, Artificial Sequence
  Synthetic
gaaacttaagaattatgctgcaag

SEQ ID NO: 12463 - DNA, 21 bp, Artificial Sequence
  Synthetic
ctagacatgtcatagcaccat

SEQ ID NO: 12464 - DNA, 23 bp, Artificial Sequence
  Synthetic
aatgttagaaatgatggtactgt

SEQ ID NO: 12465 - DNA, 25 bp, Artificial Sequence
  Synthetic
ggttatttagtttgtacttattggg

SEQ ID NO: 12466 - DNA, 23 bp, Artificial Sequence
  Synthetic
gtgttgcttcatcatttgttagt

SEQ ID NO: 12467 - DNA, 23 bp, Artificial Sequence
  Synthetic
attctaagattgtttgtgatggt

SEQ ID NO: 12468 - DNA, 23 bp, Artificial Sequence
  Synthetic
ttaaataccttacgtagaggtgc

SEQ ID NO: 12469 - DNA, 21 bp, Artificial Sequence
  Synthetic
gttcctcaccctagtatggat

SEQ ID NO: 12470 - DNA, 25 bp, Artificial Sequence
  Synthetic
ttaaaaatgctgatcttaaggatgg

SEQ ID NO: 12471 - DNA, 25 bp, Artificial Sequence
  Synthetic
tattttgatagtaagggttggtatg

SEQ ID NO: 12472 - DNA, 20 bp, Artificial Sequence
  Synthetic
cttttggtccactatgtcgt

SEQ ID NO: 12473 - DNA, 25 bp, Artificial Sequence
  Synthetic
ctatatcttatgaagaacaggatgc

SEQ ID NO: 12474 - DNA, 24 bp, Artificial Sequence
  Synthetic
ttatcccaaatgtgatagagcttt

SEQ ID NO: 12475 - DNA, 25 bp, Artificial Sequence
  Synthetic
accagaataatgtctttatgagtac

SEQ ID NO: 12476 - DNA, 23 bp, Artificial Sequence
  Synthetic
gggtgttcttgaatctttttctg

SEQ ID NO: 12477 - DNA, 24 bp, Artificial Sequence
  Synthetic
aactactaagttagttcctggtat

SEQ ID NO: 12478 - DNA, 23 bp, Artificial Sequence
  Synthetic
atagtttgttttgtacacgtgac

SEQ ID NO: 12479 - DNA, 23 bp, Artificial Sequence
  Synthetic
ttgttgttttaaacatgcattgg

SEQ ID NO: 12480 - DNA, 25 bp, Artificial Sequence
  Synthetic
agtgttattcatgacattggtaatc

SEQ ID NO: 12481 - DNA, 19 bp, Artificial Sequence
  Synthetic
gtgagttacctgttgcagt

SEQ ID NO: 12482 - DNA, 25 bp, Artificial Sequence
  Synthetic
tgtacttatatggatttgttgttgg

SEQ ID NO: 12483 - DNA, 24 bp, Artificial Sequence
  Synthetic
ctttgtcaatacctaaatagcact

SEQ ID NO: 12484 - DNA, 23 bp, Artificial Sequence
  Synthetic
gaaacttttcttgattttgcttg

SEQ ID NO: 12485 - DNA, 25 bp, Artificial Sequence
  Synthetic
ttgttatttacagaacagttaggtg

SEQ ID NO: 12486 - DNA, 24 bp, Artificial Sequence
  Synthetic
acatattttctgttcaacaggatg

SEQ ID NO: 12487 - DNA, 24 bp, Artificial Sequence
  Synthetic
tattgtagtaattcttcctcaggt

SEQ ID NO: 12488 - DNA, 24 bp, Artificial Sequence
  Synthetic
aaacttactttattgcgattctcc

SEQ ID NO: 12489 - DNA, 25 bp, Artificial Sequence
  Synthetic
tggtggtattacatatgtttctaac

SEQ ID NO: 12490 - DNA, 25 bp, Artificial Sequence
  Synthetic
tggagattataacctttctagtgtt

SEQ ID NO: 12491 - DNA, 24 bp, Artificial Sequence
  Synthetic
gctatacatactgttactattgca

SEQ ID NO: 12492 - DNA, 20 bp, Artificial Sequence
  Synthetic
gctgccaactgattacaaga

SEQ ID NO: 12493 - DNA, 25 bp, Artificial Sequence
  Synthetic
cagtacatatgttgatttgaagttg

SEQ ID NO: 12494 - DNA, 25 bp, Artificial Sequence
  Synthetic
tttagtaggacattatatcaaccag

SEQ ID NO: 12495 - DNA, 20 bp, Artificial Sequence
  Synthetic
gccgtgttaaaactttttgg

SEQ ID NO: 12496 - DNA, 21 bp, Artificial Sequence
  Synthetic
gggtgttttgtcagaaagaga

SEQ ID NO: 12497 - DNA, 23 bp, Artificial Sequence
  Synthetic
ctcataaggaccttaaattcaga

SEQ ID NO: 12498 - DNA, 21 bp, Artificial Sequence
  Synthetic
gtagcacttcaagacaacagt

SEQ ID NO: 12499 - DNA, 19 bp, Artificial Sequence
  Synthetic
cagaatggtgttgatgcca

SEQ ID NO: 12500 - DNA, 19 bp, Artificial Sequence
  Synthetic
atttggtgtttggatgctg

SEQ ID NO: 12501 - DNA, 25 bp, Artificial Sequence
  Synthetic
cagtaaaatggcagataataaaggt

SEQ ID NO: 12502 - DNA, 18 bp, Artificial Sequence
  Synthetic
cgccgcattattaagcag

SEQ ID NO: 12503 - DNA, 23 bp, Artificial Sequence
  Synthetic
taaccacaattcttccagttgat

SEQ ID NO: 12504 - DNA, 20 bp, Artificial Sequence
  Synthetic
cgcttagacttactgcaaga

SEQ ID NO: 12505 - DNA, 20 bp, Artificial Sequence
  Synthetic
gtcacttcaagacactagca

SEQ ID NO: 12506 - DNA, 20 bp, Artificial Sequence
  Synthetic
tgtcttccactagctcccca

SEQ ID NO: 12507 - DNA, 22 bp, Artificial Sequence
  Synthetic
gacagatagaaaaaacaccgag

SEQ ID NO: 12508 - DNA, 20 bp, Artificial Sequence
  Synthetic
gcccccaaagatatataccc

SEQ ID NO: 12509 - DNA, 18 bp, Artificial Sequence
  Synthetic
tgtggaaacagtaggccc

SEQ ID NO: 12510 - DNA, 25 bp, Artificial Sequence
  Synthetic
tgcatctacatctaatataagtgct

SEQ ID NO: 12511 - DNA, 18 bp, Artificial Sequence
  Synthetic
ggttcgttgagcagccac

SEQ ID NO: 12512 - DNA, 25 bp, Artificial Sequence
  Synthetic
cccactttttctatgatttaagttc

SEQ ID NO: 12513 - DNA, 18 bp, Artificial Sequence
  Synthetic
tctatcttcctccccagc

SEQ ID NO: 12514 - DNA, 21 bp, Artificial Sequence
  Synthetic
atagagataggtagaggccag

SEQ ID NO: 12515 - DNA, 21 bp, Artificial Sequence
  Synthetic
ggtgacatgatggatattggt

SEQ ID NO: 12516 - DNA, 18 bp, Artificial Sequence
  Synthetic
gcagatgctgaaccaaga

SEQ ID NO: 12517 - DNA, 21 bp, Artificial Sequence
  Synthetic
cacaagtgtgcattttttgtg

SEQ ID NO: 12518 - DNA, 22 bp, Artificial Sequence
  Synthetic
ttaaaagactacacctacagga

SEQ ID NO: 12519 - DNA, 18 bp, Artificial Sequence
  Synthetic
tgcagcaaccctatttgg

SEQ ID NO: 12520 - DNA, 24 bp, Artificial Sequence
  Synthetic
cttggatgattctgatatagatga

SEQ ID NO: 12521 - DNA, 22 bp, Artificial Sequence
  Synthetic
cacctaaagaaaagggtaaacg

SEQ ID NO: 12522 - DNA, 24 bp, Artificial Sequence
  Synthetic
ctgaacctccaaaattaagaagtg

SEQ ID NO: 12523 - DNA, 23 bp, Artificial Sequence
  Synthetic
gttttgtattttatggacctcct

SEQ ID NO: 12524 - DNA, 19 bp, Artificial Sequence
  Synthetic
agagtcactgcaagagaga

SEQ ID NO: 12525 - DNA, 23 bp, Artificial Sequence
  Synthetic
aattgaaaacacaacaattgctg

SEQ ID NO: 12526 - DNA, 23 bp, Artificial Sequence
  Synthetic
ccttcagtgattcctttagaaga

SEQ ID NO: 12527 - DNA, 23 bp, Artificial Sequence
  Synthetic
atttgtacactcattcataggag

SEQ ID NO: 12528 - DNA, 18 bp, Artificial Sequence
  Synthetic
ggccaacctttaggaagt

SEQ ID NO: 12529 - DNA, 21 bp, Artificial Sequence
  Synthetic
tccacctttagagttaatgca

SEQ ID NO: 12530 - DNA, 18 bp, Artificial Sequence
  Synthetic
gaagcagttccaaacctg

SEQ ID NO: 12531 - DNA, 25 bp, Artificial Sequence
  Synthetic
ttgtattatatttgcccctaaactg

SEQ ID NO: 12532 - DNA, 18 bp, Artificial Sequence
  Synthetic
cgcagaagcagaggattt

SEQ ID NO: 12533 - DNA, 22 bp, Artificial Sequence
  Synthetic
tcttgaagagagaaaagcaatt

SEQ ID NO: 12534 - DNA, 20 bp, Artificial Sequence
  Synthetic
aaagaggggaaattccgttt

SEQ ID NO: 12535 - DNA, 19 bp, Artificial Sequence
  Synthetic
catcggatcctcaactcac

SEQ ID NO: 12536 - DNA, 18 bp, Artificial Sequence
  Synthetic
ggaatttccggagtccct

SEQ ID NO: 12537 - DNA, 18 bp, Artificial Sequence
  Synthetic
ggggtcaactccatgatt

SEQ ID NO: 12538 - DNA, 21 bp, Artificial Sequence
  Synthetic
aaggtattttccagactgttg

SEQ ID NO: 12539 - DNA, 22 bp, Artificial Sequence
  Synthetic
catgctcttttccatgaagttg

SEQ ID NO: 12540 - DNA, 23 bp, Artificial Sequence
  Synthetic
tgcaatattaacaatgtggttag

SEQ ID NO: 12541 - DNA, 25 bp, Artificial Sequence
  Synthetic
atctgtcaaattatgaagatgcaag

SEQ ID NO: 12542 - DNA, 23 bp, Artificial Sequence
  Synthetic
tttgtcagatgttttgtttttgg

SEQ ID NO: 12543 - DNA, 20 bp, Artificial Sequence
  Synthetic
ctccttacagagtgaacagg

SEQ ID NO: 12544 - DNA, 23 bp, Artificial Sequence
  Synthetic
aacaaccatgaaagatttgaaag

SEQ ID NO: 12545 - DNA, 25 bp, Artificial Sequence
  Synthetic
aagagtacacatttcctataacctt

SEQ ID NO: 12546 - DNA, 21 bp, Artificial Sequence
  Synthetic
aaatgccatgttatccactga

SEQ ID NO: 12547 - DNA, 23 bp, Artificial Sequence
  Synthetic
tctcttttttatactgaggagca

SEQ ID NO: 12548 - DNA, 20 bp, Artificial Sequence
  Synthetic
ctgtggcttcagattactgg

SEQ ID NO: 12549 - DNA, 25 bp, Artificial Sequence
  Synthetic
tttcagatgatgataatgatagtgc

SEQ ID NO: 12550 - DNA, 25 bp, Artificial Sequence
  Synthetic
gtgattaaattagatgcagatccag

SEQ ID NO: 12551 - DNA, 18 bp, Artificial Sequence
  Synthetic
gatcaggcatggagagga

SEQ ID NO: 12552 - DNA, 21 bp, Artificial Sequence
  Synthetic
cgctttttagaaagagtccca

SEQ ID NO: 12553 - DNA, 21 bp, Artificial Sequence
  Synthetic
tgatgctatcaacatggattc

SEQ ID NO: 12554 - DNA, 18 bp, Artificial Sequence
  Synthetic
gatgcttgtcctctggat

SEQ ID NO: 12555 - DNA, 23 bp, Artificial Sequence
  Synthetic
ccatgaagactatcattgctttg

SEQ ID NO: 12556 - DNA, 20 bp, Artificial Sequence
  Synthetic
ccttgatggagaaaactgca

SEQ ID NO: 12557 - DNA, 25 bp, Artificial Sequence
  Synthetic
cagtttctttagtagattgaattgg

SEQ ID NO: 12558 - DNA, 25 bp, Artificial Sequence
  Synthetic
gcatctattggacaatagtaaaacc

SEQ ID NO: 12559 - DNA, 21 bp, Artificial Sequence
  Synthetic
tgttaagcaaaacactctgaa

SEQ ID NO: 12560 - DNA, 25 bp, Artificial Sequence
  Synthetic
ccatcagattgaaaaagaattctca

SEQ ID NO: 12561 - DNA, 23 bp, Artificial Sequence
  Synthetic
aatggaacttatgaccatgatgt

SEQ ID NO: 12562 - DNA, 18 bp, Artificial Sequence
  Synthetic
ttgagaggttgttggcaa

SEQ ID NO: 12563 - DNA, 20 bp, Artificial Sequence
  Synthetic
aggaaggttatgcatatgcg

SEQ ID NO: 12564 - DNA, 23 bp, Artificial Sequence
  Synthetic
ttgtagagagatatgattgggaa

SEQ ID NO: 12565 - DNA, 22 bp, Artificial Sequence
  Synthetic
tagaagacttgctgctagaaga

SEQ ID NO: 12566 - DNA, 18 bp, Artificial Sequence
  Synthetic
caggggagtgaggagttt

SEQ ID NO: 12567 - DNA, 23 bp, Artificial Sequence
  Synthetic
ttgttaaaatgcagtaatctcag

SEQ ID NO: 12568 - DNA, 21 bp, Artificial Sequence
  Synthetic
aaaatgttatcgctacagggt

SEQ ID NO: 12569 - DNA, 25 bp, Artificial Sequence
  Synthetic
taacccactttatatattgtatggc

SEQ ID NO: 12570 - DNA, 19 bp, Artificial Sequence
  Synthetic
gtcattccagaagcgattg

SEQ ID NO: 12571 - DNA, 22 bp, Artificial Sequence
  Synthetic
ctacatatgctgaaacaccaga

SEQ ID NO: 12572 - DNA, 25 bp, Artificial Sequence
  Synthetic
ccaacaataataattcatacagagg

SEQ ID NO: 12573 - DNA, 24 bp, Artificial Sequence
  Synthetic
gatgtgaggaaaaataatggagat

SEQ ID NO: 12574 - DNA, 25 bp, Artificial Sequence
  Synthetic
aaaatccaaatggctataatacagg

SEQ ID NO: 12575 - DNA, 25 bp, Artificial Sequence
  Synthetic
agtatccagatttcttaaaaatggc

SEQ ID NO: 12576 - DNA, 25 bp, Artificial Sequence
  Synthetic
aaagataataacaattggctctgtc

SEQ ID NO: 12577 - DNA, 19 bp, Artificial Sequence
  Synthetic
acagaaattggtcaaagcc

SEQ ID NO: 12578 - DNA, 19 bp, Artificial Sequence
  Synthetic
tcatttaggaaccaggcaa

SEQ ID NO: 12579 - DNA, 25 bp, Artificial Sequence
  Synthetic
actagaatactattcattgaagagg

SEQ ID NO: 12580 - DNA, 20 bp, Artificial Sequence
  Synthetic
tgcaggaatcctaacaatga

SEQ ID NO: 12581 - DNA, 18 bp, Artificial Sequence
  Synthetic
gcaagttgctaccgctgg

SEQ ID NO: 12582 - DNA, 17 bp, Artificial Sequence
  Synthetic
cctggccgctttctacg

SEQ ID NO: 12583 - DNA, 16 bp, Artificial Sequence
  Synthetic
cgaggtgcagaccgct

SEQ ID NO: 12584 - DNA, 20 bp, Artificial Sequence
  Synthetic
ggtacctgaaaccgaaagcg

SEQ ID NO: 12585 - DNA, 17 bp, Artificial Sequence
  Synthetic
tgggcaaagacggagcc

SEQ ID NO: 12586 - DNA, 17 bp, Artificial Sequence
  Synthetic
gagggtgagcgcgaaga

SEQ ID NO: 12587 - DNA, 16 bp, Artificial Sequence
  Synthetic
cgatcaccaccgcgac

SEQ ID NO: 12588 - DNA, 20 bp, Artificial Sequence
  Synthetic
ccggtttcggtgagacactt

SEQ ID NO: 12589 - DNA, 21 bp, Artificial Sequence
  Synthetic
ctccgttatgtctttcagatc

SEQ ID NO: 12590 - DNA, 22 bp, Artificial Sequence
  Synthetic
aatcttctcataaccgtagtcc

SEQ ID NO: 12591 - DNA, 19 bp, Artificial Sequence
  Synthetic
ccgtcacatgacaggaaat

SEQ ID NO: 12592 - DNA, 20 bp, Artificial Sequence
  Synthetic
gagaatgacacaccacagaa

SEQ ID NO: 12593 - DNA, 18 bp, Artificial Sequence
  Synthetic
aaacggtcgtcatcacat

SEQ ID NO: 12594 - DNA, 20 bp, Artificial Sequence
  Synthetic
acagaagttttccaccaaag

SEQ ID NO: 12595 - DNA, 19 bp, Artificial Sequence
  Synthetic
gtgtctaaacgagtctgga

SEQ ID NO: 12596 - DNA, 20 bp, Artificial Sequence
  Synthetic
ctttttccgacaaacacaga

SEQ ID NO: 12597 - DNA, 18 bp, Artificial Sequence
  Synthetic
ggagccgagtaagcattt

SEQ ID NO: 12598 - DNA, 18 bp, Artificial Sequence
  Synthetic
gagtccaccattttcgga

SEQ ID NO: 12599 - DNA, 21 bp, Artificial Sequence
  Synthetic
aaaacctctagattcttcccg

SEQ ID NO: 12600 - DNA, 19 bp, Artificial Sequence
  Synthetic
ggtggtttcttttgaagca

SEQ ID NO: 12601 - DNA, 19 bp, Artificial Sequence
  Synthetic
tcgccagattacttcagac

SEQ ID NO: 12602 - DNA, 25 bp, Artificial Sequence
  Synthetic
ggaattagatttttattgatggtgc

SEQ ID NO: 12603 - DNA, 18 bp, Artificial Sequence
  Synthetic
cgaagtgcttctctcgat

SEQ ID NO: 12604 - DNA, 20 bp, Artificial Sequence
  Synthetic
cgaatccggaatttacttgt

SEQ ID NO: 12605 - DNA, 22 bp, Artificial Sequence
  Synthetic
tatgaataacggagagcttgtt

SEQ ID NO: 12606 - DNA, 18 bp, Artificial Sequence
  Synthetic
tttctgtgtgtgctttcg

SEQ ID NO: 12607 - DNA, 19 bp, Artificial Sequence
  Synthetic
cgtggatttgttgaatgga

SEQ ID NO: 12608 - DNA, 20 bp, Artificial Sequence
  Synthetic
acagatccgtctctcagctg

SEQ ID NO: 12609 - DNA, 18 bp, Artificial Sequence
  Synthetic
gcacagagctggtcctga

SEQ ID NO: 12610 - DNA, 16 bp, Artificial Sequence
  Synthetic
gagggctgcaacgcga

SEQ ID NO: 12611 - DNA, 17 bp, Artificial Sequence
  Synthetic
gagacgcagaagccgtc

SEQ ID NO: 12612 - DNA, 18 bp, Artificial Sequence
  Synthetic
cagagacgtgaccggaga

SEQ ID NO: 12613 - DNA, 21 bp, Artificial Sequence
  Synthetic
caagaaacatagcatggatgg

SEQ ID NO: 12614 - DNA, 18 bp, Artificial Sequence
  Synthetic
gggagagtgctaagcaga

SEQ ID NO: 12615 - DNA, 21 bp, Artificial Sequence
  Synthetic
tcagttacacccaaaaagttg

SEQ ID NO: 12616 - DNA, 19 bp, Artificial Sequence
  Synthetic
ggaggttatggagggactg

SEQ ID NO: 12617 - DNA, 20 bp, Artificial Sequence
  Synthetic
acggatgttgtaacagttgt

SEQ ID NO: 12618 - DNA, 21 bp, Artificial Sequence
  Synthetic
gaggcaattgttgatcaagaa

SEQ ID NO: 12619 - DNA, 18 bp, Artificial Sequence
  Synthetic
cgcaaatgcagacacatt

SEQ ID NO: 12620 - DNA, 19 bp, Artificial Sequence
  Synthetic
gtgaatcactctccacagc

SEQ ID NO: 12621 - DNA, 25 bp, Artificial Sequence
  Synthetic
caaatcctacattaatgataaaggg

SEQ ID NO: 12622 - DNA, 23 bp, Artificial Sequence
  Synthetic
gggagacaaaataacattcgaag

SEQ ID NO: 12623 - DNA, 20 bp, Artificial Sequence
  Synthetic
gattgaggaatatcccgtct

SEQ ID NO: 12624 - DNA, 16 bp, Artificial Sequence
  Synthetic
cgacacactgcagcgg

SEQ ID NO: 12625 - DNA, 18 bp, Artificial Sequence
  Synthetic
gagctctctcaccccgtg

SEQ ID NO: 12626 - DNA, 20 bp, Artificial Sequence
  Synthetic
ctttgcgtttctcacggcat

SEQ ID NO: 12627 - DNA, 17 bp, Artificial Sequence
  Synthetic
ggccgccgagattaacg

SEQ ID NO: 12628 - DNA, 20 bp, Artificial Sequence
  Synthetic
aatcatctgactcgtgccag

SEQ ID NO: 12629 - DNA, 16 bp, Artificial Sequence
  Synthetic
tgagggcggccagact

SEQ ID NO: 12630 - DNA, 20 bp, Artificial Sequence
  Synthetic
ctgggaccgtggatagtgtg

SEQ ID NO: 12631 - DNA, 17 bp, Artificial Sequence
  Synthetic
aaagtaacgccgcgtcc

SEQ ID NO: 12632 - DNA, 17 bp, Artificial Sequence
  Synthetic
tccactcatgccgccga

SEQ ID NO: 12633 - DNA, 16 bp, Artificial Sequence
  Synthetic
cagcaccagcgcggaa

SEQ ID NO: 12634 - DNA, 23 bp, Artificial Sequence
  Synthetic
agatggatattcaaagtacaggg

SEQ ID NO: 12635 - DNA, 20 bp, Artificial Sequence
  Synthetic
tacgtcatcacactctttgc

SEQ ID NO: 12636 - DNA, 22 bp, Artificial Sequence
  Synthetic
aactaagaaaccgatttaccac

SEQ ID NO: 12637 - DNA, 19 bp, Artificial Sequence
  Synthetic
cccacataaaatcacgtgc

SEQ ID NO: 12638 - DNA, 22 bp, Artificial Sequence
  Synthetic
caacgattgaagaacatcatca

SEQ ID NO: 12639 - DNA, 22 bp, Artificial Sequence
  Synthetic
aaacaccaacgttttagttagg

SEQ ID NO: 12640 - DNA, 21 bp, Artificial Sequence
  Synthetic
ttctaatgaaatcgtcagtcg

SEQ ID NO: 12641 - DNA, 18 bp, Artificial Sequence
  Synthetic
cgctgaccacataaacgt

SEQ ID NO: 12642 - DNA, 21 bp, Artificial Sequence
  Synthetic
ggatacagagagcaaaaacag

SEQ ID NO: 12643 - DNA, 18 bp, Artificial Sequence
  Synthetic
ggtttgaggtgtctggtt

SEQ ID NO: 12644 - DNA, 21 bp, Artificial Sequence
  Synthetic
taacttggactggaaagatca

SEQ ID NO: 12645 - DNA, 21 bp, Artificial Sequence
  Synthetic
ccaattttagaagggcatgtc

SEQ ID NO: 12646 - DNA, 21 bp, Artificial Sequence
  Synthetic
cgaatccacgtatttatgtcc

SEQ ID NO: 12647 - DNA, 22 bp, Artificial Sequence
  Synthetic
agatcgagtcaatcatagagaa

SEQ ID NO: 12648 - DNA, 21 bp, Artificial Sequence
  Synthetic
cgttaatgctgatgaacttgg

SEQ ID NO: 12649 - DNA, 20 bp, Artificial Sequence
  Synthetic
gataggacggggaaaagaac

SEQ ID NO: 12650 - DNA, 25 bp, Artificial Sequence
  Synthetic
agtgtatcttccgagtctagtatta

SEQ ID NO: 12651 - DNA, 20 bp, Artificial Sequence
  Synthetic
gtcatctatggagacgctag

SEQ ID NO: 12652 - DNA, 21 bp, Artificial Sequence
  Synthetic
ttcagtgtttcgatttcatcc

SEQ ID NO: 12653 - DNA, 18 bp, Artificial Sequence
  Synthetic
tggatcctggggagttct

SEQ ID NO: 12654 - DNA, 18 bp, Artificial Sequence
  Synthetic
tttccatgcgcgtttcgg

SEQ ID NO: 12655 - DNA, 18 bp, Artificial Sequence
  Synthetic
catctgggatcccgctcg

SEQ ID NO: 12656 - DNA, 17 bp, Artificial Sequence
  Synthetic
gcacgagaacacgcgag

SEQ ID NO: 12657 - DNA, 20 bp, Artificial Sequence
  Synthetic
aatgtttccacgtgacgtcc

SEQ ID NO: 12658 - DNA, 18 bp, Artificial Sequence
  Synthetic
gagccgtgtacgtccacc

SEQ ID NO: 12659 - DNA, 19 bp, Artificial Sequence
  Synthetic
gacgctttgtccaaaatgc

SEQ ID NO: 12660 - DNA, 18 bp, Artificial Sequence
  Synthetic
gcagatgcaacggttcaa

SEQ ID NO: 12661 - DNA, 20 bp, Artificial Sequence
  Synthetic
atggactccaacaccatgtc

SEQ ID NO: 12662 - DNA, 18 bp, Artificial Sequence
  Synthetic
tacctacttcgcgctacc

SEQ ID NO: 12663 - DNA, 25 bp, Artificial Sequence
  Synthetic
atacttatgaggatgtcaaaaatgc

SEQ ID NO: 12664 - DNA, 22 bp, Artificial Sequence
  Synthetic
aattgtacagttactaaagggc

SEQ ID NO: 12665 - DNA, 18 bp, Artificial Sequence
  Synthetic
gactttccttttgcagcg

SEQ ID NO: 12666 - DNA, 20 bp, Artificial Sequence
  Synthetic
agcaattagacagctcagac

SEQ ID NO: 12667 - DNA, 18 bp, Artificial Sequence
  Synthetic
ttgctgatgggcacacta

SEQ ID NO: 12668 - DNA, 18 bp, Artificial Sequence
  Synthetic
gaaggtatagaggggggc

SEQ ID NO: 12669 - DNA, 25 bp, Artificial Sequence
  Synthetic
ttcatacattattaaaaggacaggc

SEQ ID NO: 12670 - DNA, 18 bp, Artificial Sequence
  Synthetic
aacaccggaatggatagc

SEQ ID NO: 12671 - DNA, 21 bp, Artificial Sequence
  Synthetic
cttttttaaaaggttggcgtc

SEQ ID NO: 12672 - DNA, 18 bp, Artificial Sequence
  Synthetic
tgtgtcaaaagccaaagc

SEQ ID NO: 12673 - DNA, 18 bp, Artificial Sequence
  Synthetic
ccgaaagcgaaggagaga

SEQ ID NO: 12674 - DNA, 19 bp, Artificial Sequence
  Synthetic
cagagggtgggttttcaat

SEQ ID NO: 12675 - DNA, 21 bp, Artificial Sequence
  Synthetic
gccacaattcctgatacattc

SEQ ID NO: 12676 - DNA, 21 bp, Artificial Sequence
  Synthetic
ttatcatgcaggtagtaccag

SEQ ID NO: 12677 - DNA, 18 bp, Artificial Sequence
  Synthetic
ggtcaggacagcagagaa

SEQ ID NO: 12678 - DNA, 21 bp, Artificial Sequence
  Synthetic
acagggcctaagtttaaatcc

SEQ ID NO: 12679 - DNA, 21 bp, Artificial Sequence
  Synthetic
tgtttcaaattgctaggtcaa

SEQ ID NO: 12680 - DNA, 19 bp, Artificial Sequence
  Synthetic
ggtttaggaccgaaaacgg

SEQ ID NO: 12681 - DNA, 23 bp, Artificial Sequence
  Synthetic
gagtagtgtatagagacgggtat

SEQ ID NO: 12682 - DNA, 18 bp, Artificial Sequence
  Synthetic
tgacatgctggagacaca

SEQ ID NO: 12683 - DNA, 19 bp, Artificial Sequence
  Synthetic
tctacacaggcagaaaggg

SEQ ID NO: 12684 - DNA, 18 bp, Artificial Sequence
  Synthetic
cgggaaagagcaaaatgg

SEQ ID NO: 12685 - DNA, 21 bp, Artificial Sequence
  Synthetic
attagtgacgtgtatgggagt

SEQ ID NO: 12686 - DNA, 18 bp, Artificial Sequence
  Synthetic
gggcacaacaacaacaga

SEQ ID NO: 12687 - DNA, 22 bp, Artificial Sequence
  Synthetic
aaatccatttccaattgatgtg

SEQ ID NO: 12688 - DNA, 18 bp, Artificial Sequence
  Synthetic
tgttgtgtggaaatgggt

SEQ ID NO: 12689 - DNA, 19 bp, Artificial Sequence
  Synthetic
ccataagacccccaccacc

SEQ ID NO: 12690 - DNA, 22 bp, Artificial Sequence
  Synthetic
gtgaagcaaacagactaaagtg

SEQ ID NO: 12691 - DNA, 25 bp, Artificial Sequence
  Synthetic
tacctggtatatacaatactacaca

SEQ ID NO: 12692 - DNA, 19 bp, Artificial Sequence
  Synthetic
ataacacccacctctacct

SEQ ID NO: 12693 - DNA, 22 bp, Artificial Sequence
  Synthetic
gatcctgcatttcttcacaaac

SEQ ID NO: 12694 - DNA, 18 bp, Artificial Sequence
  Synthetic
tacatggccttatgcacc

SEQ ID NO: 12695 - DNA, 18 bp, Artificial Sequence
  Synthetic
tatccctgtctgctgagg

SEQ ID NO: 12696 - DNA, 18 bp, Artificial Sequence
  Synthetic
gcatagtgccgtttcctg

SEQ ID NO: 12697 - DNA, 19 bp, Artificial Sequence
  Synthetic
ttaaaactgggtgtgggtt

SEQ ID NO: 12698 - DNA, 20 bp, Artificial Sequence
  Synthetic
tctttggttggtcgttcagc

SEQ ID NO: 12699 - DNA, 21 bp, Artificial Sequence
  Synthetic
tcaagatccaagcaaattcac

SEQ ID NO: 12700 - DNA, 24 bp, Artificial Sequence
  Synthetic
attagtccattacgtagtgaaact

SEQ ID NO: 12701 - DNA, 24 bp, Artificial Sequence
  Synthetic
tcaataatgtgggtaacaatgttg

SEQ ID NO: 12702 - DNA, 20 bp, Artificial Sequence
  Synthetic
attacttgcatacacaccac

SEQ ID NO: 12703 - DNA, 23 bp, Artificial Sequence
  Synthetic
ataacatcacaaacaagagatga

SEQ ID NO: 12704 - DNA, 25 bp, Artificial Sequence
  Synthetic
gtaatgcaatatatgtatgttcctc

SEQ ID NO: 12705 - DNA, 20 bp, Artificial Sequence
  Synthetic
tgattgtggtggaaaacttc

SEQ ID NO: 12706 - DNA, 25 bp, Artificial Sequence
  Synthetic
tctcggctatggttattataatcag

SEQ ID NO: 12707 - DNA, 19 bp, Artificial Sequence
  Synthetic
cattcaaagatcgcagcac

SEQ ID NO: 12708 - DNA, 20 bp, Artificial Sequence
  Synthetic
cgttttcggtacaattttgg

SEQ ID NO: 12709 - DNA, 25 bp, Artificial Sequence
  Synthetic
gtgttagattatctgctttgtatga

SEQ ID NO: 12710 - DNA, 25 bp, Artificial Sequence
  Synthetic
aaaggtactgatactaatgaaactg

SEQ ID NO: 12711 - DNA, 23 bp, Artificial Sequence
  Synthetic
gttcaaagaaatgtttggtgttc

SEQ ID NO: 12712 - DNA, 23 bp, Artificial Sequence
  Synthetic
aatgaattctatgatgaagcaga

SEQ ID NO: 12713 - DNA, 22 bp, Artificial Sequence
  Synthetic
catggcagtatatggacttaaa

SEQ ID NO: 12714 - DNA, 25 bp, Artificial Sequence
  Synthetic
gaaaagaagggttaagtagtttagg

SEQ ID NO: 12715 - DNA, 20 bp, Artificial Sequence
  Synthetic
gctcttcacggtgtgcttac

SEQ ID NO: 12716 - DNA, 24 bp, Artificial Sequence
  Synthetic
tagtagtgtaactcaaagagaagc

SEQ ID NO: 12717 - DNA, 18 bp, Artificial Sequence
  Synthetic
ccaacaacggaattggga

SEQ ID NO: 12718 - DNA, 19 bp, Artificial Sequence
  Synthetic
tttgaaaatcccgcctttg

SEQ ID NO: 12719 - DNA, 25 bp, Artificial Sequence
  Synthetic
gggtatttattgatgattatggttc

SEQ ID NO: 12720 - DNA, 23 bp, Artificial Sequence
  Synthetic
agaacgtttagtctggaaattac

SEQ ID NO: 12721 - DNA, 24 bp, Artificial Sequence
  Synthetic
ttatgccagacatatgttaaacag

SEQ ID NO: 12722 - DNA, 19 bp, Artificial Sequence
  Synthetic
tactggggtagaagatgcg

SEQ ID NO: 12723 - DNA, 20 bp, Artificial Sequence
  Synthetic
tgaagcttacttggttggcc

SEQ ID NO: 12724 - DNA, 20 bp, Artificial Sequence
  Synthetic
gttgatagtcgtaatgggca

SEQ ID NO: 12725 - DNA, 18 bp, Artificial Sequence
  Synthetic
ttttcccaagacccatcg

SEQ ID NO: 12726 - DNA, 20 bp, Artificial Sequence
  Synthetic
gtagattggaccactacgtc

SEQ ID NO: 12727 - DNA, 20 bp, Artificial Sequence
  Synthetic
gagggaggacatgtaattgg

SEQ ID NO: 12728 - DNA, 22 bp, Artificial Sequence
  Synthetic
ccattacaatctcaatagcacc

SEQ ID NO: 12729 - DNA, 25 bp, Artificial Sequence
  Synthetic
tctcaatttacaatgtacaagtgac

SEQ ID NO: 12730 - DNA, 18 bp, Artificial Sequence
  Synthetic
gttagaatgctgcgtgac

SEQ ID NO: 12731 - DNA, 20 bp, Artificial Sequence
  Synthetic
aattgagaacttcatgggcc

SEQ ID NO: 12732 - DNA, 21 bp, Artificial Sequence
  Synthetic
caacccgagtgttttctatca

SEQ ID NO: 12733 - DNA, 18 bp, Artificial Sequence
  Synthetic
cacccaatacacccacaa

SEQ ID NO: 12734 - DNA, 18 bp, Artificial Sequence
  Synthetic
cccagataccatcccaca

SEQ ID NO: 12735 - DNA, 23 bp, Artificial Sequence
  Synthetic
cacagatctaagaccctattcat

SEQ ID NO: 12736 - DNA, 19 bp, Artificial Sequence
  Synthetic
caacccttgctcttttagg

SEQ ID NO: 12737 - DNA, 24 bp, Artificial Sequence
  Synthetic
tttggttacttcaataatagccag

SEQ ID NO: 12738 - DNA, 23 bp, Artificial Sequence
  Synthetic
acaaatcttttaaatctccaacc

SEQ ID NO: 12739 - DNA, 18 bp, Artificial Sequence
  Synthetic
acatggtggttcagcaac

SEQ ID NO: 12740 - DNA, 23 bp, Artificial Sequence
  Synthetic
gtaccatatacgcattatatcgc

SEQ ID NO: 12741 - DNA, 20 bp, Artificial Sequence
  Synthetic
gctacatgcaggttgtacaa

SEQ ID NO: 12742 - DNA, 18 bp, Artificial Sequence
  Synthetic
tgtcttccacgatgtgtt

SEQ ID NO: 12743 - DNA, 18 bp, Artificial Sequence
  Synthetic
cttaccactagccctggt

SEQ ID NO: 12744 - DNA, 21 bp, Artificial Sequence
  Synthetic
acagtacttttcatgcaaacc

SEQ ID NO: 12745 - DNA, 18 bp, Artificial Sequence
  Synthetic
tccaagatgacctgggat

SEQ ID NO: 12746 - DNA, 25 bp, Artificial Sequence
  Synthetic
aaaagaactaagagatctaatgtcg

SEQ ID NO: 12747 - DNA, 19 bp, Artificial Sequence
  Synthetic
ggagcaagacaaatgatgc

SEQ ID NO: 12748 - DNA, 21 bp, Artificial Sequence
  Synthetic
agcacaagatgttatcatgga

SEQ ID NO: 12749 - DNA, 22 bp, Artificial Sequence
  Synthetic
gaggcttcactttcaaaagaac

SEQ ID NO: 12750 - DNA, 19 bp, Artificial Sequence
  Synthetic
catgataaaggcagtccga

SEQ ID NO: 12751 - DNA, 18 bp, Artificial Sequence
  Synthetic
gagagagtggtggtgagt

SEQ ID NO: 12752 - DNA, 20 bp, Artificial Sequence
  Synthetic
ttaacggttttagggcaggg

SEQ ID NO: 12753 - DNA, 18 bp, Artificial Sequence
  Synthetic
gagggccaacagactttg

SEQ ID NO: 12754 - DNA, 20 bp, Artificial Sequence
  Synthetic
tgcatttatctccgtttgag

SEQ ID NO: 12755 - DNA, 22 bp, Artificial Sequence
  Synthetic
ggttgtggaaaatcattttgtg

SEQ ID NO: 12756 - DNA, 20 bp, Artificial Sequence
  Synthetic
ttacaaatgacacgcccctg

SEQ ID NO: 12757 - DNA, 22 bp, Artificial Sequence
  Synthetic
atggatgtgtggagtattcttg

SEQ ID NO: 12758 - DNA, 20 bp, Artificial Sequence
  Synthetic
gacaaatggagccaggacac

SEQ ID NO: 12759 - DNA, 19 bp, Artificial Sequence
  Synthetic
acccattggttgaacccag

SEQ ID NO: 12760 - DNA, 20 bp, Artificial Sequence
  Synthetic
aagttttacggctgctggat

SEQ ID NO: 12761 - DNA, 18 bp, Artificial Sequence
  Synthetic
caccttccagccgtacca

SEQ ID NO: 12762 - DNA, 20 bp, Artificial Sequence
  Synthetic
agcccttatttgacaacccg

SEQ ID NO: 12763 - DNA, 18 bp, Artificial Sequence
  Synthetic
tattttttcgcgcgcggt

SEQ ID NO: 12764 - DNA, 18 bp, Artificial Sequence
  Synthetic
cggggggagatgatgtgt

SEQ ID NO: 12765 - DNA, 18 bp, Artificial Sequence
  Synthetic
aaaatggtttccggggcg

SEQ ID NO: 12766 - DNA, 18 bp, Artificial Sequence
  Synthetic
agggtctgcgagaggagc

SEQ ID NO: 12767 - DNA, 18 bp, Artificial Sequence
  Synthetic
gctggtagttcagggcct

SEQ ID NO: 12768 - DNA, 20 bp, Artificial Sequence
  Synthetic
cgtagacggacttgattggc

SEQ ID NO: 12769 - DNA, 20 bp, Artificial Sequence
  Synthetic
tgctcgtcctcactctcttc

SEQ ID NO: 12770 - DNA, 20 bp, Artificial Sequence
  Synthetic
ttgagctggacatattcgcg

SEQ ID NO: 12771 - DNA, 16 bp, Artificial Sequence
  Synthetic
gcggaggcgtacatgc

SEQ ID NO: 12772 - DNA, 18 bp, Artificial Sequence
  Synthetic
cacggtaagagcccagca

SEQ ID NO: 12773 - DNA, 18 bp, Artificial Sequence
  Synthetic
gcaggctcggttgttgat

SEQ ID NO: 12774 - DNA, 18 bp, Artificial Sequence
  Synthetic
aaggtaagggggtcccgc

SEQ ID NO: 12775 - DNA, 19 bp, Artificial Sequence
  Synthetic
aaaagcgtccgcagtactc

SEQ ID NO: 12776 - DNA, 16 bp, Artificial Sequence
  Synthetic
gtgctgcgccctgaga

SEQ ID NO: 12777 - DNA, 19 bp, Artificial Sequence
  Synthetic
caaacgcggctgtaaacca

SEQ ID NO: 12778 - DNA, 17 bp, Artificial Sequence
  Synthetic
agctcggcaatggtggc

SEQ ID NO: 12779 - DNA, 18 bp, Artificial Sequence
  Synthetic
cccgttgggtagcgaaag

SEQ ID NO: 12780 - DNA, 20 bp, Artificial Sequence
  Synthetic
agtcatgcatgagcctctca

SEQ ID NO: 12781 - DNA, 18 bp, Artificial Sequence
  Synthetic
cgtagtcgttgcaggtgc

SEQ ID NO: 12782 - DNA, 16 bp, Artificial Sequence
  Synthetic
agcggttgagcaggct

SEQ ID NO: 12783 - DNA, 17 bp, Artificial Sequence
  Synthetic
cgcccgtagtctggaga

SEQ ID NO: 12784 - DNA, 16 bp, Artificial Sequence
  Synthetic
gcggccaacctggtga

SEQ ID NO: 12785 - DNA, 18 bp, Artificial Sequence
  Synthetic
cctgagcctggccgagaa

SEQ ID NO: 12786 - DNA, 20 bp, Artificial Sequence
  Synthetic
tgaggatgaggaagaggagg

SEQ ID NO: 12787 - DNA, 16 bp, Artificial Sequence
  Synthetic
gcgctggcggagaaca

SEQ ID NO: 12788 - DNA, 16 bp, Artificial Sequence
  Synthetic
agtcgggcccggacta

SEQ ID NO: 12789 - DNA, 16 bp, Artificial Sequence
  Synthetic
cgtgcactggggcaga

SEQ ID NO: 12790 - DNA, 20 bp, Artificial Sequence
  Synthetic
gttgatggactacctgcacc

SEQ ID NO: 12791 - DNA, 20 bp, Artificial Sequence
  Synthetic
gtacctgaacgactcgctgc

SEQ ID NO: 12792 - DNA, 18 bp, Artificial Sequence
  Synthetic
caccaaggccatagcgtg

SEQ ID NO: 12793 - DNA, 20 bp, Artificial Sequence
  Synthetic
tagacctgatgaacaacgcc

SEQ ID NO: 12794 - DNA, 19 bp, Artificial Sequence
  Synthetic
tccccgcacttctaaatgt

SEQ ID NO: 12795 - DNA, 16 bp, Artificial Sequence
  Synthetic
ttacctgcggcgcgga

SEQ ID NO: 12796 - DNA, 19 bp, Artificial Sequence
  Synthetic
cagtatccgcggagtccag

SEQ ID NO: 12797 - DNA, 18 bp, Artificial Sequence
  Synthetic
cactttcgcgctccctgg

SEQ ID NO: 12798 - DNA, 16 bp, Artificial Sequence
  Synthetic
acccccacaggcagga

SEQ ID NO: 12799 - DNA, 19 bp, Artificial Sequence
  Synthetic
gcgagggggcagtagagtt

SEQ ID NO: 12800 - DNA, 17 bp, Artificial Sequence
  Synthetic
gcgagggcgagaacatg

SEQ ID NO: 12801 - DNA, 20 bp, Artificial Sequence
  Synthetic
aaaaaccctcgaccagcatc

SEQ ID NO: 12802 - DNA, 18 bp, Artificial Sequence
  Synthetic
gctaccaccccagcatcc

SEQ ID NO: 12803 - DNA, 19 bp, Artificial Sequence
  Synthetic
tctgacacacctggtcctg

SEQ ID NO: 12804 - DNA, 20 bp, Artificial Sequence
  Synthetic
agtggacattgcaaaccagg

SEQ ID NO: 12805 - DNA, 17 bp, Artificial Sequence
  Synthetic
acctgccttcaccaccc

SEQ ID NO: 12806 - DNA, 18 bp, Artificial Sequence
  Synthetic
ggacgcctcggagtacct

SEQ ID NO: 12807 - DNA, 18 bp, Artificial Sequence
  Synthetic
ccccaaactccagtcagt

SEQ ID NO: 12808 - DNA, 18 bp, Artificial Sequence
  Synthetic
ggcctctcagttgaatgc

SEQ ID NO: 12809 - DNA, 20 bp, Artificial Sequence
  Synthetic
tttctgtactcgaacgtggc

SEQ ID NO: 12810 - DNA, 16 bp, Artificial Sequence
  Synthetic
tgctcccgggctccta

SEQ ID NO: 12811 - DNA, 20 bp, Artificial Sequence
  Synthetic
ccttctacctcaaccacacc

SEQ ID NO: 12812 - DNA, 20 bp, Artificial Sequence
  Synthetic
acaaggattacaaggccgtt

SEQ ID NO: 12813 - DNA, 18 bp, Artificial Sequence
  Synthetic
atgagcccaccctcctct

SEQ ID NO: 12814 - DNA, 17 bp, Artificial Sequence
  Synthetic
gcctttggctggaaccc

SEQ ID NO: 12815 - DNA, 17 bp, Artificial Sequence
  Synthetic
cccgatcgacccatgga

SEQ ID NO: 12816 - DNA, 16 bp, Artificial Sequence
  Synthetic
ctgggaagggccacgt

SEQ ID NO: 12817 - DNA, 20 bp, Artificial Sequence
  Synthetic
ggggtcatcttacacagctg

SEQ ID NO: 12818 - DNA, 17 bp, Artificial Sequence
  Synthetic
gccttgctgggttgctc

SEQ ID NO: 12819 - DNA, 20 bp, Artificial Sequence
  Synthetic
gcctcctcgtttatccaggt

SEQ ID NO: 12820 - DNA, 19 bp, Artificial Sequence
  Synthetic
tcggggtttaccttggtca

SEQ ID NO: 12821 - DNA, 20 bp, Artificial Sequence
  Synthetic
ggagaacttaaccacccacg

SEQ ID NO: 12822 - DNA, 20 bp, Artificial Sequence
  Synthetic
agaaacagcagaggaacagg

SEQ ID NO: 12823 - DNA, 16 bp, Artificial Sequence
  Synthetic
tggccgtggtcctggt

SEQ ID NO: 12824 - DNA, 18 bp, Artificial Sequence
  Synthetic
tggcagcagtgtctcgag

SEQ ID NO: 12825 - DNA, 19 bp, Artificial Sequence
  Synthetic
agccactgctacctcttgc

SEQ ID NO: 12826 - DNA, 20 bp, Artificial Sequence
  Synthetic
tttgtaccccaggactacca

SEQ ID NO: 12827 - DNA, 20 bp, Artificial Sequence
  Synthetic
ttggaagaggtggaacagga

SEQ ID NO: 12828 - DNA, 18 bp, Artificial Sequence
  Synthetic
aggaggaggcctgaggat

SEQ ID NO: 12829 - DNA, 18 bp, Artificial Sequence
  Synthetic
tcagaaaatccccgggcc

SEQ ID NO: 12830 - DNA, 19 bp, Artificial Sequence
  Synthetic
cggaggcattggaactctc

SEQ ID NO: 12831 - DNA, 18 bp, Artificial Sequence
  Synthetic
caccacctacaccgtgta

SEQ ID NO: 12832 - DNA, 20 bp, Artificial Sequence
  Synthetic
cttgctgggtggaaatcaat

SEQ ID NO: 12833 - DNA, 19 bp, Artificial Sequence
  Synthetic
actgcatgtggctagactt

SEQ ID NO: 12834 - DNA, 21 bp, Artificial Sequence
  Synthetic
ctttagtgggaccattagacc

SEQ ID NO: 12835 - DNA, 25 bp, Artificial Sequence
  Synthetic
taacaaagacggttctaatagagaa

SEQ ID NO: 12836 - DNA, 20 bp, Artificial Sequence
  Synthetic
cagcacttatgatggcatct

SEQ ID NO: 12837 - DNA, 23 bp, Artificial Sequence
  Synthetic
gagtattattaatgcatggccag

SEQ ID NO: 12838 - DNA, 18 bp, Artificial Sequence
  Synthetic
cacacctcacccgactgt

SEQ ID NO: 12839 - DNA, 24 bp, Artificial Sequence
  Synthetic
gctataatgctacaatggatatgc

SEQ ID NO: 12840 - DNA, 18 bp, Artificial Sequence
  Synthetic
cagcatcgccttgcctat

SEQ ID NO: 12841 - DNA, 19 bp, Artificial Sequence
  Synthetic
gtctacccctatggctacg

SEQ ID NO: 12842 - DNA, 20 bp, Artificial Sequence
  Synthetic
ctggaaagggtattggaaca

SEQ ID NO: 12843 - DNA, 21 bp, Artificial Sequence
  Synthetic
aaagctattggttttatgcct

SEQ ID NO: 12844 - DNA, 18 bp, Artificial Sequence
  Synthetic
tttacaccagcgcgggta

SEQ ID NO: 12845 - DNA, 18 bp, Artificial Sequence
  Synthetic
catcagtcttctggtgcg

SEQ ID NO: 12846 - DNA, 18 bp, Artificial Sequence
  Synthetic
ctctcaccagatccaggg

SEQ ID NO: 12847 - DNA, 20 bp, Artificial Sequence
  Synthetic
tgaaacaaaaagcccgtcca

SEQ ID NO: 12848 - DNA, 19 bp, Artificial Sequence
  Synthetic
ccctccatcgatttcatca

SEQ ID NO: 12849 - DNA, 19 bp, Artificial Sequence
  Synthetic
ctccaaagctagcacctaa

SEQ ID NO: 12850 - DNA, 21 bp, Artificial Sequence
  Synthetic
ccttgcggacatacaaaaatt

SEQ ID NO: 12851 - DNA, 21 bp, Artificial Sequence
  Synthetic
gcttaccagtagacaaagagc

SEQ ID NO: 12852 - DNA, 19 bp, Artificial Sequence
  Synthetic
aagggacaagtcacagaca

SEQ ID NO: 12853 - DNA, 22 bp, Artificial Sequence
  Synthetic
tttggacctatgatcaacaaga

SEQ ID NO: 12854 - DNA, 19 bp, Artificial Sequence
  Synthetic
ccgagccccttttatatgt

SEQ ID NO: 12855 - DNA, 20 bp, Artificial Sequence
  Synthetic
gtggtggagctatagaagtg

SEQ ID NO: 12856 - DNA, 18 bp, Artificial Sequence
  Synthetic
caagattgcacgaaggct

SEQ ID NO: 12857 - DNA, 20 bp, Artificial Sequence
  Synthetic
accacgaaaacaagaatcac

SEQ ID NO: 12858 - DNA, 22 bp, Artificial Sequence
  Synthetic
caagatcatagatcaagtgagg

SEQ ID NO: 12859 - DNA, 22 bp, Artificial Sequence
  Synthetic
gtacacccttatctgatgatgg

SEQ ID NO: 12860 - DNA, 21 bp, Artificial Sequence
  Synthetic
caagtgaaaatagctccaacc

SEQ ID NO: 12861 - DNA, 25 bp, Artificial Sequence
  Synthetic
cactccatataattacagatagagg

SEQ ID NO: 12862 - DNA, 18 bp, Artificial Sequence
  Synthetic
attttgcccggagaaagg

SEQ ID NO: 12863 - DNA, 21 bp, Artificial Sequence
  Synthetic
gtattacggcacagatcaaga

SEQ ID NO: 12864 - DNA, 22 bp, Artificial Sequence
  Synthetic
cagattcagggttgtatttgtc

SEQ ID NO: 12865 - DNA, 22 bp, Artificial Sequence
  Synthetic
ataagtttccatgtacatgcaa

SEQ ID NO: 12866 - DNA, 25 bp, Artificial Sequence
  Synthetic
tcgtaccattaatcaaatacagatc

SEQ ID NO: 12867 - DNA, 19 bp, Artificial Sequence
  Synthetic
ctctgaaggatgccttgga

SEQ ID NO: 12868 - DNA, 25 bp, Artificial Sequence
  Synthetic
ggactataggagaaaaaagtcttac

SEQ ID NO: 12869 - DNA, 21 bp, Artificial Sequence
  Synthetic
gtgtagtggctaattgcattg

SEQ ID NO: 12870 - DNA, 22 bp, Artificial Sequence
  Synthetic
cagatcaagtacattgtagcat

SEQ ID NO: 12871 - DNA, 19 bp, Artificial Sequence
  Synthetic
aagtcatgcaacagacagg

SEQ ID NO: 12872 - DNA, 25 bp, Artificial Sequence
  Synthetic
cagatatgtatcctgatttaaaccc

SEQ ID NO: 12873 - DNA, 23 bp, Artificial Sequence
  Synthetic
tctcatcgatacaaaaatgaaga

SEQ ID NO: 12874 - DNA, 24 bp, Artificial Sequence
  Synthetic
ataactcaaaattacttaggtgcc

SEQ ID NO: 12875 - DNA, 25 bp, Artificial Sequence
  Synthetic
atcaggtgtatatactgatgcatat

SEQ ID NO: 12876 - DNA, 24 bp, Artificial Sequence
  Synthetic
caccaaatacaaaatcagaaatgg

SEQ ID NO: 12877 - DNA, 23 bp, Artificial Sequence
  Synthetic
ttaaaattaaccggttatgtcct

SEQ ID NO: 12878 - DNA, 21 bp, Artificial Sequence
  Synthetic
gactctttgccaagatgacat

SEQ ID NO: 12879 - DNA, 23 bp, Artificial Sequence
  Synthetic
ctaatctctattagtgcaatcca

SEQ ID NO: 12880 - DNA, 25 bp, Artificial Sequence
  Synthetic
ccattaatcctactattacgtcaac

SEQ ID NO: 12881 - DNA, 18 bp, Artificial Sequence
  Synthetic
ggacactcagaaaaccgg

SEQ ID NO: 12882 - DNA, 21 bp, Artificial Sequence
  Synthetic
gaatcgcaatggtttacactt

SEQ ID NO: 12883 - DNA, 25 bp, Artificial Sequence
  Synthetic
tgatatacccttattttgttccact

SEQ ID NO: 12884 - DNA, 24 bp, Artificial Sequence
  Synthetic
tcaggaaatcttcaattaaggtgt

SEQ ID NO: 12885 - DNA, 21 bp, Artificial Sequence
  Synthetic
taactctaccttttgatgggc

SEQ ID NO: 12886 - DNA, 18 bp, Artificial Sequence
  Synthetic
caaaagcaggcaaaccat

SEQ ID NO: 12887 - DNA, 19 bp, Artificial Sequence
  Synthetic
caatggctttccttgagga

SEQ ID NO: 12888 - DNA, 21 bp, Artificial Sequence
  Synthetic
cgggaaggctaatagatttcc

SEQ ID NO: 12889 - DNA, 18 bp, Artificial Sequence
  Synthetic
ttcgtgcactttgtcgaa

SEQ ID NO: 12890 - DNA, 20 bp, Artificial Sequence
  Synthetic
cctgaatggtttagaaacgt

SEQ ID NO: 12891 - DNA, 22 bp, Artificial Sequence
  Synthetic
atgttcaacatgctaagtacag

SEQ ID NO: 12892 - DNA, 22 bp, Artificial Sequence
  Synthetic
acaagctttttctatcgctatg

SEQ ID NO: 12893 - DNA, 25 bp, Artificial Sequence
  Synthetic
gatcaaacttatacaatatccggaa

SEQ ID NO: 12894 - DNA, 20 bp, Artificial Sequence
  Synthetic
attctcaacacaagccaaag

SEQ ID NO: 12895 - DNA, 25 bp, Artificial Sequence
  Synthetic
gacctgggtacatatataaagaaac

SEQ ID NO: 12896 - DNA, 19 bp, Artificial Sequence
  Synthetic
catgcttggcacgtgaagt

SEQ ID NO: 12897 - DNA, 20 bp, Artificial Sequence
  Synthetic
tagtccttgaagagcgtcct

SEQ ID NO: 12898 - DNA, 18 bp, Artificial Sequence
  Synthetic
aggtaaccaggaaacgca

SEQ ID NO: 12899 - DNA, 23 bp, Artificial Sequence
  Synthetic
gtggggaatggtaatattaatgc

SEQ ID NO: 12900 - DNA, 22 bp, Artificial Sequence
  Synthetic
tagtttgtccatgttagtgcaa

SEQ ID NO: 12901 - DNA, 24 bp, Artificial Sequence
  Synthetic
ttgtaccatttattagtgccctta

SEQ ID NO: 12902 - DNA, 20 bp, Artificial Sequence
  Synthetic
atctgatcaacaggaggagg

SEQ ID NO: 12903 - DNA, 22 bp, Artificial Sequence
  Synthetic
attgaagtacatctgtcattgc

SEQ ID NO: 12904 - DNA, 22 bp, Artificial Sequence
  Synthetic
tcctgctgcttatacttttctg

SEQ ID NO: 12905 - DNA, 18 bp, Artificial Sequence
  Synthetic
gtgggctagtttgggggt

SEQ ID NO: 12906 - DNA, 18 bp, Artificial Sequence
  Synthetic
ccggctgtgttggacatt

SEQ ID NO: 12907 - DNA, 18 bp, Artificial Sequence
  Synthetic
ccgtagtggtaggcgcat

SEQ ID NO: 12908 - DNA, 21 bp, Artificial Sequence
  Synthetic
ctgatgttgattttgcacatg

SEQ ID NO: 12909 - DNA, 24 bp, Artificial Sequence
  Synthetic
caccaacttattttattatggtgg

SEQ ID NO: 12910 - DNA, 18 bp, Artificial Sequence
  Synthetic
gccattgattttgctgca

SEQ ID NO: 12911 - DNA, 19 bp, Artificial Sequence
  Synthetic
tagtggctctatggtgtcc

SEQ ID NO: 12912 - DNA, 20 bp, Artificial Sequence
  Synthetic
cctgaaattatggcctacct

SEQ ID NO: 12913 - DNA, 18 bp, Artificial Sequence
  Synthetic
ctacccctacatcctccc

SEQ ID NO: 12914 - DNA, 20 bp, Artificial Sequence
  Synthetic
actgtgtgtcatgtgtgtgt

SEQ ID NO: 12915 - DNA, 20 bp, Artificial Sequence
  Synthetic
aaactttatgtgttgcacct

SEQ ID NO: 12916 - DNA, 18 bp, Artificial Sequence
  Synthetic
gtgacggtgacattgcag

SEQ ID NO: 12917 - DNA, 23 bp, Artificial Sequence
  Synthetic
atgatccaaacaattcaaatcct

SEQ ID NO: 12918 - DNA, 19 bp, Artificial Sequence
  Synthetic
gagcactcacgtccctaac

SEQ ID NO: 12919 - DNA, 18 bp, Artificial Sequence
  Synthetic
ccctctcccattggtccg

SEQ ID NO: 12920 - DNA, 24 bp, Artificial Sequence
  Synthetic
cataggctcttgaaataaacaatg

SEQ ID NO: 12921 - DNA, 21 bp, Artificial Sequence
  Synthetic
cgagttccttatatgcttacc

SEQ ID NO: 12922 - DNA, 17 bp, Artificial Sequence
  Synthetic
gcgactgctggcttcaa

SEQ ID NO: 12923 - DNA, 16 bp, Artificial Sequence
  Synthetic
actggcgggtggctca

SEQ ID NO: 12924 - DNA, 16 bp, Artificial Sequence
  Synthetic
gtggtcctgggacgca

SEQ ID NO: 12925 - DNA, 17 bp, Artificial Sequence
  Synthetic
tagatcgggcagggtgg

SEQ ID NO: 12926 - DNA, 16 bp, Artificial Sequence
  Synthetic
ggtgtgtggtcgccct

SEQ ID NO: 12927 - DNA, 20 bp, Artificial Sequence
  Synthetic
tggtgtcggaagatttcgtg

SEQ ID NO: 12928 - DNA, 20 bp, Artificial Sequence
  Synthetic
cactccggtagtatctgcgt

SEQ ID NO: 12929 - DNA, 18 bp, Artificial Sequence
  Synthetic
ggtgtgccgcctagacac

SEQ ID NO: 12930 - DNA, 18 bp, Artificial Sequence
  Synthetic
gttttgggggtagcagcg

SEQ ID NO: 12931 - DNA, 18 bp, Artificial Sequence
  Synthetic
gcagtgactccatcatgg

SEQ ID NO: 12932 - DNA, 18 bp, Artificial Sequence
  Synthetic
gtggacacgctgacgaaa

SEQ ID NO: 12933 - DNA, 20 bp, Artificial Sequence
  Synthetic
cgcagcttggctatacagac

SEQ ID NO: 12934 - DNA, 19 bp, Artificial Sequence
  Synthetic
ctgaaaggagggagcacac

SEQ ID NO: 12935 - DNA, 17 bp, Artificial Sequence
  Synthetic
cggccaccggtagttca

SEQ ID NO: 12936 - DNA, 16 bp, Artificial Sequence
  Synthetic
cccggtggtgcagttg

SEQ ID NO: 12937 - DNA, 19 bp, Artificial Sequence
  Synthetic
gaaccgccggtcaaaacac

SEQ ID NO: 12938 - DNA, 16 bp, Artificial Sequence
  Synthetic
acaggcgcgcgtatgg

SEQ ID NO: 12939 - DNA, 17 bp, Artificial Sequence
  Synthetic
cttcggcaccggtttcc

SEQ ID NO: 12940 - DNA, 20 bp, Artificial Sequence
  Synthetic
ccccgtatatgtccaacggg

SEQ ID NO: 12941 - DNA, 18 bp, Artificial Sequence
  Synthetic
aacccgccacgtaaagga

SEQ ID NO: 12942 - DNA, 20 bp, Artificial Sequence
  Synthetic
tcttgtgaggcctctttgtg

SEQ ID NO: 12943 - DNA, 20 bp, Artificial Sequence
  Synthetic
tacggtggaaacaaaggacg

SEQ ID NO: 12944 - DNA, 19 bp, Artificial Sequence
  Synthetic
aaactcggcataccaacgg

SEQ ID NO: 12945 - DNA, 18 bp, Artificial Sequence
  Synthetic
gctaccgaccccgaaacc

SEQ ID NO: 12946 - DNA, 20 bp, Artificial Sequence
  Synthetic
aaacaactcccccatccacg

SEQ ID NO: 12947 - DNA, 19 bp, Artificial Sequence
  Synthetic
agtggagatcgaacagggc

SEQ ID NO: 12948 - DNA, 17 bp, Artificial Sequence
  Synthetic
cgcagggggagagaaca

SEQ ID NO: 12949 - DNA, 18 bp, Artificial Sequence
  Synthetic
agcacctgttctgcgacc

SEQ ID NO: 12950 - DNA, 18 bp, Artificial Sequence
  Synthetic
tgctgctcctgctcctcc

SEQ ID NO: 12951 - DNA, 20 bp, Artificial Sequence
  Synthetic
gaatgagtatccgtggtccc

SEQ ID NO: 12952 - DNA, 16 bp, Artificial Sequence
  Synthetic
ttgtccctcggggcca

SEQ ID NO: 12953 - DNA, 18 bp, Artificial Sequence
  Synthetic
gaaggtggacccggctat

SEQ ID NO: 12954 - DNA, 16 bp, Artificial Sequence
  Synthetic
gcacatggcgctccga

SEQ ID NO: 12955 - DNA, 19 bp, Artificial Sequence
  Synthetic
tgtgtaggaggttggccat

SEQ ID NO: 12956 - DNA, 19 bp, Artificial Sequence
  Synthetic
cgggtcatgcgatctgttt

SEQ ID NO: 12957 - DNA, 23 bp, Artificial Sequence
  Synthetic
cgaattcggttgtatataaacag

SEQ ID NO: 12958 - DNA, 18 bp, Artificial Sequence
  Synthetic
accagatgtgcaggccta

SEQ ID NO: 12959 - DNA, 20 bp, Artificial Sequence
  Synthetic
cgaagaggcgcttattcgag

SEQ ID NO: 12960 - DNA, 19 bp, Artificial Sequence
  Synthetic
atgctgctaaacattcccg

SEQ ID NO: 12961 - DNA, 18 bp, Artificial Sequence
  Synthetic
gggactggaagcccatag

SEQ ID NO: 12962 - DNA, 21 bp, Artificial Sequence
  Synthetic
gaaatcttttggatggacacc

SEQ ID NO: 12963 - DNA, 20 bp, Artificial Sequence
  Synthetic
ggtccggctagaaaatgtca

SEQ ID NO: 12964 - DNA, 16 bp, Artificial Sequence
  Synthetic
ggacgtgggaggtgca

SEQ ID NO: 12965 - DNA, 19 bp, Artificial Sequence
  Synthetic
tgggaacggtgataagaca

SEQ ID NO: 12966 - DNA, 21 bp, Artificial Sequence
  Synthetic
ggaacatatcctgtggtactg

SEQ ID NO: 12967 - DNA, 20 bp, Artificial Sequence
  Synthetic
tttggtggaggactctagca

SEQ ID NO: 12968 - DNA, 20 bp, Artificial Sequence
  Synthetic
actgaggagttggagatgga

SEQ ID NO: 12969 - DNA, 22 bp, Artificial Sequence
  Synthetic
aaacgtgtccactatttctttg

SEQ ID NO: 12970 - DNA, 21 bp, Artificial Sequence
  Synthetic
cccctccaatttactaacaca

SEQ ID NO: 12971 - DNA, 25 bp, Artificial Sequence
  Synthetic
gtctgatactaattataaggctacc

SEQ ID NO: 12972 - DNA, 21 bp, Artificial Sequence
  Synthetic
tgtttatgttgttgttgtgct

SEQ ID NO: 12973 - DNA, 25 bp, Artificial Sequence
  Synthetic
aggaaagtgatggatctatagtttc

SEQ ID NO: 12974 - DNA, 20 bp, Artificial Sequence
  Synthetic
cagaaggcgactatttgatg

SEQ ID NO: 12975 - DNA, 25 bp, Artificial Sequence
  Synthetic
acagcttaatgtcatttttagaagg

SEQ ID NO: 12976 - DNA, 24 bp, Artificial Sequence
  Synthetic
tgaggaccaaatattgtattggaa

SEQ ID NO: 12977 - DNA, 20 bp, Artificial Sequence
  Synthetic
ccagtactggtgggaagtct

SEQ ID NO: 12978 - DNA, 19 bp, Artificial Sequence
  Synthetic
gaagctgtcctgatgatgt

SEQ ID NO: 12979 - DNA, 24 bp, Artificial Sequence
  Synthetic
tccaggaactagtagtatagtacc

SEQ ID NO: 12980 - DNA, 18 bp, Artificial Sequence
  Synthetic
ctcaggcggttcagtttg

SEQ ID NO: 12981 - DNA, 18 bp, Artificial Sequence
  Synthetic
tgtccctacacttccacc

SEQ ID NO: 12982 - DNA, 18 bp, Artificial Sequence
  Synthetic
cgaaccagggtaaggtgt

SEQ ID NO: 12983 - DNA, 22 bp, Artificial Sequence
  Synthetic
catcaacacaacgattagtttg

SEQ ID NO: 12984 - DNA, 18 bp, Artificial Sequence
  Synthetic
ctgagcctccacaagaca

SEQ ID NO: 12985 - DNA, 19 bp, Artificial Sequence
  Synthetic
tgctaggcattttttcacc

SEQ ID NO: 12986 - DNA, 22 bp, Artificial Sequence
  Synthetic
gccattgaggatcattacagat

SEQ ID NO: 12987 - DNA, 18 bp, Artificial Sequence
  Synthetic
gggcttaaggggtcttac

SEQ ID NO: 12988 - DNA, 22 bp, Artificial Sequence
  Synthetic
tgcattctatagttcagaagcc

SEQ ID NO: 12989 - DNA, 25 bp, Artificial Sequence
  Synthetic
agttgctttattattactgaagctg

SEQ ID NO: 12990 - DNA, 25 bp, Artificial Sequence
  Synthetic
aagcaataaagttaactcctgaaag

SEQ ID NO: 12991 - DNA, 19 bp, Artificial Sequence
  Synthetic
gaagtgtacctgcagcatt

SEQ ID NO: 12992 - DNA, 18 bp, Artificial Sequence
  Synthetic
ctaccagcaggtcgccaa

SEQ ID NO: 12993 - DNA, 19 bp, Artificial Sequence
  Synthetic
gctatgagcacagtatggc

SEQ ID NO: 12994 - DNA, 18 bp, Artificial Sequence
  Synthetic
gtacacagccaggaggtt

SEQ ID NO: 12995 - DNA, 22 bp, Artificial Sequence
  Synthetic
gtccatagtacctttagctgaa

SEQ ID NO: 12996 - DNA, 25 bp, Artificial Sequence
  Synthetic
agatccctctattagtaaaactaca

SEQ ID NO: 12997 - DNA, 18 bp, Artificial Sequence
  Synthetic
caacacgtcctgctgaat

SEQ ID NO: 12998 - DNA, 23 bp, Artificial Sequence
  Synthetic
gcctaggtttaaaagtttacagt

SEQ ID NO: 12999 - DNA, 22 bp, Artificial Sequence
  Synthetic
gtggctaaagttttgtctacag

SEQ ID NO: 13000 - DNA, 18 bp, Artificial Sequence
  Synthetic
ccagaacatgaacgcctt

SEQ ID NO: 13001 - DNA, 18 bp, Artificial Sequence
  Synthetic
ggggacgctattccagat

SEQ ID NO: 13002 - DNA, 25 bp, Artificial Sequence
  Synthetic
ctagtaaaagaaagaagtcttctgc

SEQ ID NO: 13003 - DNA, 23 bp, Artificial Sequence
  Synthetic
aagcagagcatattcttagaact

SEQ ID NO: 13004 - DNA, 20 bp, Artificial Sequence
  Synthetic
ataccctcgtttatcttgcc

SEQ ID NO: 13005 - DNA, 20 bp, Artificial Sequence
  Synthetic
gctgaggcatctagtatcag

SEQ ID NO: 13006 - DNA, 21 bp, Artificial Sequence
  Synthetic
cttatgataacagacggctca

SEQ ID NO: 13007 - DNA, 23 bp, Artificial Sequence
  Synthetic
tgcacaaagacttatctagacac

SEQ ID NO: 13008 - DNA, 21 bp, Artificial Sequence
  Synthetic
ggtattcttttggcttcgaaa

SEQ ID NO: 13009 - DNA, 18 bp, Artificial Sequence
  Synthetic
ccacattcgttccagcta

SEQ ID NO: 13010 - DNA, 19 bp, Artificial Sequence
  Synthetic
cagcacagagagtttcaca

SEQ ID NO: 13011 - DNA, 18 bp, Artificial Sequence
  Synthetic
cgagtcttcgtgttagcc

SEQ ID NO: 13012 - DNA, 20 bp, Artificial Sequence
  Synthetic
atttgatgaaagcccaaagt

SEQ ID NO: 13013 - DNA, 21 bp, Artificial Sequence
  Synthetic
ctcatctgtgtatgctcatgg

SEQ ID NO: 13014 - DNA, 23 bp, Artificial Sequence
  Synthetic
aaacataagttcccattcaaaga

SEQ ID NO: 13015 - DNA, 22 bp, Artificial Sequence
  Synthetic
aacattggaaactgttaagaca

SEQ ID NO: 13016 - DNA, 25 bp, Artificial Sequence
  Synthetic
ctaatggtatatactgcttggaaag

SEQ ID NO: 13017 - DNA, 18 bp, Artificial Sequence
  Synthetic
ctagctccaccccaccat

SEQ ID NO: 13018 - DNA, 19 bp, Artificial Sequence
  Synthetic
ggtctagaaccaggacccg

SEQ ID NO: 13019 - DNA, 18 bp, Artificial Sequence
  Synthetic
cctgacaaggtgggatca

SEQ ID NO: 13020 - DNA, 25 bp, Artificial Sequence
  Synthetic
tcaaatattaactgaatctacaccc

SEQ ID NO: 13021 - DNA, 22 bp, Artificial Sequence
  Synthetic
ctcaacaagtaaatgtccagga

SEQ ID NO: 13022 - DNA, 18 bp, Artificial Sequence
  Synthetic
gagctacagtaggggctc

SEQ ID NO: 13023 - DNA, 21 bp, Artificial Sequence
  Synthetic
agttagtttatggtagtggca

SEQ ID NO: 13024 - DNA, 20 bp, Artificial Sequence
  Synthetic
agatgacctcgctatggtta

SEQ ID NO: 13025 - DNA, 21 bp, Artificial Sequence
  Synthetic
atcccaacagatttgcactag

SEQ ID NO: 13026 - DNA, 21 bp, Artificial Sequence
  Synthetic
tcttctatgctagacgtgaac

SEQ ID NO: 13027 - DNA, 25 bp, Artificial Sequence
  Synthetic
taatcctatacatgacacatatagg

SEQ ID NO: 13028 - DNA, 22 bp, Artificial Sequence
  Synthetic
attggttaatgctcattcccaa

SEQ ID NO: 13029 - DNA, 25 bp, Artificial Sequence
  Synthetic
ttacgctgaacatctaaataaaacc

SEQ ID NO: 13030 - DNA, 20 bp, Artificial Sequence
  Synthetic
ctaagagagtcagcaaaggc

SEQ ID NO: 13031 - DNA, 22 bp, Artificial Sequence
  Synthetic
atatgatgggcaaagagtgtac

SEQ ID NO: 13032 - DNA, 19 bp, Artificial Sequence
  Synthetic
ccctggcattattcaacga

SEQ ID NO: 13033 - DNA, 24 bp, Artificial Sequence
  Synthetic
acataccacctctaaaaatttcag

SEQ ID NO: 13034 - DNA, 21 bp, Artificial Sequence
  Synthetic
tggcataaagttaaaggggaa

SEQ ID NO: 13035 - DNA, 18 bp, Artificial Sequence
  Synthetic
cctgaaacagctgacaca

SEQ ID NO: 13036 - DNA, 20 bp, Artificial Sequence
  Synthetic
acaccaatcacaagtcgagc

SEQ ID NO: 13037 - DNA, 19 bp, Artificial Sequence
  Synthetic
gttgcttataactgctggc

SEQ ID NO: 13038 - DNA, 19 bp, Artificial Sequence
  Synthetic
tattgttggttgtgctcca

SEQ ID NO: 13039 - DNA, 22 bp, Artificial Sequence
  Synthetic
gtgatcgtttgtttttctttgg

SEQ ID NO: 13040 - DNA, 21 bp, Artificial Sequence
  Synthetic
tgaactcagctattttggatg

SEQ ID NO: 13041 - DNA, 19 bp, Artificial Sequence
  Synthetic
ctgaatctttgtcacccga

SEQ ID NO: 13042 - DNA, 25 bp, Artificial Sequence
  Synthetic
agtctttggatgatctatttgaaga

SEQ ID NO: 13043 - DNA, 19 bp, Artificial Sequence
  Synthetic
ggatttctcctcgcaaacc

SEQ ID NO: 13044 - DNA, 24 bp, Artificial Sequence
  Synthetic
taagaagtcgtttactaatacctc

SEQ ID NO: 13045 - DNA, 21 bp, Artificial Sequence
  Synthetic
ccaaatctccatcaagaagac

SEQ ID NO: 13046 - DNA, 20 bp, Artificial Sequence
  Synthetic
cgtttgcaagtgtttggaag

SEQ ID NO: 13047 - DNA, 20 bp, Artificial Sequence
  Synthetic
cccatctgttgtacccctta

SEQ ID NO: 13048 - DNA, 21 bp, Artificial Sequence
  Synthetic
atttgaaattgaaaatcccgc

SEQ ID NO: 13049 - DNA, 20 bp, Artificial Sequence
  Synthetic
ttagtatggcagcttaaggg

SEQ ID NO: 13050 - DNA, 23 bp, Artificial Sequence
  Synthetic
gtgattgtccagctatagaatta

SEQ ID NO: 13051 - DNA, 25 bp, Artificial Sequence
  Synthetic
tgcctgatagttataaatatactgc

SEQ ID NO: 13052 - DNA, 22 bp, Artificial Sequence
  Synthetic
gccaaaatctgttaacaactgt

SEQ ID NO: 13053 - DNA, 21 bp, Artificial Sequence
  Synthetic
cacttttgaagcaaaaaaggc

SEQ ID NO: 13054 - DNA, 23 bp, Artificial Sequence
  Synthetic
tttagcttctctagttgaaaagc

SEQ ID NO: 13055 - DNA, 24 bp, Artificial Sequence
  Synthetic
gagcaacgactatttagaattgac

SEQ ID NO: 13056 - DNA, 21 bp, Artificial Sequence
  Synthetic
gtctaatacaccgagacaaca

SEQ ID NO: 13057 - DNA, 24 bp, Artificial Sequence
  Synthetic
gcactgttcttttatagaaaatcg

SEQ ID NO: 13058 - DNA, 20 bp, Artificial Sequence
  Synthetic
taccactctttctccccctg

SEQ ID NO: 13059 - DNA, 18 bp, Artificial Sequence
  Synthetic
gagaggtgggaggaagac

SEQ ID NO: 13060 - DNA, 23 bp, Artificial Sequence
  Synthetic
agtattttattctttgggggatt

SEQ ID NO: 13061 - DNA, 21 bp, Artificial Sequence
  Synthetic
cccttagttgaattaggccaa

SEQ ID NO: 13062 - DNA, 21 bp, Artificial Sequence
  Synthetic
tgtggattctcattttgatgg

SEQ ID NO: 13063 - DNA, 22 bp, Artificial Sequence
  Synthetic
agttaggtgacactgaaaatcc

SEQ ID NO: 13064 - DNA, 21 bp, Artificial Sequence
  Synthetic
ggcgatatgtgtgatataggc

SEQ ID NO: 13065 - DNA, 20 bp, Artificial Sequence
  Synthetic
cctgcaaaagagaaggtaga

SEQ ID NO: 13066 - DNA, 25 bp, Artificial Sequence
  Synthetic
attctgtatgaaggcattattatgc

SEQ ID NO: 13067 - DNA, 19 bp, Artificial Sequence
  Synthetic
cgatttcggtaccaaaagg

SEQ ID NO: 13068 - DNA, 22 bp, Artificial Sequence
  Synthetic
aagcagggttaataatcactca

SEQ ID NO: 13069 - DNA, 19 bp, Artificial Sequence
  Synthetic
gagcaatggtggatcaagt

SEQ ID NO: 13070 - DNA, 18 bp, Artificial Sequence
  Synthetic
acgagaatccagcacaca

SEQ ID NO: 13071 - DNA, 19 bp, Artificial Sequence
  Synthetic
caaaccagtgtgcaaccta

SEQ ID NO: 13072 - DNA, 24 bp, Artificial Sequence
  Synthetic
caagcatagtttatagaaagggag

SEQ ID NO: 13073 - DNA, 22 bp, Artificial Sequence
  Synthetic
tgagacagcagtataatcatgc

SEQ ID NO: 13074 - DNA, 23 bp, Artificial Sequence
  Synthetic
agtaatgtaataacaacacaggc

SEQ ID NO: 13075 - DNA, 19 bp, Artificial Sequence
  Synthetic
tggtagtggtaaacagcaa

SEQ ID NO: 13076 - DNA, 19 bp, Artificial Sequence
  Synthetic
ggatacagcgacaaacaca

SEQ ID NO: 13077 - DNA, 22 bp, Artificial Sequence
  Synthetic
acaaatgaacatgaaacaatgg

SEQ ID NO: 13078 - DNA, 25 bp, Artificial Sequence
  Synthetic
aaggtatatattatgtacatgacgg

SEQ ID NO: 13079 - DNA, 24 bp, Artificial Sequence
  Synthetic
ctatagttatacaacaacaaacgc

SEQ ID NO: 13080 - DNA, 25 bp, Artificial Sequence
  Synthetic
atacctttattacttgtatatgccc

SEQ ID NO: 13081 - DNA, 22 bp, Artificial Sequence
  Synthetic
attagacattacacctaccact

SEQ ID NO: 13082 - DNA, 20 bp, Artificial Sequence
  Synthetic
ccccacattccttaccaaac

SEQ ID NO: 13083 - DNA, 18 bp, Artificial Sequence
  Synthetic
aggccccatttgacacta

SEQ ID NO: 13084 - DNA, 23 bp, Artificial Sequence
  Synthetic
ccaatatattttatcatgcaggc

SEQ ID NO: 13085 - DNA, 23 bp, Artificial Sequence
  Synthetic
aggctcagttgtttaataaacct

SEQ ID NO: 13086 - DNA, 19 bp, Artificial Sequence
  Synthetic
tgtctgcagaaactatggc

SEQ ID NO: 13087 - DNA, 20 bp, Artificial Sequence
  Synthetic
gggttcgtactaaaccttct

SEQ ID NO: 13088 - DNA, 22 bp, Artificial Sequence
  Synthetic
cgtgtggttacataaactaagg

SEQ ID NO: 13089 - DNA, 23 bp, Artificial Sequence
  Synthetic
ctgcactttatgtttttttttgc

SEQ ID NO: 13090 - DNA, 21 bp, Artificial Sequence
  Synthetic
tatagggtgtaaccgaaaacg

SEQ ID NO: 13091 - DNA, 23 bp, Artificial Sequence
  Synthetic
gtaagaatgcatggaaaaaaacc

SEQ ID NO: 13092 - DNA, 18 bp, Artificial Sequence
  Synthetic
ctgcttatgggtgcacta

SEQ ID NO: 13093 - DNA, 20 bp, Artificial Sequence
  Synthetic
aacattagtgaaacggtggg

SEQ ID NO: 13094 - DNA, 21 bp, Artificial Sequence
  Synthetic
agtttatgcaaggtgtggtta

SEQ ID NO: 13095 - DNA, 23 bp, Artificial Sequence
  Synthetic
ggaaatatttgcacagtagaatg

SEQ ID NO: 13096 - DNA, 18 bp, Artificial Sequence
  Synthetic
cgtgcgactggaaaatgt

SEQ ID NO: 13097 - DNA, 18 bp, Artificial Sequence
  Synthetic
gtaaacgtgcatcagcca

SEQ ID NO: 13098 - DNA, 23 bp, Artificial Sequence
  Synthetic
cctcctgttattacatctgtagg

SEQ ID NO: 13099 - DNA, 18 bp, Artificial Sequence
  Synthetic
gcctgcaagataccacat

SEQ ID NO: 13100 - DNA, 18 bp, Artificial Sequence
  Synthetic
acctgtacagccttctgg

SEQ ID NO: 13101 - DNA, 23 bp, Artificial Sequence
  Synthetic
gtggaaacatagcagatagtagg

SEQ ID NO: 13102 - DNA, 25 bp, Artificial Sequence
  Synthetic
tccaacactatatgtaaatatccag

SEQ ID NO: 13103 - DNA, 25 bp, Artificial Sequence
  Synthetic
taaactatatatgttgtgtgagtgg

SEQ ID NO: 13104 - DNA, 22 bp, Artificial Sequence
  Synthetic
tcttgcaatagtcagtcttgtc

SEQ ID NO: 13105 - DNA, 19 bp, Artificial Sequence
  Synthetic
ctcggaaaccctatgtgtg

SEQ ID NO: 13106 - DNA, 23 bp, Artificial Sequence
  Synthetic
gcttatcaaaaagaacagtgcat

SEQ ID NO: 13107 - DNA, 23 bp, Artificial Sequence
  Synthetic
ttcttctggacaattttaaagcc

SEQ ID NO: 13108 - DNA, 18 bp, Artificial Sequence
  Synthetic
cttgcgactggactcaga

SEQ ID NO: 13109 - DNA, 24 bp, Artificial Sequence
  Synthetic
gttggaagggaatttaataacttg

SEQ ID NO: 13110 - DNA, 23 bp, Artificial Sequence
  Synthetic
tgtatggaaagtgtaaaaaacgg

SEQ ID NO: 13111 - DNA, 21 bp, Artificial Sequence
  Synthetic
agcaaaagcagggtagataat

SEQ ID NO: 13112 - DNA, 19 bp, Artificial Sequence
  Synthetic
tgcttttgacgaaaggaga

SEQ ID NO: 13113 - DNA, 19 bp, Artificial Sequence
  Synthetic
tctgatgcaaggttcaact

SEQ ID NO: 13114 - DNA, 19 bp, Artificial Sequence
  Synthetic
atgagaatccagcacacaa

SEQ ID NO: 13115 - DNA, 19 bp, Artificial Sequence
  Synthetic
atgagaggacaaaaggcaa

SEQ ID NO: 13116 - DNA, 23 bp, Artificial Sequence
  Synthetic
cagcagcttaagattctaaaacg

SEQ ID NO: 13117 - DNA, 18 bp, Artificial Sequence
  Synthetic
aatactggaggcagcaaa

SEQ ID NO: 13118 - DNA, 20 bp, Artificial Sequence
  Synthetic
cctgatacgggcaaatcaat

SEQ ID NO: 13119 - DNA, 25 bp, Artificial Sequence
  Synthetic
ccaataataacaattactgatgcag

SEQ ID NO: 13120 - DNA, 23 bp, Artificial Sequence
  Synthetic
tatgaactgtttatgacacctcc

SEQ ID NO: 13121 - DNA, 23 bp, Artificial Sequence
  Synthetic
cgaatccaacaaagaaaacataa

SEQ ID NO: 13122 - DNA, 19 bp, Artificial Sequence
  Synthetic
acaagtgccgttattgagg

SEQ ID NO: 13123 - DNA, 24 bp, Artificial Sequence
  Synthetic
ttatgatttcagctctatagatgc

SEQ ID NO: 13124 - DNA, 20 bp, Artificial Sequence
  Synthetic
cctttttctgtgccttctgt

SEQ ID NO: 13125 - DNA, 22 bp, Artificial Sequence
  Synthetic
tcctaatggatatcaaaagggt

SEQ ID NO: 13126 - DNA, 19 bp, Artificial Sequence
  Synthetic
ccataatggcactgttggt

SEQ ID NO: 13127 - DNA, 22 bp, Artificial Sequence
  Synthetic
caccgtctacctctattgaaac

SEQ ID NO: 13128 - DNA, 21 bp, Artificial Sequence
  Synthetic
ggctctgctacatatttttcg

SEQ ID NO: 13129 - DNA, 18 bp, Artificial Sequence
  Synthetic
tacctgaagaggaggagc

SEQ ID NO: 13130 - DNA, 25 bp, Artificial Sequence
  Synthetic
actaactcatcatttaagtttggag

SEQ ID NO: 13131 - DNA, 23 bp, Artificial Sequence
  Synthetic
tgtatctttcatgaataggcaaa

SEQ ID NO: 13132 - DNA, 19 bp, Artificial Sequence
  Synthetic
tgctaaaacagtggaagca

SEQ ID NO: 13133 - DNA, 20 bp, Artificial Sequence
  Synthetic
gcactccactatttcctccc

SEQ ID NO: 13134 - DNA, 19 bp, Artificial Sequence
  Synthetic
accagagaagctcccagaa

SEQ ID NO: 13135 - DNA, 18 bp, Artificial Sequence
  Synthetic
tggggaagaggaagatgt

SEQ ID NO: 13136 - DNA, 22 bp, Artificial Sequence
  Synthetic
cctaatgtaaatgtgtttgtgg

SEQ ID NO: 13137 - DNA, 18 bp, Artificial Sequence
  Synthetic
cgcctttacggatgacat

SEQ ID NO: 13138 - DNA, 21 bp, Artificial Sequence
  Synthetic
aggctggagaaatagaaatgc

SEQ ID NO: 13139 - DNA, 18 bp, Artificial Sequence
  Synthetic
tgtggaggttggaaggta

SEQ ID NO: 13140 - DNA, 18 bp, Artificial Sequence
  Synthetic
agcgggtattgatggtga

SEQ ID NO: 13141 - DNA, 19 bp, Artificial Sequence
  Synthetic
aaatgtcctccagatgctg

SEQ ID NO: 13142 - DNA, 21 bp, Artificial Sequence
  Synthetic
catggggtcaatatttttgcc

SEQ ID NO: 13143 - DNA, 21 bp, Artificial Sequence
  Synthetic
tgtattgttcaacaacagctg

SEQ ID NO: 13144 - DNA, 25 bp, Artificial Sequence
  Synthetic
aagacatttgctattagacttttgg

SEQ ID NO: 13145 - DNA, 18 bp, Artificial Sequence
  Synthetic
ggaaattccctggcattg

SEQ ID NO: 13146 - DNA, 25 bp, Artificial Sequence
  Synthetic
atgcattaccatttgataatgaagg

SEQ ID NO: 13147 - DNA, 19 bp, Artificial Sequence
  Synthetic
aaccccagaagactccgtg

SEQ ID NO: 13148 - DNA, 18 bp, Artificial Sequence
  Synthetic
gatttgtcccgtctccag

SEQ ID NO: 13149 - DNA, 18 bp, Artificial Sequence
  Synthetic
ggtctcgggattggtact

SEQ ID NO: 13150 - DNA, 21 bp, Artificial Sequence
  Synthetic
aggttgtaacaacacctgatc

SEQ ID NO: 13151 - DNA, 19 bp, Artificial Sequence
  Synthetic
tgcacattttacaggtgac

SEQ ID NO: 13152 - DNA, 20 bp, Artificial Sequence
  Synthetic
tgaccctgatgtaacaatga

SEQ ID NO: 13153 - DNA, 22 bp, Artificial Sequence
  Synthetic
gtactcctctagaaccttatgc

SEQ ID NO: 13154 - DNA, 20 bp, Artificial Sequence
  Synthetic
ttccatatacttccacgctg

SEQ ID NO: 13155 - DNA, 20 bp, Artificial Sequence
  Synthetic
taggagacacagaaaatccc

SEQ ID NO: 13156 - DNA, 22 bp, Artificial Sequence
  Synthetic
taataggagctcaagacaatca

SEQ ID NO: 13157 - DNA, 18 bp, Artificial Sequence
  Synthetic
ctcccctgcgaggaacca

SEQ ID NO: 13158 - DNA, 20 bp, Artificial Sequence
  Synthetic
accaaaagaaacaccgtccg

SEQ ID NO: 13159 - DNA, 20 bp, Artificial Sequence
  Synthetic
cctcggtaaggtgatcgaca

SEQ ID NO: 13160 - DNA, 20 bp, Artificial Sequence
  Synthetic
aacagacaacgccatcctac

SEQ ID NO: 13161 - DNA, 15 bp, Artificial Sequence
  Synthetic
acgtcaccggccaca

SEQ ID NO: 13162 - DNA, 20 bp, Artificial Sequence
  Synthetic
atgactctttgcagacaggg

SEQ ID NO: 13163 - DNA, 20 bp, Artificial Sequence
  Synthetic
gctcatggatgaacacaacg

SEQ ID NO: 13164 - DNA, 16 bp, Artificial Sequence
  Synthetic
tgcaattggacgcggg

SEQ ID NO: 13165 - DNA, 20 bp, Artificial Sequence
  Synthetic
tgatgatgcttatggcccag

SEQ ID NO: 13166 - DNA, 20 bp, Artificial Sequence
  Synthetic
agcccttattctctggtggg

SEQ ID NO: 13167 - DNA, 16 bp, Artificial Sequence
  Synthetic
cgctggaccggcactt

SEQ ID NO: 13168 - DNA, 19 bp, Artificial Sequence
  Synthetic
ctacccttgtcgtgagcct

SEQ ID NO: 13169 - DNA, 19 bp, Artificial Sequence
  Synthetic
tacagcgtccctactgtcc

SEQ ID NO: 13170 - DNA, 20 bp, Artificial Sequence
  Synthetic
gcttaatccatcagtcgcgg

SEQ ID NO: 13171 - DNA, 18 bp, Artificial Sequence
  Synthetic
cttggcaacgatggggaa

SEQ ID NO: 13172 - DNA, 19 bp, Artificial Sequence
  Synthetic
gacttctccttggacccca

SEQ ID NO: 13173 - DNA, 20 bp, Artificial Sequence
  Synthetic
tactggcagtgttgttgtgg

SEQ ID NO: 13174 - DNA, 20 bp, Artificial Sequence
  Synthetic
actgccaggtaatccaactg

SEQ ID NO: 13175 - DNA, 20 bp, Artificial Sequence
  Synthetic
ctggcaaacctcttacctgc

SEQ ID NO: 13176 - DNA, 19 bp, Artificial Sequence
  Synthetic
tgcatggtcctatccgact

SEQ ID NO: 13177 - DNA, 20 bp, Artificial Sequence
  Synthetic
tcgtcacaatgaccagcatt

SEQ ID NO: 13178 - DNA, 18 bp, Artificial Sequence
  Synthetic
cgagtacgcacctcccca

SEQ ID NO: 13179 - DNA, 18 bp, Artificial Sequence
  Synthetic
ctgcccactcagccagat

SEQ ID NO: 13180 - DNA, 20 bp, Artificial Sequence
  Synthetic
ggcttctcatatgacacccg

SEQ ID NO: 13181 - DNA, 16 bp, Artificial Sequence
  Synthetic
aaagcggctgcagcag

SEQ ID NO: 13182 - DNA, 20 bp, Artificial Sequence
  Synthetic
tgcggtctctacctcttcaa

SEQ ID NO: 13183 - DNA, 23 bp, Artificial Sequence
  Synthetic
atttctaaaaaatgttgctcctg

SEQ ID NO: 13184 - DNA, 25 bp, Artificial Sequence
  Synthetic
cttctagtttgaaaaaatcagaagg

SEQ ID NO: 13185 - DNA, 18 bp, Artificial Sequence
  Synthetic
aacattcccatacaccgg

SEQ ID NO: 13186 - DNA, 24 bp, Artificial Sequence
  Synthetic
ctttggatagaatggatgaagaac

SEQ ID NO: 13187 - DNA, 23 bp, Artificial Sequence
  Synthetic
aaacttggctaaaaatatctgtg

SEQ ID NO: 13188 - DNA, 18 bp, Artificial Sequence
  Synthetic
gagtcgctggagtgaatg

SEQ ID NO: 13189 - DNA, 22 bp, Artificial Sequence
  Synthetic
agagatggtctattagtagcag

SEQ ID NO: 13190 - DNA, 25 bp, Artificial Sequence
  Synthetic
aaaggaacagatctatactaaacac

SEQ ID NO: 13191 - DNA, 20 bp, Artificial Sequence
  Synthetic
ccaaaagcataacaatggcc

SEQ ID NO: 13192 - DNA, 20 bp, Artificial Sequence
  Synthetic
ccagaatgtgataggcttct

SEQ ID NO: 13193 - DNA, 18 bp, Artificial Sequence
  Synthetic
gtctggctgacacgtaaa

SEQ ID NO: 13194 - DNA, 21 bp, Artificial Sequence
  Synthetic
gggacaccataaattttgaga

SEQ ID NO: 13195 - DNA, 21 bp, Artificial Sequence
  Synthetic
gttccccagattgaatcaaga

SEQ ID NO: 13196 - DNA, 21 bp, Artificial Sequence
  Synthetic
gcaaataaatcaattcagccg

SEQ ID NO: 13197 - DNA, 24 bp, Artificial Sequence
  Synthetic
ttaaggagagacataagatgaaag

SEQ ID NO: 13198 - DNA, 21 bp, Artificial Sequence
  Synthetic
ggatagatctggtcttacagc

SEQ ID NO: 13199 - DNA, 22 bp, Artificial Sequence
  Synthetic
agcatcattattgtctttgact

SEQ ID NO: 13200 - DNA, 21 bp, Artificial Sequence
  Synthetic
acacattagtagtagcgagtg

SEQ ID NO: 13201 - DNA, 23 bp, Artificial Sequence
  Synthetic
tgatttctgatcagttaccaatc

SEQ ID NO: 13202 - DNA, 25 bp, Artificial Sequence
  Synthetic
ccagcagatttacttataaaagaac

SEQ ID NO: 13203 - DNA, 23 bp, Artificial Sequence
  Synthetic
acacacttgaaaatataacaacc

SEQ ID NO: 13204 - DNA, 21 bp, Artificial Sequence
  Synthetic
tgtggttcaactaatcaaaca

SEQ ID NO: 13205 - DNA, 19 bp, Artificial Sequence
  Synthetic
tccaaaaacaaggaccaac

SEQ ID NO: 13206 - DNA, 18 bp, Artificial Sequence
  Synthetic
agcccaccacaaaacaac

SEQ ID NO: 13207 - DNA, 20 bp, Artificial Sequence
  Synthetic
atcagaactacactgctcac

SEQ ID NO: 13208 - DNA, 25 bp, Artificial Sequence
  Synthetic
caaatcaaccagaatcaaaatcaac

SEQ ID NO: 13209 - DNA, 20 bp, Artificial Sequence
  Synthetic
ctagaaggggaagtgaacaa

SEQ ID NO: 13210 - DNA, 19 bp, Artificial Sequence
  Synthetic
aagggtccaacatctgttt

SEQ ID NO: 13211 - DNA, 19 bp, Artificial Sequence
  Synthetic
actgctcctatactgcaag

SEQ ID NO: 13212 - DNA, 19 bp, Artificial Sequence
  Synthetic
aaataagtggagctgcaga

SEQ ID NO: 13213 - DNA, 23 bp, Artificial Sequence
  Synthetic
atcaaagttatcttaacaaccct

SEQ ID NO: 13214 - DNA, 22 bp, Artificial Sequence
  Synthetic
caatagactggcagttactgag

SEQ ID NO: 13215 - DNA, 21 bp, Artificial Sequence
  Synthetic
cttagcataggaattcttggg

SEQ ID NO: 13216 - DNA, 20 bp, Artificial Sequence
  Synthetic
atcactcccctgtgaggaac

SEQ ID NO: 13217 - DNA, 20 bp, Artificial Sequence
  Synthetic
accaaacgtaacaccaaccg

SEQ ID NO: 13218 - DNA, 20 bp, Artificial Sequence
  Synthetic
catcgatacccttacgtgcg

SEQ ID NO: 13219 - DNA, 16 bp, Artificial Sequence
  Synthetic
gccgatgccatcctgc

SEQ ID NO: 13220 - DNA, 20 bp, Artificial Sequence
  Synthetic
tgatgatgaactggtcccct

SEQ ID NO: 13221 - DNA, 20 bp, Artificial Sequence
  Synthetic
ttcaactcttcaggctgtcc

SEQ ID NO: 13222 - DNA, 20 bp, Artificial Sequence
  Synthetic
tccttaacaacaccaggcca

SEQ ID NO: 13223 - DNA, 16 bp, Artificial Sequence
  Synthetic
gcacaggctggaagcg

SEQ ID NO: 13224 - DNA, 18 bp, Artificial Sequence
  Synthetic
cggctttggagaacctcg

SEQ ID NO: 13225 - DNA, 19 bp, Artificial Sequence
  Synthetic
tgtgtagtacacccgaccc

SEQ ID NO: 13226 - DNA, 17 bp, Artificial Sequence
  Synthetic
agactgggcgcacaacg

SEQ ID NO: 13227 - DNA, 20 bp, Artificial Sequence
  Synthetic
aactgctacccaaaccttcc

SEQ ID NO: 13228 - DNA, 16 bp, Artificial Sequence
  Synthetic
cacgccgtgggcctat

SEQ ID NO: 13229 - DNA, 20 bp, Artificial Sequence
  Synthetic
cctaatatcaggaccggggt

SEQ ID NO: 13230 - DNA, 19 bp, Artificial Sequence
  Synthetic
ggtgatcaaggggggaaga

SEQ ID NO: 13231 - DNA, 18 bp, Artificial Sequence
  Synthetic
caggactggcagggggaa

SEQ ID NO: 13232 - DNA, 19 bp, Artificial Sequence
  Synthetic
ccatcgtgggaccagatgt

SEQ ID NO: 13233 - DNA, 20 bp, Artificial Sequence
  Synthetic
gatggaagagtgctctcagc

SEQ ID NO: 13234 - DNA, 20 bp, Artificial Sequence
  Synthetic
tcaacatattgggggggtgg

SEQ ID NO: 13235 - DNA, 19 bp, Artificial Sequence
  Synthetic
gctaatagccttcgcctcc

SEQ ID NO: 13236 - DNA, 18 bp, Artificial Sequence
  Synthetic
ttatgcacactcgctgcc

SEQ ID NO: 13237 - DNA, 18 bp, Artificial Sequence
  Synthetic
gcgcctacacaggtttgc

SEQ ID NO: 13238 - DNA, 16 bp, Artificial Sequence
  Synthetic
caggagatgggcggca

SEQ ID NO: 13239 - DNA, 20 bp, Artificial Sequence
  Synthetic
cctatctactgccttggccg

SEQ ID NO: 13240 - DNA, 18 bp, Artificial Sequence
  Synthetic
caactcgttgctacgcca

SEQ ID NO: 13241 - DNA, 20 bp, Artificial Sequence
  Synthetic
gaacgaggttttctgcgttc

SEQ ID NO: 13242 - DNA, 20 bp, Artificial Sequence
  Synthetic
accaatgttgtgacctggac

SEQ ID NO: 13243 - DNA, 19 bp, Artificial Sequence
  Synthetic
acatcatgctcctccaacg

SEQ ID NO: 13244 - DNA, 20 bp, Artificial Sequence
  Synthetic
ttcaaagactccatggcctc

SEQ ID NO: 13245 - DNA, 18 bp, Artificial Sequence
  Synthetic
actttgtgcgacaatgct

SEQ ID NO: 13246 - DNA, 18 bp, Artificial Sequence
  Synthetic
gaacaatggcctggacag

SEQ ID NO: 13247 - DNA, 18 bp, Artificial Sequence
  Synthetic
attacctcctggcttgga

SEQ ID NO: 13248 - DNA, 22 bp, Artificial Sequence
  Synthetic
ttgacagattcaagttggattg

SEQ ID NO: 13249 - DNA, 25 bp, Artificial Sequence
  Synthetic
ttataaaaggaagatcccatttgag

SEQ ID NO: 13250 - DNA, 19 bp, Artificial Sequence
  Synthetic
gcccttttcaatcccttca

SEQ ID NO: 13251 - DNA, 21 bp, Artificial Sequence
  Synthetic
tattgaggaattgtcaaggga

SEQ ID NO: 13252 - DNA, 20 bp, Artificial Sequence
  Synthetic
ctcatcggaggacttgaatg

SEQ ID NO: 13253 - DNA, 22 bp, Artificial Sequence
  Synthetic
cgaaaccggtacatataaaagc

SEQ ID NO: 13254 - DNA, 18 bp, Artificial Sequence
  Synthetic
atgcatggaaatgtggct

SEQ ID NO: 13255 - DNA, 18 bp, Artificial Sequence
  Synthetic
catggcggataaccaagg

SEQ ID NO: 13256 - DNA, 20 bp, Artificial Sequence
  Synthetic
ggcagtccgtatgtaagtcc

SEQ ID NO: 13257 - DNA, 19 bp, Artificial Sequence
  Synthetic
tgctacaacacaatgctgg

SEQ ID NO: 13258 - DNA, 18 bp, Artificial Sequence
  Synthetic
gtcacgtttagcgctgaa

SEQ ID NO: 13259 - DNA, 18 bp, Artificial Sequence
  Synthetic
gcacaaggccattgaact

SEQ ID NO: 13260 - DNA, 22 bp, Artificial Sequence
  Synthetic
aggtgtgcagtaatatagatgc

SEQ ID NO: 13261 - DNA, 19 bp, Artificial Sequence
  Synthetic
caggaccctgcctttttac

SEQ ID NO: 13262 - DNA, 21 bp, Artificial Sequence
  Synthetic
atacacctatacccacatcct

SEQ ID NO: 13263 - DNA, 21 bp, Artificial Sequence
  Synthetic
ggctatggattttaaaaccct

SEQ ID NO: 13264 - DNA, 20 bp, Artificial Sequence
  Synthetic
aactcctagtggctctatgg

SEQ ID NO: 13265 - DNA, 23 bp, Artificial Sequence
  Synthetic
agatgttatggcctatattcatg

SEQ ID NO: 13266 - DNA, 16 bp, Artificial Sequence
  Synthetic
ccgccgccttacctga

SEQ ID NO: 13267 - DNA, 17 bp, Artificial Sequence
  Synthetic
caactctgctggctcgg

SEQ ID NO: 13268 - DNA, 18 bp, Artificial Sequence
  Synthetic
ccctcctagccagcctac

SEQ ID NO: 13269 - DNA, 19 bp, Artificial Sequence
  Synthetic
ggaagcccccagtttatgc

SEQ ID NO: 13270 - DNA, 20 bp, Artificial Sequence
  Synthetic
aaggcgagaataccagcaac

SEQ ID NO: 13271 - DNA, 18 bp, Artificial Sequence
  Synthetic
cctggacccccaaagaca

SEQ ID NO: 13272 - DNA, 20 bp, Artificial Sequence
  Synthetic
ggtcgtgatgccttacaaca

SEQ ID NO: 13273 - DNA, 18 bp, Artificial Sequence
  Synthetic
ggaggcaggccatatcga

SEQ ID NO: 13274 - DNA, 18 bp, Artificial Sequence
  Synthetic
ccggcactagatacgcct

SEQ ID NO: 13275 - DNA, 18 bp, Artificial Sequence
  Synthetic
ctgggcgctacctgaact

SEQ ID NO: 13276 - DNA, 19 bp, Artificial Sequence
  Synthetic
ccactgtggtgttccagtc

SEQ ID NO: 13277 - DNA, 18 bp, Artificial Sequence
  Synthetic
aaggcaggtcctctcagg

SEQ ID NO: 13278 - DNA, 21 bp, Artificial Sequence
  Synthetic
taggcaagcctagctacataa

SEQ ID NO: 13279 - DNA, 19 bp, Artificial Sequence
  Synthetic
tggaaaggaccacaggagg

SEQ ID NO: 13280 - DNA, 20 bp, Artificial Sequence
  Synthetic
catcctcggtgattacagcc

SEQ ID NO: 13281 - DNA, 21 bp, Artificial Sequence
  Synthetic
ctcttattcagacccttgttc

SEQ ID NO: 13282 - DNA, 20 bp, Artificial Sequence
  Synthetic
cataactccctcatcctgcc

SEQ ID NO: 13283 - DNA, 20 bp, Artificial Sequence
  Synthetic
aaaccctgagtcatccctgt

SEQ ID NO: 13284 - DNA, 15 bp, Artificial Sequence
  Synthetic
tgcgccgtgccttct

SEQ ID NO: 13285 - DNA, 20 bp, Artificial Sequence
  Synthetic
ccaaggataatagcccgtcc

SEQ ID NO: 13286 - DNA, 20 bp, Artificial Sequence
  Synthetic
gagcatcagatcacctggga

SEQ ID NO: 13287 - DNA, 20 bp, Artificial Sequence
  Synthetic
tttggacatttaccgatggc

SEQ ID NO: 13288 - DNA, 19 bp, Artificial Sequence
  Synthetic
taaggctctgacgtctccc

SEQ ID NO: 13289 - DNA, 20 bp, Artificial Sequence
  Synthetic
ataaaagcgtggggacagtt

SEQ ID NO: 13290 - DNA, 19 bp, Artificial Sequence
  Synthetic
aatctgatgtcgcagtctc

SEQ ID NO: 13291 - DNA, 19 bp, Artificial Sequence
  Synthetic
ggtcagatcgagtaatggt

SEQ ID NO: 13292 - DNA, 21 bp, Artificial Sequence
  Synthetic
ggatactaacgtcggaatcac

SEQ ID NO: 13293 - DNA, 22 bp, Artificial Sequence
  Synthetic
caaagtctaattattgcagcca

SEQ ID NO: 13294 - DNA, 19 bp, Artificial Sequence
  Synthetic
agcgggtcatcaatcaaga

SEQ ID NO: 13295 - DNA, 22 bp, Artificial Sequence
  Synthetic
gacctgaatttcgttaataggg

SEQ ID NO: 13296 - DNA, 19 bp, Artificial Sequence
  Synthetic
ttgaccggtttttgagagt

SEQ ID NO: 13297 - DNA, 21 bp, Artificial Sequence
  Synthetic
tctttagttcctaaggccatt

SEQ ID NO: 13298 - DNA, 20 bp, Artificial Sequence
  Synthetic
aacaattctcggaaaggatg

SEQ ID NO: 13299 - DNA, 20 bp, Artificial Sequence
  Synthetic
cttgaggaaatgtcaaggga

SEQ ID NO: 13300 - DNA, 19 bp, Artificial Sequence
  Synthetic
cttccaggacatactgctg

SEQ ID NO: 13301 - DNA, 18 bp, Artificial Sequence
  Synthetic
ccagcgcaaaatgccata

SEQ ID NO: 13302 - DNA, 22 bp, Artificial Sequence
  Synthetic
tatggctttccttgaagaatcc

SEQ ID NO: 13303 - DNA, 21 bp, Artificial Sequence
  Synthetic
aaggagagtaagagacaacat

SEQ ID NO: 13304 - DNA, 18 bp, Artificial Sequence
  Synthetic
gcgaaaagcttgaacagt

SEQ ID NO: 13305 - DNA, 21 bp, Artificial Sequence
  Synthetic
tgttctcaaacaaaatggcaa

SEQ ID NO: 13306 - DNA, 23 bp, Artificial Sequence
  Synthetic
caaaagaaatacaccaagacaat

SEQ ID NO: 13307 - DNA, 21 bp, Artificial Sequence
  Synthetic
tctggagtaaatgaatcagct

SEQ ID NO: 13308 - DNA, 17 bp, Artificial Sequence
  Synthetic
gctggtgcatgtgggga

SEQ ID NO: 13309 - DNA, 19 bp, Artificial Sequence
  Synthetic
ttttactcggaggccacgg

SEQ ID NO: 13310 - DNA, 20 bp, Artificial Sequence
  Synthetic
cagatcacacgctctttcct

SEQ ID NO: 13311 - DNA, 20 bp, Artificial Sequence
  Synthetic
gtagacggggtagggagatc

SEQ ID NO: 13312 - DNA, 18 bp, Artificial Sequence
  Synthetic
aacggataacgcggtggc

SEQ ID NO: 13313 - DNA, 20 bp, Artificial Sequence
  Synthetic
caactcttactgctctctcc

SEQ ID NO: 13314 - DNA, 20 bp, Artificial Sequence
  Synthetic
tcataaagctgttgaccggc

SEQ ID NO: 13315 - DNA, 20 bp, Artificial Sequence
  Synthetic
tacgggagatacaaggagcg

SEQ ID NO: 13316 - DNA, 16 bp, Artificial Sequence
  Synthetic
gcagccggcagaggat

SEQ ID NO: 13317 - DNA, 17 bp, Artificial Sequence
  Synthetic
tgttacatcgccggcgg

SEQ ID NO: 13318 - DNA, 16 bp, Artificial Sequence
  Synthetic
cactcggaccgctcct

SEQ ID NO: 13319 - DNA, 16 bp, Artificial Sequence
  Synthetic
gcgaactgtgcgtgcc

SEQ ID NO: 13320 - DNA, 18 bp, Artificial Sequence
  Synthetic
cctgctgtgctactggtg

SEQ ID NO: 13321 - DNA, 18 bp, Artificial Sequence
  Synthetic
ggtgagctggggaacagg

SEQ ID NO: 13322 - DNA, 20 bp, Artificial Sequence
  Synthetic
ttccacgctgttttcgaaac

SEQ ID NO: 13323 - DNA, 18 bp, Artificial Sequence
  Synthetic
caggtagcgcatgcagtg

SEQ ID NO: 13324 - DNA, 18 bp, Artificial Sequence
  Synthetic
tgcgcttcagatcgtgga

SEQ ID NO: 13325 - DNA, 18 bp, Artificial Sequence
  Synthetic
gggctccagaaacaggca

SEQ ID NO: 13326 - DNA, 16 bp, Artificial Sequence
  Synthetic
tggatgggctccgggt

SEQ ID NO: 13327 - DNA, 19 bp, Artificial Sequence
  Synthetic
aactcctgctgctcactgt

SEQ ID NO: 13328 - DNA, 18 bp, Artificial Sequence
  Synthetic
caggacgtggtgacctcg

SEQ ID NO: 13329 - DNA, 16 bp, Artificial Sequence
  Synthetic
tcaccaagggcgggct

SEQ ID NO: 13330 - DNA, 18 bp, Artificial Sequence
  Synthetic
ctcggacaagatcacggc

SEQ ID NO: 13331 - DNA, 17 bp, Artificial Sequence
  Synthetic
cctgcggggaaacgaga

SEQ ID NO: 13332 - DNA, 17 bp, Artificial Sequence
  Synthetic
tctggccgatggctgtg

SEQ ID NO: 13333 - DNA, 15 bp, Artificial Sequence
  Synthetic
cgtgtgcgcgctctt

SEQ ID NO: 13334 - DNA, 18 bp, Artificial Sequence
  Synthetic
agggctgctccaactttg

SEQ ID NO: 13335 - DNA, 16 bp, Artificial Sequence
  Synthetic
attgcgggacctgcgc

SEQ ID NO: 13336 - DNA, 17 bp, Artificial Sequence
  Synthetic
ggtgcacagcgacagtg

SEQ ID NO: 13337 - DNA, 16 bp, Artificial Sequence
  Synthetic
cgccgcggtagagcat

SEQ ID NO: 13338 - DNA, 18 bp, Artificial Sequence
  Synthetic
gccgctcagattccagga

SEQ ID NO: 13339 - DNA, 17 bp, Artificial Sequence
  Synthetic
ccaccgggaacaaagcg

SEQ ID NO: 13340 - DNA, 20 bp, Artificial Sequence
  Synthetic
actacatcaaagggtcggct

SEQ ID NO: 13341 - DNA, 20 bp, Artificial Sequence
  Synthetic
atcagcaacgtgttatcggc

SEQ ID NO: 13342 - DNA, 16 bp, Artificial Sequence
  Synthetic
gcagtacgggggtcga

SEQ ID NO: 13343 - DNA, 16 bp, Artificial Sequence
  Synthetic
gaactcgcgacccacg

SEQ ID NO: 13344 - DNA, 16 bp, Artificial Sequence
  Synthetic
ggtgccgcctggaaca

SEQ ID NO: 13345 - DNA, 17 bp, Artificial Sequence
  Synthetic
cgaagcccacactgacg

SEQ ID NO: 13346 - DNA, 16 bp, Artificial Sequence
  Synthetic
cacgccgatgtgcagc

SEQ ID NO: 13347 - DNA, 16 bp, Artificial Sequence
  Synthetic
cgggctctcgtcctgt

SEQ ID NO: 13348 - DNA, 20 bp, Artificial Sequence
  Synthetic
ccagcccagcttttgtatga

SEQ ID NO: 13349 - DNA, 17 bp, Artificial Sequence
  Synthetic
gcttcctgcgacaccag

SEQ ID NO: 13350 - DNA, 18 bp, Artificial Sequence
  Synthetic
tacccaccacgcgtttcg

SEQ ID NO: 13351 - DNA, 18 bp, Artificial Sequence
  Synthetic
ccgacaccgatcacgaag

SEQ ID NO: 13352 - DNA, 16 bp, Artificial Sequence
  Synthetic
ggcaccaccgagacgt

SEQ ID NO: 13353 - DNA, 18 bp, Artificial Sequence
  Synthetic
cggaatgtcacaacgccg

SEQ ID NO: 13354 - DNA, 20 bp, Artificial Sequence
  Synthetic
gacattcacgacctagacgc

SEQ ID NO: 13355 - DNA, 18 bp, Artificial Sequence
  Synthetic
ggccttggtacaggagca

SEQ ID NO: 13356 - DNA, 18 bp, Artificial Sequence
  Synthetic
cgcaccaaccactggagg

SEQ ID NO: 13357 - DNA, 15 bp, Artificial Sequence
  Synthetic
tgagcacggcgcaga

SEQ ID NO: 13358 - DNA, 19 bp, Artificial Sequence
  Synthetic
gctggcttttctggaggaa

SEQ ID NO: 13359 - DNA, 16 bp, Artificial Sequence
  Synthetic
acgtggcaggcggtct

SEQ ID NO: 13360 - DNA, 19 bp, Artificial Sequence
  Synthetic
agcctggtggaactcatca

SEQ ID NO: 13361 - DNA, 19 bp, Artificial Sequence
  Synthetic
ggctttcttggcgtacagc

SEQ ID NO: 13362 - DNA, 16 bp, Artificial Sequence
  Synthetic
tccgcgtcctcgtcga

SEQ ID NO: 13363 - DNA, 16 bp, Artificial Sequence
  Synthetic
gtccacgccgcctcat

SEQ ID NO: 13364 - DNA, 17 bp, Artificial Sequence
  Synthetic
tagttgcacacggccga

SEQ ID NO: 13365 - DNA, 16 bp, Artificial Sequence
  Synthetic
tggcgccctggtacga

SEQ ID NO: 13366 - DNA, 16 bp, Artificial Sequence
  Synthetic
aagggcggcgacatct

SEQ ID NO: 13367 - DNA, 18 bp, Artificial Sequence
  Synthetic
cgggtgacgttgtggatg

SEQ ID NO: 13368 - DNA, 16 bp, Artificial Sequence
  Synthetic
gtccgtcgccgctgtt

SEQ ID NO: 13369 - DNA, 19 bp, Artificial Sequence
  Synthetic
aacttgtccatcagcgacg

SEQ ID NO: 13370 - DNA, 16 bp, Artificial Sequence
  Synthetic
aggcgcacctccgaaa

SEQ ID NO: 13371 - DNA, 16 bp, Artificial Sequence
  Synthetic
tcggtaggcacgcgat

SEQ ID NO: 13372 - DNA, 20 bp, Artificial Sequence
  Synthetic
cgtcgtaacaaagcacaggc

SEQ ID NO: 13373 - DNA, 17 bp, Artificial Sequence
  Synthetic
acaaccgcaacgatccc

SEQ ID NO: 13374 - DNA, 18 bp, Artificial Sequence
  Synthetic
ctggaggggtccggaaca

SEQ ID NO: 13375 - DNA, 18 bp, Artificial Sequence
  Synthetic
gtcttcttgcggtaccgg

SEQ ID NO: 13376 - DNA, 19 bp, Artificial Sequence
  Synthetic
actgttgacggatgtgcaa

SEQ ID NO: 13377 - DNA, 19 bp, Artificial Sequence
  Synthetic
gtcgtcgtcatcgaaaggc

SEQ ID NO: 13378 - DNA, 17 bp, Artificial Sequence
  Synthetic
cgagaaacggctgtcgg

SEQ ID NO: 13379 - DNA, 16 bp, Artificial Sequence
  Synthetic
ggcggcccagaaaacc

SEQ ID NO: 13380 - DNA, 20 bp, Artificial Sequence
  Synthetic
cacgcgtcctatgatgagtt

SEQ ID NO: 13381 - DNA, 18 bp, Artificial Sequence
  Synthetic
gattcgacggggaacgct

SEQ ID NO: 13382 - DNA, 17 bp, Artificial Sequence
  Synthetic
gacacgcgctttgggag

SEQ ID NO: 13383 - DNA, 18 bp, Artificial Sequence
  Synthetic
acgctactacatgcccct

SEQ ID NO: 13384 - DNA, 17 bp, Artificial Sequence
  Synthetic
gaatttgcccgtgcgga

SEQ ID NO: 13385 - DNA, 17 bp, Artificial Sequence
  Synthetic
acgaccagtctccggac

SEQ ID NO: 13386 - DNA, 16 bp, Artificial Sequence
  Synthetic
ccgttcttcccgcgga

SEQ ID NO: 13387 - DNA, 20 bp, Artificial Sequence
  Synthetic
acgtggatccccattatccc

SEQ ID NO: 13388 - DNA, 17 bp, Artificial Sequence
  Synthetic
tggtcaccgtggtcagt

SEQ ID NO: 13389 - DNA, 16 bp, Artificial Sequence
  Synthetic
agcgtgagagccccgt

SEQ ID NO: 13390 - DNA, 19 bp, Artificial Sequence
  Synthetic
cggaaaaagtggatgcggc

SEQ ID NO: 13391 - DNA, 15 bp, Artificial Sequence
  Synthetic
gcagcgcaaaggcca

SEQ ID NO: 13392 - DNA, 20 bp, Artificial Sequence
  Synthetic
aaaacagcagagaaccgagg

SEQ ID NO: 13393 - DNA, 18 bp, Artificial Sequence
  Synthetic
actggttctgctgacgcg

SEQ ID NO: 13394 - DNA, 19 bp, Artificial Sequence
  Synthetic
agcgcgtacacatagatcg

SEQ ID NO: 13395 - DNA, 16 bp, Artificial Sequence
  Synthetic
ggacgccagtcgcatg

SEQ ID NO: 13396 - DNA, 20 bp, Artificial Sequence
  Synthetic
agatacgtaacgtgtgcgag

SEQ ID NO: 13397 - DNA, 18 bp, Artificial Sequence
  Synthetic
tacggctggtgagtccac

SEQ ID NO: 13398 - DNA, 18 bp, Artificial Sequence
  Synthetic
tcctggcacttgacgagc

SEQ ID NO: 13399 - DNA, 20 bp, Artificial Sequence
  Synthetic
aagtaatggtctgcagctgc

SEQ ID NO: 13400 - DNA, 18 bp, Artificial Sequence
  Synthetic
atcgagtcttcgggggtg

SEQ ID NO: 13401 - DNA, 18 bp, Artificial Sequence
  Synthetic
ttccatgttacgcggcag

SEQ ID NO: 13402 - DNA, 16 bp, Artificial Sequence
  Synthetic
gcaccgcccatgggtt

SEQ ID NO: 13403 - DNA, 16 bp, Artificial Sequence
  Synthetic
ccggcgctggtcttga

SEQ ID NO: 13404 - DNA, 18 bp, Artificial Sequence
  Synthetic
gcctgtccgatacacgtg

SEQ ID NO: 13405 - DNA, 19 bp, Artificial Sequence
  Synthetic
gacgttgttgttgcggatc

SEQ ID NO: 13406 - DNA, 18 bp, Artificial Sequence
  Synthetic
accgtcagaatcgacggt

SEQ ID NO: 13407 - DNA, 16 bp, Artificial Sequence
  Synthetic
gtcaacggcggtcgga

SEQ ID NO: 13408 - DNA, 19 bp, Artificial Sequence
  Synthetic
gaagggctgttcgatgtgg

SEQ ID NO: 13409 - DNA, 17 bp, Artificial Sequence
  Synthetic
cacctgcgagttgaggc

SEQ ID NO: 13410 - DNA, 18 bp, Artificial Sequence
  Synthetic
cgtgttcgagcacctgac

SEQ ID NO: 13411 - DNA, 20 bp, Artificial Sequence
  Synthetic
cgtagccacctgttggaacc

SEQ ID NO: 13412 - DNA, 17 bp, Artificial Sequence
  Synthetic
ccgcagaaggccatgag

SEQ ID NO: 13413 - DNA, 16 bp, Artificial Sequence
  Synthetic
tggcggccgaatctcc

SEQ ID NO: 13414 - DNA, 19 bp, Artificial Sequence
  Synthetic
cgtcttcgtcgtccctagt

SEQ ID NO: 13415 - DNA, 17 bp, Artificial Sequence
  Synthetic
cgtgatgcgtgacggag

SEQ ID NO: 13416 - DNA, 18 bp, Artificial Sequence
  Synthetic
gcgcgaatgttaccaccc

SEQ ID NO: 13417 - DNA, 17 bp, Artificial Sequence
  Synthetic
catgggtacggaggcgt

SEQ ID NO: 13418 - DNA, 20 bp, Artificial Sequence
  Synthetic
gcataatctgcgaggaggac

SEQ ID NO: 13419 - DNA, 20 bp, Artificial Sequence
  Synthetic
gtctctacgctcctacgaca

SEQ ID NO: 13420 - DNA, 17 bp, Artificial Sequence
  Synthetic
gcactgggcgtggaaac

SEQ ID NO: 13421 - DNA, 20 bp, Artificial Sequence
  Synthetic
cctacgatttggccatgtcg

SEQ ID NO: 13422 - DNA, 20 bp, Artificial Sequence
  Synthetic
attggcgcaaactttttggc

SEQ ID NO: 13423 - DNA, 16 bp, Artificial Sequence
  Synthetic
cgcgaagtgcagcagg

SEQ ID NO: 13424 - DNA, 17 bp, Artificial Sequence
  Synthetic
tggaaaccagcagcccg

SEQ ID NO: 13425 - DNA, 18 bp, Artificial Sequence
  Synthetic
tggcggtcaccactttca

SEQ ID NO: 13426 - DNA, 17 bp, Artificial Sequence
  Synthetic
gcgctccacaccaacag

SEQ ID NO: 13427 - DNA, 16 bp, Artificial Sequence
  Synthetic
tccagcgcctgcagat

SEQ ID NO: 13428 - DNA, 20 bp, Artificial Sequence
  Synthetic
ccttatgctgcgctacatgc

SEQ ID NO: 13429 - DNA, 16 bp, Artificial Sequence
  Synthetic
ccagagcgtgccggta

SEQ ID NO: 13430 - DNA, 18 bp, Artificial Sequence
  Synthetic
ggcgctgctttctttcga

SEQ ID NO: 13431 - DNA, 16 bp, Artificial Sequence
  Synthetic
ggctccttcgtgggca

SEQ ID NO: 13432 - DNA, 20 bp, Artificial Sequence
  Synthetic
ctttgtgctcgacgttaacg

SEQ ID NO: 13433 - DNA, 18 bp, Artificial Sequence
  Synthetic
gcctccggatcacatggt

SEQ ID NO: 13434 - DNA, 16 bp, Artificial Sequence
  Synthetic
tgtacacggccggcga

SEQ ID NO: 13435 - DNA, 18 bp, Artificial Sequence
  Synthetic
gtaggagcgacgctgacg

SEQ ID NO: 13436 - DNA, 20 bp, Artificial Sequence
  Synthetic
tgaagtgacgttaggggagg

SEQ ID NO: 13437 - DNA, 20 bp, Artificial Sequence
  Synthetic
ccacatctggtatacacccg

SEQ ID NO: 13438 - DNA, 20 bp, Artificial Sequence
  Synthetic
tacttttcactcccgggtgc

SEQ ID NO: 13439 - DNA, 19 bp, Artificial Sequence
  Synthetic
gcgtacaggagtcctaggt

SEQ ID NO: 13440 - DNA, 17 bp, Artificial Sequence
  Synthetic
tgcaagcccattccccg

SEQ ID NO: 13441 - DNA, 16 bp, Artificial Sequence
  Synthetic
acgcagcccagcctag

SEQ ID NO: 13442 - DNA, 18 bp, Artificial Sequence
  Synthetic
acaggaagcttacagggt

SEQ ID NO: 13443 - DNA, 21 bp, Artificial Sequence
  Synthetic
atatgtgcggtatgattttgc

SEQ ID NO: 13444 - DNA, 19 bp, Artificial Sequence
  Synthetic
tgattccgtagacgccagg

SEQ ID NO: 13445 - DNA, 18 bp, Artificial Sequence
  Synthetic
tgcgcgaatggaaaccat

SEQ ID NO: 13446 - DNA, 20 bp, Artificial Sequence
  Synthetic
ggatctacgtcccagtctct

SEQ ID NO: 13447 - DNA, 18 bp, Artificial Sequence
  Synthetic
cgacgtcgtacgagtcgc

SEQ ID NO: 13448 - DNA, 19 bp, Artificial Sequence
  Synthetic
cgagagattctccagcccg

SEQ ID NO: 13449 - DNA, 18 bp, Artificial Sequence
  Synthetic
ttgcaacagcttcgacgg

SEQ ID NO: 13450 - DNA, 17 bp, Artificial Sequence
  Synthetic
gcggatgctggtcgttg

SEQ ID NO: 13451 - DNA, 16 bp, Artificial Sequence
  Synthetic
cagctccaagcgccgt

SEQ ID NO: 13452 - DNA, 19 bp, Artificial Sequence
  Synthetic
gaaagccgtcccggtcatt

SEQ ID NO: 13453 - DNA, 15 bp, Artificial Sequence
  Synthetic
tgtggtgcacggcgt

SEQ ID NO: 13454 - DNA, 16 bp, Artificial Sequence
  Synthetic
ggatcggtcgtcgcgt

SEQ ID NO: 13455 - DNA, 16 bp, Artificial Sequence
  Synthetic
tggcgtgcgaggaaga

SEQ ID NO: 13456 - DNA, 19 bp, Artificial Sequence
  Synthetic
gatgtcgggcgtccaccta

SEQ ID NO: 13457 - DNA, 19 bp, Artificial Sequence
  Synthetic
aaagcctggttggatctcg

SEQ ID NO: 13458 - DNA, 18 bp, Artificial Sequence
  Synthetic
tagcctcctccaccacgg

SEQ ID NO: 13459 - DNA, 20 bp, Artificial Sequence
  Synthetic
cttgaagtacagcatgccca

SEQ ID NO: 13460 - DNA, 19 bp, Artificial Sequence
  Synthetic
aaaccgcgactttccacac

SEQ ID NO: 13461 - DNA, 18 bp, Artificial Sequence
  Synthetic
gcccacccccattacacg

SEQ ID NO: 13462 - DNA, 18 bp, Artificial Sequence
  Synthetic
acggatcaagaggtccat

SEQ ID NO: 13463 - DNA, 16 bp, Artificial Sequence
  Synthetic
gctctcggggccgtat

SEQ ID NO: 13464 - DNA, 20 bp, Artificial Sequence
  Synthetic
agcgttcataacaatcccgg

SEQ ID NO: 13465 - DNA, 17 bp, Artificial Sequence
  Synthetic
gttgcaggccacgaaca

SEQ ID NO: 13466 - DNA, 18 bp, Artificial Sequence
  Synthetic
accggtgtgcagctaagc

SEQ ID NO: 13467 - DNA, 17 bp, Artificial Sequence
  Synthetic
gacccaagccagactgc

SEQ ID NO: 13468 - DNA, 18 bp, Artificial Sequence
  Synthetic
ggccggcgagtaatagca

SEQ ID NO: 13469 - DNA, 16 bp, Artificial Sequence
  Synthetic
agccgccgaaacacga

SEQ ID NO: 13470 - DNA, 18 bp, Artificial Sequence
  Synthetic
ccgaaagcgtcgtgagca

SEQ ID NO: 13471 - DNA, 19 bp, Artificial Sequence
  Synthetic
taggggactacctcctcga

SEQ ID NO: 13472 - DNA, 18 bp, Artificial Sequence
  Synthetic
ccaatcggcgtcgcttag

SEQ ID NO: 13473 - DNA, 18 bp, Artificial Sequence
  Synthetic
gggacctgtttcagcgtg

SEQ ID NO: 13474 - DNA, 20 bp, Artificial Sequence
  Synthetic
gcgtaaatctgcgggatagc

SEQ ID NO: 13475 - DNA, 16 bp, Artificial Sequence
  Synthetic
tcgcctcgacagagcc

SEQ ID NO: 13476 - DNA, 17 bp, Artificial Sequence
  Synthetic
aagttcacgtcgcgtcc

SEQ ID NO: 13477 - DNA, 16 bp, Artificial Sequence
  Synthetic
tccggcatggtgctgc

SEQ ID NO: 13478 - DNA, 20 bp, Artificial Sequence
  Synthetic
ataacgccatgggatcctca

SEQ ID NO: 13479 - DNA, 19 bp, Artificial Sequence
  Synthetic
cctgaacagaccgctaacc

SEQ ID NO: 13480 - DNA, 19 bp, Artificial Sequence
  Synthetic
ctgatgctgttgtcgtgca

SEQ ID NO: 13481 - DNA, 18 bp, Artificial Sequence
  Synthetic
ccaccaccgcattaaccg

SEQ ID NO: 13482 - DNA, 18 bp, Artificial Sequence
  Synthetic
ggaccttctgggaccagt

SEQ ID NO: 13483 - DNA, 20 bp, Artificial Sequence
  Synthetic
ataggcagcgacgtgtatgg

SEQ ID NO: 13484 - DNA, 16 bp, Artificial Sequence
  Synthetic
ggacgcccgacatcca

SEQ ID NO: 13485 - DNA, 18 bp, Artificial Sequence
  Synthetic
ctttgtgcgacagtgctt

SEQ ID NO: 13486 - DNA, 19 bp, Artificial Sequence
  Synthetic
tggacagtggtgaatagca

SEQ ID NO: 13487 - DNA, 20 bp, Artificial Sequence
  Synthetic
taagacaggaaatggcaagc

SEQ ID NO: 13488 - DNA, 21 bp, Artificial Sequence
  Synthetic
aaacaagccaattaatgtggg

SEQ ID NO: 13489 - DNA, 20 bp, Artificial Sequence
  Synthetic
gattcgagctggatagaact

SEQ ID NO: 13490 - DNA, 23 bp, Artificial Sequence
  Synthetic
gttcattataaaaggaaggtccc

SEQ ID NO: 13491 - DNA, 20 bp, Artificial Sequence
  Synthetic
ctgccttcttcaatctcttc

SEQ ID NO: 13492 - DNA, 22 bp, Artificial Sequence
  Synthetic
gatcctatgaacagatggaaac

SEQ ID NO: 13493 - DNA, 20 bp, Artificial Sequence
  Synthetic
aggtccaatttacaggagaa

SEQ ID NO: 13494 - DNA, 19 bp, Artificial Sequence
  Synthetic
atggaactgattcggatga

SEQ ID NO: 13495 - DNA, 21 bp, Artificial Sequence
  Synthetic
attagagggacaagaatggtc

SEQ ID NO: 13496 - DNA, 20 bp, Artificial Sequence
  Synthetic
gaaatgatgttttttgggcg

SEQ ID NO: 13497 - DNA, 18 bp, Artificial Sequence
  Synthetic
ggcgccattatgagaact

SEQ ID NO: 13498 - DNA, 19 bp, Artificial Sequence
  Synthetic
cacaactgcaccctgaaga

SEQ ID NO: 13499 - DNA, 18 bp, Artificial Sequence
  Synthetic
gaagtgcggttccagaag

SEQ ID NO: 13500 - DNA, 22 bp, Artificial Sequence
  Synthetic
tcttagtaatggagttggaaac

SEQ ID NO: 13501 - DNA, 20 bp, Artificial Sequence
  Synthetic
acatgtcaatgcagctgtgg

SEQ ID NO: 13502 - DNA, 19 bp, Artificial Sequence
  Synthetic
gcttttgctaaattggcct

SEQ ID NO: 13503 - DNA, 24 bp, Artificial Sequence
  Synthetic
gtgtacttgctttaattgtagagg

SEQ ID NO: 13504 - DNA, 20 bp, Artificial Sequence
  Synthetic
gtaacttcagccactcaaac

SEQ ID NO: 13505 - DNA, 20 bp, Artificial Sequence
  Synthetic
aggatctacagtggacggtc

SEQ ID NO: 13506 - DNA, 18 bp, Artificial Sequence
  Synthetic
gtaagctcttgaccaccg

SEQ ID NO: 13507 - DNA, 23 bp, Artificial Sequence
  Synthetic
tgattgtattttgagattggcaa

SEQ ID NO: 13508 - DNA, 20 bp, Artificial Sequence
  Synthetic
acagtttctggagcaggtgt

SEQ ID NO: 13509 - DNA, 18 bp, Artificial Sequence
  Synthetic
gcttcagcagttgcaagc

SEQ ID NO: 13510 - DNA, 19 bp, Artificial Sequence
  Synthetic
aagacaaagcctctgtagc

SEQ ID NO: 13511 - DNA, 22 bp, Artificial Sequence
  Synthetic
tccgtatacagatttaaggggt

SEQ ID NO: 13512 - DNA, 19 bp, Artificial Sequence
  Synthetic
cttggtcttcatcgctttc

SEQ ID NO: 13513 - DNA, 20 bp, Artificial Sequence
  Synthetic
ttgcggcaatattgagttgc

SEQ ID NO: 13514 - DNA, 18 bp, Artificial Sequence
  Synthetic
gcccgctcataggggtta

SEQ ID NO: 13515 - DNA, 21 bp, Artificial Sequence
  Synthetic
aggtattcctccttatccttc

SEQ ID NO: 13516 - DNA, 23 bp, Artificial Sequence
  Synthetic
aaataatattttgccagctcttg

SEQ ID NO: 13517 - DNA, 22 bp, Artificial Sequence
  Synthetic
tgtaagcggtttctataggtac

SEQ ID NO: 13518 - DNA, 20 bp, Artificial Sequence
  Synthetic
aagtagaaatctcgtcggcg

SEQ ID NO: 13519 - DNA, 19 bp, Artificial Sequence
  Synthetic
tgcattgccactaccgttt

SEQ ID NO: 13520 - DNA, 16 bp, Artificial Sequence
  Synthetic
acggttccacggtgca

SEQ ID NO: 13521 - DNA, 23 bp, Artificial Sequence
  Synthetic
gttatcttggtaggcaatttctg

SEQ ID NO: 13522 - DNA, 19 bp, Artificial Sequence
  Synthetic
gtgggggttgtcttcttcg

SEQ ID NO: 13523 - DNA, 18 bp, Artificial Sequence
  Synthetic
cagtcacagtcacaaggt

SEQ ID NO: 13524 - DNA, 18 bp, Artificial Sequence
  Synthetic
caagcactgcctgttgaa

SEQ ID NO: 13525 - DNA, 19 bp, Artificial Sequence
  Synthetic
cttccaacatgaggcggtg

SEQ ID NO: 13526 - DNA, 20 bp, Artificial Sequence
  Synthetic
ccgtggtttggtggaaaagt

SEQ ID NO: 13527 - DNA, 17 bp, Artificial Sequence
  Synthetic
ctcctgagcgtcaccca

SEQ ID NO: 13528 - DNA, 18 bp, Artificial Sequence
  Synthetic
gcacactaatagcgcgag

SEQ ID NO: 13529 - DNA, 18 bp, Artificial Sequence
  Synthetic
gacgggagcaggaacaga

SEQ ID NO: 13530 - DNA, 18 bp, Artificial Sequence
  Synthetic
cagtagtgccgtctcgta

SEQ ID NO: 13531 - DNA, 18 bp, Artificial Sequence
  Synthetic
gccttgcgactaatggtt

SEQ ID NO: 13532 - DNA, 19 bp, Artificial Sequence
  Synthetic
tcgagctttcattaatcgc

SEQ ID NO: 13533 - DNA, 20 bp, Artificial Sequence
  Synthetic
gaatgggaggaaagacagcc

SEQ ID NO: 13534 - DNA, 20 bp, Artificial Sequence
  Synthetic
tggcacgcaaactattaact

SEQ ID NO: 13535 - DNA, 19 bp, Artificial Sequence
  Synthetic
tgctggaaagtgacattgg

SEQ ID NO: 13536 - DNA, 23 bp, Artificial Sequence
  Synthetic
ccttaaataaggctgctaggatt

SEQ ID NO: 13537 - DNA, 18 bp, Artificial Sequence
  Synthetic
gtaacaacacgggctggg

SEQ ID NO: 13538 - DNA, 16 bp, Artificial Sequence
  Synthetic
cggccagagcgttggt

SEQ ID NO: 13539 - DNA, 20 bp, Artificial Sequence
  Synthetic
caagcgcgatatcaagcatg

SEQ ID NO: 13540 - DNA, 19 bp, Artificial Sequence
  Synthetic
ttaaaagggaagccatgga

SEQ ID NO: 13541 - DNA, 18 bp, Artificial Sequence
  Synthetic
gggtaccgtgggacaact

SEQ ID NO: 13542 - DNA, 18 bp, Artificial Sequence
  Synthetic
gcccgacgaggtaatggt

SEQ ID NO: 13543 - DNA, 20 bp, Artificial Sequence
  Synthetic
cctatgttagcgccagagga

SEQ ID NO: 13544 - DNA, 18 bp, Artificial Sequence
  Synthetic
ctttacgctggctgtggg

SEQ ID NO: 13545 - DNA, 20 bp, Artificial Sequence
  Synthetic
gacaatccaaggatgacaac

SEQ ID NO: 13546 - DNA, 20 bp, Artificial Sequence
  Synthetic
cagttaatgctggatgcttt

SEQ ID NO: 13547 - DNA, 22 bp, Artificial Sequence
  Synthetic
gaagcttcttgtactcaaatgt

SEQ ID NO: 13548 - DNA, 18 bp, Artificial Sequence
  Synthetic
cccggttcctacacttac

SEQ ID NO: 13549 - DNA, 18 bp, Artificial Sequence
  Synthetic
ctgggttcagggtttgac

SEQ ID NO: 13550 - DNA, 18 bp, Artificial Sequence
  Synthetic
gagtaggcaagttgtgga

SEQ ID NO: 13551 - DNA, 18 bp, Artificial Sequence
  Synthetic
ccctcccagactgctgta

SEQ ID NO: 13552 - DNA, 20 bp, Artificial Sequence
  Synthetic
taccctagaaaagtcaaccc

SEQ ID NO: 13553 - DNA, 18 bp, Artificial Sequence
  Synthetic
ggttggtgggcagggata

SEQ ID NO: 13554 - DNA, 18 bp, Artificial Sequence
  Synthetic
cactggcataaggagacg

SEQ ID NO: 13555 - DNA, 20 bp, Artificial Sequence
  Synthetic
caccatctccattccatgca

SEQ ID NO: 13556 - DNA, 18 bp, Artificial Sequence
  Synthetic
gcttccatgcctttttcc

SEQ ID NO: 13557 - DNA, 20 bp, Artificial Sequence
  Synthetic
ctactcataccccaagacgc

SEQ ID NO: 13558 - DNA, 18 bp, Artificial Sequence
  Synthetic
agtttttgcagtgccaga

SEQ ID NO: 13559 - DNA, 20 bp, Artificial Sequence
  Synthetic
tgagcgcagtgatgaatcag

SEQ ID NO: 13560 - DNA, 20 bp, Artificial Sequence
  Synthetic
ctgcatttaccttttcctgt

SEQ ID NO: 13561 - DNA, 23 bp, Artificial Sequence
  Synthetic
actgaactattaagtgaaagtca

SEQ ID NO: 13562 - DNA, 20 bp, Artificial Sequence
  Synthetic
ttccatcacctttgtgtgct

SEQ ID NO: 13563 - DNA, 20 bp, Artificial Sequence
  Synthetic
tgggacaccattgaaaccag

SEQ ID NO: 13564 - DNA, 20 bp, Artificial Sequence
  Synthetic
gaaaacgcatttttcccact

SEQ ID NO: 13565 - DNA, 19 bp, Artificial Sequence
  Synthetic
ccccacatgatttccaggg

SEQ ID NO: 13566 - DNA, 21 bp, Artificial Sequence
  Synthetic
gctattggtggaaaaagatca

SEQ ID NO: 13567 - DNA, 22 bp, Artificial Sequence
  Synthetic
atttcaacctattaacctggga

SEQ ID NO: 13568 - DNA, 22 bp, Artificial Sequence
  Synthetic
ctaacttgtttctagtgcaaca

SEQ ID NO: 13569 - DNA, 23 bp, Artificial Sequence
  Synthetic
ttgtcacattacaattaactgca

SEQ ID NO: 13570 - DNA, 24 bp, Artificial Sequence
  Synthetic
tttctaaaacagaacctcttatgc

SEQ ID NO: 13571 - DNA, 24 bp, Artificial Sequence
  Synthetic
ctcctctgtagtttctttacaact

SEQ ID NO: 13572 - DNA, 20 bp, Artificial Sequence
  Synthetic
aaaaggacttttttgcctgg

SEQ ID NO: 13573 - DNA, 18 bp, Artificial Sequence
  Synthetic
catggtctccgtgtactc

SEQ ID NO: 13574 - DNA, 21 bp, Artificial Sequence
  Synthetic
cggaataaaacttaatgccca

SEQ ID NO: 13575 - DNA, 20 bp, Artificial Sequence
  Synthetic
tgtaaattctagcggtgccc

SEQ ID NO: 13576 - DNA, 21 bp, Artificial Sequence
  Synthetic
gggtcatgaaagtaaacgttg

SEQ ID NO: 13577 - DNA, 25 bp, Artificial Sequence
  Synthetic
cctaaatatccaaagtactactacc

SEQ ID NO: 13578 - DNA, 21 bp, Artificial Sequence
  Synthetic
aaatcagcctttctctacacc

SEQ ID NO: 13579 - DNA, 18 bp, Artificial Sequence
  Synthetic
gtcactcaagcggcattc

SEQ ID NO: 13580 - DNA, 22 bp, Artificial Sequence
  Synthetic
acaccttttgttaattaaggcg

SEQ ID NO: 13581 - DNA, 24 bp, Artificial Sequence
  Synthetic
atgtaaagtcagactattacactc

SEQ ID NO: 13582 - DNA, 25 bp, Artificial Sequence
  Synthetic
caaggtagaggcataaaaacttaat

SEQ ID NO: 13583 - DNA, 21 bp, Artificial Sequence
  Synthetic
agatttacattaggctccaca

SEQ ID NO: 13584 - DNA, 18 bp, Artificial Sequence
  Synthetic
gttccgtaaagactccgg

SEQ ID NO: 13585 - DNA, 23 bp, Artificial Sequence
  Synthetic
ccatgtggaggtataacaaaatt

SEQ ID NO: 13586 - DNA, 20 bp, Artificial Sequence
  Synthetic
ccggtacccttgtatacgct

SEQ ID NO: 13587 - DNA, 20 bp, Artificial Sequence
  Synthetic
tttctcaagacccgtccaag

SEQ ID NO: 13588 - DNA, 18 bp, Artificial Sequence
  Synthetic
gccatggggagatctgga

SEQ ID NO: 13589 - DNA, 22 bp, Artificial Sequence
  Synthetic
tccattgctcctatcaaatcag

SEQ ID NO: 13590 - DNA, 20 bp, Artificial Sequence
  Synthetic
gccttcaatcatcatgtcac

SEQ ID NO: 13591 - DNA, 22 bp, Artificial Sequence
  Synthetic
aatgaatgataacacaaatgcc

SEQ ID NO: 13592 - DNA, 21 bp, Artificial Sequence
  Synthetic
gctaagccaaaacatacaaca

SEQ ID NO: 13593 - DNA, 19 bp, Artificial Sequence
  Synthetic
ggtgaaggaccatgttctc

SEQ ID NO: 13594 - DNA, 22 bp, Artificial Sequence
  Synthetic
tggttgaaaaagtttactgagt

SEQ ID NO: 13595 - DNA, 18 bp, Artificial Sequence
  Synthetic
tggctacaaccaacagga

SEQ ID NO: 13596 - DNA, 20 bp, Artificial Sequence
  Synthetic
agtgtgtggagtacaatctc

SEQ ID NO: 13597 - DNA, 21 bp, Artificial Sequence
  Synthetic
agtagaggacacaattctgat

SEQ ID NO: 13598 - DNA, 20 bp, Artificial Sequence
  Synthetic
taaagcctatcaacacacca

SEQ ID NO: 13599 - DNA, 20 bp, Artificial Sequence
  Synthetic
agggaaaacaagagctatcg

SEQ ID NO: 13600 - DNA, 21 bp, Artificial Sequence
  Synthetic
tgatgtgatagcttcataccc

SEQ ID NO: 13601 - DNA, 22 bp, Artificial Sequence
  Synthetic
acagtgcatttctactaaatcc

SEQ ID NO: 13602 - DNA, 21 bp, Artificial Sequence
  Synthetic
aaatgacttagtgttaccagc

SEQ ID NO: 13603 - DNA, 22 bp, Artificial Sequence
  Synthetic
aagaagtcttaacagaaatggc

SEQ ID NO: 13604 - DNA, 23 bp, Artificial Sequence
  Synthetic
cgaaagtataacaaaagtccaga

SEQ ID NO: 13605 - DNA, 24 bp, Artificial Sequence
  Synthetic
atatcaaatgttatgtgatcctcc

SEQ ID NO: 13606 - DNA, 20 bp, Artificial Sequence
  Synthetic
cctgaagaggaaaacaatgg

SEQ ID NO: 13607 - DNA, 22 bp, Artificial Sequence
  Synthetic
cgggagaaagagcttattttac

SEQ ID NO: 13608 - DNA, 18 bp, Artificial Sequence
  Synthetic
ccaccacgtcccctgaaa

SEQ ID NO: 13609 - DNA, 20 bp, Artificial Sequence
  Synthetic
tattgttaaagggcacagca

SEQ ID NO: 13610 - DNA, 19 bp, Artificial Sequence
  Synthetic
gcaattgcctacctgatgt

SEQ ID NO: 13611 - DNA, 19 bp, Artificial Sequence
  Synthetic
tacagtgcctgtggaaagt

SEQ ID NO: 13612 - DNA, 18 bp, Artificial Sequence
  Synthetic
taacgccattgcagtgtt

SEQ ID NO: 13613 - DNA, 20 bp, Artificial Sequence
  Synthetic
caccacgtgacgttttaaat

SEQ ID NO: 13614 - DNA, 19 bp, Artificial Sequence
  Synthetic
tttcagagacagatgctgg

SEQ ID NO: 13615 - DNA, 23 bp, Artificial Sequence
  Synthetic
cacaaagtattagttcctaaggt

SEQ ID NO: 13616 - DNA, 21 bp, Artificial Sequence
  Synthetic
attgccacagtttgtaaatgg

SEQ ID NO: 13617 - DNA, 25 bp, Artificial Sequence
  Synthetic
tcctaatattttggataattggcag

SEQ ID NO: 13618 - DNA, 25 bp, Artificial Sequence
  Synthetic
tgtgaactatagtgaaataaactgc

SEQ ID NO: 13619 - DNA, 19 bp, Artificial Sequence
  Synthetic
tgtccacgacctactcacc

SEQ ID NO: 13620 - DNA, 21 bp, Artificial Sequence
  Synthetic
ttggtaatggtcattcagttc

SEQ ID NO: 13621 - DNA, 23 bp, Artificial Sequence
  Synthetic
aacctgataaatactcatgaagg

SEQ ID NO: 13622 - DNA, 17 bp, Artificial Sequence
  Synthetic
cgcgccttcagacctga

SEQ ID NO: 13623 - DNA, 22 bp, Artificial Sequence
  Synthetic
tcaacccatatttgatgtttct

SEQ ID NO: 13624 - DNA, 21 bp, Artificial Sequence
  Synthetic
ttgatatcagttccttgttgg

SEQ ID NO: 13625 - DNA, 21 bp, Artificial Sequence
  Synthetic
gtgagaaattgaaagaaagcg

SEQ ID NO: 13626 - DNA, 20 bp, Artificial Sequence
  Synthetic
tgtccaatcttgctatggaa

SEQ ID NO: 13627 - DNA, 24 bp, Artificial Sequence
  Synthetic
accctattgaatacagatatgaga

SEQ ID NO: 13628 - DNA, 20 bp, Artificial Sequence
  Synthetic
gccctaaaatttagcaaacg

SEQ ID NO: 13629 - DNA, 20 bp, Artificial Sequence
  Synthetic
gtgctgcctagaatttcatg

SEQ ID NO: 13630 - DNA, 22 bp, Artificial Sequence
  Synthetic
aggatattgtattagacctgca

SEQ ID NO: 13631 - DNA, 19 bp, Artificial Sequence
  Synthetic
ggacgattcaggtacagaa

SEQ ID NO: 13632 - DNA, 25 bp, Artificial Sequence
  Synthetic
gaaagtatttaggtagtccatatgt

SEQ ID NO: 13633 - DNA, 18 bp, Artificial Sequence
  Synthetic
aagggacatagaggggga

SEQ ID NO: 13634 - DNA, 20 bp, Artificial Sequence
  Synthetic
ggcagacagtcagtttaaat

SEQ ID NO: 13635 - DNA, 23 bp, Artificial Sequence
  Synthetic
ggaaatgtttttttgaaagactg

SEQ ID NO: 13636 - DNA, 18 bp, Artificial Sequence
  Synthetic
gtccgaagcaaaaggaca

SEQ ID NO: 13637 - DNA, 18 bp, Artificial Sequence
  Synthetic
gagtccaacagtcccctt

SEQ ID NO: 13638 - DNA, 20 bp, Artificial Sequence
  Synthetic
aaacatgccattgtaactgt

SEQ ID NO: 13639 - DNA, 25 bp, Artificial Sequence
  Synthetic
atggatatctgagtttattgtgtac

SEQ ID NO: 13640 - DNA, 20 bp, Artificial Sequence
  Synthetic
tcatctagtgatagcggtcc

SEQ ID NO: 13641 - DNA, 18 bp, Artificial Sequence
  Synthetic
ggggtaacaccacagttc

SEQ ID NO: 13642 - DNA, 18 bp, Artificial Sequence
  Synthetic
cctcctcctaaccctgta

SEQ ID NO: 13643 - DNA, 18 bp, Artificial Sequence
  Synthetic
acaggatggcgatatggt

SEQ ID NO: 13644 - DNA, 18 bp, Artificial Sequence
  Synthetic
ggctctttggtgtcctct

SEQ ID NO: 13645 - DNA, 18 bp, Artificial Sequence
  Synthetic
ccaagttgcttgccaagt

SEQ ID NO: 13646 - DNA, 19 bp, Artificial Sequence
  Synthetic
gtgttgtacagcctccagg

SEQ ID NO: 13647 - DNA, 20 bp, Artificial Sequence
  Synthetic
aatggacgttaagttcccgg

SEQ ID NO: 13648 - DNA, 18 bp, Artificial Sequence
  Synthetic
cgccgacctcatgggata

SEQ ID NO: 13649 - DNA, 15 bp, Artificial Sequence
  Synthetic
ttgcgtgccctgcgt

SEQ ID NO: 13650 - DNA, 19 bp, Artificial Sequence
  Synthetic
accttagttctcgcccagg

SEQ ID NO: 13651 - DNA, 19 bp, Artificial Sequence
  Synthetic
acagctcagggtgttccga

SEQ ID NO: 13652 - DNA, 20 bp, Artificial Sequence
  Synthetic
ttttgaactcgaccagaccg

SEQ ID NO: 13653 - DNA, 18 bp, Artificial Sequence
  Synthetic
ggcatgcaactggaccag

SEQ ID NO: 13654 - DNA, 20 bp, Artificial Sequence
  Synthetic
tctgcattgtctggcatgtc

SEQ ID NO: 13655 - DNA, 20 bp, Artificial Sequence
  Synthetic
tatagctaggaccgaggctg

SEQ ID NO: 13656 - DNA, 18 bp, Artificial Sequence
  Synthetic
gtgttcacgcccatggag

SEQ ID NO: 13657 - DNA, 20 bp, Artificial Sequence
  Synthetic
agaattgtggcgaagtgcag

SEQ ID NO: 13658 - DNA, 16 bp, Artificial Sequence
  Synthetic
gcgccggcatattccg

SEQ ID NO: 13659 - DNA, 20 bp, Artificial Sequence
  Synthetic
acatgtccaaggcatatggc

SEQ ID NO: 13660 - DNA, 18 bp, Artificial Sequence
  Synthetic
gccaacaacgggggaaat

SEQ ID NO: 13661 - DNA, 20 bp, Artificial Sequence
  Synthetic
gattacaaccgttccccagg

SEQ ID NO: 13662 - DNA, 20 bp, Artificial Sequence
  Synthetic
atcgggtgagaatttcccgt

SEQ ID NO: 13663 - DNA, 20 bp, Artificial Sequence
  Synthetic
gtgattgttgggagagtcgt

SEQ ID NO: 13664 - DNA, 20 bp, Artificial Sequence
  Synthetic
cattgcttccctcatgtcct

SEQ ID NO: 13665 - DNA, 18 bp, Artificial Sequence
  Synthetic
cattctatcgcccggagc

SEQ ID NO: 13666 - DNA, 20 bp, Artificial Sequence
  Synthetic
tgctgagtgacttcaagacg

SEQ ID NO: 13667 - DNA, 20 bp, Artificial Sequence
  Synthetic
acaacatcaagttcccctgc

SEQ ID NO: 13668 - DNA, 18 bp, Artificial Sequence
  Synthetic
cgaccctcgctagctagt

SEQ ID NO: 13669 - DNA, 20 bp, Artificial Sequence
  Synthetic
aagcagcaggactaccaagc

SEQ ID NO: 13670 - DNA, 20 bp, Artificial Sequence
  Synthetic
tcagactcttggtccactgt

SEQ ID NO: 13671 - DNA, 18 bp, Artificial Sequence
  Synthetic
ccccactcagccagatca

SEQ ID NO: 13672 - DNA, 20 bp, Artificial Sequence
  Synthetic
agcgggtggaatttcttctg

SEQ ID NO: 13673 - DNA, 16 bp, Artificial Sequence
  Synthetic
gcggcgctgagagact

SEQ ID NO: 13674 - DNA, 20 bp, Artificial Sequence
  Synthetic
tacctctttaactgggcggt

SEQ ID NO: 13675 - DNA, 19 bp, Artificial Sequence
  Synthetic
tcgtaatgagcaattccgg

SEQ ID NO: 13676 - DNA, 22 bp, Artificial Sequence
  Synthetic
agaaccagttaaagatctcatg

SEQ ID NO: 13677 - DNA, 21 bp, Artificial Sequence
  Synthetic
ttggatagtaagacatggaca

SEQ ID NO: 13678 - DNA, 23 bp, Artificial Sequence
  Synthetic
agttacctcataccactaaatgc

SEQ ID NO: 13679 - DNA, 20 bp, Artificial Sequence
  Synthetic
agcaatgctaggtactcatg

SEQ ID NO: 13680 - DNA, 23 bp, Artificial Sequence
  Synthetic
ttaggctgatgaaagatactcaa

SEQ ID NO: 13681 - DNA, 19 bp, Artificial Sequence
  Synthetic
aagccatgtatgttccaca

SEQ ID NO: 13682 - DNA, 18 bp, Artificial Sequence
  Synthetic
ttatcacagggcaaagct

SEQ ID NO: 13683 - DNA, 19 bp, Artificial Sequence
  Synthetic
tagtctcaacaggaggaca

SEQ ID NO: 13684 - DNA, 19 bp, Artificial Sequence
  Synthetic
atgcatacatggtcccatt

SEQ ID NO: 13685 - DNA, 21 bp, Artificial Sequence
  Synthetic
agaaatcatgatgacttggtc

SEQ ID NO: 13686 - DNA, 22 bp, Artificial Sequence
  Synthetic
agtgtgtgtattaatccatggt

SEQ ID NO: 13687 - DNA, 24 bp, Artificial Sequence
  Synthetic
ccaatggctagtttagataacaag

SEQ ID NO: 13688 - DNA, 25 bp, Artificial Sequence
  Synthetic
actttaccaacactatcttagaagt

SEQ ID NO: 13689 - DNA, 23 bp, Artificial Sequence
  Synthetic
ggagtttaacataaatccagtca

SEQ ID NO: 13690 - DNA, 21 bp, Artificial Sequence
  Synthetic
aaagtccgattagggaaaagt

SEQ ID NO: 13691 - DNA, 18 bp, Artificial Sequence
  Synthetic
tggatccacaagtgttgg

SEQ ID NO: 13692 - DNA, 18 bp, Artificial Sequence
  Synthetic
tgcaaagccgctatgtcc

SEQ ID NO: 13693 - DNA, 20 bp, Artificial Sequence
  Synthetic
accacaaaagatgctcgact

SEQ ID NO: 13694 - DNA, 18 bp, Artificial Sequence
  Synthetic
acgcgtctcggaaaaacg

SEQ ID NO: 13695 - DNA, 19 bp, Artificial Sequence
  Synthetic
aaaccaaattcttccgcgc

SEQ ID NO: 13696 - DNA, 18 bp, Artificial Sequence
  Synthetic
caccatgtccaccccatg

SEQ ID NO: 13697 - DNA, 19 bp, Artificial Sequence
  Synthetic
tactgcgactacttcaaca

SEQ ID NO: 13698 - DNA, 19 bp, Artificial Sequence
  Synthetic
ccagaggaggagttactgt

SEQ ID NO: 13699 - DNA, 22 bp, Artificial Sequence
  Synthetic
tggaagcaattagtctttctcc

SEQ ID NO: 13700 - DNA, 20 bp, Artificial Sequence
  Synthetic
cggctgcgctatatttttac

SEQ ID NO: 13701 - DNA, 25 bp, Artificial Sequence
  Synthetic
agaggtaaagtagtatcatacatga

SEQ ID NO: 13702 - DNA, 19 bp, Artificial Sequence
  Synthetic
gtcttcacctgtctccccg

SEQ ID NO: 13703 - DNA, 20 bp, Artificial Sequence
  Synthetic
agaacgtcatatcctctctg

SEQ ID NO: 13704 - DNA, 19 bp, Artificial Sequence
  Synthetic
tgcaaacagtaatcaacgc

SEQ ID NO: 13705 - DNA, 20 bp, Artificial Sequence
  Synthetic
acttgggtattggtacggga

SEQ ID NO: 13706 - DNA, 22 bp, Artificial Sequence
  Synthetic
acattggtgatccagaatacat

SEQ ID NO: 13707 - DNA, 24 bp, Artificial Sequence
  Synthetic
ggtgatttgacagacatattcaat

SEQ ID NO: 13708 - DNA, 19 bp, Artificial Sequence
  Synthetic
aaactgggtgacactgaaa

SEQ ID NO: 13709 - DNA, 22 bp, Artificial Sequence
  Synthetic
tttagtactttttcagcgagtc

SEQ ID NO: 13710 - DNA, 24 bp, Artificial Sequence
  Synthetic
cctaaaaatggattagggaatcac

SEQ ID NO: 13711 - DNA, 24 bp, Artificial Sequence
  Synthetic
ccatataagggcttaaatttttgg

SEQ ID NO: 13712 - DNA, 24 bp, Artificial Sequence
  Synthetic
ggtttctatttgaagtttgtacac

SEQ ID NO: 13713 - DNA, 18 bp, Artificial Sequence
  Synthetic
ctctagcagcggccaact

SEQ ID NO: 13714 - DNA, 20 bp, Artificial Sequence
  Synthetic
aaccctaatgtggtccaccg

SEQ ID NO: 13715 - DNA, 18 bp, Artificial Sequence
  Synthetic
cgaggctatgttccgcca

SEQ ID NO: 13716 - DNA, 18 bp, Artificial Sequence
  Synthetic
gccattggctgccacttt

SEQ ID NO: 13717 - DNA, 20 bp, Artificial Sequence
  Synthetic
gctacaaggttactgtgggc

SEQ ID NO: 13718 - DNA, 18 bp, Artificial Sequence
  Synthetic
tacgctcagtgtaggcgc

SEQ ID NO: 13719 - DNA, 17 bp, Artificial Sequence
  Synthetic
atgtcgaccccgctgaa

SEQ ID NO: 13720 - DNA, 20 bp, Artificial Sequence
  Synthetic
ttttgatgccagtcagagca

SEQ ID NO: 13721 - DNA, 17 bp, Artificial Sequence
  Synthetic
ccggccataacccacca

SEQ ID NO: 13722 - DNA, 19 bp, Artificial Sequence
  Synthetic
atacattaaccccccggcc

SEQ ID NO: 13723 - DNA, 18 bp, Artificial Sequence
  Synthetic
ccaataggccgacctgcc

SEQ ID NO: 13724 - DNA, 17 bp, Artificial Sequence
  Synthetic
cggcttcgctgctttca

SEQ ID NO: 13725 - DNA, 20 bp, Artificial Sequence
  Synthetic
ctgcggatgtatgtgagctg

SEQ ID NO: 13726 - DNA, 18 bp, Artificial Sequence
  Synthetic
gcgccacactgagaagtg

SEQ ID NO: 13727 - DNA, 20 bp, Artificial Sequence
  Synthetic
ttgtacgagctagtggaggc

SEQ ID NO: 13728 - DNA, 16 bp, Artificial Sequence
  Synthetic
ccttggcgcgcttcct

SEQ ID NO: 13729 - DNA, 16 bp, Artificial Sequence
  Synthetic
gggctggacctcgtgt

SEQ ID NO: 13730 - DNA, 20 bp, Artificial Sequence
  Synthetic
ctttgccctcgaacttgagt

SEQ ID NO: 13731 - DNA, 20 bp, Artificial Sequence
  Synthetic
tgtgctttggctttctctca

SEQ ID NO: 13732 - DNA, 20 bp, Artificial Sequence
  Synthetic
actgctagtgaccaactgct

SEQ ID NO: 13733 - DNA, 20 bp, Artificial Sequence
  Synthetic
aacaatataccaaaacggcg

SEQ ID NO: 13734 - DNA, 19 bp, Artificial Sequence
  Synthetic
taccgaaagacacagtgtt

SEQ ID NO: 13735 - DNA, 25 bp, Artificial Sequence
  Synthetic
gggttgtttattaagtttaaatcgg

SEQ ID NO: 13736 - DNA, 24 bp, Artificial Sequence
  Synthetic
gattcgggctatagagtattttac

SEQ ID NO: 13737 - DNA, 19 bp, Artificial Sequence
  Synthetic
gtggaaacgaaaaaccgtc

SEQ ID NO: 13738 - DNA, 20 bp, Artificial Sequence
  Synthetic
tgtttactgctattggacga

SEQ ID NO: 13739 - DNA, 18 bp, Artificial Sequence
  Synthetic
ggctatgttacctgcact

SEQ ID NO: 13740 - DNA, 20 bp, Artificial Sequence
  Synthetic
aggggtatgtatattagcgc

SEQ ID NO: 13741 - DNA, 21 bp, Artificial Sequence
  Synthetic
tttttcatcgtcgttacttcc

SEQ ID NO: 13742 - DNA, 21 bp, Artificial Sequence
  Synthetic
ttgctgggttatttaacatcc

SEQ ID NO: 13743 - DNA, 20 bp, Artificial Sequence
  Synthetic
cagaaactatccgacagaga

SEQ ID NO: 13744 - DNA, 18 bp, Artificial Sequence
  Synthetic
cgtttcctccttgcagac

SEQ ID NO: 13745 - DNA, 18 bp, Artificial Sequence
  Synthetic
acgaaccgtgttccgtcg

SEQ ID NO: 13746 - DNA, 18 bp, Artificial Sequence
  Synthetic
cccagaccccgagactgt

SEQ ID NO: 13747 - DNA, 18 bp, Artificial Sequence
  Synthetic
catcctcccagtgaccct

SEQ ID NO: 13748 - DNA, 17 bp, Artificial Sequence
  Synthetic
tctaggtttgccccccg

SEQ ID NO: 13749 - DNA, 24 bp, Artificial Sequence
  Synthetic
attagatcgatgggaaaaaattcg

SEQ ID NO: 13750 - DNA, 23 bp, Artificial Sequence
  Synthetic
tttagacaagatagaggaagagc

SEQ ID NO: 13751 - DNA, 19 bp, Artificial Sequence
  Synthetic
ccatcaatgaggaagctgc

SEQ ID NO: 13752 - DNA, 18 bp, Artificial Sequence
  Synthetic
gagcaagcttcacaggag

SEQ ID NO: 13753 - DNA, 21 bp, Artificial Sequence
  Synthetic
caccagggattagatatcagt

SEQ ID NO: 13754 - DNA, 21 bp, Artificial Sequence
  Synthetic
ccatcctgataaatggacagt

SEQ ID NO: 13755 - DNA, 20 bp, Artificial Sequence
  Synthetic
atatgcaagaatgaggggtg

SEQ ID NO: 13756 - DNA, 25 bp, Artificial Sequence
  Synthetic
tcaggaaagtactatttttagatgg

SEQ ID NO: 13757 - DNA, 22 bp, Artificial Sequence
  Synthetic
tagaagcagaagttattccagc

SEQ ID NO: 13758 - DNA, 18 bp, Artificial Sequence
  Synthetic
ggaaagctaggggatggt

SEQ ID NO: 13759 - DNA, 21 bp, Artificial Sequence
  Synthetic
attaggacacatagttagccc

SEQ ID NO: 13760 - DNA, 24 bp, Artificial Sequence
  Synthetic
cttagggcaacatatctatgaaac

SEQ ID NO: 13761 - DNA, 22 bp, Artificial Sequence
  Synthetic
tgtagtgctacagaaaaattgt

SEQ ID NO: 13762 - DNA, 20 bp, Artificial Sequence
  Synthetic
tggaacaggaccatgtacaa

SEQ ID NO: 13763 - DNA, 18 bp, Artificial Sequence
  Synthetic
caatgtatgcccctccca

SEQ ID NO: 13764 - DNA, 19 bp, Artificial Sequence
  Synthetic
caatgacgctgacggtaca

SEQ ID NO: 13765 - DNA, 20 bp, Artificial Sequence
  Synthetic
tggatggcctactgtaaggg

SEQ ID NO: 13766 - DNA, 20 bp, Artificial Sequence
  Synthetic
tagcatttcatcacgtggcc

SEQ ID NO: 13767 - DNA, 18 bp, Artificial Sequence
  Synthetic
caacgacatgcagtggct

SEQ ID NO: 13768 - DNA, 19 bp, Artificial Sequence
  Synthetic
gtttaggcgcaggtttccg

SEQ ID NO: 13769 - DNA, 16 bp, Artificial Sequence
  Synthetic
gagccggtcagcagct

SEQ ID NO: 13770 - DNA, 18 bp, Artificial Sequence
  Synthetic
cttcgagggcgtagtggc

SEQ ID NO: 13771 - DNA, 17 bp, Artificial Sequence
  Synthetic
gcgaactccaccgaggt

SEQ ID NO: 13772 - DNA, 20 bp, Artificial Sequence
  Synthetic
acacaacaaactccccctcg

SEQ ID NO: 13773 - DNA, 20 bp, Artificial Sequence
  Synthetic
taacgtacatgttctgcgcc

SEQ ID NO: 13774 - DNA, 18 bp, Artificial Sequence
  Synthetic
agtacatccccgcgtacg

SEQ ID NO: 13775 - DNA, 18 bp, Artificial Sequence
  Synthetic
ggacctccgggacttcga

SEQ ID NO: 13776 - DNA, 20 bp, Artificial Sequence
  Synthetic
tcctgaacacgctaatgtgc

SEQ ID NO: 13777 - DNA, 19 bp, Artificial Sequence
  Synthetic
ctctcctccacccaaacga

SEQ ID NO: 13778 - DNA, 16 bp, Artificial Sequence
  Synthetic
accgcgtcctccgaca

SEQ ID NO: 13779 - DNA, 18 bp, Artificial Sequence
  Synthetic
cagacggaacagctccca

SEQ ID NO: 13780 - DNA, 18 bp, Artificial Sequence
  Synthetic
atgggcgtaaagacgggc

SEQ ID NO: 13781 - DNA, 18 bp, Artificial Sequence
  Synthetic
ctaaggcccaccgtcacg

SEQ ID NO: 13782 - DNA, 16 bp, Artificial Sequence
  Synthetic
tgggcggtcagcgaga

SEQ ID NO: 13783 - DNA, 18 bp, Artificial Sequence
  Synthetic
cgctaaccagcagctcca

SEQ ID NO: 13784 - DNA, 16 bp, Artificial Sequence
  Synthetic
cacgatctggcgctgc

SEQ ID NO: 13785 - DNA, 19 bp, Artificial Sequence
  Synthetic
catcatctctaagcgcgcg

SEQ ID NO: 13786 - DNA, 19 bp, Artificial Sequence
  Synthetic
tacagcgtcctgaacacgt

SEQ ID NO: 13787 - DNA, 16 bp, Artificial Sequence
  Synthetic
cgggtggaccacgtca

SEQ ID NO: 13788 - DNA, 18 bp, Artificial Sequence
  Synthetic
gccagcgcgtgtatgagt

SEQ ID NO: 13789 - DNA, 19 bp, Artificial Sequence
  Synthetic
cggaaagaccactagcccg

SEQ ID NO: 13790 - DNA, 16 bp, Artificial Sequence
  Synthetic
ccaggggcaggacgaa

SEQ ID NO: 13791 - DNA, 18 bp, Artificial Sequence
  Synthetic
cttgggggattcgcaggc

SEQ ID NO: 13792 - DNA, 20 bp, Artificial Sequence
  Synthetic
taggtgataaacagcgggcg

SEQ ID NO: 13793 - DNA, 17 bp, Artificial Sequence
  Synthetic
cagggcgttgtagtgcg

SEQ ID NO: 13794 - DNA, 17 bp, Artificial Sequence
  Synthetic
cgccggccaattcttcc

SEQ ID NO: 13795 - DNA, 19 bp, Artificial Sequence
  Synthetic
gtcctgtctctgcagtcgt

SEQ ID NO: 13796 - DNA, 16 bp, Artificial Sequence
  Synthetic
tgcttcggcggctcct

SEQ ID NO: 13797 - DNA, 18 bp, Artificial Sequence
  Synthetic
gtgtagacctccaggggc

SEQ ID NO: 13798 - DNA, 17 bp, Artificial Sequence
  Synthetic
ccaatcagcgcccgaac

SEQ ID NO: 13799 - DNA, 20 bp, Artificial Sequence
  Synthetic
acgcgatggtctctatgtcc

SEQ ID NO: 13800 - DNA, 17 bp, Artificial Sequence
  Synthetic
tttgccccccacaaccc

SEQ ID NO: 13801 - DNA, 17 bp, Artificial Sequence
  Synthetic
tggtaccgcctcaagcc

SEQ ID NO: 13802 - DNA, 18 bp, Artificial Sequence
  Synthetic
agacgaactcgaaggcgg

SEQ ID NO: 13803 - DNA, 17 bp, Artificial Sequence
  Synthetic
catgaacgactgggccg

SEQ ID NO: 13804 - DNA, 16 bp, Artificial Sequence
  Synthetic
acgacgtcaaggggcg

SEQ ID NO: 13805 - DNA, 18 bp, Artificial Sequence
  Synthetic
cacaacaggtgggtgctt

SEQ ID NO: 13806 - DNA, 16 bp, Artificial Sequence
  Synthetic
gatgcgacgcctgtgc

SEQ ID NO: 13807 - DNA, 16 bp, Artificial Sequence
  Synthetic
ggcgttcaacgacgcc

SEQ ID NO: 13808 - DNA, 16 bp, Artificial Sequence
  Synthetic
aacccacgccccagtg

SEQ ID NO: 13809 - DNA, 16 bp, Artificial Sequence
  Synthetic
acagcgctccgatcgg

SEQ ID NO: 13810 - DNA, 17 bp, Artificial Sequence
  Synthetic
caaccaccttcgctccc

SEQ ID NO: 13811 - DNA, 17 bp, Artificial Sequence
  Synthetic
cagctcggcgatggtca

SEQ ID NO: 13812 - DNA, 17 bp, Artificial Sequence
  Synthetic
ccttgtcgcggtggttc

SEQ ID NO: 13813 - DNA, 17 bp, Artificial Sequence
  Synthetic
cgatggcgtccaccaga

SEQ ID NO: 13814 - DNA, 17 bp, Artificial Sequence
  Synthetic
tccagacggacagcacc

SEQ ID NO: 13815 - DNA, 18 bp, Artificial Sequence
  Synthetic
actgcgatcacgaagggc

SEQ ID NO: 13816 - DNA, 16 bp, Artificial Sequence
  Synthetic
tcctgcgccgacaaga

SEQ ID NO: 13817 - DNA, 17 bp, Artificial Sequence
  Synthetic
cccatgttttccgcggc

SEQ ID NO: 13818 - DNA, 17 bp, Artificial Sequence
  Synthetic
ctgcgcttcaagcacgg

SEQ ID NO: 13819 - DNA, 17 bp, Artificial Sequence
  Synthetic
gacacccagatgcgcct

SEQ ID NO: 13820 - DNA, 18 bp, Artificial Sequence
  Synthetic
acacgaaaatcacccgcc

SEQ ID NO: 13821 - DNA, 20 bp, Artificial Sequence
  Synthetic
tcgaacctgtttttacgggc

SEQ ID NO: 13822 - DNA, 16 bp, Artificial Sequence
  Synthetic
catgcccagcccccaa

SEQ ID NO: 13823 - DNA, 16 bp, Artificial Sequence
  Synthetic
gcggaaggaaacgggc

SEQ ID NO: 13824 - DNA, 16 bp, Artificial Sequence
  Synthetic
ccaccggggtgttgca

SEQ ID NO: 13825 - DNA, 16 bp, Artificial Sequence
  Synthetic
gtcgccccatgcacgt

SEQ ID NO: 13826 - DNA, 16 bp, Artificial Sequence
  Synthetic
gtttccgggagcgctg

SEQ ID NO: 13827 - DNA, 16 bp, Artificial Sequence
  Synthetic
tgggactccgcgtcgt

SEQ ID NO: 13828 - DNA, 20 bp, Artificial Sequence
  Synthetic
cccgatcactgtgtactacg

SEQ ID NO: 13829 - DNA, 18 bp, Artificial Sequence
  Synthetic
cggtctgtatgtcctgcg

SEQ ID NO: 13830 - DNA, 18 bp, Artificial Sequence
  Synthetic
gctggttgggtgggggta

SEQ ID NO: 13831 - DNA, 20 bp, Artificial Sequence
  Synthetic
acttatcctggggagaaggg

SEQ ID NO: 13832 - DNA, 18 bp, Artificial Sequence
  Synthetic
gatctggaggggaacttg

SEQ ID NO: 13833 - DNA, 20 bp, Artificial Sequence
  Synthetic
tcagtgtccattttgccagg

SEQ ID NO: 13834 - DNA, 20 bp, Artificial Sequence
  Synthetic
gacaaaacaacatcacagca

SEQ ID NO: 13835 - DNA, 24 bp, Artificial Sequence
  Synthetic
tgctgctttattcttctatcatag

SEQ ID NO: 13836 - DNA, 18 bp, Artificial Sequence
  Synthetic
agacactacaagacagcg

SEQ ID NO: 13837 - DNA, 23 bp, Artificial Sequence
  Synthetic
cttaacaaatttttggatggaca

SEQ ID NO: 13838 - DNA, 18 bp, Artificial Sequence
  Synthetic
ggcagccagttaccctaa

SEQ ID NO: 13839 - DNA, 18 bp, Artificial Sequence
  Synthetic
cagcgccctggtaaatgt

SEQ ID NO: 13840 - DNA, 22 bp, Artificial Sequence
  Synthetic
caagattcctaaaaacattggg

SEQ ID NO: 13841 - DNA, 17 bp, Artificial Sequence
  Synthetic
gggcattggcacaggac

SEQ ID NO: 13842 - DNA, 20 bp, Artificial Sequence
  Synthetic
ccgtaggtgacaatgctgaa

SEQ ID NO: 13843 - DNA, 19 bp, Artificial Sequence
  Synthetic
cgtagtgacacagacctgc

SEQ ID NO: 13844 - DNA, 20 bp, Artificial Sequence
  Synthetic
gaactagatgtactgggtga

SEQ ID NO: 13845 - DNA, 20 bp, Artificial Sequence
  Synthetic
atacaacggacattgaacac

SEQ ID NO: 13846 - DNA, 20 bp, Artificial Sequence
  Synthetic
gattgaggtttctaggggac

SEQ ID NO: 13847 - DNA, 20 bp, Artificial Sequence
  Synthetic
aagcagatgacaaatgtcct

SEQ ID NO: 13848 - DNA, 22 bp, Artificial Sequence
  Synthetic
ctaactttaccatcagtgttcc

SEQ ID NO: 13849 - DNA, 20 bp, Artificial Sequence
  Synthetic
aaatgtccctctaaggatgc

SEQ ID NO: 13850 - DNA, 20 bp, Artificial Sequence
  Synthetic
ccaacattggcaaacgtctc

SEQ ID NO: 13851 - DNA, 23 bp, Artificial Sequence
  Synthetic
tatgccaattaatttactgtgtg

SEQ ID NO: 13852 - DNA, 22 bp, Artificial Sequence
  Synthetic
cgaaagtatgtgataagtccac

SEQ ID NO: 13853 - DNA, 19 bp, Artificial Sequence
  Synthetic
tggaaacacaacagacact

SEQ ID NO: 13854 - DNA, 25 bp, Artificial Sequence
  Synthetic
tataggaattgtcaaatatctggtg

SEQ ID NO: 13855 - DNA, 23 bp, Artificial Sequence
  Synthetic
tattcagcaagttaaaacaacca

SEQ ID NO: 13856 - DNA, 22 bp, Artificial Sequence
  Synthetic
taagggaactattcataccaga

SEQ ID NO: 13857 - DNA, 22 bp, Artificial Sequence
  Synthetic
gaatctggaaaattgtatctgc

SEQ ID NO: 13858 - DNA, 25 bp, Artificial Sequence
  Synthetic
atcctaatagagaacgtttagtctg

SEQ ID NO: 13859 - DNA, 25 bp, Artificial Sequence
  Synthetic
ctctttacaatgtatattttgtggc

SEQ ID NO: 13860 - DNA, 21 bp, Artificial Sequence
  Synthetic
atggcaatgttagatcttgtt

SEQ ID NO: 13861 - DNA, 18 bp, Artificial Sequence
  Synthetic
acacctgttgtcacactt

SEQ ID NO: 13862 - DNA, 23 bp, Artificial Sequence
  Synthetic
atgcgtagattttaattctctgg

SEQ ID NO: 13863 - DNA, 21 bp, Artificial Sequence
  Synthetic
ttaaactttcaggacagtgga

SEQ ID NO: 13864 - DNA, 22 bp, Artificial Sequence
  Synthetic
atatggtgagtttccatcatgg

SEQ ID NO: 13865 - DNA, 25 bp, Artificial Sequence
  Synthetic
tttccaaataaattacctgtcactg

SEQ ID NO: 13866 - DNA, 20 bp, Artificial Sequence
  Synthetic
gggaacccaccaaaaggaaa

SEQ ID NO: 13867 - DNA, 18 bp, Artificial Sequence
  Synthetic
gccaactgctgtcccaac

SEQ ID NO: 13868 - DNA, 20 bp, Artificial Sequence
  Synthetic
ttaaacctccaaaacacacg

SEQ ID NO: 13869 - DNA, 18 bp, Artificial Sequence
  Synthetic
ggtccggaagaggatcag

SEQ ID NO: 13870 - DNA, 18 bp, Artificial Sequence
  Synthetic
cttcctgatccagcactt

SEQ ID NO: 13871 - DNA, 22 bp, Artificial Sequence
  Synthetic
tccggactttaatgtatttgtg

SEQ ID NO: 13872 - DNA, 21 bp, Artificial Sequence
  Synthetic
tttgaatttgaaaatcccgcg

SEQ ID NO: 13873 - DNA, 19 bp, Artificial Sequence
  Synthetic
gaccctgatgtgtctgatg

SEQ ID NO: 13874 - DNA, 20 bp, Artificial Sequence
  Synthetic
gagggtaagaggtatccaaa

SEQ ID NO: 13875 - DNA, 20 bp, Artificial Sequence
  Synthetic
tgattgtcctccaattcagc

SEQ ID NO: 13876 - DNA, 22 bp, Artificial Sequence
  Synthetic
actgtgaactagtatactgtga

SEQ ID NO: 13877 - DNA, 18 bp, Artificial Sequence
  Synthetic
cctagggctactttccga

SEQ ID NO: 13878 - DNA, 22 bp, Artificial Sequence
  Synthetic
aaggaatacaaaagactatgcc

SEQ ID NO: 13879 - DNA, 18 bp, Artificial Sequence
  Synthetic
ggcccatgctactcaaga

SEQ ID NO: 13880 - DNA, 23 bp, Artificial Sequence
  Synthetic
tctctgataatcttgaagcattt

SEQ ID NO: 13881 - DNA, 21 bp, Artificial Sequence
  Synthetic
gtcatggaatagcgataaggg

SEQ ID NO: 13882 - DNA, 20 bp, Artificial Sequence
  Synthetic
ctaggctttctgctaggtat

SEQ ID NO: 13883 - DNA, 25 bp, Artificial Sequence
  Synthetic
aatgatctagaaataaagctggaag

SEQ ID NO: 13884 - DNA, 18 bp, Artificial Sequence
  Synthetic
taagcgccctaaaacgaa

SEQ ID NO: 13885 - DNA, 20 bp, Artificial Sequence
  Synthetic
ctttcttacagggtgttcca

SEQ ID NO: 13886 - DNA, 19 bp, Artificial Sequence
  Synthetic
cacaggaaactctgacaga

SEQ ID NO: 13887 - DNA, 19 bp, Artificial Sequence
  Synthetic
cggcccacaatcttcgatc

SEQ ID NO: 13888 - DNA, 24 bp, Artificial Sequence
  Synthetic
gaatttgtatagacactgtaaagc

SEQ ID NO: 13889 - DNA, 19 bp, Artificial Sequence
  Synthetic
cagtccctatgaacctcct

SEQ ID NO: 13890 - DNA, 23 bp, Artificial Sequence
  Synthetic
gttacattcaacaaatcagaaca

SEQ ID NO: 13891 - DNA, 19 bp, Artificial Sequence
  Synthetic
ttagtaccagaagcggtac

SEQ ID NO: 13892 - DNA, 21 bp, Artificial Sequence
  Synthetic
tgttttgatgttttgcagatg

SEQ ID NO: 13893 - DNA, 20 bp, Artificial Sequence
  Synthetic
ccaatatcgagtgtttaggc

SEQ ID NO: 13894 - DNA, 21 bp, Artificial Sequence
  Synthetic
tattgggatgttgctaaacca

SEQ ID NO: 13895 - DNA, 24 bp, Artificial Sequence
  Synthetic
gatgtttatggcgataaatgtttc

SEQ ID NO: 13896 - DNA, 21 bp, Artificial Sequence
  Synthetic
gaatggcaattagcttttgtg

SEQ ID NO: 13897 - DNA, 20 bp, Artificial Sequence
  Synthetic
gctggacaggtagtattgtc

SEQ ID NO: 13898 - DNA, 18 bp, Artificial Sequence
  Synthetic
tcgttggatgatgctgaa

SEQ ID NO: 13899 - DNA, 18 bp, Artificial Sequence
  Synthetic
tggagccagcaaatcctt

SEQ ID NO: 13900 - DNA, 23 bp, Artificial Sequence
  Synthetic
agtttaacagctttagatgactt

SEQ ID NO: 13901 - DNA, 22 bp, Artificial Sequence
  Synthetic
gtggaattgtagaagatgaagc

SEQ ID NO: 13902 - DNA, 18 bp, Artificial Sequence
  Synthetic
ggtcctctccagtctctc

SEQ ID NO: 13903 - DNA, 21 bp, Artificial Sequence
  Synthetic
tttggcaatttaggaataggg

SEQ ID NO: 13904 - DNA, 21 bp, Artificial Sequence
  Synthetic
agaagaaattgaattaggccc

SEQ ID NO: 13905 - DNA, 19 bp, Artificial Sequence
  Synthetic
gatcgcctcttaacagtgg

SEQ ID NO: 13906 - DNA, 23 bp, Artificial Sequence
  Synthetic
aattagttgatgtagaaaaccct

SEQ ID NO: 13907 - DNA, 25 bp, Artificial Sequence
  Synthetic
tccttataaagacctaaagttttgg

SEQ ID NO: 13908 - DNA, 22 bp, Artificial Sequence
  Synthetic
atttccatcaagcaatactgac

SEQ ID NO: 13909 - DNA, 21 bp, Artificial Sequence
  Synthetic
cgacaaaacagtcaaatcaac

SEQ ID NO: 13910 - DNA, 19 bp, Artificial Sequence
  Synthetic
cgtccgtagaaatgaaggg

SEQ ID NO: 13911 - DNA, 21 bp, Artificial Sequence
  Synthetic
aagaagatctgtggatacctc

SEQ ID NO: 13912 - DNA, 20 bp, Artificial Sequence
  Synthetic
ccctccactagtttggtcga

SEQ ID NO: 13913 - DNA, 20 bp, Artificial Sequence
  Synthetic
tccatctaagttcacagagc

SEQ ID NO: 13914 - DNA, 19 bp, Artificial Sequence
  Synthetic
aaagctacttccaaaggct

SEQ ID NO: 13915 - DNA, 19 bp, Artificial Sequence
  Synthetic
atccaggagatcgaggtat

SEQ ID NO: 13916 - DNA, 18 bp, Artificial Sequence
  Synthetic
acccactggatcttctcc

SEQ ID NO: 13917 - DNA, 21 bp, Artificial Sequence
  Synthetic
caaattacctcataccactgc

SEQ ID NO: 13918 - DNA, 21 bp, Artificial Sequence
  Synthetic
gtggtccagaagatagaaagg

SEQ ID NO: 13919 - DNA, 19 bp, Artificial Sequence
  Synthetic
gatgtagagagcttcctcg

SEQ ID NO: 13920 - DNA, 18 bp, Artificial Sequence
  Synthetic
aggcaatgtatgtgcctc

SEQ ID NO: 13921 - DNA, 21 bp, Artificial Sequence
  Synthetic
tgatgttcataccacgattgt

SEQ ID NO: 13922 - DNA, 18 bp, Artificial Sequence
  Synthetic
ctactggagcacatggag

SEQ ID NO: 13923 - DNA, 20 bp, Artificial Sequence
  Synthetic
tagatgtatacatggcccca

SEQ ID NO: 13924 - DNA, 18 bp, Artificial Sequence
  Synthetic
aagccagggaaaagcttg

SEQ ID NO: 13925 - DNA, 19 bp, Artificial Sequence
  Synthetic
aaagaactgagccagtgtg

SEQ ID NO: 13926 - DNA, 25 bp, Artificial Sequence
  Synthetic
gttgtttactagtaactttgtgttg

SEQ ID NO: 13927 - DNA, 18 bp, Artificial Sequence
  Synthetic
caccacagagaaagggga

SEQ ID NO: 13928 - DNA, 21 bp, Artificial Sequence
  Synthetic
ctactttagtagtgcactcca

SEQ ID NO: 13929 - DNA, 25 bp, Artificial Sequence
  Synthetic
attgtatctaaacaaaaggtgagag

SEQ ID NO: 13930 - DNA, 18 bp, Artificial Sequence
  Synthetic
attttgtgcgacaatgct

SEQ ID NO: 13931 - DNA, 23 bp, Artificial Sequence
  Synthetic
gaagtaaatgctagaattgaacc

SEQ ID NO: 13932 - DNA, 19 bp, Artificial Sequence
  Synthetic
gctggatagagcttgatga

SEQ ID NO: 13933 - DNA, 20 bp, Artificial Sequence
  Synthetic
atcccacttaaggaatgaca

SEQ ID NO: 13934 - DNA, 18 bp, Artificial Sequence
  Synthetic
cgttgtctcctccagtca

SEQ ID NO: 13935 - DNA, 18 bp, Artificial Sequence
  Synthetic
cactcgcgagatactgac

SEQ ID NO: 13936 - DNA, 21 bp, Artificial Sequence
  Synthetic
caagcacagtccattatccaa

SEQ ID NO: 13937 - DNA, 21 bp, Artificial Sequence
  Synthetic
acatcagagtcacagttaacg

SEQ ID NO: 13938 - DNA, 24 bp, Artificial Sequence
  Synthetic
gctgctagaaatattgttagaaga

SEQ ID NO: 13939 - DNA, 19 bp, Artificial Sequence
  Synthetic
aggcaacctccaaacattg

SEQ ID NO: 13940 - DNA, 18 bp, Artificial Sequence
  Synthetic
aaaccagcggctaaatcc

SEQ ID NO: 13941 - DNA, 18 bp, Artificial Sequence
  Synthetic
cagaggggaaacgtactc

SEQ ID NO: 13942 - DNA, 19 bp, Artificial Sequence
  Synthetic
cgtactgggaacatttgac

SEQ ID NO: 13943 - DNA, 23 bp, Artificial Sequence
  Synthetic
accattgcatcaaatttacatga

SEQ ID NO: 13944 - DNA, 23 bp, Artificial Sequence
  Synthetic
attgtatggatgacatagagact

SEQ ID NO: 13945 - DNA, 23 bp, Artificial Sequence
  Synthetic
aagaaagacaaagtaaaaggaga

SEQ ID NO: 13946 - DNA, 18 bp, Artificial Sequence
  Synthetic
aacagcaacggtcggagg

SEQ ID NO: 13947 - DNA, 18 bp, Artificial Sequence
  Synthetic
tgctgaggaagttggaag

SEQ ID NO: 13948 - DNA, 23 bp, Artificial Sequence
  Synthetic
ttggaagtattctttatttgggt

SEQ ID NO: 13949 - DNA, 18 bp, Artificial Sequence
  Synthetic
gtcctggtttgcctacag

SEQ ID NO: 13950 - DNA, 24 bp, Artificial Sequence
  Synthetic
cagcaatattttacctcttactcc

SEQ ID NO: 13951 - DNA, 22 bp, Artificial Sequence
  Synthetic
tctttattttcatgccaattcg

SEQ ID NO: 13952 - DNA, 18 bp, Artificial Sequence
  Synthetic
cctctaggcataggaacg

SEQ ID NO: 13953 - DNA, 19 bp, Artificial Sequence
  Synthetic
tcactcccctgtgaggaac

SEQ ID NO: 13954 - DNA, 20 bp, Artificial Sequence
  Synthetic
aaagaaacaccaaccgtcgc

SEQ ID NO: 13955 - DNA, 18 bp, Artificial Sequence
  Synthetic
tagtgctggaagcggagg

SEQ ID NO: 13956 - DNA, 20 bp, Artificial Sequence
  Synthetic
atgatgatgaactggtcgcc

SEQ ID NO: 13957 - DNA, 20 bp, Artificial Sequence
  Synthetic
accgcagcaatttcaactcc

SEQ ID NO: 13958 - DNA, 19 bp, Artificial Sequence
  Synthetic
tcatgctagagagcctgcg

SEQ ID NO: 13959 - DNA, 20 bp, Artificial Sequence
  Synthetic
gtcccctcctcttttcaacc

SEQ ID NO: 13960 - DNA, 17 bp, Artificial Sequence
  Synthetic
cggcaaggtcgaagcag

SEQ ID NO: 13961 - DNA, 17 bp, Artificial Sequence
  Synthetic
gccgtagctgttgagcc

SEQ ID NO: 13962 - DNA, 20 bp, Artificial Sequence
  Synthetic
aacagccactcagagtttcc

SEQ ID NO: 13963 - DNA, 20 bp, Artificial Sequence
  Synthetic
ccatcagggcacgtagtagg

SEQ ID NO: 13964 - DNA, 20 bp, Artificial Sequence
  Synthetic
atatgggaagtttctggccg

SEQ ID NO: 13965 - DNA, 20 bp, Artificial Sequence
  Synthetic
ttaggtctcaatgctgtcgc

SEQ ID NO: 13966 - DNA, 19 bp, Artificial Sequence
  Synthetic
aaagccgggggtgtatagg

SEQ ID NO: 13967 - DNA, 20 bp, Artificial Sequence
  Synthetic
gggacgtgatgtggaaatgt

SEQ ID NO: 13968 - DNA, 20 bp, Artificial Sequence
  Synthetic
gctctaagcacatcccctac

SEQ ID NO: 13969 - DNA, 19 bp, Artificial Sequence
  Synthetic
tcaacatattgggcggctg

SEQ ID NO: 13970 - DNA, 19 bp, Artificial Sequence
  Synthetic
atagcctttgcctccaggg

SEQ ID NO: 13971 - DNA, 19 bp, Artificial Sequence
  Synthetic
gtgtgtcacaccacttgct

SEQ ID NO: 13972 - DNA, 20 bp, Artificial Sequence
  Synthetic
aggatacatcgttatgcgcc

SEQ ID NO: 13973 - DNA, 20 bp, Artificial Sequence
  Synthetic
tcctcgactcgtttgatcct

SEQ ID NO: 13974 - DNA, 20 bp, Artificial Sequence
  Synthetic
caacagctggctgataaggt

SEQ ID NO: 13975 - DNA, 20 bp, Artificial Sequence
  Synthetic
agtcttctgtgtagacccgt

SEQ ID NO: 13976 - DNA, 18 bp, Artificial Sequence
  Synthetic
ccctcacagaacgcctct

SEQ ID NO: 13977 - DNA, 20 bp, Artificial Sequence
  Synthetic
aacatcatgctcgtccaacg

SEQ ID NO: 13978 - DNA, 20 bp, Artificial Sequence
  Synthetic
tggtatggcagctttttccc

SEQ ID NO: 13979 - DNA, 19 bp, Artificial Sequence
  Synthetic
gtcaaaacagaaagacgcc

SEQ ID NO: 13980 - DNA, 20 bp, Artificial Sequence
  Synthetic
gattccattgggatcagact

SEQ ID NO: 13981 - DNA, 20 bp, Artificial Sequence
  Synthetic
tctgctgaattgttcactct

SEQ ID NO: 13982 - DNA, 23 bp, Artificial Sequence
  Synthetic
gtaaaagcaaactacaatgatgc

SEQ ID NO: 13983 - DNA, 22 bp, Artificial Sequence
  Synthetic
gtattaatgatggcatgctttg

SEQ ID NO: 13984 - DNA, 21 bp, Artificial Sequence
  Synthetic
acaccctttctttttcgaatt

SEQ ID NO: 13985 - DNA, 18 bp, Artificial Sequence
  Synthetic
aacgtttggggtatcgtt

SEQ ID NO: 13986 - DNA, 18 bp, Artificial Sequence
  Synthetic
gaggaggagcagcaagaa

SEQ ID NO: 13987 - DNA, 25 bp, Artificial Sequence
  Synthetic
actttatcatctagaaagcaaactc

SEQ ID NO: 13988 - DNA, 22 bp, Artificial Sequence
  Synthetic
aaaattcgtagtgtacctgttg

SEQ ID NO: 13989 - DNA, 22 bp, Artificial Sequence
  Synthetic
agatagtaaacatagacagcct

SEQ ID NO: 13990 - DNA, 18 bp, Artificial Sequence
  Synthetic
cacgtcagcaaggcatta

SEQ ID NO: 13991 - DNA, 18 bp, Artificial Sequence
  Synthetic
tacagagccatcagggga

SEQ ID NO: 13992 - DNA, 20 bp, Artificial Sequence
  Synthetic
tctgtctagacttagagcgt

SEQ ID NO: 13993 - DNA, 19 bp, Artificial Sequence
  Synthetic
ggtacaggaggttctatgg

SEQ ID NO: 13994 - DNA, 20 bp, Artificial Sequence
  Synthetic
aatcaaagggaggagtttca

SEQ ID NO: 13995 - DNA, 18 bp, Artificial Sequence
  Synthetic
gttgatcagcttgccgaa

SEQ ID NO: 13996 - DNA, 23 bp, Artificial Sequence
  Synthetic
ttcattctgctactgatagactc

SEQ ID NO: 13997 - DNA, 23 bp, Artificial Sequence
  Synthetic
atggcctgatttacttaaaatgt

SEQ ID NO: 13998 - DNA, 25 bp, Artificial Sequence
  Synthetic
aacattatctcagacatgtagaaga

SEQ ID NO: 13999 - DNA, 24 bp, Artificial Sequence
  Synthetic
gattactactgtgaaactactctg

SEQ ID NO: 14000 - DNA, 19 bp, Artificial Sequence
  Synthetic
cctcaatgggaatggagat

SEQ ID NO: 14001 - DNA, 18 bp, Artificial Sequence
  Synthetic
ttgccgcgagtatcattg

SEQ ID NO: 14002 - DNA, 19 bp, Artificial Sequence
  Synthetic
ggtacgggatgtaatggat

SEQ ID NO: 14003 - DNA, 23 bp, Artificial Sequence
  Synthetic
aaaaaggagattatttgaaagcg

SEQ ID NO: 14004 - DNA, 18 bp, Artificial Sequence
  Synthetic
gaggacgaggacaaggaa

SEQ ID NO: 14005 - DNA, 20 bp, Artificial Sequence
  Synthetic
acattacaagacgttagcct

SEQ ID NO: 14006 - DNA, 21 bp, Artificial Sequence
  Synthetic
aacatctgtaccttccattcc

SEQ ID NO: 14007 - DNA, 21 bp, Artificial Sequence
  Synthetic
tttttcagatgtctctttggc

SEQ ID NO: 14008 - DNA, 20 bp, Artificial Sequence
  Synthetic
aagtttggttttcctgacac

SEQ ID NO: 14009 - DNA, 18 bp, Artificial Sequence
  Synthetic
aaggatccccatgtacca

SEQ ID NO: 14010 - DNA, 25 bp, Artificial Sequence
  Synthetic
ttagacatttatttaatagggctgg

SEQ ID NO: 14011 - DNA, 24 bp, Artificial Sequence
  Synthetic
ccccttaaaaaatacactttttgg

SEQ ID NO: 14012 - DNA, 18 bp, Artificial Sequence
  Synthetic
cggttgcatgctttttgg

SEQ ID NO: 14013 - DNA, 22 bp, Artificial Sequence
  Synthetic
caaaagagaactgcaatgtttc

SEQ ID NO: 14014 - DNA, 22 bp, Artificial Sequence
  Synthetic
gtgtattaactgtcaaaagcca

SEQ ID NO: 14015 - DNA, 23 bp, Artificial Sequence
  Synthetic
actgttatgagcaattaaatgac

SEQ ID NO: 14016 - DNA, 20 bp, Artificial Sequence
  Synthetic
gcttcaatccaatgatcgtc

SEQ ID NO: 14017 - DNA, 21 bp, Artificial Sequence
  Synthetic
ggtgaatagtatctgcaacac

SEQ ID NO: 14018 - DNA, 18 bp, Artificial Sequence
  Synthetic
ggtgctagcagaacttca

SEQ ID NO: 14019 - DNA, 21 bp, Artificial Sequence
  Synthetic
agaacttgatgaaatagggga

SEQ ID NO: 14020 - DNA, 21 bp, Artificial Sequence
  Synthetic
atttgaggaatgataccgacg

SEQ ID NO: 14021 - DNA, 22 bp, Artificial Sequence
  Synthetic
cagattgagagcatgattgaag

SEQ ID NO: 14022 - DNA, 22 bp, Artificial Sequence
  Synthetic
gattacaacacatttccagagg

SEQ ID NO: 14023 - DNA, 18 bp, Artificial Sequence
  Synthetic
cgaggagcatctgtgaga

SEQ ID NO: 14024 - DNA, 19 bp, Artificial Sequence
  Synthetic
tgttctcaaacaagatggc

SEQ ID NO: 14025 - DNA, 18 bp, Artificial Sequence
  Synthetic
atctcgggcagaagaagt

SEQ ID NO: 14026 - DNA, 20 bp, Artificial Sequence
  Synthetic
agtgtccgggattaatgagt

SEQ ID NO: 14027 - DNA, 18 bp, Artificial Sequence
  Synthetic
agggccaaacctgtacaa

SEQ ID NO: 14028 - DNA, 21 bp, Artificial Sequence
  Synthetic
gttctaacacgaacgtttacg

SEQ ID NO: 14029 - DNA, 18 bp, Artificial Sequence
  Synthetic
ttgcttgttgtcagtgct

SEQ ID NO: 14030 - DNA, 20 bp, Artificial Sequence
  Synthetic
agagcagccaaatataggtg

SEQ ID NO: 14031 - DNA, 18 bp, Artificial Sequence
  Synthetic
ctgtgtgccattcgacac

SEQ ID NO: 14032 - DNA, 18 bp, Artificial Sequence
  Synthetic
cagaacgagcaggaccta

SEQ ID NO: 14033 - DNA, 18 bp, Artificial Sequence
  Synthetic
gtacagtctctgggaggt

SEQ ID NO: 14034 - DNA, 22 bp, Artificial Sequence
  Synthetic
gcattttccttaacagacatca

SEQ ID NO: 14035 - DNA, 18 bp, Artificial Sequence
  Synthetic
caagttgtgccttccctt

SEQ ID NO: 14036 - DNA, 20 bp, Artificial Sequence
  Synthetic
aggacaatccacccaaactg

SEQ ID NO: 14037 - DNA, 22 bp, Artificial Sequence
  Synthetic
ttctgttattttaggggcattt

SEQ ID NO: 14038 - DNA, 21 bp, Artificial Sequence
  Synthetic
atctagttcagctgttcttca

SEQ ID NO: 14039 - DNA, 22 bp, Artificial Sequence
  Synthetic
aactgagttcacaactagtaca

SEQ ID NO: 14040 - DNA, 22 bp, Artificial Sequence
  Synthetic
gaagtggtgttactataggtgc

SEQ ID NO: 14041 - DNA, 23 bp, Artificial Sequence
  Synthetic
tttagataattcaacaggggatt

SEQ ID NO: 14042 - DNA, 19 bp, Artificial Sequence
  Synthetic
ccgtgcaaatgataacact

SEQ ID NO: 14043 - DNA, 21 bp, Artificial Sequence
  Synthetic
caaaatgttgcttttgatgca

SEQ ID NO: 14044 - DNA, 18 bp, Artificial Sequence
  Synthetic
ttcctttaggccgcaaat

SEQ ID NO: 14045 - DNA, 23 bp, Artificial Sequence
  Synthetic
ttgttaataaacgtttatgctgc

SEQ ID NO: 14046 - DNA, 23 bp, Artificial Sequence
  Synthetic
gatcatatgaacaaatggagact

SEQ ID NO: 14047 - DNA, 23 bp, Artificial Sequence
  Synthetic
gaacaatagcaatggagttaatc

SEQ ID NO: 14048 - DNA, 19 bp, Artificial Sequence
  Synthetic
tgaggggatcagttgcaca

SEQ ID NO: 14049 - DNA, 25 bp, Artificial Sequence
  Synthetic
caagtttcataagaggaaagaaagt

SEQ ID NO: 14050 - DNA, 23 bp, Artificial Sequence
  Synthetic
aagacaatagcataagaattggt

SEQ ID NO: 14051 - DNA, 19 bp, Artificial Sequence
  Synthetic
catgggctggctaacaatc

SEQ ID NO: 14052 - DNA, 23 bp, Artificial Sequence
  Synthetic
aattctcactatgaggaatgttc

SEQ ID NO: 14053 - DNA, 19 bp, Artificial Sequence
  Synthetic
tggtgtttggataggaagg

SEQ ID NO: 14054 - DNA, 20 bp, Artificial Sequence
  Synthetic
cagattgtgtattggaagca

SEQ ID NO: 14055 - DNA, 21 bp, Artificial Sequence
  Synthetic
tactttgtcgaaacactagcg

SEQ ID NO: 14056 - DNA, 24 bp, Artificial Sequence
  Synthetic
gtttagaaatgtcttaagcattgc

SEQ ID NO: 14057 - DNA, 21 bp, Artificial Sequence
  Synthetic
agtcttaggagtttcaatcct

SEQ ID NO: 14058 - DNA, 20 bp, Artificial Sequence
  Synthetic
agccaacttcagtatggagc

SEQ ID NO: 14059 - DNA, 25 bp, Artificial Sequence
  Synthetic
cgaaaacggtgtatataaaagatgt

SEQ ID NO: 14060 - DNA, 19 bp, Artificial Sequence
  Synthetic
tgctgcatgccataaatgt

SEQ ID NO: 14061 - DNA, 25 bp, Artificial Sequence
  Synthetic
aatattaagtatgcatggacctaag

SEQ ID NO: 14062 - DNA, 19 bp, Artificial Sequence
  Synthetic
aacattttgtgaacaggca

SEQ ID NO: 14063 - DNA, 18 bp, Artificial Sequence
  Synthetic
tgttctgaagtggaagca

SEQ ID NO: 14064 - DNA, 18 bp, Artificial Sequence
  Synthetic
gtgccacaatgtgcaaac

SEQ ID NO: 14065 - DNA, 22 bp, Artificial Sequence
  Synthetic
gacatagacagccaaatacagt

SEQ ID NO: 14066 - DNA, 22 bp, Artificial Sequence
  Synthetic
ggcaacaaagacaattgtatga

SEQ ID NO: 14067 - DNA, 19 bp, Artificial Sequence
  Synthetic
cggtatccgctactcagct

SEQ ID NO: 14068 - DNA, 23 bp, Artificial Sequence
  Synthetic
acagtttaaaatgtttacggtac

SEQ ID NO: 14069 - DNA, 18 bp, Artificial Sequence
  Synthetic
tatgtgtgctgccatgtc

SEQ ID NO: 14070 - DNA, 25 bp, Artificial Sequence
  Synthetic
tcctctttaattacatatgacaacc

SEQ ID NO: 14071 - DNA, 19 bp, Artificial Sequence
  Synthetic
tgcagcctttagtatctgc

SEQ ID NO: 14072 - DNA, 18 bp, Artificial Sequence
  Synthetic
tgaggacgttagggacaa

SEQ ID NO: 14073 - DNA, 20 bp, Artificial Sequence
  Synthetic
gggattccatgtttttttgc

SEQ ID NO: 14074 - DNA, 20 bp, Artificial Sequence
  Synthetic
tgtttgctggcataatcaat

SEQ ID NO: 14075 - DNA, 20 bp, Artificial Sequence
  Synthetic
atttgtgtttgtggtatggg

SEQ ID NO: 14076 - DNA, 18 bp, Artificial Sequence
  Synthetic
ggatgtcaatccgacctt

SEQ ID NO: 14077 - DNA, 20 bp, Artificial Sequence
  Synthetic
acagattgtgtattggaagc

SEQ ID NO: 14078 - DNA, 18 bp, Artificial Sequence
  Synthetic
ttgagacactggcaagga

SEQ ID NO: 14079 - DNA, 18 bp, Artificial Sequence
  Synthetic
ttaggcgtctccatcctg

SEQ ID NO: 14080 - DNA, 19 bp, Artificial Sequence
  Synthetic
tttgttgccaatttcagca

SEQ ID NO: 14081 - DNA, 22 bp, Artificial Sequence
  Synthetic
tgaatacaagtcaaagaggagt

SEQ ID NO: 14082 - DNA, 16 bp, Artificial Sequence
  Synthetic
cgccccaccacctcaa

SEQ ID NO: 14083 - DNA, 17 bp, Artificial Sequence
  Synthetic
tcggggacagctatgcg

SEQ ID NO: 14084 - DNA, 17 bp, Artificial Sequence
  Synthetic
tggagttgctacgcggc

SEQ ID NO: 14085 - DNA, 18 bp, Artificial Sequence
  Synthetic
ttggtgttggagcaacgc

SEQ ID NO: 14086 - DNA, 20 bp, Artificial Sequence
  Synthetic
ccgagagggaactgtgtgga

SEQ ID NO: 14087 - DNA, 20 bp, Artificial Sequence
  Synthetic
aaggccaaaatacctgggtc

SEQ ID NO: 14088 - DNA, 18 bp, Artificial Sequence
  Synthetic
gcgtggacgtctgcaatg

SEQ ID NO: 14089 - DNA, 19 bp, Artificial Sequence
  Synthetic
ccccactgtcaagcctttg

SEQ ID NO: 14090 - DNA, 19 bp, Artificial Sequence
  Synthetic
tggggttcctagcagtgtg

SEQ ID NO: 14091 - DNA, 19 bp, Artificial Sequence
  Synthetic
ctggtgcgtgttctaccaa

SEQ ID NO: 14092 - DNA, 16 bp, Artificial Sequence
  Synthetic
cagcggcagagcggtt

SEQ ID NO: 14093 - DNA, 19 bp, Artificial Sequence
  Synthetic
tcatggcactaacgggagg

SEQ ID NO: 14094 - DNA, 18 bp, Artificial Sequence
  Synthetic
tcttgtgtgacgagggcc

SEQ ID NO: 14095 - DNA, 20 bp, Artificial Sequence
  Synthetic
ggccatgacgtggtgatctg

SEQ ID NO: 14096 - DNA, 19 bp, Artificial Sequence
  Synthetic
ttgcaagatacgccactgg

SEQ ID NO: 14097 - DNA, 18 bp, Artificial Sequence
  Synthetic
tgaggatgcaacgcaggg

SEQ ID NO: 14098 - DNA, 16 bp, Artificial Sequence
  Synthetic
tgggcccccagctgat

SEQ ID NO: 14099 - DNA, 16 bp, Artificial Sequence
  Synthetic
cggcgaggagtcccaa

SEQ ID NO: 14100 - DNA, 19 bp, Artificial Sequence
  Synthetic
tttcaccaatggtcgctcg

SEQ ID NO: 14101 - DNA, 20 bp, Artificial Sequence
  Synthetic
ttgacctcctttctggcaag

SEQ ID NO: 14102 - DNA, 18 bp, Artificial Sequence
  Synthetic
gccttggtcgctacctgt

SEQ ID NO: 14103 - DNA, 17 bp, Artificial Sequence
  Synthetic
ccagcttggttgcgcag

SEQ ID NO: 14104 - DNA, 20 bp, Artificial Sequence
  Synthetic
ttgaggctatagggtctgca

SEQ ID NO: 14105 - DNA, 19 bp, Artificial Sequence
  Synthetic
atccgtgatgaggtgaggg

SEQ ID NO: 14106 - DNA, 20 bp, Artificial Sequence
  Synthetic
ccaaaccagcgtgtaaaagc

SEQ ID NO: 14107 - DNA, 20 bp, Artificial Sequence
  Synthetic
ttaaggctgctttggctgac

SEQ ID NO: 14108 - DNA, 19 bp, Artificial Sequence
  Synthetic
acccagtggtgagatacgt

SEQ ID NO: 14109 - DNA, 25 bp, Artificial Sequence
  Synthetic
tacctttaagtattagagacttagc

SEQ ID NO: 14110 - DNA, 22 bp, Artificial Sequence
  Synthetic
tagaaaagttagattgctgtgg

SEQ ID NO: 14111 - DNA, 25 bp, Artificial Sequence
  Synthetic
acaattatttgagagagatacagac

SEQ ID NO: 14112 - DNA, 18 bp, Artificial Sequence
  Synthetic
gtggaggtaccggctatt

SEQ ID NO: 14113 - DNA, 23 bp, Artificial Sequence
  Synthetic
catgatgatctatttgaaagctc

SEQ ID NO: 14114 - DNA, 23 bp, Artificial Sequence
  Synthetic
ggcaagtacttttgatttttcag

SEQ ID NO: 14115 - DNA, 23 bp, Artificial Sequence
  Synthetic
ttgcattttaatttatggtcctc

SEQ ID NO: 14116 - DNA, 23 bp, Artificial Sequence
  Synthetic
tatgaaagcagataatacacctc

SEQ ID NO: 14117 - DNA, 16 bp, Artificial Sequence
  Synthetic
cagctccacgcctcca

SEQ ID NO: 14118 - DNA, 17 bp, Artificial Sequence
  Synthetic
tcgggcccttacaagca

SEQ ID NO: 14119 - DNA, 18 bp, Artificial Sequence
  Synthetic
gagggtcacttcgatcag

SEQ ID NO: 14120 - DNA, 21 bp, Artificial Sequence
  Synthetic
aggagagattttgatgaagcg

SEQ ID NO: 14121 - DNA, 20 bp, Artificial Sequence
  Synthetic
tctaactgagtccacaggcg

SEQ ID NO: 14122 - DNA, 23 bp, Artificial Sequence
  Synthetic
ttcgttttgcatttgataatcct

SEQ ID NO: 14123 - DNA, 24 bp, Artificial Sequence
  Synthetic
catactatacacaagacacaaagg

SEQ ID NO: 14124 - DNA, 23 bp, Artificial Sequence
  Synthetic
aaagatacagaaaacagtaatgc

SEQ ID NO: 14125 - DNA, 24 bp, Artificial Sequence
  Synthetic
caaaaatcagttttacattccagg

SEQ ID NO: 14126 - DNA, 18 bp, Artificial Sequence
  Synthetic
ccaagctgggttacaaca

SEQ ID NO: 14127 - DNA, 23 bp, Artificial Sequence
  Synthetic
gacaatatgtttactcatgcaga

SEQ ID NO: 14128 - DNA, 20 bp, Artificial Sequence
  Synthetic
ctttctccaaggacaactca

SEQ ID NO: 14129 - DNA, 18 bp, Artificial Sequence
  Synthetic
atagcatggtccagctca

SEQ ID NO: 14130 - DNA, 18 bp, Artificial Sequence
  Synthetic
cacattggtccactgtca

SEQ ID NO: 14131 - DNA, 18 bp, Artificial Sequence
  Synthetic
ggtgggcctttgacaatg

SEQ ID NO: 14132 - DNA, 22 bp, Artificial Sequence
  Synthetic
gcttcgagcactaataaaactg

SEQ ID NO: 14133 - DNA, 22 bp, Artificial Sequence
  Synthetic
agagataaagaagagcgtctac

SEQ ID NO: 14134 - DNA, 22 bp, Artificial Sequence
  Synthetic
tgattcaatggcaaagaaaacc

SEQ ID NO: 14135 - DNA, 20 bp, Artificial Sequence
  Synthetic
aaacctttaagttttggcgc

SEQ ID NO: 14136 - DNA, 23 bp, Artificial Sequence
  Synthetic
aattgattgttgttatgctgaac

SEQ ID NO: 14137 - DNA, 18 bp, Artificial Sequence
  Synthetic
cttgtggagcaggtgtac

SEQ ID NO: 14138 - DNA, 20 bp, Artificial Sequence
  Synthetic
actgatggatctgatgtctc

SEQ ID NO: 14139 - DNA, 18 bp, Artificial Sequence
  Synthetic
gtcatgagtcagctgcta

SEQ ID NO: 14140 - DNA, 22 bp, Artificial Sequence
  Synthetic
acagatgtagtacattttggtt

SEQ ID NO: 14141 - DNA, 23 bp, Artificial Sequence
  Synthetic
tactaataaaacctggacatgtt

SEQ ID NO: 14142 - DNA, 20 bp, Artificial Sequence
  Synthetic
ctccggatctcttcaagggt

SEQ ID NO: 14143 - DNA, 22 bp, Artificial Sequence
  Synthetic
accagatacaatagtgacaact

SEQ ID NO: 14144 - DNA, 23 bp, Artificial Sequence
  Synthetic
taacatttggtgaggaaatacca

SEQ ID NO: 14145 - DNA, 23 bp, Artificial Sequence
  Synthetic
tacctctaatacctggaagatcc

SEQ ID NO: 14146 - DNA, 22 bp, Artificial Sequence
  Synthetic
ttaccgatgagtctaaagtagc

SEQ ID NO: 14147 - DNA, 23 bp, Artificial Sequence
  Synthetic
taataagtatgtggatgctgaga

SEQ ID NO: 14148 - DNA, 20 bp, Artificial Sequence
  Synthetic
tggaaatgcaaactttgagc

SEQ ID NO: 14149 - DNA, 18 bp, Artificial Sequence
  Synthetic
agtggctcacttgtctcc

SEQ ID NO: 14150 - DNA, 25 bp, Artificial Sequence
  Synthetic
taaacttgagtgaaaagttaactgg

SEQ ID NO: 14151 - DNA, 21 bp, Artificial Sequence
  Synthetic
gatgtcaatccgactctactg

SEQ ID NO: 14152 - DNA, 19 bp, Artificial Sequence
  Synthetic
acaaacagactgtgtcctg

SEQ ID NO: 14153 - DNA, 21 bp, Artificial Sequence
  Synthetic
aggatgtgatggaatcaatgg

SEQ ID NO: 14154 - DNA, 22 bp, Artificial Sequence
  Synthetic
cgttgaaactttagctagaagc

SEQ ID NO: 14155 - DNA, 20 bp, Artificial Sequence
  Synthetic
catcgcaccaataatgttct

SEQ ID NO: 14156 - DNA, 20 bp, Artificial Sequence
  Synthetic
agtctcggtactgaatcttg

SEQ ID NO: 14157 - DNA, 20 bp, Artificial Sequence
  Synthetic
tggagtgtctggaataaacg

SEQ ID NO: 14158 - DNA, 19 bp, Artificial Sequence
  Synthetic
ccaatcaagggcaggacta

SEQ ID NO: 14159 - DNA, 20 bp, Artificial Sequence
  Synthetic
tagccaaaggggaattcttg

SEQ ID NO: 14160 - DNA, 18 bp, Artificial Sequence
  Synthetic
agacgtgacaaccgacta

SEQ ID NO: 14161 - DNA, 23 bp, Artificial Sequence
  Synthetic
cctgatattgttttagaagagct

SEQ ID NO: 14162 - DNA, 18 bp, Artificial Sequence
  Synthetic
aagttttatgccaccccg

SEQ ID NO: 14163 - DNA, 18 bp, Artificial Sequence
  Synthetic
ttcaacctgatgccactg

SEQ ID NO: 14164 - DNA, 18 bp, Artificial Sequence
  Synthetic
gttgtagctctgcatgga

SEQ ID NO: 14165 - DNA, 21 bp, Artificial Sequence
  Synthetic
aatttgaaggcaacacaatcg

SEQ ID NO: 14166 - DNA, 24 bp, Artificial Sequence
  Synthetic
tcaatagttccattagtagaaggc

SEQ ID NO: 14167 - DNA, 23 bp, Artificial Sequence
  Synthetic
tgttaatgtattagttgacccca

SEQ ID NO: 14168 - DNA, 25 bp, Artificial Sequence
  Synthetic
tgttcagtttgaatatagaaatccc

SEQ ID NO: 14169 - DNA, 18 bp, Artificial Sequence
  Synthetic
aagtactcctgttgccag

SEQ ID NO: 14170 - DNA, 24 bp, Artificial Sequence
  Synthetic
ttggaaactagtaggtatagaagt

SEQ ID NO: 14171 - DNA, 20 bp, Artificial Sequence
  Synthetic
aagtgtcctccaatacaact

SEQ ID NO: 14172 - DNA, 23 bp, Artificial Sequence
  Synthetic
aggttgatattaaggacattgtc

SEQ ID NO: 14173 - DNA, 20 bp, Artificial Sequence
  Synthetic
agatgtagatttgagtccgc

SEQ ID NO: 14174 - DNA, 20 bp, Artificial Sequence
  Synthetic
gacgaagacccagatcatcc

SEQ ID NO: 14175 - DNA, 18 bp, Artificial Sequence
  Synthetic
ctacaagaagaggctcgg

SEQ ID NO: 14176 - DNA, 18 bp, Artificial Sequence
  Synthetic
ggaggtggtggaagagtc

SEQ ID NO: 14177 - DNA, 18 bp, Artificial Sequence
  Synthetic
cccgctgtttctacaact

SEQ ID NO: 14178 - DNA, 23 bp, Artificial Sequence
  Synthetic
aggaatttaatattgaagagcca

SEQ ID NO: 14179 - DNA, 19 bp, Artificial Sequence
  Synthetic
gaaaacagtgatgcacctt

SEQ ID NO: 14180 - DNA, 23 bp, Artificial Sequence
  Synthetic
gtattacatcccagtcatatccc

SEQ ID NO: 14181 - DNA, 23 bp, Artificial Sequence
  Synthetic
agacggtttgtttatcaaattgg

SEQ ID NO: 14182 - DNA, 22 bp, Artificial Sequence
  Synthetic
ttttccaatcttctcatctgac

SEQ ID NO: 14183 - DNA, 22 bp, Artificial Sequence
  Synthetic
ctactcctgtaactattaccga

SEQ ID NO: 14184 - DNA, 19 bp, Artificial Sequence
  Synthetic
acgaagttttgtcaccaga

SEQ ID NO: 14185 - DNA, 20 bp, Artificial Sequence
  Synthetic
gcagacatagatttgagtcc

SEQ ID NO: 14186 - DNA, 23 bp, Artificial Sequence
  Synthetic
tattcaaattatgtgtgaccctc

SEQ ID NO: 14187 - DNA, 24 bp, Artificial Sequence
  Synthetic
gtattcactaatacgttttctgga

SEQ ID NO: 14188 - DNA, 19 bp, Artificial Sequence
  Synthetic
ctcaccagaagaagagcag

SEQ ID NO: 14189 - DNA, 21 bp, Artificial Sequence
  Synthetic
ttgatgaaaaagcacaaacct

SEQ ID NO: 14190 - DNA, 25 bp, Artificial Sequence
  Synthetic
atgggtagattatgatagtagtagc

SEQ ID NO: 14191 - DNA, 19 bp, Artificial Sequence
  Synthetic
tggatcctttgggacctac

SEQ ID NO: 14192 - DNA, 20 bp, Artificial Sequence
  Synthetic
ctaaggcttttcaaagagca

SEQ ID NO: 14193 - DNA, 21 bp, Artificial Sequence
  Synthetic
atcacaatgccaactattcct

SEQ ID NO: 14194 - DNA, 18 bp, Artificial Sequence
  Synthetic
acaaggttgtggtgccta

SEQ ID NO: 14195 - DNA, 21 bp, Artificial Sequence
  Synthetic
gtgtacctttggacatagtgg

SEQ ID NO: 14196 - DNA, 19 bp, Artificial Sequence
  Synthetic
ttcctctggaacctgatgt

SEQ ID NO: 14197 - DNA, 19 bp, Artificial Sequence
  Synthetic
acatgttttgagcctctcc

SEQ ID NO: 14198 - DNA, 18 bp, Artificial Sequence
  Synthetic
acagtctttggctgcaac

SEQ ID NO: 14199 - DNA, 20 bp, Artificial Sequence
  Synthetic
ccatctcgggggtctctagc

SEQ ID NO: 14200 - DNA, 17 bp, Artificial Sequence
  Synthetic
atgctctggggcacaca

SEQ ID NO: 14201 - DNA, 16 bp, Artificial Sequence
  Synthetic
tggggctggacgttcg

SEQ ID NO: 14202 - DNA, 16 bp, Artificial Sequence
  Synthetic
gccacgtacgcgctgt

SEQ ID NO: 14203 - DNA, 18 bp, Artificial Sequence
  Synthetic
tgttggtgttgacgacgg

SEQ ID NO: 14204 - DNA, 16 bp, Artificial Sequence
  Synthetic
gccacgaccagctgct

SEQ ID NO: 14205 - DNA, 18 bp, Artificial Sequence
  Synthetic
cgtaagcacggggagggt

SEQ ID NO: 14206 - DNA, 16 bp, Artificial Sequence
  Synthetic
tctggcggacggaaca

SEQ ID NO: 14207 - DNA, 19 bp, Artificial Sequence
  Synthetic
ttctccctgttcaacccca

SEQ ID NO: 14208 - DNA, 18 bp, Artificial Sequence
  Synthetic
cagttgccactgggtcct

SEQ ID NO: 14209 - DNA, 18 bp, Artificial Sequence
  Synthetic
tgcttttggccatctgca

SEQ ID NO: 14210 - DNA, 18 bp, Artificial Sequence
  Synthetic
tcgaacaccagctgcatg

SEQ ID NO: 14211 - DNA, 16 bp, Artificial Sequence
  Synthetic
gtggtcacgtccccga

SEQ ID NO: 14212 - DNA, 18 bp, Artificial Sequence
  Synthetic
acactcgtgtccggagag

SEQ ID NO: 14213 - DNA, 19 bp, Artificial Sequence
  Synthetic
gcagatcaccgtcctgttg

SEQ ID NO: 14214 - DNA, 18 bp, Artificial Sequence
  Synthetic
cgttgtttcggcagcagc

SEQ ID NO: 14215 - DNA, 16 bp, Artificial Sequence
  Synthetic
ttgctgggtcctgcgg

SEQ ID NO: 14216 - DNA, 16 bp, Artificial Sequence
  Synthetic
gcccggggcttttcgt

SEQ ID NO: 14217 - DNA, 16 bp, Artificial Sequence
  Synthetic
acacaggcgggacacc

SEQ ID NO: 14218 - DNA, 16 bp, Artificial Sequence
  Synthetic
cagaccccccgaagct

SEQ ID NO: 14219 - DNA, 17 bp, Artificial Sequence
  Synthetic
tcgctgcttcctcgagt

SEQ ID NO: 14220 - DNA, 16 bp, Artificial Sequence
  Synthetic
cgcgcgggactttagc

SEQ ID NO: 14221 - DNA, 16 bp, Artificial Sequence
  Synthetic
tcgggggtttcctccg

SEQ ID NO: 14222 - DNA, 19 bp, Artificial Sequence
  Synthetic
gggcgcgtcagatacagaa

SEQ ID NO: 14223 - DNA, 16 bp, Artificial Sequence
  Synthetic
ccgtggccgagatcgt

SEQ ID NO: 14224 - DNA, 18 bp, Artificial Sequence
  Synthetic
ggccgattccttcatgca

SEQ ID NO: 14225 - DNA, 17 bp, Artificial Sequence
  Synthetic
tcccccaacactgacgt

SEQ ID NO: 14226 - DNA, 18 bp, Artificial Sequence
  Synthetic
gtctcctagttggcccgc

SEQ ID NO: 14227 - DNA, 16 bp, Artificial Sequence
  Synthetic
cggggtttctggggct

SEQ ID NO: 14228 - DNA, 16 bp, Artificial Sequence
  Synthetic
ctgtacgtcgctggcg

SEQ ID NO: 14229 - DNA, 16 bp, Artificial Sequence
  Synthetic
tggagctggcccagga

SEQ ID NO: 14230 - DNA, 16 bp, Artificial Sequence
  Synthetic
gttcacgaacgccgcg

SEQ ID NO: 14231 - DNA, 20 bp, Artificial Sequence
  Synthetic
tgcatcggcaacaacaaagc

SEQ ID NO: 14232 - DNA, 20 bp, Artificial Sequence
  Synthetic
agctccggaaacttggtaca

SEQ ID NO: 14233 - DNA, 16 bp, Artificial Sequence
  Synthetic
ggtgggcggcagcatt

SEQ ID NO: 14234 - DNA, 16 bp, Artificial Sequence
  Synthetic
acccacgcccacatcc

SEQ ID NO: 14235 - DNA, 17 bp, Artificial Sequence
  Synthetic
ggcgttgtagtgtgccc

SEQ ID NO: 14236 - DNA, 16 bp, Artificial Sequence
  Synthetic
gcagaccgcgccgttt

SEQ ID NO: 14237 - DNA, 16 bp, Artificial Sequence
  Synthetic
cgaatcgcggccagca

SEQ ID NO: 14238 - DNA, 16 bp, Artificial Sequence
  Synthetic
acgaagccatacgcgc

SEQ ID NO: 14239 - DNA, 16 bp, Artificial Sequence
  Synthetic
tcttctgcgtgcccgt

SEQ ID NO: 14240 - DNA, 19 bp, Artificial Sequence
  Synthetic
gacgtctgggaacacaggc

SEQ ID NO: 14241 - DNA, 20 bp, Artificial Sequence
  Synthetic
accatcacggactttcccct

SEQ ID NO: 14242 - DNA, 16 bp, Artificial Sequence
  Synthetic
tgcgctccatggcaga

SEQ ID NO: 14243 - DNA, 20 bp, Artificial Sequence
  Synthetic
caaactcgtgatcctccagc

SEQ ID NO: 14244 - DNA, 16 bp, Artificial Sequence
  Synthetic
acgtcgccgagcatcc

SEQ ID NO: 14245 - DNA, 19 bp, Artificial Sequence
  Synthetic
cgatcagaaagcccccatt

SEQ ID NO: 14246 - DNA, 19 bp, Artificial Sequence
  Synthetic
tggatatggcgtcggaaga

SEQ ID NO: 14247 - DNA, 17 bp, Artificial Sequence
  Synthetic
gccgtccagaaccactg

SEQ ID NO: 14248 - DNA, 18 bp, Artificial Sequence
  Synthetic
ccgacagaaacccgttgt

SEQ ID NO: 14249 - DNA, 16 bp, Artificial Sequence
  Synthetic
gcctcgcggttggtga

SEQ ID NO: 14250 - DNA, 17 bp, Artificial Sequence
  Synthetic
tgaacagctgcaacggg

SEQ ID NO: 14251 - DNA, 16 bp, Artificial Sequence
  Synthetic
ttcggacggacacgcg

SEQ ID NO: 14252 - DNA, 16 bp, Artificial Sequence
  Synthetic
ttcgaggcggaggtgg

SEQ ID NO: 14253 - DNA, 18 bp, Artificial Sequence
  Synthetic
agagcctcctcagcatcc

SEQ ID NO: 14254 - DNA, 20 bp, Artificial Sequence
  Synthetic
actccatctttgtgctgtgc

SEQ ID NO: 14255 - DNA, 16 bp, Artificial Sequence
  Synthetic
tagtgcaggtgggcgg

SEQ ID NO: 14256 - DNA, 17 bp, Artificial Sequence
  Synthetic
gggcggcacacctatca

SEQ ID NO: 14257 - DNA, 16 bp, Artificial Sequence
  Synthetic
ctcggcgacctggaca

SEQ ID NO: 14258 - DNA, 18 bp, Artificial Sequence
  Synthetic
taatgtcgcggatgctgc

SEQ ID NO: 14259 - DNA, 18 bp, Artificial Sequence
  Synthetic
ccctagggggccaatggt

SEQ ID NO: 14260 - DNA, 18 bp, Artificial Sequence
  Synthetic
gcatgcacgataccgacc

SEQ ID NO: 14261 - DNA, 17 bp, Artificial Sequence
  Synthetic
ggagatagcccagccca

SEQ ID NO: 14262 - DNA, 18 bp, Artificial Sequence
  Synthetic
tctatgcgctggaggtgc

SEQ ID NO: 14263 - DNA, 18 bp, Artificial Sequence
  Synthetic
tgtgtatacggacgcgcc

SEQ ID NO: 14264 - DNA, 19 bp, Artificial Sequence
  Synthetic
actcaggacatcggtgtgt

SEQ ID NO: 14265 - DNA, 16 bp, Artificial Sequence
  Synthetic
acaaggcgaccctgcg

SEQ ID NO: 14266 - DNA, 19 bp, Artificial Sequence
  Synthetic
tgttcaaagacgcggtgaa

SEQ ID NO: 14267 - DNA, 18 bp, Artificial Sequence
  Synthetic
tccttgtagaacgcgggt

SEQ ID NO: 14268 - DNA, 18 bp, Artificial Sequence
  Synthetic
agagctgggtctggagtc

SEQ ID NO: 14269 - DNA, 19 bp, Artificial Sequence
  Synthetic
ccggggcatccttatccat

SEQ ID NO: 14270 - DNA, 16 bp, Artificial Sequence
  Synthetic
tgacgaggccgcagct

SEQ ID NO: 14271 - DNA, 20 bp, Artificial Sequence
  Synthetic
ggtgtgtgatgatttcgcca

SEQ ID NO: 14272 - DNA, 17 bp, Artificial Sequence
  Synthetic
ggagggtcagccgttca

SEQ ID NO: 14273 - DNA, 16 bp, Artificial Sequence
  Synthetic
cgtacaggggctgggt

SEQ ID NO: 14274 - DNA, 18 bp, Artificial Sequence
  Synthetic
cgccgtctaagtggagct

SEQ ID NO: 14275 - DNA, 16 bp, Artificial Sequence
  Synthetic
ggaccggacggacctt

SEQ ID NO: 14276 - DNA, 16 bp, Artificial Sequence
  Synthetic
cgcagaacgccctcga

SEQ ID NO: 14277 - DNA, 17 bp, Artificial Sequence
  Synthetic
tgcgcggacaattaggc

SEQ ID NO: 14278 - DNA, 16 bp, Artificial Sequence
  Synthetic
tcctgatgggccgcca

SEQ ID NO: 14279 - DNA, 18 bp, Artificial Sequence
  Synthetic
cgacaagatcggactgcg

SEQ ID NO: 14280 - DNA, 16 bp, Artificial Sequence
  Synthetic
ttaagcacggccgggc

SEQ ID NO: 14281 - DNA, 17 bp, Artificial Sequence
  Synthetic
tccctgcagcacctctc

SEQ ID NO: 14282 - DNA, 17 bp, Artificial Sequence
  Synthetic
gtgcgtctggtggtcgt

SEQ ID NO: 14283 - DNA, 17 bp, Artificial Sequence
  Synthetic
tggacctctccgacagc

SEQ ID NO: 14284 - DNA, 16 bp, Artificial Sequence
  Synthetic
cgggccccggacataa

SEQ ID NO: 14285 - DNA, 16 bp, Artificial Sequence
  Synthetic
cgcgcccgagttttgc

SEQ ID NO: 14286 - DNA, 18 bp, Artificial Sequence
  Synthetic
attggcacggacaacagg

SEQ ID NO: 14287 - DNA, 16 bp, Artificial Sequence
  Synthetic
ggatgcgccccaaagc

SEQ ID NO: 14288 - DNA, 19 bp, Artificial Sequence
  Synthetic
cttcacccccagtaccctc

SEQ ID NO: 14289 - DNA, 16 bp, Artificial Sequence
  Synthetic
aggatgaagccccccg

SEQ ID NO: 14290 - DNA, 20 bp, Artificial Sequence
  Synthetic
accggatagcagatgtgagg

SEQ ID NO: 14291 - DNA, 16 bp, Artificial Sequence
  Synthetic
cggtgcagcagtcgga

SEQ ID NO: 14292 - DNA, 16 bp, Artificial Sequence
  Synthetic
tggccggacgaacgac

SEQ ID NO: 14293 - DNA, 17 bp, Artificial Sequence
  Synthetic
tacgggggggtaggtca

SEQ ID NO: 14294 - DNA, 16 bp, Artificial Sequence
  Synthetic
gccgtcccgggtgttt

SEQ ID NO: 14295 - DNA, 18 bp, Artificial Sequence
  Synthetic
ccccccggtatacgacga

SEQ ID NO: 14296 - DNA, 18 bp, Artificial Sequence
  Synthetic
tcggaggggtgtgtcttt

SEQ ID NO: 14297 - DNA, 20 bp, Artificial Sequence
  Synthetic
tctggtcctccccaagtacc

SEQ ID NO: 14298 - DNA, 17 bp, Artificial Sequence
  Synthetic
actgccgtccacaacgc

SEQ ID NO: 14299 - DNA, 18 bp, Artificial Sequence
  Synthetic
tcgtccctcgcatgaagc

SEQ ID NO: 14300 - DNA, 16 bp, Artificial Sequence
  Synthetic
cggggcggtcattgga

SEQ ID NO: 14301 - DNA, 17 bp, Artificial Sequence
  Synthetic
gcgcagtctggcatctg

SEQ ID NO: 14302 - DNA, 18 bp, Artificial Sequence
  Synthetic
ccccccaaaccatgtccg

SEQ ID NO: 14303 - DNA, 17 bp, Artificial Sequence
  Synthetic
ccagcctggttgtccgt

SEQ ID NO: 14304 - DNA, 17 bp, Artificial Sequence
  Synthetic
gcaacgcgggactatgc

SEQ ID NO: 14305 - DNA, 16 bp, Artificial Sequence
  Synthetic
gcggccgtggttaacc

SEQ ID NO: 14306 - DNA, 16 bp, Artificial Sequence
  Synthetic
tcagcgcgatccgaca

SEQ ID NO: 14307 - DNA, 18 bp, Artificial Sequence
  Synthetic
gatcgcctgtctcctcgt

SEQ ID NO: 14308 - DNA, 25 bp, Artificial Sequence
  Synthetic
atcagaagataataaccattggatc

SEQ ID NO: 14309 - DNA, 18 bp, Artificial Sequence
  Synthetic
aggtttgagtctgttgct

SEQ ID NO: 14310 - DNA, 25 bp, Artificial Sequence
  Synthetic
gaaaaagggaaagtagttaaatcag

SEQ ID NO: 14311 - DNA, 23 bp, Artificial Sequence
  Synthetic
aaagggttttcatttaaatacgg

SEQ ID NO: 14312 - DNA, 20 bp, Artificial Sequence
  Synthetic
tgtatccctcctgttgctgt

SEQ ID NO: 14313 - DNA, 23 bp, Artificial Sequence
  Synthetic
ctttgggtatacatttaaaccct

SEQ ID NO: 14314 - DNA, 20 bp, Artificial Sequence
  Synthetic
cgtctgtgccttctcatctg

SEQ ID NO: 14315 - DNA, 20 bp, Artificial Sequence
  Synthetic
ttagagtctcctgagcattg

SEQ ID NO: 14316 - DNA, 20 bp, Artificial Sequence
  Synthetic
gaaacaacacatagcgcctc

SEQ ID NO: 14317 - DNA, 22 bp, Artificial Sequence
  Synthetic
aataaaagaactacggaacctg

SEQ ID NO: 14318 - DNA, 19 bp, Artificial Sequence
  Synthetic
gatcagatcgagtgatggt

SEQ ID NO: 14319 - DNA, 19 bp, Artificial Sequence
  Synthetic
ctaattattgcggccagga

SEQ ID NO: 14320 - DNA, 18 bp, Artificial Sequence
  Synthetic
aagcgggtcatcagtcaa

SEQ ID NO: 14321 - DNA, 20 bp, Artificial Sequence
  Synthetic
gacctgaatttcgtcaacag

SEQ ID NO: 14322 - DNA, 20 bp, Artificial Sequence
  Synthetic
tgatcggtttttgagagttc

SEQ ID NO: 14323 - DNA, 18 bp, Artificial Sequence
  Synthetic
ccaaggccattagaagcc

SEQ ID NO: 14324 - DNA, 18 bp, Artificial Sequence
  Synthetic
gaaaagatgccggcactt

SEQ ID NO: 14325 - DNA, 23 bp, Artificial Sequence
  Synthetic
tattttgatgttactcctgatgt

SEQ ID NO: 14326 - DNA, 21 bp, Artificial Sequence
  Synthetic
aagagttaaatgtgaggtgtc

SEQ ID NO: 14327 - DNA, 24 bp, Artificial Sequence
  Synthetic
aggagcatccagtatataaagttg

SEQ ID NO: 14328 - DNA, 25 bp, Artificial Sequence
  Synthetic
gtggatgatatacaatgtattgatg

SEQ ID NO: 14329 - DNA, 20 bp, Artificial Sequence
  Synthetic
ttgaattttcaggacagtgg

SEQ ID NO: 14330 - DNA, 24 bp, Artificial Sequence
  Synthetic
tggactcccaaataaattattgga

SEQ ID NO: 14331 - DNA, 20 bp, Artificial Sequence
  Synthetic
cagctctgcaagttccttct

SEQ ID NO: 14332 - DNA, 19 bp, Artificial Sequence
  Synthetic
cgactcttgctgatcgatt

SEQ ID NO: 14333 - DNA, 23 bp, Artificial Sequence
  Synthetic
caacattaattgaatcaggagga

SEQ ID NO: 14334 - DNA, 19 bp, Artificial Sequence
  Synthetic
ctttagcactgacgtcact

SEQ ID NO: 14335 - DNA, 19 bp, Artificial Sequence
  Synthetic
ctataggttctgacgctgc

SEQ ID NO: 14336 - DNA, 18 bp, Artificial Sequence
  Synthetic
caagaccaatcgccagag

SEQ ID NO: 14337 - DNA, 23 bp, Artificial Sequence
  Synthetic
ttaagaggtattgaaataggtcg

SEQ ID NO: 14338 - DNA, 24 bp, Artificial Sequence
  Synthetic
tccacctgtgcaattaattaattc

SEQ ID NO: 14339 - DNA, 19 bp, Artificial Sequence
  Synthetic
ctaagtgtcctactgctgc

SEQ ID NO: 14340 - DNA, 25 bp, Artificial Sequence
  Synthetic
attgtgataaaatactgtgaatccc

SEQ ID NO: 14341 - DNA, 18 bp, Artificial Sequence
  Synthetic
gagggtcgatactgccaa

SEQ ID NO: 14342 - DNA, 22 bp, Artificial Sequence
  Synthetic
gggagataaggctactattcct

SEQ ID NO: 14343 - DNA, 21 bp, Artificial Sequence
  Synthetic
acagatctcagagctaagtcc

SEQ ID NO: 14344 - DNA, 20 bp, Artificial Sequence
  Synthetic
ccgagagaatctggaaccac

SEQ ID NO: 14345 - DNA, 23 bp, Artificial Sequence
  Synthetic
tttggaagtttggtatattttgg

SEQ ID NO: 14346 - DNA, 23 bp, Artificial Sequence
  Synthetic
gggcctgatatatcttttattgc

SEQ ID NO: 14347 - DNA, 25 bp, Artificial Sequence
  Synthetic
gtgatactaatgtgtttgtagatcc

SEQ ID NO: 14348 - DNA, 20 bp, Artificial Sequence
  Synthetic
tttgagtttgaaaatcccgc

SEQ ID NO: 14349 - DNA, 19 bp, Artificial Sequence
  Synthetic
cctactgctgaaccagaag

SEQ ID NO: 14350 - DNA, 21 bp, Artificial Sequence
  Synthetic
tgaatattttaccgtggtgtc

SEQ ID NO: 14351 - DNA, 20 bp, Artificial Sequence
  Synthetic
aggaggagacatagaatcct

SEQ ID NO: 14352 - DNA, 18 bp, Artificial Sequence
  Synthetic
ctgaggctgcagggactt

SEQ ID NO: 14353 - DNA, 20 bp, Artificial Sequence
  Synthetic
tctgttaggacccttctcgc

SEQ ID NO: 14354 - DNA, 18 bp, Artificial Sequence
  Synthetic
gcgagaaactccgtcttg

SEQ ID NO: 14355 - DNA, 20 bp, Artificial Sequence
  Synthetic
acaagtagaccaacagcacc

SEQ ID NO: 14356 - DNA, 19 bp, Artificial Sequence
  Synthetic
caagagggtctgacatagc

SEQ ID NO: 14357 - DNA, 18 bp, Artificial Sequence
  Synthetic
ggaccaagccctatccca

SEQ ID NO: 14358 - DNA, 21 bp, Artificial Sequence
  Synthetic
accataatgacaggagatacc

SEQ ID NO: 14359 - DNA, 24 bp, Artificial Sequence
  Synthetic
aaataaggtgactcaagatttcac

SEQ ID NO: 14360 - DNA, 19 bp, Artificial Sequence
  Synthetic
gacaggacaggtttagagc

SEQ ID NO: 14361 - DNA, 18 bp, Artificial Sequence
  Synthetic
cagaagaagtgcagtgga

SEQ ID NO: 14362 - DNA, 21 bp, Artificial Sequence
  Synthetic
gagtgggactttgtatctacc

SEQ ID NO: 14363 - DNA, 19 bp, Artificial Sequence
  Synthetic
agtctatgttgcatgggtc

SEQ ID NO: 14364 - DNA, 20 bp, Artificial Sequence
  Synthetic
gaagcagaagtcatcccaca

SEQ ID NO: 14365 - DNA, 19 bp, Artificial Sequence
  Synthetic
aagaaggggaggaataggg

SEQ ID NO: 14366 - DNA, 21 bp, Artificial Sequence
  Synthetic
gaacctaacaccagaaaaagg

SEQ ID NO: 14367 - DNA, 21 bp, Artificial Sequence
  Synthetic
ccatagaagccttaaacaggg

SEQ ID NO: 14368 - DNA, 20 bp, Artificial Sequence
  Synthetic
aggaagaagccttaagacat

SEQ ID NO: 14369 - DNA, 18 bp, Artificial Sequence
  Synthetic
agacgaagaaggactcca

SEQ ID NO: 14370 - DNA, 22 bp, Artificial Sequence
  Synthetic
tggaataatacagtgacagaac

SEQ ID NO: 14371 - DNA, 22 bp, Artificial Sequence
  Synthetic
catggtatttagaagatgtggt

SEQ ID NO: 14372 - DNA, 23 bp, Artificial Sequence
  Synthetic
gtaagagaccaggaaataagaca

SEQ ID NO: 14373 - DNA, 21 bp, Artificial Sequence
  Synthetic
caattgggtagaagacaagaa

SEQ ID NO: 14374 - DNA, 19 bp, Artificial Sequence
  Synthetic
aagagtcactgctatcgag

SEQ ID NO: 14375 - DNA, 20 bp, Artificial Sequence
  Synthetic
actatccaagaactccccga

SEQ ID NO: 14376 - DNA, 18 bp, Artificial Sequence
  Synthetic
agagtacatgaacagccc

SEQ ID NO: 14377 - DNA, 21 bp, Artificial Sequence
  Synthetic
aacaagcagacatgatgatga

SEQ ID NO: 14378 - DNA, 18 bp, Artificial Sequence
  Synthetic
gagaggctggcagatcga

SEQ ID NO: 14379 - DNA, 24 bp, Artificial Sequence
  Synthetic
gaaggcaataattgtactactcat

SEQ ID NO: 14380 - DNA, 19 bp, Artificial Sequence
  Synthetic
cctaggcagaccaaaatgc

SEQ ID NO: 14381 - DNA, 18 bp, Artificial Sequence
  Synthetic
atgggaacggcttcttca

SEQ ID NO: 14382 - DNA, 20 bp, Artificial Sequence
  Synthetic
ccaaatcaaacagaagacga

SEQ ID NO: 14383 - DNA, 20 bp, Artificial Sequence
  Synthetic
ccaatatgggtgaaaacacc

SEQ ID NO: 14384 - DNA, 18 bp, Artificial Sequence
  Synthetic
cggagcaatgaatgagct

SEQ ID NO: 14385 - DNA, 19 bp, Artificial Sequence
  Synthetic
tgctttgaaaccaaacaca

SEQ ID NO: 14386 - DNA, 22 bp, Artificial Sequence
  Synthetic
tggagatccaaacaatatggat

SEQ ID NO: 14387 - DNA, 20 bp, Artificial Sequence
  Synthetic
tgagaacagaatggtgctgg

SEQ ID NO: 14388 - DNA, 18 bp, Artificial Sequence
  Synthetic
gcagcgattcaagtgatc

SEQ ID NO: 14389 - DNA, 19 bp, Artificial Sequence
  Synthetic
gtgtaagggtttgtgttgc

SEQ ID NO: 14390 - DNA, 24 bp, Artificial Sequence
  Synthetic
ctaacgtttcccaattaatagacg

SEQ ID NO: 14391 - DNA, 22 bp, Artificial Sequence
  Synthetic
aaaattactgatgctgaatgga

SEQ ID NO: 14392 - DNA, 22 bp, Artificial Sequence
  Synthetic
tgggattggatatactatcagg

SEQ ID NO: 14393 - DNA, 25 bp, Artificial Sequence
  Synthetic
tgacagtttataatgtatagagctg

SEQ ID NO: 14394 - DNA, 19 bp, Artificial Sequence
  Synthetic
gaggtacaacaaggcctat

SEQ ID NO: 14395 - DNA, 25 bp, Artificial Sequence
  Synthetic
atgatactgcagctatattagatgt

SEQ ID NO: 14396 - DNA, 22 bp, Artificial Sequence
  Synthetic
tggctgaatttgaaataatgga

SEQ ID NO: 14397 - DNA, 25 bp, Artificial Sequence
  Synthetic
attacataggcctacttatactaca

SEQ ID NO: 14398 - DNA, 25 bp, Artificial Sequence
  Synthetic
catcagatgactattttctacatcc

SEQ ID NO: 14399 - DNA, 22 bp, Artificial Sequence
  Synthetic
gaacacagtctgtagtagtacc

SEQ ID NO: 14400 - DNA, 25 bp, Artificial Sequence
  Synthetic
gatgaaaatgatcacagattgaatg

SEQ ID NO: 14401 - DNA, 19 bp, Artificial Sequence
  Synthetic
agatctggtgttcctttgg

SEQ ID NO: 14402 - DNA, 21 bp, Artificial Sequence
  Synthetic
tttgcaaagtttctctggatc

SEQ ID NO: 14403 - DNA, 20 bp, Artificial Sequence
  Synthetic
cgccgctttctatatcaaac

SEQ ID NO: 14404 - DNA, 18 bp, Artificial Sequence
  Synthetic
aaacagctgagtctggtt

SEQ ID NO: 14405 - DNA, 19 bp, Artificial Sequence
  Synthetic
agcccatctattgtgtgaa

SEQ ID NO: 14406 - DNA, 23 bp, Artificial Sequence
  Synthetic
ttggaagcaataagaatttctcc

SEQ ID NO: 14407 - DNA, 25 bp, Artificial Sequence
  Synthetic
ctgggaaatcatatatttatggaac

SEQ ID NO: 14408 - DNA, 21 bp, Artificial Sequence
  Synthetic
acccgaagataatgaatcaga

SEQ ID NO: 14409 - DNA, 20 bp, Artificial Sequence
  Synthetic
gtctctatccgactcccctg

SEQ ID NO: 14410 - DNA, 21 bp, Artificial Sequence
  Synthetic
taaacgaataaagcgagcttc

SEQ ID NO: 14411 - DNA, 20 bp, Artificial Sequence
  Synthetic
ccccaagaccttctattcca

SEQ ID NO: 14412 - DNA, 18 bp, Artificial Sequence
  Synthetic
agggccctttaaggagta

SEQ ID NO: 14413 - DNA, 20 bp, Artificial Sequence
  Synthetic
tataggagggttcagggatg

SEQ ID NO: 14414 - DNA, 23 bp, Artificial Sequence
  Synthetic
taataatgtccaagttccaaagg

SEQ ID NO: 14415 - DNA, 25 bp, Artificial Sequence
  Synthetic
attaattctacatgtaaatggccag

SEQ ID NO: 14416 - DNA, 19 bp, Artificial Sequence
  Synthetic
cctttagaggctgatgtgt

SEQ ID NO: 14417 - DNA, 23 bp, Artificial Sequence
  Synthetic
tttacatatcagtcgttcaaagg

SEQ ID NO: 14418 - DNA, 18 bp, Artificial Sequence
  Synthetic
cactcgcgagatactgac

SEQ ID NO: 14419 - DNA, 18 bp, Artificial Sequence
  Synthetic
gctggatcagacagggta

SEQ ID NO: 14420 - DNA, 20 bp, Artificial Sequence
  Synthetic
gtcgttttcccaaatgaagt

SEQ ID NO: 14421 - DNA, 22 bp, Artificial Sequence
  Synthetic
gggaggtaagaaatgatgatgt

SEQ ID NO: 14422 - DNA, 21 bp, Artificial Sequence
  Synthetic
aagagaggaagaagtgcttac

SEQ ID NO: 14423 - DNA, 20 bp, Artificial Sequence
  Synthetic
ccgaggtgatttgaatttcg

SEQ ID NO: 14424 - DNA, 18 bp, Artificial Sequence
  Synthetic
cgtttcttaagggtccga

SEQ ID NO: 14425 - DNA, 20 bp, Artificial Sequence
  Synthetic
gccagaagccaatatagtgg

SEQ ID NO: 14426 - DNA, 21 bp, Artificial Sequence
  Synthetic
ttacaatacttgggaaggacg

SEQ ID NO: 14427 - DNA, 20 bp, Artificial Sequence
  Synthetic
gcgatcattccaacaaatgc

SEQ ID NO: 14428 - DNA, 22 bp, Artificial Sequence
  Synthetic
ccgatttaattattgagaggcg

SEQ ID NO: 14429 - DNA, 19 bp, Artificial Sequence
  Synthetic
gggatccatcattccgtat

SEQ ID NO: 14430 - DNA, 18 bp, Artificial Sequence
  Synthetic
tccagagtggagtacagg

SEQ ID NO: 14431 - DNA, 18 bp, Artificial Sequence
  Synthetic
tttggtgctatagcgggt

SEQ ID NO: 14432 - DNA, 20 bp, Artificial Sequence
  Synthetic
ctgaactcttggtagcaatg

SEQ ID NO: 14433 - DNA, 19 bp, Artificial Sequence
  Synthetic
ggtttaaccgaaaacggtg

SEQ ID NO: 14434 - DNA, 22 bp, Artificial Sequence
  Synthetic
attttggcatacagtagaacaa

SEQ ID NO: 14435 - DNA, 22 bp, Artificial Sequence
  Synthetic
aatttgacacctcagatgaaga

SEQ ID NO: 14436 - DNA, 18 bp, Artificial Sequence
  Synthetic
acgggagtatgggtaacg

SEQ ID NO: 14437 - DNA, 22 bp, Artificial Sequence
  Synthetic
catacaatggttaacctgtacc

SEQ ID NO: 14438 - DNA, 25 bp, Artificial Sequence
  Synthetic
gcatatgataatgatttaaccgaag

SEQ ID NO: 14439 - DNA, 22 bp, Artificial Sequence
  Synthetic
gaatttcaagaatcagaggacg

SEQ ID NO: 14440 - DNA, 19 bp, Artificial Sequence
  Synthetic
ccatggacattgcaagaga

SEQ ID NO: 14441 - DNA, 20 bp, Artificial Sequence
  Synthetic
cacctacacccacaaccatc

SEQ ID NO: 14442 - DNA, 22 bp, Artificial Sequence
  Synthetic
ttactgtgagtccactattgtg

SEQ ID NO: 14443 - DNA, 25 bp, Artificial Sequence
  Synthetic
ttgtacatacgtgataatatggtac

SEQ ID NO: 14444 - DNA, 22 bp, Artificial Sequence
  Synthetic
attgattctagcataccagtgc

SEQ ID NO: 14445 - DNA, 18 bp, Artificial Sequence
  Synthetic
gggctcgtattgggtcta

SEQ ID NO: 14446 - DNA, 23 bp, Artificial Sequence
  Synthetic
taccatatttttttgcagatgtc

SEQ ID NO: 14447 - DNA, 18 bp, Artificial Sequence
  Synthetic
ctgcttgctctgcacaat

SEQ ID NO: 14448 - DNA, 25 bp, Artificial Sequence
  Synthetic
tgcaaaattacattatctgtagagg

SEQ ID NO: 14449 - DNA, 23 bp, Artificial Sequence
  Synthetic
caatcctccattttagtacatgc

SEQ ID NO: 14450 - DNA, 19 bp, Artificial Sequence
  Synthetic
gtgtgttacctgaatgggt

SEQ ID NO: 14451 - DNA, 22 bp, Artificial Sequence
  Synthetic
acaggtcaagtttgtaaaagac

SEQ ID NO: 14452 - DNA, 19 bp, Artificial Sequence
  Synthetic
ctgaatcccagagcaacgg

SEQ ID NO: 14453 - DNA, 19 bp, Artificial Sequence
  Synthetic
ctgctgacattactgctga

SEQ ID NO: 14454 - DNA, 18 bp, Artificial Sequence
  Synthetic
gcccaggtcttgatgttg

SEQ ID NO: 14455 - DNA, 23 bp, Artificial Sequence
  Synthetic
acttttcagcattttcagaaagt

SEQ ID NO: 14456 - DNA, 18 bp, Artificial Sequence
  Synthetic
gacaatgctacacctcca

SEQ ID NO: 14457 - DNA, 19 bp, Artificial Sequence
  Synthetic
tttgaagtggagcttgtga

SEQ ID NO: 14458 - DNA, 23 bp, Artificial Sequence
  Synthetic
atttgcgagataaatttacctcc

SEQ ID NO: 14459 - DNA, 23 bp, Artificial Sequence
  Synthetic
aacatatggtgctatgtatcctg

SEQ ID NO: 14460 - DNA, 21 bp, Artificial Sequence
  Synthetic
ttgaacttagaccgaatttgg

SEQ ID NO: 14461 - DNA, 18 bp, Artificial Sequence
  Synthetic
ggcagatggcgactacca

SEQ ID NO: 14462 - DNA, 20 bp, Artificial Sequence
  Synthetic
gcaaatgcagagattcaagt

SEQ ID NO: 14463 - DNA, 22 bp, Artificial Sequence
  Synthetic
tggataatgagaaacaacatgc

SEQ ID NO: 14464 - DNA, 21 bp, Artificial Sequence
  Synthetic
tcaacaattgaagaccttgtc

SEQ ID NO: 14465 - DNA, 21 bp, Artificial Sequence
  Synthetic
caactatcctgccatatggag

SEQ ID NO: 14466 - DNA, 20 bp, Artificial Sequence
  Synthetic
tttagagtttgcttgcaact

SEQ ID NO: 14467 - DNA, 20 bp, Artificial Sequence
  Synthetic
gaaactgtacagagaggacc

SEQ ID NO: 14468 - DNA, 23 bp, Artificial Sequence
  Synthetic
gaaaatctcaaaaacaacaacca

SEQ ID NO: 14469 - DNA, 25 bp, Artificial Sequence
  Synthetic
gaaaagatcaagaaaactaggtttg

SEQ ID NO: 14470 - DNA, 22 bp, Artificial Sequence
  Synthetic
atacacattcccagaatcatca

SEQ ID NO: 14471 - DNA, 23 bp, Artificial Sequence
  Synthetic
ataaaaccagaactatacccatg

SEQ ID NO: 14472 - DNA, 21 bp, Artificial Sequence
  Synthetic
caagagtggatgcaattttcc

SEQ ID NO: 14473 - DNA, 22 bp, Artificial Sequence
  Synthetic
tagaagactctaactcttgtgg

SEQ ID NO: 14474 - DNA, 21 bp, Artificial Sequence
  Synthetic
tgattactcaatcaccctcca

SEQ ID NO: 14475 - DNA, 21 bp, Artificial Sequence
  Synthetic
tgcaaactgtataacaaccac

SEQ ID NO: 14476 - DNA, 24 bp, Artificial Sequence
  Synthetic
aatccaactctactcatacaattg

SEQ ID NO: 14477 - DNA, 25 bp, Artificial Sequence
  Synthetic
taacacatgatgtaggtataaaacc

SEQ ID NO: 14478 - DNA, 20 bp, Artificial Sequence
  Synthetic
tatgctgcactatacccatc

SEQ ID NO: 14479 - DNA, 18 bp, Artificial Sequence
  Synthetic
cacagggagcattgtgtc

SEQ ID NO: 14480 - DNA, 18 bp, Artificial Sequence
  Synthetic
gcctcctgtgacattacc

SEQ ID NO: 14481 - DNA, 25 bp, Artificial Sequence
  Synthetic
tagcaaaagaatctattatgatggg

SEQ ID NO: 14482 - DNA, 23 bp, Artificial Sequence
  Synthetic
atcaatccaactataacacagaa

SEQ ID NO: 14483 - DNA, 25 bp, Artificial Sequence
  Synthetic
atcagatatgaagatatgtgttcag

SEQ ID NO: 14484 - DNA, 21 bp, Artificial Sequence
  Synthetic
atgggcatttggtaatgatga

SEQ ID NO: 14485 - DNA, 22 bp, Artificial Sequence
  Synthetic
gactttgtgtctacttttctca

SEQ ID NO: 14486 - DNA, 20 bp, Artificial Sequence
  Synthetic
aatttctgcaaatggctgtt

SEQ ID NO: 14487 - DNA, 20 bp, Artificial Sequence
  Synthetic
ttatggcagtttgttgacca

SEQ ID NO: 14488 - DNA, 21 bp, Artificial Sequence
  Synthetic
tctcctgttatgacaaatggt

SEQ ID NO: 14489 - DNA, 20 bp, Artificial Sequence
  Synthetic
agagtgattgctcttcagag

SEQ ID NO: 14490 - DNA, 21 bp, Artificial Sequence
  Synthetic
tgcctgagaagtttttgaatg

SEQ ID NO: 14491 - DNA, 23 bp, Artificial Sequence
  Synthetic
aaagttaagtatgcaacagttgt

SEQ ID NO: 14492 - DNA, 23 bp, Artificial Sequence
  Synthetic
actttatgtgagagactatgttg

SEQ ID NO: 14493 - DNA, 18 bp, Artificial Sequence
  Synthetic
gaacatgtgcaaagcgtt

SEQ ID NO: 14494 - DNA, 25 bp, Artificial Sequence
  Synthetic
caggattaagtcttttagtactttc

SEQ ID NO: 14495 - DNA, 23 bp, Artificial Sequence
  Synthetic
tgagtttgaagatgaaaaacttg

SEQ ID NO: 14496 - DNA, 25 bp, Artificial Sequence
  Synthetic
tactcaaacaattggataacaactg

SEQ ID NO: 14497 - DNA, 21 bp, Artificial Sequence
  Synthetic
aaatgtagttgtaccagtggt

SEQ ID NO: 14498 - DNA, 23 bp, Artificial Sequence
  Synthetic
aagttgaaatatctgttacacca

SEQ ID NO: 14499 - DNA, 22 bp, Artificial Sequence
  Synthetic
aaggttaaggattttgtgtctg

SEQ ID NO: 14500 - DNA, 22 bp, Artificial Sequence
  Synthetic
gttctgttgttgtctacatgtg

SEQ ID NO: 14501 - DNA, 22 bp, Artificial Sequence
  Synthetic
taaggacaaagatctttctggt

SEQ ID NO: 14502 - DNA, 18 bp, Artificial Sequence
  Synthetic
tgtgctagtgtcaaacgt

SEQ ID NO: 14503 - DNA, 22 bp, Artificial Sequence
  Synthetic
gttaaaataatggccaaagcac

SEQ ID NO: 14504 - DNA, 22 bp, Artificial Sequence
  Synthetic
tcaaggatgattactgtgatgg

SEQ ID NO: 14505 - DNA, 19 bp, Artificial Sequence
  Synthetic
tgtgctttttggttgtgaa

SEQ ID NO: 14506 - DNA, 19 bp, Artificial Sequence
  Synthetic
tatgtctttagccgagtgc

SEQ ID NO: 14507 - DNA, 24 bp, Artificial Sequence
  Synthetic
cgcaagtatattgtaaaaactagc

SEQ ID NO: 14508 - DNA, 21 bp, Artificial Sequence
  Synthetic
ggcttcacacctttaaacaag

SEQ ID NO: 14509 - DNA, 21 bp, Artificial Sequence
  Synthetic
caaggctttggttttagaaca

SEQ ID NO: 14510 - DNA, 25 bp, Artificial Sequence
  Synthetic
attgtatttctttgctactagaagc

SEQ ID NO: 14511 - DNA, 22 bp, Artificial Sequence
  Synthetic
cttttcgcgtgatcataatgac

SEQ ID NO: 14512 - DNA, 23 bp, Artificial Sequence
  Synthetic
tgcatggagtaactcttaaaatt

SEQ ID NO: 14513 - DNA, 21 bp, Artificial Sequence
  Synthetic
ggttttgaagaccaacctaat

SEQ ID NO: 14514 - DNA, 22 bp, Artificial Sequence
  Synthetic
aatccataagcttatttgctgg

SEQ ID NO: 14515 - DNA, 21 bp, Artificial Sequence
  Synthetic
atttgtctttttgttgcactg

SEQ ID NO: 14516 - DNA, 23 bp, Artificial Sequence
  Synthetic
gctgtatgtactatggtttgttg

SEQ ID NO: 14517 - DNA, 20 bp, Artificial Sequence
  Synthetic
acaaacgtcgttctaatggg

SEQ ID NO: 14518 - DNA, 22 bp, Artificial Sequence
  Synthetic
ttgaagaaggctatgaatgttg

SEQ ID NO: 14519 - DNA, 23 bp, Artificial Sequence
  Synthetic
aaatgatggtagatggttttgtg

SEQ ID NO: 14520 - DNA, 18 bp, Artificial Sequence
  Synthetic
ggtggacgtgcattcatg

SEQ ID NO: 14521 - DNA, 18 bp, Artificial Sequence
  Synthetic
cagctgcagcctatcttg

SEQ ID NO: 14522 - DNA, 22 bp, Artificial Sequence
  Synthetic
taatcatggctgtacatgtgac

SEQ ID NO: 14523 - DNA, 23 bp, Artificial Sequence
  Synthetic
tatggtaatgttagtagacagga

SEQ ID NO: 14524 - DNA, 25 bp, Artificial Sequence
  Synthetic
tcttaatgggaatttctatgacttc

SEQ ID NO: 14525 - DNA, 19 bp, Artificial Sequence
  Synthetic
tcttcgcaaccacaattcc

SEQ ID NO: 14526 - DNA, 23 bp, Artificial Sequence
  Synthetic
gctttgagtacaggattaacatc

SEQ ID NO: 14527 - DNA, 25 bp, Artificial Sequence
  Synthetic
tgactcagttaaatcttaaatacgc

SEQ ID NO: 14528 - DNA, 23 bp, Artificial Sequence
  Synthetic
gcaaaagcatttttctatgatga

SEQ ID NO: 14529 - DNA, 20 bp, Artificial Sequence
  Synthetic
catcactaagactgatgctg

SEQ ID NO: 14530 - DNA, 20 bp, Artificial Sequence
  Synthetic
accacaaaccacatctttca

SEQ ID NO: 14531 - DNA, 23 bp, Artificial Sequence
  Synthetic
catgcttccaaattacaaaagac

SEQ ID NO: 14532 - DNA, 18 bp, Artificial Sequence
  Synthetic
tcctcctggtagtggaaa

SEQ ID NO: 14533 - DNA, 22 bp, Artificial Sequence
  Synthetic
tctatgtgcactaactatgact

SEQ ID NO: 14534 - DNA, 25 bp, Artificial Sequence
  Synthetic
agcgatttatacataaaaactccac

SEQ ID NO: 14535 - DNA, 19 bp, Artificial Sequence
  Synthetic
gtttaaggattgtgcacgt

SEQ ID NO: 14536 - DNA, 20 bp, Artificial Sequence
  Synthetic
tcatgtcagaggttggttag

SEQ ID NO: 14537 - DNA, 18 bp, Artificial Sequence
  Synthetic
ggtgtttgtactttgggc

SEQ ID NO: 14538 - DNA, 23 bp, Artificial Sequence
  Synthetic
gtatgactgctttgttaagaatg

SEQ ID NO: 14539 - DNA, 22 bp, Artificial Sequence
  Synthetic
tgaattctcaattgtttgcagg

SEQ ID NO: 14540 - DNA, 23 bp, Artificial Sequence
  Synthetic
ataacatttttactcaagctggt

SEQ ID NO: 14541 - DNA, 21 bp, Artificial Sequence
  Synthetic
ttgtcgccacatataagtttg

SEQ ID NO: 14542 - DNA, 22 bp, Artificial Sequence
  Synthetic
ttaactggtttgtttacgtacg

SEQ ID NO: 14543 - DNA, 22 bp, Artificial Sequence
  Synthetic
tcctagttctaagactgtttgt

SEQ ID NO: 14544 - DNA, 25 bp, Artificial Sequence
  Synthetic
tgtgtcaatattttaacagtaccac

SEQ ID NO: 14545 - DNA, 23 bp, Artificial Sequence
  Synthetic
gttgtcggaattaactatcttgg

SEQ ID NO: 14546 - DNA, 19 bp, Artificial Sequence
  Synthetic
tgccttgttgcatattgct

SEQ ID NO: 14547 - DNA, 20 bp, Artificial Sequence
  Synthetic
gatgctcacataccatttgg

SEQ ID NO: 14548 - DNA, 23 bp, Artificial Sequence
  Synthetic
agatggtttttattctacaagcc

SEQ ID NO: 14549 - DNA, 25 bp, Artificial Sequence
  Synthetic
aatatttatgatgtatctggtgtgg

SEQ ID NO: 14550 - DNA, 25 bp, Artificial Sequence
  Synthetic
gttttaacttattctagttttggcg

SEQ ID NO: 14551 - DNA, 20 bp, Artificial Sequence
  Synthetic
ctgcagatgttagtgagatg

SEQ ID NO: 14552 - DNA, 22 bp, Artificial Sequence
  Synthetic
ttctttaattggtggaattgct

SEQ ID NO: 14553 - DNA, 22 bp, Artificial Sequence
  Synthetic
tctatgacagacttgacactat

SEQ ID NO: 14554 - DNA, 18 bp, Artificial Sequence
  Synthetic
ggttgtgcgttgatggta

SEQ ID NO: 14555 - DNA, 22 bp, Artificial Sequence
  Synthetic
tacaaattgccaaattacactg

SEQ ID NO: 14556 - DNA, 20 bp, Artificial Sequence
  Synthetic
ggcttctttagttgttttgc

SEQ ID NO: 14557 - DNA, 24 bp, Artificial Sequence
  Synthetic
ttctaatccttttcgtttatgtgc

SEQ ID NO: 14558 - DNA, 19 bp, Artificial Sequence
  Synthetic
agctagtggatgatcatgc

SEQ ID NO: 14559 - DNA, 20 bp, Artificial Sequence
  Synthetic
ttgaagatgcttgtactgtg

SEQ ID NO: 14560 - DNA, 24 bp, Artificial Sequence
  Synthetic
taatttatagtagagtcggaaggt

SEQ ID NO: 14561 - DNA, 21 bp, Artificial Sequence
  Synthetic
tacccatcaacaagaaagaca

SEQ ID NO: 14562 - DNA, 20 bp, Artificial Sequence
  Synthetic
ggaatccttcaagtgacaga

SEQ ID NO: 14563 - DNA, 18 bp, Artificial Sequence
  Synthetic
aaatgcaaaagccacggt

SEQ ID NO: 14564 - DNA, 22 bp, Artificial Sequence
  Synthetic
attcactagagaaatgcaacaa

SEQ ID NO: 14565 - DNA, 24 bp, Artificial Sequence
  Synthetic
tcagagctgcttttaattaacatg

SEQ ID NO: 14566 - DNA, 20 bp, Artificial Sequence
  Synthetic
ctcatgtcctgtttctgtgt

SEQ ID NO: 14567 - DNA, 19 bp, Artificial Sequence
  Synthetic
gcgatgagtgtctagactc

SEQ ID NO: 14568 - DNA, 20 bp, Artificial Sequence
  Synthetic
aaaagacggctgtttgaggg

SEQ ID NO: 14569 - DNA, 18 bp, Artificial Sequence
  Synthetic
ccgcggcataaaagtgtt

SEQ ID NO: 14570 - DNA, 22 bp, Artificial Sequence
  Synthetic
gcatggctaaaaagtaacaatc

SEQ ID NO: 14571 - DNA, 22 bp, Artificial Sequence
  Synthetic
agtcatgaactgtatacaacac

SEQ ID NO: 14572 - DNA, 21 bp, Artificial Sequence
  Synthetic
agaaagaaaacatagatcgcg

SEQ ID NO: 14573 - DNA, 24 bp, Artificial Sequence
  Synthetic
atatatatagacattgtgtggggt

SEQ ID NO: 14574 - DNA, 19 bp, Artificial Sequence
  Synthetic
cttaggccaagtgtggtgg

SEQ ID NO: 14575 - DNA, 18 bp, Artificial Sequence
  Synthetic
cacttccacgcctaaacg

SEQ ID NO: 14576 - DNA, 18 bp, Artificial Sequence
  Synthetic
tccaaagggcaagggacc

SEQ ID NO: 14577 - DNA, 23 bp, Artificial Sequence
  Synthetic
ttagaagatacttatgctgagga

SEQ ID NO: 14578 - DNA, 19 bp, Artificial Sequence
  Synthetic
cttggtacgtaaacgcaaa

SEQ ID NO: 14579 - DNA, 20 bp, Artificial Sequence
  Synthetic
atctgggaatcagtacagag

SEQ ID NO: 14580 - DNA, 19 bp, Artificial Sequence
  Synthetic
tgccatgtttttctttggt

SEQ ID NO: 14581 - DNA, 25 bp, Artificial Sequence
  Synthetic
tctcatattaatgtaatggatccag

SEQ ID NO: 14582 - DNA, 17 bp, Artificial Sequence
  Synthetic
gtccgcggaaatccagc

SEQ ID NO: 14583 - DNA, 19 bp, Artificial Sequence
  Synthetic
gcatggacatctctccgtc

SEQ ID NO: 14584 - DNA, 20 bp, Artificial Sequence
  Synthetic
agtgtcgttggatctgaggg

SEQ ID NO: 14585 - DNA, 16 bp, Artificial Sequence
  Synthetic
gcctggtgacctgcct

SEQ ID NO: 14586 - DNA, 19 bp, Artificial Sequence
  Synthetic
aacatgtacccggcagtcc

SEQ ID NO: 14587 - DNA, 18 bp, Artificial Sequence
  Synthetic
aacattagcatcccggcg

SEQ ID NO: 14588 - DNA, 19 bp, Artificial Sequence
  Synthetic
accatccttttgccaatca

SEQ ID NO: 14589 - DNA, 20 bp, Artificial Sequence
  Synthetic
ccaggggggactttatgtga

SEQ ID NO: 14590 - DNA, 16 bp, Artificial Sequence
  Synthetic
gtcgctgactccgcca

SEQ ID NO: 14591 - DNA, 19 bp, Artificial Sequence
  Synthetic
cagctcctaagaaggcacc

SEQ ID NO: 14592 - DNA, 16 bp, Artificial Sequence
  Synthetic
accctaggcgtcccct

SEQ ID NO: 14593 - DNA, 17 bp, Artificial Sequence
  Synthetic
cacacacccacccgtct

SEQ ID NO: 14594 - DNA, 18 bp, Artificial Sequence
  Synthetic
aaaggtcagggcccaagg

SEQ ID NO: 14595 - DNA, 17 bp, Artificial Sequence
  Synthetic
acacccaggcacacact

SEQ ID NO: 14596 - DNA, 20 bp, Artificial Sequence
  Synthetic
ccaaaattggtgccttgctc

SEQ ID NO: 14597 - DNA, 16 bp, Artificial Sequence
  Synthetic
acacgttagggggcgc

SEQ ID NO: 14598 - DNA, 18 bp, Artificial Sequence
  Synthetic
ttgtcggaggtggagagg

SEQ ID NO: 14599 - DNA, 20 bp, Artificial Sequence
  Synthetic
aaactctaggcctgtggagc

SEQ ID NO: 14600 - DNA, 19 bp, Artificial Sequence
  Synthetic
gctccagggaatctttggg

SEQ ID NO: 14601 - DNA, 16 bp, Artificial Sequence
  Synthetic
tccccgctgaccagtc

SEQ ID NO: 14602 - DNA, 19 bp, Artificial Sequence
  Synthetic
gcagcttgtccttgaggag

SEQ ID NO: 14603 - DNA, 16 bp, Artificial Sequence
  Synthetic
tcgggagaggcgcctt

SEQ ID NO: 14604 - DNA, 16 bp, Artificial Sequence
  Synthetic
agagggccggtctcga

SEQ ID NO: 14605 - DNA, 16 bp, Artificial Sequence
  Synthetic
gccgaggccaccttgt

SEQ ID NO: 14606 - DNA, 17 bp, Artificial Sequence
  Synthetic
cctgttgtctggccacg

SEQ ID NO: 14607 - DNA, 20 bp, Artificial Sequence
  Synthetic
tctaggtcagacaggtagcg

SEQ ID NO: 14608 - DNA, 18 bp, Artificial Sequence
  Synthetic
gagaatggccgcgagttt

SEQ ID NO: 14609 - DNA, 18 bp, Artificial Sequence
  Synthetic
ctggatgccctccacgac

SEQ ID NO: 14610 - DNA, 16 bp, Artificial Sequence
  Synthetic
agctgcccccgtcaag

SEQ ID NO: 14611 - DNA, 18 bp, Artificial Sequence
  Synthetic
agctcgttggagaggacc

SEQ ID NO: 14612 - DNA, 19 bp, Artificial Sequence
  Synthetic
gagaaccacgagaggtgcc

SEQ ID NO: 14613 - DNA, 20 bp, Artificial Sequence
  Synthetic
gacagcgggcaagttttgtg

SEQ ID NO: 14614 - DNA, 16 bp, Artificial Sequence
  Synthetic
gtgctgcagccctcga

SEQ ID NO: 14615 - DNA, 17 bp, Artificial Sequence
  Synthetic
gccttcactggccctgt

SEQ ID NO: 14616 - DNA, 18 bp, Artificial Sequence
  Synthetic
cacctccgccacctccta

SEQ ID NO: 14617 - DNA, 20 bp, Artificial Sequence
  Synthetic
acgtgacatggagaaactgg

SEQ ID NO: 14618 - DNA, 16 bp, Artificial Sequence
  Synthetic
ccaggcccgcatgagt

SEQ ID NO: 14619 - DNA, 16 bp, Artificial Sequence
  Synthetic
cagccgcttcttgggc

SEQ ID NO: 14620 - DNA, 18 bp, Artificial Sequence
  Synthetic
ggggtactgggggtggtt

SEQ ID NO: 14621 - DNA, 19 bp, Artificial Sequence
  Synthetic
caacatgagacgtgaccgg

SEQ ID NO: 14622 - DNA, 18 bp, Artificial Sequence
  Synthetic
cacctggcttctgaccgg

SEQ ID NO: 14623 - DNA, 20 bp, Artificial Sequence
  Synthetic
tatagcctcagccatctacc

SEQ ID NO: 14624 - DNA, 18 bp, Artificial Sequence
  Synthetic
agcagctcagggaatggc

SEQ ID NO: 14625 - DNA, 16 bp, Artificial Sequence
  Synthetic
gcattagacgcgcgcg

SEQ ID NO: 14626 - DNA, 20 bp, Artificial Sequence
  Synthetic
tttgtcaatccatggcaggc

SEQ ID NO: 14627 - DNA, 18 bp, Artificial Sequence
  Synthetic
gtatgggttaccgcacgc

SEQ ID NO: 14628 - DNA, 20 bp, Artificial Sequence
  Synthetic
caacttagcagttcggcacc

SEQ ID NO: 14629 - DNA, 17 bp, Artificial Sequence
  Synthetic
cgagtcactgctgctgg

SEQ ID NO: 14630 - DNA, 20 bp, Artificial Sequence
  Synthetic
gcatcgcttaagtatgagtg

SEQ ID NO: 14631 - DNA, 19 bp, Artificial Sequence
  Synthetic
agggaatgaaagctcacgg

SEQ ID NO: 14632 - DNA, 18 bp, Artificial Sequence
  Synthetic
tgagggcagtgatagcga

SEQ ID NO: 14633 - DNA, 16 bp, Artificial Sequence
  Synthetic
gcagttcgcccagctc

SEQ ID NO: 14634 - DNA, 17 bp, Artificial Sequence
  Synthetic
gcgttccagcttcgtcc

SEQ ID NO: 14635 - DNA, 16 bp, Artificial Sequence
  Synthetic
cgccgctggagttcct

SEQ ID NO: 14636 - DNA, 19 bp, Artificial Sequence
  Synthetic
aggagcgacgagtatgtgg

SEQ ID NO: 14637 - DNA, 18 bp, Artificial Sequence
  Synthetic
cgaaaatactgccccgcg

SEQ ID NO: 14638 - DNA, 20 bp, Artificial Sequence
  Synthetic
ttctacaatgccagggggga

SEQ ID NO: 14639 - DNA, 17 bp, Artificial Sequence
  Synthetic
gcttggtgcctctgtgg

SEQ ID NO: 14640 - DNA, 18 bp, Artificial Sequence
  Synthetic
ggcatgtctgttccccct

SEQ ID NO: 14641 - DNA, 21 bp, Artificial Sequence
  Synthetic
actggaccctttaaaacatcc

SEQ ID NO: 14642 - DNA, 20 bp, Artificial Sequence
  Synthetic
attgtctgcgtacgctttcc

SEQ ID NO: 14643 - DNA, 18 bp, Artificial Sequence
  Synthetic
gacagcacctccaacagc

SEQ ID NO: 14644 - DNA, 20 bp, Artificial Sequence
  Synthetic
aatgcctctatgttggcaca

SEQ ID NO: 14645 - DNA, 17 bp, Artificial Sequence
  Synthetic
gcaccgagctgatgggt

SEQ ID NO: 14646 - DNA, 19 bp, Artificial Sequence
  Synthetic
aatctggttgtcggcctcc

SEQ ID NO: 14647 - DNA, 19 bp, Artificial Sequence
  Synthetic
cagacggatgtcaggtcgg

SEQ ID NO: 14648 - DNA, 19 bp, Artificial Sequence
  Synthetic
ctcaagtgtaagcagcccg

SEQ ID NO: 14649 - DNA, 19 bp, Artificial Sequence
  Synthetic
gtgctctcatccctgcaac

SEQ ID NO: 14650 - DNA, 20 bp, Artificial Sequence
  Synthetic
aaccagaaagatacccagag

SEQ ID NO: 14651 - DNA, 19 bp, Artificial Sequence
  Synthetic
cacgcatccctgtcttctc

SEQ ID NO: 14652 - DNA, 16 bp, Artificial Sequence
  Synthetic
ggctagcccccgcaaa

SEQ ID NO: 14653 - DNA, 17 bp, Artificial Sequence
  Synthetic
gaaaagggggtggcggt

SEQ ID NO: 14654 - DNA, 19 bp, Artificial Sequence
  Synthetic
ggtgtcttgggcatcatcc

SEQ ID NO: 14655 - DNA, 16 bp, Artificial Sequence
  Synthetic
gccccaagccttcgca

SEQ ID NO: 14656 - DNA, 20 bp, Artificial Sequence
  Synthetic
gacaaggcagtagaggacac

SEQ ID NO: 14657 - DNA, 20 bp, Artificial Sequence
  Synthetic
caggcaccgtctgtatacgt

SEQ ID NO: 14658 - DNA, 18 bp, Artificial Sequence
  Synthetic
gccaccacagcacaagtg

SEQ ID NO: 14659 - DNA, 18 bp, Artificial Sequence
  Synthetic
ccttccccgggaatgtgt

SEQ ID NO: 14660 - DNA, 19 bp, Artificial Sequence
  Synthetic
tctcctaggaatgccgagc

SEQ ID NO: 14661 - DNA, 17 bp, Artificial Sequence
  Synthetic
gttgcgctcgacgaact

SEQ ID NO: 14662 - DNA, 16 bp, Artificial Sequence
  Synthetic
cgtcagcacccccaca

SEQ ID NO: 14663 - DNA, 18 bp, Artificial Sequence
  Synthetic
gggaaagaggccgttggc

SEQ ID NO: 14664 - DNA, 18 bp, Artificial Sequence
  Synthetic
cccagtaggtgcctggct

SEQ ID NO: 14665 - DNA, 19 bp, Artificial Sequence
  Synthetic
accccctctatgtcttcgc

SEQ ID NO: 14666 - DNA, 19 bp, Artificial Sequence
  Synthetic
gaaggcccgtctgtagagg

SEQ ID NO: 14667 - DNA, 18 bp, Artificial Sequence
  Synthetic
gtcccctctgccgtggaa

SEQ ID NO: 14668 - DNA, 16 bp, Artificial Sequence
  Synthetic
gccgcatccacgtcct

SEQ ID NO: 14669 - DNA, 19 bp, Artificial Sequence
  Synthetic
gcaaagatctgcgtggaca

SEQ ID NO: 14670 - DNA, 16 bp, Artificial Sequence
  Synthetic
acctgtggcccgcgta

SEQ ID NO: 14671 - DNA, 18 bp, Artificial Sequence
  Synthetic
cgatgtcggctgtcctgc

SEQ ID NO: 14672 - DNA, 16 bp, Artificial Sequence
  Synthetic
cgggaggccgtgcttt

SEQ ID NO: 14673 - DNA, 20 bp, Artificial Sequence
  Synthetic
gagcggtctgtataaaaacg

SEQ ID NO: 14674 - DNA, 25 bp, Artificial Sequence
  Synthetic
agacaaatatgattggaaatagacc

SEQ ID NO: 14675 - DNA, 23 bp, Artificial Sequence
  Synthetic
gttagtgcaagattccaataacg

SEQ ID NO: 14676 - DNA, 23 bp, Artificial Sequence
  Synthetic
actgtactgaattccaaatgatt

SEQ ID NO: 14677 - DNA, 25 bp, Artificial Sequence
  Synthetic
agtttatgaaataactaatgccacc

SEQ ID NO: 14678 - DNA, 20 bp, Artificial Sequence
  Synthetic
tattttgaggatgcaaacgg

SEQ ID NO: 14679 - DNA, 18 bp, Artificial Sequence
  Synthetic
aacaattgcaccgactcg

SEQ ID NO: 14680 - DNA, 24 bp, Artificial Sequence
  Synthetic
tggagaagaaattcctttagatcc

SEQ ID NO: 14681 - DNA, 19 bp, Artificial Sequence
  Synthetic
atcttccacctcaaaagcc

SEQ ID NO: 14682 - DNA, 23 bp, Artificial Sequence
  Synthetic
gagattgtcctcctattgaatta

SEQ ID NO: 14683 - DNA, 19 bp, Artificial Sequence
  Synthetic
gggaacttgcctttgtacc

SEQ ID NO: 14684 - DNA, 25 bp, Artificial Sequence
  Synthetic
cacgtatattttatttttcaaccgc

SEQ ID NO: 14685 - DNA, 20 bp, Artificial Sequence
  Synthetic
ctactggtcctgttatgtgc

SEQ ID NO: 14686 - DNA, 18 bp, Artificial Sequence
  Synthetic
ctgcttccagtgagatca

SEQ ID NO: 14687 - DNA, 18 bp, Artificial Sequence
  Synthetic
atttgctatggctgacgg

SEQ ID NO: 14688 - DNA, 18 bp, Artificial Sequence
  Synthetic
ttgctaaaacccggagac

SEQ ID NO: 14689 - DNA, 22 bp, Artificial Sequence
  Synthetic
gttacaggactaaggaacattc

SEQ ID NO: 14690 - DNA, 25 bp, Artificial Sequence
  Synthetic
tgattatcccaaatattcagaagag

SEQ ID NO: 14691 - DNA, 18 bp, Artificial Sequence
  Synthetic
caaggttcgttggcagac

SEQ ID NO: 14692 - DNA, 23 bp, Artificial Sequence
  Synthetic
tgagctacttaattttgatcaca

SEQ ID NO: 14693 - DNA, 25 bp, Artificial Sequence
  Synthetic
taagttattagacttagtggagaag

SEQ ID NO: 14694 - DNA, 21 bp, Artificial Sequence
  Synthetic
cgtgcttgctacaaatttagg

SEQ ID NO: 14695 - DNA, 19 bp, Artificial Sequence
  Synthetic
atttgacgaagggacagac

SEQ ID NO: 14696 - DNA, 23 bp, Artificial Sequence
  Synthetic
aaatgaagctgaagatctttctg

SEQ ID NO: 14697 - DNA, 23 bp, Artificial Sequence
  Synthetic
tgaatgatgacttaattgaaagc

SEQ ID NO: 14698 - DNA, 21 bp, Artificial Sequence
  Synthetic
tcctgaatggatacttacaca

SEQ ID NO: 14699 - DNA, 21 bp, Artificial Sequence
  Synthetic
cagcagagttaaatcctttgc

SEQ ID NO: 14700 - DNA, 22 bp, Artificial Sequence
  Synthetic
agactttaagacaagagcaaat

SEQ ID NO: 14701 - DNA, 18 bp, Artificial Sequence
  Synthetic
tcttcgccaccaactgga

SEQ ID NO: 14702 - DNA, 16 bp, Artificial Sequence
  Synthetic
aaaggggaggggagcg

SEQ ID NO: 14703 - DNA, 18 bp, Artificial Sequence
  Synthetic
cacgattactggctgagg

SEQ ID NO: 14704 - DNA, 23 bp, Artificial Sequence
  Synthetic
atgatctgtaagctttactaacg

SEQ ID NO: 14705 - DNA, 19 bp, Artificial Sequence
  Synthetic
ataagtacaggccgtggca

SEQ ID NO: 14706 - DNA, 22 bp, Artificial Sequence
  Synthetic
agaatcaattgctgagatacac

SEQ ID NO: 14707 - DNA, 24 bp, Artificial Sequence
  Synthetic
tgaggtcacacaaatatttgaaag

SEQ ID NO: 14708 - DNA, 20 bp, Artificial Sequence
  Synthetic
gaaatgcaattattggggga

SEQ ID NO: 14709 - DNA, 19 bp, Artificial Sequence
  Synthetic
cagtggcgagagttcaaag

SEQ ID NO: 14710 - DNA, 18 bp, Artificial Sequence
  Synthetic
gtttgggcctgtagaggt

SEQ ID NO: 14711 - DNA, 22 bp, Artificial Sequence
  Synthetic
ttatgttagaggaggttcagtt

SEQ ID NO: 14712 - DNA, 20 bp, Artificial Sequence
  Synthetic
agatcactgaaagccagaga

SEQ ID NO: 14713 - DNA, 20 bp, Artificial Sequence
  Synthetic
ctttcttctagcatggacca

SEQ ID NO: 14714 - DNA, 20 bp, Artificial Sequence
  Synthetic
ctcaagggcgttatattgga

SEQ ID NO: 14715 - DNA, 18 bp, Artificial Sequence
  Synthetic
gcaagaagcttgtggatg

SEQ ID NO: 14716 - DNA, 18 bp, Artificial Sequence
  Synthetic
ggcaggagaaatcccatc

SEQ ID NO: 14717 - DNA, 18 bp, Artificial Sequence
  Synthetic
atgggggttaaagggaga

SEQ ID NO: 14718 - DNA, 19 bp, Artificial Sequence
  Synthetic
gcatggtatcaacagtggg

SEQ ID NO: 14719 - DNA, 18 bp, Artificial Sequence
  Synthetic
gtgtagctgcttctggtg

SEQ ID NO: 14720 - DNA, 19 bp, Artificial Sequence
  Synthetic
cagttagtctggacggatg

SEQ ID NO: 14721 - DNA, 24 bp, Artificial Sequence
  Synthetic
ctaccttcctttagtaaagaatgt

SEQ ID NO: 14722 - DNA, 19 bp, Artificial Sequence
  Synthetic
attgggttgattggtttgg

SEQ ID NO: 14723 - DNA, 20 bp, Artificial Sequence
  Synthetic
ttctcaaaagggattgacgg

SEQ ID NO: 14724 - DNA, 20 bp, Artificial Sequence
  Synthetic
tgaagctaacagaacattgc

SEQ ID NO: 14725 - DNA, 20 bp, Artificial Sequence
  Synthetic
catcgcaatcgtaagtatcc

SEQ ID NO: 14726 - DNA, 19 bp, Artificial Sequence
  Synthetic
cctctttgtgaacagtgtc

SEQ ID NO: 14727 - DNA, 20 bp, Artificial Sequence
  Synthetic
tacagggtgttatgttttgc

SEQ ID NO: 14728 - DNA, 22 bp, Artificial Sequence
  Synthetic
aactttttggatatctgccttc

SEQ ID NO: 14729 - DNA, 25 bp, Artificial Sequence
  Synthetic
gaagaagataaaactaagaatcagg

SEQ ID NO: 14730 - DNA, 20 bp, Artificial Sequence
  Synthetic
ggctcttttgttgagtttga

SEQ ID NO: 14731 - DNA, 22 bp, Artificial Sequence
  Synthetic
caatgttctgttatctccagat

SEQ ID NO: 14732 - DNA, 19 bp, Artificial Sequence
  Synthetic
atgcggttttaaagatggc

SEQ ID NO: 14733 - DNA, 22 bp, Artificial Sequence
  Synthetic
tctgattgagggacttctatca

SEQ ID NO: 14734 - DNA, 21 bp, Artificial Sequence
  Synthetic
gtttctcggaaatcacaaact

SEQ ID NO: 14735 - DNA, 21 bp, Artificial Sequence
  Synthetic
ctgaataggaattcctcgacc

SEQ ID NO: 14736 - DNA, 18 bp, Artificial Sequence
  Synthetic
cttcgccaagctttgagt

SEQ ID NO: 14737 - DNA, 22 bp, Artificial Sequence
  Synthetic
cttcgcattcttattaccaatg

SEQ ID NO: 14738 - DNA, 19 bp, Artificial Sequence
  Synthetic
ttacagtttgtggagggtt

SEQ ID NO: 14739 - DNA, 22 bp, Artificial Sequence
  Synthetic
taaacaatatgctcaatacggg

SEQ ID NO: 14740 - DNA, 19 bp, Artificial Sequence
  Synthetic
ctttcggaacaacaactgc

SEQ ID NO: 14741 - DNA, 22 bp, Artificial Sequence
  Synthetic
aaagcctgtacagaatacaaga

SEQ ID NO: 14742 - DNA, 23 bp, Artificial Sequence
  Synthetic
gtttaacagtagatcaactttcc

SEQ ID NO: 14743 - DNA, 19 bp, Artificial Sequence
  Synthetic
cttgccctttatgtggtct

SEQ ID NO: 14744 - DNA, 25 bp, Artificial Sequence
  Synthetic
tcctacttaacctattttacagatg

SEQ ID NO: 14745 - DNA, 19 bp, Artificial Sequence
  Synthetic
tggctatggcttttatggg

SEQ ID NO: 14746 - DNA, 19 bp, Artificial Sequence
  Synthetic
aagcactcctcctatcaca

SEQ ID NO: 14747 - DNA, 21 bp, Artificial Sequence
  Synthetic
ccaacaacattatactcccct

SEQ ID NO: 14748 - DNA, 19 bp, Artificial Sequence
  Synthetic
ctgttgaagtacgtccctt

SEQ ID NO: 14749 - DNA, 20 bp, Artificial Sequence
  Synthetic
aggctgataaatgttttcgg

SEQ ID NO: 14750 - DNA, 18 bp, Artificial Sequence
  Synthetic
ttgtcgcgaatagtcaca

SEQ ID NO: 14751 - DNA, 23 bp, Artificial Sequence
  Synthetic
tttgattttctctactaagtcgt

SEQ ID NO: 14752 - DNA, 18 bp, Artificial Sequence
  Synthetic
gttatccccaggcatgac

SEQ ID NO: 14753 - DNA, 18 bp, Artificial Sequence
  Synthetic
gtttggcaagcaaacaac

SEQ ID NO: 14754 - DNA, 19 bp, Artificial Sequence
  Synthetic
cctcttacaaaccgcattt

SEQ ID NO: 14755 - DNA, 21 bp, Artificial Sequence
  Synthetic
attgcttctctcttttccaaa

SEQ ID NO: 14756 - DNA, 18 bp, Artificial Sequence
  Synthetic
gagcctgtgcagaatgtg

SEQ ID NO: 14757 - DNA, 22 bp, Artificial Sequence
  Synthetic
taaagtaacaggactatcccct

SEQ ID NO: 14758 - DNA, 18 bp, Artificial Sequence
  Synthetic
accggtactttgcaacac

SEQ ID NO: 14759 - DNA, 25 bp, Artificial Sequence
  Synthetic
gaaacaagaagttctttttcaacac

SEQ ID NO: 14760 - DNA, 23 bp, Artificial Sequence
  Synthetic
gaccttatctttgggatacagat

SEQ ID NO: 14761 - DNA, 18 bp, Artificial Sequence
  Synthetic
agaaaacaggcaagccat

SEQ ID NO: 14762 - DNA, 21 bp, Artificial Sequence
  Synthetic
ccaacataaaactggagttct

SEQ ID NO: 14763 - DNA, 23 bp, Artificial Sequence
  Synthetic
atatcattctctgtaacaacctc

SEQ ID NO: 14764 - DNA, 25 bp, Artificial Sequence
  Synthetic
cggtcttaattccattaataagact

SEQ ID NO: 14765 - DNA, 18 bp, Artificial Sequence
  Synthetic
gcagacactacatgccaa

SEQ ID NO: 14766 - DNA, 18 bp, Artificial Sequence
  Synthetic
ttgttgtgtccttccgtt

SEQ ID NO: 14767 - DNA, 19 bp, Artificial Sequence
  Synthetic
cgtagcaaaaatctcccca

SEQ ID NO: 14768 - DNA, 20 bp, Artificial Sequence
  Synthetic
tcttcccaaaagacttcaga

SEQ ID NO: 14769 - DNA, 18 bp, Artificial Sequence
  Synthetic
aactgacaaaagctgccg

SEQ ID NO: 14770 - DNA, 18 bp, Artificial Sequence
  Synthetic
ccgtagtggttcgggatt

SEQ ID NO: 14771 - DNA, 18 bp, Artificial Sequence
  Synthetic
aaacggtgcaactcgatc

SEQ ID NO: 14772 - DNA, 25 bp, Artificial Sequence
  Synthetic
caaaaataggattagaagaacttcc

SEQ ID NO: 14773 - DNA, 23 bp, Artificial Sequence
  Synthetic
gctggattcacaatagtaaatgc

SEQ ID NO: 14774 - DNA, 21 bp, Artificial Sequence
  Synthetic
cagaacacatcacttcagaag

SEQ ID NO: 14775 - DNA, 21 bp, Artificial Sequence
  Synthetic
taatccagactcttcctcatc

SEQ ID NO: 14776 - DNA, 19 bp, Artificial Sequence
  Synthetic
aaggcagaaggatcttgtt

SEQ ID NO: 14777 - DNA, 19 bp, Artificial Sequence
  Synthetic
cttgcttgcgttattttcg

SEQ ID NO: 14778 - DNA, 21 bp, Artificial Sequence
  Synthetic
cctttaattacagctgggatg

SEQ ID NO: 14779 - DNA, 21 bp, Artificial Sequence
  Synthetic
atttcaacattgcgatcatca

SEQ ID NO: 14780 - DNA, 21 bp, Artificial Sequence
  Synthetic
ttaaacacgtacagaaagcaa

SEQ ID NO: 14781 - DNA, 18 bp, Artificial Sequence
  Synthetic
tgactgcgctatgaggat

SEQ ID NO: 14782 - DNA, 23 bp, Artificial Sequence
  Synthetic
tcaaatcaatgatttccacttca

SEQ ID NO: 14783 - DNA, 19 bp, Artificial Sequence
  Synthetic
ttggacaataaaatgcgcg

SEQ ID NO: 14784 - DNA, 24 bp, Artificial Sequence
  Synthetic
taccgaatctctaataatggatca

SEQ ID NO: 14785 - DNA, 18 bp, Artificial Sequence
  Synthetic
gtgctgctatccccgata

SEQ ID NO: 14786 - DNA, 18 bp, Artificial Sequence
  Synthetic
atccaccatccctgcttc

SEQ ID NO: 14787 - DNA, 20 bp, Artificial Sequence
  Synthetic
aaattcactgctttagcctg

SEQ ID NO: 14788 - DNA, 18 bp, Artificial Sequence
  Synthetic
aaaacgacgaggacccta

SEQ ID NO: 14789 - DNA, 21 bp, Artificial Sequence
  Synthetic
gtgctgcttgagaattcttac

SEQ ID NO: 14790 - DNA, 22 bp, Artificial Sequence
  Synthetic
gaaaactcgaatccaaactttc

SEQ ID NO: 14791 - DNA, 20 bp, Artificial Sequence
  Synthetic
gacgctgtagcataatcaat

SEQ ID NO: 14792 - DNA, 20 bp, Artificial Sequence
  Synthetic
agaacgcaaagattttcacg

SEQ ID NO: 14793 - DNA, 19 bp, Artificial Sequence
  Synthetic
gtgtgcccaatcatttcag

SEQ ID NO: 14794 - DNA, 22 bp, Artificial Sequence
  Synthetic
atatgctgatcaaattttggct

SEQ ID NO: 14795 - DNA, 25 bp, Artificial Sequence
  Synthetic
agaatccccttagaagttacttaaa

SEQ ID NO: 14796 - DNA, 21 bp, Artificial Sequence
  Synthetic
aggattaaccagcaaatacac

SEQ ID NO: 14797 - DNA, 19 bp, Artificial Sequence
  Synthetic
ttcctgctttcatcatggg

SEQ ID NO: 14798 - DNA, 19 bp, Artificial Sequence
  Synthetic
aaaattgggatagcgctct

SEQ ID NO: 14799 - DNA, 20 bp, Artificial Sequence
  Synthetic
ttgattaaccaaaagagcgc

SEQ ID NO: 14800 - DNA, 19 bp, Artificial Sequence
  Synthetic
tagctttcgatgctcaacc

SEQ ID NO: 14801 - DNA, 20 bp, Artificial Sequence
  Synthetic
atcgcagaagaaaaattccc

SEQ ID NO: 14802 - DNA, 19 bp, Artificial Sequence
  Synthetic
acctatgaagaagctcgtc

SEQ ID NO: 14803 - DNA, 20 bp, Artificial Sequence
  Synthetic
agactttaggagatcgtgtg

SEQ ID NO: 14804 - DNA, 25 bp, Artificial Sequence
  Synthetic
ttatcctttatctaacagtctctct

SEQ ID NO: 14805 - DNA, 25 bp, Artificial Sequence
  Synthetic
gtctctttactattaggaattaacg

SEQ ID NO: 14806 - DNA, 21 bp, Artificial Sequence
  Synthetic
tcaatgaccttcctatgtctc

SEQ ID NO: 14807 - DNA, 19 bp, Artificial Sequence
  Synthetic
catcgacaagattccctcc

SEQ ID NO: 14808 - DNA, 19 bp, Artificial Sequence
  Synthetic
aaagcagtgaaaacttgcc

SEQ ID NO: 14809 - DNA, 20 bp, Artificial Sequence
  Synthetic
ctttcaatcttcgggacaac

SEQ ID NO: 14810 - DNA, 19 bp, Artificial Sequence
  Synthetic
tcgtgcaagtatgttcaac

SEQ ID NO: 14811 - DNA, 24 bp, Artificial Sequence
  Synthetic
acgtttagaaattctagaagatgc

SEQ ID NO: 14812 - DNA, 22 bp, Artificial Sequence
  Synthetic
ctaaaaattcgtctaactgctg

SEQ ID NO: 14813 - DNA, 20 bp, Artificial Sequence
  Synthetic
aacttctacaatagcgtgca

SEQ ID NO: 14814 - DNA, 18 bp, Artificial Sequence
  Synthetic
tcttgaacgcaacgagaa

SEQ ID NO: 14815 - DNA, 19 bp, Artificial Sequence
  Synthetic
aacaggaaaatggagaggt

SEQ ID NO: 14816 - DNA, 18 bp, Artificial Sequence
  Synthetic
ccatttgttcgcgagtca

SEQ ID NO: 14817 - DNA, 18 bp, Artificial Sequence
  Synthetic
ttgtctcggacgttttgc

SEQ ID NO: 14818 - DNA, 21 bp, Artificial Sequence
  Synthetic
acatttctcgcatatgaacag

SEQ ID NO: 14819 - DNA, 21 bp, Artificial Sequence
  Synthetic
tgtgcgatcaaaaatacgttt

SEQ ID NO: 14820 - DNA, 21 bp, Artificial Sequence
  Synthetic
ccattttcaccatttcacaga

SEQ ID NO: 14821 - DNA, 22 bp, Artificial Sequence
  Synthetic
tatcacagatacatcaagagct

SEQ ID NO: 14822 - DNA, 18 bp, Artificial Sequence
  Synthetic
ccaaagcgacgaagaact

SEQ ID NO: 14823 - DNA, 19 bp, Artificial Sequence
  Synthetic
caagagatgcaaccagaag

SEQ ID NO: 14824 - DNA, 21 bp, Artificial Sequence
  Synthetic
tcggacaataaactcgtaacg

SEQ ID NO: 14825 - DNA, 19 bp, Artificial Sequence
  Synthetic
agcttcatcttgagcttct

SEQ ID NO: 14826 - DNA, 21 bp, Artificial Sequence
  Synthetic
gtcattttctgttcatttcgg

SEQ ID NO: 14827 - DNA, 18 bp, Artificial Sequence
  Synthetic
cgctatcgtcaacagcat

SEQ ID NO: 14828 - DNA, 18 bp, Artificial Sequence
  Synthetic
tttagtgcaccgttacga

SEQ ID NO: 14829 - DNA, 23 bp, Artificial Sequence
  Synthetic
tcgtctattaatccttctaacga

SEQ ID NO: 14830 - DNA, 21 bp, Artificial Sequence
  Synthetic
ttacgctcttttgaacatgtc

SEQ ID NO: 14831 - DNA, 22 bp, Artificial Sequence
  Synthetic
attagttgctatgtctacctct

SEQ ID NO: 14832 - DNA, 18 bp, Artificial Sequence
  Synthetic
agctctgtttggttcctt

SEQ ID NO: 14833 - DNA, 19 bp, Artificial Sequence
  Synthetic
ccaagaggttccttctcaa

SEQ ID NO: 14834 - DNA, 22 bp, Artificial Sequence
  Synthetic
aaggaattcgatacttggattc

SEQ ID NO: 14835 - DNA, 23 bp, Artificial Sequence
  Synthetic
atgacttttttcaagctaacatc

SEQ ID NO: 14836 - DNA, 25 bp, Artificial Sequence
  Synthetic
tcttagatagtcgcttattagtgaa

SEQ ID NO: 14837 - DNA, 18 bp, Artificial Sequence
  Synthetic
gttgacaatggcttgagc

SEQ ID NO: 14838 - DNA, 23 bp, Artificial Sequence
  Synthetic
ttttcaggttgagtatatggaag

SEQ ID NO: 14839 - DNA, 25 bp, Artificial Sequence
  Synthetic
tagaaactattgatcaaagtatccg

SEQ ID NO: 14840 - DNA, 21 bp, Artificial Sequence
  Synthetic
agagttagtggtcatacaagg

SEQ ID NO: 14841 - DNA, 22 bp, Artificial Sequence
  Synthetic
caaaaaaattatcaggacgctt

SEQ ID NO: 14842 - DNA, 20 bp, Artificial Sequence
  Synthetic
ccatcacacacagcttttac

SEQ ID NO: 14843 - DNA, 22 bp, Artificial Sequence
  Synthetic
actggaatatacacttcttccg

SEQ ID NO: 14844 - DNA, 21 bp, Artificial Sequence
  Synthetic
aaggaagtgatgattcgaaga

SEQ ID NO: 14845 - DNA, 18 bp, Artificial Sequence
  Synthetic
agaaatccccgccagaaa

SEQ ID NO: 14846 - DNA, 19 bp, Artificial Sequence
  Synthetic
cccatggatcgtttagagc

SEQ ID NO: 14847 - DNA, 21 bp, Artificial Sequence
  Synthetic
ctagctttgatcaattccgta

SEQ ID NO: 14848 - DNA, 18 bp, Artificial Sequence
  Synthetic
tttggcagtcattgagga

SEQ ID NO: 14849 - DNA, 20 bp, Artificial Sequence
  Synthetic
ttgctgattttgtggttctt

SEQ ID NO: 14850 - DNA, 18 bp, Artificial Sequence
  Synthetic
agcagagcaatacgttgg

SEQ ID NO: 14851 - DNA, 19 bp, Artificial Sequence
  Synthetic
tattcccccttaggtctgg

SEQ ID NO: 14852 - DNA, 22 bp, Artificial Sequence
  Synthetic
agcttttcttctttcagttctg

SEQ ID NO: 14853 - DNA, 19 bp, Artificial Sequence
  Synthetic
tattcatgcttcgatccca

SEQ ID NO: 14854 - DNA, 19 bp, Artificial Sequence
  Synthetic
tttctcggaagggagttgt

SEQ ID NO: 14855 - DNA, 18 bp, Artificial Sequence
  Synthetic
tttttgggcttctctgcg

SEQ ID NO: 14856 - DNA, 19 bp, Artificial Sequence
  Synthetic
gtgaaagcacaggttcatg

SEQ ID NO: 14857 - DNA, 21 bp, Artificial Sequence
  Synthetic
atgacaatgctctttatcgac

SEQ ID NO: 14858 - DNA, 25 bp, Artificial Sequence
  Synthetic
agaattattaagcaaggatttaccg

SEQ ID NO: 14859 - DNA, 20 bp, Artificial Sequence
  Synthetic
ttgcaaccgatagattctga

SEQ ID NO: 14860 - DNA, 18 bp, Artificial Sequence
  Synthetic
ccggaagtggctactacc

SEQ ID NO: 14861 - DNA, 21 bp, Artificial Sequence
  Synthetic
aatgtttgttcctttcgatcg

SEQ ID NO: 14862 - DNA, 18 bp, Artificial Sequence
  Synthetic
ttatgcctttgttgctgc

SEQ ID NO: 14863 - DNA, 21 bp, Artificial Sequence
  Synthetic
tcaaagagcatcatacgaaga

SEQ ID NO: 14864 - DNA, 19 bp, Artificial Sequence
  Synthetic
tgtcgttcggaaaatctcc

SEQ ID NO: 14865 - DNA, 18 bp, Artificial Sequence
  Synthetic
ccttatggctcagcttca

SEQ ID NO: 14866 - DNA, 18 bp, Artificial Sequence
  Synthetic
atttgttttcctccggga

SEQ ID NO: 14867 - DNA, 20 bp, Artificial Sequence
  Synthetic
ttggagattgaaagacacga

SEQ ID NO: 14868 - DNA, 21 bp, Artificial Sequence
  Synthetic
gtgtcagtcttttttctggat

SEQ ID NO: 14869 - DNA, 22 bp, Artificial Sequence
  Synthetic
tccgaataattacatctgttgc

SEQ ID NO: 14870 - DNA, 22 bp, Artificial Sequence
  Synthetic
gtgctttggttaaaattgctac

SEQ ID NO: 14871 - DNA, 18 bp, Artificial Sequence
  Synthetic
accacaggatacggcata

SEQ ID NO: 14872 - DNA, 25 bp, Artificial Sequence
  Synthetic
agcttagtctatttgtaaagtagtg

SEQ ID NO: 14873 - DNA, 19 bp, Artificial Sequence
  Synthetic
tagtttggttggtgagtga

SEQ ID NO: 14874 - DNA, 19 bp, Artificial Sequence
  Synthetic
tgaaatggcgttatgttcc

SEQ ID NO: 14875 - DNA, 25 bp, Artificial Sequence
  Synthetic
gataagactatcatgattaaagctg

SEQ ID NO: 14876 - DNA, 23 bp, Artificial Sequence
  Synthetic
gcccattaaagataatcattgga

SEQ ID NO: 14877 - DNA, 20 bp, Artificial Sequence
  Synthetic
aactctggatcagtttcctt

SEQ ID NO: 14878 - DNA, 18 bp, Artificial Sequence
  Synthetic
gcgagtagcttctttggt

SEQ ID NO: 14879 - DNA, 18 bp, Artificial Sequence
  Synthetic
atttgttcggagatgcgt

SEQ ID NO: 14880 - DNA, 18 bp, Artificial Sequence
  Synthetic
gcttccggactatcgaag

SEQ ID NO: 14881 - DNA, 23 bp, Artificial Sequence
  Synthetic
acagccttgtttttattaaaccc

SEQ ID NO: 14882 - DNA, 22 bp, Artificial Sequence
  Synthetic
aatgcaagaagatataatcgcc

SEQ ID NO: 14883 - DNA, 19 bp, Artificial Sequence
  Synthetic
agatggaaactgatgggga

SEQ ID NO: 14884 - DNA, 21 bp, Artificial Sequence
  Synthetic
aggacccatatacaagagagt

SEQ ID NO: 14885 - DNA, 19 bp, Artificial Sequence
  Synthetic
gacaatggtgatggagttg

SEQ ID NO: 14886 - DNA, 24 bp, Artificial Sequence
  Synthetic
caaatgaaaacatggatactatgg

SEQ ID NO: 14887 - DNA, 18 bp, Artificial Sequence
  Synthetic
ctctgccctgttagtgga

SEQ ID NO: 14888 - DNA, 19 bp, Artificial Sequence
  Synthetic
caagtgcttgtcatgatgg

SEQ ID NO: 14889 - DNA, 25 bp, Artificial Sequence
  Synthetic
gaaaagggaaagatagtcaaatcag

SEQ ID NO: 14890 - DNA, 22 bp, Artificial Sequence
  Synthetic
ggagtaaaagggttttcattca

SEQ ID NO: 14891 - DNA, 21 bp, Artificial Sequence
  Synthetic
tattgtggattcttgatcgtc

SEQ ID NO: 14892 - DNA, 25 bp, Artificial Sequence
  Synthetic
agaggctgaaaaaataaagatatgc

SEQ ID NO: 14893 - DNA, 19 bp, Artificial Sequence
  Synthetic
tctttgtctggtggatcct

SEQ ID NO: 14894 - DNA, 18 bp, Artificial Sequence
  Synthetic
cttggtgaatgccttgga

SEQ ID NO: 14895 - DNA, 21 bp, Artificial Sequence
  Synthetic
tgtgacaactactttcaagtg

SEQ ID NO: 14896 - DNA, 21 bp, Artificial Sequence
  Synthetic
catacattggagaagctgatg

SEQ ID NO: 14897 - DNA, 21 bp, Artificial Sequence
  Synthetic
aatccattccaaaaatcccag

SEQ ID NO: 14898 - DNA, 24 bp, Artificial Sequence
  Synthetic
gaatgacagaatttctcatgatga

SEQ ID NO: 14899 - DNA, 23 bp, Artificial Sequence
  Synthetic
tattttcaagttcaacgaaactg

SEQ ID NO: 14900 - DNA, 22 bp, Artificial Sequence
  Synthetic
atacaagaagctcaaaagagaa

SEQ ID NO: 14901 - DNA, 19 bp, Artificial Sequence
  Synthetic
tagcactacggcaaaggct

SEQ ID NO: 14902 - DNA, 21 bp, Artificial Sequence
  Synthetic
gccatagaaaaacacgtaacc

SEQ ID NO: 14903 - DNA, 20 bp, Artificial Sequence
  Synthetic
ggaaacaggctactatacca

SEQ ID NO: 14904 - DNA, 21 bp, Artificial Sequence
  Synthetic
gcaaaaatggcagataaaggt

SEQ ID NO: 14905 - DNA, 23 bp, Artificial Sequence
  Synthetic
aagtattttagtcctaaagctgt

SEQ ID NO: 14906 - DNA, 18 bp, Artificial Sequence
  Synthetic
aaatgttggggatgcaca

SEQ ID NO: 14907 - DNA, 21 bp, Artificial Sequence
  Synthetic
ggcaattagatctaagtgacc

SEQ ID NO: 14908 - DNA, 24 bp, Artificial Sequence
  Synthetic
tatcatggtgcctattttatggat

SEQ ID NO: 14909 - DNA, 20 bp, Artificial Sequence
  Synthetic
tctaaaggaaggtacgggcg

SEQ ID NO: 14910 - DNA, 18 bp, Artificial Sequence
  Synthetic
cgggagcaggagaaggag

SEQ ID NO: 14911 - DNA, 24 bp, Artificial Sequence
  Synthetic
aatactcttaagtgttatcgctac

SEQ ID NO: 14912 - DNA, 18 bp, Artificial Sequence
  Synthetic
ggtgaagggacgagtgta

SEQ ID NO: 14913 - DNA, 20 bp, Artificial Sequence
  Synthetic
acaaaaacttggtaggccta

SEQ ID NO: 14914 - DNA, 25 bp, Artificial Sequence
  Synthetic
gataataccccaacagtaataattc

SEQ ID NO: 14915 - DNA, 22 bp, Artificial Sequence
  Synthetic
gttggacacccttattttgaag

SEQ ID NO: 14916 - DNA, 21 bp, Artificial Sequence
  Synthetic
caatactggaacaaaggatga

SEQ ID NO: 14917 - DNA, 23 bp, Artificial Sequence
  Synthetic
ttggatatagtagactccacatg

SEQ ID NO: 14918 - DNA, 24 bp, Artificial Sequence
  Synthetic
aaattgccagttctatctatttcc

SEQ ID NO: 14919 - DNA, 25 bp, Artificial Sequence
  Synthetic
aaactttataaaaacatccactccc

SEQ ID NO: 14920 - DNA, 21 bp, Artificial Sequence
  Synthetic
aaaatcatgtgatggtggatt

SEQ ID NO: 14921 - DNA, 18 bp, Artificial Sequence
  Synthetic
gtgtctgtcttggtgcag

SEQ ID NO: 14922 - DNA, 19 bp, Artificial Sequence
  Synthetic
tcctacttggagtcaggaa

SEQ ID NO: 14923 - DNA, 20 bp, Artificial Sequence
  Synthetic
ggttttgttatgcagtttgg

SEQ ID NO: 14924 - DNA, 20 bp, Artificial Sequence
  Synthetic
gttttaggttgcaaggctat

SEQ ID NO: 14925 - DNA, 19 bp, Artificial Sequence
  Synthetic
gcacaagcatttcagagtg

SEQ ID NO: 14926 - DNA, 21 bp, Artificial Sequence
  Synthetic
attctgaaccacctaaagttg

SEQ ID NO: 14927 - DNA, 23 bp, Artificial Sequence
  Synthetic
tcctgaagatgatgactttcttg

SEQ ID NO: 14928 - DNA, 23 bp, Artificial Sequence
  Synthetic
ataaaaatttgcaggatctttgg

SEQ ID NO: 14929 - DNA, 23 bp, Artificial Sequence
  Synthetic
ccgatatggttaagtctaaagga

SEQ ID NO: 14930 - DNA, 18 bp, Artificial Sequence
  Synthetic
gggcactaagaaattggc

SEQ ID NO: 14931 - DNA, 23 bp, Artificial Sequence
  Synthetic
aagccttgtttttggataaagtg

SEQ ID NO: 14932 - DNA, 19 bp, Artificial Sequence
  Synthetic
gcaggttgttgttaatggt

SEQ ID NO: 14933 - DNA, 21 bp, Artificial Sequence
  Synthetic
atgtaaatgtggtgtaaagca

SEQ ID NO: 14934 - DNA, 23 bp, Artificial Sequence
  Synthetic
aatattattgtgacggaggtaag

SEQ ID NO: 14935 - DNA, 23 bp, Artificial Sequence
  Synthetic
taatagaccttcattggttgatg

SEQ ID NO: 14936 - DNA, 21 bp, Artificial Sequence
  Synthetic
tgcccttatcagtattcagat

SEQ ID NO: 14937 - DNA, 22 bp, Artificial Sequence
  Synthetic
actggcttttgttcaaaacatc

SEQ ID NO: 14938 - DNA, 19 bp, Artificial Sequence
  Synthetic
gcatgtgcagggtaatgtt

SEQ ID NO: 14939 - DNA, 23 bp, Artificial Sequence
  Synthetic
gctgtaatagatcaggattttgg

SEQ ID NO: 14940 - DNA, 21 bp, Artificial Sequence
  Synthetic
atgctaaaggttttatccgtt

SEQ ID NO: 14941 - DNA, 18 bp, Artificial Sequence
  Synthetic
gcctgtggattttttggc

SEQ ID NO: 14942 - DNA, 18 bp, Artificial Sequence
  Synthetic
tgcatatagggaggctgc

SEQ ID NO: 14943 - DNA, 20 bp, Artificial Sequence
  Synthetic
tttagctgcttataacggca

SEQ ID NO: 14944 - DNA, 25 bp, Artificial Sequence
  Synthetic
gtgttctgtagaagattttaatgtg

SEQ ID NO: 14945 - DNA, 21 bp, Artificial Sequence
  Synthetic
ttgtgttataagtttggccat

SEQ ID NO: 14946 - DNA, 22 bp, Artificial Sequence
  Synthetic
aagggttctaacttagaggaag

SEQ ID NO: 14947 - DNA, 23 bp, Artificial Sequence
  Synthetic
ccctcctaagaatagttttgaag

SEQ ID NO: 14948 - DNA, 19 bp, Artificial Sequence
  Synthetic
cgatgattacgcaaaggac

SEQ ID NO: 14949 - DNA, 19 bp, Artificial Sequence
  Synthetic
tggcagcaaatactctgaa

SEQ ID NO: 14950 - DNA, 23 bp, Artificial Sequence
  Synthetic
ttttgtaaaaggttgtaacacac

SEQ ID NO: 14951 - DNA, 21 bp, Artificial Sequence
  Synthetic
tctgtttgtatatattgccgc

SEQ ID NO: 14952 - DNA, 23 bp, Artificial Sequence
  Synthetic
aagggcatttgatatttacaatg

SEQ ID NO: 14953 - DNA, 18 bp, Artificial Sequence
  Synthetic
ccctagttagcgctactg

SEQ ID NO: 14954 - DNA, 22 bp, Artificial Sequence
  Synthetic
attgtgatgaatatggatgtgg

SEQ ID NO: 14955 - DNA, 25 bp, Artificial Sequence
  Synthetic
agtattttgagatttatgatggtgg

SEQ ID NO: 14956 - DNA, 23 bp, Artificial Sequence
  Synthetic
aaatgtttgaaaagtatagcagc

SEQ ID NO: 14957 - DNA, 20 bp, Artificial Sequence
  Synthetic
gccaatgtatgtgccttaat

SEQ ID NO: 14958 - DNA, 21 bp, Artificial Sequence
  Synthetic
gttgggttgaacatgacataa

SEQ ID NO: 14959 - DNA, 21 bp, Artificial Sequence
  Synthetic
atcttggatagctacagtgtt

SEQ ID NO: 14960 - DNA, 25 bp, Artificial Sequence
  Synthetic
taatcgtatagctagttgtaaatgg

SEQ ID NO: 14961 - DNA, 22 bp, Artificial Sequence
  Synthetic
agctaatttaagtgctcctacg

SEQ ID NO: 14962 - DNA, 18 bp, Artificial Sequence
  Synthetic
tattgttccggccaaggt

SEQ ID NO: 14963 - DNA, 24 bp, Artificial Sequence
  Synthetic
taataagtttttgaaggctaaccc

SEQ ID NO: 14964 - DNA, 21 bp, Artificial Sequence
  Synthetic
ccttagataaagtgccacagg

SEQ ID NO: 14965 - DNA, 18 bp, Artificial Sequence
  Synthetic
gcgtgatagcattgggac

SEQ ID NO: 14966 - DNA, 18 bp, Artificial Sequence
  Synthetic
agttacatgggcagccaa

SEQ ID NO: 14967 - DNA, 23 bp, Artificial Sequence
  Synthetic
actttgtgttatgatattggcaa

SEQ ID NO: 14968 - DNA, 18 bp, Artificial Sequence
  Synthetic
ggcagcctttgagcattt

SEQ ID NO: 14969 - DNA, 22 bp, Artificial Sequence
  Synthetic
tcaagactggtcattatacagg

SEQ ID NO: 14970 - DNA, 22 bp, Artificial Sequence
  Synthetic
aattgaatgtcctttttgatgg

SEQ ID NO: 14971 - DNA, 23 bp, Artificial Sequence
  Synthetic
tattcagaagtatggtttggagg

SEQ ID NO: 14972 - DNA, 23 bp, Artificial Sequence
  Synthetic
gtaacgatgagaaagttatgact

SEQ ID NO: 14973 - DNA, 25 bp, Artificial Sequence
  Synthetic
acatacatttgtcatatgattcgag

SEQ ID NO: 14974 - DNA, 23 bp, Artificial Sequence
  Synthetic
aggtttacaatttcaaattctcg

SEQ ID NO: 14975 - DNA, 18 bp, Artificial Sequence
  Synthetic
gatgcagcactgtccatt

SEQ ID NO: 14976 - DNA, 20 bp, Artificial Sequence
  Synthetic
aggagttttcactttaccga

SEQ ID NO: 14977 - DNA, 21 bp, Artificial Sequence
  Synthetic
ccctctggtaattatttagcc

SEQ ID NO: 14978 - DNA, 24 bp, Artificial Sequence
  Synthetic
gtgagttccctgctataactatag

SEQ ID NO: 14979 - DNA, 24 bp, Artificial Sequence
  Synthetic
gtttaatgtttatttaggcatggc

SEQ ID NO: 14980 - DNA, 22 bp, Artificial Sequence
  Synthetic
cgtaaacctaatcttcccaatt

SEQ ID NO: 14981 - DNA, 21 bp, Artificial Sequence
  Synthetic
ctgctaatgtttctgttagca

SEQ ID NO: 14982 - DNA, 19 bp, Artificial Sequence
  Synthetic
acttataagtgcccccaaa

SEQ ID NO: 14983 - DNA, 23 bp, Artificial Sequence
  Synthetic
caaacagaacttttatgattcgt

SEQ ID NO: 14984 - DNA, 24 bp, Artificial Sequence
  Synthetic
accttcagagtttactataggtaa

SEQ ID NO: 14985 - DNA, 25 bp, Artificial Sequence
  Synthetic
gttgaggcttataataattgtacag

SEQ ID NO: 14986 - DNA, 25 bp, Artificial Sequence
  Synthetic
caagaaattctatctagacttgatg

SEQ ID NO: 14987 - DNA, 18 bp, Artificial Sequence
  Synthetic
tatgtcacagcgagggtt

SEQ ID NO: 14988 - DNA, 21 bp, Artificial Sequence
  Synthetic
tgttacattcttggacctaca

SEQ ID NO: 14989 - DNA, 22 bp, Artificial Sequence
  Synthetic
agacctgagaagaaatatctcc

SEQ ID NO: 14990 - DNA, 22 bp, Artificial Sequence
  Synthetic
attagaactggaagtttttgga

SEQ ID NO: 14991 - DNA, 18 bp, Artificial Sequence
  Synthetic
ccaaaagggttctggcat

SEQ ID NO: 14992 - DNA, 19 bp, Artificial Sequence
  Synthetic
gaacaggaccgcatgctaa

SEQ ID NO: 14993 - DNA, 18 bp, Artificial Sequence
  Synthetic
cgcgtagtagagccaatt

SEQ ID NO: 14994 - DNA, 19 bp, Artificial Sequence
  Synthetic
tatctgggaatcctgacga

SEQ ID NO: 14995 - DNA, 21 bp, Artificial Sequence
  Synthetic
atactgaagacacctcagaaa

SEQ ID NO: 14996 - DNA, 21 bp, Artificial Sequence
  Synthetic
aactgacatgactattgagga

SEQ ID NO: 14997 - DNA, 23 bp, Artificial Sequence
  Synthetic
ttttccaggacatactattgagg

SEQ ID NO: 14998 - DNA, 20 bp, Artificial Sequence
  Synthetic
ctgctttctttggcatgtcc

SEQ ID NO: 14999 - DNA, 21 bp, Artificial Sequence
  Synthetic
gctacctaactgaaatgactc

SEQ ID NO: 15000 - DNA, 19 bp, Artificial Sequence
  Synthetic
cttccaggacatactgacg

SEQ ID NO: 15001 - DNA, 20 bp, Artificial Sequence
  Synthetic
gatcactcccctgtgaggaa

SEQ ID NO: 15002 - DNA, 20 bp, Artificial Sequence
  Synthetic
aaagaaacaccatccgtcgc

SEQ ID NO: 15003 - DNA, 18 bp, Artificial Sequence
  Synthetic
ggaggtcccgcaatttgg

SEQ ID NO: 15004 - DNA, 18 bp, Artificial Sequence
  Synthetic
cattctgcacacacccgg

SEQ ID NO: 15005 - DNA, 19 bp, Artificial Sequence
  Synthetic
ggacatcgaatggcttggg

SEQ ID NO: 15006 - DNA, 18 bp, Artificial Sequence
  Synthetic
agctgcaagcccatcact

SEQ ID NO: 15007 - DNA, 17 bp, Artificial Sequence
  Synthetic
gcgtgccaacctacacc

SEQ ID NO: 15008 - DNA, 20 bp, Artificial Sequence
  Synthetic
tgaacatcgatttaccgccg

SEQ ID NO: 15009 - DNA, 19 bp, Artificial Sequence
  Synthetic
ccctttggctgatgctgat

SEQ ID NO: 15010 - DNA, 20 bp, Artificial Sequence
  Synthetic
acctatacgaccacctagcg

SEQ ID NO: 15011 - DNA, 20 bp, Artificial Sequence
  Synthetic
gagacaagaacgtggtgacc

SEQ ID NO: 15012 - DNA, 19 bp, Artificial Sequence
  Synthetic
gctcagtcctaggcctctc

SEQ ID NO: 15013 - DNA, 19 bp, Artificial Sequence
  Synthetic
ccacattaggcttcggctc

SEQ ID NO: 15014 - DNA, 20 bp, Artificial Sequence
  Synthetic
accttttccattgagacccg

SEQ ID NO: 15015 - DNA, 19 bp, Artificial Sequence
  Synthetic
agactaagcagcagggact

SEQ ID NO: 15016 - DNA, 18 bp, Artificial Sequence
  Synthetic
tcggctgcgttgtgattg

SEQ ID NO: 15017 - DNA, 17 bp, Artificial Sequence
  Synthetic
ttgcctggcaaccctgc

SEQ ID NO: 15018 - DNA, 19 bp, Artificial Sequence
  Synthetic
gcccgccatactatctccg

SEQ ID NO: 15019 - DNA, 18 bp, Artificial Sequence
  Synthetic
ccgacttcaaggcatggc

SEQ ID NO: 15020 - DNA, 18 bp, Artificial Sequence
  Synthetic
gggtgggggacttccatt

SEQ ID NO: 15021 - DNA, 19 bp, Artificial Sequence
  Synthetic
atccgccagccaactatca

SEQ ID NO: 15022 - DNA, 20 bp, Artificial Sequence
  Synthetic
tgtaccaccaactgtccatg

SEQ ID NO: 15023 - DNA, 19 bp, Artificial Sequence
  Synthetic
accgttagtgacagcgagg

SEQ ID NO: 15024 - DNA, 18 bp, Artificial Sequence
  Synthetic
tcactctgcccgatcgaa

SEQ ID NO: 15025 - DNA, 20 bp, Artificial Sequence
  Synthetic
cactgaacaggacatcaggg

SEQ ID NO: 15026 - DNA, 18 bp, Artificial Sequence
  Synthetic
caaaggccgcaaacctcc

SEQ ID NO: 15027 - DNA, 25 bp, Artificial Sequence
  Synthetic
aaagaactaagaaatctaatgtcgc

SEQ ID NO: 15028 - DNA, 18 bp, Artificial Sequence
  Synthetic
ggatcagaccgagtgatg

SEQ ID NO: 15029 - DNA, 21 bp, Artificial Sequence
  Synthetic
aagttgttttccctaacgaag

SEQ ID NO: 15030 - DNA, 22 bp, Artificial Sequence
  Synthetic
aatgatgatgttgatcaaagct

SEQ ID NO: 15031 - DNA, 18 bp, Artificial Sequence
  Synthetic
acaagcggatcatcagtc

SEQ ID NO: 15032 - DNA, 22 bp, Artificial Sequence
  Synthetic
gatctgaatttcgtcaataggg

SEQ ID NO: 15033 - DNA, 19 bp, Artificial Sequence
  Synthetic
attgaccggttcttgagag

SEQ ID NO: 15034 - DNA, 22 bp, Artificial Sequence
  Synthetic
tagtacctaaggccattagagg

SEQ ID NO: 15035 - DNA, 20 bp, Artificial Sequence
  Synthetic
ggcactttaaccgaagaccc

SEQ ID NO: 15036 - DNA, 20 bp, Artificial Sequence
  Synthetic
atgaaagccttaacaccggc

SEQ ID NO: 15037 - DNA, 20 bp, Artificial Sequence
  Synthetic
tccttaacaacaccaggcca

SEQ ID NO: 15038 - DNA, 16 bp, Artificial Sequence
  Synthetic
gcctgcaactggacgc

SEQ ID NO: 15039 - DNA, 20 bp, Artificial Sequence
  Synthetic
tactcaatgcagcatccctg

SEQ ID NO: 15040 - DNA, 20 bp, Artificial Sequence
  Synthetic
tgtgttgtacacccgactct

SEQ ID NO: 15041 - DNA, 17 bp, Artificial Sequence
  Synthetic
ctgcgagatctggccgt

SEQ ID NO: 15042 - DNA, 19 bp, Artificial Sequence
  Synthetic
caacgtgcatcaatggggt

SEQ ID NO: 15043 - DNA, 16 bp, Artificial Sequence
  Synthetic
ggtgtgcacccgtgga

SEQ ID NO: 15044 - DNA, 18 bp, Artificial Sequence
  Synthetic
gcagccccatcacgtact

SEQ ID NO: 15045 - DNA, 20 bp, Artificial Sequence
  Synthetic
tcaaagaagaagtgcgacga

SEQ ID NO: 15046 - DNA, 20 bp, Artificial Sequence
  Synthetic
tctacagatttgtggcaccg

SEQ ID NO: 15047 - DNA, 18 bp, Artificial Sequence
  Synthetic
ggccaacacccctgctat

SEQ ID NO: 15048 - DNA, 19 bp, Artificial Sequence
  Synthetic
aagggatgatgctcgctga

SEQ ID NO: 15049 - DNA, 16 bp, Artificial Sequence
  Synthetic
tgggcgctggcttagc

SEQ ID NO: 15050 - DNA, 19 bp, Artificial Sequence
  Synthetic
ggaaccatgtttcccccac

SEQ ID NO: 15051 - DNA, 20 bp, Artificial Sequence
  Synthetic
tggacatgtcaaaaacggga

SEQ ID NO: 15052 - DNA, 16 bp, Artificial Sequence
  Synthetic
tgctgcgggaggaggt

SEQ ID NO: 15053 - DNA, 17 bp, Artificial Sequence
  Synthetic
tcgatccgcttgtggca

SEQ ID NO: 15054 - DNA, 17 bp, Artificial Sequence
  Synthetic
ggcattacgggcgacaa

SEQ ID NO: 15055 - DNA, 20 bp, Artificial Sequence
  Synthetic
attaccaggacgtgctcaag

SEQ ID NO: 15056 - DNA, 18 bp, Artificial Sequence
  Synthetic
cctgagaaggggggtcgt

SEQ ID NO: 15057 - DNA, 19 bp, Artificial Sequence
  Synthetic
ttatgttgggggccctctt

SEQ ID NO: 15058 - DNA, 18 bp, Artificial Sequence
  Synthetic
gcgctggaaagagggtct

SEQ ID NO: 15059 - DNA, 20 bp, Artificial Sequence
  Synthetic
tgaaatcaatagggtggccg

SEQ ID NO: 15060 - DNA, 24 bp, Artificial Sequence
  Synthetic
cgaatggggtacatataaaacaag

SEQ ID NO: 15061 - DNA, 25 bp, Artificial Sequence
  Synthetic
tattcatattatgtagaaggtgtgg

SEQ ID NO: 15062 - DNA, 21 bp, Artificial Sequence
  Synthetic
ggatatccctgtatgcaatgt

SEQ ID NO: 15063 - DNA, 18 bp, Artificial Sequence
  Synthetic
atttcagccccgtgtgtg

SEQ ID NO: 15064 - DNA, 22 bp, Artificial Sequence
  Synthetic
gcataaagaccctaatacaacc

SEQ ID NO: 15065 - DNA, 22 bp, Artificial Sequence
  Synthetic
aggagtaccaaaaaaaagttgt

SEQ ID NO: 15066 - DNA, 19 bp, Artificial Sequence
  Synthetic
tgacaacacaaggagaacc

SEQ ID NO: 15067 - DNA, 22 bp, Artificial Sequence
  Synthetic
ttatgtgcagaactatagtgac

SEQ ID NO: 15068 - DNA, 19 bp, Artificial Sequence
  Synthetic
aaagcgacagcgactcgag

SEQ ID NO: 15069 - DNA, 22 bp, Artificial Sequence
  Synthetic
tggatttttacttgtgtcgact

SEQ ID NO: 15070 - DNA, 19 bp, Artificial Sequence
  Synthetic
ataggacctgcaaggcctc

SEQ ID NO: 15071 - DNA, 18 bp, Artificial Sequence
  Synthetic
agggtccaccatacctac

SEQ ID NO: 15072 - DNA, 20 bp, Artificial Sequence
  Synthetic
cccgggtacattactatcag

SEQ ID NO: 15073 - DNA, 18 bp, Artificial Sequence
  Synthetic
gcgctctagtgacaactt

SEQ ID NO: 15074 - DNA, 22 bp, Artificial Sequence
  Synthetic
ctattcaggatggtgatatggt

SEQ ID NO: 15075 - DNA, 22 bp, Artificial Sequence
  Synthetic
aggaatatgatttgcagttcat

SEQ ID NO: 15076 - DNA, 21 bp, Artificial Sequence
  Synthetic
tgttatgagcatgtatgtgtg

SEQ ID NO: 15077 - DNA, 18 bp, Artificial Sequence
  Synthetic
ctgaggaggaggagcaat

SEQ ID NO: 15078 - DNA, 20 bp, Artificial Sequence
  Synthetic
cactctggaggatttgtttg

SEQ ID NO: 15079 - DNA, 21 bp, Artificial Sequence
  Synthetic
tttcaaaaaacatggctacac

SEQ ID NO: 15080 - DNA, 20 bp, Artificial Sequence
  Synthetic
tctagttctaccaggcagcc

SEQ ID NO: 15081 - DNA, 18 bp, Artificial Sequence
  Synthetic
acgaaccaccgagacaga

SEQ ID NO: 15082 - DNA, 18 bp, Artificial Sequence
  Synthetic
atttgggcaacttgggta

SEQ ID NO: 15083 - DNA, 20 bp, Artificial Sequence
  Synthetic
gagctcttcaattgttcctt

SEQ ID NO: 15084 - DNA, 19 bp, Artificial Sequence
  Synthetic
attttgtaaggcaaccgtc

SEQ ID NO: 15085 - DNA, 21 bp, Artificial Sequence
  Synthetic
acattggcctctaatattcct

SEQ ID NO: 15086 - DNA, 22 bp, Artificial Sequence
  Synthetic
aatcgtggaaagttatatctgc

SEQ ID NO: 15087 - DNA, 24 bp, Artificial Sequence
  Synthetic
gttggtttggaaattgataggatt

SEQ ID NO: 15088 - DNA, 20 bp, Artificial Sequence
  Synthetic
aaaggtttgcgaaaatgtcc

SEQ ID NO: 15089 - DNA, 19 bp, Artificial Sequence
  Synthetic
tttacgcgaggcactttta

SEQ ID NO: 15090 - DNA, 18 bp, Artificial Sequence
  Synthetic
atgctgccttttaagcca

SEQ ID NO: 15091 - DNA, 20 bp, Artificial Sequence
  Synthetic
actaaagcagctgttaaggg

SEQ ID NO: 15092 - DNA, 20 bp, Artificial Sequence
  Synthetic
ttcaatagcagcagttacct

SEQ ID NO: 15093 - DNA, 23 bp, Artificial Sequence
  Synthetic
aataccaagagaatctacttgga

SEQ ID NO: 15094 - DNA, 19 bp, Artificial Sequence
  Synthetic
atgattgtagcttgcagga

SEQ ID NO: 15095 - DNA, 18 bp, Artificial Sequence
  Synthetic
tatgggacggagaagagg

SEQ ID NO: 15096 - DNA, 18 bp, Artificial Sequence
  Synthetic
gccaacttttatccccca

SEQ ID NO: 15097 - DNA, 22 bp, Artificial Sequence
  Synthetic
gaagttataatgggagccaatg

SEQ ID NO: 15098 - DNA, 20 bp, Artificial Sequence
  Synthetic
ggtcagtacagtggatttgc

SEQ ID NO: 15099 - DNA, 18 bp, Artificial Sequence
  Synthetic
atggggaatgcagtactg

SEQ ID NO: 15100 - DNA, 22 bp, Artificial Sequence
  Synthetic
gtctatcagcttacgatctctt

SEQ ID NO: 15101 - DNA, 18 bp, Artificial Sequence
  Synthetic
gttatgcccctctactgg

SEQ ID NO: 15102 - DNA, 25 bp, Artificial Sequence
  Synthetic
gataattgtgatttttatggttggg

SEQ ID NO: 15103 - DNA, 22 bp, Artificial Sequence
  Synthetic
ttatgttcaatgtaagtgtggt

SEQ ID NO: 15104 - DNA, 21 bp, Artificial Sequence
  Synthetic
tgagtattgtcaaccacctaa

SEQ ID NO: 15105 - DNA, 21 bp, Artificial Sequence
  Synthetic
acctcaattgtatggtttgtg

SEQ ID NO: 15106 - DNA, 23 bp, Artificial Sequence
  Synthetic
cggtccatttttttcttttgaac

SEQ ID NO: 15107 - DNA, 21 bp, Artificial Sequence
  Synthetic
ttggtacattagcaaagactg

SEQ ID NO: 15108 - DNA, 23 bp, Artificial Sequence
  Synthetic
ttaaaccatttgctaaagttgac

SEQ ID NO: 15109 - DNA, 23 bp, Artificial Sequence
  Synthetic
cggttttatatagttgttactgc

SEQ ID NO: 15110 - DNA, 20 bp, Artificial Sequence
  Synthetic
gggtgtgcaattagaaaagg

SEQ ID NO: 15111 - DNA, 25 bp, Artificial Sequence
  Synthetic
ctttgtgtactatgtttaaaagagg

SEQ ID NO: 15112 - DNA, 19 bp, Artificial Sequence
  Synthetic
taatgtctggtcggatgag

SEQ ID NO: 15113 - DNA, 22 bp, Artificial Sequence
  Synthetic
ttatggtccatatagagatgct

SEQ ID NO: 15114 - DNA, 21 bp, Artificial Sequence
  Synthetic
tgtatgaacgtgataaagctg

SEQ ID NO: 15115 - DNA, 20 bp, Artificial Sequence
  Synthetic
atcatgctggtactggtatg

SEQ ID NO: 15116 - DNA, 21 bp, Artificial Sequence
  Synthetic
tactgtcatttttgcagacac

SEQ ID NO: 15117 - DNA, 21 bp, Artificial Sequence
  Synthetic
ccgtttgttgtttctattggt

SEQ ID NO: 15118 - DNA, 22 bp, Artificial Sequence
  Synthetic
aagccagactttattatgaggc

SEQ ID NO: 15119 - DNA, 19 bp, Artificial Sequence
  Synthetic
cctgttcttatgggttggg

SEQ ID NO: 15120 - DNA, 24 bp, Artificial Sequence
  Synthetic
tccagatccttctagaattttagg

SEQ ID NO: 15121 - DNA, 18 bp, Artificial Sequence
  Synthetic
aatcttgcacgggttcac

SEQ ID NO: 15122 - DNA, 18 bp, Artificial Sequence
  Synthetic
gtgcacctacacttgtcc

SEQ ID NO: 15123 - DNA, 18 bp, Artificial Sequence
  Synthetic
tgttagaggttgggttgg

SEQ ID NO: 15124 - DNA, 18 bp, Artificial Sequence
  Synthetic
ggttattgcagcgtgtca

SEQ ID NO: 15125 - DNA, 25 bp, Artificial Sequence
  Synthetic
ccttttttctattattcagatacgc

SEQ ID NO: 15126 - DNA, 25 bp, Artificial Sequence
  Synthetic
agtaggttatcaatgattaaaggtc

SEQ ID NO: 15127 - DNA, 20 bp, Artificial Sequence
  Synthetic
acaggctgtatgatgaatgt

SEQ ID NO: 15128 - DNA, 20 bp, Artificial Sequence
  Synthetic
aaccttcttttgcttcaagt

SEQ ID NO: 15129 - DNA, 24 bp, Artificial Sequence
  Synthetic
ctgattattctgtttcttcttgtg

SEQ ID NO: 15130 - DNA, 25 bp, Artificial Sequence
  Synthetic
ttacaagaaattttatctcgtctcg

SEQ ID NO: 15131 - DNA, 22 bp, Artificial Sequence
  Synthetic
attgatatgaaaggcaagatgt

SEQ ID NO: 15132 - DNA, 19 bp, Artificial Sequence
  Synthetic
cggtcattatgctggaagt

SEQ ID NO: 15133 - DNA, 22 bp, Artificial Sequence
  Synthetic
gtaaagattctaaacctcagca

SEQ ID NO: 15134 - DNA, 21 bp, Artificial Sequence
  Synthetic
cagaacactgattctgattcg

SEQ ID NO: 15135 - DNA, 19 bp, Artificial Sequence
  Synthetic
agattttgtgcgacaatgc

SEQ ID NO: 15136 - DNA, 18 bp, Artificial Sequence
  Synthetic
gaaagcagggctaggatt

SEQ ID NO: 15137 - DNA, 20 bp, Artificial Sequence
  Synthetic
atgtccaaagaagtgaatgc

SEQ ID NO: 15138 - DNA, 20 bp, Artificial Sequence
  Synthetic
tggaagcaagtattgtcaga

SEQ ID NO: 15139 - DNA, 21 bp, Artificial Sequence
  Synthetic
gatagagctcgatgaaattgg

SEQ ID NO: 15140 - DNA, 21 bp, Artificial Sequence
  Synthetic
cacagatgtggtaaactttgt

SEQ ID NO: 15141 - DNA, 19 bp, Artificial Sequence
  Synthetic
tcgagagcatgattgaagc

SEQ ID NO: 15142 - DNA, 18 bp, Artificial Sequence
  Synthetic
gaaactggtggagaacgc

SEQ ID NO: 15143 - DNA, 20 bp, Artificial Sequence
  Synthetic
gggacaatggtaatggaact

SEQ ID NO: 15144 - DNA, 20 bp, Artificial Sequence
  Synthetic
agcagaaatcctgggaatgc

SEQ ID NO: 15145 - DNA, 18 bp, Artificial Sequence
  Synthetic
catgccattctgcagcat

SEQ ID NO: 15146 - DNA, 23 bp, Artificial Sequence
  Synthetic
gatacttattgctttgattgctc

SEQ ID NO: 15147 - DNA, 19 bp, Artificial Sequence
  Synthetic
tctcaaggtccgttccaga

SEQ ID NO: 15148 - DNA, 18 bp, Artificial Sequence
  Synthetic
gggcaggaactagatcag

SEQ ID NO: 15149 - DNA, 20 bp, Artificial Sequence
  Synthetic
ctttaccaaaaggcacatca

SEQ ID NO: 15150 - DNA, 23 bp, Artificial Sequence
  Synthetic
ctggtggttcattaggatatagg

SEQ ID NO: 15151 - DNA, 19 bp, Artificial Sequence
  Synthetic
ggtgattcaatagggggga

SEQ ID NO: 15152 - DNA, 19 bp, Artificial Sequence
  Synthetic
ggactcaggatttggtcag

SEQ ID NO: 15153 - DNA, 21 bp, Artificial Sequence
  Synthetic
ccaatgaagattttgctgaca

SEQ ID NO: 15154 - DNA, 18 bp, Artificial Sequence
  Synthetic
cagaacagcggatggatt

SEQ ID NO: 15155 - DNA, 20 bp, Artificial Sequence
  Synthetic
gcaggaagacagatctagtg

SEQ ID NO: 15156 - DNA, 21 bp, Artificial Sequence
  Synthetic
atgtaaggtaaagcttgaacc

SEQ ID NO: 15157 - DNA, 23 bp, Artificial Sequence
  Synthetic
aacggttttcttcagatttaagc

SEQ ID NO: 15158 - DNA, 25 bp, Artificial Sequence
  Synthetic
tgtcataatacactataaaaggctg

SEQ ID NO: 15159 - DNA, 22 bp, Artificial Sequence
  Synthetic
aaaggcaatgaaagaatatggg

SEQ ID NO: 15160 - DNA, 23 bp, Artificial Sequence
  Synthetic
tggtgaacagtatatgtaacaca

SEQ ID NO: 15161 - DNA, 25 bp, Artificial Sequence
  Synthetic
cttttcactataagacaagaaatgg

SEQ ID NO: 15162 - DNA, 20 bp, Artificial Sequence
  Synthetic
agatcccaaggacaaagaac

SEQ ID NO: 15163 - DNA, 23 bp, Artificial Sequence
  Synthetic
tgatgaaataggagaagatgttg

SEQ ID NO: 15164 - DNA, 23 bp, Artificial Sequence
  Synthetic
tgaactttgtaagtatggagttc

SEQ ID NO: 15165 - DNA, 19 bp, Artificial Sequence
  Synthetic
ttgagagcatgattgaggc

SEQ ID NO: 15166 - DNA, 19 bp, Artificial Sequence
  Synthetic
cgataacctcgtttcaggt

SEQ ID NO: 15167 - DNA, 21 bp, Artificial Sequence
  Synthetic
ggtatatcaccgatatgagca

SEQ ID NO: 15168 - DNA, 22 bp, Artificial Sequence
  Synthetic
ttacagaggatgtcaaaaatgc

SEQ ID NO: 15169 - DNA, 24 bp, Artificial Sequence
  Synthetic
gtaatggaatcaatggataaggaa

SEQ ID NO: 15170 - DNA, 18 bp, Artificial Sequence
  Synthetic
aggattcgtgcactttgt

SEQ ID NO: 15171 - DNA, 25 bp, Artificial Sequence
  Synthetic
ttaggagtctcaatcttaaatcttg

SEQ ID NO: 15172 - DNA, 18 bp, Artificial Sequence
  Synthetic
tagccaacttcagcatgg

SEQ ID NO: 15173 - DNA, 19 bp, Artificial Sequence
  Synthetic
attcccaagagaaatcgct

SEQ ID NO: 15174 - DNA, 24 bp, Artificial Sequence
  Synthetic
gaaatcggtgcatatatataaccc

SEQ ID NO: 15175 - DNA, 18 bp, Artificial Sequence
  Synthetic
ccgcagagaaacacaagt

SEQ ID NO: 15176 - DNA, 25 bp, Artificial Sequence
  Synthetic
ctagtaatacaaattatatgcaggc

SEQ ID NO: 15177 - DNA, 23 bp, Artificial Sequence
  Synthetic
gcactatattggtataggacagg

SEQ ID NO: 15178 - DNA, 25 bp, Artificial Sequence
  Synthetic
gtagggtaacagtatttacatttcc

SEQ ID NO: 15179 - DNA, 25 bp, Artificial Sequence
  Synthetic
gtctggaaaatgcaatatattatgc

SEQ ID NO: 15180 - DNA, 25 bp, Artificial Sequence
  Synthetic
tacaatgttctgaatctatgtacag

SEQ ID NO: 15181 - DNA, 19 bp, Artificial Sequence
  Synthetic
gtggcagacctaatactgt

SEQ ID NO: 15182 - DNA, 18 bp, Artificial Sequence
  Synthetic
tgcatttaccgacccttc

SEQ ID NO: 15183 - DNA, 25 bp, Artificial Sequence
  Synthetic
atagacactacattaaccttttcac

SEQ ID NO: 15184 - DNA, 18 bp, Artificial Sequence
  Synthetic
cgcaagcaagacattcct

SEQ ID NO: 15185 - DNA, 19 bp, Artificial Sequence
  Synthetic
cccatgttgctacttctgt

SEQ ID NO: 15186 - DNA, 21 bp, Artificial Sequence
  Synthetic
aggttcccttagacatttgtc

SEQ ID NO: 15187 - DNA, 20 bp, Artificial Sequence
  Synthetic
ggcacatatatgggaaagac

SEQ ID NO: 15188 - DNA, 20 bp, Artificial Sequence
  Synthetic
gtggtcaagtactagttgcc

SEQ ID NO: 15189 - DNA, 20 bp, Artificial Sequence
  Synthetic
actggaactgctaagcatat

SEQ ID NO: 15190 - DNA, 21 bp, Artificial Sequence
  Synthetic
gagtcaagggattctcatacc

SEQ ID NO: 15191 - DNA, 19 bp, Artificial Sequence
  Synthetic
agatctaatgtcgcagtcc

SEQ ID NO: 15192 - DNA, 18 bp, Artificial Sequence
  Synthetic
gtatcacctctggccgta

SEQ ID NO: 15193 - DNA, 25 bp, Artificial Sequence
  Synthetic
ataacaaaagagaagaaagaagagc

SEQ ID NO: 15194 - DNA, 21 bp, Artificial Sequence
  Synthetic
agtttgattatcgctgctaga

SEQ ID NO: 15195 - DNA, 21 bp, Artificial Sequence
  Synthetic
aagaagaagaagtgctaacgg

SEQ ID NO: 15196 - DNA, 20 bp, Artificial Sequence
  Synthetic
gaacgtactattgtctcccg

SEQ ID NO: 15197 - DNA, 18 bp, Artificial Sequence
  Synthetic
ggacactgttccagcaaa

SEQ ID NO: 15198 - DNA, 18 bp, Artificial Sequence
  Synthetic
gatgaaggcacatctggg

SEQ ID NO: 15199 - DNA, 18 bp, Artificial Sequence
  Synthetic
atttgtgaccgggagaga

SEQ ID NO: 15200 - DNA, 22 bp, Artificial Sequence
  Synthetic
ttaagcaatgaatctctgtcac

SEQ ID NO: 15201 - DNA, 18 bp, Artificial Sequence
  Synthetic
ggatcgctcatttgcaga

SEQ ID NO: 15202 - DNA, 19 bp, Artificial Sequence
  Synthetic
acaacaaggagaacgttcc

SEQ ID NO: 15203 - DNA, 19 bp, Artificial Sequence
  Synthetic
tttgggaattggatctggg

SEQ ID NO: 15204 - DNA, 23 bp, Artificial Sequence
  Synthetic
tttagattttgtagctcctgatg

SEQ ID NO: 15205 - DNA, 19 bp, Artificial Sequence
  Synthetic
aatttgaaaatgccgccta

SEQ ID NO: 15206 - DNA, 21 bp, Artificial Sequence
  Synthetic
agaattgcagactatagctgg

SEQ ID NO: 15207 - DNA, 23 bp, Artificial Sequence
  Synthetic
tatcaggtgtagaaattaaacgt

SEQ ID NO: 15208 - DNA, 22 bp, Artificial Sequence
  Synthetic
taatagccctattcaggatggt

SEQ ID NO: 15209 - DNA, 25 bp, Artificial Sequence
  Synthetic
ttcattaacctgctatgtatttgtc

SEQ ID NO: 15210 - DNA, 19 bp, Artificial Sequence
  Synthetic
gtggtgacagattgcaagt

SEQ ID NO: 15211 - DNA, 18 bp, Artificial Sequence
  Synthetic
aggtggaaaaggtagcgt

SEQ ID NO: 15212 - DNA, 25 bp, Artificial Sequence
  Synthetic
atgtagagatactgtacaaaaactg

SEQ ID NO: 15213 - DNA, 22 bp, Artificial Sequence
  Synthetic
ccactaacagatgctaaattgg

SEQ ID NO: 15214 - DNA, 20 bp, Artificial Sequence
  Synthetic
ccaaatacaacactgggatc

SEQ ID NO: 15215 - DNA, 25 bp, Artificial Sequence
  Synthetic
atatattatcaagatgcagatgagc

SEQ ID NO: 15216 - DNA, 21 bp, Artificial Sequence
  Synthetic
cattgaaatgttggaggtaca

SEQ ID NO: 15217 - DNA, 19 bp, Artificial Sequence
  Synthetic
actttgggggtctgggtat

SEQ ID NO: 15218 - DNA, 18 bp, Artificial Sequence
  Synthetic
aaagggtctctgtaggca

SEQ ID NO: 15219 - DNA, 21 bp, Artificial Sequence
  Synthetic
ctgaaggccacattagactaa

SEQ ID NO: 15220 - DNA, 25 bp, Artificial Sequence
  Synthetic
actacattttatttacatcctggac

SEQ ID NO: 15221 - DNA, 21 bp, Artificial Sequence
  Synthetic
gacaaagtgtctctatggacc

SEQ ID NO: 15222 - DNA, 23 bp, Artificial Sequence
  Synthetic
attacattggttgataacacaca

SEQ ID NO: 15223 - DNA, 20 bp, Artificial Sequence
  Synthetic
tacagaacgtttgtcctctg

SEQ ID NO: 15224 - DNA, 21 bp, Artificial Sequence
  Synthetic
tcaacaacaagattactcagc

SEQ ID NO: 15225 - DNA, 21 bp, Artificial Sequence
  Synthetic
tttacctgtcagtcttttagc

SEQ ID NO: 15226 - DNA, 18 bp, Artificial Sequence
  Synthetic
ctgtttgaggtgctccag

SEQ ID NO: 15227 - DNA, 25 bp, Artificial Sequence
  Synthetic
gttaactaaaacacctttgaaaagc

SEQ ID NO: 15228 - DNA, 22 bp, Artificial Sequence
  Synthetic
aaagaatactttggtgtagcat

SEQ ID NO: 15229 - DNA, 24 bp, Artificial Sequence
  Synthetic
atggaaatagagcatattttctcc

SEQ ID NO: 15230 - DNA, 20 bp, Artificial Sequence
  Synthetic
tctctagctctaccacgtcg

SEQ ID NO: 15231 - DNA, 18 bp, Artificial Sequence
  Synthetic
cagatgtggtcggtgttg

SEQ ID NO: 15232 - DNA, 19 bp, Artificial Sequence
  Synthetic
aggccctattaatcagcct

SEQ ID NO: 15233 - DNA, 18 bp, Artificial Sequence
  Synthetic
gccagaccaggattttgc

SEQ ID NO: 15234 - DNA, 24 bp, Artificial Sequence
  Synthetic
aatacctgacaatatactagagga

SEQ ID NO: 15235 - DNA, 24 bp, Artificial Sequence
  Synthetic
tatggcagtagatgtttatgatga

SEQ ID NO: 15236 - DNA, 23 bp, Artificial Sequence
  Synthetic
gtagtggaaatcagtttagagtt

SEQ ID NO: 15237 - DNA, 20 bp, Artificial Sequence
  Synthetic
ccgcatatcctttaaagcag

SEQ ID NO: 15238 - DNA, 21 bp, Artificial Sequence
  Synthetic
ggggtctacatttttgtctac

SEQ ID NO: 15239 - DNA, 18 bp, Artificial Sequence
  Synthetic
ccgcggaaatccagcaat

SEQ ID NO: 15240 - DNA, 19 bp, Artificial Sequence
  Synthetic
aacatgtacccggcagtcc

SEQ ID NO: 15241 - DNA, 20 bp, Artificial Sequence
  Synthetic
tccactaaccatccttttgc

SEQ ID NO: 15242 - DNA, 20 bp, Artificial Sequence
  Synthetic
ggggggactttatgtgaccc

SEQ ID NO: 15243 - DNA, 16 bp, Artificial Sequence
  Synthetic
gtcgctgactccgcca

SEQ ID NO: 15244 - DNA, 16 bp, Artificial Sequence
  Synthetic
tccaaggactcgggcc

SEQ ID NO: 15245 - DNA, 18 bp, Artificial Sequence
  Synthetic
gccacttcctgggtcatg

SEQ ID NO: 15246 - DNA, 18 bp, Artificial Sequence
  Synthetic
caatccaacacgaggcaa

SEQ ID NO: 15247 - DNA, 16 bp, Artificial Sequence
  Synthetic
tatgcgccgaggcctt

SEQ ID NO: 15248 - DNA, 19 bp, Artificial Sequence
  Synthetic
cgagttacgctccttggag

SEQ ID NO: 15249 - DNA, 18 bp, Artificial Sequence
  Synthetic
aagctgtgtgacggtccc

SEQ ID NO: 15250 - DNA, 19 bp, Artificial Sequence
  Synthetic
cgatcgtaagccgcaatgt

SEQ ID NO: 15251 - DNA, 19 bp, Artificial Sequence
  Synthetic
cctgagaggaggcttgtgt

SEQ ID NO: 15252 - DNA, 16 bp, Artificial Sequence
  Synthetic
ctcgtttcggccccga

SEQ ID NO: 15253 - DNA, 20 bp, Artificial Sequence
  Synthetic
gagtccgacaggaggtctcc

SEQ ID NO: 15254 - DNA, 18 bp, Artificial Sequence
  Synthetic
tgtagttgagcggctcct

SEQ ID NO: 15255 - DNA, 17 bp, Artificial Sequence
  Synthetic
ttcgtcgcgtgacctgg

SEQ ID NO: 15256 - DNA, 19 bp, Artificial Sequence
  Synthetic
gggtgttccagtcatcggg

SEQ ID NO: 15257 - DNA, 20 bp, Artificial Sequence
  Synthetic
tttcagccagcatcttagca

SEQ ID NO: 15258 - DNA, 16 bp, Artificial Sequence
  Synthetic
acgcagttgctgacgc

SEQ ID NO: 15259 - DNA, 16 bp, Artificial Sequence
  Synthetic
gggcgtttgtcccacg

SEQ ID NO: 15260 - DNA, 18 bp, Artificial Sequence
  Synthetic
gcggggggaggatgaaac

SEQ ID NO: 15261 - DNA, 18 bp, Artificial Sequence
  Synthetic
cctttatgcgctttgccg

SEQ ID NO: 15262 - DNA, 20 bp, Artificial Sequence
  Synthetic
ttctctatcgtcaactgcgc

SEQ ID NO: 15263 - DNA, 18 bp, Artificial Sequence
  Synthetic
ccaacatctgcctcccgc

SEQ ID NO: 15264 - DNA, 17 bp, Artificial Sequence
  Synthetic
gagtcccgctgagcaga

SEQ ID NO: 15265 - DNA, 16 bp, Artificial Sequence
  Synthetic
ccgttgaggcccacgt

SEQ ID NO: 15266 - DNA, 18 bp, Artificial Sequence
  Synthetic
caaggccagagacaccct

SEQ ID NO: 15267 - DNA, 16 bp, Artificial Sequence
  Synthetic
acgtgtctgggaggcg

SEQ ID NO: 15268 - DNA, 19 bp, Artificial Sequence
  Synthetic
aaaagcctcggtctgctcc

SEQ ID NO: 15269 - DNA, 18 bp, Artificial Sequence
  Synthetic
gaactgggcctcgtggga

SEQ ID NO: 15270 - DNA, 17 bp, Artificial Sequence
  Synthetic
acgagagaacccgccac

SEQ ID NO: 15271 - DNA, 18 bp, Artificial Sequence
  Synthetic
gatctcggccgttgtctc

SEQ ID NO: 15272 - DNA, 18 bp, Artificial Sequence
  Synthetic
ggggggtggcatatctga

SEQ ID NO: 15273 - DNA, 16 bp, Artificial Sequence
  Synthetic
ctggctcgcctggagt

SEQ ID NO: 15274 - DNA, 16 bp, Artificial Sequence
  Synthetic
gtcatgtcgggggcct

SEQ ID NO: 15275 - DNA, 19 bp, Artificial Sequence
  Synthetic
attggtttcagcaatcgga

SEQ ID NO: 15276 - DNA, 18 bp, Artificial Sequence
  Synthetic
caggcagcgtcttcagga

SEQ ID NO: 15277 - DNA, 16 bp, Artificial Sequence
  Synthetic
cgggcttcaggggcat

SEQ ID NO: 15278 - DNA, 19 bp, Artificial Sequence
  Synthetic
tgtcgctgcagtactacga

SEQ ID NO: 15279 - DNA, 18 bp, Artificial Sequence
  Synthetic
ggaagaggacgaggacga

SEQ ID NO: 15280 - DNA, 18 bp, Artificial Sequence
  Synthetic
cggggtcgaggaggtagt

SEQ ID NO: 15281 - DNA, 20 bp, Artificial Sequence
  Synthetic
gaggttcagggacttgtcct

SEQ ID NO: 15282 - DNA, 17 bp, Artificial Sequence
  Synthetic
ccatagctgcccctggt

SEQ ID NO: 15283 - DNA, 18 bp, Artificial Sequence
  Synthetic
ccatgactgctgacccgc

SEQ ID NO: 15284 - DNA, 17 bp, Artificial Sequence
  Synthetic
catccggcaagcaccat

SEQ ID NO: 15285 - DNA, 20 bp, Artificial Sequence
  Synthetic
ttcgtgccaaaccaaaaagg

SEQ ID NO: 15286 - DNA, 18 bp, Artificial Sequence
  Synthetic
tcctctgaaggatgggcg

SEQ ID NO: 15287 - DNA, 19 bp, Artificial Sequence
  Synthetic
atcaacaggtgggggttgt

SEQ ID NO: 15288 - DNA, 19 bp, Artificial Sequence
  Synthetic
gtagcagaatagggcccct

SEQ ID NO: 15289 - DNA, 16 bp, Artificial Sequence
  Synthetic
tgcccatacctgcggg

SEQ ID NO: 15290 - DNA, 16 bp, Artificial Sequence
  Synthetic
tggccaggtggacgca

SEQ ID NO: 15291 - DNA, 18 bp, Artificial Sequence
  Synthetic
agaccctcgtgagacccg

SEQ ID NO: 15292 - DNA, 18 bp, Artificial Sequence
  Synthetic
tgtcggatctcggtccag

SEQ ID NO: 15293 - DNA, 17 bp, Artificial Sequence
  Synthetic
gtagcctgagccgcact

SEQ ID NO: 15294 - DNA, 20 bp, Artificial Sequence
  Synthetic
cctaacagggtcatcgtcct

SEQ ID NO: 15295 - DNA, 18 bp, Artificial Sequence
  Synthetic
agccggtcaacacgacat

SEQ ID NO: 15296 - DNA, 17 bp, Artificial Sequence
  Synthetic
caccagcccgttcacca

SEQ ID NO: 15297 - DNA, 18 bp, Artificial Sequence
  Synthetic
gcagaacgttgtcggtga

SEQ ID NO: 15298 - DNA, 18 bp, Artificial Sequence
  Synthetic
aagcggggtcttttggac

SEQ ID NO: 15299 - DNA, 20 bp, Artificial Sequence
  Synthetic
cgggacagattgtcttccac

SEQ ID NO: 15300 - DNA, 18 bp, Artificial Sequence
  Synthetic
cccccttttccgcatcag

SEQ ID NO: 15301 - DNA, 18 bp, Artificial Sequence
  Synthetic
attgccaaaacaacgtgt

SEQ ID NO: 15302 - DNA, 16 bp, Artificial Sequence
  Synthetic
ggcggtggacagcagt

SEQ ID NO: 15303 - DNA, 19 bp, Artificial Sequence
  Synthetic
caaaagaccctccccacct

SEQ ID NO: 15304 - DNA, 17 bp, Artificial Sequence
  Synthetic
taccacccccacccaca

SEQ ID NO: 15305 - DNA, 18 bp, Artificial Sequence
  Synthetic
cgggaggacaccaaccct

SEQ ID NO: 15306 - DNA, 18 bp, Artificial Sequence
  Synthetic
ttctggagtgcctttcgc

SEQ ID NO: 15307 - DNA, 19 bp, Artificial Sequence
  Synthetic
aggaaggcgctgtaggatt

SEQ ID NO: 15308 - DNA, 18 bp, Artificial Sequence
  Synthetic
tttctcgcccccttcact

SEQ ID NO: 15309 - DNA, 17 bp, Artificial Sequence
  Synthetic
ggtgatgcggaccttgg

SEQ ID NO: 15310 - DNA, 16 bp, Artificial Sequence
  Synthetic
ccttgccgtgccctct

SEQ ID NO: 15311 - DNA, 20 bp, Artificial Sequence
  Synthetic
ctggccatatcagggaagtc

SEQ ID NO: 15312 - DNA, 20 bp, Artificial Sequence
  Synthetic
cagggtctgggtaaacaggt

SEQ ID NO: 15313 - DNA, 16 bp, Artificial Sequence
  Synthetic
ccagcctgccggactt

SEQ ID NO: 15314 - DNA, 16 bp, Artificial Sequence
  Synthetic
gtcggcaaacaggggc

SEQ ID NO: 15315 - DNA, 20 bp, Artificial Sequence
  Synthetic
cacctccttgtcgtagagcg

SEQ ID NO: 15316 - DNA, 18 bp, Artificial Sequence
  Synthetic
cctgtgcagagccttgac

SEQ ID NO: 15317 - DNA, 17 bp, Artificial Sequence
  Synthetic
cacgtcacggggaactg

SEQ ID NO: 15318 - DNA, 16 bp, Artificial Sequence
  Synthetic
ctgagccgcgaccagt

SEQ ID NO: 15319 - DNA, 20 bp, Artificial Sequence
  Synthetic
gcaaaggcaggtctttctca

SEQ ID NO: 15320 - DNA, 16 bp, Artificial Sequence
  Synthetic
ggctgaccccggcaaa

SEQ ID NO: 15321 - DNA, 18 bp, Artificial Sequence
  Synthetic
gttttccgtttgctgcat

SEQ ID NO: 15322 - DNA, 20 bp, Artificial Sequence
  Synthetic
aaagacattgtcctgcagct

SEQ ID NO: 15323 - DNA, 22 bp, Artificial Sequence
  Synthetic
tgttaaactccagtaatcgaag

SEQ ID NO: 15324 - DNA, 22 bp, Artificial Sequence
  Synthetic
gtgtgctaaaaacagagatacc

SEQ ID NO: 15325 - DNA, 22 bp, Artificial Sequence
  Synthetic
tggctgatgtagatagtaatgc

SEQ ID NO: 15326 - DNA, 22 bp, Artificial Sequence
  Synthetic
tgtttagtattttatgggcctg

SEQ ID NO: 15327 - DNA, 25 bp, Artificial Sequence
  Synthetic
agaactgtatgaaaaagatagtgac

SEQ ID NO: 15328 - DNA, 19 bp, Artificial Sequence
  Synthetic
tatagcaacgaacgatgga

SEQ ID NO: 15329 - DNA, 20 bp, Artificial Sequence
  Synthetic
gtacatgtgggttcaagggt

SEQ ID NO: 15330 - DNA, 19 bp, Artificial Sequence
  Synthetic
atgatagtgtggaacagcg

SEQ ID NO: 15331 - DNA, 24 bp, Artificial Sequence
  Synthetic
gtttctagcactatatatacaggc

SEQ ID NO: 15332 - DNA, 18 bp, Artificial Sequence
  Synthetic
ggagcagatgttccagtg

SEQ ID NO: 15333 - DNA, 25 bp, Artificial Sequence
  Synthetic
atgctggtagttctagattacttac

SEQ ID NO: 15334 - DNA, 18 bp, Artificial Sequence
  Synthetic
cggacagcctttaggaat

SEQ ID NO: 15335 - DNA, 18 bp, Artificial Sequence
  Synthetic
cacaggttttggggcaat

SEQ ID NO: 15336 - DNA, 19 bp, Artificial Sequence
  Synthetic
tctttatgcatccacacct

SEQ ID NO: 15337 - DNA, 20 bp, Artificial Sequence
  Synthetic
catggatgctacattactgg

SEQ ID NO: 15338 - DNA, 20 bp, Artificial Sequence
  Synthetic
tgcgtgtcatgtatgtgtgt

SEQ ID NO: 15339 - DNA, 18 bp, Artificial Sequence
  Synthetic
tgcctggcagttatttgg

SEQ ID NO: 15340 - DNA, 25 bp, Artificial Sequence
  Synthetic
gtttctggtattgttagaaagatgg

SEQ ID NO: 15341 - DNA, 20 bp, Artificial Sequence
  Synthetic
gcctactgctgaaaatttgg

SEQ ID NO: 15342 - DNA, 18 bp, Artificial Sequence
  Synthetic
acgatgcttcacagggaa

SEQ ID NO: 15343 - DNA, 25 bp, Artificial Sequence
  Synthetic
actgtaggattatatgctttaatgc

SEQ ID NO: 15344 - DNA, 25 bp, Artificial Sequence
  Synthetic
caaagcaataatcaagctaaacatg

SEQ ID NO: 15345 - DNA, 18 bp, Artificial Sequence
  Synthetic
cgtatgcagcagaaacct

SEQ ID NO: 15346 - DNA, 18 bp, Artificial Sequence
  Synthetic
cgccacaccttccacatc

SEQ ID NO: 15347 - DNA, 23 bp, Artificial Sequence
  Synthetic
atttggcagtgttatttatttgg

SEQ ID NO: 15348 - DNA, 21 bp, Artificial Sequence
  Synthetic
atgtatttgaggacttgtcca

SEQ ID NO: 15349 - DNA, 20 bp, Artificial Sequence
  Synthetic
gtttggtacgttttagcaga

SEQ ID NO: 15350 - DNA, 22 bp, Artificial Sequence
  Synthetic
ctaactctataccgtacacacc

SEQ ID NO: 15351 - DNA, 19 bp, Artificial Sequence
  Synthetic
gccgatacagaaaatccca

SEQ ID NO: 15352 - DNA, 18 bp, Artificial Sequence
  Synthetic
acgagatgtcctccagaa

SEQ ID NO: 15353 - DNA, 21 bp, Artificial Sequence
  Synthetic
atcttcctattgtgcaaagtc

SEQ ID NO: 15354 - DNA, 20 bp, Artificial Sequence
  Synthetic
ctgtgcagtgaggaaaagga

SEQ ID NO: 15355 - DNA, 19 bp, Artificial Sequence
  Synthetic
cctacagaaccagcacagc

SEQ ID NO: 15356 - DNA, 20 bp, Artificial Sequence
  Synthetic
tagtgatgaggacgaggagg

SEQ ID NO: 15357 - DNA, 20 bp, Artificial Sequence
  Synthetic
acgtagactgtttgagctgc

SEQ ID NO: 15358 - DNA, 21 bp, Artificial Sequence
  Synthetic
aaaagtaataggaccacgtgt

SEQ ID NO: 15359 - DNA, 20 bp, Artificial Sequence
  Synthetic
ccaaaataagacatccagcg

SEQ ID NO: 15360 - DNA, 22 bp, Artificial Sequence
  Synthetic
gccaagcaaaatatgtaaagga

SEQ ID NO: 15361 - DNA, 22 bp, Artificial Sequence
  Synthetic
atacttttgtatgagcctgttg

SEQ ID NO: 15362 - DNA, 19 bp, Artificial Sequence
  Synthetic
tagaggaagacaggtggaa

SEQ ID NO: 15363 - DNA, 19 bp, Artificial Sequence
  Synthetic
acgttaagtttgatggcga

SEQ ID NO: 15364 - DNA, 15 bp, Artificial Sequence
  Synthetic
aacccgacgccacca

SEQ ID NO: 15365 - DNA, 23 bp, Artificial Sequence
  Synthetic
ttaaggtatagattgcacaaaca

SEQ ID NO: 15366 - DNA, 21 bp, Artificial Sequence
  Synthetic
agtgtggagacctttatttgc

SEQ ID NO: 15367 - DNA, 19 bp, Artificial Sequence
  Synthetic
cttgtgttgtagtgtgcaa

SEQ ID NO: 15368 - DNA, 18 bp, Artificial Sequence
  Synthetic
ttctttgggggtttgggc

SEQ ID NO: 15369 - DNA, 20 bp, Artificial Sequence
  Synthetic
ccaacaagtacatgtacagg

SEQ ID NO: 15370 - DNA, 19 bp, Artificial Sequence
  Synthetic
ttcccgactgttaactgtt

SEQ ID NO: 15371 - DNA, 20 bp, Artificial Sequence
  Synthetic
tgacactgaaaacaccaatt

SEQ ID NO: 15372 - DNA, 24 bp, Artificial Sequence
  Synthetic
gatgtgcctttagatattgtaacc

SEQ ID NO: 15373 - DNA, 20 bp, Artificial Sequence
  Synthetic
atcccagttgtttaacaagc

SEQ ID NO: 15374 - DNA, 19 bp, Artificial Sequence
  Synthetic
ccaaacgttcctaagcatg

SEQ ID NO: 15375 - DNA, 20 bp, Artificial Sequence
  Synthetic
gtggtgtcctgtatgtgacc

SEQ ID NO: 15376 - DNA, 19 bp, Artificial Sequence
  Synthetic
gccatgaatcactcccctg

SEQ ID NO: 15377 - DNA, 19 bp, Artificial Sequence
  Synthetic
aagaaacaccaaccgtcgc

SEQ ID NO: 15378 - DNA, 15 bp, Artificial Sequence
  Synthetic
tcgcgcaacgtgggt

SEQ ID NO: 15379 - DNA, 17 bp, Artificial Sequence
  Synthetic
gctgctgtcctccacgt

SEQ ID NO: 15380 - DNA, 20 bp, Artificial Sequence
  Synthetic
cacggctaccatgatcttgg

SEQ ID NO: 15381 - DNA, 18 bp, Artificial Sequence
  Synthetic
ccttgcacaccggcttta

SEQ ID NO: 15382 - DNA, 18 bp, Artificial Sequence
  Synthetic
gtcatggttcggctgcac

SEQ ID NO: 15383 - DNA, 18 bp, Artificial Sequence
  Synthetic
ttcactcgtggggatcgt

SEQ ID NO: 15384 - DNA, 18 bp, Artificial Sequence
  Synthetic
cagctagctgcaatggct

SEQ ID NO: 15385 - DNA, 19 bp, Artificial Sequence
  Synthetic
ccgtcgccatattctaccc

SEQ ID NO: 15386 - DNA, 19 bp, Artificial Sequence
  Synthetic
agacagctgcttgtgggga

SEQ ID NO: 15387 - DNA, 18 bp, Artificial Sequence
  Synthetic
tctcgggggttttgtgga

SEQ ID NO: 15388 - DNA, 20 bp, Artificial Sequence
  Synthetic
tttcatccccgttgagacac

SEQ ID NO: 15389 - DNA, 20 bp, Artificial Sequence
  Synthetic
atatggcaaattcctcgccg

SEQ ID NO: 15390 - DNA, 18 bp, Artificial Sequence
  Synthetic
tcggggtatgggcttgaa

SEQ ID NO: 15391 - DNA, 20 bp, Artificial Sequence
  Synthetic
gtgtagtgctctgtgagtgc

SEQ ID NO: 15392 - DNA, 16 bp, Artificial Sequence
  Synthetic
acactcgtgggcccca

SEQ ID NO: 15393 - DNA, 18 bp, Artificial Sequence
  Synthetic
gccgagatgctgaagtcc

SEQ ID NO: 15394 - DNA, 20 bp, Artificial Sequence
  Synthetic
aggtaaggtgctagtggaca

SEQ ID NO: 15395 - DNA, 18 bp, Artificial Sequence
  Synthetic
catgagaatcacggggcc

SEQ ID NO: 15396 - DNA, 17 bp, Artificial Sequence
  Synthetic
cagcttccttgcgaccc

SEQ ID NO: 15397 - DNA, 20 bp, Artificial Sequence
  Synthetic
cgaccttgagccttcgatac

SEQ ID NO: 15398 - DNA, 20 bp, Artificial Sequence
  Synthetic
cctgatgagttggccctttc

SEQ ID NO: 15399 - DNA, 20 bp, Artificial Sequence
  Synthetic
tgataggatgcaagtgctcg

SEQ ID NO: 15400 - DNA, 18 bp, Artificial Sequence
  Synthetic
tttaccctgacctcggcg

SEQ ID NO: 15401 - DNA, 20 bp, Artificial Sequence
  Synthetic
ggtgctcaccactagcatgg

SEQ ID NO: 15402 - DNA, 20 bp, Artificial Sequence
  Synthetic
tcctcaaatgtgtctgtggc

SEQ ID NO: 15403 - DNA, 20 bp, Artificial Sequence
  Synthetic
ctctgcacacatacactccc

SEQ ID NO: 15404 - DNA, 18 bp, Artificial Sequence
  Synthetic
gttgagggcagccagttg

SEQ ID NO: 15405 - DNA, 19 bp, Artificial Sequence
  Synthetic
gcggtaatgaggccgaagt

SEQ ID NO: 15406 - DNA, 20 bp, Artificial Sequence
  Synthetic
tcttcgtcaacggtcaagtc

SEQ ID NO: 15407 - DNA, 20 bp, Artificial Sequence
  Synthetic
agaggatgcggttttgttcg

SEQ ID NO: 15408 - DNA, 20 bp, Artificial Sequence
  Synthetic
cgaaaagaaaatcgccctcc

SEQ ID NO: 15409 - DNA, 20 bp, Artificial Sequence
  Synthetic
tggacggcttggattttcag

SEQ ID NO: 15410 - DNA, 20 bp, Artificial Sequence
  Synthetic
atgtcgcccaagttttcaga

SEQ ID NO: 15411 - DNA, 16 bp, Artificial Sequence
  Synthetic
acgaagccgccctggt

SEQ ID NO: 15412 - DNA, 18 bp, Artificial Sequence
  Synthetic
ggcttcgatgcccttgtt

SEQ ID NO: 15413 - DNA, 16 bp, Artificial Sequence
  Synthetic
cggctgccgtcttggt

SEQ ID NO: 15414 - DNA, 19 bp, Artificial Sequence
  Synthetic
ccgaacaggcggtatttgc

SEQ ID NO: 15415 - DNA, 20 bp, Artificial Sequence
  Synthetic
ttgttgcgatgtgatgacgc

SEQ ID NO: 15416 - DNA, 20 bp, Artificial Sequence
  Synthetic
cgggttctgccttttcaaac

SEQ ID NO: 15417 - DNA, 18 bp, Artificial Sequence
  Synthetic
aggcggacaccttgttgc

SEQ ID NO: 15418 - DNA, 20 bp, Artificial Sequence
  Synthetic
acaatttcagccacaactgc

SEQ ID NO: 15419 - DNA, 16 bp, Artificial Sequence
  Synthetic
cacaccagcgcaccga

SEQ ID NO: 15420 - DNA, 20 bp, Artificial Sequence
  Synthetic
gcaagataaaccacgtcgcc

SEQ ID NO: 15421 - DNA, 19 bp, Artificial Sequence
  Synthetic
ttccaatgcctgcgtttca

SEQ ID NO: 15422 - DNA, 17 bp, Artificial Sequence
  Synthetic
aactcttgccgcgttcc

SEQ ID NO: 15423 - DNA, 16 bp, Artificial Sequence
  Synthetic
tcagcggtgcaggcga

SEQ ID NO: 15424 - DNA, 17 bp, Artificial Sequence
  Synthetic
gtaacgcgcaaaccccg

SEQ ID NO: 15425 - DNA, 20 bp, Artificial Sequence
  Synthetic
aggttttgtggacataggcg

SEQ ID NO: 15426 - DNA, 17 bp, Artificial Sequence
  Synthetic
ttttgggcggcaggacg

SEQ ID NO: 15427 - DNA, 20 bp, Artificial Sequence
  Synthetic
gttcatgttcgtgccttccg

SEQ ID NO: 15428 - DNA, 18 bp, Artificial Sequence
  Synthetic
gttttccagtgcgaacgc

SEQ ID NO: 15429 - DNA, 15 bp, Artificial Sequence
  Synthetic
tttcttgggcgcggc

SEQ ID NO: 15430 - DNA, 17 bp, Artificial Sequence
  Synthetic
ggcatcggacggcaaag

SEQ ID NO: 15431 - DNA, 16 bp, Artificial Sequence
  Synthetic
cgaagctgcgttgggc

SEQ ID NO: 15432 - DNA, 17 bp, Artificial Sequence
  Synthetic
cataccgggttcgccga

SEQ ID NO: 15433 - DNA, 16 bp, Artificial Sequence
  Synthetic
gcacgcctgccgctat

SEQ ID NO: 15434 - DNA, 15 bp, Artificial Sequence
  Synthetic
ttcggcggcggcaat

SEQ ID NO: 15435 - DNA, 19 bp, Artificial Sequence
  Synthetic
cgccttgttctttcaggga

SEQ ID NO: 15436 - DNA, 18 bp, Artificial Sequence
  Synthetic
gggtttgaccgccgtaat

SEQ ID NO: 15437 - DNA, 18 bp, Artificial Sequence
  Synthetic
ccgcacctgtcagaatcg

SEQ ID NO: 15438 - DNA, 19 bp, Artificial Sequence
  Synthetic
atggacagatggatgtgcg

SEQ ID NO: 15439 - DNA, 20 bp, Artificial Sequence
  Synthetic
agaaaatcaccgccatcagc

SEQ ID NO: 15440 - DNA, 17 bp, Artificial Sequence
  Synthetic
cgccttaagccttgccg

SEQ ID NO: 15441 - DNA, 18 bp, Artificial Sequence
  Synthetic
gaacacctgccccggtat

SEQ ID NO: 15442 - DNA, 17 bp, Artificial Sequence
  Synthetic
attgcgccgcttccaac

SEQ ID NO: 15443 - DNA, 18 bp, Artificial Sequence
  Synthetic
tgctgcaaggctacgact

SEQ ID NO: 15444 - DNA, 20 bp, Artificial Sequence
  Synthetic
tcgttttcgaaccccaaccc

SEQ ID NO: 15445 - DNA, 19 bp, Artificial Sequence
  Synthetic
aatcgaacacagctacgcc

SEQ ID NO: 15446 - DNA, 19 bp, Artificial Sequence
  Synthetic
aaaaagccgaagccgaact

SEQ ID NO: 15447 - DNA, 18 bp, Artificial Sequence
  Synthetic
tgcctgcctcaacatcgg

SEQ ID NO: 15448 - DNA, 16 bp, Artificial Sequence
  Synthetic
aggcagtcggcgcagt

SEQ ID NO: 15449 - DNA, 18 bp, Artificial Sequence
  Synthetic
gcgttggcggctttttgg

SEQ ID NO: 15450 - DNA, 20 bp, Artificial Sequence
  Synthetic
cgaacttcaccaaacccacg

SEQ ID NO: 15451 - DNA, 16 bp, Artificial Sequence
  Synthetic
ccttttgggcgagccg

SEQ ID NO: 15452 - DNA, 20 bp, Artificial Sequence
  Synthetic
taatgttggggaacggcatt

SEQ ID NO: 15453 - DNA, 16 bp, Artificial Sequence
  Synthetic
tcgcggattgcctgct

SEQ ID NO: 15454 - DNA, 15 bp, Artificial Sequence
  Synthetic
tcagcgtcgggtgca

SEQ ID NO: 15455 - DNA, 20 bp, Artificial Sequence
  Synthetic
aaacggcatcggcttcttct

SEQ ID NO: 15456 - DNA, 20 bp, Artificial Sequence
  Synthetic
tgtgcatataaagcggcagg

SEQ ID NO: 15457 - DNA, 18 bp, Artificial Sequence
  Synthetic
cgatcggacgcgttttgc

SEQ ID NO: 15458 - DNA, 17 bp, Artificial Sequence
  Synthetic
caaggtttgccagcgcg

SEQ ID NO: 15459 - DNA, 19 bp, Artificial Sequence
  Synthetic
cggcatagtattcgcggac

SEQ ID NO: 15460 - DNA, 16 bp, Artificial Sequence
  Synthetic
gacgttgagccgggga

SEQ ID NO: 15461 - DNA, 20 bp, Artificial Sequence
  Synthetic
tcaatctgttcgggtgtcag

SEQ ID NO: 15462 - DNA, 17 bp, Artificial Sequence
  Synthetic
ccttgcgaggctttgcg

SEQ ID NO: 15463 - DNA, 20 bp, Artificial Sequence
  Synthetic
ccagttgttcggacaaacgc

SEQ ID NO: 15464 - DNA, 20 bp, Artificial Sequence
  Synthetic
tgcttttgtcttcttcgccc

SEQ ID NO: 15465 - DNA, 19 bp, Artificial Sequence
  Synthetic
ctacgagcttttgggcgag

SEQ ID NO: 15466 - DNA, 16 bp, Artificial Sequence
  Synthetic
ctgcccgcctgcatga

SEQ ID NO: 15467 - DNA, 17 bp, Artificial Sequence
  Synthetic
ggcgcgcaccataacca

SEQ ID NO: 15468 - DNA, 16 bp, Artificial Sequence
  Synthetic
cgttttcaggcggccc

SEQ ID NO: 15469 - DNA, 18 bp, Artificial Sequence
  Synthetic
ctggagctgttcgtcggt

SEQ ID NO: 15470 - DNA, 19 bp, Artificial Sequence
  Synthetic
cgaaatccgtgtcgatgca

SEQ ID NO: 15471 - DNA, 16 bp, Artificial Sequence
  Synthetic
cgctgcacgacacgct

SEQ ID NO: 15472 - DNA, 18 bp, Artificial Sequence
  Synthetic
aaaggccgaagtcatggc

SEQ ID NO: 15473 - DNA, 19 bp, Artificial Sequence
  Synthetic
gccaagctcgaagaagact

SEQ ID NO: 15474 - DNA, 16 bp, Artificial Sequence
  Synthetic
cgcctgacggatgctg

SEQ ID NO: 15475 - DNA, 16 bp, Artificial Sequence
  Synthetic
gcgtatcatcggcgcg

SEQ ID NO: 15476 - DNA, 16 bp, Artificial Sequence
  Synthetic
gcgtgggtcatgccgt

SEQ ID NO: 15477 - DNA, 17 bp, Artificial Sequence
  Synthetic
aaacctgcctcgtcggg

SEQ ID NO: 15478 - DNA, 18 bp, Artificial Sequence
  Synthetic
tctcggcaaagaacgtac

SEQ ID NO: 15479 - DNA, 17 bp, Artificial Sequence
  Synthetic
tttcggcggcacagaag

SEQ ID NO: 15480 - DNA, 20 bp, Artificial Sequence
  Synthetic
tttggaactgtggccaaaca

SEQ ID NO: 15481 - DNA, 20 bp, Artificial Sequence
  Synthetic
tgtttgagccagatttcgga

SEQ ID NO: 15482 - DNA, 19 bp, Artificial Sequence
  Synthetic
agacccaatgcgaggtagc

SEQ ID NO: 15483 - DNA, 20 bp, Artificial Sequence
  Synthetic
atacacgggataatcagcgc

SEQ ID NO: 15484 - DNA, 19 bp, Artificial Sequence
  Synthetic
caagcgtggcgataatcga

SEQ ID NO: 15485 - DNA, 16 bp, Artificial Sequence
  Synthetic
aatcgccgtctgccca

SEQ ID NO: 15486 - DNA, 20 bp, Artificial Sequence
  Synthetic
ttcatggcaacgtcaatcgg

SEQ ID NO: 15487 - DNA, 19 bp, Artificial Sequence
  Synthetic
tgtattccatcacgccgtc

SEQ ID NO: 15488 - DNA, 20 bp, Artificial Sequence
  Synthetic
acctgtcgttttattggggc

SEQ ID NO: 15489 - DNA, 17 bp, Artificial Sequence
  Synthetic
cgtttggcgcaggttgg

SEQ ID NO: 15490 - DNA, 16 bp, Artificial Sequence
  Synthetic
gggcgcaggtcatcga

SEQ ID NO: 15491 - DNA, 16 bp, Artificial Sequence
  Synthetic
ccgcaaaaagccgccg

SEQ ID NO: 15492 - DNA, 18 bp, Artificial Sequence
  Synthetic
aaaaaccgaccgttgggc

SEQ ID NO: 15493 - DNA, 17 bp, Artificial Sequence
  Synthetic
aatccggcatcgacgct

SEQ ID NO: 15494 - DNA, 16 bp, Artificial Sequence
  Synthetic
gccgagggcgaatgtg

SEQ ID NO: 15495 - DNA, 16 bp, Artificial Sequence
  Synthetic
ctgctgcgcgggttca

SEQ ID NO: 15496 - DNA, 20 bp, Artificial Sequence
  Synthetic
cctatcaggctcatacggcg

SEQ ID NO: 15497 - DNA, 20 bp, Artificial Sequence
  Synthetic
agttgctgttcaaaccacgg

SEQ ID NO: 15498 - DNA, 17 bp, Artificial Sequence
  Synthetic
gcatcccttgccgtcca

SEQ ID NO: 15499 - DNA, 19 bp, Artificial Sequence
  Synthetic
cggcactctgcatttttgc

SEQ ID NO: 15500 - DNA, 19 bp, Artificial Sequence
  Synthetic
ggatgacggtcagtgtgtg

SEQ ID NO: 15501 - DNA, 18 bp, Artificial Sequence
  Synthetic
ttggacggcgttatgggt

SEQ ID NO: 15502 - DNA, 16 bp, Artificial Sequence
  Synthetic
gcgggcaagctgacgt

SEQ ID NO: 15503 - DNA, 16 bp, Artificial Sequence
  Synthetic
tcgggacaggggtgga

SEQ ID NO: 15504 - DNA, 19 bp, Artificial Sequence
  Synthetic
ggattgcgctgaacagcct

SEQ ID NO: 15505 - DNA, 18 bp, Artificial Sequence
  Synthetic
ctttgacggatgcctggc

SEQ ID NO: 15506 - DNA, 20 bp, Artificial Sequence
  Synthetic
cgggggaaaaggagttaacc

SEQ ID NO: 15507 - DNA, 17 bp, Artificial Sequence
  Synthetic
tgtacgacaggtgcggc

SEQ ID NO: 15508 - DNA, 16 bp, Artificial Sequence
  Synthetic
ctgcaaccggggatgc

SEQ ID NO: 15509 - DNA, 20 bp, Artificial Sequence
  Synthetic
cgggttttttgacggttcag

SEQ ID NO: 15510 - DNA, 18 bp, Artificial Sequence
  Synthetic
tcggcaatggcatgcatg

SEQ ID NO: 15511 - DNA, 17 bp, Artificial Sequence
  Synthetic
gcgcaatgcctgctcga

SEQ ID NO: 15512 - DNA, 18 bp, Artificial Sequence
  Synthetic
gacgttactttgcgccaa

SEQ ID NO: 15513 - DNA, 18 bp, Artificial Sequence
  Synthetic
ttgaccgatggcacgacc

SEQ ID NO: 15514 - DNA, 16 bp, Artificial Sequence
  Synthetic
cgggtcggcgtggatt

SEQ ID NO: 15515 - DNA, 18 bp, Artificial Sequence
  Synthetic
atttcgaccgcccattcc

SEQ ID NO: 15516 - DNA, 19 bp, Artificial Sequence
  Synthetic
tgatgctgactttgtccgc

SEQ ID NO: 15517 - DNA, 15 bp, Artificial Sequence
  Synthetic
tgctgcgcttgggca

SEQ ID NO: 15518 - DNA, 16 bp, Artificial Sequence
  Synthetic
ccgcgagacaggtcgt

SEQ ID NO: 15519 - DNA, 19 bp, Artificial Sequence
  Synthetic
aaaccttccaatacgcccg

SEQ ID NO: 15520 - DNA, 20 bp, Artificial Sequence
  Synthetic
gatgccttcgatgacgaggt

SEQ ID NO: 15521 - DNA, 18 bp, Artificial Sequence
  Synthetic
ggatagcgtccggcaagt

SEQ ID NO: 15522 - DNA, 20 bp, Artificial Sequence
  Synthetic
cgtccgatgtgtattcccaa

SEQ ID NO: 15523 - DNA, 17 bp, Artificial Sequence
  Synthetic
gtaaacgacgacgcgcg

SEQ ID NO: 15524 - DNA, 19 bp, Artificial Sequence
  Synthetic
cgctgaatcggataggtcg

SEQ ID NO: 15525 - DNA, 18 bp, Artificial Sequence
  Synthetic
ggggtgaggatgtagcgt

SEQ ID NO: 15526 - DNA, 16 bp, Artificial Sequence
  Synthetic
gcctgttggacgggga

SEQ ID NO: 15527 - DNA, 17 bp, Artificial Sequence
  Synthetic
cggattcaaacgcgcca

SEQ ID NO: 15528 - DNA, 17 bp, Artificial Sequence
  Synthetic
tggaaaacccgcccagc

SEQ ID NO: 15529 - DNA, 20 bp, Artificial Sequence
  Synthetic
tcggctttgaataactgcgt

SEQ ID NO: 15530 - DNA, 18 bp, Artificial Sequence
  Synthetic
cggaaagggtaacggtcg

SEQ ID NO: 15531 - DNA, 16 bp, Artificial Sequence
  Synthetic
ccgtcagccagagggt

SEQ ID NO: 15532 - DNA, 20 bp, Artificial Sequence
  Synthetic
caaggcattggctttttcca

SEQ ID NO: 15533 - DNA, 18 bp, Artificial Sequence
  Synthetic
tcgcgttcgatttcgctg

SEQ ID NO: 15534 - DNA, 19 bp, Artificial Sequence
  Synthetic
ctcgggatggtttcgttcc

SEQ ID NO: 15535 - DNA, 19 bp, Artificial Sequence
  Synthetic
ggtcggcgaaaccaaatgg

SEQ ID NO: 15536 - DNA, 16 bp, Artificial Sequence
  Synthetic
cgttgcggctgactgc

SEQ ID NO: 15537 - DNA, 19 bp, Artificial Sequence
  Synthetic
cgaacggtattgcgcttcg

SEQ ID NO: 15538 - DNA, 20 bp, Artificial Sequence
  Synthetic
tgcaaagtgtgtatcaggct

SEQ ID NO: 15539 - DNA, 16 bp, Artificial Sequence
  Synthetic
ggtttgcgccccgatt

SEQ ID NO: 15540 - DNA, 20 bp, Artificial Sequence
  Synthetic
atgtattgaatgccgcgagc

SEQ ID NO: 15541 - DNA, 19 bp, Artificial Sequence
  Synthetic
cgctatgccgaaatgagcg

SEQ ID NO: 15542 - DNA, 20 bp, Artificial Sequence
  Synthetic
tgaattccgctttatcggcg

SEQ ID NO: 15543 - DNA, 18 bp, Artificial Sequence
  Synthetic
ccaacctcaaaccgccag

SEQ ID NO: 15544 - DNA, 17 bp, Artificial Sequence
  Synthetic
aacccgttttggcgcaa

SEQ ID NO: 15545 - DNA, 17 bp, Artificial Sequence
  Synthetic
tttctgcctgcccgtcc

SEQ ID NO: 15546 - DNA, 16 bp, Artificial Sequence
  Synthetic
gggcgggcgagttgaa

SEQ ID NO: 15547 - DNA, 17 bp, Artificial Sequence
  Synthetic
ttcaaaccgaccaccgc

SEQ ID NO: 15548 - DNA, 18 bp, Artificial Sequence
  Synthetic
tggcggggtcttttttgc

SEQ ID NO: 15549 - DNA, 19 bp, Artificial Sequence
  Synthetic
caaatcgtaggcaagcgca

SEQ ID NO: 15550 - DNA, 16 bp, Artificial Sequence
  Synthetic
cggcggcagaaggctt

SEQ ID NO: 15551 - DNA, 19 bp, Artificial Sequence
  Synthetic
agcgtccgggattttcaac

SEQ ID NO: 15552 - DNA, 17 bp, Artificial Sequence
  Synthetic
ccgcgccgattacttcg

SEQ ID NO: 15553 - DNA, 20 bp, Artificial Sequence
  Synthetic
ttggacgacctgataacaag

SEQ ID NO: 15554 - DNA, 23 bp, Artificial Sequence
  Synthetic
attggccgtaataaaaagtatgg

SEQ ID NO: 15555 - DNA, 16 bp, Artificial Sequence
  Synthetic
ggcaactggacgggga

SEQ ID NO: 15556 - DNA, 19 bp, Artificial Sequence
  Synthetic
tacatcgaatgctcgctcg

SEQ ID NO: 15557 - DNA, 16 bp, Artificial Sequence
  Synthetic
ggcggctttgccccaa

SEQ ID NO: 15558 - DNA, 16 bp, Artificial Sequence
  Synthetic
cgcaaaccgccgttgc

SEQ ID NO: 15559 - DNA, 16 bp, Artificial Sequence
  Synthetic
attcggcttgccgctg

SEQ ID NO: 15560 - DNA, 16 bp, Artificial Sequence
  Synthetic
tcggcagatacgccgt

SEQ ID NO: 15561 - DNA, 20 bp, Artificial Sequence
  Synthetic
ccttcctgaatcaggtcggc

SEQ ID NO: 15562 - DNA, 16 bp, Artificial Sequence
  Synthetic
cggtttgttgggcggt

SEQ ID NO: 15563 - DNA, 16 bp, Artificial Sequence
  Synthetic
aaggtaggcgggcagc

SEQ ID NO: 15564 - DNA, 16 bp, Artificial Sequence
  Synthetic
ggcgcatcagcagcat

SEQ ID NO: 15565 - DNA, 20 bp, Artificial Sequence
  Synthetic
aacgacgattcctgtgatgg

SEQ ID NO: 15566 - DNA, 16 bp, Artificial Sequence
  Synthetic
ccagccgttgcgtgca

SEQ ID NO: 15567 - DNA, 19 bp, Artificial Sequence
  Synthetic
gcaaaaatggttatcggcc

SEQ ID NO: 15568 - DNA, 21 bp, Artificial Sequence
  Synthetic
aaaagaagatttggctgaagt

SEQ ID NO: 15569 - DNA, 21 bp, Artificial Sequence
  Synthetic
aaaaagcggtaataaagggaa

SEQ ID NO: 15570 - DNA, 19 bp, Artificial Sequence
  Synthetic
ccgaacaacgccttttcct

SEQ ID NO: 15571 - DNA, 20 bp, Artificial Sequence
  Synthetic
acgcagttgttcggaaaacg

SEQ ID NO: 15572 - DNA, 20 bp, Artificial Sequence
  Synthetic
aggttgatgctgtcgaactg

SEQ ID NO: 15573 - DNA, 18 bp, Artificial Sequence
  Synthetic
catggcggcgacaaatgc

SEQ ID NO: 15574 - DNA, 20 bp, Artificial Sequence
  Synthetic
aaacagtttctcgaacggta

SEQ ID NO: 15575 - DNA, 16 bp, Artificial Sequence
  Synthetic
cgattgcggcatgggc

SEQ ID NO: 15576 - DNA, 18 bp, Artificial Sequence
  Synthetic
gctatctctctacgccac

SEQ ID NO: 15577 - DNA, 19 bp, Artificial Sequence
  Synthetic
tttctttttcggcgagcgt

SEQ ID NO: 15578 - DNA, 20 bp, Artificial Sequence
  Synthetic
ttcaaacccttgcccaaacc

SEQ ID NO: 15579 - DNA, 16 bp, Artificial Sequence
  Synthetic
ccgctccttcgcatgg

SEQ ID NO: 15580 - DNA, 23 bp, Artificial Sequence
  Synthetic
ttaaatcccaaaacagaaatgac

SEQ ID NO: 15581 - DNA, 16 bp, Artificial Sequence
  Synthetic
ggcaacgacagcgagg

SEQ ID NO: 15582 - DNA, 16 bp, Artificial Sequence
  Synthetic
ggtacgcgcatgacgg

SEQ ID NO: 15583 - DNA, 18 bp, Artificial Sequence
  Synthetic
cttctgctggcggaatcg

SEQ ID NO: 15584 - DNA, 18 bp, Artificial Sequence
  Synthetic
gatgtatctcggccggct

SEQ ID NO: 15585 - DNA, 16 bp, Artificial Sequence
  Synthetic
ggctacggacacggca

SEQ ID NO: 15586 - DNA, 25 bp, Artificial Sequence
  Synthetic
tcggattaatttgttcaatatcacc

SEQ ID NO: 15587 - DNA, 20 bp, Artificial Sequence
  Synthetic
cttcaggaaagctttgccgc

SEQ ID NO: 15588 - DNA, 20 bp, Artificial Sequence
  Synthetic
ccaatccgtgcaaaaacagg

SEQ ID NO: 15589 - DNA, 16 bp, Artificial Sequence
  Synthetic
gcattgtccgccacgc

SEQ ID NO: 15590 - DNA, 17 bp, Artificial Sequence
  Synthetic
tcggggatgatggcgac

SEQ ID NO: 15591 - DNA, 19 bp, Artificial Sequence
  Synthetic
attgtggctgccggtaatc

SEQ ID NO: 15592 - DNA, 16 bp, Artificial Sequence
  Synthetic
gttaggcggcgtggca

SEQ ID NO: 15593 - DNA, 16 bp, Artificial Sequence
  Synthetic
gccacgccgaagacga

SEQ ID NO: 15594 - DNA, 20 bp, Artificial Sequence
  Synthetic
gcttcccgattaccctgaaa

SEQ ID NO: 15595 - DNA, 16 bp, Artificial Sequence
  Synthetic
atgtcggtggcacggc

SEQ ID NO: 15596 - DNA, 18 bp, Artificial Sequence
  Synthetic
cgttcggcgcaataaagc

SEQ ID NO: 15597 - DNA, 18 bp, Artificial Sequence
  Synthetic
tcgaggtgtatgggcagg

SEQ ID NO: 15598 - DNA, 20 bp, Artificial Sequence
  Synthetic
ctttcagacggcattggtcg

SEQ ID NO: 15599 - DNA, 19 bp, Artificial Sequence
  Synthetic
ccgcccagccataaaacag

SEQ ID NO: 15600 - DNA, 18 bp, Artificial Sequence
  Synthetic
ttgggcggatatttcggc

SEQ ID NO: 15601 - DNA, 19 bp, Artificial Sequence
  Synthetic
attttgcgcctgattccga

SEQ ID NO: 15602 - DNA, 17 bp, Artificial Sequence
  Synthetic
gccttaccacatcgcgc

SEQ ID NO: 15603 - DNA, 19 bp, Artificial Sequence
  Synthetic
cgtcagcgtaaccatgtcg

SEQ ID NO: 15604 - DNA, 17 bp, Artificial Sequence
  Synthetic
ttgccggcaacaacgac

SEQ ID NO: 15605 - DNA, 20 bp, Artificial Sequence
  Synthetic
cgcatccccttcctttatgc

SEQ ID NO: 15606 - DNA, 18 bp, Artificial Sequence
  Synthetic
cgctcgttgatgtagcgg

SEQ ID NO: 15607 - DNA, 17 bp, Artificial Sequence
  Synthetic
gccaagcctttgcctgc

SEQ ID NO: 15608 - DNA, 20 bp, Artificial Sequence
  Synthetic
acaattacccgcaaacacgt

SEQ ID NO: 15609 - DNA, 18 bp, Artificial Sequence
  Synthetic
ccacaacaaccgcatcct

SEQ ID NO: 15610 - DNA, 20 bp, Artificial Sequence
  Synthetic
tatcgcgacgacttccatca

SEQ ID NO: 15611 - DNA, 16 bp, Artificial Sequence
  Synthetic
cgttggaacaggcgca

SEQ ID NO: 15612 - DNA, 20 bp, Artificial Sequence
  Synthetic
ggcaaatgtggcgacatagc

SEQ ID NO: 15613 - DNA, 19 bp, Artificial Sequence
  Synthetic
aactcaaacaggttgcggg

SEQ ID NO: 15614 - DNA, 18 bp, Artificial Sequence
  Synthetic
ggtcaaactcgaaggcgg

SEQ ID NO: 15615 - DNA, 16 bp, Artificial Sequence
  Synthetic
cagtgggcgaacgggt

SEQ ID NO: 15616 - DNA, 17 bp, Artificial Sequence
  Synthetic
ccgcagggattacgcca

SEQ ID NO: 15617 - DNA, 19 bp, Artificial Sequence
  Synthetic
ggcaggattttatgtgctg

SEQ ID NO: 15618 - DNA, 18 bp, Artificial Sequence
  Synthetic
tgtgatgaatgtcgcgca

SEQ ID NO: 15619 - DNA, 17 bp, Artificial Sequence
  Synthetic
cgcgaacatcatgcccg

SEQ ID NO: 15620 - DNA, 20 bp, Artificial Sequence
  Synthetic
cgatgtagtaggcgtgttcc

SEQ ID NO: 15621 - DNA, 18 bp, Artificial Sequence
  Synthetic
gggtaagaaggaacaggg

SEQ ID NO: 15622 - DNA, 18 bp, Artificial Sequence
  Synthetic
ttccgatacctttgcgcc

SEQ ID NO: 15623 - DNA, 19 bp, Artificial Sequence
  Synthetic
caatcggggtctgacaggt

SEQ ID NO: 15624 - DNA, 19 bp, Artificial Sequence
  Synthetic
ataagcggtttcgggatgg

SEQ ID NO: 15625 - DNA, 19 bp, Artificial Sequence
  Synthetic
gatggtacagaccgtgcgc

SEQ ID NO: 15626 - DNA, 16 bp, Artificial Sequence
  Synthetic
cggttgccaagcgtcc

SEQ ID NO: 15627 - DNA, 18 bp, Artificial Sequence
  Synthetic
ggacggtcgcagaaaagc

SEQ ID NO: 15628 - DNA, 16 bp, Artificial Sequence
  Synthetic
gcctgtggacgcaacc

SEQ ID NO: 15629 - DNA, 16 bp, Artificial Sequence
  Synthetic
ggcgcggttgccgtat

SEQ ID NO: 15630 - DNA, 16 bp, Artificial Sequence
  Synthetic
ccgcaacaagaggccg

SEQ ID NO: 15631 - DNA, 17 bp, Artificial Sequence
  Synthetic
gtccttgaccgcgaacc

SEQ ID NO: 15632 - DNA, 21 bp, Artificial Sequence
  Synthetic
aaaacgctaatcataagaggg

SEQ ID NO: 15633 - DNA, 17 bp, Artificial Sequence
  Synthetic
caggcatcgggagggat

SEQ ID NO: 15634 - DNA, 16 bp, Artificial Sequence
  Synthetic
cgcggcaggggttgtt

SEQ ID NO: 15635 - DNA, 19 bp, Artificial Sequence
  Synthetic
ccgcctgaaagaatcccat

SEQ ID NO: 15636 - DNA, 18 bp, Artificial Sequence
  Synthetic
cgagatgcacggctcaaa

SEQ ID NO: 15637 - DNA, 19 bp, Artificial Sequence
  Synthetic
gttccgcccgaaaatctgc

SEQ ID NO: 15638 - DNA, 19 bp, Artificial Sequence
  Synthetic
gcaggacaatccgaacctg

SEQ ID NO: 15639 - DNA, 20 bp, Artificial Sequence
  Synthetic
gacgatttcttcctcagcgt

SEQ ID NO: 15640 - DNA, 20 bp, Artificial Sequence
  Synthetic
tcgatacgaacgtccgttac

SEQ ID NO: 15641 - DNA, 20 bp, Artificial Sequence
  Synthetic
tcggcaacatgaacgaagtg

SEQ ID NO: 15642 - DNA, 18 bp, Artificial Sequence
  Synthetic
cgcccgattacaggcttg

SEQ ID NO: 15643 - DNA, 20 bp, Artificial Sequence
  Synthetic
tgacgtgaaatccgacatcg

SEQ ID NO: 15644 - DNA, 18 bp, Artificial Sequence
  Synthetic
cctgacggctggttttcg

SEQ ID NO: 15645 - DNA, 18 bp, Artificial Sequence
  Synthetic
tgggcgtggaaatttcgg

SEQ ID NO: 15646 - DNA, 16 bp, Artificial Sequence
  Synthetic
cgtcgaggcagtccga

SEQ ID NO: 15647 - DNA, 19 bp, Artificial Sequence
  Synthetic
ttatcgtgaatgccgaccg

SEQ ID NO: 15648 - DNA, 17 bp, Artificial Sequence
  Synthetic
ttgccttgtgttgccgt

SEQ ID NO: 15649 - DNA, 19 bp, Artificial Sequence
  Synthetic
ggggtcgaaggcaagatgg

SEQ ID NO: 15650 - DNA, 17 bp, Artificial Sequence
  Synthetic
ggactggtatcgcgcca

SEQ ID NO: 15651 - DNA, 16 bp, Artificial Sequence
  Synthetic
ccggcgcgtggcaata

SEQ ID NO: 15652 - DNA, 17 bp, Artificial Sequence
  Synthetic
cgatgtgattcgggcgg

SEQ ID NO: 15653 - DNA, 17 bp, Artificial Sequence
  Synthetic
ttcacgaagccgatgcc

SEQ ID NO: 15654 - DNA, 16 bp, Artificial Sequence
  Synthetic
acgcatcgcacttgcc

SEQ ID NO: 15655 - DNA, 18 bp, Artificial Sequence
  Synthetic
cccgattcttgccgttgc

SEQ ID NO: 15656 - DNA, 18 bp, Artificial Sequence
  Synthetic
gcggcaggcatattgagg

SEQ ID NO: 15657 - DNA, 16 bp, Artificial Sequence
  Synthetic
cggcgggaaaatgcgc

SEQ ID NO: 15658 - DNA, 18 bp, Artificial Sequence
  Synthetic
caagcactgccatcaccg

SEQ ID NO: 15659 - DNA, 21 bp, Artificial Sequence
  Synthetic
ctagatcgtcaaagtttagca

SEQ ID NO: 15660 - DNA, 18 bp, Artificial Sequence
  Synthetic
cggcgagattctgaactt

SEQ ID NO: 15661 - DNA, 17 bp, Artificial Sequence
  Synthetic
acaataccgccaagccg

SEQ ID NO: 15662 - DNA, 16 bp, Artificial Sequence
  Synthetic
cgccacgcgttttcgg

SEQ ID NO: 15663 - DNA, 16 bp, Artificial Sequence
  Synthetic
tgccttgtccgagccg

SEQ ID NO: 15664 - DNA, 16 bp, Artificial Sequence
  Synthetic
gcagcatcgcggtgga

SEQ ID NO: 15665 - DNA, 20 bp, Artificial Sequence
  Synthetic
atctgtggcgcatcaaaacc

SEQ ID NO: 15666 - DNA, 17 bp, Artificial Sequence
  Synthetic
gcacaaggtgcggcagt

SEQ ID NO: 15667 - DNA, 19 bp, Artificial Sequence
  Synthetic
gcgttgacgtgatccatcg

SEQ ID NO: 15668 - DNA, 20 bp, Artificial Sequence
  Synthetic
gaaaacgctgcaaaatgaac

SEQ ID NO: 15669 - DNA, 20 bp, Artificial Sequence
  Synthetic
atacacccaaagccacttcc

SEQ ID NO: 15670 - DNA, 16 bp, Artificial Sequence
  Synthetic
tcggcctggatgtggc

SEQ ID NO: 15671 - DNA, 20 bp, Artificial Sequence
  Synthetic
aaagtcgaaaacgtcgtgcg

SEQ ID NO: 15672 - DNA, 18 bp, Artificial Sequence
  Synthetic
gaagaggtcagcgcgatg

SEQ ID NO: 15673 - DNA, 18 bp, Artificial Sequence
  Synthetic
gccgcgatttgttcatcg

SEQ ID NO: 15674 - DNA, 17 bp, Artificial Sequence
  Synthetic
gacaccatcgagcagcg

SEQ ID NO: 15675 - DNA, 16 bp, Artificial Sequence
  Synthetic
agtgtccctcgtcgcc

SEQ ID NO: 15676 - DNA, 19 bp, Artificial Sequence
  Synthetic
ttgaccgaatgctgcatca

SEQ ID NO: 15677 - DNA, 16 bp, Artificial Sequence
  Synthetic
gacggcatcgacgtgg

SEQ ID NO: 15678 - DNA, 16 bp, Artificial Sequence
  Synthetic
cgcggtacaccacgct

SEQ ID NO: 15679 - DNA, 18 bp, Artificial Sequence
  Synthetic
acagaaagccggtgtgga

SEQ ID NO: 15680 - DNA, 17 bp, Artificial Sequence
  Synthetic
cgccggagagtgcaatc

SEQ ID NO: 15681 - DNA, 20 bp, Artificial Sequence
  Synthetic
tttgtaggcaataagcgcgg

SEQ ID NO: 15682 - DNA, 16 bp, Artificial Sequence
  Synthetic
ccggcggcagcagttt

SEQ ID NO: 15683 - DNA, 18 bp, Artificial Sequence
  Synthetic
cctgacggtcttcagccc

SEQ ID NO: 15684 - DNA, 19 bp, Artificial Sequence
  Synthetic
gggaacatctttgaccagt

SEQ ID NO: 15685 - DNA, 21 bp, Artificial Sequence
  Synthetic
ttgagcgtttttgaattcagc

SEQ ID NO: 15686 - DNA, 16 bp, Artificial Sequence
  Synthetic
cctgcgcgagtgttgc

SEQ ID NO: 15687 - DNA, 19 bp, Artificial Sequence
  Synthetic
gttcaggttgttgaggcgt

SEQ ID NO: 15688 - DNA, 16 bp, Artificial Sequence
  Synthetic
gcggtattgacggcgg

SEQ ID NO: 15689 - DNA, 19 bp, Artificial Sequence
  Synthetic
cgacctgcatcatttcgcc

SEQ ID NO: 15690 - DNA, 18 bp, Artificial Sequence
  Synthetic
gggaaatcggcgaaacgg

SEQ ID NO: 15691 - DNA, 15 bp, Artificial Sequence
  Synthetic
ttcggcggctttgcg

SEQ ID NO: 15692 - DNA, 16 bp, Artificial Sequence
  Synthetic
ccccgccaaaaacggc

SEQ ID NO: 15693 - DNA, 20 bp, Artificial Sequence
  Synthetic
ttccgaagatgaagttgccg

SEQ ID NO: 15694 - DNA, 20 bp, Artificial Sequence
  Synthetic
ttgttttcggtaatgctgcg

SEQ ID NO: 15695 - DNA, 16 bp, Artificial Sequence
  Synthetic
cgttggagggcgacga

SEQ ID NO: 15696 - DNA, 19 bp, Artificial Sequence
  Synthetic
cgttgatggtgtcggtgag

SEQ ID NO: 15697 - DNA, 18 bp, Artificial Sequence
  Synthetic
tcttcggtggtcatgcgg

SEQ ID NO: 15698 - DNA, 17 bp, Artificial Sequence
  Synthetic
cgccgagtttcagcgtg

SEQ ID NO: 15699 - DNA, 21 bp, Artificial Sequence
  Synthetic
catagtaacggatgtggaaag

SEQ ID NO: 15700 - DNA, 16 bp, Artificial Sequence
  Synthetic
gcaaactgcccacgcc

SEQ ID NO: 15701 - DNA, 20 bp, Artificial Sequence
  Synthetic
gaacaagcctgttttcctgc

SEQ ID NO: 15702 - DNA, 18 bp, Artificial Sequence
  Synthetic
acaaattcacacgggcgg

SEQ ID NO: 15703 - DNA, 20 bp, Artificial Sequence
  Synthetic
gctttatcaggcgatggagg

SEQ ID NO: 15704 - DNA, 20 bp, Artificial Sequence
  Synthetic
gtatcggcatcgttaccagt

SEQ ID NO: 15705 - DNA, 17 bp, Artificial Sequence
  Synthetic
gattgtctgtcgcggcg

SEQ ID NO: 15706 - DNA, 18 bp, Artificial Sequence
  Synthetic
atcatcggcttctgcgtg

SEQ ID NO: 15707 - DNA, 19 bp, Artificial Sequence
  Synthetic
cgccatatccgacgcttac

SEQ ID NO: 15708 - DNA, 18 bp, Artificial Sequence
  Synthetic
ggcgtttaccggttcgac

SEQ ID NO: 15709 - DNA, 17 bp, Artificial Sequence
  Synthetic
cgtttcaaacggcgcgg

SEQ ID NO: 15710 - DNA, 16 bp, Artificial Sequence
  Synthetic
gagcagggcgcatcga

SEQ ID NO: 15711 - DNA, 18 bp, Artificial Sequence
  Synthetic
gcacgatggaagcaggaa

SEQ ID NO: 15712 - DNA, 15 bp, Artificial Sequence
  Synthetic
ttggcggcctgcagt

SEQ ID NO: 15713 - DNA, 19 bp, Artificial Sequence
  Synthetic
tccgtatctggttaaacgg

SEQ ID NO: 15714 - DNA, 19 bp, Artificial Sequence
  Synthetic
agggtcagtccgatttcgt

SEQ ID NO: 15715 - DNA, 19 bp, Artificial Sequence
  Synthetic
tcttcggtcaacacgatgg

SEQ ID NO: 15716 - DNA, 20 bp, Artificial Sequence
  Synthetic
atatattcgagtgcgcgctc

SEQ ID NO: 15717 - DNA, 17 bp, Artificial Sequence
  Synthetic
tcgccatcgtgtgttcg

SEQ ID NO: 15718 - DNA, 20 bp, Artificial Sequence
  Synthetic
tttggcaatccttttacgcg

SEQ ID NO: 15719 - DNA, 18 bp, Artificial Sequence
  Synthetic
cggcaggcgttttctacc

SEQ ID NO: 15720 - DNA, 19 bp, Artificial Sequence
  Synthetic
gaccaaatccgcctgtacg

SEQ ID NO: 15721 - DNA, 17 bp, Artificial Sequence
  Synthetic
ccgggtcggtatggaca

SEQ ID NO: 15722 - DNA, 16 bp, Artificial Sequence
  Synthetic
cggtggaaggcgggaa

SEQ ID NO: 15723 - DNA, 18 bp, Artificial Sequence
  Synthetic
cgcgccgtctgaaaatcc

SEQ ID NO: 15724 - DNA, 16 bp, Artificial Sequence
  Synthetic
gccgccgccaaatcca

SEQ ID NO: 15725 - DNA, 17 bp, Artificial Sequence
  Synthetic
ggtgtggtgcaggagga

SEQ ID NO: 15726 - DNA, 16 bp, Artificial Sequence
  Synthetic
gcatacgcgccatcgt

SEQ ID NO: 15727 - DNA, 19 bp, Artificial Sequence
  Synthetic
atcgattcaaaacactggc

SEQ ID NO: 15728 - DNA, 18 bp, Artificial Sequence
  Synthetic
aacccaaactcaaagcca

SEQ ID NO: 15729 - DNA, 16 bp, Artificial Sequence
  Synthetic
ccccggcaggagcatt

SEQ ID NO: 15730 - DNA, 18 bp, Artificial Sequence
  Synthetic
cggctttgtgcagattgc

SEQ ID NO: 15731 - DNA, 18 bp, Artificial Sequence
  Synthetic
tgagcgacgctttaccga

SEQ ID NO: 15732 - DNA, 19 bp, Artificial Sequence
  Synthetic
agagggctttgagcatcgc

SEQ ID NO: 15733 - DNA, 17 bp, Artificial Sequence
  Synthetic
ggaagccggcgaagagt

SEQ ID NO: 15734 - DNA, 16 bp, Artificial Sequence
  Synthetic
tcagggcttcgggcgt

SEQ ID NO: 15735 - DNA, 19 bp, Artificial Sequence
  Synthetic
cgacgcagataaaatcgcg

SEQ ID NO: 15736 - DNA, 20 bp, Artificial Sequence
  Synthetic
cactcttggggtcctgaagc

SEQ ID NO: 15737 - DNA, 18 bp, Artificial Sequence
  Synthetic
gcgctcaaacctttcggt

SEQ ID NO: 15738 - DNA, 18 bp, Artificial Sequence
  Synthetic
cacccccatcgacctgat

SEQ ID NO: 15739 - DNA, 20 bp, Artificial Sequence
  Synthetic
tttccgatagattcctgccg

SEQ ID NO: 15740 - DNA, 18 bp, Artificial Sequence
  Synthetic
cggtcggctttttcctgc

SEQ ID NO: 15741 - DNA, 20 bp, Artificial Sequence
  Synthetic
tgaacaggatgttgcggatg

SEQ ID NO: 15742 - DNA, 16 bp, Artificial Sequence
  Synthetic
cgacacgctcgtccgt

SEQ ID NO: 15743 - DNA, 16 bp, Artificial Sequence
  Synthetic
cggcgggggtttctgt

SEQ ID NO: 15744 - DNA, 17 bp, Artificial Sequence
  Synthetic
caaggatgcgggcgatg

SEQ ID NO: 15745 - DNA, 18 bp, Artificial Sequence
  Synthetic
ttgctgacgctttcggtc

SEQ ID NO: 15746 - DNA, 18 bp, Artificial Sequence
  Synthetic
aggtgtcagtgcgttgtg

SEQ ID NO: 15747 - DNA, 19 bp, Artificial Sequence
  Synthetic
gcagcccgcatgtttttcc

SEQ ID NO: 15748 - DNA, 19 bp, Artificial Sequence
  Synthetic
acgccgttgtttttcacgt

SEQ ID NO: 15749 - DNA, 20 bp, Artificial Sequence
  Synthetic
cgaaacgttttttgcagcgg

SEQ ID NO: 15750 - DNA, 17 bp, Artificial Sequence
  Synthetic
cagacgcgttcggcaac

SEQ ID NO: 15751 - DNA, 17 bp, Artificial Sequence
  Synthetic
gcttcggcgacaacagc

SEQ ID NO: 15752 - DNA, 21 bp, Artificial Sequence
  Synthetic
agccgtattgtttcatcatct

SEQ ID NO: 15753 - DNA, 18 bp, Artificial Sequence
  Synthetic
cgcttcgattacggcgtt

SEQ ID NO: 15754 - DNA, 18 bp, Artificial Sequence
  Synthetic
ttggacatcgcgcattgg

SEQ ID NO: 15755 - DNA, 18 bp, Artificial Sequence
  Synthetic
gtaggggaggttgttctg

SEQ ID NO: 15756 - DNA, 22 bp, Artificial Sequence
  Synthetic
tatcggataacatctccttcaa

SEQ ID NO: 15757 - DNA, 24 bp, Artificial Sequence
  Synthetic
aagtaatcattaaattcggatccg

SEQ ID NO: 15758 - DNA, 19 bp, Artificial Sequence
  Synthetic
caaatgtgggtgacaatcg

SEQ ID NO: 15759 - DNA, 19 bp, Artificial Sequence
  Synthetic
attgggtatctaggccact

SEQ ID NO: 15760 - DNA, 23 bp, Artificial Sequence
  Synthetic
ttgaaaccacttctgatttacct

SEQ ID NO: 15761 - DNA, 21 bp, Artificial Sequence
  Synthetic
tcctgattcatttttctctgg

SEQ ID NO: 15762 - DNA, 19 bp, Artificial Sequence
  Synthetic
ctccaaagtaatcggttcg

SEQ ID NO: 15763 - DNA, 18 bp, Artificial Sequence
  Synthetic
cacgccaaatcgcaaggt

SEQ ID NO: 15764 - DNA, 16 bp, Artificial Sequence
  Synthetic
cctccgcgctgatgca

SEQ ID NO: 15765 - DNA, 18 bp, Artificial Sequence
  Synthetic
cgtgcgttgggtcaaaga

SEQ ID NO: 15766 - DNA, 19 bp, Artificial Sequence
  Synthetic
ctgaccgccattcacaacg

SEQ ID NO: 15767 - DNA, 18 bp, Artificial Sequence
  Synthetic
taccaaggccgctcgtac

SEQ ID NO: 15768 - DNA, 16 bp, Artificial Sequence
  Synthetic
cgtccgccaagatgcc

SEQ ID NO: 15769 - DNA, 17 bp, Artificial Sequence
  Synthetic
ggacgcgataccgacga

SEQ ID NO: 15770 - DNA, 18 bp, Artificial Sequence
  Synthetic
gcctgaacatccccacca

SEQ ID NO: 15771 - DNA, 16 bp, Artificial Sequence
  Synthetic
gacctgcggctcgtgt

SEQ ID NO: 15772 - DNA, 20 bp, Artificial Sequence
  Synthetic
gtcttattcggcaacatcgc

SEQ ID NO: 15773 - DNA, 17 bp, Artificial Sequence
  Synthetic
gggcggacttcatcgtg

SEQ ID NO: 15774 - DNA, 20 bp, Artificial Sequence
  Synthetic
ggaaacgccgaaattttccg

SEQ ID NO: 15775 - DNA, 20 bp, Artificial Sequence
  Synthetic
tccgaaccgtctttctgtgc

SEQ ID NO: 15776 - DNA, 20 bp, Artificial Sequence
  Synthetic
atgtccaacaagaaatgcgc

SEQ ID NO: 15777 - DNA, 20 bp, Artificial Sequence
  Synthetic
acatcggatgctcttccaga

SEQ ID NO: 15778 - DNA, 17 bp, Artificial Sequence
  Synthetic
tgtccaactcgagggcg

SEQ ID NO: 15779 - DNA, 20 bp, Artificial Sequence
  Synthetic
ggtctgaccgtctttgaagg

SEQ ID NO: 15780 - DNA, 18 bp, Artificial Sequence
  Synthetic
cgacaaacgtgccttccg

SEQ ID NO: 15781 - DNA, 18 bp, Artificial Sequence
  Synthetic
tccaaatcaaacgcgccc

SEQ ID NO: 15782 - DNA, 18 bp, Artificial Sequence
  Synthetic
cgtctgaacaccctcccg

SEQ ID NO: 15783 - DNA, 17 bp, Artificial Sequence
  Synthetic
catcgcttttgccgccg

SEQ ID NO: 15784 - DNA, 17 bp, Artificial Sequence
  Synthetic
gcacggacagggatcgt

SEQ ID NO: 15785 - DNA, 18 bp, Artificial Sequence
  Synthetic
cgaccaaccgaccgattc

SEQ ID NO: 15786 - DNA, 16 bp, Artificial Sequence
  Synthetic
ggcgcaacggccttac

SEQ ID NO: 15787 - DNA, 19 bp, Artificial Sequence
  Synthetic
gctttggcactgaaaagcg

SEQ ID NO: 15788 - DNA, 18 bp, Artificial Sequence
  Synthetic
tcgcctcgggattgaaca

SEQ ID NO: 15789 - DNA, 19 bp, Artificial Sequence
  Synthetic
ctatctgaagtccgagcgc

SEQ ID NO: 15790 - DNA, 19 bp, Artificial Sequence
  Synthetic
aaaactgtacagcaggcgc

SEQ ID NO: 15791 - DNA, 20 bp, Artificial Sequence
  Synthetic
ttttcgtcatccgttaccgc

SEQ ID NO: 15792 - DNA, 20 bp, Artificial Sequence
  Synthetic
cctactggtacatcgacacg

SEQ ID NO: 15793 - DNA, 18 bp, Artificial Sequence
  Synthetic
cccgaacacctgcaacaa

SEQ ID NO: 15794 - DNA, 20 bp, Artificial Sequence
  Synthetic
aaaaccgttcgttacctccg

SEQ ID NO: 15795 - DNA, 18 bp, Artificial Sequence
  Synthetic
gcgacaaataccccgttt

SEQ ID NO: 15796 - DNA, 20 bp, Artificial Sequence
  Synthetic
tcgtttatgctgatccctcg

SEQ ID NO: 15797 - DNA, 20 bp, Artificial Sequence
  Synthetic
ttcaatatagccaaggggat

SEQ ID NO: 15798 - DNA, 18 bp, Artificial Sequence
  Synthetic
gcgactgcgtgtccattg

SEQ ID NO: 15799 - DNA, 18 bp, Artificial Sequence
  Synthetic
tcgtcaacagcgtcgtcg

SEQ ID NO: 15800 - DNA, 17 bp, Artificial Sequence
  Synthetic
cacgcgctgaaggaggt

SEQ ID NO: 15801 - DNA, 17 bp, Artificial Sequence
  Synthetic
attgccgggaaacacgc

SEQ ID NO: 15802 - DNA, 18 bp, Artificial Sequence
  Synthetic
actgcccaaaagcgtacc

SEQ ID NO: 15803 - DNA, 18 bp, Artificial Sequence
  Synthetic
gttctttggcggcttcgt

SEQ ID NO: 15804 - DNA, 19 bp, Artificial Sequence
  Synthetic
gcggcgattatcatctgca

SEQ ID NO: 15805 - DNA, 18 bp, Artificial Sequence
  Synthetic
aaaatcggtgcggacgtg

SEQ ID NO: 15806 - DNA, 18 bp, Artificial Sequence
  Synthetic
atgagtccgaggctgtgg

SEQ ID NO: 15807 - DNA, 16 bp, Artificial Sequence
  Synthetic
gccattgcaggcggtt

SEQ ID NO: 15808 - DNA, 16 bp, Artificial Sequence
  Synthetic
ttgccgatgttgccgc

SEQ ID NO: 15809 - DNA, 16 bp, Artificial Sequence
  Synthetic
cgagtatggtggcgcg

SEQ ID NO: 15810 - DNA, 20 bp, Artificial Sequence
  Synthetic
tggtgttccaaagcagtacc

SEQ ID NO: 15811 - DNA, 20 bp, Artificial Sequence
  Synthetic
tgtattcctgatttccggcc

SEQ ID NO: 15812 - DNA, 23 bp, Artificial Sequence
  Synthetic
ctttgttatcgacttcaatttgg

SEQ ID NO: 15813 - DNA, 17 bp, Artificial Sequence
  Synthetic
gcgccgcataacctctt

SEQ ID NO: 15814 - DNA, 19 bp, Artificial Sequence
  Synthetic
agcagtagggtcatcaggc

SEQ ID NO: 15815 - DNA, 16 bp, Artificial Sequence
  Synthetic
gacagccagcgcatcg

SEQ ID NO: 15816 - DNA, 17 bp, Artificial Sequence
  Synthetic
tcgccctgatagccgtc

SEQ ID NO: 15817 - DNA, 18 bp, Artificial Sequence
  Synthetic
gatatgggcggcgagtcc

SEQ ID NO: 15818 - DNA, 16 bp, Artificial Sequence
  Synthetic
ggggcgaacaacaccg

SEQ ID NO: 15819 - DNA, 16 bp, Artificial Sequence
  Synthetic
tgctctgcggcggaca

SEQ ID NO: 15820 - DNA, 19 bp, Artificial Sequence
  Synthetic
ttgaacccgtataccaacc

SEQ ID NO: 15821 - DNA, 20 bp, Artificial Sequence
  Synthetic
cggtagctaagacgacgtcc

SEQ ID NO: 15822 - DNA, 16 bp, Artificial Sequence
  Synthetic
catttcgcgcgcaccc

SEQ ID NO: 15823 - DNA, 16 bp, Artificial Sequence
  Synthetic
acctcttcgcgacgct

SEQ ID NO: 15824 - DNA, 20 bp, Artificial Sequence
  Synthetic
acgagcaaatgaaactggcg

SEQ ID NO: 15825 - DNA, 20 bp, Artificial Sequence
  Synthetic
cggaatcgtacaggaagacg

SEQ ID NO: 15826 - DNA, 16 bp, Artificial Sequence
  Synthetic
cgcgtggcaggaacac

SEQ ID NO: 15827 - DNA, 15 bp, Artificial Sequence
  Synthetic
aaaaggccgcgctcg

SEQ ID NO: 15828 - DNA, 20 bp, Artificial Sequence
  Synthetic
gaaactggtcgaatgcaacg

SEQ ID NO: 15829 - DNA, 18 bp, Artificial Sequence
  Synthetic
gatgcgcgtttcggcata

SEQ ID NO: 15830 - DNA, 19 bp, Artificial Sequence
  Synthetic
cgtatccgcactacctcgc

SEQ ID NO: 15831 - DNA, 16 bp, Artificial Sequence
  Synthetic
ggctgctgctgtccct

SEQ ID NO: 15832 - DNA, 18 bp, Artificial Sequence
  Synthetic
tttcgcaccctcttccgt

SEQ ID NO: 15833 - DNA, 18 bp, Artificial Sequence
  Synthetic
ccaaggcttcgatgaaga

SEQ ID NO: 15834 - DNA, 16 bp, Artificial Sequence
  Synthetic
tcagacggcaggcagc

SEQ ID NO: 15835 - DNA, 20 bp, Artificial Sequence
  Synthetic
ccgatttgcacaaattaacc

SEQ ID NO: 15836 - DNA, 21 bp, Artificial Sequence
  Synthetic
atttcggatttaattgacccg

SEQ ID NO: 15837 - DNA, 18 bp, Artificial Sequence
  Synthetic
gcgatgaagcgtgggatt

SEQ ID NO: 15838 - DNA, 21 bp, Artificial Sequence
  Synthetic
ctaccattgatattgtgtgct

SEQ ID NO: 15839 - DNA, 19 bp, Artificial Sequence
  Synthetic
aatttgggcaaagaccccg

SEQ ID NO: 15840 - DNA, 24 bp, Artificial Sequence
  Synthetic
tctttgattgataatggtgaaacg

SEQ ID NO: 15841 - DNA, 19 bp, Artificial Sequence
  Synthetic
aaacaattactggcgtgtc

SEQ ID NO: 15842 - DNA, 18 bp, Artificial Sequence
  Synthetic
aaagggatacgcaaccat

SEQ ID NO: 15843 - DNA, 16 bp, Artificial Sequence
  Synthetic
cgccgtactgctggct

SEQ ID NO: 15844 - DNA, 16 bp, Artificial Sequence
  Synthetic
acaccgacgctgacct

SEQ ID NO: 15845 - DNA, 19 bp, Artificial Sequence
  Synthetic
aatatttccgttgccgtcc

SEQ ID NO: 15846 - DNA, 20 bp, Artificial Sequence
  Synthetic
tatctgccagttttccttgt

SEQ ID NO: 15847 - DNA, 17 bp, Artificial Sequence
  Synthetic
ccgaaatgcgtaccggc

SEQ ID NO: 15848 - DNA, 16 bp, Artificial Sequence
  Synthetic
ggctcgcccgaatcca

SEQ ID NO: 15849 - DNA, 21 bp, Artificial Sequence
  Synthetic
ttgttttgcagtaaatcgaga

SEQ ID NO: 15850 - DNA, 19 bp, Artificial Sequence
  Synthetic
ttgtcctttgtaagcggcg

SEQ ID NO: 15851 - DNA, 20 bp, Artificial Sequence
  Synthetic
aagcagtcgaaaatcaggcg

SEQ ID NO: 15852 - DNA, 20 bp, Artificial Sequence
  Synthetic
aaggtcgaaatcgccaaacg

SEQ ID NO: 15853 - DNA, 18 bp, Artificial Sequence
  Synthetic
tcggggaatcagaagcgg

SEQ ID NO: 15854 - DNA, 19 bp, Artificial Sequence
  Synthetic
tgacgaaagaggcggaaca

SEQ ID NO: 15855 - DNA, 18 bp, Artificial Sequence
  Synthetic
gccgtgtcaagatggaaa

SEQ ID NO: 15856 - DNA, 16 bp, Artificial Sequence
  Synthetic
tgcagacggcggaaca

SEQ ID NO: 15857 - DNA, 18 bp, Artificial Sequence
  Synthetic
gtcgagaccgcctgtttc

SEQ ID NO: 15858 - DNA, 20 bp, Artificial Sequence
  Synthetic
aatcggcgagatttccatcg

SEQ ID NO: 15859 - DNA, 17 bp, Artificial Sequence
  Synthetic
cgtaccacgctgctgac

SEQ ID NO: 15860 - DNA, 20 bp, Artificial Sequence
  Synthetic
ccgtcctattatgtccgtcg

SEQ ID NO: 15861 - DNA, 18 bp, Artificial Sequence
  Synthetic
cgtatcggacgggttgga

SEQ ID NO: 15862 - DNA, 16 bp, Artificial Sequence
  Synthetic
gtgctcctggcgcaga

SEQ ID NO: 15863 - DNA, 18 bp, Artificial Sequence
  Synthetic
acgcttggaaaacacccg

SEQ ID NO: 15864 - DNA, 20 bp, Artificial Sequence
  Synthetic
atctcgaaacccgtcattcc

SEQ ID NO: 15865 - DNA, 16 bp, Artificial Sequence
  Synthetic
gcccgcctgagcaaca

SEQ ID NO: 15866 - DNA, 19 bp, Artificial Sequence
  Synthetic
cgaagaaaaccacctgcgt

SEQ ID NO: 15867 - DNA, 16 bp, Artificial Sequence
  Synthetic
ggaagctgcccgaagc

SEQ ID NO: 15868 - DNA, 16 bp, Artificial Sequence
  Synthetic
gccgccgtttcccgtt

SEQ ID NO: 15869 - DNA, 20 bp, Artificial Sequence
  Synthetic
aaggaaccaccgtatccaca

SEQ ID NO: 15870 - DNA, 17 bp, Artificial Sequence
  Synthetic
gcgcgataatcggcagg

SEQ ID NO: 15871 - DNA, 16 bp, Artificial Sequence
  Synthetic
acgtccagcggcgtca

SEQ ID NO: 15872 - DNA, 19 bp, Artificial Sequence
  Synthetic
gccgcatagtcaaaatgcc

SEQ ID NO: 15873 - DNA, 16 bp, Artificial Sequence
  Synthetic
ccgcagcaattcccgc

SEQ ID NO: 15874 - DNA, 19 bp, Artificial Sequence
  Synthetic
ccctcataaaaccgctgcc

SEQ ID NO: 15875 - DNA, 20 bp, Artificial Sequence
  Synthetic
aaccaccaccagataatcgc

SEQ ID NO: 15876 - DNA, 19 bp, Artificial Sequence
  Synthetic
tcgcatcctcctccttcaa

SEQ ID NO: 15877 - DNA, 19 bp, Artificial Sequence
  Synthetic
gccaccagcgtgattttgc

SEQ ID NO: 15878 - DNA, 15 bp, Artificial Sequence
  Synthetic
aatccgccgccgcat

SEQ ID NO: 15879 - DNA, 20 bp, Artificial Sequence
  Synthetic
taagcctgtccaacacatcc

SEQ ID NO: 15880 - DNA, 19 bp, Artificial Sequence
  Synthetic
caaaccccaccgcagaatg

SEQ ID NO: 15881 - DNA, 17 bp, Artificial Sequence
  Synthetic
gcggcagggatttgacc

SEQ ID NO: 15882 - DNA, 16 bp, Artificial Sequence
  Synthetic
caccgtgcgccctgtt

SEQ ID NO: 15883 - DNA, 20 bp, Artificial Sequence
  Synthetic
caacacggttgtttcagggt

SEQ ID NO: 15884 - DNA, 19 bp, Artificial Sequence
  Synthetic
gtatcacgcgcattcccct

SEQ ID NO: 15885 - DNA, 20 bp, Artificial Sequence
  Synthetic
acggcgtagttttcaatccg

SEQ ID NO: 15886 - DNA, 17 bp, Artificial Sequence
  Synthetic
tcaacggcgcggattcg

SEQ ID NO: 15887 - DNA, 16 bp, Artificial Sequence
  Synthetic
cgccggccgatgatga

SEQ ID NO: 15888 - DNA, 20 bp, Artificial Sequence
  Synthetic
tccactccgaatgtctgacg

SEQ ID NO: 15889 - DNA, 16 bp, Artificial Sequence
  Synthetic
cgtgccggggttctca

SEQ ID NO: 15890 - DNA, 21 bp, Artificial Sequence
  Synthetic
atactggaatttctgcgtttg

SEQ ID NO: 15891 - DNA, 18 bp, Artificial Sequence
  Synthetic
tttggtggcggaggaaac

SEQ ID NO: 15892 - DNA, 19 bp, Artificial Sequence
  Synthetic
tggtcaggaacaatgcctg

SEQ ID NO: 15893 - DNA, 19 bp, Artificial Sequence
  Synthetic
ataaggcgtggcagaagga

SEQ ID NO: 15894 - DNA, 20 bp, Artificial Sequence
  Synthetic
agagatggttaacgaaggcg

SEQ ID NO: 15895 - DNA, 19 bp, Artificial Sequence
  Synthetic
gccacatcgacatccaaga

SEQ ID NO: 15896 - DNA, 19 bp, Artificial Sequence
  Synthetic
agctcgttaccgaacagct

SEQ ID NO: 15897 - DNA, 18 bp, Artificial Sequence
  Synthetic
gccgtttaccgcaacaac

SEQ ID NO: 15898 - DNA, 19 bp, Artificial Sequence
  Synthetic
gtatccatcccgattcggc

SEQ ID NO: 15899 - DNA, 19 bp, Artificial Sequence
  Synthetic
ttacctctacacggacggc

SEQ ID NO: 15900 - DNA, 23 bp, Artificial Sequence
  Synthetic
gatgtttcaaatttcgaagatgt

SEQ ID NO: 15901 - DNA, 19 bp, Artificial Sequence
  Synthetic
tagctacccggctatgcaa

SEQ ID NO: 15902 - DNA, 16 bp, Artificial Sequence
  Synthetic
cttttcctgccgcgcc

SEQ ID NO: 15903 - DNA, 16 bp, Artificial Sequence
  Synthetic
aacgctcaaaccgccg

SEQ ID NO: 15904 - DNA, 15 bp, Artificial Sequence
  Synthetic
gccatcgcgccgttt

SEQ ID NO: 15905 - DNA, 18 bp, Artificial Sequence
  Synthetic
ccctgaaatcgaacgccg

SEQ ID NO: 15906 - DNA, 20 bp, Artificial Sequence
  Synthetic
cttcctgattaccatcggcg

SEQ ID NO: 15907 - DNA, 18 bp, Artificial Sequence
  Synthetic
tcaacagtggcgcgaaac

SEQ ID NO: 15908 - DNA, 16 bp, Artificial Sequence
  Synthetic
gcggcggcttcagcta

SEQ ID NO: 15909 - DNA, 16 bp, Artificial Sequence
  Synthetic
ggcagcgttacgggca

SEQ ID NO: 15910 - DNA, 20 bp, Artificial Sequence
  Synthetic
ggtctggtcggacagattgc

SEQ ID NO: 15911 - DNA, 17 bp, Artificial Sequence
  Synthetic
tctacaccgcccaagca

SEQ ID NO: 15912 - DNA, 18 bp, Artificial Sequence
  Synthetic
ggcacgttctaccaaggc

SEQ ID NO: 15913 - DNA, 16 bp, Artificial Sequence
  Synthetic
cagctcgcccaagcca

SEQ ID NO: 15914 - DNA, 17 bp, Artificial Sequence
  Synthetic
cctcacccaagccgtct

SEQ ID NO: 15915 - DNA, 19 bp, Artificial Sequence
  Synthetic
cggcaaacacccattgacc

SEQ ID NO: 15916 - DNA, 20 bp, Artificial Sequence
  Synthetic
cgtaaacgctgtaatactgc

SEQ ID NO: 15917 - DNA, 20 bp, Artificial Sequence
  Synthetic
caatgactaccaccacgacg

SEQ ID NO: 15918 - DNA, 19 bp, Artificial Sequence
  Synthetic
aaactaccgccgcaatacg

SEQ ID NO: 15919 - DNA, 16 bp, Artificial Sequence
  Synthetic
cgaagcccagcgcatc

SEQ ID NO: 15920 - DNA, 17 bp, Artificial Sequence
  Synthetic
acgcggctacaacgtcg

SEQ ID NO: 15921 - DNA, 17 bp, Artificial Sequence
  Synthetic
cccgttgcgtttcggaa

SEQ ID NO: 15922 - DNA, 20 bp, Artificial Sequence
  Synthetic
gctgccgtagattttgacgg

SEQ ID NO: 15923 - DNA, 18 bp, Artificial Sequence
  Synthetic
ttcgggtttttgacggcg

SEQ ID NO: 15924 - DNA, 18 bp, Artificial Sequence
  Synthetic
tcgggagccagagtctct

SEQ ID NO: 15925 - DNA, 18 bp, Artificial Sequence
  Synthetic
gcgttgcgccataatggt

SEQ ID NO: 15926 - DNA, 16 bp, Artificial Sequence
  Synthetic
gcggcggctttgttca

SEQ ID NO: 15927 - DNA, 16 bp, Artificial Sequence
  Synthetic
cagctgacgggcgtgt

SEQ ID NO: 15928 - DNA, 16 bp, Artificial Sequence
  Synthetic
cgcagcaaaccgccga

SEQ ID NO: 15929 - DNA, 20 bp, Artificial Sequence
  Synthetic
tgcctgatacagtcggtaca

SEQ ID NO: 15930 - DNA, 19 bp, Artificial Sequence
  Synthetic
tttggaaggcaagagcgac

SEQ ID NO: 15931 - DNA, 17 bp, Artificial Sequence
  Synthetic
tgccgcctgcaaacctc

SEQ ID NO: 15932 - DNA, 15 bp, Artificial Sequence
  Synthetic
ccaaacgccgcgtgt

SEQ ID NO: 15933 - DNA, 17 bp, Artificial Sequence
  Synthetic
gcaacgacatcctcgcc

SEQ ID NO: 15934 - DNA, 16 bp, Artificial Sequence
  Synthetic
ccgcgctgtacggcat

SEQ ID NO: 15935 - DNA, 18 bp, Artificial Sequence
  Synthetic
atcgacgaccaccacacc

SEQ ID NO: 15936 - DNA, 20 bp, Artificial Sequence
  Synthetic
cttagggcaaatgggtctgc

SEQ ID NO: 15937 - DNA, 18 bp, Artificial Sequence
  Synthetic
atcagtacgggaatgagc

SEQ ID NO: 15938 - DNA, 19 bp, Artificial Sequence
  Synthetic
ttgaaagtgcgcgaactgt

SEQ ID NO: 15939 - DNA, 17 bp, Artificial Sequence
  Synthetic
gccaaagccgaactcgc

SEQ ID NO: 15940 - DNA, 20 bp, Artificial Sequence
  Synthetic
cccataccgattccaacacg

SEQ ID NO: 15941 - DNA, 19 bp, Artificial Sequence
  Synthetic
gcgtgggcgttttacttgt

SEQ ID NO: 15942 - DNA, 20 bp, Artificial Sequence
  Synthetic
cgtagccggcttctatttcg

SEQ ID NO: 15943 - DNA, 20 bp, Artificial Sequence
  Synthetic
gccaaacggcaaaaaaacgc

SEQ ID NO: 15944 - DNA, 22 bp, Artificial Sequence
  Synthetic
taaacttttggtgctttttccg

SEQ ID NO: 15945 - DNA, 22 bp, Artificial Sequence
  Synthetic
aaaagaaggttcaatatgtcgg

SEQ ID NO: 15946 - DNA, 16 bp, Artificial Sequence
  Synthetic
cggctgtgcgtgaggt

SEQ ID NO: 15947 - DNA, 19 bp, Artificial Sequence
  Synthetic
cctgttttttgacgctgaa

SEQ ID NO: 15948 - DNA, 17 bp, Artificial Sequence
  Synthetic
gcacatccgccacatcc

SEQ ID NO: 15949 - DNA, 18 bp, Artificial Sequence
  Synthetic
cagcaggctgatggcaat

SEQ ID NO: 15950 - DNA, 16 bp, Artificial Sequence
  Synthetic
cggcccagcaacacca

SEQ ID NO: 15951 - DNA, 17 bp, Artificial Sequence
  Synthetic
ctcccgcaacaatgggc

SEQ ID NO: 15952 - DNA, 17 bp, Artificial Sequence
  Synthetic
ggcacctgtatcggcgt

SEQ ID NO: 15953 - DNA, 16 bp, Artificial Sequence
  Synthetic
aaacccaagccgcacc

SEQ ID NO: 15954 - DNA, 18 bp, Artificial Sequence
  Synthetic
aaaagccgaaaccgcacc

SEQ ID NO: 15955 - DNA, 16 bp, Artificial Sequence
  Synthetic
tgagttcgggcgggag

SEQ ID NO: 15956 - DNA, 20 bp, Artificial Sequence
  Synthetic
aggaaaaccaacatgtccgc

SEQ ID NO: 15957 - DNA, 18 bp, Artificial Sequence
  Synthetic
acctgttcccgattggcg

SEQ ID NO: 15958 - DNA, 16 bp, Artificial Sequence
  Synthetic
cagcgtgcagagccac

SEQ ID NO: 15959 - DNA, 19 bp, Artificial Sequence
  Synthetic
gcgaagaaagccttgccaa

SEQ ID NO: 15960 - DNA, 18 bp, Artificial Sequence
  Synthetic
atggcggacggtataggc

SEQ ID NO: 15961 - DNA, 19 bp, Artificial Sequence
  Synthetic
cggagcatccaaatggcag

SEQ ID NO: 15962 - DNA, 17 bp, Artificial Sequence
  Synthetic
cgtaaaggcagacgcgg

SEQ ID NO: 15963 - DNA, 19 bp, Artificial Sequence
  Synthetic
caccagaggttcgtccact

SEQ ID NO: 15964 - DNA, 18 bp, Artificial Sequence
  Synthetic
aaagatgaagcggcaatg

SEQ ID NO: 15965 - DNA, 20 bp, Artificial Sequence
  Synthetic
ccaaacccaatgcttcaacc

SEQ ID NO: 15966 - DNA, 19 bp, Artificial Sequence
  Synthetic
gcggatccgggtttgatta

SEQ ID NO: 15967 - DNA, 20 bp, Artificial Sequence
  Synthetic
tttgccgaaaatatccccca

SEQ ID NO: 15968 - DNA, 18 bp, Artificial Sequence
  Synthetic
tgcctgtatttccgcgac

SEQ ID NO: 15969 - DNA, 20 bp, Artificial Sequence
  Synthetic
aactcaatgcggacgtatcc

SEQ ID NO: 15970 - DNA, 20 bp, Artificial Sequence
  Synthetic
cgcacaaaaccatgtttggg

SEQ ID NO: 15971 - DNA, 18 bp, Artificial Sequence
  Synthetic
gcgcgccatttgagtttc

SEQ ID NO: 15972 - DNA, 19 bp, Artificial Sequence
  Synthetic
tgcatcgatttgaccggtt

SEQ ID NO: 15973 - DNA, 18 bp, Artificial Sequence
  Synthetic
gcttgaaagcccacctcg

SEQ ID NO: 15974 - DNA, 17 bp, Artificial Sequence
  Synthetic
gactacggcttccacgc

SEQ ID NO: 15975 - DNA, 15 bp, Artificial Sequence
  Synthetic
tcaacgcgccgcaca

SEQ ID NO: 15976 - DNA, 20 bp, Artificial Sequence
  Synthetic
cctgacaggttgcttcgaag

SEQ ID NO: 15977 - DNA, 16 bp, Artificial Sequence
  Synthetic
cccgactttgagcgcg

SEQ ID NO: 15978 - DNA, 19 bp, Artificial Sequence
  Synthetic
gtcggggtggacttcaaag

SEQ ID NO: 15979 - DNA, 20 bp, Artificial Sequence
  Synthetic
atcaggtcggtcagatagct

SEQ ID NO: 15980 - DNA, 20 bp, Artificial Sequence
  Synthetic
ttgcacgtcgatttcagtgg

SEQ ID NO: 15981 - DNA, 18 bp, Artificial Sequence
  Synthetic
accgtatgttccgcaacc

SEQ ID NO: 15982 - DNA, 18 bp, Artificial Sequence
  Synthetic
gcggggttcagttcgatg

SEQ ID NO: 15983 - DNA, 17 bp, Artificial Sequence
  Synthetic
gcggatgaagccttcgc

SEQ ID NO: 15984 - DNA, 18 bp, Artificial Sequence
  Synthetic
tgaaacatctgccgcgtc

SEQ ID NO: 15985 - DNA, 20 bp, Artificial Sequence
  Synthetic
gcaaaaaccaccgtttaccg

SEQ ID NO: 15986 - DNA, 20 bp, Artificial Sequence
  Synthetic
ccatactgacggttctgcag

SEQ ID NO: 15987 - DNA, 16 bp, Artificial Sequence
  Synthetic
cggcaagcgtcccgtt

SEQ ID NO: 15988 - DNA, 18 bp, Artificial Sequence
  Synthetic
gttgacggtgcggacatt

SEQ ID NO: 15989 - DNA, 16 bp, Artificial Sequence
  Synthetic
ccgtcgtgcgaggcat

SEQ ID NO: 15990 - DNA, 19 bp, Artificial Sequence
  Synthetic
ggaagaaatccgcgctttg

SEQ ID NO: 15991 - DNA, 16 bp, Artificial Sequence
  Synthetic
cattgcagcacgccgg

SEQ ID NO: 15992 - DNA, 16 bp, Artificial Sequence
  Synthetic
cgttcgcgtggggcat

SEQ ID NO: 15993 - DNA, 20 bp, Artificial Sequence
  Synthetic
ttcggcaaaaaagaaaccgc

SEQ ID NO: 15994 - DNA, 17 bp, Artificial Sequence
  Synthetic
gtaccgacgcttccggt

SEQ ID NO: 15995 - DNA, 16 bp, Artificial Sequence
  Synthetic
cacgcgcccgaacaga

SEQ ID NO: 15996 - DNA, 20 bp, Artificial Sequence
  Synthetic
caaaatcagggtttgcgagc

SEQ ID NO: 15997 - DNA, 18 bp, Artificial Sequence
  Synthetic
gttcgggaagtcgctgac

SEQ ID NO: 15998 - DNA, 18 bp, Artificial Sequence
  Synthetic
catcggtgcgctctttgg

SEQ ID NO: 15999 - DNA, 16 bp, Artificial Sequence
  Synthetic
gatacgggcggcggtt

SEQ ID NO: 16000 - DNA, 19 bp, Artificial Sequence
  Synthetic
ctgatgagggcttcgagga

SEQ ID NO: 16001 - DNA, 20 bp, Artificial Sequence
  Synthetic
tactgcaaaaggtgatgccg

SEQ ID NO: 16002 - DNA, 20 bp, Artificial Sequence
  Synthetic
tccggcttcgaacaatctgt

SEQ ID NO: 16003 - DNA, 17 bp, Artificial Sequence
  Synthetic
tgccacatcgggttgcc

SEQ ID NO: 16004 - DNA, 18 bp, Artificial Sequence
  Synthetic
cctgcgtcagatcgggat

SEQ ID NO: 16005 - DNA, 18 bp, Artificial Sequence
  Synthetic
cggttcgacaccccattt

SEQ ID NO: 16006 - DNA, 18 bp, Artificial Sequence
  Synthetic
ctcaggcacgacatcacg

SEQ ID NO: 16007 - DNA, 18 bp, Artificial Sequence
  Synthetic
ggacttttctcccacgaa

SEQ ID NO: 16008 - DNA, 18 bp, Artificial Sequence
  Synthetic
aggctgggtcaaatccgg

SEQ ID NO: 16009 - DNA, 16 bp, Artificial Sequence
  Synthetic
gggcaagtgttcgccg

SEQ ID NO: 16010 - DNA, 16 bp, Artificial Sequence
  Synthetic
tacggctgcggacggt

SEQ ID NO: 16011 - DNA, 16 bp, Artificial Sequence
  Synthetic
gttgtggtagccgccg

SEQ ID NO: 16012 - DNA, 18 bp, Artificial Sequence
  Synthetic
atcacgaagacggctcgg

SEQ ID NO: 16013 - DNA, 18 bp, Artificial Sequence
  Synthetic
atgtcgaaaccgccgttg

SEQ ID NO: 16014 - DNA, 20 bp, Artificial Sequence
  Synthetic
attttccaacacctgcttgc

SEQ ID NO: 16015 - DNA, 20 bp, Artificial Sequence
  Synthetic
aaccaccacgtcgtaatcgt

SEQ ID NO: 16016 - DNA, 16 bp, Artificial Sequence
  Synthetic
ggcgcatacacgtcgg

SEQ ID NO: 16017 - DNA, 20 bp, Artificial Sequence
  Synthetic
aactacaccaaccgttctcc

SEQ ID NO: 16018 - DNA, 16 bp, Artificial Sequence
  Synthetic
cgcgcttgccagccaa

SEQ ID NO: 16019 - DNA, 20 bp, Artificial Sequence
  Synthetic
tatcggcaatttcctgctgg

SEQ ID NO: 16020 - DNA, 20 bp, Artificial Sequence
  Synthetic
gcaaacgcctcgatattggg

SEQ ID NO: 16021 - DNA, 20 bp, Artificial Sequence
  Synthetic
tacgcaaacactacgtctgc

SEQ ID NO: 16022 - DNA, 17 bp, Artificial Sequence
  Synthetic
gcgcggtgcaaatcttg

SEQ ID NO: 16023 - DNA, 16 bp, Artificial Sequence
  Synthetic
cccaacatcgcgcgca

SEQ ID NO: 16024 - DNA, 16 bp, Artificial Sequence
  Synthetic
ggctcgtcggcgaaga

SEQ ID NO: 16025 - DNA, 20 bp, Artificial Sequence
  Synthetic
gatacgcctttcaaacggct

SEQ ID NO: 16026 - DNA, 18 bp, Artificial Sequence
  Synthetic
agcttgcagaaacgcgag

SEQ ID NO: 16027 - DNA, 16 bp, Artificial Sequence
  Synthetic
cttcgagcgcgtccag

SEQ ID NO: 16028 - DNA, 20 bp, Artificial Sequence
  Synthetic
tagcgatgtcgtctgaaagc

SEQ ID NO: 16029 - DNA, 19 bp, Artificial Sequence
  Synthetic
cctgtacgggcagggattt

SEQ ID NO: 16030 - DNA, 16 bp, Artificial Sequence
  Synthetic
tgccacagttgcggcg

SEQ ID NO: 16031 - DNA, 16 bp, Artificial Sequence
  Synthetic
tcggcatgggcaagct

SEQ ID NO: 16032 - DNA, 20 bp, Artificial Sequence
  Synthetic
aatgggggcggtgtttaagc

SEQ ID NO: 16033 - DNA, 18 bp, Artificial Sequence
  Synthetic
tcggtgcgttcttctccg

SEQ ID NO: 16034 - DNA, 16 bp, Artificial Sequence
  Synthetic
tgcctgtccgacgacc

SEQ ID NO: 16035 - DNA, 18 bp, Artificial Sequence
  Synthetic
tatgccaaaagccccgtc

SEQ ID NO: 16036 - DNA, 16 bp, Artificial Sequence
  Synthetic
tgggaacaagccgcca

SEQ ID NO: 16037 - DNA, 18 bp, Artificial Sequence
  Synthetic
cgacaacacgctcgttct

SEQ ID NO: 16038 - DNA, 20 bp, Artificial Sequence
  Synthetic
ttgaaaccctgaccctctgc

SEQ ID NO: 16039 - DNA, 16 bp, Artificial Sequence
  Synthetic
gcgtccagggtcagct

SEQ ID NO: 16040 - DNA, 18 bp, Artificial Sequence
  Synthetic
acttcctgatcgcgcatc

SEQ ID NO: 16041 - DNA, 20 bp, Artificial Sequence
  Synthetic
gggtttgtaccaacagtccg

SEQ ID NO: 16042 - DNA, 20 bp, Artificial Sequence
  Synthetic
gtctacttcgcggttgaagg

SEQ ID NO: 16043 - DNA, 17 bp, Artificial Sequence
  Synthetic
aatggcggggaagtcgg

SEQ ID NO: 16044 - DNA, 17 bp, Artificial Sequence
  Synthetic
gcgcgtaggtcagttcc

SEQ ID NO: 16045 - DNA, 16 bp, Artificial Sequence
  Synthetic
cgcctaagccgatgcg

SEQ ID NO: 16046 - DNA, 18 bp, Artificial Sequence
  Synthetic
cgtacacgctccaaaccg

SEQ ID NO: 16047 - DNA, 23 bp, Artificial Sequence
  Synthetic
ttaacacagagtatgcaacttac

SEQ ID NO: 16048 - DNA, 21 bp, Artificial Sequence
  Synthetic
cagtatgacaatttgctgaac

SEQ ID NO: 16049 - DNA, 18 bp, Artificial Sequence
  Synthetic
tgctgattaccaccaaca

SEQ ID NO: 16050 - DNA, 18 bp, Artificial Sequence
  Synthetic
ttgggtcaaaatgggtgc

SEQ ID NO: 16051 - DNA, 19 bp, Artificial Sequence
  Synthetic
tgaaatgttcaacggcatt

SEQ ID NO: 16052 - DNA, 19 bp, Artificial Sequence
  Synthetic
ctgaaaatgcgcctgctca

SEQ ID NO: 16053 - DNA, 21 bp, Artificial Sequence
  Synthetic
ttcttgttttgatgttggcag

SEQ ID NO: 16054 - DNA, 18 bp, Artificial Sequence
  Synthetic
actttagcgcgaaaccat

SEQ ID NO: 16055 - DNA, 18 bp, Artificial Sequence
  Synthetic
cctgcatttcccaaaagc

SEQ ID NO: 16056 - DNA, 18 bp, Artificial Sequence
  Synthetic
caaccgcttgaaacactt

SEQ ID NO: 16057 - DNA, 21 bp, Artificial Sequence
  Synthetic
catacaggacataatgcctac

SEQ ID NO: 16058 - DNA, 22 bp, Artificial Sequence
  Synthetic
gcatatccggcaaataatcttg

SEQ ID NO: 16059 - DNA, 18 bp, Artificial Sequence
  Synthetic
gtcgtcaaagcaggcaaa

SEQ ID NO: 16060 - DNA, 19 bp, Artificial Sequence
  Synthetic
cggcaataatcgacagcgc

SEQ ID NO: 16061 - DNA, 17 bp, Artificial Sequence
  Synthetic
gcccgtagcgacttggt

SEQ ID NO: 16062 - DNA, 25 bp, Artificial Sequence
  Synthetic
agatagggagagaaataaatatcgt

SEQ ID NO: 16063 - DNA, 17 bp, Artificial Sequence
  Synthetic
gcctgatcgaatggccg

SEQ ID NO: 16064 - DNA, 16 bp, Artificial Sequence
  Synthetic
gccggcacactgttcg

SEQ ID NO: 16065 - DNA, 16 bp, Artificial Sequence
  Synthetic
gcgtgtcgccaaaggg

SEQ ID NO: 16066 - DNA, 19 bp, Artificial Sequence
  Synthetic
gcacccgatatgccgtcta

SEQ ID NO: 16067 - DNA, 20 bp, Artificial Sequence
  Synthetic
gccgagttcttctccaaact

SEQ ID NO: 16068 - DNA, 20 bp, Artificial Sequence
  Synthetic
gatgccttgttcttccagcc

SEQ ID NO: 16069 - DNA, 18 bp, Artificial Sequence
  Synthetic
cgaccaagcccaaatcgc

SEQ ID NO: 16070 - DNA, 19 bp, Artificial Sequence
  Synthetic
caacaccagctcgttcaca

SEQ ID NO: 16071 - DNA, 20 bp, Artificial Sequence
  Synthetic
gaagcagtcgtctatggtcg

SEQ ID NO: 16072 - DNA, 16 bp, Artificial Sequence
  Synthetic
gaccaggccctgcgta

SEQ ID NO: 16073 - DNA, 18 bp, Artificial Sequence
  Synthetic
aagcaagcgaaaacggca

SEQ ID NO: 16074 - DNA, 16 bp, Artificial Sequence
  Synthetic
gtgctcctggcgcaga

SEQ ID NO: 16075 - DNA, 20 bp, Artificial Sequence
  Synthetic
aaacacccgcttcaaaaccc

SEQ ID NO: 16076 - DNA, 18 bp, Artificial Sequence
  Synthetic
gggaatccggacctgtcc

SEQ ID NO: 16077 - DNA, 17 bp, Artificial Sequence
  Synthetic
caaccatacggacggcg

SEQ ID NO: 16078 - DNA, 20 bp, Artificial Sequence
  Synthetic
tgtcgatgacggtagtcgga

SEQ ID NO: 16079 - DNA, 16 bp, Artificial Sequence
  Synthetic
ccgctccggcatggtt

SEQ ID NO: 16080 - DNA, 16 bp, Artificial Sequence
  Synthetic
cctgacattcggcggc

SEQ ID NO: 16081 - DNA, 15 bp, Artificial Sequence
  Synthetic
gcgcgtaccggcaaa

SEQ ID NO: 16082 - DNA, 20 bp, Artificial Sequence
  Synthetic
cattggatggcgagatgtgg

SEQ ID NO: 16083 - DNA, 20 bp, Artificial Sequence
  Synthetic
cgcgggttggaagtattggt

SEQ ID NO: 16084 - DNA, 17 bp, Artificial Sequence
  Synthetic
ccggcgtcatgttggaa

SEQ ID NO: 16085 - DNA, 16 bp, Artificial Sequence
  Synthetic
atatcgggcaggcgca

SEQ ID NO: 16086 - DNA, 16 bp, Artificial Sequence
  Synthetic
ggcatggtcgccccaa

SEQ ID NO: 16087 - DNA, 16 bp, Artificial Sequence
  Synthetic
cggggtggtgtccgta

SEQ ID NO: 16088 - DNA, 17 bp, Artificial Sequence
  Synthetic
cagaaagccgcgtttgc

SEQ ID NO: 16089 - DNA, 16 bp, Artificial Sequence
  Synthetic
acgcagtcggtcaggt

SEQ ID NO: 16090 - DNA, 17 bp, Artificial Sequence
  Synthetic
gcggcggttcacaatgt

SEQ ID NO: 16091 - DNA, 19 bp, Artificial Sequence
  Synthetic
aatggcggtcagaatcagc

SEQ ID NO: 16092 - DNA, 18 bp, Artificial Sequence
  Synthetic
cgttcagacggcctttga

SEQ ID NO: 16093 - DNA, 19 bp, Artificial Sequence
  Synthetic
cgttgatgatgtcgtgcgg

SEQ ID NO: 16094 - DNA, 17 bp, Artificial Sequence
  Synthetic
cgactggtcaaggccgt

SEQ ID NO: 16095 - DNA, 20 bp, Artificial Sequence
  Synthetic
gtttgattgccgaaccaggt

SEQ ID NO: 16096 - DNA, 18 bp, Artificial Sequence
  Synthetic
agcgaaagttccaaacct

SEQ ID NO: 16097 - DNA, 19 bp, Artificial Sequence
  Synthetic
atgtcgcggaatttggcag

SEQ ID NO: 16098 - DNA, 19 bp, Artificial Sequence
  Synthetic
gtgctttcttgcgcactgc

SEQ ID NO: 16099 - DNA, 19 bp, Artificial Sequence
  Synthetic
acagaccttttccggattg

SEQ ID NO: 16100 - DNA, 17 bp, Artificial Sequence
  Synthetic
ggcgttgactttgccct

SEQ ID NO: 16101 - DNA, 16 bp, Artificial Sequence
  Synthetic
catccacgccatcggc

SEQ ID NO: 16102 - DNA, 16 bp, Artificial Sequence
  Synthetic
gatgcttgccgtgcgc

SEQ ID NO: 16103 - DNA, 16 bp, Artificial Sequence
  Synthetic
ggcgaagtcgtgtccg

SEQ ID NO: 16104 - DNA, 16 bp, Artificial Sequence
  Synthetic
gatgccagcatcggcg

SEQ ID NO: 16105 - DNA, 16 bp, Artificial Sequence
  Synthetic
gaccgaacttgccgcc

SEQ ID NO: 16106 - DNA, 18 bp, Artificial Sequence
  Synthetic
tcggtttcgacatcacgc

SEQ ID NO: 16107 - DNA, 18 bp, Artificial Sequence
  Synthetic
gccatgtacggtttgggt

SEQ ID NO: 16108 - DNA, 18 bp, Artificial Sequence
  Synthetic
aacgccaaggcaaccaaa

SEQ ID NO: 16109 - DNA, 16 bp, Artificial Sequence
  Synthetic
ggcttgcccgtcttgg

SEQ ID NO: 16110 - DNA, 19 bp, Artificial Sequence
  Synthetic
catcggaaaacacgtcgcc

SEQ ID NO: 16111 - DNA, 20 bp, Artificial Sequence
  Synthetic
acaaacgcaagacttcgtct

SEQ ID NO: 16112 - DNA, 20 bp, Artificial Sequence
  Synthetic
tcgatgcccgtaaacgttac

SEQ ID NO: 16113 - DNA, 16 bp, Artificial Sequence
  Synthetic
tttccggcggcgaacg

SEQ ID NO: 16114 - DNA, 20 bp, Artificial Sequence
  Synthetic
gacggaacagaacaaatgcc

SEQ ID NO: 16115 - DNA, 17 bp, Artificial Sequence
  Synthetic
gggcaaacggcaacagc

SEQ ID NO: 16116 - DNA, 21 bp, Artificial Sequence
  Synthetic
tcgtacaggttaatcaaatgg

SEQ ID NO: 16117 - DNA, 18 bp, Artificial Sequence
  Synthetic
taccccctaccctgaccg

SEQ ID NO: 16118 - DNA, 16 bp, Artificial Sequence
  Synthetic
cgaagccctgttccgc

SEQ ID NO: 16119 - DNA, 18 bp, Artificial Sequence
  Synthetic
cccgatacagctaccccg

SEQ ID NO: 16120 - DNA, 18 bp, Artificial Sequence
  Synthetic
gacagggcggttgtcatc

SEQ ID NO: 16121 - DNA, 20 bp, Artificial Sequence
  Synthetic
acaggaagcgtttcatctgg

SEQ ID NO: 16122 - DNA, 20 bp, Artificial Sequence
  Synthetic
ttgttcgacggtcattttgc

SEQ ID NO: 16123 - DNA, 16 bp, Artificial Sequence
  Synthetic
gtgtgccgcttccgca

SEQ ID NO: 16124 - DNA, 19 bp, Artificial Sequence
  Synthetic
aggcacggtagaagaagcc

SEQ ID NO: 16125 - DNA, 15 bp, Artificial Sequence
  Synthetic
tacgcgcgcggcatt

SEQ ID NO: 16126 - DNA, 19 bp, Artificial Sequence
  Synthetic
aatatttcaccgcccccga

SEQ ID NO: 16127 - DNA, 16 bp, Artificial Sequence
  Synthetic
tccccgaccgcgacat

SEQ ID NO: 16128 - DNA, 16 bp, Artificial Sequence
  Synthetic
cgcggacaagacctgc

SEQ ID NO: 16129 - DNA, 16 bp, Artificial Sequence
  Synthetic
cgcaggattgtgccgc

SEQ ID NO: 16130 - DNA, 17 bp, Artificial Sequence
  Synthetic
ccgaacgcgcctttctg

SEQ ID NO: 16131 - DNA, 16 bp, Artificial Sequence
  Synthetic
gccgcctttgtccgca

SEQ ID NO: 16132 - DNA, 18 bp, Artificial Sequence
  Synthetic
ttaaggcggctttgtcgg

SEQ ID NO: 16133 - DNA, 20 bp, Artificial Sequence
  Synthetic
gtaccgcttcaggaaatcgc

SEQ ID NO: 16134 - DNA, 18 bp, Artificial Sequence
  Synthetic
gcccagttgaacagggga

SEQ ID NO: 16135 - DNA, 20 bp, Artificial Sequence
  Synthetic
cttaccccgtatcggcaaac

SEQ ID NO: 16136 - DNA, 16 bp, Artificial Sequence
  Synthetic
cggctgtgcgtgaggt

SEQ ID NO: 16137 - DNA, 16 bp, Artificial Sequence
  Synthetic
cggcgcggcaaagtct

SEQ ID NO: 16138 - DNA, 16 bp, Artificial Sequence
  Synthetic
gcgaactcaacgccgc

SEQ ID NO: 16139 - DNA, 21 bp, Artificial Sequence
  Synthetic
gaaaagtaattcttggttgcc

SEQ ID NO: 16140 - DNA, 20 bp, Artificial Sequence
  Synthetic
ttccacataatgaagcggct

SEQ ID NO: 16141 - DNA, 20 bp, Artificial Sequence
  Synthetic
aaatcaaactgattgccgcc

SEQ ID NO: 16142 - DNA, 19 bp, Artificial Sequence
  Synthetic
tccgaaaaaggcctgaccg

SEQ ID NO: 16143 - DNA, 17 bp, Artificial Sequence
  Synthetic
tcgcggacgacgtttcc

SEQ ID NO: 16144 - DNA, 18 bp, Artificial Sequence
  Synthetic
catttgttgcaggcggga

SEQ ID NO: 16145 - DNA, 19 bp, Artificial Sequence
  Synthetic
gacggcacagtaaaggctg

SEQ ID NO: 16146 - DNA, 19 bp, Artificial Sequence
  Synthetic
gccttcgacgatttcggaa

SEQ ID NO: 16147 - DNA, 16 bp, Artificial Sequence
  Synthetic
cgccaaccgcaaccat

SEQ ID NO: 16148 - DNA, 16 bp, Artificial Sequence
  Synthetic
tccctgccgtccgcat

SEQ ID NO: 16149 - DNA, 17 bp, Artificial Sequence
  Synthetic
actggtggctgacccat

SEQ ID NO: 16150 - DNA, 18 bp, Artificial Sequence
  Synthetic
cccaatttcgcacaatgg

SEQ ID NO: 16151 - DNA, 16 bp, Artificial Sequence
  Synthetic
gctgatcggcgatgcg

SEQ ID NO: 16152 - DNA, 16 bp, Artificial Sequence
  Synthetic
ctgaccggcgttccct

SEQ ID NO: 16153 - DNA, 20 bp, Artificial Sequence
  Synthetic
cgaattgaacggcttatggc

SEQ ID NO: 16154 - DNA, 16 bp, Artificial Sequence
  Synthetic
tgaccgccctgacagg

SEQ ID NO: 16155 - DNA, 18 bp, Artificial Sequence
  Synthetic
aaccgaaaatgccgtctt

SEQ ID NO: 16156 - DNA, 18 bp, Artificial Sequence
  Synthetic
tcctcctcaaacccgacc

SEQ ID NO: 16157 - DNA, 16 bp, Artificial Sequence
  Synthetic
gccgcatccgcctaca

SEQ ID NO: 16158 - DNA, 20 bp, Artificial Sequence
  Synthetic
cggacggcaagaaataccgg

SEQ ID NO: 16159 - DNA, 19 bp, Artificial Sequence
  Synthetic
gatgcgctgtttgcacaaa

SEQ ID NO: 16160 - DNA, 15 bp, Artificial Sequence
  Synthetic
agcgcgtcccacctt

SEQ ID NO: 16161 - DNA, 19 bp, Artificial Sequence
  Synthetic
cctccatatacgccagccc

SEQ ID NO: 16162 - DNA, 17 bp, Artificial Sequence
  Synthetic
catgcccgacaacccca

SEQ ID NO: 16163 - DNA, 21 bp, Artificial Sequence
  Synthetic
aggtaatactgttcctctacc

SEQ ID NO: 16164 - DNA, 18 bp, Artificial Sequence
  Synthetic
ccgtaacggcgcattacg

SEQ ID NO: 16165 - DNA, 16 bp, Artificial Sequence
  Synthetic
gcaaggtcgtgcgcca

SEQ ID NO: 16166 - DNA, 20 bp, Artificial Sequence
  Synthetic
caaggcgatgtcctgatacg

SEQ ID NO: 16167 - DNA, 20 bp, Artificial Sequence
  Synthetic
atttgatgatgtgccagccg

SEQ ID NO: 16168 - DNA, 16 bp, Artificial Sequence
  Synthetic
tgcgaaatccgtgccg

SEQ ID NO: 16169 - DNA, 19 bp, Artificial Sequence
  Synthetic
atttcagcttcgctcacgc

SEQ ID NO: 16170 - DNA, 17 bp, Artificial Sequence
  Synthetic
ggataccgccctgctgt

SEQ ID NO: 16171 - DNA, 17 bp, Artificial Sequence
  Synthetic
tcgcccaacatttcggc

SEQ ID NO: 16172 - DNA, 17 bp, Artificial Sequence
  Synthetic
ttcggttctctcggggc

SEQ ID NO: 16173 - DNA, 20 bp, Artificial Sequence
  Synthetic
gcacactgatacccaaagca

SEQ ID NO: 16174 - DNA, 16 bp, Artificial Sequence
  Synthetic
cgcacttgccgcagaa

SEQ ID NO: 16175 - DNA, 18 bp, Artificial Sequence
  Synthetic
ctggcggtatgaacaggc

SEQ ID NO: 16176 - DNA, 16 bp, Artificial Sequence
  Synthetic
agaatccgcccgaccg

SEQ ID NO: 16177 - DNA, 16 bp, Artificial Sequence
  Synthetic
cgcgccccgatgaaac

SEQ ID NO: 16178 - DNA, 19 bp, Artificial Sequence
  Synthetic
ttcacgggcgcaaaacttc

SEQ ID NO: 16179 - DNA, 20 bp, Artificial Sequence
  Synthetic
acggctttgggcattttgtc

SEQ ID NO: 16180 - DNA, 16 bp, Artificial Sequence
  Synthetic
tcggcaaatacgcgcc

SEQ ID NO: 16181 - DNA, 19 bp, Artificial Sequence
  Synthetic
cgaagccgtctatgccaag

SEQ ID NO: 16182 - DNA, 19 bp, Artificial Sequence
  Synthetic
tttacgccaaactctgggc

SEQ ID NO: 16183 - DNA, 16 bp, Artificial Sequence
  Synthetic
gccgccgctacatcgt

SEQ ID NO: 16184 - DNA, 17 bp, Artificial Sequence
  Synthetic
cgcacgggattcgagga

SEQ ID NO: 16185 - DNA, 18 bp, Artificial Sequence
  Synthetic
ccgtccgacaacaccatc

SEQ ID NO: 16186 - DNA, 16 bp, Artificial Sequence
  Synthetic
tcccacacggcaagct

SEQ ID NO: 16187 - DNA, 18 bp, Artificial Sequence
  Synthetic
cagaaatcggagtcgggc

SEQ ID NO: 16188 - DNA, 18 bp, Artificial Sequence
  Synthetic
ggagagcgcccaatacca

SEQ ID NO: 16189 - DNA, 19 bp, Artificial Sequence
  Synthetic
cgacgtaaaccaccaccag

SEQ ID NO: 16190 - DNA, 20 bp, Artificial Sequence
  Synthetic
atgataaataccgacgccgc

SEQ ID NO: 16191 - DNA, 16 bp, Artificial Sequence
  Synthetic
ccgccgcctgtacgaa

SEQ ID NO: 16192 - DNA, 19 bp, Artificial Sequence
  Synthetic
caatgcgccgtctatgtgt

SEQ ID NO: 16193 - DNA, 20 bp, Artificial Sequence
  Synthetic
tcattatgggacaggtcgcc

SEQ ID NO: 16194 - DNA, 17 bp, Artificial Sequence
  Synthetic
gccctgctgattctgcc

SEQ ID NO: 16195 - DNA, 19 bp, Artificial Sequence
  Synthetic
gtgatgctcacccaccaaa

SEQ ID NO: 16196 - DNA, 20 bp, Artificial Sequence
  Synthetic
gagcttcagatgtgtagggc

SEQ ID NO: 16197 - DNA, 17 bp, Artificial Sequence
  Synthetic
cgacccgcgcaaattcc

SEQ ID NO: 16198 - DNA, 16 bp, Artificial Sequence
  Synthetic
catgcggcggtcagga

SEQ ID NO: 16199 - DNA, 16 bp, Artificial Sequence
  Synthetic
cagttcggcggacgca

SEQ ID NO: 16200 - DNA, 16 bp, Artificial Sequence
  Synthetic
cgtccgcggaaggctt

SEQ ID NO: 16201 - DNA, 16 bp, Artificial Sequence
  Synthetic
ccggacacgcccagtt

SEQ ID NO: 16202 - DNA, 19 bp, Artificial Sequence
  Synthetic
cgacgacggagttgagatg

SEQ ID NO: 16203 - DNA, 20 bp, Artificial Sequence
  Synthetic
catcatgaccgtcttgcacg

SEQ ID NO: 16204 - DNA, 18 bp, Artificial Sequence
  Synthetic
gatggtgtacgccatggc

SEQ ID NO: 16205 - DNA, 20 bp, Artificial Sequence
  Synthetic
ctacaaaaccaacgcctcca

SEQ ID NO: 16206 - DNA, 16 bp, Artificial Sequence
  Synthetic
cggcgggttggtgcaa

SEQ ID NO: 16207 - DNA, 18 bp, Artificial Sequence
  Synthetic
ttttcaatccggccggtg

SEQ ID NO: 16208 - DNA, 16 bp, Artificial Sequence
  Synthetic
gacggcgatgtcctgc

SEQ ID NO: 16209 - DNA, 17 bp, Artificial Sequence
  Synthetic
cgacagccgttttgccg

SEQ ID NO: 16210 - DNA, 19 bp, Artificial Sequence
  Synthetic
cgcaatccaagtcccatcc

SEQ ID NO: 16211 - DNA, 16 bp, Artificial Sequence
  Synthetic
cgacatccgcgcccaa

SEQ ID NO: 16212 - DNA, 20 bp, Artificial Sequence
  Synthetic
cggaaggcttattgaccacc

SEQ ID NO: 16213 - DNA, 18 bp, Artificial Sequence
  Synthetic
gggcaaactctcccgttt

SEQ ID NO: 16214 - DNA, 20 bp, Artificial Sequence
  Synthetic
aagcgatgaaggacaacacc

SEQ ID NO: 16215 - DNA, 16 bp, Artificial Sequence
  Synthetic
caccgcccgaaaccga

SEQ ID NO: 16216 - DNA, 16 bp, Artificial Sequence
  Synthetic
ccgcgcacgttttcgg

SEQ ID NO: 16217 - DNA, 18 bp, Artificial Sequence
  Synthetic
gcacaggaaatgccgtct

SEQ ID NO: 16218 - DNA, 19 bp, Artificial Sequence
  Synthetic
cacggcagttatcaggctg

SEQ ID NO: 16219 - DNA, 19 bp, Artificial Sequence
  Synthetic
cgcggagtttaaagcacgc

SEQ ID NO: 16220 - DNA, 19 bp, Artificial Sequence
  Synthetic
gaacaaatccgcgtgttcg

SEQ ID NO: 16221 - DNA, 17 bp, Artificial Sequence
  Synthetic
ttcctgcaccagctcga

SEQ ID NO: 16222 - DNA, 16 bp, Artificial Sequence
  Synthetic
tgccctgcggatccaa

SEQ ID NO: 16223 - DNA, 17 bp, Artificial Sequence
  Synthetic
acaacggcagcgaatgg

SEQ ID NO: 16224 - DNA, 18 bp, Artificial Sequence
  Synthetic
atgacgcgcgaacgtttg

SEQ ID NO: 16225 - DNA, 16 bp, Artificial Sequence
  Synthetic
tgctcctgaccaccgc

SEQ ID NO: 16226 - DNA, 16 bp, Artificial Sequence
  Synthetic
tggaagccctcgccga

SEQ ID NO: 16227 - DNA, 18 bp, Artificial Sequence
  Synthetic
caccatcggcgtgaaacc

SEQ ID NO: 16228 - DNA, 16 bp, Artificial Sequence
  Synthetic
cgctgctcgccgtgat

SEQ ID NO: 16229 - DNA, 18 bp, Artificial Sequence
  Synthetic
cgtgtcgaaggcttgcag

SEQ ID NO: 16230 - DNA, 19 bp, Artificial Sequence
  Synthetic
agcgtaaccataggcagct

SEQ ID NO: 16231 - DNA, 17 bp, Artificial Sequence
  Synthetic
tgatgaccgcgctgtcc

SEQ ID NO: 16232 - DNA, 19 bp, Artificial Sequence
  Synthetic
gattacccagcaaatgcgc

SEQ ID NO: 16233 - DNA, 16 bp, Artificial Sequence
  Synthetic
cgcccccatgtgcgat

SEQ ID NO: 16234 - DNA, 24 bp, Artificial Sequence
  Synthetic
ccaaatcttttgctttagtatcag

SEQ ID NO: 16235 - DNA, 20 bp, Artificial Sequence
  Synthetic
tcaattgtaccaatcaggct

SEQ ID NO: 16236 - DNA, 22 bp, Artificial Sequence
  Synthetic
ttagttttgcctttagtggtaa

SEQ ID NO: 16237 - DNA, 19 bp, Artificial Sequence
  Synthetic
ggcacaaaataagccgatt

SEQ ID NO: 16238 - DNA, 17 bp, Artificial Sequence
  Synthetic
gacggcattgcatcgcg

SEQ ID NO: 16239 - DNA, 20 bp, Artificial Sequence
  Synthetic
atcgtcttcaacaacgacca

SEQ ID NO: 16240 - DNA, 19 bp, Artificial Sequence
  Synthetic
gcccaaacctccatctcac

SEQ ID NO: 16241 - DNA, 16 bp, Artificial Sequence
  Synthetic
cccgcgcctgtaaacg

SEQ ID NO: 16242 - DNA, 18 bp, Artificial Sequence
  Synthetic
ttgctgtgggggttgtct

SEQ ID NO: 16243 - DNA, 18 bp, Artificial Sequence
  Synthetic
cgaaataacgccgctcca

SEQ ID NO: 16244 - DNA, 18 bp, Artificial Sequence
  Synthetic
gcggattgcggatttcgt

SEQ ID NO: 16245 - DNA, 18 bp, Artificial Sequence
  Synthetic
tactacacccgcacccat

SEQ ID NO: 16246 - DNA, 19 bp, Artificial Sequence
  Synthetic
ccccgtattgaccacgtcc

SEQ ID NO: 16247 - DNA, 17 bp, Artificial Sequence
  Synthetic
gcgatgtggcaaacgcg

SEQ ID NO: 16248 - DNA, 18 bp, Artificial Sequence
  Synthetic
cgtatggcgatgtaccgg

SEQ ID NO: 16249 - DNA, 16 bp, Artificial Sequence
  Synthetic
cagcgattggggcgtc

SEQ ID NO: 16250 - DNA, 18 bp, Artificial Sequence
  Synthetic
aattgatgacgggggaag

SEQ ID NO: 16251 - DNA, 16 bp, Artificial Sequence
  Synthetic
gcgtgcggcatcgact

SEQ ID NO: 16252 - DNA, 17 bp, Artificial Sequence
  Synthetic
agcgatttggcgagccg

SEQ ID NO: 16253 - DNA, 18 bp, Artificial Sequence
  Synthetic
aataaatcgacgcgccgg

SEQ ID NO: 16254 - DNA, 16 bp, Artificial Sequence
  Synthetic
tccaactcgcgcaggt

SEQ ID NO: 16255 - DNA, 18 bp, Artificial Sequence
  Synthetic
accgccgcgatacctatg

SEQ ID NO: 16256 - DNA, 18 bp, Artificial Sequence
  Synthetic
catcctcctgccggtttg

SEQ ID NO: 16257 - DNA, 18 bp, Artificial Sequence
  Synthetic
gaggtatttggggcgaaa

SEQ ID NO: 16258 - DNA, 19 bp, Artificial Sequence
  Synthetic
tttccgggtgtattcggca

SEQ ID NO: 16259 - DNA, 19 bp, Artificial Sequence
  Synthetic
ccggacacttggttttcgg

SEQ ID NO: 16260 - DNA, 17 bp, Artificial Sequence
  Synthetic
cgctatgcgccaatccc

SEQ ID NO: 16261 - DNA, 18 bp, Artificial Sequence
  Synthetic
cttcccgttttcgccagt

SEQ ID NO: 16262 - DNA, 18 bp, Artificial Sequence
  Synthetic
ctggctgaccaacccctt

SEQ ID NO: 16263 - DNA, 16 bp, Artificial Sequence
  Synthetic
gctgccgccaatcgct

SEQ ID NO: 16264 - DNA, 20 bp, Artificial Sequence
  Synthetic
accggcagcttcaaaaacac

SEQ ID NO: 16265 - DNA, 18 bp, Artificial Sequence
  Synthetic
gccaacccaactacaccg

SEQ ID NO: 16266 - DNA, 16 bp, Artificial Sequence
  Synthetic
cgacagcctgcaaccc

SEQ ID NO: 16267 - DNA, 17 bp, Artificial Sequence
  Synthetic
acatgggacccgacgac

SEQ ID NO: 16268 - DNA, 19 bp, Artificial Sequence
  Synthetic
ctaccctatagcccgcctt

SEQ ID NO: 16269 - DNA, 18 bp, Artificial Sequence
  Synthetic
cgctgacgctgatttccg

SEQ ID NO: 16270 - DNA, 16 bp, Artificial Sequence
  Synthetic
gcgcccaagcttcgac

SEQ ID NO: 16271 - DNA, 19 bp, Artificial Sequence
  Synthetic
gtcgttgccaaagcctttg

SEQ ID NO: 16272 - DNA, 18 bp, Artificial Sequence
  Synthetic
acataaacagcggcaggg

SEQ ID NO: 16273 - DNA, 18 bp, Artificial Sequence
  Synthetic
ctttggacggcgttacca

SEQ ID NO: 16274 - DNA, 18 bp, Artificial Sequence
  Synthetic
ggaaggttcgggcatcac

SEQ ID NO: 16275 - DNA, 17 bp, Artificial Sequence
  Synthetic
tagcgtgccgggcgtta

SEQ ID NO: 16276 - DNA, 18 bp, Artificial Sequence
  Synthetic
aactcgtccgtactttgg

SEQ ID NO: 16277 - DNA, 20 bp, Artificial Sequence
  Synthetic
aatgcaatgtttatctgcct

SEQ ID NO: 16278 - DNA, 20 bp, Artificial Sequence
  Synthetic
caaatgccttggaaaaacct

SEQ ID NO: 16279 - DNA, 18 bp, Artificial Sequence
  Synthetic
ttgttatggcttggggtg

SEQ ID NO: 16280 - DNA, 18 bp, Artificial Sequence
  Synthetic
aggttgacaagcccggtt

SEQ ID NO: 16281 - DNA, 17 bp, Artificial Sequence
  Synthetic
gttgccggaaaccgtca

SEQ ID NO: 16282 - DNA, 19 bp, Artificial Sequence
  Synthetic
ctgccggtaatgttttgcg

SEQ ID NO: 16283 - DNA, 20 bp, Artificial Sequence
  Synthetic
cgatgcggtcgttttgaaag

SEQ ID NO: 16284 - DNA, 16 bp, Artificial Sequence
  Synthetic
gtcaggccggcggtat

SEQ ID NO: 16285 - DNA, 16 bp, Artificial Sequence
  Synthetic
tcgatgcgcgaagggt

SEQ ID NO: 16286 - DNA, 18 bp, Artificial Sequence
  Synthetic
gtcgagcagtgtgccttt

SEQ ID NO: 16287 - DNA, 20 bp, Artificial Sequence
  Synthetic
ttgtccgcgtatgatgaacg

SEQ ID NO: 16288 - DNA, 18 bp, Artificial Sequence
  Synthetic
cgtttccaagaggcggtc

SEQ ID NO: 16289 - DNA, 16 bp, Artificial Sequence
  Synthetic
ccgtcaaaaccggccg

SEQ ID NO: 16290 - DNA, 18 bp, Artificial Sequence
  Synthetic
ttttacccctgcttcacg

SEQ ID NO: 16291 - DNA, 16 bp, Artificial Sequence
  Synthetic
cggcgtacggctcgaa

SEQ ID NO: 16292 - DNA, 16 bp, Artificial Sequence
  Synthetic
cgatgccgtgtccgca

SEQ ID NO: 16293 - DNA, 17 bp, Artificial Sequence
  Synthetic
tcttctgtgccgtccgg

SEQ ID NO: 16294 - DNA, 17 bp, Artificial Sequence
  Synthetic
caggtggcggttgtagc

SEQ ID NO: 16295 - DNA, 19 bp, Artificial Sequence
  Synthetic
cgatacagtcgcacatggc

SEQ ID NO: 16296 - DNA, 18 bp, Artificial Sequence
  Synthetic
cgacctcgacaccgacga

SEQ ID NO: 16297 - DNA, 19 bp, Artificial Sequence
  Synthetic
aactcaaagtcctcgccga

SEQ ID NO: 16298 - DNA, 19 bp, Artificial Sequence
  Synthetic
tccccggtctgattgaagg

SEQ ID NO: 16299 - DNA, 18 bp, Artificial Sequence
  Synthetic
gggctggacggacatgtg

SEQ ID NO: 16300 - DNA, 16 bp, Artificial Sequence
  Synthetic
gttcggctgcacccca

SEQ ID NO: 16301 - DNA, 18 bp, Artificial Sequence
  Synthetic
ccacttgggcgtgaatcg

SEQ ID NO: 16302 - DNA, 19 bp, Artificial Sequence
  Synthetic
cgcctttgacaaagttcgg

SEQ ID NO: 16303 - DNA, 18 bp, Artificial Sequence
  Synthetic
ttgccgcaacacgtatcg

SEQ ID NO: 16304 - DNA, 19 bp, Artificial Sequence
  Synthetic
cgagtgcctgatgttcagt

SEQ ID NO: 16305 - DNA, 16 bp, Artificial Sequence
  Synthetic
agggcgaacagacggt

SEQ ID NO: 16306 - DNA, 17 bp, Artificial Sequence
  Synthetic
gggaaaacgcccaagcc

SEQ ID NO: 16307 - DNA, 16 bp, Artificial Sequence
  Synthetic
aatcggggtcggcagg

SEQ ID NO: 16308 - DNA, 17 bp, Artificial Sequence
  Synthetic
attcgacggccagtgcg

SEQ ID NO: 16309 - DNA, 19 bp, Artificial Sequence
  Synthetic
ggcggtgggcatttgtttg

SEQ ID NO: 16310 - DNA, 17 bp, Artificial Sequence
  Synthetic
gtgtaaacccgcgccac

SEQ ID NO: 16311 - DNA, 20 bp, Artificial Sequence
  Synthetic
actcgctggataatggcttg

SEQ ID NO: 16312 - DNA, 16 bp, Artificial Sequence
  Synthetic
agcgttgccgtcaggg

SEQ ID NO: 16313 - DNA, 15 bp, Artificial Sequence
  Synthetic
aaagcagggccgcca

SEQ ID NO: 16314 - DNA, 16 bp, Artificial Sequence
  Synthetic
ccgatccgcgcatcgt

SEQ ID NO: 16315 - DNA, 16 bp, Artificial Sequence
  Synthetic
cgcaagccggcaaact

SEQ ID NO: 16316 - DNA, 20 bp, Artificial Sequence
  Synthetic
ggcaaaaaccaaggctttga

SEQ ID NO: 16317 - DNA, 18 bp, Artificial Sequence
  Synthetic
cgaccgggcatattcagc

SEQ ID NO: 16318 - DNA, 16 bp, Artificial Sequence
  Synthetic
gcttttcgccgcttgc

SEQ ID NO: 16319 - DNA, 16 bp, Artificial Sequence
  Synthetic
gcgcggcaggtcgaaa

SEQ ID NO: 16320 - DNA, 20 bp, Artificial Sequence
  Synthetic
aaactttaccgcgaactgcc

SEQ ID NO: 16321 - DNA, 19 bp, Artificial Sequence
  Synthetic
gcaaggcgaagtcatcacc

SEQ ID NO: 16322 - DNA, 16 bp, Artificial Sequence
  Synthetic
tgctcaaacgcctgcg

SEQ ID NO: 16323 - DNA, 19 bp, Artificial Sequence
  Synthetic
cgtgaaaacaaacgcggac

SEQ ID NO: 16324 - DNA, 18 bp, Artificial Sequence
  Synthetic
actggccgaaatcacccg

SEQ ID NO: 16325 - DNA, 16 bp, Artificial Sequence
  Synthetic
cgcagcagcctttcgc

SEQ ID NO: 16326 - DNA, 17 bp, Artificial Sequence
  Synthetic
ccatttgggctgctcgc

SEQ ID NO: 16327 - DNA, 20 bp, Artificial Sequence
  Synthetic
ttgttctttgcccctgaagg

SEQ ID NO: 16328 - DNA, 18 bp, Artificial Sequence
  Synthetic
tgaaaagcctgaatccgt

SEQ ID NO: 16329 - DNA, 18 bp, Artificial Sequence
  Synthetic
gccgcctttaccgaatgc

SEQ ID NO: 16330 - DNA, 17 bp, Artificial Sequence
  Synthetic
ttggacgaagccgcagc

SEQ ID NO: 16331 - DNA, 17 bp, Artificial Sequence
  Synthetic
gccatccgtgaagcagc

SEQ ID NO: 16332 - DNA, 20 bp, Artificial Sequence
  Synthetic
tcatcacctacaaactcgcc

SEQ ID NO: 16333 - DNA, 17 bp, Artificial Sequence
  Synthetic
caggttgacggcaggtg

SEQ ID NO: 16334 - DNA, 20 bp, Artificial Sequence
  Synthetic
taatcgcgtccagattgagg

SEQ ID NO: 16335 - DNA, 17 bp, Artificial Sequence
  Synthetic
cctttttcgcgtgccgc

SEQ ID NO: 16336 - DNA, 18 bp, Artificial Sequence
  Synthetic
tgcccttgattgccgttg

SEQ ID NO: 16337 - DNA, 16 bp, Artificial Sequence
  Synthetic
aaggcttgggcgcaca

SEQ ID NO: 16338 - DNA, 19 bp, Artificial Sequence
  Synthetic
atggccttggtcggtatgg

SEQ ID NO: 16339 - DNA, 17 bp, Artificial Sequence
  Synthetic
cgaacatcggcggtctg

SEQ ID NO: 16340 - DNA, 19 bp, Artificial Sequence
  Synthetic
gaaccggtatcgaaatcgt

SEQ ID NO: 16341 - DNA, 20 bp, Artificial Sequence
  Synthetic
ttcctttctttgcgatgcct

SEQ ID NO: 16342 - DNA, 16 bp, Artificial Sequence
  Synthetic
cgccggcagaagcgtt

SEQ ID NO: 16343 - DNA, 20 bp, Artificial Sequence
  Synthetic
gacaaaaccaaattcccgcc

SEQ ID NO: 16344 - DNA, 16 bp, Artificial Sequence
  Synthetic
cgtgcctgttccggca

SEQ ID NO: 16345 - DNA, 17 bp, Artificial Sequence
  Synthetic
ggtaactgtgcgcctgc

SEQ ID NO: 16346 - DNA, 16 bp, Artificial Sequence
  Synthetic
gcgagcgtttcccagc

SEQ ID NO: 16347 - DNA, 18 bp, Artificial Sequence
  Synthetic
gcactaccgctggacgta

SEQ ID NO: 16348 - DNA, 16 bp, Artificial Sequence
  Synthetic
cggcgttcgtgtcggt

SEQ ID NO: 16349 - DNA, 20 bp, Artificial Sequence
  Synthetic
gatttcctcgaccttgcctt

SEQ ID NO: 16350 - DNA, 19 bp, Artificial Sequence
  Synthetic
agggttcgtacagggatgc

SEQ ID NO: 16351 - DNA, 18 bp, Artificial Sequence
  Synthetic
cgccgcatcatatgggaa

SEQ ID NO: 16352 - DNA, 16 bp, Artificial Sequence
  Synthetic
ccaagcgtgcggatgc

SEQ ID NO: 16353 - DNA, 15 bp, Artificial Sequence
  Synthetic
ccggttgcgcgcaaa

SEQ ID NO: 16354 - DNA, 20 bp, Artificial Sequence
  Synthetic
ttggaaatggaaaacccgcg

SEQ ID NO: 16355 - DNA, 18 bp, Artificial Sequence
  Synthetic
aggttgatgtcttgcggc

SEQ ID NO: 16356 - DNA, 19 bp, Artificial Sequence
  Synthetic
cttcatcggtcagcggaat

SEQ ID NO: 16357 - DNA, 17 bp, Artificial Sequence
  Synthetic
atgctgtcggcgagtgc

SEQ ID NO: 16358 - DNA, 16 bp, Artificial Sequence
  Synthetic
ggtcgctgtctcgcgt

SEQ ID NO: 16359 - DNA, 16 bp, Artificial Sequence
  Synthetic
aatcgggcccggatgg

SEQ ID NO: 16360 - DNA, 16 bp, Artificial Sequence
  Synthetic
gcactgccgccggatt

SEQ ID NO: 16361 - DNA, 16 bp, Artificial Sequence
  Synthetic
gcaccaaaatgccgcg

SEQ ID NO: 16362 - DNA, 23 bp, Artificial Sequence
  Synthetic
ggctttaattgacgattatcttg

SEQ ID NO: 16363 - DNA, 17 bp, Artificial Sequence
  Synthetic
ccgtccggttcaaaccc

SEQ ID NO: 16364 - DNA, 17 bp, Artificial Sequence
  Synthetic
attgtgcggcggaaacc

SEQ ID NO: 16365 - DNA, 17 bp, Artificial Sequence
  Synthetic
cgttcggctttggtgcc

SEQ ID NO: 16366 - DNA, 17 bp, Artificial Sequence
  Synthetic
aggctccggcgaatacg

SEQ ID NO: 16367 - DNA, 19 bp, Artificial Sequence
  Synthetic
cctgccctatctggtagcg

SEQ ID NO: 16368 - DNA, 20 bp, Artificial Sequence
  Synthetic
cgccggctttgtttatgttg

SEQ ID NO: 16369 - DNA, 16 bp, Artificial Sequence
  Synthetic
cgtttgaggcgcgggt

SEQ ID NO: 16370 - DNA, 18 bp, Artificial Sequence
  Synthetic
ttccgccgactattccca

SEQ ID NO: 16371 - DNA, 18 bp, Artificial Sequence
  Synthetic
gcggcggattttgcctct

SEQ ID NO: 16372 - DNA, 17 bp, Artificial Sequence
  Synthetic
aaacaggatgccgacgc

SEQ ID NO: 16373 - DNA, 20 bp, Artificial Sequence
  Synthetic
aacaagtgcagatgcttggt

SEQ ID NO: 16374 - DNA, 19 bp, Artificial Sequence
  Synthetic
ttcgttgaggaatcgggct

SEQ ID NO: 16375 - DNA, 18 bp, Artificial Sequence
  Synthetic
tgcctgaaacaatgccgt

SEQ ID NO: 16376 - DNA, 16 bp, Artificial Sequence
  Synthetic
cgaggtcgttgcgcag

SEQ ID NO: 16377 - DNA, 17 bp, Artificial Sequence
  Synthetic
tttggcggatgcggtcg

SEQ ID NO: 16378 - DNA, 18 bp, Artificial Sequence
  Synthetic
cgccgcaaaccaatttcg

SEQ ID NO: 16379 - DNA, 19 bp, Artificial Sequence
  Synthetic
catccgatacagccgtccc

SEQ ID NO: 16380 - DNA, 16 bp, Artificial Sequence
  Synthetic
cccgcctgccaaaacc

SEQ ID NO: 16381 - DNA, 20 bp, Artificial Sequence
  Synthetic
tacccggaaaaacatacgcg

SEQ ID NO: 16382 - DNA, 15 bp, Artificial Sequence
  Synthetic
ttgcggtcggtgcgt

SEQ ID NO: 16383 - DNA, 18 bp, Artificial Sequence
  Synthetic
aacagggcatattcgcgc

SEQ ID NO: 16384 - DNA, 17 bp, Artificial Sequence
  Synthetic
cggcaggcatgataggc

SEQ ID NO: 16385 - DNA, 19 bp, Artificial Sequence
  Synthetic
ccatttccgttacccgctt

SEQ ID NO: 16386 - DNA, 18 bp, Artificial Sequence
  Synthetic
gtcgtcgcttcgtttgcc

SEQ ID NO: 16387 - DNA, 17 bp, Artificial Sequence
  Synthetic
gcaaaattgccgccgcc

SEQ ID NO: 16388 - DNA, 19 bp, Artificial Sequence
  Synthetic
gccgtcgccgtattcaaac

SEQ ID NO: 16389 - DNA, 17 bp, Artificial Sequence
  Synthetic
atggcgaacgggtttgc

SEQ ID NO: 16390 - DNA, 18 bp, Artificial Sequence
  Synthetic
cgcaaggaagacggttcg

SEQ ID NO: 16391 - DNA, 18 bp, Artificial Sequence
  Synthetic
gaatgtttgttgcgccgg

SEQ ID NO: 16392 - DNA, 16 bp, Artificial Sequence
  Synthetic
gcgtcgccgaatctgc

SEQ ID NO: 16393 - DNA, 18 bp, Artificial Sequence
  Synthetic
ttgtccaatgcgctggtg

SEQ ID NO: 16394 - DNA, 15 bp, Artificial Sequence
  Synthetic
cgcgagcgtgccttt

SEQ ID NO: 16395 - DNA, 18 bp, Artificial Sequence
  Synthetic
ggtggaaaggatgtcggc

SEQ ID NO: 16396 - DNA, 19 bp, Artificial Sequence
  Synthetic
ctgcaatgggaaggaacgg

SEQ ID NO: 16397 - DNA, 18 bp, Artificial Sequence
  Synthetic
cttgcgtgcagagtaccg

SEQ ID NO: 16398 - DNA, 22 bp, Artificial Sequence
  Synthetic
ttgtagctactttgatattccg

SEQ ID NO: 16399 - DNA, 19 bp, Artificial Sequence
  Synthetic
ttatgcaacgaaagcttgt

SEQ ID NO: 16400 - DNA, 18 bp, Artificial Sequence
  Synthetic
aaaaggaccgtctgttgc

SEQ ID NO: 16401 - DNA, 18 bp, Artificial Sequence
  Synthetic
agaagtgttcctgcagct

SEQ ID NO: 16402 - DNA, 21 bp, Artificial Sequence
  Synthetic
atcatataccagcaacaaggg

SEQ ID NO: 16403 - DNA, 21 bp, Artificial Sequence
  Synthetic
tgggaaagttgattatgatgg

SEQ ID NO: 16404 - DNA, 18 bp, Artificial Sequence
  Synthetic
ctagggatccggccatag

SEQ ID NO: 16405 - DNA, 22 bp, Artificial Sequence
  Synthetic
tattccactagaacctataggc

SEQ ID NO: 16406 - DNA, 20 bp, Artificial Sequence
  Synthetic
gccacctgtacaaagtactc

SEQ ID NO: 16407 - DNA, 23 bp, Artificial Sequence
  Synthetic
ttttctgacgaatctttattgga

SEQ ID NO: 16408 - DNA, 21 bp, Artificial Sequence
  Synthetic
gttttgcgtttacagttacct

SEQ ID NO: 16409 - DNA, 18 bp, Artificial Sequence
  Synthetic
tggccagattttgtgcag

SEQ ID NO: 16410 - DNA, 23 bp, Artificial Sequence
  Synthetic
ttggaagtagaaatagtaatgca

SEQ ID NO: 16411 - DNA, 22 bp, Artificial Sequence
  Synthetic
caatgttaagctgtgaaacttg

SEQ ID NO: 16412 - DNA, 18 bp, Artificial Sequence
  Synthetic
cgacaatgcttcaatccg

SEQ ID NO: 16413 - DNA, 20 bp, Artificial Sequence
  Synthetic
gcctggacagtagtaaacag

SEQ ID NO: 16414 - DNA, 23 bp, Artificial Sequence
  Synthetic
attgaaccttttctgaaaacaac

SEQ ID NO: 16415 - DNA, 18 bp, Artificial Sequence
  Synthetic
aagcaagtactggcggaa

SEQ ID NO: 16416 - DNA, 19 bp, Artificial Sequence
  Synthetic
ctggatagagctcgatgag

SEQ ID NO: 16417 - DNA, 23 bp, Artificial Sequence
  Synthetic
atggtttcatcataaaaggaaga

SEQ ID NO: 16418 - DNA, 20 bp, Artificial Sequence
  Synthetic
ctccttcagtcactacaaca

SEQ ID NO: 16419 - DNA, 17 bp, Artificial Sequence
  Synthetic
ggaggaagccacacgga

SEQ ID NO: 16420 - DNA, 19 bp, Artificial Sequence
  Synthetic
cggaccccctttcaaagtg

SEQ ID NO: 16421 - DNA, 20 bp, Artificial Sequence
  Synthetic
tagcttcccagagagaagcg

SEQ ID NO: 16422 - DNA, 20 bp, Artificial Sequence
  Synthetic
ttccccttatgtccagtccc

SEQ ID NO: 16423 - DNA, 19 bp, Artificial Sequence
  Synthetic
gttctcgagggccttcctt

SEQ ID NO: 16424 - DNA, 22 bp, Artificial Sequence
  Synthetic
cgaaaccggtacatataaaagt

SEQ ID NO: 16425 - DNA, 20 bp, Artificial Sequence
  Synthetic
tatggtgcaacattagaagc

SEQ ID NO: 16426 - DNA, 25 bp, Artificial Sequence
  Synthetic
attgaagatgtaatactagatctgg

SEQ ID NO: 16427 - DNA, 18 bp, Artificial Sequence
  Synthetic
cttggtgtgccatcagtg

SEQ ID NO: 16428 - DNA, 19 bp, Artificial Sequence
  Synthetic
taacccaggcattgtttca

SEQ ID NO: 16429 - DNA, 21 bp, Artificial Sequence
  Synthetic
caatgggaatcctgtatatgc

SEQ ID NO: 16430 - DNA, 18 bp, Artificial Sequence
  Synthetic
gtggtgccctctactgtt

SEQ ID NO: 16431 - DNA, 21 bp, Artificial Sequence
  Synthetic
taaaggtactggagatgttga

SEQ ID NO: 16432 - DNA, 18 bp, Artificial Sequence
  Synthetic
ggcaccaaggaaaccgag

SEQ ID NO: 16433 - DNA, 18 bp, Artificial Sequence
  Synthetic
ctgtgggtcctacagaac

SEQ ID NO: 16434 - DNA, 20 bp, Artificial Sequence
  Synthetic
cagtagtactgtagcacctg

SEQ ID NO: 16435 - DNA, 21 bp, Artificial Sequence
  Synthetic
atatgcagaccctgatacagt

SEQ ID NO: 16436 - DNA, 25 bp, Artificial Sequence
  Synthetic
catggggataattattatttatggc

SEQ ID NO: 16437 - DNA, 21 bp, Artificial Sequence
  Synthetic
cgaaattcctaaggtatctgc

SEQ ID NO: 16438 - DNA, 25 bp, Artificial Sequence
  Synthetic
cagttatgtattataggttgtacac

SEQ ID NO: 16439 - DNA, 22 bp, Artificial Sequence
  Synthetic
acagcatgtttttttttcttcg

SEQ ID NO: 16440 - DNA, 22 bp, Artificial Sequence
  Synthetic
aacgcaaaaaacgtaaacttac

SEQ ID NO: 16441 - DNA, 16 bp, Artificial Sequence
  Synthetic
tggagcacccccccta

SEQ ID NO: 16442 - DNA, 20 bp, Artificial Sequence
  Synthetic
gcaagcccacctatatgtgt

SEQ ID NO: 16443 - DNA, 18 bp, Artificial Sequence
  Synthetic
tctagtaggcccgctggt

SEQ ID NO: 16444 - DNA, 20 bp, Artificial Sequence
  Synthetic
ttgttctccttccacttgcc

SEQ ID NO: 16445 - DNA, 20 bp, Artificial Sequence
  Synthetic
tttgttacagtccaaagtgg

SEQ ID NO: 16446 - DNA, 21 bp, Artificial Sequence
  Synthetic
tcaggccatttgtattttgag

SEQ ID NO: 16447 - DNA, 18 bp, Artificial Sequence
  Synthetic
gtcaccgcatagctctgc

SEQ ID NO: 16448 - DNA, 18 bp, Artificial Sequence
  Synthetic
cgctggtgactttctgtg

SEQ ID NO: 16449 - DNA, 19 bp, Artificial Sequence
  Synthetic
cacggttgatggtttgccc

SEQ ID NO: 16450 - DNA, 20 bp, Artificial Sequence
  Synthetic
acacccaataaccgttgacg

SEQ ID NO: 16451 - DNA, 20 bp, Artificial Sequence
  Synthetic
gccactcttgatacaaaacc

SEQ ID NO: 16452 - DNA, 18 bp, Artificial Sequence
  Synthetic
gtcctaaccgaagctcca

SEQ ID NO: 16453 - DNA, 19 bp, Artificial Sequence
  Synthetic
acattgttgaagccttcga

SEQ ID NO: 16454 - DNA, 21 bp, Artificial Sequence
  Synthetic
gagtacaatcaccacaactag

SEQ ID NO: 16455 - DNA, 18 bp, Artificial Sequence
  Synthetic
ttgacatgctaggcggct

SEQ ID NO: 16456 - DNA, 22 bp, Artificial Sequence
  Synthetic
acttgttcaaattactggagag

SEQ ID NO: 16457 - DNA, 19 bp, Artificial Sequence
  Synthetic
tcatgtcctgaaagcctgc

SEQ ID NO: 16458 - DNA, 20 bp, Artificial Sequence
  Synthetic
tgggaaagagtgagttttcg

SEQ ID NO: 16459 - DNA, 20 bp, Artificial Sequence
  Synthetic
gctaagtcccacatcactgg

SEQ ID NO: 16460 - DNA, 19 bp, Artificial Sequence
  Synthetic
tgttgtcgatgtggtcacc

SEQ ID NO: 16461 - DNA, 18 bp, Artificial Sequence
  Synthetic
cgaacaggctggcatgaa

SEQ ID NO: 16462 - DNA, 20 bp, Artificial Sequence
  Synthetic
ttgaggacaaacttcccgag

SEQ ID NO: 16463 - DNA, 18 bp, Artificial Sequence
  Synthetic
cttctctggcatgctaca

SEQ ID NO: 16464 - DNA, 18 bp, Artificial Sequence
  Synthetic
gggagaccccgggcttaa

SEQ ID NO: 16465 - DNA, 21 bp, Artificial Sequence
  Synthetic
tctgtttctctcaccatttcc

SEQ ID NO: 16466 - DNA, 20 bp, Artificial Sequence
  Synthetic
tacagaaattggtcaaagcc

SEQ ID NO: 16467 - DNA, 18 bp, Artificial Sequence
  Synthetic
caagtgtgcatagcatgg

SEQ ID NO: 16468 - DNA, 23 bp, Artificial Sequence
  Synthetic
ggaaaatcattcatactagcaca

SEQ ID NO: 16469 - DNA, 22 bp, Artificial Sequence
  Synthetic
cattgcttggatcctaacaatg

SEQ ID NO: 16470 - DNA, 23 bp, Artificial Sequence
  Synthetic
ttgaattgtcttattgttcgttg

SEQ ID NO: 16471 - DNA, 22 bp, Artificial Sequence
  Synthetic
attatattgggttgacacctgt

SEQ ID NO: 16472 - DNA, 25 bp, Artificial Sequence
  Synthetic
atatatttgaagagagtacagatgg

SEQ ID NO: 16473 - DNA, 22 bp, Artificial Sequence
  Synthetic
aaaagacgattatttcaggaca

SEQ ID NO: 16474 - DNA, 25 bp, Artificial Sequence
  Synthetic
aggtaaagtcatttctttcatgaac

SEQ ID NO: 16475 - DNA, 18 bp, Artificial Sequence
  Synthetic
tcgcagactccagccaag

SEQ ID NO: 16476 - DNA, 18 bp, Artificial Sequence
  Synthetic
gaatctgctgtcccgtct

SEQ ID NO: 16477 - DNA, 18 bp, Artificial Sequence
  Synthetic
tggattgggaattggcac

SEQ ID NO: 16478 - DNA, 20 bp, Artificial Sequence
  Synthetic
cttttccgatgatgtcactt

SEQ ID NO: 16479 - DNA, 18 bp, Artificial Sequence
  Synthetic
accgttaggggttggaac

SEQ ID NO: 16480 - DNA, 23 bp, Artificial Sequence
  Synthetic
aatacaagatggtgatatgtgtg

SEQ ID NO: 16481 - DNA, 18 bp, Artificial Sequence
  Synthetic
cagagctgtcaaccgttt

SEQ ID NO: 16482 - DNA, 18 bp, Artificial Sequence
  Synthetic
caacccttcttgtgacct

SEQ ID NO: 16483 - DNA, 20 bp, Artificial Sequence
  Synthetic
caaaagagcggtttttaccc

SEQ ID NO: 16484 - DNA, 18 bp, Artificial Sequence
  Synthetic
ggccaaacattgcgagta

SEQ ID NO: 16485 - DNA, 19 bp, Artificial Sequence
  Synthetic
agaggactatttggagcca

SEQ ID NO: 16486 - DNA, 23 bp, Artificial Sequence
  Synthetic
agattgatgaccaaatacaagac

SEQ ID NO: 16487 - DNA, 20 bp, Artificial Sequence
  Synthetic
atgagtgtcgaacagcctcc

SEQ ID NO: 16488 - DNA, 17 bp, Artificial Sequence
  Synthetic
gcccacaggacgtcaag

SEQ ID NO: 16489 - DNA, 17 bp, Artificial Sequence
  Synthetic
tgccctgtgtcctggaa

SEQ ID NO: 16490 - DNA, 20 bp, Artificial Sequence
  Synthetic
ctgggccaaggttatactgg

SEQ ID NO: 16491 - DNA, 20 bp, Artificial Sequence
  Synthetic
tcaactcttctgggtgtcca

SEQ ID NO: 16492 - DNA, 18 bp, Artificial Sequence
  Synthetic
taacattaggccccccgc

SEQ ID NO: 16493 - DNA, 20 bp, Artificial Sequence
  Synthetic
aattggacctatggtgagcg

SEQ ID NO: 16494 - DNA, 20 bp, Artificial Sequence
  Synthetic
gaagcaacctgcaagaacgt

SEQ ID NO: 16495 - DNA, 20 bp, Artificial Sequence
  Synthetic
tttcatagcccgagtggagg

SEQ ID NO: 16496 - DNA, 18 bp, Artificial Sequence
  Synthetic
tgaaggattgggcagcgt

SEQ ID NO: 16497 - DNA, 20 bp, Artificial Sequence
  Synthetic
aggtgcagttcttatccacg

SEQ ID NO: 16498 - DNA, 20 bp, Artificial Sequence
  Synthetic
ttacctcaagggttcctcgg

SEQ ID NO: 16499 - DNA, 16 bp, Artificial Sequence
  Synthetic
gttcgggttcggggca

SEQ ID NO: 16500 - DNA, 19 bp, Artificial Sequence
  Synthetic
taaagggcggtaggcatct

SEQ ID NO: 16501 - DNA, 20 bp, Artificial Sequence
  Synthetic
gagactactacagtgcccca

SEQ ID NO: 16502 - DNA, 20 bp, Artificial Sequence
  Synthetic
ccagctgggatacaatgtgg

SEQ ID NO: 16503 - DNA, 18 bp, Artificial Sequence
  Synthetic
accttgccgggtaatccc

SEQ ID NO: 16504 - DNA, 20 bp, Artificial Sequence
  Synthetic
tcaatactctgccctggagc

SEQ ID NO: 16505 - DNA, 19 bp, Artificial Sequence
  Synthetic
cggcactgacagacttcaa

SEQ ID NO: 16506 - DNA, 20 bp, Artificial Sequence
  Synthetic
acaatctgaagtgtccctgc

SEQ ID NO: 16507 - DNA, 18 bp, Artificial Sequence
  Synthetic
tctccaccctctctggca

SEQ ID NO: 16508 - DNA, 17 bp, Artificial Sequence
  Synthetic
gacttggaagcgaccgg

SEQ ID NO: 16509 - DNA, 18 bp, Artificial Sequence
  Synthetic
cagggtcatggtcaaccg

SEQ ID NO: 16510 - DNA, 19 bp, Artificial Sequence
  Synthetic
ccctagaggaagcctgtgg

SEQ ID NO: 16511 - DNA, 20 bp, Artificial Sequence
  Synthetic
gctttagcctcctgtagagc

SEQ ID NO: 16512 - DNA, 20 bp, Artificial Sequence
  Synthetic
cggttaattcctggctaggg

SEQ ID NO: 16513 - DNA, 18 bp, Artificial Sequence
  Synthetic
ttggagacatcgggctcg

SEQ ID NO: 16514 - DNA, 23 bp, Artificial Sequence
  Synthetic
cttgtagatctgttctctaaacg

SEQ ID NO: 16515 - DNA, 20 bp, Artificial Sequence
  Synthetic
ggttagagacgtgctagtgc

SEQ ID NO: 16516 - DNA, 20 bp, Artificial Sequence
  Synthetic
gagtgccaagaaatttgaca

SEQ ID NO: 16517 - DNA, 18 bp, Artificial Sequence
  Synthetic
gcaagggaggtaggacta

SEQ ID NO: 16518 - DNA, 18 bp, Artificial Sequence
  Synthetic
attgttgagtcctgcggt

SEQ ID NO: 16519 - DNA, 21 bp, Artificial Sequence
  Synthetic
gacgccatggtttatacttca

SEQ ID NO: 16520 - DNA, 19 bp, Artificial Sequence
  Synthetic
ttgttaacaaggcactcga

SEQ ID NO: 16521 - DNA, 19 bp, Artificial Sequence
  Synthetic
accagtctgtgtaaatggc

SEQ ID NO: 16522 - DNA, 25 bp, Artificial Sequence
  Synthetic
acttttcatcacgtatgtattgttc

SEQ ID NO: 16523 - DNA, 21 bp, Artificial Sequence
  Synthetic
tgtgttgacatcgttaaggag

SEQ ID NO: 16524 - DNA, 20 bp, Artificial Sequence
  Synthetic
tcacaggacatcttacttgc

SEQ ID NO: 16525 - DNA, 20 bp, Artificial Sequence
  Synthetic
gaacatgcttagaggtgaag

SEQ ID NO: 16526 - DNA, 22 bp, Artificial Sequence
  Synthetic
aactgtatcctggaatttgaga

SEQ ID NO: 16527 - DNA, 20 bp, Artificial Sequence
  Synthetic
ccgtagtgtcagtatcatca

SEQ ID NO: 16528 - DNA, 23 bp, Artificial Sequence
  Synthetic
atgtaaatcatgagggtaagact

SEQ ID NO: 16529 - DNA, 21 bp, Artificial Sequence
  Synthetic
catgctaatttggaatctgca

SEQ ID NO: 16530 - DNA, 21 bp, Artificial Sequence
  Synthetic
taaggagaccctctatcgtat

SEQ ID NO: 16531 - DNA, 18 bp, Artificial Sequence
  Synthetic
caaagccagcttcacgag

SEQ ID NO: 16532 - DNA, 22 bp, Artificial Sequence
  Synthetic
accatacagaaggaagtcatag

SEQ ID NO: 16533 - DNA, 21 bp, Artificial Sequence
  Synthetic
gctccttcttattgtaatggc

SEQ ID NO: 16534 - DNA, 18 bp, Artificial Sequence
  Synthetic
tcttggctcatgtggttt

SEQ ID NO: 16535 - DNA, 21 bp, Artificial Sequence
  Synthetic
tcattagtgatgaagttgctc

SEQ ID NO: 16536 - DNA, 22 bp, Artificial Sequence
  Synthetic
gtttccgttaagatgtttgatg

SEQ ID NO: 16537 - DNA, 20 bp, Artificial Sequence
  Synthetic
catatcaatgcccaagtagc

SEQ ID NO: 16538 - DNA, 21 bp, Artificial Sequence
  Synthetic
aaatcattggttacaaagcca

SEQ ID NO: 16539 - DNA, 18 bp, Artificial Sequence
  Synthetic
gctatgggcaaacctgtg

SEQ ID NO: 16540 - DNA, 19 bp, Artificial Sequence
  Synthetic
ttactcctcttgtgcaacc

SEQ ID NO: 16541 - DNA, 22 bp, Artificial Sequence
  Synthetic
gttacatttagtaccttcgagg

SEQ ID NO: 16542 - DNA, 20 bp, Artificial Sequence
  Synthetic
gctgatgttctctaccaacc

SEQ ID NO: 16543 - DNA, 21 bp, Artificial Sequence
  Synthetic
aaaattgtctgcttaggctta

SEQ ID NO: 16544 - DNA, 22 bp, Artificial Sequence
  Synthetic
agattcaccactactttgaatg

SEQ ID NO: 16545 - DNA, 24 bp, Artificial Sequence
  Synthetic
catcattggatgcttttaactttc

SEQ ID NO: 16546 - DNA, 25 bp, Artificial Sequence
  Synthetic
tctactatggtaatgctttagatca

SEQ ID NO: 16547 - DNA, 18 bp, Artificial Sequence
  Synthetic
atatgaactcccaggggc

SEQ ID NO: 16548 - DNA, 22 bp, Artificial Sequence
  Synthetic
agaagatggtttctcttttgtc

SEQ ID NO: 16549 - DNA, 19 bp, Artificial Sequence
  Synthetic
caggctatgacccaaatgt

SEQ ID NO: 16550 - DNA, 21 bp, Artificial Sequence
  Synthetic
ttggcctcttattgttacagc

SEQ ID NO: 16551 - DNA, 18 bp, Artificial Sequence
  Synthetic
tatggtgctgggcagttt

SEQ ID NO: 16552 - DNA, 23 bp, Artificial Sequence
  Synthetic
taaaggattctgtgacttgaaag

SEQ ID NO: 16553 - DNA, 23 bp, Artificial Sequence
  Synthetic
ataacttggttaaagattgtcca

SEQ ID NO: 16554 - DNA, 24 bp, Artificial Sequence
  Synthetic
tgtacgccaatcattattaaagac

SEQ ID NO: 16555 - DNA, 23 bp, Artificial Sequence
  Synthetic
tctcttcgaccgttattttaaat

SEQ ID NO: 16556 - DNA, 22 bp, Artificial Sequence
  Synthetic
tattgctagataaacgcactac

SEQ ID NO: 16557 - DNA, 25 bp, Artificial Sequence
  Synthetic
aactcaaatgaatcttaagtatgcc

SEQ ID NO: 16558 - DNA, 20 bp, Artificial Sequence
  Synthetic
gttcttgctcgcaaacataa

SEQ ID NO: 16559 - DNA, 21 bp, Artificial Sequence
  Synthetic
atcatgaattcgtggatgagt

SEQ ID NO: 16560 - DNA, 22 bp, Artificial Sequence
  Synthetic
acttatgattgaaaggttcgtg

SEQ ID NO: 16561 - DNA, 20 bp, Artificial Sequence
  Synthetic
gaccattcctatgttgcaag

SEQ ID NO: 16562 - DNA, 20 bp, Artificial Sequence
  Synthetic
ccaacacttgtactgagaga

SEQ ID NO: 16563 - DNA, 21 bp, Artificial Sequence
  Synthetic
cttagtgcacctactctagtg

SEQ ID NO: 16564 - DNA, 19 bp, Artificial Sequence
  Synthetic
atgcattgccagaaacaac

SEQ ID NO: 16565 - DNA, 22 bp, Artificial Sequence
  Synthetic
aaaagcacacaaggataagtca

SEQ ID NO: 16566 - DNA, 22 bp, Artificial Sequence
  Synthetic
cattttgtgcataatgtctgat

SEQ ID NO: 16567 - DNA, 24 bp, Artificial Sequence
  Synthetic
ggttaccctaatatgtttatcacc

SEQ ID NO: 16568 - DNA, 22 bp, Artificial Sequence
  Synthetic
agtgatacactgaaaggattgt

SEQ ID NO: 16569 - DNA, 22 bp, Artificial Sequence
  Synthetic
attataggagatgaactgaggg

SEQ ID NO: 16570 - DNA, 21 bp, Artificial Sequence
  Synthetic
aatgcaattgtgtgtaggttt

SEQ ID NO: 16571 - DNA, 20 bp, Artificial Sequence
  Synthetic
atttctgctggatttagcct

SEQ ID NO: 16572 - DNA, 18 bp, Artificial Sequence
  Synthetic
tctgcacaatgactgaca

SEQ ID NO: 16573 - DNA, 20 bp, Artificial Sequence
  Synthetic
taagcccagatcacaaatgg

SEQ ID NO: 16574 - DNA, 25 bp, Artificial Sequence
  Synthetic
aataaagtcacaagatttgtcagtg

SEQ ID NO: 16575 - DNA, 19 bp, Artificial Sequence
  Synthetic
ctcagacaatggttgccaa

SEQ ID NO: 16576 - DNA, 22 bp, Artificial Sequence
  Synthetic
ggacagcttttgttacaaatgt

SEQ ID NO: 16577 - DNA, 22 bp, Artificial Sequence
  Synthetic
gtaactttgaattgtgtgacaa

SEQ ID NO: 16578 - DNA, 19 bp, Artificial Sequence
  Synthetic
ttttcacctgctcaagaca

SEQ ID NO: 16579 - DNA, 25 bp, Artificial Sequence
  Synthetic
ctacaactcaacatttttttcaacc

SEQ ID NO: 16580 - DNA, 18 bp, Artificial Sequence
  Synthetic
taggccctttgagagaga

SEQ ID NO: 16581 - DNA, 25 bp, Artificial Sequence
  Synthetic
catctgaaatattagacatttcacc

SEQ ID NO: 16582 - DNA, 22 bp, Artificial Sequence
  Synthetic
actagccaaaaatctattgtgg

SEQ ID NO: 16583 - DNA, 22 bp, Artificial Sequence
  Synthetic
aggtcttttattgaggacttgc

SEQ ID NO: 16584 - DNA, 24 bp, Artificial Sequence
  Synthetic
tctatgagaaccaaaaacaaatcg

SEQ ID NO: 16585 - DNA, 19 bp, Artificial Sequence
  Synthetic
tgagtgtgttcttggacaa

SEQ ID NO: 16586 - DNA, 23 bp, Artificial Sequence
  Synthetic
tcgttattggcatcattaacaac

SEQ ID NO: 16587 - DNA, 22 bp, Artificial Sequence
  Synthetic
catcgtcatggttacaatcttg

SEQ ID NO: 16588 - DNA, 19 bp, Artificial Sequence
  Synthetic
gctgtttttcagagcgcta

SEQ ID NO: 16589 - DNA, 21 bp, Artificial Sequence
  Synthetic
aattggtggttattctgagga

SEQ ID NO: 16590 - DNA, 18 bp, Artificial Sequence
  Synthetic
tcggaagaaacaggtacg

SEQ ID NO: 16591 - DNA, 18 bp, Artificial Sequence
  Synthetic
tcctggaacaatggaacc

SEQ ID NO: 16592 - DNA, 20 bp, Artificial Sequence
  Synthetic
acttgtcattggtgctgtga

SEQ ID NO: 16593 - DNA, 24 bp, Artificial Sequence
  Synthetic
catgaaaattattctcttcctgac

SEQ ID NO: 16594 - DNA, 22 bp, Artificial Sequence
  Synthetic
ttgtatttctctatgcagttgc

SEQ ID NO: 16595 - DNA, 19 bp, Artificial Sequence
  Synthetic
ccccccgcattacatttgg

SEQ ID NO: 16596 - DNA, 18 bp, Artificial Sequence
  Synthetic
acttccctacggcgctaa

SEQ ID NO: 16597 - DNA, 20 bp, Artificial Sequence
  Synthetic
cttgagagcaaagtttctgg

SEQ ID NO: 16598 - DNA, 20 bp, Artificial Sequence
  Synthetic
tcatggagccattaaattgg

SEQ ID NO: 16599 - DNA, 24 bp, Artificial Sequence
  Synthetic
ttccgtttacgatacatagtctac

SEQ ID NO: 16600 - DNA, 18 bp, Artificial Sequence
  Synthetic
ccatgcggtgttgtactc

SEQ ID NO: 16601 - DNA, 20 bp, Artificial Sequence
  Synthetic
agtagacctggcagatgagg

SEQ ID NO: 16602 - DNA, 18 bp, Artificial Sequence
  Synthetic
gtgtccgtgtttcctgtt

SEQ ID NO: 16603 - DNA, 24 bp, Artificial Sequence
  Synthetic
ctgttaaagatgtgttagaaaagg

SEQ ID NO: 16604 - DNA, 18 bp, Artificial Sequence
  Synthetic
tggacagtcgttcttgga

SEQ ID NO: 16605 - DNA, 19 bp, Artificial Sequence
  Synthetic
aggtgagcaaggtagagaa

SEQ ID NO: 16606 - DNA, 22 bp, Artificial Sequence
  Synthetic
tcaattagccctatgttttcag

SEQ ID NO: 16607 - DNA, 25 bp, Artificial Sequence
  Synthetic
tgaatatgtacactgttgatttacg

SEQ ID NO: 16608 - DNA, 18 bp, Artificial Sequence
  Synthetic
tcctggtgttggaaaacc

SEQ ID NO: 16609 - DNA, 25 bp, Artificial Sequence
  Synthetic
caaagatttttgcttaagattagcc

SEQ ID NO: 16610 - DNA, 20 bp, Artificial Sequence
  Synthetic
ttatgtatgtacccccagga

SEQ ID NO: 16611 - DNA, 21 bp, Artificial Sequence
  Synthetic
cacgattcaaatattgtgtgc

SEQ ID NO: 16612 - DNA, 25 bp, Artificial Sequence
  Synthetic
tgattctattcttgtatcatactcc

SEQ ID NO: 16613 - DNA, 24 bp, Artificial Sequence
  Synthetic
tggtgttataggtatgattacagc

SEQ ID NO: 16614 - DNA, 20 bp, Artificial Sequence
  Synthetic
cacaaactgtaattgccact

SEQ ID NO: 16615 - DNA, 20 bp, Artificial Sequence
  Synthetic
actggaaaatctcttgccac

SEQ ID NO: 16616 - DNA, 21 bp, Artificial Sequence
  Synthetic
accatttacatccaagtttgt

SEQ ID NO: 16617 - DNA, 25 bp, Artificial Sequence
  Synthetic
ctataggtataatagctaatgtggt

SEQ ID NO: 16618 - DNA, 20 bp, Artificial Sequence
  Synthetic
tggtacttccaacacattct

SEQ ID NO: 16619 - DNA, 20 bp, Artificial Sequence
  Synthetic
tactgcacgaatgatcaagt

SEQ ID NO: 16620 - DNA, 24 bp, Artificial Sequence
  Synthetic
tgtgttattcagaagtgtatttgg

SEQ ID NO: 16621 - DNA, 18 bp, Artificial Sequence
  Synthetic
acccctgctgataagtct

SEQ ID NO: 16622 - DNA, 18 bp, Artificial Sequence
  Synthetic
aagaggtggagttgtcac

SEQ ID NO: 16623 - DNA, 24 bp, Artificial Sequence
  Synthetic
tctaaaaggagattgtttacagac

SEQ ID NO: 16624 - DNA, 22 bp, Artificial Sequence
  Synthetic
gggtaaagtaggctttctagat

SEQ ID NO: 16625 - DNA, 18 bp, Artificial Sequence
  Synthetic
ctgagcgtacgttttgct

SEQ ID NO: 16626 - DNA, 23 bp, Artificial Sequence
  Synthetic
caacctgatgtgttaaagtatgg

SEQ ID NO: 16627 - DNA, 24 bp, Artificial Sequence
  Synthetic
cagaaatatgggcatttatacctg

SEQ ID NO: 16628 - DNA, 18 bp, Artificial Sequence
  Synthetic
gcccattacaaggcctaa

SEQ ID NO: 16629 - DNA, 18 bp, Artificial Sequence
  Synthetic
cacacctgtcactgcatt

SEQ ID NO: 16630 - DNA, 25 bp, Artificial Sequence
  Synthetic
agaaggggaaacattaaatattcct

SEQ ID NO: 16631 - DNA, 23 bp, Artificial Sequence
  Synthetic
gtattcagatgtaagttaccaga

SEQ ID NO: 16632 - DNA, 18 bp, Artificial Sequence
  Synthetic
caattgctttgtggcctg

SEQ ID NO: 16633 - DNA, 23 bp, Artificial Sequence
  Synthetic
atgtaaaataactttggatgctg

SEQ ID NO: 16634 - DNA, 24 bp, Artificial Sequence
  Synthetic
gcttgaataaattgtttactgtgc

SEQ ID NO: 16635 - DNA, 23 bp, Artificial Sequence
  Synthetic
taaagtatgaaggggactattgc

SEQ ID NO: 16636 - DNA, 18 bp, Artificial Sequence
  Synthetic
ccaggacctgctttcaag

SEQ ID NO: 16637 - DNA, 18 bp, Artificial Sequence
  Synthetic
ccgagctttagtggacct

SEQ ID NO: 16638 - DNA, 20 bp, Artificial Sequence
  Synthetic
cagtgtgacgaagaagatga

SEQ ID NO: 16639 - DNA, 23 bp, Artificial Sequence
  Synthetic
tattcaaatactggacaatggac

SEQ ID NO: 16640 - DNA, 19 bp, Artificial Sequence
  Synthetic
cgacaagagaacgacgacg

SEQ ID NO: 16641 - DNA, 20 bp, Artificial Sequence
  Synthetic
tacaaaaccaagcataccac

SEQ ID NO: 16642 - DNA, 25 bp, Artificial Sequence
  Synthetic
cttttaatagggttatcaatcaagg

SEQ ID NO: 16643 - DNA, 18 bp, Artificial Sequence
  Synthetic
gcgcaggtgttaagacaa

SEQ ID NO: 16644 - DNA, 18 bp, Artificial Sequence
  Synthetic
atgtcgctgtttggagac

SEQ ID NO: 16645 - DNA, 18 bp, Artificial Sequence
  Synthetic
cctgtcaggaatgggaac

SEQ ID NO: 16646 - DNA, 18 bp, Artificial Sequence
  Synthetic
gtcttcggtacctggagt

SEQ ID NO: 16647 - DNA, 20 bp, Artificial Sequence
  Synthetic
actcactgagtgacatcaac

SEQ ID NO: 16648 - DNA, 19 bp, Artificial Sequence
  Synthetic
aggtccaatctaccgaaga

SEQ ID NO: 16649 - DNA, 20 bp, Artificial Sequence
  Synthetic
agcagaaatcctgggaatgc

SEQ ID NO: 16650 - DNA, 19 bp, Artificial Sequence
  Synthetic
caattggtgtggatggcat

SEQ ID NO: 16651 - DNA, 19 bp, Artificial Sequence
  Synthetic
tttttgttcatgatgcccg

SEQ ID NO: 16652 - DNA, 18 bp, Artificial Sequence
  Synthetic
ggctgttgctgcttcaat

SEQ ID NO: 16653 - DNA, 22 bp, Artificial Sequence
  Synthetic
aaattgacacgattactgttga

SEQ ID NO: 16654 - DNA, 21 bp, Artificial Sequence
  Synthetic
ccgttgaggtatttttctcac

SEQ ID NO: 16655 - DNA, 23 bp, Artificial Sequence
  Synthetic
gttgaaatgaaaaaacctcatgc

SEQ ID NO: 16656 - DNA, 25 bp, Artificial Sequence
  Synthetic
gttggtaaatcaaccttatttaacg

SEQ ID NO: 16657 - DNA, 18 bp, Artificial Sequence
  Synthetic
taaacgttatgcgcgtgt

SEQ ID NO: 16658 - DNA, 22 bp, Artificial Sequence
  Synthetic
cgtgcagaagaagaaatttcag

SEQ ID NO: 16659 - DNA, 23 bp, Artificial Sequence
  Synthetic
atggtaaaaatgattgttggtct

SEQ ID NO: 16660 - DNA, 20 bp, Artificial Sequence
  Synthetic
aggaggacataatggcatta

SEQ ID NO: 16661 - DNA, 18 bp, Artificial Sequence
  Synthetic
gtgggcttgtctggtcta

SEQ ID NO: 16662 - DNA, 20 bp, Artificial Sequence
  Synthetic
ggaggctcaaaatttgtgat

SEQ ID NO: 16663 - DNA, 18 bp, Artificial Sequence
  Synthetic
cagcaattagaagcgctg

SEQ ID NO: 16664 - DNA, 23 bp, Artificial Sequence
  Synthetic
aagttactaagttttgacgatgt

SEQ ID NO: 16665 - DNA, 23 bp, Artificial Sequence
  Synthetic
gaataccgattgaaatttctcct

SEQ ID NO: 16666 - DNA, 19 bp, Artificial Sequence
  Synthetic
gtggtgatcacatctgctt

SEQ ID NO: 16667 - DNA, 19 bp, Artificial Sequence
  Synthetic
tggtaccgaaaacatgagt

SEQ ID NO: 16668 - DNA, 25 bp, Artificial Sequence
  Synthetic
atcaagatgaataccctaaatttgg

SEQ ID NO: 16669 - DNA, 18 bp, Artificial Sequence
  Synthetic
cttttgctgctcaggctt

SEQ ID NO: 16670 - DNA, 18 bp, Artificial Sequence
  Synthetic
cacgattatggtcggtgg

SEQ ID NO: 16671 - DNA, 22 bp, Artificial Sequence
  Synthetic
tcttgccaaagaatatctgaac

SEQ ID NO: 16672 - DNA, 25 bp, Artificial Sequence
  Synthetic
tttgaaggataagattgatagaagg

SEQ ID NO: 16673 - DNA, 25 bp, Artificial Sequence
  Synthetic
ctttgatcagcatttaaaactactg

SEQ ID NO: 16674 - DNA, 24 bp, Artificial Sequence
  Synthetic
ctaaaaaatggttagttaagccag

SEQ ID NO: 16675 - DNA, 20 bp, Artificial Sequence
  Synthetic
gttgtcaagagcttactgac

SEQ ID NO: 16676 - DNA, 19 bp, Artificial Sequence
  Synthetic
aaagtaaatggttggcagc

SEQ ID NO: 16677 - DNA, 19 bp, Artificial Sequence
  Synthetic
tgtctcttggtatacggct

SEQ ID NO: 16678 - DNA, 19 bp, Artificial Sequence
  Synthetic
tggtgcttacttcttgagc

SEQ ID NO: 16679 - DNA, 25 bp, Artificial Sequence
  Synthetic
tctttcaaaaacactaagaaagacc

SEQ ID NO: 16680 - DNA, 20 bp, Artificial Sequence
  Synthetic
aaagctgagtttgcaaaagc

SEQ ID NO: 16681 - DNA, 24 bp, Artificial Sequence
  Synthetic
catcagtttttagaggagaattgg

SEQ ID NO: 16682 - DNA, 25 bp, Artificial Sequence
  Synthetic
ctaaaaagagcttatttgtgacaag

SEQ ID NO: 16683 - DNA, 19 bp, Artificial Sequence
  Synthetic
gcacctgcttctagtccag

SEQ ID NO: 16684 - DNA, 18 bp, Artificial Sequence
  Synthetic
caccacaagtgttgcaac

SEQ ID NO: 16685 - DNA, 20 bp, Artificial Sequence
  Synthetic
gccatttgcaagtatttacg

SEQ ID NO: 16686 - DNA, 25 bp, Artificial Sequence
  Synthetic
ggtcttgaaatgtattatactagtg

SEQ ID NO: 16687 - DNA, 19 bp, Artificial Sequence
  Synthetic
ttccctcactggaaattcc

SEQ ID NO: 16688 - DNA, 22 bp, Artificial Sequence
  Synthetic
aggtttatccaccatattgatg

SEQ ID NO: 16689 - DNA, 18 bp, Artificial Sequence
  Synthetic
ctaagccaaccaaagcgt

SEQ ID NO: 16690 - DNA, 21 bp, Artificial Sequence
  Synthetic
aaagaaaatgagaccactgtc

SEQ ID NO: 16691 - DNA, 18 bp, Artificial Sequence
  Synthetic
ccaaacagctccgttgag

SEQ ID NO: 16692 - DNA, 22 bp, Artificial Sequence
  Synthetic
tatcatttacgatgcccttacc

SEQ ID NO: 16693 - DNA, 20 bp, Artificial Sequence
  Synthetic
gcagagttgaatttgacctt

SEQ ID NO: 16694 - DNA, 25 bp, Artificial Sequence
  Synthetic
cacatgtctaagttattattggttg

SEQ ID NO: 16695 - DNA, 18 bp, Artificial Sequence
  Synthetic
tgtggctctagcttttcg

SEQ ID NO: 16696 - DNA, 22 bp, Artificial Sequence
  Synthetic
agatactacgacgattagagaa

SEQ ID NO: 16697 - DNA, 22 bp, Artificial Sequence
  Synthetic
gaagcagtcttagctaatcaac

SEQ ID NO: 16698 - DNA, 24 bp, Artificial Sequence
  Synthetic
tattgttggtcctaatttcaatcg

SEQ ID NO: 16699 - DNA, 23 bp, Artificial Sequence
  Synthetic
taaaaatagggatgatgctatcg

SEQ ID NO: 16700 - DNA, 18 bp, Artificial Sequence
  Synthetic
gccattaccgactaccga

SEQ ID NO: 16701 - DNA, 19 bp, Artificial Sequence
  Synthetic
taagccctgattatgctcc

SEQ ID NO: 16702 - DNA, 21 bp, Artificial Sequence
  Synthetic
taaacggtaagaaagtagccg

SEQ ID NO: 16703 - DNA, 19 bp, Artificial Sequence
  Synthetic
ctcttgacgatgctcttcg

SEQ ID NO: 16704 - DNA, 18 bp, Artificial Sequence
  Synthetic
gctgcagcttctttttcc

SEQ ID NO: 16705 - DNA, 21 bp, Artificial Sequence
  Synthetic
tacaaaaaagagtttcggtgg

SEQ ID NO: 16706 - DNA, 21 bp, Artificial Sequence
  Synthetic
caagtccccttcttagaaagt

SEQ ID NO: 16707 - DNA, 19 bp, Artificial Sequence
  Synthetic
aggaaggtcaattggttgc

SEQ ID NO: 16708 - DNA, 19 bp, Artificial Sequence
  Synthetic
gttccggctatgaaaatgc

SEQ ID NO: 16709 - DNA, 20 bp, Artificial Sequence
  Synthetic
aaaatggcaccattgattgc

SEQ ID NO: 16710 - DNA, 19 bp, Artificial Sequence
  Synthetic
ttatccaaacgtgccaaac

SEQ ID NO: 16711 - DNA, 20 bp, Artificial Sequence
  Synthetic
ggctttattcaagacttgcc

SEQ ID NO: 16712 - DNA, 25 bp, Artificial Sequence
  Synthetic
cagtttgttccttttagaatcaaag

SEQ ID NO: 16713 - DNA, 21 bp, Artificial Sequence
  Synthetic
cctactttgctgaaatctacc

SEQ ID NO: 16714 - DNA, 19 bp, Artificial Sequence
  Synthetic
tacacctgatgacacactc

SEQ ID NO: 16715 - DNA, 19 bp, Artificial Sequence
  Synthetic
gaaggaacgcaaagacaaa

SEQ ID NO: 16716 - DNA, 18 bp, Artificial Sequence
  Synthetic
gtctggcgcataccattt

SEQ ID NO: 16717 - DNA, 18 bp, Artificial Sequence
  Synthetic
cggattgcgagaaatcac

SEQ ID NO: 16718 - DNA, 20 bp, Artificial Sequence
  Synthetic
aacaaagaacgcctagaaca

SEQ ID NO: 16719 - DNA, 18 bp, Artificial Sequence
  Synthetic
caggcttgattgcgtcag

SEQ ID NO: 16720 - DNA, 21 bp, Artificial Sequence
  Synthetic
ccgctcagttgatttatgatc

SEQ ID NO: 16721 - DNA, 25 bp, Artificial Sequence
  Synthetic
ttatcagtttttagaggctattggt

SEQ ID NO: 16722 - DNA, 18 bp, Artificial Sequence
  Synthetic
aaacgacctcaactccaa

SEQ ID NO: 16723 - DNA, 19 bp, Artificial Sequence
  Synthetic
tctttttcagatggggggt

SEQ ID NO: 16724 - DNA, 18 bp, Artificial Sequence
  Synthetic
cttagcagccgagtacga

SEQ ID NO: 16725 - DNA, 18 bp, Artificial Sequence
  Synthetic
agcagccttgtctgctta

SEQ ID NO: 16726 - DNA, 18 bp, Artificial Sequence
  Synthetic
cgtcagttagtggaaggg

SEQ ID NO: 16727 - DNA, 23 bp, Artificial Sequence
  Synthetic
tatggcctgtcaattagatacac

SEQ ID NO: 16728 - DNA, 23 bp, Artificial Sequence
  Synthetic
atgaacccctaaaacattacact

SEQ ID NO: 16729 - DNA, 19 bp, Artificial Sequence
  Synthetic
gtttgaatttgcatgtggc

SEQ ID NO: 16730 - DNA, 20 bp, Artificial Sequence
  Synthetic
ttgtggatctgtgtttaagc

SEQ ID NO: 16731 - DNA, 18 bp, Artificial Sequence
  Synthetic
aaagcaagagcccctgaa

SEQ ID NO: 16732 - DNA, 20 bp, Artificial Sequence
  Synthetic
ccagttgctactttatcgac

SEQ ID NO: 16733 - DNA, 20 bp, Artificial Sequence
  Synthetic
gcggtaaaaattcctggacg

SEQ ID NO: 16734 - DNA, 21 bp, Artificial Sequence
  Synthetic
caggctgtaataatttagcgc

SEQ ID NO: 16735 - DNA, 19 bp, Artificial Sequence
  Synthetic
ccaaaggtttcaagccttg

SEQ ID NO: 16736 - DNA, 22 bp, Artificial Sequence
  Synthetic
tgccttaaacccatttaattgc

SEQ ID NO: 16737 - DNA, 18 bp, Artificial Sequence
  Synthetic
caagtcctgcaacagcta

SEQ ID NO: 16738 - DNA, 23 bp, Artificial Sequence
  Synthetic
tatttttgatggtcttgtcaacg

SEQ ID NO: 16739 - DNA, 22 bp, Artificial Sequence
  Synthetic
gtaatcaccaaaggtttgtagt

SEQ ID NO: 16740 - DNA, 23 bp, Artificial Sequence
  Synthetic
caggtggagtatatcaattctcc

SEQ ID NO: 16741 - DNA, 22 bp, Artificial Sequence
  Synthetic
agcttcaacgattttttcaatg

SEQ ID NO: 16742 - DNA, 19 bp, Artificial Sequence
  Synthetic
agccttatttcggtaagct

SEQ ID NO: 16743 - DNA, 23 bp, Artificial Sequence
  Synthetic
taaccattgctcaaaaaagaaga

SEQ ID NO: 16744 - DNA, 20 bp, Artificial Sequence
  Synthetic
ttgatttgggacataacagc

SEQ ID NO: 16745 - DNA, 18 bp, Artificial Sequence
  Synthetic
atgttttaaggcccgtcg

SEQ ID NO: 16746 - DNA, 23 bp, Artificial Sequence
  Synthetic
taagccaagaatgttaaaaaacc

SEQ ID NO: 16747 - DNA, 22 bp, Artificial Sequence
  Synthetic
ttatgctggtgattttttctca

SEQ ID NO: 16748 - DNA, 23 bp, Artificial Sequence
  Synthetic
tttgaaaaacgttggataagacg

SEQ ID NO: 16749 - DNA, 19 bp, Artificial Sequence
  Synthetic
caagaagtgcaatgatggg

SEQ ID NO: 16750 - DNA, 18 bp, Artificial Sequence
  Synthetic
tcccaccaaagtaatgcg

SEQ ID NO: 16751 - DNA, 20 bp, Artificial Sequence
  Synthetic
tttcacttcttcactagcgt

SEQ ID NO: 16752 - DNA, 18 bp, Artificial Sequence
  Synthetic
cgacgacgttctaagcta

SEQ ID NO: 16753 - DNA, 20 bp, Artificial Sequence
  Synthetic
ccatagaaacacggacatca

SEQ ID NO: 16754 - DNA, 21 bp, Artificial Sequence
  Synthetic
caagaagaaccagagtcaaac

SEQ ID NO: 16755 - DNA, 19 bp, Artificial Sequence
  Synthetic
cccatgatggatgaaaggt

SEQ ID NO: 16756 - DNA, 20 bp, Artificial Sequence
  Synthetic
tagtcatcctcaccaaaacc

SEQ ID NO: 16757 - DNA, 25 bp, Artificial Sequence
  Synthetic
cgatatacgtattagtatcaaggat

SEQ ID NO: 16758 - DNA, 21 bp, Artificial Sequence
  Synthetic
tatcaacctgacttaaagcgt

SEQ ID NO: 16759 - DNA, 18 bp, Artificial Sequence
  Synthetic
ttgttcccaagctgcttg

SEQ ID NO: 16760 - DNA, 25 bp, Artificial Sequence
  Synthetic
ctgtgattataagcaaatcatcttg

SEQ ID NO: 16761 - DNA, 23 bp, Artificial Sequence
  Synthetic
aaacgattaatgtctattctcgt

SEQ ID NO: 16762 - DNA, 25 bp, Artificial Sequence
  Synthetic
aaagttactaaatagctatagtccg

SEQ ID NO: 16763 - DNA, 19 bp, Artificial Sequence
  Synthetic
agctgagctaaactcccat

SEQ ID NO: 16764 - DNA, 20 bp, Artificial Sequence
  Synthetic
atgctttcagcgcttatccc

SEQ ID NO: 16765 - DNA, 20 bp, Artificial Sequence
  Synthetic
tgttatccccagggtagctt

SEQ ID NO: 16766 - DNA, 19 bp, Artificial Sequence
  Synthetic
ggcgtcaccccctatacat

SEQ ID NO: 16767 - DNA, 25 bp, Artificial Sequence
  Synthetic
cagctcaatgttataaagataagca

SEQ ID NO: 16768 - DNA, 20 bp, Artificial Sequence
  Synthetic
ctctcctaccatgacacttt

SEQ ID NO: 16769 - DNA, 19 bp, Artificial Sequence
  Synthetic
atcgtaactcgccggttca

SEQ ID NO: 16770 - DNA, 18 bp, Artificial Sequence
  Synthetic
gacctcctgcgtgcaaag

SEQ ID NO: 16771 - DNA, 23 bp, Artificial Sequence
  Synthetic
tctttgattgttttttcagtagc

SEQ ID NO: 16772 - DNA, 20 bp, Artificial Sequence
  Synthetic
cttgttatctgctgccattg

SEQ ID NO: 16773 - DNA, 19 bp, Artificial Sequence
  Synthetic
ctgggatacgagttgatcc

SEQ ID NO: 16774 - DNA, 21 bp, Artificial Sequence
  Synthetic
accaccaagtttgttatcacc

SEQ ID NO: 16775 - DNA, 18 bp, Artificial Sequence
  Synthetic
cactgcttgacgttttgc

SEQ ID NO: 16776 - DNA, 25 bp, Artificial Sequence
  Synthetic
gcttctaacttgctatctagtttac

SEQ ID NO: 16777 - DNA, 18 bp, Artificial Sequence
  Synthetic
ccaaggcacgttctagat

SEQ ID NO: 16778 - DNA, 25 bp, Artificial Sequence
  Synthetic
cgataataatcacctaatttagcag

SEQ ID NO: 16779 - DNA, 18 bp, Artificial Sequence
  Synthetic
agcgctcctctacgatag

SEQ ID NO: 16780 - DNA, 18 bp, Artificial Sequence
  Synthetic
cttggcatccgtccacta

SEQ ID NO: 16781 - DNA, 18 bp, Artificial Sequence
  Synthetic
gctggtggaacttctgtt

SEQ ID NO: 16782 - DNA, 22 bp, Artificial Sequence
  Synthetic
cacaaaaagatctctttgcctt

SEQ ID NO: 16783 - DNA, 23 bp, Artificial Sequence
  Synthetic
ctatgcgcaaaatgatatctttg

SEQ ID NO: 16784 - DNA, 19 bp, Artificial Sequence
  Synthetic
tggaaaataagcgtgctca

SEQ ID NO: 16785 - DNA, 24 bp, Artificial Sequence
  Synthetic
aagcctattatgatctgatgaaga

SEQ ID NO: 16786 - DNA, 18 bp, Artificial Sequence
  Synthetic
tcgtgattgtggttgacc

SEQ ID NO: 16787 - DNA, 18 bp, Artificial Sequence
  Synthetic
ctattgagagcgcacaga

SEQ ID NO: 16788 - DNA, 20 bp, Artificial Sequence
  Synthetic
cgatcaagaacaagaagctc

SEQ ID NO: 16789 - DNA, 25 bp, Artificial Sequence
  Synthetic
taccaagcctataaagaaaaacaag

SEQ ID NO: 16790 - DNA, 24 bp, Artificial Sequence
  Synthetic
tagctctagtgatatcaaatatgc

SEQ ID NO: 16791 - DNA, 19 bp, Artificial Sequence
  Synthetic
ggtcagaatcaccacttcc

SEQ ID NO: 16792 - DNA, 18 bp, Artificial Sequence
  Synthetic
caaaagggcacaggttga

SEQ ID NO: 16793 - DNA, 23 bp, Artificial Sequence
  Synthetic
gaaaggaattcacacttatgact

SEQ ID NO: 16794 - DNA, 20 bp, Artificial Sequence
  Synthetic
ctcagtttgactttgcctta

SEQ ID NO: 16795 - DNA, 24 bp, Artificial Sequence
  Synthetic
ctctttaatcagcttgagattgac

SEQ ID NO: 16796 - DNA, 23 bp, Artificial Sequence
  Synthetic
atcaaagatgtagataatcaccg

SEQ ID NO: 16797 - DNA, 19 bp, Artificial Sequence
  Synthetic
agattgggctttatcacgt

SEQ ID NO: 16798 - DNA, 23 bp, Artificial Sequence
  Synthetic
gtctgattaaatcctacccattg

SEQ ID NO: 16799 - DNA, 23 bp, Artificial Sequence
  Synthetic
gattactccattattggcaaagg

SEQ ID NO: 16800 - DNA, 19 bp, Artificial Sequence
  Synthetic
ccacgagtggtttgattgt

SEQ ID NO: 16801 - DNA, 18 bp, Artificial Sequence
  Synthetic
catcagtatgtcgccgcc

SEQ ID NO: 16802 - DNA, 17 bp, Artificial Sequence
  Synthetic
gatatgcagcgctggcg

SEQ ID NO: 16803 - DNA, 20 bp, Artificial Sequence
  Synthetic
caatgcgtgctcatggtatg

SEQ ID NO: 16804 - DNA, 19 bp, Artificial Sequence
  Synthetic
gcgcgttagggctattggg

SEQ ID NO: 16805 - DNA, 19 bp, Artificial Sequence
  Synthetic
aaagtcaccgttggcacag

SEQ ID NO: 16806 - DNA, 20 bp, Artificial Sequence
  Synthetic
aaagagacatttgtccccgg

SEQ ID NO: 16807 - DNA, 20 bp, Artificial Sequence
  Synthetic
ctgacagccgacttttaccc

SEQ ID NO: 16808 - DNA, 18 bp, Artificial Sequence
  Synthetic
gccaccgtctacaccgga

SEQ ID NO: 16809 - DNA, 16 bp, Artificial Sequence
  Synthetic
gagtccagccggtcca

SEQ ID NO: 16810 - DNA, 19 bp, Artificial Sequence
  Synthetic
tgtggcgcctgactatagg

SEQ ID NO: 16811 - DNA, 16 bp, Artificial Sequence
  Synthetic
ggggaagtccgtcggt

SEQ ID NO: 16812 - DNA, 20 bp, Artificial Sequence
  Synthetic
tgattttgagagcaagggcc

SEQ ID NO: 16813 - DNA, 20 bp, Artificial Sequence
  Synthetic
tgcaggacatagacgcagtg

SEQ ID NO: 16814 - DNA, 19 bp, Artificial Sequence
  Synthetic
caggtacggcaaggagaca

SEQ ID NO: 16815 - DNA, 20 bp, Artificial Sequence
  Synthetic
tattgatgaaggaggccggg

SEQ ID NO: 16816 - DNA, 16 bp, Artificial Sequence
  Synthetic
gccctcatcaccggct

SEQ ID NO: 16817 - DNA, 17 bp, Artificial Sequence
  Synthetic
ctgctctgtcgtgcctg

SEQ ID NO: 16818 - DNA, 16 bp, Artificial Sequence
  Synthetic
cgacgcggcacacgat

SEQ ID NO: 16819 - DNA, 18 bp, Artificial Sequence
  Synthetic
ggtgggtatgcggtgtca

SEQ ID NO: 16820 - DNA, 19 bp, Artificial Sequence
  Synthetic
accaattcagcctacaccg

SEQ ID NO: 16821 - DNA, 16 bp, Artificial Sequence
  Synthetic
gctcgccccatcacca

SEQ ID NO: 16822 - DNA, 19 bp, Artificial Sequence
  Synthetic
gggcaagatcagtttttgg

SEQ ID NO: 16823 - DNA, 23 bp, Artificial Sequence
  Synthetic
actaaacgaaatttttctagtgc

SEQ ID NO: 16824 - DNA, 18 bp, Artificial Sequence
  Synthetic
gttcgcacctatagcgaa

SEQ ID NO: 16825 - DNA, 23 bp, Artificial Sequence
  Synthetic
attacaaatggtatgtcattgct

SEQ ID NO: 16826 - DNA, 25 bp, Artificial Sequence
  Synthetic
tactttctaatcaattacgtctagc

SEQ ID NO: 16827 - DNA, 22 bp, Artificial Sequence
  Synthetic
tgaacttgccactgttaatttg

SEQ ID NO: 16828 - DNA, 19 bp, Artificial Sequence
  Synthetic
ggttgatggctgtagtgtc

SEQ ID NO: 16829 - DNA, 25 bp, Artificial Sequence
  Synthetic
cacttacttctaatggtcttttagg

SEQ ID NO: 16830 - DNA, 24 bp, Artificial Sequence
  Synthetic
gtccattatttatacaggtgattg

SEQ ID NO: 16831 - DNA, 22 bp, Artificial Sequence
  Synthetic
ggtaaaaagtttgatgatcagg

SEQ ID NO: 16832 - DNA, 20 bp, Artificial Sequence
  Synthetic
aagctggtgaagttaaacct

SEQ ID NO: 16833 - DNA, 21 bp, Artificial Sequence
  Synthetic
tttttgttgagagttgtacca

SEQ ID NO: 16834 - DNA, 19 bp, Artificial Sequence
  Synthetic
aacaattgggtgttgtgag

SEQ ID NO: 16835 - DNA, 23 bp, Artificial Sequence
  Synthetic
tgtaaaagtactgtagttgaagt

SEQ ID NO: 16836 - DNA, 21 bp, Artificial Sequence
  Synthetic
tgtttgaagcacctttacact

SEQ ID NO: 16837 - DNA, 21 bp, Artificial Sequence
  Synthetic
tattgtagagttggtgaatgc

SEQ ID NO: 16838 - DNA, 21 bp, Artificial Sequence
  Synthetic
atagtggtagtgctagtgagg

SEQ ID NO: 16839 - DNA, 25 bp, Artificial Sequence
  Synthetic
accactgttcttattgattatgatc

SEQ ID NO: 16840 - DNA, 23 bp, Artificial Sequence
  Synthetic
tacaccaaattgagttaggtagt

SEQ ID NO: 16841 - DNA, 25 bp, Artificial Sequence
  Synthetic
aggttttttaaatgtactatgggtg

SEQ ID NO: 16842 - DNA, 23 bp, Artificial Sequence
  Synthetic
ttgcttatgaaaatgctagacaa

SEQ ID NO: 16843 - DNA, 20 bp, Artificial Sequence
  Synthetic
tctgttcattatgctggagt

SEQ ID NO: 16844 - DNA, 21 bp, Artificial Sequence
  Synthetic
cgttcttggttttataggtgc

SEQ ID NO: 16845 - DNA, 20 bp, Artificial Sequence
  Synthetic
ggtaaatgtgttcaggttcc

SEQ ID NO: 16846 - DNA, 25 bp, Artificial Sequence
  Synthetic
tgttataaagaggtgtactaagtcg

SEQ ID NO: 16847 - DNA, 25 bp, Artificial Sequence
  Synthetic
cccagttgaaaatgaagatatacat

SEQ ID NO: 16848 - DNA, 20 bp, Artificial Sequence
  Synthetic
gtgttccacttgttacaact

SEQ ID NO: 16849 - DNA, 21 bp, Artificial Sequence
  Synthetic
ctttgacaaagcgtaatgtcc

SEQ ID NO: 16850 - DNA, 22 bp, Artificial Sequence
  Synthetic
gcctaacatgatacgtatgatt

SEQ ID NO: 16851 - DNA, 23 bp, Artificial Sequence
  Synthetic
gttgggttgaagaagatttaact

SEQ ID NO: 16852 - DNA, 25 bp, Artificial Sequence
  Synthetic
aatcaagaagataagttttggtgtg

SEQ ID NO: 16853 - DNA, 23 bp, Artificial Sequence
  Synthetic
ttttgtcttaacatctcacaatg

SEQ ID NO: 16854 - DNA, 20 bp, Artificial Sequence
  Synthetic
tttgctattcgtaatgtgcg

SEQ ID NO: 16855 - DNA, 23 bp, Artificial Sequence
  Synthetic
gttgtgattatgtttacaatccg

SEQ ID NO: 16856 - DNA, 19 bp, Artificial Sequence
  Synthetic
gctgttactgatgccaaat

SEQ ID NO: 16857 - DNA, 21 bp, Artificial Sequence
  Synthetic
caaagtttttgttcgctatgg

SEQ ID NO: 16858 - DNA, 24 bp, Artificial Sequence
  Synthetic
actaaagagtttagatcttggtgt

SEQ ID NO: 16859 - DNA, 18 bp, Artificial Sequence
  Synthetic
acaatgtgcgtacctcat

SEQ ID NO: 16860 - DNA, 19 bp, Artificial Sequence
  Synthetic
tggcctcttgctttttcac

SEQ ID NO: 16861 - DNA, 22 bp, Artificial Sequence
  Synthetic
ggcataactatatctggtgaaa

SEQ ID NO: 16862 - DNA, 18 bp, Artificial Sequence
  Synthetic
gccgcattcctaatggtt

SEQ ID NO: 16863 - DNA, 21 bp, Artificial Sequence
  Synthetic
ttcttgacaccacaatacctt

SEQ ID NO: 16864 - DNA, 18 bp, Artificial Sequence
  Synthetic
gtgtgagcacttgcagtt

SEQ ID NO: 16865 - DNA, 23 bp, Artificial Sequence
  Synthetic
cttggttttaaaaatgtttccac

SEQ ID NO: 16866 - DNA, 21 bp, Artificial Sequence
  Synthetic
ttacctcagagaaacattcgt

SEQ ID NO: 16867 - DNA, 21 bp, Artificial Sequence
  Synthetic
tgttaatcaacagggtagtgc

SEQ ID NO: 16868 - DNA, 18 bp, Artificial Sequence
  Synthetic
atgtaaaggcgtggtctg

SEQ ID NO: 16869 - DNA, 24 bp, Artificial Sequence
  Synthetic
gaaaattatatcaaatggccttgg

SEQ ID NO: 16870 - DNA, 22 bp, Artificial Sequence
  Synthetic
tgcttaccaagattatatgcaa

SEQ ID NO: 16871 - DNA, 23 bp, Artificial Sequence
  Synthetic
gcttttaatcctgaaactaatgc

SEQ ID NO: 16872 - DNA, 25 bp, Artificial Sequence
  Synthetic
tctaaactaaacaaaatggctagtg

SEQ ID NO: 16873 - DNA, 19 bp, Artificial Sequence
  Synthetic
caacgttctgatggtgttg

SEQ ID NO: 16874 - DNA, 22 bp, Artificial Sequence
  Synthetic
gattctaaccagtcttcttcag

SEQ ID NO: 16875 - DNA, 18 bp, Artificial Sequence
  Synthetic
aggttttccacagcttgc

SEQ ID NO: 16876 - DNA, 19 bp, Artificial Sequence
  Synthetic
tcaagggtgtgctagaact

SEQ ID NO: 16877 - DNA, 19 bp, Artificial Sequence
  Synthetic
aacgattggtttttggtgg

SEQ ID NO: 16878 - DNA, 18 bp, Artificial Sequence
  Synthetic
taaagatacggctggcgt

SEQ ID NO: 16879 - DNA, 20 bp, Artificial Sequence
  Synthetic
ctgagcctccaaaatcaaga

SEQ ID NO: 16880 - DNA, 25 bp, Artificial Sequence
  Synthetic
aacaggacagtaaattgatagaaga

SEQ ID NO: 16881 - DNA, 18 bp, Artificial Sequence
  Synthetic
gagagctgtttttggcac

SEQ ID NO: 16882 - DNA, 16 bp, Artificial Sequence
  Synthetic
ctggggctcctgcagt

SEQ ID NO: 16883 - DNA, 21 bp, Artificial Sequence
  Synthetic
aggataggtagtgctagaatg

SEQ ID NO: 16884 - DNA, 22 bp, Artificial Sequence
  Synthetic
ctcatgcaaaatatcaaacacc

SEQ ID NO: 16885 - DNA, 22 bp, Artificial Sequence
  Synthetic
gaaattttccccatagatgttg

SEQ ID NO: 16886 - DNA, 20 bp, Artificial Sequence
  Synthetic
ggagaagcatcaacatcaga

SEQ ID NO: 16887 - DNA, 20 bp, Artificial Sequence
  Synthetic
aatccagcatttgagccaga

SEQ ID NO: 16888 - DNA, 20 bp, Artificial Sequence
  Synthetic
tattgctccagaagactcaa

SEQ ID NO: 16889 - DNA, 20 bp, Artificial Sequence
  Synthetic
ccatcactagaatcctgtcc

SEQ ID NO: 16890 - DNA, 19 bp, Artificial Sequence
  Synthetic
gggccaccctcttttaaat

SEQ ID NO: 16891 - DNA, 19 bp, Artificial Sequence
  Synthetic
ttggggctatggattttgc

SEQ ID NO: 16892 - DNA, 21 bp, Artificial Sequence
  Synthetic
caacaaattatgtaggcacac

SEQ ID NO: 16893 - DNA, 24 bp, Artificial Sequence
  Synthetic
ctgattgattgtgtgttattttcc

SEQ ID NO: 16894 - DNA, 23 bp, Artificial Sequence
  Synthetic
tcttcattgtttatggtttaccg

SEQ ID NO: 16895 - DNA, 18 bp, Artificial Sequence
  Synthetic
gcgcagtgtttgaatgtg

SEQ ID NO: 16896 - DNA, 25 bp, Artificial Sequence
  Synthetic
ttggaaactaacagtgatatatcag

SEQ ID NO: 16897 - DNA, 21 bp, Artificial Sequence
  Synthetic
cgaaggcgattatttaatgtg

SEQ ID NO: 16898 - DNA, 18 bp, Artificial Sequence
  Synthetic
cctgctgcaatgttttgg

SEQ ID NO: 16899 - DNA, 19 bp, Artificial Sequence
  Synthetic
tttgtatgagcctgttgca

SEQ ID NO: 16900 - DNA, 22 bp, Artificial Sequence
  Synthetic
ctgttgagtctttatgaacagg

SEQ ID NO: 16901 - DNA, 25 bp, Artificial Sequence
  Synthetic
aagattcttcaatatggaagtttgg

SEQ ID NO: 16902 - DNA, 22 bp, Artificial Sequence
  Synthetic
tctatctaacattcccactaca

SEQ ID NO: 16903 - DNA, 21 bp, Artificial Sequence
  Synthetic
gtcaatctgtaggtgaagaca

SEQ ID NO: 16904 - DNA, 18 bp, Artificial Sequence
  Synthetic
tgttaccgggcatcctag

SEQ ID NO: 16905 - DNA, 22 bp, Artificial Sequence
  Synthetic
tagaagatggtgatatgatgga

SEQ ID NO: 16906 - DNA, 22 bp, Artificial Sequence
  Synthetic
aatacatttgtagccaatggag

SEQ ID NO: 16907 - DNA, 23 bp, Artificial Sequence
  Synthetic
gacaccaaatcctaataaaatgc

SEQ ID NO: 16908 - DNA, 19 bp, Artificial Sequence
  Synthetic
tttagtcactggcaaacgg

SEQ ID NO: 16909 - DNA, 22 bp, Artificial Sequence
  Synthetic
ggggtaaaaatgatgaaagtgc

SEQ ID NO: 16910 - DNA, 23 bp, Artificial Sequence
  Synthetic
aaaaagggatatacgtaatgtgt

SEQ ID NO: 16911 - DNA, 19 bp, Artificial Sequence
  Synthetic
tcttcgagcgttttgatga

SEQ ID NO: 16912 - DNA, 18 bp, Artificial Sequence
  Synthetic
tggaagtccatggtgagg

SEQ ID NO: 16913 - DNA, 18 bp, Artificial Sequence
  Synthetic
gcatggagctgtaggagt

SEQ ID NO: 16914 - DNA, 18 bp, Artificial Sequence
  Synthetic
tggtcttgaccacatcct

SEQ ID NO: 16915 - DNA, 25 bp, Artificial Sequence
  Synthetic
gtggtgaaattattatacaatgagc

SEQ ID NO: 16916 - DNA, 25 bp, Artificial Sequence
  Synthetic
aaggttccatttatttacacaagag

SEQ ID NO: 16917 - DNA, 20 bp, Artificial Sequence
  Synthetic
agcaaagatgtcttttgctt

SEQ ID NO: 16918 - DNA, 24 bp, Artificial Sequence
  Synthetic
gagatcttgtctttgattttcaag

SEQ ID NO: 16919 - DNA, 20 bp, Artificial Sequence
  Synthetic
aagtcagcacatcagaaagg

SEQ ID NO: 16920 - DNA, 21 bp, Artificial Sequence
  Synthetic
aagctaacagagggaaaatgg

SEQ ID NO: 16921 - DNA, 21 bp, Artificial Sequence
  Synthetic
gtcttcaacctctaatcctcc

SEQ ID NO: 16922 - DNA, 18 bp, Artificial Sequence
  Synthetic
cagctggagacttggagt

SEQ ID NO: 16923 - DNA, 23 bp, Artificial Sequence
  Synthetic
tgaaataatgaagttttcctgga

SEQ ID NO: 16924 - DNA, 25 bp, Artificial Sequence
  Synthetic
atggatatagtggacaattagtttg

SEQ ID NO: 16925 - DNA, 22 bp, Artificial Sequence
  Synthetic
gtttttccagtcttttccatct

SEQ ID NO: 16926 - DNA, 21 bp, Artificial Sequence
  Synthetic
agaatctcagtcaactttgga

SEQ ID NO: 16927 - DNA, 19 bp, Artificial Sequence
  Synthetic
cgaaggtcttcctggaatg

SEQ ID NO: 16928 - DNA, 23 bp, Artificial Sequence
  Synthetic
atcatcacattgataaaaccatg

SEQ ID NO: 16929 - DNA, 21 bp, Artificial Sequence
  Synthetic
ctcctggatttccttatgtcc

SEQ ID NO: 16930 - DNA, 20 bp, Artificial Sequence
  Synthetic
tactcaattttgtgccgaat

SEQ ID NO: 16931 - DNA, 21 bp, Artificial Sequence
  Synthetic
agctacattctatgtctggtt

SEQ ID NO: 16932 - DNA, 18 bp, Artificial Sequence
  Synthetic
ggagaccctcagtgtgat

SEQ ID NO: 16933 - DNA, 24 bp, Artificial Sequence
  Synthetic
gacccacttaaaattcaaataccc

SEQ ID NO: 16934 - DNA, 24 bp, Artificial Sequence
  Synthetic
ggagacatacttttgattaacagc

SEQ ID NO: 16935 - DNA, 18 bp, Artificial Sequence
  Synthetic
gcaacagggatgcgaaat

SEQ ID NO: 16936 - DNA, 22 bp, Artificial Sequence
  Synthetic
gaagtagaagggagaattcagg

SEQ ID NO: 16937 - DNA, 25 bp, Artificial Sequence
  Synthetic
atacagagatgaagcattaaacaac

SEQ ID NO: 16938 - DNA, 19 bp, Artificial Sequence
  Synthetic
cctgccactcataaacaag

SEQ ID NO: 16939 - DNA, 21 bp, Artificial Sequence
  Synthetic
tgttgtttcaattgtgctaga

SEQ ID NO: 16940 - DNA, 21 bp, Artificial Sequence
  Synthetic
agaagcaactataccagacat

SEQ ID NO: 16941 - DNA, 18 bp, Artificial Sequence
  Synthetic
accttctttgctgtgtcc

SEQ ID NO: 16942 - DNA, 19 bp, Artificial Sequence
  Synthetic
gagcagcaaatacaggact

SEQ ID NO: 16943 - DNA, 23 bp, Artificial Sequence
  Synthetic
atgctcagcaaatttaaaaacag

SEQ ID NO: 16944 - DNA, 21 bp, Artificial Sequence
  Synthetic
gaaagacaaacttagaggctc

SEQ ID NO: 16945 - DNA, 18 bp, Artificial Sequence
  Synthetic
gcgcacgtagagtaaagc

SEQ ID NO: 16946 - DNA, 24 bp, Artificial Sequence
  Synthetic
gtcctactgatataatacctttgg

SEQ ID NO: 16947 - DNA, 23 bp, Artificial Sequence
  Synthetic
aggttacattagagtcagtagac

SEQ ID NO: 16948 - DNA, 21 bp, Artificial Sequence
  Synthetic
tttacatccaagtttgagacg

SEQ ID NO: 16949 - DNA, 21 bp, Artificial Sequence
  Synthetic
catgaagtgttagttcccaag

SEQ ID NO: 16950 - DNA, 21 bp, Artificial Sequence
  Synthetic
ggtgaatacatcctttgatcc

SEQ ID NO: 16951 - DNA, 21 bp, Artificial Sequence
  Synthetic
taatgatgtgtatggcaatgc

SEQ ID NO: 16952 - DNA, 18 bp, Artificial Sequence
  Synthetic
tctctcaccattgcaaca

SEQ ID NO: 16953 - DNA, 22 bp, Artificial Sequence
  Synthetic
gcaatgtcaaattacaggattt

SEQ ID NO: 16954 - DNA, 18 bp, Artificial Sequence
  Synthetic
gtgtgtgtagcatggtcc

SEQ ID NO: 16955 - DNA, 22 bp, Artificial Sequence
  Synthetic
ggaaaattgtccatattagccc

SEQ ID NO: 16956 - DNA, 18 bp, Artificial Sequence
  Synthetic
gagagggaatccaggagt

SEQ ID NO: 16957 - DNA, 19 bp, Artificial Sequence
  Synthetic
gcctaattacgctgtccgc

SEQ ID NO: 16958 - DNA, 19 bp, Artificial Sequence
  Synthetic
ccctgtggagactgcatct

SEQ ID NO: 16959 - DNA, 17 bp, Artificial Sequence
  Synthetic
gctggacgaactgtgcg

SEQ ID NO: 16960 - DNA, 16 bp, Artificial Sequence
  Synthetic
gggcggtctcccttgt

SEQ ID NO: 16961 - DNA, 20 bp, Artificial Sequence
  Synthetic
gtgtacgtccaccacatgag

SEQ ID NO: 16962 - DNA, 18 bp, Artificial Sequence
  Synthetic
gccggcgagagaaagaga

SEQ ID NO: 16963 - DNA, 16 bp, Artificial Sequence
  Synthetic
cgggtatgagccgcca

SEQ ID NO: 16964 - DNA, 18 bp, Artificial Sequence
  Synthetic
cgtagacgggctcgaagc

SEQ ID NO: 16965 - DNA, 19 bp, Artificial Sequence
  Synthetic
aacatcaagttccctggaa

SEQ ID NO: 16966 - DNA, 19 bp, Artificial Sequence
  Synthetic
gcaaaaagtctggcaaacc

SEQ ID NO: 16967 - DNA, 19 bp, Artificial Sequence
  Synthetic
tgcaaaaaaacagagtggt

SEQ ID NO: 16968 - DNA, 22 bp, Artificial Sequence
  Synthetic
gacacgaaacactgatacttac

SEQ ID NO: 16969 - DNA, 18 bp, Artificial Sequence
  Synthetic
ctcccgaagaactgacag

SEQ ID NO: 16970 - DNA, 21 bp, Artificial Sequence
  Synthetic
cctttgccatagtaaacatga

SEQ ID NO: 16971 - DNA, 21 bp, Artificial Sequence
  Synthetic
gtttgttgttgtacttcaagc

SEQ ID NO: 16972 - DNA, 20 bp, Artificial Sequence
  Synthetic
attgtttgatttcggttgga

SEQ ID NO: 16973 - DNA, 21 bp, Artificial Sequence
  Synthetic
agggacttgatatatccgagt

SEQ ID NO: 16974 - DNA, 22 bp, Artificial Sequence
  Synthetic
ttgtgtttttttaccgaaagac

SEQ ID NO: 16975 - DNA, 22 bp, Artificial Sequence
  Synthetic
tctgcgcagattttaaaatacg

SEQ ID NO: 16976 - DNA, 19 bp, Artificial Sequence
  Synthetic
ttacgtcgtttcctgtagc

SEQ ID NO: 16977 - DNA, 18 bp, Artificial Sequence
  Synthetic
tctgacggctaaggtgaa

SEQ ID NO: 16978 - DNA, 21 bp, Artificial Sequence
  Synthetic
tgtatcggaaaaactcgaatt

SEQ ID NO: 16979 - DNA, 24 bp, Artificial Sequence
  Synthetic
gaaagtttcggaaaatgtaaacac

SEQ ID NO: 16980 - DNA, 23 bp, Artificial Sequence
  Synthetic
tgtgttataacagacatatgcaa

SEQ ID NO: 16981 - DNA, 22 bp, Artificial Sequence
  Synthetic
aggacactttcaaaatttttcg

SEQ ID NO: 16982 - DNA, 18 bp, Artificial Sequence
  Synthetic
cggtgagcaagttctctt

SEQ ID NO: 16983 - DNA, 18 bp, Artificial Sequence
  Synthetic
aacgctgtttaaaagggc

SEQ ID NO: 16984 - DNA, 19 bp, Artificial Sequence
  Synthetic
gctgacaggatcgtcccct

SEQ ID NO: 16985 - DNA, 16 bp, Artificial Sequence
  Synthetic
tggagacgcgggcgaa

SEQ ID NO: 16986 - DNA, 20 bp, Artificial Sequence
  Synthetic
gccgtgacgtatgaagaaga

SEQ ID NO: 16987 - DNA, 19 bp, Artificial Sequence
  Synthetic
gcctccgatacgtacgact

SEQ ID NO: 16988 - DNA, 20 bp, Artificial Sequence
  Synthetic
aatcatgcattgtgtggggt

SEQ ID NO: 16989 - DNA, 18 bp, Artificial Sequence
  Synthetic
ccttagcccaagagcatg

SEQ ID NO: 16990 - DNA, 18 bp, Artificial Sequence
  Synthetic
ctcacagaacttcaggct

SEQ ID NO: 16991 - DNA, 18 bp, Artificial Sequence
  Synthetic
aaatgggaggacctgaga

SEQ ID NO: 16992 - DNA, 23 bp, Artificial Sequence
  Synthetic
aatacaataagcaatgaggaaac

SEQ ID NO: 16993 - DNA, 23 bp, Artificial Sequence
  Synthetic
gactttcgagtttagtagtacag

SEQ ID NO: 16994 - DNA, 23 bp, Artificial Sequence
  Synthetic
cgatacaagggtatgatatgacc

SEQ ID NO: 16995 - DNA, 22 bp, Artificial Sequence
  Synthetic
gttatcatgcgaacaattcaac

SEQ ID NO: 16996 - DNA, 20 bp, Artificial Sequence
  Synthetic
aagctcatggtcctacattg

SEQ ID NO: 16997 - DNA, 19 bp, Artificial Sequence
  Synthetic
aaagaagtcctcgtgctat

SEQ ID NO: 16998 - DNA, 19 bp, Artificial Sequence
  Synthetic
tggaaatctagtggtaccg

SEQ ID NO: 16999 - DNA, 23 bp, Artificial Sequence
  Synthetic
attcaatctagaggcctatttgg

SEQ ID NO: 17000 - DNA, 17 bp, Artificial Sequence
  Synthetic
cttccacgcggcagatc

SEQ ID NO: 17001 - DNA, 20 bp, Artificial Sequence
  Synthetic
ttggagtgggagagaacaga

SEQ ID NO: 17002 - DNA, 18 bp, Artificial Sequence
  Synthetic
ctccgcacgtctgtctga

SEQ ID NO: 17003 - DNA, 16 bp, Artificial Sequence
  Synthetic
agtctatgcgcgcgcc

SEQ ID NO: 17004 - DNA, 20 bp, Artificial Sequence
  Synthetic
ttcacacagatgcaaccgat

SEQ ID NO: 17005 - DNA, 16 bp, Artificial Sequence
  Synthetic
ccgtctggcgtcgaac

SEQ ID NO: 17006 - DNA, 18 bp, Artificial Sequence
  Synthetic
cgccgttctgtctcgaga

SEQ ID NO: 17007 - DNA, 20 bp, Artificial Sequence
  Synthetic
gaagaatctgccgatcacca

SEQ ID NO: 17008 - DNA, 16 bp, Artificial Sequence
  Synthetic
agaaagaggcgccggt

SEQ ID NO: 17009 - DNA, 20 bp, Artificial Sequence
  Synthetic
ctgcgaagatagtgaccccg

SEQ ID NO: 17010 - DNA, 24 bp, Artificial Sequence
  Synthetic
actccttaacacatcattattcct

SEQ ID NO: 17011 - DNA, 19 bp, Artificial Sequence
  Synthetic
tagcgattttgtgctcatg

SEQ ID NO: 17012 - DNA, 22 bp, Artificial Sequence
  Synthetic
gtttccaatgtccattttttcc

SEQ ID NO: 17013 - DNA, 24 bp, Artificial Sequence
  Synthetic
tagctctgttttctttgttttgtc

SEQ ID NO: 17014 - DNA, 23 bp, Artificial Sequence
  Synthetic
tttttgttaaaaagcgaatgtcc

SEQ ID NO: 17015 - DNA, 18 bp, Artificial Sequence
  Synthetic
cacacatcacgagtctcc

SEQ ID NO: 17016 - DNA, 23 bp, Artificial Sequence
  Synthetic
tatgatcatctgaaactgtttgg

SEQ ID NO: 17017 - DNA, 20 bp, Artificial Sequence
  Synthetic
gatgacgcatacgatctact

SEQ ID NO: 17018 - DNA, 18 bp, Artificial Sequence
  Synthetic
ccgtcattacatctcccg

SEQ ID NO: 17019 - DNA, 18 bp, Artificial Sequence
  Synthetic
tttcgacgcaaactttgg

SEQ ID NO: 17020 - DNA, 20 bp, Artificial Sequence
  Synthetic
gttcgttgagagaattaggc

SEQ ID NO: 17021 - DNA, 25 bp, Artificial Sequence
  Synthetic
agaaacatactgatttgtacagaag

SEQ ID NO: 17022 - DNA, 18 bp, Artificial Sequence
  Synthetic
gtgttggtaaacgcgtgt

SEQ ID NO: 17023 - DNA, 18 bp, Artificial Sequence
  Synthetic
tttttcaaacgtctgggc

SEQ ID NO: 17024 - DNA, 18 bp, Artificial Sequence
  Synthetic
gtttgtggagtcggtagc

SEQ ID NO: 17025 - DNA, 20 bp, Artificial Sequence
  Synthetic
gagcctagcgattagtttgt

SEQ ID NO: 17026 - DNA, 18 bp, Artificial Sequence
  Synthetic
tgatgccaatgaagcctt

SEQ ID NO: 17027 - DNA, 19 bp, Artificial Sequence
  Synthetic
tgaatgggagcctttgaac

SEQ ID NO: 17028 - DNA, 21 bp, Artificial Sequence
  Synthetic
atctgtgtttgtatctgctcc

SEQ ID NO: 17029 - DNA, 23 bp, Artificial Sequence
  Synthetic
tgaattttttctggaatcttgag

SEQ ID NO: 17030 - DNA, 16 bp, Artificial Sequence
  Synthetic
gccgacacactgcagc

SEQ ID NO: 17031 - DNA, 18 bp, Artificial Sequence
  Synthetic
gagctctctcaccccgtg

SEQ ID NO: 17032 - DNA, 17 bp, Artificial Sequence
  Synthetic
ggccgccgagattaacg

SEQ ID NO: 17033 - DNA, 17 bp, Artificial Sequence
  Synthetic
ccggtgattcccggaga

SEQ ID NO: 17034 - DNA, 16 bp, Artificial Sequence
  Synthetic
acatgagggcggccag

SEQ ID NO: 17035 - DNA, 18 bp, Artificial Sequence
  Synthetic
ccttaatgggaacgggga

SEQ ID NO: 17036 - DNA, 21 bp, Artificial Sequence
  Synthetic
ctattgccgcaaatatcattg

SEQ ID NO: 17037 - DNA, 20 bp, Artificial Sequence
  Synthetic
gtttcctttggcatatccgc

SEQ ID NO: 17038 - DNA, 18 bp, Artificial Sequence
  Synthetic
tttctgacatgaccctcg

SEQ ID NO: 17039 - DNA, 20 bp, Artificial Sequence
  Synthetic
ctcatcggaggacttgaatg

SEQ ID NO: 17040 - DNA, 18 bp, Artificial Sequence
  Synthetic
gtaaccgaaaacggtccg

SEQ ID NO: 17041 - DNA, 25 bp, Artificial Sequence
  Synthetic
ttatggaaaagtgaatcagtatagg

SEQ ID NO: 17042 - DNA, 20 bp, Artificial Sequence
  Synthetic
tcagaagatgaccatgaaca

SEQ ID NO: 17043 - DNA, 19 bp, Artificial Sequence
  Synthetic
tatagtgtgccccaactgt

SEQ ID NO: 17044 - DNA, 18 bp, Artificial Sequence
  Synthetic
gcgacagttgaaacggaa

SEQ ID NO: 17045 - DNA, 18 bp, Artificial Sequence
  Synthetic
tggacaacgtgtagatgg

SEQ ID NO: 17046 - DNA, 21 bp, Artificial Sequence
  Synthetic
gttggaacatagttttgctga

SEQ ID NO: 17047 - DNA, 19 bp, Artificial Sequence
  Synthetic
cagtttagagctgcagaca

SEQ ID NO: 17048 - DNA, 19 bp, Artificial Sequence
  Synthetic
catgcagcaattgaaatgc

SEQ ID NO: 17049 - DNA, 18 bp, Artificial Sequence
  Synthetic
cggagacttgtccatcag

SEQ ID NO: 17050 - DNA, 20 bp, Artificial Sequence
  Synthetic
catcaggtacagatgtccct

SEQ ID NO: 17051 - DNA, 20 bp, Artificial Sequence
  Synthetic
ttaacatctggtcctgacat

SEQ ID NO: 17052 - DNA, 23 bp, Artificial Sequence
  Synthetic
ccatattttgaattgaaaaagcc

SEQ ID NO: 17053 - DNA, 25 bp, Artificial Sequence
  Synthetic
gttgctatggattataaacaaactc

SEQ ID NO: 17054 - DNA, 18 bp, Artificial Sequence
  Synthetic
gcccctacctcttcttcc

SEQ ID NO: 17055 - DNA, 18 bp, Artificial Sequence
  Synthetic
gttccctgccaaaaatgc

SEQ ID NO: 17056 - DNA, 23 bp, Artificial Sequence
  Synthetic
acatataaaagcactgtgtacaa

SEQ ID NO: 17057 - DNA, 25 bp, Artificial Sequence
  Synthetic
ctgtttgctattttatagtaaggtc

SEQ ID NO: 17058 - DNA, 21 bp, Artificial Sequence
  Synthetic
atcagcagtataatcatgcac

SEQ ID NO: 17059 - DNA, 18 bp, Artificial Sequence
  Synthetic
gacagctcagcagttgtt

SEQ ID NO: 17060 - DNA, 19 bp, Artificial Sequence
  Synthetic
aggctcacaacatagtgtg

SEQ ID NO: 17061 - DNA, 22 bp, Artificial Sequence
  Synthetic
acaccagaatggatagaaagac

SEQ ID NO: 17062 - DNA, 23 bp, Artificial Sequence
  Synthetic
tatgaaacaatggataaagcatg

SEQ ID NO: 17063 - DNA, 23 bp, Artificial Sequence
  Synthetic
aatggaaatcctgtataccaatt

SEQ ID NO: 17064 - DNA, 19 bp, Artificial Sequence
  Synthetic
ggatgggtggtgtaaagtg

SEQ ID NO: 17065 - DNA, 18 bp, Artificial Sequence
  Synthetic
ggcacctacgaagcctca

SEQ ID NO: 17066 - DNA, 23 bp, Artificial Sequence
  Synthetic
aggtatcggtttcaaaaacataa

SEQ ID NO: 17067 - DNA, 19 bp, Artificial Sequence
  Synthetic
cgccatatatgctgctagg

SEQ ID NO: 17068 - DNA, 25 bp, Artificial Sequence
  Synthetic
agttctactacatatactaatccca

SEQ ID NO: 17069 - DNA, 25 bp, Artificial Sequence
  Synthetic
gataatcccatatttcaaaatgctg

SEQ ID NO: 17070 - DNA, 22 bp, Artificial Sequence
  Synthetic
tcaatctccttttgataccacc

SEQ ID NO: 17071 - DNA, 25 bp, Artificial Sequence
  Synthetic
catactatgaattctaccttactgg

SEQ ID NO: 17072 - DNA, 25 bp, Artificial Sequence
  Synthetic
tttgttttatacactatgccttacc

SEQ ID NO: 17073 - DNA, 18 bp, Artificial Sequence
  Synthetic
cccaatgggtgttgtact

SEQ ID NO: 17074 - DNA, 20 bp, Artificial Sequence
  Synthetic
tgcatacccagcagtagacc

SEQ ID NO: 17075 - DNA, 20 bp, Artificial Sequence
  Synthetic
tgacccagttaaagatgtct

SEQ ID NO: 17076 - DNA, 24 bp, Artificial Sequence
  Synthetic
acatcttctaatatagtgccaatc

SEQ ID NO: 17077 - DNA, 21 bp, Artificial Sequence
  Synthetic
tgtacactgtacaactaggga

SEQ ID NO: 17078 - DNA, 21 bp, Artificial Sequence
  Synthetic
ctggtattgatgaaccaacaa

SEQ ID NO: 17079 - DNA, 24 bp, Artificial Sequence
  Synthetic
tagaaagtttccttggtagatctg

SEQ ID NO: 17080 - DNA, 18 bp, Artificial Sequence
  Synthetic
caggagctccaattcctt

SEQ ID NO: 17081 - DNA, 18 bp, Artificial Sequence
  Synthetic
acatggtgtcattggcat

SEQ ID NO: 17082 - DNA, 18 bp, Artificial Sequence
  Synthetic
aaactcctctgaccctca

SEQ ID NO: 17083 - DNA, 21 bp, Artificial Sequence
  Synthetic
ttgctcaacatacaccttagc

SEQ ID NO: 17084 - DNA, 20 bp, Artificial Sequence
  Synthetic
ccaaaggctgttttagtacc

SEQ ID NO: 17085 - DNA, 23 bp, Artificial Sequence
  Synthetic
tgaaaattattgtgtgtgtgttg

SEQ ID NO: 17086 - DNA, 20 bp, Artificial Sequence
  Synthetic
aaagttggtttgttgtggat

SEQ ID NO: 17087 - DNA, 24 bp, Artificial Sequence
  Synthetic
agaagctacaaaagtaataagtcc

SEQ ID NO: 17088 - DNA, 21 bp, Artificial Sequence
  Synthetic
tatacgcagatgaagatagca

SEQ ID NO: 17089 - DNA, 22 bp, Artificial Sequence
  Synthetic
tatgaggaatgcattagatggt

SEQ ID NO: 17090 - DNA, 22 bp, Artificial Sequence
  Synthetic
ttcaagtttcagaagctaaagc

SEQ ID NO: 17091 - DNA, 18 bp, Artificial Sequence
  Synthetic
ggcctcctccaactccat

SEQ ID NO: 17092 - DNA, 21 bp, Artificial Sequence
  Synthetic
aactgtaaacctcccaaaagg

SEQ ID NO: 17093 - DNA, 23 bp, Artificial Sequence
  Synthetic
aggggaaatcgatattgtatcag

SEQ ID NO: 17094 - DNA, 25 bp, Artificial Sequence
  Synthetic
gatgtttcatttacatttgaaaggg

SEQ ID NO: 17095 - DNA, 22 bp, Artificial Sequence
  Synthetic
tggattggtagtgtttaatccc

SEQ ID NO: 17096 - DNA, 21 bp, Artificial Sequence
  Synthetic
gaagaggaaatccattaggtg

SEQ ID NO: 17097 - DNA, 18 bp, Artificial Sequence
  Synthetic
ggctggaaaggttggaga

SEQ ID NO: 17098 - DNA, 24 bp, Artificial Sequence
  Synthetic
tacaagtatattacttcatgggcc

SEQ ID NO: 17099 - DNA, 18 bp, Artificial Sequence
  Synthetic
gctcagccactaacccgt

SEQ ID NO: 17100 - DNA, 18 bp, Artificial Sequence
  Synthetic
ctgtgggatggaaccaac

SEQ ID NO: 17101 - DNA, 20 bp, Artificial Sequence
  Synthetic
aaattcacacaacctctagc

SEQ ID NO: 17102 - DNA, 19 bp, Artificial Sequence
  Synthetic
taaaggttggtggtggaag

SEQ ID NO: 17103 - DNA, 25 bp, Artificial Sequence
  Synthetic
ttcaaatgttaggagagataacaag

SEQ ID NO: 17104 - DNA, 21 bp, Artificial Sequence
  Synthetic
gataagtcagagttctcaggg

SEQ ID NO: 17105 - DNA, 20 bp, Artificial Sequence
  Synthetic
caagaaaacagcagacaagc

SEQ ID NO: 17106 - DNA, 20 bp, Artificial Sequence
  Synthetic
acaccaatgatgaaacagga

SEQ ID NO: 17107 - DNA, 18 bp, Artificial Sequence
  Synthetic
ctctttgggccaagatcc

SEQ ID NO: 17108 - DNA, 24 bp, Artificial Sequence
  Synthetic
ggttttcctaggtttactattcca

SEQ ID NO: 17109 - DNA, 20 bp, Artificial Sequence
  Synthetic
attcagcacaaactaccatg

SEQ ID NO: 17110 - DNA, 20 bp, Artificial Sequence
  Synthetic
ttggagggctgctactatag

SEQ ID NO: 17111 - DNA, 20 bp, Artificial Sequence
  Synthetic
gtttagacactcaccaaggt

SEQ ID NO: 17112 - DNA, 19 bp, Artificial Sequence
  Synthetic
ctgtcacaagtcaccatgg

SEQ ID NO: 17113 - DNA, 20 bp, Artificial Sequence
  Synthetic
gtttaaccaaaccaggtgac

SEQ ID NO: 17114 - DNA, 18 bp, Artificial Sequence
  Synthetic
acccacagtaacagtccc

SEQ ID NO: 17115 - DNA, 20 bp, Artificial Sequence
  Synthetic
atagaggagagcaaatccag

SEQ ID NO: 17116 - DNA, 20 bp, Artificial Sequence
  Synthetic
ttgatgtgtattgcccaagg

SEQ ID NO: 17117 - DNA, 21 bp, Artificial Sequence
  Synthetic
atatgactatccaacccaacc

SEQ ID NO: 17118 - DNA, 19 bp, Artificial Sequence
  Synthetic
tcctggtgttaaggaacca

SEQ ID NO: 17119 - DNA, 20 bp, Artificial Sequence
  Synthetic
ttcccttatgtgtctttggg

SEQ ID NO: 17120 - DNA, 20 bp, Artificial Sequence
  Synthetic
caggtatcttaacaggctca

SEQ ID NO: 17121 - DNA, 20 bp, Artificial Sequence
  Synthetic
aatgtgaccttccttaaacg

SEQ ID NO: 17122 - DNA, 21 bp, Artificial Sequence
  Synthetic
cgcgagatactaacaaaaacc

SEQ ID NO: 17123 - DNA, 18 bp, Artificial Sequence
  Synthetic
gtcggacagagtgatggt

SEQ ID NO: 17124 - DNA, 20 bp, Artificial Sequence
  Synthetic
gtcgttttcccaaatgaagt

SEQ ID NO: 17125 - DNA, 19 bp, Artificial Sequence
  Synthetic
catccgtcaagaaggaaga

SEQ ID NO: 17126 - DNA, 18 bp, Artificial Sequence
  Synthetic
ggcgatctgaatttcgtg

SEQ ID NO: 17127 - DNA, 19 bp, Artificial Sequence
  Synthetic
attgaccgtttcttgaggg

SEQ ID NO: 17128 - DNA, 20 bp, Artificial Sequence
  Synthetic
acaagcggtaatgcagttga

SEQ ID NO: 17129 - DNA, 18 bp, Artificial Sequence
  Synthetic
accgattacgtggggttt

SEQ ID NO: 17130 - DNA, 18 bp, Artificial Sequence
  Synthetic
cccacacttcaggaccta

SEQ ID NO: 17131 - DNA, 18 bp, Artificial Sequence
  Synthetic
ttggacaatcctgaggtg

SEQ ID NO: 17132 - DNA, 18 bp, Artificial Sequence
  Synthetic
ggttagaccgagtggcga

SEQ ID NO: 17133 - DNA, 20 bp, Artificial Sequence
  Synthetic
gggaatttaacaagacacgc

SEQ ID NO: 17134 - DNA, 19 bp, Artificial Sequence
  Synthetic
gcaggggctacattctgga

SEQ ID NO: 17135 - DNA, 18 bp, Artificial Sequence
  Synthetic
acgaggattgggaggagg

SEQ ID NO: 17136 - DNA, 18 bp, Artificial Sequence
  Synthetic
tggaagacccaagagcga

SEQ ID NO: 17137 - DNA, 20 bp, Artificial Sequence
  Synthetic
gtgcaactttagccagacca

SEQ ID NO: 17138 - DNA, 16 bp, Artificial Sequence
  Synthetic
gggatgggccggagtt

SEQ ID NO: 17139 - DNA, 18 bp, Artificial Sequence
  Synthetic
tggtccacctctcccgat

SEQ ID NO: 17140 - DNA, 20 bp, Artificial Sequence
  Synthetic
ggcctggatcttaaggttgg

SEQ ID NO: 17141 - DNA, 17 bp, Artificial Sequence
  Synthetic
ggggtgatgagctgcga

SEQ ID NO: 17142 - DNA, 16 bp, Artificial Sequence
  Synthetic
tccaggcggtcccaga

SEQ ID NO: 17143 - DNA, 17 bp, Artificial Sequence
  Synthetic
cggagcttgcccttgga

SEQ ID NO: 17144 - DNA, 16 bp, Artificial Sequence
  Synthetic
tgtcctgcaggggcgt

SEQ ID NO: 17145 - DNA, 18 bp, Artificial Sequence
  Synthetic
ccagctgttggggtaggt

SEQ ID NO: 17146 - DNA, 18 bp, Artificial Sequence
  Synthetic
cgcaacgcacttccattc

SEQ ID NO: 17147 - DNA, 20 bp, Artificial Sequence
  Synthetic
tacacatagatgggctccga

SEQ ID NO: 17148 - DNA, 20 bp, Artificial Sequence
  Synthetic
atggttaacggccttgtagg

SEQ ID NO: 17149 - DNA, 18 bp, Artificial Sequence
  Synthetic
ctgggcggctaggacaat

SEQ ID NO: 17150 - DNA, 16 bp, Artificial Sequence
  Synthetic
tcccagcgatcccagc

SEQ ID NO: 17151 - DNA, 16 bp, Artificial Sequence
  Synthetic
cgctgcacgggctgta

SEQ ID NO: 17152 - DNA, 16 bp, Artificial Sequence
  Synthetic
gacgcggcggttgaca

SEQ ID NO: 17153 - DNA, 16 bp, Artificial Sequence
  Synthetic
tccccgtcaacgtcgc

SEQ ID NO: 17154 - DNA, 18 bp, Artificial Sequence
  Synthetic
tcgcgctcaaaatccccg

SEQ ID NO: 17155 - DNA, 18 bp, Artificial Sequence
  Synthetic
ggcgctaacgatgcatct

SEQ ID NO: 17156 - DNA, 19 bp, Artificial Sequence
  Synthetic
atgtcatcatttgcggcgg

SEQ ID NO: 17157 - DNA, 17 bp, Artificial Sequence
  Synthetic
actaggaagtgcggcgg

SEQ ID NO: 17158 - DNA, 18 bp, Artificial Sequence
  Synthetic
cttcctccgtagcctggc

SEQ ID NO: 17159 - DNA, 18 bp, Artificial Sequence
  Synthetic
agcattgccagggttacg

SEQ ID NO: 17160 - DNA, 18 bp, Artificial Sequence
  Synthetic
ggcctacgagcagacggt

SEQ ID NO: 17161 - DNA, 20 bp, Artificial Sequence
  Synthetic
gcgatcaactactcagtgct

SEQ ID NO: 17162 - DNA, 16 bp, Artificial Sequence
  Synthetic
aggatgcacccgctgc

SEQ ID NO: 17163 - DNA, 16 bp, Artificial Sequence
  Synthetic
aggccatccgtcccga

SEQ ID NO: 17164 - DNA, 20 bp, Artificial Sequence
  Synthetic
tttttccagacaagccggca

SEQ ID NO: 17165 - DNA, 19 bp, Artificial Sequence
  Synthetic
acgacaccgacagtttgag

SEQ ID NO: 17166 - DNA, 16 bp, Artificial Sequence
  Synthetic
gcgcggcgtccatgaa

SEQ ID NO: 17167 - DNA, 20 bp, Artificial Sequence
  Synthetic
gaacgccatggccaataacg

SEQ ID NO: 17168 - DNA, 20 bp, Artificial Sequence
  Synthetic
ccttgttagagatgaggcgc

SEQ ID NO: 17169 - DNA, 19 bp, Artificial Sequence
  Synthetic
aagtggggcgtcaaaatgg

SEQ ID NO: 17170 - DNA, 20 bp, Artificial Sequence
  Synthetic
caagtacttggaaagcaaga

SEQ ID NO: 17171 - DNA, 20 bp, Artificial Sequence
  Synthetic
gcaagtttactggtcgctgc

SEQ ID NO: 17172 - DNA, 20 bp, Artificial Sequence
  Synthetic
cgagtgaccgttactgacgc

SEQ ID NO: 17173 - DNA, 16 bp, Artificial Sequence
  Synthetic
gcttacaagcgcgggc

SEQ ID NO: 17174 - DNA, 16 bp, Artificial Sequence
  Synthetic
cagacgagcggccgtt

SEQ ID NO: 17175 - DNA, 17 bp, Artificial Sequence
  Synthetic
tgtgcgcgagtttgctc

SEQ ID NO: 17176 - DNA, 19 bp, Artificial Sequence
  Synthetic
tacccgaccatgcagatca

SEQ ID NO: 17177 - DNA, 16 bp, Artificial Sequence
  Synthetic
gtgcagaccgacccct

SEQ ID NO: 17178 - DNA, 19 bp, Artificial Sequence
  Synthetic
actgttgcagagagatggc

SEQ ID NO: 17179 - DNA, 20 bp, Artificial Sequence
  Synthetic
catcaattttgcgtccctgg

SEQ ID NO: 17180 - DNA, 16 bp, Artificial Sequence
  Synthetic
ccgtgcagcgcgagat

SEQ ID NO: 17181 - DNA, 16 bp, Artificial Sequence
  Synthetic
cagctccggtcgtgca

SEQ ID NO: 17182 - DNA, 16 bp, Artificial Sequence
  Synthetic
ccgggtctggtgcagt

SEQ ID NO: 17183 - DNA, 22 bp, Artificial Sequence
  Synthetic
caaaacaaactaatgctggaaa

SEQ ID NO: 17184 - DNA, 20 bp, Artificial Sequence
  Synthetic
tgtggttgacttacaagaca

SEQ ID NO: 17185 - DNA, 18 bp, Artificial Sequence
  Synthetic
ttgtacctgcccgactcc

SEQ ID NO: 17186 - DNA, 20 bp, Artificial Sequence
  Synthetic
cacctacgagtggaacttcc

SEQ ID NO: 17187 - DNA, 19 bp, Artificial Sequence
  Synthetic
gttcgactcctcggttagc

SEQ ID NO: 17188 - DNA, 16 bp, Artificial Sequence
  Synthetic
ccctgcccttccagca

SEQ ID NO: 17189 - DNA, 20 bp, Artificial Sequence
  Synthetic
tgaagttttcgacgtggtca

SEQ ID NO: 17190 - DNA, 16 bp, Artificial Sequence
  Synthetic
gctcgcgcacctgcta

SEQ ID NO: 17191 - DNA, 18 bp, Artificial Sequence
  Synthetic
gggaaccccaccatgaac

SEQ ID NO: 17192 - DNA, 19 bp, Artificial Sequence
  Synthetic
tgcggtactggtacttggg

SEQ ID NO: 17193 - DNA, 19 bp, Artificial Sequence
  Synthetic
ctgtggggcttgtggttac

SEQ ID NO: 17194 - DNA, 16 bp, Artificial Sequence
  Synthetic
gcgctgaccgttctcg

SEQ ID NO: 17195 - DNA, 20 bp, Artificial Sequence
  Synthetic
tttggaagatctcggtctgc

SEQ ID NO: 17196 - DNA, 20 bp, Artificial Sequence
  Synthetic
tgtttggtctttctgggctg

SEQ ID NO: 17197 - DNA, 20 bp, Artificial Sequence
  Synthetic
gcaacccaaaatcaagcagg

SEQ ID NO: 17198 - DNA, 19 bp, Artificial Sequence
  Synthetic
gttacactagcgccctggt

SEQ ID NO: 17199 - DNA, 18 bp, Artificial Sequence
  Synthetic
ttggaatgtatgcgccgc

SEQ ID NO: 17200 - DNA, 19 bp, Artificial Sequence
  Synthetic
gacgagaacctgaaggagc

SEQ ID NO: 17201 - DNA, 19 bp, Artificial Sequence
  Synthetic
agctggccaactacattgc

SEQ ID NO: 17202 - DNA, 20 bp, Artificial Sequence
  Synthetic
tctttgaggaccaattgcgc

SEQ ID NO: 17203 - DNA, 17 bp, Artificial Sequence
  Synthetic
gcaggcaacagagcagc

SEQ ID NO: 17204 - DNA, 18 bp, Artificial Sequence
  Synthetic
cttgaccaccagggagct

SEQ ID NO: 17205 - DNA, 20 bp, Artificial Sequence
  Synthetic
actaccgtactacttccgcg

SEQ ID NO: 17206 - DNA, 20 bp, Artificial Sequence
  Synthetic
cagttcgtggaggagtttgt

SEQ ID NO: 17207 - DNA, 18 bp, Artificial Sequence
  Synthetic
cccgaagttgcatgagaa

SEQ ID NO: 17208 - DNA, 22 bp, Artificial Sequence
  Synthetic
tatctgctgggttagatattgc

SEQ ID NO: 17209 - DNA, 19 bp, Artificial Sequence
  Synthetic
ctaccaaggagaacatggt

SEQ ID NO: 17210 - DNA, 21 bp, Artificial Sequence
  Synthetic
ccagttacatggtatgatgga

SEQ ID NO: 17211 - DNA, 20 bp, Artificial Sequence
  Synthetic
gtgtcagtcaaaaccttgtt

SEQ ID NO: 17212 - DNA, 22 bp, Artificial Sequence
  Synthetic
gataaggcaaatcgttacagaa

SEQ ID NO: 17213 - DNA, 24 bp, Artificial Sequence
  Synthetic
ctcaggtttgcatattcaaattac

SEQ ID NO: 17214 - DNA, 18 bp, Artificial Sequence
  Synthetic
gccattccccacctacct

SEQ ID NO: 17215 - DNA, 23 bp, Artificial Sequence
  Synthetic
ttcctattacttggtaattgtgg

SEQ ID NO: 17216 - DNA, 19 bp, Artificial Sequence
  Synthetic
ccccagcagaagcaaaagt

SEQ ID NO: 17217 - DNA, 18 bp, Artificial Sequence
  Synthetic
cttccttactcccccctt

SEQ ID NO: 17218 - DNA, 24 bp, Artificial Sequence
  Synthetic
ggtggaaatatatgtgttagagtt

SEQ ID NO: 17219 - DNA, 21 bp, Artificial Sequence
  Synthetic
tttggtagcctatccaaaacc

SEQ ID NO: 17220 - DNA, 19 bp, Artificial Sequence
  Synthetic
cacattctcccaccaccag

SEQ ID NO: 17221 - DNA, 19 bp, Artificial Sequence
  Synthetic
gcaccgcattctaatttcg

SEQ ID NO: 17222 - DNA, 20 bp, Artificial Sequence
  Synthetic
aggcacactgacatacatct

SEQ ID NO: 17223 - DNA, 19 bp, Artificial Sequence
  Synthetic
tgcgaattcccctcaacac

SEQ ID NO: 17224 - DNA, 20 bp, Artificial Sequence
  Synthetic
catcatgttacattcctgca

SEQ ID NO: 17225 - DNA, 19 bp, Artificial Sequence
  Synthetic
ctgcatgctggaataagct

SEQ ID NO: 17226 - DNA, 19 bp, Artificial Sequence
  Synthetic
gtccgtgtgattaaagagc

SEQ ID NO: 17227 - DNA, 18 bp, Artificial Sequence
  Synthetic
cagtacaagcgccaacag

SEQ ID NO: 17228 - DNA, 18 bp, Artificial Sequence
  Synthetic
ttataatggccgggctac

SEQ ID NO: 17229 - DNA, 18 bp, Artificial Sequence
  Synthetic
ccattgttccaagggcaa

SEQ ID NO: 17230 - DNA, 20 bp, Artificial Sequence
  Synthetic
atactcagagacccagttca

SEQ ID NO: 17231 - DNA, 25 bp, Artificial Sequence
  Synthetic
ttgatcatacagacataacatttgg

SEQ ID NO: 17232 - DNA, 18 bp, Artificial Sequence
  Synthetic
ggccgacagaaaacagag

SEQ ID NO: 17233 - DNA, 19 bp, Artificial Sequence
  Synthetic
tctcagatgtcatcggact

SEQ ID NO: 17234 - DNA, 20 bp, Artificial Sequence
  Synthetic
ggagtggaatctctaggaga

SEQ ID NO: 17235 - DNA, 24 bp, Artificial Sequence
  Synthetic
gagggtagaacaaataataatgga

SEQ ID NO: 17236 - DNA, 18 bp, Artificial Sequence
  Synthetic
tcgaagaccacaacacca

SEQ ID NO: 17237 - DNA, 18 bp, Artificial Sequence
  Synthetic
cgggaaaacgggaaatcc

SEQ ID NO: 17238 - DNA, 20 bp, Artificial Sequence
  Synthetic
aaatggctgaaacatacagg

SEQ ID NO: 17239 - DNA, 22 bp, Artificial Sequence
  Synthetic
gcattgacctcaaaataactgt

SEQ ID NO: 17240 - DNA, 24 bp, Artificial Sequence
  Synthetic
tggaacatcactaggtacaattac

SEQ ID NO: 17241 - DNA, 21 bp, Artificial Sequence
  Synthetic
caggcacattatccaaaactc

SEQ ID NO: 17242 - DNA, 25 bp, Artificial Sequence
  Synthetic
tcagttcaaataagaaaaacgtagg

SEQ ID NO: 17243 - DNA, 25 bp, Artificial Sequence
  Synthetic
atccctgataacaataactaatgac

SEQ ID NO: 17244 - DNA, 25 bp, Artificial Sequence
  Synthetic
ctctactctgctaatataacagaaa

SEQ ID NO: 17245 - DNA, 18 bp, Artificial Sequence
  Synthetic
catccacatgtacatgcg

SEQ ID NO: 17246 - DNA, 24 bp, Artificial Sequence
  Synthetic
catacaacaatcaaatctatccac

SEQ ID NO: 17247 - DNA, 21 bp, Artificial Sequence
  Synthetic
gaaaacaccattgctattcac

SEQ ID NO: 17248 - DNA, 23 bp, Artificial Sequence
  Synthetic
ggtaatttctcatacctatgaca

SEQ ID NO: 17249 - DNA, 22 bp, Artificial Sequence
  Synthetic
acttttgaccatcctttttctg

SEQ ID NO: 17250 - DNA, 23 bp, Artificial Sequence
  Synthetic
gaaggtaggctacttaaactagg

SEQ ID NO: 17251 - DNA, 19 bp, Artificial Sequence
  Synthetic
ccactatctcctgatgcag

SEQ ID NO: 17252 - DNA, 19 bp, Artificial Sequence
  Synthetic
cccggcagatcaaaatcag

SEQ ID NO: 17253 - DNA, 25 bp, Artificial Sequence
  Synthetic
gtattaatgtattgtgatgttgtcg

SEQ ID NO: 17254 - DNA, 19 bp, Artificial Sequence
  Synthetic
aagatgagagcagtccagg

SEQ ID NO: 17255 - DNA, 20 bp, Artificial Sequence
  Synthetic
tcttgcagctgttaaagttg

SEQ ID NO: 17256 - DNA, 23 bp, Artificial Sequence
  Synthetic
aagggaaaaattggttaagatgt

SEQ ID NO: 17257 - DNA, 25 bp, Artificial Sequence
  Synthetic
gagtatatgtgttcagtagaattgg

SEQ ID NO: 17258 - DNA, 19 bp, Artificial Sequence
  Synthetic
gggcttatggaactgatga

SEQ ID NO: 17259 - DNA, 21 bp, Artificial Sequence
  Synthetic
ttcgggggtattctaatcaat

SEQ ID NO: 17260 - DNA, 21 bp, Artificial Sequence
  Synthetic
tgagagtaagaggtataggga

SEQ ID NO: 17261 - DNA, 22 bp, Artificial Sequence
  Synthetic
ttatcacaccaattgagacttt

SEQ ID NO: 17262 - DNA, 18 bp, Artificial Sequence
  Synthetic
ggatgtcaatccgacctt

SEQ ID NO: 17263 - DNA, 20 bp, Artificial Sequence
  Synthetic
atcacacccaggaatctttg

SEQ ID NO: 17264 - DNA, 22 bp, Artificial Sequence
  Synthetic
ggatgtgatagaatcaatggat

SEQ ID NO: 17265 - DNA, 22 bp, Artificial Sequence
  Synthetic
acactagcgagaaatatttgtg

SEQ ID NO: 17266 - DNA, 18 bp, Artificial Sequence
  Synthetic
ctgagcattgcacccata

SEQ ID NO: 17267 - DNA, 21 bp, Artificial Sequence
  Synthetic
tcttaggagtctcaatcctga

SEQ ID NO: 17268 - DNA, 22 bp, Artificial Sequence
  Synthetic
gatttgtagccaattttagcat

SEQ ID NO: 17269 - DNA, 19 bp, Artificial Sequence
  Synthetic
tctccacattccagaagtc

SEQ ID NO: 17270 - DNA, 21 bp, Artificial Sequence
  Synthetic
gggaattcttgaagatgaaca

SEQ ID NO: 17271 - DNA, 18 bp, Artificial Sequence
  Synthetic
gtagggtcagcaaagcac

SEQ ID NO: 17272 - DNA, 18 bp, Artificial Sequence
  Synthetic
aaaagtgagggagctgcg

SEQ ID NO: 17273 - DNA, 20 bp, Artificial Sequence
  Synthetic
ggtggttgacctacattgca

SEQ ID NO: 17274 - DNA, 24 bp, Artificial Sequence
  Synthetic
agacatattagaggtgtttaaggt

SEQ ID NO: 17275 - DNA, 19 bp, Artificial Sequence
  Synthetic
tgtgcgatacaaatgtggg

SEQ ID NO: 17276 - DNA, 19 bp, Artificial Sequence
  Synthetic
tgggcatatgacaatgaca

SEQ ID NO: 17277 - DNA, 20 bp, Artificial Sequence
  Synthetic
ggtaccaaaaaaaagctgca

SEQ ID NO: 17278 - DNA, 18 bp, Artificial Sequence
  Synthetic
aggaggaggaggatgagg

SEQ ID NO: 17279 - DNA, 19 bp, Artificial Sequence
  Synthetic
aagggttacaaacaagtgc

SEQ ID NO: 17280 - DNA, 21 bp, Artificial Sequence
  Synthetic
gctttcctatctttcctcact

SEQ ID NO: 17281 - DNA, 19 bp, Artificial Sequence
  Synthetic
gggggattgggtataggca

SEQ ID NO: 17282 - DNA, 18 bp, Artificial Sequence
  Synthetic
gggtctgtgcaggttagc

SEQ ID NO: 17283 - DNA, 19 bp, Artificial Sequence
  Synthetic
gcgctcgggtacactttta

SEQ ID NO: 17284 - DNA, 20 bp, Artificial Sequence
  Synthetic
gtaccagctgtaccatatgt

SEQ ID NO: 17285 - DNA, 18 bp, Artificial Sequence
  Synthetic
cagttcccgtctgcttac

SEQ ID NO: 17286 - DNA, 22 bp, Artificial Sequence
  Synthetic
aataaatctgaagtgccattgg

SEQ ID NO: 17287 - DNA, 25 bp, Artificial Sequence
  Synthetic
ctgattcccaattatttaataagcc

SEQ ID NO: 17288 - DNA, 19 bp, Artificial Sequence
  Synthetic
ttgttggatgactggaact

SEQ ID NO: 17289 - DNA, 20 bp, Artificial Sequence
  Synthetic
tgctacaaaacgcaaaaagc

SEQ ID NO: 17290 - DNA, 20 bp, Artificial Sequence
  Synthetic
tgcaccctgtgagtaagtgt

SEQ ID NO: 17291 - DNA, 18 bp, Artificial Sequence
  Synthetic
gggtgtgtttgacaggtt

SEQ ID NO: 17292 - DNA, 21 bp, Artificial Sequence
  Synthetic
ttggagaaacagtggaattac

SEQ ID NO: 17293 - DNA, 18 bp, Artificial Sequence
  Synthetic
gacgtttgcatccaacac

SEQ ID NO: 17294 - DNA, 19 bp, Artificial Sequence
  Synthetic
gggacggtccagtacttcc

SEQ ID NO: 17295 - DNA, 18 bp, Artificial Sequence
  Synthetic
ccggcccgtcaatcaaag

SEQ ID NO: 17296 - DNA, 21 bp, Artificial Sequence
  Synthetic
tttaccgagtaaaaggttcca

SEQ ID NO: 17297 - DNA, 19 bp, Artificial Sequence
  Synthetic
tgattctggtctcacctgt

SEQ ID NO: 17298 - DNA, 18 bp, Artificial Sequence
  Synthetic
cgcggttcgatgtagggt

SEQ ID NO: 17299 - DNA, 20 bp, Artificial Sequence
  Synthetic
catgtggctgagcaaaaagg

SEQ ID NO: 17300 - DNA, 17 bp, Artificial Sequence
  Synthetic
aggttcctgcggaggtg

SEQ ID NO: 17301 - DNA, 17 bp, Artificial Sequence
  Synthetic
tacttgaggagccggcg

SEQ ID NO: 17302 - DNA, 16 bp, Artificial Sequence
  Synthetic
ccccttccgcctccaa

SEQ ID NO: 17303 - DNA, 18 bp, Artificial Sequence
  Synthetic
gtcgtcacgctccacaac

SEQ ID NO: 17304 - DNA, 18 bp, Artificial Sequence
  Synthetic
gtcctcgaattcgtggcc

SEQ ID NO: 17305 - DNA, 20 bp, Artificial Sequence
  Synthetic
cggtgcgaaatgaagagtgt

SEQ ID NO: 17306 - DNA, 20 bp, Artificial Sequence
  Synthetic
tgagaagcagtttcaggacg

SEQ ID NO: 17307 - DNA, 19 bp, Artificial Sequence
  Synthetic
ttatcaggtacgtgctgtt

SEQ ID NO: 17308 - DNA, 16 bp, Artificial Sequence
  Synthetic
cgatggagcgcatgcc

SEQ ID NO: 17309 - DNA, 18 bp, Artificial Sequence
  Synthetic
cccgttgcagtgattcgg

SEQ ID NO: 17310 - DNA, 17 bp, Artificial Sequence
  Synthetic
gtcccgttgtgcgttgt

SEQ ID NO: 17311 - DNA, 19 bp, Artificial Sequence
  Synthetic
cagacggtgtcagtcaagg

SEQ ID NO: 17312 - DNA, 20 bp, Artificial Sequence
  Synthetic
ccaacagtagtccctctgcc

SEQ ID NO: 17313 - DNA, 19 bp, Artificial Sequence
  Synthetic
cgtcctccccctgaaaagc

SEQ ID NO: 17314 - DNA, 17 bp, Artificial Sequence
  Synthetic
cgtagctggcggttctg

SEQ ID NO: 17315 - DNA, 16 bp, Artificial Sequence
  Synthetic
agccacgcgctagcac

SEQ ID NO: 17316 - DNA, 20 bp, Artificial Sequence
  Synthetic
aaaggggatcaaattggccc

SEQ ID NO: 17317 - DNA, 18 bp, Artificial Sequence
  Synthetic
cgaggcctgcgtaacttg

SEQ ID NO: 17318 - DNA, 19 bp, Artificial Sequence
  Synthetic
ctgtccttagttggcgccg

SEQ ID NO: 17319 - DNA, 18 bp, Artificial Sequence
  Synthetic
cggcggtaacaaaggacg

SEQ ID NO: 17320 - DNA, 18 bp, Artificial Sequence
  Synthetic
gacgcaaagacgctcctg

SEQ ID NO: 17321 - DNA, 20 bp, Artificial Sequence
  Synthetic
cagagagcctagaatcacgc

SEQ ID NO: 17322 - DNA, 19 bp, Artificial Sequence
  Synthetic
ccccacacgccatagacat

SEQ ID NO: 17323 - DNA, 20 bp, Artificial Sequence
  Synthetic
ctttccacacgcaatgaagc

SEQ ID NO: 17324 - DNA, 20 bp, Artificial Sequence
  Synthetic
ttgtatgccagaagcctcct

SEQ ID NO: 17325 - DNA, 16 bp, Artificial Sequence
  Synthetic
cgctgtgcgccctcaa

SEQ ID NO: 17326 - DNA, 17 bp, Artificial Sequence
  Synthetic
tgctgctcctgctcctc

SEQ ID NO: 17327 - DNA, 18 bp, Artificial Sequence
  Synthetic
cggagacacaggatggga

SEQ ID NO: 17328 - DNA, 16 bp, Artificial Sequence
  Synthetic
acggtgcccagtgggt

SEQ ID NO: 17329 - DNA, 20 bp, Artificial Sequence
  Synthetic
gagacagctctgattcacgg

SEQ ID NO: 17330 - DNA, 17 bp, Artificial Sequence
  Synthetic
aagcgtcggagagctgg

SEQ ID NO: 17331 - DNA, 17 bp, Artificial Sequence
  Synthetic
ggacggagtgatggcct

SEQ ID NO: 17332 - DNA, 19 bp, Artificial Sequence
  Synthetic
agtccggagaagatagggc

SEQ ID NO: 17333 - DNA, 18 bp, Artificial Sequence
  Synthetic
gcagggatgtctgaggag

SEQ ID NO: 17334 - DNA, 19 bp, Artificial Sequence
  Synthetic
cggggtggtaactacctgc

SEQ ID NO: 17335 - DNA, 20 bp, Artificial Sequence
  Synthetic
cagacagtgggtatggcaat

SEQ ID NO: 17336 - DNA, 21 bp, Artificial Sequence
  Synthetic
catagaaccaccaaaactgag

SEQ ID NO: 17337 - DNA, 22 bp, Artificial Sequence
  Synthetic
tcaggtttctaagacatcaagg

SEQ ID NO: 17338 - DNA, 20 bp, Artificial Sequence
  Synthetic
agtgagcatagacagaaagc

SEQ ID NO: 17339 - DNA, 19 bp, Artificial Sequence
  Synthetic
tgctgtttaaggcccgaga

SEQ ID NO: 17340 - DNA, 20 bp, Artificial Sequence
  Synthetic
tggctgggactgttattcac

SEQ ID NO: 17341 - DNA, 18 bp, Artificial Sequence
  Synthetic
gcctttgtaacactgtgg

SEQ ID NO: 17342 - DNA, 19 bp, Artificial Sequence
  Synthetic
tggggtcatgatgatgttc

SEQ ID NO: 17343 - DNA, 18 bp, Artificial Sequence
  Synthetic
caggagcgtcacatccca

SEQ ID NO: 17344 - DNA, 19 bp, Artificial Sequence
  Synthetic
gttgcccccagcttctact

SEQ ID NO: 17345 - DNA, 18 bp, Artificial Sequence
  Synthetic
gtggcggcctaatgaaag

SEQ ID NO: 17346 - DNA, 18 bp, Artificial Sequence
  Synthetic
gaggacggggatatggtt

SEQ ID NO: 17347 - DNA, 22 bp, Artificial Sequence
  Synthetic
ggaatatctcaggcatatggag

SEQ ID NO: 17348 - DNA, 22 bp, Artificial Sequence
  Synthetic
acatgtatggtatgtatcccct

SEQ ID NO: 17349 - DNA, 23 bp, Artificial Sequence
  Synthetic
aaacttactagatgatagcgatg

SEQ ID NO: 17350 - DNA, 22 bp, Artificial Sequence
  Synthetic
acagtggaatagaaaatgaagc

SEQ ID NO: 17351 - DNA, 25 bp, Artificial Sequence
  Synthetic
ggtttctcatatgaattcaaaaagc

SEQ ID NO: 17352 - DNA, 24 bp, Artificial Sequence
  Synthetic
tcatgagaaaagaaggaatactgt

SEQ ID NO: 17353 - DNA, 20 bp, Artificial Sequence
  Synthetic
atcagctcttcctaccccac

SEQ ID NO: 17354 - DNA, 23 bp, Artificial Sequence
  Synthetic
aataaagtagaggaaacaacact

SEQ ID NO: 17355 - DNA, 19 bp, Artificial Sequence
  Synthetic
ggtcactcctgaagtagtg

SEQ ID NO: 17356 - DNA, 19 bp, Artificial Sequence
  Synthetic
gaaaatcccgcctttacca

SEQ ID NO: 17357 - DNA, 19 bp, Artificial Sequence
  Synthetic
tggtgtggctcttagagtg

SEQ ID NO: 17358 - DNA, 19 bp, Artificial Sequence
  Synthetic
atcttccaccttccagacc

SEQ ID NO: 17359 - DNA, 21 bp, Artificial Sequence
  Synthetic
gaaactgaaaggtattgaggt

SEQ ID NO: 17360 - DNA, 19 bp, Artificial Sequence
  Synthetic
ctgcccacctcttgaatta

SEQ ID NO: 17361 - DNA, 23 bp, Artificial Sequence
  Synthetic
gggttgtaggtgaaaatattcct

SEQ ID NO: 17362 - DNA, 18 bp, Artificial Sequence
  Synthetic
ccacacgttgtcctgatc

SEQ ID NO: 17363 - DNA, 23 bp, Artificial Sequence
  Synthetic
actgtgaatttaatgtgaaatgc

SEQ ID NO: 17364 - DNA, 23 bp, Artificial Sequence
  Synthetic
ttgcaagaaattgatattcgttg

SEQ ID NO: 17365 - DNA, 23 bp, Artificial Sequence
  Synthetic
gtgagaatgagcatgatactttg

SEQ ID NO: 17366 - DNA, 23 bp, Artificial Sequence
  Synthetic
attgaaaagacgattgttgtttc

SEQ ID NO: 17367 - DNA, 25 bp, Artificial Sequence
  Synthetic
taacaaatgcctcttatatgtatgg

SEQ ID NO: 17368 - DNA, 18 bp, Artificial Sequence
  Synthetic
gacgacgacgacgaagag

SEQ ID NO: 17369 - DNA, 25 bp, Artificial Sequence
  Synthetic
gaacataaagaatctagtagcaagc

SEQ ID NO: 17370 - DNA, 25 bp, Artificial Sequence
  Synthetic
aataaagtagaaggtaatacatggg

SEQ ID NO: 17371 - DNA, 20 bp, Artificial Sequence
  Synthetic
tgttatagacacaggcacat

SEQ ID NO: 17372 - DNA, 18 bp, Artificial Sequence
  Synthetic
actgctgtgcaaactcat

SEQ ID NO: 17373 - DNA, 23 bp, Artificial Sequence
  Synthetic
ttgcactttatacatctaggttt

SEQ ID NO: 17374 - DNA, 22 bp, Artificial Sequence
  Synthetic
attaatacattaccctgtgcag

SEQ ID NO: 17375 - DNA, 25 bp, Artificial Sequence
  Synthetic
attgttggaactgatttatacttcc

SEQ ID NO: 17376 - DNA, 23 bp, Artificial Sequence
  Synthetic
ggtattgaaattgatagaggtgg

SEQ ID NO: 17377 - DNA, 22 bp, Artificial Sequence
  Synthetic
tattttaatcctaatggccagg

SEQ ID NO: 17378 - DNA, 23 bp, Artificial Sequence
  Synthetic
tattttgcatgtgaaatggaaca

SEQ ID NO: 17379 - DNA, 20 bp, Artificial Sequence
  Synthetic
tgaacaggccaaaaatgaac

SEQ ID NO: 17380 - DNA, 18 bp, Artificial Sequence
  Synthetic
agggctcaacctttcaga

SEQ ID NO: 17381 - DNA, 20 bp, Artificial Sequence
  Synthetic
caactgtggaaaactccatt

SEQ ID NO: 17382 - DNA, 25 bp, Artificial Sequence
  Synthetic
tgcagatttcttaaaattagagagg

SEQ ID NO: 17383 - DNA, 18 bp, Artificial Sequence
  Synthetic
ccagaccggatgatggaa

SEQ ID NO: 17384 - DNA, 23 bp, Artificial Sequence
  Synthetic
taaaggacaagaaatgtgatgtc

SEQ ID NO: 17385 - DNA, 18 bp, Artificial Sequence
  Synthetic
cattttggcgccaactct

SEQ ID NO: 17386 - DNA, 18 bp, Artificial Sequence
  Synthetic
ggggtgtgtagacattgc

SEQ ID NO: 17387 - DNA, 20 bp, Artificial Sequence
  Synthetic
ctgacgctgctattagaagt

SEQ ID NO: 17388 - DNA, 25 bp, Artificial Sequence
  Synthetic
tcaaatttgttaaatgatgaggagg

SEQ ID NO: 17389 - DNA, 22 bp, Artificial Sequence
  Synthetic
tgattggattgtaaatcagacc

SEQ ID NO: 17390 - DNA, 21 bp, Artificial Sequence
  Synthetic
atggtacccctgtatttcaac

SEQ ID NO: 17391 - DNA, 23 bp, Artificial Sequence
  Synthetic
caagctttattattttttgcacg

SEQ ID NO: 17392 - DNA, 24 bp, Artificial Sequence
  Synthetic
tttgtagactcagatgatatgtgg

SEQ ID NO: 17393 - DNA, 17 bp, Artificial Sequence
  Synthetic
ccacggggctacgagaa

SEQ ID NO: 17394 - DNA, 17 bp, Artificial Sequence
  Synthetic
gggaagcgagcacctca

SEQ ID NO: 17395 - DNA, 21 bp, Artificial Sequence
  Synthetic
agagtacaaacagttagtgga

SEQ ID NO: 17396 - DNA, 23 bp, Artificial Sequence
  Synthetic
gaatctgcattaactgatcatgt

SEQ ID NO: 17397 - DNA, 18 bp, Artificial Sequence
  Synthetic
gccctcacgtttagttcg

SEQ ID NO: 17398 - DNA, 25 bp, Artificial Sequence
  Synthetic
agtgcatttttatacagatcttagc

SEQ ID NO: 17399 - DNA, 21 bp, Artificial Sequence
  Synthetic
gcgttctaccacatttactgt

SEQ ID NO: 17400 - DNA, 19 bp, Artificial Sequence
  Synthetic
cctgcaactggtaaggtat

SEQ ID NO: 17401 - DNA, 24 bp, Artificial Sequence
  Synthetic
ccagaaaaggaaagattagtatgg

SEQ ID NO: 17402 - DNA, 18 bp, Artificial Sequence
  Synthetic
aatgttatgccaggcact

SEQ ID NO: 17403 - DNA, 19 bp, Artificial Sequence
  Synthetic
tcttacatcacaggcaaca

SEQ ID NO: 17404 - DNA, 20 bp, Artificial Sequence
  Synthetic
acagaaaataacagggtccc

SEQ ID NO: 17405 - DNA, 18 bp, Artificial Sequence
  Synthetic
gaaggggtcttgcaagga

SEQ ID NO: 17406 - DNA, 23 bp, Artificial Sequence
  Synthetic
agacattaaacgaaaaacagatg

SEQ ID NO: 17407 - DNA, 23 bp, Artificial Sequence
  Synthetic
tacaagaaaatgtagaagacctt

SEQ ID NO: 17408 - DNA, 19 bp, Artificial Sequence
  Synthetic
gcaggtaaacgaggaatgt

SEQ ID NO: 17409 - DNA, 18 bp, Artificial Sequence
  Synthetic
aaaaccacgctaaaaccg

SEQ ID NO: 17410 - DNA, 19 bp, Artificial Sequence
  Synthetic
ttttaccgaactggatggg

SEQ ID NO: 17411 - DNA, 23 bp, Artificial Sequence
  Synthetic
agtgttattgatattcaaacgcc

SEQ ID NO: 17412 - DNA, 19 bp, Artificial Sequence
  Synthetic
gggcgcgagatttgtacaa

SEQ ID NO: 17413 - DNA, 18 bp, Artificial Sequence
  Synthetic
cagtgacggaagacctag

SEQ ID NO: 17414 - DNA, 18 bp, Artificial Sequence
  Synthetic
ccttagggcaacattggg

SEQ ID NO: 17415 - DNA, 21 bp, Artificial Sequence
  Synthetic
aaaacgtgaacaagtctatgc

SEQ ID NO: 17416 - DNA, 18 bp, Artificial Sequence
  Synthetic
tagcctttgtaccagcac

SEQ ID NO: 17417 - DNA, 18 bp, Artificial Sequence
  Synthetic
gatgagctggaggaggag

SEQ ID NO: 17418 - DNA, 25 bp, Artificial Sequence
  Synthetic
gggtcagttatttcaaatctaatag

SEQ ID NO: 17419 - DNA, 23 bp, Artificial Sequence
  Synthetic
tccaaaaaaacgtttatttgagg

SEQ ID NO: 17420 - DNA, 20 bp, Artificial Sequence
  Synthetic
atttgtgtttggtcaaatgc

SEQ ID NO: 17421 - DNA, 19 bp, Artificial Sequence
  Synthetic
cagcaagaaaacgaagagt

SEQ ID NO: 17422 - DNA, 19 bp, Artificial Sequence
  Synthetic
tattttgggggtttgggaa

SEQ ID NO: 17423 - DNA, 19 bp, Artificial Sequence
  Synthetic
cagaaggtgttccagagac

SEQ ID NO: 17424 - DNA, 23 bp, Artificial Sequence
  Synthetic
ttgttattcaatcaagaacttgc

SEQ ID NO: 17425 - DNA, 21 bp, Artificial Sequence
  Synthetic
agaattaggtagaggaggtcc

SEQ ID NO: 17426 - DNA, 21 bp, Artificial Sequence
  Synthetic
gcacacaagaattcaagatgg

SEQ ID NO: 17427 - DNA, 21 bp, Artificial Sequence
  Synthetic
aagcgattttaaccagtacac

SEQ ID NO: 17428 - DNA, 20 bp, Artificial Sequence
  Synthetic
ttttgccaaatgtactgtga

SEQ ID NO: 17429 - DNA, 20 bp, Artificial Sequence
  Synthetic
cagaggcgattgttataccg

SEQ ID NO: 17430 - DNA, 24 bp, Artificial Sequence
  Synthetic
ctttacctgaggtgattattaggt

SEQ ID NO: 17431 - DNA, 19 bp, Artificial Sequence
  Synthetic
acttcttgtgcaaactgtg

SEQ ID NO: 17432 - DNA, 18 bp, Artificial Sequence
  Synthetic
ggcaaaacggagactgtt

SEQ ID NO: 17433 - DNA, 24 bp, Artificial Sequence
  Synthetic
taatttcatgatgggagaatttcc

SEQ ID NO: 17434 - DNA, 20 bp, Artificial Sequence
  Synthetic
ctagctctacaaggccaacc

SEQ ID NO: 17435 - DNA, 18 bp, Artificial Sequence
  Synthetic
tagaacggttgcgagaac

SEQ ID NO: 17436 - DNA, 18 bp, Artificial Sequence
  Synthetic
gggcataggtactggcaa

SEQ ID NO: 17437 - DNA, 21 bp, Artificial Sequence
  Synthetic
ccatcagttgttagtacctct

SEQ ID NO: 17438 - DNA, 21 bp, Artificial Sequence
  Synthetic
tatagggggacaatatgagga

SEQ ID NO: 17439 - DNA, 23 bp, Artificial Sequence
  Synthetic
taacaaatacatgagcaaacagt

SEQ ID NO: 17440 - DNA, 23 bp, Artificial Sequence
  Synthetic
tgtcaattttgtaaagtttcagg

SEQ ID NO: 17441 - DNA, 25 bp, Artificial Sequence
  Synthetic
tccttatgccagatataatttttgg

SEQ ID NO: 17442 - DNA, 25 bp, Artificial Sequence
  Synthetic
caactatatctactgactcatttgg

SEQ ID NO: 17443 - DNA, 20 bp, Artificial Sequence
  Synthetic
cgccaaaaggaagtaaagac

SEQ ID NO: 17444 - DNA, 21 bp, Artificial Sequence
  Synthetic
cgagtgacatcaaaatcatgg

SEQ ID NO: 17445 - DNA, 18 bp, Artificial Sequence
  Synthetic
gagagaaagtcggaaccc

SEQ ID NO: 17446 - DNA, 18 bp, Artificial Sequence
  Synthetic
gagtcagctggtgtggat

SEQ ID NO: 17447 - DNA, 22 bp, Artificial Sequence
  Synthetic
cgttttctgtacaaagaaacct

SEQ ID NO: 17448 - DNA, 19 bp, Artificial Sequence
  Synthetic
tttcaaccgaaaacggtac

SEQ ID NO: 17449 - DNA, 23 bp, Artificial Sequence
  Synthetic
acggtaaagtaacaactattcca

SEQ ID NO: 17450 - DNA, 18 bp, Artificial Sequence
  Synthetic
gacagggagacagctcag

SEQ ID NO: 17451 - DNA, 18 bp, Artificial Sequence
  Synthetic
gatggaggctcacagact

SEQ ID NO: 17452 - DNA, 20 bp, Artificial Sequence
  Synthetic
aatacagcacagttttcagg

SEQ ID NO: 17453 - DNA, 25 bp, Artificial Sequence
  Synthetic
cacacatatgtagtaaagtagatga

SEQ ID NO: 17454 - DNA, 24 bp, Artificial Sequence
  Synthetic
attatacagactttaatgacgagg

SEQ ID NO: 17455 - DNA, 18 bp, Artificial Sequence
  Synthetic
tattttgctgctacgcct

SEQ ID NO: 17456 - DNA, 22 bp, Artificial Sequence
  Synthetic
atgctgtgtggttaataaacac

SEQ ID NO: 17457 - DNA, 18 bp, Artificial Sequence
  Synthetic
ggctctgtccatgttagt

SEQ ID NO: 17458 - DNA, 22 bp, Artificial Sequence
  Synthetic
tggataatccagtctttgagga

SEQ ID NO: 17459 - DNA, 22 bp, Artificial Sequence
  Synthetic
cacatgatgtggttatacatgg

SEQ ID NO: 17460 - DNA, 18 bp, Artificial Sequence
  Synthetic
ctcacgtttgcttgctgt

SEQ ID NO: 17461 - DNA, 19 bp, Artificial Sequence
  Synthetic
acagggacacaataatggc

SEQ ID NO: 17462 - DNA, 25 bp, Artificial Sequence
  Synthetic
catactatgaactccactttacttg

SEQ ID NO: 17463 - DNA, 21 bp, Artificial Sequence
  Synthetic
actactactaaaaaacgctcg

SEQ ID NO: 17464 - DNA, 18 bp, Artificial Sequence
  Synthetic
ggttgtgtccctaggcat

SEQ ID NO: 17465 - DNA, 18 bp, Artificial Sequence
  Synthetic
gtaagacgcctcgcctta

SEQ ID NO: 17466 - DNA, 22 bp, Artificial Sequence
  Synthetic
atatcggtgcatatataagtgc

SEQ ID NO: 17467 - DNA, 18 bp, Artificial Sequence
  Synthetic
aagtgtgcaggacattgt

SEQ ID NO: 17468 - DNA, 18 bp, Artificial Sequence
  Synthetic
aaaattgtgtgccccaac

SEQ ID NO: 17469 - DNA, 22 bp, Artificial Sequence
  Synthetic
gtacccgaatggattaaaagac

SEQ ID NO: 17470 - DNA, 20 bp, Artificial Sequence
  Synthetic
agtcatttttggttatcgcc

SEQ ID NO: 17471 - DNA, 23 bp, Artificial Sequence
  Synthetic
aaagtgtttacgttttcaaatcc

SEQ ID NO: 17472 - DNA, 20 bp, Artificial Sequence
  Synthetic
acataaggcacgtgaaatgg

SEQ ID NO: 17473 - DNA, 22 bp, Artificial Sequence
  Synthetic
tacaaaacatgtaagcaaagtg

SEQ ID NO: 17474 - DNA, 25 bp, Artificial Sequence
  Synthetic
gattcttctatagtttcattagtgg

SEQ ID NO: 17475 - DNA, 20 bp, Artificial Sequence
  Synthetic
agaatttcagcacagtgact

SEQ ID NO: 17476 - DNA, 22 bp, Artificial Sequence
  Synthetic
tatgggtccgattttatattgc

SEQ ID NO: 17477 - DNA, 25 bp, Artificial Sequence
  Synthetic
gtcagtagattataaacaaacacag

SEQ ID NO: 17478 - DNA, 18 bp, Artificial Sequence
  Synthetic
gcagatccctatggcgat

SEQ ID NO: 17479 - DNA, 19 bp, Artificial Sequence
  Synthetic
taatagccactgtgtctcc

SEQ ID NO: 17480 - DNA, 22 bp, Artificial Sequence
  Synthetic
aaaagtgatcagatttgcattg

SEQ ID NO: 17481 - DNA, 19 bp, Artificial Sequence
  Synthetic
acgaattcatcaatgtgcc

SEQ ID NO: 17482 - DNA, 20 bp, Artificial Sequence
  Synthetic
acccaacaataaagaggagc

SEQ ID NO: 17483 - DNA, 21 bp, Artificial Sequence
  Synthetic
gaatgatgccatcaatttcga

SEQ ID NO: 17484 - DNA, 25 bp, Artificial Sequence
  Synthetic
gagagagagaagaagaaaaaagaga

SEQ ID NO: 17485 - DNA, 25 bp, Artificial Sequence
  Synthetic
aaggaggatagagaatttaaacaag

SEQ ID NO: 17486 - DNA, 18 bp, Artificial Sequence
  Synthetic
aacgtatgactacccgca

SEQ ID NO: 17487 - DNA, 22 bp, Artificial Sequence
  Synthetic
ctgagtgacatcaaaatcatgg

SEQ ID NO: 17488 - DNA, 23 bp, Artificial Sequence
  Synthetic
aataaatacctggaagaacatcc

SEQ ID NO: 17489 - DNA, 18 bp, Artificial Sequence
  Synthetic
ctccctaggaggtctgga

SEQ ID NO: 17490 - DNA, 18 bp, Artificial Sequence
  Synthetic
gagtcaactggtgtggat

SEQ ID NO: 17491 - DNA, 25 bp, Artificial Sequence
  Synthetic
ctattggagatgtaaagttagaact

SEQ ID NO: 17492 - DNA, 21 bp, Artificial Sequence
  Synthetic
aaagtactttagtcctagccc

SEQ ID NO: 17493 - DNA, 20 bp, Artificial Sequence
  Synthetic
aacattactgcaaccacatt

SEQ ID NO: 17494 - DNA, 25 bp, Artificial Sequence
  Synthetic
aataaaatatacccaaggtaaggtg

SEQ ID NO: 17495 - DNA, 24 bp, Artificial Sequence
  Synthetic
ctttttttagtaaactgtggaagc

SEQ ID NO: 17496 - DNA, 23 bp, Artificial Sequence
  Synthetic
tcgcatacatttaaaaaacaagg

SEQ ID NO: 17497 - DNA, 18 bp, Artificial Sequence
  Synthetic
ggggatccgagtctccta

SEQ ID NO: 17498 - DNA, 22 bp, Artificial Sequence
  Synthetic
acctcctacatctactcctaag

SEQ ID NO: 17499 - DNA, 18 bp, Artificial Sequence
  Synthetic
tggctcagttgaattgca

SEQ ID NO: 17500 - DNA, 19 bp, Artificial Sequence
  Synthetic
acatcctgttattcctggc

SEQ ID NO: 17501 - DNA, 18 bp, Artificial Sequence
  Synthetic
ggtgctaaggacgctaga

SEQ ID NO: 17502 - DNA, 23 bp, Artificial Sequence
  Synthetic
gtttgagggtaatggtaaaaagt

SEQ ID NO: 17503 - DNA, 25 bp, Artificial Sequence
  Synthetic
cttacagatatattgattctcttgc

SEQ ID NO: 17504 - DNA, 19 bp, Artificial Sequence
  Synthetic
tattgcttttggaggcacc

SEQ ID NO: 17505 - DNA, 24 bp, Artificial Sequence
  Synthetic
acctgttccacaagtactacaaca

SEQ ID NO: 17506 - DNA, 22 bp, Artificial Sequence
  Synthetic
tgctgcagctgtttcatgattt

SEQ ID NO: 17507 - DNA, 25 bp, Artificial Sequence
  Synthetic
gcagagtagcatcatctagaaaacc

SEQ ID NO: 17508 - DNA, 25 bp, Artificial Sequence
  Synthetic
tggcgagcataataatatagcacat

SEQ ID NO: 17509 - DNA, 19 bp, Artificial Sequence
  Synthetic
ggtggggaaacggagtcgc

SEQ ID NO: 17510 - DNA, 20 bp, Artificial Sequence
  Synthetic
ataccccagcaccgaccacc

SEQ ID NO: 17511 - DNA, 25 bp, Artificial Sequence
  Synthetic
tgagcctgattttgaaatgctacaa

SEQ ID NO: 17512 - DNA, 25 bp, Artificial Sequence
  Synthetic
ggacctcccaaagtctctaattcta

SEQ ID NO: 17513 - DNA, 20 bp, Artificial Sequence
  Synthetic
aatgcctcatctggagcagc

SEQ ID NO: 17514 - DNA, 23 bp, Artificial Sequence
  Synthetic
gggttaacaatagtgtgtggcac

SEQ ID NO: 17515 - DNA, 25 bp, Artificial Sequence
  Synthetic
ggatttcctgttaatccaatgccta

SEQ ID NO: 17516 - DNA, 25 bp, Artificial Sequence
  Synthetic
ggccatttaccttatttactggtga

SEQ ID NO: 17517 - DNA, 22 bp, Artificial Sequence
  Synthetic
ccagaatgcatattgtccccag

SEQ ID NO: 17518 - DNA, 25 bp, Artificial Sequence
  Synthetic
gtctgtaactaagtcctaaggatgc

SEQ ID NO: 17519 - DNA, 20 bp, Artificial Sequence
  Synthetic
aatgcctgcaataagcacgc

SEQ ID NO: 17520 - DNA, 24 bp, Artificial Sequence
  Synthetic
ggacaacaaagagaaagtccttcg

SEQ ID NO: 17521 - DNA, 24 bp, Artificial Sequence
  Synthetic
actttcgttttagggcagctattg

SEQ ID NO: 17522 - DNA, 25 bp, Artificial Sequence
  Synthetic
gcgccaagctttctaaagaaagatt

SEQ ID NO: 17523 - DNA, 20 bp, Artificial Sequence
  Synthetic
gcgtgtcttggaggtcgagg

SEQ ID NO: 17524 - DNA, 25 bp, Artificial Sequence
  Synthetic
ccaagtctagacagacctgttgttt

SEQ ID NO: 17525 - DNA, 25 bp, Artificial Sequence
  Synthetic
ctccaggatttactctactaggagt

SEQ ID NO: 17526 - DNA, 20 bp, Artificial Sequence
  Synthetic
acggttggatgtccactagc

SEQ ID NO: 17527 - DNA, 24 bp, Artificial Sequence
  Synthetic
ctctggtgtgtaatgtctccaaag

SEQ ID NO: 17528 - DNA, 20 bp, Artificial Sequence
  Synthetic
agcaaaatccagatcgggcg

SEQ ID NO: 17529 - DNA, 24 bp, Artificial Sequence
  Synthetic
tcgcctatgacttggatgaagtat

SEQ ID NO: 17530 - DNA, 24 bp, Artificial Sequence
  Synthetic
ccgaataggaaagtatgggtgacc

SEQ ID NO: 17531 - DNA, 22 bp, Artificial Sequence
  Synthetic
ggtctaaagatacgtcctggcg

SEQ ID NO: 17532 - DNA, 23 bp, Artificial Sequence
  Synthetic
ggtgttccaaagtacacatgtga

SEQ ID NO: 17533 - DNA, 22 bp, Artificial Sequence
  Synthetic
ggtcctggaggctgtacgacac

SEQ ID NO: 17534 - DNA, 20 bp, Artificial Sequence
  Synthetic
gactccgccaacgatctgcc

SEQ ID NO: 17535 - DNA, 22 bp, Artificial Sequence
  Synthetic
gcgcctaggacagggatgtacc

SEQ ID NO: 17536 - DNA, 22 bp, Artificial Sequence
  Synthetic
cactggttcccaacacctgcta

SEQ ID NO: 17537 - DNA, 19 bp, Artificial Sequence
  Synthetic
ccattgacaaggccggcgc

SEQ ID NO: 17538 - DNA, 22 bp, Artificial Sequence
  Synthetic
cctctcgggacagccactagaa

SEQ ID NO: 17539 - DNA, 22 bp, Artificial Sequence
  Synthetic
gacgtatcttgcacggaggacc

SEQ ID NO: 17540 - DNA, 21 bp, Artificial Sequence
  Synthetic
ggggacatgtccaccctgtct

SEQ ID NO: 17541 - DNA, 20 bp, Artificial Sequence
  Synthetic
gccgcgttgaggtggatcaa

SEQ ID NO: 17542 - DNA, 22 bp, Artificial Sequence
  Synthetic
cacgtttggagtgctgcttcac

SEQ ID NO: 17543 - DNA, 19 bp, Artificial Sequence
  Synthetic
aaatcccgtaggccgccgg

SEQ ID NO: 17544 - DNA, 19 bp, Artificial Sequence
  Synthetic
aacacctgcacctcgccgg

SEQ ID NO: 17545 - DNA, 20 bp, Artificial Sequence
  Synthetic
acaagacaggccctcccgag

SEQ ID NO: 17546 - DNA, 22 bp, Artificial Sequence
  Synthetic
cggtgcgcacacttggatcaat

SEQ ID NO: 17547 - DNA, 21 bp, Artificial Sequence
  Synthetic
cccccttgatgtgttgcaggg

SEQ ID NO: 17548 - DNA, 22 bp, Artificial Sequence
  Synthetic
gcgagacagaatcttgcgggac

SEQ ID NO: 17549 - DNA, 20 bp, Artificial Sequence
  Synthetic
aaacctctctgtcgggggcc

SEQ ID NO: 17550 - DNA, 21 bp, Artificial Sequence
  Synthetic
gggggctagtaactgaggcgg

SEQ ID NO: 17551 - DNA, 22 bp, Artificial Sequence
  Synthetic
cggcacaaacaactcccacaac

SEQ ID NO: 17552 - DNA, 22 bp, Artificial Sequence
  Synthetic
tccctggaaggctgggaagtac

SEQ ID NO: 17553 - DNA, 20 bp, Artificial Sequence
  Synthetic
acacgggcacttgaggtcct

SEQ ID NO: 17554 - DNA, 19 bp, Artificial Sequence
  Synthetic
acaggaggggtctgcgcag

SEQ ID NO: 17555 - DNA, 22 bp, Artificial Sequence
  Synthetic
tgggcgcaagagatctgacttc

SEQ ID NO: 17556 - DNA, 22 bp, Artificial Sequence
  Synthetic
gctctcagtgcggatgtcttgt

SEQ ID NO: 17557 - DNA, 19 bp, Artificial Sequence
  Synthetic
gtcatcgccgcagaccagg

SEQ ID NO: 17558 - DNA, 22 bp, Artificial Sequence
  Synthetic
cgcctgcaagtggagtgagttt

SEQ ID NO: 17559 - DNA, 25 bp, Artificial Sequence
  Synthetic
gctgattttcctcctgttattgctg

SEQ ID NO: 17560 - DNA, 22 bp, Artificial Sequence
  Synthetic
agtctccagctgctttcatttg

SEQ ID NO: 17561 - DNA, 24 bp, Artificial Sequence
  Synthetic
gtgtctattgtgtagcctgttccc

SEQ ID NO: 17562 - DNA, 20 bp, Artificial Sequence
  Synthetic
catggcattctgtgaccctg

SEQ ID NO: 17563 - DNA, 21 bp, Artificial Sequence
  Synthetic
cgtttccacctacgggtaaac

SEQ ID NO: 17564 - DNA, 25 bp, Artificial Sequence
  Synthetic
cccatcccattgttgatcatattgt

SEQ ID NO: 17565 - DNA, 25 bp, Artificial Sequence
  Synthetic
ttctggaatatgcaggtttctcaaa

SEQ ID NO: 17566 - DNA, 22 bp, Artificial Sequence
  Synthetic
aaggttgcaacacttagcgtag

SEQ ID NO: 17567 - DNA, 20 bp, Artificial Sequence
  Synthetic
gcatatctggtcccccctca

SEQ ID NO: 17568 - DNA, 25 bp, Artificial Sequence
  Synthetic
actgtatctcgggttttctttctcc

SEQ ID NO: 17569 - DNA, 23 bp, Artificial Sequence
  Synthetic
cgcttgtattgttgtacgatcct

SEQ ID NO: 17570 - DNA, 24 bp, Artificial Sequence
  Synthetic
atccctgaactacctcttttcgat

SEQ ID NO: 17571 - DNA, 24 bp, Artificial Sequence
  Synthetic
tgccatcctccttctataaaacca

SEQ ID NO: 17572 - DNA, 22 bp, Artificial Sequence
  Synthetic
tttgtggtgtggtgtcattgtg

SEQ ID NO: 17573 - DNA, 23 bp, Artificial Sequence
  Synthetic
aacttgactttgctaagagccat

SEQ ID NO: 17574 - DNA, 25 bp, Artificial Sequence
  Synthetic
tgggtagtaagcctttataacgttt

SEQ ID NO: 17575 - DNA, 20 bp, Artificial Sequence
  Synthetic
cccattatgcctaggccagc

SEQ ID NO: 17576 - DNA, 24 bp, Artificial Sequence
  Synthetic
aaccatggcatctcttataccatc

SEQ ID NO: 17577 - DNA, 25 bp, Artificial Sequence
  Synthetic
gtttgtttgttggtcttctgttggt

SEQ ID NO: 17578 - DNA, 25 bp, Artificial Sequence
  Synthetic
tgggtgtggatatttgtttcactag

SEQ ID NO: 17579 - DNA, 25 bp, Artificial Sequence
  Synthetic
cctgagtaagggatgatttttgcat

SEQ ID NO: 17580 - DNA, 25 bp, Artificial Sequence
  Synthetic
ctgatgaacaatgacttgggatgat

SEQ ID NO: 17581 - DNA, 21 bp, Artificial Sequence
  Synthetic
tgattgagagtgtcccaggtc

SEQ ID NO: 17582 - DNA, 25 bp, Artificial Sequence
  Synthetic
gcaaggtacaaagttgaacacttca

SEQ ID NO: 17583 - DNA, 23 bp, Artificial Sequence
  Synthetic
ttcccttttgacttgtgtgttct

SEQ ID NO: 17584 - DNA, 24 bp, Artificial Sequence
  Synthetic
gcatttgttttgaggattggcaac

SEQ ID NO: 17585 - DNA, 25 bp, Artificial Sequence
  Synthetic
actccatttgataagctgactacag

SEQ ID NO: 17586 - DNA, 23 bp, Artificial Sequence
  Synthetic
actgatcctgcattgtcacagta

SEQ ID NO: 17587 - DNA, 23 bp, Artificial Sequence
  Synthetic
accactcagttgatccttgctta

SEQ ID NO: 17588 - DNA, 20 bp, Artificial Sequence
  Synthetic
cactccaactacaccgaggg

SEQ ID NO: 17589 - DNA, 23 bp, Artificial Sequence
  Synthetic
ctgagttctctttctttgcctgt

SEQ ID NO: 17590 - DNA, 24 bp, Artificial Sequence
  Synthetic
tctgtagtggtatagtgttgtgca

SEQ ID NO: 17591 - DNA, 25 bp, Artificial Sequence
  Synthetic
ggcgatgcaaatagttaacacttaa

SEQ ID NO: 17592 - DNA, 22 bp, Artificial Sequence
  Synthetic
ggaggctgcacgacactcatac

SEQ ID NO: 17593 - DNA, 19 bp, Artificial Sequence
  Synthetic
acgatctgaccgccacccg

SEQ ID NO: 17594 - DNA, 19 bp, Artificial Sequence
  Synthetic
tggcagcgcctccaagagg

SEQ ID NO: 17595 - DNA, 19 bp, Artificial Sequence
  Synthetic
tcgaggcgttaccctcgcg

SEQ ID NO: 17596 - DNA, 20 bp, Artificial Sequence
  Synthetic
ttgtgggatccggagcagct

SEQ ID NO: 17597 - DNA, 21 bp, Artificial Sequence
  Synthetic
tgggcaaaatcggtaaggcgt

SEQ ID NO: 17598 - DNA, 22 bp, Artificial Sequence
  Synthetic
tccgcacactttggtgaatcca

SEQ ID NO: 17599 - DNA, 22 bp, Artificial Sequence
  Synthetic
cggacctgtccctgtcttccag

SEQ ID NO: 17600 - DNA, 19 bp, Artificial Sequence
  Synthetic
acaagaccgtgcgtcccgg

SEQ ID NO: 17601 - DNA, 21 bp, Artificial Sequence
  Synthetic
ggtccgaagatggccaggagt

SEQ ID NO: 17602 - DNA, 22 bp, Artificial Sequence
  Synthetic
cgggagaagacgactggttcca

SEQ ID NO: 17603 - DNA, 22 bp, Artificial Sequence
  Synthetic
cccgtggtagacagtccagcat

SEQ ID NO: 17604 - DNA, 22 bp, Artificial Sequence
  Synthetic
aaagtccaccgctttagccact

SEQ ID NO: 17605 - DNA, 22 bp, Artificial Sequence
  Synthetic
aggaacttgccgtaggtggagt

SEQ ID NO: 17606 - DNA, 21 bp, Artificial Sequence
  Synthetic
cgagctcgtcgcacttcttct

SEQ ID NO: 17607 - DNA, 22 bp, Artificial Sequence
  Synthetic
ggacgagtcgaacatgccggag

SEQ ID NO: 17608 - DNA, 19 bp, Artificial Sequence
  Synthetic
gggtgttggcccatggagg

SEQ ID NO: 17609 - DNA, 21 bp, Artificial Sequence
  Synthetic
tgcttgaactgctcagcgagc

SEQ ID NO: 17610 - DNA, 19 bp, Artificial Sequence
  Synthetic
aaggcagtagcggcaccgg

SEQ ID NO: 17611 - DNA, 18 bp, Artificial Sequence
  Synthetic
tgcatcgctctccggcac

SEQ ID NO: 17612 - DNA, 22 bp, Artificial Sequence
  Synthetic
gtcctaggaccgacgatcctca

SEQ ID NO: 17613 - DNA, 22 bp, Artificial Sequence
  Synthetic
cgggtactcgtggagtcctact

SEQ ID NO: 17614 - DNA, 22 bp, Artificial Sequence
  Synthetic
agcggatcgaaggagtccagaa

SEQ ID NO: 17615 - DNA, 20 bp, Artificial Sequence
  Synthetic
gccggaagttgaggagctgc

SEQ ID NO: 17616 - DNA, 22 bp, Artificial Sequence
  Synthetic
ctttggcaagcactgcgtgaag

SEQ ID NO: 17617 - DNA, 21 bp, Artificial Sequence
  Synthetic
acacgatgagacgagctggct

SEQ ID NO: 17618 - DNA, 22 bp, Artificial Sequence
  Synthetic
gcccccaacataaagcctctca

SEQ ID NO: 17619 - DNA, 22 bp, Artificial Sequence
  Synthetic
ggggttgtagggtcacgggtaa

SEQ ID NO: 17620 - DNA, 22 bp, Artificial Sequence
  Synthetic
tgcggccaccctattgatttca

SEQ ID NO: 17621 - DNA, 25 bp, Artificial Sequence
  Synthetic
cccatattctttcattgccttttcc

SEQ ID NO: 17622 - DNA, 25 bp, Artificial Sequence
  Synthetic
ggagaaatttaggcttctcaactcc

SEQ ID NO: 17623 - DNA, 25 bp, Artificial Sequence
  Synthetic
tgtctttggaattttctcctcgttt

SEQ ID NO: 17624 - DNA, 22 bp, Artificial Sequence
  Synthetic
cttgcaatgtgctcaattggag

SEQ ID NO: 17625 - DNA, 25 bp, Artificial Sequence
  Synthetic
tcggatcagtaagagagaattccat

SEQ ID NO: 17626 - DNA, 25 bp, Artificial Sequence
  Synthetic
gtctttttctttgacagaagactcg

SEQ ID NO: 17627 - DNA, 20 bp, Artificial Sequence
  Synthetic
gagggccttccactttctgc

SEQ ID NO: 17628 - DNA, 25 bp, Artificial Sequence
  Synthetic
ccaagcgaatctctgtagagtttta

SEQ ID NO: 17629 - DNA, 21 bp, Artificial Sequence
  Synthetic
ggggttcagtagcagacattg

SEQ ID NO: 17630 - DNA, 23 bp, Artificial Sequence
  Synthetic
caggtcaaacggttctggtttta

SEQ ID NO: 17631 - DNA, 25 bp, Artificial Sequence
  Synthetic
gcttccacaaaaaaccatccattac

SEQ ID NO: 17632 - DNA, 22 bp, Artificial Sequence
  Synthetic
ccgggggcttaggtccttttct

SEQ ID NO: 17633 - DNA, 23 bp, Artificial Sequence
  Synthetic
aggattgccatctaatgcattgc

SEQ ID NO: 17634 - DNA, 22 bp, Artificial Sequence
  Synthetic
gtgttgctagggtctccattct

SEQ ID NO: 17635 - DNA, 23 bp, Artificial Sequence
  Synthetic
gttcggtgctgtatactgtcttt

SEQ ID NO: 17636 - DNA, 25 bp, Artificial Sequence
  Synthetic
ccacataatacactttgtgttctgc

SEQ ID NO: 17637 - DNA, 25 bp, Artificial Sequence
  Synthetic
gggttaccctcatatacaggattgt

SEQ ID NO: 17638 - DNA, 20 bp, Artificial Sequence
  Synthetic
aggacgtgcgggaacaaatg

SEQ ID NO: 17639 - DNA, 22 bp, Artificial Sequence
  Synthetic
gaggtagctacatcaaggggta

SEQ ID NO: 17640 - DNA, 24 bp, Artificial Sequence
  Synthetic
cccgttgtaaccagtatggcttat

SEQ ID NO: 17641 - DNA, 25 bp, Artificial Sequence
  Synthetic
gggttataccaaagttccagtcctc

SEQ ID NO: 17642 - DNA, 19 bp, Artificial Sequence
  Synthetic
tcaggaggcaccacaggcg

SEQ ID NO: 17643 - DNA, 22 bp, Artificial Sequence
  Synthetic
acgagcccccaactgtgtacta

SEQ ID NO: 17644 - DNA, 22 bp, Artificial Sequence
  Synthetic
ctgggcttgggtttggatgagt

SEQ ID NO: 17645 - DNA, 20 bp, Artificial Sequence
  Synthetic
tggcagtggggtcaaactgc

SEQ ID NO: 17646 - DNA, 20 bp, Artificial Sequence
  Synthetic
gtctttggcactccctggca

SEQ ID NO: 17647 - DNA, 20 bp, Artificial Sequence
  Synthetic
ggctgatttggggggggttt

SEQ ID NO: 17648 - DNA, 22 bp, Artificial Sequence
  Synthetic
ggcaagattacaggcggccttt

SEQ ID NO: 17649 - DNA, 21 bp, Artificial Sequence
  Synthetic
tcgccaggttccattggcttt

SEQ ID NO: 17650 - DNA, 22 bp, Artificial Sequence
  Synthetic
gcatttcgaacagggtgggact

SEQ ID NO: 17651 - DNA, 22 bp, Artificial Sequence
  Synthetic
gctggcgtaaggtaggagttcc

SEQ ID NO: 17652 - DNA, 20 bp, Artificial Sequence
  Synthetic
tggggtaggggggcatgtag

SEQ ID NO: 17653 - DNA, 22 bp, Artificial Sequence
  Synthetic
gcgaacgtggtgcaaatagacg

SEQ ID NO: 17654 - DNA, 25 bp, Artificial Sequence
  Synthetic
acacatattgaggaagtcttgggaa

SEQ ID NO: 17655 - DNA, 21 bp, Artificial Sequence
  Synthetic
gcgcttaccgggatgagagca

SEQ ID NO: 17656 - DNA, 22 bp, Artificial Sequence
  Synthetic
gggcaggattgcagggtttaga

SEQ ID NO: 17657 - DNA, 20 bp, Artificial Sequence
  Synthetic
taggggcaggtccatgattg

SEQ ID NO: 17658 - DNA, 19 bp, Artificial Sequence
  Synthetic
gcgggatcctagcgtggga

SEQ ID NO: 17659 - DNA, 20 bp, Artificial Sequence
  Synthetic
ggctggaggcgatgtggttg

SEQ ID NO: 17660 - DNA, 22 bp, Artificial Sequence
  Synthetic
agagcgggagaaagaggaggaa

SEQ ID NO: 17661 - DNA, 20 bp, Artificial Sequence
  Synthetic
tttgcctgttccatgcccgg

SEQ ID NO: 17662 - DNA, 22 bp, Artificial Sequence
  Synthetic
ggaggggagtcgagggataagg

SEQ ID NO: 17663 - DNA, 23 bp, Artificial Sequence
  Synthetic
tgtagtactaaagatggctggcc

SEQ ID NO: 17664 - DNA, 20 bp, Artificial Sequence
  Synthetic
acgtcagggcctagcctgag

SEQ ID NO: 17665 - DNA, 21 bp, Artificial Sequence
  Synthetic
ggatggcggcctcaggtaagg

SEQ ID NO: 17666 - DNA, 21 bp, Artificial Sequence
  Synthetic
gccatatggtccactgtggtt

SEQ ID NO: 17667 - DNA, 25 bp, Artificial Sequence
  Synthetic
ttgtcattggtccatttctattcca

SEQ ID NO: 17668 - DNA, 25 bp, Artificial Sequence
  Synthetic
aggagaaattttgcaatcttggagt

SEQ ID NO: 17669 - DNA, 23 bp, Artificial Sequence
  Synthetic
ctagtggatctgctgatactgct

SEQ ID NO: 17670 - DNA, 25 bp, Artificial Sequence
  Synthetic
gcacccttattttcaatgtttggag

SEQ ID NO: 17671 - DNA, 25 bp, Artificial Sequence
  Synthetic
gcacttttgcatctttctgaaaatg

SEQ ID NO: 17672 - DNA, 22 bp, Artificial Sequence
  Synthetic
gtttcactgacctcctcaggag

SEQ ID NO: 17673 - DNA, 25 bp, Artificial Sequence
  Synthetic
ccctcatttgttggaatagagtcct

SEQ ID NO: 17674 - DNA, 20 bp, Artificial Sequence
  Synthetic
tccggatgtgccttcatctg

SEQ ID NO: 17675 - DNA, 20 bp, Artificial Sequence
  Synthetic
caaagagggcctgccacttt

SEQ ID NO: 17676 - DNA, 22 bp, Artificial Sequence
  Synthetic
tccattcaagtcctccgatgag

SEQ ID NO: 17677 - DNA, 22 bp, Artificial Sequence
  Synthetic
tccatggctgtatggaggatct

SEQ ID NO: 17678 - DNA, 25 bp, Artificial Sequence
  Synthetic
acttccattgtttcaaggcatgaat

SEQ ID NO: 17679 - DNA, 25 bp, Artificial Sequence
  Synthetic
agcctctcttattcagtctttgttt

SEQ ID NO: 17680 - DNA, 23 bp, Artificial Sequence
  Synthetic
tctcacaacatttgccagtttgg

SEQ ID NO: 17681 - DNA, 25 bp, Artificial Sequence
  Synthetic
gctggtatttgtgttcgaatcttca

SEQ ID NO: 17682 - DNA, 22 bp, Artificial Sequence
  Synthetic
agcaaaatcgtcggatgattgg

SEQ ID NO: 17683 - DNA, 25 bp, Artificial Sequence
  Synthetic
ccaaggtcattgtttatcatgttgt

SEQ ID NO: 17684 - DNA, 22 bp, Artificial Sequence
  Synthetic
cgccaacagtaaggtgacgaca

SEQ ID NO: 17685 - DNA, 21 bp, Artificial Sequence
  Synthetic
gcctcgagcttgggcttctcc

SEQ ID NO: 17686 - DNA, 22 bp, Artificial Sequence
  Synthetic
agtttcggggattgtgaaccgt

SEQ ID NO: 17687 - DNA, 18 bp, Artificial Sequence
  Synthetic
agcagcgtggcggcgaaa

SEQ ID NO: 17688 - DNA, 21 bp, Artificial Sequence
  Synthetic
gcagtaccactaccgccaccc

SEQ ID NO: 17689 - DNA, 23 bp, Artificial Sequence
  Synthetic
aatgttgcgttgttggagagtat

SEQ ID NO: 17690 - DNA, 20 bp, Artificial Sequence
  Synthetic
caagaagcgaccgcagtggg

SEQ ID NO: 17691 - DNA, 20 bp, Artificial Sequence
  Synthetic
gcgtgctgcatagcttggcg

SEQ ID NO: 17692 - DNA, 22 bp, Artificial Sequence
  Synthetic
cggtgctttctgcagtgtgtgg

SEQ ID NO: 17693 - DNA, 21 bp, Artificial Sequence
  Synthetic
cgaaacgagaggctcagccgc

SEQ ID NO: 17694 - DNA, 20 bp, Artificial Sequence
  Synthetic
tccacaggtaccgcgtctgt

SEQ ID NO: 17695 - DNA, 18 bp, Artificial Sequence
  Synthetic
ccggcggctgcagttgtt

SEQ ID NO: 17696 - DNA, 22 bp, Artificial Sequence
  Synthetic
cgcctcgttttcctcttcggtg

SEQ ID NO: 17697 - DNA, 22 bp, Artificial Sequence
  Synthetic
gcgcctctctcatggatccact

SEQ ID NO: 17698 - DNA, 19 bp, Artificial Sequence
  Synthetic
tgacgtacccgccgggaac

SEQ ID NO: 17699 - DNA, 18 bp, Artificial Sequence
  Synthetic
tggagtttgcgcgcgtcg

SEQ ID NO: 17700 - DNA, 19 bp, Artificial Sequence
  Synthetic
accccgtgcaacgtcgaga

SEQ ID NO: 17701 - DNA, 21 bp, Artificial Sequence
  Synthetic
gcagctatgctcgatgaccga

SEQ ID NO: 17702 - DNA, 20 bp, Artificial Sequence
  Synthetic
gccgtcaacagcgtgccttt

SEQ ID NO: 17703 - DNA, 21 bp, Artificial Sequence
  Synthetic
gccgacttggaggactttgcc

SEQ ID NO: 17704 - DNA, 19 bp, Artificial Sequence
  Synthetic
gccgtagttgtcgcggtcc

SEQ ID NO: 17705 - DNA, 21 bp, Artificial Sequence
  Synthetic
cgactgccgcatggtttcctc

SEQ ID NO: 17706 - DNA, 21 bp, Artificial Sequence
  Synthetic
cgctcgtcagcaggtagaagg

SEQ ID NO: 17707 - DNA, 20 bp, Artificial Sequence
  Synthetic
cccttgaacatcccgcagca

SEQ ID NO: 17708 - DNA, 19 bp, Artificial Sequence
  Synthetic
gcgcggtcattctggccaa

SEQ ID NO: 17709 - DNA, 18 bp, Artificial Sequence
  Synthetic
gctcgcagtagtggcgca

SEQ ID NO: 17710 - DNA, 20 bp, Artificial Sequence
  Synthetic
agtgcgtatacggggctggg

SEQ ID NO: 17711 - DNA, 20 bp, Artificial Sequence
  Synthetic
aagcagccgcgtcttaagcg

SEQ ID NO: 17712 - DNA, 20 bp, Artificial Sequence
  Synthetic
ctacgcacctgtggccgcag

SEQ ID NO: 17713 - DNA, 19 bp, Artificial Sequence
  Synthetic
taccagcggcccatggtgc

SEQ ID NO: 17714 - DNA, 20 bp, Artificial Sequence
  Synthetic
ccgcgcacttttgccaagtc

SEQ ID NO: 17715 - DNA, 19 bp, Artificial Sequence
  Synthetic
tggcgcagttctggcacgg

SEQ ID NO: 17716 - DNA, 20 bp, Artificial Sequence
  Synthetic
agacgcgcgtactcggaaac

SEQ ID NO: 17717 - DNA, 22 bp, Artificial Sequence
  Synthetic
ccagacctccagcaacaccgtc

SEQ ID NO: 17718 - DNA, 19 bp, Artificial Sequence
  Synthetic
acggtttccacgccaccgc

SEQ ID NO: 17719 - DNA, 19 bp, Artificial Sequence
  Synthetic
ctgcgcgaagaactgggct

SEQ ID NO: 17720 - DNA, 20 bp, Artificial Sequence
  Synthetic
cgtggttggagcagcaccag

SEQ ID NO: 17721 - DNA, 19 bp, Artificial Sequence
  Synthetic
ttctggcggtgggtcccga

SEQ ID NO: 17722 - DNA, 20 bp, Artificial Sequence
  Synthetic
ggcgtccgaatggtgggtag

SEQ ID NO: 17723 - DNA, 21 bp, Artificial Sequence
  Synthetic
acgcggccattttgtgtttgg

SEQ ID NO: 17724 - DNA, 20 bp, Artificial Sequence
  Synthetic
tgtcaaccgtcgcatcacgc

SEQ ID NO: 17725 - DNA, 22 bp, Artificial Sequence
  Synthetic
cgttgtggtagaacggcaaccg

SEQ ID NO: 17726 - DNA, 21 bp, Artificial Sequence
  Synthetic
cgcagattctcggccaacagc

SEQ ID NO: 17727 - DNA, 20 bp, Artificial Sequence
  Synthetic
gcacccaggacctccggtac

SEQ ID NO: 17728 - DNA, 22 bp, Artificial Sequence
  Synthetic
ccgcagaaagtcgaagatgccc

SEQ ID NO: 17729 - DNA, 22 bp, Artificial Sequence
  Synthetic
gtgagcaccatcagcacctgat

SEQ ID NO: 17730 - DNA, 21 bp, Artificial Sequence
  Synthetic
ggctgcagcgctttcagaatt

SEQ ID NO: 17731 - DNA, 19 bp, Artificial Sequence
  Synthetic
ttcgggtagctgcaggccg

SEQ ID NO: 17732 - DNA, 21 bp, Artificial Sequence
  Synthetic
cggttgggcgcgttgatctag

SEQ ID NO: 17733 - DNA, 21 bp, Artificial Sequence
  Synthetic
cagtccgccgctcattttgtg

SEQ ID NO: 17734 - DNA, 19 bp, Artificial Sequence
  Synthetic
tgatgcgggtgcgtagggt

SEQ ID NO: 17735 - DNA, 19 bp, Artificial Sequence
  Synthetic
gaaagcgaagacggcgccc

SEQ ID NO: 17736 - DNA, 22 bp, Artificial Sequence
  Synthetic
gtcatggccaatcgtcgtctcc

SEQ ID NO: 17737 - DNA, 19 bp, Artificial Sequence
  Synthetic
ggacccgaaaacgagggcg

SEQ ID NO: 17738 - DNA, 22 bp, Artificial Sequence
  Synthetic
cgtgcaggatgacgtggattct

SEQ ID NO: 17739 - DNA, 21 bp, Artificial Sequence
  Synthetic
ggtgagagtagtggtggggct

SEQ ID NO: 17740 - DNA, 19 bp, Artificial Sequence
  Synthetic
gagaggaggagagccggca

SEQ ID NO: 17741 - DNA, 19 bp, Artificial Sequence
  Synthetic
cggcgtcggcgtttccaac

SEQ ID NO: 17742 - DNA, 20 bp, Artificial Sequence
  Synthetic
catctctaccgccgccgtgc

SEQ ID NO: 17743 - DNA, 21 bp, Artificial Sequence
  Synthetic
tgcgacgaacacgaagctctc

SEQ ID NO: 17744 - DNA, 20 bp, Artificial Sequence
  Synthetic
caccgacacagcagcaccag

SEQ ID NO: 17745 - DNA, 22 bp, Artificial Sequence
  Synthetic
gcgtccgacgatgtgctcttct

SEQ ID NO: 17746 - DNA, 22 bp, Artificial Sequence
  Synthetic
cgtcttttcggcgctcaacaag

SEQ ID NO: 17747 - DNA, 19 bp, Artificial Sequence
  Synthetic
acgcccgccagaagtacgc

SEQ ID NO: 17748 - DNA, 19 bp, Artificial Sequence
  Synthetic
tctgttggcggggctcacg

SEQ ID NO: 17749 - DNA, 20 bp, Artificial Sequence
  Synthetic
agaggctacccgaccgtagc

SEQ ID NO: 17750 - DNA, 20 bp, Artificial Sequence
  Synthetic
gacggtcgtggtctcctcgg

SEQ ID NO: 17751 - DNA, 21 bp, Artificial Sequence
  Synthetic
acagtacgacggcaacccaac

SEQ ID NO: 17752 - DNA, 21 bp, Artificial Sequence
  Synthetic
catcctgctgtcacacgacga

SEQ ID NO: 17753 - DNA, 18 bp, Artificial Sequence
  Synthetic
aagcgcgtgcccacccaa

SEQ ID NO: 17754 - DNA, 22 bp, Artificial Sequence
  Synthetic
acctggcatcgcagcctctttc

SEQ ID NO: 17755 - DNA, 19 bp, Artificial Sequence
  Synthetic
tggcttacgacgctgacgc

SEQ ID NO: 17756 - DNA, 22 bp, Artificial Sequence
  Synthetic
ggtcgaacctcataacggtggg

SEQ ID NO: 17757 - DNA, 22 bp, Artificial Sequence
  Synthetic
cttgcgcttaccgatccgctta

SEQ ID NO: 17758 - DNA, 19 bp, Artificial Sequence
  Synthetic
gctcactcaacaccgccgt

SEQ ID NO: 17759 - DNA, 22 bp, Artificial Sequence
  Synthetic
acgtgacgatcaaaagtgcccg

SEQ ID NO: 17760 - DNA, 19 bp, Artificial Sequence
  Synthetic
acgatgatggcccgcgacg

SEQ ID NO: 17761 - DNA, 22 bp, Artificial Sequence
  Synthetic
gcaaccagtgctccactacgtc

SEQ ID NO: 17762 - DNA, 19 bp, Artificial Sequence
  Synthetic
acatggacgccgcctctgc

SEQ ID NO: 17763 - DNA, 18 bp, Artificial Sequence
  Synthetic
atgcaaagacggcgcggg

SEQ ID NO: 17764 - DNA, 18 bp, Artificial Sequence
  Synthetic
tgttgtgtccgccgctgc

SEQ ID NO: 17765 - DNA, 20 bp, Artificial Sequence
  Synthetic
cccgggcactgatcctgacc

SEQ ID NO: 17766 - DNA, 20 bp, Artificial Sequence
  Synthetic
cacgctgaccggcgatcagg

SEQ ID NO: 17767 - DNA, 19 bp, Artificial Sequence
  Synthetic
ttggcccacgacgcctgac

SEQ ID NO: 17768 - DNA, 20 bp, Artificial Sequence
  Synthetic
gcgactcctggacctgcgta

SEQ ID NO: 17769 - DNA, 19 bp, Artificial Sequence
  Synthetic
agatgtggcaggcgcgtct

SEQ ID NO: 17770 - DNA, 19 bp, Artificial Sequence
  Synthetic
acaaccccacgggccgaag

SEQ ID NO: 17771 - DNA, 18 bp, Artificial Sequence
  Synthetic
tctcggtgctgggcgctt

SEQ ID NO: 17772 - DNA, 19 bp, Artificial Sequence
  Synthetic
agggactggaggtgcgcgt

SEQ ID NO: 17773 - DNA, 19 bp, Artificial Sequence
  Synthetic
cgctgtgctggcatcgagt

SEQ ID NO: 17774 - DNA, 22 bp, Artificial Sequence
  Synthetic
ccatgacctacgtgcgcaagtt

SEQ ID NO: 17775 - DNA, 20 bp, Artificial Sequence
  Synthetic
tcgctcgaccgttcgtacga

SEQ ID NO: 17776 - DNA, 22 bp, Artificial Sequence
  Synthetic
gcggtctccacgtcaggtacga

SEQ ID NO: 17777 - DNA, 18 bp, Artificial Sequence
  Synthetic
aacgcgctgcacgaccac

SEQ ID NO: 17778 - DNA, 20 bp, Artificial Sequence
  Synthetic
cggaacccgccatgcaacga

SEQ ID NO: 17779 - DNA, 22 bp, Artificial Sequence
  Synthetic
cgctcgagctcctgcctaaagt

SEQ ID NO: 17780 - DNA, 22 bp, Artificial Sequence
  Synthetic
tcccagtaacagacgacccagt

SEQ ID NO: 17781 - DNA, 22 bp, Artificial Sequence
  Synthetic
gccacgtggttttcgagaacgt

SEQ ID NO: 17782 - DNA, 19 bp, Artificial Sequence
  Synthetic
gggagcgcggtggaagaca

SEQ ID NO: 17783 - DNA, 19 bp, Artificial Sequence
  Synthetic
tctcccccgattccagcgt

SEQ ID NO: 17784 - DNA, 18 bp, Artificial Sequence
  Synthetic
cgctcatccgcgtgctct

SEQ ID NO: 17785 - DNA, 20 bp, Artificial Sequence
  Synthetic
cacggcgtgtccttgctacc

SEQ ID NO: 17786 - DNA, 19 bp, Artificial Sequence
  Synthetic
ttcacgtccgggtggctgc

SEQ ID NO: 17787 - DNA, 22 bp, Artificial Sequence
  Synthetic
ggcgctgatgatgttgacgtcg

SEQ ID NO: 17788 - DNA, 21 bp, Artificial Sequence
  Synthetic
agatgatgcaccccgaactcg

SEQ ID NO: 17789 - DNA, 19 bp, Artificial Sequence
  Synthetic
gcctaacctccgctcgcac

SEQ ID NO: 17790 - DNA, 22 bp, Artificial Sequence
  Synthetic
gcggaggaagattcgtctgagc

SEQ ID NO: 17791 - DNA, 19 bp, Artificial Sequence
  Synthetic
ggccgacgctggttctcct

SEQ ID NO: 17792 - DNA, 21 bp, Artificial Sequence
  Synthetic
ggtcgcagatgagcagcttct

SEQ ID NO: 17793 - DNA, 19 bp, Artificial Sequence
  Synthetic
ttctccaacgcgcggcagg

SEQ ID NO: 17794 - DNA, 22 bp, Artificial Sequence
  Synthetic
cgtccaggttactcggggaaca

SEQ ID NO: 17795 - DNA, 19 bp, Artificial Sequence
  Synthetic
tcgtcctccccttcgtccg

SEQ ID NO: 17796 - DNA, 22 bp, Artificial Sequence
  Synthetic
accactagcttggctacgtgga

SEQ ID NO: 17797 - DNA, 20 bp, Artificial Sequence
  Synthetic
tcgtcgcgctccagcacata

SEQ ID NO: 17798 - DNA, 21 bp, Artificial Sequence
  Synthetic
cgcgctctcttgaacacgaca

SEQ ID NO: 17799 - DNA, 21 bp, Artificial Sequence
  Synthetic
cggatctgcggctcaaacacc

SEQ ID NO: 17800 - DNA, 20 bp, Artificial Sequence
  Synthetic
gactttacggtgcgcggcga

SEQ ID NO: 17801 - DNA, 22 bp, Artificial Sequence
  Synthetic
tctgccgccaccaaaagatctg

SEQ ID NO: 17802 - DNA, 18 bp, Artificial Sequence
  Synthetic
tttccctaccgcgcgctg

SEQ ID NO: 17803 - DNA, 20 bp, Artificial Sequence
  Synthetic
tccacgatgtcggcgatgac

SEQ ID NO: 17804 - DNA, 21 bp, Artificial Sequence
  Synthetic
cccccagggcgttgtaaaagt

SEQ ID NO: 17805 - DNA, 20 bp, Artificial Sequence
  Synthetic
ggggatgtcgtgggtctcct

SEQ ID NO: 17806 - DNA, 22 bp, Artificial Sequence
  Synthetic
gcgcttgagaaaaatgtcgcgg

SEQ ID NO: 17807 - DNA, 20 bp, Artificial Sequence
  Synthetic
agccctcgagcgtgtacgtc

SEQ ID NO: 17808 - DNA, 19 bp, Artificial Sequence
  Synthetic
tgcagactcttgccctgcg

SEQ ID NO: 17809 - DNA, 21 bp, Artificial Sequence
  Synthetic
acagcctggatctcaccgtca

SEQ ID NO: 17810 - DNA, 20 bp, Artificial Sequence
  Synthetic
cgctggatgacggtgatgcg

SEQ ID NO: 17811 - DNA, 22 bp, Artificial Sequence
  Synthetic
actgctgtggtgttgccttctg

SEQ ID NO: 17812 - DNA, 22 bp, Artificial Sequence
  Synthetic
gccacgacaaacactaccgtcg

SEQ ID NO: 17813 - DNA, 19 bp, Artificial Sequence
  Synthetic
tgcatccgtccggtggtgc

SEQ ID NO: 17814 - DNA, 19 bp, Artificial Sequence
  Synthetic
ttccgtgctggcgatcgcg

SEQ ID NO: 17815 - DNA, 22 bp, Artificial Sequence
  Synthetic
tctacccaccctgcgagacatc

SEQ ID NO: 17816 - DNA, 19 bp, Artificial Sequence
  Synthetic
agtgtgccgcacaaggccg

SEQ ID NO: 17817 - DNA, 22 bp, Artificial Sequence
  Synthetic
cccctggtcttcaagcacactt

SEQ ID NO: 17818 - DNA, 20 bp, Artificial Sequence
  Synthetic
gagatgccaacagtgttgct

SEQ ID NO: 17819 - DNA, 21 bp, Artificial Sequence
  Synthetic
cgtacttttccactccaggcg

SEQ ID NO: 17820 - DNA, 22 bp, Artificial Sequence
  Synthetic
gttaggtcgctactcgctggga

SEQ ID NO: 17821 - DNA, 22 bp, Artificial Sequence
  Synthetic
gagcaagttaccatcccctgca

SEQ ID NO: 17822 - DNA, 19 bp, Artificial Sequence
  Synthetic
agggttgagggggccgttc

SEQ ID NO: 17823 - DNA, 18 bp, Artificial Sequence
  Synthetic
aacgacgacgcggttgcc

SEQ ID NO: 17824 - DNA, 19 bp, Artificial Sequence
  Synthetic
gccacaaaagccaccgcgg

SEQ ID NO: 17825 - DNA, 20 bp, Artificial Sequence
  Synthetic
tgcgcgctgctggtgtttta

SEQ ID NO: 17826 - DNA, 19 bp, Artificial Sequence
  Synthetic
acgaaggtccaagcggcgg

SEQ ID NO: 17827 - DNA, 22 bp, Artificial Sequence
  Synthetic
cgcgtgactctctgttcgatgg

SEQ ID NO: 17828 - DNA, 19 bp, Artificial Sequence
  Synthetic
cccaacggtcacacgtccg

SEQ ID NO: 17829 - DNA, 20 bp, Artificial Sequence
  Synthetic
caacgcggcacttccaacag

SEQ ID NO: 17830 - DNA, 19 bp, Artificial Sequence
  Synthetic
ttcgcacacccagcccctg

SEQ ID NO: 17831 - DNA, 19 bp, Artificial Sequence
  Synthetic
ccgacgtcccgcatccaac

SEQ ID NO: 17832 - DNA, 19 bp, Artificial Sequence
  Synthetic
gaacacgcgcaacagggcc

SEQ ID NO: 17833 - DNA, 20 bp, Artificial Sequence
  Synthetic
tatcgtcgggtcggctgtcc

SEQ ID NO: 17834 - DNA, 21 bp, Artificial Sequence
  Synthetic
cctcgtcatcctccgtgtcgg

SEQ ID NO: 17835 - DNA, 20 bp, Artificial Sequence
  Synthetic
ggcccactttcgggtggagg

SEQ ID NO: 17836 - DNA, 22 bp, Artificial Sequence
  Synthetic
ggtgccgaaatcaccgtgtgaa

SEQ ID NO: 17837 - DNA, 19 bp, Artificial Sequence
  Synthetic
atgtcgcgacacccgggtc

SEQ ID NO: 17838 - DNA, 25 bp, Artificial Sequence
  Synthetic
agaacatatataatcgccgtttcgt

SEQ ID NO: 17839 - DNA, 19 bp, Artificial Sequence
  Synthetic
agcacggggtactcgtggc

SEQ ID NO: 17840 - DNA, 22 bp, Artificial Sequence
  Synthetic
gaaggaaaccgaccccgaaact

SEQ ID NO: 17841 - DNA, 20 bp, Artificial Sequence
  Synthetic
ctcaacctgtgcgccacagc

SEQ ID NO: 17842 - DNA, 21 bp, Artificial Sequence
  Synthetic
ccctcactgggctacgagtgc

SEQ ID NO: 17843 - DNA, 20 bp, Artificial Sequence
  Synthetic
tcatctacgtgccccccggg

SEQ ID NO: 17844 - DNA, 19 bp, Artificial Sequence
  Synthetic
tcagcgaaaccggcacccg

SEQ ID NO: 17845 - DNA, 19 bp, Artificial Sequence
  Synthetic
ggctgtcatgggtctgcgc

SEQ ID NO: 17846 - DNA, 19 bp, Artificial Sequence
  Synthetic
atcgttcacgtcgccgccg

SEQ ID NO: 17847 - DNA, 18 bp, Artificial Sequence
  Synthetic
acagcagccgcgcttgtc

SEQ ID NO: 17848 - DNA, 21 bp, Artificial Sequence
  Synthetic
gcgtctacgtggtgatgctgc

SEQ ID NO: 17849 - DNA, 19 bp, Artificial Sequence
  Synthetic
aggcctggttacagcgcgg

SEQ ID NO: 17850 - DNA, 20 bp, Artificial Sequence
  Synthetic
gcaaccccgccaactggttc

SEQ ID NO: 17851 - DNA, 20 bp, Artificial Sequence
  Synthetic
tgttcgacagcggcgtagac

SEQ ID NO: 17852 - DNA, 21 bp, Artificial Sequence
  Synthetic
ggtcatgacaccgacgcgttg

SEQ ID NO: 17853 - DNA, 19 bp, Artificial Sequence
  Synthetic
gtcgctcggcattccgcac

SEQ ID NO: 17854 - DNA, 18 bp, Artificial Sequence
  Synthetic
agttgtgccgccggagct

SEQ ID NO: 17855 - DNA, 20 bp, Artificial Sequence
  Synthetic
aaccagatggcgacggacgt

SEQ ID NO: 17856 - DNA, 20 bp, Artificial Sequence
  Synthetic
tgctaaccacgcaaccggat

SEQ ID NO: 17857 - DNA, 18 bp, Artificial Sequence
  Synthetic
atcccggcaagttgcgcg

SEQ ID NO: 17858 - DNA, 20 bp, Artificial Sequence
  Synthetic
cgcctgctctctccaggtcc

SEQ ID NO: 17859 - DNA, 20 bp, Artificial Sequence
  Synthetic
gccttccagactgcacggcc

SEQ ID NO: 17860 - DNA, 20 bp, Artificial Sequence
  Synthetic
cagaaaacacccccccgccc

SEQ ID NO: 17861 - DNA, 25 bp, Artificial Sequence
  Synthetic
tcttccccatattccttcattgtct

SEQ ID NO: 17862 - DNA, 25 bp, Artificial Sequence
  Synthetic
tgtagtcgtatagatccggaagaaa

SEQ ID NO: 17863 - DNA, 20 bp, Artificial Sequence
  Synthetic
ttcgcctctctcggactgac

SEQ ID NO: 17864 - DNA, 23 bp, Artificial Sequence
  Synthetic
tcctcaaagtccaatttttccgg

SEQ ID NO: 17865 - DNA, 20 bp, Artificial Sequence
  Synthetic
caatgtgctcaattggggca

SEQ ID NO: 17866 - DNA, 24 bp, Artificial Sequence
  Synthetic
ccatactcacaaagttcaccacgt

SEQ ID NO: 17867 - DNA, 24 bp, Artificial Sequence
  Synthetic
tctctttgatagaagactcagcct

SEQ ID NO: 17868 - DNA, 22 bp, Artificial Sequence
  Synthetic
cagatgccctgatctcagtagc

SEQ ID NO: 17869 - DNA, 24 bp, Artificial Sequence
  Synthetic
cctctttgtcatacaggatcagct

SEQ ID NO: 17870 - DNA, 24 bp, Artificial Sequence
  Synthetic
ccattttcgcctctccagaaattc

SEQ ID NO: 17871 - DNA, 22 bp, Artificial Sequence
  Synthetic
ttgaagcaatttgaacccctct

SEQ ID NO: 17872 - DNA, 23 bp, Artificial Sequence
  Synthetic
gcatttcagttttcgcgcctaaa

SEQ ID NO: 17873 - DNA, 23 bp, Artificial Sequence
  Synthetic
tccaatatgtcgtcagcttcctg

SEQ ID NO: 17874 - DNA, 22 bp, Artificial Sequence
  Synthetic
ccgaatcgctacagggaaagcc

SEQ ID NO: 17875 - DNA, 20 bp, Artificial Sequence
  Synthetic
acatctacgcctcccagtca

SEQ ID NO: 17876 - DNA, 20 bp, Artificial Sequence
  Synthetic
tactgcaagagctggcgaac

SEQ ID NO: 17877 - DNA, 22 bp, Artificial Sequence
  Synthetic
gcgccagcgagtaaatgcaaac

SEQ ID NO: 17878 - DNA, 25 bp, Artificial Sequence
  Synthetic
gcgcatgaagtaatggttactgttt

SEQ ID NO: 17879 - DNA, 23 bp, Artificial Sequence
  Synthetic
aggcattttctgaagctgcatta

SEQ ID NO: 17880 - DNA, 25 bp, Artificial Sequence
  Synthetic
accccatttaaacacactctagaaa

SEQ ID NO: 17881 - DNA, 22 bp, Artificial Sequence
  Synthetic
ggcgagggtccaatagttgcat

SEQ ID NO: 17882 - DNA, 25 bp, Artificial Sequence
  Synthetic
aggctcatctttacaaaatactgga

SEQ ID NO: 17883 - DNA, 25 bp, Artificial Sequence
  Synthetic
tggttctccacaatatgaatccaag

SEQ ID NO: 17884 - DNA, 22 bp, Artificial Sequence
  Synthetic
tgggaagtctcagttgttgcgt

SEQ ID NO: 17885 - DNA, 22 bp, Artificial Sequence
  Synthetic
cgcaacgaggaagtttgctgga

SEQ ID NO: 17886 - DNA, 23 bp, Artificial Sequence
  Synthetic
ttaaatgccttcagtgtcctcac

SEQ ID NO: 17887 - DNA, 23 bp, Artificial Sequence
  Synthetic
tggtcagaattcctgtacgagga

SEQ ID NO: 17888 - DNA, 21 bp, Artificial Sequence
  Synthetic
gtgtactcacccaaccagttg

SEQ ID NO: 17889 - DNA, 22 bp, Artificial Sequence
  Synthetic
ccaccattttccccacctggaa

SEQ ID NO: 17890 - DNA, 20 bp, Artificial Sequence
  Synthetic
atgcatcggccctcacacac

SEQ ID NO: 17891 - DNA, 21 bp, Artificial Sequence
  Synthetic
ggttcttaccgtgcagatgca

SEQ ID NO: 17892 - DNA, 20 bp, Artificial Sequence
  Synthetic
ggacgtccctggacccttta

SEQ ID NO: 17893 - DNA, 25 bp, Artificial Sequence
  Synthetic
actttctactgcttaaccccagaaa

SEQ ID NO: 17894 - DNA, 22 bp, Artificial Sequence
  Synthetic
acactgcgcacgcttttacaaa

SEQ ID NO: 17895 - DNA, 20 bp, Artificial Sequence
  Synthetic
ctggacatgcaggtcgaggg

SEQ ID NO: 17896 - DNA, 20 bp, Artificial Sequence
  Synthetic
ttcctccgggagctcgtccg

SEQ ID NO: 17897 - DNA, 22 bp, Artificial Sequence
  Synthetic
cactattgaacgtgcgggacat

SEQ ID NO: 17898 - DNA, 22 bp, Artificial Sequence
  Synthetic
cgtcgcggcgaaatgattgaaa

SEQ ID NO: 17899 - DNA, 20 bp, Artificial Sequence
  Synthetic
ttgctcagcttcctggtact

SEQ ID NO: 17900 - DNA, 22 bp, Artificial Sequence
  Synthetic
accgctttgtagatgtggatga

SEQ ID NO: 17901 - DNA, 20 bp, Artificial Sequence
  Synthetic
gctgccggcatcacatggat

SEQ ID NO: 17902 - DNA, 21 bp, Artificial Sequence
  Synthetic
ggatcctgccggtttcgaacc

SEQ ID NO: 17903 - DNA, 22 bp, Artificial Sequence
  Synthetic
gcgaaacatgttctgacgaggc

SEQ ID NO: 17904 - DNA, 24 bp, Artificial Sequence
  Synthetic
agcttctacaaagtcccaaagatg

SEQ ID NO: 17905 - DNA, 19 bp, Artificial Sequence
  Synthetic
cgcttggctgccaccgtag

SEQ ID NO: 17906 - DNA, 24 bp, Artificial Sequence
  Synthetic
gctttgctatccaacaaagcattt

SEQ ID NO: 17907 - DNA, 25 bp, Artificial Sequence
  Synthetic
aaaagtaatcgggtccagactgata

SEQ ID NO: 17908 - DNA, 25 bp, Artificial Sequence
  Synthetic
gcatttgtaaagtattccccgttca

SEQ ID NO: 17909 - DNA, 20 bp, Artificial Sequence
  Synthetic
ttttgcgtcgctgccaacgt

SEQ ID NO: 17910 - DNA, 25 bp, Artificial Sequence
  Synthetic
ggcatgttggtatgtaagatggttt

SEQ ID NO: 17911 - DNA, 21 bp, Artificial Sequence
  Synthetic
ctaattgggtttcggggtccc

SEQ ID NO: 17912 - DNA, 22 bp, Artificial Sequence
  Synthetic
agttgtaactgcgtcctttggg

SEQ ID NO: 17913 - DNA, 22 bp, Artificial Sequence
  Synthetic
cgcactggatgttggctagacc

SEQ ID NO: 17914 - DNA, 20 bp, Artificial Sequence
  Synthetic
gctgcccgcatcatagctcg

SEQ ID NO: 17915 - DNA, 20 bp, Artificial Sequence
  Synthetic
aactcgacgccgtctgctga

SEQ ID NO: 17916 - DNA, 22 bp, Artificial Sequence
  Synthetic
cctctaacttttgccgcttagg

SEQ ID NO: 17917 - DNA, 22 bp, Artificial Sequence
  Synthetic
tgatggacctcgtctacggcta

SEQ ID NO: 17918 - DNA, 20 bp, Artificial Sequence
  Synthetic
aacggatccgggcacagttt

SEQ ID NO: 17919 - DNA, 21 bp, Artificial Sequence
  Synthetic
gccatcttgaaagcgctggtg

SEQ ID NO: 17920 - DNA, 22 bp, Artificial Sequence
  Synthetic
ccacgatccagtacccctcgaa

SEQ ID NO: 17921 - DNA, 22 bp, Artificial Sequence
  Synthetic
tgtttgctgcattgttagctga

SEQ ID NO: 17922 - DNA, 20 bp, Artificial Sequence
  Synthetic
actgcggaattccacaagga

SEQ ID NO: 17923 - DNA, 25 bp, Artificial Sequence
  Synthetic
ggtagttttatgtttcctggagtgt

SEQ ID NO: 17924 - DNA, 24 bp, Artificial Sequence
  Synthetic
agtgtgctctgaagaatcatgttt

SEQ ID NO: 17925 - DNA, 23 bp, Artificial Sequence
  Synthetic
aggtgccgtctaaatagggaatg

SEQ ID NO: 17926 - DNA, 25 bp, Artificial Sequence
  Synthetic
agttgttatgttgaaactctacggt

SEQ ID NO: 17927 - DNA, 22 bp, Artificial Sequence
  Synthetic
gggtccacagcctagatctcga

SEQ ID NO: 17928 - DNA, 22 bp, Artificial Sequence
  Synthetic
gaacatacaacaaaacaggccg

SEQ ID NO: 17929 - DNA, 22 bp, Artificial Sequence
  Synthetic
gctccccccctaggcttgttat

SEQ ID NO: 17930 - DNA, 21 bp, Artificial Sequence
  Synthetic
cttttatgctggccgactacc

SEQ ID NO: 17931 - DNA, 22 bp, Artificial Sequence
  Synthetic
ctgcgtgtgggagcataagtgt

SEQ ID NO: 17932 - DNA, 20 bp, Artificial Sequence
  Synthetic
gttgttgttcgcaatccggc

SEQ ID NO: 17933 - DNA, 20 bp, Artificial Sequence
  Synthetic
tcctcggggggagtctcgta

SEQ ID NO: 17934 - DNA, 25 bp, Artificial Sequence
  Synthetic
gacaggataggggtattttgtgatt

SEQ ID NO: 17935 - DNA, 21 bp, Artificial Sequence
  Synthetic
gcctccgggtcttgcaagttt

SEQ ID NO: 17936 - DNA, 20 bp, Artificial Sequence
  Synthetic
aagcattgctgccaaacacc

SEQ ID NO: 17937 - DNA, 20 bp, Artificial Sequence
  Synthetic
attgctgtcagactgcggtc

SEQ ID NO: 17938 - DNA, 20 bp, Artificial Sequence
  Synthetic
ttgcggctttcggggacatg

SEQ ID NO: 17939 - DNA, 20 bp, Artificial Sequence
  Synthetic
catgagcagtagccccgacg

SEQ ID NO: 17940 - DNA, 20 bp, Artificial Sequence
  Synthetic
tcgtgttcttgacctcgact

SEQ ID NO: 17941 - DNA, 22 bp, Artificial Sequence
  Synthetic
gagagcggcttgttctagcagt

SEQ ID NO: 17942 - DNA, 22 bp, Artificial Sequence
  Synthetic
cgggaacaggacaaatgcaata

SEQ ID NO: 17943 - DNA, 20 bp, Artificial Sequence
  Synthetic
aaatgcttgcgtacagggtg

SEQ ID NO: 17944 - DNA, 25 bp, Artificial Sequence
  Synthetic
agccagaaggtaaagaaaagagaaa

SEQ ID NO: 17945 - DNA, 24 bp, Artificial Sequence
  Synthetic
ccgtagtaccatcgactgacatta

SEQ ID NO: 17946 - DNA, 24 bp, Artificial Sequence
  Synthetic
gaaccgtcaccatactgtaagaaa

SEQ ID NO: 17947 - DNA, 25 bp, Artificial Sequence
  Synthetic
ttggatattcgggaagatcatcagt

SEQ ID NO: 17948 - DNA, 25 bp, Artificial Sequence
  Synthetic
tgttctttgcctggtaaagattcat

SEQ ID NO: 17949 - DNA, 24 bp, Artificial Sequence
  Synthetic
gtttgcaagtctgtcaggtttgac

SEQ ID NO: 17950 - DNA, 23 bp, Artificial Sequence
  Synthetic
aaggggctccaaaacattgatat

SEQ ID NO: 17951 - DNA, 22 bp, Artificial Sequence
  Synthetic
gggtaagagcgttgttgcgaac

SEQ ID NO: 17952 - DNA, 25 bp, Artificial Sequence
  Synthetic
gctcgcatcaaagggataattaaca

SEQ ID NO: 17953 - DNA, 25 bp, Artificial Sequence
  Synthetic
ggttgatgtgattaatcttccctgt

SEQ ID NO: 17954 - DNA, 24 bp, Artificial Sequence
  Synthetic
gcaatttgtgttttgtgtgtgttt

SEQ ID NO: 17955 - DNA, 25 bp, Artificial Sequence
  Synthetic
gatggacactgactgttgttacttt

SEQ ID NO: 17956 - DNA, 20 bp, Artificial Sequence
  Synthetic
gatgcttttgggacgctggt

SEQ ID NO: 17957 - DNA, 22 bp, Artificial Sequence
  Synthetic
aaagctacgttgagtacttcgg

SEQ ID NO: 17958 - DNA, 20 bp, Artificial Sequence
  Synthetic
tgccacctgcgagatttacg

SEQ ID NO: 17959 - DNA, 25 bp, Artificial Sequence
  Synthetic
tgctggcttctgatttgtatgattt

SEQ ID NO: 17960 - DNA, 20 bp, Artificial Sequence
  Synthetic
aagcatgtttcagaggtcgc

SEQ ID NO: 17961 - DNA, 21 bp, Artificial Sequence
  Synthetic
gcctaaacaagagggcgactc

SEQ ID NO: 17962 - DNA, 22 bp, Artificial Sequence
  Synthetic
cttctcgtaggcactttgcgga

SEQ ID NO: 17963 - DNA, 22 bp, Artificial Sequence
  Synthetic
agggagacatcaaggctgggtt

SEQ ID NO: 17964 - DNA, 22 bp, Artificial Sequence
  Synthetic
ccactgccaccaacaaacatcc

SEQ ID NO: 17965 - DNA, 20 bp, Artificial Sequence
  Synthetic
gtgcggtagctttaatggcc

SEQ ID NO: 17966 - DNA, 25 bp, Artificial Sequence
  Synthetic
tctttgttcttctgaagaaatggga

SEQ ID NO: 17967 - DNA, 21 bp, Artificial Sequence
  Synthetic
gtgtgaaattcgcccataggg

SEQ ID NO: 17968 - DNA, 20 bp, Artificial Sequence
  Synthetic
gcaggtattgggtggctctg

SEQ ID NO: 17969 - DNA, 24 bp, Artificial Sequence
  Synthetic
cctatggttccatgtacacacaac

SEQ ID NO: 17970 - DNA, 23 bp, Artificial Sequence
  Synthetic
acttgtcaccaatccattccaag

SEQ ID NO: 17971 - DNA, 24 bp, Artificial Sequence
  Synthetic
ggtctcttccatctggattttgac

SEQ ID NO: 17972 - DNA, 21 bp, Artificial Sequence
  Synthetic
ccccggagttgaatcatctcc

SEQ ID NO: 17973 - DNA, 25 bp, Artificial Sequence
  Synthetic
tccacatcattttcatctgtgacaa

SEQ ID NO: 17974 - DNA, 22 bp, Artificial Sequence
  Synthetic
ggttctttttcaccggggaata

SEQ ID NO: 17975 - DNA, 23 bp, Artificial Sequence
  Synthetic
aaacacccttctgaagttagctg

SEQ ID NO: 17976 - DNA, 20 bp, Artificial Sequence
  Synthetic
gaggccagaaacggctatct

SEQ ID NO: 17977 - DNA, 20 bp, Artificial Sequence
  Synthetic
gtcgtccaaggttgcaggtc

SEQ ID NO: 17978 - DNA, 25 bp, Artificial Sequence
  Synthetic
ctcctcctctgtaatctcatactca

SEQ ID NO: 17979 - DNA, 25 bp, Artificial Sequence
  Synthetic
ttctgcttcatggacaatataccaa

SEQ ID NO: 17980 - DNA, 24 bp, Artificial Sequence
  Synthetic
ggagttattttcacagcctgcaac

SEQ ID NO: 17981 - DNA, 25 bp, Artificial Sequence
  Synthetic
aactctctgttaacatagcatgctt

SEQ ID NO: 17982 - DNA, 24 bp, Artificial Sequence
  Synthetic
tcagaattgcttcttgaagtgcat

SEQ ID NO: 17983 - DNA, 25 bp, Artificial Sequence
  Synthetic
acagtccagttctgctaaatctttg

SEQ ID NO: 17984 - DNA, 22 bp, Artificial Sequence
  Synthetic
gggccctgattttccttctcgt

SEQ ID NO: 17985 - DNA, 25 bp, Artificial Sequence
  Synthetic
actcatgaataagaagttgcagcaa

SEQ ID NO: 17986 - DNA, 22 bp, Artificial Sequence
  Synthetic
tcagcaaacgatcagcaagagt

SEQ ID NO: 17987 - DNA, 25 bp, Artificial Sequence
  Synthetic
gatgttgttgggtctattgcatcta

SEQ ID NO: 17988 - DNA, 22 bp, Artificial Sequence
  Synthetic
gccaatgctatccgttttgtgg

SEQ ID NO: 17989 - DNA, 25 bp, Artificial Sequence
  Synthetic
agtaggtatttgctgaacccttcta

SEQ ID NO: 17990 - DNA, 25 bp, Artificial Sequence
  Synthetic
acttctagtttttattgtgcctcgg

SEQ ID NO: 17991 - DNA, 25 bp, Artificial Sequence
  Synthetic
gtctggcaaattgaatctaaacact

SEQ ID NO: 17992 - DNA, 25 bp, Artificial Sequence
  Synthetic
tccaaagaaaaacaagctatctcca

SEQ ID NO: 17993 - DNA, 21 bp, Artificial Sequence
  Synthetic
cctcaattccagagggaggtg

SEQ ID NO: 17994 - DNA, 23 bp, Artificial Sequence
  Synthetic
ccaaatgactcagagagactgga

SEQ ID NO: 17995 - DNA, 19 bp, Artificial Sequence
  Synthetic
gttggcagctgacgccggt

SEQ ID NO: 17996 - DNA, 20 bp, Artificial Sequence
  Synthetic
ttgcacagccagttgacgtt

SEQ ID NO: 17997 - DNA, 23 bp, Artificial Sequence
  Synthetic
tccatccgttataaaaaagcccg

SEQ ID NO: 17998 - DNA, 22 bp, Artificial Sequence
  Synthetic
gcacatacattgctccgtccct

SEQ ID NO: 17999 - DNA, 20 bp, Artificial Sequence
  Synthetic
tggaggtggccctgtatagg

SEQ ID NO: 18000 - DNA, 25 bp, Artificial Sequence
  Synthetic
gcttaaaaaatccttcccccattct

SEQ ID NO: 18001 - DNA, 25 bp, Artificial Sequence
  Synthetic
gcattgagagaagtaacagtagtct

SEQ ID NO: 18002 - DNA, 25 bp, Artificial Sequence
  Synthetic
gcagctgtaaaatcaactccttcat

SEQ ID NO: 18003 - DNA, 25 bp, Artificial Sequence
  Synthetic
ttaaacatgtcgcaaaccatttgat

SEQ ID NO: 18004 - DNA, 20 bp, Artificial Sequence
  Synthetic
tatggtcgttgcagacgtgg

SEQ ID NO: 18005 - DNA, 25 bp, Artificial Sequence
  Synthetic
gttgttgcatatccagcataatcaa

SEQ ID NO: 18006 - DNA, 24 bp, Artificial Sequence
  Synthetic
agctgtctactaattgctcatagc

SEQ ID NO: 18007 - DNA, 25 bp, Artificial Sequence
  Synthetic
gcactatagcttctaccataaacca

SEQ ID NO: 18008 - DNA, 20 bp, Artificial Sequence
  Synthetic
ctttccactgcctcggctat

SEQ ID NO: 18009 - DNA, 21 bp, Artificial Sequence
  Synthetic
tgctcccgtacactgtttgtg

SEQ ID NO: 18010 - DNA, 25 bp, Artificial Sequence
  Synthetic
actctcctcgcatatgtcattatca

SEQ ID NO: 18011 - DNA, 22 bp, Artificial Sequence
  Synthetic
cttcctcgtcctcagaatcctg

SEQ ID NO: 18012 - DNA, 25 bp, Artificial Sequence
  Synthetic
cggttccatactatactcagtcctt

SEQ ID NO: 18013 - DNA, 20 bp, Artificial Sequence
  Synthetic
gtttccactgtccacgggtc

SEQ ID NO: 18014 - DNA, 25 bp, Artificial Sequence
  Synthetic
tggtagggggtatttttacaacatc

SEQ ID NO: 18015 - DNA, 25 bp, Artificial Sequence
  Synthetic
ggttgttaatagcagccacaatagt

SEQ ID NO: 18016 - DNA, 21 bp, Artificial Sequence
  Synthetic
ctatataggcccacacgaggc

SEQ ID NO: 18017 - DNA, 25 bp, Artificial Sequence
  Synthetic
ggaaaagttatatcagggccagatt

SEQ ID NO: 18018 - DNA, 25 bp, Artificial Sequence
  Synthetic
gcatgataaaatatgttggtgcgag

SEQ ID NO: 18019 - DNA, 25 bp, Artificial Sequence
  Synthetic
ggaacatctgatttattggtctgca

SEQ ID NO: 18020 - DNA, 20 bp, Artificial Sequence
  Synthetic
gtccctgggctttttgtagc

SEQ ID NO: 18021 - DNA, 20 bp, Artificial Sequence
  Synthetic
taaggcaataccgcaccctg

SEQ ID NO: 18022 - DNA, 22 bp, Artificial Sequence
  Synthetic
tcaccggttccgaagaccacta

SEQ ID NO: 18023 - DNA, 22 bp, Artificial Sequence
  Synthetic
ctgcgcggcaacaagtaaactc

SEQ ID NO: 18024 - DNA, 20 bp, Artificial Sequence
  Synthetic
ctgacaccatgtgccagggc

SEQ ID NO: 18025 - DNA, 21 bp, Artificial Sequence
  Synthetic
cggtaggagtaagggccaccc

SEQ ID NO: 18026 - DNA, 22 bp, Artificial Sequence
  Synthetic
cccagtggcctccagagagtaa

SEQ ID NO: 18027 - DNA, 21 bp, Artificial Sequence
  Synthetic
gccttggccgtagctgtcaag

SEQ ID NO: 18028 - DNA, 22 bp, Artificial Sequence
  Synthetic
cggtactgttcatccacacgca

SEQ ID NO: 18029 - DNA, 22 bp, Artificial Sequence
  Synthetic
caggggtgatagctctacccga

SEQ ID NO: 18030 - DNA, 22 bp, Artificial Sequence
  Synthetic
caggagaaaacagggccacagc

SEQ ID NO: 18031 - DNA, 20 bp, Artificial Sequence
  Synthetic
aatcactgagtcgcgaggcc

SEQ ID NO: 18032 - DNA, 22 bp, Artificial Sequence
  Synthetic
cccttatgatgtctccgcacgc

SEQ ID NO: 18033 - DNA, 20 bp, Artificial Sequence
  Synthetic
accgcagtacccaggaagga

SEQ ID NO: 18034 - DNA, 20 bp, Artificial Sequence
  Synthetic
acgaagtctaccgccttggc

SEQ ID NO: 18035 - DNA, 21 bp, Artificial Sequence
  Synthetic
cgtggtgatggtcctgactcc

SEQ ID NO: 18036 - DNA, 22 bp, Artificial Sequence
  Synthetic
ccccccttgatcagctccagag

SEQ ID NO: 18037 - DNA, 20 bp, Artificial Sequence
  Synthetic
cctaccagtgcggcctctcc

SEQ ID NO: 18038 - DNA, 20 bp, Artificial Sequence
  Synthetic
tggagcgagccagaccttgg

SEQ ID NO: 18039 - DNA, 22 bp, Artificial Sequence
  Synthetic
ggtagagcacttcgcgatcagg

SEQ ID NO: 18040 - DNA, 22 bp, Artificial Sequence
  Synthetic
agggtttgttgggtggtcagag

SEQ ID NO: 18041 - DNA, 17 bp, Artificial Sequence
  Synthetic
tggcggcgcaaaatcgc

SEQ ID NO: 18042 - DNA, 21 bp, Artificial Sequence
  Synthetic
ggggatgcctggcattaaggg

SEQ ID NO: 18043 - DNA, 21 bp, Artificial Sequence
  Synthetic
gatgccgtccacttccgtgaa

SEQ ID NO: 18044 - DNA, 20 bp, Artificial Sequence
  Synthetic
acgtggcctgaagaagacgg

SEQ ID NO: 18045 - DNA, 19 bp, Artificial Sequence
  Synthetic
acagggggctgctttgccg

SEQ ID NO: 18046 - DNA, 22 bp, Artificial Sequence
  Synthetic
gccccagtccacgagtatgaca

SEQ ID NO: 18047 - DNA, 20 bp, Artificial Sequence
  Synthetic
ttgcgggaatggctccgaac

SEQ ID NO: 18048 - DNA, 22 bp, Artificial Sequence
  Synthetic
ggagtcaaagcagcgggtatca

SEQ ID NO: 18049 - DNA, 19 bp, Artificial Sequence
  Synthetic
ctacgccgtcgctctcagc

SEQ ID NO: 18050 - DNA, 20 bp, Artificial Sequence
  Synthetic
atcgagtttggcagcggcag

SEQ ID NO: 18051 - DNA, 25 bp, Artificial Sequence
  Synthetic
tgctgtgaccataagacaatatgaa

SEQ ID NO: 18052 - DNA, 22 bp, Artificial Sequence
  Synthetic
gcctcaacattgggtgaattca

SEQ ID NO: 18053 - DNA, 24 bp, Artificial Sequence
  Synthetic
cttgagtgcatctggtaatttcca

SEQ ID NO: 18054 - DNA, 24 bp, Artificial Sequence
  Synthetic
accaataaacaggtttgtcccaaa

SEQ ID NO: 18055 - DNA, 24 bp, Artificial Sequence
  Synthetic
cctgatgtccatggtattgtcatt

SEQ ID NO: 18056 - DNA, 21 bp, Artificial Sequence
  Synthetic
acctaagccttcagtgagtgc

SEQ ID NO: 18057 - DNA, 20 bp, Artificial Sequence
  Synthetic
tgccatgtgtaatcgcccac

SEQ ID NO: 18058 - DNA, 20 bp, Artificial Sequence
  Synthetic
gtagggtagtgctctgggtg

SEQ ID NO: 18059 - DNA, 25 bp, Artificial Sequence
  Synthetic
tggaatagtaaacacctgatgtacg

SEQ ID NO: 18060 - DNA, 25 bp, Artificial Sequence
  Synthetic
tgtcgtatgtcagcaaaacaaacat

SEQ ID NO: 18061 - DNA, 24 bp, Artificial Sequence
  Synthetic
ggagatccatcacatccaagtagt

SEQ ID NO: 18062 - DNA, 23 bp, Artificial Sequence
  Synthetic
cgtcccacaatggatgttgttaa

SEQ ID NO: 18063 - DNA, 25 bp, Artificial Sequence
  Synthetic
tgtgttagaatttgtggaggctaga

SEQ ID NO: 18064 - DNA, 25 bp, Artificial Sequence
  Synthetic
gggggtgctactcaaattaataagt

SEQ ID NO: 18065 - DNA, 25 bp, Artificial Sequence
  Synthetic
ccttgtcacctggaaaaacatcata

SEQ ID NO: 18066 - DNA, 25 bp, Artificial Sequence
  Synthetic
ggttgcctagtttcattctcatgtt

SEQ ID NO: 18067 - DNA, 20 bp, Artificial Sequence
  Synthetic
tctgggggtgtgatggttag

SEQ ID NO: 18068 - DNA, 20 bp, Artificial Sequence
  Synthetic
aacagcccatgggtccagct

SEQ ID NO: 18069 - DNA, 20 bp, Artificial Sequence
  Synthetic
actgagccctcctgcgacaa

SEQ ID NO: 18070 - DNA, 20 bp, Artificial Sequence
  Synthetic
gcaggcagcagtggatgtgt

SEQ ID NO: 18071 - DNA, 21 bp, Artificial Sequence
  Synthetic
cgatgagagcggaatgtcccg

SEQ ID NO: 18072 - DNA, 22 bp, Artificial Sequence
  Synthetic
accaggataccccgtggattgt

SEQ ID NO: 18073 - DNA, 24 bp, Artificial Sequence
  Synthetic
ggcgtaagataattcctgcagaaa

SEQ ID NO: 18074 - DNA, 24 bp, Artificial Sequence
  Synthetic
actctggctgtacaagaattacac

SEQ ID NO: 18075 - DNA, 23 bp, Artificial Sequence
  Synthetic
gctattccactgtcctcaaacag

SEQ ID NO: 18076 - DNA, 25 bp, Artificial Sequence
  Synthetic
tgtttgttttacaacccaatctggt

SEQ ID NO: 18077 - DNA, 25 bp, Artificial Sequence
  Synthetic
acaatctagtaatggctgaatccaa

SEQ ID NO: 18078 - DNA, 20 bp, Artificial Sequence
  Synthetic
ggtggggctgcttgatctcc

SEQ ID NO: 18079 - DNA, 21 bp, Artificial Sequence
  Synthetic
cctgatcgtggaacagatcga

SEQ ID NO: 18080 - DNA, 23 bp, Artificial Sequence
  Synthetic
catggaggtacccttaggaagtg

SEQ ID NO: 18081 - DNA, 22 bp, Artificial Sequence
  Synthetic
tccctccctaggtgtttgagca

SEQ ID NO: 18082 - DNA, 25 bp, Artificial Sequence
  Synthetic
tcatctatttcaaactgcgccatag

SEQ ID NO: 18083 - DNA, 22 bp, Artificial Sequence
  Synthetic
ctgtctagaggagttgtcagct

SEQ ID NO: 18084 - DNA, 25 bp, Artificial Sequence
  Synthetic
gggtcgaaagatacattttgcctat

SEQ ID NO: 18085 - DNA, 24 bp, Artificial Sequence
  Synthetic
tctgtataaaatccggccatttgc

SEQ ID NO: 18086 - DNA, 25 bp, Artificial Sequence
  Synthetic
cctcactagtaactagagaaccact

SEQ ID NO: 18087 - DNA, 25 bp, Artificial Sequence
  Synthetic
acctaaaggtgtctgatccaaatca

SEQ ID NO: 18088 - DNA, 25 bp, Artificial Sequence
  Synthetic
cgaagttaaagtgatagaacaccga

SEQ ID NO: 18089 - DNA, 22 bp, Artificial Sequence
  Synthetic
tgctggtgagagagaaaaggcc

SEQ ID NO: 18090 - DNA, 22 bp, Artificial Sequence
  Synthetic
gcgggtaggggcagtataccaa

SEQ ID NO: 18091 - DNA, 20 bp, Artificial Sequence
  Synthetic
acaggacctcaggcgggagg

SEQ ID NO: 18092 - DNA, 20 bp, Artificial Sequence
  Synthetic
agggcgtaggtgatggctcc

SEQ ID NO: 18093 - DNA, 20 bp, Artificial Sequence
  Synthetic
agcgacctcagaggcgttcc

SEQ ID NO: 18094 - DNA, 21 bp, Artificial Sequence
  Synthetic
aaaaccaacacccgtgggtca

SEQ ID NO: 18095 - DNA, 19 bp, Artificial Sequence
  Synthetic
tgccagggacgacgtagga

SEQ ID NO: 18096 - DNA, 21 bp, Artificial Sequence
  Synthetic
cagaggcggcataggtgagac

SEQ ID NO: 18097 - DNA, 22 bp, Artificial Sequence
  Synthetic
ccttagagccatccgggtaggt

SEQ ID NO: 18098 - DNA, 22 bp, Artificial Sequence
  Synthetic
gcagcctcaagcatctttgggt

SEQ ID NO: 18099 - DNA, 22 bp, Artificial Sequence
  Synthetic
gccagatttgctgtccgtgcaa

SEQ ID NO: 18100 - DNA, 18 bp, Artificial Sequence
  Synthetic
aatgacaacccggcgccc

SEQ ID NO: 18101 - DNA, 22 bp, Artificial Sequence
  Synthetic
ggaggacccgactagtggtctg

SEQ ID NO: 18102 - DNA, 20 bp, Artificial Sequence
  Synthetic
gagatgcccacctcgcgaag

SEQ ID NO: 18103 - DNA, 20 bp, Artificial Sequence
  Synthetic
aggtcgagctcaaggacggc

SEQ ID NO: 18104 - DNA, 22 bp, Artificial Sequence
  Synthetic
ccagggccccaattcttctcag

SEQ ID NO: 18105 - DNA, 19 bp, Artificial Sequence
  Synthetic
tgggcctggtcacgccaag

SEQ ID NO: 18106 - DNA, 21 bp, Artificial Sequence
  Synthetic
gggagacccgcgtgttggtat

SEQ ID NO: 18107 - DNA, 20 bp, Artificial Sequence
  Synthetic
agactgggccggtcgaagag

SEQ ID NO: 18108 - DNA, 22 bp, Artificial Sequence
  Synthetic
gcacccaggctagtggtgtaag

SEQ ID NO: 18109 - DNA, 20 bp, Artificial Sequence
  Synthetic
attggctgcatatcgacgac

SEQ ID NO: 18110 - DNA, 21 bp, Artificial Sequence
  Synthetic
ccaccaacgattcaggaacat

SEQ ID NO: 18111 - DNA, 23 bp, Artificial Sequence
  Synthetic
gcatgccagatttaccggttatg

SEQ ID NO: 18112 - DNA, 25 bp, Artificial Sequence
  Synthetic
aaactctttcatatgccgttcctat

SEQ ID NO: 18113 - DNA, 21 bp, Artificial Sequence
  Synthetic
acaacatccaacgccgtttta

SEQ ID NO: 18114 - DNA, 24 bp, Artificial Sequence
  Synthetic
aatcgagtcttttcgttcccataa

SEQ ID NO: 18115 - DNA, 22 bp, Artificial Sequence
  Synthetic
tgattaaacaatgggccgttga

SEQ ID NO: 18116 - DNA, 25 bp, Artificial Sequence
  Synthetic
ggaaagaccgtttgttttatagtgg

SEQ ID NO: 18117 - DNA, 22 bp, Artificial Sequence
  Synthetic
tgagtggattattcgacgggac

SEQ ID NO: 18118 - DNA, 24 bp, Artificial Sequence
  Synthetic
cctctatggttgacagcacatttc

SEQ ID NO: 18119 - DNA, 22 bp, Artificial Sequence
  Synthetic
acctcatcgaaatgcgtatagc

SEQ ID NO: 18120 - DNA, 20 bp, Artificial Sequence
  Synthetic
ttttcggtttaggcagccgg

SEQ ID NO: 18121 - DNA, 19 bp, Artificial Sequence
  Synthetic
tgtggccgcccggttttgg

SEQ ID NO: 18122 - DNA, 20 bp, Artificial Sequence
  Synthetic
cagtacgtgctgccgggttt

SEQ ID NO: 18123 - DNA, 20 bp, Artificial Sequence
  Synthetic
ccatccaacagggtgcggtt

SEQ ID NO: 18124 - DNA, 22 bp, Artificial Sequence
  Synthetic
aggaaacatgatgcccggggta

SEQ ID NO: 18125 - DNA, 25 bp, Artificial Sequence
  Synthetic
ccctgcttgcccatactatatgttt

SEQ ID NO: 18126 - DNA, 20 bp, Artificial Sequence
  Synthetic
gtgtcctgtgtcagctgctg

SEQ ID NO: 18127 - DNA, 20 bp, Artificial Sequence
  Synthetic
atctggcctggtgcaatagg

SEQ ID NO: 18128 - DNA, 22 bp, Artificial Sequence
  Synthetic
gttcgcattttggaccaacaag

SEQ ID NO: 18129 - DNA, 25 bp, Artificial Sequence
  Synthetic
tggaatattgctggtgatcctttcc

SEQ ID NO: 18130 - DNA, 24 bp, Artificial Sequence
  Synthetic
tctgtatgtcattgacagtccagc

SEQ ID NO: 18131 - DNA, 24 bp, Artificial Sequence
  Synthetic
tggttattttttgcactgcctctg

SEQ ID NO: 18132 - DNA, 25 bp, Artificial Sequence
  Synthetic
ccattgctctccaattactgtgata

SEQ ID NO: 18133 - DNA, 23 bp, Artificial Sequence
  Synthetic
actggccatcttcctgctaattt

SEQ ID NO: 18134 - DNA, 25 bp, Artificial Sequence
  Synthetic
gtgggatgtgtacttctgaacttat

SEQ ID NO: 18135 - DNA, 25 bp, Artificial Sequence
  Synthetic
gccaagtattgtagagatcctacct

SEQ ID NO: 18136 - DNA, 25 bp, Artificial Sequence
  Synthetic
gcagaattcttattatggcttccac

SEQ ID NO: 18137 - DNA, 21 bp, Artificial Sequence
  Synthetic
tgcttccttccacacaggtac

SEQ ID NO: 18138 - DNA, 25 bp, Artificial Sequence
  Synthetic
agttgatactactggcctaattcca

SEQ ID NO: 18139 - DNA, 25 bp, Artificial Sequence
  Synthetic
tctcttgttaatagcagccctgtaa

SEQ ID NO: 18140 - DNA, 22 bp, Artificial Sequence
  Synthetic
cgcctcaatagccctcagcaaa

SEQ ID NO: 18141 - DNA, 21 bp, Artificial Sequence
  Synthetic
gctcccaccctatctgctgct

SEQ ID NO: 18142 - DNA, 22 bp, Artificial Sequence
  Synthetic
agcaagctcgatgtcagcagtt

SEQ ID NO: 18143 - DNA, 22 bp, Artificial Sequence
  Synthetic
cgtcagagattcccacctcggt

SEQ ID NO: 18144 - DNA, 20 bp, Artificial Sequence
  Synthetic
ccaggggctcagtctggaca

SEQ ID NO: 18145 - DNA, 20 bp, Artificial Sequence
  Synthetic
cccccttcagcacctacgtg

SEQ ID NO: 18146 - DNA, 19 bp, Artificial Sequence
  Synthetic
tcttcgccgggctggacga

SEQ ID NO: 18147 - DNA, 19 bp, Artificial Sequence
  Synthetic
ttcgaggctgtgctgcgcg

SEQ ID NO: 18148 - DNA, 21 bp, Artificial Sequence
  Synthetic
cgcgtacatggccaagctcca

SEQ ID NO: 18149 - DNA, 19 bp, Artificial Sequence
  Synthetic
aggtcctggactgcgtggt

SEQ ID NO: 18150 - DNA, 19 bp, Artificial Sequence
  Synthetic
agctcgtgctcccagaggc

SEQ ID NO: 18151 - DNA, 20 bp, Artificial Sequence
  Synthetic
gctccggggacagttctcca

SEQ ID NO: 18152 - DNA, 21 bp, Artificial Sequence
  Synthetic
gggcaggactagctcgtcgtc

SEQ ID NO: 18153 - DNA, 20 bp, Artificial Sequence
  Synthetic
cgatacacggcaacccccgg

SEQ ID NO: 18154 - DNA, 21 bp, Artificial Sequence
  Synthetic
ctggtgttcgaactgggccac

SEQ ID NO: 18155 - DNA, 21 bp, Artificial Sequence
  Synthetic
tggagcttgtggccctacacc

SEQ ID NO: 18156 - DNA, 22 bp, Artificial Sequence
  Synthetic
gcaagggggagctgctgatcta

SEQ ID NO: 18157 - DNA, 20 bp, Artificial Sequence
  Synthetic
tgaccacatggggccggtac

SEQ ID NO: 18158 - DNA, 20 bp, Artificial Sequence
  Synthetic
gctgctgccgacacaacgtc

SEQ ID NO: 18159 - DNA, 19 bp, Artificial Sequence
  Synthetic
tcgggctggcggtcgatct

SEQ ID NO: 18160 - DNA, 20 bp, Artificial Sequence
  Synthetic
ccacgacatccgcggcttta

SEQ ID NO: 18161 - DNA, 20 bp, Artificial Sequence
  Synthetic
caaggcggcccacttggaat

SEQ ID NO: 18162 - DNA, 22 bp, Artificial Sequence
  Synthetic
acgaagtgaaccaactgccgaa

SEQ ID NO: 18163 - DNA, 18 bp, Artificial Sequence
  Synthetic
acgatcgtgctgcgcgag

SEQ ID NO: 18164 - DNA, 21 bp, Artificial Sequence
  Synthetic
gctgacgcgtgcttttgttcc

SEQ ID NO: 18165 - DNA, 21 bp, Artificial Sequence
  Synthetic
agagctacgcgtacctctgcc

SEQ ID NO: 18166 - DNA, 19 bp, Artificial Sequence
  Synthetic
ccaccaacgtgccctaccc

SEQ ID NO: 18167 - DNA, 19 bp, Artificial Sequence
  Synthetic
ttgtgcgggaggggcttgg

SEQ ID NO: 18168 - DNA, 21 bp, Artificial Sequence
  Synthetic
ccccgcgggatcggatacaag

SEQ ID NO: 18169 - DNA, 19 bp, Artificial Sequence
  Synthetic
tggcacaacagacccgcgg

SEQ ID NO: 18170 - DNA, 19 bp, Artificial Sequence
  Synthetic
ggtccatgttcgagggcgg

SEQ ID NO: 18171 - DNA, 21 bp, Artificial Sequence
  Synthetic
tcgaaggcggaatagtggcgc

SEQ ID NO: 18172 - DNA, 19 bp, Artificial Sequence
  Synthetic
tgcaggcggttgtcgaggc

SEQ ID NO: 18173 - DNA, 22 bp, Artificial Sequence
  Synthetic
cgtcagcaccttcatcgacctg

SEQ ID NO: 18174 - DNA, 21 bp, Artificial Sequence
  Synthetic
gccgcacctcaaggaggaact

SEQ ID NO: 18175 - DNA, 19 bp, Artificial Sequence
  Synthetic
tccagcgcaaccagctccc

SEQ ID NO: 18176 - DNA, 18 bp, Artificial Sequence
  Synthetic
agaagttctgccggcggc

SEQ ID NO: 18177 - DNA, 19 bp, Artificial Sequence
  Synthetic
aggttccgaacgccgtcgg

SEQ ID NO: 18178 - DNA, 19 bp, Artificial Sequence
  Synthetic
tctgcgccaagtgcctggg

SEQ ID NO: 18179 - DNA, 18 bp, Artificial Sequence
  Synthetic
acgccggtgttctgcacg

SEQ ID NO: 18180 - DNA, 21 bp, Artificial Sequence
  Synthetic
gctgatccacatgctggccat

SEQ ID NO: 18181 - DNA, 18 bp, Artificial Sequence
  Synthetic
acgtgagggctcgcagga

SEQ ID NO: 18182 - DNA, 22 bp, Artificial Sequence
  Synthetic
tccctcagatgatagggcgtgt

SEQ ID NO: 18183 - DNA, 21 bp, Artificial Sequence
  Synthetic
ggagtcgaggaccttcagggc

SEQ ID NO: 18184 - DNA, 22 bp, Artificial Sequence
  Synthetic
cctgcatgccaatgcccatgga

SEQ ID NO: 18185 - DNA, 21 bp, Artificial Sequence
  Synthetic
cggcgggatccatggcgatat

SEQ ID NO: 18186 - DNA, 21 bp, Artificial Sequence
  Synthetic
ccacgaacacgagctcggtct

SEQ ID NO: 18187 - DNA, 19 bp, Artificial Sequence
  Synthetic
tcatccacgacgccccgga

SEQ ID NO: 18188 - DNA, 19 bp, Artificial Sequence
  Synthetic
accgaggaggcgtgggtga

SEQ ID NO: 18189 - DNA, 20 bp, Artificial Sequence
  Synthetic
acggatcggcgggcaaaaac

SEQ ID NO: 18190 - DNA, 21 bp, Artificial Sequence
  Synthetic
gcgaatagctacggccgcttg

SEQ ID NO: 18191 - DNA, 19 bp, Artificial Sequence
  Synthetic
cccgtcggtcgcatacagc

SEQ ID NO: 18192 - DNA, 19 bp, Artificial Sequence
  Synthetic
tgcacaacgtacggggcgg

SEQ ID NO: 18193 - DNA, 21 bp, Artificial Sequence
  Synthetic
tgacatagtccccgcccaggc

SEQ ID NO: 18194 - DNA, 19 bp, Artificial Sequence
  Synthetic
gttggtcccgacgctcagc

SEQ ID NO: 18195 - DNA, 19 bp, Artificial Sequence
  Synthetic
tggtgaagggcgacgaacg

SEQ ID NO: 18196 - DNA, 19 bp, Artificial Sequence
  Synthetic
agctgcaccagggtctggc

SEQ ID NO: 18197 - DNA, 22 bp, Artificial Sequence
  Synthetic
cgtggcattcagacagtacggg

SEQ ID NO: 18198 - DNA, 21 bp, Artificial Sequence
  Synthetic
accacacgacatgcaggcttc

SEQ ID NO: 18199 - DNA, 18 bp, Artificial Sequence
  Synthetic
aagtcgacacaccgcgcg

SEQ ID NO: 18200 - DNA, 21 bp, Artificial Sequence
  Synthetic
cccgtgcatgaagacctggat

SEQ ID NO: 18201 - DNA, 20 bp, Artificial Sequence
  Synthetic
gcatcatcccgcccgcatcc

SEQ ID NO: 18202 - DNA, 19 bp, Artificial Sequence
  Synthetic
acgcgtggtaggtcgctgg

SEQ ID NO: 18203 - DNA, 22 bp, Artificial Sequence
  Synthetic
tgggatcggccatcttaagcga

SEQ ID NO: 18204 - DNA, 20 bp, Artificial Sequence
  Synthetic
ggcatgtaggagcacgctgc

SEQ ID NO: 18205 - DNA, 21 bp, Artificial Sequence
  Synthetic
ccaaaacaaaccggctggcgt

SEQ ID NO: 18206 - DNA, 22 bp, Artificial Sequence
  Synthetic
cgtgctggccccttgatacgat

SEQ ID NO: 18207 - DNA, 22 bp, Artificial Sequence
  Synthetic
ccagccttgcaagcactctagt

SEQ ID NO: 18208 - DNA, 25 bp, Artificial Sequence
  Synthetic
acagcaatacaatacagcaaacagt

SEQ ID NO: 18209 - DNA, 22 bp, Artificial Sequence
  Synthetic
ccgtatcccagtgttgcttgct

SEQ ID NO: 18210 - DNA, 25 bp, Artificial Sequence
  Synthetic
acctccatagcacttatctcactat

SEQ ID NO: 18211 - DNA, 25 bp, Artificial Sequence
  Synthetic
gcactggtttacaattatttctggc

SEQ ID NO: 18212 - DNA, 23 bp, Artificial Sequence
  Synthetic
gacaccgcttattcacatactgt

SEQ ID NO: 18213 - DNA, 25 bp, Artificial Sequence
  Synthetic
ggtgataaccaaaaatgtgacccat

SEQ ID NO: 18214 - DNA, 25 bp, Artificial Sequence
  Synthetic
cccatttccacaatacaacttctgt

SEQ ID NO: 18215 - DNA, 20 bp, Artificial Sequence
  Synthetic
ggggttctctccctcgtgga

SEQ ID NO: 18216 - DNA, 25 bp, Artificial Sequence
  Synthetic
tgcctagcaagcattgtttaatgat

SEQ ID NO: 18217 - DNA, 21 bp, Artificial Sequence
  Synthetic
cactggatatggacgggcgtc

SEQ ID NO: 18218 - DNA, 20 bp, Artificial Sequence
  Synthetic
gtcaattgtgtccccccggg

SEQ ID NO: 18219 - DNA, 21 bp, Artificial Sequence
  Synthetic
gccagtagtgcgcctctggta

SEQ ID NO: 18220 - DNA, 20 bp, Artificial Sequence
  Synthetic
gcgtagggtctcctctcaca

SEQ ID NO: 18221 - DNA, 21 bp, Artificial Sequence
  Synthetic
gcagcatggaggaaagtactg

SEQ ID NO: 18222 - DNA, 25 bp, Artificial Sequence
  Synthetic
agggattttcagcatcatcaaactt

SEQ ID NO: 18223 - DNA, 24 bp, Artificial Sequence
  Synthetic
actcatgtctgcatcctcaatgta

SEQ ID NO: 18224 - DNA, 25 bp, Artificial Sequence
  Synthetic
ggtgtgccttaaaaactcaaaaaac

SEQ ID NO: 18225 - DNA, 25 bp, Artificial Sequence
  Synthetic
acctcccaaaacttaagatctttgt

SEQ ID NO: 18226 - DNA, 22 bp, Artificial Sequence
  Synthetic
ggggctattggcaagacagacc

SEQ ID NO: 18227 - DNA, 22 bp, Artificial Sequence
  Synthetic
tctccttcacaatcggatgaca

SEQ ID NO: 18228 - DNA, 23 bp, Artificial Sequence
  Synthetic
ggtgatatgtgaacagcatgcag

SEQ ID NO: 18229 - DNA, 25 bp, Artificial Sequence
  Synthetic
aggagctctctcatacagattcatt

SEQ ID NO: 18230 - DNA, 24 bp, Artificial Sequence
  Synthetic
gatcagcaagtgtttcaccttcta

SEQ ID NO: 18231 - DNA, 20 bp, Artificial Sequence
  Synthetic
ttgaactgcgcgggaaactt

SEQ ID NO: 18232 - DNA, 25 bp, Artificial Sequence
  Synthetic
gctcaggaattgctgataaatccat

SEQ ID NO: 18233 - DNA, 25 bp, Artificial Sequence
  Synthetic
ggtttccttcacatattcatccgta

SEQ ID NO: 18234 - DNA, 21 bp, Artificial Sequence
  Synthetic
aggaccacccctatccatttg

SEQ ID NO: 18235 - DNA, 25 bp, Artificial Sequence
  Synthetic
tttctgtaaaaatcagcaagctgtt

SEQ ID NO: 18236 - DNA, 23 bp, Artificial Sequence
  Synthetic
ccgttgcgcactaaatagaagtg

SEQ ID NO: 18237 - DNA, 22 bp, Artificial Sequence
  Synthetic
gaagagtacgaacagcagtagc

SEQ ID NO: 18238 - DNA, 24 bp, Artificial Sequence
  Synthetic
gagagatacatgaaccgtctgtac

SEQ ID NO: 18239 - DNA, 24 bp, Artificial Sequence
  Synthetic
atagcgactacctgagaagtactt

SEQ ID NO: 18240 - DNA, 23 bp, Artificial Sequence
  Synthetic
tgctgaagctgttcgatgatcta

SEQ ID NO: 18241 - DNA, 25 bp, Artificial Sequence
  Synthetic
tgcccaagtatcattggttatttca

SEQ ID NO: 18242 - DNA, 20 bp, Artificial Sequence
  Synthetic
atgtggacggggtgttgctg

SEQ ID NO: 18243 - DNA, 21 bp, Artificial Sequence
  Synthetic
cccgttcgctgagttgatcga

SEQ ID NO: 18244 - DNA, 23 bp, Artificial Sequence
  Synthetic
agcgcgctttgatctatacattt

SEQ ID NO: 18245 - DNA, 25 bp, Artificial Sequence
  Synthetic
tggtacagtctccggtaaaggtata

SEQ ID NO: 18246 - DNA, 25 bp, Artificial Sequence
  Synthetic
tccgctgcatctgtatatatttcat

SEQ ID NO: 18247 - DNA, 25 bp, Artificial Sequence
  Synthetic
tgatcctattcaagggttgtaactc

SEQ ID NO: 18248 - DNA, 24 bp, Artificial Sequence
  Synthetic
ctctctaagatcccgctcaaactc

SEQ ID NO: 18249 - DNA, 25 bp, Artificial Sequence
  Synthetic
cctccccctaatccatctactatag

SEQ ID NO: 18250 - DNA, 21 bp, Artificial Sequence
  Synthetic
gatgacccgatgttcccaatc

SEQ ID NO: 18251 - DNA, 24 bp, Artificial Sequence
  Synthetic
agccaatatcacacatatccccat

SEQ ID NO: 18252 - DNA, 25 bp, Artificial Sequence
  Synthetic
tcacagttgaacattcacagtacat

SEQ ID NO: 18253 - DNA, 25 bp, Artificial Sequence
  Synthetic
tctgaacttgcacttacctttacaa

SEQ ID NO: 18254 - DNA, 25 bp, Artificial Sequence
  Synthetic
cgtagtgtagtttgatacagttcct

SEQ ID NO: 18255 - DNA, 24 bp, Artificial Sequence
  Synthetic
gtactgctctgacaccttggatat

SEQ ID NO: 18256 - DNA, 25 bp, Artificial Sequence
  Synthetic
acctttttgtcactaggaaggtcta

SEQ ID NO: 18257 - DNA, 23 bp, Artificial Sequence
  Synthetic
gctaacgaagtgtccatgtgttc

SEQ ID NO: 18258 - DNA, 25 bp, Artificial Sequence
  Synthetic
aggaaatcctcaaaatgaattccct

SEQ ID NO: 18259 - DNA, 25 bp, Artificial Sequence
  Synthetic
gacaaaacctcgttgcttaaaaggt

SEQ ID NO: 18260 - DNA, 22 bp, Artificial Sequence
  Synthetic
gactcaactcagcaacagtctg

SEQ ID NO: 18261 - DNA, 25 bp, Artificial Sequence
  Synthetic
gcagaaatatgatttcccagtgtca

SEQ ID NO: 18262 - DNA, 25 bp, Artificial Sequence
  Synthetic
ggatcttaaatcagtttctcccctt

SEQ ID NO: 18263 - DNA, 21 bp, Artificial Sequence
  Synthetic
tgctccggaggttcgttctcc

SEQ ID NO: 18264 - DNA, 25 bp, Artificial Sequence
  Synthetic
cgatctgctaatgtattgccttcta

SEQ ID NO: 18265 - DNA, 20 bp, Artificial Sequence
  Synthetic
tgcttctgcatgcacacttg

SEQ ID NO: 18266 - DNA, 25 bp, Artificial Sequence
  Synthetic
ggcgggattttcaaattcaaattga

SEQ ID NO: 18267 - DNA, 25 bp, Artificial Sequence
  Synthetic
aggctctataggttcaattgcacta

SEQ ID NO: 18268 - DNA, 20 bp, Artificial Sequence
  Synthetic
tttgccacaggtttagccgg

SEQ ID NO: 18269 - DNA, 25 bp, Artificial Sequence
  Synthetic
cgttcaggattgaaaattgactgat

SEQ ID NO: 18270 - DNA, 20 bp, Artificial Sequence
  Synthetic
taggtggacagtctcctgca

SEQ ID NO: 18271 - DNA, 20 bp, Artificial Sequence
  Synthetic
aatggcgagcatacgactgc

SEQ ID NO: 18272 - DNA, 25 bp, Artificial Sequence
  Synthetic
gacatcttgttgccaaagatgttat

SEQ ID NO: 18273 - DNA, 25 bp, Artificial Sequence
  Synthetic
ggctatgttccaaacaacttacctt

SEQ ID NO: 18274 - DNA, 23 bp, Artificial Sequence
  Synthetic
cccttatcaacaaaactgcttgc

SEQ ID NO: 18275 - DNA, 25 bp, Artificial Sequence
  Synthetic
gcaacaaaaaaaagccttacacctc

SEQ ID NO: 18276 - DNA, 24 bp, Artificial Sequence
  Synthetic
tccacaggttcatcgtctagtaaa

SEQ ID NO: 18277 - DNA, 22 bp, Artificial Sequence
  Synthetic
attcattatggcggttcccatg

SEQ ID NO: 18278 - DNA, 22 bp, Artificial Sequence
  Synthetic
gatggtgtttcggaactgatcg

SEQ ID NO: 18279 - DNA, 23 bp, Artificial Sequence
  Synthetic
ttgctgttccaccaattggttta

SEQ ID NO: 18280 - DNA, 20 bp, Artificial Sequence
  Synthetic
gtgcttgtactaggacccgc

SEQ ID NO: 18281 - DNA, 25 bp, Artificial Sequence
  Synthetic
cctgtgacttttggtacttctactt

SEQ ID NO: 18282 - DNA, 25 bp, Artificial Sequence
  Synthetic
ggccatatctaatctgttgtcttct

SEQ ID NO: 18283 - DNA, 25 bp, Artificial Sequence
  Synthetic
accgtcttcctaaataagactgact

SEQ ID NO: 18284 - DNA, 21 bp, Artificial Sequence
  Synthetic
aattgttgggtgcggtaagga

SEQ ID NO: 18285 - DNA, 25 bp, Artificial Sequence
  Synthetic
tgcatgtgtctaaatcttcttgtct

SEQ ID NO: 18286 - DNA, 21 bp, Artificial Sequence
  Synthetic
tggtgctatgtttcttggagc

SEQ ID NO: 18287 - DNA, 25 bp, Artificial Sequence
  Synthetic
ccgcttttaatgcatctgaaacatt

SEQ ID NO: 18288 - DNA, 20 bp, Artificial Sequence
  Synthetic
gcaggctaggacacggtcac

SEQ ID NO: 18289 - DNA, 20 bp, Artificial Sequence
  Synthetic
gtgaattcagtgctggtgcc

SEQ ID NO: 18290 - DNA, 25 bp, Artificial Sequence
  Synthetic
gccaaatactcccatgtccttaaga

SEQ ID NO: 18291 - DNA, 20 bp, Artificial Sequence
  Synthetic
tgttgtagatggcgtcgctg

SEQ ID NO: 18292 - DNA, 25 bp, Artificial Sequence
  Synthetic
ccagtaaattctgtgcacattggtg

SEQ ID NO: 18293 - DNA, 25 bp, Artificial Sequence
  Synthetic
accaatgtagagttttgtgccaaat

SEQ ID NO: 18294 - DNA, 25 bp, Artificial Sequence
  Synthetic
ggattgtaagccaatatcccataca

SEQ ID NO: 18295 - DNA, 25 bp, Artificial Sequence
  Synthetic
tgcgttcttgtttttgatttctgtc

SEQ ID NO: 18296 - DNA, 23 bp, Artificial Sequence
  Synthetic
ctttgccatgtgtaatcatccca

SEQ ID NO: 18297 - DNA, 20 bp, Artificial Sequence
  Synthetic
tgcttccacatgtttggctc

SEQ ID NO: 18298 - DNA, 23 bp, Artificial Sequence
  Synthetic
ggagtagtaaacaccggatgtgc

SEQ ID NO: 18299 - DNA, 22 bp, Artificial Sequence
  Synthetic
gcaaaacagacataaccgcctc

SEQ ID NO: 18300 - DNA, 25 bp, Artificial Sequence
  Synthetic
cgagtcatgtatggatgctatttgt

SEQ ID NO: 18301 - DNA, 25 bp, Artificial Sequence
  Synthetic
tggatgtagttagtgatttgccaga

SEQ ID NO: 18302 - DNA, 20 bp, Artificial Sequence
  Synthetic
agtggggggacttagagtgt

SEQ ID NO: 18303 - DNA, 24 bp, Artificial Sequence
  Synthetic
gtgttggtaagacacagatacgat

SEQ ID NO: 18304 - DNA, 25 bp, Artificial Sequence
  Synthetic
gccatggttattggtcctacatcta

SEQ ID NO: 18305 - DNA, 23 bp, Artificial Sequence
  Synthetic
cttggttttggtgggtgtgttta

SEQ ID NO: 18306 - DNA, 24 bp, Artificial Sequence
  Synthetic
cctccccatactctttcattgttt

SEQ ID NO: 18307 - DNA, 22 bp, Artificial Sequence
  Synthetic
attcggaagtctaagtggtcgt

SEQ ID NO: 18308 - DNA, 23 bp, Artificial Sequence
  Synthetic
ctcatgcttgcaatgtgttcaat

SEQ ID NO: 18309 - DNA, 23 bp, Artificial Sequence
  Synthetic
gtcagtgagagaaaactccatgc

SEQ ID NO: 18310 - DNA, 22 bp, Artificial Sequence
  Synthetic
tttgacagaggactcagcttca

SEQ ID NO: 18311 - DNA, 25 bp, Artificial Sequence
  Synthetic
ggattcttctcctgtcttcctgatg

SEQ ID NO: 18312 - DNA, 25 bp, Artificial Sequence
  Synthetic
catgttttagcctttcgaccttttc

SEQ ID NO: 18313 - DNA, 23 bp, Artificial Sequence
  Synthetic
ccaccattaaaggggcaattttg

SEQ ID NO: 18314 - DNA, 21 bp, Artificial Sequence
  Synthetic
ggcacatctccaaaagcgaag

SEQ ID NO: 18315 - DNA, 23 bp, Artificial Sequence
  Synthetic
cccgaccattgtgaattcctcat

SEQ ID NO: 18316 - DNA, 21 bp, Artificial Sequence
  Synthetic
aggacctttgcatccttttgg

SEQ ID NO: 18317 - DNA, 22 bp, Artificial Sequence
  Synthetic
cagcttttctgttccctgtgtt

SEQ ID NO: 18318 - DNA, 20 bp, Artificial Sequence
  Synthetic
catcctactctgcttcggcg

SEQ ID NO: 18319 - DNA, 25 bp, Artificial Sequence
  Synthetic
gctaccaaatcaaatttctcttgca

SEQ ID NO: 18320 - DNA, 25 bp, Artificial Sequence
  Synthetic
cgagactgtagaatcacaatcactt

SEQ ID NO: 18321 - DNA, 22 bp, Artificial Sequence
  Synthetic
gttcagcttcatcttcgcctaa

SEQ ID NO: 18322 - DNA, 22 bp, Artificial Sequence
  Synthetic
gctcagcgacagagttggtggt

SEQ ID NO: 18323 - DNA, 25 bp, Artificial Sequence
  Synthetic
gaagtcgttcaagtctcgatagacc

SEQ ID NO: 18324 - DNA, 20 bp, Artificial Sequence
  Synthetic
tgacctccaccacccttacc

SEQ ID NO: 18325 - DNA, 25 bp, Artificial Sequence
  Synthetic
acaccagttacttcagaaacaagat

SEQ ID NO: 18326 - DNA, 24 bp, Artificial Sequence
  Synthetic
gcgccttatattagcaggatgtat

SEQ ID NO: 18327 - DNA, 25 bp, Artificial Sequence
  Synthetic
cgtcattcaaaacgtcaaagtaagg

SEQ ID NO: 18328 - DNA, 25 bp, Artificial Sequence
  Synthetic
gggcataaacattaggattttccgt

SEQ ID NO: 18329 - DNA, 22 bp, Artificial Sequence
  Synthetic
ggaggctgcacgacactcatac

SEQ ID NO: 18330 - DNA, 19 bp, Artificial Sequence
  Synthetic
accaacgatctggccgccg

SEQ ID NO: 18331 - DNA, 20 bp, Artificial Sequence
  Synthetic
gctctcacgcaaggcacaca

SEQ ID NO: 18332 - DNA, 22 bp, Artificial Sequence
  Synthetic
ttcgggcactctcagaatgctc

SEQ ID NO: 18333 - DNA, 20 bp, Artificial Sequence
  Synthetic
gttccaagggcttgcatgcg

SEQ ID NO: 18334 - DNA, 21 bp, Artificial Sequence
  Synthetic
agagttcatccacgtgcaccc

SEQ ID NO: 18335 - DNA, 21 bp, Artificial Sequence
  Synthetic
gggcatggtggtaaagctgca

SEQ ID NO: 18336 - DNA, 19 bp, Artificial Sequence
  Synthetic
acaccaaccggcggtaccc

SEQ ID NO: 18337 - DNA, 19 bp, Artificial Sequence
  Synthetic
acgcagcggtgtctgcacc

SEQ ID NO: 18338 - DNA, 22 bp, Artificial Sequence
  Synthetic
agccagcaccgtgataaacagt

SEQ ID NO: 18339 - DNA, 18 bp, Artificial Sequence
  Synthetic
ttggccacgcccctcgta

SEQ ID NO: 18340 - DNA, 22 bp, Artificial Sequence
  Synthetic
ggagtggcactcgtcacagatg

SEQ ID NO: 18341 - DNA, 20 bp, Artificial Sequence
  Synthetic
cgcctgaggtggggatcaca

SEQ ID NO: 18342 - DNA, 20 bp, Artificial Sequence
  Synthetic
agcttcacagagcacgacgc

SEQ ID NO: 18343 - DNA, 22 bp, Artificial Sequence
  Synthetic
taggaggggggtaggacctgtg

SEQ ID NO: 18344 - DNA, 22 bp, Artificial Sequence
  Synthetic
cagcccaaggaccttttgcttg

SEQ ID NO: 18345 - DNA, 19 bp, Artificial Sequence
  Synthetic
aagctgtggacgcggaggg

SEQ ID NO: 18346 - DNA, 21 bp, Artificial Sequence
  Synthetic
gtttgatgcgtccgtctcggg

SEQ ID NO: 18347 - DNA, 22 bp, Artificial Sequence
  Synthetic
tccggggtcctgtgatcttcat

SEQ ID NO: 18348 - DNA, 22 bp, Artificial Sequence
  Synthetic
gcccacagagaagctcacctca

SEQ ID NO: 18349 - DNA, 22 bp, Artificial Sequence
  Synthetic
ggtggtctatggcactctgctg

SEQ ID NO: 18350 - DNA, 20 bp, Artificial Sequence
  Synthetic
gccggctattgaccctccga

SEQ ID NO: 18351 - DNA, 22 bp, Artificial Sequence
  Synthetic
acccgcacggataagtctggat

SEQ ID NO: 18352 - DNA, 20 bp, Artificial Sequence
  Synthetic
tggcacggcatctgcgatag

SEQ ID NO: 18353 - DNA, 22 bp, Artificial Sequence
  Synthetic
tggtacagtcacgggtgaggta

SEQ ID NO: 18354 - DNA, 20 bp, Artificial Sequence
  Synthetic
cgctcccaccctgttgagtt

SEQ ID NO: 18355 - DNA, 25 bp, Artificial Sequence
  Synthetic
gcaatgtaggcttcaatgttctcat

SEQ ID NO: 18356 - DNA, 25 bp, Artificial Sequence
  Synthetic
gtcaattcaacaactgcatggtagg

SEQ ID NO: 18357 - DNA, 25 bp, Artificial Sequence
  Synthetic
cgatgtgcttttccattatccattt

SEQ ID NO: 18358 - DNA, 20 bp, Artificial Sequence
  Synthetic
ggagtgatgcttctgcgatg

SEQ ID NO: 18359 - DNA, 24 bp, Artificial Sequence
  Synthetic
ctaaccatagcagagaccaaactg

SEQ ID NO: 18360 - DNA, 25 bp, Artificial Sequence
  Synthetic
tggttttttgggtcttttcactctt

SEQ ID NO: 18361 - DNA, 24 bp, Artificial Sequence
  Synthetic
gccaaatcttgtaagcatacagga

SEQ ID NO: 18362 - DNA, 21 bp, Artificial Sequence
  Synthetic
acacctgttccacaagtgtga

SEQ ID NO: 18363 - DNA, 25 bp, Artificial Sequence
  Synthetic
tcttctaggattccactgtcatcaa

SEQ ID NO: 18364 - DNA, 25 bp, Artificial Sequence
  Synthetic
ccaaacacatatgaagcatttccaa

SEQ ID NO: 18365 - DNA, 25 bp, Artificial Sequence
  Synthetic
gaaggttctgttggcacatctatat

SEQ ID NO: 18366 - DNA, 25 bp, Artificial Sequence
  Synthetic
cattgtattcagaaactaccagtgc

SEQ ID NO: 18367 - DNA, 25 bp, Artificial Sequence
  Synthetic
gcacagtccattctccagttttact

SEQ ID NO: 18368 - DNA, 24 bp, Artificial Sequence
  Synthetic
gcatttgcccctcctctaattata

SEQ ID NO: 18369 - DNA, 23 bp, Artificial Sequence
  Synthetic
tgccatctggaattactctgcta

SEQ ID NO: 18370 - DNA, 25 bp, Artificial Sequence
  Synthetic
cgtatcctattcaaaccttgactga

SEQ ID NO: 18371 - DNA, 25 bp, Artificial Sequence
  Synthetic
agcctcagtaaatgctgtattctgt

SEQ ID NO: 18372 - DNA, 25 bp, Artificial Sequence
  Synthetic
gaccaacaccttagattgatctaca

SEQ ID NO: 18373 - DNA, 25 bp, Artificial Sequence
  Synthetic
ccttgttctcgctttccataaaaga

SEQ ID NO: 18374 - DNA, 25 bp, Artificial Sequence
  Synthetic
cctgtagtggaattttacaaagctg

SEQ ID NO: 18375 - DNA, 23 bp, Artificial Sequence
  Synthetic
actcaagctgaagtgtgcaaatt

SEQ ID NO: 18376 - DNA, 25 bp, Artificial Sequence
  Synthetic
acgttatctccctcttaagtttcct

SEQ ID NO: 18377 - DNA, 25 bp, Artificial Sequence
  Synthetic
cgcatttgaaaaaaagacgatcaag

SEQ ID NO: 18378 - DNA, 25 bp, Artificial Sequence
  Synthetic
tcatctgatatagcatcccctgttt

SEQ ID NO: 18379 - DNA, 23 bp, Artificial Sequence
  Synthetic
ctgctgagtttccacttcagtat

SEQ ID NO: 18380 - DNA, 25 bp, Artificial Sequence
  Synthetic
tgtgttagtattttgtcctgacaca

SEQ ID NO: 18381 - DNA, 25 bp, Artificial Sequence
  Synthetic
gcacttccactgtatatccatgttt

SEQ ID NO: 18382 - DNA, 25 bp, Artificial Sequence
  Synthetic
aggtgtggtatcagttgaagtagta

SEQ ID NO: 18383 - DNA, 25 bp, Artificial Sequence
  Synthetic
gcttacaaccttagatactgggaca

SEQ ID NO: 18384 - DNA, 20 bp, Artificial Sequence
  Synthetic
ctacacaggcccaaaccagc

SEQ ID NO: 18385 - DNA, 24 bp, Artificial Sequence
  Synthetic
tcaccatcctgaataactgtgttt

SEQ ID NO: 18386 - DNA, 25 bp, Artificial Sequence
  Synthetic
cagtagacccagagcctttaatgta

SEQ ID NO: 18387 - DNA, 25 bp, Artificial Sequence
  Synthetic
ctgatctaggtctgcagaaaacttt

SEQ ID NO: 18388 - DNA, 25 bp, Artificial Sequence
  Synthetic
gcaggaaacgtacaagtttaaacca

SEQ ID NO: 18389 - DNA, 25 bp, Artificial Sequence
  Synthetic
tgtgcataactgtggtaactttctg

SEQ ID NO: 18390 - DNA, 25 bp, Artificial Sequence
  Synthetic
tctttgctttttgtccagatgtctt

SEQ ID NO: 18391 - DNA, 20 bp, Artificial Sequence
  Synthetic
gttctgcttgtccagctgga

SEQ ID NO: 18392 - DNA, 24 bp, Artificial Sequence
  Synthetic
tcgattttcggatcttccccatat

SEQ ID NO: 18393 - DNA, 24 bp, Artificial Sequence
  Synthetic
agtcatacagatccgggagaaatt

SEQ ID NO: 18394 - DNA, 24 bp, Artificial Sequence
  Synthetic
tcttcatgttctttgtccttggaa

SEQ ID NO: 18395 - DNA, 20 bp, Artificial Sequence
  Synthetic
ccgtctcatgcttgcaatgt

SEQ ID NO: 18396 - DNA, 23 bp, Artificial Sequence
  Synthetic
cttgggtcggtaagggaaaattc

SEQ ID NO: 18397 - DNA, 25 bp, Artificial Sequence
  Synthetic
tcaaagaattctttggtcaggtctt

SEQ ID NO: 18398 - DNA, 24 bp, Artificial Sequence
  Synthetic
ttctctgtgtgaccattttcttgg

SEQ ID NO: 18399 - DNA, 23 bp, Artificial Sequence
  Synthetic
gctttcttctcattccctccgac

SEQ ID NO: 18400 - DNA, 25 bp, Artificial Sequence
  Synthetic
tgtgtccgtaacttcatactcttac

SEQ ID NO: 18401 - DNA, 20 bp, Artificial Sequence
  Synthetic
tctgaggattggagtccgtc

SEQ ID NO: 18402 - DNA, 25 bp, Artificial Sequence
  Synthetic
ctggtccaagatcgttgtttatcat

SEQ ID NO: 18403 - DNA, 25 bp, Artificial Sequence
  Synthetic
atcaattcccatttcaagcagacct

SEQ ID NO: 18404 - DNA, 24 bp, Artificial Sequence
  Synthetic
caagagaaattcccaccagagttt

SEQ ID NO: 18405 - DNA, 25 bp, Artificial Sequence
  Synthetic
tcagatacctcgaaagactcctgat

SEQ ID NO: 18406 - DNA, 25 bp, Artificial Sequence
  Synthetic
cctcagcaggtatatcctcataaca

SEQ ID NO: 18407 - DNA, 25 bp, Artificial Sequence
  Synthetic
tgcctcatccacaatataccaatca

SEQ ID NO: 18408 - DNA, 20 bp, Artificial Sequence
  Synthetic
ggcagtctctgtggcacttg

SEQ ID NO: 18409 - DNA, 25 bp, Artificial Sequence
  Synthetic
ggcaagtagagcagatcttgtatta

SEQ ID NO: 18410 - DNA, 24 bp, Artificial Sequence
  Synthetic
aagtctaactggctccaaaacctt

SEQ ID NO: 18411 - DNA, 25 bp, Artificial Sequence
  Synthetic
tgaggccactaagataaagagtcat

SEQ ID NO: 18412 - DNA, 22 bp, Artificial Sequence
  Synthetic
cgatttcgggtggtgtctcgac

SEQ ID NO: 18413 - DNA, 25 bp, Artificial Sequence
  Synthetic
cgtcgtttacgtactcttaacatga

SEQ ID NO: 18414 - DNA, 22 bp, Artificial Sequence
  Synthetic
tgggaacgtgtgattgtacgtg

SEQ ID NO: 18415 - DNA, 21 bp, Artificial Sequence
  Synthetic
agaaacgtgtaggcctttcct

SEQ ID NO: 18416 - DNA, 25 bp, Artificial Sequence
  Synthetic
gccatcatttgaggagatagagcta

SEQ ID NO: 18417 - DNA, 24 bp, Artificial Sequence
  Synthetic
atgaactaatttgcgacgtttacg

SEQ ID NO: 18418 - DNA, 25 bp, Artificial Sequence
  Synthetic
ctggaaatctaacacgaaagactct

SEQ ID NO: 18419 - DNA, 20 bp, Artificial Sequence
  Synthetic
ttgaccagtgttccccagtg

SEQ ID NO: 18420 - DNA, 22 bp, Artificial Sequence
  Synthetic
cagtttttggaacagaacgctg

SEQ ID NO: 18421 - DNA, 25 bp, Artificial Sequence
  Synthetic
gtcatgaggctatatgactaggcaa

SEQ ID NO: 18422 - DNA, 22 bp, Artificial Sequence
  Synthetic
cagatgctctgatttctgtggc

SEQ ID NO: 18423 - DNA, 24 bp, Artificial Sequence
  Synthetic
cctccagaaatttcggtcattgat

SEQ ID NO: 18424 - DNA, 22 bp, Artificial Sequence
  Synthetic
gtcatgcccacttgctactgca

SEQ ID NO: 18425 - DNA, 20 bp, Artificial Sequence
  Synthetic
tggacccctcttgtggaaag

SEQ ID NO: 18426 - DNA, 25 bp, Artificial Sequence
  Synthetic
gagaacatgaaataaagggctctct

SEQ ID NO: 18427 - DNA, 25 bp, Artificial Sequence
  Synthetic
cgttgtattttaatacagccactgc

SEQ ID NO: 18428 - DNA, 22 bp, Artificial Sequence
  Synthetic
tctgcacacacacatcactttg

SEQ ID NO: 18429 - DNA, 24 bp, Artificial Sequence
  Synthetic
gatcccaaatcatctcaaacccat

SEQ ID NO: 18430 - DNA, 23 bp, Artificial Sequence
  Synthetic
gagttttcaaagatccctgggtg

SEQ ID NO: 18431 - DNA, 22 bp, Artificial Sequence
  Synthetic
gccttcttttcattccctccga

SEQ ID NO: 18432 - DNA, 24 bp, Artificial Sequence
  Synthetic
ctttccctaatcttgccatcttgt

SEQ ID NO: 18433 - DNA, 20 bp, Artificial Sequence
  Synthetic
gtccgtcccaccagtatgtg

SEQ ID NO: 18434 - DNA, 22 bp, Artificial Sequence
  Synthetic
accaatgctcatgtcagccgat

SEQ ID NO: 18435 - DNA, 20 bp, Artificial Sequence
  Synthetic
atcctcaaagcgcgccatag

SEQ ID NO: 18436 - DNA, 25 bp, Artificial Sequence
  Synthetic
tgtctccatacacagagtctgaata

SEQ ID NO: 18437 - DNA, 23 bp, Artificial Sequence
  Synthetic
ttggggctctaaatgcaatacaa

SEQ ID NO: 18438 - DNA, 20 bp, Artificial Sequence
  Synthetic
gcatcattgtggacctcctg

SEQ ID NO: 18439 - DNA, 20 bp, Artificial Sequence
  Synthetic
atacattgccgccatgttcg

SEQ ID NO: 18440 - DNA, 25 bp, Artificial Sequence
  Synthetic
acatctaaatcgtatccactgtgac

SEQ ID NO: 18441 - DNA, 22 bp, Artificial Sequence
  Synthetic
atgttcccttgctgcaaagaat

SEQ ID NO: 18442 - DNA, 23 bp, Artificial Sequence
  Synthetic
ccatgttcctgcatcagtcatat

SEQ ID NO: 18443 - DNA, 21 bp, Artificial Sequence
  Synthetic
ggtgctggaatacggtgaggg

SEQ ID NO: 18444 - DNA, 25 bp, Artificial Sequence
  Synthetic
tgccaggtggatgatatatctctat

SEQ ID NO: 18445 - DNA, 22 bp, Artificial Sequence
  Synthetic
ataccaatacccatgcatacgc

SEQ ID NO: 18446 - DNA, 25 bp, Artificial Sequence
  Synthetic
aacatcactacgaggatcaaatgtt

SEQ ID NO: 18447 - DNA, 22 bp, Artificial Sequence
  Synthetic
agggtccatgtcatctgcatat

SEQ ID NO: 18448 - DNA, 24 bp, Artificial Sequence
  Synthetic
cacagcccaaaatacataactgtg

SEQ ID NO: 18449 - DNA, 24 bp, Artificial Sequence
  Synthetic
tgctctattccaaaaatgcctagc

SEQ ID NO: 18450 - DNA, 25 bp, Artificial Sequence
  Synthetic
gagactgtgtagaagcacatattgt

SEQ ID NO: 18451 - DNA, 22 bp, Artificial Sequence
  Synthetic
tgctgtaaggtgtgcagtttta

SEQ ID NO: 18452 - DNA, 25 bp, Artificial Sequence
  Synthetic
cggtataagggaaagttgtgcttat

SEQ ID NO: 18453 - DNA, 25 bp, Artificial Sequence
  Synthetic
cgagttttcaaaaataccaggatgg

SEQ ID NO: 18454 - DNA, 20 bp, Artificial Sequence
  Synthetic
tctcattgcctccaactggc

SEQ ID NO: 18455 - DNA, 24 bp, Artificial Sequence
  Synthetic
ccatcccaccagtaagtagtcttg

SEQ ID NO: 18456 - DNA, 20 bp, Artificial Sequence
  Synthetic
ctgactcgttgctcccagac

SEQ ID NO: 18457 - DNA, 25 bp, Artificial Sequence
  Synthetic
actgctggggaagaatttttcaaat

SEQ ID NO: 18458 - DNA, 20 bp, Artificial Sequence
  Synthetic
acaggatccaccgcctttcg

SEQ ID NO: 18459 - DNA, 22 bp, Artificial Sequence
  Synthetic
ggagcccacaacaatagtgggc

SEQ ID NO: 18460 - DNA, 20 bp, Artificial Sequence
  Synthetic
ggctccgccaaacttcccaa

SEQ ID NO: 18461 - DNA, 20 bp, Artificial Sequence
  Synthetic
gtgcctcgcccaccactaaa

SEQ ID NO: 18462 - DNA, 22 bp, Artificial Sequence
  Synthetic
gccgacactgtgccaagaacct

SEQ ID NO: 18463 - DNA, 22 bp, Artificial Sequence
  Synthetic
gctcacagtcatgttgacccca

SEQ ID NO: 18464 - DNA, 22 bp, Artificial Sequence
  Synthetic
ggcggccctttttgacatggat

SEQ ID NO: 18465 - DNA, 22 bp, Artificial Sequence
  Synthetic
ggcggcgttactgactgaatca

SEQ ID NO: 18466 - DNA, 22 bp, Artificial Sequence
  Synthetic
agcatctggcagtgccgagaac

SEQ ID NO: 18467 - DNA, 20 bp, Artificial Sequence
  Synthetic
gcggttgcctatgggagtgt

SEQ ID NO: 18468 - DNA, 19 bp, Artificial Sequence
  Synthetic
ctggcttcacagcgacggg

SEQ ID NO: 18469 - DNA, 20 bp, Artificial Sequence
  Synthetic
ctggttgaccaccacctggc

SEQ ID NO: 18470 - DNA, 21 bp, Artificial Sequence
  Synthetic
gacccgattgccacgatgcaa

SEQ ID NO: 18471 - DNA, 22 bp, Artificial Sequence
  Synthetic
catgcccagaacactaacgccg

SEQ ID NO: 18472 - DNA, 22 bp, Artificial Sequence
  Synthetic
cgtcctctcgcactcaaccttt

SEQ ID NO: 18473 - DNA, 22 bp, Artificial Sequence
  Synthetic
ccagcgcggagtagtagtgtcc

SEQ ID NO: 18474 - DNA, 22 bp, Artificial Sequence
  Synthetic
ggcccccccacctgagtaataa

SEQ ID NO: 18475 - DNA, 19 bp, Artificial Sequence
  Synthetic
tcacaggggtagcgctccc

SEQ ID NO: 18476 - DNA, 22 bp, Artificial Sequence
  Synthetic
ccaccccgagaggtggattcct

SEQ ID NO: 18477 - DNA, 20 bp, Artificial Sequence
  Synthetic
gccaggcaggagatgatgca

SEQ ID NO: 18478 - DNA, 20 bp, Artificial Sequence
  Synthetic
agagggattttgaggcgcgg

SEQ ID NO: 18479 - DNA, 20 bp, Artificial Sequence
  Synthetic
cgtcaccgtaaccgtgccag

SEQ ID NO: 18480 - DNA, 21 bp, Artificial Sequence
  Synthetic
catcctccagagcctgcaagg

SEQ ID NO: 18481 - DNA, 22 bp, Artificial Sequence
  Synthetic
caatgtcccccactgtgtctgt

SEQ ID NO: 18482 - DNA, 22 bp, Artificial Sequence
  Synthetic
acagttatcgcagccggatgtt

SEQ ID NO: 18483 - DNA, 22 bp, Artificial Sequence
  Synthetic
gccgagcaacactcagctgtat

SEQ ID NO: 18484 - DNA, 22 bp, Artificial Sequence
  Synthetic
atccggtgatgaaccacttcgg

SEQ ID NO: 18485 - DNA, 24 bp, Artificial Sequence
  Synthetic
tgccacagaaattgcaaggtatta

SEQ ID NO: 18486 - DNA, 20 bp, Artificial Sequence
  Synthetic
attcccttccaggcgttcct

SEQ ID NO: 18487 - DNA, 25 bp, Artificial Sequence
  Synthetic
tgctccagttcagtatcatctaaca

SEQ ID NO: 18488 - DNA, 25 bp, Artificial Sequence
  Synthetic
gcagtgtaatgtatatctacgtccc

SEQ ID NO: 18489 - DNA, 23 bp, Artificial Sequence
  Synthetic
ggacccagatatagtcacaatgc

SEQ ID NO: 18490 - DNA, 25 bp, Artificial Sequence
  Synthetic
tggtatgctatatctgcttcgtcta

SEQ ID NO: 18491 - DNA, 24 bp, Artificial Sequence
  Synthetic
acactctacccttcaacactctta

SEQ ID NO: 18492 - DNA, 25 bp, Artificial Sequence
  Synthetic
gccttgtaaaaaaagatttccagct

SEQ ID NO: 18493 - DNA, 19 bp, Artificial Sequence
  Synthetic
gtcgcgggggtggtgtttg

SEQ ID NO: 18494 - DNA, 21 bp, Artificial Sequence
  Synthetic
ctccccttctgcaggtggttg

SEQ ID NO: 18495 - DNA, 24 bp, Artificial Sequence
  Synthetic
agcttcttccagtaatcttccaag

SEQ ID NO: 18496 - DNA, 22 bp, Artificial Sequence
  Synthetic
caggttgccataggccttatca

SEQ ID NO: 18497 - DNA, 22 bp, Artificial Sequence
  Synthetic
gcccctcaggtacaggatggat

SEQ ID NO: 18498 - DNA, 25 bp, Artificial Sequence
  Synthetic
ggttcttcaaagacatccagatcat

SEQ ID NO: 18499 - DNA, 25 bp, Artificial Sequence
  Synthetic
tttctgcattattacgtgactctgg

SEQ ID NO: 18500 - DNA, 25 bp, Artificial Sequence
  Synthetic
ggatcaaaagatgtatcctgtctgt

SEQ ID NO: 18501 - DNA, 25 bp, Artificial Sequence
  Synthetic
ccactaacagttgggaaatacatgg

SEQ ID NO: 18502 - DNA, 25 bp, Artificial Sequence
  Synthetic
cgttttgttcctctattagaccctt

SEQ ID NO: 18503 - DNA, 25 bp, Artificial Sequence
  Synthetic
tgggttggtacattcattgaaatgt

SEQ ID NO: 18504 - DNA, 25 bp, Artificial Sequence
  Synthetic
acataaggttctcttgtcacccaaa

SEQ ID NO: 18505 - DNA, 23 bp, Artificial Sequence
  Synthetic
ccccagtgacacaaacatgtaac

SEQ ID NO: 18506 - DNA, 20 bp, Artificial Sequence
  Synthetic
ataccgggggtaacaggagc

SEQ ID NO: 18507 - DNA, 22 bp, Artificial Sequence
  Synthetic
agcgcgaatctttcttgattgt

SEQ ID NO: 18508 - DNA, 25 bp, Artificial Sequence
  Synthetic
ggtgttttatcgattgttccggtat

SEQ ID NO: 18509 - DNA, 22 bp, Artificial Sequence
  Synthetic
gtccagctttgaccatcatctg

SEQ ID NO: 18510 - DNA, 25 bp, Artificial Sequence
  Synthetic
tgggattgactttgtttttgtctga

SEQ ID NO: 18511 - DNA, 23 bp, Artificial Sequence
  Synthetic
ccgaaagtggtgcatagtttctt

SEQ ID NO: 18512 - DNA, 25 bp, Artificial Sequence
  Synthetic
ctacagcaatttctccaatgacaac

SEQ ID NO: 18513 - DNA, 25 bp, Artificial Sequence
  Synthetic
gctctccaatcaataattgctcaaa

SEQ ID NO: 18514 - DNA, 25 bp, Artificial Sequence
  Synthetic
gttcattaaacaatgccagggaatt

SEQ ID NO: 18515 - DNA, 25 bp, Artificial Sequence
  Synthetic
tggctcatcatggagattgttatca

SEQ ID NO: 18516 - DNA, 25 bp, Artificial Sequence
  Synthetic
cacccaggataggttacatcatcta

SEQ ID NO: 18517 - DNA, 25 bp, Artificial Sequence
  Synthetic
tggatcttctttaggctctagatca

SEQ ID NO: 18518 - DNA, 21 bp, Artificial Sequence
  Synthetic
tcgtcttggggtttgcggtac

SEQ ID NO: 18519 - DNA, 25 bp, Artificial Sequence
  Synthetic
tgatgtggtgtctgttacaatgttt

SEQ ID NO: 18520 - DNA, 25 bp, Artificial Sequence
  Synthetic
tgctagtagttggtaagtcctcaat

SEQ ID NO: 18521 - DNA, 25 bp, Artificial Sequence
  Synthetic
tgcgtttcagtacactaggatgtat

SEQ ID NO: 18522 - DNA, 25 bp, Artificial Sequence
  Synthetic
tgtttggatctggaaattgtagtct

SEQ ID NO: 18523 - DNA, 20 bp, Artificial Sequence
  Synthetic
ccccatcctctgcttgcttt

SEQ ID NO: 18524 - DNA, 25 bp, Artificial Sequence
  Synthetic
aggccaaatactgatttcattcgta

SEQ ID NO: 18525 - DNA, 23 bp, Artificial Sequence
  Synthetic
tggctcctaatgccctatgtaaa

SEQ ID NO: 18526 - DNA, 25 bp, Artificial Sequence
  Synthetic
gctgtcctctttgatacaaaaatcg

SEQ ID NO: 18527 - DNA, 21 bp, Artificial Sequence
  Synthetic
gggaatgtggtgcttatggca

SEQ ID NO: 18528 - DNA, 22 bp, Artificial Sequence
  Synthetic
tcaaagatacctgggtgggatt

SEQ ID NO: 18529 - DNA, 25 bp, Artificial Sequence
  Synthetic
ggtcatgttgtctcttactctcctt

SEQ ID NO: 18530 - DNA, 20 bp, Artificial Sequence
  Synthetic
attacccccaaccggaagtc

SEQ ID NO: 18531 - DNA, 25 bp, Artificial Sequence
  Synthetic
tctcttactctcgaacatgtatcct

SEQ ID NO: 18532 - DNA, 21 bp, Artificial Sequence
  Synthetic
gcccatcccaccagtatgttg

SEQ ID NO: 18533 - DNA, 25 bp, Artificial Sequence
  Synthetic
ccaaggtcattgtttatcatgttgt

SEQ ID NO: 18534 - DNA, 25 bp, Artificial Sequence
  Synthetic
ggatgtgaaggttccggatattgta

SEQ ID NO: 18535 - DNA, 20 bp, Artificial Sequence
  Synthetic
ctcgaacaagttgcagcact

SEQ ID NO: 18536 - DNA, 23 bp, Artificial Sequence
  Synthetic
tcagtctccttcaaatctgtgct

SEQ ID NO: 18537 - DNA, 25 bp, Artificial Sequence
  Synthetic
tcagattctgctatgtcatcagttt

SEQ ID NO: 18538 - DNA, 20 bp, Artificial Sequence
  Synthetic
atgcaccgctgaaagtctcg

SEQ ID NO: 18539 - DNA, 25 bp, Artificial Sequence
  Synthetic
gctagtgacagaggaatgaatagtt

SEQ ID NO: 18540 - DNA, 24 bp, Artificial Sequence
  Synthetic
gcaatttagcatcacccctgtatc

SEQ ID NO: 18541 - DNA, 25 bp, Artificial Sequence
  Synthetic
tccaattcccaaattgccaaagtat

SEQ ID NO: 18542 - DNA, 20 bp, Artificial Sequence
  Synthetic
atcagttccacctgctgcag

SEQ ID NO: 18543 - DNA, 25 bp, Artificial Sequence
  Synthetic
aaacgttccaaaggtatctcttcat

SEQ ID NO: 18544 - DNA, 21 bp, Artificial Sequence
  Synthetic
cccgctcaaagtataggctca

SEQ ID NO: 18545 - DNA, 25 bp, Artificial Sequence
  Synthetic
gcgtgcatgaaagtaaacatcagtt

SEQ ID NO: 18546 - DNA, 24 bp, Artificial Sequence
  Synthetic
gatgaccagtagatccaacaccta

SEQ ID NO: 18547 - DNA, 25 bp, Artificial Sequence
  Synthetic
aggaaagtttgcattaccaaatcct

SEQ ID NO: 18548 - DNA, 25 bp, Artificial Sequence
  Synthetic
cgttacaaagcagattaacaggcaa

SEQ ID NO: 18549 - DNA, 25 bp, Artificial Sequence
  Synthetic
actgtccacaaatagacgtctttta

SEQ ID NO: 18550 - DNA, 20 bp, Artificial Sequence
  Synthetic
ctggtgtccccgtcgctttg

SEQ ID NO: 18551 - DNA, 25 bp, Artificial Sequence
  Synthetic
agcgatatctccagcattttaatgt

SEQ ID NO: 18552 - DNA, 24 bp, Artificial Sequence
  Synthetic
acaggttcaaccactatgtttggt

SEQ ID NO: 18553 - DNA, 20 bp, Artificial Sequence
  Synthetic
tataggggctgctggttgca

SEQ ID NO: 18554 - DNA, 23 bp, Artificial Sequence
  Synthetic
gctctactaaaagctcttggtgt

SEQ ID NO: 18555 - DNA, 25 bp, Artificial Sequence
  Synthetic
catgtgagttactgaaatcctctgt

SEQ ID NO: 18556 - DNA, 24 bp, Artificial Sequence
  Synthetic
ggcagccaatatgacatctgtaaa

SEQ ID NO: 18557 - DNA, 22 bp, Artificial Sequence
  Synthetic
accctattgcaacacgtttacg

SEQ ID NO: 18558 - DNA, 24 bp, Artificial Sequence
  Synthetic
caggatatacctatgaagggtggg

SEQ ID NO: 18559 - DNA, 25 bp, Artificial Sequence
  Synthetic
gcgacaaaaggtacaaggtagtcta

SEQ ID NO: 18560 - DNA, 25 bp, Artificial Sequence
  Synthetic
caaactctgcacactgaatctattc

SEQ ID NO: 18561 - DNA, 25 bp, Artificial Sequence
  Synthetic
ccactgttctcaaacaatcgtcttt

SEQ ID NO: 18562 - DNA, 25 bp, Artificial Sequence
  Synthetic
tgtagcatttccagttgtacactta

SEQ ID NO: 18563 - DNA, 25 bp, Artificial Sequence
  Synthetic
gttgaatccaaaaatgactgtgact

SEQ ID NO: 18564 - DNA, 20 bp, Artificial Sequence
  Synthetic
gcttcttgcacagcatcgaa

SEQ ID NO: 18565 - DNA, 25 bp, Artificial Sequence
  Synthetic
agaggtaacagagggagaaatagtt

SEQ ID NO: 18566 - DNA, 25 bp, Artificial Sequence
  Synthetic
caattgtctttgtgcagtgtcttta

SEQ ID NO: 18567 - DNA, 23 bp, Artificial Sequence
  Synthetic
ccttcatttagaggcaccaaagc

SEQ ID NO: 18568 - DNA, 23 bp, Artificial Sequence
  Synthetic
tgtacttgttgtacccgcctatt

SEQ ID NO: 18569 - DNA, 25 bp, Artificial Sequence
  Synthetic
agtggttgtgctatatctgttacaa

SEQ ID NO: 18570 - DNA, 24 bp, Artificial Sequence
  Synthetic
ggatctggcagcataacccttaat

SEQ ID NO: 18571 - DNA, 25 bp, Artificial Sequence
  Synthetic
tccccataggattcctttgtcattt

SEQ ID NO: 18572 - DNA, 25 bp, Artificial Sequence
  Synthetic
ggaacaaatgctaaattccagtctt

SEQ ID NO: 18573 - DNA, 25 bp, Artificial Sequence
  Synthetic
caatgaaacattaaggtgcaagcat

SEQ ID NO: 18574 - DNA, 20 bp, Artificial Sequence
  Synthetic
gcagttaccactcccggtac

SEQ ID NO: 18575 - DNA, 22 bp, Artificial Sequence
  Synthetic
aggcagtcccccgtgatagtct

SEQ ID NO: 18576 - DNA, 19 bp, Artificial Sequence
  Synthetic
gacgcaatggacccgaggg

SEQ ID NO: 18577 - DNA, 21 bp, Artificial Sequence
  Synthetic
gcgggagtcgtatctggcgat

SEQ ID NO: 18578 - DNA, 21 bp, Artificial Sequence
  Synthetic
ctggacaaggtcgccatctgc

SEQ ID NO: 18579 - DNA, 21 bp, Artificial Sequence
  Synthetic
ccccctgccttacgtggtctt

SEQ ID NO: 18580 - DNA, 19 bp, Artificial Sequence
  Synthetic
agagccaggaccaggacgc

SEQ ID NO: 18581 - DNA, 22 bp, Artificial Sequence
  Synthetic
cacgcctacctgaaggtgaccc

SEQ ID NO: 18582 - DNA, 19 bp, Artificial Sequence
  Synthetic
agacggcgtccctggagtc

SEQ ID NO: 18583 - DNA, 22 bp, Artificial Sequence
  Synthetic
ccaggtacatcagcagacaggc

SEQ ID NO: 18584 - DNA, 22 bp, Artificial Sequence
  Synthetic
tcgtcgtcgaacggttttacgt

SEQ ID NO: 18585 - DNA, 20 bp, Artificial Sequence
  Synthetic
gcggtggcgctgttcaagat

SEQ ID NO: 18586 - DNA, 21 bp, Artificial Sequence
  Synthetic
cccgatgacgtgctggaccta

SEQ ID NO: 18587 - DNA, 21 bp, Artificial Sequence
  Synthetic
cgtcagtttacggaccgcgtg

SEQ ID NO: 18588 - DNA, 22 bp, Artificial Sequence
  Synthetic
cgggaaaaactaccgcgctgat

SEQ ID NO: 18589 - DNA, 21 bp, Artificial Sequence
  Synthetic
ggacgtaaaccaggtgggcca

SEQ ID NO: 18590 - DNA, 19 bp, Artificial Sequence
  Synthetic
ctcgccgagctatgggcct

SEQ ID NO: 18591 - DNA, 19 bp, Artificial Sequence
  Synthetic
ggagggcgtaacgttccgc

SEQ ID NO: 18592 - DNA, 19 bp, Artificial Sequence
  Synthetic
gcccgttaaccccccacgt

SEQ ID NO: 18593 - DNA, 19 bp, Artificial Sequence
  Synthetic
actgtcgtcggtggcgctg

SEQ ID NO: 18594 - DNA, 22 bp, Artificial Sequence
  Synthetic
tcaaccccgccctacactacac

SEQ ID NO: 18595 - DNA, 19 bp, Artificial Sequence
  Synthetic
ttggtgagcgcctggacgc

SEQ ID NO: 18596 - DNA, 22 bp, Artificial Sequence
  Synthetic
cggtttgttggcgcctttatgg

SEQ ID NO: 18597 - DNA, 21 bp, Artificial Sequence
  Synthetic
ctcctgtgcaccctcacgttc

SEQ ID NO: 18598 - DNA, 21 bp, Artificial Sequence
  Synthetic
cttcctaacccagaccccggg

SEQ ID NO: 18599 - DNA, 20 bp, Artificial Sequence
  Synthetic
cccacccccgaaccatgaac

SEQ ID NO: 18600 - DNA, 19 bp, Artificial Sequence
  Synthetic
tcagaacgggccggtcgtc

SEQ ID NO: 18601 - DNA, 19 bp, Artificial Sequence
  Synthetic
aaggtcatccgaggcgccg

SEQ ID NO: 18602 - DNA, 20 bp, Artificial Sequence
  Synthetic
aaggctgccgctttacgagg

SEQ ID NO: 18603 - DNA, 19 bp, Artificial Sequence
  Synthetic
aatcgtggcgcggctcgtg

SEQ ID NO: 18604 - DNA, 20 bp, Artificial Sequence
  Synthetic
gcgcctgatcgtggagacgg

SEQ ID NO: 18605 - DNA, 22 bp, Artificial Sequence
  Synthetic
cgctttgtgactgagaacgtgc

SEQ ID NO: 18606 - DNA, 21 bp, Artificial Sequence
  Synthetic
ggctcgtggtccagtgcatca

SEQ ID NO: 18607 - DNA, 21 bp, Artificial Sequence
  Synthetic
gaccagatgctgcacgtgctg

SEQ ID NO: 18608 - DNA, 20 bp, Artificial Sequence
  Synthetic
ctcgtgcgctttctggagct

SEQ ID NO: 18609 - DNA, 19 bp, Artificial Sequence
  Synthetic
accttcagtccggacgggc

SEQ ID NO: 18610 - DNA, 19 bp, Artificial Sequence
  Synthetic
taagctccatcgcgggcgg

SEQ ID NO: 18611 - DNA, 19 bp, Artificial Sequence
  Synthetic
tcctggcccagcagaccca

SEQ ID NO: 18612 - DNA, 18 bp, Artificial Sequence
  Synthetic
tgctcgcgacgtcgggtt

SEQ ID NO: 18613 - DNA, 19 bp, Artificial Sequence
  Synthetic
tcgaccgcctggccaaacg

SEQ ID NO: 18614 - DNA, 19 bp, Artificial Sequence
  Synthetic
gtggcgtgaaactcccgca

SEQ ID NO: 18615 - DNA, 22 bp, Artificial Sequence
  Synthetic
ggagggggaaggaacgaaacac

SEQ ID NO: 18616 - DNA, 22 bp, Artificial Sequence
  Synthetic
gggaactcgggggtgatgaagt

SEQ ID NO: 18617 - DNA, 21 bp, Artificial Sequence
  Synthetic
tcttggacatacggccgtccc

SEQ ID NO: 18618 - DNA, 20 bp, Artificial Sequence
  Synthetic
gaggccaagctagccgaggc

SEQ ID NO: 18619 - DNA, 22 bp, Artificial Sequence
  Synthetic
acatcaccaccgtcagcacctt

SEQ ID NO: 18620 - DNA, 19 bp, Artificial Sequence
  Synthetic
accccaacgccatcgcctc

SEQ ID NO: 18621 - DNA, 20 bp, Artificial Sequence
  Synthetic
gcgacgcacatcaaggtggg

SEQ ID NO: 18622 - DNA, 18 bp, Artificial Sequence
  Synthetic
cgagatgctgcgctccga

SEQ ID NO: 18623 - DNA, 18 bp, Artificial Sequence
  Synthetic
ttccccaacggcaagccc

SEQ ID NO: 18624 - DNA, 22 bp, Artificial Sequence
  Synthetic
atcaattccaaccggtgctgcg

SEQ ID NO: 18625 - DNA, 19 bp, Artificial Sequence
  Synthetic
agtacgtggaccaggcggt

SEQ ID NO: 18626 - DNA, 22 bp, Artificial Sequence
  Synthetic
acaaggtaaccataggcggggc

SEQ ID NO: 18627 - DNA, 20 bp, Artificial Sequence
  Synthetic
caccatcaaggtcccccccg

SEQ ID NO: 18628 - DNA, 20 bp, Artificial Sequence
  Synthetic
cggtaaaacagagcggggcg

SEQ ID NO: 18629 - DNA, 20 bp, Artificial Sequence
  Synthetic
cgcgagcggatctgctttcg

SEQ ID NO: 18630 - DNA, 19 bp, Artificial Sequence
  Synthetic
atcttgtcgcccacggccg

SEQ ID NO: 18631 - DNA, 20 bp, Artificial Sequence
  Synthetic
ccacttacgggggccacatg

SEQ ID NO: 18632 - DNA, 22 bp, Artificial Sequence
  Synthetic
gctcttaacgaggctctctgcg

SEQ ID NO: 18633 - DNA, 20 bp, Artificial Sequence
  Synthetic
acatgctggccatcatcggc

SEQ ID NO: 18634 - DNA, 22 bp, Artificial Sequence
  Synthetic
ccgccaaccaagggctgataga

SEQ ID NO: 18635 - DNA, 19 bp, Artificial Sequence
  Synthetic
acacgttcttcgccggccc

SEQ ID NO: 18636 - DNA, 19 bp, Artificial Sequence
  Synthetic
tcgtggtcaccggtgctcg

SEQ ID NO: 18637 - DNA, 19 bp, Artificial Sequence
  Synthetic
ttccccgcccggtcgagtt

SEQ ID NO: 18638 - DNA, 21 bp, Artificial Sequence
  Synthetic
cggttcttggccctggtgagt

SEQ ID NO: 18639 - DNA, 19 bp, Artificial Sequence
  Synthetic
accccacagccaaacgcgg

SEQ ID NO: 18640 - DNA, 18 bp, Artificial Sequence
  Synthetic
tccacatcgcgcaggggt

SEQ ID NO: 18641 - DNA, 19 bp, Artificial Sequence
  Synthetic
tagcccgatgcccccgttg

SEQ ID NO: 18642 - DNA, 19 bp, Artificial Sequence
  Synthetic
aggttggagccggcgatgg

SEQ ID NO: 18643 - DNA, 21 bp, Artificial Sequence
  Synthetic
atcgccgacaggtttctggag

SEQ ID NO: 18644 - DNA, 19 bp, Artificial Sequence
  Synthetic
gccagtgacgtggacgcct

SEQ ID NO: 18645 - DNA, 21 bp, Artificial Sequence
  Synthetic
agtgttccaggggcaggaaca

SEQ ID NO: 18646 - DNA, 19 bp, Artificial Sequence
  Synthetic
tgggcgtggcactatcggc

SEQ ID NO: 18647 - DNA, 22 bp, Artificial Sequence
  Synthetic
ttccggaatttatacccgggcc

SEQ ID NO: 18648 - DNA, 20 bp, Artificial Sequence
  Synthetic
cacggggttacgcgggtagt

SEQ ID NO: 18649 - DNA, 19 bp, Artificial Sequence
  Synthetic
tgggcacgtacacccccct

SEQ ID NO: 18650 - DNA, 19 bp, Artificial Sequence
  Synthetic
acgcgcagactgtcgacgg

SEQ ID NO: 18651 - DNA, 21 bp, Artificial Sequence
  Synthetic
gggctgtcattcctcgggaac

SEQ ID NO: 18652 - DNA, 21 bp, Artificial Sequence
  Synthetic
tggtgaatccagacgtggtgc

SEQ ID NO: 18653 - DNA, 21 bp, Artificial Sequence
  Synthetic
gctcgacctctccacacctgc

SEQ ID NO: 18654 - DNA, 19 bp, Artificial Sequence
  Synthetic
agaacgactggcgcgccac

SEQ ID NO: 18655 - DNA, 21 bp, Artificial Sequence
  Synthetic
gagaaccgtggacgacgtacg

SEQ ID NO: 18656 - DNA, 19 bp, Artificial Sequence
  Synthetic
tgttggccccgacgctcag

SEQ ID NO: 18657 - DNA, 19 bp, Artificial Sequence
  Synthetic
accacacgagcacgaggcc

SEQ ID NO: 18658 - DNA, 19 bp, Artificial Sequence
  Synthetic
atcggcgttggtggagggc

SEQ ID NO: 18659 - DNA, 19 bp, Artificial Sequence
  Synthetic
attccaggtcgtcgcggcg

SEQ ID NO: 18660 - DNA, 18 bp, Artificial Sequence
  Synthetic
tttcggcctgccaggtgg

SEQ ID NO: 18661 - DNA, 19 bp, Artificial Sequence
  Synthetic
tcgaccgaacagccgtccg

SEQ ID NO: 18662 - DNA, 20 bp, Artificial Sequence
  Synthetic
tctggacacccccacggacc

SEQ ID NO: 18663 - DNA, 22 bp, Artificial Sequence
  Synthetic
tggggagtagggccttttccat

SEQ ID NO: 18664 - DNA, 19 bp, Artificial Sequence
  Synthetic
cgccctcgacgagtgggat

SEQ ID NO: 18665 - DNA, 18 bp, Artificial Sequence
  Synthetic
aaaccgccccccaagcct

SEQ ID NO: 18666 - DNA, 21 bp, Artificial Sequence
  Synthetic
actgaccctctgatcgccgtt

SEQ ID NO: 18667 - DNA, 19 bp, Artificial Sequence
  Synthetic
cagccccttggagagcacc

SEQ ID NO: 18668 - DNA, 19 bp, Artificial Sequence
  Synthetic
ggcagtgccgcattttggc

SEQ ID NO: 18669 - DNA, 20 bp, Artificial Sequence
  Synthetic
gggccccggggttttaagga

SEQ ID NO: 18670 - DNA, 19 bp, Artificial Sequence
  Synthetic
agtccaggcacgcgtcctc

SEQ ID NO: 18671 - DNA, 22 bp, Artificial Sequence
  Synthetic
ctcttccgcggtaaatcccgtg

SEQ ID NO: 18672 - DNA, 22 bp, Artificial Sequence
  Synthetic
cgccttcacgattacccgttgg

SEQ ID NO: 18673 - DNA, 20 bp, Artificial Sequence
  Synthetic
tgggttcaggcgcctactca

SEQ ID NO: 18674 - DNA, 19 bp, Artificial Sequence
  Synthetic
tcgcacgggccccttttgg

SEQ ID NO: 18675 - DNA, 19 bp, Artificial Sequence
  Synthetic
tggcggtgggagagtcggt

SEQ ID NO: 18676 - DNA, 20 bp, Artificial Sequence
  Synthetic
cgcgcatgcttcatgggtcc

SEQ ID NO: 18677 - DNA, 19 bp, Artificial Sequence
  Synthetic
gggtggcggcaagaacagc

SEQ ID NO: 18678 - DNA, 20 bp, Artificial Sequence
  Synthetic
gtgttgttgggtgccctccg

SEQ ID NO: 18679 - DNA, 21 bp, Artificial Sequence
  Synthetic
cccggcgtccacaaatgagtt

SEQ ID NO: 18680 - DNA, 18 bp, Artificial Sequence
  Synthetic
tttggcgcgtcaccgacc

SEQ ID NO: 18681 - DNA, 18 bp, Artificial Sequence
  Synthetic
aggccgctgtccgtctct

SEQ ID NO: 18682 - DNA, 21 bp, Artificial Sequence
  Synthetic
gcttcgaccgaaactggcgag

SEQ ID NO: 18683 - DNA, 19 bp, Artificial Sequence
  Synthetic
agccacatcaggagcgccc

SEQ ID NO: 18684 - DNA, 25 bp, Artificial Sequence
  Synthetic
tgttcccaatttgtaacatcaagct

SEQ ID NO: 18685 - DNA, 21 bp, Artificial Sequence
  Synthetic
attgtcaaccaactggtgcca

SEQ ID NO: 18686 - DNA, 22 bp, Artificial Sequence
  Synthetic
atcaggataacaggagcactcc

SEQ ID NO: 18687 - DNA, 25 bp, Artificial Sequence
  Synthetic
cctggaattagtgcttttggttctc

SEQ ID NO: 18688 - DNA, 22 bp, Artificial Sequence
  Synthetic
ttccgaaagcccaggatgatgg

SEQ ID NO: 18689 - DNA, 25 bp, Artificial Sequence
  Synthetic
cccataacatccaatgacataaccc

SEQ ID NO: 18690 - DNA, 20 bp, Artificial Sequence
  Synthetic
gtggtctccatgcgacgtgc

SEQ ID NO: 18691 - DNA, 21 bp, Artificial Sequence
  Synthetic
gttccccccagcaaagaattg

SEQ ID NO: 18692 - DNA, 22 bp, Artificial Sequence
  Synthetic
tggaaagattctgccccatgct

SEQ ID NO: 18693 - DNA, 23 bp, Artificial Sequence
  Synthetic
tgtggtttttgtcagtatctcgc

SEQ ID NO: 18694 - DNA, 22 bp, Artificial Sequence
  Synthetic
ccacgggtccatttctattcca

SEQ ID NO: 18695 - DNA, 22 bp, Artificial Sequence
  Synthetic
agatgctagtggatctgctgat

SEQ ID NO: 18696 - DNA, 25 bp, Artificial Sequence
  Synthetic
acccctcatgtactcttatcttcaa

SEQ ID NO: 18697 - DNA, 23 bp, Artificial Sequence
  Synthetic
aatgccttaaaagctgatgcatg

SEQ ID NO: 18698 - DNA, 22 bp, Artificial Sequence
  Synthetic
gtttcactgacctcctcaggag

SEQ ID NO: 18699 - DNA, 25 bp, Artificial Sequence
  Synthetic
caagtacgtctctcatttgttggaa

SEQ ID NO: 18700 - DNA, 20 bp, Artificial Sequence
  Synthetic
gaaaccctctcaagacggcg

SEQ ID NO: 18701 - DNA, 23 bp, Artificial Sequence
  Synthetic
cacacaaatcacgacgacagaaa

SEQ ID NO: 18702 - DNA, 25 bp, Artificial Sequence
  Synthetic
cgcgataatatcaatcttctcctca

SEQ ID NO: 18703 - DNA, 24 bp, Artificial Sequence
  Synthetic
gcaacaacaacgacacgaattact

SEQ ID NO: 18704 - DNA, 25 bp, Artificial Sequence
  Synthetic
tgtcgtctaacagatttgagatgtt

SEQ ID NO: 18705 - DNA, 25 bp, Artificial Sequence
  Synthetic
gatctctacctgcgacgtaaaagta

SEQ ID NO: 18706 - DNA, 24 bp, Artificial Sequence
  Synthetic
tgaggccttcttttctcccataat

SEQ ID NO: 18707 - DNA, 21 bp, Artificial Sequence
  Synthetic
tttcggtgggactggaaacgg

SEQ ID NO: 18708 - DNA, 25 bp, Artificial Sequence
  Synthetic
gttcctatacccagtcctccaaaat

SEQ ID NO: 18709 - DNA, 24 bp, Artificial Sequence
  Synthetic
agttgtaagtacaggtggttctgc

SEQ ID NO: 18710 - DNA, 24 bp, Artificial Sequence
  Synthetic
gatctggagtagcagctacattct

SEQ ID NO: 18711 - DNA, 20 bp, Artificial Sequence
  Synthetic
tcgcctgaatgttggcctat

SEQ ID NO: 18712 - DNA, 25 bp, Artificial Sequence
  Synthetic
ctgtaccagcatagaaaaacagact

SEQ ID NO: 18713 - DNA, 25 bp, Artificial Sequence
  Synthetic
ttaaataatggattgcctgttgtgg

SEQ ID NO: 18714 - DNA, 24 bp, Artificial Sequence
  Synthetic
caccaaagccaatgtcacacatat

SEQ ID NO: 18715 - DNA, 25 bp, Artificial Sequence
  Synthetic
tcgttcagtcatatctatttgccaa

SEQ ID NO: 18716 - DNA, 25 bp, Artificial Sequence
  Synthetic
agtacattcagagaccattcacagt

SEQ ID NO: 18717 - DNA, 22 bp, Artificial Sequence
  Synthetic
cctttggcgccaaaaacttacc

SEQ ID NO: 18718 - DNA, 25 bp, Artificial Sequence
  Synthetic
cgtcagaaattaagttagcaggcaa

SEQ ID NO: 18719 - DNA, 21 bp, Artificial Sequence
  Synthetic
gcttagatgctctctcaggcg

SEQ ID NO: 18720 - DNA, 22 bp, Artificial Sequence
  Synthetic
gcagagtcggaccccaatttcc

SEQ ID NO: 18721 - DNA, 20 bp, Artificial Sequence
  Synthetic
atcccccagacccttttcca

SEQ ID NO: 18722 - DNA, 25 bp, Artificial Sequence
  Synthetic
gctggatctctaaaggtgaatagtt

SEQ ID NO: 18723 - DNA, 25 bp, Artificial Sequence
  Synthetic
tctcttcaaatatgttgtccccaat

SEQ ID NO: 18724 - DNA, 24 bp, Artificial Sequence
  Synthetic
gctatttacatcacgctggaactg

SEQ ID NO: 18725 - DNA, 25 bp, Artificial Sequence
  Synthetic
cgctctgtcatatctaaagtccaga

SEQ ID NO: 18726 - DNA, 24 bp, Artificial Sequence
  Synthetic
caggagtttataggtcagaaccca

SEQ ID NO: 18727 - DNA, 23 bp, Artificial Sequence
  Synthetic
gccaatctggtattatcccttcc

SEQ ID NO: 18728 - DNA, 20 bp, Artificial Sequence
  Synthetic
ccagctcctcccatgtccct

SEQ ID NO: 18729 - DNA, 20 bp, Artificial Sequence
  Synthetic
gcgccaacctgctagggatt

SEQ ID NO: 18730 - DNA, 23 bp, Artificial Sequence
  Synthetic
cgggccgtaacctaactttttct

SEQ ID NO: 18731 - DNA, 20 bp, Artificial Sequence
  Synthetic
ccgcttgttgcacggggtag

SEQ ID NO: 18732 - DNA, 25 bp, Artificial Sequence
  Synthetic
gcctatacatccactggatctgttc

SEQ ID NO: 18733 - DNA, 22 bp, Artificial Sequence
  Synthetic
cgagtgtccctcctttccacag

SEQ ID NO: 18734 - DNA, 23 bp, Artificial Sequence
  Synthetic
gacatgcctaaggctgtcagaat

SEQ ID NO: 18735 - DNA, 24 bp, Artificial Sequence
  Synthetic
ccttttctttttggctagtcctgc

SEQ ID NO: 18736 - DNA, 24 bp, Artificial Sequence
  Synthetic
ccctaggccatttagaagttcttt

SEQ ID NO: 18737 - DNA, 25 bp, Artificial Sequence
  Synthetic
gttcctggctcaagataattttgtt

SEQ ID NO: 18738 - DNA, 25 bp, Artificial Sequence
  Synthetic
gcctggtataggatctcctactagg

SEQ ID NO: 18739 - DNA, 25 bp, Artificial Sequence
  Synthetic
gccttgacttactaaatggtctact

SEQ ID NO: 18740 - DNA, 22 bp, Artificial Sequence
  Synthetic
tgcgttattggccacctactgg

SEQ ID NO: 18741 - DNA, 25 bp, Artificial Sequence
  Synthetic
tcttgttctgtggtaatcatgttga

SEQ ID NO: 18742 - DNA, 25 bp, Artificial Sequence
  Synthetic
ggtaacatctgtccagaacttttct

SEQ ID NO: 18743 - DNA, 22 bp, Artificial Sequence
  Synthetic
acacctggaaaatgagctctcg

SEQ ID NO: 18744 - DNA, 25 bp, Artificial Sequence
  Synthetic
gggtgtctccatgtctattatggat

SEQ ID NO: 18745 - DNA, 21 bp, Artificial Sequence
  Synthetic
actcacttgtctggtgcagaa

SEQ ID NO: 18746 - DNA, 25 bp, Artificial Sequence
  Synthetic
gcttgacacatggttttattgatgt

SEQ ID NO: 18747 - DNA, 24 bp, Artificial Sequence
  Synthetic
gcaatgtctcatgtaacatgtgcc

SEQ ID NO: 18748 - DNA, 25 bp, Artificial Sequence
  Synthetic
gagagtgaaacactaatcctgacat

SEQ ID NO: 18749 - DNA, 25 bp, Artificial Sequence
  Synthetic
ttttccctactttatgccaggtatt

SEQ ID NO: 18750 - DNA, 22 bp, Artificial Sequence
  Synthetic
cgcacatccccatgaatttagc

SEQ ID NO: 18751 - DNA, 22 bp, Artificial Sequence
  Synthetic
cagccagtccctgattgctgtt

SEQ ID NO: 18752 - DNA, 25 bp, Artificial Sequence
  Synthetic
tgctgcctatacaaatctttctgtc

SEQ ID NO: 18753 - DNA, 20 bp, Artificial Sequence
  Synthetic
cagcatggagtcaaactgcc

SEQ ID NO: 18754 - DNA, 21 bp, Artificial Sequence
  Synthetic
agggaacacccaggctctacc

SEQ ID NO: 18755 - DNA, 20 bp, Artificial Sequence
  Synthetic
tcccagtgcagattcgatct

SEQ ID NO: 18756 - DNA, 25 bp, Artificial Sequence
  Synthetic
gcaggtttgacttcatggagtattg

SEQ ID NO: 18757 - DNA, 25 bp, Artificial Sequence
  Synthetic
actggatttattgctgtcttgttgt

SEQ ID NO: 18758 - DNA, 25 bp, Artificial Sequence
  Synthetic
tccaggtttttgtaccatgtaatca

SEQ ID NO: 18759 - DNA, 24 bp, Artificial Sequence
  Synthetic
tcctttaatagttttgcaggcggt

SEQ ID NO: 18760 - DNA, 25 bp, Artificial Sequence
  Synthetic
gctcttagatcatccactttttcgt

SEQ ID NO: 18761 - DNA, 20 bp, Artificial Sequence
  Synthetic
gcattaaaggtgccagcagc

SEQ ID NO: 18762 - DNA, 25 bp, Artificial Sequence
  Synthetic
gccccatggaatgttatttctcttt

SEQ ID NO: 18763 - DNA, 21 bp, Artificial Sequence
  Synthetic
tcgatccagccatctgctcca

SEQ ID NO: 18764 - DNA, 25 bp, Artificial Sequence
  Synthetic
cacaatatcaagtgcagtatcccaa

SEQ ID NO: 18765 - DNA, 24 bp, Artificial Sequence
  Synthetic
tccgcgcaataattcttcaaaaag

SEQ ID NO: 18766 - DNA, 25 bp, Artificial Sequence
  Synthetic
gcttgttatacaatgccagggaatt

SEQ ID NO: 18767 - DNA, 24 bp, Artificial Sequence
  Synthetic
tcttgtaactctaattgcactgca

SEQ ID NO: 18768 - DNA, 24 bp, Artificial Sequence
  Synthetic
tccattgtaatctgcatcaccttt

SEQ ID NO: 18769 - DNA, 25 bp, Artificial Sequence
  Synthetic
ggacaatcaccagtaaagcattgtt

SEQ ID NO: 18770 - DNA, 22 bp, Artificial Sequence
  Synthetic
accaataggctccacaggtact

SEQ ID NO: 18771 - DNA, 25 bp, Artificial Sequence
  Synthetic
gcctgaacgtggttcattatttaca

SEQ ID NO: 18772 - DNA, 23 bp, Artificial Sequence
  Synthetic
cgttcaactatttgggtgggagt

SEQ ID NO: 18773 - DNA, 21 bp, Artificial Sequence
  Synthetic
caccttcacggctcactctta

SEQ ID NO: 18774 - DNA, 20 bp, Artificial Sequence
  Synthetic
acatctgagcgtttgcgttt

SEQ ID NO: 18775 - DNA, 25 bp, Artificial Sequence
  Synthetic
tgggatctggacacagtaatctaaa

SEQ ID NO: 18776 - DNA, 25 bp, Artificial Sequence
  Synthetic
gtgcaacctactataaacacctgat

SEQ ID NO: 18777 - DNA, 24 bp, Artificial Sequence
  Synthetic
ctccggagatatcctttgacattt

SEQ ID NO: 18778 - DNA, 25 bp, Artificial Sequence
  Synthetic
cccaatcatctaacactgttggatt

SEQ ID NO: 18779 - DNA, 25 bp, Artificial Sequence
  Synthetic
cagtttttctggatactttcggaga

SEQ ID NO: 18780 - DNA, 21 bp, Artificial Sequence
  Synthetic
gacaaacagctttcgcaacag

SEQ ID NO: 18781 - DNA, 20 bp, Artificial Sequence
  Synthetic
atgactcctcctctggggtg

SEQ ID NO: 18782 - DNA, 23 bp, Artificial Sequence
  Synthetic
cctagtccactgtcctgaaacag

SEQ ID NO: 18783 - DNA, 24 bp, Artificial Sequence
  Synthetic
gcttgagaagccatttgatgattt

SEQ ID NO: 18784 - DNA, 25 bp, Artificial Sequence
  Synthetic
agtcattaattgctcttgtagtgca

SEQ ID NO: 18785 - DNA, 20 bp, Artificial Sequence
  Synthetic
ttttcctcttcggcctcggc

SEQ ID NO: 18786 - DNA, 21 bp, Artificial Sequence
  Synthetic
tgacatcttctggacagtccc

SEQ ID NO: 18787 - DNA, 25 bp, Artificial Sequence
  Synthetic
gcatctggagtgattggtagtactt

SEQ ID NO: 18788 - DNA, 25 bp, Artificial Sequence
  Synthetic
aggaacctgttgaacaaatctatga

SEQ ID NO: 18789 - DNA, 25 bp, Artificial Sequence
  Synthetic
gtgtcaggaatgttaacaaatgtgt

SEQ ID NO: 18790 - DNA, 24 bp, Artificial Sequence
  Synthetic
gcaaactggttaggatctggtaat

SEQ ID NO: 18791 - DNA, 25 bp, Artificial Sequence
  Synthetic
cccgccgtccataaaaaaataattt

SEQ ID NO: 18792 - DNA, 25 bp, Artificial Sequence
  Synthetic
ccagctgccagttttctaatattga

SEQ ID NO: 18793 - DNA, 22 bp, Artificial Sequence
  Synthetic
ggtcgggtatcaaatacagcag

SEQ ID NO: 18794 - DNA, 25 bp, Artificial Sequence
  Synthetic
cctgtcttcctgatgtgtacttctt

SEQ ID NO: 18795 - DNA, 21 bp, Artificial Sequence
  Synthetic
ggtccatttctgttccaccac

SEQ ID NO: 18796 - DNA, 25 bp, Artificial Sequence
  Synthetic
cctttgttattgtcagctgtgattc

SEQ ID NO: 18797 - DNA, 21 bp, Artificial Sequence
  Synthetic
cctgacaatgttcctagcagc

SEQ ID NO: 18798 - DNA, 25 bp, Artificial Sequence
  Synthetic
gtccaaccattgtgaattcctcata

SEQ ID NO: 18799 - DNA, 21 bp, Artificial Sequence
  Synthetic
ggagttggtgcatgggattca

SEQ ID NO: 18800 - DNA, 25 bp, Artificial Sequence
  Synthetic
tgtttcactaacttcttcaggggat

SEQ ID NO: 18801 - DNA, 21 bp, Artificial Sequence
  Synthetic
cccaaaacatcacgcatctgc

SEQ ID NO: 18802 - DNA, 21 bp, Artificial Sequence
  Synthetic
tcctgctgttccttcatctgg

SEQ ID NO: 18803 - DNA, 21 bp, Artificial Sequence
  Synthetic
actttggttccgtttgacacg

SEQ ID NO: 18804 - DNA, 25 bp, Artificial Sequence
  Synthetic
tcttcattcacgaatttcccaggat

SEQ ID NO: 18805 - DNA, 23 bp, Artificial Sequence
  Synthetic
ccagtttgtttccactcccatat

SEQ ID NO: 18806 - DNA, 22 bp, Artificial Sequence
  Synthetic
ttgtccctccactatgatagca

SEQ ID NO: 18807 - DNA, 25 bp, Artificial Sequence
  Synthetic
tctgaaaccataccaaccatcaatt

SEQ ID NO: 18808 - DNA, 22 bp, Artificial Sequence
  Synthetic
tgtccatttctgaatcagccag

SEQ ID NO: 18809 - DNA, 23 bp, Artificial Sequence
  Synthetic
acttgccattctgccttaacaag

SEQ ID NO: 18810 - DNA, 25 bp, Artificial Sequence
  Synthetic
gcttttgacatatagcacagcgaat

SEQ ID NO: 18811 - DNA, 25 bp, Artificial Sequence
  Synthetic
ttctgtaacgttgtatgtcctgttt

SEQ ID NO: 18812 - DNA, 21 bp, Artificial Sequence
  Synthetic
tttcctgattttcctgcaccc

SEQ ID NO: 18813 - DNA, 24 bp, Artificial Sequence
  Synthetic
gcgattcttgccacatttaaatct

SEQ ID NO: 18814 - DNA, 20 bp, Artificial Sequence
  Synthetic
cagcacgttgggcatattca

SEQ ID NO: 18815 - DNA, 20 bp, Artificial Sequence
  Synthetic
acgcatctaaacgtttggcc

SEQ ID NO: 18816 - DNA, 25 bp, Artificial Sequence
  Synthetic
gcgtccctgtttttttaaacacttt

SEQ ID NO: 18817 - DNA, 22 bp, Artificial Sequence
  Synthetic
ggtcggggtggggtctttgtat

SEQ ID NO: 18818 - DNA, 25 bp, Artificial Sequence
  Synthetic
cacgcagcaacaactataaacaata

SEQ ID NO: 18819 - DNA, 21 bp, Artificial Sequence
  Synthetic
ctaaaaaccacagcagcagcc

SEQ ID NO: 18820 - DNA, 25 bp, Artificial Sequence
  Synthetic
tgcagaggacgtaatattaaaccca

SEQ ID NO: 18821 - DNA, 21 bp, Artificial Sequence
  Synthetic
tgatggcctagtgattgggct

SEQ ID NO: 18822 - DNA, 23 bp, Artificial Sequence
  Synthetic
gaggaggcagataaaccttgttg

SEQ ID NO: 18823 - DNA, 25 bp, Artificial Sequence
  Synthetic
accatcctgaataacactgttttgt

SEQ ID NO: 18824 - DNA, 25 bp, Artificial Sequence
  Synthetic
cgtctagtatgtcaggattcatggt

SEQ ID NO: 18825 - DNA, 25 bp, Artificial Sequence
  Synthetic
gcatgtgcttgctaaatttaatgga

SEQ ID NO: 18826 - DNA, 25 bp, Artificial Sequence
  Synthetic
cttaattgaaatgtgtctgcctgtg

SEQ ID NO: 18827 - DNA, 25 bp, Artificial Sequence
  Synthetic
cactgtgccattgtcatatttttca

SEQ ID NO: 18828 - DNA, 22 bp, Artificial Sequence
  Synthetic
cctccgaccgtctcttcagtct

SEQ ID NO: 18829 - DNA, 20 bp, Artificial Sequence
  Synthetic
agacctgctgctggtactga

SEQ ID NO: 18830 - DNA, 25 bp, Artificial Sequence
  Synthetic
ccaactacttctgaaactggatcaa

SEQ ID NO: 18831 - DNA, 24 bp, Artificial Sequence
  Synthetic
caggccatttacaagtggagttaa

SEQ ID NO: 18832 - DNA, 20 bp, Artificial Sequence
  Synthetic
accactgggcgtcggataat

SEQ ID NO: 18833 - DNA, 20 bp, Artificial Sequence
  Synthetic
gggctagcacatcagcttcc

SEQ ID NO: 18834 - DNA, 25 bp, Artificial Sequence
  Synthetic
acgggaattaagtaatcccatctga

SEQ ID NO: 18835 - DNA, 22 bp, Artificial Sequence
  Synthetic
atgagtcagcaatgccttgttt

SEQ ID NO: 18836 - DNA, 23 bp, Artificial Sequence
  Synthetic
acgatcgttaacggttggatttg

SEQ ID NO: 18837 - DNA, 22 bp, Artificial Sequence
  Synthetic
gccgtagtgctggctagtacca

SEQ ID NO: 18838 - DNA, 25 bp, Artificial Sequence
  Synthetic
ccacaatatcaagtgcaatatccca

SEQ ID NO: 18839 - DNA, 21 bp, Artificial Sequence
  Synthetic
gagctctggattggcataagc

SEQ ID NO: 18840 - DNA, 25 bp, Artificial Sequence
  Synthetic
tgaccagaactatccagatctgtat

SEQ ID NO: 18841 - DNA, 25 bp, Artificial Sequence
  Synthetic
tgttgcatggctctattttgtacaa

SEQ ID NO: 18842 - DNA, 25 bp, Artificial Sequence
  Synthetic
tcttcccaagaatccatgatttgat

SEQ ID NO: 18843 - DNA, 22 bp, Artificial Sequence
  Synthetic
gaccacagtctcagctctacta

SEQ ID NO: 18844 - DNA, 25 bp, Artificial Sequence
  Synthetic
gtgttcctgatgattctgtctgtat

SEQ ID NO: 18845 - DNA, 25 bp, Artificial Sequence
  Synthetic
cctgcatgtcgatatagatcaggta

SEQ ID NO: 18846 - DNA, 24 bp, Artificial Sequence
  Synthetic
ttgactttgagtggtaatggttct

SEQ ID NO: 18847 - DNA, 20 bp, Artificial Sequence
  Synthetic
tggcatcgaacagcattcct

SEQ ID NO: 18848 - DNA, 23 bp, Artificial Sequence
  Synthetic
ttcccaactccttttgcgataat

SEQ ID NO: 18849 - DNA, 25 bp, Artificial Sequence
  Synthetic
gggatgatcagtctatccaataacc

SEQ ID NO: 18850 - DNA, 21 bp, Artificial Sequence
  Synthetic
tctgagtgttcagcagcctag

SEQ ID NO: 18851 - DNA, 25 bp, Artificial Sequence
  Synthetic
ctccttgattaggtggttgattgat

SEQ ID NO: 18852 - DNA, 25 bp, Artificial Sequence
  Synthetic
ccagtattccatctcgaatttggat

SEQ ID NO: 18853 - DNA, 20 bp, Artificial Sequence
  Synthetic
gaagaccagacgtgcacctc

SEQ ID NO: 18854 - DNA, 22 bp, Artificial Sequence
  Synthetic
aagacctccatacccgagaaat

SEQ ID NO: 18855 - DNA, 21 bp, Artificial Sequence
  Synthetic
tgactgggttcactctcgatt

SEQ ID NO: 18856 - DNA, 24 bp, Artificial Sequence
  Synthetic
gcagagtttgaaccgtaagcattt

SEQ ID NO: 18857 - DNA, 25 bp, Artificial Sequence
  Synthetic
ctctgaccaaaagacacatctagat

SEQ ID NO: 18858 - DNA, 25 bp, Artificial Sequence
  Synthetic
gcaggtattaaagaggcatattgca

SEQ ID NO: 18859 - DNA, 25 bp, Artificial Sequence
  Synthetic
ccttcctcctgataaatgaatccac

SEQ ID NO: 18860 - DNA, 25 bp, Artificial Sequence
  Synthetic
agtgtaaaatttgcacgtgtttgtg

SEQ ID NO: 18861 - DNA, 23 bp, Artificial Sequence
  Synthetic
ctacgactccagcatcaaagatg

SEQ ID NO: 18862 - DNA, 20 bp, Artificial Sequence
  Synthetic
aaaccattgctagcggcctc

SEQ ID NO: 18863 - DNA, 25 bp, Artificial Sequence
  Synthetic
cttagtaagccaagcacaaacgtaa

SEQ ID NO: 18864 - DNA, 25 bp, Artificial Sequence
  Synthetic
ccacaagtacattgaactaatgcac

SEQ ID NO: 18865 - DNA, 25 bp, Artificial Sequence
  Synthetic
atgttcctcttctacaaaagtggaa

SEQ ID NO: 18866 - DNA, 24 bp, Artificial Sequence
  Synthetic
acagcacagtcaaagacagtttga

SEQ ID NO: 18867 - DNA, 20 bp, Artificial Sequence
  Synthetic
agcagtgctacgttcaacac

SEQ ID NO: 18868 - DNA, 23 bp, Artificial Sequence
  Synthetic
tcctcaaaccaagactcgttact

SEQ ID NO: 18869 - DNA, 25 bp, Artificial Sequence
  Synthetic
agtgtctaaaaacgcattataggcc

SEQ ID NO: 18870 - DNA, 25 bp, Artificial Sequence
  Synthetic
gtcaaaatgtgtagggtctgcaatt

SEQ ID NO: 18871 - DNA, 25 bp, Artificial Sequence
  Synthetic
tcccagtcaccttcatgtttaattt

SEQ ID NO: 18872 - DNA, 25 bp, Artificial Sequence
  Synthetic
gcatagtcaccatcaagtataccag

SEQ ID NO: 18873 - DNA, 22 bp, Artificial Sequence
  Synthetic
agtgggcgtacaaaacaaaaca

SEQ ID NO: 18874 - DNA, 25 bp, Artificial Sequence
  Synthetic
gcgttcaacttctctttaacaacaa

SEQ ID NO: 18875 - DNA, 25 bp, Artificial Sequence
  Synthetic
tggttctattttaggttgctcaact

SEQ ID NO: 18876 - DNA, 22 bp, Artificial Sequence
  Synthetic
acgtgtgcatcgttgaacatta

SEQ ID NO: 18877 - DNA, 25 bp, Artificial Sequence
  Synthetic
cgacccaatcaacatctattgcttt

SEQ ID NO: 18878 - DNA, 25 bp, Artificial Sequence
  Synthetic
cctctaacacttctaacacgtgaat

SEQ ID NO: 18879 - DNA, 23 bp, Artificial Sequence
  Synthetic
agctgctgacgcttttaagttat

SEQ ID NO: 18880 - DNA, 25 bp, Artificial Sequence
  Synthetic
tggctaaattgacttaactcttggt

SEQ ID NO: 18881 - DNA, 25 bp, Artificial Sequence
  Synthetic
gggaatctcttaagtctagcactct

SEQ ID NO: 18882 - DNA, 25 bp, Artificial Sequence
  Synthetic
aacgatgtgcattagaaatagcact

SEQ ID NO: 18883 - DNA, 23 bp, Artificial Sequence
  Synthetic
gcgtgacagcttggttttcatta

SEQ ID NO: 18884 - DNA, 25 bp, Artificial Sequence
  Synthetic
gccagcgacagtattaacaatttca

SEQ ID NO: 18885 - DNA, 20 bp, Artificial Sequence
  Synthetic
attcacctacgcggcagtat

SEQ ID NO: 18886 - DNA, 25 bp, Artificial Sequence
  Synthetic
gcaattaaatatgcagcacaccaaa

SEQ ID NO: 18887 - DNA, 25 bp, Artificial Sequence
  Synthetic
ccagcctgtaatgtagaaccataac

SEQ ID NO: 18888 - DNA, 25 bp, Artificial Sequence
  Synthetic
ctaaaagaatgtctaggtgtgtgca

SEQ ID NO: 18889 - DNA, 25 bp, Artificial Sequence
  Synthetic
gcaaccacattaactgttaacatct

SEQ ID NO: 18890 - DNA, 25 bp, Artificial Sequence
  Synthetic
acccaaatagtggtggtataaacaa

SEQ ID NO: 18891 - DNA, 23 bp, Artificial Sequence
  Synthetic
accaatgtgtacaacgctcttta

SEQ ID NO: 18892 - DNA, 25 bp, Artificial Sequence
  Synthetic
ggctggactaacacagaaatcataa

SEQ ID NO: 18893 - DNA, 24 bp, Artificial Sequence
  Synthetic
gcccactcctttgaattagaagct

SEQ ID NO: 18894 - DNA, 25 bp, Artificial Sequence
  Synthetic
gcttgttcagccattctgttaattt

SEQ ID NO: 18895 - DNA, 25 bp, Artificial Sequence
  Synthetic
tgcacattcttaccatcattatcct

SEQ ID NO: 18896 - DNA, 25 bp, Artificial Sequence
  Synthetic
ccagagtcatgttcccatttaacat

SEQ ID NO: 18897 - DNA, 25 bp, Artificial Sequence
  Synthetic
acatctttacacaattgccaacagg

SEQ ID NO: 18898 - DNA, 24 bp, Artificial Sequence
  Synthetic
cccggactcgtttaaataactgtt

SEQ ID NO: 18899 - DNA, 25 bp, Artificial Sequence
  Synthetic
cagtctttttcatcaaagttacgca

SEQ ID NO: 18900 - DNA, 21 bp, Artificial Sequence
  Synthetic
tgacgtgcagtagggtattcc

SEQ ID NO: 18901 - DNA, 25 bp, Artificial Sequence
  Synthetic
cgggtacaccatcaataaacacttt

SEQ ID NO: 18902 - DNA, 25 bp, Artificial Sequence
  Synthetic
cccctgagaacgtaagaagtcataa

SEQ ID NO: 18903 - DNA, 20 bp, Artificial Sequence
  Synthetic
aagagacgccacccactgta

SEQ ID NO: 18904 - DNA, 25 bp, Artificial Sequence
  Synthetic
caatgtaaccaagtccagcataagt

SEQ ID NO: 18905 - DNA, 24 bp, Artificial Sequence
  Synthetic
ggtaggcatctatagccagagaaa

SEQ ID NO: 18906 - DNA, 25 bp, Artificial Sequence
  Synthetic
gcagaacttttgtacaaaccaaaga

SEQ ID NO: 18907 - DNA, 25 bp, Artificial Sequence
  Synthetic
accgtaatctactttctcaaacaca

SEQ ID NO: 18908 - DNA, 21 bp, Artificial Sequence
  Synthetic
tcgctccagggtaatacacac

SEQ ID NO: 18909 - DNA, 25 bp, Artificial Sequence
  Synthetic
tgttgaggatcaccaacatatacaa

SEQ ID NO: 18910 - DNA, 25 bp, Artificial Sequence
  Synthetic
cctggcagctacataattttgacta

SEQ ID NO: 18911 - DNA, 25 bp, Artificial Sequence
  Synthetic
agacaatgacaaataagtagtggca

SEQ ID NO: 18912 - DNA, 21 bp, Artificial Sequence
  Synthetic
tgccaacattgtcacctgtga

SEQ ID NO: 18913 - DNA, 25 bp, Artificial Sequence
  Synthetic
gctccaatcttaacaaaataacgca

SEQ ID NO: 18914 - DNA, 25 bp, Artificial Sequence
  Synthetic
gcccttgtttatggcattttcatta

SEQ ID NO: 18915 - DNA, 22 bp, Artificial Sequence
  Synthetic
cccaccatttacaccttcaagg

SEQ ID NO: 18916 - DNA, 23 bp, Artificial Sequence
  Synthetic
tctgtgaatgtctgccacaaatt

SEQ ID NO: 18917 - DNA, 20 bp, Artificial Sequence
  Synthetic
aagcttgtcaagggacgctc

SEQ ID NO: 18918 - DNA, 25 bp, Artificial Sequence
  Synthetic
cgaccttgggtataaaaaccatcat

SEQ ID NO: 18919 - DNA, 25 bp, Artificial Sequence
  Synthetic
caacagtcaaatccaaagacttcaa

SEQ ID NO: 18920 - DNA, 25 bp, Artificial Sequence
  Synthetic
gcacccaagtgtaacactctcatat

SEQ ID NO: 18921 - DNA, 25 bp, Artificial Sequence
  Synthetic
cgccaaaatacataatttgcgtgta

SEQ ID NO: 18922 - DNA, 25 bp, Artificial Sequence
  Synthetic
cgttgcaaacagagtaactagtgtt

SEQ ID NO: 18923 - DNA, 25 bp, Artificial Sequence
  Synthetic
acgtagtttcattgccaatagtagt

SEQ ID NO: 18924 - DNA, 22 bp, Artificial Sequence
  Synthetic
agcgacacaatagacacaggta

SEQ ID NO: 18925 - DNA, 25 bp, Artificial Sequence
  Synthetic
tgaagttgatgtgtacgtaattcca

SEQ ID NO: 18926 - DNA, 25 bp, Artificial Sequence
  Synthetic
gaaacattacgtggttgaacagcaa

SEQ ID NO: 18927 - DNA, 25 bp, Artificial Sequence
  Synthetic
gctaaggttgtagtcaccaaaacta

SEQ ID NO: 18928 - DNA, 25 bp, Artificial Sequence
  Synthetic
tgcctgaattgctaatgaaaatggt

SEQ ID NO: 18929 - DNA, 25 bp, Artificial Sequence
  Synthetic
ccaatctaccagtaatcagcctatc

SEQ ID NO: 18930 - DNA, 25 bp, Artificial Sequence
  Synthetic
tgccttctttgtaaagagcaagatt

SEQ ID NO: 18931 - DNA, 25 bp, Artificial Sequence
  Synthetic
gtgctaatttcactggtcaaattca

SEQ ID NO: 18932 - DNA, 24 bp, Artificial Sequence
  Synthetic
tgtggatcttttcaacgtcgtaat

SEQ ID NO: 18933 - DNA, 25 bp, Artificial Sequence
  Synthetic
aaaattacagcaatcaaagttgcgt

SEQ ID NO: 18934 - DNA, 23 bp, Artificial Sequence
  Synthetic
atcactataagcaccacacacca

SEQ ID NO: 18935 - DNA, 21 bp, Artificial Sequence
  Synthetic
agcccaggtgtcaaagattga

SEQ ID NO: 18936 - DNA, 21 bp, Artificial Sequence
  Synthetic
acgtagaaaacccagcctgtg

SEQ ID NO: 18937 - DNA, 25 bp, Artificial Sequence
  Synthetic
ttctgaaacgtttttgaacattcca

SEQ ID NO: 18938 - DNA, 23 bp, Artificial Sequence
  Synthetic
acctaaagatttaagagccgcag

SEQ ID NO: 18939 - DNA, 25 bp, Artificial Sequence
  Synthetic
ggccaaaacattgtgtgacattaga

SEQ ID NO: 18940 - DNA, 23 bp, Artificial Sequence
  Synthetic
gagatgggttgaattctagtgca

SEQ ID NO: 18941 - DNA, 23 bp, Artificial Sequence
  Synthetic
accactggcttaccattgtgtat

SEQ ID NO: 18942 - DNA, 20 bp, Artificial Sequence
  Synthetic
ccaggtgtggcaaatggaca

SEQ ID NO: 18943 - DNA, 21 bp, Artificial Sequence
  Synthetic
agaaacatctgtcccatcgct

SEQ ID NO: 18944 - DNA, 22 bp, Artificial Sequence
  Synthetic
gcgatgctaccttttccaccct

SEQ ID NO: 18945 - DNA, 25 bp, Artificial Sequence
  Synthetic
ggcattacaccctctgtaaagctaa

SEQ ID NO: 18946 - DNA, 25 bp, Artificial Sequence
  Synthetic
ggcgcatttcgtatcttttatacat

SEQ ID NO: 18947 - DNA, 20 bp, Artificial Sequence
  Synthetic
tccacttgtgcaccaccttt

SEQ ID NO: 18948 - DNA, 24 bp, Artificial Sequence
  Synthetic
gcagaagtgtcagaagcagattct

SEQ ID NO: 18949 - DNA, 25 bp, Artificial Sequence
  Synthetic
tcagctaatgtggtttgttctactt

SEQ ID NO: 18950 - DNA, 22 bp, Artificial Sequence
  Synthetic
cgtgtcgggggttaccacatct

SEQ ID NO: 18951 - DNA, 25 bp, Artificial Sequence
  Synthetic
acagaaatatatgatggggtggcat

SEQ ID NO: 18952 - DNA, 22 bp, Artificial Sequence
  Synthetic
tgacgtgggcggtttaagaagt

SEQ ID NO: 18953 - DNA, 20 bp, Artificial Sequence
  Synthetic
agaaacaccctgaaggcctg

SEQ ID NO: 18954 - DNA, 23 bp, Artificial Sequence
  Synthetic
ggtaaccacagtgacatctgaaa

SEQ ID NO: 18955 - DNA, 21 bp, Artificial Sequence
  Synthetic
ccaacgcaagcttgttaggat

SEQ ID NO: 18956 - DNA, 23 bp, Artificial Sequence
  Synthetic
gccatcccgtgtaaaaaagtgac

SEQ ID NO: 18957 - DNA, 20 bp, Artificial Sequence
  Synthetic
ggggtacaaagcctaactgc

SEQ ID NO: 18958 - DNA, 19 bp, Artificial Sequence
  Synthetic
tgcccatctccacgcgaag

SEQ ID NO: 18959 - DNA, 22 bp, Artificial Sequence
  Synthetic
tgcttgtgaggcatgactccag

SEQ ID NO: 18960 - DNA, 19 bp, Artificial Sequence
  Synthetic
gcgttcagcagcgcctcag

SEQ ID NO: 18961 - DNA, 22 bp, Artificial Sequence
  Synthetic
ccaccggcatagtgatggtcac

SEQ ID NO: 18962 - DNA, 22 bp, Artificial Sequence
  Synthetic
gccgtgctgcacctcaaacatt

SEQ ID NO: 18963 - DNA, 19 bp, Artificial Sequence
  Synthetic
acaaggcaggacgcagccc

SEQ ID NO: 18964 - DNA, 23 bp, Artificial Sequence
  Synthetic
ctacctgaactaagactgggtgt

SEQ ID NO: 18965 - DNA, 22 bp, Artificial Sequence
  Synthetic
cgaggcaggcttacatgggagt

SEQ ID NO: 18966 - DNA, 19 bp, Artificial Sequence
  Synthetic
cgggttggtccagggcctt

SEQ ID NO: 18967 - DNA, 20 bp, Artificial Sequence
  Synthetic
ctcgtctgggttcttggccc

SEQ ID NO: 18968 - DNA, 20 bp, Artificial Sequence
  Synthetic
aagaggcccctctccgcgag

SEQ ID NO: 18969 - DNA, 22 bp, Artificial Sequence
  Synthetic
cctctggtaggactgggcgacc

SEQ ID NO: 18970 - DNA, 21 bp, Artificial Sequence
  Synthetic
cgtaaacgcgctggactgaga

SEQ ID NO: 18971 - DNA, 22 bp, Artificial Sequence
  Synthetic
gccttcttaggagctgtccgag

SEQ ID NO: 18972 - DNA, 22 bp, Artificial Sequence
  Synthetic
gagttgagctgcctaccatgct

SEQ ID NO: 18973 - DNA, 22 bp, Artificial Sequence
  Synthetic
cctcgtcttcggtctcagcttc

SEQ ID NO: 18974 - DNA, 20 bp, Artificial Sequence
  Synthetic
aggggctggtctgtgacctg

SEQ ID NO: 18975 - DNA, 18 bp, Artificial Sequence
  Synthetic
agtccaggcccgggacat

SEQ ID NO: 18976 - DNA, 19 bp, Artificial Sequence
  Synthetic
agagcccagaccggtctcc

SEQ ID NO: 18977 - DNA, 22 bp, Artificial Sequence
  Synthetic
gcaacgtccaggagctgttctc

SEQ ID NO: 18978 - DNA, 19 bp, Artificial Sequence
  Synthetic
tcgtggtggaggctgccag

SEQ ID NO: 18979 - DNA, 19 bp, Artificial Sequence
  Synthetic
cacgttggaccccaagcgg

SEQ ID NO: 18980 - DNA, 19 bp, Artificial Sequence
  Synthetic
ggcggagagaatggaggcc

SEQ ID NO: 18981 - DNA, 18 bp, Artificial Sequence
  Synthetic
aatgcggccctgcacgtg

SEQ ID NO: 18982 - DNA, 22 bp, Artificial Sequence
  Synthetic
aaagctggaagcgcctcctatc

SEQ ID NO: 18983 - DNA, 22 bp, Artificial Sequence
  Synthetic
gccctcctttggggatgatgca

SEQ ID NO: 18984 - DNA, 19 bp, Artificial Sequence
  Synthetic
acccgtgggacaaacgccc

SEQ ID NO: 18985 - DNA, 19 bp, Artificial Sequence
  Synthetic
tccccccgccactactcca

SEQ ID NO: 18986 - DNA, 20 bp, Artificial Sequence
  Synthetic
ccgctttctggtctcgggtg

SEQ ID NO: 18987 - DNA, 20 bp, Artificial Sequence
  Synthetic
cggccgccttcatcgagttc

SEQ ID NO: 18988 - DNA, 22 bp, Artificial Sequence
  Synthetic
gcttgaagaagagctcggggac

SEQ ID NO: 18989 - DNA, 22 bp, Artificial Sequence
  Synthetic
acggcgcagttgacgatagaga

SEQ ID NO: 18990 - DNA, 19 bp, Artificial Sequence
  Synthetic
cgggaggcagatgttggcc

SEQ ID NO: 18991 - DNA, 20 bp, Artificial Sequence
  Synthetic
agacaacgtgggcctcaacg

SEQ ID NO: 18992 - DNA, 21 bp, Artificial Sequence
  Synthetic
cgagggtgtctctggccttgc

SEQ ID NO: 18993 - DNA, 21 bp, Artificial Sequence
  Synthetic
ctcatgagcaccctggcaaca

SEQ ID NO: 18994 - DNA, 19 bp, Artificial Sequence
  Synthetic
aatccgcatggagcccccg

SEQ ID NO: 18995 - DNA, 18 bp, Artificial Sequence
  Synthetic
tccaccacgtggcgggtt

SEQ ID NO: 18996 - DNA, 22 bp, Artificial Sequence
  Synthetic
ccttcagatatgccacccccca

SEQ ID NO: 18997 - DNA, 20 bp, Artificial Sequence
  Synthetic
cccgagggtcatgggctcat

SEQ ID NO: 18998 - DNA, 19 bp, Artificial Sequence
  Synthetic
tcagtcagggaagccgccg

SEQ ID NO: 18999 - DNA, 20 bp, Artificial Sequence
  Synthetic
cagcagcgtgttcacaaact

SEQ ID NO: 19000 - DNA, 20 bp, Artificial Sequence
  Synthetic
gcctgtgctaccggacacgg

SEQ ID NO: 19001 - DNA, 19 bp, Artificial Sequence
  Synthetic
aacggggtggatttggcgt

SEQ ID NO: 19002 - DNA, 21 bp, Artificial Sequence
  Synthetic
caccctcctcttgaacaggcc

SEQ ID NO: 19003 - DNA, 21 bp, Artificial Sequence
  Synthetic
ggacattgtccccccctgact

SEQ ID NO: 19004 - DNA, 19 bp, Artificial Sequence
  Synthetic
acttggctgaaccaccggc

SEQ ID NO: 19005 - DNA, 19 bp, Artificial Sequence
  Synthetic
ctgaagcccggtgcccaaa

SEQ ID NO: 19006 - DNA, 22 bp, Artificial Sequence
  Synthetic
agccagatgttcaggaaccaaa

SEQ ID NO: 19007 - DNA, 20 bp, Artificial Sequence
  Synthetic
gggaacagcaggggaggtcc

SEQ ID NO: 19008 - DNA, 22 bp, Artificial Sequence
  Synthetic
gctctcgctgtagtcagactcg

SEQ ID NO: 19009 - DNA, 19 bp, Artificial Sequence
  Synthetic
ttggtgctgtgcccctgcc

SEQ ID NO: 19010 - DNA, 18 bp, Artificial Sequence
  Synthetic
catgcaccaggggcagct

SEQ ID NO: 19011 - DNA, 19 bp, Artificial Sequence
  Synthetic
gcagcgggtcagcagtcat

SEQ ID NO: 19012 - DNA, 21 bp, Artificial Sequence
  Synthetic
gggaagagcacatgcagcctg

SEQ ID NO: 19013 - DNA, 21 bp, Artificial Sequence
  Synthetic
gctgatggtgcttgccggatg

SEQ ID NO: 19014 - DNA, 19 bp, Artificial Sequence
  Synthetic
atccgggccttgacgtggg

SEQ ID NO: 19015 - DNA, 21 bp, Artificial Sequence
  Synthetic
gctctacgccttcctccgcag

SEQ ID NO: 19016 - DNA, 21 bp, Artificial Sequence
  Synthetic
ggaccaacaacccccacctgt

SEQ ID NO: 19017 - DNA, 25 bp, Artificial Sequence
  Synthetic
gtctcagttgagcattcacctttta

SEQ ID NO: 19018 - DNA, 22 bp, Artificial Sequence
  Synthetic
tgccggactctgtcatccgtaa

SEQ ID NO: 19019 - DNA, 22 bp, Artificial Sequence
  Synthetic
ccgatccgacccgctctacttt

SEQ ID NO: 19020 - DNA, 22 bp, Artificial Sequence
  Synthetic
gcaaaaggggccctattctgct

SEQ ID NO: 19021 - DNA, 19 bp, Artificial Sequence
  Synthetic
gcacagtgcggctcaggct

SEQ ID NO: 19022 - DNA, 20 bp, Artificial Sequence
  Synthetic
caccgacaacgttctgcgcc

SEQ ID NO: 19023 - DNA, 19 bp, Artificial Sequence
  Synthetic
tcccttcgcaggagggcca

SEQ ID NO: 19024 - DNA, 19 bp, Artificial Sequence
  Synthetic
tcccgatggcaggtgcacg

SEQ ID NO: 19025 - DNA, 20 bp, Artificial Sequence
  Synthetic
ggggctccggtgcctttttc

SEQ ID NO: 19026 - DNA, 21 bp, Artificial Sequence
  Synthetic
gcacacgttgttttggcaata

SEQ ID NO: 19027 - DNA, 22 bp, Artificial Sequence
  Synthetic
cggccgtttcaaatgctgtgga

SEQ ID NO: 19028 - DNA, 18 bp, Artificial Sequence
  Synthetic
tgctgtccaccgccctgt

SEQ ID NO: 19029 - DNA, 22 bp, Artificial Sequence
  Synthetic
cggggtttacagtggcctcatt

SEQ ID NO: 19030 - DNA, 20 bp, Artificial Sequence
  Synthetic
gctgaagcggctaagtggga

SEQ ID NO: 19031 - DNA, 19 bp, Artificial Sequence
  Synthetic
tcccgctctgccagctcga

SEQ ID NO: 19032 - DNA, 22 bp, Artificial Sequence
  Synthetic
tgctcttcaaccttggcagtgt

SEQ ID NO: 19033 - DNA, 19 bp, Artificial Sequence
  Synthetic
aggcaggcgtccttgggtg

SEQ ID NO: 19034 - DNA, 20 bp, Artificial Sequence
  Synthetic
tggcgccctaagaccacctg

SEQ ID NO: 19035 - DNA, 18 bp, Artificial Sequence
  Synthetic
gcagcacacgcccccatt

SEQ ID NO: 19036 - DNA, 21 bp, Artificial Sequence
  Synthetic
aaggctggcaaagatccccag

SEQ ID NO: 19037 - DNA, 22 bp, Artificial Sequence
  Synthetic
tcagcctacaagagcacccaga

SEQ ID NO: 19038 - DNA, 22 bp, Artificial Sequence
  Synthetic
gccgagaagaccttctcctgcc

SEQ ID NO: 19039 - DNA, 22 bp, Artificial Sequence
  Synthetic
gccatcaagtgcacgtgcaacg

SEQ ID NO: 19040 - DNA, 20 bp, Artificial Sequence
  Synthetic
gccgggacaagctcagcctc

SEQ ID NO: 19041 - DNA, 20 bp, Artificial Sequence
  Synthetic
aggaggccgggcgctatagg

SEQ ID NO: 19042 - DNA, 21 bp, Artificial Sequence
  Synthetic
gggacgtggtctactgggagc

SEQ ID NO: 19043 - DNA, 20 bp, Artificial Sequence
  Synthetic
cgctgtgtgggcgagctgat

SEQ ID NO: 19044 - DNA, 22 bp, Artificial Sequence
  Synthetic
agctagagaaggagccccatgg

SEQ ID NO: 19045 - DNA, 22 bp, Artificial Sequence
  Synthetic
tgtggctgcgttacaccgatat

SEQ ID NO: 19046 - DNA, 22 bp, Artificial Sequence
  Synthetic
ccctggccacctaccctcttag

SEQ ID NO: 19047 - DNA, 22 bp, Artificial Sequence
  Synthetic
tcaaggcctccctgaggaagga

SEQ ID NO: 19048 - DNA, 21 bp, Artificial Sequence
  Synthetic
cctcccctacggttaccccac

SEQ ID NO: 19049 - DNA, 23 bp, Artificial Sequence
  Synthetic
cgagtcagccatggaagaagaaa

SEQ ID NO: 19050 - DNA, 25 bp, Artificial Sequence
  Synthetic
aggtagtactaaagcatgcaaatct

SEQ ID NO: 19051 - DNA, 25 bp, Artificial Sequence
  Synthetic
cgtttgtactggagaaccaactaac

SEQ ID NO: 19052 - DNA, 25 bp, Artificial Sequence
  Synthetic
tgaaagaagaaaatggcaactggtg

SEQ ID NO: 19053 - DNA, 24 bp, Artificial Sequence
  Synthetic
ggtctatttgtgtggcgagttttc

SEQ ID NO: 19054 - DNA, 23 bp, Artificial Sequence
  Synthetic
accatatctttgggcatctgatg

SEQ ID NO: 19055 - DNA, 22 bp, Artificial Sequence
  Synthetic
cgaaaacggtcgtgtaggtctt

SEQ ID NO: 19056 - DNA, 25 bp, Artificial Sequence
  Synthetic
aggttggggttcttcaatttcaaat

SEQ ID NO: 19057 - DNA, 25 bp, Artificial Sequence
  Synthetic
tgcctccatgaaagtaatatccagt

SEQ ID NO: 19058 - DNA, 25 bp, Artificial Sequence
  Synthetic
gcatttccaaatccaaattcacaca

SEQ ID NO: 19059 - DNA, 25 bp, Artificial Sequence
  Synthetic
tgcaggacattttgtagctaatgat

SEQ ID NO: 19060 - DNA, 25 bp, Artificial Sequence
  Synthetic
ggtatgttggcttggctttatactc

SEQ ID NO: 19061 - DNA, 25 bp, Artificial Sequence
  Synthetic
cgcatggtagcctatacatattgtg

SEQ ID NO: 19062 - DNA, 25 bp, Artificial Sequence
  Synthetic
gtcgatgaaatctcctggataacat

SEQ ID NO: 19063 - DNA, 25 bp, Artificial Sequence
  Synthetic
acttctttccctttcttgttcacat

SEQ ID NO: 19064 - DNA, 25 bp, Artificial Sequence
  Synthetic
agcataccttggtgctattagattt

SEQ ID NO: 19065 - DNA, 20 bp, Artificial Sequence
  Synthetic
aaccggcaatggctccaaat

SEQ ID NO: 19066 - DNA, 25 bp, Artificial Sequence
  Synthetic
cccattgattccaatttcactccat

SEQ ID NO: 19067 - DNA, 21 bp, Artificial Sequence
  Synthetic
acgtgccaagacttaccgtta

SEQ ID NO: 19068 - DNA, 21 bp, Artificial Sequence
  Synthetic
acaccaaatcctcctctgtcc

SEQ ID NO: 19069 - DNA, 25 bp, Artificial Sequence
  Synthetic
cctttccagctgtttctgaccttat

SEQ ID NO: 19070 - DNA, 24 bp, Artificial Sequence
  Synthetic
accagttgtatatcacccagcaaa

SEQ ID NO: 19071 - DNA, 22 bp, Artificial Sequence
  Synthetic
ccctgtacagcatctccatcat

SEQ ID NO: 19072 - DNA, 20 bp, Artificial Sequence
  Synthetic
ctgttgttggtggattggcc

SEQ ID NO: 19073 - DNA, 24 bp, Artificial Sequence
  Synthetic
tggtggcatataatgtagccaaat

SEQ ID NO: 19074 - DNA, 24 bp, Artificial Sequence
  Synthetic
agtcaaattgtgtagcatttgcag

SEQ ID NO: 19075 - DNA, 25 bp, Artificial Sequence
  Synthetic
ggtcagtaagttcaaattgtggttt

SEQ ID NO: 19076 - DNA, 22 bp, Artificial Sequence
  Synthetic
ccccaatcgcataactccattt

SEQ ID NO: 19077 - DNA, 20 bp, Artificial Sequence
  Synthetic
accccgacctggaaagggtg

SEQ ID NO: 19078 - DNA, 21 bp, Artificial Sequence
  Synthetic
ggtgggggtagtggagtctgc

SEQ ID NO: 19079 - DNA, 21 bp, Artificial Sequence
  Synthetic
gcacttaagcacattggcgtc

SEQ ID NO: 19080 - DNA, 25 bp, Artificial Sequence
  Synthetic
cgaaccatgttagttagtatgggtt

SEQ ID NO: 19081 - DNA, 21 bp, Artificial Sequence
  Synthetic
cctggcccttcccctaatgga

SEQ ID NO: 19082 - DNA, 25 bp, Artificial Sequence
  Synthetic
accttctgttacaactggagtatct

SEQ ID NO: 19083 - DNA, 25 bp, Artificial Sequence
  Synthetic
ggcgttgtacatctaaaaattgcct

SEQ ID NO: 19084 - DNA, 22 bp, Artificial Sequence
  Synthetic
actttcaactgggccttgtact

SEQ ID NO: 19085 - DNA, 25 bp, Artificial Sequence
  Synthetic
gcaaacggtcactaattgcatgata

SEQ ID NO: 19086 - DNA, 22 bp, Artificial Sequence
  Synthetic
acctgatgttccaacccctaaa

SEQ ID NO: 19087 - DNA, 25 bp, Artificial Sequence
  Synthetic
tgctggcaaaaagaaattatgatcc

SEQ ID NO: 19088 - DNA, 23 bp, Artificial Sequence
  Synthetic
aggggccgttttttatcgaaatt

SEQ ID NO: 19089 - DNA, 20 bp, Artificial Sequence
  Synthetic
atgcacagctagcgccatat

SEQ ID NO: 19090 - DNA, 22 bp, Artificial Sequence
  Synthetic
tgttgggatcttctggcctatt

SEQ ID NO: 19091 - DNA, 25 bp, Artificial Sequence
  Synthetic
gcttaatgccactgtatcgtttcaa

SEQ ID NO: 19092 - DNA, 24 bp, Artificial Sequence
  Synthetic
acacgttaacagtactcgattcct

SEQ ID NO: 19093 - DNA, 24 bp, Artificial Sequence
  Synthetic
cgttttgatttagcctcagtcttc

SEQ ID NO: 19094 - DNA, 23 bp, Artificial Sequence
  Synthetic
gtgaaatggcgaactgtttgttc

SEQ ID NO: 19095 - DNA, 25 bp, Artificial Sequence
  Synthetic
agaacggttaggattcgtttttctt

SEQ ID NO: 19096 - DNA, 25 bp, Artificial Sequence
  Synthetic
actcggagacaagtgatataatgga

SEQ ID NO: 19097 - DNA, 25 bp, Artificial Sequence
  Synthetic
ccatctttacatgagaaggcattcc

SEQ ID NO: 19098 - DNA, 23 bp, Artificial Sequence
  Synthetic
aaccatgatccaccatgttcaat

SEQ ID NO: 19099 - DNA, 25 bp, Artificial Sequence
  Synthetic
cgcaccttgacaaatcctttagaaa

SEQ ID NO: 19100 - DNA, 24 bp, Artificial Sequence
  Synthetic
agcatcaactgatgagccagaatc

SEQ ID NO: 19101 - DNA, 21 bp, Artificial Sequence
  Synthetic
agacaaagagtatgcagcggt

SEQ ID NO: 19102 - DNA, 24 bp, Artificial Sequence
  Synthetic
tgttccatagtcccttgtcgatat

SEQ ID NO: 19103 - DNA, 24 bp, Artificial Sequence
  Synthetic
atcaccctctacaaaaagctccta

SEQ ID NO: 19104 - DNA, 23 bp, Artificial Sequence
  Synthetic
cacagtatcgcaagttgaaggtt

SEQ ID NO: 19105 - DNA, 20 bp, Artificial Sequence
  Synthetic
tttgcaggcctgtagtccct

SEQ ID NO: 19106 - DNA, 22 bp, Artificial Sequence
  Synthetic
cccccgaaaagctctatccatg

SEQ ID NO: 19107 - DNA, 23 bp, Artificial Sequence
  Synthetic
gccaaccattgcttatccgaaat

SEQ ID NO: 19108 - DNA, 22 bp, Artificial Sequence
  Synthetic
cctttgctacctcttccatgga

SEQ ID NO: 19109 - DNA, 25 bp, Artificial Sequence
  Synthetic
ttttgctatccaatttcctgagtct

SEQ ID NO: 19110 - DNA, 25 bp, Artificial Sequence
  Synthetic
aaagcgttctagttgtgtgtgataa

SEQ ID NO: 19111 - DNA, 22 bp, Artificial Sequence
  Synthetic
gttcgcatattggaagacggag

SEQ ID NO: 19112 - DNA, 23 bp, Artificial Sequence
  Synthetic
aggtttaacaaaagccaaggagg

SEQ ID NO: 19113 - DNA, 24 bp, Artificial Sequence
  Synthetic
cggagtagagaaatcagcagactg

SEQ ID NO: 19114 - DNA, 23 bp, Artificial Sequence
  Synthetic
catgcaccaatagttacggtgtt

SEQ ID NO: 19115 - DNA, 25 bp, Artificial Sequence
  Synthetic
gcttgtgtgtcttttgtctttttca

SEQ ID NO: 19116 - DNA, 23 bp, Artificial Sequence
  Synthetic
gtttcacctcctaagaagaaccg

SEQ ID NO: 19117 - DNA, 23 bp, Artificial Sequence
  Synthetic
catcctgttcagctttacgaagg

SEQ ID NO: 19118 - DNA, 25 bp, Artificial Sequence
  Synthetic
ccttcggttatcggagtagttacaa

SEQ ID NO: 19119 - DNA, 25 bp, Artificial Sequence
  Synthetic
ggaagcagataatttagaggaagct

SEQ ID NO: 19120 - DNA, 24 bp, Artificial Sequence
  Synthetic
cctaagatagcgatcaaaggttga

SEQ ID NO: 19121 - DNA, 23 bp, Artificial Sequence
  Synthetic
gcaggtttagatgttgtgggttt

SEQ ID NO: 19122 - DNA, 25 bp, Artificial Sequence
  Synthetic
aatgttctaaaggggatgtggattt

SEQ ID NO: 19123 - DNA, 21 bp, Artificial Sequence
  Synthetic
ggagtggattcctcggttgtt

SEQ ID NO: 19124 - DNA, 25 bp, Artificial Sequence
  Synthetic
catgggtgatttcttctgggaatta

SEQ ID NO: 19125 - DNA, 23 bp, Artificial Sequence
  Synthetic
agaactgctgcctctaaaagatc

SEQ ID NO: 19126 - DNA, 25 bp, Artificial Sequence
  Synthetic
ctggtaaaagaagggctgtttgata

SEQ ID NO: 19127 - DNA, 20 bp, Artificial Sequence
  Synthetic
ggctgcagaggctattgaag

SEQ ID NO: 19128 - DNA, 20 bp, Artificial Sequence
  Synthetic
agacgtcacaggtgtggtaa

SEQ ID NO: 19129 - DNA, 24 bp, Artificial Sequence
  Synthetic
gattgctcctcagaggtattggta

SEQ ID NO: 19130 - DNA, 22 bp, Artificial Sequence
  Synthetic
tggtttcttgcccaagatctca

SEQ ID NO: 19131 - DNA, 24 bp, Artificial Sequence
  Synthetic
ttcacagatcctccgtaaagaatg

SEQ ID NO: 19132 - DNA, 24 bp, Artificial Sequence
  Synthetic
aggttatggaatcgcggttatcag

SEQ ID NO: 19133 - DNA, 20 bp, Artificial Sequence
  Synthetic
tggaatttctcgaggcgctc

SEQ ID NO: 19134 - DNA, 25 bp, Artificial Sequence
  Synthetic
gaagtggatactgagacagaaagtt

SEQ ID NO: 19135 - DNA, 22 bp, Artificial Sequence
  Synthetic
ggtgcatattacgctgtccttc

SEQ ID NO: 19136 - DNA, 20 bp, Artificial Sequence
  Synthetic
tggtcaaagacgcaagctgt

SEQ ID NO: 19137 - DNA, 22 bp, Artificial Sequence
  Synthetic
atgattttgttcgttggcggag

SEQ ID NO: 19138 - DNA, 24 bp, Artificial Sequence
  Synthetic
agctagcttcatggagtatgtcta

SEQ ID NO: 19139 - DNA, 22 bp, Artificial Sequence
  Synthetic
gggaaaggggttttcaagaaga

SEQ ID NO: 19140 - DNA, 22 bp, Artificial Sequence
  Synthetic
tttcaggaatttctgtcggtgg

SEQ ID NO: 19141 - DNA, 21 bp, Artificial Sequence
  Synthetic
agaaggaagaccgcaaaggaa

SEQ ID NO: 19142 - DNA, 24 bp, Artificial Sequence
  Synthetic
catggtagtcgtaaaagaaaggga

SEQ ID NO: 19143 - DNA, 20 bp, Artificial Sequence
  Synthetic
tagaggcccaggaatggaga

SEQ ID NO: 19144 - DNA, 21 bp, Artificial Sequence
  Synthetic
gctcagtatttagcagggcag

SEQ ID NO: 19145 - DNA, 24 bp, Artificial Sequence
  Synthetic
gttagcatggcaggagaatttctt

SEQ ID NO: 19146 - DNA, 24 bp, Artificial Sequence
  Synthetic
aggctgctaatatgtcttcacgtt

SEQ ID NO: 19147 - DNA, 20 bp, Artificial Sequence
  Synthetic
tcagaaagggctgaaggcag

SEQ ID NO: 19148 - DNA, 23 bp, Artificial Sequence
  Synthetic
agttgcacagaaataacagctcc

SEQ ID NO: 19149 - DNA, 23 bp, Artificial Sequence
  Synthetic
tgctttcgagaggatacaaaggg

SEQ ID NO: 19150 - DNA, 20 bp, Artificial Sequence
  Synthetic
taaggggtccccagacatgg

SEQ ID NO: 19151 - DNA, 20 bp, Artificial Sequence
  Synthetic
tggctcagtcggttcttcag

SEQ ID NO: 19152 - DNA, 21 bp, Artificial Sequence
  Synthetic
tctacggcgagcttgtttact

SEQ ID NO: 19153 - DNA, 25 bp, Artificial Sequence
  Synthetic
cttgaatttcgaaagaggatgttgc

SEQ ID NO: 19154 - DNA, 22 bp, Artificial Sequence
  Synthetic
ggttgtcagtaagatcgtcgga

SEQ ID NO: 19155 - DNA, 22 bp, Artificial Sequence
  Synthetic
acaggattcttgctttggcaga

SEQ ID NO: 19156 - DNA, 25 bp, Artificial Sequence
  Synthetic
cattgatcgttttgctagggatttc

SEQ ID NO: 19157 - DNA, 23 bp, Artificial Sequence
  Synthetic
cacgagtgtttgagtgctaagtc

SEQ ID NO: 19158 - DNA, 20 bp, Artificial Sequence
  Synthetic
gtaggggctcaaggacgaac

SEQ ID NO: 19159 - DNA, 23 bp, Artificial Sequence
  Synthetic
gattgtagagtgggatcagcaag

SEQ ID NO: 19160 - DNA, 25 bp, Artificial Sequence
  Synthetic
cctacctggttgattatggagaaat

SEQ ID NO: 19161 - DNA, 20 bp, Artificial Sequence
  Synthetic
aaagctcctttttcgtgccc

SEQ ID NO: 19162 - DNA, 22 bp, Artificial Sequence
  Synthetic
tcccattctcttcacgaggttt

SEQ ID NO: 19163 - DNA, 23 bp, Artificial Sequence
  Synthetic
tgttcaatgttcctttggagcag

SEQ ID NO: 19164 - DNA, 20 bp, Artificial Sequence
  Synthetic
cgtgcgtgctagaacttctt

SEQ ID NO: 19165 - DNA, 25 bp, Artificial Sequence
  Synthetic
gcatttgtacgttgatatcgagcat

SEQ ID NO: 19166 - DNA, 21 bp, Artificial Sequence
  Synthetic
gcatgcagggttgctatcaac

SEQ ID NO: 19167 - DNA, 22 bp, Artificial Sequence
  Synthetic
tggtataagaacggtcgtgtgc

SEQ ID NO: 19168 - DNA, 21 bp, Artificial Sequence
  Synthetic
gatggcgctattgcaaatgca

SEQ ID NO: 19169 - DNA, 25 bp, Artificial Sequence
  Synthetic
agaagaaaactccaatcaaaacgtg

SEQ ID NO: 19170 - DNA, 20 bp, Artificial Sequence
  Synthetic
ggcagctcctcaattccgag

SEQ ID NO: 19171 - DNA, 20 bp, Artificial Sequence
  Synthetic
gggaagcagaccagagaaga

SEQ ID NO: 19172 - DNA, 21 bp, Artificial Sequence
  Synthetic
tccccagggaatttctttgca

SEQ ID NO: 19173 - DNA, 23 bp, Artificial Sequence
  Synthetic
gggaggtaaatcaagactccgat

SEQ ID NO: 19174 - DNA, 24 bp, Artificial Sequence
  Synthetic
atcgtagagtcttgtatcacctga

SEQ ID NO: 19175 - DNA, 22 bp, Artificial Sequence
  Synthetic
ttacgctaaaaacgggcctatt

SEQ ID NO: 19176 - DNA, 22 bp, Artificial Sequence
  Synthetic
tcatcaagctatcggcgatgta

SEQ ID NO: 19177 - DNA, 21 bp, Artificial Sequence
  Synthetic
gcaagagcagcttctttgtct

SEQ ID NO: 19178 - DNA, 20 bp, Artificial Sequence
  Synthetic
ctccaggagttgcggataca

SEQ ID NO: 19179 - DNA, 25 bp, Artificial Sequence
  Synthetic
caatcaatgcagaattcgtcacaaa

SEQ ID NO: 19180 - DNA, 22 bp, Artificial Sequence
  Synthetic
gctatcgaagtggattgccgaa

SEQ ID NO: 19181 - DNA, 23 bp, Artificial Sequence
  Synthetic
cttcgtcaagggttcttgtgatt

SEQ ID NO: 19182 - DNA, 21 bp, Artificial Sequence
  Synthetic
ttgcgcatggatgactgttag

SEQ ID NO: 19183 - DNA, 25 bp, Artificial Sequence
  Synthetic
cgagcagcaagaaggaattaattgt

SEQ ID NO: 19184 - DNA, 22 bp, Artificial Sequence
  Synthetic
gctgtttcatctgcggaacttt

SEQ ID NO: 19185 - DNA, 25 bp, Artificial Sequence
  Synthetic
gagaagtctttattcaagccaaagg

SEQ ID NO: 19186 - DNA, 20 bp, Artificial Sequence
  Synthetic
aacagaaagcctgagccagc

SEQ ID NO: 19187 - DNA, 24 bp, Artificial Sequence
  Synthetic
gtcctccgctgatgatattagaag

SEQ ID NO: 19188 - DNA, 20 bp, Artificial Sequence
  Synthetic
cagcaaatggtgaatgctgc

SEQ ID NO: 19189 - DNA, 21 bp, Artificial Sequence
  Synthetic
tgcgagtgttatatgagcacg

SEQ ID NO: 19190 - DNA, 25 bp, Artificial Sequence
  Synthetic
tgtccatttatttggtcttggagtc

SEQ ID NO: 19191 - DNA, 22 bp, Artificial Sequence
  Synthetic
cgcttcatcgataggcatagcc

SEQ ID NO: 19192 - DNA, 25 bp, Artificial Sequence
  Synthetic
tccaagaattagacaaaagatcgca

SEQ ID NO: 19193 - DNA, 25 bp, Artificial Sequence
  Synthetic
caaccaccttgatgaaaaacaaagt

SEQ ID NO: 19194 - DNA, 25 bp, Artificial Sequence
  Synthetic
cgatgtagtattttgctcttgcctt

SEQ ID NO: 19195 - DNA, 23 bp, Artificial Sequence
  Synthetic
agctaatcactcacagcaccatc

SEQ ID NO: 19196 - DNA, 20 bp, Artificial Sequence
  Synthetic
taccgtcgtatgtcggctga

SEQ ID NO: 19197 - DNA, 23 bp, Artificial Sequence
  Synthetic
ctttccgactgcagttgatcatt

SEQ ID NO: 19198 - DNA, 25 bp, Artificial Sequence
  Synthetic
gttgttcttttgggtacaacaatct

SEQ ID NO: 19199 - DNA, 20 bp, Artificial Sequence
  Synthetic
caaaggagttgccggacctc

SEQ ID NO: 19200 - DNA, 25 bp, Artificial Sequence
  Synthetic
cgttgaaaccgattttgttgctaac

SEQ ID NO: 19201 - DNA, 20 bp, Artificial Sequence
  Synthetic
acctgcggaagaagctgttg

SEQ ID NO: 19202 - DNA, 25 bp, Artificial Sequence
  Synthetic
ggatcctaaatagcgcttcactaaa

SEQ ID NO: 19203 - DNA, 24 bp, Artificial Sequence
  Synthetic
tcacctaacctaggattatgcgtt

SEQ ID NO: 19204 - DNA, 21 bp, Artificial Sequence
  Synthetic
gccctttcccaactccttgag

SEQ ID NO: 19205 - DNA, 20 bp, Artificial Sequence
  Synthetic
ttaggcccagaggtcgattg

SEQ ID NO: 19206 - DNA, 24 bp, Artificial Sequence
  Synthetic
gtcaccggagcatcattatttact

SEQ ID NO: 19207 - DNA, 20 bp, Artificial Sequence
  Synthetic
gtgggagcgttcgagacatg

SEQ ID NO: 19208 - DNA, 23 bp, Artificial Sequence
  Synthetic
ggacaattccgcataatttcgga

SEQ ID NO: 19209 - DNA, 22 bp, Artificial Sequence
  Synthetic
caatgcaccccttctttctgat

SEQ ID NO: 19210 - DNA, 21 bp, Artificial Sequence
  Synthetic
ccaccttcaatcacagcactt

SEQ ID NO: 19211 - DNA, 22 bp, Artificial Sequence
  Synthetic
cgggatgattgaagtacagtcc

SEQ ID NO: 19212 - DNA, 22 bp, Artificial Sequence
  Synthetic
ccagtcctcttgtctttcgact

SEQ ID NO: 19213 - DNA, 24 bp, Artificial Sequence
  Synthetic
ctgttttattcttgcgtattggct

SEQ ID NO: 19214 - DNA, 21 bp, Artificial Sequence
  Synthetic
cggctttgcgcataaaaaaca

SEQ ID NO: 19215 - DNA, 24 bp, Artificial Sequence
  Synthetic
gcgattttaaccacaagcttcaaa

SEQ ID NO: 19216 - DNA, 24 bp, Artificial Sequence
  Synthetic
caaagttctggcattacagatcct

SEQ ID NO: 19217 - DNA, 23 bp, Artificial Sequence
  Synthetic
gccctgaagtcagattttcttgc

SEQ ID NO: 19218 - DNA, 20 bp, Artificial Sequence
  Synthetic
atgcagggttcgggaaaaca

SEQ ID NO: 19219 - DNA, 22 bp, Artificial Sequence
  Synthetic
cctccgtagacaaaaacaacgg

SEQ ID NO: 19220 - DNA, 24 bp, Artificial Sequence
  Synthetic
gcactctttaaatgattgctgcct

SEQ ID NO: 19221 - DNA, 20 bp, Artificial Sequence
  Synthetic
gagtttgggcaagccgatga

SEQ ID NO: 19222 - DNA, 20 bp, Artificial Sequence
  Synthetic
ctgttcgaaacgcatggcag

SEQ ID NO: 19223 - DNA, 22 bp, Artificial Sequence
  Synthetic
tcccaaccaactgcttaaacat

SEQ ID NO: 19224 - DNA, 24 bp, Artificial Sequence
  Synthetic
agtgattgttacctctttgcaacc

SEQ ID NO: 19225 - DNA, 21 bp, Artificial Sequence
  Synthetic
ccataggatctggaaccggag

SEQ ID NO: 19226 - DNA, 25 bp, Artificial Sequence
  Synthetic
actctttttagactctgtgcgtgtc

SEQ ID NO: 19227 - DNA, 24 bp, Artificial Sequence
  Synthetic
gccccaatcgaaaatctctcctat

SEQ ID NO: 19228 - DNA, 23 bp, Artificial Sequence
  Synthetic
tgggatgcgatcttctgtgtatt

SEQ ID NO: 19229 - DNA, 23 bp, Artificial Sequence
  Synthetic
aggagaacacataccctcttctt

SEQ ID NO: 19230 - DNA, 22 bp, Artificial Sequence
  Synthetic
tgaagaaccaggatccagctaa

SEQ ID NO: 19231 - DNA, 20 bp, Artificial Sequence
  Synthetic
gctcgcaatagcagttctcc

SEQ ID NO: 19232 - DNA, 20 bp, Artificial Sequence
  Synthetic
agagtgcgcaataaccaccc

SEQ ID NO: 19233 - DNA, 25 bp, Artificial Sequence
  Synthetic
gtcacgaatattttcctgagaagga

SEQ ID NO: 19234 - DNA, 21 bp, Artificial Sequence
  Synthetic
aagaccctgctttccctgtaa

SEQ ID NO: 19235 - DNA, 23 bp, Artificial Sequence
  Synthetic
ccaaagctccgtacactttttcc

SEQ ID NO: 19236 - DNA, 20 bp, Artificial Sequence
  Synthetic
atctcccgcagccatatcac

SEQ ID NO: 19237 - DNA, 22 bp, Artificial Sequence
  Synthetic
gtgtctcgaaaagctgcttcta

SEQ ID NO: 19238 - DNA, 23 bp, Artificial Sequence
  Synthetic
cgatttccctaacgcttccttat

SEQ ID NO: 19239 - DNA, 21 bp, Artificial Sequence
  Synthetic
accacaactcttgctcgctta

SEQ ID NO: 19240 - DNA, 25 bp, Artificial Sequence
  Synthetic
catccgcaaaagttactttgttttg

SEQ ID NO: 19241 - DNA, 22 bp, Artificial Sequence
  Synthetic
acaagcttgctgttaaactcct

SEQ ID NO: 19242 - DNA, 25 bp, Artificial Sequence
  Synthetic
gcgcattgaaactatgcagatcaat

SEQ ID NO: 19243 - DNA, 20 bp, Artificial Sequence
  Synthetic
tccagcacacatgagacagg

SEQ ID NO: 19244 - DNA, 25 bp, Artificial Sequence
  Synthetic
ccagaaagtttaatctgcgctcttt

SEQ ID NO: 19245 - DNA, 23 bp, Artificial Sequence
  Synthetic
cctactcatgcggaatgttttgg

SEQ ID NO: 19246 - DNA, 22 bp, Artificial Sequence
  Synthetic
cctaatccacaacgaggtcctg

SEQ ID NO: 19247 - DNA, 24 bp, Artificial Sequence
  Synthetic
ttcctcattatctttggtcttgcc

SEQ ID NO: 19248 - DNA, 20 bp, Artificial Sequence
  Synthetic
acaaaccgatcgcgaattgg

SEQ ID NO: 19249 - DNA, 20 bp, Artificial Sequence
  Synthetic
cgcaaatgattacgcccctc

SEQ ID NO: 19250 - DNA, 22 bp, Artificial Sequence
  Synthetic
gccctgatagaaggagctatgg

SEQ ID NO: 19251 - DNA, 20 bp, Artificial Sequence
  Synthetic
ttggaggtggcatcctttcc

SEQ ID NO: 19252 - DNA, 20 bp, Artificial Sequence
  Synthetic
accggccaaactccatcaag

SEQ ID NO: 19253 - DNA, 24 bp, Artificial Sequence
  Synthetic
ccagcagctacattgctactaaag

SEQ ID NO: 19254 - DNA, 25 bp, Artificial Sequence
  Synthetic
tgaatgcgcagatcgtatatctaaa

SEQ ID NO: 19255 - DNA, 22 bp, Artificial Sequence
  Synthetic
aggttttcatatgctggttccc

SEQ ID NO: 19256 - DNA, 22 bp, Artificial Sequence
  Synthetic
acccgctgctgaattattttgt

SEQ ID NO: 19257 - DNA, 23 bp, Artificial Sequence
  Synthetic
gacaaaccatgattcacctcgat

SEQ ID NO: 19258 - DNA, 20 bp, Artificial Sequence
  Synthetic
ccgcatctgtaagctcacag

SEQ ID NO: 19259 - DNA, 20 bp, Artificial Sequence
  Synthetic
tcatcttcccgacggatgct

SEQ ID NO: 19260 - DNA, 25 bp, Artificial Sequence
  Synthetic
gccagattcgccttatttcttcttt

SEQ ID NO: 19261 - DNA, 23 bp, Artificial Sequence
  Synthetic
tctccagaagttccgatcattga

SEQ ID NO: 19262 - DNA, 21 bp, Artificial Sequence
  Synthetic
ggcccagtacctgcttcttag

SEQ ID NO: 19263 - DNA, 23 bp, Artificial Sequence
  Synthetic
ccttggaaccgattcttacactg

SEQ ID NO: 19264 - DNA, 23 bp, Artificial Sequence
  Synthetic
tgtactttaacacagccactgcc

SEQ ID NO: 19265 - DNA, 25 bp, Artificial Sequence
  Synthetic
cactagaatcaggataacaggagca

SEQ ID NO: 19266 - DNA, 25 bp, Artificial Sequence
  Synthetic
aaaccgtttcttgaactaatgcttt

SEQ ID NO: 19267 - DNA, 22 bp, Artificial Sequence
  Synthetic
tcagaccgtgtttaaagaagcg

SEQ ID NO: 19268 - DNA, 22 bp, Artificial Sequence
  Synthetic
ttgtgtaggctgaagctactgt

SEQ ID NO: 19269 - DNA, 25 bp, Artificial Sequence
  Synthetic
tccacatccttggtaaaggtagtct

SEQ ID NO: 19270 - DNA, 23 bp, Artificial Sequence
  Synthetic
aagctgttgttgcaattttttgc

SEQ ID NO: 19271 - DNA, 25 bp, Artificial Sequence
  Synthetic
cctgttatctagtcctccaacaact

SEQ ID NO: 19272 - DNA, 20 bp, Artificial Sequence
  Synthetic
cctgacagcaactccctcat

SEQ ID NO: 19273 - DNA, 24 bp, Artificial Sequence
  Synthetic
tggttacagtggtatcagttccac

SEQ ID NO: 19274 - DNA, 25 bp, Artificial Sequence
  Synthetic
agcttcagatcttgcattttcaatt

SEQ ID NO: 19275 - DNA, 25 bp, Artificial Sequence
  Synthetic
cagatcaatttttgtgtcaagaggg

SEQ ID NO: 19276 - DNA, 25 bp, Artificial Sequence
  Synthetic
gttgaatagcttagtgacacctcct

SEQ ID NO: 19277 - DNA, 21 bp, Artificial Sequence
  Synthetic
tagcaacctccatggcctccg

SEQ ID NO: 19278 - DNA, 23 bp, Artificial Sequence
  Synthetic
ggaacactttcactgcctgtatt

SEQ ID NO: 19279 - DNA, 20 bp, Artificial Sequence
  Synthetic
tcaatgggctggacaaggtc

SEQ ID NO: 19280 - DNA, 25 bp, Artificial Sequence
  Synthetic
ccatctacatcactacaatcagctt

SEQ ID NO: 19281 - DNA, 24 bp, Artificial Sequence
  Synthetic
tgcgttgaggcgaaatagtaatag

SEQ ID NO: 19282 - DNA, 20 bp, Artificial Sequence
  Synthetic
caaagctgctactacgctgc

SEQ ID NO: 19283 - DNA, 21 bp, Artificial Sequence
  Synthetic
cattgaaacggtcgctgagag

SEQ ID NO: 19284 - DNA, 24 bp, Artificial Sequence
  Synthetic
gtgcgtcttgagcaaatctgatat

SEQ ID NO: 19285 - DNA, 20 bp, Artificial Sequence
  Synthetic
tttggatccccctggaggcg

SEQ ID NO: 19286 - DNA, 18 bp, Artificial Sequence
  Synthetic
tcccccgttcccttccgt

SEQ ID NO: 19287 - DNA, 25 bp, Artificial Sequence
  Synthetic
gaccatgtagtactgaagcaatcat

SEQ ID NO: 19288 - DNA, 20 bp, Artificial Sequence
  Synthetic
ggcaccaaagcaggcctaat

SEQ ID NO: 19289 - DNA, 25 bp, Artificial Sequence
  Synthetic
ccaagtctgctaacccttatatagc

SEQ ID NO: 19290 - DNA, 25 bp, Artificial Sequence
  Synthetic
tcgtttcttccattttaagctagga

SEQ ID NO: 19291 - DNA, 22 bp, Artificial Sequence
  Synthetic
tccctgacaccttaggcactaa

SEQ ID NO: 19292 - DNA, 25 bp, Artificial Sequence
  Synthetic
agcatggtgtacatcctaaaacaaa

SEQ ID NO: 19293 - DNA, 25 bp, Artificial Sequence
  Synthetic
ccatagaaaaaacatgagttgccat

SEQ ID NO: 19294 - DNA, 25 bp, Artificial Sequence
  Synthetic
ggccgattaaataattgtgcatcag

SEQ ID NO: 19295 - DNA, 24 bp, Artificial Sequence
  Synthetic
caccactatgaaaaatctacgccc

SEQ ID NO: 19296 - DNA, 21 bp, Artificial Sequence
  Synthetic
gctagactgcacacaacactc

SEQ ID NO: 19297 - DNA, 20 bp, Artificial Sequence
  Synthetic
atttccgggattgcacaggc

SEQ ID NO: 19298 - DNA, 25 bp, Artificial Sequence
  Synthetic
tgcaatctcataacataacgtggat

SEQ ID NO: 19299 - DNA, 25 bp, Artificial Sequence
  Synthetic
aatccaacctttaaaatcacacgag

SEQ ID NO: 19300 - DNA, 25 bp, Artificial Sequence
  Synthetic
gccacacttgtgttgaacataatca

SEQ ID NO: 19301 - DNA, 25 bp, Artificial Sequence
  Synthetic
ccaatcttaaaacaagaaaggccat

SEQ ID NO: 19302 - DNA, 24 bp, Artificial Sequence
  Synthetic
ccagccttggccatataaacatta

SEQ ID NO: 19303 - DNA, 25 bp, Artificial Sequence
  Synthetic
agtttcctcaccttctacatcatct

SEQ ID NO: 19304 - DNA, 25 bp, Artificial Sequence
  Synthetic
ccaaggtatcaacaaacaactgact

SEQ ID NO: 19305 - DNA, 21 bp, Artificial Sequence
  Synthetic
gccccctgtagagacataaca

SEQ ID NO: 19306 - DNA, 25 bp, Artificial Sequence
  Synthetic
tctgtttcgtaaacaatggaacgtc

SEQ ID NO: 19307 - DNA, 25 bp, Artificial Sequence
  Synthetic
aacaggcacaaacctattagtgaaa

SEQ ID NO: 19308 - DNA, 25 bp, Artificial Sequence
  Synthetic
tctggagcattaagcaagaaacatt

SEQ ID NO: 19309 - DNA, 23 bp, Artificial Sequence
  Synthetic
tgtaccaaaatgcataacagcgt

SEQ ID NO: 19310 - DNA, 25 bp, Artificial Sequence
  Synthetic
acaccatctactttctcgaatgttt

SEQ ID NO: 19311 - DNA, 25 bp, Artificial Sequence
  Synthetic
ccatcgtcaacatcatccactttta

SEQ ID NO: 19312 - DNA, 25 bp, Artificial Sequence
  Synthetic
ccagcaacctaaaactccaatgtaa

SEQ ID NO: 19313 - DNA, 25 bp, Artificial Sequence
  Synthetic
gcggcctcaacagtaataaaagtat

SEQ ID NO: 19314 - DNA, 25 bp, Artificial Sequence
  Synthetic
actgattaaaagcatccacagacca

SEQ ID NO: 19315 - DNA, 25 bp, Artificial Sequence
  Synthetic
accatatcgtaacactttggtaggg

SEQ ID NO: 19316 - DNA, 20 bp, Artificial Sequence
  Synthetic
acgcacgatacgtacaagcc

SEQ ID NO: 19317 - DNA, 25 bp, Artificial Sequence
  Synthetic
acaacaattacagcgagtatagcac

SEQ ID NO: 19318 - DNA, 25 bp, Artificial Sequence
  Synthetic
gttggtaaagcacatcactaccatt

SEQ ID NO: 19319 - DNA, 25 bp, Artificial Sequence
  Synthetic
cgcataaaaaggaacccttaatggt

SEQ ID NO: 19320 - DNA, 25 bp, Artificial Sequence
  Synthetic
acaaggtcagatttaacttggctaa

SEQ ID NO: 19321 - DNA, 25 bp, Artificial Sequence
  Synthetic
acagtgtaaaaagcacaggagttat

SEQ ID NO: 19322 - DNA, 25 bp, Artificial Sequence
  Synthetic
ccatgtgtaagtaccaaaaagggaa

SEQ ID NO: 19323 - DNA, 20 bp, Artificial Sequence
  Synthetic
acctccaatacccaacagct

SEQ ID NO: 19324 - DNA, 25 bp, Artificial Sequence
  Synthetic
tcaacgaagctagccatattaacaa

SEQ ID NO: 19325 - DNA, 25 bp, Artificial Sequence
  Synthetic
acccgcataggtaacatagacatta

SEQ ID NO: 19326 - DNA, 25 bp, Artificial Sequence
  Synthetic
cagcttgcaatctaactgtagaaga

SEQ ID NO: 19327 - DNA, 24 bp, Artificial Sequence
  Synthetic
cgtaatttgcacaacccatcaaca

SEQ ID NO: 19328 - DNA, 25 bp, Artificial Sequence
  Synthetic
gctgaaaacggcaacaattaacttt

SEQ ID NO: 19329 - DNA, 25 bp, Artificial Sequence
  Synthetic
agtgttaaaacgcctactaagccta

SEQ ID NO: 19330 - DNA, 25 bp, Artificial Sequence
  Synthetic
cagcagcatataaaagcaagtcttt

SEQ ID NO: 19331 - DNA, 25 bp, Artificial Sequence
  Synthetic
aatggatagccagcactcttatcat

SEQ ID NO: 19332 - DNA, 25 bp, Artificial Sequence
  Synthetic
ccaccataaaatttagtggtgccta

SEQ ID NO: 19333 - DNA, 25 bp, Artificial Sequence
  Synthetic
gcttctgaagagcacgtatactaag

SEQ ID NO: 19334 - DNA, 22 bp, Artificial Sequence
  Synthetic
caagcattgtgtgttgtgaaca

SEQ ID NO: 19335 - DNA, 24 bp, Artificial Sequence
  Synthetic
aaggactcatcagtgaacttttgt

SEQ ID NO: 19336 - DNA, 25 bp, Artificial Sequence
  Synthetic
cgctctgtacattcattagctagta

SEQ ID NO: 19337 - DNA, 25 bp, Artificial Sequence
  Synthetic
acgtctcaagcacactataaacact

SEQ ID NO: 19338 - DNA, 25 bp, Artificial Sequence
  Synthetic
acacatacttacgagtggtgtcatt

SEQ ID NO: 19339 - DNA, 25 bp, Artificial Sequence
  Synthetic
gcttagctgcaaagttctgactatt

SEQ ID NO: 19340 - DNA, 25 bp, Artificial Sequence
  Synthetic
ccgctataactcttgctacaatctt

SEQ ID NO: 19341 - DNA, 25 bp, Artificial Sequence
  Synthetic
cacaacaaaatcaattcctgtggaa

SEQ ID NO: 19342 - DNA, 22 bp, Artificial Sequence
  Synthetic
tcacgccctacttttgcaaagt

SEQ ID NO: 19343 - DNA, 24 bp, Artificial Sequence
  Synthetic
tggttgggcatcatagaacttaaa

SEQ ID NO: 19344 - DNA, 25 bp, Artificial Sequence
  Synthetic
atccatatacacacaaggcgtatct

SEQ ID NO: 19345 - DNA, 25 bp, Artificial Sequence
  Synthetic
tcgatcttagccacaactttatcat

SEQ ID NO: 19346 - DNA, 23 bp, Artificial Sequence
  Synthetic
tcgtggaaatgtaaacgccatta

SEQ ID NO: 19347 - DNA, 25 bp, Artificial Sequence
  Synthetic
ccaccaataatcttctggttgaagt

SEQ ID NO: 19348 - DNA, 20 bp, Artificial Sequence
  Synthetic
ggcttccagtcagatgcagc

SEQ ID NO: 19349 - DNA, 25 bp, Artificial Sequence
  Synthetic
tctgcattccaagaaaactctgtta

SEQ ID NO: 19350 - DNA, 20 bp, Artificial Sequence
  Synthetic
tgtgtggcgctgtttgtatt

SEQ ID NO: 19351 - DNA, 23 bp, Artificial Sequence
  Synthetic
tgatgaggggttgatggtgattt

SEQ ID NO: 19352 - DNA, 24 bp, Artificial Sequence
  Synthetic
aaggcgtaaaattaacaccctcat

SEQ ID NO: 19353 - DNA, 25 bp, Artificial Sequence
  Synthetic
acagattgctttcgtaggaacagtt

SEQ ID NO: 19354 - DNA, 24 bp, Artificial Sequence
  Synthetic
tgattgtacgtggttgtactacca

SEQ ID NO: 19355 - DNA, 25 bp, Artificial Sequence
  Synthetic
gcttactattacaagtcagaggcat

SEQ ID NO: 19356 - DNA, 23 bp, Artificial Sequence
  Synthetic
tcccaatttaatggagagggcac

SEQ ID NO: 19357 - DNA, 25 bp, Artificial Sequence
  Synthetic
tcgaggcttaaaaacagaatcttct

SEQ ID NO: 19358 - DNA, 20 bp, Artificial Sequence
  Synthetic
caagacccgaacagtgctca

SEQ ID NO: 19359 - DNA, 20 bp, Artificial Sequence
  Synthetic
agagttagcgtgaaaggccg

SEQ ID NO: 19360 - DNA, 24 bp, Artificial Sequence
  Synthetic
gacaaatgcagcacaatcaatagt

SEQ ID NO: 19361 - DNA, 22 bp, Artificial Sequence
  Synthetic
actttgcacacaaatgaggtcc

SEQ ID NO: 19362 - DNA, 25 bp, Artificial Sequence
  Synthetic
gcggtaagacgaccattaataagtc

SEQ ID NO: 19363 - DNA, 25 bp, Artificial Sequence
  Synthetic
ccactcttaggagctatacctctat

SEQ ID NO: 19364 - DNA, 25 bp, Artificial Sequence
  Synthetic
ccttgagattgatgtagctctgatt

SEQ ID NO: 19365 - DNA, 25 bp, Artificial Sequence
  Synthetic
acaagcatcttctaattctgagaca

SEQ ID NO: 19366 - DNA, 25 bp, Artificial Sequence
  Synthetic
ggcctaacatacattgttcctttca

SEQ ID NO: 19367 - DNA, 25 bp, Artificial Sequence
  Synthetic
gcttaccaggagtaaaagacatcct

SEQ ID NO: 19368 - DNA, 21 bp, Artificial Sequence
  Synthetic
agcgacccagtagactccgtc

SEQ ID NO: 19369 - DNA, 21 bp, Artificial Sequence
  Synthetic
cagccatgtcaggtgttacac

SEQ ID NO: 19370 - DNA, 22 bp, Artificial Sequence
  Synthetic
aacctaattgcgccgttatagc

SEQ ID NO: 19371 - DNA, 20 bp, Artificial Sequence
  Synthetic
ggttaccaccagatgccgac

SEQ ID NO: 19372 - DNA, 22 bp, Artificial Sequence
  Synthetic
actttctgcttgggcattagca

SEQ ID NO: 19373 - DNA, 22 bp, Artificial Sequence
  Synthetic
tccattcaagtcctccgatgag

SEQ ID NO: 19374 - DNA, 22 bp, Artificial Sequence
  Synthetic
ggtcaaggaatggggcatcacc

SEQ ID NO: 19375 - DNA, 22 bp, Artificial Sequence
  Synthetic
gcttgggaatgagcattaacca

SEQ ID NO: 19376 - DNA, 22 bp, Artificial Sequence
  Synthetic
tccattcaagtcctccgatgag

SEQ ID NO: 19377 - DNA, 22 bp, Artificial Sequence
  Synthetic
tggaggctgcacgacactcgta

SEQ ID NO: 19378 - DNA, 20 bp, Artificial Sequence
  Synthetic
ccaacgatctgtccgccacc

SEQ ID NO: 19379 - DNA, 21 bp, Artificial Sequence
  Synthetic
ccccatgaggtcggcgaatcc

SEQ ID NO: 19380 - DNA, 22 bp, Artificial Sequence
  Synthetic
tggggtccagcacgtagatgta

SEQ ID NO: 19381 - DNA, 20 bp, Artificial Sequence
  Synthetic
ccaccaccatacccacagcg

SEQ ID NO: 19382 - DNA, 22 bp, Artificial Sequence
  Synthetic
ggtctgtcatcagaaggaccgg

SEQ ID NO: 19383 - DNA, 20 bp, Artificial Sequence
  Synthetic
gccgctgggacttcagcagg

SEQ ID NO: 19384 - DNA, 21 bp, Artificial Sequence
  Synthetic
cgatcctcgatatcgcagcgc

SEQ ID NO: 19385 - DNA, 21 bp, Artificial Sequence
  Synthetic
cagcgtgaccaggttctccaa

SEQ ID NO: 19386 - DNA, 22 bp, Artificial Sequence
  Synthetic
gtggccactgctaggtctttga

SEQ ID NO: 19387 - DNA, 20 bp, Artificial Sequence
  Synthetic
aggaaggtctgggtagccgt

SEQ ID NO: 19388 - DNA, 22 bp, Artificial Sequence
  Synthetic
gaagggcacataacgggacctc

SEQ ID NO: 19389 - DNA, 20 bp, Artificial Sequence
  Synthetic
gtgcggatgttggggtcgat

SEQ ID NO: 19390 - DNA, 20 bp, Artificial Sequence
  Synthetic
tctacctcgacccgttcggc

SEQ ID NO: 19391 - DNA, 20 bp, Artificial Sequence
  Synthetic
gcgcacacagtggcttggta

SEQ ID NO: 19392 - DNA, 21 bp, Artificial Sequence
  Synthetic
gtctggaacgagtgctggctt

SEQ ID NO: 19393 - DNA, 22 bp, Artificial Sequence
  Synthetic
tttggttggtcgtcaggggact

SEQ ID NO: 19394 - DNA, 19 bp, Artificial Sequence
  Synthetic
tgtcggcgcagtatggctg

SEQ ID NO: 19395 - DNA, 21 bp, Artificial Sequence
  Synthetic
ggaaatgaagggcagcccagg

SEQ ID NO: 19396 - DNA, 21 bp, Artificial Sequence
  Synthetic
cttggcacggacacttgagct

SEQ ID NO: 19397 - DNA, 21 bp, Artificial Sequence
  Synthetic
gatgaggcctatgcgtctggc

SEQ ID NO: 19398 - DNA, 21 bp, Artificial Sequence
  Synthetic
gtccttttcctccgaggggga

SEQ ID NO: 19399 - DNA, 22 bp, Artificial Sequence
  Synthetic
cgccggtccaagaatacgacat

SEQ ID NO: 19400 - DNA, 21 bp, Artificial Sequence
  Synthetic
ccctgctggacaaggagcgaa

SEQ ID NO: 19401 - DNA, 22 bp, Artificial Sequence
  Synthetic
gcctccggttcaaggttacagc

SEQ ID NO: 19402 - DNA, 22 bp, Artificial Sequence
  Synthetic
tcagccaccacgaccaaatcat

SEQ ID NO: 19403 - DNA, 23 bp, Artificial Sequence
  Synthetic
ccacggtggtttttgtgagtatc

SEQ ID NO: 19404 - DNA, 24 bp, Artificial Sequence
  Synthetic
gtcattggtccattcctattccac

SEQ ID NO: 19405 - DNA, 24 bp, Artificial Sequence
  Synthetic
ttggttatcgttagttgcgattcc

SEQ ID NO: 19406 - DNA, 21 bp, Artificial Sequence
  Synthetic
gtgggtctgctgatactgcag

SEQ ID NO: 19407 - DNA, 25 bp, Artificial Sequence
  Synthetic
cctcatgcactcttatcttcaatgt

SEQ ID NO: 19408 - DNA, 25 bp, Artificial Sequence
  Synthetic
cgcatccttctgaaaatgtcttaaa

SEQ ID NO: 19409 - DNA, 20 bp, Artificial Sequence
  Synthetic
ttcactgacctcctcgggag

SEQ ID NO: 19410 - DNA, 24 bp, Artificial Sequence
  Synthetic
cctcatttgttggaacagagttct

SEQ ID NO: 19411 - DNA, 21 bp, Artificial Sequence
  Synthetic
tcccctcagaacagcggactc

SEQ ID NO: 19412 - DNA, 21 bp, Artificial Sequence
  Synthetic
gccaacctctcaggacagcct

SEQ ID NO: 19413 - DNA, 22 bp, Artificial Sequence
  Synthetic
tccgcacactttggtgaatcca

SEQ ID NO: 19414 - DNA, 20 bp, Artificial Sequence
  Synthetic
tgagctcggacctgtccctg

SEQ ID NO: 19415 - DNA, 22 bp, Artificial Sequence
  Synthetic
cgcaaagcagaagaacacgagg

SEQ ID NO: 19416 - DNA, 21 bp, Artificial Sequence
  Synthetic
ggtccgaagatggccaggagt

SEQ ID NO: 19417 - DNA, 22 bp, Artificial Sequence
  Synthetic
cacgtgatgagcttggtctcca

SEQ ID NO: 19418 - DNA, 20 bp, Artificial Sequence
  Synthetic
gcgatggtcctcgttccggc

SEQ ID NO: 19419 - DNA, 22 bp, Artificial Sequence
  Synthetic
acaccggggatctcatggttgt

SEQ ID NO: 19420 - DNA, 21 bp, Artificial Sequence
  Synthetic
taagcacctcctgagcacccg

SEQ ID NO: 19421 - DNA, 21 bp, Artificial Sequence
  Synthetic
agtaggccacggcattgatgc

SEQ ID NO: 19422 - DNA, 21 bp, Artificial Sequence
  Synthetic
acagaggacggacgagtcgaa

SEQ ID NO: 19423 - DNA, 20 bp, Artificial Sequence
  Synthetic
gggtgcgtcagggtgacttc

SEQ ID NO: 19424 - DNA, 22 bp, Artificial Sequence
  Synthetic
ggtgataacctctgcttggcgg

SEQ ID NO: 19425 - DNA, 22 bp, Artificial Sequence
  Synthetic
ccctgcaagaatgtccacgagg

SEQ ID NO: 19426 - DNA, 19 bp, Artificial Sequence
  Synthetic
tatggcagtgacgcgggcg

SEQ ID NO: 19427 - DNA, 22 bp, Artificial Sequence
  Synthetic
ctccacatgttcctgcaggtcc

SEQ ID NO: 19428 - DNA, 21 bp, Artificial Sequence
  Synthetic
aggtaattgcgaccccaccgg

SEQ ID NO: 19429 - DNA, 22 bp, Artificial Sequence
  Synthetic
cgaatctccgagacttccgcag

SEQ ID NO: 19430 - DNA, 20 bp, Artificial Sequence
  Synthetic
gactcaacgtcggagtcggg

SEQ ID NO: 19431 - DNA, 22 bp, Artificial Sequence
  Synthetic
gctgcaagcttcctctacggat

SEQ ID NO: 19432 - DNA, 20 bp, Artificial Sequence
  Synthetic
ggccatcttctcgcacacgc

SEQ ID NO: 19433 - DNA, 19 bp, Artificial Sequence
  Synthetic
ttgtcagtacgccgctcgc

SEQ ID NO: 19434 - DNA, 20 bp, Artificial Sequence
  Synthetic
gtcttgctgtctcccacgcg

SEQ ID NO: 19435 - DNA, 20 bp, Artificial Sequence
  Synthetic
tgtctccaagctcgcaaggg

SEQ ID NO: 19436 - DNA, 20 bp, Artificial Sequence
  Synthetic
tgcacccatggacatagctt

SEQ ID NO: 19437 - DNA, 24 bp, Artificial Sequence
  Synthetic
tgtagcatctgatcagctgtgtat

SEQ ID NO: 19438 - DNA, 20 bp, Artificial Sequence
  Synthetic
tggttccaccgcatctgtat

SEQ ID NO: 19439 - DNA, 22 bp, Artificial Sequence
  Synthetic
ccccagctttatggcgtctagc

SEQ ID NO: 19440 - DNA, 23 bp, Artificial Sequence
  Synthetic
cattggcatggtagcacttgtat

SEQ ID NO: 19441 - DNA, 25 bp, Artificial Sequence
  Synthetic
gctcatacaaaagtatgatttgcca

SEQ ID NO: 19442 - DNA, 25 bp, Artificial Sequence
  Synthetic
accttcgaaaaaagcatttccaatt

SEQ ID NO: 19443 - DNA, 23 bp, Artificial Sequence
  Synthetic
accctcgtatgagacttttcctg

SEQ ID NO: 19444 - DNA, 22 bp, Artificial Sequence
  Synthetic
tctttggacccttgtcgctgct

SEQ ID NO: 19445 - DNA, 21 bp, Artificial Sequence
  Synthetic
ccaaaacaaacacagcagcag

SEQ ID NO: 19446 - DNA, 22 bp, Artificial Sequence
  Synthetic
ggtggtgccctctactttggga

SEQ ID NO: 19447 - DNA, 22 bp, Artificial Sequence
  Synthetic
gttgtggcagaggatgtaactt

SEQ ID NO: 19448 - DNA, 23 bp, Artificial Sequence
  Synthetic
ggttccatttcaatgtcctcgat

SEQ ID NO: 19449 - DNA, 22 bp, Artificial Sequence
  Synthetic
tccgtgctgagaactttagaca

SEQ ID NO: 19450 - DNA, 25 bp, Artificial Sequence
  Synthetic
aggcacgtcagacttatttaattgt

SEQ ID NO: 19451 - DNA, 23 bp, Artificial Sequence
  Synthetic
gccataatatccggggtcaatgt

SEQ ID NO: 19452 - DNA, 25 bp, Artificial Sequence
  Synthetic
cacaggaacagcaattacacaaatt

SEQ ID NO: 19453 - DNA, 20 bp, Artificial Sequence
  Synthetic
atcgtacacctgtcccacag

SEQ ID NO: 19454 - DNA, 25 bp, Artificial Sequence
  Synthetic
atccatatcgtctatcaggttggac

SEQ ID NO: 19455 - DNA, 25 bp, Artificial Sequence
  Synthetic
gtcccagtttgtataaggaaacaca

SEQ ID NO: 19456 - DNA, 20 bp, Artificial Sequence
  Synthetic
ggggtagaggggtatgcggt

SEQ ID NO: 19457 - DNA, 22 bp, Artificial Sequence
  Synthetic
gttcccactgcttcaggagctg

SEQ ID NO: 19458 - DNA, 25 bp, Artificial Sequence
  Synthetic
ctaacgatgaataacctgtagtccc

SEQ ID NO: 19459 - DNA, 24 bp, Artificial Sequence
  Synthetic
tcctggatcagcagtgataactat

SEQ ID NO: 19460 - DNA, 23 bp, Artificial Sequence
  Synthetic
tcatcatcaaaggcgggattttc

SEQ ID NO: 19461 - DNA, 25 bp, Artificial Sequence
  Synthetic
catcaggtactataggtctgtcagt

SEQ ID NO: 19462 - DNA, 25 bp, Artificial Sequence
  Synthetic
cccttctacatattcatccgtactc

SEQ ID NO: 19463 - DNA, 25 bp, Artificial Sequence
  Synthetic
gggatgacctgatgtactaatacct

SEQ ID NO: 19464 - DNA, 25 bp, Artificial Sequence
  Synthetic
acatgtcaccatcctgaatagtagt

SEQ ID NO: 19465 - DNA, 25 bp, Artificial Sequence
  Synthetic
cctgctgagcaccataaataaagtt

SEQ ID NO: 19466 - DNA, 20 bp, Artificial Sequence
  Synthetic
tggcgccaaaaacttaccga

SEQ ID NO: 19467 - DNA, 21 bp, Artificial Sequence
  Synthetic
ggtctaccgttgtctgtctca

SEQ ID NO: 19468 - DNA, 24 bp, Artificial Sequence
  Synthetic
ccttttcaaacccttcagtatccc

SEQ ID NO: 19469 - DNA, 25 bp, Artificial Sequence
  Synthetic
catcgttcccttcaatttttctctt

SEQ ID NO: 19470 - DNA, 21 bp, Artificial Sequence
  Synthetic
agctctagtgggtttgatgca

SEQ ID NO: 19471 - DNA, 24 bp, Artificial Sequence
  Synthetic
gctttttttcaatatccccctgca

SEQ ID NO: 19472 - DNA, 25 bp, Artificial Sequence
  Synthetic
cattgatcaaaaaggtcattgctcc

SEQ ID NO: 19473 - DNA, 23 bp, Artificial Sequence
  Synthetic
acgttatcattagctgtgcttgt

SEQ ID NO: 19474 - DNA, 25 bp, Artificial Sequence
  Synthetic
ggtcagttttcataacctcttggtc

SEQ ID NO: 19475 - DNA, 25 bp, Artificial Sequence
  Synthetic
ggttttgaaatctccaagatcaggg

SEQ ID NO: 19476 - DNA, 25 bp, Artificial Sequence
  Synthetic
gcatggataacagggaatcttgttt

SEQ ID NO: 19477 - DNA, 25 bp, Artificial Sequence
  Synthetic
agcgacaatctatcttcacatgatt

SEQ ID NO: 19478 - DNA, 24 bp, Artificial Sequence
  Synthetic
cacaatggacaagaaaaaccatcc

SEQ ID NO: 19479 - DNA, 25 bp, Artificial Sequence
  Synthetic
caccaagaattattaacgccaagaa

SEQ ID NO: 19480 - DNA, 24 bp, Artificial Sequence
  Synthetic
caccacacttacccatgtacatat

SEQ ID NO: 19481 - DNA, 25 bp, Artificial Sequence
  Synthetic
cagctttaacaagtctagcaacatt

SEQ ID NO: 19482 - DNA, 25 bp, Artificial Sequence
  Synthetic
gcaacataagacaagctacattcac

SEQ ID NO: 19483 - DNA, 21 bp, Artificial Sequence
  Synthetic
acctgcacaattacagccaat

SEQ ID NO: 19484 - DNA, 25 bp, Artificial Sequence
  Synthetic
tgagcacaaatatcatgtccaacta

SEQ ID NO: 19485 - DNA, 25 bp, Artificial Sequence
  Synthetic
accagctttattacaaccatagaca

SEQ ID NO: 19486 - DNA, 25 bp, Artificial Sequence
  Synthetic
caacatctgaatcaatggaacaaca

SEQ ID NO: 19487 - DNA, 25 bp, Artificial Sequence
  Synthetic
agcattcttcataacaccatctgaa

SEQ ID NO: 19488 - DNA, 20 bp, Artificial Sequence
  Synthetic
acaagttgacagccctgcat

SEQ ID NO: 19489 - DNA, 25 bp, Artificial Sequence
  Synthetic
gcaataacattaacagtctggacgt

SEQ ID NO: 19490 - DNA, 24 bp, Artificial Sequence
  Synthetic
gttagtaagtgctaggtctgccat

SEQ ID NO: 19491 - DNA, 25 bp, Artificial Sequence
  Synthetic
gcaccaccataagaatcttggttaa

SEQ ID NO: 19492 - DNA, 25 bp, Artificial Sequence
  Synthetic
accattgaccatacaaatcttggtt

SEQ ID NO: 19493 - DNA, 25 bp, Artificial Sequence
  Synthetic
ggtgtgtgtcaacatctaagttcat

SEQ ID NO: 19494 - DNA, 25 bp, Artificial Sequence
  Synthetic
gtgggcagaacattacgtttagtat

SEQ ID NO: 19495 - DNA, 25 bp, Artificial Sequence
  Synthetic
cgggccaaaactaaactactaacaa

SEQ ID NO: 19496 - DNA, 25 bp, Artificial Sequence
  Synthetic
gctctatcaaaagaacactgtcagt

SEQ ID NO: 19497 - DNA, 25 bp, Artificial Sequence
  Synthetic
tgccagaacataatcatcaacttct

SEQ ID NO: 19498 - DNA, 25 bp, Artificial Sequence
  Synthetic
acaccaatggaacactataaacact

SEQ ID NO: 19499 - DNA, 23 bp, Artificial Sequence
  Synthetic
tgttccaatgttttcgcgagtag

SEQ ID NO: 19500 - DNA, 25 bp, Artificial Sequence
  Synthetic
aaacctttaggattgcctatgtcat

SEQ ID NO: 19501 - DNA, 25 bp, Artificial Sequence
  Synthetic
gcgcttcttaaaggaacgtaatcaa

SEQ ID NO: 19502 - DNA, 25 bp, Artificial Sequence
  Synthetic
caactttatccacaatcacaccatt

SEQ ID NO: 19503 - DNA, 25 bp, Artificial Sequence
  Synthetic
cgcatattaacaggaacagctaatg

SEQ ID NO: 19504 - DNA, 21 bp, Artificial Sequence
  Synthetic
accaataggacaggaagcaga

SEQ ID NO: 19505 - DNA, 25 bp, Artificial Sequence
  Synthetic
cgaagaggaagaagaaggtgagtta

SEQ ID NO: 19506 - DNA, 25 bp, Artificial Sequence
  Synthetic
gcagttaaacgaccattaataagcc

SEQ ID NO: 19507 - DNA, 25 bp, Artificial Sequence
  Synthetic
tgaccacgaataacagtagcagtta

SEQ ID NO: 19508 - DNA, 21 bp, Artificial Sequence
  Synthetic
ggtcagcccaagaagttttct

SEQ ID NO: 19509 - DNA, 23 bp, Artificial Sequence
  Synthetic
gcttttggcgaggttttgttaaa

SEQ ID NO: 19510 - DNA, 25 bp, Artificial Sequence
  Synthetic
agagtcaaactgttctggtaattgt

SEQ ID NO: 19511 - DNA, 25 bp, Artificial Sequence
  Synthetic
cctctccatactctttcattgcttt

SEQ ID NO: 19512 - DNA, 21 bp, Artificial Sequence
  Synthetic
cctctgttggccatttcttgt

SEQ ID NO: 19513 - DNA, 23 bp, Artificial Sequence
  Synthetic
gtttgattggtcttggtgttgtc

SEQ ID NO: 19514 - DNA, 25 bp, Artificial Sequence
  Synthetic
tcatgtttttagtccttgggatctt

SEQ ID NO: 19515 - DNA, 22 bp, Artificial Sequence
  Synthetic
ctcctcatgcttgcaatgtact

SEQ ID NO: 19516 - DNA, 20 bp, Artificial Sequence
  Synthetic
atgtggctcaagtctcgggt

SEQ ID NO: 19517 - DNA, 25 bp, Artificial Sequence
  Synthetic
ggccatgcttctgatttattctcaa

SEQ ID NO: 19518 - DNA, 23 bp, Artificial Sequence
  Synthetic
caccaaccattcttccaacagat

SEQ ID NO: 19519 - DNA, 22 bp, Artificial Sequence
  Synthetic
tctccagaagttccggtcatta

SEQ ID NO: 19520 - DNA, 20 bp, Artificial Sequence
  Synthetic
tgagtgcagaccgtgccaga

SEQ ID NO: 19521 - DNA, 25 bp, Artificial Sequence
  Synthetic
gggatcactcttgttcctctaatga

SEQ ID NO: 19522 - DNA, 20 bp, Artificial Sequence
  Synthetic
attccaaaggacgacgcgac

SEQ ID NO: 19523 - DNA, 20 bp, Artificial Sequence
  Synthetic
tggatggggtgtccggggag

SEQ ID NO: 19524 - DNA, 23 bp, Artificial Sequence
  Synthetic
gcctcttcttgaagtcgtctaag

SEQ ID NO: 19525 - DNA, 25 bp, Artificial Sequence
  Synthetic
ctcgctttcttcttataggcatgtt

SEQ ID NO: 19526 - DNA, 20 bp, Artificial Sequence
  Synthetic
ttaccaaaaggacgcccagt

SEQ ID NO: 19527 - DNA, 23 bp, Artificial Sequence
  Synthetic
catccaatacagcagaaacaccc

SEQ ID NO: 19528 - DNA, 25 bp, Artificial Sequence
  Synthetic
gtctccaatctttgtgtaggagtac

SEQ ID NO: 19529 - DNA, 22 bp, Artificial Sequence
  Synthetic
ctggagcatactcagttaaccg

SEQ ID NO: 19530 - DNA, 23 bp, Artificial Sequence
  Synthetic
gctggtgcacatcctacaataaa

SEQ ID NO: 19531 - DNA, 25 bp, Artificial Sequence
  Synthetic
tgtcatccgtaaataatctggccat

SEQ ID NO: 19532 - DNA, 25 bp, Artificial Sequence
  Synthetic
aaaagctaattgccattgatcaagt

SEQ ID NO: 19533 - DNA, 25 bp, Artificial Sequence
  Synthetic
ccatttagcaggcctatctgataca

SEQ ID NO: 19534 - DNA, 24 bp, Artificial Sequence
  Synthetic
caccaactgttactgaagaactga

SEQ ID NO: 19535 - DNA, 25 bp, Artificial Sequence
  Synthetic
gaaacaaacttccaaatgtgtgcat

SEQ ID NO: 19536 - DNA, 25 bp, Artificial Sequence
  Synthetic
accggttctctttgtaatcatacaa

SEQ ID NO: 19537 - DNA, 21 bp, Artificial Sequence
  Synthetic
tcggactgacgaaaggaatcc

SEQ ID NO: 19538 - DNA, 21 bp, Artificial Sequence
  Synthetic
gccatattttcaccgagtgcc

SEQ ID NO: 19539 - DNA, 25 bp, Artificial Sequence
  Synthetic
gctgtaaaatagttcctcctcatgc

SEQ ID NO: 19540 - DNA, 20 bp, Artificial Sequence
  Synthetic
tcccatttgtgtggctccag

SEQ ID NO: 19541 - DNA, 25 bp, Artificial Sequence
  Synthetic
gccatgtttccgatttgttttcaaa

SEQ ID NO: 19542 - DNA, 25 bp, Artificial Sequence
  Synthetic
acatgtctctcatactgagtagctt

SEQ ID NO: 19543 - DNA, 21 bp, Artificial Sequence
  Synthetic
cctaggcatcagcatgtacca

SEQ ID NO: 19544 - DNA, 25 bp, Artificial Sequence
  Synthetic
cgctcgaattgagttatcattccat

SEQ ID NO: 19545 - DNA, 25 bp, Artificial Sequence
  Synthetic
cactcttctctttctctggaaatgt

SEQ ID NO: 19546 - DNA, 24 bp, Artificial Sequence
  Synthetic
gtccagattgctcaagtttttcac

SEQ ID NO: 19547 - DNA, 20 bp, Artificial Sequence
  Synthetic
gcccatcccaccagtatgtg

SEQ ID NO: 19548 - DNA, 25 bp, Artificial Sequence
  Synthetic
tcatgtcagccgattcattaattcc

SEQ ID NO: 19549 - DNA, 25 bp, Artificial Sequence
  Synthetic
tggtacatttgttcatcctcaagaa

SEQ ID NO: 19550 - DNA, 23 bp, Artificial Sequence
  Synthetic
attgccaaattcagccatcctat

SEQ ID NO: 19551 - DNA, 25 bp, Artificial Sequence
  Synthetic
acacaatgtcatgtacagtaggttt

SEQ ID NO: 19552 - DNA, 22 bp, Artificial Sequence
  Synthetic
cctgtgcatgtaatagcgcttg

SEQ ID NO: 19553 - DNA, 22 bp, Artificial Sequence
  Synthetic
ctcaggtgtgtctcctgttact

SEQ ID NO: 19554 - DNA, 22 bp, Artificial Sequence
  Synthetic
acactggattgccattgctatc

SEQ ID NO: 19555 - DNA, 25 bp, Artificial Sequence
  Synthetic
aatttgaaatgttggtaccacgtgg

SEQ ID NO: 19556 - DNA, 21 bp, Artificial Sequence
  Synthetic
agcaattgcagtagcggatac

SEQ ID NO: 19557 - DNA, 25 bp, Artificial Sequence
  Synthetic
ccacagattcaattacaacaggtgg

SEQ ID NO: 19558 - DNA, 25 bp, Artificial Sequence
  Synthetic
tcccagatgtaggggtagtaataaa

SEQ ID NO: 19559 - DNA, 25 bp, Artificial Sequence
  Synthetic
ggcctatgtaaacgaacaatatcca

SEQ ID NO: 19560 - DNA, 24 bp, Artificial Sequence
  Synthetic
tcaggtaatgtaacccgaaacact

SEQ ID NO: 19561 - DNA, 25 bp, Artificial Sequence
  Synthetic
gggtttgtttataatccactgacac

SEQ ID NO: 19562 - DNA, 20 bp, Artificial Sequence
  Synthetic
ctgtccccatatgcatctgc

SEQ ID NO: 19563 - DNA, 24 bp, Artificial Sequence
  Synthetic
tcttgtgactaaaacatccgagct

SEQ ID NO: 19564 - DNA, 24 bp, Artificial Sequence
  Synthetic
tgcattgttgtttggtcctgatat

SEQ ID NO: 19565 - DNA, 20 bp, Artificial Sequence
  Synthetic
ccaattgtccctgcatgtgc

SEQ ID NO: 19566 - DNA, 23 bp, Artificial Sequence
  Synthetic
gctgtgcttattgtcctccctag

SEQ ID NO: 19567 - DNA, 21 bp, Artificial Sequence
  Synthetic
gccatatggtccacagtggtc

SEQ ID NO: 19568 - DNA, 25 bp, Artificial Sequence
  Synthetic
agggtaatgaactgtacttgttgtt

SEQ ID NO: 19569 - DNA, 20 bp, Artificial Sequence
  Synthetic
gtacgccaccatcaagggag

SEQ ID NO: 19570 - DNA, 21 bp, Artificial Sequence
  Synthetic
tgctaatgggtctgctgacac

SEQ ID NO: 19571 - DNA, 24 bp, Artificial Sequence
  Synthetic
tcccaaccattgtgaattcttcat

SEQ ID NO: 19572 - DNA, 25 bp, Artificial Sequence
  Synthetic
cccacatcattgatgacgaataagt

SEQ ID NO: 19573 - DNA, 22 bp, Artificial Sequence
  Synthetic
gcagcaaaggggagaagtttta

SEQ ID NO: 19574 - DNA, 25 bp, Artificial Sequence
  Synthetic
gtcttctttgcccaaaatgagaaat

SEQ ID NO: 19575 - DNA, 25 bp, Artificial Sequence
  Synthetic
tcttggtttggattccatcagaatt

SEQ ID NO: 19576 - DNA, 25 bp, Artificial Sequence
  Synthetic
agcgtgtcaactctaaataattgct

SEQ ID NO: 19577 - DNA, 25 bp, Artificial Sequence
  Synthetic
gacactctttgtggagaaatgtgaa

SEQ ID NO: 19578 - DNA, 22 bp, Artificial Sequence
  Synthetic
acttcttcaggagatgggacac

SEQ ID NO: 19579 - DNA, 24 bp, Artificial Sequence
  Synthetic
cagcttcacctaatggtctgtaac

SEQ ID NO: 19580 - DNA, 25 bp, Artificial Sequence
  Synthetic
ggtagcagtagagtcagtgattgta

SEQ ID NO: 19581 - DNA, 20 bp, Artificial Sequence
  Synthetic
gctacttctgccaagtcccg

SEQ ID NO: 19582 - DNA, 25 bp, Artificial Sequence
  Synthetic
cgttgtagctagtatgtcgtcaact

SEQ ID NO: 19583 - DNA, 25 bp, Artificial Sequence
  Synthetic
ctttgttaaagtaaggatggcctgt

SEQ ID NO: 19584 - DNA, 25 bp, Artificial Sequence
  Synthetic
ctgctttatcttcttgtaaacggct

SEQ ID NO: 19585 - DNA, 21 bp, Artificial Sequence
  Synthetic
ggtgttaagaatgcaccccca

SEQ ID NO: 19586 - DNA, 22 bp, Artificial Sequence
  Synthetic
gtttctaatgccctcctccgtg

SEQ ID NO: 19587 - DNA, 25 bp, Artificial Sequence
  Synthetic
gcattttcatccccattagtcaatg

SEQ ID NO: 19588 - DNA, 25 bp, Artificial Sequence
  Synthetic
cgcggaggatctgttattatttgat

SEQ ID NO: 19589 - DNA, 25 bp, Artificial Sequence
  Synthetic
aaagcacttctcatatacacatcca

SEQ ID NO: 19590 - DNA, 21 bp, Artificial Sequence
  Synthetic
gtttgtatgccctgccttctg

SEQ ID NO: 19591 - DNA, 25 bp, Artificial Sequence
  Synthetic
atgtctataaagtacaggccatccg

SEQ ID NO: 19592 - DNA, 25 bp, Artificial Sequence
  Synthetic
gctgtgctaatacactgaaataagc

SEQ ID NO: 19593 - DNA, 21 bp, Artificial Sequence
  Synthetic
tgggaacatagccagaggccc

SEQ ID NO: 19594 - DNA, 24 bp, Artificial Sequence
  Synthetic
aggatgcccatatacagagatgta

SEQ ID NO: 19595 - DNA, 23 bp, Artificial Sequence
  Synthetic
aggccacttcttgtacgaatagt

SEQ ID NO: 19596 - DNA, 23 bp, Artificial Sequence
  Synthetic
agccacaaagacatctgcaaaat

SEQ ID NO: 19597 - DNA, 24 bp, Artificial Sequence
  Synthetic
caaacaaggagtacagcctactac

SEQ ID NO: 19598 - DNA, 22 bp, Artificial Sequence
  Synthetic
gccagcgtctgacttaacattt

SEQ ID NO: 19599 - DNA, 25 bp, Artificial Sequence
  Synthetic
ccagtttgagataaaaatctgcgac

SEQ ID NO: 19600 - DNA, 24 bp, Artificial Sequence
  Synthetic
aatattacaaaacatcgctgccgg

SEQ ID NO: 19601 - DNA, 21 bp, Artificial Sequence
  Synthetic
cctcctcctcaggatcaccat

SEQ ID NO: 19602 - DNA, 25 bp, Artificial Sequence
  Synthetic
tgcccctcatttaattcaagagaat

SEQ ID NO: 19603 - DNA, 21 bp, Artificial Sequence
  Synthetic
tgtgacagcttccaaccttgg

SEQ ID NO: 19604 - DNA, 25 bp, Artificial Sequence
  Synthetic
taacccagttttcacaacatgatct

SEQ ID NO: 19605 - DNA, 25 bp, Artificial Sequence
  Synthetic
atgtcccagtttgtgaatatgtttg

SEQ ID NO: 19606 - DNA, 20 bp, Artificial Sequence
  Synthetic
tgctcgttggatcttcggcg

SEQ ID NO: 19607 - DNA, 25 bp, Artificial Sequence
  Synthetic
gctggtgtaatgtctaatgtagcaa

SEQ ID NO: 19608 - DNA, 20 bp, Artificial Sequence
  Synthetic
aggtgtactggtacgtggag

SEQ ID NO: 19609 - DNA, 24 bp, Artificial Sequence
  Synthetic
ctgcagatgtttctgaaaaccgag

SEQ ID NO: 19610 - DNA, 25 bp, Artificial Sequence
  Synthetic
tgttgcaaatatcagctgtgcatta

SEQ ID NO: 19611 - DNA, 21 bp, Artificial Sequence
  Synthetic
cgtttgcgtcgcctaagaaga

SEQ ID NO: 19612 - DNA, 25 bp, Artificial Sequence
  Synthetic
gctctgtctatcattgcaaatttgt

SEQ ID NO: 19613 - DNA, 25 bp, Artificial Sequence
  Synthetic
gcatttgttttggatccattgaaac

SEQ ID NO: 19614 - DNA, 24 bp, Artificial Sequence
  Synthetic
agtgtgccaagtgattgtttctta

SEQ ID NO: 19615 - DNA, 20 bp, Artificial Sequence
  Synthetic
ctgcccatctccacgcgaag

SEQ ID NO: 19616 - DNA, 22 bp, Artificial Sequence
  Synthetic
gccgtgctgcacctcaaacatt

SEQ ID NO: 19617 - DNA, 22 bp, Artificial Sequence
  Synthetic
ctgaactaagactgggtgtcca

SEQ ID NO: 19618 - DNA, 21 bp, Artificial Sequence
  Synthetic
cgaggcaggcttacatgggag

SEQ ID NO: 19619 - DNA, 19 bp, Artificial Sequence
  Synthetic
cgggctggtccagggactt

SEQ ID NO: 19620 - DNA, 19 bp, Artificial Sequence
  Synthetic
cgcagggcaagacgaggga

SEQ ID NO: 19621 - DNA, 21 bp, Artificial Sequence
  Synthetic
cacgctggagggacattgtcc

SEQ ID NO: 19622 - DNA, 25 bp, Artificial Sequence
  Synthetic
cccagctcattttggaaaataaaca

SEQ ID NO: 19623 - DNA, 19 bp, Artificial Sequence
  Synthetic
tgcgccgcctaatgcatcc

SEQ ID NO: 19624 - DNA, 19 bp, Artificial Sequence
  Synthetic
tccttcttccacggcgccg

SEQ ID NO: 19625 - DNA, 19 bp, Artificial Sequence
  Synthetic
tcgagctcgctggcgtgag

SEQ ID NO: 19626 - DNA, 20 bp, Artificial Sequence
  Synthetic
acttgtaggcccggggaccc

SEQ ID NO: 19627 - DNA, 22 bp, Artificial Sequence
  Synthetic
cccacaccatcagcagcgtctt

SEQ ID NO: 19628 - DNA, 20 bp, Artificial Sequence
  Synthetic
cccccatcactctcccaggc

SEQ ID NO: 19629 - DNA, 19 bp, Artificial Sequence
  Synthetic
actcggcctggtctcggct

SEQ ID NO: 19630 - DNA, 20 bp, Artificial Sequence
  Synthetic
ccctgcgacccccttaaccc

SEQ ID NO: 19631 - DNA, 19 bp, Artificial Sequence
  Synthetic
agcactcggcggggctttc

SEQ ID NO: 19632 - DNA, 21 bp, Artificial Sequence
  Synthetic
aattaggaaggcgctgggggc

SEQ ID NO: 19633 - DNA, 19 bp, Artificial Sequence
  Synthetic
cgtccctggccacgaagga

SEQ ID NO: 19634 - DNA, 20 bp, Artificial Sequence
  Synthetic
gcaaccaggcccactgcaag

SEQ ID NO: 19635 - DNA, 19 bp, Artificial Sequence
  Synthetic
agacccaccacctcgtgcc

SEQ ID NO: 19636 - DNA, 20 bp, Artificial Sequence
  Synthetic
cggaagaggaggaggaggcg

SEQ ID NO: 19637 - DNA, 20 bp, Artificial Sequence
  Synthetic
ggggtggtgaggatgcagct

SEQ ID NO: 19638 - DNA, 22 bp, Artificial Sequence
  Synthetic
cgttgcaggcctccttcaaaag

SEQ ID NO: 19639 - DNA, 19 bp, Artificial Sequence
  Synthetic
tcatccccctgcgtgtcgg

SEQ ID NO: 19640 - DNA, 19 bp, Artificial Sequence
  Synthetic
tgtcaaccggccccgcaac

SEQ ID NO: 19641 - DNA, 19 bp, Artificial Sequence
  Synthetic
tgcggcagaggctaagcgc

SEQ ID NO: 19642 - DNA, 20 bp, Artificial Sequence
  Synthetic
ctctccagtgcggtgttgct

SEQ ID NO: 19643 - DNA, 19 bp, Artificial Sequence
  Synthetic
tctcgtcccacctggcgga

SEQ ID NO: 19644 - DNA, 19 bp, Artificial Sequence
  Synthetic
tcacgtccctggccgagct

SEQ ID NO: 19645 - DNA, 21 bp, Artificial Sequence
  Synthetic
accgcgttaacatctcggcca

SEQ ID NO: 19646 - DNA, 22 bp, Artificial Sequence
  Synthetic
ggcttccgcctgttttgtttgt

SEQ ID NO: 19647 - DNA, 21 bp, Artificial Sequence
  Synthetic
cggagttgatgaaaggggccg

SEQ ID NO: 19648 - DNA, 20 bp, Artificial Sequence
  Synthetic
aactccacgctgcgtccatc

SEQ ID NO: 19649 - DNA, 19 bp, Artificial Sequence
  Synthetic
agacgaggcacaggcaccc

SEQ ID NO: 19650 - DNA, 22 bp, Artificial Sequence
  Synthetic
accggtgacaccaagtccatct

SEQ ID NO: 19651 - DNA, 22 bp, Artificial Sequence
  Synthetic
tgttcaggttttgctcaaggaa

SEQ ID NO: 19652 - DNA, 22 bp, Artificial Sequence
  Synthetic
cgccaaccaacacctccctcta

SEQ ID NO: 19653 - DNA, 22 bp, Artificial Sequence
  Synthetic
ggagtccggacagtttcatgct

SEQ ID NO: 19654 - DNA, 22 bp, Artificial Sequence
  Synthetic
ggcagacatccgcgattacctt

SEQ ID NO: 19655 - DNA, 19 bp, Artificial Sequence
  Synthetic
tggccctgatcctgagccg

SEQ ID NO: 19656 - DNA, 20 bp, Artificial Sequence
  Synthetic
tcacgtcctctaccccggcg

SEQ ID NO: 19657 - DNA, 22 bp, Artificial Sequence
  Synthetic
cgtgtgctgcctggaacacaat

SEQ ID NO: 19658 - DNA, 19 bp, Artificial Sequence
  Synthetic
actcgggagtctctggccc

SEQ ID NO: 19659 - DNA, 22 bp, Artificial Sequence
  Synthetic
accgtctatagcgcctttgggt

SEQ ID NO: 19660 - DNA, 22 bp, Artificial Sequence
  Synthetic
cgcgcaggcttactttttgcat

SEQ ID NO: 19661 - DNA, 22 bp, Artificial Sequence
  Synthetic
cagggggatctttacgtgggtg

SEQ ID NO: 19662 - DNA, 22 bp, Artificial Sequence
  Synthetic
acctgggcttatgcagacgagt

SEQ ID NO: 19663 - DNA, 20 bp, Artificial Sequence
  Synthetic
ggtggtctgccaaagctgct

SEQ ID NO: 19664 - DNA, 21 bp, Artificial Sequence
  Synthetic
ctgcgaagagcgtcactgtgt

SEQ ID NO: 19665 - DNA, 20 bp, Artificial Sequence
  Synthetic
tgttcaacgcggtcaaggcc

SEQ ID NO: 19666 - DNA, 20 bp, Artificial Sequence
  Synthetic
tggttggggctgcttcccag

SEQ ID NO: 19667 - DNA, 19 bp, Artificial Sequence
  Synthetic
aactgcgagggggcctggt

SEQ ID NO: 19668 - DNA, 21 bp, Artificial Sequence
  Synthetic
acaggcaactacatggggccg

SEQ ID NO: 19669 - DNA, 19 bp, Artificial Sequence
  Synthetic
caacccggcagagctccag

SEQ ID NO: 19670 - DNA, 22 bp, Artificial Sequence
  Synthetic
agcgtcccctgttaggtccttg

SEQ ID NO: 19671 - DNA, 21 bp, Artificial Sequence
  Synthetic
ggtcctaactggtcaggggca

SEQ ID NO: 19672 - DNA, 19 bp, Artificial Sequence
  Synthetic
agcagctggccccgaatcc

SEQ ID NO: 19673 - DNA, 19 bp, Artificial Sequence
  Synthetic
cctacacgaccgccaaggg

SEQ ID NO: 19674 - DNA, 20 bp, Artificial Sequence
  Synthetic
gttgagaccgtcctggcagg

SEQ ID NO: 19675 - DNA, 19 bp, Artificial Sequence
  Synthetic
ttccccaggcagtcccagc

SEQ ID NO: 19676 - DNA, 22 bp, Artificial Sequence
  Synthetic
cccggactcgttttacggactc

SEQ ID NO: 19677 - DNA, 22 bp, Artificial Sequence
  Synthetic
caacgggactgtcatggaaatt

SEQ ID NO: 19678 - DNA, 20 bp, Artificial Sequence
  Synthetic
gcggctgaacgtgactaccc

SEQ ID NO: 19679 - DNA, 19 bp, Artificial Sequence
  Synthetic
atcctgccagcgggagagg

SEQ ID NO: 19680 - DNA, 19 bp, Artificial Sequence
  Synthetic
tggaggggggccaaagagg

SEQ ID NO: 19681 - DNA, 22 bp, Artificial Sequence
  Synthetic
caccagtttctttccgcggtgg

SEQ ID NO: 19682 - DNA, 22 bp, Artificial Sequence
  Synthetic
ggcacaggagcgattaagtcct

SEQ ID NO: 19683 - DNA, 22 bp, Artificial Sequence
  Synthetic
tggccaacatgacttccgtcaa

SEQ ID NO: 19684 - DNA, 22 bp, Artificial Sequence
  Synthetic
cagatccacgaccgcatccagt

SEQ ID NO: 19685 - DNA, 19 bp, Artificial Sequence
  Synthetic
aggcgaccccatgatgcgg

SEQ ID NO: 19686 - DNA, 21 bp, Artificial Sequence
  Synthetic
ggggtgacgaggatggaaagg

SEQ ID NO: 19687 - DNA, 19 bp, Artificial Sequence
  Synthetic
tggctcgctgctgtgacgc

SEQ ID NO: 19688 - DNA, 20 bp, Artificial Sequence
  Synthetic
cgagggtgccgcctttgaga

SEQ ID NO: 19689 - DNA, 19 bp, Artificial Sequence
  Synthetic
tggcggtgccggtgaatcc

SEQ ID NO: 19690 - DNA, 19 bp, Artificial Sequence
  Synthetic
tggaggcctcgcacgagac

SEQ ID NO: 19691 - DNA, 20 bp, Artificial Sequence
  Synthetic
acaggaggtagcggtggggc

SEQ ID NO: 19692 - DNA, 21 bp, Artificial Sequence
  Synthetic
cgctcctttgtggcatcaccg

SEQ ID NO: 19693 - DNA, 18 bp, Artificial Sequence
  Synthetic
tggtttgcgaggctgggc

SEQ ID NO: 19694 - DNA, 21 bp, Artificial Sequence
  Synthetic
gctcatcatcagcgtcctgcg

SEQ ID NO: 19695 - DNA, 22 bp, Artificial Sequence
  Synthetic
gctacctcatgttcagggccat

SEQ ID NO: 19696 - DNA, 20 bp, Artificial Sequence
  Synthetic
cccttggtcacgcttggctg

SEQ ID NO: 19697 - DNA, 25 bp, Artificial Sequence
  Synthetic
tgccaatatctaagttgccttagtt

SEQ ID NO: 19698 - DNA, 22 bp, Artificial Sequence
  Synthetic
gctggcaaattgctcgtgacaa

SEQ ID NO: 19699 - DNA, 25 bp, Artificial Sequence
  Synthetic
ttgccgtaccaattccatatatgat

SEQ ID NO: 19700 - DNA, 25 bp, Artificial Sequence
  Synthetic
tggtggttctattagcatgtttgtt

SEQ ID NO: 19701 - DNA, 25 bp, Artificial Sequence
  Synthetic
gcatctttcacatatttggcttgac

SEQ ID NO: 19702 - DNA, 22 bp, Artificial Sequence
  Synthetic
aaccgtaataggctcatgcaaa

SEQ ID NO: 19703 - DNA, 21 bp, Artificial Sequence
  Synthetic
gcacgtgttgccagtgtttaa

SEQ ID NO: 19704 - DNA, 20 bp, Artificial Sequence
  Synthetic
attgcttaggcactgcgtcc

SEQ ID NO: 19705 - DNA, 22 bp, Artificial Sequence
  Synthetic
ggtgtcctgggtgctagacaca

SEQ ID NO: 19706 - DNA, 22 bp, Artificial Sequence
  Synthetic
ggcctctatgcccttaggaata

SEQ ID NO: 19707 - DNA, 20 bp, Artificial Sequence
  Synthetic
gctggttgtgtggtagtcac

SEQ ID NO: 19708 - DNA, 20 bp, Artificial Sequence
  Synthetic
tagtggcatgggaggtggaa

SEQ ID NO: 19709 - DNA, 21 bp, Artificial Sequence
  Synthetic
acttgcctggcgaataggaaa

SEQ ID NO: 19710 - DNA, 25 bp, Artificial Sequence
  Synthetic
gcattttcagtgtcattaagcttgt

SEQ ID NO: 19711 - DNA, 21 bp, Artificial Sequence
  Synthetic
ccaagggaacgtcagacctat

SEQ ID NO: 19712 - DNA, 24 bp, Artificial Sequence
  Synthetic
aaggcttgttaaacaactgtgact

SEQ ID NO: 19713 - DNA, 23 bp, Artificial Sequence
  Synthetic
aagactagcagtaggaggtggta

SEQ ID NO: 19714 - DNA, 20 bp, Artificial Sequence
  Synthetic
caccggacagggggggttat

SEQ ID NO: 19715 - DNA, 25 bp, Artificial Sequence
  Synthetic
tgcacggtgagtaacacatgtatta

SEQ ID NO: 19716 - DNA, 25 bp, Artificial Sequence
  Synthetic
ccaaactttgattcaccttttcctg

SEQ ID NO: 19717 - DNA, 25 bp, Artificial Sequence
  Synthetic
cgacaaactctcttctgctaaaaga

SEQ ID NO: 19718 - DNA, 25 bp, Artificial Sequence
  Synthetic
gctttattgcaatcctctgctaact

SEQ ID NO: 19719 - DNA, 25 bp, Artificial Sequence
  Synthetic
ggtaaccgtttctctactttttcct

SEQ ID NO: 19720 - DNA, 25 bp, Artificial Sequence
  Synthetic
gtcatttggcgcatttcatatcttt

SEQ ID NO: 19721 - DNA, 25 bp, Artificial Sequence
  Synthetic
tgaaacagtttttgggttgggtatt

SEQ ID NO: 19722 - DNA, 22 bp, Artificial Sequence
  Synthetic
cttcgtcctccagctcgaagac

SEQ ID NO: 19723 - DNA, 20 bp, Artificial Sequence
  Synthetic
gacgaaatccagtggcaccc

SEQ ID NO: 19724 - DNA, 25 bp, Artificial Sequence
  Synthetic
gctatgtcttcttggccatgtagaa

SEQ ID NO: 19725 - DNA, 24 bp, Artificial Sequence
  Synthetic
tggtaatgcaccttttgtgtcaaa

SEQ ID NO: 19726 - DNA, 25 bp, Artificial Sequence
  Synthetic
tctacgtttcaataaagcaggatgt

SEQ ID NO: 19727 - DNA, 24 bp, Artificial Sequence
  Synthetic
acctgcttaggatccatactaaga

SEQ ID NO: 19728 - DNA, 25 bp, Artificial Sequence
  Synthetic
cgctctgttaaatctacgttccaaa

SEQ ID NO: 19729 - DNA, 21 bp, Artificial Sequence
  Synthetic
aacacgcaggttatgttcagg

SEQ ID NO: 19730 - DNA, 21 bp, Artificial Sequence
  Synthetic
cctcgccaaagcccagctatt

SEQ ID NO: 19731 - DNA, 22 bp, Artificial Sequence
  Synthetic
tctccaccaccagccttactgt

SEQ ID NO: 19732 - DNA, 22 bp, Artificial Sequence
  Synthetic
tccatccccgggatgcctacta

SEQ ID NO: 19733 - DNA, 22 bp, Artificial Sequence
  Synthetic
gtcgcgtcaatatccacttgcg

SEQ ID NO: 19734 - DNA, 20 bp, Artificial Sequence
  Synthetic
tgacaccctctgcaactgtg

SEQ ID NO: 19735 - DNA, 25 bp, Artificial Sequence
  Synthetic
ccaattatttcactagcattgccca

SEQ ID NO: 19736 - DNA, 20 bp, Artificial Sequence
  Synthetic
tgctctgcccgtttgtaatg

SEQ ID NO: 19737 - DNA, 22 bp, Artificial Sequence
  Synthetic
gtggagttggcataggaaatca

SEQ ID NO: 19738 - DNA, 25 bp, Artificial Sequence
  Synthetic
acaggaaatgcattaggaaaggtaa

SEQ ID NO: 19739 - DNA, 24 bp, Artificial Sequence
  Synthetic
tcatcatcaccgctttgtacatat

SEQ ID NO: 19740 - DNA, 21 bp, Artificial Sequence
  Synthetic
ccgagtcgctgacgcttatgc

SEQ ID NO: 19741 - DNA, 20 bp, Artificial Sequence
  Synthetic
gccaggtggaggttactttg

SEQ ID NO: 19742 - DNA, 25 bp, Artificial Sequence
  Synthetic
ggaaggatagacagccaaaagaaga

SEQ ID NO: 19743 - DNA, 21 bp, Artificial Sequence
  Synthetic
cccccccatctctatcacgta

SEQ ID NO: 19744 - DNA, 21 bp, Artificial Sequence
  Synthetic
gggatgtatccagtgcgccca

SEQ ID NO: 19745 - DNA, 25 bp, Artificial Sequence
  Synthetic
caggattgtcataggtaacaagtgt

SEQ ID NO: 19746 - DNA, 25 bp, Artificial Sequence
  Synthetic
cactatagggttttttcctgattgc

SEQ ID NO: 19747 - DNA, 23 bp, Artificial Sequence
  Synthetic
ccatagtaagattgtcccgggtg

SEQ ID NO: 19748 - DNA, 20 bp, Artificial Sequence
  Synthetic
caccatatggctcagctgcc

SEQ ID NO: 19749 - DNA, 21 bp, Artificial Sequence
  Synthetic
gcagataccattgttagggcc

SEQ ID NO: 19750 - DNA, 21 bp, Artificial Sequence
  Synthetic
aaggaacccgtgtacagacac

SEQ ID NO: 19751 - DNA, 20 bp, Artificial Sequence
  Synthetic
ccgaaatcggtccgggggta

SEQ ID NO: 19752 - DNA, 21 bp, Artificial Sequence
  Synthetic
cgccatggctagacgctttct

SEQ ID NO: 19753 - DNA, 22 bp, Artificial Sequence
  Synthetic
cggcaacaagtatactccgcca

SEQ ID NO: 19754 - DNA, 22 bp, Artificial Sequence
  Synthetic
gtaccccatgaggtcggcaaag

SEQ ID NO: 19755 - DNA, 22 bp, Artificial Sequence
  Synthetic
ccggtatccagcactgagatgc

SEQ ID NO: 19756 - DNA, 22 bp, Artificial Sequence
  Synthetic
cccaatgagccccgctaatgat

SEQ ID NO: 19757 - DNA, 22 bp, Artificial Sequence
  Synthetic
tcgggacatcctgacgagttga

SEQ ID NO: 19758 - DNA, 21 bp, Artificial Sequence
  Synthetic
gctctagtacggcagggtggt

SEQ ID NO: 19759 - DNA, 22 bp, Artificial Sequence
  Synthetic
cgtggtggagtgcaacaaagga

SEQ ID NO: 19760 - DNA, 22 bp, Artificial Sequence
  Synthetic
cccttgatgtaccaagcagcca

SEQ ID NO: 19761 - DNA, 20 bp, Artificial Sequence
  Synthetic
gtaagcaggcccaagcaccg

SEQ ID NO: 19762 - DNA, 21 bp, Artificial Sequence
  Synthetic
gaggacctcccgaccaagtcg

SEQ ID NO: 19763 - DNA, 20 bp, Artificial Sequence
  Synthetic
cgtgagccggccagagtctt

SEQ ID NO: 19764 - DNA, 22 bp, Artificial Sequence
  Synthetic
caggtggtgtgctgttgtcact

SEQ ID NO: 19765 - DNA, 22 bp, Artificial Sequence
  Synthetic
ccacggcatggcattcatcaca

SEQ ID NO: 19766 - DNA, 22 bp, Artificial Sequence
  Synthetic
cgaccactacgtctccctgagt

SEQ ID NO: 19767 - DNA, 22 bp, Artificial Sequence
  Synthetic
ggtctccgatggtgtgagctca

SEQ ID NO: 19768 - DNA, 22 bp, Artificial Sequence
  Synthetic
cacgggatgtgtgagggtgacc

SEQ ID NO: 19769 - DNA, 22 bp, Artificial Sequence
  Synthetic
gcctgcacagtgggttgtatgt

SEQ ID NO: 19770 - DNA, 21 bp, Artificial Sequence
  Synthetic
cgacgagagcccccgaaatgc

SEQ ID NO: 19771 - DNA, 22 bp, Artificial Sequence
  Synthetic
cactggccctccgtgtaacaat

SEQ ID NO: 19772 - DNA, 22 bp, Artificial Sequence
  Synthetic
gcagtctccgccgtgatatgag

SEQ ID NO: 19773 - DNA, 21 bp, Artificial Sequence
  Synthetic
ccggtaaagctggtgggaacc

SEQ ID NO: 19774 - DNA, 19 bp, Artificial Sequence
  Synthetic
tccaagctccccctcgagg

SEQ ID NO: 19775 - DNA, 22 bp, Artificial Sequence
  Synthetic
ggaggccgctagcttaatgtcc

SEQ ID NO: 19776 - DNA, 22 bp, Artificial Sequence
  Synthetic
ccatcaccgcctgaggaagttt

SEQ ID NO: 19777 - DNA, 22 bp, Artificial Sequence
  Synthetic
ccctgcagctttacaagccgct

SEQ ID NO: 19778 - DNA, 22 bp, Artificial Sequence
  Synthetic
gtggtagggtctctggtcaggt

SEQ ID NO: 19779 - DNA, 22 bp, Artificial Sequence
  Synthetic
ccccaagttttctgagggctga

SEQ ID NO: 19780 - DNA, 20 bp, Artificial Sequence
  Synthetic
caggctgcataggcaaggcg

SEQ ID NO: 19781 - DNA, 20 bp, Artificial Sequence
  Synthetic
gcacgggcaactaccaccaa

SEQ ID NO: 19782 - DNA, 20 bp, Artificial Sequence
  Synthetic
acgtcaaaggctgccaccag

SEQ ID NO: 19783 - DNA, 21 bp, Artificial Sequence
  Synthetic
gctccgaccgaacaacaacca

SEQ ID NO: 19784 - DNA, 20 bp, Artificial Sequence
  Synthetic
aacagtaccgacaagcccgg

SEQ ID NO: 19785 - DNA, 20 bp, Artificial Sequence
  Synthetic
ccttggctttgcagcttggc

SEQ ID NO: 19786 - DNA, 20 bp, Artificial Sequence
  Synthetic
gaccgcgccccagtatttcg

SEQ ID NO: 19787 - DNA, 22 bp, Artificial Sequence
  Synthetic
cgcgcagtttgccgttgacttg

SEQ ID NO: 19788 - DNA, 20 bp, Artificial Sequence
  Synthetic
ggcgttaaaaagccgagcgg

SEQ ID NO: 19789 - DNA, 21 bp, Artificial Sequence
  Synthetic
cccgaatggcagatacaggca

SEQ ID NO: 19790 - DNA, 18 bp, Artificial Sequence
  Synthetic
attggcacgccgatccgc

SEQ ID NO: 19791 - DNA, 19 bp, Artificial Sequence
  Synthetic
tcgggctgcccatgaccct

SEQ ID NO: 19792 - DNA, 20 bp, Artificial Sequence
  Synthetic
cgcgcggcagttgatacagg

SEQ ID NO: 19793 - DNA, 20 bp, Artificial Sequence
  Synthetic
gccgccaaaggcaaaggacg

SEQ ID NO: 19794 - DNA, 22 bp, Artificial Sequence
  Synthetic
gcccatttgtaaccggttctgc

SEQ ID NO: 19795 - DNA, 19 bp, Artificial Sequence
  Synthetic
aacggcggcctgattaccg

SEQ ID NO: 19796 - DNA, 19 bp, Artificial Sequence
  Synthetic
agttgccgcacctgccctc

SEQ ID NO: 19797 - DNA, 19 bp, Artificial Sequence
  Synthetic
gaatcggggcgaactcggg

SEQ ID NO: 19798 - DNA, 20 bp, Artificial Sequence
  Synthetic
cgccagttgaccgaatcggg

SEQ ID NO: 19799 - DNA, 22 bp, Artificial Sequence
  Synthetic
cgcaaagactaccgcagcaacg

SEQ ID NO: 19800 - DNA, 19 bp, Artificial Sequence
  Synthetic
acttcctcgaccgcctcgc

SEQ ID NO: 19801 - DNA, 22 bp, Artificial Sequence
  Synthetic
gcatcctgctcgacaacatcct

SEQ ID NO: 19802 - DNA, 21 bp, Artificial Sequence
  Synthetic
cgaggctttgggcttgggtcc

SEQ ID NO: 19803 - DNA, 21 bp, Artificial Sequence
  Synthetic
gtccgcaacaaaatcgccctg

SEQ ID NO: 19804 - DNA, 20 bp, Artificial Sequence
  Synthetic
agacattgccctccccgagg

SEQ ID NO: 19805 - DNA, 19 bp, Artificial Sequence
  Synthetic
acggcggcgaagagaaagg

SEQ ID NO: 19806 - DNA, 18 bp, Artificial Sequence
  Synthetic
ttggcgttggctcaggcg

SEQ ID NO: 19807 - DNA, 22 bp, Artificial Sequence
  Synthetic
ggcaatttgttcggcaatggcg

SEQ ID NO: 19808 - DNA, 18 bp, Artificial Sequence
  Synthetic
tcgaagatgcctgcgccg

SEQ ID NO: 19809 - DNA, 20 bp, Artificial Sequence
  Synthetic
ccgacaccatccgcctgatg

SEQ ID NO: 19810 - DNA, 19 bp, Artificial Sequence
  Synthetic
cgtgtgcatcggtcctgcc

SEQ ID NO: 19811 - DNA, 19 bp, Artificial Sequence
  Synthetic
tgccgctcgccaaagtcgg

SEQ ID NO: 19812 - DNA, 20 bp, Artificial Sequence
  Synthetic
ttggaaatcgtccgcaccga

SEQ ID NO: 19813 - DNA, 20 bp, Artificial Sequence
  Synthetic
cgcctgaccatgctgttgcg

SEQ ID NO: 19814 - DNA, 22 bp, Artificial Sequence
  Synthetic
cgccgatgccgtacaagaaacc

SEQ ID NO: 19815 - DNA, 18 bp, Artificial Sequence
  Synthetic
agtcgcgcccgtcgacaa

SEQ ID NO: 19816 - DNA, 20 bp, Artificial Sequence
  Synthetic
gcgcaggtggggcaggtaat

SEQ ID NO: 19817 - DNA, 21 bp, Artificial Sequence
  Synthetic
gctgttttcgggcatctggct

SEQ ID NO: 19818 - DNA, 20 bp, Artificial Sequence
  Synthetic
ccgatcataccggtcgcgcc

SEQ ID NO: 19819 - DNA, 20 bp, Artificial Sequence
  Synthetic
ccgatttccaaaaccgcgcc

SEQ ID NO: 19820 - DNA, 19 bp, Artificial Sequence
  Synthetic
acggcagggcggggttttg

SEQ ID NO: 19821 - DNA, 22 bp, Artificial Sequence
  Synthetic
cctgtcgctcggtaaatcagcg

SEQ ID NO: 19822 - DNA, 18 bp, Artificial Sequence
  Synthetic
actgcttcgcgcgcttcg

SEQ ID NO: 19823 - DNA, 20 bp, Artificial Sequence
  Synthetic
gcgttcttccctgcgtttgc

SEQ ID NO: 19824 - DNA, 21 bp, Artificial Sequence
  Synthetic
tcgagcgggcaggctgaaatc

SEQ ID NO: 19825 - DNA, 19 bp, Artificial Sequence
  Synthetic
accgcgccatgctcttggc

SEQ ID NO: 19826 - DNA, 21 bp, Artificial Sequence
  Synthetic
cgcctcgcccgtatccatgta

SEQ ID NO: 19827 - DNA, 19 bp, Artificial Sequence
  Synthetic
ccgcagcattcccacgact

SEQ ID NO: 19828 - DNA, 20 bp, Artificial Sequence
  Synthetic
gcgcgtgaacacggcattcc

SEQ ID NO: 19829 - DNA, 20 bp, Artificial Sequence
  Synthetic
actctccgccctgctcgacc

SEQ ID NO: 19830 - DNA, 22 bp, Artificial Sequence
  Synthetic
ggctgaaaaacgccgtcgaact

SEQ ID NO: 19831 - DNA, 22 bp, Artificial Sequence
  Synthetic
ccatgctgaacaccgccctttc

SEQ ID NO: 19832 - DNA, 22 bp, Artificial Sequence
  Synthetic
tcaagacagaaagctcctgccg

SEQ ID NO: 19833 - DNA, 22 bp, Artificial Sequence
  Synthetic
cgctgttttacacgctgaccga

SEQ ID NO: 19834 - DNA, 19 bp, Artificial Sequence
  Synthetic
tgctgcactttccggcgaa

SEQ ID NO: 19835 - DNA, 22 bp, Artificial Sequence
  Synthetic
gggactgacggtgtcggtattg

SEQ ID NO: 19836 - DNA, 19 bp, Artificial Sequence
  Synthetic
aagctgcgcggtgctgacc

SEQ ID NO: 19837 - DNA, 19 bp, Artificial Sequence
  Synthetic
cctccgcaacgacctgacc

SEQ ID NO: 19838 - DNA, 19 bp, Artificial Sequence
  Synthetic
cgtgcgcgcctaccagatt

SEQ ID NO: 19839 - DNA, 19 bp, Artificial Sequence
  Synthetic
tatggctgcacggcgaggc

SEQ ID NO: 19840 - DNA, 22 bp, Artificial Sequence
  Synthetic
ggcacatttttcacgcttgcca

SEQ ID NO: 19841 - DNA, 22 bp, Artificial Sequence
  Synthetic
cccagcagtttcgccgttttgt

SEQ ID NO: 19842 - DNA, 20 bp, Artificial Sequence
  Synthetic
tgaccgccatgtacaagccg

SEQ ID NO: 19843 - DNA, 21 bp, Artificial Sequence
  Synthetic
cgccgtttatgacgcccccaa

SEQ ID NO: 19844 - DNA, 22 bp, Artificial Sequence
  Synthetic
gctcgcgcgaaaacttaaacca

SEQ ID NO: 19845 - DNA, 19 bp, Artificial Sequence
  Synthetic
gcctgccggggctacatca

SEQ ID NO: 19846 - DNA, 18 bp, Artificial Sequence
  Synthetic
gtcccgaaagccgctgca

SEQ ID NO: 19847 - DNA, 18 bp, Artificial Sequence
  Synthetic
ggcaaggtgcggcagctt

SEQ ID NO: 19848 - DNA, 21 bp, Artificial Sequence
  Synthetic
cgatgacggtggtggcaacca

SEQ ID NO: 19849 - DNA, 20 bp, Artificial Sequence
  Synthetic
atcagcatcggggcggtttc

SEQ ID NO: 19850 - DNA, 19 bp, Artificial Sequence
  Synthetic
acacccgaaacccgcagcg

SEQ ID NO: 19851 - DNA, 19 bp, Artificial Sequence
  Synthetic
gcttcaggacggcatcgcc

SEQ ID NO: 19852 - DNA, 19 bp, Artificial Sequence
  Synthetic
ccgccgacttccgcatacg

SEQ ID NO: 19853 - DNA, 20 bp, Artificial Sequence
  Synthetic
actttccaagtctgcgcggc

SEQ ID NO: 19854 - DNA, 20 bp, Artificial Sequence
  Synthetic
ggagtagcgttgggattcgc

SEQ ID NO: 19855 - DNA, 21 bp, Artificial Sequence
  Synthetic
ttccgacccattctccggaga

SEQ ID NO: 19856 - DNA, 22 bp, Artificial Sequence
  Synthetic
ggtaggatgcggatttcctgct

SEQ ID NO: 19857 - DNA, 22 bp, Artificial Sequence
  Synthetic
gcccacgtcgtttatccgcaag

SEQ ID NO: 19858 - DNA, 22 bp, Artificial Sequence
  Synthetic
gcaactgccttatgccctgacg

SEQ ID NO: 19859 - DNA, 20 bp, Artificial Sequence
  Synthetic
tatgctgccgattgccgccg

SEQ ID NO: 19860 - DNA, 19 bp, Artificial Sequence
  Synthetic
cgcccatgtgcgtgctgat

SEQ ID NO: 19861 - DNA, 21 bp, Artificial Sequence
  Synthetic
cgtcgacggtctgacacacct

SEQ ID NO: 19862 - DNA, 21 bp, Artificial Sequence
  Synthetic
gcaaatatacagccgcagcgg

SEQ ID NO: 19863 - DNA, 20 bp, Artificial Sequence
  Synthetic
tttccggttgccgatacgcc

SEQ ID NO: 19864 - DNA, 20 bp, Artificial Sequence
  Synthetic
gccattaccgccgaaccgag

SEQ ID NO: 19865 - DNA, 22 bp, Artificial Sequence
  Synthetic
cggtattcctgagcgtcggatc

SEQ ID NO: 19866 - DNA, 22 bp, Artificial Sequence
  Synthetic
cggcttggacgttgcacacttt

SEQ ID NO: 19867 - DNA, 20 bp, Artificial Sequence
  Synthetic
cgcgccctatcatgatgccg

SEQ ID NO: 19868 - DNA, 20 bp, Artificial Sequence
  Synthetic
acggcggcatggcaatactg

SEQ ID NO: 19869 - DNA, 19 bp, Artificial Sequence
  Synthetic
gaccaaagccgccaatgcc

SEQ ID NO: 19870 - DNA, 19 bp, Artificial Sequence
  Synthetic
agcttgcccggaaagccgc

SEQ ID NO: 19871 - DNA, 20 bp, Artificial Sequence
  Synthetic
gcaggtcgtcgtcgctgtac

SEQ ID NO: 19872 - DNA, 19 bp, Artificial Sequence
  Synthetic
tctgcctgtccctcagcgc

SEQ ID NO: 19873 - DNA, 21 bp, Artificial Sequence
  Synthetic
ccgtctgcaagcctacgaagg

SEQ ID NO: 19874 - DNA, 19 bp, Artificial Sequence
  Synthetic
ccacgttggcacgcctgtg

SEQ ID NO: 19875 - DNA, 21 bp, Artificial Sequence
  Synthetic
cgcaagaacacaggcaaagcc

SEQ ID NO: 19876 - DNA, 20 bp, Artificial Sequence
  Synthetic
cgctttgccgaactcgacgg

SEQ ID NO: 19877 - DNA, 19 bp, Artificial Sequence
  Synthetic
aaatcccgccctgctcgcc

SEQ ID NO: 19878 - DNA, 19 bp, Artificial Sequence
  Synthetic
ctgaccggcacacccacac

SEQ ID NO: 19879 - DNA, 19 bp, Artificial Sequence
  Synthetic
acgccgacgacctcgaagc

SEQ ID NO: 19880 - DNA, 22 bp, Artificial Sequence
  Synthetic
ccaaaaccgccgtcctacacca

SEQ ID NO: 19881 - DNA, 21 bp, Artificial Sequence
  Synthetic
caacagcatctccgtcagcga

SEQ ID NO: 19882 - DNA, 22 bp, Artificial Sequence
  Synthetic
gccatattcgcaggattgctgc

SEQ ID NO: 19883 - DNA, 20 bp, Artificial Sequence
  Synthetic
ccgacaaagaccgcgcatgg

SEQ ID NO: 19884 - DNA, 22 bp, Artificial Sequence
  Synthetic
catcacccgcatcggtttcaac

SEQ ID NO: 19885 - DNA, 22 bp, Artificial Sequence
  Synthetic
gctatcggagttggaccaggtg

SEQ ID NO: 19886 - DNA, 19 bp, Artificial Sequence
  Synthetic
agccggcggattctgcctg

SEQ ID NO: 19887 - DNA, 19 bp, Artificial Sequence
  Synthetic
accccggggcaaaccatcc

SEQ ID NO: 19888 - DNA, 25 bp, Artificial Sequence
  Synthetic
tccattatttaccaattcctcaccg

SEQ ID NO: 19889 - DNA, 19 bp, Artificial Sequence
  Synthetic
cgccgctacgccatcaacg

SEQ ID NO: 19890 - DNA, 22 bp, Artificial Sequence
  Synthetic
ggcgaacccaaacccagcatca

SEQ ID NO: 19891 - DNA, 22 bp, Artificial Sequence
  Synthetic
gggaaatctttacccacggcgg

SEQ ID NO: 19892 - DNA, 18 bp, Artificial Sequence
  Synthetic
acgcaccgttgccgacat

SEQ ID NO: 19893 - DNA, 19 bp, Artificial Sequence
  Synthetic
agcaggcgcgattaccggc

SEQ ID NO: 19894 - DNA, 19 bp, Artificial Sequence
  Synthetic
acgtcttgagcgtcggccc

SEQ ID NO: 19895 - DNA, 22 bp, Artificial Sequence
  Synthetic
ggcacaccaattgaaccttgcc

SEQ ID NO: 19896 - DNA, 20 bp, Artificial Sequence
  Synthetic
cgacgcactggtcggcaaag

SEQ ID NO: 19897 - DNA, 21 bp, Artificial Sequence
  Synthetic
cgacagcgcatcgaagccatg

SEQ ID NO: 19898 - DNA, 18 bp, Artificial Sequence
  Synthetic
gctgaccgccgacgatgt

SEQ ID NO: 19899 - DNA, 20 bp, Artificial Sequence
  Synthetic
accggttgccgccaaaaaag

SEQ ID NO: 19900 - DNA, 20 bp, Artificial Sequence
  Synthetic
gcgtcaaccgtatgccgctc

SEQ ID NO: 19901 - DNA, 20 bp, Artificial Sequence
  Synthetic
aaacccaagcccgaagacgc

SEQ ID NO: 19902 - DNA, 20 bp, Artificial Sequence
  Synthetic
tcctacggctggttcggctt

SEQ ID NO: 19903 - DNA, 19 bp, Artificial Sequence
  Synthetic
tcggcggcattgcccgatc

SEQ ID NO: 19904 - DNA, 21 bp, Artificial Sequence
  Synthetic
gatgggttggttcgatgccgt

SEQ ID NO: 19905 - DNA, 19 bp, Artificial Sequence
  Synthetic
ccttgccgtcgccatcctg

SEQ ID NO: 19906 - DNA, 20 bp, Artificial Sequence
  Synthetic
tacgccttttcggacggcgc

SEQ ID NO: 19907 - DNA, 19 bp, Artificial Sequence
  Synthetic
aactgaccgcgctgctcgg

SEQ ID NO: 19908 - DNA, 19 bp, Artificial Sequence
  Synthetic
accgactacgtcgtcgccg

SEQ ID NO: 19909 - DNA, 22 bp, Artificial Sequence
  Synthetic
gctccataagccctaccgcctg

SEQ ID NO: 19910 - DNA, 20 bp, Artificial Sequence
  Synthetic
cgatgccgaatacgaccgcc

SEQ ID NO: 19911 - DNA, 20 bp, Artificial Sequence
  Synthetic
ccgcactggacgcattctgc

SEQ ID NO: 19912 - DNA, 19 bp, Artificial Sequence
  Synthetic
ccatcccgggcatccgcta

SEQ ID NO: 19913 - DNA, 22 bp, Artificial Sequence
  Synthetic
gcgttttccatcggcatcgaac

SEQ ID NO: 19914 - DNA, 22 bp, Artificial Sequence
  Synthetic
ggaaaagctgtttgccaaccgg

SEQ ID NO: 19915 - DNA, 22 bp, Artificial Sequence
  Synthetic
ccgatacgcgccatcgatactt

SEQ ID NO: 19916 - DNA, 21 bp, Artificial Sequence
  Synthetic
acggaacagcagcaaaggctc

SEQ ID NO: 19917 - DNA, 20 bp, Artificial Sequence
  Synthetic
cgcgcagttgttccagcgat

SEQ ID NO: 19918 - DNA, 21 bp, Artificial Sequence
  Synthetic
caccctgtacgaaacgctcgc

SEQ ID NO: 19919 - DNA, 22 bp, Artificial Sequence
  Synthetic
gccataatgcgcgctttgtagg

SEQ ID NO: 19920 - DNA, 20 bp, Artificial Sequence
  Synthetic
tcggcggtggtgatgtgttc

SEQ ID NO: 19921 - DNA, 20 bp, Artificial Sequence
  Synthetic
ggtaacggcggcgaccaatg

SEQ ID NO: 19922 - DNA, 20 bp, Artificial Sequence
  Synthetic
tccatcgcgtccgccagtat

SEQ ID NO: 19923 - DNA, 19 bp, Artificial Sequence
  Synthetic
acatccacaccgccgagcg

SEQ ID NO: 19924 - DNA, 20 bp, Artificial Sequence
  Synthetic
gcggaagcggtcgacgtatc

SEQ ID NO: 19925 - DNA, 22 bp, Artificial Sequence
  Synthetic
ggcaggaaatcctatgccgtcg

SEQ ID NO: 19926 - DNA, 18 bp, Artificial Sequence
  Synthetic
ggaaaccgccgccgacaa

SEQ ID NO: 19927 - DNA, 19 bp, Artificial Sequence
  Synthetic
tgccggtggacattggtgc

SEQ ID NO: 19928 - DNA, 22 bp, Artificial Sequence
  Synthetic
cctgcatcagatagctgcggaa

SEQ ID NO: 19929 - DNA, 21 bp, Artificial Sequence
  Synthetic
cggcgcgaatttaaacggaaa

SEQ ID NO: 19930 - DNA, 20 bp, Artificial Sequence
  Synthetic
atccccaatatgccgtcagc

SEQ ID NO: 19931 - DNA, 18 bp, Artificial Sequence
  Synthetic
tgggacagctcggggcaa

SEQ ID NO: 19932 - DNA, 19 bp, Artificial Sequence
  Synthetic
ctcgcgcatatggacgcgg

SEQ ID NO: 19933 - DNA, 22 bp, Artificial Sequence
  Synthetic
gcgtctgcctcgatacccaaac

SEQ ID NO: 19934 - DNA, 19 bp, Artificial Sequence
  Synthetic
tccacgcgcctgccagttg

SEQ ID NO: 19935 - DNA, 20 bp, Artificial Sequence
  Synthetic
tgaggctgttgcggacggat

SEQ ID NO: 19936 - DNA, 20 bp, Artificial Sequence
  Synthetic
ttcaagacgacggcggactg

SEQ ID NO: 19937 - DNA, 18 bp, Artificial Sequence
  Synthetic
tccatcgcgcgcggctat

SEQ ID NO: 19938 - DNA, 22 bp, Artificial Sequence
  Synthetic
gcctgcttccggccattctgat

SEQ ID NO: 19939 - DNA, 19 bp, Artificial Sequence
  Synthetic
acgacgtttccggcctgcc

SEQ ID NO: 19940 - DNA, 20 bp, Artificial Sequence
  Synthetic
ggtgtacggaatcgtcgccg

SEQ ID NO: 19941 - DNA, 20 bp, Artificial Sequence
  Synthetic
ttcggttcgggcttgttggg

SEQ ID NO: 19942 - DNA, 21 bp, Artificial Sequence
  Synthetic
tggcgcacggcatcgatatgt

SEQ ID NO: 19943 - DNA, 20 bp, Artificial Sequence
  Synthetic
tttccgtggcgatgtcgtaa

SEQ ID NO: 19944 - DNA, 20 bp, Artificial Sequence
  Synthetic
ttgacggccttccattttgg

SEQ ID NO: 19945 - DNA, 24 bp, Artificial Sequence
  Synthetic
ccctttggatattgcgctcaattt

SEQ ID NO: 19946 - DNA, 20 bp, Artificial Sequence
  Synthetic
cacagcattcccggggtgtc

SEQ ID NO: 19947 - DNA, 22 bp, Artificial Sequence
  Synthetic
cctcaggcaaatacgcggacaa

SEQ ID NO: 19948 - DNA, 21 bp, Artificial Sequence
  Synthetic
tgccgtctgaagcaccgtttg

SEQ ID NO: 19949 - DNA, 19 bp, Artificial Sequence
  Synthetic
cgcgccacccatgcattgg

SEQ ID NO: 19950 - DNA, 25 bp, Artificial Sequence
  Synthetic
gttgatttgaaaaaaatgccgtctg

SEQ ID NO: 19951 - DNA, 22 bp, Artificial Sequence
  Synthetic
acacccgaccaccaaaagctgg

SEQ ID NO: 19952 - DNA, 25 bp, Artificial Sequence
  Synthetic
gtctgaatgtttcgacaatccgatt

SEQ ID NO: 19953 - DNA, 20 bp, Artificial Sequence
  Synthetic
cacaaccgccgacatcaagc

SEQ ID NO: 19954 - DNA, 22 bp, Artificial Sequence
  Synthetic
gtcaattcgcaccggactgcgt

SEQ ID NO: 19955 - DNA, 19 bp, Artificial Sequence
  Synthetic
tcctcaggctccgccacac

SEQ ID NO: 19956 - DNA, 25 bp, Artificial Sequence
  Synthetic
cattggcaaaaatagcagcacaata

SEQ ID NO: 19957 - DNA, 19 bp, Artificial Sequence
  Synthetic
cgcaccttcgggcagactg

SEQ ID NO: 19958 - DNA, 19 bp, Artificial Sequence
  Synthetic
ttgccggttcggaagccgc

SEQ ID NO: 19959 - DNA, 21 bp, Artificial Sequence
  Synthetic
cgcatgaagattggcttccgc

SEQ ID NO: 19960 - DNA, 22 bp, Artificial Sequence
  Synthetic
cgcttcaaggtagccttttgcc

SEQ ID NO: 19961 - DNA, 19 bp, Artificial Sequence
  Synthetic
ggcgtgttggttgatgccg

SEQ ID NO: 19962 - DNA, 25 bp, Artificial Sequence
  Synthetic
gcgaaagtttccgtaaaaatatcgg

SEQ ID NO: 19963 - DNA, 20 bp, Artificial Sequence
  Synthetic
ccgccgcccaagattggaat

SEQ ID NO: 19964 - DNA, 22 bp, Artificial Sequence
  Synthetic
acttcaaactgcgcggacaacc

SEQ ID NO: 19965 - DNA, 22 bp, Artificial Sequence
  Synthetic
cgccgtacctatgcgtgtgaaa

SEQ ID NO: 19966 - DNA, 20 bp, Artificial Sequence
  Synthetic
acggtttcgtcgacggcacg

SEQ ID NO: 19967 - DNA, 22 bp, Artificial Sequence
  Synthetic
gctctacttcgcagccgtcaac

SEQ ID NO: 19968 - DNA, 22 bp, Artificial Sequence
  Synthetic
tggtattcgtcatcggcatcgc

SEQ ID NO: 19969 - DNA, 22 bp, Artificial Sequence
  Synthetic
gcatttccaatcccgacaccgt

SEQ ID NO: 19970 - DNA, 20 bp, Artificial Sequence
  Synthetic
catcgtcaggcgagcaaccg

SEQ ID NO: 19971 - DNA, 22 bp, Artificial Sequence
  Synthetic
atcggacgaattggcacggatt

SEQ ID NO: 19972 - DNA, 19 bp, Artificial Sequence
  Synthetic
tgctcgacaacggcgttcc

SEQ ID NO: 19973 - DNA, 19 bp, Artificial Sequence
  Synthetic
cgtcgccgccataaaacgc

SEQ ID NO: 19974 - DNA, 19 bp, Artificial Sequence
  Synthetic
atccgcagcccgacggttc

SEQ ID NO: 19975 - DNA, 19 bp, Artificial Sequence
  Synthetic
attgcgcgacatcgtccga

SEQ ID NO: 19976 - DNA, 22 bp, Artificial Sequence
  Synthetic
cgcccgataaagctgcgtaagt

SEQ ID NO: 19977 - DNA, 22 bp, Artificial Sequence
  Synthetic
gcccgaaccgatgaagcaatcc

SEQ ID NO: 19978 - DNA, 20 bp, Artificial Sequence
  Synthetic
gccgattttgcctttgccgc

SEQ ID NO: 19979 - DNA, 21 bp, Artificial Sequence
  Synthetic
acgaagtggaagccgtgttgg

SEQ ID NO: 19980 - DNA, 19 bp, Artificial Sequence
  Synthetic
agtcgaacccgccgccaag

SEQ ID NO: 19981 - DNA, 22 bp, Artificial Sequence
  Synthetic
tcttcgcggaagatttcgcctt

SEQ ID NO: 19982 - DNA, 19 bp, Artificial Sequence
  Synthetic
agtccgctacacgcaaggc

SEQ ID NO: 19983 - DNA, 21 bp, Artificial Sequence
  Synthetic
ggcttccaacgcgtcatccag

SEQ ID NO: 19984 - DNA, 20 bp, Artificial Sequence
  Synthetic
tgtcttcggcaaccacaccg

SEQ ID NO: 19985 - DNA, 20 bp, Artificial Sequence
  Synthetic
gcgcattttgcccgaacgca

SEQ ID NO: 19986 - DNA, 20 bp, Artificial Sequence
  Synthetic
aacggtctttgaggcggctg

SEQ ID NO: 19987 - DNA, 18 bp, Artificial Sequence
  Synthetic
aagctcggcggcgcaaag

SEQ ID NO: 19988 - DNA, 20 bp, Artificial Sequence
  Synthetic
cgaagccccggaatttgcct

SEQ ID NO: 19989 - DNA, 20 bp, Artificial Sequence
  Synthetic
gccaaaccgccgtggacatc

SEQ ID NO: 19990 - DNA, 22 bp, Artificial Sequence
  Synthetic
cggaattccgcgcatttgcaga

SEQ ID NO: 19991 - DNA, 22 bp, Artificial Sequence
  Synthetic
ctgccctttctgcaaagccgtt

SEQ ID NO: 19992 - DNA, 21 bp, Artificial Sequence
  Synthetic
gaacaggtattccggcgcgga

SEQ ID NO: 19993 - DNA, 20 bp, Artificial Sequence
  Synthetic
atcggcaggctgaaacactc

SEQ ID NO: 19994 - DNA, 19 bp, Artificial Sequence
  Synthetic
gcgcgctggatgccaaagt

SEQ ID NO: 19995 - DNA, 18 bp, Artificial Sequence
  Synthetic
gcgtgctgctgccggaaa

SEQ ID NO: 19996 - DNA, 21 bp, Artificial Sequence
  Synthetic
gctgaccactgaaaacacgcc

SEQ ID NO: 19997 - DNA, 23 bp, Artificial Sequence
  Synthetic
accgtcatatgccttattgtcgt

SEQ ID NO: 19998 - DNA, 22 bp, Artificial Sequence
  Synthetic
gcccggtcaaaagcgcaaaaag

SEQ ID NO: 19999 - DNA, 21 bp, Artificial Sequence
  Synthetic
agctacaccccgaaacatccg

SEQ ID NO: 20000 - DNA, 19 bp, Artificial Sequence
  Synthetic
gcacggcgatgcggaagtg

SEQ ID NO: 20001 - DNA, 21 bp, Artificial Sequence
  Synthetic
gcggcggcggtttttgtagat

SEQ ID NO: 20002 - DNA, 19 bp, Artificial Sequence
  Synthetic
ccagcggtttgcaatcgcc

SEQ ID NO: 20003 - DNA, 20 bp, Artificial Sequence
  Synthetic
taccgcgtctttgccgactg

SEQ ID NO: 20004 - DNA, 22 bp, Artificial Sequence
  Synthetic
ccgatacggggtaaggcaggat

SEQ ID NO: 20005 - DNA, 19 bp, Artificial Sequence
  Synthetic
gtttgcgccgccgtctttg

SEQ ID NO: 20006 - DNA, 21 bp, Artificial Sequence
  Synthetic
gttcctcgtaggctgcctgcg

SEQ ID NO: 20007 - DNA, 20 bp, Artificial Sequence
  Synthetic
ggtcgtacagggcgttgccg

SEQ ID NO: 20008 - DNA, 25 bp, Artificial Sequence
  Synthetic
agtgccatttcattctaacttcctt

SEQ ID NO: 20009 - DNA, 22 bp, Artificial Sequence
  Synthetic
gcttcatctgctttgtgcgggt

SEQ ID NO: 20010 - DNA, 21 bp, Artificial Sequence
  Synthetic
cgaccacatcggacaatcccg

SEQ ID NO: 20011 - DNA, 22 bp, Artificial Sequence
  Synthetic
gtttccgttcgggcaatggttc

SEQ ID NO: 20012 - DNA, 20 bp, Artificial Sequence
  Synthetic
gcccgtcgtcttccacgttg

SEQ ID NO: 20013 - DNA, 22 bp, Artificial Sequence
  Synthetic
ggcggttacttttttgcctgcc

SEQ ID NO: 20014 - DNA, 18 bp, Artificial Sequence
  Synthetic
gcagcttcggcttcggct

SEQ ID NO: 20015 - DNA, 20 bp, Artificial Sequence
  Synthetic
cgcccgatataggcttccgc

SEQ ID NO: 20016 - DNA, 19 bp, Artificial Sequence
  Synthetic
cgttgacactgcccgcgaa

SEQ ID NO: 20017 - DNA, 19 bp, Artificial Sequence
  Synthetic
ccctgcgtttcaagcccga

SEQ ID NO: 20018 - DNA, 19 bp, Artificial Sequence
  Synthetic
tccaatacgccgcccaggg

SEQ ID NO: 20019 - DNA, 21 bp, Artificial Sequence
  Synthetic
ccgcctgataaatgttgcgcg

SEQ ID NO: 20020 - DNA, 18 bp, Artificial Sequence
  Synthetic
tcaaacccgcgttgcgcc

SEQ ID NO: 20021 - DNA, 18 bp, Artificial Sequence
  Synthetic
atcgcggctgtcctgctc

SEQ ID NO: 20022 - DNA, 19 bp, Artificial Sequence
  Synthetic
cgggcgtgtgtctgaaccg

SEQ ID NO: 20023 - DNA, 22 bp, Artificial Sequence
  Synthetic
cgaacgggaacacatccgcctt

SEQ ID NO: 20024 - DNA, 20 bp, Artificial Sequence
  Synthetic
cggcaagaagcggcggtatg

SEQ ID NO: 20025 - DNA, 22 bp, Artificial Sequence
  Synthetic
cggacaggagggcgtttgatgt

SEQ ID NO: 20026 - DNA, 19 bp, Artificial Sequence
  Synthetic
gcgggggcttcgagtttcg

SEQ ID NO: 20027 - DNA, 19 bp, Artificial Sequence
  Synthetic
acaccgccgcaccgtatcc

SEQ ID NO: 20028 - DNA, 18 bp, Artificial Sequence
  Synthetic
ttcccaccgcttccccga

SEQ ID NO: 20029 - DNA, 19 bp, Artificial Sequence
  Synthetic
tccgggcggttttggcgtg

SEQ ID NO: 20030 - DNA, 22 bp, Artificial Sequence
  Synthetic
gccttgagcttgtcgattgccg

SEQ ID NO: 20031 - DNA, 21 bp, Artificial Sequence
  Synthetic
cgcccatcaaccccatcactg

SEQ ID NO: 20032 - DNA, 22 bp, Artificial Sequence
  Synthetic
gcgaagtgggcgaactgatcgt

SEQ ID NO: 20033 - DNA, 18 bp, Artificial Sequence
  Synthetic
ttttggcgggcgcggtgt

SEQ ID NO: 20034 - DNA, 20 bp, Artificial Sequence
  Synthetic
ggctggcaggcgagttttct

SEQ ID NO: 20035 - DNA, 20 bp, Artificial Sequence
  Synthetic
cgacaggggttctttttgct

SEQ ID NO: 20036 - DNA, 20 bp, Artificial Sequence
  Synthetic
ttttcgcaaatcttccgccc

SEQ ID NO: 20037 - DNA, 19 bp, Artificial Sequence
  Synthetic
caggaaatcatcgcgcgcg

SEQ ID NO: 20038 - DNA, 19 bp, Artificial Sequence
  Synthetic
gcacatcgcccccgaaacc

SEQ ID NO: 20039 - DNA, 19 bp, Artificial Sequence
  Synthetic
actgccgacgtgcttgccc

SEQ ID NO: 20040 - DNA, 19 bp, Artificial Sequence
  Synthetic
cgccgacgcccgatttcac

SEQ ID NO: 20041 - DNA, 22 bp, Artificial Sequence
  Synthetic
cggaagacaaatccatgccgcc

SEQ ID NO: 20042 - DNA, 19 bp, Artificial Sequence
  Synthetic
atcagcgcgggcttgtgcc

SEQ ID NO: 20043 - DNA, 21 bp, Artificial Sequence
  Synthetic
cttgcattggaagccttgggc

SEQ ID NO: 20044 - DNA, 21 bp, Artificial Sequence
  Synthetic
gctggccggaaaccatatctc

SEQ ID NO: 20045 - DNA, 19 bp, Artificial Sequence
  Synthetic
tccacccgcacccgacctt

SEQ ID NO: 20046 - DNA, 19 bp, Artificial Sequence
  Synthetic
ccgtacgacgctgaacggc

SEQ ID NO: 20047 - DNA, 20 bp, Artificial Sequence
  Synthetic
ggcatcagcagctccacgct

SEQ ID NO: 20048 - DNA, 20 bp, Artificial Sequence
  Synthetic
ctccgatcggcaactggcaa

SEQ ID NO: 20049 - DNA, 21 bp, Artificial Sequence
  Synthetic
aaggcgcatctgctcgatgtg

SEQ ID NO: 20050 - DNA, 20 bp, Artificial Sequence
  Synthetic
cgccgcgttcgtactgcatg

SEQ ID NO: 20051 - DNA, 19 bp, Artificial Sequence
  Synthetic
atcaggctgcggtgggagc

SEQ ID NO: 20052 - DNA, 18 bp, Artificial Sequence
  Synthetic
aaggcggtgcggacgttg

SEQ ID NO: 20053 - DNA, 22 bp, Artificial Sequence
  Synthetic
cggtgaaacacggcatttggtt

SEQ ID NO: 20054 - DNA, 18 bp, Artificial Sequence
  Synthetic
ggcgggcggcaaagtgtt

SEQ ID NO: 20055 - DNA, 20 bp, Artificial Sequence
  Synthetic
gcagcagcaatgtcggcatt

SEQ ID NO: 20056 - DNA, 20 bp, Artificial Sequence
  Synthetic
cccgcccataaagccatcgg

SEQ ID NO: 20057 - DNA, 20 bp, Artificial Sequence
  Synthetic
gctcgacagccttgccgaca

SEQ ID NO: 20058 - DNA, 19 bp, Artificial Sequence
  Synthetic
tgtttgccgcgctgatccg

SEQ ID NO: 20059 - DNA, 22 bp, Artificial Sequence
  Synthetic
cgacaggcagggagtcggcata

SEQ ID NO: 20060 - DNA, 20 bp, Artificial Sequence
  Synthetic
cggtgtcaacgataaggcac

SEQ ID NO: 20061 - DNA, 22 bp, Artificial Sequence
  Synthetic
accgtaaacgcaggtctgaaat

SEQ ID NO: 20062 - DNA, 22 bp, Artificial Sequence
  Synthetic
gcagcgcaacctcaaaccgaaa

SEQ ID NO: 20063 - DNA, 20 bp, Artificial Sequence
  Synthetic
cgacatctcgacggcaaccg

SEQ ID NO: 20064 - DNA, 20 bp, Artificial Sequence
  Synthetic
cgcccttgcccaacgctata

SEQ ID NO: 20065 - DNA, 19 bp, Artificial Sequence
  Synthetic
tggaaatccgcggcgcagg

SEQ ID NO: 20066 - DNA, 20 bp, Artificial Sequence
  Synthetic
cgaccacgcttctggtcgag

SEQ ID NO: 20067 - DNA, 18 bp, Artificial Sequence
  Synthetic
tcgccctgcacaagctcg

SEQ ID NO: 20068 - DNA, 21 bp, Artificial Sequence
  Synthetic
tgttgttcgtaccggttgcca

SEQ ID NO: 20069 - DNA, 19 bp, Artificial Sequence
  Synthetic
tcctcgccgcctacatcca

SEQ ID NO: 20070 - DNA, 19 bp, Artificial Sequence
  Synthetic
tacagcacccgccacctgc

SEQ ID NO: 20071 - DNA, 22 bp, Artificial Sequence
  Synthetic
cgatctcatccgtatcgccccg

SEQ ID NO: 20072 - DNA, 20 bp, Artificial Sequence
  Synthetic
ggtatcgccgtcggtatggc

SEQ ID NO: 20073 - DNA, 20 bp, Artificial Sequence
  Synthetic
gcaacgacgaactggcgcac

SEQ ID NO: 20074 - DNA, 22 bp, Artificial Sequence
  Synthetic
ccaagttcgcccaatacctgct

SEQ ID NO: 20075 - DNA, 21 bp, Artificial Sequence
  Synthetic
cgggcatcgttgcttttcatt

SEQ ID NO: 20076 - DNA, 22 bp, Artificial Sequence
  Synthetic
tgcccctgcccgatgacataat

SEQ ID NO: 20077 - DNA, 22 bp, Artificial Sequence
  Synthetic
cgcagtcaggggcagaaacttc

SEQ ID NO: 20078 - DNA, 19 bp, Artificial Sequence
  Synthetic
atggtaggcagcacgcgcg

SEQ ID NO: 20079 - DNA, 20 bp, Artificial Sequence
  Synthetic
cggcgcattggcaaaaggtc

SEQ ID NO: 20080 - DNA, 22 bp, Artificial Sequence
  Synthetic
cggcgtttcaaggtggttacga

SEQ ID NO: 20081 - DNA, 22 bp, Artificial Sequence
  Synthetic
cgcacgaccggttcttcgttaa

SEQ ID NO: 20082 - DNA, 19 bp, Artificial Sequence
  Synthetic
ggcgggaatggcggcaaat

SEQ ID NO: 20083 - DNA, 20 bp, Artificial Sequence
  Synthetic
ccagaccgatatgccgtcgc

SEQ ID NO: 20084 - DNA, 18 bp, Artificial Sequence
  Synthetic
ggtttgcgcccgcatgtg

SEQ ID NO: 20085 - DNA, 19 bp, Artificial Sequence
  Synthetic
aaccaccccgacccctgtg

SEQ ID NO: 20086 - DNA, 22 bp, Artificial Sequence
  Synthetic
gcagcgaacacgatacccgtat

SEQ ID NO: 20087 - DNA, 20 bp, Artificial Sequence
  Synthetic
ggcaaagcaaccttagccgc

SEQ ID NO: 20088 - DNA, 18 bp, Artificial Sequence
  Synthetic
atcaccgcgccgctgcaa

SEQ ID NO: 20089 - DNA, 25 bp, Artificial Sequence
  Synthetic
accgcctttaaacaattgaaagaaa

SEQ ID NO: 20090 - DNA, 22 bp, Artificial Sequence
  Synthetic
tcgacattaccgaacaccgcaa

SEQ ID NO: 20091 - DNA, 22 bp, Artificial Sequence
  Synthetic
ccagcttcgccgacatcttctt

SEQ ID NO: 20092 - DNA, 21 bp, Artificial Sequence
  Synthetic
aatcccgccgaagaaaccgat

SEQ ID NO: 20093 - DNA, 19 bp, Artificial Sequence
  Synthetic
tccacccacggcgcattcg

SEQ ID NO: 20094 - DNA, 18 bp, Artificial Sequence
  Synthetic
agcgcgccaaatcgaccg

SEQ ID NO: 20095 - DNA, 21 bp, Artificial Sequence
  Synthetic
cggatagacaagttcgcccgc

SEQ ID NO: 20096 - DNA, 22 bp, Artificial Sequence
  Synthetic
gcgtgccattatgggtttccac

SEQ ID NO: 20097 - DNA, 21 bp, Artificial Sequence
  Synthetic
aaatgccggcgatgaaggtca

SEQ ID NO: 20098 - DNA, 19 bp, Artificial Sequence
  Synthetic
ttgtcttgcccacgcccgg

SEQ ID NO: 20099 - DNA, 19 bp, Artificial Sequence
  Synthetic
ggatttgcgcgcccaagct

SEQ ID NO: 20100 - DNA, 21 bp, Artificial Sequence
  Synthetic
tctttgacgaagcggcgcatt

SEQ ID NO: 20101 - DNA, 21 bp, Artificial Sequence
  Synthetic
ccaaagcccttgatcgcgtcc

SEQ ID NO: 20102 - DNA, 18 bp, Artificial Sequence
  Synthetic
gattcccgccgccgtcat

SEQ ID NO: 20103 - DNA, 21 bp, Artificial Sequence
  Synthetic
tgcctgaaacggctaaatcct

SEQ ID NO: 20104 - DNA, 23 bp, Artificial Sequence
  Synthetic
cctgcactcatcaatcctgattt

SEQ ID NO: 20105 - DNA, 22 bp, Artificial Sequence
  Synthetic
gccatttgccgatgattggggc

SEQ ID NO: 20106 - DNA, 19 bp, Artificial Sequence
  Synthetic
tgttgtcgttgtgggcggg

SEQ ID NO: 20107 - DNA, 20 bp, Artificial Sequence
  Synthetic
ccgggtttcacatcgccgta

SEQ ID NO: 20108 - DNA, 22 bp, Artificial Sequence
  Synthetic
ggaacacggcatcgacacactc

SEQ ID NO: 20109 - DNA, 18 bp, Artificial Sequence
  Synthetic
gcgcatcgatttgggcgc

SEQ ID NO: 20110 - DNA, 20 bp, Artificial Sequence
  Synthetic
cgtatgtccggcgcgtcagg

SEQ ID NO: 20111 - DNA, 19 bp, Artificial Sequence
  Synthetic
cagcgcgaagtgttggcgg

SEQ ID NO: 20112 - DNA, 20 bp, Artificial Sequence
  Synthetic
cgtgccacttgttgccgtcg

SEQ ID NO: 20113 - DNA, 20 bp, Artificial Sequence
  Synthetic
gagccgtccacgttggagac

SEQ ID NO: 20114 - DNA, 20 bp, Artificial Sequence
  Synthetic
atttcgtggtgtccgggcag

SEQ ID NO: 20115 - DNA, 21 bp, Artificial Sequence
  Synthetic
cactcttcgccattcccgcga

SEQ ID NO: 20116 - DNA, 19 bp, Artificial Sequence
  Synthetic
caacgtcggcgcactggac

SEQ ID NO: 20117 - DNA, 19 bp, Artificial Sequence
  Synthetic
acggacgcgggcaagacac

SEQ ID NO: 20118 - DNA, 20 bp, Artificial Sequence
  Synthetic
acgagtgcggctacggaatc

SEQ ID NO: 20119 - DNA, 22 bp, Artificial Sequence
  Synthetic
cgcgggaatccggtaaccgaaa

SEQ ID NO: 20120 - DNA, 19 bp, Artificial Sequence
  Synthetic
acgcctacctgctgaccgg

SEQ ID NO: 20121 - DNA, 22 bp, Artificial Sequence
  Synthetic
gttccacacgctcaacaaagcc

SEQ ID NO: 20122 - DNA, 21 bp, Artificial Sequence
  Synthetic
aagtcatgctccatgccgtca

SEQ ID NO: 20123 - DNA, 20 bp, Artificial Sequence
  Synthetic
tggctgcggtacacaatgcc

SEQ ID NO: 20124 - DNA, 20 bp, Artificial Sequence
  Synthetic
gcatcgccaaccgcctgttg

SEQ ID NO: 20125 - DNA, 22 bp, Artificial Sequence
  Synthetic
gcgcaccttatcgccgaacaaa

SEQ ID NO: 20126 - DNA, 20 bp, Artificial Sequence
  Synthetic
agctgatgcggcagatggtg

SEQ ID NO: 20127 - DNA, 20 bp, Artificial Sequence
  Synthetic
ccttcatcgcccgatacggc

SEQ ID NO: 20128 - DNA, 24 bp, Artificial Sequence
  Synthetic
cgaatgctgcaaatttgtttgatg

SEQ ID NO: 20129 - DNA, 22 bp, Artificial Sequence
  Synthetic
ccaagccaaaccggtaacctgt

SEQ ID NO: 20130 - DNA, 21 bp, Artificial Sequence
  Synthetic
gcgtgggtcattttggcgttg

SEQ ID NO: 20131 - DNA, 23 bp, Artificial Sequence
  Synthetic
atgaccaaggacaaaatggactt

SEQ ID NO: 20132 - DNA, 21 bp, Artificial Sequence
  Synthetic
cgccaagcgtaaaccattcat

SEQ ID NO: 20133 - DNA, 23 bp, Artificial Sequence
  Synthetic
gctttggttccttcacatgtcag

SEQ ID NO: 20134 - DNA, 23 bp, Artificial Sequence
  Synthetic
acacggtgcttgatacctttcaa

SEQ ID NO: 20135 - DNA, 21 bp, Artificial Sequence
  Synthetic
ggactactgtggctaccgtaa

SEQ ID NO: 20136 - DNA, 24 bp, Artificial Sequence
  Synthetic
ctgaatttttcagttgcctcacct

SEQ ID NO: 20137 - DNA, 24 bp, Artificial Sequence
  Synthetic
ttgtctgtttgggtgtatgaatca

SEQ ID NO: 20138 - DNA, 25 bp, Artificial Sequence
  Synthetic
gccaaagtaaatggtactaaagctg

SEQ ID NO: 20139 - DNA, 22 bp, Artificial Sequence
  Synthetic
accgcccggacagcttttgata

SEQ ID NO: 20140 - DNA, 22 bp, Artificial Sequence
  Synthetic
cgtggaagaaggcggcaaggta

SEQ ID NO: 20141 - DNA, 21 bp, Artificial Sequence
  Synthetic
ctttggcagtggcgatgttgc

SEQ ID NO: 20142 - DNA, 20 bp, Artificial Sequence
  Synthetic
ccgtcggcaatcagcggaac

SEQ ID NO: 20143 - DNA, 20 bp, Artificial Sequence
  Synthetic
cttggctcatcgcgcccaag

SEQ ID NO: 20144 - DNA, 19 bp, Artificial Sequence
  Synthetic
cgttcgatgcgcccctgat

SEQ ID NO: 20145 - DNA, 19 bp, Artificial Sequence
  Synthetic
acgggtttgacgatgcccg

SEQ ID NO: 20146 - DNA, 20 bp, Artificial Sequence
  Synthetic
ccgatgaccttgcccgcttc

SEQ ID NO: 20147 - DNA, 20 bp, Artificial Sequence
  Synthetic
cgcttcggtcaggcagttca

SEQ ID NO: 20148 - DNA, 18 bp, Artificial Sequence
  Synthetic
tcgtccacgcctgcggtt

SEQ ID NO: 20149 - DNA, 20 bp, Artificial Sequence
  Synthetic
atcctcgccgtcctcgagcc

SEQ ID NO: 20150 - DNA, 19 bp, Artificial Sequence
  Synthetic
atatgccggactcgcgccg

SEQ ID NO: 20151 - DNA, 20 bp, Artificial Sequence
  Synthetic
acacggtgagggacgaagcc

SEQ ID NO: 20152 - DNA, 19 bp, Artificial Sequence
  Synthetic
ttgtgcggacgcgtggtcg

SEQ ID NO: 20153 - DNA, 21 bp, Artificial Sequence
  Synthetic
ccggacagatattgccggtgt

SEQ ID NO: 20154 - DNA, 18 bp, Artificial Sequence
  Synthetic
agccgtggtcgaagccga

SEQ ID NO: 20155 - DNA, 21 bp, Artificial Sequence
  Synthetic
gcaattccaccatccccaccg

SEQ ID NO: 20156 - DNA, 18 bp, Artificial Sequence
  Synthetic
acctaccgccgccgcaat

SEQ ID NO: 20157 - DNA, 20 bp, Artificial Sequence
  Synthetic
tatcggcatcaggcagcagc

SEQ ID NO: 20158 - DNA, 19 bp, Artificial Sequence
  Synthetic
ggcggcatcgaaggcttcg

SEQ ID NO: 20159 - DNA, 20 bp, Artificial Sequence
  Synthetic
gctgcgtgaggactcggtcg

SEQ ID NO: 20160 - DNA, 20 bp, Artificial Sequence
  Synthetic
caaaccgcaaaccgtccgca

SEQ ID NO: 20161 - DNA, 20 bp, Artificial Sequence
  Synthetic
aggacggggtgctgaaacac

SEQ ID NO: 20162 - DNA, 20 bp, Artificial Sequence
  Synthetic
tctgttcattgtcccgcgcc

SEQ ID NO: 20163 - DNA, 22 bp, Artificial Sequence
  Synthetic
gcgtgcggattgaaatgcatct

SEQ ID NO: 20164 - DNA, 21 bp, Artificial Sequence
  Synthetic
ggtatccgaacacctgccgac

SEQ ID NO: 20165 - DNA, 22 bp, Artificial Sequence
  Synthetic
tggttttgtctgcctatgccgt

SEQ ID NO: 20166 - DNA, 21 bp, Artificial Sequence
  Synthetic
tgcgagaattggcggaggaaa

SEQ ID NO: 20167 - DNA, 19 bp, Artificial Sequence
  Synthetic
gcgcatcgtcatccggcat

SEQ ID NO: 20168 - DNA, 20 bp, Artificial Sequence
  Synthetic
gcctcgctgccttcgagatt

SEQ ID NO: 20169 - DNA, 20 bp, Artificial Sequence
  Synthetic
acgacggacagcaaaacgcc

SEQ ID NO: 20170 - DNA, 20 bp, Artificial Sequence
  Synthetic
aaagccgcgagtggtcatgg

SEQ ID NO: 20171 - DNA, 23 bp, Artificial Sequence
  Synthetic
gttcagacggcattttgtatgga

SEQ ID NO: 20172 - DNA, 19 bp, Artificial Sequence
  Synthetic
tcttcgaggcgttcgcggg

SEQ ID NO: 20173 - DNA, 22 bp, Artificial Sequence
  Synthetic
cgggtaatctttccgaaaccgt

SEQ ID NO: 20174 - DNA, 21 bp, Artificial Sequence
  Synthetic
agcctgctttgcgtatccacg

SEQ ID NO: 20175 - DNA, 22 bp, Artificial Sequence
  Synthetic
aggtattcgagataggcgcggg

SEQ ID NO: 20176 - DNA, 19 bp, Artificial Sequence
  Synthetic
acgaatcgccgtcttgcgc

SEQ ID NO: 20177 - DNA, 18 bp, Artificial Sequence
  Synthetic
acccccaagccgcattgg

SEQ ID NO: 20178 - DNA, 20 bp, Artificial Sequence
  Synthetic
tttgccgtcttcgatgccca

SEQ ID NO: 20179 - DNA, 20 bp, Artificial Sequence
  Synthetic
ttgccgaagccagatcgcac

SEQ ID NO: 20180 - DNA, 20 bp, Artificial Sequence
  Synthetic
tcgaccaaatcgccgatggg

SEQ ID NO: 20181 - DNA, 19 bp, Artificial Sequence
  Synthetic
tcctttcgggcgcgagact

SEQ ID NO: 20182 - DNA, 19 bp, Artificial Sequence
  Synthetic
tccgcatcagccacatcgg

SEQ ID NO: 20183 - DNA, 22 bp, Artificial Sequence
  Synthetic
ccgataccacacccgaatacgc

SEQ ID NO: 20184 - DNA, 18 bp, Artificial Sequence
  Synthetic
tgggcaagccattccgcc

SEQ ID NO: 20185 - DNA, 18 bp, Artificial Sequence
  Synthetic
cctcaaccgccgcatgca

SEQ ID NO: 20186 - DNA, 20 bp, Artificial Sequence
  Synthetic
ccgctgattgcaccgctcat

SEQ ID NO: 20187 - DNA, 21 bp, Artificial Sequence
  Synthetic
caccgtaagcgagcgtcaact

SEQ ID NO: 20188 - DNA, 20 bp, Artificial Sequence
  Synthetic
ggtactgcttcctttgccgg

SEQ ID NO: 20189 - DNA, 21 bp, Artificial Sequence
  Synthetic
ccttcggcgtgcatttggaca

SEQ ID NO: 20190 - DNA, 22 bp, Artificial Sequence
  Synthetic
cgatgtttgggcaaagtggctg

SEQ ID NO: 20191 - DNA, 19 bp, Artificial Sequence
  Synthetic
tcaggtgcgcgctcatcgg

SEQ ID NO: 20192 - DNA, 20 bp, Artificial Sequence
  Synthetic
acatcaatgccaagccgggc

SEQ ID NO: 20193 - DNA, 19 bp, Artificial Sequence
  Synthetic
tcacccacgccgtgctgtc

SEQ ID NO: 20194 - DNA, 18 bp, Artificial Sequence
  Synthetic
tccgcgccggctttttcg

SEQ ID NO: 20195 - DNA, 20 bp, Artificial Sequence
  Synthetic
gcaaagagtttcggggcggc

SEQ ID NO: 20196 - DNA, 20 bp, Artificial Sequence
  Synthetic
cggatatttctgcctgcccg

SEQ ID NO: 20197 - DNA, 19 bp, Artificial Sequence
  Synthetic
ccgtctggttgcgttggcg

SEQ ID NO: 20198 - DNA, 21 bp, Artificial Sequence
  Synthetic
cgggaactgggtgtgggaaat

SEQ ID NO: 20199 - DNA, 22 bp, Artificial Sequence
  Synthetic
aaagtgcgtcaaggcagagtct

SEQ ID NO: 20200 - DNA, 19 bp, Artificial Sequence
  Synthetic
aaatcccgtcccgcacgcg

SEQ ID NO: 20201 - DNA, 20 bp, Artificial Sequence
  Synthetic
tgcgccccctcatgattgag

SEQ ID NO: 20202 - DNA, 18 bp, Artificial Sequence
  Synthetic
tgccgcgcacgatgcttg

SEQ ID NO: 20203 - DNA, 19 bp, Artificial Sequence
  Synthetic
acgtcggtcagggcaacgc

SEQ ID NO: 20204 - DNA, 20 bp, Artificial Sequence
  Synthetic
atggttttgcccggcgagtc

SEQ ID NO: 20205 - DNA, 22 bp, Artificial Sequence
  Synthetic
gggcgaggaatagtcgatgacg

SEQ ID NO: 20206 - DNA, 22 bp, Artificial Sequence
  Synthetic
cgtagaagcggctgaacagggt

SEQ ID NO: 20207 - DNA, 22 bp, Artificial Sequence
  Synthetic
ggtcagcagtgccaaaacccaa

SEQ ID NO: 20208 - DNA, 20 bp, Artificial Sequence
  Synthetic
aaacggcatattcgcccgcg

SEQ ID NO: 20209 - DNA, 23 bp, Artificial Sequence
  Synthetic
cgtacccgaaaacgaatacatcg

SEQ ID NO: 20210 - DNA, 19 bp, Artificial Sequence
  Synthetic
ggtttggcggcggaaaccg

SEQ ID NO: 20211 - DNA, 23 bp, Artificial Sequence
  Synthetic
gcatcgtattgactgcctttcaa

SEQ ID NO: 20212 - DNA, 20 bp, Artificial Sequence
  Synthetic
ccaattcgtgcgtgtcttca

SEQ ID NO: 20213 - DNA, 20 bp, Artificial Sequence
  Synthetic
aaccgaagtcaaaccgccgg

SEQ ID NO: 20214 - DNA, 24 bp, Artificial Sequence
  Synthetic
cacagggtcaaaatacagttcagt

SEQ ID NO: 20215 - DNA, 22 bp, Artificial Sequence
  Synthetic
ggacagtttggcagacggtgtg

SEQ ID NO: 20216 - DNA, 21 bp, Artificial Sequence
  Synthetic
gtgccaccgtcttttttgtga

SEQ ID NO: 20217 - DNA, 22 bp, Artificial Sequence
  Synthetic
tcgggcttttggtcattttcag

SEQ ID NO: 20218 - DNA, 21 bp, Artificial Sequence
  Synthetic
ccgtcttggttttccagtgca

SEQ ID NO: 20219 - DNA, 22 bp, Artificial Sequence
  Synthetic
tcgaattgcagcgtgaatgcgc

SEQ ID NO: 20220 - DNA, 19 bp, Artificial Sequence
  Synthetic
tcggtggtccgctcggaag

SEQ ID NO: 20221 - DNA, 20 bp, Artificial Sequence
  Synthetic
atccattccctctcccgtgg

SEQ ID NO: 20222 - DNA, 23 bp, Artificial Sequence
  Synthetic
ctcaaaaaataccagcccgagag

SEQ ID NO: 20223 - DNA, 22 bp, Artificial Sequence
  Synthetic
gcgcgttgagatagacggcgag

SEQ ID NO: 20224 - DNA, 21 bp, Artificial Sequence
  Synthetic
gcggagaactgtttgaccgcg

SEQ ID NO: 20225 - DNA, 21 bp, Artificial Sequence
  Synthetic
acgccgtctgaaaaaaccttt

SEQ ID NO: 20226 - DNA, 20 bp, Artificial Sequence
  Synthetic
gccatgcgcccaaacagatg

SEQ ID NO: 20227 - DNA, 22 bp, Artificial Sequence
  Synthetic
gcgcctgctgcttaagatatgc

SEQ ID NO: 20228 - DNA, 19 bp, Artificial Sequence
  Synthetic
tttccagtcgccgccgtct

SEQ ID NO: 20229 - DNA, 22 bp, Artificial Sequence
  Synthetic
aaacacccgcttcaaaacccac

SEQ ID NO: 20230 - DNA, 18 bp, Artificial Sequence
  Synthetic
tttgaccgcgccgacacg

SEQ ID NO: 20231 - DNA, 20 bp, Artificial Sequence
  Synthetic
aaacggcggtcgattttgtc

SEQ ID NO: 20232 - DNA, 18 bp, Artificial Sequence
  Synthetic
tgccgcccgtgcaaactg

SEQ ID NO: 20233 - DNA, 22 bp, Artificial Sequence
  Synthetic
acgaaccgttgggctacatcaa

SEQ ID NO: 20234 - DNA, 22 bp, Artificial Sequence
  Synthetic
tcttcgccgtaaattaccgcca

SEQ ID NO: 20235 - DNA, 21 bp, Artificial Sequence
  Synthetic
ccgaacttgctgtccactccg

SEQ ID NO: 20236 - DNA, 19 bp, Artificial Sequence
  Synthetic
ggaatgtgccgctgccgaa

SEQ ID NO: 20237 - DNA, 21 bp, Artificial Sequence
  Synthetic
cctgttgggtttgcgcgatga

SEQ ID NO: 20238 - DNA, 22 bp, Artificial Sequence
  Synthetic
tcttgatgggcgtcttgcgtat

SEQ ID NO: 20239 - DNA, 20 bp, Artificial Sequence
  Synthetic
atcagaagcggtagcgcacg

SEQ ID NO: 20240 - DNA, 22 bp, Artificial Sequence
  Synthetic
ccgataagtttccgtgcggaca

SEQ ID NO: 20241 - DNA, 21 bp, Artificial Sequence
  Synthetic
ctcttgtcgtgcggacggttt

SEQ ID NO: 20242 - DNA, 20 bp, Artificial Sequence
  Synthetic
aaacgatacggcaagcgcga

SEQ ID NO: 20243 - DNA, 20 bp, Artificial Sequence
  Synthetic
cctgtcaagcccgtgtgcag

SEQ ID NO: 20244 - DNA, 22 bp, Artificial Sequence
  Synthetic
ggcggatgatacggaggctttg

SEQ ID NO: 20245 - DNA, 19 bp, Artificial Sequence
  Synthetic
gcgggggtgcgaaggaaat

SEQ ID NO: 20246 - DNA, 19 bp, Artificial Sequence
  Synthetic
gcgcgtttccccgttgacg

SEQ ID NO: 20247 - DNA, 20 bp, Artificial Sequence
  Synthetic
tcggggataaggcgggcgag

SEQ ID NO: 20248 - DNA, 20 bp, Artificial Sequence
  Synthetic
gcgacgcggctttcgaacag

SEQ ID NO: 20249 - DNA, 20 bp, Artificial Sequence
  Synthetic
ggcttatccggtgatggcgg

SEQ ID NO: 20250 - DNA, 22 bp, Artificial Sequence
  Synthetic
cccgtgatgaagtcccgggatt

SEQ ID NO: 20251 - DNA, 18 bp, Artificial Sequence
  Synthetic
acgagctgggcggtgtgt

SEQ ID NO: 20252 - DNA, 20 bp, Artificial Sequence
  Synthetic
gcggttacggaggcggacaa

SEQ ID NO: 20253 - DNA, 21 bp, Artificial Sequence
  Synthetic
ctgttgtcgcagcgtgtggag

SEQ ID NO: 20254 - DNA, 19 bp, Artificial Sequence
  Synthetic
ttgcggaatcggcgggcag

SEQ ID NO: 20255 - DNA, 19 bp, Artificial Sequence
  Synthetic
gggctgtacgcgcttaccg

SEQ ID NO: 20256 - DNA, 19 bp, Artificial Sequence
  Synthetic
acgagaagggggcggcttt

SEQ ID NO: 20257 - DNA, 20 bp, Artificial Sequence
  Synthetic
accaactcctaccgcagcca

SEQ ID NO: 20258 - DNA, 22 bp, Artificial Sequence
  Synthetic
gcggaagtatggtacaggcggt

SEQ ID NO: 20259 - DNA, 19 bp, Artificial Sequence
  Synthetic
gggcaatgcacgccgaaca

SEQ ID NO: 20260 - DNA, 20 bp, Artificial Sequence
  Synthetic
gccgcctgcccgatattggg

SEQ ID NO: 20261 - DNA, 18 bp, Artificial Sequence
  Synthetic
atcgggcgttcgggcatc

SEQ ID NO: 20262 - DNA, 22 bp, Artificial Sequence
  Synthetic
cggcctgtaaattccgcgtacg

SEQ ID NO: 20263 - DNA, 19 bp, Artificial Sequence
  Synthetic
ttacggcccggaccaacgc

SEQ ID NO: 20264 - DNA, 19 bp, Artificial Sequence
  Synthetic
gcggtccgcagtcgcattt

SEQ ID NO: 20265 - DNA, 20 bp, Artificial Sequence
  Synthetic
cgaagtatcgcccgccgaaa

SEQ ID NO: 20266 - DNA, 25 bp, Artificial Sequence
  Synthetic
aggttatccaaaaggtttacagcct

SEQ ID NO: 20267 - DNA, 19 bp, Artificial Sequence
  Synthetic
aacagcctgctgtcgcccg

SEQ ID NO: 20268 - DNA, 20 bp, Artificial Sequence
  Synthetic
atacgcggcggcaaagaaca

SEQ ID NO: 20269 - DNA, 22 bp, Artificial Sequence
  Synthetic
cggctgttgaccaaaatctgcg

SEQ ID NO: 20270 - DNA, 18 bp, Artificial Sequence
  Synthetic
cgcgcagggtgttgcctt

SEQ ID NO: 20271 - DNA, 19 bp, Artificial Sequence
  Synthetic
tggtggacaattccgcgcc

SEQ ID NO: 20272 - DNA, 21 bp, Artificial Sequence
  Synthetic
acgtaaaacctgcaatgcgcc

SEQ ID NO: 20273 - DNA, 22 bp, Artificial Sequence
  Synthetic
gtcgccttcgatgatgacggtt

SEQ ID NO: 20274 - DNA, 20 bp, Artificial Sequence
  Synthetic
cgatggttggcaaccgtgcg

SEQ ID NO: 20275 - DNA, 21 bp, Artificial Sequence
  Synthetic
attaatacgccccagccgccc

SEQ ID NO: 20276 - DNA, 20 bp, Artificial Sequence
  Synthetic
ataggcagaatgaccgcagc

SEQ ID NO: 20277 - DNA, 20 bp, Artificial Sequence
  Synthetic
accggagtggacgaacctct

SEQ ID NO: 20278 - DNA, 18 bp, Artificial Sequence
  Synthetic
cgcaagctgtttcggcgg

SEQ ID NO: 20279 - DNA, 20 bp, Artificial Sequence
  Synthetic
cggtcgaggaggcaatccgt

SEQ ID NO: 20280 - DNA, 21 bp, Artificial Sequence
  Synthetic
gcaccttcgtcgcggatttcg

SEQ ID NO: 20281 - DNA, 19 bp, Artificial Sequence
  Synthetic
ttggtcgccgagctgccag

SEQ ID NO: 20282 - DNA, 19 bp, Artificial Sequence
  Synthetic
accatttggtcgcggtggg

SEQ ID NO: 20283 - DNA, 22 bp, Artificial Sequence
  Synthetic
cgatttgcccgtttacgccctg

SEQ ID NO: 20284 - DNA, 22 bp, Artificial Sequence
  Synthetic
acaggatggatttcgcccagcc

SEQ ID NO: 20285 - DNA, 19 bp, Artificial Sequence
  Synthetic
ggacgacttcgcgttccgc

SEQ ID NO: 20286 - DNA, 20 bp, Artificial Sequence
  Synthetic
acgagggcatgacgaccgtg

SEQ ID NO: 20287 - DNA, 22 bp, Artificial Sequence
  Synthetic
gctacggcaatcagtgtcaggt

SEQ ID NO: 20288 - DNA, 19 bp, Artificial Sequence
  Synthetic
atgccgtgcagggcttggg

SEQ ID NO: 20289 - DNA, 22 bp, Artificial Sequence
  Synthetic
cggcccattcgtcttggttgat

SEQ ID NO: 20290 - DNA, 18 bp, Artificial Sequence
  Synthetic
cgttgcgcggcagcttgt

SEQ ID NO: 20291 - DNA, 19 bp, Artificial Sequence
  Synthetic
ccgggtgcaagcagggttt

SEQ ID NO: 20292 - DNA, 23 bp, Artificial Sequence
  Synthetic
gaggcaaccggcaattattatga

SEQ ID NO: 20293 - DNA, 22 bp, Artificial Sequence
  Synthetic
cgggcgttgtgtgttttgttgt

SEQ ID NO: 20294 - DNA, 21 bp, Artificial Sequence
  Synthetic
gcaggttgtcggctttgacgt

SEQ ID NO: 20295 - DNA, 20 bp, Artificial Sequence
  Synthetic
cgtacatcacgccggtcagg

SEQ ID NO: 20296 - DNA, 19 bp, Artificial Sequence
  Synthetic
cttggcaggcttcgcagcg

SEQ ID NO: 20297 - DNA, 18 bp, Artificial Sequence
  Synthetic
aaaggcagacgcggtcgc

SEQ ID NO: 20298 - DNA, 18 bp, Artificial Sequence
  Synthetic
tgggcgcgcaagaagtcg

SEQ ID NO: 20299 - DNA, 20 bp, Artificial Sequence
  Synthetic
acgtgcagcaggcggatttg

SEQ ID NO: 20300 - DNA, 20 bp, Artificial Sequence
  Synthetic
gcggtgtggcgcaggaattg

SEQ ID NO: 20301 - DNA, 21 bp, Artificial Sequence
  Synthetic
acatcggcagcatcctcgaaa

SEQ ID NO: 20302 - DNA, 19 bp, Artificial Sequence
  Synthetic
acggtttgcaggcagtcgc

SEQ ID NO: 20303 - DNA, 20 bp, Artificial Sequence
  Synthetic
ccgatgacccagaagccgac

SEQ ID NO: 20304 - DNA, 19 bp, Artificial Sequence
  Synthetic
aactcgccttcgcctgcgg

SEQ ID NO: 20305 - DNA, 22 bp, Artificial Sequence
  Synthetic
cggggaaggaaataccgatggg

SEQ ID NO: 20306 - DNA, 19 bp, Artificial Sequence
  Synthetic
tccattttggtcggcggcg

SEQ ID NO: 20307 - DNA, 22 bp, Artificial Sequence
  Synthetic
ggcgcggatgcacttgaagaag

SEQ ID NO: 20308 - DNA, 22 bp, Artificial Sequence
  Synthetic
ccagtatttcagacggccccgc

SEQ ID NO: 20309 - DNA, 21 bp, Artificial Sequence
  Synthetic
tttggcaaaaccgggcggaac

SEQ ID NO: 20310 - DNA, 22 bp, Artificial Sequence
  Synthetic
cgggcaggttgagggtgaaatc

SEQ ID NO: 20311 - DNA, 20 bp, Artificial Sequence
  Synthetic
cctgccggattgcttgtccg

SEQ ID NO: 20312 - DNA, 18 bp, Artificial Sequence
  Synthetic
cgacttcgatgccgccgt

SEQ ID NO: 20313 - DNA, 20 bp, Artificial Sequence
  Synthetic
tgccttggaacatccccatc

SEQ ID NO: 20314 - DNA, 22 bp, Artificial Sequence
  Synthetic
ggaaaggtaaaacacgacgcgc

SEQ ID NO: 20315 - DNA, 21 bp, Artificial Sequence
  Synthetic
cccaggtcttttgcgtcgtcc

SEQ ID NO: 20316 - DNA, 22 bp, Artificial Sequence
  Synthetic
ggcgtattcgagataggcgcgt

SEQ ID NO: 20317 - DNA, 22 bp, Artificial Sequence
  Synthetic
gcgggttgagggtggaaaagaa

SEQ ID NO: 20318 - DNA, 22 bp, Artificial Sequence
  Synthetic
gcacggtcgatgtatctgaccg

SEQ ID NO: 20319 - DNA, 19 bp, Artificial Sequence
  Synthetic
cggcaaggtgttcgccgag

SEQ ID NO: 20320 - DNA, 24 bp, Artificial Sequence
  Synthetic
cgggttcttgccatcaaatttaac

SEQ ID NO: 20321 - DNA, 23 bp, Artificial Sequence
  Synthetic
agttcaaaggctacacgtcaaat

SEQ ID NO: 20322 - DNA, 20 bp, Artificial Sequence
  Synthetic
acaagtaatcccgcgtcccg

SEQ ID NO: 20323 - DNA, 25 bp, Artificial Sequence
  Synthetic
ccgtccgttctaaaatttgaccaat

SEQ ID NO: 20324 - DNA, 21 bp, Artificial Sequence
  Synthetic
ggttcgggctttcacaacgga

SEQ ID NO: 20325 - DNA, 20 bp, Artificial Sequence
  Synthetic
gacttggggcttctggctgc

SEQ ID NO: 20326 - DNA, 19 bp, Artificial Sequence
  Synthetic
tatggcaatcggcgcctgc

SEQ ID NO: 20327 - DNA, 22 bp, Artificial Sequence
  Synthetic
cggctcagggattcgacaatgt

SEQ ID NO: 20328 - DNA, 22 bp, Artificial Sequence
  Synthetic
ctcgccggacaattcattgctg

SEQ ID NO: 20329 - DNA, 20 bp, Artificial Sequence
  Synthetic
gctcgggcttttaccgcgtc

SEQ ID NO: 20330 - DNA, 22 bp, Artificial Sequence
  Synthetic
acggctttttctttgggctcgg

SEQ ID NO: 20331 - DNA, 22 bp, Artificial Sequence
  Synthetic
cggatatcgagctgcacagccg

SEQ ID NO: 20332 - DNA, 20 bp, Artificial Sequence
  Synthetic
ccaccacacgccatgtcgaa

SEQ ID NO: 20333 - DNA, 19 bp, Artificial Sequence
  Synthetic
tggttcgagggcaggctgg

SEQ ID NO: 20334 - DNA, 19 bp, Artificial Sequence
  Synthetic
tggcggcaaccttcggtac

SEQ ID NO: 20335 - DNA, 20 bp, Artificial Sequence
  Synthetic
caatccctgcgtgcttcggg

SEQ ID NO: 20336 - DNA, 22 bp, Artificial Sequence
  Synthetic
tccactgcttgccctcaacaag

SEQ ID NO: 20337 - DNA, 19 bp, Artificial Sequence
  Synthetic
tcgccagcttgcctgtccg

SEQ ID NO: 20338 - DNA, 21 bp, Artificial Sequence
  Synthetic
cccgttgcgtttcggaatgcc

SEQ ID NO: 20339 - DNA, 21 bp, Artificial Sequence
  Synthetic
gttggaagtttgacgggggct

SEQ ID NO: 20340 - DNA, 25 bp, Artificial Sequence
  Synthetic
tccgttcaattgcttatttgttcaa

SEQ ID NO: 20341 - DNA, 20 bp, Artificial Sequence
  Synthetic
ctgcctgcgggaatgtcgaa

SEQ ID NO: 20342 - DNA, 22 bp, Artificial Sequence
  Synthetic
acggacagatggatcggcattt

SEQ ID NO: 20343 - DNA, 19 bp, Artificial Sequence
  Synthetic
tatgcggcggcagggcttc

SEQ ID NO: 20344 - DNA, 18 bp, Artificial Sequence
  Synthetic
tacagttccgcgccgcac

SEQ ID NO: 20345 - DNA, 21 bp, Artificial Sequence
  Synthetic
cggcttgaccacccagaactg

SEQ ID NO: 20346 - DNA, 20 bp, Artificial Sequence
  Synthetic
attgctcaacgccgcttcga

SEQ ID NO: 20347 - DNA, 19 bp, Artificial Sequence
  Synthetic
tgctcttctcgccgacagc

SEQ ID NO: 20348 - DNA, 19 bp, Artificial Sequence
  Synthetic
ggcggtcgcttcgtccaac

SEQ ID NO: 20349 - DNA, 19 bp, Artificial Sequence
  Synthetic
cgctgtgggtgtcggtcag

SEQ ID NO: 20350 - DNA, 21 bp, Artificial Sequence
  Synthetic
ggttcgatcatcagcgtgccg

SEQ ID NO: 20351 - DNA, 19 bp, Artificial Sequence
  Synthetic
cgcgagagtacggatgcgc

SEQ ID NO: 20352 - DNA, 19 bp, Artificial Sequence
  Synthetic
agacaagggtgcggcagcc

SEQ ID NO: 20353 - DNA, 19 bp, Artificial Sequence
  Synthetic
gcgcagggacgcatcgtta

SEQ ID NO: 20354 - DNA, 20 bp, Artificial Sequence
  Synthetic
ccacacaagccatcctgccc

SEQ ID NO: 20355 - DNA, 19 bp, Artificial Sequence
  Synthetic
agcgcacacccaaacctgg

SEQ ID NO: 20356 - DNA, 20 bp, Artificial Sequence
  Synthetic
aagtcatcgacaacgcggcg

SEQ ID NO: 20357 - DNA, 20 bp, Artificial Sequence
  Synthetic
tgggcttgaaagtcgtgcgc

SEQ ID NO: 20358 - DNA, 21 bp, Artificial Sequence
  Synthetic
gcctgtaccgttgccgtcatg

SEQ ID NO: 20359 - DNA, 22 bp, Artificial Sequence
  Synthetic
gcccaagcccttatcctgcaaa

SEQ ID NO: 20360 - DNA, 19 bp, Artificial Sequence
  Synthetic
tgggacgaaacccggggct

SEQ ID NO: 20361 - DNA, 19 bp, Artificial Sequence
  Synthetic
ggcggacgcgttgaaggtg

SEQ ID NO: 20362 - DNA, 18 bp, Artificial Sequence
  Synthetic
aaggcgtggctttcggcg

SEQ ID NO: 20363 - DNA, 19 bp, Artificial Sequence
  Synthetic
agccgtgcgctatacccgc

SEQ ID NO: 20364 - DNA, 20 bp, Artificial Sequence
  Synthetic
tgaatggttgtggcagcccg

SEQ ID NO: 20365 - DNA, 20 bp, Artificial Sequence
  Synthetic
cggcttgggacattgcctcc

SEQ ID NO: 20366 - DNA, 20 bp, Artificial Sequence
  Synthetic
gcggtcggacacgtcaaact

SEQ ID NO: 20367 - DNA, 18 bp, Artificial Sequence
  Synthetic
cccggtgccgtgcagatt

SEQ ID NO: 20368 - DNA, 19 bp, Artificial Sequence
  Synthetic
agccggggcggaagtttcc

SEQ ID NO: 20369 - DNA, 21 bp, Artificial Sequence
  Synthetic
gcgcagacgttttctgacggc

SEQ ID NO: 20370 - DNA, 19 bp, Artificial Sequence
  Synthetic
gccaatatcggtgcggcgc

SEQ ID NO: 20371 - DNA, 22 bp, Artificial Sequence
  Synthetic
agcagcagctacaatgtcggac

SEQ ID NO: 20372 - DNA, 20 bp, Artificial Sequence
  Synthetic
cctcgaatggggcggacagt

SEQ ID NO: 20373 - DNA, 20 bp, Artificial Sequence
  Synthetic
cgacatccgcaccgcattgg

SEQ ID NO: 20374 - DNA, 22 bp, Artificial Sequence
  Synthetic
gaccgaagaccaaggcttcgtt

SEQ ID NO: 20375 - DNA, 21 bp, Artificial Sequence
  Synthetic
ccgaaacctatatcggggcgc

SEQ ID NO: 20376 - DNA, 20 bp, Artificial Sequence
  Synthetic
ccaaacatcccgccaaaggc

SEQ ID NO: 20377 - DNA, 21 bp, Artificial Sequence
  Synthetic
ccgcttcctcgacagcgaaag

SEQ ID NO: 20378 - DNA, 21 bp, Artificial Sequence
  Synthetic
cgacggtcggagaatgggtgg

SEQ ID NO: 20379 - DNA, 21 bp, Artificial Sequence
  Synthetic
cctggaagcaggcggtagacc

SEQ ID NO: 20380 - DNA, 20 bp, Artificial Sequence
  Synthetic
gggcaacgtcatcgaagcgg

SEQ ID NO: 20381 - DNA, 20 bp, Artificial Sequence
  Synthetic
tttggggcggcaagttcgtg

SEQ ID NO: 20382 - DNA, 21 bp, Artificial Sequence
  Synthetic
gccgctattccgacgaatggc

SEQ ID NO: 20383 - DNA, 20 bp, Artificial Sequence
  Synthetic
atgcggcaggtttgatggat

SEQ ID NO: 20384 - DNA, 21 bp, Artificial Sequence
  Synthetic
gcgttttgctggcggatgtag

SEQ ID NO: 20385 - DNA, 18 bp, Artificial Sequence
  Synthetic
tcgcgcaaaagcccggag

SEQ ID NO: 20386 - DNA, 21 bp, Artificial Sequence
  Synthetic
ccgaatacgccgacaccgacg

SEQ ID NO: 20387 - DNA, 20 bp, Artificial Sequence
  Synthetic
gggcaacataagcggcggac

SEQ ID NO: 20388 - DNA, 22 bp, Artificial Sequence
  Synthetic
cgccgtctttgcctacacccat

SEQ ID NO: 20389 - DNA, 21 bp, Artificial Sequence
  Synthetic
accacggcaggttacggattg

SEQ ID NO: 20390 - DNA, 22 bp, Artificial Sequence
  Synthetic
gttccgctgattaaggccttgc

SEQ ID NO: 20391 - DNA, 18 bp, Artificial Sequence
  Synthetic
ccgaaccgtgcctgctgt

SEQ ID NO: 20392 - DNA, 19 bp, Artificial Sequence
  Synthetic
cgccgaagaacagtccggt

SEQ ID NO: 20393 - DNA, 20 bp, Artificial Sequence
  Synthetic
tggcaatgctgtcttcgcgg

SEQ ID NO: 20394 - DNA, 19 bp, Artificial Sequence
  Synthetic
ttgtccgcacgaaccgccg

SEQ ID NO: 20395 - DNA, 18 bp, Artificial Sequence
  Synthetic
gcgcgctttggcaaacga

SEQ ID NO: 20396 - DNA, 18 bp, Artificial Sequence
  Synthetic
tgcccgcgccgattttgg

SEQ ID NO: 20397 - DNA, 22 bp, Artificial Sequence
  Synthetic
acagataacctgcggcggcaaa

SEQ ID NO: 20398 - DNA, 19 bp, Artificial Sequence
  Synthetic
gccttgccgaacgcgaacg

SEQ ID NO: 20399 - DNA, 20 bp, Artificial Sequence
  Synthetic
cgtgttgcacagccggatgg

SEQ ID NO: 20400 - DNA, 19 bp, Artificial Sequence
  Synthetic
agcagcgcgtctccatcgc

SEQ ID NO: 20401 - DNA, 21 bp, Artificial Sequence
  Synthetic
cgtcgtcgccgtagacatcaa

SEQ ID NO: 20402 - DNA, 22 bp, Artificial Sequence
  Synthetic
cccttctgccttctggacgaag

SEQ ID NO: 20403 - DNA, 22 bp, Artificial Sequence
  Synthetic
ccctgatcaacgccaaacgcta

SEQ ID NO: 20404 - DNA, 19 bp, Artificial Sequence
  Synthetic
tggcggaagagcagaccgt

SEQ ID NO: 20405 - DNA, 21 bp, Artificial Sequence
  Synthetic
gcaggcggcatggctttcaga

SEQ ID NO: 20406 - DNA, 20 bp, Artificial Sequence
  Synthetic
agcaggaagccgccgacttt

SEQ ID NO: 20407 - DNA, 19 bp, Artificial Sequence
  Synthetic
cgaggcaaaccgcatccgc

SEQ ID NO: 20408 - DNA, 20 bp, Artificial Sequence
  Synthetic
ggcaaaactgcccgccacat

SEQ ID NO: 20409 - DNA, 22 bp, Artificial Sequence
  Synthetic
ggcgatttgctgctgaatcgga

SEQ ID NO: 20410 - DNA, 22 bp, Artificial Sequence
  Synthetic
gccttcttcgacttggctgtcg

SEQ ID NO: 20411 - DNA, 20 bp, Artificial Sequence
  Synthetic
tgctctacctggccgggttt

SEQ ID NO: 20412 - DNA, 22 bp, Artificial Sequence
  Synthetic
cacttgcccgcttttttgcagc

SEQ ID NO: 20413 - DNA, 22 bp, Artificial Sequence
  Synthetic
gatgttttcggggaacacggct

SEQ ID NO: 20414 - DNA, 19 bp, Artificial Sequence
  Synthetic
cggtcatcagggcggtgtc

SEQ ID NO: 20415 - DNA, 21 bp, Artificial Sequence
  Synthetic
gtaggtctcggtgtcatcgcc

SEQ ID NO: 20416 - DNA, 20 bp, Artificial Sequence
  Synthetic
acgtgattgccgaacagggc

SEQ ID NO: 20417 - DNA, 20 bp, Artificial Sequence
  Synthetic
aaagcaggtgccaaccgctt

SEQ ID NO: 20418 - DNA, 18 bp, Artificial Sequence
  Synthetic
acgccaccgacaccacca

SEQ ID NO: 20419 - DNA, 21 bp, Artificial Sequence
  Synthetic
ccgccgcgaaaaactggaaac

SEQ ID NO: 20420 - DNA, 21 bp, Artificial Sequence
  Synthetic
cggcgtatcgctcaaaatgcc

SEQ ID NO: 20421 - DNA, 18 bp, Artificial Sequence
  Synthetic
tgccgccgcattgctgac

SEQ ID NO: 20422 - DNA, 19 bp, Artificial Sequence
  Synthetic
caaaccgaaagcgcgggcc

SEQ ID NO: 20423 - DNA, 20 bp, Artificial Sequence
  Synthetic
ggcacaccaaaaatcatggc

SEQ ID NO: 20424 - DNA, 22 bp, Artificial Sequence
  Synthetic
gctgctgattatctgccgtaaa

SEQ ID NO: 20425 - DNA, 21 bp, Artificial Sequence
  Synthetic
cggtgtgccattggtagattt

SEQ ID NO: 20426 - DNA, 23 bp, Artificial Sequence
  Synthetic
gtcccacaattcaaaaccgtctt

SEQ ID NO: 20427 - DNA, 25 bp, Artificial Sequence
  Synthetic
ggctgtttttcaggttgcttaattt

SEQ ID NO: 20428 - DNA, 21 bp, Artificial Sequence
  Synthetic
tttgagcttgtcagcagccga

SEQ ID NO: 20429 - DNA, 23 bp, Artificial Sequence
  Synthetic
tgccaaacaccgacataatcatc

SEQ ID NO: 20430 - DNA, 25 bp, Artificial Sequence
  Synthetic
cgcttgtttacgagttttcaaacaa

SEQ ID NO: 20431 - DNA, 20 bp, Artificial Sequence
  Synthetic
gccctgccacaaacagattt

SEQ ID NO: 20432 - DNA, 24 bp, Artificial Sequence
  Synthetic
gtggcaatgaatggaatattgtcc

SEQ ID NO: 20433 - DNA, 21 bp, Artificial Sequence
  Synthetic
agactgttcccgataactcgc

SEQ ID NO: 20434 - DNA, 25 bp, Artificial Sequence
  Synthetic
gccttaatccaacaaaaaatgacga

SEQ ID NO: 20435 - DNA, 21 bp, Artificial Sequence
  Synthetic
agcgcgttattgttcaacagc

SEQ ID NO: 20436 - DNA, 22 bp, Artificial Sequence
  Synthetic
gtcggtgtgattgccgccatta

SEQ ID NO: 20437 - DNA, 19 bp, Artificial Sequence
  Synthetic
tatcgacctgcgccgccct

SEQ ID NO: 20438 - DNA, 24 bp, Artificial Sequence
  Synthetic
cagaaatcggttattgacgaagtg

SEQ ID NO: 20439 - DNA, 18 bp, Artificial Sequence
  Synthetic
tgcggtgatgtcggcagg

SEQ ID NO: 20440 - DNA, 19 bp, Artificial Sequence
  Synthetic
ggcgcgtaccgttttggca

SEQ ID NO: 20441 - DNA, 19 bp, Artificial Sequence
  Synthetic
gcgtcggcgtggatggaga

SEQ ID NO: 20442 - DNA, 22 bp, Artificial Sequence
  Synthetic
gcttctcttcggcaggattgga

SEQ ID NO: 20443 - DNA, 19 bp, Artificial Sequence
  Synthetic
aggtcgaggcgggcgaaac

SEQ ID NO: 20444 - DNA, 19 bp, Artificial Sequence
  Synthetic
cgacgcattgggcaagccc

SEQ ID NO: 20445 - DNA, 22 bp, Artificial Sequence
  Synthetic
acgccgaacaaatcaggcagtt

SEQ ID NO: 20446 - DNA, 19 bp, Artificial Sequence
  Synthetic
atggatgggcggatggcgg

SEQ ID NO: 20447 - DNA, 22 bp, Artificial Sequence
  Synthetic
gcggcaatcaagcatttcggac

SEQ ID NO: 20448 - DNA, 19 bp, Artificial Sequence
  Synthetic
tgcccccgttttggctgcc

SEQ ID NO: 20449 - DNA, 22 bp, Artificial Sequence
  Synthetic
cgcaccggcattcacatctgtt

SEQ ID NO: 20450 - DNA, 22 bp, Artificial Sequence
  Synthetic
tcttgatgggcgtcttgcgtat

SEQ ID NO: 20451 - DNA, 21 bp, Artificial Sequence
  Synthetic
cggggaatcagaagcggtagc

SEQ ID NO: 20452 - DNA, 18 bp, Artificial Sequence
  Synthetic
acgcggggtttgggcaac

SEQ ID NO: 20453 - DNA, 20 bp, Artificial Sequence
  Synthetic
cccaaagccgttcccgttgc

SEQ ID NO: 20454 - DNA, 22 bp, Artificial Sequence
  Synthetic
acacgccgtcgatttggtgatt

SEQ ID NO: 20455 - DNA, 19 bp, Artificial Sequence
  Synthetic
tttcccggcctgcccaacg

SEQ ID NO: 20456 - DNA, 20 bp, Artificial Sequence
  Synthetic
gaagtgcgcttcgggcatcc

SEQ ID NO: 20457 - DNA, 20 bp, Artificial Sequence
  Synthetic
ccgattacaccgcctccagc

SEQ ID NO: 20458 - DNA, 18 bp, Artificial Sequence
  Synthetic
tgcgtccgccggcgattt

SEQ ID NO: 20459 - DNA, 22 bp, Artificial Sequence
  Synthetic
ccaaatgcctgacggtgcagtg

SEQ ID NO: 20460 - DNA, 21 bp, Artificial Sequence
  Synthetic
tcgaatttttcggcgagggcg

SEQ ID NO: 20461 - DNA, 20 bp, Artificial Sequence
  Synthetic
gcggtttggaagcggaaacc

SEQ ID NO: 20462 - DNA, 22 bp, Artificial Sequence
  Synthetic
cccgatacggttgaggtcgtcc

SEQ ID NO: 20463 - DNA, 22 bp, Artificial Sequence
  Synthetic
gcgacatcaagttgccaaacgg

SEQ ID NO: 20464 - DNA, 19 bp, Artificial Sequence
  Synthetic
tcgggcgcggagagtggtt

SEQ ID NO: 20465 - DNA, 18 bp, Artificial Sequence
  Synthetic
gatgcgccgcaaatccgc

SEQ ID NO: 20466 - DNA, 16 bp, Artificial Sequence
  Synthetic
aaaacggcgggcgcgt

SEQ ID NO: 20467 - DNA, 21 bp, Artificial Sequence
  Synthetic
ccgcaaacccacctcgtcaaa

SEQ ID NO: 20468 - DNA, 22 bp, Artificial Sequence
  Synthetic
tgagtttgaacgatgtggcgga

SEQ ID NO: 20469 - DNA, 22 bp, Artificial Sequence
  Synthetic
gggcgcggataaagtcgtcgta

SEQ ID NO: 20470 - DNA, 20 bp, Artificial Sequence
  Synthetic
ccgtcaacaaggcgcaacag

SEQ ID NO: 20471 - DNA, 18 bp, Artificial Sequence
  Synthetic
agcgaacagcggcgcaac

SEQ ID NO: 20472 - DNA, 21 bp, Artificial Sequence
  Synthetic
gcacacgtcatcggatttacc

SEQ ID NO: 20473 - DNA, 22 bp, Artificial Sequence
  Synthetic
gcgcacacgaattaagcatcga

SEQ ID NO: 20474 - DNA, 21 bp, Artificial Sequence
  Synthetic
tgaagaaaaggcgggcgagcc

SEQ ID NO: 20475 - DNA, 22 bp, Artificial Sequence
  Synthetic
tgccgtctgaaacacattaagg

SEQ ID NO: 20476 - DNA, 22 bp, Artificial Sequence
  Synthetic
ccgttttggaacgcgtcatcgc

SEQ ID NO: 20477 - DNA, 21 bp, Artificial Sequence
  Synthetic
cggaaatgccgttgccttcgt

SEQ ID NO: 20478 - DNA, 19 bp, Artificial Sequence
  Synthetic
tcgcgcacttcggcaatgg

SEQ ID NO: 20479 - DNA, 21 bp, Artificial Sequence
  Synthetic
ggtttgttcggcaggtttggc

SEQ ID NO: 20480 - DNA, 19 bp, Artificial Sequence
  Synthetic
gttgatcaggcgcgccact

SEQ ID NO: 20481 - DNA, 20 bp, Artificial Sequence
  Synthetic
ccgagtaggaagccagcggg

SEQ ID NO: 20482 - DNA, 21 bp, Artificial Sequence
  Synthetic
tccccagttgtggtagcggta

SEQ ID NO: 20483 - DNA, 19 bp, Artificial Sequence
  Synthetic
tgccgctgtgggtcagtgc

SEQ ID NO: 20484 - DNA, 20 bp, Artificial Sequence
  Synthetic
gctgccggtggcgaaggtaa

SEQ ID NO: 20485 - DNA, 22 bp, Artificial Sequence
  Synthetic
cctcgcctttcagacgatggat

SEQ ID NO: 20486 - DNA, 20 bp, Artificial Sequence
  Synthetic
ggcggcttcgtcgcacaaac

SEQ ID NO: 20487 - DNA, 19 bp, Artificial Sequence
  Synthetic
tgccgacggacgaacgctg

SEQ ID NO: 20488 - DNA, 19 bp, Artificial Sequence
  Synthetic
cgcacgcgaacagggcttg

SEQ ID NO: 20489 - DNA, 18 bp, Artificial Sequence
  Synthetic
attgccgccgcccaacaa

SEQ ID NO: 20490 - DNA, 21 bp, Artificial Sequence
  Synthetic
tgtttgtgctggcgtttgtgc

SEQ ID NO: 20491 - DNA, 22 bp, Artificial Sequence
  Synthetic
gaacaaaagctgctccgtcccg

SEQ ID NO: 20492 - DNA, 22 bp, Artificial Sequence
  Synthetic
tctcaatctgcaggtgctgaaa

SEQ ID NO: 20493 - DNA, 20 bp, Artificial Sequence
  Synthetic
gtctgtgcctgtgtcctgca

SEQ ID NO: 20494 - DNA, 20 bp, Artificial Sequence
  Synthetic
ggcaatcccgccgatgttca

SEQ ID NO: 20495 - DNA, 19 bp, Artificial Sequence
  Synthetic
cggagagcgcgtcggattt

SEQ ID NO: 20496 - DNA, 22 bp, Artificial Sequence
  Synthetic
cacagtttcggcaaggctttcc

SEQ ID NO: 20497 - DNA, 20 bp, Artificial Sequence
  Synthetic
cgtattgaccgcaccggcag

SEQ ID NO: 20498 - DNA, 19 bp, Artificial Sequence
  Synthetic
ctgggtgtcggctacctgc

SEQ ID NO: 20499 - DNA, 19 bp, Artificial Sequence
  Synthetic
gcaaccatggcctcgaccg

SEQ ID NO: 20500 - DNA, 22 bp, Artificial Sequence
  Synthetic
ggcaggcactttaatcatggcg

SEQ ID NO: 20501 - DNA, 22 bp, Artificial Sequence
  Synthetic
ggcgacaacttggatatgggca

SEQ ID NO: 20502 - DNA, 20 bp, Artificial Sequence
  Synthetic
aaaagctgcacgcggtttgc

SEQ ID NO: 20503 - DNA, 22 bp, Artificial Sequence
  Synthetic
cgggcgaggttttgggtgtaac

SEQ ID NO: 20504 - DNA, 20 bp, Artificial Sequence
  Synthetic
cgcccaaacactgctgcaaa

SEQ ID NO: 20505 - DNA, 22 bp, Artificial Sequence
  Synthetic
ttggtgcaacgcctctacacat

SEQ ID NO: 20506 - DNA, 22 bp, Artificial Sequence
  Synthetic
acggctacaacgaggtcaacct

SEQ ID NO: 20507 - DNA, 20 bp, Artificial Sequence
  Synthetic
ccgacggataagcgacgtgc

SEQ ID NO: 20508 - DNA, 21 bp, Artificial Sequence
  Synthetic
tatgcgggctttttccacgcc

SEQ ID NO: 20509 - DNA, 19 bp, Artificial Sequence
  Synthetic
tggacgcttggcaaccggc

SEQ ID NO: 20510 - DNA, 21 bp, Artificial Sequence
  Synthetic
gcgaatgtctgccatgttcgg

SEQ ID NO: 20511 - DNA, 19 bp, Artificial Sequence
  Synthetic
cgctcctgaccgccctgtt

SEQ ID NO: 20512 - DNA, 22 bp, Artificial Sequence
  Synthetic
gtacaagtaatcccgcgtcccg

SEQ ID NO: 20513 - DNA, 19 bp, Artificial Sequence
  Synthetic
ccgacaaacaggccgcacc

SEQ ID NO: 20514 - DNA, 19 bp, Artificial Sequence
  Synthetic
agggccgcaccaaatcggc

SEQ ID NO: 20515 - DNA, 23 bp, Artificial Sequence
  Synthetic
gccattaaaagaccagggcattc

SEQ ID NO: 20516 - DNA, 22 bp, Artificial Sequence
  Synthetic
tgctgattgtcgtattcggcgg

SEQ ID NO: 20517 - DNA, 20 bp, Artificial Sequence
  Synthetic
agtcgcgcatgtgcctgaaa

SEQ ID NO: 20518 - DNA, 22 bp, Artificial Sequence
  Synthetic
ggaagaaacggcaatgacggct

SEQ ID NO: 20519 - DNA, 21 bp, Artificial Sequence
  Synthetic
gtggacgatgcctacgaagcc

SEQ ID NO: 20520 - DNA, 21 bp, Artificial Sequence
  Synthetic
tgccgcaactgccacttcaaa

SEQ ID NO: 20521 - DNA, 20 bp, Artificial Sequence
  Synthetic
caggttcggtcgtcgtgtcc

SEQ ID NO: 20522 - DNA, 22 bp, Artificial Sequence
  Synthetic
gccgcacccaccatcattgaag

SEQ ID NO: 20523 - DNA, 19 bp, Artificial Sequence
  Synthetic
ggtgggcggacgctattcc

SEQ ID NO: 20524 - DNA, 20 bp, Artificial Sequence
  Synthetic
cgctgcatacggctttgcgc

SEQ ID NO: 20525 - DNA, 19 bp, Artificial Sequence
  Synthetic
ccgattccgccggtcagtc

SEQ ID NO: 20526 - DNA, 24 bp, Artificial Sequence
  Synthetic
ccgcgtacatactcaactccataa

SEQ ID NO: 20527 - DNA, 20 bp, Artificial Sequence
  Synthetic
cccgaggttgaagccgtgtg

SEQ ID NO: 20528 - DNA, 19 bp, Artificial Sequence
  Synthetic
gcacacatggcggctgcac

SEQ ID NO: 20529 - DNA, 21 bp, Artificial Sequence
  Synthetic
cgaaaagcgtgccgccttgtg

SEQ ID NO: 20530 - DNA, 21 bp, Artificial Sequence
  Synthetic
gcgttcttcccactgctgcaa

SEQ ID NO: 20531 - DNA, 25 bp, Artificial Sequence
  Synthetic
gcttgaaaaaacgtgttttaaggga

SEQ ID NO: 20532 - DNA, 22 bp, Artificial Sequence
  Synthetic
cggaaaaaatgtcggggatggc

SEQ ID NO: 20533 - DNA, 20 bp, Artificial Sequence
  Synthetic
cctgtccggcatccagacag

SEQ ID NO: 20534 - DNA, 22 bp, Artificial Sequence
  Synthetic
cgcatcatcagcgtgttgtcgg

SEQ ID NO: 20535 - DNA, 22 bp, Artificial Sequence
  Synthetic
ggcagaaaaaatccgcgctcaa

SEQ ID NO: 20536 - DNA, 19 bp, Artificial Sequence
  Synthetic
cgaagtcagcaccgcgcct

SEQ ID NO: 20537 - DNA, 19 bp, Artificial Sequence
  Synthetic
gccattcgatgacggcggc

SEQ ID NO: 20538 - DNA, 19 bp, Artificial Sequence
  Synthetic
ttgccgccgcgttgttcta

SEQ ID NO: 20539 - DNA, 20 bp, Artificial Sequence
  Synthetic
tttgagtgccgacgagaacc

SEQ ID NO: 20540 - DNA, 22 bp, Artificial Sequence
  Synthetic
gccgccgatttggatgtcactt

SEQ ID NO: 20541 - DNA, 22 bp, Artificial Sequence
  Synthetic
cgtcatcctgcccaaacttgcc

SEQ ID NO: 20542 - DNA, 21 bp, Artificial Sequence
  Synthetic
tcggtagggctgaacattgcc

SEQ ID NO: 20543 - DNA, 21 bp, Artificial Sequence
  Synthetic
gctcaaacccggacaggtcgg

SEQ ID NO: 20544 - DNA, 20 bp, Artificial Sequence
  Synthetic
cggcgcggaaagtaccatcc

SEQ ID NO: 20545 - DNA, 22 bp, Artificial Sequence
  Synthetic
cattgccgaaaaagtccgccag

SEQ ID NO: 20546 - DNA, 19 bp, Artificial Sequence
  Synthetic
gtcaaagctgccgccacgg

SEQ ID NO: 20547 - DNA, 18 bp, Artificial Sequence
  Synthetic
accgaacaaggcggacgg

SEQ ID NO: 20548 - DNA, 19 bp, Artificial Sequence
  Synthetic
accctcggttcgacctgcc

SEQ ID NO: 20549 - DNA, 20 bp, Artificial Sequence
  Synthetic
tttgcaccctgcggcaaatg

SEQ ID NO: 20550 - DNA, 22 bp, Artificial Sequence
  Synthetic
cggtgtttgccgcgtatcgaat

SEQ ID NO: 20551 - DNA, 22 bp, Artificial Sequence
  Synthetic
gctttcgtcggagaggacggta

SEQ ID NO: 20552 - DNA, 21 bp, Artificial Sequence
  Synthetic
gctccctgcttagcggaacgg

SEQ ID NO: 20553 - DNA, 19 bp, Artificial Sequence
  Synthetic
gcgtttccggcccgaacag

SEQ ID NO: 20554 - DNA, 19 bp, Artificial Sequence
  Synthetic
gggcggcggtaaaggcgtt

SEQ ID NO: 20555 - DNA, 19 bp, Artificial Sequence
  Synthetic
tcttctgcaaccgcccgcg

SEQ ID NO: 20556 - DNA, 19 bp, Artificial Sequence
  Synthetic
ccattgccgccagttccca

SEQ ID NO: 20557 - DNA, 18 bp, Artificial Sequence
  Synthetic
tttgggcgcgcaccgtaa

SEQ ID NO: 20558 - DNA, 20 bp, Artificial Sequence
  Synthetic
ctgccactcgacgtgttcgc

SEQ ID NO: 20559 - DNA, 22 bp, Artificial Sequence
  Synthetic
cgttttttgcgggtgctggctt

SEQ ID NO: 20560 - DNA, 18 bp, Artificial Sequence
  Synthetic
agctggcggcaggtttcg

SEQ ID NO: 20561 - DNA, 22 bp, Artificial Sequence
  Synthetic
cgccattacctacgcgctgatg

SEQ ID NO: 20562 - DNA, 19 bp, Artificial Sequence
  Synthetic
gcattacggcgcgttggca

SEQ ID NO: 20563 - DNA, 20 bp, Artificial Sequence
  Synthetic
atcggcacaattcccgctgc

SEQ ID NO: 20564 - DNA, 20 bp, Artificial Sequence
  Synthetic
gacggaaggggagggcaaag

SEQ ID NO: 20565 - DNA, 22 bp, Artificial Sequence
  Synthetic
agcgcgatgatttggatgctga

SEQ ID NO: 20566 - DNA, 20 bp, Artificial Sequence
  Synthetic
aggggagggcgttcagacgg

SEQ ID NO: 20567 - DNA, 19 bp, Artificial Sequence
  Synthetic
tttccgcacacgcccagcc

SEQ ID NO: 20568 - DNA, 21 bp, Artificial Sequence
  Synthetic
ccgtgcgcgaaaaaagcaacc

SEQ ID NO: 20569 - DNA, 19 bp, Artificial Sequence
  Synthetic
agtccggatgccaagccgc

SEQ ID NO: 20570 - DNA, 18 bp, Artificial Sequence
  Synthetic
gtgtgggcggcgttgttg

SEQ ID NO: 20571 - DNA, 22 bp, Artificial Sequence
  Synthetic
tgtgtaatcacgatgccgccga

SEQ ID NO: 20572 - DNA, 20 bp, Artificial Sequence
  Synthetic
gcgggattggtttcggtggg

SEQ ID NO: 20573 - DNA, 20 bp, Artificial Sequence
  Synthetic
gcatattggtgcgcggatcg

SEQ ID NO: 20574 - DNA, 20 bp, Artificial Sequence
  Synthetic
gcttcggtctcggaagcagg

SEQ ID NO: 20575 - DNA, 20 bp, Artificial Sequence
  Synthetic
gtcccaaaactggctgccca

SEQ ID NO: 20576 - DNA, 21 bp, Artificial Sequence
  Synthetic
caagaaatcctcgccgtcggc

SEQ ID NO: 20577 - DNA, 18 bp, Artificial Sequence
  Synthetic
tccacgaaaccggccacg

SEQ ID NO: 20578 - DNA, 19 bp, Artificial Sequence
  Synthetic
ggcatcaccgaacgcgtcg

SEQ ID NO: 20579 - DNA, 22 bp, Artificial Sequence
  Synthetic
ccgccggagattttgtagctgt

SEQ ID NO: 20580 - DNA, 20 bp, Artificial Sequence
  Synthetic
cgttggtcggggcggtaacg

SEQ ID NO: 20581 - DNA, 19 bp, Artificial Sequence
  Synthetic
acgccgacttcgccctgac

SEQ ID NO: 20582 - DNA, 18 bp, Artificial Sequence
  Synthetic
gggctttttcggcggcga

SEQ ID NO: 20583 - DNA, 21 bp, Artificial Sequence
  Synthetic
gcttccgatggcggcttacgg

SEQ ID NO: 20584 - DNA, 19 bp, Artificial Sequence
  Synthetic
agacggagttggggcagcc

SEQ ID NO: 20585 - DNA, 21 bp, Artificial Sequence
  Synthetic
tgcgttcgttgcgtttgaggt

SEQ ID NO: 20586 - DNA, 21 bp, Artificial Sequence
  Synthetic
cggaagttgtcgcgcattgtg

SEQ ID NO: 20587 - DNA, 21 bp, Artificial Sequence
  Synthetic
ggtcatccgatggcacagctt

SEQ ID NO: 20588 - DNA, 19 bp, Artificial Sequence
  Synthetic
cgcgtgcgtttgaggtggt

SEQ ID NO: 20589 - DNA, 21 bp, Artificial Sequence
  Synthetic
ccaaagcgggtttcaggcgtt

SEQ ID NO: 20590 - DNA, 21 bp, Artificial Sequence
  Synthetic
caggaaggtggcgacatcgac

SEQ ID NO: 20591 - DNA, 17 bp, Artificial Sequence
  Synthetic
tcgttgcggctgccgtt

SEQ ID NO: 20592 - DNA, 20 bp, Artificial Sequence
  Synthetic
agcggatcggcaatgctgac

SEQ ID NO: 20593 - DNA, 19 bp, Artificial Sequence
  Synthetic
ttcccgtgcctgttccgcc

SEQ ID NO: 20594 - DNA, 19 bp, Artificial Sequence
  Synthetic
accgcgctcgatttggcgg

SEQ ID NO: 20595 - DNA, 22 bp, Artificial Sequence
  Synthetic
ccgatgtggattttgccggaca

SEQ ID NO: 20596 - DNA, 22 bp, Artificial Sequence
  Synthetic
cggcgtaacaaatcgtgcaggt

SEQ ID NO: 20597 - DNA, 18 bp, Artificial Sequence
  Synthetic
acgctgtgctgggtgcga

SEQ ID NO: 20598 - DNA, 22 bp, Artificial Sequence
  Synthetic
gacggtaaatttggcggcttcg

SEQ ID NO: 20599 - DNA, 20 bp, Artificial Sequence
  Synthetic
gcgccgatgaggacgttcat

SEQ ID NO: 20600 - DNA, 22 bp, Artificial Sequence
  Synthetic
gaccatgcgtgcgttgatttgg

SEQ ID NO: 20601 - DNA, 19 bp, Artificial Sequence
  Synthetic
gccggatttcgctgccgtt

SEQ ID NO: 20602 - DNA, 22 bp, Artificial Sequence
  Synthetic
cgcatattggtgctgagccaga

SEQ ID NO: 20603 - DNA, 21 bp, Artificial Sequence
  Synthetic
cgcggatggctttctcgactt

SEQ ID NO: 20604 - DNA, 19 bp, Artificial Sequence
  Synthetic
tgccgctgaaatacgcgca

SEQ ID NO: 20605 - DNA, 22 bp, Artificial Sequence
  Synthetic
cgactttgacgggcaggtagtt

SEQ ID NO: 20606 - DNA, 20 bp, Artificial Sequence
  Synthetic
cgatgtgtccgaccgtaccg

SEQ ID NO: 20607 - DNA, 19 bp, Artificial Sequence
  Synthetic
accactgcagtcgccacgc

SEQ ID NO: 20608 - DNA, 21 bp, Artificial Sequence
  Synthetic
tcgtgaaatactcgcgcgtcc

SEQ ID NO: 20609 - DNA, 19 bp, Artificial Sequence
  Synthetic
gtttcggggaaacgggcga

SEQ ID NO: 20610 - DNA, 25 bp, Artificial Sequence
  Synthetic
gctactcgtgctaaattgatttgtg

SEQ ID NO: 20611 - DNA, 23 bp, Artificial Sequence
  Synthetic
ggagttaaccatggctgaacaaa

SEQ ID NO: 20612 - DNA, 20 bp, Artificial Sequence
  Synthetic
agctgctgttcggtgttcaa

SEQ ID NO: 20613 - DNA, 25 bp, Artificial Sequence
  Synthetic
gcaaacagatttaaggcaaaacaac

SEQ ID NO: 20614 - DNA, 19 bp, Artificial Sequence
  Synthetic
aaagcctcgccctcctgcc

SEQ ID NO: 20615 - DNA, 20 bp, Artificial Sequence
  Synthetic
cggttacctgacccgtcgtc

SEQ ID NO: 20616 - DNA, 21 bp, Artificial Sequence
  Synthetic
caacctctgggcggtaaagct

SEQ ID NO: 20617 - DNA, 22 bp, Artificial Sequence
  Synthetic
cgataccgatgccgtctgaacc

SEQ ID NO: 20618 - DNA, 19 bp, Artificial Sequence
  Synthetic
ggcagaaatggggcgcgaa

SEQ ID NO: 20619 - DNA, 22 bp, Artificial Sequence
  Synthetic
cgtgcgggttcgactttaacct

SEQ ID NO: 20620 - DNA, 20 bp, Artificial Sequence
  Synthetic
gcaaaaagaagccgcgtggg

SEQ ID NO: 20621 - DNA, 20 bp, Artificial Sequence
  Synthetic
ccagcggctgtatcgaacgg

SEQ ID NO: 20622 - DNA, 19 bp, Artificial Sequence
  Synthetic
tgtgggagtgggcgaacgc

SEQ ID NO: 20623 - DNA, 21 bp, Artificial Sequence
  Synthetic
ggcggtttcggcggaacacat

SEQ ID NO: 20624 - DNA, 19 bp, Artificial Sequence
  Synthetic
gtcgtggtcggtgctggtt

SEQ ID NO: 20625 - DNA, 18 bp, Artificial Sequence
  Synthetic
gcgcgcggtcgttgatgt

SEQ ID NO: 20626 - DNA, 25 bp, Artificial Sequence
  Synthetic
gctttctgttgaaatggagtctgat

SEQ ID NO: 20627 - DNA, 18 bp, Artificial Sequence
  Synthetic
acgtggtgaaagccggcg

SEQ ID NO: 20628 - DNA, 19 bp, Artificial Sequence
  Synthetic
atccatcggcgtggggcag

SEQ ID NO: 20629 - DNA, 20 bp, Artificial Sequence
  Synthetic
ggaatgcccgaaagcagcct

SEQ ID NO: 20630 - DNA, 20 bp, Artificial Sequence
  Synthetic
ggctggacgatacgcagctg

SEQ ID NO: 20631 - DNA, 22 bp, Artificial Sequence
  Synthetic
tgcgatgaagctgtggaaggaa

SEQ ID NO: 20632 - DNA, 21 bp, Artificial Sequence
  Synthetic
cgaccttggacggcaaagtca

SEQ ID NO: 20633 - DNA, 20 bp, Artificial Sequence
  Synthetic
aaagcccttccttcgacagc

SEQ ID NO: 20634 - DNA, 19 bp, Artificial Sequence
  Synthetic
cagccgttacctcggggga

SEQ ID NO: 20635 - DNA, 22 bp, Artificial Sequence
  Synthetic
tccacgatacggtcgacggttt

SEQ ID NO: 20636 - DNA, 21 bp, Artificial Sequence
  Synthetic
ccatactttccctgctgcgga

SEQ ID NO: 20637 - DNA, 19 bp, Artificial Sequence
  Synthetic
gggttcgcctagctgccag

SEQ ID NO: 20638 - DNA, 21 bp, Artificial Sequence
  Synthetic
aggatgatggcggtgctgtac

SEQ ID NO: 20639 - DNA, 19 bp, Artificial Sequence
  Synthetic
ggtggcggatgtcgggact

SEQ ID NO: 20640 - DNA, 21 bp, Artificial Sequence
  Synthetic
acgcctgattcgaggttcagc

SEQ ID NO: 20641 - DNA, 19 bp, Artificial Sequence
  Synthetic
agtacggtgccggcgatgc

SEQ ID NO: 20642 - DNA, 21 bp, Artificial Sequence
  Synthetic
ggagatgtagccggtcagggc

SEQ ID NO: 20643 - DNA, 19 bp, Artificial Sequence
  Synthetic
tgcggagggtgccgagttc

SEQ ID NO: 20644 - DNA, 19 bp, Artificial Sequence
  Synthetic
ttccctttgagccggggcg

SEQ ID NO: 20645 - DNA, 22 bp, Artificial Sequence
  Synthetic
cgcgctgttctttgaacgacga

SEQ ID NO: 20646 - DNA, 20 bp, Artificial Sequence
  Synthetic
atcaatacgccggcgcaggc

SEQ ID NO: 20647 - DNA, 21 bp, Artificial Sequence
  Synthetic
ggcaacgtcggcgatgtcttt

SEQ ID NO: 20648 - DNA, 21 bp, Artificial Sequence
  Synthetic
cttcggcacactgcttaccct

SEQ ID NO: 20649 - DNA, 22 bp, Artificial Sequence
  Synthetic
ggcttcgttggggatggagatt

SEQ ID NO: 20650 - DNA, 20 bp, Artificial Sequence
  Synthetic
tttccccgaaaccctgccag

SEQ ID NO: 20651 - DNA, 19 bp, Artificial Sequence
  Synthetic
aagtcggcgcgggcaaagg

SEQ ID NO: 20652 - DNA, 20 bp, Artificial Sequence
  Synthetic
tccacaggtttgttcaagcc

SEQ ID NO: 20653 - DNA, 20 bp, Artificial Sequence
  Synthetic
tctgcaatctgttccgcacg

SEQ ID NO: 20654 - DNA, 21 bp, Artificial Sequence
  Synthetic
gcctgttttaatcggatcggt

SEQ ID NO: 20655 - DNA, 25 bp, Artificial Sequence
  Synthetic
cctttttttcaaatgcgccaactta

SEQ ID NO: 20656 - DNA, 20 bp, Artificial Sequence
  Synthetic
ccgtcggcatcaccctcatc

SEQ ID NO: 20657 - DNA, 21 bp, Artificial Sequence
  Synthetic
gcgcggtgttcgacaaatacc

SEQ ID NO: 20658 - DNA, 20 bp, Artificial Sequence
  Synthetic
agcctcccttcccgacttgg

SEQ ID NO: 20659 - DNA, 21 bp, Artificial Sequence
  Synthetic
cgggcaggctttgggtttgaa

SEQ ID NO: 20660 - DNA, 19 bp, Artificial Sequence
  Synthetic
tcaagggcggccgcctttc

SEQ ID NO: 20661 - DNA, 22 bp, Artificial Sequence
  Synthetic
agctgtttaaagaccgcctgct

SEQ ID NO: 20662 - DNA, 20 bp, Artificial Sequence
  Synthetic
aaatcccgtcctggttcggc

SEQ ID NO: 20663 - DNA, 22 bp, Artificial Sequence
  Synthetic
cgcgcaggttatttcttcacgc

SEQ ID NO: 20664 - DNA, 21 bp, Artificial Sequence
  Synthetic
cccggctcggatgtcgatttg

SEQ ID NO: 20665 - DNA, 19 bp, Artificial Sequence
  Synthetic
tttcggcagcaccccttcc

SEQ ID NO: 20666 - DNA, 23 bp, Artificial Sequence
  Synthetic
tgatggagcacctactagtatgg

SEQ ID NO: 20667 - DNA, 19 bp, Artificial Sequence
  Synthetic
caaaccgcctcgcgcaaac

SEQ ID NO: 20668 - DNA, 21 bp, Artificial Sequence
  Synthetic
ccagcaggttgccgaaaatgc

SEQ ID NO: 20669 - DNA, 20 bp, Artificial Sequence
  Synthetic
cccaacccgaacaccaccac

SEQ ID NO: 20670 - DNA, 22 bp, Artificial Sequence
  Synthetic
tgcgccaaaacaaccaaaccaa

SEQ ID NO: 20671 - DNA, 19 bp, Artificial Sequence
  Synthetic
gcaccgcccgcattcagga

SEQ ID NO: 20672 - DNA, 19 bp, Artificial Sequence
  Synthetic
ctttggcgaggcagacgcg

SEQ ID NO: 20673 - DNA, 19 bp, Artificial Sequence
  Synthetic
gggtggatttgccggcgtt

SEQ ID NO: 20674 - DNA, 21 bp, Artificial Sequence
  Synthetic
gtgtttgaggaagcggtggcc

SEQ ID NO: 20675 - DNA, 21 bp, Artificial Sequence
  Synthetic
cgcggttgctccaccatgtat

SEQ ID NO: 20676 - DNA, 19 bp, Artificial Sequence
  Synthetic
gcggcgaatacatcagcgc

SEQ ID NO: 20677 - DNA, 20 bp, Artificial Sequence
  Synthetic
gcgggcgcgaaaaatatgcg

SEQ ID NO: 20678 - DNA, 19 bp, Artificial Sequence
  Synthetic
aagttgccgccgccgatat

SEQ ID NO: 20679 - DNA, 20 bp, Artificial Sequence
  Synthetic
cgttgagctgctgcggcttc

SEQ ID NO: 20680 - DNA, 22 bp, Artificial Sequence
  Synthetic
agcgaacccaactcatactgcg

SEQ ID NO: 20681 - DNA, 21 bp, Artificial Sequence
  Synthetic
cacggaaaccgacctgtcgtc

SEQ ID NO: 20682 - DNA, 19 bp, Artificial Sequence
  Synthetic
tatgcgccccgccgaatcc

SEQ ID NO: 20683 - DNA, 22 bp, Artificial Sequence
  Synthetic
caaacacggcaggcttctttcc

SEQ ID NO: 20684 - DNA, 19 bp, Artificial Sequence
  Synthetic
acaccgccgtctcacgcag

SEQ ID NO: 20685 - DNA, 19 bp, Artificial Sequence
  Synthetic
accccggctacatcgccag

SEQ ID NO: 20686 - DNA, 19 bp, Artificial Sequence
  Synthetic
atcccccgagcacaccagc

SEQ ID NO: 20687 - DNA, 19 bp, Artificial Sequence
  Synthetic
tgcaggaaaacggcagcct

SEQ ID NO: 20688 - DNA, 19 bp, Artificial Sequence
  Synthetic
tttcctggctgccgctggc

SEQ ID NO: 20689 - DNA, 18 bp, Artificial Sequence
  Synthetic
cagcacgggtacgctgct

SEQ ID NO: 20690 - DNA, 22 bp, Artificial Sequence
  Synthetic
ccagacgggcgaggtaaaccat

SEQ ID NO: 20691 - DNA, 20 bp, Artificial Sequence
  Synthetic
cgcggataggcgtttttgcg

SEQ ID NO: 20692 - DNA, 20 bp, Artificial Sequence
  Synthetic
ctgccgagcaggtctttggc

SEQ ID NO: 20693 - DNA, 22 bp, Artificial Sequence
  Synthetic
gccatacctttgctgttgccga

SEQ ID NO: 20694 - DNA, 18 bp, Artificial Sequence
  Synthetic
aaccggcatcgcccaacg

SEQ ID NO: 20695 - DNA, 19 bp, Artificial Sequence
  Synthetic
ggcaggctggcggtttacc

SEQ ID NO: 20696 - DNA, 22 bp, Artificial Sequence
  Synthetic
tgccattacgtcgtcgttgact

SEQ ID NO: 20697 - DNA, 20 bp, Artificial Sequence
  Synthetic
ttccaagttgcgttgggcgt

SEQ ID NO: 20698 - DNA, 21 bp, Artificial Sequence
  Synthetic
ggtcaggtgcaccatcagcag

SEQ ID NO: 20699 - DNA, 21 bp, Artificial Sequence
  Synthetic
tccgcacacacttccaaggtt

SEQ ID NO: 20700 - DNA, 21 bp, Artificial Sequence
  Synthetic
gccccatcatggttttgggct

SEQ ID NO: 20701 - DNA, 22 bp, Artificial Sequence
  Synthetic
gccgctgttcgaacgcaaatcc

SEQ ID NO: 20702 - DNA, 19 bp, Artificial Sequence
  Synthetic
agtctgcgcccaaatcggc

SEQ ID NO: 20703 - DNA, 20 bp, Artificial Sequence
  Synthetic
ttgccgcatcgaagttcggc

SEQ ID NO: 20704 - DNA, 25 bp, Artificial Sequence
  Synthetic
tgacatttttagaatgatgccgtct

SEQ ID NO: 20705 - DNA, 21 bp, Artificial Sequence
  Synthetic
gcggacgtgatggcgaaaatg

SEQ ID NO: 20706 - DNA, 22 bp, Artificial Sequence
  Synthetic
gccctcgccgaagtagtcgttg

SEQ ID NO: 20707 - DNA, 18 bp, Artificial Sequence
  Synthetic
cggacgcttgcagcacct

SEQ ID NO: 20708 - DNA, 18 bp, Artificial Sequence
  Synthetic
aattgcgcgtccggccag

SEQ ID NO: 20709 - DNA, 19 bp, Artificial Sequence
  Synthetic
cgtcaacgccgccaacgac

SEQ ID NO: 20710 - DNA, 18 bp, Artificial Sequence
  Synthetic
ccccgtgttgccgcaaac

SEQ ID NO: 20711 - DNA, 21 bp, Artificial Sequence
  Synthetic
gcaaaatcaaacgcgtgcgcc

SEQ ID NO: 20712 - DNA, 20 bp, Artificial Sequence
  Synthetic
acgcataccgccgacctttc

SEQ ID NO: 20713 - DNA, 19 bp, Artificial Sequence
  Synthetic
cctcggctgcgccaatttg

SEQ ID NO: 20714 - DNA, 22 bp, Artificial Sequence
  Synthetic
cggcaagcaggaaaaaaacgct

SEQ ID NO: 20715 - DNA, 18 bp, Artificial Sequence
  Synthetic
ctgccgcatctgtgccca

SEQ ID NO: 20716 - DNA, 20 bp, Artificial Sequence
  Synthetic
gtacgttccacgccgtttct

SEQ ID NO: 20717 - DNA, 19 bp, Artificial Sequence
  Synthetic
acaagccccgattccccgg

SEQ ID NO: 20718 - DNA, 21 bp, Artificial Sequence
  Synthetic
catcgttgccgggtattgccc

SEQ ID NO: 20719 - DNA, 22 bp, Artificial Sequence
  Synthetic
ccaaatccgccaactctaccga

SEQ ID NO: 20720 - DNA, 19 bp, Artificial Sequence
  Synthetic
tcgccttgggctgacgcag

SEQ ID NO: 20721 - DNA, 20 bp, Artificial Sequence
  Synthetic
gcgcccgaaaaacagcttgc

SEQ ID NO: 20722 - DNA, 19 bp, Artificial Sequence
  Synthetic
acattccggaccgcccctc

SEQ ID NO: 20723 - DNA, 21 bp, Artificial Sequence
  Synthetic
gcataccgcccgccaaaaaga

SEQ ID NO: 20724 - DNA, 21 bp, Artificial Sequence
  Synthetic
gtccagccacgtctttaccgc

SEQ ID NO: 20725 - DNA, 19 bp, Artificial Sequence
  Synthetic
ggcttccaaaccagccgcc

SEQ ID NO: 20726 - DNA, 22 bp, Artificial Sequence
  Synthetic
tgcaccgatatgcccgaactct

SEQ ID NO: 20727 - DNA, 20 bp, Artificial Sequence
  Synthetic
gcaaccgcagcaactacgcc

SEQ ID NO: 20728 - DNA, 22 bp, Artificial Sequence
  Synthetic
ccgtcggacaactcgtcttctt

SEQ ID NO: 20729 - DNA, 19 bp, Artificial Sequence
  Synthetic
aaccaggcaggccggcttg

SEQ ID NO: 20730 - DNA, 19 bp, Artificial Sequence
  Synthetic
ttgcgacaggacgggcagc

SEQ ID NO: 20731 - DNA, 19 bp, Artificial Sequence
  Synthetic
cgcgacattctgcgcggag

SEQ ID NO: 20732 - DNA, 21 bp, Artificial Sequence
  Synthetic
cgagttccacacccaagccaa

SEQ ID NO: 20733 - DNA, 19 bp, Artificial Sequence
  Synthetic
cggtatgttcggcggcgtt

SEQ ID NO: 20734 - DNA, 19 bp, Artificial Sequence
  Synthetic
ggcgcgccatccatgttcc

SEQ ID NO: 20735 - DNA, 18 bp, Artificial Sequence
  Synthetic
gcctccgtcggcgcattt

SEQ ID NO: 20736 - DNA, 21 bp, Artificial Sequence
  Synthetic
gccgtctgaaagccgtttgcg

SEQ ID NO: 20737 - DNA, 20 bp, Artificial Sequence
  Synthetic
cgtccgaagcgtttggcgta

SEQ ID NO: 20738 - DNA, 22 bp, Artificial Sequence
  Synthetic
tccggctacaagtgataaggtg

SEQ ID NO: 20739 - DNA, 21 bp, Artificial Sequence
  Synthetic
ccggctgacgattttggggct

SEQ ID NO: 20740 - DNA, 20 bp, Artificial Sequence
  Synthetic
tcgccgcaaaattccgaccc

SEQ ID NO: 20741 - DNA, 20 bp, Artificial Sequence
  Synthetic
cgctgcaaacccacggcaaa

SEQ ID NO: 20742 - DNA, 22 bp, Artificial Sequence
  Synthetic
cgggttactttggcagggtcga

SEQ ID NO: 20743 - DNA, 21 bp, Artificial Sequence
  Synthetic
tggcataatcgagcagcagca

SEQ ID NO: 20744 - DNA, 20 bp, Artificial Sequence
  Synthetic
gcctgcgtaattccggcaac

SEQ ID NO: 20745 - DNA, 20 bp, Artificial Sequence
  Synthetic
ccatacagccggccgccttc

SEQ ID NO: 20746 - DNA, 22 bp, Artificial Sequence
  Synthetic
gagggttttgtcaccggagagg

SEQ ID NO: 20747 - DNA, 19 bp, Artificial Sequence
  Synthetic
acatcggcatcagcgcggg

SEQ ID NO: 20748 - DNA, 20 bp, Artificial Sequence
  Synthetic
cgacctgcgccaaatcggta

SEQ ID NO: 20749 - DNA, 19 bp, Artificial Sequence
  Synthetic
acgcgggcttcagctacgg

SEQ ID NO: 20750 - DNA, 19 bp, Artificial Sequence
  Synthetic
gtcatcgacagcgaccccg

SEQ ID NO: 20751 - DNA, 22 bp, Artificial Sequence
  Synthetic
cgttcaacgtcgtcatccgcac

SEQ ID NO: 20752 - DNA, 19 bp, Artificial Sequence
  Synthetic
cagacccgaaaaaccgcgc

SEQ ID NO: 20753 - DNA, 21 bp, Artificial Sequence
  Synthetic
cggcatttccacgccgcaatc

SEQ ID NO: 20754 - DNA, 21 bp, Artificial Sequence
  Synthetic
ccgtcaaagccgttgccgaaa

SEQ ID NO: 20755 - DNA, 22 bp, Artificial Sequence
  Synthetic
ggggttttcaggcggcatgaaa

SEQ ID NO: 20756 - DNA, 20 bp, Artificial Sequence
  Synthetic
cagccaggcaaacgccatca

SEQ ID NO: 20757 - DNA, 19 bp, Artificial Sequence
  Synthetic
tcagggtaacgcctgccgc

SEQ ID NO: 20758 - DNA, 19 bp, Artificial Sequence
  Synthetic
ccgcgttcgaccacggttt

SEQ ID NO: 20759 - DNA, 18 bp, Artificial Sequence
  Synthetic
ttgccgccgcattgggca

SEQ ID NO: 20760 - DNA, 21 bp, Artificial Sequence
  Synthetic
gcggtagtagccgtagcggat

SEQ ID NO: 20761 - DNA, 19 bp, Artificial Sequence
  Synthetic
gctgatggtgcgcgaaacg

SEQ ID NO: 20762 - DNA, 19 bp, Artificial Sequence
  Synthetic
tgcctgcccttccaatgcc

SEQ ID NO: 20763 - DNA, 20 bp, Artificial Sequence
  Synthetic
ccccaaatgccgaccagggt

SEQ ID NO: 20764 - DNA, 18 bp, Artificial Sequence
  Synthetic
acgcgtttgttggcggcg

SEQ ID NO: 20765 - DNA, 21 bp, Artificial Sequence
  Synthetic
gggcatcgccgtattggtacg

SEQ ID NO: 20766 - DNA, 19 bp, Artificial Sequence
  Synthetic
ggcaaatgccgtctgcgcg

SEQ ID NO: 20767 - DNA, 22 bp, Artificial Sequence
  Synthetic
ggcgcgtatgtgctgcacctta

SEQ ID NO: 20768 - DNA, 19 bp, Artificial Sequence
  Synthetic
gcccgaagaaacccgccaa

SEQ ID NO: 20769 - DNA, 21 bp, Artificial Sequence
  Synthetic
cgcgccattttgaaagacgcg

SEQ ID NO: 20770 - DNA, 19 bp, Artificial Sequence
  Synthetic
gccgacggcgtatgtgcat

SEQ ID NO: 20771 - DNA, 21 bp, Artificial Sequence
  Synthetic
cccctgatcaaccacggcttt

SEQ ID NO: 20772 - DNA, 21 bp, Artificial Sequence
  Synthetic
gccaaagaagccggagccaaa

SEQ ID NO: 20773 - DNA, 19 bp, Artificial Sequence
  Synthetic
ttcggcaaccccgcaaccg

SEQ ID NO: 20774 - DNA, 25 bp, Artificial Sequence
  Synthetic
gtgctaaatctaccaagttgcaaat

SEQ ID NO: 20775 - DNA, 21 bp, Artificial Sequence
  Synthetic
tggtaaggtgtcacttgctcc

SEQ ID NO: 20776 - DNA, 25 bp, Artificial Sequence
  Synthetic
tgcttagtctttctttttctggaga

SEQ ID NO: 20777 - DNA, 25 bp, Artificial Sequence
  Synthetic
gtaacccagctaggcaatttgttat

SEQ ID NO: 20778 - DNA, 22 bp, Artificial Sequence
  Synthetic
cgatgcccatttgtattgcaac

SEQ ID NO: 20779 - DNA, 25 bp, Artificial Sequence
  Synthetic
tcctggcatcttcaaaaaacaatag

SEQ ID NO: 20780 - DNA, 24 bp, Artificial Sequence
  Synthetic
tccatctatacctccagcacttta

SEQ ID NO: 20781 - DNA, 23 bp, Artificial Sequence
  Synthetic
gaacaatagatgaagcaccaggc

SEQ ID NO: 20782 - DNA, 25 bp, Artificial Sequence
  Synthetic
tggaacctgtgttgtgtatctagta

SEQ ID NO: 20783 - DNA, 23 bp, Artificial Sequence
  Synthetic
ccctgtgtgtctgtagtggtaac

SEQ ID NO: 20784 - DNA, 25 bp, Artificial Sequence
  Synthetic
caaactaaccgttctctttgaggat

SEQ ID NO: 20785 - DNA, 25 bp, Artificial Sequence
  Synthetic
tgacgagcataaagttgttctcttt

SEQ ID NO: 20786 - DNA, 25 bp, Artificial Sequence
  Synthetic
gggatccattgcattaatatgagct

SEQ ID NO: 20787 - DNA, 25 bp, Artificial Sequence
  Synthetic
aagcagtcaggatattcaagtacaa

SEQ ID NO: 20788 - DNA, 24 bp, Artificial Sequence
  Synthetic
tcttctccatactctttcattgcc

SEQ ID NO: 20789 - DNA, 25 bp, Artificial Sequence
  Synthetic
tccttgtaatcatacaaatctggca

SEQ ID NO: 20790 - DNA, 21 bp, Artificial Sequence
  Synthetic
ctgaaaacaaggaggcccatc

SEQ ID NO: 20791 - DNA, 24 bp, Artificial Sequence
  Synthetic
agctgactcgttttcttcatgttt

SEQ ID NO: 20792 - DNA, 23 bp, Artificial Sequence
  Synthetic
tctcatgcttgcaatgtgttcaa

SEQ ID NO: 20793 - DNA, 21 bp, Artificial Sequence
  Synthetic
tcacaaagtttaccacgtcgg

SEQ ID NO: 20794 - DNA, 25 bp, Artificial Sequence
  Synthetic
gtctttctctttgacagaggactcg

SEQ ID NO: 20795 - DNA, 21 bp, Artificial Sequence
  Synthetic
tctgttcgctgaaggggtcct

SEQ ID NO: 20796 - DNA, 20 bp, Artificial Sequence
  Synthetic
tggctccactggtccccaat

SEQ ID NO: 20797 - DNA, 20 bp, Artificial Sequence
  Synthetic
gacgcacgtccactcggatg

SEQ ID NO: 20798 - DNA, 21 bp, Artificial Sequence
  Synthetic
catgcaaggagtcccggagtc

SEQ ID NO: 20799 - DNA, 21 bp, Artificial Sequence
  Synthetic
ccaggggaggattcaccgaca

SEQ ID NO: 20800 - DNA, 23 bp, Artificial Sequence
  Synthetic
aggatcctcgaacatagctgttt

SEQ ID NO: 20801 - DNA, 25 bp, Artificial Sequence
  Synthetic
ggcatttgacatctatgacacctta

SEQ ID NO: 20802 - DNA, 20 bp, Artificial Sequence
  Synthetic
gttcgtagcagcgtaggtca

SEQ ID NO: 20803 - DNA, 24 bp, Artificial Sequence
  Synthetic
ctcctcatttgtaccttcacagtc

SEQ ID NO: 20804 - DNA, 22 bp, Artificial Sequence
  Synthetic
ttaaattgcgcactgcctttgt

SEQ ID NO: 20805 - DNA, 24 bp, Artificial Sequence
  Synthetic
ccaaatctaatctggaccaggtgg

SEQ ID NO: 20806 - DNA, 25 bp, Artificial Sequence
  Synthetic
cgtgtttattaacgactgcaatgct

SEQ ID NO: 20807 - DNA, 25 bp, Artificial Sequence
  Synthetic
cgtaatactgcttatatgccccttg

SEQ ID NO: 20808 - DNA, 21 bp, Artificial Sequence
  Synthetic
cggtggtgtcaggtccactga

SEQ ID NO: 20809 - DNA, 24 bp, Artificial Sequence
  Synthetic
aggggctccagattgtataatact

SEQ ID NO: 20810 - DNA, 20 bp, Artificial Sequence
  Synthetic
agatgtaagggccggacgat

SEQ ID NO: 20811 - DNA, 24 bp, Artificial Sequence
  Synthetic
atgttgtaggggaatatgacatgc

SEQ ID NO: 20812 - DNA, 23 bp, Artificial Sequence
  Synthetic
gcatacgtttacggcgtttatgg

SEQ ID NO: 20813 - DNA, 20 bp, Artificial Sequence
  Synthetic
aggatcaggtaggtgcactc

SEQ ID NO: 20814 - DNA, 25 bp, Artificial Sequence
  Synthetic
cacgttgtgtctgtgtatttttaca

SEQ ID NO: 20815 - DNA, 25 bp, Artificial Sequence
  Synthetic
cccccgccttattataaaaatgtct

SEQ ID NO: 20816 - DNA, 25 bp, Artificial Sequence
  Synthetic
acacaccttacataacataccacaa

SEQ ID NO: 20817 - DNA, 20 bp, Artificial Sequence
  Synthetic
ctccacccttctgcagacgg

SEQ ID NO: 20818 - DNA, 22 bp, Artificial Sequence
  Synthetic
ggaccctatcaggcagtacggt

SEQ ID NO: 20819 - DNA, 22 bp, Artificial Sequence
  Synthetic
ccagcaagcgtactatctggca

SEQ ID NO: 20820 - DNA, 20 bp, Artificial Sequence
  Synthetic
tgtacggattggcgggaacc

SEQ ID NO: 20821 - DNA, 23 bp, Artificial Sequence
  Synthetic
caccagggattgtataggggtac

SEQ ID NO: 20822 - DNA, 25 bp, Artificial Sequence
  Synthetic
gtggaattcacagggtcataaaagt

SEQ ID NO: 20823 - DNA, 22 bp, Artificial Sequence
  Synthetic
agctgaagcaggcgtaaccaaa

SEQ ID NO: 20824 - DNA, 21 bp, Artificial Sequence
  Synthetic
cgatgctgcactggatgttaa

SEQ ID NO: 20825 - DNA, 22 bp, Artificial Sequence
  Synthetic
gcatagccaaccctgcgaaaac

SEQ ID NO: 20826 - DNA, 22 bp, Artificial Sequence
  Synthetic
ccagctccacatggtggttgat

SEQ ID NO: 20827 - DNA, 23 bp, Artificial Sequence
  Synthetic
tgggggcaattaaaatttgcact

SEQ ID NO: 20828 - DNA, 21 bp, Artificial Sequence
  Synthetic
ggtgtagggattactccaggg

SEQ ID NO: 20829 - DNA, 24 bp, Artificial Sequence
  Synthetic
agtttgagcttctgttgatgacaa

SEQ ID NO: 20830 - DNA, 25 bp, Artificial Sequence
  Synthetic
cccaagaaaggtgttaagtttttca

SEQ ID NO: 20831 - DNA, 22 bp, Artificial Sequence
  Synthetic
ggccactcacccatcaagcatt

SEQ ID NO: 20832 - DNA, 20 bp, Artificial Sequence
  Synthetic
tcagttgggtccggtctagc

SEQ ID NO: 20833 - DNA, 22 bp, Artificial Sequence
  Synthetic
ggtggtgaaggagggaggtttg

SEQ ID NO: 20834 - DNA, 24 bp, Artificial Sequence
  Synthetic
cagttttgaagctaatcacgtcgg

SEQ ID NO: 20835 - DNA, 20 bp, Artificial Sequence
  Synthetic
gtccagaacagccttgcggg

SEQ ID NO: 20836 - DNA, 22 bp, Artificial Sequence
  Synthetic
cctcgggtgtgatggtactgtc

SEQ ID NO: 20837 - DNA, 22 bp, Artificial Sequence
  Synthetic
gcgctcttccaaattacggtgc

SEQ ID NO: 20838 - DNA, 22 bp, Artificial Sequence
  Synthetic
gcagatcttctacaggcaccgt

SEQ ID NO: 20839 - DNA, 20 bp, Artificial Sequence
  Synthetic
aaagtggtgtaccgagccac

SEQ ID NO: 20840 - DNA, 22 bp, Artificial Sequence
  Synthetic
ggcttcacccgaaacggttctg

SEQ ID NO: 20841 - DNA, 23 bp, Artificial Sequence
  Synthetic
cagtggttatcaggatggcaatt

SEQ ID NO: 20842 - DNA, 25 bp, Artificial Sequence
  Synthetic
ggaaagcctaatcgaattgtcctta

SEQ ID NO: 20843 - DNA, 20 bp, Artificial Sequence
  Synthetic
acacaaacatgcagccatgc

SEQ ID NO: 20844 - DNA, 20 bp, Artificial Sequence
  Synthetic
gaggatagcaggagcactcc

SEQ ID NO: 20845 - DNA, 20 bp, Artificial Sequence
  Synthetic
tccatcatcaaaggcccagc

SEQ ID NO: 20846 - DNA, 25 bp, Artificial Sequence
  Synthetic
atcgtacttttcagcagtatccaat

SEQ ID NO: 20847 - DNA, 25 bp, Artificial Sequence
  Synthetic
tgaagtagcaaaaacacacactctt

SEQ ID NO: 20848 - DNA, 25 bp, Artificial Sequence
  Synthetic
tgtgaagcattatccacatcatcaa

SEQ ID NO: 20849 - DNA, 24 bp, Artificial Sequence
  Synthetic
tgtacctgagaaacatttgcagtt

SEQ ID NO: 20850 - DNA, 25 bp, Artificial Sequence
  Synthetic
tcgtctaacaagccaattttaccat

SEQ ID NO: 20851 - DNA, 21 bp, Artificial Sequence
  Synthetic
gcgatggggtcttggagtacc

SEQ ID NO: 20852 - DNA, 20 bp, Artificial Sequence
  Synthetic
cttgtcgcgcaagtagtcga

SEQ ID NO: 20853 - DNA, 25 bp, Artificial Sequence
  Synthetic
ggaagtgcttcaggaattggtttta

SEQ ID NO: 20854 - DNA, 21 bp, Artificial Sequence
  Synthetic
gaaagtaggatccggtgcagc

SEQ ID NO: 20855 - DNA, 25 bp, Artificial Sequence
  Synthetic
gcattaggattttctgtgtcaagca

SEQ ID NO: 20856 - DNA, 25 bp, Artificial Sequence
  Synthetic
cctgatttgtcctgttgtaatcgtc

SEQ ID NO: 20857 - DNA, 21 bp, Artificial Sequence
  Synthetic
cagaaccggtatgcaatagcc

SEQ ID NO: 20858 - DNA, 24 bp, Artificial Sequence
  Synthetic
ctgatgatctttcgacgatgtagg

SEQ ID NO: 20859 - DNA, 23 bp, Artificial Sequence
  Synthetic
cgaaaagaatgctctttcccctg

SEQ ID NO: 20860 - DNA, 24 bp, Artificial Sequence
  Synthetic
tgaaagaacgtgtccataccatgg

SEQ ID NO: 20861 - DNA, 20 bp, Artificial Sequence
  Synthetic
taccagccagcgactagtcc

SEQ ID NO: 20862 - DNA, 25 bp, Artificial Sequence
  Synthetic
atgctcatcgagtgttttttgattt

SEQ ID NO: 20863 - DNA, 22 bp, Artificial Sequence
  Synthetic
cggttccgcagaccactatggc

SEQ ID NO: 20864 - DNA, 22 bp, Artificial Sequence
  Synthetic
gcggcaacaagtaaactccacc

SEQ ID NO: 20865 - DNA, 21 bp, Artificial Sequence
  Synthetic
tgacagcgtgggggtgatttg

SEQ ID NO: 20866 - DNA, 21 bp, Artificial Sequence
  Synthetic
acagtatgggtgcggccatca

SEQ ID NO: 20867 - DNA, 20 bp, Artificial Sequence
  Synthetic
ttggtcgaatgcggcaaggg

SEQ ID NO: 20868 - DNA, 22 bp, Artificial Sequence
  Synthetic
acaaaccccgtggagttcatcc

SEQ ID NO: 20869 - DNA, 20 bp, Artificial Sequence
  Synthetic
gtgtggtggtgtgcaggagc

SEQ ID NO: 20870 - DNA, 19 bp, Artificial Sequence
  Synthetic
cccatgattccctgcggcc

SEQ ID NO: 20871 - DNA, 21 bp, Artificial Sequence
  Synthetic
ccacccttaacctgcaacggg

SEQ ID NO: 20872 - DNA, 22 bp, Artificial Sequence
  Synthetic
cgcggagaatacgatgggttct

SEQ ID NO: 20873 - DNA, 21 bp, Artificial Sequence
  Synthetic
gccccatggaagagtgtccac

SEQ ID NO: 20874 - DNA, 20 bp, Artificial Sequence
  Synthetic
aacacctaccacatgcccgg

SEQ ID NO: 20875 - DNA, 21 bp, Artificial Sequence
  Synthetic
ctccggtcctgatgttggggt

SEQ ID NO: 20876 - DNA, 22 bp, Artificial Sequence
  Synthetic
acgcccagactggtcaattgtt

SEQ ID NO: 20877 - DNA, 20 bp, Artificial Sequence
  Synthetic
tctccctgtacggcccctac

SEQ ID NO: 20878 - DNA, 22 bp, Artificial Sequence
  Synthetic
gagtggggccagttaaagtcgg

SEQ ID NO: 20879 - DNA, 20 bp, Artificial Sequence
  Synthetic
aagaggggaggtcaccgcgg

SEQ ID NO: 20880 - DNA, 18 bp, Artificial Sequence
  Synthetic
atgtggcgccgcagaacg

SEQ ID NO: 20881 - DNA, 20 bp, Artificial Sequence
  Synthetic
aagggcactccggggagttg

SEQ ID NO: 20882 - DNA, 20 bp, Artificial Sequence
  Synthetic
acgccatccagctccgtgaa

SEQ ID NO: 20883 - DNA, 20 bp, Artificial Sequence
  Synthetic
gcaggtggccttgagagagg

SEQ ID NO: 20884 - DNA, 19 bp, Artificial Sequence
  Synthetic
gcaggtggtatcgggcagc

SEQ ID NO: 20885 - DNA, 22 bp, Artificial Sequence
  Synthetic
gccccagtccaggtgtatgaca

SEQ ID NO: 20886 - DNA, 22 bp, Artificial Sequence
  Synthetic
cgccgtatccgtacttggaacg

SEQ ID NO: 20887 - DNA, 22 bp, Artificial Sequence
  Synthetic
gtcgtcaccacataccaggagc

SEQ ID NO: 20888 - DNA, 21 bp, Artificial Sequence
  Synthetic
gcactatccgagcccacaagg

SEQ ID NO: 20889 - DNA, 20 bp, Artificial Sequence
  Synthetic
atggcggccctacctccctg

SEQ ID NO: 20890 - DNA, 20 bp, Artificial Sequence
  Synthetic
tactgcgtaggtgcactagg

SEQ ID NO: 20891 - DNA, 22 bp, Artificial Sequence
  Synthetic
ggtgttcacgtgcctccgatag

SEQ ID NO: 20892 - DNA, 25 bp, Artificial Sequence
  Synthetic
gtggttgaatgactttgacttttga

SEQ ID NO: 20893 - DNA, 25 bp, Artificial Sequence
  Synthetic
cgcttattatagcagccaacatagg

SEQ ID NO: 20894 - DNA, 20 bp, Artificial Sequence
  Synthetic
tccaagcaccttttacgggc

SEQ ID NO: 20895 - DNA, 25 bp, Artificial Sequence
  Synthetic
gaccaccagttacatatgccataat

SEQ ID NO: 20896 - DNA, 22 bp, Artificial Sequence
  Synthetic
acctaagttgagtgatcgcaac

SEQ ID NO: 20897 - DNA, 21 bp, Artificial Sequence
  Synthetic
caggagacaatgcgcagtatt

SEQ ID NO: 20898 - DNA, 21 bp, Artificial Sequence
  Synthetic
tgcatcgtcctcttcttcctc

SEQ ID NO: 20899 - DNA, 25 bp, Artificial Sequence
  Synthetic
aggtgtatgttagcagcatttacaa

SEQ ID NO: 20900 - DNA, 22 bp, Artificial Sequence
  Synthetic
aagactgaagtggtttagcacc

SEQ ID NO: 20901 - DNA, 22 bp, Artificial Sequence
  Synthetic
tcacctaccatgtaaggtgcat

SEQ ID NO: 20902 - DNA, 25 bp, Artificial Sequence
  Synthetic
gctctaacatccatgcatataggca

SEQ ID NO: 20903 - DNA, 24 bp, Artificial Sequence
  Synthetic
tgatgacgaagtgaggtatccatt

SEQ ID NO: 20904 - DNA, 24 bp, Artificial Sequence
  Synthetic
agcttcactacgtagtgtgtcatc

SEQ ID NO: 20905 - DNA, 25 bp, Artificial Sequence
  Synthetic
ggtagtagttttctgaccacaatgt

SEQ ID NO: 20906 - DNA, 23 bp, Artificial Sequence
  Synthetic
tggtcctttgtactctgacatct

SEQ ID NO: 20907 - DNA, 22 bp, Artificial Sequence
  Synthetic
ccactacatcgccattcaagtc

SEQ ID NO: 20908 - DNA, 25 bp, Artificial Sequence
  Synthetic
tggtttaagtatgacattgcctaca

SEQ ID NO: 20909 - DNA, 25 bp, Artificial Sequence
  Synthetic
ggaaaagaaccttcacagaaatcca

SEQ ID NO: 20910 - DNA, 21 bp, Artificial Sequence
  Synthetic
ctaaccattgcagaaacgggt

SEQ ID NO: 20911 - DNA, 23 bp, Artificial Sequence
  Synthetic
gtcagtagggttgattggtcttt

SEQ ID NO: 20912 - DNA, 25 bp, Artificial Sequence
  Synthetic
gcaacaagtgccttaagtttttcca

SEQ ID NO: 20913 - DNA, 25 bp, Artificial Sequence
  Synthetic
gcagctgttcagataaagacatgta

SEQ ID NO: 20914 - DNA, 25 bp, Artificial Sequence
  Synthetic
accagcatgtttatttgcaaaacaa

SEQ ID NO: 20915 - DNA, 25 bp, Artificial Sequence
  Synthetic
tctggacgaagctcactataagaaa

SEQ ID NO: 20916 - DNA, 20 bp, Artificial Sequence
  Synthetic
ccaccagccactactgaagc

SEQ ID NO: 20917 - DNA, 25 bp, Artificial Sequence
  Synthetic
cgctacgcaattttaggtacatttc

SEQ ID NO: 20918 - DNA, 20 bp, Artificial Sequence
  Synthetic
aaccactctgcagaacagca

SEQ ID NO: 20919 - DNA, 25 bp, Artificial Sequence
  Synthetic
cggacaaatttatacttgggtgtct

SEQ ID NO: 20920 - DNA, 25 bp, Artificial Sequence
  Synthetic
acatgatcttgtgtcaaaggttcat

SEQ ID NO: 20921 - DNA, 24 bp, Artificial Sequence
  Synthetic
gaccactgtgtactttgaacaaga

SEQ ID NO: 20922 - DNA, 25 bp, Artificial Sequence
  Synthetic
cgacaccagaatagttagaggttac

SEQ ID NO: 20923 - DNA, 25 bp, Artificial Sequence
  Synthetic
cctccaatacccaacaacttaatgt

SEQ ID NO: 20924 - DNA, 25 bp, Artificial Sequence
  Synthetic
acaacctattaatgtctacagcacc

SEQ ID NO: 20925 - DNA, 24 bp, Artificial Sequence
  Synthetic
gcactagttacttttgccctcttg

SEQ ID NO: 20926 - DNA, 22 bp, Artificial Sequence
  Synthetic
gtcgtagtgctactggactcag

SEQ ID NO: 20927 - DNA, 24 bp, Artificial Sequence
  Synthetic
gcaggtacttctgtagcatttcca

SEQ ID NO: 20928 - DNA, 22 bp, Artificial Sequence
  Synthetic
gggtcattagcacaagtggtag

SEQ ID NO: 20929 - DNA, 25 bp, Artificial Sequence
  Synthetic
ccatgtcaccatctactctaaactt

SEQ ID NO: 20930 - DNA, 20 bp, Artificial Sequence
  Synthetic
cctacaatgcctgcatcacg

SEQ ID NO: 20931 - DNA, 25 bp, Artificial Sequence
  Synthetic
ggatacacctatcatccaaacagtt

SEQ ID NO: 20932 - DNA, 25 bp, Artificial Sequence
  Synthetic
tgacagtttgaaaagcaacattgtt

SEQ ID NO: 20933 - DNA, 23 bp, Artificial Sequence
  Synthetic
acagatagagacaccagctacgg

SEQ ID NO: 20934 - DNA, 23 bp, Artificial Sequence
  Synthetic
cgttagctaacctgtagaaacgg

SEQ ID NO: 20935 - DNA, 25 bp, Artificial Sequence
  Synthetic
cggcatcatcagaaagaatcatcat

SEQ ID NO: 20936 - DNA, 25 bp, Artificial Sequence
  Synthetic
agacatcagcatactcctgattagg

SEQ ID NO: 20937 - DNA, 25 bp, Artificial Sequence
  Synthetic
gcaaacatagggattaacagacaac

SEQ ID NO: 20938 - DNA, 20 bp, Artificial Sequence
  Synthetic
ttcctcagtggctttgagcg

SEQ ID NO: 20939 - DNA, 22 bp, Artificial Sequence
  Synthetic
gtgttgggtacaagccagtaat

SEQ ID NO: 20940 - DNA, 25 bp, Artificial Sequence
  Synthetic
agcattgacaacactcaagtcataa

SEQ ID NO: 20941 - DNA, 25 bp, Artificial Sequence
  Synthetic
tgattgcagatgaaacatcatgtgt

SEQ ID NO: 20942 - DNA, 25 bp, Artificial Sequence
  Synthetic
cgacgtggtatttctagacttgtaa

SEQ ID NO: 20943 - DNA, 20 bp, Artificial Sequence
  Synthetic
aaagccaatccacgcacgaa

SEQ ID NO: 20944 - DNA, 20 bp, Artificial Sequence
  Synthetic
gtaagctcaaagccatgcgc

SEQ ID NO: 20945 - DNA, 23 bp, Artificial Sequence
  Synthetic
caatgcagacttcacaaccatgt

SEQ ID NO: 20946 - DNA, 23 bp, Artificial Sequence
  Synthetic
catcacagcctggtaagttcaag

SEQ ID NO: 20947 - DNA, 25 bp, Artificial Sequence
  Synthetic
cctggtaaatgtattccacaggtta

SEQ ID NO: 20948 - DNA, 25 bp, Artificial Sequence
  Synthetic
acaagacagtaagtgaagaacaagc

SEQ ID NO: 20949 - DNA, 25 bp, Artificial Sequence
  Synthetic
cctcgagcttatatcgctgtatgaa

SEQ ID NO: 20950 - DNA, 25 bp, Artificial Sequence
  Synthetic
ccaaagcatgaatgaaatttcagca

SEQ ID NO: 20951 - DNA, 25 bp, Artificial Sequence
  Synthetic
ccaattaaagtagaatctgcgtcgg

SEQ ID NO: 20952 - DNA, 23 bp, Artificial Sequence
  Synthetic
tgccaagatagttagccccaatt

SEQ ID NO: 20953 - DNA, 21 bp, Artificial Sequence
  Synthetic
tgtctgtgtacccatgggttt

SEQ ID NO: 20954 - DNA, 25 bp, Artificial Sequence
  Synthetic
acttgagcataaatgtagttggctt

SEQ ID NO: 20955 - DNA, 25 bp, Artificial Sequence
  Synthetic
gcaaagatcattcaacttagtggca

SEQ ID NO: 20956 - DNA, 25 bp, Artificial Sequence
  Synthetic
gccaataacaattaagagcaggtgg

SEQ ID NO: 20957 - DNA, 25 bp, Artificial Sequence
  Synthetic
agcatttgttccaggtgtaattaca

SEQ ID NO: 20958 - DNA, 25 bp, Artificial Sequence
  Synthetic
agcaatggtgttattagagtaagca

SEQ ID NO: 20959 - DNA, 24 bp, Artificial Sequence
  Synthetic
gcattcgccatattgcttcatgaa

SEQ ID NO: 20960 - DNA, 25 bp, Artificial Sequence
  Synthetic
tgcagttgatgttgttgtaagtgat

SEQ ID NO: 20961 - DNA, 23 bp, Artificial Sequence
  Synthetic
ggacataaggtggtagccctttc

SEQ ID NO: 20962 - DNA, 25 bp, Artificial Sequence
  Synthetic
gctcttctttgaatgagtcaagctc

SEQ ID NO: 20963 - DNA, 20 bp, Artificial Sequence
  Synthetic
aagagcatgcacccttgagg

SEQ ID NO: 20964 - DNA, 23 bp, Artificial Sequence
  Synthetic
gcaaatgaactggaagcccttat

SEQ ID NO: 20965 - DNA, 25 bp, Artificial Sequence
  Synthetic
gtgaaatagccatgtacaacgacat

SEQ ID NO: 20966 - DNA, 25 bp, Artificial Sequence
  Synthetic
gcaagaataccacgaaagcaagaaa

SEQ ID NO: 20967 - DNA, 25 bp, Artificial Sequence
  Synthetic
cctgttccgattagaataggcaaat

SEQ ID NO: 20968 - DNA, 20 bp, Artificial Sequence
  Synthetic
acagcgccctagggagtgtc

SEQ ID NO: 20969 - DNA, 24 bp, Artificial Sequence
  Synthetic
cctgatagtgatatagctcgcaag

SEQ ID NO: 20970 - DNA, 25 bp, Artificial Sequence
  Synthetic
acatgaggtttattagatgcacagc

SEQ ID NO: 20971 - DNA, 22 bp, Artificial Sequence
  Synthetic
ccattgcgtcctccattctggt

SEQ ID NO: 20972 - DNA, 22 bp, Artificial Sequence
  Synthetic
tgccaatgtggtctttgggtgt

SEQ ID NO: 20973 - DNA, 25 bp, Artificial Sequence
  Synthetic
agcagatttcttagtgacagtttgg

SEQ ID NO: 20974 - DNA, 23 bp, Artificial Sequence
  Synthetic
gttcagcagtatgacgttgtctt

SEQ ID NO: 20975 - DNA, 25 bp, Artificial Sequence
  Synthetic
cctacttgtgctgtttagttacgag

SEQ ID NO: 20976 - DNA, 21 bp, Artificial Sequence
  Synthetic
gggaagggtgggaaaaactgg

SEQ ID NO: 20977 - DNA, 21 bp, Artificial Sequence
  Synthetic
caagaagggtgagcaggcagc

SEQ ID NO: 20978 - DNA, 25 bp, Artificial Sequence
  Synthetic
gcacccatgatgacaatctatacac

SEQ ID NO: 20979 - DNA, 22 bp, Artificial Sequence
  Synthetic
cacaagcttcaactgttggtga

SEQ ID NO: 20980 - DNA, 20 bp, Artificial Sequence
  Synthetic
agggcatcaggcaatttcca

SEQ ID NO: 20981 - DNA, 25 bp, Artificial Sequence
  Synthetic
ccaactgtcatcactaggtctttta

SEQ ID NO: 20982 - DNA, 25 bp, Artificial Sequence
  Synthetic
ctgagtggtactaaacacaacctta

SEQ ID NO: 20983 - DNA, 25 bp, Artificial Sequence
  Synthetic
ggttgtgaggcaatatctactggta

SEQ ID NO: 20984 - DNA, 22 bp, Artificial Sequence
  Synthetic
ccccacatcccacactaaatgt

SEQ ID NO: 20985 - DNA, 23 bp, Artificial Sequence
  Synthetic
tgtgagtactccttcttgtgtgt

SEQ ID NO: 20986 - DNA, 25 bp, Artificial Sequence
  Synthetic
ttcctgattgccatgtgtaatcatc

SEQ ID NO: 20987 - DNA, 24 bp, Artificial Sequence
  Synthetic
cgaggacaccatgcttttatatgt

SEQ ID NO: 20988 - DNA, 25 bp, Artificial Sequence
  Synthetic
tcacatcattaccttcagtgtttgt

SEQ ID NO: 20989 - DNA, 25 bp, Artificial Sequence
  Synthetic
cacactggaattttctcaggtcaat

SEQ ID NO: 20990 - DNA, 25 bp, Artificial Sequence
  Synthetic
acgcacagagtttctctttaagaaa

SEQ ID NO: 20991 - DNA, 23 bp, Artificial Sequence
  Synthetic
tttaggatctgggggcaaagaat

SEQ ID NO: 20992 - DNA, 25 bp, Artificial Sequence
  Synthetic
tgaagatactgttggtggtgttagt

SEQ ID NO: 20993 - DNA, 24 bp, Artificial Sequence
  Synthetic
accctgaagtgtacagaacaattt

SEQ ID NO: 20994 - DNA, 25 bp, Artificial Sequence
  Synthetic
gcaaatcataggaatcagagacctt

SEQ ID NO: 20995 - DNA, 22 bp, Artificial Sequence
  Synthetic
ccttgtacaaaacacccccaca

SEQ ID NO: 20996 - DNA, 25 bp, Artificial Sequence
  Synthetic
gtgactatacctgggtttttgtgga

SEQ ID NO: 20997 - DNA, 25 bp, Artificial Sequence
  Synthetic
ctcatcagctctgaatcctctttta

SEQ ID NO: 20998 - DNA, 25 bp, Artificial Sequence
  Synthetic
ggtagaagcactaacacacagtcta

SEQ ID NO: 20999 - DNA, 25 bp, Artificial Sequence
  Synthetic
cttcacaagctacctgtacattaga

SEQ ID NO: 21000 - DNA, 25 bp, Artificial Sequence
  Synthetic
ccatcaaatgcatttctcatatgca

SEQ ID NO: 21001 - DNA, 25 bp, Artificial Sequence
  Synthetic
tgtgatgtgatctctaaggtctgta

SEQ ID NO: 21002 - DNA, 25 bp, Artificial Sequence
  Synthetic
tgacaggagcaagaatagttttgtt

SEQ ID NO: 21003 - DNA, 20 bp, Artificial Sequence
  Synthetic
ttcacagtcatgccccaacc

SEQ ID NO: 21004 - DNA, 23 bp, Artificial Sequence
  Synthetic
ggaagatgctccaggttctactg

SEQ ID NO: 21005 - DNA, 24 bp, Artificial Sequence
  Synthetic
ctctgtgattggtacctgctctat

SEQ ID NO: 21006 - DNA, 25 bp, Artificial Sequence
  Synthetic
tcggggacaaatacctttaaaactg

SEQ ID NO: 21007 - DNA, 23 bp, Artificial Sequence
  Synthetic
gacgttccctgtctgaattgtat

SEQ ID NO: 21008 - DNA, 25 bp, Artificial Sequence
  Synthetic
gctgttctcgctttccaaaaaagaa

SEQ ID NO: 21009 - DNA, 25 bp, Artificial Sequence
  Synthetic
gccattcttccaatattctgggatt

SEQ ID NO: 21010 - DNA, 24 bp, Artificial Sequence
  Synthetic
tgaccccatgagtcagataaaaca

SEQ ID NO: 21011 - DNA, 24 bp, Artificial Sequence
  Synthetic
gaaggtaacaccaactcttccaaa

SEQ ID NO: 21012 - DNA, 25 bp, Artificial Sequence
  Synthetic
ccaatctgcagtttgtaattcaaga

SEQ ID NO: 21013 - DNA, 25 bp, Artificial Sequence
  Synthetic
agtctcggactcaaatctacaagat

SEQ ID NO: 21014 - DNA, 22 bp, Artificial Sequence
  Synthetic
tgatcctgcagtacatcgaaac

SEQ ID NO: 21015 - DNA, 25 bp, Artificial Sequence
  Synthetic
tggaactagtaacgacagaggaaat

SEQ ID NO: 21016 - DNA, 22 bp, Artificial Sequence
  Synthetic
ggctcttggttctctggtggtt

SEQ ID NO: 21017 - DNA, 25 bp, Artificial Sequence
  Synthetic
cctctggatttatcacatccaaagg

SEQ ID NO: 21018 - DNA, 24 bp, Artificial Sequence
  Synthetic
ggtttgaacctgttgtacaaaacg

SEQ ID NO: 21019 - DNA, 25 bp, Artificial Sequence
  Synthetic
gttgaaaaaggtccagttggctatc

SEQ ID NO: 21020 - DNA, 23 bp, Artificial Sequence
  Synthetic
tgctttgccttctccatcttcta

SEQ ID NO: 21021 - DNA, 25 bp, Artificial Sequence
  Synthetic
acatcttctcatttttctctcagct

SEQ ID NO: 21022 - DNA, 23 bp, Artificial Sequence
  Synthetic
tgtctttgctgtgttcatagctg

SEQ ID NO: 21023 - DNA, 25 bp, Artificial Sequence
  Synthetic
agtttccatctgttcataagatcgt

SEQ ID NO: 21024 - DNA, 25 bp, Artificial Sequence
  Synthetic
tcctctttgtcatacagaatcagct

SEQ ID NO: 21025 - DNA, 20 bp, Artificial Sequence
  Synthetic
tgagtgcagaccgtgccaga

SEQ ID NO: 21026 - DNA, 24 bp, Artificial Sequence
  Synthetic
ctgatgaagcttgagactctcaga

SEQ ID NO: 21027 - DNA, 25 bp, Artificial Sequence
  Synthetic
cccaaaagagctctttcatttgatc

SEQ ID NO: 21028 - DNA, 25 bp, Artificial Sequence
  Synthetic
gccaccccaaataaacaaaggatta

SEQ ID NO: 21029 - DNA, 20 bp, Artificial Sequence
  Synthetic
tccatcttgctttctggcgc

SEQ ID NO: 21030 - DNA, 25 bp, Artificial Sequence
  Synthetic
gaggcgtgtataaaaagaaatgtgt

SEQ ID NO: 21031 - DNA, 25 bp, Artificial Sequence
  Synthetic
cagtaccttccattgattagccttt

SEQ ID NO: 21032 - DNA, 25 bp, Artificial Sequence
  Synthetic
gcaaaaggataattagcagcttctg

SEQ ID NO: 21033 - DNA, 25 bp, Artificial Sequence
  Synthetic
tgcaaaacattaaactctgctactg

SEQ ID NO: 21034 - DNA, 25 bp, Artificial Sequence
  Synthetic
ttcagtaagaccgatagcttccaaa

SEQ ID NO: 21035 - DNA, 25 bp, Artificial Sequence
  Synthetic
agccataaaaccaatattgtgcttt

SEQ ID NO: 21036 - DNA, 25 bp, Artificial Sequence
  Synthetic
ccaactttgattcggttaaattcct

SEQ ID NO: 21037 - DNA, 24 bp, Artificial Sequence
  Synthetic
caaagaagcaagcctaagcctaaa

SEQ ID NO: 21038 - DNA, 25 bp, Artificial Sequence
  Synthetic
gcctgcaaaatcttacctaagtcat

SEQ ID NO: 21039 - DNA, 22 bp, Artificial Sequence
  Synthetic
agcacaacaaaacaagccattt

SEQ ID NO: 21040 - DNA, 25 bp, Artificial Sequence
  Synthetic
cacaaaacctttcaagagacgtttg

SEQ ID NO: 21041 - DNA, 23 bp, Artificial Sequence
  Synthetic
gcaattaatggctgatttgcgga

SEQ ID NO: 21042 - DNA, 25 bp, Artificial Sequence
  Synthetic
cccaaatctacggctgataaagatt

SEQ ID NO: 21043 - DNA, 20 bp, Artificial Sequence
  Synthetic
tacgagatccccaacgttgg

SEQ ID NO: 21044 - DNA, 20 bp, Artificial Sequence
  Synthetic
gcagggcgtaactttgctaa

SEQ ID NO: 21045 - DNA, 24 bp, Artificial Sequence
  Synthetic
gcaatagctcctccattgacatta

SEQ ID NO: 21046 - DNA, 22 bp, Artificial Sequence
  Synthetic
accagtgcatcaattaacgctt

SEQ ID NO: 21047 - DNA, 25 bp, Artificial Sequence
  Synthetic
tgaggttaatcgaccaaaatcttct

SEQ ID NO: 21048 - DNA, 25 bp, Artificial Sequence
  Synthetic
gagcaacccttcaagataaacatct

SEQ ID NO: 21049 - DNA, 25 bp, Artificial Sequence
  Synthetic
gcttcttttgtagctactagtgtcg

SEQ ID NO: 21050 - DNA, 20 bp, Artificial Sequence
  Synthetic
acaatggggcatttccgatg

SEQ ID NO: 21051 - DNA, 24 bp, Artificial Sequence
  Synthetic
gaccttgaaagtggcaaagtttta

SEQ ID NO: 21052 - DNA, 25 bp, Artificial Sequence
  Synthetic
gcatttttattaccacaagctgcca

SEQ ID NO: 21053 - DNA, 25 bp, Artificial Sequence
  Synthetic
ccagtcacaaaatcttctgctgtta

SEQ ID NO: 21054 - DNA, 25 bp, Artificial Sequence
  Synthetic
caacattcttagcatcccagtagtt

SEQ ID NO: 21055 - DNA, 25 bp, Artificial Sequence
  Synthetic
acgaaaatccttgttgttaagagct

SEQ ID NO: 21056 - DNA, 25 bp, Artificial Sequence
  Synthetic
ctaattgaactgggaaggttacacc

SEQ ID NO: 21057 - DNA, 20 bp, Artificial Sequence
  Synthetic
tgtgtcatcagccagctgta

SEQ ID NO: 21058 - DNA, 20 bp, Artificial Sequence
  Synthetic
ggtgtccactcttgtgcctg

SEQ ID NO: 21059 - DNA, 22 bp, Artificial Sequence
  Synthetic
tgcttggggtaatggctcactg

SEQ ID NO: 21060 - DNA, 23 bp, Artificial Sequence
  Synthetic
cattggattgtaggcatggtttg

SEQ ID NO: 21061 - DNA, 22 bp, Artificial Sequence
  Synthetic
tctgtaatactgccgcgatctg

SEQ ID NO: 21062 - DNA, 20 bp, Artificial Sequence
  Synthetic
caggttttcgaggtgttgca

SEQ ID NO: 21063 - DNA, 24 bp, Artificial Sequence
  Synthetic
cagttggatgagttaggatcatcc

SEQ ID NO: 21064 - DNA, 25 bp, Artificial Sequence
  Synthetic
ggtttgaccatagagtcatattggt

SEQ ID NO: 21065 - DNA, 25 bp, Artificial Sequence
  Synthetic
ccaaaatcatctgattgagcagcta

SEQ ID NO: 21066 - DNA, 23 bp, Artificial Sequence
  Synthetic
ggacgtaattgccctcactattg

SEQ ID NO: 21067 - DNA, 25 bp, Artificial Sequence
  Synthetic
gctgctggtgttttagcaatgataa

SEQ ID NO: 21068 - DNA, 25 bp, Artificial Sequence
  Synthetic
cttctgtgccatacataccatagtt

SEQ ID NO: 21069 - DNA, 25 bp, Artificial Sequence
  Synthetic
aggaatagctcgctctttagggtaa

SEQ ID NO: 21070 - DNA, 21 bp, Artificial Sequence
  Synthetic
tgaaactgattggggctaacg

SEQ ID NO: 21071 - DNA, 23 bp, Artificial Sequence
  Synthetic
tgccttcaaaaatggcagctaaa

SEQ ID NO: 21072 - DNA, 25 bp, Artificial Sequence
  Synthetic
gctccgtatggtaaatagcttgtaa

SEQ ID NO: 21073 - DNA, 25 bp, Artificial Sequence
  Synthetic
gccgattagccttaagtttggttaa

SEQ ID NO: 21074 - DNA, 25 bp, Artificial Sequence
  Synthetic
cgtcatacaacctggtaaataaggt

SEQ ID NO: 21075 - DNA, 22 bp, Artificial Sequence
  Synthetic
ggcttatgcgcttgtttgtaag

SEQ ID NO: 21076 - DNA, 25 bp, Artificial Sequence
  Synthetic
ccgatttttacacacagttgtccta

SEQ ID NO: 21077 - DNA, 25 bp, Artificial Sequence
  Synthetic
agctaattgaacatctgctccaaca

SEQ ID NO: 21078 - DNA, 25 bp, Artificial Sequence
  Synthetic
aatcagattggcctttggtaattgt

SEQ ID NO: 21079 - DNA, 25 bp, Artificial Sequence
  Synthetic
gtgattcttgaagagtaccagcttt

SEQ ID NO: 21080 - DNA, 25 bp, Artificial Sequence
  Synthetic
cggtaccagtcttttctttgttgta

SEQ ID NO: 21081 - DNA, 24 bp, Artificial Sequence
  Synthetic
cacctccccataaaaatcccattt

SEQ ID NO: 21082 - DNA, 25 bp, Artificial Sequence
  Synthetic
cggtatattaagcgacataccagtc

SEQ ID NO: 21083 - DNA, 25 bp, Artificial Sequence
  Synthetic
gcgtcgtaaatggtattggattgat

SEQ ID NO: 21084 - DNA, 25 bp, Artificial Sequence
  Synthetic
ggtgattgacatgttcttgagtcaa

SEQ ID NO: 21085 - DNA, 25 bp, Artificial Sequence
  Synthetic
ggcaacaaatcagcaatcttgttaa

SEQ ID NO: 21086 - DNA, 25 bp, Artificial Sequence
  Synthetic
gatcgcctttgttactagattctct

SEQ ID NO: 21087 - DNA, 25 bp, Artificial Sequence
  Synthetic
ccacatatttgctttcttctagggt

SEQ ID NO: 21088 - DNA, 25 bp, Artificial Sequence
  Synthetic
ggtctaaaagagcaactcgattcaa

SEQ ID NO: 21089 - DNA, 22 bp, Artificial Sequence
  Synthetic
gccccaaagccttagaaagatt

SEQ ID NO: 21090 - DNA, 24 bp, Artificial Sequence
  Synthetic
cccttaagcatggtgataccgttt

SEQ ID NO: 21091 - DNA, 25 bp, Artificial Sequence
  Synthetic
ggtctccatgcaaatgagtaatgaa

SEQ ID NO: 21092 - DNA, 25 bp, Artificial Sequence
  Synthetic
cgtctagggttccttctaagtcttt

SEQ ID NO: 21093 - DNA, 21 bp, Artificial Sequence
  Synthetic
gcttcatgagcgatttgtgct

SEQ ID NO: 21094 - DNA, 21 bp, Artificial Sequence
  Synthetic
tccaactcgaggcattctttg

SEQ ID NO: 21095 - DNA, 21 bp, Artificial Sequence
  Synthetic
tccgataagggcaaacttggt

SEQ ID NO: 21096 - DNA, 25 bp, Artificial Sequence
  Synthetic
ccgctgttaaaaactcatctaaggc

SEQ ID NO: 21097 - DNA, 22 bp, Artificial Sequence
  Synthetic
ttaggcgtgtcaagaagacctt

SEQ ID NO: 21098 - DNA, 23 bp, Artificial Sequence
  Synthetic
tgagggcttcaactaaagcatcc

SEQ ID NO: 21099 - DNA, 21 bp, Artificial Sequence
  Synthetic
agccccatcagcaatcatttg

SEQ ID NO: 21100 - DNA, 25 bp, Artificial Sequence
  Synthetic
caaacgtcttgtgttacctcttgat

SEQ ID NO: 21101 - DNA, 21 bp, Artificial Sequence
  Synthetic
tgacatcgtgtacgcgtacaa

SEQ ID NO: 21102 - DNA, 23 bp, Artificial Sequence
  Synthetic
gttcacaaatcgcacctgctaaa

SEQ ID NO: 21103 - DNA, 25 bp, Artificial Sequence
  Synthetic
aagagattgctcaatagcttgtgtt

SEQ ID NO: 21104 - DNA, 23 bp, Artificial Sequence
  Synthetic
ggaaaagccaagaaatctgctgg

SEQ ID NO: 21105 - DNA, 23 bp, Artificial Sequence
  Synthetic
agcacccgcattcataaaaacag

SEQ ID NO: 21106 - DNA, 25 bp, Artificial Sequence
  Synthetic
gccctttaagatttgcttccatgat

SEQ ID NO: 21107 - DNA, 24 bp, Artificial Sequence
  Synthetic
ggttacttgattttcgttgtgcag

SEQ ID NO: 21108 - DNA, 24 bp, Artificial Sequence
  Synthetic
ggccttcaattcccttgtcaaatt

SEQ ID NO: 21109 - DNA, 22 bp, Artificial Sequence
  Synthetic
agcaacacgttggcaaaccatt

SEQ ID NO: 21110 - DNA, 22 bp, Artificial Sequence
  Synthetic
tattgccaccccatttgccatt

SEQ ID NO: 21111 - DNA, 25 bp, Artificial Sequence
  Synthetic
tggaggaattatggaaaatcaggaa

SEQ ID NO: 21112 - DNA, 23 bp, Artificial Sequence
  Synthetic
ttacctttcctttgcctacgttg

SEQ ID NO: 21113 - DNA, 25 bp, Artificial Sequence
  Synthetic
cggaagaaaaagatggtattgatgc

SEQ ID NO: 21114 - DNA, 25 bp, Artificial Sequence
  Synthetic
acaggctggtaccaattactcatta

SEQ ID NO: 21115 - DNA, 25 bp, Artificial Sequence
  Synthetic
ccagttacgtctttggaaaatgttt

SEQ ID NO: 21116 - DNA, 24 bp, Artificial Sequence
  Synthetic
gaatgtgccaagttgcaaaaatct

SEQ ID NO: 21117 - DNA, 23 bp, Artificial Sequence
  Synthetic
cttagtgactacacgcccaaaag

SEQ ID NO: 21118 - DNA, 20 bp, Artificial Sequence
  Synthetic
tgacgtgacagtcgaaagca

SEQ ID NO: 21119 - DNA, 24 bp, Artificial Sequence
  Synthetic
aggtctgcgctaagatatggtata

SEQ ID NO: 21120 - DNA, 21 bp, Artificial Sequence
  Synthetic
gaaggagatttcggacgaacc

SEQ ID NO: 21121 - DNA, 25 bp, Artificial Sequence
  Synthetic
tgcatttaatcttggagagcaagaa

SEQ ID NO: 21122 - DNA, 25 bp, Artificial Sequence
  Synthetic
tgctcttcctagatctcaaaaaagg

SEQ ID NO: 21123 - DNA, 21 bp, Artificial Sequence
  Synthetic
ggtggcggtgtagtggtttta

SEQ ID NO: 21124 - DNA, 22 bp, Artificial Sequence
  Synthetic
tgcagccttgcttgttaaacaa

SEQ ID NO: 21125 - DNA, 25 bp, Artificial Sequence
  Synthetic
aggaactatcatatcaggaggtctt

SEQ ID NO: 21126 - DNA, 25 bp, Artificial Sequence
  Synthetic
actcgaaaccatacagaagaaatga

SEQ ID NO: 21127 - DNA, 25 bp, Artificial Sequence
  Synthetic
cgcgaaatgctaagattatcggtaa

SEQ ID NO: 21128 - DNA, 25 bp, Artificial Sequence
  Synthetic
tcagccttctatcttgattttgcta

SEQ ID NO: 21129 - DNA, 23 bp, Artificial Sequence
  Synthetic
gcagatattcttcgactttgggt

SEQ ID NO: 21130 - DNA, 24 bp, Artificial Sequence
  Synthetic
ccaaatggcgagtttacaaaagaa

SEQ ID NO: 21131 - DNA, 24 bp, Artificial Sequence
  Synthetic
tctgtttctgatttccgtcaagat

SEQ ID NO: 21132 - DNA, 21 bp, Artificial Sequence
  Synthetic
gttacccttgagtcagggaca

SEQ ID NO: 21133 - DNA, 25 bp, Artificial Sequence
  Synthetic
cgattcaacctctttatactacgcc

SEQ ID NO: 21134 - DNA, 25 bp, Artificial Sequence
  Synthetic
cgtaaggagatggatttagcagaat

SEQ ID NO: 21135 - DNA, 20 bp, Artificial Sequence
  Synthetic
aaacagcctttccaatgcgc

SEQ ID NO: 21136 - DNA, 25 bp, Artificial Sequence
  Synthetic
agaggtaaatctcagtgaaacacaa

SEQ ID NO: 21137 - DNA, 25 bp, Artificial Sequence
  Synthetic
aggattaaaccgagtataagcgtag

SEQ ID NO: 21138 - DNA, 20 bp, Artificial Sequence
  Synthetic
ccttttcacggcggtaacac

SEQ ID NO: 21139 - DNA, 22 bp, Artificial Sequence
  Synthetic
gccccctgtgagataaggtagt

SEQ ID NO: 21140 - DNA, 22 bp, Artificial Sequence
  Synthetic
tggacttaccgctggtgtacca

SEQ ID NO: 21141 - DNA, 22 bp, Artificial Sequence
  Synthetic
gggcttagtgatccggtggtac

SEQ ID NO: 21142 - DNA, 22 bp, Artificial Sequence
  Synthetic
cgcagtgaataggcccaagcaa

SEQ ID NO: 21143 - DNA, 20 bp, Artificial Sequence
  Synthetic
gagtccggctaagcagtgag

SEQ ID NO: 21144 - DNA, 22 bp, Artificial Sequence
  Synthetic
tgtaccggggctaaaacagttt

SEQ ID NO: 21145 - DNA, 22 bp, Artificial Sequence
  Synthetic
cctacaacaagttcgagcccgt

SEQ ID NO: 21146 - DNA, 20 bp, Artificial Sequence
  Synthetic
tgagaggtcttgtggggcct

SEQ ID NO: 21147 - DNA, 25 bp, Artificial Sequence
  Synthetic
cgaaacgtaaagaagaagttgacct

SEQ ID NO: 21148 - DNA, 20 bp, Artificial Sequence
  Synthetic
gcagacaaccaaccagctgt

SEQ ID NO: 21149 - DNA, 24 bp, Artificial Sequence
  Synthetic
tgcaggattgtcattgtcagaaat

SEQ ID NO: 21150 - DNA, 24 bp, Artificial Sequence
  Synthetic
tccttgaattaggtgatggtgtct

SEQ ID NO: 21151 - DNA, 25 bp, Artificial Sequence
  Synthetic
tcgtacaactccttcagtagtatca

SEQ ID NO: 21152 - DNA, 25 bp, Artificial Sequence
  Synthetic
ccagcgatggtagttgtttataact

SEQ ID NO: 21153 - DNA, 21 bp, Artificial Sequence
  Synthetic
tcgttctcaggatctggcaaa

SEQ ID NO: 21154 - DNA, 25 bp, Artificial Sequence
  Synthetic
cgtaggtctgttagtttggtaaaca

SEQ ID NO: 21155 - DNA, 25 bp, Artificial Sequence
  Synthetic
gcagtttgctattccaagaaacttt

SEQ ID NO: 21156 - DNA, 23 bp, Artificial Sequence
  Synthetic
tggcaaaactagagaagttggga

SEQ ID NO: 21157 - DNA, 23 bp, Artificial Sequence
  Synthetic
gtcacatcacctcgtctatcacg

SEQ ID NO: 21158 - DNA, 20 bp, Artificial Sequence
  Synthetic
atttggtgagcacgagggat

SEQ ID NO: 21159 - DNA, 25 bp, Artificial Sequence
  Synthetic
acgatcgctggattctaaatttttg

SEQ ID NO: 21160 - DNA, 20 bp, Artificial Sequence
  Synthetic
ttgccgtattgctgttccgt

SEQ ID NO: 21161 - DNA, 25 bp, Artificial Sequence
  Synthetic
tctggtagtttttctttgaccttct

SEQ ID NO: 21162 - DNA, 25 bp, Artificial Sequence
  Synthetic
cataggctggcgatcaataaagatc

SEQ ID NO: 21163 - DNA, 25 bp, Artificial Sequence
  Synthetic
gagtttatcaaacgcttgaaaggct

SEQ ID NO: 21164 - DNA, 24 bp, Artificial Sequence
  Synthetic
agggtttgattttgccaaatcttg

SEQ ID NO: 21165 - DNA, 24 bp, Artificial Sequence
  Synthetic
cccgttcaaattggctcttgtatt

SEQ ID NO: 21166 - DNA, 20 bp, Artificial Sequence
  Synthetic
ggcttcttgttcagggaggg

SEQ ID NO: 21167 - DNA, 20 bp, Artificial Sequence
  Synthetic
acatgatgcgctcagaaggg

SEQ ID NO: 21168 - DNA, 25 bp, Artificial Sequence
  Synthetic
cagaaaaagcagctgaattggtaca

SEQ ID NO: 21169 - DNA, 25 bp, Artificial Sequence
  Synthetic
aggaccgtcatgaatactaaaatgt

SEQ ID NO: 21170 - DNA, 20 bp, Artificial Sequence
  Synthetic
attgcggtgtgaagacctgc

SEQ ID NO: 21171 - DNA, 25 bp, Artificial Sequence
  Synthetic
tccctacctagaagtttgtacttgt

SEQ ID NO: 21172 - DNA, 24 bp, Artificial Sequence
  Synthetic
gccaaatcgtaaacaacgttggaa

SEQ ID NO: 21173 - DNA, 23 bp, Artificial Sequence
  Synthetic
agaagcttcgcaatcactatcaa

SEQ ID NO: 21174 - DNA, 25 bp, Artificial Sequence
  Synthetic
cgatcagtgggttattggttatacg

SEQ ID NO: 21175 - DNA, 21 bp, Artificial Sequence
  Synthetic
agcgtgacaaccaatccattg

SEQ ID NO: 21176 - DNA, 25 bp, Artificial Sequence
  Synthetic
agtgaaaatccgactttcagaagtt

SEQ ID NO: 21177 - DNA, 22 bp, Artificial Sequence
  Synthetic
gcattagcaaaggcggtagccg

SEQ ID NO: 21178 - DNA, 21 bp, Artificial Sequence
  Synthetic
atgcaacggcggatgttgttg

SEQ ID NO: 21179 - DNA, 20 bp, Artificial Sequence
  Synthetic
gtccggcaacaacgcctcag

SEQ ID NO: 21180 - DNA, 21 bp, Artificial Sequence
  Synthetic
gggcatggggcaaggatttgc

SEQ ID NO: 21181 - DNA, 21 bp, Artificial Sequence
  Synthetic
gtgagggcgtactcatcggtg

SEQ ID NO: 21182 - DNA, 22 bp, Artificial Sequence
  Synthetic
tgacacccaatcccgacactgt

SEQ ID NO: 21183 - DNA, 22 bp, Artificial Sequence
  Synthetic
gcgcggatggtccaattatcca

SEQ ID NO: 21184 - DNA, 20 bp, Artificial Sequence
  Synthetic
ccaagatgcaggcgggggag

SEQ ID NO: 21185 - DNA, 22 bp, Artificial Sequence
  Synthetic
cctcataaactgccgccccatc

SEQ ID NO: 21186 - DNA, 21 bp, Artificial Sequence
  Synthetic
actcctgataggccacctgca

SEQ ID NO: 21187 - DNA, 22 bp, Artificial Sequence
  Synthetic
gccctccattgcgccttaagtt

SEQ ID NO: 21188 - DNA, 22 bp, Artificial Sequence
  Synthetic
actgtagccgccattctgttgg

SEQ ID NO: 21189 - DNA, 20 bp, Artificial Sequence
  Synthetic
gcctgtggccgaatgcttcg

SEQ ID NO: 21190 - DNA, 20 bp, Artificial Sequence
  Synthetic
aacagacggagcgactcccg

SEQ ID NO: 21191 - DNA, 21 bp, Artificial Sequence
  Synthetic
cgaacggagcaggtggtacaa

SEQ ID NO: 21192 - DNA, 22 bp, Artificial Sequence
  Synthetic
ctgcgtacgagccaacatcact

SEQ ID NO: 21193 - DNA, 19 bp, Artificial Sequence
  Synthetic
ttgagggccagaccaggct

SEQ ID NO: 21194 - DNA, 19 bp, Artificial Sequence
  Synthetic
attggtccgttggggcggg

SEQ ID NO: 21195 - DNA, 20 bp, Artificial Sequence
  Synthetic
ccaccgacgtggggactgtt

SEQ ID NO: 21196 - DNA, 22 bp, Artificial Sequence
  Synthetic
gcgatattcaacctggagggcg

SEQ ID NO: 21197 - DNA, 22 bp, Artificial Sequence
  Synthetic
ctctgcagagggcaaggtcacc

SEQ ID NO: 21198 - DNA, 25 bp, Artificial Sequence
  Synthetic
ctatcagagtcagtggtgttgtaat

SEQ ID NO: 21199 - DNA, 25 bp, Artificial Sequence
  Synthetic
cctaaccagtttacaaacttgacga

SEQ ID NO: 21200 - DNA, 21 bp, Artificial Sequence
  Synthetic
ccaaaagcaacaaaacggcat

SEQ ID NO: 21201 - DNA, 25 bp, Artificial Sequence
  Synthetic
ccacaattgcatttaacaaaagcat

SEQ ID NO: 21202 - DNA, 25 bp, Artificial Sequence
  Synthetic
gctagcagcaaatttaacatcttct

SEQ ID NO: 21203 - DNA, 25 bp, Artificial Sequence
  Synthetic
caacaatcttacctttagggcaaac

SEQ ID NO: 21204 - DNA, 25 bp, Artificial Sequence
  Synthetic
gctcccaaacattataacagtcctt

SEQ ID NO: 21205 - DNA, 25 bp, Artificial Sequence
  Synthetic
caagcaattttaccaaaacacgtct

SEQ ID NO: 21206 - DNA, 25 bp, Artificial Sequence
  Synthetic
gcaacttaatatgttgcccaatgac

SEQ ID NO: 21207 - DNA, 25 bp, Artificial Sequence
  Synthetic
acaacactcacctttttgaaaaagt

SEQ ID NO: 21208 - DNA, 25 bp, Artificial Sequence
  Synthetic
agaaacacagtttacaaggtgtgaa

SEQ ID NO: 21209 - DNA, 25 bp, Artificial Sequence
  Synthetic
cacacaacgaccaagatttttatca

SEQ ID NO: 21210 - DNA, 25 bp, Artificial Sequence
  Synthetic
tggagctacagataagacagtatca

SEQ ID NO: 21211 - DNA, 23 bp, Artificial Sequence
  Synthetic
aaccatctttaagcacactagca

SEQ ID NO: 21212 - DNA, 25 bp, Artificial Sequence
  Synthetic
caaacttagcctcatgccattgatt

SEQ ID NO: 21213 - DNA, 25 bp, Artificial Sequence
  Synthetic
acacgtccatcattaacataccatt

SEQ ID NO: 21214 - DNA, 24 bp, Artificial Sequence
  Synthetic
gcataatctaacatagccttggct

SEQ ID NO: 21215 - DNA, 24 bp, Artificial Sequence
  Synthetic
gacactgaaaaattatgcaaacgc

SEQ ID NO: 21216 - DNA, 25 bp, Artificial Sequence
  Synthetic
actaggttggtcatcaaaattacca

SEQ ID NO: 21217 - DNA, 25 bp, Artificial Sequence
  Synthetic
tgaagtccattagcaaccatgtatt

SEQ ID NO: 21218 - DNA, 25 bp, Artificial Sequence
  Synthetic
ggcacgcttcaattgtttaataagt

SEQ ID NO: 21219 - DNA, 25 bp, Artificial Sequence
  Synthetic
gaacaggtctaccatcattgtcttt

SEQ ID NO: 21220 - DNA, 25 bp, Artificial Sequence
  Synthetic
tccagaattaacagccaattcagtt

SEQ ID NO: 21221 - DNA, 25 bp, Artificial Sequence
  Synthetic
caacaaccacaaacattacacacat

SEQ ID NO: 21222 - DNA, 24 bp, Artificial Sequence
  Synthetic
gccaaagcaccagaaaagttaagt

SEQ ID NO: 21223 - DNA, 23 bp, Artificial Sequence
  Synthetic
acgcatttaagcatagctctagc

SEQ ID NO: 21224 - DNA, 25 bp, Artificial Sequence
  Synthetic
cctaactgagtgtgtgttaacatct

SEQ ID NO: 21225 - DNA, 25 bp, Artificial Sequence
  Synthetic
gcacgttctttaccactaatagcat

SEQ ID NO: 21226 - DNA, 25 bp, Artificial Sequence
  Synthetic
gcctataaaacctatctgttgcagt

SEQ ID NO: 21227 - DNA, 25 bp, Artificial Sequence
  Synthetic
ggtaccatctttgtcaactatttgc

SEQ ID NO: 21228 - DNA, 24 bp, Artificial Sequence
  Synthetic
ccagcagcttgcaatattgtagaa

SEQ ID NO: 21229 - DNA, 25 bp, Artificial Sequence
  Synthetic
gctagaatacttctcttggtttgca

SEQ ID NO: 21230 - DNA, 22 bp, Artificial Sequence
  Synthetic
gccacaaacatgagcactttca

SEQ ID NO: 21231 - DNA, 21 bp, Artificial Sequence
  Synthetic
ggaaccaacataaccccactg

SEQ ID NO: 21232 - DNA, 25 bp, Artificial Sequence
  Synthetic
tgggttgcataatcataatccaaca

SEQ ID NO: 21233 - DNA, 25 bp, Artificial Sequence
  Synthetic
gcaacattagtaggcaatgttgttt

SEQ ID NO: 21234 - DNA, 23 bp, Artificial Sequence
  Synthetic
caccacaacatccacctataagg

SEQ ID NO: 21235 - DNA, 21 bp, Artificial Sequence
  Synthetic
acacctttgtcagaaccagca

SEQ ID NO: 21236 - DNA, 25 bp, Artificial Sequence
  Synthetic
gttgaagaattgtcaggaacaccta

SEQ ID NO: 21237 - DNA, 25 bp, Artificial Sequence
  Synthetic
tggcacataaaaagtacgagttaca

SEQ ID NO: 21238 - DNA, 20 bp, Artificial Sequence
  Synthetic
agaccccgtccactagtgtg

SEQ ID NO: 21239 - DNA, 25 bp, Artificial Sequence
  Synthetic
atgagtagtgttgatagtgctgttt

SEQ ID NO: 21240 - DNA, 25 bp, Artificial Sequence
  Synthetic
agtctcaggcaaaacattatcatca

SEQ ID NO: 21241 - DNA, 22 bp, Artificial Sequence
  Synthetic
gtctggttggttacatggtgtc

SEQ ID NO: 21242 - DNA, 25 bp, Artificial Sequence
  Synthetic
gctaaacaacaaatcttccaaagca

SEQ ID NO: 21243 - DNA, 25 bp, Artificial Sequence
  Synthetic
gcctgaattgaattagaaatggcct

SEQ ID NO: 21244 - DNA, 20 bp, Artificial Sequence
  Synthetic
ggttgacgcagaacatagcc

SEQ ID NO: 21245 - DNA, 25 bp, Artificial Sequence
  Synthetic
caacaaaacacaagaagactcaaca

SEQ ID NO: 21246 - DNA, 25 bp, Artificial Sequence
  Synthetic
ggcacactactattagacatcgttt

SEQ ID NO: 21247 - DNA, 24 bp, Artificial Sequence
  Synthetic
gcagccatcaccggtaagtaataa

SEQ ID NO: 21248 - DNA, 24 bp, Artificial Sequence
  Synthetic
ggaaatttcttcctagcagctctg

SEQ ID NO: 21249 - DNA, 22 bp, Artificial Sequence
  Synthetic
cgtttgcgattaccaagactgg

SEQ ID NO: 21250 - DNA, 25 bp, Artificial Sequence
  Synthetic
ggtgacttcgactggttatcaaaac

SEQ ID NO: 21251 - DNA, 25 bp, Artificial Sequence
  Synthetic
cagtgctaacctcactatcaaagaa

SEQ ID NO: 21252 - DNA, 25 bp, Artificial Sequence
  Synthetic
cggtacctcataagactcctgataa

SEQ ID NO: 21253 - DNA, 24 bp, Artificial Sequence
  Synthetic
tcaccaagtgaggtttcctctaac

SEQ ID NO: 21254 - DNA, 23 bp, Artificial Sequence
  Synthetic
acaggttttgttgctcttgtacg

SEQ ID NO: 21255 - DNA, 25 bp, Artificial Sequence
  Synthetic
ccccatgtaaaaacagttgaagaca

SEQ ID NO: 21256 - DNA, 25 bp, Artificial Sequence
  Synthetic
gcgaaatggaaaagaacttgttctt

SEQ ID NO: 21257 - DNA, 20 bp, Artificial Sequence
  Synthetic
aacctcaagtgtgctgccac

SEQ ID NO: 21258 - DNA, 20 bp, Artificial Sequence
  Synthetic
tgctgggcggtgtcactctc

SEQ ID NO: 21259 - DNA, 23 bp, Artificial Sequence
  Synthetic
caagaaacttctctcgttgagcc

SEQ ID NO: 21260 - DNA, 25 bp, Artificial Sequence
  Synthetic
tcagcaattgttgtatgctcaattt

SEQ ID NO: 21261 - DNA, 25 bp, Artificial Sequence
  Synthetic
gttggtattgggaagtctctaccta

SEQ ID NO: 21262 - DNA, 21 bp, Artificial Sequence
  Synthetic
ctaccaaggggatatcctcgc

SEQ ID NO: 21263 - DNA, 22 bp, Artificial Sequence
  Synthetic
cactggtgtctgagcaagagca

SEQ ID NO: 21264 - DNA, 25 bp, Artificial Sequence
  Synthetic
tggaactaatgactgttgtttgact

SEQ ID NO: 21265 - DNA, 23 bp, Artificial Sequence
  Synthetic
gttgcatggtagaagagattggt

SEQ ID NO: 21266 - DNA, 25 bp, Artificial Sequence
  Synthetic
ttgtctagaatctccatttgcatga

SEQ ID NO: 21267 - DNA, 25 bp, Artificial Sequence
  Synthetic
gcttgaacaacatctaaagggacat

SEQ ID NO: 21268 - DNA, 22 bp, Artificial Sequence
  Synthetic
tcgctgaagccagtaagatcta

SEQ ID NO: 21269 - DNA, 25 bp, Artificial Sequence
  Synthetic
gggattaacaaaaagaaaggacagc

SEQ ID NO: 21270 - DNA, 20 bp, Artificial Sequence
  Synthetic
gttggcaaaccgtctttggg

SEQ ID NO: 21271 - DNA, 22 bp, Artificial Sequence
  Synthetic
cagttctctgatggagagcaga

SEQ ID NO: 21272 - DNA, 22 bp, Artificial Sequence
  Synthetic
ggaatttccctgactttgtggt

SEQ ID NO: 21273 - DNA, 23 bp, Artificial Sequence
  Synthetic
tgtcaacttcatttggcaacgat

SEQ ID NO: 21274 - DNA, 25 bp, Artificial Sequence
  Synthetic
gcaatatccattcaggtgtttttcc

SEQ ID NO: 21275 - DNA, 25 bp, Artificial Sequence
  Synthetic
gctgcaaccaaaaatgacttttact

SEQ ID NO: 21276 - DNA, 25 bp, Artificial Sequence
  Synthetic
gcacttgctcttgttttattaaggt

SEQ ID NO: 21277 - DNA, 24 bp, Artificial Sequence
  Synthetic
cctctaccagttccaataccaaga

SEQ ID NO: 21278 - DNA, 24 bp, Artificial Sequence
  Synthetic
ggaagatcagaagcagggtgaatt

SEQ ID NO: 21279 - DNA, 20 bp, Artificial Sequence
  Synthetic
gtgtcaaagctggatgcacg

SEQ ID NO: 21280 - DNA, 25 bp, Artificial Sequence
  Synthetic
ctcctgctttgtcatgatcactatt

SEQ ID NO: 21281 - DNA, 25 bp, Artificial Sequence
  Synthetic
gggcacatcagataaatttccttgt

SEQ ID NO: 21282 - DNA, 25 bp, Artificial Sequence
  Synthetic
tgggaacagcaaaataattgtctgt

SEQ ID NO: 21283 - DNA, 25 bp, Artificial Sequence
  Synthetic
cataccgtacttaaggagtcacatc

SEQ ID NO: 21284 - DNA, 22 bp, Artificial Sequence
  Synthetic
gacccacctcaatttgtgttgt

SEQ ID NO: 21285 - DNA, 22 bp, Artificial Sequence
  Synthetic
gctcaaacccttcaattccagc

SEQ ID NO: 21286 - DNA, 20 bp, Artificial Sequence
  Synthetic
gggtgcttgaggaaggttcc

SEQ ID NO: 21287 - DNA, 20 bp, Artificial Sequence
  Synthetic
gactcccaccgcagtttcag

SEQ ID NO: 21288 - DNA, 25 bp, Artificial Sequence
  Synthetic
gggaaaatttagcctatagcctagg

SEQ ID NO: 21289 - DNA, 20 bp, Artificial Sequence
  Synthetic
acactgcaaggtgacgttcc

SEQ ID NO: 21290 - DNA, 25 bp, Artificial Sequence
  Synthetic
gcagtcctatcaactgattgaatca

SEQ ID NO: 21291 - DNA, 25 bp, Artificial Sequence
  Synthetic
atgccaaatcttgcatatgtatggt

SEQ ID NO: 21292 - DNA, 25 bp, Artificial Sequence
  Synthetic
accaaactctaattgtcaattccca

SEQ ID NO: 21293 - DNA, 25 bp, Artificial Sequence
  Synthetic
atgagtaattttgatcccaccaccc

SEQ ID NO: 21294 - DNA, 25 bp, Artificial Sequence
  Synthetic
gccaggaacaaaacaaaacagtaat

SEQ ID NO: 21295 - DNA, 25 bp, Artificial Sequence
  Synthetic
cgttagaaggagaggtcaatctgtt

SEQ ID NO: 21296 - DNA, 21 bp, Artificial Sequence
  Synthetic
tgttgtgatagctcccacagg

SEQ ID NO: 21297 - DNA, 25 bp, Artificial Sequence
  Synthetic
tgaaacaagttgaaaaaccacctca

SEQ ID NO: 21298 - DNA, 25 bp, Artificial Sequence
  Synthetic
gcttcctgcattctatatgactctc

SEQ ID NO: 21299 - DNA, 25 bp, Artificial Sequence
  Synthetic
aatccaaacctccttaaagctctag

SEQ ID NO: 21300 - DNA, 22 bp, Artificial Sequence
  Synthetic
cctcatctgttgtgttttggcc

SEQ ID NO: 21301 - DNA, 25 bp, Artificial Sequence
  Synthetic
caacccacttgtgattagtaacaga

SEQ ID NO: 21302 - DNA, 24 bp, Artificial Sequence
  Synthetic
caactccaaactgaaccaagttct

SEQ ID NO: 21303 - DNA, 22 bp, Artificial Sequence
  Synthetic
tgcccaagattgcattctgtat

SEQ ID NO: 21304 - DNA, 25 bp, Artificial Sequence
  Synthetic
gccattggatcaatttcagctttag

SEQ ID NO: 21305 - DNA, 25 bp, Artificial Sequence
  Synthetic
gcaataaaccattttcatccaacca

SEQ ID NO: 21306 - DNA, 25 bp, Artificial Sequence
  Synthetic
cctgtatggaaacctggattcaaat

SEQ ID NO: 21307 - DNA, 20 bp, Artificial Sequence
  Synthetic
ttgccgtgctgttgtcattt

SEQ ID NO: 21308 - DNA, 22 bp, Artificial Sequence
  Synthetic
tttgctgcgttcaacaaaaagg

SEQ ID NO: 21309 - DNA, 25 bp, Artificial Sequence
  Synthetic
cccccaaatgtacagtttgtcaaat

SEQ ID NO: 21310 - DNA, 24 bp, Artificial Sequence
  Synthetic
cgtattttgaagtaaccccgagga

SEQ ID NO: 21311 - DNA, 25 bp, Artificial Sequence
  Synthetic
ccattttctatgaaacccgcgattg

SEQ ID NO: 21312 - DNA, 23 bp, Artificial Sequence
  Synthetic
cgcgttgtatgaccagagatcta

SEQ ID NO: 21313 - DNA, 25 bp, Artificial Sequence
  Synthetic
aggatccaatctttgtatcctgact

SEQ ID NO: 21314 - DNA, 25 bp, Artificial Sequence
  Synthetic
tccatctcaacaatgaacagagatc

SEQ ID NO: 21315 - DNA, 25 bp, Artificial Sequence
  Synthetic
tcgtcccttgactgttttttcataa

SEQ ID NO: 21316 - DNA, 20 bp, Artificial Sequence
  Synthetic
caggtcaatgggcaggacaa

SEQ ID NO: 21317 - DNA, 25 bp, Artificial Sequence
  Synthetic
acacccttctttaggatcaatacct

SEQ ID NO: 21318 - DNA, 22 bp, Artificial Sequence
  Synthetic
gctaagctgctgcaactctttc

SEQ ID NO: 21319 - DNA, 25 bp, Artificial Sequence
  Synthetic
cccgacaacaagtcttattgctatt

SEQ ID NO: 21320 - DNA, 20 bp, Artificial Sequence
  Synthetic
tgaagccacccatgaccatg

SEQ ID NO: 21321 - DNA, 20 bp, Artificial Sequence
  Synthetic
atgtgccagctgccttacag

SEQ ID NO: 21322 - DNA, 20 bp, Artificial Sequence
  Synthetic
actgaaggtgcaacagggtc

SEQ ID NO: 21323 - DNA, 20 bp, Artificial Sequence
  Synthetic
ttgagtgccaacctgtgctc

SEQ ID NO: 21324 - DNA, 23 bp, Artificial Sequence
  Synthetic
accacaatgatgacatctgcaaa

SEQ ID NO: 21325 - DNA, 22 bp, Artificial Sequence
  Synthetic
cggtaagtgtaccctaaaggcc

SEQ ID NO: 21326 - DNA, 20 bp, Artificial Sequence
  Synthetic
ccaatgttcccccaagcagg

SEQ ID NO: 21327 - DNA, 25 bp, Artificial Sequence
  Synthetic
cctctacaaaacatatgtctggcat

SEQ ID NO: 21328 - DNA, 25 bp, Artificial Sequence
  Synthetic
caatgtcacagtagttaccaggatg

SEQ ID NO: 21329 - DNA, 21 bp, Artificial Sequence
  Synthetic
cagcagaaagccggattgaat

SEQ ID NO: 21330 - DNA, 22 bp, Artificial Sequence
  Synthetic
tgacacaaacatgcaaccatgc

SEQ ID NO: 21331 - DNA, 22 bp, Artificial Sequence
  Synthetic
tcgaggataacaggaacactcc

SEQ ID NO: 21332 - DNA, 20 bp, Artificial Sequence
  Synthetic
tcccatccacacgtcatctc

SEQ ID NO: 21333 - DNA, 18 bp, Artificial Sequence
  Synthetic
gctgctccagcgtgtcgt

SEQ ID NO: 21334 - DNA, 21 bp, Artificial Sequence
  Synthetic
gctctcccactccaacacggg

SEQ ID NO: 21335 - DNA, 22 bp, Artificial Sequence
  Synthetic
tgcggagatgtggagagaaacg

SEQ ID NO: 21336 - DNA, 22 bp, Artificial Sequence
  Synthetic
acgtatacgaagggtggctcgt

SEQ ID NO: 21337 - DNA, 18 bp, Artificial Sequence
  Synthetic
tccgttgtgctcgacgcc

SEQ ID NO: 21338 - DNA, 22 bp, Artificial Sequence
  Synthetic
gcgtatcctcgtctgccctctg

SEQ ID NO: 21339 - DNA, 22 bp, Artificial Sequence
  Synthetic
gcggggctttctttgagttcgc

SEQ ID NO: 21340 - DNA, 19 bp, Artificial Sequence
  Synthetic
tctcgccgaggacgcgttc

SEQ ID NO: 21341 - DNA, 21 bp, Artificial Sequence
  Synthetic
ataccattcccaaccatccct

SEQ ID NO: 21342 - DNA, 20 bp, Artificial Sequence
  Synthetic
tggttaagctgggcgattgt

SEQ ID NO: 21343 - DNA, 20 bp, Artificial Sequence
  Synthetic
tgtgagtcaaaacggaggct

SEQ ID NO: 21344 - DNA, 21 bp, Artificial Sequence
  Synthetic
ccatttcccacaaagtctgcc

SEQ ID NO: 21345 - DNA, 22 bp, Artificial Sequence
  Synthetic
tgcaagtttgtaaggcgtgttt

SEQ ID NO: 21346 - DNA, 25 bp, Artificial Sequence
  Synthetic
cctctatgttgcgaaagtatgcttt

SEQ ID NO: 21347 - DNA, 23 bp, Artificial Sequence
  Synthetic
tctgcggtaaacctgtactagat

SEQ ID NO: 21348 - DNA, 20 bp, Artificial Sequence
  Synthetic
cagtgcgacacaactaacga

SEQ ID NO: 21349 - DNA, 21 bp, Artificial Sequence
  Synthetic
cgccccggctttataacattt

SEQ ID NO: 21350 - DNA, 21 bp, Artificial Sequence
  Synthetic
gttgctgtccggttgtaacat

SEQ ID NO: 21351 - DNA, 20 bp, Artificial Sequence
  Synthetic
ttttccccccctgatcggag

SEQ ID NO: 21352 - DNA, 20 bp, Artificial Sequence
  Synthetic
accctcgggaaggttctctt

SEQ ID NO: 21353 - DNA, 20 bp, Artificial Sequence
  Synthetic
atcgcgcaatcgaaccattc

SEQ ID NO: 21354 - DNA, 23 bp, Artificial Sequence
  Synthetic
gcaatgtgatcaacgacgtttta

SEQ ID NO: 21355 - DNA, 24 bp, Artificial Sequence
  Synthetic
caaagcaattcctctatcgcagaa

SEQ ID NO: 21356 - DNA, 22 bp, Artificial Sequence
  Synthetic
cctgtaaactggtctgcttgca

SEQ ID NO: 21357 - DNA, 22 bp, Artificial Sequence
  Synthetic
aatctctaacccgtcatctcca

SEQ ID NO: 21358 - DNA, 25 bp, Artificial Sequence
  Synthetic
cacaaatcatcgtcgaacaataagg

SEQ ID NO: 21359 - DNA, 22 bp, Artificial Sequence
  Synthetic
gattccgccgtactgaaaaaac

SEQ ID NO: 21360 - DNA, 21 bp, Artificial Sequence
  Synthetic
ggcagaacagagaccccccct

SEQ ID NO: 21361 - DNA, 19 bp, Artificial Sequence
  Synthetic
cgcgaagtgttccgcgacg

SEQ ID NO: 21362 - DNA, 20 bp, Artificial Sequence
  Synthetic
gggcgttcgttccgcacata

SEQ ID NO: 21363 - DNA, 19 bp, Artificial Sequence
  Synthetic
gcgatctccacctcgcgtg

SEQ ID NO: 21364 - DNA, 21 bp, Artificial Sequence
  Synthetic
aggaaaacgagtacgcgcacc

SEQ ID NO: 21365 - DNA, 24 bp, Artificial Sequence
  Synthetic
ccgacttcgataaacctcttggtt

SEQ ID NO: 21366 - DNA, 25 bp, Artificial Sequence
  Synthetic
tcctttttcaatttcttcttcccct

SEQ ID NO: 21367 - DNA, 22 bp, Artificial Sequence
  Synthetic
tggaacttctggtagctcatgg

SEQ ID NO: 21368 - DNA, 20 bp, Artificial Sequence
  Synthetic
catctcctgtggcccacttg

SEQ ID NO: 21369 - DNA, 25 bp, Artificial Sequence
  Synthetic
agggagccaattttaaagacagtat

SEQ ID NO: 21370 - DNA, 25 bp, Artificial Sequence
  Synthetic
tgagtcccaatactgaaagttttgg

SEQ ID NO: 21371 - DNA, 25 bp, Artificial Sequence
  Synthetic
gaaggttaacagagtgtgttactgt

SEQ ID NO: 21372 - DNA, 20 bp, Artificial Sequence
  Synthetic
tcctgggtaacacgttccat

SEQ ID NO: 21373 - DNA, 23 bp, Artificial Sequence
  Synthetic
agagactttgttggtcagcacta

SEQ ID NO: 21374 - DNA, 25 bp, Artificial Sequence
  Synthetic
cgtggactggtgtatctgaaatgat

SEQ ID NO: 21375 - DNA, 20 bp, Artificial Sequence
  Synthetic
tctaccatccctgtccaccc

SEQ ID NO: 21376 - DNA, 19 bp, Artificial Sequence
  Synthetic
agcacgagccaaggggacg

SEQ ID NO: 21377 - DNA, 19 bp, Artificial Sequence
  Synthetic
aggtgcgtacacggccacc

SEQ ID NO: 21378 - DNA, 20 bp, Artificial Sequence
  Synthetic
tcgttcaggtcaagcgccag

SEQ ID NO: 21379 - DNA, 21 bp, Artificial Sequence
  Synthetic
gcaggagtcggtcgatcgtct

SEQ ID NO: 21380 - DNA, 19 bp, Artificial Sequence
  Synthetic
gccggcgagcgtttgcttg

SEQ ID NO: 21381 - DNA, 20 bp, Artificial Sequence
  Synthetic
ctcatacgccacggggtccc

SEQ ID NO: 21382 - DNA, 19 bp, Artificial Sequence
  Synthetic
gcctccgctgcctatcgga

SEQ ID NO: 21383 - DNA, 20 bp, Artificial Sequence
  Synthetic
ggagaagaggtggcggctca

SEQ ID NO: 21384 - DNA, 19 bp, Artificial Sequence
  Synthetic
ttgcgtcgcttcgagcccg

SEQ ID NO: 21385 - DNA, 21 bp, Artificial Sequence
  Synthetic
gccaagctgtctcgcggatac

SEQ ID NO: 21386 - DNA, 20 bp, Artificial Sequence
  Synthetic
gtatgacggccccagattcg

SEQ ID NO: 21387 - DNA, 21 bp, Artificial Sequence
  Synthetic
atgagaacagctgctctctgt

SEQ ID NO: 21388 - DNA, 22 bp, Artificial Sequence
  Synthetic
cgtctgactgtttgcgattctg

SEQ ID NO: 21389 - DNA, 20 bp, Artificial Sequence
  Synthetic
cgtgcctgctttttagcgtg

SEQ ID NO: 21390 - DNA, 21 bp, Artificial Sequence
  Synthetic
tctcggattgcgtcgttatga

SEQ ID NO: 21391 - DNA, 23 bp, Artificial Sequence
  Synthetic
gcccagagagattgcaactactt

SEQ ID NO: 21392 - DNA, 20 bp, Artificial Sequence
  Synthetic
cggcccattggaacgaacat

SEQ ID NO: 21393 - DNA, 25 bp, Artificial Sequence
  Synthetic
cggtatacgcgtttagtagaatgct

SEQ ID NO: 21394 - DNA, 20 bp, Artificial Sequence
  Synthetic
gcgtgtttagtgggtgcagt

SEQ ID NO: 21395 - DNA, 24 bp, Artificial Sequence
  Synthetic
tcagacctctcatcgttcacataa

SEQ ID NO: 21396 - DNA, 22 bp, Artificial Sequence
  Synthetic
tggaagtccgacagatgcaata

SEQ ID NO: 21397 - DNA, 24 bp, Artificial Sequence
  Synthetic
agtcttagtgaggactgactttga

SEQ ID NO: 21398 - DNA, 24 bp, Artificial Sequence
  Synthetic
tcagacatgggaagcaagatacaa

SEQ ID NO: 21399 - DNA, 21 bp, Artificial Sequence
  Synthetic
acacaaggcaattttagccct

SEQ ID NO: 21400 - DNA, 21 bp, Artificial Sequence
  Synthetic
cgcccatatgctaaacgaacg

SEQ ID NO: 21401 - DNA, 25 bp, Artificial Sequence
  Synthetic
ggactagtgttcgcattagagaatc

SEQ ID NO: 21402 - DNA, 21 bp, Artificial Sequence
  Synthetic
cggcctggaatacaagaccat

SEQ ID NO: 21403 - DNA, 22 bp, Artificial Sequence
  Synthetic
accatgacctcgagaatctctc

SEQ ID NO: 21404 - DNA, 22 bp, Artificial Sequence
  Synthetic
agacgttcgagacctgttcaaa

SEQ ID NO: 21405 - DNA, 23 bp, Artificial Sequence
  Synthetic
acaaccattgagtgagaatacgc

SEQ ID NO: 21406 - DNA, 19 bp, Artificial Sequence
  Synthetic
cgagccaaggggacgatcc

SEQ ID NO: 21407 - DNA, 21 bp, Artificial Sequence
  Synthetic
cgtctccgatccgtcaggacc

SEQ ID NO: 21408 - DNA, 21 bp, Artificial Sequence
  Synthetic
tctcgctccgcttggttttcc

SEQ ID NO: 21409 - DNA, 21 bp, Artificial Sequence
  Synthetic
gtctgcggaccccgatgtaaa

SEQ ID NO: 21410 - DNA, 20 bp, Artificial Sequence
  Synthetic
cctcgccttgcaaactccgt

SEQ ID NO: 21411 - DNA, 25 bp, Artificial Sequence
  Synthetic
ccctcttgagcttcctatacagttt

SEQ ID NO: 21412 - DNA, 23 bp, Artificial Sequence
  Synthetic
agcgacggtaaatgcatttgaaa

SEQ ID NO: 21413 - DNA, 22 bp, Artificial Sequence
  Synthetic
ccgatcaaggaatggggcatca

SEQ ID NO: 21414 - DNA, 25 bp, Artificial Sequence
  Synthetic
ggcctattatcttttgcctaggcat

SEQ ID NO: 21415 - DNA, 25 bp, Artificial Sequence
  Synthetic
agtttctccaagcgaatctctgtat

SEQ ID NO: 21416 - DNA, 23 bp, Artificial Sequence
  Synthetic
ccagatcaggttttttgggttgg

SEQ ID NO: 21417 - DNA, 24 bp, Artificial Sequence
  Synthetic
tcttcttccactgttggtgcatat

SEQ ID NO: 21418 - DNA, 21 bp, Artificial Sequence
  Synthetic
ggttgctcacgctgtctattg

SEQ ID NO: 21419 - DNA, 21 bp, Artificial Sequence
  Synthetic
tctgtacctgaatcgtctgcc

SEQ ID NO: 21420 - DNA, 25 bp, Artificial Sequence
  Synthetic
cggactaagttgctgtataacatca

SEQ ID NO: 21421 - DNA, 22 bp, Artificial Sequence
  Synthetic
tgccgcactactgtttctctat

SEQ ID NO: 21422 - DNA, 22 bp, Artificial Sequence
  Synthetic
cccattatcatatgcccactgc

SEQ ID NO: 21423 - DNA, 20 bp, Artificial Sequence
  Synthetic
tcctggcacaaatctaggcg

SEQ ID NO: 21424 - DNA, 25 bp, Artificial Sequence
  Synthetic
cgtccatggctctaagttatattca

SEQ ID NO: 21425 - DNA, 24 bp, Artificial Sequence
  Synthetic
tgtttccagtgtccacgtattttc

SEQ ID NO: 21426 - DNA, 25 bp, Artificial Sequence
  Synthetic
ggtgtgtggtagatgtaacatgtac

SEQ ID NO: 21427 - DNA, 22 bp, Artificial Sequence
  Synthetic
cacaggcaaatatggtgtacct

SEQ ID NO: 21428 - DNA, 25 bp, Artificial Sequence
  Synthetic
ctctgtattgatgtccagacacttt

SEQ ID NO: 21429 - DNA, 25 bp, Artificial Sequence
  Synthetic
acccataccccaatattctccaata

SEQ ID NO: 21430 - DNA, 25 bp, Artificial Sequence
  Synthetic
cacacatacacaatcatcgttttgt

SEQ ID NO: 21431 - DNA, 25 bp, Artificial Sequence
  Synthetic
agtgtaattaaaggtgtggcaacct

SEQ ID NO: 21432 - DNA, 25 bp, Artificial Sequence
  Synthetic
tggtcgctcttctgtattttcaaat

SEQ ID NO: 21433 - DNA, 21 bp, Artificial Sequence
  Synthetic
gccccgtacactgaacaattg

SEQ ID NO: 21434 - DNA, 25 bp, Artificial Sequence
  Synthetic
caggtcaatctcagtttgtggtata

SEQ ID NO: 21435 - DNA, 24 bp, Artificial Sequence
  Synthetic
cgttttaatttctgcagcgtctgt

SEQ ID NO: 21436 - DNA, 23 bp, Artificial Sequence
  Synthetic
cacatccatatcacttcctgacc

SEQ ID NO: 21437 - DNA, 25 bp, Artificial Sequence
  Synthetic
ccactgcaccattttagatagttca

SEQ ID NO: 21438 - DNA, 22 bp, Artificial Sequence
  Synthetic
tgtactattggcttccagtccc

SEQ ID NO: 21439 - DNA, 25 bp, Artificial Sequence
  Synthetic
ggaccatgtcctttcaaaaaaacat

SEQ ID NO: 21440 - DNA, 22 bp, Artificial Sequence
  Synthetic
acgttttatggccgtcatgtat

SEQ ID NO: 21441 - DNA, 20 bp, Artificial Sequence
  Synthetic
cgggctctgtggttctggga

SEQ ID NO: 21442 - DNA, 25 bp, Artificial Sequence
  Synthetic
gcacagtttacatttgtccaatgat

SEQ ID NO: 21443 - DNA, 25 bp, Artificial Sequence
  Synthetic
gcaaaaacacaaaactaacacacaa

SEQ ID NO: 21444 - DNA, 20 bp, Artificial Sequence
  Synthetic
tacctcaccagtttggggga

SEQ ID NO: 21445 - DNA, 20 bp, Artificial Sequence
  Synthetic
atcaggatcaggtgccacac

SEQ ID NO: 21446 - DNA, 21 bp, Artificial Sequence
  Synthetic
gccataacgcaaatgtggagc

SEQ ID NO: 21447 - DNA, 22 bp, Artificial Sequence
  Synthetic
tgtcctctaagctagtggcaac

SEQ ID NO: 21448 - DNA, 23 bp, Artificial Sequence
  Synthetic
gtaaaagcatagttggcagccta

SEQ ID NO: 21449 - DNA, 20 bp, Artificial Sequence
  Synthetic
gaggggagggaaaaactggc

SEQ ID NO: 21450 - DNA, 22 bp, Artificial Sequence
  Synthetic
aggctggaccactgttaccagt

SEQ ID NO: 21451 - DNA, 22 bp, Artificial Sequence
  Synthetic
gcctcaacagatggtgattgta

SEQ ID NO: 21452 - DNA, 23 bp, Artificial Sequence
  Synthetic
caccagaaaattcagcacacatg

SEQ ID NO: 21453 - DNA, 25 bp, Artificial Sequence
  Synthetic
caaaggctgtgatgtaatgtctact

SEQ ID NO: 21454 - DNA, 21 bp, Artificial Sequence
  Synthetic
tccaacatcccacacaacatg

SEQ ID NO: 21455 - DNA, 24 bp, Artificial Sequence
  Synthetic
tgtcctgtccattatagtcagtgt

SEQ ID NO: 21456 - DNA, 25 bp, Artificial Sequence
  Synthetic
ccagaatattgacatattggtgcct

SEQ ID NO: 21457 - DNA, 25 bp, Artificial Sequence
  Synthetic
cagcacagtgaaattgtctaagatc

SEQ ID NO: 21458 - DNA, 22 bp, Artificial Sequence
  Synthetic
tggtgaaccattgcaaccaatt

SEQ ID NO: 21459 - DNA, 25 bp, Artificial Sequence
  Synthetic
tgtctccttcttttgtcttcttcca

SEQ ID NO: 21460 - DNA, 25 bp, Artificial Sequence
  Synthetic
cctcagcttgtacttacctggataa

SEQ ID NO: 21461 - DNA, 25 bp, Artificial Sequence
  Synthetic
agcaacgaatagtaatgctctgtaa

SEQ ID NO: 21462 - DNA, 25 bp, Artificial Sequence
  Synthetic
tgaaccatctgtactttcatcgaaa

SEQ ID NO: 21463 - DNA, 25 bp, Artificial Sequence
  Synthetic
tgcctcaattacttcttctaaagca

SEQ ID NO: 21464 - DNA, 25 bp, Artificial Sequence
  Synthetic
accatttgactgcaatctctaacat

SEQ ID NO: 21465 - DNA, 25 bp, Artificial Sequence
  Synthetic
ggtagtttaatttgttgtgggactc

SEQ ID NO: 21466 - DNA, 25 bp, Artificial Sequence
  Synthetic
ctcagaggcatactgtgatttactt

SEQ ID NO: 21467 - DNA, 22 bp, Artificial Sequence
  Synthetic
ggcctcctctcaggggaattga

SEQ ID NO: 21468 - DNA, 24 bp, Artificial Sequence
  Synthetic
cacgtttatttctacctgctctgt

SEQ ID NO: 21469 - DNA, 21 bp, Artificial Sequence
  Synthetic
tggattaccccctacaccacc

SEQ ID NO: 21470 - DNA, 20 bp, Artificial Sequence
  Synthetic
agtctgcatcaggagcagct

SEQ ID NO: 21471 - DNA, 25 bp, Artificial Sequence
  Synthetic
gctctgtttgtgatggtataatggt

SEQ ID NO: 21472 - DNA, 25 bp, Artificial Sequence
  Synthetic
tgggtatgtgttaggattttcaaca

SEQ ID NO: 21473 - DNA, 25 bp, Artificial Sequence
  Synthetic
gggaagcaagtttattatcctgctt

SEQ ID NO: 21474 - DNA, 25 bp, Artificial Sequence
  Synthetic
gcgtaagggtcagttttttccttat

SEQ ID NO: 21475 - DNA, 19 bp, Artificial Sequence
  Synthetic
actgtcgccagtggggtgc

SEQ ID NO: 21476 - DNA, 25 bp, Artificial Sequence
  Synthetic
acactatttgtcaccataagcaagt

SEQ ID NO: 21477 - DNA, 23 bp, Artificial Sequence
  Synthetic
tgcttcaacagttggtgacatta

SEQ ID NO: 21478 - DNA, 21 bp, Artificial Sequence
  Synthetic
acagattttgcccgaagatgc

SEQ ID NO: 21479 - DNA, 25 bp, Artificial Sequence
  Synthetic
agggtcccattacaattaaagaagg

SEQ ID NO: 21480 - DNA, 20 bp, Artificial Sequence
  Synthetic
cttggcagccgtgttggtaa

SEQ ID NO: 21481 - DNA, 25 bp, Artificial Sequence
  Synthetic
gtggtagaaaagagagtgttgctaa

SEQ ID NO: 21482 - DNA, 24 bp, Artificial Sequence
  Synthetic
accttgtctatgtagtcctcaact

SEQ ID NO: 21483 - DNA, 25 bp, Artificial Sequence
  Synthetic
catgctcttggaagtttatatccca

SEQ ID NO: 21484 - DNA, 25 bp, Artificial Sequence
  Synthetic
tctggggacatcataaccatcataa

SEQ ID NO: 21485 - DNA, 25 bp, Artificial Sequence
  Synthetic
tcagtcctgtggttaataaagtgtt

SEQ ID NO: 21486 - DNA, 25 bp, Artificial Sequence
  Synthetic
gtcgtgtgcttctaatttaactggt

SEQ ID NO: 21487 - DNA, 23 bp, Artificial Sequence
  Synthetic
gctaccaaaggcactccctaatt

SEQ ID NO: 21488 - DNA, 25 bp, Artificial Sequence
  Synthetic
ggtctagtgatgtttaaccactgac

SEQ ID NO: 21489 - DNA, 25 bp, Artificial Sequence
  Synthetic
acttcttgttgatcatacccatcaa

SEQ ID NO: 21490 - DNA, 25 bp, Artificial Sequence
  Synthetic
ggtacccttgcaagatcttaagatc

SEQ ID NO: 21491 - DNA, 23 bp, Artificial Sequence
  Synthetic
ccaagccctgaaatatagctgtt

SEQ ID NO: 21492 - DNA, 23 bp, Artificial Sequence
  Synthetic
actcaggtttcttcttgggtgta

SEQ ID NO: 21493 - DNA, 24 bp, Artificial Sequence
  Synthetic
cctatgatattacctgtgttggcc

SEQ ID NO: 21494 - DNA, 22 bp, Artificial Sequence
  Synthetic
gtgaggtctacttccaatcgtg

SEQ ID NO: 21495 - DNA, 25 bp, Artificial Sequence
  Synthetic
ccttgtgtctttagtagcgttgttt

SEQ ID NO: 21496 - DNA, 23 bp, Artificial Sequence
  Synthetic
gcatgcatttgtgaccaaaacac

SEQ ID NO: 21497 - DNA, 25 bp, Artificial Sequence
  Synthetic
tgcattgagtaaacaggatgtatca

SEQ ID NO: 21498 - DNA, 25 bp, Artificial Sequence
  Synthetic
cttctcttgtcttcctgatgtgtat

SEQ ID NO: 21499 - DNA, 20 bp, Artificial Sequence
  Synthetic
ttgtcggcccattcctgttc

SEQ ID NO: 21500 - DNA, 25 bp, Artificial Sequence
  Synthetic
ggagctcttctttcttctcttttgt

SEQ ID NO: 21501 - DNA, 25 bp, Artificial Sequence
  Synthetic
tgtgaattcttcatacccctcatgt

SEQ ID NO: 21502 - DNA, 21 bp, Artificial Sequence
  Synthetic
cctcaggagttgatgcatggg

SEQ ID NO: 21503 - DNA, 25 bp, Artificial Sequence
  Synthetic
tgtttcactaacctcttcaggagat

SEQ ID NO: 21504 - DNA, 20 bp, Artificial Sequence
  Synthetic
gacttgcttccgggctaggc

SEQ ID NO: 21505 - DNA, 21 bp, Artificial Sequence
  Synthetic
ggatttaacacggacgcggaa

SEQ ID NO: 21506 - DNA, 20 bp, Artificial Sequence
  Synthetic
cttcgtttgggtcgttctcc

SEQ ID NO: 21507 - DNA, 22 bp, Artificial Sequence
  Synthetic
ggtctgttcccggtgatattga

SEQ ID NO: 21508 - DNA, 22 bp, Artificial Sequence
  Synthetic
cccacgtcctgcaacaaatcct

SEQ ID NO: 21509 - DNA, 20 bp, Artificial Sequence
  Synthetic
gtctccaaaacccggagcac

SEQ ID NO: 21510 - DNA, 20 bp, Artificial Sequence
  Synthetic
tctgtccccgctgcctcatc

SEQ ID NO: 21511 - DNA, 20 bp, Artificial Sequence
  Synthetic
cttgcaatctgggcgcaggg

SEQ ID NO: 21512 - DNA, 22 bp, Artificial Sequence
  Synthetic
cggtacagactcccaggtagca

SEQ ID NO: 21513 - DNA, 21 bp, Artificial Sequence
  Synthetic
gatgccgttcaggttcaccct

SEQ ID NO: 21514 - DNA, 19 bp, Artificial Sequence
  Synthetic
tgctggaagcactgggcgc

SEQ ID NO: 21515 - DNA, 20 bp, Artificial Sequence
  Synthetic
cacctctaccgggtcctgga

SEQ ID NO: 21516 - DNA, 20 bp, Artificial Sequence
  Synthetic
tgcacaacatgaacccccgg

SEQ ID NO: 21517 - DNA, 19 bp, Artificial Sequence
  Synthetic
aaccgggtgcggcaagtcc

SEQ ID NO: 21518 - DNA, 22 bp, Artificial Sequence
  Synthetic
ccccgaaacgaggaagtctgct

SEQ ID NO: 21519 - DNA, 21 bp, Artificial Sequence
  Synthetic
ctgtacgccctgcaatccctc

SEQ ID NO: 21520 - DNA, 22 bp, Artificial Sequence
  Synthetic
gccttcgtctcagagtggtccg

SEQ ID NO: 21521 - DNA, 21 bp, Artificial Sequence
  Synthetic
tgacaacctgagtgccgaggt

SEQ ID NO: 21522 - DNA, 19 bp, Artificial Sequence
  Synthetic
cgcgtcaggattgtgcccg

SEQ ID NO: 21523 - DNA, 19 bp, Artificial Sequence
  Synthetic
tacgtgcgcgccagcatcc

SEQ ID NO: 21524 - DNA, 20 bp, Artificial Sequence
  Synthetic
cgctcaagcttacgccctcc

SEQ ID NO: 21525 - DNA, 22 bp, Artificial Sequence
  Synthetic
cgcccgcgattcatggaactat

SEQ ID NO: 21526 - DNA, 19 bp, Artificial Sequence
  Synthetic
ccccaagctggtcgccctt

SEQ ID NO: 21527 - DNA, 22 bp, Artificial Sequence
  Synthetic
cgccactcctgaagttcctcct

SEQ ID NO: 21528 - DNA, 20 bp, Artificial Sequence
  Synthetic
gttcaaagtcacggggcccg

SEQ ID NO: 21529 - DNA, 19 bp, Artificial Sequence
  Synthetic
cgccgtctttacgcggcac

SEQ ID NO: 21530 - DNA, 20 bp, Artificial Sequence
  Synthetic
ccaccgcccccagaggaaat

SEQ ID NO: 21531 - DNA, 21 bp, Artificial Sequence
  Synthetic
cggtcgatcttgacgcgctta

SEQ ID NO: 21532 - DNA, 19 bp, Artificial Sequence
  Synthetic
gctcaggggcgttggggtt

SEQ ID NO: 21533 - DNA, 19 bp, Artificial Sequence
  Synthetic
atgctcgaggacctggccc

SEQ ID NO: 21534 - DNA, 19 bp, Artificial Sequence
  Synthetic
ctcgaaccggggtacacgc

SEQ ID NO: 21535 - DNA, 19 bp, Artificial Sequence
  Synthetic
aaaagggggctcgctcgcc

SEQ ID NO: 21536 - DNA, 22 bp, Artificial Sequence
  Synthetic
ggtgcgcacgtggttgttgaaa

SEQ ID NO: 21537 - DNA, 22 bp, Artificial Sequence
  Synthetic
gggcacgtacggcgtcttgtaa

SEQ ID NO: 21538 - DNA, 22 bp, Artificial Sequence
  Synthetic
gggcttgctgctgggacatcta

SEQ ID NO: 21539 - DNA, 19 bp, Artificial Sequence
  Synthetic
gctgttgtagcggcccacg

SEQ ID NO: 21540 - DNA, 22 bp, Artificial Sequence
  Synthetic
cccgcgtaggttcttgaaagcc

SEQ ID NO: 21541 - DNA, 22 bp, Artificial Sequence
  Synthetic
cgtactgcggcggaattttctg

SEQ ID NO: 21542 - DNA, 21 bp, Artificial Sequence
  Synthetic
cgggagccaatgcgggttcaa

SEQ ID NO: 21543 - DNA, 22 bp, Artificial Sequence
  Synthetic
agcgtaggtcttccagcggttt

SEQ ID NO: 21544 - DNA, 21 bp, Artificial Sequence
  Synthetic
catcacgctctcgtacgaggg

SEQ ID NO: 21545 - DNA, 22 bp, Artificial Sequence
  Synthetic
ggtcccagcccagcttgaaatt

SEQ ID NO: 21546 - DNA, 25 bp, Artificial Sequence
  Synthetic
aggagcattaactttagcagcattt

SEQ ID NO: 21547 - DNA, 21 bp, Artificial Sequence
  Synthetic
gctgggtggagcgaaaggtga

SEQ ID NO: 21548 - DNA, 20 bp, Artificial Sequence
  Synthetic
tgcccagggccttgtagacg

SEQ ID NO: 21549 - DNA, 22 bp, Artificial Sequence
  Synthetic
gcgtcagcgactacggagtcaa

SEQ ID NO: 21550 - DNA, 19 bp, Artificial Sequence
  Synthetic
tttccgcgcctgggtctgg

SEQ ID NO: 21551 - DNA, 19 bp, Artificial Sequence
  Synthetic
caacacgcgctgcaccctg

SEQ ID NO: 21552 - DNA, 19 bp, Artificial Sequence
  Synthetic
ggtgtccagcacgtcctcc

SEQ ID NO: 21553 - DNA, 19 bp, Artificial Sequence
  Synthetic
aggctcggtggccgtggat

SEQ ID NO: 21554 - DNA, 22 bp, Artificial Sequence
  Synthetic
cggcgggatcttcctcggtaat

SEQ ID NO: 21555 - DNA, 21 bp, Artificial Sequence
  Synthetic
cgttccaggtgcccatgaacg

SEQ ID NO: 21556 - DNA, 22 bp, Artificial Sequence
  Synthetic
gcatcttccatctccaccaccg

SEQ ID NO: 21557 - DNA, 19 bp, Artificial Sequence
  Synthetic
tgccagttctgggcctggc

SEQ ID NO: 21558 - DNA, 22 bp, Artificial Sequence
  Synthetic
ggagccaccgtggggtttctaa

SEQ ID NO: 21559 - DNA, 22 bp, Artificial Sequence
  Synthetic
aattgttatgtcagcgcctccc

SEQ ID NO: 21560 - DNA, 23 bp, Artificial Sequence
  Synthetic
acccagagaatctagcaaaagct

SEQ ID NO: 21561 - DNA, 20 bp, Artificial Sequence
  Synthetic
tggtgttggtgggcagtgtg

SEQ ID NO: 21562 - DNA, 20 bp, Artificial Sequence
  Synthetic
gttgcccagggaactctgca

SEQ ID NO: 21563 - DNA, 22 bp, Artificial Sequence
  Synthetic
acgctgcgcttaatctcgaact

SEQ ID NO: 21564 - DNA, 19 bp, Artificial Sequence
  Synthetic
cctggcgcatggtaggtgc

SEQ ID NO: 21565 - DNA, 20 bp, Artificial Sequence
  Synthetic
gtagacggcctcgatgacgc

SEQ ID NO: 21566 - DNA, 19 bp, Artificial Sequence
  Synthetic
tctgcttaagccggcggtc

SEQ ID NO: 21567 - DNA, 22 bp, Artificial Sequence
  Synthetic
gcacctgtggcgattgtagcat

SEQ ID NO: 21568 - DNA, 22 bp, Artificial Sequence
  Synthetic
ccccgagattgctgttcccaaa

SEQ ID NO: 21569 - DNA, 20 bp, Artificial Sequence
  Synthetic
tacccgaatatgcagcgcgg

SEQ ID NO: 21570 - DNA, 21 bp, Artificial Sequence
  Synthetic
gctcaagtgtctgcacgggac

SEQ ID NO: 21571 - DNA, 20 bp, Artificial Sequence
  Synthetic
tgctgatggaacgctaccgc

SEQ ID NO: 21572 - DNA, 22 bp, Artificial Sequence
  Synthetic
cgaggaggacgtggttccactg

SEQ ID NO: 21573 - DNA, 22 bp, Artificial Sequence
  Synthetic
tcctgtgggggttctagacgag

SEQ ID NO: 21574 - DNA, 20 bp, Artificial Sequence
  Synthetic
tcgacgctgcgcttaagcac

SEQ ID NO: 21575 - DNA, 22 bp, Artificial Sequence
  Synthetic
tgtagtgcagggtctcctcgac

SEQ ID NO: 21576 - DNA, 22 bp, Artificial Sequence
  Synthetic
gcccgtccacaacgttttaagg

SEQ ID NO: 21577 - DNA, 19 bp, Artificial Sequence
  Synthetic
actcaagcagcccctcgcc

SEQ ID NO: 21578 - DNA, 21 bp, Artificial Sequence
  Synthetic
gatcgtgccctgggtgatgac

SEQ ID NO: 21579 - DNA, 20 bp, Artificial Sequence
  Synthetic
acgaggaggcttgaccggag

SEQ ID NO: 21580 - DNA, 22 bp, Artificial Sequence
  Synthetic
gctgacctcgactctgctgaaa

SEQ ID NO: 21581 - DNA, 22 bp, Artificial Sequence
  Synthetic
gccagctggacacctgagttag

SEQ ID NO: 21582 - DNA, 20 bp, Artificial Sequence
  Synthetic
ggcctggggagcctgaaaag

SEQ ID NO: 21583 - DNA, 25 bp, Artificial Sequence
  Synthetic
tccagagtagagtcttatttcagct

SEQ ID NO: 21584 - DNA, 25 bp, Artificial Sequence
  Synthetic
caccagggaaaggataattagcaaa

SEQ ID NO: 21585 - DNA, 24 bp, Artificial Sequence
  Synthetic
acctgacataaagcaggccataat

SEQ ID NO: 21586 - DNA, 23 bp, Artificial Sequence
  Synthetic
agctatgcttgatttgtgggttt

SEQ ID NO: 21587 - DNA, 25 bp, Artificial Sequence
  Synthetic
ctttgagcagtattaccttgtccaa

SEQ ID NO: 21588 - DNA, 25 bp, Artificial Sequence
  Synthetic
gaggttctttggtatgtggcttaat

SEQ ID NO: 21589 - DNA, 25 bp, Artificial Sequence
  Synthetic
acaaagtacaaaagaaccacgagaa

SEQ ID NO: 21590 - DNA, 21 bp, Artificial Sequence
  Synthetic
gcagacaatgctgcagacgca

SEQ ID NO: 21591 - DNA, 25 bp, Artificial Sequence
  Synthetic
cgagatcaaaacaggggtagatcat

SEQ ID NO: 21592 - DNA, 22 bp, Artificial Sequence
  Synthetic
cccgtctgctgggtgatgacta

SEQ ID NO: 21593 - DNA, 20 bp, Artificial Sequence
  Synthetic
tgagtgacagaaccccaggg

SEQ ID NO: 21594 - DNA, 25 bp, Artificial Sequence
  Synthetic
aaatgctaccaagtctccattatca

SEQ ID NO: 21595 - DNA, 25 bp, Artificial Sequence
  Synthetic
gccaaggtagatgtttccataaact

SEQ ID NO: 21596 - DNA, 21 bp, Artificial Sequence
  Synthetic
aaggccacccgtactgagaga

SEQ ID NO: 21597 - DNA, 25 bp, Artificial Sequence
  Synthetic
tgggctgctgaataacataatgatt

SEQ ID NO: 21598 - DNA, 23 bp, Artificial Sequence
  Synthetic
cctgggatatgatcctgaccaca

SEQ ID NO: 21599 - DNA, 22 bp, Artificial Sequence
  Synthetic
ggcagcattaactggatgggga

SEQ ID NO: 21600 - DNA, 25 bp, Artificial Sequence
  Synthetic
tggacttacaccaacaatttgtaga

SEQ ID NO: 21601 - DNA, 25 bp, Artificial Sequence
  Synthetic
cctggctttatcacttacattttgg

SEQ ID NO: 21602 - DNA, 21 bp, Artificial Sequence
  Synthetic
ccgatgtgatttttgccggaa

SEQ ID NO: 21603 - DNA, 24 bp, Artificial Sequence
  Synthetic
cgtcagtgtaagttgcctttaagt

SEQ ID NO: 21604 - DNA, 21 bp, Artificial Sequence
  Synthetic
gatgctctcacttctcctgga

SEQ ID NO: 21605 - DNA, 25 bp, Artificial Sequence
  Synthetic
caggatatccatatgtctgaagcaa

SEQ ID NO: 21606 - DNA, 20 bp, Artificial Sequence
  Synthetic
agctccacagtgctggatag

SEQ ID NO: 21607 - DNA, 21 bp, Artificial Sequence
  Synthetic
ccagttcttgttgtcccgatc

SEQ ID NO: 21608 - DNA, 24 bp, Artificial Sequence
  Synthetic
cattctcatagtcagcatcactgc

SEQ ID NO: 21609 - DNA, 22 bp, Artificial Sequence
  Synthetic
cttctccaatttctgtgggctt

SEQ ID NO: 21610 - DNA, 25 bp, Artificial Sequence
  Synthetic
gttgatcaaggattctagcatgtgt

SEQ ID NO: 21611 - DNA, 25 bp, Artificial Sequence
  Synthetic
cttgggttggtaatgacatcagtta

SEQ ID NO: 21612 - DNA, 23 bp, Artificial Sequence
  Synthetic
gctgctgactcttcgttctttga

SEQ ID NO: 21613 - DNA, 24 bp, Artificial Sequence
  Synthetic
tgtctttcccttttgtgaagactg

SEQ ID NO: 21614 - DNA, 24 bp, Artificial Sequence
  Synthetic
gagaggttctactgtcccattttc

SEQ ID NO: 21615 - DNA, 23 bp, Artificial Sequence
  Synthetic
ggagcatggatcgaatctaccat

SEQ ID NO: 21616 - DNA, 24 bp, Artificial Sequence
  Synthetic
ttgagttcggtaatgcaagatctg

SEQ ID NO: 21617 - DNA, 25 bp, Artificial Sequence
  Synthetic
tccattaaaggatagcaaactgctt

SEQ ID NO: 21618 - DNA, 24 bp, Artificial Sequence
  Synthetic
gctgagctttttgagactcttgtc

SEQ ID NO: 21619 - DNA, 25 bp, Artificial Sequence
  Synthetic
gcaccaaagaatctagtttgtggat

SEQ ID NO: 21620 - DNA, 25 bp, Artificial Sequence
  Synthetic
acctgttcagtgtaaatgatgtcat

SEQ ID NO: 21621 - DNA, 25 bp, Artificial Sequence
  Synthetic
gaatgtaactcctcttgagcgatct

SEQ ID NO: 21622 - DNA, 25 bp, Artificial Sequence
  Synthetic
gactggattgtctttaaccctaagt

SEQ ID NO: 21623 - DNA, 21 bp, Artificial Sequence
  Synthetic
cagaaatcgtgtgggtccaga

SEQ ID NO: 21624 - DNA, 23 bp, Artificial Sequence
  Synthetic
tcctgcagctattacagaacatg

SEQ ID NO: 21625 - DNA, 25 bp, Artificial Sequence
  Synthetic
cgtaccctaggaaaatgagtgtatt

SEQ ID NO: 21626 - DNA, 23 bp, Artificial Sequence
  Synthetic
agtgccaacctgaagatctagta

SEQ ID NO: 21627 - DNA, 22 bp, Artificial Sequence
  Synthetic
tggtgggattaacacgtgatgt

SEQ ID NO: 21628 - DNA, 25 bp, Artificial Sequence
  Synthetic
cggataaggttcaaaagtgtaacga

SEQ ID NO: 21629 - DNA, 20 bp, Artificial Sequence
  Synthetic
cgagtcgtccagctgaagac

SEQ ID NO: 21630 - DNA, 25 bp, Artificial Sequence
  Synthetic
cccattttcactgaataactcacct

SEQ ID NO: 21631 - DNA, 25 bp, Artificial Sequence
  Synthetic
tgctatagcttgattgtctccttgt

SEQ ID NO: 21632 - DNA, 25 bp, Artificial Sequence
  Synthetic
gctgtagacatatagttgaaccctc

SEQ ID NO: 21633 - DNA, 25 bp, Artificial Sequence
  Synthetic
gtggattggtcttccataagttaga

SEQ ID NO: 21634 - DNA, 25 bp, Artificial Sequence
  Synthetic
ttctctaaacttaagttagccctgg

SEQ ID NO: 21635 - DNA, 20 bp, Artificial Sequence
  Synthetic
tccctctgacgtttaacccg

SEQ ID NO: 21636 - DNA, 23 bp, Artificial Sequence
  Synthetic
agcatactatcggcatcaggatc

SEQ ID NO: 21637 - DNA, 25 bp, Artificial Sequence
  Synthetic
ggtaagttccaatgctttcaaacaa

SEQ ID NO: 21638 - DNA, 24 bp, Artificial Sequence
  Synthetic
aggatctccagtataagggaatgt

SEQ ID NO: 21639 - DNA, 25 bp, Artificial Sequence
  Synthetic
gtttgtccactcttgtttgttgaat

SEQ ID NO: 21640 - DNA, 25 bp, Artificial Sequence
  Synthetic
tggtcatgttgtctcttactcttct

SEQ ID NO: 21641 - DNA, 24 bp, Artificial Sequence
  Synthetic
ccttcttttcattacctccaaccg

SEQ ID NO: 21642 - DNA, 24 bp, Artificial Sequence
  Synthetic
tcgaacatgtaacctttccctagt

SEQ ID NO: 21643 - DNA, 20 bp, Artificial Sequence
  Synthetic
agtccgtcccaccagtatgt

SEQ ID NO: 21644 - DNA, 24 bp, Artificial Sequence
  Synthetic
agccgattcattaattccagacac

SEQ ID NO: 21645 - DNA, 21 bp, Artificial Sequence
  Synthetic
gcctcccctgatagtcttcat

SEQ ID NO: 21646 - DNA, 25 bp, Artificial Sequence
  Synthetic
actgctagggaagaatttctcaaat

SEQ ID NO: 21647 - DNA, 25 bp, Artificial Sequence
  Synthetic
tgcagagcaggaaaatattagttgg

SEQ ID NO: 21648 - DNA, 22 bp, Artificial Sequence
  Synthetic
ccgtcctgttgtctgttccaca

SEQ ID NO: 21649 - DNA, 22 bp, Artificial Sequence
  Synthetic
acgcacactatcctcctcctct

SEQ ID NO: 21650 - DNA, 25 bp, Artificial Sequence
  Synthetic
gctagtccaaataggtccttgaatt

SEQ ID NO: 21651 - DNA, 25 bp, Artificial Sequence
  Synthetic
ggtatgtttaacagttttcccatgc

SEQ ID NO: 21652 - DNA, 23 bp, Artificial Sequence
  Synthetic
cctcatttcccagcaatgcatat

SEQ ID NO: 21653 - DNA, 22 bp, Artificial Sequence
  Synthetic
gcaaaatagcgacttccctgtg

SEQ ID NO: 21654 - DNA, 24 bp, Artificial Sequence
  Synthetic
ggtctagtaatttctcctggcacg

SEQ ID NO: 21655 - DNA, 21 bp, Artificial Sequence
  Synthetic
tttccaaagaggtggtttgca

SEQ ID NO: 21656 - DNA, 25 bp, Artificial Sequence
  Synthetic
gcacaacaatcctacatatatggca

SEQ ID NO: 21657 - DNA, 20 bp, Artificial Sequence
  Synthetic
tacagtaggaggccgggtgc

SEQ ID NO: 21658 - DNA, 22 bp, Artificial Sequence
  Synthetic
cccctgcctgaggaggttcaat

SEQ ID NO: 21659 - DNA, 22 bp, Artificial Sequence
  Synthetic
ggcaccaaaggctgtaactcca

SEQ ID NO: 21660 - DNA, 25 bp, Artificial Sequence
  Synthetic
gcaacaaataaaaatcagagccctg

SEQ ID NO: 21661 - DNA, 21 bp, Artificial Sequence
  Synthetic
gtgtttttcttgccctgcagc

SEQ ID NO: 21662 - DNA, 25 bp, Artificial Sequence
  Synthetic
agcagccatttgtaaataatcagga

SEQ ID NO: 21663 - DNA, 21 bp, Artificial Sequence
  Synthetic
ataccattgttgtggccctgg

SEQ ID NO: 21664 - DNA, 25 bp, Artificial Sequence
  Synthetic
ggactgcaaaaacctatatgtgtct

SEQ ID NO: 21665 - DNA, 23 bp, Artificial Sequence
  Synthetic
acatgcacaacaacagcatacag

SEQ ID NO: 21666 - DNA, 22 bp, Artificial Sequence
  Synthetic
acagaaatggggaagctgcaca

SEQ ID NO: 21667 - DNA, 25 bp, Artificial Sequence
  Synthetic
cacagtaattgcacaacatgtcaaa

SEQ ID NO: 21668 - DNA, 23 bp, Artificial Sequence
  Synthetic
gctgttatattgcgggcataagt

SEQ ID NO: 21669 - DNA, 25 bp, Artificial Sequence
  Synthetic
tctgtatagtttgagcgttgaaaga

SEQ ID NO: 21670 - DNA, 19 bp, Artificial Sequence
  Synthetic
ggacatgggctgccagacc

SEQ ID NO: 21671 - DNA, 19 bp, Artificial Sequence
  Synthetic
acgggattggtcggccgaa

SEQ ID NO: 21672 - DNA, 20 bp, Artificial Sequence
  Synthetic
taagcaaaggggggatgggt

SEQ ID NO: 21673 - DNA, 20 bp, Artificial Sequence
  Synthetic
tatcccgcatgtaagctggc

SEQ ID NO: 21674 - DNA, 18 bp, Artificial Sequence
  Synthetic
tacaccatgcgcggcggt

SEQ ID NO: 21675 - DNA, 19 bp, Artificial Sequence
  Synthetic
tacgtgcaggcgccacacg

SEQ ID NO: 21676 - DNA, 21 bp, Artificial Sequence
  Synthetic
gctggacacgcccatctcctc

SEQ ID NO: 21677 - DNA, 21 bp, Artificial Sequence
  Synthetic
gcagcacgcaaaagagcaggt

SEQ ID NO: 21678 - DNA, 19 bp, Artificial Sequence
  Synthetic
ccccattgacgcgtctgcc

SEQ ID NO: 21679 - DNA, 21 bp, Artificial Sequence
  Synthetic
ccgaacagaagatgggacgcc

SEQ ID NO: 21680 - DNA, 22 bp, Artificial Sequence
  Synthetic
accgcatctcttggcgtttacc

SEQ ID NO: 21681 - DNA, 20 bp, Artificial Sequence
  Synthetic
acaggcaaaacacgccgtgg

SEQ ID NO: 21682 - DNA, 18 bp, Artificial Sequence
  Synthetic
cgcgcttcagtgcaccgt

SEQ ID NO: 21683 - DNA, 23 bp, Artificial Sequence
  Synthetic
cactgataacatgtaactccgcc

SEQ ID NO: 21684 - DNA, 22 bp, Artificial Sequence
  Synthetic
ggtcacgggcgtgttcagtaat

SEQ ID NO: 21685 - DNA, 20 bp, Artificial Sequence
  Synthetic
cctgccgttgttctttgcgg

SEQ ID NO: 21686 - DNA, 19 bp, Artificial Sequence
  Synthetic
tttgtgggagcgtccggcc

SEQ ID NO: 21687 - DNA, 19 bp, Artificial Sequence
  Synthetic
cggcaccgttgtcgcagta

SEQ ID NO: 21688 - DNA, 19 bp, Artificial Sequence
  Synthetic
ggcttctggttgggcgagc

SEQ ID NO: 21689 - DNA, 22 bp, Artificial Sequence
  Synthetic
ccccgtgttgttctgccgtatt

SEQ ID NO: 21690 - DNA, 20 bp, Artificial Sequence
  Synthetic
gcccgggtatgcgaaaccat

SEQ ID NO: 21691 - DNA, 19 bp, Artificial Sequence
  Synthetic
tgcacctctggcgccacag

SEQ ID NO: 21692 - DNA, 19 bp, Artificial Sequence
  Synthetic
tcagggcgcgtctggtctc

SEQ ID NO: 21693 - DNA, 22 bp, Artificial Sequence
  Synthetic
gtgaatgagggcgcatctacct

SEQ ID NO: 21694 - DNA, 19 bp, Artificial Sequence
  Synthetic
acgcctctgaggacgctgc

SEQ ID NO: 21695 - DNA, 21 bp, Artificial Sequence
  Synthetic
ggccaccgcgtccttcatttc

SEQ ID NO: 21696 - DNA, 22 bp, Artificial Sequence
  Synthetic
cctgttggacgatctcgcacat

SEQ ID NO: 21697 - DNA, 21 bp, Artificial Sequence
  Synthetic
ggcgatgtgctgggggtgata

SEQ ID NO: 21698 - DNA, 21 bp, Artificial Sequence
  Synthetic
cgcgtgaggtgaggtggacat

SEQ ID NO: 21699 - DNA, 19 bp, Artificial Sequence
  Synthetic
ttggggtaacggcgggcac

SEQ ID NO: 21700 - DNA, 18 bp, Artificial Sequence
  Synthetic
tgcgagcaggagggacct

SEQ ID NO: 21701 - DNA, 20 bp, Artificial Sequence
  Synthetic
tccctgggcaggcggaatag

SEQ ID NO: 21702 - DNA, 21 bp, Artificial Sequence
  Synthetic
gcagcagcaggatgagcagca

SEQ ID NO: 21703 - DNA, 22 bp, Artificial Sequence
  Synthetic
gcactcttaccccccgtaacca

SEQ ID NO: 21704 - DNA, 19 bp, Artificial Sequence
  Synthetic
tgtcagaggtgctgcgggc

SEQ ID NO: 21705 - DNA, 21 bp, Artificial Sequence
  Synthetic
ccccggacgtaaaggtcgaag

SEQ ID NO: 21706 - DNA, 19 bp, Artificial Sequence
  Synthetic
ttctgccgggagctgggag

SEQ ID NO: 21707 - DNA, 20 bp, Artificial Sequence
  Synthetic
catgctggccgagagggtgg

SEQ ID NO: 21708 - DNA, 22 bp, Artificial Sequence
  Synthetic
gcgcatcttggagaccctgaag

SEQ ID NO: 21709 - DNA, 25 bp, Artificial Sequence
  Synthetic
ccaaaccatactctttgcaaagcaa

SEQ ID NO: 21710 - DNA, 19 bp, Artificial Sequence
  Synthetic
ccgcactcaaccaccagcc

SEQ ID NO: 21711 - DNA, 20 bp, Artificial Sequence
  Synthetic
tcccccgttacctcctctgg

SEQ ID NO: 21712 - DNA, 20 bp, Artificial Sequence
  Synthetic
catggccgtcttgtaccagt

SEQ ID NO: 21713 - DNA, 25 bp, Artificial Sequence
  Synthetic
cgccttttaggaacaatttaaaggc

SEQ ID NO: 21714 - DNA, 25 bp, Artificial Sequence
  Synthetic
gttgttatcattaggggtggacact

SEQ ID NO: 21715 - DNA, 20 bp, Artificial Sequence
  Synthetic
gagggcaggcacagctgtac

SEQ ID NO: 21716 - DNA, 19 bp, Artificial Sequence
  Synthetic
ttcgtcgtccgaggcgctg

SEQ ID NO: 21717 - DNA, 25 bp, Artificial Sequence
  Synthetic
cccttaggtatactgactcttgtca

SEQ ID NO: 21718 - DNA, 25 bp, Artificial Sequence
  Synthetic
acaaacggacataaaacatcaacaa

SEQ ID NO: 21719 - DNA, 22 bp, Artificial Sequence
  Synthetic
gggtctgtaacggtggaggttg

SEQ ID NO: 21720 - DNA, 22 bp, Artificial Sequence
  Synthetic
gcaatggctgaaggacatccga

SEQ ID NO: 21721 - DNA, 24 bp, Artificial Sequence
  Synthetic
ccgtactgatcacctttgaaacag

SEQ ID NO: 21722 - DNA, 23 bp, Artificial Sequence
  Synthetic
gacttatttgactgcagagtggc

SEQ ID NO: 21723 - DNA, 23 bp, Artificial Sequence
  Synthetic
gggttatcttgcacagttggaag

SEQ ID NO: 21724 - DNA, 25 bp, Artificial Sequence
  Synthetic
acagttacagaacacacaacacatg

SEQ ID NO: 21725 - DNA, 20 bp, Artificial Sequence
  Synthetic
ttgctttcttgcagcagctg

SEQ ID NO: 21726 - DNA, 22 bp, Artificial Sequence
  Synthetic
ggcaatctggagagacagactc

SEQ ID NO: 21727 - DNA, 25 bp, Artificial Sequence
  Synthetic
tctgtagcatcatctataagcccaa

SEQ ID NO: 21728 - DNA, 20 bp, Artificial Sequence
  Synthetic
ggaacatgctgcaggcctag

SEQ ID NO: 21729 - DNA, 22 bp, Artificial Sequence
  Synthetic
ggtttctccggtttgtgcaacc

SEQ ID NO: 21730 - DNA, 25 bp, Artificial Sequence
  Synthetic
ggccaccaaagtatactaaactact

SEQ ID NO: 21731 - DNA, 25 bp, Artificial Sequence
  Synthetic
gttctgtagttatgtcaaagcctgt

SEQ ID NO: 21732 - DNA, 20 bp, Artificial Sequence
  Synthetic
aggatctggagcagcagttg

SEQ ID NO: 21733 - DNA, 22 bp, Artificial Sequence
  Synthetic
tgagggtgagacacaaagagtc

SEQ ID NO: 21734 - DNA, 25 bp, Artificial Sequence
  Synthetic
gccgtggaagtatatttctgtttct

SEQ ID NO: 21735 - DNA, 25 bp, Artificial Sequence
  Synthetic
cgtttaacttatttagcaaggggtg

SEQ ID NO: 21736 - DNA, 25 bp, Artificial Sequence
  Synthetic
cccaaatccaatatcacacatgtct

SEQ ID NO: 21737 - DNA, 20 bp, Artificial Sequence
  Synthetic
gcctgagtaccttgaccagg

SEQ ID NO: 21738 - DNA, 25 bp, Artificial Sequence
  Synthetic
tctgatagatccacatcccaaaagt

SEQ ID NO: 21739 - DNA, 21 bp, Artificial Sequence
  Synthetic
cgtgttgagacagcaccattt

SEQ ID NO: 21740 - DNA, 25 bp, Artificial Sequence
  Synthetic
gcttcccttgagcaatcaaatcaaa

SEQ ID NO: 21741 - DNA, 24 bp, Artificial Sequence
  Synthetic
ctgaaatgttggacccatcagtac

SEQ ID NO: 21742 - DNA, 25 bp, Artificial Sequence
  Synthetic
cctgttcagaagaatttgcagtttc

SEQ ID NO: 21743 - DNA, 23 bp, Artificial Sequence
  Synthetic
gatgttgcactttggtgattcac

SEQ ID NO: 21744 - DNA, 21 bp, Artificial Sequence
  Synthetic
gcgtcacctcctcgctttctc

SEQ ID NO: 21745 - DNA, 25 bp, Artificial Sequence
  Synthetic
ggcaatgtggtagtgactaaaaaca

SEQ ID NO: 21746 - DNA, 25 bp, Artificial Sequence
  Synthetic
ccaaaatagaccacacttccaaaca

SEQ ID NO: 21747 - DNA, 24 bp, Artificial Sequence
  Synthetic
gggggtctagcactgttactatat

SEQ ID NO: 21748 - DNA, 25 bp, Artificial Sequence
  Synthetic
accaaaagactgtgcatctacaaat

SEQ ID NO: 21749 - DNA, 22 bp, Artificial Sequence
  Synthetic
ccatagtgacgtcctcctcaaa

SEQ ID NO: 21750 - DNA, 25 bp, Artificial Sequence
  Synthetic
aggttgcacaggaatataaggtgta

SEQ ID NO: 21751 - DNA, 25 bp, Artificial Sequence
  Synthetic
tcaaagaaaggatgtccaactgtta

SEQ ID NO: 21752 - DNA, 25 bp, Artificial Sequence
  Synthetic
ggattttctgtatcctgcaatttgt

SEQ ID NO: 21753 - DNA, 25 bp, Artificial Sequence
  Synthetic
cgaaccactcggaattgtaaagtaa

SEQ ID NO: 21754 - DNA, 25 bp, Artificial Sequence
  Synthetic
ccacatgagtcaagtcaacatcatt

SEQ ID NO: 21755 - DNA, 25 bp, Artificial Sequence
  Synthetic
cccctgatgtgagtaatagggttaa

SEQ ID NO: 21756 - DNA, 22 bp, Artificial Sequence
  Synthetic
ttcctttgatctctccgaacct

SEQ ID NO: 21757 - DNA, 20 bp, Artificial Sequence
  Synthetic
accatcatggcatgcggatc

SEQ ID NO: 21758 - DNA, 21 bp, Artificial Sequence
  Synthetic
gctccactcttcctgttggaa

SEQ ID NO: 21759 - DNA, 21 bp, Artificial Sequence
  Synthetic
tccaagccacttgtctccatt

SEQ ID NO: 21760 - DNA, 25 bp, Artificial Sequence
  Synthetic
caagtatcttttccaccatcgtgta

SEQ ID NO: 21761 - DNA, 21 bp, Artificial Sequence
  Synthetic
cgcccgattgaaacttaccgt

SEQ ID NO: 21762 - DNA, 25 bp, Artificial Sequence
  Synthetic
ctggccaaactcttcttgtagtatt

SEQ ID NO: 21763 - DNA, 23 bp, Artificial Sequence
  Synthetic
tgaggacacaagaattgcagttc

SEQ ID NO: 21764 - DNA, 21 bp, Artificial Sequence
  Synthetic
ctcaaattcctgctggcgaag

SEQ ID NO: 21765 - DNA, 23 bp, Artificial Sequence
  Synthetic
aggtcaaattgcatagcatctgc

SEQ ID NO: 21766 - DNA, 25 bp, Artificial Sequence
  Synthetic
gtgtccaaagcctttcaaaaaaaga

SEQ ID NO: 21767 - DNA, 20 bp, Artificial Sequence
  Synthetic
cggaggtacgggttgatacc

SEQ ID NO: 21768 - DNA, 25 bp, Artificial Sequence
  Synthetic
ttccatccttataatatgcacctgc

SEQ ID NO: 21769 - DNA, 20 bp, Artificial Sequence
  Synthetic
ggtgtctcgtcgacggtgtc

SEQ ID NO: 21770 - DNA, 22 bp, Artificial Sequence
  Synthetic
ggaccctctggatcctctggaa

SEQ ID NO: 21771 - DNA, 22 bp, Artificial Sequence
  Synthetic
gctagcctcctccagtaacctt

SEQ ID NO: 21772 - DNA, 21 bp, Artificial Sequence
  Synthetic
tccacctattggttgaccacc

SEQ ID NO: 21773 - DNA, 25 bp, Artificial Sequence
  Synthetic
tgctacgtccctttcaaatatttgt

SEQ ID NO: 21774 - DNA, 25 bp, Artificial Sequence
  Synthetic
accagaatgttcccctaatagtgat

SEQ ID NO: 21775 - DNA, 25 bp, Artificial Sequence
  Synthetic
cacagcataaccttccaaatcttgt

SEQ ID NO: 21776 - DNA, 20 bp, Artificial Sequence
  Synthetic
tccgtgctttgtacccttgc

SEQ ID NO: 21777 - DNA, 20 bp, Artificial Sequence
  Synthetic
aacacctaaaggctggccac

SEQ ID NO: 21778 - DNA, 22 bp, Artificial Sequence
  Synthetic
gcagtattgggtatcgcatccc

SEQ ID NO: 21779 - DNA, 25 bp, Artificial Sequence
  Synthetic
gctcatatggatctttcctttctgg

SEQ ID NO: 21780 - DNA, 25 bp, Artificial Sequence
  Synthetic
gctttcaatgtgatgtttttgtcca

SEQ ID NO: 21781 - DNA, 24 bp, Artificial Sequence
  Synthetic
gccccaacagtaagaatgcatttc

SEQ ID NO: 21782 - DNA, 25 bp, Artificial Sequence
  Synthetic
agcttctcttaaaggttgagcaatt

SEQ ID NO: 21783 - DNA, 25 bp, Artificial Sequence
  Synthetic
cctctggagtgtcatcaatggataa

SEQ ID NO: 21784 - DNA, 25 bp, Artificial Sequence
  Synthetic
gcaactgtaggttccgtagaacttt

SEQ ID NO: 21785 - DNA, 25 bp, Artificial Sequence
  Synthetic
gcatacttggatttagccaaacttt

SEQ ID NO: 21786 - DNA, 25 bp, Artificial Sequence
  Synthetic
cagtccatgtaccagtttttccata

SEQ ID NO: 21787 - DNA, 23 bp, Artificial Sequence
  Synthetic
agtgacgctagtgtcaagcaata

SEQ ID NO: 21788 - DNA, 22 bp, Artificial Sequence
  Synthetic
agggcggagagatagaccaaca

SEQ ID NO: 21789 - DNA, 25 bp, Artificial Sequence
  Synthetic
tgtgcttagtactttgtcagtgtta

SEQ ID NO: 21790 - DNA, 20 bp, Artificial Sequence
  Synthetic
cacgtacccttttgacctgg

SEQ ID NO: 21791 - DNA, 20 bp, Artificial Sequence
  Synthetic
cagggatactgtcgccaaca

SEQ ID NO: 21792 - DNA, 24 bp, Artificial Sequence
  Synthetic
gcgtctttaggacagatagtagct

SEQ ID NO: 21793 - DNA, 23 bp, Artificial Sequence
  Synthetic
ggttacaatggtcacagcatgtg

SEQ ID NO: 21794 - DNA, 22 bp, Artificial Sequence
  Synthetic
tgaagagtgccagggaatttcc

SEQ ID NO: 21795 - DNA, 25 bp, Artificial Sequence
  Synthetic
gcactcttctacctgtgatagttca

SEQ ID NO: 21796 - DNA, 25 bp, Artificial Sequence
  Synthetic
gcactagccatttgatgattaacaa

SEQ ID NO: 21797 - DNA, 21 bp, Artificial Sequence
  Synthetic
ccttcccacttcttcagcaga

SEQ ID NO: 21798 - DNA, 23 bp, Artificial Sequence
  Synthetic
ccaaatggtctgtagccagtagc

SEQ ID NO: 21799 - DNA, 23 bp, Artificial Sequence
  Synthetic
tcttcagcagttattgtaggccc

SEQ ID NO: 21800 - DNA, 25 bp, Artificial Sequence
  Synthetic
ggcctactcaggtaattgatatctc

SEQ ID NO: 21801 - DNA, 25 bp, Artificial Sequence
  Synthetic
acaaagggttttctgaatctccata

SEQ ID NO: 21802 - DNA, 25 bp, Artificial Sequence
  Synthetic
tgctgatctgtcttgagaaaatgtt

SEQ ID NO: 21803 - DNA, 25 bp, Artificial Sequence
  Synthetic
tggtactttacaaagacgaaagact

SEQ ID NO: 21804 - DNA, 25 bp, Artificial Sequence
  Synthetic
acatgagtcagtattttgcaaacac

SEQ ID NO: 21805 - DNA, 24 bp, Artificial Sequence
  Synthetic
ccgccaaattttgagtcagtcaaa

SEQ ID NO: 21806 - DNA, 22 bp, Artificial Sequence
  Synthetic
gcttttctgctgcatccaacaa

SEQ ID NO: 21807 - DNA, 20 bp, Artificial Sequence
  Synthetic
atcgacgagctccagagtcg

SEQ ID NO: 21808 - DNA, 25 bp, Artificial Sequence
  Synthetic
tgagttagtgtctacctgtgtaaga

SEQ ID NO: 21809 - DNA, 25 bp, Artificial Sequence
  Synthetic
gcagctgattgatgttctaccaata

SEQ ID NO: 21810 - DNA, 20 bp, Artificial Sequence
  Synthetic
tcggtgtcggtggtcccacc

SEQ ID NO: 21811 - DNA, 22 bp, Artificial Sequence
  Synthetic
ggatcccgagcttcttcttgta

SEQ ID NO: 21812 - DNA, 25 bp, Artificial Sequence
  Synthetic
ggtgtagatggtgtcaatggtctat

SEQ ID NO: 21813 - DNA, 25 bp, Artificial Sequence
  Synthetic
actacagtaggtgtactttctggta

SEQ ID NO: 21814 - DNA, 25 bp, Artificial Sequence
  Synthetic
cttgtttttggtgggttaatagagc

SEQ ID NO: 21815 - DNA, 25 bp, Artificial Sequence
  Synthetic
gtttgtttgggatcaaaagacacat

SEQ ID NO: 21816 - DNA, 24 bp, Artificial Sequence
  Synthetic
ggccatttgcaagtactgtgaata

SEQ ID NO: 21817 - DNA, 25 bp, Artificial Sequence
  Synthetic
agcgtttacctaaagaaaactgtga

SEQ ID NO: 21818 - DNA, 21 bp, Artificial Sequence
  Synthetic
tcataggtaaacaggggtgcg

SEQ ID NO: 21819 - DNA, 25 bp, Artificial Sequence
  Synthetic
cctcttgttaaaacttgacctacct

SEQ ID NO: 21820 - DNA, 25 bp, Artificial Sequence
  Synthetic
cccatcagtttccatctgttcataa

SEQ ID NO: 21821 - DNA, 25 bp, Artificial Sequence
  Synthetic
ccctctcaatatcaatgcagatctt

SEQ ID NO: 21822 - DNA, 25 bp, Artificial Sequence
  Synthetic
ccctctgatgaagcttaacaatctt

SEQ ID NO: 21823 - DNA, 20 bp, Artificial Sequence
  Synthetic
ccagtgaatgctgccatgat

SEQ ID NO: 21824 - DNA, 20 bp, Artificial Sequence
  Synthetic
aagccatgggtacactgtcc

SEQ ID NO: 21825 - DNA, 23 bp, Artificial Sequence
  Synthetic
aggtcaatttcagtttgcggtac

SEQ ID NO: 21826 - DNA, 23 bp, Artificial Sequence
  Synthetic
gcagcgtctgtgtatctgcatat

SEQ ID NO: 21827 - DNA, 25 bp, Artificial Sequence
  Synthetic
gcctatatccatatcactgtctgct

SEQ ID NO: 21828 - DNA, 23 bp, Artificial Sequence
  Synthetic
cgtcattatcaaatgcccattgc

SEQ ID NO: 21829 - DNA, 25 bp, Artificial Sequence
  Synthetic
gaagtcgaccccttgatatcttaaa

SEQ ID NO: 21830 - DNA, 21 bp, Artificial Sequence
  Synthetic
cccatatgcacttcccatgtg

SEQ ID NO: 21831 - DNA, 25 bp, Artificial Sequence
  Synthetic
gcaaagcaaaaacacaaaactaaca

SEQ ID NO: 21832 - DNA, 25 bp, Artificial Sequence
  Synthetic
gccctacacaaagcaaaagtgtaat

SEQ ID NO: 21833 - DNA, 24 bp, Artificial Sequence
  Synthetic
cctcaataactgggggttcaacaa

SEQ ID NO: 21834 - DNA, 20 bp, Artificial Sequence
  Synthetic
gtcaggatcaggtgccacac

SEQ ID NO: 21835 - DNA, 25 bp, Artificial Sequence
  Synthetic
gcctacgccttaaaaagtatacagg

SEQ ID NO: 21836 - DNA, 25 bp, Artificial Sequence
  Synthetic
catctgttttggaattaccagcctt

SEQ ID NO: 21837 - DNA, 22 bp, Artificial Sequence
  Synthetic
tttgtgttcctagtggtgtcca

SEQ ID NO: 21838 - DNA, 20 bp, Artificial Sequence
  Synthetic
ctaagcttgtggcagctggg

SEQ ID NO: 21839 - DNA, 20 bp, Artificial Sequence
  Synthetic
tgcgtttggctgatggtgta

SEQ ID NO: 21840 - DNA, 21 bp, Artificial Sequence
  Synthetic
aaaagggtggaggacataggg

SEQ ID NO: 21841 - DNA, 24 bp, Artificial Sequence
  Synthetic
ccaacagcagtaaagtatgctgat

SEQ ID NO: 21842 - DNA, 25 bp, Artificial Sequence
  Synthetic
cctcaggattgggaaaaaacatttc

SEQ ID NO: 21843 - DNA, 24 bp, Artificial Sequence
  Synthetic
actcgtaacatgtaaggtcagtct

SEQ ID NO: 21844 - DNA, 23 bp, Artificial Sequence
  Synthetic
cccaattacctgaatcagccatc

SEQ ID NO: 21845 - DNA, 25 bp, Artificial Sequence
  Synthetic
tgagataggtcaaattgacagtcct

SEQ ID NO: 21846 - DNA, 20 bp, Artificial Sequence
  Synthetic
tgtccagcatgcaggtgttg

SEQ ID NO: 21847 - DNA, 25 bp, Artificial Sequence
  Synthetic
tgccttccagttttcattagtaagt

SEQ ID NO: 21848 - DNA, 21 bp, Artificial Sequence
  Synthetic
tcgtgatactgcaaggcttgg

SEQ ID NO: 21849 - DNA, 22 bp, Artificial Sequence
  Synthetic
attgccctcaacctttggaatt

SEQ ID NO: 21850 - DNA, 20 bp, Artificial Sequence
  Synthetic
ggcactatggaggtaggacc

SEQ ID NO: 21851 - DNA, 25 bp, Artificial Sequence
  Synthetic
aagcaggcctatgtaactttacaat

SEQ ID NO: 21852 - DNA, 25 bp, Artificial Sequence
  Synthetic
gccacatctgcaaaaaaatatgaca

SEQ ID NO: 21853 - DNA, 22 bp, Artificial Sequence
  Synthetic
gtaccccaatgttcccctaagg

SEQ ID NO: 21854 - DNA, 25 bp, Artificial Sequence
  Synthetic
gccctgttaaataggtgtctaacaa

SEQ ID NO: 21855 - DNA, 22 bp, Artificial Sequence
  Synthetic
aagcggtcgcagaataacttta

SEQ ID NO: 21856 - DNA, 24 bp, Artificial Sequence
  Synthetic
tccattattgtgtcaacctgctct

SEQ ID NO: 21857 - DNA, 20 bp, Artificial Sequence
  Synthetic
gaggtcattggctggactgg

SEQ ID NO: 21858 - DNA, 25 bp, Artificial Sequence
  Synthetic
gtgaatcccccacagtactaaaaga

SEQ ID NO: 21859 - DNA, 25 bp, Artificial Sequence
  Synthetic
ccctttcttgacaattttgtatgca

SEQ ID NO: 21860 - DNA, 25 bp, Artificial Sequence
  Synthetic
catcctccctctataaaacctgcta

SEQ ID NO: 21861 - DNA, 25 bp, Artificial Sequence
  Synthetic
aagttcagcattataagtccagaca

SEQ ID NO: 21862 - DNA, 25 bp, Artificial Sequence
  Synthetic
cccattgattccaattttactccac

SEQ ID NO: 21863 - DNA, 25 bp, Artificial Sequence
  Synthetic
catcagtctccatctgttcgtaaga

SEQ ID NO: 21864 - DNA, 25 bp, Artificial Sequence
  Synthetic
ctcttctgtatataggtcctccagt

SEQ ID NO: 21865 - DNA, 24 bp, Artificial Sequence
  Synthetic
aattccatcaccattgttccaact

SEQ ID NO: 21866 - DNA, 25 bp, Artificial Sequence
  Synthetic
ccctttgatgaagctcaatactctt

SEQ ID NO: 21867 - DNA, 25 bp, Artificial Sequence
  Synthetic
ctcctcggttactaattcatcacat

SEQ ID NO: 21868 - DNA, 21 bp, Artificial Sequence
  Synthetic
gttgcagtcttgggctcaaat

SEQ ID NO: 21869 - DNA, 23 bp, Artificial Sequence
  Synthetic
acatcattactgtaacgcccgtc

SEQ ID NO: 21870 - DNA, 23 bp, Artificial Sequence
  Synthetic
cccatctactagtggttgcaacc

SEQ ID NO: 21871 - DNA, 20 bp, Artificial Sequence
  Synthetic
ccatctgagctgtcgtctgg

SEQ ID NO: 21872 - DNA, 25 bp, Artificial Sequence
  Synthetic
actgcattgtcctcattatttccat

SEQ ID NO: 21873 - DNA, 24 bp, Artificial Sequence
  Synthetic
gtgtctattaggcagtcgatgtcc

SEQ ID NO: 21874 - DNA, 25 bp, Artificial Sequence
  Synthetic
ggccatataccgatatgtaagaagg

SEQ ID NO: 21875 - DNA, 21 bp, Artificial Sequence
  Synthetic
agccatcaacaatagaggcca

SEQ ID NO: 21876 - DNA, 23 bp, Artificial Sequence
  Synthetic
accatccacaacaataggaggtt

SEQ ID NO: 21877 - DNA, 23 bp, Artificial Sequence
  Synthetic
caaccaacaacaaacaactgtgt

SEQ ID NO: 21878 - DNA, 24 bp, Artificial Sequence
  Synthetic
gcaaaatataaagagggagccagc

SEQ ID NO: 21879 - DNA, 22 bp, Artificial Sequence
  Synthetic
ccttttccttaggaggctctgc

SEQ ID NO: 21880 - DNA, 24 bp, Artificial Sequence
  Synthetic
gaacatacctgctggcaaaattgg

SEQ ID NO: 21881 - DNA, 21 bp, Artificial Sequence
  Synthetic
gtccgtctctctgttttggcc

SEQ ID NO: 21882 - DNA, 24 bp, Artificial Sequence
  Synthetic
ttagcagaaatggttcaatggtgt

SEQ ID NO: 21883 - DNA, 23 bp, Artificial Sequence
  Synthetic
cttgttggctgttcatggatact

SEQ ID NO: 21884 - DNA, 20 bp, Artificial Sequence
  Synthetic
ggtttgcaaccccttcctag

SEQ ID NO: 21885 - DNA, 19 bp, Artificial Sequence
  Synthetic
ctcccacccaggcggcata

SEQ ID NO: 21886 - DNA, 21 bp, Artificial Sequence
  Synthetic
ctgctggagaagtgggaagcg

SEQ ID NO: 21887 - DNA, 25 bp, Artificial Sequence
  Synthetic
aaagcagtttctaagtagtgtgtct

SEQ ID NO: 21888 - DNA, 23 bp, Artificial Sequence
  Synthetic
aagaatcaggtcctagcactagc

SEQ ID NO: 21889 - DNA, 25 bp, Artificial Sequence
  Synthetic
cggacattaagtagaccaacattca

SEQ ID NO: 21890 - DNA, 22 bp, Artificial Sequence
  Synthetic
agatgcattagctgagtctgct

SEQ ID NO: 21891 - DNA, 25 bp, Artificial Sequence
  Synthetic
ttgttcaataaatatgctgacgtgg

SEQ ID NO: 21892 - DNA, 23 bp, Artificial Sequence
  Synthetic
ttgctccctacacgtattttcca

SEQ ID NO: 21893 - DNA, 25 bp, Artificial Sequence
  Synthetic
ctatggatctgtctgaaagactgtc

SEQ ID NO: 21894 - DNA, 20 bp, Artificial Sequence
  Synthetic
gctgtggacagtgtggtcag

SEQ ID NO: 21895 - DNA, 25 bp, Artificial Sequence
  Synthetic
actgaaaaatgagaggtaatgctcc

SEQ ID NO: 21896 - DNA, 21 bp, Artificial Sequence
  Synthetic
atcctgtgcaagaaaccgtgg

SEQ ID NO: 21897 - DNA, 24 bp, Artificial Sequence
  Synthetic
ctaaaagtccagaagttgcagttg

SEQ ID NO: 21898 - DNA, 25 bp, Artificial Sequence
  Synthetic
acctaaaacatccagaaggagatgg

SEQ ID NO: 21899 - DNA, 22 bp, Artificial Sequence
  Synthetic
aggagagtcctgctaggagacg

SEQ ID NO: 21900 - DNA, 22 bp, Artificial Sequence
  Synthetic
gcttgggatccgccaataattc

SEQ ID NO: 21901 - DNA, 23 bp, Artificial Sequence
  Synthetic
gacccacaattcctgttgacact

SEQ ID NO: 21902 - DNA, 24 bp, Artificial Sequence
  Synthetic
ttagcaatgcagaagaaggtgtag

SEQ ID NO: 21903 - DNA, 25 bp, Artificial Sequence
  Synthetic
ctgaatttgaaattgaagcccctcc

SEQ ID NO: 21904 - DNA, 25 bp, Artificial Sequence
  Synthetic
taggacgtcctagatacagtgaaac

SEQ ID NO: 21905 - DNA, 23 bp, Artificial Sequence
  Synthetic
cgcaaacgaaaacgaatagctat

SEQ ID NO: 21906 - DNA, 22 bp, Artificial Sequence
  Synthetic
agttcctcatgtctcaggaagt

SEQ ID NO: 21907 - DNA, 25 bp, Artificial Sequence
  Synthetic
acccaactatttattgtaggctgtg

SEQ ID NO: 21908 - DNA, 24 bp, Artificial Sequence
  Synthetic
tagtggttctctagtttccagtga

SEQ ID NO: 21909 - DNA, 21 bp, Artificial Sequence
  Synthetic
tagtggtctgcggaaccggtg

SEQ ID NO: 21910 - DNA, 20 bp, Artificial Sequence
  Synthetic
ggccctagattgggtgtgcg

SEQ ID NO: 21911 - DNA, 19 bp, Artificial Sequence
  Synthetic
ccagggctctggcacatgg

SEQ ID NO: 21912 - DNA, 20 bp, Artificial Sequence
  Synthetic
ccactttggcggtccgctat

SEQ ID NO: 21913 - DNA, 20 bp, Artificial Sequence
  Synthetic
ttgccgcttacgctgtgaga

SEQ ID NO: 21914 - DNA, 22 bp, Artificial Sequence
  Synthetic
cagtgactttgaccaggggtgg

SEQ ID NO: 21915 - DNA, 21 bp, Artificial Sequence
  Synthetic
cccagggtgcccagagtaaca

SEQ ID NO: 21916 - DNA, 22 bp, Artificial Sequence
  Synthetic
tgctccattccactacggagct

SEQ ID NO: 21917 - DNA, 22 bp, Artificial Sequence
  Synthetic
gggaacccatggtatctggtgg

SEQ ID NO: 21918 - DNA, 20 bp, Artificial Sequence
  Synthetic
tccctcctctcaaccctcgg

SEQ ID NO: 21919 - DNA, 22 bp, Artificial Sequence
  Synthetic
cgttgcagtcgagcccgtgata

SEQ ID NO: 21920 - DNA, 22 bp, Artificial Sequence
  Synthetic
tccacctcaacgcagaccttcc

SEQ ID NO: 21921 - DNA, 21 bp, Artificial Sequence
  Synthetic
gcccccaaagtcattgcgttg

SEQ ID NO: 21922 - DNA, 20 bp, Artificial Sequence
  Synthetic
accacgggggctcccataac

SEQ ID NO: 21923 - DNA, 22 bp, Artificial Sequence
  Synthetic
aaatgtgatgagcttgccggga

SEQ ID NO: 21924 - DNA, 21 bp, Artificial Sequence
  Synthetic
gctctcagagacgtgggagga

SEQ ID NO: 21925 - DNA, 22 bp, Artificial Sequence
  Synthetic
tggaagagtgctccaaagctcc

SEQ ID NO: 21926 - DNA, 22 bp, Artificial Sequence
  Synthetic
agtcaacatcctgggtgggtgg

SEQ ID NO: 21927 - DNA, 21 bp, Artificial Sequence
  Synthetic
ggcataccggcactagtgagg

SEQ ID NO: 21928 - DNA, 22 bp, Artificial Sequence
  Synthetic
ggcatcatgaacaccaagtgcc

SEQ ID NO: 21929 - DNA, 22 bp, Artificial Sequence
  Synthetic
tccttcccccgaattcttcagc

SEQ ID NO: 21930 - DNA, 19 bp, Artificial Sequence
  Synthetic
tccaccacccaggcggaag

SEQ ID NO: 21931 - DNA, 22 bp, Artificial Sequence
  Synthetic
ctacaggacatgaccaccccga

SEQ ID NO: 21932 - DNA, 22 bp, Artificial Sequence
  Synthetic
tatcagtgctgcaacctcgacc

SEQ ID NO: 21933 - DNA, 22 bp, Artificial Sequence
  Synthetic
cgagagcaagggagtcgaacgg

SEQ ID NO: 21934 - DNA, 20 bp, Artificial Sequence
  Synthetic
ctggccggctcgatctttcg

SEQ ID NO: 21935 - DNA, 25 bp, Artificial Sequence
  Synthetic
aagaatgaacatcttcccctaatgt

SEQ ID NO: 21936 - DNA, 21 bp, Artificial Sequence
  Synthetic
tcttgggagtggagtcaatga

SEQ ID NO: 21937 - DNA, 24 bp, Artificial Sequence
  Synthetic
cgtgattagaacacacgagtactc

SEQ ID NO: 21938 - DNA, 23 bp, Artificial Sequence
  Synthetic
gacaaattgactcaggggagaca

SEQ ID NO: 21939 - DNA, 23 bp, Artificial Sequence
  Synthetic
agaaggccaaactatcaaatgca

SEQ ID NO: 21940 - DNA, 25 bp, Artificial Sequence
  Synthetic
gcacaaacagccatacaattattca

SEQ ID NO: 21941 - DNA, 24 bp, Artificial Sequence
  Synthetic
acaacataatggaccctgagtaca

SEQ ID NO: 21942 - DNA, 23 bp, Artificial Sequence
  Synthetic
tttgaggcttgctttaacagtgc

SEQ ID NO: 21943 - DNA, 25 bp, Artificial Sequence
  Synthetic
attggataccatgccaataattcca

SEQ ID NO: 21944 - DNA, 20 bp, Artificial Sequence
  Synthetic
ttgtgttacccaggcagctt

SEQ ID NO: 21945 - DNA, 25 bp, Artificial Sequence
  Synthetic
aaatgctaataatttggggagtgca

SEQ ID NO: 21946 - DNA, 25 bp, Artificial Sequence
  Synthetic
catgaagacagaaggaacacttgag

SEQ ID NO: 21947 - DNA, 23 bp, Artificial Sequence
  Synthetic
aggaatggttgatggttggtatg

SEQ ID NO: 21948 - DNA, 25 bp, Artificial Sequence
  Synthetic
gactgatgatcacagacatgagacc

SEQ ID NO: 21949 - DNA, 25 bp, Artificial Sequence
  Synthetic
acactcaacaaagatcaacttctgt

SEQ ID NO: 21950 - DNA, 22 bp, Artificial Sequence
  Synthetic
gccaacagcttctatgaagtgt

SEQ ID NO: 21951 - DNA, 23 bp, Artificial Sequence
  Synthetic
acagaggtacaccaaggaatcaa

SEQ ID NO: 21952 - DNA, 25 bp, Artificial Sequence
  Synthetic
atcagaactgaagcattaatgacca

SEQ ID NO: 21953 - DNA, 22 bp, Artificial Sequence
  Synthetic
caactcacccatccaaccaaac

SEQ ID NO: 21954 - DNA, 23 bp, Artificial Sequence
  Synthetic
aaactcaagaagtgcagtgctag

SEQ ID NO: 21955 - DNA, 25 bp, Artificial Sequence
  Synthetic
tactgttagtcatcacagtgactga

SEQ ID NO: 21956 - DNA, 24 bp, Artificial Sequence
  Synthetic
atccacatggggcaaataatcatt

SEQ ID NO: 21957 - DNA, 25 bp, Artificial Sequence
  Synthetic
gcacaaatcacattatccattctgg

SEQ ID NO: 21958 - DNA, 22 bp, Artificial Sequence
  Synthetic
agcatatgcagcaacaatccaa

SEQ ID NO: 21959 - DNA, 20 bp, Artificial Sequence
  Synthetic
ccctccactcaacctcctcc

SEQ ID NO: 21960 - DNA, 21 bp, Artificial Sequence
  Synthetic
caatccttgctgcagtcacac

SEQ ID NO: 21961 - DNA, 23 bp, Artificial Sequence
  Synthetic
agtgtcttaaccagcaaagtgtt

SEQ ID NO: 21962 - DNA, 24 bp, Artificial Sequence
  Synthetic
tcttcccactagctgaaacatgta

SEQ ID NO: 21963 - DNA, 25 bp, Artificial Sequence
  Synthetic
gcacctaatcatgttcttacaatgg

SEQ ID NO: 21964 - DNA, 20 bp, Artificial Sequence
  Synthetic
gccatgagcaaactcctcac

SEQ ID NO: 21965 - DNA, 24 bp, Artificial Sequence
  Synthetic
tgtaggtagaatgtttgcaatgca

SEQ ID NO: 21966 - DNA, 22 bp, Artificial Sequence
  Synthetic
gaacctacatatcctcacgggc

SEQ ID NO: 21967 - DNA, 25 bp, Artificial Sequence
  Synthetic
tacagtcagtagtagaccatgtgaa

SEQ ID NO: 21968 - DNA, 20 bp, Artificial Sequence
  Synthetic
cctcccgggagagccatagt

SEQ ID NO: 21969 - DNA, 22 bp, Artificial Sequence
  Synthetic
caggggccctagattgggtgtg

SEQ ID NO: 21970 - DNA, 19 bp, Artificial Sequence
  Synthetic
cgcatggcgtccgggttct

SEQ ID NO: 21971 - DNA, 18 bp, Artificial Sequence
  Synthetic
ggtgttgggtggcggtga

SEQ ID NO: 21972 - DNA, 22 bp, Artificial Sequence
  Synthetic
tcatggacatgatcgctggtgc

SEQ ID NO: 21973 - DNA, 22 bp, Artificial Sequence
  Synthetic
tcagttatgccaacggaagcgg

SEQ ID NO: 21974 - DNA, 20 bp, Artificial Sequence
  Synthetic
gcccccttgtgtcatcggag

SEQ ID NO: 21975 - DNA, 19 bp, Artificial Sequence
  Synthetic
agcccgttgctgctgtcca

SEQ ID NO: 21976 - DNA, 22 bp, Artificial Sequence
  Synthetic
cctcgtgttcttctgctttgcg

SEQ ID NO: 21977 - DNA, 21 bp, Artificial Sequence
  Synthetic
aaagtcccctacttcgtgcgc

SEQ ID NO: 21978 - DNA, 22 bp, Artificial Sequence
  Synthetic
ggagaccaagctcatcacgtgg

SEQ ID NO: 21979 - DNA, 21 bp, Artificial Sequence
  Synthetic
ggaacgaggaccatcgcatca

SEQ ID NO: 21980 - DNA, 22 bp, Artificial Sequence
  Synthetic
tccctgtggagaacctagggac

SEQ ID NO: 21981 - DNA, 21 bp, Artificial Sequence
  Synthetic
cgggtgctcaggaggtgctta

SEQ ID NO: 21982 - DNA, 20 bp, Artificial Sequence
  Synthetic
gaagctggtcgcattgggca

SEQ ID NO: 21983 - DNA, 22 bp, Artificial Sequence
  Synthetic
tctgtgagtgctatgacgcggg

SEQ ID NO: 21984 - DNA, 21 bp, Artificial Sequence
  Synthetic
tgaagtcaccctgacgcaccc

SEQ ID NO: 21985 - DNA, 21 bp, Artificial Sequence
  Synthetic
gtcccgccatgcagaggttat

SEQ ID NO: 21986 - DNA, 19 bp, Artificial Sequence
  Synthetic
tgtgggtgctggcctagct

SEQ ID NO: 21987 - DNA, 19 bp, Artificial Sequence
  Synthetic
cgcccgcgtcactgccata

SEQ ID NO: 21988 - DNA, 22 bp, Artificial Sequence
  Synthetic
ctgcaggaacatgtggagtggg

SEQ ID NO: 21989 - DNA, 21 bp, Artificial Sequence
  Synthetic
gcaattaccttgcgagcccga

SEQ ID NO: 21990 - DNA, 21 bp, Artificial Sequence
  Synthetic
tgtggcagaggaggatgagcg

SEQ ID NO: 21991 - DNA, 22 bp, Artificial Sequence
  Synthetic
acgacaacatcctctgagcccg

SEQ ID NO: 21992 - DNA, 22 bp, Artificial Sequence
  Synthetic
agactgcaagttctggacagcc

SEQ ID NO: 21993 - DNA, 20 bp, Artificial Sequence
  Synthetic
gcgtgtgcgagaagatggcc

SEQ ID NO: 21994 - DNA, 21 bp, Artificial Sequence
  Synthetic
ttcaaggggggaaaactgcgg

SEQ ID NO: 21995 - DNA, 20 bp, Artificial Sequence
  Synthetic
cgcgtgggagacagcaagac

SEQ ID NO: 21996 - DNA, 22 bp, Artificial Sequence
  Synthetic
tgcctcagaaaacttggggtcc

SEQ ID NO: 21997 - DNA, 23 bp, Artificial Sequence
  Synthetic
agatccgaaaatcgaaacgaaca

SEQ ID NO: 21998 - DNA, 25 bp, Artificial Sequence
  Synthetic
gtatgactacaaggagaaccgattt

SEQ ID NO: 21999 - DNA, 23 bp, Artificial Sequence
  Synthetic
aagaacatgaggaaaacaagcca

SEQ ID NO: 22000 - DNA, 24 bp, Artificial Sequence
  Synthetic
atgagaaggaactatttcacagcg

SEQ ID NO: 22001 - DNA, 20 bp, Artificial Sequence
  Synthetic
tggagccacacagatgggaa

SEQ ID NO: 22002 - DNA, 23 bp, Artificial Sequence
  Synthetic
aatcagaaacatggccaattgga

SEQ ID NO: 22003 - DNA, 23 bp, Artificial Sequence
  Synthetic
tttgcatcagaatagaccaggca

SEQ ID NO: 22004 - DNA, 24 bp, Artificial Sequence
  Synthetic
agaagcagtaatgagaatgggaga

SEQ ID NO: 22005 - DNA, 20 bp, Artificial Sequence
  Synthetic
agccgcgtactctagctgat

SEQ ID NO: 22006 - DNA, 22 bp, Artificial Sequence
  Synthetic
gcagggagcaattagaagactc

SEQ ID NO: 22007 - DNA, 24 bp, Artificial Sequence
  Synthetic
aattgtagaacgtaaaacagggga

SEQ ID NO: 22008 - DNA, 22 bp, Artificial Sequence
  Synthetic
ggggctatatccctaggacggc

SEQ ID NO: 22009 - DNA, 25 bp, Artificial Sequence
  Synthetic
tgtgctttgatagaaaacatcgagc

SEQ ID NO: 22010 - DNA, 21 bp, Artificial Sequence
  Synthetic
ccaggaaaggcttctagacct

SEQ ID NO: 22011 - DNA, 22 bp, Artificial Sequence
  Synthetic
cgtggacattacaggacacatg

SEQ ID NO: 22012 - DNA, 25 bp, Artificial Sequence
  Synthetic
aaaaggaagcatctaagtatgggga

SEQ ID NO: 22013 - DNA, 24 bp, Artificial Sequence
  Synthetic
agatgttaccctacactttgagca

SEQ ID NO: 22014 - DNA, 22 bp, Artificial Sequence
  Synthetic
atttccacaaacacccattgct

SEQ ID NO: 22015 - DNA, 25 bp, Artificial Sequence
  Synthetic
atcctgattaccttaaaatggctgc

SEQ ID NO: 22016 - DNA, 23 bp, Artificial Sequence
  Synthetic
cccagggtcaaaacaatggtatt

SEQ ID NO: 22017 - DNA, 22 bp, Artificial Sequence
  Synthetic
ccccagctacaagtagtttgga

SEQ ID NO: 22018 - DNA, 20 bp, Artificial Sequence
  Synthetic
actacgtccgccgtctaggt

SEQ ID NO: 22019 - DNA, 19 bp, Artificial Sequence
  Synthetic
cgggattcgagcgcccctt

SEQ ID NO: 22020 - DNA, 19 bp, Artificial Sequence
  Synthetic
cgccgtcatcctccaccca

SEQ ID NO: 22021 - DNA, 22 bp, Artificial Sequence
  Synthetic
aagacctccaagacctcctgca

SEQ ID NO: 22022 - DNA, 22 bp, Artificial Sequence
  Synthetic
ccttcctgggcctctatcctcc

SEQ ID NO: 22023 - DNA, 20 bp, Artificial Sequence
  Synthetic
cttccggtgcgggaaagcag

SEQ ID NO: 22024 - DNA, 20 bp, Artificial Sequence
  Synthetic
tacaggcgccagctgtcctt

SEQ ID NO: 22025 - DNA, 20 bp, Artificial Sequence
  Synthetic
gacctgcgggccactaactc

SEQ ID NO: 22026 - DNA, 20 bp, Artificial Sequence
  Synthetic
ctggcccatatcctgcagcc

SEQ ID NO: 22027 - DNA, 22 bp, Artificial Sequence
  Synthetic
aggcatactgatccccgagacc

SEQ ID NO: 22028 - DNA, 20 bp, Artificial Sequence
  Synthetic
ggggcagctacttgcctcag

SEQ ID NO: 22029 - DNA, 21 bp, Artificial Sequence
  Synthetic
acctgatcccatctccaggct

SEQ ID NO: 22030 - DNA, 24 bp, Artificial Sequence
  Synthetic
gctattcgccatactacccatgtc

SEQ ID NO: 22031 - DNA, 21 bp, Artificial Sequence
  Synthetic
agttctgcccagtggatcccg

SEQ ID NO: 22032 - DNA, 21 bp, Artificial Sequence
  Synthetic
gttcatggaccctcgacctgc

SEQ ID NO: 22033 - DNA, 22 bp, Artificial Sequence
  Synthetic
cagcccctactggaaatttcag

SEQ ID NO: 22034 - DNA, 19 bp, Artificial Sequence
  Synthetic
gagcagtaccggtggcggt

SEQ ID NO: 22035 - DNA, 22 bp, Artificial Sequence
  Synthetic
atcctccttctcctgcagcaac

SEQ ID NO: 22036 - DNA, 22 bp, Artificial Sequence
  Synthetic
tcgcttcctcttctcctcagcc

SEQ ID NO: 22037 - DNA, 21 bp, Artificial Sequence
  Synthetic
tatcagcccacttcccagggt

SEQ ID NO: 22038 - DNA, 22 bp, Artificial Sequence
  Synthetic
acccttaaggtccttaccccgc

SEQ ID NO: 22039 - DNA, 20 bp, Artificial Sequence
  Synthetic
tcaaaccaaggcctaccacc

SEQ ID NO: 22040 - DNA, 22 bp, Artificial Sequence
  Synthetic
taagctcagacctccgggaagc

SEQ ID NO: 22041 - DNA, 18 bp, Artificial Sequence
  Synthetic
acgccggttgagtcgcgt

SEQ ID NO: 22042 - DNA, 23 bp, Artificial Sequence
  Synthetic
agaagtacacatcagggagacag

SEQ ID NO: 22043 - DNA, 25 bp, Artificial Sequence
  Synthetic
aagtcgaaaggttaaaacatggaac

SEQ ID NO: 22044 - DNA, 25 bp, Artificial Sequence
  Synthetic
tggttgcatacatgttagagagaga

SEQ ID NO: 22045 - DNA, 20 bp, Artificial Sequence
  Synthetic
attggagatgtgccacagca

SEQ ID NO: 22046 - DNA, 23 bp, Artificial Sequence
  Synthetic
ggaaaagggcaacagctatactc

SEQ ID NO: 22047 - DNA, 25 bp, Artificial Sequence
  Synthetic
aattggggaattgaacatatcgaca

SEQ ID NO: 22048 - DNA, 21 bp, Artificial Sequence
  Synthetic
acaggggacagagaaactgac

SEQ ID NO: 22049 - DNA, 24 bp, Artificial Sequence
  Synthetic
tgtacttgggacatttgataccac

SEQ ID NO: 22050 - DNA, 20 bp, Artificial Sequence
  Synthetic
gtggagtccgctgttctgag

SEQ ID NO: 22051 - DNA, 21 bp, Artificial Sequence
  Synthetic
tatcagaatggaccaggcgat

SEQ ID NO: 22052 - DNA, 23 bp, Artificial Sequence
  Synthetic
aacacagttcgagtctctgaaac

SEQ ID NO: 22053 - DNA, 22 bp, Artificial Sequence
  Synthetic
acaggaacaggatacaccatgg

SEQ ID NO: 22054 - DNA, 21 bp, Artificial Sequence
  Synthetic
ctaactcaaggtcgccagact

SEQ ID NO: 22055 - DNA, 25 bp, Artificial Sequence
  Synthetic
agagcactgacattaaatacgatga

SEQ ID NO: 22056 - DNA, 23 bp, Artificial Sequence
  Synthetic
ctttcacaatcactggggacaac

SEQ ID NO: 22057 - DNA, 21 bp, Artificial Sequence
  Synthetic
gctagcaagcattgacctgaa

SEQ ID NO: 22058 - DNA, 23 bp, Artificial Sequence
  Synthetic
ctcatagtgaatgcaccaaacca

SEQ ID NO: 22059 - DNA, 22 bp, Artificial Sequence
  Synthetic
cccagatggctcttcaattgtt

SEQ ID NO: 22060 - DNA, 19 bp, Artificial Sequence
  Synthetic
gacggcctcgctgactgga

SEQ ID NO: 22061 - DNA, 22 bp, Artificial Sequence
  Synthetic
tattgccacgcatccggatcac

SEQ ID NO: 22062 - DNA, 19 bp, Artificial Sequence
  Synthetic
acgccgtccaacttcacgc

SEQ ID NO: 22063 - DNA, 22 bp, Artificial Sequence
  Synthetic
tccaataaacccatcccctcgc

SEQ ID NO: 22064 - DNA, 22 bp, Artificial Sequence
  Synthetic
gggacggaggagagacgatgca

SEQ ID NO: 22065 - DNA, 25 bp, Artificial Sequence
  Synthetic
atacaccacatcgttggataatacg

SEQ ID NO: 22066 - DNA, 22 bp, Artificial Sequence
  Synthetic
cgttatcatctgctcccgctgc

SEQ ID NO: 22067 - DNA, 22 bp, Artificial Sequence
  Synthetic
cggattccaagtcagagcggcg

SEQ ID NO: 22068 - DNA, 19 bp, Artificial Sequence
  Synthetic
tcagccacgacgcgagtga

SEQ ID NO: 22069 - DNA, 21 bp, Artificial Sequence
  Synthetic
tctcatcaccgagaccgcggg

SEQ ID NO: 22070 - DNA, 19 bp, Artificial Sequence
  Synthetic
cgcccgatccctccaggtt

SEQ ID NO: 22071 - DNA, 20 bp, Artificial Sequence
  Synthetic
catcgggtagacggcgctag

SEQ ID NO: 22072 - DNA, 19 bp, Artificial Sequence
  Synthetic
ggaggaaactgccgcggga

SEQ ID NO: 22073 - DNA, 22 bp, Artificial Sequence
  Synthetic
gcacgctgcatggctaaatacc

SEQ ID NO: 22074 - DNA, 20 bp, Artificial Sequence
  Synthetic
gcatgaactgcccgtggtgg

SEQ ID NO: 22075 - DNA, 18 bp, Artificial Sequence
  Synthetic
tgaggttgcgggccaggt

SEQ ID NO: 22076 - DNA, 20 bp, Artificial Sequence
  Synthetic
tctgagcgagtcccttgcgc

SEQ ID NO: 22077 - DNA, 19 bp, Artificial Sequence
  Synthetic
cgcaagtaatgggtgcgcg

SEQ ID NO: 22078 - DNA, 22 bp, Artificial Sequence
  Synthetic
cgagagcccgtcgtgatagtcc

SEQ ID NO: 22079 - DNA, 19 bp, Artificial Sequence
  Synthetic
acatgcgccctgggtctga

SEQ ID NO: 22080 - DNA, 18 bp, Artificial Sequence
  Synthetic
cgtgcgccacgccaagat

SEQ ID NO: 22081 - DNA, 22 bp, Artificial Sequence
  Synthetic
caggcggtgcagatcggttttc

SEQ ID NO: 22082 - DNA, 22 bp, Artificial Sequence
  Synthetic
cgggtacgacctgcgatttagc

SEQ ID NO: 22083 - DNA, 20 bp, Artificial Sequence
  Synthetic
ccgctggtcggtttctgact

SEQ ID NO: 22084 - DNA, 19 bp, Artificial Sequence
  Synthetic
gcgctccacgatctcggca

SEQ ID NO: 22085 - DNA, 21 bp, Artificial Sequence
  Synthetic
accaggacaaggtggtgagct

SEQ ID NO: 22086 - DNA, 20 bp, Artificial Sequence
  Synthetic
ggccttggtggacttccagg

SEQ ID NO: 22087 - DNA, 22 bp, Artificial Sequence
  Synthetic
agagggctcatccgactctgcc

SEQ ID NO: 22088 - DNA, 20 bp, Artificial Sequence
  Synthetic
caggggcgagtccgtcgtca

SEQ ID NO: 22089 - DNA, 22 bp, Artificial Sequence
  Synthetic
tcgcgcatagtgtggaagtggt

SEQ ID NO: 22090 - DNA, 21 bp, Artificial Sequence
  Synthetic
cccctccgtattcttgtcgcg

SEQ ID NO: 22091 - DNA, 20 bp, Artificial Sequence
  Synthetic
tgctgggcgccaggaaaaac

SEQ ID NO: 22092 - DNA, 20 bp, Artificial Sequence
  Synthetic
acctgacggtgaaccaccca

SEQ ID NO: 22093 - DNA, 21 bp, Artificial Sequence
  Synthetic
cggcagcagtacacgtcgagc

SEQ ID NO: 22094 - DNA, 20 bp, Artificial Sequence
  Synthetic
cgtcgggcacagacccatgg

SEQ ID NO: 22095 - DNA, 19 bp, Artificial Sequence
  Synthetic
gcgtagttgcgcaggccct

SEQ ID NO: 22096 - DNA, 21 bp, Artificial Sequence
  Synthetic
cgtaattcaccacgggcacgc

SEQ ID NO: 22097 - DNA, 21 bp, Artificial Sequence
  Synthetic
actgacagttgcgcaatccga

SEQ ID NO: 22098 - DNA, 18 bp, Artificial Sequence
  Synthetic
gcgcgttgccccaaacca

SEQ ID NO: 22099 - DNA, 18 bp, Artificial Sequence
  Synthetic
acaagccccagcaaccgg

SEQ ID NO: 22100 - DNA, 18 bp, Artificial Sequence
  Synthetic
aagctacagcgctcgcgg

SEQ ID NO: 22101 - DNA, 19 bp, Artificial Sequence
  Synthetic
gggccacgctgacggcttt

SEQ ID NO: 22102 - DNA, 18 bp, Artificial Sequence
  Synthetic
cggcttgaacgagcgcct

SEQ ID NO: 22103 - DNA, 18 bp, Artificial Sequence
  Synthetic
gcgctacgaacccgcaca

SEQ ID NO: 22104 - DNA, 18 bp, Artificial Sequence
  Synthetic
tacgcgcacgccaaaccg

SEQ ID NO: 22105 - DNA, 19 bp, Artificial Sequence
  Synthetic
ggcttcggcgtgcagctgt

SEQ ID NO: 22106 - DNA, 20 bp, Artificial Sequence
  Synthetic
gttggacgacaacgccaagc

SEQ ID NO: 22107 - DNA, 19 bp, Artificial Sequence
  Synthetic
gtgcagcagcgcctacaga

SEQ ID NO: 22108 - DNA, 22 bp, Artificial Sequence
  Synthetic
tcaaccaggacttgctgtcggc

SEQ ID NO: 22109 - DNA, 19 bp, Artificial Sequence
  Synthetic
tgaccacccccgacgccaa

SEQ ID NO: 22110 - DNA, 21 bp, Artificial Sequence
  Synthetic
cggaagcaggacccactaccg

SEQ ID NO: 22111 - DNA, 22 bp, Artificial Sequence
  Synthetic
caaacagctgtcgcggtactcg

SEQ ID NO: 22112 - DNA, 19 bp, Artificial Sequence
  Synthetic
cgccacagcagagccagca

SEQ ID NO: 22113 - DNA, 22 bp, Artificial Sequence
  Synthetic
agctcgatgttgaacaccgacg

SEQ ID NO: 22114 - DNA, 22 bp, Artificial Sequence
  Synthetic
tcgttttcctcctctccgtcgt

SEQ ID NO: 22115 - DNA, 22 bp, Artificial Sequence
  Synthetic
accagtctcagtctcagcagca

SEQ ID NO: 22116 - DNA, 22 bp, Artificial Sequence
  Synthetic
ctgttgctctcctctaccccgc

SEQ ID NO: 22117 - DNA, 19 bp, Artificial Sequence
  Synthetic
ccactactgccggagccga

SEQ ID NO: 22118 - DNA, 21 bp, Artificial Sequence
  Synthetic
atagcggcgttaggtgacacg

SEQ ID NO: 22119 - DNA, 19 bp, Artificial Sequence
  Synthetic
gttgcgcacccgtaagccg

SEQ ID NO: 22120 - DNA, 22 bp, Artificial Sequence
  Synthetic
gctgctgttgctgctgttgttg

SEQ ID NO: 22121 - DNA, 20 bp, Artificial Sequence
  Synthetic
ggggatctcctcacgcacgc

SEQ ID NO: 22122 - DNA, 21 bp, Artificial Sequence
  Synthetic
gccacaaagtcgcttttgccg

SEQ ID NO: 22123 - DNA, 19 bp, Artificial Sequence
  Synthetic
cctcgcacagccgatgcac

SEQ ID NO: 22124 - DNA, 19 bp, Artificial Sequence
  Synthetic
gcgatcaccacgctcgagg

SEQ ID NO: 22125 - DNA, 19 bp, Artificial Sequence
  Synthetic
cagccagaccgctagccga

SEQ ID NO: 22126 - DNA, 19 bp, Artificial Sequence
  Synthetic
acccggcgtgtcgactcgt

SEQ ID NO: 22127 - DNA, 19 bp, Artificial Sequence
  Synthetic
gcggactgcaccgggatga

SEQ ID NO: 22128 - DNA, 19 bp, Artificial Sequence
  Synthetic
cgaccgcgcggctgatgat

SEQ ID NO: 22129 - DNA, 22 bp, Artificial Sequence
  Synthetic
tgaagaaatagaccgggtgccg

SEQ ID NO: 22130 - DNA, 19 bp, Artificial Sequence
  Synthetic
gaggccacggcgcagaaga

SEQ ID NO: 22131 - DNA, 19 bp, Artificial Sequence
  Synthetic
cgcgccggtactcgagcaa

SEQ ID NO: 22132 - DNA, 19 bp, Artificial Sequence
  Synthetic
agcggctgctggaagaggg

SEQ ID NO: 22133 - DNA, 22 bp, Artificial Sequence
  Synthetic
cacctggacatctaccgtcgcc

SEQ ID NO: 22134 - DNA, 19 bp, Artificial Sequence
  Synthetic
tgcctcagctgttaccgcg

SEQ ID NO: 22135 - DNA, 19 bp, Artificial Sequence
  Synthetic
gctggtgcggcttttccac

SEQ ID NO: 22136 - DNA, 19 bp, Artificial Sequence
  Synthetic
ctcggtgagcgggtagcga

SEQ ID NO: 22137 - DNA, 19 bp, Artificial Sequence
  Synthetic
cagggccagggacagcctt

SEQ ID NO: 22138 - DNA, 19 bp, Artificial Sequence
  Synthetic
cgcaccctctgagtgctgc

SEQ ID NO: 22139 - DNA, 19 bp, Artificial Sequence
  Synthetic
ccgtcttatcccgtgccgc

SEQ ID NO: 22140 - DNA, 19 bp, Artificial Sequence
  Synthetic
cgtaaggaaaccgcggcgg

SEQ ID NO: 22141 - DNA, 20 bp, Artificial Sequence
  Synthetic
acagtccggcttgggtgtcc

SEQ ID NO: 22142 - DNA, 19 bp, Artificial Sequence
  Synthetic
cgcggagggtgattcgcac

SEQ ID NO: 22143 - DNA, 22 bp, Artificial Sequence
  Synthetic
agttgttgaggtccaccagcag

SEQ ID NO: 22144 - DNA, 19 bp, Artificial Sequence
  Synthetic
agacgaccggcttccagcg

SEQ ID NO: 22145 - DNA, 18 bp, Artificial Sequence
  Synthetic
gcttgcccgacgcgtgaa

SEQ ID NO: 22146 - DNA, 21 bp, Artificial Sequence
  Synthetic
gcacgttgaccgacacgttct

SEQ ID NO: 22147 - DNA, 19 bp, Artificial Sequence
  Synthetic
gctgttgcgacggcgaatg

SEQ ID NO: 22148 - DNA, 19 bp, Artificial Sequence
  Synthetic
ccggagcgtggcggtacaa

SEQ ID NO: 22149 - DNA, 19 bp, Artificial Sequence
  Synthetic
cgtgtcgtacgcgcaccgt

SEQ ID NO: 22150 - DNA, 22 bp, Artificial Sequence
  Synthetic
tcagctccgaggctaggttagc

SEQ ID NO: 22151 - DNA, 22 bp, Artificial Sequence
  Synthetic
gaggcccatgatgagtagtcgc

SEQ ID NO: 22152 - DNA, 19 bp, Artificial Sequence
  Synthetic
gcggccggcatcaggagaa

SEQ ID NO: 22153 - DNA, 21 bp, Artificial Sequence
  Synthetic
ccgatagcggttcctcagcca

SEQ ID NO: 22154 - DNA, 19 bp, Artificial Sequence
  Synthetic
agggtggtccgcgttccgt

SEQ ID NO: 22155 - DNA, 20 bp, Artificial Sequence
  Synthetic
ccgaccagttctccatcgcg

SEQ ID NO: 22156 - DNA, 19 bp, Artificial Sequence
  Synthetic
cccgtggccgtaccctgtt

SEQ ID NO: 22157 - DNA, 21 bp, Artificial Sequence
  Synthetic
cacgcatgtgctacgcggatt

SEQ ID NO: 22158 - DNA, 19 bp, Artificial Sequence
  Synthetic
cgacgagcgcgggtcacaa

SEQ ID NO: 22159 - DNA, 19 bp, Artificial Sequence
  Synthetic
ctgacgccacgccgccatt

SEQ ID NO: 22160 - DNA, 19 bp, Artificial Sequence
  Synthetic
tgctgctctgcacgctctg

SEQ ID NO: 22161 - DNA, 19 bp, Artificial Sequence
  Synthetic
gcgtcgcccttctccgtga

SEQ ID NO: 22162 - DNA, 22 bp, Artificial Sequence
  Synthetic
cgtcgtggagacaagcaacacc

SEQ ID NO: 22163 - DNA, 20 bp, Artificial Sequence
  Synthetic
gtgctcagcggcgtgtacag

SEQ ID NO: 22164 - DNA, 18 bp, Artificial Sequence
  Synthetic
ggtagcgcttgcggcaca

SEQ ID NO: 22165 - DNA, 20 bp, Artificial Sequence
  Synthetic
gcagcggcgagaggagagga

SEQ ID NO: 22166 - DNA, 22 bp, Artificial Sequence
  Synthetic
tcctctcagtttccccgtctcc

SEQ ID NO: 22167 - DNA, 19 bp, Artificial Sequence
  Synthetic
gtggtgccgtccacgtcgt

SEQ ID NO: 22168 - DNA, 19 bp, Artificial Sequence
  Synthetic
gcacgcgcgtttccccgta

SEQ ID NO: 22169 - DNA, 19 bp, Artificial Sequence
  Synthetic
cggcaagctcacgcactgc

SEQ ID NO: 22170 - DNA, 19 bp, Artificial Sequence
  Synthetic
cggaacgtgacggttgccg

SEQ ID NO: 22171 - DNA, 20 bp, Artificial Sequence
  Synthetic
tgacgacggggaggatgacg

SEQ ID NO: 22172 - DNA, 22 bp, Artificial Sequence
  Synthetic
atcggctcgtatcccgaagtgc

SEQ ID NO: 22173 - DNA, 19 bp, Artificial Sequence
  Synthetic
ccgtcctggcacgcctctt

SEQ ID NO: 22174 - DNA, 19 bp, Artificial Sequence
  Synthetic
cccggcgtgctgttggtct

SEQ ID NO: 22175 - DNA, 20 bp, Artificial Sequence
  Synthetic
agagcctcacctgcgtgacg

SEQ ID NO: 22176 - DNA, 20 bp, Artificial Sequence
  Synthetic
gagcacttgcggctccatga

SEQ ID NO: 22177 - DNA, 19 bp, Artificial Sequence
  Synthetic
gcccgtcgtagcgcagaat

SEQ ID NO: 22178 - DNA, 20 bp, Artificial Sequence
  Synthetic
caacgccgcgtgtaacttcc

SEQ ID NO: 22179 - DNA, 20 bp, Artificial Sequence
  Synthetic
atatgtgggagcgcaaggcc

SEQ ID NO: 22180 - DNA, 20 bp, Artificial Sequence
  Synthetic
gcgactttaccgcgaacgcc

SEQ ID NO: 22181 - DNA, 21 bp, Artificial Sequence
  Synthetic
tgcctgtccaaccaccatgac

SEQ ID NO: 22182 - DNA, 20 bp, Artificial Sequence
  Synthetic
gctcatgcagcgtctcacgg

SEQ ID NO: 22183 - DNA, 20 bp, Artificial Sequence
  Synthetic
acaccagcgacaacgtgctc

SEQ ID NO: 22184 - DNA, 18 bp, Artificial Sequence
  Synthetic
cgtgtgcaccaccgtgga

SEQ ID NO: 22185 - DNA, 20 bp, Artificial Sequence
  Synthetic
cgtgcaccacggtgaacacg

SEQ ID NO: 22186 - DNA, 19 bp, Artificial Sequence
  Synthetic
ggcgctgtgtccgagctca

SEQ ID NO: 22187 - DNA, 22 bp, Artificial Sequence
  Synthetic
ccaggtgagaaagagaagccgc

SEQ ID NO: 22188 - DNA, 20 bp, Artificial Sequence
  Synthetic
cggcagcggtggtactggta

SEQ ID NO: 22189 - DNA, 19 bp, Artificial Sequence
  Synthetic
gtccagaacgcggttggga

SEQ ID NO: 22190 - DNA, 22 bp, Artificial Sequence
  Synthetic
catgttgccgtgtgacgagacg

SEQ ID NO: 22191 - DNA, 22 bp, Artificial Sequence
  Synthetic
tgggcgatgcacaactctttct

SEQ ID NO: 22192 - DNA, 19 bp, Artificial Sequence
  Synthetic
ggtggtggtgggcatcgtg

SEQ ID NO: 22193 - DNA, 22 bp, Artificial Sequence
  Synthetic
gtcgcctcggtagctcagtagt

SEQ ID NO: 22194 - DNA, 24 bp, Artificial Sequence
  Synthetic
cgataggcggctataagatagaga

SEQ ID NO: 22195 - DNA, 20 bp, Artificial Sequence
  Synthetic
tatggttcttaggcgcgcat

SEQ ID NO: 22196 - DNA, 18 bp, Artificial Sequence
  Synthetic
ccggcgtgcagcaaggtt

SEQ ID NO: 22197 - DNA, 19 bp, Artificial Sequence
  Synthetic
tccctcggcgaccaacacc

SEQ ID NO: 22198 - DNA, 21 bp, Artificial Sequence
  Synthetic
gtagcgggagatacggcgttc

SEQ ID NO: 22199 - DNA, 21 bp, Artificial Sequence
  Synthetic
gctatcgtcgccggtttcggg

SEQ ID NO: 22200 - DNA, 20 bp, Artificial Sequence
  Synthetic
tcggcgttttcgggaagggc

SEQ ID NO: 22201 - DNA, 20 bp, Artificial Sequence
  Synthetic
cgacgcgatcacggtaaccc

SEQ ID NO: 22202 - DNA, 22 bp, Artificial Sequence
  Synthetic
gcgttgtctcgcctatcagcgt

SEQ ID NO: 22203 - DNA, 20 bp, Artificial Sequence
  Synthetic
tacgagaccccgaggtacgc

SEQ ID NO: 22204 - DNA, 20 bp, Artificial Sequence
  Synthetic
cggaacggcgtttcactgcc

SEQ ID NO: 22205 - DNA, 19 bp, Artificial Sequence
  Synthetic
gcgtggcagggctggaaga

SEQ ID NO: 22206 - DNA, 19 bp, Artificial Sequence
  Synthetic
accggtgtggaagccgagg

SEQ ID NO: 22207 - DNA, 20 bp, Artificial Sequence
  Synthetic
acatgggccatgtgtggtgg

SEQ ID NO: 22208 - DNA, 22 bp, Artificial Sequence
  Synthetic
ctccgggttcctgccttttcca

SEQ ID NO: 22209 - DNA, 22 bp, Artificial Sequence
  Synthetic
aacaacgcagactgctgaaggc

SEQ ID NO: 22210 - DNA, 19 bp, Artificial Sequence
  Synthetic
agcttctccccgactccgc

SEQ ID NO: 22211 - DNA, 22 bp, Artificial Sequence
  Synthetic
cgataccaccacattcaggggc

SEQ ID NO: 22212 - DNA, 19 bp, Artificial Sequence
  Synthetic
gggactttccacacggcgg

SEQ ID NO: 22213 - DNA, 22 bp, Artificial Sequence
  Synthetic
tcgacgacaggtgcggattagt

SEQ ID NO: 22214 - DNA, 21 bp, Artificial Sequence
  Synthetic
caacaataccgccctacgttg

SEQ ID NO: 22215 - DNA, 22 bp, Artificial Sequence
  Synthetic
ggacgtaacattcggacacgga

SEQ ID NO: 22216 - DNA, 19 bp, Artificial Sequence
  Synthetic
ggcgacgacagttccgtgg

SEQ ID NO: 22217 - DNA, 19 bp, Artificial Sequence
  Synthetic
ccggcggtggtgaacgaga

SEQ ID NO: 22218 - DNA, 21 bp, Artificial Sequence
  Synthetic
gtaacccagccaaaccagcgc

SEQ ID NO: 22219 - DNA, 19 bp, Artificial Sequence
  Synthetic
ccgtgccatcggtgggtac

SEQ ID NO: 22220 - DNA, 22 bp, Artificial Sequence
  Synthetic
gcgagaaccggtcgctcatagc

SEQ ID NO: 22221 - DNA, 20 bp, Artificial Sequence
  Synthetic
ggaggctatatgaccgcgcg

SEQ ID NO: 22222 - DNA, 21 bp, Artificial Sequence
  Synthetic
ccttcatcgcgtttgccgtgc

SEQ ID NO: 22223 - DNA, 22 bp, Artificial Sequence
  Synthetic
aaacgggcgcggttttataggc

SEQ ID NO: 22224 - DNA, 22 bp, Artificial Sequence
  Synthetic
agctgatgcatttccagcgacg

SEQ ID NO: 22225 - DNA, 21 bp, Artificial Sequence
  Synthetic
ttctctgtggtcggcgagtct

SEQ ID NO: 22226 - DNA, 20 bp, Artificial Sequence
  Synthetic
gcagtgctacggtggttccc

SEQ ID NO: 22227 - DNA, 21 bp, Artificial Sequence
  Synthetic
tggtaaagtgaagacgcgccg

SEQ ID NO: 22228 - DNA, 19 bp, Artificial Sequence
  Synthetic
gtgacgcagcagcatcgct

SEQ ID NO: 22229 - DNA, 22 bp, Artificial Sequence
  Synthetic
acacctggtcgacgtggttacg

SEQ ID NO: 22230 - DNA, 20 bp, Artificial Sequence
  Synthetic
gtcagggccagaacccgcag

SEQ ID NO: 22231 - DNA, 21 bp, Artificial Sequence
  Synthetic
ccctgctgttggctacctctc

SEQ ID NO: 22232 - DNA, 20 bp, Artificial Sequence
  Synthetic
cgcatctgctcgccgtagat

SEQ ID NO: 22233 - DNA, 19 bp, Artificial Sequence
  Synthetic
acgagcacgcttccgaggg

SEQ ID NO: 22234 - DNA, 19 bp, Artificial Sequence
  Synthetic
gaccgagccagagggacct

SEQ ID NO: 22235 - DNA, 20 bp, Artificial Sequence
  Synthetic
cgtggaaaaccacccggcag

SEQ ID NO: 22236 - DNA, 21 bp, Artificial Sequence
  Synthetic
cgggggggtgaaatttggagt

SEQ ID NO: 22237 - DNA, 22 bp, Artificial Sequence
  Synthetic
aagttcgctgcaatatgcacac

SEQ ID NO: 22238 - DNA, 25 bp, Artificial Sequence
  Synthetic
aggaaaaccgattcactgaaattgg

SEQ ID NO: 22239 - DNA, 20 bp, Artificial Sequence
  Synthetic
aatcacagggaccatgcgta

SEQ ID NO: 22240 - DNA, 23 bp, Artificial Sequence
  Synthetic
ctgcaaagatattggcgatctga

SEQ ID NO: 22241 - DNA, 21 bp, Artificial Sequence
  Synthetic
cattgcagggccactgagtac

SEQ ID NO: 22242 - DNA, 21 bp, Artificial Sequence
  Synthetic
ttctcccttactgacccaagg

SEQ ID NO: 22243 - DNA, 21 bp, Artificial Sequence
  Synthetic
aaacagatcggagacatggcc

SEQ ID NO: 22244 - DNA, 21 bp, Artificial Sequence
  Synthetic
agaatggttagcggcattggg

SEQ ID NO: 22245 - DNA, 20 bp, Artificial Sequence
  Synthetic
gcgacaagcgaacaatggag

SEQ ID NO: 22246 - DNA, 25 bp, Artificial Sequence
  Synthetic
agaaggacaagaattgcatatgaga

SEQ ID NO: 22247 - DNA, 23 bp, Artificial Sequence
  Synthetic
atgagaacatggaagcaatggac

SEQ ID NO: 22248 - DNA, 22 bp, Artificial Sequence
  Synthetic
ggaagtgaaaattgatgacggc

SEQ ID NO: 22249 - DNA, 25 bp, Artificial Sequence
  Synthetic
tttggtggacaacttttttaacgag

SEQ ID NO: 22250 - DNA, 22 bp, Artificial Sequence
  Synthetic
aagacgagcaagacgagaacgg

SEQ ID NO: 22251 - DNA, 25 bp, Artificial Sequence
  Synthetic
agaggaagaaagagaacaaacagtg

SEQ ID NO: 22252 - DNA, 23 bp, Artificial Sequence
  Synthetic
aaacacttcaggtttttggaggt

SEQ ID NO: 22253 - DNA, 20 bp, Artificial Sequence
  Synthetic
ctgccgacgttgcaagagga

SEQ ID NO: 22254 - DNA, 25 bp, Artificial Sequence
  Synthetic
tataggtaacggggcaatagttgag

SEQ ID NO: 22255 - DNA, 25 bp, Artificial Sequence
  Synthetic
tgaagggaatggctattttaaagca

SEQ ID NO: 22256 - DNA, 22 bp, Artificial Sequence
  Synthetic
tgatgatactcgacatcgttgc

SEQ ID NO: 22257 - DNA, 21 bp, Artificial Sequence
  Synthetic
cgcttctacggctcgcagtat

SEQ ID NO: 22258 - DNA, 21 bp, Artificial Sequence
  Synthetic
gcattaggccatctttgggat

SEQ ID NO: 22259 - DNA, 21 bp, Artificial Sequence
  Synthetic
cgaaaacggtgtagccagtac

SEQ ID NO: 22260 - DNA, 20 bp, Artificial Sequence
  Synthetic
ttaacgaggtgcagctgccg

SEQ ID NO: 22261 - DNA, 20 bp, Artificial Sequence
  Synthetic
gggtttggctggctgttgct

SEQ ID NO: 22262 - DNA, 20 bp, Artificial Sequence
  Synthetic
ggcgtacagttttggagcca

SEQ ID NO: 22263 - DNA, 24 bp, Artificial Sequence
  Synthetic
ctctgacacaaaagctctagtcca

SEQ ID NO: 22264 - DNA, 25 bp, Artificial Sequence
  Synthetic
acgtgtcagtttctataaacgatga

SEQ ID NO: 22265 - DNA, 21 bp, Artificial Sequence
  Synthetic
tgcgctcgtcagatagcaagc

SEQ ID NO: 22266 - DNA, 21 bp, Artificial Sequence
  Synthetic
agtaggatagcacctgccgcc

SEQ ID NO: 22267 - DNA, 25 bp, Artificial Sequence
  Synthetic
agcatataaaactgatttaccgcct

SEQ ID NO: 22268 - DNA, 23 bp, Artificial Sequence
  Synthetic
aagcggttattgattacctgagc

SEQ ID NO: 22269 - DNA, 23 bp, Artificial Sequence
  Synthetic
agagtctttttcccattggtccc

SEQ ID NO: 22270 - DNA, 20 bp, Artificial Sequence
  Synthetic
gcatcgttgcacgggctgta

SEQ ID NO: 22271 - DNA, 21 bp, Artificial Sequence
  Synthetic
cggaaacgggaaatcagggcg

SEQ ID NO: 22272 - DNA, 19 bp, Artificial Sequence
  Synthetic
ggttcgggtcctgcgggaa

SEQ ID NO: 22273 - DNA, 23 bp, Artificial Sequence
  Synthetic
gctgcaaggtcattagatatccg

SEQ ID NO: 22274 - DNA, 21 bp, Artificial Sequence
  Synthetic
gctcgaccgttttcacgtggt

SEQ ID NO: 22275 - DNA, 24 bp, Artificial Sequence
  Synthetic
ttgaagtaagctgttttaagccca

SEQ ID NO: 22276 - DNA, 24 bp, Artificial Sequence
  Synthetic
taagctcctgcattaatggtgtag

SEQ ID NO: 22277 - DNA, 22 bp, Artificial Sequence
  Synthetic
tgttgctcgcataaattcgcgg

SEQ ID NO: 22278 - DNA, 22 bp, Artificial Sequence
  Synthetic
gctatgagcacaagtgaggcgc

SEQ ID NO: 22279 - DNA, 20 bp, Artificial Sequence
  Synthetic
gacaacagcggggaggaagc

SEQ ID NO: 22280 - DNA, 25 bp, Artificial Sequence
  Synthetic
tgtacataatccagcaagtaaaccc

SEQ ID NO: 22281 - DNA, 22 bp, Artificial Sequence
  Synthetic
tgctgacgtcactggcgatgac

SEQ ID NO: 22282 - DNA, 20 bp, Artificial Sequence
  Synthetic
catccgcaaagatgaggctg

SEQ ID NO: 22283 - DNA, 20 bp, Artificial Sequence
  Synthetic
caaacgtccaggcagggttt

SEQ ID NO: 22284 - DNA, 21 bp, Artificial Sequence
  Synthetic
ccccctcctggattttacact

SEQ ID NO: 22285 - DNA, 22 bp, Artificial Sequence
  Synthetic
cacatgcgggggatgaaggaag

SEQ ID NO: 22286 - DNA, 25 bp, Artificial Sequence
  Synthetic
gtttaccaccaaatttaaggccagg

SEQ ID NO: 22287 - DNA, 23 bp, Artificial Sequence
  Synthetic
aactccgggagtgtacactaatg

SEQ ID NO: 22288 - DNA, 21 bp, Artificial Sequence
  Synthetic
tatcgcagctggtatttggca

SEQ ID NO: 22289 - DNA, 21 bp, Artificial Sequence
  Synthetic
cgtacgcggacattaccgagc

SEQ ID NO: 22290 - DNA, 19 bp, Artificial Sequence
  Synthetic
gctgcggccgcaacagcta

SEQ ID NO: 22291 - DNA, 21 bp, Artificial Sequence
  Synthetic
cgcccagacgtagggtacagt

SEQ ID NO: 22292 - DNA, 22 bp, Artificial Sequence
  Synthetic
acgtactagagcacatgaaggt

SEQ ID NO: 22293 - DNA, 19 bp, Artificial Sequence
  Synthetic
cgccgtagacgtcgacgca

SEQ ID NO: 22294 - DNA, 22 bp, Artificial Sequence
  Synthetic
ccaaccaaaggagaaaagcggc

SEQ ID NO: 22295 - DNA, 20 bp, Artificial Sequence
  Synthetic
cactccctcgatgatgccgc

SEQ ID NO: 22296 - DNA, 22 bp, Artificial Sequence
  Synthetic
ttaagccctattccggaaccgc

SEQ ID NO: 22297 - DNA, 24 bp, Artificial Sequence
  Synthetic
ctgctcaagttgtgttctataccg

SEQ ID NO: 22298 - DNA, 23 bp, Artificial Sequence
  Synthetic
cgttcgcgttattgagaatcacg

SEQ ID NO: 22299 - DNA, 24 bp, Artificial Sequence
  Synthetic
aacaagaacacctacgagtacatg

SEQ ID NO: 22300 - DNA, 21 bp, Artificial Sequence
  Synthetic
gggaaatgatcttcgggtgga

SEQ ID NO: 22301 - DNA, 24 bp, Artificial Sequence
  Synthetic
gtgtcaatcatgtttgactcctcc

SEQ ID NO: 22302 - DNA, 20 bp, Artificial Sequence
  Synthetic
ggatacctgggccccactat

SEQ ID NO: 22303 - DNA, 22 bp, Artificial Sequence
  Synthetic
tttccgggttttgtgtctcgcg

SEQ ID NO: 22304 - DNA, 25 bp, Artificial Sequence
  Synthetic
atggataaaaatcccactatggacc

SEQ ID NO: 22305 - DNA, 20 bp, Artificial Sequence
  Synthetic
ccacagctggcgcacaagtt

SEQ ID NO: 22306 - DNA, 24 bp, Artificial Sequence
  Synthetic
gctatttgagccttcattccttca

SEQ ID NO: 22307 - DNA, 21 bp, Artificial Sequence
  Synthetic
accggtgggttcccaggaatt

SEQ ID NO: 22308 - DNA, 24 bp, Artificial Sequence
  Synthetic
acattcttttcattttcgtcgctg

SEQ ID NO: 22309 - DNA, 20 bp, Artificial Sequence
  Synthetic
aaaacgctgggctcgaggac

SEQ ID NO: 22310 - DNA, 20 bp, Artificial Sequence
  Synthetic
ttcttgctttaagggctggc

SEQ ID NO: 22311 - DNA, 22 bp, Artificial Sequence
  Synthetic
atggaaagccggttgtaagcga

SEQ ID NO: 22312 - DNA, 25 bp, Artificial Sequence
  Synthetic
aaccttcgagaactaaacaaactgt

SEQ ID NO: 22313 - DNA, 24 bp, Artificial Sequence
  Synthetic
ttcacgacgaacctaagacttacc

SEQ ID NO: 22314 - DNA, 22 bp, Artificial Sequence
  Synthetic
cgcagcaacgctcaaagaaaca

SEQ ID NO: 22315 - DNA, 22 bp, Artificial Sequence
  Synthetic
tgtagcctgctttcagcactgc

SEQ ID NO: 22316 - DNA, 20 bp, Artificial Sequence
  Synthetic
ccgcagctgtctctacctca

SEQ ID NO: 22317 - DNA, 22 bp, Artificial Sequence
  Synthetic
ttaaccctccctcttggccagc

SEQ ID NO: 22318 - DNA, 25 bp, Artificial Sequence
  Synthetic
tgaagatttctgctgtcatttgtgt

SEQ ID NO: 22319 - DNA, 24 bp, Artificial Sequence
  Synthetic
ttgttgctccagttattgacaaac

SEQ ID NO: 22320 - DNA, 22 bp, Artificial Sequence
  Synthetic
gtatgctcaaacagccgaaaga

SEQ ID NO: 22321 - DNA, 20 bp, Artificial Sequence
  Synthetic
atacggtaagggcagcccaa

SEQ ID NO: 22322 - DNA, 23 bp, Artificial Sequence
  Synthetic
ttctcatctttttatgcctgcca

SEQ ID NO: 22323 - DNA, 21 bp, Artificial Sequence
  Synthetic
cccccaggatgatttacccct

SEQ ID NO: 22324 - DNA, 20 bp, Artificial Sequence
  Synthetic
tcaactgtgctacacgctgc

SEQ ID NO: 22325 - DNA, 25 bp, Artificial Sequence
  Synthetic
aaatggaaggtcagattcttcttcc

SEQ ID NO: 22326 - DNA, 25 bp, Artificial Sequence
  Synthetic
tcacaaggtcttaaactttcttgga

SEQ ID NO: 22327 - DNA, 22 bp, Artificial Sequence
  Synthetic
aatggtgagctccgatgggttg

SEQ ID NO: 22328 - DNA, 22 bp, Artificial Sequence
  Synthetic
ctgtccttaagacggggattgg

SEQ ID NO: 22329 - DNA, 20 bp, Artificial Sequence
  Synthetic
ctggttccccaagcttcgtg

SEQ ID NO: 22330 - DNA, 24 bp, Artificial Sequence
  Synthetic
tacactatacgcgtggttaaactg

SEQ ID NO: 22331 - DNA, 20 bp, Artificial Sequence
  Synthetic
cgcccaaggattctctcgtt

SEQ ID NO: 22332 - DNA, 23 bp, Artificial Sequence
  Synthetic
ccagctgacatacactgtagtga

SEQ ID NO: 22333 - DNA, 20 bp, Artificial Sequence
  Synthetic
ttcctcacagggcggtagtt

SEQ ID NO: 22334 - DNA, 20 bp, Artificial Sequence
  Synthetic
ccgctgtgctggtgaaagat

SEQ ID NO: 22335 - DNA, 22 bp, Artificial Sequence
  Synthetic
gcaaagaaagttcacctccagg

SEQ ID NO: 22336 - DNA, 21 bp, Artificial Sequence
  Synthetic
ctggcaaacgggtggaaaaac

SEQ ID NO: 22337 - DNA, 20 bp, Artificial Sequence
  Synthetic
catagccccaggtcccgtaa

SEQ ID NO: 22338 - DNA, 20 bp, Artificial Sequence
  Synthetic
gcctatggctggtcgctcaa

SEQ ID NO: 22339 - DNA, 22 bp, Artificial Sequence
  Synthetic
gttgaggcttgtgggttttccg

SEQ ID NO: 22340 - DNA, 20 bp, Artificial Sequence
  Synthetic
gcctgagcaccagttggctt

SEQ ID NO: 22341 - DNA, 21 bp, Artificial Sequence
  Synthetic
gaatgcctagtggggctaacc

SEQ ID NO: 22342 - DNA, 23 bp, Artificial Sequence
  Synthetic
acagaaggtggctttatcacatt

SEQ ID NO: 22343 - DNA, 25 bp, Artificial Sequence
  Synthetic
tcaagagctggaaaataaacttcca

SEQ ID NO: 22344 - DNA, 25 bp, Artificial Sequence
  Synthetic
gtaccaattacaacaagcaaaagcc

SEQ ID NO: 22345 - DNA, 20 bp, Artificial Sequence
  Synthetic
gatggtgactgcaggtggag

SEQ ID NO: 22346 - DNA, 22 bp, Artificial Sequence
  Synthetic
atccaagttcattgactggctg

SEQ ID NO: 22347 - DNA, 23 bp, Artificial Sequence
  Synthetic
tttgtcagatggtttcaagcact

SEQ ID NO: 22348 - DNA, 25 bp, Artificial Sequence
  Synthetic
cattgtagatcttcttagtgcctcc

SEQ ID NO: 22349 - DNA, 25 bp, Artificial Sequence
  Synthetic
ataacgattttgtggctagatcgaa

SEQ ID NO: 22350 - DNA, 20 bp, Artificial Sequence
  Synthetic
cgctgtgttgacccagaaag

SEQ ID NO: 22351 - DNA, 24 bp, Artificial Sequence
  Synthetic
gtaatctctatgctggcttccatg

SEQ ID NO: 22352 - DNA, 23 bp, Artificial Sequence
  Synthetic
atggattgacaataacacctgct

SEQ ID NO: 22353 - DNA, 22 bp, Artificial Sequence
  Synthetic
ttctgcagacgattcgacattt

SEQ ID NO: 22354 - DNA, 25 bp, Artificial Sequence
  Synthetic
tcggtggttccatttagaatagaca

SEQ ID NO: 22355 - DNA, 25 bp, Artificial Sequence
  Synthetic
tgcactgacagtatagatacgttgg

SEQ ID NO: 22356 - DNA, 24 bp, Artificial Sequence
  Synthetic
tgaaagacacagcaaaaggagatt

SEQ ID NO: 22357 - DNA, 21 bp, Artificial Sequence
  Synthetic
ctgtttttggacaaacaccgg

SEQ ID NO: 22358 - DNA, 24 bp, Artificial Sequence
  Synthetic
ctcatattgagtcacaggagagca

SEQ ID NO: 22359 - DNA, 25 bp, Artificial Sequence
  Synthetic
ggactgtgcattttaaaacccaagt

SEQ ID NO: 22360 - DNA, 20 bp, Artificial Sequence
  Synthetic
gtcaggagaaaccccccgca

SEQ ID NO: 22361 - DNA, 21 bp, Artificial Sequence
  Synthetic
actgtttggaactgggttgga

SEQ ID NO: 22362 - DNA, 25 bp, Artificial Sequence
  Synthetic
gggaagtgtaatatacctaggaggc

SEQ ID NO: 22363 - DNA, 24 bp, Artificial Sequence
  Synthetic
ttctgttgtgccattagaggatct

SEQ ID NO: 22364 - DNA, 20 bp, Artificial Sequence
  Synthetic
gagcctcagcaactccacat

SEQ ID NO: 22365 - DNA, 21 bp, Artificial Sequence
  Synthetic
cccagctttactgacacagcc

SEQ ID NO: 22366 - DNA, 20 bp, Artificial Sequence
  Synthetic
aattgggcaggcggttcatt

SEQ ID NO: 22367 - DNA, 24 bp, Artificial Sequence
  Synthetic
atgattctgatcatgaacgcctag

SEQ ID NO: 22368 - DNA, 25 bp, Artificial Sequence
  Synthetic
agaagagaacaactatatgccagac

SEQ ID NO: 22369 - DNA, 23 bp, Artificial Sequence
  Synthetic
tagagctacaagatgccctacac

SEQ ID NO: 22370 - DNA, 24 bp, Artificial Sequence
  Synthetic
gtccgcaccccaataattatttgc

SEQ ID NO: 22371 - DNA, 21 bp, Artificial Sequence
  Synthetic
acagaccacgatccccacacc

SEQ ID NO: 22372 - DNA, 23 bp, Artificial Sequence
  Synthetic
gccttaaccacaaattctttggc

SEQ ID NO: 22373 - DNA, 22 bp, Artificial Sequence
  Synthetic
tgccagcctattcacatacctg

SEQ ID NO: 22374 - DNA, 20 bp, Artificial Sequence
  Synthetic
atcacatgagaacggcgcga

SEQ ID NO: 22375 - DNA, 24 bp, Artificial Sequence
  Synthetic
atgtcacatggatcatcaaccaaa

SEQ ID NO: 22376 - DNA, 23 bp, Artificial Sequence
  Synthetic
attgtgtaatggaggcagaaaca

SEQ ID NO: 22377 - DNA, 24 bp, Artificial Sequence
  Synthetic
caggatgaacagtgatcagtttgc

SEQ ID NO: 22378 - DNA, 23 bp, Artificial Sequence
  Synthetic
aacagcttatcaccttctactgc

SEQ ID NO: 22379 - DNA, 20 bp, Artificial Sequence
  Synthetic
aagcgtgtttgaatcagcgg

SEQ ID NO: 22380 - DNA, 20 bp, Artificial Sequence
  Synthetic
gaccagttgtgcaagacgtt

SEQ ID NO: 22381 - DNA, 25 bp, Artificial Sequence
  Synthetic
aacaagacatcttagacgtgctaat

SEQ ID NO: 22382 - DNA, 23 bp, Artificial Sequence
  Synthetic
cagaagatgaggtggacgaagtg

SEQ ID NO: 22383 - DNA, 24 bp, Artificial Sequence
  Synthetic
cccaacaggtacacaaatatcaga

SEQ ID NO: 22384 - DNA, 20 bp, Artificial Sequence
  Synthetic
tccacgattggacgccatta

SEQ ID NO: 22385 - DNA, 21 bp, Artificial Sequence
  Synthetic
caggcacagcaggaatattgg

SEQ ID NO: 22386 - DNA, 24 bp, Artificial Sequence
  Synthetic
gcatttgaatatgcacaaagggga

SEQ ID NO: 22387 - DNA, 21 bp, Artificial Sequence
  Synthetic
atggaagcaatagccaagcgt

SEQ ID NO: 22388 - DNA, 25 bp, Artificial Sequence
  Synthetic
aacaagttatgaaatgtggcaaaca

SEQ ID NO: 22389 - DNA, 20 bp, Artificial Sequence
  Synthetic
accagcaccaaagacggaac

SEQ ID NO: 22390 - DNA, 24 bp, Artificial Sequence
  Synthetic
ctgggatttatgtcactgcaccta

SEQ ID NO: 22391 - DNA, 25 bp, Artificial Sequence
  Synthetic
aactctacttgtgtgttactgtccc

SEQ ID NO: 22392 - DNA, 20 bp, Artificial Sequence
  Synthetic
ccaggtgcaggttacagacc

SEQ ID NO: 22393 - DNA, 21 bp, Artificial Sequence
  Synthetic
tactgcacctatgggaacacc

SEQ ID NO: 22394 - DNA, 23 bp, Artificial Sequence
  Synthetic
cagcagttctagacttcttgcag

SEQ ID NO: 22395 - DNA, 25 bp, Artificial Sequence
  Synthetic
tccagattatttacaaatggctgca

SEQ ID NO: 22396 - DNA, 25 bp, Artificial Sequence
  Synthetic
acaatggtatttgttggggtaatca

SEQ ID NO: 22397 - DNA, 24 bp, Artificial Sequence
  Synthetic
cttttatgcactgtagccaactct

SEQ ID NO: 22398 - DNA, 22 bp, Artificial Sequence
  Synthetic
tggattaacccgctcaatgccc

SEQ ID NO: 22399 - DNA, 19 bp, Artificial Sequence
  Synthetic
cccagattgggtgtgcgcg

SEQ ID NO: 22400 - DNA, 21 bp, Artificial Sequence
  Synthetic
ggctttggaggacgggatcaa

SEQ ID NO: 22401 - DNA, 19 bp, Artificial Sequence
  Synthetic
tcgcagcgccatacatcgg

SEQ ID NO: 22402 - DNA, 20 bp, Artificial Sequence
  Synthetic
cctcgtgggggtggcctatt

SEQ ID NO: 22403 - DNA, 20 bp, Artificial Sequence
  Synthetic
cccactcggggtcgctaaca

SEQ ID NO: 22404 - DNA, 21 bp, Artificial Sequence
  Synthetic
gttcaccaaaacctgtggcgc

SEQ ID NO: 22405 - DNA, 21 bp, Artificial Sequence
  Synthetic
ccactacagcgtggcagatcc

SEQ ID NO: 22406 - DNA, 22 bp, Artificial Sequence
  Synthetic
ttctgatgctgcctgagagggc

SEQ ID NO: 22407 - DNA, 22 bp, Artificial Sequence
  Synthetic
tcttgcagtcctggtctgtcca

SEQ ID NO: 22408 - DNA, 20 bp, Artificial Sequence
  Synthetic
cctgtttcggccaggttggg

SEQ ID NO: 22409 - DNA, 20 bp, Artificial Sequence
  Synthetic
taacggcgtgatgtggaccg

SEQ ID NO: 22410 - DNA, 22 bp, Artificial Sequence
  Synthetic
cactgacaactcaacaccccca

SEQ ID NO: 22411 - DNA, 21 bp, Artificial Sequence
  Synthetic
ggtgcgccaatcacgtactca

SEQ ID NO: 22412 - DNA, 22 bp, Artificial Sequence
  Synthetic
aaagtgcgatgaactggccaga

SEQ ID NO: 22413 - DNA, 21 bp, Artificial Sequence
  Synthetic
gggaggttgggcacataccgg

SEQ ID NO: 22414 - DNA, 21 bp, Artificial Sequence
  Synthetic
ccaagctgggacaccatgtgg

SEQ ID NO: 22415 - DNA, 22 bp, Artificial Sequence
  Synthetic
aacacctcccactagtcgagca

SEQ ID NO: 22416 - DNA, 22 bp, Artificial Sequence
  Synthetic
gattcgcgactccgatgcttct

SEQ ID NO: 22417 - DNA, 19 bp, Artificial Sequence
  Synthetic
gaaggggccgtgcagtgga

SEQ ID NO: 22418 - DNA, 22 bp, Artificial Sequence
  Synthetic
aggctataagggagagtggcgc

SEQ ID NO: 22419 - DNA, 21 bp, Artificial Sequence
  Synthetic
ccacgcccctaagtgcaaacc

SEQ ID NO: 22420 - DNA, 21 bp, Artificial Sequence
  Synthetic
gtaccgctccccatgactccc

SEQ ID NO: 22421 - DNA, 22 bp, Artificial Sequence
  Synthetic
tccctctcccaggaggaaacgg

SEQ ID NO: 22422 - DNA, 20 bp, Artificial Sequence
  Synthetic
gcttgtaacaccttgcgcgg

SEQ ID NO: 22423 - DNA, 22 bp, Artificial Sequence
  Synthetic
taaccacatcagctccgtgtgg

SEQ ID NO: 22424 - DNA, 22 bp, Artificial Sequence
  Synthetic
accgaaaaggacatcagggtcg

SEQ ID NO: 22425 - DNA, 19 bp, Artificial Sequence
  Synthetic
aggaggacaaccgagccct

SEQ ID NO: 22426 - DNA, 22 bp, Artificial Sequence
  Synthetic
atcgggttggtttacggtaggc

SEQ ID NO: 22427 - DNA, 24 bp, Artificial Sequence
  Synthetic
atacatatactgtgatcatgggcg

SEQ ID NO: 22428 - DNA, 23 bp, Artificial Sequence
  Synthetic
gagtacaacaaatcacactcggg

SEQ ID NO: 22429 - DNA, 20 bp, Artificial Sequence
  Synthetic
tatgggtgtgttcgggcaaa

SEQ ID NO: 22430 - DNA, 25 bp, Artificial Sequence
  Synthetic
gatggggtcttcaaaactactcttc

SEQ ID NO: 22431 - DNA, 24 bp, Artificial Sequence
  Synthetic
actgatccagatacatacaccagt

SEQ ID NO: 22432 - DNA, 23 bp, Artificial Sequence
  Synthetic
gttgagaaaacgaaacagacggt

SEQ ID NO: 22433 - DNA, 21 bp, Artificial Sequence
  Synthetic
aagtgcttcaaaccccagtgt

SEQ ID NO: 22434 - DNA, 21 bp, Artificial Sequence
  Synthetic
acatcaatagggcgcacaaat

SEQ ID NO: 22435 - DNA, 24 bp, Artificial Sequence
  Synthetic
attaccccataatttgcgaaaagc

SEQ ID NO: 22436 - DNA, 21 bp, Artificial Sequence
  Synthetic
gttggagtgtatcgcagagga

SEQ ID NO: 22437 - DNA, 25 bp, Artificial Sequence
  Synthetic
tgtacatttccaaacactttcaggt

SEQ ID NO: 22438 - DNA, 24 bp, Artificial Sequence
  Synthetic
tgcaattgcagaacacttcaattc

SEQ ID NO: 22439 - DNA, 21 bp, Artificial Sequence
  Synthetic
ctaagccccccaacaatcttg

SEQ ID NO: 22440 - DNA, 24 bp, Artificial Sequence
  Synthetic
atgattatgcaacaaaaactgggc

SEQ ID NO: 22441 - DNA, 24 bp, Artificial Sequence
  Synthetic
aacctgctgtattgagtgacaatg

SEQ ID NO: 22442 - DNA, 24 bp, Artificial Sequence
  Synthetic
acaaagcattccatcaaaatcccg

SEQ ID NO: 22443 - DNA, 25 bp, Artificial Sequence
  Synthetic
aagagatacttcaagcctgatcaac

SEQ ID NO: 22444 - DNA, 22 bp, Artificial Sequence
  Synthetic
tcattggtcgagagaaccacgc

SEQ ID NO: 22445 - DNA, 22 bp, Artificial Sequence
  Synthetic
ttgcagatgcagcaagtgtgga

SEQ ID NO: 22446 - DNA, 21 bp, Artificial Sequence
  Synthetic
agtggaacgtggacgacctca

SEQ ID NO: 22447 - DNA, 21 bp, Artificial Sequence
  Synthetic
ccggggttgagtgtgactgtt

SEQ ID NO: 22448 - DNA, 20 bp, Artificial Sequence
  Synthetic
aagtgaaaacaacgcggcgc

SEQ ID NO: 22449 - DNA, 25 bp, Artificial Sequence
  Synthetic
aagcaattgagtcttgtatggaagg

SEQ ID NO: 22450 - DNA, 22 bp, Artificial Sequence
  Synthetic
caggctttgtgtagttgcaaca

SEQ ID NO: 22451 - DNA, 24 bp, Artificial Sequence
  Synthetic
agaagatgaagctacaaatgctgc

SEQ ID NO: 22452 - DNA, 22 bp, Artificial Sequence
  Synthetic
catcagctagcttcacaggcag

SEQ ID NO: 22453 - DNA, 24 bp, Artificial Sequence
  Synthetic
agtaggatttttggatgatgccac

SEQ ID NO: 22454 - DNA, 20 bp, Artificial Sequence
  Synthetic
acctacaccaagaccccgca

SEQ ID NO: 22455 - DNA, 25 bp, Artificial Sequence
  Synthetic
tgaaagacttgaagaggaagctagg

SEQ ID NO: 22456 - DNA, 21 bp, Artificial Sequence
  Synthetic
tcgcagacgaataaaacgagc

SEQ ID NO: 22457 - DNA, 22 bp, Artificial Sequence
  Synthetic
taggccacgtcctaccataccc

SEQ ID NO: 22458 - DNA, 24 bp, Artificial Sequence
  Synthetic
gggacctttaagaagtacaccttt

SEQ ID NO: 22459 - DNA, 24 bp, Artificial Sequence
  Synthetic
tattgcatttacagaacagccacg

SEQ ID NO: 22460 - DNA, 25 bp, Artificial Sequence
  Synthetic
atcagatgttcattgttggttgtgc

SEQ ID NO: 22461 - DNA, 25 bp, Artificial Sequence
  Synthetic
agatgtttcttttatggcaagaggg

SEQ ID NO: 22462 - DNA, 23 bp, Artificial Sequence
  Synthetic
taataggccattttgggtgcaca

SEQ ID NO: 22463 - DNA, 23 bp, Artificial Sequence
  Synthetic
tgtaccaactaggaatgctcaca

SEQ ID NO: 22464 - DNA, 22 bp, Artificial Sequence
  Synthetic
cgaaatcggtcgcttgtatagc

SEQ ID NO: 22465 - DNA, 22 bp, Artificial Sequence
  Synthetic
aacctaatgcaacctcgccagc

SEQ ID NO: 22466 - DNA, 19 bp, Artificial Sequence
  Synthetic
gggccggctgctaattgcc

SEQ ID NO: 22467 - DNA, 19 bp, Artificial Sequence
  Synthetic
ccccctggcacataccgca

SEQ ID NO: 22468 - DNA, 22 bp, Artificial Sequence
  Synthetic
tgttccttacccccggtctacc

SEQ ID NO: 22469 - DNA, 22 bp, Artificial Sequence
  Synthetic
ttaccatctgccaccagcggta

SEQ ID NO: 22470 - DNA, 21 bp, Artificial Sequence
  Synthetic
ggactgcgattcgtaaggcgg

SEQ ID NO: 22471 - DNA, 21 bp, Artificial Sequence
  Synthetic
ctgccctccaaccgctttacc

SEQ ID NO: 22472 - DNA, 19 bp, Artificial Sequence
  Synthetic
ctgggctggaggtgcgcta

SEQ ID NO: 22473 - DNA, 19 bp, Artificial Sequence
  Synthetic
attcgccggctcgctgttt

SEQ ID NO: 22474 - DNA, 20 bp, Artificial Sequence
  Synthetic
gacttgctcccgcctcggta

SEQ ID NO: 22475 - DNA, 22 bp, Artificial Sequence
  Synthetic
cttgactcagccacagacgtcg

SEQ ID NO: 22476 - DNA, 20 bp, Artificial Sequence
  Synthetic
gatgaggccccgtcccttcc

SEQ ID NO: 22477 - DNA, 21 bp, Artificial Sequence
  Synthetic
ggtcgttgttctggggtgagc

SEQ ID NO: 22478 - DNA, 22 bp, Artificial Sequence
  Synthetic
tccttgctggtggcgaaattgg

SEQ ID NO: 22479 - DNA, 20 bp, Artificial Sequence
  Synthetic
gtaaccgcgacgtgtccagg

SEQ ID NO: 22480 - DNA, 19 bp, Artificial Sequence
  Synthetic
gaagcagctccgcctcgct

SEQ ID NO: 22481 - DNA, 19 bp, Artificial Sequence
  Synthetic
gccgctgcctcacgtcgta

SEQ ID NO: 22482 - DNA, 21 bp, Artificial Sequence
  Synthetic
ttactccagcactgcccgtca

SEQ ID NO: 22483 - DNA, 22 bp, Artificial Sequence
  Synthetic
ttggttaatgtagcgaccggcg

SEQ ID NO: 22484 - DNA, 20 bp, Artificial Sequence
  Synthetic
ggccccgtctctatttccgc

SEQ ID NO: 22485 - DNA, 20 bp, Artificial Sequence
  Synthetic
acttgacgttcgtaatgggc

SEQ ID NO: 22486 - DNA, 24 bp, Artificial Sequence
  Synthetic
tctcgtgtatgtctaacgatgttc

SEQ ID NO: 22487 - DNA, 23 bp, Artificial Sequence
  Synthetic
gtattaacgcattgcccagttga

SEQ ID NO: 22488 - DNA, 20 bp, Artificial Sequence
  Synthetic
acaaacaatggtagaccgcg

SEQ ID NO: 22489 - DNA, 25 bp, Artificial Sequence
  Synthetic
gttgcaaaaacaaagacagtttgaa

SEQ ID NO: 22490 - DNA, 20 bp, Artificial Sequence
  Synthetic
ccagctccggattatgtggt

SEQ ID NO: 22491 - DNA, 20 bp, Artificial Sequence
  Synthetic
cgatgaacaccgttttgcac

SEQ ID NO: 22492 - DNA, 20 bp, Artificial Sequence
  Synthetic
ggcaccactggattccgttt

SEQ ID NO: 22493 - DNA, 22 bp, Artificial Sequence
  Synthetic
ctagctcctgcaaactttctgg

SEQ ID NO: 22494 - DNA, 20 bp, Artificial Sequence
  Synthetic
gtgtgcacaccgttgcattt

SEQ ID NO: 22495 - DNA, 23 bp, Artificial Sequence
  Synthetic
ctgcttcttccggtgaatattca

SEQ ID NO: 22496 - DNA, 22 bp, Artificial Sequence
  Synthetic
caccgttgcctttactgtaagt

SEQ ID NO: 22497 - DNA, 21 bp, Artificial Sequence
  Synthetic
actctgggaatcggggggagg

SEQ ID NO: 22498 - DNA, 20 bp, Artificial Sequence
  Synthetic
ccggtattcacggggcgaca

SEQ ID NO: 22499 - DNA, 19 bp, Artificial Sequence
  Synthetic
cgatccgggccaagggctt

SEQ ID NO: 22500 - DNA, 20 bp, Artificial Sequence
  Synthetic
tgggcgggtatcatcggtct

SEQ ID NO: 22501 - DNA, 24 bp, Artificial Sequence
  Synthetic
agctagaacgattcgcagttaatc

SEQ ID NO: 22502 - DNA, 21 bp, Artificial Sequence
  Synthetic
agcaatcaggtcagccaaaat

SEQ ID NO: 22503 - DNA, 22 bp, Artificial Sequence
  Synthetic
gagagaaccaaggggaagtgac

SEQ ID NO: 22504 - DNA, 20 bp, Artificial Sequence
  Synthetic
ggaccagcggctacactaga

SEQ ID NO: 22505 - DNA, 25 bp, Artificial Sequence
  Synthetic
gtagcatgacaaaaatcttagagcc

SEQ ID NO: 22506 - DNA, 24 bp, Artificial Sequence
  Synthetic
gttagtggggaaattgaattgggc

SEQ ID NO: 22507 - DNA, 24 bp, Artificial Sequence
  Synthetic
aaactgcccatacaaaaggaaaca

SEQ ID NO: 22508 - DNA, 23 bp, Artificial Sequence
  Synthetic
ctagtgattttaacctgccacct

SEQ ID NO: 22509 - DNA, 25 bp, Artificial Sequence
  Synthetic
atacatactgacaatggcagcaatt

SEQ ID NO: 22510 - DNA, 25 bp, Artificial Sequence
  Synthetic
aggggatgctagattggtaataaca

SEQ ID NO: 22511 - DNA, 25 bp, Artificial Sequence
  Synthetic
aacaccaaaaaagataaagccacct

SEQ ID NO: 22512 - DNA, 25 bp, Artificial Sequence
  Synthetic
acaactgctgtttatccattttcag

SEQ ID NO: 22513 - DNA, 23 bp, Artificial Sequence
  Synthetic
acagaggtacataatgtttgggc

SEQ ID NO: 22514 - DNA, 23 bp, Artificial Sequence
  Synthetic
ctgctgttaaatggcagtctagc

SEQ ID NO: 22515 - DNA, 25 bp, Artificial Sequence
  Synthetic
tggtggtaatagcaacaatgagtcc

SEQ ID NO: 22516 - DNA, 22 bp, Artificial Sequence
  Synthetic
gttgcaactcacagtctggggc

SEQ ID NO: 22517 - DNA, 22 bp, Artificial Sequence
  Synthetic
agcagctaccaatgctgcttgt

SEQ ID NO: 22518 - DNA, 20 bp, Artificial Sequence
  Synthetic
agggactttccgctggggac

SEQ ID NO: 22519 - DNA, 20 bp, Artificial Sequence
  Synthetic
acgaccttcaccgcgactcc

SEQ ID NO: 22520 - DNA, 20 bp, Artificial Sequence
  Synthetic
gagcgcgtgatggtcatcgc

SEQ ID NO: 22521 - DNA, 20 bp, Artificial Sequence
  Synthetic
cgctctcaaacacctccccg

SEQ ID NO: 22522 - DNA, 22 bp, Artificial Sequence
  Synthetic
taacgtcaaggtcgtcgtcggg

SEQ ID NO: 22523 - DNA, 19 bp, Artificial Sequence
  Synthetic
ggtccgaaacgtcccgtcg

SEQ ID NO: 22524 - DNA, 22 bp, Artificial Sequence
  Synthetic
tccttgtgggacgagaacagcc

SEQ ID NO: 22525 - DNA, 19 bp, Artificial Sequence
  Synthetic
cgttgagggtctgcacgca

SEQ ID NO: 22526 - DNA, 22 bp, Artificial Sequence
  Synthetic
ggtgcgctgcttcaagattctg

SEQ ID NO: 22527 - DNA, 19 bp, Artificial Sequence
  Synthetic
ccacgccctcgctgttcgt

SEQ ID NO: 22528 - DNA, 22 bp, Artificial Sequence
  Synthetic
cactggtacatggcccactacc

SEQ ID NO: 22529 - DNA, 19 bp, Artificial Sequence
  Synthetic
gagcgcggccccagactta

SEQ ID NO: 22530 - DNA, 22 bp, Artificial Sequence
  Synthetic
ctgcatgtagcggtcgtagtgg

SEQ ID NO: 22531 - DNA, 19 bp, Artificial Sequence
  Synthetic
gctctccggcggcgttgat

SEQ ID NO: 22532 - DNA, 20 bp, Artificial Sequence
  Synthetic
gagagtccgtacccgcccca

SEQ ID NO: 22533 - DNA, 19 bp, Artificial Sequence
  Synthetic
ggggtgagcgagtggagca

SEQ ID NO: 22534 - DNA, 19 bp, Artificial Sequence
  Synthetic
cggagaacgcgaggcccat

SEQ ID NO: 22535 - DNA, 19 bp, Artificial Sequence
  Synthetic
cgtgcttcagggggcggtt

SEQ ID NO: 22536 - DNA, 19 bp, Artificial Sequence
  Synthetic
cgaagagcgcactccccca

SEQ ID NO: 22537 - DNA, 22 bp, Artificial Sequence
  Synthetic
aaaggcgccaacaaacctagga

SEQ ID NO: 22538 - DNA, 18 bp, Artificial Sequence
  Synthetic
gcgggacttcgcccagtt

SEQ ID NO: 22539 - DNA, 21 bp, Artificial Sequence
  Synthetic
gtttgcctccagccacaacac

SEQ ID NO: 22540 - DNA, 20 bp, Artificial Sequence
  Synthetic
ggacaaggccgggtcccgta

SEQ ID NO: 22541 - DNA, 22 bp, Artificial Sequence
  Synthetic
ctcccggaaggtattgctcgca

SEQ ID NO: 22542 - DNA, 20 bp, Artificial Sequence
  Synthetic
cggcgtagatgcgcttctcc

SEQ ID NO: 22543 - DNA, 19 bp, Artificial Sequence
  Synthetic
ccggcggacgcgactaaca

SEQ ID NO: 22544 - DNA, 20 bp, Artificial Sequence
  Synthetic
caagggggtgtgggtgacga

SEQ ID NO: 22545 - DNA, 19 bp, Artificial Sequence
  Synthetic
gtccgccgggatgtcggat

SEQ ID NO: 22546 - DNA, 21 bp, Artificial Sequence
  Synthetic
cgtactaccctttcgacgcgc

SEQ ID NO: 22547 - DNA, 19 bp, Artificial Sequence
  Synthetic
gtgcgccgtgctgtgtctg

SEQ ID NO: 22548 - DNA, 20 bp, Artificial Sequence
  Synthetic
gctgggcatgctgatcccgg

SEQ ID NO: 22549 - DNA, 19 bp, Artificial Sequence
  Synthetic
gtgacgtcggcgcgactca

SEQ ID NO: 22550 - DNA, 19 bp, Artificial Sequence
  Synthetic
aggagccccacgttctcga

SEQ ID NO: 22551 - DNA, 19 bp, Artificial Sequence
  Synthetic
gggcggtccagaaccactg

SEQ ID NO: 22552 - DNA, 19 bp, Artificial Sequence
  Synthetic
acaacccccacctcgctca

SEQ ID NO: 22553 - DNA, 22 bp, Artificial Sequence
  Synthetic
agcgacgtcgagtttaactgca

SEQ ID NO: 22554 - DNA, 20 bp, Artificial Sequence
  Synthetic
ggaacgcgtaatcggccacc

SEQ ID NO: 22555 - DNA, 21 bp, Artificial Sequence
  Synthetic
ttcggtgctgtttcaggggtt

SEQ ID NO: 22556 - DNA, 19 bp, Artificial Sequence
  Synthetic
gctttgtgcgcatgccccg

SEQ ID NO: 22557 - DNA, 20 bp, Artificial Sequence
  Synthetic
cttcgcccaccgattcctgt

SEQ ID NO: 22558 - DNA, 18 bp, Artificial Sequence
  Synthetic
gtatgcgacgcggctggt

SEQ ID NO: 22559 - DNA, 18 bp, Artificial Sequence
  Synthetic
tggtggcggcgcacaaca

SEQ ID NO: 22560 - DNA, 19 bp, Artificial Sequence
  Synthetic
cacacggcgtgcctgaaga

SEQ ID NO: 22561 - DNA, 20 bp, Artificial Sequence
  Synthetic
gcgagcaccgaccccctaga

SEQ ID NO: 22562 - DNA, 22 bp, Artificial Sequence
  Synthetic
aggacgtctccaagctctccga

SEQ ID NO: 22563 - DNA, 19 bp, Artificial Sequence
  Synthetic
gcgacgtccggcgacatag

SEQ ID NO: 22564 - DNA, 19 bp, Artificial Sequence
  Synthetic
cgctatcgtcggctgcggt

SEQ ID NO: 22565 - DNA, 20 bp, Artificial Sequence
  Synthetic
caggtcgaggatcgcgtcgc

SEQ ID NO: 22566 - DNA, 19 bp, Artificial Sequence
  Synthetic
gggggcggagtcgttcaac

SEQ ID NO: 22567 - DNA, 22 bp, Artificial Sequence
  Synthetic
tgcgttatcacctcctcgctcg

SEQ ID NO: 22568 - DNA, 19 bp, Artificial Sequence
  Synthetic
cggctccctgacgatgcgt

SEQ ID NO: 22569 - DNA, 22 bp, Artificial Sequence
  Synthetic
ttttcgagaagaaggcgtcgcg

SEQ ID NO: 22570 - DNA, 20 bp, Artificial Sequence
  Synthetic
cgcctatgcgcgtccctgtg

SEQ ID NO: 22571 - DNA, 20 bp, Artificial Sequence
  Synthetic
acgacgatgcatgttcggcg

SEQ ID NO: 22572 - DNA, 20 bp, Artificial Sequence
  Synthetic
gttcgaggcggatccggtca

SEQ ID NO: 22573 - DNA, 18 bp, Artificial Sequence
  Synthetic
tggcaggccgaaaacgcc

SEQ ID NO: 22574 - DNA, 20 bp, Artificial Sequence
  Synthetic
cggtcgtagtccaacgtgcc

SEQ ID NO: 22575 - DNA, 18 bp, Artificial Sequence
  Synthetic
gcatgccccgcaaaacgc

SEQ ID NO: 22576 - DNA, 20 bp, Artificial Sequence
  Synthetic
atgcagaaggggtgcaggca

SEQ ID NO: 22577 - DNA, 19 bp, Artificial Sequence
  Synthetic
ggggcggggtttgttgtga

SEQ ID NO: 22578 - DNA, 19 bp, Artificial Sequence
  Synthetic
ctccccagagcctgctggt

SEQ ID NO: 22579 - DNA, 22 bp, Artificial Sequence
  Synthetic
tttcgcgggaagaaccttccgg

SEQ ID NO: 22580 - DNA, 20 bp, Artificial Sequence
  Synthetic
ccatcggaggccccccagat

SEQ ID NO: 22581 - DNA, 19 bp, Artificial Sequence
  Synthetic
gggtggcgctctctgccaa

SEQ ID NO: 22582 - DNA, 20 bp, Artificial Sequence
  Synthetic
cgatcctgccgctcgttcga

SEQ ID NO: 22583 - DNA, 21 bp, Artificial Sequence
  Synthetic
acgaagtgtcttgtgcagcca

SEQ ID NO: 22584 - DNA, 24 bp, Artificial Sequence
  Synthetic
aatcgtgcgtaaattgctataccc

SEQ ID NO: 22585 - DNA, 22 bp, Artificial Sequence
  Synthetic
caggcactcctggtcaacagtc

SEQ ID NO: 22586 - DNA, 20 bp, Artificial Sequence
  Synthetic
tttgctgcgacaacaatgcc

SEQ ID NO: 22587 - DNA, 23 bp, Artificial Sequence
  Synthetic
gtggtgtctaatcagcagacaga

SEQ ID NO: 22588 - DNA, 20 bp, Artificial Sequence
  Synthetic
tggaccatggggaagctgat

SEQ ID NO: 22589 - DNA, 21 bp, Artificial Sequence
  Synthetic
gggcacggtgctgtctaatag

SEQ ID NO: 22590 - DNA, 25 bp, Artificial Sequence
  Synthetic
tgaatggtataaagctagaggtggc

SEQ ID NO: 22591 - DNA, 22 bp, Artificial Sequence
  Synthetic
aaggtactacgaccgcaggggt

SEQ ID NO: 22592 - DNA, 21 bp, Artificial Sequence
  Synthetic
aagggttaaacgcgctaatcc

SEQ ID NO: 22593 - DNA, 22 bp, Artificial Sequence
  Synthetic
ggtccccgggatattttgccaa

SEQ ID NO: 22594 - DNA, 20 bp, Artificial Sequence
  Synthetic
ggcgaggaggagactgcctt

SEQ ID NO: 22595 - DNA, 20 bp, Artificial Sequence
  Synthetic
gttagtcgcctggggcaacg

SEQ ID NO: 22596 - DNA, 24 bp, Artificial Sequence
  Synthetic
ttgagcaagacataggactaaccg

SEQ ID NO: 22597 - DNA, 21 bp, Artificial Sequence
  Synthetic
cactgaccgtttgcttactgt

SEQ ID NO: 22598 - DNA, 21 bp, Artificial Sequence
  Synthetic
actgaccaaggttcagactca

SEQ ID NO: 22599 - DNA, 22 bp, Artificial Sequence
  Synthetic
cataggcctgggaaacttgaat

SEQ ID NO: 22600 - DNA, 21 bp, Artificial Sequence
  Synthetic
gaggagtttcagcttgccttt

SEQ ID NO: 22601 - DNA, 24 bp, Artificial Sequence
  Synthetic
tgatctacgggatcgtatgacaga

SEQ ID NO: 22602 - DNA, 22 bp, Artificial Sequence
  Synthetic
actgaaacggtgtgtactgcca

SEQ ID NO: 22603 - DNA, 25 bp, Artificial Sequence
  Synthetic
agaatgcacctgttttaattgtggt

SEQ ID NO: 22604 - DNA, 24 bp, Artificial Sequence
  Synthetic
tcgaaaaaacatcaaaagacgctt

SEQ ID NO: 22605 - DNA, 25 bp, Artificial Sequence
  Synthetic
ttgctttctcaaattgaacattgga

SEQ ID NO: 22606 - DNA, 25 bp, Artificial Sequence
  Synthetic
acttgggaaatttgggtattggtac

SEQ ID NO: 22607 - DNA, 23 bp, Artificial Sequence
  Synthetic
tacacaaatcccgcctttgatcc

SEQ ID NO: 22608 - DNA, 23 bp, Artificial Sequence
  Synthetic
agaactacagcctttagggtctt

SEQ ID NO: 22609 - DNA, 25 bp, Artificial Sequence
  Synthetic
tgttggacatccatactttgaagtg

SEQ ID NO: 22610 - DNA, 25 bp, Artificial Sequence
  Synthetic
aatccaaatcagtatcctccagagg

SEQ ID NO: 22611 - DNA, 23 bp, Artificial Sequence
  Synthetic
ggtcttagcctggtttggagaag

SEQ ID NO: 22612 - DNA, 23 bp, Artificial Sequence
  Synthetic
ctggaaaggtttgtgtagacagt

SEQ ID NO: 22613 - DNA, 20 bp, Artificial Sequence
  Synthetic
tgctgtttgcagaacttggt

SEQ ID NO: 22614 - DNA, 21 bp, Artificial Sequence
  Synthetic
agctgattgatgatgccgatg

SEQ ID NO: 22615 - DNA, 23 bp, Artificial Sequence
  Synthetic
agaaacatctgtggtggaaaagc

SEQ ID NO: 22616 - DNA, 23 bp, Artificial Sequence
  Synthetic
acaatgggcatttgacaatgaca

SEQ ID NO: 22617 - DNA, 23 bp, Artificial Sequence
  Synthetic
agacttgagaaaagaggatggcg

SEQ ID NO: 22618 - DNA, 20 bp, Artificial Sequence
  Synthetic
cgcagagcctcagccctaga

SEQ ID NO: 22619 - DNA, 22 bp, Artificial Sequence
  Synthetic
cgcgacttcaacgacttcaagc

SEQ ID NO: 22620 - DNA, 21 bp, Artificial Sequence
  Synthetic
aaacgggacactgctgaaaat

SEQ ID NO: 22621 - DNA, 23 bp, Artificial Sequence
  Synthetic
gtggtacaacccactgttaaacc

SEQ ID NO: 22622 - DNA, 21 bp, Artificial Sequence
  Synthetic
aactctaggggctacaggagg

SEQ ID NO: 22623 - DNA, 23 bp, Artificial Sequence
  Synthetic
tctttgcaaagaactagcacacc

SEQ ID NO: 22624 - DNA, 20 bp, Artificial Sequence
  Synthetic
tgctccagatcccgccttta

SEQ ID NO: 22625 - DNA, 25 bp, Artificial Sequence
  Synthetic
ttgatgtttttggtgacttcagtga

SEQ ID NO: 22626 - DNA, 25 bp, Artificial Sequence
  Synthetic
aattaggtgacactgaaaatcctgc

SEQ ID NO: 22627 - DNA, 22 bp, Artificial Sequence
  Synthetic
ttggggctgcaaacttcaaaac

SEQ ID NO: 22628 - DNA, 25 bp, Artificial Sequence
  Synthetic
tgctttaattctactgactcatggg

SEQ ID NO: 22629 - DNA, 22 bp, Artificial Sequence
  Synthetic
agactgactcaaatctggcagc

SEQ ID NO: 22630 - DNA, 25 bp, Artificial Sequence
  Synthetic
aaatggactacatcaaggaaggaaa

SEQ ID NO: 22631 - DNA, 25 bp, Artificial Sequence
  Synthetic
tactggagtgagcaagaagaattct

SEQ ID NO: 22632 - DNA, 25 bp, Artificial Sequence
  Synthetic
ttcaggatgtaagctttcaacatcc

SEQ ID NO: 22633 - DNA, 25 bp, Artificial Sequence
  Synthetic
gaagggtttagtgtttgtgaaaacg

SEQ ID NO: 22634 - DNA, 24 bp, Artificial Sequence
  Synthetic
aagaatctagctgatgtggtatgc

SEQ ID NO: 22635 - DNA, 21 bp, Artificial Sequence
  Synthetic
atctgatgaggagacccagga

SEQ ID NO: 22636 - DNA, 23 bp, Artificial Sequence
  Synthetic
caaggcttcaagcagtttcaatt

SEQ ID NO: 22637 - DNA, 25 bp, Artificial Sequence
  Synthetic
aatacgtttttttgggggaaaagtt

SEQ ID NO: 22638 - DNA, 24 bp, Artificial Sequence
  Synthetic
attgggagctggttagaaaagagc

SEQ ID NO: 22639 - DNA, 22 bp, Artificial Sequence
  Synthetic
agaagaagaacagccaccgacg

SEQ ID NO: 22640 - DNA, 22 bp, Artificial Sequence
  Synthetic
attgctgcgcatttttggtagt

SEQ ID NO: 22641 - DNA, 24 bp, Artificial Sequence
  Synthetic
agagagctcactacctacagaatc

SEQ ID NO: 22642 - DNA, 25 bp, Artificial Sequence
  Synthetic
ctggtgatgtaagtcttgaatttgc

SEQ ID NO: 22643 - DNA, 25 bp, Artificial Sequence
  Synthetic
ctaatttaggggagtttagtgggga

SEQ ID NO: 22644 - DNA, 25 bp, Artificial Sequence
  Synthetic
ttggaactcagttacattttcatgc

SEQ ID NO: 22645 - DNA, 25 bp, Artificial Sequence
  Synthetic
aaggtattcaaattggtagaggtgg

SEQ ID NO: 22646 - DNA, 24 bp, Artificial Sequence
  Synthetic
taatgctgttattcaggacggaac

SEQ ID NO: 22647 - DNA, 23 bp, Artificial Sequence
  Synthetic
tatggctcgtgaaggtaaaatgg

SEQ ID NO: 22648 - DNA, 24 bp, Artificial Sequence
  Synthetic
ctactgaaaatcctgctccagaaa

SEQ ID NO: 22649 - DNA, 20 bp, Artificial Sequence
  Synthetic
tctctcgaacggaagcggta

SEQ ID NO: 22650 - DNA, 25 bp, Artificial Sequence
  Synthetic
gtgcagaaattgtaagtcatgaagg

SEQ ID NO: 22651 - DNA, 22 bp, Artificial Sequence
  Synthetic
aacttctgcttcaattcgcaca

SEQ ID NO: 22652 - DNA, 24 bp, Artificial Sequence
  Synthetic
ggaaattccctggcactatacaac

SEQ ID NO: 22653 - DNA, 21 bp, Artificial Sequence
  Synthetic
cccataacactgcgttgttgg

SEQ ID NO: 22654 - DNA, 23 bp, Artificial Sequence
  Synthetic
tcaagaggaagctagggatccac

SEQ ID NO: 22655 - DNA, 24 bp, Artificial Sequence
  Synthetic
gcaaaggtcctgaaataactgtga

SEQ ID NO: 22656 - DNA, 25 bp, Artificial Sequence
  Synthetic
aagaattatcaatcaagggcaacga

SEQ ID NO: 22657 - DNA, 25 bp, Artificial Sequence
  Synthetic
atagggttttcagatttcatttgcc

SEQ ID NO: 22658 - DNA, 24 bp, Artificial Sequence
  Synthetic
atggagcctaagcaaaatcaattg

SEQ ID NO: 22659 - DNA, 25 bp, Artificial Sequence
  Synthetic
tcagattggaatgttaaatgggagc

SEQ ID NO: 22660 - DNA, 25 bp, Artificial Sequence
  Synthetic
atttggccagtattaatacccacac

SEQ ID NO: 22661 - DNA, 22 bp, Artificial Sequence
  Synthetic
aaaacgtcaacaaaagccaggt

SEQ ID NO: 22662 - DNA, 25 bp, Artificial Sequence
  Synthetic
attcctaactttgatggaaacgtct

SEQ ID NO: 22663 - DNA, 24 bp, Artificial Sequence
  Synthetic
attcgttatggctaccgatgaaat

SEQ ID NO: 22664 - DNA, 20 bp, Artificial Sequence
  Synthetic
ggcggccaacccagcttatg

SEQ ID NO: 22665 - DNA, 23 bp, Artificial Sequence
  Synthetic
cgaatgttgaagcatgtggttac

SEQ ID NO: 22666 - DNA, 25 bp, Artificial Sequence
  Synthetic
ttaccattcacttggtagaacaggt

SEQ ID NO: 22667 - DNA, 20 bp, Artificial Sequence
  Synthetic
tggacggaactcttctaggc

SEQ ID NO: 22668 - DNA, 21 bp, Artificial Sequence
  Synthetic
ccacaagggttacccactact

SEQ ID NO: 22669 - DNA, 25 bp, Artificial Sequence
  Synthetic
ttgggtgaaatagctcagtactaca

SEQ ID NO: 22670 - DNA, 23 bp, Artificial Sequence
  Synthetic
cattccatggacatcaggtgtac

SEQ ID NO: 22671 - DNA, 22 bp, Artificial Sequence
  Synthetic
gctggcttggataatcacagga

SEQ ID NO: 22672 - DNA, 20 bp, Artificial Sequence
  Synthetic
tgcttctaaccccagtgtgt

SEQ ID NO: 22673 - DNA, 22 bp, Artificial Sequence
  Synthetic
tggattccaagagcacctagag

SEQ ID NO: 22674 - DNA, 25 bp, Artificial Sequence
  Synthetic
acaggaagttctatcccatcatttg

SEQ ID NO: 22675 - DNA, 25 bp, Artificial Sequence
  Synthetic
agacaattggatttcattgctgatg

SEQ ID NO: 22676 - DNA, 25 bp, Artificial Sequence
  Synthetic
aatcccactcaagagaaaagagagc

SEQ ID NO: 22677 - DNA, 20 bp, Artificial Sequence
  Synthetic
cgcgcattggcagaacattt

SEQ ID NO: 22678 - DNA, 22 bp, Artificial Sequence
  Synthetic
atcttgaacccagaagctctga

SEQ ID NO: 22679 - DNA, 22 bp, Artificial Sequence
  Synthetic
atgcccaaccaggtgataatgt

SEQ ID NO: 22680 - DNA, 23 bp, Artificial Sequence
  Synthetic
atacaccaacaaccaggatgatc

SEQ ID NO: 22681 - DNA, 25 bp, Artificial Sequence
  Synthetic
agtgtgttttacaatgtgttccctg

SEQ ID NO: 22682 - DNA, 25 bp, Artificial Sequence
  Synthetic
aaatcgaaacaaacaaatttgcagc

SEQ ID NO: 22683 - DNA, 20 bp, Artificial Sequence
  Synthetic
cctgttctcagcggtccaaa

SEQ ID NO: 22684 - DNA, 25 bp, Artificial Sequence
  Synthetic
aggaattatttcacatcagaggtgt

SEQ ID NO: 22685 - DNA, 24 bp, Artificial Sequence
  Synthetic
ccaagacttgaaccacacaaatgg

SEQ ID NO: 22686 - DNA, 25 bp, Artificial Sequence
  Synthetic
aagacatgaccaaagagttctttga

SEQ ID NO: 22687 - DNA, 22 bp, Artificial Sequence
  Synthetic
tgcccttaggatgaagtggatg

SEQ ID NO: 22688 - DNA, 20 bp, Artificial Sequence
  Synthetic
ggccccgttcacttcagaaa

SEQ ID NO: 22689 - DNA, 22 bp, Artificial Sequence
  Synthetic
acatgttggagagagaactggt

SEQ ID NO: 22690 - DNA, 20 bp, Artificial Sequence
  Synthetic
agtacacagattggcgggat

SEQ ID NO: 22691 - DNA, 22 bp, Artificial Sequence
  Synthetic
cgaagagcaacagccattctaa

SEQ ID NO: 22692 - DNA, 24 bp, Artificial Sequence
  Synthetic
gtttcaaaactggggaattgaacc

SEQ ID NO: 22693 - DNA, 22 bp, Artificial Sequence
  Synthetic
attcatcgtccatgatgtggga

SEQ ID NO: 22694 - DNA, 25 bp, Artificial Sequence
  Synthetic
ctcttctctaactgtgaatgtgagg

SEQ ID NO: 22695 - DNA, 22 bp, Artificial Sequence
  Synthetic
agtgagagggtattggagaggc

SEQ ID NO: 22696 - DNA, 25 bp, Artificial Sequence
  Synthetic
gacgatgagaattttcaagaacagg

SEQ ID NO: 22697 - DNA, 24 bp, Artificial Sequence
  Synthetic
tttctgaacaggtagaagtgcaaa

SEQ ID NO: 22698 - DNA, 20 bp, Artificial Sequence
  Synthetic
gggccctccagatccaccga

SEQ ID NO: 22699 - DNA, 20 bp, Artificial Sequence
  Synthetic
ggaggctcgggatccgtata

SEQ ID NO: 22700 - DNA, 22 bp, Artificial Sequence
  Synthetic
ggatacacaccttttggaggca

SEQ ID NO: 22701 - DNA, 22 bp, Artificial Sequence
  Synthetic
tggtgaacatccttccgttaca

SEQ ID NO: 22702 - DNA, 21 bp, Artificial Sequence
  Synthetic
aaacgcaaacactcctcctct

SEQ ID NO: 22703 - DNA, 25 bp, Artificial Sequence
  Synthetic
taaagcaatagaggttccaaaggtg

SEQ ID NO: 22704 - DNA, 23 bp, Artificial Sequence
  Synthetic
ctgcagaggtagatgacagtaga

SEQ ID NO: 22705 - DNA, 20 bp, Artificial Sequence
  Synthetic
cctcccgggagagccatagt

SEQ ID NO: 22706 - DNA, 20 bp, Artificial Sequence
  Synthetic
ggtgtgcgcgccacaagaaa

SEQ ID NO: 22707 - DNA, 22 bp, Artificial Sequence
  Synthetic
ttcacgctgctggcatcctgtt

SEQ ID NO: 22708 - DNA, 20 bp, Artificial Sequence
  Synthetic
cggtcactggggtgtcctga

SEQ ID NO: 22709 - DNA, 22 bp, Artificial Sequence
  Synthetic
tggggccctataacccacaagt

SEQ ID NO: 22710 - DNA, 21 bp, Artificial Sequence
  Synthetic
gcttcaccaagacctgcggag

SEQ ID NO: 22711 - DNA, 22 bp, Artificial Sequence
  Synthetic
cctctacggagtctcctcgagc

SEQ ID NO: 22712 - DNA, 22 bp, Artificial Sequence
  Synthetic
tggaccctcatcttcctgtgct

SEQ ID NO: 22713 - DNA, 22 bp, Artificial Sequence
  Synthetic
gtggcgacatcttgaggggtct

SEQ ID NO: 22714 - DNA, 21 bp, Artificial Sequence
  Synthetic
aagggcccgtatgccagatgt

SEQ ID NO: 22715 - DNA, 21 bp, Artificial Sequence
  Synthetic
ggccctggacttcatccctgt

SEQ ID NO: 22716 - DNA, 22 bp, Artificial Sequence
  Synthetic
cagacccaacgacggtgcttgg

SEQ ID NO: 22717 - DNA, 20 bp, Artificial Sequence
  Synthetic
gacggacgcccttatgaccg

SEQ ID NO: 22718 - DNA, 20 bp, Artificial Sequence
  Synthetic
cacggggtgcgcatggtatg

SEQ ID NO: 22719 - DNA, 22 bp, Artificial Sequence
  Synthetic
ctgggggctgtccaaaatgaga

SEQ ID NO: 22720 - DNA, 22 bp, Artificial Sequence
  Synthetic
tgcagaagaactgaaacccgct

SEQ ID NO: 22721 - DNA, 19 bp, Artificial Sequence
  Synthetic
tcgtcgtgagcggcttagc

SEQ ID NO: 22722 - DNA, 22 bp, Artificial Sequence
  Synthetic
gttacgcaggctacaccagtgg

SEQ ID NO: 22723 - DNA, 21 bp, Artificial Sequence
  Synthetic
tgtgcagcaacacttggcatg

SEQ ID NO: 22724 - DNA, 21 bp, Artificial Sequence
  Synthetic
tgttgtggggtctcagctccc

SEQ ID NO: 22725 - DNA, 20 bp, Artificial Sequence
  Synthetic
gttccctcctgctctcccga

SEQ ID NO: 22726 - DNA, 22 bp, Artificial Sequence
  Synthetic
catctcctgacccgacaacagc

SEQ ID NO: 22727 - DNA, 22 bp, Artificial Sequence
  Synthetic
tgcgagaagatggcactctacg

SEQ ID NO: 22728 - DNA, 22 bp, Artificial Sequence
  Synthetic
gtggggtgctcactaccagttt

SEQ ID NO: 22729 - DNA, 20 bp, Artificial Sequence
  Synthetic
gcgagctgcttgggagacag

SEQ ID NO: 22730 - DNA, 20 bp, Artificial Sequence
  Synthetic
ggcgccacccttaagagctt

SEQ ID NO: 22731 - DNA, 22 bp, Artificial Sequence
  Synthetic
gtaaggaagtgggccttaatgg

SEQ ID NO: 22732 - DNA, 22 bp, Artificial Sequence
  Synthetic
aagccgctcaagaattgttcaa

SEQ ID NO: 22733 - DNA, 24 bp, Artificial Sequence
  Synthetic
aattggagttcttatagctgacgc

SEQ ID NO: 22734 - DNA, 25 bp, Artificial Sequence
  Synthetic
aaagcctcagataaccaacaagatg

SEQ ID NO: 22735 - DNA, 24 bp, Artificial Sequence
  Synthetic
ccaccctcttaagttgagaaacag

SEQ ID NO: 22736 - DNA, 24 bp, Artificial Sequence
  Synthetic
tatcagcagattggaagaagaagg

SEQ ID NO: 22737 - DNA, 25 bp, Artificial Sequence
  Synthetic
tttggagagaaggaagatgttatgc

SEQ ID NO: 22738 - DNA, 24 bp, Artificial Sequence
  Synthetic
agagttacttctgatccacgaagg

SEQ ID NO: 22739 - DNA, 22 bp, Artificial Sequence
  Synthetic
ccatagcggttcagaaaatggc

SEQ ID NO: 22740 - DNA, 22 bp, Artificial Sequence
  Synthetic
ccagattgggttgctagacaaa

SEQ ID NO: 22741 - DNA, 25 bp, Artificial Sequence
  Synthetic
agggtagtatgctttaaattcccaa

SEQ ID NO: 22742 - DNA, 25 bp, Artificial Sequence
  Synthetic
aacaagcaatttccataagtctgac

SEQ ID NO: 22743 - DNA, 24 bp, Artificial Sequence
  Synthetic
aaaacctacactatctcccctccc

SEQ ID NO: 22744 - DNA, 23 bp, Artificial Sequence
  Synthetic
aaaacgcattccagcagtaaaca

SEQ ID NO: 22745 - DNA, 23 bp, Artificial Sequence
  Synthetic
taggcctactgttcctgtagagc

SEQ ID NO: 22746 - DNA, 24 bp, Artificial Sequence
  Synthetic
ttttacaacaaccaaccagaaacg

SEQ ID NO: 22747 - DNA, 25 bp, Artificial Sequence
  Synthetic
tggttttacgtactggtagtagaca

SEQ ID NO: 22748 - DNA, 24 bp, Artificial Sequence
  Synthetic
agtttcaggcaatcagtttagagt

SEQ ID NO: 22749 - DNA, 24 bp, Artificial Sequence
  Synthetic
atatgccagacatttttggacacg

SEQ ID NO: 22750 - DNA, 24 bp, Artificial Sequence
  Synthetic
atcaatgctatgaatccaggcatt

SEQ ID NO: 22751 - DNA, 23 bp, Artificial Sequence
  Synthetic
cacttgtccatttgtgtcattcg

SEQ ID NO: 22752 - DNA, 22 bp, Artificial Sequence
  Synthetic
tccatggggccaaagaaatagc

SEQ ID NO: 22753 - DNA, 22 bp, Artificial Sequence
  Synthetic
ctatcgactcttcaaacacggc

SEQ ID NO: 22754 - DNA, 25 bp, Artificial Sequence
  Synthetic
cgagaacgaaaatgacagtgataca

SEQ ID NO: 22755 - DNA, 20 bp, Artificial Sequence
  Synthetic
tacaggtagaagggcgccat

SEQ ID NO: 22756 - DNA, 24 bp, Artificial Sequence
  Synthetic
acagacctacgtgaccatatagac

SEQ ID NO: 22757 - DNA, 24 bp, Artificial Sequence
  Synthetic
tggagacatatgcaatacaatgca

SEQ ID NO: 22758 - DNA, 21 bp, Artificial Sequence
  Synthetic
aatcccactttcactgaccca

SEQ ID NO: 22759 - DNA, 21 bp, Artificial Sequence
  Synthetic
acggatgaatatgttgcacgc

SEQ ID NO: 22760 - DNA, 20 bp, Artificial Sequence
  Synthetic
gtgttgaggtaggtcgtggt

SEQ ID NO: 22761 - DNA, 23 bp, Artificial Sequence
  Synthetic
tatggttgatactggctttggtg

SEQ ID NO: 22762 - DNA, 25 bp, Artificial Sequence
  Synthetic
tttcctacacctagtggttctatgg

SEQ ID NO: 22763 - DNA, 25 bp, Artificial Sequence
  Synthetic
taggacgcaaatttttactacaagc

SEQ ID NO: 22764 - DNA, 20 bp, Artificial Sequence
  Synthetic
atgcgtgccaaatccctgtt

SEQ ID NO: 22765 - DNA, 22 bp, Artificial Sequence
  Synthetic
agaatgtgtgtactgcaagcaa

SEQ ID NO: 22766 - DNA, 24 bp, Artificial Sequence
  Synthetic
ttccataatataaggggtcggtgg

SEQ ID NO: 22767 - DNA, 25 bp, Artificial Sequence
  Synthetic
cggacagagcccattacaatattgt

SEQ ID NO: 22768 - DNA, 24 bp, Artificial Sequence
  Synthetic
atatgcacacacttagaagtctgc

SEQ ID NO: 22769 - DNA, 25 bp, Artificial Sequence
  Synthetic
aggaaaaccgtttcattgaaattgg

SEQ ID NO: 22770 - DNA, 22 bp, Artificial Sequence
  Synthetic
aacaagccaattaaagtgggca

SEQ ID NO: 22771 - DNA, 21 bp, Artificial Sequence
  Synthetic
ttttacagcagaggtgtccca

SEQ ID NO: 22772 - DNA, 25 bp, Artificial Sequence
  Synthetic
gttggaaccacataaatgggaaaag

SEQ ID NO: 22773 - DNA, 23 bp, Artificial Sequence
  Synthetic
aatcagaaacatggccaattgga

SEQ ID NO: 22774 - DNA, 25 bp, Artificial Sequence
  Synthetic
acaaagactgaacaaaaggagctac

SEQ ID NO: 22775 - DNA, 24 bp, Artificial Sequence
  Synthetic
aattggcaaatgttgtgaggaaga

SEQ ID NO: 22776 - DNA, 20 bp, Artificial Sequence
  Synthetic
agtaccagcggaaatgctcg

SEQ ID NO: 22777 - DNA, 21 bp, Artificial Sequence
  Synthetic
tgacttcgccctcatagtgaa

SEQ ID NO: 22778 - DNA, 20 bp, Artificial Sequence
  Synthetic
cccaaatggcccttcagcta

SEQ ID NO: 22779 - DNA, 22 bp, Artificial Sequence
  Synthetic
ggatgaagactaccaaggcagg

SEQ ID NO: 22780 - DNA, 25 bp, Artificial Sequence
  Synthetic
agatggacctgacatctgtacattc

SEQ ID NO: 22781 - DNA, 25 bp, Artificial Sequence
  Synthetic
attggtttaaggtgtgttacatgca

SEQ ID NO: 22782 - DNA, 25 bp, Artificial Sequence
  Synthetic
aggaggagtctgaatatccatatgc

SEQ ID NO: 22783 - DNA, 23 bp, Artificial Sequence
  Synthetic
cgggatgatgatgagagcgaatt

SEQ ID NO: 22784 - DNA, 20 bp, Artificial Sequence
  Synthetic
tgcaatagcctcagtcccag

SEQ ID NO: 22785 - DNA, 24 bp, Artificial Sequence
  Synthetic
cacagtaggtgtcagttttactga

SEQ ID NO: 22786 - DNA, 22 bp, Artificial Sequence
  Synthetic
aagtgaccaagaagacgaggag

SEQ ID NO: 22787 - DNA, 25 bp, Artificial Sequence
  Synthetic
gactcacaatatggttctgaacagt

SEQ ID NO: 22788 - DNA, 18 bp, Artificial Sequence
  Synthetic
ccggctgttcgcaagcga

SEQ ID NO: 22789 - DNA, 24 bp, Artificial Sequence
  Synthetic
agctgctccacaagatatttatcc

SEQ ID NO: 22790 - DNA, 25 bp, Artificial Sequence
  Synthetic
tcctttattcaggatcacagctagt

SEQ ID NO: 22791 - DNA, 24 bp, Artificial Sequence
  Synthetic
tagacgctattatgaacaagtgcc

SEQ ID NO: 22792 - DNA, 24 bp, Artificial Sequence
  Synthetic
ttgagttacaaacactgggtgaag

SEQ ID NO: 22793 - DNA, 20 bp, Artificial Sequence
  Synthetic
cagatggctgtttggcttcc

SEQ ID NO: 22794 - DNA, 22 bp, Artificial Sequence
  Synthetic
cctaaccgatttgcctttggag

SEQ ID NO: 22795 - DNA, 21 bp, Artificial Sequence
  Synthetic
tgtgcaggaacacagtttcag

SEQ ID NO: 22796 - DNA, 25 bp, Artificial Sequence
  Synthetic
tttcagaaaacgtagatcctccaat

SEQ ID NO: 22797 - DNA, 21 bp, Artificial Sequence
  Synthetic
tggcatgcaattggtatgtgg

SEQ ID NO: 22798 - DNA, 24 bp, Artificial Sequence
  Synthetic
tcggaagaatgattggtggaatcg

SEQ ID NO: 22799 - DNA, 22 bp, Artificial Sequence
  Synthetic
ggtgaaaatggacgaaggacaa

SEQ ID NO: 22800 - DNA, 22 bp, Artificial Sequence
  Synthetic
agggaagggtactcactggtcg

SEQ ID NO: 22801 - DNA, 25 bp, Artificial Sequence
  Synthetic
ttgcttcaaatgagaatgtggaaac

SEQ ID NO: 22802 - DNA, 24 bp, Artificial Sequence
  Synthetic
acttggaatgcaggaccttttttc

SEQ ID NO: 22803 - DNA, 24 bp, Artificial Sequence
  Synthetic
ttgaggacacaagagtctgaatgt

SEQ ID NO: 22804 - DNA, 22 bp, Artificial Sequence
  Synthetic
gacaattggcatggttcgaacc

SEQ ID NO: 22805 - DNA, 24 bp, Artificial Sequence
  Synthetic
aatggatggacagagactgatagt

SEQ ID NO: 22806 - DNA, 23 bp, Artificial Sequence
  Synthetic
gtgtcttgaaacgatggaagttg

SEQ ID NO: 22807 - DNA, 23 bp, Artificial Sequence
  Synthetic
aattggcaaatgtcgtgaggaag

SEQ ID NO: 22808 - DNA, 25 bp, Artificial Sequence
  Synthetic
atgttcgaaagtaagagcatgaagc

SEQ ID NO: 22809 - DNA, 23 bp, Artificial Sequence
  Synthetic
tccaatcctctgatgatttcgct

SEQ ID NO: 22810 - DNA, 21 bp, Artificial Sequence
  Synthetic
ggacaacgaccttggaccagc

SEQ ID NO: 22811 - DNA, 20 bp, Artificial Sequence
  Synthetic
caacacggcgaccctacaag

SEQ ID NO: 22812 - DNA, 25 bp, Artificial Sequence
  Synthetic
ttggaaaaactaactaacactgggt

SEQ ID NO: 22813 - DNA, 23 bp, Artificial Sequence
  Synthetic
aattccggttgaccttctatgtc

SEQ ID NO: 22814 - DNA, 20 bp, Artificial Sequence
  Synthetic
acgaaagtttgcaggaggca

SEQ ID NO: 22815 - DNA, 21 bp, Artificial Sequence
  Synthetic
ggcagtacggaggctatagac

SEQ ID NO: 22816 - DNA, 22 bp, Artificial Sequence
  Synthetic
agatgaagggggagattggaga

SEQ ID NO: 22817 - DNA, 23 bp, Artificial Sequence
  Synthetic
ggcatacagacattaaaccacca

SEQ ID NO: 22818 - DNA, 22 bp, Artificial Sequence
  Synthetic
gacaaaaccgctacctgtgtaa

SEQ ID NO: 22819 - DNA, 20 bp, Artificial Sequence
  Synthetic
gggcaccgcaaagacctacg

SEQ ID NO: 22820 - DNA, 20 bp, Artificial Sequence
  Synthetic
ttggacaggtgcaggcaatg

SEQ ID NO: 22821 - DNA, 23 bp, Artificial Sequence
  Synthetic
attgtggtaataacgtcccctgc

SEQ ID NO: 22822 - DNA, 21 bp, Artificial Sequence
  Synthetic
tatccgtctacataggcctgc

SEQ ID NO: 22823 - DNA, 20 bp, Artificial Sequence
  Synthetic
gcctgtaccatcgcgttcta

SEQ ID NO: 22824 - DNA, 20 bp, Artificial Sequence
  Synthetic
attggggaacactgggctaa

SEQ ID NO: 22825 - DNA, 22 bp, Artificial Sequence
  Synthetic
ggtactatgggtgacactgtgc

SEQ ID NO: 22826 - DNA, 22 bp, Artificial Sequence
  Synthetic
ctgtacctgggcaatatgatgc

SEQ ID NO: 22827 - DNA, 23 bp, Artificial Sequence
  Synthetic
tcctacaatcctccattttgctg

SEQ ID NO: 22828 - DNA, 21 bp, Artificial Sequence
  Synthetic
gagaccctccttacagccatg

SEQ ID NO: 22829 - DNA, 22 bp, Artificial Sequence
  Synthetic
tgaaacgatggaggttgttcag

SEQ ID NO: 22830 - DNA, 24 bp, Artificial Sequence
  Synthetic
gaaagcaaagttggcaaatgttgt

SEQ ID NO: 22831 - DNA, 24 bp, Artificial Sequence
  Synthetic
tcttcaatcctctgacgattttgc

SEQ ID NO: 22832 - DNA, 24 bp, Artificial Sequence
  Synthetic
cggacatgagtattggagttactg

SEQ ID NO: 22833 - DNA, 23 bp, Artificial Sequence
  Synthetic
acagaagaccagtcgggatatcc

SEQ ID NO: 22834 - DNA, 22 bp, Artificial Sequence
  Synthetic
ggtggtaaatcccagcacaggt

SEQ ID NO: 22835 - DNA, 22 bp, Artificial Sequence
  Synthetic
gagttcctctagggatggccga

SEQ ID NO: 22836 - DNA, 19 bp, Artificial Sequence
  Synthetic
ccggtggcctcagctgctt

SEQ ID NO: 22837 - DNA, 22 bp, Artificial Sequence
  Synthetic
agggtggcatcttcgacaactg

SEQ ID NO: 22838 - DNA, 19 bp, Artificial Sequence
  Synthetic
cagtggggctccgcgtact

SEQ ID NO: 22839 - DNA, 22 bp, Artificial Sequence
  Synthetic
taggaggttattggcacgccct

SEQ ID NO: 22840 - DNA, 21 bp, Artificial Sequence
  Synthetic
tcttcagtggtcagcgtcggt

SEQ ID NO: 22841 - DNA, 21 bp, Artificial Sequence
  Synthetic
tgcttcgctggttccgacttg

SEQ ID NO: 22842 - DNA, 18 bp, Artificial Sequence
  Synthetic
cgtgctggtggcgatgca

SEQ ID NO: 22843 - DNA, 20 bp, Artificial Sequence
  Synthetic
gccggcctttgtgcaaactg

SEQ ID NO: 22844 - DNA, 22 bp, Artificial Sequence
  Synthetic
aggactgtgccatagttcggga

SEQ ID NO: 22845 - DNA, 21 bp, Artificial Sequence
  Synthetic
ccattgccaatgggggctacc

SEQ ID NO: 22846 - DNA, 22 bp, Artificial Sequence
  Synthetic
ctccctagggaggctcagacca

SEQ ID NO: 22847 - DNA, 19 bp, Artificial Sequence
  Synthetic
gtgcccggttgctggcgaa

SEQ ID NO: 22848 - DNA, 20 bp, Artificial Sequence
  Synthetic
ctgggtgtgtcggcagtgac

SEQ ID NO: 22849 - DNA, 19 bp, Artificial Sequence
  Synthetic
ggcaggtaccgtgcgctct

SEQ ID NO: 22850 - DNA, 22 bp, Artificial Sequence
  Synthetic
ggaacatgtggccccccatcac

SEQ ID NO: 22851 - DNA, 20 bp, Artificial Sequence
  Synthetic
tgtgaagccggtggcggaag

SEQ ID NO: 22852 - DNA, 20 bp, Artificial Sequence
  Synthetic
cggcctctttcctgctggga

SEQ ID NO: 22853 - DNA, 21 bp, Artificial Sequence
  Synthetic
gcgctcggcgttctactctgg

SEQ ID NO: 22854 - DNA, 22 bp, Artificial Sequence
  Synthetic
gatggggtgcagcaaaggatgg

SEQ ID NO: 22855 - DNA, 21 bp, Artificial Sequence
  Synthetic
cgtctagcgcctacgacctga

SEQ ID NO: 22856 - DNA, 20 bp, Artificial Sequence
  Synthetic
ctgctgtgtccctactgccc

SEQ ID NO: 22857 - DNA, 22 bp, Artificial Sequence
  Synthetic
agctggtgtgcaggagagaaga

SEQ ID NO: 22858 - DNA, 22 bp, Artificial Sequence
  Synthetic
tcgacgaacatgacatgcaggt

SEQ ID NO: 22859 - DNA, 22 bp, Artificial Sequence
  Synthetic
cttggctgaatgtgttgctggg

SEQ ID NO: 22860 - DNA, 22 bp, Artificial Sequence
  Synthetic
gagttggtgatgtgccaggtcc

SEQ ID NO: 22861 - DNA, 24 bp, Artificial Sequence
  Synthetic
atttggaagcttgtgaattcgact

SEQ ID NO: 22862 - DNA, 25 bp, Artificial Sequence
  Synthetic
aggcagtgtaagcatttttatcatg

SEQ ID NO: 22863 - DNA, 23 bp, Artificial Sequence
  Synthetic
ggcaattccctggaactatttca

SEQ ID NO: 22864 - DNA, 22 bp, Artificial Sequence
  Synthetic
tgcgttctagcaacaaaaaagc

SEQ ID NO: 22865 - DNA, 22 bp, Artificial Sequence
  Synthetic
gtgggataggtgcaatgtcatt

SEQ ID NO: 22866 - DNA, 20 bp, Artificial Sequence
  Synthetic
caaggcttgctcccgaagac

SEQ ID NO: 22867 - DNA, 24 bp, Artificial Sequence
  Synthetic
ctaaaagtcagttttggctgcaac

SEQ ID NO: 22868 - DNA, 24 bp, Artificial Sequence
  Synthetic
tttggacacaattagacctgagtg

SEQ ID NO: 22869 - DNA, 20 bp, Artificial Sequence
  Synthetic
ccccaccacctccacaaccg

SEQ ID NO: 22870 - DNA, 19 bp, Artificial Sequence
  Synthetic
gtggaaggtcacccaggcg

SEQ ID NO: 22871 - DNA, 20 bp, Artificial Sequence
  Synthetic
gcgaccccccagtaatcatt

SEQ ID NO: 22872 - DNA, 25 bp, Artificial Sequence
  Synthetic
atgctgcttttgctactaacatact

SEQ ID NO: 22873 - DNA, 22 bp, Artificial Sequence
  Synthetic
ccactagcacaggttccagtgc

SEQ ID NO: 22874 - DNA, 25 bp, Artificial Sequence
  Synthetic
tccagacagagattttcttgatgtt

SEQ ID NO: 22875 - DNA, 25 bp, Artificial Sequence
  Synthetic
agtcattatacaccctcatgacagt

SEQ ID NO: 22876 - DNA, 25 bp, Artificial Sequence
  Synthetic
ccaaatgtttattgtaggatgcaca

SEQ ID NO: 22877 - DNA, 25 bp, Artificial Sequence
  Synthetic
atccagtgatgctcaattgtttaac

SEQ ID NO: 22878 - DNA, 25 bp, Artificial Sequence
  Synthetic
caaacgtaaaaattgaggtctgacc

SEQ ID NO: 22879 - DNA, 20 bp, Artificial Sequence
  Synthetic
tcgaacaatcaagcagtgcc

SEQ ID NO: 22880 - DNA, 22 bp, Artificial Sequence
  Synthetic
atcgtgcggtcttggtaaatgt

SEQ ID NO: 22881 - DNA, 25 bp, Artificial Sequence
  Synthetic
atgcgactgctagcatcatttatga

SEQ ID NO: 22882 - DNA, 24 bp, Artificial Sequence
  Synthetic
ccagaagttagatgtgtttgcaga

SEQ ID NO: 22883 - DNA, 24 bp, Artificial Sequence
  Synthetic
ctggttatgagactttcagggtcg

SEQ ID NO: 22884 - DNA, 21 bp, Artificial Sequence
  Synthetic
aagaactgactcccggaacca

SEQ ID NO: 22885 - DNA, 25 bp, Artificial Sequence
  Synthetic
ctaattcaaaatgcacaagctgtgg

SEQ ID NO: 22886 - DNA, 25 bp, Artificial Sequence
  Synthetic
tgagattccaattaagcagaccatc

SEQ ID NO: 22887 - DNA, 24 bp, Artificial Sequence
  Synthetic
tctctcctatcattgttggcaact

SEQ ID NO: 22888 - DNA, 25 bp, Artificial Sequence
  Synthetic
actttgtcgatttgaaaatgagagg

SEQ ID NO: 22889 - DNA, 20 bp, Artificial Sequence
  Synthetic
ccctccgtgctcgaagattt

SEQ ID NO: 22890 - DNA, 24 bp, Artificial Sequence
  Synthetic
tgaaacggaggatcataactctgc

SEQ ID NO: 22891 - DNA, 22 bp, Artificial Sequence
  Synthetic
agcattgcctacagatatgcca

SEQ ID NO: 22892 - DNA, 22 bp, Artificial Sequence
  Synthetic
cgaggcgcattagatggtaatg

SEQ ID NO: 22893 - DNA, 22 bp, Artificial Sequence
  Synthetic
agatgaatcaggccgatttgac

SEQ ID NO: 22894 - DNA, 21 bp, Artificial Sequence
  Synthetic
aaaaggcgaagagggaggagc

SEQ ID NO: 22895 - DNA, 24 bp, Artificial Sequence
  Synthetic
tctccagaaaatggggttgcaatt

SEQ ID NO: 22896 - DNA, 24 bp, Artificial Sequence
  Synthetic
cccctattgaacgtctacaatcct

SEQ ID NO: 22897 - DNA, 25 bp, Artificial Sequence
  Synthetic
tttcagatgtcttggacaaagtcag

SEQ ID NO: 22898 - DNA, 24 bp, Artificial Sequence
  Synthetic
aatttgctatcacagatgcatgtg

SEQ ID NO: 22899 - DNA, 23 bp, Artificial Sequence
  Synthetic
agacaggatatggcatttgaccc

SEQ ID NO: 22900 - DNA, 25 bp, Artificial Sequence
  Synthetic
aaatgggcaaggatatttatggtga

SEQ ID NO: 22901 - DNA, 25 bp, Artificial Sequence
  Synthetic
atggtgttttatggggtaatgactg

SEQ ID NO: 22902 - DNA, 22 bp, Artificial Sequence
  Synthetic
aacatgccctcaaactttggtt

SEQ ID NO: 22903 - DNA, 21 bp, Artificial Sequence
  Synthetic
ggagatcctccatacagccat

SEQ ID NO: 22904 - DNA, 24 bp, Artificial Sequence
  Synthetic
gaactcatgccttgaaacaatgga

SEQ ID NO: 22905 - DNA, 25 bp, Artificial Sequence
  Synthetic
aatggtcacacaaagaacaataggg

SEQ ID NO: 22906 - DNA, 22 bp, Artificial Sequence
  Synthetic
ccaaactggcaaatgttgtgag

SEQ ID NO: 22907 - DNA, 22 bp, Artificial Sequence
  Synthetic
tgaagctccgaacacaaatacc

SEQ ID NO: 22908 - DNA, 22 bp, Artificial Sequence
  Synthetic
tccaatcctccgacgattttgc

SEQ ID NO: 22909 - DNA, 21 bp, Artificial Sequence
  Synthetic
cccagatggctctccaattgt

SEQ ID NO: 22910 - DNA, 23 bp, Artificial Sequence
  Synthetic
tgaagtctgcttaaagtgggagc

SEQ ID NO: 22911 - DNA, 25 bp, Artificial Sequence
  Synthetic
ccctagtagttcatataggagaccg

SEQ ID NO: 22912 - DNA, 24 bp, Artificial Sequence
  Synthetic
tggagcctcagagagctaaaaatt

SEQ ID NO: 22913 - DNA, 25 bp, Artificial Sequence
  Synthetic
aaggtcaccattcaagattgattct

SEQ ID NO: 22914 - DNA, 25 bp, Artificial Sequence
  Synthetic
aacaccagaaagacaatccaaaagg

SEQ ID NO: 22915 - DNA, 20 bp, Artificial Sequence
  Synthetic
tcctcaaggagtgcgtttgg

SEQ ID NO: 22916 - DNA, 25 bp, Artificial Sequence
  Synthetic
gcttttaaaaatcctgaacaaaggc

SEQ ID NO: 22917 - DNA, 20 bp, Artificial Sequence
  Synthetic
caggaagaggaactgggggt

SEQ ID NO: 22918 - DNA, 22 bp, Artificial Sequence
  Synthetic
caacagatgttggtgctgttgg

SEQ ID NO: 22919 - DNA, 25 bp, Artificial Sequence
  Synthetic
tcaaacctttgacattttagagcca

SEQ ID NO: 22920 - DNA, 21 bp, Artificial Sequence
  Synthetic
cgccattgcaggaatttgctg

SEQ ID NO: 22921 - DNA, 24 bp, Artificial Sequence
  Synthetic
agtgagcgtttactaattgtggga

SEQ ID NO: 22922 - DNA, 25 bp, Artificial Sequence
  Synthetic
gttggagacacagaaaatcctagct

SEQ ID NO: 22923 - DNA, 22 bp, Artificial Sequence
  Synthetic
aactacaacaggacagagcagg

SEQ ID NO: 22924 - DNA, 21 bp, Artificial Sequence
  Synthetic
aggatttgtcacaagaggcgg

SEQ ID NO: 22925 - DNA, 24 bp, Artificial Sequence
  Synthetic
ggactaggaaatgaagctgaagat

SEQ ID NO: 22926 - DNA, 21 bp, Artificial Sequence
  Synthetic
cgtcgacgcctagaagacgac

SEQ ID NO: 22927 - DNA, 23 bp, Artificial Sequence
  Synthetic
gcaaactaaaatacaggggcatg

SEQ ID NO: 22928 - DNA, 21 bp, Artificial Sequence
  Synthetic
aattggtgccaatagacgccc

SEQ ID NO: 22929 - DNA, 20 bp, Artificial Sequence
  Synthetic
cctagacgggtagcgactag

SEQ ID NO: 22930 - DNA, 25 bp, Artificial Sequence
  Synthetic
tgtacaatagaagagtcagacaggt

SEQ ID NO: 22931 - DNA, 22 bp, Artificial Sequence
  Synthetic
tcgtccttaatactggctctcg

SEQ ID NO: 22932 - DNA, 24 bp, Artificial Sequence
  Synthetic
tgcttctggtaaggtgtatcttcc

SEQ ID NO: 22933 - DNA, 24 bp, Artificial Sequence
  Synthetic
acttctaagtcttccaaacgcaaa

SEQ ID NO: 22934 - DNA, 20 bp, Artificial Sequence
  Synthetic
gactcacagccaacctctct

SEQ ID NO: 22935 - DNA, 24 bp, Artificial Sequence
  Synthetic
ttcaggatcttgcatcgtttgaac

SEQ ID NO: 22936 - DNA, 25 bp, Artificial Sequence
  Synthetic
atcagattttatgtaagtgccagcg

SEQ ID NO: 22937 - DNA, 23 bp, Artificial Sequence
  Synthetic
cagtgcagaaaatgaagctgaag

SEQ ID NO: 22938 - DNA, 23 bp, Artificial Sequence
  Synthetic
gcataatgccagagtggataaca

SEQ ID NO: 22939 - DNA, 25 bp, Artificial Sequence
  Synthetic
tgatgttacatatgcatgttggagt

SEQ ID NO: 22940 - DNA, 25 bp, Artificial Sequence
  Synthetic
aaatgctgcaaaagacattgataca

SEQ ID NO: 22941 - DNA, 20 bp, Artificial Sequence
  Synthetic
ctctcccactgcctggaaac

SEQ ID NO: 22942 - DNA, 25 bp, Artificial Sequence
  Synthetic
gacactgtcacactaccaaaaggaa

SEQ ID NO: 22943 - DNA, 22 bp, Artificial Sequence
  Synthetic
ttttcctgatgtcaccgttgtt

SEQ ID NO: 22944 - DNA, 25 bp, Artificial Sequence
  Synthetic
tacactttttaaatcagccttcccg

SEQ ID NO: 22945 - DNA, 25 bp, Artificial Sequence
  Synthetic
cccacaaacaaatataattcctggc

SEQ ID NO: 22946 - DNA, 23 bp, Artificial Sequence
  Synthetic
aatccagaaactcaacggctagt

SEQ ID NO: 22947 - DNA, 22 bp, Artificial Sequence
  Synthetic
ctatggaaaacgagagcagctg

SEQ ID NO: 22948 - DNA, 23 bp, Artificial Sequence
  Synthetic
acaaccaacatccagtattgagg

SEQ ID NO: 22949 - DNA, 22 bp, Artificial Sequence
  Synthetic
tgtttgactcatggggtcagtc

SEQ ID NO: 22950 - DNA, 24 bp, Artificial Sequence
  Synthetic
ttcaggtacgtctttattgttgcc

SEQ ID NO: 22951 - DNA, 22 bp, Artificial Sequence
  Synthetic
gcccatcctggacatggagacg

SEQ ID NO: 22952 - DNA, 22 bp, Artificial Sequence
  Synthetic
ctcaagttttcgcacccgtcgc

SEQ ID NO: 22953 - DNA, 20 bp, Artificial Sequence
  Synthetic
gattccattcggggtgccgc

SEQ ID NO: 22954 - DNA, 19 bp, Artificial Sequence
  Synthetic
taaggccctgggagcgcgt

SEQ ID NO: 22955 - DNA, 21 bp, Artificial Sequence
  Synthetic
gcctcttccagtaactcggcc

SEQ ID NO: 22956 - DNA, 21 bp, Artificial Sequence
  Synthetic
gcgagtagttggtgatgcggc

SEQ ID NO: 22957 - DNA, 20 bp, Artificial Sequence
  Synthetic
gagcttggccatgtacgcgc

SEQ ID NO: 22958 - DNA, 19 bp, Artificial Sequence
  Synthetic
gtcggcgagcccacacaca

SEQ ID NO: 22959 - DNA, 19 bp, Artificial Sequence
  Synthetic
agaactgcccccgaagcca

SEQ ID NO: 22960 - DNA, 19 bp, Artificial Sequence
  Synthetic
gttcgtcctgccccactgg

SEQ ID NO: 22961 - DNA, 20 bp, Artificial Sequence
  Synthetic
gtggtccgtctcgctaacgg

SEQ ID NO: 22962 - DNA, 21 bp, Artificial Sequence
  Synthetic
ccgaaggtcctcccagatccc

SEQ ID NO: 22963 - DNA, 20 bp, Artificial Sequence
  Synthetic
gcagaaccgggccacgatct

SEQ ID NO: 22964 - DNA, 18 bp, Artificial Sequence
  Synthetic
attggcgcgcggaccaca

SEQ ID NO: 22965 - DNA, 21 bp, Artificial Sequence
  Synthetic
tgcactttgcgtgtctggtgt

SEQ ID NO: 22966 - DNA, 20 bp, Artificial Sequence
  Synthetic
cgtgtcgtcgaatgccaggc

SEQ ID NO: 22967 - DNA, 19 bp, Artificial Sequence
  Synthetic
ggtgcggtgcctgccgata

SEQ ID NO: 22968 - DNA, 21 bp, Artificial Sequence
  Synthetic
gaatgggagctcgggtccaca

SEQ ID NO: 22969 - DNA, 21 bp, Artificial Sequence
  Synthetic
atcgccttgtgtgtgtgctgg

SEQ ID NO: 22970 - DNA, 19 bp, Artificial Sequence
  Synthetic
ggcgaacacggggctgcat

SEQ ID NO: 22971 - DNA, 19 bp, Artificial Sequence
  Synthetic
cgccggatcgaggtaccgt

SEQ ID NO: 22972 - DNA, 20 bp, Artificial Sequence
  Synthetic
aggatcttgggtgctgacgc

SEQ ID NO: 22973 - DNA, 19 bp, Artificial Sequence
  Synthetic
tcagggggtgcgtcacgct

SEQ ID NO: 22974 - DNA, 19 bp, Artificial Sequence
  Synthetic
ggccacctgacacagaggc

SEQ ID NO: 22975 - DNA, 20 bp, Artificial Sequence
  Synthetic
tgtgggtgtgtaggcgatgc

SEQ ID NO: 22976 - DNA, 19 bp, Artificial Sequence
  Synthetic
aagtctgcgggggagcggt

SEQ ID NO: 22977 - DNA, 21 bp, Artificial Sequence
  Synthetic
atggtcgccgtcattatggcc

SEQ ID NO: 22978 - DNA, 21 bp, Artificial Sequence
  Synthetic
cgctctccatcctgcatcagg

SEQ ID NO: 22979 - DNA, 19 bp, Artificial Sequence
  Synthetic
caggggcgatggaagcgga

SEQ ID NO: 22980 - DNA, 20 bp, Artificial Sequence
  Synthetic
tccaggcagcgatgtttggc

SEQ ID NO: 22981 - DNA, 19 bp, Artificial Sequence
  Synthetic
gtcctgtcggacgacggtg

SEQ ID NO: 22982 - DNA, 19 bp, Artificial Sequence
  Synthetic
gccagggcgcagaagacgt

SEQ ID NO: 22983 - DNA, 19 bp, Artificial Sequence
  Synthetic
cgctcaaacgccccgagga

SEQ ID NO: 22984 - DNA, 22 bp, Artificial Sequence
  Synthetic
acagggtgttgcaatacgaccc

SEQ ID NO: 22985 - DNA, 18 bp, Artificial Sequence
  Synthetic
ggcggcgaacaaggcaca

SEQ ID NO: 22986 - DNA, 19 bp, Artificial Sequence
  Synthetic
gctacgccaccaccatgca

SEQ ID NO: 22987 - DNA, 19 bp, Artificial Sequence
  Synthetic
cttcgaccggggtctcgga

SEQ ID NO: 22988 - DNA, 19 bp, Artificial Sequence
  Synthetic
gccccgttaggcgccagaa

SEQ ID NO: 22989 - DNA, 22 bp, Artificial Sequence
  Synthetic
tgtgtctgtcctccggaagggc

SEQ ID NO: 22990 - DNA, 18 bp, Artificial Sequence
  Synthetic
cggcacgctgttgacgct

SEQ ID NO: 22991 - DNA, 19 bp, Artificial Sequence
  Synthetic
ccccgcgtcagacaaaccc

SEQ ID NO: 22992 - DNA, 21 bp, Artificial Sequence
  Synthetic
ccgggacttttggatgtcgcc

SEQ ID NO: 22993 - DNA, 22 bp, Artificial Sequence
  Synthetic
ccttcatgacggcgctggtact

SEQ ID NO: 22994 - DNA, 19 bp, Artificial Sequence
  Synthetic
gtcaaagtcgccgccctcc

SEQ ID NO: 22995 - DNA, 19 bp, Artificial Sequence
  Synthetic
cggctcagctggtgggagt

SEQ ID NO: 22996 - DNA, 18 bp, Artificial Sequence
  Synthetic
tcagcttgcgggcctcgt

SEQ ID NO: 22997 - DNA, 20 bp, Artificial Sequence
  Synthetic
tgtacctgcgggcgaagatg

SEQ ID NO: 22998 - DNA, 20 bp, Artificial Sequence
  Synthetic
tccacctcctgccacttggt

SEQ ID NO: 22999 - DNA, 19 bp, Artificial Sequence
  Synthetic
gatggccgcgtggaactgc

SEQ ID NO: 23000 - DNA, 18 bp, Artificial Sequence
  Synthetic
tgcgaaagttgcgcccct

SEQ ID NO: 23001 - DNA, 19 bp, Artificial Sequence
  Synthetic
gcagggtctcgagttcggc

SEQ ID NO: 23002 - DNA, 20 bp, Artificial Sequence
  Synthetic
ccgagcctcccaggtgcaga

SEQ ID NO: 23003 - DNA, 21 bp, Artificial Sequence
  Synthetic
gttgccgtcttgggctttgtc

SEQ ID NO: 23004 - DNA, 19 bp, Artificial Sequence
  Synthetic
cgtctacgtccgaagcggg

SEQ ID NO: 23005 - DNA, 20 bp, Artificial Sequence
  Synthetic
gattccccagagcagccccg

SEQ ID NO: 23006 - DNA, 18 bp, Artificial Sequence
  Synthetic
acatctcgcgcgcgctgt

SEQ ID NO: 23007 - DNA, 22 bp, Artificial Sequence
  Synthetic
ggtccgggtaaaacaacagccg

SEQ ID NO: 23008 - DNA, 21 bp, Artificial Sequence
  Synthetic
caggaggctgggatcgaaggc

SEQ ID NO: 23009 - DNA, 20 bp, Artificial Sequence
  Synthetic
ggatcagctgctttgtgcgc

SEQ ID NO: 23010 - DNA, 20 bp, Artificial Sequence
  Synthetic
cgtcaggacggagagccagg

SEQ ID NO: 23011 - DNA, 20 bp, Artificial Sequence
  Synthetic
gtgcggggcattgtgtctcc

SEQ ID NO: 23012 - DNA, 19 bp, Artificial Sequence
  Synthetic
gatcccccccgcgttccat

SEQ ID NO: 23013 - DNA, 19 bp, Artificial Sequence
  Synthetic
ggtaggccgcgctacacgt

SEQ ID NO: 23014 - DNA, 20 bp, Artificial Sequence
  Synthetic
gaggccctcttgcacgaacg

SEQ ID NO: 23015 - DNA, 19 bp, Artificial Sequence
  Synthetic
gggtggttccgccttgcgt

SEQ ID NO: 23016 - DNA, 18 bp, Artificial Sequence
  Synthetic
aaaagccagcgcgggtgg

SEQ ID NO: 23017 - DNA, 20 bp, Artificial Sequence
  Synthetic
tgcgtgcaggcgtttaacga

SEQ ID NO: 23018 - DNA, 21 bp, Artificial Sequence
  Synthetic
ctgcaccgagatcgtccatcc

SEQ ID NO: 23019 - DNA, 21 bp, Artificial Sequence
  Synthetic
atcaggggccgtgatatgccg

SEQ ID NO: 23020 - DNA, 20 bp, Artificial Sequence
  Synthetic
ctcctcgtccgtccggcact

SEQ ID NO: 23021 - DNA, 21 bp, Artificial Sequence
  Synthetic
ttcagtcggtatcgctggcgc

SEQ ID NO: 23022 - DNA, 19 bp, Artificial Sequence
  Synthetic
ccacgttcgagctcggggt

SEQ ID NO: 23023 - DNA, 20 bp, Artificial Sequence
  Synthetic
ggggacacgggctaccctca

SEQ ID NO: 23024 - DNA, 22 bp, Artificial Sequence
  Synthetic
tgtctggttcgaggacgaccac

SEQ ID NO: 23025 - DNA, 19 bp, Artificial Sequence
  Synthetic
ggccgtgaatcccccgtca

SEQ ID NO: 23026 - DNA, 20 bp, Artificial Sequence
  Synthetic
gtgtcccgcggggagaaagg

SEQ ID NO: 23027 - DNA, 18 bp, Artificial Sequence
  Synthetic
tggtcgccaccacgcatt

SEQ ID NO: 23028 - DNA, 18 bp, Artificial Sequence
  Synthetic
actcgttggcgcgctgaa

SEQ ID NO: 23029 - DNA, 20 bp, Artificial Sequence
  Synthetic
gcggcccgggagagaagaga

SEQ ID NO: 23030 - DNA, 20 bp, Artificial Sequence
  Synthetic
aggttcaccatgcaggcgtg

SEQ ID NO: 23031 - DNA, 19 bp, Artificial Sequence
  Synthetic
taacgatgcggggggtggc

SEQ ID NO: 23032 - DNA, 21 bp, Artificial Sequence
  Synthetic
cgcctgtgcgtgtccttgtgt

SEQ ID NO: 23033 - DNA, 19 bp, Artificial Sequence
  Synthetic
ccgtcttcggtgccagtcc

SEQ ID NO: 23034 - DNA, 20 bp, Artificial Sequence
  Synthetic
tgtttggcgtcgtgagtccc

SEQ ID NO: 23035 - DNA, 19 bp, Artificial Sequence
  Synthetic
ggacagcagcggggagtgt

SEQ ID NO: 23036 - DNA, 18 bp, Artificial Sequence
  Synthetic
cggccatgcacaccagca

SEQ ID NO: 23037 - DNA, 19 bp, Artificial Sequence
  Synthetic
acgaacggccacgacagtg

SEQ ID NO: 23038 - DNA, 21 bp, Artificial Sequence
  Synthetic
ataacgacaaacggcccctcg

SEQ ID NO: 23039 - DNA, 22 bp, Artificial Sequence
  Synthetic
tccaagccagccaagttaacgg

SEQ ID NO: 23040 - DNA, 22 bp, Artificial Sequence
  Synthetic
ccccggtgtcgttcaacaaaga

SEQ ID NO: 23041 - DNA, 22 bp, Artificial Sequence
  Synthetic
tctggacatgtcggcggaatcc

SEQ ID NO: 23042 - DNA, 19 bp, Artificial Sequence
  Synthetic
ttcttgcggaccacggccc

SEQ ID NO: 23043 - DNA, 19 bp, Artificial Sequence
  Synthetic
tcctccgcaaacaggcccg

SEQ ID NO: 23044 - DNA, 19 bp, Artificial Sequence
  Synthetic
gcaggaagctccacagggc

SEQ ID NO: 23045 - DNA, 20 bp, Artificial Sequence
  Synthetic
gtcgttcggggtgctcgttg

SEQ ID NO: 23046 - DNA, 20 bp, Artificial Sequence
  Synthetic
ccccggagacccccaaacct

SEQ ID NO: 23047 - DNA, 20 bp, Artificial Sequence
  Synthetic
ctggacgccatggacaggga

SEQ ID NO: 23048 - DNA, 21 bp, Artificial Sequence
  Synthetic
gtggtacacgagcacgagcca

SEQ ID NO: 23049 - DNA, 20 bp, Artificial Sequence
  Synthetic
ccgcagatcgcagcggtctc

SEQ ID NO: 23050 - DNA, 22 bp, Artificial Sequence
  Synthetic
tcagatcacccgcatcatccga

SEQ ID NO: 23051 - DNA, 19 bp, Artificial Sequence
  Synthetic
tcagccttaccacgcccga

SEQ ID NO: 23052 - DNA, 20 bp, Artificial Sequence
  Synthetic
acttccgggcctcagaaccc

SEQ ID NO: 23053 - DNA, 19 bp, Artificial Sequence
  Synthetic
gggacctgcggccaacaca

SEQ ID NO: 23054 - DNA, 22 bp, Artificial Sequence
  Synthetic
cgggctaaccaggaaatccgtg

SEQ ID NO: 23055 - DNA, 20 bp, Artificial Sequence
  Synthetic
cccgacggcgtagtggagga

SEQ ID NO: 23056 - DNA, 20 bp, Artificial Sequence
  Synthetic
cgccagcctgtttgtcctgg

SEQ ID NO: 23057 - DNA, 21 bp, Artificial Sequence
  Synthetic
gtataccctgtccgtgggcga

SEQ ID NO: 23058 - DNA, 22 bp, Artificial Sequence
  Synthetic
actcggaaagcgaagacgaggc

SEQ ID NO: 23059 - DNA, 22 bp, Artificial Sequence
  Synthetic
gctccgctaaaagaccgcatcg

SEQ ID NO: 23060 - DNA, 25 bp, Artificial Sequence
  Synthetic
ttcaattcagacagggaatcaacac

SEQ ID NO: 23061 - DNA, 20 bp, Artificial Sequence
  Synthetic
ggggctgtggctgtattgaa

SEQ ID NO: 23062 - DNA, 20 bp, Artificial Sequence
  Synthetic
gctggcgaaatcacatgtgt

SEQ ID NO: 23063 - DNA, 22 bp, Artificial Sequence
  Synthetic
agcggctttgaaatgatttggg

SEQ ID NO: 23064 - DNA, 22 bp, Artificial Sequence
  Synthetic
attcctatgggagtgggcctca

SEQ ID NO: 23065 - DNA, 21 bp, Artificial Sequence
  Synthetic
tccttgccacaagaacacatc

SEQ ID NO: 23066 - DNA, 22 bp, Artificial Sequence
  Synthetic
gaacgcccaccaaatattgccc

SEQ ID NO: 23067 - DNA, 24 bp, Artificial Sequence
  Synthetic
tttggaagatccagcgtctagaga

SEQ ID NO: 23068 - DNA, 22 bp, Artificial Sequence
  Synthetic
ctttcccgaccaccagttggat

SEQ ID NO: 23069 - DNA, 25 bp, Artificial Sequence
  Synthetic
gtggaccatatggccataattaaga

SEQ ID NO: 23070 - DNA, 24 bp, Artificial Sequence
  Synthetic
caagtacggtccattacccaaaag

SEQ ID NO: 23071 - DNA, 20 bp, Artificial Sequence
  Synthetic
attggagatgtgccacagca

SEQ ID NO: 23072 - DNA, 22 bp, Artificial Sequence
  Synthetic
atgaggagttcacaatggtggg

SEQ ID NO: 23073 - DNA, 22 bp, Artificial Sequence
  Synthetic
ttcagaaagatgcgaaagtgct

SEQ ID NO: 23074 - DNA, 22 bp, Artificial Sequence
  Synthetic
attcatcgtcgatgatgtggga

SEQ ID NO: 23075 - DNA, 20 bp, Artificial Sequence
  Synthetic
ggacatttgacaccacccag

SEQ ID NO: 23076 - DNA, 24 bp, Artificial Sequence
  Synthetic
aggtaaggaagacagaagatacgg

SEQ ID NO: 23077 - DNA, 25 bp, Artificial Sequence
  Synthetic
gaaagcgtctgagtttagtatggaa

SEQ ID NO: 23078 - DNA, 25 bp, Artificial Sequence
  Synthetic
tctggttctaaatttcaactggtgc

SEQ ID NO: 23079 - DNA, 24 bp, Artificial Sequence
  Synthetic
actgaaactggcattagagcattt

SEQ ID NO: 23080 - DNA, 21 bp, Artificial Sequence
  Synthetic
gtgatgaggtggatcagggga

SEQ ID NO: 23081 - DNA, 24 bp, Artificial Sequence
  Synthetic
gttagtacgcctgaagaaaatggc

SEQ ID NO: 23082 - DNA, 20 bp, Artificial Sequence
  Synthetic
ccgttacctgtagcagcagt

SEQ ID NO: 23083 - DNA, 22 bp, Artificial Sequence
  Synthetic
accgtatcccaatcggaaagcc

SEQ ID NO: 23084 - DNA, 20 bp, Artificial Sequence
  Synthetic
aaagggttcagggggtgcta

SEQ ID NO: 23085 - DNA, 25 bp, Artificial Sequence
  Synthetic
agatcctatatcagacgttacagca

SEQ ID NO: 23086 - DNA, 25 bp, Artificial Sequence
  Synthetic
ttgcagatgttatcacagtacacag

SEQ ID NO: 23087 - DNA, 23 bp, Artificial Sequence
  Synthetic
aactgcaattgtagatgcagtgg

SEQ ID NO: 23088 - DNA, 22 bp, Artificial Sequence
  Synthetic
aacgcttactacaagtaggcca

SEQ ID NO: 23089 - DNA, 22 bp, Artificial Sequence
  Synthetic
atcctctggctcaaacagatga

SEQ ID NO: 23090 - DNA, 25 bp, Artificial Sequence
  Synthetic
cttgcaatttcagaacatttcagca

SEQ ID NO: 23091 - DNA, 24 bp, Artificial Sequence
  Synthetic
atcaatttccactaggtagacggt

SEQ ID NO: 23092 - DNA, 25 bp, Artificial Sequence
  Synthetic
tttgtctgaataaattgctgatgcg

SEQ ID NO: 23093 - DNA, 25 bp, Artificial Sequence
  Synthetic
aacggtctcttagagtcaaacaagg

SEQ ID NO: 23094 - DNA, 23 bp, Artificial Sequence
  Synthetic
agtcattgtcaccagatgctact

SEQ ID NO: 23095 - DNA, 25 bp, Artificial Sequence
  Synthetic
tagtggagttgttgaagatgaagct

SEQ ID NO: 23096 - DNA, 22 bp, Artificial Sequence
  Synthetic
accaactccttcggaagtggga

SEQ ID NO: 23097 - DNA, 25 bp, Artificial Sequence
  Synthetic
ttggatatagaccattaggatccgc

SEQ ID NO: 23098 - DNA, 24 bp, Artificial Sequence
  Synthetic
aactgatgtaggtggtgttagtgg

SEQ ID NO: 23099 - DNA, 23 bp, Artificial Sequence
  Synthetic
ttaaatttcagttttccgcggga

SEQ ID NO: 23100 - DNA, 21 bp, Artificial Sequence
  Synthetic
ctgcgccaaatccagcttttg

SEQ ID NO: 23101 - DNA, 22 bp, Artificial Sequence
  Synthetic
aagtcagttttccttgggtcga

SEQ ID NO: 23102 - DNA, 22 bp, Artificial Sequence
  Synthetic
ggtcagtcatttggtcagcaga

SEQ ID NO: 23103 - DNA, 23 bp, Artificial Sequence
  Synthetic
gaattatactcatgggccaggag

SEQ ID NO: 23104 - DNA, 21 bp, Artificial Sequence
  Synthetic
ttcagtcgctctgcggagagg

SEQ ID NO: 23105 - DNA, 22 bp, Artificial Sequence
  Synthetic
aagaggactgagaagccctgga

SEQ ID NO: 23106 - DNA, 25 bp, Artificial Sequence
  Synthetic
acaggttaaaacatattgtgtgggc

SEQ ID NO: 23107 - DNA, 22 bp, Artificial Sequence
  Synthetic
tggcaactatgtccatgtgcca

SEQ ID NO: 23108 - DNA, 24 bp, Artificial Sequence
  Synthetic
cagaagatggatccaaatagggct

SEQ ID NO: 23109 - DNA, 22 bp, Artificial Sequence
  Synthetic
gtgccgagcacctagaagacag

SEQ ID NO: 23110 - DNA, 23 bp, Artificial Sequence
  Synthetic
ttaccagttgccaagatagagcc

SEQ ID NO: 23111 - DNA, 25 bp, Artificial Sequence
  Synthetic
agatgtaggggatgcctatttttcc

SEQ ID NO: 23112 - DNA, 24 bp, Artificial Sequence
  Synthetic
tctactccagatgagaagttccaa

SEQ ID NO: 23113 - DNA, 24 bp, Artificial Sequence
  Synthetic
tagaggcaacaatccaaaaaagcc

SEQ ID NO: 23114 - DNA, 23 bp, Artificial Sequence
  Synthetic
gcagagaccttctacacagatgg

SEQ ID NO: 23115 - DNA, 23 bp, Artificial Sequence
  Synthetic
attcctggaaaagatagagcccg

SEQ ID NO: 23116 - DNA, 20 bp, Artificial Sequence
  Synthetic
gcacacagacaatggcccca

SEQ ID NO: 23117 - DNA, 25 bp, Artificial Sequence
  Synthetic
tttccaggtctattacagagaaggc

SEQ ID NO: 23118 - DNA, 20 bp, Artificial Sequence
  Synthetic
ccagactgtgcagacatcct

SEQ ID NO: 23119 - DNA, 23 bp, Artificial Sequence
  Synthetic
ggcaaaggtcctggagatattgg

SEQ ID NO: 23120 - DNA, 20 bp, Artificial Sequence
  Synthetic
aggcgccagagagctcatta

SEQ ID NO: 23121 - DNA, 21 bp, Artificial Sequence
  Synthetic
atggagcctggtaggaatcag

SEQ ID NO: 23122 - DNA, 25 bp, Artificial Sequence
  Synthetic
acacctctatgtgtggcaatgaatt

SEQ ID NO: 23123 - DNA, 25 bp, Artificial Sequence
  Synthetic
gagtcatgtgataagcactattggg

SEQ ID NO: 23124 - DNA, 22 bp, Artificial Sequence
  Synthetic
agccaatcaacacaaggcctag

SEQ ID NO: 23125 - DNA, 20 bp, Artificial Sequence
  Synthetic
cctcctagggaaggggagtt

SEQ ID NO: 23126 - DNA, 24 bp, Artificial Sequence
  Synthetic
aatgactctttatcgcctgactgg

SEQ ID NO: 23127 - DNA, 21 bp, Artificial Sequence
  Synthetic
agacttaaggcggcccaactg

SEQ ID NO: 23128 - DNA, 25 bp, Artificial Sequence
  Synthetic
acctaataggagttcctgttacacc

SEQ ID NO: 23129 - DNA, 22 bp, Artificial Sequence
  Synthetic
gtttgggcacaagtcaggattg

SEQ ID NO: 23130 - DNA, 21 bp, Artificial Sequence
  Synthetic
cagtacttggccggtactggg

SEQ ID NO: 23131 - DNA, 23 bp, Artificial Sequence
  Synthetic
aacatcgtcaaactcacctcatg

SEQ ID NO: 23132 - DNA, 25 bp, Artificial Sequence
  Synthetic
acatctggatgctttcctataatgc

SEQ ID NO: 23133 - DNA, 24 bp, Artificial Sequence
  Synthetic
accatacatttgttcagaagggga

SEQ ID NO: 23134 - DNA, 25 bp, Artificial Sequence
  Synthetic
aggaacaattgtttatcaaagaggc

SEQ ID NO: 23135 - DNA, 23 bp, Artificial Sequence
  Synthetic
aagaggtttcttcggagctattg

SEQ ID NO: 23136 - DNA, 24 bp, Artificial Sequence
  Synthetic
taagctcacaaatagagcttgcag

SEQ ID NO: 23137 - DNA, 25 bp, Artificial Sequence
  Synthetic
tgctgcatctttaaatgatgatggc

SEQ ID NO: 23138 - DNA, 20 bp, Artificial Sequence
  Synthetic
aaggaggtcgcactcagcta

SEQ ID NO: 23139 - DNA, 20 bp, Artificial Sequence
  Synthetic
cggaagccatggaggttgct

SEQ ID NO: 23140 - DNA, 25 bp, Artificial Sequence
  Synthetic
tcttgatcgtcttttcttcaaatgc

SEQ ID NO: 23141 - DNA, 24 bp, Artificial Sequence
  Synthetic
aggccattttcatcatgggagatc

SEQ ID NO: 23142 - DNA, 25 bp, Artificial Sequence
  Synthetic
actgaggaatgtgatttagccttac

SEQ ID NO: 23143 - DNA, 20 bp, Artificial Sequence
  Synthetic
agaggaagcagatggagagc

SEQ ID NO: 23144 - DNA, 24 bp, Artificial Sequence
  Synthetic
accttttatgaggaggttacagga

SEQ ID NO: 23145 - DNA, 25 bp, Artificial Sequence
  Synthetic
aaaattgaaggagatacatgggcag

SEQ ID NO: 23146 - DNA, 24 bp, Artificial Sequence
  Synthetic
ggcagggccatctgttatagattt

SEQ ID NO: 23147 - DNA, 23 bp, Artificial Sequence
  Synthetic
tcttcaactacacatcctgaccc

SEQ ID NO: 23148 - DNA, 23 bp, Artificial Sequence
  Synthetic
ctgtttgaacaggttcctacacg

SEQ ID NO: 23149 - DNA, 25 bp, Artificial Sequence
  Synthetic
ctcgtgcatctataactaccagaag

SEQ ID NO: 23150 - DNA, 23 bp, Artificial Sequence
  Synthetic
ttttgcagatgactgtctggatg

SEQ ID NO: 23151 - DNA, 24 bp, Artificial Sequence
  Synthetic
agagacagagaacgcttagtatgg

SEQ ID NO: 23152 - DNA, 22 bp, Artificial Sequence
  Synthetic
tcctccatggggtgaatattgg

SEQ ID NO: 23153 - DNA, 20 bp, Artificial Sequence
  Synthetic
ttttgggcgtaaggagcagc

SEQ ID NO: 23154 - DNA, 22 bp, Artificial Sequence
  Synthetic
tttagcatttgtacccccacca

SEQ ID NO: 23155 - DNA, 25 bp, Artificial Sequence
  Synthetic
aagcgcaaaaggtctaagtaatttc

SEQ ID NO: 23156 - DNA, 25 bp, Artificial Sequence
  Synthetic
ttaacggcgaaatatgaatcagaga

SEQ ID NO: 23157 - DNA, 24 bp, Artificial Sequence
  Synthetic
ccttaccaggttgacactatttgt

SEQ ID NO: 23158 - DNA, 25 bp, Artificial Sequence
  Synthetic
agactttatcagatgaaactgtggc

SEQ ID NO: 23159 - DNA, 20 bp, Artificial Sequence
  Synthetic
aagtcaaatggtgcagtggg

SEQ ID NO: 23160 - DNA, 23 bp, Artificial Sequence
  Synthetic
aattgggacccaccgatttatcc

SEQ ID NO: 23161 - DNA, 20 bp, Artificial Sequence
  Synthetic
acaaccgcagacgacaagcc

SEQ ID NO: 23162 - DNA, 22 bp, Artificial Sequence
  Synthetic
aagttgaaggaacaacatgggc

SEQ ID NO: 23163 - DNA, 25 bp, Artificial Sequence
  Synthetic
agaagaaggaattccagatgttggg

SEQ ID NO: 23164 - DNA, 21 bp, Artificial Sequence
  Synthetic
actcgttctgctgaccttttc

SEQ ID NO: 23165 - DNA, 24 bp, Artificial Sequence
  Synthetic
agtgataaataacaccggcctacc

SEQ ID NO: 23166 - DNA, 25 bp, Artificial Sequence
  Synthetic
tcctgaaagagaacgtttagtttgg

SEQ ID NO: 23167 - DNA, 25 bp, Artificial Sequence
  Synthetic
atgccagacatttcttttgtaagga

SEQ ID NO: 23168 - DNA, 24 bp, Artificial Sequence
  Synthetic
tcctcctcaaggattggaggatac

SEQ ID NO: 23169 - DNA, 20 bp, Artificial Sequence
  Synthetic
aacaaccggttctggtcgtt

SEQ ID NO: 23170 - DNA, 24 bp, Artificial Sequence
  Synthetic
agaagaatcccgctcttagaatga

SEQ ID NO: 23171 - DNA, 25 bp, Artificial Sequence
  Synthetic
agtacagtccattatccaaaggtgt

SEQ ID NO: 23172 - DNA, 24 bp, Artificial Sequence
  Synthetic
aatattgctcctttaatggtggca

SEQ ID NO: 23173 - DNA, 22 bp, Artificial Sequence
  Synthetic
agagcaacagtatcagcagacc

SEQ ID NO: 23174 - DNA, 23 bp, Artificial Sequence
  Synthetic
gaagagcaacagccattctaaga

SEQ ID NO: 23175 - DNA, 23 bp, Artificial Sequence
  Synthetic
tgagacactttcaaaaggatgca

SEQ ID NO: 23176 - DNA, 23 bp, Artificial Sequence
  Synthetic
cagggaatggaaaagttgacgat

SEQ ID NO: 23177 - DNA, 25 bp, Artificial Sequence
  Synthetic
acgttcgacactgttcaaataatca

SEQ ID NO: 23178 - DNA, 23 bp, Artificial Sequence
  Synthetic
agagtctgcagtattgagaggat

SEQ ID NO: 23179 - DNA, 25 bp, Artificial Sequence
  Synthetic
aacacattaactgaaagaggagtgg

SEQ ID NO: 23180 - DNA, 25 bp, Artificial Sequence
  Synthetic
tgaggcaaattctcagagaatcagg

SEQ ID NO: 23181 - DNA, 25 bp, Artificial Sequence
  Synthetic
atcaacaatcttttgtaccgagtcc

SEQ ID NO: 23182 - DNA, 25 bp, Artificial Sequence
  Synthetic
cttgccatttcagaacatagatagc

SEQ ID NO: 23183 - DNA, 20 bp, Artificial Sequence
  Synthetic
caccagaatgcacagggaga

SEQ ID NO: 23184 - DNA, 24 bp, Artificial Sequence
  Synthetic
aactgtacgaacgagtgaaaagac

SEQ ID NO: 23185 - DNA, 20 bp, Artificial Sequence
  Synthetic
acttctgcctcatcacagcc

SEQ ID NO: 23186 - DNA, 24 bp, Artificial Sequence
  Synthetic
tatcgccaagtgagaaagatcatc

SEQ ID NO: 23187 - DNA, 22 bp, Artificial Sequence
  Synthetic
gtgtggttgtacacagtgtgga

SEQ ID NO: 23188 - DNA, 23 bp, Artificial Sequence
  Synthetic
agggtggtggaattgcttaagtg

SEQ ID NO: 23189 - DNA, 23 bp, Artificial Sequence
  Synthetic
accacagtgtctaaaggaatgtg

SEQ ID NO: 23190 - DNA, 22 bp, Artificial Sequence
  Synthetic
acacagatagtaatgcagctgc

SEQ ID NO: 23191 - DNA, 21 bp, Artificial Sequence
  Synthetic
aacatgtgcagcactggaagt

SEQ ID NO: 23192 - DNA, 23 bp, Artificial Sequence
  Synthetic
actgtggaggttgtattcgatgg

SEQ ID NO: 23193 - DNA, 20 bp, Artificial Sequence
  Synthetic
ccccgccgcgaaaacgatac

SEQ ID NO: 23194 - DNA, 23 bp, Artificial Sequence
  Synthetic
tgtgttgtgtgtgtggattagtt

SEQ ID NO: 23195 - DNA, 25 bp, Artificial Sequence
  Synthetic
ttaaactactgcagacatacgtgtg

SEQ ID NO: 23196 - DNA, 23 bp, Artificial Sequence
  Synthetic
ggacatttctcctcccaccaata

SEQ ID NO: 23197 - DNA, 25 bp, Artificial Sequence
  Synthetic
aggctatagaattgcaacctttagg

SEQ ID NO: 23198 - DNA, 21 bp, Artificial Sequence
  Synthetic
ctcctgtttccaaggtggtca

SEQ ID NO: 23199 - DNA, 23 bp, Artificial Sequence
  Synthetic
tatggcagatgtagggtttggag

SEQ ID NO: 23200 - DNA, 23 bp, Artificial Sequence
  Synthetic
attggaatgttggtgtagctcca

SEQ ID NO: 23201 - DNA, 25 bp, Artificial Sequence
  Synthetic
tgtactgccaaatggtattgctaag

SEQ ID NO: 23202 - DNA, 22 bp, Artificial Sequence
  Synthetic
aaatggttcaatgggcgtatga

SEQ ID NO: 23203 - DNA, 24 bp, Artificial Sequence
  Synthetic
aaatgttgtagggaatgtgatggt

SEQ ID NO: 23204 - DNA, 22 bp, Artificial Sequence
  Synthetic
gattcctcaagaagcggcagga

SEQ ID NO: 23205 - DNA, 24 bp, Artificial Sequence
  Synthetic
caagagttgagcgacttaaagcag

SEQ ID NO: 23206 - DNA, 21 bp, Artificial Sequence
  Synthetic
tgtaggtgagcatcccaatgt

SEQ ID NO: 23207 - DNA, 25 bp, Artificial Sequence
  Synthetic
tggggacagattgtttttttatggt

SEQ ID NO: 23208 - DNA, 23 bp, Artificial Sequence
  Synthetic
tcgttagttagcagcgaatctca

SEQ ID NO: 23209 - DNA, 22 bp, Artificial Sequence
  Synthetic
attaatgcaatggactctcgca

SEQ ID NO: 23210 - DNA, 23 bp, Artificial Sequence
  Synthetic
aagcgaccacggaatatctatga

SEQ ID NO: 23211 - DNA, 25 bp, Artificial Sequence
  Synthetic
ttaccctcctattatttgcccacaa

SEQ ID NO: 23212 - DNA, 20 bp, Artificial Sequence
  Synthetic
aagctggcaagaacaacacc

SEQ ID NO: 23213 - DNA, 22 bp, Artificial Sequence
  Synthetic
atggctggatcaagtgagcagg

SEQ ID NO: 23214 - DNA, 24 bp, Artificial Sequence
  Synthetic
tcttcaaatgcatttatcgtcgct

SEQ ID NO: 23215 - DNA, 25 bp, Artificial Sequence
  Synthetic
acctaacaacaaatggaagtaatgc

SEQ ID NO: 23216 - DNA, 25 bp, Artificial Sequence
  Synthetic
aagctatcactagtatctcagggtt

SEQ ID NO: 23217 - DNA, 23 bp, Artificial Sequence
  Synthetic
atatgttccagctaggacaagca

SEQ ID NO: 23218 - DNA, 23 bp, Artificial Sequence
  Synthetic
atcaactaatatctcctcggccc

SEQ ID NO: 23219 - DNA, 22 bp, Artificial Sequence
  Synthetic
gaggaatctccagaagcatcac

SEQ ID NO: 23220 - DNA, 24 bp, Artificial Sequence
  Synthetic
aatcctcatcatggaatctcacca

SEQ ID NO: 23221 - DNA, 25 bp, Artificial Sequence
  Synthetic
atacactagagaacgatgtgcaagt

SEQ ID NO: 23222 - DNA, 23 bp, Artificial Sequence
  Synthetic
gaacagagaaaagcagtacccca

SEQ ID NO: 23223 - DNA, 21 bp, Artificial Sequence
  Synthetic
acaaagttgctcttgctcctc

SEQ ID NO: 23224 - DNA, 24 bp, Artificial Sequence
  Synthetic
aatctctacttcaatctggacgca

SEQ ID NO: 23225 - DNA, 25 bp, Artificial Sequence
  Synthetic
tgtgatagtaaccaatcaggaatcc

SEQ ID NO: 23226 - DNA, 25 bp, Artificial Sequence
  Synthetic
agaatggtatattcctcttcccagc

SEQ ID NO: 23227 - DNA, 25 bp, Artificial Sequence
  Synthetic
agtacaataggtatcaacggaatgc

SEQ ID NO: 23228 - DNA, 22 bp, Artificial Sequence
  Synthetic
aagcataccaatcacggaaagg

SEQ ID NO: 23229 - DNA, 25 bp, Artificial Sequence
  Synthetic
acccaaaaataaggttaatgccagg

SEQ ID NO: 23230 - DNA, 25 bp, Artificial Sequence
  Synthetic
atgagaatgtaatctgcaacacaac

SEQ ID NO: 23231 - DNA, 24 bp, Artificial Sequence
  Synthetic
acttactcaacagcaactgaaaga

SEQ ID NO: 23232 - DNA, 25 bp, Artificial Sequence
  Synthetic
aaacgctgttgattattaccagagc

SEQ ID NO: 23233 - DNA, 25 bp, Artificial Sequence
  Synthetic
tagacgaaacaagatcagcatcttc

SEQ ID NO: 23234 - DNA, 23 bp, Artificial Sequence
  Synthetic
cagtgttgggggattcaattaca

SEQ ID NO: 23235 - DNA, 23 bp, Artificial Sequence
  Synthetic
aagtggacttgaaacacctgacc

SEQ ID NO: 23236 - DNA, 25 bp, Artificial Sequence
  Synthetic
gtctcaaaattttaacaccggtagc

SEQ ID NO: 23237 - DNA, 22 bp, Artificial Sequence
  Synthetic
atttgggttgcaacagtttgga

SEQ ID NO: 23238 - DNA, 21 bp, Artificial Sequence
  Synthetic
tagggcatgccgatttgtttc

SEQ ID NO: 23239 - DNA, 25 bp, Artificial Sequence
  Synthetic
cgtaagcccttagattacaaacgtc

SEQ ID NO: 23240 - DNA, 21 bp, Artificial Sequence
  Synthetic
ccaagtcttggtctgttggtg

SEQ ID NO: 23241 - DNA, 25 bp, Artificial Sequence
  Synthetic
ggatacattctgcttcaatgtacgc

SEQ ID NO: 23242 - DNA, 24 bp, Artificial Sequence
  Synthetic
tgaaacttgtactattgccggtaa

SEQ ID NO: 23243 - DNA, 25 bp, Artificial Sequence
  Synthetic
acttacaatcgccaacaattattcc

SEQ ID NO: 23244 - DNA, 25 bp, Artificial Sequence
  Synthetic
tgattacagggcttttatcagtgtt

SEQ ID NO: 23245 - DNA, 25 bp, Artificial Sequence
  Synthetic
ggtttctactgttaaaattggtggc

SEQ ID NO: 23246 - DNA, 23 bp, Artificial Sequence
  Synthetic
agatgcagagtttgtagaaccag

SEQ ID NO: 23247 - DNA, 25 bp, Artificial Sequence
  Synthetic
ttcaatcagcactttctgttgtttc

SEQ ID NO: 23248 - DNA, 25 bp, Artificial Sequence
  Synthetic
tatgcagttttttaaaatgggccga

SEQ ID NO: 23249 - DNA, 22 bp, Artificial Sequence
  Synthetic
aggcgtttccttatggtacttg

SEQ ID NO: 23250 - DNA, 24 bp, Artificial Sequence
  Synthetic
cttcctcgttcatgacaatgtagc

SEQ ID NO: 23251 - DNA, 25 bp, Artificial Sequence
  Synthetic
aaccagtgtccgtaattaaagttgc

SEQ ID NO: 23252 - DNA, 23 bp, Artificial Sequence
  Synthetic
ataccagctgactacatcttgcc

SEQ ID NO: 23253 - DNA, 24 bp, Artificial Sequence
  Synthetic
agatgctgttacttttgcaacagt

SEQ ID NO: 23254 - DNA, 25 bp, Artificial Sequence
  Synthetic
gctattatagtcagtgtcgaacagc

SEQ ID NO: 23255 - DNA, 25 bp, Artificial Sequence
  Synthetic
gttcttaaatctaagtggtggctgc

SEQ ID NO: 23256 - DNA, 21 bp, Artificial Sequence
  Synthetic
tttggatgttgtgtggaagca

SEQ ID NO: 23257 - DNA, 24 bp, Artificial Sequence
  Synthetic
acacaattgtcaatggtgtgcaac

SEQ ID NO: 23258 - DNA, 24 bp, Artificial Sequence
  Synthetic
aacaactttgtcagttcgtatgct

SEQ ID NO: 23259 - DNA, 20 bp, Artificial Sequence
  Synthetic
ctggtgatgctggccattca

SEQ ID NO: 23260 - DNA, 25 bp, Artificial Sequence
  Synthetic
ttttacactacaagctgcttttggt

SEQ ID NO: 23261 - DNA, 22 bp, Artificial Sequence
  Synthetic
gtgttgaatccaatgcaggtgt

SEQ ID NO: 23262 - DNA, 21 bp, Artificial Sequence
  Synthetic
ttttgctccatggtggttgtg

SEQ ID NO: 23263 - DNA, 20 bp, Artificial Sequence
  Synthetic
tttgcgcaaaatggcacaac

SEQ ID NO: 23264 - DNA, 25 bp, Artificial Sequence
  Synthetic
ctggtgaaggttttaacatcttagc

SEQ ID NO: 23265 - DNA, 25 bp, Artificial Sequence
  Synthetic
ttatgctgctatattgaatggttgc

SEQ ID NO: 23266 - DNA, 23 bp, Artificial Sequence
  Synthetic
taaccctggttttcttactccgt

SEQ ID NO: 23267 - DNA, 25 bp, Artificial Sequence
  Synthetic
gcacttatttgttctcactcattgc

SEQ ID NO: 23268 - DNA, 25 bp, Artificial Sequence
  Synthetic
tatggttgctaatggtttgaatgca

SEQ ID NO: 23269 - DNA, 21 bp, Artificial Sequence
  Synthetic
aacttgtgtgacgaccctgaa

SEQ ID NO: 23270 - DNA, 23 bp, Artificial Sequence
  Synthetic
tgctgcagctatgtacaaagaag

SEQ ID NO: 23271 - DNA, 25 bp, Artificial Sequence
  Synthetic
agatgttacaaaggaaaaccaggaa

SEQ ID NO: 23272 - DNA, 24 bp, Artificial Sequence
  Synthetic
tacagttgaattggaaccaccttg

SEQ ID NO: 23273 - DNA, 22 bp, Artificial Sequence
  Synthetic
gactaatggttctggtagcggt

SEQ ID NO: 23274 - DNA, 20 bp, Artificial Sequence
  Synthetic
ctagtgccgctcgactagag

SEQ ID NO: 23275 - DNA, 25 bp, Artificial Sequence
  Synthetic
ggagatattggttcttactggttgt

SEQ ID NO: 23276 - DNA, 23 bp, Artificial Sequence
  Synthetic
tgatgcctgttatgggtatgact

SEQ ID NO: 23277 - DNA, 21 bp, Artificial Sequence
  Synthetic
agttgctactgctggttacca

SEQ ID NO: 23278 - DNA, 25 bp, Artificial Sequence
  Synthetic
tttcgatgagggttcagaattaaca

SEQ ID NO: 23279 - DNA, 25 bp, Artificial Sequence
  Synthetic
tgtctgaaatccatagtagctacca

SEQ ID NO: 23280 - DNA, 25 bp, Artificial Sequence
  Synthetic
agccactttgtattatcagaatggt

SEQ ID NO: 23281 - DNA, 25 bp, Artificial Sequence
  Synthetic
ttgtctaagcatcctaaacctgagt

SEQ ID NO: 23282 - DNA, 23 bp, Artificial Sequence
  Synthetic
tttgggttccatggacattgatg

SEQ ID NO: 23283 - DNA, 25 bp, Artificial Sequence
  Synthetic
atacggttacttacaaatccactgc

SEQ ID NO: 23284 - DNA, 20 bp, Artificial Sequence
  Synthetic
cgctctgtgcaaaagctgtc

SEQ ID NO: 23285 - DNA, 21 bp, Artificial Sequence
  Synthetic
gcttccagctcctagagttct

SEQ ID NO: 23286 - DNA, 25 bp, Artificial Sequence
  Synthetic
tttaggcttacaaactcagacagtg

SEQ ID NO: 23287 - DNA, 21 bp, Artificial Sequence
  Synthetic
aagactagtggtgacttggct

SEQ ID NO: 23288 - DNA, 25 bp, Artificial Sequence
  Synthetic
tgtacctctacaagttggtttttcc

SEQ ID NO: 23289 - DNA, 23 bp, Artificial Sequence
  Synthetic
acattgccaatgtggtactgttg

SEQ ID NO: 23290 - DNA, 20 bp, Artificial Sequence
  Synthetic
gtcgcactgtgcagagtcat

SEQ ID NO: 23291 - DNA, 21 bp, Artificial Sequence
  Synthetic
tcatgcatttcacactcctgc

SEQ ID NO: 23292 - DNA, 25 bp, Artificial Sequence
  Synthetic
agagaacattgcttttaacgttgtt

SEQ ID NO: 23293 - DNA, 25 bp, Artificial Sequence
  Synthetic
ctgtttgtggttatacagactttgc

SEQ ID NO: 23294 - DNA, 20 bp, Artificial Sequence
  Synthetic
acaagactttttgcctcgca

SEQ ID NO: 23295 - DNA, 25 bp, Artificial Sequence
  Synthetic
ccaaggttcatgaggtcataattga

SEQ ID NO: 23296 - DNA, 22 bp, Artificial Sequence
  Synthetic
tggctctgattatggtgttgca

SEQ ID NO: 23297 - DNA, 25 bp, Artificial Sequence
  Synthetic
aactccactgttatgagtttgtcct

SEQ ID NO: 23298 - DNA, 25 bp, Artificial Sequence
  Synthetic
aaatgtatttgctgttgagagtggt

SEQ ID NO: 23299 - DNA, 20 bp, Artificial Sequence
  Synthetic
ctgcttttgtgggtgcacta

SEQ ID NO: 23300 - DNA, 24 bp, Artificial Sequence
  Synthetic
acgtttattgtgttgtacgttgac

SEQ ID NO: 23301 - DNA, 23 bp, Artificial Sequence
  Synthetic
ggcaccatctactctatcactcc

SEQ ID NO: 23302 - DNA, 23 bp, Artificial Sequence
  Synthetic
agtgtttcagctatcgtcacagc

SEQ ID NO: 23303 - DNA, 20 bp, Artificial Sequence
  Synthetic
agcgtcatacctagcttgcc

SEQ ID NO: 23304 - DNA, 22 bp, Artificial Sequence
  Synthetic
atgttgcattgcagactgatgt

SEQ ID NO: 23305 - DNA, 25 bp, Artificial Sequence
  Synthetic
ctgctttgaatgtattcgtttctca

SEQ ID NO: 23306 - DNA, 25 bp, Artificial Sequence
  Synthetic
tcacatctcgcataatgtttgaacc

SEQ ID NO: 23307 - DNA, 25 bp, Artificial Sequence
  Synthetic
acactgttcaaaaattgcaaactct

SEQ ID NO: 23308 - DNA, 25 bp, Artificial Sequence
  Synthetic
tacagtaatggctctaggtttgttc

SEQ ID NO: 23309 - DNA, 22 bp, Artificial Sequence
  Synthetic
ttttccatacagcttggcactg

SEQ ID NO: 23310 - DNA, 25 bp, Artificial Sequence
  Synthetic
aagctttgtttcacttgccatatgt

SEQ ID NO: 23311 - DNA, 23 bp, Artificial Sequence
  Synthetic
aattgggattctaattgggcctt

SEQ ID NO: 23312 - DNA, 25 bp, Artificial Sequence
  Synthetic
acgagtaaaacacggtgatttttct

SEQ ID NO: 23313 - DNA, 20 bp, Artificial Sequence
  Synthetic
gaaagggcaaacgggtggat

SEQ ID NO: 23314 - DNA, 23 bp, Artificial Sequence
  Synthetic
tttgacaagcctcaggaaaaaga

SEQ ID NO: 23315 - DNA, 21 bp, Artificial Sequence
  Synthetic
ccagagaccttgaccacaact

SEQ ID NO: 23316 - DNA, 21 bp, Artificial Sequence
  Synthetic
aacttcacctgcaactgctga

SEQ ID NO: 23317 - DNA, 22 bp, Artificial Sequence
  Synthetic
actgaacctaggtgaacgctag

SEQ ID NO: 23318 - DNA, 25 bp, Artificial Sequence
  Synthetic
cttttagtatttggcttccgtcctt

SEQ ID NO: 23319 - DNA, 20 bp, Artificial Sequence
  Synthetic
ggaaatccccatgcactgtt

SEQ ID NO: 23320 - DNA, 21 bp, Artificial Sequence
  Synthetic
aatggggaacaggagcagcag

SEQ ID NO: 23321 - DNA, 25 bp, Artificial Sequence
  Synthetic
agaagcaaactatgttaaaccacca

SEQ ID NO: 23322 - DNA, 25 bp, Artificial Sequence
  Synthetic
aggacaatggataaaaaagtgtggg

SEQ ID NO: 23323 - DNA, 25 bp, Artificial Sequence
  Synthetic
agtgctatatgacaacgaggaaaat

SEQ ID NO: 23324 - DNA, 21 bp, Artificial Sequence
  Synthetic
cactatccgtcgagacttgca

SEQ ID NO: 23325 - DNA, 22 bp, Artificial Sequence
  Synthetic
aaatggattgccagtgtggtgt

SEQ ID NO: 23326 - DNA, 22 bp, Artificial Sequence
  Synthetic
gcttccattgttcccctggagg

SEQ ID NO: 23327 - DNA, 22 bp, Artificial Sequence
  Synthetic
cagccgcagaggttattattgg

SEQ ID NO: 23328 - DNA, 22 bp, Artificial Sequence
  Synthetic
cgcctttgaggaggaggtaacc

SEQ ID NO: 23329 - DNA, 21 bp, Artificial Sequence
  Synthetic
atctcctgccttggaaactgt

SEQ ID NO: 23330 - DNA, 25 bp, Artificial Sequence
  Synthetic
tccggtaaattatatttgccaccct

SEQ ID NO: 23331 - DNA, 22 bp, Artificial Sequence
  Synthetic
aatcctgagtctgaacgtttgg

SEQ ID NO: 23332 - DNA, 25 bp, Artificial Sequence
  Synthetic
tggtgacaagattccagaacaaaat

SEQ ID NO: 23333 - DNA, 22 bp, Artificial Sequence
  Synthetic
ccatctattggggatgcgtaca

SEQ ID NO: 23334 - DNA, 21 bp, Artificial Sequence
  Synthetic
ggcagtttggcttcgaggtgc

SEQ ID NO: 23335 - DNA, 19 bp, Artificial Sequence
  Synthetic
tcctgtcacaccccaccgt

SEQ ID NO: 23336 - DNA, 21 bp, Artificial Sequence
  Synthetic
agcatgtgccccaatcttgga

SEQ ID NO: 23337 - DNA, 21 bp, Artificial Sequence
  Synthetic
tccgactacctcccggagatg

SEQ ID NO: 23338 - DNA, 19 bp, Artificial Sequence
  Synthetic
ccagagacggtgttgcgcc

SEQ ID NO: 23339 - DNA, 18 bp, Artificial Sequence
  Synthetic
tgggtgcaaggctcgtgc

SEQ ID NO: 23340 - DNA, 20 bp, Artificial Sequence
  Synthetic
acacccagttatgcagtgcc

SEQ ID NO: 23341 - DNA, 21 bp, Artificial Sequence
  Synthetic
gtaggtgcctccagagcccct

SEQ ID NO: 23342 - DNA, 19 bp, Artificial Sequence
  Synthetic
ccggtatcgggccagaggt

SEQ ID NO: 23343 - DNA, 21 bp, Artificial Sequence
  Synthetic
tccgtagaagggtcctcgtcc

SEQ ID NO: 23344 - DNA, 19 bp, Artificial Sequence
  Synthetic
tgggccctcaagtccagcc

SEQ ID NO: 23345 - DNA, 20 bp, Artificial Sequence
  Synthetic
gggccaagaacccagacgag

SEQ ID NO: 23346 - DNA, 22 bp, Artificial Sequence
  Synthetic
aagccagacagcagccaattgt

SEQ ID NO: 23347 - DNA, 19 bp, Artificial Sequence
  Synthetic
accggtcgcccagtcctac

SEQ ID NO: 23348 - DNA, 20 bp, Artificial Sequence
  Synthetic
cccgtcttactgcccagcct

SEQ ID NO: 23349 - DNA, 21 bp, Artificial Sequence
  Synthetic
cgagttacgctccttggaggg

SEQ ID NO: 23350 - DNA, 19 bp, Artificial Sequence
  Synthetic
tgaccctcgcgccccatct

SEQ ID NO: 23351 - DNA, 22 bp, Artificial Sequence
  Synthetic
cacaaagctgtgtgacggtccc

SEQ ID NO: 23352 - DNA, 19 bp, Artificial Sequence
  Synthetic
cggaagccctcgtttcggc

SEQ ID NO: 23353 - DNA, 20 bp, Artificial Sequence
  Synthetic
gtggattcgggggaagctgg

SEQ ID NO: 23354 - DNA, 18 bp, Artificial Sequence
  Synthetic
tcttgagctggcgcgggt

SEQ ID NO: 23355 - DNA, 20 bp, Artificial Sequence
  Synthetic
gccagagccaacctcagctc

SEQ ID NO: 23356 - DNA, 19 bp, Artificial Sequence
  Synthetic
gcaccaccatcgtccacga

SEQ ID NO: 23357 - DNA, 20 bp, Artificial Sequence
  Synthetic
gaccggacggccacgttgtg

SEQ ID NO: 23358 - DNA, 21 bp, Artificial Sequence
  Synthetic
cgtcgtccaggaccaagggga

SEQ ID NO: 23359 - DNA, 20 bp, Artificial Sequence
  Synthetic
ccgaagggaggtgatgggga

SEQ ID NO: 23360 - DNA, 22 bp, Artificial Sequence
  Synthetic
gagggggaatcgtcggttaggg

SEQ ID NO: 23361 - DNA, 22 bp, Artificial Sequence
  Synthetic
aacgctcttttccttcaccgct

SEQ ID NO: 23362 - DNA, 19 bp, Artificial Sequence
  Synthetic
gtggccaggcccaacgact

SEQ ID NO: 23363 - DNA, 22 bp, Artificial Sequence
  Synthetic
agaaggggctgtggacataggc

SEQ ID NO: 23364 - DNA, 19 bp, Artificial Sequence
  Synthetic
gacacgccctggtcggact

SEQ ID NO: 23365 - DNA, 19 bp, Artificial Sequence
  Synthetic
ccggcagccccttcatcct

SEQ ID NO: 23366 - DNA, 19 bp, Artificial Sequence
  Synthetic
cgctgcctggtgaatgcgc

SEQ ID NO: 23367 - DNA, 19 bp, Artificial Sequence
  Synthetic
gctcggtagcagcggactc

SEQ ID NO: 23368 - DNA, 21 bp, Artificial Sequence
  Synthetic
cctgccattcccagccactcc

SEQ ID NO: 23369 - DNA, 20 bp, Artificial Sequence
  Synthetic
gagggccagatgcaggagct

SEQ ID NO: 23370 - DNA, 19 bp, Artificial Sequence
  Synthetic
ttcagctgctggacacgca

SEQ ID NO: 23371 - DNA, 19 bp, Artificial Sequence
  Synthetic
ggcgaggcgttgtggcaca

SEQ ID NO: 23372 - DNA, 22 bp, Artificial Sequence
  Synthetic
gccaggtggattttgagctccg

SEQ ID NO: 23373 - DNA, 22 bp, Artificial Sequence
  Synthetic
ggcatagaggcctaggtccaca

SEQ ID NO: 23374 - DNA, 22 bp, Artificial Sequence
  Synthetic
agcccaggaccagttctactcc

SEQ ID NO: 23375 - DNA, 24 bp, Artificial Sequence
  Synthetic
agatggggatatttaaaaggggca

SEQ ID NO: 23376 - DNA, 19 bp, Artificial Sequence
  Synthetic
acctacgcccttgccccct

SEQ ID NO: 23377 - DNA, 21 bp, Artificial Sequence
  Synthetic
ctcccagtcagatgtccgtgc

SEQ ID NO: 23378 - DNA, 19 bp, Artificial Sequence
  Synthetic
gccaggatgccaccgaggt

SEQ ID NO: 23379 - DNA, 20 bp, Artificial Sequence
  Synthetic
acccggtccttgtgactgct

SEQ ID NO: 23380 - DNA, 22 bp, Artificial Sequence
  Synthetic
atgacccaacgaaacagtcccg

SEQ ID NO: 23381 - DNA, 19 bp, Artificial Sequence
  Synthetic
catggtcgggctcgggaga

SEQ ID NO: 23382 - DNA, 24 bp, Artificial Sequence
  Synthetic
ggggcattaactaagcttatgagc

SEQ ID NO: 23383 - DNA, 22 bp, Artificial Sequence
  Synthetic
ccagtttgccccatcgtttccc

SEQ ID NO: 23384 - DNA, 20 bp, Artificial Sequence
  Synthetic
cgaggatgaagcaacccccg

SEQ ID NO: 23385 - DNA, 20 bp, Artificial Sequence
  Synthetic
gctccgccacgtattccccg

SEQ ID NO: 23386 - DNA, 22 bp, Artificial Sequence
  Synthetic
tctctcaggacctcaaaggcgg

SEQ ID NO: 23387 - DNA, 20 bp, Artificial Sequence
  Synthetic
atgtggcggctcttgaaccc

SEQ ID NO: 23388 - DNA, 19 bp, Artificial Sequence
  Synthetic
cccggccatctttgccgga

SEQ ID NO: 23389 - DNA, 20 bp, Artificial Sequence
  Synthetic
ggggacacggagcctgacca

SEQ ID NO: 23390 - DNA, 22 bp, Artificial Sequence
  Synthetic
gatctcgtcccagttttgcggc

SEQ ID NO: 23391 - DNA, 19 bp, Artificial Sequence
  Synthetic
gcccccggccatactccaa

SEQ ID NO: 23392 - DNA, 19 bp, Artificial Sequence
  Synthetic
gcccatcatcccccgagca

SEQ ID NO: 23393 - DNA, 22 bp, Artificial Sequence
  Synthetic
catcgcaatcatgaagtcctcc

SEQ ID NO: 23394 - DNA, 20 bp, Artificial Sequence
  Synthetic
ggaccacgggtgtcaccagc

SEQ ID NO: 23395 - DNA, 22 bp, Artificial Sequence
  Synthetic
aatcccatgtcagggttggggt

SEQ ID NO: 23396 - DNA, 18 bp, Artificial Sequence
  Synthetic
cccgtgccgcagcgtaaa

SEQ ID NO: 23397 - DNA, 22 bp, Artificial Sequence
  Synthetic
gtgacgatgccatcaaccagct

SEQ ID NO: 23398 - DNA, 19 bp, Artificial Sequence
  Synthetic
aaacaccccccccactggc

SEQ ID NO: 23399 - DNA, 21 bp, Artificial Sequence
  Synthetic
ggggcacctaaagacccccct

SEQ ID NO: 23400 - DNA, 22 bp, Artificial Sequence
  Synthetic
tgtcttccacaccatccacagc

SEQ ID NO: 23401 - DNA, 19 bp, Artificial Sequence
  Synthetic
cggagccccaagccacctt

SEQ ID NO: 23402 - DNA, 20 bp, Artificial Sequence
  Synthetic
tcttcatacaggcccgcaat

SEQ ID NO: 23403 - DNA, 20 bp, Artificial Sequence
  Synthetic
cctggtccagcgttgcctcc

SEQ ID NO: 23404 - DNA, 22 bp, Artificial Sequence
  Synthetic
ttggtatagggcaaggttgggc

SEQ ID NO: 23405 - DNA, 19 bp, Artificial Sequence
  Synthetic
ccttggggtagccgacggt

SEQ ID NO: 23406 - DNA, 22 bp, Artificial Sequence
  Synthetic
tgggcagcatgcttggataact

SEQ ID NO: 23407 - DNA, 19 bp, Artificial Sequence
  Synthetic
ccgaaagggccaggtcgga

SEQ ID NO: 23408 - DNA, 21 bp, Artificial Sequence
  Synthetic
atttccgtcagccagggtgac

SEQ ID NO: 23409 - DNA, 20 bp, Artificial Sequence
  Synthetic
tcacctggatcccctcaccg

SEQ ID NO: 23410 - DNA, 22 bp, Artificial Sequence
  Synthetic
ggatcgattggaaaagggccca

SEQ ID NO: 23411 - DNA, 19 bp, Artificial Sequence
  Synthetic
gccagcaggtaaggcaggc

SEQ ID NO: 23412 - DNA, 22 bp, Artificial Sequence
  Synthetic
ctagattcagcgatcccccggt

SEQ ID NO: 23413 - DNA, 19 bp, Artificial Sequence
  Synthetic
gagcttgcggctgagctcc

SEQ ID NO: 23414 - DNA, 20 bp, Artificial Sequence
  Synthetic
ctccagggagatgggggcca

SEQ ID NO: 23415 - DNA, 22 bp, Artificial Sequence
  Synthetic
cagctgctgcttgtcgaggatg

SEQ ID NO: 23416 - DNA, 22 bp, Artificial Sequence
  Synthetic
acacggcgtacatgtcgatggg

SEQ ID NO: 23417 - DNA, 20 bp, Artificial Sequence
  Synthetic
cccctgtcgaccagaggacg

SEQ ID NO: 23418 - DNA, 19 bp, Artificial Sequence
  Synthetic
gcaggcacagggtctcggt

SEQ ID NO: 23419 - DNA, 20 bp, Artificial Sequence
  Synthetic
ccagcagggcacagaggtga

SEQ ID NO: 23420 - DNA, 22 bp, Artificial Sequence
  Synthetic
ttccttcagcgtctatgcccag

SEQ ID NO: 23421 - DNA, 20 bp, Artificial Sequence
  Synthetic
cgggcctctggaccctcaca

SEQ ID NO: 23422 - DNA, 20 bp, Artificial Sequence
  Synthetic
agatgtagccgcacggaccc

SEQ ID NO: 23423 - DNA, 19 bp, Artificial Sequence
  Synthetic
tgagccggcagaggaccag

SEQ ID NO: 23424 - DNA, 20 bp, Artificial Sequence
  Synthetic
cgggtgaggcggctaagagg

SEQ ID NO: 23425 - DNA, 25 bp, Artificial Sequence
  Synthetic
ttcgagtatccttctttgatgttcg

SEQ ID NO: 23426 - DNA, 24 bp, Artificial Sequence
  Synthetic
cttagtgaagagtctttgtcacca

SEQ ID NO: 23427 - DNA, 20 bp, Artificial Sequence
  Synthetic
cccgcgattggaagctgtat

SEQ ID NO: 23428 - DNA, 25 bp, Artificial Sequence
  Synthetic
ttcctttaagttcggtgattatcca

SEQ ID NO: 23429 - DNA, 21 bp, Artificial Sequence
  Synthetic
tgtcccccaaggaagagctac

SEQ ID NO: 23430 - DNA, 25 bp, Artificial Sequence
  Synthetic
ttccacttctcttagttctcaaagg

SEQ ID NO: 23431 - DNA, 20 bp, Artificial Sequence
  Synthetic
tgcaagcaggcccatagatg

SEQ ID NO: 23432 - DNA, 25 bp, Artificial Sequence
  Synthetic
acacctttagacagagttcagagag

SEQ ID NO: 23433 - DNA, 22 bp, Artificial Sequence
  Synthetic
cagaacggttgcttatggttgg

SEQ ID NO: 23434 - DNA, 25 bp, Artificial Sequence
  Synthetic
tgagtcttttcaacaagacagagct

SEQ ID NO: 23435 - DNA, 24 bp, Artificial Sequence
  Synthetic
gatgttattccagcagaaaagcct

SEQ ID NO: 23436 - DNA, 25 bp, Artificial Sequence
  Synthetic
ctgaagccatttgcacttatcttct

SEQ ID NO: 23437 - DNA, 21 bp, Artificial Sequence
  Synthetic
ttcaaccgacactgttgacac

SEQ ID NO: 23438 - DNA, 20 bp, Artificial Sequence
  Synthetic
gctgagggagcaattgagct

SEQ ID NO: 23439 - DNA, 23 bp, Artificial Sequence
  Synthetic
ccttgtactgtggggtattcatc

SEQ ID NO: 23440 - DNA, 20 bp, Artificial Sequence
  Synthetic
ttcgcactgagtagaggctt

SEQ ID NO: 23441 - DNA, 20 bp, Artificial Sequence
  Synthetic
ttgaagggggatggactgga

SEQ ID NO: 23442 - DNA, 25 bp, Artificial Sequence
  Synthetic
ctatcagattctggcgatctactca

SEQ ID NO: 23443 - DNA, 23 bp, Artificial Sequence
  Synthetic
aggtggttatttgatcgttggga

SEQ ID NO: 23444 - DNA, 22 bp, Artificial Sequence
  Synthetic
atggactctgtagtagctgtgc

SEQ ID NO: 23445 - DNA, 20 bp, Artificial Sequence
  Synthetic
attgtgcagacactgtgggt

SEQ ID NO: 23446 - DNA, 20 bp, Artificial Sequence
  Synthetic
gaggcagacttcgccatgag

SEQ ID NO: 23447 - DNA, 21 bp, Artificial Sequence
  Synthetic
aaactcccgcgaactgttttg

SEQ ID NO: 23448 - DNA, 21 bp, Artificial Sequence
  Synthetic
ctcagggaactaagggcttgg

SEQ ID NO: 23449 - DNA, 24 bp, Artificial Sequence
  Synthetic
aacgtaggcaaaagtagagaaact

SEQ ID NO: 23450 - DNA, 25 bp, Artificial Sequence
  Synthetic
ttgatgaagctaccattgcatatca

SEQ ID NO: 23451 - DNA, 23 bp, Artificial Sequence
  Synthetic
aaaaggctttggacacagttaga

SEQ ID NO: 23452 - DNA, 21 bp, Artificial Sequence
  Synthetic
taccaacctgtacctccgttg

SEQ ID NO: 23453 - DNA, 20 bp, Artificial Sequence
  Synthetic
cgccaacaacatcgcgactc

SEQ ID NO: 23454 - DNA, 21 bp, Artificial Sequence
  Synthetic
gacaggcgaaggggaagggga

SEQ ID NO: 23455 - DNA, 22 bp, Artificial Sequence
  Synthetic
agtactacgtggtcatgggtag

SEQ ID NO: 23456 - DNA, 23 bp, Artificial Sequence
  Synthetic
cgtactaaacgtgcctctgttac

SEQ ID NO: 23457 - DNA, 21 bp, Artificial Sequence
  Synthetic
agttcgccctggggtgatacc

SEQ ID NO: 23458 - DNA, 22 bp, Artificial Sequence
  Synthetic
ggctcgtctgccattttagagg

SEQ ID NO: 23459 - DNA, 23 bp, Artificial Sequence
  Synthetic
acagaaacacctcagggatatgt

SEQ ID NO: 23460 - DNA, 20 bp, Artificial Sequence
  Synthetic
acctgatggtttggaggtgg

SEQ ID NO: 23461 - DNA, 25 bp, Artificial Sequence
  Synthetic
gtgggtcatccatattatgatgtcc

SEQ ID NO: 23462 - DNA, 25 bp, Artificial Sequence
  Synthetic
ggttagagacacagaaaactctagc

SEQ ID NO: 23463 - DNA, 25 bp, Artificial Sequence
  Synthetic
gtgatcaacaacaacgaacaatagc

SEQ ID NO: 23464 - DNA, 21 bp, Artificial Sequence
  Synthetic
cttctgtatgcctcttgggga

SEQ ID NO: 23465 - DNA, 20 bp, Artificial Sequence
  Synthetic
cctgagctcacctatgtccg

SEQ ID NO: 23466 - DNA, 24 bp, Artificial Sequence
  Synthetic
ggagatcccaaaagattttcaacg

SEQ ID NO: 23467 - DNA, 21 bp, Artificial Sequence
  Synthetic
agtctgctcctaagcctgaaa

SEQ ID NO: 23468 - DNA, 24 bp, Artificial Sequence
  Synthetic
cttccctgaaggttgagacaattt

SEQ ID NO: 23469 - DNA, 23 bp, Artificial Sequence
  Synthetic
aaatccatctacgtgcatttcct

SEQ ID NO: 23470 - DNA, 24 bp, Artificial Sequence
  Synthetic
aacggtttcaataaaaagctgtgc

SEQ ID NO: 23471 - DNA, 20 bp, Artificial Sequence
  Synthetic
gtacagctcacagttggcgt

SEQ ID NO: 23472 - DNA, 23 bp, Artificial Sequence
  Synthetic
caaggcagcgtggaattatacaa

SEQ ID NO: 23473 - DNA, 22 bp, Artificial Sequence
  Synthetic
gatctttatgctctgggggttg

SEQ ID NO: 23474 - DNA, 25 bp, Artificial Sequence
  Synthetic
tctgtttctgtctataaccgaagtc

SEQ ID NO: 23475 - DNA, 20 bp, Artificial Sequence
  Synthetic
gctgttgccgagggaagaaa

SEQ ID NO: 23476 - DNA, 21 bp, Artificial Sequence
  Synthetic
ttgcctgaatgagagtggact

SEQ ID NO: 23477 - DNA, 23 bp, Artificial Sequence
  Synthetic
tcaaacagcatgatgtccgatag

SEQ ID NO: 23478 - DNA, 24 bp, Artificial Sequence
  Synthetic
ataccctgtcagaaatacacgagc

SEQ ID NO: 23479 - DNA, 20 bp, Artificial Sequence
  Synthetic
gcagactttctgggggagga

SEQ ID NO: 23480 - DNA, 23 bp, Artificial Sequence
  Synthetic
tgatgagttgcgtaattggatgc

SEQ ID NO: 23481 - DNA, 20 bp, Artificial Sequence
  Synthetic
tgcttgcgaaaggtgtgtac

SEQ ID NO: 23482 - DNA, 20 bp, Artificial Sequence
  Synthetic
aaaggagaacctcgagcctt

SEQ ID NO: 23483 - DNA, 21 bp, Artificial Sequence
  Synthetic
ttagctcccaggttacgtcat

SEQ ID NO: 23484 - DNA, 25 bp, Artificial Sequence
  Synthetic
tatcgatgtttctcgcttaacagaa

SEQ ID NO: 23485 - DNA, 22 bp, Artificial Sequence
  Synthetic
ccgctttcctgtgtgtaatcat

SEQ ID NO: 23486 - DNA, 25 bp, Artificial Sequence
  Synthetic
gatcttcagttacaacttgacagct

SEQ ID NO: 23487 - DNA, 22 bp, Artificial Sequence
  Synthetic
aacgacctcggtacaaaaaccc

SEQ ID NO: 23488 - DNA, 21 bp, Artificial Sequence
  Synthetic
gcaaaacatctccttcctgca

SEQ ID NO: 23489 - DNA, 20 bp, Artificial Sequence
  Synthetic
gaagctgacttcgccgatct

SEQ ID NO: 23490 - DNA, 21 bp, Artificial Sequence
  Synthetic
cgtatccttgccggtattcac

SEQ ID NO: 23491 - DNA, 22 bp, Artificial Sequence
  Synthetic
tgcacaagctttactgaacact

SEQ ID NO: 23492 - DNA, 21 bp, Artificial Sequence
  Synthetic
cactgttcgcggttacaaacc

SEQ ID NO: 23493 - DNA, 20 bp, Artificial Sequence
  Synthetic
tctagggatttggcctccac

SEQ ID NO: 23494 - DNA, 21 bp, Artificial Sequence
  Synthetic
aggtttagggcttcttcctgc

SEQ ID NO: 23495 - DNA, 23 bp, Artificial Sequence
  Synthetic
caagtagcgaaaaatccaacagc

SEQ ID NO: 23496 - DNA, 20 bp, Artificial Sequence
  Synthetic
ctgctcagctcttgcggtta

SEQ ID NO: 23497 - DNA, 24 bp, Artificial Sequence
  Synthetic
tttgtcacgaatatagccactgat

SEQ ID NO: 23498 - DNA, 24 bp, Artificial Sequence
  Synthetic
agatcctctaaatttgaacctccg

SEQ ID NO: 23499 - DNA, 23 bp, Artificial Sequence
  Synthetic
tccagacatagcaacaatgacag

SEQ ID NO: 23500 - DNA, 25 bp, Artificial Sequence
  Synthetic
tgatggttacttcctcaaaacaaga

SEQ ID NO: 23501 - DNA, 20 bp, Artificial Sequence
  Synthetic
tcagaaccctgacggattgt

SEQ ID NO: 23502 - DNA, 20 bp, Artificial Sequence
  Synthetic
ggctgcatcgtctcgagaac

SEQ ID NO: 23503 - DNA, 25 bp, Artificial Sequence
  Synthetic
tctccagcagcaaaaactaaaattc

SEQ ID NO: 23504 - DNA, 24 bp, Artificial Sequence
  Synthetic
tgtacggaagaagaattgaggtct

SEQ ID NO: 23505 - DNA, 20 bp, Artificial Sequence
  Synthetic
caacgttctctcctgcacga

SEQ ID NO: 23506 - DNA, 23 bp, Artificial Sequence
  Synthetic
caagtagtcattgctatgctcga

SEQ ID NO: 23507 - DNA, 20 bp, Artificial Sequence
  Synthetic
agccgataatgctcgctcac

SEQ ID NO: 23508 - DNA, 23 bp, Artificial Sequence
  Synthetic
gtccttcctgtttagggaaacga

SEQ ID NO: 23509 - DNA, 23 bp, Artificial Sequence
  Synthetic
cattctgtggcttctgcattaga

SEQ ID NO: 23510 - DNA, 24 bp, Artificial Sequence
  Synthetic
tacgatccaaattgagaaccttgc

SEQ ID NO: 23511 - DNA, 24 bp, Artificial Sequence
  Synthetic
tcttactagctccttgtcgagaac

SEQ ID NO: 23512 - DNA, 20 bp, Artificial Sequence
  Synthetic
aatgccgctcgagtcaatgt

SEQ ID NO: 23513 - DNA, 20 bp, Artificial Sequence
  Synthetic
cgacaacccacgatcttgct

SEQ ID NO: 23514 - DNA, 20 bp, Artificial Sequence
  Synthetic
tcgctcccactaatgcaact

SEQ ID NO: 23515 - DNA, 24 bp, Artificial Sequence
  Synthetic
aaacagtgaggacgacaaagtaaa

SEQ ID NO: 23516 - DNA, 24 bp, Artificial Sequence
  Synthetic
gcaatcgctaaaacaatcgattgc

SEQ ID NO: 23517 - DNA, 25 bp, Artificial Sequence
  Synthetic
gtaggtaaaacctcgtttggtcaac

SEQ ID NO: 23518 - DNA, 20 bp, Artificial Sequence
  Synthetic
caggctgcacaccatcacta

SEQ ID NO: 23519 - DNA, 23 bp, Artificial Sequence
  Synthetic
ggaactgaccctataaggaatgc

SEQ ID NO: 23520 - DNA, 23 bp, Artificial Sequence
  Synthetic
gacaaccatttttgctttgctgt

SEQ ID NO: 23521 - DNA, 24 bp, Artificial Sequence
  Synthetic
cgatcaaatcgcaaacaaacactt

SEQ ID NO: 23522 - DNA, 22 bp, Artificial Sequence
  Synthetic
gcgaacgtttacaaatggctcc

SEQ ID NO: 23523 - DNA, 25 bp, Artificial Sequence
  Synthetic
atctgtgcagcttaaaacctaatgt

SEQ ID NO: 23524 - DNA, 20 bp, Artificial Sequence
  Synthetic
ggcttctgtcaccttgctca

SEQ ID NO: 23525 - DNA, 20 bp, Artificial Sequence
  Synthetic
ccgcacaagaaagccctctt

SEQ ID NO: 23526 - DNA, 25 bp, Artificial Sequence
  Synthetic
ctgtcaattctacattatgtgcagc

SEQ ID NO: 23527 - DNA, 24 bp, Artificial Sequence
  Synthetic
gaagctggttctacaacagaaact

SEQ ID NO: 23528 - DNA, 22 bp, Artificial Sequence
  Synthetic
gctcaaagtccaaaaaaacgca

SEQ ID NO: 23529 - DNA, 20 bp, Artificial Sequence
  Synthetic
gcctgaccccagaaaccatt

SEQ ID NO: 23530 - DNA, 23 bp, Artificial Sequence
  Synthetic
tcgtttccttttccaggttcatt

SEQ ID NO: 23531 - DNA, 25 bp, Artificial Sequence
  Synthetic
ttaggtcctgtagctttagactcat

SEQ ID NO: 23532 - DNA, 20 bp, Artificial Sequence
  Synthetic
aaggcactattcgttgcacc

SEQ ID NO: 23533 - DNA, 21 bp, Artificial Sequence
  Synthetic
aatcacaatgcgctcccattt

SEQ ID NO: 23534 - DNA, 24 bp, Artificial Sequence
  Synthetic
agaagcaaggatgaggttttctgt

SEQ ID NO: 23535 - DNA, 20 bp, Artificial Sequence
  Synthetic
gcccctaaaacccgacaaag

SEQ ID NO: 23536 - DNA, 22 bp, Artificial Sequence
  Synthetic
aaaagcatctaggagctcccca

SEQ ID NO: 23537 - DNA, 20 bp, Artificial Sequence
  Synthetic
cacaggagcaaccacgaaga

SEQ ID NO: 23538 - DNA, 25 bp, Artificial Sequence
  Synthetic
acctctctgtaagcaaatactgaca

SEQ ID NO: 23539 - DNA, 20 bp, Artificial Sequence
  Synthetic
cgaagcggtgaatgcatgaa

SEQ ID NO: 23540 - DNA, 25 bp, Artificial Sequence
  Synthetic
actggaaaagctacaatggattgta

SEQ ID NO: 23541 - DNA, 21 bp, Artificial Sequence
  Synthetic
tctgccatcaaagcatttcga

SEQ ID NO: 23542 - DNA, 20 bp, Artificial Sequence
  Synthetic
aatttggcggctggtaatcc

SEQ ID NO: 23543 - DNA, 20 bp, Artificial Sequence
  Synthetic
ttccgaccgagcaatctcag

SEQ ID NO: 23544 - DNA, 25 bp, Artificial Sequence
  Synthetic
caacacttttttaaggcatcttcca

SEQ ID NO: 23545 - DNA, 22 bp, Artificial Sequence
  Synthetic
ccaaagcgttcatatctcggac

SEQ ID NO: 23546 - DNA, 20 bp, Artificial Sequence
  Synthetic
aagcaaccttgacgggcatt

SEQ ID NO: 23547 - DNA, 21 bp, Artificial Sequence
  Synthetic
aaaccggcgtatttcttcctg

SEQ ID NO: 23548 - DNA, 21 bp, Artificial Sequence
  Synthetic
agaccctcttacgctggttaa

SEQ ID NO: 23549 - DNA, 23 bp, Artificial Sequence
  Synthetic
tctttgtcatcgatttggtcacg

SEQ ID NO: 23550 - DNA, 22 bp, Artificial Sequence
  Synthetic
cgtccactaccaagacctagat

SEQ ID NO: 23551 - DNA, 23 bp, Artificial Sequence
  Synthetic
tagctctgcagattttgtagcac

SEQ ID NO: 23552 - DNA, 22 bp, Artificial Sequence
  Synthetic
agctaaaccaacccgaagaatc

SEQ ID NO: 23553 - DNA, 25 bp, Artificial Sequence
  Synthetic
tctcaaaatccctttaaagcagagc

SEQ ID NO: 23554 - DNA, 25 bp, Artificial Sequence
  Synthetic
atctggaaattcaagaaagtcgtgg

SEQ ID NO: 23555 - DNA, 21 bp, Artificial Sequence
  Synthetic
ctgaaggaatcgctcaaggac

SEQ ID NO: 23556 - DNA, 20 bp, Artificial Sequence
  Synthetic
tggaggggccattccgtaat

SEQ ID NO: 23557 - DNA, 20 bp, Artificial Sequence
  Synthetic
aacctgggagacaagatgca

SEQ ID NO: 23558 - DNA, 22 bp, Artificial Sequence
  Synthetic
caccctaatatagttccgctgc

SEQ ID NO: 23559 - DNA, 23 bp, Artificial Sequence
  Synthetic
cagatgcttttacgacttgcaac

SEQ ID NO: 23560 - DNA, 20 bp, Artificial Sequence
  Synthetic
aagttcccatgatcgcctca

SEQ ID NO: 23561 - DNA, 20 bp, Artificial Sequence
  Synthetic
gagcttgtcccaattgctcc

SEQ ID NO: 23562 - DNA, 24 bp, Artificial Sequence
  Synthetic
tatcagcgatgcagtttctacagc

SEQ ID NO: 23563 - DNA, 20 bp, Artificial Sequence
  Synthetic
tgttccccgtacaagcaagt

SEQ ID NO: 23564 - DNA, 24 bp, Artificial Sequence
  Synthetic
ctgctcagctgttaaaaagtcaaa

SEQ ID NO: 23565 - DNA, 20 bp, Artificial Sequence
  Synthetic
ccccaggcaaagcaaaaagc

SEQ ID NO: 23566 - DNA, 22 bp, Artificial Sequence
  Synthetic
ggtaactgttgtattcgcacgg

SEQ ID NO: 23567 - DNA, 23 bp, Artificial Sequence
  Synthetic
gatcctaacgtgtctcctattgc

SEQ ID NO: 23568 - DNA, 24 bp, Artificial Sequence
  Synthetic
ttttcctgtgttttttcgatcagc

SEQ ID NO: 23569 - DNA, 22 bp, Artificial Sequence
  Synthetic
gggagttggagaaatcatggga

SEQ ID NO: 23570 - DNA, 22 bp, Artificial Sequence
  Synthetic
ttcgagcccttttgaagagtga

SEQ ID NO: 23571 - DNA, 22 bp, Artificial Sequence
  Synthetic
tcagagcctgtggatagtcttg

SEQ ID NO: 23572 - DNA, 21 bp, Artificial Sequence
  Synthetic
agggaaatcagaaaatcccgc

SEQ ID NO: 23573 - DNA, 25 bp, Artificial Sequence
  Synthetic
agcgtacatccatgatttattgtgt

SEQ ID NO: 23574 - DNA, 20 bp, Artificial Sequence
  Synthetic
cgcgctccgttaagatgatt

SEQ ID NO: 23575 - DNA, 22 bp, Artificial Sequence
  Synthetic
ccttcggcaacaaaaatcgttg

SEQ ID NO: 23576 - DNA, 21 bp, Artificial Sequence
  Synthetic
ttaacttcaacaagcgctgca

SEQ ID NO: 23577 - DNA, 23 bp, Artificial Sequence
  Synthetic
caggacgcaccggagataaaatt

SEQ ID NO: 23578 - DNA, 20 bp, Artificial Sequence
  Synthetic
gtagtgccagctcgggataa

SEQ ID NO: 23579 - DNA, 20 bp, Artificial Sequence
  Synthetic
tcctgcagccagaccatgta

SEQ ID NO: 23580 - DNA, 23 bp, Artificial Sequence
  Synthetic
cttaatctttctgaatggggcgt

SEQ ID NO: 23581 - DNA, 22 bp, Artificial Sequence
  Synthetic
ttacgaaggccatacggtatct

SEQ ID NO: 23582 - DNA, 20 bp, Artificial Sequence
  Synthetic
gtgcggggagaactcttgtt

SEQ ID NO: 23583 - DNA, 23 bp, Artificial Sequence
  Synthetic
caacgaaatacgcttgataccca

SEQ ID NO: 23584 - DNA, 24 bp, Artificial Sequence
  Synthetic
aatgtcgaggctttaaacgttttc

SEQ ID NO: 23585 - DNA, 21 bp, Artificial Sequence
  Synthetic
cgtctgcgtaagatgcatctt

SEQ ID NO: 23586 - DNA, 20 bp, Artificial Sequence
  Synthetic
gcgtaatggtgtgatgcctg

SEQ ID NO: 23587 - DNA, 25 bp, Artificial Sequence
  Synthetic
tccgtaacttctgattcagaattga

SEQ ID NO: 23588 - DNA, 20 bp, Artificial Sequence
  Synthetic
catggcaaaggttcgcctca

SEQ ID NO: 23589 - DNA, 21 bp, Artificial Sequence
  Synthetic
aggcgattctggaccaaaatc

SEQ ID NO: 23590 - DNA, 23 bp, Artificial Sequence
  Synthetic
ttgccttaggagaaaagggaagg

SEQ ID NO: 23591 - DNA, 20 bp, Artificial Sequence
  Synthetic
agcttcggaaggagacaagt

SEQ ID NO: 23592 - DNA, 23 bp, Artificial Sequence
  Synthetic
agcaattacgggatgaacatctg

SEQ ID NO: 23593 - DNA, 25 bp, Artificial Sequence
  Synthetic
gttcacctctttcaacggtatatga

SEQ ID NO: 23594 - DNA, 20 bp, Artificial Sequence
  Synthetic
ctccacaaatcagccgatcc

SEQ ID NO: 23595 - DNA, 20 bp, Artificial Sequence
  Synthetic
tgctcgctgcaaattccgaa

SEQ ID NO: 23596 - DNA, 23 bp, Artificial Sequence
  Synthetic
aacagctcaccaatcgagaatca

SEQ ID NO: 23597 - DNA, 20 bp, Artificial Sequence
  Synthetic
catgtgcggcaagccttttg

SEQ ID NO: 23598 - DNA, 22 bp, Artificial Sequence
  Synthetic
caagagcacaatggtatccgag

SEQ ID NO: 23599 - DNA, 25 bp, Artificial Sequence
  Synthetic
tggaagaggttcttttatgaatcgt

SEQ ID NO: 23600 - DNA, 22 bp, Artificial Sequence
  Synthetic
tatagggagcgaatgttgctgt

SEQ ID NO: 23601 - DNA, 20 bp, Artificial Sequence
  Synthetic
ttggcgagatagcgttgttc

SEQ ID NO: 23602 - DNA, 20 bp, Artificial Sequence
  Synthetic
ggtgctttgtgccaactctt

SEQ ID NO: 23603 - DNA, 25 bp, Artificial Sequence
  Synthetic
ctaagggaacagaaggcttgataat

SEQ ID NO: 23604 - DNA, 20 bp, Artificial Sequence
  Synthetic
tgctaaaaggtcgcgctaga

SEQ ID NO: 23605 - DNA, 20 bp, Artificial Sequence
  Synthetic
gtggaaattcgggggagtct

SEQ ID NO: 23606 - DNA, 25 bp, Artificial Sequence
  Synthetic
aaggacaatatagccttggagaaac

SEQ ID NO: 23607 - DNA, 25 bp, Artificial Sequence
  Synthetic
tcctggttttcctctcttaatagct

SEQ ID NO: 23608 - DNA, 22 bp, Artificial Sequence
  Synthetic
ccggaagacttattagcagcag

SEQ ID NO: 23609 - DNA, 22 bp, Artificial Sequence
  Synthetic
actagctaagcagttaggcctt

SEQ ID NO: 23610 - DNA, 22 bp, Artificial Sequence
  Synthetic
ttcacactacacaatgtgtcgc

SEQ ID NO: 23611 - DNA, 24 bp, Artificial Sequence
  Synthetic
tgacggatgttgttaaaggttctc

SEQ ID NO: 23612 - DNA, 23 bp, Artificial Sequence
  Synthetic
ttctcagaagaggatgtgcatga

SEQ ID NO: 23613 - DNA, 24 bp, Artificial Sequence
  Synthetic
tcgcagaattgatgatcatatgcc

SEQ ID NO: 23614 - DNA, 25 bp, Artificial Sequence
  Synthetic
atatgctgaggatttagaacaagca

SEQ ID NO: 23615 - DNA, 20 bp, Artificial Sequence
  Synthetic
gtcgcatcgagcaaagcatc

SEQ ID NO: 23616 - DNA, 21 bp, Artificial Sequence
  Synthetic
tagcagggatagaggaagcca

SEQ ID NO: 23617 - DNA, 24 bp, Artificial Sequence
  Synthetic
ctccttctttgacaaagtcagaga

SEQ ID NO: 23618 - DNA, 25 bp, Artificial Sequence
  Synthetic
ggagcatatttagaaacagttccct

SEQ ID NO: 23619 - DNA, 23 bp, Artificial Sequence
  Synthetic
gcgattcagttagcacgtattcc

SEQ ID NO: 23620 - DNA, 20 bp, Artificial Sequence
  Synthetic
tccgaagaaagcttgggtgc

SEQ ID NO: 23621 - DNA, 20 bp, Artificial Sequence
  Synthetic
cgttgcgtgatctcaaggct

SEQ ID NO: 23622 - DNA, 25 bp, Artificial Sequence
  Synthetic
ggaaattttctttccggagaacgag

SEQ ID NO: 23623 - DNA, 23 bp, Artificial Sequence
  Synthetic
gatcccagccatcaatgtgatag

SEQ ID NO: 23624 - DNA, 21 bp, Artificial Sequence
  Synthetic
ctagtcagcgagtgggatgac

SEQ ID NO: 23625 - DNA, 23 bp, Artificial Sequence
  Synthetic
tatgccgcatattttaacgcgta

SEQ ID NO: 23626 - DNA, 24 bp, Artificial Sequence
  Synthetic
tccacagttacagaaatcgatgag

SEQ ID NO: 23627 - DNA, 20 bp, Artificial Sequence
  Synthetic
gcgctatgatggttacagcg

SEQ ID NO: 23628 - DNA, 25 bp, Artificial Sequence
  Synthetic
accagtattttgggtcatatcttgt

SEQ ID NO: 23629 - DNA, 22 bp, Artificial Sequence
  Synthetic
gaaagggggagctatttatgcc

SEQ ID NO: 23630 - DNA, 22 bp, Artificial Sequence
  Synthetic
gcaattcaagcaagtgtggatg

SEQ ID NO: 23631 - DNA, 22 bp, Artificial Sequence
  Synthetic
atacacatttgcagaggagagc

SEQ ID NO: 23632 - DNA, 21 bp, Artificial Sequence
  Synthetic
gcatcgacaccatcaccatct

SEQ ID NO: 23633 - DNA, 24 bp, Artificial Sequence
  Synthetic
tttacgcagttgctgtactactca

SEQ ID NO: 23634 - DNA, 22 bp, Artificial Sequence
  Synthetic
ttgctctgaaacacttctgtcg

SEQ ID NO: 23635 - DNA, 25 bp, Artificial Sequence
  Synthetic
ttgatggaattggacgattctacat

SEQ ID NO: 23636 - DNA, 23 bp, Artificial Sequence
  Synthetic
gccaagccaataatggtgatgat

SEQ ID NO: 23637 - DNA, 22 bp, Artificial Sequence
  Synthetic
ggtgagaatggacggaaaacaa

SEQ ID NO: 23638 - DNA, 21 bp, Artificial Sequence
  Synthetic
aaggaccagaagtggaggaaa

SEQ ID NO: 23639 - DNA, 24 bp, Artificial Sequence
  Synthetic
gggatgtgtttgtcataagggaac

SEQ ID NO: 23640 - DNA, 25 bp, Artificial Sequence
  Synthetic
aacagacactatcaagagttggaga

SEQ ID NO: 23641 - DNA, 22 bp, Artificial Sequence
  Synthetic
cacatgtgtgtgcagggataac

SEQ ID NO: 23642 - DNA, 23 bp, Artificial Sequence
  Synthetic
tgagatgatttgggatccgaacg

SEQ ID NO: 23643 - DNA, 22 bp, Artificial Sequence
  Synthetic
tctacggaaggagtacctgagt

SEQ ID NO: 23644 - DNA, 23 bp, Artificial Sequence
  Synthetic
tggcttcggaggaaatttgtatg

SEQ ID NO: 23645 - DNA, 23 bp, Artificial Sequence
  Synthetic
tgaaggagttaactggagtccac

SEQ ID NO: 23646 - DNA, 24 bp, Artificial Sequence
  Synthetic
aaatccagcattgtacacacaaga

SEQ ID NO: 23647 - DNA, 24 bp, Artificial Sequence
  Synthetic
atcaccttacacagggaattctgg

SEQ ID NO: 23648 - DNA, 23 bp, Artificial Sequence
  Synthetic
actggactatgaagctagatgca

SEQ ID NO: 23649 - DNA, 25 bp, Artificial Sequence
  Synthetic
agagcagaatttttggaatcgatga

SEQ ID NO: 23650 - DNA, 25 bp, Artificial Sequence
  Synthetic
aggagaattgggaataataagagcc

SEQ ID NO: 23651 - DNA, 24 bp, Artificial Sequence
  Synthetic
caatcagatcctttttactgggga

SEQ ID NO: 23652 - DNA, 20 bp, Artificial Sequence
  Synthetic
ccagttgcatgggcctcata

SEQ ID NO: 23653 - DNA, 22 bp, Artificial Sequence
  Synthetic
tcatcctagctccagtgctggt

SEQ ID NO: 23654 - DNA, 22 bp, Artificial Sequence
  Synthetic
catcacaatggcaaaacctcct

SEQ ID NO: 23655 - DNA, 21 bp, Artificial Sequence
  Synthetic
cctgcattgtgacgaagactt

SEQ ID NO: 23656 - DNA, 24 bp, Artificial Sequence
  Synthetic
tttgacaaagacacagactcagat

SEQ ID NO: 23657 - DNA, 20 bp, Artificial Sequence
  Synthetic
aagaggcgactgttcgagga

SEQ ID NO: 23658 - DNA, 23 bp, Artificial Sequence
  Synthetic
atacccatggagaatacccagag

SEQ ID NO: 23659 - DNA, 25 bp, Artificial Sequence
  Synthetic
cactgcaagacaagttaatgacaat

SEQ ID NO: 23660 - DNA, 23 bp, Artificial Sequence
  Synthetic
agtgaaactggagaatgggaagt

SEQ ID NO: 23661 - DNA, 20 bp, Artificial Sequence
  Synthetic
gacgaccgaaagcgtcaccg

SEQ ID NO: 23662 - DNA, 20 bp, Artificial Sequence
  Synthetic
cctccagaggccgtagaggg

SEQ ID NO: 23663 - DNA, 23 bp, Artificial Sequence
  Synthetic
gcaggtagcaacgatagaatagg

SEQ ID NO: 23664 - DNA, 23 bp, Artificial Sequence
  Synthetic
tgaggctataggaccaagtgaac

SEQ ID NO: 23665 - DNA, 24 bp, Artificial Sequence
  Synthetic
caaacgagctactataaggaccag

SEQ ID NO: 23666 - DNA, 23 bp, Artificial Sequence
  Synthetic
ttttgcagatgtcctattggctt

SEQ ID NO: 23667 - DNA, 25 bp, Artificial Sequence
  Synthetic
atcagtttagagcttttcgactgaa

SEQ ID NO: 23668 - DNA, 22 bp, Artificial Sequence
  Synthetic
taggtgaacattgggacacagc

SEQ ID NO: 23669 - DNA, 25 bp, Artificial Sequence
  Synthetic
acgacgagaacaatgttatgttagg

SEQ ID NO: 23670 - DNA, 23 bp, Artificial Sequence
  Synthetic
attggttacaaagagcacaaggc

SEQ ID NO: 23671 - DNA, 21 bp, Artificial Sequence
  Synthetic
gttaacagctttcagccaggg

SEQ ID NO: 23672 - DNA, 25 bp, Artificial Sequence
  Synthetic
tgaatgcaagtccatatgatttgga

SEQ ID NO: 23673 - DNA, 24 bp, Artificial Sequence
  Synthetic
ttgttccatgggttatgtacttgc

SEQ ID NO: 23674 - DNA, 24 bp, Artificial Sequence
  Synthetic
gagtgctgctactatacgtagtgt

SEQ ID NO: 23675 - DNA, 25 bp, Artificial Sequence
  Synthetic
tggtaacatgatagatggttttgct

SEQ ID NO: 23676 - DNA, 20 bp, Artificial Sequence
  Synthetic
acgggagttgctaggtgttt

SEQ ID NO: 23677 - DNA, 25 bp, Artificial Sequence
  Synthetic
acgtagaagaatttgtctttcaggc

SEQ ID NO: 23678 - DNA, 24 bp, Artificial Sequence
  Synthetic
tgacaaatattaccctgttgtggt

SEQ ID NO: 23679 - DNA, 23 bp, Artificial Sequence
  Synthetic
ttaactgtcacaagtgctggaca

SEQ ID NO: 23680 - DNA, 25 bp, Artificial Sequence
  Synthetic
acctgctaatattgtacttccacaa

SEQ ID NO: 23681 - DNA, 24 bp, Artificial Sequence
  Synthetic
aaactgtgcttaatgttgttggac

SEQ ID NO: 23682 - DNA, 24 bp, Artificial Sequence
  Synthetic
atcaatgacgttgcatttgtttcg

SEQ ID NO: 23683 - DNA, 24 bp, Artificial Sequence
  Synthetic
aggaaatgtgttttgtgatggagt

SEQ ID NO: 23684 - DNA, 23 bp, Artificial Sequence
  Synthetic
aaaattgttcaatggcaagaggc

SEQ ID NO: 23685 - DNA, 25 bp, Artificial Sequence
  Synthetic
ttgagtcgtgaagatcttgagattg

SEQ ID NO: 23686 - DNA, 25 bp, Artificial Sequence
  Synthetic
ttaaattgataggacacaccgtctg

SEQ ID NO: 23687 - DNA, 20 bp, Artificial Sequence
  Synthetic
ggtgacagctcagagagtgg

SEQ ID NO: 23688 - DNA, 25 bp, Artificial Sequence
  Synthetic
tggctttagctaatatgttaccagc

SEQ ID NO: 23689 - DNA, 23 bp, Artificial Sequence
  Synthetic
ctaaggaattgaaacggcccatt

SEQ ID NO: 23690 - DNA, 25 bp, Artificial Sequence
  Synthetic
aactggtttgaaactgaagcttact

SEQ ID NO: 23691 - DNA, 25 bp, Artificial Sequence
  Synthetic
tgtgttgcactttattacacatgca

SEQ ID NO: 23692 - DNA, 23 bp, Artificial Sequence
  Synthetic
actcgttctatgtcgtattgcag

SEQ ID NO: 23693 - DNA, 22 bp, Artificial Sequence
  Synthetic
aagcttaaacgtgcttttggtg

SEQ ID NO: 23694 - DNA, 20 bp, Artificial Sequence
  Synthetic
gcctactgcttccgtctcaa

SEQ ID NO: 23695 - DNA, 25 bp, Artificial Sequence
  Synthetic
gatcttgtggatctgttggttatgt

SEQ ID NO: 23696 - DNA, 25 bp, Artificial Sequence
  Synthetic
agatgctttagcttctatgactggt

SEQ ID NO: 23697 - DNA, 25 bp, Artificial Sequence
  Synthetic
tgtgtacaagcatacatttagaggc

SEQ ID NO: 23698 - DNA, 23 bp, Artificial Sequence
  Synthetic
gcaaaggttattgctaagtgggt

SEQ ID NO: 23699 - DNA, 25 bp, Artificial Sequence
  Synthetic
tgactgatgtcaaatgtgctaatgt

SEQ ID NO: 23700 - DNA, 25 bp, Artificial Sequence
  Synthetic
tgctaagaaaaatcttgatgaggcg

SEQ ID NO: 23701 - DNA, 25 bp, Artificial Sequence
  Synthetic
gtatggcagattcaaactatccagg

SEQ ID NO: 23702 - DNA, 24 bp, Artificial Sequence
  Synthetic
gaactgctactgaatatgcttcca

SEQ ID NO: 23703 - DNA, 21 bp, Artificial Sequence
  Synthetic
cggcaagtttgtacaagtgcc

SEQ ID NO: 23704 - DNA, 25 bp, Artificial Sequence
  Synthetic
tcagttctttgttgttaagaggaca

SEQ ID NO: 23705 - DNA, 25 bp, Artificial Sequence
  Synthetic
ttttggtgactatgttattgcagcc

SEQ ID NO: 23706 - DNA, 22 bp, Artificial Sequence
  Synthetic
atccagctttgcatgtagcttc

SEQ ID NO: 23707 - DNA, 25 bp, Artificial Sequence
  Synthetic
ttggaaaagccaggctctattatga

SEQ ID NO: 23708 - DNA, 21 bp, Artificial Sequence
  Synthetic
ctgggatgatatgttacgccg

SEQ ID NO: 23709 - DNA, 25 bp, Artificial Sequence
  Synthetic
gttgattcaacctttgtcacagaat

SEQ ID NO: 23710 - DNA, 21 bp, Artificial Sequence
  Synthetic
agatggatggtgacgatgtct

SEQ ID NO: 23711 - DNA, 22 bp, Artificial Sequence
  Synthetic
ttatgcagagtgttggagcttg

SEQ ID NO: 23712 - DNA, 24 bp, Artificial Sequence
  Synthetic
cttgaaattgtttgctgcagaaac

SEQ ID NO: 23713 - DNA, 25 bp, Artificial Sequence
  Synthetic
acacattggtatgaaacgttactgc

SEQ ID NO: 23714 - DNA, 25 bp, Artificial Sequence
  Synthetic
accataaatgcattacctgagatgg

SEQ ID NO: 23715 - DNA, 21 bp, Artificial Sequence
  Synthetic
caaaccgtggattctgctcaa

SEQ ID NO: 23716 - DNA, 20 bp, Artificial Sequence
  Synthetic
atcacccagctcatgctcct

SEQ ID NO: 23717 - DNA, 21 bp, Artificial Sequence
  Synthetic
gaagccactggtttgtttgct

SEQ ID NO: 23718 - DNA, 25 bp, Artificial Sequence
  Synthetic
taaacgtgccacagtttacaattct

SEQ ID NO: 23719 - DNA, 25 bp, Artificial Sequence
  Synthetic
tttgaggcacataaggactctttta

SEQ ID NO: 23720 - DNA, 21 bp, Artificial Sequence
  Synthetic
gcatggatgctaagcaggttg

SEQ ID NO: 23721 - DNA, 24 bp, Artificial Sequence
  Synthetic
acaacataccctactaatgtggcc

SEQ ID NO: 23722 - DNA, 25 bp, Artificial Sequence
  Synthetic
agagtctttcgatgataagaggtcc

SEQ ID NO: 23723 - DNA, 25 bp, Artificial Sequence
  Synthetic
tgcatttgttaataggcttgtaccg

SEQ ID NO: 23724 - DNA, 25 bp, Artificial Sequence
  Synthetic
ttctccaatggaaagagttagtctc

SEQ ID NO: 23725 - DNA, 24 bp, Artificial Sequence
  Synthetic
aatggggtattttgcattttggac

SEQ ID NO: 23726 - DNA, 22 bp, Artificial Sequence
  Synthetic
ctggacatacagcctgaagact

SEQ ID NO: 23727 - DNA, 25 bp, Artificial Sequence
  Synthetic
ccggctagacttgaaatagttaagc

SEQ ID NO: 23728 - DNA, 22 bp, Artificial Sequence
  Synthetic
tcatgcctttaaatgcaaccgt

SEQ ID NO: 23729 - DNA, 24 bp, Artificial Sequence
  Synthetic
gtaaggattttacgcctgtacagg

SEQ ID NO: 23730 - DNA, 24 bp, Artificial Sequence
  Synthetic
acaaggtcttttagaggtctctgt

SEQ ID NO: 23731 - DNA, 25 bp, Artificial Sequence
  Synthetic
attgggttacacctctcacttctag

SEQ ID NO: 23732 - DNA, 25 bp, Artificial Sequence
  Synthetic
tgagcagcctgatgtcttttattca

SEQ ID NO: 23733 - DNA, 24 bp, Artificial Sequence
  Synthetic
cctgcaggtgttcttactaatcat

SEQ ID NO: 23734 - DNA, 25 bp, Artificial Sequence
  Synthetic
aagtgattattgtggaggcaattct

SEQ ID NO: 23735 - DNA, 22 bp, Artificial Sequence
  Synthetic
ccgaaccagcattgctatttcg

SEQ ID NO: 23736 - DNA, 23 bp, Artificial Sequence
  Synthetic
tgtggtgattatgcagcatgtaa

SEQ ID NO: 23737 - DNA, 20 bp, Artificial Sequence
  Synthetic
gcatcaaagtgttgcctcca

SEQ ID NO: 23738 - DNA, 25 bp, Artificial Sequence
  Synthetic
tgcttatgtttctcaacagcttagt

SEQ ID NO: 23739 - DNA, 25 bp, Artificial Sequence
  Synthetic
gtagtggttactactaccctgaacc

SEQ ID NO: 23740 - DNA, 25 bp, Artificial Sequence
  Synthetic
gtaaaatggccttggtatgtatggc

SEQ ID NO: 23741 - DNA, 22 bp, Artificial Sequence
  Synthetic
agagttcctagtcatgcttggt

SEQ ID NO: 23742 - DNA, 24 bp, Artificial Sequence
  Synthetic
ttgaggactatcatactctgacgg

SEQ ID NO: 23743 - DNA, 22 bp, Artificial Sequence
  Synthetic
aatccagtagtagagcgtcctc

SEQ ID NO: 23744 - DNA, 22 bp, Artificial Sequence
  Synthetic
ccaggctgatgtcaataccccg

SEQ ID NO: 23745 - DNA, 24 bp, Artificial Sequence
  Synthetic
ttgctagtcttgttctggcaaaac

SEQ ID NO: 23746 - DNA, 25 bp, Artificial Sequence
  Synthetic
tgacagtacactttcaggttttgag

SEQ ID NO: 23747 - DNA, 23 bp, Artificial Sequence
  Synthetic
gcagaaaagtcgagataaggcac

SEQ ID NO: 23748 - DNA, 22 bp, Artificial Sequence
  Synthetic
ggaaggacctctttgcatcaga

SEQ ID NO: 23749 - DNA, 24 bp, Artificial Sequence
  Synthetic
ctacagagattcgcttggagaagc

SEQ ID NO: 23750 - DNA, 21 bp, Artificial Sequence
  Synthetic
ggcttcgccgagatcagaagt

SEQ ID NO: 23751 - DNA, 20 bp, Artificial Sequence
  Synthetic
gaaagtgacagggccccttt

SEQ ID NO: 23752 - DNA, 23 bp, Artificial Sequence
  Synthetic
aacacagttcgagtctctgaaac

SEQ ID NO: 23753 - DNA, 22 bp, Artificial Sequence
  Synthetic
ccctcccgggagagccatagtg

SEQ ID NO: 23754 - DNA, 21 bp, Artificial Sequence
  Synthetic
tggagtatacgtgttgccgcg

SEQ ID NO: 23755 - DNA, 19 bp, Artificial Sequence
  Synthetic
gctcgtcggcgctcctgta

SEQ ID NO: 23756 - DNA, 22 bp, Artificial Sequence
  Synthetic
acacctacagtggcagtcaggt

SEQ ID NO: 23757 - DNA, 21 bp, Artificial Sequence
  Synthetic
gcatgtcctgcgtttacccca

SEQ ID NO: 23758 - DNA, 20 bp, Artificial Sequence
  Synthetic
tactgctggcactacgcacc

SEQ ID NO: 23759 - DNA, 21 bp, Artificial Sequence
  Synthetic
ctcccagtggtcggtggtttg

SEQ ID NO: 23760 - DNA, 21 bp, Artificial Sequence
  Synthetic
tgaccgcagtgagcaacatcc

SEQ ID NO: 23761 - DNA, 20 bp, Artificial Sequence
  Synthetic
cgctgctgctgggacacatg

SEQ ID NO: 23762 - DNA, 20 bp, Artificial Sequence
  Synthetic
aggtcatcacctggggtgcg

SEQ ID NO: 23763 - DNA, 22 bp, Artificial Sequence
  Synthetic
atggagcaggttcgagaacgct

SEQ ID NO: 23764 - DNA, 22 bp, Artificial Sequence
  Synthetic
tgttgcggggatctttagggct

SEQ ID NO: 23765 - DNA, 21 bp, Artificial Sequence
  Synthetic
gggaaccgcaccgttacaact

SEQ ID NO: 23766 - DNA, 22 bp, Artificial Sequence
  Synthetic
acgtaccgatatgtcgcctccg

SEQ ID NO: 23767 - DNA, 20 bp, Artificial Sequence
  Synthetic
gcaggctcctcccccaagtt

SEQ ID NO: 23768 - DNA, 22 bp, Artificial Sequence
  Synthetic
atggaggagtgctcacaagctg

SEQ ID NO: 23769 - DNA, 19 bp, Artificial Sequence
  Synthetic
tactcggggggtgggttgc

SEQ ID NO: 23770 - DNA, 20 bp, Artificial Sequence
  Synthetic
cgtaggacctggggagggag

SEQ ID NO: 23771 - DNA, 22 bp, Artificial Sequence
  Synthetic
aaagggatacaagggcgtgtgg

SEQ ID NO: 23772 - DNA, 20 bp, Artificial Sequence
  Synthetic
tgccggctgctgagttcttt

SEQ ID NO: 23773 - DNA, 21 bp, Artificial Sequence
  Synthetic
cagacgctgagctagtggacg

SEQ ID NO: 23774 - DNA, 22 bp, Artificial Sequence
  Synthetic
tcagctggacggctctaatgtg

SEQ ID NO: 23775 - DNA, 22 bp, Artificial Sequence
  Synthetic
aagagaaactgcccatcagccc

SEQ ID NO: 23776 - DNA, 22 bp, Artificial Sequence
  Synthetic
ttccaaccaccatcatggcgaa

SEQ ID NO: 23777 - DNA, 21 bp, Artificial Sequence
  Synthetic
ctccctcacggagcggcttta

SEQ ID NO: 23778 - DNA, 21 bp, Artificial Sequence
  Synthetic
tagagcagccctgagagcctt

SEQ ID NO: 23779 - DNA, 25 bp, Artificial Sequence
  Synthetic
tcaagaagtacacatcaggaagaca

SEQ ID NO: 23780 - DNA, 23 bp, Artificial Sequence
  Synthetic
agtcgaaaggctaaagcatggaa

SEQ ID NO: 23781 - DNA, 25 bp, Artificial Sequence
  Synthetic
agagaagaaagaagaactccaggat

SEQ ID NO: 23782 - DNA, 25 bp, Artificial Sequence
  Synthetic
tagcatctttattggagatgtgcca

SEQ ID NO: 23783 - DNA, 23 bp, Artificial Sequence
  Synthetic
tgaagagttcacaatggttggga

SEQ ID NO: 23784 - DNA, 24 bp, Artificial Sequence
  Synthetic
aaagtgctttttcaaaattgggga

SEQ ID NO: 23785 - DNA, 22 bp, Artificial Sequence
  Synthetic
acacagggaacagagaaactga

SEQ ID NO: 23786 - DNA, 24 bp, Artificial Sequence
  Synthetic
gatgtgcttgggacatttgatacc

SEQ ID NO: 23787 - DNA, 22 bp, Artificial Sequence
  Synthetic
agacaggagatatgggccagca

SEQ ID NO: 23788 - DNA, 20 bp, Artificial Sequence
  Synthetic
ctgccgacgccttaccgatt

SEQ ID NO: 23789 - DNA, 20 bp, Artificial Sequence
  Synthetic
gcccccttgtgtcatcggag

SEQ ID NO: 23790 - DNA, 20 bp, Artificial Sequence
  Synthetic
gcccattgctgctgtccacc

SEQ ID NO: 23791 - DNA, 22 bp, Artificial Sequence
  Synthetic
atctgaagggtaggtgggtgcc

SEQ ID NO: 23792 - DNA, 21 bp, Artificial Sequence
  Synthetic
aaagtcccctacttcgtgcgc

SEQ ID NO: 23793 - DNA, 18 bp, Artificial Sequence
  Synthetic
ccgcgtgcggtgacatca

SEQ ID NO: 23794 - DNA, 19 bp, Artificial Sequence
  Synthetic
agaccttgtgggctggccc

SEQ ID NO: 23795 - DNA, 22 bp, Artificial Sequence
  Synthetic
tcacggacaactcctctccacc

SEQ ID NO: 23796 - DNA, 22 bp, Artificial Sequence
  Synthetic
tttgtgacgagtgccactccac

SEQ ID NO: 23797 - DNA, 20 bp, Artificial Sequence
  Synthetic
accgcggtcttgacgtgtct

SEQ ID NO: 23798 - DNA, 20 bp, Artificial Sequence
  Synthetic
gagtgctatgacgcgggctg

SEQ ID NO: 23799 - DNA, 20 bp, Artificial Sequence
  Synthetic
acctggaggtcgtcacgagc

SEQ ID NO: 23800 - DNA, 22 bp, Artificial Sequence
  Synthetic
accaactggcagaaactcgagg

SEQ ID NO: 23801 - DNA, 22 bp, Artificial Sequence
  Synthetic
agatcatgagcggtgaggtccc

SEQ ID NO: 23802 - DNA, 22 bp, Artificial Sequence
  Synthetic
ctcagcagcctcactgtaaccc

SEQ ID NO: 23803 - DNA, 21 bp, Artificial Sequence
  Synthetic
gggacgttccccattaacgcc

SEQ ID NO: 23804 - DNA, 19 bp, Artificial Sequence
  Synthetic
cgagcccgaaccggacgta

SEQ ID NO: 23805 - DNA, 20 bp, Artificial Sequence
  Synthetic
ccggactacaaccccccgct

SEQ ID NO: 23806 - DNA, 19 bp, Artificial Sequence
  Synthetic
tcttccatgccccccctgg

SEQ ID NO: 23807 - DNA, 20 bp, Artificial Sequence
  Synthetic
ctgacgcccccacattcagc

SEQ ID NO: 23808 - DNA, 22 bp, Artificial Sequence
  Synthetic
acgacgtggttagcaagctccc

SEQ ID NO: 23809 - DNA, 22 bp, Artificial Sequence
  Synthetic
tcacttgctacatcaaggcccg

SEQ ID NO: 23810 - DNA, 22 bp, Artificial Sequence
  Synthetic
ccagtcaattcctggctaggca

SEQ ID NO: 23811 - DNA, 20 bp, Artificial Sequence
  Synthetic
gtccgcgctaggcttctgtc

SEQ ID NO: 23812 - DNA, 25 bp, Artificial Sequence
  Synthetic
acccagaaacatattgcttttgtgt

SEQ ID NO: 23813 - DNA, 20 bp, Artificial Sequence
  Synthetic
tgtgtcacaaaccgctggta

SEQ ID NO: 23814 - DNA, 21 bp, Artificial Sequence
  Synthetic
gcacaacaagcgtatagggtg

SEQ ID NO: 23815 - DNA, 22 bp, Artificial Sequence
  Synthetic
gacagtcagcaaaggccaaacg

SEQ ID NO: 23816 - DNA, 22 bp, Artificial Sequence
  Synthetic
gggaatgacagtgcttatgctg

SEQ ID NO: 23817 - DNA, 20 bp, Artificial Sequence
  Synthetic
tggggggggctgttatatcc

SEQ ID NO: 23818 - DNA, 23 bp, Artificial Sequence
  Synthetic
tatgggcacgtttaagccttacc

SEQ ID NO: 23819 - DNA, 23 bp, Artificial Sequence
  Synthetic
atgtgaatttcaaggatgacgct

SEQ ID NO: 23820 - DNA, 19 bp, Artificial Sequence
  Synthetic
ttccacccagaaggccgcg

SEQ ID NO: 23821 - DNA, 20 bp, Artificial Sequence
  Synthetic
gctgacgtgctatctggcat

SEQ ID NO: 23822 - DNA, 22 bp, Artificial Sequence
  Synthetic
tggcagatcgcattttgcagtg

SEQ ID NO: 23823 - DNA, 20 bp, Artificial Sequence
  Synthetic
ccccagctgtgttggacatc

SEQ ID NO: 23824 - DNA, 20 bp, Artificial Sequence
  Synthetic
tacttgctccagctgcctct

SEQ ID NO: 23825 - DNA, 20 bp, Artificial Sequence
  Synthetic
cgactatgtgacacgcacca

SEQ ID NO: 23826 - DNA, 23 bp, Artificial Sequence
  Synthetic
atccagattatttgggaatggcc

SEQ ID NO: 23827 - DNA, 23 bp, Artificial Sequence
  Synthetic
attggaggattggaactttgggt

SEQ ID NO: 23828 - DNA, 24 bp, Artificial Sequence
  Synthetic
gtaaggttgttctaggtcaggaga

SEQ ID NO: 23829 - DNA, 21 bp, Artificial Sequence
  Synthetic
tgtgcgacacaagctgcaata

SEQ ID NO: 23830 - DNA, 21 bp, Artificial Sequence
  Synthetic
gaatcggagcagggaaattcc

SEQ ID NO: 23831 - DNA, 25 bp, Artificial Sequence
  Synthetic
tatcaggattcacatgaacagtggc

SEQ ID NO: 23832 - DNA, 20 bp, Artificial Sequence
  Synthetic
accgcaaatcgcagctggag

SEQ ID NO: 23833 - DNA, 22 bp, Artificial Sequence
  Synthetic
agacttcaagaggaggctcggg

SEQ ID NO: 23834 - DNA, 23 bp, Artificial Sequence
  Synthetic
ctccatctattacacgccctttg

SEQ ID NO: 23835 - DNA, 21 bp, Artificial Sequence
  Synthetic
acatcattaggtggtggggag

SEQ ID NO: 23836 - DNA, 22 bp, Artificial Sequence
  Synthetic
catcagtttgcagtttcagcag

SEQ ID NO: 23837 - DNA, 24 bp, Artificial Sequence
  Synthetic
atcacctacttacccttacacacc

SEQ ID NO: 23838 - DNA, 23 bp, Artificial Sequence
  Synthetic
ttatgctggatctgaaaggcttc

SEQ ID NO: 23839 - DNA, 25 bp, Artificial Sequence
  Synthetic
acagaaaatcctaacacgtatcctg

SEQ ID NO: 23840 - DNA, 22 bp, Artificial Sequence
  Synthetic
gtgatgtaggatttggagctgc

SEQ ID NO: 23841 - DNA, 25 bp, Artificial Sequence
  Synthetic
acaaacctcaaaacaatttaggacc

SEQ ID NO: 23842 - DNA, 23 bp, Artificial Sequence
  Synthetic
gaggcaaacttagaaaccgtttc

SEQ ID NO: 23843 - DNA, 21 bp, Artificial Sequence
  Synthetic
aagaatgaagtgggccatgtg

SEQ ID NO: 23844 - DNA, 25 bp, Artificial Sequence
  Synthetic
tcagaaagatgagacttgacaatgc

SEQ ID NO: 23845 - DNA, 23 bp, Artificial Sequence
  Synthetic
aactcccattgtactggcataca

SEQ ID NO: 23846 - DNA, 25 bp, Artificial Sequence
  Synthetic
agctgtagagattgcaaataagact

SEQ ID NO: 23847 - DNA, 22 bp, Artificial Sequence
  Synthetic
ttcagccaaaaaggaggacatg

SEQ ID NO: 23848 - DNA, 25 bp, Artificial Sequence
  Synthetic
tgaggaatcacctaaagcaagtgag

SEQ ID NO: 23849 - DNA, 22 bp, Artificial Sequence
  Synthetic
ccaagatgtgggaaatgggaac

SEQ ID NO: 23850 - DNA, 24 bp, Artificial Sequence
  Synthetic
aattgttgcctttctgtttttcgc

SEQ ID NO: 23851 - DNA, 25 bp, Artificial Sequence
  Synthetic
tgaggaacttgaaagactaaaaccg

SEQ ID NO: 23852 - DNA, 25 bp, Artificial Sequence
  Synthetic
actttccacacttttcatctctctg

SEQ ID NO: 23853 - DNA, 22 bp, Artificial Sequence
  Synthetic
tcttggacaagaatggcatgtg

SEQ ID NO: 23854 - DNA, 25 bp, Artificial Sequence
  Synthetic
ctagcgaagttaaagcccaatcatc

SEQ ID NO: 23855 - DNA, 23 bp, Artificial Sequence
  Synthetic
attgacttgtttgttaagcgtcg

SEQ ID NO: 23856 - DNA, 24 bp, Artificial Sequence
  Synthetic
tttgtcttttagatcaggcttggc

SEQ ID NO: 23857 - DNA, 24 bp, Artificial Sequence
  Synthetic
ttaatcctgctaatgggcatatgc

SEQ ID NO: 23858 - DNA, 20 bp, Artificial Sequence
  Synthetic
cagtggcaggaagcatggta

SEQ ID NO: 23859 - DNA, 25 bp, Artificial Sequence
  Synthetic
ctcctctgagtaaggatttacctga

SEQ ID NO: 23860 - DNA, 25 bp, Artificial Sequence
  Synthetic
tgttgagtacaaagtaacagtctgg

SEQ ID NO: 23861 - DNA, 25 bp, Artificial Sequence
  Synthetic
acgaaattgtagtgttcgtgttaag

SEQ ID NO: 23862 - DNA, 21 bp, Artificial Sequence
  Synthetic
cagtagctgctggtttggaat

SEQ ID NO: 23863 - DNA, 25 bp, Artificial Sequence
  Synthetic
atacatctttggttccacatacacg

SEQ ID NO: 23864 - DNA, 25 bp, Artificial Sequence
  Synthetic
tggtaatgttaaacctggtgaaact

SEQ ID NO: 23865 - DNA, 25 bp, Artificial Sequence
  Synthetic
attgtgcttggtttgtacaaaatga

SEQ ID NO: 23866 - DNA, 25 bp, Artificial Sequence
  Synthetic
agaggctcggattaatgataagaag

SEQ ID NO: 23867 - DNA, 24 bp, Artificial Sequence
  Synthetic
ctcagtttgtatttattgccgtgc

SEQ ID NO: 23868 - DNA, 25 bp, Artificial Sequence
  Synthetic
tttggtgattttatacaaacagccc

SEQ ID NO: 23869 - DNA, 21 bp, Artificial Sequence
  Synthetic
cagatcctgctatgcacgttg

SEQ ID NO: 23870 - DNA, 25 bp, Artificial Sequence
  Synthetic
tgctatcagtgctaagaatagagct

SEQ ID NO: 23871 - DNA, 25 bp, Artificial Sequence
  Synthetic
acatgaattttgttgttcacatggt

SEQ ID NO: 23872 - DNA, 25 bp, Artificial Sequence
  Synthetic
aagtctagctatagatgcttaccct

SEQ ID NO: 23873 - DNA, 25 bp, Artificial Sequence
  Synthetic
tgaacgtttaaagttatttgctgca

SEQ ID NO: 23874 - DNA, 25 bp, Artificial Sequence
  Synthetic
atgttgctaattatcagcacattgg

SEQ ID NO: 23875 - DNA, 25 bp, Artificial Sequence
  Synthetic
ctttccactgcaaataggtttttca

SEQ ID NO: 23876 - DNA, 22 bp, Artificial Sequence
  Synthetic
tgatgcttttcctgtagccaag

SEQ ID NO: 23877 - DNA, 23 bp, Artificial Sequence
  Synthetic
atcacacggtgtaatctaggtgg

SEQ ID NO: 23878 - DNA, 23 bp, Artificial Sequence
  Synthetic
ctcaaagttgagttttggttcgc

SEQ ID NO: 23879 - DNA, 24 bp, Artificial Sequence
  Synthetic
ttttacatttaggtgcagggtctg

SEQ ID NO: 23880 - DNA, 25 bp, Artificial Sequence
  Synthetic
atcgttcttgtgagagtactactgt

SEQ ID NO: 23881 - DNA, 25 bp, Artificial Sequence
  Synthetic
tcgtaaacgtagaagtatttctgct

SEQ ID NO: 23882 - DNA, 24 bp, Artificial Sequence
  Synthetic
aaatgcttatgtctctcaacagct

SEQ ID NO: 23883 - DNA, 21 bp, Artificial Sequence
  Synthetic
tacagggtgtcaaacttggca

SEQ ID NO: 23884 - DNA, 23 bp, Artificial Sequence
  Synthetic
atctgagcgaaattaccaaacct

SEQ ID NO: 23885 - DNA, 25 bp, Artificial Sequence
  Synthetic
tcaacagtgttttggtaaaagagga

SEQ ID NO: 23886 - DNA, 24 bp, Artificial Sequence
  Synthetic
ctggtactcagcacatttcaaatg

SEQ ID NO: 23887 - DNA, 20 bp, Artificial Sequence
  Synthetic
tgcagcaatatgcacccact

SEQ ID NO: 23888 - DNA, 24 bp, Artificial Sequence
  Synthetic
cgaaagaggcgaagaaacaattga

SEQ ID NO: 23889 - DNA, 24 bp, Artificial Sequence
  Synthetic
cctaatggacctccttgttatcag

SEQ ID NO: 23890 - DNA, 23 bp, Artificial Sequence
  Synthetic
aaaacgagtcaactaaagtgggc

SEQ ID NO: 23891 - DNA, 25 bp, Artificial Sequence
  Synthetic
gaattatttcacagcagaggtgtcc

SEQ ID NO: 23892 - DNA, 25 bp, Artificial Sequence
  Synthetic
aaatgggagaaatactgtgtccttg

SEQ ID NO: 23893 - DNA, 20 bp, Artificial Sequence
  Synthetic
ccccaagggagtggaagaag

SEQ ID NO: 23894 - DNA, 25 bp, Artificial Sequence
  Synthetic
aattgggaggttttacgtacagatg

SEQ ID NO: 23895 - DNA, 21 bp, Artificial Sequence
  Synthetic
ggcgataatggacgaagaaca

SEQ ID NO: 23896 - DNA, 21 bp, Artificial Sequence
  Synthetic
tcctgagaggatccgtagccc

SEQ ID NO: 23897 - DNA, 25 bp, Artificial Sequence
  Synthetic
aagaggacaactatccactagagga

SEQ ID NO: 23898 - DNA, 25 bp, Artificial Sequence
  Synthetic
aagctttcagcatctattactgaca

SEQ ID NO: 23899 - DNA, 22 bp, Artificial Sequence
  Synthetic
aagagacggagagagaccgagg

SEQ ID NO: 23900 - DNA, 24 bp, Artificial Sequence
  Synthetic
aaatgttggaggtggagatgtaaa

SEQ ID NO: 23901 - DNA, 23 bp, Artificial Sequence
  Synthetic
cggaggacttatatagggcttgt

SEQ ID NO: 23902 - DNA, 25 bp, Artificial Sequence
  Synthetic
acacctgttaaaccaaatacagctg

SEQ ID NO: 23903 - DNA, 21 bp, Artificial Sequence
  Synthetic
tgcagcctatacctgaaaggc

SEQ ID NO: 23904 - DNA, 23 bp, Artificial Sequence
  Synthetic
cactttagttagagccagggaac

SEQ ID NO: 23905 - DNA, 20 bp, Artificial Sequence
  Synthetic
ggtggttcgagtgagcagat

SEQ ID NO: 23906 - DNA, 25 bp, Artificial Sequence
  Synthetic
tacaggtgaatattgggatgtagca

SEQ ID NO: 23907 - DNA, 21 bp, Artificial Sequence
  Synthetic
ctttcatggaagacgggagca

SEQ ID NO: 23908 - DNA, 20 bp, Artificial Sequence
  Synthetic
gtacctccccctcagactgc

SEQ ID NO: 23909 - DNA, 21 bp, Artificial Sequence
  Synthetic
tcgcactgtttatgcagagca

SEQ ID NO: 23910 - DNA, 23 bp, Artificial Sequence
  Synthetic
ttttggtaagtgacaaatgcccg

SEQ ID NO: 23911 - DNA, 24 bp, Artificial Sequence
  Synthetic
attcggatttccatttcatcgacg

SEQ ID NO: 23912 - DNA, 24 bp, Artificial Sequence
  Synthetic
tcattgaaattggagtaacacgga

SEQ ID NO: 23913 - DNA, 23 bp, Artificial Sequence
  Synthetic
aagaggcgaagagacaattgaag

SEQ ID NO: 23914 - DNA, 25 bp, Artificial Sequence
  Synthetic
agactttgatgactgcaaagatgtt

SEQ ID NO: 23915 - DNA, 25 bp, Artificial Sequence
  Synthetic
gggctactgaatacataatgaaggg

SEQ ID NO: 23916 - DNA, 25 bp, Artificial Sequence
  Synthetic
tgtgttcttgaaataggagacatgc

SEQ ID NO: 23917 - DNA, 20 bp, Artificial Sequence
  Synthetic
gggagtggaggaaggctcta

SEQ ID NO: 23918 - DNA, 21 bp, Artificial Sequence
  Synthetic
gtgatgccccctttgatgaca

SEQ ID NO: 23919 - DNA, 25 bp, Artificial Sequence
  Synthetic
cagaaaataactggaggccttatgg

SEQ ID NO: 23920 - DNA, 20 bp, Artificial Sequence
  Synthetic
acagagattcgcttggggaa

SEQ ID NO: 23921 - DNA, 23 bp, Artificial Sequence
  Synthetic
agggacaacatgaccaagaaaat

SEQ ID NO: 23922 - DNA, 21 bp, Artificial Sequence
  Synthetic
ccgttggagggaatgagaaga

SEQ ID NO: 23923 - DNA, 23 bp, Artificial Sequence
  Synthetic
tccaatcctctgatgatttcgct

SEQ ID NO: 23924 - DNA, 20 bp, Artificial Sequence
  Synthetic
aacaacgaccttggaccagc

SEQ ID NO: 23925 - DNA, 23 bp, Artificial Sequence
  Synthetic
tcttccctagcagttcatatcgg

SEQ ID NO: 23926 - DNA, 20 bp, Artificial Sequence
  Synthetic
ccagctacccgaccctacaa

SEQ ID NO: 23927 - DNA, 25 bp, Artificial Sequence
  Synthetic
tggaaccatataatgaagtgcaaga

SEQ ID NO: 23928 - DNA, 25 bp, Artificial Sequence
  Synthetic
acatgccttaaaacgaaagtatgga

SEQ ID NO: 23929 - DNA, 24 bp, Artificial Sequence
  Synthetic
tgacagtgtatttgacctgtcaga

SEQ ID NO: 23930 - DNA, 23 bp, Artificial Sequence
  Synthetic
gacgtggtccagattagatttgc

SEQ ID NO: 23931 - DNA, 23 bp, Artificial Sequence
  Synthetic
aaaagcaaagcacatgaagcaat

SEQ ID NO: 23932 - DNA, 22 bp, Artificial Sequence
  Synthetic
agagaattacaacaccccacca

SEQ ID NO: 23933 - DNA, 25 bp, Artificial Sequence
  Synthetic
ggccttcagatccatctattgttac

SEQ ID NO: 23934 - DNA, 23 bp, Artificial Sequence
  Synthetic
cacatggatacgaggaaattcca

SEQ ID NO: 23935 - DNA, 21 bp, Artificial Sequence
  Synthetic
tgccttaacatccagacgtgg

SEQ ID NO: 23936 - DNA, 25 bp, Artificial Sequence
  Synthetic
tcctgaaacacaacgtttagtatgg

SEQ ID NO: 23937 - DNA, 23 bp, Artificial Sequence
  Synthetic
attggttgtgttcctgctattgg

SEQ ID NO: 23938 - DNA, 24 bp, Artificial Sequence
  Synthetic
tttacgacgcgaacagttatttgc

SEQ ID NO: 23939 - DNA, 22 bp, Artificial Sequence
  Synthetic
gaaccctatgtttcatgcgacc

SEQ ID NO: 23940 - DNA, 24 bp, Artificial Sequence
  Synthetic
tctgcagtagtatggtacaacaga

SEQ ID NO: 23941 - DNA, 23 bp, Artificial Sequence
  Synthetic
ggctcaaatagaccagtgattca

SEQ ID NO: 23942 - DNA, 22 bp, Artificial Sequence
  Synthetic
ctcgaggtctggatacgagatg

SEQ ID NO: 23943 - DNA, 23 bp, Artificial Sequence
  Synthetic
aaaagtacacatcaggaaggcaa

SEQ ID NO: 23944 - DNA, 24 bp, Artificial Sequence
  Synthetic
aaaaggtcgaaaggttgaaacatg

SEQ ID NO: 23945 - DNA, 24 bp, Artificial Sequence
  Synthetic
atgctagaaagagaattggtccgt

SEQ ID NO: 23946 - DNA, 22 bp, Artificial Sequence
  Synthetic
tctctcttggaaatgtgccaca

SEQ ID NO: 23947 - DNA, 25 bp, Artificial Sequence
  Synthetic
gaagagcaacagctattctcagaaa

SEQ ID NO: 23948 - DNA, 20 bp, Artificial Sequence
  Synthetic
agatcaatggccctgagtca

SEQ ID NO: 23949 - DNA, 20 bp, Artificial Sequence
  Synthetic
tgccccaccagaacagagta

SEQ ID NO: 23950 - DNA, 24 bp, Artificial Sequence
  Synthetic
aagagatatggcccagcattaagc

SEQ ID NO: 23951 - DNA, 25 bp, Artificial Sequence
  Synthetic
tggaggagtattgcaaacattatgg

SEQ ID NO: 23952 - DNA, 25 bp, Artificial Sequence
  Synthetic
ggttagattaagggtttgtgtacgt

SEQ ID NO: 23953 - DNA, 25 bp, Artificial Sequence
  Synthetic
aaaaggagattgtttttggacagtg

SEQ ID NO: 23954 - DNA, 23 bp, Artificial Sequence
  Synthetic
gggaagtggatctagaacggttc

SEQ ID NO: 23955 - DNA, 22 bp, Artificial Sequence
  Synthetic
gtggatcacgttctggtagacc

SEQ ID NO: 23956 - DNA, 20 bp, Artificial Sequence
  Synthetic
actggcggtgtcactcaatc

SEQ ID NO: 23957 - DNA, 21 bp, Artificial Sequence
  Synthetic
agcagcaccagacaatgcatt

SEQ ID NO: 23958 - DNA, 25 bp, Artificial Sequence
  Synthetic
agaccctataaatgcaacagatgtt

SEQ ID NO: 23959 - DNA, 23 bp, Artificial Sequence
  Synthetic
taggtgatacagagaatccagca

SEQ ID NO: 23960 - DNA, 25 bp, Artificial Sequence
  Synthetic
gtgtgccattagaattagtggacac

SEQ ID NO: 23961 - DNA, 21 bp, Artificial Sequence
  Synthetic
ctagtggacagcagtgacctt

SEQ ID NO: 23962 - DNA, 25 bp, Artificial Sequence
  Synthetic
ctgtgtggaaacctggatattgtgt

SEQ ID NO: 23963 - DNA, 24 bp, Artificial Sequence
  Synthetic
gtgcctggatattttacacagcag

SEQ ID NO: 23964 - DNA, 24 bp, Artificial Sequence
  Synthetic
agaagtgtaccagtagcattgttt

SEQ ID NO: 23965 - DNA, 21 bp, Artificial Sequence
  Synthetic
agatggaaacgaggtgtctgt

SEQ ID NO: 23966 - DNA, 21 bp, Artificial Sequence
  Synthetic
cattggcagcatctgaaagca

SEQ ID NO: 23967 - DNA, 23 bp, Artificial Sequence
  Synthetic
atgtgcattttaccaaggaagca

SEQ ID NO: 23968 - DNA, 20 bp, Artificial Sequence
  Synthetic
ttttacatgggtggcggatg

SEQ ID NO: 23969 - DNA, 20 bp, Artificial Sequence
  Synthetic
caggtgggggtcgggtaaca

SEQ ID NO: 23970 - DNA, 23 bp, Artificial Sequence
  Synthetic
acagaccctgttacacaatctgc

SEQ ID NO: 23971 - DNA, 24 bp, Artificial Sequence
  Synthetic
gtatccaccctgactcatttgaat

SEQ ID NO: 23972 - DNA, 25 bp, Artificial Sequence
  Synthetic
ccacagtccggtaaactttatctac

SEQ ID NO: 23973 - DNA, 20 bp, Artificial Sequence
  Synthetic
cattgggatgctgcaaagcc

SEQ ID NO: 23974 - DNA, 25 bp, Artificial Sequence
  Synthetic
tgccaccagctataaacattatctg

SEQ ID NO: 23975 - DNA, 23 bp, Artificial Sequence
  Synthetic
tctacctcctctagaaagcggtc

SEQ ID NO: 23976 - DNA, 25 bp, Artificial Sequence
  Synthetic
cttgatcctatgattgttgttggca

SEQ ID NO: 23977 - DNA, 25 bp, Artificial Sequence
  Synthetic
gcactatccctatacaatagacacc

SEQ ID NO: 23978 - DNA, 23 bp, Artificial Sequence
  Synthetic
tagcgaatggtatgttgtgacag

SEQ ID NO: 23979 - DNA, 25 bp, Artificial Sequence
  Synthetic
tttcacctcagagacaaagcaaaag

SEQ ID NO: 23980 - DNA, 21 bp, Artificial Sequence
  Synthetic
gtgccgctgcagaagaagtaa

SEQ ID NO: 23981 - DNA, 25 bp, Artificial Sequence
  Synthetic
ccaaattatttctgctcctgttacc

SEQ ID NO: 23982 - DNA, 20 bp, Artificial Sequence
  Synthetic
ctccagagagtcgccccgta

SEQ ID NO: 23983 - DNA, 25 bp, Artificial Sequence
  Synthetic
agaccctataagttcaggttctgaa

SEQ ID NO: 23984 - DNA, 22 bp, Artificial Sequence
  Synthetic
ggggagggatttcaacgtgtta

SEQ ID NO: 23985 - DNA, 25 bp, Artificial Sequence
  Synthetic
gaacaatacgagtcagcagattagg

SEQ ID NO: 23986 - DNA, 25 bp, Artificial Sequence
  Synthetic
tgaaggagaatctatgatcatgccc

SEQ ID NO: 23987 - DNA, 25 bp, Artificial Sequence
  Synthetic
aatgttttacagatggctctttggt

SEQ ID NO: 23988 - DNA, 25 bp, Artificial Sequence
  Synthetic
tgtctttaacccagaaagagagaga

SEQ ID NO: 23989 - DNA, 20 bp, Artificial Sequence
  Synthetic
ccagccactggtgaacactg

SEQ ID NO: 23990 - DNA, 23 bp, Artificial Sequence
  Synthetic
ctcggatttaacaagcattgctg

SEQ ID NO: 23991 - DNA, 20 bp, Artificial Sequence
  Synthetic
gcagtttggcttcgaggtgc

SEQ ID NO: 23992 - DNA, 19 bp, Artificial Sequence
  Synthetic
ccagagacggtgttgcgcc

SEQ ID NO: 23993 - DNA, 22 bp, Artificial Sequence
  Synthetic
gtagacacccagttatgcagtg

SEQ ID NO: 23994 - DNA, 20 bp, Artificial Sequence
  Synthetic
agtaggtgcctccagagccc

SEQ ID NO: 23995 - DNA, 19 bp, Artificial Sequence
  Synthetic
ccggtatcgggccagaggt

SEQ ID NO: 23996 - DNA, 20 bp, Artificial Sequence
  Synthetic
cctggggccaccttcatcac

SEQ ID NO: 23997 - DNA, 20 bp, Artificial Sequence
  Synthetic
gtggctgcctttgggatgca

SEQ ID NO: 23998 - DNA, 21 bp, Artificial Sequence
  Synthetic
agttgatgatctgtaggcgca

SEQ ID NO: 23999 - DNA, 19 bp, Artificial Sequence
  Synthetic
atgcgggatctgccggtcg

SEQ ID NO: 24000 - DNA, 20 bp, Artificial Sequence
  Synthetic
actcgtgaggcaccccatcc

SEQ ID NO: 24001 - DNA, 20 bp, Artificial Sequence
  Synthetic
tccccgggagattcgcgaca

SEQ ID NO: 24002 - DNA, 21 bp, Artificial Sequence
  Synthetic
gtttcagatcccacgcctcca

SEQ ID NO: 24003 - DNA, 21 bp, Artificial Sequence
  Synthetic
agctatgcctcccgtcgactg

SEQ ID NO: 24004 - DNA, 20 bp, Artificial Sequence
  Synthetic
cggccaatcccggggtaact

SEQ ID NO: 24005 - DNA, 21 bp, Artificial Sequence
  Synthetic
cctgcgtagaacgatggggcg

SEQ ID NO: 24006 - DNA, 22 bp, Artificial Sequence
  Synthetic
gactctgtttccagccagaggg

SEQ ID NO: 24007 - DNA, 19 bp, Artificial Sequence
  Synthetic
ccgccatctcgtgggcctt

SEQ ID NO: 24008 - DNA, 19 bp, Artificial Sequence
  Synthetic
ggcctcattcgcctctcgc

SEQ ID NO: 24009 - DNA, 19 bp, Artificial Sequence
  Synthetic
gcaggcaggcctccagctt

SEQ ID NO: 24010 - DNA, 19 bp, Artificial Sequence
  Synthetic
gccgtgcctaggatgcgga

SEQ ID NO: 24011 - DNA, 18 bp, Artificial Sequence
  Synthetic
tgcgagcaaaggcggcga

SEQ ID NO: 24012 - DNA, 20 bp, Artificial Sequence
  Synthetic
tcgccagagggatctgcacc

SEQ ID NO: 24013 - DNA, 20 bp, Artificial Sequence
  Synthetic
cgacctcagctccgagtggg

SEQ ID NO: 24014 - DNA, 19 bp, Artificial Sequence
  Synthetic
cccacttttggcgcgacct

SEQ ID NO: 24015 - DNA, 19 bp, Artificial Sequence
  Synthetic
actcctgctggccctccct

SEQ ID NO: 24016 - DNA, 19 bp, Artificial Sequence
  Synthetic
catgagcaagggcccaggg

SEQ ID NO: 24017 - DNA, 18 bp, Artificial Sequence
  Synthetic
ttccggccgttagcgtgc

SEQ ID NO: 24018 - DNA, 20 bp, Artificial Sequence
  Synthetic
gcctctggctgttcagctcg

SEQ ID NO: 24019 - DNA, 18 bp, Artificial Sequence
  Synthetic
aggggtcagcggctgtca

SEQ ID NO: 24020 - DNA, 19 bp, Artificial Sequence
  Synthetic
cggccaggctctgaccaga

SEQ ID NO: 24021 - DNA, 19 bp, Artificial Sequence
  Synthetic
agatgcggcgcagacagcc

SEQ ID NO: 24022 - DNA, 20 bp, Artificial Sequence
  Synthetic
ctcgtcaggccgcgagagga

SEQ ID NO: 24023 - DNA, 19 bp, Artificial Sequence
  Synthetic
cctttgagcccgaggtgcc

SEQ ID NO: 24024 - DNA, 20 bp, Artificial Sequence
  Synthetic
gtagcgccgctgattctgga

SEQ ID NO: 24025 - DNA, 22 bp, Artificial Sequence
  Synthetic
tctgttccttctgctccagtgc

SEQ ID NO: 24026 - DNA, 19 bp, Artificial Sequence
  Synthetic
gatgcgcctgacgttgtgc

SEQ ID NO: 24027 - DNA, 25 bp, Artificial Sequence
  Synthetic
tcgaagagtttatatggatgtgcat

SEQ ID NO: 24028 - DNA, 22 bp, Artificial Sequence
  Synthetic
ttggcttctgacatctcccagc

SEQ ID NO: 24029 - DNA, 18 bp, Artificial Sequence
  Synthetic
agtagcgggcctcggtgt

SEQ ID NO: 24030 - DNA, 21 bp, Artificial Sequence
  Synthetic
gcagtggctatgcctccatgc

SEQ ID NO: 24031 - DNA, 22 bp, Artificial Sequence
  Synthetic
gagatggtgtccggagacccca

SEQ ID NO: 24032 - DNA, 21 bp, Artificial Sequence
  Synthetic
aagagccagggggggaagtcg

SEQ ID NO: 24033 - DNA, 21 bp, Artificial Sequence
  Synthetic
aagcctgcctcatccttgacc

SEQ ID NO: 24034 - DNA, 19 bp, Artificial Sequence
  Synthetic
ccctgggcttggttcgcct

SEQ ID NO: 24035 - DNA, 20 bp, Artificial Sequence
  Synthetic
tgggcagtaggctcggagtg

SEQ ID NO: 24036 - DNA, 19 bp, Artificial Sequence
  Synthetic
cccgcctggtgctggaagt

SEQ ID NO: 24037 - DNA, 22 bp, Artificial Sequence
  Synthetic
agatggccatcagtaggcaccc

SEQ ID NO: 24038 - DNA, 20 bp, Artificial Sequence
  Synthetic
cagtcctaggtcagcggccg

SEQ ID NO: 24039 - DNA, 22 bp, Artificial Sequence
  Synthetic
tgtgctggaaagagaggctgga

SEQ ID NO: 24040 - DNA, 19 bp, Artificial Sequence
  Synthetic
tgggacctggggccgtaga

SEQ ID NO: 24041 - DNA, 19 bp, Artificial Sequence
  Synthetic
tgctgtatgcctcgcagcg

SEQ ID NO: 24042 - DNA, 20 bp, Artificial Sequence
  Synthetic
ggggggcctggagtcgatca

SEQ ID NO: 24043 - DNA, 18 bp, Artificial Sequence
  Synthetic
tggcacgcgattggggca

SEQ ID NO: 24044 - DNA, 18 bp, Artificial Sequence
  Synthetic
aagggcgcacaccactcc

SEQ ID NO: 24045 - DNA, 19 bp, Artificial Sequence
  Synthetic
acaccctcaacccccgagt

SEQ ID NO: 24046 - DNA, 19 bp, Artificial Sequence
  Synthetic
gccctccagatcgccacct

SEQ ID NO: 24047 - DNA, 22 bp, Artificial Sequence
  Synthetic
tgacggatgtctttaacggcgc

SEQ ID NO: 24048 - DNA, 22 bp, Artificial Sequence
  Synthetic
gcgtaacgtcattgtccaccga

SEQ ID NO: 24049 - DNA, 20 bp, Artificial Sequence
  Synthetic
actgacccccttgagcacgc

SEQ ID NO: 24050 - DNA, 21 bp, Artificial Sequence
  Synthetic
gtgtcctggtttaaggccgca

SEQ ID NO: 24051 - DNA, 19 bp, Artificial Sequence
  Synthetic
tgtacccatcccggccctc

SEQ ID NO: 24052 - DNA, 21 bp, Artificial Sequence
  Synthetic
tcgatgagggagcaaacaccc

SEQ ID NO: 24053 - DNA, 21 bp, Artificial Sequence
  Synthetic
gtggtcagcagcagatagtga

SEQ ID NO: 24054 - DNA, 19 bp, Artificial Sequence
  Synthetic
cgtagcaccacgtggctgc

SEQ ID NO: 24055 - DNA, 19 bp, Artificial Sequence
  Synthetic
cgctctccgggcacgtctt

SEQ ID NO: 24056 - DNA, 21 bp, Artificial Sequence
  Synthetic
cccgtgcctccttactacgga

SEQ ID NO: 24057 - DNA, 19 bp, Artificial Sequence
  Synthetic
aggcctctgcgtccggagt

SEQ ID NO: 24058 - DNA, 21 bp, Artificial Sequence
  Synthetic
ctggatgagggagcgccaatt

SEQ ID NO: 24059 - DNA, 19 bp, Artificial Sequence
  Synthetic
ccagggtccccacagtgga

SEQ ID NO: 24060 - DNA, 19 bp, Artificial Sequence
  Synthetic
gggcagttcctcgttgcgc

SEQ ID NO: 24061 - DNA, 19 bp, Artificial Sequence
  Synthetic
cagacgcccccagccctaa

SEQ ID NO: 24062 - DNA, 20 bp, Artificial Sequence
  Synthetic
ccaccaccgtcagggagtct

SEQ ID NO: 24063 - DNA, 19 bp, Artificial Sequence
  Synthetic
cacgttgctgggtggggga

SEQ ID NO: 24064 - DNA, 20 bp, Artificial Sequence
  Synthetic
ctgtcctcccagggacccga

SEQ ID NO: 24065 - DNA, 22 bp, Artificial Sequence
  Synthetic
ggtggttacaggagacgtgggt

SEQ ID NO: 24066 - DNA, 19 bp, Artificial Sequence
  Synthetic
cgtagctcaccgccagctc

SEQ ID NO: 24067 - DNA, 22 bp, Artificial Sequence
  Synthetic
aacgatggaatggccaccaggt

SEQ ID NO: 24068 - DNA, 19 bp, Artificial Sequence
  Synthetic
gcaccgtcaggcacctgtg

SEQ ID NO: 24069 - DNA, 22 bp, Artificial Sequence
  Synthetic
gagtctgcgatagagggccagg

SEQ ID NO: 24070 - DNA, 21 bp, Artificial Sequence
  Synthetic
cgtacgtgcgtgtctttgccc

SEQ ID NO: 24071 - DNA, 21 bp, Artificial Sequence
  Synthetic
tggactcagccaccttgtcgt

SEQ ID NO: 24072 - DNA, 19 bp, Artificial Sequence
  Synthetic
gccgctgggtgacacagac

SEQ ID NO: 24073 - DNA, 22 bp, Artificial Sequence
  Synthetic
tttcaggctttgcaaacacagt

SEQ ID NO: 24074 - DNA, 22 bp, Artificial Sequence
  Synthetic
atagggtggacggtgagcaacc

SEQ ID NO: 24075 - DNA, 23 bp, Artificial Sequence
  Synthetic
aacaacatgtttggactgggtag

SEQ ID NO: 24076 - DNA, 20 bp, Artificial Sequence
  Synthetic
agaagtacgcctgctgcatt

SEQ ID NO: 24077 - DNA, 25 bp, Artificial Sequence
  Synthetic
gtagacattataaacgagcagagca

SEQ ID NO: 24078 - DNA, 21 bp, Artificial Sequence
  Synthetic
tttgggtggggttgtcatttc

SEQ ID NO: 24079 - DNA, 25 bp, Artificial Sequence
  Synthetic
atgtgttgttatttaaggcaaggga

SEQ ID NO: 24080 - DNA, 24 bp, Artificial Sequence
  Synthetic
gctggaaaaaaaaaggctacactg

SEQ ID NO: 24081 - DNA, 22 bp, Artificial Sequence
  Synthetic
aaacctactgaccacggacccg

SEQ ID NO: 24082 - DNA, 25 bp, Artificial Sequence
  Synthetic
accaggatatatgtcattgtttgca

SEQ ID NO: 24083 - DNA, 25 bp, Artificial Sequence
  Synthetic
tactgctactacgtgtacataacct

SEQ ID NO: 24084 - DNA, 20 bp, Artificial Sequence
  Synthetic
ctcctactcctgtagtgccg

SEQ ID NO: 24085 - DNA, 25 bp, Artificial Sequence
  Synthetic
aaatcgtatagttgtccccaaagtg

SEQ ID NO: 24086 - DNA, 24 bp, Artificial Sequence
  Synthetic
gctgtttgatgttaatcctggtga

SEQ ID NO: 24087 - DNA, 25 bp, Artificial Sequence
  Synthetic
tatcagattatttcgaatggctgca

SEQ ID NO: 24088 - DNA, 20 bp, Artificial Sequence
  Synthetic
actggctacaacgtgcacag

SEQ ID NO: 24089 - DNA, 23 bp, Artificial Sequence
  Synthetic
ggtgatacctaccgctttttaca

SEQ ID NO: 24090 - DNA, 20 bp, Artificial Sequence
  Synthetic
cagtgaccatgccctgcctt

SEQ ID NO: 24091 - DNA, 24 bp, Artificial Sequence
  Synthetic
ccattgtttggggcatatagttgt

SEQ ID NO: 24092 - DNA, 22 bp, Artificial Sequence
  Synthetic
ataccacttctgtcactggctg

SEQ ID NO: 24093 - DNA, 20 bp, Artificial Sequence
  Synthetic
tcctgaagaggaggagcgac

SEQ ID NO: 24094 - DNA, 24 bp, Artificial Sequence
  Synthetic
aaaacgaaagtatctgacaagccc

SEQ ID NO: 24095 - DNA, 21 bp, Artificial Sequence
  Synthetic
tgaagttatgtgccagcctcc

SEQ ID NO: 24096 - DNA, 25 bp, Artificial Sequence
  Synthetic
ggcagcatggataaataaatgttgc

SEQ ID NO: 24097 - DNA, 23 bp, Artificial Sequence
  Synthetic
aaaagctggctattccgttgatg

SEQ ID NO: 24098 - DNA, 22 bp, Artificial Sequence
  Synthetic
agaagaaccaggtcccctcagc

SEQ ID NO: 24099 - DNA, 24 bp, Artificial Sequence
  Synthetic
attcctttggaaactttacctcca

SEQ ID NO: 24100 - DNA, 20 bp, Artificial Sequence
  Synthetic
ctgacccgattcctcccaga

SEQ ID NO: 24101 - DNA, 24 bp, Artificial Sequence
  Synthetic
agcccaatttcgactattgttgaa

SEQ ID NO: 24102 - DNA, 23 bp, Artificial Sequence
  Synthetic
aattgcctttcagatgacactgt

SEQ ID NO: 24103 - DNA, 21 bp, Artificial Sequence
  Synthetic
ggttgtgaaccagcgttaggt

SEQ ID NO: 24104 - DNA, 22 bp, Artificial Sequence
  Synthetic
tttcagctgaattgtcccagtt

SEQ ID NO: 24105 - DNA, 21 bp, Artificial Sequence
  Synthetic
ttgcggaacagcattaacaga

SEQ ID NO: 24106 - DNA, 22 bp, Artificial Sequence
  Synthetic
gcttgcctgcagtgttggaaac

SEQ ID NO: 24107 - DNA, 21 bp, Artificial Sequence
  Synthetic
ctccaggagcttctgttgggc

SEQ ID NO: 24108 - DNA, 21 bp, Artificial Sequence
  Synthetic
acagacagcaggaggcacaag

SEQ ID NO: 24109 - DNA, 20 bp, Artificial Sequence
  Synthetic
gcacagggggggtacaggaa

SEQ ID NO: 24110 - DNA, 23 bp, Artificial Sequence
  Synthetic
cagcaacactgtcaatatgcaca

SEQ ID NO: 24111 - DNA, 25 bp, Artificial Sequence
  Synthetic
agaaacaccagaatggattgtaaga

SEQ ID NO: 24112 - DNA, 24 bp, Artificial Sequence
  Synthetic
ggcacaaatgacaatgtcagaatg

SEQ ID NO: 24113 - DNA, 21 bp, Artificial Sequence
  Synthetic
gctgcagccattatgtgatgc

SEQ ID NO: 24114 - DNA, 23 bp, Artificial Sequence
  Synthetic
tgatgcaaactggaaatgcttct

SEQ ID NO: 24115 - DNA, 20 bp, Artificial Sequence
  Synthetic
acatggaccaaggtgtctgg

SEQ ID NO: 24116 - DNA, 22 bp, Artificial Sequence
  Synthetic
acagaagacaggatccagcggc

SEQ ID NO: 24117 - DNA, 21 bp, Artificial Sequence
  Synthetic
gatggtcaacgtgcagtaaca

SEQ ID NO: 24118 - DNA, 24 bp, Artificial Sequence
  Synthetic
tggcgttactgcttttcttattgt

SEQ ID NO: 24119 - DNA, 23 bp, Artificial Sequence
  Synthetic
atcctgtagtactgtggacacct

SEQ ID NO: 24120 - DNA, 19 bp, Artificial Sequence
  Synthetic
attgggacccgacccccca

SEQ ID NO: 24121 - DNA, 25 bp, Artificial Sequence
  Synthetic
acagaggaaaccatactatttgagc

SEQ ID NO: 24122 - DNA, 23 bp, Artificial Sequence
  Synthetic
gttcccaaggtgtctggatatca

SEQ ID NO: 24123 - DNA, 25 bp, Artificial Sequence
  Synthetic
acccagctatttattatagggtgca

SEQ ID NO: 24124 - DNA, 24 bp, Artificial Sequence
  Synthetic
tctgtttacgtagggaacagatgt

SEQ ID NO: 24125 - DNA, 24 bp, Artificial Sequence
  Synthetic
actacacgtagcaccaatatgact

SEQ ID NO: 24126 - DNA, 24 bp, Artificial Sequence
  Synthetic
gtactgttgtgtatgtatgggtgg

SEQ ID NO: 24127 - DNA, 20 bp, Artificial Sequence
  Synthetic
ccggtttcggtcgtgcacaa

SEQ ID NO: 24128 - DNA, 22 bp, Artificial Sequence
  Synthetic
tgagtgtcgtacagcctccagg

SEQ ID NO: 24129 - DNA, 20 bp, Artificial Sequence
  Synthetic
gcgcgcgacaaggaagactt

SEQ ID NO: 24130 - DNA, 19 bp, Artificial Sequence
  Synthetic
cgccagagctctcgcgcat

SEQ ID NO: 24131 - DNA, 21 bp, Artificial Sequence
  Synthetic
tctcaccgaatgtggccgtgc

SEQ ID NO: 24132 - DNA, 20 bp, Artificial Sequence
  Synthetic
cgtcatgttcggcttggcct

SEQ ID NO: 24133 - DNA, 20 bp, Artificial Sequence
  Synthetic
ggatggggcgccttgcaata

SEQ ID NO: 24134 - DNA, 20 bp, Artificial Sequence
  Synthetic
tgacttcaacgccagcacgg

SEQ ID NO: 24135 - DNA, 22 bp, Artificial Sequence
  Synthetic
ccttgctcttactcggacctgc

SEQ ID NO: 24136 - DNA, 21 bp, Artificial Sequence
  Synthetic
attccctcactggcctgtggt

SEQ ID NO: 24137 - DNA, 22 bp, Artificial Sequence
  Synthetic
ctaaaaggtgctttgacgcgcg

SEQ ID NO: 24138 - DNA, 22 bp, Artificial Sequence
  Synthetic
tggcccagctgatggctatacc

SEQ ID NO: 24139 - DNA, 22 bp, Artificial Sequence
  Synthetic
tcacgcagatgtactccagtgc

SEQ ID NO: 24140 - DNA, 21 bp, Artificial Sequence
  Synthetic
caggtcgggtacttgcatgcc

SEQ ID NO: 24141 - DNA, 22 bp, Artificial Sequence
  Synthetic
ctaccaccatccttggcatcgg

SEQ ID NO: 24142 - DNA, 20 bp, Artificial Sequence
  Synthetic
caccgacgccctcatgacag

SEQ ID NO: 24143 - DNA, 20 bp, Artificial Sequence
  Synthetic
ccgtcaggctcagggcgtat

SEQ ID NO: 24144 - DNA, 22 bp, Artificial Sequence
  Synthetic
atacatcgccacctgcatgcaa

SEQ ID NO: 24145 - DNA, 22 bp, Artificial Sequence
  Synthetic
ttctgggccaaacacatgtgga

SEQ ID NO: 24146 - DNA, 22 bp, Artificial Sequence
  Synthetic
tgtcgtcaacttgctgcctgga

SEQ ID NO: 24147 - DNA, 20 bp, Artificial Sequence
  Synthetic
cgaaacccgcgccaaacttt

SEQ ID NO: 24148 - DNA, 18 bp, Artificial Sequence
  Synthetic
cgtttagcgcgggggtca

SEQ ID NO: 24149 - DNA, 20 bp, Artificial Sequence
  Synthetic
cctgggcacggcctgattac

SEQ ID NO: 24150 - DNA, 22 bp, Artificial Sequence
  Synthetic
acctggagcctgagcaggtaga

SEQ ID NO: 24151 - DNA, 20 bp, Artificial Sequence
  Synthetic
cgcaaggctcctcaccatgg

SEQ ID NO: 24152 - DNA, 22 bp, Artificial Sequence
  Synthetic
tggattccagtattcccccgct

SEQ ID NO: 24153 - DNA, 20 bp, Artificial Sequence
  Synthetic
aatcgcgcccacaatgctgg

SEQ ID NO: 24154 - DNA, 20 bp, Artificial Sequence
  Synthetic
gggctgcctgggaaacagtt

SEQ ID NO: 24155 - DNA, 19 bp, Artificial Sequence
  Synthetic
ccacccctcagagcgtgga

SEQ ID NO: 24156 - DNA, 21 bp, Artificial Sequence
  Synthetic
cgcgattgatgcggatttgcc

SEQ ID NO: 24157 - DNA, 20 bp, Artificial Sequence
  Synthetic
cgaggtgggcgtaacgcttg

SEQ ID NO: 24158 - DNA, 21 bp, Artificial Sequence
  Synthetic
tcatgcccgggaagagtttgc

SEQ ID NO: 24159 - DNA, 19 bp, Artificial Sequence
  Synthetic
gggcggacaatgccgtctg

SEQ ID NO: 24160 - DNA, 20 bp, Artificial Sequence
  Synthetic
cagcgtcagtccgaacgtcc

SEQ ID NO: 24161 - DNA, 22 bp, Artificial Sequence
  Synthetic
gcgaaccgaaaacccaataccg

SEQ ID NO: 24162 - DNA, 22 bp, Artificial Sequence
  Synthetic
gaccaatacatcggcggcatcg

SEQ ID NO: 24163 - DNA, 20 bp, Artificial Sequence
  Synthetic
gcaaaatcaccgtcgccgcc

SEQ ID NO: 24164 - DNA, 20 bp, Artificial Sequence
  Synthetic
gctcccaagccgaaacgtga

SEQ ID NO: 24165 - DNA, 19 bp, Artificial Sequence
  Synthetic
gtgatgcggccgccgactt

SEQ ID NO: 24166 - DNA, 21 bp, Artificial Sequence
  Synthetic
aaccgggaatcaggtcggtgg

SEQ ID NO: 24167 - DNA, 19 bp, Artificial Sequence
  Synthetic
ggggtgtgcgtgccggaaa

SEQ ID NO: 24168 - DNA, 20 bp, Artificial Sequence
  Synthetic
ccgcccgcgacaatgtagtt

SEQ ID NO: 24169 - DNA, 20 bp, Artificial Sequence
  Synthetic
gcgcttttgggcgaacagcg

SEQ ID NO: 24170 - DNA, 19 bp, Artificial Sequence
  Synthetic
ggcagggaataccgcccgt

SEQ ID NO: 24171 - DNA, 19 bp, Artificial Sequence
  Synthetic
ccgccctgcaagccgatgt

SEQ ID NO: 24172 - DNA, 22 bp, Artificial Sequence
  Synthetic
gcttcctgccatttgctgtcgg

SEQ ID NO: 24173 - DNA, 20 bp, Artificial Sequence
  Synthetic
agtttcaccgccaccaacgc

SEQ ID NO: 24174 - DNA, 19 bp, Artificial Sequence
  Synthetic
ttcgtcccaagccggacac

SEQ ID NO: 24175 - DNA, 19 bp, Artificial Sequence
  Synthetic
ccgcgtttcgggcaactcg

SEQ ID NO: 24176 - DNA, 18 bp, Artificial Sequence
  Synthetic
ggtacgcgccgtggatga

SEQ ID NO: 24177 - DNA, 20 bp, Artificial Sequence
  Synthetic
ccgctttgccgtggaacagt

SEQ ID NO: 24178 - DNA, 19 bp, Artificial Sequence
  Synthetic
tgcaggtggaggtagcgcg

SEQ ID NO: 24179 - DNA, 20 bp, Artificial Sequence
  Synthetic
tagagcagttcggcgtgtgc

SEQ ID NO: 24180 - DNA, 22 bp, Artificial Sequence
  Synthetic
gccgccctaccgacttgataat

SEQ ID NO: 24181 - DNA, 20 bp, Artificial Sequence
  Synthetic
cgcgtgtcgcccaaaatgac

SEQ ID NO: 24182 - DNA, 22 bp, Artificial Sequence
  Synthetic
ccaaaaacgcctcgaatcgtgg

SEQ ID NO: 24183 - DNA, 21 bp, Artificial Sequence
  Synthetic
ttatgccgtctgtcgaacggc

SEQ ID NO: 24184 - DNA, 19 bp, Artificial Sequence
  Synthetic
ggcggagagtgcaccgtgt

SEQ ID NO: 24185 - DNA, 22 bp, Artificial Sequence
  Synthetic
ttcgggccgatgaaggtaaagc

SEQ ID NO: 24186 - DNA, 22 bp, Artificial Sequence
  Synthetic
gattcgtcggcgagtttgacgt

SEQ ID NO: 24187 - DNA, 18 bp, Artificial Sequence
  Synthetic
cgccggtggctttggaga

SEQ ID NO: 24188 - DNA, 21 bp, Artificial Sequence
  Synthetic
acgtcttccaatgtcagcggc

SEQ ID NO: 24189 - DNA, 19 bp, Artificial Sequence
  Synthetic
cgggtgtcgatgtcggcga

SEQ ID NO: 24190 - DNA, 18 bp, Artificial Sequence
  Synthetic
cgatgtgcgcgacaggga

SEQ ID NO: 24191 - DNA, 19 bp, Artificial Sequence
  Synthetic
ggcgttgcccagttgcagg

SEQ ID NO: 24192 - DNA, 20 bp, Artificial Sequence
  Synthetic
cctgcgaaatgctggtcgga

SEQ ID NO: 24193 - DNA, 20 bp, Artificial Sequence
  Synthetic
cgctcccttgcctacgatgc

SEQ ID NO: 24194 - DNA, 20 bp, Artificial Sequence
  Synthetic
gaccccagcttcaaagccgc

SEQ ID NO: 24195 - DNA, 20 bp, Artificial Sequence
  Synthetic
gttccgaccagtggggcaac

SEQ ID NO: 24196 - DNA, 21 bp, Artificial Sequence
  Synthetic
atcagccccctgcgtaccaaa

SEQ ID NO: 24197 - DNA, 22 bp, Artificial Sequence
  Synthetic
tcagtggtttgtcggcatggac

SEQ ID NO: 24198 - DNA, 19 bp, Artificial Sequence
  Synthetic
ccgccgccatcgagccttt

SEQ ID NO: 24199 - DNA, 19 bp, Artificial Sequence
  Synthetic
catggcagggcaggccgaa

SEQ ID NO: 24200 - DNA, 22 bp, Artificial Sequence
  Synthetic
tcttcgaggctgacgaaggcga

SEQ ID NO: 24201 - DNA, 20 bp, Artificial Sequence
  Synthetic
tcgatgctgtcgaacgcgcc

SEQ ID NO: 24202 - DNA, 22 bp, Artificial Sequence
  Synthetic
gattcgtccgcctgatacacgg

SEQ ID NO: 24203 - DNA, 18 bp, Artificial Sequence
  Synthetic
tgcggcgaggcgtgcatt

SEQ ID NO: 24204 - DNA, 21 bp, Artificial Sequence
  Synthetic
cgtccaaacgcgccatttcgc

SEQ ID NO: 24205 - DNA, 18 bp, Artificial Sequence
  Synthetic
tcgtgccacggcagcatg

SEQ ID NO: 24206 - DNA, 19 bp, Artificial Sequence
  Synthetic
cgccacggcgtgttgtcga

SEQ ID NO: 24207 - DNA, 21 bp, Artificial Sequence
  Synthetic
tgtttggtccgtcgggttcgg

SEQ ID NO: 24208 - DNA, 21 bp, Artificial Sequence
  Synthetic
aacaaccagaatgaggcggca

SEQ ID NO: 24209 - DNA, 21 bp, Artificial Sequence
  Synthetic
gcggcaacatgcacgatacga

SEQ ID NO: 24210 - DNA, 18 bp, Artificial Sequence
  Synthetic
ccgtcagcggcaacagca

SEQ ID NO: 24211 - DNA, 19 bp, Artificial Sequence
  Synthetic
gccgccgtctgcatcagca

SEQ ID NO: 24212 - DNA, 20 bp, Artificial Sequence
  Synthetic
cggcacgcaaaacctgtacg

SEQ ID NO: 24213 - DNA, 22 bp, Artificial Sequence
  Synthetic
cgttgtgcattgaagggcgaac

SEQ ID NO: 24214 - DNA, 19 bp, Artificial Sequence
  Synthetic
cggcgacgggggaatttgc

SEQ ID NO: 24215 - DNA, 22 bp, Artificial Sequence
  Synthetic
cgccgtaacccatttccgcttc

SEQ ID NO: 24216 - DNA, 22 bp, Artificial Sequence
  Synthetic
caacacgctgttgggtatggga

SEQ ID NO: 24217 - DNA, 19 bp, Artificial Sequence
  Synthetic
tttgccgtatccgggcggt

SEQ ID NO: 24218 - DNA, 20 bp, Artificial Sequence
  Synthetic
ggtggaacggaagctgctgg

SEQ ID NO: 24219 - DNA, 22 bp, Artificial Sequence
  Synthetic
ccgctgtcggcttcaaaatggt

SEQ ID NO: 24220 - DNA, 19 bp, Artificial Sequence
  Synthetic
gtttgcgcgtcagctcgac

SEQ ID NO: 24221 - DNA, 21 bp, Artificial Sequence
  Synthetic
ttttccggcaggagcttgtcg

SEQ ID NO: 24222 - DNA, 21 bp, Artificial Sequence
  Synthetic
gcgtgccgcagattttcatcg

SEQ ID NO: 24223 - DNA, 22 bp, Artificial Sequence
  Synthetic
aagcctgcgccttttgcattcg

SEQ ID NO: 24224 - DNA, 21 bp, Artificial Sequence
  Synthetic
aagtcggcgtagatgtgccca

SEQ ID NO: 24225 - DNA, 22 bp, Artificial Sequence
  Synthetic
aaccctgaaatcgtcgaagcgc

SEQ ID NO: 24226 - DNA, 19 bp, Artificial Sequence
  Synthetic
gaaccggcgggcaggatgt

SEQ ID NO: 24227 - DNA, 19 bp, Artificial Sequence
  Synthetic
ccggcgatggtctgcctga

SEQ ID NO: 24228 - DNA, 20 bp, Artificial Sequence
  Synthetic
aaaggtcgatgacgcgcacg

SEQ ID NO: 24229 - DNA, 20 bp, Artificial Sequence
  Synthetic
aatcggcaactgcggttccc

SEQ ID NO: 24230 - DNA, 20 bp, Artificial Sequence
  Synthetic
gctttcagacgacgtcaggt

SEQ ID NO: 24231 - DNA, 20 bp, Artificial Sequence
  Synthetic
gcaaggtcggcggcgcttta

SEQ ID NO: 24232 - DNA, 21 bp, Artificial Sequence
  Synthetic
catgttgcgcgggatttctgg

SEQ ID NO: 24233 - DNA, 19 bp, Artificial Sequence
  Synthetic
gggcatgaccgccgccata

SEQ ID NO: 24234 - DNA, 22 bp, Artificial Sequence
  Synthetic
aacgtggtcgatgtggttgcag

SEQ ID NO: 24235 - DNA, 19 bp, Artificial Sequence
  Synthetic
atgccgaacgtcccccagc

SEQ ID NO: 24236 - DNA, 21 bp, Artificial Sequence
  Synthetic
aggcagtggagtcgaggatgt

SEQ ID NO: 24237 - DNA, 18 bp, Artificial Sequence
  Synthetic
gggttgccgccgaccaaa

SEQ ID NO: 24238 - DNA, 20 bp, Artificial Sequence
  Synthetic
ttgatgccgacgacctgtcc

SEQ ID NO: 24239 - DNA, 21 bp, Artificial Sequence
  Synthetic
gcttcgccgtcgccttgttta

SEQ ID NO: 24240 - DNA, 22 bp, Artificial Sequence
  Synthetic
ttcgcgcccaaccgttatttgg

SEQ ID NO: 24241 - DNA, 21 bp, Artificial Sequence
  Synthetic
aaaaccctgcaccgcagtgat

SEQ ID NO: 24242 - DNA, 19 bp, Artificial Sequence
  Synthetic
gtagcgcgctgatgcagga

SEQ ID NO: 24243 - DNA, 19 bp, Artificial Sequence
  Synthetic
cgcaaggcaggccgtggtt

SEQ ID NO: 24244 - DNA, 20 bp, Artificial Sequence
  Synthetic
gggttcggacggcatctgtc

SEQ ID NO: 24245 - DNA, 22 bp, Artificial Sequence
  Synthetic
agccataagctgcccgtttcgg

SEQ ID NO: 24246 - DNA, 20 bp, Artificial Sequence
  Synthetic
gggtatggacggcagcaagg

SEQ ID NO: 24247 - DNA, 19 bp, Artificial Sequence
  Synthetic
tgctcctgctcgcccacga

SEQ ID NO: 24248 - DNA, 18 bp, Artificial Sequence
  Synthetic
agacggatgcgagggcgt

SEQ ID NO: 24249 - DNA, 21 bp, Artificial Sequence
  Synthetic
gggtaccttccacgacgcgta

SEQ ID NO: 24250 - DNA, 19 bp, Artificial Sequence
  Synthetic
ctgcgggcagttcgttggt

SEQ ID NO: 24251 - DNA, 21 bp, Artificial Sequence
  Synthetic
tttgggcgtgtcgtgtgttcc

SEQ ID NO: 24252 - DNA, 19 bp, Artificial Sequence
  Synthetic
gcaaggtggcggctgtcga

SEQ ID NO: 24253 - DNA, 21 bp, Artificial Sequence
  Synthetic
gccgctgcaagggcttttttg

SEQ ID NO: 24254 - DNA, 20 bp, Artificial Sequence
  Synthetic
tccgttgcggatgtggtggg

SEQ ID NO: 24255 - DNA, 22 bp, Artificial Sequence
  Synthetic
atgaggaagttgcagtgtcggg

SEQ ID NO: 24256 - DNA, 21 bp, Artificial Sequence
  Synthetic
tgtgcaggctgtgtccgaagc

SEQ ID NO: 24257 - DNA, 20 bp, Artificial Sequence
  Synthetic
ggtgcgttgttctgttcgcc

SEQ ID NO: 24258 - DNA, 20 bp, Artificial Sequence
  Synthetic
ggaggcggtcagtatgccga

SEQ ID NO: 24259 - DNA, 22 bp, Artificial Sequence
  Synthetic
tttccgcaggttcggctgtact

SEQ ID NO: 24260 - DNA, 20 bp, Artificial Sequence
  Synthetic
aggctgtgttcgagttcggg

SEQ ID NO: 24261 - DNA, 20 bp, Artificial Sequence
  Synthetic
gggaagcggccgatgtgttt

SEQ ID NO: 24262 - DNA, 20 bp, Artificial Sequence
  Synthetic
gcttttcgcgtgatgccccg

SEQ ID NO: 24263 - DNA, 19 bp, Artificial Sequence
  Synthetic
ggtgcaggcggggtggaaa

SEQ ID NO: 24264 - DNA, 24 bp, Artificial Sequence
  Synthetic
ttgatggctttaggttttgtcgtt

SEQ ID NO: 24265 - DNA, 19 bp, Artificial Sequence
  Synthetic
caggttgcggctgccttct

SEQ ID NO: 24266 - DNA, 19 bp, Artificial Sequence
  Synthetic
caggtgtcgccgctgacga

SEQ ID NO: 24267 - DNA, 21 bp, Artificial Sequence
  Synthetic
agcgtgtgttttcggggttga

SEQ ID NO: 24268 - DNA, 19 bp, Artificial Sequence
  Synthetic
ccgacggtcagcgggatga

SEQ ID NO: 24269 - DNA, 20 bp, Artificial Sequence
  Synthetic
acgccatgtttttcggcggc

SEQ ID NO: 24270 - DNA, 18 bp, Artificial Sequence
  Synthetic
tggcactgcgttggacgg

SEQ ID NO: 24271 - DNA, 18 bp, Artificial Sequence
  Synthetic
agcgcgtcggcatcggta

SEQ ID NO: 24272 - DNA, 21 bp, Artificial Sequence
  Synthetic
aaccagtcgtcgcttttgcct

SEQ ID NO: 24273 - DNA, 19 bp, Artificial Sequence
  Synthetic
ctcttgcgccgtcctgcct

SEQ ID NO: 24274 - DNA, 18 bp, Artificial Sequence
  Synthetic
agcagggtggcggtcaac

SEQ ID NO: 24275 - DNA, 18 bp, Artificial Sequence
  Synthetic
cgcctttgccgcgtgttt

SEQ ID NO: 24276 - DNA, 20 bp, Artificial Sequence
  Synthetic
gtttgcgacagtcggccatg

SEQ ID NO: 24277 - DNA, 22 bp, Artificial Sequence
  Synthetic
ttcgacaatgccggtaatgcgt

SEQ ID NO: 24278 - DNA, 21 bp, Artificial Sequence
  Synthetic
gacgtgttcctcgggttgcag

SEQ ID NO: 24279 - DNA, 19 bp, Artificial Sequence
  Synthetic
agccttcaacggcactgca

SEQ ID NO: 24280 - DNA, 20 bp, Artificial Sequence
  Synthetic
ccggcaaaatgcaggcaggc

SEQ ID NO: 24281 - DNA, 19 bp, Artificial Sequence
  Synthetic
acgatgatgcccatcccgc

SEQ ID NO: 24282 - DNA, 20 bp, Artificial Sequence
  Synthetic
ggagagggcggcgggtatca

SEQ ID NO: 24283 - DNA, 22 bp, Artificial Sequence
  Synthetic
tcgaaacagccttggatgtcgc

SEQ ID NO: 24284 - DNA, 19 bp, Artificial Sequence
  Synthetic
ttttggacacgctgccgga

SEQ ID NO: 24285 - DNA, 22 bp, Artificial Sequence
  Synthetic
gaacggattcggtttgcttggc

SEQ ID NO: 24286 - DNA, 19 bp, Artificial Sequence
  Synthetic
ggtatgctgggcgcgtcga

SEQ ID NO: 24287 - DNA, 22 bp, Artificial Sequence
  Synthetic
aagccacttcgataaaggcggc

SEQ ID NO: 24288 - DNA, 22 bp, Artificial Sequence
  Synthetic
tcggcaatctggaaatggtcgt

SEQ ID NO: 24289 - DNA, 19 bp, Artificial Sequence
  Synthetic
cacttctcccgcccccgaa

SEQ ID NO: 24290 - DNA, 20 bp, Artificial Sequence
  Synthetic
accgcatccgtgccgtattc

SEQ ID NO: 24291 - DNA, 19 bp, Artificial Sequence
  Synthetic
acaggcgcgcgagaaagac

SEQ ID NO: 24292 - DNA, 18 bp, Artificial Sequence
  Synthetic
aaacaggtgcgccgacgg

SEQ ID NO: 24293 - DNA, 19 bp, Artificial Sequence
  Synthetic
tcctgtggcacggctaccc

SEQ ID NO: 24294 - DNA, 19 bp, Artificial Sequence
  Synthetic
cgccgtgcggttgccgata

SEQ ID NO: 24295 - DNA, 18 bp, Artificial Sequence
  Synthetic
cccgaaggcagcgcgttt

SEQ ID NO: 24296 - DNA, 19 bp, Artificial Sequence
  Synthetic
agccgcccgcctcgttttg

SEQ ID NO: 24297 - DNA, 22 bp, Artificial Sequence
  Synthetic
aggcgcacaaattcttcctcgg

SEQ ID NO: 24298 - DNA, 18 bp, Artificial Sequence
  Synthetic
gcgatgtttgccgccgtc

SEQ ID NO: 24299 - DNA, 21 bp, Artificial Sequence
  Synthetic
ggtggttttcgtcgtggaggc

SEQ ID NO: 24300 - DNA, 19 bp, Artificial Sequence
  Synthetic
ccggtgatgcggacggctt

SEQ ID NO: 24301 - DNA, 20 bp, Artificial Sequence
  Synthetic
tcgctgtcggtttgcgaacc

SEQ ID NO: 24302 - DNA, 20 bp, Artificial Sequence
  Synthetic
cgttttcggcggcggatttc

SEQ ID NO: 24303 - DNA, 21 bp, Artificial Sequence
  Synthetic
gtctgtcgtcgaggcattcca

SEQ ID NO: 24304 - DNA, 22 bp, Artificial Sequence
  Synthetic
acgaaaacggccaagtcttggg

SEQ ID NO: 24305 - DNA, 24 bp, Artificial Sequence
  Synthetic
cctgttaacaagaaacggttttgc

SEQ ID NO: 24306 - DNA, 20 bp, Artificial Sequence
  Synthetic
cgactaccgttgctatgcgt

SEQ ID NO: 24307 - DNA, 18 bp, Artificial Sequence
  Synthetic
aattccgcgcgcgggcat

SEQ ID NO: 24308 - DNA, 19 bp, Artificial Sequence
  Synthetic
gccaaccatccgcttgccg

SEQ ID NO: 24309 - DNA, 19 bp, Artificial Sequence
  Synthetic
gcactgtttgccgagcgcg

SEQ ID NO: 24310 - DNA, 19 bp, Artificial Sequence
  Synthetic
tgaagggcgatgtcccgcg

SEQ ID NO: 24311 - DNA, 22 bp, Artificial Sequence
  Synthetic
ggctttggggcgacaaacagac

SEQ ID NO: 24312 - DNA, 20 bp, Artificial Sequence
  Synthetic
gccagcggctttccacaatg

SEQ ID NO: 24313 - DNA, 19 bp, Artificial Sequence
  Synthetic
aacgacgacgcgcaggtgg

SEQ ID NO: 24314 - DNA, 19 bp, Artificial Sequence
  Synthetic
gtttgcccgaacgtgcggt

SEQ ID NO: 24315 - DNA, 21 bp, Artificial Sequence
  Synthetic
gcagggcagtgtgtatccagt

SEQ ID NO: 24316 - DNA, 21 bp, Artificial Sequence
  Synthetic
aaacagtcatgccgatgccga

SEQ ID NO: 24317 - DNA, 22 bp, Artificial Sequence
  Synthetic
acgcatgatatttggctggcgg

SEQ ID NO: 24318 - DNA, 21 bp, Artificial Sequence
  Synthetic
cgccgtacacgaggtcttccg

SEQ ID NO: 24319 - DNA, 22 bp, Artificial Sequence
  Synthetic
aaccgtttacaccggaagatgt

SEQ ID NO: 24320 - DNA, 20 bp, Artificial Sequence
  Synthetic
atggtgatgatgattgcgcc

SEQ ID NO: 24321 - DNA, 22 bp, Artificial Sequence
  Synthetic
agaagtaacaggccgtctgaaa

SEQ ID NO: 24322 - DNA, 21 bp, Artificial Sequence
  Synthetic
tcatcgtcgaagaaagcggct

SEQ ID NO: 24323 - DNA, 19 bp, Artificial Sequence
  Synthetic
gtagggcggcgaggttggt

SEQ ID NO: 24324 - DNA, 22 bp, Artificial Sequence
  Synthetic
tccgagtccgaagcatcttgtg

SEQ ID NO: 24325 - DNA, 22 bp, Artificial Sequence
  Synthetic
tcgctgctcatcaggctaaggt

SEQ ID NO: 24326 - DNA, 22 bp, Artificial Sequence
  Synthetic
gttctttacgtttttgtggggc

SEQ ID NO: 24327 - DNA, 22 bp, Artificial Sequence
  Synthetic
aggcgtggatttccgttaccgt

SEQ ID NO: 24328 - DNA, 24 bp, Artificial Sequence
  Synthetic
gcatttttcggtatcggtgtaacg

SEQ ID NO: 24329 - DNA, 19 bp, Artificial Sequence
  Synthetic
ggcgtggcgatgattgccg

SEQ ID NO: 24330 - DNA, 21 bp, Artificial Sequence
  Synthetic
taagccaagccgttgcaaccg

SEQ ID NO: 24331 - DNA, 21 bp, Artificial Sequence
  Synthetic
acgtctggctttccattcggg

SEQ ID NO: 24332 - DNA, 21 bp, Artificial Sequence
  Synthetic
cctaccgtttttctgcttgcg

SEQ ID NO: 24333 - DNA, 20 bp, Artificial Sequence
  Synthetic
gcgtattgtctgtgcgcgga

SEQ ID NO: 24334 - DNA, 22 bp, Artificial Sequence
  Synthetic
cgaaaacacagcttccgaaccg

SEQ ID NO: 24335 - DNA, 21 bp, Artificial Sequence
  Synthetic
gcggcgaagatgaatgccaac

SEQ ID NO: 24336 - DNA, 22 bp, Artificial Sequence
  Synthetic
tgcactgaagccgagtattccg

SEQ ID NO: 24337 - DNA, 22 bp, Artificial Sequence
  Synthetic
gaccccgaacacgccaaaatct

SEQ ID NO: 24338 - DNA, 21 bp, Artificial Sequence
  Synthetic
aagcccaatgggagaaatcgt

SEQ ID NO: 24339 - DNA, 21 bp, Artificial Sequence
  Synthetic
acgcttcgaccgtccaatccc

SEQ ID NO: 24340 - DNA, 22 bp, Artificial Sequence
  Synthetic
ggcaacggcgtaaatcagtgcc

SEQ ID NO: 24341 - DNA, 19 bp, Artificial Sequence
  Synthetic
gacggtttcgcggctgtct

SEQ ID NO: 24342 - DNA, 21 bp, Artificial Sequence
  Synthetic
ccagcccgcgatcctgataca

SEQ ID NO: 24343 - DNA, 22 bp, Artificial Sequence
  Synthetic
aggagtggtaaccatgccgaca

SEQ ID NO: 24344 - DNA, 20 bp, Artificial Sequence
  Synthetic
gacttgttcgggcagcccca

SEQ ID NO: 24345 - DNA, 22 bp, Artificial Sequence
  Synthetic
ggcggttttgattttggagccg

SEQ ID NO: 24346 - DNA, 20 bp, Artificial Sequence
  Synthetic
acggtttatctgcccgccga

SEQ ID NO: 24347 - DNA, 19 bp, Artificial Sequence
  Synthetic
gaacgcaggctgccgagca

SEQ ID NO: 24348 - DNA, 20 bp, Artificial Sequence
  Synthetic
ggtgttgttcggcggcaagg

SEQ ID NO: 24349 - DNA, 18 bp, Artificial Sequence
  Synthetic
cggctgccgtgtcggtaa

SEQ ID NO: 24350 - DNA, 20 bp, Artificial Sequence
  Synthetic
agagcggcatatcgggatgc

SEQ ID NO: 24351 - DNA, 20 bp, Artificial Sequence
  Synthetic
tcgtcggcgtgtttaagcgc

SEQ ID NO: 24352 - DNA, 18 bp, Artificial Sequence
  Synthetic
tttgcccgccgtcgaacg

SEQ ID NO: 24353 - DNA, 21 bp, Artificial Sequence
  Synthetic
gttgtcgtttcccccgaagcc

SEQ ID NO: 24354 - DNA, 19 bp, Artificial Sequence
  Synthetic
gcatcggccctgcctacga

SEQ ID NO: 24355 - DNA, 20 bp, Artificial Sequence
  Synthetic
cgcgcgtcatatggtcgagc

SEQ ID NO: 24356 - DNA, 19 bp, Artificial Sequence
  Synthetic
atctggtgatgggccgccc

SEQ ID NO: 24357 - DNA, 20 bp, Artificial Sequence
  Synthetic
gcgcgaactcgaaaaaccgc

SEQ ID NO: 24358 - DNA, 22 bp, Artificial Sequence
  Synthetic
tggtggaaggcttcgaacatcg

SEQ ID NO: 24359 - DNA, 19 bp, Artificial Sequence
  Synthetic
ggccgggtttcgaccgtgt

SEQ ID NO: 24360 - DNA, 21 bp, Artificial Sequence
  Synthetic
gcccaattggaaaagggcagc

SEQ ID NO: 24361 - DNA, 19 bp, Artificial Sequence
  Synthetic
ccggcatccgcgccttgtt

SEQ ID NO: 24362 - DNA, 22 bp, Artificial Sequence
  Synthetic
accgtccgaccatcgtgtttgc

SEQ ID NO: 24363 - DNA, 21 bp, Artificial Sequence
  Synthetic
gacgagttccacgtcgttcgc

SEQ ID NO: 24364 - DNA, 19 bp, Artificial Sequence
  Synthetic
ggatgttgggcgcgggcat

SEQ ID NO: 24365 - DNA, 19 bp, Artificial Sequence
  Synthetic
gcgtgtcgggcaggtaggt

SEQ ID NO: 24366 - DNA, 22 bp, Artificial Sequence
  Synthetic
gtctgtgcccacatcggtctga

SEQ ID NO: 24367 - DNA, 20 bp, Artificial Sequence
  Synthetic
cgggaacggctctggcaacc

SEQ ID NO: 24368 - DNA, 19 bp, Artificial Sequence
  Synthetic
gacaaaggcgtgctggcgg

SEQ ID NO: 24369 - DNA, 22 bp, Artificial Sequence
  Synthetic
atacgcttagggtgtctgatcg

SEQ ID NO: 24370 - DNA, 22 bp, Artificial Sequence
  Synthetic
aagggttcgtccaaaagcagga

SEQ ID NO: 24371 - DNA, 22 bp, Artificial Sequence
  Synthetic
aacgttgtgaaacggtttgcgc

SEQ ID NO: 24372 - DNA, 20 bp, Artificial Sequence
  Synthetic
ggagttgccgcgttggaagt

SEQ ID NO: 24373 - DNA, 21 bp, Artificial Sequence
  Synthetic
ttctgcggatgtttttctccg

SEQ ID NO: 24374 - DNA, 19 bp, Artificial Sequence
  Synthetic
ggacagccggttccggtca

SEQ ID NO: 24375 - DNA, 22 bp, Artificial Sequence
  Synthetic
tcatcttgttgctgatggcgga

SEQ ID NO: 24376 - DNA, 21 bp, Artificial Sequence
  Synthetic
cggcaaccggcttcttcttcc

SEQ ID NO: 24377 - DNA, 19 bp, Artificial Sequence
  Synthetic
ctgacggcgcggcattcct

SEQ ID NO: 24378 - DNA, 19 bp, Artificial Sequence
  Synthetic
tgcgagatgctgggaacgg

SEQ ID NO: 24379 - DNA, 22 bp, Artificial Sequence
  Synthetic
gcgtgaaaccaagacattcggc

SEQ ID NO: 24380 - DNA, 22 bp, Artificial Sequence
  Synthetic
accgttattggcggatttggcg

SEQ ID NO: 24381 - DNA, 22 bp, Artificial Sequence
  Synthetic
ttggacaacgccctgaaggttg

SEQ ID NO: 24382 - DNA, 19 bp, Artificial Sequence
  Synthetic
ggctgaaatcaggcggcgc

SEQ ID NO: 24383 - DNA, 19 bp, Artificial Sequence
  Synthetic
tcgccgtcgccgtcagcta

SEQ ID NO: 24384 - DNA, 20 bp, Artificial Sequence
  Synthetic
agggcaattcgacgatgttg

SEQ ID NO: 24385 - DNA, 19 bp, Artificial Sequence
  Synthetic
gaagcgaggtcaggcggca

SEQ ID NO: 24386 - DNA, 22 bp, Artificial Sequence
  Synthetic
agccgataatcaggcgtgttgc

SEQ ID NO: 24387 - DNA, 19 bp, Artificial Sequence
  Synthetic
ggcgatggcggacggtatg

SEQ ID NO: 24388 - DNA, 20 bp, Artificial Sequence
  Synthetic
gcacatttttcggggcgcat

SEQ ID NO: 24389 - DNA, 20 bp, Artificial Sequence
  Synthetic
gtgattccggctgttcgcgg

SEQ ID NO: 24390 - DNA, 19 bp, Artificial Sequence
  Synthetic
tgccgaagcagaagccgaa

SEQ ID NO: 24391 - DNA, 19 bp, Artificial Sequence
  Synthetic
gcctcctggccgccgatta

SEQ ID NO: 24392 - DNA, 19 bp, Artificial Sequence
  Synthetic
taaggcttcgctgcgccag

SEQ ID NO: 24393 - DNA, 19 bp, Artificial Sequence
  Synthetic
agcaggaagccgcacaagc

SEQ ID NO: 24394 - DNA, 18 bp, Artificial Sequence
  Synthetic
cggcgcgcgggtcaaaat

SEQ ID NO: 24395 - DNA, 22 bp, Artificial Sequence
  Synthetic
gctgcatgaggacgctctatga

SEQ ID NO: 24396 - DNA, 20 bp, Artificial Sequence
  Synthetic
gcaggacggtcaaggcacac

SEQ ID NO: 24397 - DNA, 22 bp, Artificial Sequence
  Synthetic
tgctgacattgtgctacgtcga

SEQ ID NO: 24398 - DNA, 21 bp, Artificial Sequence
  Synthetic
aagcatcaacggcttggaggc

SEQ ID NO: 24399 - DNA, 22 bp, Artificial Sequence
  Synthetic
tggtggacacgcagaaaaaccg

SEQ ID NO: 24400 - DNA, 19 bp, Artificial Sequence
  Synthetic
cgccgccctgccttgtgaa

SEQ ID NO: 24401 - DNA, 22 bp, Artificial Sequence
  Synthetic
acatcgggcatttcttcccagc

SEQ ID NO: 24402 - DNA, 19 bp, Artificial Sequence
  Synthetic
atacggctgcatcgcggtc

SEQ ID NO: 24403 - DNA, 19 bp, Artificial Sequence
  Synthetic
cggaacgcctcaaagccgc

SEQ ID NO: 24404 - DNA, 22 bp, Artificial Sequence
  Synthetic
gtcaaatcgtggtttgacgggc

SEQ ID NO: 24405 - DNA, 20 bp, Artificial Sequence
  Synthetic
aaaagccgggcgcaaatcag

SEQ ID NO: 24406 - DNA, 21 bp, Artificial Sequence
  Synthetic
ccaaatgggcgaattggggcg

SEQ ID NO: 24407 - DNA, 18 bp, Artificial Sequence
  Synthetic
gcggcggcggttctcaaa

SEQ ID NO: 24408 - DNA, 18 bp, Artificial Sequence
  Synthetic
gcgcggcacttcgaccaa

SEQ ID NO: 24409 - DNA, 19 bp, Artificial Sequence
  Synthetic
atgcgcgcggatgtttggc

SEQ ID NO: 24410 - DNA, 20 bp, Artificial Sequence
  Synthetic
attgtccgaccatacgcccg

SEQ ID NO: 24411 - DNA, 23 bp, Artificial Sequence
  Synthetic
gagttcctgttgtcgctatttgc

SEQ ID NO: 24412 - DNA, 21 bp, Artificial Sequence
  Synthetic
gcgaagagcggaaaatcaaac

SEQ ID NO: 24413 - DNA, 22 bp, Artificial Sequence
  Synthetic
tcccgggtagcagccttttttg

SEQ ID NO: 24414 - DNA, 20 bp, Artificial Sequence
  Synthetic
aaatgccccgatggtgcagg

SEQ ID NO: 24415 - DNA, 21 bp, Artificial Sequence
  Synthetic
ctgttcggcagccgtttcacc

SEQ ID NO: 24416 - DNA, 18 bp, Artificial Sequence
  Synthetic
gcgcgatgtccatccgca

SEQ ID NO: 24417 - DNA, 19 bp, Artificial Sequence
  Synthetic
cccgccccgatcccttcta

SEQ ID NO: 24418 - DNA, 19 bp, Artificial Sequence
  Synthetic
atttggccgatgcgctgca

SEQ ID NO: 24419 - DNA, 22 bp, Artificial Sequence
  Synthetic
gttggcgatgacttcgttggtg

SEQ ID NO: 24420 - DNA, 22 bp, Artificial Sequence
  Synthetic
cgcattaatgccgtttatgcca

SEQ ID NO: 24421 - DNA, 21 bp, Artificial Sequence
  Synthetic
tggttttgccgatgtctgccg

SEQ ID NO: 24422 - DNA, 19 bp, Artificial Sequence
  Synthetic
gcagtaccgcccagcagga

SEQ ID NO: 24423 - DNA, 19 bp, Artificial Sequence
  Synthetic
ggtggtgcagcctgccgaa

SEQ ID NO: 24424 - DNA, 20 bp, Artificial Sequence
  Synthetic
tgtggacgacgtaaccgcgc

SEQ ID NO: 24425 - DNA, 22 bp, Artificial Sequence
  Synthetic
tccgccaccaaaaacctgatga

SEQ ID NO: 24426 - DNA, 22 bp, Artificial Sequence
  Synthetic
atttggacttcaaacgcggcag

SEQ ID NO: 24427 - DNA, 19 bp, Artificial Sequence
  Synthetic
tcaaaccataggccgcgcc

SEQ ID NO: 24428 - DNA, 19 bp, Artificial Sequence
  Synthetic
cgaagctgacgttggcggc

SEQ ID NO: 24429 - DNA, 22 bp, Artificial Sequence
  Synthetic
ttgcccatgccgaccataatcg

SEQ ID NO: 24430 - DNA, 22 bp, Artificial Sequence
  Synthetic
tcttcgggattggattcgccgg

SEQ ID NO: 24431 - DNA, 20 bp, Artificial Sequence
  Synthetic
aatcgttgctgccggcatcg

SEQ ID NO: 24432 - DNA, 22 bp, Artificial Sequence
  Synthetic
agccgcagtggattaagaaggg

SEQ ID NO: 24433 - DNA, 18 bp, Artificial Sequence
  Synthetic
tgctccccgaacgcgctt

SEQ ID NO: 24434 - DNA, 21 bp, Artificial Sequence
  Synthetic
acataaagccggcggcaaaca

SEQ ID NO: 24435 - DNA, 20 bp, Artificial Sequence
  Synthetic
gagcaggcggtatggtcggc

SEQ ID NO: 24436 - DNA, 23 bp, Artificial Sequence
  Synthetic
tccagcatcacatactcgaaagt

SEQ ID NO: 24437 - DNA, 21 bp, Artificial Sequence
  Synthetic
acgaagttttggtcgattgcc

SEQ ID NO: 24438 - DNA, 19 bp, Artificial Sequence
  Synthetic
gcaagggcgggttcggtaa

SEQ ID NO: 24439 - DNA, 20 bp, Artificial Sequence
  Synthetic
ggttttggcggcaggcgtat

SEQ ID NO: 24440 - DNA, 22 bp, Artificial Sequence
  Synthetic
tttggcggctttggatatcgga

SEQ ID NO: 24441 - DNA, 20 bp, Artificial Sequence
  Synthetic
aatcctgcatggcgagggtg

SEQ ID NO: 24442 - DNA, 19 bp, Artificial Sequence
  Synthetic
ggcgagtacggcgacctgt

SEQ ID NO: 24443 - DNA, 20 bp, Artificial Sequence
  Synthetic
cgctttcatgcgcctgaccg

SEQ ID NO: 24444 - DNA, 18 bp, Artificial Sequence
  Synthetic
tccgccgcgccgctttta

SEQ ID NO: 24445 - DNA, 19 bp, Artificial Sequence
  Synthetic
ggcccggggcgcatgattt

SEQ ID NO: 24446 - DNA, 17 bp, Artificial Sequence
  Synthetic
ttgttcgaccgccgcgt

SEQ ID NO: 24447 - DNA, 21 bp, Artificial Sequence
  Synthetic
ggttcgatggcttcggatgcc

SEQ ID NO: 24448 - DNA, 19 bp, Artificial Sequence
  Synthetic
ggacgagccgttgacgagc

SEQ ID NO: 24449 - DNA, 19 bp, Artificial Sequence
  Synthetic
caagcgcgcgcaggacgta

SEQ ID NO: 24450 - DNA, 20 bp, Artificial Sequence
  Synthetic
gcttcgccgaagcagacggg

SEQ ID NO: 24451 - DNA, 25 bp, Artificial Sequence
  Synthetic
aatttgcaggttatcactatgtgca

SEQ ID NO: 24452 - DNA, 19 bp, Artificial Sequence
  Synthetic
ggcgaaaaaggcgctggcg

SEQ ID NO: 24453 - DNA, 21 bp, Artificial Sequence
  Synthetic
gacgttgtgcaaggtttccgg

SEQ ID NO: 24454 - DNA, 18 bp, Artificial Sequence
  Synthetic
cagtccgcacgccccaat

SEQ ID NO: 24455 - DNA, 21 bp, Artificial Sequence
  Synthetic
actttggtggcgacgacttcg

SEQ ID NO: 24456 - DNA, 19 bp, Artificial Sequence
  Synthetic
gcgcccgaaatccccgtca

SEQ ID NO: 24457 - DNA, 19 bp, Artificial Sequence
  Synthetic
cgccatcgaagcctgcacg

SEQ ID NO: 24458 - DNA, 22 bp, Artificial Sequence
  Synthetic
acctgaaagacctgttcggcac

SEQ ID NO: 24459 - DNA, 20 bp, Artificial Sequence
  Synthetic
gcattggccgtcataccgct

SEQ ID NO: 24460 - DNA, 21 bp, Artificial Sequence
  Synthetic
aaaaccgtgttggagctcggc

SEQ ID NO: 24461 - DNA, 22 bp, Artificial Sequence
  Synthetic
ccctgcgacggttttagacagg

SEQ ID NO: 24462 - DNA, 22 bp, Artificial Sequence
  Synthetic
cgatacgttcggggtggatgtt

SEQ ID NO: 24463 - DNA, 20 bp, Artificial Sequence
  Synthetic
ttgcgacgtatgcaccagct

SEQ ID NO: 24464 - DNA, 19 bp, Artificial Sequence
  Synthetic
gcgcaggcgatggtggtgt

SEQ ID NO: 24465 - DNA, 22 bp, Artificial Sequence
  Synthetic
ttgctggaatctaaatcggctg

SEQ ID NO: 24466 - DNA, 20 bp, Artificial Sequence
  Synthetic
tgtgaatgtttcgccgcccg

SEQ ID NO: 24467 - DNA, 20 bp, Artificial Sequence
  Synthetic
gggcgataatggcgcggaag

SEQ ID NO: 24468 - DNA, 20 bp, Artificial Sequence
  Synthetic
gcactttgccgccgatgttt

SEQ ID NO: 24469 - DNA, 18 bp, Artificial Sequence
  Synthetic
gcgaatcgccgcagacga

SEQ ID NO: 24470 - DNA, 22 bp, Artificial Sequence
  Synthetic
tattgcaggagttcggcagctt

SEQ ID NO: 24471 - DNA, 19 bp, Artificial Sequence
  Synthetic
tccgcaccgcaaatcaggg

SEQ ID NO: 24472 - DNA, 21 bp, Artificial Sequence
  Synthetic
acgaagcagtgctgatgctca

SEQ ID NO: 24473 - DNA, 19 bp, Artificial Sequence
  Synthetic
acagcctcgccaccaacgc

SEQ ID NO: 24474 - DNA, 20 bp, Artificial Sequence
  Synthetic
cgttggcgcggattttggcg

SEQ ID NO: 24475 - DNA, 20 bp, Artificial Sequence
  Synthetic
gccgtttcgacaaaggcggc

SEQ ID NO: 24476 - DNA, 20 bp, Artificial Sequence
  Synthetic
aaacgccagcgacgaagtgc

SEQ ID NO: 24477 - DNA, 19 bp, Artificial Sequence
  Synthetic
gcagcgaccaggaatggcg

SEQ ID NO: 24478 - DNA, 19 bp, Artificial Sequence
  Synthetic
agcccgttcatttgcgcca

SEQ ID NO: 24479 - DNA, 22 bp, Artificial Sequence
  Synthetic
gcctgaacaatcaaaatggcga

SEQ ID NO: 24480 - DNA, 22 bp, Artificial Sequence
  Synthetic
tatcggcttcactattggcagc

SEQ ID NO: 24481 - DNA, 20 bp, Artificial Sequence
  Synthetic
tgtacggcaaaggagacggc

SEQ ID NO: 24482 - DNA, 18 bp, Artificial Sequence
  Synthetic
cggcggcaagcgtctgaa

SEQ ID NO: 24483 - DNA, 22 bp, Artificial Sequence
  Synthetic
accgtattcattgcaggtgccg

SEQ ID NO: 24484 - DNA, 21 bp, Artificial Sequence
  Synthetic
aaagccagttggacttcgccc

SEQ ID NO: 24485 - DNA, 22 bp, Artificial Sequence
  Synthetic
acttctcggacgttccattcgg

SEQ ID NO: 24486 - DNA, 19 bp, Artificial Sequence
  Synthetic
gtcggtcagcagcgccact

SEQ ID NO: 24487 - DNA, 20 bp, Artificial Sequence
  Synthetic
acacgatggcgggtgcttcg

SEQ ID NO: 24488 - DNA, 22 bp, Artificial Sequence
  Synthetic
acagtaatgcgcttcagacggc

SEQ ID NO: 24489 - DNA, 21 bp, Artificial Sequence
  Synthetic
gcaactgcgcgacgtattgtc

SEQ ID NO: 24490 - DNA, 21 bp, Artificial Sequence
  Synthetic
cctgcttgccaacgtctttgc

SEQ ID NO: 24491 - DNA, 18 bp, Artificial Sequence
  Synthetic
gcaggattggcggggcat

SEQ ID NO: 24492 - DNA, 22 bp, Artificial Sequence
  Synthetic
ttcgccgtgggactttatccgg

SEQ ID NO: 24493 - DNA, 22 bp, Artificial Sequence
  Synthetic
tttctgcgtcggtcattggggt

SEQ ID NO: 24494 - DNA, 22 bp, Artificial Sequence
  Synthetic
ccccaaagccgaaatcgaaggc

SEQ ID NO: 24495 - DNA, 19 bp, Artificial Sequence
  Synthetic
ttcgcgggaatgacggtcg

SEQ ID NO: 24496 - DNA, 18 bp, Artificial Sequence
  Synthetic
ggtgcagcctgccttcgt

SEQ ID NO: 24497 - DNA, 21 bp, Artificial Sequence
  Synthetic
acgagttggtgtacttgccgg

SEQ ID NO: 24498 - DNA, 21 bp, Artificial Sequence
  Synthetic
tgtcgcggacaaaacgatggt

SEQ ID NO: 24499 - DNA, 20 bp, Artificial Sequence
  Synthetic
acgatttgcagttggcggcg

SEQ ID NO: 24500 - DNA, 18 bp, Artificial Sequence
  Synthetic
cggctgcgtttggcgact

SEQ ID NO: 24501 - DNA, 20 bp, Artificial Sequence
  Synthetic
ttttccccgagcgcggcatt

SEQ ID NO: 24502 - DNA, 22 bp, Artificial Sequence
  Synthetic
tcttcggcgatttcaaagccgt

SEQ ID NO: 24503 - DNA, 22 bp, Artificial Sequence
  Synthetic
gggcattgtttgaccggtttcc

SEQ ID NO: 24504 - DNA, 21 bp, Artificial Sequence
  Synthetic
gcttaagcccgcaacaaaaag

SEQ ID NO: 24505 - DNA, 20 bp, Artificial Sequence
  Synthetic
gaagtcggcggcgaattgct

SEQ ID NO: 24506 - DNA, 20 bp, Artificial Sequence
  Synthetic
ccaaatgcggatggtgcgga

SEQ ID NO: 24507 - DNA, 21 bp, Artificial Sequence
  Synthetic
agtgactgggttatcttcggc

SEQ ID NO: 24508 - DNA, 20 bp, Artificial Sequence
  Synthetic
gttgagaagcgttgacggct

SEQ ID NO: 24509 - DNA, 22 bp, Artificial Sequence
  Synthetic
tgaaagaatgtccaggcgattt

SEQ ID NO: 24510 - DNA, 21 bp, Artificial Sequence
  Synthetic
cccgatgttcgtgattacgga

SEQ ID NO: 24511 - DNA, 25 bp, Artificial Sequence
  Synthetic
aatatttcacgggcaataacttccc

SEQ ID NO: 24512 - DNA, 25 bp, Artificial Sequence
  Synthetic
cgattgaggcttcatcgtttttagg

SEQ ID NO: 24513 - DNA, 25 bp, Artificial Sequence
  Synthetic
tggaattctaggcagaatctcttgc

SEQ ID NO: 24514 - DNA, 22 bp, Artificial Sequence
  Synthetic
tggcacaaattccatatccgaa

SEQ ID NO: 24515 - DNA, 19 bp, Artificial Sequence
  Synthetic
ctgcgcgacatccacaccc

SEQ ID NO: 24516 - DNA, 19 bp, Artificial Sequence
  Synthetic
acatcgccaaaggacgcgg

SEQ ID NO: 24517 - DNA, 21 bp, Artificial Sequence
  Synthetic
ccgctttggatttggttgccg

SEQ ID NO: 24518 - DNA, 19 bp, Artificial Sequence
  Synthetic
gcatccgcttctccggcga

SEQ ID NO: 24519 - DNA, 21 bp, Artificial Sequence
  Synthetic
gttctgccgaccgctacttcc

SEQ ID NO: 24520 - DNA, 19 bp, Artificial Sequence
  Synthetic
gttcggtcaccgtcgggca

SEQ ID NO: 24521 - DNA, 18 bp, Artificial Sequence
  Synthetic
gttggatgcgcccgtcga

SEQ ID NO: 24522 - DNA, 21 bp, Artificial Sequence
  Synthetic
cgtggcaaacatccaacccga

SEQ ID NO: 24523 - DNA, 19 bp, Artificial Sequence
  Synthetic
gtctgtccctgcccggcaa

SEQ ID NO: 24524 - DNA, 22 bp, Artificial Sequence
  Synthetic
agcatcctcaaattcaccggcc

SEQ ID NO: 24525 - DNA, 18 bp, Artificial Sequence
  Synthetic
gccgacacgttggcgcaa

SEQ ID NO: 24526 - DNA, 19 bp, Artificial Sequence
  Synthetic
tccaagacccaggcgagca

SEQ ID NO: 24527 - DNA, 22 bp, Artificial Sequence
  Synthetic
atcgccaactcctgcgtcttcc

SEQ ID NO: 24528 - DNA, 19 bp, Artificial Sequence
  Synthetic
cccctgcccaaaacgaccg

SEQ ID NO: 24529 - DNA, 22 bp, Artificial Sequence
  Synthetic
gatcgccgaaatcgattcccca

SEQ ID NO: 24530 - DNA, 20 bp, Artificial Sequence
  Synthetic
cgcgtgccgccatatcttcg

SEQ ID NO: 24531 - DNA, 22 bp, Artificial Sequence
  Synthetic
gcgggatgattttttccgccaa

SEQ ID NO: 24532 - DNA, 21 bp, Artificial Sequence
  Synthetic
tcgttgagcaggcgcaatacg

SEQ ID NO: 24533 - DNA, 22 bp, Artificial Sequence
  Synthetic
aagcccaaaaagtcggactggt

SEQ ID NO: 24534 - DNA, 18 bp, Artificial Sequence
  Synthetic
tacttgccaccgcgccct

SEQ ID NO: 24535 - DNA, 22 bp, Artificial Sequence
  Synthetic
ctcgaggttgcaaaagtcgcct

SEQ ID NO: 24536 - DNA, 22 bp, Artificial Sequence
  Synthetic
ttgatgaccgcctgccagtagc

SEQ ID NO: 24537 - DNA, 21 bp, Artificial Sequence
  Synthetic
gatggatgcccgattcgtgcg

SEQ ID NO: 24538 - DNA, 22 bp, Artificial Sequence
  Synthetic
ttttcgcaatcgcattgaccgc

SEQ ID NO: 24539 - DNA, 19 bp, Artificial Sequence
  Synthetic
gccatcgttgccgccctga

SEQ ID NO: 24540 - DNA, 21 bp, Artificial Sequence
  Synthetic
gcaccggtctcttccgattgg

SEQ ID NO: 24541 - DNA, 22 bp, Artificial Sequence
  Synthetic
tgctttccaacatcctccccct

SEQ ID NO: 24542 - DNA, 20 bp, Artificial Sequence
  Synthetic
cgcacacgctgccatatcct

SEQ ID NO: 24543 - DNA, 20 bp, Artificial Sequence
  Synthetic
tgcccttcattgccgttggg

SEQ ID NO: 24544 - DNA, 22 bp, Artificial Sequence
  Synthetic
gcagaaagtcggcgaataccgg

SEQ ID NO: 24545 - DNA, 22 bp, Artificial Sequence
  Synthetic
tccgcctgtaccgaaatcaacg

SEQ ID NO: 24546 - DNA, 20 bp, Artificial Sequence
  Synthetic
cgaaaccgacgctcgcgtat

SEQ ID NO: 24547 - DNA, 24 bp, Artificial Sequence
  Synthetic
ttttccagacggcattttttgttt

SEQ ID NO: 24548 - DNA, 19 bp, Artificial Sequence
  Synthetic
catccgcacccagttgcgc

SEQ ID NO: 24549 - DNA, 22 bp, Artificial Sequence
  Synthetic
gtcagacatcgggaaatgcttt

SEQ ID NO: 24550 - DNA, 20 bp, Artificial Sequence
  Synthetic
tgcaaaccgcgccgtatcag

SEQ ID NO: 24551 - DNA, 19 bp, Artificial Sequence
  Synthetic
gcgaaccggcgcaagaact

SEQ ID NO: 24552 - DNA, 22 bp, Artificial Sequence
  Synthetic
gttgccaagcctaagccgttgc

SEQ ID NO: 24553 - DNA, 20 bp, Artificial Sequence
  Synthetic
tggcggcttcgactgtttcg

SEQ ID NO: 24554 - DNA, 22 bp, Artificial Sequence
  Synthetic
agcatccccatcatccacaacc

SEQ ID NO: 24555 - DNA, 21 bp, Artificial Sequence
  Synthetic
tcgcttcgatcacttcgggac

SEQ ID NO: 24556 - DNA, 19 bp, Artificial Sequence
  Synthetic
ggattgccggcgccgatgt

SEQ ID NO: 24557 - DNA, 18 bp, Artificial Sequence
  Synthetic
cgcgccgtccaagccttt

SEQ ID NO: 24558 - DNA, 21 bp, Artificial Sequence
  Synthetic
ggcttggatttgccggactgt

SEQ ID NO: 24559 - DNA, 19 bp, Artificial Sequence
  Synthetic
cgagggtgcgctccatctg

SEQ ID NO: 24560 - DNA, 20 bp, Artificial Sequence
  Synthetic
gtagcggtcgaagtcgtgcg

SEQ ID NO: 24561 - DNA, 21 bp, Artificial Sequence
  Synthetic
cgggggaagtcggtcaggtag

SEQ ID NO: 24562 - DNA, 22 bp, Artificial Sequence
  Synthetic
tttgaccagcagcgaagacagg

SEQ ID NO: 24563 - DNA, 20 bp, Artificial Sequence
  Synthetic
cacggtccgcgtgatttggt

SEQ ID NO: 24564 - DNA, 25 bp, Artificial Sequence
  Synthetic
acaggctggttactttgtttttttg

SEQ ID NO: 24565 - DNA, 21 bp, Artificial Sequence
  Synthetic
ggtcggtatgcaatgcgtggt

SEQ ID NO: 24566 - DNA, 21 bp, Artificial Sequence
  Synthetic
ccccgatagccgaaaagcagc

SEQ ID NO: 24567 - DNA, 19 bp, Artificial Sequence
  Synthetic
ggacagcccgaacacaccc

SEQ ID NO: 24568 - DNA, 19 bp, Artificial Sequence
  Synthetic
ttgccggaacatggctgct

SEQ ID NO: 24569 - DNA, 18 bp, Artificial Sequence
  Synthetic
tgggcaacgaaggcgacg

SEQ ID NO: 24570 - DNA, 21 bp, Artificial Sequence
  Synthetic
ctacaccctctccgtcgtccc

SEQ ID NO: 24571 - DNA, 19 bp, Artificial Sequence
  Synthetic
atatgtgccgtgccgcgct

SEQ ID NO: 24572 - DNA, 21 bp, Artificial Sequence
  Synthetic
aaaggggcgaagtttacaggc

SEQ ID NO: 24573 - DNA, 20 bp, Artificial Sequence
  Synthetic
ttggtttcgccgctcatggc

SEQ ID NO: 24574 - DNA, 18 bp, Artificial Sequence
  Synthetic
cgctcggcggcatccaaa

SEQ ID NO: 24575 - DNA, 19 bp, Artificial Sequence
  Synthetic
tcacaggcacacgtctgcg

SEQ ID NO: 24576 - DNA, 19 bp, Artificial Sequence
  Synthetic
cgtgggcttacctgccgct

SEQ ID NO: 24577 - DNA, 22 bp, Artificial Sequence
  Synthetic
ttcagacggcattttcggcaca

SEQ ID NO: 24578 - DNA, 22 bp, Artificial Sequence
  Synthetic
tacctcgccaaaaaactcggca

SEQ ID NO: 24579 - DNA, 22 bp, Artificial Sequence
  Synthetic
ggtcggtatggatgccttcctg

SEQ ID NO: 24580 - DNA, 22 bp, Artificial Sequence
  Synthetic
accaacaacagcaccttcctcg

SEQ ID NO: 24581 - DNA, 22 bp, Artificial Sequence
  Synthetic
atctggcgaaggaaatgcacgt

SEQ ID NO: 24582 - DNA, 22 bp, Artificial Sequence
  Synthetic
gcttgcccgattttgaaagccg

SEQ ID NO: 24583 - DNA, 19 bp, Artificial Sequence
  Synthetic
ccgcccgcccgattgtcaa

SEQ ID NO: 24584 - DNA, 22 bp, Artificial Sequence
  Synthetic
tcgagtacgccggtgattttgt

SEQ ID NO: 24585 - DNA, 21 bp, Artificial Sequence
  Synthetic
aattcgactgctttttcggcg

SEQ ID NO: 24586 - DNA, 22 bp, Artificial Sequence
  Synthetic
tccaacagttttgccacaccgt

SEQ ID NO: 24587 - DNA, 22 bp, Artificial Sequence
  Synthetic
agcccagtatgacaatttgctg

SEQ ID NO: 24588 - DNA, 20 bp, Artificial Sequence
  Synthetic
tgcccaagcacccaaatcat

SEQ ID NO: 24589 - DNA, 20 bp, Artificial Sequence
  Synthetic
cacgccaatgacgcgcaatc

SEQ ID NO: 24590 - DNA, 21 bp, Artificial Sequence
  Synthetic
gcaaaattccgcgcattaagc

SEQ ID NO: 24591 - DNA, 22 bp, Artificial Sequence
  Synthetic
gcctataccgaaaaatggcgcg

SEQ ID NO: 24592 - DNA, 20 bp, Artificial Sequence
  Synthetic
gtttgatgccgttttgtgcg

SEQ ID NO: 24593 - DNA, 20 bp, Artificial Sequence
  Synthetic
gcaaacaacaacactcgggc

SEQ ID NO: 24594 - DNA, 25 bp, Artificial Sequence
  Synthetic
cgaaatttttcatggtaaacgagcg

SEQ ID NO: 24595 - DNA, 21 bp, Artificial Sequence
  Synthetic
gtccgaagacggcggcttcac

SEQ ID NO: 24596 - DNA, 21 bp, Artificial Sequence
  Synthetic
ggtacgcaaccgaacagctct

SEQ ID NO: 24597 - DNA, 25 bp, Artificial Sequence
  Synthetic
accgttcaaataaatcgctctacat

SEQ ID NO: 24598 - DNA, 21 bp, Artificial Sequence
  Synthetic
ctgggcaaactggaaaaacgg

SEQ ID NO: 24599 - DNA, 18 bp, Artificial Sequence
  Synthetic
cggcaaaggcgtgcacgt

SEQ ID NO: 24600 - DNA, 19 bp, Artificial Sequence
  Synthetic
cgcctgcgcgttgtgaatc

SEQ ID NO: 24601 - DNA, 23 bp, Artificial Sequence
  Synthetic
aaacggtttttctttggcttcgg

SEQ ID NO: 24602 - DNA, 22 bp, Artificial Sequence
  Synthetic
gcggctgccgtacaatcaaaat

SEQ ID NO: 24603 - DNA, 19 bp, Artificial Sequence
  Synthetic
gcatcagccttgccacgct

SEQ ID NO: 24604 - DNA, 22 bp, Artificial Sequence
  Synthetic
caggcagtgtcggtcatcctca

SEQ ID NO: 24605 - DNA, 19 bp, Artificial Sequence
  Synthetic
tccaggcgtccccagttgt

SEQ ID NO: 24606 - DNA, 18 bp, Artificial Sequence
  Synthetic
acgttcgacggcggcttg

SEQ ID NO: 24607 - DNA, 21 bp, Artificial Sequence
  Synthetic
ttcagcttcggatggaaaagg

SEQ ID NO: 24608 - DNA, 20 bp, Artificial Sequence
  Synthetic
catacggcgcatcgttggcg

SEQ ID NO: 24609 - DNA, 20 bp, Artificial Sequence
  Synthetic
cccgcctttccgacaacgag

SEQ ID NO: 24610 - DNA, 21 bp, Artificial Sequence
  Synthetic
tgtggcgaaaagctccatcgg

SEQ ID NO: 24611 - DNA, 19 bp, Artificial Sequence
  Synthetic
gggctgctggatgcgggta

SEQ ID NO: 24612 - DNA, 19 bp, Artificial Sequence
  Synthetic
cgcccgccggtctgaaaca

SEQ ID NO: 24613 - DNA, 21 bp, Artificial Sequence
  Synthetic
acggtggaacgtgggaacagg

SEQ ID NO: 24614 - DNA, 19 bp, Artificial Sequence
  Synthetic
aagcaacagcatccgccgc

SEQ ID NO: 24615 - DNA, 20 bp, Artificial Sequence
  Synthetic
tccccgataccgatgccgtc

SEQ ID NO: 24616 - DNA, 20 bp, Artificial Sequence
  Synthetic
aaacggttgcccaaaccccg

SEQ ID NO: 24617 - DNA, 22 bp, Artificial Sequence
  Synthetic
tctgctcgccaaagtcaaagcc

SEQ ID NO: 24618 - DNA, 22 bp, Artificial Sequence
  Synthetic
aacatctggcgcaaaaaaccgg

SEQ ID NO: 24619 - DNA, 20 bp, Artificial Sequence
  Synthetic
cgaagtgttggacgcaccgc

SEQ ID NO: 24620 - DNA, 20 bp, Artificial Sequence
  Synthetic
ttttccacgcgtttgcccgg

SEQ ID NO: 24621 - DNA, 20 bp, Artificial Sequence
  Synthetic
cgacatccacggcaaagcgc

SEQ ID NO: 24622 - DNA, 20 bp, Artificial Sequence
  Synthetic
attcacacgcaaacccgcct

SEQ ID NO: 24623 - DNA, 22 bp, Artificial Sequence
  Synthetic
agtgtccgccaacatattgcgc

SEQ ID NO: 24624 - DNA, 19 bp, Artificial Sequence
  Synthetic
ccccgcccgtttcgccaaa

SEQ ID NO: 24625 - DNA, 19 bp, Artificial Sequence
  Synthetic
accattgccgtctgcgaca

SEQ ID NO: 24626 - DNA, 21 bp, Artificial Sequence
  Synthetic
cgaaaccttaaaccccggccc

SEQ ID NO: 24627 - DNA, 22 bp, Artificial Sequence
  Synthetic
tgtcaaaacgctccttcaggcg

SEQ ID NO: 24628 - DNA, 18 bp, Artificial Sequence
  Synthetic
gcatccgcgccgaagagt

SEQ ID NO: 24629 - DNA, 19 bp, Artificial Sequence
  Synthetic
catctgcgccttgtccggc

SEQ ID NO: 24630 - DNA, 21 bp, Artificial Sequence
  Synthetic
cctgcggattcaataccggca

SEQ ID NO: 24631 - DNA, 19 bp, Artificial Sequence
  Synthetic
cggccgattccgccaaacc

SEQ ID NO: 24632 - DNA, 20 bp, Artificial Sequence
  Synthetic
cccattccccgtttgccagc

SEQ ID NO: 24633 - DNA, 21 bp, Artificial Sequence
  Synthetic
gctgggcacgtcttccaaagc

SEQ ID NO: 24634 - DNA, 18 bp, Artificial Sequence
  Synthetic
gccagttcgcgcgtggtt

SEQ ID NO: 24635 - DNA, 18 bp, Artificial Sequence
  Synthetic
gcctttggcggctttgcg

SEQ ID NO: 24636 - DNA, 18 bp, Artificial Sequence
  Synthetic
gtgtgcggcgcggatgta

SEQ ID NO: 24637 - DNA, 19 bp, Artificial Sequence
  Synthetic
gcgtttttccagcgcgtcg

SEQ ID NO: 24638 - DNA, 21 bp, Artificial Sequence
  Synthetic
gatcctacacgccgcgaacct

SEQ ID NO: 24639 - DNA, 22 bp, Artificial Sequence
  Synthetic
gactcggaagacgtcatccggc

SEQ ID NO: 24640 - DNA, 22 bp, Artificial Sequence
  Synthetic
aacttgaagcggcaatgagggc

SEQ ID NO: 24641 - DNA, 19 bp, Artificial Sequence
  Synthetic
cggctgtgcgtgaggtgct

SEQ ID NO: 24642 - DNA, 20 bp, Artificial Sequence
  Synthetic
tcaacgcctttcaccagctc

SEQ ID NO: 24643 - DNA, 19 bp, Artificial Sequence
  Synthetic
gtccaccaccaagagcgcg

SEQ ID NO: 24644 - DNA, 20 bp, Artificial Sequence
  Synthetic
ggcgagcgtttgcggatgaa

SEQ ID NO: 24645 - DNA, 21 bp, Artificial Sequence
  Synthetic
atgtgtgccgaaaacaaccgc

SEQ ID NO: 24646 - DNA, 19 bp, Artificial Sequence
  Synthetic
cttccgtcctcgccgatcc

SEQ ID NO: 24647 - DNA, 19 bp, Artificial Sequence
  Synthetic
cgaagccctgcgcctcgaa

SEQ ID NO: 24648 - DNA, 19 bp, Artificial Sequence
  Synthetic
tttgcagacgaccgcgtgc

SEQ ID NO: 24649 - DNA, 20 bp, Artificial Sequence
  Synthetic
aaatcctgtttgccgccgcc

SEQ ID NO: 24650 - DNA, 18 bp, Artificial Sequence
  Synthetic
tttggccttggctgccga

SEQ ID NO: 24651 - DNA, 19 bp, Artificial Sequence
  Synthetic
cgctacggcagccgcgaaa

SEQ ID NO: 24652 - DNA, 21 bp, Artificial Sequence
  Synthetic
tgccggtatggtttcaagacg

SEQ ID NO: 24653 - DNA, 22 bp, Artificial Sequence
  Synthetic
cctctcgtactaggagcagccc

SEQ ID NO: 24654 - DNA, 19 bp, Artificial Sequence
  Synthetic
gcggggccctcgaaaacct

SEQ ID NO: 24655 - DNA, 22 bp, Artificial Sequence
  Synthetic
agcacaaaaatcttgccgtcgc

SEQ ID NO: 24656 - DNA, 19 bp, Artificial Sequence
  Synthetic
gacgggcaaaggttcgcgt

SEQ ID NO: 24657 - DNA, 21 bp, Artificial Sequence
  Synthetic
atctccatccacgacgtgggc

SEQ ID NO: 24658 - DNA, 21 bp, Artificial Sequence
  Synthetic
cggcaaataccaaacccccgt

SEQ ID NO: 24659 - DNA, 19 bp, Artificial Sequence
  Synthetic
aatggccgccgccttcacc

SEQ ID NO: 24660 - DNA, 19 bp, Artificial Sequence
  Synthetic
ccctgccttgcgcgaccaa

SEQ ID NO: 24661 - DNA, 21 bp, Artificial Sequence
  Synthetic
tctcgctcgcgtccaaatctg

SEQ ID NO: 24662 - DNA, 20 bp, Artificial Sequence
  Synthetic
ccgtgggtatgtcgctcggc

SEQ ID NO: 24663 - DNA, 20 bp, Artificial Sequence
  Synthetic
caccgtcggtgcagtcttca

SEQ ID NO: 24664 - DNA, 19 bp, Artificial Sequence
  Synthetic
ctacgaagcccccgtcgga

SEQ ID NO: 24665 - DNA, 19 bp, Artificial Sequence
  Synthetic
cgttcaggctgcccgaaca

SEQ ID NO: 24666 - DNA, 22 bp, Artificial Sequence
  Synthetic
agaacaaatcaaacgcgcccgc

SEQ ID NO: 24667 - DNA, 19 bp, Artificial Sequence
  Synthetic
cgcaccccgtgggcacaat

SEQ ID NO: 24668 - DNA, 24 bp, Artificial Sequence
  Synthetic
catgcagatatgcagattctgaca

SEQ ID NO: 24669 - DNA, 21 bp, Artificial Sequence
  Synthetic
tatcgagttgcgccaccaacc

SEQ ID NO: 24670 - DNA, 22 bp, Artificial Sequence
  Synthetic
tcaaccaatccgtttacgccca

SEQ ID NO: 24671 - DNA, 22 bp, Artificial Sequence
  Synthetic
ttttggacgaaccctccatcgg

SEQ ID NO: 24672 - DNA, 22 bp, Artificial Sequence
  Synthetic
gcgacggcgtgattaaagtcga

SEQ ID NO: 24673 - DNA, 19 bp, Artificial Sequence
  Synthetic
acgccgtacgccgaaacag

SEQ ID NO: 24674 - DNA, 18 bp, Artificial Sequence
  Synthetic
aacgcatcgtgccgccca

SEQ ID NO: 24675 - DNA, 22 bp, Artificial Sequence
  Synthetic
agctgcaactgctcggtaatga

SEQ ID NO: 24676 - DNA, 19 bp, Artificial Sequence
  Synthetic
ccgccagattgccgcgtgt

SEQ ID NO: 24677 - DNA, 21 bp, Artificial Sequence
  Synthetic
tggggtctttttcggtcaggc

SEQ ID NO: 24678 - DNA, 22 bp, Artificial Sequence
  Synthetic
tgtccgtcgggattttggtgtc

SEQ ID NO: 24679 - DNA, 20 bp, Artificial Sequence
  Synthetic
atgaccccgcttttgctggt

SEQ ID NO: 24680 - DNA, 20 bp, Artificial Sequence
  Synthetic
cttggtcgagctgcttgccc

SEQ ID NO: 24681 - DNA, 20 bp, Artificial Sequence
  Synthetic
caggttcaggcttggtcgct

SEQ ID NO: 24682 - DNA, 22 bp, Artificial Sequence
  Synthetic
cgcgaaagagttgtccgacgaa

SEQ ID NO: 24683 - DNA, 21 bp, Artificial Sequence
  Synthetic
ctgcggaaaatgcggcaaagc

SEQ ID NO: 24684 - DNA, 19 bp, Artificial Sequence
  Synthetic
ggcacgacacccgccgatt

SEQ ID NO: 24685 - DNA, 22 bp, Artificial Sequence
  Synthetic
ctcgatgcgatggaaagccccg

SEQ ID NO: 24686 - DNA, 20 bp, Artificial Sequence
  Synthetic
ccgtcctcgaagccgtcagg

SEQ ID NO: 24687 - DNA, 22 bp, Artificial Sequence
  Synthetic
cactcggcgacaaaaaaggcat

SEQ ID NO: 24688 - DNA, 20 bp, Artificial Sequence
  Synthetic
gcgtatacaaccgctcgccc

SEQ ID NO: 24689 - DNA, 20 bp, Artificial Sequence
  Synthetic
tcggttttctctgtgcggac

SEQ ID NO: 24690 - DNA, 18 bp, Artificial Sequence
  Synthetic
caaccggcgtggcgatgt

SEQ ID NO: 24691 - DNA, 18 bp, Artificial Sequence
  Synthetic
cgcggccaaactcgttgc

SEQ ID NO: 24692 - DNA, 21 bp, Artificial Sequence
  Synthetic
atgagcgtggtcaaaggtcgc

SEQ ID NO: 24693 - DNA, 21 bp, Artificial Sequence
  Synthetic
tggcaatggcaggctttgaga

SEQ ID NO: 24694 - DNA, 22 bp, Artificial Sequence
  Synthetic
cttgcccatgaaaaccacgtcg

SEQ ID NO: 24695 - DNA, 19 bp, Artificial Sequence
  Synthetic
gacaagcccccgcctacca

SEQ ID NO: 24696 - DNA, 21 bp, Artificial Sequence
  Synthetic
aaccgtctgcaccgtaaatgt

SEQ ID NO: 24697 - DNA, 20 bp, Artificial Sequence
  Synthetic
tttccagtgcggcgagatac

SEQ ID NO: 24698 - DNA, 19 bp, Artificial Sequence
  Synthetic
acatccgccgtggtgttgc

SEQ ID NO: 24699 - DNA, 20 bp, Artificial Sequence
  Synthetic
ttcatgcagtggcgttagct

SEQ ID NO: 24700 - DNA, 20 bp, Artificial Sequence
  Synthetic
gtgcctctccaaacgccacg

SEQ ID NO: 24701 - DNA, 20 bp, Artificial Sequence
  Synthetic
gtttgtcgtcaaaccgcgcg

SEQ ID NO: 24702 - DNA, 20 bp, Artificial Sequence
  Synthetic
gaggcggaggtagagccgga

SEQ ID NO: 24703 - DNA, 18 bp, Artificial Sequence
  Synthetic
ttgccgccagttgcagcg

SEQ ID NO: 24704 - DNA, 22 bp, Artificial Sequence
  Synthetic
cgcatcgacgttgtcctttggt

SEQ ID NO: 24705 - DNA, 16 bp, Artificial Sequence
  Synthetic
tgccgcacgcgcagaa

SEQ ID NO: 24706 - DNA, 22 bp, Artificial Sequence
  Synthetic
caagccgaaacacgagcgaaac

SEQ ID NO: 24707 - DNA, 18 bp, Artificial Sequence
  Synthetic
cgtgtccgcgcgtttgca

SEQ ID NO: 24708 - DNA, 21 bp, Artificial Sequence
  Synthetic
acggtgcgtttctgacttcgc

SEQ ID NO: 24709 - DNA, 20 bp, Artificial Sequence
  Synthetic
ccgtcctgccactcggtctc

SEQ ID NO: 24710 - DNA, 19 bp, Artificial Sequence
  Synthetic
ctggtccgcatacagccgc

SEQ ID NO: 24711 - DNA, 20 bp, Artificial Sequence
  Synthetic
cgcgggcttggcgttatacg

SEQ ID NO: 24712 - DNA, 22 bp, Artificial Sequence
  Synthetic
accgcaaaagacgacaaggtgt

SEQ ID NO: 24713 - DNA, 16 bp, Artificial Sequence
  Synthetic
aaggcagccgcgcgat

SEQ ID NO: 24714 - DNA, 20 bp, Artificial Sequence
  Synthetic
cgggcctataccgttgccgc

SEQ ID NO: 24715 - DNA, 21 bp, Artificial Sequence
  Synthetic
gcccactgcagatagggacca

SEQ ID NO: 24716 - DNA, 21 bp, Artificial Sequence
  Synthetic
aaaccataaaacgggttgcct

SEQ ID NO: 24717 - DNA, 21 bp, Artificial Sequence
  Synthetic
cagatcgaccgcttcctcgtg

SEQ ID NO: 24718 - DNA, 22 bp, Artificial Sequence
  Synthetic
acaggcgaacaccaccaactac

SEQ ID NO: 24719 - DNA, 21 bp, Artificial Sequence
  Synthetic
cggtagattgcccggaatgcg

SEQ ID NO: 24720 - DNA, 19 bp, Artificial Sequence
  Synthetic
ccgccgacggccgaaaagt

SEQ ID NO: 24721 - DNA, 20 bp, Artificial Sequence
  Synthetic
cgtatcgaccaaagcggcgt

SEQ ID NO: 24722 - DNA, 22 bp, Artificial Sequence
  Synthetic
gcattcaaccgtttggacagca

SEQ ID NO: 24723 - DNA, 22 bp, Artificial Sequence
  Synthetic
cgactttgtcggcaacaccttg

SEQ ID NO: 24724 - DNA, 19 bp, Artificial Sequence
  Synthetic
gccgaagcgatggcgatgg

SEQ ID NO: 24725 - DNA, 20 bp, Artificial Sequence
  Synthetic
caagtgccgggcaaacctcc

SEQ ID NO: 24726 - DNA, 22 bp, Artificial Sequence
  Synthetic
cgaaagcaaagccgaactcgac

SEQ ID NO: 24727 - DNA, 20 bp, Artificial Sequence
  Synthetic
agaagccgtcttcccgctgc

SEQ ID NO: 24728 - DNA, 19 bp, Artificial Sequence
  Synthetic
tctgccttcgcttctgccg

SEQ ID NO: 24729 - DNA, 18 bp, Artificial Sequence
  Synthetic
gagcgcggggttgccttt

SEQ ID NO: 24730 - DNA, 20 bp, Artificial Sequence
  Synthetic
ctttgtcgcgggcgagtttg

SEQ ID NO: 24731 - DNA, 20 bp, Artificial Sequence
  Synthetic
tcgtcttcgcctttgaccgg

SEQ ID NO: 24732 - DNA, 22 bp, Artificial Sequence
  Synthetic
cttggcagatatgtgtcgggct

SEQ ID NO: 24733 - DNA, 22 bp, Artificial Sequence
  Synthetic
tcttcagccgccttcaaatcca

SEQ ID NO: 24734 - DNA, 19 bp, Artificial Sequence
  Synthetic
ggaggtgtggatgcggcct

SEQ ID NO: 24735 - DNA, 19 bp, Artificial Sequence
  Synthetic
ggaagctgtccgagcccgt

SEQ ID NO: 24736 - DNA, 19 bp, Artificial Sequence
  Synthetic
ggcaagtgcgccgaaatgg

SEQ ID NO: 24737 - DNA, 21 bp, Artificial Sequence
  Synthetic
gtcgccttcacatcgtgcacg

SEQ ID NO: 24738 - DNA, 19 bp, Artificial Sequence
  Synthetic
ggcaacgcggctgtcttcc

SEQ ID NO: 24739 - DNA, 20 bp, Artificial Sequence
  Synthetic
tttcaggcaggtcgggctgt

SEQ ID NO: 24740 - DNA, 21 bp, Artificial Sequence
  Synthetic
cgattgcgatatacccggcgg

SEQ ID NO: 24741 - DNA, 19 bp, Artificial Sequence
  Synthetic
cgtcgcataccaaacgcgc

SEQ ID NO: 24742 - DNA, 20 bp, Artificial Sequence
  Synthetic
gaagcctgccgcgagattct

SEQ ID NO: 24743 - DNA, 22 bp, Artificial Sequence
  Synthetic
acgcaccacaacgacagtatgg

SEQ ID NO: 24744 - DNA, 20 bp, Artificial Sequence
  Synthetic
ttgggacgggcagaacgacc

SEQ ID NO: 24745 - DNA, 21 bp, Artificial Sequence
  Synthetic
ccgaaatgcctgcccataccg

SEQ ID NO: 24746 - DNA, 20 bp, Artificial Sequence
  Synthetic
gtttgcctgtttgagcgcgt

SEQ ID NO: 24747 - DNA, 20 bp, Artificial Sequence
  Synthetic
gacattgccgccgctcaagc

SEQ ID NO: 24748 - DNA, 21 bp, Artificial Sequence
  Synthetic
gtaaccgccgcccaattcgtc

SEQ ID NO: 24749 - DNA, 21 bp, Artificial Sequence
  Synthetic
gcaaacgaaatgccttgcgcc

SEQ ID NO: 24750 - DNA, 20 bp, Artificial Sequence
  Synthetic
ggcaggaacgaagtcggcag

SEQ ID NO: 24751 - DNA, 20 bp, Artificial Sequence
  Synthetic
cgatttgctccgcgtgttgc

SEQ ID NO: 24752 - DNA, 21 bp, Artificial Sequence
  Synthetic
caaccaggtcgaatacggcgg

SEQ ID NO: 24753 - DNA, 19 bp, Artificial Sequence
  Synthetic
cggatgtggcggatgacgg

SEQ ID NO: 24754 - DNA, 19 bp, Artificial Sequence
  Synthetic
ctgccgccatatccgggca

SEQ ID NO: 24755 - DNA, 20 bp, Artificial Sequence
  Synthetic
aaacagctgatccgtgccgc

SEQ ID NO: 24756 - DNA, 22 bp, Artificial Sequence
  Synthetic
caatgcatcccgctcggattga

SEQ ID NO: 24757 - DNA, 21 bp, Artificial Sequence
  Synthetic
tacctgcccaagcaatacccg

SEQ ID NO: 24758 - DNA, 20 bp, Artificial Sequence
  Synthetic
cgcccacacgtgccaaatca

SEQ ID NO: 24759 - DNA, 20 bp, Artificial Sequence
  Synthetic
tcgccccttatgacctcgac

SEQ ID NO: 24760 - DNA, 20 bp, Artificial Sequence
  Synthetic
gacaccgtgcgcgaagaagg

SEQ ID NO: 24761 - DNA, 19 bp, Artificial Sequence
  Synthetic
cgctcgcccgccacaaact

SEQ ID NO: 24762 - DNA, 20 bp, Artificial Sequence
  Synthetic
ggtacgacttcgatgccgcg

SEQ ID NO: 24763 - DNA, 22 bp, Artificial Sequence
  Synthetic
aaccttggtcgcccataacgga

SEQ ID NO: 24764 - DNA, 20 bp, Artificial Sequence
  Synthetic
ggccgaccgacagtttccag

SEQ ID NO: 24765 - DNA, 21 bp, Artificial Sequence
  Synthetic
ggcaagggcgaggatgatgag

SEQ ID NO: 24766 - DNA, 19 bp, Artificial Sequence
  Synthetic
ctctgcctgccctgctgct

SEQ ID NO: 24767 - DNA, 22 bp, Artificial Sequence
  Synthetic
cgttaacaccgagcttgtcgca

SEQ ID NO: 24768 - DNA, 20 bp, Artificial Sequence
  Synthetic
cgaggttcgcaccgacttcg

SEQ ID NO: 24769 - DNA, 20 bp, Artificial Sequence
  Synthetic
aagccgcacaagcctttccc

SEQ ID NO: 24770 - DNA, 21 bp, Artificial Sequence
  Synthetic
tgccgcgttgtcgtgaaaagc

SEQ ID NO: 24771 - DNA, 22 bp, Artificial Sequence
  Synthetic
tcgtctttcaactgcgcttcca

SEQ ID NO: 24772 - DNA, 21 bp, Artificial Sequence
  Synthetic
gcgtcgtggtttcagacgtgc

SEQ ID NO: 24773 - DNA, 19 bp, Artificial Sequence
  Synthetic
ggacaggcgcggcgaaact

SEQ ID NO: 24774 - DNA, 19 bp, Artificial Sequence
  Synthetic
gcaccatcagcatcggggc

SEQ ID NO: 24775 - DNA, 19 bp, Artificial Sequence
  Synthetic
cggcacgtcggcaaaacgg

SEQ ID NO: 24776 - DNA, 19 bp, Artificial Sequence
  Synthetic
gctgtccgcccgagagttc

SEQ ID NO: 24777 - DNA, 20 bp, Artificial Sequence
  Synthetic
cgcgacacgcctttttcctg

SEQ ID NO: 24778 - DNA, 19 bp, Artificial Sequence
  Synthetic
ggcggggttgaggctgaac

SEQ ID NO: 24779 - DNA, 20 bp, Artificial Sequence
  Synthetic
cctcctgctgctgcaacagg

SEQ ID NO: 24780 - DNA, 19 bp, Artificial Sequence
  Synthetic
actgtgccagttcgcgctc

SEQ ID NO: 24781 - DNA, 19 bp, Artificial Sequence
  Synthetic
ggcaaaggtgcgggcggta

SEQ ID NO: 24782 - DNA, 22 bp, Artificial Sequence
  Synthetic
tgcgacaggatttgcgacaacg

SEQ ID NO: 24783 - DNA, 20 bp, Artificial Sequence
  Synthetic
tcctgctgggtttggaaggc

SEQ ID NO: 24784 - DNA, 19 bp, Artificial Sequence
  Synthetic
ctttcggcgcgggggtttc

SEQ ID NO: 24785 - DNA, 21 bp, Artificial Sequence
  Synthetic
ataccggcctgtccgtgaccc

SEQ ID NO: 24786 - DNA, 22 bp, Artificial Sequence
  Synthetic
ggcttcgtacagcttatcgcct

SEQ ID NO: 24787 - DNA, 20 bp, Artificial Sequence
  Synthetic
ccgacaatggcaagggcgtt

SEQ ID NO: 24788 - DNA, 21 bp, Artificial Sequence
  Synthetic
ccgccgtacaacgaatggctc

SEQ ID NO: 24789 - DNA, 19 bp, Artificial Sequence
  Synthetic
ccctcgccgctgattgacg

SEQ ID NO: 24790 - DNA, 22 bp, Artificial Sequence
  Synthetic
acggcgaaatcgaatgggtcaa

SEQ ID NO: 24791 - DNA, 18 bp, Artificial Sequence
  Synthetic
gcggcggatgctgttgct

SEQ ID NO: 24792 - DNA, 19 bp, Artificial Sequence
  Synthetic
cgccgtcgcggaatgggaa

SEQ ID NO: 24793 - DNA, 20 bp, Artificial Sequence
  Synthetic
agcggcacttccaatacgcg

SEQ ID NO: 24794 - DNA, 20 bp, Artificial Sequence
  Synthetic
aggcgagtttgtaggcggtc

SEQ ID NO: 24795 - DNA, 18 bp, Artificial Sequence
  Synthetic
aacgcaccatggtcgggc

SEQ ID NO: 24796 - DNA, 18 bp, Artificial Sequence
  Synthetic
agaaacaccgccgctccg

SEQ ID NO: 24797 - DNA, 20 bp, Artificial Sequence
  Synthetic
cgtccacacgcccaacatcg

SEQ ID NO: 24798 - DNA, 19 bp, Artificial Sequence
  Synthetic
gcgcggtaagccacgccta

SEQ ID NO: 24799 - DNA, 21 bp, Artificial Sequence
  Synthetic
tgttgtcggtttagcagcaag

SEQ ID NO: 24800 - DNA, 21 bp, Artificial Sequence
  Synthetic
gtttgaacacgattgaccgct

SEQ ID NO: 24801 - DNA, 22 bp, Artificial Sequence
  Synthetic
ccacctacttacattttgcggt

SEQ ID NO: 24802 - DNA, 20 bp, Artificial Sequence
  Synthetic
ggtcgcgccattcagaaaac

SEQ ID NO: 24803 - DNA, 20 bp, Artificial Sequence
  Synthetic
aaacagcccgaatcacaacc

SEQ ID NO: 24804 - DNA, 20 bp, Artificial Sequence
  Synthetic
acacaaagcgagatgcccga

SEQ ID NO: 24805 - DNA, 24 bp, Artificial Sequence
  Synthetic
acgtgatgatgctaaatttttgca

SEQ ID NO: 24806 - DNA, 24 bp, Artificial Sequence
  Synthetic
ggtcgtcatgaagttttaatgcgg

SEQ ID NO: 24807 - DNA, 20 bp, Artificial Sequence
  Synthetic
cggaagcgatgcacaatctg

SEQ ID NO: 24808 - DNA, 24 bp, Artificial Sequence
  Synthetic
tctgaaagatgatgatgagccaag

SEQ ID NO: 24809 - DNA, 22 bp, Artificial Sequence
  Synthetic
tgcaactgacctgcaaattttc

SEQ ID NO: 24810 - DNA, 24 bp, Artificial Sequence
  Synthetic
gtgcctgtcataatcgcttaatgc

SEQ ID NO: 24811 - DNA, 20 bp, Artificial Sequence
  Synthetic
cgttggaaacgttgtgcgac

SEQ ID NO: 24812 - DNA, 21 bp, Artificial Sequence
  Synthetic
catagccagcagcgtccaagc

SEQ ID NO: 24813 - DNA, 19 bp, Artificial Sequence
  Synthetic
cggttggtcaggcgcacgt

SEQ ID NO: 24814 - DNA, 20 bp, Artificial Sequence
  Synthetic
tcgcccaggtaagtctttgg

SEQ ID NO: 24815 - DNA, 19 bp, Artificial Sequence
  Synthetic
acattgacacacggcggcg

SEQ ID NO: 24816 - DNA, 18 bp, Artificial Sequence
  Synthetic
ccgcagtttaccgccgca

SEQ ID NO: 24817 - DNA, 19 bp, Artificial Sequence
  Synthetic
tttcaccagcccctccgcg

SEQ ID NO: 24818 - DNA, 20 bp, Artificial Sequence
  Synthetic
gctgggcagcgaatccttcc

SEQ ID NO: 24819 - DNA, 18 bp, Artificial Sequence
  Synthetic
gccgccggcaaattccca

SEQ ID NO: 24820 - DNA, 19 bp, Artificial Sequence
  Synthetic
gcccgatgccgatgttgcg

SEQ ID NO: 24821 - DNA, 18 bp, Artificial Sequence
  Synthetic
ggctgtgtgcgtcggcat

SEQ ID NO: 24822 - DNA, 19 bp, Artificial Sequence
  Synthetic
ggcgcggtgcagggttttg

SEQ ID NO: 24823 - DNA, 22 bp, Artificial Sequence
  Synthetic
ctgttgggtaaacgtgccctgc

SEQ ID NO: 24824 - DNA, 20 bp, Artificial Sequence
  Synthetic
acccgaaaaacagcacggcg

SEQ ID NO: 24825 - DNA, 20 bp, Artificial Sequence
  Synthetic
gcaatcagcctttgcgtcgg

SEQ ID NO: 24826 - DNA, 18 bp, Artificial Sequence
  Synthetic
aagcgacagcatccgccg

SEQ ID NO: 24827 - DNA, 21 bp, Artificial Sequence
  Synthetic
acaccgatgccgtctgaacct

SEQ ID NO: 24828 - DNA, 22 bp, Artificial Sequence
  Synthetic
ccacttccgtgggaatgacggt

SEQ ID NO: 24829 - DNA, 22 bp, Artificial Sequence
  Synthetic
cggcggataaatcgaattgccc

SEQ ID NO: 24830 - DNA, 22 bp, Artificial Sequence
  Synthetic
tccaaacgctcgcggatttcat

SEQ ID NO: 24831 - DNA, 19 bp, Artificial Sequence
  Synthetic
gttcctgcgcggcgaggat

SEQ ID NO: 24832 - DNA, 18 bp, Artificial Sequence
  Synthetic
tttacgcgttccgccgcc

SEQ ID NO: 24833 - DNA, 18 bp, Artificial Sequence
  Synthetic
cgcgacgaaggcgggttt

SEQ ID NO: 24834 - DNA, 21 bp, Artificial Sequence
  Synthetic
tgtacgttcccctgccagtgc

SEQ ID NO: 24835 - DNA, 22 bp, Artificial Sequence
  Synthetic
aggctcttcgtaaggcttcgcc

SEQ ID NO: 24836 - DNA, 19 bp, Artificial Sequence
  Synthetic
ccccgaccacgcgctcttt

SEQ ID NO: 24837 - DNA, 20 bp, Artificial Sequence
  Synthetic
ccacgccacggaaatcacgc

SEQ ID NO: 24838 - DNA, 17 bp, Artificial Sequence
  Synthetic
aaaacggcggcgcacca

SEQ ID NO: 24839 - DNA, 21 bp, Artificial Sequence
  Synthetic
cgtatttttggaagcggcggc

SEQ ID NO: 24840 - DNA, 22 bp, Artificial Sequence
  Synthetic
agagtgggtaagctggtagccg

SEQ ID NO: 24841 - DNA, 20 bp, Artificial Sequence
  Synthetic
gacgccgatcaggaacacgc

SEQ ID NO: 24842 - DNA, 22 bp, Artificial Sequence
  Synthetic
gcttgaacgcctcgatatccgg

SEQ ID NO: 24843 - DNA, 18 bp, Artificial Sequence
  Synthetic
gcactgcctgcccgcatt

SEQ ID NO: 24844 - DNA, 18 bp, Artificial Sequence
  Synthetic
aaccggcagccaaagcca

SEQ ID NO: 24845 - DNA, 18 bp, Artificial Sequence
  Synthetic
gctgccgcgcccatcaat

SEQ ID NO: 24846 - DNA, 22 bp, Artificial Sequence
  Synthetic
aacggtagagcagggtttggac

SEQ ID NO: 24847 - DNA, 19 bp, Artificial Sequence
  Synthetic
cggccgggtctgttgggat

SEQ ID NO: 24848 - DNA, 20 bp, Artificial Sequence
  Synthetic
caggttgcccatcgggtaat

SEQ ID NO: 24849 - DNA, 21 bp, Artificial Sequence
  Synthetic
cgccgaacatgacatgtccca

SEQ ID NO: 24850 - DNA, 20 bp, Artificial Sequence
  Synthetic
acctcgtcggctttgtcggc

SEQ ID NO: 24851 - DNA, 20 bp, Artificial Sequence
  Synthetic
cgtttgcttacgggcggata

SEQ ID NO: 24852 - DNA, 18 bp, Artificial Sequence
  Synthetic
acgcactgctttcgcccg

SEQ ID NO: 24853 - DNA, 22 bp, Artificial Sequence
  Synthetic
caaactctccgccatccatccg

SEQ ID NO: 24854 - DNA, 20 bp, Artificial Sequence
  Synthetic
agccgtcgatttctgccgct

SEQ ID NO: 24855 - DNA, 21 bp, Artificial Sequence
  Synthetic
agcctgattgccggttatgcc

SEQ ID NO: 24856 - DNA, 19 bp, Artificial Sequence
  Synthetic
aaagcccttgccaaacgcg

SEQ ID NO: 24857 - DNA, 21 bp, Artificial Sequence
  Synthetic
ccgacttggacggtttgctgc

SEQ ID NO: 24858 - DNA, 21 bp, Artificial Sequence
  Synthetic
cgcttggaaaacacccgcttc

SEQ ID NO: 24859 - DNA, 19 bp, Artificial Sequence
  Synthetic
aaggcgcacgcaattccgc

SEQ ID NO: 24860 - DNA, 18 bp, Artificial Sequence
  Synthetic
tgggcggcagtgcgcaat

SEQ ID NO: 24861 - DNA, 19 bp, Artificial Sequence
  Synthetic
cgcgccaagtccataccgg

SEQ ID NO: 24862 - DNA, 20 bp, Artificial Sequence
  Synthetic
gtccgcaccatcctgtcgca

SEQ ID NO: 24863 - DNA, 21 bp, Artificial Sequence
  Synthetic
tttcccgtccatccatcggca

SEQ ID NO: 24864 - DNA, 19 bp, Artificial Sequence
  Synthetic
ctgcgcctgcggcaatttg

SEQ ID NO: 24865 - DNA, 21 bp, Artificial Sequence
  Synthetic
gtgttgctgctggacgaaccg

SEQ ID NO: 24866 - DNA, 21 bp, Artificial Sequence
  Synthetic
gcatggcgacaatctcgtccc

SEQ ID NO: 24867 - DNA, 22 bp, Artificial Sequence
  Synthetic
attcggcgaacacatcatccgg

SEQ ID NO: 24868 - DNA, 24 bp, Artificial Sequence
  Synthetic
atcttgatgtgtttgtgttcgacg

SEQ ID NO: 24869 - DNA, 20 bp, Artificial Sequence
  Synthetic
ctgcaccgcagcaggatgtt

SEQ ID NO: 24870 - DNA, 22 bp, Artificial Sequence
  Synthetic
aacatcagcgtactcccccccg

SEQ ID NO: 24871 - DNA, 22 bp, Artificial Sequence
  Synthetic
gcgtaaccacttccacatcggt

SEQ ID NO: 24872 - DNA, 21 bp, Artificial Sequence
  Synthetic
gatgacggtccgttgcagtcg

SEQ ID NO: 24873 - DNA, 21 bp, Artificial Sequence
  Synthetic
ctggtgtggttggaagacggc

SEQ ID NO: 24874 - DNA, 18 bp, Artificial Sequence
  Synthetic
gcgggcgcgttcgtgtat

SEQ ID NO: 24875 - DNA, 22 bp, Artificial Sequence
  Synthetic
cgccattttgcgcccgatatgt

SEQ ID NO: 24876 - DNA, 19 bp, Artificial Sequence
  Synthetic
accgacgcaggcatcgatg

SEQ ID NO: 24877 - DNA, 21 bp, Artificial Sequence
  Synthetic
agcttcttcatctcgcgcgtg

SEQ ID NO: 24878 - DNA, 20 bp, Artificial Sequence
  Synthetic
atgggcatctaccggcgtga

SEQ ID NO: 24879 - DNA, 22 bp, Artificial Sequence
  Synthetic
cgacatcggcgatttcgtcctg

SEQ ID NO: 24880 - DNA, 21 bp, Artificial Sequence
  Synthetic
ttccgacaccgcaatatgccc

SEQ ID NO: 24881 - DNA, 21 bp, Artificial Sequence
  Synthetic
atcggcgtattcgatcggggc

SEQ ID NO: 24882 - DNA, 19 bp, Artificial Sequence
  Synthetic
tcttcggcggctttggcgg

SEQ ID NO: 24883 - DNA, 19 bp, Artificial Sequence
  Synthetic
cgcacgggattcagcggct

SEQ ID NO: 24884 - DNA, 20 bp, Artificial Sequence
  Synthetic
atgcgggcggaggattatgc

SEQ ID NO: 24885 - DNA, 19 bp, Artificial Sequence
  Synthetic
agtgctgaacgacacgcgc

SEQ ID NO: 24886 - DNA, 21 bp, Artificial Sequence
  Synthetic
cgcgattgagcaagacgcaaa

SEQ ID NO: 24887 - DNA, 20 bp, Artificial Sequence
  Synthetic
ggaggcggcggcgtataagg

SEQ ID NO: 24888 - DNA, 18 bp, Artificial Sequence
  Synthetic
atccgccgtggtgttgcc

SEQ ID NO: 24889 - DNA, 19 bp, Artificial Sequence
  Synthetic
acactgcctgggcaaagcg

SEQ ID NO: 24890 - DNA, 19 bp, Artificial Sequence
  Synthetic
gcccgaaactgccgcacct

SEQ ID NO: 24891 - DNA, 23 bp, Artificial Sequence
  Synthetic
aactgacgggcattttgaatttg

SEQ ID NO: 24892 - DNA, 20 bp, Artificial Sequence
  Synthetic
ccagtccgacccactgcatc

SEQ ID NO: 24893 - DNA, 21 bp, Artificial Sequence
  Synthetic
gggcggactgaatatccggtc

SEQ ID NO: 24894 - DNA, 20 bp, Artificial Sequence
  Synthetic
gcacaggcagtccgcgatcc

SEQ ID NO: 24895 - DNA, 22 bp, Artificial Sequence
  Synthetic
ttcaaccgcgatgtgtccgtag

SEQ ID NO: 24896 - DNA, 20 bp, Artificial Sequence
  Synthetic
cggtacatcacgctgcgctg

SEQ ID NO: 24897 - DNA, 20 bp, Artificial Sequence
  Synthetic
cggtacgcggccttggtaga

SEQ ID NO: 24898 - DNA, 20 bp, Artificial Sequence
  Synthetic
ctgcaggggctcgagtacgc

SEQ ID NO: 24899 - DNA, 22 bp, Artificial Sequence
  Synthetic
cagtcgtacatcgcaaacacgc

SEQ ID NO: 24900 - DNA, 19 bp, Artificial Sequence
  Synthetic
cccctcgctgccgttgact

SEQ ID NO: 24901 - DNA, 18 bp, Artificial Sequence
  Synthetic
cagcggcaaatcggcagc

SEQ ID NO: 24902 - DNA, 20 bp, Artificial Sequence
  Synthetic
cgtaaaaaccggcggcaaac

SEQ ID NO: 24903 - DNA, 22 bp, Artificial Sequence
  Synthetic
tttccagcgcggatattctggc

SEQ ID NO: 24904 - DNA, 22 bp, Artificial Sequence
  Synthetic
aggatggggtgcatacggtagc

SEQ ID NO: 24905 - DNA, 22 bp, Artificial Sequence
  Synthetic
ccgatacggtttggagccgttt

SEQ ID NO: 24906 - DNA, 21 bp, Artificial Sequence
  Synthetic
tggttcgcaccgctttacgaa

SEQ ID NO: 24907 - DNA, 20 bp, Artificial Sequence
  Synthetic
gcgaccataccaaacaccca

SEQ ID NO: 24908 - DNA, 20 bp, Artificial Sequence
  Synthetic
ggcaaagcaaaaacccccgg

SEQ ID NO: 24909 - DNA, 20 bp, Artificial Sequence
  Synthetic
tttgcctgacccactgcctg

SEQ ID NO: 24910 - DNA, 22 bp, Artificial Sequence
  Synthetic
cgaaatgattaaggcgggcgcg

SEQ ID NO: 24911 - DNA, 21 bp, Artificial Sequence
  Synthetic
acgttttaaacctcccccgcc

SEQ ID NO: 24912 - DNA, 19 bp, Artificial Sequence
  Synthetic
gccaccctgcaatcgctcg

SEQ ID NO: 24913 - DNA, 20 bp, Artificial Sequence
  Synthetic
tgcccaagctgatttcgccc

SEQ ID NO: 24914 - DNA, 22 bp, Artificial Sequence
  Synthetic
tcatcgaaatcaccgtccccga

SEQ ID NO: 24915 - DNA, 22 bp, Artificial Sequence
  Synthetic
tcgaaataccccaatcggaacc

SEQ ID NO: 24916 - DNA, 19 bp, Artificial Sequence
  Synthetic
gcggcagggttgggttcga

SEQ ID NO: 24917 - DNA, 19 bp, Artificial Sequence
  Synthetic
gtttcgcgcgcctcttgca

SEQ ID NO: 24918 - DNA, 20 bp, Artificial Sequence
  Synthetic
aaccgacttcccggcaaacg

SEQ ID NO: 24919 - DNA, 22 bp, Artificial Sequence
  Synthetic
gcgtggacggcttcttcaaagg

SEQ ID NO: 24920 - DNA, 18 bp, Artificial Sequence
  Synthetic
acggcggcgtttttgctg

SEQ ID NO: 24921 - DNA, 20 bp, Artificial Sequence
  Synthetic
atgttgtcggcaagctcgcg

SEQ ID NO: 24922 - DNA, 18 bp, Artificial Sequence
  Synthetic
ctttggcgggcgcggttt

SEQ ID NO: 24923 - DNA, 21 bp, Artificial Sequence
  Synthetic
ttccatacggacgttgtgcgc

SEQ ID NO: 24924 - DNA, 22 bp, Artificial Sequence
  Synthetic
atcggaagcttgtgcggattcg

SEQ ID NO: 24925 - DNA, 21 bp, Artificial Sequence
  Synthetic
acactgggcgagtttgacgac

SEQ ID NO: 24926 - DNA, 19 bp, Artificial Sequence
  Synthetic
aaacctgcccgccgtcatt

SEQ ID NO: 24927 - DNA, 20 bp, Artificial Sequence
  Synthetic
cttgccgatatgcttgccgc

SEQ ID NO: 24928 - DNA, 18 bp, Artificial Sequence
  Synthetic
gctgctgcaacgcgggtt

SEQ ID NO: 24929 - DNA, 19 bp, Artificial Sequence
  Synthetic
ggctgcctgccgacatcct

SEQ ID NO: 24930 - DNA, 21 bp, Artificial Sequence
  Synthetic
aaaaccctgcccatccccagc

SEQ ID NO: 24931 - DNA, 22 bp, Artificial Sequence
  Synthetic
atgtcaaacgcctctcctccgc

SEQ ID NO: 24932 - DNA, 21 bp, Artificial Sequence
  Synthetic
cggcgatgatggtgttttcgg

SEQ ID NO: 24933 - DNA, 19 bp, Artificial Sequence
  Synthetic
ggctggcgactctgctgca

SEQ ID NO: 24934 - DNA, 20 bp, Artificial Sequence
  Synthetic
cacgactgaaccgatgccgt

SEQ ID NO: 24935 - DNA, 19 bp, Artificial Sequence
  Synthetic
cgtcgatttcgcctgcggc

SEQ ID NO: 24936 - DNA, 22 bp, Artificial Sequence
  Synthetic
ggtggtgtccgaaatgtttgcg

SEQ ID NO: 24937 - DNA, 21 bp, Artificial Sequence
  Synthetic
taatagaggcccgccgcaaag

SEQ ID NO: 24938 - DNA, 22 bp, Artificial Sequence
  Synthetic
acggcatttgtcatcactggcc

SEQ ID NO: 24939 - DNA, 22 bp, Artificial Sequence
  Synthetic
ttacccatcgcaccgacaaaca

SEQ ID NO: 24940 - DNA, 22 bp, Artificial Sequence
  Synthetic
ttgaggccgtctgaaacttcgc

SEQ ID NO: 24941 - DNA, 20 bp, Artificial Sequence
  Synthetic
cacgcagaaggtcagcacca

SEQ ID NO: 24942 - DNA, 19 bp, Artificial Sequence
  Synthetic
gcccatgtgctgcggttgt

SEQ ID NO: 24943 - DNA, 21 bp, Artificial Sequence
  Synthetic
ggcggcggtatttatgtccgt

SEQ ID NO: 24944 - DNA, 20 bp, Artificial Sequence
  Synthetic
aaaaccgctcaaaccgccct

SEQ ID NO: 24945 - DNA, 19 bp, Artificial Sequence
  Synthetic
ggtcaacgcaggcggttcg

SEQ ID NO: 24946 - DNA, 21 bp, Artificial Sequence
  Synthetic
ccaacacacccaagccacaca

SEQ ID NO: 24947 - DNA, 22 bp, Artificial Sequence
  Synthetic
attcggtgactacggctggatg

SEQ ID NO: 24948 - DNA, 20 bp, Artificial Sequence
  Synthetic
caccaacctcaccggctcaa

SEQ ID NO: 24949 - DNA, 21 bp, Artificial Sequence
  Synthetic
gttccgccacaaacaactggg

SEQ ID NO: 24950 - DNA, 21 bp, Artificial Sequence
  Synthetic
ggcttcccaagtacaggcctc

SEQ ID NO: 24951 - DNA, 18 bp, Artificial Sequence
  Synthetic
ggacgtgccgccgatgtt

SEQ ID NO: 24952 - DNA, 21 bp, Artificial Sequence
  Synthetic
ccagaagcgtttgcctgtggc

SEQ ID NO: 24953 - DNA, 22 bp, Artificial Sequence
  Synthetic
gagggtgaggatttcgtcgtgg

SEQ ID NO: 24954 - DNA, 20 bp, Artificial Sequence
  Synthetic
ggtcagacgctcgacggtgt

SEQ ID NO: 24955 - DNA, 19 bp, Artificial Sequence
  Synthetic
gcgtgggcgtatccgtcgt

SEQ ID NO: 24956 - DNA, 18 bp, Artificial Sequence
  Synthetic
gcgcggcaggcatcattc

SEQ ID NO: 24957 - DNA, 19 bp, Artificial Sequence
  Synthetic
agcgtgttcaatggcggcg

SEQ ID NO: 24958 - DNA, 19 bp, Artificial Sequence
  Synthetic
gcacgctcgcgctcttgga

SEQ ID NO: 24959 - DNA, 21 bp, Artificial Sequence
  Synthetic
gtgccgactgttttgccgacg

SEQ ID NO: 24960 - DNA, 22 bp, Artificial Sequence
  Synthetic
ttccgacaaaatccggctcaca

SEQ ID NO: 24961 - DNA, 20 bp, Artificial Sequence
  Synthetic
cgaagccgacgaacgcaagg

SEQ ID NO: 24962 - DNA, 21 bp, Artificial Sequence
  Synthetic
aaacagccgttgaccgcaacc

SEQ ID NO: 24963 - DNA, 20 bp, Artificial Sequence
  Synthetic
gacaaactccgcacgtccgc

SEQ ID NO: 24964 - DNA, 19 bp, Artificial Sequence
  Synthetic
cggcacgcctttcagacgg

SEQ ID NO: 24965 - DNA, 19 bp, Artificial Sequence
  Synthetic
cgaaagcagccacgtcgcc

SEQ ID NO: 24966 - DNA, 21 bp, Artificial Sequence
  Synthetic
ctgaacgaaaaacgcgccgag

SEQ ID NO: 24967 - DNA, 18 bp, Artificial Sequence
  Synthetic
acgtggccaaaccgcacc

SEQ ID NO: 24968 - DNA, 20 bp, Artificial Sequence
  Synthetic
catcgccacacccgttcaga

SEQ ID NO: 24969 - DNA, 18 bp, Artificial Sequence
  Synthetic
accgcacaaaccggcgga

SEQ ID NO: 24970 - DNA, 19 bp, Artificial Sequence
  Synthetic
cgtgatcgacggaggtgcg

SEQ ID NO: 24971 - DNA, 22 bp, Artificial Sequence
  Synthetic
ttggaaaactacgaaggcggcc

SEQ ID NO: 24972 - DNA, 20 bp, Artificial Sequence
  Synthetic
cccgaacctcgattacgccg

SEQ ID NO: 24973 - DNA, 19 bp, Artificial Sequence
  Synthetic
atccgccctctttgctgcg

SEQ ID NO: 24974 - DNA, 21 bp, Artificial Sequence
  Synthetic
gtcgtcgttttgcccacaccg

SEQ ID NO: 24975 - DNA, 18 bp, Artificial Sequence
  Synthetic
gccattgccgccgccaaa

SEQ ID NO: 24976 - DNA, 19 bp, Artificial Sequence
  Synthetic
aaaagccgcagccacctcg

SEQ ID NO: 24977 - DNA, 19 bp, Artificial Sequence
  Synthetic
tgctcgaccgccacttcac

SEQ ID NO: 24978 - DNA, 22 bp, Artificial Sequence
  Synthetic
caggaaatttccgccctcgtca

SEQ ID NO: 24979 - DNA, 22 bp, Artificial Sequence
  Synthetic
caaacttgggactgaacccggc

SEQ ID NO: 24980 - DNA, 19 bp, Artificial Sequence
  Synthetic
aggcgctcggcaaacacaa

SEQ ID NO: 24981 - DNA, 22 bp, Artificial Sequence
  Synthetic
gcgacacctacaacgacacaca

SEQ ID NO: 24982 - DNA, 22 bp, Artificial Sequence
  Synthetic
atcgccgacaaaaccaccatcg

SEQ ID NO: 24983 - DNA, 19 bp, Artificial Sequence
  Synthetic
ccgggcgcggtattctgga

SEQ ID NO: 24984 - DNA, 19 bp, Artificial Sequence
  Synthetic
ggacgacgtacgcgccgaa

SEQ ID NO: 24985 - DNA, 18 bp, Artificial Sequence
  Synthetic
cgacggcggcgagattgt

SEQ ID NO: 24986 - DNA, 24 bp, Artificial Sequence
  Synthetic
accaataccgtaaatagcctgaag

SEQ ID NO: 24987 - DNA, 22 bp, Artificial Sequence
  Synthetic
aaatgtcttccactgtcaagcc

SEQ ID NO: 24988 - DNA, 22 bp, Artificial Sequence
  Synthetic
cgacagcagctttgatttcagg

SEQ ID NO: 24989 - DNA, 20 bp, Artificial Sequence
  Synthetic
cgccgcatattttcagacgg

SEQ ID NO: 24990 - DNA, 19 bp, Artificial Sequence
  Synthetic
ccccttcagacggcatcgc

SEQ ID NO: 24991 - DNA, 21 bp, Artificial Sequence
  Synthetic
gagttcgcggttttcaacgcg

SEQ ID NO: 24992 - DNA, 21 bp, Artificial Sequence
  Synthetic
gtaaccagactgtacgggccg

SEQ ID NO: 24993 - DNA, 21 bp, Artificial Sequence
  Synthetic
gggaatcagaagcggtagcgc

SEQ ID NO: 24994 - DNA, 19 bp, Artificial Sequence
  Synthetic
gccaggccggcggtaatca

SEQ ID NO: 24995 - DNA, 20 bp, Artificial Sequence
  Synthetic
atatgccccgttccgtcggc

SEQ ID NO: 24996 - DNA, 19 bp, Artificial Sequence
  Synthetic
gcgcgtatcagcacggtga

SEQ ID NO: 24997 - DNA, 21 bp, Artificial Sequence
  Synthetic
tggtcgaaaccgccatttccg

SEQ ID NO: 24998 - DNA, 20 bp, Artificial Sequence
  Synthetic
cgctgaacgccaataccgcc

SEQ ID NO: 24999 - DNA, 22 bp, Artificial Sequence
  Synthetic
cggcgcgtatccgtttgaaacc

SEQ ID NO: 25000 - DNA, 20 bp, Artificial Sequence
  Synthetic
acggcgttgaacgaagtcga

SEQ ID NO: 25001 - DNA, 19 bp, Artificial Sequence
  Synthetic
gcgtgggcgtgaactaccg

SEQ ID NO: 25002 - DNA, 22 bp, Artificial Sequence
  Synthetic
aattgttggaatccggcttgtt

SEQ ID NO: 25003 - DNA, 19 bp, Artificial Sequence
  Synthetic
cgcgcgggtcttggacgaa

SEQ ID NO: 25004 - DNA, 21 bp, Artificial Sequence
  Synthetic
tttgaccaactcggcaagcgg

SEQ ID NO: 25005 - DNA, 19 bp, Artificial Sequence
  Synthetic
gcaccagttcgcccgcgat

SEQ ID NO: 25006 - DNA, 20 bp, Artificial Sequence
  Synthetic
cgcccgtggcttctttacgg

SEQ ID NO: 25007 - DNA, 22 bp, Artificial Sequence
  Synthetic
aacgccgccatttccatatcgg

SEQ ID NO: 25008 - DNA, 20 bp, Artificial Sequence
  Synthetic
gcacttctaactccccgccc

SEQ ID NO: 25009 - DNA, 22 bp, Artificial Sequence
  Synthetic
tttgcaaaggtctcagaatgcc

SEQ ID NO: 25010 - DNA, 21 bp, Artificial Sequence
  Synthetic
agcgtaccgaccgacaatccg

SEQ ID NO: 25011 - DNA, 20 bp, Artificial Sequence
  Synthetic
cgtattccccgccggagaga

SEQ ID NO: 25012 - DNA, 20 bp, Artificial Sequence
  Synthetic
aatacgcgatgcagctcgcc

SEQ ID NO: 25013 - DNA, 19 bp, Artificial Sequence
  Synthetic
aagctcgccatgcccttcg

SEQ ID NO: 25014 - DNA, 22 bp, Artificial Sequence
  Synthetic
ttccaaatcatcctgccccacc

SEQ ID NO: 25015 - DNA, 21 bp, Artificial Sequence
  Synthetic
tgagccgccttctcgacaacc

SEQ ID NO: 25016 - DNA, 18 bp, Artificial Sequence
  Synthetic
attccgccatgccgtccg

SEQ ID NO: 25017 - DNA, 20 bp, Artificial Sequence
  Synthetic
cggcgtaatcgtcggctcgc

SEQ ID NO: 25018 - DNA, 20 bp, Artificial Sequence
  Synthetic
cgcataccgcagcgaaatgc

SEQ ID NO: 25019 - DNA, 20 bp, Artificial Sequence
  Synthetic
gcagcagcggaacacaaagc

SEQ ID NO: 25020 - DNA, 19 bp, Artificial Sequence
  Synthetic
cggttccctaaggcgccca

SEQ ID NO: 25021 - DNA, 19 bp, Artificial Sequence
  Synthetic
tgcagaccggcaagctgtt

SEQ ID NO: 25022 - DNA, 19 bp, Artificial Sequence
  Synthetic
gcgggcgaactcgacgctt

SEQ ID NO: 25023 - DNA, 22 bp, Artificial Sequence
  Synthetic
atgattttggacatcggcccga

SEQ ID NO: 25024 - DNA, 21 bp, Artificial Sequence
  Synthetic
ggttggcgcagaagctgtttg

SEQ ID NO: 25025 - DNA, 22 bp, Artificial Sequence
  Synthetic
agacgacctgattattgcccgc

SEQ ID NO: 25026 - DNA, 21 bp, Artificial Sequence
  Synthetic
aagggtttccaacaggctgct

SEQ ID NO: 25027 - DNA, 21 bp, Artificial Sequence
  Synthetic
cgccgacctgttcgcaaatcg

SEQ ID NO: 25028 - DNA, 22 bp, Artificial Sequence
  Synthetic
aaatgccgtctgaacacattgc

SEQ ID NO: 25029 - DNA, 20 bp, Artificial Sequence
  Synthetic
cgggctgccgtttaccatag

SEQ ID NO: 25030 - DNA, 23 bp, Artificial Sequence
  Synthetic
gttcaagtttcggctattgcaaa

SEQ ID NO: 25031 - DNA, 21 bp, Artificial Sequence
  Synthetic
ccgcaacacaagggtatgatt

SEQ ID NO: 25032 - DNA, 20 bp, Artificial Sequence
  Synthetic
ccgcagttttgccctgtcct

SEQ ID NO: 25033 - DNA, 20 bp, Artificial Sequence
  Synthetic
tatcgacatcgggcacgctg

SEQ ID NO: 25034 - DNA, 19 bp, Artificial Sequence
  Synthetic
gtaatcctgccgccgagcg

SEQ ID NO: 25035 - DNA, 19 bp, Artificial Sequence
  Synthetic
ccgggcaatacggcatcgc

SEQ ID NO: 25036 - DNA, 18 bp, Artificial Sequence
  Synthetic
gcatcgggcggcttgtgt

SEQ ID NO: 25037 - DNA, 20 bp, Artificial Sequence
  Synthetic
cgagatagccttgcgcggtc

SEQ ID NO: 25038 - DNA, 20 bp, Artificial Sequence
  Synthetic
ggtacagcccgaagcgcaaa

SEQ ID NO: 25039 - DNA, 20 bp, Artificial Sequence
  Synthetic
ggcagaggtgcggattagcg

SEQ ID NO: 25040 - DNA, 22 bp, Artificial Sequence
  Synthetic
ttttccggccttctgcgagaaa

SEQ ID NO: 25041 - DNA, 19 bp, Artificial Sequence
  Synthetic
agatgaggaggcagcgggc

SEQ ID NO: 25042 - DNA, 24 bp, Artificial Sequence
  Synthetic
ggcatattaacaacatcaaccctg

SEQ ID NO: 25043 - DNA, 21 bp, Artificial Sequence
  Synthetic
cgatggggaggtttggaagct

SEQ ID NO: 25044 - DNA, 19 bp, Artificial Sequence
  Synthetic
cgtaacctacgccgcccag

SEQ ID NO: 25045 - DNA, 19 bp, Artificial Sequence
  Synthetic
cggcatcttgtccgacggc

SEQ ID NO: 25046 - DNA, 19 bp, Artificial Sequence
  Synthetic
ggtaggaacgggcggtggt

SEQ ID NO: 25047 - DNA, 19 bp, Artificial Sequence
  Synthetic
gcggatgggggacgttgag

SEQ ID NO: 25048 - DNA, 19 bp, Artificial Sequence
  Synthetic
gcaaaggcggcttgggcaa

SEQ ID NO: 25049 - DNA, 20 bp, Artificial Sequence
  Synthetic
tgattaccgccgtctccgcc

SEQ ID NO: 25050 - DNA, 21 bp, Artificial Sequence
  Synthetic
ctatcacgcaccggtctgctg

SEQ ID NO: 25051 - DNA, 22 bp, Artificial Sequence
  Synthetic
ggcaggcgtatgcgaaagatgt

SEQ ID NO: 25052 - DNA, 21 bp, Artificial Sequence
  Synthetic
ccatgcccagtttgcggatgc

SEQ ID NO: 25053 - DNA, 18 bp, Artificial Sequence
  Synthetic
gccggaagcggcttggta

SEQ ID NO: 25054 - DNA, 22 bp, Artificial Sequence
  Synthetic
catcggcaagattttcggtcgc

SEQ ID NO: 25055 - DNA, 20 bp, Artificial Sequence
  Synthetic
gcagcagatgccggcgcata

SEQ ID NO: 25056 - DNA, 18 bp, Artificial Sequence
  Synthetic
gcctgttgcggcacttgc

SEQ ID NO: 25057 - DNA, 19 bp, Artificial Sequence
  Synthetic
cgaagcggcgggattcgga

SEQ ID NO: 25058 - DNA, 22 bp, Artificial Sequence
  Synthetic
ttgtcgaacactttgccgaagc

SEQ ID NO: 25059 - DNA, 22 bp, Artificial Sequence
  Synthetic
aacaaccgtccgatttggtgcg

SEQ ID NO: 25060 - DNA, 22 bp, Artificial Sequence
  Synthetic
gcaatacgccgtcaaaacccca

SEQ ID NO: 25061 - DNA, 19 bp, Artificial Sequence
  Synthetic
gacagggcgcggtcgagtt

SEQ ID NO: 25062 - DNA, 19 bp, Artificial Sequence
  Synthetic
gcggttttcgcgccgtagc

SEQ ID NO: 25063 - DNA, 22 bp, Artificial Sequence
  Synthetic
tcatcgtgagcgtgttcagacg

SEQ ID NO: 25064 - DNA, 19 bp, Artificial Sequence
  Synthetic
ggcatgacggcggacagtt

SEQ ID NO: 25065 - DNA, 22 bp, Artificial Sequence
  Synthetic
atttcggcaatcgataccgccg

SEQ ID NO: 25066 - DNA, 18 bp, Artificial Sequence
  Synthetic
gcaaacacgccgccgaca

SEQ ID NO: 25067 - DNA, 21 bp, Artificial Sequence
  Synthetic
cgaactttccggcggtcagaa

SEQ ID NO: 25068 - DNA, 22 bp, Artificial Sequence
  Synthetic
gtcgaattcgtcctgaccgagg

SEQ ID NO: 25069 - DNA, 20 bp, Artificial Sequence
  Synthetic
gttggcgatgctggtggtgg

SEQ ID NO: 25070 - DNA, 19 bp, Artificial Sequence
  Synthetic
ccgcgtccgattccacgct

SEQ ID NO: 25071 - DNA, 19 bp, Artificial Sequence
  Synthetic
ggttcgcccgcttccagca

SEQ ID NO: 25072 - DNA, 19 bp, Artificial Sequence
  Synthetic
tggcagccctctcgcctga

SEQ ID NO: 25073 - DNA, 20 bp, Artificial Sequence
  Synthetic
accttggttgccgcgacttt

SEQ ID NO: 25074 - DNA, 18 bp, Artificial Sequence
  Synthetic
aacggcgtggcgcaaggt

SEQ ID NO: 25075 - DNA, 21 bp, Artificial Sequence
  Synthetic
tttggcagaggcgctcaaaga

SEQ ID NO: 25076 - DNA, 21 bp, Artificial Sequence
  Synthetic
ccggcatcggcgatctcatct

SEQ ID NO: 25077 - DNA, 22 bp, Artificial Sequence
  Synthetic
gtgccgtagtggttttcgagca

SEQ ID NO: 25078 - DNA, 20 bp, Artificial Sequence
  Synthetic
ggaagggcggcttcttctgc

SEQ ID NO: 25079 - DNA, 20 bp, Artificial Sequence
  Synthetic
atgcgctgaaaacacccccg

SEQ ID NO: 25080 - DNA, 22 bp, Artificial Sequence
  Synthetic
ggcatcgggaacttaatcaggg

SEQ ID NO: 25081 - DNA, 21 bp, Artificial Sequence
  Synthetic
gcccgaagatttggtgtgccg

SEQ ID NO: 25082 - DNA, 22 bp, Artificial Sequence
  Synthetic
atgagtatcgtgctgcacggcg

SEQ ID NO: 25083 - DNA, 19 bp, Artificial Sequence
  Synthetic
ggccagccgtccgcattca

SEQ ID NO: 25084 - DNA, 20 bp, Artificial Sequence
  Synthetic
cgacaacgccctgagcaagg

SEQ ID NO: 25085 - DNA, 18 bp, Artificial Sequence
  Synthetic
tcgtctttggcggcgtcg

SEQ ID NO: 25086 - DNA, 19 bp, Artificial Sequence
  Synthetic
gcgaggtaggcggtcagca

SEQ ID NO: 25087 - DNA, 21 bp, Artificial Sequence
  Synthetic
cgtcggtgttgacggcaatgc

SEQ ID NO: 25088 - DNA, 18 bp, Artificial Sequence
  Synthetic
gccgccggcattgtcgat

SEQ ID NO: 25089 - DNA, 22 bp, Artificial Sequence
  Synthetic
cggaaggattgcaggcttttgg

SEQ ID NO: 25090 - DNA, 20 bp, Artificial Sequence
  Synthetic
tcaaacagagcccgacgtgg

SEQ ID NO: 25091 - DNA, 20 bp, Artificial Sequence
  Synthetic
gcgtgaaggtcgccaaaggc

SEQ ID NO: 25092 - DNA, 22 bp, Artificial Sequence
  Synthetic
cgttttcctgatgttccgtctt

SEQ ID NO: 25093 - DNA, 20 bp, Artificial Sequence
  Synthetic
cgggctgtccgtccgtatcg

SEQ ID NO: 25094 - DNA, 22 bp, Artificial Sequence
  Synthetic
attcatcgcggcaggttgacgg

SEQ ID NO: 25095 - DNA, 20 bp, Artificial Sequence
  Synthetic
caggcctcaacccatcctgc

SEQ ID NO: 25096 - DNA, 22 bp, Artificial Sequence
  Synthetic
aagctccctgccgtggattttg

SEQ ID NO: 25097 - DNA, 20 bp, Artificial Sequence
  Synthetic
cggggacgcggatttcagac

SEQ ID NO: 25098 - DNA, 19 bp, Artificial Sequence
  Synthetic
gttccgcgccgatgatgcg

SEQ ID NO: 25099 - DNA, 20 bp, Artificial Sequence
  Synthetic
tgatgttgacggcgcagtgg

SEQ ID NO: 25100 - DNA, 19 bp, Artificial Sequence
  Synthetic
gatgacgggcgcgacgtgt

SEQ ID NO: 25101 - DNA, 21 bp, Artificial Sequence
  Synthetic
aaagacggcttcatgcgtgcg

SEQ ID NO: 25102 - DNA, 20 bp, Artificial Sequence
  Synthetic
gaagcccagtccgacgacgt

SEQ ID NO: 25103 - DNA, 19 bp, Artificial Sequence
  Synthetic
cgtatggcgaggcggtcga

SEQ ID NO: 25104 - DNA, 22 bp, Artificial Sequence
  Synthetic
gcgaaattttgccgcctactgc

SEQ ID NO: 25105 - DNA, 20 bp, Artificial Sequence
  Synthetic
gcctgcctgaaaggttcgga

SEQ ID NO: 25106 - DNA, 19 bp, Artificial Sequence
  Synthetic
gacgatgccgcgctgctgt

SEQ ID NO: 25107 - DNA, 19 bp, Artificial Sequence
  Synthetic
gtagccgcgtttgagggcg

SEQ ID NO: 25108 - DNA, 20 bp, Artificial Sequence
  Synthetic
tcgccttcggcatagggaca

SEQ ID NO: 25109 - DNA, 21 bp, Artificial Sequence
  Synthetic
cccgcgccggtaatcagaatc

SEQ ID NO: 25110 - DNA, 22 bp, Artificial Sequence
  Synthetic
actttgccgagcatatagccgc

SEQ ID NO: 25111 - DNA, 19 bp, Artificial Sequence
  Synthetic
cgcgaagggcagtacgtcc

SEQ ID NO: 25112 - DNA, 21 bp, Artificial Sequence
  Synthetic
atgccgtatcacgttccccct

SEQ ID NO: 25113 - DNA, 19 bp, Artificial Sequence
  Synthetic
gacgccgcctacgcactca

SEQ ID NO: 25114 - DNA, 20 bp, Artificial Sequence
  Synthetic
acaccttggctcgttccaaa

SEQ ID NO: 25115 - DNA, 22 bp, Artificial Sequence
  Synthetic
atcaggtaggcaaacaccgcca

SEQ ID NO: 25116 - DNA, 19 bp, Artificial Sequence
  Synthetic
ccaaggcgaggacggtgca

SEQ ID NO: 25117 - DNA, 19 bp, Artificial Sequence
  Synthetic
cgtcatacaggcgcgggct

SEQ ID NO: 25118 - DNA, 18 bp, Artificial Sequence
  Synthetic
ttccgcgctgcaacacgc

SEQ ID NO: 25119 - DNA, 19 bp, Artificial Sequence
  Synthetic
ccgttaccggggttctgcg

SEQ ID NO: 25120 - DNA, 21 bp, Artificial Sequence
  Synthetic
acctgaacgccttgtcctcca

SEQ ID NO: 25121 - DNA, 19 bp, Artificial Sequence
  Synthetic
gttggcgggttggatgggc

SEQ ID NO: 25122 - DNA, 19 bp, Artificial Sequence
  Synthetic
gccgcatttcaaagcggcg

SEQ ID NO: 25123 - DNA, 22 bp, Artificial Sequence
  Synthetic
cgaacctgccgatgccgtattg

SEQ ID NO: 25124 - DNA, 19 bp, Artificial Sequence
  Synthetic
gtttgttggcggtaggcgc

SEQ ID NO: 25125 - DNA, 18 bp, Artificial Sequence
  Synthetic
cgcgcgttccgaacccaa

SEQ ID NO: 25126 - DNA, 19 bp, Artificial Sequence
  Synthetic
gatgccggaaccgacaccg

SEQ ID NO: 25127 - DNA, 20 bp, Artificial Sequence
  Synthetic
cgccttcaaaccccaagccg

SEQ ID NO: 25128 - DNA, 18 bp, Artificial Sequence
  Synthetic
gcgcggcgttcgtcttgt

SEQ ID NO: 25129 - DNA, 19 bp, Artificial Sequence
  Synthetic
gcggggaggccgtctgaat

SEQ ID NO: 25130 - DNA, 21 bp, Artificial Sequence
  Synthetic
cgctcttcaatcagcgtgccc

SEQ ID NO: 25131 - DNA, 18 bp, Artificial Sequence
  Synthetic
ggcatgcgccgcattgtg

SEQ ID NO: 25132 - DNA, 18 bp, Artificial Sequence
  Synthetic
tggcccggcgtgttttcc

SEQ ID NO: 25133 - DNA, 21 bp, Artificial Sequence
  Synthetic
cctgggctttgctgatgacgc

SEQ ID NO: 25134 - DNA, 19 bp, Artificial Sequence
  Synthetic
ggcggccagcagcttgtct

SEQ ID NO: 25135 - DNA, 18 bp, Artificial Sequence
  Synthetic
gttgcgcgcgtctgtggt

SEQ ID NO: 25136 - DNA, 22 bp, Artificial Sequence
  Synthetic
agtcatcgtcttcatcgtcgcc

SEQ ID NO: 25137 - DNA, 19 bp, Artificial Sequence
  Synthetic
ccagccgccgcctttcctt

SEQ ID NO: 25138 - DNA, 19 bp, Artificial Sequence
  Synthetic
gccgtctgaacgcgaccgt

SEQ ID NO: 25139 - DNA, 22 bp, Artificial Sequence
  Synthetic
tcggtttgattcctaccggcga

SEQ ID NO: 25140 - DNA, 22 bp, Artificial Sequence
  Synthetic
cctgctgaaaaaagccgatgcc

SEQ ID NO: 25141 - DNA, 21 bp, Artificial Sequence
  Synthetic
gtcgccgtcagccattattgc

SEQ ID NO: 25142 - DNA, 22 bp, Artificial Sequence
  Synthetic
ttgccgcttctgatcgattgcc

SEQ ID NO: 25143 - DNA, 20 bp, Artificial Sequence
  Synthetic
taccgcgaacgcatgagggc

SEQ ID NO: 25144 - DNA, 19 bp, Artificial Sequence
  Synthetic
agggcgcgggtcatatcgg

SEQ ID NO: 25145 - DNA, 18 bp, Artificial Sequence
  Synthetic
ggcaatggcgacgcgttg

SEQ ID NO: 25146 - DNA, 20 bp, Artificial Sequence
  Synthetic
ggcgaggaacatcgtctgca

SEQ ID NO: 25147 - DNA, 19 bp, Artificial Sequence
  Synthetic
ggcgatgaaggcggcaaga

SEQ ID NO: 25148 - DNA, 19 bp, Artificial Sequence
  Synthetic
gcagccatggtgcgtccga

SEQ ID NO: 25149 - DNA, 22 bp, Artificial Sequence
  Synthetic
catgagttgtgccagttccgcc

SEQ ID NO: 25150 - DNA, 20 bp, Artificial Sequence
  Synthetic
tggagacaacatgtagcgca

SEQ ID NO: 25151 - DNA, 25 bp, Artificial Sequence
  Synthetic
gacagttggtgtcctaattgtaaca

SEQ ID NO: 25152 - DNA, 24 bp, Artificial Sequence
  Synthetic
aaaggaggttattgtttgaggaca

SEQ ID NO: 25153 - DNA, 23 bp, Artificial Sequence
  Synthetic
acagctgacgttaattagccacc

SEQ ID NO: 25154 - DNA, 25 bp, Artificial Sequence
  Synthetic
atcccttgcgaaatctaaatatgca

SEQ ID NO: 25155 - DNA, 25 bp, Artificial Sequence
  Synthetic
tttggagtgtgcattacaaaaatga

SEQ ID NO: 25156 - DNA, 21 bp, Artificial Sequence
  Synthetic
aacctaaacttgggtcccctg

SEQ ID NO: 25157 - DNA, 24 bp, Artificial Sequence
  Synthetic
tattgcagtgattgatacaccagg

SEQ ID NO: 25158 - DNA, 25 bp, Artificial Sequence
  Synthetic
acaagacaggttttaaatgtcaccg

SEQ ID NO: 25159 - DNA, 25 bp, Artificial Sequence
  Synthetic
accaccagcatttaatgtaaaagtg

SEQ ID NO: 25160 - DNA, 25 bp, Artificial Sequence
  Synthetic
agtaggggttcaaattgatagaggt

SEQ ID NO: 25161 - DNA, 25 bp, Artificial Sequence
  Synthetic
aaggagatagtttacctacagaccc

SEQ ID NO: 25162 - DNA, 25 bp, Artificial Sequence
  Synthetic
acttgatgagtgggaattagcattt

SEQ ID NO: 25163 - DNA, 25 bp, Artificial Sequence
  Synthetic
gacctatgtgtaagtgaccaatagc

SEQ ID NO: 25164 - DNA, 25 bp, Artificial Sequence
  Synthetic
aaatcgaaacaaacaaatttgcagc

SEQ ID NO: 25165 - DNA, 23 bp, Artificial Sequence
  Synthetic
cgagattggagtgacaaggagag

SEQ ID NO: 25166 - DNA, 21 bp, Artificial Sequence
  Synthetic
cggtccaaattcctgctgatg

SEQ ID NO: 25167 - DNA, 21 bp, Artificial Sequence
  Synthetic
aaagtgggcacttggtgagaa

SEQ ID NO: 25168 - DNA, 23 bp, Artificial Sequence
  Synthetic
aggaattacttcacagcagaggt

SEQ ID NO: 25169 - DNA, 23 bp, Artificial Sequence
  Synthetic
gcatggagttttctctcactgac

SEQ ID NO: 25170 - DNA, 25 bp, Artificial Sequence
  Synthetic
tgagaataaatcagaaacatggccc

SEQ ID NO: 25171 - DNA, 22 bp, Artificial Sequence
  Synthetic
agcgataggaggggatgctagg

SEQ ID NO: 25172 - DNA, 21 bp, Artificial Sequence
  Synthetic
tgggatgctcctcccgattcc

SEQ ID NO: 25173 - DNA, 20 bp, Artificial Sequence
  Synthetic
tccttcggatgcccaggtcg

SEQ ID NO: 25174 - DNA, 19 bp, Artificial Sequence
  Synthetic
cgctcccctcgttccacct

SEQ ID NO: 25175 - DNA, 21 bp, Artificial Sequence
  Synthetic
aaggcctcttcctaggtccgg

SEQ ID NO: 25176 - DNA, 20 bp, Artificial Sequence
  Synthetic
agagaacgacccagaacgct

SEQ ID NO: 25177 - DNA, 23 bp, Artificial Sequence
  Synthetic
attggggccagaagaaaaacaaa

SEQ ID NO: 25178 - DNA, 25 bp, Artificial Sequence
  Synthetic
ttggactatgaacaatttgacagct

SEQ ID NO: 25179 - DNA, 21 bp, Artificial Sequence
  Synthetic
ggggtgtacagggtggttttc

SEQ ID NO: 25180 - DNA, 21 bp, Artificial Sequence
  Synthetic
actaggtagtcagaacagccc

SEQ ID NO: 25181 - DNA, 20 bp, Artificial Sequence
  Synthetic
ggaggacgcggacaaagaaa

SEQ ID NO: 25182 - DNA, 20 bp, Artificial Sequence
  Synthetic
acagaagcttggacaatgcg

SEQ ID NO: 25183 - DNA, 21 bp, Artificial Sequence
  Synthetic
tggactttaaacaagaggcgg

SEQ ID NO: 25184 - DNA, 20 bp, Artificial Sequence
  Synthetic
ccactgtcaccacagctgcc

SEQ ID NO: 25185 - DNA, 23 bp, Artificial Sequence
  Synthetic
acctacatttagtggtggcaatg

SEQ ID NO: 25186 - DNA, 23 bp, Artificial Sequence
  Synthetic
cgcaaaggtactgtacgctatag

SEQ ID NO: 25187 - DNA, 23 bp, Artificial Sequence
  Synthetic
taccagttccaagatatgcctcc

SEQ ID NO: 25188 - DNA, 20 bp, Artificial Sequence
  Synthetic
tttcagatggctttgtggcg

SEQ ID NO: 25189 - DNA, 20 bp, Artificial Sequence
  Synthetic
tggattgcctgatccacagt

SEQ ID NO: 25190 - DNA, 20 bp, Artificial Sequence
  Synthetic
gggattgcccccccttagaa

SEQ ID NO: 25191 - DNA, 20 bp, Artificial Sequence
  Synthetic
gggatgctatacccaccact

SEQ ID NO: 25192 - DNA, 25 bp, Artificial Sequence
  Synthetic
acaactgtatgtaatgtaaaggcgt

SEQ ID NO: 25193 - DNA, 22 bp, Artificial Sequence
  Synthetic
ccaccttagtatgtaggcggcg

SEQ ID NO: 25194 - DNA, 20 bp, Artificial Sequence
  Synthetic
ttgcgaggggatctgggagt

SEQ ID NO: 25195 - DNA, 22 bp, Artificial Sequence
  Synthetic
tggagtcaactgggctactggt

SEQ ID NO: 25196 - DNA, 22 bp, Artificial Sequence
  Synthetic
acacccttccaattggactggc

SEQ ID NO: 25197 - DNA, 25 bp, Artificial Sequence
  Synthetic
cgaggggatgtatggttaaattcaa

SEQ ID NO: 25198 - DNA, 20 bp, Artificial Sequence
  Synthetic
gtaccccacctgtggtacgt

SEQ ID NO: 25199 - DNA, 22 bp, Artificial Sequence
  Synthetic
tggagggctgacaataccacct

SEQ ID NO: 25200 - DNA, 23 bp, Artificial Sequence
  Synthetic
gttagggcccatagaatgttggt

SEQ ID NO: 25201 - DNA, 19 bp, Artificial Sequence
  Synthetic
cgccagatgggtgggccat

SEQ ID NO: 25202 - DNA, 22 bp, Artificial Sequence
  Synthetic
gtcccttactcggtgctcttgc

SEQ ID NO: 25203 - DNA, 25 bp, Artificial Sequence
  Synthetic
tcttacatgcaggagaagtatgagg

SEQ ID NO: 25204 - DNA, 25 bp, Artificial Sequence
  Synthetic
acatgccaacataactgagattcaa

SEQ ID NO: 25205 - DNA, 20 bp, Artificial Sequence
  Synthetic
caacctgggttacctgcgat

SEQ ID NO: 25206 - DNA, 22 bp, Artificial Sequence
  Synthetic
cctcatgcagctacaatccttg

SEQ ID NO: 25207 - DNA, 22 bp, Artificial Sequence
  Synthetic
gtctactccgcgttcaatccgg

SEQ ID NO: 25208 - DNA, 25 bp, Artificial Sequence
  Synthetic
ggactagtcttgtcgtcaattatgg

SEQ ID NO: 25209 - DNA, 20 bp, Artificial Sequence
  Synthetic
ccatgccgatgcccctgttg

SEQ ID NO: 25210 - DNA, 21 bp, Artificial Sequence
  Synthetic
caactcgggccatcactagtg

SEQ ID NO: 25211 - DNA, 21 bp, Artificial Sequence
  Synthetic
ttgcagaagtgtgtcgaggca

SEQ ID NO: 25212 - DNA, 22 bp, Artificial Sequence
  Synthetic
aactcagtgaccaacaccgagc

SEQ ID NO: 25213 - DNA, 22 bp, Artificial Sequence
  Synthetic
tgcagacaaacaagcaatgcgt

SEQ ID NO: 25214 - DNA, 21 bp, Artificial Sequence
  Synthetic
gcatcattgctggtgtgcacg

SEQ ID NO: 25215 - DNA, 22 bp, Artificial Sequence
  Synthetic
attgtgatgtttactccccgga

SEQ ID NO: 25216 - DNA, 22 bp, Artificial Sequence
  Synthetic
tggtctgaaggggatgacgtcc

SEQ ID NO: 25217 - DNA, 21 bp, Artificial Sequence
  Synthetic
gaattcaactcccccccaaac

SEQ ID NO: 25218 - DNA, 20 bp, Artificial Sequence
  Synthetic
tggggacatctgggtgacaa

SEQ ID NO: 25219 - DNA, 22 bp, Artificial Sequence
  Synthetic
aacgggggatgataaaaatgca

SEQ ID NO: 25220 - DNA, 21 bp, Artificial Sequence
  Synthetic
atcctggtgtcagatgtgtct

SEQ ID NO: 25221 - DNA, 21 bp, Artificial Sequence
  Synthetic
aatgacgtgtggatgggaaga

SEQ ID NO: 25222 - DNA, 20 bp, Artificial Sequence
  Synthetic
agaagtcagtggcgaggttt

SEQ ID NO: 25223 - DNA, 21 bp, Artificial Sequence
  Synthetic
ggacagctttcctttgtgtgc

SEQ ID NO: 25224 - DNA, 21 bp, Artificial Sequence
  Synthetic
ggaattccctggcgttttaca

SEQ ID NO: 25225 - DNA, 25 bp, Artificial Sequence
  Synthetic
agctgatactcagataagtgtaccc

SEQ ID NO: 25226 - DNA, 25 bp, Artificial Sequence
  Synthetic
ttgcttgttggcaatatatggatgt

SEQ ID NO: 25227 - DNA, 20 bp, Artificial Sequence
  Synthetic
gaagcgtcgacgagctgcag

SEQ ID NO: 25228 - DNA, 22 bp, Artificial Sequence
  Synthetic
ctcttggaagagttcagcgact

SEQ ID NO: 25229 - DNA, 20 bp, Artificial Sequence
  Synthetic
ccggaaggtgcaccaacaaa

SEQ ID NO: 25230 - DNA, 25 bp, Artificial Sequence
  Synthetic
ttcaactacagaaacctcagtttgc

SEQ ID NO: 25231 - DNA, 22 bp, Artificial Sequence
  Synthetic
atcctccagaacaaacagacga

SEQ ID NO: 25232 - DNA, 25 bp, Artificial Sequence
  Synthetic
tggcctgatcttataaaaatggagc

SEQ ID NO: 25233 - DNA, 22 bp, Artificial Sequence
  Synthetic
acaacatgtgcagacaaactga

SEQ ID NO: 25234 - DNA, 21 bp, Artificial Sequence
  Synthetic
aaatggaacgtgttaccctgg

SEQ ID NO: 25235 - DNA, 20 bp, Artificial Sequence
  Synthetic
tgtggggcatacatcaccca

SEQ ID NO: 25236 - DNA, 20 bp, Artificial Sequence
  Synthetic
ggagggagccatggaagaat

SEQ ID NO: 25237 - DNA, 25 bp, Artificial Sequence
  Synthetic
tggtttccagcattcaaatgatcaa

SEQ ID NO: 25238 - DNA, 25 bp, Artificial Sequence
  Synthetic
ctatataacaaggtgaagagggcac

SEQ ID NO: 25239 - DNA, 19 bp, Artificial Sequence
  Synthetic
aaacccgctcaatgcccgg

SEQ ID NO: 25240 - DNA, 20 bp, Artificial Sequence
  Synthetic
gcaggggccctaaattgggt

SEQ ID NO: 25241 - DNA, 20 bp, Artificial Sequence
  Synthetic
cgagcttcggagcagtcacg

SEQ ID NO: 25242 - DNA, 21 bp, Artificial Sequence
  Synthetic
gggcggtactgttggtcaagg

SEQ ID NO: 25243 - DNA, 22 bp, Artificial Sequence
  Synthetic
gatgacaagccgtattgctggc

SEQ ID NO: 25244 - DNA, 20 bp, Artificial Sequence
  Synthetic
ggccaacaggcaacaacagc

SEQ ID NO: 25245 - DNA, 20 bp, Artificial Sequence
  Synthetic
cttcacacctacgcccgctc

SEQ ID NO: 25246 - DNA, 22 bp, Artificial Sequence
  Synthetic
gcttggcttggcatgtcaaggg

SEQ ID NO: 25247 - DNA, 22 bp, Artificial Sequence
  Synthetic
cgtgacgctgtcatcatgctca

SEQ ID NO: 25248 - DNA, 22 bp, Artificial Sequence
  Synthetic
ggagacgaaggtcatcacgtgg

SEQ ID NO: 25249 - DNA, 22 bp, Artificial Sequence
  Synthetic
cggttctaagacccttgctggc

SEQ ID NO: 25250 - DNA, 18 bp, Artificial Sequence
  Synthetic
gtgtgcacgcggggtgtt

SEQ ID NO: 25251 - DNA, 21 bp, Artificial Sequence
  Synthetic
taggactgtcaccaccggagc

SEQ ID NO: 25252 - DNA, 20 bp, Artificial Sequence
  Synthetic
agaggtctagacgtcgccgt

SEQ ID NO: 25253 - DNA, 22 bp, Artificial Sequence
  Synthetic
accggtatgtttcgtctgggga

SEQ ID NO: 25254 - DNA, 20 bp, Artificial Sequence
  Synthetic
gctgggggccgttcagaatg

SEQ ID NO: 25255 - DNA, 19 bp, Artificial Sequence
  Synthetic
tctaggagggtgggtggcc

SEQ ID NO: 25256 - DNA, 21 bp, Artificial Sequence
  Synthetic
caggcgagggggctgtacagt

SEQ ID NO: 25257 - DNA, 22 bp, Artificial Sequence
  Synthetic
catgccagaaggggtacaaggg

SEQ ID NO: 25258 - DNA, 20 bp, Artificial Sequence
  Synthetic
gaggattcaccgcttcgcgc

SEQ ID NO: 25259 - DNA, 20 bp, Artificial Sequence
  Synthetic
acaaggccaccacccagatg

SEQ ID NO: 25260 - DNA, 22 bp, Artificial Sequence
  Synthetic
ttccgcggaggaaaaggaagcc

SEQ ID NO: 25261 - DNA, 21 bp, Artificial Sequence
  Synthetic
gctcatcaccccttgctctgc

SEQ ID NO: 25262 - DNA, 22 bp, Artificial Sequence
  Synthetic
tcgctctctcgacaagaaagcc

SEQ ID NO: 25263 - DNA, 20 bp, Artificial Sequence
  Synthetic
gagagccaggggacacacga

SEQ ID NO: 25264 - DNA, 22 bp, Artificial Sequence
  Synthetic
ctacagagccaggaacagctgg

SEQ ID NO: 25265 - DNA, 22 bp, Artificial Sequence
  Synthetic
actgggcggtgaagacaaaacg

SEQ ID NO: 25266 - DNA, 22 bp, Artificial Sequence
  Synthetic
cgagtaactcgtccctcttctg

SEQ ID NO: 25267 - DNA, 20 bp, Artificial Sequence
  Synthetic
gcgtactgccccagcttgaa

SEQ ID NO: 25268 - DNA, 25 bp, Artificial Sequence
  Synthetic
gtgttgaaaagaaaaagactgaggg

SEQ ID NO: 25269 - DNA, 23 bp, Artificial Sequence
  Synthetic
ccatactggcattactggtgaca

SEQ ID NO: 25270 - DNA, 21 bp, Artificial Sequence
  Synthetic
ccactgtgtggttttccctca

SEQ ID NO: 25271 - DNA, 23 bp, Artificial Sequence
  Synthetic
tgtacaacagacttctcagtggt

SEQ ID NO: 25272 - DNA, 22 bp, Artificial Sequence
  Synthetic
gaagtcttcatcgctcaaagca

SEQ ID NO: 25273 - DNA, 25 bp, Artificial Sequence
  Synthetic
tactggctacaaacaatgtctttcg

SEQ ID NO: 25274 - DNA, 25 bp, Artificial Sequence
  Synthetic
tgatgaaacctgtgaacatgagtac

SEQ ID NO: 25275 - DNA, 21 bp, Artificial Sequence
  Synthetic
gaaacatggtggtggtgtagc

SEQ ID NO: 25276 - DNA, 20 bp, Artificial Sequence
  Synthetic
gtgcagacggttcgtacaca

SEQ ID NO: 25277 - DNA, 25 bp, Artificial Sequence
  Synthetic
ctagtggtgatatcacttgtgttgt

SEQ ID NO: 25278 - DNA, 22 bp, Artificial Sequence
  Synthetic
cataatggcaaccatccaacgt

SEQ ID NO: 25279 - DNA, 23 bp, Artificial Sequence
  Synthetic
aagacatctgaggagcactttgt

SEQ ID NO: 25280 - DNA, 25 bp, Artificial Sequence
  Synthetic
cttgatgagagttttcttggtaggt

SEQ ID NO: 25281 - DNA, 22 bp, Artificial Sequence
  Synthetic
ttaacgggtgtagaagctgtga

SEQ ID NO: 25282 - DNA, 25 bp, Artificial Sequence
  Synthetic
aaggaaacatcttacactacaacca

SEQ ID NO: 25283 - DNA, 25 bp, Artificial Sequence
  Synthetic
agacactattcagcgagtttcaaga

SEQ ID NO: 25284 - DNA, 24 bp, Artificial Sequence
  Synthetic
aacacaagagttaggtcatgagga

SEQ ID NO: 25285 - DNA, 25 bp, Artificial Sequence
  Synthetic
tgcagcatttgtttaagtggattag

SEQ ID NO: 25286 - DNA, 25 bp, Artificial Sequence
  Synthetic
tggaagagctatgttcatatcatgg

SEQ ID NO: 25287 - DNA, 22 bp, Artificial Sequence
  Synthetic
agtgttgctgtgaaaaatggcg

SEQ ID NO: 25288 - DNA, 21 bp, Artificial Sequence
  Synthetic
tacagctcacagcgagttagc

SEQ ID NO: 25289 - DNA, 22 bp, Artificial Sequence
  Synthetic
aattcgtagtgctgccaagaag

SEQ ID NO: 25290 - DNA, 20 bp, Artificial Sequence
  Synthetic
tttagccagcgtggtggttc

SEQ ID NO: 25291 - DNA, 24 bp, Artificial Sequence
  Synthetic
cactcgttatgtgcttatggatgg

SEQ ID NO: 25292 - DNA, 24 bp, Artificial Sequence
  Synthetic
tattgccatattggtgacttgtgc

SEQ ID NO: 25293 - DNA, 22 bp, Artificial Sequence
  Synthetic
agacactgttgccacttacaca

SEQ ID NO: 25294 - DNA, 21 bp, Artificial Sequence
  Synthetic
aggaaaatggcattcccgtca

SEQ ID NO: 25295 - DNA, 24 bp, Artificial Sequence
  Synthetic
atccaacctggtcaaacattttca

SEQ ID NO: 25296 - DNA, 24 bp, Artificial Sequence
  Synthetic
tgacatattgggacctctttctgc

SEQ ID NO: 25297 - DNA, 23 bp, Artificial Sequence
  Synthetic
gtttacgagaatgctttcttgcc

SEQ ID NO: 25298 - DNA, 24 bp, Artificial Sequence
  Synthetic
gctagagctatagtgtttgtgtgt

SEQ ID NO: 25299 - DNA, 25 bp, Artificial Sequence
  Synthetic
aaaccatgtatcaaggttgctactg

SEQ ID NO: 25300 - DNA, 21 bp, Artificial Sequence
  Synthetic
gcgaggaaatgctcgataacc

SEQ ID NO: 25301 - DNA, 24 bp, Artificial Sequence
  Synthetic
acaatgctcttcactatgcttagg

SEQ ID NO: 25302 - DNA, 20 bp, Artificial Sequence
  Synthetic
cggctggtaccacacaaaca

SEQ ID NO: 25303 - DNA, 23 bp, Artificial Sequence
  Synthetic
ttcaactgtgctttccttctgtg

SEQ ID NO: 25304 - DNA, 22 bp, Artificial Sequence
  Synthetic
agaaacacagtctgtaccgtct

SEQ ID NO: 25305 - DNA, 24 bp, Artificial Sequence
  Synthetic
cgtcagcgtctaactaaatacaca

SEQ ID NO: 25306 - DNA, 25 bp, Artificial Sequence
  Synthetic
aatcaggatcttaatgggaactggt

SEQ ID NO: 25307 - DNA, 24 bp, Artificial Sequence
  Synthetic
tctactgtgtttccacctacaagt

SEQ ID NO: 25308 - DNA, 25 bp, Artificial Sequence
  Synthetic
agacttttatgactttgctgtgtct

SEQ ID NO: 25309 - DNA, 21 bp, Artificial Sequence
  Synthetic
ttgaagtcaatagccgccact

SEQ ID NO: 25310 - DNA, 23 bp, Artificial Sequence
  Synthetic
agtgtgcgcaagtattaagtgag

SEQ ID NO: 25311 - DNA, 25 bp, Artificial Sequence
  Synthetic
tgtgtgctataacagtaactatgcg

SEQ ID NO: 25312 - DNA, 22 bp, Artificial Sequence
  Synthetic
acatgatgagcttactggccac

SEQ ID NO: 25313 - DNA, 20 bp, Artificial Sequence
  Synthetic
aatgccccaggttgtgatgt

SEQ ID NO: 25314 - DNA, 20 bp, Artificial Sequence
  Synthetic
tggtattgccactgtacgcg

SEQ ID NO: 25315 - DNA, 25 bp, Artificial Sequence
  Synthetic
atgttgcaaattatcaaaaggtcgg

SEQ ID NO: 25316 - DNA, 22 bp, Artificial Sequence
  Synthetic
agacttcgtgcaaaacactacg

SEQ ID NO: 25317 - DNA, 25 bp, Artificial Sequence
  Synthetic
acagacctcaaataggcgttgtaag

SEQ ID NO: 25318 - DNA, 23 bp, Artificial Sequence
  Synthetic
atgtggctacattacaagcagaa

SEQ ID NO: 25319 - DNA, 20 bp, Artificial Sequence
  Synthetic
tagagggctgtcatgcaact

SEQ ID NO: 25320 - DNA, 25 bp, Artificial Sequence
  Synthetic
tgaagtactttgtcaagattggacc

SEQ ID NO: 25321 - DNA, 25 bp, Artificial Sequence
  Synthetic
ttgctgataagtttccagttcttca

SEQ ID NO: 25322 - DNA, 24 bp, Artificial Sequence
  Synthetic
atgtgaataagcatgcattccaca

SEQ ID NO: 25323 - DNA, 22 bp, Artificial Sequence
  Synthetic
aaaggacactttgatggacacg

SEQ ID NO: 25324 - DNA, 23 bp, Artificial Sequence
  Synthetic
ttgatggtagagtggaaggacag

SEQ ID NO: 25325 - DNA, 22 bp, Artificial Sequence
  Synthetic
gctatgccttcgaacacatcgt

SEQ ID NO: 25326 - DNA, 25 bp, Artificial Sequence
  Synthetic
gtaaggatggacatgttgaaacctt

SEQ ID NO: 25327 - DNA, 21 bp, Artificial Sequence
  Synthetic
ctgtgcaacagtacatacggc

SEQ ID NO: 25328 - DNA, 23 bp, Artificial Sequence
  Synthetic
tggctataccatgcatgctaact

SEQ ID NO: 25329 - DNA, 25 bp, Artificial Sequence
  Synthetic
tgcactttcgagtacatatctgatg

SEQ ID NO: 25330 - DNA, 24 bp, Artificial Sequence
  Synthetic
aaatggtacaatcacagatgctgt

SEQ ID NO: 25331 - DNA, 25 bp, Artificial Sequence
  Synthetic
atgcagattcttttgtagtcaaggg

SEQ ID NO: 25332 - DNA, 25 bp, Artificial Sequence
  Synthetic
tatggtttttacaccactactggca

SEQ ID NO: 25333 - DNA, 24 bp, Artificial Sequence
  Synthetic
tcaagatgttaactgcactgatgt

SEQ ID NO: 25334 - DNA, 25 bp, Artificial Sequence
  Synthetic
acagaagtaatgcctgtttctatgg

SEQ ID NO: 25335 - DNA, 25 bp, Artificial Sequence
  Synthetic
taatgctagagatctcatttgtgcg

SEQ ID NO: 25336 - DNA, 20 bp, Artificial Sequence
  Synthetic
gcaagctgcaagacgttgtt

SEQ ID NO: 25337 - DNA, 22 bp, Artificial Sequence
  Synthetic
acatgtcacgtatgtgccatcc

SEQ ID NO: 25338 - DNA, 23 bp, Artificial Sequence
  Synthetic
catcaccagatgttgatcttggc

SEQ ID NO: 25339 - DNA, 21 bp, Artificial Sequence
  Synthetic
gtggttcttgctgcaagtttg

SEQ ID NO: 25340 - DNA, 23 bp, Artificial Sequence
  Synthetic
attcacatcttttgcttgtcgct

SEQ ID NO: 25341 - DNA, 23 bp, Artificial Sequence
  Synthetic
cgaagtttactaccagcttgagt

SEQ ID NO: 25342 - DNA, 23 bp, Artificial Sequence
  Synthetic
agtcacactagccatccttactg

SEQ ID NO: 25343 - DNA, 23 bp, Artificial Sequence
  Synthetic
taaagcttgttttcctctggctc

SEQ ID NO: 25344 - DNA, 22 bp, Artificial Sequence
  Synthetic
actgtggctacatcacgaacgc

SEQ ID NO: 25345 - DNA, 22 bp, Artificial Sequence
  Synthetic
agtgtgttagaggtacgactgt

SEQ ID NO: 25346 - DNA, 24 bp, Artificial Sequence
  Synthetic
gcttgaagatccttgtaaggtaca

SEQ ID NO: 25347 - DNA, 20 bp, Artificial Sequence
  Synthetic
agcgccgaccccaaggttta

SEQ ID NO: 25348 - DNA, 20 bp, Artificial Sequence
  Synthetic
acaatgctgccaccgtgcta

SEQ ID NO: 25349 - DNA, 21 bp, Artificial Sequence
  Synthetic
gctgaggcatctaaaaagcct

SEQ ID NO: 25350 - DNA, 23 bp, Artificial Sequence
  Synthetic
aagcacattgacgcatacaaaac

SEQ ID NO: 25351 - DNA, 25 bp, Artificial Sequence
  Synthetic
tcaatgtgtaacattagggaggact

SEQ ID NO: 25352 - DNA, 24 bp, Artificial Sequence
  Synthetic
accaataggtgacaatcatccaga

SEQ ID NO: 25353 - DNA, 22 bp, Artificial Sequence
  Synthetic
ttgacaaggtgtgaagagccgc

SEQ ID NO: 25354 - DNA, 22 bp, Artificial Sequence
  Synthetic
gttgggacacactccacacaaa

SEQ ID NO: 25355 - DNA, 25 bp, Artificial Sequence
  Synthetic
cagacagactaatacagataacccg

SEQ ID NO: 25356 - DNA, 25 bp, Artificial Sequence
  Synthetic
ttaccattttctagggagatctgga

SEQ ID NO: 25357 - DNA, 25 bp, Artificial Sequence
  Synthetic
ggtaacttacctatttatccccacc

SEQ ID NO: 25358 - DNA, 25 bp, Artificial Sequence
  Synthetic
taccagttatgttaacacctggatc

SEQ ID NO: 25359 - DNA, 25 bp, Artificial Sequence
  Synthetic
ttagccactactctcataggagaac

SEQ ID NO: 25360 - DNA, 20 bp, Artificial Sequence
  Synthetic
agtccaccgcctcactagtt

SEQ ID NO: 25361 - DNA, 24 bp, Artificial Sequence
  Synthetic
ttaaatgaagttcttgtggtgcca

SEQ ID NO: 25362 - DNA, 21 bp, Artificial Sequence
  Synthetic
aaatgcatctgtgttctggca

SEQ ID NO: 25363 - DNA, 23 bp, Artificial Sequence
  Synthetic
ttgcctatcaacacacacactca

SEQ ID NO: 25364 - DNA, 25 bp, Artificial Sequence
  Synthetic
tccctaattgtgattgcactgaatg

SEQ ID NO: 25365 - DNA, 22 bp, Artificial Sequence
  Synthetic
ctgaggagcaagggttatctga

SEQ ID NO: 25366 - DNA, 23 bp, Artificial Sequence
  Synthetic
ggctccagcttagctatgtacat

SEQ ID NO: 25367 - DNA, 25 bp, Artificial Sequence
  Synthetic
ttgatgggtatgatcaacagagtgt

SEQ ID NO: 25368 - DNA, 22 bp, Artificial Sequence
  Synthetic
ttaccagcaatggcaagaaggt

SEQ ID NO: 25369 - DNA, 23 bp, Artificial Sequence
  Synthetic
gggaacctaaacccaaaagcaga

SEQ ID NO: 25370 - DNA, 23 bp, Artificial Sequence
  Synthetic
ccatgagggtgttaagctagaga

SEQ ID NO: 25371 - DNA, 23 bp, Artificial Sequence
  Synthetic
ttcttggtatacatgttggtggc

SEQ ID NO: 25372 - DNA, 20 bp, Artificial Sequence
  Synthetic
tggttcagcagtagggtgtg

SEQ ID NO: 25373 - DNA, 22 bp, Artificial Sequence
  Synthetic
cgccactctttccttatacacc

SEQ ID NO: 25374 - DNA, 20 bp, Artificial Sequence
  Synthetic
tctgccattcgcattttgca

SEQ ID NO: 25375 - DNA, 25 bp, Artificial Sequence
  Synthetic
agactctctaaattcaaatgtggcg

SEQ ID NO: 25376 - DNA, 25 bp, Artificial Sequence
  Synthetic
gtatgcaacaaatcatattgccacc

SEQ ID NO: 25377 - DNA, 24 bp, Artificial Sequence
  Synthetic
actgggatgcagttagaaaagaaa

SEQ ID NO: 25378 - DNA, 23 bp, Artificial Sequence
  Synthetic
ctagctcctcacggacttttttc

SEQ ID NO: 25379 - DNA, 25 bp, Artificial Sequence
  Synthetic
aaacagaaacatcaaaggtgctagt

SEQ ID NO: 25380 - DNA, 24 bp, Artificial Sequence
  Synthetic
gttccattagttgaaggtacccct

SEQ ID NO: 25381 - DNA, 24 bp, Artificial Sequence
  Synthetic
cctgaatttttggtacagccttcc

SEQ ID NO: 25382 - DNA, 25 bp, Artificial Sequence
  Synthetic
tgtaggtgatggactttttgtagca

SEQ ID NO: 25383 - DNA, 23 bp, Artificial Sequence
  Synthetic
tggtctggagattaatagggctg

SEQ ID NO: 25384 - DNA, 25 bp, Artificial Sequence
  Synthetic
ttactcatgcaggaactataggtga

SEQ ID NO: 25385 - DNA, 22 bp, Artificial Sequence
  Synthetic
agttggcttttattcctcctgc

SEQ ID NO: 25386 - DNA, 25 bp, Artificial Sequence
  Synthetic
cccatggggttggtataaatacaga

SEQ ID NO: 25387 - DNA, 23 bp, Artificial Sequence
  Synthetic
aatttgctggcttcagaagagtc

SEQ ID NO: 25388 - DNA, 23 bp, Artificial Sequence
  Synthetic
attgtggaagaagcagattgtgt

SEQ ID NO: 25389 - DNA, 21 bp, Artificial Sequence
  Synthetic
ggcagcagtacacatttctcc

SEQ ID NO: 25390 - DNA, 25 bp, Artificial Sequence
  Synthetic
tcctagcactttatgaaaaaggagc

SEQ ID NO: 25391 - DNA, 21 bp, Artificial Sequence
  Synthetic
agaagtccttctccgctgaaa

SEQ ID NO: 25392 - DNA, 20 bp, Artificial Sequence
  Synthetic
gcccactgcaccaactcctg

SEQ ID NO: 25393 - DNA, 20 bp, Artificial Sequence
  Synthetic
tccctcagttgtgcctttgc

SEQ ID NO: 25394 - DNA, 23 bp, Artificial Sequence
  Synthetic
cccagacttcattagacagcctt

SEQ ID NO: 25395 - DNA, 20 bp, Artificial Sequence
  Synthetic
tggtacaatttgcgcgggaa

SEQ ID NO: 25396 - DNA, 25 bp, Artificial Sequence
  Synthetic
gctgaaaaattacactgttggttcg

SEQ ID NO: 25397 - DNA, 25 bp, Artificial Sequence
  Synthetic
tgaagcatttgaaatagcagaaggc

SEQ ID NO: 25398 - DNA, 22 bp, Artificial Sequence
  Synthetic
tgaatggaatgggaaagggaga

SEQ ID NO: 25399 - DNA, 20 bp, Artificial Sequence
  Synthetic
gtggagaacgccagaatgct

SEQ ID NO: 25400 - DNA, 22 bp, Artificial Sequence
  Synthetic
gatcaggagaatttggcgtcaa

SEQ ID NO: 25401 - DNA, 21 bp, Artificial Sequence
  Synthetic
tcctgagaggatcagtggccc

SEQ ID NO: 25402 - DNA, 24 bp, Artificial Sequence
  Synthetic
cccaaggggacaactatctactag

SEQ ID NO: 25403 - DNA, 25 bp, Artificial Sequence
  Synthetic
ctgctggttttgaagtttataacgc

SEQ ID NO: 25404 - DNA, 20 bp, Artificial Sequence
  Synthetic
cctgggcttggaaaaaccca

SEQ ID NO: 25405 - DNA, 25 bp, Artificial Sequence
  Synthetic
aatgacagttattcccatcgaagaa

SEQ ID NO: 25406 - DNA, 23 bp, Artificial Sequence
  Synthetic
ggaaattatcccgatacagaccg

SEQ ID NO: 25407 - DNA, 25 bp, Artificial Sequence
  Synthetic
cagtgtactaactgtcagcatgtga

SEQ ID NO: 25408 - DNA, 24 bp, Artificial Sequence
  Synthetic
tgatcccaatgttggtatggtaga

SEQ ID NO: 25409 - DNA, 24 bp, Artificial Sequence
  Synthetic
ttaaacctgttttggaagatggga

SEQ ID NO: 25410 - DNA, 25 bp, Artificial Sequence
  Synthetic
tcaggcgttgataaattaaccagag

SEQ ID NO: 25411 - DNA, 25 bp, Artificial Sequence
  Synthetic
tcaagaaccttgacgttacctttac

SEQ ID NO: 25412 - DNA, 20 bp, Artificial Sequence
  Synthetic
ccatgtgatgggccaattca

SEQ ID NO: 25413 - DNA, 25 bp, Artificial Sequence
  Synthetic
atggttccttattcaaagatggggt

SEQ ID NO: 25414 - DNA, 24 bp, Artificial Sequence
  Synthetic
atcaattaggagatgccacaacaa

SEQ ID NO: 25415 - DNA, 23 bp, Artificial Sequence
  Synthetic
tgagagaggctagaacaacttcc

SEQ ID NO: 25416 - DNA, 25 bp, Artificial Sequence
  Synthetic
aaggcagagttgatctcttaggaga

SEQ ID NO: 25417 - DNA, 21 bp, Artificial Sequence
  Synthetic
tcatgtgatgcgataaccacc

SEQ ID NO: 25418 - DNA, 25 bp, Artificial Sequence
  Synthetic
tttagctgataccggtcttaaaagt

SEQ ID NO: 25419 - DNA, 25 bp, Artificial Sequence
  Synthetic
gataccatgcttaaagatgggttga

SEQ ID NO: 25420 - DNA, 23 bp, Artificial Sequence
  Synthetic
tcaaagatgaggggacagtaact

SEQ ID NO: 25421 - DNA, 20 bp, Artificial Sequence
  Synthetic
tttgggtcacccgattggag

SEQ ID NO: 25422 - DNA, 24 bp, Artificial Sequence
  Synthetic
tgacaaaggcacaaaagacttaac

SEQ ID NO: 25423 - DNA, 21 bp, Artificial Sequence
  Synthetic
ctaactgtgtagcctgcttgc

SEQ ID NO: 25424 - DNA, 24 bp, Artificial Sequence
  Synthetic
gacttgtccctttgatagaggtgc

SEQ ID NO: 25425 - DNA, 25 bp, Artificial Sequence
  Synthetic
accggcttttttagaataaccaaca

SEQ ID NO: 25426 - DNA, 23 bp, Artificial Sequence
  Synthetic
tttgtcaacaaatttgggttcgg

SEQ ID NO: 25427 - DNA, 20 bp, Artificial Sequence
  Synthetic
aacggcaatcgcatgcttag

SEQ ID NO: 25428 - DNA, 22 bp, Artificial Sequence
  Synthetic
tggctcagaagctacaaaaacc

SEQ ID NO: 25429 - DNA, 25 bp, Artificial Sequence
  Synthetic
aatcagatgctctttacgttgttga

SEQ ID NO: 25430 - DNA, 25 bp, Artificial Sequence
  Synthetic
attgacttactcagatggttcagac

SEQ ID NO: 25431 - DNA, 25 bp, Artificial Sequence
  Synthetic
caagctattcagtttgcttttgacc

SEQ ID NO: 25432 - DNA, 23 bp, Artificial Sequence
  Synthetic
attaccctgttgaccaagcaaac

SEQ ID NO: 25433 - DNA, 25 bp, Artificial Sequence
  Synthetic
acgtaaccctaaatcaaatgaacct

SEQ ID NO: 25434 - DNA, 24 bp, Artificial Sequence
  Synthetic
acgatcggttacagaaatcaagtc

SEQ ID NO: 25435 - DNA, 21 bp, Artificial Sequence
  Synthetic
tctgccacctctcaaccgact

SEQ ID NO: 25436 - DNA, 21 bp, Artificial Sequence
  Synthetic
ggcttcaaccacaaacagcag

SEQ ID NO: 25437 - DNA, 25 bp, Artificial Sequence
  Synthetic
tcatgttcatgtctcctttaatgct

SEQ ID NO: 25438 - DNA, 23 bp, Artificial Sequence
  Synthetic
aaggggtagatcagaaatcagct

SEQ ID NO: 25439 - DNA, 24 bp, Artificial Sequence
  Synthetic
tcgtttgattcacaagagaggaaa

SEQ ID NO: 25440 - DNA, 25 bp, Artificial Sequence
  Synthetic
tattgcttacctagaatcacacgac

SEQ ID NO: 25441 - DNA, 25 bp, Artificial Sequence
  Synthetic
tcatcctaaagtgttttaccaggac

SEQ ID NO: 25442 - DNA, 25 bp, Artificial Sequence
  Synthetic
acaagaaaattgaggagtgtacagg

SEQ ID NO: 25443 - DNA, 21 bp, Artificial Sequence
  Synthetic
ttgggggacaacagaagactt

SEQ ID NO: 25444 - DNA, 23 bp, Artificial Sequence
  Synthetic
gtgaaagccagttgacctatgtt

SEQ ID NO: 25445 - DNA, 21 bp, Artificial Sequence
  Synthetic
gaacagcggaatgcacgtatt

SEQ ID NO: 25446 - DNA, 22 bp, Artificial Sequence
  Synthetic
ttttcggcggttcagaagttaa

SEQ ID NO: 25447 - DNA, 25 bp, Artificial Sequence
  Synthetic
agtcactttcattttagtgggatca

SEQ ID NO: 25448 - DNA, 23 bp, Artificial Sequence
  Synthetic
gcccaaggcagtaatcatttcaa

SEQ ID NO: 25449 - DNA, 23 bp, Artificial Sequence
  Synthetic
ttgtcctagttgtacgaggagag

SEQ ID NO: 25450 - DNA, 25 bp, Artificial Sequence
  Synthetic
tgaagtggttacagcattagaatca

SEQ ID NO: 25451 - DNA, 25 bp, Artificial Sequence
  Synthetic
acagaagtgaactcttgtcttgaac

SEQ ID NO: 25452 - DNA, 23 bp, Artificial Sequence
  Synthetic
ttttggatcgtgaagtaacgcaa

SEQ ID NO: 25453 - DNA, 25 bp, Artificial Sequence
  Synthetic
caggctattgctgatgaattagacg

SEQ ID NO: 25454 - DNA, 23 bp, Artificial Sequence
  Synthetic
tctttgactgctatgggagaagc

SEQ ID NO: 25455 - DNA, 24 bp, Artificial Sequence
  Synthetic
cgtaaacgtaaatcagaagcagct

SEQ ID NO: 25456 - DNA, 23 bp, Artificial Sequence
  Synthetic
ataacggctcctaaaaagctacc

SEQ ID NO: 25457 - DNA, 25 bp, Artificial Sequence
  Synthetic
agcgttaatattgtcgatgtcattg

SEQ ID NO: 25458 - DNA, 21 bp, Artificial Sequence
  Synthetic
gcagtacttgctagccaacac

SEQ ID NO: 25459 - DNA, 25 bp, Artificial Sequence
  Synthetic
ctttcgaaatcgtatcatgtttccc

SEQ ID NO: 25460 - DNA, 20 bp, Artificial Sequence
  Synthetic
tgatggtgacgatgctggac

SEQ ID NO: 25461 - DNA, 25 bp, Artificial Sequence
  Synthetic
atgcattaaggattcaagataggca

SEQ ID NO: 25462 - DNA, 23 bp, Artificial Sequence
  Synthetic
tcaagcggctctagaagtactag

SEQ ID NO: 25463 - DNA, 25 bp, Artificial Sequence
  Synthetic
atttgctgttacatgtgattgatgc

SEQ ID NO: 25464 - DNA, 25 bp, Artificial Sequence
  Synthetic
tacacgtttgaccaagaaatagagg

SEQ ID NO: 25465 - DNA, 23 bp, Artificial Sequence
  Synthetic
actgaccaaccatcttttgagga

SEQ ID NO: 25466 - DNA, 24 bp, Artificial Sequence
  Synthetic
gctcttagccaaacattttctggt

SEQ ID NO: 25467 - DNA, 25 bp, Artificial Sequence
  Synthetic
ttaccaggatttttatcaagtcggt

SEQ ID NO: 25468 - DNA, 21 bp, Artificial Sequence
  Synthetic
cagaagccttaaaagcagcgg

SEQ ID NO: 25469 - DNA, 25 bp, Artificial Sequence
  Synthetic
tcttgctcaatcatgtatcagctcg

SEQ ID NO: 25470 - DNA, 24 bp, Artificial Sequence
  Synthetic
attaccaatccagtagccattgag

SEQ ID NO: 25471 - DNA, 25 bp, Artificial Sequence
  Synthetic
cccttcgcttagaattagcggataa

SEQ ID NO: 25472 - DNA, 23 bp, Artificial Sequence
  Synthetic
acttgtctcaactgcatgatcct

SEQ ID NO: 25473 - DNA, 22 bp, Artificial Sequence
  Synthetic
acgggttgctaaaatgtatgcg

SEQ ID NO: 25474 - DNA, 20 bp, Artificial Sequence
  Synthetic
catgaccatgcgaggcatca

SEQ ID NO: 25475 - DNA, 20 bp, Artificial Sequence
  Synthetic
tcatcgacgttggtggagaa

SEQ ID NO: 25476 - DNA, 22 bp, Artificial Sequence
  Synthetic
tctaggcaatagagcacaagca

SEQ ID NO: 25477 - DNA, 25 bp, Artificial Sequence
  Synthetic
ccagttgatgtgaggacttatggat

SEQ ID NO: 25478 - DNA, 23 bp, Artificial Sequence
  Synthetic
agctttttaacgaatttccgcct

SEQ ID NO: 25479 - DNA, 23 bp, Artificial Sequence
  Synthetic
ggtcgtgtgaggcatgaaaaatg

SEQ ID NO: 25480 - DNA, 22 bp, Artificial Sequence
  Synthetic
aatcactacgagctatcacgca

SEQ ID NO: 25481 - DNA, 21 bp, Artificial Sequence
  Synthetic
tatccgctaaggtgcttaccc

SEQ ID NO: 25482 - DNA, 20 bp, Artificial Sequence
  Synthetic
atcggattggtggtgtggaa

SEQ ID NO: 25483 - DNA, 20 bp, Artificial Sequence
  Synthetic
aagagccccacaaccacaga

SEQ ID NO: 25484 - DNA, 20 bp, Artificial Sequence
  Synthetic
aagactagggcaagggacca

SEQ ID NO: 25485 - DNA, 20 bp, Artificial Sequence
  Synthetic
cgcccgcagactgtctgttg

SEQ ID NO: 25486 - DNA, 25 bp, Artificial Sequence
  Synthetic
aaatggtaaccaaaaaggatcctgt

SEQ ID NO: 25487 - DNA, 25 bp, Artificial Sequence
  Synthetic
ttttccatcatgagatttgaccact

SEQ ID NO: 25488 - DNA, 21 bp, Artificial Sequence
  Synthetic
aaatggcacctggtgtttgtg

SEQ ID NO: 25489 - DNA, 25 bp, Artificial Sequence
  Synthetic
catcactatttccaatttggacagc

SEQ ID NO: 25490 - DNA, 22 bp, Artificial Sequence
  Synthetic
gattggggcaaagtaatgacgt

SEQ ID NO: 25491 - DNA, 25 bp, Artificial Sequence
  Synthetic
ctttgatcaagttggatttaggtgc

SEQ ID NO: 25492 - DNA, 24 bp, Artificial Sequence
  Synthetic
ggatacccgtgatgccaatattga

SEQ ID NO: 25493 - DNA, 22 bp, Artificial Sequence
  Synthetic
accagcatcatttctccagagt

SEQ ID NO: 25494 - DNA, 25 bp, Artificial Sequence
  Synthetic
ttccagcaattttatagaggctgtc

SEQ ID NO: 25495 - DNA, 21 bp, Artificial Sequence
  Synthetic
aaagggcttgtcctccataca

SEQ ID NO: 25496 - DNA, 21 bp, Artificial Sequence
  Synthetic
ggaaacgagcatagttgagca

SEQ ID NO: 25497 - DNA, 25 bp, Artificial Sequence
  Synthetic
tggaatgttaatcaaagtgtcacgc

SEQ ID NO: 25498 - DNA, 25 bp, Artificial Sequence
  Synthetic
acagactctgttaaaaaagcatcgt

SEQ ID NO: 25499 - DNA, 25 bp, Artificial Sequence
  Synthetic
acacttgactttcaattgttcgaaa

SEQ ID NO: 25500 - DNA, 25 bp, Artificial Sequence
  Synthetic
ttgctgtcatcataccaatacgatg

SEQ ID NO: 25501 - DNA, 24 bp, Artificial Sequence
  Synthetic
accactcgaatactagttacttgc

SEQ ID NO: 25502 - DNA, 22 bp, Artificial Sequence
  Synthetic
caacctgtgttgttccttttgc

SEQ ID NO: 25503 - DNA, 22 bp, Artificial Sequence
  Synthetic
gctttttgagcttgagtacgca

SEQ ID NO: 25504 - DNA, 23 bp, Artificial Sequence
  Synthetic
atcaaccgtaacaaagttcacca

SEQ ID NO: 25505 - DNA, 22 bp, Artificial Sequence
  Synthetic
agacattttttcgcccttacca

SEQ ID NO: 25506 - DNA, 20 bp, Artificial Sequence
  Synthetic
tgaccctggatgagtgaagc

SEQ ID NO: 25507 - DNA, 20 bp, Artificial Sequence
  Synthetic
ggtacagcacgccagatgat

SEQ ID NO: 25508 - DNA, 24 bp, Artificial Sequence
  Synthetic
atggtcaccaaggataaccaattc

SEQ ID NO: 25509 - DNA, 25 bp, Artificial Sequence
  Synthetic
tgtcatggtattcaatttcagcctc

SEQ ID NO: 25510 - DNA, 22 bp, Artificial Sequence
  Synthetic
gattccttgcttagccaagact

SEQ ID NO: 25511 - DNA, 25 bp, Artificial Sequence
  Synthetic
aactccttttaaacaaacttgcgac

SEQ ID NO: 25512 - DNA, 23 bp, Artificial Sequence
  Synthetic
ggctcagtcgtagaatcagattg

SEQ ID NO: 25513 - DNA, 25 bp, Artificial Sequence
  Synthetic
actaagaagcaattgaatagcctgc

SEQ ID NO: 25514 - DNA, 20 bp, Artificial Sequence
  Synthetic
cccttgaccaacggaccata

SEQ ID NO: 25515 - DNA, 20 bp, Artificial Sequence
  Synthetic
ctgtgttcggcatgggtaca

SEQ ID NO: 25516 - DNA, 22 bp, Artificial Sequence
  Synthetic
tctcaaatttcctacgcccgcg

SEQ ID NO: 25517 - DNA, 22 bp, Artificial Sequence
  Synthetic
cctgctcgagttgtagctctcg

SEQ ID NO: 25518 - DNA, 21 bp, Artificial Sequence
  Synthetic
aagtcagcaccccttctcccg

SEQ ID NO: 25519 - DNA, 24 bp, Artificial Sequence
  Synthetic
ttccaatcgtccggtttagttagc

SEQ ID NO: 25520 - DNA, 23 bp, Artificial Sequence
  Synthetic
actcgactagtgagctattacgc

SEQ ID NO: 25521 - DNA, 22 bp, Artificial Sequence
  Synthetic
cacctttccctcacggtactgg

SEQ ID NO: 25522 - DNA, 21 bp, Artificial Sequence
  Synthetic
gaaaggaggtgatccagccgc

SEQ ID NO: 25523 - DNA, 20 bp, Artificial Sequence
  Synthetic
catcggcttcggcattagct

SEQ ID NO: 25524 - DNA, 24 bp, Artificial Sequence
  Synthetic
tgctgttgagaagacttgtgattt

SEQ ID NO: 25525 - DNA, 21 bp, Artificial Sequence
  Synthetic
tctgaaagggcttgacgaact

SEQ ID NO: 25526 - DNA, 23 bp, Artificial Sequence
  Synthetic
gatacgtcaaatgtaccaccacc

SEQ ID NO: 25527 - DNA, 21 bp, Artificial Sequence
  Synthetic
ttgccttctgggttagcaatg

SEQ ID NO: 25528 - DNA, 20 bp, Artificial Sequence
  Synthetic
cttagcagacgctcgtgcaa

SEQ ID NO: 25529 - DNA, 21 bp, Artificial Sequence
  Synthetic
tagcgttgaagttgttgacgt

SEQ ID NO: 25530 - DNA, 25 bp, Artificial Sequence
  Synthetic
atcaataggaccaatcaaactcagg

SEQ ID NO: 25531 - DNA, 24 bp, Artificial Sequence
  Synthetic
actgtcactggcttagattcatct

SEQ ID NO: 25532 - DNA, 24 bp, Artificial Sequence
  Synthetic
attacgaatagtggcgctactaga

SEQ ID NO: 25533 - DNA, 25 bp, Artificial Sequence
  Synthetic
acttctcatcaatggcttacctatg

SEQ ID NO: 25534 - DNA, 25 bp, Artificial Sequence
  Synthetic
aaaagcactaattctccttcgtcct

SEQ ID NO: 25535 - DNA, 23 bp, Artificial Sequence
  Synthetic
tggtcaccaccattcaaaaactc

SEQ ID NO: 25536 - DNA, 25 bp, Artificial Sequence
  Synthetic
atgtctccatcaatacaccgttaaa

SEQ ID NO: 25537 - DNA, 25 bp, Artificial Sequence
  Synthetic
ctatcactgaaaatgacaatgcgtc

SEQ ID NO: 25538 - DNA, 24 bp, Artificial Sequence
  Synthetic
aaacctcagcacattattcaagct

SEQ ID NO: 25539 - DNA, 25 bp, Artificial Sequence
  Synthetic
ttgcatctgtacaggtctatagtga

SEQ ID NO: 25540 - DNA, 21 bp, Artificial Sequence
  Synthetic
gctatggctgactcactagct

SEQ ID NO: 25541 - DNA, 25 bp, Artificial Sequence
  Synthetic
cttaaaagggcactaggaaaggaaa

SEQ ID NO: 25542 - DNA, 23 bp, Artificial Sequence
  Synthetic
attggcgaacttttccaaatggt

SEQ ID NO: 25543 - DNA, 21 bp, Artificial Sequence
  Synthetic
ccttgcccataaagccaagat

SEQ ID NO: 25544 - DNA, 25 bp, Artificial Sequence
  Synthetic
atccgtcgctttatgttgtaattgt

SEQ ID NO: 25545 - DNA, 25 bp, Artificial Sequence
  Synthetic
ggacaaccgtttttttaaaaggttg

SEQ ID NO: 25546 - DNA, 20 bp, Artificial Sequence
  Synthetic
cctttgccaaacacgagcaa

SEQ ID NO: 25547 - DNA, 23 bp, Artificial Sequence
  Synthetic
gtatgagatggctgaggtcaagg

SEQ ID NO: 25548 - DNA, 22 bp, Artificial Sequence
  Synthetic
aaaagtcccgctaatgaatccc

SEQ ID NO: 25549 - DNA, 25 bp, Artificial Sequence
  Synthetic
atcaactcctgattgattacctgtt

SEQ ID NO: 25550 - DNA, 22 bp, Artificial Sequence
  Synthetic
cctgctaagtcgggattgaagt

SEQ ID NO: 25551 - DNA, 20 bp, Artificial Sequence
  Synthetic
ccacctaaagctacccccaa

SEQ ID NO: 25552 - DNA, 22 bp, Artificial Sequence
  Synthetic
attcacacgaccaatcagacct

SEQ ID NO: 25553 - DNA, 21 bp, Artificial Sequence
  Synthetic
gtggtacgcccctacctgtcg

SEQ ID NO: 25554 - DNA, 19 bp, Artificial Sequence
  Synthetic
cagggcgccctgctactga

SEQ ID NO: 25555 - DNA, 20 bp, Artificial Sequence
  Synthetic
gggtttataccacccgcgct

SEQ ID NO: 25556 - DNA, 22 bp, Artificial Sequence
  Synthetic
tacaccccttacccgaaggcca

SEQ ID NO: 25557 - DNA, 21 bp, Artificial Sequence
  Synthetic
cggtggttgtggcctcctatt

SEQ ID NO: 25558 - DNA, 22 bp, Artificial Sequence
  Synthetic
tgcttcgatcgtgaatacgcct

SEQ ID NO: 25559 - DNA, 21 bp, Artificial Sequence
  Synthetic
tctcacggacgccttccatca

SEQ ID NO: 25560 - DNA, 21 bp, Artificial Sequence
  Synthetic
ggggccgatttccccgaggta

SEQ ID NO: 25561 - DNA, 20 bp, Artificial Sequence
  Synthetic
cggccaacgcccaacacaac

SEQ ID NO: 25562 - DNA, 21 bp, Artificial Sequence
  Synthetic
tataggcaggagacggctgct

SEQ ID NO: 25563 - DNA, 22 bp, Artificial Sequence
  Synthetic
ggtttccctgttatgaccccgc

SEQ ID NO: 25564 - DNA, 20 bp, Artificial Sequence
  Synthetic
cgatgcccccgagatgtgtg

SEQ ID NO: 25565 - DNA, 19 bp, Artificial Sequence
  Synthetic
tcgaggtgcgagctgtggt

SEQ ID NO: 25566 - DNA, 22 bp, Artificial Sequence
  Synthetic
agcttgccgaattggttgaggc

SEQ ID NO: 25567 - DNA, 20 bp, Artificial Sequence
  Synthetic
ggtgttgcaggctccccaag

SEQ ID NO: 25568 - DNA, 21 bp, Artificial Sequence
  Synthetic
gcttgctagtcgcctgtggtc

SEQ ID NO: 25569 - DNA, 21 bp, Artificial Sequence
  Synthetic
tgcggtcgcaggtttgaaagc

SEQ ID NO: 25570 - DNA, 22 bp, Artificial Sequence
  Synthetic
ctctccaccatgcccccacttg

SEQ ID NO: 25571 - DNA, 22 bp, Artificial Sequence
  Synthetic
ttccatcacttccaccgacgtg

SEQ ID NO: 25572 - DNA, 22 bp, Artificial Sequence
  Synthetic
tgacccctggtaacacgaacac

SEQ ID NO: 25573 - DNA, 22 bp, Artificial Sequence
  Synthetic
gcccagtcgcagagtgctatgg

SEQ ID NO: 25574 - DNA, 20 bp, Artificial Sequence
  Synthetic
tctgtgggtctggtgggatg

SEQ ID NO: 25575 - DNA, 22 bp, Artificial Sequence
  Synthetic
tttctgtgtctaagcactggtg

SEQ ID NO: 25576 - DNA, 25 bp, Artificial Sequence
  Synthetic
tgattatgtcattgcattgactggt

SEQ ID NO: 25577 - DNA, 22 bp, Artificial Sequence
  Synthetic
ttctgagagttggagtgttggt

SEQ ID NO: 25578 - DNA, 24 bp, Artificial Sequence
  Synthetic
actggtgttattgacattagtgct

SEQ ID NO: 25579 - DNA, 25 bp, Artificial Sequence
  Synthetic
acaagcttttttctatagtggtggt

SEQ ID NO: 25580 - DNA, 25 bp, Artificial Sequence
  Synthetic
ttctgcattgataattgtggtgagc

SEQ ID NO: 25581 - DNA, 24 bp, Artificial Sequence
  Synthetic
tgaaactgtctgtagtgtcgcata

SEQ ID NO: 25582 - DNA, 24 bp, Artificial Sequence
  Synthetic
tgatgaagagggtggttatgatgt

SEQ ID NO: 25583 - DNA, 25 bp, Artificial Sequence
  Synthetic
agcttgttagtatgaaaggtactgg

SEQ ID NO: 25584 - DNA, 24 bp, Artificial Sequence
  Synthetic
tttgactttgttgtcaatgctgct

SEQ ID NO: 25585 - DNA, 24 bp, Artificial Sequence
  Synthetic
aacttgtgttattgccaatgttcc

SEQ ID NO: 25586 - DNA, 24 bp, Artificial Sequence
  Synthetic
gaagttgactgggttgctttttac

SEQ ID NO: 25587 - DNA, 23 bp, Artificial Sequence
  Synthetic
gtgatgttggtttttgtccacac

SEQ ID NO: 25588 - DNA, 25 bp, Artificial Sequence
  Synthetic
tgtcctatagttgttggtgtttcag

SEQ ID NO: 25589 - DNA, 23 bp, Artificial Sequence
  Synthetic
tgatgacggttacatttgtggtg

SEQ ID NO: 25590 - DNA, 25 bp, Artificial Sequence
  Synthetic
agctacaattccaccttacaatctg

SEQ ID NO: 25591 - DNA, 24 bp, Artificial Sequence
  Synthetic
cataatggtgtcttcttgggagtt

SEQ ID NO: 25592 - DNA, 20 bp, Artificial Sequence
  Synthetic
tgcaagttgagagtgccaac

SEQ ID NO: 25593 - DNA, 20 bp, Artificial Sequence
  Synthetic
tgcaccacatggaccttttg

SEQ ID NO: 25594 - DNA, 25 bp, Artificial Sequence
  Synthetic
cgcaaagtctgaatttgatcatgag

SEQ ID NO: 25595 - DNA, 25 bp, Artificial Sequence
  Synthetic
tgaaactttgacatggcctcttatc

SEQ ID NO: 25596 - DNA, 25 bp, Artificial Sequence
  Synthetic
ttaactgcttgtgctttttctgttg

SEQ ID NO: 25597 - DNA, 20 bp, Artificial Sequence
  Synthetic
gggtgtgcttgtgaccgtac

SEQ ID NO: 25598 - DNA, 23 bp, Artificial Sequence
  Synthetic
tacttggaaagatggcagagtca

SEQ ID NO: 25599 - DNA, 20 bp, Artificial Sequence
  Synthetic
tgctctatgcgatgcgatgg

SEQ ID NO: 25600 - DNA, 24 bp, Artificial Sequence
  Synthetic
actgaacttttgcaatttgtcacc

SEQ ID NO: 25601 - DNA, 22 bp, Artificial Sequence
  Synthetic
agaactgttggtggtgtttctc

SEQ ID NO: 25602 - DNA, 25 bp, Artificial Sequence
  Synthetic
tggcacaagttttaacagaagttgt

SEQ ID NO: 25603 - DNA, 23 bp, Artificial Sequence
  Synthetic
atttgccttacccagatcctagt

SEQ ID NO: 25604 - DNA, 24 bp, Artificial Sequence
  Synthetic
ttgtggttcacaaactgtacttcg

SEQ ID NO: 25605 - DNA, 25 bp, Artificial Sequence
  Synthetic
gtcagtgatgcatatgctaatttgg

SEQ ID NO: 25606 - DNA, 25 bp, Artificial Sequence
  Synthetic
tgttcctttacaggttggtttttca

SEQ ID NO: 25607 - DNA, 20 bp, Artificial Sequence
  Synthetic
ttgagccaaaaccaccacac

SEQ ID NO: 25608 - DNA, 23 bp, Artificial Sequence
  Synthetic
tggtcaacttgatggtctttgtt

SEQ ID NO: 25609 - DNA, 25 bp, Artificial Sequence
  Synthetic
aattgtttgcaaaacgaaaaatggg

SEQ ID NO: 25610 - DNA, 25 bp, Artificial Sequence
  Synthetic
taaccacttgtccactttttatcca

SEQ ID NO: 25611 - DNA, 25 bp, Artificial Sequence
  Synthetic
cacctggtacaactgttttaaaacg

SEQ ID NO: 25612 - DNA, 23 bp, Artificial Sequence
  Synthetic
gttacgggtttattgccaactca

SEQ ID NO: 25613 - DNA, 25 bp, Artificial Sequence
  Synthetic
ttcctgtgtttttagtgttgtcaac

SEQ ID NO: 25614 - DNA, 24 bp, Artificial Sequence
  Synthetic
atcaaccactccgtttaacttgtt

SEQ ID NO: 25615 - DNA, 25 bp, Artificial Sequence
  Synthetic
gcacttttgtgggtattttaccacc

SEQ ID NO: 25616 - DNA, 25 bp, Artificial Sequence
  Synthetic
atgttgcactccccatttattatca

SEQ ID NO: 25617 - DNA, 23 bp, Artificial Sequence
  Synthetic
atcaacaaagcattattggtgcc

SEQ ID NO: 25618 - DNA, 25 bp, Artificial Sequence
  Synthetic
aagttgttacatctggtttgggtac

SEQ ID NO: 25619 - DNA, 23 bp, Artificial Sequence
  Synthetic
atgaccggcttgattcaattcaa

SEQ ID NO: 25620 - DNA, 24 bp, Artificial Sequence
  Synthetic
aatggtgtctttcgtgtaacttcc

SEQ ID NO: 25621 - DNA, 23 bp, Artificial Sequence
  Synthetic
ctacaggttgttgtggttgttgc

SEQ ID NO: 25622 - DNA, 25 bp, Artificial Sequence
  Synthetic
atgtccatttacgtaactggaactt

SEQ ID NO: 25623 - DNA, 25 bp, Artificial Sequence
  Synthetic
cacttcttagtggtgtacttcttgt

SEQ ID NO: 25624 - DNA, 24 bp, Artificial Sequence
  Synthetic
tcctccttcattttacatgcctct

SEQ ID NO: 25625 - DNA, 25 bp, Artificial Sequence
  Synthetic
tttggaaccaaagttctctattgct

SEQ ID NO: 25626 - DNA, 23 bp, Artificial Sequence
  Synthetic
agttcttctggtacttccactcc

SEQ ID NO: 25627 - DNA, 25 bp, Artificial Sequence
  Synthetic
agtgggtgataatgttcagattacc

SEQ ID NO: 25628 - DNA, 25 bp, Artificial Sequence
  Synthetic
ttggacagacctttattgcaaattg

SEQ ID NO: 25629 - DNA, 23 bp, Artificial Sequence
  Synthetic
atctgatttattagacgaggcgc

SEQ ID NO: 25630 - DNA, 21 bp, Artificial Sequence
  Synthetic
tgtggagattgggttttggca

SEQ ID NO: 25631 - DNA, 22 bp, Artificial Sequence
  Synthetic
acaactttggagtggattgcac

SEQ ID NO: 25632 - DNA, 25 bp, Artificial Sequence
  Synthetic
aatggggtaatgagaattggattgc

SEQ ID NO: 25633 - DNA, 24 bp, Artificial Sequence
  Synthetic
taaccctgataatcagacaaggca

SEQ ID NO: 25634 - DNA, 22 bp, Artificial Sequence
  Synthetic
tcgacgtccatcgactacaccg

SEQ ID NO: 25635 - DNA, 20 bp, Artificial Sequence
  Synthetic
agagagttgctttgcccaga

SEQ ID NO: 25636 - DNA, 24 bp, Artificial Sequence
  Synthetic
aatattgcaatatggcagtctggg

SEQ ID NO: 25637 - DNA, 24 bp, Artificial Sequence
  Synthetic
tgcaggttattgcagaaattcacc

SEQ ID NO: 25638 - DNA, 25 bp, Artificial Sequence
  Synthetic
ttaaacttaggccttgaaacagaca

SEQ ID NO: 25639 - DNA, 22 bp, Artificial Sequence
  Synthetic
ctgagcaagcccacattttcgc

SEQ ID NO: 25640 - DNA, 25 bp, Artificial Sequence
  Synthetic
taggtgacacagcatttatacaagg

SEQ ID NO: 25641 - DNA, 21 bp, Artificial Sequence
  Synthetic
atctgaacgtctactgctggt

SEQ ID NO: 25642 - DNA, 24 bp, Artificial Sequence
  Synthetic
tactgcttttgatgcaaaacagac

SEQ ID NO: 25643 - DNA, 25 bp, Artificial Sequence
  Synthetic
atcagaatgaaccatgaagcctatg

SEQ ID NO: 25644 - DNA, 23 bp, Artificial Sequence
  Synthetic
ccagaataatggcatttgctgga

SEQ ID NO: 25645 - DNA, 25 bp, Artificial Sequence
  Synthetic
aatccctacccctaaaatctgtttg

SEQ ID NO: 25646 - DNA, 20 bp, Artificial Sequence
  Synthetic
cgcggttaggacttgtttca

SEQ ID NO: 25647 - DNA, 21 bp, Artificial Sequence
  Synthetic
tttgtgtgaaacctgtgctgc

SEQ ID NO: 25648 - DNA, 24 bp, Artificial Sequence
  Synthetic
ggaattgttccaccaacaggaaag

SEQ ID NO: 25649 - DNA, 23 bp, Artificial Sequence
  Synthetic
ctgatgttacggagagtcaaacc

SEQ ID NO: 25650 - DNA, 24 bp, Artificial Sequence
  Synthetic
acaaacacaagtagggcaaacaga

SEQ ID NO: 25651 - DNA, 20 bp, Artificial Sequence
  Synthetic
acgatgcaacgtcacaatgt

SEQ ID NO: 25652 - DNA, 24 bp, Artificial Sequence
  Synthetic
tttcactatgctcgacaaaatggt

SEQ ID NO: 25653 - DNA, 22 bp, Artificial Sequence
  Synthetic
atctggtggaaggcttggatat

SEQ ID NO: 25654 - DNA, 20 bp, Artificial Sequence
  Synthetic
gggtgacccaaaatgaaggc

SEQ ID NO: 25655 - DNA, 23 bp, Artificial Sequence
  Synthetic
tgtagcagagaccgattttacca

SEQ ID NO: 25656 - DNA, 21 bp, Artificial Sequence
  Synthetic
acaacagacaaaatgtgggct

SEQ ID NO: 25657 - DNA, 24 bp, Artificial Sequence
  Synthetic
atccagactacattaaaatggcgc

SEQ ID NO: 25658 - DNA, 22 bp, Artificial Sequence
  Synthetic
gtggttctctcgtatccacaga

SEQ ID NO: 25659 - DNA, 24 bp, Artificial Sequence
  Synthetic
aacatctcagacaagttgtagcat

SEQ ID NO: 25660 - DNA, 24 bp, Artificial Sequence
  Synthetic
actttgaagcaggaattctggagt

SEQ ID NO: 25661 - DNA, 25 bp, Artificial Sequence
  Synthetic
actgtgtgaaaaatccctcaactag

SEQ ID NO: 25662 - DNA, 25 bp, Artificial Sequence
  Synthetic
aatggagacaagtccttatcaactc

SEQ ID NO: 25663 - DNA, 24 bp, Artificial Sequence
  Synthetic
tatcccaatttggtcaagagcacc

SEQ ID NO: 25664 - DNA, 24 bp, Artificial Sequence
  Synthetic
tttcccttttccctttcctattcc

SEQ ID NO: 25665 - DNA, 25 bp, Artificial Sequence
  Synthetic
tctctttgatcttccacaaggggta

SEQ ID NO: 25666 - DNA, 25 bp, Artificial Sequence
  Synthetic
agtgactggtgcttcttattttact

SEQ ID NO: 25667 - DNA, 25 bp, Artificial Sequence
  Synthetic
tcaagttcagataaaccctacacct

SEQ ID NO: 25668 - DNA, 24 bp, Artificial Sequence
  Synthetic
aatattgggacaggaacttcagct

SEQ ID NO: 25669 - DNA, 25 bp, Artificial Sequence
  Synthetic
cttggacatctattccaactttggc

SEQ ID NO: 25670 - DNA, 25 bp, Artificial Sequence
  Synthetic
tttctggaatcacattaaagcaagc

SEQ ID NO: 25671 - DNA, 21 bp, Artificial Sequence
  Synthetic
ttgcttcccatgtcagagtga

SEQ ID NO: 25672 - DNA, 25 bp, Artificial Sequence
  Synthetic
ttgaggatccagttttagcaaagaa

SEQ ID NO: 25673 - DNA, 24 bp, Artificial Sequence
  Synthetic
tagagggcctttagatctgacaat

SEQ ID NO: 25674 - DNA, 24 bp, Artificial Sequence
  Synthetic
agaagttgggaaacaaagactcaa

SEQ ID NO: 25675 - DNA, 20 bp, Artificial Sequence
  Synthetic
caggcagaagtgtgtggact

SEQ ID NO: 25676 - DNA, 25 bp, Artificial Sequence
  Synthetic
tggtcagatttttgtcagttagtgt

SEQ ID NO: 25677 - DNA, 20 bp, Artificial Sequence
  Synthetic
gcagttggcattcttggagt

SEQ ID NO: 25678 - DNA, 25 bp, Artificial Sequence
  Synthetic
gagagaagaatggatgtgtgagatg

SEQ ID NO: 25679 - DNA, 22 bp, Artificial Sequence
  Synthetic
tccatgttgctggaggaaattc

SEQ ID NO: 25680 - DNA, 25 bp, Artificial Sequence
  Synthetic
agaaccagaggattataaagaggct

SEQ ID NO: 25681 - DNA, 22 bp, Artificial Sequence
  Synthetic
ggagttcatccaagattggctc

SEQ ID NO: 25682 - DNA, 25 bp, Artificial Sequence
  Synthetic
tgctattggcatagatcctgataga

SEQ ID NO: 25683 - DNA, 20 bp, Artificial Sequence
  Synthetic
ggcaccatgcagtaccaaac

SEQ ID NO: 25684 - DNA, 24 bp, Artificial Sequence
  Synthetic
cctacagcaactgttacccttatg

SEQ ID NO: 25685 - DNA, 20 bp, Artificial Sequence
  Synthetic
cgggtacggacaatgaccaa

SEQ ID NO: 25686 - DNA, 23 bp, Artificial Sequence
  Synthetic
atgagatcagatgcacccattgg

SEQ ID NO: 25687 - DNA, 21 bp, Artificial Sequence
  Synthetic
ttgggagggaatggtagacgg

SEQ ID NO: 25688 - DNA, 20 bp, Artificial Sequence
  Synthetic
ttcttgtggccctggagaac

SEQ ID NO: 25689 - DNA, 25 bp, Artificial Sequence
  Synthetic
atggatttcctttgccatatcatgt

SEQ ID NO: 25690 - DNA, 23 bp, Artificial Sequence
  Synthetic
aaagacagtgcagcaacttagaa

SEQ ID NO: 25691 - DNA, 21 bp, Artificial Sequence
  Synthetic
aatctcgcagtggcagtttac

SEQ ID NO: 25692 - DNA, 23 bp, Artificial Sequence
  Synthetic
cattgtgacgaagagttgacaga

SEQ ID NO: 25693 - DNA, 25 bp, Artificial Sequence
  Synthetic
aattggttttctcttgaagcagact

SEQ ID NO: 25694 - DNA, 22 bp, Artificial Sequence
  Synthetic
cctcgtttggaagcaatacctt

SEQ ID NO: 25695 - DNA, 22 bp, Artificial Sequence
  Synthetic
actgggtcgtaactgcatatgg

SEQ ID NO: 25696 - DNA, 25 bp, Artificial Sequence
  Synthetic
caaggtaatacacgcataggtagag

SEQ ID NO: 25697 - DNA, 25 bp, Artificial Sequence
  Synthetic
ccaaattttaaagtatggcagcacc

SEQ ID NO: 25698 - DNA, 21 bp, Artificial Sequence
  Synthetic
tgtccctcttacagacacagg

SEQ ID NO: 25699 - DNA, 24 bp, Artificial Sequence
  Synthetic
taagcactattgacacagaaccct

SEQ ID NO: 25700 - DNA, 21 bp, Artificial Sequence
  Synthetic
tgtcaacaacgggtaaggtct

SEQ ID NO: 25701 - DNA, 25 bp, Artificial Sequence
  Synthetic
gatcctaacagatttgctctagctg

SEQ ID NO: 25702 - DNA, 25 bp, Artificial Sequence
  Synthetic
ccttaccttgtgtagaaaatcctcc

SEQ ID NO: 25703 - DNA, 24 bp, Artificial Sequence
  Synthetic
tgggtcagtaggagacagtattcc

SEQ ID NO: 25704 - DNA, 22 bp, Artificial Sequence
  Synthetic
ttaagcaacatgagtgcgactc

SEQ ID NO: 25705 - DNA, 20 bp, Artificial Sequence
  Synthetic
gtggggacatttgggtgacg

SEQ ID NO: 25706 - DNA, 24 bp, Artificial Sequence
  Synthetic
ctggggatgataaaaatgcaactg

SEQ ID NO: 25707 - DNA, 23 bp, Artificial Sequence
  Synthetic
tcctgacgtcagatgtatctgca

SEQ ID NO: 25708 - DNA, 23 bp, Artificial Sequence
  Synthetic
agaacgatcagcaaggatttacg

SEQ ID NO: 25709 - DNA, 20 bp, Artificial Sequence
  Synthetic
ttccacgcgacagatccgtc

SEQ ID NO: 25710 - DNA, 20 bp, Artificial Sequence
  Synthetic
acagagctggtcctgacgga

SEQ ID NO: 25711 - DNA, 22 bp, Artificial Sequence
  Synthetic
gctgatcctaacggaaggaggc

SEQ ID NO: 25712 - DNA, 19 bp, Artificial Sequence
  Synthetic
cctcccacgcgcgcctata

SEQ ID NO: 25713 - DNA, 20 bp, Artificial Sequence
  Synthetic
acaagacgagggctgcaacg

SEQ ID NO: 25714 - DNA, 20 bp, Artificial Sequence
  Synthetic
cggaggagagagaacggccg

SEQ ID NO: 25715 - DNA, 19 bp, Artificial Sequence
  Synthetic
ggccaaggcaacggcacga

SEQ ID NO: 25716 - DNA, 21 bp, Artificial Sequence
  Synthetic
cgatacagcgcgtcgtcgaac

SEQ ID NO: 25717 - DNA, 20 bp, Artificial Sequence
  Synthetic
gttctcggacgggtccctta

SEQ ID NO: 25718 - DNA, 23 bp, Artificial Sequence
  Synthetic
gcacgttgtctatccaatcgtaa

SEQ ID NO: 25719 - DNA, 21 bp, Artificial Sequence
  Synthetic
cgctttcctccgcatgtacaa

SEQ ID NO: 25720 - DNA, 24 bp, Artificial Sequence
  Synthetic
ttttacacagtgtcgaaatcacca

SEQ ID NO: 25721 - DNA, 22 bp, Artificial Sequence
  Synthetic
aacctgacctcgataaagcact

SEQ ID NO: 25722 - DNA, 23 bp, Artificial Sequence
  Synthetic
aatgacaaaacgtgctctctctg

SEQ ID NO: 25723 - DNA, 23 bp, Artificial Sequence
  Synthetic
gttgcctgagttttcggtattcg

SEQ ID NO: 25724 - DNA, 25 bp, Artificial Sequence
  Synthetic
ggttttgaagaagaagatgggatgt

SEQ ID NO: 25725 - DNA, 25 bp, Artificial Sequence
  Synthetic
aacgattggattttcaaagtttcca

SEQ ID NO: 25726 - DNA, 23 bp, Artificial Sequence
  Synthetic
cgaaaatagttccgcctgtttct

SEQ ID NO: 25727 - DNA, 25 bp, Artificial Sequence
  Synthetic
ggtcaagcgaagataacattctttc

SEQ ID NO: 25728 - DNA, 23 bp, Artificial Sequence
  Synthetic
cattcgactcacatcattgaagc

SEQ ID NO: 25729 - DNA, 24 bp, Artificial Sequence
  Synthetic
aggttagattcggaaaccatagct

SEQ ID NO: 25730 - DNA, 20 bp, Artificial Sequence
  Synthetic
ggctccgcccatgatttcat

SEQ ID NO: 25731 - DNA, 20 bp, Artificial Sequence
  Synthetic
gagtcgcttctagactcgcc

SEQ ID NO: 25732 - DNA, 20 bp, Artificial Sequence
  Synthetic
tatgggcgcaaagtgctgta

SEQ ID NO: 25733 - DNA, 21 bp, Artificial Sequence
  Synthetic
ttggaagcatacgtttgtggc

SEQ ID NO: 25734 - DNA, 21 bp, Artificial Sequence
  Synthetic
tttgcttttactgcagagcgt

SEQ ID NO: 25735 - DNA, 20 bp, Artificial Sequence
  Synthetic
tcggagagcgttgtggattg

SEQ ID NO: 25736 - DNA, 19 bp, Artificial Sequence
  Synthetic
acgacgtgctgcaaggccg

SEQ ID NO: 25737 - DNA, 21 bp, Artificial Sequence
  Synthetic
cagaccgctgctggacgaact

SEQ ID NO: 25738 - DNA, 22 bp, Artificial Sequence
  Synthetic
acatctgttcgacgtgatcgcc

SEQ ID NO: 25739 - DNA, 22 bp, Artificial Sequence
  Synthetic
ttgggtggtcttgactttggcg

SEQ ID NO: 25740 - DNA, 22 bp, Artificial Sequence
  Synthetic
ccctcttccctttaaccccacg

SEQ ID NO: 25741 - DNA, 24 bp, Artificial Sequence
  Synthetic
acaaagggattggctgatgattac

SEQ ID NO: 25742 - DNA, 25 bp, Artificial Sequence
  Synthetic
aactgaggaatatatctgttccagc

SEQ ID NO: 25743 - DNA, 24 bp, Artificial Sequence
  Synthetic
taatgcctttctcctcatgtctga

SEQ ID NO: 25744 - DNA, 25 bp, Artificial Sequence
  Synthetic
agaagtagcaatagatgacgaaacg

SEQ ID NO: 25745 - DNA, 24 bp, Artificial Sequence
  Synthetic
tttgtgagtggaagagaaaaacct

SEQ ID NO: 25746 - DNA, 24 bp, Artificial Sequence
  Synthetic
ggaaggcaaactagtaaaagggtc

SEQ ID NO: 25747 - DNA, 23 bp, Artificial Sequence
  Synthetic
agaagacaagcataacgggaaac

SEQ ID NO: 25748 - DNA, 25 bp, Artificial Sequence
  Synthetic
tcatcgattatgaggagctaagaga

SEQ ID NO: 25749 - DNA, 23 bp, Artificial Sequence
  Synthetic
tgcagatgcatatgtttttgtgg

SEQ ID NO: 25750 - DNA, 25 bp, Artificial Sequence
  Synthetic
attgcaatacaacttgtcaaacacc

SEQ ID NO: 25751 - DNA, 22 bp, Artificial Sequence
  Synthetic
caccatcaaaatgagcaggggt

SEQ ID NO: 25752 - DNA, 20 bp, Artificial Sequence
  Synthetic
cctacaagcgccaggagggt

SEQ ID NO: 25753 - DNA, 19 bp, Artificial Sequence
  Synthetic
ctcggagtcccagcgcgtt

SEQ ID NO: 25754 - DNA, 19 bp, Artificial Sequence
  Synthetic
cacctccctgtggcgcatc

SEQ ID NO: 25755 - DNA, 20 bp, Artificial Sequence
  Synthetic
tatccgtcctccctgggcac

SEQ ID NO: 25756 - DNA, 19 bp, Artificial Sequence
  Synthetic
ccgtccaccgtccctctca

SEQ ID NO: 25757 - DNA, 22 bp, Artificial Sequence
  Synthetic
gaagacctagagctgccggacc

SEQ ID NO: 25758 - DNA, 22 bp, Artificial Sequence
  Synthetic
gtgattctgggaaacgtgccca

SEQ ID NO: 25759 - DNA, 19 bp, Artificial Sequence
  Synthetic
gccctcctgggtacggcaa

SEQ ID NO: 25760 - DNA, 20 bp, Artificial Sequence
  Synthetic
gccgtgcttccagagaccga

SEQ ID NO: 25761 - DNA, 20 bp, Artificial Sequence
  Synthetic
caactcggcctgcgtgatcc

SEQ ID NO: 25762 - DNA, 20 bp, Artificial Sequence
  Synthetic
aagccatgacggtacacagg

SEQ ID NO: 25763 - DNA, 24 bp, Artificial Sequence
  Synthetic
ttaaccgtttcttctgccagttag

SEQ ID NO: 25764 - DNA, 23 bp, Artificial Sequence
  Synthetic
tctccgaacatgatcagaactcg

SEQ ID NO: 25765 - DNA, 24 bp, Artificial Sequence
  Synthetic
acgaaaacttttaacttcgacgga

SEQ ID NO: 25766 - DNA, 20 bp, Artificial Sequence
  Synthetic
actgcaaatcgttccgtcgt

SEQ ID NO: 25767 - DNA, 23 bp, Artificial Sequence
  Synthetic
agcaaagcaataacgaaccttgt

SEQ ID NO: 25768 - DNA, 21 bp, Artificial Sequence
  Synthetic
tatcgtcgagctgtacagacg

SEQ ID NO: 25769 - DNA, 25 bp, Artificial Sequence
  Synthetic
taccttcaaaaatacgtaaacccct

SEQ ID NO: 25770 - DNA, 20 bp, Artificial Sequence
  Synthetic
acaaacttgcaagcctgagc

SEQ ID NO: 25771 - DNA, 20 bp, Artificial Sequence
  Synthetic
ggtaggtcgcgacttgttga

SEQ ID NO: 25772 - DNA, 25 bp, Artificial Sequence
  Synthetic
caaccctgatgtaataaattccgtg

SEQ ID NO: 25773 - DNA, 23 bp, Artificial Sequence
  Synthetic
tcgggagaaaatagatcaagggc

SEQ ID NO: 25774 - DNA, 24 bp, Artificial Sequence
  Synthetic
taattcgcttaagattggcagtgg

SEQ ID NO: 25775 - DNA, 21 bp, Artificial Sequence
  Synthetic
cgtctgttgttaggaccggtt

SEQ ID NO: 25776 - DNA, 24 bp, Artificial Sequence
  Synthetic
tcttcgcatacgtaagaaactacg

SEQ ID NO: 25777 - DNA, 23 bp, Artificial Sequence
  Synthetic
gcaaagcataaattcttctggcg

SEQ ID NO: 25778 - DNA, 21 bp, Artificial Sequence
  Synthetic
tcatggttccgtcttccaagt

SEQ ID NO: 25779 - DNA, 20 bp, Artificial Sequence
  Synthetic
ccagatccgggttatagcga

SEQ ID NO: 25780 - DNA, 20 bp, Artificial Sequence
  Synthetic
ctctctcctgtgtcgatcgc

SEQ ID NO: 25781 - DNA, 20 bp, Artificial Sequence
  Synthetic
atgtgtgacgtccgcatcat

SEQ ID NO: 25782 - DNA, 20 bp, Artificial Sequence
  Synthetic
tgctcctacaagcgccagga

SEQ ID NO: 25783 - DNA, 19 bp, Artificial Sequence
  Synthetic
ggtggccgtgtacgcacct

SEQ ID NO: 25784 - DNA, 22 bp, Artificial Sequence
  Synthetic
atcgaccgactcctgctatccg

SEQ ID NO: 25785 - DNA, 19 bp, Artificial Sequence
  Synthetic
gcggttctgccagggcgtt

SEQ ID NO: 25786 - DNA, 19 bp, Artificial Sequence
  Synthetic
gggaccccgtggcgtatga

SEQ ID NO: 25787 - DNA, 20 bp, Artificial Sequence
  Synthetic
acattccatggggccaaaga

SEQ ID NO: 25788 - DNA, 24 bp, Artificial Sequence
  Synthetic
ttaaatacggactgaaaggagggc

SEQ ID NO: 25789 - DNA, 22 bp, Artificial Sequence
  Synthetic
ctccgccgagatcaaaagtcct

SEQ ID NO: 25790 - DNA, 25 bp, Artificial Sequence
  Synthetic
aggcgatcatggaaaagaacatagt

SEQ ID NO: 25791 - DNA, 22 bp, Artificial Sequence
  Synthetic
gggagaccttcactacctccag

SEQ ID NO: 25792 - DNA, 20 bp, Artificial Sequence
  Synthetic
ggccactatgtctgcacgtt

SEQ ID NO: 25793 - DNA, 24 bp, Artificial Sequence
  Synthetic
agaagtgagaataagatgctgcaa

SEQ ID NO: 25794 - DNA, 20 bp, Artificial Sequence
  Synthetic
cacgcaacaggacttgcaag

SEQ ID NO: 25795 - DNA, 20 bp, Artificial Sequence
  Synthetic
atgtggggtctgggtgttca

SEQ ID NO: 25796 - DNA, 24 bp, Artificial Sequence
  Synthetic
caggtggtagagctgtttaaatgc

SEQ ID NO: 25797 - DNA, 25 bp, Artificial Sequence
  Synthetic
gcttgccaaaatgttaaatgtacca

SEQ ID NO: 25798 - DNA, 25 bp, Artificial Sequence
  Synthetic
tgcacaaatagcagatatagatgca

SEQ ID NO: 25799 - DNA, 22 bp, Artificial Sequence
  Synthetic
gcaaacagctacagcaccatat

SEQ ID NO: 25800 - DNA, 25 bp, Artificial Sequence
  Synthetic
tacaggacacaagtcaagaactatg

SEQ ID NO: 25801 - DNA, 21 bp, Artificial Sequence
  Synthetic
gcacgctcgcctgatattgaa

SEQ ID NO: 25802 - DNA, 25 bp, Artificial Sequence
  Synthetic
aaccccatatttactgatccttcgg

SEQ ID NO: 25803 - DNA, 25 bp, Artificial Sequence
  Synthetic
tcaccttctatacctgccatatctg

SEQ ID NO: 25804 - DNA, 20 bp, Artificial Sequence
  Synthetic
tacgcttgcccgaccctaat

SEQ ID NO: 25805 - DNA, 21 bp, Artificial Sequence
  Synthetic
acaccgtgcaatgcttctaaa

SEQ ID NO: 25806 - DNA, 21 bp, Artificial Sequence
  Synthetic
tgtgtgtgatactcccttgca

SEQ ID NO: 25807 - DNA, 25 bp, Artificial Sequence
  Synthetic
atacgcttccaaacttgcttttagg

SEQ ID NO: 25808 - DNA, 22 bp, Artificial Sequence
  Synthetic
cattgcaccagctatgtgaagt

SEQ ID NO: 25809 - DNA, 25 bp, Artificial Sequence
  Synthetic
taaggtgctacagatgtcaacatcc

SEQ ID NO: 25810 - DNA, 24 bp, Artificial Sequence
  Synthetic
ctcagaggatgaggatgaggatga

SEQ ID NO: 25811 - DNA, 22 bp, Artificial Sequence
  Synthetic
gtaatcagcaaacagtgtgccg

SEQ ID NO: 25812 - DNA, 22 bp, Artificial Sequence
  Synthetic
tgccactgcaacaaatacaaga

SEQ ID NO: 25813 - DNA, 25 bp, Artificial Sequence
  Synthetic
gcatttgacaatgaagtaaccgatg

SEQ ID NO: 25814 - DNA, 22 bp, Artificial Sequence
  Synthetic
cctaaggtatcaaggggtcgag

SEQ ID NO: 25815 - DNA, 24 bp, Artificial Sequence
  Synthetic
atttggataacgacgaagacaagg

SEQ ID NO: 25816 - DNA, 22 bp, Artificial Sequence
  Synthetic
acaaactttaaagacgaggcca

SEQ ID NO: 25817 - DNA, 22 bp, Artificial Sequence
  Synthetic
actgactccaccacacagtcca

SEQ ID NO: 25818 - DNA, 24 bp, Artificial Sequence
  Synthetic
agatgaaacccaacgccaaaaatt

SEQ ID NO: 25819 - DNA, 20 bp, Artificial Sequence
  Synthetic
tttgctgctttgtgtgcctg

SEQ ID NO: 25820 - DNA, 24 bp, Artificial Sequence
  Synthetic
ccaacatctggggttcatagttat

SEQ ID NO: 25821 - DNA, 24 bp, Artificial Sequence
  Synthetic
agacattgtggctttacacagacc

SEQ ID NO: 25822 - DNA, 23 bp, Artificial Sequence
  Synthetic
acgtaggcgtcgtaaacgtattc

SEQ ID NO: 25823 - DNA, 23 bp, Artificial Sequence
  Synthetic
acagatatgtgaaaagtgcagct

SEQ ID NO: 25824 - DNA, 23 bp, Artificial Sequence
  Synthetic
ctgcataccttagtgcttttggg

SEQ ID NO: 25825 - DNA, 20 bp, Artificial Sequence
  Synthetic
ggcaactctccaggttgtct

SEQ ID NO: 25826 - DNA, 20 bp, Artificial Sequence
  Synthetic
ctgcctgcgcacctctcatg

SEQ ID NO: 25827 - DNA, 25 bp, Artificial Sequence
  Synthetic
tgtggctattcagacaggattatgc

SEQ ID NO: 25828 - DNA, 22 bp, Artificial Sequence
  Synthetic
aactccaggatctgggcaattc

SEQ ID NO: 25829 - DNA, 24 bp, Artificial Sequence
  Synthetic
acaactttaattggggagattgca

SEQ ID NO: 25830 - DNA, 22 bp, Artificial Sequence
  Synthetic
tctcttgttgtaccatgggtga

SEQ ID NO: 25831 - DNA, 25 bp, Artificial Sequence
  Synthetic
tggaaaatcacactacaggaaatgg

SEQ ID NO: 25832 - DNA, 25 bp, Artificial Sequence
  Synthetic
ggacagccatttcctagattttctt

SEQ ID NO: 25833 - DNA, 25 bp, Artificial Sequence
  Synthetic
aggaacaaggcataactgattacat

SEQ ID NO: 25834 - DNA, 25 bp, Artificial Sequence
  Synthetic
aaaagttttgcaaatggacccaatt

SEQ ID NO: 25835 - DNA, 21 bp, Artificial Sequence
  Synthetic
ggtggtggatgtcatgtctgc

SEQ ID NO: 25836 - DNA, 25 bp, Artificial Sequence
  Synthetic
aacgatttatgagtcaaaaggttgg

SEQ ID NO: 25837 - DNA, 25 bp, Artificial Sequence
  Synthetic
tatgcgaaaaacttgattgttgtgt

SEQ ID NO: 25838 - DNA, 25 bp, Artificial Sequence
  Synthetic
agatgatgaagttgatgcagaagag

SEQ ID NO: 25839 - DNA, 25 bp, Artificial Sequence
  Synthetic
acaggtaacaactagtggattttca

SEQ ID NO: 25840 - DNA, 24 bp, Artificial Sequence
  Synthetic
aaatgcgtaatatgtcaatggcag

SEQ ID NO: 25841 - DNA, 25 bp, Artificial Sequence
  Synthetic
agatgtaaaagcagaacaatcgttg

SEQ ID NO: 25842 - DNA, 24 bp, Artificial Sequence
  Synthetic
atttggaggcttaaagacacaagt

SEQ ID NO: 25843 - DNA, 22 bp, Artificial Sequence
  Synthetic
aaccttcgacgacgacaaggag

SEQ ID NO: 25844 - DNA, 25 bp, Artificial Sequence
  Synthetic
gaggagctatataaacaatgtgcca

SEQ ID NO: 25845 - DNA, 25 bp, Artificial Sequence
  Synthetic
cagatgagtctgcagtactagatgt

SEQ ID NO: 25846 - DNA, 25 bp, Artificial Sequence
  Synthetic
accttcctattttacaaccgatacc

SEQ ID NO: 25847 - DNA, 25 bp, Artificial Sequence
  Synthetic
ttcagatgacttttacttgcatcct

SEQ ID NO: 25848 - DNA, 22 bp, Artificial Sequence
  Synthetic
gaggacgatactggtgatcaca

SEQ ID NO: 25849 - DNA, 20 bp, Artificial Sequence
  Synthetic
caacaccgagtggctcactg

SEQ ID NO: 25850 - DNA, 25 bp, Artificial Sequence
  Synthetic
ttctgggacgttgatttaacagaga

SEQ ID NO: 25851 - DNA, 21 bp, Artificial Sequence
  Synthetic
ggctgcctgcccctctttgag

SEQ ID NO: 25852 - DNA, 21 bp, Artificial Sequence
  Synthetic
tactgtttgacaccatgggcg

SEQ ID NO: 25853 - DNA, 25 bp, Artificial Sequence
  Synthetic
aggcttaaacaaattactatcggga

SEQ ID NO: 25854 - DNA, 21 bp, Artificial Sequence
  Synthetic
accatcatgcattgggtaggt

SEQ ID NO: 25855 - DNA, 25 bp, Artificial Sequence
  Synthetic
aacatcactatattcccacaccagc

SEQ ID NO: 25856 - DNA, 25 bp, Artificial Sequence
  Synthetic
tggatctcaacaatttctcacaact

SEQ ID NO: 25857 - DNA, 25 bp, Artificial Sequence
  Synthetic
actttgcaaattggtcaggtagtat

SEQ ID NO: 25858 - DNA, 20 bp, Artificial Sequence
  Synthetic
ccaacccagtggtccacaac

SEQ ID NO: 25859 - DNA, 25 bp, Artificial Sequence
  Synthetic
tttgacatggaagttactgttgtca

SEQ ID NO: 25860 - DNA, 25 bp, Artificial Sequence
  Synthetic
tgctgtgtatggtatcacatctaca

SEQ ID NO: 25861 - DNA, 20 bp, Artificial Sequence
  Synthetic
aaactgcaggcccaagtgat

SEQ ID NO: 25862 - DNA, 25 bp, Artificial Sequence
  Synthetic
tggtatcagatagaggaaacctgtt

SEQ ID NO: 25863 - DNA, 25 bp, Artificial Sequence
  Synthetic
ggtttcactgacacacttaaagacc

SEQ ID NO: 25864 - DNA, 20 bp, Artificial Sequence
  Synthetic
ccaagccgacaaggtgatgg

SEQ ID NO: 25865 - DNA, 21 bp, Artificial Sequence
  Synthetic
atggatgatctgggccaaaac

SEQ ID NO: 25866 - DNA, 24 bp, Artificial Sequence
  Synthetic
tcaagtaggcttgctagatactgc

SEQ ID NO: 25867 - DNA, 25 bp, Artificial Sequence
  Synthetic
agaccctaaagtcattcaatactgc

SEQ ID NO: 25868 - DNA, 21 bp, Artificial Sequence
  Synthetic
ccttgcaaggtcctgaacatg

SEQ ID NO: 25869 - DNA, 24 bp, Artificial Sequence
  Synthetic
atacatgtgggtggaaatggtagg

SEQ ID NO: 25870 - DNA, 24 bp, Artificial Sequence
  Synthetic
tgaatgagtacatagaaacagccg

SEQ ID NO: 25871 - DNA, 24 bp, Artificial Sequence
  Synthetic
actttcctaaaggatgaactccgc

SEQ ID NO: 25872 - DNA, 24 bp, Artificial Sequence
  Synthetic
agatggagaactcattgcttttga

SEQ ID NO: 25873 - DNA, 25 bp, Artificial Sequence
  Synthetic
atgagtcaatcagatggactaagga

SEQ ID NO: 25874 - DNA, 23 bp, Artificial Sequence
  Synthetic
aaccctgctctcagaatgaaatg

SEQ ID NO: 25875 - DNA, 25 bp, Artificial Sequence
  Synthetic
caagtacagtccattatccaaaggt

SEQ ID NO: 25876 - DNA, 25 bp, Artificial Sequence
  Synthetic
gtaaaattgctcctttaatggtggc

SEQ ID NO: 25877 - DNA, 20 bp, Artificial Sequence
  Synthetic
ggcggagagcaacagctatc

SEQ ID NO: 25878 - DNA, 25 bp, Artificial Sequence
  Synthetic
cacttccaaaaagatgcaaaagtgc

SEQ ID NO: 25879 - DNA, 23 bp, Artificial Sequence
  Synthetic
cagggaacagagaagttgacaat

SEQ ID NO: 25880 - DNA, 21 bp, Artificial Sequence
  Synthetic
ggaaacggccgattttcccac

SEQ ID NO: 25881 - DNA, 25 bp, Artificial Sequence
  Synthetic
ggtgtttatgttacacatcagctga

SEQ ID NO: 25882 - DNA, 23 bp, Artificial Sequence
  Synthetic
atgattcttcaggctgacatagc

SEQ ID NO: 25883 - DNA, 20 bp, Artificial Sequence
  Synthetic
ggagacccaaatgcttcctg

SEQ ID NO: 25884 - DNA, 20 bp, Artificial Sequence
  Synthetic
ccaggaactaggcgcagctg

SEQ ID NO: 25885 - DNA, 24 bp, Artificial Sequence
  Synthetic
actggtttggaactcctctatctc

SEQ ID NO: 25886 - DNA, 21 bp, Artificial Sequence
  Synthetic
gcttttacagccagcagcgtc

SEQ ID NO: 25887 - DNA, 22 bp, Artificial Sequence
  Synthetic
aacatgcctgctacatctcggg

SEQ ID NO: 25888 - DNA, 22 bp, Artificial Sequence
  Synthetic
ctgctcttccctagaaacgggc

SEQ ID NO: 25889 - DNA, 22 bp, Artificial Sequence
  Synthetic
acgatgagaccaagtccagggt

SEQ ID NO: 25890 - DNA, 21 bp, Artificial Sequence
  Synthetic
gaccatgacctacgcgaccgt

SEQ ID NO: 25891 - DNA, 20 bp, Artificial Sequence
  Synthetic
ggggtggaggtagcaccact

SEQ ID NO: 25892 - DNA, 22 bp, Artificial Sequence
  Synthetic
ggaccaccaggacaatgtagcc

SEQ ID NO: 25893 - DNA, 19 bp, Artificial Sequence
  Synthetic
gggccgtagatgaccccga

SEQ ID NO: 25894 - DNA, 22 bp, Artificial Sequence
  Synthetic
ttgggacgactgcgactgtagg

SEQ ID NO: 25895 - DNA, 20 bp, Artificial Sequence
  Synthetic
tttgggcgcgagaaagaccg

SEQ ID NO: 25896 - DNA, 22 bp, Artificial Sequence
  Synthetic
cgtccacgccaagacaaaggag

SEQ ID NO: 25897 - DNA, 22 bp, Artificial Sequence
  Synthetic
ccctgccgcaatgctttttagg

SEQ ID NO: 25898 - DNA, 20 bp, Artificial Sequence
  Synthetic
ccagcctcggttatgcaggg

SEQ ID NO: 25899 - DNA, 20 bp, Artificial Sequence
  Synthetic
acaactcatgcgagggtgcc

SEQ ID NO: 25900 - DNA, 20 bp, Artificial Sequence
  Synthetic
gaggtgtgcgtcagggcaaa

SEQ ID NO: 25901 - DNA, 22 bp, Artificial Sequence
  Synthetic
aagctcctcgtaggtgaggtcc

SEQ ID NO: 25902 - DNA, 22 bp, Artificial Sequence
  Synthetic
accagcatgaaggggacaagct

SEQ ID NO: 25903 - DNA, 20 bp, Artificial Sequence
  Synthetic
gccctggctggtggttttca

SEQ ID NO: 25904 - DNA, 19 bp, Artificial Sequence
  Synthetic
gcgtcattgacggcggcct

SEQ ID NO: 25905 - DNA, 21 bp, Artificial Sequence
  Synthetic
cgcaggcgctgaaaaaggtag

SEQ ID NO: 25906 - DNA, 20 bp, Artificial Sequence
  Synthetic
cgggagacggtcgacgaagc

SEQ ID NO: 25907 - DNA, 22 bp, Artificial Sequence
  Synthetic
aggaaagcgtctagccaatcgc

SEQ ID NO: 25908 - DNA, 19 bp, Artificial Sequence
  Synthetic
cgacgcgctcggcaaggat

SEQ ID NO: 25909 - DNA, 22 bp, Artificial Sequence
  Synthetic
gtagccgtagaggtagcgggac

SEQ ID NO: 25910 - DNA, 21 bp, Artificial Sequence
  Synthetic
ggctaaagccgcgactaacgt

SEQ ID NO: 25911 - DNA, 21 bp, Artificial Sequence
  Synthetic
gcatcccgtcctgcgccaaat

SEQ ID NO: 25912 - DNA, 19 bp, Artificial Sequence
  Synthetic
tgattgcgcgcgaggaggt

SEQ ID NO: 25913 - DNA, 19 bp, Artificial Sequence
  Synthetic
cgcatggcgctcaaggtgc

SEQ ID NO: 25914 - DNA, 18 bp, Artificial Sequence
  Synthetic
taagggcggcgctgcaaa

SEQ ID NO: 25915 - DNA, 21 bp, Artificial Sequence
  Synthetic
acgaacgtgcagtccaacctg

SEQ ID NO: 25916 - DNA, 21 bp, Artificial Sequence
  Synthetic
cggtcaacggtgagcagcttg

SEQ ID NO: 25917 - DNA, 21 bp, Artificial Sequence
  Synthetic
cactgtcggccgaggaagaaa

SEQ ID NO: 25918 - DNA, 20 bp, Artificial Sequence
  Synthetic
ccgccagggttctacacggg

SEQ ID NO: 25919 - DNA, 19 bp, Artificial Sequence
  Synthetic
gcctggtgtgggacgacga

SEQ ID NO: 25920 - DNA, 22 bp, Artificial Sequence
  Synthetic
accctggaggttccgtttgtgc

SEQ ID NO: 25921 - DNA, 22 bp, Artificial Sequence
  Synthetic
gatgccgggggtctacacctac

SEQ ID NO: 25922 - DNA, 22 bp, Artificial Sequence
  Synthetic
gcaagaggagatagcagtgtcc

SEQ ID NO: 25923 - DNA, 22 bp, Artificial Sequence
  Synthetic
tcagcaactaccccgtggttgg

SEQ ID NO: 25924 - DNA, 19 bp, Artificial Sequence
  Synthetic
cgcgtgctctccagtcgca

SEQ ID NO: 25925 - DNA, 19 bp, Artificial Sequence
  Synthetic
aactacacccccgccccct

SEQ ID NO: 25926 - DNA, 18 bp, Artificial Sequence
  Synthetic
cgtgtactgggtgcgcga

SEQ ID NO: 25927 - DNA, 20 bp, Artificial Sequence
  Synthetic
cggcacggcggtggtgttta

SEQ ID NO: 25928 - DNA, 21 bp, Artificial Sequence
  Synthetic
aaatggatgtggagcccgagg

SEQ ID NO: 25929 - DNA, 20 bp, Artificial Sequence
  Synthetic
ccaggaggcgaagatggggc

SEQ ID NO: 25930 - DNA, 19 bp, Artificial Sequence
  Synthetic
caggagaggcatggcaggc

SEQ ID NO: 25931 - DNA, 20 bp, Artificial Sequence
  Synthetic
gaacgggggcgccttcaatt

SEQ ID NO: 25932 - DNA, 19 bp, Artificial Sequence
  Synthetic
cctgacgcggaggagacga

SEQ ID NO: 25933 - DNA, 21 bp, Artificial Sequence
  Synthetic
gagcacgctgcacagtatcgt

SEQ ID NO: 25934 - DNA, 21 bp, Artificial Sequence
  Synthetic
cacccacgatgtgaccacgga

SEQ ID NO: 25935 - DNA, 22 bp, Artificial Sequence
  Synthetic
aagggtctgcaaattggtgttg

SEQ ID NO: 25936 - DNA, 20 bp, Artificial Sequence
  Synthetic
gaactctgcggtggacagtt

SEQ ID NO: 25937 - DNA, 22 bp, Artificial Sequence
  Synthetic
cctacgagtacatgaacgggcg

SEQ ID NO: 25938 - DNA, 19 bp, Artificial Sequence
  Synthetic
gcgcctccgtccgctttga

SEQ ID NO: 25939 - DNA, 21 bp, Artificial Sequence
  Synthetic
aacgtggcccaatgcaacatg

SEQ ID NO: 25940 - DNA, 19 bp, Artificial Sequence
  Synthetic
cagccctaccccgccaact

SEQ ID NO: 25941 - DNA, 20 bp, Artificial Sequence
  Synthetic
ggcaacgccaccacctaagc

SEQ ID NO: 25942 - DNA, 22 bp, Artificial Sequence
  Synthetic
ttcgagtacgaggccatgttgc

SEQ ID NO: 25943 - DNA, 19 bp, Artificial Sequence
  Synthetic
tccggcgcaaccaggagga

SEQ ID NO: 25944 - DNA, 20 bp, Artificial Sequence
  Synthetic
gtctcgctccacatgcgccg

SEQ ID NO: 25945 - DNA, 22 bp, Artificial Sequence
  Synthetic
ctgcttaaaagcttgctgggcc

SEQ ID NO: 25946 - DNA, 18 bp, Artificial Sequence
  Synthetic
tggccttccacctcggca

SEQ ID NO: 25947 - DNA, 22 bp, Artificial Sequence
  Synthetic
tggtatccatgcccttctccca

SEQ ID NO: 25948 - DNA, 20 bp, Artificial Sequence
  Synthetic
ccggagcccacccgctgata

SEQ ID NO: 25949 - DNA, 22 bp, Artificial Sequence
  Synthetic
acagaaggaaaccaacgctggg

SEQ ID NO: 25950 - DNA, 22 bp, Artificial Sequence
  Synthetic
ctcacccattttgcctaccccg

SEQ ID NO: 25951 - DNA, 22 bp, Artificial Sequence
  Synthetic
cgtggagctaaccaacctggtc

SEQ ID NO: 25952 - DNA, 20 bp, Artificial Sequence
  Synthetic
gccttggacctggccgaaat

SEQ ID NO: 25953 - DNA, 19 bp, Artificial Sequence
  Synthetic
gccactgccgctgcaacct

SEQ ID NO: 25954 - DNA, 20 bp, Artificial Sequence
  Synthetic
ctcgcccaattgcacgccat

SEQ ID NO: 25955 - DNA, 22 bp, Artificial Sequence
  Synthetic
gggatcgagtaaagggtgacgg

SEQ ID NO: 25956 - DNA, 20 bp, Artificial Sequence
  Synthetic
aaatcggtctctgcgctcgc

SEQ ID NO: 25957 - DNA, 20 bp, Artificial Sequence
  Synthetic
gtccgcccagacccgactta

SEQ ID NO: 25958 - DNA, 22 bp, Artificial Sequence
  Synthetic
taccccgacgagttcataccga

SEQ ID NO: 25959 - DNA, 22 bp, Artificial Sequence
  Synthetic
atccagtgtcgtcataatcgca

SEQ ID NO: 25960 - DNA, 20 bp, Artificial Sequence
  Synthetic
ggggtgtactgtcatgccac

SEQ ID NO: 25961 - DNA, 21 bp, Artificial Sequence
  Synthetic
ctgctggtaggggctctaatg

SEQ ID NO: 25962 - DNA, 25 bp, Artificial Sequence
  Synthetic
taatgctgacaagtctcatgaaagg

SEQ ID NO: 25963 - DNA, 25 bp, Artificial Sequence
  Synthetic
atcaacaaataaccttcagccaaca

SEQ ID NO: 25964 - DNA, 25 bp, Artificial Sequence
  Synthetic
acaagttgcagaaactgatcaaaac

SEQ ID NO: 25965 - DNA, 24 bp, Artificial Sequence
  Synthetic
ttgctgcaaagccagaaaaaaatc

SEQ ID NO: 25966 - DNA, 22 bp, Artificial Sequence
  Synthetic
tcctgcagcttatcgactggtg

SEQ ID NO: 25967 - DNA, 20 bp, Artificial Sequence
  Synthetic
ctggaactctgttggggcat

SEQ ID NO: 25968 - DNA, 21 bp, Artificial Sequence
  Synthetic
cgaaaccagcggctgtatcca

SEQ ID NO: 25969 - DNA, 24 bp, Artificial Sequence
  Synthetic
tggaaatgtctcactcaaggttgg

SEQ ID NO: 25970 - DNA, 23 bp, Artificial Sequence
  Synthetic
agaagataaacgcaccctatgga

SEQ ID NO: 25971 - DNA, 20 bp, Artificial Sequence
  Synthetic
ggaaagccacatcaaccagc

SEQ ID NO: 25972 - DNA, 20 bp, Artificial Sequence
  Synthetic
gtgcgggaactggacttggg

SEQ ID NO: 25973 - DNA, 22 bp, Artificial Sequence
  Synthetic
atgttgggaatgatggaaccca

SEQ ID NO: 25974 - DNA, 20 bp, Artificial Sequence
  Synthetic
tggaaactcttgcagcaggg

SEQ ID NO: 25975 - DNA, 21 bp, Artificial Sequence
  Synthetic
gcggaggcaggattggaagaa

SEQ ID NO: 25976 - DNA, 20 bp, Artificial Sequence
  Synthetic
tccgcacatgtggaaaagct

SEQ ID NO: 25977 - DNA, 25 bp, Artificial Sequence
  Synthetic
atcctgtaaatacgtcactaggacc

SEQ ID NO: 25978 - DNA, 20 bp, Artificial Sequence
  Synthetic
actgggttagtatgcccgtg

SEQ ID NO: 25979 - DNA, 23 bp, Artificial Sequence
  Synthetic
aatgacggaaggtgtaaaaaccc

SEQ ID NO: 25980 - DNA, 23 bp, Artificial Sequence
  Synthetic
agtctggcggaggagcaattata

SEQ ID NO: 25981 - DNA, 24 bp, Artificial Sequence
  Synthetic
agttcaagtttggatagtgttggt

SEQ ID NO: 25982 - DNA, 20 bp, Artificial Sequence
  Synthetic
caatgggcgttgctgtggta

SEQ ID NO: 25983 - DNA, 25 bp, Artificial Sequence
  Synthetic
aatgacagcaatgaaagatggatga

SEQ ID NO: 25984 - DNA, 20 bp, Artificial Sequence
  Synthetic
tgatgatgctacagcggctg

SEQ ID NO: 25985 - DNA, 21 bp, Artificial Sequence
  Synthetic
acagaagctggctccatggta

SEQ ID NO: 25986 - DNA, 22 bp, Artificial Sequence
  Synthetic
aaggtatacacagggcctctag

SEQ ID NO: 25987 - DNA, 20 bp, Artificial Sequence
  Synthetic
tccagagcttgaagatgccg

SEQ ID NO: 25988 - DNA, 23 bp, Artificial Sequence
  Synthetic
cactccaaagaacaaccacaacc

SEQ ID NO: 25989 - DNA, 22 bp, Artificial Sequence
  Synthetic
aaagacaaggtttgacccctct

SEQ ID NO: 25990 - DNA, 22 bp, Artificial Sequence
  Synthetic
cctctcaaaacaggtcctgaca

SEQ ID NO: 25991 - DNA, 21 bp, Artificial Sequence
  Synthetic
tctactaccatggtccagccg

SEQ ID NO: 25992 - DNA, 25 bp, Artificial Sequence
  Synthetic
tatcagtgaatctgctggttacact

SEQ ID NO: 25993 - DNA, 25 bp, Artificial Sequence
  Synthetic
ccacatatgaatctagtcatctggg

SEQ ID NO: 25994 - DNA, 25 bp, Artificial Sequence
  Synthetic
aagcagagagaaaaacaacaacaca

SEQ ID NO: 25995 - DNA, 24 bp, Artificial Sequence
  Synthetic
tgtcattggtaccatagcactagg

SEQ ID NO: 25996 - DNA, 25 bp, Artificial Sequence
  Synthetic
aagggaactgtgatagatgttgatt

SEQ ID NO: 25997 - DNA, 23 bp, Artificial Sequence
  Synthetic
ttgacctataccaattgcggttt

SEQ ID NO: 25998 - DNA, 22 bp, Artificial Sequence
  Synthetic
aacctataaggcaacagcatcc

SEQ ID NO: 25999 - DNA, 25 bp, Artificial Sequence
  Synthetic
tctcattattacctggaccaagtct

SEQ ID NO: 26000 - DNA, 24 bp, Artificial Sequence
  Synthetic
acaaggggttatcagttatgctcc

SEQ ID NO: 26001 - DNA, 20 bp, Artificial Sequence
  Synthetic
gtggcttaacaactccgctc

SEQ ID NO: 26002 - DNA, 25 bp, Artificial Sequence
  Synthetic
ccaacctgcaaataggatcattaga

SEQ ID NO: 26003 - DNA, 25 bp, Artificial Sequence
  Synthetic
tcaacatgctaagactcaagaatgt

SEQ ID NO: 26004 - DNA, 25 bp, Artificial Sequence
  Synthetic
agagttactcagactggatatccca

SEQ ID NO: 26005 - DNA, 25 bp, Artificial Sequence
  Synthetic
gaattatgggagcttatcgactctt

SEQ ID NO: 26006 - DNA, 25 bp, Artificial Sequence
  Synthetic
tggtaaagggagaaattgacctact

SEQ ID NO: 26007 - DNA, 22 bp, Artificial Sequence
  Synthetic
gtgacatccagagttcctgtca

SEQ ID NO: 26008 - DNA, 25 bp, Artificial Sequence
  Synthetic
ttgtcagaaatataggtgatccagc

SEQ ID NO: 26009 - DNA, 22 bp, Artificial Sequence
  Synthetic
agaaactccagacccgttagaa

SEQ ID NO: 26010 - DNA, 24 bp, Artificial Sequence
  Synthetic
ttgaagttactcacccctgtatcg

SEQ ID NO: 26011 - DNA, 22 bp, Artificial Sequence
  Synthetic
aaagacacatcacatgcagtcc

SEQ ID NO: 26012 - DNA, 25 bp, Artificial Sequence
  Synthetic
ctgctgaggttcaacacaatatacc

SEQ ID NO: 26013 - DNA, 20 bp, Artificial Sequence
  Synthetic
atctcggagaaggtgcaggt

SEQ ID NO: 26014 - DNA, 20 bp, Artificial Sequence
  Synthetic
ccatacagccatgggacagg

SEQ ID NO: 26015 - DNA, 21 bp, Artificial Sequence
  Synthetic
gtcgtcagacctatgactgga

SEQ ID NO: 26016 - DNA, 25 bp, Artificial Sequence
  Synthetic
aaatggtcacacaacgaacaatagg

SEQ ID NO: 26017 - DNA, 25 bp, Artificial Sequence
  Synthetic
atgactaattcacaagacacagagc

SEQ ID NO: 26018 - DNA, 20 bp, Artificial Sequence
  Synthetic
gcatgaagctccgaacacaa

SEQ ID NO: 26019 - DNA, 21 bp, Artificial Sequence
  Synthetic
ccaatcctctgatgacttcgc

SEQ ID NO: 26020 - DNA, 22 bp, Artificial Sequence
  Synthetic
atgagcattggggtaacagtga

SEQ ID NO: 26021 - DNA, 24 bp, Artificial Sequence
  Synthetic
gtaatcccctgaatccatttgtca

SEQ ID NO: 26022 - DNA, 20 bp, Artificial Sequence
  Synthetic
tcgtacaggagaccagttgg

SEQ ID NO: 26023 - DNA, 21 bp, Artificial Sequence
  Synthetic
aggactacgaggtggactttg

SEQ ID NO: 26024 - DNA, 21 bp, Artificial Sequence
  Synthetic
atacggtgccatgcatgcagc

SEQ ID NO: 26025 - DNA, 22 bp, Artificial Sequence
  Synthetic
ttgttgaacaagcacagcaggc

SEQ ID NO: 26026 - DNA, 25 bp, Artificial Sequence
  Synthetic
agtgataagtcaatatgtggggact

SEQ ID NO: 26027 - DNA, 22 bp, Artificial Sequence
  Synthetic
ccaccaaagattagaagcgcac

SEQ ID NO: 26028 - DNA, 21 bp, Artificial Sequence
  Synthetic
ccttcttggccagtaactgcc

SEQ ID NO: 26029 - DNA, 25 bp, Artificial Sequence
  Synthetic
tgagcctactaaattttctgggagg

SEQ ID NO: 26030 - DNA, 21 bp, Artificial Sequence
  Synthetic
gcaacaagcttgaggaccaaa

SEQ ID NO: 26031 - DNA, 20 bp, Artificial Sequence
  Synthetic
tgtggaatacgcagccacaa

SEQ ID NO: 26032 - DNA, 24 bp, Artificial Sequence
  Synthetic
acatgcaagtgttgtggtatatgg

SEQ ID NO: 26033 - DNA, 22 bp, Artificial Sequence
  Synthetic
gtggatattggccctgtgtccc

SEQ ID NO: 26034 - DNA, 20 bp, Artificial Sequence
  Synthetic
accttgccggccatgtcatt

SEQ ID NO: 26035 - DNA, 22 bp, Artificial Sequence
  Synthetic
atgctgaccctgaggtgttgga

SEQ ID NO: 26036 - DNA, 23 bp, Artificial Sequence
  Synthetic
cgtcgtaaacgtgtaccctattc

SEQ ID NO: 26037 - DNA, 20 bp, Artificial Sequence
  Synthetic
tatccccaaggtgtctggct

SEQ ID NO: 26038 - DNA, 23 bp, Artificial Sequence
  Synthetic
gtttacgcagggaacaaatgttt

SEQ ID NO: 26039 - DNA, 25 bp, Artificial Sequence
  Synthetic
aattgtttgtaaccgttgtggatac

SEQ ID NO: 26040 - DNA, 20 bp, Artificial Sequence
  Synthetic
gcccaaggaggatcgctatg

SEQ ID NO: 26041 - DNA, 25 bp, Artificial Sequence
  Synthetic
gttgttttgtattgtgctgtactgg

SEQ ID NO: 26042 - DNA, 22 bp, Artificial Sequence
  Synthetic
gttccttgtgttcgggtagcca

SEQ ID NO: 26043 - DNA, 24 bp, Artificial Sequence
  Synthetic
tttgtgctgactactttcccttaa

SEQ ID NO: 26044 - DNA, 23 bp, Artificial Sequence
  Synthetic
aacatgtttacaaggtgggacgt

SEQ ID NO: 26045 - DNA, 21 bp, Artificial Sequence
  Synthetic
acctccaacaaagcctgaaga

SEQ ID NO: 26046 - DNA, 21 bp, Artificial Sequence
  Synthetic
aacctgactcacgctcagggc

SEQ ID NO: 26047 - DNA, 20 bp, Artificial Sequence
  Synthetic
cgaccgcgccattccattgg

SEQ ID NO: 26048 - DNA, 22 bp, Artificial Sequence
  Synthetic
atcacccgaaaactagaggaca

SEQ ID NO: 26049 - DNA, 23 bp, Artificial Sequence
  Synthetic
agttggcctaactcaccaaaaac

SEQ ID NO: 26050 - DNA, 19 bp, Artificial Sequence
  Synthetic
tgcgtggtctccggtgcct

SEQ ID NO: 26051 - DNA, 22 bp, Artificial Sequence
  Synthetic
tgggtgggtgtacgtaggttcc

SEQ ID NO: 26052 - DNA, 21 bp, Artificial Sequence
  Synthetic
gagatgctgctgtgtgaggca

SEQ ID NO: 26053 - DNA, 22 bp, Artificial Sequence
  Synthetic
tggaagcctgctcagggatttc

SEQ ID NO: 26054 - DNA, 19 bp, Artificial Sequence
  Synthetic
acgtgggctgggcggatct

SEQ ID NO: 26055 - DNA, 22 bp, Artificial Sequence
  Synthetic
tctcccggattcactgccatct

SEQ ID NO: 26056 - DNA, 22 bp, Artificial Sequence
  Synthetic
ctcttcgcctacgcacaagtgg

SEQ ID NO: 26057 - DNA, 19 bp, Artificial Sequence
  Synthetic
accagtgtcgccagtgcct

SEQ ID NO: 26058 - DNA, 21 bp, Artificial Sequence
  Synthetic
ccgagctcgggactctggtac

SEQ ID NO: 26059 - DNA, 20 bp, Artificial Sequence
  Synthetic
actggatgtgggcaaaggat

SEQ ID NO: 26060 - DNA, 20 bp, Artificial Sequence
  Synthetic
tggcgatctgggagttggcg

SEQ ID NO: 26061 - DNA, 20 bp, Artificial Sequence
  Synthetic
tagaggctgccgatgcctga

SEQ ID NO: 26062 - DNA, 21 bp, Artificial Sequence
  Synthetic
atgggagaggcaccactctgt

SEQ ID NO: 26063 - DNA, 19 bp, Artificial Sequence
  Synthetic
gcaatgccagcgcggggta

SEQ ID NO: 26064 - DNA, 19 bp, Artificial Sequence
  Synthetic
tcgggcgaagagcttccgg

SEQ ID NO: 26065 - DNA, 19 bp, Artificial Sequence
  Synthetic
cggacagtgtcgcgctgca

SEQ ID NO: 26066 - DNA, 19 bp, Artificial Sequence
  Synthetic
gcgctgggcggttgaggtt

SEQ ID NO: 26067 - DNA, 21 bp, Artificial Sequence
  Synthetic
ccctggctgaactcaccgaca

SEQ ID NO: 26068 - DNA, 20 bp, Artificial Sequence
  Synthetic
ggccaccatcccgtgacagg

SEQ ID NO: 26069 - DNA, 20 bp, Artificial Sequence
  Synthetic
ggtatccacacggagcaggc

SEQ ID NO: 26070 - DNA, 19 bp, Artificial Sequence
  Synthetic
ctccagcggcccaaaggga

SEQ ID NO: 26071 - DNA, 19 bp, Artificial Sequence
  Synthetic
accagccaccagacgagca

SEQ ID NO: 26072 - DNA, 20 bp, Artificial Sequence
  Synthetic
cggttgaaggagcccacgtt

SEQ ID NO: 26073 - DNA, 21 bp, Artificial Sequence
  Synthetic
cgtcgcctataccgcatctgc

SEQ ID NO: 26074 - DNA, 19 bp, Artificial Sequence
  Synthetic
agagacacaagcccccccg

SEQ ID NO: 26075 - DNA, 19 bp, Artificial Sequence
  Synthetic
cgcaccgtagcccgcgaaa

SEQ ID NO: 26076 - DNA, 19 bp, Artificial Sequence
  Synthetic
gcagcactacgtggcggga

SEQ ID NO: 26077 - DNA, 20 bp, Artificial Sequence
  Synthetic
aaaagctcagggcatccgcg

SEQ ID NO: 26078 - DNA, 22 bp, Artificial Sequence
  Synthetic
atcctgctgctcctgctcatcc

SEQ ID NO: 26079 - DNA, 22 bp, Artificial Sequence
  Synthetic
cggtggaggtaaaggtgttgcg

SEQ ID NO: 26080 - DNA, 22 bp, Artificial Sequence
  Synthetic
gtgtacctggggcacctcaacc

SEQ ID NO: 26081 - DNA, 22 bp, Artificial Sequence
  Synthetic
atctggatcccttgacctcggc

SEQ ID NO: 26082 - DNA, 20 bp, Artificial Sequence
  Synthetic
ttccttgcaggcgaagaggc

SEQ ID NO: 26083 - DNA, 19 bp, Artificial Sequence
  Synthetic
gacgagtgcagcaccaggt

SEQ ID NO: 26084 - DNA, 18 bp, Artificial Sequence
  Synthetic
accgcgttgtcggagctg

SEQ ID NO: 26085 - DNA, 22 bp, Artificial Sequence
  Synthetic
agctagaggatttgcgattgct

SEQ ID NO: 26086 - DNA, 22 bp, Artificial Sequence
  Synthetic
agacgctgactctagtgtgccc

SEQ ID NO: 26087 - DNA, 20 bp, Artificial Sequence
  Synthetic
ccggtggaggatcaggagga

SEQ ID NO: 26088 - DNA, 25 bp, Artificial Sequence
  Synthetic
atggattgttagacagacgttggta

SEQ ID NO: 26089 - DNA, 22 bp, Artificial Sequence
  Synthetic
agtgttctatggacctgcagac

SEQ ID NO: 26090 - DNA, 25 bp, Artificial Sequence
  Synthetic
gaggaggacagatggaaatatttgc

SEQ ID NO: 26091 - DNA, 22 bp, Artificial Sequence
  Synthetic
aggccatagaggtacagctggc

SEQ ID NO: 26092 - DNA, 21 bp, Artificial Sequence
  Synthetic
gtatccccagtcccagcccca

SEQ ID NO: 26093 - DNA, 24 bp, Artificial Sequence
  Synthetic
gatagcattgccagggtatatgtc

SEQ ID NO: 26094 - DNA, 20 bp, Artificial Sequence
  Synthetic
cacacctaacacccccactt

SEQ ID NO: 26095 - DNA, 22 bp, Artificial Sequence
  Synthetic
gccgtcttggatatcaccccct

SEQ ID NO: 26096 - DNA, 20 bp, Artificial Sequence
  Synthetic
ttgatgagttacccgccgcc

SEQ ID NO: 26097 - DNA, 22 bp, Artificial Sequence
  Synthetic
atgtctatgtcacgcggactaa

SEQ ID NO: 26098 - DNA, 25 bp, Artificial Sequence
  Synthetic
atcctgattatctgaagatggctgc

SEQ ID NO: 26099 - DNA, 22 bp, Artificial Sequence
  Synthetic
atggatccccagttgttagagg

SEQ ID NO: 26100 - DNA, 20 bp, Artificial Sequence
  Synthetic
cttgtgtgtagcccccagtt

SEQ ID NO: 26101 - DNA, 25 bp, Artificial Sequence
  Synthetic
ccttcaattggcagatctaaaacga

SEQ ID NO: 26102 - DNA, 20 bp, Artificial Sequence
  Synthetic
gccagggtgtgtaaggagtt

SEQ ID NO: 26103 - DNA, 20 bp, Artificial Sequence
  Synthetic
tgcatgttggcagttcatgg

SEQ ID NO: 26104 - DNA, 25 bp, Artificial Sequence
  Synthetic
agcaaaacaagctataatgatggcc

SEQ ID NO: 26105 - DNA, 21 bp, Artificial Sequence
  Synthetic
gacgagggggaagtcgaagga

SEQ ID NO: 26106 - DNA, 20 bp, Artificial Sequence
  Synthetic
tggcatagggacaggcaaag

SEQ ID NO: 26107 - DNA, 25 bp, Artificial Sequence
  Synthetic
gtagtggtagtaatactcctgcagt

SEQ ID NO: 26108 - DNA, 25 bp, Artificial Sequence
  Synthetic
aactagaaagaccaaggttctctga

SEQ ID NO: 26109 - DNA, 25 bp, Artificial Sequence
  Synthetic
attaccagcaataataacaccaggc

SEQ ID NO: 26110 - DNA, 24 bp, Artificial Sequence
  Synthetic
gtagtgatcgccttctaacagttg

SEQ ID NO: 26111 - DNA, 24 bp, Artificial Sequence
  Synthetic
tttcagggtagtactgatagcaga

SEQ ID NO: 26112 - DNA, 23 bp, Artificial Sequence
  Synthetic
gtttacagcacgataggtcctca

SEQ ID NO: 26113 - DNA, 25 bp, Artificial Sequence
  Synthetic
gtttactttcctactcctagtggct

SEQ ID NO: 26114 - DNA, 25 bp, Artificial Sequence
  Synthetic
attgtctcagacatctcttggaagg

SEQ ID NO: 26115 - DNA, 22 bp, Artificial Sequence
  Synthetic
gtgtgttactgactcacagggt

SEQ ID NO: 26116 - DNA, 25 bp, Artificial Sequence
  Synthetic
ggatactttagagcgccttgtacag

SEQ ID NO: 26117 - DNA, 25 bp, Artificial Sequence
  Synthetic
tagacgatgatgtggatgaagttga

SEQ ID NO: 26118 - DNA, 20 bp, Artificial Sequence
  Synthetic
gagccgagctctgaaaccaa

SEQ ID NO: 26119 - DNA, 25 bp, Artificial Sequence
  Synthetic
agcagactcatttgatctatcacaa

SEQ ID NO: 26120 - DNA, 22 bp, Artificial Sequence
  Synthetic
actgctgcagaagttggaagca

SEQ ID NO: 26121 - DNA, 24 bp, Artificial Sequence
  Synthetic
aaaagggtgtacgtattgctttgg

SEQ ID NO: 26122 - DNA, 20 bp, Artificial Sequence
  Synthetic
tgggcttggcattggaacag

SEQ ID NO: 26123 - DNA, 21 bp, Artificial Sequence
  Synthetic
tatcagaggtcacaggggttg

SEQ ID NO: 26124 - DNA, 25 bp, Artificial Sequence
  Synthetic
actcatgtgggttatacagaagaca

SEQ ID NO: 26125 - DNA, 22 bp, Artificial Sequence
  Synthetic
atgatttggcagagattgggga

SEQ ID NO: 26126 - DNA, 24 bp, Artificial Sequence
  Synthetic
cctgatggagttctggtagatgac

SEQ ID NO: 26127 - DNA, 24 bp, Artificial Sequence
  Synthetic
ttaagcacagaccaaaataccgtt

SEQ ID NO: 26128 - DNA, 25 bp, Artificial Sequence
  Synthetic
atggattaatcagtgaccaaaagga

SEQ ID NO: 26129 - DNA, 23 bp, Artificial Sequence
  Synthetic
ttgactagcagcgaatcaaacat

SEQ ID NO: 26130 - DNA, 22 bp, Artificial Sequence
  Synthetic
tctgcatttttgttaccccacc

SEQ ID NO: 26131 - DNA, 25 bp, Artificial Sequence
  Synthetic
atcactatatgtgtcagcctcattg

SEQ ID NO: 26132 - DNA, 25 bp, Artificial Sequence
  Synthetic
actcagctcccttgataataagaga

SEQ ID NO: 26133 - DNA, 25 bp, Artificial Sequence
  Synthetic
aatggacatatatcggagttgatgg

SEQ ID NO: 26134 - DNA, 20 bp, Artificial Sequence
  Synthetic
cactgaagagtgcacatgcg

SEQ ID NO: 26135 - DNA, 22 bp, Artificial Sequence
  Synthetic
ggcatcaaaggaggattcgtcc

SEQ ID NO: 26136 - DNA, 23 bp, Artificial Sequence
  Synthetic
acagccatttactgtttgatggg

SEQ ID NO: 26137 - DNA, 25 bp, Artificial Sequence
  Synthetic
aacagatatacatgtaaccgcttgc

SEQ ID NO: 26138 - DNA, 21 bp, Artificial Sequence
  Synthetic
attgacctgcaatgctacgag

SEQ ID NO: 26139 - DNA, 23 bp, Artificial Sequence
  Synthetic
gtgtcgtgaagaaattcggaatg

SEQ ID NO: 26140 - DNA, 25 bp, Artificial Sequence
  Synthetic
cggagcaagtacaaaagttaaaacg

SEQ ID NO: 26141 - DNA, 22 bp, Artificial Sequence
  Synthetic
acaatgggcctatgatagcgat

SEQ ID NO: 26142 - DNA, 22 bp, Artificial Sequence
  Synthetic
aattagagctcagtgacccaga

SEQ ID NO: 26143 - DNA, 22 bp, Artificial Sequence
  Synthetic
tggcagtatctgaaaccaaagc

SEQ ID NO: 26144 - DNA, 22 bp, Artificial Sequence
  Synthetic
gttaccttcgctgatgatgctg

SEQ ID NO: 26145 - DNA, 20 bp, Artificial Sequence
  Synthetic
caccagcaccacagcaacca

SEQ ID NO: 26146 - DNA, 22 bp, Artificial Sequence
  Synthetic
caacctccagagattccagccc

SEQ ID NO: 26147 - DNA, 24 bp, Artificial Sequence
  Synthetic
gatcctccagtaatacttttgcga

SEQ ID NO: 26148 - DNA, 22 bp, Artificial Sequence
  Synthetic
tagaggaacctacaccaccaag

SEQ ID NO: 26149 - DNA, 22 bp, Artificial Sequence
  Synthetic
gctgtagaagaacctccagaca

SEQ ID NO: 26150 - DNA, 22 bp, Artificial Sequence
  Synthetic
gatgctactattgtccaaggcc

SEQ ID NO: 26151 - DNA, 25 bp, Artificial Sequence
  Synthetic
atcctgaacgaaggaattatccaga

SEQ ID NO: 26152 - DNA, 24 bp, Artificial Sequence
  Synthetic
acattcagaggacagacatctact

SEQ ID NO: 26153 - DNA, 25 bp, Artificial Sequence
  Synthetic
acaacaggacatccattgtttaaca

SEQ ID NO: 26154 - DNA, 22 bp, Artificial Sequence
  Synthetic
attacctgcagcaagtcaacag

SEQ ID NO: 26155 - DNA, 25 bp, Artificial Sequence
  Synthetic
cagaaaaactgtctttggatttgga

SEQ ID NO: 26156 - DNA, 24 bp, Artificial Sequence
  Synthetic
tttcagtgtgattttcaatcggct

SEQ ID NO: 26157 - DNA, 25 bp, Artificial Sequence
  Synthetic
tttcctgggaaaataaaagtggtgc

SEQ ID NO: 26158 - DNA, 25 bp, Artificial Sequence
  Synthetic
gctggtacaacaattctatttctgc

SEQ ID NO: 26159 - DNA, 25 bp, Artificial Sequence
  Synthetic
attgtcaccttatagagttgacagc

SEQ ID NO: 26160 - DNA, 21 bp, Artificial Sequence
  Synthetic
tgctcttagtcctcgtttgga

SEQ ID NO: 26161 - DNA, 21 bp, Artificial Sequence
  Synthetic
atctgaacagtggacgtttgc

SEQ ID NO: 26162 - DNA, 25 bp, Artificial Sequence
  Synthetic
tgacaatgaacaaattttgcccttt

SEQ ID NO: 26163 - DNA, 21 bp, Artificial Sequence
  Synthetic
cacaccactgagcctagtttg

SEQ ID NO: 26164 - DNA, 22 bp, Artificial Sequence
  Synthetic
atcccgcctttgatgctgatgt

SEQ ID NO: 26165 - DNA, 24 bp, Artificial Sequence
  Synthetic
tctcagttcattaccaatgcttca

SEQ ID NO: 26166 - DNA, 24 bp, Artificial Sequence
  Synthetic
atacattcgcctatacaagatggc

SEQ ID NO: 26167 - DNA, 23 bp, Artificial Sequence
  Synthetic
aggatgtgaatggtgatcacaga

SEQ ID NO: 26168 - DNA, 20 bp, Artificial Sequence
  Synthetic
tcaacagaagccacctgcag

SEQ ID NO: 26169 - DNA, 23 bp, Artificial Sequence
  Synthetic
tttcagcaactattggtttccga

SEQ ID NO: 26170 - DNA, 23 bp, Artificial Sequence
  Synthetic
atgcccaagttacagaggattca

SEQ ID NO: 26171 - DNA, 24 bp, Artificial Sequence
  Synthetic
tctaacaatgcggtggttgaaaat

SEQ ID NO: 26172 - DNA, 25 bp, Artificial Sequence
  Synthetic
gaactttcaaagatggtacaatggg

SEQ ID NO: 26173 - DNA, 21 bp, Artificial Sequence
  Synthetic
cttccgcgacatggtttatcg

SEQ ID NO: 26174 - DNA, 22 bp, Artificial Sequence
  Synthetic
tggtggaggaacagtttctagg

SEQ ID NO: 26175 - DNA, 25 bp, Artificial Sequence
  Synthetic
tgagcatcctgcagtaataaatgtt

SEQ ID NO: 26176 - DNA, 22 bp, Artificial Sequence
  Synthetic
ttttacagtgagaccgaaagcg

SEQ ID NO: 26177 - DNA, 25 bp, Artificial Sequence
  Synthetic
ttaccagaacaaaatgaaaacaggg

SEQ ID NO: 26178 - DNA, 23 bp, Artificial Sequence
  Synthetic
agatgctgtttgtaaatggcctg

SEQ ID NO: 26179 - DNA, 24 bp, Artificial Sequence
  Synthetic
tcgcatataaatgtgatgaaccca

SEQ ID NO: 26180 - DNA, 22 bp, Artificial Sequence
  Synthetic
ggtcaaattccttttccccacc

SEQ ID NO: 26181 - DNA, 20 bp, Artificial Sequence
  Synthetic
cgcttttgttgctggctgtc

SEQ ID NO: 26182 - DNA, 20 bp, Artificial Sequence
  Synthetic
tagagggcattggagagggt

SEQ ID NO: 26183 - DNA, 25 bp, Artificial Sequence
  Synthetic
gctcgaagaattatcattcgtttgc

SEQ ID NO: 26184 - DNA, 23 bp, Artificial Sequence
  Synthetic
gtagtgagctgggtaaagatggc

SEQ ID NO: 26185 - DNA, 25 bp, Artificial Sequence
  Synthetic
tggtacagtgggcatatgataatga

SEQ ID NO: 26186 - DNA, 22 bp, Artificial Sequence
  Synthetic
ggcccagcagaaagttccatcc

SEQ ID NO: 26187 - DNA, 21 bp, Artificial Sequence
  Synthetic
aaaaggtcctgcaaatcccct

SEQ ID NO: 26188 - DNA, 21 bp, Artificial Sequence
  Synthetic
acgcgtattacctgaagggac

SEQ ID NO: 26189 - DNA, 23 bp, Artificial Sequence
  Synthetic
atatatctcctgcacaaccagcc

SEQ ID NO: 26190 - DNA, 20 bp, Artificial Sequence
  Synthetic
cagtgccacggctaacacaa

SEQ ID NO: 26191 - DNA, 23 bp, Artificial Sequence
  Synthetic
accttcattaggggaacattggg

SEQ ID NO: 26192 - DNA, 25 bp, Artificial Sequence
  Synthetic
tacggtgaccaggtatttttctttg

SEQ ID NO: 26193 - DNA, 22 bp, Artificial Sequence
  Synthetic
tcaaactggtttactggagcgt

SEQ ID NO: 26194 - DNA, 20 bp, Artificial Sequence
  Synthetic
atccggacctcatgccagat

SEQ ID NO: 26195 - DNA, 22 bp, Artificial Sequence
  Synthetic
tgactgactcaaacgttcttgg

SEQ ID NO: 26196 - DNA, 20 bp, Artificial Sequence
  Synthetic
gatcgccagaatgcaactga

SEQ ID NO: 26197 - DNA, 22 bp, Artificial Sequence
  Synthetic
tcagttgctcacaaatcttgcc

SEQ ID NO: 26198 - DNA, 20 bp, Artificial Sequence
  Synthetic
aaaagtatctccgcggggga

SEQ ID NO: 26199 - DNA, 22 bp, Artificial Sequence
  Synthetic
aatacggagggaaggacttcag

SEQ ID NO: 26200 - DNA, 23 bp, Artificial Sequence
  Synthetic
aatttgaaaatacaggcgagcgc

SEQ ID NO: 26201 - DNA, 23 bp, Artificial Sequence
  Synthetic
gagcaattgaacagctcagagga

SEQ ID NO: 26202 - DNA, 25 bp, Artificial Sequence
  Synthetic
aaaacgaaagtatttaggcagtccg

SEQ ID NO: 26203 - DNA, 20 bp, Artificial Sequence
  Synthetic
acgccaccacagcaaataca

SEQ ID NO: 26204 - DNA, 22 bp, Artificial Sequence
  Synthetic
aacagatgacagtgacattgca

SEQ ID NO: 26205 - DNA, 22 bp, Artificial Sequence
  Synthetic
ttttacgaggcacaccaaaaca

SEQ ID NO: 26206 - DNA, 22 bp, Artificial Sequence
  Synthetic
attgtcccgactctgtgtctag

SEQ ID NO: 26207 - DNA, 20 bp, Artificial Sequence
  Synthetic
tttgtgtgcctgtgtgtctg

SEQ ID NO: 26208 - DNA, 20 bp, Artificial Sequence
  Synthetic
gtgtactatggtcgcccacc

SEQ ID NO: 26209 - DNA, 21 bp, Artificial Sequence
  Synthetic
tccacaaactggggaggtatc

SEQ ID NO: 26210 - DNA, 22 bp, Artificial Sequence
  Synthetic
ttgtggctttacacagacctgc

SEQ ID NO: 26211 - DNA, 25 bp, Artificial Sequence
  Synthetic
aacatgttccctattttcttgcaga

SEQ ID NO: 26212 - DNA, 22 bp, Artificial Sequence
  Synthetic
ttcccaaggtgtctgcatttca

SEQ ID NO: 26213 - DNA, 25 bp, Artificial Sequence
  Synthetic
catgactatatctgcaaccacacaa

SEQ ID NO: 26214 - DNA, 24 bp, Artificial Sequence
  Synthetic
aaaagccttgctataacctgtcaa

SEQ ID NO: 26215 - DNA, 20 bp, Artificial Sequence
  Synthetic
cggcggtgattgtttgtgtc

SEQ ID NO: 26216 - DNA, 20 bp, Artificial Sequence
  Synthetic
tggttgttgcacaccactgt

SEQ ID NO: 26217 - DNA, 23 bp, Artificial Sequence
  Synthetic
tgcaaacatctgcaacacaatga

SEQ ID NO: 26218 - DNA, 20 bp, Artificial Sequence
  Synthetic
aacggccatacaagctacca

SEQ ID NO: 26219 - DNA, 25 bp, Artificial Sequence
  Synthetic
ctcagaggatgaggatgaaacagac

SEQ ID NO: 26220 - DNA, 20 bp, Artificial Sequence
  Synthetic
ggaggtgttcgggatggttt

SEQ ID NO: 26221 - DNA, 25 bp, Artificial Sequence
  Synthetic
aatggtacagtgggcatttgataat

SEQ ID NO: 26222 - DNA, 25 bp, Artificial Sequence
  Synthetic
aatgcattagatggcaatcctatgt

SEQ ID NO: 26223 - DNA, 24 bp, Artificial Sequence
  Synthetic
acaaagacgtggtcaaaactagat

SEQ ID NO: 26224 - DNA, 24 bp, Artificial Sequence
  Synthetic
tccaaagggcataatgcaattgaa

SEQ ID NO: 26225 - DNA, 25 bp, Artificial Sequence
  Synthetic
atggtagcattggggtattttttgg

SEQ ID NO: 26226 - DNA, 23 bp, Artificial Sequence
  Synthetic
aacaacatctgtggacagtacac

SEQ ID NO: 26227 - DNA, 23 bp, Artificial Sequence
  Synthetic
gctagaaaaactggcatacgtgt

SEQ ID NO: 26228 - DNA, 24 bp, Artificial Sequence
  Synthetic
gacctactgaggcaaaggtatacc

SEQ ID NO: 26229 - DNA, 20 bp, Artificial Sequence
  Synthetic
gcacaccatgtggtacccaa

SEQ ID NO: 26230 - DNA, 23 bp, Artificial Sequence
  Synthetic
aggtactgtaggcgatgctattc

SEQ ID NO: 26231 - DNA, 23 bp, Artificial Sequence
  Synthetic
aacatgttttggtctgtttgtgc

SEQ ID NO: 26232 - DNA, 24 bp, Artificial Sequence
  Synthetic
aagaacgttactgttacacatgcc

SEQ ID NO: 26233 - DNA, 21 bp, Artificial Sequence
  Synthetic
gttacccaggggatttcaacg

SEQ ID NO: 26234 - DNA, 20 bp, Artificial Sequence
  Synthetic
gatgcggcagagcagacaaa

SEQ ID NO: 26235 - DNA, 25 bp, Artificial Sequence
  Synthetic
agtgaattggaatatggtaactgca

SEQ ID NO: 26236 - DNA, 22 bp, Artificial Sequence
  Synthetic
ggtaccaccatagcaatgagca

SEQ ID NO: 26237 - DNA, 25 bp, Artificial Sequence
  Synthetic
ttcatgactcaaatgtcaagaacct

SEQ ID NO: 26238 - DNA, 25 bp, Artificial Sequence
  Synthetic
actgtcaatttattcaacagtggcg

SEQ ID NO: 26239 - DNA, 20 bp, Artificial Sequence
  Synthetic
gagaacgccagaatgccact

SEQ ID NO: 26240 - DNA, 24 bp, Artificial Sequence
  Synthetic
taaacggaaagtggatgagagaac

SEQ ID NO: 26241 - DNA, 21 bp, Artificial Sequence
  Synthetic
ggtcaggatgatcaaacgtgg

SEQ ID NO: 26242 - DNA, 24 bp, Artificial Sequence
  Synthetic
ggaagctttccactagaggagttc

SEQ ID NO: 26243 - DNA, 20 bp, Artificial Sequence
  Synthetic
cagcaggacgagcaagcttt

SEQ ID NO: 26244 - DNA, 20 bp, Artificial Sequence
  Synthetic
agttgcgtgtatcgtcccaa

SEQ ID NO: 26245 - DNA, 25 bp, Artificial Sequence
  Synthetic
ttcagttttatgctgcaaaatgtcg

SEQ ID NO: 26246 - DNA, 25 bp, Artificial Sequence
  Synthetic
agggctaatagatgatgcaacattt

SEQ ID NO: 26247 - DNA, 20 bp, Artificial Sequence
  Synthetic
accgtttcgatgctgtgcaa

SEQ ID NO: 26248 - DNA, 25 bp, Artificial Sequence
  Synthetic
acgttatggaccgctatttattacc

SEQ ID NO: 26249 - DNA, 20 bp, Artificial Sequence
  Synthetic
aagacgaggctagggatccg

SEQ ID NO: 26250 - DNA, 20 bp, Artificial Sequence
  Synthetic
gctggtgctgaggtgtttgt

SEQ ID NO: 26251 - DNA, 23 bp, Artificial Sequence
  Synthetic
gcatctgctaacattaatggcag

SEQ ID NO: 26252 - DNA, 22 bp, Artificial Sequence
  Synthetic
atttgcatccaagtcacagacg

SEQ ID NO: 26253 - DNA, 22 bp, Artificial Sequence
  Synthetic
caccccttgtaaaggtgaacac

SEQ ID NO: 26254 - DNA, 23 bp, Artificial Sequence
  Synthetic
gtccttagcatctagtgactccc

SEQ ID NO: 26255 - DNA, 25 bp, Artificial Sequence
  Synthetic
ttttgggtggttgatttatcagaca

SEQ ID NO: 26256 - DNA, 25 bp, Artificial Sequence
  Synthetic
gtattactcatgtgttttgcaacgt

SEQ ID NO: 26257 - DNA, 20 bp, Artificial Sequence
  Synthetic
cttgaagcagtagtccttct

SEQ ID NO: 26258 - DNA, 25 bp, Artificial Sequence
  Synthetic
catatctataagcaataattggctc

SEQ ID NO: 26259 - DNA, 18 bp, Artificial Sequence
  Synthetic
tccaaacatacaggggtg

SEQ ID NO: 26260 - DNA, 23 bp, Artificial Sequence
  Synthetic
aaatgtatagcttctttggactt

SEQ ID NO: 26261 - DNA, 18 bp, Artificial Sequence
  Synthetic
ccggtggtgctactagcg

SEQ ID NO: 26262 - DNA, 20 bp, Artificial Sequence
  Synthetic
gcttcagcttcaagtcttgc

SEQ ID NO: 26263 - DNA, 23 bp, Artificial Sequence
  Synthetic
ttataatgagtccaaatgtccat

SEQ ID NO: 26264 - DNA, 19 bp, Artificial Sequence
  Synthetic
ataaaattggcgggctctg

SEQ ID NO: 26265 - DNA, 22 bp, Artificial Sequence
  Synthetic
tcctagcctacttaatcgaatt

SEQ ID NO: 26266 - DNA, 25 bp, Artificial Sequence
  Synthetic
gtcaaaagactcattatatggatct

SEQ ID NO: 26267 - DNA, 21 bp, Artificial Sequence
  Synthetic
tgtaatcctcatcctgttgag

SEQ ID NO: 26268 - DNA, 23 bp, Artificial Sequence
  Synthetic
gcagccaatatggtctattaaat

SEQ ID NO: 26269 - DNA, 19 bp, Artificial Sequence
  Synthetic
ccgtaacataccggtttga

SEQ ID NO: 26270 - DNA, 18 bp, Artificial Sequence
  Synthetic
tttggcgcctttttagca

SEQ ID NO: 26271 - DNA, 22 bp, Artificial Sequence
  Synthetic
aggcagtactaattcttcaaga

SEQ ID NO: 26272 - DNA, 24 bp, Artificial Sequence
  Synthetic
ctacttgtaccttctaaactatca

SEQ ID NO: 26273 - DNA, 20 bp, Artificial Sequence
  Synthetic
agagcttattttcacagcct

SEQ ID NO: 26274 - DNA, 18 bp, Artificial Sequence
  Synthetic
cagttcctgcagtgcatc

SEQ ID NO: 26275 - DNA, 20 bp, Artificial Sequence
  Synthetic
tgtctcaggtgatgttgtgg

SEQ ID NO: 26276 - DNA, 21 bp, Artificial Sequence
  Synthetic
cgatatctccagcatttaagc

SEQ ID NO: 26277 - DNA, 18 bp, Artificial Sequence
  Synthetic
gaatgactgcagagccag

SEQ ID NO: 26278 - DNA, 18 bp, Artificial Sequence
  Synthetic
tgctaaacgtttcggtgg

SEQ ID NO: 26279 - DNA, 18 bp, Artificial Sequence
  Synthetic
atctctgaagcgggtgac

SEQ ID NO: 26280 - DNA, 19 bp, Artificial Sequence
  Synthetic
cgagtttgcattgttccac

SEQ ID NO: 26281 - DNA, 21 bp, Artificial Sequence
  Synthetic
cagatacagtttaccagttgg

SEQ ID NO: 26282 - DNA, 18 bp, Artificial Sequence
  Synthetic
gcgattcggatctggtag

SEQ ID NO: 26283 - DNA, 20 bp, Artificial Sequence
  Synthetic
acaaggctttgctatatccc

SEQ ID NO: 26284 - DNA, 18 bp, Artificial Sequence
  Synthetic
ttgttagtcccctgagca

SEQ ID NO: 26285 - DNA, 20 bp, Artificial Sequence
  Synthetic
cgggcatagagtgggttgat

SEQ ID NO: 26286 - DNA, 18 bp, Artificial Sequence
  Synthetic
tttggggatacgttggcg

SEQ ID NO: 26287 - DNA, 20 bp, Artificial Sequence
  Synthetic
tccctgttgcatagttgacc

SEQ ID NO: 26288 - DNA, 18 bp, Artificial Sequence
  Synthetic
aggtcaatatgcgtccgc

SEQ ID NO: 26289 - DNA, 17 bp, Artificial Sequence
  Synthetic
aacacaccccagtggcc

SEQ ID NO: 26290 - DNA, 18 bp, Artificial Sequence
  Synthetic
aatagggtcgctggtccg

SEQ ID NO: 26291 - DNA, 20 bp, Artificial Sequence
  Synthetic
cggatgtttcctgaagcagt

SEQ ID NO: 26292 - DNA, 20 bp, Artificial Sequence
  Synthetic
gtagataaggccggaagcgg

SEQ ID NO: 26293 - DNA, 19 bp, Artificial Sequence
  Synthetic
ctgcctcgtagatgccaag

SEQ ID NO: 26294 - DNA, 18 bp, Artificial Sequence
  Synthetic
tagcacagcagcacacac

SEQ ID NO: 26295 - DNA, 17 bp, Artificial Sequence
  Synthetic
tgtcgccacaagcagtg

SEQ ID NO: 26296 - DNA, 16 bp, Artificial Sequence
  Synthetic
gtgcccgctccgtgat

SEQ ID NO: 26297 - DNA, 18 bp, Artificial Sequence
  Synthetic
ctgctttggctacaccgc

SEQ ID NO: 26298 - DNA, 18 bp, Artificial Sequence
  Synthetic
acctgaacaacccccgtc

SEQ ID NO: 26299 - DNA, 20 bp, Artificial Sequence
  Synthetic
cccctatagtaagcaacggc

SEQ ID NO: 26300 - DNA, 18 bp, Artificial Sequence
  Synthetic
cgccactggacacgtatc

SEQ ID NO: 26301 - DNA, 18 bp, Artificial Sequence
  Synthetic
tgaacattccgccgatgg

SEQ ID NO: 26302 - DNA, 18 bp, Artificial Sequence
  Synthetic
ccgagaccacgaaagtcg

SEQ ID NO: 26303 - DNA, 18 bp, Artificial Sequence
  Synthetic
atttccacgggaggcgaa

SEQ ID NO: 26304 - DNA, 20 bp, Artificial Sequence
  Synthetic
cgcatcgatccgttcttgac

SEQ ID NO: 26305 - DNA, 18 bp, Artificial Sequence
  Synthetic
tgggttcaggggcgaatc

SEQ ID NO: 26306 - DNA, 16 bp, Artificial Sequence
  Synthetic
gtgccgtggaaaccgc

SEQ ID NO: 26307 - DNA, 20 bp, Artificial Sequence
  Synthetic
ggcaggatttacgcagaaga

SEQ ID NO: 26308 - DNA, 20 bp, Artificial Sequence
  Synthetic
ccacgtacaacctctcggta

SEQ ID NO: 26309 - DNA, 19 bp, Artificial Sequence
  Synthetic
gagtacctggtcattgccg

SEQ ID NO: 26310 - DNA, 17 bp, Artificial Sequence
  Synthetic
tgatccacgtccgcctc

SEQ ID NO: 26311 - DNA, 20 bp, Artificial Sequence
  Synthetic
taagcacctcataacgatgt

SEQ ID NO: 26312 - DNA, 21 bp, Artificial Sequence
  Synthetic
acttcttcaaccatttccatt

SEQ ID NO: 26313 - DNA, 21 bp, Artificial Sequence
  Synthetic
cacatcctgtaacatcagaaa

SEQ ID NO: 26314 - DNA, 19 bp, Artificial Sequence
  Synthetic
tattgttgtgttcagtgcc

SEQ ID NO: 26315 - DNA, 18 bp, Artificial Sequence
  Synthetic
tactgatccctcctggtg

SEQ ID NO: 26316 - DNA, 18 bp, Artificial Sequence
  Synthetic
atctcccctgtggcattt

SEQ ID NO: 26317 - DNA, 22 bp, Artificial Sequence
  Synthetic
caaatgtcctacaaagggattt

SEQ ID NO: 26318 - DNA, 18 bp, Artificial Sequence
  Synthetic
gtgggccatagcttcaag

SEQ ID NO: 26319 - DNA, 18 bp, Artificial Sequence
  Synthetic
cacagtgacattccgctc

SEQ ID NO: 26320 - DNA, 18 bp, Artificial Sequence
  Synthetic
atgtttcacgctgctgag

SEQ ID NO: 26321 - DNA, 20 bp, Artificial Sequence
  Synthetic
tctggtacaatgctctttgt

SEQ ID NO: 26322 - DNA, 22 bp, Artificial Sequence
  Synthetic
tgtatttattgctcccaaagga

SEQ ID NO: 26323 - DNA, 18 bp, Artificial Sequence
  Synthetic
ctgctgcataccctgatc

SEQ ID NO: 26324 - DNA, 21 bp, Artificial Sequence
  Synthetic
tgtgtgttatgatgtctctgg

SEQ ID NO: 26325 - DNA, 18 bp, Artificial Sequence
  Synthetic
actatctcctgtgctccg

SEQ ID NO: 26326 - DNA, 22 bp, Artificial Sequence
  Synthetic
tgtgctataccaaaatgaacaa

SEQ ID NO: 26327 - DNA, 20 bp, Artificial Sequence
  Synthetic
ttgagttgttcagcatatgc

SEQ ID NO: 26328 - DNA, 20 bp, Artificial Sequence
  Synthetic
ttcactttcctcattcctga

SEQ ID NO: 26329 - DNA, 18 bp, Artificial Sequence
  Synthetic
tttttccgggtggctagt

SEQ ID NO: 26330 - DNA, 18 bp, Artificial Sequence
  Synthetic
aaggacacattggcacat

SEQ ID NO: 26331 - DNA, 25 bp, Artificial Sequence
  Synthetic
ctactataaattgactttgtggctt

SEQ ID NO: 26332 - DNA, 24 bp, Artificial Sequence
  Synthetic
tgtctatgttgacagatattgtga

SEQ ID NO: 26333 - DNA, 21 bp, Artificial Sequence
  Synthetic
atgaatatgatggctgcaatt

SEQ ID NO: 26334 - DNA, 21 bp, Artificial Sequence
  Synthetic
tccaggttttttgtttggtat

SEQ ID NO: 26335 - DNA, 20 bp, Artificial Sequence
  Synthetic
tgtgataggtactcggatgt

SEQ ID NO: 26336 - DNA, 18 bp, Artificial Sequence
  Synthetic
gcactgcatgttgtttga

SEQ ID NO: 26337 - DNA, 22 bp, Artificial Sequence
  Synthetic
tcacaataggtaacaactgttt

SEQ ID NO: 26338 - DNA, 20 bp, Artificial Sequence
  Synthetic
actgttcattgtgtcacaaa

SEQ ID NO: 26339 - DNA, 22 bp, Artificial Sequence
  Synthetic
aaatccaatgatagatgggttg

SEQ ID NO: 26340 - DNA, 20 bp, Artificial Sequence
  Synthetic
tcttcattgtccctcagttt

SEQ ID NO: 26341 - DNA, 22 bp, Artificial Sequence
  Synthetic
cagctatcattttctctgctaa

SEQ ID NO: 26342 - DNA, 23 bp, Artificial Sequence
  Synthetic
ttctctgctttataaaagggtaa

SEQ ID NO: 26343 - DNA, 24 bp, Artificial Sequence
  Synthetic
ggctagtatcaaagtgataatttg

SEQ ID NO: 26344 - DNA, 18 bp, Artificial Sequence
  Synthetic
gtcgtcctggcaattccg

SEQ ID NO: 26345 - DNA, 20 bp, Artificial Sequence
  Synthetic
tggggataggctgacgtcta

SEQ ID NO: 26346 - DNA, 20 bp, Artificial Sequence
  Synthetic
agaaagagcaaccaggaagg

SEQ ID NO: 26347 - DNA, 18 bp, Artificial Sequence
  Synthetic
tgcgttgtggggagtttg

SEQ ID NO: 26348 - DNA, 20 bp, Artificial Sequence
  Synthetic
ccaccatggagaaatacgct

SEQ ID NO: 26349 - DNA, 19 bp, Artificial Sequence
  Synthetic
gtcttggagggtagtgcca

SEQ ID NO: 26350 - DNA, 19 bp, Artificial Sequence
  Synthetic
gaagcaatcagtggggcag

SEQ ID NO: 26351 - DNA, 20 bp, Artificial Sequence
  Synthetic
gcagggtcgtgaaagaacac

SEQ ID NO: 26352 - DNA, 18 bp, Artificial Sequence
  Synthetic
gaggccacatcccgtaga

SEQ ID NO: 26353 - DNA, 18 bp, Artificial Sequence
  Synthetic
cggctatcttccgcgcta

SEQ ID NO: 26354 - DNA, 20 bp, Artificial Sequence
  Synthetic
aagccgttgatgatgtcacc

SEQ ID NO: 26355 - DNA, 20 bp, Artificial Sequence
  Synthetic
cacaaggtcttggtccacat

SEQ ID NO: 26356 - DNA, 19 bp, Artificial Sequence
  Synthetic
ggtggagaggagttgtccg

SEQ ID NO: 26357 - DNA, 18 bp, Artificial Sequence
  Synthetic
atgtggcatccgtggagt

SEQ ID NO: 26358 - DNA, 19 bp, Artificial Sequence
  Synthetic
gacagacacgtcaagaccg

SEQ ID NO: 26359 - DNA, 19 bp, Artificial Sequence
  Synthetic
taactgtagtctcggcggg

SEQ ID NO: 26360 - DNA, 17 bp, Artificial Sequence
  Synthetic
ggtgctcgtgacgacct

SEQ ID NO: 26361 - DNA, 20 bp, Artificial Sequence
  Synthetic
agacctcgagtttctgccag

SEQ ID NO: 26362 - DNA, 18 bp, Artificial Sequence
  Synthetic
cacgaggaccttccccag

SEQ ID NO: 26363 - DNA, 17 bp, Artificial Sequence
  Synthetic
tgcagtcgcctcaggag

SEQ ID NO: 26364 - DNA, 19 bp, Artificial Sequence
  Synthetic
caggaaggggagtacaggg

SEQ ID NO: 26365 - DNA, 20 bp, Artificial Sequence
  Synthetic
agggatcagtgagcatggac

SEQ ID NO: 26366 - DNA, 19 bp, Artificial Sequence
  Synthetic
gcgaatctccgagacttcc

SEQ ID NO: 26367 - DNA, 20 bp, Artificial Sequence
  Synthetic
ggggcatggaagaataggac

SEQ ID NO: 26368 - DNA, 18 bp, Artificial Sequence
  Synthetic
ttttgacgccgctgcttt

SEQ ID NO: 26369 - DNA, 18 bp, Artificial Sequence
  Synthetic
aggagcttcccatcacgg

SEQ ID NO: 26370 - DNA, 20 bp, Artificial Sequence
  Synthetic
cagctagttgtcagtacgcc

SEQ ID NO: 26371 - DNA, 20 bp, Artificial Sequence
  Synthetic
tgtgggggcaaacatgatta

SEQ ID NO: 26372 - DNA, 18 bp, Artificial Sequence
  Synthetic
tggacagaagcctagcgc

SEQ ID NO: 26373 - DNA, 22 bp, Artificial Sequence
  Synthetic
catgaaacagacttctaagtgc

SEQ ID NO: 26374 - DNA, 21 bp, Artificial Sequence
  Synthetic
tagtatgtgtgaacttccctc

SEQ ID NO: 26375 - DNA, 20 bp, Artificial Sequence
  Synthetic
ctactttctctggtgccata

SEQ ID NO: 26376 - DNA, 23 bp, Artificial Sequence
  Synthetic
cccttcattatgtattcagtagc

SEQ ID NO: 26377 - DNA, 19 bp, Artificial Sequence
  Synthetic
gtccgtaagagcatgtctc

SEQ ID NO: 26378 - DNA, 18 bp, Artificial Sequence
  Synthetic
aaggttctgcacaccttc

SEQ ID NO: 26379 - DNA, 20 bp, Artificial Sequence
  Synthetic
tcacactgaaattcgctttc

SEQ ID NO: 26380 - DNA, 18 bp, Artificial Sequence
  Synthetic
gttctcgccattttccgt

SEQ ID NO: 26381 - DNA, 18 bp, Artificial Sequence
  Synthetic
gcacaaggaagttgcaaa

SEQ ID NO: 26382 - DNA, 20 bp, Artificial Sequence
  Synthetic
cttgtttgtcaggttgtgtt

SEQ ID NO: 26383 - DNA, 18 bp, Artificial Sequence
  Synthetic
cactgtcctccacatcct

SEQ ID NO: 26384 - DNA, 20 bp, Artificial Sequence
  Synthetic
ttgggccttatcaaacagcc

SEQ ID NO: 26385 - DNA, 21 bp, Artificial Sequence
  Synthetic
gcatttatgttggaggtcact

SEQ ID NO: 26386 - DNA, 23 bp, Artificial Sequence
  Synthetic
ccaatgttctatttggtcctcta

SEQ ID NO: 26387 - DNA, 20 bp, Artificial Sequence
  Synthetic
ctactgtttgtccacgtctt

SEQ ID NO: 26388 - DNA, 19 bp, Artificial Sequence
  Synthetic
gaaaaaatgatgctgctgc

SEQ ID NO: 26389 - DNA, 18 bp, Artificial Sequence
  Synthetic
tgtccataaaggcgggat

SEQ ID NO: 26390 - DNA, 25 bp, Artificial Sequence
  Synthetic
ataagtataactaggatgcaggtaa

SEQ ID NO: 26391 - DNA, 18 bp, Artificial Sequence
  Synthetic
acatttgttcccgcctta

SEQ ID NO: 26392 - DNA, 20 bp, Artificial Sequence
  Synthetic
gggtggtatctacaactgtt

SEQ ID NO: 26393 - DNA, 18 bp, Artificial Sequence
  Synthetic
ttgacatgcaatggcctg

SEQ ID NO: 26394 - DNA, 16 bp, Artificial Sequence
  Synthetic
gagcgccggacaaagg

SEQ ID NO: 26395 - DNA, 16 bp, Artificial Sequence
  Synthetic
agggctagcgctacgg

SEQ ID NO: 26396 - DNA, 20 bp, Artificial Sequence
  Synthetic
aacatagggaggggggattt

SEQ ID NO: 26397 - DNA, 19 bp, Artificial Sequence
  Synthetic
tgctggtgatggagggaag

SEQ ID NO: 26398 - DNA, 18 bp, Artificial Sequence
  Synthetic
gaggcgttctacgaaggc

SEQ ID NO: 26399 - DNA, 18 bp, Artificial Sequence
  Synthetic
tgacatagggggcatggc

SEQ ID NO: 26400 - DNA, 19 bp, Artificial Sequence
  Synthetic
ggaactggctgatttcggg

SEQ ID NO: 26401 - DNA, 18 bp, Artificial Sequence
  Synthetic
aggctggacaagtcaggg

SEQ ID NO: 26402 - DNA, 20 bp, Artificial Sequence
  Synthetic
tgccaggagaatgtcatcca

SEQ ID NO: 26403 - DNA, 20 bp, Artificial Sequence
  Synthetic
cgcagctgcactaatgattg

SEQ ID NO: 26404 - DNA, 20 bp, Artificial Sequence
  Synthetic
tggtttggcagagtagtcca

SEQ ID NO: 26405 - DNA, 19 bp, Artificial Sequence
  Synthetic
tgcaggacaggggtgatta

SEQ ID NO: 26406 - DNA, 22 bp, Artificial Sequence
  Synthetic
atagggttttaagaatgccatt

SEQ ID NO: 26407 - DNA, 16 bp, Artificial Sequence
  Synthetic
tccgacgggtcttggg

SEQ ID NO: 26408 - DNA, 18 bp, Artificial Sequence
  Synthetic
attagggcagggtggctg

SEQ ID NO: 26409 - DNA, 24 bp, Artificial Sequence
  Synthetic
aatattgaggtgtgaaacttcttg

SEQ ID NO: 26410 - DNA, 16 bp, Artificial Sequence
  Synthetic
tcctgccagccactcc

SEQ ID NO: 26411 - DNA, 18 bp, Artificial Sequence
  Synthetic
ttggaaggcgaggtggag

SEQ ID NO: 26412 - DNA, 16 bp, Artificial Sequence
  Synthetic
tccaggggggaaagcg

SEQ ID NO: 26413 - DNA, 20 bp, Artificial Sequence
  Synthetic
tccaaacacgtagactgggt

SEQ ID NO: 26414 - DNA, 20 bp, Artificial Sequence
  Synthetic
gaggaaggagggtggaatgt

SEQ ID NO: 26415 - DNA, 24 bp, Artificial Sequence
  Synthetic
gagatgcaaattatgaaaggaaga

SEQ ID NO: 26416 - DNA, 19 bp, Artificial Sequence
  Synthetic
acggcttgacaaacatggg

SEQ ID NO: 26417 - DNA, 19 bp, Artificial Sequence
  Synthetic
cggacgtagttcaggaggc

SEQ ID NO: 26418 - DNA, 20 bp, Artificial Sequence
  Synthetic
ttcattgccatcatccattt

SEQ ID NO: 26419 - DNA, 20 bp, Artificial Sequence
  Synthetic
ggcgtattttgacttggttt

SEQ ID NO: 26420 - DNA, 18 bp, Artificial Sequence
  Synthetic
ttgttccaccagcaactg

SEQ ID NO: 26421 - DNA, 19 bp, Artificial Sequence
  Synthetic
ctgcctaagaatgtccacc

SEQ ID NO: 26422 - DNA, 20 bp, Artificial Sequence
  Synthetic
attgactgttcgtctcttcc

SEQ ID NO: 26423 - DNA, 20 bp, Artificial Sequence
  Synthetic
cttggagtcatgtctggtaa

SEQ ID NO: 26424 - DNA, 19 bp, Artificial Sequence
  Synthetic
tcagggccattaatctccc

SEQ ID NO: 26425 - DNA, 19 bp, Artificial Sequence
  Synthetic
tctactttgctttggtggg

SEQ ID NO: 26426 - DNA, 19 bp, Artificial Sequence
  Synthetic
tgatgcttaatgctggtcc

SEQ ID NO: 26427 - DNA, 19 bp, Artificial Sequence
  Synthetic
tcacactgaagttcgcttt

SEQ ID NO: 26428 - DNA, 21 bp, Artificial Sequence
  Synthetic
tcccattctcattactgcttc

SEQ ID NO: 26429 - DNA, 20 bp, Artificial Sequence
  Synthetic
ccactttcccttttctgagt

SEQ ID NO: 26430 - DNA, 18 bp, Artificial Sequence
  Synthetic
tatggtgttggccaatgc

SEQ ID NO: 26431 - DNA, 21 bp, Artificial Sequence
  Synthetic
cgatagcccttctttttaact

SEQ ID NO: 26432 - DNA, 18 bp, Artificial Sequence
  Synthetic
catcgccaggaacattcg

SEQ ID NO: 26433 - DNA, 21 bp, Artificial Sequence
  Synthetic
gaagaggccttattttctcaa

SEQ ID NO: 26434 - DNA, 20 bp, Artificial Sequence
  Synthetic
aggtcctgtagaatctgtcc

SEQ ID NO: 26435 - DNA, 20 bp, Artificial Sequence
  Synthetic
ctcccctatggcacctatat

SEQ ID NO: 26436 - DNA, 18 bp, Artificial Sequence
  Synthetic
gaatcgtgtgcgcgaaag

SEQ ID NO: 26437 - DNA, 16 bp, Artificial Sequence
  Synthetic
tgggctggggtggttt

SEQ ID NO: 26438 - DNA, 16 bp, Artificial Sequence
  Synthetic
gttcaccgcgtcgtgc

SEQ ID NO: 26439 - DNA, 20 bp, Artificial Sequence
  Synthetic
gacggattcctgaggctaca

SEQ ID NO: 26440 - DNA, 19 bp, Artificial Sequence
  Synthetic
ggtcggaccatccacccat

SEQ ID NO: 26441 - DNA, 20 bp, Artificial Sequence
  Synthetic
gacgcgttaatcgaactttc

SEQ ID NO: 26442 - DNA, 19 bp, Artificial Sequence
  Synthetic
cggccgctgaaaaaagagt

SEQ ID NO: 26443 - DNA, 18 bp, Artificial Sequence
  Synthetic
ggtcggtccaggtcaacg

SEQ ID NO: 26444 - DNA, 20 bp, Artificial Sequence
  Synthetic
cgttatagcgccgtctttcg

SEQ ID NO: 26445 - DNA, 18 bp, Artificial Sequence
  Synthetic
ccaggctgtgggtctcgt

SEQ ID NO: 26446 - DNA, 17 bp, Artificial Sequence
  Synthetic
tacgcggtgccgttcac

SEQ ID NO: 26447 - DNA, 18 bp, Artificial Sequence
  Synthetic
cggatccgtcagccagta

SEQ ID NO: 26448 - DNA, 18 bp, Artificial Sequence
  Synthetic
tcttcctcagagacggcc

SEQ ID NO: 26449 - DNA, 17 bp, Artificial Sequence
  Synthetic
catgacgcgttcgggac

SEQ ID NO: 26450 - DNA, 20 bp, Artificial Sequence
  Synthetic
tggagcctcggtttggatac

SEQ ID NO: 26451 - DNA, 18 bp, Artificial Sequence
  Synthetic
tctcggacgagggctatg

SEQ ID NO: 26452 - DNA, 16 bp, Artificial Sequence
  Synthetic
gcagcggctcatcagg

SEQ ID NO: 26453 - DNA, 19 bp, Artificial Sequence
  Synthetic
atacgtggtgtgcacgttg

SEQ ID NO: 26454 - DNA, 15 bp, Artificial Sequence
  Synthetic
tacgcggcgacagct

SEQ ID NO: 26455 - DNA, 17 bp, Artificial Sequence
  Synthetic
tcgatgggtccgcttca

SEQ ID NO: 26456 - DNA, 19 bp, Artificial Sequence
  Synthetic
agtacgactcgtaggccgt

SEQ ID NO: 26457 - DNA, 16 bp, Artificial Sequence
  Synthetic
aatgcgggcaggcgtg

SEQ ID NO: 26458 - DNA, 17 bp, Artificial Sequence
  Synthetic
gacagttgagcgcgtcg

SEQ ID NO: 26459 - DNA, 19 bp, Artificial Sequence
  Synthetic
ggcggtgtttccagcattt

SEQ ID NO: 26460 - DNA, 20 bp, Artificial Sequence
  Synthetic
tgtgctagaccgtaccgaat

SEQ ID NO: 26461 - DNA, 17 bp, Artificial Sequence
  Synthetic
gccgatttttcgccgca

SEQ ID NO: 26462 - DNA, 19 bp, Artificial Sequence
  Synthetic
cggataatctcctgggcca

SEQ ID NO: 26463 - DNA, 18 bp, Artificial Sequence
  Synthetic
cacgctgatgtcctcggg

SEQ ID NO: 26464 - DNA, 19 bp, Artificial Sequence
  Synthetic
cgacgccatcaccgagaac

SEQ ID NO: 26465 - DNA, 19 bp, Artificial Sequence
  Synthetic
cgcccaccatgaaggattt

SEQ ID NO: 26466 - DNA, 18 bp, Artificial Sequence
  Synthetic
tccaccagctggactacg

SEQ ID NO: 26467 - DNA, 18 bp, Artificial Sequence
  Synthetic
ttcatgacgcccaagtgg

SEQ ID NO: 26468 - DNA, 18 bp, Artificial Sequence
  Synthetic
aatcgcccctcacgtcag

SEQ ID NO: 26469 - DNA, 18 bp, Artificial Sequence
  Synthetic
gcgtacgccgtgtaccac

SEQ ID NO: 26470 - DNA, 18 bp, Artificial Sequence
  Synthetic
cgaccgggatcacgacga

SEQ ID NO: 26471 - DNA, 18 bp, Artificial Sequence
  Synthetic
gtacctggtgtcgcggtc

SEQ ID NO: 26472 - DNA, 20 bp, Artificial Sequence
  Synthetic
ccgtgagtgttacttcccca

SEQ ID NO: 26473 - DNA, 16 bp, Artificial Sequence
  Synthetic
tctccatcgccagcgc

SEQ ID NO: 26474 - DNA, 20 bp, Artificial Sequence
  Synthetic
ctttgatttgagcgtgctgc

SEQ ID NO: 26475 - DNA, 17 bp, Artificial Sequence
  Synthetic
tacccaagctggccgag

SEQ ID NO: 26476 - DNA, 18 bp, Artificial Sequence
  Synthetic
cactggcagaccttggtc

SEQ ID NO: 26477 - DNA, 19 bp, Artificial Sequence
  Synthetic
ttacggtctggatctcgcg

SEQ ID NO: 26478 - DNA, 19 bp, Artificial Sequence
  Synthetic
tgtcgctgctgatctgacg

SEQ ID NO: 26479 - DNA, 16 bp, Artificial Sequence
  Synthetic
gcctggcttacgggga

SEQ ID NO: 26480 - DNA, 17 bp, Artificial Sequence
  Synthetic
cgcgccaacgagttgac

SEQ ID NO: 26481 - DNA, 17 bp, Artificial Sequence
  Synthetic
cgccacatccagcatgt

SEQ ID NO: 26482 - DNA, 20 bp, Artificial Sequence
  Synthetic
gcaactctagcattttggcg

SEQ ID NO: 26483 - DNA, 20 bp, Artificial Sequence
  Synthetic
gcgtttcctcttcctcttcg

SEQ ID NO: 26484 - DNA, 18 bp, Artificial Sequence
  Synthetic
cgttgatccgcccgtcta

SEQ ID NO: 26485 - DNA, 18 bp, Artificial Sequence
  Synthetic
acagctcgcgaagtgtct

SEQ ID NO: 26486 - DNA, 16 bp, Artificial Sequence
  Synthetic
tgcgctagcgtcacgg

SEQ ID NO: 26487 - DNA, 16 bp, Artificial Sequence
  Synthetic
acttcgcacgggcacg

SEQ ID NO: 26488 - DNA, 17 bp, Artificial Sequence
  Synthetic
ctttgcgactctgggcc

SEQ ID NO: 26489 - DNA, 18 bp, Artificial Sequence
  Synthetic
cggagtgctgacgaagtg

SEQ ID NO: 26490 - DNA, 20 bp, Artificial Sequence
  Synthetic
gaatgtcctgggctaagcag

SEQ ID NO: 26491 - DNA, 17 bp, Artificial Sequence
  Synthetic
ttgagaaacagcggcgg

SEQ ID NO: 26492 - DNA, 18 bp, Artificial Sequence
  Synthetic
gtcggacgcgattgatgg

SEQ ID NO: 26493 - DNA, 19 bp, Artificial Sequence
  Synthetic
gctccggcagtaacagtag

SEQ ID NO: 26494 - DNA, 20 bp, Artificial Sequence
  Synthetic
tacagcaaaggtacgacggt

SEQ ID NO: 26495 - DNA, 16 bp, Artificial Sequence
  Synthetic
agggggaggggcgaat

SEQ ID NO: 26496 - DNA, 17 bp, Artificial Sequence
  Synthetic
agcagcaacagtcgcag

SEQ ID NO: 26497 - DNA, 19 bp, Artificial Sequence
  Synthetic
ggattgcgaccccgaagtg

SEQ ID NO: 26498 - DNA, 18 bp, Artificial Sequence
  Synthetic
ctcatcgaccccgtgacg

SEQ ID NO: 26499 - DNA, 19 bp, Artificial Sequence
  Synthetic
catacgcaaggcatcgtgg

SEQ ID NO: 26500 - DNA, 19 bp, Artificial Sequence
  Synthetic
aacgcaggagattctggcc

SEQ ID NO: 26501 - DNA, 18 bp, Artificial Sequence
  Synthetic
aagccgtcccgaacatca

SEQ ID NO: 26502 - DNA, 20 bp, Artificial Sequence
  Synthetic
agggaaaaaaaggtggggcc

SEQ ID NO: 26503 - DNA, 16 bp, Artificial Sequence
  Synthetic
tctcacggcggcagtc

SEQ ID NO: 26504 - DNA, 17 bp, Artificial Sequence
  Synthetic
acgtctggcaccctacc

SEQ ID NO: 26505 - DNA, 19 bp, Artificial Sequence
  Synthetic
tctggatgaccgtatgggc

SEQ ID NO: 26506 - DNA, 16 bp, Artificial Sequence
  Synthetic
accgctgcccgtctac

SEQ ID NO: 26507 - DNA, 18 bp, Artificial Sequence
  Synthetic
acgtctacctggcctacc

SEQ ID NO: 26508 - DNA, 16 bp, Artificial Sequence
  Synthetic
cgggtgacggcgacat

SEQ ID NO: 26509 - DNA, 16 bp, Artificial Sequence
  Synthetic
acaggcggttgagcgc

SEQ ID NO: 26510 - DNA, 16 bp, Artificial Sequence
  Synthetic
gccttcccaagcggca

SEQ ID NO: 26511 - DNA, 16 bp, Artificial Sequence
  Synthetic
atcgtcccgtagcccg

SEQ ID NO: 26512 - DNA, 16 bp, Artificial Sequence
  Synthetic
agcctgcgactgctgc

SEQ ID NO: 26513 - DNA, 20 bp, Artificial Sequence
  Synthetic
gtcgtcgtggttgatgttga

SEQ ID NO: 26514 - DNA, 18 bp, Artificial Sequence
  Synthetic
ctgccacggtagcacctg

SEQ ID NO: 26515 - DNA, 17 bp, Artificial Sequence
  Synthetic
ataccgcccggagagtc

SEQ ID NO: 26516 - DNA, 20 bp, Artificial Sequence
  Synthetic
gcctgggaaactcaagtctt

SEQ ID NO: 26517 - DNA, 19 bp, Artificial Sequence
  Synthetic
atgtttgccggcttcgagg

SEQ ID NO: 26518 - DNA, 18 bp, Artificial Sequence
  Synthetic
tcccgggcgtctccatag

SEQ ID NO: 26519 - DNA, 19 bp, Artificial Sequence
  Synthetic
taaacatcaagggccgctg

SEQ ID NO: 26520 - DNA, 17 bp, Artificial Sequence
  Synthetic
actgccaggtgcttcgg

SEQ ID NO: 26521 - DNA, 16 bp, Artificial Sequence
  Synthetic
ggccgagcgcaaacac

SEQ ID NO: 26522 - DNA, 19 bp, Artificial Sequence
  Synthetic
acaatcagctgcaggtgca

SEQ ID NO: 26523 - DNA, 20 bp, Artificial Sequence
  Synthetic
acgcaccaagtcaaatccac

SEQ ID NO: 26524 - DNA, 17 bp, Artificial Sequence
  Synthetic
ggtgcgacgacccttct

SEQ ID NO: 26525 - DNA, 19 bp, Artificial Sequence
  Synthetic
tgataccgcggaatcaacg

SEQ ID NO: 26526 - DNA, 20 bp, Artificial Sequence
  Synthetic
tgatcgacatgaagaccgcc

SEQ ID NO: 26527 - DNA, 18 bp, Artificial Sequence
  Synthetic
gccctggatcgtacccat

SEQ ID NO: 26528 - DNA, 19 bp, Artificial Sequence
  Synthetic
acctcaagacgctgctagt

SEQ ID NO: 26529 - DNA, 18 bp, Artificial Sequence
  Synthetic
ggtaacgcgcatctcagc

SEQ ID NO: 26530 - DNA, 16 bp, Artificial Sequence
  Synthetic
tgtgccacccggtgct

SEQ ID NO: 26531 - DNA, 17 bp, Artificial Sequence
  Synthetic
tgctttccccgagctcc

SEQ ID NO: 26532 - DNA, 20 bp, Artificial Sequence
  Synthetic
gtaccagatgttcaccgtgg

SEQ ID NO: 26533 - DNA, 19 bp, Artificial Sequence
  Synthetic
agaggctcggcaattctcg

SEQ ID NO: 26534 - DNA, 17 bp, Artificial Sequence
  Synthetic
acgtcgaacgcgatcgg

SEQ ID NO: 26535 - DNA, 19 bp, Artificial Sequence
  Synthetic
gtgttcctgataggcccgg

SEQ ID NO: 26536 - DNA, 16 bp, Artificial Sequence
  Synthetic
acaccaaccaggcggc

SEQ ID NO: 26537 - DNA, 20 bp, Artificial Sequence
  Synthetic
tcaacgtggtctcttacgtg

SEQ ID NO: 26538 - DNA, 17 bp, Artificial Sequence
  Synthetic
agttttgggggcggagg

SEQ ID NO: 26539 - DNA, 17 bp, Artificial Sequence
  Synthetic
cttggatcacgtcggcg

SEQ ID NO: 26540 - DNA, 18 bp, Artificial Sequence
  Synthetic
ccacctcctgcatctcca

SEQ ID NO: 26541 - DNA, 19 bp, Artificial Sequence
  Synthetic
ttcaggtggatcctccgtc

SEQ ID NO: 26542 - DNA, 16 bp, Artificial Sequence
  Synthetic
acgtcgaaaccccggc

SEQ ID NO: 26543 - DNA, 18 bp, Artificial Sequence
  Synthetic
gcaagccgtggtaaccgt

SEQ ID NO: 26544 - DNA, 16 bp, Artificial Sequence
  Synthetic
agcgccgacaactccg

SEQ ID NO: 26545 - DNA, 18 bp, Artificial Sequence
  Synthetic
cgtagctcatttgcgccg

SEQ ID NO: 26546 - DNA, 16 bp, Artificial Sequence
  Synthetic
ttttccccgccggtgg

SEQ ID NO: 26547 - DNA, 17 bp, Artificial Sequence
  Synthetic
agccactaccgcagagc

SEQ ID NO: 26548 - DNA, 17 bp, Artificial Sequence
  Synthetic
tcagagacgcgttccgc

SEQ ID NO: 26549 - DNA, 17 bp, Artificial Sequence
  Synthetic
cagacgcagacaggtgc

SEQ ID NO: 26550 - DNA, 20 bp, Artificial Sequence
  Synthetic
ccgttgccgtagaagaagtt

SEQ ID NO: 26551 - DNA, 18 bp, Artificial Sequence
  Synthetic
tttctgggctactccgcc

SEQ ID NO: 26552 - DNA, 20 bp, Artificial Sequence
  Synthetic
gctggaggtccatacggatt

SEQ ID NO: 26553 - DNA, 18 bp, Artificial Sequence
  Synthetic
aagctgctgttcaccacg

SEQ ID NO: 26554 - DNA, 20 bp, Artificial Sequence
  Synthetic
acgctctttgacaccatcac

SEQ ID NO: 26555 - DNA, 16 bp, Artificial Sequence
  Synthetic
agaggtcctcgcaggc

SEQ ID NO: 26556 - DNA, 16 bp, Artificial Sequence
  Synthetic
ggtctgcgtgggcgaa

SEQ ID NO: 26557 - DNA, 20 bp, Artificial Sequence
  Synthetic
gtgtgatccatgagttcggc

SEQ ID NO: 26558 - DNA, 20 bp, Artificial Sequence
  Synthetic
ggcgattgtaggtaacgagc

SEQ ID NO: 26559 - DNA, 16 bp, Artificial Sequence
  Synthetic
tgcaccacctcggggt

SEQ ID NO: 26560 - DNA, 20 bp, Artificial Sequence
  Synthetic
gactcttggcgatggtcatg

SEQ ID NO: 26561 - DNA, 16 bp, Artificial Sequence
  Synthetic
ttgcctggacgcctgg

SEQ ID NO: 26562 - DNA, 20 bp, Artificial Sequence
  Synthetic
cctgctgtacaacaatccgg

SEQ ID NO: 26563 - DNA, 18 bp, Artificial Sequence
  Synthetic
ctctcatcgtgccgcaga

SEQ ID NO: 26564 - DNA, 19 bp, Artificial Sequence
  Synthetic
tgcttactgtgtgaagcgg

SEQ ID NO: 26565 - DNA, 16 bp, Artificial Sequence
  Synthetic
acgccacaggccgtag

SEQ ID NO: 26566 - DNA, 18 bp, Artificial Sequence
  Synthetic
aggtgacgcgacctcctg

SEQ ID NO: 26567 - DNA, 19 bp, Artificial Sequence
  Synthetic
gctacggctgctgatacga

SEQ ID NO: 26568 - DNA, 16 bp, Artificial Sequence
  Synthetic
cgctcggcagctcctt

SEQ ID NO: 26569 - DNA, 18 bp, Artificial Sequence
  Synthetic
ctacggaccgtctgtcga

SEQ ID NO: 26570 - DNA, 24 bp, Artificial Sequence
  Synthetic
ttgtctctctttatctttcttgtg

SEQ ID NO: 26571 - DNA, 21 bp, Artificial Sequence
  Synthetic
caagtcatgattcgtaactgc

SEQ ID NO: 26572 - DNA, 20 bp, Artificial Sequence
  Synthetic
cgcttcgtaattctgacgca

SEQ ID NO: 26573 - DNA, 19 bp, Artificial Sequence
  Synthetic
aagatgtgggccgagaact

SEQ ID NO: 26574 - DNA, 16 bp, Artificial Sequence
  Synthetic
aagccgccgttcaagc

SEQ ID NO: 26575 - DNA, 18 bp, Artificial Sequence
  Synthetic
tggtggacgagacgagac

SEQ ID NO: 26576 - DNA, 17 bp, Artificial Sequence
  Synthetic
aaacccaagccggtcgg

SEQ ID NO: 26577 - DNA, 16 bp, Artificial Sequence
  Synthetic
tacgctagcggggctg

SEQ ID NO: 26578 - DNA, 20 bp, Artificial Sequence
  Synthetic
taacgtgggtttcaggggaa

SEQ ID NO: 26579 - DNA, 17 bp, Artificial Sequence
  Synthetic
actgcagaccgtacggg

SEQ ID NO: 26580 - DNA, 16 bp, Artificial Sequence
  Synthetic
ttctgcaccgccgacg

SEQ ID NO: 26581 - DNA, 18 bp, Artificial Sequence
  Synthetic
acccagcactccatcgac

SEQ ID NO: 26582 - DNA, 18 bp, Artificial Sequence
  Synthetic
catacgccacagcatgcg

SEQ ID NO: 26583 - DNA, 15 bp, Artificial Sequence
  Synthetic
tgtgcactgccgcga

SEQ ID NO: 26584 - DNA, 18 bp, Artificial Sequence
  Synthetic
aggccgtggaaaaccacc

SEQ ID NO: 26585 - DNA, 18 bp, Artificial Sequence
  Synthetic
caggcatgggtctgtcga

SEQ ID NO: 26586 - DNA, 18 bp, Artificial Sequence
  Synthetic
gagactggcagggacacg

SEQ ID NO: 26587 - DNA, 18 bp, Artificial Sequence
  Synthetic
ctggccgtcctgttcctg

SEQ ID NO: 26588 - DNA, 16 bp, Artificial Sequence
  Synthetic
accgttgacgtgggcg

SEQ ID NO: 26589 - DNA, 18 bp, Artificial Sequence
  Synthetic
gcgacagacatccccctg

SEQ ID NO: 26590 - DNA, 20 bp, Artificial Sequence
  Synthetic
gttcagtgttggatcagact

SEQ ID NO: 26591 - DNA, 16 bp, Artificial Sequence
  Synthetic
ctcgcgggtttgggga

SEQ ID NO: 26592 - DNA, 16 bp, Artificial Sequence
  Synthetic
gaaggcaccgcgacag

SEQ ID NO: 26593 - DNA, 16 bp, Artificial Sequence
  Synthetic
accccagcaacggcct

SEQ ID NO: 26594 - DNA, 20 bp, Artificial Sequence
  Synthetic
gattgctgacgctggaaacc

SEQ ID NO: 26595 - DNA, 17 bp, Artificial Sequence
  Synthetic
cagagaacgcagcgcac

SEQ ID NO: 26596 - DNA, 18 bp, Artificial Sequence
  Synthetic
tcctcctggtgcctgtgg

SEQ ID NO: 26597 - DNA, 17 bp, Artificial Sequence
  Synthetic
gggccgcccaaacatct

SEQ ID NO: 26598 - DNA, 20 bp, Artificial Sequence
  Synthetic
cccttgagtttgatggtgcc

SEQ ID NO: 26599 - DNA, 17 bp, Artificial Sequence
  Synthetic
cgggactttgacagccg

SEQ ID NO: 26600 - DNA, 18 bp, Artificial Sequence
  Synthetic
tctcctttacggggctgg

SEQ ID NO: 26601 - DNA, 17 bp, Artificial Sequence
  Synthetic
gggcctgaagcgatgga

SEQ ID NO: 26602 - DNA, 17 bp, Artificial Sequence
  Synthetic
tacgatcctccggcgct

SEQ ID NO: 26603 - DNA, 17 bp, Artificial Sequence
  Synthetic
caggctggaacgcaacg

SEQ ID NO: 26604 - DNA, 19 bp, Artificial Sequence
  Synthetic
ccacagacgccgtttgcta

SEQ ID NO: 26605 - DNA, 19 bp, Artificial Sequence
  Synthetic
ttgagtgccagtacagcgc

SEQ ID NO: 26606 - DNA, 16 bp, Artificial Sequence
  Synthetic
gtgacgccggttgtcc

SEQ ID NO: 26607 - DNA, 19 bp, Artificial Sequence
  Synthetic
tttcctgtgcaccgtcatc

SEQ ID NO: 26608 - DNA, 19 bp, Artificial Sequence
  Synthetic
tggatgattttgcgcgaca

SEQ ID NO: 26609 - DNA, 19 bp, Artificial Sequence
  Synthetic
gaagatcgtcctctcgccg

SEQ ID NO: 26610 - DNA, 20 bp, Artificial Sequence
  Synthetic
ccgacaggtaagatgtggct

SEQ ID NO: 26611 - DNA, 16 bp, Artificial Sequence
  Synthetic
tcctccgggttcctgc

SEQ ID NO: 26612 - DNA, 19 bp, Artificial Sequence
  Synthetic
gcagcacacgcaactagtc

SEQ ID NO: 26613 - DNA, 25 bp, Artificial Sequence
  Synthetic
caatgaaatggaagtctgaatacat

SEQ ID NO: 26614 - DNA, 23 bp, Artificial Sequence
  Synthetic
tcggattttatcttgttagcttt

SEQ ID NO: 26615 - DNA, 19 bp, Artificial Sequence
  Synthetic
aaggctggagaagttaggt

SEQ ID NO: 26616 - DNA, 19 bp, Artificial Sequence
  Synthetic
tgctatcgatctgagctct

SEQ ID NO: 26617 - DNA, 18 bp, Artificial Sequence
  Synthetic
catccatggctgcacaag

SEQ ID NO: 26618 - DNA, 21 bp, Artificial Sequence
  Synthetic
cctacttcaagaacacagtac

SEQ ID NO: 26619 - DNA, 18 bp, Artificial Sequence
  Synthetic
aaggttctgcacaccttc

SEQ ID NO: 26620 - DNA, 20 bp, Artificial Sequence
  Synthetic
gaatcagcctcccttcattg

SEQ ID NO: 26621 - DNA, 20 bp, Artificial Sequence
  Synthetic
atgccatatcatcagatggg

SEQ ID NO: 26622 - DNA, 18 bp, Artificial Sequence
  Synthetic
gtgctgctgtttggaatt

SEQ ID NO: 26623 - DNA, 25 bp, Artificial Sequence
  Synthetic
ttcttatagcccaatatctacttct

SEQ ID NO: 26624 - DNA, 18 bp, Artificial Sequence
  Synthetic
gaggctcagagttcactc

SEQ ID NO: 26625 - DNA, 21 bp, Artificial Sequence
  Synthetic
tcgtaaagagacggaacataa

SEQ ID NO: 26626 - DNA, 18 bp, Artificial Sequence
  Synthetic
gttccctatcagcggcag

SEQ ID NO: 26627 - DNA, 19 bp, Artificial Sequence
  Synthetic
caggtgctcaaagtccatt

SEQ ID NO: 26628 - DNA, 20 bp, Artificial Sequence
  Synthetic
tcaccctatttaccaccttg

SEQ ID NO: 26629 - DNA, 20 bp, Artificial Sequence
  Synthetic
tttacttctccaccaccgca

SEQ ID NO: 26630 - DNA, 21 bp, Artificial Sequence
  Synthetic
tgcattcgacatctaaaagca

SEQ ID NO: 26631 - DNA, 20 bp, Artificial Sequence
  Synthetic
caaaacgtcgcatagtttga

SEQ ID NO: 26632 - DNA, 18 bp, Artificial Sequence
  Synthetic
tagcacaatgggacgaag

SEQ ID NO: 26633 - DNA, 20 bp, Artificial Sequence
  Synthetic
agcattcgaagccaagtgat

SEQ ID NO: 26634 - DNA, 19 bp, Artificial Sequence
  Synthetic
cactaacccggaacatgaa

SEQ ID NO: 26635 - DNA, 19 bp, Artificial Sequence
  Synthetic
tttccatgcctttccttct

SEQ ID NO: 26636 - DNA, 19 bp, Artificial Sequence
  Synthetic
cgcgtccgacaaatgatga

SEQ ID NO: 26637 - DNA, 20 bp, Artificial Sequence
  Synthetic
ggacaaaaccctcgtccatt

SEQ ID NO: 26638 - DNA, 19 bp, Artificial Sequence
  Synthetic
agttattgtggcgcagatg

SEQ ID NO: 26639 - DNA, 18 bp, Artificial Sequence
  Synthetic
aacgatcggtacccttcc

SEQ ID NO: 26640 - DNA, 22 bp, Artificial Sequence
  Synthetic
tgatcaaatggaagaaagccta

SEQ ID NO: 26641 - DNA, 20 bp, Artificial Sequence
  Synthetic
cggtgaagtagttaccagcg

SEQ ID NO: 26642 - DNA, 19 bp, Artificial Sequence
  Synthetic
gcgccttcacatgagctat

SEQ ID NO: 26643 - DNA, 19 bp, Artificial Sequence
  Synthetic
ttaagaaaggctgcacaag

SEQ ID NO: 26644 - DNA, 24 bp, Artificial Sequence
  Synthetic
gagttgtatatagtaggacacaat

SEQ ID NO: 26645 - DNA, 20 bp, Artificial Sequence
  Synthetic
tcttgtcaaacatgccttac

SEQ ID NO: 26646 - DNA, 18 bp, Artificial Sequence
  Synthetic
ctgctttctggtgcgagg

SEQ ID NO: 26647 - DNA, 20 bp, Artificial Sequence
  Synthetic
gcggacatgcttttctctct

SEQ ID NO: 26648 - DNA, 16 bp, Artificial Sequence
  Synthetic
tcccctgccagagcgt

SEQ ID NO: 26649 - DNA, 21 bp, Artificial Sequence
  Synthetic
ggaacgaaattggactaaacg

SEQ ID NO: 26650 - DNA, 19 bp, Artificial Sequence
  Synthetic
gcaacgcctcatttcccat

SEQ ID NO: 26651 - DNA, 18 bp, Artificial Sequence
  Synthetic
gcctgcgaattcaacaag

SEQ ID NO: 26652 - DNA, 19 bp, Artificial Sequence
  Synthetic
acacagaaactgtacagcc

SEQ ID NO: 26653 - DNA, 20 bp, Artificial Sequence
  Synthetic
cgtggcaactattgaacgct

SEQ ID NO: 26654 - DNA, 20 bp, Artificial Sequence
  Synthetic
aagactcctctccgtgtctg

SEQ ID NO: 26655 - DNA, 15 bp, Artificial Sequence
  Synthetic
aaatccgcggcgcag

SEQ ID NO: 26656 - DNA, 23 bp, Artificial Sequence
  Synthetic
cattgtctctactatgttgaact

SEQ ID NO: 26657 - DNA, 16 bp, Artificial Sequence
  Synthetic
gccggtcgctgcatct

SEQ ID NO: 26658 - DNA, 18 bp, Artificial Sequence
  Synthetic
ctgttatagcgtgccacg

SEQ ID NO: 26659 - DNA, 24 bp, Artificial Sequence
  Synthetic
cttgcaaatttttaaaagcctgag

SEQ ID NO: 26660 - DNA, 20 bp, Artificial Sequence
  Synthetic
gactgtccgtaacatcatcc

SEQ ID NO: 26661 - DNA, 20 bp, Artificial Sequence
  Synthetic
agcaaatgggtttcctgacc

SEQ ID NO: 26662 - DNA, 18 bp, Artificial Sequence
  Synthetic
atggtttggccttcgttg

SEQ ID NO: 26663 - DNA, 18 bp, Artificial Sequence
  Synthetic
aaaatcaaccccgcaacc

SEQ ID NO: 26664 - DNA, 18 bp, Artificial Sequence
  Synthetic
gtccatgaccgaactcct

SEQ ID NO: 26665 - DNA, 18 bp, Artificial Sequence
  Synthetic
cgtctacagtggtgcgac

SEQ ID NO: 26666 - DNA, 19 bp, Artificial Sequence
  Synthetic
tcgcgcacccagtatacat

SEQ ID NO: 26667 - DNA, 20 bp, Artificial Sequence
  Synthetic
ccgggagaaaaaaccactgt

SEQ ID NO: 26668 - DNA, 24 bp, Artificial Sequence
  Synthetic
cttttttatcggacgtacttttac

SEQ ID NO: 26669 - DNA, 20 bp, Artificial Sequence
  Synthetic
ttgtacaacgcgacgtactg

SEQ ID NO: 26670 - DNA, 20 bp, Artificial Sequence
  Synthetic
ggttctgttgtgtgcgttac

SEQ ID NO: 26671 - DNA, 18 bp, Artificial Sequence
  Synthetic
actccgaggcatcctgac

SEQ ID NO: 26672 - DNA, 20 bp, Artificial Sequence
  Synthetic
ttgtgaagcattaggagcgc

SEQ ID NO: 26673 - DNA, 20 bp, Artificial Sequence
  Synthetic
gcttaaacacaagatgcgtg

SEQ ID NO: 26674 - DNA, 19 bp, Artificial Sequence
  Synthetic
cctactgcgctaagaggaa

SEQ ID NO: 26675 - DNA, 22 bp, Artificial Sequence
  Synthetic
cgatattgacataggtatccac

SEQ ID NO: 26676 - DNA, 19 bp, Artificial Sequence
  Synthetic
tgtgccatgggaaaaaagt

SEQ ID NO: 26677 - DNA, 20 bp, Artificial Sequence
  Synthetic
ttcatttggggttagcaaac

SEQ ID NO: 26678 - DNA, 19 bp, Artificial Sequence
  Synthetic
cacagctgtttggcctata

SEQ ID NO: 26679 - DNA, 18 bp, Artificial Sequence
  Synthetic
gtgtacgcccccagtttc

SEQ ID NO: 26680 - DNA, 20 bp, Artificial Sequence
  Synthetic
cctgaggactttgtagcata

SEQ ID NO: 26681 - DNA, 20 bp, Artificial Sequence
  Synthetic
ggccctaattgcgacttcaa

SEQ ID NO: 26682 - DNA, 22 bp, Artificial Sequence
  Synthetic
ggaataattctttctccggaaa

SEQ ID NO: 26683 - DNA, 18 bp, Artificial Sequence
  Synthetic
tcaggagctcatgggacg

SEQ ID NO: 26684 - DNA, 18 bp, Artificial Sequence
  Synthetic
aaatggaaaccaggcagg

SEQ ID NO: 26685 - DNA, 20 bp, Artificial Sequence
  Synthetic
tgctttgtcgctgtagatgt

SEQ ID NO: 26686 - DNA, 25 bp, Artificial Sequence
  Synthetic
gacctaaaccttcaaaaattttagg

SEQ ID NO: 26687 - DNA, 20 bp, Artificial Sequence
  Synthetic
cgctgttgtagttcgttgga

SEQ ID NO: 26688 - DNA, 18 bp, Artificial Sequence
  Synthetic
tgtccgttcgtcaaaacc

SEQ ID NO: 26689 - DNA, 18 bp, Artificial Sequence
  Synthetic
ggttcaaatttgcgcagg

SEQ ID NO: 26690 - DNA, 19 bp, Artificial Sequence
  Synthetic
ctgcctgactctcccaaga

SEQ ID NO: 26691 - DNA, 20 bp, Artificial Sequence
  Synthetic
gaatcgccactccatcatgg

SEQ ID NO: 26692 - DNA, 23 bp, Artificial Sequence
  Synthetic
agtatttattgaacagagcttct

SEQ ID NO: 26693 - DNA, 20 bp, Artificial Sequence
  Synthetic
cgaggcaaaagtacagtggt

SEQ ID NO: 26694 - DNA, 18 bp, Artificial Sequence
  Synthetic
cttcttcaggcggtacag

SEQ ID NO: 26695 - DNA, 18 bp, Artificial Sequence
  Synthetic
gaaggagaaactgcctcg

SEQ ID NO: 26696 - DNA, 19 bp, Artificial Sequence
  Synthetic
agggttacattatggccag

SEQ ID NO: 26697 - DNA, 23 bp, Artificial Sequence
  Synthetic
agcttttagtaatacctgaaaca

SEQ ID NO: 26698 - DNA, 18 bp, Artificial Sequence
  Synthetic
atcaaggtcactgactgc

SEQ ID NO: 26699 - DNA, 18 bp, Artificial Sequence
  Synthetic
aacaacagaaggaggacg

SEQ ID NO: 26700 - DNA, 18 bp, Artificial Sequence
  Synthetic
aataggtaccgagcccac

SEQ ID NO: 26701 - DNA, 18 bp, Artificial Sequence
  Synthetic
catactgggttctgctgc

SEQ ID NO: 26702 - DNA, 20 bp, Artificial Sequence
  Synthetic
tcttgtgttaagtgtgaggg

SEQ ID NO: 26703 - DNA, 20 bp, Artificial Sequence
  Synthetic
gacaaggctaaggaaccgtt

SEQ ID NO: 26704 - DNA, 21 bp, Artificial Sequence
  Synthetic
agttgttaagttccagtttgt

SEQ ID NO: 26705 - DNA, 23 bp, Artificial Sequence
  Synthetic
taacagtattggtagacactgat

SEQ ID NO: 26706 - DNA, 18 bp, Artificial Sequence
  Synthetic
tacaaagggggaaaggga

SEQ ID NO: 26707 - DNA, 23 bp, Artificial Sequence
  Synthetic
taattatgcatcatcgagcaatt

SEQ ID NO: 26708 - DNA, 18 bp, Artificial Sequence
  Synthetic
tacatggtcatgagcggt

SEQ ID NO: 26709 - DNA, 18 bp, Artificial Sequence
  Synthetic
cagacggtatcgctacag

SEQ ID NO: 26710 - DNA, 23 bp, Artificial Sequence
  Synthetic
ttgaacatttggaaaatcgctta

SEQ ID NO: 26711 - DNA, 21 bp, Artificial Sequence
  Synthetic
ttgtgcaagttgtatgttctg

SEQ ID NO: 26712 - DNA, 18 bp, Artificial Sequence
  Synthetic
cgtgttttgcgatgttcg

SEQ ID NO: 26713 - DNA, 19 bp, Artificial Sequence
  Synthetic
tctggtaaggcattatggc

SEQ ID NO: 26714 - DNA, 20 bp, Artificial Sequence
  Synthetic
acatctagcctcatctgcca

SEQ ID NO: 26715 - DNA, 19 bp, Artificial Sequence
  Synthetic
cacagcgtcttgggttgtt

SEQ ID NO: 26716 - DNA, 20 bp, Artificial Sequence
  Synthetic
atgggtgtgctcatagctca

SEQ ID NO: 26717 - DNA, 18 bp, Artificial Sequence
  Synthetic
tggtggggtgaaatcctg

SEQ ID NO: 26718 - DNA, 18 bp, Artificial Sequence
  Synthetic
ccattatagcccctgtgg

SEQ ID NO: 26719 - DNA, 23 bp, Artificial Sequence
  Synthetic
tcaaatctaacataggtgaacaa

SEQ ID NO: 26720 - DNA, 22 bp, Artificial Sequence
  Synthetic
tgttaaggaaatgttttggctc

SEQ ID NO: 26721 - DNA, 21 bp, Artificial Sequence
  Synthetic
tgagctgtagtttctcaagtc

SEQ ID NO: 26722 - DNA, 18 bp, Artificial Sequence
  Synthetic
taatgtgtccgacttgcg

SEQ ID NO: 26723 - DNA, 20 bp, Artificial Sequence
  Synthetic
ctctgcccttatcttcaaga

SEQ ID NO: 26724 - DNA, 20 bp, Artificial Sequence
  Synthetic
catccctctttctcacagaa

SEQ ID NO: 26725 - DNA, 22 bp, Artificial Sequence
  Synthetic
ggtagtctggtatgaatcttct

SEQ ID NO: 26726 - DNA, 19 bp, Artificial Sequence
  Synthetic
cttggacaaaacagctgtt

SEQ ID NO: 26727 - DNA, 20 bp, Artificial Sequence
  Synthetic
atcacaccctatagctgaac

SEQ ID NO: 26728 - DNA, 21 bp, Artificial Sequence
  Synthetic
gcattatcccagttgactttc

SEQ ID NO: 26729 - DNA, 21 bp, Artificial Sequence
  Synthetic
agatcgacagtatgagaacaa

SEQ ID NO: 26730 - DNA, 23 bp, Artificial Sequence
  Synthetic
gcagcatacaatgtaattcttac

SEQ ID NO: 26731 - DNA, 23 bp, Artificial Sequence
  Synthetic
gttagaaatgtttgaatcgtcat

SEQ ID NO: 26732 - DNA, 22 bp, Artificial Sequence
  Synthetic
gaattttcagcttcatcttcga

SEQ ID NO: 26733 - DNA, 20 bp, Artificial Sequence
  Synthetic
gttgctgcttgatgacttac

SEQ ID NO: 26734 - DNA, 25 bp, Artificial Sequence
  Synthetic
gcattttcttttctgatattttccc

SEQ ID NO: 26735 - DNA, 18 bp, Artificial Sequence
  Synthetic
gtcgaaggaggaggagta

SEQ ID NO: 26736 - DNA, 19 bp, Artificial Sequence
  Synthetic
ttcggtctctcctcctcct

SEQ ID NO: 26737 - DNA, 22 bp, Artificial Sequence
  Synthetic
gtcagtgctatcaaatgcaata

SEQ ID NO: 26738 - DNA, 20 bp, Artificial Sequence
  Synthetic
ggattatacccagttgaccc

SEQ ID NO: 26739 - DNA, 24 bp, Artificial Sequence
  Synthetic
ctcttgtatctccactatctactg

SEQ ID NO: 26740 - DNA, 24 bp, Artificial Sequence
  Synthetic
acaaatacattcagatcagatgac

SEQ ID NO: 26741 - DNA, 18 bp, Artificial Sequence
  Synthetic
gcatcaaaggcgggattt

SEQ ID NO: 26742 - DNA, 24 bp, Artificial Sequence
  Synthetic
gataattcaatagcatcagcagta

SEQ ID NO: 26743 - DNA, 20 bp, Artificial Sequence
  Synthetic
gtagtacctataccaagcgg

SEQ ID NO: 26744 - DNA, 18 bp, Artificial Sequence
  Synthetic
tggtagagcatctcccat

SEQ ID NO: 26745 - DNA, 21 bp, Artificial Sequence
  Synthetic
tcaacaacccaaaaagacaaa

SEQ ID NO: 26746 - DNA, 23 bp, Artificial Sequence
  Synthetic
ggaaatttgaagaggatatgtcc

SEQ ID NO: 26747 - DNA, 16 bp, Artificial Sequence
  Synthetic
actgctgccgtgcgac

SEQ ID NO: 26748 - DNA, 21 bp, Artificial Sequence
  Synthetic
cttactgaacgacatcgaaat

SEQ ID NO: 26749 - DNA, 20 bp, Artificial Sequence
  Synthetic
actacattaacggtctccat

SEQ ID NO: 26750 - DNA, 16 bp, Artificial Sequence
  Synthetic
cgtcgcgcgaattcgg

SEQ ID NO: 26751 - DNA, 24 bp, Artificial Sequence
  Synthetic
gttcttgagtagtcatatgttctt

SEQ ID NO: 26752 - DNA, 19 bp, Artificial Sequence
  Synthetic
gtcttccttccgtaagtct

SEQ ID NO: 26753 - DNA, 20 bp, Artificial Sequence
  Synthetic
tgttggcattcattccattt

SEQ ID NO: 26754 - DNA, 21 bp, Artificial Sequence
  Synthetic
tcgctctaaattcttggagac

SEQ ID NO: 26755 - DNA, 19 bp, Artificial Sequence
  Synthetic
tttcttctatggcctctcc

SEQ ID NO: 26756 - DNA, 22 bp, Artificial Sequence
  Synthetic
gcaaaacacacaattaatttgc

SEQ ID NO: 26757 - DNA, 19 bp, Artificial Sequence
  Synthetic
tttctacttcacacagcgg

SEQ ID NO: 26758 - DNA, 22 bp, Artificial Sequence
  Synthetic
ggtcactatttggaaatgttgt

SEQ ID NO: 26759 - DNA, 19 bp, Artificial Sequence
  Synthetic
ccatgtcatacccactgtc

SEQ ID NO: 26760 - DNA, 18 bp, Artificial Sequence
  Synthetic
tggtttgaaacagccgtc

SEQ ID NO: 26761 - DNA, 18 bp, Artificial Sequence
  Synthetic
taccaagtaatgctgccc

SEQ ID NO: 26762 - DNA, 25 bp, Artificial Sequence
  Synthetic
gcatattgctatttaaaaatgctcg

SEQ ID NO: 26763 - DNA, 25 bp, Artificial Sequence
  Synthetic
cagtactgttttcttcataaagttc

SEQ ID NO: 26764 - DNA, 18 bp, Artificial Sequence
  Synthetic
ttctacagttttgccccg

SEQ ID NO: 26765 - DNA, 23 bp, Artificial Sequence
  Synthetic
actttaaacaattggattcacct

SEQ ID NO: 26766 - DNA, 23 bp, Artificial Sequence
  Synthetic
atgtacagttgtattacaccaat

SEQ ID NO: 26767 - DNA, 20 bp, Artificial Sequence
  Synthetic
catcattgctgtgtggtaac

SEQ ID NO: 26768 - DNA, 21 bp, Artificial Sequence
  Synthetic
tccccttcatatacagggtta

SEQ ID NO: 26769 - DNA, 19 bp, Artificial Sequence
  Synthetic
aaacagggcctgtaggtaa

SEQ ID NO: 26770 - DNA, 19 bp, Artificial Sequence
  Synthetic
cagttttgttagcccgttt

SEQ ID NO: 26771 - DNA, 20 bp, Artificial Sequence
  Synthetic
acatttgttccttccgtaga

SEQ ID NO: 26772 - DNA, 18 bp, Artificial Sequence
  Synthetic
atgttggtactgcgtgtg

SEQ ID NO: 26773 - DNA, 23 bp, Artificial Sequence
  Synthetic
aacagtaagagcaaaaaaatgtg

SEQ ID NO: 26774 - DNA, 16 bp, Artificial Sequence
  Synthetic
aggcctttcgcgaccc

SEQ ID NO: 26775 - DNA, 19 bp, Artificial Sequence
  Synthetic
tcttccacgaggttgcgac

SEQ ID NO: 26776 - DNA, 20 bp, Artificial Sequence
  Synthetic
cgaaagaagtgccaagagga

SEQ ID NO: 26777 - DNA, 20 bp, Artificial Sequence
  Synthetic
ccccaccatcaaatccacat

SEQ ID NO: 26778 - DNA, 20 bp, Artificial Sequence
  Synthetic
caacccctgcaaagaggaat

SEQ ID NO: 26779 - DNA, 16 bp, Artificial Sequence
  Synthetic
atcccgcatggccgag

SEQ ID NO: 26780 - DNA, 18 bp, Artificial Sequence
  Synthetic
cctgaagcaatcggtggg

SEQ ID NO: 26781 - DNA, 18 bp, Artificial Sequence
  Synthetic
atcaagccggtggagagg

SEQ ID NO: 26782 - DNA, 16 bp, Artificial Sequence
  Synthetic
gacaacgatggcgccg

SEQ ID NO: 26783 - DNA, 20 bp, Artificial Sequence
  Synthetic
gccctaagatggccagaaga

SEQ ID NO: 26784 - DNA, 20 bp, Artificial Sequence
  Synthetic
gtctccacccctttgatgtt

SEQ ID NO: 26785 - DNA, 19 bp, Artificial Sequence
  Synthetic
gattgacaggtcccttcgg

SEQ ID NO: 26786 - DNA, 16 bp, Artificial Sequence
  Synthetic
ggtgcgtgtaggtgcg

SEQ ID NO: 26787 - DNA, 18 bp, Artificial Sequence
  Synthetic
atgtcgtatgcccctccg

SEQ ID NO: 26788 - DNA, 20 bp, Artificial Sequence
  Synthetic
ctctgtagtaggctacggca

SEQ ID NO: 26789 - DNA, 20 bp, Artificial Sequence
  Synthetic
gcagtgtcaaacatgcctga

SEQ ID NO: 26790 - DNA, 18 bp, Artificial Sequence
  Synthetic
tctgtagaggaggggcgt

SEQ ID NO: 26791 - DNA, 20 bp, Artificial Sequence
  Synthetic
cctaaggccttctgcttgaa

SEQ ID NO: 26792 - DNA, 18 bp, Artificial Sequence
  Synthetic
ttttgccaaggcccacac

SEQ ID NO: 26793 - DNA, 17 bp, Artificial Sequence
  Synthetic
acacgtgattgcctcgc

SEQ ID NO: 26794 - DNA, 18 bp, Artificial Sequence
  Synthetic
acctgccagatctgctcc

SEQ ID NO: 26795 - DNA, 20 bp, Artificial Sequence
  Synthetic
ttgtgatcccactacgaacg

SEQ ID NO: 26796 - DNA, 20 bp, Artificial Sequence
  Synthetic
agacccccacaagaggttag

SEQ ID NO: 26797 - DNA, 20 bp, Artificial Sequence
  Synthetic
gccaaagcggtagaaacaac

SEQ ID NO: 26798 - DNA, 20 bp, Artificial Sequence
  Synthetic
tgaattgctcagggggctaa

SEQ ID NO: 26799 - DNA, 20 bp, Artificial Sequence
  Synthetic
tggccatgattgttgttgga

SEQ ID NO: 26800 - DNA, 18 bp, Artificial Sequence
  Synthetic
atgactttgcgggcttcg

SEQ ID NO: 26801 - DNA, 16 bp, Artificial Sequence
  Synthetic
agcgtcacctggggga

SEQ ID NO: 26802 - DNA, 18 bp, Artificial Sequence
  Synthetic
ggtcgggcatgagacatg

SEQ ID NO: 26803 - DNA, 21 bp, Artificial Sequence
  Synthetic
ttgattttcgtgagatccact

SEQ ID NO: 26804 - DNA, 19 bp, Artificial Sequence
  Synthetic
cataacacacaacagcgtt

SEQ ID NO: 26805 - DNA, 22 bp, Artificial Sequence
  Synthetic
tactgtgtaacctgatcttcct

SEQ ID NO: 26806 - DNA, 20 bp, Artificial Sequence
  Synthetic
gtgatccagaccaatgtgta

SEQ ID NO: 26807 - DNA, 25 bp, Artificial Sequence
  Synthetic
gaagtataagagaagtttgatacca

SEQ ID NO: 26808 - DNA, 20 bp, Artificial Sequence
  Synthetic
gggactttttgtgtgtgttt

SEQ ID NO: 26809 - DNA, 22 bp, Artificial Sequence
  Synthetic
taaggcacactaaaccttgatg

SEQ ID NO: 26810 - DNA, 23 bp, Artificial Sequence
  Synthetic
cctttcctcttcttaattactgg

SEQ ID NO: 26811 - DNA, 20 bp, Artificial Sequence
  Synthetic
acttgggtaataagggcttc

SEQ ID NO: 26812 - DNA, 18 bp, Artificial Sequence
  Synthetic
agtgaacccgacaccaaa

SEQ ID NO: 26813 - DNA, 20 bp, Artificial Sequence
  Synthetic
actttctgaaccatccatca

SEQ ID NO: 26814 - DNA, 20 bp, Artificial Sequence
  Synthetic
catcaaagtgcttgggatct

SEQ ID NO: 26815 - DNA, 23 bp, Artificial Sequence
  Synthetic
tgcaaacatatatctaggtcaaa

SEQ ID NO: 26816 - DNA, 21 bp, Artificial Sequence
  Synthetic
accaaagatcttaccagtagc

SEQ ID NO: 26817 - DNA, 25 bp, Artificial Sequence
  Synthetic
cccttgtacttagagaataatgatt

SEQ ID NO: 26818 - DNA, 19 bp, Artificial Sequence
  Synthetic
cacatcaggatcacaaccc

SEQ ID NO: 26819 - DNA, 23 bp, Artificial Sequence
  Synthetic
atgtatatctttcatgggcataa

SEQ ID NO: 26820 - DNA, 20 bp, Artificial Sequence
  Synthetic
tcgaccgaaatccacgaaag

SEQ ID NO: 26821 - DNA, 19 bp, Artificial Sequence
  Synthetic
gcataaaagcgctcgtggt

SEQ ID NO: 26822 - DNA, 19 bp, Artificial Sequence
  Synthetic
atcgtcaagcactgcgtac

SEQ ID NO: 26823 - DNA, 18 bp, Artificial Sequence
  Synthetic
cactgccaagctggacac

SEQ ID NO: 26824 - DNA, 18 bp, Artificial Sequence
  Synthetic
gaacgcctgcagatcgac

SEQ ID NO: 26825 - DNA, 21 bp, Artificial Sequence
  Synthetic
gcttcaaattttgcactaagc

SEQ ID NO: 26826 - DNA, 18 bp, Artificial Sequence
  Synthetic
gtcacgaaaaagcagtcg

SEQ ID NO: 26827 - DNA, 18 bp, Artificial Sequence
  Synthetic
ttaaggagctctgcgtcc

SEQ ID NO: 26828 - DNA, 25 bp, Artificial Sequence
  Synthetic
gagtcttctgttaattgattgtcat

SEQ ID NO: 26829 - DNA, 19 bp, Artificial Sequence
  Synthetic
tccatctaatgcatttcgc

SEQ ID NO: 26830 - DNA, 18 bp, Artificial Sequence
  Synthetic
agtgcttgcctcctcctg

SEQ ID NO: 26831 - DNA, 18 bp, Artificial Sequence
  Synthetic
taatggattagcaggccc

SEQ ID NO: 26832 - DNA, 18 bp, Artificial Sequence
  Synthetic
atcaccaccttggacaca

SEQ ID NO: 26833 - DNA, 19 bp, Artificial Sequence
  Synthetic
gcaacaggaaggacgtctg

SEQ ID NO: 26834 - DNA, 20 bp, Artificial Sequence
  Synthetic
tctgatataaatctcgcgcc

SEQ ID NO: 26835 - DNA, 18 bp, Artificial Sequence
  Synthetic
taagcggcttacacgaat

SEQ ID NO: 26836 - DNA, 21 bp, Artificial Sequence
  Synthetic
cacatggtttagctaaatccc

SEQ ID NO: 26837 - DNA, 24 bp, Artificial Sequence
  Synthetic
tactccatctttacaaaacatgtg

SEQ ID NO: 26838 - DNA, 18 bp, Artificial Sequence
  Synthetic
aagttcgtttccccatgc

SEQ ID NO: 26839 - DNA, 22 bp, Artificial Sequence
  Synthetic
ggagtactggatgtataggtat

SEQ ID NO: 26840 - DNA, 21 bp, Artificial Sequence
  Synthetic
acaaagtaaagtgtgccaaat

SEQ ID NO: 26841 - DNA, 19 bp, Artificial Sequence
  Synthetic
gctggatgggatggttcca

SEQ ID NO: 26842 - DNA, 18 bp, Artificial Sequence
  Synthetic
gcagtaagtgcggtcagc

SEQ ID NO: 26843 - DNA, 16 bp, Artificial Sequence
  Synthetic
accacaacgcgcctgc

SEQ ID NO: 26844 - DNA, 20 bp, Artificial Sequence
  Synthetic
tggaaatagggagggggtac

SEQ ID NO: 26845 - DNA, 18 bp, Artificial Sequence
  Synthetic
cttctgagcatgctcccg

SEQ ID NO: 26846 - DNA, 20 bp, Artificial Sequence
  Synthetic
ggttgtaggaaacaggtgca

SEQ ID NO: 26847 - DNA, 18 bp, Artificial Sequence
  Synthetic
tttactgtggcggtcagc

SEQ ID NO: 26848 - DNA, 16 bp, Artificial Sequence
  Synthetic
cgggggcaaaaaccgc

SEQ ID NO: 26849 - DNA, 20 bp, Artificial Sequence
  Synthetic
tggtcaacattagacgcgtt

SEQ ID NO: 26850 - DNA, 18 bp, Artificial Sequence
  Synthetic
gcacctggtatatgccgg

SEQ ID NO: 26851 - DNA, 16 bp, Artificial Sequence
  Synthetic
actgcacaacgccggg

SEQ ID NO: 26852 - DNA, 16 bp, Artificial Sequence
  Synthetic
aaggtggacggtggcg

SEQ ID NO: 26853 - DNA, 17 bp, Artificial Sequence
  Synthetic
gttggcggccttagctg

SEQ ID NO: 26854 - DNA, 18 bp, Artificial Sequence
  Synthetic
attggcgtcaggattgcc

SEQ ID NO: 26855 - DNA, 18 bp, Artificial Sequence
  Synthetic
gtctcccccgtggtgaat

SEQ ID NO: 26856 - DNA, 20 bp, Artificial Sequence
  Synthetic
catccacacacatctgagct

SEQ ID NO: 26857 - DNA, 16 bp, Artificial Sequence
  Synthetic
agcgaccgcggttagc

SEQ ID NO: 26858 - DNA, 17 bp, Artificial Sequence
  Synthetic
tggtgagctcggcagtc

SEQ ID NO: 26859 - DNA, 19 bp, Artificial Sequence
  Synthetic
tgtgaccttggtccagtcg

SEQ ID NO: 26860 - DNA, 19 bp, Artificial Sequence
  Synthetic
tcctcaagcaatgctagcg

SEQ ID NO: 26861 - DNA, 21 bp, Artificial Sequence
  Synthetic
ttaaaaaatccgttggtcgtc

SEQ ID NO: 26862 - DNA, 23 bp, Artificial Sequence
  Synthetic
caaacatctttgaattgtttcca

SEQ ID NO: 26863 - DNA, 20 bp, Artificial Sequence
  Synthetic
attgaagtttggtttacgcg

SEQ ID NO: 26864 - DNA, 19 bp, Artificial Sequence
  Synthetic
catacgaaactgtgcaagc

SEQ ID NO: 26865 - DNA, 22 bp, Artificial Sequence
  Synthetic
ggaatacgttcaattaaagctc

SEQ ID NO: 26866 - DNA, 19 bp, Artificial Sequence
  Synthetic
cgatgtacggcaaatcaat

SEQ ID NO: 26867 - DNA, 18 bp, Artificial Sequence
  Synthetic
taggccaacgttttccac

SEQ ID NO: 26868 - DNA, 18 bp, Artificial Sequence
  Synthetic
agtaaatttgggacgccg

SEQ ID NO: 26869 - DNA, 20 bp, Artificial Sequence
  Synthetic
aagccagtttttcattggtg

SEQ ID NO: 26870 - DNA, 21 bp, Artificial Sequence
  Synthetic
aaggctgttatcatctgatcg

SEQ ID NO: 26871 - DNA, 20 bp, Artificial Sequence
  Synthetic
agccctgaattaaaaaaggc

SEQ ID NO: 26872 - DNA, 20 bp, Artificial Sequence
  Synthetic
atgttacaaaatacgcacgc

SEQ ID NO: 26873 - DNA, 17 bp, Artificial Sequence
  Synthetic
tcggtggcgctgtatgc

SEQ ID NO: 26874 - DNA, 17 bp, Artificial Sequence
  Synthetic
acaccgtgtgtacccgc

SEQ ID NO: 26875 - DNA, 19 bp, Artificial Sequence
  Synthetic
gataattcccccggtgtcg

SEQ ID NO: 26876 - DNA, 16 bp, Artificial Sequence
  Synthetic
tcggacagcgttcccg

SEQ ID NO: 26877 - DNA, 22 bp, Artificial Sequence
  Synthetic
cagtatttgtctacagccttct

SEQ ID NO: 26878 - DNA, 18 bp, Artificial Sequence
  Synthetic
gcctgatgtaccatttgc

SEQ ID NO: 26879 - DNA, 21 bp, Artificial Sequence
  Synthetic
catcctatttgttcctgaagg

SEQ ID NO: 26880 - DNA, 19 bp, Artificial Sequence
  Synthetic
agccaaaactcttgcctta

SEQ ID NO: 26881 - DNA, 25 bp, Artificial Sequence
  Synthetic
tgtattgatagataactatgtctgg

SEQ ID NO: 26882 - DNA, 23 bp, Artificial Sequence
  Synthetic
aggagtttacataattgccttac

SEQ ID NO: 26883 - DNA, 18 bp, Artificial Sequence
  Synthetic
actcaggaatccaggtgg

SEQ ID NO: 26884 - DNA, 20 bp, Artificial Sequence
  Synthetic
ctgacatttatcacagctgg

SEQ ID NO: 26885 - DNA, 18 bp, Artificial Sequence
  Synthetic
attcctgcttgattcccg

SEQ ID NO: 26886 - DNA, 20 bp, Artificial Sequence
  Synthetic
aaatgccagtctctttctcc

SEQ ID NO: 26887 - DNA, 18 bp, Artificial Sequence
  Synthetic
ttctggggcttgttccat

SEQ ID NO: 26888 - DNA, 19 bp, Artificial Sequence
  Synthetic
tctgtcgagtaacgcctat

SEQ ID NO: 26889 - DNA, 18 bp, Artificial Sequence
  Synthetic
tacttcttgtgggttggg

SEQ ID NO: 26890 - DNA, 21 bp, Artificial Sequence
  Synthetic
tgtccgtgaaattgacagatc

SEQ ID NO: 26891 - DNA, 20 bp, Artificial Sequence
  Synthetic
cacttctccaattgtccctc

SEQ ID NO: 26892 - DNA, 20 bp, Artificial Sequence
  Synthetic
ggtatctttccacagccagg

SEQ ID NO: 26893 - DNA, 19 bp, Artificial Sequence
  Synthetic
ggaaaacccacctcctcct

SEQ ID NO: 26894 - DNA, 18 bp, Artificial Sequence
  Synthetic
tgcaggatctgagggctc

SEQ ID NO: 26895 - DNA, 20 bp, Artificial Sequence
  Synthetic
gcctcgaacatctccgtgtc

SEQ ID NO: 26896 - DNA, 17 bp, Artificial Sequence
  Synthetic
ccatggccatcaacgcc

SEQ ID NO: 26897 - DNA, 16 bp, Artificial Sequence
  Synthetic
agggcctttctggggc

SEQ ID NO: 26898 - DNA, 17 bp, Artificial Sequence
  Synthetic
ttaagcacctgggcccg

SEQ ID NO: 26899 - DNA, 16 bp, Artificial Sequence
  Synthetic
aacagccaggtcgcgg

SEQ ID NO: 26900 - DNA, 20 bp, Artificial Sequence
  Synthetic
aagttacatcaccaacccgg

SEQ ID NO: 26901 - DNA, 18 bp, Artificial Sequence
  Synthetic
cggcgtatctcatcaccg

SEQ ID NO: 26902 - DNA, 20 bp, Artificial Sequence
  Synthetic
ccgctagagtacgagatcga

SEQ ID NO: 26903 - DNA, 16 bp, Artificial Sequence
  Synthetic
aagggagacgcgtggc

SEQ ID NO: 26904 - DNA, 18 bp, Artificial Sequence
  Synthetic
gcaaaacagggccgagag

SEQ ID NO: 26905 - DNA, 18 bp, Artificial Sequence
  Synthetic
cctggcccatgatgcagg

SEQ ID NO: 26906 - DNA, 19 bp, Artificial Sequence
  Synthetic
cgaacctttagccccgagg

SEQ ID NO: 26907 - DNA, 20 bp, Artificial Sequence
  Synthetic
ggcggctttacgaccactac

SEQ ID NO: 26908 - DNA, 19 bp, Artificial Sequence
  Synthetic
catgaactacgggccggac

SEQ ID NO: 26909 - DNA, 17 bp, Artificial Sequence
  Synthetic
cgttgccaggttctgcc

SEQ ID NO: 26910 - DNA, 16 bp, Artificial Sequence
  Synthetic
cgaaacagccgcctgg

SEQ ID NO: 26911 - DNA, 18 bp, Artificial Sequence
  Synthetic
caccggagctctcggtaa

SEQ ID NO: 26912 - DNA, 20 bp, Artificial Sequence
  Synthetic
aaaagagtggtttgccgtgg

SEQ ID NO: 26913 - DNA, 18 bp, Artificial Sequence
  Synthetic
ccagaccctgcagctaca

SEQ ID NO: 26914 - DNA, 17 bp, Artificial Sequence
  Synthetic
ccgtagtctccgcgaga

SEQ ID NO: 26915 - DNA, 17 bp, Artificial Sequence
  Synthetic
accggggaaacaggcac

SEQ ID NO: 26916 - DNA, 16 bp, Artificial Sequence
  Synthetic
tcagcctcgcagaccc

SEQ ID NO: 26917 - DNA, 18 bp, Artificial Sequence
  Synthetic
gcttcatggagggcagcc

SEQ ID NO: 26918 - DNA, 19 bp, Artificial Sequence
  Synthetic
cggatctggtggccatagg

SEQ ID NO: 26919 - DNA, 16 bp, Artificial Sequence
  Synthetic
gttggtcgggttgccc

SEQ ID NO: 26920 - DNA, 16 bp, Artificial Sequence
  Synthetic
agccccggatcctcgt

SEQ ID NO: 26921 - DNA, 18 bp, Artificial Sequence
  Synthetic
gagggcgggttcatcctg

SEQ ID NO: 26922 - DNA, 16 bp, Artificial Sequence
  Synthetic
tcctggagtcggcgac

SEQ ID NO: 26923 - DNA, 16 bp, Artificial Sequence
  Synthetic
atcgcgatcgggggag

SEQ ID NO: 26924 - DNA, 16 bp, Artificial Sequence
  Synthetic
tccaatccggacgccc

SEQ ID NO: 26925 - DNA, 20 bp, Artificial Sequence
  Synthetic
gggctacgtgtacttcgagg

SEQ ID NO: 26926 - DNA, 16 bp, Artificial Sequence
  Synthetic
acagcttcgcccagcc

SEQ ID NO: 26927 - DNA, 18 bp, Artificial Sequence
  Synthetic
ctttcccaacggcaagcc

SEQ ID NO: 26928 - DNA, 18 bp, Artificial Sequence
  Synthetic
gtacgtatggcgctgagc

SEQ ID NO: 26929 - DNA, 17 bp, Artificial Sequence
  Synthetic
ggcaggtcacacatggc

SEQ ID NO: 26930 - DNA, 19 bp, Artificial Sequence
  Synthetic
gcaccatcgagctgtacaa

SEQ ID NO: 26931 - DNA, 16 bp, Artificial Sequence
  Synthetic
tgctccgccgtgatcg

SEQ ID NO: 26932 - DNA, 16 bp, Artificial Sequence
  Synthetic
tgcgaacggcgtcctc

SEQ ID NO: 26933 - DNA, 20 bp, Artificial Sequence
  Synthetic
ccaacaatctgtcgacagga

SEQ ID NO: 26934 - DNA, 16 bp, Artificial Sequence
  Synthetic
atacaggcgggcggac

SEQ ID NO: 26935 - DNA, 18 bp, Artificial Sequence
  Synthetic
ttccaggtacacgcacgc

SEQ ID NO: 26936 - DNA, 19 bp, Artificial Sequence
  Synthetic
gttcaggtcccggaactcg

SEQ ID NO: 26937 - DNA, 17 bp, Artificial Sequence
  Synthetic
tggggcacaccggaatc

SEQ ID NO: 26938 - DNA, 20 bp, Artificial Sequence
  Synthetic
cgacaggaaggcaaacagaa

SEQ ID NO: 26939 - DNA, 17 bp, Artificial Sequence
  Synthetic
tcgtgcaggtccccaac

SEQ ID NO: 26940 - DNA, 20 bp, Artificial Sequence
  Synthetic
tggaaaagaagacaaccggc

SEQ ID NO: 26941 - DNA, 16 bp, Artificial Sequence
  Synthetic
agacgctgcagcaggg

SEQ ID NO: 26942 - DNA, 19 bp, Artificial Sequence
  Synthetic
ctgccggggtaaaatccac

SEQ ID NO: 26943 - DNA, 17 bp, Artificial Sequence
  Synthetic
atacaacggctcggccc

SEQ ID NO: 26944 - DNA, 16 bp, Artificial Sequence
  Synthetic
cggtccaacagcaccg

SEQ ID NO: 26945 - DNA, 16 bp, Artificial Sequence
  Synthetic
tccgtcagggtctcgc

SEQ ID NO: 26946 - DNA, 18 bp, Artificial Sequence
  Synthetic
gcaggcggttgttatcgc

SEQ ID NO: 26947 - DNA, 19 bp, Artificial Sequence
  Synthetic
caaaagataggtcgccggg

SEQ ID NO: 26948 - DNA, 17 bp, Artificial Sequence
  Synthetic
gcccacgatgacgccaa

SEQ ID NO: 26949 - DNA, 16 bp, Artificial Sequence
  Synthetic
ataactccgcgcggcc

SEQ ID NO: 26950 - DNA, 16 bp, Artificial Sequence
  Synthetic
tagtggtcggcgtggg

SEQ ID NO: 26951 - DNA, 16 bp, Artificial Sequence
  Synthetic
cccaccacaacacggc

SEQ ID NO: 26952 - DNA, 16 bp, Artificial Sequence
  Synthetic
acggacgagatcgccc

SEQ ID NO: 26953 - DNA, 18 bp, Artificial Sequence
  Synthetic
gaacgcagctgtcttcgc

SEQ ID NO: 26954 - DNA, 17 bp, Artificial Sequence
  Synthetic
tgggtcgtgccatccga

SEQ ID NO: 26955 - DNA, 17 bp, Artificial Sequence
  Synthetic
aacacgcttcaccccgg

SEQ ID NO: 26956 - DNA, 19 bp, Artificial Sequence
  Synthetic
tgtacgtgtgctttcgggc

SEQ ID NO: 26957 - DNA, 18 bp, Artificial Sequence
  Synthetic
tcgcaggagccgtagtcc

SEQ ID NO: 26958 - DNA, 20 bp, Artificial Sequence
  Synthetic
cgagtcgaaatcccacacag

SEQ ID NO: 26959 - DNA, 18 bp, Artificial Sequence
  Synthetic
aaggtcgctgaggctctg

SEQ ID NO: 26960 - DNA, 21 bp, Artificial Sequence
  Synthetic
caatttcttgcaggtcaacac

SEQ ID NO: 26961 - DNA, 19 bp, Artificial Sequence
  Synthetic
gccattctgctcgacacag

SEQ ID NO: 26962 - DNA, 23 bp, Artificial Sequence
  Synthetic
gaacagtataatgccatcattgt

SEQ ID NO: 26963 - DNA, 18 bp, Artificial Sequence
  Synthetic
cagatcgttgtccagtgc

SEQ ID NO: 26964 - DNA, 21 bp, Artificial Sequence
  Synthetic
tgatacctcagaaaatgcaca

SEQ ID NO: 26965 - DNA, 18 bp, Artificial Sequence
  Synthetic
atgttttggtccgcgtac

SEQ ID NO: 26966 - DNA, 19 bp, Artificial Sequence
  Synthetic
acagactcgtggtcaatgt

SEQ ID NO: 26967 - DNA, 16 bp, Artificial Sequence
  Synthetic
ttaggggctggggcga

SEQ ID NO: 26968 - DNA, 18 bp, Artificial Sequence
  Synthetic
aacatcgggtggacaatc

SEQ ID NO: 26969 - DNA, 16 bp, Artificial Sequence
  Synthetic
acacggggtgccatgg

SEQ ID NO: 26970 - DNA, 20 bp, Artificial Sequence
  Synthetic
atcgctcctgtataggcaca

SEQ ID NO: 26971 - DNA, 20 bp, Artificial Sequence
  Synthetic
agcctacctgaacaccagag

SEQ ID NO: 26972 - DNA, 25 bp, Artificial Sequence
  Synthetic
gcagttaataaatctatttcctgca

SEQ ID NO: 26973 - DNA, 18 bp, Artificial Sequence
  Synthetic
gaccacctctttgccatc

SEQ ID NO: 26974 - DNA, 18 bp, Artificial Sequence
  Synthetic
agcagctgtgtttgctta

SEQ ID NO: 26975 - DNA, 21 bp, Artificial Sequence
  Synthetic
cacaatatctaatggggcatc

SEQ ID NO: 26976 - DNA, 20 bp, Artificial Sequence
  Synthetic
aaattctcaggggtaaggtc

SEQ ID NO: 26977 - DNA, 21 bp, Artificial Sequence
  Synthetic
gaaacaaaaacttcctgccaa

SEQ ID NO: 26978 - DNA, 19 bp, Artificial Sequence
  Synthetic
cgcctaaatccttgcgctt

SEQ ID NO: 26979 - DNA, 18 bp, Artificial Sequence
  Synthetic
aaaggccccaatacctcc

SEQ ID NO: 26980 - DNA, 22 bp, Artificial Sequence
  Synthetic
gatttgtagcttcatcttcctc

SEQ ID NO: 26981 - DNA, 25 bp, Artificial Sequence
  Synthetic
cttttctagcatagtataaagtcac

SEQ ID NO: 26982 - DNA, 20 bp, Artificial Sequence
  Synthetic
gcagcaggtgtaataggttt

SEQ ID NO: 26983 - DNA, 19 bp, Artificial Sequence
  Synthetic
aaaatctggatctggtgca

SEQ ID NO: 26984 - DNA, 23 bp, Artificial Sequence
  Synthetic
actttctgcaagattatccacta

SEQ ID NO: 26985 - DNA, 23 bp, Artificial Sequence
  Synthetic
ctaactttaggaacttctacagc

SEQ ID NO: 26986 - DNA, 19 bp, Artificial Sequence
  Synthetic
atcatgtgctacgtccatg

SEQ ID NO: 26987 - DNA, 18 bp, Artificial Sequence
  Synthetic
ctcaaactcaaaccgtgc

SEQ ID NO: 26988 - DNA, 20 bp, Artificial Sequence
  Synthetic
tgatatcacgcaaagtaggt

SEQ ID NO: 26989 - DNA, 18 bp, Artificial Sequence
  Synthetic
gatctgccatggcgatag

SEQ ID NO: 26990 - DNA, 19 bp, Artificial Sequence
  Synthetic
gtcttctgtaacctgctgg

SEQ ID NO: 26991 - DNA, 20 bp, Artificial Sequence
  Synthetic
actacaccgtaacagttcaa

SEQ ID NO: 26992 - DNA, 21 bp, Artificial Sequence
  Synthetic
catctgcagctaaagcataat

SEQ ID NO: 26993 - DNA, 18 bp, Artificial Sequence
  Synthetic
tcgaaacgctctgtcaga

SEQ ID NO: 26994 - DNA, 20 bp, Artificial Sequence
  Synthetic
gaggtttccgaagacgagga

SEQ ID NO: 26995 - DNA, 20 bp, Artificial Sequence
  Synthetic
agtttgcaggaccttgaaca

SEQ ID NO: 26996 - DNA, 18 bp, Artificial Sequence
  Synthetic
atcaggagggcatgtacc

SEQ ID NO: 26997 - DNA, 20 bp, Artificial Sequence
  Synthetic
tgtctagagggacaccaaat

SEQ ID NO: 26998 - DNA, 23 bp, Artificial Sequence
  Synthetic
aaggtgtaatttctaataaggct

SEQ ID NO: 26999 - DNA, 21 bp, Artificial Sequence
  Synthetic
ccataaagttctctgggtctt

SEQ ID NO: 27000 - DNA, 18 bp, Artificial Sequence
  Synthetic
cgtatatttccgctgggc

SEQ ID NO: 27001 - DNA, 20 bp, Artificial Sequence
  Synthetic
cttcacgaaacacatcatcc

SEQ ID NO: 27002 - DNA, 24 bp, Artificial Sequence
  Synthetic
cattctgcctattatcattaccag

SEQ ID NO: 27003 - DNA, 21 bp, Artificial Sequence
  Synthetic
ggccatttgcaagtttgatta

SEQ ID NO: 27004 - DNA, 20 bp, Artificial Sequence
  Synthetic
agctgacaacatgtatgagg

SEQ ID NO: 27005 - DNA, 18 bp, Artificial Sequence
  Synthetic
actcccggtacatgagtg

SEQ ID NO: 27006 - DNA, 18 bp, Artificial Sequence
  Synthetic
aatttgctgctcattgcc

SEQ ID NO: 27007 - DNA, 20 bp, Artificial Sequence
  Synthetic
tcctttctgctgaataaagc

SEQ ID NO: 27008 - DNA, 21 bp, Artificial Sequence
  Synthetic
ttgttatggccgttttctcat

SEQ ID NO: 27009 - DNA, 24 bp, Artificial Sequence
  Synthetic
ccacatcaattaaatcttgtcttg

SEQ ID NO: 27010 - DNA, 23 bp, Artificial Sequence
  Synthetic
ttttcaggtaaatcaagcaatga

SEQ ID NO: 27011 - DNA, 21 bp, Artificial Sequence
  Synthetic
cgcaactggtatctatttgga

SEQ ID NO: 27012 - DNA, 20 bp, Artificial Sequence
  Synthetic
ctgtcatcgaataagcgtct

SEQ ID NO: 27013 - DNA, 22 bp, Artificial Sequence
  Synthetic
tttagtatcttgcaatggttgt

SEQ ID NO: 27014 - DNA, 23 bp, Artificial Sequence
  Synthetic
ccaagtctattatagccactctt

SEQ ID NO: 27015 - DNA, 18 bp, Artificial Sequence
  Synthetic
atcccacctgcgaaggag

SEQ ID NO: 27016 - DNA, 18 bp, Artificial Sequence
  Synthetic
aatacctgttgtgccctc

SEQ ID NO: 27017 - DNA, 25 bp, Artificial Sequence
  Synthetic
caatttcacctgtaatattagcatc

SEQ ID NO: 27018 - DNA, 18 bp, Artificial Sequence
  Synthetic
aatctggatcaggagccg

SEQ ID NO: 27019 - DNA, 23 bp, Artificial Sequence
  Synthetic
ctactgtatgcccagataaaatt

SEQ ID NO: 27020 - DNA, 22 bp, Artificial Sequence
  Synthetic
tttcatagtagggatggtctac

SEQ ID NO: 27021 - DNA, 23 bp, Artificial Sequence
  Synthetic
gctttgttaaataaaggatgacc

SEQ ID NO: 27022 - DNA, 21 bp, Artificial Sequence
  Synthetic
agttcttaaaatttgctgccc

SEQ ID NO: 27023 - DNA, 20 bp, Artificial Sequence
  Synthetic
agcatttgtaggtggcaata

SEQ ID NO: 27024 - DNA, 22 bp, Artificial Sequence
  Synthetic
tcttgcaaatcaactaaccaaa

SEQ ID NO: 27025 - DNA, 19 bp, Artificial Sequence
  Synthetic
cgccaaaataccagagacg

SEQ ID NO: 27026 - DNA, 23 bp, Artificial Sequence
  Synthetic
caaattaacaggcaataccaaat

SEQ ID NO: 27027 - DNA, 19 bp, Artificial Sequence
  Synthetic
agacagatcacaggcaatt

SEQ ID NO: 27028 - DNA, 19 bp, Artificial Sequence
  Synthetic
aagtccccaatagctctgt

SEQ ID NO: 27029 - DNA, 23 bp, Artificial Sequence
  Synthetic
ccaaataaatctttgaatttgcc

SEQ ID NO: 27030 - DNA, 23 bp, Artificial Sequence
  Synthetic
acattaaatctattcctccaaca

SEQ ID NO: 27031 - DNA, 18 bp, Artificial Sequence
  Synthetic
aagggtatgacatcagcg

SEQ ID NO: 27032 - DNA, 21 bp, Artificial Sequence
  Synthetic
gtctggatttctggtttgaac

SEQ ID NO: 27033 - DNA, 23 bp, Artificial Sequence
  Synthetic
ctggattataaactttgggatct

SEQ ID NO: 27034 - DNA, 21 bp, Artificial Sequence
  Synthetic
tcccaatgttctcctattgtg

SEQ ID NO: 27035 - DNA, 23 bp, Artificial Sequence
  Synthetic
gcagattttttagaaactgaagt

SEQ ID NO: 27036 - DNA, 18 bp, Artificial Sequence
  Synthetic
aggttgtaaagcgtccag

SEQ ID NO: 27037 - DNA, 20 bp, Artificial Sequence
  Synthetic
atcttcccatgttctaggtg

SEQ ID NO: 27038 - DNA, 18 bp, Artificial Sequence
  Synthetic
tgtcaaagttgctccacg

SEQ ID NO: 27039 - DNA, 18 bp, Artificial Sequence
  Synthetic
aatagggatcgagctggg

SEQ ID NO: 27040 - DNA, 20 bp, Artificial Sequence
  Synthetic
catgcgagtcttcacaccat

SEQ ID NO: 27041 - DNA, 18 bp, Artificial Sequence
  Synthetic
tatggtggaattgcccag

SEQ ID NO: 27042 - DNA, 23 bp, Artificial Sequence
  Synthetic
ctatgaaatttggtagcattgca

SEQ ID NO: 27043 - DNA, 25 bp, Artificial Sequence
  Synthetic
gtcctcaaatttataaattggtgag

SEQ ID NO: 27044 - DNA, 21 bp, Artificial Sequence
  Synthetic
gtctgtcatctgtagtgagaa

SEQ ID NO: 27045 - DNA, 20 bp, Artificial Sequence
  Synthetic
tcctgtgtacatgagtgaaa

SEQ ID NO: 27046 - DNA, 23 bp, Artificial Sequence
  Synthetic
cccagcactagtataagtatcag

SEQ ID NO: 27047 - DNA, 25 bp, Artificial Sequence
  Synthetic
gacttgaaaggttaattttccaatc

SEQ ID NO: 27048 - DNA, 20 bp, Artificial Sequence
  Synthetic
aaaagggacactaaacctgg

SEQ ID NO: 27049 - DNA, 18 bp, Artificial Sequence
  Synthetic
tctggggtagttagtgcg

SEQ ID NO: 27050 - DNA, 18 bp, Artificial Sequence
  Synthetic
agtacgagctaccctcaa

SEQ ID NO: 27051 - DNA, 20 bp, Artificial Sequence
  Synthetic
tgctctccctaaactggtaa

SEQ ID NO: 27052 - DNA, 22 bp, Artificial Sequence
  Synthetic
ttgtgacatttgttctaaccac

SEQ ID NO: 27053 - DNA, 22 bp, Artificial Sequence
  Synthetic
aatgttttggatcaggaggtaa

SEQ ID NO: 27054 - DNA, 18 bp, Artificial Sequence
  Synthetic
tgtgctgtgcatgcaaat

SEQ ID NO: 27055 - DNA, 25 bp, Artificial Sequence
  Synthetic
ggatctactagtttgtatttgtctt

SEQ ID NO: 27056 - DNA, 19 bp, Artificial Sequence
  Synthetic
tttttcctgttgtgcacaa

SEQ ID NO: 27057 - DNA, 21 bp, Artificial Sequence
  Synthetic
gtctagggtcattgtcattga

SEQ ID NO: 27058 - DNA, 24 bp, Artificial Sequence
  Synthetic
gaaatctgaatacatgaagcatac

SEQ ID NO: 27059 - DNA, 19 bp, Artificial Sequence
  Synthetic
tgggtcctcaatgcttaat

SEQ ID NO: 27060 - DNA, 18 bp, Artificial Sequence
  Synthetic
tgatgtacacccccttca

SEQ ID NO: 27061 - DNA, 25 bp, Artificial Sequence
  Synthetic
cttagaagcatatctcctatctcaa

SEQ ID NO: 27062 - DNA, 18 bp, Artificial Sequence
  Synthetic
ttcctccactcctttggg

SEQ ID NO: 27063 - DNA, 20 bp, Artificial Sequence
  Synthetic
ccattatccttttgtctgcc

SEQ ID NO: 27064 - DNA, 18 bp, Artificial Sequence
  Synthetic
ctaagatctgcatggccc

SEQ ID NO: 27065 - DNA, 19 bp, Artificial Sequence
  Synthetic
cgatatacacgctgcttgt

SEQ ID NO: 27066 - DNA, 21 bp, Artificial Sequence
  Synthetic
gttcttctgttgggttttgtc

SEQ ID NO: 27067 - DNA, 19 bp, Artificial Sequence
  Synthetic
cccactcactatcagttgg

SEQ ID NO: 27068 - DNA, 20 bp, Artificial Sequence
  Synthetic
tgtcaggcaatattccgatc

SEQ ID NO: 27069 - DNA, 24 bp, Artificial Sequence
  Synthetic
attgatatgtgttaactagcactg

SEQ ID NO: 27070 - DNA, 19 bp, Artificial Sequence
  Synthetic
acaggagaattgcctctca

SEQ ID NO: 27071 - DNA, 23 bp, Artificial Sequence
  Synthetic
aattgttactctatcacctttca

SEQ ID NO: 27072 - DNA, 18 bp, Artificial Sequence
  Synthetic
actcctctgcacactgta

SEQ ID NO: 27073 - DNA, 19 bp, Artificial Sequence
  Synthetic
actattacatgcggcactt

SEQ ID NO: 27074 - DNA, 18 bp, Artificial Sequence
  Synthetic
cgctctgcgtctgtgctt

SEQ ID NO: 27075 - DNA, 24 bp, Artificial Sequence
  Synthetic
ccaacactttaatgtattctgagg

SEQ ID NO: 27076 - DNA, 18 bp, Artificial Sequence
  Synthetic
aattgcaggccttactgg

SEQ ID NO: 27077 - DNA, 23 bp, Artificial Sequence
  Synthetic
ttgtacttgaacatctatctgag

SEQ ID NO: 27078 - DNA, 19 bp, Artificial Sequence
  Synthetic
gaagataaagccgtccagt

SEQ ID NO: 27079 - DNA, 24 bp, Artificial Sequence
  Synthetic
gcaaatttattaggatcaggtaac

SEQ ID NO: 27080 - DNA, 23 bp, Artificial Sequence
  Synthetic
ataaaaagctgattttgtttggg

SEQ ID NO: 27081 - DNA, 18 bp, Artificial Sequence
  Synthetic
gtcgtcctggcaattccg

SEQ ID NO: 27082 - DNA, 16 bp, Artificial Sequence
  Synthetic
agatgggcgcgccttg

SEQ ID NO: 27083 - DNA, 19 bp, Artificial Sequence
  Synthetic
ccacatgtttgcggaaccc

SEQ ID NO: 27084 - DNA, 20 bp, Artificial Sequence
  Synthetic
accttcaaccaattgcctga

SEQ ID NO: 27085 - DNA, 19 bp, Artificial Sequence
  Synthetic
gcatagtgccagcagtagg

SEQ ID NO: 27086 - DNA, 18 bp, Artificial Sequence
  Synthetic
gggcacaggagctggtta

SEQ ID NO: 27087 - DNA, 20 bp, Artificial Sequence
  Synthetic
atgaggacgacatactccca

SEQ ID NO: 27088 - DNA, 15 bp, Artificial Sequence
  Synthetic
aggtgcatgcgggca

SEQ ID NO: 27089 - DNA, 19 bp, Artificial Sequence
  Synthetic
gtcccagcagcaccaagtc

SEQ ID NO: 27090 - DNA, 18 bp, Artificial Sequence
  Synthetic
aagtgacctagcccccag

SEQ ID NO: 27091 - DNA, 19 bp, Artificial Sequence
  Synthetic
ggcgaggagttgtcggtaa

SEQ ID NO: 27092 - DNA, 17 bp, Artificial Sequence
  Synthetic
cgtagcgagcaccgtga

SEQ ID NO: 27093 - DNA, 18 bp, Artificial Sequence
  Synthetic
tctaccacctgcgtcacg

SEQ ID NO: 27094 - DNA, 20 bp, Artificial Sequence
  Synthetic
ggagtgtttaggtaggcacg

SEQ ID NO: 27095 - DNA, 20 bp, Artificial Sequence
  Synthetic
acttccaggtctgcagacat

SEQ ID NO: 27096 - DNA, 20 bp, Artificial Sequence
  Synthetic
ccacatgtgtttcctccaga

SEQ ID NO: 27097 - DNA, 19 bp, Artificial Sequence
  Synthetic
ccggcaaggatgtcaacaa

SEQ ID NO: 27098 - DNA, 18 bp, Artificial Sequence
  Synthetic
tctcgcagccatgaggac

SEQ ID NO: 27099 - DNA, 19 bp, Artificial Sequence
  Synthetic
gcacactagggctggtagt

SEQ ID NO: 27100 - DNA, 20 bp, Artificial Sequence
  Synthetic
cagtgagcattgacgtgact

SEQ ID NO: 27101 - DNA, 18 bp, Artificial Sequence
  Synthetic
tcgtatccgggcatttgc

SEQ ID NO: 27102 - DNA, 20 bp, Artificial Sequence
  Synthetic
ggggcattgagctaaaggat

SEQ ID NO: 27103 - DNA, 18 bp, Artificial Sequence
  Synthetic
tgcagatcccatcacggt

SEQ ID NO: 27104 - DNA, 19 bp, Artificial Sequence
  Synthetic
gatgttggctgccctacac

SEQ ID NO: 27105 - DNA, 20 bp, Artificial Sequence
  Synthetic
tgatgatgttgcccaaccac

SEQ ID NO: 27106 - DNA, 20 bp, Artificial Sequence
  Synthetic
accttgggcaatgagtttgg

SEQ ID NO: 27107 - DNA, 23 bp, Artificial Sequence
  Synthetic
ctttttcaattgctatgccattt

SEQ ID NO: 27108 - DNA, 23 bp, Artificial Sequence
  Synthetic
tttgctctgtttagttcatttcc

SEQ ID NO: 27109 - DNA, 20 bp, Artificial Sequence
  Synthetic
ctcctcttttgccttctctc

SEQ ID NO: 27110 - DNA, 18 bp, Artificial Sequence
  Synthetic
agagtaagtctggcagcc

SEQ ID NO: 27111 - DNA, 20 bp, Artificial Sequence
  Synthetic
gagaaagcactgttgaaact

SEQ ID NO: 27112 - DNA, 19 bp, Artificial Sequence
  Synthetic
tcatcttcttggcttgtcc

SEQ ID NO: 27113 - DNA, 24 bp, Artificial Sequence
  Synthetic
gctgttgaaattcaaataaagcag

SEQ ID NO: 27114 - DNA, 19 bp, Artificial Sequence
  Synthetic
aagatcgtctcctggaaca

SEQ ID NO: 27115 - DNA, 18 bp, Artificial Sequence
  Synthetic
cagttgctcgccaattag

SEQ ID NO: 27116 - DNA, 19 bp, Artificial Sequence
  Synthetic
aatcaaattggtctgcagc

SEQ ID NO: 27117 - DNA, 19 bp, Artificial Sequence
  Synthetic
aacatatacacaggctccc

SEQ ID NO: 27118 - DNA, 23 bp, Artificial Sequence
  Synthetic
atgtttcttttccaaatggtgat

SEQ ID NO: 27119 - DNA, 21 bp, Artificial Sequence
  Synthetic
gtggttctagagtaagagctg

SEQ ID NO: 27120 - DNA, 19 bp, Artificial Sequence
  Synthetic
ccccaacccatttaaacac

SEQ ID NO: 27121 - DNA, 20 bp, Artificial Sequence
  Synthetic
attatagctgatgcctctgg

SEQ ID NO: 27122 - DNA, 19 bp, Artificial Sequence
  Synthetic
ttcaaattgaacagcccga

SEQ ID NO: 27123 - DNA, 24 bp, Artificial Sequence
  Synthetic
ttcctaattcaggtggtaaactag

SEQ ID NO: 27124 - DNA, 25 bp, Artificial Sequence
  Synthetic
gatctattaaagcaaacttgttagg

SEQ ID NO: 27125 - DNA, 20 bp, Artificial Sequence
  Synthetic
gagcatgtggttcaggtatg

SEQ ID NO: 27126 - DNA, 18 bp, Artificial Sequence
  Synthetic
gtcctcaataccggatgg

SEQ ID NO: 27127 - DNA, 18 bp, Artificial Sequence
  Synthetic
tgtttgttttgacagccg

SEQ ID NO: 27128 - DNA, 18 bp, Artificial Sequence
  Synthetic
tatgaggcccatgcaact

SEQ ID NO: 27129 - DNA, 21 bp, Artificial Sequence
  Synthetic
atagactcaggtactccttcc

SEQ ID NO: 27130 - DNA, 21 bp, Artificial Sequence
  Synthetic
ctgtttctgcctgtgttaaat

SEQ ID NO: 27131 - DNA, 18 bp, Artificial Sequence
  Synthetic
ccccacttccaccactat

SEQ ID NO: 27132 - DNA, 25 bp, Artificial Sequence
  Synthetic
ttgtaataaatagcacattctaggc

SEQ ID NO: 27133 - DNA, 22 bp, Artificial Sequence
  Synthetic
gttactgatgcttcttcacaaa

SEQ ID NO: 27134 - DNA, 18 bp, Artificial Sequence
  Synthetic
aatgccctccagtttctg

SEQ ID NO: 27135 - DNA, 20 bp, Artificial Sequence
  Synthetic
gcaagtagtctggatgttcc

SEQ ID NO: 27136 - DNA, 25 bp, Artificial Sequence
  Synthetic
ccaatttatttaataaaggatggcc

SEQ ID NO: 27137 - DNA, 21 bp, Artificial Sequence
  Synthetic
aacttcacttttgttagcctg

SEQ ID NO: 27138 - DNA, 19 bp, Artificial Sequence
  Synthetic
tgtgctcgttgtaaccaat

SEQ ID NO: 27139 - DNA, 22 bp, Artificial Sequence
  Synthetic
tgtagcttttcgttttcctaat

SEQ ID NO: 27140 - DNA, 22 bp, Artificial Sequence
  Synthetic
taaaaaacaatggaatggttgg

SEQ ID NO: 27141 - DNA, 19 bp, Artificial Sequence
  Synthetic
tcccgaaaagcaaagtcat

SEQ ID NO: 27142 - DNA, 20 bp, Artificial Sequence
  Synthetic
cgtgttcttgatgatctgca

SEQ ID NO: 27143 - DNA, 18 bp, Artificial Sequence
  Synthetic
ttgtacgcacaaccgaag

SEQ ID NO: 27144 - DNA, 18 bp, Artificial Sequence
  Synthetic
agttgattcgcctcgttc

SEQ ID NO: 27145 - DNA, 25 bp, Artificial Sequence
  Synthetic
ctttctctaggtaatatatgtggac

SEQ ID NO: 27146 - DNA, 19 bp, Artificial Sequence
  Synthetic
tcctcaaagtccaccttct

SEQ ID NO: 27147 - DNA, 24 bp, Artificial Sequence
  Synthetic
ctgtatttatgtacactcccttca

SEQ ID NO: 27148 - DNA, 18 bp, Artificial Sequence
  Synthetic
cttggcctactgcagttc

SEQ ID NO: 27149 - DNA, 18 bp, Artificial Sequence
  Synthetic
aaggttctgcacaccttc

SEQ ID NO: 27150 - DNA, 21 bp, Artificial Sequence
  Synthetic
gcatcctttgtcattgtgttc

SEQ ID NO: 27151 - DNA, 20 bp, Artificial Sequence
  Synthetic
aattgtgaaggagagctctg

SEQ ID NO: 27152 - DNA, 23 bp, Artificial Sequence
  Synthetic
ctctcttgttgatttgttgaagt

SEQ ID NO: 27153 - DNA, 19 bp, Artificial Sequence
  Synthetic
acctatctactcctgcctg

SEQ ID NO: 27154 - DNA, 18 bp, Artificial Sequence
  Synthetic
cccctgtgacatcggtat

SEQ ID NO: 27155 - DNA, 22 bp, Artificial Sequence
  Synthetic
atttccttatgactgacaaacg

SEQ ID NO: 27156 - DNA, 22 bp, Artificial Sequence
  Synthetic
tcaataaatgggatacggagag

SEQ ID NO: 27157 - DNA, 23 bp, Artificial Sequence
  Synthetic
agaaacaacagctaacttttctg

SEQ ID NO: 27158 - DNA, 18 bp, Artificial Sequence
  Synthetic
gccttaacagctgatcgc

SEQ ID NO: 27159 - DNA, 23 bp, Artificial Sequence
  Synthetic
atctgatatgtcactttcagatc

SEQ ID NO: 27160 - DNA, 19 bp, Artificial Sequence
  Synthetic
ttgcctttttttccctctg

SEQ ID NO: 27161 - DNA, 20 bp, Artificial Sequence
  Synthetic
aactacagcatgtcttgttg

SEQ ID NO: 27162 - DNA, 19 bp, Artificial Sequence
  Synthetic
cttgtagccagtctaagcg

SEQ ID NO: 27163 - DNA, 22 bp, Artificial Sequence
  Synthetic
tggtgctaaaaagatttctctg

SEQ ID NO: 27164 - DNA, 20 bp, Artificial Sequence
  Synthetic
tctgagggtggtatctctgg

SEQ ID NO: 27165 - DNA, 19 bp, Artificial Sequence
  Synthetic
tttgtatatcaggggggca

SEQ ID NO: 27166 - DNA, 24 bp, Artificial Sequence
  Synthetic
aatattatcagatgctgaagcttc

SEQ ID NO: 27167 - DNA, 19 bp, Artificial Sequence
  Synthetic
gtaactaaggaagcaggcc

SEQ ID NO: 27168 - DNA, 19 bp, Artificial Sequence
  Synthetic
cgatgcagcaagagaactt

SEQ ID NO: 27169 - DNA, 18 bp, Artificial Sequence
  Synthetic
ttggtgatcggttgggta

SEQ ID NO: 27170 - DNA, 22 bp, Artificial Sequence
  Synthetic
ccaaactagtctctcagtttct

SEQ ID NO: 27171 - DNA, 25 bp, Artificial Sequence
  Synthetic
cctcaataactgtgttaactaattc

SEQ ID NO: 27172 - DNA, 21 bp, Artificial Sequence
  Synthetic
attcacatgtatattcaggcc

SEQ ID NO: 27173 - DNA, 18 bp, Artificial Sequence
  Synthetic
aacttcaaaattcgcgcg

SEQ ID NO: 27174 - DNA, 24 bp, Artificial Sequence
  Synthetic
cataatcactgagtttgagttcag

SEQ ID NO: 27175 - DNA, 22 bp, Artificial Sequence
  Synthetic
tgtttgaaattttcctttgagg

SEQ ID NO: 27176 - DNA, 20 bp, Artificial Sequence
  Synthetic
gaccacttggctgttttgga

SEQ ID NO: 27177 - DNA, 19 bp, Artificial Sequence
  Synthetic
cccagtatctgcttctcag

SEQ ID NO: 27178 - DNA, 19 bp, Artificial Sequence
  Synthetic
cccatttgaatgcctgtca

SEQ ID NO: 27179 - DNA, 25 bp, Artificial Sequence
  Synthetic
ccatcagtcattatagtaaaacatg

SEQ ID NO: 27180 - DNA, 25 bp, Artificial Sequence
  Synthetic
gtatcctatttgataatccaggttt

SEQ ID NO: 27181 - DNA, 20 bp, Artificial Sequence
  Synthetic
caatcagtcattgccacaac

SEQ ID NO: 27182 - DNA, 18 bp, Artificial Sequence
  Synthetic
gtcataggtttggcgacc

SEQ ID NO: 27183 - DNA, 25 bp, Artificial Sequence
  Synthetic
agtaattgtaaaagagagctctgta

SEQ ID NO: 27184 - DNA, 19 bp, Artificial Sequence
  Synthetic
tcaagtcaatgcttgcaag

SEQ ID NO: 27185 - DNA, 20 bp, Artificial Sequence
  Synthetic
cctgcttctattccctcatg

SEQ ID NO: 27186 - DNA, 20 bp, Artificial Sequence
  Synthetic
gtggcatcggtatgggtatc

SEQ ID NO: 27187 - DNA, 20 bp, Artificial Sequence
  Synthetic
tcttgcagtgaagtgttcag

SEQ ID NO: 27188 - DNA, 18 bp, Artificial Sequence
  Synthetic
ttcaacggtttctggcac

SEQ ID NO: 27189 - DNA, 24 bp, Artificial Sequence
  Synthetic
catctatttcatcgttttcttcct

SEQ ID NO: 27190 - DNA, 18 bp, Artificial Sequence
  Synthetic
tctgtatccacctccagc

SEQ ID NO: 27191 - DNA, 25 bp, Artificial Sequence
  Synthetic
ctatattgctattgtcacttgtacc

SEQ ID NO: 27192 - DNA, 25 bp, Artificial Sequence
  Synthetic
ggctcctaaaaatgttataaactct

SEQ ID NO: 27193 - DNA, 23 bp, Artificial Sequence
  Synthetic
gttcaatagctttatgtgcttta

SEQ ID NO: 27194 - DNA, 19 bp, Artificial Sequence
  Synthetic
cgtgttgtacccttccttt

SEQ ID NO: 27195 - DNA, 19 bp, Artificial Sequence
  Synthetic
gagtccacagtgtccaggt

SEQ ID NO: 27196 - DNA, 23 bp, Artificial Sequence
  Synthetic
tctttgtgtttcactatggtatg

SEQ ID NO: 27197 - DNA, 21 bp, Artificial Sequence
  Synthetic
gcaatagtaacatgggcaata

SEQ ID NO: 27198 - DNA, 23 bp, Artificial Sequence
  Synthetic
ctaatctactaaagcgaacagtc

SEQ ID NO: 27199 - DNA, 21 bp, Artificial Sequence
  Synthetic
cagaagatatagtgggcgaat

SEQ ID NO: 27200 - DNA, 19 bp, Artificial Sequence
  Synthetic
taagttctaaaggggggca

SEQ ID NO: 27201 - DNA, 18 bp, Artificial Sequence
  Synthetic
caggtgaagcaggcatac

SEQ ID NO: 27202 - DNA, 22 bp, Artificial Sequence
  Synthetic
atcatattcctcaacatgtctg

SEQ ID NO: 27203 - DNA, 20 bp, Artificial Sequence
  Synthetic
aaaccacagacataagccaa

SEQ ID NO: 27204 - DNA, 19 bp, Artificial Sequence
  Synthetic
actgatgtgtcctgttgac

SEQ ID NO: 27205 - DNA, 18 bp, Artificial Sequence
  Synthetic
agtcataggtctgtcggc

SEQ ID NO: 27206 - DNA, 19 bp, Artificial Sequence
  Synthetic
aagaaagttcggtgtcctg

SEQ ID NO: 27207 - DNA, 19 bp, Artificial Sequence
  Synthetic
cggcttgaatcccttcatg

SEQ ID NO: 27208 - DNA, 19 bp, Artificial Sequence
  Synthetic
tgctggaccaagatcattg

SEQ ID NO: 27209 - DNA, 18 bp, Artificial Sequence
  Synthetic
gcatcaattcgggctctg

SEQ ID NO: 27210 - DNA, 17 bp, Artificial Sequence
  Synthetic
tccagggaagcggtcac

SEQ ID NO: 27211 - DNA, 16 bp, Artificial Sequence
  Synthetic
tgccgcctgtagcacg

SEQ ID NO: 27212 - DNA, 19 bp, Artificial Sequence
  Synthetic
cgagggagaatggttcacc

SEQ ID NO: 27213 - DNA, 19 bp, Artificial Sequence
  Synthetic
tgatgtccagcctaggagg

SEQ ID NO: 27214 - DNA, 18 bp, Artificial Sequence
  Synthetic
ctcctgggcagctcatca

SEQ ID NO: 27215 - DNA, 19 bp, Artificial Sequence
  Synthetic
cactgggattccgggaatc

SEQ ID NO: 27216 - DNA, 19 bp, Artificial Sequence
  Synthetic
accaacatggcaagaacca

SEQ ID NO: 27217 - DNA, 16 bp, Artificial Sequence
  Synthetic
tggcgccagaaagggc

SEQ ID NO: 27218 - DNA, 20 bp, Artificial Sequence
  Synthetic
ctgccaacactagcatgact

SEQ ID NO: 27219 - DNA, 20 bp, Artificial Sequence
  Synthetic
acacacttcagcagcaatgt

SEQ ID NO: 27220 - DNA, 20 bp, Artificial Sequence
  Synthetic
gcacaccattcactctctga

SEQ ID NO: 27221 - DNA, 18 bp, Artificial Sequence
  Synthetic
ttctcacgacccaaacgc

SEQ ID NO: 27222 - DNA, 20 bp, Artificial Sequence
  Synthetic
acgatagccggttttacccg

SEQ ID NO: 27223 - DNA, 18 bp, Artificial Sequence
  Synthetic
gggtcgcagtggcaaaca

SEQ ID NO: 27224 - DNA, 19 bp, Artificial Sequence
  Synthetic
cacatcaccggctggaatt

SEQ ID NO: 27225 - DNA, 19 bp, Artificial Sequence
  Synthetic
taccacgtgacaccagcct

SEQ ID NO: 27226 - DNA, 16 bp, Artificial Sequence
  Synthetic
ccgccaagcaaggggt

SEQ ID NO: 27227 - DNA, 19 bp, Artificial Sequence
  Synthetic
cgtagctagcagccatggg

SEQ ID NO: 27228 - DNA, 16 bp, Artificial Sequence
  Synthetic
aggagcagagcagccg

SEQ ID NO: 27229 - DNA, 18 bp, Artificial Sequence
  Synthetic
agacggttgacccagtcg

SEQ ID NO: 27230 - DNA, 18 bp, Artificial Sequence
  Synthetic
atccacaagtacagcgcg

SEQ ID NO: 27231 - DNA, 18 bp, Artificial Sequence
  Synthetic
ggcaaatcaccggcgaag

SEQ ID NO: 27232 - DNA, 19 bp, Artificial Sequence
  Synthetic
tctcggcaagaacagtcgt

SEQ ID NO: 27233 - DNA, 19 bp, Artificial Sequence
  Synthetic
ccctcccacaacctaaggg

SEQ ID NO: 27234 - DNA, 18 bp, Artificial Sequence
  Synthetic
caaagcatgcacccggac

SEQ ID NO: 27235 - DNA, 19 bp, Artificial Sequence
  Synthetic
ggcttccgcatatccgtac

SEQ ID NO: 27236 - DNA, 18 bp, Artificial Sequence
  Synthetic
gcgaggcaagagcttcag

SEQ ID NO: 27237 - DNA, 18 bp, Artificial Sequence
  Synthetic
agcacgcaaacacacaat

SEQ ID NO: 27238 - DNA, 22 bp, Artificial Sequence
  Synthetic
agctccagaataatatcttgca

SEQ ID NO: 27239 - DNA, 20 bp, Artificial Sequence
  Synthetic
agtttttgcaattgctcctc

SEQ ID NO: 27240 - DNA, 20 bp, Artificial Sequence
  Synthetic
aacctactccaaacgactct

SEQ ID NO: 27241 - DNA, 18 bp, Artificial Sequence
  Synthetic
tatgaactgtcccgcgat

SEQ ID NO: 27242 - DNA, 19 bp, Artificial Sequence
  Synthetic
caaatttggcctggttgtt

SEQ ID NO: 27243 - DNA, 24 bp, Artificial Sequence
  Synthetic
tgttacatcatccaatagagctat

SEQ ID NO: 27244 - DNA, 18 bp, Artificial Sequence
  Synthetic
attgaaacgctcgctgag

SEQ ID NO: 27245 - DNA, 20 bp, Artificial Sequence
  Synthetic
tcggtttgttgtggctgttt

SEQ ID NO: 27246 - DNA, 18 bp, Artificial Sequence
  Synthetic
gtgtggtgcaggaggagg

SEQ ID NO: 27247 - DNA, 18 bp, Artificial Sequence
  Synthetic
tttagctctgttgcggac

SEQ ID NO: 27248 - DNA, 22 bp, Artificial Sequence
  Synthetic
cgccatagcaaatacaaaatgt

SEQ ID NO: 27249 - DNA, 19 bp, Artificial Sequence
  Synthetic
tgacccgtgttggaggaat

SEQ ID NO: 27250 - DNA, 18 bp, Artificial Sequence
  Synthetic
catatcccgctggtgttg

SEQ ID NO: 27251 - DNA, 18 bp, Artificial Sequence
  Synthetic
ttttacgtttgcgcctgt

SEQ ID NO: 27252 - DNA, 20 bp, Artificial Sequence
  Synthetic
tcattttctgcacatggaac

SEQ ID NO: 27253 - DNA, 21 bp, Artificial Sequence
  Synthetic
ccattattatgaccttgggct

SEQ ID NO: 27254 - DNA, 23 bp, Artificial Sequence
  Synthetic
ttccttgaatactgtgtaaaagt

SEQ ID NO: 27255 - DNA, 23 bp, Artificial Sequence
  Synthetic
actatctctgttatgttcctttc

SEQ ID NO: 27256 - DNA, 20 bp, Artificial Sequence
  Synthetic
ttgttgttcaaagtggttcc

SEQ ID NO: 27257 - DNA, 20 bp, Artificial Sequence
  Synthetic
tgagttctgaggatgttctt

SEQ ID NO: 27258 - DNA, 24 bp, Artificial Sequence
  Synthetic
acatttatatatagcacgggtcta

SEQ ID NO: 27259 - DNA, 23 bp, Artificial Sequence
  Synthetic
tgacttgcctatttatttgtgac

SEQ ID NO: 27260 - DNA, 18 bp, Artificial Sequence
  Synthetic
gttcgtttgttgcttggc

SEQ ID NO: 27261 - DNA, 23 bp, Artificial Sequence
  Synthetic
ttcagttttcttgtcatcagttg

SEQ ID NO: 27262 - DNA, 20 bp, Artificial Sequence
  Synthetic
tcataatcctctgctgtgtc

SEQ ID NO: 27263 - DNA, 20 bp, Artificial Sequence
  Synthetic
tatagtaaccggtgctggtt

SEQ ID NO: 27264 - DNA, 24 bp, Artificial Sequence
  Synthetic
tggtagaactaagctttctaattc

SEQ ID NO: 27265 - DNA, 25 bp, Artificial Sequence
  Synthetic
gttaagtcagtacctttattactgt

SEQ ID NO: 27266 - DNA, 18 bp, Artificial Sequence
  Synthetic
gctgaggagaggtggtaa

SEQ ID NO: 27267 - DNA, 18 bp, Artificial Sequence
  Synthetic
atgcttcagaaacgcagc

SEQ ID NO: 27268 - DNA, 21 bp, Artificial Sequence
  Synthetic
ttcaattgagtaggtgctcta

SEQ ID NO: 27269 - DNA, 25 bp, Artificial Sequence
  Synthetic
ctcataaagattcattaggttttcc

SEQ ID NO: 27270 - DNA, 18 bp, Artificial Sequence
  Synthetic
cgtcgtcgtcgtcgtaac

SEQ ID NO: 27271 - DNA, 21 bp, Artificial Sequence
  Synthetic
taatagtgtcatgtgcaaaca

SEQ ID NO: 27272 - DNA, 22 bp, Artificial Sequence
  Synthetic
aacttgctgtacaaaacgtcta

SEQ ID NO: 27273 - DNA, 18 bp, Artificial Sequence
  Synthetic
cacctttgcaacaggctt

SEQ ID NO: 27274 - DNA, 22 bp, Artificial Sequence
  Synthetic
tactagtctccatactaatcgc

SEQ ID NO: 27275 - DNA, 18 bp, Artificial Sequence
  Synthetic
tactgtcctgttggtggt

SEQ ID NO: 27276 - DNA, 21 bp, Artificial Sequence
  Synthetic
tcttgcataaagctgttcctt

SEQ ID NO: 27277 - DNA, 23 bp, Artificial Sequence
  Synthetic
ctgaagttaatatttcgcgtatt

SEQ ID NO: 27278 - DNA, 19 bp, Artificial Sequence
  Synthetic
tttgtgctacgtttgcagt

SEQ ID NO: 27279 - DNA, 19 bp, Artificial Sequence
  Synthetic
tgtgttctgttgactgtgt

SEQ ID NO: 27280 - DNA, 18 bp, Artificial Sequence
  Synthetic
ggccttgggttagtttgt

SEQ ID NO: 27281 - DNA, 23 bp, Artificial Sequence
  Synthetic
gctcttattagatagcctctctt

SEQ ID NO: 27282 - DNA, 21 bp, Artificial Sequence
  Synthetic
tgaaagaaagctcagtgtctt

SEQ ID NO: 27283 - DNA, 23 bp, Artificial Sequence
  Synthetic
cattgaaatacttcaggtcaatg

SEQ ID NO: 27284 - DNA, 21 bp, Artificial Sequence
  Synthetic
gaatctatccactcctgcttg

SEQ ID NO: 27285 - DNA, 21 bp, Artificial Sequence
  Synthetic
tcctctatggcacctatatgt

SEQ ID NO: 27286 - DNA, 20 bp, Artificial Sequence
  Synthetic
cagggggttacaaagtcttc

SEQ ID NO: 27287 - DNA, 18 bp, Artificial Sequence
  Synthetic
attctggcatcaatccgg

SEQ ID NO: 27288 - DNA, 22 bp, Artificial Sequence
  Synthetic
acaagcactgtagctctaattc

SEQ ID NO: 27289 - DNA, 19 bp, Artificial Sequence
  Synthetic
gacacaacacagtctaacg

SEQ ID NO: 27290 - DNA, 22 bp, Artificial Sequence
  Synthetic
ttttcagcttcatcttcaatcc

SEQ ID NO: 27291 - DNA, 18 bp, Artificial Sequence
  Synthetic
tgtcgtacgatgtggaag

SEQ ID NO: 27292 - DNA, 21 bp, Artificial Sequence
  Synthetic
aatgtcccatagagtacgtag

SEQ ID NO: 27293 - DNA, 18 bp, Artificial Sequence
  Synthetic
tgagttggccttccagac

SEQ ID NO: 27294 - DNA, 24 bp, Artificial Sequence
  Synthetic
ctacttcaaattcttcgttagagg

SEQ ID NO: 27295 - DNA, 23 bp, Artificial Sequence
  Synthetic
acaaacctattacctaattgggt

SEQ ID NO: 27296 - DNA, 24 bp, Artificial Sequence
  Synthetic
cttactcttattgtaccttctgag

SEQ ID NO: 27297 - DNA, 21 bp, Artificial Sequence
  Synthetic
actttgatatctccaccatct

SEQ ID NO: 27298 - DNA, 25 bp, Artificial Sequence
  Synthetic
gtttgtttaggatctatagacaagt

SEQ ID NO: 27299 - DNA, 19 bp, Artificial Sequence
  Synthetic
tcaggccataagctgattg

SEQ ID NO: 27300 - DNA, 22 bp, Artificial Sequence
  Synthetic
caactgaaacaatacacaacaa

SEQ ID NO: 27301 - DNA, 20 bp, Artificial Sequence
  Synthetic
cccattgctatcagactcag

SEQ ID NO: 27302 - DNA, 19 bp, Artificial Sequence
  Synthetic
gttgttctctccgttgggc

SEQ ID NO: 27303 - DNA, 18 bp, Artificial Sequence
  Synthetic
ccttcagcaacccatgaa

SEQ ID NO: 27304 - DNA, 21 bp, Artificial Sequence
  Synthetic
gcactactatttcaggaccaa

SEQ ID NO: 27305 - DNA, 19 bp, Artificial Sequence
  Synthetic
ctgtagtggccacaaatgt

SEQ ID NO: 27306 - DNA, 19 bp, Artificial Sequence
  Synthetic
aattgaactgaatcgcctg

SEQ ID NO: 27307 - DNA, 19 bp, Artificial Sequence
  Synthetic
acctttaatgctgctccac

SEQ ID NO: 27308 - DNA, 21 bp, Artificial Sequence
  Synthetic
aatcatctgtactcagcactc

SEQ ID NO: 27309 - DNA, 22 bp, Artificial Sequence
  Synthetic
gcaagtagaacaaagttcacat

SEQ ID NO: 27310 - DNA, 21 bp, Artificial Sequence
  Synthetic
gttgcaagaggattatgtctc

SEQ ID NO: 27311 - DNA, 22 bp, Artificial Sequence
  Synthetic
cataacaaaatggtcctttcca

SEQ ID NO: 27312 - DNA, 19 bp, Artificial Sequence
  Synthetic
ctgagaaagaagcagttgc

SEQ ID NO: 27313 - DNA, 25 bp, Artificial Sequence
  Synthetic
cattgttattttcagttccagtttc

SEQ ID NO: 27314 - DNA, 19 bp, Artificial Sequence
  Synthetic
atgactcactagctgtagc

SEQ ID NO: 27315 - DNA, 21 bp, Artificial Sequence
  Synthetic
ggattaccatctaaacccgtt

SEQ ID NO: 27316 - DNA, 23 bp, Artificial Sequence
  Synthetic
acataataacatgctcttgtctt

SEQ ID NO: 27317 - DNA, 19 bp, Artificial Sequence
  Synthetic
atagtttcggagttccagg

SEQ ID NO: 27318 - DNA, 23 bp, Artificial Sequence
  Synthetic
ttaacccttttactggtattcat

SEQ ID NO: 27319 - DNA, 19 bp, Artificial Sequence
  Synthetic
ggaccagaaacagtgacat

SEQ ID NO: 27320 - DNA, 18 bp, Artificial Sequence
  Synthetic
tctgctcctcctcaaagg

SEQ ID NO: 27321 - DNA, 23 bp, Artificial Sequence
  Synthetic
attgcaggttcaatattagaagt

SEQ ID NO: 27322 - DNA, 20 bp, Artificial Sequence
  Synthetic
gtagttccaataccaagcgg

SEQ ID NO: 27323 - DNA, 18 bp, Artificial Sequence
  Synthetic
tctcccattgttcctgct

SEQ ID NO: 27324 - DNA, 18 bp, Artificial Sequence
  Synthetic
cagcttgttcaggacagg

SEQ ID NO: 27325 - DNA, 23 bp, Artificial Sequence
  Synthetic
gatggacagtctaaaatctgttt

SEQ ID NO: 27326 - DNA, 18 bp, Artificial Sequence
  Synthetic
taccactcccggtcattg

SEQ ID NO: 27327 - DNA, 16 bp, Artificial Sequence
  Synthetic
cccgtctggtccacca

SEQ ID NO: 27328 - DNA, 20 bp, Artificial Sequence
  Synthetic
gaggaaatgctggcaggttc

SEQ ID NO: 27329 - DNA, 16 bp, Artificial Sequence
  Synthetic
tgtggcctcccgttcc

SEQ ID NO: 27330 - DNA, 19 bp, Artificial Sequence
  Synthetic
gccataaacgccgactacg

SEQ ID NO: 27331 - DNA, 17 bp, Artificial Sequence
  Synthetic
ctttgcggacgagctgc

SEQ ID NO: 27332 - DNA, 16 bp, Artificial Sequence
  Synthetic
gcccggcctgacgatt

SEQ ID NO: 27333 - DNA, 16 bp, Artificial Sequence
  Synthetic
aacctccccggctgga

SEQ ID NO: 27334 - DNA, 17 bp, Artificial Sequence
  Synthetic
accacaccccccagtac

SEQ ID NO: 27335 - DNA, 16 bp, Artificial Sequence
  Synthetic
cgagccacgccagaac

SEQ ID NO: 27336 - DNA, 17 bp, Artificial Sequence
  Synthetic
acagggccgagagaacg

SEQ ID NO: 27337 - DNA, 15 bp, Artificial Sequence
  Synthetic
agccgtcaagcgcgt

SEQ ID NO: 27338 - DNA, 16 bp, Artificial Sequence
  Synthetic
tgcagcaccatggccg

SEQ ID NO: 27339 - DNA, 20 bp, Artificial Sequence
  Synthetic
ggggcgataacatctgcatt

SEQ ID NO: 27340 - DNA, 17 bp, Artificial Sequence
  Synthetic
accttccccaacgcgag

SEQ ID NO: 27341 - DNA, 18 bp, Artificial Sequence
  Synthetic
gatacgtcccgctcagga

SEQ ID NO: 27342 - DNA, 18 bp, Artificial Sequence
  Synthetic
cgcatcgatccggagatc

SEQ ID NO: 27343 - DNA, 17 bp, Artificial Sequence
  Synthetic
agccacttccccgactg

SEQ ID NO: 27344 - DNA, 16 bp, Artificial Sequence
  Synthetic
accttccgtcccctgc

SEQ ID NO: 27345 - DNA, 16 bp, Artificial Sequence
  Synthetic
cccaagattcggcgcg

SEQ ID NO: 27346 - DNA, 18 bp, Artificial Sequence
  Synthetic
tccccctcgcacatcctc

SEQ ID NO: 27347 - DNA, 16 bp, Artificial Sequence
  Synthetic
tggaggagcaagcggc

SEQ ID NO: 27348 - DNA, 20 bp, Artificial Sequence
  Synthetic
gccgagatttacaaggacca

SEQ ID NO: 27349 - DNA, 16 bp, Artificial Sequence
  Synthetic
tttaaccgcgagcgcc

SEQ ID NO: 27350 - DNA, 20 bp, Artificial Sequence
  Synthetic
gagcggctcaagatctttcg

SEQ ID NO: 27351 - DNA, 15 bp, Artificial Sequence
  Synthetic
tacgcgcgccaaacc

SEQ ID NO: 27352 - DNA, 16 bp, Artificial Sequence
  Synthetic
gaggccgctgttggtg

SEQ ID NO: 27353 - DNA, 17 bp, Artificial Sequence
  Synthetic
gcgaatgtgtgcggagg

SEQ ID NO: 27354 - DNA, 16 bp, Artificial Sequence
  Synthetic
agtgtcacgcgggagg

SEQ ID NO: 27355 - DNA, 17 bp, Artificial Sequence
  Synthetic
gtgcgcctggattcgct

SEQ ID NO: 27356 - DNA, 19 bp, Artificial Sequence
  Synthetic
gtgctcagcccctgcttta

SEQ ID NO: 27357 - DNA, 20 bp, Artificial Sequence
  Synthetic
catcatcagctcaagacggg

SEQ ID NO: 27358 - DNA, 20 bp, Artificial Sequence
  Synthetic
cggtgttttacctgctgcag

SEQ ID NO: 27359 - DNA, 17 bp, Artificial Sequence
  Synthetic
gttgcgcgccatccaac

SEQ ID NO: 27360 - DNA, 20 bp, Artificial Sequence
  Synthetic
atgcaaacagcctgtacgac

SEQ ID NO: 27361 - DNA, 20 bp, Artificial Sequence
  Synthetic
tgttttgggggatgtccgtg

SEQ ID NO: 27362 - DNA, 19 bp, Artificial Sequence
  Synthetic
ggtttcggtccgttgtgac

SEQ ID NO: 27363 - DNA, 20 bp, Artificial Sequence
  Synthetic
cgagagcgtgtttatcctgg

SEQ ID NO: 27364 - DNA, 18 bp, Artificial Sequence
  Synthetic
gtttttctcgggggacgc

SEQ ID NO: 27365 - DNA, 17 bp, Artificial Sequence
  Synthetic
tcatcccgccgaccttg

SEQ ID NO: 27366 - DNA, 18 bp, Artificial Sequence
  Synthetic
tgtggcctcgaataccga

SEQ ID NO: 27367 - DNA, 18 bp, Artificial Sequence
  Synthetic
tgagtcttcggacctcgc

SEQ ID NO: 27368 - DNA, 16 bp, Artificial Sequence
  Synthetic
acgaccacctgctccg

SEQ ID NO: 27369 - DNA, 17 bp, Artificial Sequence
  Synthetic
ggaatagtggcgctggc

SEQ ID NO: 27370 - DNA, 19 bp, Artificial Sequence
  Synthetic
ctcaagaaccccaccaacc

SEQ ID NO: 27371 - DNA, 18 bp, Artificial Sequence
  Synthetic
caccttcggtgggggcta

SEQ ID NO: 27372 - DNA, 16 bp, Artificial Sequence
  Synthetic
tgccatcgcgtggtgc

SEQ ID NO: 27373 - DNA, 16 bp, Artificial Sequence
  Synthetic
tgggggactgcatcgg

SEQ ID NO: 27374 - DNA, 16 bp, Artificial Sequence
  Synthetic
tggcctgggactgggt

SEQ ID NO: 27375 - DNA, 17 bp, Artificial Sequence
  Synthetic
aagcgcgtggacatcct

SEQ ID NO: 27376 - DNA, 17 bp, Artificial Sequence
  Synthetic
gccctgagtcagtgcca

SEQ ID NO: 27377 - DNA, 19 bp, Artificial Sequence
  Synthetic
tcatgcaggagacgtaccg

SEQ ID NO: 27378 - DNA, 19 bp, Artificial Sequence
  Synthetic
accgagggcttcaaggagg

SEQ ID NO: 27379 - DNA, 18 bp, Artificial Sequence
  Synthetic
ggattacctccgttcgcg

SEQ ID NO: 27380 - DNA, 17 bp, Artificial Sequence
  Synthetic
atggccgggcagaagtt

SEQ ID NO: 27381 - DNA, 17 bp, Artificial Sequence
  Synthetic
cttgatggcggcctgct

SEQ ID NO: 27382 - DNA, 20 bp, Artificial Sequence
  Synthetic
ggtgaacgtcttttcgcact

SEQ ID NO: 27383 - DNA, 20 bp, Artificial Sequence
  Synthetic
agctttttttcgtccacacg

SEQ ID NO: 27384 - DNA, 16 bp, Artificial Sequence
  Synthetic
gcagcagctggaaggc

SEQ ID NO: 27385 - DNA, 16 bp, Artificial Sequence
  Synthetic
tcggggcccatgaacc

SEQ ID NO: 27386 - DNA, 16 bp, Artificial Sequence
  Synthetic
atccagcggggccaga

SEQ ID NO: 27387 - DNA, 16 bp, Artificial Sequence
  Synthetic
ggcgaggtgggcttct

SEQ ID NO: 27388 - DNA, 19 bp, Artificial Sequence
  Synthetic
gcagggcacatatgatcgc

SEQ ID NO: 27389 - DNA, 19 bp, Artificial Sequence
  Synthetic
cctacgttctggccctggt

SEQ ID NO: 27390 - DNA, 18 bp, Artificial Sequence
  Synthetic
gaaccttaccaccccggc

SEQ ID NO: 27391 - DNA, 16 bp, Artificial Sequence
  Synthetic
agcaagacccggggga

SEQ ID NO: 27392 - DNA, 20 bp, Artificial Sequence
  Synthetic
gaccggcaagtttccaaagc

SEQ ID NO: 27393 - DNA, 16 bp, Artificial Sequence
  Synthetic
ccttgagggcgggcat

SEQ ID NO: 27394 - DNA, 17 bp, Artificial Sequence
  Synthetic
cgcttcccaggttgcag

SEQ ID NO: 27395 - DNA, 18 bp, Artificial Sequence
  Synthetic
aggacatccgcgacgaaa

SEQ ID NO: 27396 - DNA, 19 bp, Artificial Sequence
  Synthetic
ttgtgtttggagccaaggc

SEQ ID NO: 27397 - DNA, 19 bp, Artificial Sequence
  Synthetic
cgcttctggtccacgagag

SEQ ID NO: 27398 - DNA, 19 bp, Artificial Sequence
  Synthetic
ggtgacgcaggtactcgtg

SEQ ID NO: 27399 - DNA, 16 bp, Artificial Sequence
  Synthetic
tgtgcgttcgatgcgg

SEQ ID NO: 27400 - DNA, 17 bp, Artificial Sequence
  Synthetic
tcgtgcgtctgcgtgtc

SEQ ID NO: 27401 - DNA, 18 bp, Artificial Sequence
  Synthetic
tttgccgacaccgtggtg

SEQ ID NO: 27402 - DNA, 16 bp, Artificial Sequence
  Synthetic
acgacgcccccgaaga

SEQ ID NO: 27403 - DNA, 19 bp, Artificial Sequence
  Synthetic
gggaagtcacgaggtacgg

SEQ ID NO: 27404 - DNA, 17 bp, Artificial Sequence
  Synthetic
tcaccaccatccgcgtg

SEQ ID NO: 27405 - DNA, 18 bp, Artificial Sequence
  Synthetic
cacagagggccactcacg

SEQ ID NO: 27406 - DNA, 16 bp, Artificial Sequence
  Synthetic
cccgacgcctcgtgaa

SEQ ID NO: 27407 - DNA, 20 bp, Artificial Sequence
  Synthetic
ctccacaaaatctcggtcca

SEQ ID NO: 27408 - DNA, 17 bp, Artificial Sequence
  Synthetic
tgcaggcggttgctgtc

SEQ ID NO: 27409 - DNA, 16 bp, Artificial Sequence
  Synthetic
tgttggtgccggtggg

SEQ ID NO: 27410 - DNA, 19 bp, Artificial Sequence
  Synthetic
gcctgcgtagttcaagagg

SEQ ID NO: 27411 - DNA, 18 bp, Artificial Sequence
  Synthetic
tcctctccgtgggggtct

SEQ ID NO: 27412 - DNA, 16 bp, Artificial Sequence
  Synthetic
ggcgcggaccaggtaa

SEQ ID NO: 27413 - DNA, 18 bp, Artificial Sequence
  Synthetic
acgtacgccgaggctatg

SEQ ID NO: 27414 - DNA, 16 bp, Artificial Sequence
  Synthetic
ttgctgatcccccgcc

SEQ ID NO: 27415 - DNA, 17 bp, Artificial Sequence
  Synthetic
caaaatccgccggggtg

SEQ ID NO: 27416 - DNA, 19 bp, Artificial Sequence
  Synthetic
ttggggagaagcaggtgtc

SEQ ID NO: 27417 - DNA, 16 bp, Artificial Sequence
  Synthetic
tgtcgtcggggtcgtc

SEQ ID NO: 27418 - DNA, 17 bp, Artificial Sequence
  Synthetic
gcgtgtatgggcatgcc

SEQ ID NO: 27419 - DNA, 18 bp, Artificial Sequence
  Synthetic
atcgtgcgcactaggtcc

SEQ ID NO: 27420 - DNA, 17 bp, Artificial Sequence
  Synthetic
agaacaacgccctgccc

SEQ ID NO: 27421 - DNA, 20 bp, Artificial Sequence
  Synthetic
acaaaacttacgacaggcca

SEQ ID NO: 27422 - DNA, 16 bp, Artificial Sequence
  Synthetic
tgacacaggcgctcgg

SEQ ID NO: 27423 - DNA, 16 bp, Artificial Sequence
  Synthetic
tggtcgaggggggctt

SEQ ID NO: 27424 - DNA, 16 bp, Artificial Sequence
  Synthetic
aggatcgccgggtggt

SEQ ID NO: 27425 - DNA, 19 bp, Artificial Sequence
  Synthetic
cctggcggtgaatgtagtc

SEQ ID NO: 27426 - DNA, 20 bp, Artificial Sequence
  Synthetic
tctggatgcggggaaaactc

SEQ ID NO: 27427 - DNA, 19 bp, Artificial Sequence
  Synthetic
cctcctcctccagtccaat

SEQ ID NO: 27428 - DNA, 18 bp, Artificial Sequence
  Synthetic
tccggatagccaggcctg

SEQ ID NO: 27429 - DNA, 18 bp, Artificial Sequence
  Synthetic
ctggggtgaggggacact

SEQ ID NO: 27430 - DNA, 16 bp, Artificial Sequence
  Synthetic
tcacacggccgggcta

SEQ ID NO: 27431 - DNA, 18 bp, Artificial Sequence
  Synthetic
ggtcccccacaaagcgaa

SEQ ID NO: 27432 - DNA, 18 bp, Artificial Sequence
  Synthetic
gagccgttgtacgccaga

SEQ ID NO: 27433 - DNA, 16 bp, Artificial Sequence
  Synthetic
ccaccaggaccaccga

SEQ ID NO: 27434 - DNA, 16 bp, Artificial Sequence
  Synthetic
accgactgttggcggc

SEQ ID NO: 27435 - DNA, 20 bp, Artificial Sequence
  Synthetic
gtgatgggggggaagagaga

SEQ ID NO: 27436 - DNA, 20 bp, Artificial Sequence
  Synthetic
tgatttacccaggtgttgtt

SEQ ID NO: 27437 - DNA, 22 bp, Artificial Sequence
  Synthetic
ttgagttctcagtatgttgttc

SEQ ID NO: 27438 - DNA, 24 bp, Artificial Sequence
  Synthetic
ccaaattttgattgaaagataccc

SEQ ID NO: 27439 - DNA, 18 bp, Artificial Sequence
  Synthetic
caccgagaagctactgtc

SEQ ID NO: 27440 - DNA, 20 bp, Artificial Sequence
  Synthetic
accactgaacaaatggcact

SEQ ID NO: 27441 - DNA, 20 bp, Artificial Sequence
  Synthetic
aggcctgttaataggaagtt

SEQ ID NO: 27442 - DNA, 18 bp, Artificial Sequence
  Synthetic
atgcctcaaggtcggtcg

SEQ ID NO: 27443 - DNA, 20 bp, Artificial Sequence
  Synthetic
cacaagagttgcctgaactt

SEQ ID NO: 27444 - DNA, 20 bp, Artificial Sequence
  Synthetic
aggtgtccttgttgggattg

SEQ ID NO: 27445 - DNA, 19 bp, Artificial Sequence
  Synthetic
tcctaagtgacgggttctt

SEQ ID NO: 27446 - DNA, 23 bp, Artificial Sequence
  Synthetic
atgttttaacctttcgactttgt

SEQ ID NO: 27447 - DNA, 21 bp, Artificial Sequence
  Synthetic
ctgtctaagaatgtccaccat

SEQ ID NO: 27448 - DNA, 21 bp, Artificial Sequence
  Synthetic
atcttctggttgcttttctga

SEQ ID NO: 27449 - DNA, 18 bp, Artificial Sequence
  Synthetic
ccatcacactgtcgatgt

SEQ ID NO: 27450 - DNA, 23 bp, Artificial Sequence
  Synthetic
atgatccattgataggtattgac

SEQ ID NO: 27451 - DNA, 18 bp, Artificial Sequence
  Synthetic
tgctttgctttggtggag

SEQ ID NO: 27452 - DNA, 22 bp, Artificial Sequence
  Synthetic
cttttgcaaggttactcagttc

SEQ ID NO: 27453 - DNA, 19 bp, Artificial Sequence
  Synthetic
gtgcaacacatctcacaca

SEQ ID NO: 27454 - DNA, 19 bp, Artificial Sequence
  Synthetic
gcatcttagaagcattcgc

SEQ ID NO: 27455 - DNA, 19 bp, Artificial Sequence
  Synthetic
ttggggcaaagaaacgaaa

SEQ ID NO: 27456 - DNA, 18 bp, Artificial Sequence
  Synthetic
tttgtcacaatcctcccg

SEQ ID NO: 27457 - DNA, 23 bp, Artificial Sequence
  Synthetic
tgctttctgattagttctttcca

SEQ ID NO: 27458 - DNA, 24 bp, Artificial Sequence
  Synthetic
cttttttaatgactgcaacaacag

SEQ ID NO: 27459 - DNA, 19 bp, Artificial Sequence
  Synthetic
actggtactagagccgacc

SEQ ID NO: 27460 - DNA, 19 bp, Artificial Sequence
  Synthetic
ctgtgactctaggtgttgt

SEQ ID NO: 27461 - DNA, 24 bp, Artificial Sequence
  Synthetic
gctatattttcatcttgtcctgta

SEQ ID NO: 27462 - DNA, 21 bp, Artificial Sequence
  Synthetic
taactctaacgcgaccactat

SEQ ID NO: 27463 - DNA, 25 bp, Artificial Sequence
  Synthetic
cctcatcatcaaattgtatttcact

SEQ ID NO: 27464 - DNA, 19 bp, Artificial Sequence
  Synthetic
cctcaacagtttcctgagg

SEQ ID NO: 27465 - DNA, 18 bp, Artificial Sequence
  Synthetic
agctgtgtttgttttggg

SEQ ID NO: 27466 - DNA, 24 bp, Artificial Sequence
  Synthetic
gaaaatctggatatttacaggtgc

SEQ ID NO: 27467 - DNA, 21 bp, Artificial Sequence
  Synthetic
gctcttttctaacacgtttgt

SEQ ID NO: 27468 - DNA, 20 bp, Artificial Sequence
  Synthetic
tgaaaaatatttgccagccc

SEQ ID NO: 27469 - DNA, 20 bp, Artificial Sequence
  Synthetic
aaacacttgagtcagccata

SEQ ID NO: 27470 - DNA, 19 bp, Artificial Sequence
  Synthetic
attgtgacacttggagtct

SEQ ID NO: 27471 - DNA, 19 bp, Artificial Sequence
  Synthetic
gtctttttgcaccaacagt

SEQ ID NO: 27472 - DNA, 20 bp, Artificial Sequence
  Synthetic
agtcgtgagtaaccgtgtct

SEQ ID NO: 27473 - DNA, 21 bp, Artificial Sequence
  Synthetic
gtctagtcactggtaagtctg

SEQ ID NO: 27474 - DNA, 21 bp, Artificial Sequence
  Synthetic
tagctgtctcactttcttctg

SEQ ID NO: 27475 - DNA, 18 bp, Artificial Sequence
  Synthetic
tgagctggtgttcgtaaa

SEQ ID NO: 27476 - DNA, 20 bp, Artificial Sequence
  Synthetic
tccttctgatgtagcagaca

SEQ ID NO: 27477 - DNA, 22 bp, Artificial Sequence
  Synthetic
gctcgtttaccatttaacaaac

SEQ ID NO: 27478 - DNA, 19 bp, Artificial Sequence
  Synthetic
tctcacaaatggacgtctg

SEQ ID NO: 27479 - DNA, 20 bp, Artificial Sequence
  Synthetic
actgatactagcttccacag

SEQ ID NO: 27480 - DNA, 20 bp, Artificial Sequence
  Synthetic
tgctagtgctggagagaacc

SEQ ID NO: 27481 - DNA, 18 bp, Artificial Sequence
  Synthetic
cgtggtttgttcctgccg

SEQ ID NO: 27482 - DNA, 18 bp, Artificial Sequence
  Synthetic
gactccaacaggctctct

SEQ ID NO: 27483 - DNA, 20 bp, Artificial Sequence
  Synthetic
cccgaacttcttttcctcca

SEQ ID NO: 27484 - DNA, 22 bp, Artificial Sequence
  Synthetic
ttttggtccctgttttatgtct

SEQ ID NO: 27485 - DNA, 20 bp, Artificial Sequence
  Synthetic
tttgccatgatgtgtcctgg

SEQ ID NO: 27486 - DNA, 18 bp, Artificial Sequence
  Synthetic
gccttggtccatctttcc

SEQ ID NO: 27487 - DNA, 20 bp, Artificial Sequence
  Synthetic
ctggtagggtaaatgcagta

SEQ ID NO: 27488 - DNA, 18 bp, Artificial Sequence
  Synthetic
ttggccatagttcacagc

SEQ ID NO: 27489 - DNA, 21 bp, Artificial Sequence
  Synthetic
ggattttctcttcctggtgta

SEQ ID NO: 27490 - DNA, 21 bp, Artificial Sequence
  Synthetic
catatcctgcttttccctctt

SEQ ID NO: 27491 - DNA, 25 bp, Artificial Sequence
  Synthetic
gggttagttcttttataatgctatg

SEQ ID NO: 27492 - DNA, 18 bp, Artificial Sequence
  Synthetic
acctacccaccatgccac

SEQ ID NO: 27493 - DNA, 19 bp, Artificial Sequence
  Synthetic
ttccacagtagttcaccag

SEQ ID NO: 27494 - DNA, 18 bp, Artificial Sequence
  Synthetic
cttcacctgccgtaaagc

SEQ ID NO: 27495 - DNA, 25 bp, Artificial Sequence
  Synthetic
gcacaaatatctatactttgtgtag

SEQ ID NO: 27496 - DNA, 18 bp, Artificial Sequence
  Synthetic
tacatcccgctctgaagt

SEQ ID NO: 27497 - DNA, 23 bp, Artificial Sequence
  Synthetic
acaatatactaagcaagcacttg

SEQ ID NO: 27498 - DNA, 18 bp, Artificial Sequence
  Synthetic
gaggttgtggaactcgag

SEQ ID NO: 27499 - DNA, 22 bp, Artificial Sequence
  Synthetic
ttacatcttaatagggcaaagc

SEQ ID NO: 27500 - DNA, 18 bp, Artificial Sequence
  Synthetic
ggtttgcttcacctcctg

SEQ ID NO: 27501 - DNA, 24 bp, Artificial Sequence
  Synthetic
gtccgatttttatctatgtcaatg

SEQ ID NO: 27502 - DNA, 21 bp, Artificial Sequence
  Synthetic
tgatatttgcctctaggtagc

SEQ ID NO: 27503 - DNA, 19 bp, Artificial Sequence
  Synthetic
cctcgcgaatgcttggaaa

SEQ ID NO: 27504 - DNA, 25 bp, Artificial Sequence
  Synthetic
catatctattgccaatttataggtc

SEQ ID NO: 27505 - DNA, 24 bp, Artificial Sequence
  Synthetic
cctgttattcactatatggtatcc

SEQ ID NO: 27506 - DNA, 20 bp, Artificial Sequence
  Synthetic
tgcttctaactggcagcttt

SEQ ID NO: 27507 - DNA, 19 bp, Artificial Sequence
  Synthetic
atcacaccagtcacattga

SEQ ID NO: 27508 - DNA, 24 bp, Artificial Sequence
  Synthetic
ctctgagaagattaggtagttgtc

SEQ ID NO: 27509 - DNA, 21 bp, Artificial Sequence
  Synthetic
ttttgtcatcagagtggaacc

SEQ ID NO: 27510 - DNA, 21 bp, Artificial Sequence
  Synthetic
cttttattaccttgctcctgc

SEQ ID NO: 27511 - DNA, 19 bp, Artificial Sequence
  Synthetic
acctgcaatcattccttcc

SEQ ID NO: 27512 - DNA, 24 bp, Artificial Sequence
  Synthetic
ctcatcttcactgtttattatccc

SEQ ID NO: 27513 - DNA, 19 bp, Artificial Sequence
  Synthetic
ctagaagcagcagttgagt

SEQ ID NO: 27514 - DNA, 24 bp, Artificial Sequence
  Synthetic
ttgtatatgagacccatacaactg

SEQ ID NO: 27515 - DNA, 20 bp, Artificial Sequence
  Synthetic
cccaattgtcctcattgcct

SEQ ID NO: 27516 - DNA, 19 bp, Artificial Sequence
  Synthetic
gaaggccctcttttcaaac

SEQ ID NO: 27517 - DNA, 20 bp, Artificial Sequence
  Synthetic
tcctccataacaaaccagtt

SEQ ID NO: 27518 - DNA, 21 bp, Artificial Sequence
  Synthetic
aacagaatgtttcggactaca

SEQ ID NO: 27519 - DNA, 18 bp, Artificial Sequence
  Synthetic
gagtctcctgtagtgcag

SEQ ID NO: 27520 - DNA, 19 bp, Artificial Sequence
  Synthetic
ccatatctggcagcatctg

SEQ ID NO: 27521 - DNA, 24 bp, Artificial Sequence
  Synthetic
acccaagtatattacacttccaaa

SEQ ID NO: 27522 - DNA, 25 bp, Artificial Sequence
  Synthetic
ctatgtcaataatagatggatcagg

SEQ ID NO: 27523 - DNA, 23 bp, Artificial Sequence
  Synthetic
tttcaccttgataatttggtgaa

SEQ ID NO: 27524 - DNA, 20 bp, Artificial Sequence
  Synthetic
aatattcaaactgcacagcg

SEQ ID NO: 27525 - DNA, 25 bp, Artificial Sequence
  Synthetic
gactcaatagcagataaatcttgat

SEQ ID NO: 27526 - DNA, 18 bp, Artificial Sequence
  Synthetic
aagtactctggctgtggg

SEQ ID NO: 27527 - DNA, 20 bp, Artificial Sequence
  Synthetic
ccaacacctagaggatttcc

SEQ ID NO: 27528 - DNA, 18 bp, Artificial Sequence
  Synthetic
cctggcttcaagggtcta

SEQ ID NO: 27529 - DNA, 18 bp, Artificial Sequence
  Synthetic
atccccaacatttcctgc

SEQ ID NO: 27530 - DNA, 25 bp, Artificial Sequence
  Synthetic
caagaagacaaatatctgtatgtgt

SEQ ID NO: 27531 - DNA, 24 bp, Artificial Sequence
  Synthetic
gcatacagtaaacatttcacagta

SEQ ID NO: 27532 - DNA, 20 bp, Artificial Sequence
  Synthetic
aatagcccatgcaaatcttg

SEQ ID NO: 27533 - DNA, 20 bp, Artificial Sequence
  Synthetic
gtagctaacacacacagtct

SEQ ID NO: 27534 - DNA, 22 bp, Artificial Sequence
  Synthetic
caaaatatcctgtaaggcagtg

SEQ ID NO: 27535 - DNA, 18 bp, Artificial Sequence
  Synthetic
gtatgcaatggctggttc

SEQ ID NO: 27536 - DNA, 24 bp, Artificial Sequence
  Synthetic
agcataatactccaatacactttc

SEQ ID NO: 27537 - DNA, 18 bp, Artificial Sequence
  Synthetic
cttgtcctcgtcgtcgtc

SEQ ID NO: 27538 - DNA, 23 bp, Artificial Sequence
  Synthetic
tttcccaaatatataacactgct

SEQ ID NO: 27539 - DNA, 20 bp, Artificial Sequence
  Synthetic
tgtttctgctcctaaaccag

SEQ ID NO: 27540 - DNA, 22 bp, Artificial Sequence
  Synthetic
cgggattttcaaattcaaatgt

SEQ ID NO: 27541 - DNA, 21 bp, Artificial Sequence
  Synthetic
ctggcacatttttttcactag

SEQ ID NO: 27542 - DNA, 18 bp, Artificial Sequence
  Synthetic
taccgactccaagaggac

SEQ ID NO: 27543 - DNA, 18 bp, Artificial Sequence
  Synthetic
gctcatctggaggattcc

SEQ ID NO: 27544 - DNA, 22 bp, Artificial Sequence
  Synthetic
ctttaggacacatagctgctaa

SEQ ID NO: 27545 - DNA, 18 bp, Artificial Sequence
  Synthetic
aagacacaggcaccgata

SEQ ID NO: 27546 - DNA, 18 bp, Artificial Sequence
  Synthetic
tttgtcagctgtgatcgg

SEQ ID NO: 27547 - DNA, 22 bp, Artificial Sequence
  Synthetic
tccgtgttttaatctttcaacc

SEQ ID NO: 27548 - DNA, 18 bp, Artificial Sequence
  Synthetic
aggaatctggtcttgcga

SEQ ID NO: 27549 - DNA, 19 bp, Artificial Sequence
  Synthetic
ccaatttgtgtgctatggc

SEQ ID NO: 27550 - DNA, 18 bp, Artificial Sequence
  Synthetic
cccttccgctgactatca

SEQ ID NO: 27551 - DNA, 20 bp, Artificial Sequence
  Synthetic
acattgtcgatgggttcaat

SEQ ID NO: 27552 - DNA, 18 bp, Artificial Sequence
  Synthetic
tctggcccgttaatctcc

SEQ ID NO: 27553 - DNA, 18 bp, Artificial Sequence
  Synthetic
cctactctgttccggtgg

SEQ ID NO: 27554 - DNA, 18 bp, Artificial Sequence
  Synthetic
tgcttaatgctggtccat

SEQ ID NO: 27555 - DNA, 20 bp, Artificial Sequence
  Synthetic
gatgtttgttcgttccactg

SEQ ID NO: 27556 - DNA, 23 bp, Artificial Sequence
  Synthetic
ccattagttcttattccactgta

SEQ ID NO: 27557 - DNA, 22 bp, Artificial Sequence
  Synthetic
caattcttccagatagaccatt

SEQ ID NO: 27558 - DNA, 22 bp, Artificial Sequence
  Synthetic
ctcctttgcttaacatatctcg

SEQ ID NO: 27559 - DNA, 23 bp, Artificial Sequence
  Synthetic
tgttatttgatcaattgccgatt

SEQ ID NO: 27560 - DNA, 23 bp, Artificial Sequence
  Synthetic
tgaaatatttcaaagcaaccagt

SEQ ID NO: 27561 - DNA, 21 bp, Artificial Sequence
  Synthetic
gcagatttgtaaattccgcag

SEQ ID NO: 27562 - DNA, 25 bp, Artificial Sequence
  Synthetic
gtccacctatttaaaatgaatctga

SEQ ID NO: 27563 - DNA, 18 bp, Artificial Sequence
  Synthetic
tgcagctgttgtatgtcc

SEQ ID NO: 27564 - DNA, 21 bp, Artificial Sequence
  Synthetic
accaaatgacaatccaaacag

SEQ ID NO: 27565 - DNA, 23 bp, Artificial Sequence
  Synthetic
gctctattaacagttgattagca

SEQ ID NO: 27566 - DNA, 23 bp, Artificial Sequence
  Synthetic
tgtctacacataattccacaatc

SEQ ID NO: 27567 - DNA, 20 bp, Artificial Sequence
  Synthetic
ccatttcacgagccttaaat

SEQ ID NO: 27568 - DNA, 23 bp, Artificial Sequence
  Synthetic
cgtatataaatgtccatgctgta

SEQ ID NO: 27569 - DNA, 18 bp, Artificial Sequence
  Synthetic
ttgtgacgccgtagtgct

SEQ ID NO: 27570 - DNA, 18 bp, Artificial Sequence
  Synthetic
agctagcaagacaggagg

SEQ ID NO: 27571 - DNA, 23 bp, Artificial Sequence
  Synthetic
tacaaacaatacaaaaacccaac

SEQ ID NO: 27572 - DNA, 23 bp, Artificial Sequence
  Synthetic
cgtaaagtaaaaggatcactgta

SEQ ID NO: 27573 - DNA, 20 bp, Artificial Sequence
  Synthetic
tcattaattgcggatgaagc

SEQ ID NO: 27574 - DNA, 20 bp, Artificial Sequence
  Synthetic
actgctggcatgataaaagt

SEQ ID NO: 27575 - DNA, 21 bp, Artificial Sequence
  Synthetic
cacctcagcttttgaagtttg

SEQ ID NO: 27576 - DNA, 18 bp, Artificial Sequence
  Synthetic
tatggcctgagactgcac

SEQ ID NO: 27577 - DNA, 21 bp, Artificial Sequence
  Synthetic
ctttctaaaacatgcttgtgc

SEQ ID NO: 27578 - DNA, 23 bp, Artificial Sequence
  Synthetic
aaagcataatagtaagcaattgc

SEQ ID NO: 27579 - DNA, 25 bp, Artificial Sequence
  Synthetic
ccctgatacttaagtaaattagcaa

SEQ ID NO: 27580 - DNA, 19 bp, Artificial Sequence
  Synthetic
tcgtcgtcgttgtcctctt

SEQ ID NO: 27581 - DNA, 25 bp, Artificial Sequence
  Synthetic
ctccaacatttcaatttattagcac

SEQ ID NO: 27582 - DNA, 19 bp, Artificial Sequence
  Synthetic
agctgcacatcgatttgag

SEQ ID NO: 27583 - DNA, 19 bp, Artificial Sequence
  Synthetic
atcaccaacaactccatct

SEQ ID NO: 27584 - DNA, 20 bp, Artificial Sequence
  Synthetic
ttccctgagctttatgtacc

SEQ ID NO: 27585 - DNA, 18 bp, Artificial Sequence
  Synthetic
cctgaggaggtgaaggaa

SEQ ID NO: 27586 - DNA, 19 bp, Artificial Sequence
  Synthetic
gtttagtagtgcgacgctt

SEQ ID NO: 27587 - DNA, 18 bp, Artificial Sequence
  Synthetic
acgtttgtgtgcgatgtt

SEQ ID NO: 27588 - DNA, 21 bp, Artificial Sequence
  Synthetic
cagaagatgactcaaatgcct

SEQ ID NO: 27589 - DNA, 20 bp, Artificial Sequence
  Synthetic
ccatttgcctagcctgactt

SEQ ID NO: 27590 - DNA, 18 bp, Artificial Sequence
  Synthetic
agactcaggcactccttc

SEQ ID NO: 27591 - DNA, 24 bp, Artificial Sequence
  Synthetic
gttttagatctttctcgatcatgt

SEQ ID NO: 27592 - DNA, 21 bp, Artificial Sequence
  Synthetic
cttgtctgaaagcttccaatc

SEQ ID NO: 27593 - DNA, 23 bp, Artificial Sequence
  Synthetic
ccaagttcatcttctagtgttga

SEQ ID NO: 27594 - DNA, 18 bp, Artificial Sequence
  Synthetic
taggtcttcttgggggtc

SEQ ID NO: 27595 - DNA, 21 bp, Artificial Sequence
  Synthetic
gatcaatatcctccgtgttct

SEQ ID NO: 27596 - DNA, 19 bp, Artificial Sequence
  Synthetic
agttgtgtttgtctgttcg

SEQ ID NO: 27597 - DNA, 23 bp, Artificial Sequence
  Synthetic
gttgcatttgattcattgtatga

SEQ ID NO: 27598 - DNA, 22 bp, Artificial Sequence
  Synthetic
tctaaataccgagatccatgtt

SEQ ID NO: 27599 - DNA, 23 bp, Artificial Sequence
  Synthetic
cgtacaattcacgaagattactc

SEQ ID NO: 27600 - DNA, 25 bp, Artificial Sequence
  Synthetic
gtcctaagtttttgattatccctta

SEQ ID NO: 27601 - DNA, 19 bp, Artificial Sequence
  Synthetic
cccctccaaagaatcgttt

SEQ ID NO: 27602 - DNA, 18 bp, Artificial Sequence
  Synthetic
acatctgctccacctaga

SEQ ID NO: 27603 - DNA, 21 bp, Artificial Sequence
  Synthetic
tgtgtagaatgcaagagttcc

SEQ ID NO: 27604 - DNA, 21 bp, Artificial Sequence
  Synthetic
gagcttgttgttatgagtagc

SEQ ID NO: 27605 - DNA, 18 bp, Artificial Sequence
  Synthetic
cacagccatcaacagtcg

SEQ ID NO: 27606 - DNA, 21 bp, Artificial Sequence
  Synthetic
gactataagatgcctgattgc

SEQ ID NO: 27607 - DNA, 18 bp, Artificial Sequence
  Synthetic
ccagctgagagtgttctg

SEQ ID NO: 27608 - DNA, 23 bp, Artificial Sequence
  Synthetic
aattgtcaaatcctcatctaact

SEQ ID NO: 27609 - DNA, 23 bp, Artificial Sequence
  Synthetic
tgaataaccattctcaattgctt

SEQ ID NO: 27610 - DNA, 19 bp, Artificial Sequence
  Synthetic
atgcagcaactgatggatc

SEQ ID NO: 27611 - DNA, 22 bp, Artificial Sequence
  Synthetic
ttctgatcctgttattaccacc

SEQ ID NO: 27612 - DNA, 24 bp, Artificial Sequence
  Synthetic
ttgcagtatcttttaatctgtgtg

SEQ ID NO: 27613 - DNA, 18 bp, Artificial Sequence
  Synthetic
aatctcgtgacggaacac

SEQ ID NO: 27614 - DNA, 20 bp, Artificial Sequence
  Synthetic
tgcagacccataacatatgt

SEQ ID NO: 27615 - DNA, 23 bp, Artificial Sequence
  Synthetic
accatgcacatattcaatctctt

SEQ ID NO: 27616 - DNA, 19 bp, Artificial Sequence
  Synthetic
actgatcacgttgcaacaa

SEQ ID NO: 27617 - DNA, 18 bp, Artificial Sequence
  Synthetic
tttcagcacccaacatgg

SEQ ID NO: 27618 - DNA, 19 bp, Artificial Sequence
  Synthetic
aagcgcattatcaagcaaa

SEQ ID NO: 27619 - DNA, 19 bp, Artificial Sequence
  Synthetic
acatcgccaattacaacag

SEQ ID NO: 27620 - DNA, 20 bp, Artificial Sequence
  Synthetic
ttagactctgcagctttcac

SEQ ID NO: 27621 - DNA, 23 bp, Artificial Sequence
  Synthetic
acaatgtaaggtttatcaaaagc

SEQ ID NO: 27622 - DNA, 23 bp, Artificial Sequence
  Synthetic
ttcttataaaagacgtgctcatc

SEQ ID NO: 27623 - DNA, 21 bp, Artificial Sequence
  Synthetic
cgccttcttcatcataaatgt

SEQ ID NO: 27624 - DNA, 20 bp, Artificial Sequence
  Synthetic
cgtatacattgctcagcagt

SEQ ID NO: 27625 - DNA, 21 bp, Artificial Sequence
  Synthetic
aactgcctaattgtacacatg

SEQ ID NO: 27626 - DNA, 22 bp, Artificial Sequence
  Synthetic
gtcaacaccattaacaacagta

SEQ ID NO: 27627 - DNA, 21 bp, Artificial Sequence
  Synthetic
acacacaacaagtcttctgta

SEQ ID NO: 27628 - DNA, 25 bp, Artificial Sequence
  Synthetic
cctacaaaagaaacattacaagtca

SEQ ID NO: 27629 - DNA, 21 bp, Artificial Sequence
  Synthetic
ccattaacaacagcactttca

SEQ ID NO: 27630 - DNA, 19 bp, Artificial Sequence
  Synthetic
agcaacaccactcaaaagt

SEQ ID NO: 27631 - DNA, 22 bp, Artificial Sequence
  Synthetic
gcaaaactactgagtacaatgt

SEQ ID NO: 27632 - DNA, 21 bp, Artificial Sequence
  Synthetic
tgacaatgaaaggttgcatat

SEQ ID NO: 27633 - DNA, 22 bp, Artificial Sequence
  Synthetic
acaaaacttactaccaccattt

SEQ ID NO: 27634 - DNA, 18 bp, Artificial Sequence
  Synthetic
tacaacacgccaagtcat

SEQ ID NO: 27635 - DNA, 20 bp, Artificial Sequence
  Synthetic
atcaaacacacaagaccaca

SEQ ID NO: 27636 - DNA, 19 bp, Artificial Sequence
  Synthetic
caggtgttgtgactccaaa

SEQ ID NO: 27637 - DNA, 18 bp, Artificial Sequence
  Synthetic
aacgtaaccattggcaac

SEQ ID NO: 27638 - DNA, 21 bp, Artificial Sequence
  Synthetic
tcagcaaactaggtaacaaac

SEQ ID NO: 27639 - DNA, 18 bp, Artificial Sequence
  Synthetic
atagcagacacggacaac

SEQ ID NO: 27640 - DNA, 19 bp, Artificial Sequence
  Synthetic
tgttcacaccaaaaacacc

SEQ ID NO: 27641 - DNA, 22 bp, Artificial Sequence
  Synthetic
tcattataatgctccacaaaca

SEQ ID NO: 27642 - DNA, 23 bp, Artificial Sequence
  Synthetic
aaatgtaagacagagtgacaaag

SEQ ID NO: 27643 - DNA, 20 bp, Artificial Sequence
  Synthetic
accagcaaactaacgtagtc

SEQ ID NO: 27644 - DNA, 22 bp, Artificial Sequence
  Synthetic
agtttaaaagacagaaagagcg

SEQ ID NO: 27645 - DNA, 19 bp, Artificial Sequence
  Synthetic
aagaaaaaggccaacaacg

SEQ ID NO: 27646 - DNA, 19 bp, Artificial Sequence
  Synthetic
tgcatggcactaacaactt

SEQ ID NO: 27647 - DNA, 18 bp, Artificial Sequence
  Synthetic
acgacacgttcacaagtc

SEQ ID NO: 27648 - DNA, 22 bp, Artificial Sequence
  Synthetic
agatacttaatttggggtccag

SEQ ID NO: 27649 - DNA, 19 bp, Artificial Sequence
  Synthetic
tcctgcgtagtgttggaat

SEQ ID NO: 27650 - DNA, 20 bp, Artificial Sequence
  Synthetic
aatgcacggacacagtaatc

SEQ ID NO: 27651 - DNA, 20 bp, Artificial Sequence
  Synthetic
tctatggggtcaaaccaatt

SEQ ID NO: 27652 - DNA, 24 bp, Artificial Sequence
  Synthetic
aagatgtcacttttcataaagcac

SEQ ID NO: 27653 - DNA, 22 bp, Artificial Sequence
  Synthetic
tgttaacatctttgttccacac

SEQ ID NO: 27654 - DNA, 18 bp, Artificial Sequence
  Synthetic
attgcagcatcacccttt

SEQ ID NO: 27655 - DNA, 20 bp, Artificial Sequence
  Synthetic
gccataaaacttggtagtgc

SEQ ID NO: 27656 - DNA, 20 bp, Artificial Sequence
  Synthetic
agatcttcctcagtccaaca

SEQ ID NO: 27657 - DNA, 21 bp, Artificial Sequence
  Synthetic
agatgtttgacccagtctaac

SEQ ID NO: 27658 - DNA, 19 bp, Artificial Sequence
  Synthetic
gcgaatgtcagaccaatca

SEQ ID NO: 27659 - DNA, 22 bp, Artificial Sequence
  Synthetic
agcaacattatgagaagtcaaa

SEQ ID NO: 27660 - DNA, 18 bp, Artificial Sequence
  Synthetic
aacactcaactctggcac

SEQ ID NO: 27661 - DNA, 23 bp, Artificial Sequence
  Synthetic
caacattatagtcaattggttcc

SEQ ID NO: 27662 - DNA, 25 bp, Artificial Sequence
  Synthetic
gcgaatataacatagtcatattcac

SEQ ID NO: 27663 - DNA, 22 bp, Artificial Sequence
  Synthetic
cacatgttcataggtacaaaca

SEQ ID NO: 27664 - DNA, 20 bp, Artificial Sequence
  Synthetic
gttagaacacaaccttcagg

SEQ ID NO: 27665 - DNA, 22 bp, Artificial Sequence
  Synthetic
caatgcatgtttaaagcaacaa

SEQ ID NO: 27666 - DNA, 21 bp, Artificial Sequence
  Synthetic
gattgctttagggttgtacaa

SEQ ID NO: 27667 - DNA, 18 bp, Artificial Sequence
  Synthetic
aacggtgctggtttcaat

SEQ ID NO: 27668 - DNA, 22 bp, Artificial Sequence
  Synthetic
ctaatggctactggtaattcac

SEQ ID NO: 27669 - DNA, 21 bp, Artificial Sequence
  Synthetic
cagagtaaaacgttcgtatga

SEQ ID NO: 27670 - DNA, 20 bp, Artificial Sequence
  Synthetic
cacgcctatatccatgttca

SEQ ID NO: 27671 - DNA, 23 bp, Artificial Sequence
  Synthetic
gcattatctttacaccatagcat

SEQ ID NO: 27672 - DNA, 18 bp, Artificial Sequence
  Synthetic
aacaacaattgcgtcgtg

SEQ ID NO: 27673 - DNA, 25 bp, Artificial Sequence
  Synthetic
gtgtttgcaattaaatttactcagg

SEQ ID NO: 27674 - DNA, 23 bp, Artificial Sequence
  Synthetic
aggaaccaattattgaatgcaaa

SEQ ID NO: 27675 - DNA, 18 bp, Artificial Sequence
  Synthetic
aatgtcctgtgcgtgaaa

SEQ ID NO: 27676 - DNA, 20 bp, Artificial Sequence
  Synthetic
taacagttaaagcacttgcc

SEQ ID NO: 27677 - DNA, 21 bp, Artificial Sequence
  Synthetic
cagcttgctgataaacaacaa

SEQ ID NO: 27678 - DNA, 18 bp, Artificial Sequence
  Synthetic
ctcaacctggaccgaagt

SEQ ID NO: 27679 - DNA, 18 bp, Artificial Sequence
  Synthetic
cttctatggcactgcgac

SEQ ID NO: 27680 - DNA, 22 bp, Artificial Sequence
  Synthetic
tgttaaaagatgcagcaagaat

SEQ ID NO: 27681 - DNA, 18 bp, Artificial Sequence
  Synthetic
ttgttgtgcaagctgtct

SEQ ID NO: 27682 - DNA, 23 bp, Artificial Sequence
  Synthetic
gtgacattgcaattttcaatttg

SEQ ID NO: 27683 - DNA, 20 bp, Artificial Sequence
  Synthetic
agccactttaagtcgactaa

SEQ ID NO: 27684 - DNA, 21 bp, Artificial Sequence
  Synthetic
gcattgctaagcgattgatta

SEQ ID NO: 27685 - DNA, 21 bp, Artificial Sequence
  Synthetic
gtgtggttacattgaagacaa

SEQ ID NO: 27686 - DNA, 23 bp, Artificial Sequence
  Synthetic
atatgattggtaaatgtggtaca

SEQ ID NO: 27687 - DNA, 19 bp, Artificial Sequence
  Synthetic
taacgagtgttgatacggc

SEQ ID NO: 27688 - DNA, 21 bp, Artificial Sequence
  Synthetic
ctttcgttttctgtcatgttg

SEQ ID NO: 27689 - DNA, 19 bp, Artificial Sequence
  Synthetic
ggtcctgtgccaagataat

SEQ ID NO: 27690 - DNA, 20 bp, Artificial Sequence
  Synthetic
tacgagaaggcttaggagta

SEQ ID NO: 27691 - DNA, 21 bp, Artificial Sequence
  Synthetic
tttagctttaacaccattggc

SEQ ID NO: 27692 - DNA, 23 bp, Artificial Sequence
  Synthetic
gcatgtttagtttacttcatcaa

SEQ ID NO: 27693 - DNA, 21 bp, Artificial Sequence
  Synthetic
tgcgatctttgattactccag

SEQ ID NO: 27694 - DNA, 21 bp, Artificial Sequence
  Synthetic
aagtagccaaatacctaggac

SEQ ID NO: 27695 - DNA, 18 bp, Artificial Sequence
  Synthetic
cacacttagcagctgact

SEQ ID NO: 27696 - DNA, 19 bp, Artificial Sequence
  Synthetic
tgcaaaatgtccaggcact

SEQ ID NO: 27697 - DNA, 21 bp, Artificial Sequence
  Synthetic
attgcaccataggagctaatt

SEQ ID NO: 27698 - DNA, 24 bp, Artificial Sequence
  Synthetic
attaattagctttttccagtctcc

SEQ ID NO: 27699 - DNA, 21 bp, Artificial Sequence
  Synthetic
aggtcttctgaatcttggtaa

SEQ ID NO: 27700 - DNA, 22 bp, Artificial Sequence
  Synthetic
gtgtgttagatggtccttttac

SEQ ID NO: 27701 - DNA, 18 bp, Artificial Sequence
  Synthetic
acatacccagaggaaccc

SEQ ID NO: 27702 - DNA, 20 bp, Artificial Sequence
  Synthetic
gcagagggtctacaggtaca

SEQ ID NO: 27703 - DNA, 25 bp, Artificial Sequence
  Synthetic
tatccaaaggtatagattcaccaat

SEQ ID NO: 27704 - DNA, 18 bp, Artificial Sequence
  Synthetic
gcagcagcagcaagtgta

SEQ ID NO: 27705 - DNA, 21 bp, Artificial Sequence
  Synthetic
gtttaccaccagtagaggtta

SEQ ID NO: 27706 - DNA, 20 bp, Artificial Sequence
  Synthetic
cacgtaatcatctgtaggca

SEQ ID NO: 27707 - DNA, 19 bp, Artificial Sequence
  Synthetic
gtagacccaacacctaacg

SEQ ID NO: 27708 - DNA, 23 bp, Artificial Sequence
  Synthetic
gactccccaggaataatatatgt

SEQ ID NO: 27709 - DNA, 18 bp, Artificial Sequence
  Synthetic
tttccttagggggctctg

SEQ ID NO: 27710 - DNA, 20 bp, Artificial Sequence
  Synthetic
attgatggcctggaactgac

SEQ ID NO: 27711 - DNA, 17 bp, Artificial Sequence
  Synthetic
tgaccctgtccgtgtgc

SEQ ID NO: 27712 - DNA, 20 bp, Artificial Sequence
  Synthetic
gatccaggtgtagatgcagg

SEQ ID NO: 27713 - DNA, 19 bp, Artificial Sequence
  Synthetic
cgctcctccacctcaaaca

SEQ ID NO: 27714 - DNA, 20 bp, Artificial Sequence
  Synthetic
ggcaaaggatgaccaggttc

SEQ ID NO: 27715 - DNA, 20 bp, Artificial Sequence
  Synthetic
gcaaaacatatggcatcccg

SEQ ID NO: 27716 - DNA, 22 bp, Artificial Sequence
  Synthetic
atgatagaattccaggaggttt

SEQ ID NO: 27717 - DNA, 16 bp, Artificial Sequence
  Synthetic
aagtttgggggcgccc

SEQ ID NO: 27718 - DNA, 19 bp, Artificial Sequence
  Synthetic
ggtggagtgttgggcttag

SEQ ID NO: 27719 - DNA, 19 bp, Artificial Sequence
  Synthetic
tacccctgaaggtgaaccg

SEQ ID NO: 27720 - DNA, 16 bp, Artificial Sequence
  Synthetic
agagaagggccggtgg

SEQ ID NO: 27721 - DNA, 20 bp, Artificial Sequence
  Synthetic
taccacctcctcttcttgct

SEQ ID NO: 27722 - DNA, 20 bp, Artificial Sequence
  Synthetic
ccactttataccaggggcag

SEQ ID NO: 27723 - DNA, 19 bp, Artificial Sequence
  Synthetic
ggacccttctacggactcg

SEQ ID NO: 27724 - DNA, 20 bp, Artificial Sequence
  Synthetic
ggaaatgcataggagtgcga

SEQ ID NO: 27725 - DNA, 16 bp, Artificial Sequence
  Synthetic
ccttcttccacggcgc

SEQ ID NO: 27726 - DNA, 16 bp, Artificial Sequence
  Synthetic
tccacacccaccaccg

SEQ ID NO: 27727 - DNA, 16 bp, Artificial Sequence
  Synthetic
atcgagctcgctggcg

SEQ ID NO: 27728 - DNA, 18 bp, Artificial Sequence
  Synthetic
catcactctcccaggccc

SEQ ID NO: 27729 - DNA, 20 bp, Artificial Sequence
  Synthetic
tccttctacgagcacgaaga

SEQ ID NO: 27730 - DNA, 19 bp, Artificial Sequence
  Synthetic
aacgctgcaggatctggtc

SEQ ID NO: 27731 - DNA, 17 bp, Artificial Sequence
  Synthetic
aagtcgagggcatggcc

SEQ ID NO: 27732 - DNA, 20 bp, Artificial Sequence
  Synthetic
gccgctatgctattgggaat

SEQ ID NO: 27733 - DNA, 18 bp, Artificial Sequence
  Synthetic
agagtatggggcccctcc

SEQ ID NO: 27734 - DNA, 19 bp, Artificial Sequence
  Synthetic
aggaggagaacccgaggat

SEQ ID NO: 27735 - DNA, 17 bp, Artificial Sequence
  Synthetic
aaaaccatcccccggcc

SEQ ID NO: 27736 - DNA, 16 bp, Artificial Sequence
  Synthetic
tttgctcgcacggccc

SEQ ID NO: 27737 - DNA, 18 bp, Artificial Sequence
  Synthetic
cagatccctctggcgacg

SEQ ID NO: 27738 - DNA, 20 bp, Artificial Sequence
  Synthetic
acctccctcttttcactcct

SEQ ID NO: 27739 - DNA, 18 bp, Artificial Sequence
  Synthetic
tactgccggtccctgagg

SEQ ID NO: 27740 - DNA, 18 bp, Artificial Sequence
  Synthetic
agagcctctccaggtccc

SEQ ID NO: 27741 - DNA, 15 bp, Artificial Sequence
  Synthetic
gcaggtcgcgccaaa

SEQ ID NO: 27742 - DNA, 17 bp, Artificial Sequence
  Synthetic
tcatccccctgcgtgtc

SEQ ID NO: 27743 - DNA, 17 bp, Artificial Sequence
  Synthetic
ctaacggccggaatgcg

SEQ ID NO: 27744 - DNA, 17 bp, Artificial Sequence
  Synthetic
cctcgcgagctgaacag

SEQ ID NO: 27745 - DNA, 20 bp, Artificial Sequence
  Synthetic
tgatagagggacatctgggc

SEQ ID NO: 27746 - DNA, 17 bp, Artificial Sequence
  Synthetic
gcgcacctacttcaccc

SEQ ID NO: 27747 - DNA, 16 bp, Artificial Sequence
  Synthetic
tgccatcctctcgcgg

SEQ ID NO: 27748 - DNA, 18 bp, Artificial Sequence
  Synthetic
cctccagaatcagcggcg

SEQ ID NO: 27749 - DNA, 20 bp, Artificial Sequence
  Synthetic
aacaagaccaccatcctgct

SEQ ID NO: 27750 - DNA, 20 bp, Artificial Sequence
  Synthetic
ctggtcaaagaaggcgagaa

SEQ ID NO: 27751 - DNA, 20 bp, Artificial Sequence
  Synthetic
ggtttaacgagcagagaaga

SEQ ID NO: 27752 - DNA, 20 bp, Artificial Sequence
  Synthetic
ccgtcgctaaaaacacctgg

SEQ ID NO: 27753 - DNA, 19 bp, Artificial Sequence
  Synthetic
tttgacctgtgcctcagca

SEQ ID NO: 27754 - DNA, 17 bp, Artificial Sequence
  Synthetic
tgaacaggccactcggg

SEQ ID NO: 27755 - DNA, 18 bp, Artificial Sequence
  Synthetic
tacgttgttgcatgccgc

SEQ ID NO: 27756 - DNA, 16 bp, Artificial Sequence
  Synthetic
tcgcaggggcattggc

SEQ ID NO: 27757 - DNA, 20 bp, Artificial Sequence
  Synthetic
gagtccggacagtttcatgc

SEQ ID NO: 27758 - DNA, 20 bp, Artificial Sequence
  Synthetic
tttcctccagaaagagtgac

SEQ ID NO: 27759 - DNA, 17 bp, Artificial Sequence
  Synthetic
gcaaggatcccatgccc

SEQ ID NO: 27760 - DNA, 20 bp, Artificial Sequence
  Synthetic
ggtagatggcgagactcttg

SEQ ID NO: 27761 - DNA, 20 bp, Artificial Sequence
  Synthetic
atctacgcttttagccacgg

SEQ ID NO: 27762 - DNA, 16 bp, Artificial Sequence
  Synthetic
gcgaaccaagcccagg

SEQ ID NO: 27763 - DNA, 19 bp, Artificial Sequence
  Synthetic
agacactccgagcctactg

SEQ ID NO: 27764 - DNA, 18 bp, Artificial Sequence
  Synthetic
ttctggtagaggcgctgc

SEQ ID NO: 27765 - DNA, 18 bp, Artificial Sequence
  Synthetic
aacttccagcaccaggcg

SEQ ID NO: 27766 - DNA, 18 bp, Artificial Sequence
  Synthetic
tcgacctggtcctcggag

SEQ ID NO: 27767 - DNA, 16 bp, Artificial Sequence
  Synthetic
tcttgagccggctggg

SEQ ID NO: 27768 - DNA, 20 bp, Artificial Sequence
  Synthetic
tcttccagcctctctttcca

SEQ ID NO: 27769 - DNA, 18 bp, Artificial Sequence
  Synthetic
acaagcgttttgacccac

SEQ ID NO: 27770 - DNA, 18 bp, Artificial Sequence
  Synthetic
gacctgcttctggacgcc

SEQ ID NO: 27771 - DNA, 19 bp, Artificial Sequence
  Synthetic
tggtatcatgcacctcgct

SEQ ID NO: 27772 - DNA, 18 bp, Artificial Sequence
  Synthetic
cttctacggccccaggtc

SEQ ID NO: 27773 - DNA, 16 bp, Artificial Sequence
  Synthetic
cggctactcgggggtt

SEQ ID NO: 27774 - DNA, 19 bp, Artificial Sequence
  Synthetic
ctcaagggggtcagtacct

SEQ ID NO: 27775 - DNA, 16 bp, Artificial Sequence
  Synthetic
ttcgctcttggccggg

SEQ ID NO: 27776 - DNA, 19 bp, Artificial Sequence
  Synthetic
acattttccccaggcagtc

SEQ ID NO: 27777 - DNA, 19 bp, Artificial Sequence
  Synthetic
tgtcgcccgatgtcgtaaa

SEQ ID NO: 27778 - DNA, 19 bp, Artificial Sequence
  Synthetic
ttcactatctgctgctgac

SEQ ID NO: 27779 - DNA, 20 bp, Artificial Sequence
  Synthetic
cgatttgacctcacacgaga

SEQ ID NO: 27780 - DNA, 18 bp, Artificial Sequence
  Synthetic
gtggtgctacgcgagttg

SEQ ID NO: 27781 - DNA, 20 bp, Artificial Sequence
  Synthetic
gggtcacctgactactgaga

SEQ ID NO: 27782 - DNA, 19 bp, Artificial Sequence
  Synthetic
tctcttcgaacacctggcc

SEQ ID NO: 27783 - DNA, 20 bp, Artificial Sequence
  Synthetic
gcagcctatttttgagcacc

SEQ ID NO: 27784 - DNA, 17 bp, Artificial Sequence
  Synthetic
catgtgtgtgggcgcag

SEQ ID NO: 27785 - DNA, 17 bp, Artificial Sequence
  Synthetic
cgtgagtggcaagggct

SEQ ID NO: 27786 - DNA, 19 bp, Artificial Sequence
  Synthetic
gcggcctgtttctaaacgt

SEQ ID NO: 27787 - DNA, 20 bp, Artificial Sequence
  Synthetic
ccagatcttcctcagtggct

SEQ ID NO: 27788 - DNA, 17 bp, Artificial Sequence
  Synthetic
acgagcgggatagcagg

SEQ ID NO: 27789 - DNA, 17 bp, Artificial Sequence
  Synthetic
tccgtgaaggcagggtc

SEQ ID NO: 27790 - DNA, 16 bp, Artificial Sequence
  Synthetic
ttgccgatgccctggc

SEQ ID NO: 27791 - DNA, 17 bp, Artificial Sequence
  Synthetic
aagaagctgctggcggc

SEQ ID NO: 27792 - DNA, 17 bp, Artificial Sequence
  Synthetic
tcttgcgggccaacacc

SEQ ID NO: 27793 - DNA, 16 bp, Artificial Sequence
  Synthetic
acggccaccaacgagg

SEQ ID NO: 27794 - DNA, 17 bp, Artificial Sequence
  Synthetic
gccaagctgcagtcctg

SEQ ID NO: 27795 - DNA, 17 bp, Artificial Sequence
  Synthetic
cgctttcggggcgtaag

SEQ ID NO: 27796 - DNA, 19 bp, Artificial Sequence
  Synthetic
actggcagctgaaccagaa

SEQ ID NO: 27797 - DNA, 16 bp, Artificial Sequence
  Synthetic
ccggccagcctcaact

SEQ ID NO: 27798 - DNA, 19 bp, Artificial Sequence
  Synthetic
tgcacagactagcgaggat

SEQ ID NO: 27799 - DNA, 18 bp, Artificial Sequence
  Synthetic
cggtgttcacccgggatg

SEQ ID NO: 27800 - DNA, 18 bp, Artificial Sequence
  Synthetic
atatccgccgtctgctgc

SEQ ID NO: 27801 - DNA, 19 bp, Artificial Sequence
  Synthetic
ctgctaactcttgcaaaca

SEQ ID NO: 27802 - DNA, 20 bp, Artificial Sequence
  Synthetic
ctctataagggctatgctcc

SEQ ID NO: 27803 - DNA, 22 bp, Artificial Sequence
  Synthetic
aaacaatcgtcttttgctttgt

SEQ ID NO: 27804 - DNA, 21 bp, Artificial Sequence
  Synthetic
gctgactcatgactaagcata

SEQ ID NO: 27805 - DNA, 19 bp, Artificial Sequence
  Synthetic
agtgcatcgaaacgaactg

SEQ ID NO: 27806 - DNA, 18 bp, Artificial Sequence
  Synthetic
ggaggaactgactgatcc

SEQ ID NO: 27807 - DNA, 23 bp, Artificial Sequence
  Synthetic
ggggtaatttctgatagaggtac

SEQ ID NO: 27808 - DNA, 18 bp, Artificial Sequence
  Synthetic
ctgaatgtgacgcccata

SEQ ID NO: 27809 - DNA, 23 bp, Artificial Sequence
  Synthetic
tttcatcgtctacagtatccatt

SEQ ID NO: 27810 - DNA, 18 bp, Artificial Sequence
  Synthetic
ggccaaagagctgtttca

SEQ ID NO: 27811 - DNA, 25 bp, Artificial Sequence
  Synthetic
gtcatatctatttcccaaaatgtgt

SEQ ID NO: 27812 - DNA, 19 bp, Artificial Sequence
  Synthetic
aaacggttggtgaatgtcc

SEQ ID NO: 27813 - DNA, 20 bp, Artificial Sequence
  Synthetic
aggttaacagagtgtgtcac

SEQ ID NO: 27814 - DNA, 23 bp, Artificial Sequence
  Synthetic
ttctttgggaaatatttcgaatc

SEQ ID NO: 27815 - DNA, 25 bp, Artificial Sequence
  Synthetic
attctgatagatattctgttgatcc

SEQ ID NO: 27816 - DNA, 21 bp, Artificial Sequence
  Synthetic
tgttacactcatgcattgatg

SEQ ID NO: 27817 - DNA, 21 bp, Artificial Sequence
  Synthetic
ccctgttcattctgatgatga

SEQ ID NO: 27818 - DNA, 18 bp, Artificial Sequence
  Synthetic
gaaactgattgcccccag

SEQ ID NO: 27819 - DNA, 21 bp, Artificial Sequence
  Synthetic
gcggtcatatgaaaatgtgta

SEQ ID NO: 27820 - DNA, 21 bp, Artificial Sequence
  Synthetic
tcttttccaactacagcaaat

SEQ ID NO: 27821 - DNA, 21 bp, Artificial Sequence
  Synthetic
ccacctctggtatagtagctt

SEQ ID NO: 27822 - DNA, 25 bp, Artificial Sequence
  Synthetic
ctacagcattctttaggatctaatt

SEQ ID NO: 27823 - DNA, 19 bp, Artificial Sequence
  Synthetic
gcaattgtgtttgttgctc

SEQ ID NO: 27824 - DNA, 20 bp, Artificial Sequence
  Synthetic
acagctttcacattgctatg

SEQ ID NO: 27825 - DNA, 20 bp, Artificial Sequence
  Synthetic
acttcagatacttgcagcaa

SEQ ID NO: 27826 - DNA, 20 bp, Artificial Sequence
  Synthetic
gtaaaaaagccctggcatta

SEQ ID NO: 27827 - DNA, 19 bp, Artificial Sequence
  Synthetic
gctgagagtttccatcctc

SEQ ID NO: 27828 - DNA, 22 bp, Artificial Sequence
  Synthetic
gcaatagtaaaaccatgccaat

SEQ ID NO: 27829 - DNA, 20 bp, Artificial Sequence
  Synthetic
gggatgatgtcctggatcct

SEQ ID NO: 27830 - DNA, 16 bp, Artificial Sequence
  Synthetic
ggagtgggagcgggaa

SEQ ID NO: 27831 - DNA, 18 bp, Artificial Sequence
  Synthetic
aatcattcgcgctcttcc

SEQ ID NO: 27832 - DNA, 18 bp, Artificial Sequence
  Synthetic
gtggacatgtaccagcag

SEQ ID NO: 27833 - DNA, 20 bp, Artificial Sequence
  Synthetic
gggtcaattggtctgactgt

SEQ ID NO: 27834 - DNA, 18 bp, Artificial Sequence
  Synthetic
attgagttcgtgcaacac

SEQ ID NO: 27835 - DNA, 18 bp, Artificial Sequence
  Synthetic
tacgtgtgcggattgttg

SEQ ID NO: 27836 - DNA, 25 bp, Artificial Sequence
  Synthetic
gaattaaaatccacatcttcaacag

SEQ ID NO: 27837 - DNA, 21 bp, Artificial Sequence
  Synthetic
agacactttagggacttcaat

SEQ ID NO: 27838 - DNA, 20 bp, Artificial Sequence
  Synthetic
gatgtgttttgcctgtcatc

SEQ ID NO: 27839 - DNA, 24 bp, Artificial Sequence
  Synthetic
gttactaatgacccacttactgta

SEQ ID NO: 27840 - DNA, 19 bp, Artificial Sequence
  Synthetic
cttggattttcgtgtcctc

SEQ ID NO: 27841 - DNA, 21 bp, Artificial Sequence
  Synthetic
gtcccaggatatattcgtctc

SEQ ID NO: 27842 - DNA, 18 bp, Artificial Sequence
  Synthetic
tgtcctatgagcgctgat

SEQ ID NO: 27843 - DNA, 21 bp, Artificial Sequence
  Synthetic
agatttcttcttacccttggg

SEQ ID NO: 27844 - DNA, 20 bp, Artificial Sequence
  Synthetic
gaatgctcaaatcaaaggcg

SEQ ID NO: 27845 - DNA, 23 bp, Artificial Sequence
  Synthetic
tactctgaaatggattcttgatg

SEQ ID NO: 27846 - DNA, 22 bp, Artificial Sequence
  Synthetic
tagacatgaagtatgcagagac

SEQ ID NO: 27847 - DNA, 20 bp, Artificial Sequence
  Synthetic
aagcgatacgactatctagc

SEQ ID NO: 27848 - DNA, 22 bp, Artificial Sequence
  Synthetic
ccatattcaaagcctaaaacgg

SEQ ID NO: 27849 - DNA, 23 bp, Artificial Sequence
  Synthetic
cttttttctggatcaaaacgttc

SEQ ID NO: 27850 - DNA, 22 bp, Artificial Sequence
  Synthetic
actctctccatgatctttcaag

SEQ ID NO: 27851 - DNA, 22 bp, Artificial Sequence
  Synthetic
cgattcttttctcgttcaatga

SEQ ID NO: 27852 - DNA, 24 bp, Artificial Sequence
  Synthetic
tgattatctaattcaaacagctcc

SEQ ID NO: 27853 - DNA, 20 bp, Artificial Sequence
  Synthetic
caggcgttatggttatgcta

SEQ ID NO: 27854 - DNA, 21 bp, Artificial Sequence
  Synthetic
acaaaacaatcacaacagctc

SEQ ID NO: 27855 - DNA, 20 bp, Artificial Sequence
  Synthetic
aagagagctcagatctgtgt

SEQ ID NO: 27856 - DNA, 18 bp, Artificial Sequence
  Synthetic
acaggagacaatggcaac

SEQ ID NO: 27857 - DNA, 19 bp, Artificial Sequence
  Synthetic
ccattattccacccccatc

SEQ ID NO: 27858 - DNA, 21 bp, Artificial Sequence
  Synthetic
gttggtaaaggatgtctgatg

SEQ ID NO: 27859 - DNA, 23 bp, Artificial Sequence
  Synthetic
gtatgagactgatagatgtttgt

SEQ ID NO: 27860 - DNA, 25 bp, Artificial Sequence
  Synthetic
ctctagatccttaaatagagcattt

SEQ ID NO: 27861 - DNA, 21 bp, Artificial Sequence
  Synthetic
ctctgctatcgaaaaggtttc

SEQ ID NO: 27862 - DNA, 19 bp, Artificial Sequence
  Synthetic
gagttcgaggtgtttctct

SEQ ID NO: 27863 - DNA, 20 bp, Artificial Sequence
  Synthetic
tggtttatgaagtggtggat

SEQ ID NO: 27864 - DNA, 21 bp, Artificial Sequence
  Synthetic
ttgttgcttataagaaggctg

SEQ ID NO: 27865 - DNA, 21 bp, Artificial Sequence
  Synthetic
tacttctcccagactgttctt

SEQ ID NO: 27866 - DNA, 21 bp, Artificial Sequence
  Synthetic
tcgatattacggagacaaaga

SEQ ID NO: 27867 - DNA, 21 bp, Artificial Sequence
  Synthetic
acgaactcatagactagggat

SEQ ID NO: 27868 - DNA, 20 bp, Artificial Sequence
  Synthetic
cttgtggttcagtaggagaa

SEQ ID NO: 27869 - DNA, 18 bp, Artificial Sequence
  Synthetic
gaacccctacatccatgc

SEQ ID NO: 27870 - DNA, 20 bp, Artificial Sequence
  Synthetic
ataccataaacagcctcagt

SEQ ID NO: 27871 - DNA, 23 bp, Artificial Sequence
  Synthetic
ccacaaaccaaaaccttctatag

SEQ ID NO: 27872 - DNA, 18 bp, Artificial Sequence
  Synthetic
taaccgcgaatcccatag

SEQ ID NO: 27873 - DNA, 19 bp, Artificial Sequence
  Synthetic
ttgggttcttctgagctag

SEQ ID NO: 27874 - DNA, 24 bp, Artificial Sequence
  Synthetic
catactaagttgtccattgttgat

SEQ ID NO: 27875 - DNA, 21 bp, Artificial Sequence
  Synthetic
aaacttcaataaacgaaagcg

SEQ ID NO: 27876 - DNA, 20 bp, Artificial Sequence
  Synthetic
acggtaaaagaaggtcgttt

SEQ ID NO: 27877 - DNA, 20 bp, Artificial Sequence
  Synthetic
ctgagagagattgtggtact

SEQ ID NO: 27878 - DNA, 23 bp, Artificial Sequence
  Synthetic
ttaaaaaacacttgttggagaga

SEQ ID NO: 27879 - DNA, 20 bp, Artificial Sequence
  Synthetic
tggttcggtttctttacctc

SEQ ID NO: 27880 - DNA, 18 bp, Artificial Sequence
  Synthetic
aagaagaaggtggacgac

SEQ ID NO: 27881 - DNA, 21 bp, Artificial Sequence
  Synthetic
gttactggggttgaaatgttc

SEQ ID NO: 27882 - DNA, 21 bp, Artificial Sequence
  Synthetic
atagagttgtacaagcgattg

SEQ ID NO: 27883 - DNA, 21 bp, Artificial Sequence
  Synthetic
tcctccaactaaaagaccatt

SEQ ID NO: 27884 - DNA, 25 bp, Artificial Sequence
  Synthetic
cgttttatttttatagcggacttct

SEQ ID NO: 27885 - DNA, 18 bp, Artificial Sequence
  Synthetic
taaggatggccgattcgt

SEQ ID NO: 27886 - DNA, 22 bp, Artificial Sequence
  Synthetic
ctgatacaccagaaatagtcga

SEQ ID NO: 27887 - DNA, 19 bp, Artificial Sequence
  Synthetic
aggacttggagaagctttc

SEQ ID NO: 27888 - DNA, 18 bp, Artificial Sequence
  Synthetic
agttcacgagcagtttgc

SEQ ID NO: 27889 - DNA, 18 bp, Artificial Sequence
  Synthetic
gcgctcatttcttggttg

SEQ ID NO: 27890 - DNA, 21 bp, Artificial Sequence
  Synthetic
cttgaagcttttggtacagta

SEQ ID NO: 27891 - DNA, 18 bp, Artificial Sequence
  Synthetic
gtcggagatactgggagg

SEQ ID NO: 27892 - DNA, 18 bp, Artificial Sequence
  Synthetic
agcaattgtggctatcgc

SEQ ID NO: 27893 - DNA, 22 bp, Artificial Sequence
  Synthetic
atctgtatcaaaaaaaggcagc

SEQ ID NO: 27894 - DNA, 23 bp, Artificial Sequence
  Synthetic
cttttttatggttttgtctgtgc

SEQ ID NO: 27895 - DNA, 20 bp, Artificial Sequence
  Synthetic
gtaacgacatcattgcatga

SEQ ID NO: 27896 - DNA, 18 bp, Artificial Sequence
  Synthetic
gggatttggcgaagaaga

SEQ ID NO: 27897 - DNA, 18 bp, Artificial Sequence
  Synthetic
gatcgtgtgtgtcgtgat

SEQ ID NO: 27898 - DNA, 22 bp, Artificial Sequence
  Synthetic
caaaattttcgcaaaagcatac

SEQ ID NO: 27899 - DNA, 25 bp, Artificial Sequence
  Synthetic
ctttagagaaagtcataaatacgga

SEQ ID NO: 27900 - DNA, 20 bp, Artificial Sequence
  Synthetic
gctttagttgtggcttcaac

SEQ ID NO: 27901 - DNA, 20 bp, Artificial Sequence
  Synthetic
ggaaagactcctttggtgtt

SEQ ID NO: 27902 - DNA, 21 bp, Artificial Sequence
  Synthetic
gatcttttttggagcatatgc

SEQ ID NO: 27903 - DNA, 22 bp, Artificial Sequence
  Synthetic
acagtttctccatagatagcac

SEQ ID NO: 27904 - DNA, 19 bp, Artificial Sequence
  Synthetic
tcttggagcatcttgtgga

SEQ ID NO: 27905 - DNA, 24 bp, Artificial Sequence
  Synthetic
tcttcttcattaaaatcagcaacg

SEQ ID NO: 27906 - DNA, 19 bp, Artificial Sequence
  Synthetic
ggtcgaggacaatatgctc

SEQ ID NO: 27907 - DNA, 19 bp, Artificial Sequence
  Synthetic
caaagagactcccgtagac

SEQ ID NO: 27908 - DNA, 21 bp, Artificial Sequence
  Synthetic
aaagagttcagttccttggat

SEQ ID NO: 27909 - DNA, 20 bp, Artificial Sequence
  Synthetic
agtgcatgagaatcgtcttg

SEQ ID NO: 27910 - DNA, 18 bp, Artificial Sequence
  Synthetic
gttggagcacacatcacg

SEQ ID NO: 27911 - DNA, 22 bp, Artificial Sequence
  Synthetic
agaacgtccctaatattgaaga

SEQ ID NO: 27912 - DNA, 20 bp, Artificial Sequence
  Synthetic
aaggactggatatgaagtgg

SEQ ID NO: 27913 - DNA, 19 bp, Artificial Sequence
  Synthetic
gtaaaagagtgccttggtg

SEQ ID NO: 27914 - DNA, 24 bp, Artificial Sequence
  Synthetic
ggttacttccggatattaatgatc

SEQ ID NO: 27915 - DNA, 21 bp, Artificial Sequence
  Synthetic
ggatgagatgttgaagagagc

SEQ ID NO: 27916 - DNA, 23 bp, Artificial Sequence
  Synthetic
gaagagtaagaagttcattgctt

SEQ ID NO: 27917 - DNA, 19 bp, Artificial Sequence
  Synthetic
atgggaatgacgagtgatt

SEQ ID NO: 27918 - DNA, 18 bp, Artificial Sequence
  Synthetic
tgacttcggcgaatttgg

SEQ ID NO: 27919 - DNA, 22 bp, Artificial Sequence
  Synthetic
tttgggagtaaaagttcaggtt

SEQ ID NO: 27920 - DNA, 20 bp, Artificial Sequence
  Synthetic
gtagtgttgttgaagctcaa

SEQ ID NO: 27921 - DNA, 23 bp, Artificial Sequence
  Synthetic
taagaaaaggtccttttgttgat

SEQ ID NO: 27922 - DNA, 20 bp, Artificial Sequence
  Synthetic
gccattccactaaaaagcct

SEQ ID NO: 27923 - DNA, 19 bp, Artificial Sequence
  Synthetic
aaaacaattcccctgtgga

SEQ ID NO: 27924 - DNA, 25 bp, Artificial Sequence
  Synthetic
cctttggagataataatagaggatt

SEQ ID NO: 27925 - DNA, 18 bp, Artificial Sequence
  Synthetic
gaggggaaagcatcatca

SEQ ID NO: 27926 - DNA, 20 bp, Artificial Sequence
  Synthetic
acgccaatcaaaatctcctt

SEQ ID NO: 27927 - DNA, 19 bp, Artificial Sequence
  Synthetic
cctccgggatagtcttagg

SEQ ID NO: 27928 - DNA, 23 bp, Artificial Sequence
  Synthetic
tgttcttacacatatcgatcgta

SEQ ID NO: 27929 - DNA, 22 bp, Artificial Sequence
  Synthetic
atacgcggaaatttctacttct

SEQ ID NO: 27930 - DNA, 20 bp, Artificial Sequence
  Synthetic
ggtaagggatcaggaattcc

SEQ ID NO: 27931 - DNA, 21 bp, Artificial Sequence
  Synthetic
gtgttccaatttggtttggtt

SEQ ID NO: 27932 - DNA, 19 bp, Artificial Sequence
  Synthetic
tgttgttcgagatccttgg

SEQ ID NO: 27933 - DNA, 19 bp, Artificial Sequence
  Synthetic
ccattggagataaaagcgc

SEQ ID NO: 27934 - DNA, 22 bp, Artificial Sequence
  Synthetic
ctcttgatacagtttgaaagct

SEQ ID NO: 27935 - DNA, 19 bp, Artificial Sequence
  Synthetic
caagatattggtgtgcggt

SEQ ID NO: 27936 - DNA, 20 bp, Artificial Sequence
  Synthetic
acaggaaactctaacccttt

SEQ ID NO: 27937 - DNA, 20 bp, Artificial Sequence
  Synthetic
gtcaaaaagaaacggatcgt

SEQ ID NO: 27938 - DNA, 22 bp, Artificial Sequence
  Synthetic
agaagatacccacaataaaagc

SEQ ID NO: 27939 - DNA, 18 bp, Artificial Sequence
  Synthetic
ttctgccccatatctgca

SEQ ID NO: 27940 - DNA, 19 bp, Artificial Sequence
  Synthetic
tggtaagtgttcttcccac

SEQ ID NO: 27941 - DNA, 18 bp, Artificial Sequence
  Synthetic
aagctcactgttgctgtt

SEQ ID NO: 27942 - DNA, 23 bp, Artificial Sequence
  Synthetic
gcgatatatcaatgaggtaggac

SEQ ID NO: 27943 - DNA, 23 bp, Artificial Sequence
  Synthetic
tgtagtaggtatctgaatctgtg

SEQ ID NO: 27944 - DNA, 19 bp, Artificial Sequence
  Synthetic
ggagcaactcttactgacg

SEQ ID NO: 27945 - DNA, 21 bp, Artificial Sequence
  Synthetic
ccctcaaactcaacaagaact

SEQ ID NO: 27946 - DNA, 20 bp, Artificial Sequence
  Synthetic
tcgcaatctaatgacgagaa

SEQ ID NO: 27947 - DNA, 20 bp, Artificial Sequence
  Synthetic
cagcgtattccattccattt

SEQ ID NO: 27948 - DNA, 22 bp, Artificial Sequence
  Synthetic
aaaaccttcctcttaagtctcc

SEQ ID NO: 27949 - DNA, 18 bp, Artificial Sequence
  Synthetic
tatcgcggctatcgtctt

SEQ ID NO: 27950 - DNA, 19 bp, Artificial Sequence
  Synthetic
caaggccctattgacaaag

SEQ ID NO: 27951 - DNA, 21 bp, Artificial Sequence
  Synthetic
caaaaattctccaacggaaag

SEQ ID NO: 27952 - DNA, 19 bp, Artificial Sequence
  Synthetic
acaaaagagggcgtgattg

SEQ ID NO: 27953 - DNA, 21 bp, Artificial Sequence
  Synthetic
aaagatgctgttattgatgcg

SEQ ID NO: 27954 - DNA, 18 bp, Artificial Sequence
  Synthetic
acccgtcactaaacactg

SEQ ID NO: 27955 - DNA, 20 bp, Artificial Sequence
  Synthetic
atgtctccggaaaagacaac

SEQ ID NO: 27956 - DNA, 19 bp, Artificial Sequence
  Synthetic
tccagtaggagcatacagc

SEQ ID NO: 27957 - DNA, 18 bp, Artificial Sequence
  Synthetic
aaattggctattcgtgcg

SEQ ID NO: 27958 - DNA, 24 bp, Artificial Sequence
  Synthetic
ggttctcgtatttaaaatcgattc

SEQ ID NO: 27959 - DNA, 23 bp, Artificial Sequence
  Synthetic
ttggaagttgcaaaaaagattgt

SEQ ID NO: 27960 - DNA, 18 bp, Artificial Sequence
  Synthetic
atatcgcaaacgccttgt

SEQ ID NO: 27961 - DNA, 19 bp, Artificial Sequence
  Synthetic
aacgtcttccctaatccca

SEQ ID NO: 27962 - DNA, 20 bp, Artificial Sequence
  Synthetic
ctgcttgctctctaaactct

SEQ ID NO: 27963 - DNA, 19 bp, Artificial Sequence
  Synthetic
ccttcccatgaatgcctat

SEQ ID NO: 27964 - DNA, 18 bp, Artificial Sequence
  Synthetic
cacactttcttcgcgaag

SEQ ID NO: 27965 - DNA, 20 bp, Artificial Sequence
  Synthetic
gaacgcttactacaggagat

SEQ ID NO: 27966 - DNA, 18 bp, Artificial Sequence
  Synthetic
acaatcacacatcccacc

SEQ ID NO: 27967 - DNA, 19 bp, Artificial Sequence
  Synthetic
tcgatccgagatggcttta

SEQ ID NO: 27968 - DNA, 19 bp, Artificial Sequence
  Synthetic
gcaagctttgaatacggtg

SEQ ID NO: 27969 - DNA, 20 bp, Artificial Sequence
  Synthetic
gtatggctaaggagattcgc

SEQ ID NO: 27970 - DNA, 23 bp, Artificial Sequence
  Synthetic
ctatcgatcagatttatgcagat

SEQ ID NO: 27971 - DNA, 21 bp, Artificial Sequence
  Synthetic
agttttgcgttagtagaagct

SEQ ID NO: 27972 - DNA, 21 bp, Artificial Sequence
  Synthetic
gatgtcggttttatgcttagt

SEQ ID NO: 27973 - DNA, 20 bp, Artificial Sequence
  Synthetic
gtgtttgcctctctacaaga

SEQ ID NO: 27974 - DNA, 20 bp, Artificial Sequence
  Synthetic
ctagcattgcatcaggacta

SEQ ID NO: 27975 - DNA, 18 bp, Artificial Sequence
  Synthetic
tagcactgcattcacagc

SEQ ID NO: 27976 - DNA, 23 bp, Artificial Sequence
  Synthetic
ttgctaagaaactatctctctgg

SEQ ID NO: 27977 - DNA, 18 bp, Artificial Sequence
  Synthetic
acaggctgtgatggaaat

SEQ ID NO: 27978 - DNA, 21 bp, Artificial Sequence
  Synthetic
tgctttaccaataagctcgaa

SEQ ID NO: 27979 - DNA, 18 bp, Artificial Sequence
  Synthetic
ctccaagcaagcgtctac

SEQ ID NO: 27980 - DNA, 19 bp, Artificial Sequence
  Synthetic
agcatgatctttgttgcag

SEQ ID NO: 27981 - DNA, 22 bp, Artificial Sequence
  Synthetic
tttctaaggacaaaaaccactg

SEQ ID NO: 27982 - DNA, 20 bp, Artificial Sequence
  Synthetic
cgactctcctagtactccat

SEQ ID NO: 27983 - DNA, 22 bp, Artificial Sequence
  Synthetic
caccacattctgaaatccaaat

SEQ ID NO: 27984 - DNA, 25 bp, Artificial Sequence
  Synthetic
ctgtctgattactagaaaattgcat

SEQ ID NO: 27985 - DNA, 22 bp, Artificial Sequence
  Synthetic
ttgactaaacatccgattgttc

SEQ ID NO: 27986 - DNA, 18 bp, Artificial Sequence
  Synthetic
ccaccctttcctggagta

SEQ ID NO: 27987 - DNA, 20 bp, Artificial Sequence
  Synthetic
cacaatgacatcttcttggc

SEQ ID NO: 27988 - DNA, 25 bp, Artificial Sequence
  Synthetic
gaaatcggatcatctaaattctgaa

SEQ ID NO: 27989 - DNA, 18 bp, Artificial Sequence
  Synthetic
tgcgttatcgagcgtatg

SEQ ID NO: 27990 - DNA, 18 bp, Artificial Sequence
  Synthetic
gtatccccttctgcgatg

SEQ ID NO: 27991 - DNA, 20 bp, Artificial Sequence
  Synthetic
tgatgttttgtcgagcaatt

SEQ ID NO: 27992 - DNA, 23 bp, Artificial Sequence
  Synthetic
aggattcttcaagaaatctacga

SEQ ID NO: 27993 - DNA, 23 bp, Artificial Sequence
  Synthetic
tctgtcatatttctgaattgtct

SEQ ID NO: 27994 - DNA, 25 bp, Artificial Sequence
  Synthetic
tcatatccttaatcttatgacacag

SEQ ID NO: 27995 - DNA, 19 bp, Artificial Sequence
  Synthetic
ccagctcctaaacgcaaat

SEQ ID NO: 27996 - DNA, 19 bp, Artificial Sequence
  Synthetic
tgcaggtatcagcatttgg

SEQ ID NO: 27997 - DNA, 20 bp, Artificial Sequence
  Synthetic
ctctcgtaacagcagatacc

SEQ ID NO: 27998 - DNA, 19 bp, Artificial Sequence
  Synthetic
tgcgtcgggttaattttcc

SEQ ID NO: 27999 - DNA, 21 bp, Artificial Sequence
  Synthetic
ctttactgtatcggtgtcaaa

SEQ ID NO: 28000 - DNA, 19 bp, Artificial Sequence
  Synthetic
attatatcaccccccctcc

SEQ ID NO: 28001 - DNA, 24 bp, Artificial Sequence
  Synthetic
caacagaatccctataaagaatgt

SEQ ID NO: 28002 - DNA, 18 bp, Artificial Sequence
  Synthetic
tagaccgatgaaacgcat

SEQ ID NO: 28003 - DNA, 18 bp, Artificial Sequence
  Synthetic
agcatcgtcgctacaatc

SEQ ID NO: 28004 - DNA, 19 bp, Artificial Sequence
  Synthetic
ctcaaagaggggaagagtc

SEQ ID NO: 28005 - DNA, 19 bp, Artificial Sequence
  Synthetic
aagaattgtacagggccac

SEQ ID NO: 28006 - DNA, 20 bp, Artificial Sequence
  Synthetic
cgaaactccagaaacccata

SEQ ID NO: 28007 - DNA, 19 bp, Artificial Sequence
  Synthetic
ccaatctctccaaccagac

SEQ ID NO: 28008 - DNA, 20 bp, Artificial Sequence
  Synthetic
ccggactgattaatcgtgac

SEQ ID NO: 28009 - DNA, 18 bp, Artificial Sequence
  Synthetic
aaaagaggcgaggtctct

SEQ ID NO: 28010 - DNA, 21 bp, Artificial Sequence
  Synthetic
tttcatttttttctcacgtcg

SEQ ID NO: 28011 - DNA, 19 bp, Artificial Sequence
  Synthetic
gcccctcataatcactgag

SEQ ID NO: 28012 - DNA, 25 bp, Artificial Sequence
  Synthetic
ggtatgttgtatcattcaaattgga

SEQ ID NO: 28013 - DNA, 22 bp, Artificial Sequence
  Synthetic
ttttcctttgagaatgttgcac

SEQ ID NO: 28014 - DNA, 19 bp, Artificial Sequence
  Synthetic
gtacactgatttgacctgc

SEQ ID NO: 28015 - DNA, 22 bp, Artificial Sequence
  Synthetic
ttgagtcaagaagaaggttctg

SEQ ID NO: 28016 - DNA, 20 bp, Artificial Sequence
  Synthetic
acacatgcacattcagactc

SEQ ID NO: 28017 - DNA, 19 bp, Artificial Sequence
  Synthetic
ttctggttgaaagacaccc

SEQ ID NO: 28018 - DNA, 24 bp, Artificial Sequence
  Synthetic
cgatatcttgctttattgagaagt

SEQ ID NO: 28019 - DNA, 18 bp, Artificial Sequence
  Synthetic
tatcgtcagcatccacag

SEQ ID NO: 28020 - DNA, 18 bp, Artificial Sequence
  Synthetic
tcaagacagaggctccag

SEQ ID NO: 28021 - DNA, 23 bp, Artificial Sequence
  Synthetic
ttcagtttgatatcagtccaatt

SEQ ID NO: 28022 - DNA, 21 bp, Artificial Sequence
  Synthetic
gcaagattttctttcccacat

SEQ ID NO: 28023 - DNA, 18 bp, Artificial Sequence
  Synthetic
gtttcagctggagcatgt

SEQ ID NO: 28024 - DNA, 19 bp, Artificial Sequence
  Synthetic
cgtaaaagggctggtttca

SEQ ID NO: 28025 - DNA, 19 bp, Artificial Sequence
  Synthetic
ctgcttcaacgattgcaac

SEQ ID NO: 28026 - DNA, 24 bp, Artificial Sequence
  Synthetic
gttcccataaagattcttgtaatc

SEQ ID NO: 28027 - DNA, 19 bp, Artificial Sequence
  Synthetic
gccaatgaaatagcagcag

SEQ ID NO: 28028 - DNA, 18 bp, Artificial Sequence
  Synthetic
ccaaaagcagcttctgtg

SEQ ID NO: 28029 - DNA, 20 bp, Artificial Sequence
  Synthetic
cttctggtaggcctgcaaat

SEQ ID NO: 28030 - DNA, 24 bp, Artificial Sequence
  Synthetic
tccaatggaatatctaactgtctt

SEQ ID NO: 28031 - DNA, 20 bp, Artificial Sequence
  Synthetic
gtctattctttgaggtgcag

SEQ ID NO: 28032 - DNA, 18 bp, Artificial Sequence
  Synthetic
tttcccaattctgcgtcc

SEQ ID NO: 28033 - DNA, 21 bp, Artificial Sequence
  Synthetic
gaatcttcagcttcatgagtt

SEQ ID NO: 28034 - DNA, 23 bp, Artificial Sequence
  Synthetic
tcatattcctgatgagaaagcaa

SEQ ID NO: 28035 - DNA, 23 bp, Artificial Sequence
  Synthetic
gttccaatgttcaatttgatctt

SEQ ID NO: 28036 - DNA, 18 bp, Artificial Sequence
  Synthetic
gttggtggagctggtaac

SEQ ID NO: 28037 - DNA, 20 bp, Artificial Sequence
  Synthetic
tgtgatcccgatctcgatcc

SEQ ID NO: 28038 - DNA, 19 bp, Artificial Sequence
  Synthetic
gccacttgtgccaacagat

SEQ ID NO: 28039 - DNA, 23 bp, Artificial Sequence
  Synthetic
tctttgagatttactggtaaagc

SEQ ID NO: 28040 - DNA, 18 bp, Artificial Sequence
  Synthetic
agaagcactggggtcaat

SEQ ID NO: 28041 - DNA, 22 bp, Artificial Sequence
  Synthetic
ccctaaaaaaatgtacctgacc

SEQ ID NO: 28042 - DNA, 18 bp, Artificial Sequence
  Synthetic
tttgtacccttgcaaccg

SEQ ID NO: 28043 - DNA, 20 bp, Artificial Sequence
  Synthetic
cagacatgtcagctaaagca

SEQ ID NO: 28044 - DNA, 18 bp, Artificial Sequence
  Synthetic
ctctaatggtgggcatcc

SEQ ID NO: 28045 - DNA, 18 bp, Artificial Sequence
  Synthetic
gggatggtatcacccaca

SEQ ID NO: 28046 - DNA, 22 bp, Artificial Sequence
  Synthetic
gtcagaaacagttcattactcc

SEQ ID NO: 28047 - DNA, 18 bp, Artificial Sequence
  Synthetic
cattgtgacctatgggcg

SEQ ID NO: 28048 - DNA, 18 bp, Artificial Sequence
  Synthetic
aaaactgcttcacgggac

SEQ ID NO: 28049 - DNA, 23 bp, Artificial Sequence
  Synthetic
tccatgatctttattgtaagcac

SEQ ID NO: 28050 - DNA, 20 bp, Artificial Sequence
  Synthetic
aaccatcacacaagtcttca

SEQ ID NO: 28051 - DNA, 19 bp, Artificial Sequence
  Synthetic
tgccatcaaatcacctact

SEQ ID NO: 28052 - DNA, 23 bp, Artificial Sequence
  Synthetic
acagaggtttataaacacctcta

SEQ ID NO: 28053 - DNA, 20 bp, Artificial Sequence
  Synthetic
gatgaatgtaacaagccacg

SEQ ID NO: 28054 - DNA, 19 bp, Artificial Sequence
  Synthetic
ggaactctccatgcttgat

SEQ ID NO: 28055 - DNA, 20 bp, Artificial Sequence
  Synthetic
agacttcagaagactcctcc

SEQ ID NO: 28056 - DNA, 21 bp, Artificial Sequence
  Synthetic
actgccaatcacataaggtta

SEQ ID NO: 28057 - DNA, 24 bp, Artificial Sequence
  Synthetic
cgctctaacaatacataactttgt

SEQ ID NO: 28058 - DNA, 23 bp, Artificial Sequence
  Synthetic
gtgctatatcatgtcttaaggat

SEQ ID NO: 28059 - DNA, 22 bp, Artificial Sequence
  Synthetic
actggaaaaagactttaccttt

SEQ ID NO: 28060 - DNA, 19 bp, Artificial Sequence
  Synthetic
ctacaaatctagcagggcg

SEQ ID NO: 28061 - DNA, 23 bp, Artificial Sequence
  Synthetic
atgaattagctttttaccgcaag

SEQ ID NO: 28062 - DNA, 23 bp, Artificial Sequence
  Synthetic
ctttagagctatcaaaacccaac

SEQ ID NO: 28063 - DNA, 23 bp, Artificial Sequence
  Synthetic
tggttttttaacaccacttaact

SEQ ID NO: 28064 - DNA, 23 bp, Artificial Sequence
  Synthetic
agagcttaataaaagaggcaata

SEQ ID NO: 28065 - DNA, 22 bp, Artificial Sequence
  Synthetic
cttaacatcagtaaccgtatga

SEQ ID NO: 28066 - DNA, 23 bp, Artificial Sequence
  Synthetic
ggtgtagttaaaacagagacatt

SEQ ID NO: 28067 - DNA, 22 bp, Artificial Sequence
  Synthetic
tacgatatttgactatgtggcg

SEQ ID NO: 28068 - DNA, 22 bp, Artificial Sequence
  Synthetic
taaagcatataccctcatcagc

SEQ ID NO: 28069 - DNA, 20 bp, Artificial Sequence
  Synthetic
acaccacacaatcacgttaa

SEQ ID NO: 28070 - DNA, 23 bp, Artificial Sequence
  Synthetic
agtaggatttaccattttcacaa

SEQ ID NO: 28071 - DNA, 22 bp, Artificial Sequence
  Synthetic
ctaagctccaattgatgcatat

SEQ ID NO: 28072 - DNA, 23 bp, Artificial Sequence
  Synthetic
accattcttaagacgcttaatag

SEQ ID NO: 28073 - DNA, 20 bp, Artificial Sequence
  Synthetic
gtgtactcaactgatggaac

SEQ ID NO: 28074 - DNA, 23 bp, Artificial Sequence
  Synthetic
tagcacaaaagcactatcttaat

SEQ ID NO: 28075 - DNA, 23 bp, Artificial Sequence
  Synthetic
acttagaattagaagcaacatgc

SEQ ID NO: 28076 - DNA, 22 bp, Artificial Sequence
  Synthetic
gctttctctagctgttttaact

SEQ ID NO: 28077 - DNA, 25 bp, Artificial Sequence
  Synthetic
atcagatatctcattcaactgctta

SEQ ID NO: 28078 - DNA, 22 bp, Artificial Sequence
  Synthetic
cttaggatctacagaaaacgca

SEQ ID NO: 28079 - DNA, 23 bp, Artificial Sequence
  Synthetic
catgtgtcaaaacataagacaca

SEQ ID NO: 28080 - DNA, 22 bp, Artificial Sequence
  Synthetic
cttttacacgctcatagcattt

SEQ ID NO: 28081 - DNA, 23 bp, Artificial Sequence
  Synthetic
cagcataggcatgatataagaat

SEQ ID NO: 28082 - DNA, 19 bp, Artificial Sequence
  Synthetic
acactaaaacagcaagtgc

SEQ ID NO: 28083 - DNA, 25 bp, Artificial Sequence
  Synthetic
tagtataagcgtaaatttcatcctg

SEQ ID NO: 28084 - DNA, 19 bp, Artificial Sequence
  Synthetic
cccaacccataagtacagg

SEQ ID NO: 28085 - DNA, 22 bp, Artificial Sequence
  Synthetic
ccatcatcactcaaaatcatca

SEQ ID NO: 28086 - DNA, 21 bp, Artificial Sequence
  Synthetic
acaaaacatccagctcctaat

SEQ ID NO: 28087 - DNA, 18 bp, Artificial Sequence
  Synthetic
ttctgatgcaactgccac

SEQ ID NO: 28088 - DNA, 22 bp, Artificial Sequence
  Synthetic
ctgatgcataactctgcttaaa

SEQ ID NO: 28089 - DNA, 19 bp, Artificial Sequence
  Synthetic
gcaagatgtgacttccctg

SEQ ID NO: 28090 - DNA, 23 bp, Artificial Sequence
  Synthetic
tggtaagcatactaacttcatct

SEQ ID NO: 28091 - DNA, 20 bp, Artificial Sequence
  Synthetic
tgtttctgcagtctgtgaat

SEQ ID NO: 28092 - DNA, 18 bp, Artificial Sequence
  Synthetic
aaatcgccagttgcctta

SEQ ID NO: 28093 - DNA, 18 bp, Artificial Sequence
  Synthetic
tcaccaggaggagctttc

SEQ ID NO: 28094 - DNA, 23 bp, Artificial Sequence
  Synthetic
tacaagtaatcacatgtaacact

SEQ ID NO: 28095 - DNA, 23 bp, Artificial Sequence
  Synthetic
cttatccacattacagttccaaa

SEQ ID NO: 28096 - DNA, 21 bp, Artificial Sequence
  Synthetic
acctaaattgcatcttgtgat

SEQ ID NO: 28097 - DNA, 18 bp, Artificial Sequence
  Synthetic
ttaagctctgggtggtgt

SEQ ID NO: 28098 - DNA, 19 bp, Artificial Sequence
  Synthetic
caaccttgtccaccactac

SEQ ID NO: 28099 - DNA, 21 bp, Artificial Sequence
  Synthetic
aaacaaactcctgaacaacca

SEQ ID NO: 28100 - DNA, 20 bp, Artificial Sequence
  Synthetic
ttcatcatacagcctgtagg

SEQ ID NO: 28101 - DNA, 23 bp, Artificial Sequence
  Synthetic
gccaattaaaaatccttcactag

SEQ ID NO: 28102 - DNA, 19 bp, Artificial Sequence
  Synthetic
ccatcaccccaatgcatat

SEQ ID NO: 28103 - DNA, 22 bp, Artificial Sequence
  Synthetic
ccagtgactaactatggtttca

SEQ ID NO: 28104 - DNA, 21 bp, Artificial Sequence
  Synthetic
aacaagcctttattctgcatc

SEQ ID NO: 28105 - DNA, 18 bp, Artificial Sequence
  Synthetic
gttatcagactgcctggc

SEQ ID NO: 28106 - DNA, 21 bp, Artificial Sequence
  Synthetic
ggttaggatgacaaatcgttt

SEQ ID NO: 28107 - DNA, 22 bp, Artificial Sequence
  Synthetic
actcatacaatcaacagcatta

SEQ ID NO: 28108 - DNA, 23 bp, Artificial Sequence
  Synthetic
ccatatatcttagcagcatcaat

SEQ ID NO: 28109 - DNA, 23 bp, Artificial Sequence
  Synthetic
acagaaatttttaggagctttga

SEQ ID NO: 28110 - DNA, 18 bp, Artificial Sequence
  Synthetic
tctgcagaccaacccaaa

SEQ ID NO: 28111 - DNA, 18 bp, Artificial Sequence
  Synthetic
cagctgtcgtgtaagact

SEQ ID NO: 28112 - DNA, 25 bp, Artificial Sequence
  Synthetic
gcattaatgttatcacagaaactac

SEQ ID NO: 28113 - DNA, 18 bp, Artificial Sequence
  Synthetic
ggcagccaaagtgtatcc

SEQ ID NO: 28114 - DNA, 19 bp, Artificial Sequence
  Synthetic
ccttctccatagcttgtgc

SEQ ID NO: 28115 - DNA, 18 bp, Artificial Sequence
  Synthetic
acagcgcaggtactcata

SEQ ID NO: 28116 - DNA, 25 bp, Artificial Sequence
  Synthetic
aatagtaaaacaagcatagctacac

SEQ ID NO: 28117 - DNA, 24 bp, Artificial Sequence
  Synthetic
ggatttaccataaagagtgaatgt

SEQ ID NO: 28118 - DNA, 25 bp, Artificial Sequence
  Synthetic
gtacctagttttataccttgaatgt

SEQ ID NO: 28119 - DNA, 18 bp, Artificial Sequence
  Synthetic
aaactggtcggactgatc

SEQ ID NO: 28120 - DNA, 20 bp, Artificial Sequence
  Synthetic
cggaatagcctcatcgctac

SEQ ID NO: 28121 - DNA, 21 bp, Artificial Sequence
  Synthetic
atgcttagttacttgctgagg

SEQ ID NO: 28122 - DNA, 22 bp, Artificial Sequence
  Synthetic
tgataggcattcaaattctcat

SEQ ID NO: 28123 - DNA, 24 bp, Artificial Sequence
  Synthetic
ctatagtctgctataaccttctct

SEQ ID NO: 28124 - DNA, 20 bp, Artificial Sequence
  Synthetic
ttcgctttcaacatgatgtt

SEQ ID NO: 28125 - DNA, 22 bp, Artificial Sequence
  Synthetic
ttctgttttggagtaagtggag

SEQ ID NO: 28126 - DNA, 20 bp, Artificial Sequence
  Synthetic
gtggcagttctgatgtccag

SEQ ID NO: 28127 - DNA, 22 bp, Artificial Sequence
  Synthetic
ttcaatatgatggttttaccca

SEQ ID NO: 28128 - DNA, 19 bp, Artificial Sequence
  Synthetic
tcccattctcatcactgct

SEQ ID NO: 28129 - DNA, 18 bp, Artificial Sequence
  Synthetic
gtcaccccagcgattccg

SEQ ID NO: 28130 - DNA, 19 bp, Artificial Sequence
  Synthetic
cagaagttttacgcgtcgc

SEQ ID NO: 28131 - DNA, 16 bp, Artificial Sequence
  Synthetic
tcaagggccctcacgc

SEQ ID NO: 28132 - DNA, 20 bp, Artificial Sequence
  Synthetic
cgcgcctactaataggtcca

SEQ ID NO: 28133 - DNA, 18 bp, Artificial Sequence
  Synthetic
gccaagatgccccaatgg

SEQ ID NO: 28134 - DNA, 18 bp, Artificial Sequence
  Synthetic
ggccgcagacacttgatg

SEQ ID NO: 28135 - DNA, 19 bp, Artificial Sequence
  Synthetic
cgcacgtcttgagaaaccc

SEQ ID NO: 28136 - DNA, 20 bp, Artificial Sequence
  Synthetic
agcaaggcagtatagcaagc

SEQ ID NO: 28137 - DNA, 18 bp, Artificial Sequence
  Synthetic
ttaccccgcacgtaccac

SEQ ID NO: 28138 - DNA, 19 bp, Artificial Sequence
  Synthetic
ctaatcgtgcagagacggg

SEQ ID NO: 28139 - DNA, 19 bp, Artificial Sequence
  Synthetic
cccaacgaggtcctgatct

SEQ ID NO: 28140 - DNA, 20 bp, Artificial Sequence
  Synthetic
tgctaagggtttccactggt

SEQ ID NO: 28141 - DNA, 20 bp, Artificial Sequence
  Synthetic
ccgcgagaaacttaccgtag

SEQ ID NO: 28142 - DNA, 18 bp, Artificial Sequence
  Synthetic
acagaggacgaccgagtc

SEQ ID NO: 28143 - DNA, 20 bp, Artificial Sequence
  Synthetic
ggtccatgtagtgttggctt

SEQ ID NO: 28144 - DNA, 20 bp, Artificial Sequence
  Synthetic
ccttgaactggtgggctatt

SEQ ID NO: 28145 - DNA, 19 bp, Artificial Sequence
  Synthetic
caagccgcttaccacgaac

SEQ ID NO: 28146 - DNA, 16 bp, Artificial Sequence
  Synthetic
tggttgccccgggatg

SEQ ID NO: 28147 - DNA, 18 bp, Artificial Sequence
  Synthetic
cagttattgctgccccgc

SEQ ID NO: 28148 - DNA, 18 bp, Artificial Sequence
  Synthetic
aggggcttacatggaggg

SEQ ID NO: 28149 - DNA, 20 bp, Artificial Sequence
  Synthetic
tgtaatgttgctgcccatct

SEQ ID NO: 28150 - DNA, 19 bp, Artificial Sequence
  Synthetic
tcctgtggtttcgaggacg

SEQ ID NO: 28151 - DNA, 20 bp, Artificial Sequence
  Synthetic
cgcttctagacgacgttgaa

SEQ ID NO: 28152 - DNA, 16 bp, Artificial Sequence
  Synthetic
tgcggccccctttagc

SEQ ID NO: 28153 - DNA, 18 bp, Artificial Sequence
  Synthetic
cgataaccacactgggcc

SEQ ID NO: 28154 - DNA, 18 bp, Artificial Sequence
  Synthetic
tggcctgtggagcatctc

SEQ ID NO: 28155 - DNA, 20 bp, Artificial Sequence
  Synthetic
ttcattgccatcatccattt

SEQ ID NO: 28156 - DNA, 21 bp, Artificial Sequence
  Synthetic
acgtattttgacttggtttct

SEQ ID NO: 28157 - DNA, 20 bp, Artificial Sequence
  Synthetic
ctctccaacatgtatgcaac

SEQ ID NO: 28158 - DNA, 20 bp, Artificial Sequence
  Synthetic
ctgcttaaggatgtctacca

SEQ ID NO: 28159 - DNA, 19 bp, Artificial Sequence
  Synthetic
tcaatctcctggttgcttt

SEQ ID NO: 28160 - DNA, 20 bp, Artificial Sequence
  Synthetic
gcaatatcccaatcattccc

SEQ ID NO: 28161 - DNA, 20 bp, Artificial Sequence
  Synthetic
ttgaccaacactgattcagg

SEQ ID NO: 28162 - DNA, 18 bp, Artificial Sequence
  Synthetic
actttgctttggtggagc

SEQ ID NO: 28163 - DNA, 20 bp, Artificial Sequence
  Synthetic
gccttctctcctttcgcaag

SEQ ID NO: 28164 - DNA, 20 bp, Artificial Sequence
  Synthetic
gcttccgttggcataactga

SEQ ID NO: 28165 - DNA, 20 bp, Artificial Sequence
  Synthetic
gaaacaatcagtggggcaga

SEQ ID NO: 28166 - DNA, 19 bp, Artificial Sequence
  Synthetic
ggcagggtcgtgaaagaac

SEQ ID NO: 28167 - DNA, 18 bp, Artificial Sequence
  Synthetic
ggaggagaggccacatcc

SEQ ID NO: 28168 - DNA, 18 bp, Artificial Sequence
  Synthetic
cggctatcttccgcgcta

SEQ ID NO: 28169 - DNA, 19 bp, Artificial Sequence
  Synthetic
gtatctcctggcccctacg

SEQ ID NO: 28170 - DNA, 18 bp, Artificial Sequence
  Synthetic
taaaggtccgaggagccg

SEQ ID NO: 28171 - DNA, 16 bp, Artificial Sequence
  Synthetic
gagcatgcaggtgggc

SEQ ID NO: 28172 - DNA, 18 bp, Artificial Sequence
  Synthetic
ggtcaaggacagtgccga

SEQ ID NO: 28173 - DNA, 18 bp, Artificial Sequence
  Synthetic
gagcatcggtcgacacga

SEQ ID NO: 28174 - DNA, 20 bp, Artificial Sequence
  Synthetic
agcctaactgtagtctcggc

SEQ ID NO: 28175 - DNA, 18 bp, Artificial Sequence
  Synthetic
ttgacaggcaatacgcgg

SEQ ID NO: 28176 - DNA, 20 bp, Artificial Sequence
  Synthetic
cccgccaagtattgtatccc

SEQ ID NO: 28177 - DNA, 16 bp, Artificial Sequence
  Synthetic
agaggatggcgggcag

SEQ ID NO: 28178 - DNA, 20 bp, Artificial Sequence
  Synthetic
acactccgagcttatccact

SEQ ID NO: 28179 - DNA, 18 bp, Artificial Sequence
  Synthetic
tagttcggcgcaggaagg

SEQ ID NO: 28180 - DNA, 20 bp, Artificial Sequence
  Synthetic
cgcctctgctgttatatggg

SEQ ID NO: 28181 - DNA, 19 bp, Artificial Sequence
  Synthetic
ccacaggtggttcgtagtc

SEQ ID NO: 28182 - DNA, 17 bp, Artificial Sequence
  Synthetic
ccatgacccgtcgctga

SEQ ID NO: 28183 - DNA, 19 bp, Artificial Sequence
  Synthetic
catggcaacggacgtcttt

SEQ ID NO: 28184 - DNA, 17 bp, Artificial Sequence
  Synthetic
ccgctgtcctggtgagt

SEQ ID NO: 28185 - DNA, 18 bp, Artificial Sequence
  Synthetic
gcatggtgcagtcctgga

SEQ ID NO: 28186 - DNA, 20 bp, Artificial Sequence
  Synthetic
tatcatcctcgcccacagtg

SEQ ID NO: 28187 - DNA, 20 bp, Artificial Sequence
  Synthetic
tgcccagttgaagaggtact

SEQ ID NO: 28188 - DNA, 23 bp, Artificial Sequence
  Synthetic
tgttttgtgcaaaatatacagca

SEQ ID NO: 28189 - DNA, 20 bp, Artificial Sequence
  Synthetic
tgatattttgtgcagtcgtc

SEQ ID NO: 28190 - DNA, 18 bp, Artificial Sequence
  Synthetic
tgcactctaccaccagtc

SEQ ID NO: 28191 - DNA, 19 bp, Artificial Sequence
  Synthetic
acctgtgtttggccatagc

SEQ ID NO: 28192 - DNA, 19 bp, Artificial Sequence
  Synthetic
tttagccactgtttccctg

SEQ ID NO: 28193 - DNA, 19 bp, Artificial Sequence
  Synthetic
cagataatggctgcaacca

SEQ ID NO: 28194 - DNA, 18 bp, Artificial Sequence
  Synthetic
taaacggttcgctagggt

SEQ ID NO: 28195 - DNA, 18 bp, Artificial Sequence
  Synthetic
cccacatgtacctcccat

SEQ ID NO: 28196 - DNA, 19 bp, Artificial Sequence
  Synthetic
aaccgggtcctgtcactgt

SEQ ID NO: 28197 - DNA, 24 bp, Artificial Sequence
  Synthetic
tgtaaatataatgctataaggccc

SEQ ID NO: 28198 - DNA, 18 bp, Artificial Sequence
  Synthetic
gttccaatgcctaggccc

SEQ ID NO: 28199 - DNA, 23 bp, Artificial Sequence
  Synthetic
gcaggatttgtaaagtttgtact

SEQ ID NO: 28200 - DNA, 20 bp, Artificial Sequence
  Synthetic
tcaccatcatcaacatcagc

SEQ ID NO: 28201 - DNA, 18 bp, Artificial Sequence
  Synthetic
tggcctacagtaagcaac

SEQ ID NO: 28202 - DNA, 20 bp, Artificial Sequence
  Synthetic
ctgcgcaagtaaaagaacat

SEQ ID NO: 28203 - DNA, 23 bp, Artificial Sequence
  Synthetic
aaatctatatgtgtcctccaagc

SEQ ID NO: 28204 - DNA, 18 bp, Artificial Sequence
  Synthetic
aattggtggtgtgcacac

SEQ ID NO: 28205 - DNA, 23 bp, Artificial Sequence
  Synthetic
acagcaaagataattcttgttgt

SEQ ID NO: 28206 - DNA, 25 bp, Artificial Sequence
  Synthetic
gcaatagtattattacagtcctctg

SEQ ID NO: 28207 - DNA, 24 bp, Artificial Sequence
  Synthetic
aaagtacattccatcataatccac

SEQ ID NO: 28208 - DNA, 19 bp, Artificial Sequence
  Synthetic
tgagacagtgcctctctcc

SEQ ID NO: 28209 - DNA, 19 bp, Artificial Sequence
  Synthetic
taagctgtttcccggacct

SEQ ID NO: 28210 - DNA, 23 bp, Artificial Sequence
  Synthetic
agtgggatattaaaaggtcttgt

SEQ ID NO: 28211 - DNA, 25 bp, Artificial Sequence
  Synthetic
tcatatgcaggatttaaaactgtag

SEQ ID NO: 28212 - DNA, 22 bp, Artificial Sequence
  Synthetic
tgaaagtctatatctggtgcag

SEQ ID NO: 28213 - DNA, 22 bp, Artificial Sequence
  Synthetic
gggtgcaagaaaaaatcataat

SEQ ID NO: 28214 - DNA, 22 bp, Artificial Sequence
  Synthetic
tttccaggatcaattacatcaa

SEQ ID NO: 28215 - DNA, 21 bp, Artificial Sequence
  Synthetic
agacacgtccattctattgtc

SEQ ID NO: 28216 - DNA, 24 bp, Artificial Sequence
  Synthetic
taggtactcctgatttatcttcct

SEQ ID NO: 28217 - DNA, 22 bp, Artificial Sequence
  Synthetic
ttgagtataaagagccactagg

SEQ ID NO: 28218 - DNA, 20 bp, Artificial Sequence
  Synthetic
tgtttgaacttgcacttacc

SEQ ID NO: 28219 - DNA, 18 bp, Artificial Sequence
  Synthetic
ttgccatatcacccttgg

SEQ ID NO: 28220 - DNA, 19 bp, Artificial Sequence
  Synthetic
ttactctctcaacagggcc

SEQ ID NO: 28221 - DNA, 18 bp, Artificial Sequence
  Synthetic
tactggcaggaaccttct

SEQ ID NO: 28222 - DNA, 18 bp, Artificial Sequence
  Synthetic
acatcacctccatccagg

SEQ ID NO: 28223 - DNA, 22 bp, Artificial Sequence
  Synthetic
gtgtcttgagaaaataccatgc

SEQ ID NO: 28224 - DNA, 23 bp, Artificial Sequence
  Synthetic
aatgtatagtcagatgcattcat

SEQ ID NO: 28225 - DNA, 23 bp, Artificial Sequence
  Synthetic
actaaatttttaagcacccattg

SEQ ID NO: 28226 - DNA, 24 bp, Artificial Sequence
  Synthetic
caaaaattgataaggctctccatt

SEQ ID NO: 28227 - DNA, 18 bp, Artificial Sequence
  Synthetic
acgggctttccttggtaa

SEQ ID NO: 28228 - DNA, 18 bp, Artificial Sequence
  Synthetic
cattgcgacctatgggag

SEQ ID NO: 28229 - DNA, 23 bp, Artificial Sequence
  Synthetic
aacatgtagatcttcatgaacaa

SEQ ID NO: 28230 - DNA, 23 bp, Artificial Sequence
  Synthetic
atcatggttaacagtatcagtac

SEQ ID NO: 28231 - DNA, 20 bp, Artificial Sequence
  Synthetic
aaaaccatctccacaaactg

SEQ ID NO: 28232 - DNA, 22 bp, Artificial Sequence
  Synthetic
caacaggtttctcgttaaaatt

SEQ ID NO: 28233 - DNA, 18 bp, Artificial Sequence
  Synthetic
tttacctgcagctacagc

SEQ ID NO: 28234 - DNA, 22 bp, Artificial Sequence
  Synthetic
gctaaaacaagagcaactaacc

SEQ ID NO: 28235 - DNA, 19 bp, Artificial Sequence
  Synthetic
gcctacacctacacccata

SEQ ID NO: 28236 - DNA, 23 bp, Artificial Sequence
  Synthetic
acatataaatcatcagatgccaa

SEQ ID NO: 28237 - DNA, 25 bp, Artificial Sequence
  Synthetic
ccaccattagcagtaatatcataat

SEQ ID NO: 28238 - DNA, 25 bp, Artificial Sequence
  Synthetic
cactctttaaatatgtaggtaccaa

SEQ ID NO: 28239 - DNA, 24 bp, Artificial Sequence
  Synthetic
ccttcactaataacatcaggaaat

SEQ ID NO: 28240 - DNA, 18 bp, Artificial Sequence
  Synthetic
gaaatgccccttgtggtc

SEQ ID NO: 28241 - DNA, 18 bp, Artificial Sequence
  Synthetic
tttgccatagcccaaaca

SEQ ID NO: 28242 - DNA, 19 bp, Artificial Sequence
  Synthetic
acgaaccatgctaaaaagc

SEQ ID NO: 28243 - DNA, 24 bp, Artificial Sequence
  Synthetic
ccacgtaatttacatataccatct

SEQ ID NO: 28244 - DNA, 25 bp, Artificial Sequence
  Synthetic
gtcaacataggcatcatataagaat

SEQ ID NO: 28245 - DNA, 23 bp, Artificial Sequence
  Synthetic
cactaaaacaacaagttcgtaaa

SEQ ID NO: 28246 - DNA, 22 bp, Artificial Sequence
  Synthetic
ggcctgtcatagtactaagaat

SEQ ID NO: 28247 - DNA, 21 bp, Artificial Sequence
  Synthetic
tcaaaacttgagcacattcat

SEQ ID NO: 28248 - DNA, 21 bp, Artificial Sequence
  Synthetic
acacgaaagactttttggtat

SEQ ID NO: 28249 - DNA, 19 bp, Artificial Sequence
  Synthetic
tggtagcagaagcatagct

SEQ ID NO: 28250 - DNA, 18 bp, Artificial Sequence
  Synthetic
agactttcccgtaccagg

SEQ ID NO: 28251 - DNA, 24 bp, Artificial Sequence
  Synthetic
aagtataacaatctctctcagcaa

SEQ ID NO: 28252 - DNA, 23 bp, Artificial Sequence
  Synthetic
atctttatgcacatcatagacat

SEQ ID NO: 28253 - DNA, 25 bp, Artificial Sequence
  Synthetic
ggtagttacaatattcttcagcatg

SEQ ID NO: 28254 - DNA, 18 bp, Artificial Sequence
  Synthetic
ctgtctgttcggctgaag

SEQ ID NO: 28255 - DNA, 19 bp, Artificial Sequence
  Synthetic
ccagatggtaaccactgtc

SEQ ID NO: 28256 - DNA, 21 bp, Artificial Sequence
  Synthetic
caggtaaacaagaacacctac

SEQ ID NO: 28257 - DNA, 22 bp, Artificial Sequence
  Synthetic
aaactgacattaaagggttcaa

SEQ ID NO: 28258 - DNA, 21 bp, Artificial Sequence
  Synthetic
ccttctccatagctaaagcag

SEQ ID NO: 28259 - DNA, 23 bp, Artificial Sequence
  Synthetic
tacagtaacatatacgggcaaat

SEQ ID NO: 28260 - DNA, 21 bp, Artificial Sequence
  Synthetic
agacacagtgaatttaggttg

SEQ ID NO: 28261 - DNA, 22 bp, Artificial Sequence
  Synthetic
ccaagctttaacatttcagcat

SEQ ID NO: 28262 - DNA, 22 bp, Artificial Sequence
  Synthetic
ggatcatcaagagtagcaagta

SEQ ID NO: 28263 - DNA, 19 bp, Artificial Sequence
  Synthetic
tcgccttgttcattgatga

SEQ ID NO: 28264 - DNA, 18 bp, Artificial Sequence
  Synthetic
tttcggtgggagactttg

SEQ ID NO: 28265 - DNA, 21 bp, Artificial Sequence
  Synthetic
ttcaatgctcaatttcaaagc

SEQ ID NO: 28266 - DNA, 22 bp, Artificial Sequence
  Synthetic
tgtcaaagtctactttctctgg

SEQ ID NO: 28267 - DNA, 24 bp, Artificial Sequence
  Synthetic
cagtattaatgtatacccccttca

SEQ ID NO: 28268 - DNA, 20 bp, Artificial Sequence
  Synthetic
ccttgaaatttggcctatgg

SEQ ID NO: 28269 - DNA, 22 bp, Artificial Sequence
  Synthetic
tgacttagccaatagagtccta

SEQ ID NO: 28270 - DNA, 20 bp, Artificial Sequence
  Synthetic
atcaaccttccttcttggtc

SEQ ID NO: 28271 - DNA, 19 bp, Artificial Sequence
  Synthetic
ttccctttgaggatgttgc

SEQ ID NO: 28272 - DNA, 18 bp, Artificial Sequence
  Synthetic
tatccactggccacagcg

SEQ ID NO: 28273 - DNA, 19 bp, Artificial Sequence
  Synthetic
gaatccattgcttccacgt

SEQ ID NO: 28274 - DNA, 22 bp, Artificial Sequence
  Synthetic
ctgtatatttctcctagcacac

SEQ ID NO: 28275 - DNA, 20 bp, Artificial Sequence
  Synthetic
ttcaatgttggacgaggagg

SEQ ID NO: 28276 - DNA, 21 bp, Artificial Sequence
  Synthetic
aaaactgtagtgcatgctaaa

SEQ ID NO: 28277 - DNA, 20 bp, Artificial Sequence
  Synthetic
tgcaagtgtagtttgttcaa

SEQ ID NO: 28278 - DNA, 18 bp, Artificial Sequence
  Synthetic
ttgcagatgactcaggag

SEQ ID NO: 28279 - DNA, 18 bp, Artificial Sequence
  Synthetic
ctgggctgttgcatcaat

SEQ ID NO: 28280 - DNA, 22 bp, Artificial Sequence
  Synthetic
tggatcacttataggtacctgt

SEQ ID NO: 28281 - DNA, 20 bp, Artificial Sequence
  Synthetic
gtgcactgtttgacctatag

SEQ ID NO: 28282 - DNA, 25 bp, Artificial Sequence
  Synthetic
gtttactaattgtattgcaggacaa

SEQ ID NO: 28283 - DNA, 18 bp, Artificial Sequence
  Synthetic
atcacccatagtccctgc

SEQ ID NO: 28284 - DNA, 18 bp, Artificial Sequence
  Synthetic
ggtaaatgacagcgggtt

SEQ ID NO: 28285 - DNA, 23 bp, Artificial Sequence
  Synthetic
tgcagtattgtaaacaacattct

SEQ ID NO: 28286 - DNA, 20 bp, Artificial Sequence
  Synthetic
gctttaaagtgcacggtaac

SEQ ID NO: 28287 - DNA, 18 bp, Artificial Sequence
  Synthetic
atagtgcattcgggtcac

SEQ ID NO: 28288 - DNA, 22 bp, Artificial Sequence
  Synthetic
tattttgttggctttctctagg

SEQ ID NO: 28289 - DNA, 18 bp, Artificial Sequence
  Synthetic
gttcggtgggagactttg

SEQ ID NO: 28290 - DNA, 18 bp, Artificial Sequence
  Synthetic
tagagatctgggctctgg

SEQ ID NO: 28291 - DNA, 18 bp, Artificial Sequence
  Synthetic
aaagtcatccatggctgc

SEQ ID NO: 28292 - DNA, 18 bp, Artificial Sequence
  Synthetic
ataggaacatgggcctcg

SEQ ID NO: 28293 - DNA, 21 bp, Artificial Sequence
  Synthetic
agacgcatatagactgttgaa

SEQ ID NO: 28294 - DNA, 18 bp, Artificial Sequence
  Synthetic
caagtgtgctgcctcttc

SEQ ID NO: 28295 - DNA, 23 bp, Artificial Sequence
  Synthetic
actgagaaatttgctttaaggat

SEQ ID NO: 28296 - DNA, 20 bp, Artificial Sequence
  Synthetic
ctgttttggagggagtgaag

SEQ ID NO: 28297 - DNA, 20 bp, Artificial Sequence
  Synthetic
agctcttttttgtcagcttt

SEQ ID NO: 28298 - DNA, 24 bp, Artificial Sequence
  Synthetic
gttagtcatcatctttctcacaac

SEQ ID NO: 28299 - DNA, 20 bp, Artificial Sequence
  Synthetic
cctgcttgtattccctcatg

SEQ ID NO: 28300 - DNA, 23 bp, Artificial Sequence
  Synthetic
tgtagtctttaatgaacagctga

SEQ ID NO: 28301 - DNA, 18 bp, Artificial Sequence
  Synthetic
atcaattcgggccctaga

SEQ ID NO: 28302 - DNA, 18 bp, Artificial Sequence
  Synthetic
cttgcagtgatgtgtcca

SEQ ID NO: 28303 - DNA, 22 bp, Artificial Sequence
  Synthetic
cctctgagttgtttaattcctc

SEQ ID NO: 28304 - DNA, 19 bp, Artificial Sequence
  Synthetic
cttgctgtatcacgacatg

SEQ ID NO: 28305 - DNA, 24 bp, Artificial Sequence
  Synthetic
tcatatgctatgtcactttcatct

SEQ ID NO: 28306 - DNA, 18 bp, Artificial Sequence
  Synthetic
aacgttgggatagggcat

SEQ ID NO: 28307 - DNA, 22 bp, Artificial Sequence
  Synthetic
actctgatttagcaagactctc

SEQ ID NO: 28308 - DNA, 18 bp, Artificial Sequence
  Synthetic
gaacccccactcttttgg

SEQ ID NO: 28309 - DNA, 18 bp, Artificial Sequence
  Synthetic
aacaggagctccagatgt

SEQ ID NO: 28310 - DNA, 18 bp, Artificial Sequence
  Synthetic
aataggttcggtgcctct

SEQ ID NO: 28311 - DNA, 25 bp, Artificial Sequence
  Synthetic
gacatagttagttttttacccaatc

SEQ ID NO: 28312 - DNA, 18 bp, Artificial Sequence
  Synthetic
taacacctaaaggctgcc

SEQ ID NO: 28313 - DNA, 18 bp, Artificial Sequence
  Synthetic
cagtcacctgtttgcaca

SEQ ID NO: 28314 - DNA, 19 bp, Artificial Sequence
  Synthetic
ctgcatctcctatagtgcc

SEQ ID NO: 28315 - DNA, 18 bp, Artificial Sequence
  Synthetic
tgttgttccttggctgag

SEQ ID NO: 28316 - DNA, 18 bp, Artificial Sequence
  Synthetic
agtatgtttcgggcccat

SEQ ID NO: 28317 - DNA, 25 bp, Artificial Sequence
  Synthetic
gcatatatattgactagtgtgtgtc

SEQ ID NO: 28318 - DNA, 22 bp, Artificial Sequence
  Synthetic
ggctttgatctatcatctgtca

SEQ ID NO: 28319 - DNA, 19 bp, Artificial Sequence
  Synthetic
attgccatcatccacttca

SEQ ID NO: 28320 - DNA, 25 bp, Artificial Sequence
  Synthetic
cctccttattttaacttgatttctg

SEQ ID NO: 28321 - DNA, 18 bp, Artificial Sequence
  Synthetic
taaacactgcctgttccg

SEQ ID NO: 28322 - DNA, 19 bp, Artificial Sequence
  Synthetic
gtctaaggatgtccaccat

SEQ ID NO: 28323 - DNA, 20 bp, Artificial Sequence
  Synthetic
ctctcccgcttactatcaac

SEQ ID NO: 28324 - DNA, 21 bp, Artificial Sequence
  Synthetic
caatttcccagttcctgatta

SEQ ID NO: 28325 - DNA, 19 bp, Artificial Sequence
  Synthetic
tcaaccctgatcctctcac

SEQ ID NO: 28326 - DNA, 20 bp, Artificial Sequence
  Synthetic
acattagccttctctccttt

SEQ ID NO: 28327 - DNA, 18 bp, Artificial Sequence
  Synthetic
atggcaaaacacgcatct

SEQ ID NO: 28328 - DNA, 21 bp, Artificial Sequence
  Synthetic
aagagaagcacttgaagactg

SEQ ID NO: 28329 - DNA, 24 bp, Artificial Sequence
  Synthetic
ctacctgtgtaacagtattttcag

SEQ ID NO: 28330 - DNA, 19 bp, Artificial Sequence
  Synthetic
attaatggcggatcccaag

SEQ ID NO: 28331 - DNA, 23 bp, Artificial Sequence
  Synthetic
catctactgttacagatggtctt

SEQ ID NO: 28332 - DNA, 23 bp, Artificial Sequence
  Synthetic
ctagaactgcaaaactagtctca

SEQ ID NO: 28333 - DNA, 24 bp, Artificial Sequence
  Synthetic
tttctgttagtataggtctgtgta

SEQ ID NO: 28334 - DNA, 21 bp, Artificial Sequence
  Synthetic
gctttctgcatattcatcctc

SEQ ID NO: 28335 - DNA, 20 bp, Artificial Sequence
  Synthetic
acaattcattcgttggtctg

SEQ ID NO: 28336 - DNA, 20 bp, Artificial Sequence
  Synthetic
tatcactggtcatgcgtaag

SEQ ID NO: 28337 - DNA, 18 bp, Artificial Sequence
  Synthetic
caggcgccaaaaacttac

SEQ ID NO: 28338 - DNA, 24 bp, Artificial Sequence
  Synthetic
aagatgtacctttagtgtctttgt

SEQ ID NO: 28339 - DNA, 21 bp, Artificial Sequence
  Synthetic
ttccttatatcccactccaaa

SEQ ID NO: 28340 - DNA, 22 bp, Artificial Sequence
  Synthetic
attgttccatgtacaaaacttg

SEQ ID NO: 28341 - DNA, 22 bp, Artificial Sequence
  Synthetic
gaggtaatttaatttgcactgg

SEQ ID NO: 28342 - DNA, 22 bp, Artificial Sequence
  Synthetic
ccatattgggatttctttaggc

SEQ ID NO: 28343 - DNA, 18 bp, Artificial Sequence
  Synthetic
ttccagtcctcacttgcc

SEQ ID NO: 28344 - DNA, 25 bp, Artificial Sequence
  Synthetic
cctttgtgatgtattagtaaatcct

SEQ ID NO: 28345 - DNA, 20 bp, Artificial Sequence
  Synthetic
caggaggcccaataggatct

SEQ ID NO: 28346 - DNA, 20 bp, Artificial Sequence
  Synthetic
cagatccttctgttacagca

SEQ ID NO: 28347 - DNA, 21 bp, Artificial Sequence
  Synthetic
tcaataatacctgtgtcaccg

SEQ ID NO: 28348 - DNA, 21 bp, Artificial Sequence
  Synthetic
cgtattcatcagtaggcagta

SEQ ID NO: 28349 - DNA, 18 bp, Artificial Sequence
  Synthetic
taaaggaggacatgcacc

SEQ ID NO: 28350 - DNA, 20 bp, Artificial Sequence
  Synthetic
tgagaggaaccttgcataat

SEQ ID NO: 28351 - DNA, 18 bp, Artificial Sequence
  Synthetic
ttaaaccccccgtctacg

SEQ ID NO: 28352 - DNA, 18 bp, Artificial Sequence
  Synthetic
tacacctctcccggttag

SEQ ID NO: 28353 - DNA, 25 bp, Artificial Sequence
  Synthetic
gcaataatagtaaatctaacacctg

SEQ ID NO: 28354 - DNA, 22 bp, Artificial Sequence
  Synthetic
tagctcttccattgtatccaaa

SEQ ID NO: 28355 - DNA, 23 bp, Artificial Sequence
  Synthetic
tagcttcatcttctcctaatcca

SEQ ID NO: 28356 - DNA, 22 bp, Artificial Sequence
  Synthetic
aaaatcacaatgttgctgcata

SEQ ID NO: 28357 - DNA, 19 bp, Artificial Sequence
  Synthetic
gctttggaagtgtagtcgt

SEQ ID NO: 28358 - DNA, 19 bp, Artificial Sequence
  Synthetic
actctgtcggtcgacttcg

SEQ ID NO: 28359 - DNA, 22 bp, Artificial Sequence
  Synthetic
tctgcagcacttatatctgaaa

SEQ ID NO: 28360 - DNA, 22 bp, Artificial Sequence
  Synthetic
tcaatattttgtgttggctgtt

SEQ ID NO: 28361 - DNA, 23 bp, Artificial Sequence
  Synthetic
ctttctgaccaatagttagtcca

SEQ ID NO: 28362 - DNA, 20 bp, Artificial Sequence
  Synthetic
cttgcagctatttctggaat

SEQ ID NO: 28363 - DNA, 18 bp, Artificial Sequence
  Synthetic
gagtacacgagcaacagg

SEQ ID NO: 28364 - DNA, 20 bp, Artificial Sequence
  Synthetic
ccacctctaccaatttcaag

SEQ ID NO: 28365 - DNA, 18 bp, Artificial Sequence
  Synthetic
ggatccttttgctggagc

SEQ ID NO: 28366 - DNA, 18 bp, Artificial Sequence
  Synthetic
ttgcctgtttcccctttg

SEQ ID NO: 28367 - DNA, 20 bp, Artificial Sequence
  Synthetic
attgatggcctggaactgac

SEQ ID NO: 28368 - DNA, 20 bp, Artificial Sequence
  Synthetic
ggcaaaggaggaccaggttc

SEQ ID NO: 28369 - DNA, 21 bp, Artificial Sequence
  Synthetic
tgatagaattccaggaggttt

SEQ ID NO: 28370 - DNA, 16 bp, Artificial Sequence
  Synthetic
aagtttgggggcgccc

SEQ ID NO: 28371 - DNA, 19 bp, Artificial Sequence
  Synthetic
ggtggagtgttgggcttag

SEQ ID NO: 28372 - DNA, 19 bp, Artificial Sequence
  Synthetic
cacttcggtctcccctagg

SEQ ID NO: 28373 - DNA, 16 bp, Artificial Sequence
  Synthetic
gcaggcaaggcgagca

SEQ ID NO: 28374 - DNA, 18 bp, Artificial Sequence
  Synthetic
catctacgaggccatcaa

SEQ ID NO: 28375 - DNA, 16 bp, Artificial Sequence
  Synthetic
aaacccgatggccccg

SEQ ID NO: 28376 - DNA, 16 bp, Artificial Sequence
  Synthetic
tggctcccgcgcatac

SEQ ID NO: 28377 - DNA, 20 bp, Artificial Sequence
  Synthetic
catgatcagccacgaacgaa

SEQ ID NO: 28378 - DNA, 18 bp, Artificial Sequence
  Synthetic
aaaacacggccaagggag

SEQ ID NO: 28379 - DNA, 20 bp, Artificial Sequence
  Synthetic
agaagcccagttatccaccc

SEQ ID NO: 28380 - DNA, 20 bp, Artificial Sequence
  Synthetic
agggactggctgtctcctac

SEQ ID NO: 28381 - DNA, 18 bp, Artificial Sequence
  Synthetic
ctggtcggcacacatccg

SEQ ID NO: 28382 - DNA, 17 bp, Artificial Sequence
  Synthetic
acaatttctggcggcgg

SEQ ID NO: 28383 - DNA, 18 bp, Artificial Sequence
  Synthetic
cgctggaagagcaggtcc

SEQ ID NO: 28384 - DNA, 20 bp, Artificial Sequence
  Synthetic
gctccgagaacaggaagaca

SEQ ID NO: 28385 - DNA, 20 bp, Artificial Sequence
  Synthetic
aaacaagggaagagcgggag

SEQ ID NO: 28386 - DNA, 18 bp, Artificial Sequence
  Synthetic
ggatgtgaatgcccccgg

SEQ ID NO: 28387 - DNA, 20 bp, Artificial Sequence
  Synthetic
tccggaacagatcacagtca

SEQ ID NO: 28388 - DNA, 16 bp, Artificial Sequence
  Synthetic
tggaggctgtgctccc

SEQ ID NO: 28389 - DNA, 18 bp, Artificial Sequence
  Synthetic
aagaggtagcgccccagg

SEQ ID NO: 28390 - DNA, 16 bp, Artificial Sequence
  Synthetic
cctcggcgcacaggtt

SEQ ID NO: 28391 - DNA, 16 bp, Artificial Sequence
  Synthetic
tcaccgactgccccct

SEQ ID NO: 28392 - DNA, 17 bp, Artificial Sequence
  Synthetic
acttccaatcccccggg

SEQ ID NO: 28393 - DNA, 20 bp, Artificial Sequence
  Synthetic
caccacagctatgatgccag

SEQ ID NO: 28394 - DNA, 18 bp, Artificial Sequence
  Synthetic
cttctgcttctgcctggc

SEQ ID NO: 28395 - DNA, 18 bp, Artificial Sequence
  Synthetic
accggtcttcctctgcca

SEQ ID NO: 28396 - DNA, 17 bp, Artificial Sequence
  Synthetic
ttgagaccctggcgcac

SEQ ID NO: 28397 - DNA, 18 bp, Artificial Sequence
  Synthetic
acagggggatgccagagg

SEQ ID NO: 28398 - DNA, 20 bp, Artificial Sequence
  Synthetic
tggcctcaaacactgacatt

SEQ ID NO: 28399 - DNA, 16 bp, Artificial Sequence
  Synthetic
agagtgctccggctgc

SEQ ID NO: 28400 - DNA, 20 bp, Artificial Sequence
  Synthetic
catcatcgatcccggctaca

SEQ ID NO: 28401 - DNA, 20 bp, Artificial Sequence
  Synthetic
tcattacctctcgctgtcga

SEQ ID NO: 28402 - DNA, 18 bp, Artificial Sequence
  Synthetic
ggccccactgtatccacc

SEQ ID NO: 28403 - DNA, 19 bp, Artificial Sequence
  Synthetic
atggtttttgtctgatggc

SEQ ID NO: 28404 - DNA, 19 bp, Artificial Sequence
  Synthetic
tgtgcgtagtgttgctgtg

SEQ ID NO: 28405 - DNA, 19 bp, Artificial Sequence
  Synthetic
ggatggacgaggagctcat

SEQ ID NO: 28406 - DNA, 19 bp, Artificial Sequence
  Synthetic
caagagctggtgggagagg

SEQ ID NO: 28407 - DNA, 16 bp, Artificial Sequence
  Synthetic
caccgtgggccccttt

SEQ ID NO: 28408 - DNA, 20 bp, Artificial Sequence
  Synthetic
tcttttcaccacgtccacga

SEQ ID NO: 28409 - DNA, 18 bp, Artificial Sequence
  Synthetic
aaagcagcagcctcagga

SEQ ID NO: 28410 - DNA, 20 bp, Artificial Sequence
  Synthetic
ccaaatactggccggtactc

SEQ ID NO: 28411 - DNA, 17 bp, Artificial Sequence
  Synthetic
tcacgggagccacaacc

SEQ ID NO: 28412 - DNA, 17 bp, Artificial Sequence
  Synthetic
tcagggacgttggtggc

SEQ ID NO: 28413 - DNA, 17 bp, Artificial Sequence
  Synthetic
tggcccgcagacacatt

SEQ ID NO: 28414 - DNA, 18 bp, Artificial Sequence
  Synthetic
actcgggggcctctacac

SEQ ID NO: 28415 - DNA, 16 bp, Artificial Sequence
  Synthetic
tcttgtccgccgccag

SEQ ID NO: 28416 - DNA, 18 bp, Artificial Sequence
  Synthetic
cctggtgcctgaagaccc

SEQ ID NO: 28417 - DNA, 18 bp, Artificial Sequence
  Synthetic
ctatcctgctgcagggcg

SEQ ID NO: 28418 - DNA, 20 bp, Artificial Sequence
  Synthetic
ccacccgctgtatgaggaag

SEQ ID NO: 28419 - DNA, 18 bp, Artificial Sequence
  Synthetic
cccctcctcgtgcaccta

SEQ ID NO: 28420 - DNA, 19 bp, Artificial Sequence
  Synthetic
tgtgatggatccagcgagt

SEQ ID NO: 28421 - DNA, 18 bp, Artificial Sequence
  Synthetic
gccggatcaacgtacacg

SEQ ID NO: 28422 - DNA, 16 bp, Artificial Sequence
  Synthetic
tgggggtgcagggtga

SEQ ID NO: 28423 - DNA, 20 bp, Artificial Sequence
  Synthetic
aggatgtgttggcctttagg

SEQ ID NO: 28424 - DNA, 20 bp, Artificial Sequence
  Synthetic
cattcatgacctgccccact

SEQ ID NO: 28425 - DNA, 20 bp, Artificial Sequence
  Synthetic
gaagccgtctctctgagatg

SEQ ID NO: 28426 - DNA, 18 bp, Artificial Sequence
  Synthetic
gtgctgctccaatgtccg

SEQ ID NO: 28427 - DNA, 17 bp, Artificial Sequence
  Synthetic
atgggcaggctctcacg

SEQ ID NO: 28428 - DNA, 18 bp, Artificial Sequence
  Synthetic
gcacagtcacggggatct

SEQ ID NO: 28429 - DNA, 22 bp, Artificial Sequence
  Synthetic
atcttgagctccaactactttg

SEQ ID NO: 28430 - DNA, 17 bp, Artificial Sequence
  Synthetic
tccagcccctgcatacc

SEQ ID NO: 28431 - DNA, 17 bp, Artificial Sequence
  Synthetic
agttcggggcctgtgtc

SEQ ID NO: 28432 - DNA, 16 bp, Artificial Sequence
  Synthetic
tggatcgcgagggagc

SEQ ID NO: 28433 - DNA, 18 bp, Artificial Sequence
  Synthetic
cacagacttggccttggg

SEQ ID NO: 28434 - DNA, 19 bp, Artificial Sequence
  Synthetic
acaagggtgggctaactct

SEQ ID NO: 28435 - DNA, 18 bp, Artificial Sequence
  Synthetic
tggctctgaccagcaaga

SEQ ID NO: 28436 - DNA, 19 bp, Artificial Sequence
  Synthetic
acccagatgcctcacctgg

SEQ ID NO: 28437 - DNA, 20 bp, Artificial Sequence
  Synthetic
caggcacatctacagcatca

SEQ ID NO: 28438 - DNA, 17 bp, Artificial Sequence
  Synthetic
aggggtggtggatgtgc

SEQ ID NO: 28439 - DNA, 17 bp, Artificial Sequence
  Synthetic
accttcatcacggggcc

SEQ ID NO: 28440 - DNA, 16 bp, Artificial Sequence
  Synthetic
cccgcatgcgcaacca

SEQ ID NO: 28441 - DNA, 18 bp, Artificial Sequence
  Synthetic
tggttctgcccaaccacg

SEQ ID NO: 28442 - DNA, 19 bp, Artificial Sequence
  Synthetic
cggactcgggagccttaat

SEQ ID NO: 28443 - DNA, 20 bp, Artificial Sequence
  Synthetic
ggcaataaccgaggccttca

SEQ ID NO: 28444 - DNA, 19 bp, Artificial Sequence
  Synthetic
ctcttagggaggtggccac

SEQ ID NO: 28445 - DNA, 16 bp, Artificial Sequence
  Synthetic
cacaagagcgccgcct

SEQ ID NO: 28446 - DNA, 18 bp, Artificial Sequence
  Synthetic
aggaagctgtacgcggag

SEQ ID NO: 28447 - DNA, 16 bp, Artificial Sequence
  Synthetic
tgaggaccccggtcga

SEQ ID NO: 28448 - DNA, 16 bp, Artificial Sequence
  Synthetic
aacaccccccgatgcc

SEQ ID NO: 28449 - DNA, 22 bp, Artificial Sequence
  Synthetic
gtattagttgctctgtaactgg

SEQ ID NO: 28450 - DNA, 20 bp, Artificial Sequence
  Synthetic
accacagtatgaaaccaccc

SEQ ID NO: 28451 - DNA, 18 bp, Artificial Sequence
  Synthetic
ttttacaccctccgcaac

SEQ ID NO: 28452 - DNA, 20 bp, Artificial Sequence
  Synthetic
atatgtcacttgcgtttccc

SEQ ID NO: 28453 - DNA, 25 bp, Artificial Sequence
  Synthetic
cacttctaaatgatatccattgtga

SEQ ID NO: 28454 - DNA, 19 bp, Artificial Sequence
  Synthetic
attttgcatcagctaacgg

SEQ ID NO: 28455 - DNA, 18 bp, Artificial Sequence
  Synthetic
aataccaagcacaggcac

SEQ ID NO: 28456 - DNA, 22 bp, Artificial Sequence
  Synthetic
acacattgtcttttcctctttg

SEQ ID NO: 28457 - DNA, 18 bp, Artificial Sequence
  Synthetic
ggtttcgttggtgcccag

SEQ ID NO: 28458 - DNA, 18 bp, Artificial Sequence
  Synthetic
gtacccttaacgttccgc

SEQ ID NO: 28459 - DNA, 24 bp, Artificial Sequence
  Synthetic
cacaacaggatacatatatgcaat

SEQ ID NO: 28460 - DNA, 24 bp, Artificial Sequence
  Synthetic
aaataatacctcagttccatacac

SEQ ID NO: 28461 - DNA, 22 bp, Artificial Sequence
  Synthetic
caaatttatttgggtcgggtag

SEQ ID NO: 28462 - DNA, 24 bp, Artificial Sequence
  Synthetic
gcaaccaataatacatagttgtgt

SEQ ID NO: 28463 - DNA, 19 bp, Artificial Sequence
  Synthetic
ttaaaacattgctctcggc

SEQ ID NO: 28464 - DNA, 21 bp, Artificial Sequence
  Synthetic
gttacaaaaagcagattgccc

SEQ ID NO: 28465 - DNA, 18 bp, Artificial Sequence
  Synthetic
ttttctgcaggaggagga

SEQ ID NO: 28466 - DNA, 18 bp, Artificial Sequence
  Synthetic
aacggcggccattttagg

SEQ ID NO: 28467 - DNA, 18 bp, Artificial Sequence
  Synthetic
tacactgctgttgccaaa

SEQ ID NO: 28468 - DNA, 20 bp, Artificial Sequence
  Synthetic
tgttaaggaaatgcaagcac

SEQ ID NO: 28469 - DNA, 18 bp, Artificial Sequence
  Synthetic
tgcattacaggtaccgca

SEQ ID NO: 28470 - DNA, 18 bp, Artificial Sequence
  Synthetic
tacagcttccagtctcgg

SEQ ID NO: 28471 - DNA, 24 bp, Artificial Sequence
  Synthetic
cgaccgtttataaaaatacaaagc

SEQ ID NO: 28472 - DNA, 20 bp, Artificial Sequence
  Synthetic
tgtgcaataggtttccaatc

SEQ ID NO: 28473 - DNA, 21 bp, Artificial Sequence
  Synthetic
tgtgtatggaaaggctttagc

SEQ ID NO: 28474 - DNA, 19 bp, Artificial Sequence
  Synthetic
atgtcctgttcccacctcc

SEQ ID NO: 28475 - DNA, 18 bp, Artificial Sequence
  Synthetic
aggcctaacgactggaat

SEQ ID NO: 28476 - DNA, 22 bp, Artificial Sequence
  Synthetic
tttcaataactacagcatttgc

SEQ ID NO: 28477 - DNA, 21 bp, Artificial Sequence
  Synthetic
agcatatctgaagtgtcatgt

SEQ ID NO: 28478 - DNA, 18 bp, Artificial Sequence
  Synthetic
ctactggctttgcaggag

SEQ ID NO: 28479 - DNA, 20 bp, Artificial Sequence
  Synthetic
ttaacctcatcactgcaagg

SEQ ID NO: 28480 - DNA, 18 bp, Artificial Sequence
  Synthetic
tttagcagccctgtttga

SEQ ID NO: 28481 - DNA, 19 bp, Artificial Sequence
  Synthetic
acaacttgtagctccttgt

SEQ ID NO: 28482 - DNA, 18 bp, Artificial Sequence
  Synthetic
cgcatcaggctgatccag

SEQ ID NO: 28483 - DNA, 18 bp, Artificial Sequence
  Synthetic
cttcaccgtcggccatag

SEQ ID NO: 28484 - DNA, 20 bp, Artificial Sequence
  Synthetic
ggccaacggactagctagat

SEQ ID NO: 28485 - DNA, 18 bp, Artificial Sequence
  Synthetic
gtgctgtaactgcacccg

SEQ ID NO: 28486 - DNA, 21 bp, Artificial Sequence
  Synthetic
atctcactagcattaggacca

SEQ ID NO: 28487 - DNA, 20 bp, Artificial Sequence
  Synthetic
actgaaactggcattcttct

SEQ ID NO: 28488 - DNA, 18 bp, Artificial Sequence
  Synthetic
accgtactatgggtctcc

SEQ ID NO: 28489 - DNA, 22 bp, Artificial Sequence
  Synthetic
ggtatctatatagctccagcac

SEQ ID NO: 28490 - DNA, 18 bp, Artificial Sequence
  Synthetic
attgtcctcctggtcgtc

SEQ ID NO: 28491 - DNA, 18 bp, Artificial Sequence
  Synthetic
gttacacgtgtcccttcg

SEQ ID NO: 28492 - DNA, 20 bp, Artificial Sequence
  Synthetic
gctgtcagggttacactggt

SEQ ID NO: 28493 - DNA, 18 bp, Artificial Sequence
  Synthetic
atcatgccacagggttac

SEQ ID NO: 28494 - DNA, 22 bp, Artificial Sequence
  Synthetic
gtatgtatatgatcaggaggcc

SEQ ID NO: 28495 - DNA, 20 bp, Artificial Sequence
  Synthetic
aagacacacgaaaagcaaca

SEQ ID NO: 28496 - DNA, 16 bp, Artificial Sequence
  Synthetic
taacgacaggggggcg

SEQ ID NO: 28497 - DNA, 20 bp, Artificial Sequence
  Synthetic
atccaaaaagtcaggatccg

SEQ ID NO: 28498 - DNA, 20 bp, Artificial Sequence
  Synthetic
acttattgggatcaggcaaa

SEQ ID NO: 28499 - DNA, 20 bp, Artificial Sequence
  Synthetic
agacatattgcatggggtac

SEQ ID NO: 28500 - DNA, 18 bp, Artificial Sequence
  Synthetic
gaattgcgtcgcccatag

SEQ ID NO: 28501 - DNA, 24 bp, Artificial Sequence
  Synthetic
gcatgtactctttaaaattggaag

SEQ ID NO: 28502 - DNA, 22 bp, Artificial Sequence
  Synthetic
cacacaaacatgcataaggaaa

SEQ ID NO: 28503 - DNA, 19 bp, Artificial Sequence
  Synthetic
gcgcgaaacagctaacagt

SEQ ID NO: 28504 - DNA, 18 bp, Artificial Sequence
  Synthetic
tactcaccggttccgcag

SEQ ID NO: 28505 - DNA, 18 bp, Artificial Sequence
  Synthetic
tttagggatgggctggcg

SEQ ID NO: 28506 - DNA, 20 bp, Artificial Sequence
  Synthetic
cgggtaagttccctgttgca

SEQ ID NO: 28507 - DNA, 16 bp, Artificial Sequence
  Synthetic
gtcgatgtgcgtccgc

SEQ ID NO: 28508 - DNA, 20 bp, Artificial Sequence
  Synthetic
ggccaacagaaggatgacaa

SEQ ID NO: 28509 - DNA, 20 bp, Artificial Sequence
  Synthetic
tgccagcaatagggtctcat

SEQ ID NO: 28510 - DNA, 20 bp, Artificial Sequence
  Synthetic
ccgcatttgaggtaagtggt

SEQ ID NO: 28511 - DNA, 20 bp, Artificial Sequence
  Synthetic
acgatgttttggtggaggtg

SEQ ID NO: 28512 - DNA, 20 bp, Artificial Sequence
  Synthetic
gcacagatgcgtcataagca

SEQ ID NO: 28513 - DNA, 19 bp, Artificial Sequence
  Synthetic
gcacatcctcagtagagcg

SEQ ID NO: 28514 - DNA, 18 bp, Artificial Sequence
  Synthetic
gtgtctgctgggcgtaag

SEQ ID NO: 28515 - DNA, 17 bp, Artificial Sequence
  Synthetic
cgtgcacggctccaaag

SEQ ID NO: 28516 - DNA, 20 bp, Artificial Sequence
  Synthetic
cagcatatgcgacaggaact

SEQ ID NO: 28517 - DNA, 20 bp, Artificial Sequence
  Synthetic
gcacagttagtctgacccca

SEQ ID NO: 28518 - DNA, 19 bp, Artificial Sequence
  Synthetic
tacgttgcagtcgatcacg

SEQ ID NO: 28519 - DNA, 20 bp, Artificial Sequence
  Synthetic
ctgcctcccaaaactcaaga

SEQ ID NO: 28520 - DNA, 18 bp, Artificial Sequence
  Synthetic
cctgccaagacccatgtg

SEQ ID NO: 28521 - DNA, 20 bp, Artificial Sequence
  Synthetic
tgttgatagtcctgcgaggt

SEQ ID NO: 28522 - DNA, 18 bp, Artificial Sequence
  Synthetic
cagaatggccgcgcagat

SEQ ID NO: 28523 - DNA, 18 bp, Artificial Sequence
  Synthetic
acctccgcgtactctgag

SEQ ID NO: 28524 - DNA, 17 bp, Artificial Sequence
  Synthetic
tgccgatagctggctcg

SEQ ID NO: 28525 - DNA, 20 bp, Artificial Sequence
  Synthetic
cggttggtaatctggccttt

SEQ ID NO: 28526 - DNA, 18 bp, Artificial Sequence
  Synthetic
agaccaggaccccgagtc

SEQ ID NO: 28527 - DNA, 20 bp, Artificial Sequence
  Synthetic
agatcttgcagaatggggtg

SEQ ID NO: 28528 - DNA, 18 bp, Artificial Sequence
  Synthetic
ggtccttcttttccgccc

SEQ ID NO: 28529 - DNA, 20 bp, Artificial Sequence
  Synthetic
ggtcccctggctttctgaga

SEQ ID NO: 28530 - DNA, 20 bp, Artificial Sequence
  Synthetic
tggatgatgtttcccagcca

SEQ ID NO: 28531 - DNA, 17 bp, Artificial Sequence
  Synthetic
acgggagatgagggacg

SEQ ID NO: 28532 - DNA, 18 bp, Artificial Sequence
  Synthetic
gttccagcaccgttttgc

SEQ ID NO: 28533 - DNA, 20 bp, Artificial Sequence
  Synthetic
caaagtccacgccaaaatgg

SEQ ID NO: 28534 - DNA, 18 bp, Artificial Sequence
  Synthetic
cggcttcgtcttcctgtc

SEQ ID NO: 28535 - DNA, 18 bp, Artificial Sequence
  Synthetic
cgtcatgccgcctgaaac

SEQ ID NO: 28536 - DNA, 16 bp, Artificial Sequence
  Synthetic
tcagtgccaccccgtc

SEQ ID NO: 28537 - DNA, 17 bp, Artificial Sequence
  Synthetic
agccccagtagcgttgg

SEQ ID NO: 28538 - DNA, 19 bp, Artificial Sequence
  Synthetic
agtttggtgaagaagcgcg

SEQ ID NO: 28539 - DNA, 16 bp, Artificial Sequence
  Synthetic
tcgttggcgagtgcgg

SEQ ID NO: 28540 - DNA, 18 bp, Artificial Sequence
  Synthetic
tatcgcaagccgctttcg

SEQ ID NO: 28541 - DNA, 16 bp, Artificial Sequence
  Synthetic
ctatcgcgccgccaac

SEQ ID NO: 28542 - DNA, 16 bp, Artificial Sequence
  Synthetic
cggtgtggcaggcgta

SEQ ID NO: 28543 - DNA, 16 bp, Artificial Sequence
  Synthetic
ttaccgccgaccgcac

SEQ ID NO: 28544 - DNA, 18 bp, Artificial Sequence
  Synthetic
ggcacgaacgcttggaag

SEQ ID NO: 28545 - DNA, 17 bp, Artificial Sequence
  Synthetic
taaggaagcgcgcgtgg

SEQ ID NO: 28546 - DNA, 17 bp, Artificial Sequence
  Synthetic
tacgtccgccagttcgc

SEQ ID NO: 28547 - DNA, 19 bp, Artificial Sequence
  Synthetic
cgtgcgtgatttgtccgaa

SEQ ID NO: 28548 - DNA, 20 bp, Artificial Sequence
  Synthetic
gctggagaatgtacaaggcc

SEQ ID NO: 28549 - DNA, 16 bp, Artificial Sequence
  Synthetic
gcaaggactggcaccg

SEQ ID NO: 28550 - DNA, 20 bp, Artificial Sequence
  Synthetic
caaaaaccatgtgtcgtggc

SEQ ID NO: 28551 - DNA, 19 bp, Artificial Sequence
  Synthetic
gaatggtttgccgaacgcg

SEQ ID NO: 28552 - DNA, 18 bp, Artificial Sequence
  Synthetic
cgacatcgggctgttgtc

SEQ ID NO: 28553 - DNA, 17 bp, Artificial Sequence
  Synthetic
tcgtcagcctgtgtccg

SEQ ID NO: 28554 - DNA, 19 bp, Artificial Sequence
  Synthetic
caaaccgaagatgccgtct

SEQ ID NO: 28555 - DNA, 16 bp, Artificial Sequence
  Synthetic
tttctcgcgctcgccc

SEQ ID NO: 28556 - DNA, 20 bp, Artificial Sequence
  Synthetic
gcgaagtgttttatgcgtgg

SEQ ID NO: 28557 - DNA, 17 bp, Artificial Sequence
  Synthetic
ttgcctccgccgaactc

SEQ ID NO: 28558 - DNA, 18 bp, Artificial Sequence
  Synthetic
atatgcggcgaaacgtgc

SEQ ID NO: 28559 - DNA, 18 bp, Artificial Sequence
  Synthetic
ggcagtcatcgtcgcttc

SEQ ID NO: 28560 - DNA, 18 bp, Artificial Sequence
  Synthetic
tcaacgtcaacgatgccg

SEQ ID NO: 28561 - DNA, 18 bp, Artificial Sequence
  Synthetic
tgccgaaaacgccgattt

SEQ ID NO: 28562 - DNA, 18 bp, Artificial Sequence
  Synthetic
caccgttgccgtgcattc

SEQ ID NO: 28563 - DNA, 19 bp, Artificial Sequence
  Synthetic
cgtgttggaagtgaacccg

SEQ ID NO: 28564 - DNA, 18 bp, Artificial Sequence
  Synthetic
gtgtccaccgacttcgac

SEQ ID NO: 28565 - DNA, 20 bp, Artificial Sequence
  Synthetic
aagcctgcacgactatttgg

SEQ ID NO: 28566 - DNA, 18 bp, Artificial Sequence
  Synthetic
acagcgttcagacggcat

SEQ ID NO: 28567 - DNA, 16 bp, Artificial Sequence
  Synthetic
tgtccggactcgccac

SEQ ID NO: 28568 - DNA, 17 bp, Artificial Sequence
  Synthetic
ttccgctgttgccggta

SEQ ID NO: 28569 - DNA, 20 bp, Artificial Sequence
  Synthetic
agagtttgtgcagcatacgg

SEQ ID NO: 28570 - DNA, 16 bp, Artificial Sequence
  Synthetic
cctacccagccggcaa

SEQ ID NO: 28571 - DNA, 18 bp, Artificial Sequence
  Synthetic
tttttggttcaggcggcg

SEQ ID NO: 28572 - DNA, 16 bp, Artificial Sequence
  Synthetic
acccaggcggcatcga

SEQ ID NO: 28573 - DNA, 18 bp, Artificial Sequence
  Synthetic
ttgatggctttgtcgcgc

SEQ ID NO: 28574 - DNA, 18 bp, Artificial Sequence
  Synthetic
cttccgcctgcaaggacg

SEQ ID NO: 28575 - DNA, 19 bp, Artificial Sequence
  Synthetic
ggaaaaatacggcggtccc

SEQ ID NO: 28576 - DNA, 17 bp, Artificial Sequence
  Synthetic
attcgttaccgccgtgc

SEQ ID NO: 28577 - DNA, 18 bp, Artificial Sequence
  Synthetic
aacacatgaaccgccgca

SEQ ID NO: 28578 - DNA, 17 bp, Artificial Sequence
  Synthetic
ggcggcgtgttgattgc

SEQ ID NO: 28579 - DNA, 17 bp, Artificial Sequence
  Synthetic
ccgttgcgcatcgtagc

SEQ ID NO: 28580 - DNA, 16 bp, Artificial Sequence
  Synthetic
ttcgcgcccgaccaac

SEQ ID NO: 28581 - DNA, 17 bp, Artificial Sequence
  Synthetic
cgcaaaaccggccatcc

SEQ ID NO: 28582 - DNA, 19 bp, Artificial Sequence
  Synthetic
ctatcaaggcggctgctcc

SEQ ID NO: 28583 - DNA, 19 bp, Artificial Sequence
  Synthetic
gaacacgcccccttcagac

SEQ ID NO: 28584 - DNA, 16 bp, Artificial Sequence
  Synthetic
ttgccgtaccgtccgg

SEQ ID NO: 28585 - DNA, 17 bp, Artificial Sequence
  Synthetic
cctcctgctgccggaaa

SEQ ID NO: 28586 - DNA, 19 bp, Artificial Sequence
  Synthetic
cttttcgtccgcgcaactc

SEQ ID NO: 28587 - DNA, 19 bp, Artificial Sequence
  Synthetic
tgctgtcgtggtatttccc

SEQ ID NO: 28588 - DNA, 19 bp, Artificial Sequence
  Synthetic
cggcagcagcttttggatt

SEQ ID NO: 28589 - DNA, 18 bp, Artificial Sequence
  Synthetic
cgaactcaaaatgcccgc

SEQ ID NO: 28590 - DNA, 16 bp, Artificial Sequence
  Synthetic
aaggcaaaggcgtgcg

SEQ ID NO: 28591 - DNA, 17 bp, Artificial Sequence
  Synthetic
gcgcatggctcaacctc

SEQ ID NO: 28592 - DNA, 18 bp, Artificial Sequence
  Synthetic
ccggtaaagcctgctacg

SEQ ID NO: 28593 - DNA, 16 bp, Artificial Sequence
  Synthetic
aacgcttcgggcctgc

SEQ ID NO: 28594 - DNA, 16 bp, Artificial Sequence
  Synthetic
atcacgccgcacatcg

SEQ ID NO: 28595 - DNA, 19 bp, Artificial Sequence
  Synthetic
gatgctcgaccacagcctg

SEQ ID NO: 28596 - DNA, 17 bp, Artificial Sequence
  Synthetic
accgtacccgcgttacc

SEQ ID NO: 28597 - DNA, 18 bp, Artificial Sequence
  Synthetic
cccaacgcatcgaagacg

SEQ ID NO: 28598 - DNA, 19 bp, Artificial Sequence
  Synthetic
aaggcggtagaggtcggta

SEQ ID NO: 28599 - DNA, 20 bp, Artificial Sequence
  Synthetic
cgtgccgtctgaaagttgat

SEQ ID NO: 28600 - DNA, 16 bp, Artificial Sequence
  Synthetic
aagcccatgcgctcgg

SEQ ID NO: 28601 - DNA, 20 bp, Artificial Sequence
  Synthetic
acccaaataaccttccctgc

SEQ ID NO: 28602 - DNA, 17 bp, Artificial Sequence
  Synthetic
aaaccgtcctgcgcgac

SEQ ID NO: 28603 - DNA, 20 bp, Artificial Sequence
  Synthetic
ggcgacaacttcaaagccta

SEQ ID NO: 28604 - DNA, 19 bp, Artificial Sequence
  Synthetic
ggcatcgccatgaaagacg

SEQ ID NO: 28605 - DNA, 18 bp, Artificial Sequence
  Synthetic
ccagatgtcgaagtcgcc

SEQ ID NO: 28606 - DNA, 19 bp, Artificial Sequence
  Synthetic
tcccttttccaacgtatcc

SEQ ID NO: 28607 - DNA, 16 bp, Artificial Sequence
  Synthetic
ttaccaatgcgccgcc

SEQ ID NO: 28608 - DNA, 18 bp, Artificial Sequence
  Synthetic
tccattgctgctgccaaa

SEQ ID NO: 28609 - DNA, 16 bp, Artificial Sequence
  Synthetic
tcgaagccgccgacct

SEQ ID NO: 28610 - DNA, 18 bp, Artificial Sequence
  Synthetic
cccatctccgacacgacc

SEQ ID NO: 28611 - DNA, 17 bp, Artificial Sequence
  Synthetic
tcttcctgctcgccagc

SEQ ID NO: 28612 - DNA, 18 bp, Artificial Sequence
  Synthetic
gccccgttaccgacaagt

SEQ ID NO: 28613 - DNA, 20 bp, Artificial Sequence
  Synthetic
actgctgtctttaggcatcg

SEQ ID NO: 28614 - DNA, 19 bp, Artificial Sequence
  Synthetic
atcaatccgggcaattccg

SEQ ID NO: 28615 - DNA, 19 bp, Artificial Sequence
  Synthetic
aatcgccgttctgctttcg

SEQ ID NO: 28616 - DNA, 16 bp, Artificial Sequence
  Synthetic
tcgcgacggcaagcag

SEQ ID NO: 28617 - DNA, 16 bp, Artificial Sequence
  Synthetic
ccggcaatctgcacgg

SEQ ID NO: 28618 - DNA, 16 bp, Artificial Sequence
  Synthetic
gccttgaccaccgcct

SEQ ID NO: 28619 - DNA, 19 bp, Artificial Sequence
  Synthetic
cggtaaaacgccgtgttcg

SEQ ID NO: 28620 - DNA, 19 bp, Artificial Sequence
  Synthetic
tgttttcgacattcgccgg

SEQ ID NO: 28621 - DNA, 16 bp, Artificial Sequence
  Synthetic
ctttgccgaccaccgc

SEQ ID NO: 28622 - DNA, 19 bp, Artificial Sequence
  Synthetic
tgcggatttccttcagcct

SEQ ID NO: 28623 - DNA, 17 bp, Artificial Sequence
  Synthetic
tagagcgtttgggcggc

SEQ ID NO: 28624 - DNA, 17 bp, Artificial Sequence
  Synthetic
acgacctgctccttgcc

SEQ ID NO: 28625 - DNA, 18 bp, Artificial Sequence
  Synthetic
aatccccgaattcgcacc

SEQ ID NO: 28626 - DNA, 16 bp, Artificial Sequence
  Synthetic
ttcgtccgcagcctcg

SEQ ID NO: 28627 - DNA, 18 bp, Artificial Sequence
  Synthetic
acggcggacaatacagca

SEQ ID NO: 28628 - DNA, 19 bp, Artificial Sequence
  Synthetic
caacggacaaaccactgcc

SEQ ID NO: 28629 - DNA, 15 bp, Artificial Sequence
  Synthetic
attgcaccgccgcag

SEQ ID NO: 28630 - DNA, 20 bp, Artificial Sequence
  Synthetic
gcacgcaccaaaaaacctca

SEQ ID NO: 28631 - DNA, 19 bp, Artificial Sequence
  Synthetic
cctcacgacagaaaccgac

SEQ ID NO: 28632 - DNA, 16 bp, Artificial Sequence
  Synthetic
gcatcccggcatcagc

SEQ ID NO: 28633 - DNA, 20 bp, Artificial Sequence
  Synthetic
actcttggcacgcatcaatg

SEQ ID NO: 28634 - DNA, 18 bp, Artificial Sequence
  Synthetic
agaggcttcagacggcat

SEQ ID NO: 28635 - DNA, 20 bp, Artificial Sequence
  Synthetic
atacttccgccgaaaccctt

SEQ ID NO: 28636 - DNA, 18 bp, Artificial Sequence
  Synthetic
gttcaaagccgtcctgcc

SEQ ID NO: 28637 - DNA, 19 bp, Artificial Sequence
  Synthetic
tgaacaccttcttccggca

SEQ ID NO: 28638 - DNA, 20 bp, Artificial Sequence
  Synthetic
atggtcatgaaacgcaaagc

SEQ ID NO: 28639 - DNA, 19 bp, Artificial Sequence
  Synthetic
ttgcgcctttttttgggca

SEQ ID NO: 28640 - DNA, 18 bp, Artificial Sequence
  Synthetic
aaaacgccattcgaaacg

SEQ ID NO: 28641 - DNA, 19 bp, Artificial Sequence
  Synthetic
tctacatcctgcaagcccg

SEQ ID NO: 28642 - DNA, 20 bp, Artificial Sequence
  Synthetic
actcgttcccaaactcggat

SEQ ID NO: 28643 - DNA, 17 bp, Artificial Sequence
  Synthetic
cggttcgcaagccatcg

SEQ ID NO: 28644 - DNA, 20 bp, Artificial Sequence
  Synthetic
caccatcctgcacatcatcg

SEQ ID NO: 28645 - DNA, 16 bp, Artificial Sequence
  Synthetic
tcccgtcatcgcctcc

SEQ ID NO: 28646 - DNA, 19 bp, Artificial Sequence
  Synthetic
ggtcttccccgacctgaac

SEQ ID NO: 28647 - DNA, 16 bp, Artificial Sequence
  Synthetic
tcccttgacgcggcag

SEQ ID NO: 28648 - DNA, 18 bp, Artificial Sequence
  Synthetic
ttccaagccgttgacgca

SEQ ID NO: 28649 - DNA, 20 bp, Artificial Sequence
  Synthetic
accgtttaccgcaatatcgc

SEQ ID NO: 28650 - DNA, 18 bp, Artificial Sequence
  Synthetic
ggcattaccgccgcattc

SEQ ID NO: 28651 - DNA, 19 bp, Artificial Sequence
  Synthetic
cagccaacctcctagagcc

SEQ ID NO: 28652 - DNA, 19 bp, Artificial Sequence
  Synthetic
atgctcgcctacgtcgaaa

SEQ ID NO: 28653 - DNA, 20 bp, Artificial Sequence
  Synthetic
tcatacggcatcgtcgaaac

SEQ ID NO: 28654 - DNA, 16 bp, Artificial Sequence
  Synthetic
acgtcttccgggccga

SEQ ID NO: 28655 - DNA, 19 bp, Artificial Sequence
  Synthetic
cgacaatttctcctgccgc

SEQ ID NO: 28656 - DNA, 20 bp, Artificial Sequence
  Synthetic
aactctggttcggctacacc

SEQ ID NO: 28657 - DNA, 17 bp, Artificial Sequence
  Synthetic
gccccctccgtcaactt

SEQ ID NO: 28658 - DNA, 16 bp, Artificial Sequence
  Synthetic
acgtcctctcccgcct

SEQ ID NO: 28659 - DNA, 20 bp, Artificial Sequence
  Synthetic
ttcccacttcacaacacccg

SEQ ID NO: 28660 - DNA, 19 bp, Artificial Sequence
  Synthetic
accaagcccaagccctaat

SEQ ID NO: 28661 - DNA, 17 bp, Artificial Sequence
  Synthetic
tcgggcatcagcaggac

SEQ ID NO: 28662 - DNA, 18 bp, Artificial Sequence
  Synthetic
tcaccgacctcctcaacc

SEQ ID NO: 28663 - DNA, 19 bp, Artificial Sequence
  Synthetic
cattcgcacaaagcatggg

SEQ ID NO: 28664 - DNA, 16 bp, Artificial Sequence
  Synthetic
tttccaaccgctgccg

SEQ ID NO: 28665 - DNA, 17 bp, Artificial Sequence
  Synthetic
atcatgcggcgacatgg

SEQ ID NO: 28666 - DNA, 18 bp, Artificial Sequence
  Synthetic
tttccctgatcgtgctgc

SEQ ID NO: 28667 - DNA, 15 bp, Artificial Sequence
  Synthetic
aaacgccgcgcacac

SEQ ID NO: 28668 - DNA, 16 bp, Artificial Sequence
  Synthetic
cagcaacgccctgcct

SEQ ID NO: 28669 - DNA, 16 bp, Artificial Sequence
  Synthetic
tatccacaccggcggc

SEQ ID NO: 28670 - DNA, 16 bp, Artificial Sequence
  Synthetic
ctcctgcatacgcgcg

SEQ ID NO: 28671 - DNA, 16 bp, Artificial Sequence
  Synthetic
ttcgggcgtggcttgg

SEQ ID NO: 28672 - DNA, 16 bp, Artificial Sequence
  Synthetic
gtgttgcggggtcacg

SEQ ID NO: 28673 - DNA, 20 bp, Artificial Sequence
  Synthetic
gcgttttctttggcggattt

SEQ ID NO: 28674 - DNA, 17 bp, Artificial Sequence
  Synthetic
gcgcaccaccttttccg

SEQ ID NO: 28675 - DNA, 20 bp, Artificial Sequence
  Synthetic
gttgtttcaacacgacgcgg

SEQ ID NO: 28676 - DNA, 16 bp, Artificial Sequence
  Synthetic
agccgtgggtgcttgc

SEQ ID NO: 28677 - DNA, 20 bp, Artificial Sequence
  Synthetic
ttgccttccgtgatccttac

SEQ ID NO: 28678 - DNA, 18 bp, Artificial Sequence
  Synthetic
gcaacggaaagccaaacg

SEQ ID NO: 28679 - DNA, 18 bp, Artificial Sequence
  Synthetic
cggcgcataccagctttc

SEQ ID NO: 28680 - DNA, 18 bp, Artificial Sequence
  Synthetic
cgatgccggggtaatcca

SEQ ID NO: 28681 - DNA, 20 bp, Artificial Sequence
  Synthetic
cataacggggcattaaacct

SEQ ID NO: 28682 - DNA, 19 bp, Artificial Sequence
  Synthetic
tccaacgtaccgatgattg

SEQ ID NO: 28683 - DNA, 17 bp, Artificial Sequence
  Synthetic
gcaaccaccatcagccc

SEQ ID NO: 28684 - DNA, 16 bp, Artificial Sequence
  Synthetic
gtgtcgccgcacggat

SEQ ID NO: 28685 - DNA, 20 bp, Artificial Sequence
  Synthetic
gcttgtcgatttcctgacgt

SEQ ID NO: 28686 - DNA, 20 bp, Artificial Sequence
  Synthetic
ttcttcgccttcttcctcca

SEQ ID NO: 28687 - DNA, 18 bp, Artificial Sequence
  Synthetic
ggcggacgacggaaatcc

SEQ ID NO: 28688 - DNA, 17 bp, Artificial Sequence
  Synthetic
ctgcaaaacgccttggc

SEQ ID NO: 28689 - DNA, 17 bp, Artificial Sequence
  Synthetic
gccggataaagggcgac

SEQ ID NO: 28690 - DNA, 19 bp, Artificial Sequence
  Synthetic
ccgcctttctcggtgtctg

SEQ ID NO: 28691 - DNA, 18 bp, Artificial Sequence
  Synthetic
cgcctacctgttcggtct

SEQ ID NO: 28692 - DNA, 20 bp, Artificial Sequence
  Synthetic
acaatacagcctgatgacgc

SEQ ID NO: 28693 - DNA, 19 bp, Artificial Sequence
  Synthetic
ggcaaccactttaaacgcc

SEQ ID NO: 28694 - DNA, 17 bp, Artificial Sequence
  Synthetic
gcccgaacacaaaccgc

SEQ ID NO: 28695 - DNA, 21 bp, Artificial Sequence
  Synthetic
cttgggcaatcaattctttca

SEQ ID NO: 28696 - DNA, 19 bp, Artificial Sequence
  Synthetic
caatcggagtaagcggaaa

SEQ ID NO: 28697 - DNA, 22 bp, Artificial Sequence
  Synthetic
acatcgttactccaaaaacgta

SEQ ID NO: 28698 - DNA, 17 bp, Artificial Sequence
  Synthetic
caatgcgttgcgtccga

SEQ ID NO: 28699 - DNA, 18 bp, Artificial Sequence
  Synthetic
tcatctactgcaccggcg

SEQ ID NO: 28700 - DNA, 19 bp, Artificial Sequence
  Synthetic
tgtctgcctccccgataat

SEQ ID NO: 28701 - DNA, 20 bp, Artificial Sequence
  Synthetic
cgtcttgccataggtacggc

SEQ ID NO: 28702 - DNA, 18 bp, Artificial Sequence
  Synthetic
ttaccaggcatccaaacg

SEQ ID NO: 28703 - DNA, 17 bp, Artificial Sequence
  Synthetic
ttgccgcattgcccgac

SEQ ID NO: 28704 - DNA, 22 bp, Artificial Sequence
  Synthetic
gcgttttcggtatatatgcaaa

SEQ ID NO: 28705 - DNA, 20 bp, Artificial Sequence
  Synthetic
cgaatccccaaaccgcatta

SEQ ID NO: 28706 - DNA, 20 bp, Artificial Sequence
  Synthetic
gcatagtgcttgcattgagc

SEQ ID NO: 28707 - DNA, 18 bp, Artificial Sequence
  Synthetic
tcaattcccgaagctcgc

SEQ ID NO: 28708 - DNA, 18 bp, Artificial Sequence
  Synthetic
tggcacaaacagttgtcg

SEQ ID NO: 28709 - DNA, 20 bp, Artificial Sequence
  Synthetic
ttctcctgcaaggcattcat

SEQ ID NO: 28710 - DNA, 19 bp, Artificial Sequence
  Synthetic
agggacggtgcttctatgg

SEQ ID NO: 28711 - DNA, 20 bp, Artificial Sequence
  Synthetic
tcgaaggcgtaacgaagttg

SEQ ID NO: 28712 - DNA, 19 bp, Artificial Sequence
  Synthetic
actgtgcggtttcgtcaaa

SEQ ID NO: 28713 - DNA, 16 bp, Artificial Sequence
  Synthetic
gccgtgatactgccgc

SEQ ID NO: 28714 - DNA, 19 bp, Artificial Sequence
  Synthetic
ggatttgggctttcatcaa

SEQ ID NO: 28715 - DNA, 16 bp, Artificial Sequence
  Synthetic
accggtcggattgcgc

SEQ ID NO: 28716 - DNA, 16 bp, Artificial Sequence
  Synthetic
gcgatggacgaagccg

SEQ ID NO: 28717 - DNA, 16 bp, Artificial Sequence
  Synthetic
cgccgacaaccccctt

SEQ ID NO: 28718 - DNA, 18 bp, Artificial Sequence
  Synthetic
cgacagcatatgcgtcgc

SEQ ID NO: 28719 - DNA, 17 bp, Artificial Sequence
  Synthetic
atccaacgcggcctgac

SEQ ID NO: 28720 - DNA, 18 bp, Artificial Sequence
  Synthetic
cgccctgcttgtaccgat

SEQ ID NO: 28721 - DNA, 20 bp, Artificial Sequence
  Synthetic
gcgctgttgattttccttgc

SEQ ID NO: 28722 - DNA, 19 bp, Artificial Sequence
  Synthetic
ccatcaatgcgacaaagcg

SEQ ID NO: 28723 - DNA, 18 bp, Artificial Sequence
  Synthetic
gctcgaaggcgacctcat

SEQ ID NO: 28724 - DNA, 15 bp, Artificial Sequence
  Synthetic
acgaaaccgccgcac

SEQ ID NO: 28725 - DNA, 20 bp, Artificial Sequence
  Synthetic
atcacaggcctaggttacct

SEQ ID NO: 28726 - DNA, 16 bp, Artificial Sequence
  Synthetic
aaccccgtcgtcagcg

SEQ ID NO: 28727 - DNA, 19 bp, Artificial Sequence
  Synthetic
tacaacactttcggcctgc

SEQ ID NO: 28728 - DNA, 18 bp, Artificial Sequence
  Synthetic
ccgcttctgcatcttccg

SEQ ID NO: 28729 - DNA, 19 bp, Artificial Sequence
  Synthetic
ggccttcgacgtttttcac

SEQ ID NO: 28730 - DNA, 15 bp, Artificial Sequence
  Synthetic
agcaaatcggcggcg

SEQ ID NO: 28731 - DNA, 20 bp, Artificial Sequence
  Synthetic
gcatcgagaaacagctccct

SEQ ID NO: 28732 - DNA, 17 bp, Artificial Sequence
  Synthetic
acttcgcgcaatacggc

SEQ ID NO: 28733 - DNA, 20 bp, Artificial Sequence
  Synthetic
ggcgcaatacttggtcaaac

SEQ ID NO: 28734 - DNA, 17 bp, Artificial Sequence
  Synthetic
caccgttgccgaaaccg

SEQ ID NO: 28735 - DNA, 18 bp, Artificial Sequence
  Synthetic
gcgttgccgaaaacaccc

SEQ ID NO: 28736 - DNA, 18 bp, Artificial Sequence
  Synthetic
ggattgacggcgaaccag

SEQ ID NO: 28737 - DNA, 18 bp, Artificial Sequence
  Synthetic
caaacggctgagccttgc

SEQ ID NO: 28738 - DNA, 16 bp, Artificial Sequence
  Synthetic
tggagcgtcccgaacc

SEQ ID NO: 28739 - DNA, 20 bp, Artificial Sequence
  Synthetic
cacgcttttttgtgtttgcc

SEQ ID NO: 28740 - DNA, 17 bp, Artificial Sequence
  Synthetic
tacggacgcggcgaaac

SEQ ID NO: 28741 - DNA, 18 bp, Artificial Sequence
  Synthetic
tcacccaaatcggcttgg

SEQ ID NO: 28742 - DNA, 16 bp, Artificial Sequence
  Synthetic
ccgcgcccctgaactt

SEQ ID NO: 28743 - DNA, 18 bp, Artificial Sequence
  Synthetic
ggcgacttcgggggattt

SEQ ID NO: 28744 - DNA, 16 bp, Artificial Sequence
  Synthetic
tctgccgcaaagccgc

SEQ ID NO: 28745 - DNA, 18 bp, Artificial Sequence
  Synthetic
aaaccatacgcccaagac

SEQ ID NO: 28746 - DNA, 15 bp, Artificial Sequence
  Synthetic
aacgccagcgcatcg

SEQ ID NO: 28747 - DNA, 20 bp, Artificial Sequence
  Synthetic
gaaggaattgtcgggcgaat

SEQ ID NO: 28748 - DNA, 18 bp, Artificial Sequence
  Synthetic
tggctggtgaaacccctg

SEQ ID NO: 28749 - DNA, 23 bp, Artificial Sequence
  Synthetic
taattaatccgcttatccttgat

SEQ ID NO: 28750 - DNA, 17 bp, Artificial Sequence
  Synthetic
caggaacgcgccgtcaa

SEQ ID NO: 28751 - DNA, 18 bp, Artificial Sequence
  Synthetic
accaagaaagcagcgacg

SEQ ID NO: 28752 - DNA, 18 bp, Artificial Sequence
  Synthetic
ttgagcgccgagatttgg

SEQ ID NO: 28753 - DNA, 17 bp, Artificial Sequence
  Synthetic
tggcggagaacatcggc

SEQ ID NO: 28754 - DNA, 19 bp, Artificial Sequence
  Synthetic
aaaccggtttccttgtccc

SEQ ID NO: 28755 - DNA, 19 bp, Artificial Sequence
  Synthetic
agccttttgtccaaaccgc

SEQ ID NO: 28756 - DNA, 16 bp, Artificial Sequence
  Synthetic
ccttatacgccgccgc

SEQ ID NO: 28757 - DNA, 20 bp, Artificial Sequence
  Synthetic
cctgtcgttgtgataggcaa

SEQ ID NO: 28758 - DNA, 19 bp, Artificial Sequence
  Synthetic
gccaagcccaaatccgtct

SEQ ID NO: 28759 - DNA, 19 bp, Artificial Sequence
  Synthetic
gcagggaaacgtctctgcc

SEQ ID NO: 28760 - DNA, 19 bp, Artificial Sequence
  Synthetic
atacaggcttgcagaactt

SEQ ID NO: 28761 - DNA, 19 bp, Artificial Sequence
  Synthetic
tccgggattcgaccgtgtt

SEQ ID NO: 28762 - DNA, 19 bp, Artificial Sequence
  Synthetic
caggcattacgcgcaacaa

SEQ ID NO: 28763 - DNA, 16 bp, Artificial Sequence
  Synthetic
cttgccggcaaccagc

SEQ ID NO: 28764 - DNA, 19 bp, Artificial Sequence
  Synthetic
acgcctgtcttgactttcg

SEQ ID NO: 28765 - DNA, 16 bp, Artificial Sequence
  Synthetic
tcagaaccggccgcac

SEQ ID NO: 28766 - DNA, 16 bp, Artificial Sequence
  Synthetic
aagcgataccggggcg

SEQ ID NO: 28767 - DNA, 18 bp, Artificial Sequence
  Synthetic
acacgatgcggtctttgc

SEQ ID NO: 28768 - DNA, 18 bp, Artificial Sequence
  Synthetic
atatcgcggcggtttcag

SEQ ID NO: 28769 - DNA, 18 bp, Artificial Sequence
  Synthetic
caatcaccgcgccgaaac

SEQ ID NO: 28770 - DNA, 16 bp, Artificial Sequence
  Synthetic
ttcaccgcaccgacgg

SEQ ID NO: 28771 - DNA, 18 bp, Artificial Sequence
  Synthetic
cgcccgtttaccgtgaat

SEQ ID NO: 28772 - DNA, 16 bp, Artificial Sequence
  Synthetic
gggtagggcaggcgaa

SEQ ID NO: 28773 - DNA, 16 bp, Artificial Sequence
  Synthetic
cgcccttcagttcggc

SEQ ID NO: 28774 - DNA, 18 bp, Artificial Sequence
  Synthetic
ccgccactttgccgtttg

SEQ ID NO: 28775 - DNA, 16 bp, Artificial Sequence
  Synthetic
ccgccttgccgttgac

SEQ ID NO: 28776 - DNA, 18 bp, Artificial Sequence
  Synthetic
gcttacaaccgcgcaacc

SEQ ID NO: 28777 - DNA, 18 bp, Artificial Sequence
  Synthetic
tgtccgaccttttggcgg

SEQ ID NO: 28778 - DNA, 20 bp, Artificial Sequence
  Synthetic
tgccgacaacgaagaaaacg

SEQ ID NO: 28779 - DNA, 16 bp, Artificial Sequence
  Synthetic
cggcggacgatttgcg

SEQ ID NO: 28780 - DNA, 16 bp, Artificial Sequence
  Synthetic
acaacgacggccagcc

SEQ ID NO: 28781 - DNA, 16 bp, Artificial Sequence
  Synthetic
tcgggtctttggccgc

SEQ ID NO: 28782 - DNA, 18 bp, Artificial Sequence
  Synthetic
cgcgtttgccctcgttct

SEQ ID NO: 28783 - DNA, 16 bp, Artificial Sequence
  Synthetic
atgtcccagccgcctg

SEQ ID NO: 28784 - DNA, 16 bp, Artificial Sequence
  Synthetic
tccccctgcccggttt

SEQ ID NO: 28785 - DNA, 16 bp, Artificial Sequence
  Synthetic
gcctggcgggttttgc

SEQ ID NO: 28786 - DNA, 16 bp, Artificial Sequence
  Synthetic
tgctcagcacggggac

SEQ ID NO: 28787 - DNA, 21 bp, Artificial Sequence
  Synthetic
attttcaaatggtagggaagg

SEQ ID NO: 28788 - DNA, 23 bp, Artificial Sequence
  Synthetic
accttgatttctttggaaatctc

SEQ ID NO: 28789 - DNA, 18 bp, Artificial Sequence
  Synthetic
cgcccaaatgctcaacca

SEQ ID NO: 28790 - DNA, 20 bp, Artificial Sequence
  Synthetic
tttacctccgaatgcgtctc

SEQ ID NO: 28791 - DNA, 19 bp, Artificial Sequence
  Synthetic
cgggcggcttgattttcct

SEQ ID NO: 28792 - DNA, 19 bp, Artificial Sequence
  Synthetic
gccgaatttctgcccttcg

SEQ ID NO: 28793 - DNA, 16 bp, Artificial Sequence
  Synthetic
tgctcgggcggtatcc

SEQ ID NO: 28794 - DNA, 16 bp, Artificial Sequence
  Synthetic
aactgttccccgccgc

SEQ ID NO: 28795 - DNA, 18 bp, Artificial Sequence
  Synthetic
tccgacgtgtatcagggc

SEQ ID NO: 28796 - DNA, 18 bp, Artificial Sequence
  Synthetic
gagaccgacaaaaatgcc

SEQ ID NO: 28797 - DNA, 20 bp, Artificial Sequence
  Synthetic
gatcggtgaagtctgccttg

SEQ ID NO: 28798 - DNA, 16 bp, Artificial Sequence
  Synthetic
cgacttggcttgggcg

SEQ ID NO: 28799 - DNA, 20 bp, Artificial Sequence
  Synthetic
cgcagcagttctttaccgta

SEQ ID NO: 28800 - DNA, 16 bp, Artificial Sequence
  Synthetic
atgcagcacgacagcg

SEQ ID NO: 28801 - DNA, 18 bp, Artificial Sequence
  Synthetic
cgtaaatggcggacacgg

SEQ ID NO: 28802 - DNA, 16 bp, Artificial Sequence
  Synthetic
ttcggcggggtacacg

SEQ ID NO: 28803 - DNA, 19 bp, Artificial Sequence
  Synthetic
ttgtcggcgtacaggatgg

SEQ ID NO: 28804 - DNA, 16 bp, Artificial Sequence
  Synthetic
accgtggcgatggtcg

SEQ ID NO: 28805 - DNA, 16 bp, Artificial Sequence
  Synthetic
gattgcctgcccgtgc

SEQ ID NO: 28806 - DNA, 18 bp, Artificial Sequence
  Synthetic
tatcgaaagcggcagcgg

SEQ ID NO: 28807 - DNA, 18 bp, Artificial Sequence
  Synthetic
ttcagaggaccgttcggc

SEQ ID NO: 28808 - DNA, 16 bp, Artificial Sequence
  Synthetic
tgtcgagctgggtcgg

SEQ ID NO: 28809 - DNA, 18 bp, Artificial Sequence
  Synthetic
tggacggtatggacgggc

SEQ ID NO: 28810 - DNA, 17 bp, Artificial Sequence
  Synthetic
actccgtcggcgaatgg

SEQ ID NO: 28811 - DNA, 19 bp, Artificial Sequence
  Synthetic
gatttccccaacagccacg

SEQ ID NO: 28812 - DNA, 18 bp, Artificial Sequence
  Synthetic
catgccaacgctatctgg

SEQ ID NO: 28813 - DNA, 18 bp, Artificial Sequence
  Synthetic
caagaaatgaacccgggt

SEQ ID NO: 28814 - DNA, 19 bp, Artificial Sequence
  Synthetic
gcaagaaaccgtccgtacg

SEQ ID NO: 28815 - DNA, 18 bp, Artificial Sequence
  Synthetic
aactacctcaacgccgca

SEQ ID NO: 28816 - DNA, 18 bp, Artificial Sequence
  Synthetic
acaccgttcggatgttcg

SEQ ID NO: 28817 - DNA, 16 bp, Artificial Sequence
  Synthetic
acgcctcgacgccatc

SEQ ID NO: 28818 - DNA, 16 bp, Artificial Sequence
  Synthetic
accgaagtcgccctgc

SEQ ID NO: 28819 - DNA, 20 bp, Artificial Sequence
  Synthetic
gctttatgtgcctgtttcgc

SEQ ID NO: 28820 - DNA, 19 bp, Artificial Sequence
  Synthetic
caggatttggtgtcggagc

SEQ ID NO: 28821 - DNA, 16 bp, Artificial Sequence
  Synthetic
tcaacctgcgccaacg

SEQ ID NO: 28822 - DNA, 16 bp, Artificial Sequence
  Synthetic
cagcaaccgcctgacc

SEQ ID NO: 28823 - DNA, 16 bp, Artificial Sequence
  Synthetic
gccgatgcgcgtttgc

SEQ ID NO: 28824 - DNA, 17 bp, Artificial Sequence
  Synthetic
cgaacacgagccgcttg

SEQ ID NO: 28825 - DNA, 18 bp, Artificial Sequence
  Synthetic
ccgtatccagcggatccg

SEQ ID NO: 28826 - DNA, 16 bp, Artificial Sequence
  Synthetic
ggcataccggcgtgct

SEQ ID NO: 28827 - DNA, 20 bp, Artificial Sequence
  Synthetic
gccagaatgaacaatctgat

SEQ ID NO: 28828 - DNA, 16 bp, Artificial Sequence
  Synthetic
tttcgggtggcgcagg

SEQ ID NO: 28829 - DNA, 16 bp, Artificial Sequence
  Synthetic
gatggcgtgtgcggtc

SEQ ID NO: 28830 - DNA, 16 bp, Artificial Sequence
  Synthetic
tttgcacggaggctgc

SEQ ID NO: 28831 - DNA, 16 bp, Artificial Sequence
  Synthetic
tcccgtttcggcgtgc

SEQ ID NO: 28832 - DNA, 16 bp, Artificial Sequence
  Synthetic
gaaactcgctgcccgc

SEQ ID NO: 28833 - DNA, 20 bp, Artificial Sequence
  Synthetic
cgtgaaatcggtttcgtgtc

SEQ ID NO: 28834 - DNA, 17 bp, Artificial Sequence
  Synthetic
accaggccagcaggatg

SEQ ID NO: 28835 - DNA, 20 bp, Artificial Sequence
  Synthetic
aggtcgagtgctttgacaaa

SEQ ID NO: 28836 - DNA, 18 bp, Artificial Sequence
  Synthetic
ttccaaatcggcatcggg

SEQ ID NO: 28837 - DNA, 20 bp, Artificial Sequence
  Synthetic
ggggccgaatacttcttctc

SEQ ID NO: 28838 - DNA, 18 bp, Artificial Sequence
  Synthetic
ttgccaacctcaaaccgc

SEQ ID NO: 28839 - DNA, 18 bp, Artificial Sequence
  Synthetic
cacgctgacggacaaagc

SEQ ID NO: 28840 - DNA, 18 bp, Artificial Sequence
  Synthetic
caacgccgaaatcgtcgc

SEQ ID NO: 28841 - DNA, 22 bp, Artificial Sequence
  Synthetic
cagacccttgttttttattccc

SEQ ID NO: 28842 - DNA, 18 bp, Artificial Sequence
  Synthetic
atcggctctccatcgacc

SEQ ID NO: 28843 - DNA, 18 bp, Artificial Sequence
  Synthetic
tcttcacgcgaacatgcc

SEQ ID NO: 28844 - DNA, 20 bp, Artificial Sequence
  Synthetic
tcgaaccgcaagttacttgg

SEQ ID NO: 28845 - DNA, 18 bp, Artificial Sequence
  Synthetic
tatggggcccgaacaagg

SEQ ID NO: 28846 - DNA, 17 bp, Artificial Sequence
  Synthetic
atgccgacagtttgccg

SEQ ID NO: 28847 - DNA, 17 bp, Artificial Sequence
  Synthetic
tgtgcggatgcggttga

SEQ ID NO: 28848 - DNA, 19 bp, Artificial Sequence
  Synthetic
ctgttcgatcagccagacg

SEQ ID NO: 28849 - DNA, 17 bp, Artificial Sequence
  Synthetic
acagcagcatcgcgatg

SEQ ID NO: 28850 - DNA, 18 bp, Artificial Sequence
  Synthetic
aacacggcggaaacaggc

SEQ ID NO: 28851 - DNA, 18 bp, Artificial Sequence
  Synthetic
cacggatttgtgcagggc

SEQ ID NO: 28852 - DNA, 20 bp, Artificial Sequence
  Synthetic
ttccttcatcagcttggtcg

SEQ ID NO: 28853 - DNA, 20 bp, Artificial Sequence
  Synthetic
acgaacccttcagcgtgatg

SEQ ID NO: 28854 - DNA, 16 bp, Artificial Sequence
  Synthetic
cggcgtactcgtccgt

SEQ ID NO: 28855 - DNA, 18 bp, Artificial Sequence
  Synthetic
ttgctgaccatcgtgaat

SEQ ID NO: 28856 - DNA, 19 bp, Artificial Sequence
  Synthetic
tgttcgttgctttgggatt

SEQ ID NO: 28857 - DNA, 20 bp, Artificial Sequence
  Synthetic
tgtaatcgccgaaacggtct

SEQ ID NO: 28858 - DNA, 20 bp, Artificial Sequence
  Synthetic
tgttggactactatccgcgt

SEQ ID NO: 28859 - DNA, 19 bp, Artificial Sequence
  Synthetic
atacagttgggcggtcaac

SEQ ID NO: 28860 - DNA, 17 bp, Artificial Sequence
  Synthetic
cgcaacagcggcattcc

SEQ ID NO: 28861 - DNA, 18 bp, Artificial Sequence
  Synthetic
gcttcgactccgttaccg

SEQ ID NO: 28862 - DNA, 17 bp, Artificial Sequence
  Synthetic
actgaccccgcctttgg

SEQ ID NO: 28863 - DNA, 20 bp, Artificial Sequence
  Synthetic
gtggttaaagtgtcagccgt

SEQ ID NO: 28864 - DNA, 16 bp, Artificial Sequence
  Synthetic
tttctgccccgccctc

SEQ ID NO: 28865 - DNA, 20 bp, Artificial Sequence
  Synthetic
ttggaggcgatgatgaacag

SEQ ID NO: 28866 - DNA, 18 bp, Artificial Sequence
  Synthetic
cttcgtcgggggttttgc

SEQ ID NO: 28867 - DNA, 18 bp, Artificial Sequence
  Synthetic
gcaatccgaccgaaaccg

SEQ ID NO: 28868 - DNA, 18 bp, Artificial Sequence
  Synthetic
ctgtgcatcaaagccgcc

SEQ ID NO: 28869 - DNA, 16 bp, Artificial Sequence
  Synthetic
tccgagcacacccacc

SEQ ID NO: 28870 - DNA, 16 bp, Artificial Sequence
  Synthetic
ctcatcaggcgcgcct

SEQ ID NO: 28871 - DNA, 16 bp, Artificial Sequence
  Synthetic
aagatctgccccccgg

SEQ ID NO: 28872 - DNA, 19 bp, Artificial Sequence
  Synthetic
agtcggtcaggaacacgtc

SEQ ID NO: 28873 - DNA, 18 bp, Artificial Sequence
  Synthetic
aacgtccacccgaccaaa

SEQ ID NO: 28874 - DNA, 18 bp, Artificial Sequence
  Synthetic
ccgactttcgccaaaggc

SEQ ID NO: 28875 - DNA, 20 bp, Artificial Sequence
  Synthetic
agatacggcatatcgcaagg

SEQ ID NO: 28876 - DNA, 20 bp, Artificial Sequence
  Synthetic
acaactgttgcagctcgata

SEQ ID NO: 28877 - DNA, 17 bp, Artificial Sequence
  Synthetic
cgaagccgccaatcagg

SEQ ID NO: 28878 - DNA, 17 bp, Artificial Sequence
  Synthetic
tcccgtccgcatccttc

SEQ ID NO: 28879 - DNA, 18 bp, Artificial Sequence
  Synthetic
tttcgacccgagcattcg

SEQ ID NO: 28880 - DNA, 19 bp, Artificial Sequence
  Synthetic
acttggtcagtttgccttt

SEQ ID NO: 28881 - DNA, 19 bp, Artificial Sequence
  Synthetic
ggatcatgcctttacccgg

SEQ ID NO: 28882 - DNA, 18 bp, Artificial Sequence
  Synthetic
gacggaagagcaggttgc

SEQ ID NO: 28883 - DNA, 24 bp, Artificial Sequence
  Synthetic
ttgtagtatcagaggataaagtgt

SEQ ID NO: 28884 - DNA, 19 bp, Artificial Sequence
  Synthetic
atgcggatatgacctcagt

SEQ ID NO: 28885 - DNA, 20 bp, Artificial Sequence
  Synthetic
cgaatttcctgatgcaaagt

SEQ ID NO: 28886 - DNA, 23 bp, Artificial Sequence
  Synthetic
ggtatttttgtgcgatagacatc

SEQ ID NO: 28887 - DNA, 21 bp, Artificial Sequence
  Synthetic
aagcagatgaagtagtgattg

SEQ ID NO: 28888 - DNA, 18 bp, Artificial Sequence
  Synthetic
gcaatctcggtgctgaat

SEQ ID NO: 28889 - DNA, 18 bp, Artificial Sequence
  Synthetic
cttgacccagagcagttg

SEQ ID NO: 28890 - DNA, 22 bp, Artificial Sequence
  Synthetic
catcaaaaagaggtatcggaaa

SEQ ID NO: 28891 - DNA, 16 bp, Artificial Sequence
  Synthetic
caggttggccgccaag

SEQ ID NO: 28892 - DNA, 15 bp, Artificial Sequence
  Synthetic
attggcgcgcgtctg

SEQ ID NO: 28893 - DNA, 18 bp, Artificial Sequence
  Synthetic
tcgaacccggaccgatac

SEQ ID NO: 28894 - DNA, 16 bp, Artificial Sequence
  Synthetic
accgccgagcatgacg

SEQ ID NO: 28895 - DNA, 18 bp, Artificial Sequence
  Synthetic
ttcgatgccttcggggac

SEQ ID NO: 28896 - DNA, 17 bp, Artificial Sequence
  Synthetic
acacttcggcggtcagc

SEQ ID NO: 28897 - DNA, 15 bp, Artificial Sequence
  Synthetic
tcaggcgcgcgcaat

SEQ ID NO: 28898 - DNA, 18 bp, Artificial Sequence
  Synthetic
ccgccgattcgatcatgg

SEQ ID NO: 28899 - DNA, 19 bp, Artificial Sequence
  Synthetic
acaattctttgcggcctgc

SEQ ID NO: 28900 - DNA, 16 bp, Artificial Sequence
  Synthetic
taccttcgacggcggc

SEQ ID NO: 28901 - DNA, 16 bp, Artificial Sequence
  Synthetic
ttcgcccaccacccga

SEQ ID NO: 28902 - DNA, 16 bp, Artificial Sequence
  Synthetic
tactcggcgtggcagg

SEQ ID NO: 28903 - DNA, 20 bp, Artificial Sequence
  Synthetic
cgggtgtacagttcggtcag

SEQ ID NO: 28904 - DNA, 17 bp, Artificial Sequence
  Synthetic
gtcggcaccgtcttacg

SEQ ID NO: 28905 - DNA, 20 bp, Artificial Sequence
  Synthetic
ggacagatgacggaagagga

SEQ ID NO: 28906 - DNA, 20 bp, Artificial Sequence
  Synthetic
accatcacccaaatgctcaa

SEQ ID NO: 28907 - DNA, 18 bp, Artificial Sequence
  Synthetic
acgttacccccttgtcgc

SEQ ID NO: 28908 - DNA, 17 bp, Artificial Sequence
  Synthetic
acgccaggccaccaaag

SEQ ID NO: 28909 - DNA, 20 bp, Artificial Sequence
  Synthetic
ggtcgatttcgttcaacagc

SEQ ID NO: 28910 - DNA, 16 bp, Artificial Sequence
  Synthetic
acgtgttcgggcgtgc

SEQ ID NO: 28911 - DNA, 19 bp, Artificial Sequence
  Synthetic
ggaaatcggggtgcgaaca

SEQ ID NO: 28912 - DNA, 18 bp, Artificial Sequence
  Synthetic
acttgcgtccgaactgcc

SEQ ID NO: 28913 - DNA, 18 bp, Artificial Sequence
  Synthetic
tatcccgtgcagcccaat

SEQ ID NO: 28914 - DNA, 17 bp, Artificial Sequence
  Synthetic
tcgaagcgggttttgcc

SEQ ID NO: 28915 - DNA, 16 bp, Artificial Sequence
  Synthetic
tacggcttcggggtcg

SEQ ID NO: 28916 - DNA, 16 bp, Artificial Sequence
  Synthetic
ccgtcctgccgggtat

SEQ ID NO: 28917 - DNA, 18 bp, Artificial Sequence
  Synthetic
gaggttgagcagccaacg

SEQ ID NO: 28918 - DNA, 20 bp, Artificial Sequence
  Synthetic
gacattggaacttcctgcgg

SEQ ID NO: 28919 - DNA, 18 bp, Artificial Sequence
  Synthetic
gagggcggtttcgtcagt

SEQ ID NO: 28920 - DNA, 17 bp, Artificial Sequence
  Synthetic
gttcggcaggcaggttt

SEQ ID NO: 28921 - DNA, 18 bp, Artificial Sequence
  Synthetic
ccatacccaatacgccgg

SEQ ID NO: 28922 - DNA, 20 bp, Artificial Sequence
  Synthetic
cgtcttcgggattagccaat

SEQ ID NO: 28923 - DNA, 20 bp, Artificial Sequence
  Synthetic
tggtcattttgctggaagag

SEQ ID NO: 28924 - DNA, 19 bp, Artificial Sequence
  Synthetic
ggtttgtttgctgccgagg

SEQ ID NO: 28925 - DNA, 22 bp, Artificial Sequence
  Synthetic
tttcaaaagcagattggacaaa

SEQ ID NO: 28926 - DNA, 18 bp, Artificial Sequence
  Synthetic
aattgcgcgcttgcttca

SEQ ID NO: 28927 - DNA, 18 bp, Artificial Sequence
  Synthetic
atacttcggggttgcggg

SEQ ID NO: 28928 - DNA, 17 bp, Artificial Sequence
  Synthetic
gcaatcggcggattcgg

SEQ ID NO: 28929 - DNA, 20 bp, Artificial Sequence
  Synthetic
cctttatgcacgccaccttt

SEQ ID NO: 28930 - DNA, 19 bp, Artificial Sequence
  Synthetic
ggggaagtagaacacggct

SEQ ID NO: 28931 - DNA, 20 bp, Artificial Sequence
  Synthetic
gcggaattgctgaaacagga

SEQ ID NO: 28932 - DNA, 20 bp, Artificial Sequence
  Synthetic
ccgatatgaagcggcggata

SEQ ID NO: 28933 - DNA, 16 bp, Artificial Sequence
  Synthetic
tggcgagggtcatcgc

SEQ ID NO: 28934 - DNA, 16 bp, Artificial Sequence
  Synthetic
gcacgacctccggcaa

SEQ ID NO: 28935 - DNA, 17 bp, Artificial Sequence
  Synthetic
ccgaaatgggcgtcgtc

SEQ ID NO: 28936 - DNA, 18 bp, Artificial Sequence
  Synthetic
gacctggacatcctcgcc

SEQ ID NO: 28937 - DNA, 20 bp, Artificial Sequence
  Synthetic
cctgttcaaccccttcgtcc

SEQ ID NO: 28938 - DNA, 16 bp, Artificial Sequence
  Synthetic
tcggcttcggcgcaag

SEQ ID NO: 28939 - DNA, 19 bp, Artificial Sequence
  Synthetic
aatcggcaggggaaatgtg

SEQ ID NO: 28940 - DNA, 19 bp, Artificial Sequence
  Synthetic
ccatcgtgaccaaactgac

SEQ ID NO: 28941 - DNA, 16 bp, Artificial Sequence
  Synthetic
cgcgtgggctgtatgc

SEQ ID NO: 28942 - DNA, 16 bp, Artificial Sequence
  Synthetic
taccgaagccctgcgc

SEQ ID NO: 28943 - DNA, 19 bp, Artificial Sequence
  Synthetic
gttttcgggaatcagggcg

SEQ ID NO: 28944 - DNA, 17 bp, Artificial Sequence
  Synthetic
agatgcctgcgccgtag

SEQ ID NO: 28945 - DNA, 20 bp, Artificial Sequence
  Synthetic
gacaccagcatgtcgcaatg

SEQ ID NO: 28946 - DNA, 20 bp, Artificial Sequence
  Synthetic
ggctttgaaatggcggtaca

SEQ ID NO: 28947 - DNA, 17 bp, Artificial Sequence
  Synthetic
gccggtcgttgagttcg

SEQ ID NO: 28948 - DNA, 19 bp, Artificial Sequence
  Synthetic
ttcgcgttgttgtaggttt

SEQ ID NO: 28949 - DNA, 16 bp, Artificial Sequence
  Synthetic
aaagcccgcgccgaag

SEQ ID NO: 28950 - DNA, 18 bp, Artificial Sequence
  Synthetic
gaaagttacgaggccgcc

SEQ ID NO: 28951 - DNA, 16 bp, Artificial Sequence
  Synthetic
aaagcctcgaccgccc

SEQ ID NO: 28952 - DNA, 20 bp, Artificial Sequence
  Synthetic
cgatgtaaacctcgggcagc

SEQ ID NO: 28953 - DNA, 18 bp, Artificial Sequence
  Synthetic
atttctggtggcggcttg

SEQ ID NO: 28954 - DNA, 19 bp, Artificial Sequence
  Synthetic
ggcttggaggaattcgtgc

SEQ ID NO: 28955 - DNA, 19 bp, Artificial Sequence
  Synthetic
agcccgtcaaagagtttgg

SEQ ID NO: 28956 - DNA, 20 bp, Artificial Sequence
  Synthetic
cgttctaggttcgggtatgc

SEQ ID NO: 28957 - DNA, 19 bp, Artificial Sequence
  Synthetic
gcgaaatactgtcgccgat

SEQ ID NO: 28958 - DNA, 19 bp, Artificial Sequence
  Synthetic
ggtgagttttgccagttgc

SEQ ID NO: 28959 - DNA, 17 bp, Artificial Sequence
  Synthetic
aaggcagggcgatcagc

SEQ ID NO: 28960 - DNA, 20 bp, Artificial Sequence
  Synthetic
gtccacggcttgaatatcga

SEQ ID NO: 28961 - DNA, 24 bp, Artificial Sequence
  Synthetic
ggataaaaatatgacgacacaaga

SEQ ID NO: 28962 - DNA, 20 bp, Artificial Sequence
  Synthetic
gtggaaaaacggtggacaga

SEQ ID NO: 28963 - DNA, 20 bp, Artificial Sequence
  Synthetic
tgctgattatctgccgtaaa

SEQ ID NO: 28964 - DNA, 20 bp, Artificial Sequence
  Synthetic
atttgttttgccgtgatgtg

SEQ ID NO: 28965 - DNA, 20 bp, Artificial Sequence
  Synthetic
tttcggattctttcgccagt

SEQ ID NO: 28966 - DNA, 18 bp, Artificial Sequence
  Synthetic
atgattttcaggctgcct

SEQ ID NO: 28967 - DNA, 19 bp, Artificial Sequence
  Synthetic
aaaccattctgtgcgctcg

SEQ ID NO: 28968 - DNA, 18 bp, Artificial Sequence
  Synthetic
tgattatttacgcggcgg

SEQ ID NO: 28969 - DNA, 18 bp, Artificial Sequence
  Synthetic
ctgcccattgtgcatagg

SEQ ID NO: 28970 - DNA, 18 bp, Artificial Sequence
  Synthetic
gataccgcaatggctttg

SEQ ID NO: 28971 - DNA, 18 bp, Artificial Sequence
  Synthetic
aacagccgaagccgtaag

SEQ ID NO: 28972 - DNA, 18 bp, Artificial Sequence
  Synthetic
gttggctatgactgcccg

SEQ ID NO: 28973 - DNA, 22 bp, Artificial Sequence
  Synthetic
gattagacccaacatgagtttg

SEQ ID NO: 28974 - DNA, 22 bp, Artificial Sequence
  Synthetic
atatattatgctgacgcccaaa

SEQ ID NO: 28975 - DNA, 15 bp, Artificial Sequence
  Synthetic
aatgcctgcgtcgcg

SEQ ID NO: 28976 - DNA, 17 bp, Artificial Sequence
  Synthetic
gccctgcaacactacgc

SEQ ID NO: 28977 - DNA, 18 bp, Artificial Sequence
  Synthetic
ggataaaaccgcctacgc

SEQ ID NO: 28978 - DNA, 18 bp, Artificial Sequence
  Synthetic
gatatgtcgggcggcatc

SEQ ID NO: 28979 - DNA, 15 bp, Artificial Sequence
  Synthetic
tgcgcgtcggcttga

SEQ ID NO: 28980 - DNA, 18 bp, Artificial Sequence
  Synthetic
ctcttccagcctgccctc

SEQ ID NO: 28981 - DNA, 18 bp, Artificial Sequence
  Synthetic
catcacgcccaacctgac

SEQ ID NO: 28982 - DNA, 19 bp, Artificial Sequence
  Synthetic
tgcatcaaaagtcctgcgg

SEQ ID NO: 28983 - DNA, 18 bp, Artificial Sequence
  Synthetic
acgttttttgctggcatc

SEQ ID NO: 28984 - DNA, 19 bp, Artificial Sequence
  Synthetic
gcgccggtttacaatcctt

SEQ ID NO: 28985 - DNA, 20 bp, Artificial Sequence
  Synthetic
aacagtatgcccaactgcaa

SEQ ID NO: 28986 - DNA, 18 bp, Artificial Sequence
  Synthetic
aatcgcccaagtgagctg

SEQ ID NO: 28987 - DNA, 19 bp, Artificial Sequence
  Synthetic
aaagtcgccgaacggaaag

SEQ ID NO: 28988 - DNA, 18 bp, Artificial Sequence
  Synthetic
tccagctcgaccatcagg

SEQ ID NO: 28989 - DNA, 20 bp, Artificial Sequence
  Synthetic
gatagtttgggtactgccgc

SEQ ID NO: 28990 - DNA, 18 bp, Artificial Sequence
  Synthetic
gcgtgatgtcgaaaccga

SEQ ID NO: 28991 - DNA, 19 bp, Artificial Sequence
  Synthetic
tgtaaacggcaggtgcatc

SEQ ID NO: 28992 - DNA, 19 bp, Artificial Sequence
  Synthetic
caaccgaaccgtcattccc

SEQ ID NO: 28993 - DNA, 16 bp, Artificial Sequence
  Synthetic
acgcggatgtcgaggc

SEQ ID NO: 28994 - DNA, 18 bp, Artificial Sequence
  Synthetic
cggcatccaaagtgtcgg

SEQ ID NO: 28995 - DNA, 20 bp, Artificial Sequence
  Synthetic
taaagagttgccgtcgatgg

SEQ ID NO: 28996 - DNA, 18 bp, Artificial Sequence
  Synthetic
gctgcggcaaagttgttg

SEQ ID NO: 28997 - DNA, 18 bp, Artificial Sequence
  Synthetic
tgtggaaacgctcgtcgg

SEQ ID NO: 28998 - DNA, 17 bp, Artificial Sequence
  Synthetic
gacaacacggcggaagg

SEQ ID NO: 28999 - DNA, 19 bp, Artificial Sequence
  Synthetic
ggcagtgacgacgatgacc

SEQ ID NO: 29000 - DNA, 20 bp, Artificial Sequence
  Synthetic
ggagaagtttaaccgccagg

SEQ ID NO: 29001 - DNA, 20 bp, Artificial Sequence
  Synthetic
cggctttttgtggatgatgg

SEQ ID NO: 29002 - DNA, 16 bp, Artificial Sequence
  Synthetic
gcgaggcggagaagct

SEQ ID NO: 29003 - DNA, 15 bp, Artificial Sequence
  Synthetic
aacggttggcgcgtg

SEQ ID NO: 29004 - DNA, 16 bp, Artificial Sequence
  Synthetic
cggcggcgttttggac

SEQ ID NO: 29005 - DNA, 16 bp, Artificial Sequence
  Synthetic
aggcggactggcggaa

SEQ ID NO: 29006 - DNA, 18 bp, Artificial Sequence
  Synthetic
ggaaacgtgcgcctgttg

SEQ ID NO: 29007 - DNA, 17 bp, Artificial Sequence
  Synthetic
ggattatgcgccgggag

SEQ ID NO: 29008 - DNA, 19 bp, Artificial Sequence
  Synthetic
ggaatcggccggtgagttt

SEQ ID NO: 29009 - DNA, 20 bp, Artificial Sequence
  Synthetic
cggcaaggcttatttgtcca

SEQ ID NO: 29010 - DNA, 16 bp, Artificial Sequence
  Synthetic
ttcggggcgcaacacc

SEQ ID NO: 29011 - DNA, 20 bp, Artificial Sequence
  Synthetic
ttgggatttcatcggacagg

SEQ ID NO: 29012 - DNA, 16 bp, Artificial Sequence
  Synthetic
cggaaaaacgcgcggc

SEQ ID NO: 29013 - DNA, 18 bp, Artificial Sequence
  Synthetic
acgaaatggcggcatacg

SEQ ID NO: 29014 - DNA, 19 bp, Artificial Sequence
  Synthetic
ccgaaagctccttgtccgc

SEQ ID NO: 29015 - DNA, 20 bp, Artificial Sequence
  Synthetic
ggtccagttgaagcagctga

SEQ ID NO: 29016 - DNA, 20 bp, Artificial Sequence
  Synthetic
cctgacgcagatagacgatg

SEQ ID NO: 29017 - DNA, 18 bp, Artificial Sequence
  Synthetic
caagtaatcccgcgtccc

SEQ ID NO: 29018 - DNA, 18 bp, Artificial Sequence
  Synthetic
tcctccgcgatatagggt

SEQ ID NO: 29019 - DNA, 18 bp, Artificial Sequence
  Synthetic
gccgacttggaagccttg

SEQ ID NO: 29020 - DNA, 18 bp, Artificial Sequence
  Synthetic
tgccgaacggacaaaacc

SEQ ID NO: 29021 - DNA, 19 bp, Artificial Sequence
  Synthetic
ttgaggaagacggttgcga

SEQ ID NO: 29022 - DNA, 16 bp, Artificial Sequence
  Synthetic
tgtggatgacggcggg

SEQ ID NO: 29023 - DNA, 16 bp, Artificial Sequence
  Synthetic
accgcccaagccttgc

SEQ ID NO: 29024 - DNA, 16 bp, Artificial Sequence
  Synthetic
tccgacaagcagcccg

SEQ ID NO: 29025 - DNA, 16 bp, Artificial Sequence
  Synthetic
ttggggcgcaattcgg

SEQ ID NO: 29026 - DNA, 17 bp, Artificial Sequence
  Synthetic
tccgccgaaacagcttg

SEQ ID NO: 29027 - DNA, 19 bp, Artificial Sequence
  Synthetic
gcggttgttggtggtttgc

SEQ ID NO: 29028 - DNA, 18 bp, Artificial Sequence
  Synthetic
aaagagcagacggagaag

SEQ ID NO: 29029 - DNA, 19 bp, Artificial Sequence
  Synthetic
cgtgagacagtttggtccc

SEQ ID NO: 29030 - DNA, 17 bp, Artificial Sequence
  Synthetic
ccgcacggttaccaacc

SEQ ID NO: 29031 - DNA, 20 bp, Artificial Sequence
  Synthetic
gcgattgacgtgattgtcga

SEQ ID NO: 29032 - DNA, 20 bp, Artificial Sequence
  Synthetic
gttgaggttggacacggtaa

SEQ ID NO: 29033 - DNA, 20 bp, Artificial Sequence
  Synthetic
gcatcgttgaccaattcagg

SEQ ID NO: 29034 - DNA, 20 bp, Artificial Sequence
  Synthetic
cgataggtgttgaagcccat

SEQ ID NO: 29035 - DNA, 20 bp, Artificial Sequence
  Synthetic
aggtcggacatatgcacgtc

SEQ ID NO: 29036 - DNA, 19 bp, Artificial Sequence
  Synthetic
cccaatgtcagcgtgttcg

SEQ ID NO: 29037 - DNA, 16 bp, Artificial Sequence
  Synthetic
atgccgccgatggagc

SEQ ID NO: 29038 - DNA, 16 bp, Artificial Sequence
  Synthetic
tgcgttcgagcgaggc

SEQ ID NO: 29039 - DNA, 17 bp, Artificial Sequence
  Synthetic
tttggcgatgtggacgg

SEQ ID NO: 29040 - DNA, 20 bp, Artificial Sequence
  Synthetic
gcccaatagctgaatacggt

SEQ ID NO: 29041 - DNA, 16 bp, Artificial Sequence
  Synthetic
cttgtccgccgtcgtc

SEQ ID NO: 29042 - DNA, 18 bp, Artificial Sequence
  Synthetic
ctgcaggtagcggctgag

SEQ ID NO: 29043 - DNA, 17 bp, Artificial Sequence
  Synthetic
gcgcagggtcatggctt

SEQ ID NO: 29044 - DNA, 22 bp, Artificial Sequence
  Synthetic
aaggtttagatcagttttcgga

SEQ ID NO: 29045 - DNA, 19 bp, Artificial Sequence
  Synthetic
ccaaatattgcacgcccca

SEQ ID NO: 29046 - DNA, 18 bp, Artificial Sequence
  Synthetic
taaagctgcggcccattt

SEQ ID NO: 29047 - DNA, 16 bp, Artificial Sequence
  Synthetic
tgagggtggcgagcag

SEQ ID NO: 29048 - DNA, 19 bp, Artificial Sequence
  Synthetic
agacttcgcaggggacgta

SEQ ID NO: 29049 - DNA, 19 bp, Artificial Sequence
  Synthetic
gccgatgaggttttcgagg

SEQ ID NO: 29050 - DNA, 18 bp, Artificial Sequence
  Synthetic
tgacgaatggcaaaccgc

SEQ ID NO: 29051 - DNA, 18 bp, Artificial Sequence
  Synthetic
cgaatgccccgaaatgct

SEQ ID NO: 29052 - DNA, 19 bp, Artificial Sequence
  Synthetic
tcgtcccctatgctttggc

SEQ ID NO: 29053 - DNA, 18 bp, Artificial Sequence
  Synthetic
atcgtcaaaccgctcgac

SEQ ID NO: 29054 - DNA, 20 bp, Artificial Sequence
  Synthetic
atgcgctcttctctgctttg

SEQ ID NO: 29055 - DNA, 19 bp, Artificial Sequence
  Synthetic
agcgggtcaatacggtcag

SEQ ID NO: 29056 - DNA, 19 bp, Artificial Sequence
  Synthetic
tttgactttggcggcatcg

SEQ ID NO: 29057 - DNA, 17 bp, Artificial Sequence
  Synthetic
tcgggcatatcgagcgg

SEQ ID NO: 29058 - DNA, 16 bp, Artificial Sequence
  Synthetic
ttccatacgcgcgccg

SEQ ID NO: 29059 - DNA, 19 bp, Artificial Sequence
  Synthetic
gccgatgtcttccttacgc

SEQ ID NO: 29060 - DNA, 18 bp, Artificial Sequence
  Synthetic
ttcgtcgtgttcggcctg

SEQ ID NO: 29061 - DNA, 18 bp, Artificial Sequence
  Synthetic
ccattcccgcatcagggc

SEQ ID NO: 29062 - DNA, 20 bp, Artificial Sequence
  Synthetic
ggttgttcgggtaggcgata

SEQ ID NO: 29063 - DNA, 16 bp, Artificial Sequence
  Synthetic
agggcttcgtcgagcg

SEQ ID NO: 29064 - DNA, 20 bp, Artificial Sequence
  Synthetic
tgccgtaaacttttgctcct

SEQ ID NO: 29065 - DNA, 20 bp, Artificial Sequence
  Synthetic
acgttttgggttatgaggat

SEQ ID NO: 29066 - DNA, 17 bp, Artificial Sequence
  Synthetic
aggacagggtgtgccag

SEQ ID NO: 29067 - DNA, 17 bp, Artificial Sequence
  Synthetic
ttacggtttcgcgcagg

SEQ ID NO: 29068 - DNA, 15 bp, Artificial Sequence
  Synthetic
cgctgcacgggcttt

SEQ ID NO: 29069 - DNA, 19 bp, Artificial Sequence
  Synthetic
ccgatcatcgtgatgtcgg

SEQ ID NO: 29070 - DNA, 20 bp, Artificial Sequence
  Synthetic
ggttgagcacgatttggttc

SEQ ID NO: 29071 - DNA, 20 bp, Artificial Sequence
  Synthetic
gtagggcaggtaaacgtcga

SEQ ID NO: 29072 - DNA, 18 bp, Artificial Sequence
  Synthetic
taaagatggtcgggttgc

SEQ ID NO: 29073 - DNA, 19 bp, Artificial Sequence
  Synthetic
atcatccttgcaacaggtc

SEQ ID NO: 29074 - DNA, 18 bp, Artificial Sequence
  Synthetic
atcccgttcaagttgccg

SEQ ID NO: 29075 - DNA, 25 bp, Artificial Sequence
  Synthetic
taaaaaactgagcttcgagaattac

SEQ ID NO: 29076 - DNA, 18 bp, Artificial Sequence
  Synthetic
cctgacgaagcgacaacg

SEQ ID NO: 29077 - DNA, 20 bp, Artificial Sequence
  Synthetic
ttgggcttcgtattgttggt

SEQ ID NO: 29078 - DNA, 17 bp, Artificial Sequence
  Synthetic
atgttgggcggcgttcc

SEQ ID NO: 29079 - DNA, 18 bp, Artificial Sequence
  Synthetic
cggaatgggagcagatgc

SEQ ID NO: 29080 - DNA, 16 bp, Artificial Sequence
  Synthetic
ttcggcgggtgagagc

SEQ ID NO: 29081 - DNA, 20 bp, Artificial Sequence
  Synthetic
gctttcagttttgccgcttc

SEQ ID NO: 29082 - DNA, 16 bp, Artificial Sequence
  Synthetic
ggtgcggcaggtttcg

SEQ ID NO: 29083 - DNA, 16 bp, Artificial Sequence
  Synthetic
accctgaccctgctcg

SEQ ID NO: 29084 - DNA, 18 bp, Artificial Sequence
  Synthetic
gcaaaacctcgctcctgc

SEQ ID NO: 29085 - DNA, 20 bp, Artificial Sequence
  Synthetic
cgccgaaaatcgtcttgaac

SEQ ID NO: 29086 - DNA, 17 bp, Artificial Sequence
  Synthetic
acgtggtttcggggcaa

SEQ ID NO: 29087 - DNA, 19 bp, Artificial Sequence
  Synthetic
gggtttcagcctgtcatcg

SEQ ID NO: 29088 - DNA, 18 bp, Artificial Sequence
  Synthetic
accgattacgcccatccc

SEQ ID NO: 29089 - DNA, 16 bp, Artificial Sequence
  Synthetic
ttcgccgcccgatacg

SEQ ID NO: 29090 - DNA, 19 bp, Artificial Sequence
  Synthetic
ttttgacggcagggagcaa

SEQ ID NO: 29091 - DNA, 19 bp, Artificial Sequence
  Synthetic
aagtggtacgtgagctggg

SEQ ID NO: 29092 - DNA, 20 bp, Artificial Sequence
  Synthetic
tcagaagttgaagcaggtaa

SEQ ID NO: 29093 - DNA, 20 bp, Artificial Sequence
  Synthetic
cggatattgtggaacgggaa

SEQ ID NO: 29094 - DNA, 20 bp, Artificial Sequence
  Synthetic
atgcgttcgacaccaatgtt

SEQ ID NO: 29095 - DNA, 19 bp, Artificial Sequence
  Synthetic
cgcctctcccttgtccaac

SEQ ID NO: 29096 - DNA, 18 bp, Artificial Sequence
  Synthetic
tacaaaacaaccgccgcc

SEQ ID NO: 29097 - DNA, 19 bp, Artificial Sequence
  Synthetic
aagcgatgtacgaacccga

SEQ ID NO: 29098 - DNA, 19 bp, Artificial Sequence
  Synthetic
tccatttgtcggtactgcc

SEQ ID NO: 29099 - DNA, 18 bp, Artificial Sequence
  Synthetic
tcgggcaaatcgagttcg

SEQ ID NO: 29100 - DNA, 20 bp, Artificial Sequence
  Synthetic
ccacaaagaaacgctcggat

SEQ ID NO: 29101 - DNA, 19 bp, Artificial Sequence
  Synthetic
aatcggcaggatggatgca

SEQ ID NO: 29102 - DNA, 16 bp, Artificial Sequence
  Synthetic
tgcacttcgcggcgaa

SEQ ID NO: 29103 - DNA, 16 bp, Artificial Sequence
  Synthetic
gcggttgacgaagggc

SEQ ID NO: 29104 - DNA, 20 bp, Artificial Sequence
  Synthetic
cgcttcaggaacagcttctg

SEQ ID NO: 29105 - DNA, 20 bp, Artificial Sequence
  Synthetic
ggtttggacgtttaccgcag

SEQ ID NO: 29106 - DNA, 20 bp, Artificial Sequence
  Synthetic
gaactcttcctcgtcgaagg

SEQ ID NO: 29107 - DNA, 16 bp, Artificial Sequence
  Synthetic
aaagccgtgctgctgc

SEQ ID NO: 29108 - DNA, 18 bp, Artificial Sequence
  Synthetic
agccggtcaaagaacgtc

SEQ ID NO: 29109 - DNA, 19 bp, Artificial Sequence
  Synthetic
cgtgaaaactgtggcgttg

SEQ ID NO: 29110 - DNA, 17 bp, Artificial Sequence
  Synthetic
tgaatcgggcggacacc

SEQ ID NO: 29111 - DNA, 17 bp, Artificial Sequence
  Synthetic
gtccgcacgcttatccc

SEQ ID NO: 29112 - DNA, 20 bp, Artificial Sequence
  Synthetic
agcaaaatcagcacggaaac

SEQ ID NO: 29113 - DNA, 17 bp, Artificial Sequence
  Synthetic
gcggctttggcttccgt

SEQ ID NO: 29114 - DNA, 20 bp, Artificial Sequence
  Synthetic
ccgcattttggacacatgga

SEQ ID NO: 29115 - DNA, 16 bp, Artificial Sequence
  Synthetic
gtttgccgggcagacg

SEQ ID NO: 29116 - DNA, 19 bp, Artificial Sequence
  Synthetic
ggtttggaatgggtgcgtt

SEQ ID NO: 29117 - DNA, 17 bp, Artificial Sequence
  Synthetic
ccgttcctgcccgctat

SEQ ID NO: 29118 - DNA, 17 bp, Artificial Sequence
  Synthetic
ccacgccgtaatacgcg

SEQ ID NO: 29119 - DNA, 18 bp, Artificial Sequence
  Synthetic
tgcagggcgtattgttgc

SEQ ID NO: 29120 - DNA, 16 bp, Artificial Sequence
  Synthetic
tcggtttcccagccgc

SEQ ID NO: 29121 - DNA, 18 bp, Artificial Sequence
  Synthetic
tccgcatccgcacatcaa

SEQ ID NO: 29122 - DNA, 20 bp, Artificial Sequence
  Synthetic
cgaagtattgctcgaccgtc

SEQ ID NO: 29123 - DNA, 16 bp, Artificial Sequence
  Synthetic
tcctgcccacgcttgc

SEQ ID NO: 29124 - DNA, 19 bp, Artificial Sequence
  Synthetic
tttccaccgggcaggctat

SEQ ID NO: 29125 - DNA, 20 bp, Artificial Sequence
  Synthetic
tcgccgcagttgaaaatcga

SEQ ID NO: 29126 - DNA, 18 bp, Artificial Sequence
  Synthetic
atatcggcttggcggttg

SEQ ID NO: 29127 - DNA, 19 bp, Artificial Sequence
  Synthetic
gaaccccatatcggcgaag

SEQ ID NO: 29128 - DNA, 20 bp, Artificial Sequence
  Synthetic
gttgggtttgaacgacggag

SEQ ID NO: 29129 - DNA, 20 bp, Artificial Sequence
  Synthetic
gaaaccgaattggcgcaatt

SEQ ID NO: 29130 - DNA, 17 bp, Artificial Sequence
  Synthetic
ttcggacgttttgccgc

SEQ ID NO: 29131 - DNA, 19 bp, Artificial Sequence
  Synthetic
cgatttgaacgtccgctgg

SEQ ID NO: 29132 - DNA, 19 bp, Artificial Sequence
  Synthetic
gcacaagctgtccgaacat

SEQ ID NO: 29133 - DNA, 19 bp, Artificial Sequence
  Synthetic
tggaacttgggtgtcgttg

SEQ ID NO: 29134 - DNA, 20 bp, Artificial Sequence
  Synthetic
tacgaccatccgttccaatg

SEQ ID NO: 29135 - DNA, 18 bp, Artificial Sequence
  Synthetic
taatgccttcgaatgccc

SEQ ID NO: 29136 - DNA, 18 bp, Artificial Sequence
  Synthetic
tttgggcgtgagtttggc

SEQ ID NO: 29137 - DNA, 17 bp, Artificial Sequence
  Synthetic
cttccaagtcgcgggac

SEQ ID NO: 29138 - DNA, 20 bp, Artificial Sequence
  Synthetic
cgtttccttcctgaccaacc

SEQ ID NO: 29139 - DNA, 19 bp, Artificial Sequence
  Synthetic
acttgtccgccctgaaagg

SEQ ID NO: 29140 - DNA, 19 bp, Artificial Sequence
  Synthetic
ccttcggcaaacagggttt

SEQ ID NO: 29141 - DNA, 18 bp, Artificial Sequence
  Synthetic
atcccatttggcgcaacc

SEQ ID NO: 29142 - DNA, 17 bp, Artificial Sequence
  Synthetic
cgaaacgctggtgtccg

SEQ ID NO: 29143 - DNA, 18 bp, Artificial Sequence
  Synthetic
tgatgacggttgccaacc

SEQ ID NO: 29144 - DNA, 17 bp, Artificial Sequence
  Synthetic
gcgcaagagctgttggg

SEQ ID NO: 29145 - DNA, 20 bp, Artificial Sequence
  Synthetic
cattttttccagcagggcga

SEQ ID NO: 29146 - DNA, 19 bp, Artificial Sequence
  Synthetic
ctgatgtgggacagctcgg

SEQ ID NO: 29147 - DNA, 19 bp, Artificial Sequence
  Synthetic
cgagccggcttatgaggat

SEQ ID NO: 29148 - DNA, 18 bp, Artificial Sequence
  Synthetic
cacgggtttggcgggtac

SEQ ID NO: 29149 - DNA, 19 bp, Artificial Sequence
  Synthetic
agggtaatcaggtgcaggg

SEQ ID NO: 29150 - DNA, 16 bp, Artificial Sequence
  Synthetic
aaaccctcgccccgct

SEQ ID NO: 29151 - DNA, 19 bp, Artificial Sequence
  Synthetic
gaaatcaacctcacgccgc

SEQ ID NO: 29152 - DNA, 20 bp, Artificial Sequence
  Synthetic
aggatttgggtttggcaagt

SEQ ID NO: 29153 - DNA, 19 bp, Artificial Sequence
  Synthetic
tgaccatggaaatggcgga

SEQ ID NO: 29154 - DNA, 16 bp, Artificial Sequence
  Synthetic
ccggcggcgaaaaagc

SEQ ID NO: 29155 - DNA, 18 bp, Artificial Sequence
  Synthetic
caaaccaagctgccgcag

SEQ ID NO: 29156 - DNA, 15 bp, Artificial Sequence
  Synthetic
tctggcgcgcaccaa

SEQ ID NO: 29157 - DNA, 16 bp, Artificial Sequence
  Synthetic
tgccgaacgcctgcac

SEQ ID NO: 29158 - DNA, 20 bp, Artificial Sequence
  Synthetic
gcctgaagcagcaacacatt

SEQ ID NO: 29159 - DNA, 19 bp, Artificial Sequence
  Synthetic
cgtctgcccgaattggaag

SEQ ID NO: 29160 - DNA, 18 bp, Artificial Sequence
  Synthetic
cgttttgtgcggcaaccg

SEQ ID NO: 29161 - DNA, 16 bp, Artificial Sequence
  Synthetic
attgcccatcgcgccg

SEQ ID NO: 29162 - DNA, 16 bp, Artificial Sequence
  Synthetic
gtcggcaagcgggttg

SEQ ID NO: 29163 - DNA, 19 bp, Artificial Sequence
  Synthetic
tcgtcaaaggggacaaacg

SEQ ID NO: 29164 - DNA, 17 bp, Artificial Sequence
  Synthetic
tcggaagggatgccgac

SEQ ID NO: 29165 - DNA, 18 bp, Artificial Sequence
  Synthetic
tgtccgtagtcgcattgc

SEQ ID NO: 29166 - DNA, 16 bp, Artificial Sequence
  Synthetic
ttcggtcagcggctcg

SEQ ID NO: 29167 - DNA, 20 bp, Artificial Sequence
  Synthetic
acggtttatcctcctcacga

SEQ ID NO: 29168 - DNA, 18 bp, Artificial Sequence
  Synthetic
gtctcgacctcaacggcg

SEQ ID NO: 29169 - DNA, 18 bp, Artificial Sequence
  Synthetic
aaattcaccgccgaagcc

SEQ ID NO: 29170 - DNA, 18 bp, Artificial Sequence
  Synthetic
tgaaacacgccaatccgt

SEQ ID NO: 29171 - DNA, 18 bp, Artificial Sequence
  Synthetic
gctgcacactggaagacg

SEQ ID NO: 29172 - DNA, 19 bp, Artificial Sequence
  Synthetic
acagcgtcttccccgaaat

SEQ ID NO: 29173 - DNA, 19 bp, Artificial Sequence
  Synthetic
gtgtataacgtgccgctcg

SEQ ID NO: 29174 - DNA, 18 bp, Artificial Sequence
  Synthetic
gcgacggtgcgaacgata

SEQ ID NO: 29175 - DNA, 18 bp, Artificial Sequence
  Synthetic
gttcaggaaaggcattgc

SEQ ID NO: 29176 - DNA, 19 bp, Artificial Sequence
  Synthetic
agatgctttgatgtcggtt

SEQ ID NO: 29177 - DNA, 19 bp, Artificial Sequence
  Synthetic
tttctatccgccgtttgtc

SEQ ID NO: 29178 - DNA, 20 bp, Artificial Sequence
  Synthetic
tttcaaggatttccaaacgg

SEQ ID NO: 29179 - DNA, 18 bp, Artificial Sequence
  Synthetic
tgttccaatgcttcggag

SEQ ID NO: 29180 - DNA, 20 bp, Artificial Sequence
  Synthetic
cttcggtatctgcaatcggc

SEQ ID NO: 29181 - DNA, 21 bp, Artificial Sequence
  Synthetic
gaaaataggtaattgccaccg

SEQ ID NO: 29182 - DNA, 19 bp, Artificial Sequence
  Synthetic
cgtctgaaacaaccaacca

SEQ ID NO: 29183 - DNA, 24 bp, Artificial Sequence
  Synthetic
gttaaatattgctgataagtgcca

SEQ ID NO: 29184 - DNA, 19 bp, Artificial Sequence
  Synthetic
catcacatcggcaatcagt

SEQ ID NO: 29185 - DNA, 23 bp, Artificial Sequence
  Synthetic
tgacagaaagtgtgtaaaaactc

SEQ ID NO: 29186 - DNA, 19 bp, Artificial Sequence
  Synthetic
ctgccataaataaaccgcg

SEQ ID NO: 29187 - DNA, 18 bp, Artificial Sequence
  Synthetic
ttaacgggcaactttcct

SEQ ID NO: 29188 - DNA, 18 bp, Artificial Sequence
  Synthetic
ccctggttttggcactgc

SEQ ID NO: 29189 - DNA, 18 bp, Artificial Sequence
  Synthetic
tacgccgccgttccaaat

SEQ ID NO: 29190 - DNA, 20 bp, Artificial Sequence
  Synthetic
aaaggatgatgattgggagg

SEQ ID NO: 29191 - DNA, 19 bp, Artificial Sequence
  Synthetic
gcttcctcgttcggtatgg

SEQ ID NO: 29192 - DNA, 17 bp, Artificial Sequence
  Synthetic
gctttccagcgtcaggc

SEQ ID NO: 29193 - DNA, 17 bp, Artificial Sequence
  Synthetic
tggtcgcgcctttggtg

SEQ ID NO: 29194 - DNA, 18 bp, Artificial Sequence
  Synthetic
tagcgttggacacccgag

SEQ ID NO: 29195 - DNA, 16 bp, Artificial Sequence
  Synthetic
tacctgctcggctcgc

SEQ ID NO: 29196 - DNA, 16 bp, Artificial Sequence
  Synthetic
tcgccaaagccgtcgg

SEQ ID NO: 29197 - DNA, 16 bp, Artificial Sequence
  Synthetic
atgatgtcggcgcgcc

SEQ ID NO: 29198 - DNA, 17 bp, Artificial Sequence
  Synthetic
ttcgtccctgccagcgt

SEQ ID NO: 29199 - DNA, 16 bp, Artificial Sequence
  Synthetic
ctcgccgtcgaacgtc

SEQ ID NO: 29200 - DNA, 20 bp, Artificial Sequence
  Synthetic
gggattgtcgtccaatttgc

SEQ ID NO: 29201 - DNA, 17 bp, Artificial Sequence
  Synthetic
ctggtgttgttggcggg

SEQ ID NO: 29202 - DNA, 18 bp, Artificial Sequence
  Synthetic
gcgtgatgtcgaaaccga

SEQ ID NO: 29203 - DNA, 16 bp, Artificial Sequence
  Synthetic
ccgcgcctgtaaacgg

SEQ ID NO: 29204 - DNA, 17 bp, Artificial Sequence
  Synthetic
cagacggcatcggtgtc

SEQ ID NO: 29205 - DNA, 20 bp, Artificial Sequence
  Synthetic
ctgactttgggcatgatggc

SEQ ID NO: 29206 - DNA, 18 bp, Artificial Sequence
  Synthetic
cctgatgctgcccgaaga

SEQ ID NO: 29207 - DNA, 16 bp, Artificial Sequence
  Synthetic
tgcatcccgttcgccc

SEQ ID NO: 29208 - DNA, 16 bp, Artificial Sequence
  Synthetic
tcgcctcggtcgccat

SEQ ID NO: 29209 - DNA, 19 bp, Artificial Sequence
  Synthetic
tcagcgacgtatccgaagc

SEQ ID NO: 29210 - DNA, 20 bp, Artificial Sequence
  Synthetic
cgatgtccacctacatccgc

SEQ ID NO: 29211 - DNA, 17 bp, Artificial Sequence
  Synthetic
cacgcgcgttttgccac

SEQ ID NO: 29212 - DNA, 20 bp, Artificial Sequence
  Synthetic
ctgccacagacatcgtgttg

SEQ ID NO: 29213 - DNA, 17 bp, Artificial Sequence
  Synthetic
gatacctgcgtcggcac

SEQ ID NO: 29214 - DNA, 18 bp, Artificial Sequence
  Synthetic
cacaggaagcctaccgcc

SEQ ID NO: 29215 - DNA, 20 bp, Artificial Sequence
  Synthetic
tgaagcgatccaaaaaggct

SEQ ID NO: 29216 - DNA, 20 bp, Artificial Sequence
  Synthetic
cgggtagtggcatttttgga

SEQ ID NO: 29217 - DNA, 17 bp, Artificial Sequence
  Synthetic
aggacttcacgcccctg

SEQ ID NO: 29218 - DNA, 20 bp, Artificial Sequence
  Synthetic
tcgatattctggcgctcagt

SEQ ID NO: 29219 - DNA, 17 bp, Artificial Sequence
  Synthetic
gatgttcggcccgtgga

SEQ ID NO: 29220 - DNA, 16 bp, Artificial Sequence
  Synthetic
cggccgccacaatgtc

SEQ ID NO: 29221 - DNA, 17 bp, Artificial Sequence
  Synthetic
gtattcggttgcggcgg

SEQ ID NO: 29222 - DNA, 19 bp, Artificial Sequence
  Synthetic
cattggaagaaaccgcgca

SEQ ID NO: 29223 - DNA, 18 bp, Artificial Sequence
  Synthetic
cgcacgggggaaatcctc

SEQ ID NO: 29224 - DNA, 20 bp, Artificial Sequence
  Synthetic
ttgggtttggaaaactttgt

SEQ ID NO: 29225 - DNA, 19 bp, Artificial Sequence
  Synthetic
gtggggcaaagtgtctctt

SEQ ID NO: 29226 - DNA, 19 bp, Artificial Sequence
  Synthetic
gagcagtcggatgcggaaa

SEQ ID NO: 29227 - DNA, 18 bp, Artificial Sequence
  Synthetic
gggaatggaagcaggttt

SEQ ID NO: 29228 - DNA, 17 bp, Artificial Sequence
  Synthetic
aagtccccagcctgtcc

SEQ ID NO: 29229 - DNA, 17 bp, Artificial Sequence
  Synthetic
agttcgcccatcacgcg

SEQ ID NO: 29230 - DNA, 18 bp, Artificial Sequence
  Synthetic
ttgcgtcttgaggcaggg

SEQ ID NO: 29231 - DNA, 17 bp, Artificial Sequence
  Synthetic
agggcggaagtcgggat

SEQ ID NO: 29232 - DNA, 16 bp, Artificial Sequence
  Synthetic
gcgttttgtccgccgg

SEQ ID NO: 29233 - DNA, 19 bp, Artificial Sequence
  Synthetic
gacgtggttcacaccggtg

SEQ ID NO: 29234 - DNA, 19 bp, Artificial Sequence
  Synthetic
aatcagaagcggtagcgca

SEQ ID NO: 29235 - DNA, 17 bp, Artificial Sequence
  Synthetic
tatagccgcccacgcct

SEQ ID NO: 29236 - DNA, 19 bp, Artificial Sequence
  Synthetic
gggatactgcaccagcgtc

SEQ ID NO: 29237 - DNA, 20 bp, Artificial Sequence
  Synthetic
cgccaaacttttcctcgtca

SEQ ID NO: 29238 - DNA, 16 bp, Artificial Sequence
  Synthetic
tcgaacgccacgccct

SEQ ID NO: 29239 - DNA, 17 bp, Artificial Sequence
  Synthetic
tggcttggcgcgtgatg

SEQ ID NO: 29240 - DNA, 19 bp, Artificial Sequence
  Synthetic
aacccgaagttacccgcaa

SEQ ID NO: 29241 - DNA, 16 bp, Artificial Sequence
  Synthetic
cgtcttccaacgcgcg

SEQ ID NO: 29242 - DNA, 19 bp, Artificial Sequence
  Synthetic
ggaacgtgaaacgggtgtc

SEQ ID NO: 29243 - DNA, 16 bp, Artificial Sequence
  Synthetic
tgtcggtatggcggcg

SEQ ID NO: 29244 - DNA, 18 bp, Artificial Sequence
  Synthetic
agccgcacattatccaag

SEQ ID NO: 29245 - DNA, 15 bp, Artificial Sequence
  Synthetic
ttcggcggcggtttg

SEQ ID NO: 29246 - DNA, 17 bp, Artificial Sequence
  Synthetic
gcatattgcccggccct

SEQ ID NO: 29247 - DNA, 20 bp, Artificial Sequence
  Synthetic
gtccgttgtttttcgtcagg

SEQ ID NO: 29248 - DNA, 20 bp, Artificial Sequence
  Synthetic
tcaaacgactgagccggata

SEQ ID NO: 29249 - DNA, 18 bp, Artificial Sequence
  Synthetic
ttggccaaaccgataccg

SEQ ID NO: 29250 - DNA, 16 bp, Artificial Sequence
  Synthetic
gcaggcagcgtgatgc

SEQ ID NO: 29251 - DNA, 16 bp, Artificial Sequence
  Synthetic
tgcaagggcagggtcg

SEQ ID NO: 29252 - DNA, 18 bp, Artificial Sequence
  Synthetic
caggttcacgctgatgcc

SEQ ID NO: 29253 - DNA, 16 bp, Artificial Sequence
  Synthetic
gcctttgagccggtcg

SEQ ID NO: 29254 - DNA, 19 bp, Artificial Sequence
  Synthetic
caggctgtcaacgtagagc

SEQ ID NO: 29255 - DNA, 18 bp, Artificial Sequence
  Synthetic
acgacggcgagctggtat

SEQ ID NO: 29256 - DNA, 19 bp, Artificial Sequence
  Synthetic
cgaccatttctgcccttgc

SEQ ID NO: 29257 - DNA, 18 bp, Artificial Sequence
  Synthetic
tgatgcgcgaatgggaca

SEQ ID NO: 29258 - DNA, 16 bp, Artificial Sequence
  Synthetic
tcgccctgcaactggg

SEQ ID NO: 29259 - DNA, 18 bp, Artificial Sequence
  Synthetic
gggcattcaggcggacaa

SEQ ID NO: 29260 - DNA, 18 bp, Artificial Sequence
  Synthetic
ccggcagggaagttaagc

SEQ ID NO: 29261 - DNA, 18 bp, Artificial Sequence
  Synthetic
gttcccagcatctcgcac

SEQ ID NO: 29262 - DNA, 20 bp, Artificial Sequence
  Synthetic
ttccgtcgtagtagctttcg

SEQ ID NO: 29263 - DNA, 16 bp, Artificial Sequence
  Synthetic
ttcggacggcatcgcg

SEQ ID NO: 29264 - DNA, 18 bp, Artificial Sequence
  Synthetic
atcccgttcaagttgccg

SEQ ID NO: 29265 - DNA, 16 bp, Artificial Sequence
  Synthetic
tgcccaggctttggcg

SEQ ID NO: 29266 - DNA, 16 bp, Artificial Sequence
  Synthetic
taccggccgccttcag

SEQ ID NO: 29267 - DNA, 19 bp, Artificial Sequence
  Synthetic
ctgaaccttggttttgcct

SEQ ID NO: 29268 - DNA, 18 bp, Artificial Sequence
  Synthetic
tcaggcggctttcctgta

SEQ ID NO: 29269 - DNA, 19 bp, Artificial Sequence
  Synthetic
cggttacggtaatgctgcc

SEQ ID NO: 29270 - DNA, 18 bp, Artificial Sequence
  Synthetic
tgtattcgcgtacctgcg

SEQ ID NO: 29271 - DNA, 19 bp, Artificial Sequence
  Synthetic
acgcacaactgggatacgg

SEQ ID NO: 29272 - DNA, 18 bp, Artificial Sequence
  Synthetic
ccgatgccgacatgatgc

SEQ ID NO: 29273 - DNA, 20 bp, Artificial Sequence
  Synthetic
gttcatcggtcaatccacca

SEQ ID NO: 29274 - DNA, 20 bp, Artificial Sequence
  Synthetic
cggcaaaaacgtccacttga

SEQ ID NO: 29275 - DNA, 16 bp, Artificial Sequence
  Synthetic
cgatacggaagcggcg

SEQ ID NO: 29276 - DNA, 19 bp, Artificial Sequence
  Synthetic
ggcggatttggaagggaaa

SEQ ID NO: 29277 - DNA, 16 bp, Artificial Sequence
  Synthetic
gcgtccgcatcgatgc

SEQ ID NO: 29278 - DNA, 23 bp, Artificial Sequence
  Synthetic
ctgttctactttcaatttttcgc

SEQ ID NO: 29279 - DNA, 18 bp, Artificial Sequence
  Synthetic
cgatgtcttgaccgcgct

SEQ ID NO: 29280 - DNA, 18 bp, Artificial Sequence
  Synthetic
catcgagccgctggtcta

SEQ ID NO: 29281 - DNA, 19 bp, Artificial Sequence
  Synthetic
tccgcataagctcggaagc

SEQ ID NO: 29282 - DNA, 16 bp, Artificial Sequence
  Synthetic
cgtggcgatgtccagc

SEQ ID NO: 29283 - DNA, 19 bp, Artificial Sequence
  Synthetic
ttgatggagcaaaggttgt

SEQ ID NO: 29284 - DNA, 20 bp, Artificial Sequence
  Synthetic
gtaggtcactgccaaacacc

SEQ ID NO: 29285 - DNA, 19 bp, Artificial Sequence
  Synthetic
gcacagtcggacatagacg

SEQ ID NO: 29286 - DNA, 18 bp, Artificial Sequence
  Synthetic
aaatcgtgttccgccgcc

SEQ ID NO: 29287 - DNA, 18 bp, Artificial Sequence
  Synthetic
gaaatcggtcagctgccg

SEQ ID NO: 29288 - DNA, 16 bp, Artificial Sequence
  Synthetic
ttcgggcagccacagc

SEQ ID NO: 29289 - DNA, 19 bp, Artificial Sequence
  Synthetic
tttgcgcgaggaaaacagg

SEQ ID NO: 29290 - DNA, 16 bp, Artificial Sequence
  Synthetic
tcggtgcggatgaggc

SEQ ID NO: 29291 - DNA, 21 bp, Artificial Sequence
  Synthetic
ccatagagctttctacggttt

SEQ ID NO: 29292 - DNA, 17 bp, Artificial Sequence
  Synthetic
cgtgttgggtttcgccg

SEQ ID NO: 29293 - DNA, 20 bp, Artificial Sequence
  Synthetic
caccagcgaagacatcaaca

SEQ ID NO: 29294 - DNA, 16 bp, Artificial Sequence
  Synthetic
gtcatttcgggcggcg

SEQ ID NO: 29295 - DNA, 16 bp, Artificial Sequence
  Synthetic
atggcggcgacttggg

SEQ ID NO: 29296 - DNA, 17 bp, Artificial Sequence
  Synthetic
ccgttgcgccaataccg

SEQ ID NO: 29297 - DNA, 20 bp, Artificial Sequence
  Synthetic
cacaaaatcccgccctcaaa

SEQ ID NO: 29298 - DNA, 16 bp, Artificial Sequence
  Synthetic
ccgcattgctggcagc

SEQ ID NO: 29299 - DNA, 19 bp, Artificial Sequence
  Synthetic
ggcgaaaccctgacctaca

SEQ ID NO: 29300 - DNA, 16 bp, Artificial Sequence
  Synthetic
ttgcggcggaagaggc

SEQ ID NO: 29301 - DNA, 18 bp, Artificial Sequence
  Synthetic
tagtagtcgtgccggtcg

SEQ ID NO: 29302 - DNA, 20 bp, Artificial Sequence
  Synthetic
cggattaaccctttgctcgg

SEQ ID NO: 29303 - DNA, 16 bp, Artificial Sequence
  Synthetic
gcccaagccgtgtacg

SEQ ID NO: 29304 - DNA, 16 bp, Artificial Sequence
  Synthetic
cagccgtagcgttgcg

SEQ ID NO: 29305 - DNA, 18 bp, Artificial Sequence
  Synthetic
gcatcggcaggcggattt

SEQ ID NO: 29306 - DNA, 19 bp, Artificial Sequence
  Synthetic
gatgacgcttttgccgttt

SEQ ID NO: 29307 - DNA, 20 bp, Artificial Sequence
  Synthetic
ccaagaccatacgttcggcg

SEQ ID NO: 29308 - DNA, 16 bp, Artificial Sequence
  Synthetic
agggtttgcaggcgca

SEQ ID NO: 29309 - DNA, 18 bp, Artificial Sequence
  Synthetic
cggagagggtcagcgaag

SEQ ID NO: 29310 - DNA, 19 bp, Artificial Sequence
  Synthetic
tggggttgggtgtggaaat

SEQ ID NO: 29311 - DNA, 20 bp, Artificial Sequence
  Synthetic
acaacttgttcggcgttgac

SEQ ID NO: 29312 - DNA, 20 bp, Artificial Sequence
  Synthetic
ccttcctcacgaccagactg

SEQ ID NO: 29313 - DNA, 19 bp, Artificial Sequence
  Synthetic
acgggtttcatcctgttgg

SEQ ID NO: 29314 - DNA, 17 bp, Artificial Sequence
  Synthetic
ctgctgtcgctgctggt

SEQ ID NO: 29315 - DNA, 18 bp, Artificial Sequence
  Synthetic
cggcgtggaatggtcttt

SEQ ID NO: 29316 - DNA, 20 bp, Artificial Sequence
  Synthetic
ggtgaaaatggaagcggtca

SEQ ID NO: 29317 - DNA, 20 bp, Artificial Sequence
  Synthetic
taccgttaccgccaaaaacc

SEQ ID NO: 29318 - DNA, 18 bp, Artificial Sequence
  Synthetic
gaaagacgcgctggatgc

SEQ ID NO: 29319 - DNA, 17 bp, Artificial Sequence
  Synthetic
cgatgccgaagccgtca

SEQ ID NO: 29320 - DNA, 19 bp, Artificial Sequence
  Synthetic
tcgacaaatcaagcctcgg

SEQ ID NO: 29321 - DNA, 20 bp, Artificial Sequence
  Synthetic
cttgagtccttgaaccagcg

SEQ ID NO: 29322 - DNA, 19 bp, Artificial Sequence
  Synthetic
ggggttttgaaggcggttt

SEQ ID NO: 29323 - DNA, 17 bp, Artificial Sequence
  Synthetic
caggacaagcagggctg

SEQ ID NO: 29324 - DNA, 16 bp, Artificial Sequence
  Synthetic
tggattcccgcctgcg

SEQ ID NO: 29325 - DNA, 18 bp, Artificial Sequence
  Synthetic
ggtaacttggtgcagggc

SEQ ID NO: 29326 - DNA, 16 bp, Artificial Sequence
  Synthetic
tggtcttcgggcgagg

SEQ ID NO: 29327 - DNA, 20 bp, Artificial Sequence
  Synthetic
atttccaccggattcaccaa

SEQ ID NO: 29328 - DNA, 16 bp, Artificial Sequence
  Synthetic
agcgccgatgcctacg

SEQ ID NO: 29329 - DNA, 16 bp, Artificial Sequence
  Synthetic
ctgcaacttcgccccg

SEQ ID NO: 29330 - DNA, 17 bp, Artificial Sequence
  Synthetic
aatcgccgccgtcaaag

SEQ ID NO: 29331 - DNA, 18 bp, Artificial Sequence
  Synthetic
tcgcggtagatggtcagc

SEQ ID NO: 29332 - DNA, 17 bp, Artificial Sequence
  Synthetic
ggcgtgggggttgaact

SEQ ID NO: 29333 - DNA, 18 bp, Artificial Sequence
  Synthetic
ccacttgtttgggcgtgc

SEQ ID NO: 29334 - DNA, 19 bp, Artificial Sequence
  Synthetic
ggatgacttcgtcgagcga

SEQ ID NO: 29335 - DNA, 16 bp, Artificial Sequence
  Synthetic
aaaccgtccgccacgc

SEQ ID NO: 29336 - DNA, 17 bp, Artificial Sequence
  Synthetic
gtttgccgtatcgggcg

SEQ ID NO: 29337 - DNA, 15 bp, Artificial Sequence
  Synthetic
ttgcggacgcgcgtt

SEQ ID NO: 29338 - DNA, 15 bp, Artificial Sequence
  Synthetic
tgcacgttccgcgct

SEQ ID NO: 29339 - DNA, 18 bp, Artificial Sequence
  Synthetic
gtgcctgttcccgatgga

SEQ ID NO: 29340 - DNA, 20 bp, Artificial Sequence
  Synthetic
gagatacggtgcggattccg

SEQ ID NO: 29341 - DNA, 18 bp, Artificial Sequence
  Synthetic
tcgatgccgcggattacg

SEQ ID NO: 29342 - DNA, 20 bp, Artificial Sequence
  Synthetic
aggacgacgttcacatccaa

SEQ ID NO: 29343 - DNA, 20 bp, Artificial Sequence
  Synthetic
gttttccgctgtctgaacgg

SEQ ID NO: 29344 - DNA, 20 bp, Artificial Sequence
  Synthetic
tcataaatcagtgcgtcgcc

SEQ ID NO: 29345 - DNA, 18 bp, Artificial Sequence
  Synthetic
gcccatgccttcaatgcg

SEQ ID NO: 29346 - DNA, 16 bp, Artificial Sequence
  Synthetic
acagcttcgggcaggg

SEQ ID NO: 29347 - DNA, 16 bp, Artificial Sequence
  Synthetic
caaacgtccgccgagc

SEQ ID NO: 29348 - DNA, 20 bp, Artificial Sequence
  Synthetic
gaggttttcagacggcatcg

SEQ ID NO: 29349 - DNA, 19 bp, Artificial Sequence
  Synthetic
ccggcgtttatcaggtctt

SEQ ID NO: 29350 - DNA, 20 bp, Artificial Sequence
  Synthetic
gacatgagtgcgaacatcct

SEQ ID NO: 29351 - DNA, 20 bp, Artificial Sequence
  Synthetic
agcatgaaacgccacatcag

SEQ ID NO: 29352 - DNA, 19 bp, Artificial Sequence
  Synthetic
catcatggaggggctgatg

SEQ ID NO: 29353 - DNA, 16 bp, Artificial Sequence
  Synthetic
gttgatgagggcggcg

SEQ ID NO: 29354 - DNA, 17 bp, Artificial Sequence
  Synthetic
gttcgtgggcatccagc

SEQ ID NO: 29355 - DNA, 17 bp, Artificial Sequence
  Synthetic
tcagcatgggcatcggc

SEQ ID NO: 29356 - DNA, 16 bp, Artificial Sequence
  Synthetic
tgcgccttcccagctc

SEQ ID NO: 29357 - DNA, 18 bp, Artificial Sequence
  Synthetic
agaaaccggtggcgtaca

SEQ ID NO: 29358 - DNA, 18 bp, Artificial Sequence
  Synthetic
aggtgtttgccgctttcg

SEQ ID NO: 29359 - DNA, 19 bp, Artificial Sequence
  Synthetic
gccgtatttggtggccatg

SEQ ID NO: 29360 - DNA, 20 bp, Artificial Sequence
  Synthetic
gcggtaaatcaagccctgtt

SEQ ID NO: 29361 - DNA, 20 bp, Artificial Sequence
  Synthetic
cgatcaaatcctgcaacacg

SEQ ID NO: 29362 - DNA, 19 bp, Artificial Sequence
  Synthetic
ttgcaggggtaaatatccc

SEQ ID NO: 29363 - DNA, 21 bp, Artificial Sequence
  Synthetic
tgtctaagttgcatactcctg

SEQ ID NO: 29364 - DNA, 20 bp, Artificial Sequence
  Synthetic
atgcaaccaaatgacgttta

SEQ ID NO: 29365 - DNA, 19 bp, Artificial Sequence
  Synthetic
aatccccaagcaatcaatg

SEQ ID NO: 29366 - DNA, 16 bp, Artificial Sequence
  Synthetic
atcggcgtgcctgtcg

SEQ ID NO: 29367 - DNA, 19 bp, Artificial Sequence
  Synthetic
actttattgcgacccacgg

SEQ ID NO: 29368 - DNA, 19 bp, Artificial Sequence
  Synthetic
ctgcaccacttggttgacg

SEQ ID NO: 29369 - DNA, 19 bp, Artificial Sequence
  Synthetic
tggaaaacacccgcttcaa

SEQ ID NO: 29370 - DNA, 19 bp, Artificial Sequence
  Synthetic
caggttacgctggtggtcg

SEQ ID NO: 29371 - DNA, 17 bp, Artificial Sequence
  Synthetic
gtatcggcgcggcttct

SEQ ID NO: 29372 - DNA, 18 bp, Artificial Sequence
  Synthetic
cccgaagacaacggcaac

SEQ ID NO: 29373 - DNA, 18 bp, Artificial Sequence
  Synthetic
cggtgtcttccggcattt

SEQ ID NO: 29374 - DNA, 20 bp, Artificial Sequence
  Synthetic
caggtcttggaaatcggggt

SEQ ID NO: 29375 - DNA, 17 bp, Artificial Sequence
  Synthetic
tctttttccgcagccgc

SEQ ID NO: 29376 - DNA, 16 bp, Artificial Sequence
  Synthetic
tggtcgccggaatgca

SEQ ID NO: 29377 - DNA, 16 bp, Artificial Sequence
  Synthetic
gtctgccgcccattcg

SEQ ID NO: 29378 - DNA, 19 bp, Artificial Sequence
  Synthetic
tgaccttttctcaggagca

SEQ ID NO: 29379 - DNA, 18 bp, Artificial Sequence
  Synthetic
tccatcaggacggcttgg

SEQ ID NO: 29380 - DNA, 16 bp, Artificial Sequence
  Synthetic
tgtttccctgcgcggc

SEQ ID NO: 29381 - DNA, 16 bp, Artificial Sequence
  Synthetic
gctcatcgccatcggc

SEQ ID NO: 29382 - DNA, 17 bp, Artificial Sequence
  Synthetic
cttttggacgacggcgc

SEQ ID NO: 29383 - DNA, 19 bp, Artificial Sequence
  Synthetic
ggtattgccgtgccgtatt

SEQ ID NO: 29384 - DNA, 19 bp, Artificial Sequence
  Synthetic
atttgcattgcgaactgcc

SEQ ID NO: 29385 - DNA, 23 bp, Artificial Sequence
  Synthetic
gcatatctgaaaagtgtattccg

SEQ ID NO: 29386 - DNA, 20 bp, Artificial Sequence
  Synthetic
cgtgcaaaaatatccgcacc

SEQ ID NO: 29387 - DNA, 17 bp, Artificial Sequence
  Synthetic
acggcggtcagcgattc

SEQ ID NO: 29388 - DNA, 16 bp, Artificial Sequence
  Synthetic
ggtgttggcgtggagc

SEQ ID NO: 29389 - DNA, 20 bp, Artificial Sequence
  Synthetic
cggttgtccaaatcgaccag

SEQ ID NO: 29390 - DNA, 19 bp, Artificial Sequence
  Synthetic
gagtgcttcgtaggcgttg

SEQ ID NO: 29391 - DNA, 17 bp, Artificial Sequence
  Synthetic
gctgtgtcggagttggc

SEQ ID NO: 29392 - DNA, 18 bp, Artificial Sequence
  Synthetic
gcttcgacgatggtgcag

SEQ ID NO: 29393 - DNA, 20 bp, Artificial Sequence
  Synthetic
ccagagtttggtttcgacgg

SEQ ID NO: 29394 - DNA, 20 bp, Artificial Sequence
  Synthetic
aaggtggaactgtgcggtaa

SEQ ID NO: 29395 - DNA, 17 bp, Artificial Sequence
  Synthetic
agttgccgggcgatgag

SEQ ID NO: 29396 - DNA, 20 bp, Artificial Sequence
  Synthetic
cgcaggcagtacaaatggta

SEQ ID NO: 29397 - DNA, 20 bp, Artificial Sequence
  Synthetic
attcttgtttgccgccttcg

SEQ ID NO: 29398 - DNA, 16 bp, Artificial Sequence
  Synthetic
atcgccaccatcgggc

SEQ ID NO: 29399 - DNA, 17 bp, Artificial Sequence
  Synthetic
accggcggctttaagca

SEQ ID NO: 29400 - DNA, 19 bp, Artificial Sequence
  Synthetic
cactacttctcgctgcacg

SEQ ID NO: 29401 - DNA, 18 bp, Artificial Sequence
  Synthetic
tctaccacggcgcagaag

SEQ ID NO: 29402 - DNA, 19 bp, Artificial Sequence
  Synthetic
gtctgttcgagttggcaca

SEQ ID NO: 29403 - DNA, 18 bp, Artificial Sequence
  Synthetic
acagtatctggcgcgcct

SEQ ID NO: 29404 - DNA, 21 bp, Artificial Sequence
  Synthetic
cataagccgcaatatcaagtt

SEQ ID NO: 29405 - DNA, 18 bp, Artificial Sequence
  Synthetic
tttcaacagatacgccgc

SEQ ID NO: 29406 - DNA, 20 bp, Artificial Sequence
  Synthetic
tgataaaccaaatctgcggt

SEQ ID NO: 29407 - DNA, 20 bp, Artificial Sequence
  Synthetic
tgaagtaaaggctgcaattg

SEQ ID NO: 29408 - DNA, 19 bp, Artificial Sequence
  Synthetic
gtaaaaacctgccccaccc

SEQ ID NO: 29409 - DNA, 17 bp, Artificial Sequence
  Synthetic
gaagggacggcggaact

SEQ ID NO: 29410 - DNA, 19 bp, Artificial Sequence
  Synthetic
cgatttgggcatcggcaac

SEQ ID NO: 29411 - DNA, 16 bp, Artificial Sequence
  Synthetic
cctacgggcacaacgc

SEQ ID NO: 29412 - DNA, 20 bp, Artificial Sequence
  Synthetic
agacatccgttcgctcgatt

SEQ ID NO: 29413 - DNA, 20 bp, Artificial Sequence
  Synthetic
gtgttcgacaccgtcaacat

SEQ ID NO: 29414 - DNA, 20 bp, Artificial Sequence
  Synthetic
gcagtatgtttcctcggctg

SEQ ID NO: 29415 - DNA, 18 bp, Artificial Sequence
  Synthetic
cgacggcaaaatcgggac

SEQ ID NO: 29416 - DNA, 16 bp, Artificial Sequence
  Synthetic
ggtatgtgcgcgaccg

SEQ ID NO: 29417 - DNA, 16 bp, Artificial Sequence
  Synthetic
cttctccggcggttgc

SEQ ID NO: 29418 - DNA, 19 bp, Artificial Sequence
  Synthetic
cttgtagctgcaatgaacg

SEQ ID NO: 29419 - DNA, 18 bp, Artificial Sequence
  Synthetic
agtctgccaccctatccg

SEQ ID NO: 29420 - DNA, 20 bp, Artificial Sequence
  Synthetic
ctctatgatggcgggcatag

SEQ ID NO: 29421 - DNA, 17 bp, Artificial Sequence
  Synthetic
caacacaccgacagccc

SEQ ID NO: 29422 - DNA, 16 bp, Artificial Sequence
  Synthetic
gcgcgcaaaccgatga

SEQ ID NO: 29423 - DNA, 17 bp, Artificial Sequence
  Synthetic
cgacggcggcaaaatcg

SEQ ID NO: 29424 - DNA, 18 bp, Artificial Sequence
  Synthetic
attgttttggggcgcggt

SEQ ID NO: 29425 - DNA, 18 bp, Artificial Sequence
  Synthetic
atgcagggtggtgaaggg

SEQ ID NO: 29426 - DNA, 18 bp, Artificial Sequence
  Synthetic
gcgggattgacggtttcg

SEQ ID NO: 29427 - DNA, 20 bp, Artificial Sequence
  Synthetic
caagttcgggcgtaaccatc

SEQ ID NO: 29428 - DNA, 17 bp, Artificial Sequence
  Synthetic
gcccgccaaagttaccg

SEQ ID NO: 29429 - DNA, 20 bp, Artificial Sequence
  Synthetic
cggcctgttccaaaacgatt

SEQ ID NO: 29430 - DNA, 16 bp, Artificial Sequence
  Synthetic
aattgctgctggcgcg

SEQ ID NO: 29431 - DNA, 18 bp, Artificial Sequence
  Synthetic
cagccgccaatagccgtc

SEQ ID NO: 29432 - DNA, 20 bp, Artificial Sequence
  Synthetic
tgatttgcgtttccaaaccc

SEQ ID NO: 29433 - DNA, 18 bp, Artificial Sequence
  Synthetic
acttgagccggctgttcc

SEQ ID NO: 29434 - DNA, 18 bp, Artificial Sequence
  Synthetic
aaccgtcatacgcgacac

SEQ ID NO: 29435 - DNA, 16 bp, Artificial Sequence
  Synthetic
cccgaatccgcgctca

SEQ ID NO: 29436 - DNA, 16 bp, Artificial Sequence
  Synthetic
cgggcttgggtttgcc

SEQ ID NO: 29437 - DNA, 17 bp, Artificial Sequence
  Synthetic
cgccggtttgcgtttgg

SEQ ID NO: 29438 - DNA, 20 bp, Artificial Sequence
  Synthetic
agacctgcaagcccaatacg

SEQ ID NO: 29439 - DNA, 17 bp, Artificial Sequence
  Synthetic
tgggcaggcagagcatt

SEQ ID NO: 29440 - DNA, 16 bp, Artificial Sequence
  Synthetic
gcccgccgtttcagac

SEQ ID NO: 29441 - DNA, 18 bp, Artificial Sequence
  Synthetic
ctccttcatcttccgccg

SEQ ID NO: 29442 - DNA, 20 bp, Artificial Sequence
  Synthetic
tgtttggcgatgacggtaac

SEQ ID NO: 29443 - DNA, 18 bp, Artificial Sequence
  Synthetic
ccggattcaggcacaggg

SEQ ID NO: 29444 - DNA, 18 bp, Artificial Sequence
  Synthetic
ggtcgactttgccggaac

SEQ ID NO: 29445 - DNA, 20 bp, Artificial Sequence
  Synthetic
agtggaaaaggacgaaccga

SEQ ID NO: 29446 - DNA, 16 bp, Artificial Sequence
  Synthetic
tatggtcgtgccgccc

SEQ ID NO: 29447 - DNA, 18 bp, Artificial Sequence
  Synthetic
catcgtcggctgcacaca

SEQ ID NO: 29448 - DNA, 15 bp, Artificial Sequence
  Synthetic
atggcgcggcggtaa

SEQ ID NO: 29449 - DNA, 20 bp, Artificial Sequence
  Synthetic
cagtttggcatcagggtctt

SEQ ID NO: 29450 - DNA, 18 bp, Artificial Sequence
  Synthetic
cattttgccccgatgcgg

SEQ ID NO: 29451 - DNA, 19 bp, Artificial Sequence
  Synthetic
tgcttctcaatccggcaac

SEQ ID NO: 29452 - DNA, 16 bp, Artificial Sequence
  Synthetic
aacccaagccgacgcg

SEQ ID NO: 29453 - DNA, 20 bp, Artificial Sequence
  Synthetic
gccaaacgggttttccttac

SEQ ID NO: 29454 - DNA, 19 bp, Artificial Sequence
  Synthetic
cctttatatacgcggccgg

SEQ ID NO: 29455 - DNA, 19 bp, Artificial Sequence
  Synthetic
atggcgtagaacggtgtga

SEQ ID NO: 29456 - DNA, 25 bp, Artificial Sequence
  Synthetic
gtttcagaccttttcctaattcaat

SEQ ID NO: 29457 - DNA, 16 bp, Artificial Sequence
  Synthetic
tttcctgccctgccgc

SEQ ID NO: 29458 - DNA, 16 bp, Artificial Sequence
  Synthetic
tcaggtgggcgcaacc

SEQ ID NO: 29459 - DNA, 16 bp, Artificial Sequence
  Synthetic
actgggaggcaggctg

SEQ ID NO: 29460 - DNA, 20 bp, Artificial Sequence
  Synthetic
gcttaagcggaattggtcgc

SEQ ID NO: 29461 - DNA, 20 bp, Artificial Sequence
  Synthetic
gcgtgaaaacggttcggtaa

SEQ ID NO: 29462 - DNA, 17 bp, Artificial Sequence
  Synthetic
cgaacgcctgcacgaag

SEQ ID NO: 29463 - DNA, 16 bp, Artificial Sequence
  Synthetic
cggcctcaaacgcctc

SEQ ID NO: 29464 - DNA, 18 bp, Artificial Sequence
  Synthetic
agcccttgtccgcatcag

SEQ ID NO: 29465 - DNA, 16 bp, Artificial Sequence
  Synthetic
gccgcacctgtccatg

SEQ ID NO: 29466 - DNA, 16 bp, Artificial Sequence
  Synthetic
gcggcagccaaaaccc

SEQ ID NO: 29467 - DNA, 16 bp, Artificial Sequence
  Synthetic
ccgccgttgtgcgaaa

SEQ ID NO: 29468 - DNA, 25 bp, Artificial Sequence
  Synthetic
gataataaaaattctggcaaccatc

SEQ ID NO: 29469 - DNA, 17 bp, Artificial Sequence
  Synthetic
aatcccgaacccgaccc

SEQ ID NO: 29470 - DNA, 15 bp, Artificial Sequence
  Synthetic
aacgacgccggcaac

SEQ ID NO: 29471 - DNA, 18 bp, Artificial Sequence
  Synthetic
gttttcctggatggcggc

SEQ ID NO: 29472 - DNA, 16 bp, Artificial Sequence
  Synthetic
actgacccgccgcttc

SEQ ID NO: 29473 - DNA, 18 bp, Artificial Sequence
  Synthetic
gcccttaccgcccatcaa

SEQ ID NO: 29474 - DNA, 20 bp, Artificial Sequence
  Synthetic
atcctcaactggtcgctcaa

SEQ ID NO: 29475 - DNA, 19 bp, Artificial Sequence
  Synthetic
cagcaccacaaaccagacc

SEQ ID NO: 29476 - DNA, 19 bp, Artificial Sequence
  Synthetic
ttggaaaaacaccgcccga

SEQ ID NO: 29477 - DNA, 17 bp, Artificial Sequence
  Synthetic
tcttccaaccctccgcc

SEQ ID NO: 29478 - DNA, 16 bp, Artificial Sequence
  Synthetic
aagctcgccgttgccg

SEQ ID NO: 29479 - DNA, 20 bp, Artificial Sequence
  Synthetic
cttgggctacctgcaccata

SEQ ID NO: 29480 - DNA, 16 bp, Artificial Sequence
  Synthetic
catcttcgtcggcggc

SEQ ID NO: 29481 - DNA, 20 bp, Artificial Sequence
  Synthetic
caccggtatggaaacactgc

SEQ ID NO: 29482 - DNA, 20 bp, Artificial Sequence
  Synthetic
atggttgccgagattgtcct

SEQ ID NO: 29483 - DNA, 17 bp, Artificial Sequence
  Synthetic
caacaggcgcaaaacgg

SEQ ID NO: 29484 - DNA, 16 bp, Artificial Sequence
  Synthetic
ctgcggcaagaccacc

SEQ ID NO: 29485 - DNA, 20 bp, Artificial Sequence
  Synthetic
gttggaaaaaaccgtggacg

SEQ ID NO: 29486 - DNA, 19 bp, Artificial Sequence
  Synthetic
tgattttgggtctgccgac

SEQ ID NO: 29487 - DNA, 20 bp, Artificial Sequence
  Synthetic
gtcatgctgcccatcgtatt

SEQ ID NO: 29488 - DNA, 17 bp, Artificial Sequence
  Synthetic
ccgccgccaaagtcaga

SEQ ID NO: 29489 - DNA, 16 bp, Artificial Sequence
  Synthetic
acggcattcacgcccg

SEQ ID NO: 29490 - DNA, 18 bp, Artificial Sequence
  Synthetic
ggcaataagacgggacat

SEQ ID NO: 29491 - DNA, 16 bp, Artificial Sequence
  Synthetic
tgctgctggggcggta

SEQ ID NO: 29492 - DNA, 20 bp, Artificial Sequence
  Synthetic
ccccattttggagacaccct

SEQ ID NO: 29493 - DNA, 19 bp, Artificial Sequence
  Synthetic
gaacactggagcttcagcg

SEQ ID NO: 29494 - DNA, 19 bp, Artificial Sequence
  Synthetic
tcatgcagtcggtcgtcag

SEQ ID NO: 29495 - DNA, 16 bp, Artificial Sequence
  Synthetic
accggctcgaaccagc

SEQ ID NO: 29496 - DNA, 18 bp, Artificial Sequence
  Synthetic
ggtaaacacgacgcaggc

SEQ ID NO: 29497 - DNA, 16 bp, Artificial Sequence
  Synthetic
ttccctctgaccggcc

SEQ ID NO: 29498 - DNA, 15 bp, Artificial Sequence
  Synthetic
gcgcagtgccgaaca

SEQ ID NO: 29499 - DNA, 17 bp, Artificial Sequence
  Synthetic
catcggcaactcggcac

SEQ ID NO: 29500 - DNA, 16 bp, Artificial Sequence
  Synthetic
aagcggcatccgggac

SEQ ID NO: 29501 - DNA, 20 bp, Artificial Sequence
  Synthetic
gatccgaaatacaccaccgc

SEQ ID NO: 29502 - DNA, 18 bp, Artificial Sequence
  Synthetic
ccgcatccgtttgaagcc

SEQ ID NO: 29503 - DNA, 20 bp, Artificial Sequence
  Synthetic
gctttatacgggcagcatcg

SEQ ID NO: 29504 - DNA, 18 bp, Artificial Sequence
  Synthetic
accgaaccgatgaaaggc

SEQ ID NO: 29505 - DNA, 16 bp, Artificial Sequence
  Synthetic
tttgccgactgcgccg

SEQ ID NO: 29506 - DNA, 16 bp, Artificial Sequence
  Synthetic
gcgctacggcaaccct

SEQ ID NO: 29507 - DNA, 16 bp, Artificial Sequence
  Synthetic
tctgcggcggttttgc

SEQ ID NO: 29508 - DNA, 18 bp, Artificial Sequence
  Synthetic
cggcggtatagacggcag

SEQ ID NO: 29509 - DNA, 17 bp, Artificial Sequence
  Synthetic
gggtgcgtggcttttcg

SEQ ID NO: 29510 - DNA, 16 bp, Artificial Sequence
  Synthetic
gctcaggcggaatggc

SEQ ID NO: 29511 - DNA, 17 bp, Artificial Sequence
  Synthetic
gcaacgatgcctggagg

SEQ ID NO: 29512 - DNA, 20 bp, Artificial Sequence
  Synthetic
ttgccggtgctttgaatcag

SEQ ID NO: 29513 - DNA, 18 bp, Artificial Sequence
  Synthetic
tcggcgacaacctcttga

SEQ ID NO: 29514 - DNA, 16 bp, Artificial Sequence
  Synthetic
cattcgaccagcgcgg

SEQ ID NO: 29515 - DNA, 19 bp, Artificial Sequence
  Synthetic
caaaatacccaaggcggcg

SEQ ID NO: 29516 - DNA, 18 bp, Artificial Sequence
  Synthetic
ttcgtcctgttgcagcag

SEQ ID NO: 29517 - DNA, 17 bp, Artificial Sequence
  Synthetic
ccccaaacggtgcagtc

SEQ ID NO: 29518 - DNA, 17 bp, Artificial Sequence
  Synthetic
agccgactgttcctgcc

SEQ ID NO: 29519 - DNA, 18 bp, Artificial Sequence
  Synthetic
ccgaccgcttcatctgcg

SEQ ID NO: 29520 - DNA, 19 bp, Artificial Sequence
  Synthetic
cggggcattaccgtcaact

SEQ ID NO: 29521 - DNA, 17 bp, Artificial Sequence
  Synthetic
gcccatcggatcgaacg

SEQ ID NO: 29522 - DNA, 20 bp, Artificial Sequence
  Synthetic
caaatgtacgcccccatcaa

SEQ ID NO: 29523 - DNA, 19 bp, Artificial Sequence
  Synthetic
gccctgattgccattttcg

SEQ ID NO: 29524 - DNA, 17 bp, Artificial Sequence
  Synthetic
actcgcccggacaagtc

SEQ ID NO: 29525 - DNA, 19 bp, Artificial Sequence
  Synthetic
gtccgccggaaattcgaca

SEQ ID NO: 29526 - DNA, 18 bp, Artificial Sequence
  Synthetic
ccatatctcgcacacagc

SEQ ID NO: 29527 - DNA, 21 bp, Artificial Sequence
  Synthetic
aatggcaaaagatgtagcaag

SEQ ID NO: 29528 - DNA, 22 bp, Artificial Sequence
  Synthetic
ctgaacattatggttttcagct

SEQ ID NO: 29529 - DNA, 25 bp, Artificial Sequence
  Synthetic
cccattgaatcattttagaaagttc

SEQ ID NO: 29530 - DNA, 20 bp, Artificial Sequence
  Synthetic
gcaaattgatcagagcttgt

SEQ ID NO: 29531 - DNA, 19 bp, Artificial Sequence
  Synthetic
cagacctcctagaagagct

SEQ ID NO: 29532 - DNA, 21 bp, Artificial Sequence
  Synthetic
gtgtttcttcttgtgtaaccc

SEQ ID NO: 29533 - DNA, 18 bp, Artificial Sequence
  Synthetic
acactgcgtctattgtgg

SEQ ID NO: 29534 - DNA, 18 bp, Artificial Sequence
  Synthetic
gtgtcaaaggcgggattt

SEQ ID NO: 29535 - DNA, 22 bp, Artificial Sequence
  Synthetic
tctgttacaggatgatacacta

SEQ ID NO: 29536 - DNA, 19 bp, Artificial Sequence
  Synthetic
cgatccagtaaagggtgac

SEQ ID NO: 29537 - DNA, 18 bp, Artificial Sequence
  Synthetic
gaggagtaccatcagctg

SEQ ID NO: 29538 - DNA, 24 bp, Artificial Sequence
  Synthetic
tatctgtaagtatcttccaaaccc

SEQ ID NO: 29539 - DNA, 22 bp, Artificial Sequence
  Synthetic
aggaaacagaatgattcaacat

SEQ ID NO: 29540 - DNA, 25 bp, Artificial Sequence
  Synthetic
gaaaatctgaatacatgaagcatac

SEQ ID NO: 29541 - DNA, 21 bp, Artificial Sequence
  Synthetic
tggatgtgtgtattctcagat

SEQ ID NO: 29542 - DNA, 18 bp, Artificial Sequence
  Synthetic
tattccctccccttcgtg

SEQ ID NO: 29543 - DNA, 22 bp, Artificial Sequence
  Synthetic
tgtctctacagttgtcaaagtc

SEQ ID NO: 29544 - DNA, 25 bp, Artificial Sequence
  Synthetic
atacccccttcattatatattctgt

SEQ ID NO: 29545 - DNA, 19 bp, Artificial Sequence
  Synthetic
aggacacagtacttctccc

SEQ ID NO: 29546 - DNA, 18 bp, Artificial Sequence
  Synthetic
ctgcagaccttcccaatg

SEQ ID NO: 29547 - DNA, 16 bp, Artificial Sequence
  Synthetic
ctagccccgctgctct

SEQ ID NO: 29548 - DNA, 16 bp, Artificial Sequence
  Synthetic
tcccgccattcctggg

SEQ ID NO: 29549 - DNA, 18 bp, Artificial Sequence
  Synthetic
tttcctcttcgggtcggc

SEQ ID NO: 29550 - DNA, 17 bp, Artificial Sequence
  Synthetic
aagaatagccggcccgc

SEQ ID NO: 29551 - DNA, 18 bp, Artificial Sequence
  Synthetic
aaggatggagagggggct

SEQ ID NO: 29552 - DNA, 19 bp, Artificial Sequence
  Synthetic
acacactgtacctgcaaat

SEQ ID NO: 29553 - DNA, 19 bp, Artificial Sequence
  Synthetic
gccctgctatttcgtgaaa

SEQ ID NO: 29554 - DNA, 18 bp, Artificial Sequence
  Synthetic
tcttgtccagcttgtctg

SEQ ID NO: 29555 - DNA, 22 bp, Artificial Sequence
  Synthetic
attgtctgtttcatcatctgat

SEQ ID NO: 29556 - DNA, 19 bp, Artificial Sequence
  Synthetic
tgtattctgctgactgtcg

SEQ ID NO: 29557 - DNA, 18 bp, Artificial Sequence
  Synthetic
tattttctcctggcacgc

SEQ ID NO: 29558 - DNA, 22 bp, Artificial Sequence
  Synthetic
aacaatgtttaggttctgtcat

SEQ ID NO: 29559 - DNA, 18 bp, Artificial Sequence
  Synthetic
accacacacatgtacagc

SEQ ID NO: 29560 - DNA, 19 bp, Artificial Sequence
  Synthetic
ggcctccacttgtactgtg

SEQ ID NO: 29561 - DNA, 18 bp, Artificial Sequence
  Synthetic
gatgtccaacacagcagg

SEQ ID NO: 29562 - DNA, 21 bp, Artificial Sequence
  Synthetic
ttccactacgtgttttcatag

SEQ ID NO: 29563 - DNA, 24 bp, Artificial Sequence
  Synthetic
gtaacattggtagtggaagtatta

SEQ ID NO: 29564 - DNA, 18 bp, Artificial Sequence
  Synthetic
ttgacaacccgagacaca

SEQ ID NO: 29565 - DNA, 19 bp, Artificial Sequence
  Synthetic
acttcaacaccaacacagg

SEQ ID NO: 29566 - DNA, 21 bp, Artificial Sequence
  Synthetic
gtatcaatcatatcgccatcc

SEQ ID NO: 29567 - DNA, 18 bp, Artificial Sequence
  Synthetic
agaagatgtagggggctc

SEQ ID NO: 29568 - DNA, 21 bp, Artificial Sequence
  Synthetic
aacacataaccatgcatacat

SEQ ID NO: 29569 - DNA, 18 bp, Artificial Sequence
  Synthetic
gggccatccaagtcaagc

SEQ ID NO: 29570 - DNA, 18 bp, Artificial Sequence
  Synthetic
gcgcaggtacaggacttg

SEQ ID NO: 29571 - DNA, 20 bp, Artificial Sequence
  Synthetic
caggccaaagatagcagaca

SEQ ID NO: 29572 - DNA, 18 bp, Artificial Sequence
  Synthetic
cacaggtcacaagagcgc

SEQ ID NO: 29573 - DNA, 18 bp, Artificial Sequence
  Synthetic
atagtgcagtacgatggc

SEQ ID NO: 29574 - DNA, 19 bp, Artificial Sequence
  Synthetic
cctgtggctaggtctttca

SEQ ID NO: 29575 - DNA, 20 bp, Artificial Sequence
  Synthetic
tgagcaaagaagccaaaacg

SEQ ID NO: 29576 - DNA, 25 bp, Artificial Sequence
  Synthetic
cactaagaggaaaaacttaagaaca

SEQ ID NO: 29577 - DNA, 19 bp, Artificial Sequence
  Synthetic
tgccacgttcagagagaca

SEQ ID NO: 29578 - DNA, 18 bp, Artificial Sequence
  Synthetic
accaatgaccccagtcgt

SEQ ID NO: 29579 - DNA, 18 bp, Artificial Sequence
  Synthetic
tcgcgtgcatgtactttg

SEQ ID NO: 29580 - DNA, 23 bp, Artificial Sequence
  Synthetic
tcttcagattttcctccttaatc

SEQ ID NO: 29581 - DNA, 18 bp, Artificial Sequence
  Synthetic
atgaaggttcggggttga

SEQ ID NO: 29582 - DNA, 21 bp, Artificial Sequence
  Synthetic
ggattgtcaggtaaagtgact

SEQ ID NO: 29583 - DNA, 20 bp, Artificial Sequence
  Synthetic
ccctgctgttgtcaaagcaa

SEQ ID NO: 29584 - DNA, 22 bp, Artificial Sequence
  Synthetic
tgtgatctcccattttctcata

SEQ ID NO: 29585 - DNA, 20 bp, Artificial Sequence
  Synthetic
tgcacatccaattgcagtga

SEQ ID NO: 29586 - DNA, 18 bp, Artificial Sequence
  Synthetic
ttctaagctccgcatccc

SEQ ID NO: 29587 - DNA, 20 bp, Artificial Sequence
  Synthetic
agacctcctcctttggaact

SEQ ID NO: 29588 - DNA, 20 bp, Artificial Sequence
  Synthetic
gtcctccagcgtataactgc

SEQ ID NO: 29589 - DNA, 19 bp, Artificial Sequence
  Synthetic
tcttgtggtgcacccatca

SEQ ID NO: 29590 - DNA, 20 bp, Artificial Sequence
  Synthetic
gatctcagcgttggtgtagc

SEQ ID NO: 29591 - DNA, 21 bp, Artificial Sequence
  Synthetic
acttctgcaatcttctctgtg

SEQ ID NO: 29592 - DNA, 18 bp, Artificial Sequence
  Synthetic
tcctcacccacccgagac

SEQ ID NO: 29593 - DNA, 25 bp, Artificial Sequence
  Synthetic
gatacactatctctgttatgtttct

SEQ ID NO: 29594 - DNA, 19 bp, Artificial Sequence
  Synthetic
ccaagggcaaattggtaac

SEQ ID NO: 29595 - DNA, 21 bp, Artificial Sequence
  Synthetic
aatactatctacaagcctccc

SEQ ID NO: 29596 - DNA, 21 bp, Artificial Sequence
  Synthetic
tgtttatatctacgatgggcc

SEQ ID NO: 29597 - DNA, 21 bp, Artificial Sequence
  Synthetic
tcaatgactttgaaggtttca

SEQ ID NO: 29598 - DNA, 18 bp, Artificial Sequence
  Synthetic
tgatatcaggttgtgccc

SEQ ID NO: 29599 - DNA, 19 bp, Artificial Sequence
  Synthetic
ttagttaggtctgccatgg

SEQ ID NO: 29600 - DNA, 22 bp, Artificial Sequence
  Synthetic
gctctgatattgctttattgca

SEQ ID NO: 29601 - DNA, 24 bp, Artificial Sequence
  Synthetic
cacagcttttctattactacatct

SEQ ID NO: 29602 - DNA, 23 bp, Artificial Sequence
  Synthetic
caatagatacagcattaccatct

SEQ ID NO: 29603 - DNA, 20 bp, Artificial Sequence
  Synthetic
cctgatggggctgatgatga

SEQ ID NO: 29604 - DNA, 25 bp, Artificial Sequence
  Synthetic
gaccttttaaaattaggatgaatgg

SEQ ID NO: 29605 - DNA, 18 bp, Artificial Sequence
  Synthetic
tgggccttgtaactgatg

SEQ ID NO: 29606 - DNA, 25 bp, Artificial Sequence
  Synthetic
ttccaagtctactaaatctgactaa

SEQ ID NO: 29607 - DNA, 19 bp, Artificial Sequence
  Synthetic
tctgaacctgtttgggatc

SEQ ID NO: 29608 - DNA, 18 bp, Artificial Sequence
  Synthetic
tgctcccgttttgtgaaa

SEQ ID NO: 29609 - DNA, 18 bp, Artificial Sequence
  Synthetic
agccagtaacaaaagcgg

SEQ ID NO: 29610 - DNA, 22 bp, Artificial Sequence
  Synthetic
aactaaaaagtgtcctgagttc

SEQ ID NO: 29611 - DNA, 25 bp, Artificial Sequence
  Synthetic
gtgtcgtttcttatgtacaaatttg

SEQ ID NO: 29612 - DNA, 21 bp, Artificial Sequence
  Synthetic
attgcactacacaattaccac

SEQ ID NO: 29613 - DNA, 21 bp, Artificial Sequence
  Synthetic
gccttttgagttgaatcccta

SEQ ID NO: 29614 - DNA, 18 bp, Artificial Sequence
  Synthetic
ctcgaaacagcctttccc

SEQ ID NO: 29615 - DNA, 20 bp, Artificial Sequence
  Synthetic
cactactcggctagcagtct

SEQ ID NO: 29616 - DNA, 16 bp, Artificial Sequence
  Synthetic
tccacggggttgcgac

SEQ ID NO: 29617 - DNA, 16 bp, Artificial Sequence
  Synthetic
aaggcagcccctcctg

SEQ ID NO: 29618 - DNA, 18 bp, Artificial Sequence
  Synthetic
tacgaactgcaactgccg

SEQ ID NO: 29619 - DNA, 18 bp, Artificial Sequence
  Synthetic
actggaccgcagacatcc

SEQ ID NO: 29620 - DNA, 19 bp, Artificial Sequence
  Synthetic
acccacatctggtgtaggt

SEQ ID NO: 29621 - DNA, 20 bp, Artificial Sequence
  Synthetic
gccgtagaggtattgggtgt

SEQ ID NO: 29622 - DNA, 20 bp, Artificial Sequence
  Synthetic
acggactaagagtagtggcc

SEQ ID NO: 29623 - DNA, 20 bp, Artificial Sequence
  Synthetic
cccagtatcccgaagaggat

SEQ ID NO: 29624 - DNA, 20 bp, Artificial Sequence
  Synthetic
gctgataccggaagaacagc

SEQ ID NO: 29625 - DNA, 20 bp, Artificial Sequence
  Synthetic
cccaccaggtctttgtctac

SEQ ID NO: 29626 - DNA, 20 bp, Artificial Sequence
  Synthetic
gtggtctccaggttttcgac

SEQ ID NO: 29627 - DNA, 18 bp, Artificial Sequence
  Synthetic
cgtcggcgaagaacttgc

SEQ ID NO: 29628 - DNA, 18 bp, Artificial Sequence
  Synthetic
gtcatgagcgcgtcagtg

SEQ ID NO: 29629 - DNA, 20 bp, Artificial Sequence
  Synthetic
actcacagagcaccacagag

SEQ ID NO: 29630 - DNA, 18 bp, Artificial Sequence
  Synthetic
gtctgcggacatgcaagc

SEQ ID NO: 29631 - DNA, 16 bp, Artificial Sequence
  Synthetic
aacgacgaacgcggtg

SEQ ID NO: 29632 - DNA, 18 bp, Artificial Sequence
  Synthetic
atgattgccccgggaagc

SEQ ID NO: 29633 - DNA, 18 bp, Artificial Sequence
  Synthetic
cagatatcgtcgctccgc

SEQ ID NO: 29634 - DNA, 20 bp, Artificial Sequence
  Synthetic
ccacggagaaagtaacctcc

SEQ ID NO: 29635 - DNA, 20 bp, Artificial Sequence
  Synthetic
catgcactgtctccatagca

SEQ ID NO: 29636 - DNA, 18 bp, Artificial Sequence
  Synthetic
cggccatgacttgggaca

SEQ ID NO: 29637 - DNA, 20 bp, Artificial Sequence
  Synthetic
tggcgtaataaggtgttgct

SEQ ID NO: 29638 - DNA, 20 bp, Artificial Sequence
  Synthetic
tcggcaatggggtatcagag

SEQ ID NO: 29639 - DNA, 20 bp, Artificial Sequence
  Synthetic
ggagtacctggtcatagcct

SEQ ID NO: 29640 - DNA, 20 bp, Artificial Sequence
  Synthetic
agatccagcggagtaacaga

SEQ ID NO: 29641 - DNA, 18 bp, Artificial Sequence
  Synthetic
ggacaagtccagccggtc

SEQ ID NO: 29642 - DNA, 19 bp, Artificial Sequence
  Synthetic
tgatgatcgactgcaacac

SEQ ID NO: 29643 - DNA, 19 bp, Artificial Sequence
  Synthetic
ggccgtgattggtgcttaa

SEQ ID NO: 29644 - DNA, 19 bp, Artificial Sequence
  Synthetic
gagatgcaacagggtacac

SEQ ID NO: 29645 - DNA, 21 bp, Artificial Sequence
  Synthetic
cgactcagtatctcaaggaga

SEQ ID NO: 29646 - DNA, 18 bp, Artificial Sequence
  Synthetic
tttgctgcatcaagtgtg

SEQ ID NO: 29647 - DNA, 21 bp, Artificial Sequence
  Synthetic
taggcctgagtttttcaacag

SEQ ID NO: 29648 - DNA, 18 bp, Artificial Sequence
  Synthetic
gagtagttgcagctgctc

SEQ ID NO: 29649 - DNA, 20 bp, Artificial Sequence
  Synthetic
tcttctccaaaggttacacc

SEQ ID NO: 29650 - DNA, 18 bp, Artificial Sequence
  Synthetic
caccaaattccagaggga

SEQ ID NO: 29651 - DNA, 18 bp, Artificial Sequence
  Synthetic
ccttttgcatggcaccat

SEQ ID NO: 29652 - DNA, 19 bp, Artificial Sequence
  Synthetic
ccatgacaacctgctcata

SEQ ID NO: 29653 - DNA, 19 bp, Artificial Sequence
  Synthetic
gagagcatctcagtagtgc

SEQ ID NO: 29654 - DNA, 19 bp, Artificial Sequence
  Synthetic
tagtcaacgatgccctctt

SEQ ID NO: 29655 - DNA, 22 bp, Artificial Sequence
  Synthetic
ctgaataggaccaatctctgta

SEQ ID NO: 29656 - DNA, 19 bp, Artificial Sequence
  Synthetic
accaccaacttgaggaaat

SEQ ID NO: 29657 - DNA, 20 bp, Artificial Sequence
  Synthetic
cacacacatggaatggaaac

SEQ ID NO: 29658 - DNA, 22 bp, Artificial Sequence
  Synthetic
attttggttcaatctctgtgta

SEQ ID NO: 29659 - DNA, 21 bp, Artificial Sequence
  Synthetic
ggttaatgtgccaaacaattg

SEQ ID NO: 29660 - DNA, 23 bp, Artificial Sequence
  Synthetic
tcttaatggtaatgcttgtgttt

SEQ ID NO: 29661 - DNA, 19 bp, Artificial Sequence
  Synthetic
gaaatcgtcacctgaatgg

SEQ ID NO: 29662 - DNA, 19 bp, Artificial Sequence
  Synthetic
ttgcgcttatagcacatca

SEQ ID NO: 29663 - DNA, 21 bp, Artificial Sequence
  Synthetic
ggatgtctctcataggtcttt

SEQ ID NO: 29664 - DNA, 21 bp, Artificial Sequence
  Synthetic
acacgaatgtagaaaggacac

SEQ ID NO: 29665 - DNA, 21 bp, Artificial Sequence
  Synthetic
tgtctagttgtagcacaagtt

SEQ ID NO: 29666 - DNA, 20 bp, Artificial Sequence
  Synthetic
tgatagcagctactacaggg

SEQ ID NO: 29667 - DNA, 18 bp, Artificial Sequence
  Synthetic
ctaacagaaccctccagg

SEQ ID NO: 29668 - DNA, 19 bp, Artificial Sequence
  Synthetic
actcaccaaaaacacgtct

SEQ ID NO: 29669 - DNA, 23 bp, Artificial Sequence
  Synthetic
ccactgaaatacttgtacttgtt

SEQ ID NO: 29670 - DNA, 21 bp, Artificial Sequence
  Synthetic
gttccacaggttacttgtacc

SEQ ID NO: 29671 - DNA, 20 bp, Artificial Sequence
  Synthetic
cactgataaacaccagatgg

SEQ ID NO: 29672 - DNA, 19 bp, Artificial Sequence
  Synthetic
ctttcaaagcagcacacat

SEQ ID NO: 29673 - DNA, 18 bp, Artificial Sequence
  Synthetic
caagcagcatagcacatg

SEQ ID NO: 29674 - DNA, 19 bp, Artificial Sequence
  Synthetic
ctgtaaggtgttgccagta

SEQ ID NO: 29675 - DNA, 19 bp, Artificial Sequence
  Synthetic
taccacagatgtgcacttt

SEQ ID NO: 29676 - DNA, 19 bp, Artificial Sequence
  Synthetic
aagcggcatatgatggtaa

SEQ ID NO: 29677 - DNA, 21 bp, Artificial Sequence
  Synthetic
cgcattgttgataatgttgtt

SEQ ID NO: 29678 - DNA, 23 bp, Artificial Sequence
  Synthetic
gaattgttatagtaggcaagtgc

SEQ ID NO: 29679 - DNA, 24 bp, Artificial Sequence
  Synthetic
taggtaatccttatatgctttagc

SEQ ID NO: 29680 - DNA, 18 bp, Artificial Sequence
  Synthetic
gactgcatcaagggttcg

SEQ ID NO: 29681 - DNA, 22 bp, Artificial Sequence
  Synthetic
ttaccctcatcaaaatgacgta

SEQ ID NO: 29682 - DNA, 18 bp, Artificial Sequence
  Synthetic
caataggaactccgcagc

SEQ ID NO: 29683 - DNA, 20 bp, Artificial Sequence
  Synthetic
caacaaaaggaacaccatct

SEQ ID NO: 29684 - DNA, 23 bp, Artificial Sequence
  Synthetic
gaagtgttttagttcaacagaac

SEQ ID NO: 29685 - DNA, 20 bp, Artificial Sequence
  Synthetic
ccgtaaaacttgcttgttcc

SEQ ID NO: 29686 - DNA, 19 bp, Artificial Sequence
  Synthetic
atgatgttccacctggttt

SEQ ID NO: 29687 - DNA, 22 bp, Artificial Sequence
  Synthetic
actgccttaaagttcttaatgc

SEQ ID NO: 29688 - DNA, 25 bp, Artificial Sequence
  Synthetic
gtgttatcattagttagcattacgg

SEQ ID NO: 29689 - DNA, 23 bp, Artificial Sequence
  Synthetic
gcaataatagctcatacctccta

SEQ ID NO: 29690 - DNA, 19 bp, Artificial Sequence
  Synthetic
aacctcccatgaaagatgc

SEQ ID NO: 29691 - DNA, 18 bp, Artificial Sequence
  Synthetic
cttaccagtaccaggtgg

SEQ ID NO: 29692 - DNA, 19 bp, Artificial Sequence
  Synthetic
cctttagtcagcaatgtgc

SEQ ID NO: 29693 - DNA, 24 bp, Artificial Sequence
  Synthetic
gagataaaaacagcttttctccaa

SEQ ID NO: 29694 - DNA, 23 bp, Artificial Sequence
  Synthetic
atgaagaccagtaatgatcttac

SEQ ID NO: 29695 - DNA, 21 bp, Artificial Sequence
  Synthetic
cctgtagaaaatcctagctgg

SEQ ID NO: 29696 - DNA, 21 bp, Artificial Sequence
  Synthetic
tgaagtagaaaagcaagttgc

SEQ ID NO: 29697 - DNA, 19 bp, Artificial Sequence
  Synthetic
attctacttcagcctgagg

SEQ ID NO: 29698 - DNA, 21 bp, Artificial Sequence
  Synthetic
gtaaaagaaaggcaattgctt

SEQ ID NO: 29699 - DNA, 21 bp, Artificial Sequence
  Synthetic
acctttgtgtaaacagcatta

SEQ ID NO: 29700 - DNA, 23 bp, Artificial Sequence
  Synthetic
tgttattaaaacaccattacggg

SEQ ID NO: 29701 - DNA, 19 bp, Artificial Sequence
  Synthetic
aatgaagaccgccaagttg

SEQ ID NO: 29702 - DNA, 18 bp, Artificial Sequence
  Synthetic
gttaggcatcgcaacacc

SEQ ID NO: 29703 - DNA, 22 bp, Artificial Sequence
  Synthetic
ctagggtcatacatatcgctaa

SEQ ID NO: 29704 - DNA, 22 bp, Artificial Sequence
  Synthetic
ggaagacaactggataggattt

SEQ ID NO: 29705 - DNA, 25 bp, Artificial Sequence
  Synthetic
ctcgtaagtgtttaaaattacctga

SEQ ID NO: 29706 - DNA, 19 bp, Artificial Sequence
  Synthetic
cagagcatttgagttcagc

SEQ ID NO: 29707 - DNA, 20 bp, Artificial Sequence
  Synthetic
gcaataacaccagtttgtcc

SEQ ID NO: 29708 - DNA, 21 bp, Artificial Sequence
  Synthetic
ccggtgcatttaaaagttcaa

SEQ ID NO: 29709 - DNA, 21 bp, Artificial Sequence
  Synthetic
cagtagaatatatgcgccaag

SEQ ID NO: 29710 - DNA, 19 bp, Artificial Sequence
  Synthetic
gtagaatctccgcagatgt

SEQ ID NO: 29711 - DNA, 18 bp, Artificial Sequence
  Synthetic
atcagtgagcagaggtgg

SEQ ID NO: 29712 - DNA, 23 bp, Artificial Sequence
  Synthetic
gctaagttgtttaacaagtgtgt

SEQ ID NO: 29713 - DNA, 19 bp, Artificial Sequence
  Synthetic
gagggaagtatgctttgcc

SEQ ID NO: 29714 - DNA, 22 bp, Artificial Sequence
  Synthetic
ttttgaatgttgacgacagaag

SEQ ID NO: 29715 - DNA, 22 bp, Artificial Sequence
  Synthetic
taatttgacacccttgagaact

SEQ ID NO: 29716 - DNA, 20 bp, Artificial Sequence
  Synthetic
atcaaggcatagaggtacaa

SEQ ID NO: 29717 - DNA, 22 bp, Artificial Sequence
  Synthetic
tgtagcattttcaataccagtg

SEQ ID NO: 29718 - DNA, 21 bp, Artificial Sequence
  Synthetic
cacgttaacaatattgcagca

SEQ ID NO: 29719 - DNA, 22 bp, Artificial Sequence
  Synthetic
attaattctgtagacagcagca

SEQ ID NO: 29720 - DNA, 20 bp, Artificial Sequence
  Synthetic
gcaaaacctgaatcagtgcc

SEQ ID NO: 29721 - DNA, 18 bp, Artificial Sequence
  Synthetic
ttgccctcgtatgttcct

SEQ ID NO: 29722 - DNA, 20 bp, Artificial Sequence
  Synthetic
acctttcctagagcacaaag

SEQ ID NO: 29723 - DNA, 19 bp, Artificial Sequence
  Synthetic
ctccttgccatgctgagtg

SEQ ID NO: 29724 - DNA, 20 bp, Artificial Sequence
  Synthetic
tctgcgtagaagccttttgg

SEQ ID NO: 29725 - DNA, 20 bp, Artificial Sequence
  Synthetic
tgagtgacgttgtactgttt

SEQ ID NO: 29726 - DNA, 23 bp, Artificial Sequence
  Synthetic
cagtctttttctttttgtccttt

SEQ ID NO: 29727 - DNA, 18 bp, Artificial Sequence
  Synthetic
taccctcgatcgtactcc

SEQ ID NO: 29728 - DNA, 19 bp, Artificial Sequence
  Synthetic
catatcctcattgaccggg

SEQ ID NO: 29729 - DNA, 20 bp, Artificial Sequence
  Synthetic
aaggttagccacattcaggg

SEQ ID NO: 29730 - DNA, 24 bp, Artificial Sequence
  Synthetic
gctgcgtctttaaaataattgatg

SEQ ID NO: 29731 - DNA, 19 bp, Artificial Sequence
  Synthetic
acaccataagcaacaactg

SEQ ID NO: 29732 - DNA, 23 bp, Artificial Sequence
  Synthetic
ctgatgaaacttgctagaattac

SEQ ID NO: 29733 - DNA, 24 bp, Artificial Sequence
  Synthetic
gtaaaataagggtagctgaattgt

SEQ ID NO: 29734 - DNA, 18 bp, Artificial Sequence
  Synthetic
aaacgctgatggggattg

SEQ ID NO: 29735 - DNA, 18 bp, Artificial Sequence
  Synthetic
aaagcgcagactaccagt

SEQ ID NO: 29736 - DNA, 22 bp, Artificial Sequence
  Synthetic
ggtgtagtgaatctaaaatggc

SEQ ID NO: 29737 - DNA, 18 bp, Artificial Sequence
  Synthetic
tttccgcagcatccaatg

SEQ ID NO: 29738 - DNA, 22 bp, Artificial Sequence
  Synthetic
gctcataaaagggattgtgaat

SEQ ID NO: 29739 - DNA, 18 bp, Artificial Sequence
  Synthetic
atctgagttgtggcctca

SEQ ID NO: 29740 - DNA, 21 bp, Artificial Sequence
  Synthetic
ccaatcatgtgcagtaactct

SEQ ID NO: 29741 - DNA, 19 bp, Artificial Sequence
  Synthetic
cgaagcctacaccaaagac

SEQ ID NO: 29742 - DNA, 22 bp, Artificial Sequence
  Synthetic
cacgcttcagtaaatttcttga

SEQ ID NO: 29743 - DNA, 21 bp, Artificial Sequence
  Synthetic
cttcaccactaggattttgca

SEQ ID NO: 29744 - DNA, 23 bp, Artificial Sequence
  Synthetic
tttgccatctaaaagatactctt

SEQ ID NO: 29745 - DNA, 18 bp, Artificial Sequence
  Synthetic
caaactcttcctctgggc

SEQ ID NO: 29746 - DNA, 23 bp, Artificial Sequence
  Synthetic
tctgatgtctttaaacttctcat

SEQ ID NO: 29747 - DNA, 23 bp, Artificial Sequence
  Synthetic
aaataagatttgagaagcattgc

SEQ ID NO: 29748 - DNA, 21 bp, Artificial Sequence
  Synthetic
attctccatctagcatgagag

SEQ ID NO: 29749 - DNA, 20 bp, Artificial Sequence
  Synthetic
ggtttttggtccatctgatg

SEQ ID NO: 29750 - DNA, 19 bp, Artificial Sequence
  Synthetic
cacccagaacaaagcaaat

SEQ ID NO: 29751 - DNA, 20 bp, Artificial Sequence
  Synthetic
aaaatggaaagcacttctgc

SEQ ID NO: 29752 - DNA, 22 bp, Artificial Sequence
  Synthetic
tgtttgctcagatttaacatct

SEQ ID NO: 29753 - DNA, 25 bp, Artificial Sequence
  Synthetic
gcaaacctaaattagaatatccttc

SEQ ID NO: 29754 - DNA, 18 bp, Artificial Sequence
  Synthetic
tatgtggtgttcgaggtg

SEQ ID NO: 29755 - DNA, 20 bp, Artificial Sequence
  Synthetic
tgggtaaagtcacagtttct

SEQ ID NO: 29756 - DNA, 18 bp, Artificial Sequence
  Synthetic
ttctccccctactcctgg

SEQ ID NO: 29757 - DNA, 18 bp, Artificial Sequence
  Synthetic
tacatctgggtcaaaggc

SEQ ID NO: 29758 - DNA, 25 bp, Artificial Sequence
  Synthetic
ctcaactggtaaattatttggtagt

SEQ ID NO: 29759 - DNA, 20 bp, Artificial Sequence
  Synthetic
cctgtagaaccaacacctaa

SEQ ID NO: 29760 - DNA, 23 bp, Artificial Sequence
  Synthetic
gtctctagtatcatccacctttc

SEQ ID NO: 29761 - DNA, 19 bp, Artificial Sequence
  Synthetic
ggcacatagttgccaaaga

SEQ ID NO: 29762 - DNA, 18 bp, Artificial Sequence
  Synthetic
gttgtccagatgtccagc

SEQ ID NO: 29763 - DNA, 19 bp, Artificial Sequence
  Synthetic
gatttgttggctcctcctc

SEQ ID NO: 29764 - DNA, 23 bp, Artificial Sequence
  Synthetic
tgctttgttcaaataagtcatct

SEQ ID NO: 29765 - DNA, 20 bp, Artificial Sequence
  Synthetic
tcaattccactgtcctgaaa

SEQ ID NO: 29766 - DNA, 23 bp, Artificial Sequence
  Synthetic
ctttctacttagttcccaatgtt

SEQ ID NO: 29767 - DNA, 19 bp, Artificial Sequence
  Synthetic
cggtgaggattctctatgc

SEQ ID NO: 29768 - DNA, 20 bp, Artificial Sequence
  Synthetic
attgtgcgacggaactgatc

SEQ ID NO: 29769 - DNA, 20 bp, Artificial Sequence
  Synthetic
tccagtgtctgtaatgggaa

SEQ ID NO: 29770 - DNA, 21 bp, Artificial Sequence
  Synthetic
aatgtatatgtcacgtcatcg

SEQ ID NO: 29771 - DNA, 19 bp, Artificial Sequence
  Synthetic
caggctgtaaatacgaccg

SEQ ID NO: 29772 - DNA, 23 bp, Artificial Sequence
  Synthetic
gttttttatccattccaaagcag

SEQ ID NO: 29773 - DNA, 20 bp, Artificial Sequence
  Synthetic
tcagggtttaggtacatgac

SEQ ID NO: 29774 - DNA, 21 bp, Artificial Sequence
  Synthetic
caatgttgttttgcagctctt

SEQ ID NO: 29775 - DNA, 19 bp, Artificial Sequence
  Synthetic
ccaattccaccaaccattc

SEQ ID NO: 29776 - DNA, 18 bp, Artificial Sequence
  Synthetic
atgtgagtgagaccagca

SEQ ID NO: 29777 - DNA, 18 bp, Artificial Sequence
  Synthetic
catatccactggccacgg

SEQ ID NO: 29778 - DNA, 21 bp, Artificial Sequence
  Synthetic
ccattgtttccatgttctcat

SEQ ID NO: 29779 - DNA, 23 bp, Artificial Sequence
  Synthetic
caatcattaggtcttcttcgaaa

SEQ ID NO: 29780 - DNA, 25 bp, Artificial Sequence
  Synthetic
gcatttggattttctaatagtacag

SEQ ID NO: 29781 - DNA, 20 bp, Artificial Sequence
  Synthetic
atttctttgacggtaacacc

SEQ ID NO: 29782 - DNA, 21 bp, Artificial Sequence
  Synthetic
tattgaaaacaacctccgtct

SEQ ID NO: 29783 - DNA, 20 bp, Artificial Sequence
  Synthetic
gactttcatggttgcagtac

SEQ ID NO: 29784 - DNA, 22 bp, Artificial Sequence
  Synthetic
aggtgtaatcaattctgtcaat

SEQ ID NO: 29785 - DNA, 22 bp, Artificial Sequence
  Synthetic
acctttaacaacttttgcttca

SEQ ID NO: 29786 - DNA, 22 bp, Artificial Sequence
  Synthetic
tgctgtaaaataggttccaagg

SEQ ID NO: 29787 - DNA, 23 bp, Artificial Sequence
  Synthetic
ataaaagtacttcctatctgtgc

SEQ ID NO: 29788 - DNA, 22 bp, Artificial Sequence
  Synthetic
ctctgtcaagagttaacgaaat

SEQ ID NO: 29789 - DNA, 21 bp, Artificial Sequence
  Synthetic
cgtaaaatggaaactgaagca

SEQ ID NO: 29790 - DNA, 21 bp, Artificial Sequence
  Synthetic
gtttgagaggtaagataaggc

SEQ ID NO: 29791 - DNA, 18 bp, Artificial Sequence
  Synthetic
gacggtttagtggaggtc

SEQ ID NO: 29792 - DNA, 25 bp, Artificial Sequence
  Synthetic
gattttattaacacccactacacta

SEQ ID NO: 29793 - DNA, 18 bp, Artificial Sequence
  Synthetic
gggcgtctagttggacta

SEQ ID NO: 29794 - DNA, 20 bp, Artificial Sequence
  Synthetic
gcatgtaacacattcccaaa

SEQ ID NO: 29795 - DNA, 19 bp, Artificial Sequence
  Synthetic
ttcggctgttatacccatg

SEQ ID NO: 29796 - DNA, 18 bp, Artificial Sequence
  Synthetic
ataaaattgccgctgctc

SEQ ID NO: 29797 - DNA, 24 bp, Artificial Sequence
  Synthetic
catttctgctaataaggtgactaa

SEQ ID NO: 29798 - DNA, 18 bp, Artificial Sequence
  Synthetic
tttttccaacaccgcgat

SEQ ID NO: 29799 - DNA, 19 bp, Artificial Sequence
  Synthetic
atttgcttttcggtgatgc

SEQ ID NO: 29800 - DNA, 22 bp, Artificial Sequence
  Synthetic
accaatacatacaaagaccaaa

SEQ ID NO: 29801 - DNA, 25 bp, Artificial Sequence
  Synthetic
cagttataattacatgcttaaaggc

SEQ ID NO: 29802 - DNA, 20 bp, Artificial Sequence
  Synthetic
tgttaataacgccaatagcc

SEQ ID NO: 29803 - DNA, 20 bp, Artificial Sequence
  Synthetic
gccttattttttgcagcaag

SEQ ID NO: 29804 - DNA, 25 bp, Artificial Sequence
  Synthetic
cgccattagtcaaaatataatccaa

SEQ ID NO: 29805 - DNA, 25 bp, Artificial Sequence
  Synthetic
caacttctttaaaatctacttcacc

SEQ ID NO: 29806 - DNA, 20 bp, Artificial Sequence
  Synthetic
ctgaactcacccttgtcaaa

SEQ ID NO: 29807 - DNA, 18 bp, Artificial Sequence
  Synthetic
tttggcatcttgacctgc

SEQ ID NO: 29808 - DNA, 21 bp, Artificial Sequence
  Synthetic
acagattgtttgaaagactgg

SEQ ID NO: 29809 - DNA, 20 bp, Artificial Sequence
  Synthetic
aaaagtggtgtcatcaaaca

SEQ ID NO: 29810 - DNA, 22 bp, Artificial Sequence
  Synthetic
agtgtcaccgtattttacagta

SEQ ID NO: 29811 - DNA, 20 bp, Artificial Sequence
  Synthetic
gttgggacatcagatggtgt

SEQ ID NO: 29812 - DNA, 18 bp, Artificial Sequence
  Synthetic
cctggacggtaaccacta

SEQ ID NO: 29813 - DNA, 19 bp, Artificial Sequence
  Synthetic
aaaaactcacgcctaaacg

SEQ ID NO: 29814 - DNA, 20 bp, Artificial Sequence
  Synthetic
cgaataaggaaaacagctgc

SEQ ID NO: 29815 - DNA, 19 bp, Artificial Sequence
  Synthetic
gactgtttaccgagcgtat

SEQ ID NO: 29816 - DNA, 21 bp, Artificial Sequence
  Synthetic
ccacctgaatatcagtgactt

SEQ ID NO: 29817 - DNA, 20 bp, Artificial Sequence
  Synthetic
tgttttatggttgctgtagc

SEQ ID NO: 29818 - DNA, 18 bp, Artificial Sequence
  Synthetic
tcaacaggtaccccaagg

SEQ ID NO: 29819 - DNA, 21 bp, Artificial Sequence
  Synthetic
aagaatatggccgttgacaaa

SEQ ID NO: 29820 - DNA, 18 bp, Artificial Sequence
  Synthetic
aaaatcagccgccttagt

SEQ ID NO: 29821 - DNA, 21 bp, Artificial Sequence
  Synthetic
aattgccaacaaatctctgta

SEQ ID NO: 29822 - DNA, 18 bp, Artificial Sequence
  Synthetic
atctggtagggccgtaaa

SEQ ID NO: 29823 - DNA, 21 bp, Artificial Sequence
  Synthetic
tctcacaagtacctcaatcag

SEQ ID NO: 29824 - DNA, 21 bp, Artificial Sequence
  Synthetic
tcacttcacaggattcgtaaa

SEQ ID NO: 29825 - DNA, 18 bp, Artificial Sequence
  Synthetic
ttcaatactggccaggct

SEQ ID NO: 29826 - DNA, 20 bp, Artificial Sequence
  Synthetic
cctacagtagaaccaggaaa

SEQ ID NO: 29827 - DNA, 18 bp, Artificial Sequence
  Synthetic
tcgagtttgatgccacag

SEQ ID NO: 29828 - DNA, 24 bp, Artificial Sequence
  Synthetic
agacgtattcttaactgtcttgaa

SEQ ID NO: 29829 - DNA, 22 bp, Artificial Sequence
  Synthetic
accagtctgtaaactagacaaa

SEQ ID NO: 29830 - DNA, 20 bp, Artificial Sequence
  Synthetic
acaggtgcttctaaggtaac

SEQ ID NO: 29831 - DNA, 23 bp, Artificial Sequence
  Synthetic
agttctaattgtgagaactgttt

SEQ ID NO: 29832 - DNA, 23 bp, Artificial Sequence
  Synthetic
ttgaaaacatcactcaattgtca

SEQ ID NO: 29833 - DNA, 18 bp, Artificial Sequence
  Synthetic
aaagcccgagataatgcc

SEQ ID NO: 29834 - DNA, 19 bp, Artificial Sequence
  Synthetic
gcatcctcatgaagtgtca

SEQ ID NO: 29835 - DNA, 19 bp, Artificial Sequence
  Synthetic
acgtcctgaaaaggcaata

SEQ ID NO: 29836 - DNA, 23 bp, Artificial Sequence
  Synthetic
cgacaacaaaatctttaagcaat

SEQ ID NO: 29837 - DNA, 18 bp, Artificial Sequence
  Synthetic
caagattgctgacggctt

SEQ ID NO: 29838 - DNA, 23 bp, Artificial Sequence
  Synthetic
aatttcctctattccatttttcg

SEQ ID NO: 29839 - DNA, 23 bp, Artificial Sequence
  Synthetic
ttaaaaccactttttcttgctca

SEQ ID NO: 29840 - DNA, 20 bp, Artificial Sequence
  Synthetic
tcaagtctccattgctgttt

SEQ ID NO: 29841 - DNA, 21 bp, Artificial Sequence
  Synthetic
ccataagcttttccagacaaa

SEQ ID NO: 29842 - DNA, 24 bp, Artificial Sequence
  Synthetic
tgtaaatcataaattctcgttggg

SEQ ID NO: 29843 - DNA, 25 bp, Artificial Sequence
  Synthetic
ccataaatatcaagatctgtctgtt

SEQ ID NO: 29844 - DNA, 23 bp, Artificial Sequence
  Synthetic
gaccatttttaattttgccaaag

SEQ ID NO: 29845 - DNA, 23 bp, Artificial Sequence
  Synthetic
aacattttcaaatatagtggcgg

SEQ ID NO: 29846 - DNA, 18 bp, Artificial Sequence
  Synthetic
atcaatacggccatagcg

SEQ ID NO: 29847 - DNA, 20 bp, Artificial Sequence
  Synthetic
agcttggtcaaaaaacttgg

SEQ ID NO: 29848 - DNA, 18 bp, Artificial Sequence
  Synthetic
cgaattcttggcacagct

SEQ ID NO: 29849 - DNA, 20 bp, Artificial Sequence
  Synthetic
gccgtaaactcctctttagg

SEQ ID NO: 29850 - DNA, 22 bp, Artificial Sequence
  Synthetic
ctttccttatataagcctctgg

SEQ ID NO: 29851 - DNA, 18 bp, Artificial Sequence
  Synthetic
ttcatcggtagcgcttac

SEQ ID NO: 29852 - DNA, 23 bp, Artificial Sequence
  Synthetic
tcaacccaaatattgttttttgg

SEQ ID NO: 29853 - DNA, 22 bp, Artificial Sequence
  Synthetic
tctgttcttctttaaaggctcc

SEQ ID NO: 29854 - DNA, 18 bp, Artificial Sequence
  Synthetic
atcggtgggttttccttt

SEQ ID NO: 29855 - DNA, 25 bp, Artificial Sequence
  Synthetic
ctccaaatagcaagatatcaatgtc

SEQ ID NO: 29856 - DNA, 20 bp, Artificial Sequence
  Synthetic
caaaacaagccaaggcatat

SEQ ID NO: 29857 - DNA, 20 bp, Artificial Sequence
  Synthetic
agccatatccctagctgaaa

SEQ ID NO: 29858 - DNA, 23 bp, Artificial Sequence
  Synthetic
tctgccacattaatcataaaacc

SEQ ID NO: 29859 - DNA, 25 bp, Artificial Sequence
  Synthetic
gttaccaactttattagaacctgta

SEQ ID NO: 29860 - DNA, 20 bp, Artificial Sequence
  Synthetic
tctgtcttgacaatgggtat

SEQ ID NO: 29861 - DNA, 20 bp, Artificial Sequence
  Synthetic
ggggtctgtgtcttgtttgt

SEQ ID NO: 29862 - DNA, 18 bp, Artificial Sequence
  Synthetic
gtgtaaaaaatgcggccg

SEQ ID NO: 29863 - DNA, 23 bp, Artificial Sequence
  Synthetic
aacattgttacacatatgggata

SEQ ID NO: 29864 - DNA, 20 bp, Artificial Sequence
  Synthetic
caaagtcaagagcaagactc

SEQ ID NO: 29865 - DNA, 18 bp, Artificial Sequence
  Synthetic
gtggtggttcaggtacag

SEQ ID NO: 29866 - DNA, 22 bp, Artificial Sequence
  Synthetic
tgagcttagagaggaagacttt

SEQ ID NO: 29867 - DNA, 23 bp, Artificial Sequence
  Synthetic
ctaaaagataagcgtcaagaagg

SEQ ID NO: 29868 - DNA, 20 bp, Artificial Sequence
  Synthetic
tgttctggtgaaggaatgtt

SEQ ID NO: 29869 - DNA, 20 bp, Artificial Sequence
  Synthetic
acaaacaggtctcttgagaa

SEQ ID NO: 29870 - DNA, 23 bp, Artificial Sequence
  Synthetic
cttatgaagaccaactgactttc

SEQ ID NO: 29871 - DNA, 18 bp, Artificial Sequence
  Synthetic
acgtgaccatcccagaaa

SEQ ID NO: 29872 - DNA, 19 bp, Artificial Sequence
  Synthetic
aaccaaaccatcgaagttg

SEQ ID NO: 29873 - DNA, 18 bp, Artificial Sequence
  Synthetic
tcaatgtcggcaaccatg

SEQ ID NO: 29874 - DNA, 22 bp, Artificial Sequence
  Synthetic
cttacagctcgtagacctatag

SEQ ID NO: 29875 - DNA, 19 bp, Artificial Sequence
  Synthetic
cggtatgtctattgcagct

SEQ ID NO: 29876 - DNA, 22 bp, Artificial Sequence
  Synthetic
ctacggtactatatggggctaa

SEQ ID NO: 29877 - DNA, 18 bp, Artificial Sequence
  Synthetic
atgggagcacagattgtc

SEQ ID NO: 29878 - DNA, 19 bp, Artificial Sequence
  Synthetic
ctgctcaggttaagtcagc

SEQ ID NO: 29879 - DNA, 24 bp, Artificial Sequence
  Synthetic
tcaagaggatattttagaagcttg

SEQ ID NO: 29880 - DNA, 18 bp, Artificial Sequence
  Synthetic
gcaacgattactgacgct

SEQ ID NO: 29881 - DNA, 21 bp, Artificial Sequence
  Synthetic
gcatgctccatataaggctat

SEQ ID NO: 29882 - DNA, 20 bp, Artificial Sequence
  Synthetic
atcaatcatttggtggcaaa

SEQ ID NO: 29883 - DNA, 22 bp, Artificial Sequence
  Synthetic
gatcaatcactcttacccattt

SEQ ID NO: 29884 - DNA, 21 bp, Artificial Sequence
  Synthetic
agtacattgtgacagaacacc

SEQ ID NO: 29885 - DNA, 21 bp, Artificial Sequence
  Synthetic
aacctgtttattggtcatggt

SEQ ID NO: 29886 - DNA, 19 bp, Artificial Sequence
  Synthetic
ccttatgtacctggttggg

SEQ ID NO: 29887 - DNA, 18 bp, Artificial Sequence
  Synthetic
cacgagctttcgtccttt

SEQ ID NO: 29888 - DNA, 22 bp, Artificial Sequence
  Synthetic
ttgatgaaagcaataaggagtt

SEQ ID NO: 29889 - DNA, 21 bp, Artificial Sequence
  Synthetic
agacttcttctcagtgtcatt

SEQ ID NO: 29890 - DNA, 18 bp, Artificial Sequence
  Synthetic
gataagcgtgaggtcggt

SEQ ID NO: 29891 - DNA, 22 bp, Artificial Sequence
  Synthetic
tgggttatgaaaatagcacatt

SEQ ID NO: 29892 - DNA, 19 bp, Artificial Sequence
  Synthetic
ctgggttcagaacgtcgtg

SEQ ID NO: 29893 - DNA, 20 bp, Artificial Sequence
  Synthetic
ggttccctcagattggttgg

SEQ ID NO: 29894 - DNA, 20 bp, Artificial Sequence
  Synthetic
gcctcaggtgatcgagagaa

SEQ ID NO: 29895 - DNA, 20 bp, Artificial Sequence
  Synthetic
gccaacaggttgatattcct

SEQ ID NO: 29896 - DNA, 22 bp, Artificial Sequence
  Synthetic
gacaactaggatgttagcttag

SEQ ID NO: 29897 - DNA, 20 bp, Artificial Sequence
  Synthetic
ggaccatctcccaaccctaa

SEQ ID NO: 29898 - DNA, 20 bp, Artificial Sequence
  Synthetic
gatgattggggtgaagtcgt

SEQ ID NO: 29899 - DNA, 20 bp, Artificial Sequence
  Synthetic
gacggactttctgaagaaga

SEQ ID NO: 29900 - DNA, 20 bp, Artificial Sequence
  Synthetic
tcactaaattgatcgaccgc

SEQ ID NO: 29901 - DNA, 18 bp, Artificial Sequence
  Synthetic
tttgacgatctcactcgc

SEQ ID NO: 29902 - DNA, 21 bp, Artificial Sequence
  Synthetic
ggataagactgacaaggatga

SEQ ID NO: 29903 - DNA, 19 bp, Artificial Sequence
  Synthetic
aactcagcagtagcagttc

SEQ ID NO: 29904 - DNA, 18 bp, Artificial Sequence
  Synthetic
gaacatccagccgatagc

SEQ ID NO: 29905 - DNA, 18 bp, Artificial Sequence
  Synthetic
gagctcatgcagaaatgc

SEQ ID NO: 29906 - DNA, 22 bp, Artificial Sequence
  Synthetic
tgtgtcagttttaactcacaaa

SEQ ID NO: 29907 - DNA, 20 bp, Artificial Sequence
  Synthetic
gttcagcttagcaaccatga

SEQ ID NO: 29908 - DNA, 19 bp, Artificial Sequence
  Synthetic
aactcatgaaccagtaggg

SEQ ID NO: 29909 - DNA, 22 bp, Artificial Sequence
  Synthetic
tcaatgcattgatgattctgag

SEQ ID NO: 29910 - DNA, 18 bp, Artificial Sequence
  Synthetic
tatagccagacttgcggt

SEQ ID NO: 29911 - DNA, 22 bp, Artificial Sequence
  Synthetic
tttggagtgtcataactttcca

SEQ ID NO: 29912 - DNA, 20 bp, Artificial Sequence
  Synthetic
actcaacttgaaagcctaga

SEQ ID NO: 29913 - DNA, 23 bp, Artificial Sequence
  Synthetic
agtcttctagatttttggtcatt

SEQ ID NO: 29914 - DNA, 25 bp, Artificial Sequence
  Synthetic
ccgtaatgttttctactttcaaaga

SEQ ID NO: 29915 - DNA, 21 bp, Artificial Sequence
  Synthetic
catctgataacccaacctcac

SEQ ID NO: 29916 - DNA, 19 bp, Artificial Sequence
  Synthetic
tcataggctttgggttctt

SEQ ID NO: 29917 - DNA, 19 bp, Artificial Sequence
  Synthetic
caaaaccgtcaaagcgata

SEQ ID NO: 29918 - DNA, 21 bp, Artificial Sequence
  Synthetic
tctttaagggttgctagcttt

SEQ ID NO: 29919 - DNA, 20 bp, Artificial Sequence
  Synthetic
tgtcaatcgtgtctttgttg

SEQ ID NO: 29920 - DNA, 18 bp, Artificial Sequence
  Synthetic
gaacatggctatgcggtg

SEQ ID NO: 29921 - DNA, 18 bp, Artificial Sequence
  Synthetic
gttgggattcgggattgg

SEQ ID NO: 29922 - DNA, 23 bp, Artificial Sequence
  Synthetic
tcggtatagataaagtccacgta

SEQ ID NO: 29923 - DNA, 20 bp, Artificial Sequence
  Synthetic
gaaaacagcctgatagtctg

SEQ ID NO: 29924 - DNA, 24 bp, Artificial Sequence
  Synthetic
gcaaaacatataccttacacaaag

SEQ ID NO: 29925 - DNA, 22 bp, Artificial Sequence
  Synthetic
tacgctcaaaatggtatttcag

SEQ ID NO: 29926 - DNA, 24 bp, Artificial Sequence
  Synthetic
ctaacgtatatggctatacactag

SEQ ID NO: 29927 - DNA, 23 bp, Artificial Sequence
  Synthetic
ctatggtaaaacatttgggttag

SEQ ID NO: 29928 - DNA, 18 bp, Artificial Sequence
  Synthetic
acggtagctctgctcaag

SEQ ID NO: 29929 - DNA, 20 bp, Artificial Sequence
  Synthetic
agaggggagaagagctcaac

SEQ ID NO: 29930 - DNA, 17 bp, Artificial Sequence
  Synthetic
cataatgccggcagcgt

SEQ ID NO: 29931 - DNA, 20 bp, Artificial Sequence
  Synthetic
tatgtgactatcaggcgccc

SEQ ID NO: 29932 - DNA, 16 bp, Artificial Sequence
  Synthetic
atgcccgcccgcacta

SEQ ID NO: 29933 - DNA, 19 bp, Artificial Sequence
  Synthetic
tatgccttgcgtccgaatc

SEQ ID NO: 29934 - DNA, 19 bp, Artificial Sequence
  Synthetic
acatcctttacgcacagcc

SEQ ID NO: 29935 - DNA, 17 bp, Artificial Sequence
  Synthetic
cagccagttttgcgccg

SEQ ID NO: 29936 - DNA, 16 bp, Artificial Sequence
  Synthetic
agaagcccgcagaccc

SEQ ID NO: 29937 - DNA, 19 bp, Artificial Sequence
  Synthetic
gtcgaaggcctctggaaag

SEQ ID NO: 29938 - DNA, 20 bp, Artificial Sequence
  Synthetic
cttcgggagggacttggtat

SEQ ID NO: 29939 - DNA, 19 bp, Artificial Sequence
  Synthetic
aatcaccagcctcttgccc

SEQ ID NO: 29940 - DNA, 18 bp, Artificial Sequence
  Synthetic
ttcgaggtggtcatcccg

SEQ ID NO: 29941 - DNA, 20 bp, Artificial Sequence
  Synthetic
gggtgtaaagcttaccctgc

SEQ ID NO: 29942 - DNA, 18 bp, Artificial Sequence
  Synthetic
agttgagaaccgcagtgc

SEQ ID NO: 29943 - DNA, 18 bp, Artificial Sequence
  Synthetic
tagcagtgtaccgggctc

SEQ ID NO: 29944 - DNA, 18 bp, Artificial Sequence
  Synthetic
gagagcctccccaggaac

SEQ ID NO: 29945 - DNA, 20 bp, Artificial Sequence
  Synthetic
ggccaggtgtactccttcag

SEQ ID NO: 29946 - DNA, 17 bp, Artificial Sequence
  Synthetic
tcgggtacgacggcaac

SEQ ID NO: 29947 - DNA, 16 bp, Artificial Sequence
  Synthetic
acgacgagctctgcgg

SEQ ID NO: 29948 - DNA, 18 bp, Artificial Sequence
  Synthetic
ttgatcttgtgcggggct

SEQ ID NO: 29949 - DNA, 20 bp, Artificial Sequence
  Synthetic
aatgattgtcgcctcctcag

SEQ ID NO: 29950 - DNA, 24 bp, Artificial Sequence
  Synthetic
agcatagtagtataggtagaaaca

SEQ ID NO: 29951 - DNA, 24 bp, Artificial Sequence
  Synthetic
ggaacaccacttaaatatcaatgt

SEQ ID NO: 29952 - DNA, 25 bp, Artificial Sequence
  Synthetic
gggtctatcagaaaaaggtaaaatt

SEQ ID NO: 29953 - DNA, 20 bp, Artificial Sequence
  Synthetic
aaagtttcttagcaggtgtg

SEQ ID NO: 29954 - DNA, 22 bp, Artificial Sequence
  Synthetic
accaaggtttattgtttgtcaa

SEQ ID NO: 29955 - DNA, 22 bp, Artificial Sequence
  Synthetic
atcaccagtaaaaacaggatca

SEQ ID NO: 29956 - DNA, 23 bp, Artificial Sequence
  Synthetic
ggttattactctgcaagatagca

SEQ ID NO: 29957 - DNA, 24 bp, Artificial Sequence
  Synthetic
accactaataactacatatggaac

SEQ ID NO: 29958 - DNA, 24 bp, Artificial Sequence
  Synthetic
cattactaataggccattgtgaaa

SEQ ID NO: 29959 - DNA, 21 bp, Artificial Sequence
  Synthetic
aagcatcaatgtcaataggtg

SEQ ID NO: 29960 - DNA, 18 bp, Artificial Sequence
  Synthetic
aatagcacgtgcaacacc

SEQ ID NO: 29961 - DNA, 23 bp, Artificial Sequence
  Synthetic
aagtcaaacttgaaagaagcttt

SEQ ID NO: 29962 - DNA, 21 bp, Artificial Sequence
  Synthetic
gctttacatccaaagaagcaa

SEQ ID NO: 29963 - DNA, 21 bp, Artificial Sequence
  Synthetic
caacacgtccattaacaaact

SEQ ID NO: 29964 - DNA, 24 bp, Artificial Sequence
  Synthetic
gagtctttcctaccaaatatacat

SEQ ID NO: 29965 - DNA, 24 bp, Artificial Sequence
  Synthetic
gatgaactaaagattgagagtaca

SEQ ID NO: 29966 - DNA, 20 bp, Artificial Sequence
  Synthetic
tctctcaacacaaccagatg

SEQ ID NO: 29967 - DNA, 20 bp, Artificial Sequence
  Synthetic
accttaatacgcaacacaga

SEQ ID NO: 29968 - DNA, 19 bp, Artificial Sequence
  Synthetic
gcagcatacaaaaaggcaa

SEQ ID NO: 29969 - DNA, 20 bp, Artificial Sequence
  Synthetic
gtcaccaccaataccaagta

SEQ ID NO: 29970 - DNA, 19 bp, Artificial Sequence
  Synthetic
tgagtagcagcttgttcag

SEQ ID NO: 29971 - DNA, 22 bp, Artificial Sequence
  Synthetic
gcttaagtttaccaggcataat

SEQ ID NO: 29972 - DNA, 20 bp, Artificial Sequence
  Synthetic
tgcaccatgtttaacagctt

SEQ ID NO: 29973 - DNA, 25 bp, Artificial Sequence
  Synthetic
cttgctcgtttaaataagaaatgtc

SEQ ID NO: 29974 - DNA, 22 bp, Artificial Sequence
  Synthetic
gcatagaccaagtccatcatag

SEQ ID NO: 29975 - DNA, 25 bp, Artificial Sequence
  Synthetic
cttggttatctaatgttaaaacacc

SEQ ID NO: 29976 - DNA, 18 bp, Artificial Sequence
  Synthetic
ttgatcaacgagtgctgg

SEQ ID NO: 29977 - DNA, 23 bp, Artificial Sequence
  Synthetic
atgtttttgatggtattgtcttg

SEQ ID NO: 29978 - DNA, 19 bp, Artificial Sequence
  Synthetic
tcgtaccacctggcttaaa

SEQ ID NO: 29979 - DNA, 23 bp, Artificial Sequence
  Synthetic
tgtcttaacaacatcatcaacaa

SEQ ID NO: 29980 - DNA, 20 bp, Artificial Sequence
  Synthetic
acatgatcatatgcgcattt

SEQ ID NO: 29981 - DNA, 20 bp, Artificial Sequence
  Synthetic
ggaggaccctgtattgtagt

SEQ ID NO: 29982 - DNA, 20 bp, Artificial Sequence
  Synthetic
gacacacaaccttcagtttg

SEQ ID NO: 29983 - DNA, 18 bp, Artificial Sequence
  Synthetic
taacagcatcaccagagg

SEQ ID NO: 29984 - DNA, 23 bp, Artificial Sequence
  Synthetic
acacaattgaaaattctggatac

SEQ ID NO: 29985 - DNA, 21 bp, Artificial Sequence
  Synthetic
acaacaccgagatttttgaga

SEQ ID NO: 29986 - DNA, 19 bp, Artificial Sequence
  Synthetic
ggcatagcataaccacact

SEQ ID NO: 29987 - DNA, 23 bp, Artificial Sequence
  Synthetic
tgcatcactaacataatcattga

SEQ ID NO: 29988 - DNA, 18 bp, Artificial Sequence
  Synthetic
agaaaccattggctgagt

SEQ ID NO: 29989 - DNA, 18 bp, Artificial Sequence
  Synthetic
acacggccattatgtgtg

SEQ ID NO: 29990 - DNA, 23 bp, Artificial Sequence
  Synthetic
ggcattaaaataaacaaaaccag

SEQ ID NO: 29991 - DNA, 23 bp, Artificial Sequence
  Synthetic
ccattaatataaaactggccagt

SEQ ID NO: 29992 - DNA, 19 bp, Artificial Sequence
  Synthetic
caccaaaagatgcagttgc

SEQ ID NO: 29993 - DNA, 23 bp, Artificial Sequence
  Synthetic
gtaactgtagtaagttttgcaag

SEQ ID NO: 29994 - DNA, 25 bp, Artificial Sequence
  Synthetic
tagaaagacctttagtacaagactt

SEQ ID NO: 29995 - DNA, 21 bp, Artificial Sequence
  Synthetic
aaacaaatgcattcaaagctg

SEQ ID NO: 29996 - DNA, 21 bp, Artificial Sequence
  Synthetic
gcacaaaatcagacaaaacag

SEQ ID NO: 29997 - DNA, 18 bp, Artificial Sequence
  Synthetic
ccacaatcacaacagcct

SEQ ID NO: 29998 - DNA, 21 bp, Artificial Sequence
  Synthetic
gcaacacaactataaaaagcg

SEQ ID NO: 29999 - DNA, 18 bp, Artificial Sequence
  Synthetic
actgacccacttgaacac

SEQ ID NO: 30000 - DNA, 19 bp, Artificial Sequence
  Synthetic
aagattcctgggaatgacc

SEQ ID NO: 30001 - DNA, 19 bp, Artificial Sequence
  Synthetic
gagcgatcctcaaactcaa

SEQ ID NO: 30002 - DNA, 19 bp, Artificial Sequence
  Synthetic
ttatcagccctgggttgag

SEQ ID NO: 30003 - DNA, 24 bp, Artificial Sequence
  Synthetic
aggttcttattatccttagctaca

(The sequence listing continues in the following parts.)
